United States Patent Application Publication US 2014/0004565 A1 - sequence listing, part 102

SEQ ID NO: 2538704 - RNA, 19 nt, Artificial Sequence
  Description of Artificial Sequence: Synthetic oligonucleotide
cacaagugucguggggaag

SEQ ID NO: 2538705 - RNA, 19 nt, Artificial Sequence
  Description of Artificial Sequence: Synthetic oligonucleotide
gucuaacuucuccgagaac

SEQ ID NO: 2538706 - RNA, 19 nt, Artificial Sequence
  Description of Artificial Sequence: Synthetic oligonucleotide
cgauugacccuauggcugc

SEQ ID NO: 2538707 - RNA, 19 nt, Artificial Sequence
  Description of Artificial Sequence: Synthetic oligonucleotide
acccuauggcugcaugcaa

SEQ ID NO: 2538708 - RNA, 19 nt, Artificial Sequence
  Description of Artificial Sequence: Synthetic oligonucleotide
ggaaguagaugcgguuggc

SEQ ID NO: 2538709 - RNA, 19 nt, Artificial Sequence
  Description of Artificial Sequence: Synthetic oligonucleotide
gguaccugguggcacgcca

SEQ ID NO: 2538710 - RNA, 19 nt, Artificial Sequence
  Description of Artificial Sequence: Synthetic oligonucleotide
ucguggggaagaagagguu

SEQ ID NO: 2538711 - RNA, 19 nt, Artificial Sequence
  Description of Artificial Sequence: Synthetic oligonucleotide
agccccacgauugacccua

SEQ ID NO: 2538712 - RNA, 19 nt, Artificial Sequence
  Description of Artificial Sequence: Synthetic oligonucleotide
guagcuccaaaggcccaug

SEQ ID NO: 2538713 - RNA, 19 nt, Artificial Sequence
  Description of Artificial Sequence: Synthetic oligonucleotide
uagaccuggccgaccccaa

SEQ ID NO: 2538714 - RNA, 19 nt, Artificial Sequence
  Description of Artificial Sequence: Synthetic oligonucleotide
gcgguuggccucuggguag

SEQ ID NO: 2538715 - RNA, 19 nt, Artificial Sequence
  Description of Artificial Sequence: Synthetic oligonucleotide
cacggccaucagcaguccc

SEQ ID NO: 2538716 - RNA, 19 nt, Artificial Sequence
  Description of Artificial Sequence: Synthetic oligonucleotide
gccuccgauggcgauacag

SEQ ID NO: 2538717 - RNA, 19 nt, Artificial Sequence
  Description of Artificial Sequence: Synthetic oligonucleotide
caaaggcaucucaaucucu

SEQ ID NO: 2538718 - RNA, 19 nt, Artificial Sequence
  Description of Artificial Sequence: Synthetic oligonucleotide
aaaggcccauguagaucgu

SEQ ID NO: 2538719 - RNA, 19 nt, Artificial Sequence
  Description of Artificial Sequence: Synthetic oligonucleotide
accaccuguccagggguug

SEQ ID NO: 2538720 - RNA, 19 nt, Artificial Sequence
  Description of Artificial Sequence: Synthetic oligonucleotide
ccgaccccaacagggaugg

SEQ ID NO: 2538721 - RNA, 19 nt, Artificial Sequence
  Description of Artificial Sequence: Synthetic oligonucleotide
ccgauggcgauacaggaaa

SEQ ID NO: 2538722 - RNA, 19 nt, Artificial Sequence
  Description of Artificial Sequence: Synthetic oligonucleotide
cgagaacacggccaucagc

SEQ ID NO: 2538723 - RNA, 19 nt, Artificial Sequence
  Description of Artificial Sequence: Synthetic oligonucleotide
auagggccaccaggaucac

SEQ ID NO: 2538724 - RNA, 19 nt, Artificial Sequence
  Description of Artificial Sequence: Synthetic oligonucleotide
gggcaaugugaagacuggc

SEQ ID NO: 2538725 - RNA, 19 nt, Artificial Sequence
  Description of Artificial Sequence: Synthetic oligonucleotide
cuauggcugcaugcaagca

SEQ ID NO: 2538726 - RNA, 19 nt, Artificial Sequence
  Description of Artificial Sequence: Synthetic oligonucleotide
gauugacccuauggcugca

SEQ ID NO: 2538727 - RNA, 19 nt, Artificial Sequence
  Description of Artificial Sequence: Synthetic oligonucleotide
ugcugagugggagcuugua

SEQ ID NO: 2538728 - RNA, 19 nt, Artificial Sequence
  Description of Artificial Sequence: Synthetic oligonucleotide
gcgauacaggaaaggacac

SEQ ID NO: 2538729 - RNA, 19 nt, Artificial Sequence
  Description of Artificial Sequence: Synthetic oligonucleotide
guagaucgucucaaagggu

SEQ ID NO: 2538730 - RNA, 19 nt, Artificial Sequence
  Description of Artificial Sequence: Synthetic oligonucleotide
cagguaccugguggcacgc

SEQ ID NO: 2538731 - RNA, 19 nt, Artificial Sequence
  Description of Artificial Sequence: Synthetic oligonucleotide
ugcucgucaggaggaggaa

SEQ ID NO: 2538732 - RNA, 19 nt, Artificial Sequence
  Description of Artificial Sequence: Synthetic oligonucleotide
gcuacucaaggcacuagaa

SEQ ID NO: 2538733 - RNA, 19 nt, Artificial Sequence
  Description of Artificial Sequence: Synthetic oligonucleotide
cugcucccauguaugcaca

SEQ ID NO: 2538734 - RNA, 19 nt, Artificial Sequence
  Description of Artificial Sequence: Synthetic oligonucleotide
guagaugcgguuggccucu

SEQ ID NO: 2538735 - RNA, 19 nt, Artificial Sequence
  Description of Artificial Sequence: Synthetic oligonucleotide
cuggguaggugacuuugcu

SEQ ID NO: 2538736 - RNA, 19 nt, Artificial Sequence
  Description of Artificial Sequence: Synthetic oligonucleotide
gugggagcuuguagaugcc

SEQ ID NO: 2538737 - RNA, 19 nt, Artificial Sequence
  Description of Artificial Sequence: Synthetic oligonucleotide
auugacccuauggcugcau

SEQ ID NO: 2538738 - RNA, 19 nt, Artificial Sequence
  Description of Artificial Sequence: Synthetic oligonucleotide
ggagaugaauagggccacc

SEQ ID NO: 2538739 - RNA, 19 nt, Artificial Sequence
  Description of Artificial Sequence: Synthetic oligonucleotide
guggcacgccaaccacugc

SEQ ID NO: 2538740 - RNA, 19 nt, Artificial Sequence
  Description of Artificial Sequence: Synthetic oligonucleotide
ccaccaguaguagucuaac

SEQ ID NO: 2538741 - RNA, 19 nt, Artificial Sequence
  Description of Artificial Sequence: Synthetic oligonucleotide
gcguagaacaugccuccga

SEQ ID NO: 2538742 - RNA, 19 nt, Artificial Sequence
  Description of Artificial Sequence: Synthetic oligonucleotide
ccaaaggcccauguagauc

SEQ ID NO: 2538743 - RNA, 19 nt, Artificial Sequence
  Description of Artificial Sequence: Synthetic oligonucleotide
gaccccaacagggaugguu

SEQ ID NO: 2538744 - RNA, 19 nt, Artificial Sequence
  Description of Artificial Sequence: Synthetic oligonucleotide
caccaguaguagucuaacu

SEQ ID NO: 2538745 - RNA, 19 nt, Artificial Sequence
  Description of Artificial Sequence: Synthetic oligonucleotide
ggcaauauugaagggcaau

SEQ ID NO: 2538746 - RNA, 19 nt, Artificial Sequence
  Description of Artificial Sequence: Synthetic oligonucleotide
aggaaaggacacaguugua

SEQ ID NO: 2538747 - RNA, 19 nt, Artificial Sequence
  Description of Artificial Sequence: Synthetic oligonucleotide
uaguggccuguagcugcca

SEQ ID NO: 2538748 - RNA, 19 nt, Artificial Sequence
  Description of Artificial Sequence: Synthetic oligonucleotide
cgauggcgauacaggaaag

SEQ ID NO: 2538749 - RNA, 19 nt, Artificial Sequence
  Description of Artificial Sequence: Synthetic oligonucleotide
cauggaggugaaggucaca

SEQ ID NO: 2538750 - RNA, 19 nt, Artificial Sequence
  Description of Artificial Sequence: Synthetic oligonucleotide
caagugucguggggaagaa

SEQ ID NO: 2538751 - RNA, 19 nt, Artificial Sequence
  Description of Artificial Sequence: Synthetic oligonucleotide
guacaguguuaaggcaaua

SEQ ID NO: 2538752 - RNA, 19 nt, Artificial Sequence
  Description of Artificial Sequence: Synthetic oligonucleotide
caucccacuuggugaagau

SEQ ID NO: 2538753 - RNA, 19 nt, Artificial Sequence
  Description of Artificial Sequence: Synthetic oligonucleotide
uagaugcgguuggccucug

SEQ ID NO: 2538754 - RNA, 19 nt, Artificial Sequence
  Description of Artificial Sequence: Synthetic oligonucleotide
ggcacgccaaccacugcca

SEQ ID NO: 2538755 - RNA, 19 nt, Artificial Sequence
  Description of Artificial Sequence: Synthetic oligonucleotide
gccauagaccuggccgacc

SEQ ID NO: 2538756 - RNA, 19 nt, Artificial Sequence
  Description of Artificial Sequence: Synthetic oligonucleotide
ccauguagaucgucucaaa

SEQ ID NO: 2538757 - RNA, 19 nt, Artificial Sequence
  Description of Artificial Sequence: Synthetic oligonucleotide
cccauguagaucgucucaa

SEQ ID NO: 2538758 - RNA, 19 nt, Artificial Sequence
  Description of Artificial Sequence: Synthetic oligonucleotide
caaaggguguggccacagu

SEQ ID NO: 2538759 - RNA, 19 nt, Artificial Sequence
  Description of Artificial Sequence: Synthetic oligonucleotide
cccagguaccugguggcac

SEQ ID NO: 2538760 - RNA, 19 nt, Artificial Sequence
  Description of Artificial Sequence: Synthetic oligonucleotide
ugccuccgauggcgauaca

SEQ ID NO: 2538761 - RNA, 19 nt, Artificial Sequence
  Description of Artificial Sequence: Synthetic oligonucleotide
ggacacaguuguagcucca

SEQ ID NO: 2538762 - RNA, 19 nt, Artificial Sequence
  Description of Artificial Sequence: Synthetic oligonucleotide
gccaggugagggcguagaa

SEQ ID NO: 2538763 - RNA, 19 nt, Artificial Sequence
  Description of Artificial Sequence: Synthetic oligonucleotide
gcugccagguacaguguua

SEQ ID NO: 2538764 - RNA, 19 nt, Artificial Sequence
  Description of Artificial Sequence: Synthetic oligonucleotide
cuagugccagcaggugugu

SEQ ID NO: 2538765 - RNA, 19 nt, Artificial Sequence
  Description of Artificial Sequence: Synthetic oligonucleotide
cguagaacaugccuccgau

SEQ ID NO: 2538766 - RNA, 19 nt, Artificial Sequence
  Description of Artificial Sequence: Synthetic oligonucleotide
caggcuccacaagugucgu

SEQ ID NO: 2538767 - RNA, 19 nt, Artificial Sequence
  Description of Artificial Sequence: Synthetic oligonucleotide
gcaggccauggaggugaag

SEQ ID NO: 2538768 - RNA, 19 nt, Artificial Sequence
  Description of Artificial Sequence: Synthetic oligonucleotide
cgguuggccucuggguagg

SEQ ID NO: 2538769 - RNA, 19 nt, Artificial Sequence
  Description of Artificial Sequence: Synthetic oligonucleotide
ggccgaccccaacagggau

SEQ ID NO: 2538770 - RNA, 19 nt, Artificial Sequence
  Description of Artificial Sequence: Synthetic oligonucleotide
cccacuuggugaagaugcu

SEQ ID NO: 2538771 - RNA, 19 nt, Artificial Sequence
  Description of Artificial Sequence: Synthetic oligonucleotide
caccaccuguccagggguu

SEQ ID NO: 2538772 - RNA, 19 nt, Artificial Sequence
  Description of Artificial Sequence: Synthetic oligonucleotide
ccccacgauugacccuaug

SEQ ID NO: 2538773 - RNA, 19 nt, Artificial Sequence
  Description of Artificial Sequence: Synthetic oligonucleotide
cagccccacgauugacccu

SEQ ID NO: 2538774 - RNA, 19 nt, Artificial Sequence
  Description of Artificial Sequence: Synthetic oligonucleotide
gcacgccaaccacugccau

SEQ ID NO: 2538775 - RNA, 19 nt, Artificial Sequence
  Description of Artificial Sequence: Synthetic oligonucleotide
ccucuggguaggugacuuu

SEQ ID NO: 2538776 - RNA, 19 nt, Artificial Sequence
  Description of Artificial Sequence: Synthetic oligonucleotide
gccccacgauugacccuau

SEQ ID NO: 2538777 - RNA, 19 nt, Artificial Sequence
  Description of Artificial Sequence: Synthetic oligonucleotide
cgaccccaacagggauggu

SEQ ID NO: 2538778 - RNA, 19 nt, Artificial Sequence
  Description of Artificial Sequence: Synthetic oligonucleotide
aaugucaugaaguuaaagg

SEQ ID NO: 2538779 - RNA, 19 nt, Artificial Sequence
  Description of Artificial Sequence: Synthetic oligonucleotide
agagccauguuauugaggc

SEQ ID NO: 2538780 - RNA, 19 nt, Artificial Sequence
  Description of Artificial Sequence: Synthetic oligonucleotide
gacaaggaaaacaugaugg

SEQ ID NO: 2538781 - RNA, 19 nt, Artificial Sequence
  Description of Artificial Sequence: Synthetic oligonucleotide
aauccaucaggccaggcag

SEQ ID NO: 2538782 - RNA, 19 nt, Artificial Sequence
  Description of Artificial Sequence: Synthetic oligonucleotide
aaacugauggacuggauga

SEQ ID NO: 2538783 - RNA, 19 nt, Artificial Sequence
  Description of Artificial Sequence: Synthetic oligonucleotide
uaaaggagcugucagcccg

SEQ ID NO: 2538784 - RNA, 19 nt, Artificial Sequence
  Description of Artificial Sequence: Synthetic oligonucleotide
ugucaugaaguuaaaggag

SEQ ID NO: 2538785 - RNA, 19 nt, Artificial Sequence
  Description of Artificial Sequence: Synthetic oligonucleotide
uguuauugaggccagccag

SEQ ID NO: 2538786 - RNA, 19 nt, Artificial Sequence
  Description of Artificial Sequence: Synthetic oligonucleotide
acaaggaaaacaugauggc

SEQ ID NO: 2538787 - RNA, 19 nt, Artificial Sequence
  Description of Artificial Sequence: Synthetic oligonucleotide
aguuaaaggagcugucagc

SEQ ID NO: 2538788 - RNA, 19 nt, Artificial Sequence
  Description of Artificial Sequence: Synthetic oligonucleotide
aagguaaauccuaugcacc

SEQ ID NO: 2538789 - RNA, 19 nt, Artificial Sequence
  Description of Artificial Sequence: Synthetic oligonucleotide
auccacagcugguagaucc

SEQ ID NO: 2538790 - RNA, 19 nt, Artificial Sequence
  Description of Artificial Sequence: Synthetic oligonucleotide
aagaagaaugucaugaagu

SEQ ID NO: 2538791 - RNA, 19 nt, Artificial Sequence
  Description of Artificial Sequence: Synthetic oligonucleotide
uuauacgaaggcaggaacc

SEQ ID NO: 2538792 - RNA, 19 nt, Artificial Sequence
  Description of Artificial Sequence: Synthetic oligonucleotide
agugaagagaagcagccag

SEQ ID NO: 2538793 - RNA, 19 nt, Artificial Sequence
  Description of Artificial Sequence: Synthetic oligonucleotide
agaagcaugggcuucagga

SEQ ID NO: 2538794 - RNA, 19 nt, Artificial Sequence
  Description of Artificial Sequence: Synthetic oligonucleotide
gauagcuggggacaguggg

SEQ ID NO: 2538795 - RNA, 19 nt, Artificial Sequence
  Description of Artificial Sequence: Synthetic oligonucleotide
accuucacaagugugaugg

SEQ ID NO: 2538796 - RNA, 19 nt, Artificial Sequence
  Description of Artificial Sequence: Synthetic oligonucleotide
aauccuaugcaccuucaca

SEQ ID NO: 2538797 - RNA, 19 nt, Artificial Sequence
  Description of Artificial Sequence: Synthetic oligonucleotide
aagaaugucaugaaguuaa

SEQ ID NO: 2538798 - RNA, 19 nt, Artificial Sequence
  Description of Artificial Sequence: Synthetic oligonucleotide
uuaaacuggacuucccuug

SEQ ID NO: 2538799 - RNA, 19 nt, Artificial Sequence
  Description of Artificial Sequence: Synthetic oligonucleotide
acuggacuucccuugaugg

SEQ ID NO: 2538800 - RNA, 19 nt, Artificial Sequence
  Description of Artificial Sequence: Synthetic oligonucleotide
aacaugauggcugggauca

SEQ ID NO: 2538801 - RNA, 19 nt, Artificial Sequence
  Description of Artificial Sequence: Synthetic oligonucleotide
aaauccuaugcaccuucac

SEQ ID NO: 2538802 - RNA, 19 nt, Artificial Sequence
  Description of Artificial Sequence: Synthetic oligonucleotide
acaguaaaacauccacagc

SEQ ID NO: 2538803 - RNA, 19 nt, Artificial Sequence
  Description of Artificial Sequence: Synthetic oligonucleotide
acauugaccccaaagaauc

SEQ ID NO: 2538804 - RNA, 19 nt, Artificial Sequence
  Description of Artificial Sequence: Synthetic oligonucleotide
acucggguagguuauuccc

SEQ ID NO: 2538805 - RNA, 19 nt, Artificial Sequence
  Description of Artificial Sequence: Synthetic oligonucleotide
agcaugacagcagacaagg

SEQ ID NO: 2538806 - RNA, 19 nt, Artificial Sequence
  Description of Artificial Sequence: Synthetic oligonucleotide
ugguagauccucuucacca

SEQ ID NO: 2538807 - RNA, 19 nt, Artificial Sequence
  Description of Artificial Sequence: Synthetic oligonucleotide
uucacaagugugauggcca

SEQ ID NO: 2538808 - RNA, 19 nt, Artificial Sequence
  Description of Artificial Sequence: Synthetic oligonucleotide
uguuaaacuggacuucccu

SEQ ID NO: 2538809 - RNA, 19 nt, Artificial Sequence
  Description of Artificial Sequence: Synthetic oligonucleotide
guuaaaggagcugucagcc

SEQ ID NO: 2538810 - RNA, 19 nt, Artificial Sequence
  Description of Artificial Sequence: Synthetic oligonucleotide
aagugugauggccagcaug

SEQ ID NO: 2538811 - RNA, 19 nt, Artificial Sequence
  Description of Artificial Sequence: Synthetic oligonucleotide
uggaugaccgucacgacga

SEQ ID NO: 2538812 - RNA, 19 nt, Artificial Sequence
  Description of Artificial Sequence: Synthetic oligonucleotide
agacaaggaaaacaugaug

SEQ ID NO: 2538813 - RNA, 19 nt, Artificial Sequence
  Description of Artificial Sequence: Synthetic oligonucleotide
uugcugagggcucaggcag

SEQ ID NO: 2538814 - RNA, 19 nt, Artificial Sequence
  Description of Artificial Sequence: Synthetic oligonucleotide
gaucucaucggagaagucc

SEQ ID NO: 2538815 - RNA, 19 nt, Artificial Sequence
  Description of Artificial Sequence: Synthetic oligonucleotide
agccacauacuccccagcc

SEQ ID NO: 2538816 - RNA, 19 nt, Artificial Sequence
  Description of Artificial Sequence: Synthetic oligonucleotide
ugcaccuucacaaguguga

SEQ ID NO: 2538817 - RNA, 19 nt, Artificial Sequence
  Description of Artificial Sequence: Synthetic oligonucleotide
gaugccuaaggccacuggc

SEQ ID NO: 2538818 - RNA, 19 nt, Artificial Sequence
  Description of Artificial Sequence: Synthetic oligonucleotide
aagcuguuaaacuggacuu

SEQ ID NO: 2538819 - RNA, 19 nt, Artificial Sequence
  Description of Artificial Sequence: Synthetic oligonucleotide
accuccuaggaccucaggg

SEQ ID NO: 2538820 - RNA, 19 nt, Artificial Sequence
  Description of Artificial Sequence: Synthetic oligonucleotide
cugauggacuggaugaccg

SEQ ID NO: 2538821 - RNA, 19 nt, Artificial Sequence
  Description of Artificial Sequence: Synthetic oligonucleotide
cagguucacacccagagug

SEQ ID NO: 2538822 - RNA, 19 nt, Artificial Sequence
  Description of Artificial Sequence: Synthetic oligonucleotide
ugugccccgaagaugaaga

SEQ ID NO: 2538823 - RNA, 19 nt, Artificial Sequence
  Description of Artificial Sequence: Synthetic oligonucleotide
ucaugaaguuaaaggagcu

SEQ ID NO: 2538824 - RNA, 19 nt, Artificial Sequence
  Description of Artificial Sequence: Synthetic oligonucleotide
accccaaagaauccaacag

SEQ ID NO: 2538825 - RNA, 19 nt, Artificial Sequence
  Description of Artificial Sequence: Synthetic oligonucleotide
ccgaagaugaagaagaaug

SEQ ID NO: 2538826 - RNA, 19 nt, Artificial Sequence
  Description of Artificial Sequence: Synthetic oligonucleotide
gaagcuguuaaacuggacu

SEQ ID NO: 2538827 - RNA, 19 nt, Artificial Sequence
  Description of Artificial Sequence: Synthetic oligonucleotide
uggacuucccuugaugggg

SEQ ID NO: 2538828 - RNA, 19 nt, Artificial Sequence
  Description of Artificial Sequence: Synthetic oligonucleotide
agcacacauaacugcaggg

SEQ ID NO: 2538829 - RNA, 19 nt, Artificial Sequence
  Description of Artificial Sequence: Synthetic oligonucleotide
aacugcagggagugaagag

SEQ ID NO: 2538830 - RNA, 19 nt, Artificial Sequence
  Description of Artificial Sequence: Synthetic oligonucleotide
uccaacagcugccauccag

SEQ ID NO: 2538831 - RNA, 19 nt, Artificial Sequence
  Description of Artificial Sequence: Synthetic oligonucleotide
cuuauacgaaggcaggaac

SEQ ID NO: 2538832 - RNA, 19 nt, Artificial Sequence
  Description of Artificial Sequence: Synthetic oligonucleotide
aacuggacuucccuugaug

SEQ ID NO: 2538833 - RNA, 19 nt, Artificial Sequence
  Description of Artificial Sequence: Synthetic oligonucleotide
agaagaaugucaugaaguu

SEQ ID NO: 2538834 - RNA, 19 nt, Artificial Sequence
  Description of Artificial Sequence: Synthetic oligonucleotide
cugccauccagccacauac

SEQ ID NO: 2538835 - RNA, 19 nt, Artificial Sequence
  Description of Artificial Sequence: Synthetic oligonucleotide
uucaccagcaucuggugcu

SEQ ID NO: 2538836 - RNA, 19 nt, Artificial Sequence
  Description of Artificial Sequence: Synthetic oligonucleotide
uauacgaaggcaggaacca

SEQ ID NO: 2538837 - RNA, 19 nt, Artificial Sequence
  Description of Artificial Sequence: Synthetic oligonucleotide
ugaacacaggccgaggacc

SEQ ID NO: 2538838 - RNA, 19 nt, Artificial Sequence
  Description of Artificial Sequence: Synthetic oligonucleotide
guagguuauucccagagaa

SEQ ID NO: 2538839 - RNA, 19 nt, Artificial Sequence
  Description of Artificial Sequence: Synthetic oligonucleotide
auccuaugcaccuucacaa

SEQ ID NO: 2538840 - RNA, 19 nt, Artificial Sequence
  Description of Artificial Sequence: Synthetic oligonucleotide
agguaaauccuaugcaccu

SEQ ID NO: 2538841 - RNA, 19 nt, Artificial Sequence
  Description of Artificial Sequence: Synthetic oligonucleotide
uuauucccagagaagcugu

SEQ ID NO: 2538842 - RNA, 19 nt, Artificial Sequence
  Description of Artificial Sequence: Synthetic oligonucleotide
caguguuccauucugucug

SEQ ID NO: 2538843 - RNA, 19 nt, Artificial Sequence
  Description of Artificial Sequence: Synthetic oligonucleotide
cauguuauugaggccagcc

SEQ ID NO: 2538844 - RNA, 19 nt, Artificial Sequence
  Description of Artificial Sequence: Synthetic oligonucleotide
agcccggaaggccuuauac

SEQ ID NO: 2538845 - RNA, 19 nt, Artificial Sequence
  Description of Artificial Sequence: Synthetic oligonucleotide
uaaacuggacuucccuuga

SEQ ID NO: 2538846 - RNA, 19 nt, Artificial Sequence
  Description of Artificial Sequence: Synthetic oligonucleotide
gaaugucaugaaguuaaag

SEQ ID NO: 2538847 - RNA, 19 nt, Artificial Sequence
  Description of Artificial Sequence: Synthetic oligonucleotide
agaguggcacaguaaaaca

SEQ ID NO: 2538848 - RNA, 19 nt, Artificial Sequence
  Description of Artificial Sequence: Synthetic oligonucleotide
acugauggacuggaugacc

SEQ ID NO: 2538849 - RNA, 19 nt, Artificial Sequence
  Description of Artificial Sequence: Synthetic oligonucleotide
aaaacauccacagcuggua

SEQ ID NO: 2538850 - RNA, 19 nt, Artificial Sequence
  Description of Artificial Sequence: Synthetic oligonucleotide
aacauugaccccaaagaau

SEQ ID NO: 2538851 - RNA, 19 nt, Artificial Sequence
  Description of Artificial Sequence: Synthetic oligonucleotide
uccaccugcaauccaucag

SEQ ID NO: 2538852 - RNA, 19 nt, Artificial Sequence
  Description of Artificial Sequence: Synthetic oligonucleotide
caguaaaacauccacagcu

SEQ ID NO: 2538853 - RNA, 19 nt, Artificial Sequence
  Description of Artificial Sequence: Synthetic oligonucleotide
cuaugcaccuucacaagug

SEQ ID NO: 2538854 - RNA, 19 nt, Artificial Sequence
  Description of Artificial Sequence: Synthetic oligonucleotide
ugaaguuaaaggagcuguc

SEQ ID NO: 2538855 - RNA, 19 nt, Artificial Sequence
  Description of Artificial Sequence: Synthetic oligonucleotide
gaagcaugggcuucaggac

SEQ ID NO: 2538856 - RNA, 19 nt, Artificial Sequence
  Description of Artificial Sequence: Synthetic oligonucleotide
gagcugucagcccggaagg

SEQ ID NO: 2538857 - RNA, 19 nt, Artificial Sequence
  Description of Artificial Sequence: Synthetic oligonucleotide
uaugcaccuucacaagugu

SEQ ID NO: 2538858 - RNA, 19 nt, Artificial Sequence
  Description of Artificial Sequence: Synthetic oligonucleotide
auagccaggccgaaguugg

SEQ ID NO: 2538859 - RNA, 19 nt, Artificial Sequence
  Description of Artificial Sequence: Synthetic oligonucleotide
gucacgacgaacugugccc

SEQ ID NO: 2538860 - RNA, 19 nt, Artificial Sequence
  Description of Artificial Sequence: Synthetic oligonucleotide
agcauagccaggccgaagu

SEQ ID NO: 2538861 - RNA, 19 nt, Artificial Sequence
  Description of Artificial Sequence: Synthetic oligonucleotide
uuaaaggagcugucagccc

SEQ ID NO: 2538862 - RNA, 19 nt, Artificial Sequence
  Description of Artificial Sequence: Synthetic oligonucleotide
uguuccaccugcaauccau

SEQ ID NO: 2538863 - RNA, 19 nt, Artificial Sequence
  Description of Artificial Sequence: Synthetic oligonucleotide
guuauucccagagaagcug

SEQ ID NO: 2538864 - RNA, 19 nt, Artificial Sequence
  Description of Artificial Sequence: Synthetic oligonucleotide
aguaaaacauccacagcug

SEQ ID NO: 2538865 - RNA, 19 nt, Artificial Sequence
  Description of Artificial Sequence: Synthetic oligonucleotide
cuguguuccaccugcaauc

SEQ ID NO: 2538866 - RNA, 19 nt, Artificial Sequence
  Description of Artificial Sequence: Synthetic oligonucleotide
aucagcaugaccacagcag

SEQ ID NO: 2538867 - RNA, 19 nt, Artificial Sequence
  Description of Artificial Sequence: Synthetic oligonucleotide
gaauccaacagcugccauc

SEQ ID NO: 2538868 - RNA, 19 nt, Artificial Sequence
  Description of Artificial Sequence: Synthetic oligonucleotide
gaaaacaugauggcuggga

SEQ ID NO: 2538869 - RNA, 19 nt, Artificial Sequence
  Description of Artificial Sequence: Synthetic oligonucleotide
uucccagagaagcuguuaa

SEQ ID NO: 2538870 - RNA, 19 nt, Artificial Sequence
  Description of Artificial Sequence: Synthetic oligonucleotide
ucaggaccaaggguggugg

SEQ ID NO: 2538871 - RNA, 19 nt, Artificial Sequence
  Description of Artificial Sequence: Synthetic oligonucleotide
accugcaauccaucaggcc

SEQ ID NO: 2538872 - RNA, 19 nt, Artificial Sequence
  Description of Artificial Sequence: Synthetic oligonucleotide
gaaggccuuauacgaaggc

SEQ ID NO: 2538873 - RNA, 19 nt, Artificial Sequence
  Description of Artificial Sequence: Synthetic oligonucleotide
ucuggugcuccacagggau

SEQ ID NO: 2538874 - RNA, 19 nt, Artificial Sequence
  Description of Artificial Sequence: Synthetic oligonucleotide
aaggccuuauacgaaggca

SEQ ID NO: 2538875 - RNA, 19 nt, Artificial Sequence
  Description of Artificial Sequence: Synthetic oligonucleotide
guaaauccuaugcaccuuc

SEQ ID NO: 2538876 - RNA, 19 nt, Artificial Sequence
  Description of Artificial Sequence: Synthetic oligonucleotide
agccauguuauugaggcca

SEQ ID NO: 2538877 - RNA, 19 nt, Artificial Sequence
  Description of Artificial Sequence: Synthetic oligonucleotide
ucggguagguuauucccag

SEQ ID NO: 2538878 - RNA, 19 nt, Artificial Sequence
  Description of Artificial Sequence: Synthetic oligonucleotide
agccagagcauagccaggc

SEQ ID NO: 2538879 - RNA, 19 nt, Artificial Sequence
  Description of Artificial Sequence: Synthetic oligonucleotide
gaaguuaaaggagcuguca

SEQ ID NO: 2538880 - RNA, 19 nt, Artificial Sequence
  Description of Artificial Sequence: Synthetic oligonucleotide
augccuaaggccacuggcc

SEQ ID NO: 2538881 - RNA, 19 nt, Artificial Sequence
  Description of Artificial Sequence: Synthetic oligonucleotide
agcugguagauccucuuca

SEQ ID NO: 2538882 - RNA, 19 nt, Artificial Sequence
  Description of Artificial Sequence: Synthetic oligonucleotide
cagaguggcacaguaaaac

SEQ ID NO: 2538883 - RNA, 19 nt, Artificial Sequence
  Description of Artificial Sequence: Synthetic oligonucleotide
uccuaugcaccuucacaag

SEQ ID NO: 2538884 - RNA, 19 nt, Artificial Sequence
  Description of Artificial Sequence: Synthetic oligonucleotide
aaggccacuggccuccacu

SEQ ID NO: 2538885 - RNA, 19 nt, Artificial Sequence
  Description of Artificial Sequence: Synthetic oligonucleotide
agugugauggccagcauga

SEQ ID NO: 2538886 - RNA, 19 nt, Artificial Sequence
  Description of Artificial Sequence: Synthetic oligonucleotide
uccacugggauagcugggg

SEQ ID NO: 2538887 - RNA, 19 nt, Artificial Sequence
  Description of Artificial Sequence: Synthetic oligonucleotide
uacucggguagguuauucc

SEQ ID NO: 2538888 - RNA, 19 nt, Artificial Sequence
  Description of Artificial Sequence: Synthetic oligonucleotide
ggaaccagcacacauaacu

SEQ ID NO: 2538889 - RNA, 19 nt, Artificial Sequence
  Description of Artificial Sequence: Synthetic oligonucleotide
acaagugugauggccagca

SEQ ID NO: 2538890 - RNA, 19 nt, Artificial Sequence
  Description of Artificial Sequence: Synthetic oligonucleotide
gaucagcaugaccacagca

SEQ ID NO: 2538891 - RNA, 19 nt, Artificial Sequence
  Description of Artificial Sequence: Synthetic oligonucleotide
auguuauugaggccagcca

SEQ ID NO: 2538892 - RNA, 19 nt, Artificial Sequence
  Description of Artificial Sequence: Synthetic oligonucleotide
agacagagccauguuauug

SEQ ID NO: 2538893 - RNA, 19 nt, Artificial Sequence
  Description of Artificial Sequence: Synthetic oligonucleotide
cugcaauccaucaggccag

SEQ ID NO: 2538894 - RNA, 19 nt, Artificial Sequence
  Description of Artificial Sequence: Synthetic oligonucleotide
guaccaguguuccauucug

SEQ ID NO: 2538895 - RNA, 19 nt, Artificial Sequence
  Description of Artificial Sequence: Synthetic oligonucleotide
aagaauccaacagcugcca

SEQ ID NO: 2538896 - RNA, 19 nt, Artificial Sequence
  Description of Artificial Sequence: Synthetic oligonucleotide
aguuggccuguguuccacc

SEQ ID NO: 2538897 - RNA, 19 nt, Artificial Sequence
  Description of Artificial Sequence: Synthetic oligonucleotide
cauugaccccaaagaaucc

SEQ ID NO: 2538898 - RNA, 19 nt, Artificial Sequence
  Description of Artificial Sequence: Synthetic oligonucleotide
agcaucuggugcuccacag

SEQ ID NO: 2538899 - RNA, 19 nt, Artificial Sequence
  Description of Artificial Sequence: Synthetic oligonucleotide
aaguuggccuguguuccac

SEQ ID NO: 2538900 - RNA, 19 nt, Artificial Sequence
  Description of Artificial Sequence: Synthetic oligonucleotide
gaccccaaagaauccaaca

SEQ ID NO: 2538901 - RNA, 19 nt, Artificial Sequence
  Description of Artificial Sequence: Synthetic oligonucleotide
aggccuuauacgaaggcag

SEQ ID NO: 2538902 - RNA, 19 nt, Artificial Sequence
  Description of Artificial Sequence: Synthetic oligonucleotide
cccaagguaaauccuaugc

SEQ ID NO: 2538903 - RNA, 19 nt, Artificial Sequence
  Description of Artificial Sequence: Synthetic oligonucleotide
augaccgucacgacgaacu

SEQ ID NO: 2538904 - RNA, 19 nt, Artificial Sequence
  Description of Artificial Sequence: Synthetic oligonucleotide
cuggacuucccuugauggg

SEQ ID NO: 2538905 - RNA, 19 nt, Artificial Sequence
  Description of Artificial Sequence: Synthetic oligonucleotide
cuggccuccacugggauag

SEQ ID NO: 2538906 - RNA, 19 nt, Artificial Sequence
  Description of Artificial Sequence: Synthetic oligonucleotide
gcugggaucagcaugacca

SEQ ID NO: 2538907 - RNA, 19 nt, Artificial Sequence
  Description of Artificial Sequence: Synthetic oligonucleotide
acgaacugugccccgaaga

SEQ ID NO: 2538908 - RNA, 19 nt, Artificial Sequence
  Description of Artificial Sequence: Synthetic oligonucleotide
uucacacccagaguggcac

SEQ ID NO: 2538909 - RNA, 19 nt, Artificial Sequence
  Description of Artificial Sequence: Synthetic oligonucleotide
acuccccagccugagaaac

SEQ ID NO: 2538910 - RNA, 19 nt, Artificial Sequence
  Description of Artificial Sequence: Synthetic oligonucleotide
augggcuucaggaccaagg

SEQ ID NO: 2538911 - RNA, 19 nt, Artificial Sequence
  Description of Artificial Sequence: Synthetic oligonucleotide
aaaggagcugucagcccgg

SEQ ID NO: 2538912 - RNA, 19 nt, Artificial Sequence
  Description of Artificial Sequence: Synthetic oligonucleotide
aacagcugccauccagcca

SEQ ID NO: 2538913 - RNA, 19 nt, Artificial Sequence
  Description of Artificial Sequence: Synthetic oligonucleotide
cuccuaggaccucagggag

SEQ ID NO: 2538914 - RNA, 19 nt, Artificial Sequence
  Description of Artificial Sequence: Synthetic oligonucleotide
agaugccuaaggccacugg

SEQ ID NO: 2538915 - RNA, 19 nt, Artificial Sequence
  Description of Artificial Sequence: Synthetic oligonucleotide
agguaccaguguuccauuc

SEQ ID NO: 2538916 - RNA, 19 nt, Artificial Sequence
  Description of Artificial Sequence: Synthetic oligonucleotide
gcagacaaggaaaacauga

SEQ ID NO: 2538917 - RNA, 19 nt, Artificial Sequence
  Description of Artificial Sequence: Synthetic oligonucleotide
ggguagguuauucccagag

SEQ ID NO: 2538918 - RNA, 19 nt, Artificial Sequence
  Description of Artificial Sequence: Synthetic oligonucleotide
gggacagugggguacucgg

SEQ ID NO: 2538919 - RNA, 19 nt, Artificial Sequence
  Description of Artificial Sequence: Synthetic oligonucleotide
cuguuaaacuggacuuccc

SEQ ID NO: 2538920 - RNA, 19 nt, Artificial Sequence
  Description of Artificial Sequence: Synthetic oligonucleotide
caacauugaccccaaagaa

SEQ ID NO: 2538921 - RNA, 19 nt, Artificial Sequence
  Description of Artificial Sequence: Synthetic oligonucleotide
uggugcuccacagggaucu

SEQ ID NO: 2538922 - RNA, 19 nt, Artificial Sequence
  Description of Artificial Sequence: Synthetic oligonucleotide
aggccgaggaccuccuagg

SEQ ID NO: 2538923 - RNA, 19 nt, Artificial Sequence
  Description of Artificial Sequence: Synthetic oligonucleotide
guggcacaguaaaacaucc

SEQ ID NO: 2538924 - RNA, 19 nt, Artificial Sequence
  Description of Artificial Sequence: Synthetic oligonucleotide
ggcuucaggaccaagggug

SEQ ID NO: 2538925 - RNA, 19 nt, Artificial Sequence
  Description of Artificial Sequence: Synthetic oligonucleotide
cugguagauccucuucacc

SEQ ID NO: 2538926 - RNA, 19 nt, Artificial Sequence
  Description of Artificial Sequence: Synthetic oligonucleotide
aggcaggagaugaacacag

SEQ ID NO: 2538927 - RNA, 19 nt, Artificial Sequence
  Description of Artificial Sequence: Synthetic oligonucleotide
agccagaugccuaaggcca

SEQ ID NO: 2538928 - RNA, 19 nt, Artificial Sequence
  Description of Artificial Sequence: Synthetic oligonucleotide
caacagcugccauccagcc

SEQ ID NO: 2538929 - RNA, 19 nt, Artificial Sequence
  Description of Artificial Sequence: Synthetic oligonucleotide
uauugaggccagccagaug

SEQ ID NO: 2538930 - RNA, 19 nt, Artificial Sequence
  Description of Artificial Sequence: Synthetic oligonucleotide
aucucaucggagaaguccu

SEQ ID NO: 2538931 - RNA, 19 nt, Artificial Sequence
  Description of Artificial Sequence: Synthetic oligonucleotide
aggagacagagccauguua

SEQ ID NO: 2538932 - RNA, 19 nt, Artificial Sequence
  Description of Artificial Sequence: Synthetic oligonucleotide
auaacugcagggagugaag

SEQ ID NO: 2538933 - RNA, 19 nt, Artificial Sequence
  Description of Artificial Sequence: Synthetic oligonucleotide
cuuccagguaccaguguuc

SEQ ID NO: 2538934 - RNA, 19 nt, Artificial Sequence
  Description of Artificial Sequence: Synthetic oligonucleotide
uuccaccugcaauccauca

SEQ ID NO: 2538935 - RNA, 19 nt, Artificial Sequence
  Description of Artificial Sequence: Synthetic oligonucleotide
uaccaguguuccauucugu

SEQ ID NO: 2538936 - RNA, 19 nt, Artificial Sequence
  Description of Artificial Sequence: Synthetic oligonucleotide
ugaccgucacgacgaacug

SEQ ID NO: 2538937 - RNA, 19 nt, Artificial Sequence
  Description of Artificial Sequence: Synthetic oligonucleotide
ucacgacgaacugugcccc

SEQ ID NO: 2538938 - RNA, 19 nt, Artificial Sequence
  Description of Artificial Sequence: Synthetic oligonucleotide
ccaccugcaauccaucagg

SEQ ID NO: 2538939 - RNA, 19 nt, Artificial Sequence
  Description of Artificial Sequence: Synthetic oligonucleotide
ugccccgaagaugaagaag

SEQ ID NO: 2538940 - RNA, 19 nt, Artificial Sequence
  Description of Artificial Sequence: Synthetic oligonucleotide
uucaggaccaaggguggug

SEQ ID NO: 2538941 - RNA, 19 nt, Artificial Sequence
  Description of Artificial Sequence: Synthetic oligonucleotide
agccaggccgaaguuggcc

SEQ ID NO: 2538942 - RNA, 19 nt, Artificial Sequence
  Description of Artificial Sequence: Synthetic oligonucleotide
uccuaggaccucagggaga

SEQ ID NO: 2538943 - RNA, 19 nt, Artificial Sequence
  Description of Artificial Sequence: Synthetic oligonucleotide
ccaacauugaccccaaaga

SEQ ID NO: 2538944 - RNA, 19 nt, Artificial Sequence
  Description of Artificial Sequence: Synthetic oligonucleotide
ucucaucggagaaguccug

SEQ ID NO: 2538945 - RNA, 19 nt, Artificial Sequence
  Description of Artificial Sequence: Synthetic oligonucleotide
gaccucagggagaagcaug

SEQ ID NO: 2538946 - RNA, 19 nt, Artificial Sequence
  Description of Artificial Sequence: Synthetic oligonucleotide
caauccaucaggccaggca

SEQ ID NO: 2538947 - RNA, 19 nt, Artificial Sequence
  Description of Artificial Sequence: Synthetic oligonucleotide
accgucacgacgaacugug

SEQ ID NO: 2538948 - RNA, 19 nt, Artificial Sequence
  Description of Artificial Sequence: Synthetic oligonucleotide
ccagccccaagguaaaucc

SEQ ID NO: 2538949 - RNA, 19 nt, Artificial Sequence
  Description of Artificial Sequence: Synthetic oligonucleotide
gaagaaugucaugaaguua

SEQ ID NO: 2538950 - RNA, 19 nt, Artificial Sequence
  Description of Artificial Sequence: Synthetic oligonucleotide
agaagcuguuaaacuggac

SEQ ID NO: 2538951 - RNA, 19 nt, Artificial Sequence
  Description of Artificial Sequence: Synthetic oligonucleotide
aaacuggacuucccuugau

SEQ ID NO: 2538952 - RNA, 19 nt, Artificial Sequence
  Description of Artificial Sequence: Synthetic oligonucleotide
caccugcaauccaucaggc

SEQ ID NO: 2538953 - RNA, 19 nt, Artificial Sequence
  Description of Artificial Sequence: Synthetic oligonucleotide
agaugaacacaggccgagg

SEQ ID NO: 2538954 - RNA, 19 nt, Artificial Sequence
  Description of Artificial Sequence: Synthetic oligonucleotide
uuauugaggccagccagau

SEQ ID NO: 2538955 - RNA, 19 nt, Artificial Sequence
  Description of Artificial Sequence: Synthetic oligonucleotide
cauagccaggccgaaguug

SEQ ID NO: 2538956 - RNA, 19 nt, Artificial Sequence
  Description of Artificial Sequence: Synthetic oligonucleotide
gaacugugccccgaagaug

SEQ ID NO: 2538957 - RNA, 19 nt, Artificial Sequence
  Description of Artificial Sequence: Synthetic oligonucleotide
caucaggccaggcaggcca

SEQ ID NO: 2538958 - RNA, 19 nt, Artificial Sequence
  Description of Artificial Sequence: Synthetic oligonucleotide
ugauggacuggaugaccgu

SEQ ID NO: 2538959 - RNA, 19 nt, Artificial Sequence
  Description of Artificial Sequence: Synthetic oligonucleotide
gacgaacugugccccgaag

SEQ ID NO: 2538960 - RNA, 19 nt, Artificial Sequence
  Description of Artificial Sequence: Synthetic oligonucleotide
cauaacugcagggagugaa

SEQ ID NO: 2538961 - RNA, 19 nt, Artificial Sequence
  Description of Artificial Sequence: Synthetic oligonucleotide
gcuguuaaacuggacuucc

SEQ ID NO: 2538962 - RNA, 19 nt, Artificial Sequence
  Description of Artificial Sequence: Synthetic oligonucleotide
ugcuccacagggaucucau

SEQ ID NO: 2538963 - RNA, 19 nt, Artificial Sequence
  Description of Artificial Sequence: Synthetic oligonucleotide
aguguuccauucugucugu

SEQ ID NO: 2538964 - RNA, 19 nt, Artificial Sequence
  Description of Artificial Sequence: Synthetic oligonucleotide
gagccauguuauugaggcc

SEQ ID NO: 2538965 - RNA, 19 nt, Artificial Sequence
  Description of Artificial Sequence: Synthetic oligonucleotide
agccugagaaacugaugga

SEQ ID NO: 2538966 - RNA, 19 nt, Artificial Sequence
  Description of Artificial Sequence: Synthetic oligonucleotide
uccccagccugagaaacug

SEQ ID NO: 2538967 - RNA, 19 nt, Artificial Sequence
  Description of Artificial Sequence: Synthetic oligonucleotide
cagggagugaagagaagca

SEQ ID NO: 2538968 - RNA, 19 nt, Artificial Sequence
  Description of Artificial Sequence: Synthetic oligonucleotide
ccagagcauagccaggccg

SEQ ID NO: 2538969 - RNA, 19 nt, Artificial Sequence
  Description of Artificial Sequence: Synthetic oligonucleotide
uccaucaggccaggcaggc

SEQ ID NO: 2538970 - RNA, 19 nt, Artificial Sequence
  Description of Artificial Sequence: Synthetic oligonucleotide
acacauaacugcagggagu

SEQ ID NO: 2538971 - RNA, 19 nt, Artificial Sequence
  Description of Artificial Sequence: Synthetic oligonucleotide
cacugggauagcuggggac

SEQ ID NO: 2538972 - RNA, 19 nt, Artificial Sequence
  Description of Artificial Sequence: Synthetic oligonucleotide
ccaacagcugccauccagc

SEQ ID NO: 2538973 - RNA, 19 nt, Artificial Sequence
  Description of Artificial Sequence: Synthetic oligonucleotide
cagagcauagccaggccga

SEQ ID NO: 2538974 - RNA, 19 nt, Artificial Sequence
  Description of Artificial Sequence: Synthetic oligonucleotide
acauccacagcugguagau

SEQ ID NO: 2538975 - RNA, 19 nt, Artificial Sequence
  Description of Artificial Sequence: Synthetic oligonucleotide
gggagugaagagaagcagc

SEQ ID NO: 2538976 - RNA, 19 nt, Artificial Sequence
  Description of Artificial Sequence: Synthetic oligonucleotide
auacgaaggcaggaaccag

SEQ ID NO: 2538977 - RNA, 19 nt, Artificial Sequence
  Description of Artificial Sequence: Synthetic oligonucleotide
caggccgaggaccuccuag

SEQ ID NO: 2538978 - RNA, 19 nt, Artificial Sequence
  Description of Artificial Sequence: Synthetic oligonucleotide
cagugggguacucggguag

SEQ ID NO: 2538979 - RNA, 19 nt, Artificial Sequence
  Description of Artificial Sequence: Synthetic oligonucleotide
cuccacugggauagcuggg

SEQ ID NO: 2538980 - RNA, 19 nt, Artificial Sequence
  Description of Artificial Sequence: Synthetic oligonucleotide
caggaaccagcacacauaa

SEQ ID NO: 2538981 - RNA, 19 nt, Artificial Sequence
  Description of Artificial Sequence: Synthetic oligonucleotide
agggaucucaucggagaag

SEQ ID NO: 2538982 - RNA, 19 nt, Artificial Sequence
  Description of Artificial Sequence: Synthetic oligonucleotide
agugggguacucggguagg

SEQ ID NO: 2538983 - RNA, 19 nt, Artificial Sequence
  Description of Artificial Sequence: Synthetic oligonucleotide
cugggaucagcaugaccac

SEQ ID NO: 2538984 - RNA, 19 nt, Artificial Sequence
  Description of Artificial Sequence: Synthetic oligonucleotide
gaccaagggugguggcagg

SEQ ID NO: 2538985 - RNA, 19 nt, Artificial Sequence
  Description of Artificial Sequence: Synthetic oligonucleotide
aggccacuggccuccacug

SEQ ID NO: 2538986 - RNA, 19 nt, Artificial Sequence
  Description of Artificial Sequence: Synthetic oligonucleotide
uagcuggggacaguggggu

SEQ ID NO: 2538987 - RNA, 19 nt, Artificial Sequence
  Description of Artificial Sequence: Synthetic oligonucleotide
ccagccagaugccuaaggc

SEQ ID NO: 2538988 - RNA, 19 nt, Artificial Sequence
  Description of Artificial Sequence: Synthetic oligonucleotide
gggcagugcuugcugaggg

SEQ ID NO: 2538989 - RNA, 19 nt, Artificial Sequence
  Description of Artificial Sequence: Synthetic oligonucleotide
cucggguagguuauuccca

SEQ ID NO: 2538990 - RNA, 19 nt, Artificial Sequence
  Description of Artificial Sequence: Synthetic oligonucleotide
gcccggaaggccuuauacg

SEQ ID NO: 2538991 - RNA, 19 nt, Artificial Sequence
  Description of Artificial Sequence: Synthetic oligonucleotide
aacacaggccgaggaccuc

SEQ ID NO: 2538992 - RNA, 19 nt, Artificial Sequence
  Description of Artificial Sequence: Synthetic oligonucleotide
ugcaauccaucaggccagg

SEQ ID NO: 2538993 - RNA, 19 nt, Artificial Sequence
  Description of Artificial Sequence: Synthetic oligonucleotide
agaauccaacagcugccau

SEQ ID NO: 2538994 - RNA, 19 nt, Artificial Sequence
  Description of Artificial Sequence: Synthetic oligonucleotide
guuaaacuggacuucccuu

SEQ ID NO: 2538995 - RNA, 19 nt, Artificial Sequence
  Description of Artificial Sequence: Synthetic oligonucleotide
agcugucagcccggaaggc

SEQ ID NO: 2538996 - RNA, 19 nt, Artificial Sequence
  Description of Artificial Sequence: Synthetic oligonucleotide
ggaaggccuuauacgaagg

SEQ ID NO: 2538997 - RNA, 19 nt, Artificial Sequence
  Description of Artificial Sequence: Synthetic oligonucleotide
gaccuccuaggaccucagg

SEQ ID NO: 2538998 - RNA, 19 nt, Artificial Sequence
  Description of Artificial Sequence: Synthetic oligonucleotide
ugggaucagcaugaccaca

SEQ ID NO: 2538999 - RNA, 19 nt, Artificial Sequence
  Description of Artificial Sequence: Synthetic oligonucleotide
cugcagggagugaagagaa

SEQ ID NO: 2539000 - RNA, 19 nt, Artificial Sequence
  Description of Artificial Sequence: Synthetic oligonucleotide
ugccauccagccacauacu

SEQ ID NO: 2539001 - RNA, 19 nt, Artificial Sequence
  Description of Artificial Sequence: Synthetic oligonucleotide
gcuugcugagggcucaggc

SEQ ID NO: 2539002 - RNA, 19 nt, Artificial Sequence
  Description of Artificial Sequence: Synthetic oligonucleotide
gguagguuauucccagaga

SEQ ID NO: 2539003 - RNA, 19 nt, Artificial Sequence
  Description of Artificial Sequence: Synthetic oligonucleotide
acgaaggcaggaaccagca

SEQ ID NO: 2539004 - RNA, 19 nt, Artificial Sequence
  Description of Artificial Sequence: Synthetic oligonucleotide
caaggaaaacaugauggcu

SEQ ID NO: 2539005 - RNA, 19 nt, Artificial Sequence
  Description of Artificial Sequence: Synthetic oligonucleotide
cagcagacaaggaaaacau

SEQ ID NO: 2539006 - RNA, 19 nt, Artificial Sequence
  Description of Artificial Sequence: Synthetic oligonucleotide
ggccuuauacgaaggcagg

SEQ ID NO: 2539007 - RNA, 19 nt, Artificial Sequence
  Description of Artificial Sequence: Synthetic oligonucleotide
gugaagagaagcagccaga

SEQ ID NO: 2539008 - RNA, 19 nt, Artificial Sequence
  Description of Artificial Sequence: Synthetic oligonucleotide
gccugagaaacugauggac

SEQ ID NO: 2539009 - RNA, 19 nt, Artificial Sequence
  Description of Artificial Sequence: Synthetic oligonucleotide
gccccgaagaugaagaaga

SEQ ID NO: 2539010 - RNA, 19 nt, Artificial Sequence
  Description of Artificial Sequence: Synthetic oligonucleotide
gaugaccgucacgacgaac

SEQ ID NO: 2539011 - RNA, 19 nt, Artificial Sequence
  Description of Artificial Sequence: Synthetic oligonucleotide
cccagagaagcuguuaaac

SEQ ID NO: 2539012 - RNA, 19 nt, Artificial Sequence
  Description of Artificial Sequence: Synthetic oligonucleotide
agcaugggcuucaggacca

SEQ ID NO: 2539013 - RNA, 19 nt, Artificial Sequence
  Description of Artificial Sequence: Synthetic oligonucleotide
gguucacacccagaguggc

SEQ ID NO: 2539014 - RNA, 19 nt, Artificial Sequence
  Description of Artificial Sequence: Synthetic oligonucleotide
ucacacccagaguggcaca

SEQ ID NO: 2539015 - RNA, 19 nt, Artificial Sequence
  Description of Artificial Sequence: Synthetic oligonucleotide
cacgacgaacugugccccg

SEQ ID NO: 2539016 - RNA, 19 nt, Artificial Sequence
  Description of Artificial Sequence: Synthetic oligonucleotide
acagugggguacucgggua

SEQ ID NO: 2539017 - RNA, 19 nt, Artificial Sequence
  Description of Artificial Sequence: Synthetic oligonucleotide
aggaccuccuaggaccuca

SEQ ID NO: 2539018 - RNA, 19 nt, Artificial Sequence
  Description of Artificial Sequence: Synthetic oligonucleotide
agagaagcagccagagcau

SEQ ID NO: 2539019 - RNA, 19 nt, Artificial Sequence
  Description of Artificial Sequence: Synthetic oligonucleotide
gggauagcuggggacagug

SEQ ID NO: 2539020 - RNA, 19 nt, Artificial Sequence
  Description of Artificial Sequence: Synthetic oligonucleotide
ggaaaacaugauggcuggg

SEQ ID NO: 2539021 - RNA, 19 nt, Artificial Sequence
  Description of Artificial Sequence: Synthetic oligonucleotide
gagcauagccaggccgaag

SEQ ID NO: 2539022 - RNA, 19 nt, Artificial Sequence
  Description of Artificial Sequence: Synthetic oligonucleotide
gaguggcacaguaaaacau

SEQ ID NO: 2539023 - RNA, 19 nt, Artificial Sequence
  Description of Artificial Sequence: Synthetic oligonucleotide
augcaccuucacaagugug

SEQ ID NO: 2539024 - RNA, 19 nt, Artificial Sequence
  Description of Artificial Sequence: Synthetic oligonucleotide
aggaaccagcacacauaac

SEQ ID NO: 2539025 - RNA, 19 nt, Artificial Sequence
  Description of Artificial Sequence: Synthetic oligonucleotide
ggaucagcaugaccacagc

SEQ ID NO: 2539026 - RNA, 19 nt, Artificial Sequence
  Description of Artificial Sequence: Synthetic oligonucleotide
ugguggcaggagacagagc

SEQ ID NO: 2539027 - RNA, 19 nt, Artificial Sequence
  Description of Artificial Sequence: Synthetic oligonucleotide
ccuaaggccacuggccucc

SEQ ID NO: 2539028 - RNA, 19 nt, Artificial Sequence
  Description of Artificial Sequence: Synthetic oligonucleotide
cugugccccgaagaugaag

SEQ ID NO: 2539029 - RNA, 19 nt, Artificial Sequence
  Description of Artificial Sequence: Synthetic oligonucleotide
ccgaaguuggccuguguuc

SEQ ID NO: 2539030 - RNA, 19 nt, Artificial Sequence
  Description of Artificial Sequence: Synthetic oligonucleotide
agaaugucaugaaguuaaa

SEQ ID NO: 2539031 - RNA, 19 nt, Artificial Sequence
  Description of Artificial Sequence: Synthetic oligonucleotide
caggaccaagggugguggc

SEQ ID NO: 2539032 - RNA, 19 nt, Artificial Sequence
  Description of Artificial Sequence: Synthetic oligonucleotide
ggauagcuggggacagugg

SEQ ID NO: 2539033 - RNA, 19 nt, Artificial Sequence
  Description of Artificial Sequence: Synthetic oligonucleotide
cggaaggccuuauacgaag

SEQ ID NO: 2539034 - RNA, 19 nt, Artificial Sequence
  Description of Artificial Sequence: Synthetic oligonucleotide
aggcaggccaccagguuca

SEQ ID NO: 2539035 - RNA, 19 nt, Artificial Sequence
  Description of Artificial Sequence: Synthetic oligonucleotide
guacucggguagguuauuc

SEQ ID NO: 2539036 - RNA, 19 nt, Artificial Sequence
  Description of Artificial Sequence: Synthetic oligonucleotide
cgucacgacgaacugugcc

SEQ ID NO: 2539037 - RNA, 19 nt, Artificial Sequence
  Description of Artificial Sequence: Synthetic oligonucleotide
cuggugcuccacagggauc

SEQ ID NO: 2539038 - RNA, 19 nt, Artificial Sequence
  Description of Artificial Sequence: Synthetic oligonucleotide
ggggauucuuccagguacc

SEQ ID NO: 2539039 - RNA, 19 nt, Artificial Sequence
  Description of Artificial Sequence: Synthetic oligonucleotide
agaaacugauggacuggau

SEQ ID NO: 2539040 - RNA, 19 nt, Artificial Sequence
  Description of Artificial Sequence: Synthetic oligonucleotide
gaacacaggccgaggaccu

SEQ ID NO: 2539041 - RNA, 19 nt, Artificial Sequence
  Description of Artificial Sequence: Synthetic oligonucleotide
acuggccuccacugggaua

SEQ ID NO: 2539042 - RNA, 19 nt, Artificial Sequence
  Description of Artificial Sequence: Synthetic oligonucleotide
cagggaucucaucggagaa

SEQ ID NO: 2539043 - RNA, 19 nt, Artificial Sequence
  Description of Artificial Sequence: Synthetic oligonucleotide
ggcagugcuugcugagggc

SEQ ID NO: 2539044 - RNA, 19 nt, Artificial Sequence
  Description of Artificial Sequence: Synthetic oligonucleotide
ggagacagagccauguuau

SEQ ID NO: 2539045 - RNA, 19 nt, Artificial Sequence
  Description of Artificial Sequence: Synthetic oligonucleotide
gguaccaguguuccauucu

SEQ ID NO: 2539046 - RNA, 19 nt, Artificial Sequence
  Description of Artificial Sequence: Synthetic oligonucleotide
guuggccuguguuccaccu

SEQ ID NO: 2539047 - RNA, 19 nt, Artificial Sequence
  Description of Artificial Sequence: Synthetic oligonucleotide
ggggacagugggguacucg

SEQ ID NO: 2539048 - RNA, 19 nt, Artificial Sequence
  Description of Artificial Sequence: Synthetic oligonucleotide
aaggagcugucagcccgga

SEQ ID NO: 2539049 - RNA, 19 nt, Artificial Sequence
  Description of Artificial Sequence: Synthetic oligonucleotide
accaagggugguggcagga

SEQ ID NO: 2539050 - RNA, 19 nt, Artificial Sequence
  Description of Artificial Sequence: Synthetic oligonucleotide
agccccaagguaaauccua

SEQ ID NO: 2539051 - RNA, 19 nt, Artificial Sequence
  Description of Artificial Sequence: Synthetic oligonucleotide
gccauccagccacauacuc

SEQ ID NO: 2539052 - RNA, 19 nt, Artificial Sequence
  Description of Artificial Sequence: Synthetic oligonucleotide
gagaagcagccagagcaua

SEQ ID NO: 2539053 - RNA, 19 nt, Artificial Sequence
  Description of Artificial Sequence: Synthetic oligonucleotide
ggcugggaucagcaugacc

SEQ ID NO: 2539054 - RNA, 19 nt, Artificial Sequence
  Description of Artificial Sequence: Synthetic oligonucleotide
gggguacucggguagguua

SEQ ID NO: 2539055 - RNA, 19 nt, Artificial Sequence
  Description of Artificial Sequence: Synthetic oligonucleotide
acauaacugcagggaguga

SEQ ID NO: 2539056 - RNA, 19 nt, Artificial Sequence
  Description of Artificial Sequence: Synthetic oligonucleotide
ccagccugagaaacugaug

SEQ ID NO: 2539057 - RNA, 19 nt, Artificial Sequence
  Description of Artificial Sequence: Synthetic oligonucleotide
cagaugccuaaggccacug

SEQ ID NO: 2539058 - RNA, 19 nt, Artificial Sequence
  Description of Artificial Sequence: Synthetic oligonucleotide
guuccaccugcaauccauc

SEQ ID NO: 2539059 - RNA, 19 nt, Artificial Sequence
  Description of Artificial Sequence: Synthetic oligonucleotide
guucacacccagaguggca

SEQ ID NO: 2539060 - RNA, 19 nt, Artificial Sequence
  Description of Artificial Sequence: Synthetic oligonucleotide
ugucagcccggaaggccuu

SEQ ID NO: 2539061 - RNA, 19 nt, Artificial Sequence
  Description of Artificial Sequence: Synthetic oligonucleotide
acaugauggcugggaucag

SEQ ID NO: 2539062 - RNA, 19 nt, Artificial Sequence
  Description of Artificial Sequence: Synthetic oligonucleotide
acgacgaacugugccccga

SEQ ID NO: 2539063 - RNA, 19 nt, Artificial Sequence
  Description of Artificial Sequence: Synthetic oligonucleotide
ccagagaagcuguuaaacu

SEQ ID NO: 2539064 - RNA, 19 nt, Artificial Sequence
  Description of Artificial Sequence: Synthetic oligonucleotide
gccauguuauugaggccag

SEQ ID NO: 2539065 - RNA, 19 nt, Artificial Sequence
  Description of Artificial Sequence: Synthetic oligonucleotide
guguuccaccugcaaucca

SEQ ID NO: 2539066 - RNA, 19 nt, Artificial Sequence
  Description of Artificial Sequence: Synthetic oligonucleotide
ugggguacucggguagguu

SEQ ID NO: 2539067 - RNA, 19 nt, Artificial Sequence
  Description of Artificial Sequence: Synthetic oligonucleotide
gguuauucccagagaagcu

SEQ ID NO: 2539068 - RNA, 19 nt, Artificial Sequence
  Description of Artificial Sequence: Synthetic oligonucleotide
cagcaucuggugcuccaca

SEQ ID NO: 2539069 - RNA, 19 nt, Artificial Sequence
  Description of Artificial Sequence: Synthetic oligonucleotide
gcucaggcaggagaugaac

SEQ ID NO: 2539070 - RNA, 19 nt, Artificial Sequence
  Description of Artificial Sequence: Synthetic oligonucleotide
gccgaggaccuccuaggac

SEQ ID NO: 2539071 - RNA, 19 nt, Artificial Sequence
  Description of Artificial Sequence: Synthetic oligonucleotide
cacccagaguggcacagua

SEQ ID NO: 2539072 - RNA, 19 nt, Artificial Sequence
  Description of Artificial Sequence: Synthetic oligonucleotide
gggcucaggcaggagauga

SEQ ID NO: 2539073 - RNA, 19 nt, Artificial Sequence
  Description of Artificial Sequence: Synthetic oligonucleotide
cagccccaacauugacccc

SEQ ID NO: 2539074 - RNA, 19 nt, Artificial Sequence
  Description of Artificial Sequence: Synthetic oligonucleotide
agggcucaggcaggagaug

SEQ ID NO: 2539075 - RNA, 19 nt, Artificial Sequence
  Description of Artificial Sequence: Synthetic oligonucleotide
gccuuauacgaaggcagga

SEQ ID NO: 2539076 - RNA, 19 nt, Artificial Sequence
  Description of Artificial Sequence: Synthetic oligonucleotide
ccuuauacgaaggcaggaa

SEQ ID NO: 2539077 - RNA, 19 nt, Artificial Sequence
  Description of Artificial Sequence: Synthetic oligonucleotide
gugccccgaagaugaagaa

SEQ ID NO: 2539078 - RNA, 19 nt, Artificial Sequence
  Description of Artificial Sequence: Synthetic oligonucleotide
ccccaagguaaauccuaug

SEQ ID NO: 2539079 - RNA, 19 nt, Artificial Sequence
  Description of Artificial Sequence: Synthetic oligonucleotide
acacccagaguggcacagu

SEQ ID NO: 2539080 - RNA, 19 nt, Artificial Sequence
  Description of Artificial Sequence: Synthetic oligonucleotide
gaccgucacgacgaacugu

SEQ ID NO: 2539081 - RNA, 19 nt, Artificial Sequence
  Description of Artificial Sequence: Synthetic oligonucleotide
gggagaagcaugggcuuca

SEQ ID NO: 2539082 - RNA, 19 nt, Artificial Sequence
  Description of Artificial Sequence: Synthetic oligonucleotide
gugugauggccagcaugac

SEQ ID NO: 2539083 - RNA, 19 nt, Artificial Sequence
  Description of Artificial Sequence: Synthetic oligonucleotide
gccuccacugggauagcug

SEQ ID NO: 2539084 - RNA, 19 nt, Artificial Sequence
  Description of Artificial Sequence: Synthetic oligonucleotide
gugcuccacagggaucuca

SEQ ID NO: 2539085 - RNA, 19 nt, Artificial Sequence
  Description of Artificial Sequence: Synthetic oligonucleotide
aggagcugucagcccggaa

SEQ ID NO: 2539086 - RNA, 19 nt, Artificial Sequence
  Description of Artificial Sequence: Synthetic oligonucleotide
ucagcccggaaggccuuau

SEQ ID NO: 2539087 - RNA, 19 nt, Artificial Sequence
  Description of Artificial Sequence: Synthetic oligonucleotide
acccagaguggcacaguaa

SEQ ID NO: 2539088 - RNA, 19 nt, Artificial Sequence
  Description of Artificial Sequence: Synthetic oligonucleotide
ccuaugcaccuucacaagu

SEQ ID NO: 2539089 - RNA, 19 nt, Artificial Sequence
  Description of Artificial Sequence: Synthetic oligonucleotide
agcuggggacaguggggua

SEQ ID NO: 2539090 - RNA, 19 nt, Artificial Sequence
  Description of Artificial Sequence: Synthetic oligonucleotide
ccaguguuccauucugucu

SEQ ID NO: 2539091 - RNA, 19 nt, Artificial Sequence
  Description of Artificial Sequence: Synthetic oligonucleotide
cuaggaccucagggagaag

SEQ ID NO: 2539092 - RNA, 19 nt, Artificial Sequence
  Description of Artificial Sequence: Synthetic oligonucleotide
ccaagggugguggcaggag

SEQ ID NO: 2539093 - RNA, 19 nt, Artificial Sequence
  Description of Artificial Sequence: Synthetic oligonucleotide
ccaggccgaaguuggccug

SEQ ID NO: 2539094 - RNA, 19 nt, Artificial Sequence
  Description of Artificial Sequence: Synthetic oligonucleotide
gccuaaggccacuggccuc

SEQ ID NO: 2539095 - RNA, 19 nt, Artificial Sequence
  Description of Artificial Sequence: Synthetic oligonucleotide
ggccgaggaccuccuagga

SEQ ID NO: 2539096 - RNA, 19 nt, Artificial Sequence
  Description of Artificial Sequence: Synthetic oligonucleotide
aggccgaaguuggccugug

SEQ ID NO: 2539097 - RNA, 19 nt, Artificial Sequence
  Description of Artificial Sequence: Synthetic oligonucleotide
aggcaggaaccagcacaca

SEQ ID NO: 2539098 - RNA, 19 nt, Artificial Sequence
  Description of Artificial Sequence: Synthetic oligonucleotide
ggaccuccuaggaccucag

SEQ ID NO: 2539099 - RNA, 19 nt, Artificial Sequence
  Description of Artificial Sequence: Synthetic oligonucleotide
cagggagaagcaugggcuu

SEQ ID NO: 2539100 - RNA, 19 nt, Artificial Sequence
  Description of Artificial Sequence: Synthetic oligonucleotide
ccauguuauugaggccagc

SEQ ID NO: 2539101 - RNA, 19 nt, Artificial Sequence
  Description of Artificial Sequence: Synthetic oligonucleotide
gcagugcuugcugagggcu

SEQ ID NO: 2539102 - RNA, 19 nt, Artificial Sequence
  Description of Artificial Sequence: Synthetic oligonucleotide
ccacagggaucucaucgga

SEQ ID NO: 2539103 - RNA, 19 nt, Artificial Sequence
  Description of Artificial Sequence: Synthetic oligonucleotide
cagccccaagguaaauccu

SEQ ID NO: 2539104 - RNA, 19 nt, Artificial Sequence
  Description of Artificial Sequence: Synthetic oligonucleotide
gcaauccaucaggccaggc

SEQ ID NO: 2539105 - RNA, 19 nt, Artificial Sequence
  Description of Artificial Sequence: Synthetic oligonucleotide
gccagaugccuaaggccac

SEQ ID NO: 2539106 - RNA, 19 nt, Artificial Sequence
  Description of Artificial Sequence: Synthetic oligonucleotide
gccaggccgaaguuggccu

SEQ ID NO: 2539107 - RNA, 19 nt, Artificial Sequence
  Description of Artificial Sequence: Synthetic oligonucleotide
cuccccagccugagaaacu

SEQ ID NO: 2539108 - RNA, 19 nt, Artificial Sequence
  Description of Artificial Sequence: Synthetic oligonucleotide
gaggaccuccuaggaccuc

SEQ ID NO: 2539109 - RNA, 19 nt, Artificial Sequence
  Description of Artificial Sequence: Synthetic oligonucleotide
gccgaaguuggccuguguu

SEQ ID NO: 2539110 - RNA, 19 nt, Artificial Sequence
  Description of Artificial Sequence: Synthetic oligonucleotide
acaggccgaggaccuccua

SEQ ID NO: 2539111 - RNA, 19 nt, Artificial Sequence
  Description of Artificial Sequence: Synthetic oligonucleotide
gcugccauccagccacaua

SEQ ID NO: 2539112 - RNA, 19 nt, Artificial Sequence
  Description of Artificial Sequence: Synthetic oligonucleotide
ccuguguuccaccugcaau

SEQ ID NO: 2539113 - RNA, 19 nt, Artificial Sequence
  Description of Artificial Sequence: Synthetic oligonucleotide
uggggacagugggguacuc

SEQ ID NO: 2539114 - RNA, 19 nt, Artificial Sequence
  Description of Artificial Sequence: Synthetic oligonucleotide
ccgucacgacgaacugugc

SEQ ID NO: 2539115 - RNA, 19 nt, Artificial Sequence
  Description of Artificial Sequence: Synthetic oligonucleotide
gguaaauccuaugcaccuu

SEQ ID NO: 2539116 - RNA, 19 nt, Artificial Sequence
  Description of Artificial Sequence: Synthetic oligonucleotide
ggcaggagacagagccaug

SEQ ID NO: 2539117 - RNA, 19 nt, Artificial Sequence
  Description of Artificial Sequence: Synthetic oligonucleotide
gccuguguuccaccugcaa

SEQ ID NO: 2539118 - RNA, 19 nt, Artificial Sequence
  Description of Artificial Sequence: Synthetic oligonucleotide
gcaugacagcagacaagga

SEQ ID NO: 2539119 - RNA, 19 nt, Artificial Sequence
  Description of Artificial Sequence: Synthetic oligonucleotide
ccagguaccaguguuccau

SEQ ID NO: 2539120 - RNA, 19 nt, Artificial Sequence
  Description of Artificial Sequence: Synthetic oligonucleotide
ccaucaggccaggcaggcc

SEQ ID NO: 2539121 - RNA, 19 nt, Artificial Sequence
  Description of Artificial Sequence: Synthetic oligonucleotide
cuucaggaccaaggguggu

SEQ ID NO: 2539122 - RNA, 19 nt, Artificial Sequence
  Description of Artificial Sequence: Synthetic oligonucleotide
cgaaggcaggaaccagcac

SEQ ID NO: 2539123 - RNA, 19 nt, Artificial Sequence
  Description of Artificial Sequence: Synthetic oligonucleotide
ccacugggauagcugggga

SEQ ID NO: 2539124 - RNA, 19 nt, Artificial Sequence
  Description of Artificial Sequence: Synthetic oligonucleotide
gcaccuucacaagugugau

SEQ ID NO: 2539125 - RNA, 19 nt, Artificial Sequence
  Description of Artificial Sequence: Synthetic oligonucleotide
cagguaccaguguuccauu

SEQ ID NO: 2539126 - RNA, 19 nt, Artificial Sequence
  Description of Artificial Sequence: Synthetic oligonucleotide
ggaugaccgucacgacgaa

SEQ ID NO: 2539127 - RNA, 19 nt, Artificial Sequence
  Description of Artificial Sequence: Synthetic oligonucleotide
caagugugauggccagcau

SEQ ID NO: 2539128 - RNA, 19 nt, Artificial Sequence
  Description of Artificial Sequence: Synthetic oligonucleotide
ccacuggccuccacuggga

SEQ ID NO: 2539129 - RNA, 19 nt, Artificial Sequence
  Description of Artificial Sequence: Synthetic oligonucleotide
cacaggccgaggaccuccu

SEQ ID NO: 2539130 - RNA, 19 nt, Artificial Sequence
  Description of Artificial Sequence: Synthetic oligonucleotide
ggguacucggguagguuau

SEQ ID NO: 2539131 - RNA, 19 nt, Artificial Sequence
  Description of Artificial Sequence: Synthetic oligonucleotide
cgaacugugccccgaagau

SEQ ID NO: 2539132 - RNA, 19 nt, Artificial Sequence
  Description of Artificial Sequence: Synthetic oligonucleotide
ggcucaggcaggagaugaa

SEQ ID NO: 2539133 - RNA, 19 nt, Artificial Sequence
  Description of Artificial Sequence: Synthetic oligonucleotide
cacuggccuccacugggau

SEQ ID NO: 2539134 - RNA, 19 nt, Artificial Sequence
  Description of Artificial Sequence: Synthetic oligonucleotide
ggaccucagggagaagcau

SEQ ID NO: 2539135 - RNA, 19 nt, Artificial Sequence
  Description of Artificial Sequence: Synthetic oligonucleotide
cagcccggaaggccuuaua

SEQ ID NO: 2539136 - RNA, 19 nt, Artificial Sequence
  Description of Artificial Sequence: Synthetic oligonucleotide
gcauagccaggccgaaguu

SEQ ID NO: 2539137 - RNA, 19 nt, Artificial Sequence
  Description of Artificial Sequence: Synthetic oligonucleotide
caggccgaaguuggccugu

SEQ ID NO: 2539138 - RNA, 19 nt, Artificial Sequence
  Description of Artificial Sequence: Synthetic oligonucleotide
gccccaagguaaauccuau

SEQ ID NO: 2539139 - RNA, 19 nt, Artificial Sequence
  Description of Artificial Sequence: Synthetic oligonucleotide
gucagcccggaaggccuua

SEQ ID NO: 2539140 - RNA, 19 nt, Artificial Sequence
  Description of Artificial Sequence: Synthetic oligonucleotide
cccgaagaugaagaagaau

SEQ ID NO: 2539141 - RNA, 19 nt, Artificial Sequence
  Description of Artificial Sequence: Synthetic oligonucleotide
ggccgaaguuggccugugu

SEQ ID NO: 2539142 - RNA, 19 nt, Artificial Sequence
  Description of Artificial Sequence: Synthetic oligonucleotide
gcaggccaccagguucaca

SEQ ID NO: 2539143 - RNA, 19 nt, Artificial Sequence
  Description of Artificial Sequence: Synthetic oligonucleotide
cggguagguuauucccaga

SEQ ID NO: 2539144 - RNA, 19 nt, Artificial Sequence
  Description of Artificial Sequence: Synthetic oligonucleotide
gccccaacauugaccccaa

SEQ ID NO: 2539145 - RNA, 19 nt, Artificial Sequence
  Description of Artificial Sequence: Synthetic oligonucleotide
ggcaggccaccagguucac

SEQ ID NO: 2539146 - RNA, 19 nt, Artificial Sequence
  Description of Artificial Sequence: Synthetic oligonucleotide
cgaggaccuccuaggaccu

SEQ ID NO: 2539147 - RNA, 19 nt, Artificial Sequence
  Description of Artificial Sequence: Synthetic oligonucleotide
gguacucggguagguuauu

SEQ ID NO: 2539148 - RNA, 19 nt, Artificial Sequence
  Description of Artificial Sequence: Synthetic oligonucleotide
ccagaugccuaaggccacu

SEQ ID NO: 2539149 - RNA, 19 nt, Artificial Sequence
  Description of Artificial Sequence: Synthetic oligonucleotide
cgacgaacugugccccgaa

SEQ ID NO: 2539150 - RNA, 19 nt, Artificial Sequence
  Description of Artificial Sequence: Synthetic oligonucleotide
ccacagcagccccaacauu

SEQ ID NO: 2539151 - RNA, 19 nt, Artificial Sequence
  Description of Artificial Sequence: Synthetic oligonucleotide
ccccaacauugaccccaaa

SEQ ID NO: 2539152 - RNA, 19 nt, Artificial Sequence
  Description of Artificial Sequence: Synthetic oligonucleotide
ccccagccccaagguaaau

SEQ ID NO: 2539153 - RNA, 19 nt, Artificial Sequence
  Description of Artificial Sequence: Synthetic oligonucleotide
auaaauaauauuuagguag

SEQ ID NO: 2539154 - RNA, 19 nt, Artificial Sequence
  Description of Artificial Sequence: Synthetic oligonucleotide
auaauauuuagguagggcc

SEQ ID NO: 2539155 - RNA, 19 nt, Artificial Sequence
  Description of Artificial Sequence: Synthetic oligonucleotide
uuuaaauuaagcaugugca

SEQ ID NO: 2539156 - RNA, 19 nt, Artificial Sequence
  Description of Artificial Sequence: Synthetic oligonucleotide
uuuuaaauuaagcaugugc

SEQ ID NO: 2539157 - RNA, 19 nt, Artificial Sequence
  Description of Artificial Sequence: Synthetic oligonucleotide
aaagcaguagcauccaagc

SEQ ID NO: 2539158 - RNA, 19 nt, Artificial Sequence
  Description of Artificial Sequence: Synthetic oligonucleotide
aauaauauuuagguagggc

SEQ ID NO: 2539159 - RNA, 19 nt, Artificial Sequence
  Description of Artificial Sequence: Synthetic oligonucleotide
uaaauaauauuuagguagg

SEQ ID NO: 2539160 - RNA, 19 nt, Artificial Sequence
  Description of Artificial Sequence: Synthetic oligonucleotide
agccaugucaaauaugucc

SEQ ID NO: 2539161 - RNA, 19 nt, Artificial Sequence
  Description of Artificial Sequence: Synthetic oligonucleotide
ugaauauucugaaaagcag

SEQ ID NO: 2539162 - RNA, 19 nt, Artificial Sequence
  Description of Artificial Sequence: Synthetic oligonucleotide
aguggguuucuucugaugc

SEQ ID NO: 2539163 - RNA, 19 nt, Artificial Sequence
  Description of Artificial Sequence: Synthetic oligonucleotide
aaauagacuauuuuguuua

SEQ ID NO: 2539164 - RNA, 19 nt, Artificial Sequence
  Description of Artificial Sequence: Synthetic oligonucleotide
ucaaauauguccaugggau

SEQ ID NO: 2539165 - RNA, 19 nt, Artificial Sequence
  Description of Artificial Sequence: Synthetic oligonucleotide
aaaccaaagaacucucguc

SEQ ID NO: 2539166 - RNA, 19 nt, Artificial Sequence
  Description of Artificial Sequence: Synthetic oligonucleotide
aauaaauaauauuuaggua

SEQ ID NO: 2539167 - RNA, 19 nt, Artificial Sequence
  Description of Artificial Sequence: Synthetic oligonucleotide
aaauuaagcaugugcagca

SEQ ID NO: 2539168 - RNA, 19 nt, Artificial Sequence
  Description of Artificial Sequence: Synthetic oligonucleotide
aaauauguccaugggauuc

SEQ ID NO: 2539169 - RNA, 19 nt, Artificial Sequence
  Description of Artificial Sequence: Synthetic oligonucleotide
uuaaauuaagcaugugcag

SEQ ID NO: 2539170 - RNA, 19 nt, Artificial Sequence
  Description of Artificial Sequence: Synthetic oligonucleotide
ucaagauaccgauugaaca

SEQ ID NO: 2539171 - RNA, 19 nt, Artificial Sequence
  Description of Artificial Sequence: Synthetic oligonucleotide
agcaagacauucaagauac

SEQ ID NO: 2539172 - RNA, 19 nt, Artificial Sequence
  Description of Artificial Sequence: Synthetic oligonucleotide
aaccaaagaacucucguca

SEQ ID NO: 2539173 - RNA, 19 nt, Artificial Sequence
  Description of Artificial Sequence: Synthetic oligonucleotide
uaauauuuagguagggcca

SEQ ID NO: 2539174 - RNA, 19 nt, Artificial Sequence
  Description of Artificial Sequence: Synthetic oligonucleotide
acauucaagauaccgauug

SEQ ID NO: 2539175 - RNA, 19 nt, Artificial Sequence
  Description of Artificial Sequence: Synthetic oligonucleotide
auaacuucagauccacucg

SEQ ID NO: 2539176 - RNA, 19 nt, Artificial Sequence
  Description of Artificial Sequence: Synthetic oligonucleotide
ucugacaggagcuuguacc

SEQ ID NO: 2539177 - RNA, 19 nt, Artificial Sequence
  Description of Artificial Sequence: Synthetic oligonucleotide
ucaguugcuacagaguugg

SEQ ID NO: 2539178 - RNA, 19 nt, Artificial Sequence
  Description of Artificial Sequence: Synthetic oligonucleotide
aaaauagacuauuuuguuu

SEQ ID NO: 2539179 - RNA, 19 nt, Artificial Sequence
  Description of Artificial Sequence: Synthetic oligonucleotide
ucaugaauauucugaaaag

SEQ ID NO: 2539180 - RNA, 19 nt, Artificial Sequence
  Description of Artificial Sequence: Synthetic oligonucleotide
aauauguccaugggauucc

SEQ ID NO: 2539181 - RNA, 19 nt, Artificial Sequence
  Description of Artificial Sequence: Synthetic oligonucleotide
guugauucuuccuugcagg

SEQ ID NO: 2539182 - RNA, 19 nt, Artificial Sequence
  Description of Artificial Sequence: Synthetic oligonucleotide
ucugauagcuccauaauua

SEQ ID NO: 2539183 - RNA, 19 nt, Artificial Sequence
  Description of Artificial Sequence: Synthetic oligonucleotide
uaaauuaagcaugugcagc

SEQ ID NO: 2539184 - RNA, 19 nt, Artificial Sequence
  Description of Artificial Sequence: Synthetic oligonucleotide
guuggauccauccucaccc

SEQ ID NO: 2539185 - RNA, 19 nt, Artificial Sequence
  Description of Artificial Sequence: Synthetic oligonucleotide
aagcaguagcauccaagcc

SEQ ID NO: 2539186 - RNA, 19 nt, Artificial Sequence
  Description of Artificial Sequence: Synthetic oligonucleotide
aaauaauauuuagguaggg

SEQ ID NO: 2539187 - RNA, 19 nt, Artificial Sequence
  Description of Artificial Sequence: Synthetic oligonucleotide
caugaugucaucaggauca

SEQ ID NO: 2539188 - RNA, 19 nt, Artificial Sequence
  Description of Artificial Sequence: Synthetic oligonucleotide
gaugucaucaggaucaaac

SEQ ID NO: 2539189 - RNA, 19 nt, Artificial Sequence
  Description of Artificial Sequence: Synthetic oligonucleotide
uucugaaucucucucuuug

SEQ ID NO: 2539190 - RNA, 19 nt, Artificial Sequence
  Description of Artificial Sequence: Synthetic oligonucleotide
accgauugaacauuccuuc

SEQ ID NO: 2539191 - RNA, 19 nt, Artificial Sequence
  Description of Artificial Sequence: Synthetic oligonucleotide
ugucaucaggaucaaacca

SEQ ID NO: 2539192 - RNA, 19 nt, Artificial Sequence
  Description of Artificial Sequence: Synthetic oligonucleotide
aauuguuucaugaugucau

SEQ ID NO: 2539193 - RNA, 19 nt, Artificial Sequence
  Description of Artificial Sequence: Synthetic oligonucleotide
uugaacauuccuuccacug

SEQ ID NO: 2539194 - RNA, 19 nt, Artificial Sequence
  Description of Artificial Sequence: Synthetic oligonucleotide
caagacauucaagauaccg

SEQ ID NO: 2539195 - RNA, 19 nt, Artificial Sequence
  Description of Artificial Sequence: Synthetic oligonucleotide
acggucuucugacaggagc

SEQ ID NO: 2539196 - RNA, 19 nt, Artificial Sequence
  Description of Artificial Sequence: Synthetic oligonucleotide
aaaagcaguagcauccaag

SEQ ID NO: 2539197 - RNA, 19 nt, Artificial Sequence
  Description of Artificial Sequence: Synthetic oligonucleotide
aaaguggaaagugccuggc

SEQ ID NO: 2539198 - RNA, 19 nt, Artificial Sequence
  Description of Artificial Sequence: Synthetic oligonucleotide
caugaauauucugaaaagc

SEQ ID NO: 2539199 - RNA, 19 nt, Artificial Sequence
  Description of Artificial Sequence: Synthetic oligonucleotide
aguugauucuuccuugcag

SEQ ID NO: 2539200 - RNA, 19 nt, Artificial Sequence
  Description of Artificial Sequence: Synthetic oligonucleotide
ucugccaugaacuguuuca

SEQ ID NO: 2539201 - RNA, 19 nt, Artificial Sequence
  Description of Artificial Sequence: Synthetic oligonucleotide
uuuggugacggucuucuga

SEQ ID NO: 2539202 - RNA, 19 nt, Artificial Sequence
  Description of Artificial Sequence: Synthetic oligonucleotide
uucaagauaccgauugaac

SEQ ID NO: 2539203 - RNA, 19 nt, Artificial Sequence
  Description of Artificial Sequence: Synthetic oligonucleotide
aguuggauccauccucacc

SEQ ID NO: 2539204 - RNA, 19 nt, Artificial Sequence
  Description of Artificial Sequence: Synthetic oligonucleotide
uacagaguuggauccaucc

SEQ ID NO: 2539205 - RNA, 19 nt, Artificial Sequence
  Description of Artificial Sequence: Synthetic oligonucleotide
gucaugaauauucugaaaa

SEQ ID NO: 2539206 - RNA, 19 nt, Artificial Sequence
  Description of Artificial Sequence: Synthetic oligonucleotide
cuguuccucauuaagcugc

SEQ ID NO: 2539207 - RNA, 19 nt, Artificial Sequence
  Description of Artificial Sequence: Synthetic oligonucleotide
aagucaugaauauucugaa

SEQ ID NO: 2539208 - RNA, 19 nt, Artificial Sequence
  Description of Artificial Sequence: Synthetic oligonucleotide
ucucucuuugagcucauug

SEQ ID NO: 2539209 - RNA, 19 nt, Artificial Sequence
  Description of Artificial Sequence: Synthetic oligonucleotide
ucugaaaagcaguagcauc

SEQ ID NO: 2539210 - RNA, 19 nt, Artificial Sequence
  Description of Artificial Sequence: Synthetic oligonucleotide
aacgccucucuucacugcg

SEQ ID NO: 2539211 - RNA, 19 nt, Artificial Sequence
  Description of Artificial Sequence: Synthetic oligonucleotide
ucugucuucauuucucgga

SEQ ID NO: 2539212 - RNA, 19 nt, Artificial Sequence
  Description of Artificial Sequence: Synthetic oligonucleotide
ugaaucucucucuuugagc

SEQ ID NO: 2539213 - RNA, 19 nt, Artificial Sequence
  Description of Artificial Sequence: Synthetic oligonucleotide
aagcaagacauucaagaua

SEQ ID NO: 2539214 - RNA, 19 nt, Artificial Sequence
  Description of Artificial Sequence: Synthetic oligonucleotide
aagcaugugcagcagacaa

SEQ ID NO: 2539215 - RNA, 19 nt, Artificial Sequence
  Description of Artificial Sequence: Synthetic oligonucleotide
gguacaauaacuucagauc

SEQ ID NO: 2539216 - RNA, 19 nt, Artificial Sequence
  Description of Artificial Sequence: Synthetic oligonucleotide
uucugcacggaguugauuc

SEQ ID NO: 2539217 - RNA, 19 nt, Artificial Sequence
  Description of Artificial Sequence: Synthetic oligonucleotide
augugcagcagacaagcuc

SEQ ID NO: 2539218 - RNA, 19 nt, Artificial Sequence
  Description of Artificial Sequence: Synthetic oligonucleotide
ugccaaaguggaaagugcc

SEQ ID NO: 2539219 - RNA, 19 nt, Artificial Sequence
  Description of Artificial Sequence: Synthetic oligonucleotide
augaauauucugaaaagca

SEQ ID NO: 2539220 - RNA, 19 nt, Artificial Sequence
  Description of Artificial Sequence: Synthetic oligonucleotide
ucacccaauuguuucauga

SEQ ID NO: 2539221 - RNA, 19 nt, Artificial Sequence
  Description of Artificial Sequence: Synthetic oligonucleotide
aaacgccucucuucacugc

SEQ ID NO: 2539222 - RNA, 19 nt, Artificial Sequence
  Description of Artificial Sequence: Synthetic oligonucleotide
aagacauucaagauaccga

SEQ ID NO: 2539223 - RNA, 19 nt, Artificial Sequence
  Description of Artificial Sequence: Synthetic oligonucleotide
ucgucaucuguguuagugg

SEQ ID NO: 2539224 - RNA, 19 nt, Artificial Sequence
  Description of Artificial Sequence: Synthetic oligonucleotide
aggaucuggguacaauaac

SEQ ID NO: 2539225 - RNA, 19 nt, Artificial Sequence
  Description of Artificial Sequence: Synthetic oligonucleotide
ugaagucaugaauauucug

SEQ ID NO: 2539226 - RNA, 19 nt, Artificial Sequence
  Description of Artificial Sequence: Synthetic oligonucleotide
agacauucaagauaccgau

SEQ ID NO: 2539227 - RNA, 19 nt, Artificial Sequence
  Description of Artificial Sequence: Synthetic oligonucleotide
gaaucucucucuuugagcu

SEQ ID NO: 2539228 - RNA, 19 nt, Artificial Sequence
  Description of Artificial Sequence: Synthetic oligonucleotide
uccauccucacccaauugu

SEQ ID NO: 2539229 - RNA, 19 nt, Artificial Sequence
  Description of Artificial Sequence: Synthetic oligonucleotide
uugaagucaugaauauucu

SEQ ID NO: 2539230 - RNA, 19 nt, Artificial Sequence
  Description of Artificial Sequence: Synthetic oligonucleotide
auccucacccaauuguuuc

SEQ ID NO: 2539231 - RNA, 19 nt, Artificial Sequence
  Description of Artificial Sequence: Synthetic oligonucleotide
ucucuuugagcucauugaa

SEQ ID NO: 2539232 - RNA, 19 nt, Artificial Sequence
  Description of Artificial Sequence: Synthetic oligonucleotide
uugcuacagaguuggaucc

SEQ ID NO: 2539233 - RNA, 19 nt, Artificial Sequence
  Description of Artificial Sequence: Synthetic oligonucleotide
aauauucugaaaagcagua

SEQ ID NO: 2539234 - RNA, 19 nt, Artificial Sequence
  Description of Artificial Sequence: Synthetic oligonucleotide
auuguuucaugaugucauc

SEQ ID NO: 2539235 - RNA, 19 nt, Artificial Sequence
  Description of Artificial Sequence: Synthetic oligonucleotide
uaagcaagacauucaagau

SEQ ID NO: 2539236 - RNA, 19 nt, Artificial Sequence
  Description of Artificial Sequence: Synthetic oligonucleotide
ugaacuguuucagaguuuc

SEQ ID NO: 2539237 - RNA, 19 nt, Artificial Sequence
  Description of Artificial Sequence: Synthetic oligonucleotide
uaacuucagauccacucgu

SEQ ID NO: 2539238 - RNA, 19 nt, Artificial Sequence
  Description of Artificial Sequence: Synthetic oligonucleotide
caggaucaaaccaaagaac

SEQ ID NO: 2539239 - RNA, 19 nt, Artificial Sequence
  Description of Artificial Sequence: Synthetic oligonucleotide
aaucucucucuuugagcuc

SEQ ID NO: 2539240 - RNA, 19 nt, Artificial Sequence
  Description of Artificial Sequence: Synthetic oligonucleotide
caaaguggaaagugccugg

SEQ ID NO: 2539241 - RNA, 19 nt, Artificial Sequence
  Description of Artificial Sequence: Synthetic oligonucleotide
ucaugaugucaucaggauc

SEQ ID NO: 2539242 - RNA, 19 nt, Artificial Sequence
  Description of Artificial Sequence: Synthetic oligonucleotide
auaccgauugaacauuccu

SEQ ID NO: 2539243 - RNA, 19 nt, Artificial Sequence
  Description of Artificial Sequence: Synthetic oligonucleotide
aauagacuauuuuguuuaa

SEQ ID NO: 2539244 - RNA, 19 nt, Artificial Sequence
  Description of Artificial Sequence: Synthetic oligonucleotide
uccacuguaaaaggcacug

SEQ ID NO: 2539245 - RNA, 19 nt, Artificial Sequence
  Description of Artificial Sequence: Synthetic oligonucleotide
agaguuucagaggugcccg

SEQ ID NO: 2539246 - RNA, 19 nt, Artificial Sequence
  Description of Artificial Sequence: Synthetic oligonucleotide
aauuaagcaugugcagcag

SEQ ID NO: 2539247 - RNA, 19 nt, Artificial Sequence
  Description of Artificial Sequence: Synthetic oligonucleotide
uucugauagcuccauaauu

SEQ ID NO: 2539248 - RNA, 19 nt, Artificial Sequence
  Description of Artificial Sequence: Synthetic oligonucleotide
aauauuuagguagggccau

SEQ ID NO: 2539249 - RNA, 19 nt, Artificial Sequence
  Description of Artificial Sequence: Synthetic oligonucleotide
agggccauaagcaagacau

SEQ ID NO: 2539250 - RNA, 19 nt, Artificial Sequence
  Description of Artificial Sequence: Synthetic oligonucleotide
ucugaugcccauucagucu

SEQ ID NO: 2539251 - RNA, 19 nt, Artificial Sequence
  Description of Artificial Sequence: Synthetic oligonucleotide
gcuuccucauuucugauag

SEQ ID NO: 2539252 - RNA, 19 nt, Artificial Sequence
  Description of Artificial Sequence: Synthetic oligonucleotide
cugacaggagcuuguaccc

SEQ ID NO: 2539253 - RNA, 19 nt, Artificial Sequence
  Description of Artificial Sequence: Synthetic oligonucleotide
cuggguacaauaacuucag

SEQ ID NO: 2539254 - RNA, 19 nt, Artificial Sequence
  Description of Artificial Sequence: Synthetic oligonucleotide
gguuuauuuuaaauuaagc

SEQ ID NO: 2539255 - RNA, 19 nt, Artificial Sequence
  Description of Artificial Sequence: Synthetic oligonucleotide
acccaauuguuucaugaug

SEQ ID NO: 2539256 - RNA, 19 nt, Artificial Sequence
  Description of Artificial Sequence: Synthetic oligonucleotide
aaagaacucucgucaucug

SEQ ID NO: 2539257 - RNA, 19 nt, Artificial Sequence
  Description of Artificial Sequence: Synthetic oligonucleotide
uguguuaguggguuucuuc

SEQ ID NO: 2539258 - RNA, 19 nt, Artificial Sequence
  Description of Artificial Sequence: Synthetic oligonucleotide
uuucugauagcuccauaau

SEQ ID NO: 2539259 - RNA, 19 nt, Artificial Sequence
  Description of Artificial Sequence: Synthetic oligonucleotide
cuagccaugucaaauaugu

SEQ ID NO: 2539260 - RNA, 19 nt, Artificial Sequence
  Description of Artificial Sequence: Synthetic oligonucleotide
cucuuugagcucauugaag

SEQ ID NO: 2539261 - RNA, 19 nt, Artificial Sequence
  Description of Artificial Sequence: Synthetic oligonucleotide
ucauuaagcugcucugcca

SEQ ID NO: 2539262 - RNA, 19 nt, Artificial Sequence
  Description of Artificial Sequence: Synthetic oligonucleotide
ucagucugucuucauuucu

SEQ ID NO: 2539263 - RNA, 19 nt, Artificial Sequence
  Description of Artificial Sequence: Synthetic oligonucleotide
uucugaugcccauucaguc

SEQ ID NO: 2539264 - RNA, 19 nt, Artificial Sequence
  Description of Artificial Sequence: Synthetic oligonucleotide
uuggugacggucuucugac

SEQ ID NO: 2539265 - RNA, 19 nt, Artificial Sequence
  Description of Artificial Sequence: Synthetic oligonucleotide
uguuaguggguuucuucug

SEQ ID NO: 2539266 - RNA, 19 nt, Artificial Sequence
  Description of Artificial Sequence: Synthetic oligonucleotide
auauucugaaaagcaguag

SEQ ID NO: 2539267 - RNA, 19 nt, Artificial Sequence
  Description of Artificial Sequence: Synthetic oligonucleotide
ucucggaggaucuggguac

SEQ ID NO: 2539268 - RNA, 19 nt, Artificial Sequence
  Description of Artificial Sequence: Synthetic oligonucleotide
uagcauccaagcccuuugg

SEQ ID NO: 2539269 - RNA, 19 nt, Artificial Sequence
  Description of Artificial Sequence: Synthetic oligonucleotide
uuguuucaugaugucauca

SEQ ID NO: 2539270 - RNA, 19 nt, Artificial Sequence
  Description of Artificial Sequence: Synthetic oligonucleotide
aagcccuuuggugacgguc

SEQ ID NO: 2539271 - RNA, 19 nt, Artificial Sequence
  Description of Artificial Sequence: Synthetic oligonucleotide
gaauauucugaaaagcagu

SEQ ID NO: 2539272 - RNA, 19 nt, Artificial Sequence
  Description of Artificial Sequence: Synthetic oligonucleotide
cugccaaaguggaaagugc

SEQ ID NO: 2539273 - RNA, 19 nt, Artificial Sequence
  Description of Artificial Sequence: Synthetic oligonucleotide
aucaaaccaaagaacucuc

SEQ ID NO: 2539274 - RNA, 19 nt, Artificial Sequence
  Description of Artificial Sequence: Synthetic oligonucleotide
cauccaagcccuuugguga

SEQ ID NO: 2539275 - RNA, 19 nt, Artificial Sequence
  Description of Artificial Sequence: Synthetic oligonucleotide
uuguacccgaugucuagcc

SEQ ID NO: 2539276 - RNA, 19 nt, Artificial Sequence
  Description of Artificial Sequence: Synthetic oligonucleotide
uuaagcugcucugccauga

SEQ ID NO: 2539277 - RNA, 19 nt, Artificial Sequence
  Description of Artificial Sequence: Synthetic oligonucleotide
cauuucucggaggaucugg

SEQ ID NO: 2539278 - RNA, 19 nt, Artificial Sequence
  Description of Artificial Sequence: Synthetic oligonucleotide
uaccgauugaacauuccuu

SEQ ID NO: 2539279 - RNA, 19 nt, Artificial Sequence
  Description of Artificial Sequence: Synthetic oligonucleotide
cuucauuucucggaggauc

SEQ ID NO: 2539280 - RNA, 19 nt, Artificial Sequence
  Description of Artificial Sequence: Synthetic oligonucleotide
caugggauuccuuucucuc

SEQ ID NO: 2539281 - RNA, 19 nt, Artificial Sequence
  Description of Artificial Sequence: Synthetic oligonucleotide
auugaacauuccuuccacu

SEQ ID NO: 2539282 - RNA, 19 nt, Artificial Sequence
  Description of Artificial Sequence: Synthetic oligonucleotide
aucuguguuaguggguuuc

SEQ ID NO: 2539283 - RNA, 19 nt, Artificial Sequence
  Description of Artificial Sequence: Synthetic oligonucleotide
ugucuagccaugucaaaua

SEQ ID NO: 2539284 - RNA, 19 nt, Artificial Sequence
  Description of Artificial Sequence: Synthetic oligonucleotide
uuucagaguuucagaggug

SEQ ID NO: 2539285 - RNA, 19 nt, Artificial Sequence
  Description of Artificial Sequence: Synthetic oligonucleotide
aguggaaagugccuggcuu

SEQ ID NO: 2539286 - RNA, 19 nt, Artificial Sequence
  Description of Artificial Sequence: Synthetic oligonucleotide
guagcauccaagcccuuug

SEQ ID NO: 2539287 - RNA, 19 nt, Artificial Sequence
  Description of Artificial Sequence: Synthetic oligonucleotide
cucgucaucuguguuagug

SEQ ID NO: 2539288 - RNA, 19 nt, Artificial Sequence
  Description of Artificial Sequence: Synthetic oligonucleotide
uggguuucuucugaugccc

SEQ ID NO: 2539289 - RNA, 19 nt, Artificial Sequence
  Description of Artificial Sequence: Synthetic oligonucleotide
uccagggaccugcuguucc

SEQ ID NO: 2539290 - RNA, 19 nt, Artificial Sequence
  Description of Artificial Sequence: Synthetic oligonucleotide
acagaguuggauccauccu

SEQ ID NO: 2539291 - RNA, 19 nt, Artificial Sequence
  Description of Artificial Sequence: Synthetic oligonucleotide
ucguguuucugaaucucuc

SEQ ID NO: 2539292 - RNA, 19 nt, Artificial Sequence
  Description of Artificial Sequence: Synthetic oligonucleotide
uagcuccauaauuacauuu

SEQ ID NO: 2539293 - RNA, 19 nt, Artificial Sequence
  Description of Artificial Sequence: Synthetic oligonucleotide
agaacucucgucaucugug

SEQ ID NO: 2539294 - RNA, 19 nt, Artificial Sequence
  Description of Artificial Sequence: Synthetic oligonucleotide
auucaagauaccgauugaa

SEQ ID NO: 2539295 - RNA, 19 nt, Artificial Sequence
  Description of Artificial Sequence: Synthetic oligonucleotide
uucugaaaagcaguagcau

SEQ ID NO: 2539296 - RNA, 19 nt, Artificial Sequence
  Description of Artificial Sequence: Synthetic oligonucleotide
uccuuucucucuuccugag

SEQ ID NO: 2539297 - RNA, 19 nt, Artificial Sequence
  Description of Artificial Sequence: Synthetic oligonucleotide
gucuucauuucucggagga

SEQ ID NO: 2539298 - RNA, 19 nt, Artificial Sequence
  Description of Artificial Sequence: Synthetic oligonucleotide
cugaugcccauucagucuc

SEQ ID NO: 2539299 - RNA, 19 nt, Artificial Sequence
  Description of Artificial Sequence: Synthetic oligonucleotide
auguccaugggauuccuuu

SEQ ID NO: 2539300 - RNA, 19 nt, Artificial Sequence
  Description of Artificial Sequence: Synthetic oligonucleotide
augggauuccuuucucucu

SEQ ID NO: 2539301 - RNA, 19 nt, Artificial Sequence
  Description of Artificial Sequence: Synthetic oligonucleotide
uguacccgaugucuagcca

SEQ ID NO: 2539302 - RNA, 19 nt, Artificial Sequence
  Description of Artificial Sequence: Synthetic oligonucleotide
ggugacggucuucugacag

SEQ ID NO: 2539303 - RNA, 19 nt, Artificial Sequence
  Description of Artificial Sequence: Synthetic oligonucleotide
auuuuaaauuaagcaugug

SEQ ID NO: 2539304 - RNA, 19 nt, Artificial Sequence
  Description of Artificial Sequence: Synthetic oligonucleotide
ggguuuauuuuaaauuaag

SEQ ID NO: 2539305 - RNA, 19 nt, Artificial Sequence
  Description of Artificial Sequence: Synthetic oligonucleotide
aagauaccgauugaacauu

SEQ ID NO: 2539306 - RNA, 19 nt, Artificial Sequence
  Description of Artificial Sequence: Synthetic oligonucleotide
auuucucggaggaucuggg

SEQ ID NO: 2539307 - RNA, 19 nt, Artificial Sequence
  Description of Artificial Sequence: Synthetic oligonucleotide
agauaccgauugaacauuc

SEQ ID NO: 2539308 - RNA, 19 nt, Artificial Sequence
  Description of Artificial Sequence: Synthetic oligonucleotide
gagcucauugaagucauga

SEQ ID NO: 2539309 - RNA, 19 nt, Artificial Sequence
  Description of Artificial Sequence: Synthetic oligonucleotide
gaacauuccuuccacugua

SEQ ID NO: 2539310 - RNA, 19 nt, Artificial Sequence
  Description of Artificial Sequence: Synthetic oligonucleotide
cagaguuucagaggugccc

SEQ ID NO: 2539311 - RNA, 19 nt, Artificial Sequence
  Description of Artificial Sequence: Synthetic oligonucleotide
caaacgccucucuucacug

SEQ ID NO: 2539312 - RNA, 19 nt, Artificial Sequence
  Description of Artificial Sequence: Synthetic oligonucleotide
gauaccgauugaacauucc

SEQ ID NO: 2539313 - RNA, 19 nt, Artificial Sequence
  Description of Artificial Sequence: Synthetic oligonucleotide
ucaucuguguuaguggguu

SEQ ID NO: 2539314 - RNA, 19 nt, Artificial Sequence
  Description of Artificial Sequence: Synthetic oligonucleotide
cagucugucuucauuucuc

SEQ ID NO: 2539315 - RNA, 19 nt, Artificial Sequence
  Description of Artificial Sequence: Synthetic oligonucleotide
uguuccucauuaagcugcu

SEQ ID NO: 2539316 - RNA, 19 nt, Artificial Sequence
  Description of Artificial Sequence: Synthetic oligonucleotide
agcucauugaagucaugaa

SEQ ID NO: 2539317 - RNA, 19 nt, Artificial Sequence
  Description of Artificial Sequence: Synthetic oligonucleotide
cucaguugcuacagaguug

SEQ ID NO: 2539318 - RNA, 19 nt, Artificial Sequence
  Description of Artificial Sequence: Synthetic oligonucleotide
acggaguugauucuuccuu

SEQ ID NO: 2539319 - RNA, 19 nt, Artificial Sequence
  Description of Artificial Sequence: Synthetic oligonucleotide
uccucacccaauuguuuca

SEQ ID NO: 2539320 - RNA, 19 nt, Artificial Sequence
  Description of Artificial Sequence: Synthetic oligonucleotide
ugacaggagcuuguacccg

SEQ ID NO: 2539321 - RNA, 19 nt, Artificial Sequence
  Description of Artificial Sequence: Synthetic oligonucleotide
cagacaagcucugccaaag

SEQ ID NO: 2539322 - RNA, 19 nt, Artificial Sequence
  Description of Artificial Sequence: Synthetic oligonucleotide
gugacggucuucugacagg

SEQ ID NO: 2539323 - RNA, 19 nt, Artificial Sequence
  Description of Artificial Sequence: Synthetic oligonucleotide
guaaaaggcacugcugguc

SEQ ID NO: 2539324 - RNA, 19 nt, Artificial Sequence
  Description of Artificial Sequence: Synthetic oligonucleotide
ugacggucuucugacagga

SEQ ID NO: 2539325 - RNA, 19 nt, Artificial Sequence
  Description of Artificial Sequence: Synthetic oligonucleotide
ucugcacggaguugauucu

SEQ ID NO: 2539326 - RNA, 19 nt, Artificial Sequence
  Description of Artificial Sequence: Synthetic oligonucleotide
cucucgucaucuguguuag

SEQ ID NO: 2539327 - RNA, 19 nt, Artificial Sequence
  Description of Artificial Sequence: Synthetic oligonucleotide
ugggauuccuuucucucuu

SEQ ID NO: 2539328 - RNA, 19 nt, Artificial Sequence
  Description of Artificial Sequence: Synthetic oligonucleotide
ugucccugcaaacgccucu

SEQ ID NO: 2539329 - RNA, 19 nt, Artificial Sequence
  Description of Artificial Sequence: Synthetic oligonucleotide
uucuucugaugcccauuca

SEQ ID NO: 2539330 - RNA, 19 nt, Artificial Sequence
  Description of Artificial Sequence: Synthetic oligonucleotide
uacccgaugucuagccaug

SEQ ID NO: 2539331 - RNA, 19 nt, Artificial Sequence
  Description of Artificial Sequence: Synthetic oligonucleotide
augucuagccaugucaaau

SEQ ID NO: 2539332 - RNA, 19 nt, Artificial Sequence
  Description of Artificial Sequence: Synthetic oligonucleotide
uccaagugcagcagcuguc

SEQ ID NO: 2539333 - RNA, 19 nt, Artificial Sequence
  Description of Artificial Sequence: Synthetic oligonucleotide
gagugggaucuccucauca

SEQ ID NO: 2539334 - RNA, 19 nt, Artificial Sequence
  Description of Artificial Sequence: Synthetic oligonucleotide
agcugcucugccaugaacu

SEQ ID NO: 2539335 - RNA, 19 nt, Artificial Sequence
  Description of Artificial Sequence: Synthetic oligonucleotide
caagauaccgauugaacau

SEQ ID NO: 2539336 - RNA, 19 nt, Artificial Sequence
  Description of Artificial Sequence: Synthetic oligonucleotide
agcucugccaaaguggaaa

SEQ ID NO: 2539337 - RNA, 19 nt, Artificial Sequence
  Description of Artificial Sequence: Synthetic oligonucleotide
cuuguacccgaugucuagc

SEQ ID NO: 2539338 - RNA, 19 nt, Artificial Sequence
  Description of Artificial Sequence: Synthetic oligonucleotide
accaaagaacucucgucau

SEQ ID NO: 2539339 - RNA, 19 nt, Artificial Sequence
  Description of Artificial Sequence: Synthetic oligonucleotide
gacaggagcuuguacccga

SEQ ID NO: 2539340 - RNA, 19 nt, Artificial Sequence
  Description of Artificial Sequence: Synthetic oligonucleotide
aguugcuacagaguuggau

SEQ ID NO: 2539341 - RNA, 19 nt, Artificial Sequence
  Description of Artificial Sequence: Synthetic oligonucleotide
aacuucagauccacucgug

SEQ ID NO: 2539342 - RNA, 19 nt, Artificial Sequence
  Description of Artificial Sequence: Synthetic oligonucleotide
acucucgucaucuguguua

SEQ ID NO: 2539343 - RNA, 19 nt, Artificial Sequence
  Description of Artificial Sequence: Synthetic oligonucleotide
uaagcaugugcagcagaca

SEQ ID NO: 2539344 - RNA, 19 nt, Artificial Sequence
  Description of Artificial Sequence: Synthetic oligonucleotide
agugcagcagcugucccug

SEQ ID NO: 2539345 - RNA, 19 nt, Artificial Sequence
  Description of Artificial Sequence: Synthetic oligonucleotide
uggguacaauaacuucaga

SEQ ID NO: 2539346 - RNA, 19 nt, Artificial Sequence
  Description of Artificial Sequence: Synthetic oligonucleotide
gcaugugcagcagacaagc

SEQ ID NO: 2539347 - RNA, 19 nt, Artificial Sequence
  Description of Artificial Sequence: Synthetic oligonucleotide
gcauccaagcccuuuggug

SEQ ID NO: 2539348 - RNA, 19 nt, Artificial Sequence
  Description of Artificial Sequence: Synthetic oligonucleotide
cauuccuuccacuguaaaa

SEQ ID NO: 2539349 - RNA, 19 nt, Artificial Sequence
  Description of Artificial Sequence: Synthetic oligonucleotide
agaguuggauccauccuca

SEQ ID NO: 2539350 - RNA, 19 nt, Artificial Sequence
  Description of Artificial Sequence: Synthetic oligonucleotide
cugccaugaacuguuucag

SEQ ID NO: 2539351 - RNA, 19 nt, Artificial Sequence
  Description of Artificial Sequence: Synthetic oligonucleotide
uccagggaggguuuauuuu

SEQ ID NO: 2539352 - RNA, 19 nt, Artificial Sequence
  Description of Artificial Sequence: Synthetic oligonucleotide
gaguugauucuuccuugca

SEQ ID NO: 2539353 - RNA, 19 nt, Artificial Sequence
  Description of Artificial Sequence: Synthetic oligonucleotide
agucuccucagucugucuu

SEQ ID NO: 2539354 - RNA, 19 nt, Artificial Sequence
  Description of Artificial Sequence: Synthetic oligonucleotide
ugcacggaguugauucuuc

SEQ ID NO: 2539355 - RNA, 19 nt, Artificial Sequence
  Description of Artificial Sequence: Synthetic oligonucleotide
uuucucggaggaucugggu

SEQ ID NO: 2539356 - RNA, 19 nt, Artificial Sequence
  Description of Artificial Sequence: Synthetic oligonucleotide
uccucagucugucuucauu

SEQ ID NO: 2539357 - RNA, 19 nt, Artificial Sequence
  Description of Artificial Sequence: Synthetic oligonucleotide
ucagauccacucguguuuc

SEQ ID NO: 2539358 - RNA, 19 nt, Artificial Sequence
  Description of Artificial Sequence: Synthetic oligonucleotide
cucagucugucuucauuuc

SEQ ID NO: 2539359 - RNA, 19 nt, Artificial Sequence
  Description of Artificial Sequence: Synthetic oligonucleotide
uccaugggauuccuuucuc

SEQ ID NO: 2539360 - RNA, 19 nt, Artificial Sequence
  Description of Artificial Sequence: Synthetic oligonucleotide
cuuccugagugggaucucc

SEQ ID NO: 2539361 - RNA, 19 nt, Artificial Sequence
  Description of Artificial Sequence: Synthetic oligonucleotide
guguuaguggguuucuucu

SEQ ID NO: 2539362 - RNA, 19 nt, Artificial Sequence
  Description of Artificial Sequence: Synthetic oligonucleotide
aacucucgucaucuguguu

SEQ ID NO: 2539363 - RNA, 19 nt, Artificial Sequence
  Description of Artificial Sequence: Synthetic oligonucleotide
auagcuccauaauuacauu

SEQ ID NO: 2539364 - RNA, 19 nt, Artificial Sequence
  Description of Artificial Sequence: Synthetic oligonucleotide
cagcugucccugcaaacgc

SEQ ID NO: 2539365 - RNA, 19 nt, Artificial Sequence
  Description of Artificial Sequence: Synthetic oligonucleotide
gcagcagacaagcucugcc

SEQ ID NO: 2539366 - RNA, 19 nt, Artificial Sequence
  Description of Artificial Sequence: Synthetic oligonucleotide
agcauccaagcccuuuggu

SEQ ID NO: 2539367 - RNA, 19 nt, Artificial Sequence
  Description of Artificial Sequence: Synthetic oligonucleotide
cucauuucugauagcucca

SEQ ID NO: 2539368 - RNA, 19 nt, Artificial Sequence
  Description of Artificial Sequence: Synthetic oligonucleotide
ugcuuccucauuucugaua

SEQ ID NO: 2539369 - RNA, 19 nt, Artificial Sequence
  Description of Artificial Sequence: Synthetic oligonucleotide
cacugcugguccagggagg

SEQ ID NO: 2539370 - RNA, 19 nt, Artificial Sequence
  Description of Artificial Sequence: Synthetic oligonucleotide
uuggauccauccucaccca

SEQ ID NO: 2539371 - RNA, 19 nt, Artificial Sequence
  Description of Artificial Sequence: Synthetic oligonucleotide
ccugcuguuccucauuaag

SEQ ID NO: 2539372 - RNA, 19 nt, Artificial Sequence
  Description of Artificial Sequence: Synthetic oligonucleotide
ucuguguuaguggguuucu

SEQ ID NO: 2539373 - RNA, 19 nt, Artificial Sequence
  Description of Artificial Sequence: Synthetic oligonucleotide
caaaccaaagaacucucgu

SEQ ID NO: 2539374 - RNA, 19 nt, Artificial Sequence
  Description of Artificial Sequence: Synthetic oligonucleotide
ugaugcccauucagucucc

SEQ ID NO: 2539375 - RNA, 19 nt, Artificial Sequence
  Description of Artificial Sequence: Synthetic oligonucleotide
uguccaagugcagcagcug

SEQ ID NO: 2539376 - RNA, 19 nt, Artificial Sequence
  Description of Artificial Sequence: Synthetic oligonucleotide
auagacuauuuuguuuaaa

SEQ ID NO: 2539377 - RNA, 19 nt, Artificial Sequence
  Description of Artificial Sequence: Synthetic oligonucleotide
auccauccucacccaauug

SEQ ID NO: 2539378 - RNA, 19 nt, Artificial Sequence
  Description of Artificial Sequence: Synthetic oligonucleotide
caugaacuguuucagaguu

SEQ ID NO: 2539379 - RNA, 19 nt, Artificial Sequence
  Description of Artificial Sequence: Synthetic oligonucleotide
agcuccauaauuacauuuu

SEQ ID NO: 2539380 - RNA, 19 nt, Artificial Sequence
  Description of Artificial Sequence: Synthetic oligonucleotide
gaugucuagccaugucaaa

SEQ ID NO: 2539381 - RNA, 19 nt, Artificial Sequence
  Description of Artificial Sequence: Synthetic oligonucleotide
cauucaagauaccgauuga

SEQ ID NO: 2539382 - RNA, 19 nt, Artificial Sequence
  Description of Artificial Sequence: Synthetic oligonucleotide
agauccacucguguuucug

SEQ ID NO: 2539383 - RNA, 19 nt, Artificial Sequence
  Description of Artificial Sequence: Synthetic oligonucleotide
ugagcucauugaagucaug

SEQ ID NO: 2539384 - RNA, 19 nt, Artificial Sequence
  Description of Artificial Sequence: Synthetic oligonucleotide
ucuucacugcgcagcugcu

SEQ ID NO: 2539385 - RNA, 19 nt, Artificial Sequence
  Description of Artificial Sequence: Synthetic oligonucleotide
cugcaaacgccucucuuca

SEQ ID NO: 2539386 - RNA, 19 nt, Artificial Sequence
  Description of Artificial Sequence: Synthetic oligonucleotide
ucauuucugauagcuccau

SEQ ID NO: 2539387 - RNA, 19 nt, Artificial Sequence
  Description of Artificial Sequence: Synthetic oligonucleotide
ggguacaauaacuucagau

SEQ ID NO: 2539388 - RNA, 19 nt, Artificial Sequence
  Description of Artificial Sequence: Synthetic oligonucleotide
agaggugcccgggcggagc

SEQ ID NO: 2539389 - RNA, 19 nt, Artificial Sequence
  Description of Artificial Sequence: Synthetic oligonucleotide
gcuuguacccgaugucuag

SEQ ID NO: 2539390 - RNA, 19 nt, Artificial Sequence
  Description of Artificial Sequence: Synthetic oligonucleotide
caaagaacucucgucaucu

SEQ ID NO: 2539391 - RNA, 19 nt, Artificial Sequence
  Description of Artificial Sequence: Synthetic oligonucleotide
cgucaucuguguuaguggg

SEQ ID NO: 2539392 - RNA, 19 nt, Artificial Sequence
  Description of Artificial Sequence: Synthetic oligonucleotide
ggauuccuuucucucuucc

SEQ ID NO: 2539393 - RNA, 19 nt, Artificial Sequence
  Description of Artificial Sequence: Synthetic oligonucleotide
agacaagcucugccaaagu

SEQ ID NO: 2539394 - RNA, 19 nt, Artificial Sequence
  Description of Artificial Sequence: Synthetic oligonucleotide
augcccauucagucuccuc

SEQ ID NO: 2539395 - RNA, 19 nt, Artificial Sequence
  Description of Artificial Sequence: Synthetic oligonucleotide
ggaggguuuauuuuaaauu

SEQ ID NO: 2539396 - RNA, 19 nt, Artificial Sequence
  Description of Artificial Sequence: Synthetic oligonucleotide
caagugcagcagcuguccc

SEQ ID NO: 2539397 - RNA, 19 nt, Artificial Sequence
  Description of Artificial Sequence: Synthetic oligonucleotide
ucacugcgcagcugcuucc

SEQ ID NO: 2539398 - RNA, 19 nt, Artificial Sequence
  Description of Artificial Sequence: Synthetic oligonucleotide
cauucagucuccucagucu

SEQ ID NO: 2539399 - RNA, 19 nt, Artificial Sequence
  Description of Artificial Sequence: Synthetic oligonucleotide
gccaugucaaauaugucca

SEQ ID NO: 2539400 - RNA, 19 nt, Artificial Sequence
  Description of Artificial Sequence: Synthetic oligonucleotide
ugagugggaucuccucauc

SEQ ID NO: 2539401 - RNA, 19 nt, Artificial Sequence
  Description of Artificial Sequence: Synthetic oligonucleotide
cuuccucauuucugauagc

SEQ ID NO: 2539402 - RNA, 19 nt, Artificial Sequence
  Description of Artificial Sequence: Synthetic oligonucleotide
agcaugugcagcagacaag

SEQ ID NO: 2539403 - RNA, 19 nt, Artificial Sequence
  Description of Artificial Sequence: Synthetic oligonucleotide
cacuguaaaaggcacugcu

SEQ ID NO: 2539404 - RNA, 19 nt, Artificial Sequence
  Description of Artificial Sequence: Synthetic oligonucleotide
ggccauaagcaagacauuc

SEQ ID NO: 2539405 - RNA, 19 nt, Artificial Sequence
  Description of Artificial Sequence: Synthetic oligonucleotide
uggauccauccucacccaa

SEQ ID NO: 2539406 - RNA, 19 nt, Artificial Sequence
  Description of Artificial Sequence: Synthetic oligonucleotide
caucacuguccaagugcag

SEQ ID NO: 2539407 - RNA, 19 nt, Artificial Sequence
  Description of Artificial Sequence: Synthetic oligonucleotide
aacauuccuuccacuguaa

SEQ ID NO: 2539408 - RNA, 19 nt, Artificial Sequence
  Description of Artificial Sequence: Synthetic oligonucleotide
ccugcaaacgccucucuuc

SEQ ID NO: 2539409 - RNA, 19 nt, Artificial Sequence
  Description of Artificial Sequence: Synthetic oligonucleotide
cuacagaguuggauccauc

SEQ ID NO: 2539410 - RNA, 19 nt, Artificial Sequence
  Description of Artificial Sequence: Synthetic oligonucleotide
ucuucauuucucggaggau

SEQ ID NO: 2539411 - RNA, 19 nt, Artificial Sequence
  Description of Artificial Sequence: Synthetic oligonucleotide
ccgauugaacauuccuucc

SEQ ID NO: 2539412 - RNA, 19 nt, Artificial Sequence
  Description of Artificial Sequence: Synthetic oligonucleotide
cucacccaauuguuucaug

SEQ ID NO: 2539413 - RNA, 19 nt, Artificial Sequence
  Description of Artificial Sequence: Synthetic oligonucleotide
cuucugaugcccauucagu

SEQ ID NO: 2539414 - RNA, 19 nt, Artificial Sequence
  Description of Artificial Sequence: Synthetic oligonucleotide
ccaaaguggaaagugccug

SEQ ID NO: 2539415 - RNA, 19 nt, Artificial Sequence
  Description of Artificial Sequence: Synthetic oligonucleotide
uggaaagugccuggcuuuc

SEQ ID NO: 2539416 - RNA, 19 nt, Artificial Sequence
  Description of Artificial Sequence: Synthetic oligonucleotide
uccaagcccuuuggugacg

SEQ ID NO: 2539417 - RNA, 19 nt, Artificial Sequence
  Description of Artificial Sequence: Synthetic oligonucleotide
gucuucugacaggagcuug

SEQ ID NO: 2539418 - RNA, 19 nt, Artificial Sequence
  Description of Artificial Sequence: Synthetic oligonucleotide
ggaggaucuggguacaaua

SEQ ID NO: 2539419 - RNA, 19 nt, Artificial Sequence
  Description of Artificial Sequence: Synthetic oligonucleotide
ccacucguguuucugaauc

SEQ ID NO: 2539420 - RNA, 19 nt, Artificial Sequence
  Description of Artificial Sequence: Synthetic oligonucleotide
gaguuggauccauccucac

SEQ ID NO: 2539421 - RNA, 19 nt, Artificial Sequence
  Description of Artificial Sequence: Synthetic oligonucleotide
uccacucguguuucugaau

SEQ ID NO: 2539422 - RNA, 19 nt, Artificial Sequence
  Description of Artificial Sequence: Synthetic oligonucleotide
agcccuuuggugacggucu

SEQ ID NO: 2539423 - RNA, 19 nt, Artificial Sequence
  Description of Artificial Sequence: Synthetic oligonucleotide
gucuccucagucugucuuc

SEQ ID NO: 2539424 - RNA, 19 nt, Artificial Sequence
  Description of Artificial Sequence: Synthetic oligonucleotide
gaacucucgucaucugugu

SEQ ID NO: 2539425 - RNA, 19 nt, Artificial Sequence
  Description of Artificial Sequence: Synthetic oligonucleotide
cauuaagcugcucugccau

SEQ ID NO: 2539426 - RNA, 19 nt, Artificial Sequence
  Description of Artificial Sequence: Synthetic oligonucleotide
uauguccaugggauuccuu

SEQ ID NO: 2539427 - RNA, 19 nt, Artificial Sequence
  Description of Artificial Sequence: Synthetic oligonucleotide
gagcuuguacccgaugucu

SEQ ID NO: 2539428 - RNA, 19 nt, Artificial Sequence
  Description of Artificial Sequence: Synthetic oligonucleotide
aguagcauccaagcccuuu

SEQ ID NO: 2539429 - RNA, 19 nt, Artificial Sequence
  Description of Artificial Sequence: Synthetic oligonucleotide
cuuuggugacggucuucug

SEQ ID NO: 2539430 - RNA, 19 nt, Artificial Sequence
  Description of Artificial Sequence: Synthetic oligonucleotide
agggaccugcuguuccuca

SEQ ID NO: 2539431 - RNA, 19 nt, Artificial Sequence
  Description of Artificial Sequence: Synthetic oligonucleotide
gaccugcuguuccucauua

SEQ ID NO: 2539432 - RNA, 19 nt, Artificial Sequence
  Description of Artificial Sequence: Synthetic oligonucleotide
uggugacggucuucugaca

SEQ ID NO: 2539433 - RNA, 19 nt, Artificial Sequence
  Description of Artificial Sequence: Synthetic oligonucleotide
agggaggguuuauuuuaaa

SEQ ID NO: 2539434 - RNA, 19 nt, Artificial Sequence
  Description of Artificial Sequence: Synthetic oligonucleotide
ccaauuguuucaugauguc

SEQ ID NO: 2539435 - RNA, 19 nt, Artificial Sequence
  Description of Artificial Sequence: Synthetic oligonucleotide
ggagcuuguacccgauguc

SEQ ID NO: 2539436 - RNA, 19 nt, Artificial Sequence
  Description of Artificial Sequence: Synthetic oligonucleotide
auauguccaugggauuccu

SEQ ID NO: 2539437 - RNA, 19 nt, Artificial Sequence
  Description of Artificial Sequence: Synthetic oligonucleotide
gcucauugaagucaugaau

SEQ ID NO: 2539438 - RNA, 19 nt, Artificial Sequence
  Description of Artificial Sequence: Synthetic oligonucleotide
ggaucuggguacaauaacu

SEQ ID NO: 2539439 - RNA, 19 nt, Artificial Sequence
  Description of Artificial Sequence: Synthetic oligonucleotide
cccaauuguuucaugaugu

SEQ ID NO: 2539440 - RNA, 19 nt, Artificial Sequence
  Description of Artificial Sequence: Synthetic oligonucleotide
ccucauuaagcugcucugc

SEQ ID NO: 2539441 - RNA, 19 nt, Artificial Sequence
  Description of Artificial Sequence: Synthetic oligonucleotide
gcacggaguugauucuucc

SEQ ID NO: 2539442 - RNA, 19 nt, Artificial Sequence
  Description of Artificial Sequence: Synthetic oligonucleotide
ccgaugucuagccauguca

SEQ ID NO: 2539443 - RNA, 19 nt, Artificial Sequence
  Description of Artificial Sequence: Synthetic oligonucleotide
guacccgaugucuagccau

SEQ ID NO: 2539444 - RNA, 19 nt, Artificial Sequence
  Description of Artificial Sequence: Synthetic oligonucleotide
gucuagccaugucaaauau

SEQ ID NO: 2539445 - RNA, 19 nt, Artificial Sequence
  Description of Artificial Sequence: Synthetic oligonucleotide
ugcccgggcggagccaggg

SEQ ID NO: 2539446 - RNA, 19 nt, Artificial Sequence
  Description of Artificial Sequence: Synthetic oligonucleotide
ccaaagaacucucgucauc

SEQ ID NO: 2539447 - RNA, 19 nt, Artificial Sequence
  Description of Artificial Sequence: Synthetic oligonucleotide
guccaugggauuccuuucu

SEQ ID NO: 2539448 - RNA, 19 nt, Artificial Sequence
  Description of Artificial Sequence: Synthetic oligonucleotide
cagggaggguuuauuuuaa

SEQ ID NO: 2539449 - RNA, 19 nt, Artificial Sequence
  Description of Artificial Sequence: Synthetic oligonucleotide
gacggucuucugacaggag

SEQ ID NO: 2539450 - RNA, 19 nt, Artificial Sequence
  Description of Artificial Sequence: Synthetic oligonucleotide
gugggaucuccucaucacu

SEQ ID NO: 2539451 - RNA, 19 nt, Artificial Sequence
  Description of Artificial Sequence: Synthetic oligonucleotide
cugcgcagcugcuuccuca

SEQ ID NO: 2539452 - RNA, 19 nt, Artificial Sequence
  Description of Artificial Sequence: Synthetic oligonucleotide
caggagcuuguacccgaug

SEQ ID NO: 2539453 - RNA, 19 nt, Artificial Sequence
  Description of Artificial Sequence: Synthetic oligonucleotide
accugcuguuccucauuaa

SEQ ID NO: 2539454 - RNA, 19 nt, Artificial Sequence
  Description of Artificial Sequence: Synthetic oligonucleotide
cggaguugauucuuccuug

SEQ ID NO: 2539455 - RNA, 19 nt, Artificial Sequence
  Description of Artificial Sequence: Synthetic oligonucleotide
caaauauguccaugggauu

SEQ ID NO: 2539456 - RNA, 19 nt, Artificial Sequence
  Description of Artificial Sequence: Synthetic oligonucleotide
cugucccugcaaacgccuc

SEQ ID NO: 2539457 - RNA, 19 nt, Artificial Sequence
  Description of Artificial Sequence: Synthetic oligonucleotide
auauuuagguagggccaua

SEQ ID NO: 2539458 - RNA, 19 nt, Artificial Sequence
  Description of Artificial Sequence: Synthetic oligonucleotide
guggaaagugccuggcuuu

SEQ ID NO: 2539459 - RNA, 19 nt, Artificial Sequence
  Description of Artificial Sequence: Synthetic oligonucleotide
ccugagugggaucuccuca

SEQ ID NO: 2539460 - RNA, 19 nt, Artificial Sequence
  Description of Artificial Sequence: Synthetic oligonucleotide
ucuuccugagugggaucuc

SEQ ID NO: 2539461 - RNA, 19 nt, Artificial Sequence
  Description of Artificial Sequence: Synthetic oligonucleotide
agcuuguacccgaugucua

SEQ ID NO: 2539462 - RNA, 19 nt, Artificial Sequence
  Description of Artificial Sequence: Synthetic oligonucleotide
ccagggaggguuuauuuua

SEQ ID NO: 2539463 - RNA, 19 nt, Artificial Sequence
  Description of Artificial Sequence: Synthetic oligonucleotide
augaugucaucaggaucaa

SEQ ID NO: 2539464 - RNA, 19 nt, Artificial Sequence
  Description of Artificial Sequence: Synthetic oligonucleotide
gcaaacgccucucuucacu

SEQ ID NO: 2539465 - RNA, 19 nt, Artificial Sequence
  Description of Artificial Sequence: Synthetic oligonucleotide
augaacuguuucagaguuu

SEQ ID NO: 2539466 - RNA, 19 nt, Artificial Sequence
  Description of Artificial Sequence: Synthetic oligonucleotide
cacggaguugauucuuccu

SEQ ID NO: 2539467 - RNA, 19 nt, Artificial Sequence
  Description of Artificial Sequence: Synthetic oligonucleotide
cugagugggaucuccucau

SEQ ID NO: 2539468 - RNA, 19 nt, Artificial Sequence
  Description of Artificial Sequence: Synthetic oligonucleotide
cacccaauuguuucaugau

SEQ ID NO: 2539469 - RNA, 19 nt, Artificial Sequence
  Description of Artificial Sequence: Synthetic oligonucleotide
cacucguguuucugaaucu

SEQ ID NO: 2539470 - RNA, 19 nt, Artificial Sequence
  Description of Artificial Sequence: Synthetic oligonucleotide
gacauucaagauaccgauu

SEQ ID NO: 2539471 - RNA, 19 nt, Artificial Sequence
  Description of Artificial Sequence: Synthetic oligonucleotide
ccaagcccuuuggugacgg

SEQ ID NO: 2539472 - RNA, 19 nt, Artificial Sequence
  Description of Artificial Sequence: Synthetic oligonucleotide
gggauuccuuucucucuuc

SEQ ID NO: 2539473 - RNA, 19 nt, Artificial Sequence
  Description of Artificial Sequence: Synthetic oligonucleotide
acccgaugucuagccaugu

SEQ ID NO: 2539474 - RNA, 19 nt, Artificial Sequence
  Description of Artificial Sequence: Synthetic oligonucleotide
ccacuguaaaaggcacugc

SEQ ID NO: 2539475 - RNA, 19 nt, Artificial Sequence
  Description of Artificial Sequence: Synthetic oligonucleotide
gcuuuccagggaccugcug

SEQ ID NO: 2539476 - RNA, 19 nt, Artificial Sequence
  Description of Artificial Sequence: Synthetic oligonucleotide
gccucucuucacugcgcag

SEQ ID NO: 2539477 - RNA, 19 nt, Artificial Sequence
  Description of Artificial Sequence: Synthetic oligonucleotide
cauccucacccaauuguuu

SEQ ID NO: 2539478 - RNA, 19 nt, Artificial Sequence
  Description of Artificial Sequence: Synthetic oligonucleotide
ucggaggaucuggguacaa

SEQ ID NO: 2539479 - RNA, 19 nt, Artificial Sequence
  Description of Artificial Sequence: Synthetic oligonucleotide
cgaugucuagccaugucaa

SEQ ID NO: 2539480 - RNA, 19 nt, Artificial Sequence
  Description of Artificial Sequence: Synthetic oligonucleotide
caugugcagcagacaagcu

SEQ ID NO: 2539481 - RNA, 19 nt, Artificial Sequence
  Description of Artificial Sequence: Synthetic oligonucleotide
gcaagacauucaagauacc

SEQ ID NO: 2539482 - RNA, 19 nt, Artificial Sequence
  Description of Artificial Sequence: Synthetic oligonucleotide
gucaucuguguuagugggu

SEQ ID NO: 2539483 - RNA, 19 nt, Artificial Sequence
  Description of Artificial Sequence: Synthetic oligonucleotide
acaggagcuuguacccgau

SEQ ID NO: 2539484 - RNA, 19 nt, Artificial Sequence
  Description of Artificial Sequence: Synthetic oligonucleotide
gaugcccauucagucuccu

SEQ ID NO: 2539485 - RNA, 19 nt, Artificial Sequence
  Description of Artificial Sequence: Synthetic oligonucleotide
ccucagucugucuucauuu

SEQ ID NO: 2539486 - RNA, 19 nt, Artificial Sequence
  Description of Artificial Sequence: Synthetic oligonucleotide
cagaggugcccgggcggag

SEQ ID NO: 2539487 - RNA, 19 nt, Artificial Sequence
  Description of Artificial Sequence: Synthetic oligonucleotide
caguugcuacagaguugga

SEQ ID NO: 2539488 - RNA, 19 nt, Artificial Sequence
  Description of Artificial Sequence: Synthetic oligonucleotide
gccaaaguggaaagugccu

SEQ ID NO: 2539489 - RNA, 19 nt, Artificial Sequence
  Description of Artificial Sequence: Synthetic oligonucleotide
cccgaugucuagccauguc

SEQ ID NO: 2539490 - RNA, 19 nt, Artificial Sequence
  Description of Artificial Sequence: Synthetic oligonucleotide
ccaugggauuccuuucucu

SEQ ID NO: 2539491 - RNA, 19 nt, Artificial Sequence
  Description of Artificial Sequence: Synthetic oligonucleotide
ggauccauccucacccaau

SEQ ID NO: 2539492 - RNA, 19 nt, Artificial Sequence
  Description of Artificial Sequence: Synthetic oligonucleotide
cugcuuccucauuucugau

SEQ ID NO: 2539493 - RNA, 19 nt, Artificial Sequence
  Description of Artificial Sequence: Synthetic oligonucleotide
cagauccacucguguuucu

SEQ ID NO: 2539494 - RNA, 19 nt, Artificial Sequence
  Description of Artificial Sequence: Synthetic oligonucleotide
cggucuucugacaggagcu

SEQ ID NO: 2539495 - RNA, 19 nt, Artificial Sequence
  Description of Artificial Sequence: Synthetic oligonucleotide
gccuggcuuuccagggacc

SEQ ID NO: 2539496 - RNA, 19 nt, Artificial Sequence
  Description of Artificial Sequence: Synthetic oligonucleotide
ccauccucacccaauuguu

SEQ ID NO: 2539497 - RNA, 19 nt, Artificial Sequence
  Description of Artificial Sequence: Synthetic oligonucleotide
cggagccagggcucaguug

SEQ ID NO: 2539498 - RNA, 19 nt, Artificial Sequence
  Description of Artificial Sequence: Synthetic oligonucleotide
ccgggcggagccagggcuc

SEQ ID NO: 2539499 - RNA, 19 nt, Artificial Sequence
  Description of Artificial Sequence: Synthetic oligonucleotide
gugcccgggcggagccagg

SEQ ID NO: 2539500 - RNA, 19 nt, Artificial Sequence
  Description of Artificial Sequence: Synthetic oligonucleotide
aggugcccgggcggagcca

SEQ ID NO: 2539501 - RNA, 19 nt, Artificial Sequence
  Description of Artificial Sequence: Synthetic oligonucleotide
ggaccugcuguuccucauu

SEQ ID NO: 2539502 - RNA, 19 nt, Artificial Sequence
  Description of Artificial Sequence: Synthetic oligonucleotide
caagcccuuuggugacggu

SEQ ID NO: 2539503 - RNA, 19 nt, Artificial Sequence
  Description of Artificial Sequence: Synthetic oligonucleotide
cuguguuaguggguuucuu

SEQ ID NO: 2539504 - RNA, 19 nt, Artificial Sequence
  Description of Artificial Sequence: Synthetic oligonucleotide
cugcacggaguugauucuu

SEQ ID NO: 2539505 - RNA, 19 nt, Artificial Sequence
  Description of Artificial Sequence: Synthetic oligonucleotide
ggucuucugacaggagcuu

SEQ ID NO: 2539506 - RNA, 19 nt, Artificial Sequence
  Description of Artificial Sequence: Synthetic oligonucleotide
cuccucagucugucuucau

SEQ ID NO: 2539507 - RNA, 19 nt, Artificial Sequence
  Description of Artificial Sequence: Synthetic oligonucleotide
cccauucagucuccucagu

SEQ ID NO: 2539508 - RNA, 19 nt, Artificial Sequence
  Description of Artificial Sequence: Synthetic oligonucleotide
cccgggcggagccagggcu

SEQ ID NO: 2539509 - RNA, 19 nt, Artificial Sequence
  Description of Artificial Sequence: Synthetic oligonucleotide
gggcggagccagggcucag

SEQ ID NO: 2539510 - RNA, 19 nt, Artificial Sequence
  Description of Artificial Sequence: Synthetic oligonucleotide
gcggagccagggcucaguu

SEQ ID NO: 2539511 - RNA, 19 nt, Artificial Sequence
  Description of Artificial Sequence: Synthetic oligonucleotide
ggcuuuccagggaccugcu

SEQ ID NO: 2539512 - RNA, 19 nt, Artificial Sequence
  Description of Artificial Sequence: Synthetic oligonucleotide
gggccauaagcaagacauu

SEQ ID NO: 2539513 - RNA, 19 nt, Artificial Sequence
  Description of Artificial Sequence: Synthetic oligonucleotide
ggcggagccagggcucagu

SEQ ID NO: 2539514 - RNA, 19 nt, Artificial Sequence
  Description of Artificial Sequence: Synthetic oligonucleotide
ccucacccaauuguuucau

SEQ ID NO: 2539515 - RNA, 19 nt, Artificial Sequence
  Description of Artificial Sequence: Synthetic oligonucleotide
caguagcauccaagcccuu

SEQ ID NO: 2539516 - RNA, 19 nt, Artificial Sequence
  Description of Artificial Sequence: Synthetic oligonucleotide
gcugguccagggaggguuu

SEQ ID NO: 2539517 - RNA, 19 nt, Artificial Sequence
  Description of Artificial Sequence: Synthetic oligonucleotide
cccugcaaacgccucucuu

SEQ ID NO: 2539518 - RNA, 19 nt, Artificial Sequence
  Description of Artificial Sequence: Synthetic oligonucleotide
cggaggaucuggguacaau

SEQ ID NO: 2539519 - RNA, 19 nt, Artificial Sequence
  Description of Artificial Sequence: Synthetic oligonucleotide
gcgcagcugcuuccucauu

SEQ ID NO: 2539520 - RNA, 19 nt, Artificial Sequence
  Description of Artificial Sequence: Synthetic oligonucleotide
ugaaagaugaacaagauau

SEQ ID NO: 2539521 - RNA, 19 nt, Artificial Sequence
  Description of Artificial Sequence: Synthetic oligonucleotide
uauucuaauaacaugguca

SEQ ID NO: 2539522 - RNA, 19 nt, Artificial Sequence
  Description of Artificial Sequence: Synthetic oligonucleotide
aguaguauauucuaauaac

SEQ ID NO: 2539523 - RNA, 19 nt, Artificial Sequence
  Description of Artificial Sequence: Synthetic oligonucleotide
guauauucuaauaacaugg

SEQ ID NO: 2539524 - RNA, 19 nt, Artificial Sequence
  Description of Artificial Sequence: Synthetic oligonucleotide
aacaagauaucugaacucc

SEQ ID NO: 2539525 - RNA, 19 nt, Artificial Sequence
  Description of Artificial Sequence: Synthetic oligonucleotide
ugugcugguaagcagaugg

SEQ ID NO: 2539526 - RNA, 19 nt, Artificial Sequence
  Description of Artificial Sequence: Synthetic oligonucleotide
auuuguaaguaguauauuc

SEQ ID NO: 2539527 - RNA, 19 nt, Artificial Sequence
  Description of Artificial Sequence: Synthetic oligonucleotide
aaguaauagaagcugaaug

SEQ ID NO: 2539528 - RNA, 19 nt, Artificial Sequence
  Description of Artificial Sequence: Synthetic oligonucleotide
acuuucugaacuuagacug

SEQ ID NO: 2539529 - RNA, 19 nt, Artificial Sequence
  Description of Artificial Sequence: Synthetic oligonucleotide
auaguuaacagccauguca

SEQ ID NO: 2539530 - RNA, 19 nt, Artificial Sequence
  Description of Artificial Sequence: Synthetic oligonucleotide
uguuguaaugaacauacca

SEQ ID NO: 2539531 - RNA, 19 nt, Artificial Sequence
  Description of Artificial Sequence: Synthetic oligonucleotide
ugaacauaccaccagaacu

SEQ ID NO: 2539532 - RNA, 19 nt, Artificial Sequence
  Description of Artificial Sequence: Synthetic oligonucleotide
ucaaaugcuacacaguaga

SEQ ID NO: 2539533 - RNA, 19 nt, Artificial Sequence
  Description of Artificial Sequence: Synthetic oligonucleotide
gauggaagggaaaacaugg

SEQ ID NO: 2539534 - RNA, 19 nt, Artificial Sequence
  Description of Artificial Sequence: Synthetic oligonucleotide
uuuuacaugccauugccag

SEQ ID NO: 2539535 - RNA, 19 nt, Artificial Sequence
  Description of Artificial Sequence: Synthetic oligonucleotide
aacuguauggaaguaauag

SEQ ID NO: 2539536 - RNA, 19 nt, Artificial Sequence
  Description of Artificial Sequence: Synthetic oligonucleotide
ucucaguaaauuuuacugg

SEQ ID NO: 2539537 - RNA, 19 nt, Artificial Sequence
  Description of Artificial Sequence: Synthetic oligonucleotide
aguaauagaagcugaaugu

SEQ ID NO: 2539538 - RNA, 19 nt, Artificial Sequence
  Description of Artificial Sequence: Synthetic oligonucleotide
uaguugauggacaaaacug

SEQ ID NO: 2539539 - RNA, 19 nt, Artificial Sequence
  Description of Artificial Sequence: Synthetic oligonucleotide
accuguagaaaauuccgcc

SEQ ID NO: 2539540 - RNA, 19 nt, Artificial Sequence
  Description of Artificial Sequence: Synthetic oligonucleotide
aagauaucugaacuccagg

SEQ ID NO: 2539541 - RNA, 19 nt, Artificial Sequence
  Description of Artificial Sequence: Synthetic oligonucleotide
augaacaagauaucugaac

SEQ ID NO: 2539542 - RNA, 19 nt, Artificial Sequence
  Description of Artificial Sequence: Synthetic oligonucleotide
aaguaguauauucuaauaa

SEQ ID NO: 2539543 - RNA, 19 nt, Artificial Sequence
  Description of Artificial Sequence: Synthetic oligonucleotide
ucucacaacuuuaucacag

SEQ ID NO: 2539544 - RNA, 19 nt, Artificial Sequence
  Description of Artificial Sequence: Synthetic oligonucleotide
uuaguugauggacaaaacu

SEQ ID NO: 2539545 - RNA, 19 nt, Artificial Sequence
  Description of Artificial Sequence: Synthetic oligonucleotide
cucaguaaauuuuacuggg

SEQ ID NO: 2539546 - RNA, 19 nt, Artificial Sequence
  Description of Artificial Sequence: Synthetic oligonucleotide
uuguaaugaacauaccacc

SEQ ID NO: 2539547 - RNA, 19 nt, Artificial Sequence
  Description of Artificial Sequence: Synthetic oligonucleotide
gaaauuucagcagagugcc

SEQ ID NO: 2539548 - RNA, 19 nt, Artificial Sequence
  Description of Artificial Sequence: Synthetic oligonucleotide
uaauagaagcugaaugucc

SEQ ID NO: 2539549 - RNA, 19 nt, Artificial Sequence
  Description of Artificial Sequence: Synthetic oligonucleotide
gaaaauuccgcccucccag

SEQ ID NO: 2539550 - RNA, 19 nt, Artificial Sequence
  Description of Artificial Sequence: Synthetic oligonucleotide
ugaaccuguagaaaauucc

SEQ ID NO: 2539551 - RNA, 19 nt, Artificial Sequence
  Description of Artificial Sequence: Synthetic oligonucleotide
cucucaguaaauuuuacug

SEQ ID NO: 2539552 - RNA, 19 nt, Artificial Sequence
  Description of Artificial Sequence: Synthetic oligonucleotide
ugauggacaaaacuguaug

SEQ ID NO: 2539553 - RNA, 19 nt, Artificial Sequence
  Description of Artificial Sequence: Synthetic oligonucleotide
ucgaucaaaugcuacacag

SEQ ID NO: 2539554 - RNA, 19 nt, Artificial Sequence
  Description of Artificial Sequence: Synthetic oligonucleotide
gauggacaaaacuguaugg

SEQ ID NO: 2539555 - RNA, 19 nt, Artificial Sequence
  Description of Artificial Sequence: Synthetic oligonucleotide
cugaacuuagacuggaucc

SEQ ID NO: 2539556 - RNA, 19 nt, Artificial Sequence
  Description of Artificial Sequence: Synthetic oligonucleotide
  modified_base (10)..(10): a, c, u, g, unknown or other
ugaggagggnuaaaugugc

SEQ ID NO: 2539557 - RNA, 19 nt, Artificial Sequence
  Description of Artificial Sequence: Synthetic oligonucleotide
ucaccaaacagucaucuga

SEQ ID NO: 2539558 - RNA, 19 nt, Artificial Sequence
  Description of Artificial Sequence: Synthetic oligonucleotide
agaugaacaagauaucuga

SEQ ID NO: 2539559 - RNA, 19 nt, Artificial Sequence
  Description of Artificial Sequence: Synthetic oligonucleotide
uguaaugaacauaccacca

SEQ ID NO: 2539560 - RNA, 19 nt, Artificial Sequence
  Description of Artificial Sequence: Synthetic oligonucleotide
ucccaguucgaucaaaugc

SEQ ID NO: 2539561 - RNA, 19 nt, Artificial Sequence
  Description of Artificial Sequence: Synthetic oligonucleotide
ugccagaacaaauuguucc

SEQ ID NO: 2539562 - RNA, 19 nt, Artificial Sequence
  Description of Artificial Sequence: Synthetic oligonucleotide
uacucucacaacuuuauca

SEQ ID NO: 2539563 - RNA, 19 nt, Artificial Sequence
  Description of Artificial Sequence: Synthetic oligonucleotide
aagugagguaucuaguugu

SEQ ID NO: 2539564 - RNA, 19 nt, Artificial Sequence
  Description of Artificial Sequence: Synthetic oligonucleotide
auauucuaauaacaugguc

SEQ ID NO: 2539565 - RNA, 19 nt, Artificial Sequence
  Description of Artificial Sequence: Synthetic oligonucleotide
  modified_base (12)..(12): a, c, u, g, unknown or other
ucugaggagggnuaaaugu

SEQ ID NO: 2539566 - RNA, 19 nt, Artificial Sequence
  Description of Artificial Sequence: Synthetic oligonucleotide
uucgaagacaccauacucu

SEQ ID NO: 2539567 - RNA, 19 nt, Artificial Sequence
  Description of Artificial Sequence: Synthetic oligonucleotide
ucuucugacgcacugagua

SEQ ID NO: 2539568 - RNA, 19 nt, Artificial Sequence
  Description of Artificial Sequence: Synthetic oligonucleotide
uaacucuccacucucugag

SEQ ID NO: 2539569 - RNA, 19 nt, Artificial Sequence
  Description of Artificial Sequence: Synthetic oligonucleotide
auaucugaacuccaggucu

SEQ ID NO: 2539570 - RNA, 19 nt, Artificial Sequence
  Description of Artificial Sequence: Synthetic oligonucleotide
gaaccuguagaaaauuccg

SEQ ID NO: 2539571 - RNA, 19 nt, Artificial Sequence
  Description of Artificial Sequence: Synthetic oligonucleotide
agaacaaauuguuccauca

SEQ ID NO: 2539572 - RNA, 19 nt, Artificial Sequence
  Description of Artificial Sequence: Synthetic oligonucleotide
ugucagaaauuucagcaga

SEQ ID NO: 2539573 - RNA, 19 nt, Artificial Sequence
  Description of Artificial Sequence: Synthetic oligonucleotide
agauaagugucccagaauu

SEQ ID NO: 2539574 - RNA, 19 nt, Artificial Sequence
  Description of Artificial Sequence: Synthetic oligonucleotide
aauuuuacugggcgaucuc

SEQ ID NO: 2539575 - RNA, 19 nt, Artificial Sequence
  Description of Artificial Sequence: Synthetic oligonucleotide
gaagacaccauacucucac

SEQ ID NO: 2539576 - RNA, 19 nt, Artificial Sequence
  Description of Artificial Sequence: Synthetic oligonucleotide
gaacauaccaccagaacug

SEQ ID NO: 2539577 - RNA, 19 nt, Artificial Sequence
  Description of Artificial Sequence: Synthetic oligonucleotide
uguaaguaguauauucuaa

SEQ ID NO: 2539578 - RNA, 19 nt, Artificial Sequence
  Description of Artificial Sequence: Synthetic oligonucleotide
uuaugcaucuugaugugcu

SEQ ID NO: 2539579 - RNA, 19 nt, Artificial Sequence
  Description of Artificial Sequence: Synthetic oligonucleotide
aaccuguagaaaauuccgc

SEQ ID NO: 2539580 - RNA, 19 nt, Artificial Sequence
  Description of Artificial Sequence: Synthetic oligonucleotide
augaacauaccaccagaac

SEQ ID NO: 2539581 - RNA, 19 nt, Artificial Sequence
  Description of Artificial Sequence: Synthetic oligonucleotide
guuguaaugaacauaccac

SEQ ID NO: 2539582 - RNA, 19 nt, Artificial Sequence
  Description of Artificial Sequence: Synthetic oligonucleotide
agauaucugaacuccaggu

SEQ ID NO: 2539583 - RNA, 19 nt, Artificial Sequence
  Description of Artificial Sequence: Synthetic oligonucleotide
ugaugugcugguaagcaga

SEQ ID NO: 2539584 - RNA, 19 nt, Artificial Sequence
  Description of Artificial Sequence: Synthetic oligonucleotide
aaaugcuacacaguagaca

SEQ ID NO: 2539585 - RNA, 19 nt, Artificial Sequence
  Description of Artificial Sequence: Synthetic oligonucleotide
aguaaauuuuacugggcga

SEQ ID NO: 2539586 - RNA, 19 nt, Artificial Sequence
  Description of Artificial Sequence: Synthetic oligonucleotide
caacuggugcacaaguucg

SEQ ID NO: 2539587 - RNA, 19 nt, Artificial Sequence
  Description of Artificial Sequence: Synthetic oligonucleotide
cagauuucaccaaacaguc

SEQ ID NO: 2539588 - RNA, 19 nt, Artificial Sequence
  Description of Artificial Sequence: Synthetic oligonucleotide
cuaauaacauggucagugc

SEQ ID NO: 2539589 - RNA, 19 nt, Artificial Sequence
  Description of Artificial Sequence: Synthetic oligonucleotide
ucuaguugugccuuuaguu

SEQ ID NO: 2539590 - RNA, 19 nt, Artificial Sequence
  Description of Artificial Sequence: Synthetic oligonucleotide
agugcuaccuguuguaaug

SEQ ID NO: 2539591 - RNA, 19 nt, Artificial Sequence
  Description of Artificial Sequence: Synthetic oligonucleotide
aaauuuuacugggcgaucu

SEQ ID NO: 2539592 - RNA, 19 nt, Artificial Sequence
  Description of Artificial Sequence: Synthetic oligonucleotide
guagcuuucuuuuggcucc

SEQ ID NO: 2539593 - RNA, 19 nt, Artificial Sequence
  Description of Artificial Sequence: Synthetic oligonucleotide
gaucaaaugcuacacagua

SEQ ID NO: 2539594 - RNA, 19 nt, Artificial Sequence
  Description of Artificial Sequence: Synthetic oligonucleotide
ucgcaguguagccaggagg

SEQ ID NO: 2539595 - RNA, 19 nt, Artificial Sequence
  Description of Artificial Sequence: Synthetic oligonucleotide
cugaguagcuuucuuuugg

SEQ ID NO: 2539596 - RNA, 19 nt, Artificial Sequence
  Description of Artificial Sequence: Synthetic oligonucleotide
uuuaguugauggacaaaac

SEQ ID NO: 2539597 - RNA, 19 nt, Artificial Sequence
  Description of Artificial Sequence: Synthetic oligonucleotide
uuucauaguuaacagccau

SEQ ID NO: 2539598 - RNA, 19 nt, Artificial Sequence
  Description of Artificial Sequence: Synthetic oligonucleotide
acuguauggaaguaauaga

SEQ ID NO: 2539599 - RNA, 19 nt, Artificial Sequence
  Description of Artificial Sequence: Synthetic oligonucleotide
agacagaagauaagugucc

SEQ ID NO: 2539600 - RNA, 19 nt, Artificial Sequence
  Description of Artificial Sequence: Synthetic oligonucleotide
acaccauacucucacaacu

SEQ ID NO: 2539601 - RNA, 19 nt, Artificial Sequence
  Description of Artificial Sequence: Synthetic oligonucleotide
ccuguuguaaugaacauac

SEQ ID NO: 2539602 - RNA, 19 nt, Artificial Sequence
  Description of Artificial Sequence: Synthetic oligonucleotide
aaaacuguauggaaguaau

SEQ ID NO: 2539603 - RNA, 19 nt, Artificial Sequence
  Description of Artificial Sequence: Synthetic oligonucleotide
aguucgaucaaaugcuaca

SEQ ID NO: 2539604 - RNA, 19 nt, Artificial Sequence
  Description of Artificial Sequence: Synthetic oligonucleotide
aauuccgcccucccaguuc

SEQ ID NO: 2539605 - RNA, 19 nt, Artificial Sequence
  Description of Artificial Sequence: Synthetic oligonucleotide
aacauggucagugcuaccu

SEQ ID NO: 2539606 - RNA, 19 nt, Artificial Sequence
  Description of Artificial Sequence: Synthetic oligonucleotide
gauaucugaacuccagguc

SEQ ID NO: 2539607 - RNA, 19 nt, Artificial Sequence
  Description of Artificial Sequence: Synthetic oligonucleotide
caagauaucugaacuccag

SEQ ID NO: 2539608 - RNA, 19 nt, Artificial Sequence
  Description of Artificial Sequence: Synthetic oligonucleotide
cugccugcagcaaugagag

SEQ ID NO: 2539609 - RNA, 19 nt, Artificial Sequence
  Description of Artificial Sequence: Synthetic oligonucleotide
acuuagacuggauccuaac

SEQ ID NO: 2539610 - RNA, 19 nt, Artificial Sequence
  Description of Artificial Sequence: Synthetic oligonucleotide
agucaucugaaccuguaga

SEQ ID NO: 2539611 - RNA, 19 nt, Artificial Sequence
  Description of Artificial Sequence: Synthetic oligonucleotide
uuguaaguaguauauucua

SEQ ID NO: 2539612 - RNA, 19 nt, Artificial Sequence
  Description of Artificial Sequence: Synthetic oligonucleotide
cuuucugaacuuagacugg

SEQ ID NO: 2539613 - RNA, 19 nt, Artificial Sequence
  Description of Artificial Sequence: Synthetic oligonucleotide
guacuuucugaacuuagac

SEQ ID NO: 2539614 - RNA, 19 nt, Artificial Sequence
  Description of Artificial Sequence: Synthetic oligonucleotide
cagaacugaaagaugaaca

SEQ ID NO: 2539615 - RNA, 19 nt, Artificial Sequence
  Description of Artificial Sequence: Synthetic oligonucleotide
gaacaagauaucugaacuc

SEQ ID NO: 2539616 - RNA, 19 nt, Artificial Sequence
  Description of Artificial Sequence: Synthetic oligonucleotide
uaguugugccuuuaguuga

SEQ ID NO: 2539617 - RNA, 19 nt, Artificial Sequence
  Description of Artificial Sequence: Synthetic oligonucleotide
cuuucguccucuucugacg

SEQ ID NO: 2539618 - RNA, 19 nt, Artificial Sequence
  Description of Artificial Sequence: Synthetic oligonucleotide
uuaacagccaugucagaaa

SEQ ID NO: 2539619 - RNA, 19 nt, Artificial Sequence
  Description of Artificial Sequence: Synthetic oligonucleotide
guaguauauucuaauaaca

SEQ ID NO: 2539620 - RNA, 19 nt, Artificial Sequence
  Description of Artificial Sequence: Synthetic oligonucleotide
gaagauaagugucccagaa

SEQ ID NO: 2539621 - RNA, 19 nt, Artificial Sequence
  Description of Artificial Sequence: Synthetic oligonucleotide
ugaguagcuuucuuuuggc

SEQ ID NO: 2539622 - RNA, 19 nt, Artificial Sequence
  Description of Artificial Sequence: Synthetic oligonucleotide
cuuuaucacagcugccugc

SEQ ID NO: 2539623 - RNA, 19 nt, Artificial Sequence
  Description of Artificial Sequence: Synthetic oligonucleotide
uggacaaaacuguauggaa

SEQ ID NO: 2539624 - RNA, 19 nt, Artificial Sequence
  Description of Artificial Sequence: Synthetic oligonucleotide
cagaagauaagugucccag

SEQ ID NO: 2539625 - RNA, 19 nt, Artificial Sequence
  Description of Artificial Sequence: Synthetic oligonucleotide
aguucgaagacaccauacu

SEQ ID NO: 2539626 - RNA, 19 nt, Artificial Sequence
  Description of Artificial Sequence: Synthetic oligonucleotide
uagaagugagguaucuagu

SEQ ID NO: 2539627 - RNA, 19 nt, Artificial Sequence
  Description of Artificial Sequence: Synthetic oligonucleotide
auaagugucccagaauucu

SEQ ID NO: 2539628 - RNA, 19 nt, Artificial Sequence
  Description of Artificial Sequence: Synthetic oligonucleotide
  modified_base (11)..(11): a, c, u, g, unknown or other
cugaggagggnuaaaugug

SEQ ID NO: 2539629 - RNA, 19 nt, Artificial Sequence
  Description of Artificial Sequence: Synthetic oligonucleotide
uugaugugcugguaagcag

SEQ ID NO: 2539630 - RNA, 19 nt, Artificial Sequence
  Description of Artificial Sequence: Synthetic oligonucleotide
ugugccuuuaguugaugga

SEQ ID NO: 2539631 - RNA, 19 nt, Artificial Sequence
  Description of Artificial Sequence: Synthetic oligonucleotide
uucgaucaaaugcuacaca

SEQ ID NO: 2539632 - RNA, 19 nt, Artificial Sequence
  Description of Artificial Sequence: Synthetic oligonucleotide
guagacagaagauaagugu

SEQ ID NO: 2539633 - RNA, 19 nt, Artificial Sequence
  Description of Artificial Sequence: Synthetic oligonucleotide
uuuaucacagcugccugca

SEQ ID NO: 2539634 - RNA, 19 nt, Artificial Sequence
  Description of Artificial Sequence: Synthetic oligonucleotide
accaguagaagugagguau

SEQ ID NO: 2539635 - RNA, 19 nt, Artificial Sequence
  Description of Artificial Sequence: Synthetic oligonucleotide
ugagaguguuuucauaguu

SEQ ID NO: 2539636 - RNA, 19 nt, Artificial Sequence
  Description of Artificial Sequence: Synthetic oligonucleotide
uugauggacaaaacuguau

SEQ ID NO: 2539637 - RNA, 19 nt, Artificial Sequence
  Description of Artificial Sequence: Synthetic oligonucleotide
aagauaagugucccagaau

SEQ ID NO: 2539638 - RNA, 19 nt, Artificial Sequence
  Description of Artificial Sequence: Synthetic oligonucleotide
uaucuaguugugccuuuag

SEQ ID NO: 2539639 - RNA, 19 nt, Artificial Sequence
  Description of Artificial Sequence: Synthetic oligonucleotide
aucuugaugugcugguaag

SEQ ID NO: 2539640 - RNA, 19 nt, Artificial Sequence
  Description of Artificial Sequence: Synthetic oligonucleotide
aauaacauggucagugcua

SEQ ID NO: 2539641 - RNA, 19 nt, Artificial Sequence
  Description of Artificial Sequence: Synthetic oligonucleotide
uuuacaugccauugccaga

SEQ ID NO: 2539642 - RNA, 19 nt, Artificial Sequence
  Description of Artificial Sequence: Synthetic oligonucleotide
ugaacuuagacuggauccu

SEQ ID NO: 2539643 - RNA, 19 nt, Artificial Sequence
  Description of Artificial Sequence: Synthetic oligonucleotide
aaacagucaucugaaccug

SEQ ID NO: 2539644 - RNA, 19 nt, Artificial Sequence
  Description of Artificial Sequence: Synthetic oligonucleotide
accauuuguaaguaguaua

SEQ ID NO: 2539645 - RNA, 19 nt, Artificial Sequence
  Description of Artificial Sequence: Synthetic oligonucleotide
acuuuaucacagcugccug

SEQ ID NO: 2539646 - RNA, 19 nt, Artificial Sequence
  Description of Artificial Sequence: Synthetic oligonucleotide
auacucucacaacuuuauc

SEQ ID NO: 2539647 - RNA, 19 nt, Artificial Sequence
  Description of Artificial Sequence: Synthetic oligonucleotide
gacagaagauaaguguccc

SEQ ID NO: 2539648 - RNA, 19 nt, Artificial Sequence
  Description of Artificial Sequence: Synthetic oligonucleotide
aaugaacauaccaccagaa

SEQ ID NO: 2539649 - RNA, 19 nt, Artificial Sequence
  Description of Artificial Sequence: Synthetic oligonucleotide
cacaguagacagaagauaa

SEQ ID NO: 2539650 - RNA, 19 nt, Artificial Sequence
  Description of Artificial Sequence: Synthetic oligonucleotide
ucgaagacaccauacucuc

SEQ ID NO: 2539651 - RNA, 19 nt, Artificial Sequence
  Description of Artificial Sequence: Synthetic oligonucleotide
ugccuuuaguugauggaca

SEQ ID NO: 2539652 - RNA, 19 nt, Artificial Sequence
  Description of Artificial Sequence: Synthetic oligonucleotide
ugguaagcagauggaaggg

SEQ ID NO: 2539653 - RNA, 19 nt, Artificial Sequence
  Description of Artificial Sequence: Synthetic oligonucleotide
uuacaugccauugccagaa

SEQ ID NO: 2539654 - RNA, 19 nt, Artificial Sequence
  Description of Artificial Sequence: Synthetic oligonucleotide
uaacagccaugucagaaau

SEQ ID NO: 2539655 - RNA, 19 nt, Artificial Sequence
  Description of Artificial Sequence: Synthetic oligonucleotide
guucgaagacaccauacuc

SEQ ID NO: 2539656 - RNA, 19 nt, Artificial Sequence
  Description of Artificial Sequence: Synthetic oligonucleotide
aaauuucagcagagugccc

SEQ ID NO: 2539657 - RNA, 19 nt, Artificial Sequence
  Description of Artificial Sequence: Synthetic oligonucleotide
guaauagaagcugaauguc

SEQ ID NO: 2539658 - RNA, 19 nt, Artificial Sequence
  Description of Artificial Sequence: Synthetic oligonucleotide
agugcccucgcaguguagc

SEQ ID NO: 2539659 - RNA, 19 nt, Artificial Sequence
  Description of Artificial Sequence: Synthetic oligonucleotide
gacaccauacucucacaac

SEQ ID NO: 2539660 - RNA, 19 nt, Artificial Sequence
  Description of Artificial Sequence: Synthetic oligonucleotide
cucacaacuuuaucacagc

SEQ ID NO: 2539661 - RNA, 19 nt, Artificial Sequence
  Description of Artificial Sequence: Synthetic oligonucleotide
uguagaaaauuccgcccuc

SEQ ID NO: 2539662 - RNA, 19 nt, Artificial Sequence
  Description of Artificial Sequence: Synthetic oligonucleotide
acugaguagcuuucuuuug

SEQ ID NO: 2539663 - RNA, 19 nt, Artificial Sequence
  Description of Artificial Sequence: Synthetic oligonucleotide
cuuuaguugauggacaaaa

SEQ ID NO: 2539664 - RNA, 19 nt, Artificial Sequence
  Description of Artificial Sequence: Synthetic oligonucleotide
aucaccauuuguaaguagu

SEQ ID NO: 2539665 - RNA, 19 nt, Artificial Sequence
  Description of Artificial Sequence: Synthetic oligonucleotide
accaaacagucaucugaac

SEQ ID NO: 2539666 - RNA, 19 nt, Artificial Sequence
  Description of Artificial Sequence: Synthetic oligonucleotide
caaacagucaucugaaccu

SEQ ID NO: 2539667 - RNA, 19 nt, Artificial Sequence
  Description of Artificial Sequence: Synthetic oligonucleotide
auuucagcagagugcccuc

SEQ ID NO: 2539668 - RNA, 19 nt, Artificial Sequence
  Description of Artificial Sequence: Synthetic oligonucleotide
ucaccauuuguaaguagua

SEQ ID NO: 2539669 - RNA, 19 nt, Artificial Sequence
  Description of Artificial Sequence: Synthetic oligonucleotide
ggacaaaacuguauggaag

SEQ ID NO: 2539670 - RNA, 19 nt, Artificial Sequence
  Description of Artificial Sequence: Synthetic oligonucleotide
uuuuacugggcgaucucua

SEQ ID NO: 2539671 - RNA, 19 nt, Artificial Sequence
  Description of Artificial Sequence: Synthetic oligonucleotide
agaagauaagugucccaga

SEQ ID NO: 2539672 - RNA, 19 nt, Artificial Sequence
  Description of Artificial Sequence: Synthetic oligonucleotide
cacaaguucgaagacacca

SEQ ID NO: 2539673 - RNA, 19 nt, Artificial Sequence
  Description of Artificial Sequence: Synthetic oligonucleotide
caaaugcuacacaguagac

SEQ ID NO: 2539674 - RNA, 19 nt, Artificial Sequence
  Description of Artificial Sequence: Synthetic oligonucleotide
uuuacugggcgaucucuaa

SEQ ID NO: 2539675 - RNA, 19 nt, Artificial Sequence
  Description of Artificial Sequence: Synthetic oligonucleotide
aucuaguugugccuuuagu

SEQ ID NO: 2539676 - RNA, 19 nt, Artificial Sequence
  Description of Artificial Sequence: Synthetic oligonucleotide
ucagaaauuucagcagagu

SEQ ID NO: 2539677 - RNA, 19 nt, Artificial Sequence
  Description of Artificial Sequence: Synthetic oligonucleotide
agaagcugaaugucccuga

SEQ ID NO: 2539678 - RNA, 19 nt, Artificial Sequence
  Description of Artificial Sequence: Synthetic oligonucleotide
ugccauugccagaacaaau

SEQ ID NO: 2539679 - RNA, 19 nt, Artificial Sequence
  Description of Artificial Sequence: Synthetic oligonucleotide
cuguagcccagauuucacc

SEQ ID NO: 2539680 - RNA, 19 nt, Artificial Sequence
  Description of Artificial Sequence: Synthetic oligonucleotide
auuuuacugggcgaucucu

SEQ ID NO: 2539681 - RNA, 19 nt, Artificial Sequence
  Description of Artificial Sequence: Synthetic oligonucleotide
auucuuuaugcaucuugau

SEQ ID NO: 2539682 - RNA, 19 nt, Artificial Sequence
  Description of Artificial Sequence: Synthetic oligonucleotide
cuucugacgcacugaguag

SEQ ID NO: 2539683 - RNA, 19 nt, Artificial Sequence
  Description of Artificial Sequence: Synthetic oligonucleotide
gcguccaucaucuguagcc

SEQ ID NO: 2539684 - RNA, 19 nt, Artificial Sequence
  Description of Artificial Sequence: Synthetic oligonucleotide
aucaaaugcuacacaguag

SEQ ID NO: 2539685 - RNA, 19 nt, Artificial Sequence
  Description of Artificial Sequence: Synthetic oligonucleotide
acaugccauugccagaaca

SEQ ID NO: 2539686 - RNA, 19 nt, Artificial Sequence
  Description of Artificial Sequence: Synthetic oligonucleotide
acucuccacucucugagga

SEQ ID NO: 2539687 - RNA, 19 nt, Artificial Sequence
  Description of Artificial Sequence: Synthetic oligonucleotide
auagaagcugaaugucccu

SEQ ID NO: 2539688 - RNA, 19 nt, Artificial Sequence
  Description of Artificial Sequence: Synthetic oligonucleotide
cauaccaccagaacugaaa

SEQ ID NO: 2539689 - RNA, 19 nt, Artificial Sequence
  Description of Artificial Sequence: Synthetic oligonucleotide
guucgaucaaaugcuacac

SEQ ID NO: 2539690 - RNA, 19 nt, Artificial Sequence
  Description of Artificial Sequence: Synthetic oligonucleotide
aacauaccaccagaacuga

SEQ ID NO: 2539691 - RNA, 19 nt, Artificial Sequence
  Description of Artificial Sequence: Synthetic oligonucleotide
ccuguagaaaauuccgccc

SEQ ID NO: 2539692 - RNA, 19 nt, Artificial Sequence
  Description of Artificial Sequence: Synthetic oligonucleotide
acagaagauaaguguccca

SEQ ID NO: 2539693 - RNA, 19 nt, Artificial Sequence
  Description of Artificial Sequence: Synthetic oligonucleotide
ucugacgcacugaguagcu

SEQ ID NO: 2539694 - RNA, 19 nt, Artificial Sequence
  Description of Artificial Sequence: Synthetic oligonucleotide
guagaaaauuccgcccucc

SEQ ID NO: 2539695 - RNA, 19 nt, Artificial Sequence
  Description of Artificial Sequence: Synthetic oligonucleotide
uaagugucccagaauucuu

SEQ ID NO: 2539696 - RNA, 19 nt, Artificial Sequence
  Description of Artificial Sequence: Synthetic oligonucleotide
acauggcugaagcgacuac

SEQ ID NO: 2539697 - RNA, 19 nt, Artificial Sequence
  Description of Artificial Sequence: Synthetic oligonucleotide
ugacgcacugaguagcuuu

SEQ ID NO: 2539698 - RNA, 19 nt, Artificial Sequence
  Description of Artificial Sequence: Synthetic oligonucleotide
cuugaugugcugguaagca

SEQ ID NO: 2539699 - RNA, 19 nt, Artificial Sequence
  Description of Artificial Sequence: Synthetic oligonucleotide
acaguagacagaagauaag

SEQ ID NO: 2539700 - RNA, 19 nt, Artificial Sequence
  Description of Artificial Sequence: Synthetic oligonucleotide
uaaauuuuacugggcgauc

SEQ ID NO: 2539701 - RNA, 19 nt, Artificial Sequence
  Description of Artificial Sequence: Synthetic oligonucleotide
caguucgaucaaaugcuac

SEQ ID NO: 2539702 - RNA, 19 nt, Artificial Sequence
  Description of Artificial Sequence: Synthetic oligonucleotide
caugccauugccagaacaa

SEQ ID NO: 2539703 - RNA, 19 nt, Artificial Sequence
  Description of Artificial Sequence: Synthetic oligonucleotide
gugccuuuaguugauggac

SEQ ID NO: 2539704 - RNA, 19 nt, Artificial Sequence
  Description of Artificial Sequence: Synthetic oligonucleotide
cuggugcacaaguucgaag

SEQ ID NO: 2539705 - RNA, 19 nt, Artificial Sequence
  Description of Artificial Sequence: Synthetic oligonucleotide
acauggucagugcuaccug

SEQ ID NO: 2539706 - RNA, 19 nt, Artificial Sequence
  Description of Artificial Sequence: Synthetic oligonucleotide
uccuaacucuccacucucu

SEQ ID NO: 2539707 - RNA, 19 nt, Artificial Sequence
  Description of Artificial Sequence: Synthetic oligonucleotide
cccagauuucaccaaacag

SEQ ID NO: 2539708 - RNA, 19 nt, Artificial Sequence
  Description of Artificial Sequence: Synthetic oligonucleotide
caugcuuucguccucuucu

SEQ ID NO: 2539709 - RNA, 19 nt, Artificial Sequence
  Description of Artificial Sequence: Synthetic oligonucleotide
aguguagccaggaggcguc

SEQ ID NO: 2539710 - RNA, 19 nt, Artificial Sequence
  Description of Artificial Sequence: Synthetic oligonucleotide
cagucaucugaaccuguag

SEQ ID NO: 2539711 - RNA, 19 nt, Artificial Sequence
  Description of Artificial Sequence: Synthetic oligonucleotide
acugggcgaucucuaaacu

SEQ ID NO: 2539712 - RNA, 19 nt, Artificial Sequence
  Description of Artificial Sequence: Synthetic oligonucleotide
aacuccaggucuggaucuc

SEQ ID NO: 2539713 - RNA, 19 nt, Artificial Sequence
  Description of Artificial Sequence: Synthetic oligonucleotide
gaucucucaguaaauuuua

SEQ ID NO: 2539714 - RNA, 19 nt, Artificial Sequence
  Description of Artificial Sequence: Synthetic oligonucleotide
aacauggcugaagcgacua

SEQ ID NO: 2539715 - RNA, 19 nt, Artificial Sequence
  Description of Artificial Sequence: Synthetic oligonucleotide
uccaggucuggaucucuca

SEQ ID NO: 2539716 - RNA, 19 nt, Artificial Sequence
  Description of Artificial Sequence: Synthetic oligonucleotide
uaccuguuguaaugaacau

SEQ ID NO: 2539717 - RNA, 19 nt, Artificial Sequence
  Description of Artificial Sequence: Synthetic oligonucleotide
accauacucucacaacuuu

SEQ ID NO: 2539718 - RNA, 19 nt, Artificial Sequence
  Description of Artificial Sequence: Synthetic oligonucleotide
augcuuucguccucuucug

SEQ ID NO: 2539719 - RNA, 19 nt, Artificial Sequence
  Description of Artificial Sequence: Synthetic oligonucleotide
aaauuccgcccucccaguu

SEQ ID NO: 2539720 - RNA, 19 nt, Artificial Sequence
  Description of Artificial Sequence: Synthetic oligonucleotide
ugcuuucguccucuucuga

SEQ ID NO: 2539721 - RNA, 19 nt, Artificial Sequence
  Description of Artificial Sequence: Synthetic oligonucleotide
guaaauuuuacugggcgau

SEQ ID NO: 2539722 - RNA, 19 nt, Artificial Sequence
  Description of Artificial Sequence: Synthetic oligonucleotide
ugcugguaagcagauggaa

SEQ ID NO: 2539723 - RNA, 19 nt, Artificial Sequence
  Description of Artificial Sequence: Synthetic oligonucleotide
uucugaacuuagacuggau

SEQ ID NO: 2539724 - RNA, 19 nt, Artificial Sequence
  Description of Artificial Sequence: Synthetic oligonucleotide
gagaguguuuucauaguua

SEQ ID NO: 2539725 - RNA, 19 nt, Artificial Sequence
  Description of Artificial Sequence: Synthetic oligonucleotide
caaaacuguauggaaguaa

SEQ ID NO: 2539726 - RNA, 19 nt, Artificial Sequence
  Description of Artificial Sequence: Synthetic oligonucleotide
agacuggauccuaacucuc

SEQ ID NO: 2539727 - RNA, 19 nt, Artificial Sequence
  Description of Artificial Sequence: Synthetic oligonucleotide
cuggauccuaacucuccac

SEQ ID NO: 2539728 - RNA, 19 nt, Artificial Sequence
  Description of Artificial Sequence: Synthetic oligonucleotide
cugaaggacagcaacuggu

SEQ ID NO: 2539729 - RNA, 19 nt, Artificial Sequence
  Description of Artificial Sequence: Synthetic oligonucleotide
uaacauggucagugcuacc

SEQ ID NO: 2539730 - RNA, 19 nt, Artificial Sequence
  Description of Artificial Sequence: Synthetic oligonucleotide
aacuuagacuggauccuaa

SEQ ID NO: 2539731 - RNA, 19 nt, Artificial Sequence
  Description of Artificial Sequence: Synthetic oligonucleotide
aguuaacagccaugucaga

SEQ ID NO: 2539732 - RNA, 19 nt, Artificial Sequence
  Description of Artificial Sequence: Synthetic oligonucleotide
aaacuguauggaaguaaua

SEQ ID NO: 2539733 - RNA, 19 nt, Artificial Sequence
  Description of Artificial Sequence: Synthetic oligonucleotide
aagugucccagaauucuuu

SEQ ID NO: 2539734 - RNA, 19 nt, Artificial Sequence
  Description of Artificial Sequence: Synthetic oligonucleotide
aacuggugcacaaguucga

SEQ ID NO: 2539735 - RNA, 19 nt, Artificial Sequence
  Description of Artificial Sequence: Synthetic oligonucleotide
gaaguaauagaagcugaau

SEQ ID NO: 2539736 - RNA, 19 nt, Artificial Sequence
  Description of Artificial Sequence: Synthetic oligonucleotide
gagguaucuaguugugccu

SEQ ID NO: 2539737 - RNA, 19 nt, Artificial Sequence
  Description of Artificial Sequence: Synthetic oligonucleotide
ucagugcuaccuguuguaa

SEQ ID NO: 2539738 - RNA, 19 nt, Artificial Sequence
  Description of Artificial Sequence: Synthetic oligonucleotide
ugcuaccuguuguaaugaa

SEQ ID NO: 2539739 - RNA, 19 nt, Artificial Sequence
  Description of Artificial Sequence: Synthetic oligonucleotide
gacagcaacuggugcacaa

SEQ ID NO: 2539740 - RNA, 19 nt, Artificial Sequence
  Description of Artificial Sequence: Synthetic oligonucleotide
aucaucuguagcccagauu

SEQ ID NO: 2539741 - RNA, 19 nt, Artificial Sequence
  Description of Artificial Sequence: Synthetic oligonucleotide
cucucacaacuuuaucaca

SEQ ID NO: 2539742 - RNA, 19 nt, Artificial Sequence
  Description of Artificial Sequence: Synthetic oligonucleotide
cauacucucacaacuuuau

SEQ ID NO: 2539743 - RNA, 19 nt, Artificial Sequence
  Description of Artificial Sequence: Synthetic oligonucleotide
agcccagauuucaccaaac

SEQ ID NO: 2539744 - RNA, 19 nt, Artificial Sequence
  Description of Artificial Sequence: Synthetic oligonucleotide
gcuuucguccucuucugac

SEQ ID NO: 2539745 - RNA, 19 nt, Artificial Sequence
  Description of Artificial Sequence: Synthetic oligonucleotide
acaaguucgaagacaccau

SEQ ID NO: 2539746 - RNA, 19 nt, Artificial Sequence
  Description of Artificial Sequence: Synthetic oligonucleotide
cucuaaacuucauuguuuu

SEQ ID NO: 2539747 - RNA, 19 nt, Artificial Sequence
  Description of Artificial Sequence: Synthetic oligonucleotide
cucgcaguguagccaggag

SEQ ID NO: 2539748 - RNA, 19 nt, Artificial Sequence
  Description of Artificial Sequence: Synthetic oligonucleotide
guugauggacaaaacugua

SEQ ID NO: 2539749 - RNA, 19 nt, Artificial Sequence
  Description of Artificial Sequence: Synthetic oligonucleotide
ggugcacaaguucgaagac

SEQ ID NO: 2539750 - RNA, 19 nt, Artificial Sequence
  Description of Artificial Sequence: Synthetic oligonucleotide
ccagaacugaaagaugaac

SEQ ID NO: 2539751 - RNA, 19 nt, Artificial Sequence
  Description of Artificial Sequence: Synthetic oligonucleotide
  modified_base (8)..(8): a, c, u, g, unknown or other
aggagggnuaaaugugcuu

SEQ ID NO: 2539752 - RNA, 19 nt, Artificial Sequence
  Description of Artificial Sequence: Synthetic oligonucleotide
accuguuguaaugaacaua

SEQ ID NO: 2539753 - RNA, 19 nt, Artificial Sequence
  Description of Artificial Sequence: Synthetic oligonucleotide
gaguagcuuucuuuuggcu

SEQ ID NO: 2539754 - RNA, 19 nt, Artificial Sequence
  Description of Artificial Sequence: Synthetic oligonucleotide
caguagacagaagauaagu

SEQ ID NO: 2539755 - RNA, 19 nt, Artificial Sequence
  Description of Artificial Sequence: Synthetic oligonucleotide
aguagaagugagguaucua

SEQ ID NO: 2539756 - RNA, 19 nt, Artificial Sequence
  Description of Artificial Sequence: Synthetic oligonucleotide
gguacuuucugaacuuaga

SEQ ID NO: 2539757 - RNA, 19 nt, Artificial Sequence
  Description of Artificial Sequence: Synthetic oligonucleotide
gaggcguccaucaucugua

SEQ ID NO: 2539758 - RNA, 19 nt, Artificial Sequence
  Description of Artificial Sequence: Synthetic oligonucleotide
aggcguccaucaucuguag

SEQ ID NO: 2539759 - RNA, 19 nt, Artificial Sequence
  Description of Artificial Sequence: Synthetic oligonucleotide
gacgcacugaguagcuuuc

SEQ ID NO: 2539760 - RNA, 19 nt, Artificial Sequence
  Description of Artificial Sequence: Synthetic oligonucleotide
  modified_base (16)..(16): a, c, u, g, unknown or other
acucucugaggagggnuaa

SEQ ID NO: 2539761 - RNA, 19 nt, Artificial Sequence
  Description of Artificial Sequence: Synthetic oligonucleotide
uacaugccauugccagaac

SEQ ID NO: 2539762 - RNA, 19 nt, Artificial Sequence
  Description of Artificial Sequence: Synthetic oligonucleotide
agguaucuaguugugccuu

SEQ ID NO: 2539763 - RNA, 19 nt, Artificial Sequence
  Description of Artificial Sequence: Synthetic oligonucleotide
ggaaguaauagaagcugaa

SEQ ID NO: 2539764 - RNA, 19 nt, Artificial Sequence
  Description of Artificial Sequence: Synthetic oligonucleotide
ugcccucgcaguguagcca

SEQ ID NO: 2539765 - RNA, 19 nt, Artificial Sequence
  Description of Artificial Sequence: Synthetic oligonucleotide
auggcugaagcgacuacau

SEQ ID NO: 2539766 - RNA, 19 nt, Artificial Sequence
  Description of Artificial Sequence: Synthetic oligonucleotide
augccauugccagaacaaa

SEQ ID NO: 2539767 - RNA, 19 nt, Artificial Sequence
  Description of Artificial Sequence: Synthetic oligonucleotide
agagugcccucgcagugua

SEQ ID NO: 2539768 - RNA, 19 nt, Artificial Sequence
  Description of Artificial Sequence: Synthetic oligonucleotide
ccuaacucuccacucucug

SEQ ID NO: 2539769 - RNA, 19 nt, Artificial Sequence
  Description of Artificial Sequence: Synthetic oligonucleotide
gugcccucgcaguguagcc

SEQ ID NO: 2539770 - RNA, 19 nt, Artificial Sequence
  Description of Artificial Sequence: Synthetic oligonucleotide
  modified_base (19)..(19): a, c, u, g, unknown or other
uccacucucugaggagggn

SEQ ID NO: 2539771 - RNA, 19 nt, Artificial Sequence
  Description of Artificial Sequence: Synthetic oligonucleotide
ggggcucucugccaucacc

SEQ ID NO: 2539772 - RNA, 19 nt, Artificial Sequence
  Description of Artificial Sequence: Synthetic oligonucleotide
ccauuuguaaguaguauau

SEQ ID NO: 2539773 - RNA, 19 nt, Artificial Sequence
  Description of Artificial Sequence: Synthetic oligonucleotide
cuccaggucuggaucucuc

SEQ ID NO: 2539774 - RNA, 19 nt, Artificial Sequence
  Description of Artificial Sequence: Synthetic oligonucleotide
  modified_base (7)..(7): a, c, u, g, unknown or other
ggagggnuaaaugugcuuu

SEQ ID NO: 2539775 - RNA, 19 nt, Artificial Sequence
  Description of Artificial Sequence: Synthetic oligonucleotide
cacugaguagcuuucuuuu

SEQ ID NO: 2539776 - RNA, 19 nt, Artificial Sequence
  Description of Artificial Sequence: Synthetic oligonucleotide
guugugccuuuaguugaug

SEQ ID NO: 2539777 - RNA, 19 nt, Artificial Sequence
  Description of Artificial Sequence: Synthetic oligonucleotide
  modified_base (9)..(9): a, c, u, g, unknown or other
gaggagggnuaaaugugcu

SEQ ID NO: 2539778 - RNA, 19 nt, Artificial Sequence
  Description of Artificial Sequence: Synthetic oligonucleotide
  modified_base (6)..(6): a, c, u, g, unknown or other
gagggnuaaaugugcuuuu

SEQ ID NO: 2539779 - RNA, 19 nt, Artificial Sequence
  Description of Artificial Sequence: Synthetic oligonucleotide
aguugugccuuuaguugau

SEQ ID NO: 2539780 - RNA, 19 nt, Artificial Sequence
  Description of Artificial Sequence: Synthetic oligonucleotide
gugcuaccuguuguaauga

SEQ ID NO: 2539781 - RNA, 19 nt, Artificial Sequence
  Description of Artificial Sequence: Synthetic oligonucleotide
acagucaucugaaccugua

SEQ ID NO: 2539782 - RNA, 19 nt, Artificial Sequence
  Description of Artificial Sequence: Synthetic oligonucleotide
gcccucgcaguguagccag

SEQ ID NO: 2539783 - RNA, 19 nt, Artificial Sequence
  Description of Artificial Sequence: Synthetic oligonucleotide
cccaguucgaucaaaugcu

SEQ ID NO: 2539784 - RNA, 19 nt, Artificial Sequence
  Description of Artificial Sequence: Synthetic oligonucleotide
  modified_base (17)..(17): a, c, u, g, unknown or other
cacucucugaggagggnua

SEQ ID NO: 2539785 - RNA, 19 nt, Artificial Sequence
  Description of Artificial Sequence: Synthetic oligonucleotide
acuccaggucuggaucucu

SEQ ID NO: 2539786 - RNA, 19 nt, Artificial Sequence
  Description of Artificial Sequence: Synthetic oligonucleotide
gcccagauuucaccaaaca

SEQ ID NO: 2539787 - RNA, 19 nt, Artificial Sequence
  Description of Artificial Sequence: Synthetic oligonucleotide
gaugugcugguaagcagau

SEQ ID NO: 2539788 - RNA, 19 nt, Artificial Sequence
  Description of Artificial Sequence: Synthetic oligonucleotide
gcaccaguagaagugaggu

SEQ ID NO: 2539789 - RNA, 19 nt, Artificial Sequence
  Description of Artificial Sequence: Synthetic oligonucleotide
ggcguccaucaucuguagc

SEQ ID NO: 2539790 - RNA, 19 nt, Artificial Sequence
  Description of Artificial Sequence: Synthetic oligonucleotide
ccaguagaagugagguauc

SEQ ID NO: 2539791 - RNA, 19 nt, Artificial Sequence
  Description of Artificial Sequence: Synthetic oligonucleotide
guaucuaguugugccuuua

SEQ ID NO: 2539792 - RNA, 19 nt, Artificial Sequence
  Description of Artificial Sequence: Synthetic oligonucleotide
augugcugguaagcagaug

SEQ ID NO: 2539793 - RNA, 19 nt, Artificial Sequence
  Description of Artificial Sequence: Synthetic oligonucleotide
ggucagugcuaccuguugu

SEQ ID NO: 2539794 - RNA, 19 nt, Artificial Sequence
  Description of Artificial Sequence: Synthetic oligonucleotide
acauaccaccagaacugaa

SEQ ID NO: 2539795 - RNA, 19 nt, Artificial Sequence
  Description of Artificial Sequence: Synthetic oligonucleotide
cuccucccaugcuuucguc

SEQ ID NO: 2539796 - RNA, 19 nt, Artificial Sequence
  Description of Artificial Sequence: Synthetic oligonucleotide
caccaguagaagugaggua

SEQ ID NO: 2539797 - RNA, 19 nt, Artificial Sequence
  Description of Artificial Sequence: Synthetic oligonucleotide
gggcucucugccaucacca

SEQ ID NO: 2539798 - RNA, 19 nt, Artificial Sequence
  Description of Artificial Sequence: Synthetic oligonucleotide
aggaggcguccaucaucug

SEQ ID NO: 2539799 - RNA, 19 nt, Artificial Sequence
  Description of Artificial Sequence: Synthetic oligonucleotide
acgcacugaguagcuuucu

SEQ ID NO: 2539800 - RNA, 19 nt, Artificial Sequence
  Description of Artificial Sequence: Synthetic oligonucleotide
ugccugcagcaaugagagu

SEQ ID NO: 2539801 - RNA, 19 nt, Artificial Sequence
  Description of Artificial Sequence: Synthetic oligonucleotide
ccauacucucacaacuuua

SEQ ID NO: 2539802 - RNA, 19 nt, Artificial Sequence
  Description of Artificial Sequence: Synthetic oligonucleotide
caccauuuguaaguaguau

SEQ ID NO: 2539803 - RNA, 19 nt, Artificial Sequence
  Description of Artificial Sequence: Synthetic oligonucleotide
gugucccagaauucuuuau

SEQ ID NO: 2539804 - RNA, 19 nt, Artificial Sequence
  Description of Artificial Sequence: Synthetic oligonucleotide
caguagaagugagguaucu

SEQ ID NO: 2539805 - RNA, 19 nt, Artificial Sequence
  Description of Artificial Sequence: Synthetic oligonucleotide
guguagccaggaggcgucc

SEQ ID NO: 2539806 - RNA, 19 nt, Artificial Sequence
  Description of Artificial Sequence: Synthetic oligonucleotide
gagugcccucgcaguguag

SEQ ID NO: 2539807 - RNA, 19 nt, Artificial Sequence
  Description of Artificial Sequence: Synthetic oligonucleotide
uccgcccucccaguucgau

SEQ ID NO: 2539808 - RNA, 19 nt, Artificial Sequence
  Description of Artificial Sequence: Synthetic oligonucleotide
gcacaaguucgaagacacc

SEQ ID NO: 2539809 - RNA, 19 nt, Artificial Sequence
  Description of Artificial Sequence: Synthetic oligonucleotide
cagugcuaccuguuguaau

SEQ ID NO: 2539810 - RNA, 19 nt, Artificial Sequence
  Description of Artificial Sequence: Synthetic oligonucleotide
gggcgaucucuaaacuuca

SEQ ID NO: 2539811 - RNA, 19 nt, Artificial Sequence
  Description of Artificial Sequence: Synthetic oligonucleotide
uuccgcccucccaguucga

SEQ ID NO: 2539812 - RNA, 19 nt, Artificial Sequence
  Description of Artificial Sequence: Synthetic oligonucleotide
gccauugccagaacaaauu

SEQ ID NO: 2539813 - RNA, 19 nt, Artificial Sequence
  Description of Artificial Sequence: Synthetic oligonucleotide
cgcccucccaguucgauca

SEQ ID NO: 2539814 - RNA, 19 nt, Artificial Sequence
  Description of Artificial Sequence: Synthetic oligonucleotide
gcgaucucuaaacuucauu

SEQ ID NO: 2539815 - RNA, 19 nt, Artificial Sequence
  Description of Artificial Sequence: Synthetic oligonucleotide
gguaucuaguugugccuuu

SEQ ID NO: 2539816 - RNA, 19 nt, Artificial Sequence
  Description of Artificial Sequence: Synthetic oligonucleotide
cgaucaaaugcuacacagu

SEQ ID NO: 2539817 - RNA, 19 nt, Artificial Sequence
  Description of Artificial Sequence: Synthetic oligonucleotide
cgaagacaccauacucuca

SEQ ID NO: 2539818 - RNA, 19 nt, Artificial Sequence
  Description of Artificial Sequence: Synthetic oligonucleotide
cagagugcccucgcagugu

SEQ ID NO: 2539819 - RNA, 19 nt, Artificial Sequence
  Description of Artificial Sequence: Synthetic oligonucleotide
cagcugccugcagcaauga

SEQ ID NO: 2539820 - RNA, 19 nt, Artificial Sequence
  Description of Artificial Sequence: Synthetic oligonucleotide
ccaucaccauuuguaagua

SEQ ID NO: 2539821 - RNA, 19 nt, Artificial Sequence
  Description of Artificial Sequence: Synthetic oligonucleotide
cccucgcaguguagccagg

SEQ ID NO: 2539822 - RNA, 19 nt, Artificial Sequence
  Description of Artificial Sequence: Synthetic oligonucleotide
ccgcccucccaguucgauc

SEQ ID NO: 2539823 - RNA, 19 nt, Artificial Sequence
  Description of Artificial Sequence: Synthetic oligonucleotide
gcucucugccaucaccauu

SEQ ID NO: 2539824 - RNA, 19 nt, Artificial Sequence
  Description of Artificial Sequence: Synthetic oligonucleotide
ccucgcaguguagccagga

SEQ ID NO: 2539825 - RNA, 19 nt, Artificial Sequence
  Description of Artificial Sequence: Synthetic oligonucleotide
ggcgaucucuaaacuucau

SEQ ID NO: 2539826 - RNA, 19 nt, Artificial Sequence
  Description of Artificial Sequence: Synthetic oligonucleotide
cugacgcacugaguagcuu

SEQ ID NO: 2539827 - RNA, 19 nt, Artificial Sequence
  Description of Artificial Sequence: Synthetic oligonucleotide
gcccucccaguucgaucaa

SEQ ID NO: 2539828 - RNA, 19 nt, Artificial Sequence
  Description of Artificial Sequence: Synthetic oligonucleotide
cccucccaguucgaucaaa

SEQ ID NO: 2539829 - RNA, 19 nt, Artificial Sequence
  Description of Artificial Sequence: Synthetic oligonucleotide
acaguuuuagcccaggggc

SEQ ID NO: 2539830 - RNA, 19 nt, Artificial Sequence
  Description of Artificial Sequence: Synthetic oligonucleotide
auaaccuucaaguucacgg

SEQ ID NO: 2539831 - RNA, 19 nt, Artificial Sequence
  Description of Artificial Sequence: Synthetic oligonucleotide
aggauagugaaguugcucc

SEQ ID NO: 2539832 - RNA, 19 nt, Artificial Sequence
  Description of Artificial Sequence: Synthetic oligonucleotide
aaucugaugagucaauugu

SEQ ID NO: 2539833 - RNA, 19 nt, Artificial Sequence
  Description of Artificial Sequence: Synthetic oligonucleotide
auuaugucuaggaagaugg

SEQ ID NO: 2539834 - RNA, 19 nt, Artificial Sequence
  Description of Artificial Sequence: Synthetic oligonucleotide
aggauugugaccuccaagg

SEQ ID NO: 2539835 - RNA, 19 nt, Artificial Sequence
  Description of Artificial Sequence: Synthetic oligonucleotide
uagauuaugucuaggaaga

SEQ ID NO: 2539836 - RNA, 19 nt, Artificial Sequence
  Description of Artificial Sequence: Synthetic oligonucleotide
uauggcaucaacagagucc

SEQ ID NO: 2539837 - RNA, 19 nt, Artificial Sequence
  Description of Artificial Sequence: Synthetic oligonucleotide
ugaugagucaauugucugg

SEQ ID NO: 2539838 - RNA, 19 nt, Artificial Sequence
  Description of Artificial Sequence: Synthetic oligonucleotide
agaguuaggggcuuggcuc

SEQ ID NO: 2539839 - RNA, 19 nt, Artificial Sequence
  Description of Artificial Sequence: Synthetic oligonucleotide
ucaacaagcagccccaggu

SEQ ID NO: 2539840 - RNA, 19 nt, Artificial Sequence
  Description of Artificial Sequence: Synthetic oligonucleotide
ucugaugagucaauugucu

SEQ ID NO: 2539841 - RNA, 19 nt, Artificial Sequence
  Description of Artificial Sequence: Synthetic oligonucleotide
gaguucaacaagcagcccc

SEQ ID NO: 2539842 - RNA, 19 nt, Artificial Sequence
  Description of Artificial Sequence: Synthetic oligonucleotide
gagucaauugucugguagg

SEQ ID NO: 2539843 - RNA, 19 nt, Artificial Sequence
  Description of Artificial Sequence: Synthetic oligonucleotide
uguagauuaugucuaggaa

SEQ ID NO: 2539844 - RNA, 19 nt, Artificial Sequence
  Description of Artificial Sequence: Synthetic oligonucleotide
aagccagaggauugugacc

SEQ ID NO: 2539845 - RNA, 19 nt, Artificial Sequence
  Description of Artificial Sequence: Synthetic oligonucleotide
guccgaagaaaucugggcg

SEQ ID NO: 2539846 - RNA, 19 nt, Artificial Sequence
  Description of Artificial Sequence: Synthetic oligonucleotide
aagggcuugagcagcaagc

SEQ ID NO: 2539847 - RNA, 19 nt, Artificial Sequence
  Description of Artificial Sequence: Synthetic oligonucleotide
aagaaaucugggcggagug

SEQ ID NO: 2539848 - RNA, 19 nt, Artificial Sequence
  Description of Artificial Sequence: Synthetic oligonucleotide
augccuauggcaucaacag

SEQ ID NO: 2539849 - RNA, 19 nt, Artificial Sequence
  Description of Artificial Sequence: Synthetic oligonucleotide
gaaucugaugagucaauug

SEQ ID NO: 2539850 - RNA, 19 nt, Artificial Sequence
  Description of Artificial Sequence: Synthetic oligonucleotide
aaaggaggugacaagcauc

SEQ ID NO: 2539851 - RNA, 19 nt, Artificial Sequence
  Description of Artificial Sequence: Synthetic oligonucleotide
ggaggcaagacucugguag

SEQ ID NO: 2539852 - RNA, 19 nt, Artificial Sequence
  Description of Artificial Sequence: Synthetic oligonucleotide
uaaccuucaaguucacggc

SEQ ID NO: 2539853 - RNA, 19 nt, Artificial Sequence
  Description of Artificial Sequence: Synthetic oligonucleotide
agucaauugucugguaggc

SEQ ID NO: 2539854 - RNA, 19 nt, Artificial Sequence
  Description of Artificial Sequence: Synthetic oligonucleotide
aguugcuccaggcauagga

SEQ ID NO: 2539855 - RNA, 19 nt, Artificial Sequence
  Description of Artificial Sequence: Synthetic oligonucleotide
caagguacuugacucaggc

SEQ ID NO: 2539856 - RNA, 19 nt, Artificial Sequence
  Description of Artificial Sequence: Synthetic oligonucleotide
gaaaucugggcggaguggg

SEQ ID NO: 2539857 - RNA, 19 nt, Artificial Sequence
  Description of Artificial Sequence: Synthetic oligonucleotide
auagugaaguugcuccagg

SEQ ID NO: 2539858 - RNA, 19 nt, Artificial Sequence
  Description of Artificial Sequence: Synthetic oligonucleotide
uaugucuaggaagauggug

SEQ ID NO: 2539859 - RNA, 19 nt, Artificial Sequence
  Description of Artificial Sequence: Synthetic oligonucleotide
ugauguagauuaugucuag

SEQ ID NO: 2539860 - RNA, 19 nt, Artificial Sequence
  Description of Artificial Sequence: Synthetic oligonucleotide
agguacuugacucaggcua

SEQ ID NO: 2539861 - RNA, 19 nt, Artificial Sequence
  Description of Artificial Sequence: Synthetic oligonucleotide
cacaguuuuagcccagggg

SEQ ID NO: 2539862 - RNA, 19 nt, Artificial Sequence
  Description of Artificial Sequence: Synthetic oligonucleotide
cugguaggcgcuaugcucc

SEQ ID NO: 2539863 - RNA, 19 nt, Artificial Sequence
  Description of Artificial Sequence: Synthetic oligonucleotide
caugccgacacugaagcgg

SEQ ID NO: 2539864 - RNA, 19 nt, Artificial Sequence
  Description of Artificial Sequence: Synthetic oligonucleotide
gauguagauuaugucuagg

SEQ ID NO: 2539865 - RNA, 19 nt, Artificial Sequence
  Description of Artificial Sequence: Synthetic oligonucleotide
acucaggcuaccucugugg

SEQ ID NO: 2539866 - RNA, 19 nt, Artificial Sequence
  Description of Artificial Sequence: Synthetic oligonucleotide
ucgcucacggugcaugugg

SEQ ID NO: 2539867 - RNA, 19 nt, Artificial Sequence
  Description of Artificial Sequence: Synthetic oligonucleotide
acaagcauccugcugggca

SEQ ID NO: 2539868 - RNA, 19 nt, Artificial Sequence
  Description of Artificial Sequence: Synthetic oligonucleotide
cuccacaacggcauagggg

SEQ ID NO: 2539869 - RNA, 19 nt, Artificial Sequence
  Description of Artificial Sequence: Synthetic oligonucleotide
agggcuaggauagugaagu

SEQ ID NO: 2539870 - RNA, 19 nt, Artificial Sequence
  Description of Artificial Sequence: Synthetic oligonucleotide
uucaacaagcagccccagg

SEQ ID NO: 2539871 - RNA, 19 nt, Artificial Sequence
  Description of Artificial Sequence: Synthetic oligonucleotide
gaggugacaagcauccugc

SEQ ID NO: 2539872 - RNA, 19 nt, Artificial Sequence
  Description of Artificial Sequence: Synthetic oligonucleotide
aggcauaggagccugaguu

SEQ ID NO: 2539873 - RNA, 19 nt, Artificial Sequence
  Description of Artificial Sequence: Synthetic oligonucleotide
gaggauugugaccuccaag

SEQ ID NO: 2539874 - RNA, 19 nt, Artificial Sequence
  Description of Artificial Sequence: Synthetic oligonucleotide
agaaacaugccuauggcau

SEQ ID NO: 2539875 - RNA, 19 nt, Artificial Sequence
  Description of Artificial Sequence: Synthetic oligonucleotide
gacacuccacugcaggucc

SEQ ID NO: 2539876 - RNA, 19 nt, Artificial Sequence
  Description of Artificial Sequence: Synthetic oligonucleotide
ugucuaggaagaugguggc

SEQ ID NO: 2539877 - RNA, 19 nt, Artificial Sequence
  Description of Artificial Sequence: Synthetic oligonucleotide
guugucagcagccagugaa

SEQ ID NO: 2539878 - RNA, 19 nt, Artificial Sequence
  Description of Artificial Sequence: Synthetic oligonucleotide
uccugagacgguccgaaga

SEQ ID NO: 2539879 - RNA, 19 nt, Artificial Sequence
  Description of Artificial Sequence: Synthetic oligonucleotide
gauagugaaguugcuccag

SEQ ID NO: 2539880 - RNA, 19 nt, Artificial Sequence
  Description of Artificial Sequence: Synthetic oligonucleotide
aaacaugccuauggcauca

SEQ ID NO: 2539881 - RNA, 19 nt, Artificial Sequence
  Description of Artificial Sequence: Synthetic oligonucleotide
acuugacucaggcuaccuc

SEQ ID NO: 2539882 - RNA, 19 nt, Artificial Sequence
  Description of Artificial Sequence: Synthetic oligonucleotide
ugagacgguccgaagaaau

SEQ ID NO: 2539883 - RNA, 19 nt, Artificial Sequence
  Description of Artificial Sequence: Synthetic oligonucleotide
uccaucccgaccccggcgg

SEQ ID NO: 2539884 - RNA, 19 nt, Artificial Sequence
  Description of Artificial Sequence: Synthetic oligonucleotide
cucuucuuagcugggaagc

SEQ ID NO: 2539885 - RNA, 19 nt, Artificial Sequence
  Description of Artificial Sequence: Synthetic oligonucleotide
gagccugaguucaacaagc

SEQ ID NO: 2539886 - RNA, 19 nt, Artificial Sequence
  Description of Artificial Sequence: Synthetic oligonucleotide
ugacaagcauccugcuggg

SEQ ID NO: 2539887 - RNA, 19 nt, Artificial Sequence
  Description of Artificial Sequence: Synthetic oligonucleotide
uccaagguacuugacucag

SEQ ID NO: 2539888 - RNA, 19 nt, Artificial Sequence
  Description of Artificial Sequence: Synthetic oligonucleotide
ggcgcuaugcuccugagac

SEQ ID NO: 2539889 - RNA, 19 nt, Artificial Sequence
  Description of Artificial Sequence: Synthetic oligonucleotide
uagacgaggcagcaagaga

SEQ ID NO: 2539890 - RNA, 19 nt, Artificial Sequence
  Description of Artificial Sequence: Synthetic oligonucleotide
ugaccuccaagguacuuga

SEQ ID NO: 2539891 - RNA, 19 nt, Artificial Sequence
  Description of Artificial Sequence: Synthetic oligonucleotide
gcuaggauagugaaguugc

SEQ ID NO: 2539892 - RNA, 19 nt, Artificial Sequence
  Description of Artificial Sequence: Synthetic oligonucleotide
cugaugagucaauugucug

SEQ ID NO: 2539893 - RNA, 19 nt, Artificial Sequence
  Description of Artificial Sequence: Synthetic oligonucleotide
gaaacaugccuauggcauc

SEQ ID NO: 2539894 - RNA, 19 nt, Artificial Sequence
  Description of Artificial Sequence: Synthetic oligonucleotide
gaagggcuugagcagcaag

SEQ ID NO: 2539895 - RNA, 19 nt, Artificial Sequence
  Description of Artificial Sequence: Synthetic oligonucleotide
agccagaggauugugaccu

SEQ ID NO: 2539896 - RNA, 19 nt, Artificial Sequence
  Description of Artificial Sequence: Synthetic oligonucleotide
agaaaucugggcggagugg

SEQ ID NO: 2539897 - RNA, 19 nt, Artificial Sequence
  Description of Artificial Sequence: Synthetic oligonucleotide
gugcaugugguagacgagg

SEQ ID NO: 2539898 - RNA, 19 nt, Artificial Sequence
  Description of Artificial Sequence: Synthetic oligonucleotide
gccuauggcaucaacagag

SEQ ID NO: 2539899 - RNA, 19 nt, Artificial Sequence
  Description of Artificial Sequence: Synthetic oligonucleotide
cugcaggcgaaucugauga

SEQ ID NO: 2539900 - RNA, 19 nt, Artificial Sequence
  Description of Artificial Sequence: Synthetic oligonucleotide
gagggcaccugcacgacgg

SEQ ID NO: 2539901 - RNA, 19 nt, Artificial Sequence
  Description of Artificial Sequence: Synthetic oligonucleotide
acugaagcggccagugucg

SEQ ID NO: 2539902 - RNA, 19 nt, Artificial Sequence
  Description of Artificial Sequence: Synthetic oligonucleotide
gauugugaccuccaaggua

SEQ ID NO: 2539903 - RNA, 19 nt, Artificial Sequence
  Description of Artificial Sequence: Synthetic oligonucleotide
uuaugucuaggaagauggu

SEQ ID NO: 2539904 - RNA, 19 nt, Artificial Sequence
  Description of Artificial Sequence: Synthetic oligonucleotide
ugucugguaggcgcuaugc

SEQ ID NO: 2539905 - RNA, 19 nt, Artificial Sequence
  Description of Artificial Sequence: Synthetic oligonucleotide
cacugcagguccagaaagg

SEQ ID NO: 2539906 - RNA, 19 nt, Artificial Sequence
  Description of Artificial Sequence: Synthetic oligonucleotide
ugaaguugcuccaggcaua

SEQ ID NO: 2539907 - RNA, 19 nt, Artificial Sequence
  Description of Artificial Sequence: Synthetic oligonucleotide
agacgaggcagcaagagaa

SEQ ID NO: 2539908 - RNA, 19 nt, Artificial Sequence
  Description of Artificial Sequence: Synthetic oligonucleotide
caggcuaccucuguggcag

SEQ ID NO: 2539909 - RNA, 19 nt, Artificial Sequence
  Description of Artificial Sequence: Synthetic oligonucleotide
gcugauguagauuaugucu

SEQ ID NO: 2539910 - RNA, 19 nt, Artificial Sequence
  Description of Artificial Sequence: Synthetic oligonucleotide
gaagcggccagugucgcug

SEQ ID NO: 2539911 - RNA, 19 nt, Artificial Sequence
  Description of Artificial Sequence: Synthetic oligonucleotide
agacgguccgaagaaaucu

SEQ ID NO: 2539912 - RNA, 19 nt, Artificial Sequence
  Description of Artificial Sequence: Synthetic oligonucleotide
uuagcccaggggcuagcag

SEQ ID NO: 2539913 - RNA, 19 nt, Artificial Sequence
  Description of Artificial Sequence: Synthetic oligonucleotide
auaggagccugaguucaac

SEQ ID NO: 2539914 - RNA, 19 nt, Artificial Sequence
  Description of Artificial Sequence: Synthetic oligonucleotide
cacugaagcggccaguguc

SEQ ID NO: 2539915 - RNA, 19 nt, Artificial Sequence
  Description of Artificial Sequence: Synthetic oligonucleotide
acaugccuauggcaucaac

SEQ ID NO: 2539916 - RNA, 19 nt, Artificial Sequence
  Description of Artificial Sequence: Synthetic oligonucleotide
caggcgaaucugaugaguc

SEQ ID NO: 2539917 - RNA, 19 nt, Artificial Sequence
  Description of Artificial Sequence: Synthetic oligonucleotide
agguccagaaaggagguga

SEQ ID NO: 2539918 - RNA, 19 nt, Artificial Sequence
  Description of Artificial Sequence: Synthetic oligonucleotide
agggaauggaggacacucc

SEQ ID NO: 2539919 - RNA, 19 nt, Artificial Sequence
  Description of Artificial Sequence: Synthetic oligonucleotide
ugccuauggcaucaacaga

SEQ ID NO: 2539920 - RNA, 19 nt, Artificial Sequence
  Description of Artificial Sequence: Synthetic oligonucleotide
gaauggaggacacuccacu

SEQ ID NO: 2539921 - RNA, 19 nt, Artificial Sequence
  Description of Artificial Sequence: Synthetic oligonucleotide
cuauggcaucaacagaguc

SEQ ID NO: 2539922 - RNA, 19 nt, Artificial Sequence
  Description of Artificial Sequence: Synthetic oligonucleotide
cuuagcugggaagccagag

SEQ ID NO: 2539923 - RNA, 19 nt, Artificial Sequence
  Description of Artificial Sequence: Synthetic oligonucleotide
guagacgaggcagcaagag

SEQ ID NO: 2539924 - RNA, 19 nt, Artificial Sequence
  Description of Artificial Sequence: Synthetic oligonucleotide
gguccgaagaaaucugggc

SEQ ID NO: 2539925 - RNA, 19 nt, Artificial Sequence
  Description of Artificial Sequence: Synthetic oligonucleotide
augccgacacugaagcggc

SEQ ID NO: 2539926 - RNA, 19 nt, Artificial Sequence
  Description of Artificial Sequence: Synthetic oligonucleotide
gucaauugucugguaggcg

SEQ ID NO: 2539927 - RNA, 19 nt, Artificial Sequence
  Description of Artificial Sequence: Synthetic oligonucleotide
gacacugaagcggccagug

SEQ ID NO: 2539928 - RNA, 19 nt, Artificial Sequence
  Description of Artificial Sequence: Synthetic oligonucleotide
uaggauagugaaguugcuc

SEQ ID NO: 2539929 - RNA, 19 nt, Artificial Sequence
  Description of Artificial Sequence: Synthetic oligonucleotide
gucgcuggaggcaagacuc

SEQ ID NO: 2539930 - RNA, 19 nt, Artificial Sequence
  Description of Artificial Sequence: Synthetic oligonucleotide
cucaggcuaccucuguggc

SEQ ID NO: 2539931 - RNA, 19 nt, Artificial Sequence
  Description of Artificial Sequence: Synthetic oligonucleotide
gauggccaugccgacacug

SEQ ID NO: 2539932 - RNA, 19 nt, Artificial Sequence
  Description of Artificial Sequence: Synthetic oligonucleotide
cagggaauggaggacacuc

SEQ ID NO: 2539933 - RNA, 19 nt, Artificial Sequence
  Description of Artificial Sequence: Synthetic oligonucleotide
aguucaacaagcagcccca

SEQ ID NO: 2539934 - RNA, 19 nt, Artificial Sequence
  Description of Artificial Sequence: Synthetic oligonucleotide
gaugagucaauugucuggu

SEQ ID NO: 2539935 - RNA, 19 nt, Artificial Sequence
  Description of Artificial Sequence: Synthetic oligonucleotide
agugggagcuccccuccuc

SEQ ID NO: 2539936 - RNA, 19 nt, Artificial Sequence
  Description of Artificial Sequence: Synthetic oligonucleotide
accuucaaguucacggcgg

SEQ ID NO: 2539937 - RNA, 19 nt, Artificial Sequence
  Description of Artificial Sequence: Synthetic oligonucleotide
agaaaggaggugacaagca

SEQ ID NO: 2539938 - RNA, 19 nt, Artificial Sequence
  Description of Artificial Sequence: Synthetic oligonucleotide
gccaugccgacacugaagc

SEQ ID NO: 2539939 - RNA, 19 nt, Artificial Sequence
  Description of Artificial Sequence: Synthetic oligonucleotide
ucaggcuaccucuguggca

SEQ ID NO: 2539940 - RNA, 19 nt, Artificial Sequence
  Description of Artificial Sequence: Synthetic oligonucleotide
aggagccugaguucaacaa

SEQ ID NO: 2539941 - RNA, 19 nt, Artificial Sequence
  Description of Artificial Sequence: Synthetic oligonucleotide
aaguucacggcgggcagcu

SEQ ID NO: 2539942 - RNA, 19 nt, Artificial Sequence
  Description of Artificial Sequence: Synthetic oligonucleotide
aagcggccagugucgcugg

SEQ ID NO: 2539943 - RNA, 19 nt, Artificial Sequence
  Description of Artificial Sequence: Synthetic oligonucleotide
gugggagcuccccuccucg

SEQ ID NO: 2539944 - RNA, 19 nt, Artificial Sequence
  Description of Artificial Sequence: Synthetic oligonucleotide
uuaggggcuuggcucuucu

SEQ ID NO: 2539945 - RNA, 19 nt, Artificial Sequence
  Description of Artificial Sequence: Synthetic oligonucleotide
cuaggaagaugguggccac

SEQ ID NO: 2539946 - RNA, 19 nt, Artificial Sequence
  Description of Artificial Sequence: Synthetic oligonucleotide
gcaagacucugguagaaga

SEQ ID NO: 2539947 - RNA, 19 nt, Artificial Sequence
  Description of Artificial Sequence: Synthetic oligonucleotide
gaggcaagacucugguaga

SEQ ID NO: 2539948 - RNA, 19 nt, Artificial Sequence
  Description of Artificial Sequence: Synthetic oligonucleotide
aggcgaaucugaugaguca

SEQ ID NO: 2539949 - RNA, 19 nt, Artificial Sequence
  Description of Artificial Sequence: Synthetic oligonucleotide
gacgguccgaagaaaucug

SEQ ID NO: 2539950 - RNA, 19 nt, Artificial Sequence
  Description of Artificial Sequence: Synthetic oligonucleotide
ucacggugcaugugguaga

SEQ ID NO: 2539951 - RNA, 19 nt, Artificial Sequence
  Description of Artificial Sequence: Synthetic oligonucleotide
ugcaggcgaaucugaugag

SEQ ID NO: 2539952 - RNA, 19 nt, Artificial Sequence
  Description of Artificial Sequence: Synthetic oligonucleotide
guguuggagggguugguuc

SEQ ID NO: 2539953 - RNA, 19 nt, Artificial Sequence
  Description of Artificial Sequence: Synthetic oligonucleotide
ugcacgacggucgcgggga

SEQ ID NO: 2539954 - RNA, 19 nt, Artificial Sequence
  Description of Artificial Sequence: Synthetic oligonucleotide
cagugaaccaggagaauaa

SEQ ID NO: 2539955 - RNA, 19 nt, Artificial Sequence
  Description of Artificial Sequence: Synthetic oligonucleotide
cagggcuaggauagugaag

SEQ ID NO: 2539956 - RNA, 19 nt, Artificial Sequence
  Description of Artificial Sequence: Synthetic oligonucleotide
gaaaggaggugacaagcau

SEQ ID NO: 2539957 - RNA, 19 nt, Artificial Sequence
  Description of Artificial Sequence: Synthetic oligonucleotide
uucacggcgggcagcucca

SEQ ID NO: 2539958 - RNA, 19 nt, Artificial Sequence
  Description of Artificial Sequence: Synthetic oligonucleotide
agcaagcugaggauggcca

SEQ ID NO: 2539959 - RNA, 19 nt, Artificial Sequence
  Description of Artificial Sequence: Synthetic oligonucleotide
gagaguuaggggcuuggcu

SEQ ID NO: 2539960 - RNA, 19 nt, Artificial Sequence
  Description of Artificial Sequence: Synthetic oligonucleotide
acgguccgaagaaaucugg

SEQ ID NO: 2539961 - RNA, 19 nt, Artificial Sequence
  Description of Artificial Sequence: Synthetic oligonucleotide
aggggcuuggcucuucuua

SEQ ID NO: 2539962 - RNA, 19 nt, Artificial Sequence
  Description of Artificial Sequence: Synthetic oligonucleotide
ugguucccuggagaguuag

SEQ ID NO: 2539963 - RNA, 19 nt, Artificial Sequence
  Description of Artificial Sequence: Synthetic oligonucleotide
ggcaccugcacgacggucg

SEQ ID NO: 2539964 - RNA, 19 nt, Artificial Sequence
  Description of Artificial Sequence: Synthetic oligonucleotide
ggccacagcccacacaccc

SEQ ID NO: 2539965 - RNA, 19 nt, Artificial Sequence
  Description of Artificial Sequence: Synthetic oligonucleotide
acgacggucgcggggacuc

SEQ ID NO: 2539966 - RNA, 19 nt, Artificial Sequence
  Description of Artificial Sequence: Synthetic oligonucleotide
gcucuucuuagcugggaag

SEQ ID NO: 2539967 - RNA, 19 nt, Artificial Sequence
  Description of Artificial Sequence: Synthetic oligonucleotide
gugaaguugcuccaggcau

SEQ ID NO: 2539968 - RNA, 19 nt, Artificial Sequence
  Description of Artificial Sequence: Synthetic oligonucleotide
ggggcuuggcucuucuuag

SEQ ID NO: 2539969 - RNA, 19 nt, Artificial Sequence
  Description of Artificial Sequence: Synthetic oligonucleotide
ggcuugagcagcaagcuga

SEQ ID NO: 2539970 - RNA, 19 nt, Artificial Sequence
  Description of Artificial Sequence: Synthetic oligonucleotide
ugaguucaacaagcagccc

SEQ ID NO: 2539971 - RNA, 19 nt, Artificial Sequence
  Description of Artificial Sequence: Synthetic oligonucleotide
agaggauugugaccuccaa

SEQ ID NO: 2539972 - RNA, 19 nt, Artificial Sequence
  Description of Artificial Sequence: Synthetic oligonucleotide
ggcuaggauagugaaguug

SEQ ID NO: 2539973 - RNA, 19 nt, Artificial Sequence
  Description of Artificial Sequence: Synthetic oligonucleotide
uccucgcucacggugcaug

SEQ ID NO: 2539974 - RNA, 19 nt, Artificial Sequence
  Description of Artificial Sequence: Synthetic oligonucleotide
uuuagcccaggggcuagca

SEQ ID NO: 2539975 - RNA, 19 nt, Artificial Sequence
  Description of Artificial Sequence: Synthetic oligonucleotide
guaggcgcuaugcuccuga

SEQ ID NO: 2539976 - RNA, 19 nt, Artificial Sequence
  Description of Artificial Sequence: Synthetic oligonucleotide
agggcuugagcagcaagcu

SEQ ID NO: 2539977 - RNA, 19 nt, Artificial Sequence
  Description of Artificial Sequence: Synthetic oligonucleotide
cuaugcuccugagacgguc

SEQ ID NO: 2539978 - RNA, 19 nt, Artificial Sequence
  Description of Artificial Sequence: Synthetic oligonucleotide
gucgcggggacuccugggc

SEQ ID NO: 2539979 - RNA, 19 nt, Artificial Sequence
  Description of Artificial Sequence: Synthetic oligonucleotide
guuuuagcccaggggcuag

SEQ ID NO: 2539980 - RNA, 19 nt, Artificial Sequence
  Description of Artificial Sequence: Synthetic oligonucleotide
gagacgguccgaagaaauc

SEQ ID NO: 2539981 - RNA, 19 nt, Artificial Sequence
  Description of Artificial Sequence: Synthetic oligonucleotide
uaggcgcuaugcuccugag

SEQ ID NO: 2539982 - RNA, 19 nt, Artificial Sequence
  Description of Artificial Sequence: Synthetic oligonucleotide
gaguuaggggcuuggcucu

SEQ ID NO: 2539983 - RNA, 19 nt, Artificial Sequence
  Description of Artificial Sequence: Synthetic oligonucleotide
ggggcuagcagguguguug

SEQ ID NO: 2539984 - RNA, 19 nt, Artificial Sequence
  Description of Artificial Sequence: Synthetic oligonucleotide
ggauagugaaguugcucca

SEQ ID NO: 2539985 - RNA, 19 nt, Artificial Sequence
  Description of Artificial Sequence: Synthetic oligonucleotide
gccugaguucaacaagcag

SEQ ID NO: 2539986 - RNA, 19 nt, Artificial Sequence
  Description of Artificial Sequence: Synthetic oligonucleotide
uggcaucaacagagucccg

SEQ ID NO: 2539987 - RNA, 19 nt, Artificial Sequence
  Description of Artificial Sequence: Synthetic oligonucleotide
cugguagaagaugcugaug

SEQ ID NO: 2539988 - RNA, 19 nt, Artificial Sequence
  Description of Artificial Sequence: Synthetic oligonucleotide
uacuugacucaggcuaccu

SEQ ID NO: 2539989 - RNA, 19 nt, Artificial Sequence
  Description of Artificial Sequence: Synthetic oligonucleotide
acaagcagccccagguugu

SEQ ID NO: 2539990 - RNA, 19 nt, Artificial Sequence
  Description of Artificial Sequence: Synthetic oligonucleotide
gguacuugacucaggcuac

SEQ ID NO: 2539991 - RNA, 19 nt, Artificial Sequence
  Description of Artificial Sequence: Synthetic oligonucleotide
cuccaucccgaccccggcg

SEQ ID NO: 2539992 - RNA, 19 nt, Artificial Sequence
  Description of Artificial Sequence: Synthetic oligonucleotide
cuccaagguacuugacuca

SEQ ID NO: 2539993 - RNA, 19 nt, Artificial Sequence
  Description of Artificial Sequence: Synthetic oligonucleotide
aaguugcuccaggcauagg

SEQ ID NO: 2539994 - RNA, 19 nt, Artificial Sequence
  Description of Artificial Sequence: Synthetic oligonucleotide
agccagugaaccaggagaa

SEQ ID NO: 2539995 - RNA, 19 nt, Artificial Sequence
  Description of Artificial Sequence: Synthetic oligonucleotide
uuuuagcccaggggcuagc

SEQ ID NO: 2539996 - RNA, 19 nt, Artificial Sequence
  Description of Artificial Sequence: Synthetic oligonucleotide
ugggcggagugggagcucc

SEQ ID NO: 2539997 - RNA, 19 nt, Artificial Sequence
  Description of Artificial Sequence: Synthetic oligonucleotide
gggcuagcagguguguugg

SEQ ID NO: 2539998 - RNA, 19 nt, Artificial Sequence
  Description of Artificial Sequence: Synthetic oligonucleotide
cuucuuagcugggaagcca

SEQ ID NO: 2539999 - RNA, 19 nt, Artificial Sequence
  Description of Artificial Sequence: Synthetic oligonucleotide
aguuuuagcccaggggcua

SEQ ID NO: 2540000 - RNA, 19 nt, Artificial Sequence
  Description of Artificial Sequence: Synthetic oligonucleotide
cccuuguccuccacaacgg

SEQ ID NO: 2540001 - RNA, 19 nt, Artificial Sequence
  Description of Artificial Sequence: Synthetic oligonucleotide
uugugaccuccaagguacu

SEQ ID NO: 2540002 - RNA, 19 nt, Artificial Sequence
  Description of Artificial Sequence: Synthetic oligonucleotide
gcuagcagguguguuggag

SEQ ID NO: 2540003 - RNA, 19 nt, Artificial Sequence
  Description of Artificial Sequence: Synthetic oligonucleotide
agauuaugucuaggaagau

SEQ ID NO: 2540004 - RNA, 19 nt, Artificial Sequence
  Description of Artificial Sequence: Synthetic oligonucleotide
gcugcaggcgaaucugaug

SEQ ID NO: 2540005 - RNA, 19 nt, Artificial Sequence
  Description of Artificial Sequence: Synthetic oligonucleotide
cugcacgacggucgcgggg

SEQ ID NO: 2540006 - RNA, 19 nt, Artificial Sequence
  Description of Artificial Sequence: Synthetic oligonucleotide
cgcuaugcuccugagacgg

SEQ ID NO: 2540007 - RNA, 19 nt, Artificial Sequence
  Description of Artificial Sequence: Synthetic oligonucleotide
uaccucuguggcagggaau

SEQ ID NO: 2540008 - RNA, 19 nt, Artificial Sequence
  Description of Artificial Sequence: Synthetic oligonucleotide
guacuugacucaggcuacc

SEQ ID NO: 2540009 - RNA, 19 nt, Artificial Sequence
  Description of Artificial Sequence: Synthetic oligonucleotide
ugaagcggccagugucgcu

SEQ ID NO: 2540010 - RNA, 19 nt, Artificial Sequence
  Description of Artificial Sequence: Synthetic oligonucleotide
agcuccaucccgaccccgg

SEQ ID NO: 2540011 - RNA, 19 nt, Artificial Sequence
  Description of Artificial Sequence: Synthetic oligonucleotide
cagaggauugugaccucca

SEQ ID NO: 2540012 - RNA, 19 nt, Artificial Sequence
  Description of Artificial Sequence: Synthetic oligonucleotide
ggcauaggagccugaguuc

SEQ ID NO: 2540013 - RNA, 19 nt, Artificial Sequence
  Description of Artificial Sequence: Synthetic oligonucleotide
guccuccacaacggcauag

SEQ ID NO: 2540014 - RNA, 19 nt, Artificial Sequence
  Description of Artificial Sequence: Synthetic oligonucleotide
cacacccagggcuaggaua

SEQ ID NO: 2540015 - RNA, 19 nt, Artificial Sequence
  Description of Artificial Sequence: Synthetic oligonucleotide
ugguaggcgcuaugcuccu

SEQ ID NO: 2540016 - RNA, 19 nt, Artificial Sequence
  Description of Artificial Sequence: Synthetic oligonucleotide
ggagaauaaccuucaaguu

SEQ ID NO: 2540017 - RNA, 19 nt, Artificial Sequence
  Description of Artificial Sequence: Synthetic oligonucleotide
ccaagguacuugacucagg

SEQ ID NO: 2540018 - RNA, 19 nt, Artificial Sequence
  Description of Artificial Sequence: Synthetic oligonucleotide
guugguucccuggagaguu

SEQ ID NO: 2540019 - RNA, 19 nt, Artificial Sequence
  Description of Artificial Sequence: Synthetic oligonucleotide
ggagggcaccugcacgacg

SEQ ID NO: 2540020 - RNA, 19 nt, Artificial Sequence
  Description of Artificial Sequence: Synthetic oligonucleotide
cuaccucuguggcagggaa

SEQ ID NO: 2540021 - RNA, 19 nt, Artificial Sequence
  Description of Artificial Sequence: Synthetic oligonucleotide
ggcaagacucugguagaag

SEQ ID NO: 2540022 - RNA, 19 nt, Artificial Sequence
  Description of Artificial Sequence: Synthetic oligonucleotide
caacagagucccgcugggc

SEQ ID NO: 2540023 - RNA, 19 nt, Artificial Sequence
  Description of Artificial Sequence: Synthetic oligonucleotide
cacggugcaugugguagac

SEQ ID NO: 2540024 - RNA, 19 nt, Artificial Sequence
  Description of Artificial Sequence: Synthetic oligonucleotide
cugaagcggccagugucgc

SEQ ID NO: 2540025 - RNA, 19 nt, Artificial Sequence
  Description of Artificial Sequence: Synthetic oligonucleotide
aggcgcuaugcuccugaga

SEQ ID NO: 2540026 - RNA, 19 nt, Artificial Sequence
  Description of Artificial Sequence: Synthetic oligonucleotide
aucccgaccccggcggagg

SEQ ID NO: 2540027 - RNA, 19 nt, Artificial Sequence
  Description of Artificial Sequence: Synthetic oligonucleotide
gcagcaagagaagggcuug

SEQ ID NO: 2540028 - RNA, 19 nt, Artificial Sequence
  Description of Artificial Sequence: Synthetic oligonucleotide
caguuuuagcccaggggcu

SEQ ID NO: 2540029 - RNA, 19 nt, Artificial Sequence
  Description of Artificial Sequence: Synthetic oligonucleotide
agccugaguucaacaagca

SEQ ID NO: 2540030 - RNA, 19 nt, Artificial Sequence
  Description of Artificial Sequence: Synthetic oligonucleotide
ccagguugucagcagccag

SEQ ID NO: 2540031 - RNA, 19 nt, Artificial Sequence
  Description of Artificial Sequence: Synthetic oligonucleotide
caauugucugguaggcgcu

SEQ ID NO: 2540032 - RNA, 19 nt, Artificial Sequence
  Description of Artificial Sequence: Synthetic oligonucleotide
ugccgacacugaagcggcc

SEQ ID NO: 2540033 - RNA, 19 nt, Artificial Sequence
  Description of Artificial Sequence: Synthetic oligonucleotide
ugugaccuccaagguacuu

SEQ ID NO: 2540034 - RNA, 19 nt, Artificial Sequence
  Description of Artificial Sequence: Synthetic oligonucleotide
ggcgaaucugaugagucaa

SEQ ID NO: 2540035 - RNA, 19 nt, Artificial Sequence
  Description of Artificial Sequence: Synthetic oligonucleotide
auugucugguaggcgcuau

SEQ ID NO: 2540036 - RNA, 19 nt, Artificial Sequence
  Description of Artificial Sequence: Synthetic oligonucleotide
aacaugccuauggcaucaa

SEQ ID NO: 2540037 - RNA, 19 nt, Artificial Sequence
  Description of Artificial Sequence: Synthetic oligonucleotide
gcgcuaugcuccugagacg

SEQ ID NO: 2540038 - RNA, 19 nt, Artificial Sequence
  Description of Artificial Sequence: Synthetic oligonucleotide
gggguugguucccuggaga

SEQ ID NO: 2540039 - RNA, 19 nt, Artificial Sequence
  Description of Artificial Sequence: Synthetic oligonucleotide
ggucgcggggacuccuggg

SEQ ID NO: 2540040 - RNA, 19 nt, Artificial Sequence
  Description of Artificial Sequence: Synthetic oligonucleotide
gggcuugagcagcaagcug

SEQ ID NO: 2540041 - RNA, 19 nt, Artificial Sequence
  Description of Artificial Sequence: Synthetic oligonucleotide
aggcuaccucuguggcagg

SEQ ID NO: 2540042 - RNA, 19 nt, Artificial Sequence
  Description of Artificial Sequence: Synthetic oligonucleotide
cacuccacugcagguccag

SEQ ID NO: 2540043 - RNA, 19 nt, Artificial Sequence
  Description of Artificial Sequence: Synthetic oligonucleotide
ccagaggauugugaccucc

SEQ ID NO: 2540044 - RNA, 19 nt, Artificial Sequence
  Description of Artificial Sequence: Synthetic oligonucleotide
ggagaguuaggggcuuggc

SEQ ID NO: 2540045 - RNA, 19 nt, Artificial Sequence
  Description of Artificial Sequence: Synthetic oligonucleotide
cgguccgaagaaaucuggg

SEQ ID NO: 2540046 - RNA, 19 nt, Artificial Sequence
  Description of Artificial Sequence: Synthetic oligonucleotide
aggcaagacucugguagaa

SEQ ID NO: 2540047 - RNA, 19 nt, Artificial Sequence
  Description of Artificial Sequence: Synthetic oligonucleotide
ggccaugccgacacugaag

SEQ ID NO: 2540048 - RNA, 19 nt, Artificial Sequence
  Description of Artificial Sequence: Synthetic oligonucleotide
agcuccccuccucgcucac

SEQ ID NO: 2540049 - RNA, 19 nt, Artificial Sequence
  Description of Artificial Sequence: Synthetic oligonucleotide
gguccagaaaggaggugac

SEQ ID NO: 2540050 - RNA, 19 nt, Artificial Sequence
  Description of Artificial Sequence: Synthetic oligonucleotide
cauaggagccugaguucaa

SEQ ID NO: 2540051 - RNA, 19 nt, Artificial Sequence
  Description of Artificial Sequence: Synthetic oligonucleotide
gggcuuggcucuucuuagc

SEQ ID NO: 2540052 - RNA, 19 nt, Artificial Sequence
  Description of Artificial Sequence: Synthetic oligonucleotide
ugcuccugagacgguccga

SEQ ID NO: 2540053 - RNA, 19 nt, Artificial Sequence
  Description of Artificial Sequence: Synthetic oligonucleotide
ggauugugaccuccaaggu

SEQ ID NO: 2540054 - RNA, 19 nt, Artificial Sequence
  Description of Artificial Sequence: Synthetic oligonucleotide
gucugguaggcgcuaugcu

SEQ ID NO: 2540055 - RNA, 19 nt, Artificial Sequence
  Description of Artificial Sequence: Synthetic oligonucleotide
ccaugccgacacugaagcg

SEQ ID NO: 2540056 - RNA, 19 nt, Artificial Sequence
  Description of Artificial Sequence: Synthetic oligonucleotide
gacucugguagaagaugcu

SEQ ID NO: 2540057 - RNA, 19 nt, Artificial Sequence
  Description of Artificial Sequence: Synthetic oligonucleotide
gguucccuggagaguuagg

SEQ ID NO: 2540058 - RNA, 19 nt, Artificial Sequence
  Description of Artificial Sequence: Synthetic oligonucleotide
ggcgggcagcuccaucccg

SEQ ID NO: 2540059 - RNA, 19 nt, Artificial Sequence
  Description of Artificial Sequence: Synthetic oligonucleotide
cagagucccgcugggccac

SEQ ID NO: 2540060 - RNA, 19 nt, Artificial Sequence
  Description of Artificial Sequence: Synthetic oligonucleotide
caccaagaaacaugccuau

SEQ ID NO: 2540061 - RNA, 19 nt, Artificial Sequence
  Description of Artificial Sequence: Synthetic oligonucleotide
gcggagggcaccugcacga

SEQ ID NO: 2540062 - RNA, 19 nt, Artificial Sequence
  Description of Artificial Sequence: Synthetic oligonucleotide
ggggcaucuucaguacccc

SEQ ID NO: 2540063 - RNA, 19 nt, Artificial Sequence
  Description of Artificial Sequence: Synthetic oligonucleotide
ggagcuccccuccucgcuc

SEQ ID NO: 2540064 - RNA, 19 nt, Artificial Sequence
  Description of Artificial Sequence: Synthetic oligonucleotide
gaccuccaagguacuugac

SEQ ID NO: 2540065 - RNA, 19 nt, Artificial Sequence
  Description of Artificial Sequence: Synthetic oligonucleotide
ggaggacacuccacugcag

SEQ ID NO: 2540066 - RNA, 19 nt, Artificial Sequence
  Description of Artificial Sequence: Synthetic oligonucleotide
ccugagacgguccgaagaa

SEQ ID NO: 2540067 - RNA, 19 nt, Artificial Sequence
  Description of Artificial Sequence: Synthetic oligonucleotide
ggcuuggcucuucuuagcu

SEQ ID NO: 2540068 - RNA, 19 nt, Artificial Sequence
  Description of Artificial Sequence: Synthetic oligonucleotide
caucccgaccccggcggag

SEQ ID NO: 2540069 - RNA, 19 nt, Artificial Sequence
  Description of Artificial Sequence: Synthetic oligonucleotide
gugucgcuggaggcaagac

SEQ ID NO: 2540070 - RNA, 19 nt, Artificial Sequence
  Description of Artificial Sequence: Synthetic oligonucleotide
ccaggcauaggagccugag

SEQ ID NO: 2540071 - RNA, 19 nt, Artificial Sequence
  Description of Artificial Sequence: Synthetic oligonucleotide
ccgacacugaagcggccag

SEQ ID NO: 2540072 - RNA, 19 nt, Artificial Sequence
  Description of Artificial Sequence: Synthetic oligonucleotide
aggaggugacaagcauccu

SEQ ID NO: 2540073 - RNA, 19 nt, Artificial Sequence
  Description of Artificial Sequence: Synthetic oligonucleotide
aguucacggcgggcagcuc

SEQ ID NO: 2540074 - RNA, 19 nt, Artificial Sequence
  Description of Artificial Sequence: Synthetic oligonucleotide
agaagggcuugagcagcaa

SEQ ID NO: 2540075 - RNA, 19 nt, Artificial Sequence
  Description of Artificial Sequence: Synthetic oligonucleotide
guuaggggcuuggcucuuc

SEQ ID NO: 2540076 - RNA, 19 nt, Artificial Sequence
  Description of Artificial Sequence: Synthetic oligonucleotide
ggcagggaauggaggacac

SEQ ID NO: 2540077 - RNA, 19 nt, Artificial Sequence
  Description of Artificial Sequence: Synthetic oligonucleotide
cugagacgguccgaagaaa

SEQ ID NO: 2540078 - RNA, 19 nt, Artificial Sequence
  Description of Artificial Sequence: Synthetic oligonucleotide
aggggcuagcagguguguu

SEQ ID NO: 2540079 - RNA, 19 nt, Artificial Sequence
  Description of Artificial Sequence: Synthetic oligonucleotide
caggcauaggagccugagu

SEQ ID NO: 2540080 - RNA, 19 nt, Artificial Sequence
  Description of Artificial Sequence: Synthetic oligonucleotide
caacaagcagccccagguu

SEQ ID NO: 2540081 - RNA, 19 nt, Artificial Sequence
  Description of Artificial Sequence: Synthetic oligonucleotide
ggcggagugggagcucccc

SEQ ID NO: 2540082 - RNA, 19 nt, Artificial Sequence
  Description of Artificial Sequence: Synthetic oligonucleotide
cacggcgggcagcuccauc

SEQ ID NO: 2540083 - RNA, 19 nt, Artificial Sequence
  Description of Artificial Sequence: Synthetic oligonucleotide
aguuaggggcuuggcucuu

SEQ ID NO: 2540084 - RNA, 19 nt, Artificial Sequence
  Description of Artificial Sequence: Synthetic oligonucleotide
gcuccugagacgguccgaa

SEQ ID NO: 2540085 - RNA, 19 nt, Artificial Sequence
  Description of Artificial Sequence: Synthetic oligonucleotide
ggcccuuguccuccacaac

SEQ ID NO: 2540086 - RNA, 19 nt, Artificial Sequence
  Description of Artificial Sequence: Synthetic oligonucleotide
agcggccagugucgcugga

SEQ ID NO: 2540087 - RNA, 19 nt, Artificial Sequence
  Description of Artificial Sequence: Synthetic oligonucleotide
gccgacacugaagcggcca

SEQ ID NO: 2540088 - RNA, 19 nt, Artificial Sequence
  Description of Artificial Sequence: Synthetic oligonucleotide
gcuaccucuguggcaggga

SEQ ID NO: 2540089 - RNA, 19 nt, Artificial Sequence
  Description of Artificial Sequence: Synthetic oligonucleotide
acggucgcggggacuccug

SEQ ID NO: 2540090 - RNA, 19 nt, Artificial Sequence
  Description of Artificial Sequence: Synthetic oligonucleotide
gcggccagugucgcuggag

SEQ ID NO: 2540091 - RNA, 19 nt, Artificial Sequence
  Description of Artificial Sequence: Synthetic oligonucleotide
cccggcggagggcaccugc

SEQ ID NO: 2540092 - RNA, 19 nt, Artificial Sequence
  Description of Artificial Sequence: Synthetic oligonucleotide
cccgcugggccacagccca

SEQ ID NO: 2540093 - RNA, 19 nt, Artificial Sequence
  Description of Artificial Sequence: Synthetic oligonucleotide
gcaggcgaaucugaugagu

SEQ ID NO: 2540094 - RNA, 19 nt, Artificial Sequence
  Description of Artificial Sequence: Synthetic oligonucleotide
ccgaagaaaucugggcgga

SEQ ID NO: 2540095 - RNA, 19 nt, Artificial Sequence
  Description of Artificial Sequence: Synthetic oligonucleotide
gguaggcgcuaugcuccug

SEQ ID NO: 2540096 - RNA, 19 nt, Artificial Sequence
  Description of Artificial Sequence: Synthetic oligonucleotide
ccaccaggccaccaagaaa

SEQ ID NO: 2540097 - RNA, 19 nt, Artificial Sequence
  Description of Artificial Sequence: Synthetic oligonucleotide
accccggcggagggcaccu

SEQ ID NO: 2540098 - RNA, 19 nt, Artificial Sequence
  Description of Artificial Sequence: Synthetic oligonucleotide
gguugguucccuggagagu

SEQ ID NO: 2540099 - RNA, 19 nt, Artificial Sequence
  Description of Artificial Sequence: Synthetic oligonucleotide
gcuccccuccucgcucacg

SEQ ID NO: 2540100 - RNA, 19 nt, Artificial Sequence
  Description of Artificial Sequence: Synthetic oligonucleotide
gccagaggauugugaccuc

SEQ ID NO: 2540101 - RNA, 19 nt, Artificial Sequence
  Description of Artificial Sequence: Synthetic oligonucleotide
ccacacacccagggcuagg

SEQ ID NO: 2540102 - RNA, 19 nt, Artificial Sequence
  Description of Artificial Sequence: Synthetic oligonucleotide
gacggucgcggggacuccu

SEQ ID NO: 2540103 - RNA, 19 nt, Artificial Sequence
  Description of Artificial Sequence: Synthetic oligonucleotide
ggccaccaggccaccaaga

SEQ ID NO: 2540104 - RNA, 19 nt, Artificial Sequence
  Description of Artificial Sequence: Synthetic oligonucleotide
ccaggagaauaaccuucaa

SEQ ID NO: 2540105 - RNA, 19 nt, Artificial Sequence
  Description of Artificial Sequence: Synthetic oligonucleotide
gcucacggugcauguggua

SEQ ID NO: 2540106 - RNA, 19 nt, Artificial Sequence
  Description of Artificial Sequence: Synthetic oligonucleotide
gcgggcagcuccaucccga

SEQ ID NO: 2540107 - RNA, 19 nt, Artificial Sequence
  Description of Artificial Sequence: Synthetic oligonucleotide
agagucccgcugggccaca

SEQ ID NO: 2540108 - RNA, 19 nt, Artificial Sequence
  Description of Artificial Sequence: Synthetic oligonucleotide
ucacggcgggcagcuccau

SEQ ID NO: 2540109 - RNA, 19 nt, Artificial Sequence
  Description of Artificial Sequence: Synthetic oligonucleotide
cggucgcggggacuccugg

SEQ ID NO: 2540110 - RNA, 19 nt, Artificial Sequence
  Description of Artificial Sequence: Synthetic oligonucleotide
gcggagugggagcuccccu

SEQ ID NO: 2540111 - RNA, 19 nt, Artificial Sequence
  Description of Artificial Sequence: Synthetic oligonucleotide
cccaggggcuagcaggugu

SEQ ID NO: 2540112 - RNA, 19 nt, Artificial Sequence
  Description of Artificial Sequence: Synthetic oligonucleotide
gcuccaggcauaggagccu

SEQ ID NO: 2540113 - RNA, 19 nt, Artificial Sequence
  Description of Artificial Sequence: Synthetic oligonucleotide
gcgaaucugaugagucaau

SEQ ID NO: 2540114 - RNA, 19 nt, Artificial Sequence
  Description of Artificial Sequence: Synthetic oligonucleotide
gcacgacggucgcggggac

SEQ ID NO: 2540115 - RNA, 19 nt, Artificial Sequence
  Description of Artificial Sequence: Synthetic oligonucleotide
gcccacacacccagggcua

SEQ ID NO: 2540116 - RNA, 19 nt, Artificial Sequence
  Description of Artificial Sequence: Synthetic oligonucleotide
ccggcggagggcaccugca

SEQ ID NO: 2540117 - RNA, 19 nt, Artificial Sequence
  Description of Artificial Sequence: Synthetic oligonucleotide
gggcuaggauagugaaguu

SEQ ID NO: 2540118 - RNA, 19 nt, Artificial Sequence
  Description of Artificial Sequence: Synthetic oligonucleotide
gggcggagugggagcuccc

SEQ ID NO: 2540119 - RNA, 19 nt, Artificial Sequence
  Description of Artificial Sequence: Synthetic oligonucleotide
gcagggaauggaggacacu

SEQ ID NO: 2540120 - RNA, 19 nt, Artificial Sequence
  Description of Artificial Sequence: Synthetic oligonucleotide
cagguguguuggagggguu

SEQ ID NO: 2540121 - RNA, 19 nt, Artificial Sequence
  Description of Artificial Sequence: Synthetic oligonucleotide
ccgaccccggcggagggca

SEQ ID NO: 2540122 - RNA, 19 nt, Artificial Sequence
  Description of Artificial Sequence: Synthetic oligonucleotide
ccccggguggcagccuggc

SEQ ID NO: 2540123 - RNA, 19 nt, Artificial Sequence
  Description of Artificial Sequence: Synthetic oligonucleotide
ccucgcucacggugcaugu

SEQ ID NO: 2540124 - RNA, 19 nt, Artificial Sequence
  Description of Artificial Sequence: Synthetic oligonucleotide
ggauggccaugccgacacu

SEQ ID NO: 2540125 - RNA, 19 nt, Artificial Sequence
  Description of Artificial Sequence: Synthetic oligonucleotide
gcuaugcuccugagacggu

SEQ ID NO: 2540126 - RNA, 19 nt, Artificial Sequence
  Description of Artificial Sequence: Synthetic oligonucleotide
cacgacggucgcggggacu

SEQ ID NO: 2540127 - RNA, 19 nt, Artificial Sequence
  Description of Artificial Sequence: Synthetic oligonucleotide
ccgcugggccacagcccac

SEQ ID NO: 2540128 - RNA, 19 nt, Artificial Sequence
  Description of Artificial Sequence: Synthetic oligonucleotide
ccaucccgaccccggcgga

SEQ ID NO: 2540129 - RNA, 19 nt, Artificial Sequence
  Description of Artificial Sequence: Synthetic oligonucleotide
ccaggccaccaagaaacau

SEQ ID NO: 2540130 - RNA, 19 nt, Artificial Sequence
  Description of Artificial Sequence: Synthetic oligonucleotide
cggagggcaccugcacgac

SEQ ID NO: 2540131 - RNA, 19 nt, Artificial Sequence
  Description of Artificial Sequence: Synthetic oligonucleotide
cggguggcagccuggcccu

SEQ ID NO: 2540132 - RNA, 19 nt, Artificial Sequence
  Description of Artificial Sequence: Synthetic oligonucleotide
cgacggucgcggggacucc

SEQ ID NO: 2540133 - RNA, 19 nt, Artificial Sequence
  Description of Artificial Sequence: Synthetic oligonucleotide
cggggacuccugggcuccg

SEQ ID NO: 2540134 - RNA, 19 nt, Artificial Sequence
  Description of Artificial Sequence: Synthetic oligonucleotide
cuccucgcucacggugcau

SEQ ID NO: 2540135 - RNA, 19 nt, Artificial Sequence
  Description of Artificial Sequence: Synthetic oligonucleotide
cgaccccggcggagggcac

SEQ ID NO: 2540136 - RNA, 19 nt, Artificial Sequence
  Description of Artificial Sequence: Synthetic oligonucleotide
cgacacugaagcggccagu

SEQ ID NO: 2540137 - RNA, 19 nt, Artificial Sequence
  Description of Artificial Sequence: Synthetic oligonucleotide
ccccggcggagggcaccug

SEQ ID NO: 2540138 - RNA, 19 nt, Artificial Sequence
  Description of Artificial Sequence: Synthetic oligonucleotide
aaauauguaggcuguggcc

SEQ ID NO: 2540139 - RNA, 19 nt, Artificial Sequence
  Description of Artificial Sequence: Synthetic oligonucleotide
aauauguaggcuguggccc

SEQ ID NO: 2540140 - RNA, 19 nt, Artificial Sequence
  Description of Artificial Sequence: Synthetic oligonucleotide
aauaguucugggcagucac

SEQ ID NO: 2540141 - RNA, 19 nt, Artificial Sequence
  Description of Artificial Sequence: Synthetic oligonucleotide
agaaucagcaccuuguuag

SEQ ID NO: 2540142 - RNA, 19 nt, Artificial Sequence
  Description of Artificial Sequence: Synthetic oligonucleotide
uuguuagggagguagaugg

SEQ ID NO: 2540143 - RNA, 19 nt, Artificial Sequence
  Description of Artificial Sequence: Synthetic oligonucleotide
aauuuggcgccauuggugg

SEQ ID NO: 2540144 - RNA, 19 nt, Artificial Sequence
  Description of Artificial Sequence: Synthetic oligonucleotide
ugaggccucauacagaucc

SEQ ID NO: 2540145 - RNA, 19 nt, Artificial Sequence
  Description of Artificial Sequence: Synthetic oligonucleotide
ugguucucaaauauguagg

SEQ ID NO: 2540146 - RNA, 19 nt, Artificial Sequence
  Description of Artificial Sequence: Synthetic oligonucleotide
uucucaaauauguaggcug

SEQ ID NO: 2540147 - RNA, 19 nt, Artificial Sequence
  Description of Artificial Sequence: Synthetic oligonucleotide
uugguucucaaauauguag

SEQ ID NO: 2540148 - RNA, 19 nt, Artificial Sequence
  Description of Artificial Sequence: Synthetic oligonucleotide
aaguucugccuucuggccc

SEQ ID NO: 2540149 - RNA, 19 nt, Artificial Sequence
  Description of Artificial Sequence: Synthetic oligonucleotide
aaacaugugccgcuugagg

SEQ ID NO: 2540150 - RNA, 19 nt, Artificial Sequence
  Description of Artificial Sequence: Synthetic oligonucleotide
agcucaaauaguucugggc

SEQ ID NO: 2540151 - RNA, 19 nt, Artificial Sequence
  Description of Artificial Sequence: Synthetic oligonucleotide
ucagcuccagugaauaccg

SEQ ID NO: 2540152 - RNA, 19 nt, Artificial Sequence
  Description of Artificial Sequence: Synthetic oligonucleotide
agguagauggaguggacgc

SEQ ID NO: 2540153 - RNA, 19 nt, Artificial Sequence
  Description of Artificial Sequence: Synthetic oligonucleotide
gaaggcauaguccuccagg

SEQ ID NO: 2540154 - RNA, 19 nt, Artificial Sequence
  Description of Artificial Sequence: Synthetic oligonucleotide
guuaaguucugccuucugg

SEQ ID NO: 2540155 - RNA, 19 nt, Artificial Sequence
  Description of Artificial Sequence: Synthetic oligonucleotide
aacaugugccgcuugagga

SEQ ID NO: 2540156 - RNA, 19 nt, Artificial Sequence
  Description of Artificial Sequence: Synthetic oligonucleotide
uccuguugagcugagaggg

SEQ ID NO: 2540157 - RNA, 19 nt, Artificial Sequence
  Description of Artificial Sequence: Synthetic oligonucleotide
gucuccaucagccagaauc

SEQ ID NO: 2540158 - RNA, 19 nt, Artificial Sequence
  Description of Artificial Sequence: Synthetic oligonucleotide
ucaaauauguaggcugugg

SEQ ID NO: 2540159 - RNA, 19 nt, Artificial Sequence
  Description of Artificial Sequence: Synthetic oligonucleotide
ucagcuguuaaguucugcc

SEQ ID NO: 2540160 - RNA, 19 nt, Artificial Sequence
  Description of Artificial Sequence: Synthetic oligonucleotide
agcaaagccagacaccauc

SEQ ID NO: 2540161 - RNA, 19 nt, Artificial Sequence
  Description of Artificial Sequence: Synthetic oligonucleotide
uugagcaaugugcucacag

SEQ ID NO: 2540162 - RNA, 19 nt, Artificial Sequence
  Description of Artificial Sequence: Synthetic oligonucleotide
uuucguaguucacagggcu

SEQ ID NO: 2540163 - RNA, 19 nt, Artificial Sequence
  Description of Artificial Sequence: Synthetic oligonucleotide
uuuugggcgauguuccggg

SEQ ID NO: 2540164 - RNA, 19 nt, Artificial Sequence
  Description of Artificial Sequence: Synthetic oligonucleotide
uucuacucgucgaagguug

SEQ ID NO: 2540165 - RNA, 19 nt, Artificial Sequence
  Description of Artificial Sequence: Synthetic oligonucleotide
caaauauguaggcuguggc

SEQ ID NO: 2540166 - RNA, 19 nt, Artificial Sequence
  Description of Artificial Sequence: Synthetic oligonucleotide
gacaccaucaggccguucc

SEQ ID NO: 2540167 - RNA, 19 nt, Artificial Sequence
  Description of Artificial Sequence: Synthetic oligonucleotide
ugcuuuugggcgauguucc

SEQ ID NO: 2540168 - RNA, 19 nt, Artificial Sequence
  Description of Artificial Sequence: Synthetic oligonucleotide
aaccacgaaggcauagucc

SEQ ID NO: 2540169 - RNA, 19 nt, Artificial Sequence
  Description of Artificial Sequence: Synthetic oligonucleotide
gcuuucguaguucacaggg

SEQ ID NO: 2540170 - RNA, 19 nt, Artificial Sequence
  Description of Artificial Sequence: Synthetic oligonucleotide
ucagugauagggagcaggc

SEQ ID NO: 2540171 - RNA, 19 nt, Artificial Sequence
  Description of Artificial Sequence: Synthetic oligonucleotide
ugccgcuugaggaauuugg

SEQ ID NO: 2540172 - RNA, 19 nt, Artificial Sequence
  Description of Artificial Sequence: Synthetic oligonucleotide
aggaauuuggcgccauugg

SEQ ID NO: 2540173 - RNA, 19 nt, Artificial Sequence
  Description of Artificial Sequence: Synthetic oligonucleotide
uggggugaccaacuuaucc

SEQ ID NO: 2540174 - RNA, 19 nt, Artificial Sequence
  Description of Artificial Sequence: Synthetic oligonucleotide
aaggcauaguccuccagga

SEQ ID NO: 2540175 - RNA, 19 nt, Artificial Sequence
  Description of Artificial Sequence: Synthetic oligonucleotide
uaguucacagggcucagug

SEQ ID NO: 2540176 - RNA, 19 nt, Artificial Sequence
  Description of Artificial Sequence: Synthetic oligonucleotide
gauguuccgggccuggaag

SEQ ID NO: 2540177 - RNA, 19 nt, Artificial Sequence
  Description of Artificial Sequence: Synthetic oligonucleotide
acagaucacgaucugcuug

SEQ ID NO: 2540178 - RNA, 19 nt, Artificial Sequence
  Description of Artificial Sequence: Synthetic oligonucleotide
aaagguagcugccgggaca

SEQ ID NO: 2540179 - RNA, 19 nt, Artificial Sequence
  Description of Artificial Sequence: Synthetic oligonucleotide
ugugaggccucauacagau

SEQ ID NO: 2540180 - RNA, 19 nt, Artificial Sequence
  Description of Artificial Sequence: Synthetic oligonucleotide
auacagauccagcaggccu

SEQ ID NO: 2540181 - RNA, 19 nt, Artificial Sequence
  Description of Artificial Sequence: Synthetic oligonucleotide
gaaucagcaccuuguuagg

SEQ ID NO: 2540182 - RNA, 19 nt, Artificial Sequence
  Description of Artificial Sequence: Synthetic oligonucleotide
aaucagcaccuuguuaggg

SEQ ID NO: 2540183 - RNA, 19 nt, Artificial Sequence
  Description of Artificial Sequence: Synthetic oligonucleotide
ucaaacaugugccgcuuga

SEQ ID NO: 2540184 - RNA, 19 nt, Artificial Sequence
  Description of Artificial Sequence: Synthetic oligonucleotide
ugagcaaugugcucacagc

SEQ ID NO: 2540185 - RNA, 19 nt, Artificial Sequence
  Description of Artificial Sequence: Synthetic oligonucleotide
ugccgggacaggaagcucg

SEQ ID NO: 2540186 - RNA, 19 nt, Artificial Sequence
  Description of Artificial Sequence: Synthetic oligonucleotide
gugaccaacuuauccaugc

SEQ ID NO: 2540187 - RNA, 19 nt, Artificial Sequence
  Description of Artificial Sequence: Synthetic oligonucleotide
cucaaauaguucugggcag

SEQ ID NO: 2540188 - RNA, 19 nt, Artificial Sequence
  Description of Artificial Sequence: Synthetic oligonucleotide
gaauuuggcgccauuggug

SEQ ID NO: 2540189 - RNA, 19 nt, Artificial Sequence
  Description of Artificial Sequence: Synthetic oligonucleotide
gaccaacuuauccaugccc

SEQ ID NO: 2540190 - RNA, 19 nt, Artificial Sequence
  Description of Artificial Sequence: Synthetic oligonucleotide
acauccagaccaaaggccg

SEQ ID NO: 2540191 - RNA, 19 nt, Artificial Sequence
  Description of Artificial Sequence: Synthetic oligonucleotide
acagggcucagugauaggg

SEQ ID NO: 2540192 - RNA, 19 nt, Artificial Sequence
  Description of Artificial Sequence: Synthetic oligonucleotide
gguguagcagcuuucguag

SEQ ID NO: 2540193 - RNA, 19 nt, Artificial Sequence
  Description of Artificial Sequence: Synthetic oligonucleotide
aggagcucuccugugaggc

SEQ ID NO: 2540194 - RNA, 19 nt, Artificial Sequence
  Description of Artificial Sequence: Synthetic oligonucleotide
agcucgaugggucuccauc

SEQ ID NO: 2540195 - RNA, 19 nt, Artificial Sequence
  Description of Artificial Sequence: Synthetic oligonucleotide
gucuucuacucgucgaagg

SEQ ID NO: 2540196 - RNA, 19 nt, Artificial Sequence
  Description of Artificial Sequence: Synthetic oligonucleotide
auauguaggcuguggcccg

SEQ ID NO: 2540197 - RNA, 19 nt, Artificial Sequence
  Description of Artificial Sequence: Synthetic oligonucleotide
agugauagggagcaggcuu

SEQ ID NO: 2540198 - RNA, 19 nt, Artificial Sequence
  Description of Artificial Sequence: Synthetic oligonucleotide
uuagggagguagauggagu

SEQ ID NO: 2540199 - RNA, 19 nt, Artificial Sequence
  Description of Artificial Sequence: Synthetic oligonucleotide
ugagagggcacgcacucca

SEQ ID NO: 2540200 - RNA, 19 nt, Artificial Sequence
  Description of Artificial Sequence: Synthetic oligonucleotide
ccaguguugagcaaugugc

SEQ ID NO: 2540201 - RNA, 19 nt, Artificial Sequence
  Description of Artificial Sequence: Synthetic oligonucleotide
ggccacaucaaacaugugc

SEQ ID NO: 2540202 - RNA, 19 nt, Artificial Sequence
  Description of Artificial Sequence: Synthetic oligonucleotide
uguccaggugugcuuuugg

SEQ ID NO: 2540203 - RNA, 19 nt, Artificial Sequence
  Description of Artificial Sequence: Synthetic oligonucleotide
aguguugagcaaugugcuc

SEQ ID NO: 2540204 - RNA, 19 nt, Artificial Sequence
  Description of Artificial Sequence: Synthetic oligonucleotide
acaucaaacaugugccgcu

SEQ ID NO: 2540205 - RNA, 19 nt, Artificial Sequence
  Description of Artificial Sequence: Synthetic oligonucleotide
ucacagggcucagugauag

SEQ ID NO: 2540206 - RNA, 19 nt, Artificial Sequence
  Description of Artificial Sequence: Synthetic oligonucleotide
gagguagauggaguggacg

SEQ ID NO: 2540207 - RNA, 19 nt, Artificial Sequence
  Description of Artificial Sequence: Synthetic oligonucleotide
caggcagccagcaucuugc

SEQ ID NO: 2540208 - RNA, 19 nt, Artificial Sequence
  Description of Artificial Sequence: Synthetic oligonucleotide
uccaggugugcuuuugggc

SEQ ID NO: 2540209 - RNA, 19 nt, Artificial Sequence
  Description of Artificial Sequence: Synthetic oligonucleotide
agcaggguggguuacugug

SEQ ID NO: 2540210 - RNA, 19 nt, Artificial Sequence
  Description of Artificial Sequence: Synthetic oligonucleotide
agccagacaccaucaggcc

SEQ ID NO: 2540211 - RNA, 19 nt, Artificial Sequence
  Description of Artificial Sequence: Synthetic oligonucleotide
gaagguugcucaggaaagg

SEQ ID NO: 2540212 - RNA, 19 nt, Artificial Sequence
  Description of Artificial Sequence: Synthetic oligonucleotide
ggcauaguccuccaggaag

SEQ ID NO: 2540213 - RNA, 19 nt, Artificial Sequence
  Description of Artificial Sequence: Synthetic oligonucleotide
auagcauguccgcuucagg

SEQ ID NO: 2540214 - RNA, 19 nt, Artificial Sequence
  Description of Artificial Sequence: Synthetic oligonucleotide
cucagugauagggagcagg

SEQ ID NO: 2540215 - RNA, 19 nt, Artificial Sequence
  Description of Artificial Sequence: Synthetic oligonucleotide
uacagauccagcaggccuc

SEQ ID NO: 2540216 - RNA, 19 nt, Artificial Sequence
  Description of Artificial Sequence: Synthetic oligonucleotide
aggaaagguagcugccggg

SEQ ID NO: 2540217 - RNA, 19 nt, Artificial Sequence
  Description of Artificial Sequence: Synthetic oligonucleotide
uagggagcaggcuugguuc

SEQ ID NO: 2540218 - RNA, 19 nt, Artificial Sequence
  Description of Artificial Sequence: Synthetic oligonucleotide
gguucucaaauauguaggc

SEQ ID NO: 2540219 - RNA, 19 nt, Artificial Sequence
  Description of Artificial Sequence: Synthetic oligonucleotide
guuagggagguagauggag

SEQ ID NO: 2540220 - RNA, 19 nt, Artificial Sequence
  Description of Artificial Sequence: Synthetic oligonucleotide
gcucaaauaguucugggca

SEQ ID NO: 2540221 - RNA, 19 nt, Artificial Sequence
  Description of Artificial Sequence: Synthetic oligonucleotide
caggccucgaaccacgaag

SEQ ID NO: 2540222 - RNA, 19 nt, Artificial Sequence
  Description of Artificial Sequence: Synthetic oligonucleotide
ugguguagcagcuuucgua

SEQ ID NO: 2540223 - RNA, 19 nt, Artificial Sequence
  Description of Artificial Sequence: Synthetic oligonucleotide
cuccuguugagcugagagg

SEQ ID NO: 2540224 - RNA, 19 nt, Artificial Sequence
  Description of Artificial Sequence: Synthetic oligonucleotide
agagggcacgcacuccagc

SEQ ID NO: 2540225 - RNA, 19 nt, Artificial Sequence
  Description of Artificial Sequence: Synthetic oligonucleotide
agggcucagugauagggag

SEQ ID NO: 2540226 - RNA, 19 nt, Artificial Sequence
  Description of Artificial Sequence: Synthetic oligonucleotide
cagcuuucguaguucacag

SEQ ID NO: 2540227 - RNA, 19 nt, Artificial Sequence
  Description of Artificial Sequence: Synthetic oligonucleotide
cagaccaaaggccgggccg

SEQ ID NO: 2540228 - RNA, 19 nt, Artificial Sequence
  Description of Artificial Sequence: Synthetic oligonucleotide
ccaggugugcuuuugggcg

SEQ ID NO: 2540229 - RNA, 19 nt, Artificial Sequence
  Description of Artificial Sequence: Synthetic oligonucleotide
agucagcuccagugaauac

SEQ ID NO: 2540230 - RNA, 19 nt, Artificial Sequence
  Description of Artificial Sequence: Synthetic oligonucleotide
ugggcagucacugguguag

SEQ ID NO: 2540231 - RNA, 19 nt, Artificial Sequence
  Description of Artificial Sequence: Synthetic oligonucleotide
aucagcaccuuguuaggga

SEQ ID NO: 2540232 - RNA, 19 nt, Artificial Sequence
  Description of Artificial Sequence: Synthetic oligonucleotide
auuuggcgccauugguggc

SEQ ID NO: 2540233 - RNA, 19 nt, Artificial Sequence
  Description of Artificial Sequence: Synthetic oligonucleotide
ucaaauaguucugggcagu

SEQ ID NO: 2540234 - RNA, 19 nt, Artificial Sequence
  Description of Artificial Sequence: Synthetic oligonucleotide
uggguuacugugcuccacu

SEQ ID NO: 2540235 - RNA, 19 nt, Artificial Sequence
  Description of Artificial Sequence: Synthetic oligonucleotide
aaauaguucugggcaguca

SEQ ID NO: 2540236 - RNA, 19 nt, Artificial Sequence
  Description of Artificial Sequence: Synthetic oligonucleotide
gagggcacgcacuccagcc

SEQ ID NO: 2540237 - RNA, 19 nt, Artificial Sequence
  Description of Artificial Sequence: Synthetic oligonucleotide
gucagcuccagugaauacc

SEQ ID NO: 2540238 - RNA, 19 nt, Artificial Sequence
  Description of Artificial Sequence: Synthetic oligonucleotide
gguugcucaggaaagguag

SEQ ID NO: 2540239 - RNA, 19 nt, Artificial Sequence
  Description of Artificial Sequence: Synthetic oligonucleotide
gaaccacgaaggcauaguc

SEQ ID NO: 2540240 - RNA, 19 nt, Artificial Sequence
  Description of Artificial Sequence: Synthetic oligonucleotide
aagguugcucaggaaaggu

SEQ ID NO: 2540241 - RNA, 19 nt, Artificial Sequence
  Description of Artificial Sequence: Synthetic oligonucleotide
gucuccacagaucacgauc

SEQ ID NO: 2540242 - RNA, 19 nt, Artificial Sequence
  Description of Artificial Sequence: Synthetic oligonucleotide
cuuguuagggagguagaug

SEQ ID NO: 2540243 - RNA, 19 nt, Artificial Sequence
  Description of Artificial Sequence: Synthetic oligonucleotide
caccuuguuagggagguag

SEQ ID NO: 2540244 - RNA, 19 nt, Artificial Sequence
  Description of Artificial Sequence: Synthetic oligonucleotide
ucguaguucacagggcuca

SEQ ID NO: 2540245 - RNA, 19 nt, Artificial Sequence
  Description of Artificial Sequence: Synthetic oligonucleotide
guuccaggcagccagcauc

SEQ ID NO: 2540246 - RNA, 19 nt, Artificial Sequence
  Description of Artificial Sequence: Synthetic oligonucleotide
ugccggcauagcauguccg

SEQ ID NO: 2540247 - RNA, 19 nt, Artificial Sequence
  Description of Artificial Sequence: Synthetic oligonucleotide
aaggccgggccgcagucag

SEQ ID NO: 2540248 - RNA, 19 nt, Artificial Sequence
  Description of Artificial Sequence: Synthetic oligonucleotide
ugagagucuccuguugagc

SEQ ID NO: 2540249 - RNA, 19 nt, Artificial Sequence
  Description of Artificial Sequence: Synthetic oligonucleotide
cuuauccaugcccaggaca

SEQ ID NO: 2540250 - RNA, 19 nt, Artificial Sequence
  Description of Artificial Sequence: Synthetic oligonucleotide
uguugagcaaugugcucac

SEQ ID NO: 2540251 - RNA, 19 nt, Artificial Sequence
  Description of Artificial Sequence: Synthetic oligonucleotide
gacgcacugcagcagggcc

SEQ ID NO: 2540252 - RNA, 19 nt, Artificial Sequence
  Description of Artificial Sequence: Synthetic oligonucleotide
agcuuucguaguucacagg

SEQ ID NO: 2540253 - RNA, 19 nt, Artificial Sequence
  Description of Artificial Sequence: Synthetic oligonucleotide
agcuguuaaguucugccuu

SEQ ID NO: 2540254 - RNA, 19 nt, Artificial Sequence
  Description of Artificial Sequence: Synthetic oligonucleotide
uguuagggagguagaugga

SEQ ID NO: 2540255 - RNA, 19 nt, Artificial Sequence
  Description of Artificial Sequence: Synthetic oligonucleotide
aucaggccguuccaggcag

SEQ ID NO: 2540256 - RNA, 19 nt, Artificial Sequence
  Description of Artificial Sequence: Synthetic oligonucleotide
caacuuauccaugcccagg

SEQ ID NO: 2540257 - RNA, 19 nt, Artificial Sequence
  Description of Artificial Sequence: Synthetic oligonucleotide
uccacagaucacgaucugc

SEQ ID NO: 2540258 - RNA, 19 nt, Artificial Sequence
  Description of Artificial Sequence: Synthetic oligonucleotide
gauggaguggacgcacugc

SEQ ID NO: 2540259 - RNA, 19 nt, Artificial Sequence
  Description of Artificial Sequence: Synthetic oligonucleotide
cugugcuccacugaucccc

SEQ ID NO: 2540260 - RNA, 19 nt, Artificial Sequence
  Description of Artificial Sequence: Synthetic oligonucleotide
ucuacucgucgaagguugc

SEQ ID NO: 2540261 - RNA, 19 nt, Artificial Sequence
  Description of Artificial Sequence: Synthetic oligonucleotide
uuccgggccuggaagagcu

SEQ ID NO: 2540262 - RNA, 19 nt, Artificial Sequence
  Description of Artificial Sequence: Synthetic oligonucleotide
accaacuuauccaugccca

SEQ ID NO: 2540263 - RNA, 19 nt, Artificial Sequence
  Description of Artificial Sequence: Synthetic oligonucleotide
gcucaggaaagguagcugc

SEQ ID NO: 2540264 - RNA, 19 nt, Artificial Sequence
  Description of Artificial Sequence: Synthetic oligonucleotide
cuuuugggcgauguuccgg

SEQ ID NO: 2540265 - RNA, 19 nt, Artificial Sequence
  Description of Artificial Sequence: Synthetic oligonucleotide
cacgaaggcauaguccucc

SEQ ID NO: 2540266 - RNA, 19 nt, Artificial Sequence
  Description of Artificial Sequence: Synthetic oligonucleotide
gaagagcuucuccagccca

SEQ ID NO: 2540267 - RNA, 19 nt, Artificial Sequence
  Description of Artificial Sequence: Synthetic oligonucleotide
gaaagguagcugccgggac

SEQ ID NO: 2540268 - RNA, 19 nt, Artificial Sequence
  Description of Artificial Sequence: Synthetic oligonucleotide
ucgaugggucuccaucagc

SEQ ID NO: 2540269 - RNA, 19 nt, Artificial Sequence
  Description of Artificial Sequence: Synthetic oligonucleotide
guguugagcaaugugcuca

SEQ ID NO: 2540270 - RNA, 19 nt, Artificial Sequence
  Description of Artificial Sequence: Synthetic oligonucleotide
uguugagcugagagggcac

SEQ ID NO: 2540271 - RNA, 19 nt, Artificial Sequence
  Description of Artificial Sequence: Synthetic oligonucleotide
cuugagagucuccuguuga

SEQ ID NO: 2540272 - RNA, 19 nt, Artificial Sequence
  Description of Artificial Sequence: Synthetic oligonucleotide
uucugggcagucacuggug

SEQ ID NO: 2540273 - RNA, 19 nt, Artificial Sequence
  Description of Artificial Sequence: Synthetic oligonucleotide
cauccagaccaaaggccgg

SEQ ID NO: 2540274 - RNA, 19 nt, Artificial Sequence
  Description of Artificial Sequence: Synthetic oligonucleotide
uucguaguucacagggcuc

SEQ ID NO: 2540275 - RNA, 19 nt, Artificial Sequence
  Description of Artificial Sequence: Synthetic oligonucleotide
cacgaucugcuugagaguc

SEQ ID NO: 2540276 - RNA, 19 nt, Artificial Sequence
  Description of Artificial Sequence: Synthetic oligonucleotide
guggacgcacugcagcagg

SEQ ID NO: 2540277 - RNA, 19 nt, Artificial Sequence
  Description of Artificial Sequence: Synthetic oligonucleotide
acucgucgaagguugcuca

SEQ ID NO: 2540278 - RNA, 19 nt, Artificial Sequence
  Description of Artificial Sequence: Synthetic oligonucleotide
cuccugugaggccucauac

SEQ ID NO: 2540279 - RNA, 19 nt, Artificial Sequence
  Description of Artificial Sequence: Synthetic oligonucleotide
auagggagcaggcuugguu

SEQ ID NO: 2540280 - RNA, 19 nt, Artificial Sequence
  Description of Artificial Sequence: Synthetic oligonucleotide
ugggucuccaucagccaga

SEQ ID NO: 2540281 - RNA, 19 nt, Artificial Sequence
  Description of Artificial Sequence: Synthetic oligonucleotide
cauagcauguccgcuucag

SEQ ID NO: 2540282 - RNA, 19 nt, Artificial Sequence
  Description of Artificial Sequence: Synthetic oligonucleotide
aguucacagggcucaguga

SEQ ID NO: 2540283 - RNA, 19 nt, Artificial Sequence
  Description of Artificial Sequence: Synthetic oligonucleotide
uugguguccuugcccuggg

SEQ ID NO: 2540284 - RNA, 19 nt, Artificial Sequence
  Description of Artificial Sequence: Synthetic oligonucleotide
ucgucgaagguugcucagg

SEQ ID NO: 2540285 - RNA, 19 nt, Artificial Sequence
  Description of Artificial Sequence: Synthetic oligonucleotide
cagaucacgaucugcuuga

SEQ ID NO: 2540286 - RNA, 19 nt, Artificial Sequence
  Description of Artificial Sequence: Synthetic oligonucleotide
ugggcgauguuccgggccu

SEQ ID NO: 2540287 - RNA, 19 nt, Artificial Sequence
  Description of Artificial Sequence: Synthetic oligonucleotide
uagcagcuuucguaguuca

SEQ ID NO: 2540288 - RNA, 19 nt, Artificial Sequence
  Description of Artificial Sequence: Synthetic oligonucleotide
caaugugcucacagccucc

SEQ ID NO: 2540289 - RNA, 19 nt, Artificial Sequence
  Description of Artificial Sequence: Synthetic oligonucleotide
aucaaacaugugccgcuug

SEQ ID NO: 2540290 - RNA, 19 nt, Artificial Sequence
  Description of Artificial Sequence: Synthetic oligonucleotide
guugagcugagagggcacg

SEQ ID NO: 2540291 - RNA, 19 nt, Artificial Sequence
  Description of Artificial Sequence: Synthetic oligonucleotide
ggaguggacgcacugcagc

SEQ ID NO: 2540292 - RNA, 19 nt, Artificial Sequence
  Description of Artificial Sequence: Synthetic oligonucleotide
uugcucaggaaagguagcu

SEQ ID NO: 2540293 - RNA, 19 nt, Artificial Sequence
  Description of Artificial Sequence: Synthetic oligonucleotide
uuacugugcuccacugauc

SEQ ID NO: 2540294 - RNA, 19 nt, Artificial Sequence
  Description of Artificial Sequence: Synthetic oligonucleotide
agggagguagauggagugg

SEQ ID NO: 2540295 - RNA, 19 nt, Artificial Sequence
  Description of Artificial Sequence: Synthetic oligonucleotide
cauacagauccagcaggcc

SEQ ID NO: 2540296 - RNA, 19 nt, Artificial Sequence
  Description of Artificial Sequence: Synthetic oligonucleotide
gaguggacgcacugcagca

SEQ ID NO: 2540297 - RNA, 19 nt, Artificial Sequence
  Description of Artificial Sequence: Synthetic oligonucleotide
guuacugugcuccacugau

SEQ ID NO: 2540298 - RNA, 19 nt, Artificial Sequence
  Description of Artificial Sequence: Synthetic oligonucleotide
uggcccggucuucuacucg

SEQ ID NO: 2540299 - RNA, 19 nt, Artificial Sequence
  Description of Artificial Sequence: Synthetic oligonucleotide
uauguaggcuguggcccgg

SEQ ID NO: 2540300 - RNA, 19 nt, Artificial Sequence
  Description of Artificial Sequence: Synthetic oligonucleotide
guagauggaguggacgcac

SEQ ID NO: 2540301 - RNA, 19 nt, Artificial Sequence
  Description of Artificial Sequence: Synthetic oligonucleotide
uucaggcggccacuggcca

SEQ ID NO: 2540302 - RNA, 19 nt, Artificial Sequence
  Description of Artificial Sequence: Synthetic oligonucleotide
caaacaugugccgcuugag

SEQ ID NO: 2540303 - RNA, 19 nt, Artificial Sequence
  Description of Artificial Sequence: Synthetic oligonucleotide
uguggcccggucuucuacu

SEQ ID NO: 2540304 - RNA, 19 nt, Artificial Sequence
  Description of Artificial Sequence: Synthetic oligonucleotide
gcauguccgcuucaggcgg

SEQ ID NO: 2540305 - RNA, 19 nt, Artificial Sequence
  Description of Artificial Sequence: Synthetic oligonucleotide
uagauggaguggacgcacu

SEQ ID NO: 2540306 - RNA, 19 nt, Artificial Sequence
  Description of Artificial Sequence: Synthetic oligonucleotide
uccaugcccaggacagccc

SEQ ID NO: 2540307 - RNA, 19 nt, Artificial Sequence
  Description of Artificial Sequence: Synthetic oligonucleotide
ggggugaccaacuuaucca

SEQ ID NO: 2540308 - RNA, 19 nt, Artificial Sequence
  Description of Artificial Sequence: Synthetic oligonucleotide
gccgcagucagcuccagug

SEQ ID NO: 2540309 - RNA, 19 nt, Artificial Sequence
  Description of Artificial Sequence: Synthetic oligonucleotide
agcaccuuguuagggaggu

SEQ ID NO: 2540310 - RNA, 19 nt, Artificial Sequence
  Description of Artificial Sequence: Synthetic oligonucleotide
aggaagccccagcagggug

SEQ ID NO: 2540311 - RNA, 19 nt, Artificial Sequence
  Description of Artificial Sequence: Synthetic oligonucleotide
gaugggucuccaucagcca

SEQ ID NO: 2540312 - RNA, 19 nt, Artificial Sequence
  Description of Artificial Sequence: Synthetic oligonucleotide
aggacagccccggucacag

SEQ ID NO: 2540313 - RNA, 19 nt, Artificial Sequence
  Description of Artificial Sequence: Synthetic oligonucleotide
ugagcugagagggcacgca

SEQ ID NO: 2540314 - RNA, 19 nt, Artificial Sequence
  Description of Artificial Sequence: Synthetic oligonucleotide
guugcucaggaaagguagc

SEQ ID NO: 2540315 - RNA, 19 nt, Artificial Sequence
  Description of Artificial Sequence: Synthetic oligonucleotide
auguuccgggccuggaaga

SEQ ID NO: 2540316 - RNA, 19 nt, Artificial Sequence
  Description of Artificial Sequence: Synthetic oligonucleotide
uacucgucgaagguugcuc

SEQ ID NO: 2540317 - RNA, 19 nt, Artificial Sequence
  Description of Artificial Sequence: Synthetic oligonucleotide
uucuggcccagcucaaaua

SEQ ID NO: 2540318 - RNA, 19 nt, Artificial Sequence
  Description of Artificial Sequence: Synthetic oligonucleotide
cucgucgaagguugcucag

SEQ ID NO: 2540319 - RNA, 19 nt, Artificial Sequence
  Description of Artificial Sequence: Synthetic oligonucleotide
agcaaugugcucacagccu

SEQ ID NO: 2540320 - RNA, 19 nt, Artificial Sequence
  Description of Artificial Sequence: Synthetic oligonucleotide
ccucauacagauccagcag

SEQ ID NO: 2540321 - RNA, 19 nt, Artificial Sequence
  Description of Artificial Sequence: Synthetic oligonucleotide
cucgaugggucuccaucag

SEQ ID NO: 2540322 - RNA, 19 nt, Artificial Sequence
  Description of Artificial Sequence: Synthetic oligonucleotide
gaucacgaucugcuugaga

SEQ ID NO: 2540323 - RNA, 19 nt, Artificial Sequence
  Description of Artificial Sequence: Synthetic oligonucleotide
ggccguuccaggcagccag

SEQ ID NO: 2540324 - RNA, 19 nt, Artificial Sequence
  Description of Artificial Sequence: Synthetic oligonucleotide
gagucuccuguugagcuga

SEQ ID NO: 2540325 - RNA, 19 nt, Artificial Sequence
  Description of Artificial Sequence: Synthetic oligonucleotide
cgaugggucuccaucagcc

SEQ ID NO: 2540326 - RNA, 19 nt, Artificial Sequence
  Description of Artificial Sequence: Synthetic oligonucleotide
caggagcucuccugugagg

SEQ ID NO: 2540327 - RNA, 19 nt, Artificial Sequence
  Description of Artificial Sequence: Synthetic oligonucleotide
ccgcuugaggaauuuggcg

SEQ ID NO: 2540328 - RNA, 19 nt, Artificial Sequence
  Description of Artificial Sequence: Synthetic oligonucleotide
cucaaauauguaggcugug

SEQ ID NO: 2540329 - RNA, 19 nt, Artificial Sequence
  Description of Artificial Sequence: Synthetic oligonucleotide
augugcucacagccuccac

SEQ ID NO: 2540330 - RNA, 19 nt, Artificial Sequence
  Description of Artificial Sequence: Synthetic oligonucleotide
ugguguccuugcccugggg

SEQ ID NO: 2540331 - RNA, 19 nt, Artificial Sequence
  Description of Artificial Sequence: Synthetic oligonucleotide
uugagcugagagggcacgc

SEQ ID NO: 2540332 - RNA, 19 nt, Artificial Sequence
  Description of Artificial Sequence: Synthetic oligonucleotide
gcauaguccuccaggaagc

SEQ ID NO: 2540333 - RNA, 19 nt, Artificial Sequence
  Description of Artificial Sequence: Synthetic oligonucleotide
gaagccccagcaggguggg

SEQ ID NO: 2540334 - RNA, 19 nt, Artificial Sequence
  Description of Artificial Sequence: Synthetic oligonucleotide
auugguggccuggggugac

SEQ ID NO: 2540335 - RNA, 19 nt, Artificial Sequence
  Description of Artificial Sequence: Synthetic oligonucleotide
aguggacgcacugcagcag

SEQ ID NO: 2540336 - RNA, 19 nt, Artificial Sequence
  Description of Artificial Sequence: Synthetic oligonucleotide
ugcuugagagucuccuguu

SEQ ID NO: 2540337 - RNA, 19 nt, Artificial Sequence
  Description of Artificial Sequence: Synthetic oligonucleotide
aggaagcucgaugggucuc

SEQ ID NO: 2540338 - RNA, 19 nt, Artificial Sequence
  Description of Artificial Sequence: Synthetic oligonucleotide
gagcuucuccagcccagug

SEQ ID NO: 2540339 - RNA, 19 nt, Artificial Sequence
  Description of Artificial Sequence: Synthetic oligonucleotide
agcugccgggacaggaagc

SEQ ID NO: 2540340 - RNA, 19 nt, Artificial Sequence
  Description of Artificial Sequence: Synthetic oligonucleotide
guagcagcuuucguaguuc

SEQ ID NO: 2540341 - RNA, 19 nt, Artificial Sequence
  Description of Artificial Sequence: Synthetic oligonucleotide
cagcaucuugcuguccagg

SEQ ID NO: 2540342 - RNA, 19 nt, Artificial Sequence
  Description of Artificial Sequence: Synthetic oligonucleotide
gcuguuaaguucugccuuc

SEQ ID NO: 2540343 - RNA, 19 nt, Artificial Sequence
  Description of Artificial Sequence: Synthetic oligonucleotide
gugccggcauagcaugucc

SEQ ID NO: 2540344 - RNA, 19 nt, Artificial Sequence
  Description of Artificial Sequence: Synthetic oligonucleotide
gcagccagcaucuugcugu

SEQ ID NO: 2540345 - RNA, 19 nt, Artificial Sequence
  Description of Artificial Sequence: Synthetic oligonucleotide
agcagcuuucguaguucac

SEQ ID NO: 2540346 - RNA, 19 nt, Artificial Sequence
  Description of Artificial Sequence: Synthetic oligonucleotide
ggucacagcaaagccagac

SEQ ID NO: 2540347 - RNA, 19 nt, Artificial Sequence
  Description of Artificial Sequence: Synthetic oligonucleotide
ccagcucaaauaguucugg

SEQ ID NO: 2540348 - RNA, 19 nt, Artificial Sequence
  Description of Artificial Sequence: Synthetic oligonucleotide
caguguugagcaaugugcu

SEQ ID NO: 2540349 - RNA, 19 nt, Artificial Sequence
  Description of Artificial Sequence: Synthetic oligonucleotide
gcuugagagucuccuguug

SEQ ID NO: 2540350 - RNA, 19 nt, Artificial Sequence
  Description of Artificial Sequence: Synthetic oligonucleotide
cauguccgcuucaggcggc

SEQ ID NO: 2540351 - RNA, 19 nt, Artificial Sequence
  Description of Artificial Sequence: Synthetic oligonucleotide
gcuuuugggcgauguuccg

SEQ ID NO: 2540352 - RNA, 19 nt, Artificial Sequence
  Description of Artificial Sequence: Synthetic oligonucleotide
gucagcuguuaaguucugc

SEQ ID NO: 2540353 - RNA, 19 nt, Artificial Sequence
  Description of Artificial Sequence: Synthetic oligonucleotide
uauccaugcccaggacagc

SEQ ID NO: 2540354 - RNA, 19 nt, Artificial Sequence
  Description of Artificial Sequence: Synthetic oligonucleotide
ggcucagugauagggagca

SEQ ID NO: 2540355 - RNA, 19 nt, Artificial Sequence
  Description of Artificial Sequence: Synthetic oligonucleotide
aggguggguuacugugcuc

SEQ ID NO: 2540356 - RNA, 19 nt, Artificial Sequence
  Description of Artificial Sequence: Synthetic oligonucleotide
guucugggcagucacuggu

SEQ ID NO: 2540357 - RNA, 19 nt, Artificial Sequence
  Description of Artificial Sequence: Synthetic oligonucleotide
ucuugcuguccaggugugc

SEQ ID NO: 2540358 - RNA, 19 nt, Artificial Sequence
  Description of Artificial Sequence: Synthetic oligonucleotide
gcuugguucucaaauaugu

SEQ ID NO: 2540359 - RNA, 19 nt, Artificial Sequence
  Description of Artificial Sequence: Synthetic oligonucleotide
ccaacuuauccaugcccag

SEQ ID NO: 2540360 - RNA, 19 nt, Artificial Sequence
  Description of Artificial Sequence: Synthetic oligonucleotide
acgaaggcauaguccucca

SEQ ID NO: 2540361 - RNA, 19 nt, Artificial Sequence
  Description of Artificial Sequence: Synthetic oligonucleotide
ccaucaggccguuccaggc

SEQ ID NO: 2540362 - RNA, 19 nt, Artificial Sequence
  Description of Artificial Sequence: Synthetic oligonucleotide
ccauugguggccuggggug

SEQ ID NO: 2540363 - RNA, 19 nt, Artificial Sequence
  Description of Artificial Sequence: Synthetic oligonucleotide
cuccagcccaguguugagc

SEQ ID NO: 2540364 - RNA, 19 nt, Artificial Sequence
  Description of Artificial Sequence: Synthetic oligonucleotide
ucaggcggccacuggccac

SEQ ID NO: 2540365 - RNA, 19 nt, Artificial Sequence
  Description of Artificial Sequence: Synthetic oligonucleotide
aggcauaguccuccaggaa

SEQ ID NO: 2540366 - RNA, 19 nt, Artificial Sequence
  Description of Artificial Sequence: Synthetic oligonucleotide
cacugguguagcagcuuuc

SEQ ID NO: 2540367 - RNA, 19 nt, Artificial Sequence
  Description of Artificial Sequence: Synthetic oligonucleotide
gcagcuuucguaguucaca

SEQ ID NO: 2540368 - RNA, 19 nt, Artificial Sequence
  Description of Artificial Sequence: Synthetic oligonucleotide
gcucgaugggucuccauca

SEQ ID NO: 2540369 - RNA, 19 nt, Artificial Sequence
  Description of Artificial Sequence: Synthetic oligonucleotide
agucacugguguagcagcu

SEQ ID NO: 2540370 - RNA, 19 nt, Artificial Sequence
  Description of Artificial Sequence: Synthetic oligonucleotide
aaaggccgggccgcaguca

SEQ ID NO: 2540371 - RNA, 19 nt, Artificial Sequence
  Description of Artificial Sequence: Synthetic oligonucleotide
ggaauuuggcgccauuggu

SEQ ID NO: 2540372 - RNA, 19 nt, Artificial Sequence
  Description of Artificial Sequence: Synthetic oligonucleotide
ucaggccguuccaggcagc

SEQ ID NO: 2540373 - RNA, 19 nt, Artificial Sequence
  Description of Artificial Sequence: Synthetic oligonucleotide
ggguuacugugcuccacug

SEQ ID NO: 2540374 - RNA, 19 nt, Artificial Sequence
  Description of Artificial Sequence: Synthetic oligonucleotide
agaucacgaucugcuugag

SEQ ID NO: 2540375 - RNA, 19 nt, Artificial Sequence
  Description of Artificial Sequence: Synthetic oligonucleotide
caucaggccguuccaggca

SEQ ID NO: 2540376 - RNA, 19 nt, Artificial Sequence
  Description of Artificial Sequence: Synthetic oligonucleotide
cuguggcccggucuucuac

SEQ ID NO: 2540377 - RNA, 19 nt, Artificial Sequence
  Description of Artificial Sequence: Synthetic oligonucleotide
ggucuucuacucgucgaag

SEQ ID NO: 2540378 - RNA, 19 nt, Artificial Sequence
  Description of Artificial Sequence: Synthetic oligonucleotide
ggcauagcauguccgcuuc

SEQ ID NO: 2540379 - RNA, 19 nt, Artificial Sequence
  Description of Artificial Sequence: Synthetic oligonucleotide
gcuccagugaauaccgcac

SEQ ID NO: 2540380 - RNA, 19 nt, Artificial Sequence
  Description of Artificial Sequence: Synthetic oligonucleotide
cagaaucagcaccuuguua

SEQ ID NO: 2540381 - RNA, 19 nt, Artificial Sequence
  Description of Artificial Sequence: Synthetic oligonucleotide
ggaaagguagcugccggga

SEQ ID NO: 2540382 - RNA, 19 nt, Artificial Sequence
  Description of Artificial Sequence: Synthetic oligonucleotide
aagcucgaugggucuccau

SEQ ID NO: 2540383 - RNA, 19 nt, Artificial Sequence
  Description of Artificial Sequence: Synthetic oligonucleotide
gggagguagauggagugga

SEQ ID NO: 2540384 - RNA, 19 nt, Artificial Sequence
  Description of Artificial Sequence: Synthetic oligonucleotide
gggcacgcacuccagccag

SEQ ID NO: 2540385 - RNA, 19 nt, Artificial Sequence
  Description of Artificial Sequence: Synthetic oligonucleotide
cuccacagaucacgaucug

SEQ ID NO: 2540386 - RNA, 19 nt, Artificial Sequence
  Description of Artificial Sequence: Synthetic oligonucleotide
ggaagcucgaugggucucc

SEQ ID NO: 2540387 - RNA, 19 nt, Artificial Sequence
  Description of Artificial Sequence: Synthetic oligonucleotide
ugcucacagccuccacauc

SEQ ID NO: 2540388 - RNA, 19 nt, Artificial Sequence
  Description of Artificial Sequence: Synthetic oligonucleotide
cagcuguuaaguucugccu

SEQ ID NO: 2540389 - RNA, 19 nt, Artificial Sequence
  Description of Artificial Sequence: Synthetic oligonucleotide
gccggcauagcauguccgc

SEQ ID NO: 2540390 - RNA, 19 nt, Artificial Sequence
  Description of Artificial Sequence: Synthetic oligonucleotide
caggugugcuuuugggcga

SEQ ID NO: 2540391 - RNA, 19 nt, Artificial Sequence
  Description of Artificial Sequence: Synthetic oligonucleotide
cagcuccagugaauaccgc

SEQ ID NO: 2540392 - RNA, 19 nt, Artificial Sequence
  Description of Artificial Sequence: Synthetic oligonucleotide
accuuguuagggagguaga

SEQ ID NO: 2540393 - RNA, 19 nt, Artificial Sequence
  Description of Artificial Sequence: Synthetic oligonucleotide
gccgcuugaggaauuuggc

SEQ ID NO: 2540394 - RNA, 19 nt, Artificial Sequence
  Description of Artificial Sequence: Synthetic oligonucleotide
ugguggccuggggugacca

SEQ ID NO: 2540395 - RNA, 19 nt, Artificial Sequence
  Description of Artificial Sequence: Synthetic oligonucleotide
ggugaccaacuuauccaug

SEQ ID NO: 2540396 - RNA, 19 nt, Artificial Sequence
  Description of Artificial Sequence: Synthetic oligonucleotide
cuugcuguccaggugugcu

SEQ ID NO: 2540397 - RNA, 19 nt, Artificial Sequence
  Description of Artificial Sequence: Synthetic oligonucleotide
guuccgggccuggaagagc

SEQ ID NO: 2540398 - RNA, 19 nt, Artificial Sequence
  Description of Artificial Sequence: Synthetic oligonucleotide
cuggggugaccaacuuauc

SEQ ID NO: 2540399 - RNA, 19 nt, Artificial Sequence
  Description of Artificial Sequence: Synthetic oligonucleotide
ccuguugagcugagagggc

SEQ ID NO: 2540400 - RNA, 19 nt, Artificial Sequence
  Description of Artificial Sequence: Synthetic oligonucleotide
ugugccgcuugaggaauuu

SEQ ID NO: 2540401 - RNA, 19 nt, Artificial Sequence
  Description of Artificial Sequence: Synthetic oligonucleotide
agcccaguguugagcaaug

SEQ ID NO: 2540402 - RNA, 19 nt, Artificial Sequence
  Description of Artificial Sequence: Synthetic oligonucleotide
agguugcucaggaaaggua

SEQ ID NO: 2540403 - RNA, 19 nt, Artificial Sequence
  Description of Artificial Sequence: Synthetic oligonucleotide
cuguccaggugugcuuuug

SEQ ID NO: 2540404 - RNA, 19 nt, Artificial Sequence
  Description of Artificial Sequence: Synthetic oligonucleotide
cacgcacuccagccaggag

SEQ ID NO: 2540405 - RNA, 19 nt, Artificial Sequence
  Description of Artificial Sequence: Synthetic oligonucleotide
gcccagcucaaauaguucu

SEQ ID NO: 2540406 - RNA, 19 nt, Artificial Sequence
  Description of Artificial Sequence: Synthetic oligonucleotide
guaggcuguggcccggucu

SEQ ID NO: 2540407 - RNA, 19 nt, Artificial Sequence
  Description of Artificial Sequence: Synthetic oligonucleotide
ggcgccauugguggccugg

SEQ ID NO: 2540408 - RNA, 19 nt, Artificial Sequence
  Description of Artificial Sequence: Synthetic oligonucleotide
ccaugcccaggacagcccc

SEQ ID NO: 2540409 - RNA, 19 nt, Artificial Sequence
  Description of Artificial Sequence: Synthetic oligonucleotide
gaggccucauacagaucca

SEQ ID NO: 2540410 - RNA, 19 nt, Artificial Sequence
  Description of Artificial Sequence: Synthetic oligonucleotide
cccggucuucuacucgucg

SEQ ID NO: 2540411 - RNA, 19 nt, Artificial Sequence
  Description of Artificial Sequence: Synthetic oligonucleotide
gguagcugccgggacagga

SEQ ID NO: 2540412 - RNA, 19 nt, Artificial Sequence
  Description of Artificial Sequence: Synthetic oligonucleotide
acgcacugcagcagggccu

SEQ ID NO: 2540413 - RNA, 19 nt, Artificial Sequence
  Description of Artificial Sequence: Synthetic oligonucleotide
cagucagcuccagugaaua

SEQ ID NO: 2540414 - RNA, 19 nt, Artificial Sequence
  Description of Artificial Sequence: Synthetic oligonucleotide
gcaggguggguuacugugc

SEQ ID NO: 2540415 - RNA, 19 nt, Artificial Sequence
  Description of Artificial Sequence: Synthetic oligonucleotide
guggguuacugugcuccac

SEQ ID NO: 2540416 - RNA, 19 nt, Artificial Sequence
  Description of Artificial Sequence: Synthetic oligonucleotide
gaagcucgaugggucucca

SEQ ID NO: 2540417 - RNA, 19 nt, Artificial Sequence
  Description of Artificial Sequence: Synthetic oligonucleotide
ccacagaucacgaucugcu

SEQ ID NO: 2540418 - RNA, 19 nt, Artificial Sequence
  Description of Artificial Sequence: Synthetic oligonucleotide
guagcugccgggacaggaa

SEQ ID NO: 2540419 - RNA, 19 nt, Artificial Sequence
  Description of Artificial Sequence: Synthetic oligonucleotide
guggcccggucuucuacuc

SEQ ID NO: 2540420 - RNA, 19 nt, Artificial Sequence
  Description of Artificial Sequence: Synthetic oligonucleotide
cauugguggccugggguga

SEQ ID NO: 2540421 - RNA, 19 nt, Artificial Sequence
  Description of Artificial Sequence: Synthetic oligonucleotide
ggccucgaaccacgaaggc

SEQ ID NO: 2540422 - RNA, 19 nt, Artificial Sequence
  Description of Artificial Sequence: Synthetic oligonucleotide
acgaucugcuugagagucu

SEQ ID NO: 2540423 - RNA, 19 nt, Artificial Sequence
  Description of Artificial Sequence: Synthetic oligonucleotide
gccagaaucagcaccuugu

SEQ ID NO: 2540424 - RNA, 19 nt, Artificial Sequence
  Description of Artificial Sequence: Synthetic oligonucleotide
cccggucacagcaaagcca

SEQ ID NO: 2540425 - RNA, 19 nt, Artificial Sequence
  Description of Artificial Sequence: Synthetic oligonucleotide
gagcaggcuugguucucaa

SEQ ID NO: 2540426 - RNA, 19 nt, Artificial Sequence
  Description of Artificial Sequence: Synthetic oligonucleotide
ccuggggugaccaacuuau

SEQ ID NO: 2540427 - RNA, 19 nt, Artificial Sequence
  Description of Artificial Sequence: Synthetic oligonucleotide
ggagguagauggaguggac

SEQ ID NO: 2540428 - RNA, 19 nt, Artificial Sequence
  Description of Artificial Sequence: Synthetic oligonucleotide
gggcucagugauagggagc

SEQ ID NO: 2540429 - RNA, 19 nt, Artificial Sequence
  Description of Artificial Sequence: Synthetic oligonucleotide
ccggugccggcauagcaug

SEQ ID NO: 2540430 - RNA, 19 nt, Artificial Sequence
  Description of Artificial Sequence: Synthetic oligonucleotide
ggcagucacugguguagca

SEQ ID NO: 2540431 - RNA, 19 nt, Artificial Sequence
  Description of Artificial Sequence: Synthetic oligonucleotide
cagggccuugguguccuug

SEQ ID NO: 2540432 - RNA, 19 nt, Artificial Sequence
  Description of Artificial Sequence: Synthetic oligonucleotide
gccucgaaccacgaaggca

SEQ ID NO: 2540433 - RNA, 19 nt, Artificial Sequence
  Description of Artificial Sequence: Synthetic oligonucleotide
caggaagcucgaugggucu

SEQ ID NO: 2540434 - RNA, 19 nt, Artificial Sequence
  Description of Artificial Sequence: Synthetic oligonucleotide
cgggacaggaagcucgaug

SEQ ID NO: 2540435 - RNA, 19 nt, Artificial Sequence
  Description of Artificial Sequence: Synthetic oligonucleotide
gggugaccaacuuauccau

SEQ ID NO: 2540436 - RNA, 19 nt, Artificial Sequence
  Description of Artificial Sequence: Synthetic oligonucleotide
ugcccaggacagccccggu

SEQ ID NO: 2540437 - RNA, 19 nt, Artificial Sequence
  Description of Artificial Sequence: Synthetic oligonucleotide
ggcgauguuccgggccugg

SEQ ID NO: 2540438 - RNA, 19 nt, Artificial Sequence
  Description of Artificial Sequence: Synthetic oligonucleotide
gccuugguguccuugcccu

SEQ ID NO: 2540439 - RNA, 19 nt, Artificial Sequence
  Description of Artificial Sequence: Synthetic oligonucleotide
aggugugcuuuugggcgau

SEQ ID NO: 2540440 - RNA, 19 nt, Artificial Sequence
  Description of Artificial Sequence: Synthetic oligonucleotide
aggcuguggcccggucuuc

SEQ ID NO: 2540441 - RNA, 19 nt, Artificial Sequence
  Description of Artificial Sequence: Synthetic oligonucleotide
ggugccggcauagcauguc

SEQ ID NO: 2540442 - RNA, 19 nt, Artificial Sequence
  Description of Artificial Sequence: Synthetic oligonucleotide
gggcagucacugguguagc

SEQ ID NO: 2540443 - RNA, 19 nt, Artificial Sequence
  Description of Artificial Sequence: Synthetic oligonucleotide
auguaggcuguggcccggu

SEQ ID NO: 2540444 - RNA, 19 nt, Artificial Sequence
  Description of Artificial Sequence: Synthetic oligonucleotide
gauagggagcaggcuuggu

SEQ ID NO: 2540445 - RNA, 19 nt, Artificial Sequence
  Description of Artificial Sequence: Synthetic oligonucleotide
cugggcagucacuggugua

SEQ ID NO: 2540446 - RNA, 19 nt, Artificial Sequence
  Description of Artificial Sequence: Synthetic oligonucleotide
ccggucuucuacucgucga

SEQ ID NO: 2540447 - RNA, 19 nt, Artificial Sequence
  Description of Artificial Sequence: Synthetic oligonucleotide
cuguuaaguucugccuucu

SEQ ID NO: 2540448 - RNA, 19 nt, Artificial Sequence
  Description of Artificial Sequence: Synthetic oligonucleotide
cacuggccacaucaaacau

SEQ ID NO: 2540449 - RNA, 19 nt, Artificial Sequence
  Description of Artificial Sequence: Synthetic oligonucleotide
cacagaucacgaucugcuu

SEQ ID NO: 2540450 - RNA, 19 nt, Artificial Sequence
  Description of Artificial Sequence: Synthetic oligonucleotide
guaguucacagggcucagu

SEQ ID NO: 2540451 - RNA, 19 nt, Artificial Sequence
  Description of Artificial Sequence: Synthetic oligonucleotide
cuggcccagcucaaauagu

SEQ ID NO: 2540452 - RNA, 19 nt, Artificial Sequence
  Description of Artificial Sequence: Synthetic oligonucleotide
cugguguagcagcuuucgu

SEQ ID NO: 2540453 - RNA, 19 nt, Artificial Sequence
  Description of Artificial Sequence: Synthetic oligonucleotide
gcauagcauguccgcuuca

SEQ ID NO: 2540454 - RNA, 19 nt, Artificial Sequence
  Description of Artificial Sequence: Synthetic oligonucleotide
ggcacgcacuccagccagg

SEQ ID NO: 2540455 - RNA, 19 nt, Artificial Sequence
  Description of Artificial Sequence: Synthetic oligonucleotide
ggccacuggccacaucaaa

SEQ ID NO: 2540456 - RNA, 19 nt, Artificial Sequence
  Description of Artificial Sequence: Synthetic oligonucleotide
agcaggccucgaaccacga

SEQ ID NO: 2540457 - RNA, 19 nt, Artificial Sequence
  Description of Artificial Sequence: Synthetic oligonucleotide
cgaaggcauaguccuccag

SEQ ID NO: 2540458 - RNA, 19 nt, Artificial Sequence
  Description of Artificial Sequence: Synthetic oligonucleotide
caggcggccacuggccaca

SEQ ID NO: 2540459 - RNA, 19 nt, Artificial Sequence
  Description of Artificial Sequence: Synthetic oligonucleotide
ggcccggucuucuacucgu

SEQ ID NO: 2540460 - RNA, 19 nt, Artificial Sequence
  Description of Artificial Sequence: Synthetic oligonucleotide
gugaggccucauacagauc

SEQ ID NO: 2540461 - RNA, 19 nt, Artificial Sequence
  Description of Artificial Sequence: Synthetic oligonucleotide
uggcgccauugguggccug

SEQ ID NO: 2540462 - RNA, 19 nt, Artificial Sequence
  Description of Artificial Sequence: Synthetic oligonucleotide
cuacucgucgaagguugcu

SEQ ID NO: 2540463 - RNA, 19 nt, Artificial Sequence
  Description of Artificial Sequence: Synthetic oligonucleotide
caucaaacaugugccgcuu

SEQ ID NO: 2540464 - RNA, 19 nt, Artificial Sequence
  Description of Artificial Sequence: Synthetic oligonucleotide
cagugauagggagcaggcu

SEQ ID NO: 2540465 - RNA, 19 nt, Artificial Sequence
  Description of Artificial Sequence: Synthetic oligonucleotide
gcucagugauagggagcag

SEQ ID NO: 2540466 - RNA, 19 nt, Artificial Sequence
  Description of Artificial Sequence: Synthetic oligonucleotide
ggacagccccggucacagc

SEQ ID NO: 2540467 - RNA, 19 nt, Artificial Sequence
  Description of Artificial Sequence: Synthetic oligonucleotide
gccuggggugaccaacuua

SEQ ID NO: 2540468 - RNA, 19 nt, Artificial Sequence
  Description of Artificial Sequence: Synthetic oligonucleotide
cagccccggucacagcaaa

SEQ ID NO: 2540469 - RNA, 19 nt, Artificial Sequence
  Description of Artificial Sequence: Synthetic oligonucleotide
cagcaggguggguuacugu

SEQ ID NO: 2540470 - RNA, 19 nt, Artificial Sequence
  Description of Artificial Sequence: Synthetic oligonucleotide
cguaguucacagggcucag

SEQ ID NO: 2540471 - RNA, 19 nt, Artificial Sequence
  Description of Artificial Sequence: Synthetic oligonucleotide
gcacgcacuccagccagga

SEQ ID NO: 2540472 - RNA, 19 nt, Artificial Sequence
  Description of Artificial Sequence: Synthetic oligonucleotide
ccgcagucagcuccaguga

SEQ ID NO: 2540473 - RNA, 19 nt, Artificial Sequence
  Description of Artificial Sequence: Synthetic oligonucleotide
ggugugcuuuugggcgaug

SEQ ID NO: 2540474 - RNA, 19 nt, Artificial Sequence
  Description of Artificial Sequence: Synthetic oligonucleotide
ggucuccacagaucacgau

SEQ ID NO: 2540475 - RNA, 19 nt, Artificial Sequence
  Description of Artificial Sequence: Synthetic oligonucleotide
gcaggccucgaaccacgaa

SEQ ID NO: 2540476 - RNA, 19 nt, Artificial Sequence
  Description of Artificial Sequence: Synthetic oligonucleotide
gccguuccaggcagccagc

SEQ ID NO: 2540477 - RNA, 19 nt, Artificial Sequence
  Description of Artificial Sequence: Synthetic oligonucleotide
gucacugguguagcagcuu

SEQ ID NO: 2540478 - RNA, 19 nt, Artificial Sequence
  Description of Artificial Sequence: Synthetic oligonucleotide
cgcuucaggcggccacugg

SEQ ID NO: 2540479 - RNA, 19 nt, Artificial Sequence
  Description of Artificial Sequence: Synthetic oligonucleotide
gggucuccaucagccagaa

SEQ ID NO: 2540480 - RNA, 19 nt, Artificial Sequence
  Description of Artificial Sequence: Synthetic oligonucleotide
caggaagccccagcagggu

SEQ ID NO: 2540481 - RNA, 19 nt, Artificial Sequence
  Description of Artificial Sequence: Synthetic oligonucleotide
cgcagucagcuccagugaa

SEQ ID NO: 2540482 - RNA, 19 nt, Artificial Sequence
  Description of Artificial Sequence: Synthetic oligonucleotide
gguggccuggggugaccaa

SEQ ID NO: 2540483 - RNA, 19 nt, Artificial Sequence
  Description of Artificial Sequence: Synthetic oligonucleotide
cggucuucuacucgucgaa

SEQ ID NO: 2540484 - RNA, 19 nt, Artificial Sequence
  Description of Artificial Sequence: Synthetic oligonucleotide
ccagaaucagcaccuuguu

SEQ ID NO: 2540485 - RNA, 19 nt, Artificial Sequence
  Description of Artificial Sequence: Synthetic oligonucleotide
gccccagcaggguggguua

SEQ ID NO: 2540486 - RNA, 19 nt, Artificial Sequence
  Description of Artificial Sequence: Synthetic oligonucleotide
ccuuguuagggagguagau

SEQ ID NO: 2540487 - RNA, 19 nt, Artificial Sequence
  Description of Artificial Sequence: Synthetic oligonucleotide
gggcgauguuccgggccug

SEQ ID NO: 2540488 - RNA, 19 nt, Artificial Sequence
  Description of Artificial Sequence: Synthetic oligonucleotide
gcuguggcccggucuucua

SEQ ID NO: 2540489 - RNA, 19 nt, Artificial Sequence
  Description of Artificial Sequence: Synthetic oligonucleotide
gcagucagcuccagugaau

SEQ ID NO: 2540490 - RNA, 19 nt, Artificial Sequence
  Description of Artificial Sequence: Synthetic oligonucleotide
cgauguuccgggccuggaa

SEQ ID NO: 2540491 - RNA, 19 nt, Artificial Sequence
  Description of Artificial Sequence: Synthetic oligonucleotide
gcgauguuccgggccugga

SEQ ID NO: 2540492 - RNA, 19 nt, Artificial Sequence
  Description of Artificial Sequence: Synthetic oligonucleotide
cccggugccggcauagcau

SEQ ID NO: 2540493 - RNA, 19 nt, Artificial Sequence
  Description of Artificial Sequence: Synthetic oligonucleotide
cagauccagcaggccucga

SEQ ID NO: 2540494 - RNA, 19 nt, Artificial Sequence
  Description of Artificial Sequence: Synthetic oligonucleotide
ccgcuucaggcggccacug

SEQ ID NO: 2540495 - RNA, 19 nt, Artificial Sequence
  Description of Artificial Sequence: Synthetic oligonucleotide
gcccggucuucuacucguc

SEQ ID NO: 2540496 - RNA, 19 nt, Artificial Sequence
  Description of Artificial Sequence: Synthetic oligonucleotide
ccccagcaggguggguuac

SEQ ID NO: 2540497 - RNA, 19 nt, Artificial Sequence
  Description of Artificial Sequence: Synthetic oligonucleotide
ggccgcagucagcuccagu

SEQ ID NO: 2540498 - RNA, 19 nt, Artificial Sequence
  Description of Artificial Sequence: Synthetic oligonucleotide
gggccgcagucagcuccag

SEQ ID NO: 2540499 - RNA, 19 nt, Artificial Sequence
  Description of Artificial Sequence: Synthetic oligonucleotide
ccggcauagcauguccgcu

SEQ ID NO: 2540500 - RNA, 19 nt, Artificial Sequence
  Description of Artificial Sequence: Synthetic oligonucleotide
gcuguccaggugugcuuuu

SEQ ID NO: 2540501 - RNA, 19 nt, Artificial Sequence
  Description of Artificial Sequence: Synthetic oligonucleotide
gcccaguguugagcaaugu

SEQ ID NO: 2540502 - RNA, 19 nt, Artificial Sequence
  Description of Artificial Sequence: Synthetic oligonucleotide
cgggccgcagucagcucca

SEQ ID NO: 2540503 - RNA, 19 nt, Artificial Sequence
  Description of Artificial Sequence: Synthetic oligonucleotide
gcaccuuguuagggaggua

SEQ ID NO: 2540504 - RNA, 19 nt, Artificial Sequence
  Description of Artificial Sequence: Synthetic oligonucleotide
cggcauagcauguccgcuu

SEQ ID NO: 2540505 - RNA, 19 nt, Artificial Sequence
  Description of Artificial Sequence: Synthetic oligonucleotide
cagccagaaucagcaccuu

SEQ ID NO: 2540506 - RNA, 19 nt, Artificial Sequence
  Description of Artificial Sequence: Synthetic oligonucleotide
cggccacuggccacaucaa

SEQ ID NO: 2540507 - RNA, 19 nt, Artificial Sequence
  Description of Artificial Sequence: Synthetic oligonucleotide
cguuccaggcagccagcau

SEQ ID NO: 2540508 - RNA, 19 nt, Artificial Sequence
  Description of Artificial Sequence: Synthetic oligonucleotide
ccgggacaggaagcucgau

SEQ ID NO: 2540509 - RNA, 19 nt, Artificial Sequence
  Description of Artificial Sequence: Synthetic oligonucleotide
aaaauguaguuucuggaac

SEQ ID NO: 2540510 - RNA, 19 nt, Artificial Sequence
  Description of Artificial Sequence: Synthetic oligonucleotide
aguuccucugauuucaucc

SEQ ID NO: 2540511 - RNA, 19 nt, Artificial Sequence
  Description of Artificial Sequence: Synthetic oligonucleotide
uguaguuucuggaacaucc

SEQ ID NO: 2540512 - RNA, 19 nt, Artificial Sequence
  Description of Artificial Sequence: Synthetic oligonucleotide
uuuucuugcccaauuuugg

SEQ ID NO: 2540513 - RNA, 19 nt, Artificial Sequence
  Description of Artificial Sequence: Synthetic oligonucleotide
acucaugguaccuaggcac

SEQ ID NO: 2540514 - RNA, 19 nt, Artificial Sequence
  Description of Artificial Sequence: Synthetic oligonucleotide
uuaaaauguaguuucugga

SEQ ID NO: 2540515 - RNA, 19 nt, Artificial Sequence
  Description of Artificial Sequence: Synthetic oligonucleotide
uccagcacaaugaaggugc

SEQ ID NO: 2540516 - RNA, 19 nt, Artificial Sequence
  Description of Artificial Sequence: Synthetic oligonucleotide
aaucaugaccucgaucucc

SEQ ID NO: 2540517 - RNA, 19 nt, Artificial Sequence
  Description of Artificial Sequence: Synthetic oligonucleotide
ugauuucauccacucaugg

SEQ ID NO: 2540518 - RNA, 19 nt, Artificial Sequence
  Description of Artificial Sequence: Synthetic oligonucleotide
aaugaaggugcacuugucu

SEQ ID NO: 2540519 - RNA, 19 nt, Artificial Sequence
  Description of Artificial Sequence: Synthetic oligonucleotide
acgguguucugauucagcc

SEQ ID NO: 2540520 - RNA, 19 nt, Artificial Sequence
  Description of Artificial Sequence: Synthetic oligonucleotide
uaaaauguaguuucuggaa

SEQ ID NO: 2540521 - RNA, 19 nt, Artificial Sequence
  Description of Artificial Sequence: Synthetic oligonucleotide
ugcacugcaucucauauuc

SEQ ID NO: 2540522 - RNA, 19 nt, Artificial Sequence
  Description of Artificial Sequence: Synthetic oligonucleotide
aagacacuguacaugacuc

SEQ ID NO: 2540523 - RNA, 19 nt, Artificial Sequence
  Description of Artificial Sequence: Synthetic oligonucleotide
aacucgacucuauagggcu

SEQ ID NO: 2540524 - RNA, 19 nt, Artificial Sequence
  Description of Artificial Sequence: Synthetic oligonucleotide
aggagagacgccucggugc

SEQ ID NO: 2540525 - RNA, 19 nt, Artificial Sequence
  Description of Artificial Sequence: Synthetic oligonucleotide
uccaggucugcucacacag

SEQ ID NO: 2540526 - RNA, 19 nt, Artificial Sequence
  Description of Artificial Sequence: Synthetic oligonucleotide
gauucagccucauugcagc

SEQ ID NO: 2540527 - RNA, 19 nt, Artificial Sequence
  Description of Artificial Sequence: Synthetic oligonucleotide
auuucauccacucauggua

SEQ ID NO: 2540528 - RNA, 19 nt, Artificial Sequence
  Description of Artificial Sequence: Synthetic oligonucleotide
uggaacauccggaugcuag

SEQ ID NO: 2540529 - RNA, 19 nt, Artificial Sequence
  Description of Artificial Sequence: Synthetic oligonucleotide
aacuuggucagaccuagcu

SEQ ID NO: 2540530 - RNA, 19 nt, Artificial Sequence
  Description of Artificial Sequence: Synthetic oligonucleotide
gaagacguugcucacugcc

SEQ ID NO: 2540531 - RNA, 19 nt, Artificial Sequence
  Description of Artificial Sequence: Synthetic oligonucleotide
agguguaggguacuagggc

SEQ ID NO: 2540532 - RNA, 19 nt, Artificial Sequence
  Description of Artificial Sequence: Synthetic oligonucleotide
auauuccugcucuaggguc

SEQ ID NO: 2540533 - RNA, 19 nt, Artificial Sequence
  Description of Artificial Sequence: Synthetic oligonucleotide
uccauaggacaucaucagg

SEQ ID NO: 2540534 - RNA, 19 nt, Artificial Sequence
  Description of Artificial Sequence: Synthetic oligonucleotide
gacucuauagggcuucucc

SEQ ID NO: 2540535 - RNA, 19 nt, Artificial Sequence
  Description of Artificial Sequence: Synthetic oligonucleotide
ugauucagccucauugcag

SEQ ID NO: 2540536 - RNA, 19 nt, Artificial Sequence
  Description of Artificial Sequence: Synthetic oligonucleotide
ucuauagggcuucuccucc

SEQ ID NO: 2540537 - RNA, 19 nt, Artificial Sequence
  Description of Artificial Sequence: Synthetic oligonucleotide
ucugcaaucaugaccucga

SEQ ID NO: 2540538 - RNA, 19 nt, Artificial Sequence
  Description of Artificial Sequence: Synthetic oligonucleotide
uucacaucucccaccaugc

SEQ ID NO: 2540539 - RNA, 19 nt, Artificial Sequence
  Description of Artificial Sequence: Synthetic oligonucleotide
aauuuuggccucaaacuug

SEQ ID NO: 2540540 - RNA, 19 nt, Artificial Sequence
  Description of Artificial Sequence: Synthetic oligonucleotide
uucgucacuccauaggaca

SEQ ID NO: 2540541 - RNA, 19 nt, Artificial Sequence
  Description of Artificial Sequence: Synthetic oligonucleotide
ucggcauccagcacaauga

SEQ ID NO: 2540542 - RNA, 19 nt, Artificial Sequence
  Description of Artificial Sequence: Synthetic oligonucleotide
gacaucaucaggagagacg

SEQ ID NO: 2540543 - RNA, 19 nt, Artificial Sequence
  Description of Artificial Sequence: Synthetic oligonucleotide
ucugagugucaccuccugg

SEQ ID NO: 2540544 - RNA, 19 nt, Artificial Sequence
  Description of Artificial Sequence: Synthetic oligonucleotide
uuucuugcccaauuuuggc

SEQ ID NO: 2540545 - RNA, 19 nt, Artificial Sequence
  Description of Artificial Sequence: Synthetic oligonucleotide
uggaagacguugcucacug

SEQ ID NO: 2540546 - RNA, 19 nt, Artificial Sequence
  Description of Artificial Sequence: Synthetic oligonucleotide
uucuccuccacguggcugg

SEQ ID NO: 2540547 - RNA, 19 nt, Artificial Sequence
  Description of Artificial Sequence: Synthetic oligonucleotide
ucugugaggaagagguuca

SEQ ID NO: 2540548 - RNA, 19 nt, Artificial Sequence
  Description of Artificial Sequence: Synthetic oligonucleotide
uucuugcccaauuuuggcc

SEQ ID NO: 2540549 - RNA, 19 nt, Artificial Sequence
  Description of Artificial Sequence: Synthetic oligonucleotide
uuccagaucugugaggaag

SEQ ID NO: 2540550 - RNA, 19 nt, Artificial Sequence
  Description of Artificial Sequence: Synthetic oligonucleotide
agugucaccuccuggaaga

SEQ ID NO: 2540551 - RNA, 19 nt, Artificial Sequence
  Description of Artificial Sequence: Synthetic oligonucleotide
acauccggaugcuaggcuc

SEQ ID NO: 2540552 - RNA, 19 nt, Artificial Sequence
  Description of Artificial Sequence: Synthetic oligonucleotide
aaguuccucugauuucauc

SEQ ID NO: 2540553 - RNA, 19 nt, Artificial Sequence
  Description of Artificial Sequence: Synthetic oligonucleotide
agcuucgucacuccauagg

SEQ ID NO: 2540554 - RNA, 19 nt, Artificial Sequence
  Description of Artificial Sequence: Synthetic oligonucleotide
agacguugcucacugccac

SEQ ID NO: 2540555 - RNA, 19 nt, Artificial Sequence
  Description of Artificial Sequence: Synthetic oligonucleotide
auuuuggccucaaacuugg

SEQ ID NO: 2540556 - RNA, 19 nt, Artificial Sequence
  Description of Artificial Sequence: Synthetic oligonucleotide
guaccuaggcacaugcucg

SEQ ID NO: 2540557 - RNA, 19 nt, Artificial Sequence
  Description of Artificial Sequence: Synthetic oligonucleotide
caugacucucccaugcagc

SEQ ID NO: 2540558 - RNA, 19 nt, Artificial Sequence
  Description of Artificial Sequence: Synthetic oligonucleotide
cugcaucucauauuccugc

SEQ ID NO: 2540559 - RNA, 19 nt, Artificial Sequence
  Description of Artificial Sequence: Synthetic oligonucleotide
guacaugacucucccaugc

SEQ ID NO: 2540560 - RNA, 19 nt, Artificial Sequence
  Description of Artificial Sequence: Synthetic oligonucleotide
cuaggcacaugcucggagg

SEQ ID NO: 2540561 - RNA, 19 nt, Artificial Sequence
  Description of Artificial Sequence: Synthetic oligonucleotide
ugccaacucgacucuauag

SEQ ID NO: 2540562 - RNA, 19 nt, Artificial Sequence
  Description of Artificial Sequence: Synthetic oligonucleotide
agccugaagacacuguaca

SEQ ID NO: 2540563 - RNA, 19 nt, Artificial Sequence
  Description of Artificial Sequence: Synthetic oligonucleotide
agggucagcagcucugagg

SEQ ID NO: 2540564 - RNA, 19 nt, Artificial Sequence
  Description of Artificial Sequence: Synthetic oligonucleotide
cuucuugcccagcagcacg

SEQ ID NO: 2540565 - RNA, 19 nt, Artificial Sequence
  Description of Artificial Sequence: Synthetic oligonucleotide
gaggaagagguucacaucu

SEQ ID NO: 2540566 - RNA, 19 nt, Artificial Sequence
  Description of Artificial Sequence: Synthetic oligonucleotide
aucaugaccucgaucuccc

SEQ ID NO: 2540567 - RNA, 19 nt, Artificial Sequence
  Description of Artificial Sequence: Synthetic oligonucleotide
ucucccaugcagcugucug

SEQ ID NO: 2540568 - RNA, 19 nt, Artificial Sequence
  Description of Artificial Sequence: Synthetic oligonucleotide
cuccauaggacaucaucag

SEQ ID NO: 2540569 - RNA, 19 nt, Artificial Sequence
  Description of Artificial Sequence: Synthetic oligonucleotide
gagguguaggguacuaggg

SEQ ID NO: 2540570 - RNA, 19 nt, Artificial Sequence
  Description of Artificial Sequence: Synthetic oligonucleotide
uguacaugacucucccaug

SEQ ID NO: 2540571 - RNA, 19 nt, Artificial Sequence
  Description of Artificial Sequence: Synthetic oligonucleotide
uccagaucugugaggaaga

SEQ ID NO: 2540572 - RNA, 19 nt, Artificial Sequence
  Description of Artificial Sequence: Synthetic oligonucleotide
gucuggagcagccugaaga

SEQ ID NO: 2540573 - RNA, 19 nt, Artificial Sequence
  Description of Artificial Sequence: Synthetic oligonucleotide
caaacuuggucagaccuag

SEQ ID NO: 2540574 - RNA, 19 nt, Artificial Sequence
  Description of Artificial Sequence: Synthetic oligonucleotide
agaccuagcuucgucacuc

SEQ ID NO: 2540575 - RNA, 19 nt, Artificial Sequence
  Description of Artificial Sequence: Synthetic oligonucleotide
acuccauaggacaucauca

SEQ ID NO: 2540576 - RNA, 19 nt, Artificial Sequence
  Description of Artificial Sequence: Synthetic oligonucleotide
ugaaggugcacuugucuuc

SEQ ID NO: 2540577 - RNA, 19 nt, Artificial Sequence
  Description of Artificial Sequence: Synthetic oligonucleotide
gguguaggguacuagggcc

SEQ ID NO: 2540578 - RNA, 19 nt, Artificial Sequence
  Description of Artificial Sequence: Synthetic oligonucleotide
acucuauagggcuucuccu

SEQ ID NO: 2540579 - RNA, 19 nt, Artificial Sequence
  Description of Artificial Sequence: Synthetic oligonucleotide
aacauccggaugcuaggcu

SEQ ID NO: 2540580 - RNA, 19 nt, Artificial Sequence
  Description of Artificial Sequence: Synthetic oligonucleotide
caacucgacucuauagggc

SEQ ID NO: 2540581 - RNA, 19 nt, Artificial Sequence
  Description of Artificial Sequence: Synthetic oligonucleotide
gccaacucgacucuauagg

SEQ ID NO: 2540582 - RNA, 19 nt, Artificial Sequence
  Description of Artificial Sequence: Synthetic oligonucleotide
gaagacacuguacaugacu

SEQ ID NO: 2540583 - RNA, 19 nt, Artificial Sequence
  Description of Artificial Sequence: Synthetic oligonucleotide
ugccaccugcuuaaaaugu

SEQ ID NO: 2540584 - RNA, 19 nt, Artificial Sequence
  Description of Artificial Sequence: Synthetic oligonucleotide
auaggacaucaucaggaga

SEQ ID NO: 2540585 - RNA, 19 nt, Artificial Sequence
  Description of Artificial Sequence: Synthetic oligonucleotide
uaccuaggcacaugcucgg

SEQ ID NO: 2540586 - RNA, 19 nt, Artificial Sequence
  Description of Artificial Sequence: Synthetic oligonucleotide
caugcucggagguguaggg

SEQ ID NO: 2540587 - RNA, 19 nt, Artificial Sequence
  Description of Artificial Sequence: Synthetic oligonucleotide
gaagagguucacaucuccc

SEQ ID NO: 2540588 - RNA, 19 nt, Artificial Sequence
  Description of Artificial Sequence: Synthetic oligonucleotide
cacaucucccaccaugcag

SEQ ID NO: 2540589 - RNA, 19 nt, Artificial Sequence
  Description of Artificial Sequence: Synthetic oligonucleotide
cucggcauccagcacaaug

SEQ ID NO: 2540590 - RNA, 19 nt, Artificial Sequence
  Description of Artificial Sequence: Synthetic oligonucleotide
ggugccaaggcccuggccc

SEQ ID NO: 2540591 - RNA, 19 nt, Artificial Sequence
  Description of Artificial Sequence: Synthetic oligonucleotide
gagguucacaucucccacc

SEQ ID NO: 2540592 - RNA, 19 nt, Artificial Sequence
  Description of Artificial Sequence: Synthetic oligonucleotide
gguguucugauucagccuc

SEQ ID NO: 2540593 - RNA, 19 nt, Artificial Sequence
  Description of Artificial Sequence: Synthetic oligonucleotide
ucagaccuagcuucgucac

SEQ ID NO: 2540594 - RNA, 19 nt, Artificial Sequence
  Description of Artificial Sequence: Synthetic oligonucleotide
cuaggcucauuuucuugcc

SEQ ID NO: 2540595 - RNA, 19 nt, Artificial Sequence
  Description of Artificial Sequence: Synthetic oligonucleotide
cacuguacaugacucuccc

SEQ ID NO: 2540596 - RNA, 19 nt, Artificial Sequence
  Description of Artificial Sequence: Synthetic oligonucleotide
ugcaaucaugaccucgauc

SEQ ID NO: 2540597 - RNA, 19 nt, Artificial Sequence
  Description of Artificial Sequence: Synthetic oligonucleotide
cugauuucauccacucaug

SEQ ID NO: 2540598 - RNA, 19 nt, Artificial Sequence
  Description of Artificial Sequence: Synthetic oligonucleotide
uaggcucauuuucuugccc

SEQ ID NO: 2540599 - RNA, 19 nt, Artificial Sequence
  Description of Artificial Sequence: Synthetic oligonucleotide
gcuaggcucauuuucuugc

SEQ ID NO: 2540600 - RNA, 19 nt, Artificial Sequence
  Description of Artificial Sequence: Synthetic oligonucleotide
ugcuaggcucauuuucuug

SEQ ID NO: 2540601 - RNA, 19 nt, Artificial Sequence
  Description of Artificial Sequence: Synthetic oligonucleotide
ccaacucgacucuauaggg

SEQ ID NO: 2540602 - RNA, 19 nt, Artificial Sequence
  Description of Artificial Sequence: Synthetic oligonucleotide
cacuccauaggacaucauc

SEQ ID NO: 2540603 - RNA, 19 nt, Artificial Sequence
  Description of Artificial Sequence: Synthetic oligonucleotide
uccucugauuucauccacu

SEQ ID NO: 2540604 - RNA, 19 nt, Artificial Sequence
  Description of Artificial Sequence: Synthetic oligonucleotide
uacaugacucucccaugca

SEQ ID NO: 2540605 - RNA, 19 nt, Artificial Sequence
  Description of Artificial Sequence: Synthetic oligonucleotide
auccacucaugguaccuag

SEQ ID NO: 2540606 - RNA, 19 nt, Artificial Sequence
  Description of Artificial Sequence: Synthetic oligonucleotide
augaaggugcacuugucuu

SEQ ID NO: 2540607 - RNA, 19 nt, Artificial Sequence
  Description of Artificial Sequence: Synthetic oligonucleotide
ggaacauccggaugcuagg

SEQ ID NO: 2540608 - RNA, 19 nt, Artificial Sequence
  Description of Artificial Sequence: Synthetic oligonucleotide
agcugucuggccucgggag

SEQ ID NO: 2540609 - RNA, 19 nt, Artificial Sequence
  Description of Artificial Sequence: Synthetic oligonucleotide
cugccaccugcuuaaaaug

SEQ ID NO: 2540610 - RNA, 19 nt, Artificial Sequence
  Description of Artificial Sequence: Synthetic oligonucleotide
ugggccugccacuucucgg

SEQ ID NO: 2540611 - RNA, 19 nt, Artificial Sequence
  Description of Artificial Sequence: Synthetic oligonucleotide
caucaggagagacgccucg

SEQ ID NO: 2540612 - RNA, 19 nt, Artificial Sequence
  Description of Artificial Sequence: Synthetic oligonucleotide
ugcaucucauauuccugcu

SEQ ID NO: 2540613 - RNA, 19 nt, Artificial Sequence
  Description of Artificial Sequence: Synthetic oligonucleotide
ucuucacaccagcugcacu

SEQ ID NO: 2540614 - RNA, 19 nt, Artificial Sequence
  Description of Artificial Sequence: Synthetic oligonucleotide
uuccucugauuucauccac

SEQ ID NO: 2540615 - RNA, 19 nt, Artificial Sequence
  Description of Artificial Sequence: Synthetic oligonucleotide
aaacuuggucagaccuagc

SEQ ID NO: 2540616 - RNA, 19 nt, Artificial Sequence
  Description of Artificial Sequence: Synthetic oligonucleotide
cccaauuuuggccucaaac

SEQ ID NO: 2540617 - RNA, 19 nt, Artificial Sequence
  Description of Artificial Sequence: Synthetic oligonucleotide
uucauccacucaugguacc

SEQ ID NO: 2540618 - RNA, 19 nt, Artificial Sequence
  Description of Artificial Sequence: Synthetic oligonucleotide
aggugcacuugucuucauc

SEQ ID NO: 2540619 - RNA, 19 nt, Artificial Sequence
  Description of Artificial Sequence: Synthetic oligonucleotide
caggguggcugccacaggc

SEQ ID NO: 2540620 - RNA, 19 nt, Artificial Sequence
  Description of Artificial Sequence: Synthetic oligonucleotide
ggucugcucacacagggug

SEQ ID NO: 2540621 - RNA, 19 nt, Artificial Sequence
  Description of Artificial Sequence: Synthetic oligonucleotide
ucaggagagacgccucggu

SEQ ID NO: 2540622 - RNA, 19 nt, Artificial Sequence
  Description of Artificial Sequence: Synthetic oligonucleotide
uaggcacaugcucggaggu

SEQ ID NO: 2540623 - RNA, 19 nt, Artificial Sequence
  Description of Artificial Sequence: Synthetic oligonucleotide
gucuuccagaucugugagg

SEQ ID NO: 2540624 - RNA, 19 nt, Artificial Sequence
  Description of Artificial Sequence: Synthetic oligonucleotide
acaugcucggagguguagg

SEQ ID NO: 2540625 - RNA, 19 nt, Artificial Sequence
  Description of Artificial Sequence: Synthetic oligonucleotide
gguaccuaggcacaugcuc

SEQ ID NO: 2540626 - RNA, 19 nt, Artificial Sequence
  Description of Artificial Sequence: Synthetic oligonucleotide
cuucucggcauccagcaca

SEQ ID NO: 2540627 - RNA, 19 nt, Artificial Sequence
  Description of Artificial Sequence: Synthetic oligonucleotide
gaacauccggaugcuaggc

SEQ ID NO: 2540628 - RNA, 19 nt, Artificial Sequence
  Description of Artificial Sequence: Synthetic oligonucleotide
cucaaacuuggucagaccu

SEQ ID NO: 2540629 - RNA, 19 nt, Artificial Sequence
  Description of Artificial Sequence: Synthetic oligonucleotide
cuucgucacuccauaggac

SEQ ID NO: 2540630 - RNA, 19 nt, Artificial Sequence
  Description of Artificial Sequence: Synthetic oligonucleotide
gcuuaggagggucuggagc

SEQ ID NO: 2540631 - RNA, 19 nt, Artificial Sequence
  Description of Artificial Sequence: Synthetic oligonucleotide
cacguggcuggucugcucc

SEQ ID NO: 2540632 - RNA, 19 nt, Artificial Sequence
  Description of Artificial Sequence: Synthetic oligonucleotide
gucagaccuagcuucguca

SEQ ID NO: 2540633 - RNA, 19 nt, Artificial Sequence
  Description of Artificial Sequence: Synthetic oligonucleotide
aagacguugcucacugcca

SEQ ID NO: 2540634 - RNA, 19 nt, Artificial Sequence
  Description of Artificial Sequence: Synthetic oligonucleotide
ugugaggaagagguucaca

SEQ ID NO: 2540635 - RNA, 19 nt, Artificial Sequence
  Description of Artificial Sequence: Synthetic oligonucleotide
guuccucugauuucaucca

SEQ ID NO: 2540636 - RNA, 19 nt, Artificial Sequence
  Description of Artificial Sequence: Synthetic oligonucleotide
ucugccaacucgacucuau

SEQ ID NO: 2540637 - RNA, 19 nt, Artificial Sequence
  Description of Artificial Sequence: Synthetic oligonucleotide
ugcucggagguguagggua

SEQ ID NO: 2540638 - RNA, 19 nt, Artificial Sequence
  Description of Artificial Sequence: Synthetic oligonucleotide
gaugcuaggcucauuuucu

SEQ ID NO: 2540639 - RNA, 19 nt, Artificial Sequence
  Description of Artificial Sequence: Synthetic oligonucleotide
ggucuuccagaucugugag

SEQ ID NO: 2540640 - RNA, 19 nt, Artificial Sequence
  Description of Artificial Sequence: Synthetic oligonucleotide
ucacaucucccaccaugca

SEQ ID NO: 2540641 - RNA, 19 nt, Artificial Sequence
  Description of Artificial Sequence: Synthetic oligonucleotide
gaaggugcacuugucuuca

SEQ ID NO: 2540642 - RNA, 19 nt, Artificial Sequence
  Description of Artificial Sequence: Synthetic oligonucleotide
ucaucaggagagacgccuc

SEQ ID NO: 2540643 - RNA, 19 nt, Artificial Sequence
  Description of Artificial Sequence: Synthetic oligonucleotide
aucuucacaccagcugcac

SEQ ID NO: 2540644 - RNA, 19 nt, Artificial Sequence
  Description of Artificial Sequence: Synthetic oligonucleotide
cagcacgguguucugauuc

SEQ ID NO: 2540645 - RNA, 19 nt, Artificial Sequence
  Description of Artificial Sequence: Synthetic oligonucleotide
uaggguacuagggccaccu

SEQ ID NO: 2540646 - RNA, 19 nt, Artificial Sequence
  Description of Artificial Sequence: Synthetic oligonucleotide
cacgguguucugauucagc

SEQ ID NO: 2540647 - RNA, 19 nt, Artificial Sequence
  Description of Artificial Sequence: Synthetic oligonucleotide
ucgucacuccauaggacau

SEQ ID NO: 2540648 - RNA, 19 nt, Artificial Sequence
  Description of Artificial Sequence: Synthetic oligonucleotide
ucccaugcagcugucuggc

SEQ ID NO: 2540649 - RNA, 19 nt, Artificial Sequence
  Description of Artificial Sequence: Synthetic oligonucleotide
uucucggcauccagcacaa

SEQ ID NO: 2540650 - RNA, 19 nt, Artificial Sequence
  Description of Artificial Sequence: Synthetic oligonucleotide
agcacgguguucugauuca

SEQ ID NO: 2540651 - RNA, 19 nt, Artificial Sequence
  Description of Artificial Sequence: Synthetic oligonucleotide
acgccucggugccaaggcc

SEQ ID NO: 2540652 - RNA, 19 nt, Artificial Sequence
  Description of Artificial Sequence: Synthetic oligonucleotide
caaugaaggugcacuuguc

SEQ ID NO: 2540653 - RNA, 19 nt, Artificial Sequence
  Description of Artificial Sequence: Synthetic oligonucleotide
gacguugcucacugccacc

SEQ ID NO: 2540654 - RNA, 19 nt, Artificial Sequence
  Description of Artificial Sequence: Synthetic oligonucleotide
cagccugaagacacuguac

SEQ ID NO: 2540655 - RNA, 19 nt, Artificial Sequence
  Description of Artificial Sequence: Synthetic oligonucleotide
aucaggagagacgccucgg

SEQ ID NO: 2540656 - RNA, 19 nt, Artificial Sequence
  Description of Artificial Sequence: Synthetic oligonucleotide
cacuucucggcauccagca

SEQ ID NO: 2540657 - RNA, 19 nt, Artificial Sequence
  Description of Artificial Sequence: Synthetic oligonucleotide
caucucauauuccugcucu

SEQ ID NO: 2540658 - RNA, 19 nt, Artificial Sequence
  Description of Artificial Sequence: Synthetic oligonucleotide
gacucucccaugcagcugu

SEQ ID NO: 2540659 - RNA, 19 nt, Artificial Sequence
  Description of Artificial Sequence: Synthetic oligonucleotide
uagggucagcagcucugag

SEQ ID NO: 2540660 - RNA, 19 nt, Artificial Sequence
  Description of Artificial Sequence: Synthetic oligonucleotide
uucacaccagcugcacugc

SEQ ID NO: 2540661 - RNA, 19 nt, Artificial Sequence
  Description of Artificial Sequence: Synthetic oligonucleotide
acuguacaugacucuccca

SEQ ID NO: 2540662 - RNA, 19 nt, Artificial Sequence
  Description of Artificial Sequence: Synthetic oligonucleotide
ugggcuuaggagggucugg

SEQ ID NO: 2540663 - RNA, 19 nt, Artificial Sequence
  Description of Artificial Sequence: Synthetic oligonucleotide
ucuggaacauccggaugcu

SEQ ID NO: 2540664 - RNA, 19 nt, Artificial Sequence
  Description of Artificial Sequence: Synthetic oligonucleotide
gcuucgucacuccauagga

SEQ ID NO: 2540665 - RNA, 19 nt, Artificial Sequence
  Description of Artificial Sequence: Synthetic oligonucleotide
uuaggagggucuggagcag

SEQ ID NO: 2540666 - RNA, 19 nt, Artificial Sequence
  Description of Artificial Sequence: Synthetic oligonucleotide
gucugcucacacagggugg

SEQ ID NO: 2540667 - RNA, 19 nt, Artificial Sequence
  Description of Artificial Sequence: Synthetic oligonucleotide
cugauucagccucauugca

SEQ ID NO: 2540668 - RNA, 19 nt, Artificial Sequence
  Description of Artificial Sequence: Synthetic oligonucleotide
cucaugguaccuaggcaca

SEQ ID NO: 2540669 - RNA, 19 nt, Artificial Sequence
  Description of Artificial Sequence: Synthetic oligonucleotide
agccagaggaggcccaggu

SEQ ID NO: 2540670 - RNA, 19 nt, Artificial Sequence
  Description of Artificial Sequence: Synthetic oligonucleotide
auucagccucauugcagcu

SEQ ID NO: 2540671 - RNA, 19 nt, Artificial Sequence
  Description of Artificial Sequence: Synthetic oligonucleotide
aggaagagguucacaucuc

SEQ ID NO: 2540672 - RNA, 19 nt, Artificial Sequence
  Description of Artificial Sequence: Synthetic oligonucleotide
ggagagacgccucggugcc

SEQ ID NO: 2540673 - RNA, 19 nt, Artificial Sequence
  Description of Artificial Sequence: Synthetic oligonucleotide
uguaggguacuagggccac

SEQ ID NO: 2540674 - RNA, 19 nt, Artificial Sequence
  Description of Artificial Sequence: Synthetic oligonucleotide
caggagagacgccucggug

SEQ ID NO: 2540675 - RNA, 19 nt, Artificial Sequence
  Description of Artificial Sequence: Synthetic oligonucleotide
gaccuagcuucgucacucc

SEQ ID NO: 2540676 - RNA, 19 nt, Artificial Sequence
  Description of Artificial Sequence: Synthetic oligonucleotide
caccaugcagcucuccuca

SEQ ID NO: 2540677 - RNA, 19 nt, Artificial Sequence
  Description of Artificial Sequence: Synthetic oligonucleotide
ggugcacuugucuucaucu

SEQ ID NO: 2540678 - RNA, 19 nt, Artificial Sequence
  Description of Artificial Sequence: Synthetic oligonucleotide
cugggccugccacuucucg

SEQ ID NO: 2540679 - RNA, 19 nt, Artificial Sequence
  Description of Artificial Sequence: Synthetic oligonucleotide
ccugaagacacuguacaug

SEQ ID NO: 2540680 - RNA, 19 nt, Artificial Sequence
  Description of Artificial Sequence: Synthetic oligonucleotide
cuagggccaccuucuugcc

SEQ ID NO: 2540681 - RNA, 19 nt, Artificial Sequence
  Description of Artificial Sequence: Synthetic oligonucleotide
ugccgcucugccucaguca

SEQ ID NO: 2540682 - RNA, 19 nt, Artificial Sequence
  Description of Artificial Sequence: Synthetic oligonucleotide
uggcuggucugcuccagaa

SEQ ID NO: 2540683 - RNA, 19 nt, Artificial Sequence
  Description of Artificial Sequence: Synthetic oligonucleotide
cucgggaguggguggcucc

SEQ ID NO: 2540684 - RNA, 19 nt, Artificial Sequence
  Description of Artificial Sequence: Synthetic oligonucleotide
acaggcucugccaacucga

SEQ ID NO: 2540685 - RNA, 19 nt, Artificial Sequence
  Description of Artificial Sequence: Synthetic oligonucleotide
gaggcugucaggugccgaa

SEQ ID NO: 2540686 - RNA, 19 nt, Artificial Sequence
  Description of Artificial Sequence: Synthetic oligonucleotide
cugucaggugccgaaguuc

SEQ ID NO: 2540687 - RNA, 19 nt, Artificial Sequence
  Description of Artificial Sequence: Synthetic oligonucleotide
cacucaugguaccuaggca

SEQ ID NO: 2540688 - RNA, 19 nt, Artificial Sequence
  Description of Artificial Sequence: Synthetic oligonucleotide
cucggugccaaggcccugg

SEQ ID NO: 2540689 - RNA, 19 nt, Artificial Sequence
  Description of Artificial Sequence: Synthetic oligonucleotide
ucaugaccucgaucucccc

SEQ ID NO: 2540690 - RNA, 19 nt, Artificial Sequence
  Description of Artificial Sequence: Synthetic oligonucleotide
uuuuggccucaaacuuggu

SEQ ID NO: 2540691 - RNA, 19 nt, Artificial Sequence
  Description of Artificial Sequence: Synthetic oligonucleotide
cacacaggguggcugccac

SEQ ID NO: 2540692 - RNA, 19 nt, Artificial Sequence
  Description of Artificial Sequence: Synthetic oligonucleotide
cauauuccugcucuagggu

SEQ ID NO: 2540693 - RNA, 19 nt, Artificial Sequence
  Description of Artificial Sequence: Synthetic oligonucleotide
cuagcuucgucacuccaua

SEQ ID NO: 2540694 - RNA, 19 nt, Artificial Sequence
  Description of Artificial Sequence: Synthetic oligonucleotide
ugggcucugcaaucaugac

SEQ ID NO: 2540695 - RNA, 19 nt, Artificial Sequence
  Description of Artificial Sequence: Synthetic oligonucleotide
accuagcuucgucacucca

SEQ ID NO: 2540696 - RNA, 19 nt, Artificial Sequence
  Description of Artificial Sequence: Synthetic oligonucleotide
ucacugccagucugagugu

SEQ ID NO: 2540697 - RNA, 19 nt, Artificial Sequence
  Description of Artificial Sequence: Synthetic oligonucleotide
gagcagccugaagacacug

SEQ ID NO: 2540698 - RNA, 19 nt, Artificial Sequence
  Description of Artificial Sequence: Synthetic oligonucleotide
agucacugccagucugagu

SEQ ID NO: 2540699 - RNA, 19 nt, Artificial Sequence
  Description of Artificial Sequence: Synthetic oligonucleotide
cuugcccagcagcacggug

SEQ ID NO: 2540700 - RNA, 19 nt, Artificial Sequence
  Description of Artificial Sequence: Synthetic oligonucleotide
cucugauuucauccacuca

SEQ ID NO: 2540701 - RNA, 19 nt, Artificial Sequence
  Description of Artificial Sequence: Synthetic oligonucleotide
cucgacucuauagggcuuc

SEQ ID NO: 2540702 - RNA, 19 nt, Artificial Sequence
  Description of Artificial Sequence: Synthetic oligonucleotide
accuucuugcccagcagca

SEQ ID NO: 2540703 - RNA, 19 nt, Artificial Sequence
  Description of Artificial Sequence: Synthetic oligonucleotide
ugacucucccaugcagcug

SEQ ID NO: 2540704 - RNA, 19 nt, Artificial Sequence
  Description of Artificial Sequence: Synthetic oligonucleotide
ugucuggccucgggagugg

SEQ ID NO: 2540705 - RNA, 19 nt, Artificial Sequence
  Description of Artificial Sequence: Synthetic oligonucleotide
ugccagucugagugucacc

SEQ ID NO: 2540706 - RNA, 19 nt, Artificial Sequence
  Description of Artificial Sequence: Synthetic oligonucleotide
accaugcagcucuccucag

SEQ ID NO: 2540707 - RNA, 19 nt, Artificial Sequence
  Description of Artificial Sequence: Synthetic oligonucleotide
cauccggaugcuaggcuca

SEQ ID NO: 2540708 - RNA, 19 nt, Artificial Sequence
  Description of Artificial Sequence: Synthetic oligonucleotide
caugguaccuaggcacaug

SEQ ID NO: 2540709 - RNA, 19 nt, Artificial Sequence
  Description of Artificial Sequence: Synthetic oligonucleotide
ggguacuagggccaccuuc

SEQ ID NO: 2540710 - RNA, 19 nt, Artificial Sequence
  Description of Artificial Sequence: Synthetic oligonucleotide
ucaugguaccuaggcacau

SEQ ID NO: 2540711 - RNA, 19 nt, Artificial Sequence
  Description of Artificial Sequence: Synthetic oligonucleotide
aggcucugccaacucgacu

SEQ ID NO: 2540712 - RNA, 19 nt, Artificial Sequence
  Description of Artificial Sequence: Synthetic oligonucleotide
gccacugccgcucugccuc

SEQ ID NO: 2540713 - RNA, 19 nt, Artificial Sequence
  Description of Artificial Sequence: Synthetic oligonucleotide
augcuaggcucauuuucuu

SEQ ID NO: 2540714 - RNA, 19 nt, Artificial Sequence
  Description of Artificial Sequence: Synthetic oligonucleotide
ccucugauuucauccacuc

SEQ ID NO: 2540715 - RNA, 19 nt, Artificial Sequence
  Description of Artificial Sequence: Synthetic oligonucleotide
uguucugauucagccucau

SEQ ID NO: 2540716 - RNA, 19 nt, Artificial Sequence
  Description of Artificial Sequence: Synthetic oligonucleotide
uggggucuuccagaucugu

SEQ ID NO: 2540717 - RNA, 19 nt, Artificial Sequence
  Description of Artificial Sequence: Synthetic oligonucleotide
cugucuggccucgggagug

SEQ ID NO: 2540718 - RNA, 19 nt, Artificial Sequence
  Description of Artificial Sequence: Synthetic oligonucleotide
guguaggguacuagggcca

SEQ ID NO: 2540719 - RNA, 19 nt, Artificial Sequence
  Description of Artificial Sequence: Synthetic oligonucleotide
gccacuucucggcauccag

SEQ ID NO: 2540720 - RNA, 19 nt, Artificial Sequence
  Description of Artificial Sequence: Synthetic oligonucleotide
aggugccgaaguuccucug

SEQ ID NO: 2540721 - RNA, 19 nt, Artificial Sequence
  Description of Artificial Sequence: Synthetic oligonucleotide
caggcucugccaacucgac

SEQ ID NO: 2540722 - RNA, 19 nt, Artificial Sequence
  Description of Artificial Sequence: Synthetic oligonucleotide
ccucaaacuuggucagacc

SEQ ID NO: 2540723 - RNA, 19 nt, Artificial Sequence
  Description of Artificial Sequence: Synthetic oligonucleotide
ucggugccaaggcccuggc

SEQ ID NO: 2540724 - RNA, 19 nt, Artificial Sequence
  Description of Artificial Sequence: Synthetic oligonucleotide
ccuaggcacaugcucggag

SEQ ID NO: 2540725 - RNA, 19 nt, Artificial Sequence
  Description of Artificial Sequence: Synthetic oligonucleotide
aaggugcacuugucuucau

SEQ ID NO: 2540726 - RNA, 19 nt, Artificial Sequence
  Description of Artificial Sequence: Synthetic oligonucleotide
ugccacaggcucugccaac

SEQ ID NO: 2540727 - RNA, 19 nt, Artificial Sequence
  Description of Artificial Sequence: Synthetic oligonucleotide
cuccacguggcuggucugc

SEQ ID NO: 2540728 - RNA, 19 nt, Artificial Sequence
  Description of Artificial Sequence: Synthetic oligonucleotide
cagucacugccagucugag

SEQ ID NO: 2540729 - RNA, 19 nt, Artificial Sequence
  Description of Artificial Sequence: Synthetic oligonucleotide
ggacaucaucaggagagac

SEQ ID NO: 2540730 - RNA, 19 nt, Artificial Sequence
  Description of Artificial Sequence: Synthetic oligonucleotide
cacaugcucggagguguag

SEQ ID NO: 2540731 - RNA, 19 nt, Artificial Sequence
  Description of Artificial Sequence: Synthetic oligonucleotide
gccucagucacugccaguc

SEQ ID NO: 2540732 - RNA, 19 nt, Artificial Sequence
  Description of Artificial Sequence: Synthetic oligonucleotide
ggcuggucugcuccagaag

SEQ ID NO: 2540733 - RNA, 19 nt, Artificial Sequence
  Description of Artificial Sequence: Synthetic oligonucleotide
ggucagaccuagcuucguc

SEQ ID NO: 2540734 - RNA, 19 nt, Artificial Sequence
  Description of Artificial Sequence: Synthetic oligonucleotide
ggugccgaaguuccucuga

SEQ ID NO: 2540735 - RNA, 19 nt, Artificial Sequence
  Description of Artificial Sequence: Synthetic oligonucleotide
ugccgaaguuccucugauu

SEQ ID NO: 2540736 - RNA, 19 nt, Artificial Sequence
  Description of Artificial Sequence: Synthetic oligonucleotide
agucugagugucaccuccu

SEQ ID NO: 2540737 - RNA, 19 nt, Artificial Sequence
  Description of Artificial Sequence: Synthetic oligonucleotide
gcaucucauauuccugcuc

SEQ ID NO: 2540738 - RNA, 19 nt, Artificial Sequence
  Description of Artificial Sequence: Synthetic oligonucleotide
gguacuagggccaccuucu

SEQ ID NO: 2540739 - RNA, 19 nt, Artificial Sequence
  Description of Artificial Sequence: Synthetic oligonucleotide
cucacacaggguggcugcc

SEQ ID NO: 2540740 - RNA, 19 nt, Artificial Sequence
  Description of Artificial Sequence: Synthetic oligonucleotide
ucacuccauaggacaucau

SEQ ID NO: 2540741 - RNA, 19 nt, Artificial Sequence
  Description of Artificial Sequence: Synthetic oligonucleotide
ucgggaguggguggcucca

SEQ ID NO: 2540742 - RNA, 19 nt, Artificial Sequence
  Description of Artificial Sequence: Synthetic oligonucleotide
uccacguggcuggucugcu

SEQ ID NO: 2540743 - RNA, 19 nt, Artificial Sequence
  Description of Artificial Sequence: Synthetic oligonucleotide
cauccagcacaaugaaggu

SEQ ID NO: 2540744 - RNA, 19 nt, Artificial Sequence
  Description of Artificial Sequence: Synthetic oligonucleotide
ugcucacugccaccugcuu

SEQ ID NO: 2540745 - RNA, 19 nt, Artificial Sequence
  Description of Artificial Sequence: Synthetic oligonucleotide
ggaagacguugcucacugc

SEQ ID NO: 2540746 - RNA, 19 nt, Artificial Sequence
  Description of Artificial Sequence: Synthetic oligonucleotide
ucgacucuauagggcuucu

SEQ ID NO: 2540747 - RNA, 19 nt, Artificial Sequence
  Description of Artificial Sequence: Synthetic oligonucleotide
cugugaggaagagguucac

SEQ ID NO: 2540748 - RNA, 19 nt, Artificial Sequence
  Description of Artificial Sequence: Synthetic oligonucleotide
aggcugucaggugccgaag

SEQ ID NO: 2540749 - RNA, 19 nt, Artificial Sequence
  Description of Artificial Sequence: Synthetic oligonucleotide
uggucagaccuagcuucgu

SEQ ID NO: 2540750 - RNA, 19 nt, Artificial Sequence
  Description of Artificial Sequence: Synthetic oligonucleotide
augcucggagguguagggu

SEQ ID NO: 2540751 - RNA, 19 nt, Artificial Sequence
  Description of Artificial Sequence: Synthetic oligonucleotide
cugaggcugucaggugccg

SEQ ID NO: 2540752 - RNA, 19 nt, Artificial Sequence
  Description of Artificial Sequence: Synthetic oligonucleotide
cuagggucagcagcucuga

SEQ ID NO: 2540753 - RNA, 19 nt, Artificial Sequence
  Description of Artificial Sequence: Synthetic oligonucleotide
aucucccaccaugcagcuc

SEQ ID NO: 2540754 - RNA, 19 nt, Artificial Sequence
  Description of Artificial Sequence: Synthetic oligonucleotide
cuccaggucugcucacaca

SEQ ID NO: 2540755 - RNA, 19 nt, Artificial Sequence
  Description of Artificial Sequence: Synthetic oligonucleotide
cacugccagucugaguguc

SEQ ID NO: 2540756 - RNA, 19 nt, Artificial Sequence
  Description of Artificial Sequence: Synthetic oligonucleotide
cagcacaaugaaggugcac

SEQ ID NO: 2540757 - RNA, 19 nt, Artificial Sequence
  Description of Artificial Sequence: Synthetic oligonucleotide
acugccagucugaguguca

SEQ ID NO: 2540758 - RNA, 19 nt, Artificial Sequence
  Description of Artificial Sequence: Synthetic oligonucleotide
acguggcuggucugcucca

SEQ ID NO: 2540759 - RNA, 19 nt, Artificial Sequence
  Description of Artificial Sequence: Synthetic oligonucleotide
guaggguacuagggccacc

SEQ ID NO: 2540760 - RNA, 19 nt, Artificial Sequence
  Description of Artificial Sequence: Synthetic oligonucleotide
cgaaguuccucugauuuca

SEQ ID NO: 2540761 - RNA, 19 nt, Artificial Sequence
  Description of Artificial Sequence: Synthetic oligonucleotide
gcugcacugcaucucauau

SEQ ID NO: 2540762 - RNA, 19 nt, Artificial Sequence
  Description of Artificial Sequence: Synthetic oligonucleotide
gagacgccucggugccaag

SEQ ID NO: 2540763 - RNA, 19 nt, Artificial Sequence
  Description of Artificial Sequence: Synthetic oligonucleotide
ucggagguguaggguacua

SEQ ID NO: 2540764 - RNA, 19 nt, Artificial Sequence
  Description of Artificial Sequence: Synthetic oligonucleotide
ugcccaauuuuggccucaa

SEQ ID NO: 2540765 - RNA, 19 nt, Artificial Sequence
  Description of Artificial Sequence: Synthetic oligonucleotide
ccagaucugugaggaagag

SEQ ID NO: 2540766 - RNA, 19 nt, Artificial Sequence
  Description of Artificial Sequence: Synthetic oligonucleotide
ccagaagccacugccgcuc

SEQ ID NO: 2540767 - RNA, 19 nt, Artificial Sequence
  Description of Artificial Sequence: Synthetic oligonucleotide
guggcuggucugcuccaga

SEQ ID NO: 2540768 - RNA, 19 nt, Artificial Sequence
  Description of Artificial Sequence: Synthetic oligonucleotide
ccagcugcacugcaucuca

SEQ ID NO: 2540769 - RNA, 19 nt, Artificial Sequence
  Description of Artificial Sequence: Synthetic oligonucleotide
accuaggcacaugcucgga

SEQ ID NO: 2540770 - RNA, 19 nt, Artificial Sequence
  Description of Artificial Sequence: Synthetic oligonucleotide
cugccaacucgacucuaua

SEQ ID NO: 2540771 - RNA, 19 nt, Artificial Sequence
  Description of Artificial Sequence: Synthetic oligonucleotide
cgccucggugccaaggccc

SEQ ID NO: 2540772 - RNA, 19 nt, Artificial Sequence
  Description of Artificial Sequence: Synthetic oligonucleotide
gcgaggcugggccugccac

SEQ ID NO: 2540773 - RNA, 19 nt, Artificial Sequence
  Description of Artificial Sequence: Synthetic oligonucleotide
ggccccugcagcugggcuc

SEQ ID NO: 2540774 - RNA, 19 nt, Artificial Sequence
  Description of Artificial Sequence: Synthetic oligonucleotide
ccugcuuaaaauguaguuu

SEQ ID NO: 2540775 - RNA, 19 nt, Artificial Sequence
  Description of Artificial Sequence: Synthetic oligonucleotide
cauccacucaugguaccua

SEQ ID NO: 2540776 - RNA, 19 nt, Artificial Sequence
  Description of Artificial Sequence: Synthetic oligonucleotide
acucgacucuauagggcuu

SEQ ID NO: 2540777 - RNA, 19 nt, Artificial Sequence
  Description of Artificial Sequence: Synthetic oligonucleotide
acucucccaugcagcuguc

SEQ ID NO: 2540778 - RNA, 19 nt, Artificial Sequence
  Description of Artificial Sequence: Synthetic oligonucleotide
aggguacuagggccaccuu

SEQ ID NO: 2540779 - RNA, 19 nt, Artificial Sequence
  Description of Artificial Sequence: Synthetic oligonucleotide
cacugccaccugcuuaaaa

SEQ ID NO: 2540780 - RNA, 19 nt, Artificial Sequence
  Description of Artificial Sequence: Synthetic oligonucleotide
gugccgaaguuccucugau

SEQ ID NO: 2540781 - RNA, 19 nt, Artificial Sequence
  Description of Artificial Sequence: Synthetic oligonucleotide
gaaguuccucugauuucau

SEQ ID NO: 2540782 - RNA, 19 nt, Artificial Sequence
  Description of Artificial Sequence: Synthetic oligonucleotide
gcucggagguguaggguac

SEQ ID NO: 2540783 - RNA, 19 nt, Artificial Sequence
  Description of Artificial Sequence: Synthetic oligonucleotide
cagcugggcucugcaauca

SEQ ID NO: 2540784 - RNA, 19 nt, Artificial Sequence
  Description of Artificial Sequence: Synthetic oligonucleotide
caucucccaccaugcagcu

SEQ ID NO: 2540785 - RNA, 19 nt, Artificial Sequence
  Description of Artificial Sequence: Synthetic oligonucleotide
gugcacuugucuucaucuu

SEQ ID NO: 2540786 - RNA, 19 nt, Artificial Sequence
  Description of Artificial Sequence: Synthetic oligonucleotide
cuggaagacguugcucacu

SEQ ID NO: 2540787 - RNA, 19 nt, Artificial Sequence
  Description of Artificial Sequence: Synthetic oligonucleotide
auccggaugcuaggcucau

SEQ ID NO: 2540788 - RNA, 19 nt, Artificial Sequence
  Description of Artificial Sequence: Synthetic oligonucleotide
cagaccuagcuucgucacu

SEQ ID NO: 2540789 - RNA, 19 nt, Artificial Sequence
  Description of Artificial Sequence: Synthetic oligonucleotide
cugcacugcaucucauauu

SEQ ID NO: 2540790 - RNA, 19 nt, Artificial Sequence
  Description of Artificial Sequence: Synthetic oligonucleotide
gaucugugaggaagagguu

SEQ ID NO: 2540791 - RNA, 19 nt, Artificial Sequence
  Description of Artificial Sequence: Synthetic oligonucleotide
ccagcagcacgguguucug

SEQ ID NO: 2540792 - RNA, 19 nt, Artificial Sequence
  Description of Artificial Sequence: Synthetic oligonucleotide
cagcagcacgguguucuga

SEQ ID NO: 2540793 - RNA, 19 nt, Artificial Sequence
  Description of Artificial Sequence: Synthetic oligonucleotide
ccaugcagcugucuggccu

SEQ ID NO: 2540794 - RNA, 19 nt, Artificial Sequence
  Description of Artificial Sequence: Synthetic oligonucleotide
gccugaagacacuguacau

SEQ ID NO: 2540795 - RNA, 19 nt, Artificial Sequence
  Description of Artificial Sequence: Synthetic oligonucleotide
uccggaugcuaggcucauu

SEQ ID NO: 2540796 - RNA, 19 nt, Artificial Sequence
  Description of Artificial Sequence: Synthetic oligonucleotide
ggccucgggaguggguggc

SEQ ID NO: 2540797 - RNA, 19 nt, Artificial Sequence
  Description of Artificial Sequence: Synthetic oligonucleotide
ccagcacaaugaaggugca

SEQ ID NO: 2540798 - RNA, 19 nt, Artificial Sequence
  Description of Artificial Sequence: Synthetic oligonucleotide
gcugucuggccucgggagu

SEQ ID NO: 2540799 - RNA, 19 nt, Artificial Sequence
  Description of Artificial Sequence: Synthetic oligonucleotide
ccuggccccugcagcuggg

SEQ ID NO: 2540800 - RNA, 19 nt, Artificial Sequence
  Description of Artificial Sequence: Synthetic oligonucleotide
cacugccgcucugccucag

SEQ ID NO: 2540801 - RNA, 19 nt, Artificial Sequence
  Description of Artificial Sequence: Synthetic oligonucleotide
cugcaaucaugaccucgau

SEQ ID NO: 2540802 - RNA, 19 nt, Artificial Sequence
  Description of Artificial Sequence: Synthetic oligonucleotide
ccuccacguggcuggucug

SEQ ID NO: 2540803 - RNA, 19 nt, Artificial Sequence
  Description of Artificial Sequence: Synthetic oligonucleotide
guacuagggccaccuucuu

SEQ ID NO: 2540804 - RNA, 19 nt, Artificial Sequence
  Description of Artificial Sequence: Synthetic oligonucleotide
ccggaugcuaggcucauuu

SEQ ID NO: 2540805 - RNA, 19 nt, Artificial Sequence
  Description of Artificial Sequence: Synthetic oligonucleotide
ucucggcauccagcacaau

SEQ ID NO: 2540806 - RNA, 19 nt, Artificial Sequence
  Description of Artificial Sequence: Synthetic oligonucleotide
ccacguggcuggucugcuc

SEQ ID NO: 2540807 - RNA, 19 nt, Artificial Sequence
  Description of Artificial Sequence: Synthetic oligonucleotide
cucugccaacucgacucua

SEQ ID NO: 2540808 - RNA, 19 nt, Artificial Sequence
  Description of Artificial Sequence: Synthetic oligonucleotide
gcucuagggucagcagcuc

SEQ ID NO: 2540809 - RNA, 19 nt, Artificial Sequence
  Description of Artificial Sequence: Synthetic oligonucleotide
ccaaggcccuggccccugc

SEQ ID NO: 2540810 - RNA, 19 nt, Artificial Sequence
  Description of Artificial Sequence: Synthetic oligonucleotide
gggucuggagcagccugaa

SEQ ID NO: 2540811 - RNA, 19 nt, Artificial Sequence
  Description of Artificial Sequence: Synthetic oligonucleotide
ggagcagccugaagacacu

SEQ ID NO: 2540812 - RNA, 19 nt, Artificial Sequence
  Description of Artificial Sequence: Synthetic oligonucleotide
cguugcucacugccaccug

SEQ ID NO: 2540813 - RNA, 19 nt, Artificial Sequence
  Description of Artificial Sequence: Synthetic oligonucleotide
gcucauuuucuugcccaau

SEQ ID NO: 2540814 - RNA, 19 nt, Artificial Sequence
  Description of Artificial Sequence: Synthetic oligonucleotide
cucucccaugcagcugucu

SEQ ID NO: 2540815 - RNA, 19 nt, Artificial Sequence
  Description of Artificial Sequence: Synthetic oligonucleotide
ccucgggaguggguggcuc

SEQ ID NO: 2540816 - RNA, 19 nt, Artificial Sequence
  Description of Artificial Sequence: Synthetic oligonucleotide
gguucacaucucccaccau

SEQ ID NO: 2540817 - RNA, 19 nt, Artificial Sequence
  Description of Artificial Sequence: Synthetic oligonucleotide
cagcugcacugcaucucau

SEQ ID NO: 2540818 - RNA, 19 nt, Artificial Sequence
  Description of Artificial Sequence: Synthetic oligonucleotide
gccaaggcccuggccccug

SEQ ID NO: 2540819 - RNA, 19 nt, Artificial Sequence
  Description of Artificial Sequence: Synthetic oligonucleotide
gccagccagaggaggccca

SEQ ID NO: 2540820 - RNA, 19 nt, Artificial Sequence
  Description of Artificial Sequence: Synthetic oligonucleotide
cggugccaaggcccuggcc

SEQ ID NO: 2540821 - RNA, 19 nt, Artificial Sequence
  Description of Artificial Sequence: Synthetic oligonucleotide
gcacaugcucggaggugua

SEQ ID NO: 2540822 - RNA, 19 nt, Artificial Sequence
  Description of Artificial Sequence: Synthetic oligonucleotide
ccacugccgcucugccuca

SEQ ID NO: 2540823 - RNA, 19 nt, Artificial Sequence
  Description of Artificial Sequence: Synthetic oligonucleotide
gccugccacuucucggcau

SEQ ID NO: 2540824 - RNA, 19 nt, Artificial Sequence
  Description of Artificial Sequence: Synthetic oligonucleotide
ccucggugccaaggcccug

SEQ ID NO: 2540825 - RNA, 19 nt, Artificial Sequence
  Description of Artificial Sequence: Synthetic oligonucleotide
cgggaguggguggcuccag

SEQ ID NO: 2540826 - RNA, 19 nt, Artificial Sequence
  Description of Artificial Sequence: Synthetic oligonucleotide
ccgcucugccucagucacu

SEQ ID NO: 2540827 - RNA, 19 nt, Artificial Sequence
  Description of Artificial Sequence: Synthetic oligonucleotide
gccucgggaguggguggcu

SEQ ID NO: 2540828 - RNA, 19 nt, Artificial Sequence
  Description of Artificial Sequence: Synthetic oligonucleotide
uuuaucgggaacaagaugg

SEQ ID NO: 2540829 - RNA, 19 nt, Artificial Sequence
  Description of Artificial Sequence: Synthetic oligonucleotide
ucuuaggugacucaguugg

SEQ ID NO: 2540830 - RNA, 19 nt, Artificial Sequence
  Description of Artificial Sequence: Synthetic oligonucleotide
ucaaaguugaguuucuugg

SEQ ID NO: 2540831 - RNA, 19 nt, Artificial Sequence
  Description of Artificial Sequence: Synthetic oligonucleotide
uuuauuauaauuuucugua

SEQ ID NO: 2540832 - RNA, 19 nt, Artificial Sequence
  Description of Artificial Sequence: Synthetic oligonucleotide
uuuacaguggucuuuaucu

SEQ ID NO: 2540833 - RNA, 19 nt, Artificial Sequence
  Description of Artificial Sequence: Synthetic oligonucleotide
uauacuuuucgcuuuacag

SEQ ID NO: 2540834 - RNA, 19 nt, Artificial Sequence
  Description of Artificial Sequence: Synthetic oligonucleotide
uucuuuauuauaauuuucu

SEQ ID NO: 2540835 - RNA, 19 nt, Artificial Sequence
  Description of Artificial Sequence: Synthetic oligonucleotide
uucaacauccaccagguca

SEQ ID NO: 2540836 - RNA, 19 nt, Artificial Sequence
  Description of Artificial Sequence: Synthetic oligonucleotide
gaugucaucuucuugggcc

SEQ ID NO: 2540837 - RNA, 19 nt, Artificial Sequence
  Description of Artificial Sequence: Synthetic oligonucleotide
ucagacggaggucagaggg

SEQ ID NO: 2540838 - RNA, 19 nt, Artificial Sequence
  Description of Artificial Sequence: Synthetic oligonucleotide
aguggucuuuaucugagcc

SEQ ID NO: 2540839 - RNA, 19 nt, Artificial Sequence
  Description of Artificial Sequence: Synthetic oligonucleotide
uacuuuucgcuuuacagug

SEQ ID NO: 2540840 - RNA, 19 nt, Artificial Sequence
  Description of Artificial Sequence: Synthetic oligonucleotide
aaaguugaguuucuuggcu

SEQ ID NO: 2540841 - RNA, 19 nt, Artificial Sequence
  Description of Artificial Sequence: Synthetic oligonucleotide
ucuucauauacuuuucgcu

SEQ ID NO: 2540842 - RNA, 19 nt, Artificial Sequence
  Description of Artificial Sequence: Synthetic oligonucleotide
agagaagaucucuccaacc

SEQ ID NO: 2540843 - RNA, 19 nt, Artificial Sequence
  Description of Artificial Sequence: Synthetic oligonucleotide
ugacucaguuggaagaggg

SEQ ID NO: 2540844 - RNA, 19 nt, Artificial Sequence
  Description of Artificial Sequence: Synthetic oligonucleotide
aagaguccgauacuggaug

SEQ ID NO: 2540845 - RNA, 19 nt, Artificial Sequence
  Description of Artificial Sequence: Synthetic oligonucleotide
ugucacaucagccuucugu

SEQ ID NO: 2540846 - RNA, 19 nt, Artificial Sequence
  Description of Artificial Sequence: Synthetic oligonucleotide
cuggaaaccacggagagcc

SEQ ID NO: 2540847 - RNA, 19 nt, Artificial Sequence
  Description of Artificial Sequence: Synthetic oligonucleotide
agaguagaggagcaucagc

SEQ ID NO: 2540848 - RNA, 19 nt, Artificial Sequence
  Description of Artificial Sequence: Synthetic oligonucleotide
ucguucagagcacugagug

SEQ ID NO: 2540849 - RNA, 19 nt, Artificial Sequence
  Description of Artificial Sequence: Synthetic oligonucleotide
ucgggaacaagauggacag

SEQ ID NO: 2540850 - RNA, 19 nt, Artificial Sequence
  Description of Artificial Sequence: Synthetic oligonucleotide
uccaccaggucacuguugg

SEQ ID NO: 2540851 - RNA, 19 nt, Artificial Sequence
  Description of Artificial Sequence: Synthetic oligonucleotide
uccaguggcuuucugaccc

SEQ ID NO: 2540852 - RNA, 19 nt, Artificial Sequence
  Description of Artificial Sequence: Synthetic oligonucleotide
ucaacauccaccaggucac

SEQ ID NO: 2540853 - RNA, 19 nt, Artificial Sequence
  Description of Artificial Sequence: Synthetic oligonucleotide
uccacgguggaacagugag

SEQ ID NO: 2540854 - RNA, 19 nt, Artificial Sequence
  Description of Artificial Sequence: Synthetic oligonucleotide
auacuuuucgcuuuacagu

SEQ ID NO: 2540855 - RNA, 19 nt, Artificial Sequence
  Description of Artificial Sequence: Synthetic oligonucleotide
aaguugaguuucuuggcug

SEQ ID NO: 2540856 - RNA, 19 nt, Artificial Sequence
  Description of Artificial Sequence: Synthetic oligonucleotide
aacagugagggucgagagg

SEQ ID NO: 2540857 - RNA, 19 nt, Artificial Sequence
  Description of Artificial Sequence: Synthetic oligonucleotide
ucgagagaaggccagaguc

SEQ ID NO: 2540858 - RNA, 19 nt, Artificial Sequence
  Description of Artificial Sequence: Synthetic oligonucleotide
agucuucauauacuuuucg

SEQ ID NO: 2540859 - RNA, 19 nt, Artificial Sequence
  Description of Artificial Sequence: Synthetic oligonucleotide
agcacugagugucacauca

SEQ ID NO: 2540860 - RNA, 19 nt, Artificial Sequence
  Description of Artificial Sequence: Synthetic oligonucleotide
aguuggaggggagaggacc

SEQ ID NO: 2540861 - RNA, 19 nt, Artificial Sequence
  Description of Artificial Sequence: Synthetic oligonucleotide
uuagagucccaggugaucc

SEQ ID NO: 2540862 - RNA, 19 nt, Artificial Sequence
  Description of Artificial Sequence: Synthetic oligonucleotide
agcaggagaguagaggagc

SEQ ID NO: 2540863 - RNA, 19 nt, Artificial Sequence
  Description of Artificial Sequence: Synthetic oligonucleotide
guuucuuuaggggaggacc

SEQ ID NO: 2540864 - RNA, 19 nt, Artificial Sequence
  Description of Artificial Sequence: Synthetic oligonucleotide
ugcgggcacauguuuaucg

SEQ ID NO: 2540865 - RNA, 19 nt, Artificial Sequence
  Description of Artificial Sequence: Synthetic oligonucleotide
uagcccuucaacauccacc

SEQ ID NO: 2540866 - RNA, 19 nt, Artificial Sequence
  Description of Artificial Sequence: Synthetic oligonucleotide
uggaagggacgucagcagg

SEQ ID NO: 2540867 - RNA, 19 nt, Artificial Sequence
  Description of Artificial Sequence: Synthetic oligonucleotide
uucuccuagcccuucaaca

SEQ ID NO: 2540868 - RNA, 19 nt, Artificial Sequence
  Description of Artificial Sequence: Synthetic oligonucleotide
agaguccgauacuggaugc

SEQ ID NO: 2540869 - RNA, 19 nt, Artificial Sequence
  Description of Artificial Sequence: Synthetic oligonucleotide
agaugucaucuucuugggc

SEQ ID NO: 2540870 - RNA, 19 nt, Artificial Sequence
  Description of Artificial Sequence: Synthetic oligonucleotide
cucaguuggaagagggacg

SEQ ID NO: 2540871 - RNA, 19 nt, Artificial Sequence
  Description of Artificial Sequence: Synthetic oligonucleotide
gucggagucguucagagca

SEQ ID NO: 2540872 - RNA, 19 nt, Artificial Sequence
  Description of Artificial Sequence: Synthetic oligonucleotide
uggucuuuaucugagcccc

SEQ ID NO: 2540873 - RNA, 19 nt, Artificial Sequence
  Description of Artificial Sequence: Synthetic oligonucleotide
aguccuugcuuagaguccc

SEQ ID NO: 2540874 - RNA, 19 nt, Artificial Sequence
  Description of Artificial Sequence: Synthetic oligonucleotide
auguuuaucgggaacaaga

SEQ ID NO: 2540875 - RNA, 19 nt, Artificial Sequence
  Description of Artificial Sequence: Synthetic oligonucleotide
gucuucauauacuuuucgc

SEQ ID NO: 2540876 - RNA, 19 nt, Artificial Sequence
  Description of Artificial Sequence: Synthetic oligonucleotide
ucagcagaggucgagagaa

SEQ ID NO: 2540877 - RNA, 19 nt, Artificial Sequence
  Description of Artificial Sequence: Synthetic oligonucleotide
uccuagcccuucaacaucc

SEQ ID NO: 2540878 - RNA, 19 nt, Artificial Sequence
  Description of Artificial Sequence: Synthetic oligonucleotide
uuucuuaggugacucaguu

SEQ ID NO: 2540879 - RNA, 19 nt, Artificial Sequence
  Description of Artificial Sequence: Synthetic oligonucleotide
cacgguggaacagugaggg

SEQ ID NO: 2540880 - RNA, 19 nt, Artificial Sequence
  Description of Artificial Sequence: Synthetic oligonucleotide
gaagagggacgccagaguc

SEQ ID NO: 2540881 - RNA, 19 nt, Artificial Sequence
  Description of Artificial Sequence: Synthetic oligonucleotide
agagaauuucuuuauuaua

SEQ ID NO: 2540882 - RNA, 19 nt, Artificial Sequence
  Description of Artificial Sequence: Synthetic oligonucleotide
aaaauguccaucagacgga

SEQ ID NO: 2540883 - RNA, 19 nt, Artificial Sequence
  Description of Artificial Sequence: Synthetic oligonucleotide
ucaguuggaagagggacgc

SEQ ID NO: 2540884 - RNA, 19 nt, Artificial Sequence
  Description of Artificial Sequence: Synthetic oligonucleotide
ggagcaucagcagaggucg

SEQ ID NO: 2540885 - RNA, 19 nt, Artificial Sequence
  Description of Artificial Sequence: Synthetic oligonucleotide
uaggugacucaguuggaag

SEQ ID NO: 2540886 - RNA, 19 nt, Artificial Sequence
  Description of Artificial Sequence: Synthetic oligonucleotide
uuauaauuuucuguauaaa

SEQ ID NO: 2540887 - RNA, 19 nt, Artificial Sequence
  Description of Artificial Sequence: Synthetic oligonucleotide
ugcauagucagcuccccga

SEQ ID NO: 2540888 - RNA, 19 nt, Artificial Sequence
  Description of Artificial Sequence: Synthetic oligonucleotide
uuacaguggucuuuaucug

SEQ ID NO: 2540889 - RNA, 19 nt, Artificial Sequence
  Description of Artificial Sequence: Synthetic oligonucleotide
agggucgagagguggaagg

SEQ ID NO: 2540890 - RNA, 19 nt, Artificial Sequence
  Description of Artificial Sequence: Synthetic oligonucleotide
agucguucagagcacugag

SEQ ID NO: 2540891 - RNA, 19 nt, Artificial Sequence
  Description of Artificial Sequence: Synthetic oligonucleotide
gacgcugacgucauggccc

SEQ ID NO: 2540892 - RNA, 19 nt, Artificial Sequence
  Description of Artificial Sequence: Synthetic oligonucleotide
uccgauacuggaugcagcu

SEQ ID NO: 2540893 - RNA, 19 nt, Artificial Sequence
  Description of Artificial Sequence: Synthetic oligonucleotide
uucauauacuuuucgcuuu

SEQ ID NO: 2540894 - RNA, 19 nt, Artificial Sequence
  Description of Artificial Sequence: Synthetic oligonucleotide
uucuugggcccuuucuuag

SEQ ID NO: 2540895 - RNA, 19 nt, Artificial Sequence
  Description of Artificial Sequence: Synthetic oligonucleotide
uuaucgggaacaagaugga

SEQ ID NO: 2540896 - RNA, 19 nt, Artificial Sequence
  Description of Artificial Sequence: Synthetic oligonucleotide
gaggaguuucuccuagccc

SEQ ID NO: 2540897 - RNA, 19 nt, Artificial Sequence
  Description of Artificial Sequence: Synthetic oligonucleotide
cuucuguuucuuuagggga

SEQ ID NO: 2540898 - RNA, 19 nt, Artificial Sequence
  Description of Artificial Sequence: Synthetic oligonucleotide
agcuggaaaccacggagag

SEQ ID NO: 2540899 - RNA, 19 nt, Artificial Sequence
  Description of Artificial Sequence: Synthetic oligonucleotide
aggugacucaguuggaaga

SEQ ID NO: 2540900 - RNA, 19 nt, Artificial Sequence
  Description of Artificial Sequence: Synthetic oligonucleotide
uucuuaggugacucaguug

SEQ ID NO: 2540901 - RNA, 19 nt, Artificial Sequence
  Description of Artificial Sequence: Synthetic oligonucleotide
aggagaguagaggagcauc

SEQ ID NO: 2540902 - RNA, 19 nt, Artificial Sequence
  Description of Artificial Sequence: Synthetic oligonucleotide
ucuugggcccuuucuuagg

SEQ ID NO: 2540903 - RNA, 19 nt, Artificial Sequence
  Description of Artificial Sequence: Synthetic oligonucleotide
agcagaggucgagagaagg

SEQ ID NO: 2540904 - RNA, 19 nt, Artificial Sequence
  Description of Artificial Sequence: Synthetic oligonucleotide
cuuuacaguggucuuuauc

SEQ ID NO: 2540905 - RNA, 19 nt, Artificial Sequence
  Description of Artificial Sequence: Synthetic oligonucleotide
ucuccuagcccuucaacau

SEQ ID NO: 2540906 - RNA, 19 nt, Artificial Sequence
  Description of Artificial Sequence: Synthetic oligonucleotide
guucagagcacugaguguc

SEQ ID NO: 2540907 - RNA, 19 nt, Artificial Sequence
  Description of Artificial Sequence: Synthetic oligonucleotide
ccuucuguuucuuuagggg

SEQ ID NO: 2540908 - RNA, 19 nt, Artificial Sequence
  Description of Artificial Sequence: Synthetic oligonucleotide
ucauauacuuuucgcuuua

SEQ ID NO: 2540909 - RNA, 19 nt, Artificial Sequence
  Description of Artificial Sequence: Synthetic oligonucleotide
uccccgagcuucgugaagg

SEQ ID NO: 2540910 - RNA, 19 nt, Artificial Sequence
  Description of Artificial Sequence: Synthetic oligonucleotide
ucuuuaucugagccccggc

SEQ ID NO: 2540911 - RNA, 19 nt, Artificial Sequence
  Description of Artificial Sequence: Synthetic oligonucleotide
gauccacagguccacggug

SEQ ID NO: 2540912 - RNA, 19 nt, Artificial Sequence
  Description of Artificial Sequence: Synthetic oligonucleotide
aagaucucuccaaccuugg

SEQ ID NO: 2540913 - RNA, 19 nt, Artificial Sequence
  Description of Artificial Sequence: Synthetic oligonucleotide
uggaagagggacgccagag

SEQ ID NO: 2540914 - RNA, 19 nt, Artificial Sequence
  Description of Artificial Sequence: Synthetic oligonucleotide
gagaagaucucuccaaccu

SEQ ID NO: 2540915 - RNA, 19 nt, Artificial Sequence
  Description of Artificial Sequence: Synthetic oligonucleotide
agagggugcgggcacaugu

SEQ ID NO: 2540916 - RNA, 19 nt, Artificial Sequence
  Description of Artificial Sequence: Synthetic oligonucleotide
guggucuuuaucugagccc

SEQ ID NO: 2540917 - RNA, 19 nt, Artificial Sequence
  Description of Artificial Sequence: Synthetic oligonucleotide
uccgccgcuaccaccacgc

SEQ ID NO: 2540918 - RNA, 19 nt, Artificial Sequence
  Description of Artificial Sequence: Synthetic oligonucleotide
cacugagugucacaucagc

SEQ ID NO: 2540919 - RNA, 19 nt, Artificial Sequence
  Description of Artificial Sequence: Synthetic oligonucleotide
caucagcagaggucgagag

SEQ ID NO: 2540920 - RNA, 19 nt, Artificial Sequence
  Description of Artificial Sequence: Synthetic oligonucleotide
ucucucaugcaguccuugc

SEQ ID NO: 2540921 - RNA, 19 nt, Artificial Sequence
  Description of Artificial Sequence: Synthetic oligonucleotide
gugauccacagguccacgg

SEQ ID NO: 2540922 - RNA, 19 nt, Artificial Sequence
  Description of Artificial Sequence: Synthetic oligonucleotide
gcuucagggacacuggagc

SEQ ID NO: 2540923 - RNA, 19 nt, Artificial Sequence
  Description of Artificial Sequence: Synthetic oligonucleotide
uugguggacgcugacguca

SEQ ID NO: 2540924 - RNA, 19 nt, Artificial Sequence
  Description of Artificial Sequence: Synthetic oligonucleotide
agugagggucgagaggugg

SEQ ID NO: 2540925 - RNA, 19 nt, Artificial Sequence
  Description of Artificial Sequence: Synthetic oligonucleotide
ucaugcaguccuugcuuag

SEQ ID NO: 2540926 - RNA, 19 nt, Artificial Sequence
  Description of Artificial Sequence: Synthetic oligonucleotide
agggacgucagcaggagag

SEQ ID NO: 2540927 - RNA, 19 nt, Artificial Sequence
  Description of Artificial Sequence: Synthetic oligonucleotide
aaaccacggagagccgggc

SEQ ID NO: 2540928 - RNA, 19 nt, Artificial Sequence
  Description of Artificial Sequence: Synthetic oligonucleotide
caucagacggaggucagag

SEQ ID NO: 2540929 - RNA, 19 nt, Artificial Sequence
  Description of Artificial Sequence: Synthetic oligonucleotide
aucgggaacaagauggaca

SEQ ID NO: 2540930 - RNA, 19 nt, Artificial Sequence
  Description of Artificial Sequence: Synthetic oligonucleotide
aggagcaucagcagagguc

SEQ ID NO: 2540931 - RNA, 19 nt, Artificial Sequence
  Description of Artificial Sequence: Synthetic oligonucleotide
cagaggucgagagaaggcc

SEQ ID NO: 2540932 - RNA, 19 nt, Artificial Sequence
  Description of Artificial Sequence: Synthetic oligonucleotide
agcuucgugaaggcggcgc

SEQ ID NO: 2540933 - RNA, 19 nt, Artificial Sequence
  Description of Artificial Sequence: Synthetic oligonucleotide
uaucugagccccggcaggg

SEQ ID NO: 2540934 - RNA, 19 nt, Artificial Sequence
  Description of Artificial Sequence: Synthetic oligonucleotide
cucacggagacgcuccgcc

SEQ ID NO: 2540935 - RNA, 19 nt, Artificial Sequence
  Description of Artificial Sequence: Synthetic oligonucleotide
guggacgcugacgucaugg

SEQ ID NO: 2540936 - RNA, 19 nt, Artificial Sequence
  Description of Artificial Sequence: Synthetic oligonucleotide
ucacuguuggcgucggagu

SEQ ID NO: 2540937 - RNA, 19 nt, Artificial Sequence
  Description of Artificial Sequence: Synthetic oligonucleotide
aguuggaagagggacgcca

SEQ ID NO: 2540938 - RNA, 19 nt, Artificial Sequence
  Description of Artificial Sequence: Synthetic oligonucleotide
acgcugacgucauggcccc

SEQ ID NO: 2540939 - RNA, 19 nt, Artificial Sequence
  Description of Artificial Sequence: Synthetic oligonucleotide
uuaggugacucaguuggaa

SEQ ID NO: 2540940 - RNA, 19 nt, Artificial Sequence
  Description of Artificial Sequence: Synthetic oligonucleotide
agcugcauagucagcuccc

SEQ ID NO: 2540941 - RNA, 19 nt, Artificial Sequence
  Description of Artificial Sequence: Synthetic oligonucleotide
gacgucauggccccgcgca

SEQ ID NO: 2540942 - RNA, 19 nt, Artificial Sequence
  Description of Artificial Sequence: Synthetic oligonucleotide
cugacccucucucaugcag

SEQ ID NO: 2540943 - RNA, 19 nt, Artificial Sequence
  Description of Artificial Sequence: Synthetic oligonucleotide
aucagacggaggucagagg

SEQ ID NO: 2540944 - RNA, 19 nt, Artificial Sequence
  Description of Artificial Sequence: Synthetic oligonucleotide
gucacuguuggcgucggag

SEQ ID NO: 2540945 - RNA, 19 nt, Artificial Sequence
  Description of Artificial Sequence: Synthetic oligonucleotide
ugacccucucucaugcagu

SEQ ID NO: 2540946 - RNA, 19 nt, Artificial Sequence
  Description of Artificial Sequence: Synthetic oligonucleotide
cccuucaacauccaccagg

SEQ ID NO: 2540947 - RNA, 19 nt, Artificial Sequence
  Description of Artificial Sequence: Synthetic oligonucleotide
acuguuggcgucggagucg

SEQ ID NO: 2540948 - RNA, 19 nt, Artificial Sequence
  Description of Artificial Sequence: Synthetic oligonucleotide
agagcacugagugucacau

SEQ ID NO: 2540949 - RNA, 19 nt, Artificial Sequence
  Description of Artificial Sequence: Synthetic oligonucleotide
caccacgcgagcuggaaac

SEQ ID NO: 2540950 - RNA, 19 nt, Artificial Sequence
  Description of Artificial Sequence: Synthetic oligonucleotide
uccaucagacggaggucag

SEQ ID NO: 2540951 - RNA, 19 nt, Artificial Sequence
  Description of Artificial Sequence: Synthetic oligonucleotide
gacgccagagucuucauau

SEQ ID NO: 2540952 - RNA, 19 nt, Artificial Sequence
  Description of Artificial Sequence: Synthetic oligonucleotide
aguccgauacuggaugcag

SEQ ID NO: 2540953 - RNA, 19 nt, Artificial Sequence
  Description of Artificial Sequence: Synthetic oligonucleotide
uacuggaugcagcugcaua

SEQ ID NO: 2540954 - RNA, 19 nt, Artificial Sequence
  Description of Artificial Sequence: Synthetic oligonucleotide
gguggaacagugagggucg

SEQ ID NO: 2540955 - RNA, 19 nt, Artificial Sequence
  Description of Artificial Sequence: Synthetic oligonucleotide
uuggcgucggagucguuca

SEQ ID NO: 2540956 - RNA, 19 nt, Artificial Sequence
  Description of Artificial Sequence: Synthetic oligonucleotide
ucacggagacgcuccgccg

SEQ ID NO: 2540957 - RNA, 19 nt, Artificial Sequence
  Description of Artificial Sequence: Synthetic oligonucleotide
uucgugaaggcggcgccgg

SEQ ID NO: 2540958 - RNA, 19 nt, Artificial Sequence
  Description of Artificial Sequence: Synthetic oligonucleotide
gcaguccuugcuuagaguc

SEQ ID NO: 2540959 - RNA, 19 nt, Artificial Sequence
  Description of Artificial Sequence: Synthetic oligonucleotide
cuuuaucugagccccggca

SEQ ID NO: 2540960 - RNA, 19 nt, Artificial Sequence
  Description of Artificial Sequence: Synthetic oligonucleotide
guggaagggacgucagcag

SEQ ID NO: 2540961 - RNA, 19 nt, Artificial Sequence
  Description of Artificial Sequence: Synthetic oligonucleotide
ggaggaguuucuccuagcc

SEQ ID NO: 2540962 - RNA, 19 nt, Artificial Sequence
  Description of Artificial Sequence: Synthetic oligonucleotide
gagaguagaggagcaucag

SEQ ID NO: 2540963 - RNA, 19 nt, Artificial Sequence
  Description of Artificial Sequence: Synthetic oligonucleotide
cagcugcauagucagcucc

SEQ ID NO: 2540964 - RNA, 19 nt, Artificial Sequence
  Description of Artificial Sequence: Synthetic oligonucleotide
gucuuuaucugagccccgg

SEQ ID NO: 2540965 - RNA, 19 nt, Artificial Sequence
  Description of Artificial Sequence: Synthetic oligonucleotide
gccuucuguuucuuuaggg

SEQ ID NO: 2540966 - RNA, 19 nt, Artificial Sequence
  Description of Artificial Sequence: Synthetic oligonucleotide
gagaggaccccagauguca

SEQ ID NO: 2540967 - RNA, 19 nt, Artificial Sequence
  Description of Artificial Sequence: Synthetic oligonucleotide
gacgucagcaggagaguag

SEQ ID NO: 2540968 - RNA, 19 nt, Artificial Sequence
  Description of Artificial Sequence: Synthetic oligonucleotide
cauguuuaucgggaacaag

SEQ ID NO: 2540969 - RNA, 19 nt, Artificial Sequence
  Description of Artificial Sequence: Synthetic oligonucleotide
agucagcuccccgagcuuc

SEQ ID NO: 2540970 - RNA, 19 nt, Artificial Sequence
  Description of Artificial Sequence: Synthetic oligonucleotide
uucagggacacuggagcug

SEQ ID NO: 2540971 - RNA, 19 nt, Artificial Sequence
  Description of Artificial Sequence: Synthetic oligonucleotide
ccgagcuucgugaaggcgg

SEQ ID NO: 2540972 - RNA, 19 nt, Artificial Sequence
  Description of Artificial Sequence: Synthetic oligonucleotide
cuccucacggagacgcucc

SEQ ID NO: 2540973 - RNA, 19 nt, Artificial Sequence
  Description of Artificial Sequence: Synthetic oligonucleotide
uggaugcagcugcauaguc

SEQ ID NO: 2540974 - RNA, 19 nt, Artificial Sequence
  Description of Artificial Sequence: Synthetic oligonucleotide
ggaagaguccgauacugga

SEQ ID NO: 2540975 - RNA, 19 nt, Artificial Sequence
  Description of Artificial Sequence: Synthetic oligonucleotide
caccuccucacggagacgc

SEQ ID NO: 2540976 - RNA, 19 nt, Artificial Sequence
  Description of Artificial Sequence: Synthetic oligonucleotide
cacagguccacgguggaac

SEQ ID NO: 2540977 - RNA, 19 nt, Artificial Sequence
  Description of Artificial Sequence: Synthetic oligonucleotide
acuuuucgcuuuacagugg

SEQ ID NO: 2540978 - RNA, 19 nt, Artificial Sequence
  Description of Artificial Sequence: Synthetic oligonucleotide
uggacgcugacgucauggc

SEQ ID NO: 2540979 - RNA, 19 nt, Artificial Sequence
  Description of Artificial Sequence: Synthetic oligonucleotide
agagucccaggugauccac

SEQ ID NO: 2540980 - RNA, 19 nt, Artificial Sequence
  Description of Artificial Sequence: Synthetic oligonucleotide
uguuucuuuaggggaggac

SEQ ID NO: 2540981 - RNA, 19 nt, Artificial Sequence
  Description of Artificial Sequence: Synthetic oligonucleotide
gaagggacgucagcaggag

SEQ ID NO: 2540982 - RNA, 19 nt, Artificial Sequence
  Description of Artificial Sequence: Synthetic oligonucleotide
uggaaaccacggagagccg

SEQ ID NO: 2540983 - RNA, 19 nt, Artificial Sequence
  Description of Artificial Sequence: Synthetic oligonucleotide
uggaggaguuucuccuagc

SEQ ID NO: 2540984 - RNA, 19 nt, Artificial Sequence
  Description of Artificial Sequence: Synthetic oligonucleotide
acggaggucagagggugcg

SEQ ID NO: 2540985 - RNA, 19 nt, Artificial Sequence
  Description of Artificial Sequence: Synthetic oligonucleotide
guuggaagagggacgccag

SEQ ID NO: 2540986 - RNA, 19 nt, Artificial Sequence
  Description of Artificial Sequence: Synthetic oligonucleotide
ccaggugauccacaggucc

SEQ ID NO: 2540987 - RNA, 19 nt, Artificial Sequence
  Description of Artificial Sequence: Synthetic oligonucleotide
uucuuuaggggaggacccc

SEQ ID NO: 2540988 - RNA, 19 nt, Artificial Sequence
  Description of Artificial Sequence: Synthetic oligonucleotide
gaccccagaugucaucuuc

SEQ ID NO: 2540989 - RNA, 19 nt, Artificial Sequence
  Description of Artificial Sequence: Synthetic oligonucleotide
gaggucgagagaaggccag

SEQ ID NO: 2540990 - RNA, 19 nt, Artificial Sequence
  Description of Artificial Sequence: Synthetic oligonucleotide
uggcuuucugacccucucu

SEQ ID NO: 2540991 - RNA, 19 nt, Artificial Sequence
  Description of Artificial Sequence: Synthetic oligonucleotide
guuggaggggagaggaccc

SEQ ID NO: 2540992 - RNA, 19 nt, Artificial Sequence
  Description of Artificial Sequence: Synthetic oligonucleotide
uccucacggagacgcuccg

SEQ ID NO: 2540993 - RNA, 19 nt, Artificial Sequence
  Description of Artificial Sequence: Synthetic oligonucleotide
aggugauccacagguccac

SEQ ID NO: 2540994 - RNA, 19 nt, Artificial Sequence
  Description of Artificial Sequence: Synthetic oligonucleotide
cauagucagcuccccgagc

SEQ ID NO: 2540995 - RNA, 19 nt, Artificial Sequence
  Description of Artificial Sequence: Synthetic oligonucleotide
agcuccccgagcuucguga

SEQ ID NO: 2540996 - RNA, 19 nt, Artificial Sequence
  Description of Artificial Sequence: Synthetic oligonucleotide
cugcauagucagcuccccg

SEQ ID NO: 2540997 - RNA, 19 nt, Artificial Sequence
  Description of Artificial Sequence: Synthetic oligonucleotide
aagggacgucagcaggaga

SEQ ID NO: 2540998 - RNA, 19 nt, Artificial Sequence
  Description of Artificial Sequence: Synthetic oligonucleotide
uaucgggaacaagauggac

SEQ ID NO: 2540999 - RNA, 19 nt, Artificial Sequence
  Description of Artificial Sequence: Synthetic oligonucleotide
agacggaggucagagggug

SEQ ID NO: 2541000 - RNA, 19 nt, Artificial Sequence
  Description of Artificial Sequence: Synthetic oligonucleotide
agaggagcaucagcagagg

SEQ ID NO: 2541001 - RNA, 19 nt, Artificial Sequence
  Description of Artificial Sequence: Synthetic oligonucleotide
ggaaaccacggagagccgg

SEQ ID NO: 2541002 - RNA, 19 nt, Artificial Sequence
  Description of Artificial Sequence: Synthetic oligonucleotide
ggugacucaguuggaagag

SEQ ID NO: 2541003 - RNA, 19 nt, Artificial Sequence
  Description of Artificial Sequence: Synthetic oligonucleotide
uucgcuuuacaguggucuu

SEQ ID NO: 2541004 - RNA, 19 nt, Artificial Sequence
  Description of Artificial Sequence: Synthetic oligonucleotide
uagagucccaggugaucca

SEQ ID NO: 2541005 - RNA, 19 nt, Artificial Sequence
  Description of Artificial Sequence: Synthetic oligonucleotide
accacgcgagcuggaaacc

SEQ ID NO: 2541006 - RNA, 19 nt, Artificial Sequence
  Description of Artificial Sequence: Synthetic oligonucleotide
agcaucagcagaggucgag

SEQ ID NO: 2541007 - RNA, 19 nt, Artificial Sequence
  Description of Artificial Sequence: Synthetic oligonucleotide
agaucucuccaaccuuggu

SEQ ID NO: 2541008 - RNA, 19 nt, Artificial Sequence
  Description of Artificial Sequence: Synthetic oligonucleotide
gaggucagagggugcgggc

SEQ ID NO: 2541009 - RNA, 19 nt, Artificial Sequence
  Description of Artificial Sequence: Synthetic oligonucleotide
cacggagacgcuccgccgc

SEQ ID NO: 2541010 - RNA, 19 nt, Artificial Sequence
  Description of Artificial Sequence: Synthetic oligonucleotide
cuaccaccacgcgagcugg

SEQ ID NO: 2541011 - RNA, 19 nt, Artificial Sequence
  Description of Artificial Sequence: Synthetic oligonucleotide
uccuugcuuagagucccag

SEQ ID NO: 2541012 - RNA, 19 nt, Artificial Sequence
  Description of Artificial Sequence: Synthetic oligonucleotide
accuugguggacgcugacg

SEQ ID NO: 2541013 - RNA, 19 nt, Artificial Sequence
  Description of Artificial Sequence: Synthetic oligonucleotide
gcuccaguggcuuucugac

SEQ ID NO: 2541014 - RNA, 19 nt, Artificial Sequence
  Description of Artificial Sequence: Synthetic oligonucleotide
cgauacuggaugcagcugc

SEQ ID NO: 2541015 - RNA, 19 nt, Artificial Sequence
  Description of Artificial Sequence: Synthetic oligonucleotide
cuagcccuucaacauccac

SEQ ID NO: 2541016 - RNA, 19 nt, Artificial Sequence
  Description of Artificial Sequence: Synthetic oligonucleotide
cuccaguggcuuucugacc

SEQ ID NO: 2541017 - RNA, 19 nt, Artificial Sequence
  Description of Artificial Sequence: Synthetic oligonucleotide
agugucacaucagccuucu

SEQ ID NO: 2541018 - RNA, 19 nt, Artificial Sequence
  Description of Artificial Sequence: Synthetic oligonucleotide
acgucauggccccgcgcac

SEQ ID NO: 2541019 - RNA, 19 nt, Artificial Sequence
  Description of Artificial Sequence: Synthetic oligonucleotide
ucggagucguucagagcac

SEQ ID NO: 2541020 - RNA, 19 nt, Artificial Sequence
  Description of Artificial Sequence: Synthetic oligonucleotide
acagguccacgguggaaca

SEQ ID NO: 2541021 - RNA, 19 nt, Artificial Sequence
  Description of Artificial Sequence: Synthetic oligonucleotide
gguggaagggacgucagca

SEQ ID NO: 2541022 - RNA, 19 nt, Artificial Sequence
  Description of Artificial Sequence: Synthetic oligonucleotide
gucgagagguggaagggac

SEQ ID NO: 2541023 - RNA, 19 nt, Artificial Sequence
  Description of Artificial Sequence: Synthetic oligonucleotide
cauggccccgcgcaccucc

SEQ ID NO: 2541024 - RNA, 19 nt, Artificial Sequence
  Description of Artificial Sequence: Synthetic oligonucleotide
caguggucuuuaucugagc

SEQ ID NO: 2541025 - RNA, 19 nt, Artificial Sequence
  Description of Artificial Sequence: Synthetic oligonucleotide
acgucagcaggagaguaga

SEQ ID NO: 2541026 - RNA, 19 nt, Artificial Sequence
  Description of Artificial Sequence: Synthetic oligonucleotide
caggucacuguuggcgucg

SEQ ID NO: 2541027 - RNA, 19 nt, Artificial Sequence
  Description of Artificial Sequence: Synthetic oligonucleotide
gacccucucucaugcaguc

SEQ ID NO: 2541028 - RNA, 19 nt, Artificial Sequence
  Description of Artificial Sequence: Synthetic oligonucleotide
uugggcccuuucuuaggug

SEQ ID NO: 2541029 - RNA, 19 nt, Artificial Sequence
  Description of Artificial Sequence: Synthetic oligonucleotide
agcuucagggacacuggag

SEQ ID NO: 2541030 - RNA, 19 nt, Artificial Sequence
  Description of Artificial Sequence: Synthetic oligonucleotide
cacuguuggcgucggaguc

SEQ ID NO: 2541031 - RNA, 19 nt, Artificial Sequence
  Description of Artificial Sequence: Synthetic oligonucleotide
aggggagaggaccccagau

SEQ ID NO: 2541032 - RNA, 19 nt, Artificial Sequence
  Description of Artificial Sequence: Synthetic oligonucleotide
gcuaccaccacgcgagcug

SEQ ID NO: 2541033 - RNA, 19 nt, Artificial Sequence
  Description of Artificial Sequence: Synthetic oligonucleotide
ggggaagaguccgauacug

SEQ ID NO: 2541034 - RNA, 19 nt, Artificial Sequence
  Description of Artificial Sequence: Synthetic oligonucleotide
agaggucgagagaaggcca

SEQ ID NO: 2541035 - RNA, 19 nt, Artificial Sequence
  Description of Artificial Sequence: Synthetic oligonucleotide
cacgcgagcuggaaaccac

SEQ ID NO: 2541036 - RNA, 19 nt, Artificial Sequence
  Description of Artificial Sequence: Synthetic oligonucleotide
gccgcuaccaccacgcgag

SEQ ID NO: 2541037 - RNA, 19 nt, Artificial Sequence
  Description of Artificial Sequence: Synthetic oligonucleotide
gcgggcacauguuuaucgg

SEQ ID NO: 2541038 - RNA, 19 nt, Artificial Sequence
  Description of Artificial Sequence: Synthetic oligonucleotide
cuccuagcccuucaacauc

SEQ ID NO: 2541039 - RNA, 19 nt, Artificial Sequence
  Description of Artificial Sequence: Synthetic oligonucleotide
acauguuuaucgggaacaa

SEQ ID NO: 2541040 - RNA, 19 nt, Artificial Sequence
  Description of Artificial Sequence: Synthetic oligonucleotide
ccuuucuuaggugacucag

SEQ ID NO: 2541041 - RNA, 19 nt, Artificial Sequence
  Description of Artificial Sequence: Synthetic oligonucleotide
guuggcgucggagucguuc

SEQ ID NO: 2541042 - RNA, 19 nt, Artificial Sequence
  Description of Artificial Sequence: Synthetic oligonucleotide
gcauagucagcuccccgag

SEQ ID NO: 2541043 - RNA, 19 nt, Artificial Sequence
  Description of Artificial Sequence: Synthetic oligonucleotide
acgcuccgccgcuaccacc

SEQ ID NO: 2541044 - RNA, 19 nt, Artificial Sequence
  Description of Artificial Sequence: Synthetic oligonucleotide
cuucgugaaggcggcgccg

SEQ ID NO: 2541045 - RNA, 19 nt, Artificial Sequence
  Description of Artificial Sequence: Synthetic oligonucleotide
gagggucgagagguggaag

SEQ ID NO: 2541046 - RNA, 19 nt, Artificial Sequence
  Description of Artificial Sequence: Synthetic oligonucleotide
ugacgucauggccccgcgc

SEQ ID NO: 2541047 - RNA, 19 nt, Artificial Sequence
  Description of Artificial Sequence: Synthetic oligonucleotide
caggugauccacaggucca

SEQ ID NO: 2541048 - RNA, 19 nt, Artificial Sequence
  Description of Artificial Sequence: Synthetic oligonucleotide
gggaagaguccgauacugg

SEQ ID NO: 2541049 - RNA, 19 nt, Artificial Sequence
  Description of Artificial Sequence: Synthetic oligonucleotide
gggaacaagauggacagcu

SEQ ID NO: 2541050 - RNA, 19 nt, Artificial Sequence
  Description of Artificial Sequence: Synthetic oligonucleotide
cugacgucauggccccgcg

SEQ ID NO: 2541051 - RNA, 19 nt, Artificial Sequence
  Description of Artificial Sequence: Synthetic oligonucleotide
ccuugcuuagagucccagg

SEQ ID NO: 2541052 - RNA, 19 nt, Artificial Sequence
  Description of Artificial Sequence: Synthetic oligonucleotide
uggaacagugagggucgag

SEQ ID NO: 2541053 - RNA, 19 nt, Artificial Sequence
  Description of Artificial Sequence: Synthetic oligonucleotide
cuuaggugacucaguugga

SEQ ID NO: 2541054 - RNA, 19 nt, Artificial Sequence
  Description of Artificial Sequence: Synthetic oligonucleotide
ggagaguagaggagcauca

SEQ ID NO: 2541055 - RNA, 19 nt, Artificial Sequence
  Description of Artificial Sequence: Synthetic oligonucleotide
ggaggucagagggugcggg

SEQ ID NO: 2541056 - RNA, 19 nt, Artificial Sequence
  Description of Artificial Sequence: Synthetic oligonucleotide
gcagagaagaucucuccaa

SEQ ID NO: 2541057 - RNA, 19 nt, Artificial Sequence
  Description of Artificial Sequence: Synthetic oligonucleotide
cuugguggacgcugacguc

SEQ ID NO: 2541058 - RNA, 19 nt, Artificial Sequence
  Description of Artificial Sequence: Synthetic oligonucleotide
agagggacgccagagucuu

SEQ ID NO: 2541059 - RNA, 19 nt, Artificial Sequence
  Description of Artificial Sequence: Synthetic oligonucleotide
ugagggucgagagguggaa

SEQ ID NO: 2541060 - RNA, 19 nt, Artificial Sequence
  Description of Artificial Sequence: Synthetic oligonucleotide
acgcgagcuggaaaccacg

SEQ ID NO: 2541061 - RNA, 19 nt, Artificial Sequence
  Description of Artificial Sequence: Synthetic oligonucleotide
ggacgcugacgucauggcc

SEQ ID NO: 2541062 - RNA, 19 nt, Artificial Sequence
  Description of Artificial Sequence: Synthetic oligonucleotide
guccgauacuggaugcagc

SEQ ID NO: 2541063 - RNA, 19 nt, Artificial Sequence
  Description of Artificial Sequence: Synthetic oligonucleotide
gcgucggagucguucagag

SEQ ID NO: 2541064 - RNA, 19 nt, Artificial Sequence
  Description of Artificial Sequence: Synthetic oligonucleotide
gggagaggaccccagaugu

SEQ ID NO: 2541065 - RNA, 19 nt, Artificial Sequence
  Description of Artificial Sequence: Synthetic oligonucleotide
cuuucuuaggugacucagu

SEQ ID NO: 2541066 - RNA, 19 nt, Artificial Sequence
  Description of Artificial Sequence: Synthetic oligonucleotide
uggcgucggagucguucag

SEQ ID NO: 2541067 - RNA, 19 nt, Artificial Sequence
  Description of Artificial Sequence: Synthetic oligonucleotide
gcacauguuuaucgggaac

SEQ ID NO: 2541068 - RNA, 19 nt, Artificial Sequence
  Description of Artificial Sequence: Synthetic oligonucleotide
gagugucacaucagccuuc

SEQ ID NO: 2541069 - RNA, 19 nt, Artificial Sequence
  Description of Artificial Sequence: Synthetic oligonucleotide
cucucucaugcaguccuug

SEQ ID NO: 2541070 - RNA, 19 nt, Artificial Sequence
  Description of Artificial Sequence: Synthetic oligonucleotide
agguccacgguggaacagu

SEQ ID NO: 2541071 - RNA, 19 nt, Artificial Sequence
  Description of Artificial Sequence: Synthetic oligonucleotide
uggacagcuccaguggcuu

SEQ ID NO: 2541072 - RNA, 19 nt, Artificial Sequence
  Description of Artificial Sequence: Synthetic oligonucleotide
agacgcuccgccgcuacca

SEQ ID NO: 2541073 - RNA, 19 nt, Artificial Sequence
  Description of Artificial Sequence: Synthetic oligonucleotide
gucagcuccccgagcuucg

SEQ ID NO: 2541074 - RNA, 19 nt, Artificial Sequence
  Description of Artificial Sequence: Synthetic oligonucleotide
cucaugcaguccuugcuua

SEQ ID NO: 2541075 - RNA, 19 nt, Artificial Sequence
  Description of Artificial Sequence: Synthetic oligonucleotide
gaggaccccagaugucauc

SEQ ID NO: 2541076 - RNA, 19 nt, Artificial Sequence
  Description of Artificial Sequence: Synthetic oligonucleotide
aggucagagggugcgggca

SEQ ID NO: 2541077 - RNA, 19 nt, Artificial Sequence
  Description of Artificial Sequence: Synthetic oligonucleotide
gaagaguccgauacuggau

SEQ ID NO: 2541078 - RNA, 19 nt, Artificial Sequence
  Description of Artificial Sequence: Synthetic oligonucleotide
gcaguuggaggggagagga

SEQ ID NO: 2541079 - RNA, 19 nt, Artificial Sequence
  Description of Artificial Sequence: Synthetic oligonucleotide
guuucuccuagcccuucaa

SEQ ID NO: 2541080 - RNA, 19 nt, Artificial Sequence
  Description of Artificial Sequence: Synthetic oligonucleotide
ugucaucuucuugggcccu

SEQ ID NO: 2541081 - RNA, 19 nt, Artificial Sequence
  Description of Artificial Sequence: Synthetic oligonucleotide
gaggagcaucagcagaggu

SEQ ID NO: 2541082 - RNA, 19 nt, Artificial Sequence
  Description of Artificial Sequence: Synthetic oligonucleotide
ugguggacgcugacgucau

SEQ ID NO: 2541083 - RNA, 19 nt, Artificial Sequence
  Description of Artificial Sequence: Synthetic oligonucleotide
gagacgcuccgccgcuacc

SEQ ID NO: 2541084 - RNA, 19 nt, Artificial Sequence
  Description of Artificial Sequence: Synthetic oligonucleotide
gggucgagagguggaaggg

SEQ ID NO: 2541085 - RNA, 19 nt, Artificial Sequence
  Description of Artificial Sequence: Synthetic oligonucleotide
gcagaggucgagagaaggc

SEQ ID NO: 2541086 - RNA, 19 nt, Artificial Sequence
  Description of Artificial Sequence: Synthetic oligonucleotide
accccagaugucaucuucu

SEQ ID NO: 2541087 - RNA, 19 nt, Artificial Sequence
  Description of Artificial Sequence: Synthetic oligonucleotide
ucgcuuuacaguggucuuu

SEQ ID NO: 2541088 - RNA, 19 nt, Artificial Sequence
  Description of Artificial Sequence: Synthetic oligonucleotide
cagcagaggucgagagaag

SEQ ID NO: 2541089 - RNA, 19 nt, Artificial Sequence
  Description of Artificial Sequence: Synthetic oligonucleotide
ccgcagagaagaucucucc

SEQ ID NO: 2541090 - RNA, 19 nt, Artificial Sequence
  Description of Artificial Sequence: Synthetic oligonucleotide
gaguccgauacuggaugca

SEQ ID NO: 2541091 - RNA, 19 nt, Artificial Sequence
  Description of Artificial Sequence: Synthetic oligonucleotide
gagcacugagugucacauc

SEQ ID NO: 2541092 - RNA, 19 nt, Artificial Sequence
  Description of Artificial Sequence: Synthetic oligonucleotide
cuucaacauccaccagguc

SEQ ID NO: 2541093 - RNA, 19 nt, Artificial Sequence
  Description of Artificial Sequence: Synthetic oligonucleotide
gcuucgugaaggcggcgcc

SEQ ID NO: 2541094 - RNA, 19 nt, Artificial Sequence
  Description of Artificial Sequence: Synthetic oligonucleotide
ucgugaaggcggcgccggc

SEQ ID NO: 2541095 - RNA, 19 nt, Artificial Sequence
  Description of Artificial Sequence: Synthetic oligonucleotide
caaccuugguggacgcuga

SEQ ID NO: 2541096 - RNA, 19 nt, Artificial Sequence
  Description of Artificial Sequence: Synthetic oligonucleotide
ggugauccacagguccacg

SEQ ID NO: 2541097 - RNA, 19 nt, Artificial Sequence
  Description of Artificial Sequence: Synthetic oligonucleotide
aucugagccccggcagggg

SEQ ID NO: 2541098 - RNA, 19 nt, Artificial Sequence
  Description of Artificial Sequence: Synthetic oligonucleotide
cuucagggacacuggagcu

SEQ ID NO: 2541099 - RNA, 19 nt, Artificial Sequence
  Description of Artificial Sequence: Synthetic oligonucleotide
gacggaggucagagggugc

SEQ ID NO: 2541100 - RNA, 19 nt, Artificial Sequence
  Description of Artificial Sequence: Synthetic oligonucleotide
ccacgguggaacagugagg

SEQ ID NO: 2541101 - RNA, 19 nt, Artificial Sequence
  Description of Artificial Sequence: Synthetic oligonucleotide
gacgcuccgccgcuaccac

SEQ ID NO: 2541102 - RNA, 19 nt, Artificial Sequence
  Description of Artificial Sequence: Synthetic oligonucleotide
ccaaccuugguggacgcug

SEQ ID NO: 2541103 - RNA, 19 nt, Artificial Sequence
  Description of Artificial Sequence: Synthetic oligonucleotide
acggagacgcuccgccgcu

SEQ ID NO: 2541104 - RNA, 19 nt, Artificial Sequence
  Description of Artificial Sequence: Synthetic oligonucleotide
agggugcgggcacauguuu

SEQ ID NO: 2541105 - RNA, 19 nt, Artificial Sequence
  Description of Artificial Sequence: Synthetic oligonucleotide
ggcaguuggaggggagagg

SEQ ID NO: 2541106 - RNA, 19 nt, Artificial Sequence
  Description of Artificial Sequence: Synthetic oligonucleotide
ggaagggacgucagcagga

SEQ ID NO: 2541107 - RNA, 19 nt, Artificial Sequence
  Description of Artificial Sequence: Synthetic oligonucleotide
aggucacuguuggcgucgg

SEQ ID NO: 2541108 - RNA, 19 nt, Artificial Sequence
  Description of Artificial Sequence: Synthetic oligonucleotide
cuccgccgcuaccaccacg

SEQ ID NO: 2541109 - RNA, 19 nt, Artificial Sequence
  Description of Artificial Sequence: Synthetic oligonucleotide
ggcacauguuuaucgggaa

SEQ ID NO: 2541110 - RNA, 19 nt, Artificial Sequence
  Description of Artificial Sequence: Synthetic oligonucleotide
gggcacauguuuaucggga

SEQ ID NO: 2541111 - RNA, 19 nt, Artificial Sequence
  Description of Artificial Sequence: Synthetic oligonucleotide
cucucaugcaguccuugcu

SEQ ID NO: 2541112 - RNA, 19 nt, Artificial Sequence
  Description of Artificial Sequence: Synthetic oligonucleotide
gacacuggagcugcugggu

SEQ ID NO: 2541113 - RNA, 19 nt, Artificial Sequence
  Description of Artificial Sequence: Synthetic oligonucleotide
gcuuucugacccucucuca

SEQ ID NO: 2541114 - RNA, 19 nt, Artificial Sequence
  Description of Artificial Sequence: Synthetic oligonucleotide
cuugggcccuuucuuaggu

SEQ ID NO: 2541115 - RNA, 19 nt, Artificial Sequence
  Description of Artificial Sequence: Synthetic oligonucleotide
acgguggaacagugagggu

SEQ ID NO: 2541116 - RNA, 19 nt, Artificial Sequence
  Description of Artificial Sequence: Synthetic oligonucleotide
ggucuuuaucugagccccg

SEQ ID NO: 2541117 - RNA, 19 nt, Artificial Sequence
  Description of Artificial Sequence: Synthetic oligonucleotide
gagcuucgugaaggcggcg

SEQ ID NO: 2541118 - RNA, 19 nt, Artificial Sequence
  Description of Artificial Sequence: Synthetic oligonucleotide
gucgagagaaggccagagu

SEQ ID NO: 2541119 - RNA, 19 nt, Artificial Sequence
  Description of Artificial Sequence: Synthetic oligonucleotide
gggcaguuggaggggagag

SEQ ID NO: 2541120 - RNA, 19 nt, Artificial Sequence
  Description of Artificial Sequence: Synthetic oligonucleotide
cagugagggucgagaggug

SEQ ID NO: 2541121 - RNA, 19 nt, Artificial Sequence
  Description of Artificial Sequence: Synthetic oligonucleotide
ggaacaagauggacagcuc

SEQ ID NO: 2541122 - RNA, 19 nt, Artificial Sequence
  Description of Artificial Sequence: Synthetic oligonucleotide
ggucagagggugcgggcac

SEQ ID NO: 2541123 - RNA, 19 nt, Artificial Sequence
  Description of Artificial Sequence: Synthetic oligonucleotide
gcuggaaaccacggagagc

SEQ ID NO: 2541124 - RNA, 19 nt, Artificial Sequence
  Description of Artificial Sequence: Synthetic oligonucleotide
ucagagggugcgggcacau

SEQ ID NO: 2541125 - RNA, 19 nt, Artificial Sequence
  Description of Artificial Sequence: Synthetic oligonucleotide
cgggcacauguuuaucggg

SEQ ID NO: 2541126 - RNA, 19 nt, Artificial Sequence
  Description of Artificial Sequence: Synthetic oligonucleotide
ccuucaacauccaccaggu

SEQ ID NO: 2541127 - RNA, 19 nt, Artificial Sequence
  Description of Artificial Sequence: Synthetic oligonucleotide
acgccagagucuucauaua

SEQ ID NO: 2541128 - RNA, 19 nt, Artificial Sequence
  Description of Artificial Sequence: Synthetic oligonucleotide
cagguccacgguggaacag

SEQ ID NO: 2541129 - RNA, 19 nt, Artificial Sequence
  Description of Artificial Sequence: Synthetic oligonucleotide
gugagggucgagaggugga

SEQ ID NO: 2541130 - RNA, 19 nt, Artificial Sequence
  Description of Artificial Sequence: Synthetic oligonucleotide
ccggcaggggaagaguccg

SEQ ID NO: 2541131 - RNA, 19 nt, Artificial Sequence
  Description of Artificial Sequence: Synthetic oligonucleotide
gagagguggaagggacguc

SEQ ID NO: 2541132 - RNA, 19 nt, Artificial Sequence
  Description of Artificial Sequence: Synthetic oligonucleotide
cgagcuucgugaaggcggc

SEQ ID NO: 2541133 - RNA, 19 nt, Artificial Sequence
  Description of Artificial Sequence: Synthetic oligonucleotide
auacuggaugcagcugcau

SEQ ID NO: 2541134 - RNA, 19 nt, Artificial Sequence
  Description of Artificial Sequence: Synthetic oligonucleotide
ggagucguucagagcacug

SEQ ID NO: 2541135 - RNA, 19 nt, Artificial Sequence
  Description of Artificial Sequence: Synthetic oligonucleotide
gcugcauagucagcucccc

SEQ ID NO: 2541136 - RNA, 19 nt, Artificial Sequence
  Description of Artificial Sequence: Synthetic oligonucleotide
caguuggaagagggacgcc

SEQ ID NO: 2541137 - RNA, 19 nt, Artificial Sequence
  Description of Artificial Sequence: Synthetic oligonucleotide
cgguggaacagugaggguc

SEQ ID NO: 2541138 - RNA, 19 nt, Artificial Sequence
  Description of Artificial Sequence: Synthetic oligonucleotide
gcugacgucauggccccgc

SEQ ID NO: 2541139 - RNA, 19 nt, Artificial Sequence
  Description of Artificial Sequence: Synthetic oligonucleotide
agccccggcaggggaagag

SEQ ID NO: 2541140 - RNA, 19 nt, Artificial Sequence
  Description of Artificial Sequence: Synthetic oligonucleotide
gguccacgguggaacagug

SEQ ID NO: 2541141 - RNA, 19 nt, Artificial Sequence
  Description of Artificial Sequence: Synthetic oligonucleotide
gcagcugcauagucagcuc

SEQ ID NO: 2541142 - RNA, 19 nt, Artificial Sequence
  Description of Artificial Sequence: Synthetic oligonucleotide
agaggaccccagaugucau

SEQ ID NO: 2541143 - RNA, 19 nt, Artificial Sequence
  Description of Artificial Sequence: Synthetic oligonucleotide
cgcgagcuggaaaccacgg

SEQ ID NO: 2541144 - RNA, 19 nt, Artificial Sequence
  Description of Artificial Sequence: Synthetic oligonucleotide
cuguuucuuuaggggagga

SEQ ID NO: 2541145 - RNA, 19 nt, Artificial Sequence
  Description of Artificial Sequence: Synthetic oligonucleotide
ucagcuccccgagcuucgu

SEQ ID NO: 2541146 - RNA, 19 nt, Artificial Sequence
  Description of Artificial Sequence: Synthetic oligonucleotide
ggagacgcuccgccgcuac

SEQ ID NO: 2541147 - RNA, 19 nt, Artificial Sequence
  Description of Artificial Sequence: Synthetic oligonucleotide
ggcggcgccggccgcagag

SEQ ID NO: 2541148 - RNA, 19 nt, Artificial Sequence
  Description of Artificial Sequence: Synthetic oligonucleotide
gcacugagugucacaucag

SEQ ID NO: 2541149 - RNA, 19 nt, Artificial Sequence
  Description of Artificial Sequence: Synthetic oligonucleotide
gcaggagaguagaggagca

SEQ ID NO: 2541150 - RNA, 19 nt, Artificial Sequence
  Description of Artificial Sequence: Synthetic oligonucleotide
ccuugguggacgcugacgu

SEQ ID NO: 2541151 - RNA, 19 nt, Artificial Sequence
  Description of Artificial Sequence: Synthetic oligonucleotide
ggucgagagguggaaggga

SEQ ID NO: 2541152 - RNA, 19 nt, Artificial Sequence
  Description of Artificial Sequence: Synthetic oligonucleotide
cccggcaggggaagagucc

SEQ ID NO: 2541153 - RNA, 19 nt, Artificial Sequence
  Description of Artificial Sequence: Synthetic oligonucleotide
cccgcgcaccuccucacgg

SEQ ID NO: 2541154 - RNA, 19 nt, Artificial Sequence
  Description of Artificial Sequence: Synthetic oligonucleotide
gccgcagagaagaucucuc

SEQ ID NO: 2541155 - RNA, 19 nt, Artificial Sequence
  Description of Artificial Sequence: Synthetic oligonucleotide
gugucacaucagccuucug

SEQ ID NO: 2541156 - RNA, 19 nt, Artificial Sequence
  Description of Artificial Sequence: Synthetic oligonucleotide
cagagucuucauauacuuu

SEQ ID NO: 2541157 - RNA, 19 nt, Artificial Sequence
  Description of Artificial Sequence: Synthetic oligonucleotide
caguggcuuucugacccuc

SEQ ID NO: 2541158 - RNA, 19 nt, Artificial Sequence
  Description of Artificial Sequence: Synthetic oligonucleotide
gcccuuucuuaggugacuc

SEQ ID NO: 2541159 - RNA, 19 nt, Artificial Sequence
  Description of Artificial Sequence: Synthetic oligonucleotide
cagacggaggucagagggu

SEQ ID NO: 2541160 - RNA, 19 nt, Artificial Sequence
  Description of Artificial Sequence: Synthetic oligonucleotide
gcgagcuggaaaccacgga

SEQ ID NO: 2541161 - RNA, 19 nt, Artificial Sequence
  Description of Artificial Sequence: Synthetic oligonucleotide
cagcuccccgagcuucgug

SEQ ID NO: 2541162 - RNA, 19 nt, Artificial Sequence
  Description of Artificial Sequence: Synthetic oligonucleotide
ccggccgcagagaagaucu

SEQ ID NO: 2541163 - RNA, 19 nt, Artificial Sequence
  Description of Artificial Sequence: Synthetic oligonucleotide
ggugcgggcacauguuuau

SEQ ID NO: 2541164 - RNA, 19 nt, Artificial Sequence
  Description of Artificial Sequence: Synthetic oligonucleotide
cugagccccggcaggggaa

SEQ ID NO: 2541165 - RNA, 19 nt, Artificial Sequence
  Description of Artificial Sequence: Synthetic oligonucleotide
gcgccggccgcagagaaga

SEQ ID NO: 2541166 - RNA, 19 nt, Artificial Sequence
  Description of Artificial Sequence: Synthetic oligonucleotide
cacggagagccgggcggcc

SEQ ID NO: 2541167 - RNA, 19 nt, Artificial Sequence
  Description of Artificial Sequence: Synthetic oligonucleotide
gccagaguccagggucagg

SEQ ID NO: 2541168 - RNA, 19 nt, Artificial Sequence
  Description of Artificial Sequence: Synthetic oligonucleotide
guccacgguggaacaguga

SEQ ID NO: 2541169 - RNA, 19 nt, Artificial Sequence
  Description of Artificial Sequence: Synthetic oligonucleotide
gggucaggcuguccugguc

SEQ ID NO: 2541170 - RNA, 19 nt, Artificial Sequence
  Description of Artificial Sequence: Synthetic oligonucleotide
gugcgggcacauguuuauc

SEQ ID NO: 2541171 - RNA, 19 nt, Artificial Sequence
  Description of Artificial Sequence: Synthetic oligonucleotide
cgucagcaggagaguagag

SEQ ID NO: 2541172 - RNA, 19 nt, Artificial Sequence
  Description of Artificial Sequence: Synthetic oligonucleotide
cagagggugcgggcacaug

SEQ ID NO: 2541173 - RNA, 19 nt, Artificial Sequence
  Description of Artificial Sequence: Synthetic oligonucleotide
gguggacgcugacgucaug

SEQ ID NO: 2541174 - RNA, 19 nt, Artificial Sequence
  Description of Artificial Sequence: Synthetic oligonucleotide
cgucggagucguucagagc

SEQ ID NO: 2541175 - RNA, 19 nt, Artificial Sequence
  Description of Artificial Sequence: Synthetic oligonucleotide
ccgauacuggaugcagcug

SEQ ID NO: 2541176 - RNA, 19 nt, Artificial Sequence
  Description of Artificial Sequence: Synthetic oligonucleotide
cagaguccagggucaggcu

SEQ ID NO: 2541177 - RNA, 19 nt, Artificial Sequence
  Description of Artificial Sequence: Synthetic oligonucleotide
cccuuucuuaggugacuca

SEQ ID NO: 2541178 - RNA, 19 nt, Artificial Sequence
  Description of Artificial Sequence: Synthetic oligonucleotide
ggggcaguuggaggggaga

SEQ ID NO: 2541179 - RNA, 19 nt, Artificial Sequence
  Description of Artificial Sequence: Synthetic oligonucleotide
uggccccgcgcaccuccuc

SEQ ID NO: 2541180 - RNA, 19 nt, Artificial Sequence
  Description of Artificial Sequence: Synthetic oligonucleotide
ggcgucggagucguucaga

SEQ ID NO: 2541181 - RNA, 19 nt, Artificial Sequence
  Description of Artificial Sequence: Synthetic oligonucleotide
ggccagaguccagggucag

SEQ ID NO: 2541182 - RNA, 19 nt, Artificial Sequence
  Description of Artificial Sequence: Synthetic oligonucleotide
accuccucacggagacgcu

SEQ ID NO: 2541183 - RNA, 19 nt, Artificial Sequence
  Description of Artificial Sequence: Synthetic oligonucleotide
guccuugcuuagaguccca

SEQ ID NO: 2541184 - RNA, 19 nt, Artificial Sequence
  Description of Artificial Sequence: Synthetic oligonucleotide
ggccccgcgcaccuccuca

SEQ ID NO: 2541185 - RNA, 19 nt, Artificial Sequence
  Description of Artificial Sequence: Synthetic oligonucleotide
uguuggcgucggagucguu

SEQ ID NO: 2541186 - RNA, 19 nt, Artificial Sequence
  Description of Artificial Sequence: Synthetic oligonucleotide
gagggugcgggcacauguu

SEQ ID NO: 2541187 - RNA, 19 nt, Artificial Sequence
  Description of Artificial Sequence: Synthetic oligonucleotide
ggccgcagagaagaucucu

SEQ ID NO: 2541188 - RNA, 19 nt, Artificial Sequence
  Description of Artificial Sequence: Synthetic oligonucleotide
cgcuccgccgcuaccacca

SEQ ID NO: 2541189 - RNA, 19 nt, Artificial Sequence
  Description of Artificial Sequence: Synthetic oligonucleotide
gcuccccgagcuucgugaa

SEQ ID NO: 2541190 - RNA, 19 nt, Artificial Sequence
  Description of Artificial Sequence: Synthetic oligonucleotide
ccucacggagacgcuccgc

SEQ ID NO: 2541191 - RNA, 19 nt, Artificial Sequence
  Description of Artificial Sequence: Synthetic oligonucleotide
gggugcgggcacauguuua

SEQ ID NO: 2541192 - RNA, 19 nt, Artificial Sequence
  Description of Artificial Sequence: Synthetic oligonucleotide
ggcgccggccgcagagaag

SEQ ID NO: 2541193 - RNA, 19 nt, Artificial Sequence
  Description of Artificial Sequence: Synthetic oligonucleotide
ccccgcgcaccuccucacg

SEQ ID NO: 2541194 - RNA, 19 nt, Artificial Sequence
  Description of Artificial Sequence: Synthetic oligonucleotide
ccuggucaaaguugaguuu

SEQ ID NO: 2541195 - RNA, 19 nt, Artificial Sequence
  Description of Artificial Sequence: Synthetic oligonucleotide
ccuagcccuucaacaucca

SEQ ID NO: 2541196 - RNA, 19 nt, Artificial Sequence
  Description of Artificial Sequence: Synthetic oligonucleotide
caggagaguagaggagcau

SEQ ID NO: 2541197 - RNA, 19 nt, Artificial Sequence
  Description of Artificial Sequence: Synthetic oligonucleotide
gccggccgcagagaagauc

SEQ ID NO: 2541198 - RNA, 19 nt, Artificial Sequence
  Description of Artificial Sequence: Synthetic oligonucleotide
auggccccgcgcaccuccu

SEQ ID NO: 2541199 - RNA, 19 nt, Artificial Sequence
  Description of Artificial Sequence: Synthetic oligonucleotide
ccacgcgagcuggaaacca

SEQ ID NO: 2541200 - RNA, 19 nt, Artificial Sequence
  Description of Artificial Sequence: Synthetic oligonucleotide
gccccgcgcaccuccucac

SEQ ID NO: 2541201 - RNA, 19 nt, Artificial Sequence
  Description of Artificial Sequence: Synthetic oligonucleotide
cguucagagcacugagugu

SEQ ID NO: 2541202 - RNA, 19 nt, Artificial Sequence
  Description of Artificial Sequence: Synthetic oligonucleotide
agccgggcggccggccgcu

SEQ ID NO: 2541203 - RNA, 19 nt, Artificial Sequence
  Description of Artificial Sequence: Synthetic oligonucleotide
gcuuuacaguggucuuuau

SEQ ID NO: 2541204 - RNA, 19 nt, Artificial Sequence
  Description of Artificial Sequence: Synthetic oligonucleotide
gggacgucagcaggagagu

SEQ ID NO: 2541205 - RNA, 19 nt, Artificial Sequence
  Description of Artificial Sequence: Synthetic oligonucleotide
ccaucagacggaggucaga

SEQ ID NO: 2541206 - RNA, 19 nt, Artificial Sequence
  Description of Artificial Sequence: Synthetic oligonucleotide
ccgccgcuaccaccacgcg

SEQ ID NO: 2541207 - RNA, 19 nt, Artificial Sequence
  Description of Artificial Sequence: Synthetic oligonucleotide
cgcuuuacaguggucuuua

SEQ ID NO: 2541208 - RNA, 19 nt, Artificial Sequence
  Description of Artificial Sequence: Synthetic oligonucleotide
ccaccacgcgagcuggaaa

SEQ ID NO: 2541209 - RNA, 19 nt, Artificial Sequence
  Description of Artificial Sequence: Synthetic oligonucleotide
cgggaacaagauggacagc

SEQ ID NO: 2541210 - RNA, 19 nt, Artificial Sequence
  Description of Artificial Sequence: Synthetic oligonucleotide
caacauccaccaggucacu

SEQ ID NO: 2541211 - RNA, 19 nt, Artificial Sequence
  Description of Artificial Sequence: Synthetic oligonucleotide
ccgcuaccaccacgcgagc

SEQ ID NO: 2541212 - RNA, 19 nt, Artificial Sequence
  Description of Artificial Sequence: Synthetic oligonucleotide
ccgcgcaccuccucacgga

SEQ ID NO: 2541213 - RNA, 19 nt, Artificial Sequence
  Description of Artificial Sequence: Synthetic oligonucleotide
cgccgcuaccaccacgcga

SEQ ID NO: 2541214 - RNA, 19 nt, Artificial Sequence
  Description of Artificial Sequence: Synthetic oligonucleotide
ggaccccagaugucaucuu

SEQ ID NO: 2541215 - RNA, 19 nt, Artificial Sequence
  Description of Artificial Sequence: Synthetic oligonucleotide
ccaguggcuuucugacccu

SEQ ID NO: 2541216 - RNA, 19 nt, Artificial Sequence
  Description of Artificial Sequence: Synthetic oligonucleotide
gccccggcaggggaagagu

SEQ ID NO: 2541217 - RNA, 19 nt, Artificial Sequence
  Description of Artificial Sequence: Synthetic oligonucleotide
gcggcgccggccgcagaga

SEQ ID NO: 2541218 - RNA, 19 nt, Artificial Sequence
  Description of Artificial Sequence: Synthetic oligonucleotide
cgcugacgucauggccccg

SEQ ID NO: 2541219 - RNA, 19 nt, Artificial Sequence
  Description of Artificial Sequence: Synthetic oligonucleotide
cggagucguucagagcacu

SEQ ID NO: 2541220 - RNA, 19 nt, Artificial Sequence
  Description of Artificial Sequence: Synthetic oligonucleotide
cgcuaccaccacgcgagcu

SEQ ID NO: 2541221 - RNA, 19 nt, Artificial Sequence
  Description of Artificial Sequence: Synthetic oligonucleotide
cggcgccggccgcagagaa

SEQ ID NO: 2541222 - RNA, 19 nt, Artificial Sequence
  Description of Artificial Sequence: Synthetic oligonucleotide
gccgggcggccggccgcuc

SEQ ID NO: 2541223 - RNA, 19 nt, Artificial Sequence
  Description of Artificial Sequence: Synthetic oligonucleotide
cgccggccgcagagaagau

SEQ ID NO: 2541224 - RNA, 19 nt, Artificial Sequence
  Description of Artificial Sequence: Synthetic oligonucleotide
uuauugaucacguaggucc

SEQ ID NO: 2541225 - RNA, 19 nt, Artificial Sequence
  Description of Artificial Sequence: Synthetic oligonucleotide
gauguucagaaucugaucg

SEQ ID NO: 2541226 - RNA, 19 nt, Artificial Sequence
  Description of Artificial Sequence: Synthetic oligonucleotide
agcauuuuggucuuuaagg

SEQ ID NO: 2541227 - RNA, 19 nt, Artificial Sequence
  Description of Artificial Sequence: Synthetic oligonucleotide
uguuuauugaucacguagg

SEQ ID NO: 2541228 - RNA, 19 nt, Artificial Sequence
  Description of Artificial Sequence: Synthetic oligonucleotide
aaaggagacaucguagucc

SEQ ID NO: 2541229 - RNA, 19 nt, Artificial Sequence
  Description of Artificial Sequence: Synthetic oligonucleotide
aaccagauuugcuuguucg

SEQ ID NO: 2541230 - RNA, 19 nt, Artificial Sequence
  Description of Artificial Sequence: Synthetic oligonucleotide
uuuaaugguuagcacgccg

SEQ ID NO: 2541231 - RNA, 19 nt, Artificial Sequence
  Description of Artificial Sequence: Synthetic oligonucleotide
caguuuaaugguuagcacg

SEQ ID NO: 2541232 - RNA, 19 nt, Artificial Sequence
  Description of Artificial Sequence: Synthetic oligonucleotide
aguuuaaugguuagcacgc

SEQ ID NO: 2541233 - RNA, 19 nt, Artificial Sequence
  Description of Artificial Sequence: Synthetic oligonucleotide
aagauaaccagauuugcuu

SEQ ID NO: 2541234 - RNA, 19 nt, Artificial Sequence
  Description of Artificial Sequence: Synthetic oligonucleotide
uaagcugucucaucuagag

SEQ ID NO: 2541235 - RNA, 19 nt, Artificial Sequence
  Description of Artificial Sequence: Synthetic oligonucleotide
agguaguggagauucaaac

SEQ ID NO: 2541236 - RNA, 19 nt, Artificial Sequence
  Description of Artificial Sequence: Synthetic oligonucleotide
cuguuuauugaucacguag

SEQ ID NO: 2541237 - RNA, 19 nt, Artificial Sequence
  Description of Artificial Sequence: Synthetic oligonucleotide
aaucugaucgagguagugg

SEQ ID NO: 2541238 - RNA, 19 nt, Artificial Sequence
  Description of Artificial Sequence: Synthetic oligonucleotide
uuaaugguuagcacgccgc

SEQ ID NO: 2541239 - RNA, 19 nt, Artificial Sequence
  Description of Artificial Sequence: Synthetic oligonucleotide
uucagaaucugaucgaggu

SEQ ID NO: 2541240 - RNA, 19 nt, Artificial Sequence
  Description of Artificial Sequence: Synthetic oligonucleotide
agaagauaaccagauuugc

SEQ ID NO: 2541241 - RNA, 19 nt, Artificial Sequence
  Description of Artificial Sequence: Synthetic oligonucleotide
ucccgguccagucauagcg

SEQ ID NO: 2541242 - RNA, 19 nt, Artificial Sequence
  Description of Artificial Sequence: Synthetic oligonucleotide
uggagauucaaacucgacu

SEQ ID NO: 2541243 - RNA, 19 nt, Artificial Sequence
  Description of Artificial Sequence: Synthetic oligonucleotide
ugggaguacacccaguucu

SEQ ID NO: 2541244 - RNA, 19 nt, Artificial Sequence
  Description of Artificial Sequence: Synthetic oligonucleotide
uuugauguucagaaucuga

SEQ ID NO: 2541245 - RNA, 19 nt, Artificial Sequence
  Description of Artificial Sequence: Synthetic oligonucleotide
ucuuuaaggcugcagucag

SEQ ID NO: 2541246 - RNA, 19 nt, Artificial Sequence
  Description of Artificial Sequence: Synthetic oligonucleotide
auucaaacucgacuggcgg

SEQ ID NO: 2541247 - RNA, 19 nt, Artificial Sequence
  Description of Artificial Sequence: Synthetic oligonucleotide
aguacacccaguucuuccc

SEQ ID NO: 2541248 - RNA, 19 nt, Artificial Sequence
  Description of Artificial Sequence: Synthetic oligonucleotide
uggguaguccaaaaguucc

SEQ ID NO: 2541249 - RNA, 19 nt, Artificial Sequence
  Description of Artificial Sequence: Synthetic oligonucleotide
ucaaauguaccaugcagac

SEQ ID NO: 2541250 - RNA, 19 nt, Artificial Sequence
  Description of Artificial Sequence: Synthetic oligonucleotide
uccccucccaguuuaaugg

SEQ ID NO: 2541251 - RNA, 19 nt, Artificial Sequence
  Description of Artificial Sequence: Synthetic oligonucleotide
ggagauucaaacucgacug

SEQ ID NO: 2541252 - RNA, 19 nt, Artificial Sequence
  Description of Artificial Sequence: Synthetic oligonucleotide
augguuagcacgccgcccc

SEQ ID NO: 2541253 - RNA, 19 nt, Artificial Sequence
  Description of Artificial Sequence: Synthetic oligonucleotide
aaggagacaucguaguccu

SEQ ID NO: 2541254 - RNA, 19 nt, Artificial Sequence
  Description of Artificial Sequence: Synthetic oligonucleotide
gacaucguaguccuccagg

SEQ ID NO: 2541255 - RNA, 19 nt, Artificial Sequence
  Description of Artificial Sequence: Synthetic oligonucleotide
agauaaccagauuugcuug

SEQ ID NO: 2541256 - RNA, 19 nt, Artificial Sequence
  Description of Artificial Sequence: Synthetic oligonucleotide
uugguugugacgugcaggc

SEQ ID NO: 2541257 - RNA, 19 nt, Artificial Sequence
  Description of Artificial Sequence: Synthetic oligonucleotide
cacguaggucccuagaucc

SEQ ID NO: 2541258 - RNA, 19 nt, Artificial Sequence
  Description of Artificial Sequence: Synthetic oligonucleotide
guaguggagauucaaacuc

SEQ ID NO: 2541259 - RNA, 19 nt, Artificial Sequence
  Description of Artificial Sequence: Synthetic oligonucleotide
aaugguuagcacgccgccc

SEQ ID NO: 2541260 - RNA, 19 nt, Artificial Sequence
  Description of Artificial Sequence: Synthetic oligonucleotide
agauucaaacucgacuggc

SEQ ID NO: 2541261 - RNA, 19 nt, Artificial Sequence
  Description of Artificial Sequence: Synthetic oligonucleotide
aaaaguucccgaguuccuc

SEQ ID NO: 2541262 - RNA, 19 nt, Artificial Sequence
  Description of Artificial Sequence: Synthetic oligonucleotide
aucuagagagcuuggguag

SEQ ID NO: 2541263 - RNA, 19 nt, Artificial Sequence
  Description of Artificial Sequence: Synthetic oligonucleotide
ugcaagucuuucauaagcu

SEQ ID NO: 2541264 - RNA, 19 nt, Artificial Sequence
  Description of Artificial Sequence: Synthetic oligonucleotide
uauagggcuugucugcaag

SEQ ID NO: 2541265 - RNA, 19 nt, Artificial Sequence
  Description of Artificial Sequence: Synthetic oligonucleotide
gagauucaaacucgacugg

SEQ ID NO: 2541266 - RNA, 19 nt, Artificial Sequence
  Description of Artificial Sequence: Synthetic oligonucleotide
uggucuuuaaggcugcagu

SEQ ID NO: 2541267 - RNA, 19 nt, Artificial Sequence
  Description of Artificial Sequence: Synthetic oligonucleotide
aucgagguaguggagauuc

SEQ ID NO: 2541268 - RNA, 19 nt, Artificial Sequence
  Description of Artificial Sequence: Synthetic oligonucleotide
cagaaucugaucgagguag

SEQ ID NO: 2541269 - RNA, 19 nt, Artificial Sequence
  Description of Artificial Sequence: Synthetic oligonucleotide
gagaagauaaccagauuug

SEQ ID NO: 2541270 - RNA, 19 nt, Artificial Sequence
  Description of Artificial Sequence: Synthetic oligonucleotide
cugcaagucuuucauaagc

SEQ ID NO: 2541271 - RNA, 19 nt, Artificial Sequence
  Description of Artificial Sequence: Synthetic oligonucleotide
ucugccagggcguccagcg

SEQ ID NO: 2541272 - RNA, 19 nt, Artificial Sequence
  Description of Artificial Sequence: Synthetic oligonucleotide
ucaucuagagagcuugggu

SEQ ID NO: 2541273 - RNA, 19 nt, Artificial Sequence
  Description of Artificial Sequence: Synthetic oligonucleotide
aaaguucccgaguuccuca

SEQ ID NO: 2541274 - RNA, 19 nt, Artificial Sequence
  Description of Artificial Sequence: Synthetic oligonucleotide
uaguccaaaaguucccgag

SEQ ID NO: 2541275 - RNA, 19 nt, Artificial Sequence
  Description of Artificial Sequence: Synthetic oligonucleotide
gauucaaacucgacuggcg

SEQ ID NO: 2541276 - RNA, 19 nt, Artificial Sequence
  Description of Artificial Sequence: Synthetic oligonucleotide
uuuaaggcugcagucagcu

SEQ ID NO: 2541277 - RNA, 19 nt, Artificial Sequence
  Description of Artificial Sequence: Synthetic oligonucleotide
agcucaugcagggacacgc

SEQ ID NO: 2541278 - RNA, 19 nt, Artificial Sequence
  Description of Artificial Sequence: Synthetic oligonucleotide
uauugaucacguagguccc

SEQ ID NO: 2541279 - RNA, 19 nt, Artificial Sequence
  Description of Artificial Sequence: Synthetic oligonucleotide
auuuuggucuuuaaggcug

SEQ ID NO: 2541280 - RNA, 19 nt, Artificial Sequence
  Description of Artificial Sequence: Synthetic oligonucleotide
aucugaucgagguagugga

SEQ ID NO: 2541281 - RNA, 19 nt, Artificial Sequence
  Description of Artificial Sequence: Synthetic oligonucleotide
uguucagaaucugaucgag

SEQ ID NO: 2541282 - RNA, 19 nt, Artificial Sequence
  Description of Artificial Sequence: Synthetic oligonucleotide
cauaagcugucucaucuag

SEQ ID NO: 2541283 - RNA, 19 nt, Artificial Sequence
  Description of Artificial Sequence: Synthetic oligonucleotide
accagauuugcuuguucgg

SEQ ID NO: 2541284 - RNA, 19 nt, Artificial Sequence
  Description of Artificial Sequence: Synthetic oligonucleotide
cagauuugcuuguucgggg

SEQ ID NO: 2541285 - RNA, 19 nt, Artificial Sequence
  Description of Artificial Sequence: Synthetic oligonucleotide
uucaaacucgacuggcggc

SEQ ID NO: 2541286 - RNA, 19 nt, Artificial Sequence
  Description of Artificial Sequence: Synthetic oligonucleotide
aggguauagggcuugucug

SEQ ID NO: 2541287 - RNA, 19 nt, Artificial Sequence
  Description of Artificial Sequence: Synthetic oligonucleotide
uaaugguuagcacgccgcc

SEQ ID NO: 2541288 - RNA, 19 nt, Artificial Sequence
  Description of Artificial Sequence: Synthetic oligonucleotide
uuggguaguccaaaaguuc

SEQ ID NO: 2541289 - RNA, 19 nt, Artificial Sequence
  Description of Artificial Sequence: Synthetic oligonucleotide
uguaccaugcagacacucu

SEQ ID NO: 2541290 - RNA, 19 nt, Artificial Sequence
  Description of Artificial Sequence: Synthetic oligonucleotide
ucugcaagucuuucauaag

SEQ ID NO: 2541291 - RNA, 19 nt, Artificial Sequence
  Description of Artificial Sequence: Synthetic oligonucleotide
gaguacacccaguucuucc

SEQ ID NO: 2541292 - RNA, 19 nt, Artificial Sequence
  Description of Artificial Sequence: Synthetic oligonucleotide
ucccgaguuccucaaaugu

SEQ ID NO: 2541293 - RNA, 19 nt, Artificial Sequence
  Description of Artificial Sequence: Synthetic oligonucleotide
ucaaacucgacuggcggcc

SEQ ID NO: 2541294 - RNA, 19 nt, Artificial Sequence
  Description of Artificial Sequence: Synthetic oligonucleotide
cagucauagcgcuuggggc

SEQ ID NO: 2541295 - RNA, 19 nt, Artificial Sequence
  Description of Artificial Sequence: Synthetic oligonucleotide
ucucaucuagagagcuugg

SEQ ID NO: 2541296 - RNA, 19 nt, Artificial Sequence
  Description of Artificial Sequence: Synthetic oligonucleotide
ugauguucagaaucugauc

SEQ ID NO: 2541297 - RNA, 19 nt, Artificial Sequence
  Description of Artificial Sequence: Synthetic oligonucleotide
uuuauugaucacguagguc

SEQ ID NO: 2541298 - RNA, 19 nt, Artificial Sequence
  Description of Artificial Sequence: Synthetic oligonucleotide
guugguugugacgugcagg

SEQ ID NO: 2541299 - RNA, 19 nt, Artificial Sequence
  Description of Artificial Sequence: Synthetic oligonucleotide
uccucugcaagucuuucau

SEQ ID NO: 2541300 - RNA, 19 nt, Artificial Sequence
  Description of Artificial Sequence: Synthetic oligonucleotide
agggacacgccaucguggg

SEQ ID NO: 2541301 - RNA, 19 nt, Artificial Sequence
  Description of Artificial Sequence: Synthetic oligonucleotide
aguccaaaaguucccgagu

SEQ ID NO: 2541302 - RNA, 19 nt, Artificial Sequence
  Description of Artificial Sequence: Synthetic oligonucleotide
ugacgugcaggccucggug

SEQ ID NO: 2541303 - RNA, 19 nt, Artificial Sequence
  Description of Artificial Sequence: Synthetic oligonucleotide
gucucaucuagagagcuug

SEQ ID NO: 2541304 - RNA, 19 nt, Artificial Sequence
  Description of Artificial Sequence: Synthetic oligonucleotide
uucggggucuguuuauuga

SEQ ID NO: 2541305 - RNA, 19 nt, Artificial Sequence
  Description of Artificial Sequence: Synthetic oligonucleotide
agauuugcuuguucggggu

SEQ ID NO: 2541306 - RNA, 19 nt, Artificial Sequence
  Description of Artificial Sequence: Synthetic oligonucleotide
uacacccaguucuucccgg

SEQ ID NO: 2541307 - RNA, 19 nt, Artificial Sequence
  Description of Artificial Sequence: Synthetic oligonucleotide
agcuuggguaguccaaaag

SEQ ID NO: 2541308 - RNA, 19 nt, Artificial Sequence
  Description of Artificial Sequence: Synthetic oligonucleotide
ucacguaggucccuagauc

SEQ ID NO: 2541309 - RNA, 19 nt, Artificial Sequence
  Description of Artificial Sequence: Synthetic oligonucleotide
gaguuccucaaauguacca

SEQ ID NO: 2541310 - RNA, 19 nt, Artificial Sequence
  Description of Artificial Sequence: Synthetic oligonucleotide
aaacucgacuggcggccgg

SEQ ID NO: 2541311 - RNA, 19 nt, Artificial Sequence
  Description of Artificial Sequence: Synthetic oligonucleotide
auguucagaaucugaucga

SEQ ID NO: 2541312 - RNA, 19 nt, Artificial Sequence
  Description of Artificial Sequence: Synthetic oligonucleotide
aucacguaggucccuagau

SEQ ID NO: 2541313 - RNA, 19 nt, Artificial Sequence
  Description of Artificial Sequence: Synthetic oligonucleotide
uuagcacgccgccccaaag

SEQ ID NO: 2541314 - RNA, 19 nt, Artificial Sequence
  Description of Artificial Sequence: Synthetic oligonucleotide
uccaaaaguucccgaguuc

SEQ ID NO: 2541315 - RNA, 19 nt, Artificial Sequence
  Description of Artificial Sequence: Synthetic oligonucleotide
aagcugucucaucuagaga

SEQ ID NO: 2541316 - RNA, 19 nt, Artificial Sequence
  Description of Artificial Sequence: Synthetic oligonucleotide
aucgugggaguacacccag

SEQ ID NO: 2541317 - RNA, 19 nt, Artificial Sequence
  Description of Artificial Sequence: Synthetic oligonucleotide
ucagaaucugaucgaggua

SEQ ID NO: 2541318 - RNA, 19 nt, Artificial Sequence
  Description of Artificial Sequence: Synthetic oligonucleotide
cagggacacgccaucgugg

SEQ ID NO: 2541319 - RNA, 19 nt, Artificial Sequence
  Description of Artificial Sequence: Synthetic oligonucleotide
ugaucgagguaguggagau

SEQ ID NO: 2541320 - RNA, 19 nt, Artificial Sequence
  Description of Artificial Sequence: Synthetic oligonucleotide
caucuagagagcuugggua

SEQ ID NO: 2541321 - RNA, 19 nt, Artificial Sequence
  Description of Artificial Sequence: Synthetic oligonucleotide
cuuuaaggcugcagucagc

SEQ ID NO: 2541322 - RNA, 19 nt, Artificial Sequence
  Description of Artificial Sequence: Synthetic oligonucleotide
aacucgacuggcggccggc

SEQ ID NO: 2541323 - RNA, 19 nt, Artificial Sequence
  Description of Artificial Sequence: Synthetic oligonucleotide
uucccgaguuccucaaaug

SEQ ID NO: 2541324 - RNA, 19 nt, Artificial Sequence
  Description of Artificial Sequence: Synthetic oligonucleotide
cucaucuagagagcuuggg

SEQ ID NO: 2541325 - RNA, 19 nt, Artificial Sequence
  Description of Artificial Sequence: Synthetic oligonucleotide
guacacccaguucuucccg

SEQ ID NO: 2541326 - RNA, 19 nt, Artificial Sequence
  Description of Artificial Sequence: Synthetic oligonucleotide
ggagaagauaaccagauuu

SEQ ID NO: 2541327 - RNA, 19 nt, Artificial Sequence
  Description of Artificial Sequence: Synthetic oligonucleotide
auguaccaugcagacacuc

SEQ ID NO: 2541328 - RNA, 19 nt, Artificial Sequence
  Description of Artificial Sequence: Synthetic oligonucleotide
aagaacucugccagggcgu

SEQ ID NO: 2541329 - RNA, 19 nt, Artificial Sequence
  Description of Artificial Sequence: Synthetic oligonucleotide
auccccucccaguuuaaug

SEQ ID NO: 2541330 - RNA, 19 nt, Artificial Sequence
  Description of Artificial Sequence: Synthetic oligonucleotide
ggagacaucguaguccucc

SEQ ID NO: 2541331 - RNA, 19 nt, Artificial Sequence
  Description of Artificial Sequence: Synthetic oligonucleotide
uagauccccucccaguuua

SEQ ID NO: 2541332 - RNA, 19 nt, Artificial Sequence
  Description of Artificial Sequence: Synthetic oligonucleotide
ccaaaaguucccgaguucc

SEQ ID NO: 2541333 - RNA, 19 nt, Artificial Sequence
  Description of Artificial Sequence: Synthetic oligonucleotide
uuggucuuuaaggcugcag

SEQ ID NO: 2541334 - RNA, 19 nt, Artificial Sequence
  Description of Artificial Sequence: Synthetic oligonucleotide
agcgcuuggggccacugca

SEQ ID NO: 2541335 - RNA, 19 nt, Artificial Sequence
  Description of Artificial Sequence: Synthetic oligonucleotide
aguuccucaaauguaccau

SEQ ID NO: 2541336 - RNA, 19 nt, Artificial Sequence
  Description of Artificial Sequence: Synthetic oligonucleotide
gauaaccagauuugcuugu

SEQ ID NO: 2541337 - RNA, 19 nt, Artificial Sequence
  Description of Artificial Sequence: Synthetic oligonucleotide
ugaucacguaggucccuag

SEQ ID NO: 2541338 - RNA, 19 nt, Artificial Sequence
  Description of Artificial Sequence: Synthetic oligonucleotide
gaagauaaccagauuugcu

SEQ ID NO: 2541339 - RNA, 19 nt, Artificial Sequence
  Description of Artificial Sequence: Synthetic oligonucleotide
gaggucgaggcccgcgacg

SEQ ID NO: 2541340 - RNA, 19 nt, Artificial Sequence
  Description of Artificial Sequence: Synthetic oligonucleotide
gaaucugaucgagguagug

SEQ ID NO: 2541341 - RNA, 19 nt, Artificial Sequence
  Description of Artificial Sequence: Synthetic oligonucleotide
gauuugcuuguucgggguc

SEQ ID NO: 2541342 - RNA, 19 nt, Artificial Sequence
  Description of Artificial Sequence: Synthetic oligonucleotide
acugcagggagaagauaac

SEQ ID NO: 2541343 - RNA, 19 nt, Artificial Sequence
  Description of Artificial Sequence: Synthetic oligonucleotide
uugucugcaaggucuucaa

SEQ ID NO: 2541344 - RNA, 19 nt, Artificial Sequence
  Description of Artificial Sequence: Synthetic oligonucleotide
uucuucccgguccagucau

SEQ ID NO: 2541345 - RNA, 19 nt, Artificial Sequence
  Description of Artificial Sequence: Synthetic oligonucleotide
gcaagucuuucauaagcug

SEQ ID NO: 2541346 - RNA, 19 nt, Artificial Sequence
  Description of Artificial Sequence: Synthetic oligonucleotide
ucccuagauccccucccag

SEQ ID NO: 2541347 - RNA, 19 nt, Artificial Sequence
  Description of Artificial Sequence: Synthetic oligonucleotide
ucguaguccuccaggguau

SEQ ID NO: 2541348 - RNA, 19 nt, Artificial Sequence
  Description of Artificial Sequence: Synthetic oligonucleotide
ccaucgugggaguacaccc

SEQ ID NO: 2541349 - RNA, 19 nt, Artificial Sequence
  Description of Artificial Sequence: Synthetic oligonucleotide
agggagaagauaaccagau

SEQ ID NO: 2541350 - RNA, 19 nt, Artificial Sequence
  Description of Artificial Sequence: Synthetic oligonucleotide
gggaucccgaccgaggucg

SEQ ID NO: 2541351 - RNA, 19 nt, Artificial Sequence
  Description of Artificial Sequence: Synthetic oligonucleotide
ucggggucuguuuauugau

SEQ ID NO: 2541352 - RNA, 19 nt, Artificial Sequence
  Description of Artificial Sequence: Synthetic oligonucleotide
ggguauagggcuugucugc

SEQ ID NO: 2541353 - RNA, 19 nt, Artificial Sequence
  Description of Artificial Sequence: Synthetic oligonucleotide
guuuauugaucacguaggu

SEQ ID NO: 2541354 - RNA, 19 nt, Artificial Sequence
  Description of Artificial Sequence: Synthetic oligonucleotide
gaucacguaggucccuaga

SEQ ID NO: 2541355 - RNA, 19 nt, Artificial Sequence
  Description of Artificial Sequence: Synthetic oligonucleotide
gucuuuaaggcugcaguca

SEQ ID NO: 2541356 - RNA, 19 nt, Artificial Sequence
  Description of Artificial Sequence: Synthetic oligonucleotide
guucggggucuguuuauug

SEQ ID NO: 2541357 - RNA, 19 nt, Artificial Sequence
  Description of Artificial Sequence: Synthetic oligonucleotide
agcacgccgccccaaagga

SEQ ID NO: 2541358 - RNA, 19 nt, Artificial Sequence
  Description of Artificial Sequence: Synthetic oligonucleotide
uccagucauagcgcuuggg

SEQ ID NO: 2541359 - RNA, 19 nt, Artificial Sequence
  Description of Artificial Sequence: Synthetic oligonucleotide
agacaucguaguccuccag

SEQ ID NO: 2541360 - RNA, 19 nt, Artificial Sequence
  Description of Artificial Sequence: Synthetic oligonucleotide
cagcagcucaugcagggac

SEQ ID NO: 2541361 - RNA, 19 nt, Artificial Sequence
  Description of Artificial Sequence: Synthetic oligonucleotide
aaguucccgaguuccucaa

SEQ ID NO: 2541362 - RNA, 19 nt, Artificial Sequence
  Description of Artificial Sequence: Synthetic oligonucleotide
ccgaguuccucaaauguac

SEQ ID NO: 2541363 - RNA, 19 nt, Artificial Sequence
  Description of Artificial Sequence: Synthetic oligonucleotide
ucuagagagcuuggguagu

SEQ ID NO: 2541364 - RNA, 19 nt, Artificial Sequence
  Description of Artificial Sequence: Synthetic oligonucleotide
ggucuuuaaggcugcaguc

SEQ ID NO: 2541365 - RNA, 19 nt, Artificial Sequence
  Description of Artificial Sequence: Synthetic oligonucleotide
agcgucuccucugcaaguc

SEQ ID NO: 2541366 - RNA, 19 nt, Artificial Sequence
  Description of Artificial Sequence: Synthetic oligonucleotide
guuuaaugguuagcacgcc

SEQ ID NO: 2541367 - RNA, 19 nt, Artificial Sequence
  Description of Artificial Sequence: Synthetic oligonucleotide
cauuuuggucuuuaaggcu

SEQ ID NO: 2541368 - RNA, 19 nt, Artificial Sequence
  Description of Artificial Sequence: Synthetic oligonucleotide
guaguccaaaaguucccga

SEQ ID NO: 2541369 - RNA, 19 nt, Artificial Sequence
  Description of Artificial Sequence: Synthetic oligonucleotide
agaacucugccagggcguc

SEQ ID NO: 2541370 - RNA, 19 nt, Artificial Sequence
  Description of Artificial Sequence: Synthetic oligonucleotide
ucccaguuuaaugguuagc

SEQ ID NO: 2541371 - RNA, 19 nt, Artificial Sequence
  Description of Artificial Sequence: Synthetic oligonucleotide
acguaggucccuagauccc

SEQ ID NO: 2541372 - RNA, 19 nt, Artificial Sequence
  Description of Artificial Sequence: Synthetic oligonucleotide
uagggcuugucugcaaggu

SEQ ID NO: 2541373 - RNA, 19 nt, Artificial Sequence
  Description of Artificial Sequence: Synthetic oligonucleotide
ugccagggcguccagcguc

SEQ ID NO: 2541374 - RNA, 19 nt, Artificial Sequence
  Description of Artificial Sequence: Synthetic oligonucleotide
aguggagauucaaacucga

SEQ ID NO: 2541375 - RNA, 19 nt, Artificial Sequence
  Description of Artificial Sequence: Synthetic oligonucleotide
guagcaggcccacggcugc

SEQ ID NO: 2541376 - RNA, 19 nt, Artificial Sequence
  Description of Artificial Sequence: Synthetic oligonucleotide
ccagauuugcuuguucggg

SEQ ID NO: 2541377 - RNA, 19 nt, Artificial Sequence
  Description of Artificial Sequence: Synthetic oligonucleotide
ggacacgccaucgugggag

SEQ ID NO: 2541378 - RNA, 19 nt, Artificial Sequence
  Description of Artificial Sequence: Synthetic oligonucleotide
uccagcgucuccucugcaa

SEQ ID NO: 2541379 - RNA, 19 nt, Artificial Sequence
  Description of Artificial Sequence: Synthetic oligonucleotide
gagacaucguaguccucca

SEQ ID NO: 2541380 - RNA, 19 nt, Artificial Sequence
  Description of Artificial Sequence: Synthetic oligonucleotide
ugugacgugcaggccucgg

SEQ ID NO: 2541381 - RNA, 19 nt, Artificial Sequence
  Description of Artificial Sequence: Synthetic oligonucleotide
uuugcuuguucggggucug

SEQ ID NO: 2541382 - RNA, 19 nt, Artificial Sequence
  Description of Artificial Sequence: Synthetic oligonucleotide
gguaguggagauucaaacu

SEQ ID NO: 2541383 - RNA, 19 nt, Artificial Sequence
  Description of Artificial Sequence: Synthetic oligonucleotide
aucccgaccgaggucgagg

SEQ ID NO: 2541384 - RNA, 19 nt, Artificial Sequence
  Description of Artificial Sequence: Synthetic oligonucleotide
ugucucaucuagagagcuu

SEQ ID NO: 2541385 - RNA, 19 nt, Artificial Sequence
  Description of Artificial Sequence: Synthetic oligonucleotide
cuucccgguccagucauag

SEQ ID NO: 2541386 - RNA, 19 nt, Artificial Sequence
  Description of Artificial Sequence: Synthetic oligonucleotide
uccgaucggcucccucccg

SEQ ID NO: 2541387 - RNA, 19 nt, Artificial Sequence
  Description of Artificial Sequence: Synthetic oligonucleotide
cuuggguaguccaaaaguu

SEQ ID NO: 2541388 - RNA, 19 nt, Artificial Sequence
  Description of Artificial Sequence: Synthetic oligonucleotide
ccaguuuaaugguuagcac

SEQ ID NO: 2541389 - RNA, 19 nt, Artificial Sequence
  Description of Artificial Sequence: Synthetic oligonucleotide
ucgagguaguggagauuca

SEQ ID NO: 2541390 - RNA, 19 nt, Artificial Sequence
  Description of Artificial Sequence: Synthetic oligonucleotide
aauguaccaugcagacacu

SEQ ID NO: 2541391 - RNA, 19 nt, Artificial Sequence
  Description of Artificial Sequence: Synthetic oligonucleotide
gguccagucauagcgcuug

SEQ ID NO: 2541392 - RNA, 19 nt, Artificial Sequence
  Description of Artificial Sequence: Synthetic oligonucleotide
uuaaggcugcagucagcuc

SEQ ID NO: 2541393 - RNA, 19 nt, Artificial Sequence
  Description of Artificial Sequence: Synthetic oligonucleotide
cugcagucagcucccuggc

SEQ ID NO: 2541394 - RNA, 19 nt, Artificial Sequence
  Description of Artificial Sequence: Synthetic oligonucleotide
uagcgcuuggggccacugc

SEQ ID NO: 2541395 - RNA, 19 nt, Artificial Sequence
  Description of Artificial Sequence: Synthetic oligonucleotide
cacgccgccccaaaggaga

SEQ ID NO: 2541396 - RNA, 19 nt, Artificial Sequence
  Description of Artificial Sequence: Synthetic oligonucleotide
ucggcucccucccgcgcgg

SEQ ID NO: 2541397 - RNA, 19 nt, Artificial Sequence
  Description of Artificial Sequence: Synthetic oligonucleotide
cuccgaucggcucccuccc

SEQ ID NO: 2541398 - RNA, 19 nt, Artificial Sequence
  Description of Artificial Sequence: Synthetic oligonucleotide
gcuccgaucggcucccucc

SEQ ID NO: 2541399 - RNA, 19 nt, Artificial Sequence
  Description of Artificial Sequence: Synthetic oligonucleotide
uuguucggggucuguuuau

SEQ ID NO: 2541400 - RNA, 19 nt, Artificial Sequence
  Description of Artificial Sequence: Synthetic oligonucleotide
ggucccuagauccccuccc

SEQ ID NO: 2541401 - RNA, 19 nt, Artificial Sequence
  Description of Artificial Sequence: Synthetic oligonucleotide
gcuuggguaguccaaaagu

SEQ ID NO: 2541402 - RNA, 19 nt, Artificial Sequence
  Description of Artificial Sequence: Synthetic oligonucleotide
gucgaggcccgcgacgccg

SEQ ID NO: 2541403 - RNA, 19 nt, Artificial Sequence
  Description of Artificial Sequence: Synthetic oligonucleotide
cuuguucggggucuguuua

SEQ ID NO: 2541404 - RNA, 19 nt, Artificial Sequence
  Description of Artificial Sequence: Synthetic oligonucleotide
uucccgguccagucauagc

SEQ ID NO: 2541405 - RNA, 19 nt, Artificial Sequence
  Description of Artificial Sequence: Synthetic oligonucleotide
caucgugggaguacaccca

SEQ ID NO: 2541406 - RNA, 19 nt, Artificial Sequence
  Description of Artificial Sequence: Synthetic oligonucleotide
uuuggucuuuaaggcugca

SEQ ID NO: 2541407 - RNA, 19 nt, Artificial Sequence
  Description of Artificial Sequence: Synthetic oligonucleotide
caaacucgacuggcggccg

SEQ ID NO: 2541408 - RNA, 19 nt, Artificial Sequence
  Description of Artificial Sequence: Synthetic oligonucleotide
acacccaguucuucccggu

SEQ ID NO: 2541409 - RNA, 19 nt, Artificial Sequence
  Description of Artificial Sequence: Synthetic oligonucleotide
cuagagagcuuggguaguc

SEQ ID NO: 2541410 - RNA, 19 nt, Artificial Sequence
  Description of Artificial Sequence: Synthetic oligonucleotide
cccaguuuaaugguuagca

SEQ ID NO: 2541411 - RNA, 19 nt, Artificial Sequence
  Description of Artificial Sequence: Synthetic oligonucleotide
caggguauagggcuugucu

SEQ ID NO: 2541412 - RNA, 19 nt, Artificial Sequence
  Description of Artificial Sequence: Synthetic oligonucleotide
caaauguaccaugcagaca

SEQ ID NO: 2541413 - RNA, 19 nt, Artificial Sequence
  Description of Artificial Sequence: Synthetic oligonucleotide
gugggaguacacccaguuc

SEQ ID NO: 2541414 - RNA, 19 nt, Artificial Sequence
  Description of Artificial Sequence: Synthetic oligonucleotide
gguugugacgugcaggccu

SEQ ID NO: 2541415 - RNA, 19 nt, Artificial Sequence
  Description of Artificial Sequence: Synthetic oligonucleotide
uugaucacguaggucccua

SEQ ID NO: 2541416 - RNA, 19 nt, Artificial Sequence
  Description of Artificial Sequence: Synthetic oligonucleotide
ugguuagcacgccgcccca

SEQ ID NO: 2541417 - RNA, 19 nt, Artificial Sequence
  Description of Artificial Sequence: Synthetic oligonucleotide
gaucggcucccucccgcgc

SEQ ID NO: 2541418 - RNA, 19 nt, Artificial Sequence
  Description of Artificial Sequence: Synthetic oligonucleotide
auaaccagauuugcuuguu

SEQ ID NO: 2541419 - RNA, 19 nt, Artificial Sequence
  Description of Artificial Sequence: Synthetic oligonucleotide
guaguccuccaggguauag

SEQ ID NO: 2541420 - RNA, 19 nt, Artificial Sequence
  Description of Artificial Sequence: Synthetic oligonucleotide
agaaucugaucgagguagu

SEQ ID NO: 2541421 - RNA, 19 nt, Artificial Sequence
  Description of Artificial Sequence: Synthetic oligonucleotide
gcagggacacgccaucgug

SEQ ID NO: 2541422 - RNA, 19 nt, Artificial Sequence
  Description of Artificial Sequence: Synthetic oligonucleotide
guggagauucaaacucgac

SEQ ID NO: 2541423 - RNA, 19 nt, Artificial Sequence
  Description of Artificial Sequence: Synthetic oligonucleotide
gcggaggccgcguugguug

SEQ ID NO: 2541424 - RNA, 19 nt, Artificial Sequence
  Description of Artificial Sequence: Synthetic oligonucleotide
guugugacgugcaggccuc

SEQ ID NO: 2541425 - RNA, 19 nt, Artificial Sequence
  Description of Artificial Sequence: Synthetic oligonucleotide
cucgacuggcggccggcgg

SEQ ID NO: 2541426 - RNA, 19 nt, Artificial Sequence
  Description of Artificial Sequence: Synthetic oligonucleotide
ucgugggaguacacccagu

SEQ ID NO: 2541427 - RNA, 19 nt, Artificial Sequence
  Description of Artificial Sequence: Synthetic oligonucleotide
cacggcugcgcgccguccg

SEQ ID NO: 2541428 - RNA, 19 nt, Artificial Sequence
  Description of Artificial Sequence: Synthetic oligonucleotide
gguagcaggcccacggcug

SEQ ID NO: 2541429 - RNA, 19 nt, Artificial Sequence
  Description of Artificial Sequence: Synthetic oligonucleotide
gagcuuggguaguccaaaa

SEQ ID NO: 2541430 - RNA, 19 nt, Artificial Sequence
  Description of Artificial Sequence: Synthetic oligonucleotide
ugguugugacgugcaggcc

SEQ ID NO: 2541431 - RNA, 19 nt, Artificial Sequence
  Description of Artificial Sequence: Synthetic oligonucleotide
ggguaguccaaaaguuccc

SEQ ID NO: 2541432 - RNA, 19 nt, Artificial Sequence
  Description of Artificial Sequence: Synthetic oligonucleotide
uguucggggucuguuuauu

SEQ ID NO: 2541433 - RNA, 19 nt, Artificial Sequence
  Description of Artificial Sequence: Synthetic oligonucleotide
uugugacgugcaggccucg

SEQ ID NO: 2541434 - RNA, 19 nt, Artificial Sequence
  Description of Artificial Sequence: Synthetic oligonucleotide
guccaaaaguucccgaguu

SEQ ID NO: 2541435 - RNA, 19 nt, Artificial Sequence
  Description of Artificial Sequence: Synthetic oligonucleotide
cacgccaucgugggaguac

SEQ ID NO: 2541436 - RNA, 19 nt, Artificial Sequence
  Description of Artificial Sequence: Synthetic oligonucleotide
ccagcgucuccucugcaag

SEQ ID NO: 2541437 - RNA, 19 nt, Artificial Sequence
  Description of Artificial Sequence: Synthetic oligonucleotide
ugcgcgccguccgagcgcc

SEQ ID NO: 2541438 - RNA, 19 nt, Artificial Sequence
  Description of Artificial Sequence: Synthetic oligonucleotide
accgaggucgaggcccgcg

SEQ ID NO: 2541439 - RNA, 19 nt, Artificial Sequence
  Description of Artificial Sequence: Synthetic oligonucleotide
guucccgaguuccucaaau

SEQ ID NO: 2541440 - RNA, 19 nt, Artificial Sequence
  Description of Artificial Sequence: Synthetic oligonucleotide
gguauagggcuugucugca

SEQ ID NO: 2541441 - RNA, 19 nt, Artificial Sequence
  Description of Artificial Sequence: Synthetic oligonucleotide
ugcuuguucggggucuguu

SEQ ID NO: 2541442 - RNA, 19 nt, Artificial Sequence
  Description of Artificial Sequence: Synthetic oligonucleotide
ugcccagcauuuuggucuu

SEQ ID NO: 2541443 - RNA, 19 nt, Artificial Sequence
  Description of Artificial Sequence: Synthetic oligonucleotide
aguucccgaguuccucaaa

SEQ ID NO: 2541444 - RNA, 19 nt, Artificial Sequence
  Description of Artificial Sequence: Synthetic oligonucleotide
aggccgcguugguugugac

SEQ ID NO: 2541445 - RNA, 19 nt, Artificial Sequence
  Description of Artificial Sequence: Synthetic oligonucleotide
gucccuagauccccuccca

SEQ ID NO: 2541446 - RNA, 19 nt, Artificial Sequence
  Description of Artificial Sequence: Synthetic oligonucleotide
cgaguuccucaaauguacc

SEQ ID NO: 2541447 - RNA, 19 nt, Artificial Sequence
  Description of Artificial Sequence: Synthetic oligonucleotide
guuagcacgccgccccaaa

SEQ ID NO: 2541448 - RNA, 19 nt, Artificial Sequence
  Description of Artificial Sequence: Synthetic oligonucleotide
auagcgcuuggggccacug

SEQ ID NO: 2541449 - RNA, 19 nt, Artificial Sequence
  Description of Artificial Sequence: Synthetic oligonucleotide
gucauagcgcuuggggcca

SEQ ID NO: 2541450 - RNA, 19 nt, Artificial Sequence
  Description of Artificial Sequence: Synthetic oligonucleotide
gcugcgcgccguccgagcg

SEQ ID NO: 2541451 - RNA, 19 nt, Artificial Sequence
  Description of Artificial Sequence: Synthetic oligonucleotide
acucgacuggcggccggcg

SEQ ID NO: 2541452 - RNA, 19 nt, Artificial Sequence
  Description of Artificial Sequence: Synthetic oligonucleotide
ggccgcguugguugugacg

SEQ ID NO: 2541453 - RNA, 19 nt, Artificial Sequence
  Description of Artificial Sequence: Synthetic oligonucleotide
uagcaggcccacggcugcg

SEQ ID NO: 2541454 - RNA, 19 nt, Artificial Sequence
  Description of Artificial Sequence: Synthetic oligonucleotide
gcacgcuccgaucggcucc

SEQ ID NO: 2541455 - RNA, 19 nt, Artificial Sequence
  Description of Artificial Sequence: Synthetic oligonucleotide
ccgaccgaggucgaggccc

SEQ ID NO: 2541456 - RNA, 19 nt, Artificial Sequence
  Description of Artificial Sequence: Synthetic oligonucleotide
gaucccgaccgaggucgag

SEQ ID NO: 2541457 - RNA, 19 nt, Artificial Sequence
  Description of Artificial Sequence: Synthetic oligonucleotide
gccaucgugggaguacacc

SEQ ID NO: 2541458 - RNA, 19 nt, Artificial Sequence
  Description of Artificial Sequence: Synthetic oligonucleotide
ucgaggcccgcgacgccgu

SEQ ID NO: 2541459 - RNA, 19 nt, Artificial Sequence
  Description of Artificial Sequence: Synthetic oligonucleotide
acgccaucgugggaguaca

SEQ ID NO: 2541460 - RNA, 19 nt, Artificial Sequence
  Description of Artificial Sequence: Synthetic oligonucleotide
cuccaggguauagggcuug

SEQ ID NO: 2541461 - RNA, 19 nt, Artificial Sequence
  Description of Artificial Sequence: Synthetic oligonucleotide
uccaggguauagggcuugu

SEQ ID NO: 2541462 - RNA, 19 nt, Artificial Sequence
  Description of Artificial Sequence: Synthetic oligonucleotide
cacgcuccgaucggcuccc

SEQ ID NO: 2541463 - RNA, 19 nt, Artificial Sequence
  Description of Artificial Sequence: Synthetic oligonucleotide
cccgguccagucauagcgc

SEQ ID NO: 2541464 - RNA, 19 nt, Artificial Sequence
  Description of Artificial Sequence: Synthetic oligonucleotide
cagcucaugcagggacacg

SEQ ID NO: 2541465 - RNA, 19 nt, Artificial Sequence
  Description of Artificial Sequence: Synthetic oligonucleotide
caaugcccagcauuuuggu

SEQ ID NO: 2541466 - RNA, 19 nt, Artificial Sequence
  Description of Artificial Sequence: Synthetic oligonucleotide
cugucucaucuagagagcu

SEQ ID NO: 2541467 - RNA, 19 nt, Artificial Sequence
  Description of Artificial Sequence: Synthetic oligonucleotide
cgggguagcaggcccacgg

SEQ ID NO: 2541468 - RNA, 19 nt, Artificial Sequence
  Description of Artificial Sequence: Synthetic oligonucleotide
gaggccgcguugguuguga

SEQ ID NO: 2541469 - RNA, 19 nt, Artificial Sequence
  Description of Artificial Sequence: Synthetic oligonucleotide
caggcccacggcugcgcgc

SEQ ID NO: 2541470 - RNA, 19 nt, Artificial Sequence
  Description of Artificial Sequence: Synthetic oligonucleotide
gggguagcaggcccacggc

SEQ ID NO: 2541471 - RNA, 19 nt, Artificial Sequence
  Description of Artificial Sequence: Synthetic oligonucleotide
acgccgccccaaaggagac

SEQ ID NO: 2541472 - RNA, 19 nt, Artificial Sequence
  Description of Artificial Sequence: Synthetic oligonucleotide
aggccucgguggccgcacg

SEQ ID NO: 2541473 - RNA, 19 nt, Artificial Sequence
  Description of Artificial Sequence: Synthetic oligonucleotide
ccgcgcgggaucccgaccg

SEQ ID NO: 2541474 - RNA, 19 nt, Artificial Sequence
  Description of Artificial Sequence: Synthetic oligonucleotide
acgccguccgggguagcag

SEQ ID NO: 2541475 - RNA, 19 nt, Artificial Sequence
  Description of Artificial Sequence: Synthetic oligonucleotide
ucccucccgcgcgggaucc

SEQ ID NO: 2541476 - RNA, 19 nt, Artificial Sequence
  Description of Artificial Sequence: Synthetic oligonucleotide
cugcgcgccguccgagcgc

SEQ ID NO: 2541477 - RNA, 19 nt, Artificial Sequence
  Description of Artificial Sequence: Synthetic oligonucleotide
uccgggguagcaggcccac

SEQ ID NO: 2541478 - RNA, 19 nt, Artificial Sequence
  Description of Artificial Sequence: Synthetic oligonucleotide
ucccgcgcgggaucccgac

SEQ ID NO: 2541479 - RNA, 19 nt, Artificial Sequence
  Description of Artificial Sequence: Synthetic oligonucleotide
cguaggucccuagaucccc

SEQ ID NO: 2541480 - RNA, 19 nt, Artificial Sequence
  Description of Artificial Sequence: Synthetic oligonucleotide
aggagacaucguaguccuc

SEQ ID NO: 2541481 - RNA, 19 nt, Artificial Sequence
  Description of Artificial Sequence: Synthetic oligonucleotide
gacgccguccgggguagca

SEQ ID NO: 2541482 - RNA, 19 nt, Artificial Sequence
  Description of Artificial Sequence: Synthetic oligonucleotide
uugcuuguucggggucugu

SEQ ID NO: 2541483 - RNA, 19 nt, Artificial Sequence
  Description of Artificial Sequence: Synthetic oligonucleotide
guggccgcacgcuccgauc

SEQ ID NO: 2541484 - RNA, 19 nt, Artificial Sequence
  Description of Artificial Sequence: Synthetic oligonucleotide
ggaguacacccaguucuuc

SEQ ID NO: 2541485 - RNA, 19 nt, Artificial Sequence
  Description of Artificial Sequence: Synthetic oligonucleotide
gaggcccgcgacgccgucc

SEQ ID NO: 2541486 - RNA, 19 nt, Artificial Sequence
  Description of Artificial Sequence: Synthetic oligonucleotide
acggcugcgcgccguccga

SEQ ID NO: 2541487 - RNA, 19 nt, Artificial Sequence
  Description of Artificial Sequence: Synthetic oligonucleotide
ugcaggccucgguggccgc

SEQ ID NO: 2541488 - RNA, 19 nt, Artificial Sequence
  Description of Artificial Sequence: Synthetic oligonucleotide
caucguaguccuccagggu

SEQ ID NO: 2541489 - RNA, 19 nt, Artificial Sequence
  Description of Artificial Sequence: Synthetic oligonucleotide
gccgcguugguugugacgu

SEQ ID NO: 2541490 - RNA, 19 nt, Artificial Sequence
  Description of Artificial Sequence: Synthetic oligonucleotide
gacacgccaucgugggagu

SEQ ID NO: 2541491 - RNA, 19 nt, Artificial Sequence
  Description of Artificial Sequence: Synthetic oligonucleotide
ccgaucggcucccucccgc

SEQ ID NO: 2541492 - RNA, 19 nt, Artificial Sequence
  Description of Artificial Sequence: Synthetic oligonucleotide
gugacgugcaggccucggu

SEQ ID NO: 2541493 - RNA, 19 nt, Artificial Sequence
  Description of Artificial Sequence: Synthetic oligonucleotide
gacuggcggccggcggagg

SEQ ID NO: 2541494 - RNA, 19 nt, Artificial Sequence
  Description of Artificial Sequence: Synthetic oligonucleotide
ucauagcgcuuggggccac

SEQ ID NO: 2541495 - RNA, 19 nt, Artificial Sequence
  Description of Artificial Sequence: Synthetic oligonucleotide
ccucccaguuuaaugguua

SEQ ID NO: 2541496 - RNA, 19 nt, Artificial Sequence
  Description of Artificial Sequence: Synthetic oligonucleotide
ggccgcacgcuccgaucgg

SEQ ID NO: 2541497 - RNA, 19 nt, Artificial Sequence
  Description of Artificial Sequence: Synthetic oligonucleotide
cucccucccgcgcgggauc

SEQ ID NO: 2541498 - RNA, 19 nt, Artificial Sequence
  Description of Artificial Sequence: Synthetic oligonucleotide
cccgaguuccucaaaugua

SEQ ID NO: 2541499 - RNA, 19 nt, Artificial Sequence
  Description of Artificial Sequence: Synthetic oligonucleotide
ccccaaaggagacaucgua

SEQ ID NO: 2541500 - RNA, 19 nt, Artificial Sequence
  Description of Artificial Sequence: Synthetic oligonucleotide
cccgcgacgccguccgggg

SEQ ID NO: 2541501 - RNA, 19 nt, Artificial Sequence
  Description of Artificial Sequence: Synthetic oligonucleotide
cgcuuggggccacugcagg

SEQ ID NO: 2541502 - RNA, 19 nt, Artificial Sequence
  Description of Artificial Sequence: Synthetic oligonucleotide
cgcgggaucccgaccgagg

SEQ ID NO: 2541503 - RNA, 19 nt, Artificial Sequence
  Description of Artificial Sequence: Synthetic oligonucleotide
cgaucggcucccucccgcg

SEQ ID NO: 2541504 - RNA, 19 nt, Artificial Sequence
  Description of Artificial Sequence: Synthetic oligonucleotide
cguccagcgucuccucugc

SEQ ID NO: 2541505 - RNA, 19 nt, Artificial Sequence
  Description of Artificial Sequence: Synthetic oligonucleotide
cguccgggguagcaggccc

SEQ ID NO: 2541506 - RNA, 19 nt, Artificial Sequence
  Description of Artificial Sequence: Synthetic oligonucleotide
cgcguugguugugacgugc

SEQ ID NO: 2541507 - RNA, 19 nt, Artificial Sequence
  Description of Artificial Sequence: Synthetic oligonucleotide
ggguagcaggcccacggcu

SEQ ID NO: 2541508 - RNA, 19 nt, Artificial Sequence
  Description of Artificial Sequence: Synthetic oligonucleotide
guaggucccuagauccccu

SEQ ID NO: 2541509 - RNA, 19 nt, Artificial Sequence
  Description of Artificial Sequence: Synthetic oligonucleotide
cuagauccccucccaguuu

SEQ ID NO: 2541510 - RNA, 19 nt, Artificial Sequence
  Description of Artificial Sequence: Synthetic oligonucleotide
gcgcuuggggccacugcag

SEQ ID NO: 2541511 - RNA, 19 nt, Artificial Sequence
  Description of Artificial Sequence: Synthetic oligonucleotide
ggccucgguggccgcacgc

SEQ ID NO: 2541512 - RNA, 19 nt, Artificial Sequence
  Description of Artificial Sequence: Synthetic oligonucleotide
ggcugcgcgccguccgagc

SEQ ID NO: 2541513 - RNA, 19 nt, Artificial Sequence
  Description of Artificial Sequence: Synthetic oligonucleotide
gaucgagguaguggagauu

SEQ ID NO: 2541514 - RNA, 19 nt, Artificial Sequence
  Description of Artificial Sequence: Synthetic oligonucleotide
cgaccgaggucgaggcccg

SEQ ID NO: 2541515 - RNA, 19 nt, Artificial Sequence
  Description of Artificial Sequence: Synthetic oligonucleotide
cgccguccgggguagcagg

SEQ ID NO: 2541516 - RNA, 19 nt, Artificial Sequence
  Description of Artificial Sequence: Synthetic oligonucleotide
cagcgucuccucugcaagu

SEQ ID NO: 2541517 - RNA, 19 nt, Artificial Sequence
  Description of Artificial Sequence: Synthetic oligonucleotide
gcacgccgccccaaaggag

SEQ ID NO: 2541518 - RNA, 19 nt, Artificial Sequence
  Description of Artificial Sequence: Synthetic oligonucleotide
ggucgaggcccgcgacgcc

SEQ ID NO: 2541519 - RNA, 19 nt, Artificial Sequence
  Description of Artificial Sequence: Synthetic oligonucleotide
gcuuguucggggucuguuu

SEQ ID NO: 2541520 - RNA, 19 nt, Artificial Sequence
  Description of Artificial Sequence: Synthetic oligonucleotide
gcccgcgacgccguccggg

SEQ ID NO: 2541521 - RNA, 19 nt, Artificial Sequence
  Description of Artificial Sequence: Synthetic oligonucleotide
guccgggguagcaggccca

SEQ ID NO: 2541522 - RNA, 19 nt, Artificial Sequence
  Description of Artificial Sequence: Synthetic oligonucleotide
gggagaagauaaccagauu

SEQ ID NO: 2541523 - RNA, 19 nt, Artificial Sequence
  Description of Artificial Sequence: Synthetic oligonucleotide
gcgggaucccgaccgaggu

SEQ ID NO: 2541524 - RNA, 19 nt, Artificial Sequence
  Description of Artificial Sequence: Synthetic oligonucleotide
gcguugguugugacgugca

SEQ ID NO: 2541525 - RNA, 19 nt, Artificial Sequence
  Description of Artificial Sequence: Synthetic oligonucleotide
gggacacgccaucguggga

SEQ ID NO: 2541526 - RNA, 19 nt, Artificial Sequence
  Description of Artificial Sequence: Synthetic oligonucleotide
ccuagauccccucccaguu

SEQ ID NO: 2541527 - RNA, 19 nt, Artificial Sequence
  Description of Artificial Sequence: Synthetic oligonucleotide
gaccgaggucgaggcccgc

SEQ ID NO: 2541528 - RNA, 19 nt, Artificial Sequence
  Description of Artificial Sequence: Synthetic oligonucleotide
gccgcacgcuccgaucggc

SEQ ID NO: 2541529 - RNA, 19 nt, Artificial Sequence
  Description of Artificial Sequence: Synthetic oligonucleotide
acacgccaucgugggagua

SEQ ID NO: 2541530 - RNA, 19 nt, Artificial Sequence
  Description of Artificial Sequence: Synthetic oligonucleotide
gccggcggaggccgcguug

SEQ ID NO: 2541531 - RNA, 19 nt, Artificial Sequence
  Description of Artificial Sequence: Synthetic oligonucleotide
ccucgguggccgcacgcuc

SEQ ID NO: 2541532 - RNA, 19 nt, Artificial Sequence
  Description of Artificial Sequence: Synthetic oligonucleotide
gcgacgccguccgggguag

SEQ ID NO: 2541533 - RNA, 19 nt, Artificial Sequence
  Description of Artificial Sequence: Synthetic oligonucleotide
ccucccgcgcgggaucccg

SEQ ID NO: 2541534 - RNA, 19 nt, Artificial Sequence
  Description of Artificial Sequence: Synthetic oligonucleotide
gccguccgggguagcaggc

SEQ ID NO: 2541535 - RNA, 19 nt, Artificial Sequence
  Description of Artificial Sequence: Synthetic oligonucleotide
cccuagauccccucccagu

SEQ ID NO: 2541536 - RNA, 19 nt, Artificial Sequence
  Description of Artificial Sequence: Synthetic oligonucleotide
ccaggguauagggcuuguc

SEQ ID NO: 2541537 - RNA, 19 nt, Artificial Sequence
  Description of Artificial Sequence: Synthetic oligonucleotide
cgagguaguggagauucaa

SEQ ID NO: 2541538 - RNA, 19 nt, Artificial Sequence
  Description of Artificial Sequence: Synthetic oligonucleotide
cucccgcgcgggaucccga

SEQ ID NO: 2541539 - RNA, 19 nt, Artificial Sequence
  Description of Artificial Sequence: Synthetic oligonucleotide
gucuccucugcaagucuuu

SEQ ID NO: 2541540 - RNA, 19 nt, Artificial Sequence
  Description of Artificial Sequence: Synthetic oligonucleotide
ggaggccgcguugguugug

SEQ ID NO: 2541541 - RNA, 19 nt, Artificial Sequence
  Description of Artificial Sequence: Synthetic oligonucleotide
gguuagcacgccgccccaa

SEQ ID NO: 2541542 - RNA, 19 nt, Artificial Sequence
  Description of Artificial Sequence: Synthetic oligonucleotide
aggcugcagucagcucccu

SEQ ID NO: 2541543 - RNA, 19 nt, Artificial Sequence
  Description of Artificial Sequence: Synthetic oligonucleotide
gcgucuccucugcaagucu

SEQ ID NO: 2541544 - RNA, 19 nt, Artificial Sequence
  Description of Artificial Sequence: Synthetic oligonucleotide
gcgcgggaucccgaccgag

SEQ ID NO: 2541545 - RNA, 19 nt, Artificial Sequence
  Description of Artificial Sequence: Synthetic oligonucleotide
cgcacgcuccgaucggcuc

SEQ ID NO: 2541546 - RNA, 19 nt, Artificial Sequence
  Description of Artificial Sequence: Synthetic oligonucleotide
gccgccccaaaggagacau

SEQ ID NO: 2541547 - RNA, 19 nt, Artificial Sequence
  Description of Artificial Sequence: Synthetic oligonucleotide
gccacugcagggagaagau

SEQ ID NO: 2541548 - RNA, 19 nt, Artificial Sequence
  Description of Artificial Sequence: Synthetic oligonucleotide
ggcguccagcgucuccucu

SEQ ID NO: 2541549 - RNA, 19 nt, Artificial Sequence
  Description of Artificial Sequence: Synthetic oligonucleotide
ccguccgggguagcaggcc

SEQ ID NO: 2541550 - RNA, 19 nt, Artificial Sequence
  Description of Artificial Sequence: Synthetic oligonucleotide
cccgcgcgggaucccgacc

SEQ ID NO: 2541551 - RNA, 19 nt, Artificial Sequence
  Description of Artificial Sequence: Synthetic oligonucleotide
ccgaggucgaggcccgcga

SEQ ID NO: 2541552 - RNA, 19 nt, Artificial Sequence
  Description of Artificial Sequence: Synthetic oligonucleotide
gguggccgcacgcuccgau

SEQ ID NO: 2541553 - RNA, 19 nt, Artificial Sequence
  Description of Artificial Sequence: Synthetic oligonucleotide
gggaguacacccaguucuu

SEQ ID NO: 2541554 - RNA, 19 nt, Artificial Sequence
  Description of Artificial Sequence: Synthetic oligonucleotide
ccgcguugguugugacgug

SEQ ID NO: 2541555 - RNA, 19 nt, Artificial Sequence
  Description of Artificial Sequence: Synthetic oligonucleotide
ccgguccagucauagcgcu

SEQ ID NO: 2541556 - RNA, 19 nt, Artificial Sequence
  Description of Artificial Sequence: Synthetic oligonucleotide
cccagcauuuuggucuuua

SEQ ID NO: 2541557 - RNA, 19 nt, Artificial Sequence
  Description of Artificial Sequence: Synthetic oligonucleotide
cugccagggcguccagcgu

SEQ ID NO: 2541558 - RNA, 19 nt, Artificial Sequence
  Description of Artificial Sequence: Synthetic oligonucleotide
cgugggaguacacccaguu

SEQ ID NO: 2541559 - RNA, 19 nt, Artificial Sequence
  Description of Artificial Sequence: Synthetic oligonucleotide
gggccacugcagggagaag

SEQ ID NO: 2541560 - RNA, 19 nt, Artificial Sequence
  Description of Artificial Sequence: Synthetic oligonucleotide
cgggaucccgaccgagguc

SEQ ID NO: 2541561 - RNA, 19 nt, Artificial Sequence
  Description of Artificial Sequence: Synthetic oligonucleotide
ggaucccgaccgaggucga

SEQ ID NO: 2541562 - RNA, 19 nt, Artificial Sequence
  Description of Artificial Sequence: Synthetic oligonucleotide
ccgggguagcaggcccacg

SEQ ID NO: 2541563 - RNA, 19 nt, Artificial Sequence
  Description of Artificial Sequence: Synthetic oligonucleotide
ggcucccucccgcgcggga

SEQ ID NO: 2541564 - RNA, 19 nt, Artificial Sequence
  Description of Artificial Sequence: Synthetic oligonucleotide
gccccaaaggagacaucgu

SEQ ID NO: 2541565 - RNA, 19 nt, Artificial Sequence
  Description of Artificial Sequence: Synthetic oligonucleotide
cauagcgcuuggggccacu

SEQ ID NO: 2541566 - RNA, 19 nt, Artificial Sequence
  Description of Artificial Sequence: Synthetic oligonucleotide
ccacggcugcgcgccgucc

SEQ ID NO: 2541567 - RNA, 19 nt, Artificial Sequence
  Description of Artificial Sequence: Synthetic oligonucleotide
cgacuggcggccggcggag

SEQ ID NO: 2541568 - RNA, 19 nt, Artificial Sequence
  Description of Artificial Sequence: Synthetic oligonucleotide
cccacggcugcgcgccguc

SEQ ID NO: 2541569 - RNA, 19 nt, Artificial Sequence
  Description of Artificial Sequence: Synthetic oligonucleotide
ccgccccaaaggagacauc

SEQ ID NO: 2541570 - RNA, 19 nt, Artificial Sequence
  Description of Artificial Sequence: Synthetic oligonucleotide
gccguccgagcgcccuaca

SEQ ID NO: 2541571 - RNA, 19 nt, Artificial Sequence
  Description of Artificial Sequence: Synthetic oligonucleotide
acgcuccgaucggcucccu

SEQ ID NO: 2541572 - RNA, 19 nt, Artificial Sequence
  Description of Artificial Sequence: Synthetic oligonucleotide
cccucccaguuuaaugguu

SEQ ID NO: 2541573 - RNA, 19 nt, Artificial Sequence
  Description of Artificial Sequence: Synthetic oligonucleotide
ccacugcagggagaagaua

SEQ ID NO: 2541574 - RNA, 19 nt, Artificial Sequence
  Description of Artificial Sequence: Synthetic oligonucleotide
gccucgguggccgcacgcu

SEQ ID NO: 2541575 - RNA, 19 nt, Artificial Sequence
  Description of Artificial Sequence: Synthetic oligonucleotide
ccuccaggguauagggcuu

SEQ ID NO: 2541576 - RNA, 19 nt, Artificial Sequence
  Description of Artificial Sequence: Synthetic oligonucleotide
cgcuccgaucggcucccuc

SEQ ID NO: 2541577 - RNA, 19 nt, Artificial Sequence
  Description of Artificial Sequence: Synthetic oligonucleotide
cgcgacgccguccggggua

SEQ ID NO: 2541578 - RNA, 19 nt, Artificial Sequence
  Description of Artificial Sequence: Synthetic oligonucleotide
ggcggaggccgcguugguu

SEQ ID NO: 2541579 - RNA, 19 nt, Artificial Sequence
  Description of Artificial Sequence: Synthetic oligonucleotide
cgccguccgagcgcccuac

SEQ ID NO: 2541580 - RNA, 19 nt, Artificial Sequence
  Description of Artificial Sequence: Synthetic oligonucleotide
ccgcacgcuccgaucggcu

SEQ ID NO: 2541581 - RNA, 19 nt, Artificial Sequence
  Description of Artificial Sequence: Synthetic oligonucleotide
ccguccgagcgcccuacau

SEQ ID NO: 2541582 - RNA, 19 nt, Artificial Sequence
  Description of Artificial Sequence: Synthetic oligonucleotide
cccucccgcgcgggauccc

SEQ ID NO: 2541583 - RNA, 19 nt, Artificial Sequence
  Description of Artificial Sequence: Synthetic oligonucleotide
cggcugcgcgccguccgag

SEQ ID NO: 2541584 - RNA, 19 nt, Artificial Sequence
  Description of Artificial Sequence: Synthetic oligonucleotide
gcgccguccgagcgcccua

SEQ ID NO: 2541585 - RNA, 19 nt, Artificial Sequence
  Description of Artificial Sequence: Synthetic oligonucleotide
cgcgcgggaucccgaccga

SEQ ID NO: 2541586 - RNA, 19 nt, Artificial Sequence
  Description of Artificial Sequence: Synthetic oligonucleotide
cgaggcccgcgacgccguc

SEQ ID NO: 2541587 - RNA, 19 nt, Artificial Sequence
  Description of Artificial Sequence: Synthetic oligonucleotide
gcccacggcugcgcgccgu

SEQ ID NO: 2541588 - RNA, 19 nt, Artificial Sequence
  Description of Artificial Sequence: Synthetic oligonucleotide
cgguccagucauagcgcuu

SEQ ID NO: 2541589 - RNA, 19 nt, Artificial Sequence
  Description of Artificial Sequence: Synthetic oligonucleotide
cgccgccccaaaggagaca

SEQ ID NO: 2541590 - RNA, 19 nt, Artificial Sequence
  Description of Artificial Sequence: Synthetic oligonucleotide
gcgcgccguccgagcgccc

SEQ ID NO: 2541591 - RNA, 19 nt, Artificial Sequence
  Description of Artificial Sequence: Synthetic oligonucleotide
cgacgccguccgggguagc

SEQ ID NO: 2541592 - RNA, 19 nt, Artificial Sequence
  Description of Artificial Sequence: Synthetic oligonucleotide
ggccggcggaggccgcguu

SEQ ID NO: 2541593 - RNA, 19 nt, Artificial Sequence
  Description of Artificial Sequence: Synthetic oligonucleotide
ccgcgacgccguccggggu

SEQ ID NO: 2541594 - RNA, 19 nt, Artificial Sequence
  Description of Artificial Sequence: Synthetic oligonucleotide
gcccagcauuuuggucuuu

SEQ ID NO: 2541595 - RNA, 19 nt, Artificial Sequence
  Description of Artificial Sequence: Synthetic oligonucleotide
aacugaacuguaucaaggc

SEQ ID NO: 2541596 - RNA, 19 nt, Artificial Sequence
  Description of Artificial Sequence: Synthetic oligonucleotide
ugauugacaucacagaccc

SEQ ID NO: 2541597 - RNA, 19 nt, Artificial Sequence
  Description of Artificial Sequence: Synthetic oligonucleotide
uaaacgagggcucaguuca

SEQ ID NO: 2541598 - RNA, 19 nt, Artificial Sequence
  Description of Artificial Sequence: Synthetic oligonucleotide
uguacauugacaucagccc

SEQ ID NO: 2541599 - RNA, 19 nt, Artificial Sequence
  Description of Artificial Sequence: Synthetic oligonucleotide
gaugauugacaucacagac

SEQ ID NO: 2541600 - RNA, 19 nt, Artificial Sequence
  Description of Artificial Sequence: Synthetic oligonucleotide
augagugcagaauagccgg

SEQ ID NO: 2541601 - RNA, 19 nt, Artificial Sequence
  Description of Artificial Sequence: Synthetic oligonucleotide
auggccaugacugauggcc

SEQ ID NO: 2541602 - RNA, 19 nt, Artificial Sequence
  Description of Artificial Sequence: Synthetic oligonucleotide
aucacagaccccuguaucc

SEQ ID NO: 2541603 - RNA, 19 nt, Artificial Sequence
  Description of Artificial Sequence: Synthetic oligonucleotide
acaucagugcuguagcccc

SEQ ID NO: 2541604 - RNA, 19 nt, Artificial Sequence
  Description of Artificial Sequence: Synthetic oligonucleotide
aacaugagugcagaauagc

SEQ ID NO: 2541605 - RNA, 19 nt, Artificial Sequence
  Description of Artificial Sequence: Synthetic oligonucleotide
uauucgcuggcacacauca

SEQ ID NO: 2541606 - RNA, 19 nt, Artificial Sequence
  Description of Artificial Sequence: Synthetic oligonucleotide
agcgcuuuugacuggacac

SEQ ID NO: 2541607 - RNA, 19 nt, Artificial Sequence
  Description of Artificial Sequence: Synthetic oligonucleotide
caugagugcagaauagccg

SEQ ID NO: 2541608 - RNA, 19 nt, Artificial Sequence
  Description of Artificial Sequence: Synthetic oligonucleotide
uaucaaggcguccauauuc

SEQ ID NO: 2541609 - RNA, 19 nt, Artificial Sequence
  Description of Artificial Sequence: Synthetic oligonucleotide
acugaacuguaucaaggcg

SEQ ID NO: 2541610 - RNA, 19 nt, Artificial Sequence
  Description of Artificial Sequence: Synthetic oligonucleotide
aguaguaggcuggaaaugg

SEQ ID NO: 2541611 - RNA, 19 nt, Artificial Sequence
  Description of Artificial Sequence: Synthetic oligonucleotide
auucccaugagacacgcug

SEQ ID NO: 2541612 - RNA, 19 nt, Artificial Sequence
  Description of Artificial Sequence: Synthetic oligonucleotide
aaggcguccauauucgcug

SEQ ID NO: 2541613 - RNA, 19 nt, Artificial Sequence
  Description of Artificial Sequence: Synthetic oligonucleotide
augauugacaucacagacc

SEQ ID NO: 2541614 - RNA, 19 nt, Artificial Sequence
  Description of Artificial Sequence: Synthetic oligonucleotide
agugcagccaacaugagug

SEQ ID NO: 2541615 - RNA, 19 nt, Artificial Sequence
  Description of Artificial Sequence: Synthetic oligonucleotide
ugauggccaugacugaugg

SEQ ID NO: 2541616 - RNA, 19 nt, Artificial Sequence
  Description of Artificial Sequence: Synthetic oligonucleotide
aaagucucuugaccacagc

SEQ ID NO: 2541617 - RNA, 19 nt, Artificial Sequence
  Description of Artificial Sequence: Synthetic oligonucleotide
uuugacuggacacucgaaa

SEQ ID NO: 2541618 - RNA, 19 nt, Artificial Sequence
  Description of Artificial Sequence: Synthetic oligonucleotide
ugaugauugacaucacaga

SEQ ID NO: 2541619 - RNA, 19 nt, Artificial Sequence
  Description of Artificial Sequence: Synthetic oligonucleotide
guucugaugauugacauca

SEQ ID NO: 2541620 - RNA, 19 nt, Artificial Sequence
  Description of Artificial Sequence: Synthetic oligonucleotide
uccuguugagccuccagcg

SEQ ID NO: 2541621 - RNA, 19 nt, Artificial Sequence
  Description of Artificial Sequence: Synthetic oligonucleotide
auugacaucacagaccccu

SEQ ID NO: 2541622 - RNA, 19 nt, Artificial Sequence
  Description of Artificial Sequence: Synthetic oligonucleotide
uuccauugccaucagccag

SEQ ID NO: 2541623 - RNA, 19 nt, Artificial Sequence
  Description of Artificial Sequence: Synthetic oligonucleotide
aauagccggcucuaguucu

SEQ ID NO: 2541624 - RNA, 19 nt, Artificial Sequence
  Description of Artificial Sequence: Synthetic oligonucleotide
ugacugauggccagcauga

SEQ ID NO: 2541625 - RNA, 19 nt, Artificial Sequence
  Description of Artificial Sequence: Synthetic oligonucleotide
uguaucaaggcguccauau

SEQ ID NO: 2541626 - RNA, 19 nt, Artificial Sequence
  Description of Artificial Sequence: Synthetic oligonucleotide
gauucagagcaaugcaggc

SEQ ID NO: 2541627 - RNA, 19 nt, Artificial Sequence
  Description of Artificial Sequence: Synthetic oligonucleotide
uguagccccaucugcaucc

SEQ ID NO: 2541628 - RNA, 19 nt, Artificial Sequence
  Description of Artificial Sequence: Synthetic oligonucleotide
cuggaaauggccagauucc

SEQ ID NO: 2541629 - RNA, 19 nt, Artificial Sequence
  Description of Artificial Sequence: Synthetic oligonucleotide
cucgaaaccacuccugggc

SEQ ID NO: 2541630 - RNA, 19 nt, Artificial Sequence
  Description of Artificial Sequence: Synthetic oligonucleotide
cugaaaagucucuugacca

SEQ ID NO: 2541631 - RNA, 19 nt, Artificial Sequence
  Description of Artificial Sequence: Synthetic oligonucleotide
cugagagcgcuuuugacug

SEQ ID NO: 2541632 - RNA, 19 nt, Artificial Sequence
  Description of Artificial Sequence: Synthetic oligonucleotide
ugcaggcuucccuuaaacg

SEQ ID NO: 2541633 - RNA, 19 nt, Artificial Sequence
  Description of Artificial Sequence: Synthetic oligonucleotide
uugucuagggaugguaagg

SEQ ID NO: 2541634 - RNA, 19 nt, Artificial Sequence
  Description of Artificial Sequence: Synthetic oligonucleotide
guacauugacaucagcccc

SEQ ID NO: 2541635 - RNA, 19 nt, Artificial Sequence
  Description of Artificial Sequence: Synthetic oligonucleotide
uucgcuggcacacaucagu

SEQ ID NO: 2541636 - RNA, 19 nt, Artificial Sequence
  Description of Artificial Sequence: Synthetic oligonucleotide
auugucuagggaugguaag

SEQ ID NO: 2541637 - RNA, 19 nt, Artificial Sequence
  Description of Artificial Sequence: Synthetic oligonucleotide
ucuaguucugaugauugac

SEQ ID NO: 2541638 - RNA, 19 nt, Artificial Sequence
  Description of Artificial Sequence: Synthetic oligonucleotide
ugcccuacagaagugagug

SEQ ID NO: 2541639 - RNA, 19 nt, Artificial Sequence
  Description of Artificial Sequence: Synthetic oligonucleotide
ugaaaagucucuugaccac

SEQ ID NO: 2541640 - RNA, 19 nt, Artificial Sequence
  Description of Artificial Sequence: Synthetic oligonucleotide
ucacccaugcugaaaaguc

SEQ ID NO: 2541641 - RNA, 19 nt, Artificial Sequence
  Description of Artificial Sequence: Synthetic oligonucleotide
uccaguaguaggcuggaaa

SEQ ID NO: 2541642 - RNA, 19 nt, Artificial Sequence
  Description of Artificial Sequence: Synthetic oligonucleotide
uucagagcaaugcaggcuu

SEQ ID NO: 2541643 - RNA, 19 nt, Artificial Sequence
  Description of Artificial Sequence: Synthetic oligonucleotide
uguucccucauugucuagg

SEQ ID NO: 2541644 - RNA, 19 nt, Artificial Sequence
  Description of Artificial Sequence: Synthetic oligonucleotide
ucucuggugacuccacgag

SEQ ID NO: 2541645 - RNA, 19 nt, Artificial Sequence
  Description of Artificial Sequence: Synthetic oligonucleotide
ugaacuguaucaaggcguc

SEQ ID NO: 2541646 - RNA, 19 nt, Artificial Sequence
  Description of Artificial Sequence: Synthetic oligonucleotide
aguucugaugauugacauc

SEQ ID NO: 2541647 - RNA, 19 nt, Artificial Sequence
  Description of Artificial Sequence: Synthetic oligonucleotide
aacuguaucaaggcgucca

SEQ ID NO: 2541648 - RNA, 19 nt, Artificial Sequence
  Description of Artificial Sequence: Synthetic oligonucleotide
uguauccaguaguaggcug

SEQ ID NO: 2541649 - RNA, 19 nt, Artificial Sequence
  Description of Artificial Sequence: Synthetic oligonucleotide
augguaaggucacagccug

SEQ ID NO: 2541650 - RNA, 19 nt, Artificial Sequence
  Description of Artificial Sequence: Synthetic oligonucleotide
cacaggcucagccugagag

SEQ ID NO: 2541651 - RNA, 19 nt, Artificial Sequence
  Description of Artificial Sequence: Synthetic oligonucleotide
uacagaagugagugcagcc

SEQ ID NO: 2541652 - RNA, 19 nt, Artificial Sequence
  Description of Artificial Sequence: Synthetic oligonucleotide
ucagcugccgauucagagc

SEQ ID NO: 2541653 - RNA, 19 nt, Artificial Sequence
  Description of Artificial Sequence: Synthetic oligonucleotide
cagguucaccacaugagcc

SEQ ID NO: 2541654 - RNA, 19 nt, Artificial Sequence
  Description of Artificial Sequence: Synthetic oligonucleotide
ugggccaacagcaacugaa

SEQ ID NO: 2541655 - RNA, 19 nt, Artificial Sequence
  Description of Artificial Sequence: Synthetic oligonucleotide
aagucaggugggcauggag

SEQ ID NO: 2541656 - RNA, 19 nt, Artificial Sequence
  Description of Artificial Sequence: Synthetic oligonucleotide
acgaggccugaucagcugc

SEQ ID NO: 2541657 - RNA, 19 nt, Artificial Sequence
  Description of Artificial Sequence: Synthetic oligonucleotide
caugcugaaaagucucuug

SEQ ID NO: 2541658 - RNA, 19 nt, Artificial Sequence
  Description of Artificial Sequence: Synthetic oligonucleotide
uuuccauugccaucagcca

SEQ ID NO: 2541659 - RNA, 19 nt, Artificial Sequence
  Description of Artificial Sequence: Synthetic oligonucleotide
augcugaaaagucucuuga

SEQ ID NO: 2541660 - RNA, 19 nt, Artificial Sequence
  Description of Artificial Sequence: Synthetic oligonucleotide
cacacaucagugcuguagc

SEQ ID NO: 2541661 - RNA, 19 nt, Artificial Sequence
  Description of Artificial Sequence: Synthetic oligonucleotide
guauccaguaguaggcugg

SEQ ID NO: 2541662 - RNA, 19 nt, Artificial Sequence
  Description of Artificial Sequence: Synthetic oligonucleotide
ucccucauugucuagggau

SEQ ID NO: 2541663 - RNA, 19 nt, Artificial Sequence
  Description of Artificial Sequence: Synthetic oligonucleotide
caacaugagugcagaauag

SEQ ID NO: 2541664 - RNA, 19 nt, Artificial Sequence
  Description of Artificial Sequence: Synthetic oligonucleotide
ucugaagucaggugggcau

SEQ ID NO: 2541665 - RNA, 19 nt, Artificial Sequence
  Description of Artificial Sequence: Synthetic oligonucleotide
augcaggcuucccuuaaac

SEQ ID NO: 2541666 - RNA, 19 nt, Artificial Sequence
  Description of Artificial Sequence: Synthetic oligonucleotide
guccugauggccaugacug

SEQ ID NO: 2541667 - RNA, 19 nt, Artificial Sequence
  Description of Artificial Sequence: Synthetic oligonucleotide
ucugcauccuguacauuga

SEQ ID NO: 2541668 - RNA, 19 nt, Artificial Sequence
  Description of Artificial Sequence: Synthetic oligonucleotide
caugagacacgcuguaaug

SEQ ID NO: 2541669 - RNA, 19 nt, Artificial Sequence
  Description of Artificial Sequence: Synthetic oligonucleotide
gcugaaaagucucuugacc

SEQ ID NO: 2541670 - RNA, 19 nt, Artificial Sequence
  Description of Artificial Sequence: Synthetic oligonucleotide
uaguucugaugauugacau

SEQ ID NO: 2541671 - RNA, 19 nt, Artificial Sequence
  Description of Artificial Sequence: Synthetic oligonucleotide
acaucacccaugcugaaaa

SEQ ID NO: 2541672 - RNA, 19 nt, Artificial Sequence
  Description of Artificial Sequence: Synthetic oligonucleotide
acucgaaaccacuccuggg

SEQ ID NO: 2541673 - RNA, 19 nt, Artificial Sequence
  Description of Artificial Sequence: Synthetic oligonucleotide
ugcgcugccaucucuggug

SEQ ID NO: 2541674 - RNA, 19 nt, Artificial Sequence
  Description of Artificial Sequence: Synthetic oligonucleotide
agaauagccggcucuaguu

SEQ ID NO: 2541675 - RNA, 19 nt, Artificial Sequence
  Description of Artificial Sequence: Synthetic oligonucleotide
uccauauucgcuggcacac

SEQ ID NO: 2541676 - RNA, 19 nt, Artificial Sequence
  Description of Artificial Sequence: Synthetic oligonucleotide
gugggcauggagcagugcc

SEQ ID NO: 2541677 - RNA, 19 nt, Artificial Sequence
  Description of Artificial Sequence: Synthetic oligonucleotide
ugcugaaaagucucuugac

SEQ ID NO: 2541678 - RNA, 19 nt, Artificial Sequence
  Description of Artificial Sequence: Synthetic oligonucleotide
cacucgaaaccacuccugg

SEQ ID NO: 2541679 - RNA, 19 nt, Artificial Sequence
  Description of Artificial Sequence: Synthetic oligonucleotide
agugcagaauagccggcuc

SEQ ID NO: 2541680 - RNA, 19 nt, Artificial Sequence
  Description of Artificial Sequence: Synthetic oligonucleotide
ugccgauucagagcaaugc

SEQ ID NO: 2541681 - RNA, 19 nt, Artificial Sequence
  Description of Artificial Sequence: Synthetic oligonucleotide
ucaguucacaccucucuuc

SEQ ID NO: 2541682 - RNA, 19 nt, Artificial Sequence
  Description of Artificial Sequence: Synthetic oligonucleotide
guucccucauugucuaggg

SEQ ID NO: 2541683 - RNA, 19 nt, Artificial Sequence
  Description of Artificial Sequence: Synthetic oligonucleotide
aaauggccagauucccaug

SEQ ID NO: 2541684 - RNA, 19 nt, Artificial Sequence
  Description of Artificial Sequence: Synthetic oligonucleotide
ucgaaaccacuccugggcu

SEQ ID NO: 2541685 - RNA, 19 nt, Artificial Sequence
  Description of Artificial Sequence: Synthetic oligonucleotide
ccuguauccaguaguaggc

SEQ ID NO: 2541686 - RNA, 19 nt, Artificial Sequence
  Description of Artificial Sequence: Synthetic oligonucleotide
guaggcuggaaauggccag

SEQ ID NO: 2541687 - RNA, 19 nt, Artificial Sequence
  Description of Artificial Sequence: Synthetic oligonucleotide
agagcaaugcaggcuuccc

SEQ ID NO: 2541688 - RNA, 19 nt, Artificial Sequence
  Description of Artificial Sequence: Synthetic oligonucleotide
uucccuuaaacgagggcuc

SEQ ID NO: 2541689 - RNA, 19 nt, Artificial Sequence
  Description of Artificial Sequence: Synthetic oligonucleotide
gaauagccggcucuaguuc

SEQ ID NO: 2541690 - RNA, 19 nt, Artificial Sequence
  Description of Artificial Sequence: Synthetic oligonucleotide
ugaagucaggugggcaugg

SEQ ID NO: 2541691 - RNA, 19 nt, Artificial Sequence
  Description of Artificial Sequence: Synthetic oligonucleotide
agguucaccacaugagcca

SEQ ID NO: 2541692 - RNA, 19 nt, Artificial Sequence
  Description of Artificial Sequence: Synthetic oligonucleotide
acgagggcucaguucacac

SEQ ID NO: 2541693 - RNA, 19 nt, Artificial Sequence
  Description of Artificial Sequence: Synthetic oligonucleotide
uaaugcagggccguguuuc

SEQ ID NO: 2541694 - RNA, 19 nt, Artificial Sequence
  Description of Artificial Sequence: Synthetic oligonucleotide
acuccacgaggccugauca

SEQ ID NO: 2541695 - RNA, 19 nt, Artificial Sequence
  Description of Artificial Sequence: Synthetic oligonucleotide
uggaaauggccagauuccc

SEQ ID NO: 2541696 - RNA, 19 nt, Artificial Sequence
  Description of Artificial Sequence: Synthetic oligonucleotide
uccuguacauugacaucag

SEQ ID NO: 2541697 - RNA, 19 nt, Artificial Sequence
  Description of Artificial Sequence: Synthetic oligonucleotide
ugggcuacaaggcgugcug

SEQ ID NO: 2541698 - RNA, 19 nt, Artificial Sequence
  Description of Artificial Sequence: Synthetic oligonucleotide
ugucuagggaugguaaggu

SEQ ID NO: 2541699 - RNA, 19 nt, Artificial Sequence
  Description of Artificial Sequence: Synthetic oligonucleotide
agugccgcaaccucauccu

SEQ ID NO: 2541700 - RNA, 19 nt, Artificial Sequence
  Description of Artificial Sequence: Synthetic oligonucleotide
uguaaugcagggccguguu

SEQ ID NO: 2541701 - RNA, 19 nt, Artificial Sequence
  Description of Artificial Sequence: Synthetic oligonucleotide
uggacacucgaaaccacuc

SEQ ID NO: 2541702 - RNA, 19 nt, Artificial Sequence
  Description of Artificial Sequence: Synthetic oligonucleotide
agccccacguuccagcaag

SEQ ID NO: 2541703 - RNA, 19 nt, Artificial Sequence
  Description of Artificial Sequence: Synthetic oligonucleotide
ugagugcagaauagccggc

SEQ ID NO: 2541704 - RNA, 19 nt, Artificial Sequence
  Description of Artificial Sequence: Synthetic oligonucleotide
uuuugacuggacacucgaa

SEQ ID NO: 2541705 - RNA, 19 nt, Artificial Sequence
  Description of Artificial Sequence: Synthetic oligonucleotide
uucccaugagacacgcugu

SEQ ID NO: 2541706 - RNA, 19 nt, Artificial Sequence
  Description of Artificial Sequence: Synthetic oligonucleotide
cuagccuuggcauugacau

SEQ ID NO: 2541707 - RNA, 19 nt, Artificial Sequence
  Description of Artificial Sequence: Synthetic oligonucleotide
ucacaccucucuucugucc

SEQ ID NO: 2541708 - RNA, 19 nt, Artificial Sequence
  Description of Artificial Sequence: Synthetic oligonucleotide
cccuguauccaguaguagg

SEQ ID NO: 2541709 - RNA, 19 nt, Artificial Sequence
  Description of Artificial Sequence: Synthetic oligonucleotide
ucgcuggcacacaucagug

SEQ ID NO: 2541710 - RNA, 19 nt, Artificial Sequence
  Description of Artificial Sequence: Synthetic oligonucleotide
aaugcaggcuucccuuaaa

SEQ ID NO: 2541711 - RNA, 19 nt, Artificial Sequence
  Description of Artificial Sequence: Synthetic oligonucleotide
acuuguucccucauugucu

SEQ ID NO: 2541712 - RNA, 19 nt, Artificial Sequence
  Description of Artificial Sequence: Synthetic oligonucleotide
uguccagucuggcuagccu

SEQ ID NO: 2541713 - RNA, 19 nt, Artificial Sequence
  Description of Artificial Sequence: Synthetic oligonucleotide
agggaugguaaggucacag

SEQ ID NO: 2541714 - RNA, 19 nt, Artificial Sequence
  Description of Artificial Sequence: Synthetic oligonucleotide
uccagcgcaauggccaggg

SEQ ID NO: 2541715 - RNA, 19 nt, Artificial Sequence
  Description of Artificial Sequence: Synthetic oligonucleotide
aucucuggugacuccacga

SEQ ID NO: 2541716 - RNA, 19 nt, Artificial Sequence
  Description of Artificial Sequence: Synthetic oligonucleotide
cagugccgcaaccucaucc

SEQ ID NO: 2541717 - RNA, 19 nt, Artificial Sequence
  Description of Artificial Sequence: Synthetic oligonucleotide
cuacagaagugagugcagc

SEQ ID NO: 2541718 - RNA, 19 nt, Artificial Sequence
  Description of Artificial Sequence: Synthetic oligonucleotide
cacaucagugcuguagccc

SEQ ID NO: 2541719 - RNA, 19 nt, Artificial Sequence
  Description of Artificial Sequence: Synthetic oligonucleotide
uucacuccucgaagcaccc

SEQ ID NO: 2541720 - RNA, 19 nt, Artificial Sequence
  Description of Artificial Sequence: Synthetic oligonucleotide
gccaacagcaacugaacug

SEQ ID NO: 2541721 - RNA, 19 nt, Artificial Sequence
  Description of Artificial Sequence: Synthetic oligonucleotide
ugacaucacagaccccugu

SEQ ID NO: 2541722 - RNA, 19 nt, Artificial Sequence
  Description of Artificial Sequence: Synthetic oligonucleotide
uugacaucacagaccccug

SEQ ID NO: 2541723 - RNA, 19 nt, Artificial Sequence
  Description of Artificial Sequence: Synthetic oligonucleotide
uggccagggcacuuguucc

SEQ ID NO: 2541724 - RNA, 19 nt, Artificial Sequence
  Description of Artificial Sequence: Synthetic oligonucleotide
cucuggugacuccacgagg

SEQ ID NO: 2541725 - RNA, 19 nt, Artificial Sequence
  Description of Artificial Sequence: Synthetic oligonucleotide
ugguaaggucacagccugg

SEQ ID NO: 2541726 - RNA, 19 nt, Artificial Sequence
  Description of Artificial Sequence: Synthetic oligonucleotide
cuuuugacuggacacucga

SEQ ID NO: 2541727 - RNA, 19 nt, Artificial Sequence
  Description of Artificial Sequence: Synthetic oligonucleotide
auucagagcaaugcaggcu

SEQ ID NO: 2541728 - RNA, 19 nt, Artificial Sequence
  Description of Artificial Sequence: Synthetic oligonucleotide
ugagagcgcuuuugacugg

SEQ ID NO: 2541729 - RNA, 19 nt, Artificial Sequence
  Description of Artificial Sequence: Synthetic oligonucleotide
caucacagaccccuguauc

SEQ ID NO: 2541730 - RNA, 19 nt, Artificial Sequence
  Description of Artificial Sequence: Synthetic oligonucleotide
uggccagauucccaugaga

SEQ ID NO: 2541731 - RNA, 19 nt, Artificial Sequence
  Description of Artificial Sequence: Synthetic oligonucleotide
ucaaggcguccauauucgc

SEQ ID NO: 2541732 - RNA, 19 nt, Artificial Sequence
  Description of Artificial Sequence: Synthetic oligonucleotide
uccacgaggccugaucagc

SEQ ID NO: 2541733 - RNA, 19 nt, Artificial Sequence
  Description of Artificial Sequence: Synthetic oligonucleotide
ucuucacuccucgaagcac

SEQ ID NO: 2541734 - RNA, 19 nt, Artificial Sequence
  Description of Artificial Sequence: Synthetic oligonucleotide
cugauggccaugacugaug

SEQ ID NO: 2541735 - RNA, 19 nt, Artificial Sequence
  Description of Artificial Sequence: Synthetic oligonucleotide
gagggcucaguucacaccu

SEQ ID NO: 2541736 - RNA, 19 nt, Artificial Sequence
  Description of Artificial Sequence: Synthetic oligonucleotide
ucacagaccccuguaucca

SEQ ID NO: 2541737 - RNA, 19 nt, Artificial Sequence
  Description of Artificial Sequence: Synthetic oligonucleotide
gucaggugggcauggagca

SEQ ID NO: 2541738 - RNA, 19 nt, Artificial Sequence
  Description of Artificial Sequence: Synthetic oligonucleotide
caucucuggugacuccacg

SEQ ID NO: 2541739 - RNA, 19 nt, Artificial Sequence
  Description of Artificial Sequence: Synthetic oligonucleotide
cgauucagagcaaugcagg

SEQ ID NO: 2541740 - RNA, 19 nt, Artificial Sequence
  Description of Artificial Sequence: Synthetic oligonucleotide
acaucacagaccccuguau

SEQ ID NO: 2541741 - RNA, 19 nt, Artificial Sequence
  Description of Artificial Sequence: Synthetic oligonucleotide
uggccaugacugauggcca

SEQ ID NO: 2541742 - RNA, 19 nt, Artificial Sequence
  Description of Artificial Sequence: Synthetic oligonucleotide
cauugucuagggaugguaa

SEQ ID NO: 2541743 - RNA, 19 nt, Artificial Sequence
  Description of Artificial Sequence: Synthetic oligonucleotide
aacagcaacugaacuguau

SEQ ID NO: 2541744 - RNA, 19 nt, Artificial Sequence
  Description of Artificial Sequence: Synthetic oligonucleotide
ucaggccccaggcucuuca

SEQ ID NO: 2541745 - RNA, 19 nt, Artificial Sequence
  Description of Artificial Sequence: Synthetic oligonucleotide
aucacccaugcugaaaagu

SEQ ID NO: 2541746 - RNA, 19 nt, Artificial Sequence
  Description of Artificial Sequence: Synthetic oligonucleotide
accucucuucugucccugc

SEQ ID NO: 2541747 - RNA, 19 nt, Artificial Sequence
  Description of Artificial Sequence: Synthetic oligonucleotide
ucauugucuagggauggua

SEQ ID NO: 2541748 - RNA, 19 nt, Artificial Sequence
  Description of Artificial Sequence: Synthetic oligonucleotide
uguugagccuccagcgcaa

SEQ ID NO: 2541749 - RNA, 19 nt, Artificial Sequence
  Description of Artificial Sequence: Synthetic oligonucleotide
gacacucgaaaccacuccu

SEQ ID NO: 2541750 - RNA, 19 nt, Artificial Sequence
  Description of Artificial Sequence: Synthetic oligonucleotide
cauccuguacauugacauc

SEQ ID NO: 2541751 - RNA, 19 nt, Artificial Sequence
  Description of Artificial Sequence: Synthetic oligonucleotide
ccgauucagagcaaugcag

SEQ ID NO: 2541752 - RNA, 19 nt, Artificial Sequence
  Description of Artificial Sequence: Synthetic oligonucleotide
cagcaaggcagccaccaug

SEQ ID NO: 2541753 - RNA, 19 nt, Artificial Sequence
  Description of Artificial Sequence: Synthetic oligonucleotide
gugcuguagccccaucugc

SEQ ID NO: 2541754 - RNA, 19 nt, Artificial Sequence
  Description of Artificial Sequence: Synthetic oligonucleotide
guaguaggcuggaaauggc

SEQ ID NO: 2541755 - RNA, 19 nt, Artificial Sequence
  Description of Artificial Sequence: Synthetic oligonucleotide
aguucacaccucucuucug

SEQ ID NO: 2541756 - RNA, 19 nt, Artificial Sequence
  Description of Artificial Sequence: Synthetic oligonucleotide
agcaaggcagccaccaugu

SEQ ID NO: 2541757 - RNA, 19 nt, Artificial Sequence
  Description of Artificial Sequence: Synthetic oligonucleotide
cuucccuuaaacgagggcu

SEQ ID NO: 2541758 - RNA, 19 nt, Artificial Sequence
  Description of Artificial Sequence: Synthetic oligonucleotide
aggcguccauauucgcugg

SEQ ID NO: 2541759 - RNA, 19 nt, Artificial Sequence
  Description of Artificial Sequence: Synthetic oligonucleotide
gaugguaaggucacagccu

SEQ ID NO: 2541760 - RNA, 19 nt, Artificial Sequence
  Description of Artificial Sequence: Synthetic oligonucleotide
aaacgagggcucaguucac

SEQ ID NO: 2541761 - RNA, 19 nt, Artificial Sequence
  Description of Artificial Sequence: Synthetic oligonucleotide
ggcucuucacuccucgaag

SEQ ID NO: 2541762 - RNA, 19 nt, Artificial Sequence
  Description of Artificial Sequence: Synthetic oligonucleotide
gguaaggucacagccuggc

SEQ ID NO: 2541763 - RNA, 19 nt, Artificial Sequence
  Description of Artificial Sequence: Synthetic oligonucleotide
acuguaucaaggcguccau

SEQ ID NO: 2541764 - RNA, 19 nt, Artificial Sequence
  Description of Artificial Sequence: Synthetic oligonucleotide
ggacacucgaaaccacucc

SEQ ID NO: 2541765 - RNA, 19 nt, Artificial Sequence
  Description of Artificial Sequence: Synthetic oligonucleotide
uucacaccucucuucuguc

SEQ ID NO: 2541766 - RNA, 19 nt, Artificial Sequence
  Description of Artificial Sequence: Synthetic oligonucleotide
gacuccacgaggccugauc

SEQ ID NO: 2541767 - RNA, 19 nt, Artificial Sequence
  Description of Artificial Sequence: Synthetic oligonucleotide
uauccaguaguaggcugga

SEQ ID NO: 2541768 - RNA, 19 nt, Artificial Sequence
  Description of Artificial Sequence: Synthetic oligonucleotide
cacguuccagcaaggcagc

SEQ ID NO: 2541769 - RNA, 19 nt, Artificial Sequence
  Description of Artificial Sequence: Synthetic oligonucleotide
gauggccaugacugauggc

SEQ ID NO: 2541770 - RNA, 19 nt, Artificial Sequence
  Description of Artificial Sequence: Synthetic oligonucleotide
caucacccaugcugaaaag

SEQ ID NO: 2541771 - RNA, 19 nt, Artificial Sequence
  Description of Artificial Sequence: Synthetic oligonucleotide
gagcgcuuuugacuggaca

SEQ ID NO: 2541772 - RNA, 19 nt, Artificial Sequence
  Description of Artificial Sequence: Synthetic oligonucleotide
gcacacaucagugcuguag

SEQ ID NO: 2541773 - RNA, 19 nt, Artificial Sequence
  Description of Artificial Sequence: Synthetic oligonucleotide
agaccccuguauccaguag

SEQ ID NO: 2541774 - RNA, 19 nt, Artificial Sequence
  Description of Artificial Sequence: Synthetic oligonucleotide
accacaugagccagcagcu

SEQ ID NO: 2541775 - RNA, 19 nt, Artificial Sequence
  Description of Artificial Sequence: Synthetic oligonucleotide
guccauauucgcuggcaca

SEQ ID NO: 2541776 - RNA, 19 nt, Artificial Sequence
  Description of Artificial Sequence: Synthetic oligonucleotide
acaaggcgugcugcgcugc

SEQ ID NO: 2541777 - RNA, 19 nt, Artificial Sequence
  Description of Artificial Sequence: Synthetic oligonucleotide
aacgagggcucaguucaca

SEQ ID NO: 2541778 - RNA, 19 nt, Artificial Sequence
  Description of Artificial Sequence: Synthetic oligonucleotide
gcucuaguucugaugauug

SEQ ID NO: 2541779 - RNA, 19 nt, Artificial Sequence
  Description of Artificial Sequence: Synthetic oligonucleotide
cuguugagccuccagcgca

SEQ ID NO: 2541780 - RNA, 19 nt, Artificial Sequence
  Description of Artificial Sequence: Synthetic oligonucleotide
caguaguaggcuggaaaug

SEQ ID NO: 2541781 - RNA, 19 nt, Artificial Sequence
  Description of Artificial Sequence: Synthetic oligonucleotide
cauggagcagugccgcaac

SEQ ID NO: 2541782 - RNA, 19 nt, Artificial Sequence
  Description of Artificial Sequence: Synthetic oligonucleotide
cuugaccacagccaugucu

SEQ ID NO: 2541783 - RNA, 19 nt, Artificial Sequence
  Description of Artificial Sequence: Synthetic oligonucleotide
gagccuccagcgcaauggc

SEQ ID NO: 2541784 - RNA, 19 nt, Artificial Sequence
  Description of Artificial Sequence: Synthetic oligonucleotide
gacaucacagaccccugua

SEQ ID NO: 2541785 - RNA, 19 nt, Artificial Sequence
  Description of Artificial Sequence: Synthetic oligonucleotide
agccugagagcgcuuuuga

SEQ ID NO: 2541786 - RNA, 19 nt, Artificial Sequence
  Description of Artificial Sequence: Synthetic oligonucleotide
caccauguccugauggcca

SEQ ID NO: 2541787 - RNA, 19 nt, Artificial Sequence
  Description of Artificial Sequence: Synthetic oligonucleotide
guucacaccucucuucugu

SEQ ID NO: 2541788 - RNA, 19 nt, Artificial Sequence
  Description of Artificial Sequence: Synthetic oligonucleotide
cacagaccccuguauccag

SEQ ID NO: 2541789 - RNA, 19 nt, Artificial Sequence
  Description of Artificial Sequence: Synthetic oligonucleotide
gaagcaccccugccacagg

SEQ ID NO: 2541790 - RNA, 19 nt, Artificial Sequence
  Description of Artificial Sequence: Synthetic oligonucleotide
auauucgcuggcacacauc

SEQ ID NO: 2541791 - RNA, 19 nt, Artificial Sequence
  Description of Artificial Sequence: Synthetic oligonucleotide
ucccaugagacacgcugua

SEQ ID NO: 2541792 - RNA, 19 nt, Artificial Sequence
  Description of Artificial Sequence: Synthetic oligonucleotide
ggccagauucccaugagac

SEQ ID NO: 2541793 - RNA, 19 nt, Artificial Sequence
  Description of Artificial Sequence: Synthetic oligonucleotide
gcucuucacuccucgaagc

SEQ ID NO: 2541794 - RNA, 19 nt, Artificial Sequence
  Description of Artificial Sequence: Synthetic oligonucleotide
aggcucuucacuccucgaa

SEQ ID NO: 2541795 - RNA, 19 nt, Artificial Sequence
  Description of Artificial Sequence: Synthetic oligonucleotide
cauccuguugagccuccag

SEQ ID NO: 2541796 - RNA, 19 nt, Artificial Sequence
  Description of Artificial Sequence: Synthetic oligonucleotide
ucagagcaaugcaggcuuc

SEQ ID NO: 2541797 - RNA, 19 nt, Artificial Sequence
  Description of Artificial Sequence: Synthetic oligonucleotide
ggcuacaaggcgugcugcg

SEQ ID NO: 2541798 - RNA, 19 nt, Artificial Sequence
  Description of Artificial Sequence: Synthetic oligonucleotide
accacuccugggcuacaag

SEQ ID NO: 2541799 - RNA, 19 nt, Artificial Sequence
  Description of Artificial Sequence: Synthetic oligonucleotide
cuuguucccucauugucua

SEQ ID NO: 2541800 - RNA, 19 nt, Artificial Sequence
  Description of Artificial Sequence: Synthetic oligonucleotide
uccugcccuacagaaguga

SEQ ID NO: 2541801 - RNA, 19 nt, Artificial Sequence
  Description of Artificial Sequence: Synthetic oligonucleotide
uccugauggccaugacuga

SEQ ID NO: 2541802 - RNA, 19 nt, Artificial Sequence
  Description of Artificial Sequence: Synthetic oligonucleotide
ucccuuaaacgagggcuca

SEQ ID NO: 2541803 - RNA, 19 nt, Artificial Sequence
  Description of Artificial Sequence: Synthetic oligonucleotide
gggaugguaaggucacagc

SEQ ID NO: 2541804 - RNA, 19 nt, Artificial Sequence
  Description of Artificial Sequence: Synthetic oligonucleotide
ggcauugacaucacccaug

SEQ ID NO: 2541805 - RNA, 19 nt, Artificial Sequence
  Description of Artificial Sequence: Synthetic oligonucleotide
gaccccuguauccaguagu

SEQ ID NO: 2541806 - RNA, 19 nt, Artificial Sequence
  Description of Artificial Sequence: Synthetic oligonucleotide
cugcauccuguacauugac

SEQ ID NO: 2541807 - RNA, 19 nt, Artificial Sequence
  Description of Artificial Sequence: Synthetic oligonucleotide
ugcagaauagccggcucua

SEQ ID NO: 2541808 - RNA, 19 nt, Artificial Sequence
  Description of Artificial Sequence: Synthetic oligonucleotide
cucuaguucugaugauuga

SEQ ID NO: 2541809 - RNA, 19 nt, Artificial Sequence
  Description of Artificial Sequence: Synthetic oligonucleotide
aggcuucccuuaaacgagg

SEQ ID NO: 2541810 - RNA, 19 nt, Artificial Sequence
  Description of Artificial Sequence: Synthetic oligonucleotide
gugcagccaacaugagugc

SEQ ID NO: 2541811 - RNA, 19 nt, Artificial Sequence
  Description of Artificial Sequence: Synthetic oligonucleotide
gaacuguaucaaggcgucc

SEQ ID NO: 2541812 - RNA, 19 nt, Artificial Sequence
  Description of Artificial Sequence: Synthetic oligonucleotide
cagagcaaugcaggcuucc

SEQ ID NO: 2541813 - RNA, 19 nt, Artificial Sequence
  Description of Artificial Sequence: Synthetic oligonucleotide
cucuucacuccucgaagca

SEQ ID NO: 2541814 - RNA, 19 nt, Artificial Sequence
  Description of Artificial Sequence: Synthetic oligonucleotide
cugccgauucagagcaaug

SEQ ID NO: 2541815 - RNA, 19 nt, Artificial Sequence
  Description of Artificial Sequence: Synthetic oligonucleotide
gucuagggaugguaagguc

SEQ ID NO: 2541816 - RNA, 19 nt, Artificial Sequence
  Description of Artificial Sequence: Synthetic oligonucleotide
gaggccugaucagcugccg

SEQ ID NO: 2541817 - RNA, 19 nt, Artificial Sequence
  Description of Artificial Sequence: Synthetic oligonucleotide
cugaagucaggugggcaug

SEQ ID NO: 2541818 - RNA, 19 nt, Artificial Sequence
  Description of Artificial Sequence: Synthetic oligonucleotide
cuccacgaggccugaucag

SEQ ID NO: 2541819 - RNA, 19 nt, Artificial Sequence
  Description of Artificial Sequence: Synthetic oligonucleotide
acacucgaaaccacuccug

SEQ ID NO: 2541820 - RNA, 19 nt, Artificial Sequence
  Description of Artificial Sequence: Synthetic oligonucleotide
cagaagugagugcagccaa

SEQ ID NO: 2541821 - RNA, 19 nt, Artificial Sequence
  Description of Artificial Sequence: Synthetic oligonucleotide
gguucaccacaugagccag

SEQ ID NO: 2541822 - RNA, 19 nt, Artificial Sequence
  Description of Artificial Sequence: Synthetic oligonucleotide
ccuacagaagugagugcag

SEQ ID NO: 2541823 - RNA, 19 nt, Artificial Sequence
  Description of Artificial Sequence: Synthetic oligonucleotide
gccagguucaccacaugag

SEQ ID NO: 2541824 - RNA, 19 nt, Artificial Sequence
  Description of Artificial Sequence: Synthetic oligonucleotide
caaccucauccuguugagc

SEQ ID NO: 2541825 - RNA, 19 nt, Artificial Sequence
  Description of Artificial Sequence: Synthetic oligonucleotide
gauugacaucacagacccc

SEQ ID NO: 2541826 - RNA, 19 nt, Artificial Sequence
  Description of Artificial Sequence: Synthetic oligonucleotide
gccaccauguccugauggc

SEQ ID NO: 2541827 - RNA, 19 nt, Artificial Sequence
  Description of Artificial Sequence: Synthetic oligonucleotide
ugacaucacccaugcugaa

SEQ ID NO: 2541828 - RNA, 19 nt, Artificial Sequence
  Description of Artificial Sequence: Synthetic oligonucleotide
acaccucucuucugucccu

SEQ ID NO: 2541829 - RNA, 19 nt, Artificial Sequence
  Description of Artificial Sequence: Synthetic oligonucleotide
gcuuuugacuggacacucg

SEQ ID NO: 2541830 - RNA, 19 nt, Artificial Sequence
  Description of Artificial Sequence: Synthetic oligonucleotide
gacaucacccaugcugaaa

SEQ ID NO: 2541831 - RNA, 19 nt, Artificial Sequence
  Description of Artificial Sequence: Synthetic oligonucleotide
gccgauucagagcaaugca

SEQ ID NO: 2541832 - RNA, 19 nt, Artificial Sequence
  Description of Artificial Sequence: Synthetic oligonucleotide
cacgaggccugaucagcug

SEQ ID NO: 2541833 - RNA, 19 nt, Artificial Sequence
  Description of Artificial Sequence: Synthetic oligonucleotide
ggugacuccacgaggccug

SEQ ID NO: 2541834 - RNA, 19 nt, Artificial Sequence
  Description of Artificial Sequence: Synthetic oligonucleotide
cccucauugucuagggaug

SEQ ID NO: 2541835 - RNA, 19 nt, Artificial Sequence
  Description of Artificial Sequence: Synthetic oligonucleotide
gagagcgcuuuugacugga

SEQ ID NO: 2541836 - RNA, 19 nt, Artificial Sequence
  Description of Artificial Sequence: Synthetic oligonucleotide
ucgaagcaccccugccaca

SEQ ID NO: 2541837 - RNA, 19 nt, Artificial Sequence
  Description of Artificial Sequence: Synthetic oligonucleotide
agccccaucugcauccugu

SEQ ID NO: 2541838 - RNA, 19 nt, Artificial Sequence
  Description of Artificial Sequence: Synthetic oligonucleotide
cuccuccugcccuacagaa

SEQ ID NO: 2541839 - RNA, 19 nt, Artificial Sequence
  Description of Artificial Sequence: Synthetic oligonucleotide
acgcuguaaugcagggccg

SEQ ID NO: 2541840 - RNA, 19 nt, Artificial Sequence
  Description of Artificial Sequence: Synthetic oligonucleotide
ucagccugagagcgcuuuu

SEQ ID NO: 2541841 - RNA, 19 nt, Artificial Sequence
  Description of Artificial Sequence: Synthetic oligonucleotide
aggccugaucagcugccga

SEQ ID NO: 2541842 - RNA, 19 nt, Artificial Sequence
  Description of Artificial Sequence: Synthetic oligonucleotide
gucucuugaccacagccau

SEQ ID NO: 2541843 - RNA, 19 nt, Artificial Sequence
  Description of Artificial Sequence: Synthetic oligonucleotide
ccggcucuaguucugauga

SEQ ID NO: 2541844 - RNA, 19 nt, Artificial Sequence
  Description of Artificial Sequence: Synthetic oligonucleotide
ccugcccuacagaagugag

SEQ ID NO: 2541845 - RNA, 19 nt, Artificial Sequence
  Description of Artificial Sequence: Synthetic oligonucleotide
ggagcagugccgcaaccuc

SEQ ID NO: 2541846 - RNA, 19 nt, Artificial Sequence
  Description of Artificial Sequence: Synthetic oligonucleotide
gagcagugccgcaaccuca

SEQ ID NO: 2541847 - RNA, 19 nt, Artificial Sequence
  Description of Artificial Sequence: Synthetic oligonucleotide
caaggcguccauauucgcu

SEQ ID NO: 2541848 - RNA, 19 nt, Artificial Sequence
  Description of Artificial Sequence: Synthetic oligonucleotide
cuguccagucuggcuagcc

SEQ ID NO: 2541849 - RNA, 19 nt, Artificial Sequence
  Description of Artificial Sequence: Synthetic oligonucleotide
agagcgcuuuugacuggac

SEQ ID NO: 2541850 - RNA, 19 nt, Artificial Sequence
  Description of Artificial Sequence: Synthetic oligonucleotide
gcuucccuuaaacgagggc

SEQ ID NO: 2541851 - RNA, 19 nt, Artificial Sequence
  Description of Artificial Sequence: Synthetic oligonucleotide
gagggcugucuguccaguc

SEQ ID NO: 2541852 - RNA, 19 nt, Artificial Sequence
  Description of Artificial Sequence: Synthetic oligonucleotide
ugaccacagccaugucuuc

SEQ ID NO: 2541853 - RNA, 19 nt, Artificial Sequence
  Description of Artificial Sequence: Synthetic oligonucleotide
caaggcgugcugcgcugcc

SEQ ID NO: 2541854 - RNA, 19 nt, Artificial Sequence
  Description of Artificial Sequence: Synthetic oligonucleotide
ucacuccucgaagcacccc

SEQ ID NO: 2541855 - RNA, 19 nt, Artificial Sequence
  Description of Artificial Sequence: Synthetic oligonucleotide
guguuuccauugccaucag

SEQ ID NO: 2541856 - RNA, 19 nt, Artificial Sequence
  Description of Artificial Sequence: Synthetic oligonucleotide
gcugcgcugccaucucugg

SEQ ID NO: 2541857 - RNA, 19 nt, Artificial Sequence
  Description of Artificial Sequence: Synthetic oligonucleotide
cagccugagagcgcuuuug

SEQ ID NO: 2541858 - RNA, 19 nt, Artificial Sequence
  Description of Artificial Sequence: Synthetic oligonucleotide
aaccacuccugggcuacaa

SEQ ID NO: 2541859 - RNA, 19 nt, Artificial Sequence
  Description of Artificial Sequence: Synthetic oligonucleotide
ucuguccagucuggcuagc

SEQ ID NO: 2541860 - RNA, 19 nt, Artificial Sequence
  Description of Artificial Sequence: Synthetic oligonucleotide
gugcagaauagccggcucu

SEQ ID NO: 2541861 - RNA, 19 nt, Artificial Sequence
  Description of Artificial Sequence: Synthetic oligonucleotide
ucagugcuguagccccauc

SEQ ID NO: 2541862 - RNA, 19 nt, Artificial Sequence
  Description of Artificial Sequence: Synthetic oligonucleotide
ccuguacauugacaucagc

SEQ ID NO: 2541863 - RNA, 19 nt, Artificial Sequence
  Description of Artificial Sequence: Synthetic oligonucleotide
auagccggcucuaguucug

SEQ ID NO: 2541864 - RNA, 19 nt, Artificial Sequence
  Description of Artificial Sequence: Synthetic oligonucleotide
gccagauucccaugagaca

SEQ ID NO: 2541865 - RNA, 19 nt, Artificial Sequence
  Description of Artificial Sequence: Synthetic oligonucleotide
cguguuuccauugccauca

SEQ ID NO: 2541866 - RNA, 19 nt, Artificial Sequence
  Description of Artificial Sequence: Synthetic oligonucleotide
cuggacacucgaaaccacu

SEQ ID NO: 2541867 - RNA, 19 nt, Artificial Sequence
  Description of Artificial Sequence: Synthetic oligonucleotide
ggcuucccuuaaacgaggg

SEQ ID NO: 2541868 - RNA, 19 nt, Artificial Sequence
  Description of Artificial Sequence: Synthetic oligonucleotide
gccggcucuaguucugaug

SEQ ID NO: 2541869 - RNA, 19 nt, Artificial Sequence
  Description of Artificial Sequence: Synthetic oligonucleotide
cacccaugcugaaaagucu

SEQ ID NO: 2541870 - RNA, 19 nt, Artificial Sequence
  Description of Artificial Sequence: Synthetic oligonucleotide
gcuacaaggcgugcugcgc

SEQ ID NO: 2541871 - RNA, 19 nt, Artificial Sequence
  Description of Artificial Sequence: Synthetic oligonucleotide
cauauucgcuggcacacau

SEQ ID NO: 2541872 - RNA, 19 nt, Artificial Sequence
  Description of Artificial Sequence: Synthetic oligonucleotide
guucaccacaugagccagc

SEQ ID NO: 2541873 - RNA, 19 nt, Artificial Sequence
  Description of Artificial Sequence: Synthetic oligonucleotide
agccaacaugagugcagaa

SEQ ID NO: 2541874 - RNA, 19 nt, Artificial Sequence
  Description of Artificial Sequence: Synthetic oligonucleotide
cuuaaacgagggcucaguu

SEQ ID NO: 2541875 - RNA, 19 nt, Artificial Sequence
  Description of Artificial Sequence: Synthetic oligonucleotide
ggccccaggcucuucacuc

SEQ ID NO: 2541876 - RNA, 19 nt, Artificial Sequence
  Description of Artificial Sequence: Synthetic oligonucleotide
gugccgcaaccucauccug

SEQ ID NO: 2541877 - RNA, 19 nt, Artificial Sequence
  Description of Artificial Sequence: Synthetic oligonucleotide
aggcgugcugcgcugccau

SEQ ID NO: 2541878 - RNA, 19 nt, Artificial Sequence
  Description of Artificial Sequence: Synthetic oligonucleotide
cccuacagaagugagugca

SEQ ID NO: 2541879 - RNA, 19 nt, Artificial Sequence
  Description of Artificial Sequence: Synthetic oligonucleotide
aaaccacuccugggcuaca

SEQ ID NO: 2541880 - RNA, 19 nt, Artificial Sequence
  Description of Artificial Sequence: Synthetic oligonucleotide
caaugcaggcuucccuuaa

SEQ ID NO: 2541881 - RNA, 19 nt, Artificial Sequence
  Description of Artificial Sequence: Synthetic oligonucleotide
ccugagagcgcuuuugacu

SEQ ID NO: 2541882 - RNA, 19 nt, Artificial Sequence
  Description of Artificial Sequence: Synthetic oligonucleotide
acagaccccuguauccagu

SEQ ID NO: 2541883 - RNA, 19 nt, Artificial Sequence
  Description of Artificial Sequence: Synthetic oligonucleotide
cagggcacuuguucccuca

SEQ ID NO: 2541884 - RNA, 19 nt, Artificial Sequence
  Description of Artificial Sequence: Synthetic oligonucleotide
gcucaguucacaccucucu

SEQ ID NO: 2541885 - RNA, 19 nt, Artificial Sequence
  Description of Artificial Sequence: Synthetic oligonucleotide
gagugcagaauagccggcu

SEQ ID NO: 2541886 - RNA, 19 nt, Artificial Sequence
  Description of Artificial Sequence: Synthetic oligonucleotide
cagaauagccggcucuagu

SEQ ID NO: 2541887 - RNA, 19 nt, Artificial Sequence
  Description of Artificial Sequence: Synthetic oligonucleotide
aauggccagggcacuuguu

SEQ ID NO: 2541888 - RNA, 19 nt, Artificial Sequence
  Description of Artificial Sequence: Synthetic oligonucleotide
uagccggcucuaguucuga

SEQ ID NO: 2541889 - RNA, 19 nt, Artificial Sequence
  Description of Artificial Sequence: Synthetic oligonucleotide
caucagugcuguagcccca

SEQ ID NO: 2541890 - RNA, 19 nt, Artificial Sequence
  Description of Artificial Sequence: Synthetic oligonucleotide
gccugagagcgcuuuugac

SEQ ID NO: 2541891 - RNA, 19 nt, Artificial Sequence
  Description of Artificial Sequence: Synthetic oligonucleotide
cacuccucgaagcaccccu

SEQ ID NO: 2541892 - RNA, 19 nt, Artificial Sequence
  Description of Artificial Sequence: Synthetic oligonucleotide
guaaggucacagccuggcu

SEQ ID NO: 2541893 - RNA, 19 nt, Artificial Sequence
  Description of Artificial Sequence: Synthetic oligonucleotide
gggcauggagcagugccgc

SEQ ID NO: 2541894 - RNA, 19 nt, Artificial Sequence
  Description of Artificial Sequence: Synthetic oligonucleotide
gcagaauagccggcucuag

SEQ ID NO: 2541895 - RNA, 19 nt, Artificial Sequence
  Description of Artificial Sequence: Synthetic oligonucleotide
aucagugcuguagccccau

SEQ ID NO: 2541896 - RNA, 19 nt, Artificial Sequence
  Description of Artificial Sequence: Synthetic oligonucleotide
accccuguauccaguagua

SEQ ID NO: 2541897 - RNA, 19 nt, Artificial Sequence
  Description of Artificial Sequence: Synthetic oligonucleotide
agcucaggccccaggcucu

SEQ ID NO: 2541898 - RNA, 19 nt, Artificial Sequence
  Description of Artificial Sequence: Synthetic oligonucleotide
cagugcuguagccccaucu

SEQ ID NO: 2541899 - RNA, 19 nt, Artificial Sequence
  Description of Artificial Sequence: Synthetic oligonucleotide
caccucucuucugucccug

SEQ ID NO: 2541900 - RNA, 19 nt, Artificial Sequence
  Description of Artificial Sequence: Synthetic oligonucleotide
cuccugggcuacaaggcgu

SEQ ID NO: 2541901 - RNA, 19 nt, Artificial Sequence
  Description of Artificial Sequence: Synthetic oligonucleotide
cgcaaccucauccuguuga

SEQ ID NO: 2541902 - RNA, 19 nt, Artificial Sequence
  Description of Artificial Sequence: Synthetic oligonucleotide
gcaauggccagggcacuug

SEQ ID NO: 2541903 - RNA, 19 nt, Artificial Sequence
  Description of Artificial Sequence: Synthetic oligonucleotide
caggccccaggcucuucac

SEQ ID NO: 2541904 - RNA, 19 nt, Artificial Sequence
  Description of Artificial Sequence: Synthetic oligonucleotide
guccagucuggcuagccuu

SEQ ID NO: 2541905 - RNA, 19 nt, Artificial Sequence
  Description of Artificial Sequence: Synthetic oligonucleotide
cgagggcucaguucacacc

SEQ ID NO: 2541906 - RNA, 19 nt, Artificial Sequence
  Description of Artificial Sequence: Synthetic oligonucleotide
gcuagccuuggcauugaca

SEQ ID NO: 2541907 - RNA, 19 nt, Artificial Sequence
  Description of Artificial Sequence: Synthetic oligonucleotide
guaucaaggcguccauauu

SEQ ID NO: 2541908 - RNA, 19 nt, Artificial Sequence
  Description of Artificial Sequence: Synthetic oligonucleotide
gcccuacagaagugagugc

SEQ ID NO: 2541909 - RNA, 19 nt, Artificial Sequence
  Description of Artificial Sequence: Synthetic oligonucleotide
ccaguaguaggcuggaaau

SEQ ID NO: 2541910 - RNA, 19 nt, Artificial Sequence
  Description of Artificial Sequence: Synthetic oligonucleotide
uggcuagccuuggcauuga

SEQ ID NO: 2541911 - RNA, 19 nt, Artificial Sequence
  Description of Artificial Sequence: Synthetic oligonucleotide
cgaagcaccccugccacag

SEQ ID NO: 2541912 - RNA, 19 nt, Artificial Sequence
  Description of Artificial Sequence: Synthetic oligonucleotide
ggcguccauauucgcuggc

SEQ ID NO: 2541913 - RNA, 19 nt, Artificial Sequence
  Description of Artificial Sequence: Synthetic oligonucleotide
gcuguaaugcagggccgug

SEQ ID NO: 2541914 - RNA, 19 nt, Artificial Sequence
  Description of Artificial Sequence: Synthetic oligonucleotide
cagaccccuguauccagua

SEQ ID NO: 2541915 - RNA, 19 nt, Artificial Sequence
  Description of Artificial Sequence: Synthetic oligonucleotide
ccuccugcccuacagaagu

SEQ ID NO: 2541916 - RNA, 19 nt, Artificial Sequence
  Description of Artificial Sequence: Synthetic oligonucleotide
ccguguuuccauugccauc

SEQ ID NO: 2541917 - RNA, 19 nt, Artificial Sequence
  Description of Artificial Sequence: Synthetic oligonucleotide
caggcucuucacuccucga

SEQ ID NO: 2541918 - RNA, 19 nt, Artificial Sequence
  Description of Artificial Sequence: Synthetic oligonucleotide
agccggcucuaguucugau

SEQ ID NO: 2541919 - RNA, 19 nt, Artificial Sequence
  Description of Artificial Sequence: Synthetic oligonucleotide
cugcccuacagaagugagu

SEQ ID NO: 2541920 - RNA, 19 nt, Artificial Sequence
  Description of Artificial Sequence: Synthetic oligonucleotide
caacagcaacugaacugua

SEQ ID NO: 2541921 - RNA, 19 nt, Artificial Sequence
  Description of Artificial Sequence: Synthetic oligonucleotide
cuguauccaguaguaggcu

SEQ ID NO: 2541922 - RNA, 19 nt, Artificial Sequence
  Description of Artificial Sequence: Synthetic oligonucleotide
aggugggcauggagcagug

SEQ ID NO: 2541923 - RNA, 19 nt, Artificial Sequence
  Description of Artificial Sequence: Synthetic oligonucleotide
gccaugacugauggccagc

SEQ ID NO: 2541924 - RNA, 19 nt, Artificial Sequence
  Description of Artificial Sequence: Synthetic oligonucleotide
agcaccccugccacaggcu

SEQ ID NO: 2541925 - RNA, 19 nt, Artificial Sequence
  Description of Artificial Sequence: Synthetic oligonucleotide
cgaggccugaucagcugcc

SEQ ID NO: 2541926 - RNA, 19 nt, Artificial Sequence
  Description of Artificial Sequence: Synthetic oligonucleotide
cuguaucaaggcguccaua

SEQ ID NO: 2541927 - RNA, 19 nt, Artificial Sequence
  Description of Artificial Sequence: Synthetic oligonucleotide
cuguaaugcagggccgugu

SEQ ID NO: 2541928 - RNA, 19 nt, Artificial Sequence
  Description of Artificial Sequence: Synthetic oligonucleotide
gcacuuguucccucauugu

SEQ ID NO: 2541929 - RNA, 19 nt, Artificial Sequence
  Description of Artificial Sequence: Synthetic oligonucleotide
auccaguaguaggcuggaa

SEQ ID NO: 2541930 - RNA, 19 nt, Artificial Sequence
  Description of Artificial Sequence: Synthetic oligonucleotide
guaaugcagggccguguuu

SEQ ID NO: 2541931 - RNA, 19 nt, Artificial Sequence
  Description of Artificial Sequence: Synthetic oligonucleotide
gccaacaugagugcagaau

SEQ ID NO: 2541932 - RNA, 19 nt, Artificial Sequence
  Description of Artificial Sequence: Synthetic oligonucleotide
ccagucuggcuagccuugg

SEQ ID NO: 2541933 - RNA, 19 nt, Artificial Sequence
  Description of Artificial Sequence: Synthetic oligonucleotide
ccaugagacacgcuguaau

SEQ ID NO: 2541934 - RNA, 19 nt, Artificial Sequence
  Description of Artificial Sequence: Synthetic oligonucleotide
gauucccaugagacacgcu

SEQ ID NO: 2541935 - RNA, 19 nt, Artificial Sequence
  Description of Artificial Sequence: Synthetic oligonucleotide
caggugggcauggagcagu

SEQ ID NO: 2541936 - RNA, 19 nt, Artificial Sequence
  Description of Artificial Sequence: Synthetic oligonucleotide
cccuuaaacgagggcucag

SEQ ID NO: 2541937 - RNA, 19 nt, Artificial Sequence
  Description of Artificial Sequence: Synthetic oligonucleotide
ggcuagccuuggcauugac

SEQ ID NO: 2541938 - RNA, 19 nt, Artificial Sequence
  Description of Artificial Sequence: Synthetic oligonucleotide
gcguccauauucgcuggca

SEQ ID NO: 2541939 - RNA, 19 nt, Artificial Sequence
  Description of Artificial Sequence: Synthetic oligonucleotide
gccguguuuccauugccau

SEQ ID NO: 2541940 - RNA, 19 nt, Artificial Sequence
  Description of Artificial Sequence: Synthetic oligonucleotide
ccccaucugcauccuguac

SEQ ID NO: 2541941 - RNA, 19 nt, Artificial Sequence
  Description of Artificial Sequence: Synthetic oligonucleotide
ccccuguauccaguaguag

SEQ ID NO: 2541942 - RNA, 19 nt, Artificial Sequence
  Description of Artificial Sequence: Synthetic oligonucleotide
cgcuuuugacuggacacuc

SEQ ID NO: 2541943 - RNA, 19 nt, Artificial Sequence
  Description of Artificial Sequence: Synthetic oligonucleotide
gggcucaguucacaccucu

SEQ ID NO: 2541944 - RNA, 19 nt, Artificial Sequence
  Description of Artificial Sequence: Synthetic oligonucleotide
gcgcugccaucucugguga

SEQ ID NO: 2541945 - RNA, 19 nt, Artificial Sequence
  Description of Artificial Sequence: Synthetic oligonucleotide
cucauugucuagggauggu

SEQ ID NO: 2541946 - RNA, 19 nt, Artificial Sequence
  Description of Artificial Sequence: Synthetic oligonucleotide
ggugggcauggagcagugc

SEQ ID NO: 2541947 - RNA, 19 nt, Artificial Sequence
  Description of Artificial Sequence: Synthetic oligonucleotide
ggccugaucagcugccgau

SEQ ID NO: 2541948 - RNA, 19 nt, Artificial Sequence
  Description of Artificial Sequence: Synthetic oligonucleotide
ccaugacugauggccagca

SEQ ID NO: 2541949 - RNA, 19 nt, Artificial Sequence
  Description of Artificial Sequence: Synthetic oligonucleotide
ugacuccacgaggccugau

SEQ ID NO: 2541950 - RNA, 19 nt, Artificial Sequence
  Description of Artificial Sequence: Synthetic oligonucleotide
cugggcuacaaggcgugcu

SEQ ID NO: 2541951 - RNA, 19 nt, Artificial Sequence
  Description of Artificial Sequence: Synthetic oligonucleotide
ggcucuaguucugaugauu

SEQ ID NO: 2541952 - RNA, 19 nt, Artificial Sequence
  Description of Artificial Sequence: Synthetic oligonucleotide
gcugccaucucuggugacu

SEQ ID NO: 2541953 - RNA, 19 nt, Artificial Sequence
  Description of Artificial Sequence: Synthetic oligonucleotide
gugacuccacgaggccuga

SEQ ID NO: 2541954 - RNA, 19 nt, Artificial Sequence
  Description of Artificial Sequence: Synthetic oligonucleotide
ggcucagccugagagcgcu

SEQ ID NO: 2541955 - RNA, 19 nt, Artificial Sequence
  Description of Artificial Sequence: Synthetic oligonucleotide
ccccacguuccagcaaggc

SEQ ID NO: 2541956 - RNA, 19 nt, Artificial Sequence
  Description of Artificial Sequence: Synthetic oligonucleotide
caugacugauggccagcau

SEQ ID NO: 2541957 - RNA, 19 nt, Artificial Sequence
  Description of Artificial Sequence: Synthetic oligonucleotide
gcaaggcagccaccauguc

SEQ ID NO: 2541958 - RNA, 19 nt, Artificial Sequence
  Description of Artificial Sequence: Synthetic oligonucleotide
gccccacguuccagcaagg

SEQ ID NO: 2541959 - RNA, 19 nt, Artificial Sequence
  Description of Artificial Sequence: Synthetic oligonucleotide
gcgcuuuugacuggacacu

SEQ ID NO: 2541960 - RNA, 19 nt, Artificial Sequence
  Description of Artificial Sequence: Synthetic oligonucleotide
cccaugcugaaaagucucu

SEQ ID NO: 2541961 - RNA, 19 nt, Artificial Sequence
  Description of Artificial Sequence: Synthetic oligonucleotide
ccugggcuacaaggcgugc

SEQ ID NO: 2541962 - RNA, 19 nt, Artificial Sequence
  Description of Artificial Sequence: Synthetic oligonucleotide
ccagcgcaauggccagggc

SEQ ID NO: 2541963 - RNA, 19 nt, Artificial Sequence
  Description of Artificial Sequence: Synthetic oligonucleotide
cucaggccccaggcucuuc

SEQ ID NO: 2541964 - RNA, 19 nt, Artificial Sequence
  Description of Artificial Sequence: Synthetic oligonucleotide
cucagccugagagcgcuuu

SEQ ID NO: 2541965 - RNA, 19 nt, Artificial Sequence
  Description of Artificial Sequence: Synthetic oligonucleotide
cagccccacguuccagcaa

SEQ ID NO: 2541966 - RNA, 19 nt, Artificial Sequence
  Description of Artificial Sequence: Synthetic oligonucleotide
guagccccaucugcauccu

SEQ ID NO: 2541967 - RNA, 19 nt, Artificial Sequence
  Description of Artificial Sequence: Synthetic oligonucleotide
gcagugccgcaaccucauc

SEQ ID NO: 2541968 - RNA, 19 nt, Artificial Sequence
  Description of Artificial Sequence: Synthetic oligonucleotide
gccgcaaccucauccuguu

SEQ ID NO: 2541969 - RNA, 19 nt, Artificial Sequence
  Description of Artificial Sequence: Synthetic oligonucleotide
ggcgugcugcgcugccauc

SEQ ID NO: 2541970 - RNA, 19 nt, Artificial Sequence
  Description of Artificial Sequence: Synthetic oligonucleotide
ccgcaaccucauccuguug

SEQ ID NO: 2541971 - RNA, 19 nt, Artificial Sequence
  Description of Artificial Sequence: Synthetic oligonucleotide
gcgugcugcgcugccaucu

SEQ ID NO: 2541972 - RNA, 19 nt, Artificial Sequence
  Description of Artificial Sequence: Synthetic oligonucleotide
cgaaaccacuccugggcua

SEQ ID NO: 2541973 - RNA, 19 nt, Artificial Sequence
  Description of Artificial Sequence: Synthetic oligonucleotide
ccugauggccaugacugau

SEQ ID NO: 2541974 - RNA, 19 nt, Artificial Sequence
  Description of Artificial Sequence: Synthetic oligonucleotide
cgugcugcgcugccaucuc

SEQ ID NO: 2541975 - RNA, 19 nt, Artificial Sequence
  Description of Artificial Sequence: Synthetic oligonucleotide
ggcuggaaauggccagauu

SEQ ID NO: 2541976 - RNA, 19 nt, Artificial Sequence
  Description of Artificial Sequence: Synthetic oligonucleotide
gggcacuuguucccucauu

SEQ ID NO: 2541977 - RNA, 19 nt, Artificial Sequence
  Description of Artificial Sequence: Synthetic oligonucleotide
ccaugcugaaaagucucuu

SEQ ID NO: 2541978 - RNA, 19 nt, Artificial Sequence
  Description of Artificial Sequence: Synthetic oligonucleotide
caucugcauccuguacauu

SEQ ID NO: 2541979 - RNA, 19 nt, Artificial Sequence
  Description of Artificial Sequence: Synthetic oligonucleotide
ccacaggcucagccugaga

SEQ ID NO: 2541980 - RNA, 19 nt, Artificial Sequence
  Description of Artificial Sequence: Synthetic oligonucleotide
gccugaucagcugccgauu

SEQ ID NO: 2541981 - RNA, 19 nt, Artificial Sequence
  Description of Artificial Sequence: Synthetic oligonucleotide
gcgcaauggccagggcacu

SEQ ID NO: 2541982 - RNA, 19 nt, Artificial Sequence
  Description of Artificial Sequence: Synthetic oligonucleotide
cgcuguaaugcagggccgu

SEQ ID NO: 2541983 - RNA, 19 nt, Artificial Sequence
  Description of Artificial Sequence: Synthetic oligonucleotide
cggcucuaguucugaugau

SEQ ID NO: 2541984 - RNA, 19 nt, Artificial Sequence
  Description of Artificial Sequence: Synthetic oligonucleotide
gcucaggccccaggcucuu

SEQ ID NO: 2541985 - RNA, 19 nt, Artificial Sequence
  Description of Artificial Sequence: Synthetic oligonucleotide
gcucagccugagagcgcuu

SEQ ID NO: 2541986 - RNA, 19 nt, Artificial Sequence
  Description of Artificial Sequence: Synthetic oligonucleotide
aauauaagaacaaauuugg

SEQ ID NO: 2541987 - RNA, 19 nt, Artificial Sequence
  Description of Artificial Sequence: Synthetic oligonucleotide
aauaccuugccgcagcucc

SEQ ID NO: 2541988 - RNA, 19 nt, Artificial Sequence
  Description of Artificial Sequence: Synthetic oligonucleotide
uuggguuacagcaacaccg

SEQ ID NO: 2541989 - RNA, 19 nt, Artificial Sequence
  Description of Artificial Sequence: Synthetic oligonucleotide
aacaaauuuggguuacagc

SEQ ID NO: 2541990 - RNA, 19 nt, Artificial Sequence
  Description of Artificial Sequence: Synthetic oligonucleotide
acaaauuuggguuacagca

SEQ ID NO: 2541991 - RNA, 19 nt, Artificial Sequence
  Description of Artificial Sequence: Synthetic oligonucleotide
uauaagaacaaauuugggu

SEQ ID NO: 2541992 - RNA, 19 nt, Artificial Sequence
  Description of Artificial Sequence: Synthetic oligonucleotide
uacaaugccaauuuacagg

SEQ ID NO: 2541993 - RNA, 19 nt, Artificial Sequence
  Description of Artificial Sequence: Synthetic oligonucleotide
aaggaaguucaccauaggg

SEQ ID NO: 2541994 - RNA, 19 nt, Artificial Sequence
  Description of Artificial Sequence: Synthetic oligonucleotide
agaaggaugucacagcccc

SEQ ID NO: 2541995 - RNA, 19 nt, Artificial Sequence
  Description of Artificial Sequence: Synthetic oligonucleotide
acaaugccaauuuacaggg

SEQ ID NO: 2541996 - RNA, 19 nt, Artificial Sequence
  Description of Artificial Sequence: Synthetic oligonucleotide
aaacucgccauugagguac

SEQ ID NO: 2541997 - RNA, 19 nt, Artificial Sequence
  Description of Artificial Sequence: Synthetic oligonucleotide
agugcaagcacccacagca

SEQ ID NO: 2541998 - RNA, 19 nt, Artificial Sequence
  Description of Artificial Sequence: Synthetic oligonucleotide
ucaucauuccuuauagaag

SEQ ID NO: 2541999 - RNA, 19 nt, Artificial Sequence
  Description of Artificial Sequence: Synthetic oligonucleotide
aaugugaugaagagggcac

SEQ ID NO: 2542000 - RNA, 19 nt, Artificial Sequence
  Description of Artificial Sequence: Synthetic oligonucleotide
aacaccggauuacaaugcc

SEQ ID NO: 2542001 - RNA, 19 nt, Artificial Sequence
  Description of Artificial Sequence: Synthetic oligonucleotide
uucaucauuccuuauagaa

SEQ ID NO: 2542002 - RNA, 19 nt, Artificial Sequence
  Description of Artificial Sequence: Synthetic oligonucleotide
gucuuuaauaccuugccgc

SEQ ID NO: 2542003 - RNA, 19 nt, Artificial Sequence
  Description of Artificial Sequence: Synthetic oligonucleotide
uccuuauagaagaaguuac

SEQ ID NO: 2542004 - RNA, 19 nt, Artificial Sequence
  Description of Artificial Sequence: Synthetic oligonucleotide
uuacaacccaaccacaaga

SEQ ID NO: 2542005 - RNA, 19 nt, Artificial Sequence
  Description of Artificial Sequence: Synthetic oligonucleotide
uacacuugcgggaugguag

SEQ ID NO: 2542006 - RNA, 19 nt, Artificial Sequence
  Description of Artificial Sequence: Synthetic oligonucleotide
uuugccaucuuacaaccca

SEQ ID NO: 2542007 - RNA, 19 nt, Artificial Sequence
  Description of Artificial Sequence: Synthetic oligonucleotide
aaugacuccugaaccaggc

SEQ ID NO: 2542008 - RNA, 19 nt, Artificial Sequence
  Description of Artificial Sequence: Synthetic oligonucleotide
cucgguaaggcuuuucugg

SEQ ID NO: 2542009 - RNA, 19 nt, Artificial Sequence
  Description of Artificial Sequence: Synthetic oligonucleotide
aacaucagggguuuugcca

SEQ ID NO: 2542010 - RNA, 19 nt, Artificial Sequence
  Description of Artificial Sequence: Synthetic oligonucleotide
uggaauagucuuuaauacc

SEQ ID NO: 2542011 - RNA, 19 nt, Artificial Sequence
  Description of Artificial Sequence: Synthetic oligonucleotide
aagagucaggaaugacucc

SEQ ID NO: 2542012 - RNA, 19 nt, Artificial Sequence
  Description of Artificial Sequence: Synthetic oligonucleotide
uccugaaccaggcagagaa

SEQ ID NO: 2542013 - RNA, 19 nt, Artificial Sequence
  Description of Artificial Sequence: Synthetic oligonucleotide
agucuuuaauaccuugccg

SEQ ID NO: 2542014 - RNA, 19 nt, Artificial Sequence
  Description of Artificial Sequence: Synthetic oligonucleotide
uuauagaagaaguuacaaa

SEQ ID NO: 2542015 - RNA, 19 nt, Artificial Sequence
  Description of Artificial Sequence: Synthetic oligonucleotide
aagaacaaauuuggguuac

SEQ ID NO: 2542016 - RNA, 19 nt, Artificial Sequence
  Description of Artificial Sequence: Synthetic oligonucleotide
ugagucuugguucuucuca

SEQ ID NO: 2542017 - RNA, 19 nt, Artificial Sequence
  Description of Artificial Sequence: Synthetic oligonucleotide
gauuacaaugccaauuuac

SEQ ID NO: 2542018 - RNA, 19 nt, Artificial Sequence
  Description of Artificial Sequence: Synthetic oligonucleotide
caucuuacaacccaaccac

SEQ ID NO: 2542019 - RNA, 19 nt, Artificial Sequence
  Description of Artificial Sequence: Synthetic oligonucleotide
uccagcacguuguaggccg

SEQ ID NO: 2542020 - RNA, 19 nt, Artificial Sequence
  Description of Artificial Sequence: Synthetic oligonucleotide
aggaaguucaccauagggg

SEQ ID NO: 2542021 - RNA, 19 nt, Artificial Sequence
  Description of Artificial Sequence: Synthetic oligonucleotide
agugguuacaaggaaguuc

SEQ ID NO: 2542022 - RNA, 19 nt, Artificial Sequence
  Description of Artificial Sequence: Synthetic oligonucleotide
uucucaucuaucagggcag

SEQ ID NO: 2542023 - RNA, 19 nt, Artificial Sequence
  Description of Artificial Sequence: Synthetic oligonucleotide
gagaauaaaagacaauaua

SEQ ID NO: 2542024 - RNA, 19 nt, Artificial Sequence
  Description of Artificial Sequence: Synthetic oligonucleotide
guuggaauagucuuuaaua

SEQ ID NO: 2542025 - RNA, 19 nt, Artificial Sequence
  Description of Artificial Sequence: Synthetic oligonucleotide
ugagccaaaggccaaguaa

SEQ ID NO: 2542026 - RNA, 19 nt, Artificial Sequence
  Description of Artificial Sequence: Synthetic oligonucleotide
ucuucucuguucaucauuc

SEQ ID NO: 2542027 - RNA, 19 nt, Artificial Sequence
  Description of Artificial Sequence: Synthetic oligonucleotide
uuuggguuacagcaacacc

SEQ ID NO: 2542028 - RNA, 19 nt, Artificial Sequence
  Description of Artificial Sequence: Synthetic oligonucleotide
ucacuuugagucuugguuc

SEQ ID NO: 2542029 - RNA, 19 nt, Artificial Sequence
  Description of Artificial Sequence: Synthetic oligonucleotide
caacccaaccacaagaguc

SEQ ID NO: 2542030 - RNA, 19 nt, Artificial Sequence
  Description of Artificial Sequence: Synthetic oligonucleotide
uuuucuggcagcgaaugug

SEQ ID NO: 2542031 - RNA, 19 nt, Artificial Sequence
  Description of Artificial Sequence: Synthetic oligonucleotide
cauugagguacacuugcgg

SEQ ID NO: 2542032 - RNA, 19 nt, Artificial Sequence
  Description of Artificial Sequence: Synthetic oligonucleotide
gaacaaauuuggguuacag

SEQ ID NO: 2542033 - RNA, 19 nt, Artificial Sequence
  Description of Artificial Sequence: Synthetic oligonucleotide
auauaagaacaaauuuggg

SEQ ID NO: 2542034 - RNA, 19 nt, Artificial Sequence
  Description of Artificial Sequence: Synthetic oligonucleotide
ucuaucagggcagagcgga

SEQ ID NO: 2542035 - RNA, 19 nt, Artificial Sequence
  Description of Artificial Sequence: Synthetic oligonucleotide
uaagaacaaauuuggguua

SEQ ID NO: 2542036 - RNA, 19 nt, Artificial Sequence
  Description of Artificial Sequence: Synthetic oligonucleotide
ucaucuaucagggcagagc

SEQ ID NO: 2542037 - RNA, 19 nt, Artificial Sequence
  Description of Artificial Sequence: Synthetic oligonucleotide
ugcaccacggcguugcuga

SEQ ID NO: 2542038 - RNA, 19 nt, Artificial Sequence
  Description of Artificial Sequence: Synthetic oligonucleotide
gauucugagccaaaggcca

SEQ ID NO: 2542039 - RNA, 19 nt, Artificial Sequence
  Description of Artificial Sequence: Synthetic oligonucleotide
ucauuccuuauagaagaag

SEQ ID NO: 2542040 - RNA, 19 nt, Artificial Sequence
  Description of Artificial Sequence: Synthetic oligonucleotide
uuguaggccgcguagucgc

SEQ ID NO: 2542041 - RNA, 19 nt, Artificial Sequence
  Description of Artificial Sequence: Synthetic oligonucleotide
gggauucugagccaaaggc

SEQ ID NO: 2542042 - RNA, 19 nt, Artificial Sequence
  Description of Artificial Sequence: Synthetic oligonucleotide
uaaggcuuuucuggcagcg

SEQ ID NO: 2542043 - RNA, 19 nt, Artificial Sequence
  Description of Artificial Sequence: Synthetic oligonucleotide
aguuggaauagucuuuaau

SEQ ID NO: 2542044 - RNA, 19 nt, Artificial Sequence
  Description of Artificial Sequence: Synthetic oligonucleotide
cuuacaacccaaccacaag

SEQ ID NO: 2542045 - RNA, 19 nt, Artificial Sequence
  Description of Artificial Sequence: Synthetic oligonucleotide
uuccuuauagaagaaguua

SEQ ID NO: 2542046 - RNA, 19 nt, Artificial Sequence
  Description of Artificial Sequence: Synthetic oligonucleotide
aggaaugacuccugaacca

SEQ ID NO: 2542047 - RNA, 19 nt, Artificial Sequence
  Description of Artificial Sequence: Synthetic oligonucleotide
gguuuugccaucuuacaac

SEQ ID NO: 2542048 - RNA, 19 nt, Artificial Sequence
  Description of Artificial Sequence: Synthetic oligonucleotide
ucgguaaggcuuuucuggc

SEQ ID NO: 2542049 - RNA, 19 nt, Artificial Sequence
  Description of Artificial Sequence: Synthetic oligonucleotide
acagcacaggacaugacuc

SEQ ID NO: 2542050 - RNA, 19 nt, Artificial Sequence
  Description of Artificial Sequence: Synthetic oligonucleotide
gugguuacaaggaaguuca

SEQ ID NO: 2542051 - RNA, 19 nt, Artificial Sequence
  Description of Artificial Sequence: Synthetic oligonucleotide
augaagagggcacucugcu

SEQ ID NO: 2542052 - RNA, 19 nt, Artificial Sequence
  Description of Artificial Sequence: Synthetic oligonucleotide
ucgggcguccccuugagga

SEQ ID NO: 2542053 - RNA, 19 nt, Artificial Sequence
  Description of Artificial Sequence: Synthetic oligonucleotide
cugcuugcaaggcuggagg

SEQ ID NO: 2542054 - RNA, 19 nt, Artificial Sequence
  Description of Artificial Sequence: Synthetic oligonucleotide
caacaccggauuacaaugc

SEQ ID NO: 2542055 - RNA, 19 nt, Artificial Sequence
  Description of Artificial Sequence: Synthetic oligonucleotide
acacuugcgggaugguagg

SEQ ID NO: 2542056 - RNA, 19 nt, Artificial Sequence
  Description of Artificial Sequence: Synthetic oligonucleotide
ucgccauugagguacacuu

SEQ ID NO: 2542057 - RNA, 19 nt, Artificial Sequence
  Description of Artificial Sequence: Synthetic oligonucleotide
cucagcgaggaccuggagc

SEQ ID NO: 2542058 - RNA, 19 nt, Artificial Sequence
  Description of Artificial Sequence: Synthetic oligonucleotide
gaugaagagggcacucugc

SEQ ID NO: 2542059 - RNA, 19 nt, Artificial Sequence
  Description of Artificial Sequence: Synthetic oligonucleotide
agagucaggaaugacuccu

SEQ ID NO: 2542060 - RNA, 19 nt, Artificial Sequence
  Description of Artificial Sequence: Synthetic oligonucleotide
aacccaaccacaagaguca

SEQ ID NO: 2542061 - RNA, 19 nt, Artificial Sequence
  Description of Artificial Sequence: Synthetic oligonucleotide
ugaaccaggcagagaauaa

SEQ ID NO: 2542062 - RNA, 19 nt, Artificial Sequence
  Description of Artificial Sequence: Synthetic oligonucleotide
gcaacaccggauuacaaug

SEQ ID NO: 2542063 - RNA, 19 nt, Artificial Sequence
  Description of Artificial Sequence: Synthetic oligonucleotide
uggugcaucugcagaagga

SEQ ID NO: 2542064 - RNA, 19 nt, Artificial Sequence
  Description of Artificial Sequence: Synthetic oligonucleotide
agcaacaccggauuacaau

SEQ ID NO: 2542065 - RNA, 19 nt, Artificial Sequence
  Description of Artificial Sequence: Synthetic oligonucleotide
uuuacagggcagugguuac

SEQ ID NO: 2542066 - RNA, 19 nt, Artificial Sequence
  Description of Artificial Sequence: Synthetic oligonucleotide
gguaaggcuuuucuggcag

SEQ ID NO: 2542067 - RNA, 19 nt, Artificial Sequence
  Description of Artificial Sequence: Synthetic oligonucleotide
cuugcaaggcuggaggccc

SEQ ID NO: 2542068 - RNA, 19 nt, Artificial Sequence
  Description of Artificial Sequence: Synthetic oligonucleotide
gaaugacuccugaaccagg

SEQ ID NO: 2542069 - RNA, 19 nt, Artificial Sequence
  Description of Artificial Sequence: Synthetic oligonucleotide
accacaagagucaggaaug

SEQ ID NO: 2542070 - RNA, 19 nt, Artificial Sequence
  Description of Artificial Sequence: Synthetic oligonucleotide
caggaucugcaccacggcg

SEQ ID NO: 2542071 - RNA, 19 nt, Artificial Sequence
  Description of Artificial Sequence: Synthetic oligonucleotide
cagguccccauucuggugc

SEQ ID NO: 2542072 - RNA, 19 nt, Artificial Sequence
  Description of Artificial Sequence: Synthetic oligonucleotide
auuuacagggcagugguua

SEQ ID NO: 2542073 - RNA, 19 nt, Artificial Sequence
  Description of Artificial Sequence: Synthetic oligonucleotide
ucugcagaaggaugucaca

SEQ ID NO: 2542074 - RNA, 19 nt, Artificial Sequence
  Description of Artificial Sequence: Synthetic oligonucleotide
cuccgggucguccagcacg

SEQ ID NO: 2542075 - RNA, 19 nt, Artificial Sequence
  Description of Artificial Sequence: Synthetic oligonucleotide
acucgguaaggcuuuucug

SEQ ID NO: 2542076 - RNA, 19 nt, Artificial Sequence
  Description of Artificial Sequence: Synthetic oligonucleotide
guuguaggccgcguagucg

SEQ ID NO: 2542077 - RNA, 19 nt, Artificial Sequence
  Description of Artificial Sequence: Synthetic oligonucleotide
cuggcagcgaaugugauga

SEQ ID NO: 2542078 - RNA, 19 nt, Artificial Sequence
  Description of Artificial Sequence: Synthetic oligonucleotide
cagcgaaugugaugaagag

SEQ ID NO: 2542079 - RNA, 19 nt, Artificial Sequence
  Description of Artificial Sequence: Synthetic oligonucleotide
cuuuaauaccuugccgcag

SEQ ID NO: 2542080 - RNA, 19 nt, Artificial Sequence
  Description of Artificial Sequence: Synthetic oligonucleotide
caaggaaguucaccauagg

SEQ ID NO: 2542081 - RNA, 19 nt, Artificial Sequence
  Description of Artificial Sequence: Synthetic oligonucleotide
agguacacuugcgggaugg

SEQ ID NO: 2542082 - RNA, 19 nt, Artificial Sequence
  Description of Artificial Sequence: Synthetic oligonucleotide
ugcuugcaaggcuggaggc

SEQ ID NO: 2542083 - RNA, 19 nt, Artificial Sequence
  Description of Artificial Sequence: Synthetic oligonucleotide
cagaaggaugucacagccc

SEQ ID NO: 2542084 - RNA, 19 nt, Artificial Sequence
  Description of Artificial Sequence: Synthetic oligonucleotide
acaacccaaccacaagagu

SEQ ID NO: 2542085 - RNA, 19 nt, Artificial Sequence
  Description of Artificial Sequence: Synthetic oligonucleotide
agcacaggacaugacucgg

SEQ ID NO: 2542086 - RNA, 19 nt, Artificial Sequence
  Description of Artificial Sequence: Synthetic oligonucleotide
ucuggugcaucugcagaag

SEQ ID NO: 2542087 - RNA, 19 nt, Artificial Sequence
  Description of Artificial Sequence: Synthetic oligonucleotide
accaggcagagaauaaaag

SEQ ID NO: 2542088 - RNA, 19 nt, Artificial Sequence
  Description of Artificial Sequence: Synthetic oligonucleotide
aggcagagaauaaaagaca

SEQ ID NO: 2542089 - RNA, 19 nt, Artificial Sequence
  Description of Artificial Sequence: Synthetic oligonucleotide
aaguucaccauaggggauu

SEQ ID NO: 2542090 - RNA, 19 nt, Artificial Sequence
  Description of Artificial Sequence: Synthetic oligonucleotide
cuggugcaucugcagaagg

SEQ ID NO: 2542091 - RNA, 19 nt, Artificial Sequence
  Description of Artificial Sequence: Synthetic oligonucleotide
ggauucugagccaaaggcc

SEQ ID NO: 2542092 - RNA, 19 nt, Artificial Sequence
  Description of Artificial Sequence: Synthetic oligonucleotide
ggaauagucuuuaauaccu

SEQ ID NO: 2542093 - RNA, 19 nt, Artificial Sequence
  Description of Artificial Sequence: Synthetic oligonucleotide
cacguuguaggccgcguag

SEQ ID NO: 2542094 - RNA, 19 nt, Artificial Sequence
  Description of Artificial Sequence: Synthetic oligonucleotide
gguuacaaggaaguucacc

SEQ ID NO: 2542095 - RNA, 19 nt, Artificial Sequence
  Description of Artificial Sequence: Synthetic oligonucleotide
uugccaucuuacaacccaa

SEQ ID NO: 2542096 - RNA, 19 nt, Artificial Sequence
  Description of Artificial Sequence: Synthetic oligonucleotide
aagcacccacagcacagga

SEQ ID NO: 2542097 - RNA, 19 nt, Artificial Sequence
  Description of Artificial Sequence: Synthetic oligonucleotide
caauuuacagggcaguggu

SEQ ID NO: 2542098 - RNA, 19 nt, Artificial Sequence
  Description of Artificial Sequence: Synthetic oligonucleotide
uugguucuucucaucuauc

SEQ ID NO: 2542099 - RNA, 19 nt, Artificial Sequence
  Description of Artificial Sequence: Synthetic oligonucleotide
agucaggaaugacuccuga

SEQ ID NO: 2542100 - RNA, 19 nt, Artificial Sequence
  Description of Artificial Sequence: Synthetic oligonucleotide
agagcggauucccagcuuu

SEQ ID NO: 2542101 - RNA, 19 nt, Artificial Sequence
  Description of Artificial Sequence: Synthetic oligonucleotide
uuacagcaacaccggauua

SEQ ID NO: 2542102 - RNA, 19 nt, Artificial Sequence
  Description of Artificial Sequence: Synthetic oligonucleotide
uccccauucuggugcaucu

SEQ ID NO: 2542103 - RNA, 19 nt, Artificial Sequence
  Description of Artificial Sequence: Synthetic oligonucleotide
cacggcguugcugaagccg

SEQ ID NO: 2542104 - RNA, 19 nt, Artificial Sequence
  Description of Artificial Sequence: Synthetic oligonucleotide
aguucaccauaggggauuc

SEQ ID NO: 2542105 - RNA, 19 nt, Artificial Sequence
  Description of Artificial Sequence: Synthetic oligonucleotide
acagcaacaccggauuaca

SEQ ID NO: 2542106 - RNA, 19 nt, Artificial Sequence
  Description of Artificial Sequence: Synthetic oligonucleotide
ggaaugacuccugaaccag

SEQ ID NO: 2542107 - RNA, 19 nt, Artificial Sequence
  Description of Artificial Sequence: Synthetic oligonucleotide
ugccaauuuacagggcagu

SEQ ID NO: 2542108 - RNA, 19 nt, Artificial Sequence
  Description of Artificial Sequence: Synthetic oligonucleotide
cuugccgcagcuccggguc

SEQ ID NO: 2542109 - RNA, 19 nt, Artificial Sequence
  Description of Artificial Sequence: Synthetic oligonucleotide
guaaggcuuuucuggcagc

SEQ ID NO: 2542110 - RNA, 19 nt, Artificial Sequence
  Description of Artificial Sequence: Synthetic oligonucleotide
gaugguaggccaguuggaa

SEQ ID NO: 2542111 - RNA, 19 nt, Artificial Sequence
  Description of Artificial Sequence: Synthetic oligonucleotide
caaugccaauuuacagggc

SEQ ID NO: 2542112 - RNA, 19 nt, Artificial Sequence
  Description of Artificial Sequence: Synthetic oligonucleotide
caccggauuacaaugccaa

SEQ ID NO: 2542113 - RNA, 19 nt, Artificial Sequence
  Description of Artificial Sequence: Synthetic oligonucleotide
augccaauuuacagggcag

SEQ ID NO: 2542114 - RNA, 19 nt, Artificial Sequence
  Description of Artificial Sequence: Synthetic oligonucleotide
guuacagcaacaccggauu

SEQ ID NO: 2542115 - RNA, 19 nt, Artificial Sequence
  Description of Artificial Sequence: Synthetic oligonucleotide
aggggauucugagccaaag

SEQ ID NO: 2542116 - RNA, 19 nt, Artificial Sequence
  Description of Artificial Sequence: Synthetic oligonucleotide
cucacuuugagucuugguu

SEQ ID NO: 2542117 - RNA, 19 nt, Artificial Sequence
  Description of Artificial Sequence: Synthetic oligonucleotide
gacucgguaaggcuuuucu

SEQ ID NO: 2542118 - RNA, 19 nt, Artificial Sequence
  Description of Artificial Sequence: Synthetic oligonucleotide
ucuguucaucauuccuuau

SEQ ID NO: 2542119 - RNA, 19 nt, Artificial Sequence
  Description of Artificial Sequence: Synthetic oligonucleotide
acaggacaugacucgguaa

SEQ ID NO: 2542120 - RNA, 19 nt, Artificial Sequence
  Description of Artificial Sequence: Synthetic oligonucleotide
aggaucugcaccacggcgu

SEQ ID NO: 2542121 - RNA, 19 nt, Artificial Sequence
  Description of Artificial Sequence: Synthetic oligonucleotide
uaccuugccgcagcuccgg

SEQ ID NO: 2542122 - RNA, 19 nt, Artificial Sequence
  Description of Artificial Sequence: Synthetic oligonucleotide
caagcacccacagcacagg

SEQ ID NO: 2542123 - RNA, 19 nt, Artificial Sequence
  Description of Artificial Sequence: Synthetic oligonucleotide
uugcgggaugguaggccag

SEQ ID NO: 2542124 - RNA, 19 nt, Artificial Sequence
  Description of Artificial Sequence: Synthetic oligonucleotide
acaugacucgguaaggcuu

SEQ ID NO: 2542125 - RNA, 19 nt, Artificial Sequence
  Description of Artificial Sequence: Synthetic oligonucleotide
uugccgcagcuccgggucg

SEQ ID NO: 2542126 - RNA, 19 nt, Artificial Sequence
  Description of Artificial Sequence: Synthetic oligonucleotide
uccgggucguccagcacgu

SEQ ID NO: 2542127 - RNA, 19 nt, Artificial Sequence
  Description of Artificial Sequence: Synthetic oligonucleotide
cuguucaucauuccuuaua

SEQ ID NO: 2542128 - RNA, 19 nt, Artificial Sequence
  Description of Artificial Sequence: Synthetic oligonucleotide
aucuaucagggcagagcgg

SEQ ID NO: 2542129 - RNA, 19 nt, Artificial Sequence
  Description of Artificial Sequence: Synthetic oligonucleotide
cucuguucaucauuccuua

SEQ ID NO: 2542130 - RNA, 19 nt, Artificial Sequence
  Description of Artificial Sequence: Synthetic oligonucleotide
agaacaaauuuggguuaca

SEQ ID NO: 2542131 - RNA, 19 nt, Artificial Sequence
  Description of Artificial Sequence: Synthetic oligonucleotide
uccccuugaggaacaccac

SEQ ID NO: 2542132 - RNA, 19 nt, Artificial Sequence
  Description of Artificial Sequence: Synthetic oligonucleotide
auaggggauucugagccaa

SEQ ID NO: 2542133 - RNA, 19 nt, Artificial Sequence
  Description of Artificial Sequence: Synthetic oligonucleotide
ucucaucuaucagggcaga

SEQ ID NO: 2542134 - RNA, 19 nt, Artificial Sequence
  Description of Artificial Sequence: Synthetic oligonucleotide
ugguuacaaggaaguucac

SEQ ID NO: 2542135 - RNA, 19 nt, Artificial Sequence
  Description of Artificial Sequence: Synthetic oligonucleotide
acgcccaccccuggcaggc

SEQ ID NO: 2542136 - RNA, 19 nt, Artificial Sequence
  Description of Artificial Sequence: Synthetic oligonucleotide
aauuuacagggcagugguu

SEQ ID NO: 2542137 - RNA, 19 nt, Artificial Sequence
  Description of Artificial Sequence: Synthetic oligonucleotide
gcagcgaaugugaugaaga

SEQ ID NO: 2542138 - RNA, 19 nt, Artificial Sequence
  Description of Artificial Sequence: Synthetic oligonucleotide
augugaugaagagggcacu

SEQ ID NO: 2542139 - RNA, 19 nt, Artificial Sequence
  Description of Artificial Sequence: Synthetic oligonucleotide
aucuuacaacccaaccaca

SEQ ID NO: 2542140 - RNA, 19 nt, Artificial Sequence
  Description of Artificial Sequence: Synthetic oligonucleotide
ccaaccacaagagucagga

SEQ ID NO: 2542141 - RNA, 19 nt, Artificial Sequence
  Description of Artificial Sequence: Synthetic oligonucleotide
auaccuugccgcagcuccg

SEQ ID NO: 2542142 - RNA, 19 nt, Artificial Sequence
  Description of Artificial Sequence: Synthetic oligonucleotide
cuugguucuucucaucuau

SEQ ID NO: 2542143 - RNA, 19 nt, Artificial Sequence
  Description of Artificial Sequence: Synthetic oligonucleotide
aggccaguuggaauagucu

SEQ ID NO: 2542144 - RNA, 19 nt, Artificial Sequence
  Description of Artificial Sequence: Synthetic oligonucleotide
uagucgcggacgccgugca

SEQ ID NO: 2542145 - RNA, 19 nt, Artificial Sequence
  Description of Artificial Sequence: Synthetic oligonucleotide
cacagcacaggacaugacu

SEQ ID NO: 2542146 - RNA, 19 nt, Artificial Sequence
  Description of Artificial Sequence: Synthetic oligonucleotide
guagucgcggacgccgugc

SEQ ID NO: 2542147 - RNA, 19 nt, Artificial Sequence
  Description of Artificial Sequence: Synthetic oligonucleotide
cuggagcccucacuuugag

SEQ ID NO: 2542148 - RNA, 19 nt, Artificial Sequence
  Description of Artificial Sequence: Synthetic oligonucleotide
cucaucuaucagggcagag

SEQ ID NO: 2542149 - RNA, 19 nt, Artificial Sequence
  Description of Artificial Sequence: Synthetic oligonucleotide
gcaagcacccacagcacag

SEQ ID NO: 2542150 - RNA, 19 nt, Artificial Sequence
  Description of Artificial Sequence: Synthetic oligonucleotide
accggauuacaaugccaau

SEQ ID NO: 2542151 - RNA, 19 nt, Artificial Sequence
  Description of Artificial Sequence: Synthetic oligonucleotide
uaauaccuugccgcagcuc

SEQ ID NO: 2542152 - RNA, 19 nt, Artificial Sequence
  Description of Artificial Sequence: Synthetic oligonucleotide
cugaaccaggcagagaaua

SEQ ID NO: 2542153 - RNA, 19 nt, Artificial Sequence
  Description of Artificial Sequence: Synthetic oligonucleotide
cauaggggauucugagcca

SEQ ID NO: 2542154 - RNA, 19 nt, Artificial Sequence
  Description of Artificial Sequence: Synthetic oligonucleotide
acaccggauuacaaugcca

SEQ ID NO: 2542155 - RNA, 19 nt, Artificial Sequence
  Description of Artificial Sequence: Synthetic oligonucleotide
uaggccgcguagucgcgga

SEQ ID NO: 2542156 - RNA, 19 nt, Artificial Sequence
  Description of Artificial Sequence: Synthetic oligonucleotide
acccaaccacaagagucag

SEQ ID NO: 2542157 - RNA, 19 nt, Artificial Sequence
  Description of Artificial Sequence: Synthetic oligonucleotide
gguaggccaguuggaauag

SEQ ID NO: 2542158 - RNA, 19 nt, Artificial Sequence
  Description of Artificial Sequence: Synthetic oligonucleotide
ggcagcgaaugugaugaag

SEQ ID NO: 2542159 - RNA, 19 nt, Artificial Sequence
  Description of Artificial Sequence: Synthetic oligonucleotide
guaggccgcguagucgcgg

SEQ ID NO: 2542160 - RNA, 19 nt, Artificial Sequence
  Description of Artificial Sequence: Synthetic oligonucleotide
gggguuuugccaucuuaca

SEQ ID NO: 2542161 - RNA, 19 nt, Artificial Sequence
  Description of Artificial Sequence: Synthetic oligonucleotide
gaagccgcacuggggcugc

SEQ ID NO: 2542162 - RNA, 19 nt, Artificial Sequence
  Description of Artificial Sequence: Synthetic oligonucleotide
gccaauuuacagggcagug

SEQ ID NO: 2542163 - RNA, 19 nt, Artificial Sequence
  Description of Artificial Sequence: Synthetic oligonucleotide
acguuguaggccgcguagu

SEQ ID NO: 2542164 - RNA, 19 nt, Artificial Sequence
  Description of Artificial Sequence: Synthetic oligonucleotide
ugcgggaugguaggccagu

SEQ ID NO: 2542165 - RNA, 19 nt, Artificial Sequence
  Description of Artificial Sequence: Synthetic oligonucleotide
cacaggacaugacucggua

SEQ ID NO: 2542166 - RNA, 19 nt, Artificial Sequence
  Description of Artificial Sequence: Synthetic oligonucleotide
agccaaaggccaaguaaaa

SEQ ID NO: 2542167 - RNA, 19 nt, Artificial Sequence
  Description of Artificial Sequence: Synthetic oligonucleotide
gcuugcaaggcuggaggcc

SEQ ID NO: 2542168 - RNA, 19 nt, Artificial Sequence
  Description of Artificial Sequence: Synthetic oligonucleotide
cucgggcguccccuugagg

SEQ ID NO: 2542169 - RNA, 19 nt, Artificial Sequence
  Description of Artificial Sequence: Synthetic oligonucleotide
gugcagucgcaggaucugc

SEQ ID NO: 2542170 - RNA, 19 nt, Artificial Sequence
  Description of Artificial Sequence: Synthetic oligonucleotide
gcggacgccgugcagucgc

SEQ ID NO: 2542171 - RNA, 19 nt, Artificial Sequence
  Description of Artificial Sequence: Synthetic oligonucleotide
ccuugaggaacaccaccac

SEQ ID NO: 2542172 - RNA, 19 nt, Artificial Sequence
  Description of Artificial Sequence: Synthetic oligonucleotide
aggccgcguagucgcggac

SEQ ID NO: 2542173 - RNA, 19 nt, Artificial Sequence
  Description of Artificial Sequence: Synthetic oligonucleotide
auucugagccaaaggccaa

SEQ ID NO: 2542174 - RNA, 19 nt, Artificial Sequence
  Description of Artificial Sequence: Synthetic oligonucleotide
cacuugcgggaugguaggc

SEQ ID NO: 2542175 - RNA, 19 nt, Artificial Sequence
  Description of Artificial Sequence: Synthetic oligonucleotide
gcagucgcaggaucugcac

SEQ ID NO: 2542176 - RNA, 19 nt, Artificial Sequence
  Description of Artificial Sequence: Synthetic oligonucleotide
gcagugguuacaaggaagu

SEQ ID NO: 2542177 - RNA, 19 nt, Artificial Sequence
  Description of Artificial Sequence: Synthetic oligonucleotide
caugacucgguaaggcuuu

SEQ ID NO: 2542178 - RNA, 19 nt, Artificial Sequence
  Description of Artificial Sequence: Synthetic oligonucleotide
caaacucgccauugaggua

SEQ ID NO: 2542179 - RNA, 19 nt, Artificial Sequence
  Description of Artificial Sequence: Synthetic oligonucleotide
cacucugcucagcgaggac

SEQ ID NO: 2542180 - RNA, 19 nt, Artificial Sequence
  Description of Artificial Sequence: Synthetic oligonucleotide
agcacguuguaggccgcgu

SEQ ID NO: 2542181 - RNA, 19 nt, Artificial Sequence
  Description of Artificial Sequence: Synthetic oligonucleotide
aacucgccauugagguaca

SEQ ID NO: 2542182 - RNA, 19 nt, Artificial Sequence
  Description of Artificial Sequence: Synthetic oligonucleotide
cagcacguuguaggccgcg

SEQ ID NO: 2542183 - RNA, 19 nt, Artificial Sequence
  Description of Artificial Sequence: Synthetic oligonucleotide
cuuuucuggcagcgaaugu

SEQ ID NO: 2542184 - RNA, 19 nt, Artificial Sequence
  Description of Artificial Sequence: Synthetic oligonucleotide
gagcccucacuuugagucu

SEQ ID NO: 2542185 - RNA, 19 nt, Artificial Sequence
  Description of Artificial Sequence: Synthetic oligonucleotide
gugaugaagagggcacucu

SEQ ID NO: 2542186 - RNA, 19 nt, Artificial Sequence
  Description of Artificial Sequence: Synthetic oligonucleotide
guacacuugcgggauggua

SEQ ID NO: 2542187 - RNA, 19 nt, Artificial Sequence
  Description of Artificial Sequence: Synthetic oligonucleotide
cagcaacaccggauuacaa

SEQ ID NO: 2542188 - RNA, 19 nt, Artificial Sequence
  Description of Artificial Sequence: Synthetic oligonucleotide
ggccaguuggaauagucuu

SEQ ID NO: 2542189 - RNA, 19 nt, Artificial Sequence
  Description of Artificial Sequence: Synthetic oligonucleotide
gguuacagcaacaccggau

SEQ ID NO: 2542190 - RNA, 19 nt, Artificial Sequence
  Description of Artificial Sequence: Synthetic oligonucleotide
gccgcguagucgcggacgc

SEQ ID NO: 2542191 - RNA, 19 nt, Artificial Sequence
  Description of Artificial Sequence: Synthetic oligonucleotide
caguuggaauagucuuuaa

SEQ ID NO: 2542192 - RNA, 19 nt, Artificial Sequence
  Description of Artificial Sequence: Synthetic oligonucleotide
agcccucacuuugagucuu

SEQ ID NO: 2542193 - RNA, 19 nt, Artificial Sequence
  Description of Artificial Sequence: Synthetic oligonucleotide
uggcagcgaaugugaugaa

SEQ ID NO: 2542194 - RNA, 19 nt, Artificial Sequence
  Description of Artificial Sequence: Synthetic oligonucleotide
ggguuacagcaacaccgga

SEQ ID NO: 2542195 - RNA, 19 nt, Artificial Sequence
  Description of Artificial Sequence: Synthetic oligonucleotide
cugagccaaaggccaagua

SEQ ID NO: 2542196 - RNA, 19 nt, Artificial Sequence
  Description of Artificial Sequence: Synthetic oligonucleotide
cgcguagucgcggacgccg

SEQ ID NO: 2542197 - RNA, 19 nt, Artificial Sequence
  Description of Artificial Sequence: Synthetic oligonucleotide
ggaugguaggccaguugga

SEQ ID NO: 2542198 - RNA, 19 nt, Artificial Sequence
  Description of Artificial Sequence: Synthetic oligonucleotide
gcccaccccuggcaggccg

SEQ ID NO: 2542199 - RNA, 19 nt, Artificial Sequence
  Description of Artificial Sequence: Synthetic oligonucleotide
agccgcacuggggcugcuc

SEQ ID NO: 2542200 - RNA, 19 nt, Artificial Sequence
  Description of Artificial Sequence: Synthetic oligonucleotide
cucgccauugagguacacu

SEQ ID NO: 2542201 - RNA, 19 nt, Artificial Sequence
  Description of Artificial Sequence: Synthetic oligonucleotide
gucgcggacgccgugcagu

SEQ ID NO: 2542202 - RNA, 19 nt, Artificial Sequence
  Description of Artificial Sequence: Synthetic oligonucleotide
gcagagcggauucccagcu

SEQ ID NO: 2542203 - RNA, 19 nt, Artificial Sequence
  Description of Artificial Sequence: Synthetic oligonucleotide
ccaguuggaauagucuuua

SEQ ID NO: 2542204 - RNA, 19 nt, Artificial Sequence
  Description of Artificial Sequence: Synthetic oligonucleotide
cgccauugagguacacuug

SEQ ID NO: 2542205 - RNA, 19 nt, Artificial Sequence
  Description of Artificial Sequence: Synthetic oligonucleotide
cguuguaggccgcguaguc

SEQ ID NO: 2542206 - RNA, 19 nt, Artificial Sequence
  Description of Artificial Sequence: Synthetic oligonucleotide
accagcgcguccagcugcu

SEQ ID NO: 2542207 - RNA, 19 nt, Artificial Sequence
  Description of Artificial Sequence: Synthetic oligonucleotide
gcucagcgaggaccuggag

SEQ ID NO: 2542208 - RNA, 19 nt, Artificial Sequence
  Description of Artificial Sequence: Synthetic oligonucleotide
gcucgggcguccccuugag

SEQ ID NO: 2542209 - RNA, 19 nt, Artificial Sequence
  Description of Artificial Sequence: Synthetic oligonucleotide
gcacucugcucagcgagga

SEQ ID NO: 2542210 - RNA, 19 nt, Artificial Sequence
  Description of Artificial Sequence: Synthetic oligonucleotide
cuggccgcccgagcucgcc

SEQ ID NO: 2542211 - RNA, 19 nt, Artificial Sequence
  Description of Artificial Sequence: Synthetic oligonucleotide
ccuggagcccucacuuuga

SEQ ID NO: 2542212 - RNA, 19 nt, Artificial Sequence
  Description of Artificial Sequence: Synthetic oligonucleotide
ggcguugcugaagccgcac

SEQ ID NO: 2542213 - RNA, 19 nt, Artificial Sequence
  Description of Artificial Sequence: Synthetic oligonucleotide
cagcuccgggucguccagc

SEQ ID NO: 2542214 - RNA, 19 nt, Artificial Sequence
  Description of Artificial Sequence: Synthetic oligonucleotide
ccagcacguuguaggccgc

SEQ ID NO: 2542215 - RNA, 19 nt, Artificial Sequence
  Description of Artificial Sequence: Synthetic oligonucleotide
gccgugcagucgcaggauc

SEQ ID NO: 2542216 - RNA, 19 nt, Artificial Sequence
  Description of Artificial Sequence: Synthetic oligonucleotide
cgggucguccagcacguug

SEQ ID NO: 2542217 - RNA, 19 nt, Artificial Sequence
  Description of Artificial Sequence: Synthetic oligonucleotide
gggcguccccuugaggaac

SEQ ID NO: 2542218 - RNA, 19 nt, Artificial Sequence
  Description of Artificial Sequence: Synthetic oligonucleotide
gaccuggagcccucacuuu

SEQ ID NO: 2542219 - RNA, 19 nt, Artificial Sequence
  Description of Artificial Sequence: Synthetic oligonucleotide
cuccugaaccaggcagaga

SEQ ID NO: 2542220 - RNA, 19 nt, Artificial Sequence
  Description of Artificial Sequence: Synthetic oligonucleotide
cggauuacaaugccaauuu

SEQ ID NO: 2542221 - RNA, 19 nt, Artificial Sequence
  Description of Artificial Sequence: Synthetic oligonucleotide
ccgcacuggggcugcucgg

SEQ ID NO: 2542222 - RNA, 19 nt, Artificial Sequence
  Description of Artificial Sequence: Synthetic oligonucleotide
caccccuggcaggccgccg

SEQ ID NO: 2542223 - RNA, 19 nt, Artificial Sequence
  Description of Artificial Sequence: Synthetic oligonucleotide
cgggaugguaggccaguug

SEQ ID NO: 2542224 - RNA, 19 nt, Artificial Sequence
  Description of Artificial Sequence: Synthetic oligonucleotide
cuccgccuggccgcccgag

SEQ ID NO: 2542225 - RNA, 19 nt, Artificial Sequence
  Description of Artificial Sequence: Synthetic oligonucleotide
gcacguuguaggccgcgua

SEQ ID NO: 2542226 - RNA, 19 nt, Artificial Sequence
  Description of Artificial Sequence: Synthetic oligonucleotide
ggacgccgugcagucgcag

SEQ ID NO: 2542227 - RNA, 19 nt, Artificial Sequence
  Description of Artificial Sequence: Synthetic oligonucleotide
ggaucugcaccacggcguu

SEQ ID NO: 2542228 - RNA, 19 nt, Artificial Sequence
  Description of Artificial Sequence: Synthetic oligonucleotide
cgagcucgccgcccgcacg

SEQ ID NO: 2542229 - RNA, 19 nt, Artificial Sequence
  Description of Artificial Sequence: Synthetic oligonucleotide
cccaccccuggcaggccgc

SEQ ID NO: 2542230 - RNA, 19 nt, Artificial Sequence
  Description of Artificial Sequence: Synthetic oligonucleotide
aagccgcacuggggcugcu

SEQ ID NO: 2542231 - RNA, 19 nt, Artificial Sequence
  Description of Artificial Sequence: Synthetic oligonucleotide
gccaguuggaauagucuuu

SEQ ID NO: 2542232 - RNA, 19 nt, Artificial Sequence
  Description of Artificial Sequence: Synthetic oligonucleotide
ccggauuacaaugccaauu

SEQ ID NO: 2542233 - RNA, 19 nt, Artificial Sequence
  Description of Artificial Sequence: Synthetic oligonucleotide
ggcguccccuugaggaaca

SEQ ID NO: 2542234 - RNA, 19 nt, Artificial Sequence
  Description of Artificial Sequence: Synthetic oligonucleotide
gagcggauucccagcuuuu

SEQ ID NO: 2542235 - RNA, 19 nt, Artificial Sequence
  Description of Artificial Sequence: Synthetic oligonucleotide
cagugguuacaaggaaguu

SEQ ID NO: 2542236 - RNA, 19 nt, Artificial Sequence
  Description of Artificial Sequence: Synthetic oligonucleotide
gcccucacuuugagucuug

SEQ ID NO: 2542237 - RNA, 19 nt, Artificial Sequence
  Description of Artificial Sequence: Synthetic oligonucleotide
gcguugcugaagccgcacu

SEQ ID NO: 2542238 - RNA, 19 nt, Artificial Sequence
  Description of Artificial Sequence: Synthetic oligonucleotide
cguagucgcggacgccgug

SEQ ID NO: 2542239 - RNA, 19 nt, Artificial Sequence
  Description of Artificial Sequence: Synthetic oligonucleotide
ggcuuuucuggcagcgaau

SEQ ID NO: 2542240 - RNA, 19 nt, Artificial Sequence
  Description of Artificial Sequence: Synthetic oligonucleotide
ccgugcagucgcaggaucu

SEQ ID NO: 2542241 - RNA, 19 nt, Artificial Sequence
  Description of Artificial Sequence: Synthetic oligonucleotide
gguacacuugcgggauggu

SEQ ID NO: 2542242 - RNA, 19 nt, Artificial Sequence
  Description of Artificial Sequence: Synthetic oligonucleotide
ccgagcucgccgcccgcac

SEQ ID NO: 2542243 - RNA, 19 nt, Artificial Sequence
  Description of Artificial Sequence: Synthetic oligonucleotide
gccgcccgagcucgccgcc

SEQ ID NO: 2542244 - RNA, 19 nt, Artificial Sequence
  Description of Artificial Sequence: Synthetic oligonucleotide
ccgcacgcccaccccuggc

SEQ ID NO: 2542245 - RNA, 19 nt, Artificial Sequence
  Description of Artificial Sequence: Synthetic oligonucleotide
cagagcggauucccagcuu

SEQ ID NO: 2542246 - RNA, 19 nt, Artificial Sequence
  Description of Artificial Sequence: Synthetic oligonucleotide
cgcacgcccaccccuggca

SEQ ID NO: 2542247 - RNA, 19 nt, Artificial Sequence
  Description of Artificial Sequence: Synthetic oligonucleotide
ccaccccuggcaggccgcc

SEQ ID NO: 2542248 - RNA, 19 nt, Artificial Sequence
  Description of Artificial Sequence: Synthetic oligonucleotide
gcgaggaccuggagcccuc

SEQ ID NO: 2542249 - RNA, 19 nt, Artificial Sequence
  Description of Artificial Sequence: Synthetic oligonucleotide
gcgcguccagcugcuccgc

SEQ ID NO: 2542250 - RNA, 19 nt, Artificial Sequence
  Description of Artificial Sequence: Synthetic oligonucleotide
ccuggccgcccgagcucgc

SEQ ID NO: 2542251 - RNA, 19 nt, Artificial Sequence
  Description of Artificial Sequence: Synthetic oligonucleotide
ccgcguagucgcggacgcc

SEQ ID NO: 2542252 - RNA, 19 nt, Artificial Sequence
  Description of Artificial Sequence: Synthetic oligonucleotide
gcguccccuugaggaacac

SEQ ID NO: 2542253 - RNA, 19 nt, Artificial Sequence
  Description of Artificial Sequence: Synthetic oligonucleotide
cgggcguccccuugaggaa

SEQ ID NO: 2542254 - RNA, 19 nt, Artificial Sequence
  Description of Artificial Sequence: Synthetic oligonucleotide
ccgcccgagcucgccgccc

SEQ ID NO: 2542255 - RNA, 19 nt, Artificial Sequence
  Description of Artificial Sequence: Synthetic oligonucleotide
gcguagucgcggacgccgu

SEQ ID NO: 2542256 - RNA, 19 nt, Artificial Sequence
  Description of Artificial Sequence: Synthetic oligonucleotide
cggcguugcugaagccgca

SEQ ID NO: 2542257 - RNA, 19 nt, Artificial Sequence
  Description of Artificial Sequence: Synthetic oligonucleotide
ccagcgcguccagcugcuc

SEQ ID NO: 2542258 - RNA, 19 nt, Artificial Sequence
  Description of Artificial Sequence: Synthetic oligonucleotide
cggacgccgugcagucgca

SEQ ID NO: 2542259 - RNA, 19 nt, Artificial Sequence
  Description of Artificial Sequence: Synthetic oligonucleotide
gcgggaugguaggccaguu

SEQ ID NO: 2542260 - RNA, 19 nt, Artificial Sequence
  Description of Artificial Sequence: Synthetic oligonucleotide
ccgggucguccagcacguu

SEQ ID NO: 2542261 - RNA, 19 nt, Artificial Sequence
  Description of Artificial Sequence: Synthetic oligonucleotide
auuuuaacaggcuauaacc

SEQ ID NO: 2542262 - RNA, 19 nt, Artificial Sequence
  Description of Artificial Sequence: Synthetic oligonucleotide
uuuaacauaaaucuacagc

SEQ ID NO: 2542263 - RNA, 19 nt, Artificial Sequence
  Description of Artificial Sequence: Synthetic oligonucleotide
agagaauuaacucuaacuc

SEQ ID NO: 2542264 - RNA, 19 nt, Artificial Sequence
  Description of Artificial Sequence: Synthetic oligonucleotide
uauacagugaccauuagga

SEQ ID NO: 2542265 - RNA, 19 nt, Artificial Sequence
  Description of Artificial Sequence: Synthetic oligonucleotide
aacaacauccuuuauaaca

SEQ ID NO: 2542266 - RNA, 19 nt, Artificial Sequence
  Description of Artificial Sequence: Synthetic oligonucleotide
acaaaacuaaaauagcugg

SEQ ID NO: 2542267 - RNA, 19 nt, Artificial Sequence
  Description of Artificial Sequence: Synthetic oligonucleotide
aaccaauaaauauauauga

SEQ ID NO: 2542268 - RNA, 19 nt, Artificial Sequence
  Description of Artificial Sequence: Synthetic oligonucleotide
aacucuacaaauucaggac

SEQ ID NO: 2542269 - RNA, 19 nt, Artificial Sequence
  Description of Artificial Sequence: Synthetic oligonucleotide
auuacaauugcucauaagu

SEQ ID NO: 2542270 - RNA, 19 nt, Artificial Sequence
  Description of Artificial Sequence: Synthetic oligonucleotide
aauauauaugaaaauguuc

SEQ ID NO: 2542271 - RNA, 19 nt, Artificial Sequence
  Description of Artificial Sequence: Synthetic oligonucleotide
ucuagaauacaacaaaacu

SEQ ID NO: 2542272 - RNA, 19 nt, Artificial Sequence
  Description of Artificial Sequence: Synthetic oligonucleotide
acgaguuuaacauaaaucu

SEQ ID NO: 2542273 - RNA, 19 nt, Artificial Sequence
  Description of Artificial Sequence: Synthetic oligonucleotide
uuuagaacuaauuacaauu

SEQ ID NO: 2542274 - RNA, 19 nt, Artificial Sequence
  Description of Artificial Sequence: Synthetic oligonucleotide
auaaccaauaaauauauau

SEQ ID NO: 2542275 - RNA, 19 nt, Artificial Sequence
  Description of Artificial Sequence: Synthetic oligonucleotide
aaagaaaguuccaagagag

SEQ ID NO: 2542276 - RNA, 19 nt, Artificial Sequence
  Description of Artificial Sequence: Synthetic oligonucleotide
uuggauucuacccugaggc

SEQ ID NO: 2542277 - RNA, 19 nt, Artificial Sequence
  Description of Artificial Sequence: Synthetic oligonucleotide
uagaauacaacaaaacuaa

SEQ ID NO: 2542278 - RNA, 19 nt, Artificial Sequence
  Description of Artificial Sequence: Synthetic oligonucleotide
ucuaacucuacaaauucag

SEQ ID NO: 2542279 - RNA, 19 nt, Artificial Sequence
  Description of Artificial Sequence: Synthetic oligonucleotide
aaguaaacuacagaagaac

SEQ ID NO: 2542280 - RNA, 19 nt, Artificial Sequence
  Description of Artificial Sequence: Synthetic oligonucleotide
auaaguacgaguuuaacau

SEQ ID NO: 2542281 - RNA, 19 nt, Artificial Sequence
  Description of Artificial Sequence: Synthetic oligonucleotide
ucaucauauaaauacauaa

SEQ ID NO: 2542282 - RNA, 19 nt, Artificial Sequence
  Description of Artificial Sequence: Synthetic oligonucleotide
uuagaacuaauuacaauug

SEQ ID NO: 2542283 - RNA, 19 nt, Artificial Sequence
  Description of Artificial Sequence: Synthetic oligonucleotide
augacaggaaacaacaucc

SEQ ID NO: 2542284 - RNA, 19 nt, Artificial Sequence
  Description of Artificial Sequence: Synthetic oligonucleotide
aacuaauuacaauugcuca

SEQ ID NO: 2542285 - RNA, 19 nt, Artificial Sequence
  Description of Artificial Sequence: Synthetic oligonucleotide
aacauaaaucuacagcucu

SEQ ID NO: 2542286 - RNA, 19 nt, Artificial Sequence
  Description of Artificial Sequence: Synthetic oligonucleotide
ugagaaaggugauugaggc

SEQ ID NO: 2542287 - RNA, 19 nt, Artificial Sequence
  Description of Artificial Sequence: Synthetic oligonucleotide
ugauugaggccguagaggg

SEQ ID NO: 2542288 - RNA, 19 nt, Artificial Sequence
  Description of Artificial Sequence: Synthetic oligonucleotide
agaaaggugauugaggccg

SEQ ID NO: 2542289 - RNA, 19 nt, Artificial Sequence
  Description of Artificial Sequence: Synthetic oligonucleotide
uacaugacaggaaacaaca

SEQ ID NO: 2542290 - RNA, 19 nt, Artificial Sequence
  Description of Artificial Sequence: Synthetic oligonucleotide
uacaaauucaggacuauac

SEQ ID NO: 2542291 - RNA, 19 nt, Artificial Sequence
  Description of Artificial Sequence: Synthetic oligonucleotide
uucacuagaacacacacuu

SEQ ID NO: 2542292 - RNA, 19 nt, Artificial Sequence
  Description of Artificial Sequence: Synthetic oligonucleotide
aacccuaacacacaccucu

SEQ ID NO: 2542293 - RNA, 19 nt, Artificial Sequence
  Description of Artificial Sequence: Synthetic oligonucleotide
gaaacaacauccuuuauaa

SEQ ID NO: 2542294 - RNA, 19 nt, Artificial Sequence
  Description of Artificial Sequence: Synthetic oligonucleotide
aacaaaacuaaaauagcug

SEQ ID NO: 2542295 - RNA, 19 nt, Artificial Sequence
  Description of Artificial Sequence: Synthetic oligonucleotide
ugcaacaacccuaacacac

SEQ ID NO: 2542296 - RNA, 19 nt, Artificial Sequence
  Description of Artificial Sequence: Synthetic oligonucleotide
ucuugucuagaauacaaca

SEQ ID NO: 2542297 - RNA, 19 nt, Artificial Sequence
  Description of Artificial Sequence: Synthetic oligonucleotide
acucuaacucuacaaauuc

SEQ ID NO: 2542298 - RNA, 19 nt, Artificial Sequence
  Description of Artificial Sequence: Synthetic oligonucleotide
acaacaaaacuaaaauagc

SEQ ID NO: 2542299 - RNA, 19 nt, Artificial Sequence
  Description of Artificial Sequence: Synthetic oligonucleotide
uggggugaggcucacaggg

SEQ ID NO: 2542300 - RNA, 19 nt, Artificial Sequence
  Description of Artificial Sequence: Synthetic oligonucleotide
uacgaguuuaacauaaauc

SEQ ID NO: 2542301 - RNA, 19 nt, Artificial Sequence
  Description of Artificial Sequence: Synthetic oligonucleotide
uacagugaccauuaggagc

SEQ ID NO: 2542302 - RNA, 19 nt, Artificial Sequence
  Description of Artificial Sequence: Synthetic oligonucleotide
auaacaaguaaauacuaaa

SEQ ID NO: 2542303 - RNA, 19 nt, Artificial Sequence
  Description of Artificial Sequence: Synthetic oligonucleotide
uuaacucuaacucuacaaa

SEQ ID NO: 2542304 - RNA, 19 nt, Artificial Sequence
  Description of Artificial Sequence: Synthetic oligonucleotide
aauuacaauugcucauaag

SEQ ID NO: 2542305 - RNA, 19 nt, Artificial Sequence
  Description of Artificial Sequence: Synthetic oligonucleotide
aggugugucaauuugggug

SEQ ID NO: 2542306 - RNA, 19 nt, Artificial Sequence
  Description of Artificial Sequence: Synthetic oligonucleotide
uacaauugcucauaaguac

SEQ ID NO: 2542307 - RNA, 19 nt, Artificial Sequence
  Description of Artificial Sequence: Synthetic oligonucleotide
gaagaacaaagaaaguucc

SEQ ID NO: 2542308 - RNA, 19 nt, Artificial Sequence
  Description of Artificial Sequence: Synthetic oligonucleotide
aguucaugccuuuuagaac

SEQ ID NO: 2542309 - RNA, 19 nt, Artificial Sequence
  Description of Artificial Sequence: Synthetic oligonucleotide
aauguucacuagaacacac

SEQ ID NO: 2542310 - RNA, 19 nt, Artificial Sequence
  Description of Artificial Sequence: Synthetic oligonucleotide
gaguuuaacauaaaucuac

SEQ ID NO: 2542311 - RNA, 19 nt, Artificial Sequence
  Description of Artificial Sequence: Synthetic oligonucleotide
aaauagcugguuuuacaug

SEQ ID NO: 2542312 - RNA, 19 nt, Artificial Sequence
  Description of Artificial Sequence: Synthetic oligonucleotide
uagaacuaauuacaauugc

SEQ ID NO: 2542313 - RNA, 19 nt, Artificial Sequence
  Description of Artificial Sequence: Synthetic oligonucleotide
aaacaacauccuuuauaac

SEQ ID NO: 2542314 - RNA, 19 nt, Artificial Sequence
  Description of Artificial Sequence: Synthetic oligonucleotide
uuccaagagagaauuaacu

SEQ ID NO: 2542315 - RNA, 19 nt, Artificial Sequence
  Description of Artificial Sequence: Synthetic oligonucleotide
uuuugagcgaagcuggacu

SEQ ID NO: 2542316 - RNA, 19 nt, Artificial Sequence
  Description of Artificial Sequence: Synthetic oligonucleotide
uaaaauagcugguuuuaca

SEQ ID NO: 2542317 - RNA, 19 nt, Artificial Sequence
  Description of Artificial Sequence: Synthetic oligonucleotide
gagaggucuguguaggugg

SEQ ID NO: 2542318 - RNA, 19 nt, Artificial Sequence
  Description of Artificial Sequence: Synthetic oligonucleotide
uuauaacaaguaaauacua

SEQ ID NO: 2542319 - RNA, 19 nt, Artificial Sequence
  Description of Artificial Sequence: Synthetic oligonucleotide
auuaacucuaacucuacaa

SEQ ID NO: 2542320 - RNA, 19 nt, Artificial Sequence
  Description of Artificial Sequence: Synthetic oligonucleotide
uuaggagcugaguucaugc

SEQ ID NO: 2542321 - RNA, 19 nt, Artificial Sequence
  Description of Artificial Sequence: Synthetic oligonucleotide
uugucuagaauacaacaaa

SEQ ID NO: 2542322 - RNA, 19 nt, Artificial Sequence
  Description of Artificial Sequence: Synthetic oligonucleotide
uuacaauugcucauaagua

SEQ ID NO: 2542323 - RNA, 19 nt, Artificial Sequence
  Description of Artificial Sequence: Synthetic oligonucleotide
uuacaugacaggaaacaac

SEQ ID NO: 2542324 - RNA, 19 nt, Artificial Sequence
  Description of Artificial Sequence: Synthetic oligonucleotide
aaacuacagaagaacaaag

SEQ ID NO: 2542325 - RNA, 19 nt, Artificial Sequence
  Description of Artificial Sequence: Synthetic oligonucleotide
aauuaacucuaacucuaca

SEQ ID NO: 2542326 - RNA, 19 nt, Artificial Sequence
  Description of Artificial Sequence: Synthetic oligonucleotide
accauuaggagcugaguuc

SEQ ID NO: 2542327 - RNA, 19 nt, Artificial Sequence
  Description of Artificial Sequence: Synthetic oligonucleotide
aacuaaaauagcugguuuu

SEQ ID NO: 2542328 - RNA, 19 nt, Artificial Sequence
  Description of Artificial Sequence: Synthetic oligonucleotide
aaauucaggacuauacagu

SEQ ID NO: 2542329 - RNA, 19 nt, Artificial Sequence
  Description of Artificial Sequence: Synthetic oligonucleotide
ucaauuugggugcuucuug

SEQ ID NO: 2542330 - RNA, 19 nt, Artificial Sequence
  Description of Artificial Sequence: Synthetic oligonucleotide
cuauacagugaccauuagg

SEQ ID NO: 2542331 - RNA, 19 nt, Artificial Sequence
  Description of Artificial Sequence: Synthetic oligonucleotide
agagagaauuaacucuaac

SEQ ID NO: 2542332 - RNA, 19 nt, Artificial Sequence
  Description of Artificial Sequence: Synthetic oligonucleotide
auaugaaaauguucacuag

SEQ ID NO: 2542333 - RNA, 19 nt, Artificial Sequence
  Description of Artificial Sequence: Synthetic oligonucleotide
ugucuagaauacaacaaaa

SEQ ID NO: 2542334 - RNA, 19 nt, Artificial Sequence
  Description of Artificial Sequence: Synthetic oligonucleotide
acaaauucaggacuauaca

SEQ ID NO: 2542335 - RNA, 19 nt, Artificial Sequence
  Description of Artificial Sequence: Synthetic oligonucleotide
cuaacucuacaaauucagg

SEQ ID NO: 2542336 - RNA, 19 nt, Artificial Sequence
  Description of Artificial Sequence: Synthetic oligonucleotide
uuuaacaggcuauaaccaa

SEQ ID NO: 2542337 - RNA, 19 nt, Artificial Sequence
  Description of Artificial Sequence: Synthetic oligonucleotide
acaauugcucauaaguacg

SEQ ID NO: 2542338 - RNA, 19 nt, Artificial Sequence
  Description of Artificial Sequence: Synthetic oligonucleotide
ugaaaauguucacuagaac

SEQ ID NO: 2542339 - RNA, 19 nt, Artificial Sequence
  Description of Artificial Sequence: Synthetic oligonucleotide
uuguaguccagguuccccg

SEQ ID NO: 2542340 - RNA, 19 nt, Artificial Sequence
  Description of Artificial Sequence: Synthetic oligonucleotide
acuaauuacaauugcucau

SEQ ID NO: 2542341 - RNA, 19 nt, Artificial Sequence
  Description of Artificial Sequence: Synthetic oligonucleotide
gaacuaauuacaauugcuc

SEQ ID NO: 2542342 - RNA, 19 nt, Artificial Sequence
  Description of Artificial Sequence: Synthetic oligonucleotide
uuuuagaacuaauuacaau

SEQ ID NO: 2542343 - RNA, 19 nt, Artificial Sequence
  Description of Artificial Sequence: Synthetic oligonucleotide
cauaaguacgaguuuaaca

SEQ ID NO: 2542344 - RNA, 19 nt, Artificial Sequence
  Description of Artificial Sequence: Synthetic oligonucleotide
ugccuuuuagaacuaauua

SEQ ID NO: 2542345 - RNA, 19 nt, Artificial Sequence
  Description of Artificial Sequence: Synthetic oligonucleotide
uugcucauaaguacgaguu

SEQ ID NO: 2542346 - RNA, 19 nt, Artificial Sequence
  Description of Artificial Sequence: Synthetic oligonucleotide
gagagaauuaacucuaacu

SEQ ID NO: 2542347 - RNA, 19 nt, Artificial Sequence
  Description of Artificial Sequence: Synthetic oligonucleotide
uaaaucuacagcucuuguc

SEQ ID NO: 2542348 - RNA, 19 nt, Artificial Sequence
  Description of Artificial Sequence: Synthetic oligonucleotide
agaaaguuccaagagagaa

SEQ ID NO: 2542349 - RNA, 19 nt, Artificial Sequence
  Description of Artificial Sequence: Synthetic oligonucleotide
uuaacaggcuauaaccaau

SEQ ID NO: 2542350 - RNA, 19 nt, Artificial Sequence
  Description of Artificial Sequence: Synthetic oligonucleotide
caauuugggugcuucuugg

SEQ ID NO: 2542351 - RNA, 19 nt, Artificial Sequence
  Description of Artificial Sequence: Synthetic oligonucleotide
gaguucaugccuuuuagaa

SEQ ID NO: 2542352 - RNA, 19 nt, Artificial Sequence
  Description of Artificial Sequence: Synthetic oligonucleotide
uaacucuaacucuacaaau

SEQ ID NO: 2542353 - RNA, 19 nt, Artificial Sequence
  Description of Artificial Sequence: Synthetic oligonucleotide
caugacaggaaacaacauc

SEQ ID NO: 2542354 - RNA, 19 nt, Artificial Sequence
  Description of Artificial Sequence: Synthetic oligonucleotide
aacuacagaagaacaaaga

SEQ ID NO: 2542355 - RNA, 19 nt, Artificial Sequence
  Description of Artificial Sequence: Synthetic oligonucleotide
aguaaacuacagaagaaca

SEQ ID NO: 2542356 - RNA, 19 nt, Artificial Sequence
  Description of Artificial Sequence: Synthetic oligonucleotide
ucacaggugugucaauuug

SEQ ID NO: 2542357 - RNA, 19 nt, Artificial Sequence
  Description of Artificial Sequence: Synthetic oligonucleotide
auugcucauaaguacgagu

SEQ ID NO: 2542358 - RNA, 19 nt, Artificial Sequence
  Description of Artificial Sequence: Synthetic oligonucleotide
agaacuaauuacaauugcu

SEQ ID NO: 2542359 - RNA, 19 nt, Artificial Sequence
  Description of Artificial Sequence: Synthetic oligonucleotide
aauugcucauaaguacgag

SEQ ID NO: 2542360 - RNA, 19 nt, Artificial Sequence
  Description of Artificial Sequence: Synthetic oligonucleotide
cacaggugugucaauuugg

SEQ ID NO: 2542361 - RNA, 19 nt, Artificial Sequence
  Description of Artificial Sequence: Synthetic oligonucleotide
ucuacccugaggcggugcg

SEQ ID NO: 2542362 - RNA, 19 nt, Artificial Sequence
  Description of Artificial Sequence: Synthetic oligonucleotide
auacagugaccauuaggag

SEQ ID NO: 2542363 - RNA, 19 nt, Artificial Sequence
  Description of Artificial Sequence: Synthetic oligonucleotide
aacaacccuaacacacacc

SEQ ID NO: 2542364 - RNA, 19 nt, Artificial Sequence
  Description of Artificial Sequence: Synthetic oligonucleotide
gagaauuaacucuaacucu

SEQ ID NO: 2542365 - RNA, 19 nt, Artificial Sequence
  Description of Artificial Sequence: Synthetic oligonucleotide
cuuguuucccggaagccug

SEQ ID NO: 2542366 - RNA, 19 nt, Artificial Sequence
  Description of Artificial Sequence: Synthetic oligonucleotide
cuacagaagaacaaagaaa

SEQ ID NO: 2542367 - RNA, 19 nt, Artificial Sequence
  Description of Artificial Sequence: Synthetic oligonucleotide
caggcuauaaccaauaaau

SEQ ID NO: 2542368 - RNA, 19 nt, Artificial Sequence
  Description of Artificial Sequence: Synthetic oligonucleotide
aaguacgaguuuaacauaa

SEQ ID NO: 2542369 - RNA, 19 nt, Artificial Sequence
  Description of Artificial Sequence: Synthetic oligonucleotide
aauuugggugcuucuugga

SEQ ID NO: 2542370 - RNA, 19 nt, Artificial Sequence
  Description of Artificial Sequence: Synthetic oligonucleotide
auaaaucuacagcucuugu

SEQ ID NO: 2542371 - RNA, 19 nt, Artificial Sequence
  Description of Artificial Sequence: Synthetic oligonucleotide
aacauccuuuauaacaagu

SEQ ID NO: 2542372 - RNA, 19 nt, Artificial Sequence
  Description of Artificial Sequence: Synthetic oligonucleotide
caaagaaaguuccaagaga

SEQ ID NO: 2542373 - RNA, 19 nt, Artificial Sequence
  Description of Artificial Sequence: Synthetic oligonucleotide
uuucccggaagccugcaac

SEQ ID NO: 2542374 - RNA, 19 nt, Artificial Sequence
  Description of Artificial Sequence: Synthetic oligonucleotide
agaacaaagaaaguuccaa

SEQ ID NO: 2542375 - RNA, 19 nt, Artificial Sequence
  Description of Artificial Sequence: Synthetic oligonucleotide
ggugugucaauuugggugc

SEQ ID NO: 2542376 - RNA, 19 nt, Artificial Sequence
  Description of Artificial Sequence: Synthetic oligonucleotide
uggauucuacccugaggcg

SEQ ID NO: 2542377 - RNA, 19 nt, Artificial Sequence
  Description of Artificial Sequence: Synthetic oligonucleotide
ucuuggauucuacccugag

SEQ ID NO: 2542378 - RNA, 19 nt, Artificial Sequence
  Description of Artificial Sequence: Synthetic oligonucleotide
ccugcaacaacccuaacac

SEQ ID NO: 2542379 - RNA, 19 nt, Artificial Sequence
  Description of Artificial Sequence: Synthetic oligonucleotide
gagaaaggugauugaggcc

SEQ ID NO: 2542380 - RNA, 19 nt, Artificial Sequence
  Description of Artificial Sequence: Synthetic oligonucleotide
ugaguucaugccuuuuaga

SEQ ID NO: 2542381 - RNA, 19 nt, Artificial Sequence
  Description of Artificial Sequence: Synthetic oligonucleotide
guggugagaaaggugauug

SEQ ID NO: 2542382 - RNA, 19 nt, Artificial Sequence
  Description of Artificial Sequence: Synthetic oligonucleotide
cuugucuagaauacaacaa

SEQ ID NO: 2542383 - RNA, 19 nt, Artificial Sequence
  Description of Artificial Sequence: Synthetic oligonucleotide
gugauugaggccguagagg

SEQ ID NO: 2542384 - RNA, 19 nt, Artificial Sequence
  Description of Artificial Sequence: Synthetic oligonucleotide
ugagcgaagcuggacuugg

SEQ ID NO: 2542385 - RNA, 19 nt, Artificial Sequence
  Description of Artificial Sequence: Synthetic oligonucleotide
cucacaggguccgugaugc

SEQ ID NO: 2542386 - RNA, 19 nt, Artificial Sequence
  Description of Artificial Sequence: Synthetic oligonucleotide
gccuuuuagaacuaauuac

SEQ ID NO: 2542387 - RNA, 19 nt, Artificial Sequence
  Description of Artificial Sequence: Synthetic oligonucleotide
cugaguucaugccuuuuag

SEQ ID NO: 2542388 - RNA, 19 nt, Artificial Sequence
  Description of Artificial Sequence: Synthetic oligonucleotide
agaauuaacucuaacucua

SEQ ID NO: 2542389 - RNA, 19 nt, Artificial Sequence
  Description of Artificial Sequence: Synthetic oligonucleotide
aguccagguuccccgaggg

SEQ ID NO: 2542390 - RNA, 19 nt, Artificial Sequence
  Description of Artificial Sequence: Synthetic oligonucleotide
ugguuuuacaugacaggaa

SEQ ID NO: 2542391 - RNA, 19 nt, Artificial Sequence
  Description of Artificial Sequence: Synthetic oligonucleotide
aacucuaacucuacaaauu

SEQ ID NO: 2542392 - RNA, 19 nt, Artificial Sequence
  Description of Artificial Sequence: Synthetic oligonucleotide
gucuagaauacaacaaaac

SEQ ID NO: 2542393 - RNA, 19 nt, Artificial Sequence
  Description of Artificial Sequence: Synthetic oligonucleotide
aguuccaagagagaauuaa

SEQ ID NO: 2542394 - RNA, 19 nt, Artificial Sequence
  Description of Artificial Sequence: Synthetic oligonucleotide
acaacauccuuuauaacaa

SEQ ID NO: 2542395 - RNA, 19 nt, Artificial Sequence
  Description of Artificial Sequence: Synthetic oligonucleotide
uuccaggccuccaaacuug

SEQ ID NO: 2542396 - RNA, 19 nt, Artificial Sequence
  Description of Artificial Sequence: Synthetic oligonucleotide
aucuacagcucuugucuag

SEQ ID NO: 2542397 - RNA, 19 nt, Artificial Sequence
  Description of Artificial Sequence: Synthetic oligonucleotide
ugacaggaaacaacauccu

SEQ ID NO: 2542398 - RNA, 19 nt, Artificial Sequence
  Description of Artificial Sequence: Synthetic oligonucleotide
acaggcuauaaccaauaaa

SEQ ID NO: 2542399 - RNA, 19 nt, Artificial Sequence
  Description of Artificial Sequence: Synthetic oligonucleotide
uauaaccaauaaauauaua

SEQ ID NO: 2542400 - RNA, 19 nt, Artificial Sequence
  Description of Artificial Sequence: Synthetic oligonucleotide
cucuugucuagaauacaac

SEQ ID NO: 2542401 - RNA, 19 nt, Artificial Sequence
  Description of Artificial Sequence: Synthetic oligonucleotide
augaaaauguucacuagaa

SEQ ID NO: 2542402 - RNA, 19 nt, Artificial Sequence
  Description of Artificial Sequence: Synthetic oligonucleotide
ccuuuuagaacuaauuaca

SEQ ID NO: 2542403 - RNA, 19 nt, Artificial Sequence
  Description of Artificial Sequence: Synthetic oligonucleotide
caggccuccaaacuugccc

SEQ ID NO: 2542404 - RNA, 19 nt, Artificial Sequence
  Description of Artificial Sequence: Synthetic oligonucleotide
caagagagaauuaacucua

SEQ ID NO: 2542405 - RNA, 19 nt, Artificial Sequence
  Description of Artificial Sequence: Synthetic oligonucleotide
uggcccuugaucuccacac

SEQ ID NO: 2542406 - RNA, 19 nt, Artificial Sequence
  Description of Artificial Sequence: Synthetic oligonucleotide
ggggauaaauaauacaaaa

SEQ ID NO: 2542407 - RNA, 19 nt, Artificial Sequence
  Description of Artificial Sequence: Synthetic oligonucleotide
uaaguacgaguuuaacaua

SEQ ID NO: 2542408 - RNA, 19 nt, Artificial Sequence
  Description of Artificial Sequence: Synthetic oligonucleotide
uuugggugcuucuuggauu

SEQ ID NO: 2542409 - RNA, 19 nt, Artificial Sequence
  Description of Artificial Sequence: Synthetic oligonucleotide
aggagcugaguucaugccu

SEQ ID NO: 2542410 - RNA, 19 nt, Artificial Sequence
  Description of Artificial Sequence: Synthetic oligonucleotide
ucauaaguacgaguuuaac

SEQ ID NO: 2542411 - RNA, 19 nt, Artificial Sequence
  Description of Artificial Sequence: Synthetic oligonucleotide
gguuuuacaugacaggaaa

SEQ ID NO: 2542412 - RNA, 19 nt, Artificial Sequence
  Description of Artificial Sequence: Synthetic oligonucleotide
acuaaaauagcugguuuua

SEQ ID NO: 2542413 - RNA, 19 nt, Artificial Sequence
  Description of Artificial Sequence: Synthetic oligonucleotide
gaauuaacucuaacucuac

SEQ ID NO: 2542414 - RNA, 19 nt, Artificial Sequence
  Description of Artificial Sequence: Synthetic oligonucleotide
aaggugauugaggccguag

SEQ ID NO: 2542415 - RNA, 19 nt, Artificial Sequence
  Description of Artificial Sequence: Synthetic oligonucleotide
auccuuuauaacaaguaaa

SEQ ID NO: 2542416 - RNA, 19 nt, Artificial Sequence
  Description of Artificial Sequence: Synthetic oligonucleotide
ucaggacuauacagugacc

SEQ ID NO: 2542417 - RNA, 19 nt, Artificial Sequence
  Description of Artificial Sequence: Synthetic oligonucleotide
cauccuuuauaacaaguaa

SEQ ID NO: 2542418 - RNA, 19 nt, Artificial Sequence
  Description of Artificial Sequence: Synthetic oligonucleotide
accaauaaauauauaugaa

SEQ ID NO: 2542419 - RNA, 19 nt, Artificial Sequence
  Description of Artificial Sequence: Synthetic oligonucleotide
auuugggugcuucuuggau

SEQ ID NO: 2542420 - RNA, 19 nt, Artificial Sequence
  Description of Artificial Sequence: Synthetic oligonucleotide
uguagguggggugaggcuc

SEQ ID NO: 2542421 - RNA, 19 nt, Artificial Sequence
  Description of Artificial Sequence: Synthetic oligonucleotide
ggauucuacccugaggcgg

SEQ ID NO: 2542422 - RNA, 19 nt, Artificial Sequence
  Description of Artificial Sequence: Synthetic oligonucleotide
uuugagcgaagcuggacuu

SEQ ID NO: 2542423 - RNA, 19 nt, Artificial Sequence
  Description of Artificial Sequence: Synthetic oligonucleotide
acuauacagugaccauuag

SEQ ID NO: 2542424 - RNA, 19 nt, Artificial Sequence
  Description of Artificial Sequence: Synthetic oligonucleotide
aggccguagagggaggggc

SEQ ID NO: 2542425 - RNA, 19 nt, Artificial Sequence
  Description of Artificial Sequence: Synthetic oligonucleotide
caacaacccuaacacacac

SEQ ID NO: 2542426 - RNA, 19 nt, Artificial Sequence
  Description of Artificial Sequence: Synthetic oligonucleotide
cugguuuuacaugacagga

SEQ ID NO: 2542427 - RNA, 19 nt, Artificial Sequence
  Description of Artificial Sequence: Synthetic oligonucleotide
caacauccuuuauaacaag

SEQ ID NO: 2542428 - RNA, 19 nt, Artificial Sequence
  Description of Artificial Sequence: Synthetic oligonucleotide
cuggacuugggaaggcgcc

SEQ ID NO: 2542429 - RNA, 19 nt, Artificial Sequence
  Description of Artificial Sequence: Synthetic oligonucleotide
ggaaacaacauccuuuaua

SEQ ID NO: 2542430 - RNA, 19 nt, Artificial Sequence
  Description of Artificial Sequence: Synthetic oligonucleotide
uccagguuccccgaggggu

SEQ ID NO: 2542431 - RNA, 19 nt, Artificial Sequence
  Description of Artificial Sequence: Synthetic oligonucleotide
ccuaacacacaccucuucc

SEQ ID NO: 2542432 - RNA, 19 nt, Artificial Sequence
  Description of Artificial Sequence: Synthetic oligonucleotide
cucuaacucuacaaauuca

SEQ ID NO: 2542433 - RNA, 19 nt, Artificial Sequence
  Description of Artificial Sequence: Synthetic oligonucleotide
ucuacagcucuugucuaga

SEQ ID NO: 2542434 - RNA, 19 nt, Artificial Sequence
  Description of Artificial Sequence: Synthetic oligonucleotide
cuaacacacaccucuucca

SEQ ID NO: 2542435 - RNA, 19 nt, Artificial Sequence
  Description of Artificial Sequence: Synthetic oligonucleotide
aagaaaguuccaagagaga

SEQ ID NO: 2542436 - RNA, 19 nt, Artificial Sequence
  Description of Artificial Sequence: Synthetic oligonucleotide
gcuauaaccaauaaauaua

SEQ ID NO: 2542437 - RNA, 19 nt, Artificial Sequence
  Description of Artificial Sequence: Synthetic oligonucleotide
caggacuauacagugacca

SEQ ID NO: 2542438 - RNA, 19 nt, Artificial Sequence
  Description of Artificial Sequence: Synthetic oligonucleotide
caauugcucauaaguacga

SEQ ID NO: 2542439 - RNA, 19 nt, Artificial Sequence
  Description of Artificial Sequence: Synthetic oligonucleotide
auuaggagcugaguucaug

SEQ ID NO: 2542440 - RNA, 19 nt, Artificial Sequence
  Description of Artificial Sequence: Synthetic oligonucleotide
aggugauugaggccguaga

SEQ ID NO: 2542441 - RNA, 19 nt, Artificial Sequence
  Description of Artificial Sequence: Synthetic oligonucleotide
uacagcucuugucuagaau

SEQ ID NO: 2542442 - RNA, 19 nt, Artificial Sequence
  Description of Artificial Sequence: Synthetic oligonucleotide
uucccggaagccugcaaca

SEQ ID NO: 2542443 - RNA, 19 nt, Artificial Sequence
  Description of Artificial Sequence: Synthetic oligonucleotide
gacuauacagugaccauua

SEQ ID NO: 2542444 - RNA, 19 nt, Artificial Sequence
  Description of Artificial Sequence: Synthetic oligonucleotide
ugcccuuguuucccggaag

SEQ ID NO: 2542445 - RNA, 19 nt, Artificial Sequence
  Description of Artificial Sequence: Synthetic oligonucleotide
ggcuauaaccaauaaauau

SEQ ID NO: 2542446 - RNA, 19 nt, Artificial Sequence
  Description of Artificial Sequence: Synthetic oligonucleotide
auagcugguuuuacaugac

SEQ ID NO: 2542447 - RNA, 19 nt, Artificial Sequence
  Description of Artificial Sequence: Synthetic oligonucleotide
ugcguggugagaggagagg

SEQ ID NO: 2542448 - RNA, 19 nt, Artificial Sequence
  Description of Artificial Sequence: Synthetic oligonucleotide
uggugagaaaggugauuga

SEQ ID NO: 2542449 - RNA, 19 nt, Artificial Sequence
  Description of Artificial Sequence: Synthetic oligonucleotide
cuaauuacaauugcucaua

SEQ ID NO: 2542450 - RNA, 19 nt, Artificial Sequence
  Description of Artificial Sequence: Synthetic oligonucleotide
agcgaagcuggacuuggga

SEQ ID NO: 2542451 - RNA, 19 nt, Artificial Sequence
  Description of Artificial Sequence: Synthetic oligonucleotide
gagaggagaggucugugua

SEQ ID NO: 2542452 - RNA, 19 nt, Artificial Sequence
  Description of Artificial Sequence: Synthetic oligonucleotide
uccaggccuccaaacuugc

SEQ ID NO: 2542453 - RNA, 19 nt, Artificial Sequence
  Description of Artificial Sequence: Synthetic oligonucleotide
uuguuucccggaagccugc

SEQ ID NO: 2542454 - RNA, 19 nt, Artificial Sequence
  Description of Artificial Sequence: Synthetic oligonucleotide
acauccuuuauaacaagua

SEQ ID NO: 2542455 - RNA, 19 nt, Artificial Sequence
  Description of Artificial Sequence: Synthetic oligonucleotide
ucuacaaauucaggacuau

SEQ ID NO: 2542456 - RNA, 19 nt, Artificial Sequence
  Description of Artificial Sequence: Synthetic oligonucleotide
ugcucauaaguacgaguuu

SEQ ID NO: 2542457 - RNA, 19 nt, Artificial Sequence
  Description of Artificial Sequence: Synthetic oligonucleotide
caggaaacaacauccuuua

SEQ ID NO: 2542458 - RNA, 19 nt, Artificial Sequence
  Description of Artificial Sequence: Synthetic oligonucleotide
ucuguguagguggggugag

SEQ ID NO: 2542459 - RNA, 19 nt, Artificial Sequence
  Description of Artificial Sequence: Synthetic oligonucleotide
guuguaguccagguucccc

SEQ ID NO: 2542460 - RNA, 19 nt, Artificial Sequence
  Description of Artificial Sequence: Synthetic oligonucleotide
ugaggccguagagggaggg

SEQ ID NO: 2542461 - RNA, 19 nt, Artificial Sequence
  Description of Artificial Sequence: Synthetic oligonucleotide
acagaagaacaaagaaagu

SEQ ID NO: 2542462 - RNA, 19 nt, Artificial Sequence
  Description of Artificial Sequence: Synthetic oligonucleotide
aggacuauacagugaccau

SEQ ID NO: 2542463 - RNA, 19 nt, Artificial Sequence
  Description of Artificial Sequence: Synthetic oligonucleotide
gugaccauuaggagcugag

SEQ ID NO: 2542464 - RNA, 19 nt, Artificial Sequence
  Description of Artificial Sequence: Synthetic oligonucleotide
ugaccauuaggagcugagu

SEQ ID NO: 2542465 - RNA, 19 nt, Artificial Sequence
  Description of Artificial Sequence: Synthetic oligonucleotide
ccggaagccugcaacaacc

SEQ ID NO: 2542466 - RNA, 19 nt, Artificial Sequence
  Description of Artificial Sequence: Synthetic oligonucleotide
gaccauuaggagcugaguu

SEQ ID NO: 2542467 - RNA, 19 nt, Artificial Sequence
  Description of Artificial Sequence: Synthetic oligonucleotide
cccguuguaguccagguuc

SEQ ID NO: 2542468 - RNA, 19 nt, Artificial Sequence
  Description of Artificial Sequence: Synthetic oligonucleotide
cucauaaguacgaguuuaa

SEQ ID NO: 2542469 - RNA, 19 nt, Artificial Sequence
  Description of Artificial Sequence: Synthetic oligonucleotide
uccgugaugcuggcugggg

SEQ ID NO: 2542470 - RNA, 19 nt, Artificial Sequence
  Description of Artificial Sequence: Synthetic oligonucleotide
cagaagaacaaagaaaguu

SEQ ID NO: 2542471 - RNA, 19 nt, Artificial Sequence
  Description of Artificial Sequence: Synthetic oligonucleotide
ugaggcggugcguggugag

SEQ ID NO: 2542472 - RNA, 19 nt, Artificial Sequence
  Description of Artificial Sequence: Synthetic oligonucleotide
ucacuagaacacacacuuu

SEQ ID NO: 2542473 - RNA, 19 nt, Artificial Sequence
  Description of Artificial Sequence: Synthetic oligonucleotide
uugagcgaagcuggacuug

SEQ ID NO: 2542474 - RNA, 19 nt, Artificial Sequence
  Description of Artificial Sequence: Synthetic oligonucleotide
uggacuugggaaggcgccc

SEQ ID NO: 2542475 - RNA, 19 nt, Artificial Sequence
  Description of Artificial Sequence: Synthetic oligonucleotide
ggguccgugaugcuggcug

SEQ ID NO: 2542476 - RNA, 19 nt, Artificial Sequence
  Description of Artificial Sequence: Synthetic oligonucleotide
gggguggugagaaagguga

SEQ ID NO: 2542477 - RNA, 19 nt, Artificial Sequence
  Description of Artificial Sequence: Synthetic oligonucleotide
guacgaguuuaacauaaau

SEQ ID NO: 2542478 - RNA, 19 nt, Artificial Sequence
  Description of Artificial Sequence: Synthetic oligonucleotide
gugaggcucacaggguccg

SEQ ID NO: 2542479 - RNA, 19 nt, Artificial Sequence
  Description of Artificial Sequence: Synthetic oligonucleotide
uucaugccuuuuagaacua

SEQ ID NO: 2542480 - RNA, 19 nt, Artificial Sequence
  Description of Artificial Sequence: Synthetic oligonucleotide
auucaggacuauacaguga

SEQ ID NO: 2542481 - RNA, 19 nt, Artificial Sequence
  Description of Artificial Sequence: Synthetic oligonucleotide
cacuagaacacacacuuuu

SEQ ID NO: 2542482 - RNA, 19 nt, Artificial Sequence
  Description of Artificial Sequence: Synthetic oligonucleotide
acauaaaucuacagcucuu

SEQ ID NO: 2542483 - RNA, 19 nt, Artificial Sequence
  Description of Artificial Sequence: Synthetic oligonucleotide
cacaggguccgugaugcug

SEQ ID NO: 2542484 - RNA, 19 nt, Artificial Sequence
  Description of Artificial Sequence: Synthetic oligonucleotide
uccccucacagguguguca

SEQ ID NO: 2542485 - RNA, 19 nt, Artificial Sequence
  Description of Artificial Sequence: Synthetic oligonucleotide
agcucuugucuagaauaca

SEQ ID NO: 2542486 - RNA, 19 nt, Artificial Sequence
  Description of Artificial Sequence: Synthetic oligonucleotide
aggcuauaaccaauaaaua

SEQ ID NO: 2542487 - RNA, 19 nt, Artificial Sequence
  Description of Artificial Sequence: Synthetic oligonucleotide
gguccgugaugcuggcugg

SEQ ID NO: 2542488 - RNA, 19 nt, Artificial Sequence
  Description of Artificial Sequence: Synthetic oligonucleotide
ucaugccuuuuagaacuaa

SEQ ID NO: 2542489 - RNA, 19 nt, Artificial Sequence
  Description of Artificial Sequence: Synthetic oligonucleotide
aggagaggucuguguaggu

SEQ ID NO: 2542490 - RNA, 19 nt, Artificial Sequence
  Description of Artificial Sequence: Synthetic oligonucleotide
gaggccguagagggagggg

SEQ ID NO: 2542491 - RNA, 19 nt, Artificial Sequence
  Description of Artificial Sequence: Synthetic oligonucleotide
gacaggaaacaacauccuu

SEQ ID NO: 2542492 - RNA, 19 nt, Artificial Sequence
  Description of Artificial Sequence: Synthetic oligonucleotide
aggcggugcguggugagag

SEQ ID NO: 2542493 - RNA, 19 nt, Artificial Sequence
  Description of Artificial Sequence: Synthetic oligonucleotide
agugaccauuaggagcuga

SEQ ID NO: 2542494 - RNA, 19 nt, Artificial Sequence
  Description of Artificial Sequence: Synthetic oligonucleotide
guccagguuccccgagggg

SEQ ID NO: 2542495 - RNA, 19 nt, Artificial Sequence
  Description of Artificial Sequence: Synthetic oligonucleotide
aggcucacaggguccguga

SEQ ID NO: 2542496 - RNA, 19 nt, Artificial Sequence
  Description of Artificial Sequence: Synthetic oligonucleotide
caacccuaacacacaccuc

SEQ ID NO: 2542497 - RNA, 19 nt, Artificial Sequence
  Description of Artificial Sequence: Synthetic oligonucleotide
cuccaccaccuccuuggcc

SEQ ID NO: 2542498 - RNA, 19 nt, Artificial Sequence
  Description of Artificial Sequence: Synthetic oligonucleotide
cugcaacaacccuaacaca

SEQ ID NO: 2542499 - RNA, 19 nt, Artificial Sequence
  Description of Artificial Sequence: Synthetic oligonucleotide
gauucuacccugaggcggu

SEQ ID NO: 2542500 - RNA, 19 nt, Artificial Sequence
  Description of Artificial Sequence: Synthetic oligonucleotide
gagcgaagcuggacuuggg

SEQ ID NO: 2542501 - RNA, 19 nt, Artificial Sequence
  Description of Artificial Sequence: Synthetic oligonucleotide
agggguggugagaaaggug

SEQ ID NO: 2542502 - RNA, 19 nt, Artificial Sequence
  Description of Artificial Sequence: Synthetic oligonucleotide
gauugaggccguagaggga

SEQ ID NO: 2542503 - RNA, 19 nt, Artificial Sequence
  Description of Artificial Sequence: Synthetic oligonucleotide
gcccuuguuucccggaagc

SEQ ID NO: 2542504 - RNA, 19 nt, Artificial Sequence
  Description of Artificial Sequence: Synthetic oligonucleotide
acccugaggcggugcgugg

SEQ ID NO: 2542505 - RNA, 19 nt, Artificial Sequence
  Description of Artificial Sequence: Synthetic oligonucleotide
aguacgaguuuaacauaaa

SEQ ID NO: 2542506 - RNA, 19 nt, Artificial Sequence
  Description of Artificial Sequence: Synthetic oligonucleotide
gcucauaaguacgaguuua

SEQ ID NO: 2542507 - RNA, 19 nt, Artificial Sequence
  Description of Artificial Sequence: Synthetic oligonucleotide
uucuacccugaggcggugc

SEQ ID NO: 2542508 - RNA, 19 nt, Artificial Sequence
  Description of Artificial Sequence: Synthetic oligonucleotide
ggucuguguagguggggug

SEQ ID NO: 2542509 - RNA, 19 nt, Artificial Sequence
  Description of Artificial Sequence: Synthetic oligonucleotide
gugagaggagaggucugug

SEQ ID NO: 2542510 - RNA, 19 nt, Artificial Sequence
  Description of Artificial Sequence: Synthetic oligonucleotide
cccuugaucuccacacccc

SEQ ID NO: 2542511 - RNA, 19 nt, Artificial Sequence
  Description of Artificial Sequence: Synthetic oligonucleotide
gcucuugucuagaauacaa

SEQ ID NO: 2542512 - RNA, 19 nt, Artificial Sequence
  Description of Artificial Sequence: Synthetic oligonucleotide
aaguuccaagagagaauua

SEQ ID NO: 2542513 - RNA, 19 nt, Artificial Sequence
  Description of Artificial Sequence: Synthetic oligonucleotide
guucacuagaacacacacu

SEQ ID NO: 2542514 - RNA, 19 nt, Artificial Sequence
  Description of Artificial Sequence: Synthetic oligonucleotide
uccccuccccucacaggug

SEQ ID NO: 2542515 - RNA, 19 nt, Artificial Sequence
  Description of Artificial Sequence: Synthetic oligonucleotide
gugcguggugagaggagag

SEQ ID NO: 2542516 - RNA, 19 nt, Artificial Sequence
  Description of Artificial Sequence: Synthetic oligonucleotide
agccugcaacaacccuaac

SEQ ID NO: 2542517 - RNA, 19 nt, Artificial Sequence
  Description of Artificial Sequence: Synthetic oligonucleotide
cuguguagguggggugagg

SEQ ID NO: 2542518 - RNA, 19 nt, Artificial Sequence
  Description of Artificial Sequence: Synthetic oligonucleotide
ccauuaggagcugaguuca

SEQ ID NO: 2542519 - RNA, 19 nt, Artificial Sequence
  Description of Artificial Sequence: Synthetic oligonucleotide
aggcgccccaggccugccc

SEQ ID NO: 2542520 - RNA, 19 nt, Artificial Sequence
  Description of Artificial Sequence: Synthetic oligonucleotide
ccguuguaguccagguucc

SEQ ID NO: 2542521 - RNA, 19 nt, Artificial Sequence
  Description of Artificial Sequence: Synthetic oligonucleotide
aaggcgccccaggccugcc

SEQ ID NO: 2542522 - RNA, 19 nt, Artificial Sequence
  Description of Artificial Sequence: Synthetic oligonucleotide
gcuggacuugggaaggcgc

SEQ ID NO: 2542523 - RNA, 19 nt, Artificial Sequence
  Description of Artificial Sequence: Synthetic oligonucleotide
ucccggaagccugcaacaa

SEQ ID NO: 2542524 - RNA, 19 nt, Artificial Sequence
  Description of Artificial Sequence: Synthetic oligonucleotide
cuacagcucuugucuagaa

SEQ ID NO: 2542525 - RNA, 19 nt, Artificial Sequence
  Description of Artificial Sequence: Synthetic oligonucleotide
gcugaguucaugccuuuua

SEQ ID NO: 2542526 - RNA, 19 nt, Artificial Sequence
  Description of Artificial Sequence: Synthetic oligonucleotide
gaaggcgccccaggccugc

SEQ ID NO: 2542527 - RNA, 19 nt, Artificial Sequence
  Description of Artificial Sequence: Synthetic oligonucleotide
gacuugggaaggcgcccca

SEQ ID NO: 2542528 - RNA, 19 nt, Artificial Sequence
  Description of Artificial Sequence: Synthetic oligonucleotide
guccgugaugcuggcuggg

SEQ ID NO: 2542529 - RNA, 19 nt, Artificial Sequence
  Description of Artificial Sequence: Synthetic oligonucleotide
gcucacaggguccgugaug

SEQ ID NO: 2542530 - RNA, 19 nt, Artificial Sequence
  Description of Artificial Sequence: Synthetic oligonucleotide
ccgagggguggugagaaag

SEQ ID NO: 2542531 - RNA, 19 nt, Artificial Sequence
  Description of Artificial Sequence: Synthetic oligonucleotide
cuuggcccuugaucuccac

SEQ ID NO: 2542532 - RNA, 19 nt, Artificial Sequence
  Description of Artificial Sequence: Synthetic oligonucleotide
ucacaggguccgugaugcu

SEQ ID NO: 2542533 - RNA, 19 nt, Artificial Sequence
  Description of Artificial Sequence: Synthetic oligonucleotide
ugugucaauuugggugcuu

SEQ ID NO: 2542534 - RNA, 19 nt, Artificial Sequence
  Description of Artificial Sequence: Synthetic oligonucleotide
cuccccuccccucacaggu

SEQ ID NO: 2542535 - RNA, 19 nt, Artificial Sequence
  Description of Artificial Sequence: Synthetic oligonucleotide
ggugcguggugagaggaga

SEQ ID NO: 2542536 - RNA, 19 nt, Artificial Sequence
  Description of Artificial Sequence: Synthetic oligonucleotide
agggaggggccagcagggg

SEQ ID NO: 2542537 - RNA, 19 nt, Artificial Sequence
  Description of Artificial Sequence: Synthetic oligonucleotide
ggacuugggaaggcgcccc

SEQ ID NO: 2542538 - RNA, 19 nt, Artificial Sequence
  Description of Artificial Sequence: Synthetic oligonucleotide
ggcggugcguggugagagg

SEQ ID NO: 2542539 - RNA, 19 nt, Artificial Sequence
  Description of Artificial Sequence: Synthetic oligonucleotide
caacccuccccuccccuca

SEQ ID NO: 2542540 - RNA, 19 nt, Artificial Sequence
  Description of Artificial Sequence: Synthetic oligonucleotide
cgaguuuaacauaaaucua

SEQ ID NO: 2542541 - RNA, 19 nt, Artificial Sequence
  Description of Artificial Sequence: Synthetic oligonucleotide
guuucccggaagccugcaa

SEQ ID NO: 2542542 - RNA, 19 nt, Artificial Sequence
  Description of Artificial Sequence: Synthetic oligonucleotide
auucuacccugaggcggug

SEQ ID NO: 2542543 - RNA, 19 nt, Artificial Sequence
  Description of Artificial Sequence: Synthetic oligonucleotide
cucacaggugugucaauuu

SEQ ID NO: 2542544 - RNA, 19 nt, Artificial Sequence
  Description of Artificial Sequence: Synthetic oligonucleotide
gucaauuugggugcuucuu

SEQ ID NO: 2542545 - RNA, 19 nt, Artificial Sequence
  Description of Artificial Sequence: Synthetic oligonucleotide
cccacccucaacccucccc

SEQ ID NO: 2542546 - RNA, 19 nt, Artificial Sequence
  Description of Artificial Sequence: Synthetic oligonucleotide
caggugugucaauuugggu

SEQ ID NO: 2542547 - RNA, 19 nt, Artificial Sequence
  Description of Artificial Sequence: Synthetic oligonucleotide
cuccccucacagguguguc

SEQ ID NO: 2542548 - RNA, 19 nt, Artificial Sequence
  Description of Artificial Sequence: Synthetic oligonucleotide
cccuaacacacaccucuuc

SEQ ID NO: 2542549 - RNA, 19 nt, Artificial Sequence
  Description of Artificial Sequence: Synthetic oligonucleotide
ugaggcucacaggguccgu

SEQ ID NO: 2542550 - RNA, 19 nt, Artificial Sequence
  Description of Artificial Sequence: Synthetic oligonucleotide
cggaagccugcaacaaccc

SEQ ID NO: 2542551 - RNA, 19 nt, Artificial Sequence
  Description of Artificial Sequence: Synthetic oligonucleotide
ggccugcccuuguuucccg

SEQ ID NO: 2542552 - RNA, 19 nt, Artificial Sequence
  Description of Artificial Sequence: Synthetic oligonucleotide
cccuuguuucccggaagcc

SEQ ID NO: 2542553 - RNA, 19 nt, Artificial Sequence
  Description of Artificial Sequence: Synthetic oligonucleotide
ggacuauacagugaccauu

SEQ ID NO: 2542554 - RNA, 19 nt, Artificial Sequence
  Description of Artificial Sequence: Synthetic oligonucleotide
ggaagccugcaacaacccu

SEQ ID NO: 2542555 - RNA, 19 nt, Artificial Sequence
  Description of Artificial Sequence: Synthetic oligonucleotide
ugggugcuucuuggauucu

SEQ ID NO: 2542556 - RNA, 19 nt, Artificial Sequence
  Description of Artificial Sequence: Synthetic oligonucleotide
cccggaagccugcaacaac

SEQ ID NO: 2542557 - RNA, 19 nt, Artificial Sequence
  Description of Artificial Sequence: Synthetic oligonucleotide
cugcccuuguuucccggaa

SEQ ID NO: 2542558 - RNA, 19 nt, Artificial Sequence
  Description of Artificial Sequence: Synthetic oligonucleotide
gaggcggugcguggugaga

SEQ ID NO: 2542559 - RNA, 19 nt, Artificial Sequence
  Description of Artificial Sequence: Synthetic oligonucleotide
ccaggccuccaaacuugcc

SEQ ID NO: 2542560 - RNA, 19 nt, Artificial Sequence
  Description of Artificial Sequence: Synthetic oligonucleotide
cguggugagaggagagguc

SEQ ID NO: 2542561 - RNA, 19 nt, Artificial Sequence
  Description of Artificial Sequence: Synthetic oligonucleotide
guuccccgaggggugguga

SEQ ID NO: 2542562 - RNA, 19 nt, Artificial Sequence
  Description of Artificial Sequence: Synthetic oligonucleotide
acccuaacacacaccucuu

SEQ ID NO: 2542563 - RNA, 19 nt, Artificial Sequence
  Description of Artificial Sequence: Synthetic oligonucleotide
ggcgccccguuguagucca

SEQ ID NO: 2542564 - RNA, 19 nt, Artificial Sequence
  Description of Artificial Sequence: Synthetic oligonucleotide
cugaggcggugcgugguga

SEQ ID NO: 2542565 - RNA, 19 nt, Artificial Sequence
  Description of Artificial Sequence: Synthetic oligonucleotide
ggugagaggagaggucugu

SEQ ID NO: 2542566 - RNA, 19 nt, Artificial Sequence
  Description of Artificial Sequence: Synthetic oligonucleotide
uagguggggugaggcucac

SEQ ID NO: 2542567 - RNA, 19 nt, Artificial Sequence
  Description of Artificial Sequence: Synthetic oligonucleotide
cagugaccauuaggagcug

SEQ ID NO: 2542568 - RNA, 19 nt, Artificial Sequence
  Description of Artificial Sequence: Synthetic oligonucleotide
ccucaacccuccccucccc

SEQ ID NO: 2542569 - RNA, 19 nt, Artificial Sequence
  Description of Artificial Sequence: Synthetic oligonucleotide
ccugaggcggugcguggug

SEQ ID NO: 2542570 - RNA, 19 nt, Artificial Sequence
  Description of Artificial Sequence: Synthetic oligonucleotide
gagcugaguucaugccuuu

SEQ ID NO: 2542571 - RNA, 19 nt, Artificial Sequence
  Description of Artificial Sequence: Synthetic oligonucleotide
aggguccgugaugcuggcu

SEQ ID NO: 2542572 - RNA, 19 nt, Artificial Sequence
  Description of Artificial Sequence: Synthetic oligonucleotide
gcggugcguggugagagga

SEQ ID NO: 2542573 - RNA, 19 nt, Artificial Sequence
  Description of Artificial Sequence: Synthetic oligonucleotide
cucaacccuccccuccccu

SEQ ID NO: 2542574 - RNA, 19 nt, Artificial Sequence
  Description of Artificial Sequence: Synthetic oligonucleotide
gggcgccccguuguagucc

SEQ ID NO: 2542575 - RNA, 19 nt, Artificial Sequence
  Description of Artificial Sequence: Synthetic oligonucleotide
gcguggugagaggagaggu

SEQ ID NO: 2542576 - RNA, 19 nt, Artificial Sequence
  Description of Artificial Sequence: Synthetic oligonucleotide
gguuccccgagggguggug

SEQ ID NO: 2542577 - RNA, 19 nt, Artificial Sequence
  Description of Artificial Sequence: Synthetic oligonucleotide
ggggcgccccguuguaguc

SEQ ID NO: 2542578 - RNA, 19 nt, Artificial Sequence
  Description of Artificial Sequence: Synthetic oligonucleotide
gguggugagaaaggugauu

SEQ ID NO: 2542579 - RNA, 19 nt, Artificial Sequence
  Description of Artificial Sequence: Synthetic oligonucleotide
ccugcccuuguuucccgga

SEQ ID NO: 2542580 - RNA, 19 nt, Artificial Sequence
  Description of Artificial Sequence: Synthetic oligonucleotide
gugugucaauuugggugcu

SEQ ID NO: 2542581 - RNA, 19 nt, Artificial Sequence
  Description of Artificial Sequence: Synthetic oligonucleotide
agguggggugaggcucaca

SEQ ID NO: 2542582 - RNA, 19 nt, Artificial Sequence
  Description of Artificial Sequence: Synthetic oligonucleotide
gggugcuucuuggauucua

SEQ ID NO: 2542583 - RNA, 19 nt, Artificial Sequence
  Description of Artificial Sequence: Synthetic oligonucleotide
cggugcguggugagaggag

SEQ ID NO: 2542584 - RNA, 19 nt, Artificial Sequence
  Description of Artificial Sequence: Synthetic oligonucleotide
ccguagagggaggggccag

SEQ ID NO: 2542585 - RNA, 19 nt, Artificial Sequence
  Description of Artificial Sequence: Synthetic oligonucleotide
gccccguuguaguccaggu

SEQ ID NO: 2542586 - RNA, 19 nt, Artificial Sequence
  Description of Artificial Sequence: Synthetic oligonucleotide
cgccccguuguaguccagg

SEQ ID NO: 2542587 - RNA, 19 nt, Artificial Sequence
  Description of Artificial Sequence: Synthetic oligonucleotide
ccccucacaggugugucaa

SEQ ID NO: 2542588 - RNA, 19 nt, Artificial Sequence
  Description of Artificial Sequence: Synthetic oligonucleotide
ggcucacaggguccgugau

SEQ ID NO: 2542589 - RNA, 19 nt, Artificial Sequence
  Description of Artificial Sequence: Synthetic oligonucleotide
cuacccugaggcggugcgu

SEQ ID NO: 2542590 - RNA, 19 nt, Artificial Sequence
  Description of Artificial Sequence: Synthetic oligonucleotide
cccuccccucacaggugug

SEQ ID NO: 2542591 - RNA, 19 nt, Artificial Sequence
  Description of Artificial Sequence: Synthetic oligonucleotide
ccccgagggguggugagaa

SEQ ID NO: 2542592 - RNA, 19 nt, Artificial Sequence
  Description of Artificial Sequence: Synthetic oligonucleotide
ccccuccccucacaggugu

SEQ ID NO: 2542593 - RNA, 19 nt, Artificial Sequence
  Description of Artificial Sequence: Synthetic oligonucleotide
ccuccccucacaggugugu

SEQ ID NO: 2542594 - RNA, 19 nt, Artificial Sequence
  Description of Artificial Sequence: Synthetic oligonucleotide
cccgagggguggugagaaa

SEQ ID NO: 2542595 - RNA, 19 nt, Artificial Sequence
  Description of Artificial Sequence: Synthetic oligonucleotide
ccccguuguaguccagguu

SEQ ID NO: 2542596 - RNA, 19 nt, Artificial Sequence
  Description of Artificial Sequence: Synthetic oligonucleotide
gcgccccguuguaguccag

SEQ ID NO: 2542597 - RNA, 19 nt, Artificial Sequence
  Description of Artificial Sequence: Synthetic oligonucleotide
cccugaggcggugcguggu

SEQ ID NO: 2542598 - RNA, 19 nt, Artificial Sequence
  Description of Artificial Sequence: Synthetic oligonucleotide
cccucacaggugugucaau

SEQ ID NO: 2542599 - RNA, 19 nt, Artificial Sequence
  Description of Artificial Sequence: Synthetic oligonucleotide
ucacgaaugaucuugaagg

SEQ ID NO: 2542600 - RNA, 19 nt, Artificial Sequence
  Description of Artificial Sequence: Synthetic oligonucleotide
uguagauugacgcauagac

SEQ ID NO: 2542601 - RNA, 19 nt, Artificial Sequence
  Description of Artificial Sequence: Synthetic oligonucleotide
acuuccgacugucagagcc

SEQ ID NO: 2542602 - RNA, 19 nt, Artificial Sequence
  Description of Artificial Sequence: Synthetic oligonucleotide
uuaguggucgcucacagug

SEQ ID NO: 2542603 - RNA, 19 nt, Artificial Sequence
  Description of Artificial Sequence: Synthetic oligonucleotide
ucuucugugaucuuggccu

SEQ ID NO: 2542604 - RNA, 19 nt, Artificial Sequence
  Description of Artificial Sequence: Synthetic oligonucleotide
uguuugucgaguaugcuca

SEQ ID NO: 2542605 - RNA, 19 nt, Artificial Sequence
  Description of Artificial Sequence: Synthetic oligonucleotide
acugucagagccaucaucc

SEQ ID NO: 2542606 - RNA, 19 nt, Artificial Sequence
  Description of Artificial Sequence: Synthetic oligonucleotide
aaauguugcaucaucacgu

SEQ ID NO: 2542607 - RNA, 19 nt, Artificial Sequence
  Description of Artificial Sequence: Synthetic oligonucleotide
uuuagaggcuccuuauagg

SEQ ID NO: 2542608 - RNA, 19 nt, Artificial Sequence
  Description of Artificial Sequence: Synthetic oligonucleotide
uuagaggcuccuuauaggc

SEQ ID NO: 2542609 - RNA, 19 nt, Artificial Sequence
  Description of Artificial Sequence: Synthetic oligonucleotide
ugguucaucuccuucauca

SEQ ID NO: 2542610 - RNA, 19 nt, Artificial Sequence
  Description of Artificial Sequence: Synthetic oligonucleotide
uccuuauaggcuuugguga

SEQ ID NO: 2542611 - RNA, 19 nt, Artificial Sequence
  Description of Artificial Sequence: Synthetic oligonucleotide
caaauguugcaucaucacg

SEQ ID NO: 2542612 - RNA, 19 nt, Artificial Sequence
  Description of Artificial Sequence: Synthetic oligonucleotide
acuuuucgaggccucaagc

SEQ ID NO: 2542613 - RNA, 19 nt, Artificial Sequence
  Description of Artificial Sequence: Synthetic oligonucleotide
uaugcucagcuguagauug

SEQ ID NO: 2542614 - RNA, 19 nt, Artificial Sequence
  Description of Artificial Sequence: Synthetic oligonucleotide
augucugguaaccaggguc

SEQ ID NO: 2542615 - RNA, 19 nt, Artificial Sequence
  Description of Artificial Sequence: Synthetic oligonucleotide
auguuugucgaguaugcuc

SEQ ID NO: 2542616 - RNA, 19 nt, Artificial Sequence
  Description of Artificial Sequence: Synthetic oligonucleotide
aaugugaugaagguacgug

SEQ ID NO: 2542617 - RNA, 19 nt, Artificial Sequence
  Description of Artificial Sequence: Synthetic oligonucleotide
ugauuacuggcccagggca

SEQ ID NO: 2542618 - RNA, 19 nt, Artificial Sequence
  Description of Artificial Sequence: Synthetic oligonucleotide
cucagcuguagauugacgc

SEQ ID NO: 2542619 - RNA, 19 nt, Artificial Sequence
  Description of Artificial Sequence: Synthetic oligonucleotide
cuuuagaggcuccuuauag

SEQ ID NO: 2542620 - RNA, 19 nt, Artificial Sequence
  Description of Artificial Sequence: Synthetic oligonucleotide
uuggugacgacucugcgcu

SEQ ID NO: 2542621 - RNA, 19 nt, Artificial Sequence
  Description of Artificial Sequence: Synthetic oligonucleotide
cacgugaaugugaugaagg

SEQ ID NO: 2542622 - RNA, 19 nt, Artificial Sequence
  Description of Artificial Sequence: Synthetic oligonucleotide
uguugcaucaucacgugaa

SEQ ID NO: 2542623 - RNA, 19 nt, Artificial Sequence
  Description of Artificial Sequence: Synthetic oligonucleotide
aauguugcaucaucacgug

SEQ ID NO: 2542624 - RNA, 19 nt, Artificial Sequence
  Description of Artificial Sequence: Synthetic oligonucleotide
gugaaugugaugaagguac

SEQ ID NO: 2542625 - RNA, 19 nt, Artificial Sequence
  Description of Artificial Sequence: Synthetic oligonucleotide
uccagugaacguaaguuga

SEQ ID NO: 2542626 - RNA, 19 nt, Artificial Sequence
  Description of Artificial Sequence: Synthetic oligonucleotide
auagacuuccgacugucag

SEQ ID NO: 2542627 - RNA, 19 nt, Artificial Sequence
  Description of Artificial Sequence: Synthetic oligonucleotide
acaguggggacccuuucgc

SEQ ID NO: 2542628 - RNA, 19 nt, Artificial Sequence
  Description of Artificial Sequence: Synthetic oligonucleotide
ugaacguaaguugagcucu

SEQ ID NO: 2542629 - RNA, 19 nt, Artificial Sequence
  Description of Artificial Sequence: Synthetic oligonucleotide
ugaaugugaugaagguacg

SEQ ID NO: 2542630 - RNA, 19 nt, Artificial Sequence
  Description of Artificial Sequence: Synthetic oligonucleotide
agugaacguaaguugagcu

SEQ ID NO: 2542631 - RNA, 19 nt, Artificial Sequence
  Description of Artificial Sequence: Synthetic oligonucleotide
uccuucuuggcucuucugc

SEQ ID NO: 2542632 - RNA, 19 nt, Artificial Sequence
  Description of Artificial Sequence: Synthetic oligonucleotide
uaaguugagcucuucugug

SEQ ID NO: 2542633 - RNA, 19 nt, Artificial Sequence
  Description of Artificial Sequence: Synthetic oligonucleotide
uuucauaggucuccaguga

SEQ ID NO: 2542634 - RNA, 19 nt, Artificial Sequence
  Description of Artificial Sequence: Synthetic oligonucleotide
ugaugaagguacgugagca

SEQ ID NO: 2542635 - RNA, 19 nt, Artificial Sequence
  Description of Artificial Sequence: Synthetic oligonucleotide
acucuucaaauguugcauc

SEQ ID NO: 2542636 - RNA, 19 nt, Artificial Sequence
  Description of Artificial Sequence: Synthetic oligonucleotide
cuccuuauaggcuuuggug

SEQ ID NO: 2542637 - RNA, 19 nt, Artificial Sequence
  Description of Artificial Sequence: Synthetic oligonucleotide
uuuggugacgacucugcgc

SEQ ID NO: 2542638 - RNA, 19 nt, Artificial Sequence
  Description of Artificial Sequence: Synthetic oligonucleotide
uugucgaguaugcucagcu

SEQ ID NO: 2542639 - RNA, 19 nt, Artificial Sequence
  Description of Artificial Sequence: Synthetic oligonucleotide
cacuggaugguucaucucc

SEQ ID NO: 2542640 - RNA, 19 nt, Artificial Sequence
  Description of Artificial Sequence: Synthetic oligonucleotide
gaaaccacucuucaaaugu

SEQ ID NO: 2542641 - RNA, 19 nt, Artificial Sequence
  Description of Artificial Sequence: Synthetic oligonucleotide
uuuucgaggccucaagcuc

SEQ ID NO: 2542642 - RNA, 19 nt, Artificial Sequence
  Description of Artificial Sequence: Synthetic oligonucleotide
uccuugccguuccugaacg

SEQ ID NO: 2542643 - RNA, 19 nt, Artificial Sequence
  Description of Artificial Sequence: Synthetic oligonucleotide
uggcauagggguaugucug

SEQ ID NO: 2542644 - RNA, 19 nt, Artificial Sequence
  Description of Artificial Sequence: Synthetic oligonucleotide
ucuuguaggccucacgaau

SEQ ID NO: 2542645 - RNA, 19 nt, Artificial Sequence
  Description of Artificial Sequence: Synthetic oligonucleotide
agggguaugucugguaacc

SEQ ID NO: 2542646 - RNA, 19 nt, Artificial Sequence
  Description of Artificial Sequence: Synthetic oligonucleotide
ugaagguacgugagcagug

SEQ ID NO: 2542647 - RNA, 19 nt, Artificial Sequence
  Description of Artificial Sequence: Synthetic oligonucleotide
aaguugagcucuucuguga

SEQ ID NO: 2542648 - RNA, 19 nt, Artificial Sequence
  Description of Artificial Sequence: Synthetic oligonucleotide
aucuccuucaucaauguca

SEQ ID NO: 2542649 - RNA, 19 nt, Artificial Sequence
  Description of Artificial Sequence: Synthetic oligonucleotide
gaugaagguacgugagcag

SEQ ID NO: 2542650 - RNA, 19 nt, Artificial Sequence
  Description of Artificial Sequence: Synthetic oligonucleotide
uuucgaggccucaagcucu

SEQ ID NO: 2542651 - RNA, 19 nt, Artificial Sequence
  Description of Artificial Sequence: Synthetic oligonucleotide
uccgggacuguccuugccg

SEQ ID NO: 2542652 - RNA, 19 nt, Artificial Sequence
  Description of Artificial Sequence: Synthetic oligonucleotide
augugaugaagguacguga

SEQ ID NO: 2542653 - RNA, 19 nt, Artificial Sequence
  Description of Artificial Sequence: Synthetic oligonucleotide
aucacuggaugguucaucu

SEQ ID NO: 2542654 - RNA, 19 nt, Artificial Sequence
  Description of Artificial Sequence: Synthetic oligonucleotide
ucagcuguagauugacgca

SEQ ID NO: 2542655 - RNA, 19 nt, Artificial Sequence
  Description of Artificial Sequence: Synthetic oligonucleotide
uggacgauggggucacugg

SEQ ID NO: 2542656 - RNA, 19 nt, Artificial Sequence
  Description of Artificial Sequence: Synthetic oligonucleotide
ugacgcauagacuuccgac

SEQ ID NO: 2542657 - RNA, 19 nt, Artificial Sequence
  Description of Artificial Sequence: Synthetic oligonucleotide
aacgcgaaggaauguuugu

SEQ ID NO: 2542658 - RNA, 19 nt, Artificial Sequence
  Description of Artificial Sequence: Synthetic oligonucleotide
aguggucgcucacaguggg

SEQ ID NO: 2542659 - RNA, 19 nt, Artificial Sequence
  Description of Artificial Sequence: Synthetic oligonucleotide
cuuguaggccucacgaaug

SEQ ID NO: 2542660 - RNA, 19 nt, Artificial Sequence
  Description of Artificial Sequence: Synthetic oligonucleotide
uugagcucuucugugaucu

SEQ ID NO: 2542661 - RNA, 19 nt, Artificial Sequence
  Description of Artificial Sequence: Synthetic oligonucleotide
uccugaacgcgaaggaaug

SEQ ID NO: 2542662 - RNA, 19 nt, Artificial Sequence
  Description of Artificial Sequence: Synthetic oligonucleotide
uuugcgcuucuugugaacc

SEQ ID NO: 2542663 - RNA, 19 nt, Artificial Sequence
  Description of Artificial Sequence: Synthetic oligonucleotide
caucacgugaaugugauga

SEQ ID NO: 2542664 - RNA, 19 nt, Artificial Sequence
  Description of Artificial Sequence: Synthetic oligonucleotide
cacgaaugaucuugaaggc

SEQ ID NO: 2542665 - RNA, 19 nt, Artificial Sequence
  Description of Artificial Sequence: Synthetic oligonucleotide
cagaccucccggaacaggg

SEQ ID NO: 2542666 - RNA, 19 nt, Artificial Sequence
  Description of Artificial Sequence: Synthetic oligonucleotide
gaggccucaagcucuuuag

SEQ ID NO: 2542667 - RNA, 19 nt, Artificial Sequence
  Description of Artificial Sequence: Synthetic oligonucleotide
uuccugaacgcgaaggaau

SEQ ID NO: 2542668 - RNA, 19 nt, Artificial Sequence
  Description of Artificial Sequence: Synthetic oligonucleotide
aagguacgugagcagugag

SEQ ID NO: 2542669 - RNA, 19 nt, Artificial Sequence
  Description of Artificial Sequence: Synthetic oligonucleotide
ccuucugagagcuacuugc

SEQ ID NO: 2542670 - RNA, 19 nt, Artificial Sequence
  Description of Artificial Sequence: Synthetic oligonucleotide
gauugacgcauagacuucc

SEQ ID NO: 2542671 - RNA, 19 nt, Artificial Sequence
  Description of Artificial Sequence: Synthetic oligonucleotide
ggugcugacuuuucgaggc

SEQ ID NO: 2542672 - RNA, 19 nt, Artificial Sequence
  Description of Artificial Sequence: Synthetic oligonucleotide
uuggggaaaccacucuuca

SEQ ID NO: 2542673 - RNA, 19 nt, Artificial Sequence
  Description of Artificial Sequence: Synthetic oligonucleotide
aguaugcucagcuguagau

SEQ ID NO: 2542674 - RNA, 19 nt, Artificial Sequence
  Description of Artificial Sequence: Synthetic oligonucleotide
accacucuucaaauguugc

SEQ ID NO: 2542675 - RNA, 19 nt, Artificial Sequence
  Description of Artificial Sequence: Synthetic oligonucleotide
gaaugaucuugaaggcucg

SEQ ID NO: 2542676 - RNA, 19 nt, Artificial Sequence
  Description of Artificial Sequence: Synthetic oligonucleotide
agagcuacuugcuggggug

SEQ ID NO: 2542677 - RNA, 19 nt, Artificial Sequence
  Description of Artificial Sequence: Synthetic oligonucleotide
cugagagcuacuugcuggg

SEQ ID NO: 2542678 - RNA, 19 nt, Artificial Sequence
  Description of Artificial Sequence: Synthetic oligonucleotide
acaaugcuggacgaugggg

SEQ ID NO: 2542679 - RNA, 19 nt, Artificial Sequence
  Description of Artificial Sequence: Synthetic oligonucleotide
auagggguaugucugguaa

SEQ ID NO: 2542680 - RNA, 19 nt, Artificial Sequence
  Description of Artificial Sequence: Synthetic oligonucleotide
cuccagugaacguaaguug

SEQ ID NO: 2542681 - RNA, 19 nt, Artificial Sequence
  Description of Artificial Sequence: Synthetic oligonucleotide
agacuuccgacugucagag

SEQ ID NO: 2542682 - RNA, 19 nt, Artificial Sequence
  Description of Artificial Sequence: Synthetic oligonucleotide
guaaccagggucccgguac

SEQ ID NO: 2542683 - RNA, 19 nt, Artificial Sequence
  Description of Artificial Sequence: Synthetic oligonucleotide
guaugucugguaaccaggg

SEQ ID NO: 2542684 - RNA, 19 nt, Artificial Sequence
  Description of Artificial Sequence: Synthetic oligonucleotide
uaguccaugggcagugaug

SEQ ID NO: 2542685 - RNA, 19 nt, Artificial Sequence
  Description of Artificial Sequence: Synthetic oligonucleotide
aucuugaaggcucgagcag

SEQ ID NO: 2542686 - RNA, 19 nt, Artificial Sequence
  Description of Artificial Sequence: Synthetic oligonucleotide
uagacuuccgacugucaga

SEQ ID NO: 2542687 - RNA, 19 nt, Artificial Sequence
  Description of Artificial Sequence: Synthetic oligonucleotide
cuucuuguaggccucacga

SEQ ID NO: 2542688 - RNA, 19 nt, Artificial Sequence
  Description of Artificial Sequence: Synthetic oligonucleotide
uccagccuuucauaggucu

SEQ ID NO: 2542689 - RNA, 19 nt, Artificial Sequence
  Description of Artificial Sequence: Synthetic oligonucleotide
ugcgcuuccuucuuggcuc

SEQ ID NO: 2542690 - RNA, 19 nt, Artificial Sequence
  Description of Artificial Sequence: Synthetic oligonucleotide
aguccaugggcagugaugu

SEQ ID NO: 2542691 - RNA, 19 nt, Artificial Sequence
  Description of Artificial Sequence: Synthetic oligonucleotide
uuauaggcuuuggugacga

SEQ ID NO: 2542692 - RNA, 19 nt, Artificial Sequence
  Description of Artificial Sequence: Synthetic oligonucleotide
uaguggucgcucacagugg

SEQ ID NO: 2542693 - RNA, 19 nt, Artificial Sequence
  Description of Artificial Sequence: Synthetic oligonucleotide
aauguuugucgaguaugcu

SEQ ID NO: 2542694 - RNA, 19 nt, Artificial Sequence
  Description of Artificial Sequence: Synthetic oligonucleotide
acgcauagacuuccgacug

SEQ ID NO: 2542695 - RNA, 19 nt, Artificial Sequence
  Description of Artificial Sequence: Synthetic oligonucleotide
uuguaggccucacgaauga

SEQ ID NO: 2542696 - RNA, 19 nt, Artificial Sequence
  Description of Artificial Sequence: Synthetic oligonucleotide
aaccacucuucaaauguug

SEQ ID NO: 2542697 - RNA, 19 nt, Artificial Sequence
  Description of Artificial Sequence: Synthetic oligonucleotide
acuggcccagggcauuugc

SEQ ID NO: 2542698 - RNA, 19 nt, Artificial Sequence
  Description of Artificial Sequence: Synthetic oligonucleotide
cuuccuggguuaguggucg

SEQ ID NO: 2542699 - RNA, 19 nt, Artificial Sequence
  Description of Artificial Sequence: Synthetic oligonucleotide
acgacucugcgcuuccuuc

SEQ ID NO: 2542700 - RNA, 19 nt, Artificial Sequence
  Description of Artificial Sequence: Synthetic oligonucleotide
acgugaaugugaugaaggu

SEQ ID NO: 2542701 - RNA, 19 nt, Artificial Sequence
  Description of Artificial Sequence: Synthetic oligonucleotide
gguaugucugguaaccagg

SEQ ID NO: 2542702 - RNA, 19 nt, Artificial Sequence
  Description of Artificial Sequence: Synthetic oligonucleotide
ggugauuacuggcccaggg

SEQ ID NO: 2542703 - RNA, 19 nt, Artificial Sequence
  Description of Artificial Sequence: Synthetic oligonucleotide
ucacugggcagaccucccg

SEQ ID NO: 2542704 - RNA, 19 nt, Artificial Sequence
  Description of Artificial Sequence: Synthetic oligonucleotide
cuuuggugacgacucugcg

SEQ ID NO: 2542705 - RNA, 19 nt, Artificial Sequence
  Description of Artificial Sequence: Synthetic oligonucleotide
agguacgugagcagugagc

SEQ ID NO: 2542706 - RNA, 19 nt, Artificial Sequence
  Description of Artificial Sequence: Synthetic oligonucleotide
cuugccguuccugaacgcg

SEQ ID NO: 2542707 - RNA, 19 nt, Artificial Sequence
  Description of Artificial Sequence: Synthetic oligonucleotide
agggcauuugcgcuucuug

SEQ ID NO: 2542708 - RNA, 19 nt, Artificial Sequence
  Description of Artificial Sequence: Synthetic oligonucleotide
aguggcauagggguauguc

SEQ ID NO: 2542709 - RNA, 19 nt, Artificial Sequence
  Description of Artificial Sequence: Synthetic oligonucleotide
acccuuucgccuccgggac

SEQ ID NO: 2542710 - RNA, 19 nt, Artificial Sequence
  Description of Artificial Sequence: Synthetic oligonucleotide
gaacgcgaaggaauguuug

SEQ ID NO: 2542711 - RNA, 19 nt, Artificial Sequence
  Description of Artificial Sequence: Synthetic oligonucleotide
cuuauaggcuuuggugacg

SEQ ID NO: 2542712 - RNA, 19 nt, Artificial Sequence
  Description of Artificial Sequence: Synthetic oligonucleotide
gugaacguaaguugagcuc

SEQ ID NO: 2542713 - RNA, 19 nt, Artificial Sequence
  Description of Artificial Sequence: Synthetic oligonucleotide
gccucaagcucuuuagagg

SEQ ID NO: 2542714 - RNA, 19 nt, Artificial Sequence
  Description of Artificial Sequence: Synthetic oligonucleotide
uagaggcuccuuauaggcu

SEQ ID NO: 2542715 - RNA, 19 nt, Artificial Sequence
  Description of Artificial Sequence: Synthetic oligonucleotide
ugaacgcgaaggaauguuu

SEQ ID NO: 2542716 - RNA, 19 nt, Artificial Sequence
  Description of Artificial Sequence: Synthetic oligonucleotide
aacguaaguugagcucuuc

SEQ ID NO: 2542717 - RNA, 19 nt, Artificial Sequence
  Description of Artificial Sequence: Synthetic oligonucleotide
gugaugaagguacgugagc

SEQ ID NO: 2542718 - RNA, 19 nt, Artificial Sequence
  Description of Artificial Sequence: Synthetic oligonucleotide
uugacgcauagacuuccga

SEQ ID NO: 2542719 - RNA, 19 nt, Artificial Sequence
  Description of Artificial Sequence: Synthetic oligonucleotide
uaugucugguaaccagggu

SEQ ID NO: 2542720 - RNA, 19 nt, Artificial Sequence
  Description of Artificial Sequence: Synthetic oligonucleotide
uucuuggcucuucugcuuc

SEQ ID NO: 2542721 - RNA, 19 nt, Artificial Sequence
  Description of Artificial Sequence: Synthetic oligonucleotide
auaggcuuuggugacgacu

SEQ ID NO: 2542722 - RNA, 19 nt, Artificial Sequence
  Description of Artificial Sequence: Synthetic oligonucleotide
ugucgaguaugcucagcug

SEQ ID NO: 2542723 - RNA, 19 nt, Artificial Sequence
  Description of Artificial Sequence: Synthetic oligonucleotide
aguggggacccuuucgccu

SEQ ID NO: 2542724 - RNA, 19 nt, Artificial Sequence
  Description of Artificial Sequence: Synthetic oligonucleotide
caagggccuaggcugaggc

SEQ ID NO: 2542725 - RNA, 19 nt, Artificial Sequence
  Description of Artificial Sequence: Synthetic oligonucleotide
acguaaguugagcucuucu

SEQ ID NO: 2542726 - RNA, 19 nt, Artificial Sequence
  Description of Artificial Sequence: Synthetic oligonucleotide
ucaagcucuuuagaggcuc

SEQ ID NO: 2542727 - RNA, 19 nt, Artificial Sequence
  Description of Artificial Sequence: Synthetic oligonucleotide
aguugagcucuucugugau

SEQ ID NO: 2542728 - RNA, 19 nt, Artificial Sequence
  Description of Artificial Sequence: Synthetic oligonucleotide
agcucuucugugaucuugg

SEQ ID NO: 2542729 - RNA, 19 nt, Artificial Sequence
  Description of Artificial Sequence: Synthetic oligonucleotide
cccgguacaaugcuggacg

SEQ ID NO: 2542730 - RNA, 19 nt, Artificial Sequence
  Description of Artificial Sequence: Synthetic oligonucleotide
gaggugauuacuggcccag

SEQ ID NO: 2542731 - RNA, 19 nt, Artificial Sequence
  Description of Artificial Sequence: Synthetic oligonucleotide
uggggugcugacuuuucga

SEQ ID NO: 2542732 - RNA, 19 nt, Artificial Sequence
  Description of Artificial Sequence: Synthetic oligonucleotide
augaagguacgugagcagu

SEQ ID NO: 2542733 - RNA, 19 nt, Artificial Sequence
  Description of Artificial Sequence: Synthetic oligonucleotide
ggagggaggugauuacugg

SEQ ID NO: 2542734 - RNA, 19 nt, Artificial Sequence
  Description of Artificial Sequence: Synthetic oligonucleotide
uugccguuccugaacgcga

SEQ ID NO: 2542735 - RNA, 19 nt, Artificial Sequence
  Description of Artificial Sequence: Synthetic oligonucleotide
ggccucaagcucuuuagag

SEQ ID NO: 2542736 - RNA, 19 nt, Artificial Sequence
  Description of Artificial Sequence: Synthetic oligonucleotide
gacgcauagacuuccgacu

SEQ ID NO: 2542737 - RNA, 19 nt, Artificial Sequence
  Description of Artificial Sequence: Synthetic oligonucleotide
ucuuccuggguuagugguc

SEQ ID NO: 2542738 - RNA, 19 nt, Artificial Sequence
  Description of Artificial Sequence: Synthetic oligonucleotide
gguuaguggucgcucacag

SEQ ID NO: 2542739 - RNA, 19 nt, Artificial Sequence
  Description of Artificial Sequence: Synthetic oligonucleotide
gaucuuggccucccugagc

SEQ ID NO: 2542740 - RNA, 19 nt, Artificial Sequence
  Description of Artificial Sequence: Synthetic oligonucleotide
augguucaucuccuucauc

SEQ ID NO: 2542741 - RNA, 19 nt, Artificial Sequence
  Description of Artificial Sequence: Synthetic oligonucleotide
uucuuguaggccucacgaa

SEQ ID NO: 2542742 - RNA, 19 nt, Artificial Sequence
  Description of Artificial Sequence: Synthetic oligonucleotide
acgcgaaggaauguuuguc

SEQ ID NO: 2542743 - RNA, 19 nt, Artificial Sequence
  Description of Artificial Sequence: Synthetic oligonucleotide
agauugacgcauagacuuc

SEQ ID NO: 2542744 - RNA, 19 nt, Artificial Sequence
  Description of Artificial Sequence: Synthetic oligonucleotide
ucgaguaugcucagcugua

SEQ ID NO: 2542745 - RNA, 19 nt, Artificial Sequence
  Description of Artificial Sequence: Synthetic oligonucleotide
ggaaaccacucuucaaaug

SEQ ID NO: 2542746 - RNA, 19 nt, Artificial Sequence
  Description of Artificial Sequence: Synthetic oligonucleotide
caagcucuuuagaggcucc

SEQ ID NO: 2542747 - RNA, 19 nt, Artificial Sequence
  Description of Artificial Sequence: Synthetic oligonucleotide
caucaucacgugaauguga

SEQ ID NO: 2542748 - RNA, 19 nt, Artificial Sequence
  Description of Artificial Sequence: Synthetic oligonucleotide
gugaucuuggccucccuga

SEQ ID NO: 2542749 - RNA, 19 nt, Artificial Sequence
  Description of Artificial Sequence: Synthetic oligonucleotide
ggguaugucugguaaccag

SEQ ID NO: 2542750 - RNA, 19 nt, Artificial Sequence
  Description of Artificial Sequence: Synthetic oligonucleotide
cagugaacguaaguugagc

SEQ ID NO: 2542751 - RNA, 19 nt, Artificial Sequence
  Description of Artificial Sequence: Synthetic oligonucleotide
acgauggggucacugggca

SEQ ID NO: 2542752 - RNA, 19 nt, Artificial Sequence
  Description of Artificial Sequence: Synthetic oligonucleotide
ugagagcuacuugcugggg

SEQ ID NO: 2542753 - RNA, 19 nt, Artificial Sequence
  Description of Artificial Sequence: Synthetic oligonucleotide
uggucgcucacagugggga

SEQ ID NO: 2542754 - RNA, 19 nt, Artificial Sequence
  Description of Artificial Sequence: Synthetic oligonucleotide
ggaugguucaucuccuuca

SEQ ID NO: 2542755 - RNA, 19 nt, Artificial Sequence
  Description of Artificial Sequence: Synthetic oligonucleotide
aggaauguuugucgaguau

SEQ ID NO: 2542756 - RNA, 19 nt, Artificial Sequence
  Description of Artificial Sequence: Synthetic oligonucleotide
gguacgugagcagugagca

SEQ ID NO: 2542757 - RNA, 19 nt, Artificial Sequence
  Description of Artificial Sequence: Synthetic oligonucleotide
ggacgauggggucacuggg

SEQ ID NO: 2542758 - RNA, 19 nt, Artificial Sequence
  Description of Artificial Sequence: Synthetic oligonucleotide
gagcucuucugugaucuug

SEQ ID NO: 2542759 - RNA, 19 nt, Artificial Sequence
  Description of Artificial Sequence: Synthetic oligonucleotide
augggcagugauguacuuc

SEQ ID NO: 2542760 - RNA, 19 nt, Artificial Sequence
  Description of Artificial Sequence: Synthetic oligonucleotide
ucuucaaauguugcaucau

SEQ ID NO: 2542761 - RNA, 19 nt, Artificial Sequence
  Description of Artificial Sequence: Synthetic oligonucleotide
uuugucgaguaugcucagc

SEQ ID NO: 2542762 - RNA, 19 nt, Artificial Sequence
  Description of Artificial Sequence: Synthetic oligonucleotide
gaguaugcucagcuguaga

SEQ ID NO: 2542763 - RNA, 19 nt, Artificial Sequence
  Description of Artificial Sequence: Synthetic oligonucleotide
cuggggugcugacuuuucg

SEQ ID NO: 2542764 - RNA, 19 nt, Artificial Sequence
  Description of Artificial Sequence: Synthetic oligonucleotide
uugaaggcucgagcagugg

SEQ ID NO: 2542765 - RNA, 19 nt, Artificial Sequence
  Description of Artificial Sequence: Synthetic oligonucleotide
ggcauuugcgcuucuugug

SEQ ID NO: 2542766 - RNA, 19 nt, Artificial Sequence
  Description of Artificial Sequence: Synthetic oligonucleotide
gggccaagggccuaggcug

SEQ ID NO: 2542767 - RNA, 19 nt, Artificial Sequence
  Description of Artificial Sequence: Synthetic oligonucleotide
uaggucuccagugaacgua

SEQ ID NO: 2542768 - RNA, 19 nt, Artificial Sequence
  Description of Artificial Sequence: Synthetic oligonucleotide
gauggggucacugggcaga

SEQ ID NO: 2542769 - RNA, 19 nt, Artificial Sequence
  Description of Artificial Sequence: Synthetic oligonucleotide
gacgauggggucacugggc

SEQ ID NO: 2542770 - RNA, 19 nt, Artificial Sequence
  Description of Artificial Sequence: Synthetic oligonucleotide
ugcgcuucuugugaaccug

SEQ ID NO: 2542771 - RNA, 19 nt, Artificial Sequence
  Description of Artificial Sequence: Synthetic oligonucleotide
uagggguaugucugguaac

SEQ ID NO: 2542772 - RNA, 19 nt, Artificial Sequence
  Description of Artificial Sequence: Synthetic oligonucleotide
agcucuuccuggguuagug

SEQ ID NO: 2542773 - RNA, 19 nt, Artificial Sequence
  Description of Artificial Sequence: Synthetic oligonucleotide
aucaucacgugaaugugau

SEQ ID NO: 2542774 - RNA, 19 nt, Artificial Sequence
  Description of Artificial Sequence: Synthetic oligonucleotide
ggucccgguacaaugcugg

SEQ ID NO: 2542775 - RNA, 19 nt, Artificial Sequence
  Description of Artificial Sequence: Synthetic oligonucleotide
cuuggccucccugagcagc

SEQ ID NO: 2542776 - RNA, 19 nt, Artificial Sequence
  Description of Artificial Sequence: Synthetic oligonucleotide
ucaucacgugaaugugaug

SEQ ID NO: 2542777 - RNA, 19 nt, Artificial Sequence
  Description of Artificial Sequence: Synthetic oligonucleotide
uggguuaguggucgcucac

SEQ ID NO: 2542778 - RNA, 19 nt, Artificial Sequence
  Description of Artificial Sequence: Synthetic oligonucleotide
ggggaaaccacucuucaaa

SEQ ID NO: 2542779 - RNA, 19 nt, Artificial Sequence
  Description of Artificial Sequence: Synthetic oligonucleotide
guuugucgaguaugcucag

SEQ ID NO: 2542780 - RNA, 19 nt, Artificial Sequence
  Description of Artificial Sequence: Synthetic oligonucleotide
auugacgcauagacuuccg

SEQ ID NO: 2542781 - RNA, 19 nt, Artificial Sequence
  Description of Artificial Sequence: Synthetic oligonucleotide
gucgaguaugcucagcugu

SEQ ID NO: 2542782 - RNA, 19 nt, Artificial Sequence
  Description of Artificial Sequence: Synthetic oligonucleotide
ucugcgcuuccuucuuggc

SEQ ID NO: 2542783 - RNA, 19 nt, Artificial Sequence
  Description of Artificial Sequence: Synthetic oligonucleotide
ggcauagggguaugucugg

SEQ ID NO: 2542784 - RNA, 19 nt, Artificial Sequence
  Description of Artificial Sequence: Synthetic oligonucleotide
auguugcaucaucacguga

SEQ ID NO: 2542785 - RNA, 19 nt, Artificial Sequence
  Description of Artificial Sequence: Synthetic oligonucleotide
ucgcccuuggggaaaccac

SEQ ID NO: 2542786 - RNA, 19 nt, Artificial Sequence
  Description of Artificial Sequence: Synthetic oligonucleotide
ugcucagcuguagauugac

SEQ ID NO: 2542787 - RNA, 19 nt, Artificial Sequence
  Description of Artificial Sequence: Synthetic oligonucleotide
aaaccacucuucaaauguu

SEQ ID NO: 2542788 - RNA, 19 nt, Artificial Sequence
  Description of Artificial Sequence: Synthetic oligonucleotide
gaagguacgugagcaguga

SEQ ID NO: 2542789 - RNA, 19 nt, Artificial Sequence
  Description of Artificial Sequence: Synthetic oligonucleotide
cacugggcagaccucccgg

SEQ ID NO: 2542790 - RNA, 19 nt, Artificial Sequence
  Description of Artificial Sequence: Synthetic oligonucleotide
cuuuucgaggccucaagcu

SEQ ID NO: 2542791 - RNA, 19 nt, Artificial Sequence
  Description of Artificial Sequence: Synthetic oligonucleotide
uggggaaaccacucuucaa

SEQ ID NO: 2542792 - RNA, 19 nt, Artificial Sequence
  Description of Artificial Sequence: Synthetic oligonucleotide
aucacgugaaugugaugaa

SEQ ID NO: 2542793 - RNA, 19 nt, Artificial Sequence
  Description of Artificial Sequence: Synthetic oligonucleotide
gaccucccggaacagggac

SEQ ID NO: 2542794 - RNA, 19 nt, Artificial Sequence
  Description of Artificial Sequence: Synthetic oligonucleotide
uugcgcuucuugugaaccu

SEQ ID NO: 2542795 - RNA, 19 nt, Artificial Sequence
  Description of Artificial Sequence: Synthetic oligonucleotide
ccuuauaggcuuuggugac

SEQ ID NO: 2542796 - RNA, 19 nt, Artificial Sequence
  Description of Artificial Sequence: Synthetic oligonucleotide
ccuaggcugaggcagcagg

SEQ ID NO: 2542797 - RNA, 19 nt, Artificial Sequence
  Description of Artificial Sequence: Synthetic oligonucleotide
gaaggcucgagcaguggca

SEQ ID NO: 2542798 - RNA, 19 nt, Artificial Sequence
  Description of Artificial Sequence: Synthetic oligonucleotide
gggugcugacuuuucgagg

SEQ ID NO: 2542799 - RNA, 19 nt, Artificial Sequence
  Description of Artificial Sequence: Synthetic oligonucleotide
cuucugugaucuuggccuc

SEQ ID NO: 2542800 - RNA, 19 nt, Artificial Sequence
  Description of Artificial Sequence: Synthetic oligonucleotide
gcuguagauugacgcauag

SEQ ID NO: 2542801 - RNA, 19 nt, Artificial Sequence
  Description of Artificial Sequence: Synthetic oligonucleotide
ucuuggcucuucugcuucu

SEQ ID NO: 2542802 - RNA, 19 nt, Artificial Sequence
  Description of Artificial Sequence: Synthetic oligonucleotide
agcaggagggaggugauua

SEQ ID NO: 2542803 - RNA, 19 nt, Artificial Sequence
  Description of Artificial Sequence: Synthetic oligonucleotide
uguccuugccguuccugaa

SEQ ID NO: 2542804 - RNA, 19 nt, Artificial Sequence
  Description of Artificial Sequence: Synthetic oligonucleotide
ugcugacuuuucgaggccu

SEQ ID NO: 2542805 - RNA, 19 nt, Artificial Sequence
  Description of Artificial Sequence: Synthetic oligonucleotide
cgcgaaggaauguuugucg

SEQ ID NO: 2542806 - RNA, 19 nt, Artificial Sequence
  Description of Artificial Sequence: Synthetic oligonucleotide
caguggggacccuuucgcc

SEQ ID NO: 2542807 - RNA, 19 nt, Artificial Sequence
  Description of Artificial Sequence: Synthetic oligonucleotide
aaggcucgagcaguggcau

SEQ ID NO: 2542808 - RNA, 19 nt, Artificial Sequence
  Description of Artificial Sequence: Synthetic oligonucleotide
guggcauagggguaugucu

SEQ ID NO: 2542809 - RNA, 19 nt, Artificial Sequence
  Description of Artificial Sequence: Synthetic oligonucleotide
gggaggugauuacuggccc

SEQ ID NO: 2542810 - RNA, 19 nt, Artificial Sequence
  Description of Artificial Sequence: Synthetic oligonucleotide
cuccaucacuggaugguuc

SEQ ID NO: 2542811 - RNA, 19 nt, Artificial Sequence
  Description of Artificial Sequence: Synthetic oligonucleotide
ugagcaggagggaggugau

SEQ ID NO: 2542812 - RNA, 19 nt, Artificial Sequence
  Description of Artificial Sequence: Synthetic oligonucleotide
aagcucuuuagaggcuccu

SEQ ID NO: 2542813 - RNA, 19 nt, Artificial Sequence
  Description of Artificial Sequence: Synthetic oligonucleotide
ggccucacgaaugaucuug

SEQ ID NO: 2542814 - RNA, 19 nt, Artificial Sequence
  Description of Artificial Sequence: Synthetic oligonucleotide
accucccggaacagggacc

SEQ ID NO: 2542815 - RNA, 19 nt, Artificial Sequence
  Description of Artificial Sequence: Synthetic oligonucleotide
gcauuugcgcuucuuguga

SEQ ID NO: 2542816 - RNA, 19 nt, Artificial Sequence
  Description of Artificial Sequence: Synthetic oligonucleotide
guacgugagcagugagcag

SEQ ID NO: 2542817 - RNA, 19 nt, Artificial Sequence
  Description of Artificial Sequence: Synthetic oligonucleotide
gagagcuacuugcuggggu

SEQ ID NO: 2542818 - RNA, 19 nt, Artificial Sequence
  Description of Artificial Sequence: Synthetic oligonucleotide
agcaguggcauagggguau

SEQ ID NO: 2542819 - RNA, 19 nt, Artificial Sequence
  Description of Artificial Sequence: Synthetic oligonucleotide
guccuugccguuccugaac

SEQ ID NO: 2542820 - RNA, 19 nt, Artificial Sequence
  Description of Artificial Sequence: Synthetic oligonucleotide
ugccguuccugaacgcgaa

SEQ ID NO: 2542821 - RNA, 19 nt, Artificial Sequence
  Description of Artificial Sequence: Synthetic oligonucleotide
ucgccuccgggacuguccu

SEQ ID NO: 2542822 - RNA, 19 nt, Artificial Sequence
  Description of Artificial Sequence: Synthetic oligonucleotide
ugacuuuucgaggccucaa

SEQ ID NO: 2542823 - RNA, 19 nt, Artificial Sequence
  Description of Artificial Sequence: Synthetic oligonucleotide
guagauugacgcauagacu

SEQ ID NO: 2542824 - RNA, 19 nt, Artificial Sequence
  Description of Artificial Sequence: Synthetic oligonucleotide
ggcucgagcaguggcauag

SEQ ID NO: 2542825 - RNA, 19 nt, Artificial Sequence
  Description of Artificial Sequence: Synthetic oligonucleotide
gcagugagcaggagggagg

SEQ ID NO: 2542826 - RNA, 19 nt, Artificial Sequence
  Description of Artificial Sequence: Synthetic oligonucleotide
ccagugaacguaaguugag

SEQ ID NO: 2542827 - RNA, 19 nt, Artificial Sequence
  Description of Artificial Sequence: Synthetic oligonucleotide
gucgcucacaguggggacc

SEQ ID NO: 2542828 - RNA, 19 nt, Artificial Sequence
  Description of Artificial Sequence: Synthetic oligonucleotide
uauaggcuuuggugacgac

SEQ ID NO: 2542829 - RNA, 19 nt, Artificial Sequence
  Description of Artificial Sequence: Synthetic oligonucleotide
gaugguucaucuccuucau

SEQ ID NO: 2542830 - RNA, 19 nt, Artificial Sequence
  Description of Artificial Sequence: Synthetic oligonucleotide
cauagacuuccgacuguca

SEQ ID NO: 2542831 - RNA, 19 nt, Artificial Sequence
  Description of Artificial Sequence: Synthetic oligonucleotide
cuuccgacugucagagcca

SEQ ID NO: 2542832 - RNA, 19 nt, Artificial Sequence
  Description of Artificial Sequence: Synthetic oligonucleotide
gugcugacuuuucgaggcc

SEQ ID NO: 2542833 - RNA, 19 nt, Artificial Sequence
  Description of Artificial Sequence: Synthetic oligonucleotide
gaaugugaugaagguacgu

SEQ ID NO: 2542834 - RNA, 19 nt, Artificial Sequence
  Description of Artificial Sequence: Synthetic oligonucleotide
ucccgguacaaugcuggac

SEQ ID NO: 2542835 - RNA, 19 nt, Artificial Sequence
  Description of Artificial Sequence: Synthetic oligonucleotide
gugacgacucugcgcuucc

SEQ ID NO: 2542836 - RNA, 19 nt, Artificial Sequence
  Description of Artificial Sequence: Synthetic oligonucleotide
ggucacugggcagaccucc

SEQ ID NO: 2542837 - RNA, 19 nt, Artificial Sequence
  Description of Artificial Sequence: Synthetic oligonucleotide
aggugauuacuggcccagg

SEQ ID NO: 2542838 - RNA, 19 nt, Artificial Sequence
  Description of Artificial Sequence: Synthetic oligonucleotide
ugcuggacgauggggucac

SEQ ID NO: 2542839 - RNA, 19 nt, Artificial Sequence
  Description of Artificial Sequence: Synthetic oligonucleotide
gcaucaucacgugaaugug

SEQ ID NO: 2542840 - RNA, 19 nt, Artificial Sequence
  Description of Artificial Sequence: Synthetic oligonucleotide
cauuugcgcuucuugugaa

SEQ ID NO: 2542841 - RNA, 19 nt, Artificial Sequence
  Description of Artificial Sequence: Synthetic oligonucleotide
cuggguuaguggucgcuca

SEQ ID NO: 2542842 - RNA, 19 nt, Artificial Sequence
  Description of Artificial Sequence: Synthetic oligonucleotide
cuggacgauggggucacug

SEQ ID NO: 2542843 - RNA, 19 nt, Artificial Sequence
  Description of Artificial Sequence: Synthetic oligonucleotide
uggggacccuuucgccucc

SEQ ID NO: 2542844 - RNA, 19 nt, Artificial Sequence
  Description of Artificial Sequence: Synthetic oligonucleotide
guggggacccuuucgccuc

SEQ ID NO: 2542845 - RNA, 19 nt, Artificial Sequence
  Description of Artificial Sequence: Synthetic oligonucleotide
ccagggucccgguacaaug

SEQ ID NO: 2542846 - RNA, 19 nt, Artificial Sequence
  Description of Artificial Sequence: Synthetic oligonucleotide
guuccugaacgcgaaggaa

SEQ ID NO: 2542847 - RNA, 19 nt, Artificial Sequence
  Description of Artificial Sequence: Synthetic oligonucleotide
ucuugugaaccugcuucuu

SEQ ID NO: 2542848 - RNA, 19 nt, Artificial Sequence
  Description of Artificial Sequence: Synthetic oligonucleotide
auuacuggcccagggcauu

SEQ ID NO: 2542849 - RNA, 19 nt, Artificial Sequence
  Description of Artificial Sequence: Synthetic oligonucleotide
cgaaggaauguuugucgag

SEQ ID NO: 2542850 - RNA, 19 nt, Artificial Sequence
  Description of Artificial Sequence: Synthetic oligonucleotide
cagugauguacuucuugua

SEQ ID NO: 2542851 - RNA, 19 nt, Artificial Sequence
  Description of Artificial Sequence: Synthetic oligonucleotide
uccuggguuaguggucgcu

SEQ ID NO: 2542852 - RNA, 19 nt, Artificial Sequence
  Description of Artificial Sequence: Synthetic oligonucleotide
uuccgacugucagagccau

SEQ ID NO: 2542853 - RNA, 19 nt, Artificial Sequence
  Description of Artificial Sequence: Synthetic oligonucleotide
uucgaggccucaagcucuu

SEQ ID NO: 2542854 - RNA, 19 nt, Artificial Sequence
  Description of Artificial Sequence: Synthetic oligonucleotide
uuccuggguuaguggucgc

SEQ ID NO: 2542855 - RNA, 19 nt, Artificial Sequence
  Description of Artificial Sequence: Synthetic oligonucleotide
cuguagauugacgcauaga

SEQ ID NO: 2542856 - RNA, 19 nt, Artificial Sequence
  Description of Artificial Sequence: Synthetic oligonucleotide
cauagggguaugucuggua

SEQ ID NO: 2542857 - RNA, 19 nt, Artificial Sequence
  Description of Artificial Sequence: Synthetic oligonucleotide
ugguaaccagggucccggu

SEQ ID NO: 2542858 - RNA, 19 nt, Artificial Sequence
  Description of Artificial Sequence: Synthetic oligonucleotide
cuacuugcuggggugcuga

SEQ ID NO: 2542859 - RNA, 19 nt, Artificial Sequence
  Description of Artificial Sequence: Synthetic oligonucleotide
cucuuuagaggcuccuuau

SEQ ID NO: 2542860 - RNA, 19 nt, Artificial Sequence
  Description of Artificial Sequence: Synthetic oligonucleotide
ggaggugauuacuggccca

SEQ ID NO: 2542861 - RNA, 19 nt, Artificial Sequence
  Description of Artificial Sequence: Synthetic oligonucleotide
ccguuccugaacgcgaagg

SEQ ID NO: 2542862 - RNA, 19 nt, Artificial Sequence
  Description of Artificial Sequence: Synthetic oligonucleotide
aggucuccagugaacguaa

SEQ ID NO: 2542863 - RNA, 19 nt, Artificial Sequence
  Description of Artificial Sequence: Synthetic oligonucleotide
agccuuucauaggucucca

SEQ ID NO: 2542864 - RNA, 19 nt, Artificial Sequence
  Description of Artificial Sequence: Synthetic oligonucleotide
gcucuuuagaggcuccuua

SEQ ID NO: 2542865 - RNA, 19 nt, Artificial Sequence
  Description of Artificial Sequence: Synthetic oligonucleotide
cuccagccuuucauagguc

SEQ ID NO: 2542866 - RNA, 19 nt, Artificial Sequence
  Description of Artificial Sequence: Synthetic oligonucleotide
guggucgcucacagugggg

SEQ ID NO: 2542867 - RNA, 19 nt, Artificial Sequence
  Description of Artificial Sequence: Synthetic oligonucleotide
guugcaucaucacgugaau

SEQ ID NO: 2542868 - RNA, 19 nt, Artificial Sequence
  Description of Artificial Sequence: Synthetic oligonucleotide
gggcagaccucccggaaca

SEQ ID NO: 2542869 - RNA, 19 nt, Artificial Sequence
  Description of Artificial Sequence: Synthetic oligonucleotide
ggcuuuggugacgacucug

SEQ ID NO: 2542870 - RNA, 19 nt, Artificial Sequence
  Description of Artificial Sequence: Synthetic oligonucleotide
gcucagcuguagauugacg

SEQ ID NO: 2542871 - RNA, 19 nt, Artificial Sequence
  Description of Artificial Sequence: Synthetic oligonucleotide
caucauccugcagcuccag

SEQ ID NO: 2542872 - RNA, 19 nt, Artificial Sequence
  Description of Artificial Sequence: Synthetic oligonucleotide
ggguaguccaugggcagug

SEQ ID NO: 2542873 - RNA, 19 nt, Artificial Sequence
  Description of Artificial Sequence: Synthetic oligonucleotide
gucacugggcagaccuccc

SEQ ID NO: 2542874 - RNA, 19 nt, Artificial Sequence
  Description of Artificial Sequence: Synthetic oligonucleotide
guuaguggucgcucacagu

SEQ ID NO: 2542875 - RNA, 19 nt, Artificial Sequence
  Description of Artificial Sequence: Synthetic oligonucleotide
ugcuggggugcugacuuuu

SEQ ID NO: 2542876 - RNA, 19 nt, Artificial Sequence
  Description of Artificial Sequence: Synthetic oligonucleotide
ccacucuucaaauguugca

SEQ ID NO: 2542877 - RNA, 19 nt, Artificial Sequence
  Description of Artificial Sequence: Synthetic oligonucleotide
ggcuccuuauaggcuuugg

SEQ ID NO: 2542878 - RNA, 19 nt, Artificial Sequence
  Description of Artificial Sequence: Synthetic oligonucleotide
cagagccaucauccugcag

SEQ ID NO: 2542879 - RNA, 19 nt, Artificial Sequence
  Description of Artificial Sequence: Synthetic oligonucleotide
gauuacuggcccagggcau

SEQ ID NO: 2542880 - RNA, 19 nt, Artificial Sequence
  Description of Artificial Sequence: Synthetic oligonucleotide
cugacuuuucgaggccuca

SEQ ID NO: 2542881 - RNA, 19 nt, Artificial Sequence
  Description of Artificial Sequence: Synthetic oligonucleotide
gcaggagggaggugauuac

SEQ ID NO: 2542882 - RNA, 19 nt, Artificial Sequence
  Description of Artificial Sequence: Synthetic oligonucleotide
cagugccuucuccucucug

SEQ ID NO: 2542883 - RNA, 19 nt, Artificial Sequence
  Description of Artificial Sequence: Synthetic oligonucleotide
cuugugaaccugcuucuuu

SEQ ID NO: 2542884 - RNA, 19 nt, Artificial Sequence
  Description of Artificial Sequence: Synthetic oligonucleotide
gccuuucauaggucuccag

SEQ ID NO: 2542885 - RNA, 19 nt, Artificial Sequence
  Description of Artificial Sequence: Synthetic oligonucleotide
gggcauuugcgcuucuugu

SEQ ID NO: 2542886 - RNA, 19 nt, Artificial Sequence
  Description of Artificial Sequence: Synthetic oligonucleotide
agcucuuuagaggcuccuu

SEQ ID NO: 2542887 - RNA, 19 nt, Artificial Sequence
  Description of Artificial Sequence: Synthetic oligonucleotide
ggugacgacucugcgcuuc

SEQ ID NO: 2542888 - RNA, 19 nt, Artificial Sequence
  Description of Artificial Sequence: Synthetic oligonucleotide
gucgcccuuggggaaacca

SEQ ID NO: 2542889 - RNA, 19 nt, Artificial Sequence
  Description of Artificial Sequence: Synthetic oligonucleotide
gcagaccucccggaacagg

SEQ ID NO: 2542890 - RNA, 19 nt, Artificial Sequence
  Description of Artificial Sequence: Synthetic oligonucleotide
ccagccuuucauaggucuc

SEQ ID NO: 2542891 - RNA, 19 nt, Artificial Sequence
  Description of Artificial Sequence: Synthetic oligonucleotide
uuacuggcccagggcauuu

SEQ ID NO: 2542892 - RNA, 19 nt, Artificial Sequence
  Description of Artificial Sequence: Synthetic oligonucleotide
guaugcucagcuguagauu

SEQ ID NO: 2542893 - RNA, 19 nt, Artificial Sequence
  Description of Artificial Sequence: Synthetic oligonucleotide
uccgacugucagagccauc

SEQ ID NO: 2542894 - RNA, 19 nt, Artificial Sequence
  Description of Artificial Sequence: Synthetic oligonucleotide
ccuuucauaggucuccagu

SEQ ID NO: 2542895 - RNA, 19 nt, Artificial Sequence
  Description of Artificial Sequence: Synthetic oligonucleotide
uuucgccuccgggacuguc

SEQ ID NO: 2542896 - RNA, 19 nt, Artificial Sequence
  Description of Artificial Sequence: Synthetic oligonucleotide
ugacgacucugcgcuuccu

SEQ ID NO: 2542897 - RNA, 19 nt, Artificial Sequence
  Description of Artificial Sequence: Synthetic oligonucleotide
gggacuguccuugccguuc

SEQ ID NO: 2542898 - RNA, 19 nt, Artificial Sequence
  Description of Artificial Sequence: Synthetic oligonucleotide
agcuguagauugacgcaua

SEQ ID NO: 2542899 - RNA, 19 nt, Artificial Sequence
  Description of Artificial Sequence: Synthetic oligonucleotide
gcuccuuauaggcuuuggu

SEQ ID NO: 2542900 - RNA, 19 nt, Artificial Sequence
  Description of Artificial Sequence: Synthetic oligonucleotide
ggucgcucacaguggggac

SEQ ID NO: 2542901 - RNA, 19 nt, Artificial Sequence
  Description of Artificial Sequence: Synthetic oligonucleotide
gccuccgggacuguccuug

SEQ ID NO: 2542902 - RNA, 19 nt, Artificial Sequence
  Description of Artificial Sequence: Synthetic oligonucleotide
guaguccaugggcagugau

SEQ ID NO: 2542903 - RNA, 19 nt, Artificial Sequence
  Description of Artificial Sequence: Synthetic oligonucleotide
accagggucccgguacaau

SEQ ID NO: 2542904 - RNA, 19 nt, Artificial Sequence
  Description of Artificial Sequence: Synthetic oligonucleotide
gacgacucugcgcuuccuu

SEQ ID NO: 2542905 - RNA, 19 nt, Artificial Sequence
  Description of Artificial Sequence: Synthetic oligonucleotide
aggcuccuuauaggcuuug

SEQ ID NO: 2542906 - RNA, 19 nt, Artificial Sequence
  Description of Artificial Sequence: Synthetic oligonucleotide
cugcgcuuccuucuuggcu

SEQ ID NO: 2542907 - RNA, 19 nt, Artificial Sequence
  Description of Artificial Sequence: Synthetic oligonucleotide
ccuuucgccuccgggacug

SEQ ID NO: 2542908 - RNA, 19 nt, Artificial Sequence
  Description of Artificial Sequence: Synthetic oligonucleotide
ggggccaagggccuaggcu

SEQ ID NO: 2542909 - RNA, 19 nt, Artificial Sequence
  Description of Artificial Sequence: Synthetic oligonucleotide
ccggaacagggaccuuugg

SEQ ID NO: 2542910 - RNA, 19 nt, Artificial Sequence
  Description of Artificial Sequence: Synthetic oligonucleotide
uugcuggggugcugacuuu

SEQ ID NO: 2542911 - RNA, 19 nt, Artificial Sequence
  Description of Artificial Sequence: Synthetic oligonucleotide
ccuugccguuccugaacgc

SEQ ID NO: 2542912 - RNA, 19 nt, Artificial Sequence
  Description of Artificial Sequence: Synthetic oligonucleotide
gcgcuucuugugaaccugc

SEQ ID NO: 2542913 - RNA, 19 nt, Artificial Sequence
  Description of Artificial Sequence: Synthetic oligonucleotide
gggguaugucugguaacca

SEQ ID NO: 2542914 - RNA, 19 nt, Artificial Sequence
  Description of Artificial Sequence: Synthetic oligonucleotide
cagcuguagauugacgcau

SEQ ID NO: 2542915 - RNA, 19 nt, Artificial Sequence
  Description of Artificial Sequence: Synthetic oligonucleotide
gguaaccagggucccggua

SEQ ID NO: 2542916 - RNA, 19 nt, Artificial Sequence
  Description of Artificial Sequence: Synthetic oligonucleotide
ccuggguuaguggucgcuc

SEQ ID NO: 2542917 - RNA, 19 nt, Artificial Sequence
  Description of Artificial Sequence: Synthetic oligonucleotide
gcuacuugcuggggugcug

SEQ ID NO: 2542918 - RNA, 19 nt, Artificial Sequence
  Description of Artificial Sequence: Synthetic oligonucleotide
ggguuaguggucgcucaca

SEQ ID NO: 2542919 - RNA, 19 nt, Artificial Sequence
  Description of Artificial Sequence: Synthetic oligonucleotide
cugaacgcgaaggaauguu

SEQ ID NO: 2542920 - RNA, 19 nt, Artificial Sequence
  Description of Artificial Sequence: Synthetic oligonucleotide
cgaguaugcucagcuguag

SEQ ID NO: 2542921 - RNA, 19 nt, Artificial Sequence
  Description of Artificial Sequence: Synthetic oligonucleotide
uggugacgacucugcgcuu

SEQ ID NO: 2542922 - RNA, 19 nt, Artificial Sequence
  Description of Artificial Sequence: Synthetic oligonucleotide
cguuccugaacgcgaagga

SEQ ID NO: 2542923 - RNA, 19 nt, Artificial Sequence
  Description of Artificial Sequence: Synthetic oligonucleotide
gggucccgguacaaugcug

SEQ ID NO: 2542924 - RNA, 19 nt, Artificial Sequence
  Description of Artificial Sequence: Synthetic oligonucleotide
caggagggaggugauuacu

SEQ ID NO: 2542925 - RNA, 19 nt, Artificial Sequence
  Description of Artificial Sequence: Synthetic oligonucleotide
aggcucgagcaguggcaua

SEQ ID NO: 2542926 - RNA, 19 nt, Artificial Sequence
  Description of Artificial Sequence: Synthetic oligonucleotide
gccucacgaaugaucuuga

SEQ ID NO: 2542927 - RNA, 19 nt, Artificial Sequence
  Description of Artificial Sequence: Synthetic oligonucleotide
gaacguaaguugagcucuu

SEQ ID NO: 2542928 - RNA, 19 nt, Artificial Sequence
  Description of Artificial Sequence: Synthetic oligonucleotide
ccaagggccuaggcugagg

SEQ ID NO: 2542929 - RNA, 19 nt, Artificial Sequence
  Description of Artificial Sequence: Synthetic oligonucleotide
ggcccagggcauuugcgcu

SEQ ID NO: 2542930 - RNA, 19 nt, Artificial Sequence
  Description of Artificial Sequence: Synthetic oligonucleotide
gcccuuggggaaaccacuc

SEQ ID NO: 2542931 - RNA, 19 nt, Artificial Sequence
  Description of Artificial Sequence: Synthetic oligonucleotide
ccgguacaaugcuggacga

SEQ ID NO: 2542932 - RNA, 19 nt, Artificial Sequence
  Description of Artificial Sequence: Synthetic oligonucleotide
cuccuucaucaaugucaaa

SEQ ID NO: 2542933 - RNA, 19 nt, Artificial Sequence
  Description of Artificial Sequence: Synthetic oligonucleotide
gguaguccaugggcaguga

SEQ ID NO: 2542934 - RNA, 19 nt, Artificial Sequence
  Description of Artificial Sequence: Synthetic oligonucleotide
guccaugggcagugaugua

SEQ ID NO: 2542935 - RNA, 19 nt, Artificial Sequence
  Description of Artificial Sequence: Synthetic oligonucleotide
cgauggggucacugggcag

SEQ ID NO: 2542936 - RNA, 19 nt, Artificial Sequence
  Description of Artificial Sequence: Synthetic oligonucleotide
ccaugggcagugauguacu

SEQ ID NO: 2542937 - RNA, 19 nt, Artificial Sequence
  Description of Artificial Sequence: Synthetic oligonucleotide
cgugaaugugaugaaggua

SEQ ID NO: 2542938 - RNA, 19 nt, Artificial Sequence
  Description of Artificial Sequence: Synthetic oligonucleotide
gcaguggcauagggguaug

SEQ ID NO: 2542939 - RNA, 19 nt, Artificial Sequence
  Description of Artificial Sequence: Synthetic oligonucleotide
caugggcagugauguacuu

SEQ ID NO: 2542940 - RNA, 19 nt, Artificial Sequence
  Description of Artificial Sequence: Synthetic oligonucleotide
gccuaggcugaggcagcag

SEQ ID NO: 2542941 - RNA, 19 nt, Artificial Sequence
  Description of Artificial Sequence: Synthetic oligonucleotide
gccaagggccuaggcugag

SEQ ID NO: 2542942 - RNA, 19 nt, Artificial Sequence
  Description of Artificial Sequence: Synthetic oligonucleotide
gaggcuccuuauaggcuuu

SEQ ID NO: 2542943 - RNA, 19 nt, Artificial Sequence
  Description of Artificial Sequence: Synthetic oligonucleotide
ccucacgaaugaucuugaa

SEQ ID NO: 2542944 - RNA, 19 nt, Artificial Sequence
  Description of Artificial Sequence: Synthetic oligonucleotide
gcauagggguaugucuggu

SEQ ID NO: 2542945 - RNA, 19 nt, Artificial Sequence
  Description of Artificial Sequence: Synthetic oligonucleotide
ucgaggccucaagcucuuu

SEQ ID NO: 2542946 - RNA, 19 nt, Artificial Sequence
  Description of Artificial Sequence: Synthetic oligonucleotide
ggggacccuuucgccuccg

SEQ ID NO: 2542947 - RNA, 19 nt, Artificial Sequence
  Description of Artificial Sequence: Synthetic oligonucleotide
ggccuaggcugaggcagca

SEQ ID NO: 2542948 - RNA, 19 nt, Artificial Sequence
  Description of Artificial Sequence: Synthetic oligonucleotide
ggccucccugagcagcucu

SEQ ID NO: 2542949 - RNA, 19 nt, Artificial Sequence
  Description of Artificial Sequence: Synthetic oligonucleotide
gggucgcccuuggggaaac

SEQ ID NO: 2542950 - RNA, 19 nt, Artificial Sequence
  Description of Artificial Sequence: Synthetic oligonucleotide
ggucgcccuuggggaaacc

SEQ ID NO: 2542951 - RNA, 19 nt, Artificial Sequence
  Description of Artificial Sequence: Synthetic oligonucleotide
cgaggccucaagcucuuua

SEQ ID NO: 2542952 - RNA, 19 nt, Artificial Sequence
  Description of Artificial Sequence: Synthetic oligonucleotide
ccgggacuguccuugccgu

SEQ ID NO: 2542953 - RNA, 19 nt, Artificial Sequence
  Description of Artificial Sequence: Synthetic oligonucleotide
caguggcauagggguaugu

SEQ ID NO: 2542954 - RNA, 19 nt, Artificial Sequence
  Description of Artificial Sequence: Synthetic oligonucleotide
ggggucgcccuuggggaaa

SEQ ID NO: 2542955 - RNA, 19 nt, Artificial Sequence
  Description of Artificial Sequence: Synthetic oligonucleotide
ccucccggaacagggaccu

SEQ ID NO: 2542956 - RNA, 19 nt, Artificial Sequence
  Description of Artificial Sequence: Synthetic oligonucleotide
gagcaggagggaggugauu

SEQ ID NO: 2542957 - RNA, 19 nt, Artificial Sequence
  Description of Artificial Sequence: Synthetic oligonucleotide
cccuuggggaaaccacucu

SEQ ID NO: 2542958 - RNA, 19 nt, Artificial Sequence
  Description of Artificial Sequence: Synthetic oligonucleotide
gcgcuuccuucuuggcucu

SEQ ID NO: 2542959 - RNA, 19 nt, Artificial Sequence
  Description of Artificial Sequence: Synthetic oligonucleotide
ccugaacgcgaaggaaugu

SEQ ID NO: 2542960 - RNA, 19 nt, Artificial Sequence
  Description of Artificial Sequence: Synthetic oligonucleotide
cgcccuuggggaaaccacu

SEQ ID NO: 2542961 - RNA, 19 nt, Artificial Sequence
  Description of Artificial Sequence: Synthetic oligonucleotide
cagggcauuugcgcuucuu

SEQ ID NO: 2542962 - RNA, 19 nt, Artificial Sequence
  Description of Artificial Sequence: Synthetic oligonucleotide
ccaguggcagcagugccuu

SEQ ID NO: 2542963 - RNA, 19 nt, Artificial Sequence
  Description of Artificial Sequence: Synthetic oligonucleotide
cuuucgccuccgggacugu

SEQ ID NO: 2542964 - RNA, 19 nt, Artificial Sequence
  Description of Artificial Sequence: Synthetic oligonucleotide
cccuuucgccuccgggacu

SEQ ID NO: 2542965 - RNA, 19 nt, Artificial Sequence
  Description of Artificial Sequence: Synthetic oligonucleotide
gcuggacgauggggucacu

SEQ ID NO: 2542966 - RNA, 19 nt, Artificial Sequence
  Description of Artificial Sequence: Synthetic oligonucleotide
cucccggaacagggaccuu

SEQ ID NO: 2542967 - RNA, 19 nt, Artificial Sequence
  Description of Artificial Sequence: Synthetic oligonucleotide
cgccuccgggacuguccuu

SEQ ID NO: 2542968 - RNA, 19 nt, Artificial Sequence
  Description of Artificial Sequence: Synthetic oligonucleotide
aauaauuuuaacuugauac

SEQ ID NO: 2542969 - RNA, 19 nt, Artificial Sequence
  Description of Artificial Sequence: Synthetic oligonucleotide
auagauauaaaauuaggcc

SEQ ID NO: 2542970 - RNA, 19 nt, Artificial Sequence
  Description of Artificial Sequence: Synthetic oligonucleotide
aaaaccuaaagguaggccc

SEQ ID NO: 2542971 - RNA, 19 nt, Artificial Sequence
  Description of Artificial Sequence: Synthetic oligonucleotide
auaaauggcaagcugaccc

SEQ ID NO: 2542972 - RNA, 19 nt, Artificial Sequence
  Description of Artificial Sequence: Synthetic oligonucleotide
aaaauuaggccucuaacag

SEQ ID NO: 2542973 - RNA, 19 nt, Artificial Sequence
  Description of Artificial Sequence: Synthetic oligonucleotide
uauagauauaaaauuaggc

SEQ ID NO: 2542974 - RNA, 19 nt, Artificial Sequence
  Description of Artificial Sequence: Synthetic oligonucleotide
gaaucaagcagcuaaaggc

SEQ ID NO: 2542975 - RNA, 19 nt, Artificial Sequence
  Description of Artificial Sequence: Synthetic oligonucleotide
uuauagauauaaaauuagg

SEQ ID NO: 2542976 - RNA, 19 nt, Artificial Sequence
  Description of Artificial Sequence: Synthetic oligonucleotide
auucauagagaauauauag

SEQ ID NO: 2542977 - RNA, 19 nt, Artificial Sequence
  Description of Artificial Sequence: Synthetic oligonucleotide
uauauaaauggcaagcuga

SEQ ID NO: 2542978 - RNA, 19 nt, Artificial Sequence
  Description of Artificial Sequence: Synthetic oligonucleotide
uaaagaaucaagcagcuaa

SEQ ID NO: 2542979 - RNA, 19 nt, Artificial Sequence
  Description of Artificial Sequence: Synthetic oligonucleotide
uagauauaaaauuaggccu

SEQ ID NO: 2542980 - RNA, 19 nt, Artificial Sequence
  Description of Artificial Sequence: Synthetic oligonucleotide
uucauagagaauauauagg

SEQ ID NO: 2542981 - RNA, 19 nt, Artificial Sequence
  Description of Artificial Sequence: Synthetic oligonucleotide
uccuccauaagacuuaagg

SEQ ID NO: 2542982 - RNA, 19 nt, Artificial Sequence
  Description of Artificial Sequence: Synthetic oligonucleotide
auaaaauuaggccucuaac

SEQ ID NO: 2542983 - RNA, 19 nt, Artificial Sequence
  Description of Artificial Sequence: Synthetic oligonucleotide
uaaacuuucgacaauaauu

SEQ ID NO: 2542984 - RNA, 19 nt, Artificial Sequence
  Description of Artificial Sequence: Synthetic oligonucleotide
uauaaaaccuaaagguagg

SEQ ID NO: 2542985 - RNA, 19 nt, Artificial Sequence
  Description of Artificial Sequence: Synthetic oligonucleotide
acuuaagggaauuagaaga

SEQ ID NO: 2542986 - RNA, 19 nt, Artificial Sequence
  Description of Artificial Sequence: Synthetic oligonucleotide
agguauuuaaacuuucgac

SEQ ID NO: 2542987 - RNA, 19 nt, Artificial Sequence
  Description of Artificial Sequence: Synthetic oligonucleotide
ucauagagaauauauaggu

SEQ ID NO: 2542988 - RNA, 19 nt, Artificial Sequence
  Description of Artificial Sequence: Synthetic oligonucleotide
aaucaagcagcuaaaggcc

SEQ ID NO: 2542989 - RNA, 19 nt, Artificial Sequence
  Description of Artificial Sequence: Synthetic oligonucleotide
aaagguaggccccaggcuc

SEQ ID NO: 2542990 - RNA, 19 nt, Artificial Sequence
  Description of Artificial Sequence: Synthetic oligonucleotide
uaaaauuaggccucuaaca

SEQ ID NO: 2542991 - RNA, 19 nt, Artificial Sequence
  Description of Artificial Sequence: Synthetic oligonucleotide
ugugcuuucugucauagca

SEQ ID NO: 2542992 - RNA, 19 nt, Artificial Sequence
  Description of Artificial Sequence: Synthetic oligonucleotide
uuuaacuugauacauccaa

SEQ ID NO: 2542993 - RNA, 19 nt, Artificial Sequence
  Description of Artificial Sequence: Synthetic oligonucleotide
uugcauuguauucauagag

SEQ ID NO: 2542994 - RNA, 19 nt, Artificial Sequence
  Description of Artificial Sequence: Synthetic oligonucleotide
aguugaauggcuuaaagaa

SEQ ID NO: 2542995 - RNA, 19 nt, Artificial Sequence
  Description of Artificial Sequence: Synthetic oligonucleotide
auauauagguauuuaaacu

SEQ ID NO: 2542996 - RNA, 19 nt, Artificial Sequence
  Description of Artificial Sequence: Synthetic oligonucleotide
aauuagaagaccugaggca

SEQ ID NO: 2542997 - RNA, 19 nt, Artificial Sequence
  Description of Artificial Sequence: Synthetic oligonucleotide
uucgacaauaauuuuaacu

SEQ ID NO: 2542998 - RNA, 19 nt, Artificial Sequence
  Description of Artificial Sequence: Synthetic oligonucleotide
gaauaaaucuuccaauuac

SEQ ID NO: 2542999 - RNA, 19 nt, Artificial Sequence
  Description of Artificial Sequence: Synthetic oligonucleotide
auagagaauauauagguau

SEQ ID NO: 2543000 - RNA, 19 nt, Artificial Sequence
  Description of Artificial Sequence: Synthetic oligonucleotide
auaauuuuaacuugauaca

SEQ ID NO: 2543001 - RNA, 19 nt, Artificial Sequence
  Description of Artificial Sequence: Synthetic oligonucleotide
aaaguugaaaggaauuuuc

SEQ ID NO: 2543002 - RNA, 19 nt, Artificial Sequence
  Description of Artificial Sequence: Synthetic oligonucleotide
ucgacaauaauuuuaacuu

SEQ ID NO: 2543003 - RNA, 19 nt, Artificial Sequence
  Description of Artificial Sequence: Synthetic oligonucleotide
gacagccauauauaaaugg

SEQ ID NO: 2543004 - RNA, 19 nt, Artificial Sequence
  Description of Artificial Sequence: Synthetic oligonucleotide
gaccuuauaaaaccuaaag

SEQ ID NO: 2543005 - RNA, 19 nt, Artificial Sequence
  Description of Artificial Sequence: Synthetic oligonucleotide
uauauagguauuuaaacuu

SEQ ID NO: 2543006 - RNA, 19 nt, Artificial Sequence
  Description of Artificial Sequence: Synthetic oligonucleotide
uuuuccaaaccucugcacc

SEQ ID NO: 2543007 - RNA, 19 nt, Artificial Sequence
  Description of Artificial Sequence: Synthetic oligonucleotide
uguuuuaaagacaggccag

SEQ ID NO: 2543008 - RNA, 19 nt, Artificial Sequence
  Description of Artificial Sequence: Synthetic oligonucleotide
uuaacuugauacauccaag

SEQ ID NO: 2543009 - RNA, 19 nt, Artificial Sequence
  Description of Artificial Sequence: Synthetic oligonucleotide
auggcuuaaagaaucaagc

SEQ ID NO: 2543010 - RNA, 19 nt, Artificial Sequence
  Description of Artificial Sequence: Synthetic oligonucleotide
agaaucaagcagcuaaagg

SEQ ID NO: 2543011 - RNA, 19 nt, Artificial Sequence
  Description of Artificial Sequence: Synthetic oligonucleotide
uuuaagucccuuuauugca

SEQ ID NO: 2543012 - RNA, 19 nt, Artificial Sequence
  Description of Artificial Sequence: Synthetic oligonucleotide
cuuuaagucccuuuauugc

SEQ ID NO: 2543013 - RNA, 19 nt, Artificial Sequence
  Description of Artificial Sequence: Synthetic oligonucleotide
uuaaagacaggccagccuc

SEQ ID NO: 2543014 - RNA, 19 nt, Artificial Sequence
  Description of Artificial Sequence: Synthetic oligonucleotide
auuauagauauaaaauuag

SEQ ID NO: 2543015 - RNA, 19 nt, Artificial Sequence
  Description of Artificial Sequence: Synthetic oligonucleotide
uuucugucauagcagaacc

SEQ ID NO: 2543016 - RNA, 19 nt, Artificial Sequence
  Description of Artificial Sequence: Synthetic oligonucleotide
auucccaggaaguuuuccc

SEQ ID NO: 2543017 - RNA, 19 nt, Artificial Sequence
  Description of Artificial Sequence: Synthetic oligonucleotide
aaaccuaaagguaggcccc

SEQ ID NO: 2543018 - RNA, 19 nt, Artificial Sequence
  Description of Artificial Sequence: Synthetic oligonucleotide
uauaaaauuaggccucuaa

SEQ ID NO: 2543019 - RNA, 19 nt, Artificial Sequence
  Description of Artificial Sequence: Synthetic oligonucleotide
aagaggagcaaucuuggga

SEQ ID NO: 2543020 - RNA, 19 nt, Artificial Sequence
  Description of Artificial Sequence: Synthetic oligonucleotide
ugcaccaaggcagagaaag

SEQ ID NO: 2543021 - RNA, 19 nt, Artificial Sequence
  Description of Artificial Sequence: Synthetic oligonucleotide
aauuaggccucuaacagug

SEQ ID NO: 2543022 - RNA, 19 nt, Artificial Sequence
  Description of Artificial Sequence: Synthetic oligonucleotide
uaagggaauuagaagaccu

SEQ ID NO: 2543023 - RNA, 19 nt, Artificial Sequence
  Description of Artificial Sequence: Synthetic oligonucleotide
auauauaaauggcaagcug

SEQ ID NO: 2543024 - RNA, 19 nt, Artificial Sequence
  Description of Artificial Sequence: Synthetic oligonucleotide
gauacauccaaguuuaacu

SEQ ID NO: 2543025 - RNA, 19 nt, Artificial Sequence
  Description of Artificial Sequence: Synthetic oligonucleotide
uguucuuccaccucuugcc

SEQ ID NO: 2543026 - RNA, 19 nt, Artificial Sequence
  Description of Artificial Sequence: Synthetic oligonucleotide
gacuuaagggaauuagaag

SEQ ID NO: 2543027 - RNA, 19 nt, Artificial Sequence
  Description of Artificial Sequence: Synthetic oligonucleotide
uaagacuuaagggaauuag

SEQ ID NO: 2543028 - RNA, 19 nt, Artificial Sequence
  Description of Artificial Sequence: Synthetic oligonucleotide
agauauaaaauuaggccuc

SEQ ID NO: 2543029 - RNA, 19 nt, Artificial Sequence
  Description of Artificial Sequence: Synthetic oligonucleotide
acagccauauauaaauggc

SEQ ID NO: 2543030 - RNA, 19 nt, Artificial Sequence
  Description of Artificial Sequence: Synthetic oligonucleotide
aaacuuucgacaauaauuu

SEQ ID NO: 2543031 - RNA, 19 nt, Artificial Sequence
  Description of Artificial Sequence: Synthetic oligonucleotide
uccauaagacuuaagggaa

SEQ ID NO: 2543032 - RNA, 19 nt, Artificial Sequence
  Description of Artificial Sequence: Synthetic oligonucleotide
aaauuaggccucuaacagu

SEQ ID NO: 2543033 - RNA, 19 nt, Artificial Sequence
  Description of Artificial Sequence: Synthetic oligonucleotide
gguauuuaaacuuucgaca

SEQ ID NO: 2543034 - RNA, 19 nt, Artificial Sequence
  Description of Artificial Sequence: Synthetic oligonucleotide
cuuaagggaauuagaagac

SEQ ID NO: 2543035 - RNA, 19 nt, Artificial Sequence
  Description of Artificial Sequence: Synthetic oligonucleotide
uagguauuuaaacuuucga

SEQ ID NO: 2543036 - RNA, 19 nt, Artificial Sequence
  Description of Artificial Sequence: Synthetic oligonucleotide
agaauauauagguauuuaa

SEQ ID NO: 2543037 - RNA, 19 nt, Artificial Sequence
  Description of Artificial Sequence: Synthetic oligonucleotide
uauucauagagaauauaua

SEQ ID NO: 2543038 - RNA, 19 nt, Artificial Sequence
  Description of Artificial Sequence: Synthetic oligonucleotide
ucuaacagugauagggaca

SEQ ID NO: 2543039 - RNA, 19 nt, Artificial Sequence
  Description of Artificial Sequence: Synthetic oligonucleotide
cugguauggaguugaaugg

SEQ ID NO: 2543040 - RNA, 19 nt, Artificial Sequence
  Description of Artificial Sequence: Synthetic oligonucleotide
aauucccaggaaguuuucc

SEQ ID NO: 2543041 - RNA, 19 nt, Artificial Sequence
  Description of Artificial Sequence: Synthetic oligonucleotide
agucauguuuuaaagacag

SEQ ID NO: 2543042 - RNA, 19 nt, Artificial Sequence
  Description of Artificial Sequence: Synthetic oligonucleotide
auaaaaccuaaagguaggc

SEQ ID NO: 2543043 - RNA, 19 nt, Artificial Sequence
  Description of Artificial Sequence: Synthetic oligonucleotide
uuuaaagacaggccagccu

SEQ ID NO: 2543044 - RNA, 19 nt, Artificial Sequence
  Description of Artificial Sequence: Synthetic oligonucleotide
agggaaauuguugccaacc

SEQ ID NO: 2543045 - RNA, 19 nt, Artificial Sequence
  Description of Artificial Sequence: Synthetic oligonucleotide
uccaauuacuggcuugucc

SEQ ID NO: 2543046 - RNA, 19 nt, Artificial Sequence
  Description of Artificial Sequence: Synthetic oligonucleotide
cuaacagugauagggacag

SEQ ID NO: 2543047 - RNA, 19 nt, Artificial Sequence
  Description of Artificial Sequence: Synthetic oligonucleotide
gaaaggagcugguauggag

SEQ ID NO: 2543048 - RNA, 19 nt, Artificial Sequence
  Description of Artificial Sequence: Synthetic oligonucleotide
uuuugaccuuauaaaaccu

SEQ ID NO: 2543049 - RNA, 19 nt, Artificial Sequence
  Description of Artificial Sequence: Synthetic oligonucleotide
uccaauaagaggagcaauc

SEQ ID NO: 2543050 - RNA, 19 nt, Artificial Sequence
  Description of Artificial Sequence: Synthetic oligonucleotide
ugaggcaaaguugaaagga

SEQ ID NO: 2543051 - RNA, 19 nt, Artificial Sequence
  Description of Artificial Sequence: Synthetic oligonucleotide
auauaaauggcaagcugac

SEQ ID NO: 2543052 - RNA, 19 nt, Artificial Sequence
  Description of Artificial Sequence: Synthetic oligonucleotide
cuccauaagacuuaaggga

SEQ ID NO: 2543053 - RNA, 19 nt, Artificial Sequence
  Description of Artificial Sequence: Synthetic oligonucleotide
uauagguauuuaaacuuuc

SEQ ID NO: 2543054 - RNA, 19 nt, Artificial Sequence
  Description of Artificial Sequence: Synthetic oligonucleotide
ggaauuagaagaccugagg

SEQ ID NO: 2543055 - RNA, 19 nt, Artificial Sequence
  Description of Artificial Sequence: Synthetic oligonucleotide
accagaauaaaucuuccaa

SEQ ID NO: 2543056 - RNA, 19 nt, Artificial Sequence
  Description of Artificial Sequence: Synthetic oligonucleotide
uuaaacuuucgacaauaau

SEQ ID NO: 2543057 - RNA, 19 nt, Artificial Sequence
  Description of Artificial Sequence: Synthetic oligonucleotide
ucugcaccaaggcagagaa

SEQ ID NO: 2543058 - RNA, 19 nt, Artificial Sequence
  Description of Artificial Sequence: Synthetic oligonucleotide
guauuuaaacuuucgacaa

SEQ ID NO: 2543059 - RNA, 19 nt, Artificial Sequence
  Description of Artificial Sequence: Synthetic oligonucleotide
ucaucagucucgcucauuc

SEQ ID NO: 2543060 - RNA, 19 nt, Artificial Sequence
  Description of Artificial Sequence: Synthetic oligonucleotide
gcugguauggaguugaaug

SEQ ID NO: 2543061 - RNA, 19 nt, Artificial Sequence
  Description of Artificial Sequence: Synthetic oligonucleotide
uuuauugcauuguauucau

SEQ ID NO: 2543062 - RNA, 19 nt, Artificial Sequence
  Description of Artificial Sequence: Synthetic oligonucleotide
gacaauaauuuuaacuuga

SEQ ID NO: 2543063 - RNA, 19 nt, Artificial Sequence
  Description of Artificial Sequence: Synthetic oligonucleotide
uggcuuaaagaaucaagca

SEQ ID NO: 2543064 - RNA, 19 nt, Artificial Sequence
  Description of Artificial Sequence: Synthetic oligonucleotide
cuuauaaaaccuaaaggua

SEQ ID NO: 2543065 - RNA, 19 nt, Artificial Sequence
  Description of Artificial Sequence: Synthetic oligonucleotide
agaggagcaaucuugggau

SEQ ID NO: 2543066 - RNA, 19 nt, Artificial Sequence
  Description of Artificial Sequence: Synthetic oligonucleotide
uaaauggcaagcugacccc

SEQ ID NO: 2543067 - RNA, 19 nt, Artificial Sequence
  Description of Artificial Sequence: Synthetic oligonucleotide
caggguaaggucugcagcg

SEQ ID NO: 2543068 - RNA, 19 nt, Artificial Sequence
  Description of Artificial Sequence: Synthetic oligonucleotide
aagggcacagccaaauauc

SEQ ID NO: 2543069 - RNA, 19 nt, Artificial Sequence
  Description of Artificial Sequence: Synthetic oligonucleotide
auaagaggagcaaucuugg

SEQ ID NO: 2543070 - RNA, 19 nt, Artificial Sequence
  Description of Artificial Sequence: Synthetic oligonucleotide
uaaaaccuaaagguaggcc

SEQ ID NO: 2543071 - RNA, 19 nt, Artificial Sequence
  Description of Artificial Sequence: Synthetic oligonucleotide
cacagagguaacuucuucc

SEQ ID NO: 2543072 - RNA, 19 nt, Artificial Sequence
  Description of Artificial Sequence: Synthetic oligonucleotide
ucaccagaauaaaucuucc

SEQ ID NO: 2543073 - RNA, 19 nt, Artificial Sequence
  Description of Artificial Sequence: Synthetic oligonucleotide
aagaaucaagcagcuaaag

SEQ ID NO: 2543074 - RNA, 19 nt, Artificial Sequence
  Description of Artificial Sequence: Synthetic oligonucleotide
gaguugaauggcuuaaaga

SEQ ID NO: 2543075 - RNA, 19 nt, Artificial Sequence
  Description of Artificial Sequence: Synthetic oligonucleotide
uggcuugucccucaauucc

SEQ ID NO: 2543076 - RNA, 19 nt, Artificial Sequence
  Description of Artificial Sequence: Synthetic oligonucleotide
aacuugauacauccaaguu

SEQ ID NO: 2543077 - RNA, 19 nt, Artificial Sequence
  Description of Artificial Sequence: Synthetic oligonucleotide
auagguauuuaaacuuucg

SEQ ID NO: 2543078 - RNA, 19 nt, Artificial Sequence
  Description of Artificial Sequence: Synthetic oligonucleotide
gcuuaaagaaucaagcagc

SEQ ID NO: 2543079 - RNA, 19 nt, Artificial Sequence
  Description of Artificial Sequence: Synthetic oligonucleotide
ugaauggcuuaaagaauca

SEQ ID NO: 2543080 - RNA, 19 nt, Artificial Sequence
  Description of Artificial Sequence: Synthetic oligonucleotide
uuuuaacuugauacaucca

SEQ ID NO: 2543081 - RNA, 19 nt, Artificial Sequence
  Description of Artificial Sequence: Synthetic oligonucleotide
agaauaaaucuuccaauua

SEQ ID NO: 2543082 - RNA, 19 nt, Artificial Sequence
  Description of Artificial Sequence: Synthetic oligonucleotide
uugaaaggaauuuucuguu

SEQ ID NO: 2543083 - RNA, 19 nt, Artificial Sequence
  Description of Artificial Sequence: Synthetic oligonucleotide
ucauagcagaaccagggua

SEQ ID NO: 2543084 - RNA, 19 nt, Artificial Sequence
  Description of Artificial Sequence: Synthetic oligonucleotide
uuaagggaauuagaagacc

SEQ ID NO: 2543085 - RNA, 19 nt, Artificial Sequence
  Description of Artificial Sequence: Synthetic oligonucleotide
aggaaguuuucccuucauc

SEQ ID NO: 2543086 - RNA, 19 nt, Artificial Sequence
  Description of Artificial Sequence: Synthetic oligonucleotide
uuugaccuuauaaaaccua

SEQ ID NO: 2543087 - RNA, 19 nt, Artificial Sequence
  Description of Artificial Sequence: Synthetic oligonucleotide
aagaccugaggcaaaguug

SEQ ID NO: 2543088 - RNA, 19 nt, Artificial Sequence
  Description of Artificial Sequence: Synthetic oligonucleotide
aauuacuggcuugucccuc

SEQ ID NO: 2543089 - RNA, 19 nt, Artificial Sequence
  Description of Artificial Sequence: Synthetic oligonucleotide
uugagugugcuuucuguca

SEQ ID NO: 2543090 - RNA, 19 nt, Artificial Sequence
  Description of Artificial Sequence: Synthetic oligonucleotide
acagagguaacuucuuccu

SEQ ID NO: 2543091 - RNA, 19 nt, Artificial Sequence
  Description of Artificial Sequence: Synthetic oligonucleotide
uaagaggagcaaucuuggg

SEQ ID NO: 2543092 - RNA, 19 nt, Artificial Sequence
  Description of Artificial Sequence: Synthetic oligonucleotide
uuuuaaagacaggccagcc

SEQ ID NO: 2543093 - RNA, 19 nt, Artificial Sequence
  Description of Artificial Sequence: Synthetic oligonucleotide
guaaggucugcagcgaugg

SEQ ID NO: 2543094 - RNA, 19 nt, Artificial Sequence
  Description of Artificial Sequence: Synthetic oligonucleotide
ugucaccucugcaucauca

SEQ ID NO: 2543095 - RNA, 19 nt, Artificial Sequence
  Description of Artificial Sequence: Synthetic oligonucleotide
auacauccaaguuuaacuu

SEQ ID NO: 2543096 - RNA, 19 nt, Artificial Sequence
  Description of Artificial Sequence: Synthetic oligonucleotide
cuuucgacaauaauuuuaa

SEQ ID NO: 2543097 - RNA, 19 nt, Artificial Sequence
  Description of Artificial Sequence: Synthetic oligonucleotide
ucuuccaauuacuggcuug

SEQ ID NO: 2543098 - RNA, 19 nt, Artificial Sequence
  Description of Artificial Sequence: Synthetic oligonucleotide
aggagcaaucuugggaucc

SEQ ID NO: 2543099 - RNA, 19 nt, Artificial Sequence
  Description of Artificial Sequence: Synthetic oligonucleotide
aaguugaaaggaauuuucu

SEQ ID NO: 2543100 - RNA, 19 nt, Artificial Sequence
  Description of Artificial Sequence: Synthetic oligonucleotide
ccaauuacuggcuuguccc

SEQ ID NO: 2543101 - RNA, 19 nt, Artificial Sequence
  Description of Artificial Sequence: Synthetic oligonucleotide
uaaagguaggccccaggcu

SEQ ID NO: 2543102 - RNA, 19 nt, Artificial Sequence
  Description of Artificial Sequence: Synthetic oligonucleotide
aaaggagcugguauggagu

SEQ ID NO: 2543103 - RNA, 19 nt, Artificial Sequence
  Description of Artificial Sequence: Synthetic oligonucleotide
agagaaagaagggcacagc

SEQ ID NO: 2543104 - RNA, 19 nt, Artificial Sequence
  Description of Artificial Sequence: Synthetic oligonucleotide
ugacagccauauauaaaug

SEQ ID NO: 2543105 - RNA, 19 nt, Artificial Sequence
  Description of Artificial Sequence: Synthetic oligonucleotide
ccagucauguuuuaaagac

SEQ ID NO: 2543106 - RNA, 19 nt, Artificial Sequence
  Description of Artificial Sequence: Synthetic oligonucleotide
aggucugcagcgauggugc

SEQ ID NO: 2543107 - RNA, 19 nt, Artificial Sequence
  Description of Artificial Sequence: Synthetic oligonucleotide
uauuuaaacuuucgacaau

SEQ ID NO: 2543108 - RNA, 19 nt, Artificial Sequence
  Description of Artificial Sequence: Synthetic oligonucleotide
uuccaguaggaaaggagcu

SEQ ID NO: 2543109 - RNA, 19 nt, Artificial Sequence
  Description of Artificial Sequence: Synthetic oligonucleotide
auuagaagaccugaggcaa

SEQ ID NO: 2543110 - RNA, 19 nt, Artificial Sequence
  Description of Artificial Sequence: Synthetic oligonucleotide
auuuaaacuuucgacaaua

SEQ ID NO: 2543111 - RNA, 19 nt, Artificial Sequence
  Description of Artificial Sequence: Synthetic oligonucleotide
ccuccauaagacuuaaggg

SEQ ID NO: 2543112 - RNA, 19 nt, Artificial Sequence
  Description of Artificial Sequence: Synthetic oligonucleotide
ccaaggcagagaaagaagg

SEQ ID NO: 2543113 - RNA, 19 nt, Artificial Sequence
  Description of Artificial Sequence: Synthetic oligonucleotide
uugucccucaauucccagg

SEQ ID NO: 2543114 - RNA, 19 nt, Artificial Sequence
  Description of Artificial Sequence: Synthetic oligonucleotide
aaggucugcagcgauggug

SEQ ID NO: 2543115 - RNA, 19 nt, Artificial Sequence
  Description of Artificial Sequence: Synthetic oligonucleotide
uuaagucccuuuauugcau

SEQ ID NO: 2543116 - RNA, 19 nt, Artificial Sequence
  Description of Artificial Sequence: Synthetic oligonucleotide
acacagagguaacuucuuc

SEQ ID NO: 2543117 - RNA, 19 nt, Artificial Sequence
  Description of Artificial Sequence: Synthetic oligonucleotide
cugaggcaaaguugaaagg

SEQ ID NO: 2543118 - RNA, 19 nt, Artificial Sequence
  Description of Artificial Sequence: Synthetic oligonucleotide
uauaaauggcaagcugacc

SEQ ID NO: 2543119 - RNA, 19 nt, Artificial Sequence
  Description of Artificial Sequence: Synthetic oligonucleotide
ccugaggcaaaguugaaag

SEQ ID NO: 2543120 - RNA, 19 nt, Artificial Sequence
  Description of Artificial Sequence: Synthetic oligonucleotide
ccauauauaaauggcaagc

SEQ ID NO: 2543121 - RNA, 19 nt, Artificial Sequence
  Description of Artificial Sequence: Synthetic oligonucleotide
aagucccuuuauugcauug

SEQ ID NO: 2543122 - RNA, 19 nt, Artificial Sequence
  Description of Artificial Sequence: Synthetic oligonucleotide
gggacagggaaauuguugc

SEQ ID NO: 2543123 - RNA, 19 nt, Artificial Sequence
  Description of Artificial Sequence: Synthetic oligonucleotide
cugucauagcagaaccagg

SEQ ID NO: 2543124 - RNA, 19 nt, Artificial Sequence
  Description of Artificial Sequence: Synthetic oligonucleotide
aggaaaggagcugguaugg

SEQ ID NO: 2543125 - RNA, 19 nt, Artificial Sequence
  Description of Artificial Sequence: Synthetic oligonucleotide
gauggugcccuuccugaag

SEQ ID NO: 2543126 - RNA, 19 nt, Artificial Sequence
  Description of Artificial Sequence: Synthetic oligonucleotide
uucugucauagcagaacca

SEQ ID NO: 2543127 - RNA, 19 nt, Artificial Sequence
  Description of Artificial Sequence: Synthetic oligonucleotide
aaagaaucaagcagcuaaa

SEQ ID NO: 2543128 - RNA, 19 nt, Artificial Sequence
  Description of Artificial Sequence: Synthetic oligonucleotide
cucuaacagugauagggac

SEQ ID NO: 2543129 - RNA, 19 nt, Artificial Sequence
  Description of Artificial Sequence: Synthetic oligonucleotide
agacuuaagggaauuagaa

SEQ ID NO: 2543130 - RNA, 19 nt, Artificial Sequence
  Description of Artificial Sequence: Synthetic oligonucleotide
uccuuuaagucccuuuauu

SEQ ID NO: 2543131 - RNA, 19 nt, Artificial Sequence
  Description of Artificial Sequence: Synthetic oligonucleotide
cauagcagaaccaggguaa

SEQ ID NO: 2543132 - RNA, 19 nt, Artificial Sequence
  Description of Artificial Sequence: Synthetic oligonucleotide
ugguauggaguugaauggc

SEQ ID NO: 2543133 - RNA, 19 nt, Artificial Sequence
  Description of Artificial Sequence: Synthetic oligonucleotide
aagggaauuagaagaccug

SEQ ID NO: 2543134 - RNA, 19 nt, Artificial Sequence
  Description of Artificial Sequence: Synthetic oligonucleotide
ucagucucgcucauucuuc

SEQ ID NO: 2543135 - RNA, 19 nt, Artificial Sequence
  Description of Artificial Sequence: Synthetic oligonucleotide
ccuuuaagucccuuuauug

SEQ ID NO: 2543136 - RNA, 19 nt, Artificial Sequence
  Description of Artificial Sequence: Synthetic oligonucleotide
ugagugugcuuucugucau

SEQ ID NO: 2543137 - RNA, 19 nt, Artificial Sequence
  Description of Artificial Sequence: Synthetic oligonucleotide
ggaguugaauggcuuaaag

SEQ ID NO: 2543138 - RNA, 19 nt, Artificial Sequence
  Description of Artificial Sequence: Synthetic oligonucleotide
uuaggccucuaacagugau

SEQ ID NO: 2543139 - RNA, 19 nt, Artificial Sequence
  Description of Artificial Sequence: Synthetic oligonucleotide
aacuuucgacaauaauuuu

SEQ ID NO: 2543140 - RNA, 19 nt, Artificial Sequence
  Description of Artificial Sequence: Synthetic oligonucleotide
ucugcaucaucagucucgc

SEQ ID NO: 2543141 - RNA, 19 nt, Artificial Sequence
  Description of Artificial Sequence: Synthetic oligonucleotide
agugugcuuucugucauag

SEQ ID NO: 2543142 - RNA, 19 nt, Artificial Sequence
  Description of Artificial Sequence: Synthetic oligonucleotide
agggaauuagaagaccuga

SEQ ID NO: 2543143 - RNA, 19 nt, Artificial Sequence
  Description of Artificial Sequence: Synthetic oligonucleotide
uccccacuucuccacagcc

SEQ ID NO: 2543144 - RNA, 19 nt, Artificial Sequence
  Description of Artificial Sequence: Synthetic oligonucleotide
aaggagcugguauggaguu

SEQ ID NO: 2543145 - RNA, 19 nt, Artificial Sequence
  Description of Artificial Sequence: Synthetic oligonucleotide
agaccugaggcaaaguuga

SEQ ID NO: 2543146 - RNA, 19 nt, Artificial Sequence
  Description of Artificial Sequence: Synthetic oligonucleotide
acuggcuugucccucaauu

SEQ ID NO: 2543147 - RNA, 19 nt, Artificial Sequence
  Description of Artificial Sequence: Synthetic oligonucleotide
guugagugugcuuucuguc

SEQ ID NO: 2543148 - RNA, 19 nt, Artificial Sequence
  Description of Artificial Sequence: Synthetic oligonucleotide
aauggcaagcugaccccac

SEQ ID NO: 2543149 - RNA, 19 nt, Artificial Sequence
  Description of Artificial Sequence: Synthetic oligonucleotide
aagcagcuaaaggccaggg

SEQ ID NO: 2543150 - RNA, 19 nt, Artificial Sequence
  Description of Artificial Sequence: Synthetic oligonucleotide
uguauucauagagaauaua

SEQ ID NO: 2543151 - RNA, 19 nt, Artificial Sequence
  Description of Artificial Sequence: Synthetic oligonucleotide
acuuucgacaauaauuuua

SEQ ID NO: 2543152 - RNA, 19 nt, Artificial Sequence
  Description of Artificial Sequence: Synthetic oligonucleotide
ucaccucugcaucaucagu

SEQ ID NO: 2543153 - RNA, 19 nt, Artificial Sequence
  Description of Artificial Sequence: Synthetic oligonucleotide
uuucgacaauaauuuuaac

SEQ ID NO: 2543154 - RNA, 19 nt, Artificial Sequence
  Description of Artificial Sequence: Synthetic oligonucleotide
cagccauauauaaauggca

SEQ ID NO: 2543155 - RNA, 19 nt, Artificial Sequence
  Description of Artificial Sequence: Synthetic oligonucleotide
gccauauauaaauggcaag

SEQ ID NO: 2543156 - RNA, 19 nt, Artificial Sequence
  Description of Artificial Sequence: Synthetic oligonucleotide
uuagaagaccugaggcaaa

SEQ ID NO: 2543157 - RNA, 19 nt, Artificial Sequence
  Description of Artificial Sequence: Synthetic oligonucleotide
cagagaaagaagggcacag

SEQ ID NO: 2543158 - RNA, 19 nt, Artificial Sequence
  Description of Artificial Sequence: Synthetic oligonucleotide
uccaguaggaaaggagcug

SEQ ID NO: 2543159 - RNA, 19 nt, Artificial Sequence
  Description of Artificial Sequence: Synthetic oligonucleotide
uuccuuuaagucccuuuau

SEQ ID NO: 2543160 - RNA, 19 nt, Artificial Sequence
  Description of Artificial Sequence: Synthetic oligonucleotide
agagaauauauagguauuu

SEQ ID NO: 2543161 - RNA, 19 nt, Artificial Sequence
  Description of Artificial Sequence: Synthetic oligonucleotide
aaauggcaagcugacccca

SEQ ID NO: 2543162 - RNA, 19 nt, Artificial Sequence
  Description of Artificial Sequence: Synthetic oligonucleotide
aguuuucccuucauccuuc

SEQ ID NO: 2543163 - RNA, 19 nt, Artificial Sequence
  Description of Artificial Sequence: Synthetic oligonucleotide
cacagccaaauauccuucc

SEQ ID NO: 2543164 - RNA, 19 nt, Artificial Sequence
  Description of Artificial Sequence: Synthetic oligonucleotide
aucagucucgcucauucuu

SEQ ID NO: 2543165 - RNA, 19 nt, Artificial Sequence
  Description of Artificial Sequence: Synthetic oligonucleotide
cauagagaauauauaggua

SEQ ID NO: 2543166 - RNA, 19 nt, Artificial Sequence
  Description of Artificial Sequence: Synthetic oligonucleotide
auauagguauuuaaacuuu

SEQ ID NO: 2543167 - RNA, 19 nt, Artificial Sequence
  Description of Artificial Sequence: Synthetic oligonucleotide
acagggaaauuguugccaa

SEQ ID NO: 2543168 - RNA, 19 nt, Artificial Sequence
  Description of Artificial Sequence: Synthetic oligonucleotide
agccauauauaaauggcaa

SEQ ID NO: 2543169 - RNA, 19 nt, Artificial Sequence
  Description of Artificial Sequence: Synthetic oligonucleotide
uccaaaccucugcaccaag

SEQ ID NO: 2543170 - RNA, 19 nt, Artificial Sequence
  Description of Artificial Sequence: Synthetic oligonucleotide
gaaaggaauuuucuguuuu

SEQ ID NO: 2543171 - RNA, 19 nt, Artificial Sequence
  Description of Artificial Sequence: Synthetic oligonucleotide
uaagccccagucaccagaa

SEQ ID NO: 2543172 - RNA, 19 nt, Artificial Sequence
  Description of Artificial Sequence: Synthetic oligonucleotide
agguaacuucuuccuguuc

SEQ ID NO: 2543173 - RNA, 19 nt, Artificial Sequence
  Description of Artificial Sequence: Synthetic oligonucleotide
ugggauccuccauaagacu

SEQ ID NO: 2543174 - RNA, 19 nt, Artificial Sequence
  Description of Artificial Sequence: Synthetic oligonucleotide
auagggacagggaaauugu

SEQ ID NO: 2543175 - RNA, 19 nt, Artificial Sequence
  Description of Artificial Sequence: Synthetic oligonucleotide
agcgauggugcccuuccug

SEQ ID NO: 2543176 - RNA, 19 nt, Artificial Sequence
  Description of Artificial Sequence: Synthetic oligonucleotide
auggugcccuuccugaagu

SEQ ID NO: 2543177 - RNA, 19 nt, Artificial Sequence
  Description of Artificial Sequence: Synthetic oligonucleotide
cuggcuugucccucaauuc

SEQ ID NO: 2543178 - RNA, 19 nt, Artificial Sequence
  Description of Artificial Sequence: Synthetic oligonucleotide
agugauagggacagggaaa

SEQ ID NO: 2543179 - RNA, 19 nt, Artificial Sequence
  Description of Artificial Sequence: Synthetic oligonucleotide
agggacagggaaauuguug

SEQ ID NO: 2543180 - RNA, 19 nt, Artificial Sequence
  Description of Artificial Sequence: Synthetic oligonucleotide
caauaauuuuaacuugaua

SEQ ID NO: 2543181 - RNA, 19 nt, Artificial Sequence
  Description of Artificial Sequence: Synthetic oligonucleotide
uuuucccuucauccuucca

SEQ ID NO: 2543182 - RNA, 19 nt, Artificial Sequence
  Description of Artificial Sequence: Synthetic oligonucleotide
aggccagucauguuuuaaa

SEQ ID NO: 2543183 - RNA, 19 nt, Artificial Sequence
  Description of Artificial Sequence: Synthetic oligonucleotide
gugcuuucugucauagcag

SEQ ID NO: 2543184 - RNA, 19 nt, Artificial Sequence
  Description of Artificial Sequence: Synthetic oligonucleotide
acaauaauuuuaacuugau

SEQ ID NO: 2543185 - RNA, 19 nt, Artificial Sequence
  Description of Artificial Sequence: Synthetic oligonucleotide
uuaaagaaucaagcagcua

SEQ ID NO: 2543186 - RNA, 19 nt, Artificial Sequence
  Description of Artificial Sequence: Synthetic oligonucleotide
uagcagaaccaggguaagg

SEQ ID NO: 2543187 - RNA, 19 nt, Artificial Sequence
  Description of Artificial Sequence: Synthetic oligonucleotide
agggguugagugugcuuuc

SEQ ID NO: 2543188 - RNA, 19 nt, Artificial Sequence
  Description of Artificial Sequence: Synthetic oligonucleotide
cagucauguuuuaaagaca

SEQ ID NO: 2543189 - RNA, 19 nt, Artificial Sequence
  Description of Artificial Sequence: Synthetic oligonucleotide
aucuugggauccuccauaa

SEQ ID NO: 2543190 - RNA, 19 nt, Artificial Sequence
  Description of Artificial Sequence: Synthetic oligonucleotide
auagcagaaccaggguaag

SEQ ID NO: 2543191 - RNA, 19 nt, Artificial Sequence
  Description of Artificial Sequence: Synthetic oligonucleotide
cuuccuuuaagucccuuua

SEQ ID NO: 2543192 - RNA, 19 nt, Artificial Sequence
  Description of Artificial Sequence: Synthetic oligonucleotide
uuauugcauuguauucaua

SEQ ID NO: 2543193 - RNA, 19 nt, Artificial Sequence
  Description of Artificial Sequence: Synthetic oligonucleotide
ucuaagccccagucaccag

SEQ ID NO: 2543194 - RNA, 19 nt, Artificial Sequence
  Description of Artificial Sequence: Synthetic oligonucleotide
caagcugaccccacauguc

SEQ ID NO: 2543195 - RNA, 19 nt, Artificial Sequence
  Description of Artificial Sequence: Synthetic oligonucleotide
caagcagcuaaaggccagg

SEQ ID NO: 2543196 - RNA, 19 nt, Artificial Sequence
  Description of Artificial Sequence: Synthetic oligonucleotide
cuugucccucaauucccag

SEQ ID NO: 2543197 - RNA, 19 nt, Artificial Sequence
  Description of Artificial Sequence: Synthetic oligonucleotide
uaggccucuaacagugaua

SEQ ID NO: 2543198 - RNA, 19 nt, Artificial Sequence
  Description of Artificial Sequence: Synthetic oligonucleotide
gggaauuagaagaccugag

SEQ ID NO: 2543199 - RNA, 19 nt, Artificial Sequence
  Description of Artificial Sequence: Synthetic oligonucleotide
gaggcaaaguugaaaggaa

SEQ ID NO: 2543200 - RNA, 19 nt, Artificial Sequence
  Description of Artificial Sequence: Synthetic oligonucleotide
cucugacagccauauauaa

SEQ ID NO: 2543201 - RNA, 19 nt, Artificial Sequence
  Description of Artificial Sequence: Synthetic oligonucleotide
cuaagccccagucaccaga

SEQ ID NO: 2543202 - RNA, 19 nt, Artificial Sequence
  Description of Artificial Sequence: Synthetic oligonucleotide
agucccuuuauugcauugu

SEQ ID NO: 2543203 - RNA, 19 nt, Artificial Sequence
  Description of Artificial Sequence: Synthetic oligonucleotide
aucaagcagcuaaaggcca

SEQ ID NO: 2543204 - RNA, 19 nt, Artificial Sequence
  Description of Artificial Sequence: Synthetic oligonucleotide
aaccuaaagguaggcccca

SEQ ID NO: 2543205 - RNA, 19 nt, Artificial Sequence
  Description of Artificial Sequence: Synthetic oligonucleotide
cagugauagggacagggaa

SEQ ID NO: 2543206 - RNA, 19 nt, Artificial Sequence
  Description of Artificial Sequence: Synthetic oligonucleotide
cuaaaggccagggguugag

SEQ ID NO: 2543207 - RNA, 19 nt, Artificial Sequence
  Description of Artificial Sequence: Synthetic oligonucleotide
uaagucccuuuauugcauu

SEQ ID NO: 2543208 - RNA, 19 nt, Artificial Sequence
  Description of Artificial Sequence: Synthetic oligonucleotide
agcuaaaggccagggguug

SEQ ID NO: 2543209 - RNA, 19 nt, Artificial Sequence
  Description of Artificial Sequence: Synthetic oligonucleotide
auaagacuuaagggaauua

SEQ ID NO: 2543210 - RNA, 19 nt, Artificial Sequence
  Description of Artificial Sequence: Synthetic oligonucleotide
ucgcucauucuuccuuuaa

SEQ ID NO: 2543211 - RNA, 19 nt, Artificial Sequence
  Description of Artificial Sequence: Synthetic oligonucleotide
caccagaauaaaucuucca

SEQ ID NO: 2543212 - RNA, 19 nt, Artificial Sequence
  Description of Artificial Sequence: Synthetic oligonucleotide
aacacagagguaacuucuu

SEQ ID NO: 2543213 - RNA, 19 nt, Artificial Sequence
  Description of Artificial Sequence: Synthetic oligonucleotide
ggcucugacagccauauau

SEQ ID NO: 2543214 - RNA, 19 nt, Artificial Sequence
  Description of Artificial Sequence: Synthetic oligonucleotide
ggacagggaaauuguugcc

SEQ ID NO: 2543215 - RNA, 19 nt, Artificial Sequence
  Description of Artificial Sequence: Synthetic oligonucleotide
uagggacagggaaauuguu

SEQ ID NO: 2543216 - RNA, 19 nt, Artificial Sequence
  Description of Artificial Sequence: Synthetic oligonucleotide
aggccagccuccaauaaga

SEQ ID NO: 2543217 - RNA, 19 nt, Artificial Sequence
  Description of Artificial Sequence: Synthetic oligonucleotide
gggaaauuguugccaacca

SEQ ID NO: 2543218 - RNA, 19 nt, Artificial Sequence
  Description of Artificial Sequence: Synthetic oligonucleotide
auggaguugaauggcuuaa

SEQ ID NO: 2543219 - RNA, 19 nt, Artificial Sequence
  Description of Artificial Sequence: Synthetic oligonucleotide
acagugauagggacaggga

SEQ ID NO: 2543220 - RNA, 19 nt, Artificial Sequence
  Description of Artificial Sequence: Synthetic oligonucleotide
auggcaagcugaccccaca

SEQ ID NO: 2543221 - RNA, 19 nt, Artificial Sequence
  Description of Artificial Sequence: Synthetic oligonucleotide
gaggagcaaucuugggauc

SEQ ID NO: 2543222 - RNA, 19 nt, Artificial Sequence
  Description of Artificial Sequence: Synthetic oligonucleotide
uaacagugauagggacagg

SEQ ID NO: 2543223 - RNA, 19 nt, Artificial Sequence
  Description of Artificial Sequence: Synthetic oligonucleotide
gccagucauguuuuaaaga

SEQ ID NO: 2543224 - RNA, 19 nt, Artificial Sequence
  Description of Artificial Sequence: Synthetic oligonucleotide
ucccaggaaguuuucccuu

SEQ ID NO: 2543225 - RNA, 19 nt, Artificial Sequence
  Description of Artificial Sequence: Synthetic oligonucleotide
uaaggucugcagcgauggu

SEQ ID NO: 2543226 - RNA, 19 nt, Artificial Sequence
  Description of Artificial Sequence: Synthetic oligonucleotide
uggaguugaauggcuuaaa

SEQ ID NO: 2543227 - RNA, 19 nt, Artificial Sequence
  Description of Artificial Sequence: Synthetic oligonucleotide
cagccuccgucacagcccc

SEQ ID NO: 2543228 - RNA, 19 nt, Artificial Sequence
  Description of Artificial Sequence: Synthetic oligonucleotide
aucuuccaauuacuggcuu

SEQ ID NO: 2543229 - RNA, 19 nt, Artificial Sequence
  Description of Artificial Sequence: Synthetic oligonucleotide
guugaauggcuuaaagaau

SEQ ID NO: 2543230 - RNA, 19 nt, Artificial Sequence
  Description of Artificial Sequence: Synthetic oligonucleotide
aggcaaaguugaaaggaau

SEQ ID NO: 2543231 - RNA, 19 nt, Artificial Sequence
  Description of Artificial Sequence: Synthetic oligonucleotide
agucucgcucauucuuccu

SEQ ID NO: 2543232 - RNA, 19 nt, Artificial Sequence
  Description of Artificial Sequence: Synthetic oligonucleotide
aggccagggguugagugug

SEQ ID NO: 2543233 - RNA, 19 nt, Artificial Sequence
  Description of Artificial Sequence: Synthetic oligonucleotide
gcucauucuuccuuuaagu

SEQ ID NO: 2543234 - RNA, 19 nt, Artificial Sequence
  Description of Artificial Sequence: Synthetic oligonucleotide
gaccccacaugucaccucu

SEQ ID NO: 2543235 - RNA, 19 nt, Artificial Sequence
  Description of Artificial Sequence: Synthetic oligonucleotide
uuccaaaccucugcaccaa

SEQ ID NO: 2543236 - RNA, 19 nt, Artificial Sequence
  Description of Artificial Sequence: Synthetic oligonucleotide
gcaaucuugggauccucca

SEQ ID NO: 2543237 - RNA, 19 nt, Artificial Sequence
  Description of Artificial Sequence: Synthetic oligonucleotide
agucaccagaauaaaucuu

SEQ ID NO: 2543238 - RNA, 19 nt, Artificial Sequence
  Description of Artificial Sequence: Synthetic oligonucleotide
ggagcugguauggaguuga

SEQ ID NO: 2543239 - RNA, 19 nt, Artificial Sequence
  Description of Artificial Sequence: Synthetic oligonucleotide
accugaggcaaaguugaaa

SEQ ID NO: 2543240 - RNA, 19 nt, Artificial Sequence
  Description of Artificial Sequence: Synthetic oligonucleotide
gcagcgauggugcccuucc

SEQ ID NO: 2543241 - RNA, 19 nt, Artificial Sequence
  Description of Artificial Sequence: Synthetic oligonucleotide
gugugcuuucugucauagc

SEQ ID NO: 2543242 - RNA, 19 nt, Artificial Sequence
  Description of Artificial Sequence: Synthetic oligonucleotide
cauuguauucauagagaau

SEQ ID NO: 2543243 - RNA, 19 nt, Artificial Sequence
  Description of Artificial Sequence: Synthetic oligonucleotide
caauucccaggaaguuuuc

SEQ ID NO: 2543244 - RNA, 19 nt, Artificial Sequence
  Description of Artificial Sequence: Synthetic oligonucleotide
uaggccccaggcucugaca

SEQ ID NO: 2543245 - RNA, 19 nt, Artificial Sequence
  Description of Artificial Sequence: Synthetic oligonucleotide
gauccuccauaagacuuaa

SEQ ID NO: 2543246 - RNA, 19 nt, Artificial Sequence
  Description of Artificial Sequence: Synthetic oligonucleotide
guaggccccaggcucugac

SEQ ID NO: 2543247 - RNA, 19 nt, Artificial Sequence
  Description of Artificial Sequence: Synthetic oligonucleotide
ggcuugucccucaauuccc

SEQ ID NO: 2543248 - RNA, 19 nt, Artificial Sequence
  Description of Artificial Sequence: Synthetic oligonucleotide
gguugagugugcuuucugu

SEQ ID NO: 2543249 - RNA, 19 nt, Artificial Sequence
  Description of Artificial Sequence: Synthetic oligonucleotide
auauaaaauuaggccucua

SEQ ID NO: 2543250 - RNA, 19 nt, Artificial Sequence
  Description of Artificial Sequence: Synthetic oligonucleotide
gucauagcagaaccagggu

SEQ ID NO: 2543251 - RNA, 19 nt, Artificial Sequence
  Description of Artificial Sequence: Synthetic oligonucleotide
cccuucauccuuccaguag

SEQ ID NO: 2543252 - RNA, 19 nt, Artificial Sequence
  Description of Artificial Sequence: Synthetic oligonucleotide
gaaccaggguaaggucugc

SEQ ID NO: 2543253 - RNA, 19 nt, Artificial Sequence
  Description of Artificial Sequence: Synthetic oligonucleotide
gcaagcugaccccacaugu

SEQ ID NO: 2543254 - RNA, 19 nt, Artificial Sequence
  Description of Artificial Sequence: Synthetic oligonucleotide
gcugaccccacaugucacc

SEQ ID NO: 2543255 - RNA, 19 nt, Artificial Sequence
  Description of Artificial Sequence: Synthetic oligonucleotide
caaaguugaaaggaauuuu

SEQ ID NO: 2543256 - RNA, 19 nt, Artificial Sequence
  Description of Artificial Sequence: Synthetic oligonucleotide
ccucuaacagugauaggga

SEQ ID NO: 2543257 - RNA, 19 nt, Artificial Sequence
  Description of Artificial Sequence: Synthetic oligonucleotide
gucugcagcgauggugccc

SEQ ID NO: 2543258 - RNA, 19 nt, Artificial Sequence
  Description of Artificial Sequence: Synthetic oligonucleotide
ugaccccacaugucaccuc

SEQ ID NO: 2543259 - RNA, 19 nt, Artificial Sequence
  Description of Artificial Sequence: Synthetic oligonucleotide
gugauagggacagggaaau

SEQ ID NO: 2543260 - RNA, 19 nt, Artificial Sequence
  Description of Artificial Sequence: Synthetic oligonucleotide
ggguugagugugcuuucug

SEQ ID NO: 2543261 - RNA, 19 nt, Artificial Sequence
  Description of Artificial Sequence: Synthetic oligonucleotide
ggcacagccaaauauccuu

SEQ ID NO: 2543262 - RNA, 19 nt, Artificial Sequence
  Description of Artificial Sequence: Synthetic oligonucleotide
ccagaauaaaucuuccaau

SEQ ID NO: 2543263 - RNA, 19 nt, Artificial Sequence
  Description of Artificial Sequence: Synthetic oligonucleotide
gagguaacuucuuccuguu

SEQ ID NO: 2543264 - RNA, 19 nt, Artificial Sequence
  Description of Artificial Sequence: Synthetic oligonucleotide
aggagcugguauggaguug

SEQ ID NO: 2543265 - RNA, 19 nt, Artificial Sequence
  Description of Artificial Sequence: Synthetic oligonucleotide
caauuacuggcuugucccu

SEQ ID NO: 2543266 - RNA, 19 nt, Artificial Sequence
  Description of Artificial Sequence: Synthetic oligonucleotide
auuaggccucuaacaguga

SEQ ID NO: 2543267 - RNA, 19 nt, Artificial Sequence
  Description of Artificial Sequence: Synthetic oligonucleotide
agcugguauggaguugaau

SEQ ID NO: 2543268 - RNA, 19 nt, Artificial Sequence
  Description of Artificial Sequence: Synthetic oligonucleotide
aagccccagucaccagaau

SEQ ID NO: 2543269 - RNA, 19 nt, Artificial Sequence
  Description of Artificial Sequence: Synthetic oligonucleotide
uggugcccuuccugaaguc

SEQ ID NO: 2543270 - RNA, 19 nt, Artificial Sequence
  Description of Artificial Sequence: Synthetic oligonucleotide
cauaagacuuaagggaauu

SEQ ID NO: 2543271 - RNA, 19 nt, Artificial Sequence
  Description of Artificial Sequence: Synthetic oligonucleotide
ugauagggacagggaaauu

SEQ ID NO: 2543272 - RNA, 19 nt, Artificial Sequence
  Description of Artificial Sequence: Synthetic oligonucleotide
gagugugcuuucugucaua

SEQ ID NO: 2543273 - RNA, 19 nt, Artificial Sequence
  Description of Artificial Sequence: Synthetic oligonucleotide
gcaaaguugaaaggaauuu

SEQ ID NO: 2543274 - RNA, 19 nt, Artificial Sequence
  Description of Artificial Sequence: Synthetic oligonucleotide
ggccucuaacagugauagg

SEQ ID NO: 2543275 - RNA, 19 nt, Artificial Sequence
  Description of Artificial Sequence: Synthetic oligonucleotide
gcagagaaagaagggcaca

SEQ ID NO: 2543276 - RNA, 19 nt, Artificial Sequence
  Description of Artificial Sequence: Synthetic oligonucleotide
ugcagcgauggugcccuuc

SEQ ID NO: 2543277 - RNA, 19 nt, Artificial Sequence
  Description of Artificial Sequence: Synthetic oligonucleotide
gguauggaguugaauggcu

SEQ ID NO: 2543278 - RNA, 19 nt, Artificial Sequence
  Description of Artificial Sequence: Synthetic oligonucleotide
ccccacaugucaccucugc

SEQ ID NO: 2543279 - RNA, 19 nt, Artificial Sequence
  Description of Artificial Sequence: Synthetic oligonucleotide
ggugcccuuccugaaguca

SEQ ID NO: 2543280 - RNA, 19 nt, Artificial Sequence
  Description of Artificial Sequence: Synthetic oligonucleotide
auccuccauaagacuuaag

SEQ ID NO: 2543281 - RNA, 19 nt, Artificial Sequence
  Description of Artificial Sequence: Synthetic oligonucleotide
cucaauucccaggaaguuu

SEQ ID NO: 2543282 - RNA, 19 nt, Artificial Sequence
  Description of Artificial Sequence: Synthetic oligonucleotide
gcacagccaaauauccuuc

SEQ ID NO: 2543283 - RNA, 19 nt, Artificial Sequence
  Description of Artificial Sequence: Synthetic oligonucleotide
caaucuugggauccuccau

SEQ ID NO: 2543284 - RNA, 19 nt, Artificial Sequence
  Description of Artificial Sequence: Synthetic oligonucleotide
acaggccagucauguuuua

SEQ ID NO: 2543285 - RNA, 19 nt, Artificial Sequence
  Description of Artificial Sequence: Synthetic oligonucleotide
uucuuccuuuaagucccuu

SEQ ID NO: 2543286 - RNA, 19 nt, Artificial Sequence
  Description of Artificial Sequence: Synthetic oligonucleotide
gccccagucaccagaauaa

SEQ ID NO: 2543287 - RNA, 19 nt, Artificial Sequence
  Description of Artificial Sequence: Synthetic oligonucleotide
ggaaaggagcugguaugga

SEQ ID NO: 2543288 - RNA, 19 nt, Artificial Sequence
  Description of Artificial Sequence: Synthetic oligonucleotide
gucucgcucauucuuccuu

SEQ ID NO: 2543289 - RNA, 19 nt, Artificial Sequence
  Description of Artificial Sequence: Synthetic oligonucleotide
ggcaaaguugaaaggaauu

SEQ ID NO: 2543290 - RNA, 19 nt, Artificial Sequence
  Description of Artificial Sequence: Synthetic oligonucleotide
ggauccuccauaagacuua

SEQ ID NO: 2543291 - RNA, 19 nt, Artificial Sequence
  Description of Artificial Sequence: Synthetic oligonucleotide
ggccagccuccaauaagag

SEQ ID NO: 2543292 - RNA, 19 nt, Artificial Sequence
  Description of Artificial Sequence: Synthetic oligonucleotide
caucagucucgcucauucu

SEQ ID NO: 2543293 - RNA, 19 nt, Artificial Sequence
  Description of Artificial Sequence: Synthetic oligonucleotide
aucaucagucucgcucauu

SEQ ID NO: 2543294 - RNA, 19 nt, Artificial Sequence
  Description of Artificial Sequence: Synthetic oligonucleotide
ggucugcagcgauggugcc

SEQ ID NO: 2543295 - RNA, 19 nt, Artificial Sequence
  Description of Artificial Sequence: Synthetic oligonucleotide
ccaauaagaggagcaaucu

SEQ ID NO: 2543296 - RNA, 19 nt, Artificial Sequence
  Description of Artificial Sequence: Synthetic oligonucleotide
cagcuaaaggccagggguu

SEQ ID NO: 2543297 - RNA, 19 nt, Artificial Sequence
  Description of Artificial Sequence: Synthetic oligonucleotide
cuccaauaagaggagcaau

SEQ ID NO: 2543298 - RNA, 19 nt, Artificial Sequence
  Description of Artificial Sequence: Synthetic oligonucleotide
cucgcucauucuuccuuua

SEQ ID NO: 2543299 - RNA, 19 nt, Artificial Sequence
  Description of Artificial Sequence: Synthetic oligonucleotide
cccucaauucccaggaagu

SEQ ID NO: 2543300 - RNA, 19 nt, Artificial Sequence
  Description of Artificial Sequence: Synthetic oligonucleotide
cagggguugagugugcuuu

SEQ ID NO: 2543301 - RNA, 19 nt, Artificial Sequence
  Description of Artificial Sequence: Synthetic oligonucleotide
cacaggccagucauguuuu

SEQ ID NO: 2543302 - RNA, 19 nt, Artificial Sequence
  Description of Artificial Sequence: Synthetic oligonucleotide
caggccagucauguuuuaa

SEQ ID NO: 2543303 - RNA, 19 nt, Artificial Sequence
  Description of Artificial Sequence: Synthetic oligonucleotide
gggauccuccauaagacuu

SEQ ID NO: 2543304 - RNA, 19 nt, Artificial Sequence
  Description of Artificial Sequence: Synthetic oligonucleotide
gcuugucccucaauuccca

SEQ ID NO: 2543305 - RNA, 19 nt, Artificial Sequence
  Description of Artificial Sequence: Synthetic oligonucleotide
caggcucugacagccauau

SEQ ID NO: 2543306 - RNA, 19 nt, Artificial Sequence
  Description of Artificial Sequence: Synthetic oligonucleotide
caguaggaaaggagcuggu

SEQ ID NO: 2543307 - RNA, 19 nt, Artificial Sequence
  Description of Artificial Sequence: Synthetic oligonucleotide
ccacaugucaccucugcau

SEQ ID NO: 2543308 - RNA, 19 nt, Artificial Sequence
  Description of Artificial Sequence: Synthetic oligonucleotide
agguaggccccaggcucug

SEQ ID NO: 2543309 - RNA, 19 nt, Artificial Sequence
  Description of Artificial Sequence: Synthetic oligonucleotide
ccaggaaguuuucccuuca

SEQ ID NO: 2543310 - RNA, 19 nt, Artificial Sequence
  Description of Artificial Sequence: Synthetic oligonucleotide
gucccucaauucccaggaa

SEQ ID NO: 2543311 - RNA, 19 nt, Artificial Sequence
  Description of Artificial Sequence: Synthetic oligonucleotide
gcuaaaggccagggguuga

SEQ ID NO: 2543312 - RNA, 19 nt, Artificial Sequence
  Description of Artificial Sequence: Synthetic oligonucleotide
ggccccaggcucugacagc

SEQ ID NO: 2543313 - RNA, 19 nt, Artificial Sequence
  Description of Artificial Sequence: Synthetic oligonucleotide
gccaaauauccuuccguuu

SEQ ID NO: 2543314 - RNA, 19 nt, Artificial Sequence
  Description of Artificial Sequence: Synthetic oligonucleotide
ccuccaauaagaggagcaa

SEQ ID NO: 2543315 - RNA, 19 nt, Artificial Sequence
  Description of Artificial Sequence: Synthetic oligonucleotide
caggaaguuuucccuucau

SEQ ID NO: 2543316 - RNA, 19 nt, Artificial Sequence
  Description of Artificial Sequence: Synthetic oligonucleotide
cugcaccaaggcagagaaa

SEQ ID NO: 2543317 - RNA, 19 nt, Artificial Sequence
  Description of Artificial Sequence: Synthetic oligonucleotide
ccauaagacuuaagggaau

SEQ ID NO: 2543318 - RNA, 19 nt, Artificial Sequence
  Description of Artificial Sequence: Synthetic oligonucleotide
aggcucugacagccauaua

SEQ ID NO: 2543319 - RNA, 19 nt, Artificial Sequence
  Description of Artificial Sequence: Synthetic oligonucleotide
ggagcaaucuugggauccu

SEQ ID NO: 2543320 - RNA, 19 nt, Artificial Sequence
  Description of Artificial Sequence: Synthetic oligonucleotide
gucacaggccagucauguu

SEQ ID NO: 2543321 - RNA, 19 nt, Artificial Sequence
  Description of Artificial Sequence: Synthetic oligonucleotide
caucaucagucucgcucau

SEQ ID NO: 2543322 - RNA, 19 nt, Artificial Sequence
  Description of Artificial Sequence: Synthetic oligonucleotide
gggcacagccaaauauccu

SEQ ID NO: 2543323 - RNA, 19 nt, Artificial Sequence
  Description of Artificial Sequence: Synthetic oligonucleotide
ggccagggguugagugugc

SEQ ID NO: 2543324 - RNA, 19 nt, Artificial Sequence
  Description of Artificial Sequence: Synthetic oligonucleotide
gggguugagugugcuuucu

SEQ ID NO: 2543325 - RNA, 19 nt, Artificial Sequence
  Description of Artificial Sequence: Synthetic oligonucleotide
cugcaucaucagucucgcu

SEQ ID NO: 2543326 - RNA, 19 nt, Artificial Sequence
  Description of Artificial Sequence: Synthetic oligonucleotide
cagcgauggugcccuuccu

SEQ ID NO: 2543327 - RNA, 19 nt, Artificial Sequence
  Description of Artificial Sequence: Synthetic oligonucleotide
gguaggccccaggcucuga

SEQ ID NO: 2543328 - RNA, 19 nt, Artificial Sequence
  Description of Artificial Sequence: Synthetic oligonucleotide
cgauggugcccuuccugaa

SEQ ID NO: 2543329 - RNA, 19 nt, Artificial Sequence
  Description of Artificial Sequence: Synthetic oligonucleotide
ccccagucaccagaauaaa

SEQ ID NO: 2543330 - RNA, 19 nt, Artificial Sequence
  Description of Artificial Sequence: Synthetic oligonucleotide
gccagggguugagugugcu

SEQ ID NO: 2543331 - RNA, 19 nt, Artificial Sequence
  Description of Artificial Sequence: Synthetic oligonucleotide
cccaggcucugacagccau

SEQ ID NO: 2543332 - RNA, 19 nt, Artificial Sequence
  Description of Artificial Sequence: Synthetic oligonucleotide
ccagggguugagugugcuu

SEQ ID NO: 2543333 - RNA, 19 nt, Artificial Sequence
  Description of Artificial Sequence: Synthetic oligonucleotide
cugcagcgauggugcccuu

SEQ ID NO: 2543334 - RNA, 19 nt, Artificial Sequence
  Description of Artificial Sequence: Synthetic oligonucleotide
aaugagauagacuaaaccc

SEQ ID NO: 2543335 - RNA, 19 nt, Artificial Sequence
  Description of Artificial Sequence: Synthetic oligonucleotide
auaggaaucugcuugaggg

SEQ ID NO: 2543336 - RNA, 19 nt, Artificial Sequence
  Description of Artificial Sequence: Synthetic oligonucleotide
auaaauaaaguuuucuaca

SEQ ID NO: 2543337 - RNA, 19 nt, Artificial Sequence
  Description of Artificial Sequence: Synthetic oligonucleotide
cauaaauaaaguuuucuac

SEQ ID NO: 2543338 - RNA, 19 nt, Artificial Sequence
  Description of Artificial Sequence: Synthetic oligonucleotide
auagacuaaacccugaaga

SEQ ID NO: 2543339 - RNA, 19 nt, Artificial Sequence
  Description of Artificial Sequence: Synthetic oligonucleotide
aggccagccaaucugaugc

SEQ ID NO: 2543340 - RNA, 19 nt, Artificial Sequence
  Description of Artificial Sequence: Synthetic oligonucleotide
uuuacauagagucuggcuu

SEQ ID NO: 2543341 - RNA, 19 nt, Artificial Sequence
  Description of Artificial Sequence: Synthetic oligonucleotide
auguguaggcaauaguccc

SEQ ID NO: 2543342 - RNA, 19 nt, Artificial Sequence
  Description of Artificial Sequence: Synthetic oligonucleotide
gaugcugcuacucagcggc

SEQ ID NO: 2543343 - RNA, 19 nt, Artificial Sequence
  Description of Artificial Sequence: Synthetic oligonucleotide
aucauaguagggaagaugg

SEQ ID NO: 2543344 - RNA, 19 nt, Artificial Sequence
  Description of Artificial Sequence: Synthetic oligonucleotide
uucccaaugagauagacua

SEQ ID NO: 2543345 - RNA, 19 nt, Artificial Sequence
  Description of Artificial Sequence: Synthetic oligonucleotide
caaguaaccgacuggauag

SEQ ID NO: 2543346 - RNA, 19 nt, Artificial Sequence
  Description of Artificial Sequence: Synthetic oligonucleotide
agaaacuucugacuugaac

SEQ ID NO: 2543347 - RNA, 19 nt, Artificial Sequence
  Description of Artificial Sequence: Synthetic oligonucleotide
ucaauggcccacuugaacc

SEQ ID NO: 2543348 - RNA, 19 nt, Artificial Sequence
  Description of Artificial Sequence: Synthetic oligonucleotide
aauagucccauggacuggc

SEQ ID NO: 2543349 - RNA, 19 nt, Artificial Sequence
  Description of Artificial Sequence: Synthetic oligonucleotide
uaauuuauuggaaggagau

SEQ ID NO: 2543350 - RNA, 19 nt, Artificial Sequence
  Description of Artificial Sequence: Synthetic oligonucleotide
guagggaagauggagaugg

SEQ ID NO: 2543351 - RNA, 19 nt, Artificial Sequence
  Description of Artificial Sequence: Synthetic oligonucleotide
aacaucuugaaaguggcug

SEQ ID NO: 2543352 - RNA, 19 nt, Artificial Sequence
  Description of Artificial Sequence: Synthetic oligonucleotide
uaaccgacuggauagagug

SEQ ID NO: 2543353 - RNA, 19 nt, Artificial Sequence
  Description of Artificial Sequence: Synthetic oligonucleotide
cuuuucugcuguaacaugc

SEQ ID NO: 2543354 - RNA, 19 nt, Artificial Sequence
  Description of Artificial Sequence: Synthetic oligonucleotide
ucgaccauuuaauuuauug

SEQ ID NO: 2543355 - RNA, 19 nt, Artificial Sequence
  Description of Artificial Sequence: Synthetic oligonucleotide
aaucugaugcauguguagg

SEQ ID NO: 2543356 - RNA, 19 nt, Artificial Sequence
  Description of Artificial Sequence: Synthetic oligonucleotide
ucuacauuauuuucaguca

SEQ ID NO: 2543357 - RNA, 19 nt, Artificial Sequence
  Description of Artificial Sequence: Synthetic oligonucleotide
gaccauuuaauuuauugga

SEQ ID NO: 2543358 - RNA, 19 nt, Artificial Sequence
  Description of Artificial Sequence: Synthetic oligonucleotide
cuugaggggacccagggcg

SEQ ID NO: 2543359 - RNA, 19 nt, Artificial Sequence
  Description of Artificial Sequence: Synthetic oligonucleotide
ucuucgaccauuuaauuua

SEQ ID NO: 2543360 - RNA, 19 nt, Artificial Sequence
  Description of Artificial Sequence: Synthetic oligonucleotide
uuuguuuuacauagagucu

SEQ ID NO: 2543361 - RNA, 19 nt, Artificial Sequence
  Description of Artificial Sequence: Synthetic oligonucleotide
ugagauagacuaaacccug

SEQ ID NO: 2543362 - RNA, 19 nt, Artificial Sequence
  Description of Artificial Sequence: Synthetic oligonucleotide
caaugagauagacuaaacc

SEQ ID NO: 2543363 - RNA, 19 nt, Artificial Sequence
  Description of Artificial Sequence: Synthetic oligonucleotide
auaaaggccagccaaucug

SEQ ID NO: 2543364 - RNA, 19 nt, Artificial Sequence
  Description of Artificial Sequence: Synthetic oligonucleotide
uuguuuuacauagagucug

SEQ ID NO: 2543365 - RNA, 19 nt, Artificial Sequence
  Description of Artificial Sequence: Synthetic oligonucleotide
aauaaaggccagccaaucu

SEQ ID NO: 2543366 - RNA, 19 nt, Artificial Sequence
  Description of Artificial Sequence: Synthetic oligonucleotide
gagguucccaaugagauag

SEQ ID NO: 2543367 - RNA, 19 nt, Artificial Sequence
  Description of Artificial Sequence: Synthetic oligonucleotide
agggcgaugucccagcagc

SEQ ID NO: 2543368 - RNA, 19 nt, Artificial Sequence
  Description of Artificial Sequence: Synthetic oligonucleotide
agccauaagugcuugaaug

SEQ ID NO: 2543369 - RNA, 19 nt, Artificial Sequence
  Description of Artificial Sequence: Synthetic oligonucleotide
cauguguaggcaauagucc

SEQ ID NO: 2543370 - RNA, 19 nt, Artificial Sequence
  Description of Artificial Sequence: Synthetic oligonucleotide
gaaaguggcugaaauagcc

SEQ ID NO: 2543371 - RNA, 19 nt, Artificial Sequence
  Description of Artificial Sequence: Synthetic oligonucleotide
gaaguuguacuguaguuuc

SEQ ID NO: 2543372 - RNA, 19 nt, Artificial Sequence
  Description of Artificial Sequence: Synthetic oligonucleotide
ucagaaguuguacuguagu

SEQ ID NO: 2543373 - RNA, 19 nt, Artificial Sequence
  Description of Artificial Sequence: Synthetic oligonucleotide
agauggagaugguauugcc

SEQ ID NO: 2543374 - RNA, 19 nt, Artificial Sequence
  Description of Artificial Sequence: Synthetic oligonucleotide
uuuuacauagagucuggcu

SEQ ID NO: 2543375 - RNA, 19 nt, Artificial Sequence
  Description of Artificial Sequence: Synthetic oligonucleotide
aagugcuugaaugggucgc

SEQ ID NO: 2543376 - RNA, 19 nt, Artificial Sequence
  Description of Artificial Sequence: Synthetic oligonucleotide
uauucuuuuguuuuacaua

SEQ ID NO: 2543377 - RNA, 19 nt, Artificial Sequence
  Description of Artificial Sequence: Synthetic oligonucleotide
auggagaugguauugccug

SEQ ID NO: 2543378 - RNA, 19 nt, Artificial Sequence
  Description of Artificial Sequence: Synthetic oligonucleotide
ugcuguaacaugcugcacu

SEQ ID NO: 2543379 - RNA, 19 nt, Artificial Sequence
  Description of Artificial Sequence: Synthetic oligonucleotide
uguacuguaguuucuuuuc

SEQ ID NO: 2543380 - RNA, 19 nt, Artificial Sequence
  Description of Artificial Sequence: Synthetic oligonucleotide
aaacagccagugccaaacc

SEQ ID NO: 2543381 - RNA, 19 nt, Artificial Sequence
  Description of Artificial Sequence: Synthetic oligonucleotide
uguccaaguaaccgacugg

SEQ ID NO: 2543382 - RNA, 19 nt, Artificial Sequence
  Description of Artificial Sequence: Synthetic oligonucleotide
auacacaccaucauaguag

SEQ ID NO: 2543383 - RNA, 19 nt, Artificial Sequence
  Description of Artificial Sequence: Synthetic oligonucleotide
cuacauuauuuucagucag

SEQ ID NO: 2543384 - RNA, 19 nt, Artificial Sequence
  Description of Artificial Sequence: Synthetic oligonucleotide
ugaagaaacuucugacuug

SEQ ID NO: 2543385 - RNA, 19 nt, Artificial Sequence
  Description of Artificial Sequence: Synthetic oligonucleotide
uuguucuucgaccauuuaa

SEQ ID NO: 2543386 - RNA, 19 nt, Artificial Sequence
  Description of Artificial Sequence: Synthetic oligonucleotide
uaagugcuugaaugggucg

SEQ ID NO: 2543387 - RNA, 19 nt, Artificial Sequence
  Description of Artificial Sequence: Synthetic oligonucleotide
uaaacccugaagaaacuuc

SEQ ID NO: 2543388 - RNA, 19 nt, Artificial Sequence
  Description of Artificial Sequence: Synthetic oligonucleotide
agcucaauggcccacuuga

SEQ ID NO: 2543389 - RNA, 19 nt, Artificial Sequence
  Description of Artificial Sequence: Synthetic oligonucleotide
uaauccuccaccacugaac

SEQ ID NO: 2543390 - RNA, 19 nt, Artificial Sequence
  Description of Artificial Sequence: Synthetic oligonucleotide
aaacccaugagguucccaa

SEQ ID NO: 2543391 - RNA, 19 nt, Artificial Sequence
  Description of Artificial Sequence: Synthetic oligonucleotide
gaugguauugccugccaug

SEQ ID NO: 2543392 - RNA, 19 nt, Artificial Sequence
  Description of Artificial Sequence: Synthetic oligonucleotide
cauaguagggaagauggag

SEQ ID NO: 2543393 - RNA, 19 nt, Artificial Sequence
  Description of Artificial Sequence: Synthetic oligonucleotide
uuguccaaguaaccgacug

SEQ ID NO: 2543394 - RNA, 19 nt, Artificial Sequence
  Description of Artificial Sequence: Synthetic oligonucleotide
ugaaaguggcugaaauagc

SEQ ID NO: 2543395 - RNA, 19 nt, Artificial Sequence
  Description of Artificial Sequence: Synthetic oligonucleotide
uagacuaaacccugaagaa

SEQ ID NO: 2543396 - RNA, 19 nt, Artificial Sequence
  Description of Artificial Sequence: Synthetic oligonucleotide
uggacuggcacuuguaaac

SEQ ID NO: 2543397 - RNA, 19 nt, Artificial Sequence
  Description of Artificial Sequence: Synthetic oligonucleotide
aggcaauagucccauggac

SEQ ID NO: 2543398 - RNA, 19 nt, Artificial Sequence
  Description of Artificial Sequence: Synthetic oligonucleotide
uugcuuguccaaguaaccg

SEQ ID NO: 2543399 - RNA, 19 nt, Artificial Sequence
  Description of Artificial Sequence: Synthetic oligonucleotide
gcugaaauagccauaagug

SEQ ID NO: 2543400 - RNA, 19 nt, Artificial Sequence
  Description of Artificial Sequence: Synthetic oligonucleotide
uaaacagccagugccaaac

SEQ ID NO: 2543401 - RNA, 19 nt, Artificial Sequence
  Description of Artificial Sequence: Synthetic oligonucleotide
uccacaaggauccggucug

SEQ ID NO: 2543402 - RNA, 19 nt, Artificial Sequence
  Description of Artificial Sequence: Synthetic oligonucleotide
aaggagaugcugcuacuca

SEQ ID NO: 2543403 - RNA, 19 nt, Artificial Sequence
  Description of Artificial Sequence: Synthetic oligonucleotide
uaaaggccagccaaucuga

SEQ ID NO: 2543404 - RNA, 19 nt, Artificial Sequence
  Description of Artificial Sequence: Synthetic oligonucleotide
uucagucagaaguuguacu

SEQ ID NO: 2543405 - RNA, 19 nt, Artificial Sequence
  Description of Artificial Sequence: Synthetic oligonucleotide
agagugagucucccugucc

SEQ ID NO: 2543406 - RNA, 19 nt, Artificial Sequence
  Description of Artificial Sequence: Synthetic oligonucleotide
acugaacuccauucucucg

SEQ ID NO: 2543407 - RNA, 19 nt, Artificial Sequence
  Description of Artificial Sequence: Synthetic oligonucleotide
uucauaggaaucugcuuga

SEQ ID NO: 2543408 - RNA, 19 nt, Artificial Sequence
  Description of Artificial Sequence: Synthetic oligonucleotide
ucugacuugaacucuccaa

SEQ ID NO: 2543409 - RNA, 19 nt, Artificial Sequence
  Description of Artificial Sequence: Synthetic oligonucleotide
ucaauaaaggccagccaau

SEQ ID NO: 2543410 - RNA, 19 nt, Artificial Sequence
  Description of Artificial Sequence: Synthetic oligonucleotide
uuuucagucagaaguugua

SEQ ID NO: 2543411 - RNA, 19 nt, Artificial Sequence
  Description of Artificial Sequence: Synthetic oligonucleotide
uguguaggcaauaguccca

SEQ ID NO: 2543412 - RNA, 19 nt, Artificial Sequence
  Description of Artificial Sequence: Synthetic oligonucleotide
uaggcaauagucccaugga

SEQ ID NO: 2543413 - RNA, 19 nt, Artificial Sequence
  Description of Artificial Sequence: Synthetic oligonucleotide
cauaggaaucugcuugagg

SEQ ID NO: 2543414 - RNA, 19 nt, Artificial Sequence
  Description of Artificial Sequence: Synthetic oligonucleotide
ugaacuccauucucucggg

SEQ ID NO: 2543415 - RNA, 19 nt, Artificial Sequence
  Description of Artificial Sequence: Synthetic oligonucleotide
caauggcccacuugaaccg

SEQ ID NO: 2543416 - RNA, 19 nt, Artificial Sequence
  Description of Artificial Sequence: Synthetic oligonucleotide
ugaaugggucgccaggcca

SEQ ID NO: 2543417 - RNA, 19 nt, Artificial Sequence
  Description of Artificial Sequence: Synthetic oligonucleotide
ugcuuguccaaguaaccga

SEQ ID NO: 2543418 - RNA, 19 nt, Artificial Sequence
  Description of Artificial Sequence: Synthetic oligonucleotide
gcugguaucaggcacuugc

SEQ ID NO: 2543419 - RNA, 19 nt, Artificial Sequence
  Description of Artificial Sequence: Synthetic oligonucleotide
uugcacgcugguaucaggc

SEQ ID NO: 2543420 - RNA, 19 nt, Artificial Sequence
  Description of Artificial Sequence: Synthetic oligonucleotide
gaagaaacuucugacuuga

SEQ ID NO: 2543421 - RNA, 19 nt, Artificial Sequence
  Description of Artificial Sequence: Synthetic oligonucleotide
caaucugaugcauguguag

SEQ ID NO: 2543422 - RNA, 19 nt, Artificial Sequence
  Description of Artificial Sequence: Synthetic oligonucleotide
uuauuggaaggagaugcug

SEQ ID NO: 2543423 - RNA, 19 nt, Artificial Sequence
  Description of Artificial Sequence: Synthetic oligonucleotide
aaucugcuugaggggaccc

SEQ ID NO: 2543424 - RNA, 19 nt, Artificial Sequence
  Description of Artificial Sequence: Synthetic oligonucleotide
cucaauaaaggccagccaa

SEQ ID NO: 2543425 - RNA, 19 nt, Artificial Sequence
  Description of Artificial Sequence: Synthetic oligonucleotide
ccauuuaauuuauuggaag

SEQ ID NO: 2543426 - RNA, 19 nt, Artificial Sequence
  Description of Artificial Sequence: Synthetic oligonucleotide
uuucugcuguaacaugcug

SEQ ID NO: 2543427 - RNA, 19 nt, Artificial Sequence
  Description of Artificial Sequence: Synthetic oligonucleotide
caaaaguaauccuccacca

SEQ ID NO: 2543428 - RNA, 19 nt, Artificial Sequence
  Description of Artificial Sequence: Synthetic oligonucleotide
gguaucaggcacuugcuug

SEQ ID NO: 2543429 - RNA, 19 nt, Artificial Sequence
  Description of Artificial Sequence: Synthetic oligonucleotide
ucacaaaaguaauccucca

SEQ ID NO: 2543430 - RNA, 19 nt, Artificial Sequence
  Description of Artificial Sequence: Synthetic oligonucleotide
aauagccauaagugcuuga

SEQ ID NO: 2543431 - RNA, 19 nt, Artificial Sequence
  Description of Artificial Sequence: Synthetic oligonucleotide
gauccggucugucucuugc

SEQ ID NO: 2543432 - RNA, 19 nt, Artificial Sequence
  Description of Artificial Sequence: Synthetic oligonucleotide
ugcugcacucacaaaagua

SEQ ID NO: 2543433 - RNA, 19 nt, Artificial Sequence
  Description of Artificial Sequence: Synthetic oligonucleotide
agugcuugaaugggucgcc

SEQ ID NO: 2543434 - RNA, 19 nt, Artificial Sequence
  Description of Artificial Sequence: Synthetic oligonucleotide
uaguagggaagauggagau

SEQ ID NO: 2543435 - RNA, 19 nt, Artificial Sequence
  Description of Artificial Sequence: Synthetic oligonucleotide
ugggucgucaugacagcag

SEQ ID NO: 2543436 - RNA, 19 nt, Artificial Sequence
  Description of Artificial Sequence: Synthetic oligonucleotide
aaggccagccaaucugaug

SEQ ID NO: 2543437 - RNA, 19 nt, Artificial Sequence
  Description of Artificial Sequence: Synthetic oligonucleotide
cuugaaugggucgccaggc

SEQ ID NO: 2543438 - RNA, 19 nt, Artificial Sequence
  Description of Artificial Sequence: Synthetic oligonucleotide
ucauaguagggaagaugga

SEQ ID NO: 2543439 - RNA, 19 nt, Artificial Sequence
  Description of Artificial Sequence: Synthetic oligonucleotide
gguauugccugccauguac

SEQ ID NO: 2543440 - RNA, 19 nt, Artificial Sequence
  Description of Artificial Sequence: Synthetic oligonucleotide
acccugaagaaacuucuga

SEQ ID NO: 2543441 - RNA, 19 nt, Artificial Sequence
  Description of Artificial Sequence: Synthetic oligonucleotide
gcaauagucccauggacug

SEQ ID NO: 2543442 - RNA, 19 nt, Artificial Sequence
  Description of Artificial Sequence: Synthetic oligonucleotide
ucgucaugacagcagccgc

SEQ ID NO: 2543443 - RNA, 19 nt, Artificial Sequence
  Description of Artificial Sequence: Synthetic oligonucleotide
agucccauggacuggcacu

SEQ ID NO: 2543444 - RNA, 19 nt, Artificial Sequence
  Description of Artificial Sequence: Synthetic oligonucleotide
agugagucucccuguccac

SEQ ID NO: 2543445 - RNA, 19 nt, Artificial Sequence
  Description of Artificial Sequence: Synthetic oligonucleotide
accaucauaguagggaaga

SEQ ID NO: 2543446 - RNA, 19 nt, Artificial Sequence
  Description of Artificial Sequence: Synthetic oligonucleotide
accgacuggauagagugag

SEQ ID NO: 2543447 - RNA, 19 nt, Artificial Sequence
  Description of Artificial Sequence: Synthetic oligonucleotide
cuggauagagugagucucc

SEQ ID NO: 2543448 - RNA, 19 nt, Artificial Sequence
  Description of Artificial Sequence: Synthetic oligonucleotide
caucauaguagggaagaug

SEQ ID NO: 2543449 - RNA, 19 nt, Artificial Sequence
  Description of Artificial Sequence: Synthetic oligonucleotide
agaaguuguacuguaguuu

SEQ ID NO: 2543450 - RNA, 19 nt, Artificial Sequence
  Description of Artificial Sequence: Synthetic oligonucleotide
agauagacuaaacccugaa

SEQ ID NO: 2543451 - RNA, 19 nt, Artificial Sequence
  Description of Artificial Sequence: Synthetic oligonucleotide
caugacagcagccgcuggc

SEQ ID NO: 2543452 - RNA, 19 nt, Artificial Sequence
  Description of Artificial Sequence: Synthetic oligonucleotide
acaaggauccggucugucu

SEQ ID NO: 2543453 - RNA, 19 nt, Artificial Sequence
  Description of Artificial Sequence: Synthetic oligonucleotide
cucaauggcccacuugaac

SEQ ID NO: 2543454 - RNA, 19 nt, Artificial Sequence
  Description of Artificial Sequence: Synthetic oligonucleotide
ugagucucccuguccacug

SEQ ID NO: 2543455 - RNA, 19 nt, Artificial Sequence
  Description of Artificial Sequence: Synthetic oligonucleotide
ugaugcauguguaggcaau

SEQ ID NO: 2543456 - RNA, 19 nt, Artificial Sequence
  Description of Artificial Sequence: Synthetic oligonucleotide
gaagagguucauaggaauc

SEQ ID NO: 2543457 - RNA, 19 nt, Artificial Sequence
  Description of Artificial Sequence: Synthetic oligonucleotide
guacaugaugaagagguuc

SEQ ID NO: 2543458 - RNA, 19 nt, Artificial Sequence
  Description of Artificial Sequence: Synthetic oligonucleotide
ccaacaucuugaaaguggc

SEQ ID NO: 2543459 - RNA, 19 nt, Artificial Sequence
  Description of Artificial Sequence: Synthetic oligonucleotide
acccaugagguucccaaug

SEQ ID NO: 2543460 - RNA, 19 nt, Artificial Sequence
  Description of Artificial Sequence: Synthetic oligonucleotide
ucgccaggccaucauacac

SEQ ID NO: 2543461 - RNA, 19 nt, Artificial Sequence
  Description of Artificial Sequence: Synthetic oligonucleotide
ugcuugaaugggucgccag

SEQ ID NO: 2543462 - RNA, 19 nt, Artificial Sequence
  Description of Artificial Sequence: Synthetic oligonucleotide
ugcuauucuuuuguuuuac

SEQ ID NO: 2543463 - RNA, 19 nt, Artificial Sequence
  Description of Artificial Sequence: Synthetic oligonucleotide
gagguucauaggaaucugc

SEQ ID NO: 2543464 - RNA, 19 nt, Artificial Sequence
  Description of Artificial Sequence: Synthetic oligonucleotide
cuugcacgcugguaucagg

SEQ ID NO: 2543465 - RNA, 19 nt, Artificial Sequence
  Description of Artificial Sequence: Synthetic oligonucleotide
cacaccaucauaguaggga

SEQ ID NO: 2543466 - RNA, 19 nt, Artificial Sequence
  Description of Artificial Sequence: Synthetic oligonucleotide
ugcugggaacauaaauaaa

SEQ ID NO: 2543467 - RNA, 19 nt, Artificial Sequence
  Description of Artificial Sequence: Synthetic oligonucleotide
aguaaccgacuggauagag

SEQ ID NO: 2543468 - RNA, 19 nt, Artificial Sequence
  Description of Artificial Sequence: Synthetic oligonucleotide
auagccauaagugcuugaa

SEQ ID NO: 2543469 - RNA, 19 nt, Artificial Sequence
  Description of Artificial Sequence: Synthetic oligonucleotide
aggaaucugcuugagggga

SEQ ID NO: 2543470 - RNA, 19 nt, Artificial Sequence
  Description of Artificial Sequence: Synthetic oligonucleotide
agacuaaacccugaagaaa

SEQ ID NO: 2543471 - RNA, 19 nt, Artificial Sequence
  Description of Artificial Sequence: Synthetic oligonucleotide
ucagcggcugcuauucuuu

SEQ ID NO: 2543472 - RNA, 19 nt, Artificial Sequence
  Description of Artificial Sequence: Synthetic oligonucleotide
ugaaccgccggccucgguu

SEQ ID NO: 2543473 - RNA, 19 nt, Artificial Sequence
  Description of Artificial Sequence: Synthetic oligonucleotide
augguauugccugccaugu

SEQ ID NO: 2543474 - RNA, 19 nt, Artificial Sequence
  Description of Artificial Sequence: Synthetic oligonucleotide
auaaaguuuucuacauuau

SEQ ID NO: 2543475 - RNA, 19 nt, Artificial Sequence
  Description of Artificial Sequence: Synthetic oligonucleotide
uccggucugucucuugcac

SEQ ID NO: 2543476 - RNA, 19 nt, Artificial Sequence
  Description of Artificial Sequence: Synthetic oligonucleotide
uagccauaagugcuugaau

SEQ ID NO: 2543477 - RNA, 19 nt, Artificial Sequence
  Description of Artificial Sequence: Synthetic oligonucleotide
cauacacaccaucauagua

SEQ ID NO: 2543478 - RNA, 19 nt, Artificial Sequence
  Description of Artificial Sequence: Synthetic oligonucleotide
uguaaacagccagugccaa

SEQ ID NO: 2543479 - RNA, 19 nt, Artificial Sequence
  Description of Artificial Sequence: Synthetic oligonucleotide
ggcucaauaaaggccagcc

SEQ ID NO: 2543480 - RNA, 19 nt, Artificial Sequence
  Description of Artificial Sequence: Synthetic oligonucleotide
uccaccacugaacuccauu

SEQ ID NO: 2543481 - RNA, 19 nt, Artificial Sequence
  Description of Artificial Sequence: Synthetic oligonucleotide
gcuugaaugggucgccagg

SEQ ID NO: 2543482 - RNA, 19 nt, Artificial Sequence
  Description of Artificial Sequence: Synthetic oligonucleotide
uggauagagugagucuccc

SEQ ID NO: 2543483 - RNA, 19 nt, Artificial Sequence
  Description of Artificial Sequence: Synthetic oligonucleotide
uagagugagucucccuguc

SEQ ID NO: 2543484 - RNA, 19 nt, Artificial Sequence
  Description of Artificial Sequence: Synthetic oligonucleotide
gcauguguaggcaauaguc

SEQ ID NO: 2543485 - RNA, 19 nt, Artificial Sequence
  Description of Artificial Sequence: Synthetic oligonucleotide
caccaucauaguagggaag

SEQ ID NO: 2543486 - RNA, 19 nt, Artificial Sequence
  Description of Artificial Sequence: Synthetic oligonucleotide
auggacuggcacuuguaaa

SEQ ID NO: 2543487 - RNA, 19 nt, Artificial Sequence
  Description of Artificial Sequence: Synthetic oligonucleotide
agguucauaggaaucugcu

SEQ ID NO: 2543488 - RNA, 19 nt, Artificial Sequence
  Description of Artificial Sequence: Synthetic oligonucleotide
ucuugcacgcugguaucag

SEQ ID NO: 2543489 - RNA, 19 nt, Artificial Sequence
  Description of Artificial Sequence: Synthetic oligonucleotide
uacucagcggcugcuauuc

SEQ ID NO: 2543490 - RNA, 19 nt, Artificial Sequence
  Description of Artificial Sequence: Synthetic oligonucleotide
uacauagagucuggcuuug

SEQ ID NO: 2543491 - RNA, 19 nt, Artificial Sequence
  Description of Artificial Sequence: Synthetic oligonucleotide
gucagaaguuguacuguag

SEQ ID NO: 2543492 - RNA, 19 nt, Artificial Sequence
  Description of Artificial Sequence: Synthetic oligonucleotide
gaaggagaugcugcuacuc

SEQ ID NO: 2543493 - RNA, 19 nt, Artificial Sequence
  Description of Artificial Sequence: Synthetic oligonucleotide
cacugaacuccauucucuc

SEQ ID NO: 2543494 - RNA, 19 nt, Artificial Sequence
  Description of Artificial Sequence: Synthetic oligonucleotide
agagguucauaggaaucug

SEQ ID NO: 2543495 - RNA, 19 nt, Artificial Sequence
  Description of Artificial Sequence: Synthetic oligonucleotide
cuauucuuuuguuuuacau

SEQ ID NO: 2543496 - RNA, 19 nt, Artificial Sequence
  Description of Artificial Sequence: Synthetic oligonucleotide
aacccaugagguucccaau

SEQ ID NO: 2543497 - RNA, 19 nt, Artificial Sequence
  Description of Artificial Sequence: Synthetic oligonucleotide
aguaauccuccaccacuga

SEQ ID NO: 2543498 - RNA, 19 nt, Artificial Sequence
  Description of Artificial Sequence: Synthetic oligonucleotide
aacaugcugcacucacaaa

SEQ ID NO: 2543499 - RNA, 19 nt, Artificial Sequence
  Description of Artificial Sequence: Synthetic oligonucleotide
augcauguguaggcaauag

SEQ ID NO: 2543500 - RNA, 19 nt, Artificial Sequence
  Description of Artificial Sequence: Synthetic oligonucleotide
ggcugaaauagccauaagu

SEQ ID NO: 2543501 - RNA, 19 nt, Artificial Sequence
  Description of Artificial Sequence: Synthetic oligonucleotide
agaugguauugccugccau

SEQ ID NO: 2543502 - RNA, 19 nt, Artificial Sequence
  Description of Artificial Sequence: Synthetic oligonucleotide
aaugggucgccaggccauc

SEQ ID NO: 2543503 - RNA, 19 nt, Artificial Sequence
  Description of Artificial Sequence: Synthetic oligonucleotide
augcugcacucacaaaagu

SEQ ID NO: 2543504 - RNA, 19 nt, Artificial Sequence
  Description of Artificial Sequence: Synthetic oligonucleotide
gaaccgccggccucgguug

SEQ ID NO: 2543505 - RNA, 19 nt, Artificial Sequence
  Description of Artificial Sequence: Synthetic oligonucleotide
ucccaaugagauagacuaa

SEQ ID NO: 2543506 - RNA, 19 nt, Artificial Sequence
  Description of Artificial Sequence: Synthetic oligonucleotide
uggcccacuugaaccgccg

SEQ ID NO: 2543507 - RNA, 19 nt, Artificial Sequence
  Description of Artificial Sequence: Synthetic oligonucleotide
uagucccauggacuggcac

SEQ ID NO: 2543508 - RNA, 19 nt, Artificial Sequence
  Description of Artificial Sequence: Synthetic oligonucleotide
uauugccugccauguacau

SEQ ID NO: 2543509 - RNA, 19 nt, Artificial Sequence
  Description of Artificial Sequence: Synthetic oligonucleotide
caauagucccauggacugg

SEQ ID NO: 2543510 - RNA, 19 nt, Artificial Sequence
  Description of Artificial Sequence: Synthetic oligonucleotide
aaguuguacuguaguuucu

SEQ ID NO: 2543511 - RNA, 19 nt, Artificial Sequence
  Description of Artificial Sequence: Synthetic oligonucleotide
uggcugaaauagccauaag

SEQ ID NO: 2543512 - RNA, 19 nt, Artificial Sequence
  Description of Artificial Sequence: Synthetic oligonucleotide
aaguaaccgacuggauaga

SEQ ID NO: 2543513 - RNA, 19 nt, Artificial Sequence
  Description of Artificial Sequence: Synthetic oligonucleotide
uccaaguaaccgacuggau

SEQ ID NO: 2543514 - RNA, 19 nt, Artificial Sequence
  Description of Artificial Sequence: Synthetic oligonucleotide
cacugccccggucacuucg

SEQ ID NO: 2543515 - RNA, 19 nt, Artificial Sequence
  Description of Artificial Sequence: Synthetic oligonucleotide
cccugaagaaacuucugac

SEQ ID NO: 2543516 - RNA, 19 nt, Artificial Sequence
  Description of Artificial Sequence: Synthetic oligonucleotide
auugccugccauguacaug

SEQ ID NO: 2543517 - RNA, 19 nt, Artificial Sequence
  Description of Artificial Sequence: Synthetic oligonucleotide
uugaggggacccagggcga

SEQ ID NO: 2543518 - RNA, 19 nt, Artificial Sequence
  Description of Artificial Sequence: Synthetic oligonucleotide
aguagggaagauggagaug

SEQ ID NO: 2543519 - RNA, 19 nt, Artificial Sequence
  Description of Artificial Sequence: Synthetic oligonucleotide
aguuguacuguaguuucuu

SEQ ID NO: 2543520 - RNA, 19 nt, Artificial Sequence
  Description of Artificial Sequence: Synthetic oligonucleotide
gcuuuguuuguuuugcucu

SEQ ID NO: 2543521 - RNA, 19 nt, Artificial Sequence
  Description of Artificial Sequence: Synthetic oligonucleotide
ucugugcugggaacauaaa

SEQ ID NO: 2543522 - RNA, 19 nt, Artificial Sequence
  Description of Artificial Sequence: Synthetic oligonucleotide
ggcccgcucagcucaaugg

SEQ ID NO: 2543523 - RNA, 19 nt, Artificial Sequence
  Description of Artificial Sequence: Synthetic oligonucleotide
gagauagacuaaacccuga

SEQ ID NO: 2543524 - RNA, 19 nt, Artificial Sequence
  Description of Artificial Sequence: Synthetic oligonucleotide
gucucuugcacgcugguau

SEQ ID NO: 2543525 - RNA, 19 nt, Artificial Sequence
  Description of Artificial Sequence: Synthetic oligonucleotide
gucugucucuugcacgcug

SEQ ID NO: 2543526 - RNA, 19 nt, Artificial Sequence
  Description of Artificial Sequence: Synthetic oligonucleotide
acuaaacccugaagaaacu

SEQ ID NO: 2543527 - RNA, 19 nt, Artificial Sequence
  Description of Artificial Sequence: Synthetic oligonucleotide
gucccagcagcgcuucucc

SEQ ID NO: 2543528 - RNA, 19 nt, Artificial Sequence
  Description of Artificial Sequence: Synthetic oligonucleotide
gauggagaugguauugccu

SEQ ID NO: 2543529 - RNA, 19 nt, Artificial Sequence
  Description of Artificial Sequence: Synthetic oligonucleotide
agcggcugcuauucuuuug

SEQ ID NO: 2543530 - RNA, 19 nt, Artificial Sequence
  Description of Artificial Sequence: Synthetic oligonucleotide
uugaacucuccaacaucuu

SEQ ID NO: 2543531 - RNA, 19 nt, Artificial Sequence
  Description of Artificial Sequence: Synthetic oligonucleotide
gacuggauagagugagucu

SEQ ID NO: 2543532 - RNA, 19 nt, Artificial Sequence
  Description of Artificial Sequence: Synthetic oligonucleotide
ccaaugagauagacuaaac

SEQ ID NO: 2543533 - RNA, 19 nt, Artificial Sequence
  Description of Artificial Sequence: Synthetic oligonucleotide
cauggacuggcacuuguaa

SEQ ID NO: 2543534 - RNA, 19 nt, Artificial Sequence
  Description of Artificial Sequence: Synthetic oligonucleotide
guggcugaaauagccauaa

SEQ ID NO: 2543535 - RNA, 19 nt, Artificial Sequence
  Description of Artificial Sequence: Synthetic oligonucleotide
cucgguuggccaccaggcc

SEQ ID NO: 2543536 - RNA, 19 nt, Artificial Sequence
  Description of Artificial Sequence: Synthetic oligonucleotide
aaccgccggccucgguugg

SEQ ID NO: 2543537 - RNA, 19 nt, Artificial Sequence
  Description of Artificial Sequence: Synthetic oligonucleotide
gggucgucaugacagcagc

SEQ ID NO: 2543538 - RNA, 19 nt, Artificial Sequence
  Description of Artificial Sequence: Synthetic oligonucleotide
uagggaagauggagauggu

SEQ ID NO: 2543539 - RNA, 19 nt, Artificial Sequence
  Description of Artificial Sequence: Synthetic oligonucleotide
gcugcacucacaaaaguaa

SEQ ID NO: 2543540 - RNA, 19 nt, Artificial Sequence
  Description of Artificial Sequence: Synthetic oligonucleotide
guaacaugcugcacucaca

SEQ ID NO: 2543541 - RNA, 19 nt, Artificial Sequence
  Description of Artificial Sequence: Synthetic oligonucleotide
ccucgguuggccaccaggc

SEQ ID NO: 2543542 - RNA, 19 nt, Artificial Sequence
  Description of Artificial Sequence: Synthetic oligonucleotide
guauugccugccauguaca

SEQ ID NO: 2543543 - RNA, 19 nt, Artificial Sequence
  Description of Artificial Sequence: Synthetic oligonucleotide
ugcugcuacucagcggcug

SEQ ID NO: 2543544 - RNA, 19 nt, Artificial Sequence
  Description of Artificial Sequence: Synthetic oligonucleotide
aaccgacuggauagaguga

SEQ ID NO: 2543545 - RNA, 19 nt, Artificial Sequence
  Description of Artificial Sequence: Synthetic oligonucleotide
ugccccggucacuucggcc

SEQ ID NO: 2543546 - RNA, 19 nt, Artificial Sequence
  Description of Artificial Sequence: Synthetic oligonucleotide
uucgaccauuuaauuuauu

SEQ ID NO: 2543547 - RNA, 19 nt, Artificial Sequence
  Description of Artificial Sequence: Synthetic oligonucleotide
gcuauucuuuuguuuuaca

SEQ ID NO: 2543548 - RNA, 19 nt, Artificial Sequence
  Description of Artificial Sequence: Synthetic oligonucleotide
ccaccacugaacuccauuc

SEQ ID NO: 2543549 - RNA, 19 nt, Artificial Sequence
  Description of Artificial Sequence: Synthetic oligonucleotide
acacaccaucauaguaggg

SEQ ID NO: 2543550 - RNA, 19 nt, Artificial Sequence
  Description of Artificial Sequence: Synthetic oligonucleotide
gccucgguuggccaccagg

SEQ ID NO: 2543551 - RNA, 19 nt, Artificial Sequence
  Description of Artificial Sequence: Synthetic oligonucleotide
gaugcauguguaggcaaua

SEQ ID NO: 2543552 - RNA, 19 nt, Artificial Sequence
  Description of Artificial Sequence: Synthetic oligonucleotide
ucagcucaauggcccacuu

SEQ ID NO: 2543553 - RNA, 19 nt, Artificial Sequence
  Description of Artificial Sequence: Synthetic oligonucleotide
gcuuguccaaguaaccgac

SEQ ID NO: 2543554 - RNA, 19 nt, Artificial Sequence
  Description of Artificial Sequence: Synthetic oligonucleotide
gccccggucacuucggccc

SEQ ID NO: 2543555 - RNA, 19 nt, Artificial Sequence
  Description of Artificial Sequence: Synthetic oligonucleotide
aaaggccagccaaucugau

SEQ ID NO: 2543556 - RNA, 19 nt, Artificial Sequence
  Description of Artificial Sequence: Synthetic oligonucleotide
auccggucugucucuugca

SEQ ID NO: 2543557 - RNA, 19 nt, Artificial Sequence
  Description of Artificial Sequence: Synthetic oligonucleotide
ugguauugccugccaugua

SEQ ID NO: 2543558 - RNA, 19 nt, Artificial Sequence
  Description of Artificial Sequence: Synthetic oligonucleotide
gcugcuacucagcggcugc

SEQ ID NO: 2543559 - RNA, 19 nt, Artificial Sequence
  Description of Artificial Sequence: Synthetic oligonucleotide
cacucacaaaaguaauccu

SEQ ID NO: 2543560 - RNA, 19 nt, Artificial Sequence
  Description of Artificial Sequence: Synthetic oligonucleotide
cagcucaauggcccacuug

SEQ ID NO: 2543561 - RNA, 19 nt, Artificial Sequence
  Description of Artificial Sequence: Synthetic oligonucleotide
cacuucggccccugcugcc

SEQ ID NO: 2543562 - RNA, 19 nt, Artificial Sequence
  Description of Artificial Sequence: Synthetic oligonucleotide
gccaaucugaugcaugugu

SEQ ID NO: 2543563 - RNA, 19 nt, Artificial Sequence
  Description of Artificial Sequence: Synthetic oligonucleotide
gccaggccaucauacacac

SEQ ID NO: 2543564 - RNA, 19 nt, Artificial Sequence
  Description of Artificial Sequence: Synthetic oligonucleotide
agccaaucugaugcaugug

SEQ ID NO: 2543565 - RNA, 19 nt, Artificial Sequence
  Description of Artificial Sequence: Synthetic oligonucleotide
cacuugaaccgccggccuc

SEQ ID NO: 2543566 - RNA, 19 nt, Artificial Sequence
  Description of Artificial Sequence: Synthetic oligonucleotide
ggcaauagucccauggacu

SEQ ID NO: 2543567 - RNA, 19 nt, Artificial Sequence
  Description of Artificial Sequence: Synthetic oligonucleotide
gcacgcugguaucaggcac

SEQ ID NO: 2543568 - RNA, 19 nt, Artificial Sequence
  Description of Artificial Sequence: Synthetic oligonucleotide
gucgccaggccaucauaca

SEQ ID NO: 2543569 - RNA, 19 nt, Artificial Sequence
  Description of Artificial Sequence: Synthetic oligonucleotide
ugucucuugcacgcuggua

SEQ ID NO: 2543570 - RNA, 19 nt, Artificial Sequence
  Description of Artificial Sequence: Synthetic oligonucleotide
ugggucgccaggccaucau

SEQ ID NO: 2543571 - RNA, 19 nt, Artificial Sequence
  Description of Artificial Sequence: Synthetic oligonucleotide
cugcuauucuuuuguuuua

SEQ ID NO: 2543572 - RNA, 19 nt, Artificial Sequence
  Description of Artificial Sequence: Synthetic oligonucleotide
ccaaguaaccgacuggaua

SEQ ID NO: 2543573 - RNA, 19 nt, Artificial Sequence
  Description of Artificial Sequence: Synthetic oligonucleotide
cagggcgaugucccagcag

SEQ ID NO: 2543574 - RNA, 19 nt, Artificial Sequence
  Description of Artificial Sequence: Synthetic oligonucleotide
acugccccggucacuucgg

SEQ ID NO: 2543575 - RNA, 19 nt, Artificial Sequence
  Description of Artificial Sequence: Synthetic oligonucleotide
guucuucgaccauuuaauu

SEQ ID NO: 2543576 - RNA, 19 nt, Artificial Sequence
  Description of Artificial Sequence: Synthetic oligonucleotide
cugugcugggaacauaaau

SEQ ID NO: 2543577 - RNA, 19 nt, Artificial Sequence
  Description of Artificial Sequence: Synthetic oligonucleotide
gcccgcucagcucaauggc

SEQ ID NO: 2543578 - RNA, 19 nt, Artificial Sequence
  Description of Artificial Sequence: Synthetic oligonucleotide
cccgcucagcucaauggcc

SEQ ID NO: 2543579 - RNA, 19 nt, Artificial Sequence
  Description of Artificial Sequence: Synthetic oligonucleotide
uucggccccugcugccucc

SEQ ID NO: 2543580 - RNA, 19 nt, Artificial Sequence
  Description of Artificial Sequence: Synthetic oligonucleotide
acucagcggcugcuauucu

SEQ ID NO: 2543581 - RNA, 19 nt, Artificial Sequence
  Description of Artificial Sequence: Synthetic oligonucleotide
ggucgccaggccaucauac

SEQ ID NO: 2543582 - RNA, 19 nt, Artificial Sequence
  Description of Artificial Sequence: Synthetic oligonucleotide
acauagagucuggcuuugu

SEQ ID NO: 2543583 - RNA, 19 nt, Artificial Sequence
  Description of Artificial Sequence: Synthetic oligonucleotide
gccaaacccaugagguucc

SEQ ID NO: 2543584 - RNA, 19 nt, Artificial Sequence
  Description of Artificial Sequence: Synthetic oligonucleotide
caucuugaaaguggcugaa

SEQ ID NO: 2543585 - RNA, 19 nt, Artificial Sequence
  Description of Artificial Sequence: Synthetic oligonucleotide
cuugaaccgccggccucgg

SEQ ID NO: 2543586 - RNA, 19 nt, Artificial Sequence
  Description of Artificial Sequence: Synthetic oligonucleotide
acuucggccccugcugccu

SEQ ID NO: 2543587 - RNA, 19 nt, Artificial Sequence
  Description of Artificial Sequence: Synthetic oligonucleotide
ggacuggcacuuguaaaca

SEQ ID NO: 2543588 - RNA, 19 nt, Artificial Sequence
  Description of Artificial Sequence: Synthetic oligonucleotide
guaaccgacuggauagagu

SEQ ID NO: 2543589 - RNA, 19 nt, Artificial Sequence
  Description of Artificial Sequence: Synthetic oligonucleotide
cugguaucaggcacuugcu

SEQ ID NO: 2543590 - RNA, 19 nt, Artificial Sequence
  Description of Artificial Sequence: Synthetic oligonucleotide
ggaaucugcuugaggggac

SEQ ID NO: 2543591 - RNA, 19 nt, Artificial Sequence
  Description of Artificial Sequence: Synthetic oligonucleotide
ggucgucaugacagcagcc

SEQ ID NO: 2543592 - RNA, 19 nt, Artificial Sequence
  Description of Artificial Sequence: Synthetic oligonucleotide
cuucgaccauuuaauuuau

SEQ ID NO: 2543593 - RNA, 19 nt, Artificial Sequence
  Description of Artificial Sequence: Synthetic oligonucleotide
ggcccacuugaaccgccgg

SEQ ID NO: 2543594 - RNA, 19 nt, Artificial Sequence
  Description of Artificial Sequence: Synthetic oligonucleotide
gaaugggucgccaggccau

SEQ ID NO: 2543595 - RNA, 19 nt, Artificial Sequence
  Description of Artificial Sequence: Synthetic oligonucleotide
cuuguccaaguaaccgacu

SEQ ID NO: 2543596 - RNA, 19 nt, Artificial Sequence
  Description of Artificial Sequence: Synthetic oligonucleotide
cacgcugguaucaggcacu

SEQ ID NO: 2543597 - RNA, 19 nt, Artificial Sequence
  Description of Artificial Sequence: Synthetic oligonucleotide
cugcuguaacaugcugcac

SEQ ID NO: 2543598 - RNA, 19 nt, Artificial Sequence
  Description of Artificial Sequence: Synthetic oligonucleotide
ggcgaugucccagcagcgc

SEQ ID NO: 2543599 - RNA, 19 nt, Artificial Sequence
  Description of Artificial Sequence: Synthetic oligonucleotide
cugggucgucaugacagca

SEQ ID NO: 2543600 - RNA, 19 nt, Artificial Sequence
  Description of Artificial Sequence: Synthetic oligonucleotide
cauagagucuggcuuuguu

SEQ ID NO: 2543601 - RNA, 19 nt, Artificial Sequence
  Description of Artificial Sequence: Synthetic oligonucleotide
uugaaccgccggccucggu

SEQ ID NO: 2543602 - RNA, 19 nt, Artificial Sequence
  Description of Artificial Sequence: Synthetic oligonucleotide
cuaaacccugaagaaacuu

SEQ ID NO: 2543603 - RNA, 19 nt, Artificial Sequence
  Description of Artificial Sequence: Synthetic oligonucleotide
ccugggucgucaugacagc

SEQ ID NO: 2543604 - RNA, 19 nt, Artificial Sequence
  Description of Artificial Sequence: Synthetic oligonucleotide
ucccauggacuggcacuug

SEQ ID NO: 2543605 - RNA, 19 nt, Artificial Sequence
  Description of Artificial Sequence: Synthetic oligonucleotide
ccaaucugaugcaugugua

SEQ ID NO: 2543606 - RNA, 19 nt, Artificial Sequence
  Description of Artificial Sequence: Synthetic oligonucleotide
ugaggggacccagggcgau

SEQ ID NO: 2543607 - RNA, 19 nt, Artificial Sequence
  Description of Artificial Sequence: Synthetic oligonucleotide
accgccggccucgguuggc

SEQ ID NO: 2543608 - RNA, 19 nt, Artificial Sequence
  Description of Artificial Sequence: Synthetic oligonucleotide
cgacuggauagagugaguc

SEQ ID NO: 2543609 - RNA, 19 nt, Artificial Sequence
  Description of Artificial Sequence: Synthetic oligonucleotide
gaggggacccagggcgaug

SEQ ID NO: 2543610 - RNA, 19 nt, Artificial Sequence
  Description of Artificial Sequence: Synthetic oligonucleotide
gggcgaugucccagcagcg

SEQ ID NO: 2543611 - RNA, 19 nt, Artificial Sequence
  Description of Artificial Sequence: Synthetic oligonucleotide
gacccagggcgauguccca

SEQ ID NO: 2543612 - RNA, 19 nt, Artificial Sequence
  Description of Artificial Sequence: Synthetic oligonucleotide
cuguaacaugcugcacuca

SEQ ID NO: 2543613 - RNA, 19 nt, Artificial Sequence
  Description of Artificial Sequence: Synthetic oligonucleotide
cugccccggucacuucggc

SEQ ID NO: 2543614 - RNA, 19 nt, Artificial Sequence
  Description of Artificial Sequence: Synthetic oligonucleotide
cccagggcgaugucccagc

SEQ ID NO: 2543615 - RNA, 19 nt, Artificial Sequence
  Description of Artificial Sequence: Synthetic oligonucleotide
cuucggccccugcugccuc

SEQ ID NO: 2543616 - RNA, 19 nt, Artificial Sequence
  Description of Artificial Sequence: Synthetic oligonucleotide
cgguuggccaccaggcccc

SEQ ID NO: 2543617 - RNA, 19 nt, Artificial Sequence
  Description of Artificial Sequence: Synthetic oligonucleotide
gggcucaauaaaggccagc

SEQ ID NO: 2543618 - RNA, 19 nt, Artificial Sequence
  Description of Artificial Sequence: Synthetic oligonucleotide
guguaggcaauagucccau

SEQ ID NO: 2543619 - RNA, 19 nt, Artificial Sequence
  Description of Artificial Sequence: Synthetic oligonucleotide
augucccagcagcgcuucu

SEQ ID NO: 2543620 - RNA, 19 nt, Artificial Sequence
  Description of Artificial Sequence: Synthetic oligonucleotide
ggaaggagaugcugcuacu

SEQ ID NO: 2543621 - RNA, 19 nt, Artificial Sequence
  Description of Artificial Sequence: Synthetic oligonucleotide
augggucgccaggccauca

SEQ ID NO: 2543622 - RNA, 19 nt, Artificial Sequence
  Description of Artificial Sequence: Synthetic oligonucleotide
cucccggcccgcucagcuc

SEQ ID NO: 2543623 - RNA, 19 nt, Artificial Sequence
  Description of Artificial Sequence: Synthetic oligonucleotide
gugagucucccuguccacu

SEQ ID NO: 2543624 - RNA, 19 nt, Artificial Sequence
  Description of Artificial Sequence: Synthetic oligonucleotide
ggggcucaauaaaggccag

SEQ ID NO: 2543625 - RNA, 19 nt, Artificial Sequence
  Description of Artificial Sequence: Synthetic oligonucleotide
gagucuggcuuuguuuguu

SEQ ID NO: 2543626 - RNA, 19 nt, Artificial Sequence
  Description of Artificial Sequence: Synthetic oligonucleotide
cucagcggcugcuauucuu

SEQ ID NO: 2543627 - RNA, 19 nt, Artificial Sequence
  Description of Artificial Sequence: Synthetic oligonucleotide
gcgaugucccagcagcgcu

SEQ ID NO: 2543628 - RNA, 19 nt, Artificial Sequence
  Description of Artificial Sequence: Synthetic oligonucleotide
acgcugguaucaggcacuu

SEQ ID NO: 2543629 - RNA, 19 nt, Artificial Sequence
  Description of Artificial Sequence: Synthetic oligonucleotide
augcugcuacucagcggcu

SEQ ID NO: 2543630 - RNA, 19 nt, Artificial Sequence
  Description of Artificial Sequence: Synthetic oligonucleotide
cuacucagcggcugcuauu

SEQ ID NO: 2543631 - RNA, 19 nt, Artificial Sequence
  Description of Artificial Sequence: Synthetic oligonucleotide
cagcagcgcuucuccacaa

SEQ ID NO: 2543632 - RNA, 19 nt, Artificial Sequence
  Description of Artificial Sequence: Synthetic oligonucleotide
gcucagcucaauggcccac

SEQ ID NO: 2543633 - RNA, 19 nt, Artificial Sequence
  Description of Artificial Sequence: Synthetic oligonucleotide
gcucaauggcccacuugaa

SEQ ID NO: 2543634 - RNA, 19 nt, Artificial Sequence
  Description of Artificial Sequence: Synthetic oligonucleotide
ccauggacuggcacuugua

SEQ ID NO: 2543635 - RNA, 19 nt, Artificial Sequence
  Description of Artificial Sequence: Synthetic oligonucleotide
gggucgccaggccaucaua

SEQ ID NO: 2543636 - RNA, 19 nt, Artificial Sequence
  Description of Artificial Sequence: Synthetic oligonucleotide
ccccggucacuucggcccc

SEQ ID NO: 2543637 - RNA, 19 nt, Artificial Sequence
  Description of Artificial Sequence: Synthetic oligonucleotide
cgucaugacagcagccgcu

SEQ ID NO: 2543638 - RNA, 19 nt, Artificial Sequence
  Description of Artificial Sequence: Synthetic oligonucleotide
ccggccucgguuggccacc

SEQ ID NO: 2543639 - RNA, 19 nt, Artificial Sequence
  Description of Artificial Sequence: Synthetic oligonucleotide
ggccucgguuggccaccag

SEQ ID NO: 2543640 - RNA, 19 nt, Artificial Sequence
  Description of Artificial Sequence: Synthetic oligonucleotide
cagcggcugcuauucuuuu

SEQ ID NO: 2543641 - RNA, 19 nt, Artificial Sequence
  Description of Artificial Sequence: Synthetic oligonucleotide
cggcccgcucagcucaaug

SEQ ID NO: 2543642 - RNA, 19 nt, Artificial Sequence
  Description of Artificial Sequence: Synthetic oligonucleotide
ccgccggccucgguuggcc

SEQ ID NO: 2543643 - RNA, 19 nt, Artificial Sequence
  Description of Artificial Sequence: Synthetic oligonucleotide
ggggacccagggcgauguc

SEQ ID NO: 2543644 - RNA, 19 nt, Artificial Sequence
  Description of Artificial Sequence: Synthetic oligonucleotide
ggucugucucuugcacgcu

SEQ ID NO: 2543645 - RNA, 19 nt, Artificial Sequence
  Description of Artificial Sequence: Synthetic oligonucleotide
cuccaccacugaacuccau

SEQ ID NO: 2543646 - RNA, 19 nt, Artificial Sequence
  Description of Artificial Sequence: Synthetic oligonucleotide
ccaucauaguagggaagau

SEQ ID NO: 2543647 - RNA, 19 nt, Artificial Sequence
  Description of Artificial Sequence: Synthetic oligonucleotide
ccgacuggauagagugagu

SEQ ID NO: 2543648 - RNA, 19 nt, Artificial Sequence
  Description of Artificial Sequence: Synthetic oligonucleotide
cgcugguaucaggcacuug

SEQ ID NO: 2543649 - RNA, 19 nt, Artificial Sequence
  Description of Artificial Sequence: Synthetic oligonucleotide
cccggcccgcucagcucaa

SEQ ID NO: 2543650 - RNA, 19 nt, Artificial Sequence
  Description of Artificial Sequence: Synthetic oligonucleotide
cccggucacuucggccccu

SEQ ID NO: 2543651 - RNA, 19 nt, Artificial Sequence
  Description of Artificial Sequence: Synthetic oligonucleotide
ccggcccgcucagcucaau

SEQ ID NO: 2543652 - RNA, 19 nt, Artificial Sequence
  Description of Artificial Sequence: Synthetic oligonucleotide
uuuaugacaacccagaaac

SEQ ID NO: 2543653 - RNA, 19 nt, Artificial Sequence
  Description of Artificial Sequence: Synthetic oligonucleotide
uauacgucaaaccacagcg

SEQ ID NO: 2543654 - RNA, 19 nt, Artificial Sequence
  Description of Artificial Sequence: Synthetic oligonucleotide
uguacuucuccacaaaccg

SEQ ID NO: 2543655 - RNA, 19 nt, Artificial Sequence
  Description of Artificial Sequence: Synthetic oligonucleotide
aaagaauuucgcucgaauc

SEQ ID NO: 2543656 - RNA, 19 nt, Artificial Sequence
  Description of Artificial Sequence: Synthetic oligonucleotide
uaaaaugacaccuucugcc

SEQ ID NO: 2543657 - RNA, 19 nt, Artificial Sequence
  Description of Artificial Sequence: Synthetic oligonucleotide
uuugccauaucgcaaacgg

SEQ ID NO: 2543658 - RNA, 19 nt, Artificial Sequence
  Description of Artificial Sequence: Synthetic oligonucleotide
aaaccaacagaguccaagc

SEQ ID NO: 2543659 - RNA, 19 nt, Artificial Sequence
  Description of Artificial Sequence: Synthetic oligonucleotide
aagaauuucgcucgaaucu

SEQ ID NO: 2543660 - RNA, 19 nt, Artificial Sequence
  Description of Artificial Sequence: Synthetic oligonucleotide
uuuuacucgucuuaaaaug

SEQ ID NO: 2543661 - RNA, 19 nt, Artificial Sequence
  Description of Artificial Sequence: Synthetic oligonucleotide
aacagcaacuucgagaagg

SEQ ID NO: 2543662 - RNA, 19 nt, Artificial Sequence
  Description of Artificial Sequence: Synthetic oligonucleotide
ugccauaucgcaaacgggg

SEQ ID NO: 2543663 - RNA, 19 nt, Artificial Sequence
  Description of Artificial Sequence: Synthetic oligonucleotide
acugagauuuaugacaacc

SEQ ID NO: 2543664 - RNA, 19 nt, Artificial Sequence
  Description of Artificial Sequence: Synthetic oligonucleotide
uuucgcucgaaucugaucu

SEQ ID NO: 2543665 - RNA, 19 nt, Artificial Sequence
  Description of Artificial Sequence: Synthetic oligonucleotide
cagaaaagaauuucgcucg

SEQ ID NO: 2543666 - RNA, 19 nt, Artificial Sequence
  Description of Artificial Sequence: Synthetic oligonucleotide
uuucugaccagauccauag

SEQ ID NO: 2543667 - RNA, 19 nt, Artificial Sequence
  Description of Artificial Sequence: Synthetic oligonucleotide
auauacgucaaaccacagc

SEQ ID NO: 2543668 - RNA, 19 nt, Artificial Sequence
  Description of Artificial Sequence: Synthetic oligonucleotide
gauggaaaccaacagaguc

SEQ ID NO: 2543669 - RNA, 19 nt, Artificial Sequence
  Description of Artificial Sequence: Synthetic oligonucleotide
ucauauacgucaaaccaca

SEQ ID NO: 2543670 - RNA, 19 nt, Artificial Sequence
  Description of Artificial Sequence: Synthetic oligonucleotide
ugucaugaauaaaaguacc

SEQ ID NO: 2543671 - RNA, 19 nt, Artificial Sequence
  Description of Artificial Sequence: Synthetic oligonucleotide
aaagcuuucugaccagauc

SEQ ID NO: 2543672 - RNA, 19 nt, Artificial Sequence
  Description of Artificial Sequence: Synthetic oligonucleotide
ucugaccagauccauaggc

SEQ ID NO: 2543673 - RNA, 19 nt, Artificial Sequence
  Description of Artificial Sequence: Synthetic oligonucleotide
agaaacagcaacuucgaga

SEQ ID NO: 2543674 - RNA, 19 nt, Artificial Sequence
  Description of Artificial Sequence: Synthetic oligonucleotide
uugaaguuuggguugaaca

SEQ ID NO: 2543675 - RNA, 19 nt, Artificial Sequence
  Description of Artificial Sequence: Synthetic oligonucleotide
uuauuuaaccgugucauga

SEQ ID NO: 2543676 - RNA, 19 nt, Artificial Sequence
  Description of Artificial Sequence: Synthetic oligonucleotide
guaaacacgcucccaaucg

SEQ ID NO: 2543677 - RNA, 19 nt, Artificial Sequence
  Description of Artificial Sequence: Synthetic oligonucleotide
ucgaaucugaucuucccgg

SEQ ID NO: 2543678 - RNA, 19 nt, Artificial Sequence
  Description of Artificial Sequence: Synthetic oligonucleotide
aaaaugacaccuucugcca

SEQ ID NO: 2543679 - RNA, 19 nt, Artificial Sequence
  Description of Artificial Sequence: Synthetic oligonucleotide
ugagauuuaugacaaccca

SEQ ID NO: 2543680 - RNA, 19 nt, Artificial Sequence
  Description of Artificial Sequence: Synthetic oligonucleotide
agaacccuuuauuuaaccg

SEQ ID NO: 2543681 - RNA, 19 nt, Artificial Sequence
  Description of Artificial Sequence: Synthetic oligonucleotide
ucuuuuacucgucuuaaaa

SEQ ID NO: 2543682 - RNA, 19 nt, Artificial Sequence
  Description of Artificial Sequence: Synthetic oligonucleotide
gguugaacagaucaaaagc

SEQ ID NO: 2543683 - RNA, 19 nt, Artificial Sequence
  Description of Artificial Sequence: Synthetic oligonucleotide
uucgagaaggcagacaugc

SEQ ID NO: 2543684 - RNA, 19 nt, Artificial Sequence
  Description of Artificial Sequence: Synthetic oligonucleotide
ugacaacccagaaacagca

SEQ ID NO: 2543685 - RNA, 19 nt, Artificial Sequence
  Description of Artificial Sequence: Synthetic oligonucleotide
ugaauaaaaguaccacaga

SEQ ID NO: 2543686 - RNA, 19 nt, Artificial Sequence
  Description of Artificial Sequence: Synthetic oligonucleotide
uccagcacgcaucagauuc

SEQ ID NO: 2543687 - RNA, 19 nt, Artificial Sequence
  Description of Artificial Sequence: Synthetic oligonucleotide
uuuggcuuugccauaucgc

SEQ ID NO: 2543688 - RNA, 19 nt, Artificial Sequence
  Description of Artificial Sequence: Synthetic oligonucleotide
aauaacucuuccucaucug

SEQ ID NO: 2543689 - RNA, 19 nt, Artificial Sequence
  Description of Artificial Sequence: Synthetic oligonucleotide
uuucaaaucacgguacuga

SEQ ID NO: 2543690 - RNA, 19 nt, Artificial Sequence
  Description of Artificial Sequence: Synthetic oligonucleotide
ucgucuuaaaaugacaccu

SEQ ID NO: 2543691 - RNA, 19 nt, Artificial Sequence
  Description of Artificial Sequence: Synthetic oligonucleotide
cugagauuuaugacaaccc

SEQ ID NO: 2543692 - RNA, 19 nt, Artificial Sequence
  Description of Artificial Sequence: Synthetic oligonucleotide
gaucaaaagcuuucugacc

SEQ ID NO: 2543693 - RNA, 19 nt, Artificial Sequence
  Description of Artificial Sequence: Synthetic oligonucleotide
uucaaaucacgguacugag

SEQ ID NO: 2543694 - RNA, 19 nt, Artificial Sequence
  Description of Artificial Sequence: Synthetic oligonucleotide
uggugcuuucaaaucacgg

SEQ ID NO: 2543695 - RNA, 19 nt, Artificial Sequence
  Description of Artificial Sequence: Synthetic oligonucleotide
uacgucaaaccacagcggc

SEQ ID NO: 2543696 - RNA, 19 nt, Artificial Sequence
  Description of Artificial Sequence: Synthetic oligonucleotide
acagaguccaagcaguuca

SEQ ID NO: 2543697 - RNA, 19 nt, Artificial Sequence
  Description of Artificial Sequence: Synthetic oligonucleotide
auaggcagaaaagaauuuc

SEQ ID NO: 2543698 - RNA, 19 nt, Artificial Sequence
  Description of Artificial Sequence: Synthetic oligonucleotide
cucauauacgucaaaccac

SEQ ID NO: 2543699 - RNA, 19 nt, Artificial Sequence
  Description of Artificial Sequence: Synthetic oligonucleotide
ugucuucacaaauaacucu

SEQ ID NO: 2543700 - RNA, 19 nt, Artificial Sequence
  Description of Artificial Sequence: Synthetic oligonucleotide
acuucgagaaggcagacau

SEQ ID NO: 2543701 - RNA, 19 nt, Artificial Sequence
  Description of Artificial Sequence: Synthetic oligonucleotide
gguacugagauuuaugaca

SEQ ID NO: 2543702 - RNA, 19 nt, Artificial Sequence
  Description of Artificial Sequence: Synthetic oligonucleotide
agaacuggugcuuucaaau

SEQ ID NO: 2543703 - RNA, 19 nt, Artificial Sequence
  Description of Artificial Sequence: Synthetic oligonucleotide
accaacagaguccaagcag

SEQ ID NO: 2543704 - RNA, 19 nt, Artificial Sequence
  Description of Artificial Sequence: Synthetic oligonucleotide
aaucacgguacugagauuu

SEQ ID NO: 2543705 - RNA, 19 nt, Artificial Sequence
  Description of Artificial Sequence: Synthetic oligonucleotide
ugaccagauccauaggcag

SEQ ID NO: 2543706 - RNA, 19 nt, Artificial Sequence
  Description of Artificial Sequence: Synthetic oligonucleotide
uuuaaccgugucaugaaua

SEQ ID NO: 2543707 - RNA, 19 nt, Artificial Sequence
  Description of Artificial Sequence: Synthetic oligonucleotide
uuaaccgugucaugaauaa

SEQ ID NO: 2543708 - RNA, 19 nt, Artificial Sequence
  Description of Artificial Sequence: Synthetic oligonucleotide
uuuauuuaaccgugucaug

SEQ ID NO: 2543709 - RNA, 19 nt, Artificial Sequence
  Description of Artificial Sequence: Synthetic oligonucleotide
aguccaagcaguucagcag

SEQ ID NO: 2543710 - RNA, 19 nt, Artificial Sequence
  Description of Artificial Sequence: Synthetic oligonucleotide
ugaacagaucaaaagcuuu

SEQ ID NO: 2543711 - RNA, 19 nt, Artificial Sequence
  Description of Artificial Sequence: Synthetic oligonucleotide
acgguacugagauuuauga

SEQ ID NO: 2543712 - RNA, 19 nt, Artificial Sequence
  Description of Artificial Sequence: Synthetic oligonucleotide
uuacucgucuuaaaaugac

SEQ ID NO: 2543713 - RNA, 19 nt, Artificial Sequence
  Description of Artificial Sequence: Synthetic oligonucleotide
augacaacccagaaacagc

SEQ ID NO: 2543714 - RNA, 19 nt, Artificial Sequence
  Description of Artificial Sequence: Synthetic oligonucleotide
aacacuccagcacgcauca

SEQ ID NO: 2543715 - RNA, 19 nt, Artificial Sequence
  Description of Artificial Sequence: Synthetic oligonucleotide
uugccauaucgcaaacggg

SEQ ID NO: 2543716 - RNA, 19 nt, Artificial Sequence
  Description of Artificial Sequence: Synthetic oligonucleotide
ucaaaucacgguacugaga

SEQ ID NO: 2543717 - RNA, 19 nt, Artificial Sequence
  Description of Artificial Sequence: Synthetic oligonucleotide
aacccuuuauuuaaccgug

SEQ ID NO: 2543718 - RNA, 19 nt, Artificial Sequence
  Description of Artificial Sequence: Synthetic oligonucleotide
cugagauggaaaccaacag

SEQ ID NO: 2543719 - RNA, 19 nt, Artificial Sequence
  Description of Artificial Sequence: Synthetic oligonucleotide
uccuucaacacuccagcac

SEQ ID NO: 2543720 - RNA, 19 nt, Artificial Sequence
  Description of Artificial Sequence: Synthetic oligonucleotide
cucgaaucugaucuucccg

SEQ ID NO: 2543721 - RNA, 19 nt, Artificial Sequence
  Description of Artificial Sequence: Synthetic oligonucleotide
gagaacccuuuauuuaacc

SEQ ID NO: 2543722 - RNA, 19 nt, Artificial Sequence
  Description of Artificial Sequence: Synthetic oligonucleotide
aacagaucaaaagcuuucu

SEQ ID NO: 2543723 - RNA, 19 nt, Artificial Sequence
  Description of Artificial Sequence: Synthetic oligonucleotide
aaccaacagaguccaagca

SEQ ID NO: 2543724 - RNA, 19 nt, Artificial Sequence
  Description of Artificial Sequence: Synthetic oligonucleotide
aaaccgcugacagguagac

SEQ ID NO: 2543725 - RNA, 19 nt, Artificial Sequence
  Description of Artificial Sequence: Synthetic oligonucleotide
uugaacagaucaaaagcuu

SEQ ID NO: 2543726 - RNA, 19 nt, Artificial Sequence
  Description of Artificial Sequence: Synthetic oligonucleotide
cucgucuuaaaaugacacc

SEQ ID NO: 2543727 - RNA, 19 nt, Artificial Sequence
  Description of Artificial Sequence: Synthetic oligonucleotide
aggcagaaaagaauuucgc

SEQ ID NO: 2543728 - RNA, 19 nt, Artificial Sequence
  Description of Artificial Sequence: Synthetic oligonucleotide
ucggcuuuggcuuugccau

SEQ ID NO: 2543729 - RNA, 19 nt, Artificial Sequence
  Description of Artificial Sequence: Synthetic oligonucleotide
uccacaaaccgcugacagg

SEQ ID NO: 2543730 - RNA, 19 nt, Artificial Sequence
  Description of Artificial Sequence: Synthetic oligonucleotide
aucagagaacccuuuauuu

SEQ ID NO: 2543731 - RNA, 19 nt, Artificial Sequence
  Description of Artificial Sequence: Synthetic oligonucleotide
acaaaccgcugacagguag

SEQ ID NO: 2543732 - RNA, 19 nt, Artificial Sequence
  Description of Artificial Sequence: Synthetic oligonucleotide
gauccauaggcagaaaaga

SEQ ID NO: 2543733 - RNA, 19 nt, Artificial Sequence
  Description of Artificial Sequence: Synthetic oligonucleotide
aagauguccuggaugucgg

SEQ ID NO: 2543734 - RNA, 19 nt, Artificial Sequence
  Description of Artificial Sequence: Synthetic oligonucleotide
uacucgucuuaaaaugaca

SEQ ID NO: 2543735 - RNA, 19 nt, Artificial Sequence
  Description of Artificial Sequence: Synthetic oligonucleotide
uauuuaaccgugucaugaa

SEQ ID NO: 2543736 - RNA, 19 nt, Artificial Sequence
  Description of Artificial Sequence: Synthetic oligonucleotide
cugacauugacaguccuug

SEQ ID NO: 2543737 - RNA, 19 nt, Artificial Sequence
  Description of Artificial Sequence: Synthetic oligonucleotide
gcagaaaagaauuucgcuc

SEQ ID NO: 2543738 - RNA, 19 nt, Artificial Sequence
  Description of Artificial Sequence: Synthetic oligonucleotide
aacagaguccaagcaguuc

SEQ ID NO: 2543739 - RNA, 19 nt, Artificial Sequence
  Description of Artificial Sequence: Synthetic oligonucleotide
auuucgcucgaaucugauc

SEQ ID NO: 2543740 - RNA, 19 nt, Artificial Sequence
  Description of Artificial Sequence: Synthetic oligonucleotide
agcggcuucuccuucaaca

SEQ ID NO: 2543741 - RNA, 19 nt, Artificial Sequence
  Description of Artificial Sequence: Synthetic oligonucleotide
gugucaugaauaaaaguac

SEQ ID NO: 2543742 - RNA, 19 nt, Artificial Sequence
  Description of Artificial Sequence: Synthetic oligonucleotide
gcacgcaucagauuccucg

SEQ ID NO: 2543743 - RNA, 19 nt, Artificial Sequence
  Description of Artificial Sequence: Synthetic oligonucleotide
uuaugacaacccagaaaca

SEQ ID NO: 2543744 - RNA, 19 nt, Artificial Sequence
  Description of Artificial Sequence: Synthetic oligonucleotide
ggguugaacagaucaaaag

SEQ ID NO: 2543745 - RNA, 19 nt, Artificial Sequence
  Description of Artificial Sequence: Synthetic oligonucleotide
agaauuucgcucgaaucug

SEQ ID NO: 2543746 - RNA, 19 nt, Artificial Sequence
  Description of Artificial Sequence: Synthetic oligonucleotide
uaaacacgcucccaaucgu

SEQ ID NO: 2543747 - RNA, 19 nt, Artificial Sequence
  Description of Artificial Sequence: Synthetic oligonucleotide
aaucgucuccagccggcuc

SEQ ID NO: 2543748 - RNA, 19 nt, Artificial Sequence
  Description of Artificial Sequence: Synthetic oligonucleotide
uccucguccggguaaacac

SEQ ID NO: 2543749 - RNA, 19 nt, Artificial Sequence
  Description of Artificial Sequence: Synthetic oligonucleotide
uuccaacggaacuuggggu

SEQ ID NO: 2543750 - RNA, 19 nt, Artificial Sequence
  Description of Artificial Sequence: Synthetic oligonucleotide
ucccaaucgucuccagccg

SEQ ID NO: 2543751 - RNA, 19 nt, Artificial Sequence
  Description of Artificial Sequence: Synthetic oligonucleotide
aaacacgcucccaaucguc

SEQ ID NO: 2543752 - RNA, 19 nt, Artificial Sequence
  Description of Artificial Sequence: Synthetic oligonucleotide
gaacccuuuauuuaaccgu

SEQ ID NO: 2543753 - RNA, 19 nt, Artificial Sequence
  Description of Artificial Sequence: Synthetic oligonucleotide
uggguugaacagaucaaaa

SEQ ID NO: 2543754 - RNA, 19 nt, Artificial Sequence
  Description of Artificial Sequence: Synthetic oligonucleotide
gaacagaucaaaagcuuuc

SEQ ID NO: 2543755 - RNA, 19 nt, Artificial Sequence
  Description of Artificial Sequence: Synthetic oligonucleotide
uggaugucggcuuuggcuu

SEQ ID NO: 2543756 - RNA, 19 nt, Artificial Sequence
  Description of Artificial Sequence: Synthetic oligonucleotide
ccuucaacacuccagcacg

SEQ ID NO: 2543757 - RNA, 19 nt, Artificial Sequence
  Description of Artificial Sequence: Synthetic oligonucleotide
uccaacggaacuugggguc

SEQ ID NO: 2543758 - RNA, 19 nt, Artificial Sequence
  Description of Artificial Sequence: Synthetic oligonucleotide
cagguagacuugaaguuug

SEQ ID NO: 2543759 - RNA, 19 nt, Artificial Sequence
  Description of Artificial Sequence: Synthetic oligonucleotide
gcugguuuccuuccaacgg

SEQ ID NO: 2543760 - RNA, 19 nt, Artificial Sequence
  Description of Artificial Sequence: Synthetic oligonucleotide
uucugaccagauccauagg

SEQ ID NO: 2543761 - RNA, 19 nt, Artificial Sequence
  Description of Artificial Sequence: Synthetic oligonucleotide
gauuuaugacaacccagaa

SEQ ID NO: 2543762 - RNA, 19 nt, Artificial Sequence
  Description of Artificial Sequence: Synthetic oligonucleotide
acuggugcuuucaaaucac

SEQ ID NO: 2543763 - RNA, 19 nt, Artificial Sequence
  Description of Artificial Sequence: Synthetic oligonucleotide
gacaccuucugccagcaaa

SEQ ID NO: 2543764 - RNA, 19 nt, Artificial Sequence
  Description of Artificial Sequence: Synthetic oligonucleotide
uccauguacuucuccacaa

SEQ ID NO: 2543765 - RNA, 19 nt, Artificial Sequence
  Description of Artificial Sequence: Synthetic oligonucleotide
guagacuugaaguuugggu

SEQ ID NO: 2543766 - RNA, 19 nt, Artificial Sequence
  Description of Artificial Sequence: Synthetic oligonucleotide
auuuaaccgugucaugaau

SEQ ID NO: 2543767 - RNA, 19 nt, Artificial Sequence
  Description of Artificial Sequence: Synthetic oligonucleotide
caaacggggccuucggaag

SEQ ID NO: 2543768 - RNA, 19 nt, Artificial Sequence
  Description of Artificial Sequence: Synthetic oligonucleotide
cauugacaguccuugcuuc

SEQ ID NO: 2543769 - RNA, 19 nt, Artificial Sequence
  Description of Artificial Sequence: Synthetic oligonucleotide
cauauacgucaaaccacag

SEQ ID NO: 2543770 - RNA, 19 nt, Artificial Sequence
  Description of Artificial Sequence: Synthetic oligonucleotide
agagaacccuuuauuuaac

SEQ ID NO: 2543771 - RNA, 19 nt, Artificial Sequence
  Description of Artificial Sequence: Synthetic oligonucleotide
gaagaggguacggccaucc

SEQ ID NO: 2543772 - RNA, 19 nt, Artificial Sequence
  Description of Artificial Sequence: Synthetic oligonucleotide
aaacggggccuucggaaga

SEQ ID NO: 2543773 - RNA, 19 nt, Artificial Sequence
  Description of Artificial Sequence: Synthetic oligonucleotide
caaaucacgguacugagau

SEQ ID NO: 2543774 - RNA, 19 nt, Artificial Sequence
  Description of Artificial Sequence: Synthetic oligonucleotide
cuuggggucugacauugac

SEQ ID NO: 2543775 - RNA, 19 nt, Artificial Sequence
  Description of Artificial Sequence: Synthetic oligonucleotide
aaguuuggguugaacagau

SEQ ID NO: 2543776 - RNA, 19 nt, Artificial Sequence
  Description of Artificial Sequence: Synthetic oligonucleotide
cagagaacccuuuauuuaa

SEQ ID NO: 2543777 - RNA, 19 nt, Artificial Sequence
  Description of Artificial Sequence: Synthetic oligonucleotide
ucaacacuccagcacgcau

SEQ ID NO: 2543778 - RNA, 19 nt, Artificial Sequence
  Description of Artificial Sequence: Synthetic oligonucleotide
cucguccggguaaacacgc

SEQ ID NO: 2543779 - RNA, 19 nt, Artificial Sequence
  Description of Artificial Sequence: Synthetic oligonucleotide
cuggugcuuucaaaucacg

SEQ ID NO: 2543780 - RNA, 19 nt, Artificial Sequence
  Description of Artificial Sequence: Synthetic oligonucleotide
cuucaacacuccagcacgc

SEQ ID NO: 2543781 - RNA, 19 nt, Artificial Sequence
  Description of Artificial Sequence: Synthetic oligonucleotide
gaggguacggccaucccug

SEQ ID NO: 2543782 - RNA, 19 nt, Artificial Sequence
  Description of Artificial Sequence: Synthetic oligonucleotide
ucugacauugacaguccuu

SEQ ID NO: 2543783 - RNA, 19 nt, Artificial Sequence
  Description of Artificial Sequence: Synthetic oligonucleotide
aggcugguuuccuuccaac

SEQ ID NO: 2543784 - RNA, 19 nt, Artificial Sequence
  Description of Artificial Sequence: Synthetic oligonucleotide
cuuugccauaucgcaaacg

SEQ ID NO: 2543785 - RNA, 19 nt, Artificial Sequence
  Description of Artificial Sequence: Synthetic oligonucleotide
uccggguaaacacgcuccc

SEQ ID NO: 2543786 - RNA, 19 nt, Artificial Sequence
  Description of Artificial Sequence: Synthetic oligonucleotide
cuuucaaaucacgguacug

SEQ ID NO: 2543787 - RNA, 19 nt, Artificial Sequence
  Description of Artificial Sequence: Synthetic oligonucleotide
cucucagcggcggaaaggc

SEQ ID NO: 2543788 - RNA, 19 nt, Artificial Sequence
  Description of Artificial Sequence: Synthetic oligonucleotide
caagcaguucagcaguguc

SEQ ID NO: 2543789 - RNA, 19 nt, Artificial Sequence
  Description of Artificial Sequence: Synthetic oligonucleotide
ucggaagacaggcucucuc

SEQ ID NO: 2543790 - RNA, 19 nt, Artificial Sequence
  Description of Artificial Sequence: Synthetic oligonucleotide
gaagggucucuggaagagg

SEQ ID NO: 2543791 - RNA, 19 nt, Artificial Sequence
  Description of Artificial Sequence: Synthetic oligonucleotide
caacacuccagcacgcauc

SEQ ID NO: 2543792 - RNA, 19 nt, Artificial Sequence
  Description of Artificial Sequence: Synthetic oligonucleotide
gcggaaaggccucauauac

SEQ ID NO: 2543793 - RNA, 19 nt, Artificial Sequence
  Description of Artificial Sequence: Synthetic oligonucleotide
uucuuuuacucgucuuaaa

SEQ ID NO: 2543794 - RNA, 19 nt, Artificial Sequence
  Description of Artificial Sequence: Synthetic oligonucleotide
uccaagcaguucagcagug

SEQ ID NO: 2543795 - RNA, 19 nt, Artificial Sequence
  Description of Artificial Sequence: Synthetic oligonucleotide
auacgucaaaccacagcgg

SEQ ID NO: 2543796 - RNA, 19 nt, Artificial Sequence
  Description of Artificial Sequence: Synthetic oligonucleotide
aacggggccuucggaagac

SEQ ID NO: 2543797 - RNA, 19 nt, Artificial Sequence
  Description of Artificial Sequence: Synthetic oligonucleotide
gugcuuucaaaucacggua

SEQ ID NO: 2543798 - RNA, 19 nt, Artificial Sequence
  Description of Artificial Sequence: Synthetic oligonucleotide
ucgagaaggcagacaugcc

SEQ ID NO: 2543799 - RNA, 19 nt, Artificial Sequence
  Description of Artificial Sequence: Synthetic oligonucleotide
accgugucaugaauaaaag

SEQ ID NO: 2543800 - RNA, 19 nt, Artificial Sequence
  Description of Artificial Sequence: Synthetic oligonucleotide
cugaccagauccauaggca

SEQ ID NO: 2543801 - RNA, 19 nt, Artificial Sequence
  Description of Artificial Sequence: Synthetic oligonucleotide
ggcugguuuccuuccaacg

SEQ ID NO: 2543802 - RNA, 19 nt, Artificial Sequence
  Description of Artificial Sequence: Synthetic oligonucleotide
cuuuuacucgucuuaaaau

SEQ ID NO: 2543803 - RNA, 19 nt, Artificial Sequence
  Description of Artificial Sequence: Synthetic oligonucleotide
ccucauauacgucaaacca

SEQ ID NO: 2543804 - RNA, 19 nt, Artificial Sequence
  Description of Artificial Sequence: Synthetic oligonucleotide
gccucauauacgucaaacc

SEQ ID NO: 2543805 - RNA, 19 nt, Artificial Sequence
  Description of Artificial Sequence: Synthetic oligonucleotide
agaaggcagacaugccuga

SEQ ID NO: 2543806 - RNA, 19 nt, Artificial Sequence
  Description of Artificial Sequence: Synthetic oligonucleotide
agacaggcucucucagcgg

SEQ ID NO: 2543807 - RNA, 19 nt, Artificial Sequence
  Description of Artificial Sequence: Synthetic oligonucleotide
gucucuggaagaggguacg

SEQ ID NO: 2543808 - RNA, 19 nt, Artificial Sequence
  Description of Artificial Sequence: Synthetic oligonucleotide
cgugucaugaauaaaagua

SEQ ID NO: 2543809 - RNA, 19 nt, Artificial Sequence
  Description of Artificial Sequence: Synthetic oligonucleotide
acaccuucugccagcaaag

SEQ ID NO: 2543810 - RNA, 19 nt, Artificial Sequence
  Description of Artificial Sequence: Synthetic oligonucleotide
acgcaucagauuccucguc

SEQ ID NO: 2543811 - RNA, 19 nt, Artificial Sequence
  Description of Artificial Sequence: Synthetic oligonucleotide
caguucagcagugucccag

SEQ ID NO: 2543812 - RNA, 19 nt, Artificial Sequence
  Description of Artificial Sequence: Synthetic oligonucleotide
aacuucgagaaggcagaca

SEQ ID NO: 2543813 - RNA, 19 nt, Artificial Sequence
  Description of Artificial Sequence: Synthetic oligonucleotide
gguaaacacgcucccaauc

SEQ ID NO: 2543814 - RNA, 19 nt, Artificial Sequence
  Description of Artificial Sequence: Synthetic oligonucleotide
ggaaaggccucauauacgu

SEQ ID NO: 2543815 - RNA, 19 nt, Artificial Sequence
  Description of Artificial Sequence: Synthetic oligonucleotide
auccauaggcagaaaagaa

SEQ ID NO: 2543816 - RNA, 19 nt, Artificial Sequence
  Description of Artificial Sequence: Synthetic oligonucleotide
gguagacuugaaguuuggg

SEQ ID NO: 2543817 - RNA, 19 nt, Artificial Sequence
  Description of Artificial Sequence: Synthetic oligonucleotide
aauuucgcucgaaucugau

SEQ ID NO: 2543818 - RNA, 19 nt, Artificial Sequence
  Description of Artificial Sequence: Synthetic oligonucleotide
agauuccucguccggguaa

SEQ ID NO: 2543819 - RNA, 19 nt, Artificial Sequence
  Description of Artificial Sequence: Synthetic oligonucleotide
ccaccuagggcagaaagcc

SEQ ID NO: 2543820 - RNA, 19 nt, Artificial Sequence
  Description of Artificial Sequence: Synthetic oligonucleotide
cugguuuccuuccaacgga

SEQ ID NO: 2543821 - RNA, 19 nt, Artificial Sequence
  Description of Artificial Sequence: Synthetic oligonucleotide
cacgcucccaaucgucucc

SEQ ID NO: 2543822 - RNA, 19 nt, Artificial Sequence
  Description of Artificial Sequence: Synthetic oligonucleotide
acagaacuggugcuuucaa

SEQ ID NO: 2543823 - RNA, 19 nt, Artificial Sequence
  Description of Artificial Sequence: Synthetic oligonucleotide
gaauuucgcucgaaucuga

SEQ ID NO: 2543824 - RNA, 19 nt, Artificial Sequence
  Description of Artificial Sequence: Synthetic oligonucleotide
uucaacacuccagcacgca

SEQ ID NO: 2543825 - RNA, 19 nt, Artificial Sequence
  Description of Artificial Sequence: Synthetic oligonucleotide
guccggguaaacacgcucc

SEQ ID NO: 2543826 - RNA, 19 nt, Artificial Sequence
  Description of Artificial Sequence: Synthetic oligonucleotide
cuggaugucggcuuuggcu

SEQ ID NO: 2543827 - RNA, 19 nt, Artificial Sequence
  Description of Artificial Sequence: Synthetic oligonucleotide
ggugcuuucaaaucacggu

SEQ ID NO: 2543828 - RNA, 19 nt, Artificial Sequence
  Description of Artificial Sequence: Synthetic oligonucleotide
ucucagcggcggaaaggcc

SEQ ID NO: 2543829 - RNA, 19 nt, Artificial Sequence
  Description of Artificial Sequence: Synthetic oligonucleotide
agcaucagagaacccuuua

SEQ ID NO: 2543830 - RNA, 19 nt, Artificial Sequence
  Description of Artificial Sequence: Synthetic oligonucleotide
ucugaucuucccgguaaaa

SEQ ID NO: 2543831 - RNA, 19 nt, Artificial Sequence
  Description of Artificial Sequence: Synthetic oligonucleotide
uuccucguccggguaaaca

SEQ ID NO: 2543832 - RNA, 19 nt, Artificial Sequence
  Description of Artificial Sequence: Synthetic oligonucleotide
gaucuucccgguaaaagau

SEQ ID NO: 2543833 - RNA, 19 nt, Artificial Sequence
  Description of Artificial Sequence: Synthetic oligonucleotide
ggccaccuagggcagaaag

SEQ ID NO: 2543834 - RNA, 19 nt, Artificial Sequence
  Description of Artificial Sequence: Synthetic oligonucleotide
gaaucugaucuucccggua

SEQ ID NO: 2543835 - RNA, 19 nt, Artificial Sequence
  Description of Artificial Sequence: Synthetic oligonucleotide
agguagacuugaaguuugg

SEQ ID NO: 2543836 - RNA, 19 nt, Artificial Sequence
  Description of Artificial Sequence: Synthetic oligonucleotide
caaaccgcugacagguaga

SEQ ID NO: 2543837 - RNA, 19 nt, Artificial Sequence
  Description of Artificial Sequence: Synthetic oligonucleotide
ccgguaaaagauguccugg

SEQ ID NO: 2543838 - RNA, 19 nt, Artificial Sequence
  Description of Artificial Sequence: Synthetic oligonucleotide
aucuucccgguaaaagaug

SEQ ID NO: 2543839 - RNA, 19 nt, Artificial Sequence
  Description of Artificial Sequence: Synthetic oligonucleotide
gcucgaaucugaucuuccc

SEQ ID NO: 2543840 - RNA, 19 nt, Artificial Sequence
  Description of Artificial Sequence: Synthetic oligonucleotide
gauccugcagcuccaugua

SEQ ID NO: 2543841 - RNA, 19 nt, Artificial Sequence
  Description of Artificial Sequence: Synthetic oligonucleotide
aaggccucauauacgucaa

SEQ ID NO: 2543842 - RNA, 19 nt, Artificial Sequence
  Description of Artificial Sequence: Synthetic oligonucleotide
guccaagcaguucagcagu

SEQ ID NO: 2543843 - RNA, 19 nt, Artificial Sequence
  Description of Artificial Sequence: Synthetic oligonucleotide
ccuuuauuuaaccguguca

SEQ ID NO: 2543844 - RNA, 19 nt, Artificial Sequence
  Description of Artificial Sequence: Synthetic oligonucleotide
ugucggcuuuggcuuugcc

SEQ ID NO: 2543845 - RNA, 19 nt, Artificial Sequence
  Description of Artificial Sequence: Synthetic oligonucleotide
gggccuucggaagacaggc

SEQ ID NO: 2543846 - RNA, 19 nt, Artificial Sequence
  Description of Artificial Sequence: Synthetic oligonucleotide
aggguacggccaucccugg

SEQ ID NO: 2543847 - RNA, 19 nt, Artificial Sequence
  Description of Artificial Sequence: Synthetic oligonucleotide
cuucccgguaaaagauguc

SEQ ID NO: 2543848 - RNA, 19 nt, Artificial Sequence
  Description of Artificial Sequence: Synthetic oligonucleotide
uaaccgugucaugaauaaa

SEQ ID NO: 2543849 - RNA, 19 nt, Artificial Sequence
  Description of Artificial Sequence: Synthetic oligonucleotide
gaugucggcuuuggcuuug

SEQ ID NO: 2543850 - RNA, 19 nt, Artificial Sequence
  Description of Artificial Sequence: Synthetic oligonucleotide
ccauaucgcaaacggggcc

SEQ ID NO: 2543851 - RNA, 19 nt, Artificial Sequence
  Description of Artificial Sequence: Synthetic oligonucleotide
acaguccuugcuucuuuua

SEQ ID NO: 2543852 - RNA, 19 nt, Artificial Sequence
  Description of Artificial Sequence: Synthetic oligonucleotide
aguuuggguugaacagauc

SEQ ID NO: 2543853 - RNA, 19 nt, Artificial Sequence
  Description of Artificial Sequence: Synthetic oligonucleotide
ggcuuugccauaucgcaaa

SEQ ID NO: 2543854 - RNA, 19 nt, Artificial Sequence
  Description of Artificial Sequence: Synthetic oligonucleotide
ggccucauauacgucaaac

SEQ ID NO: 2543855 - RNA, 19 nt, Artificial Sequence
  Description of Artificial Sequence: Synthetic oligonucleotide
agcagugucccagguggug

SEQ ID NO: 2543856 - RNA, 19 nt, Artificial Sequence
  Description of Artificial Sequence: Synthetic oligonucleotide
caaaagcuuucugaccaga

SEQ ID NO: 2543857 - RNA, 19 nt, Artificial Sequence
  Description of Artificial Sequence: Synthetic oligonucleotide
gcaacuucgagaaggcaga

SEQ ID NO: 2543858 - RNA, 19 nt, Artificial Sequence
  Description of Artificial Sequence: Synthetic oligonucleotide
uucgcucgaaucugaucuu

SEQ ID NO: 2543859 - RNA, 19 nt, Artificial Sequence
  Description of Artificial Sequence: Synthetic oligonucleotide
ccucguccggguaaacacg

SEQ ID NO: 2543860 - RNA, 19 nt, Artificial Sequence
  Description of Artificial Sequence: Synthetic oligonucleotide
uacggccaucccuggcucc

SEQ ID NO: 2543861 - RNA, 19 nt, Artificial Sequence
  Description of Artificial Sequence: Synthetic oligonucleotide
cugucucucccagauccug

SEQ ID NO: 2543862 - RNA, 19 nt, Artificial Sequence
  Description of Artificial Sequence: Synthetic oligonucleotide
ucgcucgaaucugaucuuc

SEQ ID NO: 2543863 - RNA, 19 nt, Artificial Sequence
  Description of Artificial Sequence: Synthetic oligonucleotide
cuucggaagacaggcucuc

SEQ ID NO: 2543864 - RNA, 19 nt, Artificial Sequence
  Description of Artificial Sequence: Synthetic oligonucleotide
gccuucggaagacaggcuc

SEQ ID NO: 2543865 - RNA, 19 nt, Artificial Sequence
  Description of Artificial Sequence: Synthetic oligonucleotide
augucggcuuuggcuuugc

SEQ ID NO: 2543866 - RNA, 19 nt, Artificial Sequence
  Description of Artificial Sequence: Synthetic oligonucleotide
cggaaaggccucauauacg

SEQ ID NO: 2543867 - RNA, 19 nt, Artificial Sequence
  Description of Artificial Sequence: Synthetic oligonucleotide
gcaaacggggccuucggaa

SEQ ID NO: 2543868 - RNA, 19 nt, Artificial Sequence
  Description of Artificial Sequence: Synthetic oligonucleotide
cuccuucaacacuccagca

SEQ ID NO: 2543869 - RNA, 19 nt, Artificial Sequence
  Description of Artificial Sequence: Synthetic oligonucleotide
aacggaacuuggggucuga

SEQ ID NO: 2543870 - RNA, 19 nt, Artificial Sequence
  Description of Artificial Sequence: Synthetic oligonucleotide
ccaaucgucuccagccggc

SEQ ID NO: 2543871 - RNA, 19 nt, Artificial Sequence
  Description of Artificial Sequence: Synthetic oligonucleotide
ucguccggguaaacacgcu

SEQ ID NO: 2543872 - RNA, 19 nt, Artificial Sequence
  Description of Artificial Sequence: Synthetic oligonucleotide
cucagcggcggaaaggccu

SEQ ID NO: 2543873 - RNA, 19 nt, Artificial Sequence
  Description of Artificial Sequence: Synthetic oligonucleotide
gucccagguggugagcaug

SEQ ID NO: 2543874 - RNA, 19 nt, Artificial Sequence
  Description of Artificial Sequence: Synthetic oligonucleotide
auuccucguccggguaaac

SEQ ID NO: 2543875 - RNA, 19 nt, Artificial Sequence
  Description of Artificial Sequence: Synthetic oligonucleotide
acgucaaaccacagcggcu

SEQ ID NO: 2543876 - RNA, 19 nt, Artificial Sequence
  Description of Artificial Sequence: Synthetic oligonucleotide
caucagagaacccuuuauu

SEQ ID NO: 2543877 - RNA, 19 nt, Artificial Sequence
  Description of Artificial Sequence: Synthetic oligonucleotide
ccagaaacagcaacuucga

SEQ ID NO: 2543878 - RNA, 19 nt, Artificial Sequence
  Description of Artificial Sequence: Synthetic oligonucleotide
aaccgcugacagguagacu

SEQ ID NO: 2543879 - RNA, 19 nt, Artificial Sequence
  Description of Artificial Sequence: Synthetic oligonucleotide
gccauaucgcaaacggggc

SEQ ID NO: 2543880 - RNA, 19 nt, Artificial Sequence
  Description of Artificial Sequence: Synthetic oligonucleotide
caucugucucucccagauc

SEQ ID NO: 2543881 - RNA, 19 nt, Artificial Sequence
  Description of Artificial Sequence: Synthetic oligonucleotide
gacaugccugagauggaaa

SEQ ID NO: 2543882 - RNA, 19 nt, Artificial Sequence
  Description of Artificial Sequence: Synthetic oligonucleotide
gcaugcucagggcacagaa

SEQ ID NO: 2543883 - RNA, 19 nt, Artificial Sequence
  Description of Artificial Sequence: Synthetic oligonucleotide
cauaggcagaaaagaauuu

SEQ ID NO: 2543884 - RNA, 19 nt, Artificial Sequence
  Description of Artificial Sequence: Synthetic oligonucleotide
caacuucgagaaggcagac

SEQ ID NO: 2543885 - RNA, 19 nt, Artificial Sequence
  Description of Artificial Sequence: Synthetic oligonucleotide
gcucccaaucgucuccagc

SEQ ID NO: 2543886 - RNA, 19 nt, Artificial Sequence
  Description of Artificial Sequence: Synthetic oligonucleotide
cccaaucgucuccagccgg

SEQ ID NO: 2543887 - RNA, 19 nt, Artificial Sequence
  Description of Artificial Sequence: Synthetic oligonucleotide
ccagcacgcaucagauucc

SEQ ID NO: 2543888 - RNA, 19 nt, Artificial Sequence
  Description of Artificial Sequence: Synthetic oligonucleotide
cauaucgcaaacggggccu

SEQ ID NO: 2543889 - RNA, 19 nt, Artificial Sequence
  Description of Artificial Sequence: Synthetic oligonucleotide
acccuuuauuuaaccgugu

SEQ ID NO: 2543890 - RNA, 19 nt, Artificial Sequence
  Description of Artificial Sequence: Synthetic oligonucleotide
acagcggcuucuccuucaa

SEQ ID NO: 2543891 - RNA, 19 nt, Artificial Sequence
  Description of Artificial Sequence: Synthetic oligonucleotide
ggucucuggaagaggguac

SEQ ID NO: 2543892 - RNA, 19 nt, Artificial Sequence
  Description of Artificial Sequence: Synthetic oligonucleotide
ccaacagaguccaagcagu

SEQ ID NO: 2543893 - RNA, 19 nt, Artificial Sequence
  Description of Artificial Sequence: Synthetic oligonucleotide
gacaacccagaaacagcaa

SEQ ID NO: 2543894 - RNA, 19 nt, Artificial Sequence
  Description of Artificial Sequence: Synthetic oligonucleotide
cuucccugucuucacaaau

SEQ ID NO: 2543895 - RNA, 19 nt, Artificial Sequence
  Description of Artificial Sequence: Synthetic oligonucleotide
cacagcggcuucuccuuca

SEQ ID NO: 2543896 - RNA, 19 nt, Artificial Sequence
  Description of Artificial Sequence: Synthetic oligonucleotide
cacgcaucagauuccucgu

SEQ ID NO: 2543897 - RNA, 19 nt, Artificial Sequence
  Description of Artificial Sequence: Synthetic oligonucleotide
ucgucuccagccggcuccc

SEQ ID NO: 2543898 - RNA, 19 nt, Artificial Sequence
  Description of Artificial Sequence: Synthetic oligonucleotide
gcuuugccauaucgcaaac

SEQ ID NO: 2543899 - RNA, 19 nt, Artificial Sequence
  Description of Artificial Sequence: Synthetic oligonucleotide
agcacgcaucagauuccuc

SEQ ID NO: 2543900 - RNA, 19 nt, Artificial Sequence
  Description of Artificial Sequence: Synthetic oligonucleotide
cagggcacagaagggucuc

SEQ ID NO: 2543901 - RNA, 19 nt, Artificial Sequence
  Description of Artificial Sequence: Synthetic oligonucleotide
caacggaacuuggggucug

SEQ ID NO: 2543902 - RNA, 19 nt, Artificial Sequence
  Description of Artificial Sequence: Synthetic oligonucleotide
aggccucauauacgucaaa

SEQ ID NO: 2543903 - RNA, 19 nt, Artificial Sequence
  Description of Artificial Sequence: Synthetic oligonucleotide
uaucgcaaacggggccuuc

SEQ ID NO: 2543904 - RNA, 19 nt, Artificial Sequence
  Description of Artificial Sequence: Synthetic oligonucleotide
ccacaaaccgcugacaggu

SEQ ID NO: 2543905 - RNA, 19 nt, Artificial Sequence
  Description of Artificial Sequence: Synthetic oligonucleotide
cgcucgaaucugaucuucc

SEQ ID NO: 2543906 - RNA, 19 nt, Artificial Sequence
  Description of Artificial Sequence: Synthetic oligonucleotide
ugcuccugugcaggcugcu

SEQ ID NO: 2543907 - RNA, 19 nt, Artificial Sequence
  Description of Artificial Sequence: Synthetic oligonucleotide
gccugagauggaaaccaac

SEQ ID NO: 2543908 - RNA, 19 nt, Artificial Sequence
  Description of Artificial Sequence: Synthetic oligonucleotide
auaucgcaaacggggccuu

SEQ ID NO: 2543909 - RNA, 19 nt, Artificial Sequence
  Description of Artificial Sequence: Synthetic oligonucleotide
caggcugcuucugggcauc

SEQ ID NO: 2543910 - RNA, 19 nt, Artificial Sequence
  Description of Artificial Sequence: Synthetic oligonucleotide
gggcacagaagggucucug

SEQ ID NO: 2543911 - RNA, 19 nt, Artificial Sequence
  Description of Artificial Sequence: Synthetic oligonucleotide
aucacgguacugagauuua

SEQ ID NO: 2543912 - RNA, 19 nt, Artificial Sequence
  Description of Artificial Sequence: Synthetic oligonucleotide
gggucucuggaagagggua

SEQ ID NO: 2543913 - RNA, 19 nt, Artificial Sequence
  Description of Artificial Sequence: Synthetic oligonucleotide
caacagaguccaagcaguu

SEQ ID NO: 2543914 - RNA, 19 nt, Artificial Sequence
  Description of Artificial Sequence: Synthetic oligonucleotide
acuuggggucugacauuga

SEQ ID NO: 2543915 - RNA, 19 nt, Artificial Sequence
  Description of Artificial Sequence: Synthetic oligonucleotide
cguccggguaaacacgcuc

SEQ ID NO: 2543916 - RNA, 19 nt, Artificial Sequence
  Description of Artificial Sequence: Synthetic oligonucleotide
ccgugucaugaauaaaagu

SEQ ID NO: 2543917 - RNA, 19 nt, Artificial Sequence
  Description of Artificial Sequence: Synthetic oligonucleotide
cacaaaccgcugacaggua

SEQ ID NO: 2543918 - RNA, 19 nt, Artificial Sequence
  Description of Artificial Sequence: Synthetic oligonucleotide
cggguaaacacgcucccaa

SEQ ID NO: 2543919 - RNA, 19 nt, Artificial Sequence
  Description of Artificial Sequence: Synthetic oligonucleotide
ccuucggaagacaggcucu

SEQ ID NO: 2543920 - RNA, 19 nt, Artificial Sequence
  Description of Artificial Sequence: Synthetic oligonucleotide
ggaagaggguacggccauc

SEQ ID NO: 2543921 - RNA, 19 nt, Artificial Sequence
  Description of Artificial Sequence: Synthetic oligonucleotide
acggggccuucggaagaca

SEQ ID NO: 2543922 - RNA, 19 nt, Artificial Sequence
  Description of Artificial Sequence: Synthetic oligonucleotide
agcggcggaaaggccucau

SEQ ID NO: 2543923 - RNA, 19 nt, Artificial Sequence
  Description of Artificial Sequence: Synthetic oligonucleotide
caaucgucuccagccggcu

SEQ ID NO: 2543924 - RNA, 19 nt, Artificial Sequence
  Description of Artificial Sequence: Synthetic oligonucleotide
cagcacgcaucagauuccu

SEQ ID NO: 2543925 - RNA, 19 nt, Artificial Sequence
  Description of Artificial Sequence: Synthetic oligonucleotide
ggcuccccgccauggccac

SEQ ID NO: 2543926 - RNA, 19 nt, Artificial Sequence
  Description of Artificial Sequence: Synthetic oligonucleotide
gccggcuccccgccauggc

SEQ ID NO: 2543927 - RNA, 19 nt, Artificial Sequence
  Description of Artificial Sequence: Synthetic oligonucleotide
cuccccgccauggccaccu

SEQ ID NO: 2543928 - RNA, 19 nt, Artificial Sequence
  Description of Artificial Sequence: Synthetic oligonucleotide
ggaugucggcuuuggcuuu

SEQ ID NO: 2543929 - RNA, 19 nt, Artificial Sequence
  Description of Artificial Sequence: Synthetic oligonucleotide
cgucuuaaaaugacaccuu

SEQ ID NO: 2543930 - RNA, 19 nt, Artificial Sequence
  Description of Artificial Sequence: Synthetic oligonucleotide
uccccgccauggccaccua

SEQ ID NO: 2543931 - RNA, 19 nt, Artificial Sequence
  Description of Artificial Sequence: Synthetic oligonucleotide
ccaacggaacuuggggucu

SEQ ID NO: 2543932 - RNA, 19 nt, Artificial Sequence
  Description of Artificial Sequence: Synthetic oligonucleotide
cgcaaacggggccuucgga

SEQ ID NO: 2543933 - RNA, 19 nt, Artificial Sequence
  Description of Artificial Sequence: Synthetic oligonucleotide
ccggguaaacacgcuccca

SEQ ID NO: 2543934 - RNA, 19 nt, Artificial Sequence
  Description of Artificial Sequence: Synthetic oligonucleotide
gcggcggaaaggccucaua

SEQ ID NO: 2543935 - RNA, 19 nt, Artificial Sequence
  Description of Artificial Sequence: Synthetic oligonucleotide
cgcucccaaucgucuccag

SEQ ID NO: 2543936 - RNA, 19 nt, Artificial Sequence
  Description of Artificial Sequence: Synthetic oligonucleotide
cggcuccccgccauggcca

SEQ ID NO: 2543937 - RNA, 19 nt, Artificial Sequence
  Description of Artificial Sequence: Synthetic oligonucleotide
cggcggaaaggccucauau

SEQ ID NO: 2543938 - RNA, 19 nt, Artificial Sequence
  Description of Artificial Sequence: Synthetic oligonucleotide
cagcggcggaaaggccuca

SEQ ID NO: 2543939 - RNA, 19 nt, Artificial Sequence
  Description of Artificial Sequence: Synthetic oligonucleotide
gcuccccgccauggccacc

SEQ ID NO: 2543940 - RNA, 19 nt, Artificial Sequence
  Description of Artificial Sequence: Synthetic oligonucleotide
ccagccggcuccccgccau

SEQ ID NO: 2543941 - RNA, 19 nt, Artificial Sequence
  Description of Artificial Sequence: Synthetic oligonucleotide
aaugguacaaaguuagccc

SEQ ID NO: 2543942 - RNA, 19 nt, Artificial Sequence
  Description of Artificial Sequence: Synthetic oligonucleotide
aagaauaagcuugagauag

SEQ ID NO: 2543943 - RNA, 19 nt, Artificial Sequence
  Description of Artificial Sequence: Synthetic oligonucleotide
aaauugugcguugaaaugc

SEQ ID NO: 2543944 - RNA, 19 nt, Artificial Sequence
  Description of Artificial Sequence: Synthetic oligonucleotide
aaaugcgaagauuuccucc

SEQ ID NO: 2543945 - RNA, 19 nt, Artificial Sequence
  Description of Artificial Sequence: Synthetic oligonucleotide
uuuuauagagaucuuccgg

SEQ ID NO: 2543946 - RNA, 19 nt, Artificial Sequence
  Description of Artificial Sequence: Synthetic oligonucleotide
aagaagaaagucucgcagc

SEQ ID NO: 2543947 - RNA, 19 nt, Artificial Sequence
  Description of Artificial Sequence: Synthetic oligonucleotide
aauucgucaaaacacagga

SEQ ID NO: 2543948 - RNA, 19 nt, Artificial Sequence
  Description of Artificial Sequence: Synthetic oligonucleotide
uagaaguuaucaaugagag

SEQ ID NO: 2543949 - RNA, 19 nt, Artificial Sequence
  Description of Artificial Sequence: Synthetic oligonucleotide
ugaugcaagaauaagcuug

SEQ ID NO: 2543950 - RNA, 19 nt, Artificial Sequence
  Description of Artificial Sequence: Synthetic oligonucleotide
uaugacuuagucaugaauc

SEQ ID NO: 2543951 - RNA, 19 nt, Artificial Sequence
  Description of Artificial Sequence: Synthetic oligonucleotide
aauuaugcgcaccuuguag

SEQ ID NO: 2543952 - RNA, 19 nt, Artificial Sequence
  Description of Artificial Sequence: Synthetic oligonucleotide
auaagcuugagauaggagu

SEQ ID NO: 2543953 - RNA, 19 nt, Artificial Sequence
  Description of Artificial Sequence: Synthetic oligonucleotide
agaagaaagucucgcagcc

SEQ ID NO: 2543954 - RNA, 19 nt, Artificial Sequence
  Description of Artificial Sequence: Synthetic oligonucleotide
augacuuagucaugaaucc

SEQ ID NO: 2543955 - RNA, 19 nt, Artificial Sequence
  Description of Artificial Sequence: Synthetic oligonucleotide
ucaaugagaguuaugaauc

SEQ ID NO: 2543956 - RNA, 19 nt, Artificial Sequence
  Description of Artificial Sequence: Synthetic oligonucleotide
gauaaucuaucccagaauc

SEQ ID NO: 2543957 - RNA, 19 nt, Artificial Sequence
  Description of Artificial Sequence: Synthetic oligonucleotide
uucgucaaaacacaggaga

SEQ ID NO: 2543958 - RNA, 19 nt, Artificial Sequence
  Description of Artificial Sequence: Synthetic oligonucleotide
uugagauaggaguugaugc

SEQ ID NO: 2543959 - RNA, 19 nt, Artificial Sequence
  Description of Artificial Sequence: Synthetic oligonucleotide
auugcaauauuccuucagg

SEQ ID NO: 2543960 - RNA, 19 nt, Artificial Sequence
  Description of Artificial Sequence: Synthetic oligonucleotide
uuuccgauaaucuauccca

SEQ ID NO: 2543961 - RNA, 19 nt, Artificial Sequence
  Description of Artificial Sequence: Synthetic oligonucleotide
uuuauagagaucuuccggu

SEQ ID NO: 2543962 - RNA, 19 nt, Artificial Sequence
  Description of Artificial Sequence: Synthetic oligonucleotide
gaagaagaaagucucgcag

SEQ ID NO: 2543963 - RNA, 19 nt, Artificial Sequence
  Description of Artificial Sequence: Synthetic oligonucleotide
ugaaauucgucaaaacaca

SEQ ID NO: 2543964 - RNA, 19 nt, Artificial Sequence
  Description of Artificial Sequence: Synthetic oligonucleotide
uuaugaaucgccgagcuug

SEQ ID NO: 2543965 - RNA, 19 nt, Artificial Sequence
  Description of Artificial Sequence: Synthetic oligonucleotide
uuugaagaagaaagucucg

SEQ ID NO: 2543966 - RNA, 19 nt, Artificial Sequence
  Description of Artificial Sequence: Synthetic oligonucleotide
aagugaaaauccaugacag

SEQ ID NO: 2543967 - RNA, 19 nt, Artificial Sequence
  Description of Artificial Sequence: Synthetic oligonucleotide
aagucucgcagccuuacac

SEQ ID NO: 2543968 - RNA, 19 nt, Artificial Sequence
  Description of Artificial Sequence: Synthetic oligonucleotide
ugagaguuaugaaucgccg

SEQ ID NO: 2543969 - RNA, 19 nt, Artificial Sequence
  Description of Artificial Sequence: Synthetic oligonucleotide
uuugaacagauuuucaaaa

SEQ ID NO: 2543970 - RNA, 19 nt, Artificial Sequence
  Description of Artificial Sequence: Synthetic oligonucleotide
uaggaguugaugcacagca

SEQ ID NO: 2543971 - RNA, 19 nt, Artificial Sequence
  Description of Artificial Sequence: Synthetic oligonucleotide
uauagagaucuuccggugg

SEQ ID NO: 2543972 - RNA, 19 nt, Artificial Sequence
  Description of Artificial Sequence: Synthetic oligonucleotide
aagucguccaucaguaucc

SEQ ID NO: 2543973 - RNA, 19 nt, Artificial Sequence
  Description of Artificial Sequence: Synthetic oligonucleotide
uugaaguccgcuuugcaag

SEQ ID NO: 2543974 - RNA, 19 nt, Artificial Sequence
  Description of Artificial Sequence: Synthetic oligonucleotide
aaugcgaagauuuccuccu

SEQ ID NO: 2543975 - RNA, 19 nt, Artificial Sequence
  Description of Artificial Sequence: Synthetic oligonucleotide
agcuguuucagaaucaugg

SEQ ID NO: 2543976 - RNA, 19 nt, Artificial Sequence
  Description of Artificial Sequence: Synthetic oligonucleotide
uuuuccgauaaucuauccc

SEQ ID NO: 2543977 - RNA, 19 nt, Artificial Sequence
  Description of Artificial Sequence: Synthetic oligonucleotide
gaaauugugcguugaaaug

SEQ ID NO: 2543978 - RNA, 19 nt, Artificial Sequence
  Description of Artificial Sequence: Synthetic oligonucleotide
ugaaaugcgaagauuuccu

SEQ ID NO: 2543979 - RNA, 19 nt, Artificial Sequence
  Description of Artificial Sequence: Synthetic oligonucleotide
agaguuaugaaucgccgag

SEQ ID NO: 2543980 - RNA, 19 nt, Artificial Sequence
  Description of Artificial Sequence: Synthetic oligonucleotide
aucaaugagaguuaugaau

SEQ ID NO: 2543981 - RNA, 19 nt, Artificial Sequence
  Description of Artificial Sequence: Synthetic oligonucleotide
aaguuagcccucuggaguc

SEQ ID NO: 2543982 - RNA, 19 nt, Artificial Sequence
  Description of Artificial Sequence: Synthetic oligonucleotide
ugaugcacagcaaauuaug

SEQ ID NO: 2543983 - RNA, 19 nt, Artificial Sequence
  Description of Artificial Sequence: Synthetic oligonucleotide
uauugcaauauuccuucag

SEQ ID NO: 2543984 - RNA, 19 nt, Artificial Sequence
  Description of Artificial Sequence: Synthetic oligonucleotide
aaauucgucaaaacacagg

SEQ ID NO: 2543985 - RNA, 19 nt, Artificial Sequence
  Description of Artificial Sequence: Synthetic oligonucleotide
agugaaaauccaugacagc

SEQ ID NO: 2543986 - RNA, 19 nt, Artificial Sequence
  Description of Artificial Sequence: Synthetic oligonucleotide
auucuugugaaagugaccu

SEQ ID NO: 2543987 - RNA, 19 nt, Artificial Sequence
  Description of Artificial Sequence: Synthetic oligonucleotide
ucacuugugagguaguaga

SEQ ID NO: 2543988 - RNA, 19 nt, Artificial Sequence
  Description of Artificial Sequence: Synthetic oligonucleotide
ccuuacaccaguuagcugg

SEQ ID NO: 2543989 - RNA, 19 nt, Artificial Sequence
  Description of Artificial Sequence: Synthetic oligonucleotide
gacuuagucaugaaucccg

SEQ ID NO: 2543990 - RNA, 19 nt, Artificial Sequence
  Description of Artificial Sequence: Synthetic oligonucleotide
ucgucaaaacacaggagag

SEQ ID NO: 2543991 - RNA, 19 nt, Artificial Sequence
  Description of Artificial Sequence: Synthetic oligonucleotide
guuggauguugccacaacg

SEQ ID NO: 2543992 - RNA, 19 nt, Artificial Sequence
  Description of Artificial Sequence: Synthetic oligonucleotide
ugcaagaauaagcuugaga

SEQ ID NO: 2543993 - RNA, 19 nt, Artificial Sequence
  Description of Artificial Sequence: Synthetic oligonucleotide
ugugcguugaaaugcgaag

SEQ ID NO: 2543994 - RNA, 19 nt, Artificial Sequence
  Description of Artificial Sequence: Synthetic oligonucleotide
augagaguuaugaaucgcc

SEQ ID NO: 2543995 - RNA, 19 nt, Artificial Sequence
  Description of Artificial Sequence: Synthetic oligonucleotide
guuugcaucucugugaggc

SEQ ID NO: 2543996 - RNA, 19 nt, Artificial Sequence
  Description of Artificial Sequence: Synthetic oligonucleotide
ugagauaggaguugaugca

SEQ ID NO: 2543997 - RNA, 19 nt, Artificial Sequence
  Description of Artificial Sequence: Synthetic oligonucleotide
aauugugcguugaaaugcg

SEQ ID NO: 2543998 - RNA, 19 nt, Artificial Sequence
  Description of Artificial Sequence: Synthetic oligonucleotide
ucuaacuggaccguauugc

SEQ ID NO: 2543999 - RNA, 19 nt, Artificial Sequence
  Description of Artificial Sequence: Synthetic oligonucleotide
gugaaagugaccuuacuuc

SEQ ID NO: 2544000 - RNA, 19 nt, Artificial Sequence
  Description of Artificial Sequence: Synthetic oligonucleotide
cauagaaguuaucaaugag

SEQ ID NO: 2544001 - RNA, 19 nt, Artificial Sequence
  Description of Artificial Sequence: Synthetic oligonucleotide
uugaaaugcgaagauuucc

SEQ ID NO: 2544002 - RNA, 19 nt, Artificial Sequence
  Description of Artificial Sequence: Synthetic oligonucleotide
auagaaguuaucaaugaga

SEQ ID NO: 2544003 - RNA, 19 nt, Artificial Sequence
  Description of Artificial Sequence: Synthetic oligonucleotide
gagcuauugggucauauga

SEQ ID NO: 2544004 - RNA, 19 nt, Artificial Sequence
  Description of Artificial Sequence: Synthetic oligonucleotide
uuggauguugccacaacga

SEQ ID NO: 2544005 - RNA, 19 nt, Artificial Sequence
  Description of Artificial Sequence: Synthetic oligonucleotide
uuugcaagugaaaauccau

SEQ ID NO: 2544006 - RNA, 19 nt, Artificial Sequence
  Description of Artificial Sequence: Synthetic oligonucleotide
agaguuuuccugcaggagu

SEQ ID NO: 2544007 - RNA, 19 nt, Artificial Sequence
  Description of Artificial Sequence: Synthetic oligonucleotide
acaaaguuagcccucugga

SEQ ID NO: 2544008 - RNA, 19 nt, Artificial Sequence
  Description of Artificial Sequence: Synthetic oligonucleotide
ucauaugacuuagucauga

SEQ ID NO: 2544009 - RNA, 19 nt, Artificial Sequence
  Description of Artificial Sequence: Synthetic oligonucleotide
ugcaauauuccuucaggac

SEQ ID NO: 2544010 - RNA, 19 nt, Artificial Sequence
  Description of Artificial Sequence: Synthetic oligonucleotide
ugaagaagaaagucucgca

SEQ ID NO: 2544011 - RNA, 19 nt, Artificial Sequence
  Description of Artificial Sequence: Synthetic oligonucleotide
agugaccugaaauucguca

SEQ ID NO: 2544012 - RNA, 19 nt, Artificial Sequence
  Description of Artificial Sequence: Synthetic oligonucleotide
ugaaucgccgagcuugaag

SEQ ID NO: 2544013 - RNA, 19 nt, Artificial Sequence
  Description of Artificial Sequence: Synthetic oligonucleotide
gguaguagaguuuuccugc

SEQ ID NO: 2544014 - RNA, 19 nt, Artificial Sequence
  Description of Artificial Sequence: Synthetic oligonucleotide
gauguugccacaacgacga

SEQ ID NO: 2544015 - RNA, 19 nt, Artificial Sequence
  Description of Artificial Sequence: Synthetic oligonucleotide
agaaucauggcaucagcga

SEQ ID NO: 2544016 - RNA, 19 nt, Artificial Sequence
  Description of Artificial Sequence: Synthetic oligonucleotide
uuauagagaucuuccggug

SEQ ID NO: 2544017 - RNA, 19 nt, Artificial Sequence
  Description of Artificial Sequence: Synthetic oligonucleotide
auuaugcgcaccuuguagu

SEQ ID NO: 2544018 - RNA, 19 nt, Artificial Sequence
  Description of Artificial Sequence: Synthetic oligonucleotide
uccccuucgauccaguacu

SEQ ID NO: 2544019 - RNA, 19 nt, Artificial Sequence
  Description of Artificial Sequence: Synthetic oligonucleotide
aacuggaccguauugcaau

SEQ ID NO: 2544020 - RNA, 19 nt, Artificial Sequence
  Description of Artificial Sequence: Synthetic oligonucleotide
gaaauucgucaaaacacag

SEQ ID NO: 2544021 - RNA, 19 nt, Artificial Sequence
  Description of Artificial Sequence: Synthetic oligonucleotide
uucccuuuuccgauaaucu

SEQ ID NO: 2544022 - RNA, 19 nt, Artificial Sequence
  Description of Artificial Sequence: Synthetic oligonucleotide
aguuaugaaucgccgagcu

SEQ ID NO: 2544023 - RNA, 19 nt, Artificial Sequence
  Description of Artificial Sequence: Synthetic oligonucleotide
gauaggaguugaugcacag

SEQ ID NO: 2544024 - RNA, 19 nt, Artificial Sequence
  Description of Artificial Sequence: Synthetic oligonucleotide
gagugaguucccuuuuccg

SEQ ID NO: 2544025 - RNA, 19 nt, Artificial Sequence
  Description of Artificial Sequence: Synthetic oligonucleotide
cuuacuucuggcuucuguc

SEQ ID NO: 2544026 - RNA, 19 nt, Artificial Sequence
  Description of Artificial Sequence: Synthetic oligonucleotide
aaauccaugacagccucca

SEQ ID NO: 2544027 - RNA, 19 nt, Artificial Sequence
  Description of Artificial Sequence: Synthetic oligonucleotide
augguacaaaguuagcccu

SEQ ID NO: 2544028 - RNA, 19 nt, Artificial Sequence
  Description of Artificial Sequence: Synthetic oligonucleotide
guugccacaacgacgaccc

SEQ ID NO: 2544029 - RNA, 19 nt, Artificial Sequence
  Description of Artificial Sequence: Synthetic oligonucleotide
auuccuucaggacagcuau

SEQ ID NO: 2544030 - RNA, 19 nt, Artificial Sequence
  Description of Artificial Sequence: Synthetic oligonucleotide
ugggucauaugacuuaguc

SEQ ID NO: 2544031 - RNA, 19 nt, Artificial Sequence
  Description of Artificial Sequence: Synthetic oligonucleotide
uucgauccaguacugcuca

SEQ ID NO: 2544032 - RNA, 19 nt, Artificial Sequence
  Description of Artificial Sequence: Synthetic oligonucleotide
agguaguagaguuuuccug

SEQ ID NO: 2544033 - RNA, 19 nt, Artificial Sequence
  Description of Artificial Sequence: Synthetic oligonucleotide
ucagugaccugaaauucgu

SEQ ID NO: 2544034 - RNA, 19 nt, Artificial Sequence
  Description of Artificial Sequence: Synthetic oligonucleotide
cuccaacucacugucaugg

SEQ ID NO: 2544035 - RNA, 19 nt, Artificial Sequence
  Description of Artificial Sequence: Synthetic oligonucleotide
aaaauccaugacagccucc

SEQ ID NO: 2544036 - RNA, 19 nt, Artificial Sequence
  Description of Artificial Sequence: Synthetic oligonucleotide
caaaguuagcccucuggag

SEQ ID NO: 2544037 - RNA, 19 nt, Artificial Sequence
  Description of Artificial Sequence: Synthetic oligonucleotide
ccagaaucuaacuggaccg

SEQ ID NO: 2544038 - RNA, 19 nt, Artificial Sequence
  Description of Artificial Sequence: Synthetic oligonucleotide
uucagaaucauggcaucag

SEQ ID NO: 2544039 - RNA, 19 nt, Artificial Sequence
  Description of Artificial Sequence: Synthetic oligonucleotide
acagcaaauuaugcgcacc

SEQ ID NO: 2544040 - RNA, 19 nt, Artificial Sequence
  Description of Artificial Sequence: Synthetic oligonucleotide
uuccgauaaucuaucccag

SEQ ID NO: 2544041 - RNA, 19 nt, Artificial Sequence
  Description of Artificial Sequence: Synthetic oligonucleotide
gaccguauugcaauauucc

SEQ ID NO: 2544042 - RNA, 19 nt, Artificial Sequence
  Description of Artificial Sequence: Synthetic oligonucleotide
uuugcaucucugugaggcg

SEQ ID NO: 2544043 - RNA, 19 nt, Artificial Sequence
  Description of Artificial Sequence: Synthetic oligonucleotide
aaucgccgagcuugaaguc

SEQ ID NO: 2544044 - RNA, 19 nt, Artificial Sequence
  Description of Artificial Sequence: Synthetic oligonucleotide
aucaguauccugcuuugcu

SEQ ID NO: 2544045 - RNA, 19 nt, Artificial Sequence
  Description of Artificial Sequence: Synthetic oligonucleotide
ggcuaugggagcuauuggg

SEQ ID NO: 2544046 - RNA, 19 nt, Artificial Sequence
  Description of Artificial Sequence: Synthetic oligonucleotide
uugaugcacagcaaauuau

SEQ ID NO: 2544047 - RNA, 19 nt, Artificial Sequence
  Description of Artificial Sequence: Synthetic oligonucleotide
ucuuggcugaucuccucgg

SEQ ID NO: 2544048 - RNA, 19 nt, Artificial Sequence
  Description of Artificial Sequence: Synthetic oligonucleotide
uaaucuaucccagaaucua

SEQ ID NO: 2544049 - RNA, 19 nt, Artificial Sequence
  Description of Artificial Sequence: Synthetic oligonucleotide
auagagaucuuccgguggu

SEQ ID NO: 2544050 - RNA, 19 nt, Artificial Sequence
  Description of Artificial Sequence: Synthetic oligonucleotide
ucuaucccagaaucuaacu

SEQ ID NO: 2544051 - RNA, 19 nt, Artificial Sequence
  Description of Artificial Sequence: Synthetic oligonucleotide
gcaagaauaagcuugagau

SEQ ID NO: 2544052 - RNA, 19 nt, Artificial Sequence
  Description of Artificial Sequence: Synthetic oligonucleotide
aauccaugacagccuccac

SEQ ID NO: 2544053 - RNA, 19 nt, Artificial Sequence
  Description of Artificial Sequence: Synthetic oligonucleotide
accguauugcaauauuccu

SEQ ID NO: 2544054 - RNA, 19 nt, Artificial Sequence
  Description of Artificial Sequence: Synthetic oligonucleotide
ucaguauccugcuuugcuc

SEQ ID NO: 2544055 - RNA, 19 nt, Artificial Sequence
  Description of Artificial Sequence: Synthetic oligonucleotide
ucggcuaugggagcuauug

SEQ ID NO: 2544056 - RNA, 19 nt, Artificial Sequence
  Description of Artificial Sequence: Synthetic oligonucleotide
aaauuaugcgcaccuugua

SEQ ID NO: 2544057 - RNA, 19 nt, Artificial Sequence
  Description of Artificial Sequence: Synthetic oligonucleotide
cuauaaaugguacaaaguu

SEQ ID NO: 2544058 - RNA, 19 nt, Artificial Sequence
  Description of Artificial Sequence: Synthetic oligonucleotide
uccaugacagccuccacau

SEQ ID NO: 2544059 - RNA, 19 nt, Artificial Sequence
  Description of Artificial Sequence: Synthetic oligonucleotide
aucuaacuggaccguauug

SEQ ID NO: 2544060 - RNA, 19 nt, Artificial Sequence
  Description of Artificial Sequence: Synthetic oligonucleotide
aaucuaacuggaccguauu

SEQ ID NO: 2544061 - RNA, 19 nt, Artificial Sequence
  Description of Artificial Sequence: Synthetic oligonucleotide
agcuauugggucauaugac

SEQ ID NO: 2544062 - RNA, 19 nt, Artificial Sequence
  Description of Artificial Sequence: Synthetic oligonucleotide
auaggaguugaugcacagc

SEQ ID NO: 2544063 - RNA, 19 nt, Artificial Sequence
  Description of Artificial Sequence: Synthetic oligonucleotide
cuuuuccgauaaucuaucc

SEQ ID NO: 2544064 - RNA, 19 nt, Artificial Sequence
  Description of Artificial Sequence: Synthetic oligonucleotide
caguuugcaucucugugag

SEQ ID NO: 2544065 - RNA, 19 nt, Artificial Sequence
  Description of Artificial Sequence: Synthetic oligonucleotide
uugcaucucugugaggcgg

SEQ ID NO: 2544066 - RNA, 19 nt, Artificial Sequence
  Description of Artificial Sequence: Synthetic oligonucleotide
aucgccgagcuugaagucc

SEQ ID NO: 2544067 - RNA, 19 nt, Artificial Sequence
  Description of Artificial Sequence: Synthetic oligonucleotide
ggucauaugacuuagucau

SEQ ID NO: 2544068 - RNA, 19 nt, Artificial Sequence
  Description of Artificial Sequence: Synthetic oligonucleotide
augucagugaccugaaauu

SEQ ID NO: 2544069 - RNA, 19 nt, Artificial Sequence
  Description of Artificial Sequence: Synthetic oligonucleotide
ucgccgagcuugaaguccg

SEQ ID NO: 2544070 - RNA, 19 nt, Artificial Sequence
  Description of Artificial Sequence: Synthetic oligonucleotide
uccgcuuugcaagugaaaa

SEQ ID NO: 2544071 - RNA, 19 nt, Artificial Sequence
  Description of Artificial Sequence: Synthetic oligonucleotide
acaucagccucacuuguga

SEQ ID NO: 2544072 - RNA, 19 nt, Artificial Sequence
  Description of Artificial Sequence: Synthetic oligonucleotide
caagucguccaucaguauc

SEQ ID NO: 2544073 - RNA, 19 nt, Artificial Sequence
  Description of Artificial Sequence: Synthetic oligonucleotide
aucuaucccagaaucuaac

SEQ ID NO: 2544074 - RNA, 19 nt, Artificial Sequence
  Description of Artificial Sequence: Synthetic oligonucleotide
gucagugaccugaaauucg

SEQ ID NO: 2544075 - RNA, 19 nt, Artificial Sequence
  Description of Artificial Sequence: Synthetic oligonucleotide
gaaaugcgaagauuuccuc

SEQ ID NO: 2544076 - RNA, 19 nt, Artificial Sequence
  Description of Artificial Sequence: Synthetic oligonucleotide
gaugcaagaauaagcuuga

SEQ ID NO: 2544077 - RNA, 19 nt, Artificial Sequence
  Description of Artificial Sequence: Synthetic oligonucleotide
aaacacaggagagaagcuu

SEQ ID NO: 2544078 - RNA, 19 nt, Artificial Sequence
  Description of Artificial Sequence: Synthetic oligonucleotide
ugacuuagucaugaauccc

SEQ ID NO: 2544079 - RNA, 19 nt, Artificial Sequence
  Description of Artificial Sequence: Synthetic oligonucleotide
uaugaaucgccgagcuuga

SEQ ID NO: 2544080 - RNA, 19 nt, Artificial Sequence
  Description of Artificial Sequence: Synthetic oligonucleotide
gaguuuuccugcaggagug

SEQ ID NO: 2544081 - RNA, 19 nt, Artificial Sequence
  Description of Artificial Sequence: Synthetic oligonucleotide
uugugcguugaaaugcgaa

SEQ ID NO: 2544082 - RNA, 19 nt, Artificial Sequence
  Description of Artificial Sequence: Synthetic oligonucleotide
uguugccacaacgacgacc

SEQ ID NO: 2544083 - RNA, 19 nt, Artificial Sequence
  Description of Artificial Sequence: Synthetic oligonucleotide
gucuguuggauguugccac

SEQ ID NO: 2544084 - RNA, 19 nt, Artificial Sequence
  Description of Artificial Sequence: Synthetic oligonucleotide
cauggagagcccugcagag

SEQ ID NO: 2544085 - RNA, 19 nt, Artificial Sequence
  Description of Artificial Sequence: Synthetic oligonucleotide
gaaucgccgagcuugaagu

SEQ ID NO: 2544086 - RNA, 19 nt, Artificial Sequence
  Description of Artificial Sequence: Synthetic oligonucleotide
uuucagaaucauggcauca

SEQ ID NO: 2544087 - RNA, 19 nt, Artificial Sequence
  Description of Artificial Sequence: Synthetic oligonucleotide
gcaaauuaugcgcaccuug

SEQ ID NO: 2544088 - RNA, 19 nt, Artificial Sequence
  Description of Artificial Sequence: Synthetic oligonucleotide
aacucacugucauggugcu

SEQ ID NO: 2544089 - RNA, 19 nt, Artificial Sequence
  Description of Artificial Sequence: Synthetic oligonucleotide
guugaugcacagcaaauua

SEQ ID NO: 2544090 - RNA, 19 nt, Artificial Sequence
  Description of Artificial Sequence: Synthetic oligonucleotide
ugcguugaaaugcgaagau

SEQ ID NO: 2544091 - RNA, 19 nt, Artificial Sequence
  Description of Artificial Sequence: Synthetic oligonucleotide
cuuugcaagugaaaaucca

SEQ ID NO: 2544092 - RNA, 19 nt, Artificial Sequence
  Description of Artificial Sequence: Synthetic oligonucleotide
aaaacacaggagagaagcu

SEQ ID NO: 2544093 - RNA, 19 nt, Artificial Sequence
  Description of Artificial Sequence: Synthetic oligonucleotide
acaacgacgaccccauuuu

SEQ ID NO: 2544094 - RNA, 19 nt, Artificial Sequence
  Description of Artificial Sequence: Synthetic oligonucleotide
agagaagcuucuuggcuga

SEQ ID NO: 2544095 - RNA, 19 nt, Artificial Sequence
  Description of Artificial Sequence: Synthetic oligonucleotide
ugcuccaacucacugucau

SEQ ID NO: 2544096 - RNA, 19 nt, Artificial Sequence
  Description of Artificial Sequence: Synthetic oligonucleotide
cuaugggagcuauuggguc

SEQ ID NO: 2544097 - RNA, 19 nt, Artificial Sequence
  Description of Artificial Sequence: Synthetic oligonucleotide
uagaguuuuccugcaggag

SEQ ID NO: 2544098 - RNA, 19 nt, Artificial Sequence
  Description of Artificial Sequence: Synthetic oligonucleotide
ugaccugaaauucgucaaa

SEQ ID NO: 2544099 - RNA, 19 nt, Artificial Sequence
  Description of Artificial Sequence: Synthetic oligonucleotide
uuuccugcaggagugaguu

SEQ ID NO: 2544100 - RNA, 19 nt, Artificial Sequence
  Description of Artificial Sequence: Synthetic oligonucleotide
aaguccgcuuugcaaguga

SEQ ID NO: 2544101 - RNA, 19 nt, Artificial Sequence
  Description of Artificial Sequence: Synthetic oligonucleotide
gaaagugaccuuacuucug

SEQ ID NO: 2544102 - RNA, 19 nt, Artificial Sequence
  Description of Artificial Sequence: Synthetic oligonucleotide
auaaucuaucccagaaucu

SEQ ID NO: 2544103 - RNA, 19 nt, Artificial Sequence
  Description of Artificial Sequence: Synthetic oligonucleotide
uuaugcgcaccuuguaguc

SEQ ID NO: 2544104 - RNA, 19 nt, Artificial Sequence
  Description of Artificial Sequence: Synthetic oligonucleotide
cuucgauccaguacugcuc

SEQ ID NO: 2544105 - RNA, 19 nt, Artificial Sequence
  Description of Artificial Sequence: Synthetic oligonucleotide
aagcuugagauaggaguug

SEQ ID NO: 2544106 - RNA, 19 nt, Artificial Sequence
  Description of Artificial Sequence: Synthetic oligonucleotide
aaucuaucccagaaucuaa

SEQ ID NO: 2544107 - RNA, 19 nt, Artificial Sequence
  Description of Artificial Sequence: Synthetic oligonucleotide
cacuugugagguaguagag

SEQ ID NO: 2544108 - RNA, 19 nt, Artificial Sequence
  Description of Artificial Sequence: Synthetic oligonucleotide
uccgauaaucuaucccaga

SEQ ID NO: 2544109 - RNA, 19 nt, Artificial Sequence
  Description of Artificial Sequence: Synthetic oligonucleotide
cuaacuggaccguauugca

SEQ ID NO: 2544110 - RNA, 19 nt, Artificial Sequence
  Description of Artificial Sequence: Synthetic oligonucleotide
cagccuuacaccaguuagc

SEQ ID NO: 2544111 - RNA, 19 nt, Artificial Sequence
  Description of Artificial Sequence: Synthetic oligonucleotide
cccagaaucuaacuggacc

SEQ ID NO: 2544112 - RNA, 19 nt, Artificial Sequence
  Description of Artificial Sequence: Synthetic oligonucleotide
aaagucucgcagccuuaca

SEQ ID NO: 2544113 - RNA, 19 nt, Artificial Sequence
  Description of Artificial Sequence: Synthetic oligonucleotide
ggauguugccacaacgacg

SEQ ID NO: 2544114 - RNA, 19 nt, Artificial Sequence
  Description of Artificial Sequence: Synthetic oligonucleotide
agcuugaaguccgcuuugc

SEQ ID NO: 2544115 - RNA, 19 nt, Artificial Sequence
  Description of Artificial Sequence: Synthetic oligonucleotide
gaguuaugaaucgccgagc

SEQ ID NO: 2544116 - RNA, 19 nt, Artificial Sequence
  Description of Artificial Sequence: Synthetic oligonucleotide
uccuucaggacagcuauaa

SEQ ID NO: 2544117 - RNA, 19 nt, Artificial Sequence
  Description of Artificial Sequence: Synthetic oligonucleotide
uggucuguuggauguugcc

SEQ ID NO: 2544118 - RNA, 19 nt, Artificial Sequence
  Description of Artificial Sequence: Synthetic oligonucleotide
uaacuggaccguauugcaa

SEQ ID NO: 2544119 - RNA, 19 nt, Artificial Sequence
  Description of Artificial Sequence: Synthetic oligonucleotide
uguuggauguugccacaac

SEQ ID NO: 2544120 - RNA, 19 nt, Artificial Sequence
  Description of Artificial Sequence: Synthetic oligonucleotide
uacaccaguuagcugguuu

SEQ ID NO: 2544121 - RNA, 19 nt, Artificial Sequence
  Description of Artificial Sequence: Synthetic oligonucleotide
uggcucagccccaagucgu

SEQ ID NO: 2544122 - RNA, 19 nt, Artificial Sequence
  Description of Artificial Sequence: Synthetic oligonucleotide
auggcaucagcgaugucag

SEQ ID NO: 2544123 - RNA, 19 nt, Artificial Sequence
  Description of Artificial Sequence: Synthetic oligonucleotide
guuucagaaucauggcauc

SEQ ID NO: 2544124 - RNA, 19 nt, Artificial Sequence
  Description of Artificial Sequence: Synthetic oligonucleotide
ccugaaauucgucaaaaca

SEQ ID NO: 2544125 - RNA, 19 nt, Artificial Sequence
  Description of Artificial Sequence: Synthetic oligonucleotide
ugguacaaaguuagcccuc

SEQ ID NO: 2544126 - RNA, 19 nt, Artificial Sequence
  Description of Artificial Sequence: Synthetic oligonucleotide
agccuuacaccaguuagcu

SEQ ID NO: 2544127 - RNA, 19 nt, Artificial Sequence
  Description of Artificial Sequence: Synthetic oligonucleotide
aucagcgaugucagugacc

SEQ ID NO: 2544128 - RNA, 19 nt, Artificial Sequence
  Description of Artificial Sequence: Synthetic oligonucleotide
aguuaucaaugagaguuau

SEQ ID NO: 2544129 - RNA, 19 nt, Artificial Sequence
  Description of Artificial Sequence: Synthetic oligonucleotide
gaaucauggcaucagcgau

SEQ ID NO: 2544130 - RNA, 19 nt, Artificial Sequence
  Description of Artificial Sequence: Synthetic oligonucleotide
auucgucaaaacacaggag

SEQ ID NO: 2544131 - RNA, 19 nt, Artificial Sequence
  Description of Artificial Sequence: Synthetic oligonucleotide
guugaaaugcgaagauuuc

SEQ ID NO: 2544132 - RNA, 19 nt, Artificial Sequence
  Description of Artificial Sequence: Synthetic oligonucleotide
guuaucaaugagaguuaug

SEQ ID NO: 2544133 - RNA, 19 nt, Artificial Sequence
  Description of Artificial Sequence: Synthetic oligonucleotide
gaaagucucgcagccuuac

SEQ ID NO: 2544134 - RNA, 19 nt, Artificial Sequence
  Description of Artificial Sequence: Synthetic oligonucleotide
aguuagcccucuggagucc

SEQ ID NO: 2544135 - RNA, 19 nt, Artificial Sequence
  Description of Artificial Sequence: Synthetic oligonucleotide
cacagcaaauuaugcgcac

SEQ ID NO: 2544136 - RNA, 19 nt, Artificial Sequence
  Description of Artificial Sequence: Synthetic oligonucleotide
ggaaauugugcguugaaau

SEQ ID NO: 2544137 - RNA, 19 nt, Artificial Sequence
  Description of Artificial Sequence: Synthetic oligonucleotide
guaguagaguuuuccugca

SEQ ID NO: 2544138 - RNA, 19 nt, Artificial Sequence
  Description of Artificial Sequence: Synthetic oligonucleotide
ggagugaguucccuuuucc

SEQ ID NO: 2544139 - RNA, 19 nt, Artificial Sequence
  Description of Artificial Sequence: Synthetic oligonucleotide
aaguuaucaaugagaguua

SEQ ID NO: 2544140 - RNA, 19 nt, Artificial Sequence
  Description of Artificial Sequence: Synthetic oligonucleotide
caaauuaugcgcaccuugu

SEQ ID NO: 2544141 - RNA, 19 nt, Artificial Sequence
  Description of Artificial Sequence: Synthetic oligonucleotide
gugaccugaaauucgucaa

SEQ ID NO: 2544142 - RNA, 19 nt, Artificial Sequence
  Description of Artificial Sequence: Synthetic oligonucleotide
aguugaugcacagcaaauu

SEQ ID NO: 2544143 - RNA, 19 nt, Artificial Sequence
  Description of Artificial Sequence: Synthetic oligonucleotide
ugccacaacgacgacccca

SEQ ID NO: 2544144 - RNA, 19 nt, Artificial Sequence
  Description of Artificial Sequence: Synthetic oligonucleotide
caagaauaagcuugagaua

SEQ ID NO: 2544145 - RNA, 19 nt, Artificial Sequence
  Description of Artificial Sequence: Synthetic oligonucleotide
augcgaagauuuccuccuc

SEQ ID NO: 2544146 - RNA, 19 nt, Artificial Sequence
  Description of Artificial Sequence: Synthetic oligonucleotide
agaagcuucuuggcugauc

SEQ ID NO: 2544147 - RNA, 19 nt, Artificial Sequence
  Description of Artificial Sequence: Synthetic oligonucleotide
ggagcuauugggucauaug

SEQ ID NO: 2544148 - RNA, 19 nt, Artificial Sequence
  Description of Artificial Sequence: Synthetic oligonucleotide
uaugcgcaccuuguaguca

SEQ ID NO: 2544149 - RNA, 19 nt, Artificial Sequence
  Description of Artificial Sequence: Synthetic oligonucleotide
ggcaucagcgaugucagug

SEQ ID NO: 2544150 - RNA, 19 nt, Artificial Sequence
  Description of Artificial Sequence: Synthetic oligonucleotide
gagguaguagaguuuuccu

SEQ ID NO: 2544151 - RNA, 19 nt, Artificial Sequence
  Description of Artificial Sequence: Synthetic oligonucleotide
uggaccguauugcaauauu

SEQ ID NO: 2544152 - RNA, 19 nt, Artificial Sequence
  Description of Artificial Sequence: Synthetic oligonucleotide
gggucauaugacuuaguca

SEQ ID NO: 2544153 - RNA, 19 nt, Artificial Sequence
  Description of Artificial Sequence: Synthetic oligonucleotide
aguauccugcuuugcucca

SEQ ID NO: 2544154 - RNA, 19 nt, Artificial Sequence
  Description of Artificial Sequence: Synthetic oligonucleotide
cuuggcugaucuccucggc

SEQ ID NO: 2544155 - RNA, 19 nt, Artificial Sequence
  Description of Artificial Sequence: Synthetic oligonucleotide
gugcugaugcaagaauaag

SEQ ID NO: 2544156 - RNA, 19 nt, Artificial Sequence
  Description of Artificial Sequence: Synthetic oligonucleotide
agccccaagucguccauca

SEQ ID NO: 2544157 - RNA, 19 nt, Artificial Sequence
  Description of Artificial Sequence: Synthetic oligonucleotide
agagaucuuccgguggucu

SEQ ID NO: 2544158 - RNA, 19 nt, Artificial Sequence
  Description of Artificial Sequence: Synthetic oligonucleotide
auauuccuucaggacagcu

SEQ ID NO: 2544159 - RNA, 19 nt, Artificial Sequence
  Description of Artificial Sequence: Synthetic oligonucleotide
cuugugagguaguagaguu

SEQ ID NO: 2544160 - RNA, 19 nt, Artificial Sequence
  Description of Artificial Sequence: Synthetic oligonucleotide
gucucgcagccuuacacca

SEQ ID NO: 2544161 - RNA, 19 nt, Artificial Sequence
  Description of Artificial Sequence: Synthetic oligonucleotide
gcaccuuguagucauagaa

SEQ ID NO: 2544162 - RNA, 19 nt, Artificial Sequence
  Description of Artificial Sequence: Synthetic oligonucleotide
uggcugaucuccucggcua

SEQ ID NO: 2544163 - RNA, 19 nt, Artificial Sequence
  Description of Artificial Sequence: Synthetic oligonucleotide
cagugaacauggagagccc

SEQ ID NO: 2544164 - RNA, 19 nt, Artificial Sequence
  Description of Artificial Sequence: Synthetic oligonucleotide
agauaggaguugaugcaca

SEQ ID NO: 2544165 - RNA, 19 nt, Artificial Sequence
  Description of Artificial Sequence: Synthetic oligonucleotide
uugggucauaugacuuagu

SEQ ID NO: 2544166 - RNA, 19 nt, Artificial Sequence
  Description of Artificial Sequence: Synthetic oligonucleotide
augcgcaccuuguagucau

SEQ ID NO: 2544167 - RNA, 19 nt, Artificial Sequence
  Description of Artificial Sequence: Synthetic oligonucleotide
gaccugaaauucgucaaaa

SEQ ID NO: 2544168 - RNA, 19 nt, Artificial Sequence
  Description of Artificial Sequence: Synthetic oligonucleotide
caucagcgaugucagugac

SEQ ID NO: 2544169 - RNA, 19 nt, Artificial Sequence
  Description of Artificial Sequence: Synthetic oligonucleotide
gugcguugaaaugcgaaga

SEQ ID NO: 2544170 - RNA, 19 nt, Artificial Sequence
  Description of Artificial Sequence: Synthetic oligonucleotide
guccccuucgauccaguac

SEQ ID NO: 2544171 - RNA, 19 nt, Artificial Sequence
  Description of Artificial Sequence: Synthetic oligonucleotide
ugaguucccuuuuccgaua

SEQ ID NO: 2544172 - RNA, 19 nt, Artificial Sequence
  Description of Artificial Sequence: Synthetic oligonucleotide
gcugaugcaagaauaagcu

SEQ ID NO: 2544173 - RNA, 19 nt, Artificial Sequence
  Description of Artificial Sequence: Synthetic oligonucleotide
guauugcaauauuccuuca

SEQ ID NO: 2544174 - RNA, 19 nt, Artificial Sequence
  Description of Artificial Sequence: Synthetic oligonucleotide
gcuuugcuccaacucacug

SEQ ID NO: 2544175 - RNA, 19 nt, Artificial Sequence
  Description of Artificial Sequence: Synthetic oligonucleotide
ucgauccaguacugcucag

SEQ ID NO: 2544176 - RNA, 19 nt, Artificial Sequence
  Description of Artificial Sequence: Synthetic oligonucleotide
guacaaaguuagcccucug

SEQ ID NO: 2544177 - RNA, 19 nt, Artificial Sequence
  Description of Artificial Sequence: Synthetic oligonucleotide
gcuauugggucauaugacu

SEQ ID NO: 2544178 - RNA, 19 nt, Artificial Sequence
  Description of Artificial Sequence: Synthetic oligonucleotide
gaaguccgcuuugcaagug

SEQ ID NO: 2544179 - RNA, 19 nt, Artificial Sequence
  Description of Artificial Sequence: Synthetic oligonucleotide
uucuugugaaagugaccuu

SEQ ID NO: 2544180 - RNA, 19 nt, Artificial Sequence
  Description of Artificial Sequence: Synthetic oligonucleotide
gauccaguacugcucaguu

SEQ ID NO: 2544181 - RNA, 19 nt, Artificial Sequence
  Description of Artificial Sequence: Synthetic oligonucleotide
gaguucccuuuuccgauaa

SEQ ID NO: 2544182 - RNA, 19 nt, Artificial Sequence
  Description of Artificial Sequence: Synthetic oligonucleotide
auguugccacaacgacgac

SEQ ID NO: 2544183 - RNA, 19 nt, Artificial Sequence
  Description of Artificial Sequence: Synthetic oligonucleotide
agaaucuaacuggaccgua

SEQ ID NO: 2544184 - RNA, 19 nt, Artificial Sequence
  Description of Artificial Sequence: Synthetic oligonucleotide
ggaccguauugcaauauuc

SEQ ID NO: 2544185 - RNA, 19 nt, Artificial Sequence
  Description of Artificial Sequence: Synthetic oligonucleotide
acuggaccguauugcaaua

SEQ ID NO: 2544186 - RNA, 19 nt, Artificial Sequence
  Description of Artificial Sequence: Synthetic oligonucleotide
gugaggcgggaaauugugc

SEQ ID NO: 2544187 - RNA, 19 nt, Artificial Sequence
  Description of Artificial Sequence: Synthetic oligonucleotide
auccaguacugcucaguuu

SEQ ID NO: 2544188 - RNA, 19 nt, Artificial Sequence
  Description of Artificial Sequence: Synthetic oligonucleotide
gcaucagcgaugucaguga

SEQ ID NO: 2544189 - RNA, 19 nt, Artificial Sequence
  Description of Artificial Sequence: Synthetic oligonucleotide
guggucuguuggauguugc

SEQ ID NO: 2544190 - RNA, 19 nt, Artificial Sequence
  Description of Artificial Sequence: Synthetic oligonucleotide
caggacagcuauaaauggu

SEQ ID NO: 2544191 - RNA, 19 nt, Artificial Sequence
  Description of Artificial Sequence: Synthetic oligonucleotide
ggagagaagcuucuuggcu

SEQ ID NO: 2544192 - RNA, 19 nt, Artificial Sequence
  Description of Artificial Sequence: Synthetic oligonucleotide
gugaccuuacuucuggcuu

SEQ ID NO: 2544193 - RNA, 19 nt, Artificial Sequence
  Description of Artificial Sequence: Synthetic oligonucleotide
cagugaccugaaauucguc

SEQ ID NO: 2544194 - RNA, 19 nt, Artificial Sequence
  Description of Artificial Sequence: Synthetic oligonucleotide
uggcuucuguccccuucga

SEQ ID NO: 2544195 - RNA, 19 nt, Artificial Sequence
  Description of Artificial Sequence: Synthetic oligonucleotide
cuauugggucauaugacuu

SEQ ID NO: 2544196 - RNA, 19 nt, Artificial Sequence
  Description of Artificial Sequence: Synthetic oligonucleotide
ggacagcuauaaaugguac

SEQ ID NO: 2544197 - RNA, 19 nt, Artificial Sequence
  Description of Artificial Sequence: Synthetic oligonucleotide
cuuccgguggucuguugga

SEQ ID NO: 2544198 - RNA, 19 nt, Artificial Sequence
  Description of Artificial Sequence: Synthetic oligonucleotide
gaaucuaacuggaccguau

SEQ ID NO: 2544199 - RNA, 19 nt, Artificial Sequence
  Description of Artificial Sequence: Synthetic oligonucleotide
aguuuuccugcaggaguga

SEQ ID NO: 2544200 - RNA, 19 nt, Artificial Sequence
  Description of Artificial Sequence: Synthetic oligonucleotide
cgaagauuuccuccucucc

SEQ ID NO: 2544201 - RNA, 19 nt, Artificial Sequence
  Description of Artificial Sequence: Synthetic oligonucleotide
uagagaucuuccggugguc

SEQ ID NO: 2544202 - RNA, 19 nt, Artificial Sequence
  Description of Artificial Sequence: Synthetic oligonucleotide
cagcaaauuaugcgcaccu

SEQ ID NO: 2544203 - RNA, 19 nt, Artificial Sequence
  Description of Artificial Sequence: Synthetic oligonucleotide
cauggugcugaugcaagaa

SEQ ID NO: 2544204 - RNA, 19 nt, Artificial Sequence
  Description of Artificial Sequence: Synthetic oligonucleotide
ggugcugaugcaagaauaa

SEQ ID NO: 2544205 - RNA, 19 nt, Artificial Sequence
  Description of Artificial Sequence: Synthetic oligonucleotide
cgcuuugcaagugaaaauc

SEQ ID NO: 2544206 - RNA, 19 nt, Artificial Sequence
  Description of Artificial Sequence: Synthetic oligonucleotide
auugugcguugaaaugcga

SEQ ID NO: 2544207 - RNA, 19 nt, Artificial Sequence
  Description of Artificial Sequence: Synthetic oligonucleotide
gucguccaucaguauccug

SEQ ID NO: 2544208 - RNA, 19 nt, Artificial Sequence
  Description of Artificial Sequence: Synthetic oligonucleotide
uguccccuucgauccagua

SEQ ID NO: 2544209 - RNA, 19 nt, Artificial Sequence
  Description of Artificial Sequence: Synthetic oligonucleotide
agcaaauuaugcgcaccuu

SEQ ID NO: 2544210 - RNA, 19 nt, Artificial Sequence
  Description of Artificial Sequence: Synthetic oligonucleotide
gaguugaugcacagcaaau

SEQ ID NO: 2544211 - RNA, 19 nt, Artificial Sequence
  Description of Artificial Sequence: Synthetic oligonucleotide
ccgauaaucuaucccagaa

SEQ ID NO: 2544212 - RNA, 19 nt, Artificial Sequence
  Description of Artificial Sequence: Synthetic oligonucleotide
gaagaaagucucgcagccu

SEQ ID NO: 2544213 - RNA, 19 nt, Artificial Sequence
  Description of Artificial Sequence: Synthetic oligonucleotide
gcgaagauuuccuccucuc

SEQ ID NO: 2544214 - RNA, 19 nt, Artificial Sequence
  Description of Artificial Sequence: Synthetic oligonucleotide
uugccacaacgacgacccc

SEQ ID NO: 2544215 - RNA, 19 nt, Artificial Sequence
  Description of Artificial Sequence: Synthetic oligonucleotide
gggaaauugugcguugaaa

SEQ ID NO: 2544216 - RNA, 19 nt, Artificial Sequence
  Description of Artificial Sequence: Synthetic oligonucleotide
aucuuccgguggucuguug

SEQ ID NO: 2544217 - RNA, 19 nt, Artificial Sequence
  Description of Artificial Sequence: Synthetic oligonucleotide
agucguccaucaguauccu

SEQ ID NO: 2544218 - RNA, 19 nt, Artificial Sequence
  Description of Artificial Sequence: Synthetic oligonucleotide
aguucccuuuuccgauaau

SEQ ID NO: 2544219 - RNA, 19 nt, Artificial Sequence
  Description of Artificial Sequence: Synthetic oligonucleotide
ccaguacugcucaguuugc

SEQ ID NO: 2544220 - RNA, 19 nt, Artificial Sequence
  Description of Artificial Sequence: Synthetic oligonucleotide
ggcgggaaauugugcguug

SEQ ID NO: 2544221 - RNA, 19 nt, Artificial Sequence
  Description of Artificial Sequence: Synthetic oligonucleotide
ccuggcucagccccaaguc

SEQ ID NO: 2544222 - RNA, 19 nt, Artificial Sequence
  Description of Artificial Sequence: Synthetic oligonucleotide
aguccgcuuugcaagugaa

SEQ ID NO: 2544223 - RNA, 19 nt, Artificial Sequence
  Description of Artificial Sequence: Synthetic oligonucleotide
aggcgggaaauugugcguu

SEQ ID NO: 2544224 - RNA, 19 nt, Artificial Sequence
  Description of Artificial Sequence: Synthetic oligonucleotide
uuccgguggucuguuggau

SEQ ID NO: 2544225 - RNA, 19 nt, Artificial Sequence
  Description of Artificial Sequence: Synthetic oligonucleotide
aggaguugaugcacagcaa

SEQ ID NO: 2544226 - RNA, 19 nt, Artificial Sequence
  Description of Artificial Sequence: Synthetic oligonucleotide
caguacugcucaguuugca

SEQ ID NO: 2544227 - RNA, 19 nt, Artificial Sequence
  Description of Artificial Sequence: Synthetic oligonucleotide
cacaacgacgaccccauuu

SEQ ID NO: 2544228 - RNA, 19 nt, Artificial Sequence
  Description of Artificial Sequence: Synthetic oligonucleotide
guuagcccucuggagucca

SEQ ID NO: 2544229 - RNA, 19 nt, Artificial Sequence
  Description of Artificial Sequence: Synthetic oligonucleotide
acucacugucauggugcug

SEQ ID NO: 2544230 - RNA, 19 nt, Artificial Sequence
  Description of Artificial Sequence: Synthetic oligonucleotide
cccaagucguccaucagua

SEQ ID NO: 2544231 - RNA, 19 nt, Artificial Sequence
  Description of Artificial Sequence: Synthetic oligonucleotide
gccuuacaccaguuagcug

SEQ ID NO: 2544232 - RNA, 19 nt, Artificial Sequence
  Description of Artificial Sequence: Synthetic oligonucleotide
guuaugaaucgccgagcuu

SEQ ID NO: 2544233 - RNA, 19 nt, Artificial Sequence
  Description of Artificial Sequence: Synthetic oligonucleotide
ccugcaggagugaguuccc

SEQ ID NO: 2544234 - RNA, 19 nt, Artificial Sequence
  Description of Artificial Sequence: Synthetic oligonucleotide
gguacaaaguuagcccucu

SEQ ID NO: 2544235 - RNA, 19 nt, Artificial Sequence
  Description of Artificial Sequence: Synthetic oligonucleotide
gcgcaccuuguagucauag

SEQ ID NO: 2544236 - RNA, 19 nt, Artificial Sequence
  Description of Artificial Sequence: Synthetic oligonucleotide
gcuaugggagcuauugggu

SEQ ID NO: 2544237 - RNA, 19 nt, Artificial Sequence
  Description of Artificial Sequence: Synthetic oligonucleotide
gaccuuacuucuggcuucu

SEQ ID NO: 2544238 - RNA, 19 nt, Artificial Sequence
  Description of Artificial Sequence: Synthetic oligonucleotide
ccuucgauccaguacugcu

SEQ ID NO: 2544239 - RNA, 19 nt, Artificial Sequence
  Description of Artificial Sequence: Synthetic oligonucleotide
cagaaucuaacuggaccgu

SEQ ID NO: 2544240 - RNA, 19 nt, Artificial Sequence
  Description of Artificial Sequence: Synthetic oligonucleotide
ugcgcaccuuguagucaua

SEQ ID NO: 2544241 - RNA, 19 nt, Artificial Sequence
  Description of Artificial Sequence: Synthetic oligonucleotide
uuacaccaguuagcugguu

SEQ ID NO: 2544242 - RNA, 19 nt, Artificial Sequence
  Description of Artificial Sequence: Synthetic oligonucleotide
guauccugcuuugcuccaa

SEQ ID NO: 2544243 - RNA, 19 nt, Artificial Sequence
  Description of Artificial Sequence: Synthetic oligonucleotide
cugcagaguccuggcucag

SEQ ID NO: 2544244 - RNA, 19 nt, Artificial Sequence
  Description of Artificial Sequence: Synthetic oligonucleotide
gcaggagugaguucccuuu

SEQ ID NO: 2544245 - RNA, 19 nt, Artificial Sequence
  Description of Artificial Sequence: Synthetic oligonucleotide
ggagagcccugcagagucc

SEQ ID NO: 2544246 - RNA, 19 nt, Artificial Sequence
  Description of Artificial Sequence: Synthetic oligonucleotide
gaguccuggcucagcccca

SEQ ID NO: 2544247 - RNA, 19 nt, Artificial Sequence
  Description of Artificial Sequence: Synthetic oligonucleotide
augaaucgccgagcuugaa

SEQ ID NO: 2544248 - RNA, 19 nt, Artificial Sequence
  Description of Artificial Sequence: Synthetic oligonucleotide
uccucggcuaugggagcua

SEQ ID NO: 2544249 - RNA, 19 nt, Artificial Sequence
  Description of Artificial Sequence: Synthetic oligonucleotide
accuuacuucuggcuucug

SEQ ID NO: 2544250 - RNA, 19 nt, Artificial Sequence
  Description of Artificial Sequence: Synthetic oligonucleotide
cccuucgauccaguacugc

SEQ ID NO: 2544251 - RNA, 19 nt, Artificial Sequence
  Description of Artificial Sequence: Synthetic oligonucleotide
ccuuacuucuggcuucugu

SEQ ID NO: 2544252 - RNA, 19 nt, Artificial Sequence
  Description of Artificial Sequence: Synthetic oligonucleotide
gcgggaaauugugcguuga

SEQ ID NO: 2544253 - RNA, 19 nt, Artificial Sequence
  Description of Artificial Sequence: Synthetic oligonucleotide
cagccccaagucguccauc

SEQ ID NO: 2544254 - RNA, 19 nt, Artificial Sequence
  Description of Artificial Sequence: Synthetic oligonucleotide
ccccuucgauccaguacug

SEQ ID NO: 2544255 - RNA, 19 nt, Artificial Sequence
  Description of Artificial Sequence: Synthetic oligonucleotide
ccgguggucuguuggaugu

SEQ ID NO: 2544256 - RNA, 19 nt, Artificial Sequence
  Description of Artificial Sequence: Synthetic oligonucleotide
ccuucaggacagcuauaaa

SEQ ID NO: 2544257 - RNA, 19 nt, Artificial Sequence
  Description of Artificial Sequence: Synthetic oligonucleotide
ccccaagucguccaucagu

SEQ ID NO: 2544258 - RNA, 19 nt, Artificial Sequence
  Description of Artificial Sequence: Synthetic oligonucleotide
cuggaccguauugcaauau

SEQ ID NO: 2544259 - RNA, 19 nt, Artificial Sequence
  Description of Artificial Sequence: Synthetic oligonucleotide
ggcucagccccaagucguc

SEQ ID NO: 2544260 - RNA, 19 nt, Artificial Sequence
  Description of Artificial Sequence: Synthetic oligonucleotide
cuccucggcuaugggagcu

SEQ ID NO: 2544261 - RNA, 19 nt, Artificial Sequence
  Description of Artificial Sequence: Synthetic oligonucleotide
gccacaacgacgaccccau

SEQ ID NO: 2544262 - RNA, 19 nt, Artificial Sequence
  Description of Artificial Sequence: Synthetic oligonucleotide
guccaucaguauccugcuu

SEQ ID NO: 2544263 - RNA, 19 nt, Artificial Sequence
  Description of Artificial Sequence: Synthetic oligonucleotide
gggagcuauugggucauau

SEQ ID NO: 2544264 - RNA, 19 nt, Artificial Sequence
  Description of Artificial Sequence: Synthetic oligonucleotide
cgcaccuuguagucauaga

SEQ ID NO: 2544265 - RNA, 19 nt, Artificial Sequence
  Description of Artificial Sequence: Synthetic oligonucleotide
ccgcuuugcaagugaaaau

SEQ ID NO: 2544266 - RNA, 19 nt, Artificial Sequence
  Description of Artificial Sequence: Synthetic oligonucleotide
gcguugaaaugcgaagauu

SEQ ID NO: 2544267 - RNA, 19 nt, Artificial Sequence
  Description of Artificial Sequence: Synthetic oligonucleotide
cugcaggagugaguucccu

SEQ ID NO: 2544268 - RNA, 19 nt, Artificial Sequence
  Description of Artificial Sequence: Synthetic oligonucleotide
ccucacuugugagguagua

SEQ ID NO: 2544269 - RNA, 19 nt, Artificial Sequence
  Description of Artificial Sequence: Synthetic oligonucleotide
cgggaaauugugcguugaa

SEQ ID NO: 2544270 - RNA, 19 nt, Artificial Sequence
  Description of Artificial Sequence: Synthetic oligonucleotide
ccgagcuugaaguccgcuu

SEQ ID NO: 2544271 - RNA, 19 nt, Artificial Sequence
  Description of Artificial Sequence: Synthetic oligonucleotide
cucggcuaugggagcuauu

SEQ ID NO: 2544272 - RNA, 19 nt, Artificial Sequence
  Description of Artificial Sequence: Synthetic oligonucleotide
ccaagucguccaucaguau

SEQ ID NO: 2544273 - RNA, 19 nt, Artificial Sequence
  Description of Artificial Sequence: Synthetic oligonucleotide
cgccgagcuugaaguccgc

SEQ ID NO: 2544274 - RNA, 19 nt, Artificial Sequence
  Description of Artificial Sequence: Synthetic oligonucleotide
cgcagccuuacaccaguua

SEQ ID NO: 2544275 - RNA, 19 nt, Artificial Sequence
  Description of Artificial Sequence: Synthetic oligonucleotide
gccgagcuugaaguccgcu

SEQ ID NO: 2544276 - RNA, 19 nt, Artificial Sequence
  Description of Artificial Sequence: Synthetic oligonucleotide
ccuccucuccagugaacau

SEQ ID NO: 2544277 - RNA, 19 nt, Artificial Sequence
  Description of Artificial Sequence: Synthetic oligonucleotide
cgauccaguacugcucagu

SEQ ID NO: 2544278 - RNA, 19 nt, Artificial Sequence
  Description of Artificial Sequence: Synthetic oligonucleotide
gccucacuugugagguagu

SEQ ID NO: 2544279 - RNA, 19 nt, Artificial Sequence
  Description of Artificial Sequence: Synthetic oligonucleotide
ccucggcuaugggagcuau

SEQ ID NO: 2544280 - RNA, 19 nt, Artificial Sequence
  Description of Artificial Sequence: Synthetic oligonucleotide
ccacaacgacgaccccauu

SEQ ID NO: 2544281 - RNA, 19 nt, Artificial Sequence
  Description of Artificial Sequence: Synthetic oligonucleotide
cgguggucuguuggauguu

SEQ ID NO: 2544282 - RNA, 19 nt, Artificial Sequence
  Description of Artificial Sequence: Synthetic oligonucleotide
aaagaggagagcuccaugc

SEQ ID NO: 2544283 - RNA, 19 nt, Artificial Sequence
  Description of Artificial Sequence: Synthetic oligonucleotide
gaauauaaagcgcugcagg

SEQ ID NO: 2544284 - RNA, 19 nt, Artificial Sequence
  Description of Artificial Sequence: Synthetic oligonucleotide
uauaaagcgcugcaggagg

SEQ ID NO: 2544285 - RNA, 19 nt, Artificial Sequence
  Description of Artificial Sequence: Synthetic oligonucleotide
aauauaaagcgcugcagga

SEQ ID NO: 2544286 - RNA, 19 nt, Artificial Sequence
  Description of Artificial Sequence: Synthetic oligonucleotide
ucacgcuucacaaagcggc

SEQ ID NO: 2544287 - RNA, 19 nt, Artificial Sequence
  Description of Artificial Sequence: Synthetic oligonucleotide
uggcauaaaggccucacgc

SEQ ID NO: 2544288 - RNA, 19 nt, Artificial Sequence
  Description of Artificial Sequence: Synthetic oligonucleotide
gcacugagaauauaaagcg

SEQ ID NO: 2544289 - RNA, 19 nt, Artificial Sequence
  Description of Artificial Sequence: Synthetic oligonucleotide
aagaggagagcuccaugcg

SEQ ID NO: 2544290 - RNA, 19 nt, Artificial Sequence
  Description of Artificial Sequence: Synthetic oligonucleotide
aauggcauaaaggccucac

SEQ ID NO: 2544291 - RNA, 19 nt, Artificial Sequence
  Description of Artificial Sequence: Synthetic oligonucleotide
aaaagaggagagcuccaug

SEQ ID NO: 2544292 - RNA, 19 nt, Artificial Sequence
  Description of Artificial Sequence: Synthetic oligonucleotide
ucaggcacugagaauauaa

SEQ ID NO: 2544293 - RNA, 19 nt, Artificial Sequence
  Description of Artificial Sequence: Synthetic oligonucleotide
ugagaauauaaagcgcugc

SEQ ID NO: 2544294 - RNA, 19 nt, Artificial Sequence
  Description of Artificial Sequence: Synthetic oligonucleotide
acugagaauauaaagcgcu

SEQ ID NO: 2544295 - RNA, 19 nt, Artificial Sequence
  Description of Artificial Sequence: Synthetic oligonucleotide
aggcacugagaauauaaag

SEQ ID NO: 2544296 - RNA, 19 nt, Artificial Sequence
  Description of Artificial Sequence: Synthetic oligonucleotide
gagaauauaaagcgcugca

SEQ ID NO: 2544297 - RNA, 19 nt, Artificial Sequence
  Description of Artificial Sequence: Synthetic oligonucleotide
agaggagagcuccaugcgg

SEQ ID NO: 2544298 - RNA, 19 nt, Artificial Sequence
  Description of Artificial Sequence: Synthetic oligonucleotide
gugaaaagaggagagcucc

SEQ ID NO: 2544299 - RNA, 19 nt, Artificial Sequence
  Description of Artificial Sequence: Synthetic oligonucleotide
agaauauaaagcgcugcag

SEQ ID NO: 2544300 - RNA, 19 nt, Artificial Sequence
  Description of Artificial Sequence: Synthetic oligonucleotide
ggcacugagaauauaaagc

SEQ ID NO: 2544301 - RNA, 19 nt, Artificial Sequence
  Description of Artificial Sequence: Synthetic oligonucleotide
cacugagaauauaaagcgc

SEQ ID NO: 2544302 - RNA, 19 nt, Artificial Sequence
  Description of Artificial Sequence: Synthetic oligonucleotide
auauaaagcgcugcaggag

SEQ ID NO: 2544303 - RNA, 19 nt, Artificial Sequence
  Description of Artificial Sequence: Synthetic oligonucleotide
aggugaaaagaggagagcu

SEQ ID NO: 2544304 - RNA, 19 nt, Artificial Sequence
  Description of Artificial Sequence: Synthetic oligonucleotide
auggcauaaaggccucacg

SEQ ID NO: 2544305 - RNA, 19 nt, Artificial Sequence
  Description of Artificial Sequence: Synthetic oligonucleotide
ugaaaagaggagagcucca

SEQ ID NO: 2544306 - RNA, 19 nt, Artificial Sequence
  Description of Artificial Sequence: Synthetic oligonucleotide
cugagaauauaaagcgcug

SEQ ID NO: 2544307 - RNA, 19 nt, Artificial Sequence
  Description of Artificial Sequence: Synthetic oligonucleotide
cucacgcuucacaaagcgg

SEQ ID NO: 2544308 - RNA, 19 nt, Artificial Sequence
  Description of Artificial Sequence: Synthetic oligonucleotide
auccaggaaguguucagga

SEQ ID NO: 2544309 - RNA, 19 nt, Artificial Sequence
  Description of Artificial Sequence: Synthetic oligonucleotide
cauccaggaaguguucagg

SEQ ID NO: 2544310 - RNA, 19 nt, Artificial Sequence
  Description of Artificial Sequence: Synthetic oligonucleotide
auaaaggccucacgcuuca

SEQ ID NO: 2544311 - RNA, 19 nt, Artificial Sequence
  Description of Artificial Sequence: Synthetic oligonucleotide
ggccucacgcuucacaaag

SEQ ID NO: 2544312 - RNA, 19 nt, Artificial Sequence
  Description of Artificial Sequence: Synthetic oligonucleotide
cacgcuucacaaagcggcc

SEQ ID NO: 2544313 - RNA, 19 nt, Artificial Sequence
  Description of Artificial Sequence: Synthetic oligonucleotide
acgcuucacaaagcggccc

SEQ ID NO: 2544314 - RNA, 19 nt, Artificial Sequence
  Description of Artificial Sequence: Synthetic oligonucleotide
gcaggugaaaagaggagag

SEQ ID NO: 2544315 - RNA, 19 nt, Artificial Sequence
  Description of Artificial Sequence: Synthetic oligonucleotide
aggcacacccagugggagg

SEQ ID NO: 2544316 - RNA, 19 nt, Artificial Sequence
  Description of Artificial Sequence: Synthetic oligonucleotide
uccaggaaguguucaggau

SEQ ID NO: 2544317 - RNA, 19 nt, Artificial Sequence
  Description of Artificial Sequence: Synthetic oligonucleotide
ggaggcaggugaaaagagg

SEQ ID NO: 2544318 - RNA, 19 nt, Artificial Sequence
  Description of Artificial Sequence: Synthetic oligonucleotide
ccucacgcuucacaaagcg

SEQ ID NO: 2544319 - RNA, 19 nt, Artificial Sequence
  Description of Artificial Sequence: Synthetic oligonucleotide
caggugaaaagaggagagc

SEQ ID NO: 2544320 - RNA, 19 nt, Artificial Sequence
  Description of Artificial Sequence: Synthetic oligonucleotide
  modified_base (19)..(19): a, c, u, g, unknown or other
uccaugcgggccacggggn

SEQ ID NO: 2544321 - RNA, 19 nt, Artificial Sequence
  Description of Artificial Sequence: Synthetic oligonucleotide
gcaggaggcaggugaaaag

SEQ ID NO: 2544322 - RNA, 19 nt, Artificial Sequence
  Description of Artificial Sequence: Synthetic oligonucleotide
aggcaggugaaaagaggag

SEQ ID NO: 2544323 - RNA, 19 nt, Artificial Sequence
  Description of Artificial Sequence: Synthetic oligonucleotide
gcauccaggaaguguucag

SEQ ID NO: 2544324 - RNA, 19 nt, Artificial Sequence
  Description of Artificial Sequence: Synthetic oligonucleotide
  modified_base (16)..(16): a, c, u, g, unknown or other
augcgggccacggggnguc

SEQ ID NO: 2544325 - RNA, 19 nt, Artificial Sequence
  Description of Artificial Sequence: Synthetic oligonucleotide
ggugaaaagaggagagcuc

SEQ ID NO: 2544326 - RNA, 19 nt, Artificial Sequence
  Description of Artificial Sequence: Synthetic oligonucleotide
caggcacugagaauauaaa

SEQ ID NO: 2544327 - RNA, 19 nt, Artificial Sequence
  Description of Artificial Sequence: Synthetic oligonucleotide
gaaaagaggagagcuccau

SEQ ID NO: 2544328 - RNA, 19 nt, Artificial Sequence
  Description of Artificial Sequence: Synthetic oligonucleotide
acacccagugggaggaugu

SEQ ID NO: 2544329 - RNA, 19 nt, Artificial Sequence
  Description of Artificial Sequence: Synthetic oligonucleotide
ggcauaaaggccucacgcu

SEQ ID NO: 2544330 - RNA, 19 nt, Artificial Sequence
  Description of Artificial Sequence: Synthetic oligonucleotide
ccaucaggcacugagaaua

SEQ ID NO: 2544331 - RNA, 19 nt, Artificial Sequence
  Description of Artificial Sequence: Synthetic oligonucleotide
gccgcggcuguccaucagg

SEQ ID NO: 2544332 - RNA, 19 nt, Artificial Sequence
  Description of Artificial Sequence: Synthetic oligonucleotide
cacacccagugggaggaug

SEQ ID NO: 2544333 - RNA, 19 nt, Artificial Sequence
  Description of Artificial Sequence: Synthetic oligonucleotide
aggccucacgcuucacaaa

SEQ ID NO: 2544334 - RNA, 19 nt, Artificial Sequence
  Description of Artificial Sequence: Synthetic oligonucleotide
ugggccgcggcuguccauc

SEQ ID NO: 2544335 - RNA, 19 nt, Artificial Sequence
  Description of Artificial Sequence: Synthetic oligonucleotide
ggagagcuccaugcgggcc

SEQ ID NO: 2544336 - RNA, 19 nt, Artificial Sequence
  Description of Artificial Sequence: Synthetic oligonucleotide
uaaaggccucacgcuucac

SEQ ID NO: 2544337 - RNA, 19 nt, Artificial Sequence
  Description of Artificial Sequence: Synthetic oligonucleotide
ggcacacccagugggagga

SEQ ID NO: 2544338 - RNA, 19 nt, Artificial Sequence
  Description of Artificial Sequence: Synthetic oligonucleotide
gcauaaaggccucacgcuu

SEQ ID NO: 2544339 - RNA, 19 nt, Artificial Sequence
  Description of Artificial Sequence: Synthetic oligonucleotide
ggcauccaggaaguguuca

SEQ ID NO: 2544340 - RNA, 19 nt, Artificial Sequence
  Description of Artificial Sequence: Synthetic oligonucleotide
aucaggcacugagaauaua

SEQ ID NO: 2544341 - RNA, 19 nt, Artificial Sequence
  Description of Artificial Sequence: Synthetic oligonucleotide
ccgcggcuguccaucaggc

SEQ ID NO: 2544342 - RNA, 19 nt, Artificial Sequence
  Description of Artificial Sequence: Synthetic oligonucleotide
caucaggcacugagaauau

SEQ ID NO: 2544343 - RNA, 19 nt, Artificial Sequence
  Description of Artificial Sequence: Synthetic oligonucleotide
cacccagugggaggauguc

SEQ ID NO: 2544344 - RNA, 19 nt, Artificial Sequence
  Description of Artificial Sequence: Synthetic oligonucleotide
  modified_base (18)..(18): a, c, u, g, unknown or other
ccaugcgggccacggggng

SEQ ID NO: 2544345 - RNA, 19 nt, Artificial Sequence
  Description of Artificial Sequence: Synthetic oligonucleotide
gccucacgcuucacaaagc

SEQ ID NO: 2544346 - RNA, 19 nt, Artificial Sequence
  Description of Artificial Sequence: Synthetic oligonucleotide
ggucgcugggccgcggcug

SEQ ID NO: 2544347 - RNA, 19 nt, Artificial Sequence
  Description of Artificial Sequence: Synthetic oligonucleotide
  modified_base (15)..(15): a, c, u, g, unknown or other
ugcgggccacggggngucc

SEQ ID NO: 2544348 - RNA, 19 nt, Artificial Sequence
  Description of Artificial Sequence: Synthetic oligonucleotide
gucgcugggccgcggcugu

SEQ ID NO: 2544349 - RNA, 19 nt, Artificial Sequence
  Description of Artificial Sequence: Synthetic oligonucleotide
gggcauccaggaaguguuc

SEQ ID NO: 2544350 - RNA, 19 nt, Artificial Sequence
  Description of Artificial Sequence: Synthetic oligonucleotide
  modified_base (14)..(14): a, c, u, g, unknown or other
gcgggccacggggnguccc

SEQ ID NO: 2544351 - RNA, 19 nt, Artificial Sequence
  Description of Artificial Sequence: Synthetic oligonucleotide
  modified_base (13)..(13): a, c, u, g, unknown or other
cgggccacggggngucccc

SEQ ID NO: 2544352 - RNA, 19 nt, Artificial Sequence
  Description of Artificial Sequence: Synthetic oligonucleotide
  modified_base (17)..(17): a, c, u, g, unknown or other
caugcgggccacggggngu

SEQ ID NO: 2544353 - RNA, 19 nt, Artificial Sequence
  Description of Artificial Sequence: Synthetic oligonucleotide
gcugggccgcggcugucca

SEQ ID NO: 2544354 - RNA, 19 nt, Artificial Sequence
  Description of Artificial Sequence: Synthetic oligonucleotide
ucgcugggccgcggcuguc

SEQ ID NO: 2544355 - RNA, 19 nt, Artificial Sequence
  Description of Artificial Sequence: Synthetic oligonucleotide
gggccgcggcuguccauca

SEQ ID NO: 2544356 - RNA, 19 nt, Artificial Sequence
  Description of Artificial Sequence: Synthetic oligonucleotide
cgcugggccgcggcugucc

SEQ ID NO: 2544357 - RNA, 19 nt, Artificial Sequence
  Description of Artificial Sequence: Synthetic oligonucleotide
cugggccgcggcuguccau

SEQ ID NO: 2544358 - RNA, 19 nt, Artificial Sequence
  Description of Artificial Sequence: Synthetic oligonucleotide
gcacacccagugggaggau

SEQ ID NO: 2544359 - RNA, 19 nt, Artificial Sequence
  Description of Artificial Sequence: Synthetic oligonucleotide
ucaacuaucacuaccaaag

SEQ ID NO: 2544360 - RNA, 19 nt, Artificial Sequence
  Description of Artificial Sequence: Synthetic oligonucleotide
uaaguauuauauuagaucu

SEQ ID NO: 2544361 - RNA, 19 nt, Artificial Sequence
  Description of Artificial Sequence: Synthetic oligonucleotide
aacauuaccucccauuuuc

SEQ ID NO: 2544362 - RNA, 19 nt, Artificial Sequence
  Description of Artificial Sequence: Synthetic oligonucleotide
uuagaucuuacuaugaaga

SEQ ID NO: 2544363 - RNA, 19 nt, Artificial Sequence
  Description of Artificial Sequence: Synthetic oligonucleotide
aguuguugaaacuugacag

SEQ ID NO: 2544364 - RNA, 19 nt, Artificial Sequence
  Description of Artificial Sequence: Synthetic oligonucleotide
aaaguagcgacacaggcca

SEQ ID NO: 2544365 - RNA, 19 nt, Artificial Sequence
  Description of Artificial Sequence: Synthetic oligonucleotide
uauauuagaucuuacuaug

SEQ ID NO: 2544366 - RNA, 19 nt, Artificial Sequence
  Description of Artificial Sequence: Synthetic oligonucleotide
aaugagaugaccuaccauu

SEQ ID NO: 2544367 - RNA, 19 nt, Artificial Sequence
  Description of Artificial Sequence: Synthetic oligonucleotide
aacuaucacuaccaaaggg

SEQ ID NO: 2544368 - RNA, 19 nt, Artificial Sequence
  Description of Artificial Sequence: Synthetic oligonucleotide
uccaauauggaguauuucc

SEQ ID NO: 2544369 - RNA, 19 nt, Artificial Sequence
  Description of Artificial Sequence: Synthetic oligonucleotide
uauaguugucucaugauga

SEQ ID NO: 2544370 - RNA, 19 nt, Artificial Sequence
  Description of Artificial Sequence: Synthetic oligonucleotide
ucagacuuaaguauuauau

SEQ ID NO: 2544371 - RNA, 19 nt, Artificial Sequence
  Description of Artificial Sequence: Synthetic oligonucleotide
cuuacuaugaagagcuucg

SEQ ID NO: 2544372 - RNA, 19 nt, Artificial Sequence
  Description of Artificial Sequence: Synthetic oligonucleotide
aguauuuccuguuuuauca

SEQ ID NO: 2544373 - RNA, 19 nt, Artificial Sequence
  Description of Artificial Sequence: Synthetic oligonucleotide
agugaugcugaauuauacc

SEQ ID NO: 2544374 - RNA, 19 nt, Artificial Sequence
  Description of Artificial Sequence: Synthetic oligonucleotide
uguuuuaucaaaucccgug

SEQ ID NO: 2544375 - RNA, 19 nt, Artificial Sequence
  Description of Artificial Sequence: Synthetic oligonucleotide
aauuauuaaaggagcaguc

SEQ ID NO: 2544376 - RNA, 19 nt, Artificial Sequence
  Description of Artificial Sequence: Synthetic oligonucleotide
ugcaaugccacaaacauua

SEQ ID NO: 2544377 - RNA, 19 nt, Artificial Sequence
  Description of Artificial Sequence: Synthetic oligonucleotide
aaugccacaaacauuaccu

SEQ ID NO: 2544378 - RNA, 19 nt, Artificial Sequence
  Description of Artificial Sequence: Synthetic oligonucleotide
agagguuuuccuuggaucg

SEQ ID NO: 2544379 - RNA, 19 nt, Artificial Sequence
  Description of Artificial Sequence: Synthetic oligonucleotide
uuauuaaaggagcagucga

SEQ ID NO: 2544380 - RNA, 19 nt, Artificial Sequence
  Description of Artificial Sequence: Synthetic oligonucleotide
aaaggagcagucgaugacc

SEQ ID NO: 2544381 - RNA, 19 nt, Artificial Sequence
  Description of Artificial Sequence: Synthetic oligonucleotide
uauuauauuagaucuuacu

SEQ ID NO: 2544382 - RNA, 19 nt, Artificial Sequence
  Description of Artificial Sequence: Synthetic oligonucleotide
ugugauuggggaaaguagc

SEQ ID NO: 2544383 - RNA, 19 nt, Artificial Sequence
  Description of Artificial Sequence: Synthetic oligonucleotide
auuagaucuuacuaugaag

SEQ ID NO: 2544384 - RNA, 19 nt, Artificial Sequence
  Description of Artificial Sequence: Synthetic oligonucleotide
aaaucccgugaugagaacc

SEQ ID NO: 2544385 - RNA, 19 nt, Artificial Sequence
  Description of Artificial Sequence: Synthetic oligonucleotide
aaugcuagcuugcucuuag

SEQ ID NO: 2544386 - RNA, 19 nt, Artificial Sequence
  Description of Artificial Sequence: Synthetic oligonucleotide
aauauggaguauuuccugu

SEQ ID NO: 2544387 - RNA, 19 nt, Artificial Sequence
  Description of Artificial Sequence: Synthetic oligonucleotide
ugaauggguacucugaauc

SEQ ID NO: 2544388 - RNA, 19 nt, Artificial Sequence
  Description of Artificial Sequence: Synthetic oligonucleotide
uguuuagccagcucaaggc

SEQ ID NO: 2544389 - RNA, 19 nt, Artificial Sequence
  Description of Artificial Sequence: Synthetic oligonucleotide
auuauuaaaggagcagucg

SEQ ID NO: 2544390 - RNA, 19 nt, Artificial Sequence
  Description of Artificial Sequence: Synthetic oligonucleotide
cacgugaucacacaaagac

SEQ ID NO: 2544391 - RNA, 19 nt, Artificial Sequence
  Description of Artificial Sequence: Synthetic oligonucleotide
aguucagaagugcuuuugc

SEQ ID NO: 2544392 - RNA, 19 nt, Artificial Sequence
  Description of Artificial Sequence: Synthetic oligonucleotide
accugugucuuguuuagcc

SEQ ID NO: 2544393 - RNA, 19 nt, Artificial Sequence
  Description of Artificial Sequence: Synthetic oligonucleotide
uuaucaaaucccgugauga

SEQ ID NO: 2544394 - RNA, 19 nt, Artificial Sequence
  Description of Artificial Sequence: Synthetic oligonucleotide
ugaauuauaccccuaggua

SEQ ID NO: 2544395 - RNA, 19 nt, Artificial Sequence
  Description of Artificial Sequence: Synthetic oligonucleotide
ucugaaucuuccaucaacu

SEQ ID NO: 2544396 - RNA, 19 nt, Artificial Sequence
  Description of Artificial Sequence: Synthetic oligonucleotide
gugaugcugaauuauaccc

SEQ ID NO: 2544397 - RNA, 19 nt, Artificial Sequence
  Description of Artificial Sequence: Synthetic oligonucleotide
cuuagaaccuccuguaggc

SEQ ID NO: 2544398 - RNA, 19 nt, Artificial Sequence
  Description of Artificial Sequence: Synthetic oligonucleotide
ucuuugauugaaacuccgg

SEQ ID NO: 2544399 - RNA, 19 nt, Artificial Sequence
  Description of Artificial Sequence: Synthetic oligonucleotide
aagaaugagaugaccuacc

SEQ ID NO: 2544400 - RNA, 19 nt, Artificial Sequence
  Description of Artificial Sequence: Synthetic oligonucleotide
uugugauuggggaaaguag

SEQ ID NO: 2544401 - RNA, 19 nt, Artificial Sequence
  Description of Artificial Sequence: Synthetic oligonucleotide
ugauugaaacuccggauug

SEQ ID NO: 2544402 - RNA, 19 nt, Artificial Sequence
  Description of Artificial Sequence: Synthetic oligonucleotide
gaauuauaccccuagguaa

SEQ ID NO: 2544403 - RNA, 19 nt, Artificial Sequence
  Description of Artificial Sequence: Synthetic oligonucleotide
ucuauugcagucaccacac

SEQ ID NO: 2544404 - RNA, 19 nt, Artificial Sequence
  Description of Artificial Sequence: Synthetic oligonucleotide
ugacagugaauaaugcuca

SEQ ID NO: 2544405 - RNA, 19 nt, Artificial Sequence
  Description of Artificial Sequence: Synthetic oligonucleotide
ugcaucaacuaucacuacc

SEQ ID NO: 2544406 - RNA, 19 nt, Artificial Sequence
  Description of Artificial Sequence: Synthetic oligonucleotide
auaaugcucagacuuaagu

SEQ ID NO: 2544407 - RNA, 19 nt, Artificial Sequence
  Description of Artificial Sequence: Synthetic oligonucleotide
ucaugaugacuccaucacg

SEQ ID NO: 2544408 - RNA, 19 nt, Artificial Sequence
  Description of Artificial Sequence: Synthetic oligonucleotide
auaauuauuaaaggagcag

SEQ ID NO: 2544409 - RNA, 19 nt, Artificial Sequence
  Description of Artificial Sequence: Synthetic oligonucleotide
ugaugcugaauuauacccc

SEQ ID NO: 2544410 - RNA, 19 nt, Artificial Sequence
  Description of Artificial Sequence: Synthetic oligonucleotide
uauugcagucaccacacug

SEQ ID NO: 2544411 - RNA, 19 nt, Artificial Sequence
  Description of Artificial Sequence: Synthetic oligonucleotide
gacuuaaguauuauauuag

SEQ ID NO: 2544412 - RNA, 19 nt, Artificial Sequence
  Description of Artificial Sequence: Synthetic oligonucleotide
uugugcaccauccaauaug

SEQ ID NO: 2544413 - RNA, 19 nt, Artificial Sequence
  Description of Artificial Sequence: Synthetic oligonucleotide
ucaaaucccgugaugagaa

SEQ ID NO: 2544414 - RNA, 19 nt, Artificial Sequence
  Description of Artificial Sequence: Synthetic oligonucleotide
cuaucacuaccaaagggcc

SEQ ID NO: 2544415 - RNA, 19 nt, Artificial Sequence
  Description of Artificial Sequence: Synthetic oligonucleotide
uuaaaggagcagucgauga

SEQ ID NO: 2544416 - RNA, 19 nt, Artificial Sequence
  Description of Artificial Sequence: Synthetic oligonucleotide
acuaugaagagcuucguuu

SEQ ID NO: 2544417 - RNA, 19 nt, Artificial Sequence
  Description of Artificial Sequence: Synthetic oligonucleotide
uucagaagugcuuuugcca

SEQ ID NO: 2544418 - RNA, 19 nt, Artificial Sequence
  Description of Artificial Sequence: Synthetic oligonucleotide
ugcugaauuauaccccuag

SEQ ID NO: 2544419 - RNA, 19 nt, Artificial Sequence
  Description of Artificial Sequence: Synthetic oligonucleotide
uagaucuuacuaugaagag

SEQ ID NO: 2544420 - RNA, 19 nt, Artificial Sequence
  Description of Artificial Sequence: Synthetic oligonucleotide
cauuuucugccuugaaugg

SEQ ID NO: 2544421 - RNA, 19 nt, Artificial Sequence
  Description of Artificial Sequence: Synthetic oligonucleotide
cagugaauaaugcucagac

SEQ ID NO: 2544422 - RNA, 19 nt, Artificial Sequence
  Description of Artificial Sequence: Synthetic oligonucleotide
uuugauugaaacuccggau

SEQ ID NO: 2544423 - RNA, 19 nt, Artificial Sequence
  Description of Artificial Sequence: Synthetic oligonucleotide
uuuucugccuugaaugggu

SEQ ID NO: 2544424 - RNA, 19 nt, Artificial Sequence
  Description of Artificial Sequence: Synthetic oligonucleotide
uacucugaaucuuccauca

SEQ ID NO: 2544425 - RNA, 19 nt, Artificial Sequence
  Description of Artificial Sequence: Synthetic oligonucleotide
agcgacacaggccauuuuc

SEQ ID NO: 2544426 - RNA, 19 nt, Artificial Sequence
  Description of Artificial Sequence: Synthetic oligonucleotide
cauaauuauuaaaggagca

SEQ ID NO: 2544427 - RNA, 19 nt, Artificial Sequence
  Description of Artificial Sequence: Synthetic oligonucleotide
ugaaacuccggauugugau

SEQ ID NO: 2544428 - RNA, 19 nt, Artificial Sequence
  Description of Artificial Sequence: Synthetic oligonucleotide
uuuuccuuggaucgcacaa

SEQ ID NO: 2544429 - RNA, 19 nt, Artificial Sequence
  Description of Artificial Sequence: Synthetic oligonucleotide
aaacuccggauugugauug

SEQ ID NO: 2544430 - RNA, 19 nt, Artificial Sequence
  Description of Artificial Sequence: Synthetic oligonucleotide
gcagccauaauuauuaaag

SEQ ID NO: 2544431 - RNA, 19 nt, Artificial Sequence
  Description of Artificial Sequence: Synthetic oligonucleotide
aaucccgugaugagaaccg

SEQ ID NO: 2544432 - RNA, 19 nt, Artificial Sequence
  Description of Artificial Sequence: Synthetic oligonucleotide
ccauaauuauuaaaggagc

SEQ ID NO: 2544433 - RNA, 19 nt, Artificial Sequence
  Description of Artificial Sequence: Synthetic oligonucleotide
gaaaguagcgacacaggcc

SEQ ID NO: 2544434 - RNA, 19 nt, Artificial Sequence
  Description of Artificial Sequence: Synthetic oligonucleotide
ugagaggagagccaccgcu

SEQ ID NO: 2544435 - RNA, 19 nt, Artificial Sequence
  Description of Artificial Sequence: Synthetic oligonucleotide
augagaaccgcaugguuug

SEQ ID NO: 2544436 - RNA, 19 nt, Artificial Sequence
  Description of Artificial Sequence: Synthetic oligonucleotide
uuaccucccauuuucacau

SEQ ID NO: 2544437 - RNA, 19 nt, Artificial Sequence
  Description of Artificial Sequence: Synthetic oligonucleotide
uauuaaaggagcagucgau

SEQ ID NO: 2544438 - RNA, 19 nt, Artificial Sequence
  Description of Artificial Sequence: Synthetic oligonucleotide
gccauaauuauuaaaggag

SEQ ID NO: 2544439 - RNA, 19 nt, Artificial Sequence
  Description of Artificial Sequence: Synthetic oligonucleotide
uaucaaaucccgugaugag

SEQ ID NO: 2544440 - RNA, 19 nt, Artificial Sequence
  Description of Artificial Sequence: Synthetic oligonucleotide
ugugcauagccaucuauuc

SEQ ID NO: 2544441 - RNA, 19 nt, Artificial Sequence
  Description of Artificial Sequence: Synthetic oligonucleotide
ugaugacuccaucacguga

SEQ ID NO: 2544442 - RNA, 19 nt, Artificial Sequence
  Description of Artificial Sequence: Synthetic oligonucleotide
uucacaugugcauagccau

SEQ ID NO: 2544443 - RNA, 19 nt, Artificial Sequence
  Description of Artificial Sequence: Synthetic oligonucleotide
uaaaggagcagucgaugac

SEQ ID NO: 2544444 - RNA, 19 nt, Artificial Sequence
  Description of Artificial Sequence: Synthetic oligonucleotide
uguugaaacuugacaguga

SEQ ID NO: 2544445 - RNA, 19 nt, Artificial Sequence
  Description of Artificial Sequence: Synthetic oligonucleotide
caauauggaguauuuccug

SEQ ID NO: 2544446 - RNA, 19 nt, Artificial Sequence
  Description of Artificial Sequence: Synthetic oligonucleotide
aguauuauauuagaucuua

SEQ ID NO: 2544447 - RNA, 19 nt, Artificial Sequence
  Description of Artificial Sequence: Synthetic oligonucleotide
ugaauaaugcucagacuua

SEQ ID NO: 2544448 - RNA, 19 nt, Artificial Sequence
  Description of Artificial Sequence: Synthetic oligonucleotide
aaagggccgaaguucagaa

SEQ ID NO: 2544449 - RNA, 19 nt, Artificial Sequence
  Description of Artificial Sequence: Synthetic oligonucleotide
uagaaccuccuguaggcag

SEQ ID NO: 2544450 - RNA, 19 nt, Artificial Sequence
  Description of Artificial Sequence: Synthetic oligonucleotide
agucaccacacugaaugcc

SEQ ID NO: 2544451 - RNA, 19 nt, Artificial Sequence
  Description of Artificial Sequence: Synthetic oligonucleotide
aagccgauucuauugcagu

SEQ ID NO: 2544452 - RNA, 19 nt, Artificial Sequence
  Description of Artificial Sequence: Synthetic oligonucleotide
aauuauaccccuagguaau

SEQ ID NO: 2544453 - RNA, 19 nt, Artificial Sequence
  Description of Artificial Sequence: Synthetic oligonucleotide
cagcucaaggcacugagag

SEQ ID NO: 2544454 - RNA, 19 nt, Artificial Sequence
  Description of Artificial Sequence: Synthetic oligonucleotide
uaauccugccagcucacug

SEQ ID NO: 2544455 - RNA, 19 nt, Artificial Sequence
  Description of Artificial Sequence: Synthetic oligonucleotide
uccggauugugauugggga

SEQ ID NO: 2544456 - RNA, 19 nt, Artificial Sequence
  Description of Artificial Sequence: Synthetic oligonucleotide
auucuauugcagucaccac

SEQ ID NO: 2544457 - RNA, 19 nt, Artificial Sequence
  Description of Artificial Sequence: Synthetic oligonucleotide
acaaacauuaccucccauu

SEQ ID NO: 2544458 - RNA, 19 nt, Artificial Sequence
  Description of Artificial Sequence: Synthetic oligonucleotide
ggaaaguagcgacacaggc

SEQ ID NO: 2544459 - RNA, 19 nt, Artificial Sequence
  Description of Artificial Sequence: Synthetic oligonucleotide
uguaggcaguuguugaaac

SEQ ID NO: 2544460 - RNA, 19 nt, Artificial Sequence
  Description of Artificial Sequence: Synthetic oligonucleotide
agugaauaaugcucagacu

SEQ ID NO: 2544461 - RNA, 19 nt, Artificial Sequence
  Description of Artificial Sequence: Synthetic oligonucleotide
ucuuacuaugaagagcuuc

SEQ ID NO: 2544462 - RNA, 19 nt, Artificial Sequence
  Description of Artificial Sequence: Synthetic oligonucleotide
gugaauaaugcucagacuu

SEQ ID NO: 2544463 - RNA, 19 nt, Artificial Sequence
  Description of Artificial Sequence: Synthetic oligonucleotide
auuuucugccuugaauggg

SEQ ID NO: 2544464 - RNA, 19 nt, Artificial Sequence
  Description of Artificial Sequence: Synthetic oligonucleotide
agaaugagaugaccuacca

SEQ ID NO: 2544465 - RNA, 19 nt, Artificial Sequence
  Description of Artificial Sequence: Synthetic oligonucleotide
ucaccugugucuuguuuag

SEQ ID NO: 2544466 - RNA, 19 nt, Artificial Sequence
  Description of Artificial Sequence: Synthetic oligonucleotide
caacuaucacuaccaaagg

SEQ ID NO: 2544467 - RNA, 19 nt, Artificial Sequence
  Description of Artificial Sequence: Synthetic oligonucleotide
cuuucugcaagaaugagau

SEQ ID NO: 2544468 - RNA, 19 nt, Artificial Sequence
  Description of Artificial Sequence: Synthetic oligonucleotide
aauaaugcucagacuuaag

SEQ ID NO: 2544469 - RNA, 19 nt, Artificial Sequence
  Description of Artificial Sequence: Synthetic oligonucleotide
caaugccacaaacauuacc

SEQ ID NO: 2544470 - RNA, 19 nt, Artificial Sequence
  Description of Artificial Sequence: Synthetic oligonucleotide
uugaaacuccggauuguga

SEQ ID NO: 2544471 - RNA, 19 nt, Artificial Sequence
  Description of Artificial Sequence: Synthetic oligonucleotide
agccgauucuauugcaguc

SEQ ID NO: 2544472 - RNA, 19 nt, Artificial Sequence
  Description of Artificial Sequence: Synthetic oligonucleotide
acugcaucaacuaucacua

SEQ ID NO: 2544473 - RNA, 19 nt, Artificial Sequence
  Description of Artificial Sequence: Synthetic oligonucleotide
caggaguugugcaccaucc

SEQ ID NO: 2544474 - RNA, 19 nt, Artificial Sequence
  Description of Artificial Sequence: Synthetic oligonucleotide
uauaccccuagguaauccu

SEQ ID NO: 2544475 - RNA, 19 nt, Artificial Sequence
  Description of Artificial Sequence: Synthetic oligonucleotide
cauuucauccuccuggcca

SEQ ID NO: 2544476 - RNA, 19 nt, Artificial Sequence
  Description of Artificial Sequence: Synthetic oligonucleotide
uaccccuagguaauccugc

SEQ ID NO: 2544477 - RNA, 19 nt, Artificial Sequence
  Description of Artificial Sequence: Synthetic oligonucleotide
cacaagccgauucuauugc

SEQ ID NO: 2544478 - RNA, 19 nt, Artificial Sequence
  Description of Artificial Sequence: Synthetic oligonucleotide
ugagaugaccuaccauugu

SEQ ID NO: 2544479 - RNA, 19 nt, Artificial Sequence
  Description of Artificial Sequence: Synthetic oligonucleotide
gugauuggggaaaguagcg

SEQ ID NO: 2544480 - RNA, 19 nt, Artificial Sequence
  Description of Artificial Sequence: Synthetic oligonucleotide
ugcuagcuugcucuuagaa

SEQ ID NO: 2544481 - RNA, 19 nt, Artificial Sequence
  Description of Artificial Sequence: Synthetic oligonucleotide
gacuccaucacgugaucac

SEQ ID NO: 2544482 - RNA, 19 nt, Artificial Sequence
  Description of Artificial Sequence: Synthetic oligonucleotide
caagccgauucuauugcag

SEQ ID NO: 2544483 - RNA, 19 nt, Artificial Sequence
  Description of Artificial Sequence: Synthetic oligonucleotide
cagagguuuuccuuggauc

SEQ ID NO: 2544484 - RNA, 19 nt, Artificial Sequence
  Description of Artificial Sequence: Synthetic oligonucleotide
auugcagucaccacacuga

SEQ ID NO: 2544485 - RNA, 19 nt, Artificial Sequence
  Description of Artificial Sequence: Synthetic oligonucleotide
accccuagguaauccugcc

SEQ ID NO: 2544486 - RNA, 19 nt, Artificial Sequence
  Description of Artificial Sequence: Synthetic oligonucleotide
uuauaccccuagguaaucc

SEQ ID NO: 2544487 - RNA, 19 nt, Artificial Sequence
  Description of Artificial Sequence: Synthetic oligonucleotide
uauggaguauuuccuguuu

SEQ ID NO: 2544488 - RNA, 19 nt, Artificial Sequence
  Description of Artificial Sequence: Synthetic oligonucleotide
ccuuggaucgcacaagccg

SEQ ID NO: 2544489 - RNA, 19 nt, Artificial Sequence
  Description of Artificial Sequence: Synthetic oligonucleotide
aucaacuaucacuaccaaa

SEQ ID NO: 2544490 - RNA, 19 nt, Artificial Sequence
  Description of Artificial Sequence: Synthetic oligonucleotide
auugaaacuccggauugug

SEQ ID NO: 2544491 - RNA, 19 nt, Artificial Sequence
  Description of Artificial Sequence: Synthetic oligonucleotide
gaugcugaauuauaccccu

SEQ ID NO: 2544492 - RNA, 19 nt, Artificial Sequence
  Description of Artificial Sequence: Synthetic oligonucleotide
agcucaaggcacugagagg

SEQ ID NO: 2544493 - RNA, 19 nt, Artificial Sequence
  Description of Artificial Sequence: Synthetic oligonucleotide
cuccggauugugauugggg

SEQ ID NO: 2544494 - RNA, 19 nt, Artificial Sequence
  Description of Artificial Sequence: Synthetic oligonucleotide
aacuccggauugugauugg

SEQ ID NO: 2544495 - RNA, 19 nt, Artificial Sequence
  Description of Artificial Sequence: Synthetic oligonucleotide
cuuggaucgcacaagccga

SEQ ID NO: 2544496 - RNA, 19 nt, Artificial Sequence
  Description of Artificial Sequence: Synthetic oligonucleotide
ugucucaugaugacuccau

SEQ ID NO: 2544497 - RNA, 19 nt, Artificial Sequence
  Description of Artificial Sequence: Synthetic oligonucleotide
cucacugcaucaacuauca

SEQ ID NO: 2544498 - RNA, 19 nt, Artificial Sequence
  Description of Artificial Sequence: Synthetic oligonucleotide
aucaaaucccgugaugaga

SEQ ID NO: 2544499 - RNA, 19 nt, Artificial Sequence
  Description of Artificial Sequence: Synthetic oligonucleotide
aucacuaccaaagggccga

SEQ ID NO: 2544500 - RNA, 19 nt, Artificial Sequence
  Description of Artificial Sequence: Synthetic oligonucleotide
ugauuggggaaaguagcga

SEQ ID NO: 2544501 - RNA, 19 nt, Artificial Sequence
  Description of Artificial Sequence: Synthetic oligonucleotide
cauuaccucccauuuucac

SEQ ID NO: 2544502 - RNA, 19 nt, Artificial Sequence
  Description of Artificial Sequence: Synthetic oligonucleotide
caguuguugaaacuugaca

SEQ ID NO: 2544503 - RNA, 19 nt, Artificial Sequence
  Description of Artificial Sequence: Synthetic oligonucleotide
uuccaucaacuucaccugu

SEQ ID NO: 2544504 - RNA, 19 nt, Artificial Sequence
  Description of Artificial Sequence: Synthetic oligonucleotide
gacagagucugcaaugcca

SEQ ID NO: 2544505 - RNA, 19 nt, Artificial Sequence
  Description of Artificial Sequence: Synthetic oligonucleotide
gaugaccuaccauuguuua

SEQ ID NO: 2544506 - RNA, 19 nt, Artificial Sequence
  Description of Artificial Sequence: Synthetic oligonucleotide
guuuagccagcucaaggca

SEQ ID NO: 2544507 - RNA, 19 nt, Artificial Sequence
  Description of Artificial Sequence: Synthetic oligonucleotide
auuauaccccuagguaauc

SEQ ID NO: 2544508 - RNA, 19 nt, Artificial Sequence
  Description of Artificial Sequence: Synthetic oligonucleotide
uacuaugaagagcuucguu

SEQ ID NO: 2544509 - RNA, 19 nt, Artificial Sequence
  Description of Artificial Sequence: Synthetic oligonucleotide
gcugaauuauaccccuagg

SEQ ID NO: 2544510 - RNA, 19 nt, Artificial Sequence
  Description of Artificial Sequence: Synthetic oligonucleotide
gaauaaugcucagacuuaa

SEQ ID NO: 2544511 - RNA, 19 nt, Artificial Sequence
  Description of Artificial Sequence: Synthetic oligonucleotide
gaugaccugcugcacgcug

SEQ ID NO: 2544512 - RNA, 19 nt, Artificial Sequence
  Description of Artificial Sequence: Synthetic oligonucleotide
caugaugacuccaucacgu

SEQ ID NO: 2544513 - RNA, 19 nt, Artificial Sequence
  Description of Artificial Sequence: Synthetic oligonucleotide
cucuuagaaccuccuguag

SEQ ID NO: 2544514 - RNA, 19 nt, Artificial Sequence
  Description of Artificial Sequence: Synthetic oligonucleotide
uccuuggaucgcacaagcc

SEQ ID NO: 2544515 - RNA, 19 nt, Artificial Sequence
  Description of Artificial Sequence: Synthetic oligonucleotide
aauggguacucugaaucuu

SEQ ID NO: 2544516 - RNA, 19 nt, Artificial Sequence
  Description of Artificial Sequence: Synthetic oligonucleotide
agaaccgcaugguuugccu

SEQ ID NO: 2544517 - RNA, 19 nt, Artificial Sequence
  Description of Artificial Sequence: Synthetic oligonucleotide
auccaauauggaguauuuc

SEQ ID NO: 2544518 - RNA, 19 nt, Artificial Sequence
  Description of Artificial Sequence: Synthetic oligonucleotide
augaugacuccaucacgug

SEQ ID NO: 2544519 - RNA, 19 nt, Artificial Sequence
  Description of Artificial Sequence: Synthetic oligonucleotide
auauggaguauuuccuguu

SEQ ID NO: 2544520 - RNA, 19 nt, Artificial Sequence
  Description of Artificial Sequence: Synthetic oligonucleotide
uugaauggguacucugaau

SEQ ID NO: 2544521 - RNA, 19 nt, Artificial Sequence
  Description of Artificial Sequence: Synthetic oligonucleotide
aaguauuauauuagaucuu

SEQ ID NO: 2544522 - RNA, 19 nt, Artificial Sequence
  Description of Artificial Sequence: Synthetic oligonucleotide
augagaugaccuaccauug

SEQ ID NO: 2544523 - RNA, 19 nt, Artificial Sequence
  Description of Artificial Sequence: Synthetic oligonucleotide
accuccuguaggcaguugu

SEQ ID NO: 2544524 - RNA, 19 nt, Artificial Sequence
  Description of Artificial Sequence: Synthetic oligonucleotide
aguugugcaccauccaaua

SEQ ID NO: 2544525 - RNA, 19 nt, Artificial Sequence
  Description of Artificial Sequence: Synthetic oligonucleotide
cugaauuauaccccuaggu

SEQ ID NO: 2544526 - RNA, 19 nt, Artificial Sequence
  Description of Artificial Sequence: Synthetic oligonucleotide
cacugcaucaacuaucacu

SEQ ID NO: 2544527 - RNA, 19 nt, Artificial Sequence
  Description of Artificial Sequence: Synthetic oligonucleotide
cgugaugagaaccgcaugg

SEQ ID NO: 2544528 - RNA, 19 nt, Artificial Sequence
  Description of Artificial Sequence: Synthetic oligonucleotide
gucaccacacugaaugccc

SEQ ID NO: 2544529 - RNA, 19 nt, Artificial Sequence
  Description of Artificial Sequence: Synthetic oligonucleotide
ucuauuccccaggaguuuc

SEQ ID NO: 2544530 - RNA, 19 nt, Artificial Sequence
  Description of Artificial Sequence: Synthetic oligonucleotide
guuguugaaacuugacagu

SEQ ID NO: 2544531 - RNA, 19 nt, Artificial Sequence
  Description of Artificial Sequence: Synthetic oligonucleotide
cuccaucacgugaucacac

SEQ ID NO: 2544532 - RNA, 19 nt, Artificial Sequence
  Description of Artificial Sequence: Synthetic oligonucleotide
ugaccugcugcacgcugag

SEQ ID NO: 2544533 - RNA, 19 nt, Artificial Sequence
  Description of Artificial Sequence: Synthetic oligonucleotide
gcacaagccgauucuauug

SEQ ID NO: 2544534 - RNA, 19 nt, Artificial Sequence
  Description of Artificial Sequence: Synthetic oligonucleotide
uuagaaccuccuguaggca

SEQ ID NO: 2544535 - RNA, 19 nt, Artificial Sequence
  Description of Artificial Sequence: Synthetic oligonucleotide
uuucugcaagaaugagaug

SEQ ID NO: 2544536 - RNA, 19 nt, Artificial Sequence
  Description of Artificial Sequence: Synthetic oligonucleotide
ucacaugugcauagccauc

SEQ ID NO: 2544537 - RNA, 19 nt, Artificial Sequence
  Description of Artificial Sequence: Synthetic oligonucleotide
ggagcagucgaugaccugc

SEQ ID NO: 2544538 - RNA, 19 nt, Artificial Sequence
  Description of Artificial Sequence: Synthetic oligonucleotide
uugccauuucauccuccug

SEQ ID NO: 2544539 - RNA, 19 nt, Artificial Sequence
  Description of Artificial Sequence: Synthetic oligonucleotide
gcuagcuugcucuuagaac

SEQ ID NO: 2544540 - RNA, 19 nt, Artificial Sequence
  Description of Artificial Sequence: Synthetic oligonucleotide
cuauuccccaggaguuucc

SEQ ID NO: 2544541 - RNA, 19 nt, Artificial Sequence
  Description of Artificial Sequence: Synthetic oligonucleotide
uuacuaugaagagcuucgu

SEQ ID NO: 2544542 - RNA, 19 nt, Artificial Sequence
  Description of Artificial Sequence: Synthetic oligonucleotide
ucaaggcacugagaggaga

SEQ ID NO: 2544543 - RNA, 19 nt, Artificial Sequence
  Description of Artificial Sequence: Synthetic oligonucleotide
acagugaauaaugcucaga

SEQ ID NO: 2544544 - RNA, 19 nt, Artificial Sequence
  Description of Artificial Sequence: Synthetic oligonucleotide
ugacuccaucacgugauca

SEQ ID NO: 2544545 - RNA, 19 nt, Artificial Sequence
  Description of Artificial Sequence: Synthetic oligonucleotide
cagucaccacacugaaugc

SEQ ID NO: 2544546 - RNA, 19 nt, Artificial Sequence
  Description of Artificial Sequence: Synthetic oligonucleotide
uugucucaugaugacucca

SEQ ID NO: 2544547 - RNA, 19 nt, Artificial Sequence
  Description of Artificial Sequence: Synthetic oligonucleotide
agcagugaugcugaauuau

SEQ ID NO: 2544548 - RNA, 19 nt, Artificial Sequence
  Description of Artificial Sequence: Synthetic oligonucleotide
agagucugcaaugccacaa

SEQ ID NO: 2544549 - RNA, 19 nt, Artificial Sequence
  Description of Artificial Sequence: Synthetic oligonucleotide
uauuccccaggaguuuccc

SEQ ID NO: 2544550 - RNA, 19 nt, Artificial Sequence
  Description of Artificial Sequence: Synthetic oligonucleotide
caucaacuucaccuguguc

SEQ ID NO: 2544551 - RNA, 19 nt, Artificial Sequence
  Description of Artificial Sequence: Synthetic oligonucleotide
gagguuuuccuuggaucgc

SEQ ID NO: 2544552 - RNA, 19 nt, Artificial Sequence
  Description of Artificial Sequence: Synthetic oligonucleotide
gccacaaacauuaccuccc

SEQ ID NO: 2544553 - RNA, 19 nt, Artificial Sequence
  Description of Artificial Sequence: Synthetic oligonucleotide
agguaguccagagguuuuc

SEQ ID NO: 2544554 - RNA, 19 nt, Artificial Sequence
  Description of Artificial Sequence: Synthetic oligonucleotide
gagaggagagccaccgcug

SEQ ID NO: 2544555 - RNA, 19 nt, Artificial Sequence
  Description of Artificial Sequence: Synthetic oligonucleotide
cccuagguaauccugccag

SEQ ID NO: 2544556 - RNA, 19 nt, Artificial Sequence
  Description of Artificial Sequence: Synthetic oligonucleotide
agcucacugcaucaacuau

SEQ ID NO: 2544557 - RNA, 19 nt, Artificial Sequence
  Description of Artificial Sequence: Synthetic oligonucleotide
gaugagaaccgcaugguuu

SEQ ID NO: 2544558 - RNA, 19 nt, Artificial Sequence
  Description of Artificial Sequence: Synthetic oligonucleotide
accaaagggccgaaguuca

SEQ ID NO: 2544559 - RNA, 19 nt, Artificial Sequence
  Description of Artificial Sequence: Synthetic oligonucleotide
gcaucaacuaucacuacca

SEQ ID NO: 2544560 - RNA, 19 nt, Artificial Sequence
  Description of Artificial Sequence: Synthetic oligonucleotide
auuggggaaaguagcgaca

SEQ ID NO: 2544561 - RNA, 19 nt, Artificial Sequence
  Description of Artificial Sequence: Synthetic oligonucleotide
acuccggauugugauuggg

SEQ ID NO: 2544562 - RNA, 19 nt, Artificial Sequence
  Description of Artificial Sequence: Synthetic oligonucleotide
caacagagacagagucugc

SEQ ID NO: 2544563 - RNA, 19 nt, Artificial Sequence
  Description of Artificial Sequence: Synthetic oligonucleotide
aucccgugaugagaaccgc

SEQ ID NO: 2544564 - RNA, 19 nt, Artificial Sequence
  Description of Artificial Sequence: Synthetic oligonucleotide
aggaguugugcaccaucca

SEQ ID NO: 2544565 - RNA, 19 nt, Artificial Sequence
  Description of Artificial Sequence: Synthetic oligonucleotide
accgcugcagccauaauua

SEQ ID NO: 2544566 - RNA, 19 nt, Artificial Sequence
  Description of Artificial Sequence: Synthetic oligonucleotide
gaaccgcaugguuugccuc

SEQ ID NO: 2544567 - RNA, 19 nt, Artificial Sequence
  Description of Artificial Sequence: Synthetic oligonucleotide
uuucugccuugaaugggua

SEQ ID NO: 2544568 - RNA, 19 nt, Artificial Sequence
  Description of Artificial Sequence: Synthetic oligonucleotide
agccaucuauuccccagga

SEQ ID NO: 2544569 - RNA, 19 nt, Artificial Sequence
  Description of Artificial Sequence: Synthetic oligonucleotide
acgcugagguaguccagag

SEQ ID NO: 2544570 - RNA, 19 nt, Artificial Sequence
  Description of Artificial Sequence: Synthetic oligonucleotide
ucgcacaagccgauucuau

SEQ ID NO: 2544571 - RNA, 19 nt, Artificial Sequence
  Description of Artificial Sequence: Synthetic oligonucleotide
gagaaccgcaugguuugcc

SEQ ID NO: 2544572 - RNA, 19 nt, Artificial Sequence
  Description of Artificial Sequence: Synthetic oligonucleotide
acgugaucacacaaagaca

SEQ ID NO: 2544573 - RNA, 19 nt, Artificial Sequence
  Description of Artificial Sequence: Synthetic oligonucleotide
uuggaucgcacaagccgau

SEQ ID NO: 2544574 - RNA, 19 nt, Artificial Sequence
  Description of Artificial Sequence: Synthetic oligonucleotide
aggaguuuccccaggaguu

SEQ ID NO: 2544575 - RNA, 19 nt, Artificial Sequence
  Description of Artificial Sequence: Synthetic oligonucleotide
guuuuccuuggaucgcaca

SEQ ID NO: 2544576 - RNA, 19 nt, Artificial Sequence
  Description of Artificial Sequence: Synthetic oligonucleotide
acuccaucacgugaucaca

SEQ ID NO: 2544577 - RNA, 19 nt, Artificial Sequence
  Description of Artificial Sequence: Synthetic oligonucleotide
auaccccuagguaauccug

SEQ ID NO: 2544578 - RNA, 19 nt, Artificial Sequence
  Description of Artificial Sequence: Synthetic oligonucleotide
caucacgugaucacacaaa

SEQ ID NO: 2544579 - RNA, 19 nt, Artificial Sequence
  Description of Artificial Sequence: Synthetic oligonucleotide
uggccacugaagucauaug

SEQ ID NO: 2544580 - RNA, 19 nt, Artificial Sequence
  Description of Artificial Sequence: Synthetic oligonucleotide
gggaaaguagcgacacagg

SEQ ID NO: 2544581 - RNA, 19 nt, Artificial Sequence
  Description of Artificial Sequence: Synthetic oligonucleotide
gaucgcacaagccgauucu

SEQ ID NO: 2544582 - RNA, 19 nt, Artificial Sequence
  Description of Artificial Sequence: Synthetic oligonucleotide
agaagugcuuuugccauuu

SEQ ID NO: 2544583 - RNA, 19 nt, Artificial Sequence
  Description of Artificial Sequence: Synthetic oligonucleotide
gagaugaccuaccauuguu

SEQ ID NO: 2544584 - RNA, 19 nt, Artificial Sequence
  Description of Artificial Sequence: Synthetic oligonucleotide
accgcaugguuugccuccc

SEQ ID NO: 2544585 - RNA, 19 nt, Artificial Sequence
  Description of Artificial Sequence: Synthetic oligonucleotide
agcuugcucuuagaaccuc

SEQ ID NO: 2544586 - RNA, 19 nt, Artificial Sequence
  Description of Artificial Sequence: Synthetic oligonucleotide
agaugaccuaccauuguuu

SEQ ID NO: 2544587 - RNA, 19 nt, Artificial Sequence
  Description of Artificial Sequence: Synthetic oligonucleotide
cacugagaggagagccacc

SEQ ID NO: 2544588 - RNA, 19 nt, Artificial Sequence
  Description of Artificial Sequence: Synthetic oligonucleotide
ugcagucaccacacugaau

SEQ ID NO: 2544589 - RNA, 19 nt, Artificial Sequence
  Description of Artificial Sequence: Synthetic oligonucleotide
aggcaguuguugaaacuug

SEQ ID NO: 2544590 - RNA, 19 nt, Artificial Sequence
  Description of Artificial Sequence: Synthetic oligonucleotide
ucacugcaucaacuaucac

SEQ ID NO: 2544591 - RNA, 19 nt, Artificial Sequence
  Description of Artificial Sequence: Synthetic oligonucleotide
ggaucgcacaagccgauuc

SEQ ID NO: 2544592 - RNA, 19 nt, Artificial Sequence
  Description of Artificial Sequence: Synthetic oligonucleotide
ugcugcacgcugagguagu

SEQ ID NO: 2544593 - RNA, 19 nt, Artificial Sequence
  Description of Artificial Sequence: Synthetic oligonucleotide
ugagaaccgcaugguuugc

SEQ ID NO: 2544594 - RNA, 19 nt, Artificial Sequence
  Description of Artificial Sequence: Synthetic oligonucleotide
acauuaccucccauuuuca

SEQ ID NO: 2544595 - RNA, 19 nt, Artificial Sequence
  Description of Artificial Sequence: Synthetic oligonucleotide
caccauccaauauggagua

SEQ ID NO: 2544596 - RNA, 19 nt, Artificial Sequence
  Description of Artificial Sequence: Synthetic oligonucleotide
gauugaaacuccggauugu

SEQ ID NO: 2544597 - RNA, 19 nt, Artificial Sequence
  Description of Artificial Sequence: Synthetic oligonucleotide
cugagaggagagccaccgc

SEQ ID NO: 2544598 - RNA, 19 nt, Artificial Sequence
  Description of Artificial Sequence: Synthetic oligonucleotide
cugcaucaacuaucacuac

SEQ ID NO: 2544599 - RNA, 19 nt, Artificial Sequence
  Description of Artificial Sequence: Synthetic oligonucleotide
gguaguccagagguuuucc

SEQ ID NO: 2544600 - RNA, 19 nt, Artificial Sequence
  Description of Artificial Sequence: Synthetic oligonucleotide
guuugccuccccacuggag

SEQ ID NO: 2544601 - RNA, 19 nt, Artificial Sequence
  Description of Artificial Sequence: Synthetic oligonucleotide
caucuauuccccaggaguu

SEQ ID NO: 2544602 - RNA, 19 nt, Artificial Sequence
  Description of Artificial Sequence: Synthetic oligonucleotide
gugaucacacaaagacaac

SEQ ID NO: 2544603 - RNA, 19 nt, Artificial Sequence
  Description of Artificial Sequence: Synthetic oligonucleotide
cauagccaucuauucccca

SEQ ID NO: 2544604 - RNA, 19 nt, Artificial Sequence
  Description of Artificial Sequence: Synthetic oligonucleotide
ccuagguaauccugccagc

SEQ ID NO: 2544605 - RNA, 19 nt, Artificial Sequence
  Description of Artificial Sequence: Synthetic oligonucleotide
gaaacuccggauugugauu

SEQ ID NO: 2544606 - RNA, 19 nt, Artificial Sequence
  Description of Artificial Sequence: Synthetic oligonucleotide
gagcagugaugcugaauua

SEQ ID NO: 2544607 - RNA, 19 nt, Artificial Sequence
  Description of Artificial Sequence: Synthetic oligonucleotide
ggauugugauuggggaaag

SEQ ID NO: 2544608 - RNA, 19 nt, Artificial Sequence
  Description of Artificial Sequence: Synthetic oligonucleotide
caggaguuuccccaggagu

SEQ ID NO: 2544609 - RNA, 19 nt, Artificial Sequence
  Description of Artificial Sequence: Synthetic oligonucleotide
gaggagagccaccgcugca

SEQ ID NO: 2544610 - RNA, 19 nt, Artificial Sequence
  Description of Artificial Sequence: Synthetic oligonucleotide
augcuagcuugcucuuaga

SEQ ID NO: 2544611 - RNA, 19 nt, Artificial Sequence
  Description of Artificial Sequence: Synthetic oligonucleotide
gcucacugcaucaacuauc

SEQ ID NO: 2544612 - RNA, 19 nt, Artificial Sequence
  Description of Artificial Sequence: Synthetic oligonucleotide
agcagucgaugaccugcug

SEQ ID NO: 2544613 - RNA, 19 nt, Artificial Sequence
  Description of Artificial Sequence: Synthetic oligonucleotide
guaguccagagguuuuccu

SEQ ID NO: 2544614 - RNA, 19 nt, Artificial Sequence
  Description of Artificial Sequence: Synthetic oligonucleotide
ccaucuauuccccaggagu

SEQ ID NO: 2544615 - RNA, 19 nt, Artificial Sequence
  Description of Artificial Sequence: Synthetic oligonucleotide
gccaucuauuccccaggag

SEQ ID NO: 2544616 - RNA, 19 nt, Artificial Sequence
  Description of Artificial Sequence: Synthetic oligonucleotide
ggaguuuccccaggaguug

SEQ ID NO: 2544617 - RNA, 19 nt, Artificial Sequence
  Description of Artificial Sequence: Synthetic oligonucleotide
gcaccauccaauauggagu

SEQ ID NO: 2544618 - RNA, 19 nt, Artificial Sequence
  Description of Artificial Sequence: Synthetic oligonucleotide
aucuauuccccaggaguuu

SEQ ID NO: 2544619 - RNA, 19 nt, Artificial Sequence
  Description of Artificial Sequence: Synthetic oligonucleotide
ccgauucuauugcagucac

SEQ ID NO: 2544620 - RNA, 19 nt, Artificial Sequence
  Description of Artificial Sequence: Synthetic oligonucleotide
aguagcgacacaggccauu

SEQ ID NO: 2544621 - RNA, 19 nt, Artificial Sequence
  Description of Artificial Sequence: Synthetic oligonucleotide
cauccaauauggaguauuu

SEQ ID NO: 2544622 - RNA, 19 nt, Artificial Sequence
  Description of Artificial Sequence: Synthetic oligonucleotide
gcaugguuugccuccccac

SEQ ID NO: 2544623 - RNA, 19 nt, Artificial Sequence
  Description of Artificial Sequence: Synthetic oligonucleotide
acaugugcauagccaucua

SEQ ID NO: 2544624 - RNA, 19 nt, Artificial Sequence
  Description of Artificial Sequence: Synthetic oligonucleotide
ggcaguuguugaaacuuga

SEQ ID NO: 2544625 - RNA, 19 nt, Artificial Sequence
  Description of Artificial Sequence: Synthetic oligonucleotide
cagcucacugcaucaacua

SEQ ID NO: 2544626 - RNA, 19 nt, Artificial Sequence
  Description of Artificial Sequence: Synthetic oligonucleotide
aucgcacaagccgauucua

SEQ ID NO: 2544627 - RNA, 19 nt, Artificial Sequence
  Description of Artificial Sequence: Synthetic oligonucleotide
caccugugucuuguuuagc

SEQ ID NO: 2544628 - RNA, 19 nt, Artificial Sequence
  Description of Artificial Sequence: Synthetic oligonucleotide
gccgauucuauugcaguca

SEQ ID NO: 2544629 - RNA, 19 nt, Artificial Sequence
  Description of Artificial Sequence: Synthetic oligonucleotide
aguuuccccaggaguugug

SEQ ID NO: 2544630 - RNA, 19 nt, Artificial Sequence
  Description of Artificial Sequence: Synthetic oligonucleotide
caugugcauagccaucuau

SEQ ID NO: 2544631 - RNA, 19 nt, Artificial Sequence
  Description of Artificial Sequence: Synthetic oligonucleotide
cacgcugagguaguccaga

SEQ ID NO: 2544632 - RNA, 19 nt, Artificial Sequence
  Description of Artificial Sequence: Synthetic oligonucleotide
gcauagccaucuauucccc

SEQ ID NO: 2544633 - RNA, 19 nt, Artificial Sequence
  Description of Artificial Sequence: Synthetic oligonucleotide
guugugcaccauccaauau

SEQ ID NO: 2544634 - RNA, 19 nt, Artificial Sequence
  Description of Artificial Sequence: Synthetic oligonucleotide
ccugugucuuguuuagcca

SEQ ID NO: 2544635 - RNA, 19 nt, Artificial Sequence
  Description of Artificial Sequence: Synthetic oligonucleotide
cagagucugcaaugccaca

SEQ ID NO: 2544636 - RNA, 19 nt, Artificial Sequence
  Description of Artificial Sequence: Synthetic oligonucleotide
gauugugauuggggaaagu

SEQ ID NO: 2544637 - RNA, 19 nt, Artificial Sequence
  Description of Artificial Sequence: Synthetic oligonucleotide
cuaccaaagggccgaaguu

SEQ ID NO: 2544638 - RNA, 19 nt, Artificial Sequence
  Description of Artificial Sequence: Synthetic oligonucleotide
uagcgacacaggccauuuu

SEQ ID NO: 2544639 - RNA, 19 nt, Artificial Sequence
  Description of Artificial Sequence: Synthetic oligonucleotide
gaguuuccccaggaguugu

SEQ ID NO: 2544640 - RNA, 19 nt, Artificial Sequence
  Description of Artificial Sequence: Synthetic oligonucleotide
cuggccacugaagucauau

SEQ ID NO: 2544641 - RNA, 19 nt, Artificial Sequence
  Description of Artificial Sequence: Synthetic oligonucleotide
gggccgaaguucagaagug

SEQ ID NO: 2544642 - RNA, 19 nt, Artificial Sequence
  Description of Artificial Sequence: Synthetic oligonucleotide
cgacacaggccauuuucug

SEQ ID NO: 2544643 - RNA, 19 nt, Artificial Sequence
  Description of Artificial Sequence: Synthetic oligonucleotide
ggcacugagaggagagcca

SEQ ID NO: 2544644 - RNA, 19 nt, Artificial Sequence
  Description of Artificial Sequence: Synthetic oligonucleotide
aaguagcgacacaggccau

SEQ ID NO: 2544645 - RNA, 19 nt, Artificial Sequence
  Description of Artificial Sequence: Synthetic oligonucleotide
caccgcugcagccauaauu

SEQ ID NO: 2544646 - RNA, 19 nt, Artificial Sequence
  Description of Artificial Sequence: Synthetic oligonucleotide
gcagugaugcugaauuaua

SEQ ID NO: 2544647 - RNA, 19 nt, Artificial Sequence
  Description of Artificial Sequence: Synthetic oligonucleotide
guccaucuuucugcaagaa

SEQ ID NO: 2544648 - RNA, 19 nt, Artificial Sequence
  Description of Artificial Sequence: Synthetic oligonucleotide
uggaucgcacaagccgauu

SEQ ID NO: 2544649 - RNA, 19 nt, Artificial Sequence
  Description of Artificial Sequence: Synthetic oligonucleotide
cgauucuauugcagucacc

SEQ ID NO: 2544650 - RNA, 19 nt, Artificial Sequence
  Description of Artificial Sequence: Synthetic oligonucleotide
ccaucacgugaucacacaa

SEQ ID NO: 2544651 - RNA, 19 nt, Artificial Sequence
  Description of Artificial Sequence: Synthetic oligonucleotide
gugucuuguuuagccagcu

SEQ ID NO: 2544652 - RNA, 19 nt, Artificial Sequence
  Description of Artificial Sequence: Synthetic oligonucleotide
gagcagucgaugaccugcu

SEQ ID NO: 2544653 - RNA, 19 nt, Artificial Sequence
  Description of Artificial Sequence: Synthetic oligonucleotide
cgcugagguaguccagagg

SEQ ID NO: 2544654 - RNA, 19 nt, Artificial Sequence
  Description of Artificial Sequence: Synthetic oligonucleotide
augcugaauuauaccccua

SEQ ID NO: 2544655 - RNA, 19 nt, Artificial Sequence
  Description of Artificial Sequence: Synthetic oligonucleotide
ccggauugugauuggggaa

SEQ ID NO: 2544656 - RNA, 19 nt, Artificial Sequence
  Description of Artificial Sequence: Synthetic oligonucleotide
gcaaugccacaaacauuac

SEQ ID NO: 2544657 - RNA, 19 nt, Artificial Sequence
  Description of Artificial Sequence: Synthetic oligonucleotide
ccagcucacugcaucaacu

SEQ ID NO: 2544658 - RNA, 19 nt, Artificial Sequence
  Description of Artificial Sequence: Synthetic oligonucleotide
guagcgacacaggccauuu

SEQ ID NO: 2544659 - RNA, 19 nt, Artificial Sequence
  Description of Artificial Sequence: Synthetic oligonucleotide
cuccccacuggagcaguga

SEQ ID NO: 2544660 - RNA, 19 nt, Artificial Sequence
  Description of Artificial Sequence: Synthetic oligonucleotide
ccagcucaaggcacugaga

SEQ ID NO: 2544661 - RNA, 19 nt, Artificial Sequence
  Description of Artificial Sequence: Synthetic oligonucleotide
gccgaaguucagaagugcu

SEQ ID NO: 2544662 - RNA, 19 nt, Artificial Sequence
  Description of Artificial Sequence: Synthetic oligonucleotide
gugcaccauccaauaugga

SEQ ID NO: 2544663 - RNA, 19 nt, Artificial Sequence
  Description of Artificial Sequence: Synthetic oligonucleotide
gcacgcugagguaguccag

SEQ ID NO: 2544664 - RNA, 19 nt, Artificial Sequence
  Description of Artificial Sequence: Synthetic oligonucleotide
cggauugugauuggggaaa

SEQ ID NO: 2544665 - RNA, 19 nt, Artificial Sequence
  Description of Artificial Sequence: Synthetic oligonucleotide
ccaucaacuucaccugugu

SEQ ID NO: 2544666 - RNA, 19 nt, Artificial Sequence
  Description of Artificial Sequence: Synthetic oligonucleotide
cccaggaguuuccccagga

SEQ ID NO: 2544667 - RNA, 19 nt, Artificial Sequence
  Description of Artificial Sequence: Synthetic oligonucleotide
cagaagugcuuuugccauu

SEQ ID NO: 2544668 - RNA, 19 nt, Artificial Sequence
  Description of Artificial Sequence: Synthetic oligonucleotide
gaaccuccuguaggcaguu

SEQ ID NO: 2544669 - RNA, 19 nt, Artificial Sequence
  Description of Artificial Sequence: Synthetic oligonucleotide
gccaccgcugcagccauaa

SEQ ID NO: 2544670 - RNA, 19 nt, Artificial Sequence
  Description of Artificial Sequence: Synthetic oligonucleotide
ccccuagguaauccugcca

SEQ ID NO: 2544671 - RNA, 19 nt, Artificial Sequence
  Description of Artificial Sequence: Synthetic oligonucleotide
ccgaaguucagaagugcuu

SEQ ID NO: 2544672 - RNA, 19 nt, Artificial Sequence
  Description of Artificial Sequence: Synthetic oligonucleotide
gcucagacuuaaguauuau

SEQ ID NO: 2544673 - RNA, 19 nt, Artificial Sequence
  Description of Artificial Sequence: Synthetic oligonucleotide
ccugcugcacgcugaggua

SEQ ID NO: 2544674 - RNA, 19 nt, Artificial Sequence
  Description of Artificial Sequence: Synthetic oligonucleotide
cgaaguucagaagugcuuu

SEQ ID NO: 2544675 - RNA, 19 nt, Artificial Sequence
  Description of Artificial Sequence: Synthetic oligonucleotide
gcugcacgcugagguaguc

SEQ ID NO: 2544676 - RNA, 19 nt, Artificial Sequence
  Description of Artificial Sequence: Synthetic oligonucleotide
cgcaugguuugccucccca

SEQ ID NO: 2544677 - RNA, 19 nt, Artificial Sequence
  Description of Artificial Sequence: Synthetic oligonucleotide
ccgcaugguuugccucccc

SEQ ID NO: 2544678 - RNA, 19 nt, Artificial Sequence
  Description of Artificial Sequence: Synthetic oligonucleotide
cgcacaagccgauucuauu

SEQ ID NO: 2544679 - RNA, 19 nt, Artificial Sequence
  Description of Artificial Sequence: Synthetic oligonucleotide
cgaugaccugcugcacgcu

SEQ ID NO: 2544680 - RNA, 19 nt, Artificial Sequence
  Description of Artificial Sequence: Synthetic oligonucleotide
ccaccgcugcagccauaau

SEQ ID NO: 2544681 - RNA, 19 nt, Artificial Sequence
  Description of Artificial Sequence: Synthetic oligonucleotide
aagaaaagcacuuuaugac

SEQ ID NO: 2544682 - RNA, 19 nt, Artificial Sequence
  Description of Artificial Sequence: Synthetic oligonucleotide
aaucaagacacacaugagc

SEQ ID NO: 2544683 - RNA, 19 nt, Artificial Sequence
  Description of Artificial Sequence: Synthetic oligonucleotide
acauuauuaacauugaaag

SEQ ID NO: 2544684 - RNA, 19 nt, Artificial Sequence
  Description of Artificial Sequence: Synthetic oligonucleotide
  modified_base (14)..(14): a, c, u, g, unknown or other
acugcuaccauucngaaca

SEQ ID NO: 2544685 - RNA, 19 nt, Artificial Sequence
  Description of Artificial Sequence: Synthetic oligonucleotide
gauuauaugccucucuugg

SEQ ID NO: 2544686 - RNA, 19 nt, Artificial Sequence
  Description of Artificial Sequence: Synthetic oligonucleotide
uugaacaacaacuugguug

SEQ ID NO: 2544687 - RNA, 19 nt, Artificial Sequence
  Description of Artificial Sequence: Synthetic oligonucleotide
aaagauuacaguaagaaaa

SEQ ID NO: 2544688 - RNA, 19 nt, Artificial Sequence
  Description of Artificial Sequence: Synthetic oligonucleotide
uuuauucuaugcuaguggg

SEQ ID NO: 2544689 - RNA, 19 nt, Artificial Sequence
  Description of Artificial Sequence: Synthetic oligonucleotide
uugaaauucuuccauacug

SEQ ID NO: 2544690 - RNA, 19 nt, Artificial Sequence
  Description of Artificial Sequence: Synthetic oligonucleotide
uaggacauaacagugacgg

SEQ ID NO: 2544691 - RNA, 19 nt, Artificial Sequence
  Description of Artificial Sequence: Synthetic oligonucleotide
uaagaaaagcacuuuauga

SEQ ID NO: 2544692 - RNA, 19 nt, Artificial Sequence
  Description of Artificial Sequence: Synthetic oligonucleotide
acaaggaucacuuuaauau

SEQ ID NO: 2544693 - RNA, 19 nt, Artificial Sequence
  Description of Artificial Sequence: Synthetic oligonucleotide
  modified_base (5)..(5): a, c, u, g, unknown or other
auucngaacacaaagcagc

SEQ ID NO: 2544694 - RNA, 19 nt, Artificial Sequence
  Description of Artificial Sequence: Synthetic oligonucleotide
aaggaaaccaguuccuagg

SEQ ID NO: 2544695 - RNA, 19 nt, Artificial Sequence
  Description of Artificial Sequence: Synthetic oligonucleotide
uguacuguagaauaguggu

SEQ ID NO: 2544696 - RNA, 19 nt, Artificial Sequence
  Description of Artificial Sequence: Synthetic oligonucleotide
aguaugucauaccaugagc

SEQ ID NO: 2544697 - RNA, 19 nt, Artificial Sequence
  Description of Artificial Sequence: Synthetic oligonucleotide
aucgguaccauuguuagcc

SEQ ID NO: 2544698 - RNA, 19 nt, Artificial Sequence
  Description of Artificial Sequence: Synthetic oligonucleotide
guaaucaagacacacauga

SEQ ID NO: 2544699 - RNA, 19 nt, Artificial Sequence
  Description of Artificial Sequence: Synthetic oligonucleotide
ugcuugucugguaaaaucg

SEQ ID NO: 2544700 - RNA, 19 nt, Artificial Sequence
  Description of Artificial Sequence: Synthetic oligonucleotide
aaguaaucaagacacacau

SEQ ID NO: 2544701 - RNA, 19 nt, Artificial Sequence
  Description of Artificial Sequence: Synthetic oligonucleotide
  modified_base (9)..(9): a, c, u, g, unknown or other
uaccauucngaacacaaag

SEQ ID NO: 2544702 - RNA, 19 nt, Artificial Sequence
  Description of Artificial Sequence: Synthetic oligonucleotide
aucaagacacacaugagcc

SEQ ID NO: 2544703 - RNA, 19 nt, Artificial Sequence
  Description of Artificial Sequence: Synthetic oligonucleotide
auuauuaacauugaaagua

SEQ ID NO: 2544704 - RNA, 19 nt, Artificial Sequence
  Description of Artificial Sequence: Synthetic oligonucleotide
ugacgguuaacuuaaaagu

SEQ ID NO: 2544705 - RNA, 19 nt, Artificial Sequence
  Description of Artificial Sequence: Synthetic oligonucleotide
aagucaaggaaaccaguuc

SEQ ID NO: 2544706 - RNA, 19 nt, Artificial Sequence
  Description of Artificial Sequence: Synthetic oligonucleotide
uuauaugccucucuuggcc

SEQ ID NO: 2544707 - RNA, 19 nt, Artificial Sequence
  Description of Artificial Sequence: Synthetic oligonucleotide
uacgaauuugguauguuug

SEQ ID NO: 2544708 - RNA, 19 nt, Artificial Sequence
  Description of Artificial Sequence: Synthetic oligonucleotide
cuucaugauauguucaacc

SEQ ID NO: 2544709 - RNA, 19 nt, Artificial Sequence
  Description of Artificial Sequence: Synthetic oligonucleotide
uuaauauacaaagcaacug

SEQ ID NO: 2544710 - RNA, 19 nt, Artificial Sequence
  Description of Artificial Sequence: Synthetic oligonucleotide
guugauaccacaaagauua

SEQ ID NO: 2544711 - RNA, 19 nt, Artificial Sequence
  Description of Artificial Sequence: Synthetic oligonucleotide
uuaacuuaaaagucaacau

SEQ ID NO: 2544712 - RNA, 19 nt, Artificial Sequence
  Description of Artificial Sequence: Synthetic oligonucleotide
uucaugauauguucaaccc

SEQ ID NO: 2544713 - RNA, 19 nt, Artificial Sequence
  Description of Artificial Sequence: Synthetic oligonucleotide
uugguauguuuguacaucg

SEQ ID NO: 2544714 - RNA, 19 nt, Artificial Sequence
  Description of Artificial Sequence: Synthetic oligonucleotide
auuauaugccucucuuggc

SEQ ID NO: 2544715 - RNA, 19 nt, Artificial Sequence
  Description of Artificial Sequence: Synthetic oligonucleotide
gacaguugauaccacaaag

SEQ ID NO: 2544716 - RNA, 19 nt, Artificial Sequence
  Description of Artificial Sequence: Synthetic oligonucleotide
uauguuuguacaucgccag

SEQ ID NO: 2544717 - RNA, 19 nt, Artificial Sequence
  Description of Artificial Sequence: Synthetic oligonucleotide
guaauggcaauauacugcc

SEQ ID NO: 2544718 - RNA, 19 nt, Artificial Sequence
  Description of Artificial Sequence: Synthetic oligonucleotide
augacaauauuucacaaau

SEQ ID NO: 2544719 - RNA, 19 nt, Artificial Sequence
  Description of Artificial Sequence: Synthetic oligonucleotide
ugaaauucuuccauacuga

SEQ ID NO: 2544720 - RNA, 19 nt, Artificial Sequence
  Description of Artificial Sequence: Synthetic oligonucleotide
ucuaguugugcuuuguaca

SEQ ID NO: 2544721 - RNA, 19 nt, Artificial Sequence
  Description of Artificial Sequence: Synthetic oligonucleotide
uuauuaacauugaaaguaa

SEQ ID NO: 2544722 - RNA, 19 nt, Artificial Sequence
  Description of Artificial Sequence: Synthetic oligonucleotide
aagucaacauuauuaacau

SEQ ID NO: 2544723 - RNA, 19 nt, Artificial Sequence
  Description of Artificial Sequence: Synthetic oligonucleotide
gugacgguuaacuuaaaag

SEQ ID NO: 2544724 - RNA, 19 nt, Artificial Sequence
  Description of Artificial Sequence: Synthetic oligonucleotide
cacuuuaugacaauauuuc

SEQ ID NO: 2544725 - RNA, 19 nt, Artificial Sequence
  Description of Artificial Sequence: Synthetic oligonucleotide
aacaacuugguugcugggc

SEQ ID NO: 2544726 - RNA, 19 nt, Artificial Sequence
  Description of Artificial Sequence: Synthetic oligonucleotide
auuaugacaguugauacca

SEQ ID NO: 2544727 - RNA, 19 nt, Artificial Sequence
  Description of Artificial Sequence: Synthetic oligonucleotide
caaguuuauucuaugcuag

SEQ ID NO: 2544728 - RNA, 19 nt, Artificial Sequence
  Description of Artificial Sequence: Synthetic oligonucleotide
uguagaauagugguacccg

SEQ ID NO: 2544729 - RNA, 19 nt, Artificial Sequence
  Description of Artificial Sequence: Synthetic oligonucleotide
uuacaguaagaaaagcacu

SEQ ID NO: 2544730 - RNA, 19 nt, Artificial Sequence
  Description of Artificial Sequence: Synthetic oligonucleotide
gauucuagaaagucaagga

SEQ ID NO: 2544731 - RNA, 19 nt, Artificial Sequence
  Description of Artificial Sequence: Synthetic oligonucleotide
uuuguacaucgccagaggc

SEQ ID NO: 2544732 - RNA, 19 nt, Artificial Sequence
  Description of Artificial Sequence: Synthetic oligonucleotide
uauucuaugcuagugggug

SEQ ID NO: 2544733 - RNA, 19 nt, Artificial Sequence
  Description of Artificial Sequence: Synthetic oligonucleotide
aaaaucggaaguuggcacu

SEQ ID NO: 2544734 - RNA, 19 nt, Artificial Sequence
  Description of Artificial Sequence: Synthetic oligonucleotide
auuaacauugaaaguaauc

SEQ ID NO: 2544735 - RNA, 19 nt, Artificial Sequence
  Description of Artificial Sequence: Synthetic oligonucleotide
agaaaagcacuuuaugaca

SEQ ID NO: 2544736 - RNA, 19 nt, Artificial Sequence
  Description of Artificial Sequence: Synthetic oligonucleotide
uuguuagccagcuguauag

SEQ ID NO: 2544737 - RNA, 19 nt, Artificial Sequence
  Description of Artificial Sequence: Synthetic oligonucleotide
gaacaaguuuauucuaugc

SEQ ID NO: 2544738 - RNA, 19 nt, Artificial Sequence
  Description of Artificial Sequence: Synthetic oligonucleotide
ucaugauauguucaacccc

SEQ ID NO: 2544739 - RNA, 19 nt, Artificial Sequence
  Description of Artificial Sequence: Synthetic oligonucleotide
guuaacuuaaaagucaaca

SEQ ID NO: 2544740 - RNA, 19 nt, Artificial Sequence
  Description of Artificial Sequence: Synthetic oligonucleotide
  modified_base (4)..(4): a, c, u, g, unknown or other
uucngaacacaaagcagcc

SEQ ID NO: 2544741 - RNA, 19 nt, Artificial Sequence
  Description of Artificial Sequence: Synthetic oligonucleotide
ugagccacccaacagaaaa

SEQ ID NO: 2544742 - RNA, 19 nt, Artificial Sequence
  Description of Artificial Sequence: Synthetic oligonucleotide
uaaaaucggaaguuggcac

SEQ ID NO: 2544743 - RNA, 19 nt, Artificial Sequence
  Description of Artificial Sequence: Synthetic oligonucleotide
ugacucaacuucaugauau

SEQ ID NO: 2544744 - RNA, 19 nt, Artificial Sequence
  Description of Artificial Sequence: Synthetic oligonucleotide
ugucugaaggcccuguacc

SEQ ID NO: 2544745 - RNA, 19 nt, Artificial Sequence
  Description of Artificial Sequence: Synthetic oligonucleotide
cauuaugacaguugauacc

SEQ ID NO: 2544746 - RNA, 19 nt, Artificial Sequence
  Description of Artificial Sequence: Synthetic oligonucleotide
uaugugucugcacauaaau

SEQ ID NO: 2544747 - RNA, 19 nt, Artificial Sequence
  Description of Artificial Sequence: Synthetic oligonucleotide
ucuguacuguagaauagug

SEQ ID NO: 2544748 - RNA, 19 nt, Artificial Sequence
  Description of Artificial Sequence: Synthetic oligonucleotide
aaccgcagcacccuguuug

SEQ ID NO: 2544749 - RNA, 19 nt, Artificial Sequence
  Description of Artificial Sequence: Synthetic oligonucleotide
auaacagugacgguuaacu

SEQ ID NO: 2544750 - RNA, 19 nt, Artificial Sequence
  Description of Artificial Sequence: Synthetic oligonucleotide
  modified_base (15)..(15): a, c, u, g, unknown or other
aacugcuaccauucngaac

SEQ ID NO: 2544751 - RNA, 19 nt, Artificial Sequence
  Description of Artificial Sequence: Synthetic oligonucleotide
  modified_base (2)..(2): a, c, u, g, unknown or other
cngaacacaaagcagccag

SEQ ID NO: 2544752 - RNA, 19 nt, Artificial Sequence
  Description of Artificial Sequence: Synthetic oligonucleotide
agcuugaacaacaacuugg

SEQ ID NO: 2544753 - RNA, 19 nt, Artificial Sequence
  Description of Artificial Sequence: Synthetic oligonucleotide
uguacaucgccagaggcag

SEQ ID NO: 2544754 - RNA, 19 nt, Artificial Sequence
  Description of Artificial Sequence: Synthetic oligonucleotide
uuugaaauucuuccauacu

SEQ ID NO: 2544755 - RNA, 19 nt, Artificial Sequence
  Description of Artificial Sequence: Synthetic oligonucleotide
ugaacaaguuuauucuaug

SEQ ID NO: 2544756 - RNA, 19 nt, Artificial Sequence
  Description of Artificial Sequence: Synthetic oligonucleotide
uggguaauggcaauauacu

SEQ ID NO: 2544757 - RNA, 19 nt, Artificial Sequence
  Description of Artificial Sequence: Synthetic oligonucleotide
uaugucauaccaugagcag

SEQ ID NO: 2544758 - RNA, 19 nt, Artificial Sequence
  Description of Artificial Sequence: Synthetic oligonucleotide
  modified_base (6)..(6): a, c, u, g, unknown or other
cauucngaacacaaagcag

SEQ ID NO: 2544759 - RNA, 19 nt, Artificial Sequence
  Description of Artificial Sequence: Synthetic oligonucleotide
aacucugugaacaaguuua

SEQ ID NO: 2544760 - RNA, 19 nt, Artificial Sequence
  Description of Artificial Sequence: Synthetic oligonucleotide
uuuaugugucugcacauaa

SEQ ID NO: 2544761 - RNA, 19 nt, Artificial Sequence
  Description of Artificial Sequence: Synthetic oligonucleotide
auguuuaugugucugcaca

SEQ ID NO: 2544762 - RNA, 19 nt, Artificial Sequence
  Description of Artificial Sequence: Synthetic oligonucleotide
cauugaaaguaaucaagac

SEQ ID NO: 2544763 - RNA, 19 nt, Artificial Sequence
  Description of Artificial Sequence: Synthetic oligonucleotide
uacaguaagaaaagcacuu

SEQ ID NO: 2544764 - RNA, 19 nt, Artificial Sequence
  Description of Artificial Sequence: Synthetic oligonucleotide
uguuuguacaucgccagag

SEQ ID NO: 2544765 - RNA, 19 nt, Artificial Sequence
  Description of Artificial Sequence: Synthetic oligonucleotide
auucuaugcuagugggugc

SEQ ID NO: 2544766 - RNA, 19 nt, Artificial Sequence
  Description of Artificial Sequence: Synthetic oligonucleotide
uacuguagaauagugguac

SEQ ID NO: 2544767 - RNA, 19 nt, Artificial Sequence
  Description of Artificial Sequence: Synthetic oligonucleotide
ucaaggauuauaugccucu

SEQ ID NO: 2544768 - RNA, 19 nt, Artificial Sequence
  Description of Artificial Sequence: Synthetic oligonucleotide
uaaucaagacacacaugag

SEQ ID NO: 2544769 - RNA, 19 nt, Artificial Sequence
  Description of Artificial Sequence: Synthetic oligonucleotide
gaaauucuuccauacugac

SEQ ID NO: 2544770 - RNA, 19 nt, Artificial Sequence
  Description of Artificial Sequence: Synthetic oligonucleotide
acuguagaauagugguacc

SEQ ID NO: 2544771 - RNA, 19 nt, Artificial Sequence
  Description of Artificial Sequence: Synthetic oligonucleotide
guagaauagugguacccgg

SEQ ID NO: 2544772 - RNA, 19 nt, Artificial Sequence
  Description of Artificial Sequence: Synthetic oligonucleotide
acaaguuuauucuaugcua

SEQ ID NO: 2544773 - RNA, 19 nt, Artificial Sequence
  Description of Artificial Sequence: Synthetic oligonucleotide
ucauaccaugagcagaugu

SEQ ID NO: 2544774 - RNA, 19 nt, Artificial Sequence
  Description of Artificial Sequence: Synthetic oligonucleotide
  modified_base (8)..(8): a, c, u, g, unknown or other
accauucngaacacaaagc

SEQ ID NO: 2544775 - RNA, 19 nt, Artificial Sequence
  Description of Artificial Sequence: Synthetic oligonucleotide
ugucauaccaugagcagau

SEQ ID NO: 2544776 - RNA, 19 nt, Artificial Sequence
  Description of Artificial Sequence: Synthetic oligonucleotide
uuguuugaaauucuuccau

SEQ ID NO: 2544777 - RNA, 19 nt, Artificial Sequence
  Description of Artificial Sequence: Synthetic oligonucleotide
aaggauuauaugccucucu

SEQ ID NO: 2544778 - RNA, 19 nt, Artificial Sequence
  Description of Artificial Sequence: Synthetic oligonucleotide
uucuaguugugcuuuguac

SEQ ID NO: 2544779 - RNA, 19 nt, Artificial Sequence
  Description of Artificial Sequence: Synthetic oligonucleotide
aaauucacaaggaucacuu

SEQ ID NO: 2544780 - RNA, 19 nt, Artificial Sequence
  Description of Artificial Sequence: Synthetic oligonucleotide
uaugacaguugauaccaca

SEQ ID NO: 2544781 - RNA, 19 nt, Artificial Sequence
  Description of Artificial Sequence: Synthetic oligonucleotide
guugcugggcacuagaauc

SEQ ID NO: 2544782 - RNA, 19 nt, Artificial Sequence
  Description of Artificial Sequence: Synthetic oligonucleotide
uaccccaucgguaccauug

SEQ ID NO: 2544783 - RNA, 19 nt, Artificial Sequence
  Description of Artificial Sequence: Synthetic oligonucleotide
uagaauagugguacccggc

SEQ ID NO: 2544784 - RNA, 19 nt, Artificial Sequence
  Description of Artificial Sequence: Synthetic oligonucleotide
aguuccuaggacauaacag

SEQ ID NO: 2544785 - RNA, 19 nt, Artificial Sequence
  Description of Artificial Sequence: Synthetic oligonucleotide
aguugugcuuuguacaacu

SEQ ID NO: 2544786 - RNA, 19 nt, Artificial Sequence
  Description of Artificial Sequence: Synthetic oligonucleotide
ugcuagugggugcuguacg

SEQ ID NO: 2544787 - RNA, 19 nt, Artificial Sequence
  Description of Artificial Sequence: Synthetic oligonucleotide
auugauucuagaaagucaa

SEQ ID NO: 2544788 - RNA, 19 nt, Artificial Sequence
  Description of Artificial Sequence: Synthetic oligonucleotide
ugcacauaaaugucugugu

SEQ ID NO: 2544789 - RNA, 19 nt, Artificial Sequence
  Description of Artificial Sequence: Synthetic oligonucleotide
ucaguggucuguacuguag

SEQ ID NO: 2544790 - RNA, 19 nt, Artificial Sequence
  Description of Artificial Sequence: Synthetic oligonucleotide
uauagcuccucccugggua

SEQ ID NO: 2544791 - RNA, 19 nt, Artificial Sequence
  Description of Artificial Sequence: Synthetic oligonucleotide
uugugcuuuguacaacucu

SEQ ID NO: 2544792 - RNA, 19 nt, Artificial Sequence
  Description of Artificial Sequence: Synthetic oligonucleotide
uggucuguacuguagaaua

SEQ ID NO: 2544793 - RNA, 19 nt, Artificial Sequence
  Description of Artificial Sequence: Synthetic oligonucleotide
ugcuuuguacaacucugug

SEQ ID NO: 2544794 - RNA, 19 nt, Artificial Sequence
  Description of Artificial Sequence: Synthetic oligonucleotide
uugauucuagaaagucaag

SEQ ID NO: 2544795 - RNA, 19 nt, Artificial Sequence
  Description of Artificial Sequence: Synthetic oligonucleotide
uccaucaguggucuguacu

SEQ ID NO: 2544796 - RNA, 19 nt, Artificial Sequence
  Description of Artificial Sequence: Synthetic oligonucleotide
agggcauuaugacaguuga

SEQ ID NO: 2544797 - RNA, 19 nt, Artificial Sequence
  Description of Artificial Sequence: Synthetic oligonucleotide
uuauucuaugcuagugggu

SEQ ID NO: 2544798 - RNA, 19 nt, Artificial Sequence
  Description of Artificial Sequence: Synthetic oligonucleotide
ggccauugauucuagaaag

SEQ ID NO: 2544799 - RNA, 19 nt, Artificial Sequence
  Description of Artificial Sequence: Synthetic oligonucleotide
guuuguacaucgccagagg

SEQ ID NO: 2544800 - RNA, 19 nt, Artificial Sequence
  Description of Artificial Sequence: Synthetic oligonucleotide
uugucugguaaaaucggaa

SEQ ID NO: 2544801 - RNA, 19 nt, Artificial Sequence
  Description of Artificial Sequence: Synthetic oligonucleotide
ugauauguucaaccccuca

SEQ ID NO: 2544802 - RNA, 19 nt, Artificial Sequence
  Description of Artificial Sequence: Synthetic oligonucleotide
agaauagugguacccggcu

SEQ ID NO: 2544803 - RNA, 19 nt, Artificial Sequence
  Description of Artificial Sequence: Synthetic oligonucleotide
gacgguuaacuuaaaaguc

SEQ ID NO: 2544804 - RNA, 19 nt, Artificial Sequence
  Description of Artificial Sequence: Synthetic oligonucleotide
cauugauucuagaaaguca

SEQ ID NO: 2544805 - RNA, 19 nt, Artificial Sequence
  Description of Artificial Sequence: Synthetic oligonucleotide
aacaacaacuugguugcug

SEQ ID NO: 2544806 - RNA, 19 nt, Artificial Sequence
  Description of Artificial Sequence: Synthetic oligonucleotide
acgaauuugguauguuugu

SEQ ID NO: 2544807 - RNA, 19 nt, Artificial Sequence
  Description of Artificial Sequence: Synthetic oligonucleotide
uccuaggacauaacaguga

SEQ ID NO: 2544808 - RNA, 19 nt, Artificial Sequence
  Description of Artificial Sequence: Synthetic oligonucleotide
acaacuugguugcugggca

SEQ ID NO: 2544809 - RNA, 19 nt, Artificial Sequence
  Description of Artificial Sequence: Synthetic oligonucleotide
uauaugccucucuuggcca

SEQ ID NO: 2544810 - RNA, 19 nt, Artificial Sequence
  Description of Artificial Sequence: Synthetic oligonucleotide
uuagccagcuguauagcuc

SEQ ID NO: 2544811 - RNA, 19 nt, Artificial Sequence
  Description of Artificial Sequence: Synthetic oligonucleotide
acccuguuugauuuguuug

SEQ ID NO: 2544812 - RNA, 19 nt, Artificial Sequence
  Description of Artificial Sequence: Synthetic oligonucleotide
uguuugaaauucuuccaua

SEQ ID NO: 2544813 - RNA, 19 nt, Artificial Sequence
  Description of Artificial Sequence: Synthetic oligonucleotide
guaugucauaccaugagca

SEQ ID NO: 2544814 - RNA, 19 nt, Artificial Sequence
  Description of Artificial Sequence: Synthetic oligonucleotide
auaccaugagcagauguag

SEQ ID NO: 2544815 - RNA, 19 nt, Artificial Sequence
  Description of Artificial Sequence: Synthetic oligonucleotide
acacacaugagccacccaa

SEQ ID NO: 2544816 - RNA, 19 nt, Artificial Sequence
  Description of Artificial Sequence: Synthetic oligonucleotide
caguaugucauaccaugag

SEQ ID NO: 2544817 - RNA, 19 nt, Artificial Sequence
  Description of Artificial Sequence: Synthetic oligonucleotide
acauaaaugucuguguaaa

SEQ ID NO: 2544818 - RNA, 19 nt, Artificial Sequence
  Description of Artificial Sequence: Synthetic oligonucleotide
ugugaacaaguuuauucua

SEQ ID NO: 2544819 - RNA, 19 nt, Artificial Sequence
  Description of Artificial Sequence: Synthetic oligonucleotide
aaaucggaaguuggcacug

SEQ ID NO: 2544820 - RNA, 19 nt, Artificial Sequence
  Description of Artificial Sequence: Synthetic oligonucleotide
aagacacacaugagccacc

SEQ ID NO: 2544821 - RNA, 19 nt, Artificial Sequence
  Description of Artificial Sequence: Synthetic oligonucleotide
acugacucaacuucaugau

SEQ ID NO: 2544822 - RNA, 19 nt, Artificial Sequence
  Description of Artificial Sequence: Synthetic oligonucleotide
cuaggacauaacagugacg

SEQ ID NO: 2544823 - RNA, 19 nt, Artificial Sequence
  Description of Artificial Sequence: Synthetic oligonucleotide
ugauaccacaaagauuaca

SEQ ID NO: 2544824 - RNA, 19 nt, Artificial Sequence
  Description of Artificial Sequence: Synthetic oligonucleotide
uuaugugucugcacauaaa

SEQ ID NO: 2544825 - RNA, 19 nt, Artificial Sequence
  Description of Artificial Sequence: Synthetic oligonucleotide
gaauagugguacccggcug

SEQ ID NO: 2544826 - RNA, 19 nt, Artificial Sequence
  Description of Artificial Sequence: Synthetic oligonucleotide
ugacaguugauaccacaaa

SEQ ID NO: 2544827 - RNA, 19 nt, Artificial Sequence
  Description of Artificial Sequence: Synthetic oligonucleotide
guaaaaucggaaguuggca

SEQ ID NO: 2544828 - RNA, 19 nt, Artificial Sequence
  Description of Artificial Sequence: Synthetic oligonucleotide
aguaagaaaagcacuuuau

SEQ ID NO: 2544829 - RNA, 19 nt, Artificial Sequence
  Description of Artificial Sequence: Synthetic oligonucleotide
aauucuaguugugcuuugu

SEQ ID NO: 2544830 - RNA, 19 nt, Artificial Sequence
  Description of Artificial Sequence: Synthetic oligonucleotide
ucggaaguuggcacuguca

SEQ ID NO: 2544831 - RNA, 19 nt, Artificial Sequence
  Description of Artificial Sequence: Synthetic oligonucleotide
agcuguauagcuccucccu

SEQ ID NO: 2544832 - RNA, 19 nt, Artificial Sequence
  Description of Artificial Sequence: Synthetic oligonucleotide
auaccacaaagauuacagu

SEQ ID NO: 2544833 - RNA, 19 nt, Artificial Sequence
  Description of Artificial Sequence: Synthetic oligonucleotide
ugguauguuuguacaucgc

SEQ ID NO: 2544834 - RNA, 19 nt, Artificial Sequence
  Description of Artificial Sequence: Synthetic oligonucleotide
aagggcauuaugacaguug

SEQ ID NO: 2544835 - RNA, 19 nt, Artificial Sequence
  Description of Artificial Sequence: Synthetic oligonucleotide
cuguagaauagugguaccc

SEQ ID NO: 2544836 - RNA, 19 nt, Artificial Sequence
  Description of Artificial Sequence: Synthetic oligonucleotide
cauguuuaugugucugcac

SEQ ID NO: 2544837 - RNA, 19 nt, Artificial Sequence
  Description of Artificial Sequence: Synthetic oligonucleotide
acgguuaacuuaaaaguca

SEQ ID NO: 2544838 - RNA, 19 nt, Artificial Sequence
  Description of Artificial Sequence: Synthetic oligonucleotide
auuguuagccagcuguaua

SEQ ID NO: 2544839 - RNA, 19 nt, Artificial Sequence
  Description of Artificial Sequence: Synthetic oligonucleotide
aggauuauaugccucucuu

SEQ ID NO: 2544840 - RNA, 19 nt, Artificial Sequence
  Description of Artificial Sequence: Synthetic oligonucleotide
uuccauacugacucaacuu

SEQ ID NO: 2544841 - RNA, 19 nt, Artificial Sequence
  Description of Artificial Sequence: Synthetic oligonucleotide
cugcuugucugguaaaauc

SEQ ID NO: 2544842 - RNA, 19 nt, Artificial Sequence
  Description of Artificial Sequence: Synthetic oligonucleotide
gcauuaugacaguugauac

SEQ ID NO: 2544843 - RNA, 19 nt, Artificial Sequence
  Description of Artificial Sequence: Synthetic oligonucleotide
ggguaauggcaauauacug

SEQ ID NO: 2544844 - RNA, 19 nt, Artificial Sequence
  Description of Artificial Sequence: Synthetic oligonucleotide
cucaaggauuauaugccuc

SEQ ID NO: 2544845 - RNA, 19 nt, Artificial Sequence
  Description of Artificial Sequence: Synthetic oligonucleotide
cuagaaagucaaggaaacc

SEQ ID NO: 2544846 - RNA, 19 nt, Artificial Sequence
  Description of Artificial Sequence: Synthetic oligonucleotide
gccaguaugucauaccaug

SEQ ID NO: 2544847 - RNA, 19 nt, Artificial Sequence
  Description of Artificial Sequence: Synthetic oligonucleotide
ugacaauauuucacaaauu

SEQ ID NO: 2544848 - RNA, 19 nt, Artificial Sequence
  Description of Artificial Sequence: Synthetic oligonucleotide
gguaaaaucggaaguuggc

SEQ ID NO: 2544849 - RNA, 19 nt, Artificial Sequence
  Description of Artificial Sequence: Synthetic oligonucleotide
uagucagccggaaccgcag

SEQ ID NO: 2544850 - RNA, 19 nt, Artificial Sequence
  Description of Artificial Sequence: Synthetic oligonucleotide
gacucaacuucaugauaug

SEQ ID NO: 2544851 - RNA, 19 nt, Artificial Sequence
  Description of Artificial Sequence: Synthetic oligonucleotide
auguagucagccggaaccg

SEQ ID NO: 2544852 - RNA, 19 nt, Artificial Sequence
  Description of Artificial Sequence: Synthetic oligonucleotide
guauguuuguacaucgcca

SEQ ID NO: 2544853 - RNA, 19 nt, Artificial Sequence
  Description of Artificial Sequence: Synthetic oligonucleotide
aaccccucaaggauuauau

SEQ ID NO: 2544854 - RNA, 19 nt, Artificial Sequence
  Description of Artificial Sequence: Synthetic oligonucleotide
aucggaaguuggcacuguc

SEQ ID NO: 2544855 - RNA, 19 nt, Artificial Sequence
  Description of Artificial Sequence: Synthetic oligonucleotide
agugacgguuaacuuaaaa

SEQ ID NO: 2544856 - RNA, 19 nt, Artificial Sequence
  Description of Artificial Sequence: Synthetic oligonucleotide
aaaccaguuccuaggacau

SEQ ID NO: 2544857 - RNA, 19 nt, Artificial Sequence
  Description of Artificial Sequence: Synthetic oligonucleotide
cacaugagccacccaacag

SEQ ID NO: 2544858 - RNA, 19 nt, Artificial Sequence
  Description of Artificial Sequence: Synthetic oligonucleotide
gucugaaggcccuguaccc

SEQ ID NO: 2544859 - RNA, 19 nt, Artificial Sequence
  Description of Artificial Sequence: Synthetic oligonucleotide
ggcaauauacugcccacug

SEQ ID NO: 2544860 - RNA, 19 nt, Artificial Sequence
  Description of Artificial Sequence: Synthetic oligonucleotide
  modified_base (7)..(7): a, c, u, g, unknown or other
ccauucngaacacaaagca

SEQ ID NO: 2544861 - RNA, 19 nt, Artificial Sequence
  Description of Artificial Sequence: Synthetic oligonucleotide
ucugcacauaaaugucugu

SEQ ID NO: 2544862 - RNA, 19 nt, Artificial Sequence
  Description of Artificial Sequence: Synthetic oligonucleotide
acacaugagccacccaaca

SEQ ID NO: 2544863 - RNA, 19 nt, Artificial Sequence
  Description of Artificial Sequence: Synthetic oligonucleotide
cugguaaaaucggaaguug

SEQ ID NO: 2544864 - RNA, 19 nt, Artificial Sequence
  Description of Artificial Sequence: Synthetic oligonucleotide
ucuuggccauugauucuag

SEQ ID NO: 2544865 - RNA, 19 nt, Artificial Sequence
  Description of Artificial Sequence: Synthetic oligonucleotide
cccucaaggauuauaugcc

SEQ ID NO: 2544866 - RNA, 19 nt, Artificial Sequence
  Description of Artificial Sequence: Synthetic oligonucleotide
uucaaccccucaaggauua

SEQ ID NO: 2544867 - RNA, 19 nt, Artificial Sequence
  Description of Artificial Sequence: Synthetic oligonucleotide
agucagccggaaccgcagc

SEQ ID NO: 2544868 - RNA, 19 nt, Artificial Sequence
  Description of Artificial Sequence: Synthetic oligonucleotide
cuaguugugcuuuguacaa

SEQ ID NO: 2544869 - RNA, 19 nt, Artificial Sequence
  Description of Artificial Sequence: Synthetic oligonucleotide
ggauuauaugccucucuug

SEQ ID NO: 2544870 - RNA, 19 nt, Artificial Sequence
  Description of Artificial Sequence: Synthetic oligonucleotide
uuaugacaguugauaccac

SEQ ID NO: 2544871 - RNA, 19 nt, Artificial Sequence
  Description of Artificial Sequence: Synthetic oligonucleotide
augucauaccaugagcaga

SEQ ID NO: 2544872 - RNA, 19 nt, Artificial Sequence
  Description of Artificial Sequence: Synthetic oligonucleotide
  modified_base (3)..(3): a, c, u, g, unknown or other
ucngaacacaaagcagcca

SEQ ID NO: 2544873 - RNA, 19 nt, Artificial Sequence
  Description of Artificial Sequence: Synthetic oligonucleotide
uguuagccagcuguauagc

SEQ ID NO: 2544874 - RNA, 19 nt, Artificial Sequence
  Description of Artificial Sequence: Synthetic oligonucleotide
uucuaugcuagugggugcu

SEQ ID NO: 2544875 - RNA, 19 nt, Artificial Sequence
  Description of Artificial Sequence: Synthetic oligonucleotide
caauauacugcccacugcu

SEQ ID NO: 2544876 - RNA, 19 nt, Artificial Sequence
  Description of Artificial Sequence: Synthetic oligonucleotide
cuugucugguaaaaucgga

SEQ ID NO: 2544877 - RNA, 19 nt, Artificial Sequence
  Description of Artificial Sequence: Synthetic oligonucleotide
cauaccaugagcagaugua

SEQ ID NO: 2544878 - RNA, 19 nt, Artificial Sequence
  Description of Artificial Sequence: Synthetic oligonucleotide
ggcacugucacagugguga

SEQ ID NO: 2544879 - RNA, 19 nt, Artificial Sequence
  Description of Artificial Sequence: Synthetic oligonucleotide
uacaucgccagaggcagcu

SEQ ID NO: 2544880 - RNA, 19 nt, Artificial Sequence
  Description of Artificial Sequence: Synthetic oligonucleotide
caacaacuugguugcuggg

SEQ ID NO: 2544881 - RNA, 19 nt, Artificial Sequence
  Description of Artificial Sequence: Synthetic oligonucleotide
aguaaucaagacacacaug

SEQ ID NO: 2544882 - RNA, 19 nt, Artificial Sequence
  Description of Artificial Sequence: Synthetic oligonucleotide
cacacaugagccacccaac

SEQ ID NO: 2544883 - RNA, 19 nt, Artificial Sequence
  Description of Artificial Sequence: Synthetic oligonucleotide
  modified_base (19)..(19): a, c, u, g, unknown or other
aagcaacugcuaccauucn

SEQ ID NO: 2544884 - RNA, 19 nt, Artificial Sequence
  Description of Artificial Sequence: Synthetic oligonucleotide
augcuagugggugcuguac

SEQ ID NO: 2544885 - RNA, 19 nt, Artificial Sequence
  Description of Artificial Sequence: Synthetic oligonucleotide
ccaucgguaccauuguuag

SEQ ID NO: 2544886 - RNA, 19 nt, Artificial Sequence
  Description of Artificial Sequence: Synthetic oligonucleotide
ccuaggacauaacagugac

SEQ ID NO: 2544887 - RNA, 19 nt, Artificial Sequence
  Description of Artificial Sequence: Synthetic oligonucleotide
cacauaaaugucuguguaa

SEQ ID NO: 2544888 - RNA, 19 nt, Artificial Sequence
  Description of Artificial Sequence: Synthetic oligonucleotide
gacauaacagugacgguua

SEQ ID NO: 2544889 - RNA, 19 nt, Artificial Sequence
  Description of Artificial Sequence: Synthetic oligonucleotide
gucugcacauaaaugucug

SEQ ID NO: 2544890 - RNA, 19 nt, Artificial Sequence
  Description of Artificial Sequence: Synthetic oligonucleotide
uaacagugacgguuaacuu

SEQ ID NO: 2544891 - RNA, 19 nt, Artificial Sequence
  Description of Artificial Sequence: Synthetic oligonucleotide
cagcuugaacaacaacuug

SEQ ID NO: 2544892 - RNA, 19 nt, Artificial Sequence
  Description of Artificial Sequence: Synthetic oligonucleotide
uugauaccacaaagauuac

SEQ ID NO: 2544893 - RNA, 19 nt, Artificial Sequence
  Description of Artificial Sequence: Synthetic oligonucleotide
acuuaaaagucaacauuau

SEQ ID NO: 2544894 - RNA, 19 nt, Artificial Sequence
  Description of Artificial Sequence: Synthetic oligonucleotide
  modified_base (10)..(10): a, c, u, g, unknown or other
cuaccauucngaacacaaa

SEQ ID NO: 2544895 - RNA, 19 nt, Artificial Sequence
  Description of Artificial Sequence: Synthetic oligonucleotide
ugggcacuagaaucugcug

SEQ ID NO: 2544896 - RNA, 19 nt, Artificial Sequence
  Description of Artificial Sequence: Synthetic oligonucleotide
ccacaaagauuacaguaag

SEQ ID NO: 2544897 - RNA, 19 nt, Artificial Sequence
  Description of Artificial Sequence: Synthetic oligonucleotide
auucuaguugugcuuugua

SEQ ID NO: 2544898 - RNA, 19 nt, Artificial Sequence
  Description of Artificial Sequence: Synthetic oligonucleotide
augacaguugauaccacaa

SEQ ID NO: 2544899 - RNA, 19 nt, Artificial Sequence
  Description of Artificial Sequence: Synthetic oligonucleotide
cagccaguaugucauacca

SEQ ID NO: 2544900 - RNA, 19 nt, Artificial Sequence
  Description of Artificial Sequence: Synthetic oligonucleotide
aguugauaccacaaagauu

SEQ ID NO: 2544901 - RNA, 19 nt, Artificial Sequence
  Description of Artificial Sequence: Synthetic oligonucleotide
aauauacugcccacugcuu

SEQ ID NO: 2544902 - RNA, 19 nt, Artificial Sequence
  Description of Artificial Sequence: Synthetic oligonucleotide
gcauuggucaugguuaaug

SEQ ID NO: 2544903 - RNA, 19 nt, Artificial Sequence
  Description of Artificial Sequence: Synthetic oligonucleotide
aaagggcauuaugacaguu

SEQ ID NO: 2544904 - RNA, 19 nt, Artificial Sequence
  Description of Artificial Sequence: Synthetic oligonucleotide
ucaaggaaaccaguuccua

SEQ ID NO: 2544905 - RNA, 19 nt, Artificial Sequence
  Description of Artificial Sequence: Synthetic oligonucleotide
uguagucagccggaaccgc

SEQ ID NO: 2544906 - RNA, 19 nt, Artificial Sequence
  Description of Artificial Sequence: Synthetic oligonucleotide
auauacaaagcaacugcua

SEQ ID NO: 2544907 - RNA, 19 nt, Artificial Sequence
  Description of Artificial Sequence: Synthetic oligonucleotide
caucgguaccauuguuagc

SEQ ID NO: 2544908 - RNA, 19 nt, Artificial Sequence
  Description of Artificial Sequence: Synthetic oligonucleotide
gucugguaaaaucggaagu

SEQ ID NO: 2544909 - RNA, 19 nt, Artificial Sequence
  Description of Artificial Sequence: Synthetic oligonucleotide
acaaagcagccaguauguc

SEQ ID NO: 2544910 - RNA, 19 nt, Artificial Sequence
  Description of Artificial Sequence: Synthetic oligonucleotide
acccaacagaaaauucuag

SEQ ID NO: 2544911 - RNA, 19 nt, Artificial Sequence
  Description of Artificial Sequence: Synthetic oligonucleotide
ggcauuaugacaguugaua

SEQ ID NO: 2544912 - RNA, 19 nt, Artificial Sequence
  Description of Artificial Sequence: Synthetic oligonucleotide
cagcuguauagcuccuccc

SEQ ID NO: 2544913 - RNA, 19 nt, Artificial Sequence
  Description of Artificial Sequence: Synthetic oligonucleotide
ugguacccggcugaguggc

SEQ ID NO: 2544914 - RNA, 19 nt, Artificial Sequence
  Description of Artificial Sequence: Synthetic oligonucleotide
uaugcuagugggugcugua

SEQ ID NO: 2544915 - RNA, 19 nt, Artificial Sequence
  Description of Artificial Sequence: Synthetic oligonucleotide
cauaacagugacgguuaac

SEQ ID NO: 2544916 - RNA, 19 nt, Artificial Sequence
  Description of Artificial Sequence: Synthetic oligonucleotide
uagugggugcuguacgaau

SEQ ID NO: 2544917 - RNA, 19 nt, Artificial Sequence
  Description of Artificial Sequence: Synthetic oligonucleotide
gugguacccggcugagugg

SEQ ID NO: 2544918 - RNA, 19 nt, Artificial Sequence
  Description of Artificial Sequence: Synthetic oligonucleotide
caguaagaaaagcacuuua

SEQ ID NO: 2544919 - RNA, 19 nt, Artificial Sequence
  Description of Artificial Sequence: Synthetic oligonucleotide
acaguaagaaaagcacuuu

SEQ ID NO: 2544920 - RNA, 19 nt, Artificial Sequence
  Description of Artificial Sequence: Synthetic oligonucleotide
cacaaggaucacuuuaaua

SEQ ID NO: 2544921 - RNA, 19 nt, Artificial Sequence
  Description of Artificial Sequence: Synthetic oligonucleotide
gaacacaaagcagccagua

SEQ ID NO: 2544922 - RNA, 19 nt, Artificial Sequence
  Description of Artificial Sequence: Synthetic oligonucleotide
uaccauuguuagccagcug

SEQ ID NO: 2544923 - RNA, 19 nt, Artificial Sequence
  Description of Artificial Sequence: Synthetic oligonucleotide
accccucaaggauuauaug

SEQ ID NO: 2544924 - RNA, 19 nt, Artificial Sequence
  Description of Artificial Sequence: Synthetic oligonucleotide
ucgguaccauuguuagcca

SEQ ID NO: 2544925 - RNA, 19 nt, Artificial Sequence
  Description of Artificial Sequence: Synthetic oligonucleotide
augauauguucaaccccuc

SEQ ID NO: 2544926 - RNA, 19 nt, Artificial Sequence
  Description of Artificial Sequence: Synthetic oligonucleotide
auagcuccucccuggguaa

SEQ ID NO: 2544927 - RNA, 19 nt, Artificial Sequence
  Description of Artificial Sequence: Synthetic oligonucleotide
aggacauaacagugacggu

SEQ ID NO: 2544928 - RNA, 19 nt, Artificial Sequence
  Description of Artificial Sequence: Synthetic oligonucleotide
caguugauaccacaaagau

SEQ ID NO: 2544929 - RNA, 19 nt, Artificial Sequence
  Description of Artificial Sequence: Synthetic oligonucleotide
uguacgaauuugguauguu

SEQ ID NO: 2544930 - RNA, 19 nt, Artificial Sequence
  Description of Artificial Sequence: Synthetic oligonucleotide
  modified_base (17)..(17): a, c, u, g, unknown or other
gcaacugcuaccauucnga

SEQ ID NO: 2544931 - RNA, 19 nt, Artificial Sequence
  Description of Artificial Sequence: Synthetic oligonucleotide
uaguugugcuuuguacaac

SEQ ID NO: 2544932 - RNA, 19 nt, Artificial Sequence
  Description of Artificial Sequence: Synthetic oligonucleotide
guuagccagcuguauagcu

SEQ ID NO: 2544933 - RNA, 19 nt, Artificial Sequence
  Description of Artificial Sequence: Synthetic oligonucleotide
gcuguauagcuccucccug

SEQ ID NO: 2544934 - RNA, 19 nt, Artificial Sequence
  Description of Artificial Sequence: Synthetic oligonucleotide
gggugcuguacgaauuugg

SEQ ID NO: 2544935 - RNA, 19 nt, Artificial Sequence
  Description of Artificial Sequence: Synthetic oligonucleotide
  modified_base (16)..(16): a, c, u, g, unknown or other
caacugcuaccauucngaa

SEQ ID NO: 2544936 - RNA, 19 nt, Artificial Sequence
  Description of Artificial Sequence: Synthetic oligonucleotide
aaucggaaguuggcacugu

SEQ ID NO: 2544937 - RNA, 19 nt, Artificial Sequence
  Description of Artificial Sequence: Synthetic oligonucleotide
gcuguacgaauuugguaug

SEQ ID NO: 2544938 - RNA, 19 nt, Artificial Sequence
  Description of Artificial Sequence: Synthetic oligonucleotide
ggucuguacuguagaauag

SEQ ID NO: 2544939 - RNA, 19 nt, Artificial Sequence
  Description of Artificial Sequence: Synthetic oligonucleotide
ugggugcuguacgaauuug

SEQ ID NO: 2544940 - RNA, 19 nt, Artificial Sequence
  Description of Artificial Sequence: Synthetic oligonucleotide
auagugguacccggcugag

SEQ ID NO: 2544941 - RNA, 19 nt, Artificial Sequence
  Description of Artificial Sequence: Synthetic oligonucleotide
auaugccucucuuggccau

SEQ ID NO: 2544942 - RNA, 19 nt, Artificial Sequence
  Description of Artificial Sequence: Synthetic oligonucleotide
aucaguggucuguacugua

SEQ ID NO: 2544943 - RNA, 19 nt, Artificial Sequence
  Description of Artificial Sequence: Synthetic oligonucleotide
auacugcccacugcuuguc

SEQ ID NO: 2544944 - RNA, 19 nt, Artificial Sequence
  Description of Artificial Sequence: Synthetic oligonucleotide
  modified_base (11)..(11): a, c, u, g, unknown or other
gcuaccauucngaacacaa

SEQ ID NO: 2544945 - RNA, 19 nt, Artificial Sequence
  Description of Artificial Sequence: Synthetic oligonucleotide
acauaacagugacgguuaa

SEQ ID NO: 2544946 - RNA, 19 nt, Artificial Sequence
  Description of Artificial Sequence: Synthetic oligonucleotide
ucuaugcuagugggugcug

SEQ ID NO: 2544947 - RNA, 19 nt, Artificial Sequence
  Description of Artificial Sequence: Synthetic oligonucleotide
caaggauuauaugccucuc

SEQ ID NO: 2544948 - RNA, 19 nt, Artificial Sequence
  Description of Artificial Sequence: Synthetic oligonucleotide
ggaaaccaguuccuaggac

SEQ ID NO: 2544949 - RNA, 19 nt, Artificial Sequence
  Description of Artificial Sequence: Synthetic oligonucleotide
gcugcauuggucaugguua

SEQ ID NO: 2544950 - RNA, 19 nt, Artificial Sequence
  Description of Artificial Sequence: Synthetic oligonucleotide
cacuagaaucugcugucca

SEQ ID NO: 2544951 - RNA, 19 nt, Artificial Sequence
  Description of Artificial Sequence: Synthetic oligonucleotide
gcacauaaaugucugugua

SEQ ID NO: 2544952 - RNA, 19 nt, Artificial Sequence
  Description of Artificial Sequence: Synthetic oligonucleotide
accccaucgguaccauugu

SEQ ID NO: 2544953 - RNA, 19 nt, Artificial Sequence
  Description of Artificial Sequence: Synthetic oligonucleotide
  modified_base (13)..(13): a, c, u, g, unknown or other
cugcuaccauucngaacac

SEQ ID NO: 2544954 - RNA, 19 nt, Artificial Sequence
  Description of Artificial Sequence: Synthetic oligonucleotide
  modified_base (12)..(12): a, c, u, g, unknown or other
ugcuaccauucngaacaca

SEQ ID NO: 2544955 - RNA, 19 nt, Artificial Sequence
  Description of Artificial Sequence: Synthetic oligonucleotide
accgcagcacccuguuuga

SEQ ID NO: 2544956 - RNA, 19 nt, Artificial Sequence
  Description of Artificial Sequence: Synthetic oligonucleotide
guacgaauuugguauguuu

SEQ ID NO: 2544957 - RNA, 19 nt, Artificial Sequence
  Description of Artificial Sequence: Synthetic oligonucleotide
gugcuguacgaauuuggua

SEQ ID NO: 2544958 - RNA, 19 nt, Artificial Sequence
  Description of Artificial Sequence: Synthetic oligonucleotide
guagucagccggaaccgca

SEQ ID NO: 2544959 - RNA, 19 nt, Artificial Sequence
  Description of Artificial Sequence: Synthetic oligonucleotide
caguggucuguacuguaga

SEQ ID NO: 2544960 - RNA, 19 nt, Artificial Sequence
  Description of Artificial Sequence: Synthetic oligonucleotide
gguuaacuuaaaagucaac

SEQ ID NO: 2544961 - RNA, 19 nt, Artificial Sequence
  Description of Artificial Sequence: Synthetic oligonucleotide
gugaacaaguuuauucuau

SEQ ID NO: 2544962 - RNA, 19 nt, Artificial Sequence
  Description of Artificial Sequence: Synthetic oligonucleotide
caaauucacaaggaucacu

SEQ ID NO: 2544963 - RNA, 19 nt, Artificial Sequence
  Description of Artificial Sequence: Synthetic oligonucleotide
uggcacugucacaguggug

SEQ ID NO: 2544964 - RNA, 19 nt, Artificial Sequence
  Description of Artificial Sequence: Synthetic oligonucleotide
cuugguugcugggcacuag

SEQ ID NO: 2544965 - RNA, 19 nt, Artificial Sequence
  Description of Artificial Sequence: Synthetic oligonucleotide
guacccggcugaguggcag

SEQ ID NO: 2544966 - RNA, 19 nt, Artificial Sequence
  Description of Artificial Sequence: Synthetic oligonucleotide
guuuaugugucugcacaua

SEQ ID NO: 2544967 - RNA, 19 nt, Artificial Sequence
  Description of Artificial Sequence: Synthetic oligonucleotide
agugggugcuguacgaauu

SEQ ID NO: 2544968 - RNA, 19 nt, Artificial Sequence
  Description of Artificial Sequence: Synthetic oligonucleotide
uacccggcugaguggcagc

SEQ ID NO: 2544969 - RNA, 19 nt, Artificial Sequence
  Description of Artificial Sequence: Synthetic oligonucleotide
ccauacugacucaacuuca

SEQ ID NO: 2544970 - RNA, 19 nt, Artificial Sequence
  Description of Artificial Sequence: Synthetic oligonucleotide
gucagccggaaccgcagca

SEQ ID NO: 2544971 - RNA, 19 nt, Artificial Sequence
  Description of Artificial Sequence: Synthetic oligonucleotide
guacuguagaauaguggua

SEQ ID NO: 2544972 - RNA, 19 nt, Artificial Sequence
  Description of Artificial Sequence: Synthetic oligonucleotide
gcuagugggugcuguacga

SEQ ID NO: 2544973 - RNA, 19 nt, Artificial Sequence
  Description of Artificial Sequence: Synthetic oligonucleotide
cauacugacucaacuucau

SEQ ID NO: 2544974 - RNA, 19 nt, Artificial Sequence
  Description of Artificial Sequence: Synthetic oligonucleotide
gacacacaugagccaccca

SEQ ID NO: 2544975 - RNA, 19 nt, Artificial Sequence
  Description of Artificial Sequence: Synthetic oligonucleotide
ggacauaacagugacgguu

SEQ ID NO: 2544976 - RNA, 19 nt, Artificial Sequence
  Description of Artificial Sequence: Synthetic oligonucleotide
cuuggccauugauucuaga

SEQ ID NO: 2544977 - RNA, 19 nt, Artificial Sequence
  Description of Artificial Sequence: Synthetic oligonucleotide
aucgccagaggcagcuuga

SEQ ID NO: 2544978 - RNA, 19 nt, Artificial Sequence
  Description of Artificial Sequence: Synthetic oligonucleotide
gcacuuuaugacaauauuu

SEQ ID NO: 2544979 - RNA, 19 nt, Artificial Sequence
  Description of Artificial Sequence: Synthetic oligonucleotide
uguaccccaucgguaccau

SEQ ID NO: 2544980 - RNA, 19 nt, Artificial Sequence
  Description of Artificial Sequence: Synthetic oligonucleotide
cccaacagaaaauucuagu

SEQ ID NO: 2544981 - RNA, 19 nt, Artificial Sequence
  Description of Artificial Sequence: Synthetic oligonucleotide
gucauaccaugagcagaug

SEQ ID NO: 2544982 - RNA, 19 nt, Artificial Sequence
  Description of Artificial Sequence: Synthetic oligonucleotide
agccaguaugucauaccau

SEQ ID NO: 2544983 - RNA, 19 nt, Artificial Sequence
  Description of Artificial Sequence: Synthetic oligonucleotide
aaccaguuccuaggacaua

SEQ ID NO: 2544984 - RNA, 19 nt, Artificial Sequence
  Description of Artificial Sequence: Synthetic oligonucleotide
gaaggcccuguaccccauc

SEQ ID NO: 2544985 - RNA, 19 nt, Artificial Sequence
  Description of Artificial Sequence: Synthetic oligonucleotide
agcuccucccuggguaaug

SEQ ID NO: 2544986 - RNA, 19 nt, Artificial Sequence
  Description of Artificial Sequence: Synthetic oligonucleotide
gcuugaacaacaacuuggu

SEQ ID NO: 2544987 - RNA, 19 nt, Artificial Sequence
  Description of Artificial Sequence: Synthetic oligonucleotide
gcagauguagucagccgga

SEQ ID NO: 2544988 - RNA, 19 nt, Artificial Sequence
  Description of Artificial Sequence: Synthetic oligonucleotide
cuagugggugcuguacgaa

SEQ ID NO: 2544989 - RNA, 19 nt, Artificial Sequence
  Description of Artificial Sequence: Synthetic oligonucleotide
ggugcuguacgaauuuggu

SEQ ID NO: 2544990 - RNA, 19 nt, Artificial Sequence
  Description of Artificial Sequence: Synthetic oligonucleotide
acuugguugcugggcacua

SEQ ID NO: 2544991 - RNA, 19 nt, Artificial Sequence
  Description of Artificial Sequence: Synthetic oligonucleotide
guacaucgccagaggcagc

SEQ ID NO: 2544992 - RNA, 19 nt, Artificial Sequence
  Description of Artificial Sequence: Synthetic oligonucleotide
caacucugugaacaaguuu

SEQ ID NO: 2544993 - RNA, 19 nt, Artificial Sequence
  Description of Artificial Sequence: Synthetic oligonucleotide
gcagcacccuguuugauuu

SEQ ID NO: 2544994 - RNA, 19 nt, Artificial Sequence
  Description of Artificial Sequence: Synthetic oligonucleotide
ucgccagaggcagcuugaa

SEQ ID NO: 2544995 - RNA, 19 nt, Artificial Sequence
  Description of Artificial Sequence: Synthetic oligonucleotide
guggucuguacuguagaau

SEQ ID NO: 2544996 - RNA, 19 nt, Artificial Sequence
  Description of Artificial Sequence: Synthetic oligonucleotide
gccacccaacagaaaauuc

SEQ ID NO: 2544997 - RNA, 19 nt, Artificial Sequence
  Description of Artificial Sequence: Synthetic oligonucleotide
cgguuaacuuaaaagucaa

SEQ ID NO: 2544998 - RNA, 19 nt, Artificial Sequence
  Description of Artificial Sequence: Synthetic oligonucleotide
guucaaccccucaaggauu

SEQ ID NO: 2544999 - RNA, 19 nt, Artificial Sequence
  Description of Artificial Sequence: Synthetic oligonucleotide
cccaucgguaccauuguua

SEQ ID NO: 2545000 - RNA, 19 nt, Artificial Sequence
  Description of Artificial Sequence: Synthetic oligonucleotide
cacccuguuugauuuguuu

SEQ ID NO: 2545001 - RNA, 19 nt, Artificial Sequence
  Description of Artificial Sequence: Synthetic oligonucleotide
ucaaccccucaaggauuau

SEQ ID NO: 2545002 - RNA, 19 nt, Artificial Sequence
  Description of Artificial Sequence: Synthetic oligonucleotide
cuguacgaauuugguaugu

SEQ ID NO: 2545003 - RNA, 19 nt, Artificial Sequence
  Description of Artificial Sequence: Synthetic oligonucleotide
cgguaccauuguuagccag

SEQ ID NO: 2545004 - RNA, 19 nt, Artificial Sequence
  Description of Artificial Sequence: Synthetic oligonucleotide
cauuguuagccagcuguau

SEQ ID NO: 2545005 - RNA, 19 nt, Artificial Sequence
  Description of Artificial Sequence: Synthetic oligonucleotide
gagccacccaacagaaaau

SEQ ID NO: 2545006 - RNA, 19 nt, Artificial Sequence
  Description of Artificial Sequence: Synthetic oligonucleotide
caucaguggucuguacugu

SEQ ID NO: 2545007 - RNA, 19 nt, Artificial Sequence
  Description of Artificial Sequence: Synthetic oligonucleotide
ccucccuggguaauggcaa

SEQ ID NO: 2545008 - RNA, 19 nt, Artificial Sequence
  Description of Artificial Sequence: Synthetic oligonucleotide
cagauguagucagccggaa

SEQ ID NO: 2545009 - RNA, 19 nt, Artificial Sequence
  Description of Artificial Sequence: Synthetic oligonucleotide
ccucaaggauuauaugccu

SEQ ID NO: 2545010 - RNA, 19 nt, Artificial Sequence
  Description of Artificial Sequence: Synthetic oligonucleotide
ccauuguuagccagcugua

SEQ ID NO: 2545011 - RNA, 19 nt, Artificial Sequence
  Description of Artificial Sequence: Synthetic oligonucleotide
gccauugauucuagaaagu

SEQ ID NO: 2545012 - RNA, 19 nt, Artificial Sequence
  Description of Artificial Sequence: Synthetic oligonucleotide
cagugacgguuaacuuaaa

SEQ ID NO: 2545013 - RNA, 19 nt, Artificial Sequence
  Description of Artificial Sequence: Synthetic oligonucleotide
gaaccgcagcacccuguuu

SEQ ID NO: 2545014 - RNA, 19 nt, Artificial Sequence
  Description of Artificial Sequence: Synthetic oligonucleotide
ggaaccgcagcacccuguu

SEQ ID NO: 2545015 - RNA, 19 nt, Artificial Sequence
  Description of Artificial Sequence: Synthetic oligonucleotide
cgaauuugguauguuugua

SEQ ID NO: 2545016 - RNA, 19 nt, Artificial Sequence
  Description of Artificial Sequence: Synthetic oligonucleotide
ccuggguaauggcaauaua

SEQ ID NO: 2545017 - RNA, 19 nt, Artificial Sequence
  Description of Artificial Sequence: Synthetic oligonucleotide
ccggaaccgcagcacccug

SEQ ID NO: 2545018 - RNA, 19 nt, Artificial Sequence
  Description of Artificial Sequence: Synthetic oligonucleotide
guaccccaucgguaccauu

SEQ ID NO: 2545019 - RNA, 19 nt, Artificial Sequence
  Description of Artificial Sequence: Synthetic oligonucleotide
gguacccggcugaguggca

SEQ ID NO: 2545020 - RNA, 19 nt, Artificial Sequence
  Description of Artificial Sequence: Synthetic oligonucleotide
gggcauuaugacaguugau

SEQ ID NO: 2545021 - RNA, 19 nt, Artificial Sequence
  Description of Artificial Sequence: Synthetic oligonucleotide
gccggaaccgcagcacccu

SEQ ID NO: 2545022 - RNA, 19 nt, Artificial Sequence
  Description of Artificial Sequence: Synthetic oligonucleotide
cccuggguaauggcaauau

SEQ ID NO: 2545023 - RNA, 19 nt, Artificial Sequence
  Description of Artificial Sequence: Synthetic oligonucleotide
cagcugcauuggucauggu

SEQ ID NO: 2545024 - RNA, 19 nt, Artificial Sequence
  Description of Artificial Sequence: Synthetic oligonucleotide
ccccaucgguaccauuguu

SEQ ID NO: 2545025 - RNA, 19 nt, Artificial Sequence
  Description of Artificial Sequence: Synthetic oligonucleotide
ccgcagcacccuguuugau

SEQ ID NO: 2545026 - RNA, 19 nt, Artificial Sequence
  Description of Artificial Sequence: Synthetic oligonucleotide
aauaucauugaucuguaca

SEQ ID NO: 2545027 - RNA, 19 nt, Artificial Sequence
  Description of Artificial Sequence: Synthetic oligonucleotide
agagaaauaucauugaucu

SEQ ID NO: 2545028 - RNA, 19 nt, Artificial Sequence
  Description of Artificial Sequence: Synthetic oligonucleotide
agauggaugaucucaaagg

SEQ ID NO: 2545029 - RNA, 19 nt, Artificial Sequence
  Description of Artificial Sequence: Synthetic oligonucleotide
uuuauuaggcagcuuuugg

SEQ ID NO: 2545030 - RNA, 19 nt, Artificial Sequence
  Description of Artificial Sequence: Synthetic oligonucleotide
ucagcaauggucuugauau

SEQ ID NO: 2545031 - RNA, 19 nt, Artificial Sequence
  Description of Artificial Sequence: Synthetic oligonucleotide
agaaauaucauugaucugu

SEQ ID NO: 2545032 - RNA, 19 nt, Artificial Sequence
  Description of Artificial Sequence: Synthetic oligonucleotide
uuuggaacugucccaaagg

SEQ ID NO: 2545033 - RNA, 19 nt, Artificial Sequence
  Description of Artificial Sequence: Synthetic oligonucleotide
cacucagucauucugacgg

SEQ ID NO: 2545034 - RNA, 19 nt, Artificial Sequence
  Description of Artificial Sequence: Synthetic oligonucleotide
accgucaugagcuucuugc

SEQ ID NO: 2545035 - RNA, 19 nt, Artificial Sequence
  Description of Artificial Sequence: Synthetic oligonucleotide
auucugacggcgcagacgg

SEQ ID NO: 2545036 - RNA, 19 nt, Artificial Sequence
  Description of Artificial Sequence: Synthetic oligonucleotide
uuggaacugucccaaaggg

SEQ ID NO: 2545037 - RNA, 19 nt, Artificial Sequence
  Description of Artificial Sequence: Synthetic oligonucleotide
aagagcuugaugucugggg

SEQ ID NO: 2545038 - RNA, 19 nt, Artificial Sequence
  Description of Artificial Sequence: Synthetic oligonucleotide
ugcuccauuucccaaagag

SEQ ID NO: 2545039 - RNA, 19 nt, Artificial Sequence
  Description of Artificial Sequence: Synthetic oligonucleotide
aaauaucauugaucuguac

SEQ ID NO: 2545040 - RNA, 19 nt, Artificial Sequence
  Description of Artificial Sequence: Synthetic oligonucleotide
agcaauguaauccugcaga

SEQ ID NO: 2545041 - RNA, 19 nt, Artificial Sequence
  Description of Artificial Sequence: Synthetic oligonucleotide
uugauauuccggaaagcag

SEQ ID NO: 2545042 - RNA, 19 nt, Artificial Sequence
  Description of Artificial Sequence: Synthetic oligonucleotide
aaaggcaugcuugacgauc

SEQ ID NO: 2545043 - RNA, 19 nt, Artificial Sequence
  Description of Artificial Sequence: Synthetic oligonucleotide
ugcuugacgauccgcaccg

SEQ ID NO: 2545044 - RNA, 19 nt, Artificial Sequence
  Description of Artificial Sequence: Synthetic oligonucleotide
auaucauugaucuguacau

SEQ ID NO: 2545045 - RNA, 19 nt, Artificial Sequence
  Description of Artificial Sequence: Synthetic oligonucleotide
uucuugauggcguaggagu

SEQ ID NO: 2545046 - RNA, 19 nt, Artificial Sequence
  Description of Artificial Sequence: Synthetic oligonucleotide
gaccagaaccugcagaggg

SEQ ID NO: 2545047 - RNA, 19 nt, Artificial Sequence
  Description of Artificial Sequence: Synthetic oligonucleotide
uuugcggaagcgcuuggcg

SEQ ID NO: 2545048 - RNA, 19 nt, Artificial Sequence
  Description of Artificial Sequence: Synthetic oligonucleotide
agcuucuugccguuguugc

SEQ ID NO: 2545049 - RNA, 19 nt, Artificial Sequence
  Description of Artificial Sequence: Synthetic oligonucleotide
cacacaguuuauuaggcag

SEQ ID NO: 2545050 - RNA, 19 nt, Artificial Sequence
  Description of Artificial Sequence: Synthetic oligonucleotide
uugaucuguacaucgucgg

SEQ ID NO: 2545051 - RNA, 19 nt, Artificial Sequence
  Description of Artificial Sequence: Synthetic oligonucleotide
gauggccugauucacucgg

SEQ ID NO: 2545052 - RNA, 19 nt, Artificial Sequence
  Description of Artificial Sequence: Synthetic oligonucleotide
cugcagagaaauaucauug

SEQ ID NO: 2545053 - RNA, 19 nt, Artificial Sequence
  Description of Artificial Sequence: Synthetic oligonucleotide
uggaugaucucaaaggcau

SEQ ID NO: 2545054 - RNA, 19 nt, Artificial Sequence
  Description of Artificial Sequence: Synthetic oligonucleotide
aguuggaggaacccuuggc

SEQ ID NO: 2545055 - RNA, 19 nt, Artificial Sequence
  Description of Artificial Sequence: Synthetic oligonucleotide
ucaucauggaguuggugag

SEQ ID NO: 2545056 - RNA, 19 nt, Artificial Sequence
  Description of Artificial Sequence: Synthetic oligonucleotide
uccacgauggggcacuggg

SEQ ID NO: 2545057 - RNA, 19 nt, Artificial Sequence
  Description of Artificial Sequence: Synthetic oligonucleotide
ucagcgguuagacuuggcc

SEQ ID NO: 2545058 - RNA, 19 nt, Artificial Sequence
  Description of Artificial Sequence: Synthetic oligonucleotide
auucacucggcgcaguggg

SEQ ID NO: 2545059 - RNA, 19 nt, Artificial Sequence
  Description of Artificial Sequence: Synthetic oligonucleotide
agcgguuagacuuggccac

SEQ ID NO: 2545060 - RNA, 19 nt, Artificial Sequence
  Description of Artificial Sequence: Synthetic oligonucleotide
aauggucuugauauuccgg

SEQ ID NO: 2545061 - RNA, 19 nt, Artificial Sequence
  Description of Artificial Sequence: Synthetic oligonucleotide
uggggacacauccacagcc

SEQ ID NO: 2545062 - RNA, 19 nt, Artificial Sequence
  Description of Artificial Sequence: Synthetic oligonucleotide
gaugaucucaaaggcaugc

SEQ ID NO: 2545063 - RNA, 19 nt, Artificial Sequence
  Description of Artificial Sequence: Synthetic oligonucleotide
cagagaaauaucauugauc

SEQ ID NO: 2545064 - RNA, 19 nt, Artificial Sequence
  Description of Artificial Sequence: Synthetic oligonucleotide
aaggcacucagcaaugguc

SEQ ID NO: 2545065 - RNA, 19 nt, Artificial Sequence
  Description of Artificial Sequence: Synthetic oligonucleotide
guuagacuuggccacacgc

SEQ ID NO: 2545066 - RNA, 19 nt, Artificial Sequence
  Description of Artificial Sequence: Synthetic oligonucleotide
cucgccagugagcagaugg

SEQ ID NO: 2545067 - RNA, 19 nt, Artificial Sequence
  Description of Artificial Sequence: Synthetic oligonucleotide
auugaucuguacaucgucg

SEQ ID NO: 2545068 - RNA, 19 nt, Artificial Sequence
  Description of Artificial Sequence: Synthetic oligonucleotide
gaaaucagcgguuagacuu

SEQ ID NO: 2545069 - RNA, 19 nt, Artificial Sequence
  Description of Artificial Sequence: Synthetic oligonucleotide
augcuugacgauccgcacc

SEQ ID NO: 2545070 - RNA, 19 nt, Artificial Sequence
  Description of Artificial Sequence: Synthetic oligonucleotide
uuagacuuggccacacgcu

SEQ ID NO: 2545071 - RNA, 19 nt, Artificial Sequence
  Description of Artificial Sequence: Synthetic oligonucleotide
agcauugaugagcucaucu

SEQ ID NO: 2545072 - RNA, 19 nt, Artificial Sequence
  Description of Artificial Sequence: Synthetic oligonucleotide
aguucauccuucuucuuga

SEQ ID NO: 2545073 - RNA, 19 nt, Artificial Sequence
  Description of Artificial Sequence: Synthetic oligonucleotide
uguaauccugcagagaaau

SEQ ID NO: 2545074 - RNA, 19 nt, Artificial Sequence
  Description of Artificial Sequence: Synthetic oligonucleotide
aaagagcuugaugucuggg

SEQ ID NO: 2545075 - RNA, 19 nt, Artificial Sequence
  Description of Artificial Sequence: Synthetic oligonucleotide
guacuuggcauacuucucc

SEQ ID NO: 2545076 - RNA, 19 nt, Artificial Sequence
  Description of Artificial Sequence: Synthetic oligonucleotide
auggucuugauauuccgga

SEQ ID NO: 2545077 - RNA, 19 nt, Artificial Sequence
  Description of Artificial Sequence: Synthetic oligonucleotide
ugcagagaaauaucauuga

SEQ ID NO: 2545078 - RNA, 19 nt, Artificial Sequence
  Description of Artificial Sequence: Synthetic oligonucleotide
uauuccggaaagcagccuc

SEQ ID NO: 2545079 - RNA, 19 nt, Artificial Sequence
  Description of Artificial Sequence: Synthetic oligonucleotide
uguacaucgucggugcucc

SEQ ID NO: 2545080 - RNA, 19 nt, Artificial Sequence
  Description of Artificial Sequence: Synthetic oligonucleotide
cacagcaauguaauccugc

SEQ ID NO: 2545081 - RNA, 19 nt, Artificial Sequence
  Description of Artificial Sequence: Synthetic oligonucleotide
acacaguuuauuaggcagc

SEQ ID NO: 2545082 - RNA, 19 nt, Artificial Sequence
  Description of Artificial Sequence: Synthetic oligonucleotide
uggaacugucccaaagggc

SEQ ID NO: 2545083 - RNA, 19 nt, Artificial Sequence
  Description of Artificial Sequence: Synthetic oligonucleotide
cagcuuuugggaaaucagc

SEQ ID NO: 2545084 - RNA, 19 nt, Artificial Sequence
  Description of Artificial Sequence: Synthetic oligonucleotide
caauggucuugauauuccg

SEQ ID NO: 2545085 - RNA, 19 nt, Artificial Sequence
  Description of Artificial Sequence: Synthetic oligonucleotide
uggcguaggaguuggagga

SEQ ID NO: 2545086 - RNA, 19 nt, Artificial Sequence
  Description of Artificial Sequence: Synthetic oligonucleotide
agagcuugaugucuggggu

SEQ ID NO: 2545087 - RNA, 19 nt, Artificial Sequence
  Description of Artificial Sequence: Synthetic oligonucleotide
uugcggaagcgcuuggcgg

SEQ ID NO: 2545088 - RNA, 19 nt, Artificial Sequence
  Description of Artificial Sequence: Synthetic oligonucleotide
agggcacacaguuuauuag

SEQ ID NO: 2545089 - RNA, 19 nt, Artificial Sequence
  Description of Artificial Sequence: Synthetic oligonucleotide
ucagucauucugacggcgc

SEQ ID NO: 2545090 - RNA, 19 nt, Artificial Sequence
  Description of Artificial Sequence: Synthetic oligonucleotide
ucauugaucuguacaucgu

SEQ ID NO: 2545091 - RNA, 19 nt, Artificial Sequence
  Description of Artificial Sequence: Synthetic oligonucleotide
agcgcuuggcggcauaccg

SEQ ID NO: 2545092 - RNA, 19 nt, Artificial Sequence
  Description of Artificial Sequence: Synthetic oligonucleotide
gaucuguacaucgucggug

SEQ ID NO: 2545093 - RNA, 19 nt, Artificial Sequence
  Description of Artificial Sequence: Synthetic oligonucleotide
augagcucaucugcaaggc

SEQ ID NO: 2545094 - RNA, 19 nt, Artificial Sequence
  Description of Artificial Sequence: Synthetic oligonucleotide
gaggguucucgccagugag

SEQ ID NO: 2545095 - RNA, 19 nt, Artificial Sequence
  Description of Artificial Sequence: Synthetic oligonucleotide
ucccaaagggcacacaguu

SEQ ID NO: 2545096 - RNA, 19 nt, Artificial Sequence
  Description of Artificial Sequence: Synthetic oligonucleotide
ucgucggugcuccauuucc

SEQ ID NO: 2545097 - RNA, 19 nt, Artificial Sequence
  Description of Artificial Sequence: Synthetic oligonucleotide
acucagucauucugacggc

SEQ ID NO: 2545098 - RNA, 19 nt, Artificial Sequence
  Description of Artificial Sequence: Synthetic oligonucleotide
uagacuuggccacacgcuc

SEQ ID NO: 2545099 - RNA, 19 nt, Artificial Sequence
  Description of Artificial Sequence: Synthetic oligonucleotide
gagaaauaucauugaucug

SEQ ID NO: 2545100 - RNA, 19 nt, Artificial Sequence
  Description of Artificial Sequence: Synthetic oligonucleotide
uggccugauucacucggcg

SEQ ID NO: 2545101 - RNA, 19 nt, Artificial Sequence
  Description of Artificial Sequence: Synthetic oligonucleotide
aaaucagcgguuagacuug

SEQ ID NO: 2545102 - RNA, 19 nt, Artificial Sequence
  Description of Artificial Sequence: Synthetic oligonucleotide
uccugugcacagcagccag

SEQ ID NO: 2545103 - RNA, 19 nt, Artificial Sequence
  Description of Artificial Sequence: Synthetic oligonucleotide
cuucuugccguuguugcgg

SEQ ID NO: 2545104 - RNA, 19 nt, Artificial Sequence
  Description of Artificial Sequence: Synthetic oligonucleotide
accugcagaggguucucgc

SEQ ID NO: 2545105 - RNA, 19 nt, Artificial Sequence
  Description of Artificial Sequence: Synthetic oligonucleotide
guuggaggaacccuuggca

SEQ ID NO: 2545106 - RNA, 19 nt, Artificial Sequence
  Description of Artificial Sequence: Synthetic oligonucleotide
ugcaaggcacucagcaaug

SEQ ID NO: 2545107 - RNA, 19 nt, Artificial Sequence
  Description of Artificial Sequence: Synthetic oligonucleotide
gggcacacaguuuauuagg

SEQ ID NO: 2545108 - RNA, 19 nt, Artificial Sequence
  Description of Artificial Sequence: Synthetic oligonucleotide
cauugaucuguacaucguc

SEQ ID NO: 2545109 - RNA, 19 nt, Artificial Sequence
  Description of Artificial Sequence: Synthetic oligonucleotide
guuuauuaggcagcuuuug

SEQ ID NO: 2545110 - RNA, 19 nt, Artificial Sequence
  Description of Artificial Sequence: Synthetic oligonucleotide
cuccauuucccaaagagcu

SEQ ID NO: 2545111 - RNA, 19 nt, Artificial Sequence
  Description of Artificial Sequence: Synthetic oligonucleotide
ugaucuguacaucgucggu

SEQ ID NO: 2545112 - RNA, 19 nt, Artificial Sequence
  Description of Artificial Sequence: Synthetic oligonucleotide
caguucauccuucuucuug

SEQ ID NO: 2545113 - RNA, 19 nt, Artificial Sequence
  Description of Artificial Sequence: Synthetic oligonucleotide
aaugcgcguugagucuucc

SEQ ID NO: 2545114 - RNA, 19 nt, Artificial Sequence
  Description of Artificial Sequence: Synthetic oligonucleotide
gaguuggaggaacccuugg

SEQ ID NO: 2545115 - RNA, 19 nt, Artificial Sequence
  Description of Artificial Sequence: Synthetic oligonucleotide
gauucacucggcgcagugg

SEQ ID NO: 2545116 - RNA, 19 nt, Artificial Sequence
  Description of Artificial Sequence: Synthetic oligonucleotide
caaagagcuugaugucugg

SEQ ID NO: 2545117 - RNA, 19 nt, Artificial Sequence
  Description of Artificial Sequence: Synthetic oligonucleotide
aaucagcgguuagacuugg

SEQ ID NO: 2545118 - RNA, 19 nt, Artificial Sequence
  Description of Artificial Sequence: Synthetic oligonucleotide
auuaggcagcuuuugggaa

SEQ ID NO: 2545119 - RNA, 19 nt, Artificial Sequence
  Description of Artificial Sequence: Synthetic oligonucleotide
gagcucaucugcaaggcac

SEQ ID NO: 2545120 - RNA, 19 nt, Artificial Sequence
  Description of Artificial Sequence: Synthetic oligonucleotide
uuuugggaaaucagcgguu

SEQ ID NO: 2545121 - RNA, 19 nt, Artificial Sequence
  Description of Artificial Sequence: Synthetic oligonucleotide
gcaauguaauccugcagag

SEQ ID NO: 2545122 - RNA, 19 nt, Artificial Sequence
  Description of Artificial Sequence: Synthetic oligonucleotide
ugauucacucggcgcagug

SEQ ID NO: 2545123 - RNA, 19 nt, Artificial Sequence
  Description of Artificial Sequence: Synthetic oligonucleotide
ucuugauggcguaggaguu

SEQ ID NO: 2545124 - RNA, 19 nt, Artificial Sequence
  Description of Artificial Sequence: Synthetic oligonucleotide
ucggcguggaccacgcgcc

SEQ ID NO: 2545125 - RNA, 19 nt, Artificial Sequence
  Description of Artificial Sequence: Synthetic oligonucleotide
uccggaaagcagccucacg

SEQ ID NO: 2545126 - RNA, 19 nt, Artificial Sequence
  Description of Artificial Sequence: Synthetic oligonucleotide
ggaacugucccaaagggca

SEQ ID NO: 2545127 - RNA, 19 nt, Artificial Sequence
  Description of Artificial Sequence: Synthetic oligonucleotide
ugagcucaucugcaaggca

SEQ ID NO: 2545128 - RNA, 19 nt, Artificial Sequence
  Description of Artificial Sequence: Synthetic oligonucleotide
uacuuggcauacuucuccu

SEQ ID NO: 2545129 - RNA, 19 nt, Artificial Sequence
  Description of Artificial Sequence: Synthetic oligonucleotide
ugccggcucgcccaaugcg

SEQ ID NO: 2545130 - RNA, 19 nt, Artificial Sequence
  Description of Artificial Sequence: Synthetic oligonucleotide
cuugccguuguugcggccg

SEQ ID NO: 2545131 - RNA, 19 nt, Artificial Sequence
  Description of Artificial Sequence: Synthetic oligonucleotide
cagauggccugauucacuc

SEQ ID NO: 2545132 - RNA, 19 nt, Artificial Sequence
  Description of Artificial Sequence: Synthetic oligonucleotide
cauucugacggcgcagacg

SEQ ID NO: 2545133 - RNA, 19 nt, Artificial Sequence
  Description of Artificial Sequence: Synthetic oligonucleotide
ucauggaguuggugaggcg

SEQ ID NO: 2545134 - RNA, 19 nt, Artificial Sequence
  Description of Artificial Sequence: Synthetic oligonucleotide
uaucauugaucuguacauc

SEQ ID NO: 2545135 - RNA, 19 nt, Artificial Sequence
  Description of Artificial Sequence: Synthetic oligonucleotide
agauggccugauucacucg

SEQ ID NO: 2545136 - RNA, 19 nt, Artificial Sequence
  Description of Artificial Sequence: Synthetic oligonucleotide
aggcgcuccacgauggggc

SEQ ID NO: 2545137 - RNA, 19 nt, Artificial Sequence
  Description of Artificial Sequence: Synthetic oligonucleotide
gcauugaugagcucaucug

SEQ ID NO: 2545138 - RNA, 19 nt, Artificial Sequence
  Description of Artificial Sequence: Synthetic oligonucleotide
agguguggcugucucccac

SEQ ID NO: 2545139 - RNA, 19 nt, Artificial Sequence
  Description of Artificial Sequence: Synthetic oligonucleotide
auccgcaccgucaugagcu

SEQ ID NO: 2545140 - RNA, 19 nt, Artificial Sequence
  Description of Artificial Sequence: Synthetic oligonucleotide
cucggcguggaccacgcgc

SEQ ID NO: 2545141 - RNA, 19 nt, Artificial Sequence
  Description of Artificial Sequence: Synthetic oligonucleotide
ucuccuucacagcaaugua

SEQ ID NO: 2545142 - RNA, 19 nt, Artificial Sequence
  Description of Artificial Sequence: Synthetic oligonucleotide
ugucuggggucucugccac

SEQ ID NO: 2545143 - RNA, 19 nt, Artificial Sequence
  Description of Artificial Sequence: Synthetic oligonucleotide
ucugacggcgcagacggga

SEQ ID NO: 2545144 - RNA, 19 nt, Artificial Sequence
  Description of Artificial Sequence: Synthetic oligonucleotide
uuggugaggcgcuccacga

SEQ ID NO: 2545145 - RNA, 19 nt, Artificial Sequence
  Description of Artificial Sequence: Synthetic oligonucleotide
uucacucggcgcagugggg

SEQ ID NO: 2545146 - RNA, 19 nt, Artificial Sequence
  Description of Artificial Sequence: Synthetic oligonucleotide
cucagucauucugacggcg

SEQ ID NO: 2545147 - RNA, 19 nt, Artificial Sequence
  Description of Artificial Sequence: Synthetic oligonucleotide
aagcgcuuggcggcauacc

SEQ ID NO: 2545148 - RNA, 19 nt, Artificial Sequence
  Description of Artificial Sequence: Synthetic oligonucleotide
uuugggaaaucagcgguua

SEQ ID NO: 2545149 - RNA, 19 nt, Artificial Sequence
  Description of Artificial Sequence: Synthetic oligonucleotide
uaccgccccgcacuguggg

SEQ ID NO: 2545150 - RNA, 19 nt, Artificial Sequence
  Description of Artificial Sequence: Synthetic oligonucleotide
cuuuugggaaaucagcggu

SEQ ID NO: 2545151 - RNA, 19 nt, Artificial Sequence
  Description of Artificial Sequence: Synthetic oligonucleotide
ugaccagaaccugcagagg

SEQ ID NO: 2545152 - RNA, 19 nt, Artificial Sequence
  Description of Artificial Sequence: Synthetic oligonucleotide
gauccgcaccgucaugagc

SEQ ID NO: 2545153 - RNA, 19 nt, Artificial Sequence
  Description of Artificial Sequence: Synthetic oligonucleotide
caugcuugacgauccgcac

SEQ ID NO: 2545154 - RNA, 19 nt, Artificial Sequence
  Description of Artificial Sequence: Synthetic oligonucleotide
cucccacucagucauucug

SEQ ID NO: 2545155 - RNA, 19 nt, Artificial Sequence
  Description of Artificial Sequence: Synthetic oligonucleotide
aaccugcagaggguucucg

SEQ ID NO: 2545156 - RNA, 19 nt, Artificial Sequence
  Description of Artificial Sequence: Synthetic oligonucleotide
aacccuuggcagcauugau

SEQ ID NO: 2545157 - RNA, 19 nt, Artificial Sequence
  Description of Artificial Sequence: Synthetic oligonucleotide
auccugcagagaaauauca

SEQ ID NO: 2545158 - RNA, 19 nt, Artificial Sequence
  Description of Artificial Sequence: Synthetic oligonucleotide
aucgucggugcuccauuuc

SEQ ID NO: 2545159 - RNA, 19 nt, Artificial Sequence
  Description of Artificial Sequence: Synthetic oligonucleotide
ugugccggcucgcccaaug

SEQ ID NO: 2545160 - RNA, 19 nt, Artificial Sequence
  Description of Artificial Sequence: Synthetic oligonucleotide
uaggaguuggaggaacccu

SEQ ID NO: 2545161 - RNA, 19 nt, Artificial Sequence
  Description of Artificial Sequence: Synthetic oligonucleotide
agaaccugcagaggguucu

SEQ ID NO: 2545162 - RNA, 19 nt, Artificial Sequence
  Description of Artificial Sequence: Synthetic oligonucleotide
gaaauaucauugaucugua

SEQ ID NO: 2545163 - RNA, 19 nt, Artificial Sequence
  Description of Artificial Sequence: Synthetic oligonucleotide
augcgcguugagucuuccc

SEQ ID NO: 2545164 - RNA, 19 nt, Artificial Sequence
  Description of Artificial Sequence: Synthetic oligonucleotide
guuguugcggccgugcauc

SEQ ID NO: 2545165 - RNA, 19 nt, Artificial Sequence
  Description of Artificial Sequence: Synthetic oligonucleotide
agacgggacucgucggccg

SEQ ID NO: 2545166 - RNA, 19 nt, Artificial Sequence
  Description of Artificial Sequence: Synthetic oligonucleotide
ucgccagugagcagaugga

SEQ ID NO: 2545167 - RNA, 19 nt, Artificial Sequence
  Description of Artificial Sequence: Synthetic oligonucleotide
uggucuugauauuccggaa

SEQ ID NO: 2545168 - RNA, 19 nt, Artificial Sequence
  Description of Artificial Sequence: Synthetic oligonucleotide
agccucacgagcuccugug

SEQ ID NO: 2545169 - RNA, 19 nt, Artificial Sequence
  Description of Artificial Sequence: Synthetic oligonucleotide
uggggcagguacuuggcau

SEQ ID NO: 2545170 - RNA, 19 nt, Artificial Sequence
  Description of Artificial Sequence: Synthetic oligonucleotide
cauaccgccccgcacugug

SEQ ID NO: 2545171 - RNA, 19 nt, Artificial Sequence
  Description of Artificial Sequence: Synthetic oligonucleotide
uucuugccguuguugcggc

SEQ ID NO: 2545172 - RNA, 19 nt, Artificial Sequence
  Description of Artificial Sequence: Synthetic oligonucleotide
ucauucugacggcgcagac

SEQ ID NO: 2545173 - RNA, 19 nt, Artificial Sequence
  Description of Artificial Sequence: Synthetic oligonucleotide
uggggucucugccaccgca

SEQ ID NO: 2545174 - RNA, 19 nt, Artificial Sequence
  Description of Artificial Sequence: Synthetic oligonucleotide
gaaagcagccucacgagcu

SEQ ID NO: 2545175 - RNA, 19 nt, Artificial Sequence
  Description of Artificial Sequence: Synthetic oligonucleotide
guaggaguuggaggaaccc

SEQ ID NO: 2545176 - RNA, 19 nt, Artificial Sequence
  Description of Artificial Sequence: Synthetic oligonucleotide
aggguucucgccagugagc

SEQ ID NO: 2545177 - RNA, 19 nt, Artificial Sequence
  Description of Artificial Sequence: Synthetic oligonucleotide
ggaaagcagccucacgagc

SEQ ID NO: 2545178 - RNA, 19 nt, Artificial Sequence
  Description of Artificial Sequence: Synthetic oligonucleotide
uccauuucccaaagagcuu

SEQ ID NO: 2545179 - RNA, 19 nt, Artificial Sequence
  Description of Artificial Sequence: Synthetic oligonucleotide
cucacgagcuccugugcac

SEQ ID NO: 2545180 - RNA, 19 nt, Artificial Sequence
  Description of Artificial Sequence: Synthetic oligonucleotide
agaggguucucgccaguga

SEQ ID NO: 2545181 - RNA, 19 nt, Artificial Sequence
  Description of Artificial Sequence: Synthetic oligonucleotide
cagcgguuagacuuggcca

SEQ ID NO: 2545182 - RNA, 19 nt, Artificial Sequence
  Description of Artificial Sequence: Synthetic oligonucleotide
cuugauggcguaggaguug

SEQ ID NO: 2545183 - RNA, 19 nt, Artificial Sequence
  Description of Artificial Sequence: Synthetic oligonucleotide
aggcacucagcaauggucu

SEQ ID NO: 2545184 - RNA, 19 nt, Artificial Sequence
  Description of Artificial Sequence: Synthetic oligonucleotide
aacugucccaaagggcaca

SEQ ID NO: 2545185 - RNA, 19 nt, Artificial Sequence
  Description of Artificial Sequence: Synthetic oligonucleotide
cauugaccagaaccugcag

SEQ ID NO: 2545186 - RNA, 19 nt, Artificial Sequence
  Description of Artificial Sequence: Synthetic oligonucleotide
aaagggcacacaguuuauu

SEQ ID NO: 2545187 - RNA, 19 nt, Artificial Sequence
  Description of Artificial Sequence: Synthetic oligonucleotide
acugucccaaagggcacac

SEQ ID NO: 2545188 - RNA, 19 nt, Artificial Sequence
  Description of Artificial Sequence: Synthetic oligonucleotide
uugcggccgugcaucauca

SEQ ID NO: 2545189 - RNA, 19 nt, Artificial Sequence
  Description of Artificial Sequence: Synthetic oligonucleotide
ugagcagauggaugaucuc

SEQ ID NO: 2545190 - RNA, 19 nt, Artificial Sequence
  Description of Artificial Sequence: Synthetic oligonucleotide
ucacugugccggcucgccc

SEQ ID NO: 2545191 - RNA, 19 nt, Artificial Sequence
  Description of Artificial Sequence: Synthetic oligonucleotide
ucuguacaucgucggugcu

SEQ ID NO: 2545192 - RNA, 19 nt, Artificial Sequence
  Description of Artificial Sequence: Synthetic oligonucleotide
uguggcugucucccacuca

SEQ ID NO: 2545193 - RNA, 19 nt, Artificial Sequence
  Description of Artificial Sequence: Synthetic oligonucleotide
gggaaaucagcgguuagac

SEQ ID NO: 2545194 - RNA, 19 nt, Artificial Sequence
  Description of Artificial Sequence: Synthetic oligonucleotide
uuggccacacgcuccaguu

SEQ ID NO: 2545195 - RNA, 19 nt, Artificial Sequence
  Description of Artificial Sequence: Synthetic oligonucleotide
ggugcuccauuucccaaag

SEQ ID NO: 2545196 - RNA, 19 nt, Artificial Sequence
  Description of Artificial Sequence: Synthetic oligonucleotide
acgauccgcaccgucauga

SEQ ID NO: 2545197 - RNA, 19 nt, Artificial Sequence
  Description of Artificial Sequence: Synthetic oligonucleotide
ucacucggcgcagugggga

SEQ ID NO: 2545198 - RNA, 19 nt, Artificial Sequence
  Description of Artificial Sequence: Synthetic oligonucleotide
uggcauugaccagaaccug

SEQ ID NO: 2545199 - RNA, 19 nt, Artificial Sequence
  Description of Artificial Sequence: Synthetic oligonucleotide
gcagcuuuugggaaaucag

SEQ ID NO: 2545200 - RNA, 19 nt, Artificial Sequence
  Description of Artificial Sequence: Synthetic oligonucleotide
caguuuauuaggcagcuuu

SEQ ID NO: 2545201 - RNA, 19 nt, Artificial Sequence
  Description of Artificial Sequence: Synthetic oligonucleotide
ggcacacaguuuauuaggc

SEQ ID NO: 2545202 - RNA, 19 nt, Artificial Sequence
  Description of Artificial Sequence: Synthetic oligonucleotide
cuugacgauccgcaccguc

SEQ ID NO: 2545203 - RNA, 19 nt, Artificial Sequence
  Description of Artificial Sequence: Synthetic oligonucleotide
ucgucggccgcucggcgug

SEQ ID NO: 2545204 - RNA, 19 nt, Artificial Sequence
  Description of Artificial Sequence: Synthetic oligonucleotide
gugaggcgcuccacgaugg

SEQ ID NO: 2545205 - RNA, 19 nt, Artificial Sequence
  Description of Artificial Sequence: Synthetic oligonucleotide
ugugcacagcagccagaug

SEQ ID NO: 2545206 - RNA, 19 nt, Artificial Sequence
  Description of Artificial Sequence: Synthetic oligonucleotide
guugcggccgugcaucauc

SEQ ID NO: 2545207 - RNA, 19 nt, Artificial Sequence
  Description of Artificial Sequence: Synthetic oligonucleotide
aguuuauuaggcagcuuuu

SEQ ID NO: 2545208 - RNA, 19 nt, Artificial Sequence
  Description of Artificial Sequence: Synthetic oligonucleotide
acccuuggcagcauugaug

SEQ ID NO: 2545209 - RNA, 19 nt, Artificial Sequence
  Description of Artificial Sequence: Synthetic oligonucleotide
ggugaggcgcuccacgaug

SEQ ID NO: 2545210 - RNA, 19 nt, Artificial Sequence
  Description of Artificial Sequence: Synthetic oligonucleotide
ggggcacugggcuuugcgg

SEQ ID NO: 2545211 - RNA, 19 nt, Artificial Sequence
  Description of Artificial Sequence: Synthetic oligonucleotide
ucacgagcuccugugcaca

SEQ ID NO: 2545212 - RNA, 19 nt, Artificial Sequence
  Description of Artificial Sequence: Synthetic oligonucleotide
gcaauggucuugauauucc

SEQ ID NO: 2545213 - RNA, 19 nt, Artificial Sequence
  Description of Artificial Sequence: Synthetic oligonucleotide
augaucucaaaggcaugcu

SEQ ID NO: 2545214 - RNA, 19 nt, Artificial Sequence
  Description of Artificial Sequence: Synthetic oligonucleotide
auggccugauucacucggc

SEQ ID NO: 2545215 - RNA, 19 nt, Artificial Sequence
  Description of Artificial Sequence: Synthetic oligonucleotide
gguuagacuuggccacacg

SEQ ID NO: 2545216 - RNA, 19 nt, Artificial Sequence
  Description of Artificial Sequence: Synthetic oligonucleotide
aguuggugaggcgcuccac

SEQ ID NO: 2545217 - RNA, 19 nt, Artificial Sequence
  Description of Artificial Sequence: Synthetic oligonucleotide
cugggcuuugcggaagcgc

SEQ ID NO: 2545218 - RNA, 19 nt, Artificial Sequence
  Description of Artificial Sequence: Synthetic oligonucleotide
ggcauugaccagaaccugc

SEQ ID NO: 2545219 - RNA, 19 nt, Artificial Sequence
  Description of Artificial Sequence: Synthetic oligonucleotide
gaacugucccaaagggcac

SEQ ID NO: 2545220 - RNA, 19 nt, Artificial Sequence
  Description of Artificial Sequence: Synthetic oligonucleotide
gcgcagacgggacucgucg

SEQ ID NO: 2545221 - RNA, 19 nt, Artificial Sequence
  Description of Artificial Sequence: Synthetic oligonucleotide
ggucuugauauuccggaaa

SEQ ID NO: 2545222 - RNA, 19 nt, Artificial Sequence
  Description of Artificial Sequence: Synthetic oligonucleotide
ccauuucccaaagagcuug

SEQ ID NO: 2545223 - RNA, 19 nt, Artificial Sequence
  Description of Artificial Sequence: Synthetic oligonucleotide
acgagcuccugugcacagc

SEQ ID NO: 2545224 - RNA, 19 nt, Artificial Sequence
  Description of Artificial Sequence: Synthetic oligonucleotide
aggcaugcuugacgauccg

SEQ ID NO: 2545225 - RNA, 19 nt, Artificial Sequence
  Description of Artificial Sequence: Synthetic oligonucleotide
acucgucggccgcucggcg

SEQ ID NO: 2545226 - RNA, 19 nt, Artificial Sequence
  Description of Artificial Sequence: Synthetic oligonucleotide
uggaccacgcgccgcccug

SEQ ID NO: 2545227 - RNA, 19 nt, Artificial Sequence
  Description of Artificial Sequence: Synthetic oligonucleotide
gcgcaguggggacacaucc

SEQ ID NO: 2545228 - RNA, 19 nt, Artificial Sequence
  Description of Artificial Sequence: Synthetic oligonucleotide
gaacccuuggcagcauuga

SEQ ID NO: 2545229 - RNA, 19 nt, Artificial Sequence
  Description of Artificial Sequence: Synthetic oligonucleotide
ucgcccaaugcgcguugag

SEQ ID NO: 2545230 - RNA, 19 nt, Artificial Sequence
  Description of Artificial Sequence: Synthetic oligonucleotide
uucugacggcgcagacggg

SEQ ID NO: 2545231 - RNA, 19 nt, Artificial Sequence
  Description of Artificial Sequence: Synthetic oligonucleotide
caucaucauggaguuggug

SEQ ID NO: 2545232 - RNA, 19 nt, Artificial Sequence
  Description of Artificial Sequence: Synthetic oligonucleotide
gacgggacucgucggccgc

SEQ ID NO: 2545233 - RNA, 19 nt, Artificial Sequence
  Description of Artificial Sequence: Synthetic oligonucleotide
cggccgugcaucaucaugg

SEQ ID NO: 2545234 - RNA, 19 nt, Artificial Sequence
  Description of Artificial Sequence: Synthetic oligonucleotide
agcagauggaugaucucaa

SEQ ID NO: 2545235 - RNA, 19 nt, Artificial Sequence
  Description of Artificial Sequence: Synthetic oligonucleotide
gcccaaugcgcguugaguc

SEQ ID NO: 2545236 - RNA, 19 nt, Artificial Sequence
  Description of Artificial Sequence: Synthetic oligonucleotide
cuguacaucgucggugcuc

SEQ ID NO: 2545237 - RNA, 19 nt, Artificial Sequence
  Description of Artificial Sequence: Synthetic oligonucleotide
auuccggaaagcagccuca

SEQ ID NO: 2545238 - RNA, 19 nt, Artificial Sequence
  Description of Artificial Sequence: Synthetic oligonucleotide
acaucgucggugcuccauu

SEQ ID NO: 2545239 - RNA, 19 nt, Artificial Sequence
  Description of Artificial Sequence: Synthetic oligonucleotide
gugagcagauggaugaucu

SEQ ID NO: 2545240 - RNA, 19 nt, Artificial Sequence
  Description of Artificial Sequence: Synthetic oligonucleotide
gaagcgcuuggcggcauac

SEQ ID NO: 2545241 - RNA, 19 nt, Artificial Sequence
  Description of Artificial Sequence: Synthetic oligonucleotide
ucggugcuccauuucccaa

SEQ ID NO: 2545242 - RNA, 19 nt, Artificial Sequence
  Description of Artificial Sequence: Synthetic oligonucleotide
gucggugcuccauuuccca

SEQ ID NO: 2545243 - RNA, 19 nt, Artificial Sequence
  Description of Artificial Sequence: Synthetic oligonucleotide
gcagguguggcugucuccc

SEQ ID NO: 2545244 - RNA, 19 nt, Artificial Sequence
  Description of Artificial Sequence: Synthetic oligonucleotide
cugacggcgcagacgggac

SEQ ID NO: 2545245 - RNA, 19 nt, Artificial Sequence
  Description of Artificial Sequence: Synthetic oligonucleotide
cugcagaggguucucgcca

SEQ ID NO: 2545246 - RNA, 19 nt, Artificial Sequence
  Description of Artificial Sequence: Synthetic oligonucleotide
gccugauucacucggcgca

SEQ ID NO: 2545247 - RNA, 19 nt, Artificial Sequence
  Description of Artificial Sequence: Synthetic oligonucleotide
cacgagcuccugugcacag

SEQ ID NO: 2545248 - RNA, 19 nt, Artificial Sequence
  Description of Artificial Sequence: Synthetic oligonucleotide
acugggcuuugcggaagcg

SEQ ID NO: 2545249 - RNA, 19 nt, Artificial Sequence
  Description of Artificial Sequence: Synthetic oligonucleotide
uacaucgucggugcuccau

SEQ ID NO: 2545250 - RNA, 19 nt, Artificial Sequence
  Description of Artificial Sequence: Synthetic oligonucleotide
ucaugagcuucuugccguu

SEQ ID NO: 2545251 - RNA, 19 nt, Artificial Sequence
  Description of Artificial Sequence: Synthetic oligonucleotide
uuguugcggccgugcauca

SEQ ID NO: 2545252 - RNA, 19 nt, Artificial Sequence
  Description of Artificial Sequence: Synthetic oligonucleotide
gcgcguugagucuucccgg

SEQ ID NO: 2545253 - RNA, 19 nt, Artificial Sequence
  Description of Artificial Sequence: Synthetic oligonucleotide
ugacggcgcagacgggacu

SEQ ID NO: 2545254 - RNA, 19 nt, Artificial Sequence
  Description of Artificial Sequence: Synthetic oligonucleotide
ccggaaagcagccucacga

SEQ ID NO: 2545255 - RNA, 19 nt, Artificial Sequence
  Description of Artificial Sequence: Synthetic oligonucleotide
ggccugauucacucggcgc

SEQ ID NO: 2545256 - RNA, 19 nt, Artificial Sequence
  Description of Artificial Sequence: Synthetic oligonucleotide
uggugaggcgcuccacgau

SEQ ID NO: 2545257 - RNA, 19 nt, Artificial Sequence
  Description of Artificial Sequence: Synthetic oligonucleotide
ccaaagggcacacaguuua

SEQ ID NO: 2545258 - RNA, 19 nt, Artificial Sequence
  Description of Artificial Sequence: Synthetic oligonucleotide
aucagcgguuagacuuggc

SEQ ID NO: 2545259 - RNA, 19 nt, Artificial Sequence
  Description of Artificial Sequence: Synthetic oligonucleotide
auauuccggaaagcagccu

SEQ ID NO: 2545260 - RNA, 19 nt, Artificial Sequence
  Description of Artificial Sequence: Synthetic oligonucleotide
ucuugccguuguugcggcc

SEQ ID NO: 2545261 - RNA, 19 nt, Artificial Sequence
  Description of Artificial Sequence: Synthetic oligonucleotide
uucucgccagugagcagau

SEQ ID NO: 2545262 - RNA, 19 nt, Artificial Sequence
  Description of Artificial Sequence: Synthetic oligonucleotide
gacgauccgcaccgucaug

SEQ ID NO: 2545263 - RNA, 19 nt, Artificial Sequence
  Description of Artificial Sequence: Synthetic oligonucleotide
cagaaccugcagaggguuc

SEQ ID NO: 2545264 - RNA, 19 nt, Artificial Sequence
  Description of Artificial Sequence: Synthetic oligonucleotide
cauuucccaaagagcuuga

SEQ ID NO: 2545265 - RNA, 19 nt, Artificial Sequence
  Description of Artificial Sequence: Synthetic oligonucleotide
aggaguuggaggaacccuu

SEQ ID NO: 2545266 - RNA, 19 nt, Artificial Sequence
  Description of Artificial Sequence: Synthetic oligonucleotide
uugccguuguugcggccgu

SEQ ID NO: 2545267 - RNA, 19 nt, Artificial Sequence
  Description of Artificial Sequence: Synthetic oligonucleotide
gucauucugacggcgcaga

SEQ ID NO: 2545268 - RNA, 19 nt, Artificial Sequence
  Description of Artificial Sequence: Synthetic oligonucleotide
auggaguuggugaggcgcu

SEQ ID NO: 2545269 - RNA, 19 nt, Artificial Sequence
  Description of Artificial Sequence: Synthetic oligonucleotide
cagacgggacucgucggcc

SEQ ID NO: 2545270 - RNA, 19 nt, Artificial Sequence
  Description of Artificial Sequence: Synthetic oligonucleotide
gacucgucggccgcucggc

SEQ ID NO: 2545271 - RNA, 19 nt, Artificial Sequence
  Description of Artificial Sequence: Synthetic oligonucleotide
cagucauucugacggcgca

SEQ ID NO: 2545272 - RNA, 19 nt, Artificial Sequence
  Description of Artificial Sequence: Synthetic oligonucleotide
gcacacaguuuauuaggca

SEQ ID NO: 2545273 - RNA, 19 nt, Artificial Sequence
  Description of Artificial Sequence: Synthetic oligonucleotide
cacugugccggcucgccca

SEQ ID NO: 2545274 - RNA, 19 nt, Artificial Sequence
  Description of Artificial Sequence: Synthetic oligonucleotide
accagaaccugcagagggu

SEQ ID NO: 2545275 - RNA, 19 nt, Artificial Sequence
  Description of Artificial Sequence: Synthetic oligonucleotide
cacgauggggcacugggcu

SEQ ID NO: 2545276 - RNA, 19 nt, Artificial Sequence
  Description of Artificial Sequence: Synthetic oligonucleotide
ggcugucucccacucaguc

SEQ ID NO: 2545277 - RNA, 19 nt, Artificial Sequence
  Description of Artificial Sequence: Synthetic oligonucleotide
uuccggaaagcagccucac

SEQ ID NO: 2545278 - RNA, 19 nt, Artificial Sequence
  Description of Artificial Sequence: Synthetic oligonucleotide
ggacacauccacagccugc

SEQ ID NO: 2545279 - RNA, 19 nt, Artificial Sequence
  Description of Artificial Sequence: Synthetic oligonucleotide
cugucucccacucagucau

SEQ ID NO: 2545280 - RNA, 19 nt, Artificial Sequence
  Description of Artificial Sequence: Synthetic oligonucleotide
gacggcgcagacgggacuc

SEQ ID NO: 2545281 - RNA, 19 nt, Artificial Sequence
  Description of Artificial Sequence: Synthetic oligonucleotide
gggucucugccaccgcagg

SEQ ID NO: 2545282 - RNA, 19 nt, Artificial Sequence
  Description of Artificial Sequence: Synthetic oligonucleotide
gcaaggcacucagcaaugg

SEQ ID NO: 2545283 - RNA, 19 nt, Artificial Sequence
  Description of Artificial Sequence: Synthetic oligonucleotide
gcagacgggacucgucggc

SEQ ID NO: 2545284 - RNA, 19 nt, Artificial Sequence
  Description of Artificial Sequence: Synthetic oligonucleotide
cguaggaguuggaggaacc

SEQ ID NO: 2545285 - RNA, 19 nt, Artificial Sequence
  Description of Artificial Sequence: Synthetic oligonucleotide
cagaggguucucgccagug

SEQ ID NO: 2545286 - RNA, 19 nt, Artificial Sequence
  Description of Artificial Sequence: Synthetic oligonucleotide
ggaguuggaggaacccuug

SEQ ID NO: 2545287 - RNA, 19 nt, Artificial Sequence
  Description of Artificial Sequence: Synthetic oligonucleotide
caugagcuucuugccguug

SEQ ID NO: 2545288 - RNA, 19 nt, Artificial Sequence
  Description of Artificial Sequence: Synthetic oligonucleotide
ggacucgucggccgcucgg

SEQ ID NO: 2545289 - RNA, 19 nt, Artificial Sequence
  Description of Artificial Sequence: Synthetic oligonucleotide
cugccuccucacugugccg

SEQ ID NO: 2545290 - RNA, 19 nt, Artificial Sequence
  Description of Artificial Sequence: Synthetic oligonucleotide
uggcugucucccacucagu

SEQ ID NO: 2545291 - RNA, 19 nt, Artificial Sequence
  Description of Artificial Sequence: Synthetic oligonucleotide
auguaauccugcagagaaa

SEQ ID NO: 2545292 - RNA, 19 nt, Artificial Sequence
  Description of Artificial Sequence: Synthetic oligonucleotide
gcagagaaauaucauugau

SEQ ID NO: 2545293 - RNA, 19 nt, Artificial Sequence
  Description of Artificial Sequence: Synthetic oligonucleotide
caaugcgcguugagucuuc

SEQ ID NO: 2545294 - RNA, 19 nt, Artificial Sequence
  Description of Artificial Sequence: Synthetic oligonucleotide
gcauugaccagaaccugca

SEQ ID NO: 2545295 - RNA, 19 nt, Artificial Sequence
  Description of Artificial Sequence: Synthetic oligonucleotide
gccagugagcagauggaug

SEQ ID NO: 2545296 - RNA, 19 nt, Artificial Sequence
  Description of Artificial Sequence: Synthetic oligonucleotide
gggcacugggcuuugcgga

SEQ ID NO: 2545297 - RNA, 19 nt, Artificial Sequence
  Description of Artificial Sequence: Synthetic oligonucleotide
ggguucucgccagugagca

SEQ ID NO: 2545298 - RNA, 19 nt, Artificial Sequence
  Description of Artificial Sequence: Synthetic oligonucleotide
accgccccgcacugugggg

SEQ ID NO: 2545299 - RNA, 19 nt, Artificial Sequence
  Description of Artificial Sequence: Synthetic oligonucleotide
cucaucugcaaggcacuca

SEQ ID NO: 2545300 - RNA, 19 nt, Artificial Sequence
  Description of Artificial Sequence: Synthetic oligonucleotide
gugccggcucgcccaaugc

SEQ ID NO: 2545301 - RNA, 19 nt, Artificial Sequence
  Description of Artificial Sequence: Synthetic oligonucleotide
cacucggcgcaguggggac

SEQ ID NO: 2545302 - RNA, 19 nt, Artificial Sequence
  Description of Artificial Sequence: Synthetic oligonucleotide
ggaugaucucaaaggcaug

SEQ ID NO: 2545303 - RNA, 19 nt, Artificial Sequence
  Description of Artificial Sequence: Synthetic oligonucleotide
gcggccgugcaucaucaug

SEQ ID NO: 2545304 - RNA, 19 nt, Artificial Sequence
  Description of Artificial Sequence: Synthetic oligonucleotide
ggcuuugcggaagcgcuug

SEQ ID NO: 2545305 - RNA, 19 nt, Artificial Sequence
  Description of Artificial Sequence: Synthetic oligonucleotide
cccacucagucauucugac

SEQ ID NO: 2545306 - RNA, 19 nt, Artificial Sequence
  Description of Artificial Sequence: Synthetic oligonucleotide
auaccgccccgcacugugg

SEQ ID NO: 2545307 - RNA, 19 nt, Artificial Sequence
  Description of Artificial Sequence: Synthetic oligonucleotide
gcguugagucuucccgggg

SEQ ID NO: 2545308 - RNA, 19 nt, Artificial Sequence
  Description of Artificial Sequence: Synthetic oligonucleotide
ggaaaucagcgguuagacu

SEQ ID NO: 2545309 - RNA, 19 nt, Artificial Sequence
  Description of Artificial Sequence: Synthetic oligonucleotide
aggaacccuuggcagcauu

SEQ ID NO: 2545310 - RNA, 19 nt, Artificial Sequence
  Description of Artificial Sequence: Synthetic oligonucleotide
ggaguuggugaggcgcucc

SEQ ID NO: 2545311 - RNA, 19 nt, Artificial Sequence
  Description of Artificial Sequence: Synthetic oligonucleotide
cggaaagcagccucacgag

SEQ ID NO: 2545312 - RNA, 19 nt, Artificial Sequence
  Description of Artificial Sequence: Synthetic oligonucleotide
gauggggcacugggcuuug

SEQ ID NO: 2545313 - RNA, 19 nt, Artificial Sequence
  Description of Artificial Sequence: Synthetic oligonucleotide
cgcuuggcggcauaccgcc

SEQ ID NO: 2545314 - RNA, 19 nt, Artificial Sequence
  Description of Artificial Sequence: Synthetic oligonucleotide
gagcuccugugcacagcag

SEQ ID NO: 2545315 - RNA, 19 nt, Artificial Sequence
  Description of Artificial Sequence: Synthetic oligonucleotide
ggcauaccgccccgcacug

SEQ ID NO: 2545316 - RNA, 19 nt, Artificial Sequence
  Description of Artificial Sequence: Synthetic oligonucleotide
uggaguuggugaggcgcuc

SEQ ID NO: 2545317 - RNA, 19 nt, Artificial Sequence
  Description of Artificial Sequence: Synthetic oligonucleotide
gaccacgcgccgcccuggc

SEQ ID NO: 2545318 - RNA, 19 nt, Artificial Sequence
  Description of Artificial Sequence: Synthetic oligonucleotide
ccacgauggggcacugggc

SEQ ID NO: 2545319 - RNA, 19 nt, Artificial Sequence
  Description of Artificial Sequence: Synthetic oligonucleotide
ugccaccgcagguguggcu

SEQ ID NO: 2545320 - RNA, 19 nt, Artificial Sequence
  Description of Artificial Sequence: Synthetic oligonucleotide
caaggcacucagcaauggu

SEQ ID NO: 2545321 - RNA, 19 nt, Artificial Sequence
  Description of Artificial Sequence: Synthetic oligonucleotide
acggcgcagacgggacucg

SEQ ID NO: 2545322 - RNA, 19 nt, Artificial Sequence
  Description of Artificial Sequence: Synthetic oligonucleotide
gccagauggccugauucac

SEQ ID NO: 2545323 - RNA, 19 nt, Artificial Sequence
  Description of Artificial Sequence: Synthetic oligonucleotide
cuccacgauggggcacugg

SEQ ID NO: 2545324 - RNA, 19 nt, Artificial Sequence
  Description of Artificial Sequence: Synthetic oligonucleotide
ccugauucacucggcgcag

SEQ ID NO: 2545325 - RNA, 19 nt, Artificial Sequence
  Description of Artificial Sequence: Synthetic oligonucleotide
ccugcagagaaauaucauu

SEQ ID NO: 2545326 - RNA, 19 nt, Artificial Sequence
  Description of Artificial Sequence: Synthetic oligonucleotide
acucagcaauggucuugau

SEQ ID NO: 2545327 - RNA, 19 nt, Artificial Sequence
  Description of Artificial Sequence: Synthetic oligonucleotide
gccucacgagcuccugugc

SEQ ID NO: 2545328 - RNA, 19 nt, Artificial Sequence
  Description of Artificial Sequence: Synthetic oligonucleotide
cuggggucucugccaccgc

SEQ ID NO: 2545329 - RNA, 19 nt, Artificial Sequence
  Description of Artificial Sequence: Synthetic oligonucleotide
uccgcaccgucaugagcuu

SEQ ID NO: 2545330 - RNA, 19 nt, Artificial Sequence
  Description of Artificial Sequence: Synthetic oligonucleotide
ccacgcgccgcccuggcac

SEQ ID NO: 2545331 - RNA, 19 nt, Artificial Sequence
  Description of Artificial Sequence: Synthetic oligonucleotide
gggacucgucggccgcucg

SEQ ID NO: 2545332 - RNA, 19 nt, Artificial Sequence
  Description of Artificial Sequence: Synthetic oligonucleotide
gccggcucgcccaaugcgc

SEQ ID NO: 2545333 - RNA, 19 nt, Artificial Sequence
  Description of Artificial Sequence: Synthetic oligonucleotide
gcguggaccacgcgccgcc

SEQ ID NO: 2545334 - RNA, 19 nt, Artificial Sequence
  Description of Artificial Sequence: Synthetic oligonucleotide
uguugcggccgugcaucau

SEQ ID NO: 2545335 - RNA, 19 nt, Artificial Sequence
  Description of Artificial Sequence: Synthetic oligonucleotide
acucggcgcaguggggaca

SEQ ID NO: 2545336 - RNA, 19 nt, Artificial Sequence
  Description of Artificial Sequence: Synthetic oligonucleotide
gcguaggaguuggaggaac

SEQ ID NO: 2545337 - RNA, 19 nt, Artificial Sequence
  Description of Artificial Sequence: Synthetic oligonucleotide
ggggcagguacuuggcaua

SEQ ID NO: 2545338 - RNA, 19 nt, Artificial Sequence
  Description of Artificial Sequence: Synthetic oligonucleotide
caaagggcacacaguuuau

SEQ ID NO: 2545339 - RNA, 19 nt, Artificial Sequence
  Description of Artificial Sequence: Synthetic oligonucleotide
cugccaccgcagguguggc

SEQ ID NO: 2545340 - RNA, 19 nt, Artificial Sequence
  Description of Artificial Sequence: Synthetic oligonucleotide
accgcagguguggcugucu

SEQ ID NO: 2545341 - RNA, 19 nt, Artificial Sequence
  Description of Artificial Sequence: Synthetic oligonucleotide
gggcagguacuuggcauac

SEQ ID NO: 2545342 - RNA, 19 nt, Artificial Sequence
  Description of Artificial Sequence: Synthetic oligonucleotide
accacgcgccgcccuggca

SEQ ID NO: 2545343 - RNA, 19 nt, Artificial Sequence
  Description of Artificial Sequence: Synthetic oligonucleotide
gccguuguugcggccgugc

SEQ ID NO: 2545344 - RNA, 19 nt, Artificial Sequence
  Description of Artificial Sequence: Synthetic oligonucleotide
ccucacgagcuccugugca

SEQ ID NO: 2545345 - RNA, 19 nt, Artificial Sequence
  Description of Artificial Sequence: Synthetic oligonucleotide
ugcggccgugcaucaucau

SEQ ID NO: 2545346 - RNA, 19 nt, Artificial Sequence
  Description of Artificial Sequence: Synthetic oligonucleotide
gcacugggcuuugcggaag

SEQ ID NO: 2545347 - RNA, 19 nt, Artificial Sequence
  Description of Artificial Sequence: Synthetic oligonucleotide
cagguguggcugucuccca

SEQ ID NO: 2545348 - RNA, 19 nt, Artificial Sequence
  Description of Artificial Sequence: Synthetic oligonucleotide
gcgcuuggcggcauaccgc

SEQ ID NO: 2545349 - RNA, 19 nt, Artificial Sequence
  Description of Artificial Sequence: Synthetic oligonucleotide
cugugcacagcagccagau

SEQ ID NO: 2545350 - RNA, 19 nt, Artificial Sequence
  Description of Artificial Sequence: Synthetic oligonucleotide
uggcggcauaccgccccgc

SEQ ID NO: 2545351 - RNA, 19 nt, Artificial Sequence
  Description of Artificial Sequence: Synthetic oligonucleotide
guacaucgucggugcucca

SEQ ID NO: 2545352 - RNA, 19 nt, Artificial Sequence
  Description of Artificial Sequence: Synthetic oligonucleotide
gcggcauaccgccccgcac

SEQ ID NO: 2545353 - RNA, 19 nt, Artificial Sequence
  Description of Artificial Sequence: Synthetic oligonucleotide
ggaccacgcgccgcccugg

SEQ ID NO: 2545354 - RNA, 19 nt, Artificial Sequence
  Description of Artificial Sequence: Synthetic oligonucleotide
caaaggcaugcuugacgau

SEQ ID NO: 2545355 - RNA, 19 nt, Artificial Sequence
  Description of Artificial Sequence: Synthetic oligonucleotide
ggcggcauaccgccccgca

SEQ ID NO: 2545356 - RNA, 19 nt, Artificial Sequence
  Description of Artificial Sequence: Synthetic oligonucleotide
agcagccagauggccugau

SEQ ID NO: 2545357 - RNA, 19 nt, Artificial Sequence
  Description of Artificial Sequence: Synthetic oligonucleotide
acgggacucgucggccgcu

SEQ ID NO: 2545358 - RNA, 19 nt, Artificial Sequence
  Description of Artificial Sequence: Synthetic oligonucleotide
cgcagguguggcugucucc

SEQ ID NO: 2545359 - RNA, 19 nt, Artificial Sequence
  Description of Artificial Sequence: Synthetic oligonucleotide
cacuguugaugauggcauu

SEQ ID NO: 2545360 - RNA, 19 nt, Artificial Sequence
  Description of Artificial Sequence: Synthetic oligonucleotide
cgauccgcaccgucaugag

SEQ ID NO: 2545361 - RNA, 19 nt, Artificial Sequence
  Description of Artificial Sequence: Synthetic oligonucleotide
cacgcgccgcccuggcaca

SEQ ID NO: 2545362 - RNA, 19 nt, Artificial Sequence
  Description of Artificial Sequence: Synthetic oligonucleotide
ggcguggaccacgcgccgc

SEQ ID NO: 2545363 - RNA, 19 nt, Artificial Sequence
  Description of Artificial Sequence: Synthetic oligonucleotide
cucgucggccgcucggcgu

SEQ ID NO: 2545364 - RNA, 19 nt, Artificial Sequence
  Description of Artificial Sequence: Synthetic oligonucleotide
caucgucggugcuccauuu

SEQ ID NO: 2545365 - RNA, 19 nt, Artificial Sequence
  Description of Artificial Sequence: Synthetic oligonucleotide
ggcgcaguggggacacauc

SEQ ID NO: 2545366 - RNA, 19 nt, Artificial Sequence
  Description of Artificial Sequence: Synthetic oligonucleotide
ccugugcacagcagccaga

SEQ ID NO: 2545367 - RNA, 19 nt, Artificial Sequence
  Description of Artificial Sequence: Synthetic oligonucleotide
gcagcauugaugagcucau

SEQ ID NO: 2545368 - RNA, 19 nt, Artificial Sequence
  Description of Artificial Sequence: Synthetic oligonucleotide
cucgcccaaugcgcguuga

SEQ ID NO: 2545369 - RNA, 19 nt, Artificial Sequence
  Description of Artificial Sequence: Synthetic oligonucleotide
cccaaugcgcguugagucu

SEQ ID NO: 2545370 - RNA, 19 nt, Artificial Sequence
  Description of Artificial Sequence: Synthetic oligonucleotide
ccgccccgcacuguggggc

SEQ ID NO: 2545371 - RNA, 19 nt, Artificial Sequence
  Description of Artificial Sequence: Synthetic oligonucleotide
gcgguuagacuuggccaca

SEQ ID NO: 2545372 - RNA, 19 nt, Artificial Sequence
  Description of Artificial Sequence: Synthetic oligonucleotide
cagccucacgagcuccugu

SEQ ID NO: 2545373 - RNA, 19 nt, Artificial Sequence
  Description of Artificial Sequence: Synthetic oligonucleotide
guggaccacgcgccgcccu

SEQ ID NO: 2545374 - RNA, 19 nt, Artificial Sequence
  Description of Artificial Sequence: Synthetic oligonucleotide
ccgcagguguggcugucuc

SEQ ID NO: 2545375 - RNA, 19 nt, Artificial Sequence
  Description of Artificial Sequence: Synthetic oligonucleotide
ggcguaggaguuggaggaa

SEQ ID NO: 2545376 - RNA, 19 nt, Artificial Sequence
  Description of Artificial Sequence: Synthetic oligonucleotide
gcuuggcggcauaccgccc

SEQ ID NO: 2545377 - RNA, 19 nt, Artificial Sequence
  Description of Artificial Sequence: Synthetic oligonucleotide
cgcucggcguggaccacgc

SEQ ID NO: 2545378 - RNA, 19 nt, Artificial Sequence
  Description of Artificial Sequence: Synthetic oligonucleotide
ggcgcagacgggacucguc

SEQ ID NO: 2545379 - RNA, 19 nt, Artificial Sequence
  Description of Artificial Sequence: Synthetic oligonucleotide
caccgcagguguggcuguc

SEQ ID NO: 2545380 - RNA, 19 nt, Artificial Sequence
  Description of Artificial Sequence: Synthetic oligonucleotide
cugauucacucggcgcagu

SEQ ID NO: 2545381 - RNA, 19 nt, Artificial Sequence
  Description of Artificial Sequence: Synthetic oligonucleotide
gcgccgcccuggcacagac

SEQ ID NO: 2545382 - RNA, 19 nt, Artificial Sequence
  Description of Artificial Sequence: Synthetic oligonucleotide
cgcaguggggacacaucca

SEQ ID NO: 2545383 - RNA, 19 nt, Artificial Sequence
  Description of Artificial Sequence: Synthetic oligonucleotide
ccgcucggcguggaccacg

SEQ ID NO: 2545384 - RNA, 19 nt, Artificial Sequence
  Description of Artificial Sequence: Synthetic oligonucleotide
ggaagcgcuuggcggcaua

SEQ ID NO: 2545385 - RNA, 19 nt, Artificial Sequence
  Description of Artificial Sequence: Synthetic oligonucleotide
cggugcuccauuucccaaa

SEQ ID NO: 2545386 - RNA, 19 nt, Artificial Sequence
  Description of Artificial Sequence: Synthetic oligonucleotide
ucggcgcaguggggacaca

SEQ ID NO: 2545387 - RNA, 19 nt, Artificial Sequence
  Description of Artificial Sequence: Synthetic oligonucleotide
cgguuagacuuggccacac

SEQ ID NO: 2545388 - RNA, 19 nt, Artificial Sequence
  Description of Artificial Sequence: Synthetic oligonucleotide
ccguuguugcggccgugca

SEQ ID NO: 2545389 - RNA, 19 nt, Artificial Sequence
  Description of Artificial Sequence: Synthetic oligonucleotide
ggcacucagcaauggucuu

SEQ ID NO: 2545390 - RNA, 19 nt, Artificial Sequence
  Description of Artificial Sequence: Synthetic oligonucleotide
cacuguggggcagguacuu

SEQ ID NO: 2545391 - RNA, 19 nt, Artificial Sequence
  Description of Artificial Sequence: Synthetic oligonucleotide
cagugagcagauggaugau

SEQ ID NO: 2545392 - RNA, 19 nt, Artificial Sequence
  Description of Artificial Sequence: Synthetic oligonucleotide
gcggaagcgcuuggcggca

SEQ ID NO: 2545393 - RNA, 19 nt, Artificial Sequence
  Description of Artificial Sequence: Synthetic oligonucleotide
ccccgcacuguggggcagg

SEQ ID NO: 2545394 - RNA, 19 nt, Artificial Sequence
  Description of Artificial Sequence: Synthetic oligonucleotide
gcagaggguucucgccagu

SEQ ID NO: 2545395 - RNA, 19 nt, Artificial Sequence
  Description of Artificial Sequence: Synthetic oligonucleotide
gcuccacgauggggcacug

SEQ ID NO: 2545396 - RNA, 19 nt, Artificial Sequence
  Description of Artificial Sequence: Synthetic oligonucleotide
gcacuguggggcagguacu

SEQ ID NO: 2545397 - RNA, 19 nt, Artificial Sequence
  Description of Artificial Sequence: Synthetic oligonucleotide
cggcguggaccacgcgccg

SEQ ID NO: 2545398 - RNA, 19 nt, Artificial Sequence
  Description of Artificial Sequence: Synthetic oligonucleotide
cccaaagggcacacaguuu

SEQ ID NO: 2545399 - RNA, 19 nt, Artificial Sequence
  Description of Artificial Sequence: Synthetic oligonucleotide
ccagaaccugcagaggguu

SEQ ID NO: 2545400 - RNA, 19 nt, Artificial Sequence
  Description of Artificial Sequence: Synthetic oligonucleotide
cggcauaccgccccgcacu

SEQ ID NO: 2545401 - RNA, 19 nt, Artificial Sequence
  Description of Artificial Sequence: Synthetic oligonucleotide
ccgcaccgucaugagcuuc

SEQ ID NO: 2545402 - RNA, 19 nt, Artificial Sequence
  Description of Artificial Sequence: Synthetic oligonucleotide
gcagccagauggccugauu

SEQ ID NO: 2545403 - RNA, 19 nt, Artificial Sequence
  Description of Artificial Sequence: Synthetic oligonucleotide
gucggccgcucggcgugga

SEQ ID NO: 2545404 - RNA, 19 nt, Artificial Sequence
  Description of Artificial Sequence: Synthetic oligonucleotide
gccccgcacuguggggcag

SEQ ID NO: 2545405 - RNA, 19 nt, Artificial Sequence
  Description of Artificial Sequence: Synthetic oligonucleotide
ccaaugcgcguugagucuu

SEQ ID NO: 2545406 - RNA, 19 nt, Artificial Sequence
  Description of Artificial Sequence: Synthetic oligonucleotide
cguggaccacgcgccgccc

SEQ ID NO: 2545407 - RNA, 19 nt, Artificial Sequence
  Description of Artificial Sequence: Synthetic oligonucleotide
cguuguugcggccgugcau

SEQ ID NO: 2545408 - RNA, 19 nt, Artificial Sequence
  Description of Artificial Sequence: Synthetic oligonucleotide
cgcccaaugcgcguugagu

SEQ ID NO: 2545409 - RNA, 19 nt, Artificial Sequence
  Description of Artificial Sequence: Synthetic oligonucleotide
gcauaccgccccgcacugu

SEQ ID NO: 2545410 - RNA, 19 nt, Artificial Sequence
  Description of Artificial Sequence: Synthetic oligonucleotide
cgucggccgcucggcgugg

SEQ ID NO: 2545411 - RNA, 19 nt, Artificial Sequence
  Description of Artificial Sequence: Synthetic oligonucleotide
ccaccgcagguguggcugu

SEQ ID NO: 2545412 - RNA, 19 nt, Artificial Sequence
  Description of Artificial Sequence: Synthetic oligonucleotide
gccgcucggcguggaccac

SEQ ID NO: 2545413 - RNA, 19 nt, Artificial Sequence
  Description of Artificial Sequence: Synthetic oligonucleotide
cgccccgcacuguggggca

SEQ ID NO: 2545414 - RNA, 19 nt, Artificial Sequence
  Description of Artificial Sequence: Synthetic oligonucleotide
cgggacucgucggccgcuc

SEQ ID NO: 2545415 - RNA, 19 nt, Artificial Sequence
  Description of Artificial Sequence: Synthetic oligonucleotide
cgcuccacgauggggcacu

SEQ ID NO: 2545416 - RNA, 19 nt, Artificial Sequence
  Description of Artificial Sequence: Synthetic oligonucleotide
cgccagugagcagauggau

SEQ ID NO: 2545417 - RNA, 19 nt, Artificial Sequence
  Description of Artificial Sequence: Synthetic oligonucleotide
cugugccggcucgcccaau

SEQ ID NO: 2545418 - RNA, 19 nt, Artificial Sequence
  Description of Artificial Sequence: Synthetic oligonucleotide
cccgcacuguggggcaggu

SEQ ID NO: 2545419 - RNA, 19 nt, Artificial Sequence
  Description of Artificial Sequence: Synthetic oligonucleotide
cggcgcaguggggacacau

SEQ ID NO: 2545420 - RNA, 19 nt, Artificial Sequence
  Description of Artificial Sequence: Synthetic oligonucleotide
cggcucgcccaaugcgcgu

SEQ ID NO: 2545421 - RNA, 19 nt, Artificial Sequence
  Description of Artificial Sequence: Synthetic oligonucleotide
ccgcacuguggggcaggua

SEQ ID NO: 2545422 - RNA, 19 nt, Artificial Sequence
  Description of Artificial Sequence: Synthetic oligonucleotide
cgcgccgcccuggcacaga

SEQ ID NO: 2545423 - RNA, 19 nt, Artificial Sequence
  Description of Artificial Sequence: Synthetic oligonucleotide
cggcgcagacgggacucgu

SEQ ID NO: 2545424 - RNA, 19 nt, Artificial Sequence
  Description of Artificial Sequence: Synthetic oligonucleotide
aauuaaugguugcagggac

SEQ ID NO: 2545425 - RNA, 19 nt, Artificial Sequence
  Description of Artificial Sequence: Synthetic oligonucleotide
auuuucuaaagccucgagc

SEQ ID NO: 2545426 - RNA, 19 nt, Artificial Sequence
  Description of Artificial Sequence: Synthetic oligonucleotide
uuuucuaaagccucgagcu

SEQ ID NO: 2545427 - RNA, 19 nt, Artificial Sequence
  Description of Artificial Sequence: Synthetic oligonucleotide
aaauugucauuuucuaaag

SEQ ID NO: 2545428 - RNA, 19 nt, Artificial Sequence
  Description of Artificial Sequence: Synthetic oligonucleotide
gauggaaagccacacacag

SEQ ID NO: 2545429 - RNA, 19 nt, Artificial Sequence
  Description of Artificial Sequence: Synthetic oligonucleotide
gaaauugucauuuucuaaa

SEQ ID NO: 2545430 - RNA, 19 nt, Artificial Sequence
  Description of Artificial Sequence: Synthetic oligonucleotide
guuugaaauggucaccucg

SEQ ID NO: 2545431 - RNA, 19 nt, Artificial Sequence
  Description of Artificial Sequence: Synthetic oligonucleotide
agcuuacacagguauaugg

SEQ ID NO: 2545432 - RNA, 19 nt, Artificial Sequence
  Description of Artificial Sequence: Synthetic oligonucleotide
uuugaaauggucaccucga

SEQ ID NO: 2545433 - RNA, 19 nt, Artificial Sequence
  Description of Artificial Sequence: Synthetic oligonucleotide
ucuagcaaagccuggaagu

SEQ ID NO: 2545434 - RNA, 19 nt, Artificial Sequence
  Description of Artificial Sequence: Synthetic oligonucleotide
aacugcgguagccucuugc

SEQ ID NO: 2545435 - RNA, 19 nt, Artificial Sequence
  Description of Artificial Sequence: Synthetic oligonucleotide
uauauggggauggaaagcc

SEQ ID NO: 2545436 - RNA, 19 nt, Artificial Sequence
  Description of Artificial Sequence: Synthetic oligonucleotide
aaguuugaaauggucaccu

SEQ ID NO: 2545437 - RNA, 19 nt, Artificial Sequence
  Description of Artificial Sequence: Synthetic oligonucleotide
acugcgguagccucuugcc

SEQ ID NO: 2545438 - RNA, 19 nt, Artificial Sequence
  Description of Artificial Sequence: Synthetic oligonucleotide
gacuuccucucucugaugc

SEQ ID NO: 2545439 - RNA, 19 nt, Artificial Sequence
  Description of Artificial Sequence: Synthetic oligonucleotide
ucugggguaauuaaugguu

SEQ ID NO: 2545440 - RNA, 19 nt, Artificial Sequence
  Description of Artificial Sequence: Synthetic oligonucleotide
guccacuucagacaccugg

SEQ ID NO: 2545441 - RNA, 19 nt, Artificial Sequence
  Description of Artificial Sequence: Synthetic oligonucleotide
uggucugggguaauuaaug

SEQ ID NO: 2545442 - RNA, 19 nt, Artificial Sequence
  Description of Artificial Sequence: Synthetic oligonucleotide
ucugcaucaucaucaaacu

SEQ ID NO: 2545443 - RNA, 19 nt, Artificial Sequence
  Description of Artificial Sequence: Synthetic oligonucleotide
aguuggggcccucggaugc

SEQ ID NO: 2545444 - RNA, 19 nt, Artificial Sequence
  Description of Artificial Sequence: Synthetic oligonucleotide
aacuuugcugggugagugg

SEQ ID NO: 2545445 - RNA, 19 nt, Artificial Sequence
  Description of Artificial Sequence: Synthetic oligonucleotide
uaauuaaugguugcaggga

SEQ ID NO: 2545446 - RNA, 19 nt, Artificial Sequence
  Description of Artificial Sequence: Synthetic oligonucleotide
ucgagcugucgauugaucc

SEQ ID NO: 2545447 - RNA, 19 nt, Artificial Sequence
  Description of Artificial Sequence: Synthetic oligonucleotide
aacgaacggaagccgggcg

SEQ ID NO: 2545448 - RNA, 19 nt, Artificial Sequence
  Description of Artificial Sequence: Synthetic oligonucleotide
cucggaugcacucagguuc

SEQ ID NO: 2545449 - RNA, 19 nt, Artificial Sequence
  Description of Artificial Sequence: Synthetic oligonucleotide
gaaagccacacacagcaca

SEQ ID NO: 2545450 - RNA, 19 nt, Artificial Sequence
  Description of Artificial Sequence: Synthetic oligonucleotide
cugucaaguaguuggggcc

SEQ ID NO: 2545451 - RNA, 19 nt, Artificial Sequence
  Description of Artificial Sequence: Synthetic oligonucleotide
uggcuucugccuccgaucg

SEQ ID NO: 2545452 - RNA, 19 nt, Artificial Sequence
  Description of Artificial Sequence: Synthetic oligonucleotide
gguauauggggauggaaag

SEQ ID NO: 2545453 - RNA, 19 nt, Artificial Sequence
  Description of Artificial Sequence: Synthetic oligonucleotide
ucauccuggaaauugucau

SEQ ID NO: 2545454 - RNA, 19 nt, Artificial Sequence
  Description of Artificial Sequence: Synthetic oligonucleotide
aucaaacugcgguagccuc

SEQ ID NO: 2545455 - RNA, 19 nt, Artificial Sequence
  Description of Artificial Sequence: Synthetic oligonucleotide
ugaaauggucaccucgagu

SEQ ID NO: 2545456 - RNA, 19 nt, Artificial Sequence
  Description of Artificial Sequence: Synthetic oligonucleotide
uuucuaaagccucgagcug

SEQ ID NO: 2545457 - RNA, 19 nt, Artificial Sequence
  Description of Artificial Sequence: Synthetic oligonucleotide
uauggggauggaaagccac

SEQ ID NO: 2545458 - RNA, 19 nt, Artificial Sequence
  Description of Artificial Sequence: Synthetic oligonucleotide
uuuacacaguccacuucag

SEQ ID NO: 2545459 - RNA, 19 nt, Artificial Sequence
  Description of Artificial Sequence: Synthetic oligonucleotide
aaagccacacacagcacag

SEQ ID NO: 2545460 - RNA, 19 nt, Artificial Sequence
  Description of Artificial Sequence: Synthetic oligonucleotide
gaaauggucaccucgaguu

SEQ ID NO: 2545461 - RNA, 19 nt, Artificial Sequence
  Description of Artificial Sequence: Synthetic oligonucleotide
ugugcaguaccuggcaccg

SEQ ID NO: 2545462 - RNA, 19 nt, Artificial Sequence
  Description of Artificial Sequence: Synthetic oligonucleotide
aaguaguuggggcccucgg

SEQ ID NO: 2545463 - RNA, 19 nt, Artificial Sequence
  Description of Artificial Sequence: Synthetic oligonucleotide
uugaaauggucaccucgag

SEQ ID NO: 2545464 - RNA, 19 nt, Artificial Sequence
  Description of Artificial Sequence: Synthetic oligonucleotide
auugauccgucgcugccgg

SEQ ID NO: 2545465 - RNA, 19 nt, Artificial Sequence
  Description of Artificial Sequence: Synthetic oligonucleotide
acgaacggaagccgggcgc

SEQ ID NO: 2545466 - RNA, 19 nt, Artificial Sequence
  Description of Artificial Sequence: Synthetic oligonucleotide
acagaagggacgcuggggu

SEQ ID NO: 2545467 - RNA, 19 nt, Artificial Sequence
  Description of Artificial Sequence: Synthetic oligonucleotide
ucaacccaggugagaaccg

SEQ ID NO: 2545468 - RNA, 19 nt, Artificial Sequence
  Description of Artificial Sequence: Synthetic oligonucleotide
uggaaauugucauuuucua

SEQ ID NO: 2545469 - RNA, 19 nt, Artificial Sequence
  Description of Artificial Sequence: Synthetic oligonucleotide
gaaguuugaaauggucacc

SEQ ID NO: 2545470 - RNA, 19 nt, Artificial Sequence
  Description of Artificial Sequence: Synthetic oligonucleotide
gaagccgggcgcuagucag

SEQ ID NO: 2545471 - RNA, 19 nt, Artificial Sequence
  Description of Artificial Sequence: Synthetic oligonucleotide
gucauuuucuaaagccucg

SEQ ID NO: 2545472 - RNA, 19 nt, Artificial Sequence
  Description of Artificial Sequence: Synthetic oligonucleotide
acugugcaguaccuggcac

SEQ ID NO: 2545473 - RNA, 19 nt, Artificial Sequence
  Description of Artificial Sequence: Synthetic oligonucleotide
gauugauccgucgcugccg

SEQ ID NO: 2545474 - RNA, 19 nt, Artificial Sequence
  Description of Artificial Sequence: Synthetic oligonucleotide
uaaagccucgagcugucga

SEQ ID NO: 2545475 - RNA, 19 nt, Artificial Sequence
  Description of Artificial Sequence: Synthetic oligonucleotide
ugcaguaccuggcaccgca

SEQ ID NO: 2545476 - RNA, 19 nt, Artificial Sequence
  Description of Artificial Sequence: Synthetic oligonucleotide
acuuccucucucugaugcc

SEQ ID NO: 2545477 - RNA, 19 nt, Artificial Sequence
  Description of Artificial Sequence: Synthetic oligonucleotide
aaagccucgagcugucgau

SEQ ID NO: 2545478 - RNA, 19 nt, Artificial Sequence
  Description of Artificial Sequence: Synthetic oligonucleotide
ugucgauugauccgucgcu

SEQ ID NO: 2545479 - RNA, 19 nt, Artificial Sequence
  Description of Artificial Sequence: Synthetic oligonucleotide
ugggguaauuaaugguugc

SEQ ID NO: 2545480 - RNA, 19 nt, Artificial Sequence
  Description of Artificial Sequence: Synthetic oligonucleotide
ggcaccgcagcuuacacag

SEQ ID NO: 2545481 - RNA, 19 nt, Artificial Sequence
  Description of Artificial Sequence: Synthetic oligonucleotide
agaaccgggaggccgcugg

SEQ ID NO: 2545482 - RNA, 19 nt, Artificial Sequence
  Description of Artificial Sequence: Synthetic oligonucleotide
gucaccucgaguuuucuuc

SEQ ID NO: 2545483 - RNA, 19 nt, Artificial Sequence
  Description of Artificial Sequence: Synthetic oligonucleotide
aguuugaaauggucaccuc

SEQ ID NO: 2545484 - RNA, 19 nt, Artificial Sequence
  Description of Artificial Sequence: Synthetic oligonucleotide
augccagguuuacacaguc

SEQ ID NO: 2545485 - RNA, 19 nt, Artificial Sequence
  Description of Artificial Sequence: Synthetic oligonucleotide
uccacuucagacaccuggu

SEQ ID NO: 2545486 - RNA, 19 nt, Artificial Sequence
  Description of Artificial Sequence: Synthetic oligonucleotide
uuacacaguccacuucaga

SEQ ID NO: 2545487 - RNA, 19 nt, Artificial Sequence
  Description of Artificial Sequence: Synthetic oligonucleotide
cucuagcaaagccuggaag

SEQ ID NO: 2545488 - RNA, 19 nt, Artificial Sequence
  Description of Artificial Sequence: Synthetic oligonucleotide
ugucaaguaguuggggccc

SEQ ID NO: 2545489 - RNA, 19 nt, Artificial Sequence
  Description of Artificial Sequence: Synthetic oligonucleotide
gacaacuuugcugggugag

SEQ ID NO: 2545490 - RNA, 19 nt, Artificial Sequence
  Description of Artificial Sequence: Synthetic oligonucleotide
ggucugggguaauuaaugg

SEQ ID NO: 2545491 - RNA, 19 nt, Artificial Sequence
  Description of Artificial Sequence: Synthetic oligonucleotide
uucugccuccgaucgaucc

SEQ ID NO: 2545492 - RNA, 19 nt, Artificial Sequence
  Description of Artificial Sequence: Synthetic oligonucleotide
cauuuucuaaagccucgag

SEQ ID NO: 2545493 - RNA, 19 nt, Artificial Sequence
  Description of Artificial Sequence: Synthetic oligonucleotide
gucaacccaggugagaacc

SEQ ID NO: 2545494 - RNA, 19 nt, Artificial Sequence
  Description of Artificial Sequence: Synthetic oligonucleotide
uuugcugggugaguggaca

SEQ ID NO: 2545495 - RNA, 19 nt, Artificial Sequence
  Description of Artificial Sequence: Synthetic oligonucleotide
uccucucucuguccuuugg

SEQ ID NO: 2545496 - RNA, 19 nt, Artificial Sequence
  Description of Artificial Sequence: Synthetic oligonucleotide
ucugccuccgaucgauccc

SEQ ID NO: 2545497 - RNA, 19 nt, Artificial Sequence
  Description of Artificial Sequence: Synthetic oligonucleotide
gacgcuggggucgggaugg

SEQ ID NO: 2545498 - RNA, 19 nt, Artificial Sequence
  Description of Artificial Sequence: Synthetic oligonucleotide
uacacagguauauggggau

SEQ ID NO: 2545499 - RNA, 19 nt, Artificial Sequence
  Description of Artificial Sequence: Synthetic oligonucleotide
cacagguauauggggaugg

SEQ ID NO: 2545500 - RNA, 19 nt, Artificial Sequence
  Description of Artificial Sequence: Synthetic oligonucleotide
cugucgauugauccgucgc

SEQ ID NO: 2545501 - RNA, 19 nt, Artificial Sequence
  Description of Artificial Sequence: Synthetic oligonucleotide
gggauggaaagccacacac

SEQ ID NO: 2545502 - RNA, 19 nt, Artificial Sequence
  Description of Artificial Sequence: Synthetic oligonucleotide
ucauuuucuaaagccucga

SEQ ID NO: 2545503 - RNA, 19 nt, Artificial Sequence
  Description of Artificial Sequence: Synthetic oligonucleotide
cugggaacgaacggaagcc

SEQ ID NO: 2545504 - RNA, 19 nt, Artificial Sequence
  Description of Artificial Sequence: Synthetic oligonucleotide
cugugcaguaccuggcacc

SEQ ID NO: 2545505 - RNA, 19 nt, Artificial Sequence
  Description of Artificial Sequence: Synthetic oligonucleotide
ucgauugauccgucgcugc

SEQ ID NO: 2545506 - RNA, 19 nt, Artificial Sequence
  Description of Artificial Sequence: Synthetic oligonucleotide
uggacagcuccucucucug

SEQ ID NO: 2545507 - RNA, 19 nt, Artificial Sequence
  Description of Artificial Sequence: Synthetic oligonucleotide
gcuuacacagguauauggg

SEQ ID NO: 2545508 - RNA, 19 nt, Artificial Sequence
  Description of Artificial Sequence: Synthetic oligonucleotide
cuagccauggcugcgucag

SEQ ID NO: 2545509 - RNA, 19 nt, Artificial Sequence
  Description of Artificial Sequence: Synthetic oligonucleotide
ucucucugaugccagguuu

SEQ ID NO: 2545510 - RNA, 19 nt, Artificial Sequence
  Description of Artificial Sequence: Synthetic oligonucleotide
ugggaacgaacggaagccg

SEQ ID NO: 2545511 - RNA, 19 nt, Artificial Sequence
  Description of Artificial Sequence: Synthetic oligonucleotide
gauggucugggguaauuaa

SEQ ID NO: 2545512 - RNA, 19 nt, Artificial Sequence
  Description of Artificial Sequence: Synthetic oligonucleotide
uuaaugguugcagggacuu

SEQ ID NO: 2545513 - RNA, 19 nt, Artificial Sequence
  Description of Artificial Sequence: Synthetic oligonucleotide
ugagcgugccucuagccau

SEQ ID NO: 2545514 - RNA, 19 nt, Artificial Sequence
  Description of Artificial Sequence: Synthetic oligonucleotide
caggugagaaccgggaggc

SEQ ID NO: 2545515 - RNA, 19 nt, Artificial Sequence
  Description of Artificial Sequence: Synthetic oligonucleotide
ucaccucgaguuuucuucu

SEQ ID NO: 2545516 - RNA, 19 nt, Artificial Sequence
  Description of Artificial Sequence: Synthetic oligonucleotide
agcccugucaacccaggug

SEQ ID NO: 2545517 - RNA, 19 nt, Artificial Sequence
  Description of Artificial Sequence: Synthetic oligonucleotide
ggaagcgaaguuugaaaug

SEQ ID NO: 2545518 - RNA, 19 nt, Artificial Sequence
  Description of Artificial Sequence: Synthetic oligonucleotide
aaauggucaccucgaguuu

SEQ ID NO: 2545519 - RNA, 19 nt, Artificial Sequence
  Description of Artificial Sequence: Synthetic oligonucleotide
cauggcugcgucaggcccg

SEQ ID NO: 2545520 - RNA, 19 nt, Artificial Sequence
  Description of Artificial Sequence: Synthetic oligonucleotide
ucggaugcacucagguucu

SEQ ID NO: 2545521 - RNA, 19 nt, Artificial Sequence
  Description of Artificial Sequence: Synthetic oligonucleotide
agguauauggggauggaaa

SEQ ID NO: 2545522 - RNA, 19 nt, Artificial Sequence
  Description of Artificial Sequence: Synthetic oligonucleotide
gcugucaaguaguuggggc

SEQ ID NO: 2545523 - RNA, 19 nt, Artificial Sequence
  Description of Artificial Sequence: Synthetic oligonucleotide
aauggucaccucgaguuuu

SEQ ID NO: 2545524 - RNA, 19 nt, Artificial Sequence
  Description of Artificial Sequence: Synthetic oligonucleotide
aguaccuggcaccgcagcu

SEQ ID NO: 2545525 - RNA, 19 nt, Artificial Sequence
  Description of Artificial Sequence: Synthetic oligonucleotide
aguaguuggggcccucgga

SEQ ID NO: 2545526 - RNA, 19 nt, Artificial Sequence
  Description of Artificial Sequence: Synthetic oligonucleotide
cuccgaucgaucccggggc

SEQ ID NO: 2545527 - RNA, 19 nt, Artificial Sequence
  Description of Artificial Sequence: Synthetic oligonucleotide
ugaguggacagcuccucuc

SEQ ID NO: 2545528 - RNA, 19 nt, Artificial Sequence
  Description of Artificial Sequence: Synthetic oligonucleotide
ucuaaagccucgagcuguc

SEQ ID NO: 2545529 - RNA, 19 nt, Artificial Sequence
  Description of Artificial Sequence: Synthetic oligonucleotide
gucgcugccgggcugcccg

SEQ ID NO: 2545530 - RNA, 19 nt, Artificial Sequence
  Description of Artificial Sequence: Synthetic oligonucleotide
uuggggauggucuggggua

SEQ ID NO: 2545531 - RNA, 19 nt, Artificial Sequence
  Description of Artificial Sequence: Synthetic oligonucleotide
ucagacaccuggucuccug

SEQ ID NO: 2545532 - RNA, 19 nt, Artificial Sequence
  Description of Artificial Sequence: Synthetic oligonucleotide
agguucugcuccucuagca

SEQ ID NO: 2545533 - RNA, 19 nt, Artificial Sequence
  Description of Artificial Sequence: Synthetic oligonucleotide
uccugggaacgaacggaag

SEQ ID NO: 2545534 - RNA, 19 nt, Artificial Sequence
  Description of Artificial Sequence: Synthetic oligonucleotide
aacccaggugagaaccggg

SEQ ID NO: 2545535 - RNA, 19 nt, Artificial Sequence
  Description of Artificial Sequence: Synthetic oligonucleotide
uccucuagcaaagccugga

SEQ ID NO: 2545536 - RNA, 19 nt, Artificial Sequence
  Description of Artificial Sequence: Synthetic oligonucleotide
cagacaccuggucuccugg

SEQ ID NO: 2545537 - RNA, 19 nt, Artificial Sequence
  Description of Artificial Sequence: Synthetic oligonucleotide
caacuuugcugggugagug

SEQ ID NO: 2545538 - RNA, 19 nt, Artificial Sequence
  Description of Artificial Sequence: Synthetic oligonucleotide
ugauccgucgcugccgggc

SEQ ID NO: 2545539 - RNA, 19 nt, Artificial Sequence
  Description of Artificial Sequence: Synthetic oligonucleotide
cgaaguuugaaauggucac

SEQ ID NO: 2545540 - RNA, 19 nt, Artificial Sequence
  Description of Artificial Sequence: Synthetic oligonucleotide
uccuuuggggauggucugg

SEQ ID NO: 2545541 - RNA, 19 nt, Artificial Sequence
  Description of Artificial Sequence: Synthetic oligonucleotide
gaacgaacggaagccgggc

SEQ ID NO: 2545542 - RNA, 19 nt, Artificial Sequence
  Description of Artificial Sequence: Synthetic oligonucleotide
ugggugcccaggcagcgca

SEQ ID NO: 2545543 - RNA, 19 nt, Artificial Sequence
  Description of Artificial Sequence: Synthetic oligonucleotide
aaccgggaggccgcugggc

SEQ ID NO: 2545544 - RNA, 19 nt, Artificial Sequence
  Description of Artificial Sequence: Synthetic oligonucleotide
uugcugggugaguggacag

SEQ ID NO: 2545545 - RNA, 19 nt, Artificial Sequence
  Description of Artificial Sequence: Synthetic oligonucleotide
gccagguuuacacagucca

SEQ ID NO: 2545546 - RNA, 19 nt, Artificial Sequence
  Description of Artificial Sequence: Synthetic oligonucleotide
agguuuacacaguccacuu

SEQ ID NO: 2545547 - RNA, 19 nt, Artificial Sequence
  Description of Artificial Sequence: Synthetic oligonucleotide
agggacuuccucucucuga

SEQ ID NO: 2545548 - RNA, 19 nt, Artificial Sequence
  Description of Artificial Sequence: Synthetic oligonucleotide
uaguuggggcccucggaug

SEQ ID NO: 2545549 - RNA, 19 nt, Artificial Sequence
  Description of Artificial Sequence: Synthetic oligonucleotide
acuuugcugggugagugga

SEQ ID NO: 2545550 - RNA, 19 nt, Artificial Sequence
  Description of Artificial Sequence: Synthetic oligonucleotide
auccuggaaauugucauuu

SEQ ID NO: 2545551 - RNA, 19 nt, Artificial Sequence
  Description of Artificial Sequence: Synthetic oligonucleotide
uguccaggguccugggaac

SEQ ID NO: 2545552 - RNA, 19 nt, Artificial Sequence
  Description of Artificial Sequence: Synthetic oligonucleotide
gggacaacuuugcugggug

SEQ ID NO: 2545553 - RNA, 19 nt, Artificial Sequence
  Description of Artificial Sequence: Synthetic oligonucleotide
uggggauggaaagccacac

SEQ ID NO: 2545554 - RNA, 19 nt, Artificial Sequence
  Description of Artificial Sequence: Synthetic oligonucleotide
cagcgcacugugcaguacc

SEQ ID NO: 2545555 - RNA, 19 nt, Artificial Sequence
  Description of Artificial Sequence: Synthetic oligonucleotide
aggguccugggaacgaacg

SEQ ID NO: 2545556 - RNA, 19 nt, Artificial Sequence
  Description of Artificial Sequence: Synthetic oligonucleotide
caccuggucuccugguggg

SEQ ID NO: 2545557 - RNA, 19 nt, Artificial Sequence
  Description of Artificial Sequence: Synthetic oligonucleotide
ccugggaacgaacggaagc

SEQ ID NO: 2545558 - RNA, 19 nt, Artificial Sequence
  Description of Artificial Sequence: Synthetic oligonucleotide
uccuggugggugcccaggc

SEQ ID NO: 2545559 - RNA, 19 nt, Artificial Sequence
  Description of Artificial Sequence: Synthetic oligonucleotide
ugcagggacuuccucucuc

SEQ ID NO: 2545560 - RNA, 19 nt, Artificial Sequence
  Description of Artificial Sequence: Synthetic oligonucleotide
aacggaagccgggcgcuag

SEQ ID NO: 2545561 - RNA, 19 nt, Artificial Sequence
  Description of Artificial Sequence: Synthetic oligonucleotide
agccucgagcugucgauug

SEQ ID NO: 2545562 - RNA, 19 nt, Artificial Sequence
  Description of Artificial Sequence: Synthetic oligonucleotide
ugucaacccaggugagaac

SEQ ID NO: 2545563 - RNA, 19 nt, Artificial Sequence
  Description of Artificial Sequence: Synthetic oligonucleotide
gucgauugauccgucgcug

SEQ ID NO: 2545564 - RNA, 19 nt, Artificial Sequence
  Description of Artificial Sequence: Synthetic oligonucleotide
cuagucagccccgcugcgg

SEQ ID NO: 2545565 - RNA, 19 nt, Artificial Sequence
  Description of Artificial Sequence: Synthetic oligonucleotide
ggaacgaacggaagccggg

SEQ ID NO: 2545566 - RNA, 19 nt, Artificial Sequence
  Description of Artificial Sequence: Synthetic oligonucleotide
ggggucauccuggaaauug

SEQ ID NO: 2545567 - RNA, 19 nt, Artificial Sequence
  Description of Artificial Sequence: Synthetic oligonucleotide
ucucuguccuuuggggaug

SEQ ID NO: 2545568 - RNA, 19 nt, Artificial Sequence
  Description of Artificial Sequence: Synthetic oligonucleotide
cuccucuagcaaagccugg

SEQ ID NO: 2545569 - RNA, 19 nt, Artificial Sequence
  Description of Artificial Sequence: Synthetic oligonucleotide
agucagccccgcugcgggc

SEQ ID NO: 2545570 - RNA, 19 nt, Artificial Sequence
  Description of Artificial Sequence: Synthetic oligonucleotide
uccggaagcgaaguuugaa

SEQ ID NO: 2545571 - RNA, 19 nt, Artificial Sequence
  Description of Artificial Sequence: Synthetic oligonucleotide
cugccuccgaucgaucccg

SEQ ID NO: 2545572 - RNA, 19 nt, Artificial Sequence
  Description of Artificial Sequence: Synthetic oligonucleotide
uuccggaagcgaaguuuga

SEQ ID NO: 2545573 - RNA, 19 nt, Artificial Sequence
  Description of Artificial Sequence: Synthetic oligonucleotide
gcgaaguuugaaaugguca

SEQ ID NO: 2545574 - RNA, 19 nt, Artificial Sequence
  Description of Artificial Sequence: Synthetic oligonucleotide
ucucugaugccagguuuac

SEQ ID NO: 2545575 - RNA, 19 nt, Artificial Sequence
  Description of Artificial Sequence: Synthetic oligonucleotide
gaagggacgcuggggucgg

SEQ ID NO: 2545576 - RNA, 19 nt, Artificial Sequence
  Description of Artificial Sequence: Synthetic oligonucleotide
gaaccgggaggccgcuggg

SEQ ID NO: 2545577 - RNA, 19 nt, Artificial Sequence
  Description of Artificial Sequence: Synthetic oligonucleotide
uggcaccgcagcuuacaca

SEQ ID NO: 2545578 - RNA, 19 nt, Artificial Sequence
  Description of Artificial Sequence: Synthetic oligonucleotide
ccuggaaauugucauuuuc

SEQ ID NO: 2545579 - RNA, 19 nt, Artificial Sequence
  Description of Artificial Sequence: Synthetic oligonucleotide
gcugucgauugauccgucg

SEQ ID NO: 2545580 - RNA, 19 nt, Artificial Sequence
  Description of Artificial Sequence: Synthetic oligonucleotide
cugcgucaggcccggagcc

SEQ ID NO: 2545581 - RNA, 19 nt, Artificial Sequence
  Description of Artificial Sequence: Synthetic oligonucleotide
uuuccugugucugcaucau

SEQ ID NO: 2545582 - RNA, 19 nt, Artificial Sequence
  Description of Artificial Sequence: Synthetic oligonucleotide
gcccugucaacccagguga

SEQ ID NO: 2545583 - RNA, 19 nt, Artificial Sequence
  Description of Artificial Sequence: Synthetic oligonucleotide
caguaccuggcaccgcagc

SEQ ID NO: 2545584 - RNA, 19 nt, Artificial Sequence
  Description of Artificial Sequence: Synthetic oligonucleotide
aggcugucaaguaguuggg

SEQ ID NO: 2545585 - RNA, 19 nt, Artificial Sequence
  Description of Artificial Sequence: Synthetic oligonucleotide
uccgaucgaucccggggcu

SEQ ID NO: 2545586 - RNA, 19 nt, Artificial Sequence
  Description of Artificial Sequence: Synthetic oligonucleotide
ugcccgguccagcacccgc

SEQ ID NO: 2545587 - RNA, 19 nt, Artificial Sequence
  Description of Artificial Sequence: Synthetic oligonucleotide
cugagcgugccucuagcca

SEQ ID NO: 2545588 - RNA, 19 nt, Artificial Sequence
  Description of Artificial Sequence: Synthetic oligonucleotide
cuaaagccucgagcugucg

SEQ ID NO: 2545589 - RNA, 19 nt, Artificial Sequence
  Description of Artificial Sequence: Synthetic oligonucleotide
gggaacgaacggaagccgg

SEQ ID NO: 2545590 - RNA, 19 nt, Artificial Sequence
  Description of Artificial Sequence: Synthetic oligonucleotide
cgagcugucgauugauccg

SEQ ID NO: 2545591 - RNA, 19 nt, Artificial Sequence
  Description of Artificial Sequence: Synthetic oligonucleotide
cuguccaggguccugggaa

SEQ ID NO: 2545592 - RNA, 19 nt, Artificial Sequence
  Description of Artificial Sequence: Synthetic oligonucleotide
cgcacugugcaguaccugg

SEQ ID NO: 2545593 - RNA, 19 nt, Artificial Sequence
  Description of Artificial Sequence: Synthetic oligonucleotide
gugagaaccgggaggccgc

SEQ ID NO: 2545594 - RNA, 19 nt, Artificial Sequence
  Description of Artificial Sequence: Synthetic oligonucleotide
gguuuacacaguccacuuc

SEQ ID NO: 2545595 - RNA, 19 nt, Artificial Sequence
  Description of Artificial Sequence: Synthetic oligonucleotide
cugucaacccaggugagaa

SEQ ID NO: 2545596 - RNA, 19 nt, Artificial Sequence
  Description of Artificial Sequence: Synthetic oligonucleotide
ggguccugggaacgaacgg

SEQ ID NO: 2545597 - RNA, 19 nt, Artificial Sequence
  Description of Artificial Sequence: Synthetic oligonucleotide
cucgagcugucgauugauc

SEQ ID NO: 2545598 - RNA, 19 nt, Artificial Sequence
  Description of Artificial Sequence: Synthetic oligonucleotide
ccuccgaucgaucccgggg

SEQ ID NO: 2545599 - RNA, 19 nt, Artificial Sequence
  Description of Artificial Sequence: Synthetic oligonucleotide
auggucaccucgaguuuuc

SEQ ID NO: 2545600 - RNA, 19 nt, Artificial Sequence
  Description of Artificial Sequence: Synthetic oligonucleotide
accucgaguuuucuucuuu

SEQ ID NO: 2545601 - RNA, 19 nt, Artificial Sequence
  Description of Artificial Sequence: Synthetic oligonucleotide
gucugggguaauuaauggu

SEQ ID NO: 2545602 - RNA, 19 nt, Artificial Sequence
  Description of Artificial Sequence: Synthetic oligonucleotide
cagcacagaagggacgcug

SEQ ID NO: 2545603 - RNA, 19 nt, Artificial Sequence
  Description of Artificial Sequence: Synthetic oligonucleotide
cuuccucucucugaugcca

SEQ ID NO: 2545604 - RNA, 19 nt, Artificial Sequence
  Description of Artificial Sequence: Synthetic oligonucleotide
caggcagcgcacugugcag

SEQ ID NO: 2545605 - RNA, 19 nt, Artificial Sequence
  Description of Artificial Sequence: Synthetic oligonucleotide
auauggggauggaaagcca

SEQ ID NO: 2545606 - RNA, 19 nt, Artificial Sequence
  Description of Artificial Sequence: Synthetic oligonucleotide
gaguggacagcuccucucu

SEQ ID NO: 2545607 - RNA, 19 nt, Artificial Sequence
  Description of Artificial Sequence: Synthetic oligonucleotide
uugauccgucgcugccggg

SEQ ID NO: 2545608 - RNA, 19 nt, Artificial Sequence
  Description of Artificial Sequence: Synthetic oligonucleotide
ugcugcugcugcugcugcc

SEQ ID NO: 2545609 - RNA, 19 nt, Artificial Sequence
  Description of Artificial Sequence: Synthetic oligonucleotide
uuccugugucugcaucauc

SEQ ID NO: 2545610 - RNA, 19 nt, Artificial Sequence
  Description of Artificial Sequence: Synthetic oligonucleotide
auggucugggguaauuaau

SEQ ID NO: 2545611 - RNA, 19 nt, Artificial Sequence
  Description of Artificial Sequence: Synthetic oligonucleotide
aggugagaaccgggaggcc

SEQ ID NO: 2545612 - RNA, 19 nt, Artificial Sequence
  Description of Artificial Sequence: Synthetic oligonucleotide
cagaagggacgcugggguc

SEQ ID NO: 2545613 - RNA, 19 nt, Artificial Sequence
  Description of Artificial Sequence: Synthetic oligonucleotide
ugguugcagggacuuccuc

SEQ ID NO: 2545614 - RNA, 19 nt, Artificial Sequence
  Description of Artificial Sequence: Synthetic oligonucleotide
ugccuccgaucgaucccgg

SEQ ID NO: 2545615 - RNA, 19 nt, Artificial Sequence
  Description of Artificial Sequence: Synthetic oligonucleotide
cacuucagacaccuggucu

SEQ ID NO: 2545616 - RNA, 19 nt, Artificial Sequence
  Description of Artificial Sequence: Synthetic oligonucleotide
acagguauauggggaugga

SEQ ID NO: 2545617 - RNA, 19 nt, Artificial Sequence
  Description of Artificial Sequence: Synthetic oligonucleotide
cuguccuuuggggaugguc

SEQ ID NO: 2545618 - RNA, 19 nt, Artificial Sequence
  Description of Artificial Sequence: Synthetic oligonucleotide
caggguccugggaacgaac

SEQ ID NO: 2545619 - RNA, 19 nt, Artificial Sequence
  Description of Artificial Sequence: Synthetic oligonucleotide
ccucucucuguccuuuggg

SEQ ID NO: 2545620 - RNA, 19 nt, Artificial Sequence
  Description of Artificial Sequence: Synthetic oligonucleotide
cucuguccuuuggggaugg

SEQ ID NO: 2545621 - RNA, 19 nt, Artificial Sequence
  Description of Artificial Sequence: Synthetic oligonucleotide
guccaggguccugggaacg

SEQ ID NO: 2545622 - RNA, 19 nt, Artificial Sequence
  Description of Artificial Sequence: Synthetic oligonucleotide
cucucugaugccagguuua

SEQ ID NO: 2545623 - RNA, 19 nt, Artificial Sequence
  Description of Artificial Sequence: Synthetic oligonucleotide
cagcuuacacagguauaug

SEQ ID NO: 2545624 - RNA, 19 nt, Artificial Sequence
  Description of Artificial Sequence: Synthetic oligonucleotide
ggcugucaaguaguugggg

SEQ ID NO: 2545625 - RNA, 19 nt, Artificial Sequence
  Description of Artificial Sequence: Synthetic oligonucleotide
auggggauggaaagccaca

SEQ ID NO: 2545626 - RNA, 19 nt, Artificial Sequence
  Description of Artificial Sequence: Synthetic oligonucleotide
ggagccccggcuuuuccug

SEQ ID NO: 2545627 - RNA, 19 nt, Artificial Sequence
  Description of Artificial Sequence: Synthetic oligonucleotide
cugcugcugcugcugcugc

SEQ ID NO: 2545628 - RNA, 19 nt, Artificial Sequence
  Description of Artificial Sequence: Synthetic oligonucleotide
uaaugguugcagggacuuc

SEQ ID NO: 2545629 - RNA, 19 nt, Artificial Sequence
  Description of Artificial Sequence: Synthetic oligonucleotide
cagggacuuccucucucug

SEQ ID NO: 2545630 - RNA, 19 nt, Artificial Sequence
  Description of Artificial Sequence: Synthetic oligonucleotide
gcugcugcugcugcugccg

SEQ ID NO: 2545631 - RNA, 19 nt, Artificial Sequence
  Description of Artificial Sequence: Synthetic oligonucleotide
uccaggguccugggaacga

SEQ ID NO: 2545632 - RNA, 19 nt, Artificial Sequence
  Description of Artificial Sequence: Synthetic oligonucleotide
cagguuuacacaguccacu

SEQ ID NO: 2545633 - RNA, 19 nt, Artificial Sequence
  Description of Artificial Sequence: Synthetic oligonucleotide
uggggauggucugggguaa

SEQ ID NO: 2545634 - RNA, 19 nt, Artificial Sequence
  Description of Artificial Sequence: Synthetic oligonucleotide
uucagacaccuggucuccu

SEQ ID NO: 2545635 - RNA, 19 nt, Artificial Sequence
  Description of Artificial Sequence: Synthetic oligonucleotide
gagcugucgauugauccgu

SEQ ID NO: 2545636 - RNA, 19 nt, Artificial Sequence
  Description of Artificial Sequence: Synthetic oligonucleotide
ugcucccgguggcuucugc

SEQ ID NO: 2545637 - RNA, 19 nt, Artificial Sequence
  Description of Artificial Sequence: Synthetic oligonucleotide
ccagguuuacacaguccac

SEQ ID NO: 2545638 - RNA, 19 nt, Artificial Sequence
  Description of Artificial Sequence: Synthetic oligonucleotide
gcuagucagccccgcugcg

SEQ ID NO: 2545639 - RNA, 19 nt, Artificial Sequence
  Description of Artificial Sequence: Synthetic oligonucleotide
ugcugcugcugcugcugcu

SEQ ID NO: 2545640 - RNA, 19 nt, Artificial Sequence
  Description of Artificial Sequence: Synthetic oligonucleotide
ccugagcgugccucuagcc

SEQ ID NO: 2545641 - RNA, 19 nt, Artificial Sequence
  Description of Artificial Sequence: Synthetic oligonucleotide
gguccugggaacgaacgga

SEQ ID NO: 2545642 - RNA, 19 nt, Artificial Sequence
  Description of Artificial Sequence: Synthetic oligonucleotide
uccugcugcugcugcugcu

SEQ ID NO: 2545643 - RNA, 19 nt, Artificial Sequence
  Description of Artificial Sequence: Synthetic oligonucleotide
gaugccagguuuacacagu

SEQ ID NO: 2545644 - RNA, 19 nt, Artificial Sequence
  Description of Artificial Sequence: Synthetic oligonucleotide
ugcgucaggcccggagccc

SEQ ID NO: 2545645 - RNA, 19 nt, Artificial Sequence
  Description of Artificial Sequence: Synthetic oligonucleotide
ggauggaaagccacacaca

SEQ ID NO: 2545646 - RNA, 19 nt, Artificial Sequence
  Description of Artificial Sequence: Synthetic oligonucleotide
aagccucgagcugucgauu

SEQ ID NO: 2545647 - RNA, 19 nt, Artificial Sequence
  Description of Artificial Sequence: Synthetic oligonucleotide
agcgugccucuagccaugg

SEQ ID NO: 2545648 - RNA, 19 nt, Artificial Sequence
  Description of Artificial Sequence: Synthetic oligonucleotide
ccgggcgcuagucagcccc

SEQ ID NO: 2545649 - RNA, 19 nt, Artificial Sequence
  Description of Artificial Sequence: Synthetic oligonucleotide
acccaggugagaaccggga

SEQ ID NO: 2545650 - RNA, 19 nt, Artificial Sequence
  Description of Artificial Sequence: Synthetic oligonucleotide
ggcugcccgguccagcacc

SEQ ID NO: 2545651 - RNA, 19 nt, Artificial Sequence
  Description of Artificial Sequence: Synthetic oligonucleotide
ucaaguaguuggggcccuc

SEQ ID NO: 2545652 - RNA, 19 nt, Artificial Sequence
  Description of Artificial Sequence: Synthetic oligonucleotide
ggcugcgucaggcccggag

SEQ ID NO: 2545653 - RNA, 19 nt, Artificial Sequence
  Description of Artificial Sequence: Synthetic oligonucleotide
ugccgggcugcccggucca

SEQ ID NO: 2545654 - RNA, 19 nt, Artificial Sequence
  Description of Artificial Sequence: Synthetic oligonucleotide
cucucuguccuuuggggau

SEQ ID NO: 2545655 - RNA, 19 nt, Artificial Sequence
  Description of Artificial Sequence: Synthetic oligonucleotide
gagcgugccucuagccaug

SEQ ID NO: 2545656 - RNA, 19 nt, Artificial Sequence
  Description of Artificial Sequence: Synthetic oligonucleotide
augguugcagggacuuccu

SEQ ID NO: 2545657 - RNA, 19 nt, Artificial Sequence
  Description of Artificial Sequence: Synthetic oligonucleotide
agcugucgauugauccguc

SEQ ID NO: 2545658 - RNA, 19 nt, Artificial Sequence
  Description of Artificial Sequence: Synthetic oligonucleotide
aggcagcgcacugugcagu

SEQ ID NO: 2545659 - RNA, 19 nt, Artificial Sequence
  Description of Artificial Sequence: Synthetic oligonucleotide
ggacaacuuugcuggguga

SEQ ID NO: 2545660 - RNA, 19 nt, Artificial Sequence
  Description of Artificial Sequence: Synthetic oligonucleotide
gucagccccgcugcgggcc

SEQ ID NO: 2545661 - RNA, 19 nt, Artificial Sequence
  Description of Artificial Sequence: Synthetic oligonucleotide
ugagaaccgggaggccgcu

SEQ ID NO: 2545662 - RNA, 19 nt, Artificial Sequence
  Description of Artificial Sequence: Synthetic oligonucleotide
uggucaccucgaguuuucu

SEQ ID NO: 2545663 - RNA, 19 nt, Artificial Sequence
  Description of Artificial Sequence: Synthetic oligonucleotide
acggaagccgggcgcuagu

SEQ ID NO: 2545664 - RNA, 19 nt, Artificial Sequence
  Description of Artificial Sequence: Synthetic oligonucleotide
ggcccucggaugcacucag

SEQ ID NO: 2545665 - RNA, 19 nt, Artificial Sequence
  Description of Artificial Sequence: Synthetic oligonucleotide
gcgcuagucagccccgcug

SEQ ID NO: 2545666 - RNA, 19 nt, Artificial Sequence
  Description of Artificial Sequence: Synthetic oligonucleotide
agcgcacugugcaguaccu

SEQ ID NO: 2545667 - RNA, 19 nt, Artificial Sequence
  Description of Artificial Sequence: Synthetic oligonucleotide
guccugggaacgaacggaa

SEQ ID NO: 2545668 - RNA, 19 nt, Artificial Sequence
  Description of Artificial Sequence: Synthetic oligonucleotide
gcucccgguggcuucugcc

SEQ ID NO: 2545669 - RNA, 19 nt, Artificial Sequence
  Description of Artificial Sequence: Synthetic oligonucleotide
cccaggugagaaccgggag

SEQ ID NO: 2545670 - RNA, 19 nt, Artificial Sequence
  Description of Artificial Sequence: Synthetic oligonucleotide
acagcacagaagggacgcu

SEQ ID NO: 2545671 - RNA, 19 nt, Artificial Sequence
  Description of Artificial Sequence: Synthetic oligonucleotide
cagguauauggggauggaa

SEQ ID NO: 2545672 - RNA, 19 nt, Artificial Sequence
  Description of Artificial Sequence: Synthetic oligonucleotide
ccaggcagcgcacugugca

SEQ ID NO: 2545673 - RNA, 19 nt, Artificial Sequence
  Description of Artificial Sequence: Synthetic oligonucleotide
ggggauggaaagccacaca

SEQ ID NO: 2545674 - RNA, 19 nt, Artificial Sequence
  Description of Artificial Sequence: Synthetic oligonucleotide
caccgcagcuuacacaggu

SEQ ID NO: 2545675 - RNA, 19 nt, Artificial Sequence
  Description of Artificial Sequence: Synthetic oligonucleotide
gugaguggacagcuccucu

SEQ ID NO: 2545676 - RNA, 19 nt, Artificial Sequence
  Description of Artificial Sequence: Synthetic oligonucleotide
ggucauccuggaaauuguc

SEQ ID NO: 2545677 - RNA, 19 nt, Artificial Sequence
  Description of Artificial Sequence: Synthetic oligonucleotide
cgauugauccgucgcugcc

SEQ ID NO: 2545678 - RNA, 19 nt, Artificial Sequence
  Description of Artificial Sequence: Synthetic oligonucleotide
ugccgccugagcgugccuc

SEQ ID NO: 2545679 - RNA, 19 nt, Artificial Sequence
  Description of Artificial Sequence: Synthetic oligonucleotide
gcagcuuacacagguauau

SEQ ID NO: 2545680 - RNA, 19 nt, Artificial Sequence
  Description of Artificial Sequence: Synthetic oligonucleotide
ggacuuccucucucugaug

SEQ ID NO: 2545681 - RNA, 19 nt, Artificial Sequence
  Description of Artificial Sequence: Synthetic oligonucleotide
agcacccgccgcuguccag

SEQ ID NO: 2545682 - RNA, 19 nt, Artificial Sequence
  Description of Artificial Sequence: Synthetic oligonucleotide
gauccgucgcugccgggcu

SEQ ID NO: 2545683 - RNA, 19 nt, Artificial Sequence
  Description of Artificial Sequence: Synthetic oligonucleotide
caggugccgccugagcgug

SEQ ID NO: 2545684 - RNA, 19 nt, Artificial Sequence
  Description of Artificial Sequence: Synthetic oligonucleotide
ggacgcuggggucgggaug

SEQ ID NO: 2545685 - RNA, 19 nt, Artificial Sequence
  Description of Artificial Sequence: Synthetic oligonucleotide
gccugagcgugccucuagc

SEQ ID NO: 2545686 - RNA, 19 nt, Artificial Sequence
  Description of Artificial Sequence: Synthetic oligonucleotide
ggugaguggacagcuccuc

SEQ ID NO: 2545687 - RNA, 19 nt, Artificial Sequence
  Description of Artificial Sequence: Synthetic oligonucleotide
gcgguagccucuugcccag

SEQ ID NO: 2545688 - RNA, 19 nt, Artificial Sequence
  Description of Artificial Sequence: Synthetic oligonucleotide
ggaagccgggcgcuaguca

SEQ ID NO: 2545689 - RNA, 19 nt, Artificial Sequence
  Description of Artificial Sequence: Synthetic oligonucleotide
gccucuagccauggcugcg

SEQ ID NO: 2545690 - RNA, 19 nt, Artificial Sequence
  Description of Artificial Sequence: Synthetic oligonucleotide
auccgucgcugccgggcug

SEQ ID NO: 2545691 - RNA, 19 nt, Artificial Sequence
  Description of Artificial Sequence: Synthetic oligonucleotide
aucgaucccggggcuccag

SEQ ID NO: 2545692 - RNA, 19 nt, Artificial Sequence
  Description of Artificial Sequence: Synthetic oligonucleotide
gggacuuccucucucugau

SEQ ID NO: 2545693 - RNA, 19 nt, Artificial Sequence
  Description of Artificial Sequence: Synthetic oligonucleotide
cauccuggaaauugucauu

SEQ ID NO: 2545694 - RNA, 19 nt, Artificial Sequence
  Description of Artificial Sequence: Synthetic oligonucleotide
gcugcugcugcugcugcug

SEQ ID NO: 2545695 - RNA, 19 nt, Artificial Sequence
  Description of Artificial Sequence: Synthetic oligonucleotide
cgcuagucagccccgcugc

SEQ ID NO: 2545696 - RNA, 19 nt, Artificial Sequence
  Description of Artificial Sequence: Synthetic oligonucleotide
ccggaagcgaaguuugaaa

SEQ ID NO: 2545697 - RNA, 19 nt, Artificial Sequence
  Description of Artificial Sequence: Synthetic oligonucleotide
aagggacgcuggggucggg

SEQ ID NO: 2545698 - RNA, 19 nt, Artificial Sequence
  Description of Artificial Sequence: Synthetic oligonucleotide
gagaaccgggaggccgcug

SEQ ID NO: 2545699 - RNA, 19 nt, Artificial Sequence
  Description of Artificial Sequence: Synthetic oligonucleotide
agggacgcuggggucggga

SEQ ID NO: 2545700 - RNA, 19 nt, Artificial Sequence
  Description of Artificial Sequence: Synthetic oligonucleotide
gcccaggcagcgcacugug

SEQ ID NO: 2545701 - RNA, 19 nt, Artificial Sequence
  Description of Artificial Sequence: Synthetic oligonucleotide
ggauggucugggguaauua

SEQ ID NO: 2545702 - RNA, 19 nt, Artificial Sequence
  Description of Artificial Sequence: Synthetic oligonucleotide
ggugccgccugagcgugcc

SEQ ID NO: 2545703 - RNA, 19 nt, Artificial Sequence
  Description of Artificial Sequence: Synthetic oligonucleotide
gccuccgaucgaucccggg

SEQ ID NO: 2545704 - RNA, 19 nt, Artificial Sequence
  Description of Artificial Sequence: Synthetic oligonucleotide
cccgccgcuguccaggguc

SEQ ID NO: 2545705 - RNA, 19 nt, Artificial Sequence
  Description of Artificial Sequence: Synthetic oligonucleotide
gucuccuggugggugccca

SEQ ID NO: 2545706 - RNA, 19 nt, Artificial Sequence
  Description of Artificial Sequence: Synthetic oligonucleotide
ucuguccuuuggggauggu

SEQ ID NO: 2545707 - RNA, 19 nt, Artificial Sequence
  Description of Artificial Sequence: Synthetic oligonucleotide
cccugucaacccaggugag

SEQ ID NO: 2545708 - RNA, 19 nt, Artificial Sequence
  Description of Artificial Sequence: Synthetic oligonucleotide
gaucgaucccggggcucca

SEQ ID NO: 2545709 - RNA, 19 nt, Artificial Sequence
  Description of Artificial Sequence: Synthetic oligonucleotide
cccgguggcuucugccucc

SEQ ID NO: 2545710 - RNA, 19 nt, Artificial Sequence
  Description of Artificial Sequence: Synthetic oligonucleotide
ccugcugcugcugcugcug

SEQ ID NO: 2545711 - RNA, 19 nt, Artificial Sequence
  Description of Artificial Sequence: Synthetic oligonucleotide
cacucagguucugcuccuc

SEQ ID NO: 2545712 - RNA, 19 nt, Artificial Sequence
  Description of Artificial Sequence: Synthetic oligonucleotide
ccuggucuccuggugggug

SEQ ID NO: 2545713 - RNA, 19 nt, Artificial Sequence
  Description of Artificial Sequence: Synthetic oligonucleotide
cugcgggcccaggugccgc

SEQ ID NO: 2545714 - RNA, 19 nt, Artificial Sequence
  Description of Artificial Sequence: Synthetic oligonucleotide
ggggcccucggaugcacuc

SEQ ID NO: 2545715 - RNA, 19 nt, Artificial Sequence
  Description of Artificial Sequence: Synthetic oligonucleotide
aggugccgccugagcgugc

SEQ ID NO: 2545716 - RNA, 19 nt, Artificial Sequence
  Description of Artificial Sequence: Synthetic oligonucleotide
cgaucccggggcuccagcc

SEQ ID NO: 2545717 - RNA, 19 nt, Artificial Sequence
  Description of Artificial Sequence: Synthetic oligonucleotide
ccgcugcgggcccaggugc

SEQ ID NO: 2545718 - RNA, 19 nt, Artificial Sequence
  Description of Artificial Sequence: Synthetic oligonucleotide
cgaucgaucccggggcucc

SEQ ID NO: 2545719 - RNA, 19 nt, Artificial Sequence
  Description of Artificial Sequence: Synthetic oligonucleotide
gcagggacuuccucucucu

SEQ ID NO: 2545720 - RNA, 19 nt, Artificial Sequence
  Description of Artificial Sequence: Synthetic oligonucleotide
gugcaguaccuggcaccgc

SEQ ID NO: 2545721 - RNA, 19 nt, Artificial Sequence
  Description of Artificial Sequence: Synthetic oligonucleotide
accgcagcuuacacaggua

SEQ ID NO: 2545722 - RNA, 19 nt, Artificial Sequence
  Description of Artificial Sequence: Synthetic oligonucleotide
gcgucaggcccggagcccc

SEQ ID NO: 2545723 - RNA, 19 nt, Artificial Sequence
  Description of Artificial Sequence: Synthetic oligonucleotide
gggucauccuggaaauugu

SEQ ID NO: 2545724 - RNA, 19 nt, Artificial Sequence
  Description of Artificial Sequence: Synthetic oligonucleotide
gucaaguaguuggggcccu

SEQ ID NO: 2545725 - RNA, 19 nt, Artificial Sequence
  Description of Artificial Sequence: Synthetic oligonucleotide
gccucgagcugucgauuga

SEQ ID NO: 2545726 - RNA, 19 nt, Artificial Sequence
  Description of Artificial Sequence: Synthetic oligonucleotide
gcugcgggcccaggugccg

SEQ ID NO: 2545727 - RNA, 19 nt, Artificial Sequence
  Description of Artificial Sequence: Synthetic oligonucleotide
cggaagcgaaguuugaaau

SEQ ID NO: 2545728 - RNA, 19 nt, Artificial Sequence
  Description of Artificial Sequence: Synthetic oligonucleotide
cgugccucuagccauggcu

SEQ ID NO: 2545729 - RNA, 19 nt, Artificial Sequence
  Description of Artificial Sequence: Synthetic oligonucleotide
guaccuggcaccgcagcuu

SEQ ID NO: 2545730 - RNA, 19 nt, Artificial Sequence
  Description of Artificial Sequence: Synthetic oligonucleotide
cccgcugcgggcccaggug

SEQ ID NO: 2545731 - RNA, 19 nt, Artificial Sequence
  Description of Artificial Sequence: Synthetic oligonucleotide
gcugcccgguccagcaccc

SEQ ID NO: 2545732 - RNA, 19 nt, Artificial Sequence
  Description of Artificial Sequence: Synthetic oligonucleotide
cugcccgguccagcacccg

SEQ ID NO: 2545733 - RNA, 19 nt, Artificial Sequence
  Description of Artificial Sequence: Synthetic oligonucleotide
ccgccgcuguccagggucc

SEQ ID NO: 2545734 - RNA, 19 nt, Artificial Sequence
  Description of Artificial Sequence: Synthetic oligonucleotide
gaacggaagccgggcgcua

SEQ ID NO: 2545735 - RNA, 19 nt, Artificial Sequence
  Description of Artificial Sequence: Synthetic oligonucleotide
gcaccgcagcuuacacagg

SEQ ID NO: 2545736 - RNA, 19 nt, Artificial Sequence
  Description of Artificial Sequence: Synthetic oligonucleotide
ggcagcgcacugugcagua

SEQ ID NO: 2545737 - RNA, 19 nt, Artificial Sequence
  Description of Artificial Sequence: Synthetic oligonucleotide
ggcuucugccuccgaucga

SEQ ID NO: 2545738 - RNA, 19 nt, Artificial Sequence
  Description of Artificial Sequence: Synthetic oligonucleotide
cagcacccgccgcugucca

SEQ ID NO: 2545739 - RNA, 19 nt, Artificial Sequence
  Description of Artificial Sequence: Synthetic oligonucleotide
gcccgguccagcacccgcc

SEQ ID NO: 2545740 - RNA, 19 nt, Artificial Sequence
  Description of Artificial Sequence: Synthetic oligonucleotide
acgcuggggucgggauggg

SEQ ID NO: 2545741 - RNA, 19 nt, Artificial Sequence
  Description of Artificial Sequence: Synthetic oligonucleotide
gcgcacugugcaguaccug

SEQ ID NO: 2545742 - RNA, 19 nt, Artificial Sequence
  Description of Artificial Sequence: Synthetic oligonucleotide
ccugucaacccaggugaga

SEQ ID NO: 2545743 - RNA, 19 nt, Artificial Sequence
  Description of Artificial Sequence: Synthetic oligonucleotide
ggucaccucgaguuuucuu

SEQ ID NO: 2545744 - RNA, 19 nt, Artificial Sequence
  Description of Artificial Sequence: Synthetic oligonucleotide
acccgccgcuguccagggu

SEQ ID NO: 2545745 - RNA, 19 nt, Artificial Sequence
  Description of Artificial Sequence: Synthetic oligonucleotide
ccuggcaccgcagcuuaca

SEQ ID NO: 2545746 - RNA, 19 nt, Artificial Sequence
  Description of Artificial Sequence: Synthetic oligonucleotide
ggggacaacuuugcugggu

SEQ ID NO: 2545747 - RNA, 19 nt, Artificial Sequence
  Description of Artificial Sequence: Synthetic oligonucleotide
cccucggaugcacucaggu

SEQ ID NO: 2545748 - RNA, 19 nt, Artificial Sequence
  Description of Artificial Sequence: Synthetic oligonucleotide
ccggagccccggcuuuucc

SEQ ID NO: 2545749 - RNA, 19 nt, Artificial Sequence
  Description of Artificial Sequence: Synthetic oligonucleotide
gcccucggaugcacucagg

SEQ ID NO: 2545750 - RNA, 19 nt, Artificial Sequence
  Description of Artificial Sequence: Synthetic oligonucleotide
gcagcgcacugugcaguac

SEQ ID NO: 2545751 - RNA, 19 nt, Artificial Sequence
  Description of Artificial Sequence: Synthetic oligonucleotide
cgggcgcuagucagccccg

SEQ ID NO: 2545752 - RNA, 19 nt, Artificial Sequence
  Description of Artificial Sequence: Synthetic oligonucleotide
gcacucagguucugcuccu

SEQ ID NO: 2545753 - RNA, 19 nt, Artificial Sequence
  Description of Artificial Sequence: Synthetic oligonucleotide
ccgcagcuuacacagguau

SEQ ID NO: 2545754 - RNA, 19 nt, Artificial Sequence
  Description of Artificial Sequence: Synthetic oligonucleotide
gcgugccucuagccauggc

SEQ ID NO: 2545755 - RNA, 19 nt, Artificial Sequence
  Description of Artificial Sequence: Synthetic oligonucleotide
gggcccucggaugcacuca

SEQ ID NO: 2545756 - RNA, 19 nt, Artificial Sequence
  Description of Artificial Sequence: Synthetic oligonucleotide
agccccgcugcgggcccag

SEQ ID NO: 2545757 - RNA, 19 nt, Artificial Sequence
  Description of Artificial Sequence: Synthetic oligonucleotide
ccucgaguuuucuucuuuu

SEQ ID NO: 2545758 - RNA, 19 nt, Artificial Sequence
  Description of Artificial Sequence: Synthetic oligonucleotide
cgccugagcgugccucuag

SEQ ID NO: 2545759 - RNA, 19 nt, Artificial Sequence
  Description of Artificial Sequence: Synthetic oligonucleotide
caccucgaguuuucuucuu

SEQ ID NO: 2545760 - RNA, 19 nt, Artificial Sequence
  Description of Artificial Sequence: Synthetic oligonucleotide
cgucaggcccggagccccg

SEQ ID NO: 2545761 - RNA, 19 nt, Artificial Sequence
  Description of Artificial Sequence: Synthetic oligonucleotide
cgcagcuuacacagguaua

SEQ ID NO: 2545762 - RNA, 19 nt, Artificial Sequence
  Description of Artificial Sequence: Synthetic oligonucleotide
cugcucccgguggcuucug

SEQ ID NO: 2545763 - RNA, 19 nt, Artificial Sequence
  Description of Artificial Sequence: Synthetic oligonucleotide
gggcgcuagucagccccgc

SEQ ID NO: 2545764 - RNA, 19 nt, Artificial Sequence
  Description of Artificial Sequence: Synthetic oligonucleotide
gggacgcuggggucgggau

SEQ ID NO: 2545765 - RNA, 19 nt, Artificial Sequence
  Description of Artificial Sequence: Synthetic oligonucleotide
ggcgcuagucagccccgcu

SEQ ID NO: 2545766 - RNA, 19 nt, Artificial Sequence
  Description of Artificial Sequence: Synthetic oligonucleotide
gccgggcgcuagucagccc

SEQ ID NO: 2545767 - RNA, 19 nt, Artificial Sequence
  Description of Artificial Sequence: Synthetic oligonucleotide
ccgaucgaucccggggcuc

SEQ ID NO: 2545768 - RNA, 19 nt, Artificial Sequence
  Description of Artificial Sequence: Synthetic oligonucleotide
ggugcccaggcagcgcacu

SEQ ID NO: 2545769 - RNA, 19 nt, Artificial Sequence
  Description of Artificial Sequence: Synthetic oligonucleotide
cgggcugcccgguccagca

SEQ ID NO: 2545770 - RNA, 19 nt, Artificial Sequence
  Description of Artificial Sequence: Synthetic oligonucleotide
ccucggaugcacucagguu

SEQ ID NO: 2545771 - RNA, 19 nt, Artificial Sequence
  Description of Artificial Sequence: Synthetic oligonucleotide
gccgccugagcgugccucu

SEQ ID NO: 2545772 - RNA, 19 nt, Artificial Sequence
  Description of Artificial Sequence: Synthetic oligonucleotide
gggugcccaggcagcgcac

SEQ ID NO: 2545773 - RNA, 19 nt, Artificial Sequence
  Description of Artificial Sequence: Synthetic oligonucleotide
ccaggguccugggaacgaa

SEQ ID NO: 2545774 - RNA, 19 nt, Artificial Sequence
  Description of Artificial Sequence: Synthetic oligonucleotide
gcugcucccgguggcuucu

SEQ ID NO: 2545775 - RNA, 19 nt, Artificial Sequence
  Description of Artificial Sequence: Synthetic oligonucleotide
cggaagccgggcgcuaguc

SEQ ID NO: 2545776 - RNA, 19 nt, Artificial Sequence
  Description of Artificial Sequence: Synthetic oligonucleotide
gggauggucugggguaauu

SEQ ID NO: 2545777 - RNA, 19 nt, Artificial Sequence
  Description of Artificial Sequence: Synthetic oligonucleotide
cccggcuuuuccugcugcu

SEQ ID NO: 2545778 - RNA, 19 nt, Artificial Sequence
  Description of Artificial Sequence: Synthetic oligonucleotide
ccucgagcugucgauugau

SEQ ID NO: 2545779 - RNA, 19 nt, Artificial Sequence
  Description of Artificial Sequence: Synthetic oligonucleotide
cccggagccccggcuuuuc

SEQ ID NO: 2545780 - RNA, 19 nt, Artificial Sequence
  Description of Artificial Sequence: Synthetic oligonucleotide
gugccgccugagcgugccu

SEQ ID NO: 2545781 - RNA, 19 nt, Artificial Sequence
  Description of Artificial Sequence: Synthetic oligonucleotide
cgaacggaagccgggcgcu

SEQ ID NO: 2545782 - RNA, 19 nt, Artificial Sequence
  Description of Artificial Sequence: Synthetic oligonucleotide
cggaugcacucagguucug

SEQ ID NO: 2545783 - RNA, 19 nt, Artificial Sequence
  Description of Artificial Sequence: Synthetic oligonucleotide
cggagccccggcuuuuccu

SEQ ID NO: 2545784 - RNA, 19 nt, Artificial Sequence
  Description of Artificial Sequence: Synthetic oligonucleotide
cgucgcugccgggcugccc

SEQ ID NO: 2545785 - RNA, 19 nt, Artificial Sequence
  Description of Artificial Sequence: Synthetic oligonucleotide
ccgucgcugccgggcugcc

SEQ ID NO: 2545786 - RNA, 19 nt, Artificial Sequence
  Description of Artificial Sequence: Synthetic oligonucleotide
ccggggcuccagcccuguc

SEQ ID NO: 2545787 - RNA, 19 nt, Artificial Sequence
  Description of Artificial Sequence: Synthetic oligonucleotide
gccccgcugcgggcccagg

SEQ ID NO: 2545788 - RNA, 19 nt, Artificial Sequence
  Description of Artificial Sequence: Synthetic oligonucleotide
ggggauggucugggguaau

SEQ ID NO: 2545789 - RNA, 19 nt, Artificial Sequence
  Description of Artificial Sequence: Synthetic oligonucleotide
ccccgcugcgggcccaggu

SEQ ID NO: 2545790 - RNA, 19 nt, Artificial Sequence
  Description of Artificial Sequence: Synthetic oligonucleotide
ccgccugagcgugccucua

SEQ ID NO: 2545791 - RNA, 19 nt, Artificial Sequence
  Description of Artificial Sequence: Synthetic oligonucleotide
cgguggcuucugccuccga

SEQ ID NO: 2545792 - RNA, 19 nt, Artificial Sequence
  Description of Artificial Sequence: Synthetic oligonucleotide
ccgcugcucccgguggcuu

SEQ ID NO: 2545793 - RNA, 19 nt, Artificial Sequence
  Description of Artificial Sequence: Synthetic oligonucleotide
aaaucuuucaauuauagug

SEQ ID NO: 2545794 - RNA, 19 nt, Artificial Sequence
  Description of Artificial Sequence: Synthetic oligonucleotide
aauacaagaccauaaaccu

SEQ ID NO: 2545795 - RNA, 19 nt, Artificial Sequence
  Description of Artificial Sequence: Synthetic oligonucleotide
aauuuguacaauuuggcgu

SEQ ID NO: 2545796 - RNA, 19 nt, Artificial Sequence
  Description of Artificial Sequence: Synthetic oligonucleotide
aaauguuuaugacugagcu

SEQ ID NO: 2545797 - RNA, 19 nt, Artificial Sequence
  Description of Artificial Sequence: Synthetic oligonucleotide
caauacaagaccauaaacc

SEQ ID NO: 2545798 - RNA, 19 nt, Artificial Sequence
  Description of Artificial Sequence: Synthetic oligonucleotide
uaaaguacccacuugcacg

SEQ ID NO: 2545799 - RNA, 19 nt, Artificial Sequence
  Description of Artificial Sequence: Synthetic oligonucleotide
aaaguacccacuugcacgc

SEQ ID NO: 2545800 - RNA, 19 nt, Artificial Sequence
  Description of Artificial Sequence: Synthetic oligonucleotide
ucaauuauaguguugccag

SEQ ID NO: 2545801 - RNA, 19 nt, Artificial Sequence
  Description of Artificial Sequence: Synthetic oligonucleotide
aaacuguacaaugugaggg

SEQ ID NO: 2545802 - RNA, 19 nt, Artificial Sequence
  Description of Artificial Sequence: Synthetic oligonucleotide
aagacaaacauacuuguca

SEQ ID NO: 2545803 - RNA, 19 nt, Artificial Sequence
  Description of Artificial Sequence: Synthetic oligonucleotide
gaaguugguauacaggugg

SEQ ID NO: 2545804 - RNA, 19 nt, Artificial Sequence
  Description of Artificial Sequence: Synthetic oligonucleotide
ucgaauuuguacaauuugg

SEQ ID NO: 2545805 - RNA, 19 nt, Artificial Sequence
  Description of Artificial Sequence: Synthetic oligonucleotide
uacaauuuggcguucagcc

SEQ ID NO: 2545806 - RNA, 19 nt, Artificial Sequence
  Description of Artificial Sequence: Synthetic oligonucleotide
gaauuuguacaauuuggcg

SEQ ID NO: 2545807 - RNA, 19 nt, Artificial Sequence
  Description of Artificial Sequence: Synthetic oligonucleotide
auuucuauaaagcaacacu

SEQ ID NO: 2545808 - RNA, 19 nt, Artificial Sequence
  Description of Artificial Sequence: Synthetic oligonucleotide
ucuauaaagcaacacuccc

SEQ ID NO: 2545809 - RNA, 19 nt, Artificial Sequence
  Description of Artificial Sequence: Synthetic oligonucleotide
aaaauguuuaugacugagc

SEQ ID NO: 2545810 - RNA, 19 nt, Artificial Sequence
  Description of Artificial Sequence: Synthetic oligonucleotide
uaugaccuaauccugcuag

SEQ ID NO: 2545811 - RNA, 19 nt, Artificial Sequence
  Description of Artificial Sequence: Synthetic oligonucleotide
aauguuuaugacugagcuc

SEQ ID NO: 2545812 - RNA, 19 nt, Artificial Sequence
  Description of Artificial Sequence: Synthetic oligonucleotide
ugacugagcucacaaaugg

SEQ ID NO: 2545813 - RNA, 19 nt, Artificial Sequence
  Description of Artificial Sequence: Synthetic oligonucleotide
ugucacauuucuauaaagc

SEQ ID NO: 2545814 - RNA, 19 nt, Artificial Sequence
  Description of Artificial Sequence: Synthetic oligonucleotide
uuauucuaccccauucugg

SEQ ID NO: 2545815 - RNA, 19 nt, Artificial Sequence
  Description of Artificial Sequence: Synthetic oligonucleotide
uaaagcaacacucccauau

SEQ ID NO: 2545816 - RNA, 19 nt, Artificial Sequence
  Description of Artificial Sequence: Synthetic oligonucleotide
uguucugaaagugaccacg

SEQ ID NO: 2545817 - RNA, 19 nt, Artificial Sequence
  Description of Artificial Sequence: Synthetic oligonucleotide
uucuauaaagcaacacucc

SEQ ID NO: 2545818 - RNA, 19 nt, Artificial Sequence
  Description of Artificial Sequence: Synthetic oligonucleotide
uggcaugcuacaaagcagg

SEQ ID NO: 2545819 - RNA, 19 nt, Artificial Sequence
  Description of Artificial Sequence: Synthetic oligonucleotide
uauucuaccccauucuggc

SEQ ID NO: 2545820 - RNA, 19 nt, Artificial Sequence
  Description of Artificial Sequence: Synthetic oligonucleotide
auguuuaugacugagcuca

SEQ ID NO: 2545821 - RNA, 19 nt, Artificial Sequence
  Description of Artificial Sequence: Synthetic oligonucleotide
ucccauaugaccuaauccu

SEQ ID NO: 2545822 - RNA, 19 nt, Artificial Sequence
  Description of Artificial Sequence: Synthetic oligonucleotide
cacauuucuauaaagcaac

SEQ ID NO: 2545823 - RNA, 19 nt, Artificial Sequence
  Description of Artificial Sequence: Synthetic oligonucleotide
ucuuguuagcuuuugacaa

SEQ ID NO: 2545824 - RNA, 19 nt, Artificial Sequence
  Description of Artificial Sequence: Synthetic oligonucleotide
acgguugucgaauuuguac

SEQ ID NO: 2545825 - RNA, 19 nt, Artificial Sequence
  Description of Artificial Sequence: Synthetic oligonucleotide
uauaaagcaacacucccau

SEQ ID NO: 2545826 - RNA, 19 nt, Artificial Sequence
  Description of Artificial Sequence: Synthetic oligonucleotide
acauauauauauuccccag

SEQ ID NO: 2545827 - RNA, 19 nt, Artificial Sequence
  Description of Artificial Sequence: Synthetic oligonucleotide
auauauauuccccagcuua

SEQ ID NO: 2545828 - RNA, 19 nt, Artificial Sequence
  Description of Artificial Sequence: Synthetic oligonucleotide
acuaaucaguucaugaaac

SEQ ID NO: 2545829 - RNA, 19 nt, Artificial Sequence
  Description of Artificial Sequence: Synthetic oligonucleotide
auccugacuauucuggcac

SEQ ID NO: 2545830 - RNA, 19 nt, Artificial Sequence
  Description of Artificial Sequence: Synthetic oligonucleotide
uggccuaugaugauggucu

SEQ ID NO: 2545831 - RNA, 19 nt, Artificial Sequence
  Description of Artificial Sequence: Synthetic oligonucleotide
uaugcagauuaucuguccc

SEQ ID NO: 2545832 - RNA, 19 nt, Artificial Sequence
  Description of Artificial Sequence: Synthetic oligonucleotide
acaaugugagggcaguugg

SEQ ID NO: 2545833 - RNA, 19 nt, Artificial Sequence
  Description of Artificial Sequence: Synthetic oligonucleotide
aauuauaguguugccagcu

SEQ ID NO: 2545834 - RNA, 19 nt, Artificial Sequence
  Description of Artificial Sequence: Synthetic oligonucleotide
ugagcucacaaauggauga

SEQ ID NO: 2545835 - RNA, 19 nt, Artificial Sequence
  Description of Artificial Sequence: Synthetic oligonucleotide
cuaggcuuacugaaguugg

SEQ ID NO: 2545836 - RNA, 19 nt, Artificial Sequence
  Description of Artificial Sequence: Synthetic oligonucleotide
cuaccauaauucaugguag

SEQ ID NO: 2545837 - RNA, 19 nt, Artificial Sequence
  Description of Artificial Sequence: Synthetic oligonucleotide
uucaauuauaguguugcca

SEQ ID NO: 2545838 - RNA, 19 nt, Artificial Sequence
  Description of Artificial Sequence: Synthetic oligonucleotide
uauaguguugccagcuacc

SEQ ID NO: 2545839 - RNA, 19 nt, Artificial Sequence
  Description of Artificial Sequence: Synthetic oligonucleotide
uaauuuucauagagaaucu

SEQ ID NO: 2545840 - RNA, 19 nt, Artificial Sequence
  Description of Artificial Sequence: Synthetic oligonucleotide
agcuuauucuaccccauuc

SEQ ID NO: 2545841 - RNA, 19 nt, Artificial Sequence
  Description of Artificial Sequence: Synthetic oligonucleotide
augcagauuaucugucccc

SEQ ID NO: 2545842 - RNA, 19 nt, Artificial Sequence
  Description of Artificial Sequence: Synthetic oligonucleotide
ugucuuguuagcuuuugac

SEQ ID NO: 2545843 - RNA, 19 nt, Artificial Sequence
  Description of Artificial Sequence: Synthetic oligonucleotide
aacucuguguucugaaagu

SEQ ID NO: 2545844 - RNA, 19 nt, Artificial Sequence
  Description of Artificial Sequence: Synthetic oligonucleotide
aaagcaacacucccauaug

SEQ ID NO: 2545845 - RNA, 19 nt, Artificial Sequence
  Description of Artificial Sequence: Synthetic oligonucleotide
caaacuguacaaugugagg

SEQ ID NO: 2545846 - RNA, 19 nt, Artificial Sequence
  Description of Artificial Sequence: Synthetic oligonucleotide
ucuggcacuuuuagcauag

SEQ ID NO: 2545847 - RNA, 19 nt, Artificial Sequence
  Description of Artificial Sequence: Synthetic oligonucleotide
uugucacauuucuauaaag

SEQ ID NO: 2545848 - RNA, 19 nt, Artificial Sequence
  Description of Artificial Sequence: Synthetic oligonucleotide
aaagacaaacauacuuguc

SEQ ID NO: 2545849 - RNA, 19 nt, Artificial Sequence
  Description of Artificial Sequence: Synthetic oligonucleotide
auuuguacaauuuggcguu

SEQ ID NO: 2545850 - RNA, 19 nt, Artificial Sequence
  Description of Artificial Sequence: Synthetic oligonucleotide
aguggagccaaacuguaca

SEQ ID NO: 2545851 - RNA, 19 nt, Artificial Sequence
  Description of Artificial Sequence: Synthetic oligonucleotide
uaccauaauucaugguagg

SEQ ID NO: 2545852 - RNA, 19 nt, Artificial Sequence
  Description of Artificial Sequence: Synthetic oligonucleotide
cucguuuucaucucccaag

SEQ ID NO: 2545853 - RNA, 19 nt, Artificial Sequence
  Description of Artificial Sequence: Synthetic oligonucleotide
aagcaacacucccauauga

SEQ ID NO: 2545854 - RNA, 19 nt, Artificial Sequence
  Description of Artificial Sequence: Synthetic oligonucleotide
cuggucuuugucuuguuag

SEQ ID NO: 2545855 - RNA, 19 nt, Artificial Sequence
  Description of Artificial Sequence: Synthetic oligonucleotide
uuggcguucagccuaucug

SEQ ID NO: 2545856 - RNA, 19 nt, Artificial Sequence
  Description of Artificial Sequence: Synthetic oligonucleotide
gucgaauuuguacaauuug

SEQ ID NO: 2545857 - RNA, 19 nt, Artificial Sequence
  Description of Artificial Sequence: Synthetic oligonucleotide
ucaugaaacucuguguucu

SEQ ID NO: 2545858 - RNA, 19 nt, Artificial Sequence
  Description of Artificial Sequence: Synthetic oligonucleotide
guuagcuuuugacaaaauc

SEQ ID NO: 2545859 - RNA, 19 nt, Artificial Sequence
  Description of Artificial Sequence: Synthetic oligonucleotide
ugcacgcucguuuucaucu

SEQ ID NO: 2545860 - RNA, 19 nt, Artificial Sequence
  Description of Artificial Sequence: Synthetic oligonucleotide
gucucugcauaccucauag

SEQ ID NO: 2545861 - RNA, 19 nt, Artificial Sequence
  Description of Artificial Sequence: Synthetic oligonucleotide
ucuucucccacugccaggg

SEQ ID NO: 2545862 - RNA, 19 nt, Artificial Sequence
  Description of Artificial Sequence: Synthetic oligonucleotide
cucccauaugaccuaaucc

SEQ ID NO: 2545863 - RNA, 19 nt, Artificial Sequence
  Description of Artificial Sequence: Synthetic oligonucleotide
uguacaauuuggcguucag

SEQ ID NO: 2545864 - RNA, 19 nt, Artificial Sequence
  Description of Artificial Sequence: Synthetic oligonucleotide
ucucccacugccaggggcg

SEQ ID NO: 2545865 - RNA, 19 nt, Artificial Sequence
  Description of Artificial Sequence: Synthetic oligonucleotide
acucccauaugaccuaauc

SEQ ID NO: 2545866 - RNA, 19 nt, Artificial Sequence
  Description of Artificial Sequence: Synthetic oligonucleotide
accucauagccgcaauggc

SEQ ID NO: 2545867 - RNA, 19 nt, Artificial Sequence
  Description of Artificial Sequence: Synthetic oligonucleotide
cuuauucuaccccauucug

SEQ ID NO: 2545868 - RNA, 19 nt, Artificial Sequence
  Description of Artificial Sequence: Synthetic oligonucleotide
aaguugguauacagguggc

SEQ ID NO: 2545869 - RNA, 19 nt, Artificial Sequence
  Description of Artificial Sequence: Synthetic oligonucleotide
aaggaaggggucaucagug

SEQ ID NO: 2545870 - RNA, 19 nt, Artificial Sequence
  Description of Artificial Sequence: Synthetic oligonucleotide
cuuacugaaguugguauac

SEQ ID NO: 2545871 - RNA, 19 nt, Artificial Sequence
  Description of Artificial Sequence: Synthetic oligonucleotide
cuaaaguacccacuugcac

SEQ ID NO: 2545872 - RNA, 19 nt, Artificial Sequence
  Description of Artificial Sequence: Synthetic oligonucleotide
acuugucacauuucuauaa

SEQ ID NO: 2545873 - RNA, 19 nt, Artificial Sequence
  Description of Artificial Sequence: Synthetic oligonucleotide
uagcauagacuucaccaca

SEQ ID NO: 2545874 - RNA, 19 nt, Artificial Sequence
  Description of Artificial Sequence: Synthetic oligonucleotide
ugcagcuuauucuacccca

SEQ ID NO: 2545875 - RNA, 19 nt, Artificial Sequence
  Description of Artificial Sequence: Synthetic oligonucleotide
aguguugccagcuaccaua

SEQ ID NO: 2545876 - RNA, 19 nt, Artificial Sequence
  Description of Artificial Sequence: Synthetic oligonucleotide
uggcguucagccuaucugc

SEQ ID NO: 2545877 - RNA, 19 nt, Artificial Sequence
  Description of Artificial Sequence: Synthetic oligonucleotide
accauaauucaugguaggg

SEQ ID NO: 2545878 - RNA, 19 nt, Artificial Sequence
  Description of Artificial Sequence: Synthetic oligonucleotide
gauuaucuguccccugcag

SEQ ID NO: 2545879 - RNA, 19 nt, Artificial Sequence
  Description of Artificial Sequence: Synthetic oligonucleotide
ugacaaaaucuuucaauua

SEQ ID NO: 2545880 - RNA, 19 nt, Artificial Sequence
  Description of Artificial Sequence: Synthetic oligonucleotide
acaaacauacuugucacau

SEQ ID NO: 2545881 - RNA, 19 nt, Artificial Sequence
  Description of Artificial Sequence: Synthetic oligonucleotide
acacuaaucaguucaugaa

SEQ ID NO: 2545882 - RNA, 19 nt, Artificial Sequence
  Description of Artificial Sequence: Synthetic oligonucleotide
cagauuaucuguccccugc

SEQ ID NO: 2545883 - RNA, 19 nt, Artificial Sequence
  Description of Artificial Sequence: Synthetic oligonucleotide
cuguggccuaugaugaugg

SEQ ID NO: 2545884 - RNA, 19 nt, Artificial Sequence
  Description of Artificial Sequence: Synthetic oligonucleotide
gauggucuucucaucacag

SEQ ID NO: 2545885 - RNA, 19 nt, Artificial Sequence
  Description of Artificial Sequence: Synthetic oligonucleotide
agaccauaaaccugaugug

SEQ ID NO: 2545886 - RNA, 19 nt, Artificial Sequence
  Description of Artificial Sequence: Synthetic oligonucleotide
ggcuaaaguacccacuugc

SEQ ID NO: 2545887 - RNA, 19 nt, Artificial Sequence
  Description of Artificial Sequence: Synthetic oligonucleotide
ugauguguaugcagacacc

SEQ ID NO: 2545888 - RNA, 19 nt, Artificial Sequence
  Description of Artificial Sequence: Synthetic oligonucleotide
cacacuaaucaguucauga

SEQ ID NO: 2545889 - RNA, 19 nt, Artificial Sequence
  Description of Artificial Sequence: Synthetic oligonucleotide
uuccuuccagggaaggaag

SEQ ID NO: 2545890 - RNA, 19 nt, Artificial Sequence
  Description of Artificial Sequence: Synthetic oligonucleotide
ugucgaauuuguacaauuu

SEQ ID NO: 2545891 - RNA, 19 nt, Artificial Sequence
  Description of Artificial Sequence: Synthetic oligonucleotide
auuuucauagagaaucuaa

SEQ ID NO: 2545892 - RNA, 19 nt, Artificial Sequence
  Description of Artificial Sequence: Synthetic oligonucleotide
aaagcaggagucauccuga

SEQ ID NO: 2545893 - RNA, 19 nt, Artificial Sequence
  Description of Artificial Sequence: Synthetic oligonucleotide
agccaaacuguacaaugug

SEQ ID NO: 2545894 - RNA, 19 nt, Artificial Sequence
  Description of Artificial Sequence: Synthetic oligonucleotide
ucauccugacuauucuggc

SEQ ID NO: 2545895 - RNA, 19 nt, Artificial Sequence
  Description of Artificial Sequence: Synthetic oligonucleotide
accaauacaagaccauaaa

SEQ ID NO: 2545896 - RNA, 19 nt, Artificial Sequence
  Description of Artificial Sequence: Synthetic oligonucleotide
agcucacaaauggaugacc

SEQ ID NO: 2545897 - RNA, 19 nt, Artificial Sequence
  Description of Artificial Sequence: Synthetic oligonucleotide
augaccuaauccugcuagg

SEQ ID NO: 2545898 - RNA, 19 nt, Artificial Sequence
  Description of Artificial Sequence: Synthetic oligonucleotide
accauaaaccugauguguc

SEQ ID NO: 2545899 - RNA, 19 nt, Artificial Sequence
  Description of Artificial Sequence: Synthetic oligonucleotide
uucuaccccauucuggcau

SEQ ID NO: 2545900 - RNA, 19 nt, Artificial Sequence
  Description of Artificial Sequence: Synthetic oligonucleotide
uuccagggaaggaaggggu

SEQ ID NO: 2545901 - RNA, 19 nt, Artificial Sequence
  Description of Artificial Sequence: Synthetic oligonucleotide
agggcaguuggccuugauc

SEQ ID NO: 2545902 - RNA, 19 nt, Artificial Sequence
  Description of Artificial Sequence: Synthetic oligonucleotide
uggcacuuuuagcauagac

SEQ ID NO: 2545903 - RNA, 19 nt, Artificial Sequence
  Description of Artificial Sequence: Synthetic oligonucleotide
auaaaccugaugugucucu

SEQ ID NO: 2545904 - RNA, 19 nt, Artificial Sequence
  Description of Artificial Sequence: Synthetic oligonucleotide
caauuauaguguugccagc

SEQ ID NO: 2545905 - RNA, 19 nt, Artificial Sequence
  Description of Artificial Sequence: Synthetic oligonucleotide
cugaaguugguauacaggu

SEQ ID NO: 2545906 - RNA, 19 nt, Artificial Sequence
  Description of Artificial Sequence: Synthetic oligonucleotide
uggcaggcuaugcagauua

SEQ ID NO: 2545907 - RNA, 19 nt, Artificial Sequence
  Description of Artificial Sequence: Synthetic oligonucleotide
agcauagacuucaccacac

SEQ ID NO: 2545908 - RNA, 19 nt, Artificial Sequence
  Description of Artificial Sequence: Synthetic oligonucleotide
guucugaaagugaccacgg

SEQ ID NO: 2545909 - RNA, 19 nt, Artificial Sequence
  Description of Artificial Sequence: Synthetic oligonucleotide
agucauccugacuauucug

SEQ ID NO: 2545910 - RNA, 19 nt, Artificial Sequence
  Description of Artificial Sequence: Synthetic oligonucleotide
cauuucuauaaagcaacac

SEQ ID NO: 2545911 - RNA, 19 nt, Artificial Sequence
  Description of Artificial Sequence: Synthetic oligonucleotide
acaauuuggcguucagccu

SEQ ID NO: 2545912 - RNA, 19 nt, Artificial Sequence
  Description of Artificial Sequence: Synthetic oligonucleotide
uuuggcguucagccuaucu

SEQ ID NO: 2545913 - RNA, 19 nt, Artificial Sequence
  Description of Artificial Sequence: Synthetic oligonucleotide
ucaugguagggauuguaua

SEQ ID NO: 2545914 - RNA, 19 nt, Artificial Sequence
  Description of Artificial Sequence: Synthetic oligonucleotide
ugaccuaauccugcuaggc

SEQ ID NO: 2545915 - RNA, 19 nt, Artificial Sequence
  Description of Artificial Sequence: Synthetic oligonucleotide
agcaacacucccauaugac

SEQ ID NO: 2545916 - RNA, 19 nt, Artificial Sequence
  Description of Artificial Sequence: Synthetic oligonucleotide
gcuaccauaauucauggua

SEQ ID NO: 2545917 - RNA, 19 nt, Artificial Sequence
  Description of Artificial Sequence: Synthetic oligonucleotide
caccacacuaaucaguuca

SEQ ID NO: 2545918 - RNA, 19 nt, Artificial Sequence
  Description of Artificial Sequence: Synthetic oligonucleotide
uugucgaauuuguacaauu

SEQ ID NO: 2545919 - RNA, 19 nt, Artificial Sequence
  Description of Artificial Sequence: Synthetic oligonucleotide
ucugauguguaugcagaca

SEQ ID NO: 2545920 - RNA, 19 nt, Artificial Sequence
  Description of Artificial Sequence: Synthetic oligonucleotide
uagggauuguauauacaua

SEQ ID NO: 2545921 - RNA, 19 nt, Artificial Sequence
  Description of Artificial Sequence: Synthetic oligonucleotide
aggaaggggucaucagugg

SEQ ID NO: 2545922 - RNA, 19 nt, Artificial Sequence
  Description of Artificial Sequence: Synthetic oligonucleotide
guagggauuguauauacau

SEQ ID NO: 2545923 - RNA, 19 nt, Artificial Sequence
  Description of Artificial Sequence: Synthetic oligonucleotide
aguacccacuugcacgcuc

SEQ ID NO: 2545924 - RNA, 19 nt, Artificial Sequence
  Description of Artificial Sequence: Synthetic oligonucleotide
uuaugacugagcucacaaa

SEQ ID NO: 2545925 - RNA, 19 nt, Artificial Sequence
  Description of Artificial Sequence: Synthetic oligonucleotide
uccugcuaggcuuacugaa

SEQ ID NO: 2545926 - RNA, 19 nt, Artificial Sequence
  Description of Artificial Sequence: Synthetic oligonucleotide
accuaauccugcuaggcuu

SEQ ID NO: 2545927 - RNA, 19 nt, Artificial Sequence
  Description of Artificial Sequence: Synthetic oligonucleotide
uuguuagcuuuugacaaaa

SEQ ID NO: 2545928 - RNA, 19 nt, Artificial Sequence
  Description of Artificial Sequence: Synthetic oligonucleotide
uaaaccugaugugucucug

SEQ ID NO: 2545929 - RNA, 19 nt, Artificial Sequence
  Description of Artificial Sequence: Synthetic oligonucleotide
auagacuucaccacacuaa

SEQ ID NO: 2545930 - RNA, 19 nt, Artificial Sequence
  Description of Artificial Sequence: Synthetic oligonucleotide
ugacuauucuggcacuuuu

SEQ ID NO: 2545931 - RNA, 19 nt, Artificial Sequence
  Description of Artificial Sequence: Synthetic oligonucleotide
cgaauuuguacaauuuggc

SEQ ID NO: 2545932 - RNA, 19 nt, Artificial Sequence
  Description of Artificial Sequence: Synthetic oligonucleotide
ugaugugucucugcauacc

SEQ ID NO: 2545933 - RNA, 19 nt, Artificial Sequence
  Description of Artificial Sequence: Synthetic oligonucleotide
auaccucauagccgcaaug

SEQ ID NO: 2545934 - RNA, 19 nt, Artificial Sequence
  Description of Artificial Sequence: Synthetic oligonucleotide
agauuaucuguccccugca

SEQ ID NO: 2545935 - RNA, 19 nt, Artificial Sequence
  Description of Artificial Sequence: Synthetic oligonucleotide
auacaagaccauaaaccug

SEQ ID NO: 2545936 - RNA, 19 nt, Artificial Sequence
  Description of Artificial Sequence: Synthetic oligonucleotide
gcaacacucccauaugacc

SEQ ID NO: 2545937 - RNA, 19 nt, Artificial Sequence
  Description of Artificial Sequence: Synthetic oligonucleotide
cauaauucaugguagggau

SEQ ID NO: 2545938 - RNA, 19 nt, Artificial Sequence
  Description of Artificial Sequence: Synthetic oligonucleotide
aacacucccauaugaccua

SEQ ID NO: 2545939 - RNA, 19 nt, Artificial Sequence
  Description of Artificial Sequence: Synthetic oligonucleotide
guacaauuuggcguucagc

SEQ ID NO: 2545940 - RNA, 19 nt, Artificial Sequence
  Description of Artificial Sequence: Synthetic oligonucleotide
uucugaaagugaccacggu

SEQ ID NO: 2545941 - RNA, 19 nt, Artificial Sequence
  Description of Artificial Sequence: Synthetic oligonucleotide
agucugauguguaugcaga

SEQ ID NO: 2545942 - RNA, 19 nt, Artificial Sequence
  Description of Artificial Sequence: Synthetic oligonucleotide
cacuaaucaguucaugaaa

SEQ ID NO: 2545943 - RNA, 19 nt, Artificial Sequence
  Description of Artificial Sequence: Synthetic oligonucleotide
ccaagucugauguguaugc

SEQ ID NO: 2545944 - RNA, 19 nt, Artificial Sequence
  Description of Artificial Sequence: Synthetic oligonucleotide
uacuugucacauuucuaua

SEQ ID NO: 2545945 - RNA, 19 nt, Artificial Sequence
  Description of Artificial Sequence: Synthetic oligonucleotide
cugaugugucucugcauac

SEQ ID NO: 2545946 - RNA, 19 nt, Artificial Sequence
  Description of Artificial Sequence: Synthetic oligonucleotide
acugagcucacaaauggau

SEQ ID NO: 2545947 - RNA, 19 nt, Artificial Sequence
  Description of Artificial Sequence: Synthetic oligonucleotide
ugccagcuaccauaauuca

SEQ ID NO: 2545948 - RNA, 19 nt, Artificial Sequence
  Description of Artificial Sequence: Synthetic oligonucleotide
auaguguugccagcuacca

SEQ ID NO: 2545949 - RNA, 19 nt, Artificial Sequence
  Description of Artificial Sequence: Synthetic oligonucleotide
augacugagcucacaaaug

SEQ ID NO: 2545950 - RNA, 19 nt, Artificial Sequence
  Description of Artificial Sequence: Synthetic oligonucleotide
auuauaguguugccagcua

SEQ ID NO: 2545951 - RNA, 19 nt, Artificial Sequence
  Description of Artificial Sequence: Synthetic oligonucleotide
ccauaugaccuaauccugc

SEQ ID NO: 2545952 - RNA, 19 nt, Artificial Sequence
  Description of Artificial Sequence: Synthetic oligonucleotide
agacaccaauacaagacca

SEQ ID NO: 2545953 - RNA, 19 nt, Artificial Sequence
  Description of Artificial Sequence: Synthetic oligonucleotide
augcuacaaagcaggaguc

SEQ ID NO: 2545954 - RNA, 19 nt, Artificial Sequence
  Description of Artificial Sequence: Synthetic oligonucleotide
ucuaccccauucuggcaug

SEQ ID NO: 2545955 - RNA, 19 nt, Artificial Sequence
  Description of Artificial Sequence: Synthetic oligonucleotide
cauaaaccugaugugucuc

SEQ ID NO: 2545956 - RNA, 19 nt, Artificial Sequence
  Description of Artificial Sequence: Synthetic oligonucleotide
acuguacaaugugagggca

SEQ ID NO: 2545957 - RNA, 19 nt, Artificial Sequence
  Description of Artificial Sequence: Synthetic oligonucleotide
uuacugaaguugguauaca

SEQ ID NO: 2545958 - RNA, 19 nt, Artificial Sequence
  Description of Artificial Sequence: Synthetic oligonucleotide
uaggcuuacugaaguuggu

SEQ ID NO: 2545959 - RNA, 19 nt, Artificial Sequence
  Description of Artificial Sequence: Synthetic oligonucleotide
uguuuaugacugagcucac

SEQ ID NO: 2545960 - RNA, 19 nt, Artificial Sequence
  Description of Artificial Sequence: Synthetic oligonucleotide
gcuuuugacaaaaucuuuc

SEQ ID NO: 2545961 - RNA, 19 nt, Artificial Sequence
  Description of Artificial Sequence: Synthetic oligonucleotide
cacuuuuagcauagacuuc

SEQ ID NO: 2545962 - RNA, 19 nt, Artificial Sequence
  Description of Artificial Sequence: Synthetic oligonucleotide
uguccccugcagcuuauuc

SEQ ID NO: 2545963 - RNA, 19 nt, Artificial Sequence
  Description of Artificial Sequence: Synthetic oligonucleotide
caccaauacaagaccauaa

SEQ ID NO: 2545964 - RNA, 19 nt, Artificial Sequence
  Description of Artificial Sequence: Synthetic oligonucleotide
guacccacuugcacgcucg

SEQ ID NO: 2545965 - RNA, 19 nt, Artificial Sequence
  Description of Artificial Sequence: Synthetic oligonucleotide
uggaugaccuggucuuugu

SEQ ID NO: 2545966 - RNA, 19 nt, Artificial Sequence
  Description of Artificial Sequence: Synthetic oligonucleotide
caaauggaugaccuggucu

SEQ ID NO: 2545967 - RNA, 19 nt, Artificial Sequence
  Description of Artificial Sequence: Synthetic oligonucleotide
gaccauaaaccugaugugu

SEQ ID NO: 2545968 - RNA, 19 nt, Artificial Sequence
  Description of Artificial Sequence: Synthetic oligonucleotide
aauucaugguagggauugu

SEQ ID NO: 2545969 - RNA, 19 nt, Artificial Sequence
  Description of Artificial Sequence: Synthetic oligonucleotide
ugucucugcauaccucaua

SEQ ID NO: 2545970 - RNA, 19 nt, Artificial Sequence
  Description of Artificial Sequence: Synthetic oligonucleotide
gcacuuuuagcauagacuu

SEQ ID NO: 2545971 - RNA, 19 nt, Artificial Sequence
  Description of Artificial Sequence: Synthetic oligonucleotide
ggauuguauauacauacau

SEQ ID NO: 2545972 - RNA, 19 nt, Artificial Sequence
  Description of Artificial Sequence: Synthetic oligonucleotide
uuguacaauuuggcguuca

SEQ ID NO: 2545973 - RNA, 19 nt, Artificial Sequence
  Description of Artificial Sequence: Synthetic oligonucleotide
caagaccauaaaccugaug

SEQ ID NO: 2545974 - RNA, 19 nt, Artificial Sequence
  Description of Artificial Sequence: Synthetic oligonucleotide
auucuaccccauucuggca

SEQ ID NO: 2545975 - RNA, 19 nt, Artificial Sequence
  Description of Artificial Sequence: Synthetic oligonucleotide
ucauagccgcaauggcccc

SEQ ID NO: 2545976 - RNA, 19 nt, Artificial Sequence
  Description of Artificial Sequence: Synthetic oligonucleotide
acuugcacgcucguuuuca

SEQ ID NO: 2545977 - RNA, 19 nt, Artificial Sequence
  Description of Artificial Sequence: Synthetic oligonucleotide
caugguagggauuguauau

SEQ ID NO: 2545978 - RNA, 19 nt, Artificial Sequence
  Description of Artificial Sequence: Synthetic oligonucleotide
ugaccuggucuuugucuug

SEQ ID NO: 2545979 - RNA, 19 nt, Artificial Sequence
  Description of Artificial Sequence: Synthetic oligonucleotide
cacgcucguuuucaucucc

SEQ ID NO: 2545980 - RNA, 19 nt, Artificial Sequence
  Description of Artificial Sequence: Synthetic oligonucleotide
cuaaucaguucaugaaacu

SEQ ID NO: 2545981 - RNA, 19 nt, Artificial Sequence
  Description of Artificial Sequence: Synthetic oligonucleotide
guauacagguggcaggcua

SEQ ID NO: 2545982 - RNA, 19 nt, Artificial Sequence
  Description of Artificial Sequence: Synthetic oligonucleotide
cauccugacuauucuggca

SEQ ID NO: 2545983 - RNA, 19 nt, Artificial Sequence
  Description of Artificial Sequence: Synthetic oligonucleotide
gcuaggcuuacugaaguug

SEQ ID NO: 2545984 - RNA, 19 nt, Artificial Sequence
  Description of Artificial Sequence: Synthetic oligonucleotide
cauucuggcaugcuacaaa

SEQ ID NO: 2545985 - RNA, 19 nt, Artificial Sequence
  Description of Artificial Sequence: Synthetic oligonucleotide
guugccagcuaccauaauu

SEQ ID NO: 2545986 - RNA, 19 nt, Artificial Sequence
  Description of Artificial Sequence: Synthetic oligonucleotide
auagccgcaauggccccgg

SEQ ID NO: 2545987 - RNA, 19 nt, Artificial Sequence
  Description of Artificial Sequence: Synthetic oligonucleotide
acgcucguuuucaucuccc

SEQ ID NO: 2545988 - RNA, 19 nt, Artificial Sequence
  Description of Artificial Sequence: Synthetic oligonucleotide
auaugaccuaauccugcua

SEQ ID NO: 2545989 - RNA, 19 nt, Artificial Sequence
  Description of Artificial Sequence: Synthetic oligonucleotide
gccgcaauggccccggagc

SEQ ID NO: 2545990 - RNA, 19 nt, Artificial Sequence
  Description of Artificial Sequence: Synthetic oligonucleotide
caucucccaagucugaugu

SEQ ID NO: 2545991 - RNA, 19 nt, Artificial Sequence
  Description of Artificial Sequence: Synthetic oligonucleotide
uucaucucccaagucugau

SEQ ID NO: 2545992 - RNA, 19 nt, Artificial Sequence
  Description of Artificial Sequence: Synthetic oligonucleotide
uccugacuauucuggcacu

SEQ ID NO: 2545993 - RNA, 19 nt, Artificial Sequence
  Description of Artificial Sequence: Synthetic oligonucleotide
auauauuccccagcuuaaa

SEQ ID NO: 2545994 - RNA, 19 nt, Artificial Sequence
  Description of Artificial Sequence: Synthetic oligonucleotide
guuccuuccagggaaggaa

SEQ ID NO: 2545995 - RNA, 19 nt, Artificial Sequence
  Description of Artificial Sequence: Synthetic oligonucleotide
gaccuaauccugcuaggcu

SEQ ID NO: 2545996 - RNA, 19 nt, Artificial Sequence
  Description of Artificial Sequence: Synthetic oligonucleotide
uaguguugccagcuaccau

SEQ ID NO: 2545997 - RNA, 19 nt, Artificial Sequence
  Description of Artificial Sequence: Synthetic oligonucleotide
caguggagccaaacuguac

SEQ ID NO: 2545998 - RNA, 19 nt, Artificial Sequence
  Description of Artificial Sequence: Synthetic oligonucleotide
aauuuggcguucagccuau

SEQ ID NO: 2545999 - RNA, 19 nt, Artificial Sequence
  Description of Artificial Sequence: Synthetic oligonucleotide
acaccaauacaagaccaua

SEQ ID NO: 2546000 - RNA, 19 nt, Artificial Sequence
  Description of Artificial Sequence: Synthetic oligonucleotide
agcaggagucauccugacu

SEQ ID NO: 2546001 - RNA, 19 nt, Artificial Sequence
  Description of Artificial Sequence: Synthetic oligonucleotide
gagcucacaaauggaugac

SEQ ID NO: 2546002 - RNA, 19 nt, Artificial Sequence
  Description of Artificial Sequence: Synthetic oligonucleotide
ucaccacacuaaucaguuc

SEQ ID NO: 2546003 - RNA, 19 nt, Artificial Sequence
  Description of Artificial Sequence: Synthetic oligonucleotide
uuuguacaauuuggcguuc

SEQ ID NO: 2546004 - RNA, 19 nt, Artificial Sequence
  Description of Artificial Sequence: Synthetic oligonucleotide
cccauaugaccuaauccug

SEQ ID NO: 2546005 - RNA, 19 nt, Artificial Sequence
  Description of Artificial Sequence: Synthetic oligonucleotide
ccugcuaggcuuacugaag

SEQ ID NO: 2546006 - RNA, 19 nt, Artificial Sequence
  Description of Artificial Sequence: Synthetic oligonucleotide
gacugagcucacaaaugga

SEQ ID NO: 2546007 - RNA, 19 nt, Artificial Sequence
  Description of Artificial Sequence: Synthetic oligonucleotide
gaaagugaccacgguuguc

SEQ ID NO: 2546008 - RNA, 19 nt, Artificial Sequence
  Description of Artificial Sequence: Synthetic oligonucleotide
cauaugaccuaauccugcu

SEQ ID NO: 2546009 - RNA, 19 nt, Artificial Sequence
  Description of Artificial Sequence: Synthetic oligonucleotide
ucucaucacagugcagcuc

SEQ ID NO: 2546010 - RNA, 19 nt, Artificial Sequence
  Description of Artificial Sequence: Synthetic oligonucleotide
ccaggggcggcuaaaguac

SEQ ID NO: 2546011 - RNA, 19 nt, Artificial Sequence
  Description of Artificial Sequence: Synthetic oligonucleotide
ugcauaccucauagccgca

SEQ ID NO: 2546012 - RNA, 19 nt, Artificial Sequence
  Description of Artificial Sequence: Synthetic oligonucleotide
guguucugaaagugaccac

SEQ ID NO: 2546013 - RNA, 19 nt, Artificial Sequence
  Description of Artificial Sequence: Synthetic oligonucleotide
aggggcggcuaaaguaccc

SEQ ID NO: 2546014 - RNA, 19 nt, Artificial Sequence
  Description of Artificial Sequence: Synthetic oligonucleotide
agcuuuugacaaaaucuuu

SEQ ID NO: 2546015 - RNA, 19 nt, Artificial Sequence
  Description of Artificial Sequence: Synthetic oligonucleotide
ugcuaggcuuacugaaguu

SEQ ID NO: 2546016 - RNA, 19 nt, Artificial Sequence
  Description of Artificial Sequence: Synthetic oligonucleotide
caggggcggcuaaaguacc

SEQ ID NO: 2546017 - RNA, 19 nt, Artificial Sequence
  Description of Artificial Sequence: Synthetic oligonucleotide
ucagccuaucugccacuuc

SEQ ID NO: 2546018 - RNA, 19 nt, Artificial Sequence
  Description of Artificial Sequence: Synthetic oligonucleotide
ggcacuuuuagcauagacu

SEQ ID NO: 2546019 - RNA, 19 nt, Artificial Sequence
  Description of Artificial Sequence: Synthetic oligonucleotide
gguugucgaauuuguacaa

SEQ ID NO: 2546020 - RNA, 19 nt, Artificial Sequence
  Description of Artificial Sequence: Synthetic oligonucleotide
augguagggauuguauaua

SEQ ID NO: 2546021 - RNA, 19 nt, Artificial Sequence
  Description of Artificial Sequence: Synthetic oligonucleotide
uugcacgcucguuuucauc

SEQ ID NO: 2546022 - RNA, 19 nt, Artificial Sequence
  Description of Artificial Sequence: Synthetic oligonucleotide
uggagccaaacuguacaau

SEQ ID NO: 2546023 - RNA, 19 nt, Artificial Sequence
  Description of Artificial Sequence: Synthetic oligonucleotide
cauagccgcaauggccccg

SEQ ID NO: 2546024 - RNA, 19 nt, Artificial Sequence
  Description of Artificial Sequence: Synthetic oligonucleotide
agccgcaauggccccggag

SEQ ID NO: 2546025 - RNA, 19 nt, Artificial Sequence
  Description of Artificial Sequence: Synthetic oligonucleotide
guggccuaugaugaugguc

SEQ ID NO: 2546026 - RNA, 19 nt, Artificial Sequence
  Description of Artificial Sequence: Synthetic oligonucleotide
guuuaugacugagcucaca

SEQ ID NO: 2546027 - RNA, 19 nt, Artificial Sequence
  Description of Artificial Sequence: Synthetic oligonucleotide
uguggccuaugaugauggu

SEQ ID NO: 2546028 - RNA, 19 nt, Artificial Sequence
  Description of Artificial Sequence: Synthetic oligonucleotide
guggagccaaacuguacaa

SEQ ID NO: 2546029 - RNA, 19 nt, Artificial Sequence
  Description of Artificial Sequence: Synthetic oligonucleotide
accugaugugucucugcau

SEQ ID NO: 2546030 - RNA, 19 nt, Artificial Sequence
  Description of Artificial Sequence: Synthetic oligonucleotide
ccccauucuggcaugcuac

SEQ ID NO: 2546031 - RNA, 19 nt, Artificial Sequence
  Description of Artificial Sequence: Synthetic oligonucleotide
gcaugcuacaaagcaggag

SEQ ID NO: 2546032 - RNA, 19 nt, Artificial Sequence
  Description of Artificial Sequence: Synthetic oligonucleotide
accccauucuggcaugcua

SEQ ID NO: 2546033 - RNA, 19 nt, Artificial Sequence
  Description of Artificial Sequence: Synthetic oligonucleotide
gccuaucugccacuucugc

SEQ ID NO: 2546034 - RNA, 19 nt, Artificial Sequence
  Description of Artificial Sequence: Synthetic oligonucleotide
ccauaauucaugguaggga

SEQ ID NO: 2546035 - RNA, 19 nt, Artificial Sequence
  Description of Artificial Sequence: Synthetic oligonucleotide
gcuaaaguacccacuugca

SEQ ID NO: 2546036 - RNA, 19 nt, Artificial Sequence
  Description of Artificial Sequence: Synthetic oligonucleotide
guccccugcagcuuauucu

SEQ ID NO: 2546037 - RNA, 19 nt, Artificial Sequence
  Description of Artificial Sequence: Synthetic oligonucleotide
uaauccugcuaggcuuacu

SEQ ID NO: 2546038 - RNA, 19 nt, Artificial Sequence
  Description of Artificial Sequence: Synthetic oligonucleotide
aggcuuacugaaguuggua

SEQ ID NO: 2546039 - RNA, 19 nt, Artificial Sequence
  Description of Artificial Sequence: Synthetic oligonucleotide
ugaccacgguugucgaauu

SEQ ID NO: 2546040 - RNA, 19 nt, Artificial Sequence
  Description of Artificial Sequence: Synthetic oligonucleotide
cuaauccugcuaggcuuac

SEQ ID NO: 2546041 - RNA, 19 nt, Artificial Sequence
  Description of Artificial Sequence: Synthetic oligonucleotide
gcagauuaucuguccccug

SEQ ID NO: 2546042 - RNA, 19 nt, Artificial Sequence
  Description of Artificial Sequence: Synthetic oligonucleotide
uucagccuaucugccacuu

SEQ ID NO: 2546043 - RNA, 19 nt, Artificial Sequence
  Description of Artificial Sequence: Synthetic oligonucleotide
gacaccaauacaagaccau

SEQ ID NO: 2546044 - RNA, 19 nt, Artificial Sequence
  Description of Artificial Sequence: Synthetic oligonucleotide
uacccacuugcacgcucgu

SEQ ID NO: 2546045 - RNA, 19 nt, Artificial Sequence
  Description of Artificial Sequence: Synthetic oligonucleotide
accacacuaaucaguucau

SEQ ID NO: 2546046 - RNA, 19 nt, Artificial Sequence
  Description of Artificial Sequence: Synthetic oligonucleotide
ggcuuacugaaguugguau

SEQ ID NO: 2546047 - RNA, 19 nt, Artificial Sequence
  Description of Artificial Sequence: Synthetic oligonucleotide
cuaccccauucuggcaugc

SEQ ID NO: 2546048 - RNA, 19 nt, Artificial Sequence
  Description of Artificial Sequence: Synthetic oligonucleotide
cugcuaggcuuacugaagu

SEQ ID NO: 2546049 - RNA, 19 nt, Artificial Sequence
  Description of Artificial Sequence: Synthetic oligonucleotide
aaguacccacuugcacgcu

SEQ ID NO: 2546050 - RNA, 19 nt, Artificial Sequence
  Description of Artificial Sequence: Synthetic oligonucleotide
cuucucccacugccagggg

SEQ ID NO: 2546051 - RNA, 19 nt, Artificial Sequence
  Description of Artificial Sequence: Synthetic oligonucleotide
cguucagccuaucugccac

SEQ ID NO: 2546052 - RNA, 19 nt, Artificial Sequence
  Description of Artificial Sequence: Synthetic oligonucleotide
cgguugucgaauuuguaca

SEQ ID NO: 2546053 - RNA, 19 nt, Artificial Sequence
  Description of Artificial Sequence: Synthetic oligonucleotide
agccuaucugccacuucug

SEQ ID NO: 2546054 - RNA, 19 nt, Artificial Sequence
  Description of Artificial Sequence: Synthetic oligonucleotide
ccugaugugucucugcaua

SEQ ID NO: 2546055 - RNA, 19 nt, Artificial Sequence
  Description of Artificial Sequence: Synthetic oligonucleotide
cccaagucugauguguaug

SEQ ID NO: 2546056 - RNA, 19 nt, Artificial Sequence
  Description of Artificial Sequence: Synthetic oligonucleotide
ggcguucagccuaucugcc

SEQ ID NO: 2546057 - RNA, 19 nt, Artificial Sequence
  Description of Artificial Sequence: Synthetic oligonucleotide
gccaggggcggcuaaagua

SEQ ID NO: 2546058 - RNA, 19 nt, Artificial Sequence
  Description of Artificial Sequence: Synthetic oligonucleotide
gcucacaaauggaugaccu

SEQ ID NO: 2546059 - RNA, 19 nt, Artificial Sequence
  Description of Artificial Sequence: Synthetic oligonucleotide
gugaccacgguugucgaau

SEQ ID NO: 2546060 - RNA, 19 nt, Artificial Sequence
  Description of Artificial Sequence: Synthetic oligonucleotide
auuuggcguucagccuauc

SEQ ID NO: 2546061 - RNA, 19 nt, Artificial Sequence
  Description of Artificial Sequence: Synthetic oligonucleotide
cucccaagucugaugugua

SEQ ID NO: 2546062 - RNA, 19 nt, Artificial Sequence
  Description of Artificial Sequence: Synthetic oligonucleotide
uaccccauucuggcaugcu

SEQ ID NO: 2546063 - RNA, 19 nt, Artificial Sequence
  Description of Artificial Sequence: Synthetic oligonucleotide
acacucccauaugaccuaa

SEQ ID NO: 2546064 - RNA, 19 nt, Artificial Sequence
  Description of Artificial Sequence: Synthetic oligonucleotide
gggcggcuaaaguacccac

SEQ ID NO: 2546065 - RNA, 19 nt, Artificial Sequence
  Description of Artificial Sequence: Synthetic oligonucleotide
aggagucauccugacuauu

SEQ ID NO: 2546066 - RNA, 19 nt, Artificial Sequence
  Description of Artificial Sequence: Synthetic oligonucleotide
guugucgaauuuguacaau

SEQ ID NO: 2546067 - RNA, 19 nt, Artificial Sequence
  Description of Artificial Sequence: Synthetic oligonucleotide
gcuacaaagcaggagucau

SEQ ID NO: 2546068 - RNA, 19 nt, Artificial Sequence
  Description of Artificial Sequence: Synthetic oligonucleotide
ccauaaaccugaugugucu

SEQ ID NO: 2546069 - RNA, 19 nt, Artificial Sequence
  Description of Artificial Sequence: Synthetic oligonucleotide
cauaccucauagccgcaau

SEQ ID NO: 2546070 - RNA, 19 nt, Artificial Sequence
  Description of Artificial Sequence: Synthetic oligonucleotide
guucagccuaucugccacu

SEQ ID NO: 2546071 - RNA, 19 nt, Artificial Sequence
  Description of Artificial Sequence: Synthetic oligonucleotide
ccacacuaaucaguucaug

SEQ ID NO: 2546072 - RNA, 19 nt, Artificial Sequence
  Description of Artificial Sequence: Synthetic oligonucleotide
ccuaauccugcuaggcuua

SEQ ID NO: 2546073 - RNA, 19 nt, Artificial Sequence
  Description of Artificial Sequence: Synthetic oligonucleotide
ggcaugcuacaaagcagga

SEQ ID NO: 2546074 - RNA, 19 nt, Artificial Sequence
  Description of Artificial Sequence: Synthetic oligonucleotide
gguggcaggcuaugcagau

SEQ ID NO: 2546075 - RNA, 19 nt, Artificial Sequence
  Description of Artificial Sequence: Synthetic oligonucleotide
cccauucuggcaugcuaca

SEQ ID NO: 2546076 - RNA, 19 nt, Artificial Sequence
  Description of Artificial Sequence: Synthetic oligonucleotide
gcggcuaaaguacccacuu

SEQ ID NO: 2546077 - RNA, 19 nt, Artificial Sequence
  Description of Artificial Sequence: Synthetic oligonucleotide
cuugcacgcucguuuucau

SEQ ID NO: 2546078 - RNA, 19 nt, Artificial Sequence
  Description of Artificial Sequence: Synthetic oligonucleotide
gcacgcucguuuucaucuc

SEQ ID NO: 2546079 - RNA, 19 nt, Artificial Sequence
  Description of Artificial Sequence: Synthetic oligonucleotide
uagccgcaauggccccgga

SEQ ID NO: 2546080 - RNA, 19 nt, Artificial Sequence
  Description of Artificial Sequence: Synthetic oligonucleotide
ggggcggcuaaaguaccca

SEQ ID NO: 2546081 - RNA, 19 nt, Artificial Sequence
  Description of Artificial Sequence: Synthetic oligonucleotide
caggagucauccugacuau

SEQ ID NO: 2546082 - RNA, 19 nt, Artificial Sequence
  Description of Artificial Sequence: Synthetic oligonucleotide
gccuaugaugauggucuuc

SEQ ID NO: 2546083 - RNA, 19 nt, Artificial Sequence
  Description of Artificial Sequence: Synthetic oligonucleotide
gaccacgguugucgaauuu

SEQ ID NO: 2546084 - RNA, 19 nt, Artificial Sequence
  Description of Artificial Sequence: Synthetic oligonucleotide
gcauaccucauagccgcaa

SEQ ID NO: 2546085 - RNA, 19 nt, Artificial Sequence
  Description of Artificial Sequence: Synthetic oligonucleotide
cggcuaaaguacccacuug

SEQ ID NO: 2546086 - RNA, 19 nt, Artificial Sequence
  Description of Artificial Sequence: Synthetic oligonucleotide
cuggcacuuuuagcauaga

SEQ ID NO: 2546087 - RNA, 19 nt, Artificial Sequence
  Description of Artificial Sequence: Synthetic oligonucleotide
guacaaugugagggcaguu

SEQ ID NO: 2546088 - RNA, 19 nt, Artificial Sequence
  Description of Artificial Sequence: Synthetic oligonucleotide
cugacuauucuggcacuuu

SEQ ID NO: 2546089 - RNA, 19 nt, Artificial Sequence
  Description of Artificial Sequence: Synthetic oligonucleotide
ggcggcuaaaguacccacu

SEQ ID NO: 2546090 - RNA, 19 nt, Artificial Sequence
  Description of Artificial Sequence: Synthetic oligonucleotide
cccacuugcacgcucguuu

SEQ ID NO: 2546091 - RNA, 19 nt, Artificial Sequence
  Description of Artificial Sequence: Synthetic oligonucleotide
cagcuuauucuaccccauu

SEQ ID NO: 2546092 - RNA, 19 nt, Artificial Sequence
  Description of Artificial Sequence: Synthetic oligonucleotide
ccauucuggcaugcuacaa

SEQ ID NO: 2546093 - RNA, 19 nt, Artificial Sequence
  Description of Artificial Sequence: Synthetic oligonucleotide
gcagcuuauucuaccccau

SEQ ID NO: 2546094 - RNA, 19 nt, Artificial Sequence
  Description of Artificial Sequence: Synthetic oligonucleotide
cacucccauaugaccuaau

SEQ ID NO: 2546095 - RNA, 19 nt, Artificial Sequence
  Description of Artificial Sequence: Synthetic oligonucleotide
cacugccaggggcggcuaa

SEQ ID NO: 2546096 - RNA, 19 nt, Artificial Sequence
  Description of Artificial Sequence: Synthetic oligonucleotide
ggccccggagcuguggccu

SEQ ID NO: 2546097 - RNA, 19 nt, Artificial Sequence
  Description of Artificial Sequence: Synthetic oligonucleotide
ggccuaugaugauggucuu

SEQ ID NO: 2546098 - RNA, 19 nt, Artificial Sequence
  Description of Artificial Sequence: Synthetic oligonucleotide
ccacuugcacgcucguuuu

SEQ ID NO: 2546099 - RNA, 19 nt, Artificial Sequence
  Description of Artificial Sequence: Synthetic oligonucleotide
ccgcaauggccccggagcu

SEQ ID NO: 2546100 - RNA, 19 nt, Artificial Sequence
  Description of Artificial Sequence: Synthetic oligonucleotide
ggucaucaguggagccaaa

SEQ ID NO: 2546101 - RNA, 19 nt, Artificial Sequence
  Description of Artificial Sequence: Synthetic oligonucleotide
gccccggagcuguggccua

SEQ ID NO: 2546102 - RNA, 19 nt, Artificial Sequence
  Description of Artificial Sequence: Synthetic oligonucleotide
ccccggagcuguggccuau

SEQ ID NO: 2546103 - RNA, 19 nt, Artificial Sequence
  Description of Artificial Sequence: Synthetic oligonucleotide
uuuucaaagacaaauaucc

SEQ ID NO: 2546104 - RNA, 19 nt, Artificial Sequence
  Description of Artificial Sequence: Synthetic oligonucleotide
aauucgaucauacugauga

SEQ ID NO: 2546105 - RNA, 19 nt, Artificial Sequence
  Description of Artificial Sequence: Synthetic oligonucleotide
aguaaauucgaucauacug

SEQ ID NO: 2546106 - RNA, 19 nt, Artificial Sequence
  Description of Artificial Sequence: Synthetic oligonucleotide
uauauaauuaaauucucug

SEQ ID NO: 2546107 - RNA, 19 nt, Artificial Sequence
  Description of Artificial Sequence: Synthetic oligonucleotide
aaucuguguuaacugaucc

SEQ ID NO: 2546108 - RNA, 19 nt, Artificial Sequence
  Description of Artificial Sequence: Synthetic oligonucleotide
ucgaauauaaauacgggcc

SEQ ID NO: 2546109 - RNA, 19 nt, Artificial Sequence
  Description of Artificial Sequence: Synthetic oligonucleotide
uucaaaauagaugagguga

SEQ ID NO: 2546110 - RNA, 19 nt, Artificial Sequence
  Description of Artificial Sequence: Synthetic oligonucleotide
uccacaguaaauucgauca

SEQ ID NO: 2546111 - RNA, 19 nt, Artificial Sequence
  Description of Artificial Sequence: Synthetic oligonucleotide
uccucuauaggcaugacca

SEQ ID NO: 2546112 - RNA, 19 nt, Artificial Sequence
  Description of Artificial Sequence: Synthetic oligonucleotide
aaucuaauacuauauaauu

SEQ ID NO: 2546113 - RNA, 19 nt, Artificial Sequence
  Description of Artificial Sequence: Synthetic oligonucleotide
auaaauacgggccaagucu

SEQ ID NO: 2546114 - RNA, 19 nt, Artificial Sequence
  Description of Artificial Sequence: Synthetic oligonucleotide
uaacugauccucuauaggc

SEQ ID NO: 2546115 - RNA, 19 nt, Artificial Sequence
  Description of Artificial Sequence: Synthetic oligonucleotide
aaauucucugcuuaacucu

SEQ ID NO: 2546116 - RNA, 19 nt, Artificial Sequence
  Description of Artificial Sequence: Synthetic oligonucleotide
ucuacauacagcuuccaug

SEQ ID NO: 2546117 - RNA, 19 nt, Artificial Sequence
  Description of Artificial Sequence: Synthetic oligonucleotide
caaucuacuguguagagug

SEQ ID NO: 2546118 - RNA, 19 nt, Artificial Sequence
  Description of Artificial Sequence: Synthetic oligonucleotide
uuaaaagucccaagaagug

SEQ ID NO: 2546119 - RNA, 19 nt, Artificial Sequence
  Description of Artificial Sequence: Synthetic oligonucleotide
auuaucauucuuacuaggc

SEQ ID NO: 2546120 - RNA, 19 nt, Artificial Sequence
  Description of Artificial Sequence: Synthetic oligonucleotide
augaaugucuuuucaaauc

SEQ ID NO: 2546121 - RNA, 19 nt, Artificial Sequence
  Description of Artificial Sequence: Synthetic oligonucleotide
aaauagaugaggugagugu

SEQ ID NO: 2546122 - RNA, 19 nt, Artificial Sequence
  Description of Artificial Sequence: Synthetic oligonucleotide
uccacauaauuaaaagucc

SEQ ID NO: 2546123 - RNA, 19 nt, Artificial Sequence
  Description of Artificial Sequence: Synthetic oligonucleotide
aaaauagaugaggugagug

SEQ ID NO: 2546124 - RNA, 19 nt, Artificial Sequence
  Description of Artificial Sequence: Synthetic oligonucleotide
agagaucccacgaugaugc

SEQ ID NO: 2546125 - RNA, 19 nt, Artificial Sequence
  Description of Artificial Sequence: Synthetic oligonucleotide
uuaaauucucugcuuaacu

SEQ ID NO: 2546126 - RNA, 19 nt, Artificial Sequence
  Description of Artificial Sequence: Synthetic oligonucleotide
uucaaaucuaauacuauau

SEQ ID NO: 2546127 - RNA, 19 nt, Artificial Sequence
  Description of Artificial Sequence: Synthetic oligonucleotide
uucauguuaguuuucguga

SEQ ID NO: 2546128 - RNA, 19 nt, Artificial Sequence
  Description of Artificial Sequence: Synthetic oligonucleotide
ugaaccaaauuuuaacaca

SEQ ID NO: 2546129 - RNA, 19 nt, Artificial Sequence
  Description of Artificial Sequence: Synthetic oligonucleotide
ucgaucauacugaugacug

SEQ ID NO: 2546130 - RNA, 19 nt, Artificial Sequence
  Description of Artificial Sequence: Synthetic oligonucleotide
aauagaugaggugagugug

SEQ ID NO: 2546131 - RNA, 19 nt, Artificial Sequence
  Description of Artificial Sequence: Synthetic oligonucleotide
aaaugggacaaugaauguc

SEQ ID NO: 2546132 - RNA, 19 nt, Artificial Sequence
  Description of Artificial Sequence: Synthetic oligonucleotide
auuaaaagucccaagaagu

SEQ ID NO: 2546133 - RNA, 19 nt, Artificial Sequence
  Description of Artificial Sequence: Synthetic oligonucleotide
acuagaaagguucaaaaua

SEQ ID NO: 2546134 - RNA, 19 nt, Artificial Sequence
  Description of Artificial Sequence: Synthetic oligonucleotide
uuuucgugauucuuucugg

SEQ ID NO: 2546135 - RNA, 19 nt, Artificial Sequence
  Description of Artificial Sequence: Synthetic oligonucleotide
uuaucauucuuacuaggcu

SEQ ID NO: 2546136 - RNA, 19 nt, Artificial Sequence
  Description of Artificial Sequence: Synthetic oligonucleotide
cauaauuaaaagucccaag

SEQ ID NO: 2546137 - RNA, 19 nt, Artificial Sequence
  Description of Artificial Sequence: Synthetic oligonucleotide
aagaucuucauguuaguuu

SEQ ID NO: 2546138 - RNA, 19 nt, Artificial Sequence
  Description of Artificial Sequence: Synthetic oligonucleotide
gucgaauauaaauacgggc

SEQ ID NO: 2546139 - RNA, 19 nt, Artificial Sequence
  Description of Artificial Sequence: Synthetic oligonucleotide
gaagguuccuaauagguga

SEQ ID NO: 2546140 - RNA, 19 nt, Artificial Sequence
  Description of Artificial Sequence: Synthetic oligonucleotide
aaugggacaaugaaugucu

SEQ ID NO: 2546141 - RNA, 19 nt, Artificial Sequence
  Description of Artificial Sequence: Synthetic oligonucleotide
uaauuaaauucucugcuua

SEQ ID NO: 2546142 - RNA, 19 nt, Artificial Sequence
  Description of Artificial Sequence: Synthetic oligonucleotide
ugugcgucgaauauaaaua

SEQ ID NO: 2546143 - RNA, 19 nt, Artificial Sequence
  Description of Artificial Sequence: Synthetic oligonucleotide
guggccuacauuuucaaag

SEQ ID NO: 2546144 - RNA, 19 nt, Artificial Sequence
  Description of Artificial Sequence: Synthetic oligonucleotide
gaugaaguuucuaagugug

SEQ ID NO: 2546145 - RNA, 19 nt, Artificial Sequence
  Description of Artificial Sequence: Synthetic oligonucleotide
uagcaugaggaaaugagcu

SEQ ID NO: 2546146 - RNA, 19 nt, Artificial Sequence
  Description of Artificial Sequence: Synthetic oligonucleotide
gugagggucaccuaccacg

SEQ ID NO: 2546147 - RNA, 19 nt, Artificial Sequence
  Description of Artificial Sequence: Synthetic oligonucleotide
uuucccaaguguuuugucc

SEQ ID NO: 2546148 - RNA, 19 nt, Artificial Sequence
  Description of Artificial Sequence: Synthetic oligonucleotide
aaguuucuaagugugcguc

SEQ ID NO: 2546149 - RNA, 19 nt, Artificial Sequence
  Description of Artificial Sequence: Synthetic oligonucleotide
ugucuuuucaaaucuaaua

SEQ ID NO: 2546150 - RNA, 19 nt, Artificial Sequence
  Description of Artificial Sequence: Synthetic oligonucleotide
uaaauucucugcuuaacuc

SEQ ID NO: 2546151 - RNA, 19 nt, Artificial Sequence
  Description of Artificial Sequence: Synthetic oligonucleotide
uugaagauuccugacagca

SEQ ID NO: 2546152 - RNA, 19 nt, Artificial Sequence
  Description of Artificial Sequence: Synthetic oligonucleotide
uauaaauacgggccaaguc

SEQ ID NO: 2546153 - RNA, 19 nt, Artificial Sequence
  Description of Artificial Sequence: Synthetic oligonucleotide
aagugucucagcuggccac

SEQ ID NO: 2546154 - RNA, 19 nt, Artificial Sequence
  Description of Artificial Sequence: Synthetic oligonucleotide
ugugccauuaucauucuua

SEQ ID NO: 2546155 - RNA, 19 nt, Artificial Sequence
  Description of Artificial Sequence: Synthetic oligonucleotide
uuucaaaucuaauacuaua

SEQ ID NO: 2546156 - RNA, 19 nt, Artificial Sequence
  Description of Artificial Sequence: Synthetic oligonucleotide
aauccggugugccauuauc

SEQ ID NO: 2546157 - RNA, 19 nt, Artificial Sequence
  Description of Artificial Sequence: Synthetic oligonucleotide
auuaaauucucugcuuaac

SEQ ID NO: 2546158 - RNA, 19 nt, Artificial Sequence
  Description of Artificial Sequence: Synthetic oligonucleotide
cuucauguuaguuuucgug

SEQ ID NO: 2546159 - RNA, 19 nt, Artificial Sequence
  Description of Artificial Sequence: Synthetic oligonucleotide
gaggaaaugagcuuggugu

SEQ ID NO: 2546160 - RNA, 19 nt, Artificial Sequence
  Description of Artificial Sequence: Synthetic oligonucleotide
cuagcaugaggaaaugagc

SEQ ID NO: 2546161 - RNA, 19 nt, Artificial Sequence
  Description of Artificial Sequence: Synthetic oligonucleotide
acaguaaauucgaucauac

SEQ ID NO: 2546162 - RNA, 19 nt, Artificial Sequence
  Description of Artificial Sequence: Synthetic oligonucleotide
ugcgucgaauauaaauacg

SEQ ID NO: 2546163 - RNA, 19 nt, Artificial Sequence
  Description of Artificial Sequence: Synthetic oligonucleotide
uuucaaagacaaauaucca

SEQ ID NO: 2546164 - RNA, 19 nt, Artificial Sequence
  Description of Artificial Sequence: Synthetic oligonucleotide
cugaaccaaauuuuaacac

SEQ ID NO: 2546165 - RNA, 19 nt, Artificial Sequence
  Description of Artificial Sequence: Synthetic oligonucleotide
cauuaucauucuuacuagg

SEQ ID NO: 2546166 - RNA, 19 nt, Artificial Sequence
  Description of Artificial Sequence: Synthetic oligonucleotide
uacuaggcuguacuagugg

SEQ ID NO: 2546167 - RNA, 19 nt, Artificial Sequence
  Description of Artificial Sequence: Synthetic oligonucleotide
aauucucugcuuaacucuc

SEQ ID NO: 2546168 - RNA, 19 nt, Artificial Sequence
  Description of Artificial Sequence: Synthetic oligonucleotide
aagcaaaugggacaaugaa

SEQ ID NO: 2546169 - RNA, 19 nt, Artificial Sequence
  Description of Artificial Sequence: Synthetic oligonucleotide
auucuuacuaggcuguacu

SEQ ID NO: 2546170 - RNA, 19 nt, Artificial Sequence
  Description of Artificial Sequence: Synthetic oligonucleotide
guuuucgugauucuuucug

SEQ ID NO: 2546171 - RNA, 19 nt, Artificial Sequence
  Description of Artificial Sequence: Synthetic oligonucleotide
guaaauucgaucauacuga

SEQ ID NO: 2546172 - RNA, 19 nt, Artificial Sequence
  Description of Artificial Sequence: Synthetic oligonucleotide
auguuaguuuucgugauuc

SEQ ID NO: 2546173 - RNA, 19 nt, Artificial Sequence
  Description of Artificial Sequence: Synthetic oligonucleotide
ugaggaaaugagcuuggug

SEQ ID NO: 2546174 - RNA, 19 nt, Artificial Sequence
  Description of Artificial Sequence: Synthetic oligonucleotide
aaugagcuugguguggguc

SEQ ID NO: 2546175 - RNA, 19 nt, Artificial Sequence
  Description of Artificial Sequence: Synthetic oligonucleotide
ucuuacuaggcuguacuag

SEQ ID NO: 2546176 - RNA, 19 nt, Artificial Sequence
  Description of Artificial Sequence: Synthetic oligonucleotide
agcaagaucuucauguuag

SEQ ID NO: 2546177 - RNA, 19 nt, Artificial Sequence
  Description of Artificial Sequence: Synthetic oligonucleotide
ucgugauucuuucuggacu

SEQ ID NO: 2546178 - RNA, 19 nt, Artificial Sequence
  Description of Artificial Sequence: Synthetic oligonucleotide
cuacauacagcuuccauga

SEQ ID NO: 2546179 - RNA, 19 nt, Artificial Sequence
  Description of Artificial Sequence: Synthetic oligonucleotide
aguuucuaagugugcgucg

SEQ ID NO: 2546180 - RNA, 19 nt, Artificial Sequence
  Description of Artificial Sequence: Synthetic oligonucleotide
agaucuucauguuaguuuu

SEQ ID NO: 2546181 - RNA, 19 nt, Artificial Sequence
  Description of Artificial Sequence: Synthetic oligonucleotide
aggcaugaccaguacuucc

SEQ ID NO: 2546182 - RNA, 19 nt, Artificial Sequence
  Description of Artificial Sequence: Synthetic oligonucleotide
uacuaguggagcaaaggaa

SEQ ID NO: 2546183 - RNA, 19 nt, Artificial Sequence
  Description of Artificial Sequence: Synthetic oligonucleotide
aguggagcaaaggaaacag

SEQ ID NO: 2546184 - RNA, 19 nt, Artificial Sequence
  Description of Artificial Sequence: Synthetic oligonucleotide
ugaugcugaaccaaauuuu

SEQ ID NO: 2546185 - RNA, 19 nt, Artificial Sequence
  Description of Artificial Sequence: Synthetic oligonucleotide
uaauaggugagggucaccu

SEQ ID NO: 2546186 - RNA, 19 nt, Artificial Sequence
  Description of Artificial Sequence: Synthetic oligonucleotide
uauaggcaugaccaguacu

SEQ ID NO: 2546187 - RNA, 19 nt, Artificial Sequence
  Description of Artificial Sequence: Synthetic oligonucleotide
ucuauaggcaugaccagua

SEQ ID NO: 2546188 - RNA, 19 nt, Artificial Sequence
  Description of Artificial Sequence: Synthetic oligonucleotide
uaaaagucccaagaagugu

SEQ ID NO: 2546189 - RNA, 19 nt, Artificial Sequence
  Description of Artificial Sequence: Synthetic oligonucleotide
agaagugucucagcuggcc

SEQ ID NO: 2546190 - RNA, 19 nt, Artificial Sequence
  Description of Artificial Sequence: Synthetic oligonucleotide
acauacagcuuccaugaca

SEQ ID NO: 2546191 - RNA, 19 nt, Artificial Sequence
  Description of Artificial Sequence: Synthetic oligonucleotide
aucuucauguuaguuuucg

SEQ ID NO: 2546192 - RNA, 19 nt, Artificial Sequence
  Description of Artificial Sequence: Synthetic oligonucleotide
uucccaaguguuuugucca

SEQ ID NO: 2546193 - RNA, 19 nt, Artificial Sequence
  Description of Artificial Sequence: Synthetic oligonucleotide
uuacucacuaucugcacuc

SEQ ID NO: 2546194 - RNA, 19 nt, Artificial Sequence
  Description of Artificial Sequence: Synthetic oligonucleotide
aaugucuuuucaaaucuaa

SEQ ID NO: 2546195 - RNA, 19 nt, Artificial Sequence
  Description of Artificial Sequence: Synthetic oligonucleotide
uuucuacuagaaagguuca

SEQ ID NO: 2546196 - RNA, 19 nt, Artificial Sequence
  Description of Artificial Sequence: Synthetic oligonucleotide
ucuacuagaaagguucaaa

SEQ ID NO: 2546197 - RNA, 19 nt, Artificial Sequence
  Description of Artificial Sequence: Synthetic oligonucleotide
uuccuaauaggugaggguc

SEQ ID NO: 2546198 - RNA, 19 nt, Artificial Sequence
  Description of Artificial Sequence: Synthetic oligonucleotide
gacaaucuacuguguagag

SEQ ID NO: 2546199 - RNA, 19 nt, Artificial Sequence
  Description of Artificial Sequence: Synthetic oligonucleotide
aaucuacuguguagagugc

SEQ ID NO: 2546200 - RNA, 19 nt, Artificial Sequence
  Description of Artificial Sequence: Synthetic oligonucleotide
acucagaagcaaaugggac

SEQ ID NO: 2546201 - RNA, 19 nt, Artificial Sequence
  Description of Artificial Sequence: Synthetic oligonucleotide
uuacuaggcuguacuagug

SEQ ID NO: 2546202 - RNA, 19 nt, Artificial Sequence
  Description of Artificial Sequence: Synthetic oligonucleotide
cauaaucuguguuaacuga

SEQ ID NO: 2546203 - RNA, 19 nt, Artificial Sequence
  Description of Artificial Sequence: Synthetic oligonucleotide
acuguguagagugcuugcc

SEQ ID NO: 2546204 - RNA, 19 nt, Artificial Sequence
  Description of Artificial Sequence: Synthetic oligonucleotide
uaaucuguguuaacugauc

SEQ ID NO: 2546205 - RNA, 19 nt, Artificial Sequence
  Description of Artificial Sequence: Synthetic oligonucleotide
uaaauacgggccaagucuu

SEQ ID NO: 2546206 - RNA, 19 nt, Artificial Sequence
  Description of Artificial Sequence: Synthetic oligonucleotide
auucgaucauacugaugac

SEQ ID NO: 2546207 - RNA, 19 nt, Artificial Sequence
  Description of Artificial Sequence: Synthetic oligonucleotide
uccuaauaggugaggguca

SEQ ID NO: 2546208 - RNA, 19 nt, Artificial Sequence
  Description of Artificial Sequence: Synthetic oligonucleotide
ccaacuuugagcaagaucu

SEQ ID NO: 2546209 - RNA, 19 nt, Artificial Sequence
  Description of Artificial Sequence: Synthetic oligonucleotide
uccaugacaguuucuacua

SEQ ID NO: 2546210 - RNA, 19 nt, Artificial Sequence
  Description of Artificial Sequence: Synthetic oligonucleotide
uaaauucgaucauacugau

SEQ ID NO: 2546211 - RNA, 19 nt, Artificial Sequence
  Description of Artificial Sequence: Synthetic oligonucleotide
ucuaagugugcgucgaaua

SEQ ID NO: 2546212 - RNA, 19 nt, Artificial Sequence
  Description of Artificial Sequence: Synthetic oligonucleotide
uggccuacauuuucaaaga

SEQ ID NO: 2546213 - RNA, 19 nt, Artificial Sequence
  Description of Artificial Sequence: Synthetic oligonucleotide
gaucauacugaugacuguc

SEQ ID NO: 2546214 - RNA, 19 nt, Artificial Sequence
  Description of Artificial Sequence: Synthetic oligonucleotide
uugccuagcaugaggaaau

SEQ ID NO: 2546215 - RNA, 19 nt, Artificial Sequence
  Description of Artificial Sequence: Synthetic oligonucleotide
guacuaguggagcaaagga

SEQ ID NO: 2546216 - RNA, 19 nt, Artificial Sequence
  Description of Artificial Sequence: Synthetic oligonucleotide
cuuugcggaauucccuugg

SEQ ID NO: 2546217 - RNA, 19 nt, Artificial Sequence
  Description of Artificial Sequence: Synthetic oligonucleotide
cuuagguggagcccuuugc

SEQ ID NO: 2546218 - RNA, 19 nt, Artificial Sequence
  Description of Artificial Sequence: Synthetic oligonucleotide
acauaauuaaaagucccaa

SEQ ID NO: 2546219 - RNA, 19 nt, Artificial Sequence
  Description of Artificial Sequence: Synthetic oligonucleotide
uggugugggucccagagau

SEQ ID NO: 2546220 - RNA, 19 nt, Artificial Sequence
  Description of Artificial Sequence: Synthetic oligonucleotide
ucugcacucagaagcaaau

SEQ ID NO: 2546221 - RNA, 19 nt, Artificial Sequence
  Description of Artificial Sequence: Synthetic oligonucleotide
aacugauccucuauaggca

SEQ ID NO: 2546222 - RNA, 19 nt, Artificial Sequence
  Description of Artificial Sequence: Synthetic oligonucleotide
uucgaucauacugaugacu

SEQ ID NO: 2546223 - RNA, 19 nt, Artificial Sequence
  Description of Artificial Sequence: Synthetic oligonucleotide
agaugaggugaguguggcc

SEQ ID NO: 2546224 - RNA, 19 nt, Artificial Sequence
  Description of Artificial Sequence: Synthetic oligonucleotide
gcgucgaauauaaauacgg

SEQ ID NO: 2546225 - RNA, 19 nt, Artificial Sequence
  Description of Artificial Sequence: Synthetic oligonucleotide
ccuagcaugaggaaaugag

SEQ ID NO: 2546226 - RNA, 19 nt, Artificial Sequence
  Description of Artificial Sequence: Synthetic oligonucleotide
uaguuuucgugauucuuuc

SEQ ID NO: 2546227 - RNA, 19 nt, Artificial Sequence
  Description of Artificial Sequence: Synthetic oligonucleotide
ucauguuaguuuucgugau

SEQ ID NO: 2546228 - RNA, 19 nt, Artificial Sequence
  Description of Artificial Sequence: Synthetic oligonucleotide
ucuuagguggagcccuuug

SEQ ID NO: 2546229 - RNA, 19 nt, Artificial Sequence
  Description of Artificial Sequence: Synthetic oligonucleotide
gugcgucgaauauaaauac

SEQ ID NO: 2546230 - RNA, 19 nt, Artificial Sequence
  Description of Artificial Sequence: Synthetic oligonucleotide
ccacauaauuaaaaguccc

SEQ ID NO: 2546231 - RNA, 19 nt, Artificial Sequence
  Description of Artificial Sequence: Synthetic oligonucleotide
uucgugauucuuucuggac

SEQ ID NO: 2546232 - RNA, 19 nt, Artificial Sequence
  Description of Artificial Sequence: Synthetic oligonucleotide
uuugcggaauucccuuggc

SEQ ID NO: 2546233 - RNA, 19 nt, Artificial Sequence
  Description of Artificial Sequence: Synthetic oligonucleotide
ggcaucuacauacagcuuc

SEQ ID NO: 2546234 - RNA, 19 nt, Artificial Sequence
  Description of Artificial Sequence: Synthetic oligonucleotide
uguguagagugcuugccua

SEQ ID NO: 2546235 - RNA, 19 nt, Artificial Sequence
  Description of Artificial Sequence: Synthetic oligonucleotide
ucccagagaucccacgaug

SEQ ID NO: 2546236 - RNA, 19 nt, Artificial Sequence
  Description of Artificial Sequence: Synthetic oligonucleotide
gaucccacgaugaugcuga

SEQ ID NO: 2546237 - RNA, 19 nt, Artificial Sequence
  Description of Artificial Sequence: Synthetic oligonucleotide
aucuguguuaacugauccu

SEQ ID NO: 2546238 - RNA, 19 nt, Artificial Sequence
  Description of Artificial Sequence: Synthetic oligonucleotide
caaguguuuuguccagucc

SEQ ID NO: 2546239 - RNA, 19 nt, Artificial Sequence
  Description of Artificial Sequence: Synthetic oligonucleotide
gaagcaaaugggacaauga

SEQ ID NO: 2546240 - RNA, 19 nt, Artificial Sequence
  Description of Artificial Sequence: Synthetic oligonucleotide
cuaggcuguacuaguggag

SEQ ID NO: 2546241 - RNA, 19 nt, Artificial Sequence
  Description of Artificial Sequence: Synthetic oligonucleotide
aucuaauacuauauaauua

SEQ ID NO: 2546242 - RNA, 19 nt, Artificial Sequence
  Description of Artificial Sequence: Synthetic oligonucleotide
aagugugcgucgaauauaa

SEQ ID NO: 2546243 - RNA, 19 nt, Artificial Sequence
  Description of Artificial Sequence: Synthetic oligonucleotide
uuguccaguccgcauaauc

SEQ ID NO: 2546244 - RNA, 19 nt, Artificial Sequence
  Description of Artificial Sequence: Synthetic oligonucleotide
gauucuuucuggacuccag

SEQ ID NO: 2546245 - RNA, 19 nt, Artificial Sequence
  Description of Artificial Sequence: Synthetic oligonucleotide
gugugggucccagagaucc

SEQ ID NO: 2546246 - RNA, 19 nt, Artificial Sequence
  Description of Artificial Sequence: Synthetic oligonucleotide
uguuaguuuucgugauucu

SEQ ID NO: 2546247 - RNA, 19 nt, Artificial Sequence
  Description of Artificial Sequence: Synthetic oligonucleotide
uguguuaacugauccucua

SEQ ID NO: 2546248 - RNA, 19 nt, Artificial Sequence
  Description of Artificial Sequence: Synthetic oligonucleotide
aagguuccuaauaggugag

SEQ ID NO: 2546249 - RNA, 19 nt, Artificial Sequence
  Description of Artificial Sequence: Synthetic oligonucleotide
aauacgggccaagucuuga

SEQ ID NO: 2546250 - RNA, 19 nt, Artificial Sequence
  Description of Artificial Sequence: Synthetic oligonucleotide
uuuaacacaaaggcaucua

SEQ ID NO: 2546251 - RNA, 19 nt, Artificial Sequence
  Description of Artificial Sequence: Synthetic oligonucleotide
gguuccuaauaggugaggg

SEQ ID NO: 2546252 - RNA, 19 nt, Artificial Sequence
  Description of Artificial Sequence: Synthetic oligonucleotide
uagaugaggugaguguggc

SEQ ID NO: 2546253 - RNA, 19 nt, Artificial Sequence
  Description of Artificial Sequence: Synthetic oligonucleotide
ucuucauguuaguuuucgu

SEQ ID NO: 2546254 - RNA, 19 nt, Artificial Sequence
  Description of Artificial Sequence: Synthetic oligonucleotide
uccaguccgcauaaucugu

SEQ ID NO: 2546255 - RNA, 19 nt, Artificial Sequence
  Description of Artificial Sequence: Synthetic oligonucleotide
acugauccucuauaggcau

SEQ ID NO: 2546256 - RNA, 19 nt, Artificial Sequence
  Description of Artificial Sequence: Synthetic oligonucleotide
aucucaucauugaugaagu

SEQ ID NO: 2546257 - RNA, 19 nt, Artificial Sequence
  Description of Artificial Sequence: Synthetic oligonucleotide
ugcuacugaagguuccuaa

SEQ ID NO: 2546258 - RNA, 19 nt, Artificial Sequence
  Description of Artificial Sequence: Synthetic oligonucleotide
gucuugaagauuccugaca

SEQ ID NO: 2546259 - RNA, 19 nt, Artificial Sequence
  Description of Artificial Sequence: Synthetic oligonucleotide
agucccaagaagugucuca

SEQ ID NO: 2546260 - RNA, 19 nt, Artificial Sequence
  Description of Artificial Sequence: Synthetic oligonucleotide
aaauucgaucauacugaug

SEQ ID NO: 2546261 - RNA, 19 nt, Artificial Sequence
  Description of Artificial Sequence: Synthetic oligonucleotide
gaugaggugaguguggccu

SEQ ID NO: 2546262 - RNA, 19 nt, Artificial Sequence
  Description of Artificial Sequence: Synthetic oligonucleotide
acggcuuacucacuaucug

SEQ ID NO: 2546263 - RNA, 19 nt, Artificial Sequence
  Description of Artificial Sequence: Synthetic oligonucleotide
guccaguccgcauaaucug

SEQ ID NO: 2546264 - RNA, 19 nt, Artificial Sequence
  Description of Artificial Sequence: Synthetic oligonucleotide
uaguggagcaaaggaaaca

SEQ ID NO: 2546265 - RNA, 19 nt, Artificial Sequence
  Description of Artificial Sequence: Synthetic oligonucleotide
ccuaccacggcuuacucac

SEQ ID NO: 2546266 - RNA, 19 nt, Artificial Sequence
  Description of Artificial Sequence: Synthetic oligonucleotide
auaggcaugaccaguacuu

SEQ ID NO: 2546267 - RNA, 19 nt, Artificial Sequence
  Description of Artificial Sequence: Synthetic oligonucleotide
aaaugagcuuggugugggu

SEQ ID NO: 2546268 - RNA, 19 nt, Artificial Sequence
  Description of Artificial Sequence: Synthetic oligonucleotide
uccgcauaaucuguguuaa

SEQ ID NO: 2546269 - RNA, 19 nt, Artificial Sequence
  Description of Artificial Sequence: Synthetic oligonucleotide
auaaucuguguuaacugau

SEQ ID NO: 2546270 - RNA, 19 nt, Artificial Sequence
  Description of Artificial Sequence: Synthetic oligonucleotide
aguuuucgugauucuuucu

SEQ ID NO: 2546271 - RNA, 19 nt, Artificial Sequence
  Description of Artificial Sequence: Synthetic oligonucleotide
agcccuuugcggaauuccc

SEQ ID NO: 2546272 - RNA, 19 nt, Artificial Sequence
  Description of Artificial Sequence: Synthetic oligonucleotide
uguuuuguccaguccgcau

SEQ ID NO: 2546273 - RNA, 19 nt, Artificial Sequence
  Description of Artificial Sequence: Synthetic oligonucleotide
gaagugucucagcuggcca

SEQ ID NO: 2546274 - RNA, 19 nt, Artificial Sequence
  Description of Artificial Sequence: Synthetic oligonucleotide
uugcggaauucccuuggcu

SEQ ID NO: 2546275 - RNA, 19 nt, Artificial Sequence
  Description of Artificial Sequence: Synthetic oligonucleotide
uccucuuagguggagcccu

SEQ ID NO: 2546276 - RNA, 19 nt, Artificial Sequence
  Description of Artificial Sequence: Synthetic oligonucleotide
acaaucuacuguguagagu

SEQ ID NO: 2546277 - RNA, 19 nt, Artificial Sequence
  Description of Artificial Sequence: Synthetic oligonucleotide
acgggccaagucuugaaga

SEQ ID NO: 2546278 - RNA, 19 nt, Artificial Sequence
  Description of Artificial Sequence: Synthetic oligonucleotide
ugagcaagaucuucauguu

SEQ ID NO: 2546279 - RNA, 19 nt, Artificial Sequence
  Description of Artificial Sequence: Synthetic oligonucleotide
gaauauaaauacgggccaa

SEQ ID NO: 2546280 - RNA, 19 nt, Artificial Sequence
  Description of Artificial Sequence: Synthetic oligonucleotide
ucccaaguguuuuguccag

SEQ ID NO: 2546281 - RNA, 19 nt, Artificial Sequence
  Description of Artificial Sequence: Synthetic oligonucleotide
agguggagcccuuugcgga

SEQ ID NO: 2546282 - RNA, 19 nt, Artificial Sequence
  Description of Artificial Sequence: Synthetic oligonucleotide
uucuuacuaggcuguacua

SEQ ID NO: 2546283 - RNA, 19 nt, Artificial Sequence
  Description of Artificial Sequence: Synthetic oligonucleotide
cugaagguuccuaauaggu

SEQ ID NO: 2546284 - RNA, 19 nt, Artificial Sequence
  Description of Artificial Sequence: Synthetic oligonucleotide
ugcuuucccaaguguuuug

SEQ ID NO: 2546285 - RNA, 19 nt, Artificial Sequence
  Description of Artificial Sequence: Synthetic oligonucleotide
gaaguuucuaagugugcgu

SEQ ID NO: 2546286 - RNA, 19 nt, Artificial Sequence
  Description of Artificial Sequence: Synthetic oligonucleotide
cuguacuaguggagcaaag

SEQ ID NO: 2546287 - RNA, 19 nt, Artificial Sequence
  Description of Artificial Sequence: Synthetic oligonucleotide
cuacuguguagagugcuug

SEQ ID NO: 2546288 - RNA, 19 nt, Artificial Sequence
  Description of Artificial Sequence: Synthetic oligonucleotide
uguggccuacauuuucaaa

SEQ ID NO: 2546289 - RNA, 19 nt, Artificial Sequence
  Description of Artificial Sequence: Synthetic oligonucleotide
gcaugaggaaaugagcuug

SEQ ID NO: 2546290 - RNA, 19 nt, Artificial Sequence
  Description of Artificial Sequence: Synthetic oligonucleotide
cuauaggcaugaccaguac

SEQ ID NO: 2546291 - RNA, 19 nt, Artificial Sequence
  Description of Artificial Sequence: Synthetic oligonucleotide
aucuacuguguagagugcu

SEQ ID NO: 2546292 - RNA, 19 nt, Artificial Sequence
  Description of Artificial Sequence: Synthetic oligonucleotide
ugccauuaucauucuuacu

SEQ ID NO: 2546293 - RNA, 19 nt, Artificial Sequence
  Description of Artificial Sequence: Synthetic oligonucleotide
acagaauccggugugccau

SEQ ID NO: 2546294 - RNA, 19 nt, Artificial Sequence
  Description of Artificial Sequence: Synthetic oligonucleotide
uuggugugggucccagaga

SEQ ID NO: 2546295 - RNA, 19 nt, Artificial Sequence
  Description of Artificial Sequence: Synthetic oligonucleotide
cuuacuaggcuguacuagu

SEQ ID NO: 2546296 - RNA, 19 nt, Artificial Sequence
  Description of Artificial Sequence: Synthetic oligonucleotide
uaagugugcgucgaauaua

SEQ ID NO: 2546297 - RNA, 19 nt, Artificial Sequence
  Description of Artificial Sequence: Synthetic oligonucleotide
uacauacagcuuccaugac

SEQ ID NO: 2546298 - RNA, 19 nt, Artificial Sequence
  Description of Artificial Sequence: Synthetic oligonucleotide
aaauacgggccaagucuug

SEQ ID NO: 2546299 - RNA, 19 nt, Artificial Sequence
  Description of Artificial Sequence: Synthetic oligonucleotide
uucuaagugugcgucgaau

SEQ ID NO: 2546300 - RNA, 19 nt, Artificial Sequence
  Description of Artificial Sequence: Synthetic oligonucleotide
uuucuaagugugcgucgaa

SEQ ID NO: 2546301 - RNA, 19 nt, Artificial Sequence
  Description of Artificial Sequence: Synthetic oligonucleotide
agcuccacaguaaauucga

SEQ ID NO: 2546302 - RNA, 19 nt, Artificial Sequence
  Description of Artificial Sequence: Synthetic oligonucleotide
cagagaucccacgaugaug

SEQ ID NO: 2546303 - RNA, 19 nt, Artificial Sequence
  Description of Artificial Sequence: Synthetic oligonucleotide
guuucuaagugugcgucga

SEQ ID NO: 2546304 - RNA, 19 nt, Artificial Sequence
  Description of Artificial Sequence: Synthetic oligonucleotide
cgucgaauauaaauacggg

SEQ ID NO: 2546305 - RNA, 19 nt, Artificial Sequence
  Description of Artificial Sequence: Synthetic oligonucleotide
ucccaagaagugucucagc

SEQ ID NO: 2546306 - RNA, 19 nt, Artificial Sequence
  Description of Artificial Sequence: Synthetic oligonucleotide
uucccugcuacugaagguu

SEQ ID NO: 2546307 - RNA, 19 nt, Artificial Sequence
  Description of Artificial Sequence: Synthetic oligonucleotide
cauucuuacuaggcuguac

SEQ ID NO: 2546308 - RNA, 19 nt, Artificial Sequence
  Description of Artificial Sequence: Synthetic oligonucleotide
gagcccuuugcggaauucc

SEQ ID NO: 2546309 - RNA, 19 nt, Artificial Sequence
  Description of Artificial Sequence: Synthetic oligonucleotide
aguguggccuacauuuuca

SEQ ID NO: 2546310 - RNA, 19 nt, Artificial Sequence
  Description of Artificial Sequence: Synthetic oligonucleotide
agaucccacgaugaugcug

SEQ ID NO: 2546311 - RNA, 19 nt, Artificial Sequence
  Description of Artificial Sequence: Synthetic oligonucleotide
uggcuugcaucucaucauu

SEQ ID NO: 2546312 - RNA, 19 nt, Artificial Sequence
  Description of Artificial Sequence: Synthetic oligonucleotide
agccccacagaauccggug

SEQ ID NO: 2546313 - RNA, 19 nt, Artificial Sequence
  Description of Artificial Sequence: Synthetic oligonucleotide
gugugcgucgaauauaaau

SEQ ID NO: 2546314 - RNA, 19 nt, Artificial Sequence
  Description of Artificial Sequence: Synthetic oligonucleotide
uaccacggcuuacucacua

SEQ ID NO: 2546315 - RNA, 19 nt, Artificial Sequence
  Description of Artificial Sequence: Synthetic oligonucleotide
uucuacuagaaagguucaa

SEQ ID NO: 2546316 - RNA, 19 nt, Artificial Sequence
  Description of Artificial Sequence: Synthetic oligonucleotide
gguucaaaauagaugaggu

SEQ ID NO: 2546317 - RNA, 19 nt, Artificial Sequence
  Description of Artificial Sequence: Synthetic oligonucleotide
gagcaagaucuucauguua

SEQ ID NO: 2546318 - RNA, 19 nt, Artificial Sequence
  Description of Artificial Sequence: Synthetic oligonucleotide
ucccugcuacugaagguuc

SEQ ID NO: 2546319 - RNA, 19 nt, Artificial Sequence
  Description of Artificial Sequence: Synthetic oligonucleotide
aguccgcauaaucuguguu

SEQ ID NO: 2546320 - RNA, 19 nt, Artificial Sequence
  Description of Artificial Sequence: Synthetic oligonucleotide
ggcaugaccaguacuuccc

SEQ ID NO: 2546321 - RNA, 19 nt, Artificial Sequence
  Description of Artificial Sequence: Synthetic oligonucleotide
cuuacucacuaucugcacu

SEQ ID NO: 2546322 - RNA, 19 nt, Artificial Sequence
  Description of Artificial Sequence: Synthetic oligonucleotide
uuccucuuagguggagccc

SEQ ID NO: 2546323 - RNA, 19 nt, Artificial Sequence
  Description of Artificial Sequence: Synthetic oligonucleotide
ugggacaaugaaugucuuu

SEQ ID NO: 2546324 - RNA, 19 nt, Artificial Sequence
  Description of Artificial Sequence: Synthetic oligonucleotide
cucagcuggccacaucauc

SEQ ID NO: 2546325 - RNA, 19 nt, Artificial Sequence
  Description of Artificial Sequence: Synthetic oligonucleotide
auccggugugccauuauca

SEQ ID NO: 2546326 - RNA, 19 nt, Artificial Sequence
  Description of Artificial Sequence: Synthetic oligonucleotide
aguuucuacuagaaagguu

SEQ ID NO: 2546327 - RNA, 19 nt, Artificial Sequence
  Description of Artificial Sequence: Synthetic oligonucleotide
cggugugccauuaucauuc

SEQ ID NO: 2546328 - RNA, 19 nt, Artificial Sequence
  Description of Artificial Sequence: Synthetic oligonucleotide
gcggaauucccuuggcuug

SEQ ID NO: 2546329 - RNA, 19 nt, Artificial Sequence
  Description of Artificial Sequence: Synthetic oligonucleotide
guccgcauaaucuguguua

SEQ ID NO: 2546330 - RNA, 19 nt, Artificial Sequence
  Description of Artificial Sequence: Synthetic oligonucleotide
ggacaaugaaugucuuuuc

SEQ ID NO: 2546331 - RNA, 19 nt, Artificial Sequence
  Description of Artificial Sequence: Synthetic oligonucleotide
gcaaaggaaacagcaagga

SEQ ID NO: 2546332 - RNA, 19 nt, Artificial Sequence
  Description of Artificial Sequence: Synthetic oligonucleotide
uaggcaugaccaguacuuc

SEQ ID NO: 2546333 - RNA, 19 nt, Artificial Sequence
  Description of Artificial Sequence: Synthetic oligonucleotide
gaaugucuuuucaaaucua

SEQ ID NO: 2546334 - RNA, 19 nt, Artificial Sequence
  Description of Artificial Sequence: Synthetic oligonucleotide
uacucacuaucugcacuca

SEQ ID NO: 2546335 - RNA, 19 nt, Artificial Sequence
  Description of Artificial Sequence: Synthetic oligonucleotide
cuaauaggugagggucacc

SEQ ID NO: 2546336 - RNA, 19 nt, Artificial Sequence
  Description of Artificial Sequence: Synthetic oligonucleotide
guuccuaauaggugagggu

SEQ ID NO: 2546337 - RNA, 19 nt, Artificial Sequence
  Description of Artificial Sequence: Synthetic oligonucleotide
auacgggccaagucuugaa

SEQ ID NO: 2546338 - RNA, 19 nt, Artificial Sequence
  Description of Artificial Sequence: Synthetic oligonucleotide
cacagaauccggugugcca

SEQ ID NO: 2546339 - RNA, 19 nt, Artificial Sequence
  Description of Artificial Sequence: Synthetic oligonucleotide
acgaugaugcugaaccaaa

SEQ ID NO: 2546340 - RNA, 19 nt, Artificial Sequence
  Description of Artificial Sequence: Synthetic oligonucleotide
cuaagugugcgucgaauau

SEQ ID NO: 2546341 - RNA, 19 nt, Artificial Sequence
  Description of Artificial Sequence: Synthetic oligonucleotide
uaucugcacucagaagcaa

SEQ ID NO: 2546342 - RNA, 19 nt, Artificial Sequence
  Description of Artificial Sequence: Synthetic oligonucleotide
agugucucagcuggccaca

SEQ ID NO: 2546343 - RNA, 19 nt, Artificial Sequence
  Description of Artificial Sequence: Synthetic oligonucleotide
ggcuuacucacuaucugca

SEQ ID NO: 2546344 - RNA, 19 nt, Artificial Sequence
  Description of Artificial Sequence: Synthetic oligonucleotide
gcuuacucacuaucugcac

SEQ ID NO: 2546345 - RNA, 19 nt, Artificial Sequence
  Description of Artificial Sequence: Synthetic oligonucleotide
ugccuagcaugaggaaaug

SEQ ID NO: 2546346 - RNA, 19 nt, Artificial Sequence
  Description of Artificial Sequence: Synthetic oligonucleotide
gccuacauuuucaaagaca

SEQ ID NO: 2546347 - RNA, 19 nt, Artificial Sequence
  Description of Artificial Sequence: Synthetic oligonucleotide
ggccuacauuuucaaagac

SEQ ID NO: 2546348 - RNA, 19 nt, Artificial Sequence
  Description of Artificial Sequence: Synthetic oligonucleotide
ggucccagagaucccacga

SEQ ID NO: 2546349 - RNA, 19 nt, Artificial Sequence
  Description of Artificial Sequence: Synthetic oligonucleotide
ugggucccagagaucccac

SEQ ID NO: 2546350 - RNA, 19 nt, Artificial Sequence
  Description of Artificial Sequence: Synthetic oligonucleotide
cccaacuuugagcaagauc

SEQ ID NO: 2546351 - RNA, 19 nt, Artificial Sequence
  Description of Artificial Sequence: Synthetic oligonucleotide
gagggucaccuaccacggc

SEQ ID NO: 2546352 - RNA, 19 nt, Artificial Sequence
  Description of Artificial Sequence: Synthetic oligonucleotide
gcaugaccaguacuucccc

SEQ ID NO: 2546353 - RNA, 19 nt, Artificial Sequence
  Description of Artificial Sequence: Synthetic oligonucleotide
aucugcacucagaagcaaa

SEQ ID NO: 2546354 - RNA, 19 nt, Artificial Sequence
  Description of Artificial Sequence: Synthetic oligonucleotide
ccucuauaggcaugaccag

SEQ ID NO: 2546355 - RNA, 19 nt, Artificial Sequence
  Description of Artificial Sequence: Synthetic oligonucleotide
guuaguuuucgugauucuu

SEQ ID NO: 2546356 - RNA, 19 nt, Artificial Sequence
  Description of Artificial Sequence: Synthetic oligonucleotide
accacggcuuacucacuau

SEQ ID NO: 2546357 - RNA, 19 nt, Artificial Sequence
  Description of Artificial Sequence: Synthetic oligonucleotide
cggcuuacucacuaucugc

SEQ ID NO: 2546358 - RNA, 19 nt, Artificial Sequence
  Description of Artificial Sequence: Synthetic oligonucleotide
caguaaauucgaucauacu

SEQ ID NO: 2546359 - RNA, 19 nt, Artificial Sequence
  Description of Artificial Sequence: Synthetic oligonucleotide
cacgaugaugcugaaccaa

SEQ ID NO: 2546360 - RNA, 19 nt, Artificial Sequence
  Description of Artificial Sequence: Synthetic oligonucleotide
cuguguuaacugauccucu

SEQ ID NO: 2546361 - RNA, 19 nt, Artificial Sequence
  Description of Artificial Sequence: Synthetic oligonucleotide
gggucccagagaucccacg

SEQ ID NO: 2546362 - RNA, 19 nt, Artificial Sequence
  Description of Artificial Sequence: Synthetic oligonucleotide
guguuaacugauccucuau

SEQ ID NO: 2546363 - RNA, 19 nt, Artificial Sequence
  Description of Artificial Sequence: Synthetic oligonucleotide
agcuuggugugggucccag

SEQ ID NO: 2546364 - RNA, 19 nt, Artificial Sequence
  Description of Artificial Sequence: Synthetic oligonucleotide
cuguguagagugcuugccu

SEQ ID NO: 2546365 - RNA, 19 nt, Artificial Sequence
  Description of Artificial Sequence: Synthetic oligonucleotide
guguggccuacauuuucaa

SEQ ID NO: 2546366 - RNA, 19 nt, Artificial Sequence
  Description of Artificial Sequence: Synthetic oligonucleotide
gauccucuauaggcaugac

SEQ ID NO: 2546367 - RNA, 19 nt, Artificial Sequence
  Description of Artificial Sequence: Synthetic oligonucleotide
cucuauaggcaugaccagu

SEQ ID NO: 2546368 - RNA, 19 nt, Artificial Sequence
  Description of Artificial Sequence: Synthetic oligonucleotide
ccuaauaggugagggucac

SEQ ID NO: 2546369 - RNA, 19 nt, Artificial Sequence
  Description of Artificial Sequence: Synthetic oligonucleotide
ggugagggucaccuaccac

SEQ ID NO: 2546370 - RNA, 19 nt, Artificial Sequence
  Description of Artificial Sequence: Synthetic oligonucleotide
caaaauagaugaggugagu

SEQ ID NO: 2546371 - RNA, 19 nt, Artificial Sequence
  Description of Artificial Sequence: Synthetic oligonucleotide
caguuucuacuagaaaggu

SEQ ID NO: 2546372 - RNA, 19 nt, Artificial Sequence
  Description of Artificial Sequence: Synthetic oligonucleotide
gucaccuaccacggcuuac

SEQ ID NO: 2546373 - RNA, 19 nt, Artificial Sequence
  Description of Artificial Sequence: Synthetic oligonucleotide
ccuuugcggaauucccuug

SEQ ID NO: 2546374 - RNA, 19 nt, Artificial Sequence
  Description of Artificial Sequence: Synthetic oligonucleotide
uuuguccaguccgcauaau

SEQ ID NO: 2546375 - RNA, 19 nt, Artificial Sequence
  Description of Artificial Sequence: Synthetic oligonucleotide
cccagagaucccacgauga

SEQ ID NO: 2546376 - RNA, 19 nt, Artificial Sequence
  Description of Artificial Sequence: Synthetic oligonucleotide
caccuaccacggcuuacuc

SEQ ID NO: 2546377 - RNA, 19 nt, Artificial Sequence
  Description of Artificial Sequence: Synthetic oligonucleotide
agaauccggugugccauua

SEQ ID NO: 2546378 - RNA, 19 nt, Artificial Sequence
  Description of Artificial Sequence: Synthetic oligonucleotide
uucccuuggcuugcaucuc

SEQ ID NO: 2546379 - RNA, 19 nt, Artificial Sequence
  Description of Artificial Sequence: Synthetic oligonucleotide
uggagcccuuugcggaauu

SEQ ID NO: 2546380 - RNA, 19 nt, Artificial Sequence
  Description of Artificial Sequence: Synthetic oligonucleotide
cugcuuaacucucuuucuu

SEQ ID NO: 2546381 - RNA, 19 nt, Artificial Sequence
  Description of Artificial Sequence: Synthetic oligonucleotide
caucuacauacagcuucca

SEQ ID NO: 2546382 - RNA, 19 nt, Artificial Sequence
  Description of Artificial Sequence: Synthetic oligonucleotide
caagaucuucauguuaguu

SEQ ID NO: 2546383 - RNA, 19 nt, Artificial Sequence
  Description of Artificial Sequence: Synthetic oligonucleotide
ccccacagaauccggugug

SEQ ID NO: 2546384 - RNA, 19 nt, Artificial Sequence
  Description of Artificial Sequence: Synthetic oligonucleotide
ccacggcuuacucacuauc

SEQ ID NO: 2546385 - RNA, 19 nt, Artificial Sequence
  Description of Artificial Sequence: Synthetic oligonucleotide
cauguuaguuuucgugauu

SEQ ID NO: 2546386 - RNA, 19 nt, Artificial Sequence
  Description of Artificial Sequence: Synthetic oligonucleotide
augggacaaugaaugucuu

SEQ ID NO: 2546387 - RNA, 19 nt, Artificial Sequence
  Description of Artificial Sequence: Synthetic oligonucleotide
gaggugaguguggccuaca

SEQ ID NO: 2546388 - RNA, 19 nt, Artificial Sequence
  Description of Artificial Sequence: Synthetic oligonucleotide
gccaagucuugaagauucc

SEQ ID NO: 2546389 - RNA, 19 nt, Artificial Sequence
  Description of Artificial Sequence: Synthetic oligonucleotide
gcuguacuaguggagcaaa

SEQ ID NO: 2546390 - RNA, 19 nt, Artificial Sequence
  Description of Artificial Sequence: Synthetic oligonucleotide
ggacuccagcuccacagua

SEQ ID NO: 2546391 - RNA, 19 nt, Artificial Sequence
  Description of Artificial Sequence: Synthetic oligonucleotide
caucaucuucccugcuacu

SEQ ID NO: 2546392 - RNA, 19 nt, Artificial Sequence
  Description of Artificial Sequence: Synthetic oligonucleotide
gcaagaucuucauguuagu

SEQ ID NO: 2546393 - RNA, 19 nt, Artificial Sequence
  Description of Artificial Sequence: Synthetic oligonucleotide
ggcuguacuaguggagcaa

SEQ ID NO: 2546394 - RNA, 19 nt, Artificial Sequence
  Description of Artificial Sequence: Synthetic oligonucleotide
gucccagagaucccacgau

SEQ ID NO: 2546395 - RNA, 19 nt, Artificial Sequence
  Description of Artificial Sequence: Synthetic oligonucleotide
cgcauaaucuguguuaacu

SEQ ID NO: 2546396 - RNA, 19 nt, Artificial Sequence
  Description of Artificial Sequence: Synthetic oligonucleotide
agugugcgucgaauauaaa

SEQ ID NO: 2546397 - RNA, 19 nt, Artificial Sequence
  Description of Artificial Sequence: Synthetic oligonucleotide
gccuagcaugaggaaauga

SEQ ID NO: 2546398 - RNA, 19 nt, Artificial Sequence
  Description of Artificial Sequence: Synthetic oligonucleotide
ccacgaugaugcugaacca

SEQ ID NO: 2546399 - RNA, 19 nt, Artificial Sequence
  Description of Artificial Sequence: Synthetic oligonucleotide
ccgcauaaucuguguuaac

SEQ ID NO: 2546400 - RNA, 19 nt, Artificial Sequence
  Description of Artificial Sequence: Synthetic oligonucleotide
aucccacgaugaugcugaa

SEQ ID NO: 2546401 - RNA, 19 nt, Artificial Sequence
  Description of Artificial Sequence: Synthetic oligonucleotide
aggcaucuacauacagcuu

SEQ ID NO: 2546402 - RNA, 19 nt, Artificial Sequence
  Description of Artificial Sequence: Synthetic oligonucleotide
cggaauucccuuggcuugc

SEQ ID NO: 2546403 - RNA, 19 nt, Artificial Sequence
  Description of Artificial Sequence: Synthetic oligonucleotide
ggugugccauuaucauucu

SEQ ID NO: 2546404 - RNA, 19 nt, Artificial Sequence
  Description of Artificial Sequence: Synthetic oligonucleotide
ggugaguguggccuacauu

SEQ ID NO: 2546405 - RNA, 19 nt, Artificial Sequence
  Description of Artificial Sequence: Synthetic oligonucleotide
ggaauucccuuggcuugca

SEQ ID NO: 2546406 - RNA, 19 nt, Artificial Sequence
  Description of Artificial Sequence: Synthetic oligonucleotide
gcuuggugugggucccaga

SEQ ID NO: 2546407 - RNA, 19 nt, Artificial Sequence
  Description of Artificial Sequence: Synthetic oligonucleotide
cuaccacggcuuacucacu

SEQ ID NO: 2546408 - RNA, 19 nt, Artificial Sequence
  Description of Artificial Sequence: Synthetic oligonucleotide
gccccacagaauccggugu

SEQ ID NO: 2546409 - RNA, 19 nt, Artificial Sequence
  Description of Artificial Sequence: Synthetic oligonucleotide
ccaagucuugaagauuccu

SEQ ID NO: 2546410 - RNA, 19 nt, Artificial Sequence
  Description of Artificial Sequence: Synthetic oligonucleotide
cagaauccggugugccauu

SEQ ID NO: 2546411 - RNA, 19 nt, Artificial Sequence
  Description of Artificial Sequence: Synthetic oligonucleotide
gcccuuugcggaauucccu

SEQ ID NO: 2546412 - RNA, 19 nt, Artificial Sequence
  Description of Artificial Sequence: Synthetic oligonucleotide
ccacaguaaauucgaucau

SEQ ID NO: 2546413 - RNA, 19 nt, Artificial Sequence
  Description of Artificial Sequence: Synthetic oligonucleotide
cgaucauacugaugacugu

SEQ ID NO: 2546414 - RNA, 19 nt, Artificial Sequence
  Description of Artificial Sequence: Synthetic oligonucleotide
ccagagaucccacgaugau

SEQ ID NO: 2546415 - RNA, 19 nt, Artificial Sequence
  Description of Artificial Sequence: Synthetic oligonucleotide
cccuuugcggaauucccuu

SEQ ID NO: 2546416 - RNA, 19 nt, Artificial Sequence
  Description of Artificial Sequence: Synthetic oligonucleotide
guggagcccuuugcggaau

SEQ ID NO: 2546417 - RNA, 19 nt, Artificial Sequence
  Description of Artificial Sequence: Synthetic oligonucleotide
gugucucagcuggccacau

SEQ ID NO: 2546418 - RNA, 19 nt, Artificial Sequence
  Description of Artificial Sequence: Synthetic oligonucleotide
cgggccaagucuugaagau

SEQ ID NO: 2546419 - RNA, 19 nt, Artificial Sequence
  Description of Artificial Sequence: Synthetic oligonucleotide
ccggugugccauuaucauu

SEQ ID NO: 2546420 - RNA, 19 nt, Artificial Sequence
  Description of Artificial Sequence: Synthetic oligonucleotide
gcuccacaguaaauucgau

SEQ ID NO: 2546421 - RNA, 19 nt, Artificial Sequence
  Description of Artificial Sequence: Synthetic oligonucleotide
cucuuagguggagcccuuu

SEQ ID NO: 2546422 - RNA, 19 nt, Artificial Sequence
  Description of Artificial Sequence: Synthetic oligonucleotide
cccaaguguuuuguccagu

SEQ ID NO: 2546423 - RNA, 19 nt, Artificial Sequence
  Description of Artificial Sequence: Synthetic oligonucleotide
ccucuuagguggagcccuu

SEQ ID NO: 2546424 - RNA, 19 nt, Artificial Sequence
  Description of Artificial Sequence: Synthetic oligonucleotide
ccccaacuuugagcaagau

SEQ ID NO: 2546425 - RNA, 19 nt, Artificial Sequence
  Description of Artificial Sequence: Synthetic oligonucleotide
aacuacuuccuccucuucc

SEQ ID NO: 2546426 - RNA, 19 nt, Artificial Sequence
  Description of Artificial Sequence: Synthetic oligonucleotide
gaagaaaacuacuuccucc

SEQ ID NO: 2546427 - RNA, 19 nt, Artificial Sequence
  Description of Artificial Sequence: Synthetic oligonucleotide
ugcaaaguccccaaagagg

SEQ ID NO: 2546428 - RNA, 19 nt, Artificial Sequence
  Description of Artificial Sequence: Synthetic oligonucleotide
caugacucgaaguaggucc

SEQ ID NO: 2546429 - RNA, 19 nt, Artificial Sequence
  Description of Artificial Sequence: Synthetic oligonucleotide
ucuucuucccacuuaaacc

SEQ ID NO: 2546430 - RNA, 19 nt, Artificial Sequence
  Description of Artificial Sequence: Synthetic oligonucleotide
aagaaaacuacuuccuccu

SEQ ID NO: 2546431 - RNA, 19 nt, Artificial Sequence
  Description of Artificial Sequence: Synthetic oligonucleotide
aaguagguccaacugguuc

SEQ ID NO: 2546432 - RNA, 19 nt, Artificial Sequence
  Description of Artificial Sequence: Synthetic oligonucleotide
ucgaaguagguccaacugg

SEQ ID NO: 2546433 - RNA, 19 nt, Artificial Sequence
  Description of Artificial Sequence: Synthetic oligonucleotide
aacugguucuuuucucagc

SEQ ID NO: 2546434 - RNA, 19 nt, Artificial Sequence
  Description of Artificial Sequence: Synthetic oligonucleotide
aaccagaaggccuggaaug

SEQ ID NO: 2546435 - RNA, 19 nt, Artificial Sequence
  Description of Artificial Sequence: Synthetic oligonucleotide
ucccucaucugcuuguucg

SEQ ID NO: 2546436 - RNA, 19 nt, Artificial Sequence
  Description of Artificial Sequence: Synthetic oligonucleotide
acuccuuucuucuucccac

SEQ ID NO: 2546437 - RNA, 19 nt, Artificial Sequence
  Description of Artificial Sequence: Synthetic oligonucleotide
uucuucuucccacuuaaac

SEQ ID NO: 2546438 - RNA, 19 nt, Artificial Sequence
  Description of Artificial Sequence: Synthetic oligonucleotide
uuggcuacgugcauggcgc

SEQ ID NO: 2546439 - RNA, 19 nt, Artificial Sequence
  Description of Artificial Sequence: Synthetic oligonucleotide
gaacuggucuuccaugggg

SEQ ID NO: 2546440 - RNA, 19 nt, Artificial Sequence
  Description of Artificial Sequence: Synthetic oligonucleotide
aguagguccaacugguucu

SEQ ID NO: 2546441 - RNA, 19 nt, Artificial Sequence
  Description of Artificial Sequence: Synthetic oligonucleotide
ugugacacuccuuucuucu

SEQ ID NO: 2546442 - RNA, 19 nt, Artificial Sequence
  Description of Artificial Sequence: Synthetic oligonucleotide
cuuggugucgucccgggcg

SEQ ID NO: 2546443 - RNA, 19 nt, Artificial Sequence
  Description of Artificial Sequence: Synthetic oligonucleotide
cuucuucccacuuaaacca

SEQ ID NO: 2546444 - RNA, 19 nt, Artificial Sequence
  Description of Artificial Sequence: Synthetic oligonucleotide
gaauuuccucuucuugccg

SEQ ID NO: 2546445 - RNA, 19 nt, Artificial Sequence
  Description of Artificial Sequence: Synthetic oligonucleotide
ucccguagggugcaggccg

SEQ ID NO: 2546446 - RNA, 19 nt, Artificial Sequence
  Description of Artificial Sequence: Synthetic oligonucleotide
uguucaugacucgaaguag

SEQ ID NO: 2546447 - RNA, 19 nt, Artificial Sequence
  Description of Artificial Sequence: Synthetic oligonucleotide
uccagugggaagaaaacua

SEQ ID NO: 2546448 - RNA, 19 nt, Artificial Sequence
  Description of Artificial Sequence: Synthetic oligonucleotide
cuuggcuacgugcauggcg

SEQ ID NO: 2546449 - RNA, 19 nt, Artificial Sequence
  Description of Artificial Sequence: Synthetic oligonucleotide
uucagcucguucuuggcca

SEQ ID NO: 2546450 - RNA, 19 nt, Artificial Sequence
  Description of Artificial Sequence: Synthetic oligonucleotide
guucaugacucgaaguagg

SEQ ID NO: 2546451 - RNA, 19 nt, Artificial Sequence
  Description of Artificial Sequence: Synthetic oligonucleotide
ucuuacuguucaugacucg

SEQ ID NO: 2546452 - RNA, 19 nt, Artificial Sequence
  Description of Artificial Sequence: Synthetic oligonucleotide
cuucuggccuccaaagccg

SEQ ID NO: 2546453 - RNA, 19 nt, Artificial Sequence
  Description of Artificial Sequence: Synthetic oligonucleotide
aucugcuuguucguggccc

SEQ ID NO: 2546454 - RNA, 19 nt, Artificial Sequence
  Description of Artificial Sequence: Synthetic oligonucleotide
ucgaugagccauuccuugg

SEQ ID NO: 2546455 - RNA, 19 nt, Artificial Sequence
  Description of Artificial Sequence: Synthetic oligonucleotide
aaacuacuuccuccucuuc

SEQ ID NO: 2546456 - RNA, 19 nt, Artificial Sequence
  Description of Artificial Sequence: Synthetic oligonucleotide
ucccacacgagguuggucu

SEQ ID NO: 2546457 - RNA, 19 nt, Artificial Sequence
  Description of Artificial Sequence: Synthetic oligonucleotide
aagcgguggagaccuuggc

SEQ ID NO: 2546458 - RNA, 19 nt, Artificial Sequence
  Description of Artificial Sequence: Synthetic oligonucleotide
aagaggggcuggaauuucc

SEQ ID NO: 2546459 - RNA, 19 nt, Artificial Sequence
  Description of Artificial Sequence: Synthetic oligonucleotide
acuguucaugacucgaagu

SEQ ID NO: 2546460 - RNA, 19 nt, Artificial Sequence
  Description of Artificial Sequence: Synthetic oligonucleotide
agaaaacuacuuccuccuc

SEQ ID NO: 2546461 - RNA, 19 nt, Artificial Sequence
  Description of Artificial Sequence: Synthetic oligonucleotide
cauggcgcggcccagcucc

SEQ ID NO: 2546462 - RNA, 19 nt, Artificial Sequence
  Description of Artificial Sequence: Synthetic oligonucleotide
accagaaggccuggaaugc

SEQ ID NO: 2546463 - RNA, 19 nt, Artificial Sequence
  Description of Artificial Sequence: Synthetic oligonucleotide
accuuggcuacgugcaugg

SEQ ID NO: 2546464 - RNA, 19 nt, Artificial Sequence
  Description of Artificial Sequence: Synthetic oligonucleotide
acgagguuggucuucuucu

SEQ ID NO: 2546465 - RNA, 19 nt, Artificial Sequence
  Description of Artificial Sequence: Synthetic oligonucleotide
acuuaaaccagaaggccug

SEQ ID NO: 2546466 - RNA, 19 nt, Artificial Sequence
  Description of Artificial Sequence: Synthetic oligonucleotide
gacacuccuuucuucuucc

SEQ ID NO: 2546467 - RNA, 19 nt, Artificial Sequence
  Description of Artificial Sequence: Synthetic oligonucleotide
uucaugacucgaaguaggu

SEQ ID NO: 2546468 - RNA, 19 nt, Artificial Sequence
  Description of Artificial Sequence: Synthetic oligonucleotide
ucuucuugguccuccuccc

SEQ ID NO: 2546469 - RNA, 19 nt, Artificial Sequence
  Description of Artificial Sequence: Synthetic oligonucleotide
uccuggaagcgccccaccg

SEQ ID NO: 2546470 - RNA, 19 nt, Artificial Sequence
  Description of Artificial Sequence: Synthetic oligonucleotide
aaagaggggcuggaauuuc

SEQ ID NO: 2546471 - RNA, 19 nt, Artificial Sequence
  Description of Artificial Sequence: Synthetic oligonucleotide
uccaaagccgccuuuccuc

SEQ ID NO: 2546472 - RNA, 19 nt, Artificial Sequence
  Description of Artificial Sequence: Synthetic oligonucleotide
cucgaaguagguccaacug

SEQ ID NO: 2546473 - RNA, 19 nt, Artificial Sequence
  Description of Artificial Sequence: Synthetic oligonucleotide
uuacuguucaugacucgaa

SEQ ID NO: 2546474 - RNA, 19 nt, Artificial Sequence
  Description of Artificial Sequence: Synthetic oligonucleotide
uucuccuugggcaggcucu

SEQ ID NO: 2546475 - RNA, 19 nt, Artificial Sequence
  Description of Artificial Sequence: Synthetic oligonucleotide
uucuucccacuuaaaccag

SEQ ID NO: 2546476 - RNA, 19 nt, Artificial Sequence
  Description of Artificial Sequence: Synthetic oligonucleotide
cccacuuaaaccagaaggc

SEQ ID NO: 2546477 - RNA, 19 nt, Artificial Sequence
  Description of Artificial Sequence: Synthetic oligonucleotide
augcuucuggccuccaaag

SEQ ID NO: 2546478 - RNA, 19 nt, Artificial Sequence
  Description of Artificial Sequence: Synthetic oligonucleotide
aggccuggaaugcuucugg

SEQ ID NO: 2546479 - RNA, 19 nt, Artificial Sequence
  Description of Artificial Sequence: Synthetic oligonucleotide
uguaccuugugcgcucggg

SEQ ID NO: 2546480 - RNA, 19 nt, Artificial Sequence
  Description of Artificial Sequence: Synthetic oligonucleotide
acucgaaguagguccaacu

SEQ ID NO: 2546481 - RNA, 19 nt, Artificial Sequence
  Description of Artificial Sequence: Synthetic oligonucleotide
ugacacuccuuucuucuuc

SEQ ID NO: 2546482 - RNA, 19 nt, Artificial Sequence
  Description of Artificial Sequence: Synthetic oligonucleotide
uuacucuggugucccguag

SEQ ID NO: 2546483 - RNA, 19 nt, Artificial Sequence
  Description of Artificial Sequence: Synthetic oligonucleotide
uucuuuucucagcugcaaa

SEQ ID NO: 2546484 - RNA, 19 nt, Artificial Sequence
  Description of Artificial Sequence: Synthetic oligonucleotide
ugcucccagguccuugccg

SEQ ID NO: 2546485 - RNA, 19 nt, Artificial Sequence
  Description of Artificial Sequence: Synthetic oligonucleotide
uaccuugugcgcucgggcc

SEQ ID NO: 2546486 - RNA, 19 nt, Artificial Sequence
  Description of Artificial Sequence: Synthetic oligonucleotide
gaugagccauuccuuggug

SEQ ID NO: 2546487 - RNA, 19 nt, Artificial Sequence
  Description of Artificial Sequence: Synthetic oligonucleotide
ugcuucuggccuccaaagc

SEQ ID NO: 2546488 - RNA, 19 nt, Artificial Sequence
  Description of Artificial Sequence: Synthetic oligonucleotide
aggggcuggaauuuccucu

SEQ ID NO: 2546489 - RNA, 19 nt, Artificial Sequence
  Description of Artificial Sequence: Synthetic oligonucleotide
uccagcugaggcuucuuac

SEQ ID NO: 2546490 - RNA, 19 nt, Artificial Sequence
  Description of Artificial Sequence: Synthetic oligonucleotide
cacgcguucccucuuggcc

SEQ ID NO: 2546491 - RNA, 19 nt, Artificial Sequence
  Description of Artificial Sequence: Synthetic oligonucleotide
gaagcgguggagaccuugg

SEQ ID NO: 2546492 - RNA, 19 nt, Artificial Sequence
  Description of Artificial Sequence: Synthetic oligonucleotide
caacugguucuuuucucag

SEQ ID NO: 2546493 - RNA, 19 nt, Artificial Sequence
  Description of Artificial Sequence: Synthetic oligonucleotide
ucgucccacacgagguugg

SEQ ID NO: 2546494 - RNA, 19 nt, Artificial Sequence
  Description of Artificial Sequence: Synthetic oligonucleotide
cuugcucccagguccuugc

SEQ ID NO: 2546495 - RNA, 19 nt, Artificial Sequence
  Description of Artificial Sequence: Synthetic oligonucleotide
ucuucuugccggugccccg

SEQ ID NO: 2546496 - RNA, 19 nt, Artificial Sequence
  Description of Artificial Sequence: Synthetic oligonucleotide
gagguuggucuucuucuug

SEQ ID NO: 2546497 - RNA, 19 nt, Artificial Sequence
  Description of Artificial Sequence: Synthetic oligonucleotide
ugcaggccggcugagcugg

SEQ ID NO: 2546498 - RNA, 19 nt, Artificial Sequence
  Description of Artificial Sequence: Synthetic oligonucleotide
ucuugguccuccucccuca

SEQ ID NO: 2546499 - RNA, 19 nt, Artificial Sequence
  Description of Artificial Sequence: Synthetic oligonucleotide
ugucccguagggugcaggc

SEQ ID NO: 2546500 - RNA, 19 nt, Artificial Sequence
  Description of Artificial Sequence: Synthetic oligonucleotide
uccaacugguucuuuucuc

SEQ ID NO: 2546501 - RNA, 19 nt, Artificial Sequence
  Description of Artificial Sequence: Synthetic oligonucleotide
gaagcgccccaccgaagcg

SEQ ID NO: 2546502 - RNA, 19 nt, Artificial Sequence
  Description of Artificial Sequence: Synthetic oligonucleotide
caaaguccccaaagagggg

SEQ ID NO: 2546503 - RNA, 19 nt, Artificial Sequence
  Description of Artificial Sequence: Synthetic oligonucleotide
aacuggucuuccauggggu

SEQ ID NO: 2546504 - RNA, 19 nt, Artificial Sequence
  Description of Artificial Sequence: Synthetic oligonucleotide
uccgccuuuucucuugcuc

SEQ ID NO: 2546505 - RNA, 19 nt, Artificial Sequence
  Description of Artificial Sequence: Synthetic oligonucleotide
gcgaacuggucuuccaugg

SEQ ID NO: 2546506 - RNA, 19 nt, Artificial Sequence
  Description of Artificial Sequence: Synthetic oligonucleotide
cuggccacucaccucgucc

SEQ ID NO: 2546507 - RNA, 19 nt, Artificial Sequence
  Description of Artificial Sequence: Synthetic oligonucleotide
gagaccuuggcuacgugca

SEQ ID NO: 2546508 - RNA, 19 nt, Artificial Sequence
  Description of Artificial Sequence: Synthetic oligonucleotide
uggcccauuuuccuccucu

SEQ ID NO: 2546509 - RNA, 19 nt, Artificial Sequence
  Description of Artificial Sequence: Synthetic oligonucleotide
uuggugucgucccgggcgc

SEQ ID NO: 2546510 - RNA, 19 nt, Artificial Sequence
  Description of Artificial Sequence: Synthetic oligonucleotide
aagcgccccaccgaagcgg

SEQ ID NO: 2546511 - RNA, 19 nt, Artificial Sequence
  Description of Artificial Sequence: Synthetic oligonucleotide
cucaccucgucccacacga

SEQ ID NO: 2546512 - RNA, 19 nt, Artificial Sequence
  Description of Artificial Sequence: Synthetic oligonucleotide
ccaggcaccucgaugagcc

SEQ ID NO: 2546513 - RNA, 19 nt, Artificial Sequence
  Description of Artificial Sequence: Synthetic oligonucleotide
cuuacuguucaugacucga

SEQ ID NO: 2546514 - RNA, 19 nt, Artificial Sequence
  Description of Artificial Sequence: Synthetic oligonucleotide
caccucgucccacacgagg

SEQ ID NO: 2546515 - RNA, 19 nt, Artificial Sequence
  Description of Artificial Sequence: Synthetic oligonucleotide
uguucguggcccucgucac

SEQ ID NO: 2546516 - RNA, 19 nt, Artificial Sequence
  Description of Artificial Sequence: Synthetic oligonucleotide
uugccggugccccggggcg

SEQ ID NO: 2546517 - RNA, 19 nt, Artificial Sequence
  Description of Artificial Sequence: Synthetic oligonucleotide
accgaagcgguggagaccu

SEQ ID NO: 2546518 - RNA, 19 nt, Artificial Sequence
  Description of Artificial Sequence: Synthetic oligonucleotide
cuguucaugacucgaagua

SEQ ID NO: 2546519 - RNA, 19 nt, Artificial Sequence
  Description of Artificial Sequence: Synthetic oligonucleotide
ugggcaucuguaccuugug

SEQ ID NO: 2546520 - RNA, 19 nt, Artificial Sequence
  Description of Artificial Sequence: Synthetic oligonucleotide
ggaagaaaacuacuuccuc

SEQ ID NO: 2546521 - RNA, 19 nt, Artificial Sequence
  Description of Artificial Sequence: Synthetic oligonucleotide
uagggugcaggccggcuga

SEQ ID NO: 2546522 - RNA, 19 nt, Artificial Sequence
  Description of Artificial Sequence: Synthetic oligonucleotide
agcgguggagaccuuggcu

SEQ ID NO: 2546523 - RNA, 19 nt, Artificial Sequence
  Description of Artificial Sequence: Synthetic oligonucleotide
guaccuugugcgcucgggc

SEQ ID NO: 2546524 - RNA, 19 nt, Artificial Sequence
  Description of Artificial Sequence: Synthetic oligonucleotide
uucuggccuccaaagccgc

SEQ ID NO: 2546525 - RNA, 19 nt, Artificial Sequence
  Description of Artificial Sequence: Synthetic oligonucleotide
acucaccucgucccacacg

SEQ ID NO: 2546526 - RNA, 19 nt, Artificial Sequence
  Description of Artificial Sequence: Synthetic oligonucleotide
ucuguaccuugugcgcucg

SEQ ID NO: 2546527 - RNA, 19 nt, Artificial Sequence
  Description of Artificial Sequence: Synthetic oligonucleotide
cuggucuuccauggggucg

SEQ ID NO: 2546528 - RNA, 19 nt, Artificial Sequence
  Description of Artificial Sequence: Synthetic oligonucleotide
ugcuuguucguggcccucg

SEQ ID NO: 2546529 - RNA, 19 nt, Artificial Sequence
  Description of Artificial Sequence: Synthetic oligonucleotide
uccuuggugucgucccggg

SEQ ID NO: 2546530 - RNA, 19 nt, Artificial Sequence
  Description of Artificial Sequence: Synthetic oligonucleotide
cuggugucccguagggugc

SEQ ID NO: 2546531 - RNA, 19 nt, Artificial Sequence
  Description of Artificial Sequence: Synthetic oligonucleotide
acgcguucccucuuggccu

SEQ ID NO: 2546532 - RNA, 19 nt, Artificial Sequence
  Description of Artificial Sequence: Synthetic oligonucleotide
ucucuugcucccagguccu

SEQ ID NO: 2546533 - RNA, 19 nt, Artificial Sequence
  Description of Artificial Sequence: Synthetic oligonucleotide
aaggccuggaaugcuucug

SEQ ID NO: 2546534 - RNA, 19 nt, Artificial Sequence
  Description of Artificial Sequence: Synthetic oligonucleotide
aagccgcuuggcgaacugg

SEQ ID NO: 2546535 - RNA, 19 nt, Artificial Sequence
  Description of Artificial Sequence: Synthetic oligonucleotide
uuccuuggugucgucccgg

SEQ ID NO: 2546536 - RNA, 19 nt, Artificial Sequence
  Description of Artificial Sequence: Synthetic oligonucleotide
ucguucuuggccacgcguu

SEQ ID NO: 2546537 - RNA, 19 nt, Artificial Sequence
  Description of Artificial Sequence: Synthetic oligonucleotide
uccuccugcccuucuggcc

SEQ ID NO: 2546538 - RNA, 19 nt, Artificial Sequence
  Description of Artificial Sequence: Synthetic oligonucleotide
ucucucccuggcccggcgg

SEQ ID NO: 2546539 - RNA, 19 nt, Artificial Sequence
  Description of Artificial Sequence: Synthetic oligonucleotide
uuaaaccagaaggccugga

SEQ ID NO: 2546540 - RNA, 19 nt, Artificial Sequence
  Description of Artificial Sequence: Synthetic oligonucleotide
ugcgcucgggccagguucc

SEQ ID NO: 2546541 - RNA, 19 nt, Artificial Sequence
  Description of Artificial Sequence: Synthetic oligonucleotide
gguuggucuucuucuuggg

SEQ ID NO: 2546542 - RNA, 19 nt, Artificial Sequence
  Description of Artificial Sequence: Synthetic oligonucleotide
uccuccuuacucugguguc

SEQ ID NO: 2546543 - RNA, 19 nt, Artificial Sequence
  Description of Artificial Sequence: Synthetic oligonucleotide
cacgagguuggucuucuuc

SEQ ID NO: 2546544 - RNA, 19 nt, Artificial Sequence
  Description of Artificial Sequence: Synthetic oligonucleotide
cuuguagccccagcggcgc

SEQ ID NO: 2546545 - RNA, 19 nt, Artificial Sequence
  Description of Artificial Sequence: Synthetic oligonucleotide
uuggccacgcguucccucu

SEQ ID NO: 2546546 - RNA, 19 nt, Artificial Sequence
  Description of Artificial Sequence: Synthetic oligonucleotide
ggcuucuuacuguucauga

SEQ ID NO: 2546547 - RNA, 19 nt, Artificial Sequence
  Description of Artificial Sequence: Synthetic oligonucleotide
cacuuaaaccagaaggccu

SEQ ID NO: 2546548 - RNA, 19 nt, Artificial Sequence
  Description of Artificial Sequence: Synthetic oligonucleotide
gcucccagguccuugccgg

SEQ ID NO: 2546549 - RNA, 19 nt, Artificial Sequence
  Description of Artificial Sequence: Synthetic oligonucleotide
uucucucccuggcccggcg

SEQ ID NO: 2546550 - RNA, 19 nt, Artificial Sequence
  Description of Artificial Sequence: Synthetic oligonucleotide
ucuucucucccuggcccgg

SEQ ID NO: 2546551 - RNA, 19 nt, Artificial Sequence
  Description of Artificial Sequence: Synthetic oligonucleotide
cuugccggugccccggggc

SEQ ID NO: 2546552 - RNA, 19 nt, Artificial Sequence
  Description of Artificial Sequence: Synthetic oligonucleotide
uguagccccagcggcgccg

SEQ ID NO: 2546553 - RNA, 19 nt, Artificial Sequence
  Description of Artificial Sequence: Synthetic oligonucleotide
cucgucacguccagcugag

SEQ ID NO: 2546554 - RNA, 19 nt, Artificial Sequence
  Description of Artificial Sequence: Synthetic oligonucleotide
uggaaugcuucuggccucc

SEQ ID NO: 2546555 - RNA, 19 nt, Artificial Sequence
  Description of Artificial Sequence: Synthetic oligonucleotide
uccucccucaucugcuugu

SEQ ID NO: 2546556 - RNA, 19 nt, Artificial Sequence
  Description of Artificial Sequence: Synthetic oligonucleotide
ccagugggaagaaaacuac

SEQ ID NO: 2546557 - RNA, 19 nt, Artificial Sequence
  Description of Artificial Sequence: Synthetic oligonucleotide
uccuuacucuggugucccg

SEQ ID NO: 2546558 - RNA, 19 nt, Artificial Sequence
  Description of Artificial Sequence: Synthetic oligonucleotide
uuggcgaacuggucuucca

SEQ ID NO: 2546559 - RNA, 19 nt, Artificial Sequence
  Description of Artificial Sequence: Synthetic oligonucleotide
cucuucuugccggugcccc

SEQ ID NO: 2546560 - RNA, 19 nt, Artificial Sequence
  Description of Artificial Sequence: Synthetic oligonucleotide
guucguggcccucgucacg

SEQ ID NO: 2546561 - RNA, 19 nt, Artificial Sequence
  Description of Artificial Sequence: Synthetic oligonucleotide
uggcgaacuggucuuccau

SEQ ID NO: 2546562 - RNA, 19 nt, Artificial Sequence
  Description of Artificial Sequence: Synthetic oligonucleotide
uucguggcccucgucacgu

SEQ ID NO: 2546563 - RNA, 19 nt, Artificial Sequence
  Description of Artificial Sequence: Synthetic oligonucleotide
agaacagguccagugggaa

SEQ ID NO: 2546564 - RNA, 19 nt, Artificial Sequence
  Description of Artificial Sequence: Synthetic oligonucleotide
ccacuuaaaccagaaggcc

SEQ ID NO: 2546565 - RNA, 19 nt, Artificial Sequence
  Description of Artificial Sequence: Synthetic oligonucleotide
cuggaaugcuucuggccuc

SEQ ID NO: 2546566 - RNA, 19 nt, Artificial Sequence
  Description of Artificial Sequence: Synthetic oligonucleotide
cuccuuacucugguguccc

SEQ ID NO: 2546567 - RNA, 19 nt, Artificial Sequence
  Description of Artificial Sequence: Synthetic oligonucleotide
accuugugcgcucgggcca

SEQ ID NO: 2546568 - RNA, 19 nt, Artificial Sequence
  Description of Artificial Sequence: Synthetic oligonucleotide
gaccuuggcuacgugcaug

SEQ ID NO: 2546569 - RNA, 19 nt, Artificial Sequence
  Description of Artificial Sequence: Synthetic oligonucleotide
gaagccgcuuggcgaacug

SEQ ID NO: 2546570 - RNA, 19 nt, Artificial Sequence
  Description of Artificial Sequence: Synthetic oligonucleotide
ggcgccuucuccuugggca

SEQ ID NO: 2546571 - RNA, 19 nt, Artificial Sequence
  Description of Artificial Sequence: Synthetic oligonucleotide
uuggugugacacuccuuuc

SEQ ID NO: 2546572 - RNA, 19 nt, Artificial Sequence
  Description of Artificial Sequence: Synthetic oligonucleotide
cuuggugugacacuccuuu

SEQ ID NO: 2546573 - RNA, 19 nt, Artificial Sequence
  Description of Artificial Sequence: Synthetic oligonucleotide
aggcuucuuacuguucaug

SEQ ID NO: 2546574 - RNA, 19 nt, Artificial Sequence
  Description of Artificial Sequence: Synthetic oligonucleotide
cuucuugccggugccccgg

SEQ ID NO: 2546575 - RNA, 19 nt, Artificial Sequence
  Description of Artificial Sequence: Synthetic oligonucleotide
uggcuacgugcauggcgcg

SEQ ID NO: 2546576 - RNA, 19 nt, Artificial Sequence
  Description of Artificial Sequence: Synthetic oligonucleotide
ugcauggcgcggcccagcu

SEQ ID NO: 2546577 - RNA, 19 nt, Artificial Sequence
  Description of Artificial Sequence: Synthetic oligonucleotide
ccgccuuuucucuugcucc

SEQ ID NO: 2546578 - RNA, 19 nt, Artificial Sequence
  Description of Artificial Sequence: Synthetic oligonucleotide
ucagcucguucuuggccac

SEQ ID NO: 2546579 - RNA, 19 nt, Artificial Sequence
  Description of Artificial Sequence: Synthetic oligonucleotide
uucuugccggugccccggg

SEQ ID NO: 2546580 - RNA, 19 nt, Artificial Sequence
  Description of Artificial Sequence: Synthetic oligonucleotide
ucuugccggugccccgggg

SEQ ID NO: 2546581 - RNA, 19 nt, Artificial Sequence
  Description of Artificial Sequence: Synthetic oligonucleotide
ggcgaacuggucuuccaug

SEQ ID NO: 2546582 - RNA, 19 nt, Artificial Sequence
  Description of Artificial Sequence: Synthetic oligonucleotide
caucugcuuguucguggcc

SEQ ID NO: 2546583 - RNA, 19 nt, Artificial Sequence
  Description of Artificial Sequence: Synthetic oligonucleotide
ucccgggcgcgcuuguagc

SEQ ID NO: 2546584 - RNA, 19 nt, Artificial Sequence
  Description of Artificial Sequence: Synthetic oligonucleotide
gugugacacuccuuucuuc

SEQ ID NO: 2546585 - RNA, 19 nt, Artificial Sequence
  Description of Artificial Sequence: Synthetic oligonucleotide
gacucgaaguagguccaac

SEQ ID NO: 2546586 - RNA, 19 nt, Artificial Sequence
  Description of Artificial Sequence: Synthetic oligonucleotide
augacucgaaguaggucca

SEQ ID NO: 2546587 - RNA, 19 nt, Artificial Sequence
  Description of Artificial Sequence: Synthetic oligonucleotide
gguccaacugguucuuuuc

SEQ ID NO: 2546588 - RNA, 19 nt, Artificial Sequence
  Description of Artificial Sequence: Synthetic oligonucleotide
ucaccucgucccacacgag

SEQ ID NO: 2546589 - RNA, 19 nt, Artificial Sequence
  Description of Artificial Sequence: Synthetic oligonucleotide
acuggccacucaccucguc

SEQ ID NO: 2546590 - RNA, 19 nt, Artificial Sequence
  Description of Artificial Sequence: Synthetic oligonucleotide
ucacguccagcugaggcuu

SEQ ID NO: 2546591 - RNA, 19 nt, Artificial Sequence
  Description of Artificial Sequence: Synthetic oligonucleotide
acgugcauggcgcggccca

SEQ ID NO: 2546592 - RNA, 19 nt, Artificial Sequence
  Description of Artificial Sequence: Synthetic oligonucleotide
gguucagcucguucuuggc

SEQ ID NO: 2546593 - RNA, 19 nt, Artificial Sequence
  Description of Artificial Sequence: Synthetic oligonucleotide
caccuuggugugacacucc

SEQ ID NO: 2546594 - RNA, 19 nt, Artificial Sequence
  Description of Artificial Sequence: Synthetic oligonucleotide
gggcaucuguaccuugugc

SEQ ID NO: 2546595 - RNA, 19 nt, Artificial Sequence
  Description of Artificial Sequence: Synthetic oligonucleotide
gcuuguagccccagcggcg

SEQ ID NO: 2546596 - RNA, 19 nt, Artificial Sequence
  Description of Artificial Sequence: Synthetic oligonucleotide
gucccgggcgcgcuuguag

SEQ ID NO: 2546597 - RNA, 19 nt, Artificial Sequence
  Description of Artificial Sequence: Synthetic oligonucleotide
accucgucccacacgaggu

SEQ ID NO: 2546598 - RNA, 19 nt, Artificial Sequence
  Description of Artificial Sequence: Synthetic oligonucleotide
gucacguccagcugaggcu

SEQ ID NO: 2546599 - RNA, 19 nt, Artificial Sequence
  Description of Artificial Sequence: Synthetic oligonucleotide
cucgucccacacgagguug

SEQ ID NO: 2546600 - RNA, 19 nt, Artificial Sequence
  Description of Artificial Sequence: Synthetic oligonucleotide
ccaacugguucuuuucuca

SEQ ID NO: 2546601 - RNA, 19 nt, Artificial Sequence
  Description of Artificial Sequence: Synthetic oligonucleotide
gcgcuuguagccccagcgg

SEQ ID NO: 2546602 - RNA, 19 nt, Artificial Sequence
  Description of Artificial Sequence: Synthetic oligonucleotide
agguuccgcagccgguuca

SEQ ID NO: 2546603 - RNA, 19 nt, Artificial Sequence
  Description of Artificial Sequence: Synthetic oligonucleotide
cuuuucucagcugcaaagu

SEQ ID NO: 2546604 - RNA, 19 nt, Artificial Sequence
  Description of Artificial Sequence: Synthetic oligonucleotide
gaaugcuucuggccuccaa

SEQ ID NO: 2546605 - RNA, 19 nt, Artificial Sequence
  Description of Artificial Sequence: Synthetic oligonucleotide
ugaagccgcuuggcgaacu

SEQ ID NO: 2546606 - RNA, 19 nt, Artificial Sequence
  Description of Artificial Sequence: Synthetic oligonucleotide
uggcccucgucacguccag

SEQ ID NO: 2546607 - RNA, 19 nt, Artificial Sequence
  Description of Artificial Sequence: Synthetic oligonucleotide
cuuacucuggugucccgua

SEQ ID NO: 2546608 - RNA, 19 nt, Artificial Sequence
  Description of Artificial Sequence: Synthetic oligonucleotide
agaccuuggcuacgugcau

SEQ ID NO: 2546609 - RNA, 19 nt, Artificial Sequence
  Description of Artificial Sequence: Synthetic oligonucleotide
ucccuggcccggcgguccg

SEQ ID NO: 2546610 - RNA, 19 nt, Artificial Sequence
  Description of Artificial Sequence: Synthetic oligonucleotide
cuuguucguggcccucguc

SEQ ID NO: 2546611 - RNA, 19 nt, Artificial Sequence
  Description of Artificial Sequence: Synthetic oligonucleotide
caccucgaugagccauucc

SEQ ID NO: 2546612 - RNA, 19 nt, Artificial Sequence
  Description of Artificial Sequence: Synthetic oligonucleotide
cuccuccuuacucuggugu

SEQ ID NO: 2546613 - RNA, 19 nt, Artificial Sequence
  Description of Artificial Sequence: Synthetic oligonucleotide
cuggaagcgccccaccgaa

SEQ ID NO: 2546614 - RNA, 19 nt, Artificial Sequence
  Description of Artificial Sequence: Synthetic oligonucleotide
cgcgcuuguagccccagcg

SEQ ID NO: 2546615 - RNA, 19 nt, Artificial Sequence
  Description of Artificial Sequence: Synthetic oligonucleotide
cucgggccagguuccgcag

SEQ ID NO: 2546616 - RNA, 19 nt, Artificial Sequence
  Description of Artificial Sequence: Synthetic oligonucleotide
cuguaccuugugcgcucgg

SEQ ID NO: 2546617 - RNA, 19 nt, Artificial Sequence
  Description of Artificial Sequence: Synthetic oligonucleotide
gguggagaccuuggcuacg

SEQ ID NO: 2546618 - RNA, 19 nt, Artificial Sequence
  Description of Artificial Sequence: Synthetic oligonucleotide
uacgugcauggcgcggccc

SEQ ID NO: 2546619 - RNA, 19 nt, Artificial Sequence
  Description of Artificial Sequence: Synthetic oligonucleotide
caccgaagcgguggagacc

SEQ ID NO: 2546620 - RNA, 19 nt, Artificial Sequence
  Description of Artificial Sequence: Synthetic oligonucleotide
gugucccguagggugcagg

SEQ ID NO: 2546621 - RNA, 19 nt, Artificial Sequence
  Description of Artificial Sequence: Synthetic oligonucleotide
cacucaccucgucccacac

SEQ ID NO: 2546622 - RNA, 19 nt, Artificial Sequence
  Description of Artificial Sequence: Synthetic oligonucleotide
agccgcuuggcgaacuggu

SEQ ID NO: 2546623 - RNA, 19 nt, Artificial Sequence
  Description of Artificial Sequence: Synthetic oligonucleotide
guccagugggaagaaaacu

SEQ ID NO: 2546624 - RNA, 19 nt, Artificial Sequence
  Description of Artificial Sequence: Synthetic oligonucleotide
gugcaggccggcugagcug

SEQ ID NO: 2546625 - RNA, 19 nt, Artificial Sequence
  Description of Artificial Sequence: Synthetic oligonucleotide
gcgguggagaccuuggcua

SEQ ID NO: 2546626 - RNA, 19 nt, Artificial Sequence
  Description of Artificial Sequence: Synthetic oligonucleotide
ugugcgcucgggccagguu

SEQ ID NO: 2546627 - RNA, 19 nt, Artificial Sequence
  Description of Artificial Sequence: Synthetic oligonucleotide
uggugucccguagggugca

SEQ ID NO: 2546628 - RNA, 19 nt, Artificial Sequence
  Description of Artificial Sequence: Synthetic oligonucleotide
aggcaccucgaugagccau

SEQ ID NO: 2546629 - RNA, 19 nt, Artificial Sequence
  Description of Artificial Sequence: Synthetic oligonucleotide
uccauggggucggcgcccc

SEQ ID NO: 2546630 - RNA, 19 nt, Artificial Sequence
  Description of Artificial Sequence: Synthetic oligonucleotide
ccuccaaagccgccuuucc

SEQ ID NO: 2546631 - RNA, 19 nt, Artificial Sequence
  Description of Artificial Sequence: Synthetic oligonucleotide
ugacucgaaguagguccaa

SEQ ID NO: 2546632 - RNA, 19 nt, Artificial Sequence
  Description of Artificial Sequence: Synthetic oligonucleotide
ccuccuuacucuggugucc

SEQ ID NO: 2546633 - RNA, 19 nt, Artificial Sequence
  Description of Artificial Sequence: Synthetic oligonucleotide
cgcuuguagccccagcggc

SEQ ID NO: 2546634 - RNA, 19 nt, Artificial Sequence
  Description of Artificial Sequence: Synthetic oligonucleotide
uggccuccaaagccgccuu

SEQ ID NO: 2546635 - RNA, 19 nt, Artificial Sequence
  Description of Artificial Sequence: Synthetic oligonucleotide
ccuccucuucccaccuugg

SEQ ID NO: 2546636 - RNA, 19 nt, Artificial Sequence
  Description of Artificial Sequence: Synthetic oligonucleotide
ccaccgaagcgguggagac

SEQ ID NO: 2546637 - RNA, 19 nt, Artificial Sequence
  Description of Artificial Sequence: Synthetic oligonucleotide
gucccguagggugcaggcc

SEQ ID NO: 2546638 - RNA, 19 nt, Artificial Sequence
  Description of Artificial Sequence: Synthetic oligonucleotide
gccgccacuggccacucac

SEQ ID NO: 2546639 - RNA, 19 nt, Artificial Sequence
  Description of Artificial Sequence: Synthetic oligonucleotide
ggugcaggccggcugagcu

SEQ ID NO: 2546640 - RNA, 19 nt, Artificial Sequence
  Description of Artificial Sequence: Synthetic oligonucleotide
gguccgccuuuucucuugc

SEQ ID NO: 2546641 - RNA, 19 nt, Artificial Sequence
  Description of Artificial Sequence: Synthetic oligonucleotide
cucguucuuggccacgcgu

SEQ ID NO: 2546642 - RNA, 19 nt, Artificial Sequence
  Description of Artificial Sequence: Synthetic oligonucleotide
gaggcuucuuacuguucau

SEQ ID NO: 2546643 - RNA, 19 nt, Artificial Sequence
  Description of Artificial Sequence: Synthetic oligonucleotide
ccaccuuggugugacacuc

SEQ ID NO: 2546644 - RNA, 19 nt, Artificial Sequence
  Description of Artificial Sequence: Synthetic oligonucleotide
gcucguucuuggccacgcg

SEQ ID NO: 2546645 - RNA, 19 nt, Artificial Sequence
  Description of Artificial Sequence: Synthetic oligonucleotide
gccacgcguucccucuugg

SEQ ID NO: 2546646 - RNA, 19 nt, Artificial Sequence
  Description of Artificial Sequence: Synthetic oligonucleotide
cuucucucccuggcccggc

SEQ ID NO: 2546647 - RNA, 19 nt, Artificial Sequence
  Description of Artificial Sequence: Synthetic oligonucleotide
uucccaccuuggugugaca

SEQ ID NO: 2546648 - RNA, 19 nt, Artificial Sequence
  Description of Artificial Sequence: Synthetic oligonucleotide
ggcuacgugcauggcgcgg

SEQ ID NO: 2546649 - RNA, 19 nt, Artificial Sequence
  Description of Artificial Sequence: Synthetic oligonucleotide
gguuccgcagccgguucag

SEQ ID NO: 2546650 - RNA, 19 nt, Artificial Sequence
  Description of Artificial Sequence: Synthetic oligonucleotide
cagcucguucuuggccacg

SEQ ID NO: 2546651 - RNA, 19 nt, Artificial Sequence
  Description of Artificial Sequence: Synthetic oligonucleotide
ccucgucacguccagcuga

SEQ ID NO: 2546652 - RNA, 19 nt, Artificial Sequence
  Description of Artificial Sequence: Synthetic oligonucleotide
gcucgggccagguuccgca

SEQ ID NO: 2546653 - RNA, 19 nt, Artificial Sequence
  Description of Artificial Sequence: Synthetic oligonucleotide
gcuccuccuuacucuggug

SEQ ID NO: 2546654 - RNA, 19 nt, Artificial Sequence
  Description of Artificial Sequence: Synthetic oligonucleotide
uugugcgcucgggccaggu

SEQ ID NO: 2546655 - RNA, 19 nt, Artificial Sequence
  Description of Artificial Sequence: Synthetic oligonucleotide
guggcccucgucacgucca

SEQ ID NO: 2546656 - RNA, 19 nt, Artificial Sequence
  Description of Artificial Sequence: Synthetic oligonucleotide
cgaaguagguccaacuggu

SEQ ID NO: 2546657 - RNA, 19 nt, Artificial Sequence
  Description of Artificial Sequence: Synthetic oligonucleotide
caaagaggggcuggaauuu

SEQ ID NO: 2546658 - RNA, 19 nt, Artificial Sequence
  Description of Artificial Sequence: Synthetic oligonucleotide
ggugugacacuccuuucuu

SEQ ID NO: 2546659 - RNA, 19 nt, Artificial Sequence
  Description of Artificial Sequence: Synthetic oligonucleotide
guagccccagcggcgccgc

SEQ ID NO: 2546660 - RNA, 19 nt, Artificial Sequence
  Description of Artificial Sequence: Synthetic oligonucleotide
cugaagccgcuuggcgaac

SEQ ID NO: 2546661 - RNA, 19 nt, Artificial Sequence
  Description of Artificial Sequence: Synthetic oligonucleotide
guuccgcagccgguucagc

SEQ ID NO: 2546662 - RNA, 19 nt, Artificial Sequence
  Description of Artificial Sequence: Synthetic oligonucleotide
agcugggcaucuguaccuu

SEQ ID NO: 2546663 - RNA, 19 nt, Artificial Sequence
  Description of Artificial Sequence: Synthetic oligonucleotide
agcgccccaccgaagcggu

SEQ ID NO: 2546664 - RNA, 19 nt, Artificial Sequence
  Description of Artificial Sequence: Synthetic oligonucleotide
ccacgcguucccucuuggc

SEQ ID NO: 2546665 - RNA, 19 nt, Artificial Sequence
  Description of Artificial Sequence: Synthetic oligonucleotide
uggcccggcgguccgccuu

SEQ ID NO: 2546666 - RNA, 19 nt, Artificial Sequence
  Description of Artificial Sequence: Synthetic oligonucleotide
gaaguagguccaacugguu

SEQ ID NO: 2546667 - RNA, 19 nt, Artificial Sequence
  Description of Artificial Sequence: Synthetic oligonucleotide
cuugugcgcucgggccagg

SEQ ID NO: 2546668 - RNA, 19 nt, Artificial Sequence
  Description of Artificial Sequence: Synthetic oligonucleotide
ugucgucccgggcgcgcuu

SEQ ID NO: 2546669 - RNA, 19 nt, Artificial Sequence
  Description of Artificial Sequence: Synthetic oligonucleotide
gugcauggcgcggcccagc

SEQ ID NO: 2546670 - RNA, 19 nt, Artificial Sequence
  Description of Artificial Sequence: Synthetic oligonucleotide
gucgucccgggcgcgcuug

SEQ ID NO: 2546671 - RNA, 19 nt, Artificial Sequence
  Description of Artificial Sequence: Synthetic oligonucleotide
uagguccaacugguucuuu

SEQ ID NO: 2546672 - RNA, 19 nt, Artificial Sequence
  Description of Artificial Sequence: Synthetic oligonucleotide
guggagaccuuggcuacgu

SEQ ID NO: 2546673 - RNA, 19 nt, Artificial Sequence
  Description of Artificial Sequence: Synthetic oligonucleotide
ggccacgcguucccucuug

SEQ ID NO: 2546674 - RNA, 19 nt, Artificial Sequence
  Description of Artificial Sequence: Synthetic oligonucleotide
gugacacuccuuucuucuu

SEQ ID NO: 2546675 - RNA, 19 nt, Artificial Sequence
  Description of Artificial Sequence: Synthetic oligonucleotide
ccuuggugucgucccgggc

SEQ ID NO: 2546676 - RNA, 19 nt, Artificial Sequence
  Description of Artificial Sequence: Synthetic oligonucleotide
gcccucgucacguccagcu

SEQ ID NO: 2546677 - RNA, 19 nt, Artificial Sequence
  Description of Artificial Sequence: Synthetic oligonucleotide
caggccggcugagcugggc

SEQ ID NO: 2546678 - RNA, 19 nt, Artificial Sequence
  Description of Artificial Sequence: Synthetic oligonucleotide
cuucuugguccuccucccu

SEQ ID NO: 2546679 - RNA, 19 nt, Artificial Sequence
  Description of Artificial Sequence: Synthetic oligonucleotide
uggccacgcguucccucuu

SEQ ID NO: 2546680 - RNA, 19 nt, Artificial Sequence
  Description of Artificial Sequence: Synthetic oligonucleotide
cccgggcgcgcuuguagcc

SEQ ID NO: 2546681 - RNA, 19 nt, Artificial Sequence
  Description of Artificial Sequence: Synthetic oligonucleotide
acacgagguuggucuucuu

SEQ ID NO: 2546682 - RNA, 19 nt, Artificial Sequence
  Description of Artificial Sequence: Synthetic oligonucleotide
ccuucuggcccauuuuccu

SEQ ID NO: 2546683 - RNA, 19 nt, Artificial Sequence
  Description of Artificial Sequence: Synthetic oligonucleotide
agccccagcggcgccgcca

SEQ ID NO: 2546684 - RNA, 19 nt, Artificial Sequence
  Description of Artificial Sequence: Synthetic oligonucleotide
gccuccaaagccgccuuuc

SEQ ID NO: 2546685 - RNA, 19 nt, Artificial Sequence
  Description of Artificial Sequence: Synthetic oligonucleotide
cacacgagguuggucuucu

SEQ ID NO: 2546686 - RNA, 19 nt, Artificial Sequence
  Description of Artificial Sequence: Synthetic oligonucleotide
ucguggcccucgucacguc

SEQ ID NO: 2546687 - RNA, 19 nt, Artificial Sequence
  Description of Artificial Sequence: Synthetic oligonucleotide
cugcuuguucguggcccuc

SEQ ID NO: 2546688 - RNA, 19 nt, Artificial Sequence
  Description of Artificial Sequence: Synthetic oligonucleotide
ggugucgucccgggcgcgc

SEQ ID NO: 2546689 - RNA, 19 nt, Artificial Sequence
  Description of Artificial Sequence: Synthetic oligonucleotide
cguggcccucgucacgucc

SEQ ID NO: 2546690 - RNA, 19 nt, Artificial Sequence
  Description of Artificial Sequence: Synthetic oligonucleotide
ccgccacuggccacucacc

SEQ ID NO: 2546691 - RNA, 19 nt, Artificial Sequence
  Description of Artificial Sequence: Synthetic oligonucleotide
gggcgccuucuccuugggc

SEQ ID NO: 2546692 - RNA, 19 nt, Artificial Sequence
  Description of Artificial Sequence: Synthetic oligonucleotide
ccuugugcgcucgggccag

SEQ ID NO: 2546693 - RNA, 19 nt, Artificial Sequence
  Description of Artificial Sequence: Synthetic oligonucleotide
ggcgguccgccuuuucucu

SEQ ID NO: 2546694 - RNA, 19 nt, Artificial Sequence
  Description of Artificial Sequence: Synthetic oligonucleotide
uagccccagcggcgccgcc

SEQ ID NO: 2546695 - RNA, 19 nt, Artificial Sequence
  Description of Artificial Sequence: Synthetic oligonucleotide
caggcaccucgaugagcca

SEQ ID NO: 2546696 - RNA, 19 nt, Artificial Sequence
  Description of Artificial Sequence: Synthetic oligonucleotide
ccaaagccgccuuuccucu

SEQ ID NO: 2546697 - RNA, 19 nt, Artificial Sequence
  Description of Artificial Sequence: Synthetic oligonucleotide
ggggcuggaauuuccucuu

SEQ ID NO: 2546698 - RNA, 19 nt, Artificial Sequence
  Description of Artificial Sequence: Synthetic oligonucleotide
cgccccaccgaagcggugg

SEQ ID NO: 2546699 - RNA, 19 nt, Artificial Sequence
  Description of Artificial Sequence: Synthetic oligonucleotide
cgaagcgguggagaccuug

SEQ ID NO: 2546700 - RNA, 19 nt, Artificial Sequence
  Description of Artificial Sequence: Synthetic oligonucleotide
ggcucuccuggaagcgccc

SEQ ID NO: 2546701 - RNA, 19 nt, Artificial Sequence
  Description of Artificial Sequence: Synthetic oligonucleotide
gccacucaccucgucccac

SEQ ID NO: 2546702 - RNA, 19 nt, Artificial Sequence
  Description of Artificial Sequence: Synthetic oligonucleotide
ggccacucaccucguccca

SEQ ID NO: 2546703 - RNA, 19 nt, Artificial Sequence
  Description of Artificial Sequence: Synthetic oligonucleotide
cccucgucacguccagcug

SEQ ID NO: 2546704 - RNA, 19 nt, Artificial Sequence
  Description of Artificial Sequence: Synthetic oligonucleotide
ccagguccuugccggcccc

SEQ ID NO: 2546705 - RNA, 19 nt, Artificial Sequence
  Description of Artificial Sequence: Synthetic oligonucleotide
guagguccaacugguucuu

SEQ ID NO: 2546706 - RNA, 19 nt, Artificial Sequence
  Description of Artificial Sequence: Synthetic oligonucleotide
cggggcgccuucuccuugg

SEQ ID NO: 2546707 - RNA, 19 nt, Artificial Sequence
  Description of Artificial Sequence: Synthetic oligonucleotide
gccccggggcgccuucucc

SEQ ID NO: 2546708 - RNA, 19 nt, Artificial Sequence
  Description of Artificial Sequence: Synthetic oligonucleotide
cgguccgccuuuucucuug

SEQ ID NO: 2546709 - RNA, 19 nt, Artificial Sequence
  Description of Artificial Sequence: Synthetic oligonucleotide
ccacucaccucgucccaca

SEQ ID NO: 2546710 - RNA, 19 nt, Artificial Sequence
  Description of Artificial Sequence: Synthetic oligonucleotide
ccgguucagcucguucuug

SEQ ID NO: 2546711 - RNA, 19 nt, Artificial Sequence
  Description of Artificial Sequence: Synthetic oligonucleotide
cucucccuggcccggcggu

SEQ ID NO: 2546712 - RNA, 19 nt, Artificial Sequence
  Description of Artificial Sequence: Synthetic oligonucleotide
ccgcuuggcgaacuggucu

SEQ ID NO: 2546713 - RNA, 19 nt, Artificial Sequence
  Description of Artificial Sequence: Synthetic oligonucleotide
ccuuggcuacgugcauggc

SEQ ID NO: 2546714 - RNA, 19 nt, Artificial Sequence
  Description of Artificial Sequence: Synthetic oligonucleotide
cgcguucccucuuggccug

SEQ ID NO: 2546715 - RNA, 19 nt, Artificial Sequence
  Description of Artificial Sequence: Synthetic oligonucleotide
cggcgguccgccuuuucuc

SEQ ID NO: 2546716 - RNA, 19 nt, Artificial Sequence
  Description of Artificial Sequence: Synthetic oligonucleotide
ggugucccguagggugcag

SEQ ID NO: 2546717 - RNA, 19 nt, Artificial Sequence
  Description of Artificial Sequence: Synthetic oligonucleotide
ccgggcgcgcuuguagccc

SEQ ID NO: 2546718 - RNA, 19 nt, Artificial Sequence
  Description of Artificial Sequence: Synthetic oligonucleotide
gcgcgcuuguagccccagc

SEQ ID NO: 2546719 - RNA, 19 nt, Artificial Sequence
  Description of Artificial Sequence: Synthetic oligonucleotide
cccagcggcgccgccacug

SEQ ID NO: 2546720 - RNA, 19 nt, Artificial Sequence
  Description of Artificial Sequence: Synthetic oligonucleotide
ccacacgagguuggucuuc

SEQ ID NO: 2546721 - RNA, 19 nt, Artificial Sequence
  Description of Artificial Sequence: Synthetic oligonucleotide
gccgcuuggcgaacugguc

SEQ ID NO: 2546722 - RNA, 19 nt, Artificial Sequence
  Description of Artificial Sequence: Synthetic oligonucleotide
ccccaggcaccucgaugag

SEQ ID NO: 2546723 - RNA, 19 nt, Artificial Sequence
  Description of Artificial Sequence: Synthetic oligonucleotide
gcaccucgaugagccauuc

SEQ ID NO: 2546724 - RNA, 19 nt, Artificial Sequence
  Description of Artificial Sequence: Synthetic oligonucleotide
cgggcgcgcuuguagcccc

SEQ ID NO: 2546725 - RNA, 19 nt, Artificial Sequence
  Description of Artificial Sequence: Synthetic oligonucleotide
guccgccuuuucucuugcu

SEQ ID NO: 2546726 - RNA, 19 nt, Artificial Sequence
  Description of Artificial Sequence: Synthetic oligonucleotide
gcuuguucguggcccucgu

SEQ ID NO: 2546727 - RNA, 19 nt, Artificial Sequence
  Description of Artificial Sequence: Synthetic oligonucleotide
ggcgcgcuuguagccccag

SEQ ID NO: 2546728 - RNA, 19 nt, Artificial Sequence
  Description of Artificial Sequence: Synthetic oligonucleotide
gccauuccuuggugucguc

SEQ ID NO: 2546729 - RNA, 19 nt, Artificial Sequence
  Description of Artificial Sequence: Synthetic oligonucleotide
cgaugagccauuccuuggu

SEQ ID NO: 2546730 - RNA, 19 nt, Artificial Sequence
  Description of Artificial Sequence: Synthetic oligonucleotide
ggaaugcuucuggccucca

SEQ ID NO: 2546731 - RNA, 19 nt, Artificial Sequence
  Description of Artificial Sequence: Synthetic oligonucleotide
caaagccgccuuuccucuu

SEQ ID NO: 2546732 - RNA, 19 nt, Artificial Sequence
  Description of Artificial Sequence: Synthetic oligonucleotide
gcauggcgcggcccagcuc

SEQ ID NO: 2546733 - RNA, 19 nt, Artificial Sequence
  Description of Artificial Sequence: Synthetic oligonucleotide
ccucgaugagccauuccuu

SEQ ID NO: 2546734 - RNA, 19 nt, Artificial Sequence
  Description of Artificial Sequence: Synthetic oligonucleotide
gccccaccgaagcggugga

SEQ ID NO: 2546735 - RNA, 19 nt, Artificial Sequence
  Description of Artificial Sequence: Synthetic oligonucleotide
ggcccauuuuccuccucuu

SEQ ID NO: 2546736 - RNA, 19 nt, Artificial Sequence
  Description of Artificial Sequence: Synthetic oligonucleotide
cccaccuuggugugacacu

SEQ ID NO: 2546737 - RNA, 19 nt, Artificial Sequence
  Description of Artificial Sequence: Synthetic oligonucleotide
ggugccccggggcgccuuc

SEQ ID NO: 2546738 - RNA, 19 nt, Artificial Sequence
  Description of Artificial Sequence: Synthetic oligonucleotide
ccuuacucuggugucccgu

SEQ ID NO: 2546739 - RNA, 19 nt, Artificial Sequence
  Description of Artificial Sequence: Synthetic oligonucleotide
ccuuuccucuucucucccu

SEQ ID NO: 2546740 - RNA, 19 nt, Artificial Sequence
  Description of Artificial Sequence: Synthetic oligonucleotide
ccggggcgccuucuccuug

SEQ ID NO: 2546741 - RNA, 19 nt, Artificial Sequence
  Description of Artificial Sequence: Synthetic oligonucleotide
gccgguucagcucguucuu

SEQ ID NO: 2546742 - RNA, 19 nt, Artificial Sequence
  Description of Artificial Sequence: Synthetic oligonucleotide
gccggugccccggggcgcc

SEQ ID NO: 2546743 - RNA, 19 nt, Artificial Sequence
  Description of Artificial Sequence: Synthetic oligonucleotide
gugucgucccgggcgcgcu

SEQ ID NO: 2546744 - RNA, 19 nt, Artificial Sequence
  Description of Artificial Sequence: Synthetic oligonucleotide
ccguagggugcaggccggc

SEQ ID NO: 2546745 - RNA, 19 nt, Artificial Sequence
  Description of Artificial Sequence: Synthetic oligonucleotide
ccagaaggccuggaaugcu

SEQ ID NO: 2546746 - RNA, 19 nt, Artificial Sequence
  Description of Artificial Sequence: Synthetic oligonucleotide
ccuccucuuggcagcuucu

SEQ ID NO: 2546747 - RNA, 19 nt, Artificial Sequence
  Description of Artificial Sequence: Synthetic oligonucleotide
gcaggccggcugagcuggg

SEQ ID NO: 2546748 - RNA, 19 nt, Artificial Sequence
  Description of Artificial Sequence: Synthetic oligonucleotide
gcgcucgggccagguuccg

SEQ ID NO: 2546749 - RNA, 19 nt, Artificial Sequence
  Description of Artificial Sequence: Synthetic oligonucleotide
ccggcgguccgccuuuucu

SEQ ID NO: 2546750 - RNA, 19 nt, Artificial Sequence
  Description of Artificial Sequence: Synthetic oligonucleotide
ggcaccucgaugagccauu

SEQ ID NO: 2546751 - RNA, 19 nt, Artificial Sequence
  Description of Artificial Sequence: Synthetic oligonucleotide
ggcgccgccacuggccacu

SEQ ID NO: 2546752 - RNA, 19 nt, Artificial Sequence
  Description of Artificial Sequence: Synthetic oligonucleotide
ccccaccgaagcgguggag

SEQ ID NO: 2546753 - RNA, 19 nt, Artificial Sequence
  Description of Artificial Sequence: Synthetic oligonucleotide
ccuuggugugacacuccuu

SEQ ID NO: 2546754 - RNA, 19 nt, Artificial Sequence
  Description of Artificial Sequence: Synthetic oligonucleotide
cgagguuggucuucuucuu

SEQ ID NO: 2546755 - RNA, 19 nt, Artificial Sequence
  Description of Artificial Sequence: Synthetic oligonucleotide
cgcucgggccagguuccgc

SEQ ID NO: 2546756 - RNA, 19 nt, Artificial Sequence
  Description of Artificial Sequence: Synthetic oligonucleotide
cgcuuggcgaacuggucuu

SEQ ID NO: 2546757 - RNA, 19 nt, Artificial Sequence
  Description of Artificial Sequence: Synthetic oligonucleotide
cccggcgguccgccuuuuc

SEQ ID NO: 2546758 - RNA, 19 nt, Artificial Sequence
  Description of Artificial Sequence: Synthetic oligonucleotide
ccccggggcgccuucuccu

SEQ ID NO: 2546759 - RNA, 19 nt, Artificial Sequence
  Description of Artificial Sequence: Synthetic oligonucleotide
cuggcccggcgguccgccu

SEQ ID NO: 2546760 - RNA, 19 nt, Artificial Sequence
  Description of Artificial Sequence: Synthetic oligonucleotide
gcgguccgccuuuucucuu

SEQ ID NO: 2546761 - RNA, 19 nt, Artificial Sequence
  Description of Artificial Sequence: Synthetic oligonucleotide
cccacacgagguuggucuu

SEQ ID NO: 2546762 - RNA, 19 nt, Artificial Sequence
  Description of Artificial Sequence: Synthetic oligonucleotide
gggcgcgcuuguagcccca

SEQ ID NO: 2546763 - RNA, 19 nt, Artificial Sequence
  Description of Artificial Sequence: Synthetic oligonucleotide
ccucgucccacacgagguu

SEQ ID NO: 2546764 - RNA, 19 nt, Artificial Sequence
  Description of Artificial Sequence: Synthetic oligonucleotide
gcgccccaccgaagcggug

SEQ ID NO: 2546765 - RNA, 19 nt, Artificial Sequence
  Description of Artificial Sequence: Synthetic oligonucleotide
ccggcugagcugggcaucu

SEQ ID NO: 2546766 - RNA, 19 nt, Artificial Sequence
  Description of Artificial Sequence: Synthetic oligonucleotide
gcguucccucuuggccuga

SEQ ID NO: 2546767 - RNA, 19 nt, Artificial Sequence
  Description of Artificial Sequence: Synthetic oligonucleotide
cucuugcucccagguccuu

SEQ ID NO: 2546768 - RNA, 19 nt, Artificial Sequence
  Description of Artificial Sequence: Synthetic oligonucleotide
cccuggcccggcgguccgc

SEQ ID NO: 2546769 - RNA, 19 nt, Artificial Sequence
  Description of Artificial Sequence: Synthetic oligonucleotide
gugccccggggcgccuucu

SEQ ID NO: 2546770 - RNA, 19 nt, Artificial Sequence
  Description of Artificial Sequence: Synthetic oligonucleotide
ggcccggcgguccgccuuu

SEQ ID NO: 2546771 - RNA, 19 nt, Artificial Sequence
  Description of Artificial Sequence: Synthetic oligonucleotide
cguagggugcaggccggcu

SEQ ID NO: 2546772 - RNA, 19 nt, Artificial Sequence
  Description of Artificial Sequence: Synthetic oligonucleotide
cggcgccgccacuggccac

SEQ ID NO: 2546773 - RNA, 19 nt, Artificial Sequence
  Description of Artificial Sequence: Synthetic oligonucleotide
cguucccucuuggccugaa

SEQ ID NO: 2546774 - RNA, 19 nt, Artificial Sequence
  Description of Artificial Sequence: Synthetic oligonucleotide
cccggggcgccuucuccuu

SEQ ID NO: 2546775 - RNA, 19 nt, Artificial Sequence
  Description of Artificial Sequence: Synthetic oligonucleotide
cgucccacacgagguuggu

SEQ ID NO: 2546776 - RNA, 19 nt, Artificial Sequence
  Description of Artificial Sequence: Synthetic oligonucleotide
cgcagccgguucagcucgu

SEQ ID NO: 2546777 - RNA, 19 nt, Artificial Sequence
  Description of Artificial Sequence: Synthetic oligonucleotide
ccgaagcgguggagaccuu

SEQ ID NO: 2546778 - RNA, 19 nt, Artificial Sequence
  Description of Artificial Sequence: Synthetic oligonucleotide
cgucccgggcgcgcuugua

SEQ ID NO: 2546779 - RNA, 19 nt, Artificial Sequence
  Description of Artificial Sequence: Synthetic oligonucleotide
gcccggcgguccgccuuuu

SEQ ID NO: 2546780 - RNA, 19 nt, Artificial Sequence
  Description of Artificial Sequence: Synthetic oligonucleotide
ccggugccccggggcgccu

SEQ ID NO: 2546781 - RNA, 19 nt, Artificial Sequence
  Description of Artificial Sequence: Synthetic oligonucleotide
cggugccccggggcgccuu

SEQ ID NO: 2546782 - RNA, 19 nt, Artificial Sequence
  Description of Artificial Sequence: Synthetic oligonucleotide
ucaucuuccuccaagcugc

SEQ ID NO: 2546783 - RNA, 19 nt, Artificial Sequence
  Description of Artificial Sequence: Synthetic oligonucleotide
uguuucaccuuauagccag

SEQ ID NO: 2546784 - RNA, 19 nt, Artificial Sequence
  Description of Artificial Sequence: Synthetic oligonucleotide
aagguugucaaaggagucc

SEQ ID NO: 2546785 - RNA, 19 nt, Artificial Sequence
  Description of Artificial Sequence: Synthetic oligonucleotide
auagccuccggucucagcg

SEQ ID NO: 2546786 - RNA, 19 nt, Artificial Sequence
  Description of Artificial Sequence: Synthetic oligonucleotide
caugaaguggccaugcagc

SEQ ID NO: 2546787 - RNA, 19 nt, Artificial Sequence
  Description of Artificial Sequence: Synthetic oligonucleotide
aaggugggguaccuggugc

SEQ ID NO: 2546788 - RNA, 19 nt, Artificial Sequence
  Description of Artificial Sequence: Synthetic oligonucleotide
uggggaaagguuuucaucu

SEQ ID NO: 2546789 - RNA, 19 nt, Artificial Sequence
  Description of Artificial Sequence: Synthetic oligonucleotide
gaaguggccaugcagcucc

SEQ ID NO: 2546790 - RNA, 19 nt, Artificial Sequence
  Description of Artificial Sequence: Synthetic oligonucleotide
uucaucuuccuccaagcug

SEQ ID NO: 2546791 - RNA, 19 nt, Artificial Sequence
  Description of Artificial Sequence: Synthetic oligonucleotide
ucaccuuauagccaggguc

SEQ ID NO: 2546792 - RNA, 19 nt, Artificial Sequence
  Description of Artificial Sequence: Synthetic oligonucleotide
aagcucuucuaacacagga

SEQ ID NO: 2546793 - RNA, 19 nt, Artificial Sequence
  Description of Artificial Sequence: Synthetic oligonucleotide
cucuuccucgccaagagcc

SEQ ID NO: 2546794 - RNA, 19 nt, Artificial Sequence
  Description of Artificial Sequence: Synthetic oligonucleotide
aaaggaguccucacacucc

SEQ ID NO: 2546795 - RNA, 19 nt, Artificial Sequence
  Description of Artificial Sequence: Synthetic oligonucleotide
uauagccagggucauauuc

SEQ ID NO: 2546796 - RNA, 19 nt, Artificial Sequence
  Description of Artificial Sequence: Synthetic oligonucleotide
ucuccccagugccagaugg

SEQ ID NO: 2546797 - RNA, 19 nt, Artificial Sequence
  Description of Artificial Sequence: Synthetic oligonucleotide
gcuguuucaccuuauagcc

SEQ ID NO: 2546798 - RNA, 19 nt, Artificial Sequence
  Description of Artificial Sequence: Synthetic oligonucleotide
ucuaacacaggauguuggc

SEQ ID NO: 2546799 - RNA, 19 nt, Artificial Sequence
  Description of Artificial Sequence: Synthetic oligonucleotide
acacacaugggugggaccc

SEQ ID NO: 2546800 - RNA, 19 nt, Artificial Sequence
  Description of Artificial Sequence: Synthetic oligonucleotide
uaacacaggauguuggcaa

SEQ ID NO: 2546801 - RNA, 19 nt, Artificial Sequence
  Description of Artificial Sequence: Synthetic oligonucleotide
ucauauucggggucgucag

SEQ ID NO: 2546802 - RNA, 19 nt, Artificial Sequence
  Description of Artificial Sequence: Synthetic oligonucleotide
agugccagauggcuccucc

SEQ ID NO: 2546803 - RNA, 19 nt, Artificial Sequence
  Description of Artificial Sequence: Synthetic oligonucleotide
ucacacuccguacaguggu

SEQ ID NO: 2546804 - RNA, 19 nt, Artificial Sequence
  Description of Artificial Sequence: Synthetic oligonucleotide
accuaugcgcuguuucacc

SEQ ID NO: 2546805 - RNA, 19 nt, Artificial Sequence
  Description of Artificial Sequence: Synthetic oligonucleotide
ucacgggucucugucaugg

SEQ ID NO: 2546806 - RNA, 19 nt, Artificial Sequence
  Description of Artificial Sequence: Synthetic oligonucleotide
uuggguugcugucgcaggg

SEQ ID NO: 2546807 - RNA, 19 nt, Artificial Sequence
  Description of Artificial Sequence: Synthetic oligonucleotide
acgggucucugucauggcc

SEQ ID NO: 2546808 - RNA, 19 nt, Artificial Sequence
  Description of Artificial Sequence: Synthetic oligonucleotide
gucaaaggaguccucacac

SEQ ID NO: 2546809 - RNA, 19 nt, Artificial Sequence
  Description of Artificial Sequence: Synthetic oligonucleotide
cagugacugggcaaggucc

SEQ ID NO: 2546810 - RNA, 19 nt, Artificial Sequence
  Description of Artificial Sequence: Synthetic oligonucleotide
ugggcaaggucccuccccg

SEQ ID NO: 2546811 - RNA, 19 nt, Artificial Sequence
  Description of Artificial Sequence: Synthetic oligonucleotide
aggggaggggacaagagac

SEQ ID NO: 2546812 - RNA, 19 nt, Artificial Sequence
  Description of Artificial Sequence: Synthetic oligonucleotide
caaaggaguccucacacuc

SEQ ID NO: 2546813 - RNA, 19 nt, Artificial Sequence
  Description of Artificial Sequence: Synthetic oligonucleotide
ggggacaagagacaggagc

SEQ ID NO: 2546814 - RNA, 19 nt, Artificial Sequence
  Description of Artificial Sequence: Synthetic oligonucleotide
gagcagagcagugacuggg

SEQ ID NO: 2546815 - RNA, 19 nt, Artificial Sequence
  Description of Artificial Sequence: Synthetic oligonucleotide
ugggguaccuggugcagcg

SEQ ID NO: 2546816 - RNA, 19 nt, Artificial Sequence
  Description of Artificial Sequence: Synthetic oligonucleotide
uauucggggucgucagugg

SEQ ID NO: 2546817 - RNA, 19 nt, Artificial Sequence
  Description of Artificial Sequence: Synthetic oligonucleotide
ugcagcguccaccagcggu

SEQ ID NO: 2546818 - RNA, 19 nt, Artificial Sequence
  Description of Artificial Sequence: Synthetic oligonucleotide
uccccaagguugucaaagg

SEQ ID NO: 2546819 - RNA, 19 nt, Artificial Sequence
  Description of Artificial Sequence: Synthetic oligonucleotide
uuggcaaguagagagggau

SEQ ID NO: 2546820 - RNA, 19 nt, Artificial Sequence
  Description of Artificial Sequence: Synthetic oligonucleotide
uggugcagcguccaccagc

SEQ ID NO: 2546821 - RNA, 19 nt, Artificial Sequence
  Description of Artificial Sequence: Synthetic oligonucleotide
ucuccaucccgccuugcug

SEQ ID NO: 2546822 - RNA, 19 nt, Artificial Sequence
  Description of Artificial Sequence: Synthetic oligonucleotide
ucuucaucuccaucccgcc

SEQ ID NO: 2546823 - RNA, 19 nt, Artificial Sequence
  Description of Artificial Sequence: Synthetic oligonucleotide
aggagcagagcagugacug

SEQ ID NO: 2546824 - RNA, 19 nt, Artificial Sequence
  Description of Artificial Sequence: Synthetic oligonucleotide
ucuuggguugcugucgcag

SEQ ID NO: 2546825 - RNA, 19 nt, Artificial Sequence
  Description of Artificial Sequence: Synthetic oligonucleotide
acaggauguuggcaaguag

SEQ ID NO: 2546826 - RNA, 19 nt, Artificial Sequence
  Description of Artificial Sequence: Synthetic oligonucleotide
gcucuucuaacacaggaug

SEQ ID NO: 2546827 - RNA, 19 nt, Artificial Sequence
  Description of Artificial Sequence: Synthetic oligonucleotide
aguggccccgccuacaccu

SEQ ID NO: 2546828 - RNA, 19 nt, Artificial Sequence
  Description of Artificial Sequence: Synthetic oligonucleotide
gccagggucauauucgggg

SEQ ID NO: 2546829 - RNA, 19 nt, Artificial Sequence
  Description of Artificial Sequence: Synthetic oligonucleotide
gugcaggugggccagcagg

SEQ ID NO: 2546830 - RNA, 19 nt, Artificial Sequence
  Description of Artificial Sequence: Synthetic oligonucleotide
cuuggguugcugucgcagg

SEQ ID NO: 2546831 - RNA, 19 nt, Artificial Sequence
  Description of Artificial Sequence: Synthetic oligonucleotide
cucagagucgggcucuggg

SEQ ID NO: 2546832 - RNA, 19 nt, Artificial Sequence
  Description of Artificial Sequence: Synthetic oligonucleotide
uucaucuccaucccgccuu

SEQ ID NO: 2546833 - RNA, 19 nt, Artificial Sequence
  Description of Artificial Sequence: Synthetic oligonucleotide
aggauguuggcaaguagag

SEQ ID NO: 2546834 - RNA, 19 nt, Artificial Sequence
  Description of Artificial Sequence: Synthetic oligonucleotide
caggauguuggcaaguaga

SEQ ID NO: 2546835 - RNA, 19 nt, Artificial Sequence
  Description of Artificial Sequence: Synthetic oligonucleotide
auauucggggucgucagug

SEQ ID NO: 2546836 - RNA, 19 nt, Artificial Sequence
  Description of Artificial Sequence: Synthetic oligonucleotide
agggcugugcaggugggcc

SEQ ID NO: 2546837 - RNA, 19 nt, Artificial Sequence
  Description of Artificial Sequence: Synthetic oligonucleotide
ggcaaggugggguaccugg

SEQ ID NO: 2546838 - RNA, 19 nt, Artificial Sequence
  Description of Artificial Sequence: Synthetic oligonucleotide
caccuuauagccaggguca

SEQ ID NO: 2546839 - RNA, 19 nt, Artificial Sequence
  Description of Artificial Sequence: Synthetic oligonucleotide
gcggugaucggccacagag

SEQ ID NO: 2546840 - RNA, 19 nt, Artificial Sequence
  Description of Artificial Sequence: Synthetic oligonucleotide
ugcagcaugaaguggccau

SEQ ID NO: 2546841 - RNA, 19 nt, Artificial Sequence
  Description of Artificial Sequence: Synthetic oligonucleotide
agggucauauucggggucg

SEQ ID NO: 2546842 - RNA, 19 nt, Artificial Sequence
  Description of Artificial Sequence: Synthetic oligonucleotide
ucgcagggcagcagagucg

SEQ ID NO: 2546843 - RNA, 19 nt, Artificial Sequence
  Description of Artificial Sequence: Synthetic oligonucleotide
agcucucccacggucacac

SEQ ID NO: 2546844 - RNA, 19 nt, Artificial Sequence
  Description of Artificial Sequence: Synthetic oligonucleotide
caagguugucaaaggaguc

SEQ ID NO: 2546845 - RNA, 19 nt, Artificial Sequence
  Description of Artificial Sequence: Synthetic oligonucleotide
augaaguggccaugcagcu

SEQ ID NO: 2546846 - RNA, 19 nt, Artificial Sequence
  Description of Artificial Sequence: Synthetic oligonucleotide
uggcaaguagagagggaug

SEQ ID NO: 2546847 - RNA, 19 nt, Artificial Sequence
  Description of Artificial Sequence: Synthetic oligonucleotide
uaugcgcuguuucaccuua

SEQ ID NO: 2546848 - RNA, 19 nt, Artificial Sequence
  Description of Artificial Sequence: Synthetic oligonucleotide
caugcagcaugaaguggcc

SEQ ID NO: 2546849 - RNA, 19 nt, Artificial Sequence
  Description of Artificial Sequence: Synthetic oligonucleotide
cuugcucccaacccacccc

SEQ ID NO: 2546850 - RNA, 19 nt, Artificial Sequence
  Description of Artificial Sequence: Synthetic oligonucleotide
cuggggaaagguuuucauc

SEQ ID NO: 2546851 - RNA, 19 nt, Artificial Sequence
  Description of Artificial Sequence: Synthetic oligonucleotide
gagcccugccuucaggggc

SEQ ID NO: 2546852 - RNA, 19 nt, Artificial Sequence
  Description of Artificial Sequence: Synthetic oligonucleotide
uccguacagugguagguac

SEQ ID NO: 2546853 - RNA, 19 nt, Artificial Sequence
  Description of Artificial Sequence: Synthetic oligonucleotide
cuucuuggguugcugucgc

SEQ ID NO: 2546854 - RNA, 19 nt, Artificial Sequence
  Description of Artificial Sequence: Synthetic oligonucleotide
cacggucacaccucuggcc

SEQ ID NO: 2546855 - RNA, 19 nt, Artificial Sequence
  Description of Artificial Sequence: Synthetic oligonucleotide
cuugcuggccggaucuccc

SEQ ID NO: 2546856 - RNA, 19 nt, Artificial Sequence
  Description of Artificial Sequence: Synthetic oligonucleotide
caagcucuucuaacacagg

SEQ ID NO: 2546857 - RNA, 19 nt, Artificial Sequence
  Description of Artificial Sequence: Synthetic oligonucleotide
ggaaagguuuucaucuucc

SEQ ID NO: 2546858 - RNA, 19 nt, Artificial Sequence
  Description of Artificial Sequence: Synthetic oligonucleotide
ggucucagcgggcucacgg

SEQ ID NO: 2546859 - RNA, 19 nt, Artificial Sequence
  Description of Artificial Sequence: Synthetic oligonucleotide
gcaugaaguggccaugcag

SEQ ID NO: 2546860 - RNA, 19 nt, Artificial Sequence
  Description of Artificial Sequence: Synthetic oligonucleotide
ggcaaguagagagggaugc

SEQ ID NO: 2546861 - RNA, 19 nt, Artificial Sequence
  Description of Artificial Sequence: Synthetic oligonucleotide
guugucaaaggaguccuca

SEQ ID NO: 2546862 - RNA, 19 nt, Artificial Sequence
  Description of Artificial Sequence: Synthetic oligonucleotide
acugggcaaggucccuccc

SEQ ID NO: 2546863 - RNA, 19 nt, Artificial Sequence
  Description of Artificial Sequence: Synthetic oligonucleotide
agguugucaaaggaguccu

SEQ ID NO: 2546864 - RNA, 19 nt, Artificial Sequence
  Description of Artificial Sequence: Synthetic oligonucleotide
guugcugucgcagggcagc

SEQ ID NO: 2546865 - RNA, 19 nt, Artificial Sequence
  Description of Artificial Sequence: Synthetic oligonucleotide
caagagacaggagcagagc

SEQ ID NO: 2546866 - RNA, 19 nt, Artificial Sequence
  Description of Artificial Sequence: Synthetic oligonucleotide
ugcagcuccccaagguugu

SEQ ID NO: 2546867 - RNA, 19 nt, Artificial Sequence
  Description of Artificial Sequence: Synthetic oligonucleotide
cgcuguuucaccuuauagc

SEQ ID NO: 2546868 - RNA, 19 nt, Artificial Sequence
  Description of Artificial Sequence: Synthetic oligonucleotide
gucucagcgggcucacggg

SEQ ID NO: 2546869 - RNA, 19 nt, Artificial Sequence
  Description of Artificial Sequence: Synthetic oligonucleotide
cucaccccgggcaugcagc

SEQ ID NO: 2546870 - RNA, 19 nt, Artificial Sequence
  Description of Artificial Sequence: Synthetic oligonucleotide
caucccgccuugcuggccg

SEQ ID NO: 2546871 - RNA, 19 nt, Artificial Sequence
  Description of Artificial Sequence: Synthetic oligonucleotide
agcagagcagugacugggc

SEQ ID NO: 2546872 - RNA, 19 nt, Artificial Sequence
  Description of Artificial Sequence: Synthetic oligonucleotide
ucucagcgggcucacgggu

SEQ ID NO: 2546873 - RNA, 19 nt, Artificial Sequence
  Description of Artificial Sequence: Synthetic oligonucleotide
cccaagguugucaaaggag

SEQ ID NO: 2546874 - RNA, 19 nt, Artificial Sequence
  Description of Artificial Sequence: Synthetic oligonucleotide
ucaucuccaucccgccuug

SEQ ID NO: 2546875 - RNA, 19 nt, Artificial Sequence
  Description of Artificial Sequence: Synthetic oligonucleotide
gucauauucggggucguca

SEQ ID NO: 2546876 - RNA, 19 nt, Artificial Sequence
  Description of Artificial Sequence: Synthetic oligonucleotide
ugccagauggcuccuccuc

SEQ ID NO: 2546877 - RNA, 19 nt, Artificial Sequence
  Description of Artificial Sequence: Synthetic oligonucleotide
uagccuccggucucagcgg

SEQ ID NO: 2546878 - RNA, 19 nt, Artificial Sequence
  Description of Artificial Sequence: Synthetic oligonucleotide
cacuccguacagugguagg

SEQ ID NO: 2546879 - RNA, 19 nt, Artificial Sequence
  Description of Artificial Sequence: Synthetic oligonucleotide
ucucccacggucacaccuc

SEQ ID NO: 2546880 - RNA, 19 nt, Artificial Sequence
  Description of Artificial Sequence: Synthetic oligonucleotide
uacaccucaccccgggcau

SEQ ID NO: 2546881 - RNA, 19 nt, Artificial Sequence
  Description of Artificial Sequence: Synthetic oligonucleotide
caagagcccugccuucagg

SEQ ID NO: 2546882 - RNA, 19 nt, Artificial Sequence
  Description of Artificial Sequence: Synthetic oligonucleotide
agagucggcaagguggggu

SEQ ID NO: 2546883 - RNA, 19 nt, Artificial Sequence
  Description of Artificial Sequence: Synthetic oligonucleotide
ggugcagcguccaccagcg

SEQ ID NO: 2546884 - RNA, 19 nt, Artificial Sequence
  Description of Artificial Sequence: Synthetic oligonucleotide
accagcggugaucggccac

SEQ ID NO: 2546885 - RNA, 19 nt, Artificial Sequence
  Description of Artificial Sequence: Synthetic oligonucleotide
agcccuugcucccaaccca

SEQ ID NO: 2546886 - RNA, 19 nt, Artificial Sequence
  Description of Artificial Sequence: Synthetic oligonucleotide
auucggggucgucaguggu

SEQ ID NO: 2546887 - RNA, 19 nt, Artificial Sequence
  Description of Artificial Sequence: Synthetic oligonucleotide
acuccguacagugguaggu

SEQ ID NO: 2546888 - RNA, 19 nt, Artificial Sequence
  Description of Artificial Sequence: Synthetic oligonucleotide
uucggggucgucagugguc

SEQ ID NO: 2546889 - RNA, 19 nt, Artificial Sequence
  Description of Artificial Sequence: Synthetic oligonucleotide
cuaacacaggauguuggca

SEQ ID NO: 2546890 - RNA, 19 nt, Artificial Sequence
  Description of Artificial Sequence: Synthetic oligonucleotide
gcuucuuggguugcugucg

SEQ ID NO: 2546891 - RNA, 19 nt, Artificial Sequence
  Description of Artificial Sequence: Synthetic oligonucleotide
aucuccaucccgccuugcu

SEQ ID NO: 2546892 - RNA, 19 nt, Artificial Sequence
  Description of Artificial Sequence: Synthetic oligonucleotide
caaggugggguaccuggug

SEQ ID NO: 2546893 - RNA, 19 nt, Artificial Sequence
  Description of Artificial Sequence: Synthetic oligonucleotide
gccacaagcucuucuaaca

SEQ ID NO: 2546894 - RNA, 19 nt, Artificial Sequence
  Description of Artificial Sequence: Synthetic oligonucleotide
accucuggccacaagcucu

SEQ ID NO: 2546895 - RNA, 19 nt, Artificial Sequence
  Description of Artificial Sequence: Synthetic oligonucleotide
accccgggcaugcagcaug

SEQ ID NO: 2546896 - RNA, 19 nt, Artificial Sequence
  Description of Artificial Sequence: Synthetic oligonucleotide
agccuccggucucagcggg

SEQ ID NO: 2546897 - RNA, 19 nt, Artificial Sequence
  Description of Artificial Sequence: Synthetic oligonucleotide
cugggcaaggucccucccc

SEQ ID NO: 2546898 - RNA, 19 nt, Artificial Sequence
  Description of Artificial Sequence: Synthetic oligonucleotide
cuguuucaccuuauagcca

SEQ ID NO: 2546899 - RNA, 19 nt, Artificial Sequence
  Description of Artificial Sequence: Synthetic oligonucleotide
ugccauagccuccggucuc

SEQ ID NO: 2546900 - RNA, 19 nt, Artificial Sequence
  Description of Artificial Sequence: Synthetic oligonucleotide
gcgcuguuucaccuuauag

SEQ ID NO: 2546901 - RNA, 19 nt, Artificial Sequence
  Description of Artificial Sequence: Synthetic oligonucleotide
cccagugccagauggcucc

SEQ ID NO: 2546902 - RNA, 19 nt, Artificial Sequence
  Description of Artificial Sequence: Synthetic oligonucleotide
ucggggucgucaguggucu

SEQ ID NO: 2546903 - RNA, 19 nt, Artificial Sequence
  Description of Artificial Sequence: Synthetic oligonucleotide
cuacaccucaccccgggca

SEQ ID NO: 2546904 - RNA, 19 nt, Artificial Sequence
  Description of Artificial Sequence: Synthetic oligonucleotide
ccucacacuccguacagug

SEQ ID NO: 2546905 - RNA, 19 nt, Artificial Sequence
  Description of Artificial Sequence: Synthetic oligonucleotide
ucccuccccggccagcucu

SEQ ID NO: 2546906 - RNA, 19 nt, Artificial Sequence
  Description of Artificial Sequence: Synthetic oligonucleotide
cuaguggccccgccuacac

SEQ ID NO: 2546907 - RNA, 19 nt, Artificial Sequence
  Description of Artificial Sequence: Synthetic oligonucleotide
uuccucgccaagagcccug

SEQ ID NO: 2546908 - RNA, 19 nt, Artificial Sequence
  Description of Artificial Sequence: Synthetic oligonucleotide
uccccagugccagauggcu

SEQ ID NO: 2546909 - RNA, 19 nt, Artificial Sequence
  Description of Artificial Sequence: Synthetic oligonucleotide
aggugggguaccuggugca

SEQ ID NO: 2546910 - RNA, 19 nt, Artificial Sequence
  Description of Artificial Sequence: Synthetic oligonucleotide
uugcuggccggaucucccc

SEQ ID NO: 2546911 - RNA, 19 nt, Artificial Sequence
  Description of Artificial Sequence: Synthetic oligonucleotide
ucccuaguggccccgccua

SEQ ID NO: 2546912 - RNA, 19 nt, Artificial Sequence
  Description of Artificial Sequence: Synthetic oligonucleotide
agcucuucuaacacaggau

SEQ ID NO: 2546913 - RNA, 19 nt, Artificial Sequence
  Description of Artificial Sequence: Synthetic oligonucleotide
ucgucaguggucuccucuu

SEQ ID NO: 2546914 - RNA, 19 nt, Artificial Sequence
  Description of Artificial Sequence: Synthetic oligonucleotide
cauagccuccggucucagc

SEQ ID NO: 2546915 - RNA, 19 nt, Artificial Sequence
  Description of Artificial Sequence: Synthetic oligonucleotide
guuucaccuuauagccagg

SEQ ID NO: 2546916 - RNA, 19 nt, Artificial Sequence
  Description of Artificial Sequence: Synthetic oligonucleotide
uccggucucagcgggcuca

SEQ ID NO: 2546917 - RNA, 19 nt, Artificial Sequence
  Description of Artificial Sequence: Synthetic oligonucleotide
aaggucccuccccggccag

SEQ ID NO: 2546918 - RNA, 19 nt, Artificial Sequence
  Description of Artificial Sequence: Synthetic oligonucleotide
gagacaggagcagagcagu

SEQ ID NO: 2546919 - RNA, 19 nt, Artificial Sequence
  Description of Artificial Sequence: Synthetic oligonucleotide
cccacggucacaccucugg

SEQ ID NO: 2546920 - RNA, 19 nt, Artificial Sequence
  Description of Artificial Sequence: Synthetic oligonucleotide
cugucgcagggcagcagag

SEQ ID NO: 2546921 - RNA, 19 nt, Artificial Sequence
  Description of Artificial Sequence: Synthetic oligonucleotide
agcuccccaagguugucaa

SEQ ID NO: 2546922 - RNA, 19 nt, Artificial Sequence
  Description of Artificial Sequence: Synthetic oligonucleotide
cucugucauggccagggga

SEQ ID NO: 2546923 - RNA, 19 nt, Artificial Sequence
  Description of Artificial Sequence: Synthetic oligonucleotide
cugucauggccaggggagg

SEQ ID NO: 2546924 - RNA, 19 nt, Artificial Sequence
  Description of Artificial Sequence: Synthetic oligonucleotide
ucaccccgggcaugcagca

SEQ ID NO: 2546925 - RNA, 19 nt, Artificial Sequence
  Description of Artificial Sequence: Synthetic oligonucleotide
ccaccagcucccuaguggc

SEQ ID NO: 2546926 - RNA, 19 nt, Artificial Sequence
  Description of Artificial Sequence: Synthetic oligonucleotide
gucauggccaggggagggg

SEQ ID NO: 2546927 - RNA, 19 nt, Artificial Sequence
  Description of Artificial Sequence: Synthetic oligonucleotide
uaguggccccgccuacacc

SEQ ID NO: 2546928 - RNA, 19 nt, Artificial Sequence
  Description of Artificial Sequence: Synthetic oligonucleotide
uggccaugcagcuccccaa

SEQ ID NO: 2546929 - RNA, 19 nt, Artificial Sequence
  Description of Artificial Sequence: Synthetic oligonucleotide
uggccggaucuccccagug

SEQ ID NO: 2546930 - RNA, 19 nt, Artificial Sequence
  Description of Artificial Sequence: Synthetic oligonucleotide
aaguggccaugcagcuccc

SEQ ID NO: 2546931 - RNA, 19 nt, Artificial Sequence
  Description of Artificial Sequence: Synthetic oligonucleotide
gcagagucggcaagguggg

SEQ ID NO: 2546932 - RNA, 19 nt, Artificial Sequence
  Description of Artificial Sequence: Synthetic oligonucleotide
cuccccagugccagauggc

SEQ ID NO: 2546933 - RNA, 19 nt, Artificial Sequence
  Description of Artificial Sequence: Synthetic oligonucleotide
agagucgggcucuggggaa

SEQ ID NO: 2546934 - RNA, 19 nt, Artificial Sequence
  Description of Artificial Sequence: Synthetic oligonucleotide
cagagucgggcucugggga

SEQ ID NO: 2546935 - RNA, 19 nt, Artificial Sequence
  Description of Artificial Sequence: Synthetic oligonucleotide
caccuaugcgcuguuucac

SEQ ID NO: 2546936 - RNA, 19 nt, Artificial Sequence
  Description of Artificial Sequence: Synthetic oligonucleotide
agucggcaaggugggguac

SEQ ID NO: 2546937 - RNA, 19 nt, Artificial Sequence
  Description of Artificial Sequence: Synthetic oligonucleotide
ggugaucggccacagagcu

SEQ ID NO: 2546938 - RNA, 19 nt, Artificial Sequence
  Description of Artificial Sequence: Synthetic oligonucleotide
aguggccaugcagcucccc

SEQ ID NO: 2546939 - RNA, 19 nt, Artificial Sequence
  Description of Artificial Sequence: Synthetic oligonucleotide
gccggaucuccccagugcc

SEQ ID NO: 2546940 - RNA, 19 nt, Artificial Sequence
  Description of Artificial Sequence: Synthetic oligonucleotide
ggacaagagacaggagcag

SEQ ID NO: 2546941 - RNA, 19 nt, Artificial Sequence
  Description of Artificial Sequence: Synthetic oligonucleotide
ccacaagcucuucuaacac

SEQ ID NO: 2546942 - RNA, 19 nt, Artificial Sequence
  Description of Artificial Sequence: Synthetic oligonucleotide
uccaucccgccuugcuggc

SEQ ID NO: 2546943 - RNA, 19 nt, Artificial Sequence
  Description of Artificial Sequence: Synthetic oligonucleotide
ccgccuacaccucaccccg

SEQ ID NO: 2546944 - RNA, 19 nt, Artificial Sequence
  Description of Artificial Sequence: Synthetic oligonucleotide
gagcagugacugggcaagg

SEQ ID NO: 2546945 - RNA, 19 nt, Artificial Sequence
  Description of Artificial Sequence: Synthetic oligonucleotide
cucagcgggcucacggguc

SEQ ID NO: 2546946 - RNA, 19 nt, Artificial Sequence
  Description of Artificial Sequence: Synthetic oligonucleotide
agcagugacugggcaaggu

SEQ ID NO: 2546947 - RNA, 19 nt, Artificial Sequence
  Description of Artificial Sequence: Synthetic oligonucleotide
gagucggcaagguggggua

SEQ ID NO: 2546948 - RNA, 19 nt, Artificial Sequence
  Description of Artificial Sequence: Synthetic oligonucleotide
cguacagugguagguaccc

SEQ ID NO: 2546949 - RNA, 19 nt, Artificial Sequence
  Description of Artificial Sequence: Synthetic oligonucleotide
gccuacaccucaccccggg

SEQ ID NO: 2546950 - RNA, 19 nt, Artificial Sequence
  Description of Artificial Sequence: Synthetic oligonucleotide
gcagugacugggcaagguc

SEQ ID NO: 2546951 - RNA, 19 nt, Artificial Sequence
  Description of Artificial Sequence: Synthetic oligonucleotide
agccagggucauauucggg

SEQ ID NO: 2546952 - RNA, 19 nt, Artificial Sequence
  Description of Artificial Sequence: Synthetic oligonucleotide
guacagugguagguacccc

SEQ ID NO: 2546953 - RNA, 19 nt, Artificial Sequence
  Description of Artificial Sequence: Synthetic oligonucleotide
cagcagagucggcaaggug

SEQ ID NO: 2546954 - RNA, 19 nt, Artificial Sequence
  Description of Artificial Sequence: Synthetic oligonucleotide
ccaagguugucaaaggagu

SEQ ID NO: 2546955 - RNA, 19 nt, Artificial Sequence
  Description of Artificial Sequence: Synthetic oligonucleotide
cagagcagugacugggcaa

SEQ ID NO: 2546956 - RNA, 19 nt, Artificial Sequence
  Description of Artificial Sequence: Synthetic oligonucleotide
cccgccuacaccucacccc

SEQ ID NO: 2546957 - RNA, 19 nt, Artificial Sequence
  Description of Artificial Sequence: Synthetic oligonucleotide
ggccaugcagcuccccaag

SEQ ID NO: 2546958 - RNA, 19 nt, Artificial Sequence
  Description of Artificial Sequence: Synthetic oligonucleotide
ccuugcucccaacccaccc

SEQ ID NO: 2546959 - RNA, 19 nt, Artificial Sequence
  Description of Artificial Sequence: Synthetic oligonucleotide
ugacugggcaaggucccuc

SEQ ID NO: 2546960 - RNA, 19 nt, Artificial Sequence
  Description of Artificial Sequence: Synthetic oligonucleotide
gucgucaguggucuccucu

SEQ ID NO: 2546961 - RNA, 19 nt, Artificial Sequence
  Description of Artificial Sequence: Synthetic oligonucleotide
gcuggggcuucuuggguug

SEQ ID NO: 2546962 - RNA, 19 nt, Artificial Sequence
  Description of Artificial Sequence: Synthetic oligonucleotide
cucacgggucucugucaug

SEQ ID NO: 2546963 - RNA, 19 nt, Artificial Sequence
  Description of Artificial Sequence: Synthetic oligonucleotide
ccguacagugguagguacc

SEQ ID NO: 2546964 - RNA, 19 nt, Artificial Sequence
  Description of Artificial Sequence: Synthetic oligonucleotide
ucggcaaggugggguaccu

SEQ ID NO: 2546965 - RNA, 19 nt, Artificial Sequence
  Description of Artificial Sequence: Synthetic oligonucleotide
ccaagcugccauagccucc

SEQ ID NO: 2546966 - RNA, 19 nt, Artificial Sequence
  Description of Artificial Sequence: Synthetic oligonucleotide
guuggcaaguagagaggga

SEQ ID NO: 2546967 - RNA, 19 nt, Artificial Sequence
  Description of Artificial Sequence: Synthetic oligonucleotide
ggccggaucuccccagugc

SEQ ID NO: 2546968 - RNA, 19 nt, Artificial Sequence
  Description of Artificial Sequence: Synthetic oligonucleotide
cacgggucucugucauggc

SEQ ID NO: 2546969 - RNA, 19 nt, Artificial Sequence
  Description of Artificial Sequence: Synthetic oligonucleotide
uggccccgccuacaccuca

SEQ ID NO: 2546970 - RNA, 19 nt, Artificial Sequence
  Description of Artificial Sequence: Synthetic oligonucleotide
gcaaggucccuccccggcc

SEQ ID NO: 2546971 - RNA, 19 nt, Artificial Sequence
  Description of Artificial Sequence: Synthetic oligonucleotide
gucggcaaggugggguacc

SEQ ID NO: 2546972 - RNA, 19 nt, Artificial Sequence
  Description of Artificial Sequence: Synthetic oligonucleotide
gugggguaccuggugcagc

SEQ ID NO: 2546973 - RNA, 19 nt, Artificial Sequence
  Description of Artificial Sequence: Synthetic oligonucleotide
uccucgccaagagcccugc

SEQ ID NO: 2546974 - RNA, 19 nt, Artificial Sequence
  Description of Artificial Sequence: Synthetic oligonucleotide
ugcugucgcagggcagcag

SEQ ID NO: 2546975 - RNA, 19 nt, Artificial Sequence
  Description of Artificial Sequence: Synthetic oligonucleotide
ucccacggucacaccucug

SEQ ID NO: 2546976 - RNA, 19 nt, Artificial Sequence
  Description of Artificial Sequence: Synthetic oligonucleotide
caccucaccccgggcaugc

SEQ ID NO: 2546977 - RNA, 19 nt, Artificial Sequence
  Description of Artificial Sequence: Synthetic oligonucleotide
ggcuucuuggguugcuguc

SEQ ID NO: 2546978 - RNA, 19 nt, Artificial Sequence
  Description of Artificial Sequence: Synthetic oligonucleotide
cuccaccagcucccuagug

SEQ ID NO: 2546979 - RNA, 19 nt, Artificial Sequence
  Description of Artificial Sequence: Synthetic oligonucleotide
caaggucccuccccggcca

SEQ ID NO: 2546980 - RNA, 19 nt, Artificial Sequence
  Description of Artificial Sequence: Synthetic oligonucleotide
agcucccuaguggccccgc

SEQ ID NO: 2546981 - RNA, 19 nt, Artificial Sequence
  Description of Artificial Sequence: Synthetic oligonucleotide
agucgggcucuggggaaag

SEQ ID NO: 2546982 - RNA, 19 nt, Artificial Sequence
  Description of Artificial Sequence: Synthetic oligonucleotide
ccgggcaugcagcaugaag

SEQ ID NO: 2546983 - RNA, 19 nt, Artificial Sequence
  Description of Artificial Sequence: Synthetic oligonucleotide
gcagcguccaccagcggug

SEQ ID NO: 2546984 - RNA, 19 nt, Artificial Sequence
  Description of Artificial Sequence: Synthetic oligonucleotide
cucucccacggucacaccu

SEQ ID NO: 2546985 - RNA, 19 nt, Artificial Sequence
  Description of Artificial Sequence: Synthetic oligonucleotide
cccaccuaugcgcuguuuc

SEQ ID NO: 2546986 - RNA, 19 nt, Artificial Sequence
  Description of Artificial Sequence: Synthetic oligonucleotide
cucgccaagagcccugccu

SEQ ID NO: 2546987 - RNA, 19 nt, Artificial Sequence
  Description of Artificial Sequence: Synthetic oligonucleotide
ccggccagcucucccacgg

SEQ ID NO: 2546988 - RNA, 19 nt, Artificial Sequence
  Description of Artificial Sequence: Synthetic oligonucleotide
ggggucgucaguggucucc

SEQ ID NO: 2546989 - RNA, 19 nt, Artificial Sequence
  Description of Artificial Sequence: Synthetic oligonucleotide
accuuauagccagggucau

SEQ ID NO: 2546990 - RNA, 19 nt, Artificial Sequence
  Description of Artificial Sequence: Synthetic oligonucleotide
gugaucggccacagagcug

SEQ ID NO: 2546991 - RNA, 19 nt, Artificial Sequence
  Description of Artificial Sequence: Synthetic oligonucleotide
ggguaccuggugcagcguc

SEQ ID NO: 2546992 - RNA, 19 nt, Artificial Sequence
  Description of Artificial Sequence: Synthetic oligonucleotide
caggggcuggggcuucuug

SEQ ID NO: 2546993 - RNA, 19 nt, Artificial Sequence
  Description of Artificial Sequence: Synthetic oligonucleotide
cguccaccagcggugaucg

SEQ ID NO: 2546994 - RNA, 19 nt, Artificial Sequence
  Description of Artificial Sequence: Synthetic oligonucleotide
aggucccuccccggccagc

SEQ ID NO: 2546995 - RNA, 19 nt, Artificial Sequence
  Description of Artificial Sequence: Synthetic oligonucleotide
agcccugccuucaggggcu

SEQ ID NO: 2546996 - RNA, 19 nt, Artificial Sequence
  Description of Artificial Sequence: Synthetic oligonucleotide
gggcucacgggucucuguc

SEQ ID NO: 2546997 - RNA, 19 nt, Artificial Sequence
  Description of Artificial Sequence: Synthetic oligonucleotide
ggugggguaccuggugcag

SEQ ID NO: 2546998 - RNA, 19 nt, Artificial Sequence
  Description of Artificial Sequence: Synthetic oligonucleotide
ccucuuccucgccaagagc

SEQ ID NO: 2546999 - RNA, 19 nt, Artificial Sequence
  Description of Artificial Sequence: Synthetic oligonucleotide
ccaccuaugcgcuguuuca

SEQ ID NO: 2547000 - RNA, 19 nt, Artificial Sequence
  Description of Artificial Sequence: Synthetic oligonucleotide
ggcgagaugggccuccccu

SEQ ID NO: 2547001 - RNA, 19 nt, Artificial Sequence
  Description of Artificial Sequence: Synthetic oligonucleotide
agcggugaucggccacaga

SEQ ID NO: 2547002 - RNA, 19 nt, Artificial Sequence
  Description of Artificial Sequence: Synthetic oligonucleotide
cagagucggcaaggugggg

SEQ ID NO: 2547003 - RNA, 19 nt, Artificial Sequence
  Description of Artificial Sequence: Synthetic oligonucleotide
gcuggccggaucuccccag

SEQ ID NO: 2547004 - RNA, 19 nt, Artificial Sequence
  Description of Artificial Sequence: Synthetic oligonucleotide
ccacggucacaccucuggc

SEQ ID NO: 2547005 - RNA, 19 nt, Artificial Sequence
  Description of Artificial Sequence: Synthetic oligonucleotide
cggugaucggccacagagc

SEQ ID NO: 2547006 - RNA, 19 nt, Artificial Sequence
  Description of Artificial Sequence: Synthetic oligonucleotide
acaccucaccccgggcaug

SEQ ID NO: 2547007 - RNA, 19 nt, Artificial Sequence
  Description of Artificial Sequence: Synthetic oligonucleotide
cuggggcuucuuggguugc

SEQ ID NO: 2547008 - RNA, 19 nt, Artificial Sequence
  Description of Artificial Sequence: Synthetic oligonucleotide
gaucuccccagugccagau

SEQ ID NO: 2547009 - RNA, 19 nt, Artificial Sequence
  Description of Artificial Sequence: Synthetic oligonucleotide
cagggcugugcaggugggc

SEQ ID NO: 2547010 - RNA, 19 nt, Artificial Sequence
  Description of Artificial Sequence: Synthetic oligonucleotide
caucuccaucccgccuugc

SEQ ID NO: 2547011 - RNA, 19 nt, Artificial Sequence
  Description of Artificial Sequence: Synthetic oligonucleotide
cuccguacagugguaggua

SEQ ID NO: 2547012 - RNA, 19 nt, Artificial Sequence
  Description of Artificial Sequence: Synthetic oligonucleotide
gcaggcugagccgcucggg

SEQ ID NO: 2547013 - RNA, 19 nt, Artificial Sequence
  Description of Artificial Sequence: Synthetic oligonucleotide
cgggcaugcagcaugaagu

SEQ ID NO: 2547014 - RNA, 19 nt, Artificial Sequence
  Description of Artificial Sequence: Synthetic oligonucleotide
guccaccagcggugaucgg

SEQ ID NO: 2547015 - RNA, 19 nt, Artificial Sequence
  Description of Artificial Sequence: Synthetic oligonucleotide
ccuugcuggccggaucucc

SEQ ID NO: 2547016 - RNA, 19 nt, Artificial Sequence
  Description of Artificial Sequence: Synthetic oligonucleotide
gugcagcguccaccagcgg

SEQ ID NO: 2547017 - RNA, 19 nt, Artificial Sequence
  Description of Artificial Sequence: Synthetic oligonucleotide
ggcucacgggucucuguca

SEQ ID NO: 2547018 - RNA, 19 nt, Artificial Sequence
  Description of Artificial Sequence: Synthetic oligonucleotide
ccuacaccucaccccgggc

SEQ ID NO: 2547019 - RNA, 19 nt, Artificial Sequence
  Description of Artificial Sequence: Synthetic oligonucleotide
cauauucggggucgucagu

SEQ ID NO: 2547020 - RNA, 19 nt, Artificial Sequence
  Description of Artificial Sequence: Synthetic oligonucleotide
cacacuccguacaguggua

SEQ ID NO: 2547021 - RNA, 19 nt, Artificial Sequence
  Description of Artificial Sequence: Synthetic oligonucleotide
gagucgggcucuggggaaa

SEQ ID NO: 2547022 - RNA, 19 nt, Artificial Sequence
  Description of Artificial Sequence: Synthetic oligonucleotide
ccccaagguugucaaagga

SEQ ID NO: 2547023 - RNA, 19 nt, Artificial Sequence
  Description of Artificial Sequence: Synthetic oligonucleotide
ccaacccaccccuccacca

SEQ ID NO: 2547024 - RNA, 19 nt, Artificial Sequence
  Description of Artificial Sequence: Synthetic oligonucleotide
cagcggugaucggccacag

SEQ ID NO: 2547025 - RNA, 19 nt, Artificial Sequence
  Description of Artificial Sequence: Synthetic oligonucleotide
ggucucugucauggccagg

SEQ ID NO: 2547026 - RNA, 19 nt, Artificial Sequence
  Description of Artificial Sequence: Synthetic oligonucleotide
agcgggcucacgggucucu

SEQ ID NO: 2547027 - RNA, 19 nt, Artificial Sequence
  Description of Artificial Sequence: Synthetic oligonucleotide
gaucggccacagagcuggc

SEQ ID NO: 2547028 - RNA, 19 nt, Artificial Sequence
  Description of Artificial Sequence: Synthetic oligonucleotide
ccucaccccgggcaugcag

SEQ ID NO: 2547029 - RNA, 19 nt, Artificial Sequence
  Description of Artificial Sequence: Synthetic oligonucleotide
ccccgccuacaccucaccc

SEQ ID NO: 2547030 - RNA, 19 nt, Artificial Sequence
  Description of Artificial Sequence: Synthetic oligonucleotide
gggcccggcgagaugggcc

SEQ ID NO: 2547031 - RNA, 19 nt, Artificial Sequence
  Description of Artificial Sequence: Synthetic oligonucleotide
ggggaggggacaagagaca

SEQ ID NO: 2547032 - RNA, 19 nt, Artificial Sequence
  Description of Artificial Sequence: Synthetic oligonucleotide
caggagcagagcagugacu

SEQ ID NO: 2547033 - RNA, 19 nt, Artificial Sequence
  Description of Artificial Sequence: Synthetic oligonucleotide
ccuaugcgcuguuucaccu

SEQ ID NO: 2547034 - RNA, 19 nt, Artificial Sequence
  Description of Artificial Sequence: Synthetic oligonucleotide
ggucauauucggggucguc

SEQ ID NO: 2547035 - RNA, 19 nt, Artificial Sequence
  Description of Artificial Sequence: Synthetic oligonucleotide
gccagauggcuccuccucu

SEQ ID NO: 2547036 - RNA, 19 nt, Artificial Sequence
  Description of Artificial Sequence: Synthetic oligonucleotide
agcguccaccagcggugau

SEQ ID NO: 2547037 - RNA, 19 nt, Artificial Sequence
  Description of Artificial Sequence: Synthetic oligonucleotide
gccaagagcccugccuuca

SEQ ID NO: 2547038 - RNA, 19 nt, Artificial Sequence
  Description of Artificial Sequence: Synthetic oligonucleotide
cuaugcgcuguuucaccuu

SEQ ID NO: 2547039 - RNA, 19 nt, Artificial Sequence
  Description of Artificial Sequence: Synthetic oligonucleotide
cggcccacacuccagcuuc

SEQ ID NO: 2547040 - RNA, 19 nt, Artificial Sequence
  Description of Artificial Sequence: Synthetic oligonucleotide
gcccuugcucccaacccac

SEQ ID NO: 2547041 - RNA, 19 nt, Artificial Sequence
  Description of Artificial Sequence: Synthetic oligonucleotide
ccccagugccagauggcuc

SEQ ID NO: 2547042 - RNA, 19 nt, Artificial Sequence
  Description of Artificial Sequence: Synthetic oligonucleotide
cuuccucgccaagagcccu

SEQ ID NO: 2547043 - RNA, 19 nt, Artificial Sequence
  Description of Artificial Sequence: Synthetic oligonucleotide
cuccggucucagcgggcuc

SEQ ID NO: 2547044 - RNA, 19 nt, Artificial Sequence
  Description of Artificial Sequence: Synthetic oligonucleotide
gggcuucuuggguugcugu

SEQ ID NO: 2547045 - RNA, 19 nt, Artificial Sequence
  Description of Artificial Sequence: Synthetic oligonucleotide
cucccuaguggccccgccu

SEQ ID NO: 2547046 - RNA, 19 nt, Artificial Sequence
  Description of Artificial Sequence: Synthetic oligonucleotide
ggaucuccccagugccaga

SEQ ID NO: 2547047 - RNA, 19 nt, Artificial Sequence
  Description of Artificial Sequence: Synthetic oligonucleotide
caccagcggugaucggcca

SEQ ID NO: 2547048 - RNA, 19 nt, Artificial Sequence
  Description of Artificial Sequence: Synthetic oligonucleotide
gcguccaccagcggugauc

SEQ ID NO: 2547049 - RNA, 19 nt, Artificial Sequence
  Description of Artificial Sequence: Synthetic oligonucleotide
ggggaaagguuuucaucuu

SEQ ID NO: 2547050 - RNA, 19 nt, Artificial Sequence
  Description of Artificial Sequence: Synthetic oligonucleotide
cucccacggucacaccucu

SEQ ID NO: 2547051 - RNA, 19 nt, Artificial Sequence
  Description of Artificial Sequence: Synthetic oligonucleotide
augcgcuguuucaccuuau

SEQ ID NO: 2547052 - RNA, 19 nt, Artificial Sequence
  Description of Artificial Sequence: Synthetic oligonucleotide
gcucacgggucucugucau

SEQ ID NO: 2547053 - RNA, 19 nt, Artificial Sequence
  Description of Artificial Sequence: Synthetic oligonucleotide
ggucgucaguggucuccuc

SEQ ID NO: 2547054 - RNA, 19 nt, Artificial Sequence
  Description of Artificial Sequence: Synthetic oligonucleotide
gccccgccuacaccucacc

SEQ ID NO: 2547055 - RNA, 19 nt, Artificial Sequence
  Description of Artificial Sequence: Synthetic oligonucleotide
cccuaguggccccgccuac

SEQ ID NO: 2547056 - RNA, 19 nt, Artificial Sequence
  Description of Artificial Sequence: Synthetic oligonucleotide
ggcuggggcuucuuggguu

SEQ ID NO: 2547057 - RNA, 19 nt, Artificial Sequence
  Description of Artificial Sequence: Synthetic oligonucleotide
ggcccggcgagaugggccu

SEQ ID NO: 2547058 - RNA, 19 nt, Artificial Sequence
  Description of Artificial Sequence: Synthetic oligonucleotide
cagcguccaccagcgguga

SEQ ID NO: 2547059 - RNA, 19 nt, Artificial Sequence
  Description of Artificial Sequence: Synthetic oligonucleotide
ccggaucuccccagugcca

SEQ ID NO: 2547060 - RNA, 19 nt, Artificial Sequence
  Description of Artificial Sequence: Synthetic oligonucleotide
ccagcggugaucggccaca

SEQ ID NO: 2547061 - RNA, 19 nt, Artificial Sequence
  Description of Artificial Sequence: Synthetic oligonucleotide
gucccuccccggccagcuc

SEQ ID NO: 2547062 - RNA, 19 nt, Artificial Sequence
  Description of Artificial Sequence: Synthetic oligonucleotide
ccucgccaagagcccugcc

SEQ ID NO: 2547063 - RNA, 19 nt, Artificial Sequence
  Description of Artificial Sequence: Synthetic oligonucleotide
guggccccgccuacaccuc

SEQ ID NO: 2547064 - RNA, 19 nt, Artificial Sequence
  Description of Artificial Sequence: Synthetic oligonucleotide
ccuaguggccccgccuaca

SEQ ID NO: 2547065 - RNA, 19 nt, Artificial Sequence
  Description of Artificial Sequence: Synthetic oligonucleotide
cuggccggaucuccccagu

SEQ ID NO: 2547066 - RNA, 19 nt, Artificial Sequence
  Description of Artificial Sequence: Synthetic oligonucleotide
ccauagccuccggucucag

SEQ ID NO: 2547067 - RNA, 19 nt, Artificial Sequence
  Description of Artificial Sequence: Synthetic oligonucleotide
cccggcgagaugggccucc

SEQ ID NO: 2547068 - RNA, 19 nt, Artificial Sequence
  Description of Artificial Sequence: Synthetic oligonucleotide
ccaucccgccuugcuggcc

SEQ ID NO: 2547069 - RNA, 19 nt, Artificial Sequence
  Description of Artificial Sequence: Synthetic oligonucleotide
cgccuacaccucaccccgg

SEQ ID NO: 2547070 - RNA, 19 nt, Artificial Sequence
  Description of Artificial Sequence: Synthetic oligonucleotide
gggucgucaguggucuccu

SEQ ID NO: 2547071 - RNA, 19 nt, Artificial Sequence
  Description of Artificial Sequence: Synthetic oligonucleotide
ggccccgccuacaccucac

SEQ ID NO: 2547072 - RNA, 19 nt, Artificial Sequence
  Description of Artificial Sequence: Synthetic oligonucleotide
gcgggcucacgggucucug

SEQ ID NO: 2547073 - RNA, 19 nt, Artificial Sequence
  Description of Artificial Sequence: Synthetic oligonucleotide
gccuccggucucagcgggc

SEQ ID NO: 2547074 - RNA, 19 nt, Artificial Sequence
  Description of Artificial Sequence: Synthetic oligonucleotide
ggucccuccccggccagcu

SEQ ID NO: 2547075 - RNA, 19 nt, Artificial Sequence
  Description of Artificial Sequence: Synthetic oligonucleotide
gggucauauucggggucgu

SEQ ID NO: 2547076 - RNA, 19 nt, Artificial Sequence
  Description of Artificial Sequence: Synthetic oligonucleotide
ccggcgagaugggccuccc

SEQ ID NO: 2547077 - RNA, 19 nt, Artificial Sequence
  Description of Artificial Sequence: Synthetic oligonucleotide
ccggucucagcgggcucac

SEQ ID NO: 2547078 - RNA, 19 nt, Artificial Sequence
  Description of Artificial Sequence: Synthetic oligonucleotide
cggcgagaugggccucccc

SEQ ID NO: 2547079 - RNA, 19 nt, Artificial Sequence
  Description of Artificial Sequence: Synthetic oligonucleotide
ccuccggucucagcgggcu

SEQ ID NO: 2547080 - RNA, 19 nt, Artificial Sequence
  Description of Artificial Sequence: Synthetic oligonucleotide
cggcaaggugggguaccug

SEQ ID NO: 2547081 - RNA, 19 nt, Artificial Sequence
  Description of Artificial Sequence: Synthetic oligonucleotide
gggguaccuggugcagcgu

SEQ ID NO: 2547082 - RNA, 19 nt, Artificial Sequence
  Description of Artificial Sequence: Synthetic oligonucleotide
cggucucagcgggcucacg

SEQ ID NO: 2547083 - RNA, 19 nt, Artificial Sequence
  Description of Artificial Sequence: Synthetic oligonucleotide
cccggcccacacuccagcu

SEQ ID NO: 2547084 - RNA, 19 nt, Artificial Sequence
  Description of Artificial Sequence: Synthetic oligonucleotide
cggggucgucaguggucuc

SEQ ID NO: 2547085 - RNA, 19 nt, Artificial Sequence
  Description of Artificial Sequence: Synthetic oligonucleotide
caccccgggcaugcagcau

SEQ ID NO: 2547086 - RNA, 19 nt, Artificial Sequence
  Description of Artificial Sequence: Synthetic oligonucleotide
ccggcccacacuccagcuu

SEQ ID NO: 2547087 - RNA, 19 nt, Artificial Sequence
  Description of Artificial Sequence: Synthetic oligonucleotide
gcccggcgagaugggccuc

SEQ ID NO: 2547088 - RNA, 19 nt, Artificial Sequence
  Description of Artificial Sequence: Synthetic oligonucleotide
cgggcucacgggucucugu

SEQ ID NO: 2547089 - RNA, 19 nt, Artificial Sequence
  Description of Artificial Sequence: Synthetic oligonucleotide
cccgggcaugcagcaugaa

SEQ ID NO: 2547090 - RNA, 19 nt, Artificial Sequence
  Description of Artificial Sequence: Synthetic oligonucleotide
cggccagcucucccacggu

SEQ ID NO: 2547091 - RNA, 19 nt, Artificial Sequence
  Description of Artificial Sequence: Synthetic oligonucleotide
ccccaccuaugcgcuguuu

SEQ ID NO: 2547092 - RNA, 19 nt, Artificial Sequence
  Description of Artificial Sequence: Synthetic oligonucleotide
aaauuuugaaaguggauag

SEQ ID NO: 2547093 - RNA, 19 nt, Artificial Sequence
  Description of Artificial Sequence: Synthetic oligonucleotide
uuuccuauugugaaaauca

SEQ ID NO: 2547094 - RNA, 19 nt, Artificial Sequence
  Description of Artificial Sequence: Synthetic oligonucleotide
uuugugauggauaucauuc

SEQ ID NO: 2547095 - RNA, 19 nt, Artificial Sequence
  Description of Artificial Sequence: Synthetic oligonucleotide
uagugaaucacaauugugc

SEQ ID NO: 2547096 - RNA, 19 nt, Artificial Sequence
  Description of Artificial Sequence: Synthetic oligonucleotide
ucucaaauaauaaagcaaa

SEQ ID NO: 2547097 - RNA, 19 nt, Artificial Sequence
  Description of Artificial Sequence: Synthetic oligonucleotide
auguaaugacaucugaggc

SEQ ID NO: 2547098 - RNA, 19 nt, Artificial Sequence
  Description of Artificial Sequence: Synthetic oligonucleotide
ugaaaaucagcuucuuucg

SEQ ID NO: 2547099 - RNA, 19 nt, Artificial Sequence
  Description of Artificial Sequence: Synthetic oligonucleotide
gaagugaccgucuuaaaag

SEQ ID NO: 2547100 - RNA, 19 nt, Artificial Sequence
  Description of Artificial Sequence: Synthetic oligonucleotide
aaaguggauagacaucuuc

SEQ ID NO: 2547101 - RNA, 19 nt, Artificial Sequence
  Description of Artificial Sequence: Synthetic oligonucleotide
uuauuaucaggcaaguaug

SEQ ID NO: 2547102 - RNA, 19 nt, Artificial Sequence
  Description of Artificial Sequence: Synthetic oligonucleotide
cauguaaugacaucugagg

SEQ ID NO: 2547103 - RNA, 19 nt, Artificial Sequence
  Description of Artificial Sequence: Synthetic oligonucleotide
aagucugacacacaggaca

SEQ ID NO: 2547104 - RNA, 19 nt, Artificial Sequence
  Description of Artificial Sequence: Synthetic oligonucleotide
aaagugucagaagucaugg

SEQ ID NO: 2547105 - RNA, 19 nt, Artificial Sequence
  Description of Artificial Sequence: Synthetic oligonucleotide
aaagcaaauuuugaaagug

SEQ ID NO: 2547106 - RNA, 19 nt, Artificial Sequence
  Description of Artificial Sequence: Synthetic oligonucleotide
cagguaaucaggaucaggg

SEQ ID NO: 2547107 - RNA, 19 nt, Artificial Sequence
  Description of Artificial Sequence: Synthetic oligonucleotide
uguuuugugauggauauca

SEQ ID NO: 2547108 - RNA, 19 nt, Artificial Sequence
  Description of Artificial Sequence: Synthetic oligonucleotide
aaguggauagacaucuucc

SEQ ID NO: 2547109 - RNA, 19 nt, Artificial Sequence
  Description of Artificial Sequence: Synthetic oligonucleotide
aguggauagacaucuuccc

SEQ ID NO: 2547110 - RNA, 19 nt, Artificial Sequence
  Description of Artificial Sequence: Synthetic oligonucleotide
agccaaaauuuucuggucc

SEQ ID NO: 2547111 - RNA, 19 nt, Artificial Sequence
  Description of Artificial Sequence: Synthetic oligonucleotide
ucauagugaaucacaauug

SEQ ID NO: 2547112 - RNA, 19 nt, Artificial Sequence
  Description of Artificial Sequence: Synthetic oligonucleotide
uuuguauagcccuagcugu

SEQ ID NO: 2547113 - RNA, 19 nt, Artificial Sequence
  Description of Artificial Sequence: Synthetic oligonucleotide
uuaucaggcaaguaugcag

SEQ ID NO: 2547114 - RNA, 19 nt, Artificial Sequence
  Description of Artificial Sequence: Synthetic oligonucleotide
ugucucaaauaauaaagca

SEQ ID NO: 2547115 - RNA, 19 nt, Artificial Sequence
  Description of Artificial Sequence: Synthetic oligonucleotide
gauaucauuccauguaaug

SEQ ID NO: 2547116 - RNA, 19 nt, Artificial Sequence
  Description of Artificial Sequence: Synthetic oligonucleotide
ugaaaguggauagacaucu

SEQ ID NO: 2547117 - RNA, 19 nt, Artificial Sequence
  Description of Artificial Sequence: Synthetic oligonucleotide
auagacaucuucccggcac

SEQ ID NO: 2547118 - RNA, 19 nt, Artificial Sequence
  Description of Artificial Sequence: Synthetic oligonucleotide
uaucauuccauguaaugac

SEQ ID NO: 2547119 - RNA, 19 nt, Artificial Sequence
  Description of Artificial Sequence: Synthetic oligonucleotide
acucuccuuacucaauucc

SEQ ID NO: 2547120 - RNA, 19 nt, Artificial Sequence
  Description of Artificial Sequence: Synthetic oligonucleotide
uguaaugacaucugaggcu

SEQ ID NO: 2547121 - RNA, 19 nt, Artificial Sequence
  Description of Artificial Sequence: Synthetic oligonucleotide
uuccuuauuaucaggcaag

SEQ ID NO: 2547122 - RNA, 19 nt, Artificial Sequence
  Description of Artificial Sequence: Synthetic oligonucleotide
ucuauguguuccaggauag

SEQ ID NO: 2547123 - RNA, 19 nt, Artificial Sequence
  Description of Artificial Sequence: Synthetic oligonucleotide
ugcucauuuguuuggaugc

SEQ ID NO: 2547124 - RNA, 19 nt, Artificial Sequence
  Description of Artificial Sequence: Synthetic oligonucleotide
uauuaucaggcaaguaugc

SEQ ID NO: 2547125 - RNA, 19 nt, Artificial Sequence
  Description of Artificial Sequence: Synthetic oligonucleotide
ucugguccuccaaacaugg

SEQ ID NO: 2547126 - RNA, 19 nt, Artificial Sequence
  Description of Artificial Sequence: Synthetic oligonucleotide
uauguguuccaggauaggg

SEQ ID NO: 2547127 - RNA, 19 nt, Artificial Sequence
  Description of Artificial Sequence: Synthetic oligonucleotide
cuuuguauagcccuagcug

SEQ ID NO: 2547128 - RNA, 19 nt, Artificial Sequence
  Description of Artificial Sequence: Synthetic oligonucleotide
uuggagcagacccaaaacc

SEQ ID NO: 2547129 - RNA, 19 nt, Artificial Sequence
  Description of Artificial Sequence: Synthetic oligonucleotide
aaaauuuucugguccucca

SEQ ID NO: 2547130 - RNA, 19 nt, Artificial Sequence
  Description of Artificial Sequence: Synthetic oligonucleotide
uggugauacaagaaguaca

SEQ ID NO: 2547131 - RNA, 19 nt, Artificial Sequence
  Description of Artificial Sequence: Synthetic oligonucleotide
ugaaucacaauugugccac

SEQ ID NO: 2547132 - RNA, 19 nt, Artificial Sequence
  Description of Artificial Sequence: Synthetic oligonucleotide
aagcaaauuuugaaagugg

SEQ ID NO: 2547133 - RNA, 19 nt, Artificial Sequence
  Description of Artificial Sequence: Synthetic oligonucleotide
ucgagaauuuccuauugug

SEQ ID NO: 2547134 - RNA, 19 nt, Artificial Sequence
  Description of Artificial Sequence: Synthetic oligonucleotide
uaucaggcaaguaugcaga

SEQ ID NO: 2547135 - RNA, 19 nt, Artificial Sequence
  Description of Artificial Sequence: Synthetic oligonucleotide
agaucuauguguuccagga

SEQ ID NO: 2547136 - RNA, 19 nt, Artificial Sequence
  Description of Artificial Sequence: Synthetic oligonucleotide
uuuugaaaguggauagaca

SEQ ID NO: 2547137 - RNA, 19 nt, Artificial Sequence
  Description of Artificial Sequence: Synthetic oligonucleotide
uaaagcaaauuuugaaagu

SEQ ID NO: 2547138 - RNA, 19 nt, Artificial Sequence
  Description of Artificial Sequence: Synthetic oligonucleotide
cucuggauaccauaggaag

SEQ ID NO: 2547139 - RNA, 19 nt, Artificial Sequence
  Description of Artificial Sequence: Synthetic oligonucleotide
ucacaauugugccacaguc

SEQ ID NO: 2547140 - RNA, 19 nt, Artificial Sequence
  Description of Artificial Sequence: Synthetic oligonucleotide
acacguuucagguaaucag

SEQ ID NO: 2547141 - RNA, 19 nt, Artificial Sequence
  Description of Artificial Sequence: Synthetic oligonucleotide
ugugauggauaucauucca

SEQ ID NO: 2547142 - RNA, 19 nt, Artificial Sequence
  Description of Artificial Sequence: Synthetic oligonucleotide
cuuaaaagugucagaaguc

SEQ ID NO: 2547143 - RNA, 19 nt, Artificial Sequence
  Description of Artificial Sequence: Synthetic oligonucleotide
ucuuuguauagcccuagcu

SEQ ID NO: 2547144 - RNA, 19 nt, Artificial Sequence
  Description of Artificial Sequence: Synthetic oligonucleotide
cacguuucagguaaucagg

SEQ ID NO: 2547145 - RNA, 19 nt, Artificial Sequence
  Description of Artificial Sequence: Synthetic oligonucleotide
auacaagaaguacagaauu

SEQ ID NO: 2547146 - RNA, 19 nt, Artificial Sequence
  Description of Artificial Sequence: Synthetic oligonucleotide
augcagaucuauguguucc

SEQ ID NO: 2547147 - RNA, 19 nt, Artificial Sequence
  Description of Artificial Sequence: Synthetic oligonucleotide
uccuauugugaaaaucagc

SEQ ID NO: 2547148 - RNA, 19 nt, Artificial Sequence
  Description of Artificial Sequence: Synthetic oligonucleotide
uuccuauugugaaaaucag

SEQ ID NO: 2547149 - RNA, 19 nt, Artificial Sequence
  Description of Artificial Sequence: Synthetic oligonucleotide
uguuuucuuagacaggguu

SEQ ID NO: 2547150 - RNA, 19 nt, Artificial Sequence
  Description of Artificial Sequence: Synthetic oligonucleotide
auaucauuccauguaauga

SEQ ID NO: 2547151 - RNA, 19 nt, Artificial Sequence
  Description of Artificial Sequence: Synthetic oligonucleotide
aaaucagcuucuuucgaaa

SEQ ID NO: 2547152 - RNA, 19 nt, Artificial Sequence
  Description of Artificial Sequence: Synthetic oligonucleotide
aaaagugucagaagucaug

SEQ ID NO: 2547153 - RNA, 19 nt, Artificial Sequence
  Description of Artificial Sequence: Synthetic oligonucleotide
aagugaccgucuuaaaagu

SEQ ID NO: 2547154 - RNA, 19 nt, Artificial Sequence
  Description of Artificial Sequence: Synthetic oligonucleotide
caaacauggauguuuugug

SEQ ID NO: 2547155 - RNA, 19 nt, Artificial Sequence
  Description of Artificial Sequence: Synthetic oligonucleotide
gagaauuuccuauugugaa

SEQ ID NO: 2547156 - RNA, 19 nt, Artificial Sequence
  Description of Artificial Sequence: Synthetic oligonucleotide
ucuggauaccauaggaagu

SEQ ID NO: 2547157 - RNA, 19 nt, Artificial Sequence
  Description of Artificial Sequence: Synthetic oligonucleotide
aauugugccacagucucca

SEQ ID NO: 2547158 - RNA, 19 nt, Artificial Sequence
  Description of Artificial Sequence: Synthetic oligonucleotide
uguguuccaggauagggcu

SEQ ID NO: 2547159 - RNA, 19 nt, Artificial Sequence
  Description of Artificial Sequence: Synthetic oligonucleotide
auuuccuauugugaaaauc

SEQ ID NO: 2547160 - RNA, 19 nt, Artificial Sequence
  Description of Artificial Sequence: Synthetic oligonucleotide
guaaucaggaucaggguag

SEQ ID NO: 2547161 - RNA, 19 nt, Artificial Sequence
  Description of Artificial Sequence: Synthetic oligonucleotide
uggauaucauuccauguaa

SEQ ID NO: 2547162 - RNA, 19 nt, Artificial Sequence
  Description of Artificial Sequence: Synthetic oligonucleotide
uacaagaaguacagaauuc

SEQ ID NO: 2547163 - RNA, 19 nt, Artificial Sequence
  Description of Artificial Sequence: Synthetic oligonucleotide
uuuggugauacaagaagua

SEQ ID NO: 2547164 - RNA, 19 nt, Artificial Sequence
  Description of Artificial Sequence: Synthetic oligonucleotide
cauggauguuuugugaugg

SEQ ID NO: 2547165 - RNA, 19 nt, Artificial Sequence
  Description of Artificial Sequence: Synthetic oligonucleotide
cauaaccaggaagugaccg

SEQ ID NO: 2547166 - RNA, 19 nt, Artificial Sequence
  Description of Artificial Sequence: Synthetic oligonucleotide
uguugcucgagaauuuccu

SEQ ID NO: 2547167 - RNA, 19 nt, Artificial Sequence
  Description of Artificial Sequence: Synthetic oligonucleotide
ugugccacagucuccauaa

SEQ ID NO: 2547168 - RNA, 19 nt, Artificial Sequence
  Description of Artificial Sequence: Synthetic oligonucleotide
uuuugcuuucagcucuucc

SEQ ID NO: 2547169 - RNA, 19 nt, Artificial Sequence
  Description of Artificial Sequence: Synthetic oligonucleotide
uuuucugguccuccaaaca

SEQ ID NO: 2547170 - RNA, 19 nt, Artificial Sequence
  Description of Artificial Sequence: Synthetic oligonucleotide
cauaggaagucugacacac

SEQ ID NO: 2547171 - RNA, 19 nt, Artificial Sequence
  Description of Artificial Sequence: Synthetic oligonucleotide
acaagaaguacagaauuca

SEQ ID NO: 2547172 - RNA, 19 nt, Artificial Sequence
  Description of Artificial Sequence: Synthetic oligonucleotide
uugugauggauaucauucc

SEQ ID NO: 2547173 - RNA, 19 nt, Artificial Sequence
  Description of Artificial Sequence: Synthetic oligonucleotide
cuuacucaauuccuuuugc

SEQ ID NO: 2547174 - RNA, 19 nt, Artificial Sequence
  Description of Artificial Sequence: Synthetic oligonucleotide
acuaccaggcugcagugag

SEQ ID NO: 2547175 - RNA, 19 nt, Artificial Sequence
  Description of Artificial Sequence: Synthetic oligonucleotide
ugucagaagucaugguucc

SEQ ID NO: 2547176 - RNA, 19 nt, Artificial Sequence
  Description of Artificial Sequence: Synthetic oligonucleotide
auguguuccaggauagggc

SEQ ID NO: 2547177 - RNA, 19 nt, Artificial Sequence
  Description of Artificial Sequence: Synthetic oligonucleotide
aauuuugaaaguggauaga

SEQ ID NO: 2547178 - RNA, 19 nt, Artificial Sequence
  Description of Artificial Sequence: Synthetic oligonucleotide
gguagccaaaauuuucugg

SEQ ID NO: 2547179 - RNA, 19 nt, Artificial Sequence
  Description of Artificial Sequence: Synthetic oligonucleotide
accacuaccaggcugcagu

SEQ ID NO: 2547180 - RNA, 19 nt, Artificial Sequence
  Description of Artificial Sequence: Synthetic oligonucleotide
cuuauuaucaggcaaguau

SEQ ID NO: 2547181 - RNA, 19 nt, Artificial Sequence
  Description of Artificial Sequence: Synthetic oligonucleotide
aaucacaauugugccacag

SEQ ID NO: 2547182 - RNA, 19 nt, Artificial Sequence
  Description of Artificial Sequence: Synthetic oligonucleotide
cuuuuccuggguuugggug

SEQ ID NO: 2547183 - RNA, 19 nt, Artificial Sequence
  Description of Artificial Sequence: Synthetic oligonucleotide
ugccacagucuccauaacc

SEQ ID NO: 2547184 - RNA, 19 nt, Artificial Sequence
  Description of Artificial Sequence: Synthetic oligonucleotide
ucuuggagcagacccaaaa

SEQ ID NO: 2547185 - RNA, 19 nt, Artificial Sequence
  Description of Artificial Sequence: Synthetic oligonucleotide
aguacagaauucaugcuug

SEQ ID NO: 2547186 - RNA, 19 nt, Artificial Sequence
  Description of Artificial Sequence: Synthetic oligonucleotide
uguauagcccuagcugucg

SEQ ID NO: 2547187 - RNA, 19 nt, Artificial Sequence
  Description of Artificial Sequence: Synthetic oligonucleotide
uugggugcucauuuguuug

SEQ ID NO: 2547188 - RNA, 19 nt, Artificial Sequence
  Description of Artificial Sequence: Synthetic oligonucleotide
gccauaaacucagagaucc

SEQ ID NO: 2547189 - RNA, 19 nt, Artificial Sequence
  Description of Artificial Sequence: Synthetic oligonucleotide
aucuauguguuccaggaua

SEQ ID NO: 2547190 - RNA, 19 nt, Artificial Sequence
  Description of Artificial Sequence: Synthetic oligonucleotide
auggauaucauuccaugua

SEQ ID NO: 2547191 - RNA, 19 nt, Artificial Sequence
  Description of Artificial Sequence: Synthetic oligonucleotide
ucagguaaucaggaucagg

SEQ ID NO: 2547192 - RNA, 19 nt, Artificial Sequence
  Description of Artificial Sequence: Synthetic oligonucleotide
cacagucuccauaaccagg

SEQ ID NO: 2547193 - RNA, 19 nt, Artificial Sequence
  Description of Artificial Sequence: Synthetic oligonucleotide
ucaaugacauggcuuuggu

SEQ ID NO: 2547194 - RNA, 19 nt, Artificial Sequence
  Description of Artificial Sequence: Synthetic oligonucleotide
aagugcaggguuaaaggug

SEQ ID NO: 2547195 - RNA, 19 nt, Artificial Sequence
  Description of Artificial Sequence: Synthetic oligonucleotide
cauaaacucagagauccac

SEQ ID NO: 2547196 - RNA, 19 nt, Artificial Sequence
  Description of Artificial Sequence: Synthetic oligonucleotide
caggauagggcuuuuccug

SEQ ID NO: 2547197 - RNA, 19 nt, Artificial Sequence
  Description of Artificial Sequence: Synthetic oligonucleotide
ucauuccauguaaugacau

SEQ ID NO: 2547198 - RNA, 19 nt, Artificial Sequence
  Description of Artificial Sequence: Synthetic oligonucleotide
ucucuggauaccauaggaa

SEQ ID NO: 2547199 - RNA, 19 nt, Artificial Sequence
  Description of Artificial Sequence: Synthetic oligonucleotide
aaaaccucucuuccuuccu

SEQ ID NO: 2547200 - RNA, 19 nt, Artificial Sequence
  Description of Artificial Sequence: Synthetic oligonucleotide
uuauuucauagugaaucac

SEQ ID NO: 2547201 - RNA, 19 nt, Artificial Sequence
  Description of Artificial Sequence: Synthetic oligonucleotide
acaucugaggcuccuguug

SEQ ID NO: 2547202 - RNA, 19 nt, Artificial Sequence
  Description of Artificial Sequence: Synthetic oligonucleotide
gaauuuccuauugugaaaa

SEQ ID NO: 2547203 - RNA, 19 nt, Artificial Sequence
  Description of Artificial Sequence: Synthetic oligonucleotide
uuuugugauggauaucauu

SEQ ID NO: 2547204 - RNA, 19 nt, Artificial Sequence
  Description of Artificial Sequence: Synthetic oligonucleotide
caaauuuugaaaguggaua

SEQ ID NO: 2547205 - RNA, 19 nt, Artificial Sequence
  Description of Artificial Sequence: Synthetic oligonucleotide
gauguuuugugauggauau

SEQ ID NO: 2547206 - RNA, 19 nt, Artificial Sequence
  Description of Artificial Sequence: Synthetic oligonucleotide
uaccauaggaagucugaca

SEQ ID NO: 2547207 - RNA, 19 nt, Artificial Sequence
  Description of Artificial Sequence: Synthetic oligonucleotide
ugguccuccaaacauggau

SEQ ID NO: 2547208 - RNA, 19 nt, Artificial Sequence
  Description of Artificial Sequence: Synthetic oligonucleotide
cuugacacguuucagguaa

SEQ ID NO: 2547209 - RNA, 19 nt, Artificial Sequence
  Description of Artificial Sequence: Synthetic oligonucleotide
auaccauaggaagucugac

SEQ ID NO: 2547210 - RNA, 19 nt, Artificial Sequence
  Description of Artificial Sequence: Synthetic oligonucleotide
caaaaccucucuuccuucc

SEQ ID NO: 2547211 - RNA, 19 nt, Artificial Sequence
  Description of Artificial Sequence: Synthetic oligonucleotide
accgucuuaaaagugucag

SEQ ID NO: 2547212 - RNA, 19 nt, Artificial Sequence
  Description of Artificial Sequence: Synthetic oligonucleotide
agaauuuccuauugugaaa

SEQ ID NO: 2547213 - RNA, 19 nt, Artificial Sequence
  Description of Artificial Sequence: Synthetic oligonucleotide
ucugacacacaggacacac

SEQ ID NO: 2547214 - RNA, 19 nt, Artificial Sequence
  Description of Artificial Sequence: Synthetic oligonucleotide
acauggauguuuugugaug

SEQ ID NO: 2547215 - RNA, 19 nt, Artificial Sequence
  Description of Artificial Sequence: Synthetic oligonucleotide
cagaucuauguguuccagg

SEQ ID NO: 2547216 - RNA, 19 nt, Artificial Sequence
  Description of Artificial Sequence: Synthetic oligonucleotide
agcaaauuuugaaagugga

SEQ ID NO: 2547217 - RNA, 19 nt, Artificial Sequence
  Description of Artificial Sequence: Synthetic oligonucleotide
cuuggagcagacccaaaac

SEQ ID NO: 2547218 - RNA, 19 nt, Artificial Sequence
  Description of Artificial Sequence: Synthetic oligonucleotide
ugugaaaaucagcuucuuu

SEQ ID NO: 2547219 - RNA, 19 nt, Artificial Sequence
  Description of Artificial Sequence: Synthetic oligonucleotide
aauuuccuauugugaaaau

SEQ ID NO: 2547220 - RNA, 19 nt, Artificial Sequence
  Description of Artificial Sequence: Synthetic oligonucleotide
ucuuagacaggguuucuuu

SEQ ID NO: 2547221 - RNA, 19 nt, Artificial Sequence
  Description of Artificial Sequence: Synthetic oligonucleotide
guagccaaaauuuucuggu

SEQ ID NO: 2547222 - RNA, 19 nt, Artificial Sequence
  Description of Artificial Sequence: Synthetic oligonucleotide
auugugaaaaucagcuucu

SEQ ID NO: 2547223 - RNA, 19 nt, Artificial Sequence
  Description of Artificial Sequence: Synthetic oligonucleotide
agucugacacacaggacac

SEQ ID NO: 2547224 - RNA, 19 nt, Artificial Sequence
  Description of Artificial Sequence: Synthetic oligonucleotide
auaaccaggaagugaccgu

SEQ ID NO: 2547225 - RNA, 19 nt, Artificial Sequence
  Description of Artificial Sequence: Synthetic oligonucleotide
caucugaggcuccuguugc

SEQ ID NO: 2547226 - RNA, 19 nt, Artificial Sequence
  Description of Artificial Sequence: Synthetic oligonucleotide
uucuuuguauagcccuagc

SEQ ID NO: 2547227 - RNA, 19 nt, Artificial Sequence
  Description of Artificial Sequence: Synthetic oligonucleotide
gauaccauaggaagucuga

SEQ ID NO: 2547228 - RNA, 19 nt, Artificial Sequence
  Description of Artificial Sequence: Synthetic oligonucleotide
ccaagugcaggguuaaagg

SEQ ID NO: 2547229 - RNA, 19 nt, Artificial Sequence
  Description of Artificial Sequence: Synthetic oligonucleotide
agucaugguuccuccaucu

SEQ ID NO: 2547230 - RNA, 19 nt, Artificial Sequence
  Description of Artificial Sequence: Synthetic oligonucleotide
auagugaaucacaauugug

SEQ ID NO: 2547231 - RNA, 19 nt, Artificial Sequence
  Description of Artificial Sequence: Synthetic oligonucleotide
cagaagucaugguuccucc

SEQ ID NO: 2547232 - RNA, 19 nt, Artificial Sequence
  Description of Artificial Sequence: Synthetic oligonucleotide
ugaccgucuuaaaaguguc

SEQ ID NO: 2547233 - RNA, 19 nt, Artificial Sequence
  Description of Artificial Sequence: Synthetic oligonucleotide
cuguugcucgagaauuucc

SEQ ID NO: 2547234 - RNA, 19 nt, Artificial Sequence
  Description of Artificial Sequence: Synthetic oligonucleotide
aucaggguagccaaaauuu

SEQ ID NO: 2547235 - RNA, 19 nt, Artificial Sequence
  Description of Artificial Sequence: Synthetic oligonucleotide
uugcucgagaauuuccuau

SEQ ID NO: 2547236 - RNA, 19 nt, Artificial Sequence
  Description of Artificial Sequence: Synthetic oligonucleotide
uuugggugcucauuuguuu

SEQ ID NO: 2547237 - RNA, 19 nt, Artificial Sequence
  Description of Artificial Sequence: Synthetic oligonucleotide
aaugacaucugaggcuccu

SEQ ID NO: 2547238 - RNA, 19 nt, Artificial Sequence
  Description of Artificial Sequence: Synthetic oligonucleotide
cuggauaccauaggaaguc

SEQ ID NO: 2547239 - RNA, 19 nt, Artificial Sequence
  Description of Artificial Sequence: Synthetic oligonucleotide
gauggauaucauuccaugu

SEQ ID NO: 2547240 - RNA, 19 nt, Artificial Sequence
  Description of Artificial Sequence: Synthetic oligonucleotide
caggcuucaaugacauggc

SEQ ID NO: 2547241 - RNA, 19 nt, Artificial Sequence
  Description of Artificial Sequence: Synthetic oligonucleotide
aucacaauugugccacagu

SEQ ID NO: 2547242 - RNA, 19 nt, Artificial Sequence
  Description of Artificial Sequence: Synthetic oligonucleotide
uggguuugggugcucauuu

SEQ ID NO: 2547243 - RNA, 19 nt, Artificial Sequence
  Description of Artificial Sequence: Synthetic oligonucleotide
ugguuccuccaucuggcug

SEQ ID NO: 2547244 - RNA, 19 nt, Artificial Sequence
  Description of Artificial Sequence: Synthetic oligonucleotide
auagcccuagcugucguag

SEQ ID NO: 2547245 - RNA, 19 nt, Artificial Sequence
  Description of Artificial Sequence: Synthetic oligonucleotide
ucuccuuacucaauuccuu

SEQ ID NO: 2547246 - RNA, 19 nt, Artificial Sequence
  Description of Artificial Sequence: Synthetic oligonucleotide
cuuuggugauacaagaagu

SEQ ID NO: 2547247 - RNA, 19 nt, Artificial Sequence
  Description of Artificial Sequence: Synthetic oligonucleotide
ugcagaucuauguguucca

SEQ ID NO: 2547248 - RNA, 19 nt, Artificial Sequence
  Description of Artificial Sequence: Synthetic oligonucleotide
agguaaucaggaucagggu

SEQ ID NO: 2547249 - RNA, 19 nt, Artificial Sequence
  Description of Artificial Sequence: Synthetic oligonucleotide
cauuccauguaaugacauc

SEQ ID NO: 2547250 - RNA, 19 nt, Artificial Sequence
  Description of Artificial Sequence: Synthetic oligonucleotide
auggcuuuggugauacaag

SEQ ID NO: 2547251 - RNA, 19 nt, Artificial Sequence
  Description of Artificial Sequence: Synthetic oligonucleotide
uaugcagaucuauguguuc

SEQ ID NO: 2547252 - RNA, 19 nt, Artificial Sequence
  Description of Artificial Sequence: Synthetic oligonucleotide
ccuauugugaaaaucagcu

SEQ ID NO: 2547253 - RNA, 19 nt, Artificial Sequence
  Description of Artificial Sequence: Synthetic oligonucleotide
ccauguaaugacaucugag

SEQ ID NO: 2547254 - RNA, 19 nt, Artificial Sequence
  Description of Artificial Sequence: Synthetic oligonucleotide
guacagaauucaugcuugc

SEQ ID NO: 2547255 - RNA, 19 nt, Artificial Sequence
  Description of Artificial Sequence: Synthetic oligonucleotide
gugaaucacaauugugcca

SEQ ID NO: 2547256 - RNA, 19 nt, Artificial Sequence
  Description of Artificial Sequence: Synthetic oligonucleotide
gacauggcuuuggugauac

SEQ ID NO: 2547257 - RNA, 19 nt, Artificial Sequence
  Description of Artificial Sequence: Synthetic oligonucleotide
caaguaugcagaucuaugu

SEQ ID NO: 2547258 - RNA, 19 nt, Artificial Sequence
  Description of Artificial Sequence: Synthetic oligonucleotide
caaugacauggcuuuggug

SEQ ID NO: 2547259 - RNA, 19 nt, Artificial Sequence
  Description of Artificial Sequence: Synthetic oligonucleotide
uagccaaaauuuucugguc

SEQ ID NO: 2547260 - RNA, 19 nt, Artificial Sequence
  Description of Artificial Sequence: Synthetic oligonucleotide
gauacaagaaguacagaau

SEQ ID NO: 2547261 - RNA, 19 nt, Artificial Sequence
  Description of Artificial Sequence: Synthetic oligonucleotide
cucucuggauaccauagga

SEQ ID NO: 2547262 - RNA, 19 nt, Artificial Sequence
  Description of Artificial Sequence: Synthetic oligonucleotide
aaaccucucuuccuuccuu

SEQ ID NO: 2547263 - RNA, 19 nt, Artificial Sequence
  Description of Artificial Sequence: Synthetic oligonucleotide
uuguuuucuuagacagggu

SEQ ID NO: 2547264 - RNA, 19 nt, Artificial Sequence
  Description of Artificial Sequence: Synthetic oligonucleotide
caauugugccacagucucc

SEQ ID NO: 2547265 - RNA, 19 nt, Artificial Sequence
  Description of Artificial Sequence: Synthetic oligonucleotide
aggguagccaaaauuuucu

SEQ ID NO: 2547266 - RNA, 19 nt, Artificial Sequence
  Description of Artificial Sequence: Synthetic oligonucleotide
gacacguuucagguaauca

SEQ ID NO: 2547267 - RNA, 19 nt, Artificial Sequence
  Description of Artificial Sequence: Synthetic oligonucleotide
agggccagaaguucaaguu

SEQ ID NO: 2547268 - RNA, 19 nt, Artificial Sequence
  Description of Artificial Sequence: Synthetic oligonucleotide
uccuuauuaucaggcaagu

SEQ ID NO: 2547269 - RNA, 19 nt, Artificial Sequence
  Description of Artificial Sequence: Synthetic oligonucleotide
ucuccauaaccaggaagug

SEQ ID NO: 2547270 - RNA, 19 nt, Artificial Sequence
  Description of Artificial Sequence: Synthetic oligonucleotide
uaaugacaucugaggcucc

SEQ ID NO: 2547271 - RNA, 19 nt, Artificial Sequence
  Description of Artificial Sequence: Synthetic oligonucleotide
uccaaacauggauguuuug

SEQ ID NO: 2547272 - RNA, 19 nt, Artificial Sequence
  Description of Artificial Sequence: Synthetic oligonucleotide
gguaaucaggaucagggua

SEQ ID NO: 2547273 - RNA, 19 nt, Artificial Sequence
  Description of Artificial Sequence: Synthetic oligonucleotide
uccuuacucaauuccuuuu

SEQ ID NO: 2547274 - RNA, 19 nt, Artificial Sequence
  Description of Artificial Sequence: Synthetic oligonucleotide
ggauagacaucuucccggc

SEQ ID NO: 2547275 - RNA, 19 nt, Artificial Sequence
  Description of Artificial Sequence: Synthetic oligonucleotide
aaccucucuuccuuccuua

SEQ ID NO: 2547276 - RNA, 19 nt, Artificial Sequence
  Description of Artificial Sequence: Synthetic oligonucleotide
uaaucaggaucaggguagc

SEQ ID NO: 2547277 - RNA, 19 nt, Artificial Sequence
  Description of Artificial Sequence: Synthetic oligonucleotide
aucauuccauguaaugaca

SEQ ID NO: 2547278 - RNA, 19 nt, Artificial Sequence
  Description of Artificial Sequence: Synthetic oligonucleotide
cauagugaaucacaauugu

SEQ ID NO: 2547279 - RNA, 19 nt, Artificial Sequence
  Description of Artificial Sequence: Synthetic oligonucleotide
gucuccauaaccaggaagu

SEQ ID NO: 2547280 - RNA, 19 nt, Artificial Sequence
  Description of Artificial Sequence: Synthetic oligonucleotide
agaagucaugguuccucca

SEQ ID NO: 2547281 - RNA, 19 nt, Artificial Sequence
  Description of Artificial Sequence: Synthetic oligonucleotide
uggauguuuugugauggau

SEQ ID NO: 2547282 - RNA, 19 nt, Artificial Sequence
  Description of Artificial Sequence: Synthetic oligonucleotide
ugcucgagaauuuccuauu

SEQ ID NO: 2547283 - RNA, 19 nt, Artificial Sequence
  Description of Artificial Sequence: Synthetic oligonucleotide
ggaagugaccgucuuaaaa

SEQ ID NO: 2547284 - RNA, 19 nt, Artificial Sequence
  Description of Artificial Sequence: Synthetic oligonucleotide
gaggugaggcaggagggcc

SEQ ID NO: 2547285 - RNA, 19 nt, Artificial Sequence
  Description of Artificial Sequence: Synthetic oligonucleotide
gguuucuuuguauagcccu

SEQ ID NO: 2547286 - RNA, 19 nt, Artificial Sequence
  Description of Artificial Sequence: Synthetic oligonucleotide
agugaccgucuuaaaagug

SEQ ID NO: 2547287 - RNA, 19 nt, Artificial Sequence
  Description of Artificial Sequence: Synthetic oligonucleotide
cagaauucaugcuugcacu

SEQ ID NO: 2547288 - RNA, 19 nt, Artificial Sequence
  Description of Artificial Sequence: Synthetic oligonucleotide
ucucuuccuuccuuauuau

SEQ ID NO: 2547289 - RNA, 19 nt, Artificial Sequence
  Description of Artificial Sequence: Synthetic oligonucleotide
uagcugucguagaacucac

SEQ ID NO: 2547290 - RNA, 19 nt, Artificial Sequence
  Description of Artificial Sequence: Synthetic oligonucleotide
aggaagucugacacacagg

SEQ ID NO: 2547291 - RNA, 19 nt, Artificial Sequence
  Description of Artificial Sequence: Synthetic oligonucleotide
gaucaggguagccaaaauu

SEQ ID NO: 2547292 - RNA, 19 nt, Artificial Sequence
  Description of Artificial Sequence: Synthetic oligonucleotide
cuauguguuccaggauagg

SEQ ID NO: 2547293 - RNA, 19 nt, Artificial Sequence
  Description of Artificial Sequence: Synthetic oligonucleotide
uguuccaggauagggcuuu

SEQ ID NO: 2547294 - RNA, 19 nt, Artificial Sequence
  Description of Artificial Sequence: Synthetic oligonucleotide
gauagacaucuucccggca

SEQ ID NO: 2547295 - RNA, 19 nt, Artificial Sequence
  Description of Artificial Sequence: Synthetic oligonucleotide
uucagguaaucaggaucag

SEQ ID NO: 2547296 - RNA, 19 nt, Artificial Sequence
  Description of Artificial Sequence: Synthetic oligonucleotide
gcaaguaugcagaucuaug

SEQ ID NO: 2547297 - RNA, 19 nt, Artificial Sequence
  Description of Artificial Sequence: Synthetic oligonucleotide
ugcaggguuaaaggugugu

SEQ ID NO: 2547298 - RNA, 19 nt, Artificial Sequence
  Description of Artificial Sequence: Synthetic oligonucleotide
uaccaggcugcagugagau

SEQ ID NO: 2547299 - RNA, 19 nt, Artificial Sequence
  Description of Artificial Sequence: Synthetic oligonucleotide
gaagucugacacacaggac

SEQ ID NO: 2547300 - RNA, 19 nt, Artificial Sequence
  Description of Artificial Sequence: Synthetic oligonucleotide
acguuucagguaaucagga

SEQ ID NO: 2547301 - RNA, 19 nt, Artificial Sequence
  Description of Artificial Sequence: Synthetic oligonucleotide
ccuuacucaauuccuuuug

SEQ ID NO: 2547302 - RNA, 19 nt, Artificial Sequence
  Description of Artificial Sequence: Synthetic oligonucleotide
gaagucaugguuccuccau

SEQ ID NO: 2547303 - RNA, 19 nt, Artificial Sequence
  Description of Artificial Sequence: Synthetic oligonucleotide
uggauaccauaggaagucu

SEQ ID NO: 2547304 - RNA, 19 nt, Artificial Sequence
  Description of Artificial Sequence: Synthetic oligonucleotide
ugaggcuccuguugcucga

SEQ ID NO: 2547305 - RNA, 19 nt, Artificial Sequence
  Description of Artificial Sequence: Synthetic oligonucleotide
cacucuccuuacucaauuc

SEQ ID NO: 2547306 - RNA, 19 nt, Artificial Sequence
  Description of Artificial Sequence: Synthetic oligonucleotide
aucaggcaaguaugcagau

SEQ ID NO: 2547307 - RNA, 19 nt, Artificial Sequence
  Description of Artificial Sequence: Synthetic oligonucleotide
aggcuucaaugacauggcu

SEQ ID NO: 2547308 - RNA, 19 nt, Artificial Sequence
  Description of Artificial Sequence: Synthetic oligonucleotide
ugguucccucucuggauac

SEQ ID NO: 2547309 - RNA, 19 nt, Artificial Sequence
  Description of Artificial Sequence: Synthetic oligonucleotide
auagggcuuuuccuggguu

SEQ ID NO: 2547310 - RNA, 19 nt, Artificial Sequence
  Description of Artificial Sequence: Synthetic oligonucleotide
aggacacacaggcuucaau

SEQ ID NO: 2547311 - RNA, 19 nt, Artificial Sequence
  Description of Artificial Sequence: Synthetic oligonucleotide
gcucgagaauuuccuauug

SEQ ID NO: 2547312 - RNA, 19 nt, Artificial Sequence
  Description of Artificial Sequence: Synthetic oligonucleotide
uauagcccuagcugucgua

SEQ ID NO: 2547313 - RNA, 19 nt, Artificial Sequence
  Description of Artificial Sequence: Synthetic oligonucleotide
ggguagccaaaauuuucug

SEQ ID NO: 2547314 - RNA, 19 nt, Artificial Sequence
  Description of Artificial Sequence: Synthetic oligonucleotide
gcaggguuaaaggugugug

SEQ ID NO: 2547315 - RNA, 19 nt, Artificial Sequence
  Description of Artificial Sequence: Synthetic oligonucleotide
agcagacccaaaaccucuc

SEQ ID NO: 2547316 - RNA, 19 nt, Artificial Sequence
  Description of Artificial Sequence: Synthetic oligonucleotide
cuccauaaccaggaaguga

SEQ ID NO: 2547317 - RNA, 19 nt, Artificial Sequence
  Description of Artificial Sequence: Synthetic oligonucleotide
gccacagucuccauaacca

SEQ ID NO: 2547318 - RNA, 19 nt, Artificial Sequence
  Description of Artificial Sequence: Synthetic oligonucleotide
gcugcagugagauccuguc

SEQ ID NO: 2547319 - RNA, 19 nt, Artificial Sequence
  Description of Artificial Sequence: Synthetic oligonucleotide
ggauaccauaggaagucug

SEQ ID NO: 2547320 - RNA, 19 nt, Artificial Sequence
  Description of Artificial Sequence: Synthetic oligonucleotide
ugacacguuucagguaauc

SEQ ID NO: 2547321 - RNA, 19 nt, Artificial Sequence
  Description of Artificial Sequence: Synthetic oligonucleotide
aggaucaggguagccaaaa

SEQ ID NO: 2547322 - RNA, 19 nt, Artificial Sequence
  Description of Artificial Sequence: Synthetic oligonucleotide
cucuccuuacucaauuccu

SEQ ID NO: 2547323 - RNA, 19 nt, Artificial Sequence
  Description of Artificial Sequence: Synthetic oligonucleotide
guugcucgagaauuuccua

SEQ ID NO: 2547324 - RNA, 19 nt, Artificial Sequence
  Description of Artificial Sequence: Synthetic oligonucleotide
caggagggccagaaguuca

SEQ ID NO: 2547325 - RNA, 19 nt, Artificial Sequence
  Description of Artificial Sequence: Synthetic oligonucleotide
augguuccuccaucuggcu

SEQ ID NO: 2547326 - RNA, 19 nt, Artificial Sequence
  Description of Artificial Sequence: Synthetic oligonucleotide
agcuucuuucgaaaggcuu

SEQ ID NO: 2547327 - RNA, 19 nt, Artificial Sequence
  Description of Artificial Sequence: Synthetic oligonucleotide
gugaccgucuuaaaagugu

SEQ ID NO: 2547328 - RNA, 19 nt, Artificial Sequence
  Description of Artificial Sequence: Synthetic oligonucleotide
uugacacguuucagguaau

SEQ ID NO: 2547329 - RNA, 19 nt, Artificial Sequence
  Description of Artificial Sequence: Synthetic oligonucleotide
cucauuuguuuggaugcca

SEQ ID NO: 2547330 - RNA, 19 nt, Artificial Sequence
  Description of Artificial Sequence: Synthetic oligonucleotide
cgagaauuuccuauuguga

SEQ ID NO: 2547331 - RNA, 19 nt, Artificial Sequence
  Description of Artificial Sequence: Synthetic oligonucleotide
gaccgucuuaaaaguguca

SEQ ID NO: 2547332 - RNA, 19 nt, Artificial Sequence
  Description of Artificial Sequence: Synthetic oligonucleotide
cccaagugcaggguuaaag

SEQ ID NO: 2547333 - RNA, 19 nt, Artificial Sequence
  Description of Artificial Sequence: Synthetic oligonucleotide
uucccggcacucuccuuac

SEQ ID NO: 2547334 - RNA, 19 nt, Artificial Sequence
  Description of Artificial Sequence: Synthetic oligonucleotide
uucuuggagcagacccaaa

SEQ ID NO: 2547335 - RNA, 19 nt, Artificial Sequence
  Description of Artificial Sequence: Synthetic oligonucleotide
guuucuuuguauagcccua

SEQ ID NO: 2547336 - RNA, 19 nt, Artificial Sequence
  Description of Artificial Sequence: Synthetic oligonucleotide
uucccucucuggauaccau

SEQ ID NO: 2547337 - RNA, 19 nt, Artificial Sequence
  Description of Artificial Sequence: Synthetic oligonucleotide
ggauguuuugugauggaua

SEQ ID NO: 2547338 - RNA, 19 nt, Artificial Sequence
  Description of Artificial Sequence: Synthetic oligonucleotide
uugugaaaaucagcuucuu

SEQ ID NO: 2547339 - RNA, 19 nt, Artificial Sequence
  Description of Artificial Sequence: Synthetic oligonucleotide
cuucccggcacucuccuua

SEQ ID NO: 2547340 - RNA, 19 nt, Artificial Sequence
  Description of Artificial Sequence: Synthetic oligonucleotide
ccacagucuccauaaccag

SEQ ID NO: 2547341 - RNA, 19 nt, Artificial Sequence
  Description of Artificial Sequence: Synthetic oligonucleotide
gugauacaagaaguacaga

SEQ ID NO: 2547342 - RNA, 19 nt, Artificial Sequence
  Description of Artificial Sequence: Synthetic oligonucleotide
aggaagugaccgucuuaaa

SEQ ID NO: 2547343 - RNA, 19 nt, Artificial Sequence
  Description of Artificial Sequence: Synthetic oligonucleotide
gagcagacccaaaaccucu

SEQ ID NO: 2547344 - RNA, 19 nt, Artificial Sequence
  Description of Artificial Sequence: Synthetic oligonucleotide
gcagaucuauguguuccag

SEQ ID NO: 2547345 - RNA, 19 nt, Artificial Sequence
  Description of Artificial Sequence: Synthetic oligonucleotide
cuauugugaaaaucagcuu

SEQ ID NO: 2547346 - RNA, 19 nt, Artificial Sequence
  Description of Artificial Sequence: Synthetic oligonucleotide
cucgagaauuuccuauugu

SEQ ID NO: 2547347 - RNA, 19 nt, Artificial Sequence
  Description of Artificial Sequence: Synthetic oligonucleotide
ggguuucuuuguauagccc

SEQ ID NO: 2547348 - RNA, 19 nt, Artificial Sequence
  Description of Artificial Sequence: Synthetic oligonucleotide
ccauaaccaggaagugacc

SEQ ID NO: 2547349 - RNA, 19 nt, Artificial Sequence
  Description of Artificial Sequence: Synthetic oligonucleotide
gcucauuuguuuggaugcc

SEQ ID NO: 2547350 - RNA, 19 nt, Artificial Sequence
  Description of Artificial Sequence: Synthetic oligonucleotide
gaggcuccuguugcucgag

SEQ ID NO: 2547351 - RNA, 19 nt, Artificial Sequence
  Description of Artificial Sequence: Synthetic oligonucleotide
ggguuugggugcucauuug

SEQ ID NO: 2547352 - RNA, 19 nt, Artificial Sequence
  Description of Artificial Sequence: Synthetic oligonucleotide
gguuugggugcucauuugu

SEQ ID NO: 2547353 - RNA, 19 nt, Artificial Sequence
  Description of Artificial Sequence: Synthetic oligonucleotide
cgucuuaaaagugucagaa

SEQ ID NO: 2547354 - RNA, 19 nt, Artificial Sequence
  Description of Artificial Sequence: Synthetic oligonucleotide
guaugcagaucuauguguu

SEQ ID NO: 2547355 - RNA, 19 nt, Artificial Sequence
  Description of Artificial Sequence: Synthetic oligonucleotide
ccuuccuuauuaucaggca

SEQ ID NO: 2547356 - RNA, 19 nt, Artificial Sequence
  Description of Artificial Sequence: Synthetic oligonucleotide
ggcugguucccucucugga

SEQ ID NO: 2547357 - RNA, 19 nt, Artificial Sequence
  Description of Artificial Sequence: Synthetic oligonucleotide
gugauggauaucauuccau

SEQ ID NO: 2547358 - RNA, 19 nt, Artificial Sequence
  Description of Artificial Sequence: Synthetic oligonucleotide
cuaccaggcugcagugaga

SEQ ID NO: 2547359 - RNA, 19 nt, Artificial Sequence
  Description of Artificial Sequence: Synthetic oligonucleotide
cuccaaacauggauguuuu

SEQ ID NO: 2547360 - RNA, 19 nt, Artificial Sequence
  Description of Artificial Sequence: Synthetic oligonucleotide
ggaggugaggcaggagggc

SEQ ID NO: 2547361 - RNA, 19 nt, Artificial Sequence
  Description of Artificial Sequence: Synthetic oligonucleotide
aggcuccuguugcucgaga

SEQ ID NO: 2547362 - RNA, 19 nt, Artificial Sequence
  Description of Artificial Sequence: Synthetic oligonucleotide
guauagcccuagcugucgu

SEQ ID NO: 2547363 - RNA, 19 nt, Artificial Sequence
  Description of Artificial Sequence: Synthetic oligonucleotide
ccuagcugucguagaacuc

SEQ ID NO: 2547364 - RNA, 19 nt, Artificial Sequence
  Description of Artificial Sequence: Synthetic oligonucleotide
cuccuuacucaauuccuuu

SEQ ID NO: 2547365 - RNA, 19 nt, Artificial Sequence
  Description of Artificial Sequence: Synthetic oligonucleotide
gacaucuucccggcacucu

SEQ ID NO: 2547366 - RNA, 19 nt, Artificial Sequence
  Description of Artificial Sequence: Synthetic oligonucleotide
gcaaauuuugaaaguggau

SEQ ID NO: 2547367 - RNA, 19 nt, Artificial Sequence
  Description of Artificial Sequence: Synthetic oligonucleotide
ucccggcacucuccuuacu

SEQ ID NO: 2547368 - RNA, 19 nt, Artificial Sequence
  Description of Artificial Sequence: Synthetic oligonucleotide
ggcuccuguugcucgagaa

SEQ ID NO: 2547369 - RNA, 19 nt, Artificial Sequence
  Description of Artificial Sequence: Synthetic oligonucleotide
gccagaaguucaaguuuug

SEQ ID NO: 2547370 - RNA, 19 nt, Artificial Sequence
  Description of Artificial Sequence: Synthetic oligonucleotide
ggagggccagaaguucaag

SEQ ID NO: 2547371 - RNA, 19 nt, Artificial Sequence
  Description of Artificial Sequence: Synthetic oligonucleotide
ggccauaaacucagagauc

SEQ ID NO: 2547372 - RNA, 19 nt, Artificial Sequence
  Description of Artificial Sequence: Synthetic oligonucleotide
ccuguugcucgagaauuuc

SEQ ID NO: 2547373 - RNA, 19 nt, Artificial Sequence
  Description of Artificial Sequence: Synthetic oligonucleotide
ccacuaccaggcugcagug

SEQ ID NO: 2547374 - RNA, 19 nt, Artificial Sequence
  Description of Artificial Sequence: Synthetic oligonucleotide
cugguccuccaaacaugga

SEQ ID NO: 2547375 - RNA, 19 nt, Artificial Sequence
  Description of Artificial Sequence: Synthetic oligonucleotide
ccauaggaagucugacaca

SEQ ID NO: 2547376 - RNA, 19 nt, Artificial Sequence
  Description of Artificial Sequence: Synthetic oligonucleotide
ccgucuuaaaagugucaga

SEQ ID NO: 2547377 - RNA, 19 nt, Artificial Sequence
  Description of Artificial Sequence: Synthetic oligonucleotide
gcaggagggccagaaguuc

SEQ ID NO: 2547378 - RNA, 19 nt, Artificial Sequence
  Description of Artificial Sequence: Synthetic oligonucleotide
caccacuaccaggcugcag

SEQ ID NO: 2547379 - RNA, 19 nt, Artificial Sequence
  Description of Artificial Sequence: Synthetic oligonucleotide
guuugggugcucauuuguu

SEQ ID NO: 2547380 - RNA, 19 nt, Artificial Sequence
  Description of Artificial Sequence: Synthetic oligonucleotide
caggaucaggguagccaaa

SEQ ID NO: 2547381 - RNA, 19 nt, Artificial Sequence
  Description of Artificial Sequence: Synthetic oligonucleotide
cugcagugagauccugucu

SEQ ID NO: 2547382 - RNA, 19 nt, Artificial Sequence
  Description of Artificial Sequence: Synthetic oligonucleotide
gugcaggguuaaaggugug

SEQ ID NO: 2547383 - RNA, 19 nt, Artificial Sequence
  Description of Artificial Sequence: Synthetic oligonucleotide
ccauaaacucagagaucca

SEQ ID NO: 2547384 - RNA, 19 nt, Artificial Sequence
  Description of Artificial Sequence: Synthetic oligonucleotide
guuuugugauggauaucau

SEQ ID NO: 2547385 - RNA, 19 nt, Artificial Sequence
  Description of Artificial Sequence: Synthetic oligonucleotide
ucccaagugcaggguuaaa

SEQ ID NO: 2547386 - RNA, 19 nt, Artificial Sequence
  Description of Artificial Sequence: Synthetic oligonucleotide
ggcaaguaugcagaucuau

SEQ ID NO: 2547387 - RNA, 19 nt, Artificial Sequence
  Description of Artificial Sequence: Synthetic oligonucleotide
gaaaguggauagacaucuu

SEQ ID NO: 2547388 - RNA, 19 nt, Artificial Sequence
  Description of Artificial Sequence: Synthetic oligonucleotide
ggauaucauuccauguaau

SEQ ID NO: 2547389 - RNA, 19 nt, Artificial Sequence
  Description of Artificial Sequence: Synthetic oligonucleotide
cacuaccaggcugcaguga

SEQ ID NO: 2547390 - RNA, 19 nt, Artificial Sequence
  Description of Artificial Sequence: Synthetic oligonucleotide
gggccagaaguucaaguuu

SEQ ID NO: 2547391 - RNA, 19 nt, Artificial Sequence
  Description of Artificial Sequence: Synthetic oligonucleotide
ggcuucaaugacauggcuu

SEQ ID NO: 2547392 - RNA, 19 nt, Artificial Sequence
  Description of Artificial Sequence: Synthetic oligonucleotide
gggugcucauuuguuugga

SEQ ID NO: 2547393 - RNA, 19 nt, Artificial Sequence
  Description of Artificial Sequence: Synthetic oligonucleotide
ggccagaaguucaaguuuu

SEQ ID NO: 2547394 - RNA, 19 nt, Artificial Sequence
  Description of Artificial Sequence: Synthetic oligonucleotide
aggcaaguaugcagaucua

SEQ ID NO: 2547395 - RNA, 19 nt, Artificial Sequence
  Description of Artificial Sequence: Synthetic oligonucleotide
gcacucuccuuacucaauu

SEQ ID NO: 2547396 - RNA, 19 nt, Artificial Sequence
  Description of Artificial Sequence: Synthetic oligonucleotide
gcugguucccucucuggau

SEQ ID NO: 2547397 - RNA, 19 nt, Artificial Sequence
  Description of Artificial Sequence: Synthetic oligonucleotide
gucagaagucaugguuccu

SEQ ID NO: 2547398 - RNA, 19 nt, Artificial Sequence
  Description of Artificial Sequence: Synthetic oligonucleotide
ggaucaggguagccaaaau

SEQ ID NO: 2547399 - RNA, 19 nt, Artificial Sequence
  Description of Artificial Sequence: Synthetic oligonucleotide
ccuugacacguuucaggua

SEQ ID NO: 2547400 - RNA, 19 nt, Artificial Sequence
  Description of Artificial Sequence: Synthetic oligonucleotide
caggacacacaggcuucaa

SEQ ID NO: 2547401 - RNA, 19 nt, Artificial Sequence
  Description of Artificial Sequence: Synthetic oligonucleotide
ccaggaagugaccgucuua

SEQ ID NO: 2547402 - RNA, 19 nt, Artificial Sequence
  Description of Artificial Sequence: Synthetic oligonucleotide
cggcacucuccuuacucaa

SEQ ID NO: 2547403 - RNA, 19 nt, Artificial Sequence
  Description of Artificial Sequence: Synthetic oligonucleotide
cguuucagguaaucaggau

SEQ ID NO: 2547404 - RNA, 19 nt, Artificial Sequence
  Description of Artificial Sequence: Synthetic oligonucleotide
ggcuggccauaaacucaga

SEQ ID NO: 2547405 - RNA, 19 nt, Artificial Sequence
  Description of Artificial Sequence: Synthetic oligonucleotide
guuccaggauagggcuuuu

SEQ ID NO: 2547406 - RNA, 19 nt, Artificial Sequence
  Description of Artificial Sequence: Synthetic oligonucleotide
ccaccacuaccaggcugca

SEQ ID NO: 2547407 - RNA, 19 nt, Artificial Sequence
  Description of Artificial Sequence: Synthetic oligonucleotide
uaaacauuauauauaaacg

SEQ ID NO: 2547408 - RNA, 19 nt, Artificial Sequence
  Description of Artificial Sequence: Synthetic oligonucleotide
aucuuuaaaauauauaaac

SEQ ID NO: 2547409 - RNA, 19 nt, Artificial Sequence
  Description of Artificial Sequence: Synthetic oligonucleotide
aaaagaaagagagagagag

SEQ ID NO: 2547410 - RNA, 19 nt, Artificial Sequence
  Description of Artificial Sequence: Synthetic oligonucleotide
aaauauacucucuuggcac

SEQ ID NO: 2547411 - RNA, 19 nt, Artificial Sequence
  Description of Artificial Sequence: Synthetic oligonucleotide
aagguuacaagccagguag

SEQ ID NO: 2547412 - RNA, 19 nt, Artificial Sequence
  Description of Artificial Sequence: Synthetic oligonucleotide
auuaaauauacucucuugg

SEQ ID NO: 2547413 - RNA, 19 nt, Artificial Sequence
  Description of Artificial Sequence: Synthetic oligonucleotide
aaacauuauauauaaacga

SEQ ID NO: 2547414 - RNA, 19 nt, Artificial Sequence
  Description of Artificial Sequence: Synthetic oligonucleotide
uuucauggcaucaaaauag

SEQ ID NO: 2547415 - RNA, 19 nt, Artificial Sequence
  Description of Artificial Sequence: Synthetic oligonucleotide
aacgaaaagaaagagagag

SEQ ID NO: 2547416 - RNA, 19 nt, Artificial Sequence
  Description of Artificial Sequence: Synthetic oligonucleotide
aaacaagagccuuugggcc

SEQ ID NO: 2547417 - RNA, 19 nt, Artificial Sequence
  Description of Artificial Sequence: Synthetic oligonucleotide
uuaaaauauauaaacauua

SEQ ID NO: 2547418 - RNA, 19 nt, Artificial Sequence
  Description of Artificial Sequence: Synthetic oligonucleotide
aaacgaaguguuuucaugg

SEQ ID NO: 2547419 - RNA, 19 nt, Artificial Sequence
  Description of Artificial Sequence: Synthetic oligonucleotide
aaaauagaacuccagacca

SEQ ID NO: 2547420 - RNA, 19 nt, Artificial Sequence
  Description of Artificial Sequence: Synthetic oligonucleotide
uaauuuaugcccuaucucc

SEQ ID NO: 2547421 - RNA, 19 nt, Artificial Sequence
  Description of Artificial Sequence: Synthetic oligonucleotide
uuauauauaaacgaagugu

SEQ ID NO: 2547422 - RNA, 19 nt, Artificial Sequence
  Description of Artificial Sequence: Synthetic oligonucleotide
aagaaagagagagagagag

SEQ ID NO: 2547423 - RNA, 19 nt, Artificial Sequence
  Description of Artificial Sequence: Synthetic oligonucleotide
aguuucaguaauuuaugcc

SEQ ID NO: 2547424 - RNA, 19 nt, Artificial Sequence
  Description of Artificial Sequence: Synthetic oligonucleotide
guugacaaaggucagaugc

SEQ ID NO: 2547425 - RNA, 19 nt, Artificial Sequence
  Description of Artificial Sequence: Synthetic oligonucleotide
aaaggucagaugcagcccc

SEQ ID NO: 2547426 - RNA, 19 nt, Artificial Sequence
  Description of Artificial Sequence: Synthetic oligonucleotide
acaaaggucagaugcagcc

SEQ ID NO: 2547427 - RNA, 19 nt, Artificial Sequence
  Description of Artificial Sequence: Synthetic oligonucleotide
ugcugugcaaacaagagcc

SEQ ID NO: 2547428 - RNA, 19 nt, Artificial Sequence
  Description of Artificial Sequence: Synthetic oligonucleotide
guuucaguaauuuaugccc

SEQ ID NO: 2547429 - RNA, 19 nt, Artificial Sequence
  Description of Artificial Sequence: Synthetic oligonucleotide
uauauaaacauuauauaua

SEQ ID NO: 2547430 - RNA, 19 nt, Artificial Sequence
  Description of Artificial Sequence: Synthetic oligonucleotide
gaaagagagagagagagag

SEQ ID NO: 2547431 - RNA, 19 nt, Artificial Sequence
  Description of Artificial Sequence: Synthetic oligonucleotide
aauauacucucuuggcacg

SEQ ID NO: 2547432 - RNA, 19 nt, Artificial Sequence
  Description of Artificial Sequence: Synthetic oligonucleotide
ucaaaauagaacuccagac

SEQ ID NO: 2547433 - RNA, 19 nt, Artificial Sequence
  Description of Artificial Sequence: Synthetic oligonucleotide
auggcaucaaaauagaacu

SEQ ID NO: 2547434 - RNA, 19 nt, Artificial Sequence
  Description of Artificial Sequence: Synthetic oligonucleotide
aagagagagagagagagag

SEQ ID NO: 2547435 - RNA, 19 nt, Artificial Sequence
  Description of Artificial Sequence: Synthetic oligonucleotide
uuaaauauacucucuuggc

SEQ ID NO: 2547436 - RNA, 19 nt, Artificial Sequence
  Description of Artificial Sequence: Synthetic oligonucleotide
uauauauaaacgaaguguu

SEQ ID NO: 2547437 - RNA, 19 nt, Artificial Sequence
  Description of Artificial Sequence: Synthetic oligonucleotide
uaaauauacucucuuggca

SEQ ID NO: 2547438 - RNA, 19 nt, Artificial Sequence
  Description of Artificial Sequence: Synthetic oligonucleotide
auuauauauaaacgaagug

SEQ ID NO: 2547439 - RNA, 19 nt, Artificial Sequence
  Description of Artificial Sequence: Synthetic oligonucleotide
aacgaaguguuuucauggc

SEQ ID NO: 2547440 - RNA, 19 nt, Artificial Sequence
  Description of Artificial Sequence: Synthetic oligonucleotide
caaaauagaacuccagacc

SEQ ID NO: 2547441 - RNA, 19 nt, Artificial Sequence
  Description of Artificial Sequence: Synthetic oligonucleotide
caaacaagagccuuugggc

SEQ ID NO: 2547442 - RNA, 19 nt, Artificial Sequence
  Description of Artificial Sequence: Synthetic oligonucleotide
aguaauuuaugcccuaucu

SEQ ID NO: 2547443 - RNA, 19 nt, Artificial Sequence
  Description of Artificial Sequence: Synthetic oligonucleotide
auauaaacgaaguguuuuc

SEQ ID NO: 2547444 - RNA, 19 nt, Artificial Sequence
  Description of Artificial Sequence: Synthetic oligonucleotide
aacaagagccuuugggccg

SEQ ID NO: 2547445 - RNA, 19 nt, Artificial Sequence
  Description of Artificial Sequence: Synthetic oligonucleotide
caugcuuuggaagacaucc

SEQ ID NO: 2547446 - RNA, 19 nt, Artificial Sequence
  Description of Artificial Sequence: Synthetic oligonucleotide
aagagcagccaucugucac

SEQ ID NO: 2547447 - RNA, 19 nt, Artificial Sequence
  Description of Artificial Sequence: Synthetic oligonucleotide
uaaaauauauaaacauuau

SEQ ID NO: 2547448 - RNA, 19 nt, Artificial Sequence
  Description of Artificial Sequence: Synthetic oligonucleotide
gugagggagacccacaugg

SEQ ID NO: 2547449 - RNA, 19 nt, Artificial Sequence
  Description of Artificial Sequence: Synthetic oligonucleotide
gaugagauggguauagugc

SEQ ID NO: 2547450 - RNA, 19 nt, Artificial Sequence
  Description of Artificial Sequence: Synthetic oligonucleotide
gagagagagagagagagag

SEQ ID NO: 2547451 - RNA, 19 nt, Artificial Sequence
  Description of Artificial Sequence: Synthetic oligonucleotide
cauggcaucaaaauagaac

SEQ ID NO: 2547452 - RNA, 19 nt, Artificial Sequence
  Description of Artificial Sequence: Synthetic oligonucleotide
uggaagacaucccagguga

SEQ ID NO: 2547453 - RNA, 19 nt, Artificial Sequence
  Description of Artificial Sequence: Synthetic oligonucleotide
uuacaagccagguaguuga

SEQ ID NO: 2547454 - RNA, 19 nt, Artificial Sequence
  Description of Artificial Sequence: Synthetic oligonucleotide
uggggagaaagcuuugugg

SEQ ID NO: 2547455 - RNA, 19 nt, Artificial Sequence
  Description of Artificial Sequence: Synthetic oligonucleotide
aagacaucccaggugaggg

SEQ ID NO: 2547456 - RNA, 19 nt, Artificial Sequence
  Description of Artificial Sequence: Synthetic oligonucleotide
aucaaaauagaacuccaga

SEQ ID NO: 2547457 - RNA, 19 nt, Artificial Sequence
  Description of Artificial Sequence: Synthetic oligonucleotide
ugcccuaucuccaagggug

SEQ ID NO: 2547458 - RNA, 19 nt, Artificial Sequence
  Description of Artificial Sequence: Synthetic oligonucleotide
uaaacgaaguguuuucaug

SEQ ID NO: 2547459 - RNA, 19 nt, Artificial Sequence
  Description of Artificial Sequence: Synthetic oligonucleotide
aacauuauauauaaacgaa

SEQ ID NO: 2547460 - RNA, 19 nt, Artificial Sequence
  Description of Artificial Sequence: Synthetic oligonucleotide
aagcuuugugggcaagagc

SEQ ID NO: 2547461 - RNA, 19 nt, Artificial Sequence
  Description of Artificial Sequence: Synthetic oligonucleotide
agagcagccaucugucacc

SEQ ID NO: 2547462 - RNA, 19 nt, Artificial Sequence
  Description of Artificial Sequence: Synthetic oligonucleotide
aaagggcagccacagagug

SEQ ID NO: 2547463 - RNA, 19 nt, Artificial Sequence
  Description of Artificial Sequence: Synthetic oligonucleotide
cuuuggaagacaucccagg

SEQ ID NO: 2547464 - RNA, 19 nt, Artificial Sequence
  Description of Artificial Sequence: Synthetic oligonucleotide
acauuauauauaaacgaag

SEQ ID NO: 2547465 - RNA, 19 nt, Artificial Sequence
  Description of Artificial Sequence: Synthetic oligonucleotide
uauauaaacgaaguguuuu

SEQ ID NO: 2547466 - RNA, 19 nt, Artificial Sequence
  Description of Artificial Sequence: Synthetic oligonucleotide
uuucaguaauuuaugcccu

SEQ ID NO: 2547467 - RNA, 19 nt, Artificial Sequence
  Description of Artificial Sequence: Synthetic oligonucleotide
ugugguaccuccugggaag

SEQ ID NO: 2547468 - RNA, 19 nt, Artificial Sequence
  Description of Artificial Sequence: Synthetic oligonucleotide
uaugcccuaucuccaaggg

SEQ ID NO: 2547469 - RNA, 19 nt, Artificial Sequence
  Description of Artificial Sequence: Synthetic oligonucleotide
auggguauagugcucuggg

SEQ ID NO: 2547470 - RNA, 19 nt, Artificial Sequence
  Description of Artificial Sequence: Synthetic oligonucleotide
uuaugcccuaucuccaagg

SEQ ID NO: 2547471 - RNA, 19 nt, Artificial Sequence
  Description of Artificial Sequence: Synthetic oligonucleotide
cuuugggccgacauugugg

SEQ ID NO: 2547472 - RNA, 19 nt, Artificial Sequence
  Description of Artificial Sequence: Synthetic oligonucleotide
ucagaugcagccccucggg

SEQ ID NO: 2547473 - RNA, 19 nt, Artificial Sequence
  Description of Artificial Sequence: Synthetic oligonucleotide
uuuggaagacaucccaggu

SEQ ID NO: 2547474 - RNA, 19 nt, Artificial Sequence
  Description of Artificial Sequence: Synthetic oligonucleotide
augagauggguauagugcu

SEQ ID NO: 2547475 - RNA, 19 nt, Artificial Sequence
  Description of Artificial Sequence: Synthetic oligonucleotide
gcaaacaagagccuuuggg

SEQ ID NO: 2547476 - RNA, 19 nt, Artificial Sequence
  Description of Artificial Sequence: Synthetic oligonucleotide
uuugugggcaagagcagcc

SEQ ID NO: 2547477 - RNA, 19 nt, Artificial Sequence
  Description of Artificial Sequence: Synthetic oligonucleotide
aauagaacuccagaccaga

SEQ ID NO: 2547478 - RNA, 19 nt, Artificial Sequence
  Description of Artificial Sequence: Synthetic oligonucleotide
aaaagggcaguuucaguaa

SEQ ID NO: 2547479 - RNA, 19 nt, Artificial Sequence
  Description of Artificial Sequence: Synthetic oligonucleotide
agguaguugacaaagguca

SEQ ID NO: 2547480 - RNA, 19 nt, Artificial Sequence
  Description of Artificial Sequence: Synthetic oligonucleotide
uuugggccgacauuguggc

SEQ ID NO: 2547481 - RNA, 19 nt, Artificial Sequence
  Description of Artificial Sequence: Synthetic oligonucleotide
ggaaagggcagccacagag

SEQ ID NO: 2547482 - RNA, 19 nt, Artificial Sequence
  Description of Artificial Sequence: Synthetic oligonucleotide
uauaaacgaaguguuuuca

SEQ ID NO: 2547483 - RNA, 19 nt, Artificial Sequence
  Description of Artificial Sequence: Synthetic oligonucleotide
ugcuuuggaagacauccca

SEQ ID NO: 2547484 - RNA, 19 nt, Artificial Sequence
  Description of Artificial Sequence: Synthetic oligonucleotide
uuggaagacaucccaggug

SEQ ID NO: 2547485 - RNA, 19 nt, Artificial Sequence
  Description of Artificial Sequence: Synthetic oligonucleotide
uugacaaaggucagaugca

SEQ ID NO: 2547486 - RNA, 19 nt, Artificial Sequence
  Description of Artificial Sequence: Synthetic oligonucleotide
uuuaugcccuaucuccaag

SEQ ID NO: 2547487 - RNA, 19 nt, Artificial Sequence
  Description of Artificial Sequence: Synthetic oligonucleotide
uguuuucauggcaucaaaa

SEQ ID NO: 2547488 - RNA, 19 nt, Artificial Sequence
  Description of Artificial Sequence: Synthetic oligonucleotide
uucauggcaucaaaauaga

SEQ ID NO: 2547489 - RNA, 19 nt, Artificial Sequence
  Description of Artificial Sequence: Synthetic oligonucleotide
gacauuguggccuggguga

SEQ ID NO: 2547490 - RNA, 19 nt, Artificial Sequence
  Description of Artificial Sequence: Synthetic oligonucleotide
caucaaaauagaacuccag

SEQ ID NO: 2547491 - RNA, 19 nt, Artificial Sequence
  Description of Artificial Sequence: Synthetic oligonucleotide
caguuucaguaauuuaugc

SEQ ID NO: 2547492 - RNA, 19 nt, Artificial Sequence
  Description of Artificial Sequence: Synthetic oligonucleotide
uauaaacauuauauauaaa

SEQ ID NO: 2547493 - RNA, 19 nt, Artificial Sequence
  Description of Artificial Sequence: Synthetic oligonucleotide
agcuuugugggcaagagca

SEQ ID NO: 2547494 - RNA, 19 nt, Artificial Sequence
  Description of Artificial Sequence: Synthetic oligonucleotide
cauuauauauaaacgaagu

SEQ ID NO: 2547495 - RNA, 19 nt, Artificial Sequence
  Description of Artificial Sequence: Synthetic oligonucleotide
ggggagaaagcuuuguggg

SEQ ID NO: 2547496 - RNA, 19 nt, Artificial Sequence
  Description of Artificial Sequence: Synthetic oligonucleotide
guaauuuaugcccuaucuc

SEQ ID NO: 2547497 - RNA, 19 nt, Artificial Sequence
  Description of Artificial Sequence: Synthetic oligonucleotide
aacuccagaccagacagug

SEQ ID NO: 2547498 - RNA, 19 nt, Artificial Sequence
  Description of Artificial Sequence: Synthetic oligonucleotide
cagaguggggcguuggugg

SEQ ID NO: 2547499 - RNA, 19 nt, Artificial Sequence
  Description of Artificial Sequence: Synthetic oligonucleotide
aauuuaugcccuaucucca

SEQ ID NO: 2547500 - RNA, 19 nt, Artificial Sequence
  Description of Artificial Sequence: Synthetic oligonucleotide
ugggaagguuacaagccag

SEQ ID NO: 2547501 - RNA, 19 nt, Artificial Sequence
  Description of Artificial Sequence: Synthetic oligonucleotide
aaauagaacuccagaccag

SEQ ID NO: 2547502 - RNA, 19 nt, Artificial Sequence
  Description of Artificial Sequence: Synthetic oligonucleotide
ugacaaaggucagaugcag

SEQ ID NO: 2547503 - RNA, 19 nt, Artificial Sequence
  Description of Artificial Sequence: Synthetic oligonucleotide
gagagagagagagagaaaa

SEQ ID NO: 2547504 - RNA, 19 nt, Artificial Sequence
  Description of Artificial Sequence: Synthetic oligonucleotide
gagagagagagagagagaa

SEQ ID NO: 2547505 - RNA, 19 nt, Artificial Sequence
  Description of Artificial Sequence: Synthetic oligonucleotide
uuggcacgaaucuuuaaaa

SEQ ID NO: 2547506 - RNA, 19 nt, Artificial Sequence
  Description of Artificial Sequence: Synthetic oligonucleotide
aagggugcugugcaaacaa

SEQ ID NO: 2547507 - RNA, 19 nt, Artificial Sequence
  Description of Artificial Sequence: Synthetic oligonucleotide
cuccagaccagacagugac

SEQ ID NO: 2547508 - RNA, 19 nt, Artificial Sequence
  Description of Artificial Sequence: Synthetic oligonucleotide
gaagacaucccaggugagg

SEQ ID NO: 2547509 - RNA, 19 nt, Artificial Sequence
  Description of Artificial Sequence: Synthetic oligonucleotide
agggcagccacagaguggg

SEQ ID NO: 2547510 - RNA, 19 nt, Artificial Sequence
  Description of Artificial Sequence: Synthetic oligonucleotide
cagacagugaccaugggaa

SEQ ID NO: 2547511 - RNA, 19 nt, Artificial Sequence
  Description of Artificial Sequence: Synthetic oligonucleotide
auaaacgaaguguuuucau

SEQ ID NO: 2547512 - RNA, 19 nt, Artificial Sequence
  Description of Artificial Sequence: Synthetic oligonucleotide
uuccaguggggucuguacc

SEQ ID NO: 2547513 - RNA, 19 nt, Artificial Sequence
  Description of Artificial Sequence: Synthetic oligonucleotide
uggguauagugcucugggg

SEQ ID NO: 2547514 - RNA, 19 nt, Artificial Sequence
  Description of Artificial Sequence: Synthetic oligonucleotide
ugaccaugggaaagggcag

SEQ ID NO: 2547515 - RNA, 19 nt, Artificial Sequence
  Description of Artificial Sequence: Synthetic oligonucleotide
ugagggagacccacauggg

SEQ ID NO: 2547516 - RNA, 19 nt, Artificial Sequence
  Description of Artificial Sequence: Synthetic oligonucleotide
ugcaaacaagagccuuugg

SEQ ID NO: 2547517 - RNA, 19 nt, Artificial Sequence
  Description of Artificial Sequence: Synthetic oligonucleotide
gauggguauagugcucugg

SEQ ID NO: 2547518 - RNA, 19 nt, Artificial Sequence
  Description of Artificial Sequence: Synthetic oligonucleotide
acagugaccaugggaaagg

SEQ ID NO: 2547519 - RNA, 19 nt, Artificial Sequence
  Description of Artificial Sequence: Synthetic oligonucleotide
ugcugugguaccuccuggg

SEQ ID NO: 2547520 - RNA, 19 nt, Artificial Sequence
  Description of Artificial Sequence: Synthetic oligonucleotide
ucccaggugagggagaccc

SEQ ID NO: 2547521 - RNA, 19 nt, Artificial Sequence
  Description of Artificial Sequence: Synthetic oligonucleotide
acucucuuggcacgaaucu

SEQ ID NO: 2547522 - RNA, 19 nt, Artificial Sequence
  Description of Artificial Sequence: Synthetic oligonucleotide
aaagggcaguuucaguaau

SEQ ID NO: 2547523 - RNA, 19 nt, Artificial Sequence
  Description of Artificial Sequence: Synthetic oligonucleotide
uguggccugggugacaugc

SEQ ID NO: 2547524 - RNA, 19 nt, Artificial Sequence
  Description of Artificial Sequence: Synthetic oligonucleotide
gacagugaccaugggaaag

SEQ ID NO: 2547525 - RNA, 19 nt, Artificial Sequence
  Description of Artificial Sequence: Synthetic oligonucleotide
ugugcaaacaagagccuuu

SEQ ID NO: 2547526 - RNA, 19 nt, Artificial Sequence
  Description of Artificial Sequence: Synthetic oligonucleotide
cgaaaagaaagagagagag

SEQ ID NO: 2547527 - RNA, 19 nt, Artificial Sequence
  Description of Artificial Sequence: Synthetic oligonucleotide
aucuccaagggugcugugc

SEQ ID NO: 2547528 - RNA, 19 nt, Artificial Sequence
  Description of Artificial Sequence: Synthetic oligonucleotide
cagguaguugacaaagguc

SEQ ID NO: 2547529 - RNA, 19 nt, Artificial Sequence
  Description of Artificial Sequence: Synthetic oligonucleotide
gaccagacagugaccaugg

SEQ ID NO: 2547530 - RNA, 19 nt, Artificial Sequence
  Description of Artificial Sequence: Synthetic oligonucleotide
ggcaucaaaauagaacucc

SEQ ID NO: 2547531 - RNA, 19 nt, Artificial Sequence
  Description of Artificial Sequence: Synthetic oligonucleotide
gguauagugcucuggggag

SEQ ID NO: 2547532 - RNA, 19 nt, Artificial Sequence
  Description of Artificial Sequence: Synthetic oligonucleotide
aaagaaagagagagagaga

SEQ ID NO: 2547533 - RNA, 19 nt, Artificial Sequence
  Description of Artificial Sequence: Synthetic oligonucleotide
gugaccaugggaaagggca

SEQ ID NO: 2547534 - RNA, 19 nt, Artificial Sequence
  Description of Artificial Sequence: Synthetic oligonucleotide
uaguugacaaaggucagau

SEQ ID NO: 2547535 - RNA, 19 nt, Artificial Sequence
  Description of Artificial Sequence: Synthetic oligonucleotide
uacucucuuggcacgaauc

SEQ ID NO: 2547536 - RNA, 19 nt, Artificial Sequence
  Description of Artificial Sequence: Synthetic oligonucleotide
uagugcucuggggagaaag

SEQ ID NO: 2547537 - RNA, 19 nt, Artificial Sequence
  Description of Artificial Sequence: Synthetic oligonucleotide
gagggagacccacaugggc

SEQ ID NO: 2547538 - RNA, 19 nt, Artificial Sequence
  Description of Artificial Sequence: Synthetic oligonucleotide
agaguggggcguugguggc

SEQ ID NO: 2547539 - RNA, 19 nt, Artificial Sequence
  Description of Artificial Sequence: Synthetic oligonucleotide
acaugggcauuuccagugg

SEQ ID NO: 2547540 - RNA, 19 nt, Artificial Sequence
  Description of Artificial Sequence: Synthetic oligonucleotide
uuuccaguggggucuguac

SEQ ID NO: 2547541 - RNA, 19 nt, Artificial Sequence
  Description of Artificial Sequence: Synthetic oligonucleotide
ggaugagauggguauagug

SEQ ID NO: 2547542 - RNA, 19 nt, Artificial Sequence
  Description of Artificial Sequence: Synthetic oligonucleotide
gucagaugcagccccucgg

SEQ ID NO: 2547543 - RNA, 19 nt, Artificial Sequence
  Description of Artificial Sequence: Synthetic oligonucleotide
ucggggaugagauggguau

SEQ ID NO: 2547544 - RNA, 19 nt, Artificial Sequence
  Description of Artificial Sequence: Synthetic oligonucleotide
ggugacaugcuuuggaaga

SEQ ID NO: 2547545 - RNA, 19 nt, Artificial Sequence
  Description of Artificial Sequence: Synthetic oligonucleotide
guuacaagccagguaguug

SEQ ID NO: 2547546 - RNA, 19 nt, Artificial Sequence
  Description of Artificial Sequence: Synthetic oligonucleotide
ucauggcaucaaaauagaa

SEQ ID NO: 2547547 - RNA, 19 nt, Artificial Sequence
  Description of Artificial Sequence: Synthetic oligonucleotide
gugcugugcaaacaagagc

SEQ ID NO: 2547548 - RNA, 19 nt, Artificial Sequence
  Description of Artificial Sequence: Synthetic oligonucleotide
ugggaaagggcagccacag

SEQ ID NO: 2547549 - RNA, 19 nt, Artificial Sequence
  Description of Artificial Sequence: Synthetic oligonucleotide
acgaaguguuuucauggca

SEQ ID NO: 2547550 - RNA, 19 nt, Artificial Sequence
  Description of Artificial Sequence: Synthetic oligonucleotide
auagaacuccagaccagac

SEQ ID NO: 2547551 - RNA, 19 nt, Artificial Sequence
  Description of Artificial Sequence: Synthetic oligonucleotide
gaaaagaaagagagagaga

SEQ ID NO: 2547552 - RNA, 19 nt, Artificial Sequence
  Description of Artificial Sequence: Synthetic oligonucleotide
uccaguggggucuguaccu

SEQ ID NO: 2547553 - RNA, 19 nt, Artificial Sequence
  Description of Artificial Sequence: Synthetic oligonucleotide
gacaucccaggugagggag

SEQ ID NO: 2547554 - RNA, 19 nt, Artificial Sequence
  Description of Artificial Sequence: Synthetic oligonucleotide
agugcucuggggagaaagc

SEQ ID NO: 2547555 - RNA, 19 nt, Artificial Sequence
  Description of Artificial Sequence: Synthetic oligonucleotide
uggcaucaaaauagaacuc

SEQ ID NO: 2547556 - RNA, 19 nt, Artificial Sequence
  Description of Artificial Sequence: Synthetic oligonucleotide
guuuucauggcaucaaaau

SEQ ID NO: 2547557 - RNA, 19 nt, Artificial Sequence
  Description of Artificial Sequence: Synthetic oligonucleotide
cuuugugggcaagagcagc

SEQ ID NO: 2547558 - RNA, 19 nt, Artificial Sequence
  Description of Artificial Sequence: Synthetic oligonucleotide
agccuuugggccgacauug

SEQ ID NO: 2547559 - RNA, 19 nt, Artificial Sequence
  Description of Artificial Sequence: Synthetic oligonucleotide
uggcacgaaucuuuaaaau

SEQ ID NO: 2547560 - RNA, 19 nt, Artificial Sequence
  Description of Artificial Sequence: Synthetic oligonucleotide
accaugggaaagggcagcc

SEQ ID NO: 2547561 - RNA, 19 nt, Artificial Sequence
  Description of Artificial Sequence: Synthetic oligonucleotide
cuuggcacgaaucuuuaaa

SEQ ID NO: 2547562 - RNA, 19 nt, Artificial Sequence
  Description of Artificial Sequence: Synthetic oligonucleotide
uggggucuguaccugcccc

SEQ ID NO: 2547563 - RNA, 19 nt, Artificial Sequence
  Description of Artificial Sequence: Synthetic oligonucleotide
aguugacaaaggucagaug

SEQ ID NO: 2547564 - RNA, 19 nt, Artificial Sequence
  Description of Artificial Sequence: Synthetic oligonucleotide
agaccagacagugaccaug

SEQ ID NO: 2547565 - RNA, 19 nt, Artificial Sequence
  Description of Artificial Sequence: Synthetic oligonucleotide
agugaccaugggaaagggc

SEQ ID NO: 2547566 - RNA, 19 nt, Artificial Sequence
  Description of Artificial Sequence: Synthetic oligonucleotide
auuuaugcccuaucuccaa

SEQ ID NO: 2547567 - RNA, 19 nt, Artificial Sequence
  Description of Artificial Sequence: Synthetic oligonucleotide
caugggcauuuccaguggg

SEQ ID NO: 2547568 - RNA, 19 nt, Artificial Sequence
  Description of Artificial Sequence: Synthetic oligonucleotide
aaagagagagagagagaga

SEQ ID NO: 2547569 - RNA, 19 nt, Artificial Sequence
  Description of Artificial Sequence: Synthetic oligonucleotide
ugagauggguauagugcuc

SEQ ID NO: 2547570 - RNA, 19 nt, Artificial Sequence
  Description of Artificial Sequence: Synthetic oligonucleotide
acgaaucuuuaaaauauau

SEQ ID NO: 2547571 - RNA, 19 nt, Artificial Sequence
  Description of Artificial Sequence: Synthetic oligonucleotide
gacaaaggucagaugcagc

SEQ ID NO: 2547572 - RNA, 19 nt, Artificial Sequence
  Description of Artificial Sequence: Synthetic oligonucleotide
agaugcagccccucgggga

SEQ ID NO: 2547573 - RNA, 19 nt, Artificial Sequence
  Description of Artificial Sequence: Synthetic oligonucleotide
ugggccgacauuguggccu

SEQ ID NO: 2547574 - RNA, 19 nt, Artificial Sequence
  Description of Artificial Sequence: Synthetic oligonucleotide
uguaccugccccuccugcu

SEQ ID NO: 2547575 - RNA, 19 nt, Artificial Sequence
  Description of Artificial Sequence: Synthetic oligonucleotide
gaagguuacaagccaggua

SEQ ID NO: 2547576 - RNA, 19 nt, Artificial Sequence
  Description of Artificial Sequence: Synthetic oligonucleotide
caagccagguaguugacaa

SEQ ID NO: 2547577 - RNA, 19 nt, Artificial Sequence
  Description of Artificial Sequence: Synthetic oligonucleotide
caaaggucagaugcagccc

SEQ ID NO: 2547578 - RNA, 19 nt, Artificial Sequence
  Description of Artificial Sequence: Synthetic oligonucleotide
aagggcagccacagagugg

SEQ ID NO: 2547579 - RNA, 19 nt, Artificial Sequence
  Description of Artificial Sequence: Synthetic oligonucleotide
uccagaccagacagugacc

SEQ ID NO: 2547580 - RNA, 19 nt, Artificial Sequence
  Description of Artificial Sequence: Synthetic oligonucleotide
ucaguaauuuaugcccuau

SEQ ID NO: 2547581 - RNA, 19 nt, Artificial Sequence
  Description of Artificial Sequence: Synthetic oligonucleotide
agagccuuugggccgacau

SEQ ID NO: 2547582 - RNA, 19 nt, Artificial Sequence
  Description of Artificial Sequence: Synthetic oligonucleotide
uucaguaauuuaugcccua

SEQ ID NO: 2547583 - RNA, 19 nt, Artificial Sequence
  Description of Artificial Sequence: Synthetic oligonucleotide
ggugcugugcaaacaagag

SEQ ID NO: 2547584 - RNA, 19 nt, Artificial Sequence
  Description of Artificial Sequence: Synthetic oligonucleotide
ugggcauuuccaguggggu

SEQ ID NO: 2547585 - RNA, 19 nt, Artificial Sequence
  Description of Artificial Sequence: Synthetic oligonucleotide
ggguauagugcucugggga

SEQ ID NO: 2547586 - RNA, 19 nt, Artificial Sequence
  Description of Artificial Sequence: Synthetic oligonucleotide
cuggggagaaagcuuugug

SEQ ID NO: 2547587 - RNA, 19 nt, Artificial Sequence
  Description of Artificial Sequence: Synthetic oligonucleotide
ugacaugcuuuggaagaca

SEQ ID NO: 2547588 - RNA, 19 nt, Artificial Sequence
  Description of Artificial Sequence: Synthetic oligonucleotide
uauagugcucuggggagaa

SEQ ID NO: 2547589 - RNA, 19 nt, Artificial Sequence
  Description of Artificial Sequence: Synthetic oligonucleotide
aguguuuucauggcaucaa

SEQ ID NO: 2547590 - RNA, 19 nt, Artificial Sequence
  Description of Artificial Sequence: Synthetic oligonucleotide
auauauaaacgaaguguuu

SEQ ID NO: 2547591 - RNA, 19 nt, Artificial Sequence
  Description of Artificial Sequence: Synthetic oligonucleotide
acgaaaagaaagagagaga

SEQ ID NO: 2547592 - RNA, 19 nt, Artificial Sequence
  Description of Artificial Sequence: Synthetic oligonucleotide
ggcacgaaucuuuaaaaua

SEQ ID NO: 2547593 - RNA, 19 nt, Artificial Sequence
  Description of Artificial Sequence: Synthetic oligonucleotide
gcaguuucaguaauuuaug

SEQ ID NO: 2547594 - RNA, 19 nt, Artificial Sequence
  Description of Artificial Sequence: Synthetic oligonucleotide
ucuggggagaaagcuuugu

SEQ ID NO: 2547595 - RNA, 19 nt, Artificial Sequence
  Description of Artificial Sequence: Synthetic oligonucleotide
cuccugggaagguuacaag

SEQ ID NO: 2547596 - RNA, 19 nt, Artificial Sequence
  Description of Artificial Sequence: Synthetic oligonucleotide
uacaagccagguaguugac

SEQ ID NO: 2547597 - RNA, 19 nt, Artificial Sequence
  Description of Artificial Sequence: Synthetic oligonucleotide
aagccagguaguugacaaa

SEQ ID NO: 2547598 - RNA, 19 nt, Artificial Sequence
  Description of Artificial Sequence: Synthetic oligonucleotide
gggugacaugcuuuggaag

SEQ ID NO: 2547599 - RNA, 19 nt, Artificial Sequence
  Description of Artificial Sequence: Synthetic oligonucleotide
acauuguggccugggugac

SEQ ID NO: 2547600 - RNA, 19 nt, Artificial Sequence
  Description of Artificial Sequence: Synthetic oligonucleotide
gggagaaagcuuugugggc

SEQ ID NO: 2547601 - RNA, 19 nt, Artificial Sequence
  Description of Artificial Sequence: Synthetic oligonucleotide
acagaguggggcguuggug

SEQ ID NO: 2547602 - RNA, 19 nt, Artificial Sequence
  Description of Artificial Sequence: Synthetic oligonucleotide
cugcugugguaccuccugg

SEQ ID NO: 2547603 - RNA, 19 nt, Artificial Sequence
  Description of Artificial Sequence: Synthetic oligonucleotide
augggcauuuccagugggg

SEQ ID NO: 2547604 - RNA, 19 nt, Artificial Sequence
  Description of Artificial Sequence: Synthetic oligonucleotide
augcccuaucuccaagggu

SEQ ID NO: 2547605 - RNA, 19 nt, Artificial Sequence
  Description of Artificial Sequence: Synthetic oligonucleotide
cagaugcagccccucgggg

SEQ ID NO: 2547606 - RNA, 19 nt, Artificial Sequence
  Description of Artificial Sequence: Synthetic oligonucleotide
auauacucucuuggcacga

SEQ ID NO: 2547607 - RNA, 19 nt, Artificial Sequence
  Description of Artificial Sequence: Synthetic oligonucleotide
agaaagagagagagagaga

SEQ ID NO: 2547608 - RNA, 19 nt, Artificial Sequence
  Description of Artificial Sequence: Synthetic oligonucleotide
gaccaugggaaagggcagc

SEQ ID NO: 2547609 - RNA, 19 nt, Artificial Sequence
  Description of Artificial Sequence: Synthetic oligonucleotide
ucuuggcacgaaucuuuaa

SEQ ID NO: 2547610 - RNA, 19 nt, Artificial Sequence
  Description of Artificial Sequence: Synthetic oligonucleotide
cugggaagguuacaagcca

SEQ ID NO: 2547611 - RNA, 19 nt, Artificial Sequence
  Description of Artificial Sequence: Synthetic oligonucleotide
agauggguauagugcucug

SEQ ID NO: 2547612 - RNA, 19 nt, Artificial Sequence
  Description of Artificial Sequence: Synthetic oligonucleotide
ggucagaugcagccccucg

SEQ ID NO: 2547613 - RNA, 19 nt, Artificial Sequence
  Description of Artificial Sequence: Synthetic oligonucleotide
auuguggccugggugacau

SEQ ID NO: 2547614 - RNA, 19 nt, Artificial Sequence
  Description of Artificial Sequence: Synthetic oligonucleotide
uccaagggugcugugcaaa

SEQ ID NO: 2547615 - RNA, 19 nt, Artificial Sequence
  Description of Artificial Sequence: Synthetic oligonucleotide
guaguugacaaaggucaga

SEQ ID NO: 2547616 - RNA, 19 nt, Artificial Sequence
  Description of Artificial Sequence: Synthetic oligonucleotide
gguaguugacaaaggucag

SEQ ID NO: 2547617 - RNA, 19 nt, Artificial Sequence
  Description of Artificial Sequence: Synthetic oligonucleotide
aggugagggagacccacau

SEQ ID NO: 2547618 - RNA, 19 nt, Artificial Sequence
  Description of Artificial Sequence: Synthetic oligonucleotide
agacaucccaggugaggga

SEQ ID NO: 2547619 - RNA, 19 nt, Artificial Sequence
  Description of Artificial Sequence: Synthetic oligonucleotide
auacucucuuggcacgaau

SEQ ID NO: 2547620 - RNA, 19 nt, Artificial Sequence
  Description of Artificial Sequence: Synthetic oligonucleotide
acaugcuuuggaagacauc

SEQ ID NO: 2547621 - RNA, 19 nt, Artificial Sequence
  Description of Artificial Sequence: Synthetic oligonucleotide
accagacagugaccauggg

SEQ ID NO: 2547622 - RNA, 19 nt, Artificial Sequence
  Description of Artificial Sequence: Synthetic oligonucleotide
guaccugccccuccugcug

SEQ ID NO: 2547623 - RNA, 19 nt, Artificial Sequence
  Description of Artificial Sequence: Synthetic oligonucleotide
cugggugacaugcuuugga

SEQ ID NO: 2547624 - RNA, 19 nt, Artificial Sequence
  Description of Artificial Sequence: Synthetic oligonucleotide
gggaagguuacaagccagg

SEQ ID NO: 2547625 - RNA, 19 nt, Artificial Sequence
  Description of Artificial Sequence: Synthetic oligonucleotide
agacagugaccaugggaaa

SEQ ID NO: 2547626 - RNA, 19 nt, Artificial Sequence
  Description of Artificial Sequence: Synthetic oligonucleotide
gagaaagcuuugugggcaa

SEQ ID NO: 2547627 - RNA, 19 nt, Artificial Sequence
  Description of Artificial Sequence: Synthetic oligonucleotide
gugacaugcuuuggaagac

SEQ ID NO: 2547628 - RNA, 19 nt, Artificial Sequence
  Description of Artificial Sequence: Synthetic oligonucleotide
ggggaugagauggguauag

SEQ ID NO: 2547629 - RNA, 19 nt, Artificial Sequence
  Description of Artificial Sequence: Synthetic oligonucleotide
cccacaugggcauuuccag

SEQ ID NO: 2547630 - RNA, 19 nt, Artificial Sequence
  Description of Artificial Sequence: Synthetic oligonucleotide
uaccuccugggaagguuac

SEQ ID NO: 2547631 - RNA, 19 nt, Artificial Sequence
  Description of Artificial Sequence: Synthetic oligonucleotide
agggcaguuucaguaauuu

SEQ ID NO: 2547632 - RNA, 19 nt, Artificial Sequence
  Description of Artificial Sequence: Synthetic oligonucleotide
agaaagcuuugugggcaag

SEQ ID NO: 2547633 - RNA, 19 nt, Artificial Sequence
  Description of Artificial Sequence: Synthetic oligonucleotide
cuccugcugugguaccucc

SEQ ID NO: 2547634 - RNA, 19 nt, Artificial Sequence
  Description of Artificial Sequence: Synthetic oligonucleotide
cagugaccaugggaaaggg

SEQ ID NO: 2547635 - RNA, 19 nt, Artificial Sequence
  Description of Artificial Sequence: Synthetic oligonucleotide
ggcaagagcagccaucugu

SEQ ID NO: 2547636 - RNA, 19 nt, Artificial Sequence
  Description of Artificial Sequence: Synthetic oligonucleotide
gagauggguauagugcucu

SEQ ID NO: 2547637 - RNA, 19 nt, Artificial Sequence
  Description of Artificial Sequence: Synthetic oligonucleotide
guguuuucauggcaucaaa

SEQ ID NO: 2547638 - RNA, 19 nt, Artificial Sequence
  Description of Artificial Sequence: Synthetic oligonucleotide
cacgaaucuuuaaaauaua

SEQ ID NO: 2547639 - RNA, 19 nt, Artificial Sequence
  Description of Artificial Sequence: Synthetic oligonucleotide
gcuuuggaagacaucccag

SEQ ID NO: 2547640 - RNA, 19 nt, Artificial Sequence
  Description of Artificial Sequence: Synthetic oligonucleotide
uaccugccccuccugcugu

SEQ ID NO: 2547641 - RNA, 19 nt, Artificial Sequence
  Description of Artificial Sequence: Synthetic oligonucleotide
uauacucucuuggcacgaa

SEQ ID NO: 2547642 - RNA, 19 nt, Artificial Sequence
  Description of Artificial Sequence: Synthetic oligonucleotide
acaagccagguaguugaca

SEQ ID NO: 2547643 - RNA, 19 nt, Artificial Sequence
  Description of Artificial Sequence: Synthetic oligonucleotide
gugguaccuccugggaagg

SEQ ID NO: 2547644 - RNA, 19 nt, Artificial Sequence
  Description of Artificial Sequence: Synthetic oligonucleotide
caucccaggugagggagac

SEQ ID NO: 2547645 - RNA, 19 nt, Artificial Sequence
  Description of Artificial Sequence: Synthetic oligonucleotide
agagagagagagagagaga

SEQ ID NO: 2547646 - RNA, 19 nt, Artificial Sequence
  Description of Artificial Sequence: Synthetic oligonucleotide
gcaucaaaauagaacucca

SEQ ID NO: 2547647 - RNA, 19 nt, Artificial Sequence
  Description of Artificial Sequence: Synthetic oligonucleotide
acaagagccuuugggccga

SEQ ID NO: 2547648 - RNA, 19 nt, Artificial Sequence
  Description of Artificial Sequence: Synthetic oligonucleotide
cucuggggagaaagcuuug

SEQ ID NO: 2547649 - RNA, 19 nt, Artificial Sequence
  Description of Artificial Sequence: Synthetic oligonucleotide
guggggucuguaccugccc

SEQ ID NO: 2547650 - RNA, 19 nt, Artificial Sequence
  Description of Artificial Sequence: Synthetic oligonucleotide
guauagugcucuggggaga

SEQ ID NO: 2547651 - RNA, 19 nt, Artificial Sequence
  Description of Artificial Sequence: Synthetic oligonucleotide
aaggucagaugcagccccu

SEQ ID NO: 2547652 - RNA, 19 nt, Artificial Sequence
  Description of Artificial Sequence: Synthetic oligonucleotide
gcacgaaucuuuaaaauau

SEQ ID NO: 2547653 - RNA, 19 nt, Artificial Sequence
  Description of Artificial Sequence: Synthetic oligonucleotide
caagagcagccaucuguca

SEQ ID NO: 2547654 - RNA, 19 nt, Artificial Sequence
  Description of Artificial Sequence: Synthetic oligonucleotide
aagggcaguuucaguaauu

SEQ ID NO: 2547655 - RNA, 19 nt, Artificial Sequence
  Description of Artificial Sequence: Synthetic oligonucleotide
uggccugggugacaugcuu

SEQ ID NO: 2547656 - RNA, 19 nt, Artificial Sequence
  Description of Artificial Sequence: Synthetic oligonucleotide
agacccacaugggcauuuc

SEQ ID NO: 2547657 - RNA, 19 nt, Artificial Sequence
  Description of Artificial Sequence: Synthetic oligonucleotide
agggugcugugcaaacaag

SEQ ID NO: 2547658 - RNA, 19 nt, Artificial Sequence
  Description of Artificial Sequence: Synthetic oligonucleotide
cugugguaccuccugggaa

SEQ ID NO: 2547659 - RNA, 19 nt, Artificial Sequence
  Description of Artificial Sequence: Synthetic oligonucleotide
gaugcagccccucggggau

SEQ ID NO: 2547660 - RNA, 19 nt, Artificial Sequence
  Description of Artificial Sequence: Synthetic oligonucleotide
ccccucggggaugagaugg

SEQ ID NO: 2547661 - RNA, 19 nt, Artificial Sequence
  Description of Artificial Sequence: Synthetic oligonucleotide
aggucagaugcagccccuc

SEQ ID NO: 2547662 - RNA, 19 nt, Artificial Sequence
  Description of Artificial Sequence: Synthetic oligonucleotide
uugggccgacauuguggcc

SEQ ID NO: 2547663 - RNA, 19 nt, Artificial Sequence
  Description of Artificial Sequence: Synthetic oligonucleotide
uggggcguugguggccacg

SEQ ID NO: 2547664 - RNA, 19 nt, Artificial Sequence
  Description of Artificial Sequence: Synthetic oligonucleotide
gcaagagcagccaucuguc

SEQ ID NO: 2547665 - RNA, 19 nt, Artificial Sequence
  Description of Artificial Sequence: Synthetic oligonucleotide
gccugggugacaugcuuug

SEQ ID NO: 2547666 - RNA, 19 nt, Artificial Sequence
  Description of Artificial Sequence: Synthetic oligonucleotide
aguggggcguugguggcca

SEQ ID NO: 2547667 - RNA, 19 nt, Artificial Sequence
  Description of Artificial Sequence: Synthetic oligonucleotide
ggugagggagacccacaug

SEQ ID NO: 2547668 - RNA, 19 nt, Artificial Sequence
  Description of Artificial Sequence: Synthetic oligonucleotide
agagagagagagagagaaa

SEQ ID NO: 2547669 - RNA, 19 nt, Artificial Sequence
  Description of Artificial Sequence: Synthetic oligonucleotide
gccagguaguugacaaagg

SEQ ID NO: 2547670 - RNA, 19 nt, Artificial Sequence
  Description of Artificial Sequence: Synthetic oligonucleotide
cgaaucuuuaaaauauaua

SEQ ID NO: 2547671 - RNA, 19 nt, Artificial Sequence
  Description of Artificial Sequence: Synthetic oligonucleotide
ccagacagugaccauggga

SEQ ID NO: 2547672 - RNA, 19 nt, Artificial Sequence
  Description of Artificial Sequence: Synthetic oligonucleotide
agccccucggggaugagau

SEQ ID NO: 2547673 - RNA, 19 nt, Artificial Sequence
  Description of Artificial Sequence: Synthetic oligonucleotide
gggugcugugcaaacaaga

SEQ ID NO: 2547674 - RNA, 19 nt, Artificial Sequence
  Description of Artificial Sequence: Synthetic oligonucleotide
ccaagggugcugugcaaac

SEQ ID NO: 2547675 - RNA, 19 nt, Artificial Sequence
  Description of Artificial Sequence: Synthetic oligonucleotide
agguuacaagccagguagu

SEQ ID NO: 2547676 - RNA, 19 nt, Artificial Sequence
  Description of Artificial Sequence: Synthetic oligonucleotide
ggcauuuccaguggggucu

SEQ ID NO: 2547677 - RNA, 19 nt, Artificial Sequence
  Description of Artificial Sequence: Synthetic oligonucleotide
gcuuugugggcaagagcag

SEQ ID NO: 2547678 - RNA, 19 nt, Artificial Sequence
  Description of Artificial Sequence: Synthetic oligonucleotide
ugcagccccucggggauga

SEQ ID NO: 2547679 - RNA, 19 nt, Artificial Sequence
  Description of Artificial Sequence: Synthetic oligonucleotide
gugggcaagagcagccauc

SEQ ID NO: 2547680 - RNA, 19 nt, Artificial Sequence
  Description of Artificial Sequence: Synthetic oligonucleotide
cucuuggcacgaaucuuua

SEQ ID NO: 2547681 - RNA, 19 nt, Artificial Sequence
  Description of Artificial Sequence: Synthetic oligonucleotide
cgacauuguggccugggug

SEQ ID NO: 2547682 - RNA, 19 nt, Artificial Sequence
  Description of Artificial Sequence: Synthetic oligonucleotide
ggaagacaucccaggugag

SEQ ID NO: 2547683 - RNA, 19 nt, Artificial Sequence
  Description of Artificial Sequence: Synthetic oligonucleotide
cuaucuccaagggugcugu

SEQ ID NO: 2547684 - RNA, 19 nt, Artificial Sequence
  Description of Artificial Sequence: Synthetic oligonucleotide
caagggugcugugcaaaca

SEQ ID NO: 2547685 - RNA, 19 nt, Artificial Sequence
  Description of Artificial Sequence: Synthetic oligonucleotide
gggcauuuccagugggguc

SEQ ID NO: 2547686 - RNA, 19 nt, Artificial Sequence
  Description of Artificial Sequence: Synthetic oligonucleotide
cucggggaugagaugggua

SEQ ID NO: 2547687 - RNA, 19 nt, Artificial Sequence
  Description of Artificial Sequence: Synthetic oligonucleotide
gcugugguaccuccuggga

SEQ ID NO: 2547688 - RNA, 19 nt, Artificial Sequence
  Description of Artificial Sequence: Synthetic oligonucleotide
ggucuguaccugccccucc

SEQ ID NO: 2547689 - RNA, 19 nt, Artificial Sequence
  Description of Artificial Sequence: Synthetic oligonucleotide
guaccuccugggaagguua

SEQ ID NO: 2547690 - RNA, 19 nt, Artificial Sequence
  Description of Artificial Sequence: Synthetic oligonucleotide
ccuuugggccgacauugug

SEQ ID NO: 2547691 - RNA, 19 nt, Artificial Sequence
  Description of Artificial Sequence: Synthetic oligonucleotide
caggugagggagacccaca

SEQ ID NO: 2547692 - RNA, 19 nt, Artificial Sequence
  Description of Artificial Sequence: Synthetic oligonucleotide
aagagccuuugggccgaca

SEQ ID NO: 2547693 - RNA, 19 nt, Artificial Sequence
  Description of Artificial Sequence: Synthetic oligonucleotide
ugguaccuccugggaaggu

SEQ ID NO: 2547694 - RNA, 19 nt, Artificial Sequence
  Description of Artificial Sequence: Synthetic oligonucleotide
gucuguaccugccccuccu

SEQ ID NO: 2547695 - RNA, 19 nt, Artificial Sequence
  Description of Artificial Sequence: Synthetic oligonucleotide
ccuaucuccaagggugcug

SEQ ID NO: 2547696 - RNA, 19 nt, Artificial Sequence
  Description of Artificial Sequence: Synthetic oligonucleotide
ugccccuccugcuguggua

SEQ ID NO: 2547697 - RNA, 19 nt, Artificial Sequence
  Description of Artificial Sequence: Synthetic oligonucleotide
ccagguaguugacaaaggu

SEQ ID NO: 2547698 - RNA, 19 nt, Artificial Sequence
  Description of Artificial Sequence: Synthetic oligonucleotide
gccgacauuguggccuggg

SEQ ID NO: 2547699 - RNA, 19 nt, Artificial Sequence
  Description of Artificial Sequence: Synthetic oligonucleotide
ccaggugagggagacccac

SEQ ID NO: 2547700 - RNA, 19 nt, Artificial Sequence
  Description of Artificial Sequence: Synthetic oligonucleotide
acaucccaggugagggaga

SEQ ID NO: 2547701 - RNA, 19 nt, Artificial Sequence
  Description of Artificial Sequence: Synthetic oligonucleotide
ggaagguuacaagccaggu

SEQ ID NO: 2547702 - RNA, 19 nt, Artificial Sequence
  Description of Artificial Sequence: Synthetic oligonucleotide
gggcaguuucaguaauuua

SEQ ID NO: 2547703 - RNA, 19 nt, Artificial Sequence
  Description of Artificial Sequence: Synthetic oligonucleotide
accuccugggaagguuaca

SEQ ID NO: 2547704 - RNA, 19 nt, Artificial Sequence
  Description of Artificial Sequence: Synthetic oligonucleotide
ccugggugacaugcuuugg

SEQ ID NO: 2547705 - RNA, 19 nt, Artificial Sequence
  Description of Artificial Sequence: Synthetic oligonucleotide
cccucggggaugagauggg

SEQ ID NO: 2547706 - RNA, 19 nt, Artificial Sequence
  Description of Artificial Sequence: Synthetic oligonucleotide
gcccuaucuccaagggugc

SEQ ID NO: 2547707 - RNA, 19 nt, Artificial Sequence
  Description of Artificial Sequence: Synthetic oligonucleotide
gggccgacauuguggccug

SEQ ID NO: 2547708 - RNA, 19 nt, Artificial Sequence
  Description of Artificial Sequence: Synthetic oligonucleotide
ccacagaguggggcguugg

SEQ ID NO: 2547709 - RNA, 19 nt, Artificial Sequence
  Description of Artificial Sequence: Synthetic oligonucleotide
cgaaguguuuucauggcau

SEQ ID NO: 2547710 - RNA, 19 nt, Artificial Sequence
  Description of Artificial Sequence: Synthetic oligonucleotide
cauuguggccugggugaca

SEQ ID NO: 2547711 - RNA, 19 nt, Artificial Sequence
  Description of Artificial Sequence: Synthetic oligonucleotide
auagugcucuggggagaaa

SEQ ID NO: 2547712 - RNA, 19 nt, Artificial Sequence
  Description of Artificial Sequence: Synthetic oligonucleotide
cugugcaaacaagagccuu

SEQ ID NO: 2547713 - RNA, 19 nt, Artificial Sequence
  Description of Artificial Sequence: Synthetic oligonucleotide
gcauuuccaguggggucug

SEQ ID NO: 2547714 - RNA, 19 nt, Artificial Sequence
  Description of Artificial Sequence: Synthetic oligonucleotide
gagacccacaugggcauuu

SEQ ID NO: 2547715 - RNA, 19 nt, Artificial Sequence
  Description of Artificial Sequence: Synthetic oligonucleotide
gggcaagagcagccaucug

SEQ ID NO: 2547716 - RNA, 19 nt, Artificial Sequence
  Description of Artificial Sequence: Synthetic oligonucleotide
gggagacccacaugggcau

SEQ ID NO: 2547717 - RNA, 19 nt, Artificial Sequence
  Description of Artificial Sequence: Synthetic oligonucleotide
gccccuccugcugugguac

SEQ ID NO: 2547718 - RNA, 19 nt, Artificial Sequence
  Description of Artificial Sequence: Synthetic oligonucleotide
gguuacaagccagguaguu

SEQ ID NO: 2547719 - RNA, 19 nt, Artificial Sequence
  Description of Artificial Sequence: Synthetic oligonucleotide
augcagccccucggggaug

SEQ ID NO: 2547720 - RNA, 19 nt, Artificial Sequence
  Description of Artificial Sequence: Synthetic oligonucleotide
cacagaguggggcguuggu

SEQ ID NO: 2547721 - RNA, 19 nt, Artificial Sequence
  Description of Artificial Sequence: Synthetic oligonucleotide
gggucuguaccugccccuc

SEQ ID NO: 2547722 - RNA, 19 nt, Artificial Sequence
  Description of Artificial Sequence: Synthetic oligonucleotide
cucucuuggcacgaaucuu

SEQ ID NO: 2547723 - RNA, 19 nt, Artificial Sequence
  Description of Artificial Sequence: Synthetic oligonucleotide
gcucuggggagaaagcuuu

SEQ ID NO: 2547724 - RNA, 19 nt, Artificial Sequence
  Description of Artificial Sequence: Synthetic oligonucleotide
ggggucuguaccugccccu

SEQ ID NO: 2547725 - RNA, 19 nt, Artificial Sequence
  Description of Artificial Sequence: Synthetic oligonucleotide
caagagccuuugggccgac

SEQ ID NO: 2547726 - RNA, 19 nt, Artificial Sequence
  Description of Artificial Sequence: Synthetic oligonucleotide
ccacaugggcauuuccagu

SEQ ID NO: 2547727 - RNA, 19 nt, Artificial Sequence
  Description of Artificial Sequence: Synthetic oligonucleotide
gguaccuccugggaagguu

SEQ ID NO: 2547728 - RNA, 19 nt, Artificial Sequence
  Description of Artificial Sequence: Synthetic oligonucleotide
cagaccagacagugaccau

SEQ ID NO: 2547729 - RNA, 19 nt, Artificial Sequence
  Description of Artificial Sequence: Synthetic oligonucleotide
cagccccucggggaugaga

SEQ ID NO: 2547730 - RNA, 19 nt, Artificial Sequence
  Description of Artificial Sequence: Synthetic oligonucleotide
gcugugcaaacaagagccu

SEQ ID NO: 2547731 - RNA, 19 nt, Artificial Sequence
  Description of Artificial Sequence: Synthetic oligonucleotide
gccccucggggaugagaug

SEQ ID NO: 2547732 - RNA, 19 nt, Artificial Sequence
  Description of Artificial Sequence: Synthetic oligonucleotide
ccuccugcugugguaccuc

SEQ ID NO: 2547733 - RNA, 19 nt, Artificial Sequence
  Description of Artificial Sequence: Synthetic oligonucleotide
gggaugagauggguauagu

SEQ ID NO: 2547734 - RNA, 19 nt, Artificial Sequence
  Description of Artificial Sequence: Synthetic oligonucleotide
ccccuccugcugugguacc

SEQ ID NO: 2547735 - RNA, 19 nt, Artificial Sequence
  Description of Artificial Sequence: Synthetic oligonucleotide
guggccugggugacaugcu

SEQ ID NO: 2547736 - RNA, 19 nt, Artificial Sequence
  Description of Artificial Sequence: Synthetic oligonucleotide
ccaugggaaagggcagcca

SEQ ID NO: 2547737 - RNA, 19 nt, Artificial Sequence
  Description of Artificial Sequence: Synthetic oligonucleotide
cugccccuccugcuguggu

SEQ ID NO: 2547738 - RNA, 19 nt, Artificial Sequence
  Description of Artificial Sequence: Synthetic oligonucleotide
ggccgacauuguggccugg

SEQ ID NO: 2547739 - RNA, 19 nt, Artificial Sequence
  Description of Artificial Sequence: Synthetic oligonucleotide
cccaggugagggagaccca

SEQ ID NO: 2547740 - RNA, 19 nt, Artificial Sequence
  Description of Artificial Sequence: Synthetic oligonucleotide
ccgacauuguggccugggu

SEQ ID NO: 2547741 - RNA, 19 nt, Artificial Sequence
  Description of Artificial Sequence: Synthetic oligonucleotide
ggccugggugacaugcuuu

SEQ ID NO: 2547742 - RNA, 19 nt, Artificial Sequence
  Description of Artificial Sequence: Synthetic oligonucleotide
gccuuugggccgacauugu

SEQ ID NO: 2547743 - RNA, 19 nt, Artificial Sequence
  Description of Artificial Sequence: Synthetic oligonucleotide
gcagccccucggggaugag

SEQ ID NO: 2547744 - RNA, 19 nt, Artificial Sequence
  Description of Artificial Sequence: Synthetic oligonucleotide
cccuaucuccaagggugcu

SEQ ID NO: 2547745 - RNA, 19 nt, Artificial Sequence
  Description of Artificial Sequence: Synthetic oligonucleotide
ggagacccacaugggcauu

SEQ ID NO: 2547746 - RNA, 19 nt, Artificial Sequence
  Description of Artificial Sequence: Synthetic oligonucleotide
ccucggggaugagaugggu

SEQ ID NO: 2547747 - RNA, 19 nt, Artificial Sequence
  Description of Artificial Sequence: Synthetic oligonucleotide
cccuccugcugugguaccu

SEQ ID NO: 2547748 - RNA, 19 nt, Artificial Sequence
  Description of Artificial Sequence: Synthetic oligonucleotide
cggggaugagauggguaua

SEQ ID NO: 2547749 - RNA, 19 nt, Artificial Sequence
  Description of Artificial Sequence: Synthetic oligonucleotide
aaauacuugggacaguuac

SEQ ID NO: 2547750 - RNA, 19 nt, Artificial Sequence
  Description of Artificial Sequence: Synthetic oligonucleotide
uuaauuuauaaugaaauag

SEQ ID NO: 2547751 - RNA, 19 nt, Artificial Sequence
  Description of Artificial Sequence: Synthetic oligonucleotide
ugaaauaguauucaagugu

SEQ ID NO: 2547752 - RNA, 19 nt, Artificial Sequence
  Description of Artificial Sequence: Synthetic oligonucleotide
acuugggacaguuacaagc

SEQ ID NO: 2547753 - RNA, 19 nt, Artificial Sequence
  Description of Artificial Sequence: Synthetic oligonucleotide
uguugaggaaguaugaugc

SEQ ID NO: 2547754 - RNA, 19 nt, Artificial Sequence
  Description of Artificial Sequence: Synthetic oligonucleotide
aaacucuaggaacuggccc

SEQ ID NO: 2547755 - RNA, 19 nt, Artificial Sequence
  Description of Artificial Sequence: Synthetic oligonucleotide
aacuuuugcuuucaauacc

SEQ ID NO: 2547756 - RNA, 19 nt, Artificial Sequence
  Description of Artificial Sequence: Synthetic oligonucleotide
aauaguauucaagugugac

SEQ ID NO: 2547757 - RNA, 19 nt, Artificial Sequence
  Description of Artificial Sequence: Synthetic oligonucleotide
uucaauaccaaauaguauc

SEQ ID NO: 2547758 - RNA, 19 nt, Artificial Sequence
  Description of Artificial Sequence: Synthetic oligonucleotide
uuaacauaaauacuuggga

SEQ ID NO: 2547759 - RNA, 19 nt, Artificial Sequence
  Description of Artificial Sequence: Synthetic oligonucleotide
aacauaaauacuugggaca

SEQ ID NO: 2547760 - RNA, 19 nt, Artificial Sequence
  Description of Artificial Sequence: Synthetic oligonucleotide
aauaguaucugaaagacau

SEQ ID NO: 2547761 - RNA, 19 nt, Artificial Sequence
  Description of Artificial Sequence: Synthetic oligonucleotide
aauugugugccagaauucc

SEQ ID NO: 2547762 - RNA, 19 nt, Artificial Sequence
  Description of Artificial Sequence: Synthetic oligonucleotide
acaggcauuuacuagaguc

SEQ ID NO: 2547763 - RNA, 19 nt, Artificial Sequence
  Description of Artificial Sequence: Synthetic oligonucleotide
uacauggccaccuagaaac

SEQ ID NO: 2547764 - RNA, 19 nt, Artificial Sequence
  Description of Artificial Sequence: Synthetic oligonucleotide
ucaagugugacuuuacaug

SEQ ID NO: 2547765 - RNA, 19 nt, Artificial Sequence
  Description of Artificial Sequence: Synthetic oligonucleotide
aauaccaaauaguaucuga

SEQ ID NO: 2547766 - RNA, 19 nt, Artificial Sequence
  Description of Artificial Sequence: Synthetic oligonucleotide
uuauuaacauaaauacuug

SEQ ID NO: 2547767 - RNA, 19 nt, Artificial Sequence
  Description of Artificial Sequence: Synthetic oligonucleotide
gaaacaacaccacaguuac

SEQ ID NO: 2547768 - RNA, 19 nt, Artificial Sequence
  Description of Artificial Sequence: Synthetic oligonucleotide
uuauaaugaaauaguauuc

SEQ ID NO: 2547769 - RNA, 19 nt, Artificial Sequence
  Description of Artificial Sequence: Synthetic oligonucleotide
ucaaaagacuggaagagac

SEQ ID NO: 2547770 - RNA, 19 nt, Artificial Sequence
  Description of Artificial Sequence: Synthetic oligonucleotide
aguccuaggacucugaacu

SEQ ID NO: 2547771 - RNA, 19 nt, Artificial Sequence
  Description of Artificial Sequence: Synthetic oligonucleotide
uacauaagcagugagaccu

SEQ ID NO: 2547772 - RNA, 19 nt, Artificial Sequence
  Description of Artificial Sequence: Synthetic oligonucleotide
ugaacuuuugcuuucaaua

SEQ ID NO: 2547773 - RNA, 19 nt, Artificial Sequence
  Description of Artificial Sequence: Synthetic oligonucleotide
uaacauaaauacuugggac

SEQ ID NO: 2547774 - RNA, 19 nt, Artificial Sequence
  Description of Artificial Sequence: Synthetic oligonucleotide
aggaauguguucuugacug

SEQ ID NO: 2547775 - RNA, 19 nt, Artificial Sequence
  Description of Artificial Sequence: Synthetic oligonucleotide
aaagucccuacauaagcag

SEQ ID NO: 2547776 - RNA, 19 nt, Artificial Sequence
  Description of Artificial Sequence: Synthetic oligonucleotide
uaucugaaagacaugcuca

SEQ ID NO: 2547777 - RNA, 19 nt, Artificial Sequence
  Description of Artificial Sequence: Synthetic oligonucleotide
caagugugacuuuacaugg

SEQ ID NO: 2547778 - RNA, 19 nt, Artificial Sequence
  Description of Artificial Sequence: Synthetic oligonucleotide
ucaggucuuauuaacauaa

SEQ ID NO: 2547779 - RNA, 19 nt, Artificial Sequence
  Description of Artificial Sequence: Synthetic oligonucleotide
gaaauaguauucaagugug

SEQ ID NO: 2547780 - RNA, 19 nt, Artificial Sequence
  Description of Artificial Sequence: Synthetic oligonucleotide
acuggauugcugcacagac

SEQ ID NO: 2547781 - RNA, 19 nt, Artificial Sequence
  Description of Artificial Sequence: Synthetic oligonucleotide
gucaccaugggccucaagg

SEQ ID NO: 2547782 - RNA, 19 nt, Artificial Sequence
  Description of Artificial Sequence: Synthetic oligonucleotide
uuuguguuuucugagaaac

SEQ ID NO: 2547783 - RNA, 19 nt, Artificial Sequence
  Description of Artificial Sequence: Synthetic oligonucleotide
uuucugagaaacucuagga

SEQ ID NO: 2547784 - RNA, 19 nt, Artificial Sequence
  Description of Artificial Sequence: Synthetic oligonucleotide
ugcuuucaauaccaaauag

SEQ ID NO: 2547785 - RNA, 19 nt, Artificial Sequence
  Description of Artificial Sequence: Synthetic oligonucleotide
cucaccuggaucaaagucc

SEQ ID NO: 2547786 - RNA, 19 nt, Artificial Sequence
  Description of Artificial Sequence: Synthetic oligonucleotide
auuuacuagaguccuagga

SEQ ID NO: 2547787 - RNA, 19 nt, Artificial Sequence
  Description of Artificial Sequence: Synthetic oligonucleotide
augaaauaguauucaagug

SEQ ID NO: 2547788 - RNA, 19 nt, Artificial Sequence
  Description of Artificial Sequence: Synthetic oligonucleotide
caaauaguaucugaaagac

SEQ ID NO: 2547789 - RNA, 19 nt, Artificial Sequence
  Description of Artificial Sequence: Synthetic oligonucleotide
caacccauagucaccaugg

SEQ ID NO: 2547790 - RNA, 19 nt, Artificial Sequence
  Description of Artificial Sequence: Synthetic oligonucleotide
acagugauccuugaagccc

SEQ ID NO: 2547791 - RNA, 19 nt, Artificial Sequence
  Description of Artificial Sequence: Synthetic oligonucleotide
aggaguaauucuucaaaag

SEQ ID NO: 2547792 - RNA, 19 nt, Artificial Sequence
  Description of Artificial Sequence: Synthetic oligonucleotide
uuacuagaguccuaggacu

SEQ ID NO: 2547793 - RNA, 19 nt, Artificial Sequence
  Description of Artificial Sequence: Synthetic oligonucleotide
agagacgcaggucuucacc

SEQ ID NO: 2547794 - RNA, 19 nt, Artificial Sequence
  Description of Artificial Sequence: Synthetic oligonucleotide
aaggaguaauucuucaaaa

SEQ ID NO: 2547795 - RNA, 19 nt, Artificial Sequence
  Description of Artificial Sequence: Synthetic oligonucleotide
ucuugacuggcuuugcuug

SEQ ID NO: 2547796 - RNA, 19 nt, Artificial Sequence
  Description of Artificial Sequence: Synthetic oligonucleotide
aaguaugaugcgcuguugu

SEQ ID NO: 2547797 - RNA, 19 nt, Artificial Sequence
  Description of Artificial Sequence: Synthetic oligonucleotide
guucaugugauaaucauuc

SEQ ID NO: 2547798 - RNA, 19 nt, Artificial Sequence
  Description of Artificial Sequence: Synthetic oligonucleotide
cuuucaauaccaaauagua

SEQ ID NO: 2547799 - RNA, 19 nt, Artificial Sequence
  Description of Artificial Sequence: Synthetic oligonucleotide
auaguauucaagugugacu

SEQ ID NO: 2547800 - RNA, 19 nt, Artificial Sequence
  Description of Artificial Sequence: Synthetic oligonucleotide
aagcacaggcauuuacuag

SEQ ID NO: 2547801 - RNA, 19 nt, Artificial Sequence
  Description of Artificial Sequence: Synthetic oligonucleotide
aagacaugcucacuuuugu

SEQ ID NO: 2547802 - RNA, 19 nt, Artificial Sequence
  Description of Artificial Sequence: Synthetic oligonucleotide
gagacgcaggucuucaccg

SEQ ID NO: 2547803 - RNA, 19 nt, Artificial Sequence
  Description of Artificial Sequence: Synthetic oligonucleotide
cuucaaaagacuggaagag

SEQ ID NO: 2547804 - RNA, 19 nt, Artificial Sequence
  Description of Artificial Sequence: Synthetic oligonucleotide
acccauagucaccaugggc

SEQ ID NO: 2547805 - RNA, 19 nt, Artificial Sequence
  Description of Artificial Sequence: Synthetic oligonucleotide
aguaugaugcgcuguuguc

SEQ ID NO: 2547806 - RNA, 19 nt, Artificial Sequence
  Description of Artificial Sequence: Synthetic oligonucleotide
ucaccuggaucaaaguccc

SEQ ID NO: 2547807 - RNA, 19 nt, Artificial Sequence
  Description of Artificial Sequence: Synthetic oligonucleotide
uggcuguagauccacauuc

SEQ ID NO: 2547808 - RNA, 19 nt, Artificial Sequence
  Description of Artificial Sequence: Synthetic oligonucleotide
uaguauucaagugugacuu

SEQ ID NO: 2547809 - RNA, 19 nt, Artificial Sequence
  Description of Artificial Sequence: Synthetic oligonucleotide
guaucugaaagacaugcuc

SEQ ID NO: 2547810 - RNA, 19 nt, Artificial Sequence
  Description of Artificial Sequence: Synthetic oligonucleotide
gauugcugcacagacacac

SEQ ID NO: 2547811 - RNA, 19 nt, Artificial Sequence
  Description of Artificial Sequence: Synthetic oligonucleotide
gagaccuugguugagaaga

SEQ ID NO: 2547812 - RNA, 19 nt, Artificial Sequence
  Description of Artificial Sequence: Synthetic oligonucleotide
agcacaggcauuuacuaga

SEQ ID NO: 2547813 - RNA, 19 nt, Artificial Sequence
  Description of Artificial Sequence: Synthetic oligonucleotide
caggcauuuacuagagucc

SEQ ID NO: 2547814 - RNA, 19 nt, Artificial Sequence
  Description of Artificial Sequence: Synthetic oligonucleotide
uucaagugugacuuuacau

SEQ ID NO: 2547815 - RNA, 19 nt, Artificial Sequence
  Description of Artificial Sequence: Synthetic oligonucleotide
ucauccgacagcuuucugu

SEQ ID NO: 2547816 - RNA, 19 nt, Artificial Sequence
  Description of Artificial Sequence: Synthetic oligonucleotide
ugugccagaauuccucaca

SEQ ID NO: 2547817 - RNA, 19 nt, Artificial Sequence
  Description of Artificial Sequence: Synthetic oligonucleotide
ugcgcuguuguccugcagc

SEQ ID NO: 2547818 - RNA, 19 nt, Artificial Sequence
  Description of Artificial Sequence: Synthetic oligonucleotide
auuauaccaggcuuuccug

SEQ ID NO: 2547819 - RNA, 19 nt, Artificial Sequence
  Description of Artificial Sequence: Synthetic oligonucleotide
ucaacccauagucaccaug

SEQ ID NO: 2547820 - RNA, 19 nt, Artificial Sequence
  Description of Artificial Sequence: Synthetic oligonucleotide
uaugaugcgcuguuguccu

SEQ ID NO: 2547821 - RNA, 19 nt, Artificial Sequence
  Description of Artificial Sequence: Synthetic oligonucleotide
aaagacaugcucacuuuug

SEQ ID NO: 2547822 - RNA, 19 nt, Artificial Sequence
  Description of Artificial Sequence: Synthetic oligonucleotide
uaagcagugagaccuuggu

SEQ ID NO: 2547823 - RNA, 19 nt, Artificial Sequence
  Description of Artificial Sequence: Synthetic oligonucleotide
uauaugugguggcuguaga

SEQ ID NO: 2547824 - RNA, 19 nt, Artificial Sequence
  Description of Artificial Sequence: Synthetic oligonucleotide
uaggacucugaacuuuugc

SEQ ID NO: 2547825 - RNA, 19 nt, Artificial Sequence
  Description of Artificial Sequence: Synthetic oligonucleotide
uccgacagcuuucuguuga

SEQ ID NO: 2547826 - RNA, 19 nt, Artificial Sequence
  Description of Artificial Sequence: Synthetic oligonucleotide
aguugggguaucuaauugu

SEQ ID NO: 2547827 - RNA, 19 nt, Artificial Sequence
  Description of Artificial Sequence: Synthetic oligonucleotide
gauuauaccaggcuuuccu

SEQ ID NO: 2547828 - RNA, 19 nt, Artificial Sequence
  Description of Artificial Sequence: Synthetic oligonucleotide
auccuugaagcccucaaca

SEQ ID NO: 2547829 - RNA, 19 nt, Artificial Sequence
  Description of Artificial Sequence: Synthetic oligonucleotide
aagugugacuuuacauggc

SEQ ID NO: 2547830 - RNA, 19 nt, Artificial Sequence
  Description of Artificial Sequence: Synthetic oligonucleotide
uuguguggauggcucaucc

SEQ ID NO: 2547831 - RNA, 19 nt, Artificial Sequence
  Description of Artificial Sequence: Synthetic oligonucleotide
uaauugugugccagaauuc

SEQ ID NO: 2547832 - RNA, 19 nt, Artificial Sequence
  Description of Artificial Sequence: Synthetic oligonucleotide
guugaggaaguaugaugcg

SEQ ID NO: 2547833 - RNA, 19 nt, Artificial Sequence
  Description of Artificial Sequence: Synthetic oligonucleotide
uuccucaacccauagucac

SEQ ID NO: 2547834 - RNA, 19 nt, Artificial Sequence
  Description of Artificial Sequence: Synthetic oligonucleotide
ugucuccacgcucucggcg

SEQ ID NO: 2547835 - RNA, 19 nt, Artificial Sequence
  Description of Artificial Sequence: Synthetic oligonucleotide
acacagcucaccuggauca

SEQ ID NO: 2547836 - RNA, 19 nt, Artificial Sequence
  Description of Artificial Sequence: Synthetic oligonucleotide
acuuuuguguuuucugaga

SEQ ID NO: 2547837 - RNA, 19 nt, Artificial Sequence
  Description of Artificial Sequence: Synthetic oligonucleotide
uauucaagugugacuuuac

SEQ ID NO: 2547838 - RNA, 19 nt, Artificial Sequence
  Description of Artificial Sequence: Synthetic oligonucleotide
uggaucaaagucccuacau

SEQ ID NO: 2547839 - RNA, 19 nt, Artificial Sequence
  Description of Artificial Sequence: Synthetic oligonucleotide
uugaggaaguaugaugcgc

SEQ ID NO: 2547840 - RNA, 19 nt, Artificial Sequence
  Description of Artificial Sequence: Synthetic oligonucleotide
guaucuaauugugugccag

SEQ ID NO: 2547841 - RNA, 19 nt, Artificial Sequence
  Description of Artificial Sequence: Synthetic oligonucleotide
uacaagcacaggcauuuac

SEQ ID NO: 2547842 - RNA, 19 nt, Artificial Sequence
  Description of Artificial Sequence: Synthetic oligonucleotide
aauacuugggacaguuaca

SEQ ID NO: 2547843 - RNA, 19 nt, Artificial Sequence
  Description of Artificial Sequence: Synthetic oligonucleotide
acacugauaaaaguuaaaa

SEQ ID NO: 2547844 - RNA, 19 nt, Artificial Sequence
  Description of Artificial Sequence: Synthetic oligonucleotide
aagagacgcaggucuucac

SEQ ID NO: 2547845 - RNA, 19 nt, Artificial Sequence
  Description of Artificial Sequence: Synthetic oligonucleotide
uaccaaauaguaucugaaa

SEQ ID NO: 2547846 - RNA, 19 nt, Artificial Sequence
  Description of Artificial Sequence: Synthetic oligonucleotide
ugugauaaucauuccucaa

SEQ ID NO: 2547847 - RNA, 19 nt, Artificial Sequence
  Description of Artificial Sequence: Synthetic oligonucleotide
acuuuacauggccaccuag

SEQ ID NO: 2547848 - RNA, 19 nt, Artificial Sequence
  Description of Artificial Sequence: Synthetic oligonucleotide
aguuacacugauaaaaguu

SEQ ID NO: 2547849 - RNA, 19 nt, Artificial Sequence
  Description of Artificial Sequence: Synthetic oligonucleotide
aggucuuauuaacauaaau

SEQ ID NO: 2547850 - RNA, 19 nt, Artificial Sequence
  Description of Artificial Sequence: Synthetic oligonucleotide
acacagauuauaccaggcu

SEQ ID NO: 2547851 - RNA, 19 nt, Artificial Sequence
  Description of Artificial Sequence: Synthetic oligonucleotide
auucaagugugacuuuaca

SEQ ID NO: 2547852 - RNA, 19 nt, Artificial Sequence
  Description of Artificial Sequence: Synthetic oligonucleotide
cacagugauccuugaagcc

SEQ ID NO: 2547853 - RNA, 19 nt, Artificial Sequence
  Description of Artificial Sequence: Synthetic oligonucleotide
acucugaacuuuugcuuuc

SEQ ID NO: 2547854 - RNA, 19 nt, Artificial Sequence
  Description of Artificial Sequence: Synthetic oligonucleotide
uucaaaagacuggaagaga

SEQ ID NO: 2547855 - RNA, 19 nt, Artificial Sequence
  Description of Artificial Sequence: Synthetic oligonucleotide
gaaacucuaggaacuggcc

SEQ ID NO: 2547856 - RNA, 19 nt, Artificial Sequence
  Description of Artificial Sequence: Synthetic oligonucleotide
ucuaggaacuggcccaggu

SEQ ID NO: 2547857 - RNA, 19 nt, Artificial Sequence
  Description of Artificial Sequence: Synthetic oligonucleotide
cacaguuacacugauaaaa

SEQ ID NO: 2547858 - RNA, 19 nt, Artificial Sequence
  Description of Artificial Sequence: Synthetic oligonucleotide
auaaauacuugggacaguu

SEQ ID NO: 2547859 - RNA, 19 nt, Artificial Sequence
  Description of Artificial Sequence: Synthetic oligonucleotide
ucccuacauaagcagugag

SEQ ID NO: 2547860 - RNA, 19 nt, Artificial Sequence
  Description of Artificial Sequence: Synthetic oligonucleotide
gagaaacucuaggaacugg

SEQ ID NO: 2547861 - RNA, 19 nt, Artificial Sequence
  Description of Artificial Sequence: Synthetic oligonucleotide
guaugaugcgcuguugucc

SEQ ID NO: 2547862 - RNA, 19 nt, Artificial Sequence
  Description of Artificial Sequence: Synthetic oligonucleotide
uggccaccuagaaacaaca

SEQ ID NO: 2547863 - RNA, 19 nt, Artificial Sequence
  Description of Artificial Sequence: Synthetic oligonucleotide
auucggaggaauguguucu

SEQ ID NO: 2547864 - RNA, 19 nt, Artificial Sequence
  Description of Artificial Sequence: Synthetic oligonucleotide
uaucuaauugugugccaga

SEQ ID NO: 2547865 - RNA, 19 nt, Artificial Sequence
  Description of Artificial Sequence: Synthetic oligonucleotide
agauuauaccaggcuuucc

SEQ ID NO: 2547866 - RNA, 19 nt, Artificial Sequence
  Description of Artificial Sequence: Synthetic oligonucleotide
cauuuacuagaguccuagg

SEQ ID NO: 2547867 - RNA, 19 nt, Artificial Sequence
  Description of Artificial Sequence: Synthetic oligonucleotide
uacuagaguccuaggacuc

SEQ ID NO: 2547868 - RNA, 19 nt, Artificial Sequence
  Description of Artificial Sequence: Synthetic oligonucleotide
uccuugaagcccucaacac

SEQ ID NO: 2547869 - RNA, 19 nt, Artificial Sequence
  Description of Artificial Sequence: Synthetic oligonucleotide
gacaugcucacuuuugugu

SEQ ID NO: 2547870 - RNA, 19 nt, Artificial Sequence
  Description of Artificial Sequence: Synthetic oligonucleotide
uuguguuuucugagaaacu

SEQ ID NO: 2547871 - RNA, 19 nt, Artificial Sequence
  Description of Artificial Sequence: Synthetic oligonucleotide
agacaugcucacuuuugug

SEQ ID NO: 2547872 - RNA, 19 nt, Artificial Sequence
  Description of Artificial Sequence: Synthetic oligonucleotide
agaaacaacaccacaguua

SEQ ID NO: 2547873 - RNA, 19 nt, Artificial Sequence
  Description of Artificial Sequence: Synthetic oligonucleotide
ucuaauugugugccagaau

SEQ ID NO: 2547874 - RNA, 19 nt, Artificial Sequence
  Description of Artificial Sequence: Synthetic oligonucleotide
uccucaacccauagucacc

SEQ ID NO: 2547875 - RNA, 19 nt, Artificial Sequence
  Description of Artificial Sequence: Synthetic oligonucleotide
guuacacugauaaaaguua

SEQ ID NO: 2547876 - RNA, 19 nt, Artificial Sequence
  Description of Artificial Sequence: Synthetic oligonucleotide
cuugguugagaagaagcug

SEQ ID NO: 2547877 - RNA, 19 nt, Artificial Sequence
  Description of Artificial Sequence: Synthetic oligonucleotide
ugagaaacucuaggaacug

SEQ ID NO: 2547878 - RNA, 19 nt, Artificial Sequence
  Description of Artificial Sequence: Synthetic oligonucleotide
ugacuuuacauggccaccu

SEQ ID NO: 2547879 - RNA, 19 nt, Artificial Sequence
  Description of Artificial Sequence: Synthetic oligonucleotide
uauaccaggcuuuccuguc

SEQ ID NO: 2547880 - RNA, 19 nt, Artificial Sequence
  Description of Artificial Sequence: Synthetic oligonucleotide
uccacauucggaggaaugu

SEQ ID NO: 2547881 - RNA, 19 nt, Artificial Sequence
  Description of Artificial Sequence: Synthetic oligonucleotide
uuccaguugggguaucuaa

SEQ ID NO: 2547882 - RNA, 19 nt, Artificial Sequence
  Description of Artificial Sequence: Synthetic oligonucleotide
auacuugggacaguuacaa

SEQ ID NO: 2547883 - RNA, 19 nt, Artificial Sequence
  Description of Artificial Sequence: Synthetic oligonucleotide
cuaauugugugccagaauu

SEQ ID NO: 2547884 - RNA, 19 nt, Artificial Sequence
  Description of Artificial Sequence: Synthetic oligonucleotide
guauaugugguggcuguag

SEQ ID NO: 2547885 - RNA, 19 nt, Artificial Sequence
  Description of Artificial Sequence: Synthetic oligonucleotide
ugagaccuugguugagaag

SEQ ID NO: 2547886 - RNA, 19 nt, Artificial Sequence
  Description of Artificial Sequence: Synthetic oligonucleotide
uucaggucuuauuaacaua

SEQ ID NO: 2547887 - RNA, 19 nt, Artificial Sequence
  Description of Artificial Sequence: Synthetic oligonucleotide
ggucuuauuaacauaaaua

SEQ ID NO: 2547888 - RNA, 19 nt, Artificial Sequence
  Description of Artificial Sequence: Synthetic oligonucleotide
auaccaaauaguaucugaa

SEQ ID NO: 2547889 - RNA, 19 nt, Artificial Sequence
  Description of Artificial Sequence: Synthetic oligonucleotide
gaggaaguaugaugcgcug

SEQ ID NO: 2547890 - RNA, 19 nt, Artificial Sequence
  Description of Artificial Sequence: Synthetic oligonucleotide
uccugcugguauauguggu

SEQ ID NO: 2547891 - RNA, 19 nt, Artificial Sequence
  Description of Artificial Sequence: Synthetic oligonucleotide
acagcuuucuguugaggaa

SEQ ID NO: 2547892 - RNA, 19 nt, Artificial Sequence
  Description of Artificial Sequence: Synthetic oligonucleotide
ugguugagaagaagcugcu

SEQ ID NO: 2547893 - RNA, 19 nt, Artificial Sequence
  Description of Artificial Sequence: Synthetic oligonucleotide
cagcuuucuguugaggaag

SEQ ID NO: 2547894 - RNA, 19 nt, Artificial Sequence
  Description of Artificial Sequence: Synthetic oligonucleotide
gaugugcuuccaguugggg

SEQ ID NO: 2547895 - RNA, 19 nt, Artificial Sequence
  Description of Artificial Sequence: Synthetic oligonucleotide
gcauuuacuagaguccuag

SEQ ID NO: 2547896 - RNA, 19 nt, Artificial Sequence
  Description of Artificial Sequence: Synthetic oligonucleotide
uaaauacuugggacaguua

SEQ ID NO: 2547897 - RNA, 19 nt, Artificial Sequence
  Description of Artificial Sequence: Synthetic oligonucleotide
gccaccuagaaacaacacc

SEQ ID NO: 2547898 - RNA, 19 nt, Artificial Sequence
  Description of Artificial Sequence: Synthetic oligonucleotide
auaugugguggcuguagau

SEQ ID NO: 2547899 - RNA, 19 nt, Artificial Sequence
  Description of Artificial Sequence: Synthetic oligonucleotide
caguugggguaucuaauug

SEQ ID NO: 2547900 - RNA, 19 nt, Artificial Sequence
  Description of Artificial Sequence: Synthetic oligonucleotide
acaagcacaggcauuuacu

SEQ ID NO: 2547901 - RNA, 19 nt, Artificial Sequence
  Description of Artificial Sequence: Synthetic oligonucleotide
uuccccucugucuccacgc

SEQ ID NO: 2547902 - RNA, 19 nt, Artificial Sequence
  Description of Artificial Sequence: Synthetic oligonucleotide
ucaccguuccccucugucu

SEQ ID NO: 2547903 - RNA, 19 nt, Artificial Sequence
  Description of Artificial Sequence: Synthetic oligonucleotide
uucaccguuccccucuguc

SEQ ID NO: 2547904 - RNA, 19 nt, Artificial Sequence
  Description of Artificial Sequence: Synthetic oligonucleotide
ucuguugaggaaguaugau

SEQ ID NO: 2547905 - RNA, 19 nt, Artificial Sequence
  Description of Artificial Sequence: Synthetic oligonucleotide
auaagcagugagaccuugg

SEQ ID NO: 2547906 - RNA, 19 nt, Artificial Sequence
  Description of Artificial Sequence: Synthetic oligonucleotide
cuguagauccacauucgga

SEQ ID NO: 2547907 - RNA, 19 nt, Artificial Sequence
  Description of Artificial Sequence: Synthetic oligonucleotide
agucccuacauaagcagug

SEQ ID NO: 2547908 - RNA, 19 nt, Artificial Sequence
  Description of Artificial Sequence: Synthetic oligonucleotide
cagcucaccuggaucaaag

SEQ ID NO: 2547909 - RNA, 19 nt, Artificial Sequence
  Description of Artificial Sequence: Synthetic oligonucleotide
aagucccuacauaagcagu

SEQ ID NO: 2547910 - RNA, 19 nt, Artificial Sequence
  Description of Artificial Sequence: Synthetic oligonucleotide
uggcucauccgacagcuuu

SEQ ID NO: 2547911 - RNA, 19 nt, Artificial Sequence
  Description of Artificial Sequence: Synthetic oligonucleotide
gcuguagauccacauucgg

SEQ ID NO: 2547912 - RNA, 19 nt, Artificial Sequence
  Description of Artificial Sequence: Synthetic oligonucleotide
uugggacaguuacaagcac

SEQ ID NO: 2547913 - RNA, 19 nt, Artificial Sequence
  Description of Artificial Sequence: Synthetic oligonucleotide
ucccacuuccaaaaucuuu

SEQ ID NO: 2547914 - RNA, 19 nt, Artificial Sequence
  Description of Artificial Sequence: Synthetic oligonucleotide
uugcaggagaugugcuucc

SEQ ID NO: 2547915 - RNA, 19 nt, Artificial Sequence
  Description of Artificial Sequence: Synthetic oligonucleotide
gggguaucuaauugugugc

SEQ ID NO: 2547916 - RNA, 19 nt, Artificial Sequence
  Description of Artificial Sequence: Synthetic oligonucleotide
gaaguaugaugcgcuguug

SEQ ID NO: 2547917 - RNA, 19 nt, Artificial Sequence
  Description of Artificial Sequence: Synthetic oligonucleotide
aggcauuuacuagaguccu

SEQ ID NO: 2547918 - RNA, 19 nt, Artificial Sequence
  Description of Artificial Sequence: Synthetic oligonucleotide
cauucggaggaauguguuc

SEQ ID NO: 2547919 - RNA, 19 nt, Artificial Sequence
  Description of Artificial Sequence: Synthetic oligonucleotide
ggguaucuaauugugugcc

SEQ ID NO: 2547920 - RNA, 19 nt, Artificial Sequence
  Description of Artificial Sequence: Synthetic oligonucleotide
uugcuucaggucuuauuaa

SEQ ID NO: 2547921 - RNA, 19 nt, Artificial Sequence
  Description of Artificial Sequence: Synthetic oligonucleotide
ucggcgugcuugcaggaga

SEQ ID NO: 2547922 - RNA, 19 nt, Artificial Sequence
  Description of Artificial Sequence: Synthetic oligonucleotide
ucugaacuuuugcuuucaa

SEQ ID NO: 2547923 - RNA, 19 nt, Artificial Sequence
  Description of Artificial Sequence: Synthetic oligonucleotide
ggagaugugcuuccaguug

SEQ ID NO: 2547924 - RNA, 19 nt, Artificial Sequence
  Description of Artificial Sequence: Synthetic oligonucleotide
acagauuauaccaggcuuu

SEQ ID NO: 2547925 - RNA, 19 nt, Artificial Sequence
  Description of Artificial Sequence: Synthetic oligonucleotide
ugaugcgcuguuguccugc

SEQ ID NO: 2547926 - RNA, 19 nt, Artificial Sequence
  Description of Artificial Sequence: Synthetic oligonucleotide
caccuagaaacaacaccac

SEQ ID NO: 2547927 - RNA, 19 nt, Artificial Sequence
  Description of Artificial Sequence: Synthetic oligonucleotide
gcuuugcuuguguggaugg

SEQ ID NO: 2547928 - RNA, 19 nt, Artificial Sequence
  Description of Artificial Sequence: Synthetic oligonucleotide
aggagaugugcuuccaguu

SEQ ID NO: 2547929 - RNA, 19 nt, Artificial Sequence
  Description of Artificial Sequence: Synthetic oligonucleotide
guuccccucugucuccacg

SEQ ID NO: 2547930 - RNA, 19 nt, Artificial Sequence
  Description of Artificial Sequence: Synthetic oligonucleotide
cacacagcucaccuggauc

SEQ ID NO: 2547931 - RNA, 19 nt, Artificial Sequence
  Description of Artificial Sequence: Synthetic oligonucleotide
aguaucugaaagacaugcu

SEQ ID NO: 2547932 - RNA, 19 nt, Artificial Sequence
  Description of Artificial Sequence: Synthetic oligonucleotide
aggucuucaccguuccccu

SEQ ID NO: 2547933 - RNA, 19 nt, Artificial Sequence
  Description of Artificial Sequence: Synthetic oligonucleotide
ugcuugcaggagaugugcu

SEQ ID NO: 2547934 - RNA, 19 nt, Artificial Sequence
  Description of Artificial Sequence: Synthetic oligonucleotide
aucuaauugugugccagaa

SEQ ID NO: 2547935 - RNA, 19 nt, Artificial Sequence
  Description of Artificial Sequence: Synthetic oligonucleotide
gaggaauguguucuugacu

SEQ ID NO: 2547936 - RNA, 19 nt, Artificial Sequence
  Description of Artificial Sequence: Synthetic oligonucleotide
auaguaucugaaagacaug

SEQ ID NO: 2547937 - RNA, 19 nt, Artificial Sequence
  Description of Artificial Sequence: Synthetic oligonucleotide
uuccuuagguccugcuggu

SEQ ID NO: 2547938 - RNA, 19 nt, Artificial Sequence
  Description of Artificial Sequence: Synthetic oligonucleotide
uguucuugacuggcuuugc

SEQ ID NO: 2547939 - RNA, 19 nt, Artificial Sequence
  Description of Artificial Sequence: Synthetic oligonucleotide
gauggcucauccgacagcu

SEQ ID NO: 2547940 - RNA, 19 nt, Artificial Sequence
  Description of Artificial Sequence: Synthetic oligonucleotide
cuaggacucugaacuuuug

SEQ ID NO: 2547941 - RNA, 19 nt, Artificial Sequence
  Description of Artificial Sequence: Synthetic oligonucleotide
gaagagacgcaggucuuca

SEQ ID NO: 2547942 - RNA, 19 nt, Artificial Sequence
  Description of Artificial Sequence: Synthetic oligonucleotide
auguguucuugacuggcuu

SEQ ID NO: 2547943 - RNA, 19 nt, Artificial Sequence
  Description of Artificial Sequence: Synthetic oligonucleotide
caagcacaggcauuuacua

SEQ ID NO: 2547944 - RNA, 19 nt, Artificial Sequence
  Description of Artificial Sequence: Synthetic oligonucleotide
cccucaacacagauuauac

SEQ ID NO: 2547945 - RNA, 19 nt, Artificial Sequence
  Description of Artificial Sequence: Synthetic oligonucleotide
gugcuugcaggagaugugc

SEQ ID NO: 2547946 - RNA, 19 nt, Artificial Sequence
  Description of Artificial Sequence: Synthetic oligonucleotide
acgcucucggcgugcuugc

SEQ ID NO: 2547947 - RNA, 19 nt, Artificial Sequence
  Description of Artificial Sequence: Synthetic oligonucleotide
auagucaccaugggccuca

SEQ ID NO: 2547948 - RNA, 19 nt, Artificial Sequence
  Description of Artificial Sequence: Synthetic oligonucleotide
cagacacacagcucaccug

SEQ ID NO: 2547949 - RNA, 19 nt, Artificial Sequence
  Description of Artificial Sequence: Synthetic oligonucleotide
aaaggccuguuugcuucag

SEQ ID NO: 2547950 - RNA, 19 nt, Artificial Sequence
  Description of Artificial Sequence: Synthetic oligonucleotide
cagauuauaccaggcuuuc

SEQ ID NO: 2547951 - RNA, 19 nt, Artificial Sequence
  Description of Artificial Sequence: Synthetic oligonucleotide
augcaaaauccagucacau

SEQ ID NO: 2547952 - RNA, 19 nt, Artificial Sequence
  Description of Artificial Sequence: Synthetic oligonucleotide
gugacuuuacauggccacc

SEQ ID NO: 2547953 - RNA, 19 nt, Artificial Sequence
  Description of Artificial Sequence: Synthetic oligonucleotide
aguauucaagugugacuuu

SEQ ID NO: 2547954 - RNA, 19 nt, Artificial Sequence
  Description of Artificial Sequence: Synthetic oligonucleotide
cauaagcagugagaccuug

SEQ ID NO: 2547955 - RNA, 19 nt, Artificial Sequence
  Description of Artificial Sequence: Synthetic oligonucleotide
uggcccagguucaugugau

SEQ ID NO: 2547956 - RNA, 19 nt, Artificial Sequence
  Description of Artificial Sequence: Synthetic oligonucleotide
uugacuggcuuugcuugug

SEQ ID NO: 2547957 - RNA, 19 nt, Artificial Sequence
  Description of Artificial Sequence: Synthetic oligonucleotide
gaccuugguugagaagaag

SEQ ID NO: 2547958 - RNA, 19 nt, Artificial Sequence
  Description of Artificial Sequence: Synthetic oligonucleotide
gcuguuguccugcagccac

SEQ ID NO: 2547959 - RNA, 19 nt, Artificial Sequence
  Description of Artificial Sequence: Synthetic oligonucleotide
agaguccuaggacucugaa

SEQ ID NO: 2547960 - RNA, 19 nt, Artificial Sequence
  Description of Artificial Sequence: Synthetic oligonucleotide
ucggaggaauguguucuug

SEQ ID NO: 2547961 - RNA, 19 nt, Artificial Sequence
  Description of Artificial Sequence: Synthetic oligonucleotide
aggaaguaugaugcgcugu

SEQ ID NO: 2547962 - RNA, 19 nt, Artificial Sequence
  Description of Artificial Sequence: Synthetic oligonucleotide
ugggccucaaggaguaauu

SEQ ID NO: 2547963 - RNA, 19 nt, Artificial Sequence
  Description of Artificial Sequence: Synthetic oligonucleotide
cuagaguccuaggacucug

SEQ ID NO: 2547964 - RNA, 19 nt, Artificial Sequence
  Description of Artificial Sequence: Synthetic oligonucleotide
gaaagacaugcucacuuuu

SEQ ID NO: 2547965 - RNA, 19 nt, Artificial Sequence
  Description of Artificial Sequence: Synthetic oligonucleotide
cuucaggucuuauuaacau

SEQ ID NO: 2547966 - RNA, 19 nt, Artificial Sequence
  Description of Artificial Sequence: Synthetic oligonucleotide
ugccagaauuccucacagu

SEQ ID NO: 2547967 - RNA, 19 nt, Artificial Sequence
  Description of Artificial Sequence: Synthetic oligonucleotide
agaauuccucacagugauc

SEQ ID NO: 2547968 - RNA, 19 nt, Artificial Sequence
  Description of Artificial Sequence: Synthetic oligonucleotide
cagaauuccucacagugau

SEQ ID NO: 2547969 - RNA, 19 nt, Artificial Sequence
  Description of Artificial Sequence: Synthetic oligonucleotide
ggcuguagauccacauucg

SEQ ID NO: 2547970 - RNA, 19 nt, Artificial Sequence
  Description of Artificial Sequence: Synthetic oligonucleotide
acuagaguccuaggacucu

SEQ ID NO: 2547971 - RNA, 19 nt, Artificial Sequence
  Description of Artificial Sequence: Synthetic oligonucleotide
acucuaggaacuggcccag

SEQ ID NO: 2547972 - RNA, 19 nt, Artificial Sequence
  Description of Artificial Sequence: Synthetic oligonucleotide
gcucaccuggaucaaaguc

SEQ ID NO: 2547973 - RNA, 19 nt, Artificial Sequence
  Description of Artificial Sequence: Synthetic oligonucleotide
caccguuccccucugucuc

SEQ ID NO: 2547974 - RNA, 19 nt, Artificial Sequence
  Description of Artificial Sequence: Synthetic oligonucleotide
cugucaugcaaaauccagu

SEQ ID NO: 2547975 - RNA, 19 nt, Artificial Sequence
  Description of Artificial Sequence: Synthetic oligonucleotide
auccacauucggaggaaug

SEQ ID NO: 2547976 - RNA, 19 nt, Artificial Sequence
  Description of Artificial Sequence: Synthetic oligonucleotide
cacagacacacagcucacc

SEQ ID NO: 2547977 - RNA, 19 nt, Artificial Sequence
  Description of Artificial Sequence: Synthetic oligonucleotide
agacgcaggucuucaccgu

SEQ ID NO: 2547978 - RNA, 19 nt, Artificial Sequence
  Description of Artificial Sequence: Synthetic oligonucleotide
cacgcucucggcgugcuug

SEQ ID NO: 2547979 - RNA, 19 nt, Artificial Sequence
  Description of Artificial Sequence: Synthetic oligonucleotide
cacagauuauaccaggcuu

SEQ ID NO: 2547980 - RNA, 19 nt, Artificial Sequence
  Description of Artificial Sequence: Synthetic oligonucleotide
cuggauugcugcacagaca

SEQ ID NO: 2547981 - RNA, 19 nt, Artificial Sequence
  Description of Artificial Sequence: Synthetic oligonucleotide
ggaucaaagucccuacaua

SEQ ID NO: 2547982 - RNA, 19 nt, Artificial Sequence
  Description of Artificial Sequence: Synthetic oligonucleotide
guggauggcucauccgaca

SEQ ID NO: 2547983 - RNA, 19 nt, Artificial Sequence
  Description of Artificial Sequence: Synthetic oligonucleotide
ccaggcuuuccugucaugc

SEQ ID NO: 2547984 - RNA, 19 nt, Artificial Sequence
  Description of Artificial Sequence: Synthetic oligonucleotide
auccgacagcuuucuguug

SEQ ID NO: 2547985 - RNA, 19 nt, Artificial Sequence
  Description of Artificial Sequence: Synthetic oligonucleotide
gcuuucaauaccaaauagu

SEQ ID NO: 2547986 - RNA, 19 nt, Artificial Sequence
  Description of Artificial Sequence: Synthetic oligonucleotide
cacauucggaggaaugugu

SEQ ID NO: 2547987 - RNA, 19 nt, Artificial Sequence
  Description of Artificial Sequence: Synthetic oligonucleotide
caguuacacugauaaaagu

SEQ ID NO: 2547988 - RNA, 19 nt, Artificial Sequence
  Description of Artificial Sequence: Synthetic oligonucleotide
cuggaucaaagucccuaca

SEQ ID NO: 2547989 - RNA, 19 nt, Artificial Sequence
  Description of Artificial Sequence: Synthetic oligonucleotide
aguuacaagcacaggcauu

SEQ ID NO: 2547990 - RNA, 19 nt, Artificial Sequence
  Description of Artificial Sequence: Synthetic oligonucleotide
uucggaggaauguguucuu

SEQ ID NO: 2547991 - RNA, 19 nt, Artificial Sequence
  Description of Artificial Sequence: Synthetic oligonucleotide
cuuagguccugcugguaua

SEQ ID NO: 2547992 - RNA, 19 nt, Artificial Sequence
  Description of Artificial Sequence: Synthetic oligonucleotide
gaugcgcuguuguccugca

SEQ ID NO: 2547993 - RNA, 19 nt, Artificial Sequence
  Description of Artificial Sequence: Synthetic oligonucleotide
gugugccagaauuccucac

SEQ ID NO: 2547994 - RNA, 19 nt, Artificial Sequence
  Description of Artificial Sequence: Synthetic oligonucleotide
ccucaaggaguaauucuuc

SEQ ID NO: 2547995 - RNA, 19 nt, Artificial Sequence
  Description of Artificial Sequence: Synthetic oligonucleotide
cugucuccacgcucucggc

SEQ ID NO: 2547996 - RNA, 19 nt, Artificial Sequence
  Description of Artificial Sequence: Synthetic oligonucleotide
auugcugcacagacacaca

SEQ ID NO: 2547997 - RNA, 19 nt, Artificial Sequence
  Description of Artificial Sequence: Synthetic oligonucleotide
acauucggaggaauguguu

SEQ ID NO: 2547998 - RNA, 19 nt, Artificial Sequence
  Description of Artificial Sequence: Synthetic oligonucleotide
gcaggagaugugcuuccag

SEQ ID NO: 2547999 - RNA, 19 nt, Artificial Sequence
  Description of Artificial Sequence: Synthetic oligonucleotide
gcuucaggucuuauuaaca

SEQ ID NO: 2548000 - RNA, 19 nt, Artificial Sequence
  Description of Artificial Sequence: Synthetic oligonucleotide
gugugacuuuacauggcca

SEQ ID NO: 2548001 - RNA, 19 nt, Artificial Sequence
  Description of Artificial Sequence: Synthetic oligonucleotide
ccagaauuccucacaguga

SEQ ID NO: 2548002 - RNA, 19 nt, Artificial Sequence
  Description of Artificial Sequence: Synthetic oligonucleotide
gacuuuacauggccaccua

SEQ ID NO: 2548003 - RNA, 19 nt, Artificial Sequence
  Description of Artificial Sequence: Synthetic oligonucleotide
acgcaggucuucaccguuc

SEQ ID NO: 2548004 - RNA, 19 nt, Artificial Sequence
  Description of Artificial Sequence: Synthetic oligonucleotide
augggccucaaggaguaau

SEQ ID NO: 2548005 - RNA, 19 nt, Artificial Sequence
  Description of Artificial Sequence: Synthetic oligonucleotide
gaacuggcccagguucaug

SEQ ID NO: 2548006 - RNA, 19 nt, Artificial Sequence
  Description of Artificial Sequence: Synthetic oligonucleotide
caggagaugugcuuccagu

SEQ ID NO: 2548007 - RNA, 19 nt, Artificial Sequence
  Description of Artificial Sequence: Synthetic oligonucleotide
ggauggcucauccgacagc

SEQ ID NO: 2548008 - RNA, 19 nt, Artificial Sequence
  Description of Artificial Sequence: Synthetic oligonucleotide
agauccacauucggaggaa

SEQ ID NO: 2548009 - RNA, 19 nt, Artificial Sequence
  Description of Artificial Sequence: Synthetic oligonucleotide
gguugagaagaagcugcug

SEQ ID NO: 2548010 - RNA, 19 nt, Artificial Sequence
  Description of Artificial Sequence: Synthetic oligonucleotide
gucuucaccguuccccucu

SEQ ID NO: 2548011 - RNA, 19 nt, Artificial Sequence
  Description of Artificial Sequence: Synthetic oligonucleotide
augaugcgcuguuguccug

SEQ ID NO: 2548012 - RNA, 19 nt, Artificial Sequence
  Description of Artificial Sequence: Synthetic oligonucleotide
ccuugaagcccucaacaca

SEQ ID NO: 2548013 - RNA, 19 nt, Artificial Sequence
  Description of Artificial Sequence: Synthetic oligonucleotide
guucuugacuggcuuugcu

SEQ ID NO: 2548014 - RNA, 19 nt, Artificial Sequence
  Description of Artificial Sequence: Synthetic oligonucleotide
cccuacauaagcagugaga

SEQ ID NO: 2548015 - RNA, 19 nt, Artificial Sequence
  Description of Artificial Sequence: Synthetic oligonucleotide
caggucuuauuaacauaaa

SEQ ID NO: 2548016 - RNA, 19 nt, Artificial Sequence
  Description of Artificial Sequence: Synthetic oligonucleotide
augcgcuguuguccugcag

SEQ ID NO: 2548017 - RNA, 19 nt, Artificial Sequence
  Description of Artificial Sequence: Synthetic oligonucleotide
cauagucaccaugggccuc

SEQ ID NO: 2548018 - RNA, 19 nt, Artificial Sequence
  Description of Artificial Sequence: Synthetic oligonucleotide
cauccgacagcuuucuguu

SEQ ID NO: 2548019 - RNA, 19 nt, Artificial Sequence
  Description of Artificial Sequence: Synthetic oligonucleotide
gucccuacauaagcaguga

SEQ ID NO: 2548020 - RNA, 19 nt, Artificial Sequence
  Description of Artificial Sequence: Synthetic oligonucleotide
uuacaagcacaggcauuua

SEQ ID NO: 2548021 - RNA, 19 nt, Artificial Sequence
  Description of Artificial Sequence: Synthetic oligonucleotide
uggcuuugcuuguguggau

SEQ ID NO: 2548022 - RNA, 19 nt, Artificial Sequence
  Description of Artificial Sequence: Synthetic oligonucleotide
cucauccgacagcuuucug

SEQ ID NO: 2548023 - RNA, 19 nt, Artificial Sequence
  Description of Artificial Sequence: Synthetic oligonucleotide
cucggcgugcuugcaggag

SEQ ID NO: 2548024 - RNA, 19 nt, Artificial Sequence
  Description of Artificial Sequence: Synthetic oligonucleotide
ggaaguaugaugcgcuguu

SEQ ID NO: 2548025 - RNA, 19 nt, Artificial Sequence
  Description of Artificial Sequence: Synthetic oligonucleotide
caguuacaagcacaggcau

SEQ ID NO: 2548026 - RNA, 19 nt, Artificial Sequence
  Description of Artificial Sequence: Synthetic oligonucleotide
ggccuguuugcuucagguc

SEQ ID NO: 2548027 - RNA, 19 nt, Artificial Sequence
  Description of Artificial Sequence: Synthetic oligonucleotide
ggccucaaggaguaauucu

SEQ ID NO: 2548028 - RNA, 19 nt, Artificial Sequence
  Description of Artificial Sequence: Synthetic oligonucleotide
ccacauucggaggaaugug

SEQ ID NO: 2548029 - RNA, 19 nt, Artificial Sequence
  Description of Artificial Sequence: Synthetic oligonucleotide
ggaagagacgcaggucuuc

SEQ ID NO: 2548030 - RNA, 19 nt, Artificial Sequence
  Description of Artificial Sequence: Synthetic oligonucleotide
cacuggauugcugcacaga

SEQ ID NO: 2548031 - RNA, 19 nt, Artificial Sequence
  Description of Artificial Sequence: Synthetic oligonucleotide
uccacgcucucggcgugcu

SEQ ID NO: 2548032 - RNA, 19 nt, Artificial Sequence
  Description of Artificial Sequence: Synthetic oligonucleotide
acauaagcagugagaccuu

SEQ ID NO: 2548033 - RNA, 19 nt, Artificial Sequence
  Description of Artificial Sequence: Synthetic oligonucleotide
cgugcuugcaggagaugug

SEQ ID NO: 2548034 - RNA, 19 nt, Artificial Sequence
  Description of Artificial Sequence: Synthetic oligonucleotide
ccgacagcuuucuguugag

SEQ ID NO: 2548035 - RNA, 19 nt, Artificial Sequence
  Description of Artificial Sequence: Synthetic oligonucleotide
uccuuagguccugcuggua

SEQ ID NO: 2548036 - RNA, 19 nt, Artificial Sequence
  Description of Artificial Sequence: Synthetic oligonucleotide
ccucaacccauagucacca

SEQ ID NO: 2548037 - RNA, 19 nt, Artificial Sequence
  Description of Artificial Sequence: Synthetic oligonucleotide
cauaaauacuugggacagu

SEQ ID NO: 2548038 - RNA, 19 nt, Artificial Sequence
  Description of Artificial Sequence: Synthetic oligonucleotide
gguucaugugauaaucauu

SEQ ID NO: 2548039 - RNA, 19 nt, Artificial Sequence
  Description of Artificial Sequence: Synthetic oligonucleotide
ggccaccuagaaacaacac

SEQ ID NO: 2548040 - RNA, 19 nt, Artificial Sequence
  Description of Artificial Sequence: Synthetic oligonucleotide
gauccacauucggaggaau

SEQ ID NO: 2548041 - RNA, 19 nt, Artificial Sequence
  Description of Artificial Sequence: Synthetic oligonucleotide
gcccagguucaugugauaa

SEQ ID NO: 2548042 - RNA, 19 nt, Artificial Sequence
  Description of Artificial Sequence: Synthetic oligonucleotide
caugcucacuuuuguguuu

SEQ ID NO: 2548043 - RNA, 19 nt, Artificial Sequence
  Description of Artificial Sequence: Synthetic oligonucleotide
gcccucaacacagauuaua

SEQ ID NO: 2548044 - RNA, 19 nt, Artificial Sequence
  Description of Artificial Sequence: Synthetic oligonucleotide
cuuccaguugggguaucua

SEQ ID NO: 2548045 - RNA, 19 nt, Artificial Sequence
  Description of Artificial Sequence: Synthetic oligonucleotide
cuccacgcucucggcgugc

SEQ ID NO: 2548046 - RNA, 19 nt, Artificial Sequence
  Description of Artificial Sequence: Synthetic oligonucleotide
gcugguauaugugguggcu

SEQ ID NO: 2548047 - RNA, 19 nt, Artificial Sequence
  Description of Artificial Sequence: Synthetic oligonucleotide
gccucaaggaguaauucuu

SEQ ID NO: 2548048 - RNA, 19 nt, Artificial Sequence
  Description of Artificial Sequence: Synthetic oligonucleotide
gcgugcuugcaggagaugu

SEQ ID NO: 2548049 - RNA, 19 nt, Artificial Sequence
  Description of Artificial Sequence: Synthetic oligonucleotide
gguauaugugguggcugua

SEQ ID NO: 2548050 - RNA, 19 nt, Artificial Sequence
  Description of Artificial Sequence: Synthetic oligonucleotide
ccuuagguccugcugguau

SEQ ID NO: 2548051 - RNA, 19 nt, Artificial Sequence
  Description of Artificial Sequence: Synthetic oligonucleotide
ccacaguuacacugauaaa

SEQ ID NO: 2548052 - RNA, 19 nt, Artificial Sequence
  Description of Artificial Sequence: Synthetic oligonucleotide
uagucaccaugggccucaa

SEQ ID NO: 2548053 - RNA, 19 nt, Artificial Sequence
  Description of Artificial Sequence: Synthetic oligonucleotide
ggcauuuacuagaguccua

SEQ ID NO: 2548054 - RNA, 19 nt, Artificial Sequence
  Description of Artificial Sequence: Synthetic oligonucleotide
ccaguugggguaucuaauu

SEQ ID NO: 2548055 - RNA, 19 nt, Artificial Sequence
  Description of Artificial Sequence: Synthetic oligonucleotide
cacagcucaccuggaucaa

SEQ ID NO: 2548056 - RNA, 19 nt, Artificial Sequence
  Description of Artificial Sequence: Synthetic oligonucleotide
agcccucaacacagauuau

SEQ ID NO: 2548057 - RNA, 19 nt, Artificial Sequence
  Description of Artificial Sequence: Synthetic oligonucleotide
cuguuugcuucaggucuua

SEQ ID NO: 2548058 - RNA, 19 nt, Artificial Sequence
  Description of Artificial Sequence: Synthetic oligonucleotide
ccuaggacucugaacuuuu

SEQ ID NO: 2548059 - RNA, 19 nt, Artificial Sequence
  Description of Artificial Sequence: Synthetic oligonucleotide
ggcgugcuugcaggagaug

SEQ ID NO: 2548060 - RNA, 19 nt, Artificial Sequence
  Description of Artificial Sequence: Synthetic oligonucleotide
ccccucugucuccacgcuc

SEQ ID NO: 2548061 - RNA, 19 nt, Artificial Sequence
  Description of Artificial Sequence: Synthetic oligonucleotide
auggcucauccgacagcuu

SEQ ID NO: 2548062 - RNA, 19 nt, Artificial Sequence
  Description of Artificial Sequence: Synthetic oligonucleotide
cucaacccauagucaccau

SEQ ID NO: 2548063 - RNA, 19 nt, Artificial Sequence
  Description of Artificial Sequence: Synthetic oligonucleotide
cuucaccguuccccucugu

SEQ ID NO: 2548064 - RNA, 19 nt, Artificial Sequence
  Description of Artificial Sequence: Synthetic oligonucleotide
gcuuguguggauggcucau

SEQ ID NO: 2548065 - RNA, 19 nt, Artificial Sequence
  Description of Artificial Sequence: Synthetic oligonucleotide
caccuggaucaaagucccu

SEQ ID NO: 2548066 - RNA, 19 nt, Artificial Sequence
  Description of Artificial Sequence: Synthetic oligonucleotide
ggcccagguucaugugaua

SEQ ID NO: 2548067 - RNA, 19 nt, Artificial Sequence
  Description of Artificial Sequence: Synthetic oligonucleotide
ggaacuggcccagguucau

SEQ ID NO: 2548068 - RNA, 19 nt, Artificial Sequence
  Description of Artificial Sequence: Synthetic oligonucleotide
ccguuccccucugucucca

SEQ ID NO: 2548069 - RNA, 19 nt, Artificial Sequence
  Description of Artificial Sequence: Synthetic oligonucleotide
cgcuguuguccugcagcca

SEQ ID NO: 2548070 - RNA, 19 nt, Artificial Sequence
  Description of Artificial Sequence: Synthetic oligonucleotide
uuugauaucacauucagac

SEQ ID NO: 2548071 - RNA, 19 nt, Artificial Sequence
  Description of Artificial Sequence: Synthetic oligonucleotide
uauguuaaaauuuucuucc

SEQ ID NO: 2548072 - RNA, 19 nt, Artificial Sequence
  Description of Artificial Sequence: Synthetic oligonucleotide
aagucaaaagccuugguuc

SEQ ID NO: 2548073 - RNA, 19 nt, Artificial Sequence
  Description of Artificial Sequence: Synthetic oligonucleotide
uuuaauuugcuucacaccu

SEQ ID NO: 2548074 - RNA, 19 nt, Artificial Sequence
  Description of Artificial Sequence: Synthetic oligonucleotide
caagcauuccuuaagaugg

SEQ ID NO: 2548075 - RNA, 19 nt, Artificial Sequence
  Description of Artificial Sequence: Synthetic oligonucleotide
aagguaaggguuuucuucc

SEQ ID NO: 2548076 - RNA, 19 nt, Artificial Sequence
  Description of Artificial Sequence: Synthetic oligonucleotide
ucuucaaccaauuugauau

SEQ ID NO: 2548077 - RNA, 19 nt, Artificial Sequence
  Description of Artificial Sequence: Synthetic oligonucleotide
uguguuuuaaauaagcuau

SEQ ID NO: 2548078 - RNA, 19 nt, Artificial Sequence
  Description of Artificial Sequence: Synthetic oligonucleotide
aaagugacacguuuugucg

SEQ ID NO: 2548079 - RNA, 19 nt, Artificial Sequence
  Description of Artificial Sequence: Synthetic oligonucleotide
aauuugauaucacauucag

SEQ ID NO: 2548080 - RNA, 19 nt, Artificial Sequence
  Description of Artificial Sequence: Synthetic oligonucleotide
aagaggaccaccuucauca

SEQ ID NO: 2548081 - RNA, 19 nt, Artificial Sequence
  Description of Artificial Sequence: Synthetic oligonucleotide
agccuuuaaagucaaaagc

SEQ ID NO: 2548082 - RNA, 19 nt, Artificial Sequence
  Description of Artificial Sequence: Synthetic oligonucleotide
ugagucaucgcuuugaugu

SEQ ID NO: 2548083 - RNA, 19 nt, Artificial Sequence
  Description of Artificial Sequence: Synthetic oligonucleotide
uuuucagauucuaagaaug

SEQ ID NO: 2548084 - RNA, 19 nt, Artificial Sequence
  Description of Artificial Sequence: Synthetic oligonucleotide
uuugcuuucguguagguga

SEQ ID NO: 2548085 - RNA, 19 nt, Artificial Sequence
  Description of Artificial Sequence: Synthetic oligonucleotide
uucuaaaucuuccccagcg

SEQ ID NO: 2548086 - RNA, 19 nt, Artificial Sequence
  Description of Artificial Sequence: Synthetic oligonucleotide
ucuucaauaggagaaagag

SEQ ID NO: 2548087 - RNA, 19 nt, Artificial Sequence
  Description of Artificial Sequence: Synthetic oligonucleotide
ucugagcuuauuaugaagc

SEQ ID NO: 2548088 - RNA, 19 nt, Artificial Sequence
  Description of Artificial Sequence: Synthetic oligonucleotide
ucguguaggugaaagaacg

SEQ ID NO: 2548089 - RNA, 19 nt, Artificial Sequence
  Description of Artificial Sequence: Synthetic oligonucleotide
uuuaaagucaaaagccuug

SEQ ID NO: 2548090 - RNA, 19 nt, Artificial Sequence
  Description of Artificial Sequence: Synthetic oligonucleotide
ugauaucacauucagacuc

SEQ ID NO: 2548091 - RNA, 19 nt, Artificial Sequence
  Description of Artificial Sequence: Synthetic oligonucleotide
cuaucugugaccuucuagg

SEQ ID NO: 2548092 - RNA, 19 nt, Artificial Sequence
  Description of Artificial Sequence: Synthetic oligonucleotide
ucauauguuaaaauuuucu

SEQ ID NO: 2548093 - RNA, 19 nt, Artificial Sequence
  Description of Artificial Sequence: Synthetic oligonucleotide
uuauuaugaagcaaguguc

SEQ ID NO: 2548094 - RNA, 19 nt, Artificial Sequence
  Description of Artificial Sequence: Synthetic oligonucleotide
aaugucugcagcucuauca

SEQ ID NO: 2548095 - RNA, 19 nt, Artificial Sequence
  Description of Artificial Sequence: Synthetic oligonucleotide
uaagcuaucagaugaguca

SEQ ID NO: 2548096 - RNA, 19 nt, Artificial Sequence
  Description of Artificial Sequence: Synthetic oligonucleotide
agauucuaagaauggaaac

SEQ ID NO: 2548097 - RNA, 19 nt, Artificial Sequence
  Description of Artificial Sequence: Synthetic oligonucleotide
uuucagauucuaagaaugg

SEQ ID NO: 2548098 - RNA, 19 nt, Artificial Sequence
  Description of Artificial Sequence: Synthetic oligonucleotide
ucuugcaacagcuugcuca

SEQ ID NO: 2548099 - RNA, 19 nt, Artificial Sequence
  Description of Artificial Sequence: Synthetic oligonucleotide
agugucuucaaccaauuug

SEQ ID NO: 2548100 - RNA, 19 nt, Artificial Sequence
  Description of Artificial Sequence: Synthetic oligonucleotide
aucacauucagacucagga

SEQ ID NO: 2548101 - RNA, 19 nt, Artificial Sequence
  Description of Artificial Sequence: Synthetic oligonucleotide
uuaaauaagcuaucagaug

SEQ ID NO: 2548102 - RNA, 19 nt, Artificial Sequence
  Description of Artificial Sequence: Synthetic oligonucleotide
uuuuaauuugcuucacacc

SEQ ID NO: 2548103 - RNA, 19 nt, Artificial Sequence
  Description of Artificial Sequence: Synthetic oligonucleotide
aagccuugguucuauagag

SEQ ID NO: 2548104 - RNA, 19 nt, Artificial Sequence
  Description of Artificial Sequence: Synthetic oligonucleotide
auucuaagaauggaaacac

SEQ ID NO: 2548105 - RNA, 19 nt, Artificial Sequence
  Description of Artificial Sequence: Synthetic oligonucleotide
uuuauuucugagcuuauua

SEQ ID NO: 2548106 - RNA, 19 nt, Artificial Sequence
  Description of Artificial Sequence: Synthetic oligonucleotide
uacuguguuuuaaauaagc

SEQ ID NO: 2548107 - RNA, 19 nt, Artificial Sequence
  Description of Artificial Sequence: Synthetic oligonucleotide
ucaagcauuccuuaagaug

SEQ ID NO: 2548108 - RNA, 19 nt, Artificial Sequence
  Description of Artificial Sequence: Synthetic oligonucleotide
uauaguaguuuuauuucug

SEQ ID NO: 2548109 - RNA, 19 nt, Artificial Sequence
  Description of Artificial Sequence: Synthetic oligonucleotide
uuuucuaaaucuuccccag

SEQ ID NO: 2548110 - RNA, 19 nt, Artificial Sequence
  Description of Artificial Sequence: Synthetic oligonucleotide
aaaauagccuuuaaaguca

SEQ ID NO: 2548111 - RNA, 19 nt, Artificial Sequence
  Description of Artificial Sequence: Synthetic oligonucleotide
aaagccuugguucuauaga

SEQ ID NO: 2548112 - RNA, 19 nt, Artificial Sequence
  Description of Artificial Sequence: Synthetic oligonucleotide
uucugauugagccauuacu

SEQ ID NO: 2548113 - RNA, 19 nt, Artificial Sequence
  Description of Artificial Sequence: Synthetic oligonucleotide
cuucaauaggagaaagagg

SEQ ID NO: 2548114 - RNA, 19 nt, Artificial Sequence
  Description of Artificial Sequence: Synthetic oligonucleotide
guuuuaaauaagcuaucag

SEQ ID NO: 2548115 - RNA, 19 nt, Artificial Sequence
  Description of Artificial Sequence: Synthetic oligonucleotide
ucagauucuaagaauggaa

SEQ ID NO: 2548116 - RNA, 19 nt, Artificial Sequence
  Description of Artificial Sequence: Synthetic oligonucleotide
ugucaugcagucaacagaa

SEQ ID NO: 2548117 - RNA, 19 nt, Artificial Sequence
  Description of Artificial Sequence: Synthetic oligonucleotide
ucaucaauguacuuguguc

SEQ ID NO: 2548118 - RNA, 19 nt, Artificial Sequence
  Description of Artificial Sequence: Synthetic oligonucleotide
auguacuugugucuccugc

SEQ ID NO: 2548119 - RNA, 19 nt, Artificial Sequence
  Description of Artificial Sequence: Synthetic oligonucleotide
uagccuuuaaagucaaaag

SEQ ID NO: 2548120 - RNA, 19 nt, Artificial Sequence
  Description of Artificial Sequence: Synthetic oligonucleotide
aggguuuucuuccauuuuc

SEQ ID NO: 2548121 - RNA, 19 nt, Artificial Sequence
  Description of Artificial Sequence: Synthetic oligonucleotide
guuaguggcucuucaauag

SEQ ID NO: 2548122 - RNA, 19 nt, Artificial Sequence
  Description of Artificial Sequence: Synthetic oligonucleotide
uaaagugacacguuuuguc

SEQ ID NO: 2548123 - RNA, 19 nt, Artificial Sequence
  Description of Artificial Sequence: Synthetic oligonucleotide
gagcuuauuaugaagcaag

SEQ ID NO: 2548124 - RNA, 19 nt, Artificial Sequence
  Description of Artificial Sequence: Synthetic oligonucleotide
aauaggagaaagaggacca

SEQ ID NO: 2548125 - RNA, 19 nt, Artificial Sequence
  Description of Artificial Sequence: Synthetic oligonucleotide
agacucaggauuuguugcc

SEQ ID NO: 2548126 - RNA, 19 nt, Artificial Sequence
  Description of Artificial Sequence: Synthetic oligonucleotide
ugaaagaacguacuguguu

SEQ ID NO: 2548127 - RNA, 19 nt, Artificial Sequence
  Description of Artificial Sequence: Synthetic oligonucleotide
uuugcuucacaccuaucug

SEQ ID NO: 2548128 - RNA, 19 nt, Artificial Sequence
  Description of Artificial Sequence: Synthetic oligonucleotide
ucaggugucaugcagucaa

SEQ ID NO: 2548129 - RNA, 19 nt, Artificial Sequence
  Description of Artificial Sequence: Synthetic oligonucleotide
ucagacucaggauuuguug

SEQ ID NO: 2548130 - RNA, 19 nt, Artificial Sequence
  Description of Artificial Sequence: Synthetic oligonucleotide
uuauuucugagcuuauuau

SEQ ID NO: 2548131 - RNA, 19 nt, Artificial Sequence
  Description of Artificial Sequence: Synthetic oligonucleotide
ucaugcagucaacagaagu

SEQ ID NO: 2548132 - RNA, 19 nt, Artificial Sequence
  Description of Artificial Sequence: Synthetic oligonucleotide
aucgcuuugauguccaaug

SEQ ID NO: 2548133 - RNA, 19 nt, Artificial Sequence
  Description of Artificial Sequence: Synthetic oligonucleotide
gauucuaagaauggaaaca

SEQ ID NO: 2548134 - RNA, 19 nt, Artificial Sequence
  Description of Artificial Sequence: Synthetic oligonucleotide
uuugcagguaaagugacac

SEQ ID NO: 2548135 - RNA, 19 nt, Artificial Sequence
  Description of Artificial Sequence: Synthetic oligonucleotide
ugugucagugucaacauuu

SEQ ID NO: 2548136 - RNA, 19 nt, Artificial Sequence
  Description of Artificial Sequence: Synthetic oligonucleotide
cuuauuaugaagcaagugu

SEQ ID NO: 2548137 - RNA, 19 nt, Artificial Sequence
  Description of Artificial Sequence: Synthetic oligonucleotide
ugcucauauguuaaaauuu

SEQ ID NO: 2548138 - RNA, 19 nt, Artificial Sequence
  Description of Artificial Sequence: Synthetic oligonucleotide
accuucuaggguuucuagc

SEQ ID NO: 2548139 - RNA, 19 nt, Artificial Sequence
  Description of Artificial Sequence: Synthetic oligonucleotide
uaugaagcaagugucuuca

SEQ ID NO: 2548140 - RNA, 19 nt, Artificial Sequence
  Description of Artificial Sequence: Synthetic oligonucleotide
uuugcuucaagcauuccuu

SEQ ID NO: 2548141 - RNA, 19 nt, Artificial Sequence
  Description of Artificial Sequence: Synthetic oligonucleotide
uagaggagucacuugaugu

SEQ ID NO: 2548142 - RNA, 19 nt, Artificial Sequence
  Description of Artificial Sequence: Synthetic oligonucleotide
uaguaguuuuauuucugag

SEQ ID NO: 2548143 - RNA, 19 nt, Artificial Sequence
  Description of Artificial Sequence: Synthetic oligonucleotide
gauuuguugccucaucuuc

SEQ ID NO: 2548144 - RNA, 19 nt, Artificial Sequence
  Description of Artificial Sequence: Synthetic oligonucleotide
aagcaagugucuucaacca

SEQ ID NO: 2548145 - RNA, 19 nt, Artificial Sequence
  Description of Artificial Sequence: Synthetic oligonucleotide
cagaagucacuucugauug

SEQ ID NO: 2548146 - RNA, 19 nt, Artificial Sequence
  Description of Artificial Sequence: Synthetic oligonucleotide
caugcagucaacagaaguc

SEQ ID NO: 2548147 - RNA, 19 nt, Artificial Sequence
  Description of Artificial Sequence: Synthetic oligonucleotide
aagucuuccuuuucuaaau

SEQ ID NO: 2548148 - RNA, 19 nt, Artificial Sequence
  Description of Artificial Sequence: Synthetic oligonucleotide
uuuuggguucuauaguagu

SEQ ID NO: 2548149 - RNA, 19 nt, Artificial Sequence
  Description of Artificial Sequence: Synthetic oligonucleotide
aaauaagcuaucagaugag

SEQ ID NO: 2548150 - RNA, 19 nt, Artificial Sequence
  Description of Artificial Sequence: Synthetic oligonucleotide
aucaucaauguacuugugu

SEQ ID NO: 2548151 - RNA, 19 nt, Artificial Sequence
  Description of Artificial Sequence: Synthetic oligonucleotide
gacacguuuugucguaggg

SEQ ID NO: 2548152 - RNA, 19 nt, Artificial Sequence
  Description of Artificial Sequence: Synthetic oligonucleotide
aacguacuguguuuuaaau

SEQ ID NO: 2548153 - RNA, 19 nt, Artificial Sequence
  Description of Artificial Sequence: Synthetic oligonucleotide
cagacucaggauuuguugc

SEQ ID NO: 2548154 - RNA, 19 nt, Artificial Sequence
  Description of Artificial Sequence: Synthetic oligonucleotide
aauaagcuaucagaugagu

SEQ ID NO: 2548155 - RNA, 19 nt, Artificial Sequence
  Description of Artificial Sequence: Synthetic oligonucleotide
uuucguguaggugaaagaa

SEQ ID NO: 2548156 - RNA, 19 nt, Artificial Sequence
  Description of Artificial Sequence: Synthetic oligonucleotide
ugaagcaagugucuucaac

SEQ ID NO: 2548157 - RNA, 19 nt, Artificial Sequence
  Description of Artificial Sequence: Synthetic oligonucleotide
auaagcuaucagaugaguc

SEQ ID NO: 2548158 - RNA, 19 nt, Artificial Sequence
  Description of Artificial Sequence: Synthetic oligonucleotide
auuucugagcuuauuauga

SEQ ID NO: 2548159 - RNA, 19 nt, Artificial Sequence
  Description of Artificial Sequence: Synthetic oligonucleotide
uaggugaaagaacguacug

SEQ ID NO: 2548160 - RNA, 19 nt, Artificial Sequence
  Description of Artificial Sequence: Synthetic oligonucleotide
cuaaaucuuccccagcgug

SEQ ID NO: 2548161 - RNA, 19 nt, Artificial Sequence
  Description of Artificial Sequence: Synthetic oligonucleotide
agaggagucacuugaugug

SEQ ID NO: 2548162 - RNA, 19 nt, Artificial Sequence
  Description of Artificial Sequence: Synthetic oligonucleotide
ucuauagaggagucacuug

SEQ ID NO: 2548163 - RNA, 19 nt, Artificial Sequence
  Description of Artificial Sequence: Synthetic oligonucleotide
ugcagguaaagugacacgu

SEQ ID NO: 2548164 - RNA, 19 nt, Artificial Sequence
  Description of Artificial Sequence: Synthetic oligonucleotide
aagugacacguuuugucgu

SEQ ID NO: 2548165 - RNA, 19 nt, Artificial Sequence
  Description of Artificial Sequence: Synthetic oligonucleotide
uaauuugcuucacaccuau

SEQ ID NO: 2548166 - RNA, 19 nt, Artificial Sequence
  Description of Artificial Sequence: Synthetic oligonucleotide
ucuuaauuuuggcuuguau

SEQ ID NO: 2548167 - RNA, 19 nt, Artificial Sequence
  Description of Artificial Sequence: Synthetic oligonucleotide
uuccuuaagauggugcuca

SEQ ID NO: 2548168 - RNA, 19 nt, Artificial Sequence
  Description of Artificial Sequence: Synthetic oligonucleotide
uugucguaggguuucuuug

SEQ ID NO: 2548169 - RNA, 19 nt, Artificial Sequence
  Description of Artificial Sequence: Synthetic oligonucleotide
aaccaauuugauaucacau

SEQ ID NO: 2548170 - RNA, 19 nt, Artificial Sequence
  Description of Artificial Sequence: Synthetic oligonucleotide
uuucuuccaagguaagggu

SEQ ID NO: 2548171 - RNA, 19 nt, Artificial Sequence
  Description of Artificial Sequence: Synthetic oligonucleotide
ugucguaggguuucuuugc

SEQ ID NO: 2548172 - RNA, 19 nt, Artificial Sequence
  Description of Artificial Sequence: Synthetic oligonucleotide
auuuucuuccaagguaagg

SEQ ID NO: 2548173 - RNA, 19 nt, Artificial Sequence
  Description of Artificial Sequence: Synthetic oligonucleotide
cuauagaggagucacuuga

SEQ ID NO: 2548174 - RNA, 19 nt, Artificial Sequence
  Description of Artificial Sequence: Synthetic oligonucleotide
aggauuuguugccucaucu

SEQ ID NO: 2548175 - RNA, 19 nt, Artificial Sequence
  Description of Artificial Sequence: Synthetic oligonucleotide
agucuuccuuuucuaaauc

SEQ ID NO: 2548176 - RNA, 19 nt, Artificial Sequence
  Description of Artificial Sequence: Synthetic oligonucleotide
gaagucacuucugauugag

SEQ ID NO: 2548177 - RNA, 19 nt, Artificial Sequence
  Description of Artificial Sequence: Synthetic oligonucleotide
uuucuaaaucuuccccagc

SEQ ID NO: 2548178 - RNA, 19 nt, Artificial Sequence
  Description of Artificial Sequence: Synthetic oligonucleotide
ucuaaaucuuccccagcgu

SEQ ID NO: 2548179 - RNA, 19 nt, Artificial Sequence
  Description of Artificial Sequence: Synthetic oligonucleotide
ucaaccaauuugauaucac

SEQ ID NO: 2548180 - RNA, 19 nt, Artificial Sequence
  Description of Artificial Sequence: Synthetic oligonucleotide
acaccuaucugugaccuuc

SEQ ID NO: 2548181 - RNA, 19 nt, Artificial Sequence
  Description of Artificial Sequence: Synthetic oligonucleotide
uucguguaggugaaagaac

SEQ ID NO: 2548182 - RNA, 19 nt, Artificial Sequence
  Description of Artificial Sequence: Synthetic oligonucleotide
uugauaucacauucagacu

SEQ ID NO: 2548183 - RNA, 19 nt, Artificial Sequence
  Description of Artificial Sequence: Synthetic oligonucleotide
uucagauucuaagaaugga

SEQ ID NO: 2548184 - RNA, 19 nt, Artificial Sequence
  Description of Artificial Sequence: Synthetic oligonucleotide
uugcuucacaccuaucugu

SEQ ID NO: 2548185 - RNA, 19 nt, Artificial Sequence
  Description of Artificial Sequence: Synthetic oligonucleotide
uuuuauuccagguggucuu

SEQ ID NO: 2548186 - RNA, 19 nt, Artificial Sequence
  Description of Artificial Sequence: Synthetic oligonucleotide
uuccucuuggucuuaauuu

SEQ ID NO: 2548187 - RNA, 19 nt, Artificial Sequence
  Description of Artificial Sequence: Synthetic oligonucleotide
cuucacaccuaucugugac

SEQ ID NO: 2548188 - RNA, 19 nt, Artificial Sequence
  Description of Artificial Sequence: Synthetic oligonucleotide
ucaauaggagaaagaggac

SEQ ID NO: 2548189 - RNA, 19 nt, Artificial Sequence
  Description of Artificial Sequence: Synthetic oligonucleotide
gccuuuaaagucaaaagcc

SEQ ID NO: 2548190 - RNA, 19 nt, Artificial Sequence
  Description of Artificial Sequence: Synthetic oligonucleotide
ucuuggucuuaauuuuggc

SEQ ID NO: 2548191 - RNA, 19 nt, Artificial Sequence
  Description of Artificial Sequence: Synthetic oligonucleotide
ugucagugucaacauuugc

SEQ ID NO: 2548192 - RNA, 19 nt, Artificial Sequence
  Description of Artificial Sequence: Synthetic oligonucleotide
uguacuugugucuccugcu

SEQ ID NO: 2548193 - RNA, 19 nt, Artificial Sequence
  Description of Artificial Sequence: Synthetic oligonucleotide
uguuaguggcucuucaaua

SEQ ID NO: 2548194 - RNA, 19 nt, Artificial Sequence
  Description of Artificial Sequence: Synthetic oligonucleotide
gguaaagugacacguuuug

SEQ ID NO: 2548195 - RNA, 19 nt, Artificial Sequence
  Description of Artificial Sequence: Synthetic oligonucleotide
auagccuuuaaagucaaaa

SEQ ID NO: 2548196 - RNA, 19 nt, Artificial Sequence
  Description of Artificial Sequence: Synthetic oligonucleotide
agucaucgcuuugaugucc

SEQ ID NO: 2548197 - RNA, 19 nt, Artificial Sequence
  Description of Artificial Sequence: Synthetic oligonucleotide
aagauggugcucauauuug

SEQ ID NO: 2548198 - RNA, 19 nt, Artificial Sequence
  Description of Artificial Sequence: Synthetic oligonucleotide
cauuugcagguaaagugac

SEQ ID NO: 2548199 - RNA, 19 nt, Artificial Sequence
  Description of Artificial Sequence: Synthetic oligonucleotide
accaauuugauaucacauu

SEQ ID NO: 2548200 - RNA, 19 nt, Artificial Sequence
  Description of Artificial Sequence: Synthetic oligonucleotide
uuuggguucuauaguaguu

SEQ ID NO: 2548201 - RNA, 19 nt, Artificial Sequence
  Description of Artificial Sequence: Synthetic oligonucleotide
agcucuaucaggugucaug

SEQ ID NO: 2548202 - RNA, 19 nt, Artificial Sequence
  Description of Artificial Sequence: Synthetic oligonucleotide
uugcagguaaagugacacg

SEQ ID NO: 2548203 - RNA, 19 nt, Artificial Sequence
  Description of Artificial Sequence: Synthetic oligonucleotide
acuugugucuccugcucuc

SEQ ID NO: 2548204 - RNA, 19 nt, Artificial Sequence
  Description of Artificial Sequence: Synthetic oligonucleotide
cauuuucagauucuaagaa

SEQ ID NO: 2548205 - RNA, 19 nt, Artificial Sequence
  Description of Artificial Sequence: Synthetic oligonucleotide
agauggugcucauauuuga

SEQ ID NO: 2548206 - RNA, 19 nt, Artificial Sequence
  Description of Artificial Sequence: Synthetic oligonucleotide
aauuuucuuccaagguaag

SEQ ID NO: 2548207 - RNA, 19 nt, Artificial Sequence
  Description of Artificial Sequence: Synthetic oligonucleotide
acagcuugcucauauguua

SEQ ID NO: 2548208 - RNA, 19 nt, Artificial Sequence
  Description of Artificial Sequence: Synthetic oligonucleotide
uuaauuugcuucacaccua

SEQ ID NO: 2548209 - RNA, 19 nt, Artificial Sequence
  Description of Artificial Sequence: Synthetic oligonucleotide
uucuguuaguggcucuuca

SEQ ID NO: 2548210 - RNA, 19 nt, Artificial Sequence
  Description of Artificial Sequence: Synthetic oligonucleotide
gauguccaaugucugcagc

SEQ ID NO: 2548211 - RNA, 19 nt, Artificial Sequence
  Description of Artificial Sequence: Synthetic oligonucleotide
ugauguccaaugucugcag

SEQ ID NO: 2548212 - RNA, 19 nt, Artificial Sequence
  Description of Artificial Sequence: Synthetic oligonucleotide
aaaucuuccccagcgugca

SEQ ID NO: 2548213 - RNA, 19 nt, Artificial Sequence
  Description of Artificial Sequence: Synthetic oligonucleotide
cacuugaugugucaguguc

SEQ ID NO: 2548214 - RNA, 19 nt, Artificial Sequence
  Description of Artificial Sequence: Synthetic oligonucleotide
aagucacuucugauugagc

SEQ ID NO: 2548215 - RNA, 19 nt, Artificial Sequence
  Description of Artificial Sequence: Synthetic oligonucleotide
uuucugagcuuauuaugaa

SEQ ID NO: 2548216 - RNA, 19 nt, Artificial Sequence
  Description of Artificial Sequence: Synthetic oligonucleotide
aaagaacguacuguguuuu

SEQ ID NO: 2548217 - RNA, 19 nt, Artificial Sequence
  Description of Artificial Sequence: Synthetic oligonucleotide
caauuugauaucacauuca

SEQ ID NO: 2548218 - RNA, 19 nt, Artificial Sequence
  Description of Artificial Sequence: Synthetic oligonucleotide
ccaauuugauaucacauuc

SEQ ID NO: 2548219 - RNA, 19 nt, Artificial Sequence
  Description of Artificial Sequence: Synthetic oligonucleotide
ucaaagucuuccuuuucua

SEQ ID NO: 2548220 - RNA, 19 nt, Artificial Sequence
  Description of Artificial Sequence: Synthetic oligonucleotide
agucaacagaagucacuuc

SEQ ID NO: 2548221 - RNA, 19 nt, Artificial Sequence
  Description of Artificial Sequence: Synthetic oligonucleotide
auggugcucauauuugagu

SEQ ID NO: 2548222 - RNA, 19 nt, Artificial Sequence
  Description of Artificial Sequence: Synthetic oligonucleotide
aauggaaacacagcuccuu

SEQ ID NO: 2548223 - RNA, 19 nt, Artificial Sequence
  Description of Artificial Sequence: Synthetic oligonucleotide
gucagugucaacauuugca

SEQ ID NO: 2548224 - RNA, 19 nt, Artificial Sequence
  Description of Artificial Sequence: Synthetic oligonucleotide
ugacacguuuugucguagg

SEQ ID NO: 2548225 - RNA, 19 nt, Artificial Sequence
  Description of Artificial Sequence: Synthetic oligonucleotide
uuccccagcgugcauuugc

SEQ ID NO: 2548226 - RNA, 19 nt, Artificial Sequence
  Description of Artificial Sequence: Synthetic oligonucleotide
uggugcucauauuugaguu

SEQ ID NO: 2548227 - RNA, 19 nt, Artificial Sequence
  Description of Artificial Sequence: Synthetic oligonucleotide
auguccaaugucugcagcu

SEQ ID NO: 2548228 - RNA, 19 nt, Artificial Sequence
  Description of Artificial Sequence: Synthetic oligonucleotide
cagugucaacauuugcagg

SEQ ID NO: 2548229 - RNA, 19 nt, Artificial Sequence
  Description of Artificial Sequence: Synthetic oligonucleotide
ucuaggguuucuagcauuu

SEQ ID NO: 2548230 - RNA, 19 nt, Artificial Sequence
  Description of Artificial Sequence: Synthetic oligonucleotide
agaaagaggaccaccuuca

SEQ ID NO: 2548231 - RNA, 19 nt, Artificial Sequence
  Description of Artificial Sequence: Synthetic oligonucleotide
uucuauagaggagucacuu

SEQ ID NO: 2548232 - RNA, 19 nt, Artificial Sequence
  Description of Artificial Sequence: Synthetic oligonucleotide
uucaagcauuccuuaagau

SEQ ID NO: 2548233 - RNA, 19 nt, Artificial Sequence
  Description of Artificial Sequence: Synthetic oligonucleotide
ugagcuuauuaugaagcaa

SEQ ID NO: 2548234 - RNA, 19 nt, Artificial Sequence
  Description of Artificial Sequence: Synthetic oligonucleotide
cuuaagauggugcucauau

SEQ ID NO: 2548235 - RNA, 19 nt, Artificial Sequence
  Description of Artificial Sequence: Synthetic oligonucleotide
ucacauucagacucaggau

SEQ ID NO: 2548236 - RNA, 19 nt, Artificial Sequence
  Description of Artificial Sequence: Synthetic oligonucleotide
uugccucaucuucuguuag

SEQ ID NO: 2548237 - RNA, 19 nt, Artificial Sequence
  Description of Artificial Sequence: Synthetic oligonucleotide
uaucaggugucaugcaguc

SEQ ID NO: 2548238 - RNA, 19 nt, Artificial Sequence
  Description of Artificial Sequence: Synthetic oligonucleotide
uacuugugucuccugcucu

SEQ ID NO: 2548239 - RNA, 19 nt, Artificial Sequence
  Description of Artificial Sequence: Synthetic oligonucleotide
ucuguuaguggcucuucaa

SEQ ID NO: 2548240 - RNA, 19 nt, Artificial Sequence
  Description of Artificial Sequence: Synthetic oligonucleotide
uccaagguaaggguuuucu

SEQ ID NO: 2548241 - RNA, 19 nt, Artificial Sequence
  Description of Artificial Sequence: Synthetic oligonucleotide
ucagaugagucaucgcuuu

SEQ ID NO: 2548242 - RNA, 19 nt, Artificial Sequence
  Description of Artificial Sequence: Synthetic oligonucleotide
gguucuauagaggagucac

SEQ ID NO: 2548243 - RNA, 19 nt, Artificial Sequence
  Description of Artificial Sequence: Synthetic oligonucleotide
uccucuuggucuuaauuuu

SEQ ID NO: 2548244 - RNA, 19 nt, Artificial Sequence
  Description of Artificial Sequence: Synthetic oligonucleotide
ggugucaugcagucaacag

SEQ ID NO: 2548245 - RNA, 19 nt, Artificial Sequence
  Description of Artificial Sequence: Synthetic oligonucleotide
cuucaagcauuccuuaaga

SEQ ID NO: 2548246 - RNA, 19 nt, Artificial Sequence
  Description of Artificial Sequence: Synthetic oligonucleotide
auuccuuaagauggugcuc

SEQ ID NO: 2548247 - RNA, 19 nt, Artificial Sequence
  Description of Artificial Sequence: Synthetic oligonucleotide
aucugugaccuucuagggu

SEQ ID NO: 2548248 - RNA, 19 nt, Artificial Sequence
  Description of Artificial Sequence: Synthetic oligonucleotide
ugcagucaacagaagucac

SEQ ID NO: 2548249 - RNA, 19 nt, Artificial Sequence
  Description of Artificial Sequence: Synthetic oligonucleotide
gauaucacauucagacuca

SEQ ID NO: 2548250 - RNA, 19 nt, Artificial Sequence
  Description of Artificial Sequence: Synthetic oligonucleotide
auaggagaaagaggaccac

SEQ ID NO: 2548251 - RNA, 19 nt, Artificial Sequence
  Description of Artificial Sequence: Synthetic oligonucleotide
augcagucaacagaaguca

SEQ ID NO: 2548252 - RNA, 19 nt, Artificial Sequence
  Description of Artificial Sequence: Synthetic oligonucleotide
gugucaugcagucaacaga

SEQ ID NO: 2548253 - RNA, 19 nt, Artificial Sequence
  Description of Artificial Sequence: Synthetic oligonucleotide
ucacaccuaucugugaccu

SEQ ID NO: 2548254 - RNA, 19 nt, Artificial Sequence
  Description of Artificial Sequence: Synthetic oligonucleotide
uugguucuauagaggaguc

SEQ ID NO: 2548255 - RNA, 19 nt, Artificial Sequence
  Description of Artificial Sequence: Synthetic oligonucleotide
ucgcuuugauguccaaugu

SEQ ID NO: 2548256 - RNA, 19 nt, Artificial Sequence
  Description of Artificial Sequence: Synthetic oligonucleotide
ugcagcucuaucagguguc

SEQ ID NO: 2548257 - RNA, 19 nt, Artificial Sequence
  Description of Artificial Sequence: Synthetic oligonucleotide
gaacguacuguguuuuaaa

SEQ ID NO: 2548258 - RNA, 19 nt, Artificial Sequence
  Description of Artificial Sequence: Synthetic oligonucleotide
acguacuguguuuuaaaua

SEQ ID NO: 2548259 - RNA, 19 nt, Artificial Sequence
  Description of Artificial Sequence: Synthetic oligonucleotide
cauauguuaaaauuuucuu

SEQ ID NO: 2548260 - RNA, 19 nt, Artificial Sequence
  Description of Artificial Sequence: Synthetic oligonucleotide
agaugagucaucgcuuuga

SEQ ID NO: 2548261 - RNA, 19 nt, Artificial Sequence
  Description of Artificial Sequence: Synthetic oligonucleotide
gguuuucuuccauuuucag

SEQ ID NO: 2548262 - RNA, 19 nt, Artificial Sequence
  Description of Artificial Sequence: Synthetic oligonucleotide
augagucaucgcuuugaug

SEQ ID NO: 2548263 - RNA, 19 nt, Artificial Sequence
  Description of Artificial Sequence: Synthetic oligonucleotide
ucacuugaugugucagugu

SEQ ID NO: 2548264 - RNA, 19 nt, Artificial Sequence
  Description of Artificial Sequence: Synthetic oligonucleotide
aggagaaagaggaccaccu

SEQ ID NO: 2548265 - RNA, 19 nt, Artificial Sequence
  Description of Artificial Sequence: Synthetic oligonucleotide
cuuggucuuaauuuuggcu

SEQ ID NO: 2548266 - RNA, 19 nt, Artificial Sequence
  Description of Artificial Sequence: Synthetic oligonucleotide
cugagcuuauuaugaagca

SEQ ID NO: 2548267 - RNA, 19 nt, Artificial Sequence
  Description of Artificial Sequence: Synthetic oligonucleotide
aagaacguacuguguuuua

SEQ ID NO: 2548268 - RNA, 19 nt, Artificial Sequence
  Description of Artificial Sequence: Synthetic oligonucleotide
auuugauaucacauucaga

SEQ ID NO: 2548269 - RNA, 19 nt, Artificial Sequence
  Description of Artificial Sequence: Synthetic oligonucleotide
aaauagccuuuaaagucaa

SEQ ID NO: 2548270 - RNA, 19 nt, Artificial Sequence
  Description of Artificial Sequence: Synthetic oligonucleotide
uuggguucuauaguaguuu

SEQ ID NO: 2548271 - RNA, 19 nt, Artificial Sequence
  Description of Artificial Sequence: Synthetic oligonucleotide
uggguucuauaguaguuuu

SEQ ID NO: 2548272 - RNA, 19 nt, Artificial Sequence
  Description of Artificial Sequence: Synthetic oligonucleotide
cuucugauugagccauuac

SEQ ID NO: 2548273 - RNA, 19 nt, Artificial Sequence
  Description of Artificial Sequence: Synthetic oligonucleotide
gucacuucugauugagcca

SEQ ID NO: 2548274 - RNA, 19 nt, Artificial Sequence
  Description of Artificial Sequence: Synthetic oligonucleotide
uuaagauggugcucauauu

SEQ ID NO: 2548275 - RNA, 19 nt, Artificial Sequence
  Description of Artificial Sequence: Synthetic oligonucleotide
cucuucaauaggagaaaga

SEQ ID NO: 2548276 - RNA, 19 nt, Artificial Sequence
  Description of Artificial Sequence: Synthetic oligonucleotide
uucuaggguuucuagcauu

SEQ ID NO: 2548277 - RNA, 19 nt, Artificial Sequence
  Description of Artificial Sequence: Synthetic oligonucleotide
aguggcucuucaauaggag

SEQ ID NO: 2548278 - RNA, 19 nt, Artificial Sequence
  Description of Artificial Sequence: Synthetic oligonucleotide
cguacuguguuuuaaauaa

SEQ ID NO: 2548279 - RNA, 19 nt, Artificial Sequence
  Description of Artificial Sequence: Synthetic oligonucleotide
guggcucuucaauaggaga

SEQ ID NO: 2548280 - RNA, 19 nt, Artificial Sequence
  Description of Artificial Sequence: Synthetic oligonucleotide
cuuugcuuucguguaggug

SEQ ID NO: 2548281 - RNA, 19 nt, Artificial Sequence
  Description of Artificial Sequence: Synthetic oligonucleotide
cuuucguguaggugaaaga

SEQ ID NO: 2548282 - RNA, 19 nt, Artificial Sequence
  Description of Artificial Sequence: Synthetic oligonucleotide
uugcuuucguguaggugaa

SEQ ID NO: 2548283 - RNA, 19 nt, Artificial Sequence
  Description of Artificial Sequence: Synthetic oligonucleotide
ugucuccugcucucaaagu

SEQ ID NO: 2548284 - RNA, 19 nt, Artificial Sequence
  Description of Artificial Sequence: Synthetic oligonucleotide
cuugguucuauagaggagu

SEQ ID NO: 2548285 - RNA, 19 nt, Artificial Sequence
  Description of Artificial Sequence: Synthetic oligonucleotide
gcucuaucaggugucaugc

SEQ ID NO: 2548286 - RNA, 19 nt, Artificial Sequence
  Description of Artificial Sequence: Synthetic oligonucleotide
cauuccuuaagauggugcu

SEQ ID NO: 2548287 - RNA, 19 nt, Artificial Sequence
  Description of Artificial Sequence: Synthetic oligonucleotide
ucuuugcuuucguguaggu

SEQ ID NO: 2548288 - RNA, 19 nt, Artificial Sequence
  Description of Artificial Sequence: Synthetic oligonucleotide
acacguuuugucguagggu

SEQ ID NO: 2548289 - RNA, 19 nt, Artificial Sequence
  Description of Artificial Sequence: Synthetic oligonucleotide
auggaaacacagcuccuuu

SEQ ID NO: 2548290 - RNA, 19 nt, Artificial Sequence
  Description of Artificial Sequence: Synthetic oligonucleotide
uguccaaugucugcagcuc

SEQ ID NO: 2548291 - RNA, 19 nt, Artificial Sequence
  Description of Artificial Sequence: Synthetic oligonucleotide
agaacguacuguguuuuaa

SEQ ID NO: 2548292 - RNA, 19 nt, Artificial Sequence
  Description of Artificial Sequence: Synthetic oligonucleotide
ugugucuccugcucucaaa

SEQ ID NO: 2548293 - RNA, 19 nt, Artificial Sequence
  Description of Artificial Sequence: Synthetic oligonucleotide
cuugaugugucagugucaa

SEQ ID NO: 2548294 - RNA, 19 nt, Artificial Sequence
  Description of Artificial Sequence: Synthetic oligonucleotide
agcaagugucuucaaccaa

SEQ ID NO: 2548295 - RNA, 19 nt, Artificial Sequence
  Description of Artificial Sequence: Synthetic oligonucleotide
gcuuauuaugaagcaagug

SEQ ID NO: 2548296 - RNA, 19 nt, Artificial Sequence
  Description of Artificial Sequence: Synthetic oligonucleotide
gaaagaacguacuguguuu

SEQ ID NO: 2548297 - RNA, 19 nt, Artificial Sequence
  Description of Artificial Sequence: Synthetic oligonucleotide
agcuuauuaugaagcaagu

SEQ ID NO: 2548298 - RNA, 19 nt, Artificial Sequence
  Description of Artificial Sequence: Synthetic oligonucleotide
agugacacguuuugucgua

SEQ ID NO: 2548299 - RNA, 19 nt, Artificial Sequence
  Description of Artificial Sequence: Synthetic oligonucleotide
guacuugugucuccugcuc

SEQ ID NO: 2548300 - RNA, 19 nt, Artificial Sequence
  Description of Artificial Sequence: Synthetic oligonucleotide
gcuuucguguaggugaaag

SEQ ID NO: 2548301 - RNA, 19 nt, Artificial Sequence
  Description of Artificial Sequence: Synthetic oligonucleotide
gucuucaaccaauuugaua

SEQ ID NO: 2548302 - RNA, 19 nt, Artificial Sequence
  Description of Artificial Sequence: Synthetic oligonucleotide
agccuugguucuauagagg

SEQ ID NO: 2548303 - RNA, 19 nt, Artificial Sequence
  Description of Artificial Sequence: Synthetic oligonucleotide
auucagacucaggauuugu

SEQ ID NO: 2548304 - RNA, 19 nt, Artificial Sequence
  Description of Artificial Sequence: Synthetic oligonucleotide
ugguucuauagaggaguca

SEQ ID NO: 2548305 - RNA, 19 nt, Artificial Sequence
  Description of Artificial Sequence: Synthetic oligonucleotide
ccuucuaggguuucuagca

SEQ ID NO: 2548306 - RNA, 19 nt, Artificial Sequence
  Description of Artificial Sequence: Synthetic oligonucleotide
gccuugguucuauagagga

SEQ ID NO: 2548307 - RNA, 19 nt, Artificial Sequence
  Description of Artificial Sequence: Synthetic oligonucleotide
cuuuaaagucaaaagccuu

SEQ ID NO: 2548308 - RNA, 19 nt, Artificial Sequence
  Description of Artificial Sequence: Synthetic oligonucleotide
gagucaucgcuuugauguc

SEQ ID NO: 2548309 - RNA, 19 nt, Artificial Sequence
  Description of Artificial Sequence: Synthetic oligonucleotide
uccccagcgugcauuugcu

SEQ ID NO: 2548310 - RNA, 19 nt, Artificial Sequence
  Description of Artificial Sequence: Synthetic oligonucleotide
cuugcucauauguuaaaau

SEQ ID NO: 2548311 - RNA, 19 nt, Artificial Sequence
  Description of Artificial Sequence: Synthetic oligonucleotide
ccuaucugugaccuucuag

SEQ ID NO: 2548312 - RNA, 19 nt, Artificial Sequence
  Description of Artificial Sequence: Synthetic oligonucleotide
agcauuccuuaagauggug

SEQ ID NO: 2548313 - RNA, 19 nt, Artificial Sequence
  Description of Artificial Sequence: Synthetic oligonucleotide
guaggguuucuuugcuuuc

SEQ ID NO: 2548314 - RNA, 19 nt, Artificial Sequence
  Description of Artificial Sequence: Synthetic oligonucleotide
gcauuccuuaagauggugc

SEQ ID NO: 2548315 - RNA, 19 nt, Artificial Sequence
  Description of Artificial Sequence: Synthetic oligonucleotide
acauucagacucaggauuu

SEQ ID NO: 2548316 - RNA, 19 nt, Artificial Sequence
  Description of Artificial Sequence: Synthetic oligonucleotide
ucuucuguuaguggcucuu

SEQ ID NO: 2548317 - RNA, 19 nt, Artificial Sequence
  Description of Artificial Sequence: Synthetic oligonucleotide
guugccucaucuucuguua

SEQ ID NO: 2548318 - RNA, 19 nt, Artificial Sequence
  Description of Artificial Sequence: Synthetic oligonucleotide
uugugucuccugcucucaa

SEQ ID NO: 2548319 - RNA, 19 nt, Artificial Sequence
  Description of Artificial Sequence: Synthetic oligonucleotide
cuaucaggugucaugcagu

SEQ ID NO: 2548320 - RNA, 19 nt, Artificial Sequence
  Description of Artificial Sequence: Synthetic oligonucleotide
aucagaugagucaucgcuu

SEQ ID NO: 2548321 - RNA, 19 nt, Artificial Sequence
  Description of Artificial Sequence: Synthetic oligonucleotide
cacauucagacucaggauu

SEQ ID NO: 2548322 - RNA, 19 nt, Artificial Sequence
  Description of Artificial Sequence: Synthetic oligonucleotide
acuugaugugucaguguca

SEQ ID NO: 2548323 - RNA, 19 nt, Artificial Sequence
  Description of Artificial Sequence: Synthetic oligonucleotide
auuugcagguaaagugaca

SEQ ID NO: 2548324 - RNA, 19 nt, Artificial Sequence
  Description of Artificial Sequence: Synthetic oligonucleotide
guaggugaaagaacguacu

SEQ ID NO: 2548325 - RNA, 19 nt, Artificial Sequence
  Description of Artificial Sequence: Synthetic oligonucleotide
ugaccuucuaggguuucua

SEQ ID NO: 2548326 - RNA, 19 nt, Artificial Sequence
  Description of Artificial Sequence: Synthetic oligonucleotide
agcuugcucauauguuaaa

SEQ ID NO: 2548327 - RNA, 19 nt, Artificial Sequence
  Description of Artificial Sequence: Synthetic oligonucleotide
aggugucaugcagucaaca

SEQ ID NO: 2548328 - RNA, 19 nt, Artificial Sequence
  Description of Artificial Sequence: Synthetic oligonucleotide
ccucaucuucuguuagugg

SEQ ID NO: 2548329 - RNA, 19 nt, Artificial Sequence
  Description of Artificial Sequence: Synthetic oligonucleotide
cagaugagucaucgcuuug

SEQ ID NO: 2548330 - RNA, 19 nt, Artificial Sequence
  Description of Artificial Sequence: Synthetic oligonucleotide
gaugagucaucgcuuugau

SEQ ID NO: 2548331 - RNA, 19 nt, Artificial Sequence
  Description of Artificial Sequence: Synthetic oligonucleotide
ucuuccccagcgugcauuu

SEQ ID NO: 2548332 - RNA, 19 nt, Artificial Sequence
  Description of Artificial Sequence: Synthetic oligonucleotide
caggauuuguugccucauc

SEQ ID NO: 2548333 - RNA, 19 nt, Artificial Sequence
  Description of Artificial Sequence: Synthetic oligonucleotide
uugaugugucagugucaac

SEQ ID NO: 2548334 - RNA, 19 nt, Artificial Sequence
  Description of Artificial Sequence: Synthetic oligonucleotide
ccuugguucuauagaggag

SEQ ID NO: 2548335 - RNA, 19 nt, Artificial Sequence
  Description of Artificial Sequence: Synthetic oligonucleotide
gugacacguuuugucguag

SEQ ID NO: 2548336 - RNA, 19 nt, Artificial Sequence
  Description of Artificial Sequence: Synthetic oligonucleotide
cacguuuugucguaggguu

SEQ ID NO: 2548337 - RNA, 19 nt, Artificial Sequence
  Description of Artificial Sequence: Synthetic oligonucleotide
ccucuuggucuuaauuuug

SEQ ID NO: 2548338 - RNA, 19 nt, Artificial Sequence
  Description of Artificial Sequence: Synthetic oligonucleotide
ucguaggguuucuuugcuu

SEQ ID NO: 2548339 - RNA, 19 nt, Artificial Sequence
  Description of Artificial Sequence: Synthetic oligonucleotide
aauagccuuuaaagucaaa

SEQ ID NO: 2548340 - RNA, 19 nt, Artificial Sequence
  Description of Artificial Sequence: Synthetic oligonucleotide
acuucugauugagccauua

SEQ ID NO: 2548341 - RNA, 19 nt, Artificial Sequence
  Description of Artificial Sequence: Synthetic oligonucleotide
gguucuauaguaguuuuau

SEQ ID NO: 2548342 - RNA, 19 nt, Artificial Sequence
  Description of Artificial Sequence: Synthetic oligonucleotide
augugucagugucaacauu

SEQ ID NO: 2548343 - RNA, 19 nt, Artificial Sequence
  Description of Artificial Sequence: Synthetic oligonucleotide
ccuuuaaagucaaaagccu

SEQ ID NO: 2548344 - RNA, 19 nt, Artificial Sequence
  Description of Artificial Sequence: Synthetic oligonucleotide
cgugcauuugcuucaagca

SEQ ID NO: 2548345 - RNA, 19 nt, Artificial Sequence
  Description of Artificial Sequence: Synthetic oligonucleotide
gucaacauuugcagguaaa

SEQ ID NO: 2548346 - RNA, 19 nt, Artificial Sequence
  Description of Artificial Sequence: Synthetic oligonucleotide
uccuuaagauggugcucau

SEQ ID NO: 2548347 - RNA, 19 nt, Artificial Sequence
  Description of Artificial Sequence: Synthetic oligonucleotide
ggguuucuuugcuuucgug

SEQ ID NO: 2548348 - RNA, 19 nt, Artificial Sequence
  Description of Artificial Sequence: Synthetic oligonucleotide
guaaagugacacguuuugu

SEQ ID NO: 2548349 - RNA, 19 nt, Artificial Sequence
  Description of Artificial Sequence: Synthetic oligonucleotide
cuucuguuaguggcucuuc

SEQ ID NO: 2548350 - RNA, 19 nt, Artificial Sequence
  Description of Artificial Sequence: Synthetic oligonucleotide
augaagcaagugucuucaa

SEQ ID NO: 2548351 - RNA, 19 nt, Artificial Sequence
  Description of Artificial Sequence: Synthetic oligonucleotide
gucaugcagucaacagaag

SEQ ID NO: 2548352 - RNA, 19 nt, Artificial Sequence
  Description of Artificial Sequence: Synthetic oligonucleotide
cccagcgugcauuugcuuc

SEQ ID NO: 2548353 - RNA, 19 nt, Artificial Sequence
  Description of Artificial Sequence: Synthetic oligonucleotide
caggugucaugcagucaac

SEQ ID NO: 2548354 - RNA, 19 nt, Artificial Sequence
  Description of Artificial Sequence: Synthetic oligonucleotide
uccugcucucaaagucuuc

SEQ ID NO: 2548355 - RNA, 19 nt, Artificial Sequence
  Description of Artificial Sequence: Synthetic oligonucleotide
agaggaccaccuucaucau

SEQ ID NO: 2548356 - RNA, 19 nt, Artificial Sequence
  Description of Artificial Sequence: Synthetic oligonucleotide
cucuaucaggugucaugca

SEQ ID NO: 2548357 - RNA, 19 nt, Artificial Sequence
  Description of Artificial Sequence: Synthetic oligonucleotide
cuguuaguggcucuucaau

SEQ ID NO: 2548358 - RNA, 19 nt, Artificial Sequence
  Description of Artificial Sequence: Synthetic oligonucleotide
ucaucgcuuugauguccaa

SEQ ID NO: 2548359 - RNA, 19 nt, Artificial Sequence
  Description of Artificial Sequence: Synthetic oligonucleotide
gaauggaaacacagcuccu

SEQ ID NO: 2548360 - RNA, 19 nt, Artificial Sequence
  Description of Artificial Sequence: Synthetic oligonucleotide
gaaagaggaccaccuucau

SEQ ID NO: 2548361 - RNA, 19 nt, Artificial Sequence
  Description of Artificial Sequence: Synthetic oligonucleotide
gucguaggguuucuuugcu

SEQ ID NO: 2548362 - RNA, 19 nt, Artificial Sequence
  Description of Artificial Sequence: Synthetic oligonucleotide
gugaaagaacguacugugu

SEQ ID NO: 2548363 - RNA, 19 nt, Artificial Sequence
  Description of Artificial Sequence: Synthetic oligonucleotide
gacucaggauuuguugccu

SEQ ID NO: 2548364 - RNA, 19 nt, Artificial Sequence
  Description of Artificial Sequence: Synthetic oligonucleotide
cuuccucuuggucuuaauu

SEQ ID NO: 2548365 - RNA, 19 nt, Artificial Sequence
  Description of Artificial Sequence: Synthetic oligonucleotide
aucuuccccagcgugcauu

SEQ ID NO: 2548366 - RNA, 19 nt, Artificial Sequence
  Description of Artificial Sequence: Synthetic oligonucleotide
gcuugcucauauguuaaaa

SEQ ID NO: 2548367 - RNA, 19 nt, Artificial Sequence
  Description of Artificial Sequence: Synthetic oligonucleotide
cucuugcaacagcuugcuc

SEQ ID NO: 2548368 - RNA, 19 nt, Artificial Sequence
  Description of Artificial Sequence: Synthetic oligonucleotide
cuugugucuccugcucuca

SEQ ID NO: 2548369 - RNA, 19 nt, Artificial Sequence
  Description of Artificial Sequence: Synthetic oligonucleotide
caauguacuugugucuccu

SEQ ID NO: 2548370 - RNA, 19 nt, Artificial Sequence
  Description of Artificial Sequence: Synthetic oligonucleotide
accuaucugugaccuucua

SEQ ID NO: 2548371 - RNA, 19 nt, Artificial Sequence
  Description of Artificial Sequence: Synthetic oligonucleotide
cagucaacagaagucacuu

SEQ ID NO: 2548372 - RNA, 19 nt, Artificial Sequence
  Description of Artificial Sequence: Synthetic oligonucleotide
gcuucacaccuaucuguga

SEQ ID NO: 2548373 - RNA, 19 nt, Artificial Sequence
  Description of Artificial Sequence: Synthetic oligonucleotide
ccagcgugcauuugcuuca

SEQ ID NO: 2548374 - RNA, 19 nt, Artificial Sequence
  Description of Artificial Sequence: Synthetic oligonucleotide
gucaaaagccuugguucua

SEQ ID NO: 2548375 - RNA, 19 nt, Artificial Sequence
  Description of Artificial Sequence: Synthetic oligonucleotide
acguuuugucguaggguuu

SEQ ID NO: 2548376 - RNA, 19 nt, Artificial Sequence
  Description of Artificial Sequence: Synthetic oligonucleotide
gcaagugucuucaaccaau

SEQ ID NO: 2548377 - RNA, 19 nt, Artificial Sequence
  Description of Artificial Sequence: Synthetic oligonucleotide
gcucucaaagucuuccuuu

SEQ ID NO: 2548378 - RNA, 19 nt, Artificial Sequence
  Description of Artificial Sequence: Synthetic oligonucleotide
ggauuuguugccucaucuu

SEQ ID NO: 2548379 - RNA, 19 nt, Artificial Sequence
  Description of Artificial Sequence: Synthetic oligonucleotide
ugcuuucguguaggugaaa

SEQ ID NO: 2548380 - RNA, 19 nt, Artificial Sequence
  Description of Artificial Sequence: Synthetic oligonucleotide
gucuuaauuuuggcuugua

SEQ ID NO: 2548381 - RNA, 19 nt, Artificial Sequence
  Description of Artificial Sequence: Synthetic oligonucleotide
ggugcucauauuugaguuu

SEQ ID NO: 2548382 - RNA, 19 nt, Artificial Sequence
  Description of Artificial Sequence: Synthetic oligonucleotide
cuuccccagcgugcauuug

SEQ ID NO: 2548383 - RNA, 19 nt, Artificial Sequence
  Description of Artificial Sequence: Synthetic oligonucleotide
ccagguggucuuccucuug

SEQ ID NO: 2548384 - RNA, 19 nt, Artificial Sequence
  Description of Artificial Sequence: Synthetic oligonucleotide
ggguucuauaguaguuuua

SEQ ID NO: 2548385 - RNA, 19 nt, Artificial Sequence
  Description of Artificial Sequence: Synthetic oligonucleotide
caucgcuuugauguccaau

SEQ ID NO: 2548386 - RNA, 19 nt, Artificial Sequence
  Description of Artificial Sequence: Synthetic oligonucleotide
gcagcucuaucagguguca

SEQ ID NO: 2548387 - RNA, 19 nt, Artificial Sequence
  Description of Artificial Sequence: Synthetic oligonucleotide
cuuccaagguaaggguuuu

SEQ ID NO: 2548388 - RNA, 19 nt, Artificial Sequence
  Description of Artificial Sequence: Synthetic oligonucleotide
cguaggguuucuuugcuuu

SEQ ID NO: 2548389 - RNA, 19 nt, Artificial Sequence
  Description of Artificial Sequence: Synthetic oligonucleotide
ggaccaccuucaucaucaa

SEQ ID NO: 2548390 - RNA, 19 nt, Artificial Sequence
  Description of Artificial Sequence: Synthetic oligonucleotide
ccaagguaaggguuuucuu

SEQ ID NO: 2548391 - RNA, 19 nt, Artificial Sequence
  Description of Artificial Sequence: Synthetic oligonucleotide
cuaggguuucuagcauuuu

SEQ ID NO: 2548392 - RNA, 19 nt, Artificial Sequence
  Description of Artificial Sequence: Synthetic oligonucleotide
cguguaggugaaagaacgu

SEQ ID NO: 2548393 - RNA, 19 nt, Artificial Sequence
  Description of Artificial Sequence: Synthetic oligonucleotide
cagcgugcauuugcuucaa

SEQ ID NO: 2548394 - RNA, 19 nt, Artificial Sequence
  Description of Artificial Sequence: Synthetic oligonucleotide
ccuuaagauggugcucaua

SEQ ID NO: 2548395 - RNA, 19 nt, Artificial Sequence
  Description of Artificial Sequence: Synthetic oligonucleotide
cagcucuaucaggugucau

SEQ ID NO: 2548396 - RNA, 19 nt, Artificial Sequence
  Description of Artificial Sequence: Synthetic oligonucleotide
ccccagcgugcauuugcuu

SEQ ID NO: 2548397 - RNA, 19 nt, Artificial Sequence
  Description of Artificial Sequence: Synthetic oligonucleotide
ucaacaaucauauaaaacu

SEQ ID NO: 2548398 - RNA, 19 nt, Artificial Sequence
  Description of Artificial Sequence: Synthetic oligonucleotide
aaauguugaagcuuucacc

SEQ ID NO: 2548399 - RNA, 19 nt, Artificial Sequence
  Description of Artificial Sequence: Synthetic oligonucleotide
aaauuaaagguguaucaac

SEQ ID NO: 2548400 - RNA, 19 nt, Artificial Sequence
  Description of Artificial Sequence: Synthetic oligonucleotide
uuuaauugauacucaaucg

SEQ ID NO: 2548401 - RNA, 19 nt, Artificial Sequence
  Description of Artificial Sequence: Synthetic oligonucleotide
aauguugaagcuuucacca

SEQ ID NO: 2548402 - RNA, 19 nt, Artificial Sequence
  Description of Artificial Sequence: Synthetic oligonucleotide
uuuuaauugauacucaauc

SEQ ID NO: 2548403 - RNA, 19 nt, Artificial Sequence
  Description of Artificial Sequence: Synthetic oligonucleotide
aaggguuuaaacaagauug

SEQ ID NO: 2548404 - RNA, 19 nt, Artificial Sequence
  Description of Artificial Sequence: Synthetic oligonucleotide
aacuuucagacccacgugc

SEQ ID NO: 2548405 - RNA, 19 nt, Artificial Sequence
  Description of Artificial Sequence: Synthetic oligonucleotide
uggcaauucacacaaaagg

SEQ ID NO: 2548406 - RNA, 19 nt, Artificial Sequence
  Description of Artificial Sequence: Synthetic oligonucleotide
uuaauugauacucaaucgc

SEQ ID NO: 2548407 - RNA, 19 nt, Artificial Sequence
  Description of Artificial Sequence: Synthetic oligonucleotide
uuaugauacagacuuauca

SEQ ID NO: 2548408 - RNA, 19 nt, Artificial Sequence
  Description of Artificial Sequence: Synthetic oligonucleotide
uugaauaacuucuucauca

SEQ ID NO: 2548409 - RNA, 19 nt, Artificial Sequence
  Description of Artificial Sequence: Synthetic oligonucleotide
acauuauaaacucugagca

SEQ ID NO: 2548410 - RNA, 19 nt, Artificial Sequence
  Description of Artificial Sequence: Synthetic oligonucleotide
uguuuuaucuuguucacag

SEQ ID NO: 2548411 - RNA, 19 nt, Artificial Sequence
  Description of Artificial Sequence: Synthetic oligonucleotide
aagauugggacucuuagca

SEQ ID NO: 2548412 - RNA, 19 nt, Artificial Sequence
  Description of Artificial Sequence: Synthetic oligonucleotide
aaucacaugauuucuucag

SEQ ID NO: 2548413 - RNA, 19 nt, Artificial Sequence
  Description of Artificial Sequence: Synthetic oligonucleotide
guuuaaacaagauugggac

SEQ ID NO: 2548414 - RNA, 19 nt, Artificial Sequence
  Description of Artificial Sequence: Synthetic oligonucleotide
agguuucaaauguugaagc

SEQ ID NO: 2548415 - RNA, 19 nt, Artificial Sequence
  Description of Artificial Sequence: Synthetic oligonucleotide
ucuuguucacagcugaggg

SEQ ID NO: 2548416 - RNA, 19 nt, Artificial Sequence
  Description of Artificial Sequence: Synthetic oligonucleotide
uguuucaaaguucuaaaac

SEQ ID NO: 2548417 - RNA, 19 nt, Artificial Sequence
  Description of Artificial Sequence: Synthetic oligonucleotide
ucauauaaaacuacaacua

SEQ ID NO: 2548418 - RNA, 19 nt, Artificial Sequence
  Description of Artificial Sequence: Synthetic oligonucleotide
uuaaagguguaucaacaag

SEQ ID NO: 2548419 - RNA, 19 nt, Artificial Sequence
  Description of Artificial Sequence: Synthetic oligonucleotide
ucgaugaacacucugacuc

SEQ ID NO: 2548420 - RNA, 19 nt, Artificial Sequence
  Description of Artificial Sequence: Synthetic oligonucleotide
auacucaaucgcuacauac

SEQ ID NO: 2548421 - RNA, 19 nt, Artificial Sequence
  Description of Artificial Sequence: Synthetic oligonucleotide
uaaagguguaucaacaagu

SEQ ID NO: 2548422 - RNA, 19 nt, Artificial Sequence
  Description of Artificial Sequence: Synthetic oligonucleotide
aaacucacuggauaguuug

SEQ ID NO: 2548423 - RNA, 19 nt, Artificial Sequence
  Description of Artificial Sequence: Synthetic oligonucleotide
aaaacaaacucacuggaua

SEQ ID NO: 2548424 - RNA, 19 nt, Artificial Sequence
  Description of Artificial Sequence: Synthetic oligonucleotide
uuaucaacaaucauauaaa

SEQ ID NO: 2548425 - RNA, 19 nt, Artificial Sequence
  Description of Artificial Sequence: Synthetic oligonucleotide
auugauacucaaucgcuac

SEQ ID NO: 2548426 - RNA, 19 nt, Artificial Sequence
  Description of Artificial Sequence: Synthetic oligonucleotide
uugucuuccacauagucca

SEQ ID NO: 2548427 - RNA, 19 nt, Artificial Sequence
  Description of Artificial Sequence: Synthetic oligonucleotide
cuuaucaacaaucauauaa

SEQ ID NO: 2548428 - RNA, 19 nt, Artificial Sequence
  Description of Artificial Sequence: Synthetic oligonucleotide
aacaaucauauaaaacuac

SEQ ID NO: 2548429 - RNA, 19 nt, Artificial Sequence
  Description of Artificial Sequence: Synthetic oligonucleotide
uuugucuuccacauagucc

SEQ ID NO: 2548430 - RNA, 19 nt, Artificial Sequence
  Description of Artificial Sequence: Synthetic oligonucleotide
auggccacacauuauaaac

SEQ ID NO: 2548431 - RNA, 19 nt, Artificial Sequence
  Description of Artificial Sequence: Synthetic oligonucleotide
aagauggcaauucacacaa

SEQ ID NO: 2548432 - RNA, 19 nt, Artificial Sequence
  Description of Artificial Sequence: Synthetic oligonucleotide
uacaacuacuguuucaaag

SEQ ID NO: 2548433 - RNA, 19 nt, Artificial Sequence
  Description of Artificial Sequence: Synthetic oligonucleotide
ugaaaacaaacucacugga

SEQ ID NO: 2548434 - RNA, 19 nt, Artificial Sequence
  Description of Artificial Sequence: Synthetic oligonucleotide
uuuucgaugaacacucuga

SEQ ID NO: 2548435 - RNA, 19 nt, Artificial Sequence
  Description of Artificial Sequence: Synthetic oligonucleotide
ucugacuccaucuugaaua

SEQ ID NO: 2548436 - RNA, 19 nt, Artificial Sequence
  Description of Artificial Sequence: Synthetic oligonucleotide
ucaacaagucuacuuauga

SEQ ID NO: 2548437 - RNA, 19 nt, Artificial Sequence
  Description of Artificial Sequence: Synthetic oligonucleotide
acaagauggcaauucacac

SEQ ID NO: 2548438 - RNA, 19 nt, Artificial Sequence
  Description of Artificial Sequence: Synthetic oligonucleotide
aacaagucuacuuaugaua

SEQ ID NO: 2548439 - RNA, 19 nt, Artificial Sequence
  Description of Artificial Sequence: Synthetic oligonucleotide
aauuaaagguguaucaaca

SEQ ID NO: 2548440 - RNA, 19 nt, Artificial Sequence
  Description of Artificial Sequence: Synthetic oligonucleotide
cuuuguauacuccagggug

SEQ ID NO: 2548441 - RNA, 19 nt, Artificial Sequence
  Description of Artificial Sequence: Synthetic oligonucleotide
uuucaaaguucuaaaacaa

SEQ ID NO: 2548442 - RNA, 19 nt, Artificial Sequence
  Description of Artificial Sequence: Synthetic oligonucleotide
uucuuuucgaugaacacuc

SEQ ID NO: 2548443 - RNA, 19 nt, Artificial Sequence
  Description of Artificial Sequence: Synthetic oligonucleotide
uaauugauacucaaucgcu

SEQ ID NO: 2548444 - RNA, 19 nt, Artificial Sequence
  Description of Artificial Sequence: Synthetic oligonucleotide
cacaccaacuuucagaccc

SEQ ID NO: 2548445 - RNA, 19 nt, Artificial Sequence
  Description of Artificial Sequence: Synthetic oligonucleotide
aagucuacuuaugauacag

SEQ ID NO: 2548446 - RNA, 19 nt, Artificial Sequence
  Description of Artificial Sequence: Synthetic oligonucleotide
uaugauacagacuuaucaa

SEQ ID NO: 2548447 - RNA, 19 nt, Artificial Sequence
  Description of Artificial Sequence: Synthetic oligonucleotide
uguaagagaggccauuaca

SEQ ID NO: 2548448 - RNA, 19 nt, Artificial Sequence
  Description of Artificial Sequence: Synthetic oligonucleotide
uaaaacuacaacuacuguu

SEQ ID NO: 2548449 - RNA, 19 nt, Artificial Sequence
  Description of Artificial Sequence: Synthetic oligonucleotide
ugucuuuguauacuccagg

SEQ ID NO: 2548450 - RNA, 19 nt, Artificial Sequence
  Description of Artificial Sequence: Synthetic oligonucleotide
acacaaaaggguuuaaaca

SEQ ID NO: 2548451 - RNA, 19 nt, Artificial Sequence
  Description of Artificial Sequence: Synthetic oligonucleotide
ucuucaguaagcucccagg

SEQ ID NO: 2548452 - RNA, 19 nt, Artificial Sequence
  Description of Artificial Sequence: Synthetic oligonucleotide
acauaguccauuucuguuc

SEQ ID NO: 2548453 - RNA, 19 nt, Artificial Sequence
  Description of Artificial Sequence: Synthetic oligonucleotide
caugauuucuucaguaagc

SEQ ID NO: 2548454 - RNA, 19 nt, Artificial Sequence
  Description of Artificial Sequence: Synthetic oligonucleotide
acaagucuacuuaugauac

SEQ ID NO: 2548455 - RNA, 19 nt, Artificial Sequence
  Description of Artificial Sequence: Synthetic oligonucleotide
acaaucacaugauuucuuc

SEQ ID NO: 2548456 - RNA, 19 nt, Artificial Sequence
  Description of Artificial Sequence: Synthetic oligonucleotide
uuaaacaagauugggacuc

SEQ ID NO: 2548457 - RNA, 19 nt, Artificial Sequence
  Description of Artificial Sequence: Synthetic oligonucleotide
ucaaucgcuacauacaaua

SEQ ID NO: 2548458 - RNA, 19 nt, Artificial Sequence
  Description of Artificial Sequence: Synthetic oligonucleotide
acaacuacuguuucaaagu

SEQ ID NO: 2548459 - RNA, 19 nt, Artificial Sequence
  Description of Artificial Sequence: Synthetic oligonucleotide
aaaggguuuaaacaagauu

SEQ ID NO: 2548460 - RNA, 19 nt, Artificial Sequence
  Description of Artificial Sequence: Synthetic oligonucleotide
aaagguguaucaacaaguc

SEQ ID NO: 2548461 - RNA, 19 nt, Artificial Sequence
  Description of Artificial Sequence: Synthetic oligonucleotide
auuuccaaaaugcaucacu

SEQ ID NO: 2548462 - RNA, 19 nt, Artificial Sequence
  Description of Artificial Sequence: Synthetic oligonucleotide
aaacuacaacuacuguuuc

SEQ ID NO: 2548463 - RNA, 19 nt, Artificial Sequence
  Description of Artificial Sequence: Synthetic oligonucleotide
uuccuaaaaguguuaacug

SEQ ID NO: 2548464 - RNA, 19 nt, Artificial Sequence
  Description of Artificial Sequence: Synthetic oligonucleotide
ugaauaacuucuucaucag

SEQ ID NO: 2548465 - RNA, 19 nt, Artificial Sequence
  Description of Artificial Sequence: Synthetic oligonucleotide
aaaguguuaacugugcuuu

SEQ ID NO: 2548466 - RNA, 19 nt, Artificial Sequence
  Description of Artificial Sequence: Synthetic oligonucleotide
ucuacuuaugauacagacu

SEQ ID NO: 2548467 - RNA, 19 nt, Artificial Sequence
  Description of Artificial Sequence: Synthetic oligonucleotide
uuucuguuccuaaaagugu

SEQ ID NO: 2548468 - RNA, 19 nt, Artificial Sequence
  Description of Artificial Sequence: Synthetic oligonucleotide
uuugauguugggguuauug

SEQ ID NO: 2548469 - RNA, 19 nt, Artificial Sequence
  Description of Artificial Sequence: Synthetic oligonucleotide
aaacaagauggcaauucac

SEQ ID NO: 2548470 - RNA, 19 nt, Artificial Sequence
  Description of Artificial Sequence: Synthetic oligonucleotide
aaguucuaaaacaaaacaa

SEQ ID NO: 2548471 - RNA, 19 nt, Artificial Sequence
  Description of Artificial Sequence: Synthetic oligonucleotide
uccaaaaugcaucacuuua

SEQ ID NO: 2548472 - RNA, 19 nt, Artificial Sequence
  Description of Artificial Sequence: Synthetic oligonucleotide
uuuguauacuccagggugu

SEQ ID NO: 2548473 - RNA, 19 nt, Artificial Sequence
  Description of Artificial Sequence: Synthetic oligonucleotide
uaaacucugagcacgugac

SEQ ID NO: 2548474 - RNA, 19 nt, Artificial Sequence
  Description of Artificial Sequence: Synthetic oligonucleotide
ugauuuccaaaaugcauca

SEQ ID NO: 2548475 - RNA, 19 nt, Artificial Sequence
  Description of Artificial Sequence: Synthetic oligonucleotide
uuuaaacaagauugggacu

SEQ ID NO: 2548476 - RNA, 19 nt, Artificial Sequence
  Description of Artificial Sequence: Synthetic oligonucleotide
uguugaagcuuucaccaca

SEQ ID NO: 2548477 - RNA, 19 nt, Artificial Sequence
  Description of Artificial Sequence: Synthetic oligonucleotide
aacaagauggcaauucaca

SEQ ID NO: 2548478 - RNA, 19 nt, Artificial Sequence
  Description of Artificial Sequence: Synthetic oligonucleotide
uccuaaaaguguuaacugu

SEQ ID NO: 2548479 - RNA, 19 nt, Artificial Sequence
  Description of Artificial Sequence: Synthetic oligonucleotide
uacucaaucgcuacauaca

SEQ ID NO: 2548480 - RNA, 19 nt, Artificial Sequence
  Description of Artificial Sequence: Synthetic oligonucleotide
ucagaaucuccuuuugucu

SEQ ID NO: 2548481 - RNA, 19 nt, Artificial Sequence
  Description of Artificial Sequence: Synthetic oligonucleotide
uuuugucuuuguauacucc

SEQ ID NO: 2548482 - RNA, 19 nt, Artificial Sequence
  Description of Artificial Sequence: Synthetic oligonucleotide
uguaucaacaagucuacuu

SEQ ID NO: 2548483 - RNA, 19 nt, Artificial Sequence
  Description of Artificial Sequence: Synthetic oligonucleotide
aucgcuacauacaauauug

SEQ ID NO: 2548484 - RNA, 19 nt, Artificial Sequence
  Description of Artificial Sequence: Synthetic oligonucleotide
uuucuuuucgaugaacacu

SEQ ID NO: 2548485 - RNA, 19 nt, Artificial Sequence
  Description of Artificial Sequence: Synthetic oligonucleotide
gucuacuuaugauacagac

SEQ ID NO: 2548486 - RNA, 19 nt, Artificial Sequence
  Description of Artificial Sequence: Synthetic oligonucleotide
uuuccaaaaugcaucacuu

SEQ ID NO: 2548487 - RNA, 19 nt, Artificial Sequence
  Description of Artificial Sequence: Synthetic oligonucleotide
auaaacucugagcacguga

SEQ ID NO: 2548488 - RNA, 19 nt, Artificial Sequence
  Description of Artificial Sequence: Synthetic oligonucleotide
aaucgcuacauacaauauu

SEQ ID NO: 2548489 - RNA, 19 nt, Artificial Sequence
  Description of Artificial Sequence: Synthetic oligonucleotide
uaucaacaaucauauaaaa

SEQ ID NO: 2548490 - RNA, 19 nt, Artificial Sequence
  Description of Artificial Sequence: Synthetic oligonucleotide
accaacgacgccgacaugg

SEQ ID NO: 2548491 - RNA, 19 nt, Artificial Sequence
  Description of Artificial Sequence: Synthetic oligonucleotide
cacaaaaggguuuaaacaa

SEQ ID NO: 2548492 - RNA, 19 nt, Artificial Sequence
  Description of Artificial Sequence: Synthetic oligonucleotide
acuggauaguuugucuucc

SEQ ID NO: 2548493 - RNA, 19 nt, Artificial Sequence
  Description of Artificial Sequence: Synthetic oligonucleotide
aagguguaucaacaagucu

SEQ ID NO: 2548494 - RNA, 19 nt, Artificial Sequence
  Description of Artificial Sequence: Synthetic oligonucleotide
aacuacaacuacuguuuca

SEQ ID NO: 2548495 - RNA, 19 nt, Artificial Sequence
  Description of Artificial Sequence: Synthetic oligonucleotide
cauuacagccccugguucg

SEQ ID NO: 2548496 - RNA, 19 nt, Artificial Sequence
  Description of Artificial Sequence: Synthetic oligonucleotide
ggcaauucacacaaaaggg

SEQ ID NO: 2548497 - RNA, 19 nt, Artificial Sequence
  Description of Artificial Sequence: Synthetic oligonucleotide
uccacauaguccauuucug

SEQ ID NO: 2548498 - RNA, 19 nt, Artificial Sequence
  Description of Artificial Sequence: Synthetic oligonucleotide
ucuuuguauacuccagggu

SEQ ID NO: 2548499 - RNA, 19 nt, Artificial Sequence
  Description of Artificial Sequence: Synthetic oligonucleotide
aacuacuguuucaaaguuc

SEQ ID NO: 2548500 - RNA, 19 nt, Artificial Sequence
  Description of Artificial Sequence: Synthetic oligonucleotide
acuacuguuucaaaguucu

SEQ ID NO: 2548501 - RNA, 19 nt, Artificial Sequence
  Description of Artificial Sequence: Synthetic oligonucleotide
uucuucaguaagcucccag

SEQ ID NO: 2548502 - RNA, 19 nt, Artificial Sequence
  Description of Artificial Sequence: Synthetic oligonucleotide
uuauaaacucugagcacgu

SEQ ID NO: 2548503 - RNA, 19 nt, Artificial Sequence
  Description of Artificial Sequence: Synthetic oligonucleotide
acuguuucaaaguucuaaa

SEQ ID NO: 2548504 - RNA, 19 nt, Artificial Sequence
  Description of Artificial Sequence: Synthetic oligonucleotide
gugacaaucacaugauuuc

SEQ ID NO: 2548505 - RNA, 19 nt, Artificial Sequence
  Description of Artificial Sequence: Synthetic oligonucleotide
ugcaucacuuuauuuuccc

SEQ ID NO: 2548506 - RNA, 19 nt, Artificial Sequence
  Description of Artificial Sequence: Synthetic oligonucleotide
cuuucuuuucgaugaacac

SEQ ID NO: 2548507 - RNA, 19 nt, Artificial Sequence
  Description of Artificial Sequence: Synthetic oligonucleotide
uccauuucuguuccuaaaa

SEQ ID NO: 2548508 - RNA, 19 nt, Artificial Sequence
  Description of Artificial Sequence: Synthetic oligonucleotide
ugauguugggguuauugaa

SEQ ID NO: 2548509 - RNA, 19 nt, Artificial Sequence
  Description of Artificial Sequence: Synthetic oligonucleotide
uggcuugauuuccaaaaug

SEQ ID NO: 2548510 - RNA, 19 nt, Artificial Sequence
  Description of Artificial Sequence: Synthetic oligonucleotide
cuuguucacagcugagggg

SEQ ID NO: 2548511 - RNA, 19 nt, Artificial Sequence
  Description of Artificial Sequence: Synthetic oligonucleotide
auugcacaaauuaaaggug

SEQ ID NO: 2548512 - RNA, 19 nt, Artificial Sequence
  Description of Artificial Sequence: Synthetic oligonucleotide
aaguguuaacugugcuuuc

SEQ ID NO: 2548513 - RNA, 19 nt, Artificial Sequence
  Description of Artificial Sequence: Synthetic oligonucleotide
cuuccucuugcucacggcg

SEQ ID NO: 2548514 - RNA, 19 nt, Artificial Sequence
  Description of Artificial Sequence: Synthetic oligonucleotide
uccaggguguaagagaggc

SEQ ID NO: 2548515 - RNA, 19 nt, Artificial Sequence
  Description of Artificial Sequence: Synthetic oligonucleotide
agagaggccauuacagccc

SEQ ID NO: 2548516 - RNA, 19 nt, Artificial Sequence
  Description of Artificial Sequence: Synthetic oligonucleotide
acaaucauauaaaacuaca

SEQ ID NO: 2548517 - RNA, 19 nt, Artificial Sequence
  Description of Artificial Sequence: Synthetic oligonucleotide
caagauugggacucuuagc

SEQ ID NO: 2548518 - RNA, 19 nt, Artificial Sequence
  Description of Artificial Sequence: Synthetic oligonucleotide
uugggguuauugaaaacaa

SEQ ID NO: 2548519 - RNA, 19 nt, Artificial Sequence
  Description of Artificial Sequence: Synthetic oligonucleotide
uugauacucaaucgcuaca

SEQ ID NO: 2548520 - RNA, 19 nt, Artificial Sequence
  Description of Artificial Sequence: Synthetic oligonucleotide
cuacuuaugauacagacuu

SEQ ID NO: 2548521 - RNA, 19 nt, Artificial Sequence
  Description of Artificial Sequence: Synthetic oligonucleotide
caaaacaagauggcaauuc

SEQ ID NO: 2548522 - RNA, 19 nt, Artificial Sequence
  Description of Artificial Sequence: Synthetic oligonucleotide
uucuguuccuaaaaguguu

SEQ ID NO: 2548523 - RNA, 19 nt, Artificial Sequence
  Description of Artificial Sequence: Synthetic oligonucleotide
ucgcacaccaacuuucaga

SEQ ID NO: 2548524 - RNA, 19 nt, Artificial Sequence
  Description of Artificial Sequence: Synthetic oligonucleotide
ucaaauguugaagcuuuca

SEQ ID NO: 2548525 - RNA, 19 nt, Artificial Sequence
  Description of Artificial Sequence: Synthetic oligonucleotide
auguugaagcuuucaccac

SEQ ID NO: 2548526 - RNA, 19 nt, Artificial Sequence
  Description of Artificial Sequence: Synthetic oligonucleotide
aacugugcuuucuuuucga

SEQ ID NO: 2548527 - RNA, 19 nt, Artificial Sequence
  Description of Artificial Sequence: Synthetic oligonucleotide
guaucaacaagucuacuua

SEQ ID NO: 2548528 - RNA, 19 nt, Artificial Sequence
  Description of Artificial Sequence: Synthetic oligonucleotide
gauaguuugucuuccacau

SEQ ID NO: 2548529 - RNA, 19 nt, Artificial Sequence
  Description of Artificial Sequence: Synthetic oligonucleotide
acucaaucgcuacauacaa

SEQ ID NO: 2548530 - RNA, 19 nt, Artificial Sequence
  Description of Artificial Sequence: Synthetic oligonucleotide
caccacagccacaaguucc

SEQ ID NO: 2548531 - RNA, 19 nt, Artificial Sequence
  Description of Artificial Sequence: Synthetic oligonucleotide
ucacaugauuucuucagua

SEQ ID NO: 2548532 - RNA, 19 nt, Artificial Sequence
  Description of Artificial Sequence: Synthetic oligonucleotide
uaucaacaagucuacuuau

SEQ ID NO: 2548533 - RNA, 19 nt, Artificial Sequence
  Description of Artificial Sequence: Synthetic oligonucleotide
agacuuaucaacaaucaua

SEQ ID NO: 2548534 - RNA, 19 nt, Artificial Sequence
  Description of Artificial Sequence: Synthetic oligonucleotide
acaaaaggguuuaaacaag

SEQ ID NO: 2548535 - RNA, 19 nt, Artificial Sequence
  Description of Artificial Sequence: Synthetic oligonucleotide
uauacuccaggguguaaga

SEQ ID NO: 2548536 - RNA, 19 nt, Artificial Sequence
  Description of Artificial Sequence: Synthetic oligonucleotide
ugggacucuuagcauacug

SEQ ID NO: 2548537 - RNA, 19 nt, Artificial Sequence
  Description of Artificial Sequence: Synthetic oligonucleotide
agcauacuggcuugauuuc

SEQ ID NO: 2548538 - RNA, 19 nt, Artificial Sequence
  Description of Artificial Sequence: Synthetic oligonucleotide
acuacaacuacuguuucaa

SEQ ID NO: 2548539 - RNA, 19 nt, Artificial Sequence
  Description of Artificial Sequence: Synthetic oligonucleotide
uacuccaggguguaagaga

SEQ ID NO: 2548540 - RNA, 19 nt, Artificial Sequence
  Description of Artificial Sequence: Synthetic oligonucleotide
aggguuuaaacaagauugg

SEQ ID NO: 2548541 - RNA, 19 nt, Artificial Sequence
  Description of Artificial Sequence: Synthetic oligonucleotide
uggauaguuugucuuccac

SEQ ID NO: 2548542 - RNA, 19 nt, Artificial Sequence
  Description of Artificial Sequence: Synthetic oligonucleotide
guauacuccaggguguaag

SEQ ID NO: 2548543 - RNA, 19 nt, Artificial Sequence
  Description of Artificial Sequence: Synthetic oligonucleotide
uguuccuaaaaguguuaac

SEQ ID NO: 2548544 - RNA, 19 nt, Artificial Sequence
  Description of Artificial Sequence: Synthetic oligonucleotide
agguguaucaacaagucua

SEQ ID NO: 2548545 - RNA, 19 nt, Artificial Sequence
  Description of Artificial Sequence: Synthetic oligonucleotide
uccucuugcucacggcgcg

SEQ ID NO: 2548546 - RNA, 19 nt, Artificial Sequence
  Description of Artificial Sequence: Synthetic oligonucleotide
caaaaggguuuaaacaaga

SEQ ID NO: 2548547 - RNA, 19 nt, Artificial Sequence
  Description of Artificial Sequence: Synthetic oligonucleotide
aacacucugacuccaucuu

SEQ ID NO: 2548548 - RNA, 19 nt, Artificial Sequence
  Description of Artificial Sequence: Synthetic oligonucleotide
aucacaugauuucuucagu

SEQ ID NO: 2548549 - RNA, 19 nt, Artificial Sequence
  Description of Artificial Sequence: Synthetic oligonucleotide
cuuaugauacagacuuauc

SEQ ID NO: 2548550 - RNA, 19 nt, Artificial Sequence
  Description of Artificial Sequence: Synthetic oligonucleotide
ucgcuacauacaauauugc

SEQ ID NO: 2548551 - RNA, 19 nt, Artificial Sequence
  Description of Artificial Sequence: Synthetic oligonucleotide
ucugagcacgugacaauca

SEQ ID NO: 2548552 - RNA, 19 nt, Artificial Sequence
  Description of Artificial Sequence: Synthetic oligonucleotide
ugacaaucacaugauuucu

SEQ ID NO: 2548553 - RNA, 19 nt, Artificial Sequence
  Description of Artificial Sequence: Synthetic oligonucleotide
acuccaggguguaagagag

SEQ ID NO: 2548554 - RNA, 19 nt, Artificial Sequence
  Description of Artificial Sequence: Synthetic oligonucleotide
cuuuucgaugaacacucug

SEQ ID NO: 2548555 - RNA, 19 nt, Artificial Sequence
  Description of Artificial Sequence: Synthetic oligonucleotide
gcuacauacaauauugcac

SEQ ID NO: 2548556 - RNA, 19 nt, Artificial Sequence
  Description of Artificial Sequence: Synthetic oligonucleotide
ggcuugauuuccaaaaugc

SEQ ID NO: 2548557 - RNA, 19 nt, Artificial Sequence
  Description of Artificial Sequence: Synthetic oligonucleotide
aauugauacucaaucgcua

SEQ ID NO: 2548558 - RNA, 19 nt, Artificial Sequence
  Description of Artificial Sequence: Synthetic oligonucleotide
gggguuauugaaaacaaac

SEQ ID NO: 2548559 - RNA, 19 nt, Artificial Sequence
  Description of Artificial Sequence: Synthetic oligonucleotide
auuacagccccugguucgc

SEQ ID NO: 2548560 - RNA, 19 nt, Artificial Sequence
  Description of Artificial Sequence: Synthetic oligonucleotide
uugcucacggcgcgcaccg

SEQ ID NO: 2548561 - RNA, 19 nt, Artificial Sequence
  Description of Artificial Sequence: Synthetic oligonucleotide
ugauacucaaucgcuacau

SEQ ID NO: 2548562 - RNA, 19 nt, Artificial Sequence
  Description of Artificial Sequence: Synthetic oligonucleotide
gacuuaucaacaaucauau

SEQ ID NO: 2548563 - RNA, 19 nt, Artificial Sequence
  Description of Artificial Sequence: Synthetic oligonucleotide
aacaaacucacuggauagu

SEQ ID NO: 2548564 - RNA, 19 nt, Artificial Sequence
  Description of Artificial Sequence: Synthetic oligonucleotide
uucgaugaacacucugacu

SEQ ID NO: 2548565 - RNA, 19 nt, Artificial Sequence
  Description of Artificial Sequence: Synthetic oligonucleotide
guuccuaaaaguguuaacu

SEQ ID NO: 2548566 - RNA, 19 nt, Artificial Sequence
  Description of Artificial Sequence: Synthetic oligonucleotide
gauugggacucuuagcaua

SEQ ID NO: 2548567 - RNA, 19 nt, Artificial Sequence
  Description of Artificial Sequence: Synthetic oligonucleotide
aacgacgccgacauggcca

SEQ ID NO: 2548568 - RNA, 19 nt, Artificial Sequence
  Description of Artificial Sequence: Synthetic oligonucleotide
aaaaggguuuaaacaagau

SEQ ID NO: 2548569 - RNA, 19 nt, Artificial Sequence
  Description of Artificial Sequence: Synthetic oligonucleotide
ggacucuuagcauacuggc

SEQ ID NO: 2548570 - RNA, 19 nt, Artificial Sequence
  Description of Artificial Sequence: Synthetic oligonucleotide
ugagcacgugacaaucaca

SEQ ID NO: 2548571 - RNA, 19 nt, Artificial Sequence
  Description of Artificial Sequence: Synthetic oligonucleotide
ugagaagcuguuuuaucuu

SEQ ID NO: 2548572 - RNA, 19 nt, Artificial Sequence
  Description of Artificial Sequence: Synthetic oligonucleotide
auggcaauucacacaaaag

SEQ ID NO: 2548573 - RNA, 19 nt, Artificial Sequence
  Description of Artificial Sequence: Synthetic oligonucleotide
uccuccugagguuucaaau

SEQ ID NO: 2548574 - RNA, 19 nt, Artificial Sequence
  Description of Artificial Sequence: Synthetic oligonucleotide
auacagacuuaucaacaau

SEQ ID NO: 2548575 - RNA, 19 nt, Artificial Sequence
  Description of Artificial Sequence: Synthetic oligonucleotide
uugucuuugagaagcuguu

SEQ ID NO: 2548576 - RNA, 19 nt, Artificial Sequence
  Description of Artificial Sequence: Synthetic oligonucleotide
uuccucuugcucacggcgc

SEQ ID NO: 2548577 - RNA, 19 nt, Artificial Sequence
  Description of Artificial Sequence: Synthetic oligonucleotide
ugauuucuucaguaagcuc

SEQ ID NO: 2548578 - RNA, 19 nt, Artificial Sequence
  Description of Artificial Sequence: Synthetic oligonucleotide
caagauggcaauucacaca

SEQ ID NO: 2548579 - RNA, 19 nt, Artificial Sequence
  Description of Artificial Sequence: Synthetic oligonucleotide
aucccggcucuccuggagc

SEQ ID NO: 2548580 - RNA, 19 nt, Artificial Sequence
  Description of Artificial Sequence: Synthetic oligonucleotide
uuagcauacuggcuugauu

SEQ ID NO: 2548581 - RNA, 19 nt, Artificial Sequence
  Description of Artificial Sequence: Synthetic oligonucleotide
aaguuccuuugauguuggg

SEQ ID NO: 2548582 - RNA, 19 nt, Artificial Sequence
  Description of Artificial Sequence: Synthetic oligonucleotide
acucacuggauaguuuguc

SEQ ID NO: 2548583 - RNA, 19 nt, Artificial Sequence
  Description of Artificial Sequence: Synthetic oligonucleotide
uacauacaauauugcacaa

SEQ ID NO: 2548584 - RNA, 19 nt, Artificial Sequence
  Description of Artificial Sequence: Synthetic oligonucleotide
uguuaacugugcuuucuuu

SEQ ID NO: 2548585 - RNA, 19 nt, Artificial Sequence
  Description of Artificial Sequence: Synthetic oligonucleotide
ucacuggauaguuugucuu

SEQ ID NO: 2548586 - RNA, 19 nt, Artificial Sequence
  Description of Artificial Sequence: Synthetic oligonucleotide
uucgcacaccaacuuucag

SEQ ID NO: 2548587 - RNA, 19 nt, Artificial Sequence
  Description of Artificial Sequence: Synthetic oligonucleotide
gguuuaaacaagauuggga

SEQ ID NO: 2548588 - RNA, 19 nt, Artificial Sequence
  Description of Artificial Sequence: Synthetic oligonucleotide
gauguugggguuauugaaa

SEQ ID NO: 2548589 - RNA, 19 nt, Artificial Sequence
  Description of Artificial Sequence: Synthetic oligonucleotide
caucuugaauaacuucuuc

SEQ ID NO: 2548590 - RNA, 19 nt, Artificial Sequence
  Description of Artificial Sequence: Synthetic oligonucleotide
ugggguuauugaaaacaaa

SEQ ID NO: 2548591 - RNA, 19 nt, Artificial Sequence
  Description of Artificial Sequence: Synthetic oligonucleotide
cugugcuuucuuuucgaug

SEQ ID NO: 2548592 - RNA, 19 nt, Artificial Sequence
  Description of Artificial Sequence: Synthetic oligonucleotide
ucuguuccuaaaaguguua

SEQ ID NO: 2548593 - RNA, 19 nt, Artificial Sequence
  Description of Artificial Sequence: Synthetic oligonucleotide
gauggccacacauuauaaa

SEQ ID NO: 2548594 - RNA, 19 nt, Artificial Sequence
  Description of Artificial Sequence: Synthetic oligonucleotide
caaauuaaagguguaucaa

SEQ ID NO: 2548595 - RNA, 19 nt, Artificial Sequence
  Description of Artificial Sequence: Synthetic oligonucleotide
acacucugacuccaucuug

SEQ ID NO: 2548596 - RNA, 19 nt, Artificial Sequence
  Description of Artificial Sequence: Synthetic oligonucleotide
aguguuaacugugcuuucu

SEQ ID NO: 2548597 - RNA, 19 nt, Artificial Sequence
  Description of Artificial Sequence: Synthetic oligonucleotide
ggguuuaaacaagauuggg

SEQ ID NO: 2548598 - RNA, 19 nt, Artificial Sequence
  Description of Artificial Sequence: Synthetic oligonucleotide
auggccacgucgcggcgcc

SEQ ID NO: 2548599 - RNA, 19 nt, Artificial Sequence
  Description of Artificial Sequence: Synthetic oligonucleotide
cucuuagcauacuggcuug

SEQ ID NO: 2548600 - RNA, 19 nt, Artificial Sequence
  Description of Artificial Sequence: Synthetic oligonucleotide
acgacgccgacauggccac

SEQ ID NO: 2548601 - RNA, 19 nt, Artificial Sequence
  Description of Artificial Sequence: Synthetic oligonucleotide
uauaaacucugagcacgug

SEQ ID NO: 2548602 - RNA, 19 nt, Artificial Sequence
  Description of Artificial Sequence: Synthetic oligonucleotide
cugagcacgugacaaucac

SEQ ID NO: 2548603 - RNA, 19 nt, Artificial Sequence
  Description of Artificial Sequence: Synthetic oligonucleotide
cacuggauaguuugucuuc

SEQ ID NO: 2548604 - RNA, 19 nt, Artificial Sequence
  Description of Artificial Sequence: Synthetic oligonucleotide
cuugucuuugagaagcugu

SEQ ID NO: 2548605 - RNA, 19 nt, Artificial Sequence
  Description of Artificial Sequence: Synthetic oligonucleotide
ucacacaaaaggguuuaaa

SEQ ID NO: 2548606 - RNA, 19 nt, Artificial Sequence
  Description of Artificial Sequence: Synthetic oligonucleotide
aucaacaagucuacuuaug

SEQ ID NO: 2548607 - RNA, 19 nt, Artificial Sequence
  Description of Artificial Sequence: Synthetic oligonucleotide
agguagaucccggcucucc

SEQ ID NO: 2548608 - RNA, 19 nt, Artificial Sequence
  Description of Artificial Sequence: Synthetic oligonucleotide
gaacacucugacuccaucu

SEQ ID NO: 2548609 - RNA, 19 nt, Artificial Sequence
  Description of Artificial Sequence: Synthetic oligonucleotide
ggauaguuugucuuccaca

SEQ ID NO: 2548610 - RNA, 19 nt, Artificial Sequence
  Description of Artificial Sequence: Synthetic oligonucleotide
aguccauuucuguuccuaa

SEQ ID NO: 2548611 - RNA, 19 nt, Artificial Sequence
  Description of Artificial Sequence: Synthetic oligonucleotide
ucuuuucgaugaacacucu

SEQ ID NO: 2548612 - RNA, 19 nt, Artificial Sequence
  Description of Artificial Sequence: Synthetic oligonucleotide
auacuccaggguguaagag

SEQ ID NO: 2548613 - RNA, 19 nt, Artificial Sequence
  Description of Artificial Sequence: Synthetic oligonucleotide
cuuggaguccuccugaggu

SEQ ID NO: 2548614 - RNA, 19 nt, Artificial Sequence
  Description of Artificial Sequence: Synthetic oligonucleotide
caacuuucagacccacgug

SEQ ID NO: 2548615 - RNA, 19 nt, Artificial Sequence
  Description of Artificial Sequence: Synthetic oligonucleotide
gaugaacacucugacucca

SEQ ID NO: 2548616 - RNA, 19 nt, Artificial Sequence
  Description of Artificial Sequence: Synthetic oligonucleotide
cauacuggcuugauuucca

SEQ ID NO: 2548617 - RNA, 19 nt, Artificial Sequence
  Description of Artificial Sequence: Synthetic oligonucleotide
agauugggacucuuagcau

SEQ ID NO: 2548618 - RNA, 19 nt, Artificial Sequence
  Description of Artificial Sequence: Synthetic oligonucleotide
caggguguaagagaggcca

SEQ ID NO: 2548619 - RNA, 19 nt, Artificial Sequence
  Description of Artificial Sequence: Synthetic oligonucleotide
acaaacucacuggauaguu

SEQ ID NO: 2548620 - RNA, 19 nt, Artificial Sequence
  Description of Artificial Sequence: Synthetic oligonucleotide
cacaugauuucuucaguaa

SEQ ID NO: 2548621 - RNA, 19 nt, Artificial Sequence
  Description of Artificial Sequence: Synthetic oligonucleotide
ccauuucuguuccuaaaag

SEQ ID NO: 2548622 - RNA, 19 nt, Artificial Sequence
  Description of Artificial Sequence: Synthetic oligonucleotide
cuccuuuugucuuuguaua

SEQ ID NO: 2548623 - RNA, 19 nt, Artificial Sequence
  Description of Artificial Sequence: Synthetic oligonucleotide
ggccacacauuauaaacuc

SEQ ID NO: 2548624 - RNA, 19 nt, Artificial Sequence
  Description of Artificial Sequence: Synthetic oligonucleotide
uucagacccacgugcucug

SEQ ID NO: 2548625 - RNA, 19 nt, Artificial Sequence
  Description of Artificial Sequence: Synthetic oligonucleotide
auucacacaaaaggguuua

SEQ ID NO: 2548626 - RNA, 19 nt, Artificial Sequence
  Description of Artificial Sequence: Synthetic oligonucleotide
gauuuccaaaaugcaucac

SEQ ID NO: 2548627 - RNA, 19 nt, Artificial Sequence
  Description of Artificial Sequence: Synthetic oligonucleotide
uacuuaugauacagacuua

SEQ ID NO: 2548628 - RNA, 19 nt, Artificial Sequence
  Description of Artificial Sequence: Synthetic oligonucleotide
cacucugacuccaucuuga

SEQ ID NO: 2548629 - RNA, 19 nt, Artificial Sequence
  Description of Artificial Sequence: Synthetic oligonucleotide
ucccagguagaucccggcu

SEQ ID NO: 2548630 - RNA, 19 nt, Artificial Sequence
  Description of Artificial Sequence: Synthetic oligonucleotide
guguaagagaggccauuac

SEQ ID NO: 2548631 - RNA, 19 nt, Artificial Sequence
  Description of Artificial Sequence: Synthetic oligonucleotide
acauacaauauugcacaaa

SEQ ID NO: 2548632 - RNA, 19 nt, Artificial Sequence
  Description of Artificial Sequence: Synthetic oligonucleotide
aacaagauugggacucuua

SEQ ID NO: 2548633 - RNA, 19 nt, Artificial Sequence
  Description of Artificial Sequence: Synthetic oligonucleotide
gaucccggcucuccuggag

SEQ ID NO: 2548634 - RNA, 19 nt, Artificial Sequence
  Description of Artificial Sequence: Synthetic oligonucleotide
gaggccauuacagccccug

SEQ ID NO: 2548635 - RNA, 19 nt, Artificial Sequence
  Description of Artificial Sequence: Synthetic oligonucleotide
aacucacuggauaguuugu

SEQ ID NO: 2548636 - RNA, 19 nt, Artificial Sequence
  Description of Artificial Sequence: Synthetic oligonucleotide
agcuuggaguccuccugag

SEQ ID NO: 2548637 - RNA, 19 nt, Artificial Sequence
  Description of Artificial Sequence: Synthetic oligonucleotide
cucacggcgcgcaccgugg

SEQ ID NO: 2548638 - RNA, 19 nt, Artificial Sequence
  Description of Artificial Sequence: Synthetic oligonucleotide
aggccauuacagccccugg

SEQ ID NO: 2548639 - RNA, 19 nt, Artificial Sequence
  Description of Artificial Sequence: Synthetic oligonucleotide
guagaucccggcucuccug

SEQ ID NO: 2548640 - RNA, 19 nt, Artificial Sequence
  Description of Artificial Sequence: Synthetic oligonucleotide
gguguaucaacaagucuac

SEQ ID NO: 2548641 - RNA, 19 nt, Artificial Sequence
  Description of Artificial Sequence: Synthetic oligonucleotide
gagcuuggaguccuccuga

SEQ ID NO: 2548642 - RNA, 19 nt, Artificial Sequence
  Description of Artificial Sequence: Synthetic oligonucleotide
guggcgcggaccaacgacg

SEQ ID NO: 2548643 - RNA, 19 nt, Artificial Sequence
  Description of Artificial Sequence: Synthetic oligonucleotide
agaagcuguuuuaucuugu

SEQ ID NO: 2548644 - RNA, 19 nt, Artificial Sequence
  Description of Artificial Sequence: Synthetic oligonucleotide
gauacucaaucgcuacaua

SEQ ID NO: 2548645 - RNA, 19 nt, Artificial Sequence
  Description of Artificial Sequence: Synthetic oligonucleotide
uacuggcuugauuuccaaa

SEQ ID NO: 2548646 - RNA, 19 nt, Artificial Sequence
  Description of Artificial Sequence: Synthetic oligonucleotide
agcacgugacaaucacaug

SEQ ID NO: 2548647 - RNA, 19 nt, Artificial Sequence
  Description of Artificial Sequence: Synthetic oligonucleotide
gugagcgccgcccgcgugg

SEQ ID NO: 2548648 - RNA, 19 nt, Artificial Sequence
  Description of Artificial Sequence: Synthetic oligonucleotide
ucuuagcauacuggcuuga

SEQ ID NO: 2548649 - RNA, 19 nt, Artificial Sequence
  Description of Artificial Sequence: Synthetic oligonucleotide
cucugagcacgugacaauc

SEQ ID NO: 2548650 - RNA, 19 nt, Artificial Sequence
  Description of Artificial Sequence: Synthetic oligonucleotide
ugguucgcacaccaacuuu

SEQ ID NO: 2548651 - RNA, 19 nt, Artificial Sequence
  Description of Artificial Sequence: Synthetic oligonucleotide
caauucacacaaaaggguu

SEQ ID NO: 2548652 - RNA, 19 nt, Artificial Sequence
  Description of Artificial Sequence: Synthetic oligonucleotide
gcuuucuuuucgaugaaca

SEQ ID NO: 2548653 - RNA, 19 nt, Artificial Sequence
  Description of Artificial Sequence: Synthetic oligonucleotide
gcaucacuuuauuuucccc

SEQ ID NO: 2548654 - RNA, 19 nt, Artificial Sequence
  Description of Artificial Sequence: Synthetic oligonucleotide
uggcgcggaccaacgacgc

SEQ ID NO: 2548655 - RNA, 19 nt, Artificial Sequence
  Description of Artificial Sequence: Synthetic oligonucleotide
auaguuugucuuccacaua

SEQ ID NO: 2548656 - RNA, 19 nt, Artificial Sequence
  Description of Artificial Sequence: Synthetic oligonucleotide
uaguccauuucuguuccua

SEQ ID NO: 2548657 - RNA, 19 nt, Artificial Sequence
  Description of Artificial Sequence: Synthetic oligonucleotide
acucugagcacgugacaau

SEQ ID NO: 2548658 - RNA, 19 nt, Artificial Sequence
  Description of Artificial Sequence: Synthetic oligonucleotide
caagucuacuuaugauaca

SEQ ID NO: 2548659 - RNA, 19 nt, Artificial Sequence
  Description of Artificial Sequence: Synthetic oligonucleotide
acuuaucaacaaucauaua

SEQ ID NO: 2548660 - RNA, 19 nt, Artificial Sequence
  Description of Artificial Sequence: Synthetic oligonucleotide
gagcacgugacaaucacau

SEQ ID NO: 2548661 - RNA, 19 nt, Artificial Sequence
  Description of Artificial Sequence: Synthetic oligonucleotide
cugacuccaucuugaauaa

SEQ ID NO: 2548662 - RNA, 19 nt, Artificial Sequence
  Description of Artificial Sequence: Synthetic oligonucleotide
cuugcucacggcgcgcacc

SEQ ID NO: 2548663 - RNA, 19 nt, Artificial Sequence
  Description of Artificial Sequence: Synthetic oligonucleotide
agucuacuuaugauacaga

SEQ ID NO: 2548664 - RNA, 19 nt, Artificial Sequence
  Description of Artificial Sequence: Synthetic oligonucleotide
acccacgugcucuggcuug

SEQ ID NO: 2548665 - RNA, 19 nt, Artificial Sequence
  Description of Artificial Sequence: Synthetic oligonucleotide
auacuggcuugauuuccaa

SEQ ID NO: 2548666 - RNA, 19 nt, Artificial Sequence
  Description of Artificial Sequence: Synthetic oligonucleotide
uuguauacuccagggugua

SEQ ID NO: 2548667 - RNA, 19 nt, Artificial Sequence
  Description of Artificial Sequence: Synthetic oligonucleotide
uccuuugauguugggguua

SEQ ID NO: 2548668 - RNA, 19 nt, Artificial Sequence
  Description of Artificial Sequence: Synthetic oligonucleotide
agcucccagguagaucccg

SEQ ID NO: 2548669 - RNA, 19 nt, Artificial Sequence
  Description of Artificial Sequence: Synthetic oligonucleotide
guuucaaauguugaagcuu

SEQ ID NO: 2548670 - RNA, 19 nt, Artificial Sequence
  Description of Artificial Sequence: Synthetic oligonucleotide
cuccaggguguaagagagg

SEQ ID NO: 2548671 - RNA, 19 nt, Artificial Sequence
  Description of Artificial Sequence: Synthetic oligonucleotide
auacaauauugcacaaauu

SEQ ID NO: 2548672 - RNA, 19 nt, Artificial Sequence
  Description of Artificial Sequence: Synthetic oligonucleotide
ucagacccacgugcucugg

SEQ ID NO: 2548673 - RNA, 19 nt, Artificial Sequence
  Description of Artificial Sequence: Synthetic oligonucleotide
caacgacgccgacauggcc

SEQ ID NO: 2548674 - RNA, 19 nt, Artificial Sequence
  Description of Artificial Sequence: Synthetic oligonucleotide
cuucaguaagcucccaggu

SEQ ID NO: 2548675 - RNA, 19 nt, Artificial Sequence
  Description of Artificial Sequence: Synthetic oligonucleotide
gcauacuggcuugauuucc

SEQ ID NO: 2548676 - RNA, 19 nt, Artificial Sequence
  Description of Artificial Sequence: Synthetic oligonucleotide
uucacacaaaaggguuuaa

SEQ ID NO: 2548677 - RNA, 19 nt, Artificial Sequence
  Description of Artificial Sequence: Synthetic oligonucleotide
gguucgcacaccaacuuuc

SEQ ID NO: 2548678 - RNA, 19 nt, Artificial Sequence
  Description of Artificial Sequence: Synthetic oligonucleotide
uguauacuccaggguguaa

SEQ ID NO: 2548679 - RNA, 19 nt, Artificial Sequence
  Description of Artificial Sequence: Synthetic oligonucleotide
acgugcucuggcuugucuu

SEQ ID NO: 2548680 - RNA, 19 nt, Artificial Sequence
  Description of Artificial Sequence: Synthetic oligonucleotide
aguaagcucccagguagau

SEQ ID NO: 2548681 - RNA, 19 nt, Artificial Sequence
  Description of Artificial Sequence: Synthetic oligonucleotide
ucccggcucuccuggagcu

SEQ ID NO: 2548682 - RNA, 19 nt, Artificial Sequence
  Description of Artificial Sequence: Synthetic oligonucleotide
acauggccacgucgcggcg

SEQ ID NO: 2548683 - RNA, 19 nt, Artificial Sequence
  Description of Artificial Sequence: Synthetic oligonucleotide
cagacccacgugcucuggc

SEQ ID NO: 2548684 - RNA, 19 nt, Artificial Sequence
  Description of Artificial Sequence: Synthetic oligonucleotide
ucuugcucacggcgcgcac

SEQ ID NO: 2548685 - RNA, 19 nt, Artificial Sequence
  Description of Artificial Sequence: Synthetic oligonucleotide
agcgugagcgccgcccgcg

SEQ ID NO: 2548686 - RNA, 19 nt, Artificial Sequence
  Description of Artificial Sequence: Synthetic oligonucleotide
uacagccccugguucgcac

SEQ ID NO: 2548687 - RNA, 19 nt, Artificial Sequence
  Description of Artificial Sequence: Synthetic oligonucleotide
caacaagucuacuuaugau

SEQ ID NO: 2548688 - RNA, 19 nt, Artificial Sequence
  Description of Artificial Sequence: Synthetic oligonucleotide
cuguuuuaucuuguucaca

SEQ ID NO: 2548689 - RNA, 19 nt, Artificial Sequence
  Description of Artificial Sequence: Synthetic oligonucleotide
cuguuccuaaaaguguuaa

SEQ ID NO: 2548690 - RNA, 19 nt, Artificial Sequence
  Description of Artificial Sequence: Synthetic oligonucleotide
aguuugucuuccacauagu

SEQ ID NO: 2548691 - RNA, 19 nt, Artificial Sequence
  Description of Artificial Sequence: Synthetic oligonucleotide
gcaauucacacaaaagggu

SEQ ID NO: 2548692 - RNA, 19 nt, Artificial Sequence
  Description of Artificial Sequence: Synthetic oligonucleotide
caaaaugcaucacuuuauu

SEQ ID NO: 2548693 - RNA, 19 nt, Artificial Sequence
  Description of Artificial Sequence: Synthetic oligonucleotide
guaagcucccagguagauc

SEQ ID NO: 2548694 - RNA, 19 nt, Artificial Sequence
  Description of Artificial Sequence: Synthetic oligonucleotide
acgugacaaucacaugauu

SEQ ID NO: 2548695 - RNA, 19 nt, Artificial Sequence
  Description of Artificial Sequence: Synthetic oligonucleotide
cuggauaguuugucuucca

SEQ ID NO: 2548696 - RNA, 19 nt, Artificial Sequence
  Description of Artificial Sequence: Synthetic oligonucleotide
cuugagauggccacacauu

SEQ ID NO: 2548697 - RNA, 19 nt, Artificial Sequence
  Description of Artificial Sequence: Synthetic oligonucleotide
ccacaaguuccuuugaugu

SEQ ID NO: 2548698 - RNA, 19 nt, Artificial Sequence
  Description of Artificial Sequence: Synthetic oligonucleotide
ucacggcgcgcaccguggc

SEQ ID NO: 2548699 - RNA, 19 nt, Artificial Sequence
  Description of Artificial Sequence: Synthetic oligonucleotide
ccaacuuucagacccacgu

SEQ ID NO: 2548700 - RNA, 19 nt, Artificial Sequence
  Description of Artificial Sequence: Synthetic oligonucleotide
gacucuuagcauacuggcu

SEQ ID NO: 2548701 - RNA, 19 nt, Artificial Sequence
  Description of Artificial Sequence: Synthetic oligonucleotide
gcgcggaccaacgacgccg

SEQ ID NO: 2548702 - RNA, 19 nt, Artificial Sequence
  Description of Artificial Sequence: Synthetic oligonucleotide
ugacuccaucuugaauaac

SEQ ID NO: 2548703 - RNA, 19 nt, Artificial Sequence
  Description of Artificial Sequence: Synthetic oligonucleotide
cgaugaacacucugacucc

SEQ ID NO: 2548704 - RNA, 19 nt, Artificial Sequence
  Description of Artificial Sequence: Synthetic oligonucleotide
cacauaguccauuucuguu

SEQ ID NO: 2548705 - RNA, 19 nt, Artificial Sequence
  Description of Artificial Sequence: Synthetic oligonucleotide
ugagcgccgcccgcguggg

SEQ ID NO: 2548706 - RNA, 19 nt, Artificial Sequence
  Description of Artificial Sequence: Synthetic oligonucleotide
gccgacauggccacgucgc

SEQ ID NO: 2548707 - RNA, 19 nt, Artificial Sequence
  Description of Artificial Sequence: Synthetic oligonucleotide
guucgcacaccaacuuuca

SEQ ID NO: 2548708 - RNA, 19 nt, Artificial Sequence
  Description of Artificial Sequence: Synthetic oligonucleotide
caguaagcucccagguaga

SEQ ID NO: 2548709 - RNA, 19 nt, Artificial Sequence
  Description of Artificial Sequence: Synthetic oligonucleotide
gacaaucacaugauuucuu

SEQ ID NO: 2548710 - RNA, 19 nt, Artificial Sequence
  Description of Artificial Sequence: Synthetic oligonucleotide
cagaaucuccuuuugucuu

SEQ ID NO: 2548711 - RNA, 19 nt, Artificial Sequence
  Description of Artificial Sequence: Synthetic oligonucleotide
ccauuacagccccugguuc

SEQ ID NO: 2548712 - RNA, 19 nt, Artificial Sequence
  Description of Artificial Sequence: Synthetic oligonucleotide
cauggccacgucgcggcgc

SEQ ID NO: 2548713 - RNA, 19 nt, Artificial Sequence
  Description of Artificial Sequence: Synthetic oligonucleotide
ccaacgacgccgacauggc

SEQ ID NO: 2548714 - RNA, 19 nt, Artificial Sequence
  Description of Artificial Sequence: Synthetic oligonucleotide
caacuacuguuucaaaguu

SEQ ID NO: 2548715 - RNA, 19 nt, Artificial Sequence
  Description of Artificial Sequence: Synthetic oligonucleotide
cccugguucgcacaccaac

SEQ ID NO: 2548716 - RNA, 19 nt, Artificial Sequence
  Description of Artificial Sequence: Synthetic oligonucleotide
ggaccaacgacgccgacau

SEQ ID NO: 2548717 - RNA, 19 nt, Artificial Sequence
  Description of Artificial Sequence: Synthetic oligonucleotide
cgcuacauacaauauugca

SEQ ID NO: 2548718 - RNA, 19 nt, Artificial Sequence
  Description of Artificial Sequence: Synthetic oligonucleotide
acgucgcggcgcccgcagc

SEQ ID NO: 2548719 - RNA, 19 nt, Artificial Sequence
  Description of Artificial Sequence: Synthetic oligonucleotide
acgccgacauggccacguc

SEQ ID NO: 2548720 - RNA, 19 nt, Artificial Sequence
  Description of Artificial Sequence: Synthetic oligonucleotide
cagacuuaucaacaaucau

SEQ ID NO: 2548721 - RNA, 19 nt, Artificial Sequence
  Description of Artificial Sequence: Synthetic oligonucleotide
accguggcgcggaccaacg

SEQ ID NO: 2548722 - RNA, 19 nt, Artificial Sequence
  Description of Artificial Sequence: Synthetic oligonucleotide
cacgugacaaucacaugau

SEQ ID NO: 2548723 - RNA, 19 nt, Artificial Sequence
  Description of Artificial Sequence: Synthetic oligonucleotide
caaucgcuacauacaauau

SEQ ID NO: 2548724 - RNA, 19 nt, Artificial Sequence
  Description of Artificial Sequence: Synthetic oligonucleotide
agccccugguucgcacacc

SEQ ID NO: 2548725 - RNA, 19 nt, Artificial Sequence
  Description of Artificial Sequence: Synthetic oligonucleotide
uugggacucuuagcauacu

SEQ ID NO: 2548726 - RNA, 19 nt, Artificial Sequence
  Description of Artificial Sequence: Synthetic oligonucleotide
cacggcgcgcaccguggcg

SEQ ID NO: 2548727 - RNA, 19 nt, Artificial Sequence
  Description of Artificial Sequence: Synthetic oligonucleotide
agaucccggcucuccugga

SEQ ID NO: 2548728 - RNA, 19 nt, Artificial Sequence
  Description of Artificial Sequence: Synthetic oligonucleotide
cccagguagaucccggcuc

SEQ ID NO: 2548729 - RNA, 19 nt, Artificial Sequence
  Description of Artificial Sequence: Synthetic oligonucleotide
gguguaagagaggccauua

SEQ ID NO: 2548730 - RNA, 19 nt, Artificial Sequence
  Description of Artificial Sequence: Synthetic oligonucleotide
cacgucgcggcgcccgcag

SEQ ID NO: 2548731 - RNA, 19 nt, Artificial Sequence
  Description of Artificial Sequence: Synthetic oligonucleotide
cuccuggagcuuggagucc

SEQ ID NO: 2548732 - RNA, 19 nt, Artificial Sequence
  Description of Artificial Sequence: Synthetic oligonucleotide
caaacucacuggauaguuu

SEQ ID NO: 2548733 - RNA, 19 nt, Artificial Sequence
  Description of Artificial Sequence: Synthetic oligonucleotide
gcacaccaacuuucagacc

SEQ ID NO: 2548734 - RNA, 19 nt, Artificial Sequence
  Description of Artificial Sequence: Synthetic oligonucleotide
guguuaacugugcuuucuu

SEQ ID NO: 2548735 - RNA, 19 nt, Artificial Sequence
  Description of Artificial Sequence: Synthetic oligonucleotide
agcgccgcccgcgugggcu

SEQ ID NO: 2548736 - RNA, 19 nt, Artificial Sequence
  Description of Artificial Sequence: Synthetic oligonucleotide
cucaaucgcuacauacaau

SEQ ID NO: 2548737 - RNA, 19 nt, Artificial Sequence
  Description of Artificial Sequence: Synthetic oligonucleotide
gcucacggcgcgcaccgug

SEQ ID NO: 2548738 - RNA, 19 nt, Artificial Sequence
  Description of Artificial Sequence: Synthetic oligonucleotide
gaguccuccugagguuuca

SEQ ID NO: 2548739 - RNA, 19 nt, Artificial Sequence
  Description of Artificial Sequence: Synthetic oligonucleotide
gaccaacgacgccgacaug

SEQ ID NO: 2548740 - RNA, 19 nt, Artificial Sequence
  Description of Artificial Sequence: Synthetic oligonucleotide
gacgccgacauggccacgu

SEQ ID NO: 2548741 - RNA, 19 nt, Artificial Sequence
  Description of Artificial Sequence: Synthetic oligonucleotide
caccguggcgcggaccaac

SEQ ID NO: 2548742 - RNA, 19 nt, Artificial Sequence
  Description of Artificial Sequence: Synthetic oligonucleotide
gguagaucccggcucuccu

SEQ ID NO: 2548743 - RNA, 19 nt, Artificial Sequence
  Description of Artificial Sequence: Synthetic oligonucleotide
ggggucagcgugagcgccg

SEQ ID NO: 2548744 - RNA, 19 nt, Artificial Sequence
  Description of Artificial Sequence: Synthetic oligonucleotide
ccgacauggccacgucgcg

SEQ ID NO: 2548745 - RNA, 19 nt, Artificial Sequence
  Description of Artificial Sequence: Synthetic oligonucleotide
cucuugcucacggcgcgca

SEQ ID NO: 2548746 - RNA, 19 nt, Artificial Sequence
  Description of Artificial Sequence: Synthetic oligonucleotide
cguggcgcggaccaacgac

SEQ ID NO: 2548747 - RNA, 19 nt, Artificial Sequence
  Description of Artificial Sequence: Synthetic oligonucleotide
ggccauuacagccccuggu

SEQ ID NO: 2548748 - RNA, 19 nt, Artificial Sequence
  Description of Artificial Sequence: Synthetic oligonucleotide
gcacaaauuaaagguguau

SEQ ID NO: 2548749 - RNA, 19 nt, Artificial Sequence
  Description of Artificial Sequence: Synthetic oligonucleotide
cagcgugagcgccgcccgc

SEQ ID NO: 2548750 - RNA, 19 nt, Artificial Sequence
  Description of Artificial Sequence: Synthetic oligonucleotide
cucugacuccaucuugaau

SEQ ID NO: 2548751 - RNA, 19 nt, Artificial Sequence
  Description of Artificial Sequence: Synthetic oligonucleotide
ccacauaguccauuucugu

SEQ ID NO: 2548752 - RNA, 19 nt, Artificial Sequence
  Description of Artificial Sequence: Synthetic oligonucleotide
guguaucaacaagucuacu

SEQ ID NO: 2548753 - RNA, 19 nt, Artificial Sequence
  Description of Artificial Sequence: Synthetic oligonucleotide
gccauuacagccccugguu

SEQ ID NO: 2548754 - RNA, 19 nt, Artificial Sequence
  Description of Artificial Sequence: Synthetic oligonucleotide
ggccacgucgcggcgcccg

SEQ ID NO: 2548755 - RNA, 19 nt, Artificial Sequence
  Description of Artificial Sequence: Synthetic oligonucleotide
ccugguucgcacaccaacu

SEQ ID NO: 2548756 - RNA, 19 nt, Artificial Sequence
  Description of Artificial Sequence: Synthetic oligonucleotide
cugguucgcacaccaacuu

SEQ ID NO: 2548757 - RNA, 19 nt, Artificial Sequence
  Description of Artificial Sequence: Synthetic oligonucleotide
cuuagcauacuggcuugau

SEQ ID NO: 2548758 - RNA, 19 nt, Artificial Sequence
  Description of Artificial Sequence: Synthetic oligonucleotide
gacccacgugcucuggcuu

SEQ ID NO: 2548759 - RNA, 19 nt, Artificial Sequence
  Description of Artificial Sequence: Synthetic oligonucleotide
ccuuuugucuuuguauacu

SEQ ID NO: 2548760 - RNA, 19 nt, Artificial Sequence
  Description of Artificial Sequence: Synthetic oligonucleotide
cgacauggccacgucgcgg

SEQ ID NO: 2548761 - RNA, 19 nt, Artificial Sequence
  Description of Artificial Sequence: Synthetic oligonucleotide
ccccuugagauggccacac

SEQ ID NO: 2548762 - RNA, 19 nt, Artificial Sequence
  Description of Artificial Sequence: Synthetic oligonucleotide
cagguagaucccggcucuc

SEQ ID NO: 2548763 - RNA, 19 nt, Artificial Sequence
  Description of Artificial Sequence: Synthetic oligonucleotide
cgccgacauggccacgucg

SEQ ID NO: 2548764 - RNA, 19 nt, Artificial Sequence
  Description of Artificial Sequence: Synthetic oligonucleotide
gggucagcgugagcgccgc

SEQ ID NO: 2548765 - RNA, 19 nt, Artificial Sequence
  Description of Artificial Sequence: Synthetic oligonucleotide
agaggccauuacagccccu

SEQ ID NO: 2548766 - RNA, 19 nt, Artificial Sequence
  Description of Artificial Sequence: Synthetic oligonucleotide
ccggcucuccuggagcuug

SEQ ID NO: 2548767 - RNA, 19 nt, Artificial Sequence
  Description of Artificial Sequence: Synthetic oligonucleotide
ccagguagaucccggcucu

SEQ ID NO: 2548768 - RNA, 19 nt, Artificial Sequence
  Description of Artificial Sequence: Synthetic oligonucleotide
cgucgcggcgcccgcagcc

SEQ ID NO: 2548769 - RNA, 19 nt, Artificial Sequence
  Description of Artificial Sequence: Synthetic oligonucleotide
ugcucacggcgcgcaccgu

SEQ ID NO: 2548770 - RNA, 19 nt, Artificial Sequence
  Description of Artificial Sequence: Synthetic oligonucleotide
ccucuugcucacggcgcgc

SEQ ID NO: 2548771 - RNA, 19 nt, Artificial Sequence
  Description of Artificial Sequence: Synthetic oligonucleotide
ccgcgugggcugcagcuuc

SEQ ID NO: 2548772 - RNA, 19 nt, Artificial Sequence
  Description of Artificial Sequence: Synthetic oligonucleotide
gagcgccgcccgcgugggc

SEQ ID NO: 2548773 - RNA, 19 nt, Artificial Sequence
  Description of Artificial Sequence: Synthetic oligonucleotide
ggucagcgugagcgccgcc

SEQ ID NO: 2548774 - RNA, 19 nt, Artificial Sequence
  Description of Artificial Sequence: Synthetic oligonucleotide
ggcuugucuuugagaagcu

SEQ ID NO: 2548775 - RNA, 19 nt, Artificial Sequence
  Description of Artificial Sequence: Synthetic oligonucleotide
gccacgucgcggcgcccgc

SEQ ID NO: 2548776 - RNA, 19 nt, Artificial Sequence
  Description of Artificial Sequence: Synthetic oligonucleotide
uggccacgucgcggcgccc

SEQ ID NO: 2548777 - RNA, 19 nt, Artificial Sequence
  Description of Artificial Sequence: Synthetic oligonucleotide
gcccgcgugggcugcagcu

SEQ ID NO: 2548778 - RNA, 19 nt, Artificial Sequence
  Description of Artificial Sequence: Synthetic oligonucleotide
cggaccaacgacgccgaca

SEQ ID NO: 2548779 - RNA, 19 nt, Artificial Sequence
  Description of Artificial Sequence: Synthetic oligonucleotide
cccuugagauggccacaca

SEQ ID NO: 2548780 - RNA, 19 nt, Artificial Sequence
  Description of Artificial Sequence: Synthetic oligonucleotide
ccuuugauguugggguuau

SEQ ID NO: 2548781 - RNA, 19 nt, Artificial Sequence
  Description of Artificial Sequence: Synthetic oligonucleotide
gcggaccaacgacgccgac

SEQ ID NO: 2548782 - RNA, 19 nt, Artificial Sequence
  Description of Artificial Sequence: Synthetic oligonucleotide
gucgcggcgcccgcagccu

SEQ ID NO: 2548783 - RNA, 19 nt, Artificial Sequence
  Description of Artificial Sequence: Synthetic oligonucleotide
cgcggaccaacgacgccga

SEQ ID NO: 2548784 - RNA, 19 nt, Artificial Sequence
  Description of Artificial Sequence: Synthetic oligonucleotide
cgugcucuggcuugucuuu

SEQ ID NO: 2548785 - RNA, 19 nt, Artificial Sequence
  Description of Artificial Sequence: Synthetic oligonucleotide
ccguggcgcggaccaacga

SEQ ID NO: 2548786 - RNA, 19 nt, Artificial Sequence
  Description of Artificial Sequence: Synthetic oligonucleotide
ccacgugcucuggcuuguc

SEQ ID NO: 2548787 - RNA, 19 nt, Artificial Sequence
  Description of Artificial Sequence: Synthetic oligonucleotide
gcgugagcgccgcccgcgu

SEQ ID NO: 2548788 - RNA, 19 nt, Artificial Sequence
  Description of Artificial Sequence: Synthetic oligonucleotide
cgacgccgacauggccacg

SEQ ID NO: 2548789 - RNA, 19 nt, Artificial Sequence
  Description of Artificial Sequence: Synthetic oligonucleotide
cccacgugcucuggcuugu

SEQ ID NO: 2548790 - RNA, 19 nt, Artificial Sequence
  Description of Artificial Sequence: Synthetic oligonucleotide
gcgugggcugcagcuuccu

SEQ ID NO: 2548791 - RNA, 19 nt, Artificial Sequence
  Description of Artificial Sequence: Synthetic oligonucleotide
gcaccguggcgcggaccaa

SEQ ID NO: 2548792 - RNA, 19 nt, Artificial Sequence
  Description of Artificial Sequence: Synthetic oligonucleotide
ccgcccgcgugggcugcag

SEQ ID NO: 2548793 - RNA, 19 nt, Artificial Sequence
  Description of Artificial Sequence: Synthetic oligonucleotide
ccacgucgcggcgcccgca

SEQ ID NO: 2548794 - RNA, 19 nt, Artificial Sequence
  Description of Artificial Sequence: Synthetic oligonucleotide
ccacagccacaaguuccuu

SEQ ID NO: 2548795 - RNA, 19 nt, Artificial Sequence
  Description of Artificial Sequence: Synthetic oligonucleotide
cccgcgugggcugcagcuu

SEQ ID NO: 2548796 - RNA, 19 nt, Artificial Sequence
  Description of Artificial Sequence: Synthetic oligonucleotide
cccggcucuccuggagcuu

SEQ ID NO: 2548797 - RNA, 19 nt, Artificial Sequence
  Description of Artificial Sequence: Synthetic oligonucleotide
aacuugaaagcugagcugc

SEQ ID NO: 2548798 - RNA, 19 nt, Artificial Sequence
  Description of Artificial Sequence: Synthetic oligonucleotide
acuuucagcgacuugcugc

SEQ ID NO: 2548799 - RNA, 19 nt, Artificial Sequence
  Description of Artificial Sequence: Synthetic oligonucleotide
gauucgaacugguucaugg

SEQ ID NO: 2548800 - RNA, 19 nt, Artificial Sequence
  Description of Artificial Sequence: Synthetic oligonucleotide
ucacgguagaacuugaaag

SEQ ID NO: 2548801 - RNA, 19 nt, Artificial Sequence
  Description of Artificial Sequence: Synthetic oligonucleotide
aagcgauucgaacugguuc

SEQ ID NO: 2548802 - RNA, 19 nt, Artificial Sequence
  Description of Artificial Sequence: Synthetic oligonucleotide
aucaugccgacuuucagcg

SEQ ID NO: 2548803 - RNA, 19 nt, Artificial Sequence
  Description of Artificial Sequence: Synthetic oligonucleotide
uucugcaacaucuggaagc

SEQ ID NO: 2548804 - RNA, 19 nt, Artificial Sequence
  Description of Artificial Sequence: Synthetic oligonucleotide
ucaccaguagacuggaagg

SEQ ID NO: 2548805 - RNA, 19 nt, Artificial Sequence
  Description of Artificial Sequence: Synthetic oligonucleotide
cuguacaucugcaucaugc

SEQ ID NO: 2548806 - RNA, 19 nt, Artificial Sequence
  Description of Artificial Sequence: Synthetic oligonucleotide
uguacaucugcaucaugcg

SEQ ID NO: 2548807 - RNA, 19 nt, Artificial Sequence
  Description of Artificial Sequence: Synthetic oligonucleotide
uuugacuccuggaugagac

SEQ ID NO: 2548808 - RNA, 19 nt, Artificial Sequence
  Description of Artificial Sequence: Synthetic oligonucleotide
cacgguagaacuugaaagc

SEQ ID NO: 2548809 - RNA, 19 nt, Artificial Sequence
  Description of Artificial Sequence: Synthetic oligonucleotide
gaucaugccgacuuucagc

SEQ ID NO: 2548810 - RNA, 19 nt, Artificial Sequence
  Description of Artificial Sequence: Synthetic oligonucleotide
agcgacuugcugcugauuc

SEQ ID NO: 2548811 - RNA, 19 nt, Artificial Sequence
  Description of Artificial Sequence: Synthetic oligonucleotide
ugaucaugcaggaaccaca

SEQ ID NO: 2548812 - RNA, 19 nt, Artificial Sequence
  Description of Artificial Sequence: Synthetic oligonucleotide
cuucuuucugcucuggccc

SEQ ID NO: 2548813 - RNA, 19 nt, Artificial Sequence
  Description of Artificial Sequence: Synthetic oligonucleotide
augagacacacccucuugg

SEQ ID NO: 2548814 - RNA, 19 nt, Artificial Sequence
  Description of Artificial Sequence: Synthetic oligonucleotide
aacaucuggaagccuaggu

SEQ ID NO: 2548815 - RNA, 19 nt, Artificial Sequence
  Description of Artificial Sequence: Synthetic oligonucleotide
ucgaacugguucauggacc

SEQ ID NO: 2548816 - RNA, 19 nt, Artificial Sequence
  Description of Artificial Sequence: Synthetic oligonucleotide
ugagacacacccucuuggg

SEQ ID NO: 2548817 - RNA, 19 nt, Artificial Sequence
  Description of Artificial Sequence: Synthetic oligonucleotide
ucguaagcgauucgaacug

SEQ ID NO: 2548818 - RNA, 19 nt, Artificial Sequence
  Description of Artificial Sequence: Synthetic oligonucleotide
uucgaacugguucauggac

SEQ ID NO: 2548819 - RNA, 19 nt, Artificial Sequence
  Description of Artificial Sequence: Synthetic oligonucleotide
uugaaagcugagcugcucu

SEQ ID NO: 2548820 - RNA, 19 nt, Artificial Sequence
  Description of Artificial Sequence: Synthetic oligonucleotide
aucugcaucaugcgcuggc

SEQ ID NO: 2548821 - RNA, 19 nt, Artificial Sequence
  Description of Artificial Sequence: Synthetic oligonucleotide
uggcggaagacgucaaacg

SEQ ID NO: 2548822 - RNA, 19 nt, Artificial Sequence
  Description of Artificial Sequence: Synthetic oligonucleotide
agcgauucgaacugguuca

SEQ ID NO: 2548823 - RNA, 19 nt, Artificial Sequence
  Description of Artificial Sequence: Synthetic oligonucleotide
guucauggaccuuugacuc

SEQ ID NO: 2548824 - RNA, 19 nt, Artificial Sequence
  Description of Artificial Sequence: Synthetic oligonucleotide
gaacuugaaagcugagcug

SEQ ID NO: 2548825 - RNA, 19 nt, Artificial Sequence
  Description of Artificial Sequence: Synthetic oligonucleotide
ugguucauggaccuuugac

SEQ ID NO: 2548826 - RNA, 19 nt, Artificial Sequence
  Description of Artificial Sequence: Synthetic oligonucleotide
ugggacucugcucugaguc

SEQ ID NO: 2548827 - RNA, 19 nt, Artificial Sequence
  Description of Artificial Sequence: Synthetic oligonucleotide
ucaggcagcaccucagggc

SEQ ID NO: 2548828 - RNA, 19 nt, Artificial Sequence
  Description of Artificial Sequence: Synthetic oligonucleotide
aacgugucuucuuucugcu

SEQ ID NO: 2548829 - RNA, 19 nt, Artificial Sequence
  Description of Artificial Sequence: Synthetic oligonucleotide
ucugcaacaucuggaagcc

SEQ ID NO: 2548830 - RNA, 19 nt, Artificial Sequence
  Description of Artificial Sequence: Synthetic oligonucleotide
uagaacuugaaagcugagc

SEQ ID NO: 2548831 - RNA, 19 nt, Artificial Sequence
  Description of Artificial Sequence: Synthetic oligonucleotide
agccuggacauuuggcagc

SEQ ID NO: 2548832 - RNA, 19 nt, Artificial Sequence
  Description of Artificial Sequence: Synthetic oligonucleotide
ugucguaagcgauucgaac

SEQ ID NO: 2548833 - RNA, 19 nt, Artificial Sequence
  Description of Artificial Sequence: Synthetic oligonucleotide
cucugaucaugcaggaacc

SEQ ID NO: 2548834 - RNA, 19 nt, Artificial Sequence
  Description of Artificial Sequence: Synthetic oligonucleotide
gaugagacacacccucuug

SEQ ID NO: 2548835 - RNA, 19 nt, Artificial Sequence
  Description of Artificial Sequence: Synthetic oligonucleotide
cuggacauuuggcagcucc

SEQ ID NO: 2548836 - RNA, 19 nt, Artificial Sequence
  Description of Artificial Sequence: Synthetic oligonucleotide
accuucucacgguagaacu

SEQ ID NO: 2548837 - RNA, 19 nt, Artificial Sequence
  Description of Artificial Sequence: Synthetic oligonucleotide
uuugcuggcccgcuugugu

SEQ ID NO: 2548838 - RNA, 19 nt, Artificial Sequence
  Description of Artificial Sequence: Synthetic oligonucleotide
gagccuggacauuuggcag

SEQ ID NO: 2548839 - RNA, 19 nt, Artificial Sequence
  Description of Artificial Sequence: Synthetic oligonucleotide
gacauuuggcagcuccugc

SEQ ID NO: 2548840 - RNA, 19 nt, Artificial Sequence
  Description of Artificial Sequence: Synthetic oligonucleotide
cugcugauucucuuccugg

SEQ ID NO: 2548841 - RNA, 19 nt, Artificial Sequence
  Description of Artificial Sequence: Synthetic oligonucleotide
aguguagccuccugcuggg

SEQ ID NO: 2548842 - RNA, 19 nt, Artificial Sequence
  Description of Artificial Sequence: Synthetic oligonucleotide
cuggaugagacacacccuc

SEQ ID NO: 2548843 - RNA, 19 nt, Artificial Sequence
  Description of Artificial Sequence: Synthetic oligonucleotide
gaccuuugacuccuggaug

SEQ ID NO: 2548844 - RNA, 19 nt, Artificial Sequence
  Description of Artificial Sequence: Synthetic oligonucleotide
agcugcucugaucaugcag

SEQ ID NO: 2548845 - RNA, 19 nt, Artificial Sequence
  Description of Artificial Sequence: Synthetic oligonucleotide
aaagcugagcugcucugau

SEQ ID NO: 2548846 - RNA, 19 nt, Artificial Sequence
  Description of Artificial Sequence: Synthetic oligonucleotide
aagacgucaaacgugucuu

SEQ ID NO: 2548847 - RNA, 19 nt, Artificial Sequence
  Description of Artificial Sequence: Synthetic oligonucleotide
caugccgacuuucagcgac

SEQ ID NO: 2548848 - RNA, 19 nt, Artificial Sequence
  Description of Artificial Sequence: Synthetic oligonucleotide
uucauggaccuuugacucc

SEQ ID NO: 2548849 - RNA, 19 nt, Artificial Sequence
  Description of Artificial Sequence: Synthetic oligonucleotide
uucagcgacuugcugcuga

SEQ ID NO: 2548850 - RNA, 19 nt, Artificial Sequence
  Description of Artificial Sequence: Synthetic oligonucleotide
aagccuagguucuggccug

SEQ ID NO: 2548851 - RNA, 19 nt, Artificial Sequence
  Description of Artificial Sequence: Synthetic oligonucleotide
uggccuuccuuccagccca

SEQ ID NO: 2548852 - RNA, 19 nt, Artificial Sequence
  Description of Artificial Sequence: Synthetic oligonucleotide
ugugggacucugcucugag

SEQ ID NO: 2548853 - RNA, 19 nt, Artificial Sequence
  Description of Artificial Sequence: Synthetic oligonucleotide
acccucacccuccuugugg

SEQ ID NO: 2548854 - RNA, 19 nt, Artificial Sequence
  Description of Artificial Sequence: Synthetic oligonucleotide
cagggaugcugucaguggg

SEQ ID NO: 2548855 - RNA, 19 nt, Artificial Sequence
  Description of Artificial Sequence: Synthetic oligonucleotide
ugcaucaugcgcuggcgga

SEQ ID NO: 2548856 - RNA, 19 nt, Artificial Sequence
  Description of Artificial Sequence: Synthetic oligonucleotide
uguagccuccugcugggga

SEQ ID NO: 2548857 - RNA, 19 nt, Artificial Sequence
  Description of Artificial Sequence: Synthetic oligonucleotide
ucggagccuggacauuugg

SEQ ID NO: 2548858 - RNA, 19 nt, Artificial Sequence
  Description of Artificial Sequence: Synthetic oligonucleotide
ugggcacaguuccagcacc

SEQ ID NO: 2548859 - RNA, 19 nt, Artificial Sequence
  Description of Artificial Sequence: Synthetic oligonucleotide
gaagccuagguucuggccu

SEQ ID NO: 2548860 - RNA, 19 nt, Artificial Sequence
  Description of Artificial Sequence: Synthetic oligonucleotide
auucgaacugguucaugga

SEQ ID NO: 2548861 - RNA, 19 nt, Artificial Sequence
  Description of Artificial Sequence: Synthetic oligonucleotide
ucgacuuccacaucaucuu

SEQ ID NO: 2548862 - RNA, 19 nt, Artificial Sequence
  Description of Artificial Sequence: Synthetic oligonucleotide
uagacuggaaggagaugga

SEQ ID NO: 2548863 - RNA, 19 nt, Artificial Sequence
  Description of Artificial Sequence: Synthetic oligonucleotide
gcugcucugaucaugcagg

SEQ ID NO: 2548864 - RNA, 19 nt, Artificial Sequence
  Description of Artificial Sequence: Synthetic oligonucleotide
uccagggaugcugucagug

SEQ ID NO: 2548865 - RNA, 19 nt, Artificial Sequence
  Description of Artificial Sequence: Synthetic oligonucleotide
gaagacgucaaacgugucu

SEQ ID NO: 2548866 - RNA, 19 nt, Artificial Sequence
  Description of Artificial Sequence: Synthetic oligonucleotide
uggacauuuggcagcuccu

SEQ ID NO: 2548867 - RNA, 19 nt, Artificial Sequence
  Description of Artificial Sequence: Synthetic oligonucleotide
uggaccuuugacuccugga

SEQ ID NO: 2548868 - RNA, 19 nt, Artificial Sequence
  Description of Artificial Sequence: Synthetic oligonucleotide
cuucucacgguagaacuug

SEQ ID NO: 2548869 - RNA, 19 nt, Artificial Sequence
  Description of Artificial Sequence: Synthetic oligonucleotide
uggaugggcacaguuccag

SEQ ID NO: 2548870 - RNA, 19 nt, Artificial Sequence
  Description of Artificial Sequence: Synthetic oligonucleotide
aacugguucauggaccuuu

SEQ ID NO: 2548871 - RNA, 19 nt, Artificial Sequence
  Description of Artificial Sequence: Synthetic oligonucleotide
gucguaagcgauucgaacu

SEQ ID NO: 2548872 - RNA, 19 nt, Artificial Sequence
  Description of Artificial Sequence: Synthetic oligonucleotide
gaggaggccugugacaggc

SEQ ID NO: 2548873 - RNA, 19 nt, Artificial Sequence
  Description of Artificial Sequence: Synthetic oligonucleotide
uguccccacgcugacaggc

SEQ ID NO: 2548874 - RNA, 19 nt, Artificial Sequence
  Description of Artificial Sequence: Synthetic oligonucleotide
ugauucucuuccuggggaa

SEQ ID NO: 2548875 - RNA, 19 nt, Artificial Sequence
  Description of Artificial Sequence: Synthetic oligonucleotide
uggaugagacacacccucu

SEQ ID NO: 2548876 - RNA, 19 nt, Artificial Sequence
  Description of Artificial Sequence: Synthetic oligonucleotide
agacgucaaacgugucuuc

SEQ ID NO: 2548877 - RNA, 19 nt, Artificial Sequence
  Description of Artificial Sequence: Synthetic oligonucleotide
cugacaggcucgcggaugc

SEQ ID NO: 2548878 - RNA, 19 nt, Artificial Sequence
  Description of Artificial Sequence: Synthetic oligonucleotide
cuucugcaacaucuggaag

SEQ ID NO: 2548879 - RNA, 19 nt, Artificial Sequence
  Description of Artificial Sequence: Synthetic oligonucleotide
uauuugcuggcccgcuugu

SEQ ID NO: 2548880 - RNA, 19 nt, Artificial Sequence
  Description of Artificial Sequence: Synthetic oligonucleotide
gauucucuuccuggggaag

SEQ ID NO: 2548881 - RNA, 19 nt, Artificial Sequence
  Description of Artificial Sequence: Synthetic oligonucleotide
accaguagacuggaaggag

SEQ ID NO: 2548882 - RNA, 19 nt, Artificial Sequence
  Description of Artificial Sequence: Synthetic oligonucleotide
uggaagccuagguucuggc

SEQ ID NO: 2548883 - RNA, 19 nt, Artificial Sequence
  Description of Artificial Sequence: Synthetic oligonucleotide
uaagcgauucgaacugguu

SEQ ID NO: 2548884 - RNA, 19 nt, Artificial Sequence
  Description of Artificial Sequence: Synthetic oligonucleotide
uuucugcucuggcccauca

SEQ ID NO: 2548885 - RNA, 19 nt, Artificial Sequence
  Description of Artificial Sequence: Synthetic oligonucleotide
ucuggccugucguaagcga

SEQ ID NO: 2548886 - RNA, 19 nt, Artificial Sequence
  Description of Artificial Sequence: Synthetic oligonucleotide
uucuuucugcucuggccca

SEQ ID NO: 2548887 - RNA, 19 nt, Artificial Sequence
  Description of Artificial Sequence: Synthetic oligonucleotide
gguagaacuugaaagcuga

SEQ ID NO: 2548888 - RNA, 19 nt, Artificial Sequence
  Description of Artificial Sequence: Synthetic oligonucleotide
cuccaguguagccuccugc

SEQ ID NO: 2548889 - RNA, 19 nt, Artificial Sequence
  Description of Artificial Sequence: Synthetic oligonucleotide
gacuuucagcgacuugcug

SEQ ID NO: 2548890 - RNA, 19 nt, Artificial Sequence
  Description of Artificial Sequence: Synthetic oligonucleotide
ucugaucaugcaggaacca

SEQ ID NO: 2548891 - RNA, 19 nt, Artificial Sequence
  Description of Artificial Sequence: Synthetic oligonucleotide
uucucacgguagaacuuga

SEQ ID NO: 2548892 - RNA, 19 nt, Artificial Sequence
  Description of Artificial Sequence: Synthetic oligonucleotide
cucgacuuccacaucaucu

SEQ ID NO: 2548893 - RNA, 19 nt, Artificial Sequence
  Description of Artificial Sequence: Synthetic oligonucleotide
ccgacuuucagcgacuugc

SEQ ID NO: 2548894 - RNA, 19 nt, Artificial Sequence
  Description of Artificial Sequence: Synthetic oligonucleotide
uccuugugggcugugggac

SEQ ID NO: 2548895 - RNA, 19 nt, Artificial Sequence
  Description of Artificial Sequence: Synthetic oligonucleotide
cucgcggaugcccuucccg

SEQ ID NO: 2548896 - RNA, 19 nt, Artificial Sequence
  Description of Artificial Sequence: Synthetic oligonucleotide
cuggggaagcagcugccgg

SEQ ID NO: 2548897 - RNA, 19 nt, Artificial Sequence
  Description of Artificial Sequence: Synthetic oligonucleotide
agggaucaugccgacuuuc

SEQ ID NO: 2548898 - RNA, 19 nt, Artificial Sequence
  Description of Artificial Sequence: Synthetic oligonucleotide
ugcucuggcccaucagccc

SEQ ID NO: 2548899 - RNA, 19 nt, Artificial Sequence
  Description of Artificial Sequence: Synthetic oligonucleotide
caugcgcuggcggaagacg

SEQ ID NO: 2548900 - RNA, 19 nt, Artificial Sequence
  Description of Artificial Sequence: Synthetic oligonucleotide
cugaucaugcaggaaccac

SEQ ID NO: 2548901 - RNA, 19 nt, Artificial Sequence
  Description of Artificial Sequence: Synthetic oligonucleotide
gagaguguccccacgcuga

SEQ ID NO: 2548902 - RNA, 19 nt, Artificial Sequence
  Description of Artificial Sequence: Synthetic oligonucleotide
gacccuucuccagggaugc

SEQ ID NO: 2548903 - RNA, 19 nt, Artificial Sequence
  Description of Artificial Sequence: Synthetic oligonucleotide
cugcaucaugcgcuggcgg

SEQ ID NO: 2548904 - RNA, 19 nt, Artificial Sequence
  Description of Artificial Sequence: Synthetic oligonucleotide
caggccguggccuuccuuc

SEQ ID NO: 2548905 - RNA, 19 nt, Artificial Sequence
  Description of Artificial Sequence: Synthetic oligonucleotide
gucaaacgugucuucuuuc

SEQ ID NO: 2548906 - RNA, 19 nt, Artificial Sequence
  Description of Artificial Sequence: Synthetic oligonucleotide
guucuggccugucguaagc

SEQ ID NO: 2548907 - RNA, 19 nt, Artificial Sequence
  Description of Artificial Sequence: Synthetic oligonucleotide
ucucacgguagaacuugaa

SEQ ID NO: 2548908 - RNA, 19 nt, Artificial Sequence
  Description of Artificial Sequence: Synthetic oligonucleotide
gaagcagcugccggaggag

SEQ ID NO: 2548909 - RNA, 19 nt, Artificial Sequence
  Description of Artificial Sequence: Synthetic oligonucleotide
guagccuccugcuggggac

SEQ ID NO: 2548910 - RNA, 19 nt, Artificial Sequence
  Description of Artificial Sequence: Synthetic oligonucleotide
ucgcggaugcccuucccga

SEQ ID NO: 2548911 - RNA, 19 nt, Artificial Sequence
  Description of Artificial Sequence: Synthetic oligonucleotide
cuggcggaagacgucaaac

SEQ ID NO: 2548912 - RNA, 19 nt, Artificial Sequence
  Description of Artificial Sequence: Synthetic oligonucleotide
cuccucgacuuccacauca

SEQ ID NO: 2548913 - RNA, 19 nt, Artificial Sequence
  Description of Artificial Sequence: Synthetic oligonucleotide
acgugucuucuuucugcuc

SEQ ID NO: 2548914 - RNA, 19 nt, Artificial Sequence
  Description of Artificial Sequence: Synthetic oligonucleotide
ucagggcccuccaguguag

SEQ ID NO: 2548915 - RNA, 19 nt, Artificial Sequence
  Description of Artificial Sequence: Synthetic oligonucleotide
ggaucaugccgacuuucag

SEQ ID NO: 2548916 - RNA, 19 nt, Artificial Sequence
  Description of Artificial Sequence: Synthetic oligonucleotide
gaaccacaggucaggguug

SEQ ID NO: 2548917 - RNA, 19 nt, Artificial Sequence
  Description of Artificial Sequence: Synthetic oligonucleotide
agccugguccucccuggac

SEQ ID NO: 2548918 - RNA, 19 nt, Artificial Sequence
  Description of Artificial Sequence: Synthetic oligonucleotide
cucacgguagaacuugaaa

SEQ ID NO: 2548919 - RNA, 19 nt, Artificial Sequence
  Description of Artificial Sequence: Synthetic oligonucleotide
guagaacuugaaagcugag

SEQ ID NO: 2548920 - RNA, 19 nt, Artificial Sequence
  Description of Artificial Sequence: Synthetic oligonucleotide
uucucuuccuggggaagca

SEQ ID NO: 2548921 - RNA, 19 nt, Artificial Sequence
  Description of Artificial Sequence: Synthetic oligonucleotide
ucacccucacccuccuugu

SEQ ID NO: 2548922 - RNA, 19 nt, Artificial Sequence
  Description of Artificial Sequence: Synthetic oligonucleotide
ucacccuccuugugggcug

SEQ ID NO: 2548923 - RNA, 19 nt, Artificial Sequence
  Description of Artificial Sequence: Synthetic oligonucleotide
guggccuuccuuccagccc

SEQ ID NO: 2548924 - RNA, 19 nt, Artificial Sequence
  Description of Artificial Sequence: Synthetic oligonucleotide
gacaggcucgcggaugccc

SEQ ID NO: 2548925 - RNA, 19 nt, Artificial Sequence
  Description of Artificial Sequence: Synthetic oligonucleotide
ggaagccuagguucuggcc

SEQ ID NO: 2548926 - RNA, 19 nt, Artificial Sequence
  Description of Artificial Sequence: Synthetic oligonucleotide
agggaugcugucagugggg

SEQ ID NO: 2548927 - RNA, 19 nt, Artificial Sequence
  Description of Artificial Sequence: Synthetic oligonucleotide
aguagacuggaaggagaug

SEQ ID NO: 2548928 - RNA, 19 nt, Artificial Sequence
  Description of Artificial Sequence: Synthetic oligonucleotide
caacaucuggaagccuagg

SEQ ID NO: 2548929 - RNA, 19 nt, Artificial Sequence
  Description of Artificial Sequence: Synthetic oligonucleotide
caggcccucuccuucugag

SEQ ID NO: 2548930 - RNA, 19 nt, Artificial Sequence
  Description of Artificial Sequence: Synthetic oligonucleotide
gugcaggucuccucucugc

SEQ ID NO: 2548931 - RNA, 19 nt, Artificial Sequence
  Description of Artificial Sequence: Synthetic oligonucleotide
cuuucagcgacuugcugcu

SEQ ID NO: 2548932 - RNA, 19 nt, Artificial Sequence
  Description of Artificial Sequence: Synthetic oligonucleotide
cuugaaagcugagcugcuc

SEQ ID NO: 2548933 - RNA, 19 nt, Artificial Sequence
  Description of Artificial Sequence: Synthetic oligonucleotide
ugcccuucccgagggagcc

SEQ ID NO: 2548934 - RNA, 19 nt, Artificial Sequence
  Description of Artificial Sequence: Synthetic oligonucleotide
aaccacaggucaggguugu

SEQ ID NO: 2548935 - RNA, 19 nt, Artificial Sequence
  Description of Artificial Sequence: Synthetic oligonucleotide
aggccugugacaggccagg

SEQ ID NO: 2548936 - RNA, 19 nt, Artificial Sequence
  Description of Artificial Sequence: Synthetic oligonucleotide
uugcuggcccgcuuguguc

SEQ ID NO: 2548937 - RNA, 19 nt, Artificial Sequence
  Description of Artificial Sequence: Synthetic oligonucleotide
gguucuggccugucguaag

SEQ ID NO: 2548938 - RNA, 19 nt, Artificial Sequence
  Description of Artificial Sequence: Synthetic oligonucleotide
ugagggugcaggucuccuc

SEQ ID NO: 2548939 - RNA, 19 nt, Artificial Sequence
  Description of Artificial Sequence: Synthetic oligonucleotide
gcaggaaccacaggucagg

SEQ ID NO: 2548940 - RNA, 19 nt, Artificial Sequence
  Description of Artificial Sequence: Synthetic oligonucleotide
cugagcugcucugaucaug

SEQ ID NO: 2548941 - RNA, 19 nt, Artificial Sequence
  Description of Artificial Sequence: Synthetic oligonucleotide
augcccuucccgagggagc

SEQ ID NO: 2548942 - RNA, 19 nt, Artificial Sequence
  Description of Artificial Sequence: Synthetic oligonucleotide
ucccuggacccuucuccag

SEQ ID NO: 2548943 - RNA, 19 nt, Artificial Sequence
  Description of Artificial Sequence: Synthetic oligonucleotide
acgcugacaggcucgcgga

SEQ ID NO: 2548944 - RNA, 19 nt, Artificial Sequence
  Description of Artificial Sequence: Synthetic oligonucleotide
uccucucugcccucauccu

SEQ ID NO: 2548945 - RNA, 19 nt, Artificial Sequence
  Description of Artificial Sequence: Synthetic oligonucleotide
cuggaaggagauggauggg

SEQ ID NO: 2548946 - RNA, 19 nt, Artificial Sequence
  Description of Artificial Sequence: Synthetic oligonucleotide
caggaaccacaggucaggg

SEQ ID NO: 2548947 - RNA, 19 nt, Artificial Sequence
  Description of Artificial Sequence: Synthetic oligonucleotide
uccucgacuuccacaucau

SEQ ID NO: 2548948 - RNA, 19 nt, Artificial Sequence
  Description of Artificial Sequence: Synthetic oligonucleotide
gagggugcaggucuccucu

SEQ ID NO: 2548949 - RNA, 19 nt, Artificial Sequence
  Description of Artificial Sequence: Synthetic oligonucleotide
ucagcgacuugcugcugau

SEQ ID NO: 2548950 - RNA, 19 nt, Artificial Sequence
  Description of Artificial Sequence: Synthetic oligonucleotide
ugcugcugauucucuuccu

SEQ ID NO: 2548951 - RNA, 19 nt, Artificial Sequence
  Description of Artificial Sequence: Synthetic oligonucleotide
acgucaaacgugucuucuu

SEQ ID NO: 2548952 - RNA, 19 nt, Artificial Sequence
  Description of Artificial Sequence: Synthetic oligonucleotide
uagguucuggccugucgua

SEQ ID NO: 2548953 - RNA, 19 nt, Artificial Sequence
  Description of Artificial Sequence: Synthetic oligonucleotide
caccuucucacgguagaac

SEQ ID NO: 2548954 - RNA, 19 nt, Artificial Sequence
  Description of Artificial Sequence: Synthetic oligonucleotide
cuagguucuggccugucgu

SEQ ID NO: 2548955 - RNA, 19 nt, Artificial Sequence
  Description of Artificial Sequence: Synthetic oligonucleotide
ccuagguucuggccugucg

SEQ ID NO: 2548956 - RNA, 19 nt, Artificial Sequence
  Description of Artificial Sequence: Synthetic oligonucleotide
uggccugucguaagcgauu

SEQ ID NO: 2548957 - RNA, 19 nt, Artificial Sequence
  Description of Artificial Sequence: Synthetic oligonucleotide
ucaugccgacuuucagcga

SEQ ID NO: 2548958 - RNA, 19 nt, Artificial Sequence
  Description of Artificial Sequence: Synthetic oligonucleotide
gaggccugugacaggccag

SEQ ID NO: 2548959 - RNA, 19 nt, Artificial Sequence
  Description of Artificial Sequence: Synthetic oligonucleotide
gcucuggcccaucagcccc

SEQ ID NO: 2548960 - RNA, 19 nt, Artificial Sequence
  Description of Artificial Sequence: Synthetic oligonucleotide
uccugccuguggccugagg

SEQ ID NO: 2548961 - RNA, 19 nt, Artificial Sequence
  Description of Artificial Sequence: Synthetic oligonucleotide
cccgagggagcccaggccg

SEQ ID NO: 2548962 - RNA, 19 nt, Artificial Sequence
  Description of Artificial Sequence: Synthetic oligonucleotide
acugguucauggaccuuug

SEQ ID NO: 2548963 - RNA, 19 nt, Artificial Sequence
  Description of Artificial Sequence: Synthetic oligonucleotide
caucaugcgcuggcggaag

SEQ ID NO: 2548964 - RNA, 19 nt, Artificial Sequence
  Description of Artificial Sequence: Synthetic oligonucleotide
cuugugggcugugggacuc

SEQ ID NO: 2548965 - RNA, 19 nt, Artificial Sequence
  Description of Artificial Sequence: Synthetic oligonucleotide
ugcuggcccgcuugugucu

SEQ ID NO: 2548966 - RNA, 19 nt, Artificial Sequence
  Description of Artificial Sequence: Synthetic oligonucleotide
cugucguaagcgauucgaa

SEQ ID NO: 2548967 - RNA, 19 nt, Artificial Sequence
  Description of Artificial Sequence: Synthetic oligonucleotide
gccugugacaggccagggg

SEQ ID NO: 2548968 - RNA, 19 nt, Artificial Sequence
  Description of Artificial Sequence: Synthetic oligonucleotide
ugcgcuggcggaagacguc

SEQ ID NO: 2548969 - RNA, 19 nt, Artificial Sequence
  Description of Artificial Sequence: Synthetic oligonucleotide
gcggaagacgucaaacgug

SEQ ID NO: 2548970 - RNA, 19 nt, Artificial Sequence
  Description of Artificial Sequence: Synthetic oligonucleotide
ccuggacccuucuccaggg

SEQ ID NO: 2548971 - RNA, 19 nt, Artificial Sequence
  Description of Artificial Sequence: Synthetic oligonucleotide
acuugaaagcugagcugcu

SEQ ID NO: 2548972 - RNA, 19 nt, Artificial Sequence
  Description of Artificial Sequence: Synthetic oligonucleotide
gacgucaaacgugucuucu

SEQ ID NO: 2548973 - RNA, 19 nt, Artificial Sequence
  Description of Artificial Sequence: Synthetic oligonucleotide
caccaguagacuggaagga

SEQ ID NO: 2548974 - RNA, 19 nt, Artificial Sequence
  Description of Artificial Sequence: Synthetic oligonucleotide
cucggagccuggacauuug

SEQ ID NO: 2548975 - RNA, 19 nt, Artificial Sequence
  Description of Artificial Sequence: Synthetic oligonucleotide
gacgccccuccucuggcuc

SEQ ID NO: 2548976 - RNA, 19 nt, Artificial Sequence
  Description of Artificial Sequence: Synthetic oligonucleotide
gagggagcccaggccgugg

SEQ ID NO: 2548977 - RNA, 19 nt, Artificial Sequence
  Description of Artificial Sequence: Synthetic oligonucleotide
ugugggcugugggacucug

SEQ ID NO: 2548978 - RNA, 19 nt, Artificial Sequence
  Description of Artificial Sequence: Synthetic oligonucleotide
gcggaugcccuucccgagg

SEQ ID NO: 2548979 - RNA, 19 nt, Artificial Sequence
  Description of Artificial Sequence: Synthetic oligonucleotide
ugcucugaucaugcaggaa

SEQ ID NO: 2548980 - RNA, 19 nt, Artificial Sequence
  Description of Artificial Sequence: Synthetic oligonucleotide
cuuugacuccuggaugaga

SEQ ID NO: 2548981 - RNA, 19 nt, Artificial Sequence
  Description of Artificial Sequence: Synthetic oligonucleotide
uccucccuggacccuucuc

SEQ ID NO: 2548982 - RNA, 19 nt, Artificial Sequence
  Description of Artificial Sequence: Synthetic oligonucleotide
cuucccgagggagcccagg

SEQ ID NO: 2548983 - RNA, 19 nt, Artificial Sequence
  Description of Artificial Sequence: Synthetic oligonucleotide
cugcucugaucaugcagga

SEQ ID NO: 2548984 - RNA, 19 nt, Artificial Sequence
  Description of Artificial Sequence: Synthetic oligonucleotide
ggcggaagacgucaaacgu

SEQ ID NO: 2548985 - RNA, 19 nt, Artificial Sequence
  Description of Artificial Sequence: Synthetic oligonucleotide
ggaccuuugacuccuggau

SEQ ID NO: 2548986 - RNA, 19 nt, Artificial Sequence
  Description of Artificial Sequence: Synthetic oligonucleotide
gcaggucuccucucugccc

SEQ ID NO: 2548987 - RNA, 19 nt, Artificial Sequence
  Description of Artificial Sequence: Synthetic oligonucleotide
aggcccucuccuucugaga

SEQ ID NO: 2548988 - RNA, 19 nt, Artificial Sequence
  Description of Artificial Sequence: Synthetic oligonucleotide
agccuccugcuggggacgc

SEQ ID NO: 2548989 - RNA, 19 nt, Artificial Sequence
  Description of Artificial Sequence: Synthetic oligonucleotide
gacucugcucugagucccc

SEQ ID NO: 2548990 - RNA, 19 nt, Artificial Sequence
  Description of Artificial Sequence: Synthetic oligonucleotide
ggaggccugugacaggcca

SEQ ID NO: 2548991 - RNA, 19 nt, Artificial Sequence
  Description of Artificial Sequence: Synthetic oligonucleotide
uuucagcgacuugcugcug

SEQ ID NO: 2548992 - RNA, 19 nt, Artificial Sequence
  Description of Artificial Sequence: Synthetic oligonucleotide
cucagggcccuccagugua

SEQ ID NO: 2548993 - RNA, 19 nt, Artificial Sequence
  Description of Artificial Sequence: Synthetic oligonucleotide
agguucuggccugucguaa

SEQ ID NO: 2548994 - RNA, 19 nt, Artificial Sequence
  Description of Artificial Sequence: Synthetic oligonucleotide
aggaggccugugacaggcc

SEQ ID NO: 2548995 - RNA, 19 nt, Artificial Sequence
  Description of Artificial Sequence: Synthetic oligonucleotide
cccuggacccuucuccagg

SEQ ID NO: 2548996 - RNA, 19 nt, Artificial Sequence
  Description of Artificial Sequence: Synthetic oligonucleotide
ucuuucugcucuggcccau

SEQ ID NO: 2548997 - RNA, 19 nt, Artificial Sequence
  Description of Artificial Sequence: Synthetic oligonucleotide
acaggcucgcggaugcccu

SEQ ID NO: 2548998 - RNA, 19 nt, Artificial Sequence
  Description of Artificial Sequence: Synthetic oligonucleotide
cauuuggcagcuccugccu

SEQ ID NO: 2548999 - RNA, 19 nt, Artificial Sequence
  Description of Artificial Sequence: Synthetic oligonucleotide
cauggaccuuugacuccug

SEQ ID NO: 2549000 - RNA, 19 nt, Artificial Sequence
  Description of Artificial Sequence: Synthetic oligonucleotide
guguccccacgcugacagg

SEQ ID NO: 2549001 - RNA, 19 nt, Artificial Sequence
  Description of Artificial Sequence: Synthetic oligonucleotide
ugcccucauccuccucgac

SEQ ID NO: 2549002 - RNA, 19 nt, Artificial Sequence
  Description of Artificial Sequence: Synthetic oligonucleotide
ggggcagggaucaugccga

SEQ ID NO: 2549003 - RNA, 19 nt, Artificial Sequence
  Description of Artificial Sequence: Synthetic oligonucleotide
gggaagcagcugccggagg

SEQ ID NO: 2549004 - RNA, 19 nt, Artificial Sequence
  Description of Artificial Sequence: Synthetic oligonucleotide
guaagcgauucgaacuggu

SEQ ID NO: 2549005 - RNA, 19 nt, Artificial Sequence
  Description of Artificial Sequence: Synthetic oligonucleotide
ggggaagcagcugccggag

SEQ ID NO: 2549006 - RNA, 19 nt, Artificial Sequence
  Description of Artificial Sequence: Synthetic oligonucleotide
cgccucaccaguagacugg

SEQ ID NO: 2549007 - RNA, 19 nt, Artificial Sequence
  Description of Artificial Sequence: Synthetic oligonucleotide
ccugucguaagcgauucga

SEQ ID NO: 2549008 - RNA, 19 nt, Artificial Sequence
  Description of Artificial Sequence: Synthetic oligonucleotide
aggcucgcggaugcccuuc

SEQ ID NO: 2549009 - RNA, 19 nt, Artificial Sequence
  Description of Artificial Sequence: Synthetic oligonucleotide
auggaugggcacaguucca

SEQ ID NO: 2549010 - RNA, 19 nt, Artificial Sequence
  Description of Artificial Sequence: Synthetic oligonucleotide
gcagggaucaugccgacuu

SEQ ID NO: 2549011 - RNA, 19 nt, Artificial Sequence
  Description of Artificial Sequence: Synthetic oligonucleotide
ccgccucaccaguagacug

SEQ ID NO: 2549012 - RNA, 19 nt, Artificial Sequence
  Description of Artificial Sequence: Synthetic oligonucleotide
uggggacgccccuccucug

SEQ ID NO: 2549013 - RNA, 19 nt, Artificial Sequence
  Description of Artificial Sequence: Synthetic oligonucleotide
ccuucugagagugucccca

SEQ ID NO: 2549014 - RNA, 19 nt, Artificial Sequence
  Description of Artificial Sequence: Synthetic oligonucleotide
gcugacaggcucgcggaug

SEQ ID NO: 2549015 - RNA, 19 nt, Artificial Sequence
  Description of Artificial Sequence: Synthetic oligonucleotide
gccguggccuuccuuccag

SEQ ID NO: 2549016 - RNA, 19 nt, Artificial Sequence
  Description of Artificial Sequence: Synthetic oligonucleotide
ugacaggcucgcggaugcc

SEQ ID NO: 2549017 - RNA, 19 nt, Artificial Sequence
  Description of Artificial Sequence: Synthetic oligonucleotide
uggccugagggugcagguc

SEQ ID NO: 2549018 - RNA, 19 nt, Artificial Sequence
  Description of Artificial Sequence: Synthetic oligonucleotide
gugccagccugguccuccc

SEQ ID NO: 2549019 - RNA, 19 nt, Artificial Sequence
  Description of Artificial Sequence: Synthetic oligonucleotide
cugguucauggaccuuuga

SEQ ID NO: 2549020 - RNA, 19 nt, Artificial Sequence
  Description of Artificial Sequence: Synthetic oligonucleotide
guguagccuccugcugggg

SEQ ID NO: 2549021 - RNA, 19 nt, Artificial Sequence
  Description of Artificial Sequence: Synthetic oligonucleotide
cguaagcgauucgaacugg

SEQ ID NO: 2549022 - RNA, 19 nt, Artificial Sequence
  Description of Artificial Sequence: Synthetic oligonucleotide
cacccucacccuccuugug

SEQ ID NO: 2549023 - RNA, 19 nt, Artificial Sequence
  Description of Artificial Sequence: Synthetic oligonucleotide
gccugucguaagcgauucg

SEQ ID NO: 2549024 - RNA, 19 nt, Artificial Sequence
  Description of Artificial Sequence: Synthetic oligonucleotide
accacaggucaggguuguc

SEQ ID NO: 2549025 - RNA, 19 nt, Artificial Sequence
  Description of Artificial Sequence: Synthetic oligonucleotide
ggcccuccaguguagccuc

SEQ ID NO: 2549026 - RNA, 19 nt, Artificial Sequence
  Description of Artificial Sequence: Synthetic oligonucleotide
cugagaguguccccacgcu

SEQ ID NO: 2549027 - RNA, 19 nt, Artificial Sequence
  Description of Artificial Sequence: Synthetic oligonucleotide
augccgacuuucagcgacu

SEQ ID NO: 2549028 - RNA, 19 nt, Artificial Sequence
  Description of Artificial Sequence: Synthetic oligonucleotide
ggccugagggugcaggucu

SEQ ID NO: 2549029 - RNA, 19 nt, Artificial Sequence
  Description of Artificial Sequence: Synthetic oligonucleotide
ccuggggaagcagcugccg

SEQ ID NO: 2549030 - RNA, 19 nt, Artificial Sequence
  Description of Artificial Sequence: Synthetic oligonucleotide
ugccgacuuucagcgacuu

SEQ ID NO: 2549031 - RNA, 19 nt, Artificial Sequence
  Description of Artificial Sequence: Synthetic oligonucleotide
cagggcccuccaguguagc

SEQ ID NO: 2549032 - RNA, 19 nt, Artificial Sequence
  Description of Artificial Sequence: Synthetic oligonucleotide
gacuugcugcugauucucu

SEQ ID NO: 2549033 - RNA, 19 nt, Artificial Sequence
  Description of Artificial Sequence: Synthetic oligonucleotide
ugguccucccuggacccuu

SEQ ID NO: 2549034 - RNA, 19 nt, Artificial Sequence
  Description of Artificial Sequence: Synthetic oligonucleotide
cuggggacgccccuccucu

SEQ ID NO: 2549035 - RNA, 19 nt, Artificial Sequence
  Description of Artificial Sequence: Synthetic oligonucleotide
cuggccugucguaagcgau

SEQ ID NO: 2549036 - RNA, 19 nt, Artificial Sequence
  Description of Artificial Sequence: Synthetic oligonucleotide
gaguguccccacgcugaca

SEQ ID NO: 2549037 - RNA, 19 nt, Artificial Sequence
  Description of Artificial Sequence: Synthetic oligonucleotide
ccuuugacuccuggaugag

SEQ ID NO: 2549038 - RNA, 19 nt, Artificial Sequence
  Description of Artificial Sequence: Synthetic oligonucleotide
ggccugucguaagcgauuc

SEQ ID NO: 2549039 - RNA, 19 nt, Artificial Sequence
  Description of Artificial Sequence: Synthetic oligonucleotide
ccccgccucaccaguagac

SEQ ID NO: 2549040 - RNA, 19 nt, Artificial Sequence
  Description of Artificial Sequence: Synthetic oligonucleotide
agcccaggccguggccuuc

SEQ ID NO: 2549041 - RNA, 19 nt, Artificial Sequence
  Description of Artificial Sequence: Synthetic oligonucleotide
gccgacuuucagcgacuug

SEQ ID NO: 2549042 - RNA, 19 nt, Artificial Sequence
  Description of Artificial Sequence: Synthetic oligonucleotide
cggaagacgucaaacgugu

SEQ ID NO: 2549043 - RNA, 19 nt, Artificial Sequence
  Description of Artificial Sequence: Synthetic oligonucleotide
caccucagggcccuccagu

SEQ ID NO: 2549044 - RNA, 19 nt, Artificial Sequence
  Description of Artificial Sequence: Synthetic oligonucleotide
cgacuuccacaucaucuuc

SEQ ID NO: 2549045 - RNA, 19 nt, Artificial Sequence
  Description of Artificial Sequence: Synthetic oligonucleotide
ccucgacuuccacaucauc

SEQ ID NO: 2549046 - RNA, 19 nt, Artificial Sequence
  Description of Artificial Sequence: Synthetic oligonucleotide
ggcucgcggaugcccuucc

SEQ ID NO: 2549047 - RNA, 19 nt, Artificial Sequence
  Description of Artificial Sequence: Synthetic oligonucleotide
ggccugugacaggccaggg

SEQ ID NO: 2549048 - RNA, 19 nt, Artificial Sequence
  Description of Artificial Sequence: Synthetic oligonucleotide
cuggacccuucuccaggga

SEQ ID NO: 2549049 - RNA, 19 nt, Artificial Sequence
  Description of Artificial Sequence: Synthetic oligonucleotide
gcuggggacgccccuccuc

SEQ ID NO: 2549050 - RNA, 19 nt, Artificial Sequence
  Description of Artificial Sequence: Synthetic oligonucleotide
caggggugccagccugguc

SEQ ID NO: 2549051 - RNA, 19 nt, Artificial Sequence
  Description of Artificial Sequence: Synthetic oligonucleotide
gcccucauccuccucgacu

SEQ ID NO: 2549052 - RNA, 19 nt, Artificial Sequence
  Description of Artificial Sequence: Synthetic oligonucleotide
ggaagacgucaaacguguc

SEQ ID NO: 2549053 - RNA, 19 nt, Artificial Sequence
  Description of Artificial Sequence: Synthetic oligonucleotide
gccaggggugccagccugg

SEQ ID NO: 2549054 - RNA, 19 nt, Artificial Sequence
  Description of Artificial Sequence: Synthetic oligonucleotide
agccuagguucuggccugu

SEQ ID NO: 2549055 - RNA, 19 nt, Artificial Sequence
  Description of Artificial Sequence: Synthetic oligonucleotide
cgacuugcugcugauucuc

SEQ ID NO: 2549056 - RNA, 19 nt, Artificial Sequence
  Description of Artificial Sequence: Synthetic oligonucleotide
gcgacuugcugcugauucu

SEQ ID NO: 2549057 - RNA, 19 nt, Artificial Sequence
  Description of Artificial Sequence: Synthetic oligonucleotide
ccccuccucuggcucaccc

SEQ ID NO: 2549058 - RNA, 19 nt, Artificial Sequence
  Description of Artificial Sequence: Synthetic oligonucleotide
ccucacccuccuugugggc

SEQ ID NO: 2549059 - RNA, 19 nt, Artificial Sequence
  Description of Artificial Sequence: Synthetic oligonucleotide
uggcccgcuugugucugua

SEQ ID NO: 2549060 - RNA, 19 nt, Artificial Sequence
  Description of Artificial Sequence: Synthetic oligonucleotide
gcuggcccgcuugugucug

SEQ ID NO: 2549061 - RNA, 19 nt, Artificial Sequence
  Description of Artificial Sequence: Synthetic oligonucleotide
cccuccuugugggcugugg

SEQ ID NO: 2549062 - RNA, 19 nt, Artificial Sequence
  Description of Artificial Sequence: Synthetic oligonucleotide
ccgcuugugucuguacauc

SEQ ID NO: 2549063 - RNA, 19 nt, Artificial Sequence
  Description of Artificial Sequence: Synthetic oligonucleotide
ccucuggcucacccucacc

SEQ ID NO: 2549064 - RNA, 19 nt, Artificial Sequence
  Description of Artificial Sequence: Synthetic oligonucleotide
gccuguggccugagggugc

SEQ ID NO: 2549065 - RNA, 19 nt, Artificial Sequence
  Description of Artificial Sequence: Synthetic oligonucleotide
gcaucaugcgcuggcggaa

SEQ ID NO: 2549066 - RNA, 19 nt, Artificial Sequence
  Description of Artificial Sequence: Synthetic oligonucleotide
ccguggccuuccuuccagc

SEQ ID NO: 2549067 - RNA, 19 nt, Artificial Sequence
  Description of Artificial Sequence: Synthetic oligonucleotide
ggcccgcuugugucuguac

SEQ ID NO: 2549068 - RNA, 19 nt, Artificial Sequence
  Description of Artificial Sequence: Synthetic oligonucleotide
gccucaccaguagacugga

SEQ ID NO: 2549069 - RNA, 19 nt, Artificial Sequence
  Description of Artificial Sequence: Synthetic oligonucleotide
cgcggaugcccuucccgag

SEQ ID NO: 2549070 - RNA, 19 nt, Artificial Sequence
  Description of Artificial Sequence: Synthetic oligonucleotide
gcgcuggcggaagacguca

SEQ ID NO: 2549071 - RNA, 19 nt, Artificial Sequence
  Description of Artificial Sequence: Synthetic oligonucleotide
gggcagggaucaugccgac

SEQ ID NO: 2549072 - RNA, 19 nt, Artificial Sequence
  Description of Artificial Sequence: Synthetic oligonucleotide
gcaccuucucacgguagaa

SEQ ID NO: 2549073 - RNA, 19 nt, Artificial Sequence
  Description of Artificial Sequence: Synthetic oligonucleotide
cccacgcugacaggcucgc

SEQ ID NO: 2549074 - RNA, 19 nt, Artificial Sequence
  Description of Artificial Sequence: Synthetic oligonucleotide
ccuggaugagacacacccu

SEQ ID NO: 2549075 - RNA, 19 nt, Artificial Sequence
  Description of Artificial Sequence: Synthetic oligonucleotide
acccuucuccagggaugcu

SEQ ID NO: 2549076 - RNA, 19 nt, Artificial Sequence
  Description of Artificial Sequence: Synthetic oligonucleotide
cugagggugcaggucuccu

SEQ ID NO: 2549077 - RNA, 19 nt, Artificial Sequence
  Description of Artificial Sequence: Synthetic oligonucleotide
cgauucgaacugguucaug

SEQ ID NO: 2549078 - RNA, 19 nt, Artificial Sequence
  Description of Artificial Sequence: Synthetic oligonucleotide
gaacugguucauggaccuu

SEQ ID NO: 2549079 - RNA, 19 nt, Artificial Sequence
  Description of Artificial Sequence: Synthetic oligonucleotide
ccuucucacgguagaacuu

SEQ ID NO: 2549080 - RNA, 19 nt, Artificial Sequence
  Description of Artificial Sequence: Synthetic oligonucleotide
acccuccuugugggcugug

SEQ ID NO: 2549081 - RNA, 19 nt, Artificial Sequence
  Description of Artificial Sequence: Synthetic oligonucleotide
gccuggacauuuggcagcu

SEQ ID NO: 2549082 - RNA, 19 nt, Artificial Sequence
  Description of Artificial Sequence: Synthetic oligonucleotide
guccccacgcugacaggcu

SEQ ID NO: 2549083 - RNA, 19 nt, Artificial Sequence
  Description of Artificial Sequence: Synthetic oligonucleotide
ccuccucgacuuccacauc

SEQ ID NO: 2549084 - RNA, 19 nt, Artificial Sequence
  Description of Artificial Sequence: Synthetic oligonucleotide
cccgcuugugucuguacau

SEQ ID NO: 2549085 - RNA, 19 nt, Artificial Sequence
  Description of Artificial Sequence: Synthetic oligonucleotide
gggcacaguuccagcaccu

SEQ ID NO: 2549086 - RNA, 19 nt, Artificial Sequence
  Description of Artificial Sequence: Synthetic oligonucleotide
ggagcugcccucggagccu

SEQ ID NO: 2549087 - RNA, 19 nt, Artificial Sequence
  Description of Artificial Sequence: Synthetic oligonucleotide
cgucaaacgugucuucuuu

SEQ ID NO: 2549088 - RNA, 19 nt, Artificial Sequence
  Description of Artificial Sequence: Synthetic oligonucleotide
ccuugugggcugugggacu

SEQ ID NO: 2549089 - RNA, 19 nt, Artificial Sequence
  Description of Artificial Sequence: Synthetic oligonucleotide
cugcaacaucuggaagccu

SEQ ID NO: 2549090 - RNA, 19 nt, Artificial Sequence
  Description of Artificial Sequence: Synthetic oligonucleotide
guccucccuggacccuucu

SEQ ID NO: 2549091 - RNA, 19 nt, Artificial Sequence
  Description of Artificial Sequence: Synthetic oligonucleotide
gguccucccuggacccuuc

SEQ ID NO: 2549092 - RNA, 19 nt, Artificial Sequence
  Description of Artificial Sequence: Synthetic oligonucleotide
ccacgcugacaggcucgcg

SEQ ID NO: 2549093 - RNA, 19 nt, Artificial Sequence
  Description of Artificial Sequence: Synthetic oligonucleotide
ccaggcccucuccuucuga

SEQ ID NO: 2549094 - RNA, 19 nt, Artificial Sequence
  Description of Artificial Sequence: Synthetic oligonucleotide
cgacuuucagcgacuugcu

SEQ ID NO: 2549095 - RNA, 19 nt, Artificial Sequence
  Description of Artificial Sequence: Synthetic oligonucleotide
ggagauggaugggcacagu

SEQ ID NO: 2549096 - RNA, 19 nt, Artificial Sequence
  Description of Artificial Sequence: Synthetic oligonucleotide
ggacgccccuccucuggcu

SEQ ID NO: 2549097 - RNA, 19 nt, Artificial Sequence
  Description of Artificial Sequence: Synthetic oligonucleotide
cagcugccggaggaggccu

SEQ ID NO: 2549098 - RNA, 19 nt, Artificial Sequence
  Description of Artificial Sequence: Synthetic oligonucleotide
gcccuccaguguagccucc

SEQ ID NO: 2549099 - RNA, 19 nt, Artificial Sequence
  Description of Artificial Sequence: Synthetic oligonucleotide
gccuagguucuggccuguc

SEQ ID NO: 2549100 - RNA, 19 nt, Artificial Sequence
  Description of Artificial Sequence: Synthetic oligonucleotide
ggcagggaucaugccgacu

SEQ ID NO: 2549101 - RNA, 19 nt, Artificial Sequence
  Description of Artificial Sequence: Synthetic oligonucleotide
gcccuucccgagggagccc

SEQ ID NO: 2549102 - RNA, 19 nt, Artificial Sequence
  Description of Artificial Sequence: Synthetic oligonucleotide
gcgauucgaacugguucau

SEQ ID NO: 2549103 - RNA, 19 nt, Artificial Sequence
  Description of Artificial Sequence: Synthetic oligonucleotide
cuggcccgcuugugucugu

SEQ ID NO: 2549104 - RNA, 19 nt, Artificial Sequence
  Description of Artificial Sequence: Synthetic oligonucleotide
ccuggacauuuggcagcuc

SEQ ID NO: 2549105 - RNA, 19 nt, Artificial Sequence
  Description of Artificial Sequence: Synthetic oligonucleotide
ccucagggcccuccagugu

SEQ ID NO: 2549106 - RNA, 19 nt, Artificial Sequence
  Description of Artificial Sequence: Synthetic oligonucleotide
cccuccucuggcucacccu

SEQ ID NO: 2549107 - RNA, 19 nt, Artificial Sequence
  Description of Artificial Sequence: Synthetic oligonucleotide
caggcucgcggaugcccuu

SEQ ID NO: 2549108 - RNA, 19 nt, Artificial Sequence
  Description of Artificial Sequence: Synthetic oligonucleotide
cccgccucaccaguagacu

SEQ ID NO: 2549109 - RNA, 19 nt, Artificial Sequence
  Description of Artificial Sequence: Synthetic oligonucleotide
cacccuccuugugggcugu

SEQ ID NO: 2549110 - RNA, 19 nt, Artificial Sequence
  Description of Artificial Sequence: Synthetic oligonucleotide
ccgagggagcccaggccgu

SEQ ID NO: 2549111 - RNA, 19 nt, Artificial Sequence
  Description of Artificial Sequence: Synthetic oligonucleotide
cagcgacuugcugcugauu

SEQ ID NO: 2549112 - RNA, 19 nt, Artificial Sequence
  Description of Artificial Sequence: Synthetic oligonucleotide
ccucuccuucugagagugu

SEQ ID NO: 2549113 - RNA, 19 nt, Artificial Sequence
  Description of Artificial Sequence: Synthetic oligonucleotide
cgccccuccucuggcucac

SEQ ID NO: 2549114 - RNA, 19 nt, Artificial Sequence
  Description of Artificial Sequence: Synthetic oligonucleotide
ccaggccguggccuuccuu

SEQ ID NO: 2549115 - RNA, 19 nt, Artificial Sequence
  Description of Artificial Sequence: Synthetic oligonucleotide
uguacaaccacaguuauga

SEQ ID NO: 2549116 - RNA, 19 nt, Artificial Sequence
  Description of Artificial Sequence: Synthetic oligonucleotide
uguacgagcucucaggucc

SEQ ID NO: 2549117 - RNA, 19 nt, Artificial Sequence
  Description of Artificial Sequence: Synthetic oligonucleotide
ugcuuuaucuagcagguag

SEQ ID NO: 2549118 - RNA, 19 nt, Artificial Sequence
  Description of Artificial Sequence: Synthetic oligonucleotide
uacaacugcagucccaugg

SEQ ID NO: 2549119 - RNA, 19 nt, Artificial Sequence
  Description of Artificial Sequence: Synthetic oligonucleotide
gauuuuauauuucuguaca

SEQ ID NO: 2549120 - RNA, 19 nt, Artificial Sequence
  Description of Artificial Sequence: Synthetic oligonucleotide
aagcuauacaacugcaguc

SEQ ID NO: 2549121 - RNA, 19 nt, Artificial Sequence
  Description of Artificial Sequence: Synthetic oligonucleotide
uguaccgucaccaucggcu

SEQ ID NO: 2549122 - RNA, 19 nt, Artificial Sequence
  Description of Artificial Sequence: Synthetic oligonucleotide
ugaggauaaacucugugaa

SEQ ID NO: 2549123 - RNA, 19 nt, Artificial Sequence
  Description of Artificial Sequence: Synthetic oligonucleotide
uguugcaccacucaguaau

SEQ ID NO: 2549124 - RNA, 19 nt, Artificial Sequence
  Description of Artificial Sequence: Synthetic oligonucleotide
agcuauacaacugcagucc

SEQ ID NO: 2549125 - RNA, 19 nt, Artificial Sequence
  Description of Artificial Sequence: Synthetic oligonucleotide
agauguaacagggagauga

SEQ ID NO: 2549126 - RNA, 19 nt, Artificial Sequence
  Description of Artificial Sequence: Synthetic oligonucleotide
agauacguccuccagguag

SEQ ID NO: 2549127 - RNA, 19 nt, Artificial Sequence
  Description of Artificial Sequence: Synthetic oligonucleotide
uuaguguugcaccacucag

SEQ ID NO: 2549128 - RNA, 19 nt, Artificial Sequence
  Description of Artificial Sequence: Synthetic oligonucleotide
uuggaugaucccaacauac

SEQ ID NO: 2549129 - RNA, 19 nt, Artificial Sequence
  Description of Artificial Sequence: Synthetic oligonucleotide
uuucuguacaaccacaguu

SEQ ID NO: 2549130 - RNA, 19 nt, Artificial Sequence
  Description of Artificial Sequence: Synthetic oligonucleotide
cagugcuuuaucuagcagg

SEQ ID NO: 2549131 - RNA, 19 nt, Artificial Sequence
  Description of Artificial Sequence: Synthetic oligonucleotide
ugccagauguaacagggag

SEQ ID NO: 2549132 - RNA, 19 nt, Artificial Sequence
  Description of Artificial Sequence: Synthetic oligonucleotide
acuaaaguuuccaacagug

SEQ ID NO: 2549133 - RNA, 19 nt, Artificial Sequence
  Description of Artificial Sequence: Synthetic oligonucleotide
agauucagccuccccaccc

SEQ ID NO: 2549134 - RNA, 19 nt, Artificial Sequence
  Description of Artificial Sequence: Synthetic oligonucleotide
augaggauaaacucuguga

SEQ ID NO: 2549135 - RNA, 19 nt, Artificial Sequence
  Description of Artificial Sequence: Synthetic oligonucleotide
aacuaaaguuuccaacagu

SEQ ID NO: 2549136 - RNA, 19 nt, Artificial Sequence
  Description of Artificial Sequence: Synthetic oligonucleotide
ugaggauuuuauauuucug

SEQ ID NO: 2549137 - RNA, 19 nt, Artificial Sequence
  Description of Artificial Sequence: Synthetic oligonucleotide
guagauuccccugugaagc

SEQ ID NO: 2549138 - RNA, 19 nt, Artificial Sequence
  Description of Artificial Sequence: Synthetic oligonucleotide
gaugaucugucucugguca

SEQ ID NO: 2549139 - RNA, 19 nt, Artificial Sequence
  Description of Artificial Sequence: Synthetic oligonucleotide
guuaugaggauaaacucug

SEQ ID NO: 2549140 - RNA, 19 nt, Artificial Sequence
  Description of Artificial Sequence: Synthetic oligonucleotide
cucaguaaugcauucccag

SEQ ID NO: 2549141 - RNA, 19 nt, Artificial Sequence
  Description of Artificial Sequence: Synthetic oligonucleotide
ucagcgguaguuucugggg

SEQ ID NO: 2549142 - RNA, 19 nt, Artificial Sequence
  Description of Artificial Sequence: Synthetic oligonucleotide
uuuggugaugaucugucuc

SEQ ID NO: 2549143 - RNA, 19 nt, Artificial Sequence
  Description of Artificial Sequence: Synthetic oligonucleotide
aggauaaacucugugaacu

SEQ ID NO: 2549144 - RNA, 19 nt, Artificial Sequence
  Description of Artificial Sequence: Synthetic oligonucleotide
ucugugaacuuccauccac

SEQ ID NO: 2549145 - RNA, 19 nt, Artificial Sequence
  Description of Artificial Sequence: Synthetic oligonucleotide
uguuugugaggccaaagua

SEQ ID NO: 2549146 - RNA, 19 nt, Artificial Sequence
  Description of Artificial Sequence: Synthetic oligonucleotide
aaguuuccaacagugugag

SEQ ID NO: 2549147 - RNA, 19 nt, Artificial Sequence
  Description of Artificial Sequence: Synthetic oligonucleotide
uucuguacaaccacaguua

SEQ ID NO: 2549148 - RNA, 19 nt, Artificial Sequence
  Description of Artificial Sequence: Synthetic oligonucleotide
uuguuugugaggccaaagu

SEQ ID NO: 2549149 - RNA, 19 nt, Artificial Sequence
  Description of Artificial Sequence: Synthetic oligonucleotide
aguaaugcauucccagcag

SEQ ID NO: 2549150 - RNA, 19 nt, Artificial Sequence
  Description of Artificial Sequence: Synthetic oligonucleotide
acuuggaugaucccaacau

SEQ ID NO: 2549151 - RNA, 19 nt, Artificial Sequence
  Description of Artificial Sequence: Synthetic oligonucleotide
aguuaugaggauaaacucu

SEQ ID NO: 2549152 - RNA, 19 nt, Artificial Sequence
  Description of Artificial Sequence: Synthetic oligonucleotide
uuggugaugaucugucucu

SEQ ID NO: 2549153 - RNA, 19 nt, Artificial Sequence
  Description of Artificial Sequence: Synthetic oligonucleotide
guaacagggagaugagucc

SEQ ID NO: 2549154 - RNA, 19 nt, Artificial Sequence
  Description of Artificial Sequence: Synthetic oligonucleotide
aaggaguagccguggagug

SEQ ID NO: 2549155 - RNA, 19 nt, Artificial Sequence
  Description of Artificial Sequence: Synthetic oligonucleotide
aucggcuugcaguuccugc

SEQ ID NO: 2549156 - RNA, 19 nt, Artificial Sequence
  Description of Artificial Sequence: Synthetic oligonucleotide
gacagugccagauguaaca

SEQ ID NO: 2549157 - RNA, 19 nt, Artificial Sequence
  Description of Artificial Sequence: Synthetic oligonucleotide
gaggauuuuauauuucugu

SEQ ID NO: 2549158 - RNA, 19 nt, Artificial Sequence
  Description of Artificial Sequence: Synthetic oligonucleotide
uaguagauuccccugugaa

SEQ ID NO: 2549159 - RNA, 19 nt, Artificial Sequence
  Description of Artificial Sequence: Synthetic oligonucleotide
gagccuggagggcacaugg

SEQ ID NO: 2549160 - RNA, 19 nt, Artificial Sequence
  Description of Artificial Sequence: Synthetic oligonucleotide
uccuccagguaguagauuc

SEQ ID NO: 2549161 - RNA, 19 nt, Artificial Sequence
  Description of Artificial Sequence: Synthetic oligonucleotide
cugcaauuguuugugaggc

SEQ ID NO: 2549162 - RNA, 19 nt, Artificial Sequence
  Description of Artificial Sequence: Synthetic oligonucleotide
ucugguagccugcaauugu

SEQ ID NO: 2549163 - RNA, 19 nt, Artificial Sequence
  Description of Artificial Sequence: Synthetic oligonucleotide
agcagguagggcaagacag

SEQ ID NO: 2549164 - RNA, 19 nt, Artificial Sequence
  Description of Artificial Sequence: Synthetic oligonucleotide
ugccugaagcuauacaacu

SEQ ID NO: 2549165 - RNA, 19 nt, Artificial Sequence
  Description of Artificial Sequence: Synthetic oligonucleotide
aaagguggccacaaggagu

SEQ ID NO: 2549166 - RNA, 19 nt, Artificial Sequence
  Description of Artificial Sequence: Synthetic oligonucleotide
cucuccaagugucugguag

SEQ ID NO: 2549167 - RNA, 19 nt, Artificial Sequence
  Description of Artificial Sequence: Synthetic oligonucleotide
uaaugcauucccagcagaa

SEQ ID NO: 2549168 - RNA, 19 nt, Artificial Sequence
  Description of Artificial Sequence: Synthetic oligonucleotide
acauacuccucuccaagug

SEQ ID NO: 2549169 - RNA, 19 nt, Artificial Sequence
  Description of Artificial Sequence: Synthetic oligonucleotide
gaagcuauacaacugcagu

SEQ ID NO: 2549170 - RNA, 19 nt, Artificial Sequence
  Description of Artificial Sequence: Synthetic oligonucleotide
agugcaaccagcacuccac

SEQ ID NO: 2549171 - RNA, 19 nt, Artificial Sequence
  Description of Artificial Sequence: Synthetic oligonucleotide
uggagugcaaccagcacuc

SEQ ID NO: 2549172 - RNA, 19 nt, Artificial Sequence
  Description of Artificial Sequence: Synthetic oligonucleotide
aggauuuuauauuucugua

SEQ ID NO: 2549173 - RNA, 19 nt, Artificial Sequence
  Description of Artificial Sequence: Synthetic oligonucleotide
ucuguacaaccacaguuau

SEQ ID NO: 2549174 - RNA, 19 nt, Artificial Sequence
  Description of Artificial Sequence: Synthetic oligonucleotide
uuuaucuagcagguagggc

SEQ ID NO: 2549175 - RNA, 19 nt, Artificial Sequence
  Description of Artificial Sequence: Synthetic oligonucleotide
uccuccaagcauagggugc

SEQ ID NO: 2549176 - RNA, 19 nt, Artificial Sequence
  Description of Artificial Sequence: Synthetic oligonucleotide
cuuccagggaacuccugcg

SEQ ID NO: 2549177 - RNA, 19 nt, Artificial Sequence
  Description of Artificial Sequence: Synthetic oligonucleotide
gucagcgguaguuucuggg

SEQ ID NO: 2549178 - RNA, 19 nt, Artificial Sequence
  Description of Artificial Sequence: Synthetic oligonucleotide
ugcauaguggggcucugca

SEQ ID NO: 2549179 - RNA, 19 nt, Artificial Sequence
  Description of Artificial Sequence: Synthetic oligonucleotide
gggacauucugucuuagug

SEQ ID NO: 2549180 - RNA, 19 nt, Artificial Sequence
  Description of Artificial Sequence: Synthetic oligonucleotide
agcucugucuuccagggaa

SEQ ID NO: 2549181 - RNA, 19 nt, Artificial Sequence
  Description of Artificial Sequence: Synthetic oligonucleotide
ucuccaagugucugguagc

SEQ ID NO: 2549182 - RNA, 19 nt, Artificial Sequence
  Description of Artificial Sequence: Synthetic oligonucleotide
gcuuguacgagcucucagg

SEQ ID NO: 2549183 - RNA, 19 nt, Artificial Sequence
  Description of Artificial Sequence: Synthetic oligonucleotide
augcauucccagcagaaaa

SEQ ID NO: 2549184 - RNA, 19 nt, Artificial Sequence
  Description of Artificial Sequence: Synthetic oligonucleotide
aguguugcaccacucagua

SEQ ID NO: 2549185 - RNA, 19 nt, Artificial Sequence
  Description of Artificial Sequence: Synthetic oligonucleotide
caggcaagcggcgaguucg

SEQ ID NO: 2549186 - RNA, 19 nt, Artificial Sequence
  Description of Artificial Sequence: Synthetic oligonucleotide
uaguguugcaccacucagu

SEQ ID NO: 2549187 - RNA, 19 nt, Artificial Sequence
  Description of Artificial Sequence: Synthetic oligonucleotide
aagcccguguaccgucacc

SEQ ID NO: 2549188 - RNA, 19 nt, Artificial Sequence
  Description of Artificial Sequence: Synthetic oligonucleotide
aguucggagauacguccuc

SEQ ID NO: 2549189 - RNA, 19 nt, Artificial Sequence
  Description of Artificial Sequence: Synthetic oligonucleotide
gguagggcaagacagcaug

SEQ ID NO: 2549190 - RNA, 19 nt, Artificial Sequence
  Description of Artificial Sequence: Synthetic oligonucleotide
ugcaaccagcacuccacgg

SEQ ID NO: 2549191 - RNA, 19 nt, Artificial Sequence
  Description of Artificial Sequence: Synthetic oligonucleotide
caaccagcacuccacggcg

SEQ ID NO: 2549192 - RNA, 19 nt, Artificial Sequence
  Description of Artificial Sequence: Synthetic oligonucleotide
ccaaacuaaaguuuccaac

SEQ ID NO: 2549193 - RNA, 19 nt, Artificial Sequence
  Description of Artificial Sequence: Synthetic oligonucleotide
ugcaccacucaguaaugca

SEQ ID NO: 2549194 - RNA, 19 nt, Artificial Sequence
  Description of Artificial Sequence: Synthetic oligonucleotide
gauguaacagggagaugag

SEQ ID NO: 2549195 - RNA, 19 nt, Artificial Sequence
  Description of Artificial Sequence: Synthetic oligonucleotide
cacaguuaugaggauaaac

SEQ ID NO: 2549196 - RNA, 19 nt, Artificial Sequence
  Description of Artificial Sequence: Synthetic oligonucleotide
agugcuuuaucuagcaggu

SEQ ID NO: 2549197 - RNA, 19 nt, Artificial Sequence
  Description of Artificial Sequence: Synthetic oligonucleotide
ugcagucccauggacagug

SEQ ID NO: 2549198 - RNA, 19 nt, Artificial Sequence
  Description of Artificial Sequence: Synthetic oligonucleotide
uucguuccuccaagcauag

SEQ ID NO: 2549199 - RNA, 19 nt, Artificial Sequence
  Description of Artificial Sequence: Synthetic oligonucleotide
uuaugaggauaaacucugu

SEQ ID NO: 2549200 - RNA, 19 nt, Artificial Sequence
  Description of Artificial Sequence: Synthetic oligonucleotide
gucgguagcuuguacgagc

SEQ ID NO: 2549201 - RNA, 19 nt, Artificial Sequence
  Description of Artificial Sequence: Synthetic oligonucleotide
gcagcagugcuuuaucuag

SEQ ID NO: 2549202 - RNA, 19 nt, Artificial Sequence
  Description of Artificial Sequence: Synthetic oligonucleotide
agggcaagacagcauggag

SEQ ID NO: 2549203 - RNA, 19 nt, Artificial Sequence
  Description of Artificial Sequence: Synthetic oligonucleotide
gcauagggugcauaguggg

SEQ ID NO: 2549204 - RNA, 19 nt, Artificial Sequence
  Description of Artificial Sequence: Synthetic oligonucleotide
ucgguagcuuguacgagcu

SEQ ID NO: 2549205 - RNA, 19 nt, Artificial Sequence
  Description of Artificial Sequence: Synthetic oligonucleotide
ucggagauacguccuccag

SEQ ID NO: 2549206 - RNA, 19 nt, Artificial Sequence
  Description of Artificial Sequence: Synthetic oligonucleotide
agcacuccacggcggagcc

SEQ ID NO: 2549207 - RNA, 19 nt, Artificial Sequence
  Description of Artificial Sequence: Synthetic oligonucleotide
uccagguaguagauucccc

SEQ ID NO: 2549208 - RNA, 19 nt, Artificial Sequence
  Description of Artificial Sequence: Synthetic oligonucleotide
ucuuggguaggggacauuc

SEQ ID NO: 2549209 - RNA, 19 nt, Artificial Sequence
  Description of Artificial Sequence: Synthetic oligonucleotide
gauucagccuccccacccc

SEQ ID NO: 2549210 - RNA, 19 nt, Artificial Sequence
  Description of Artificial Sequence: Synthetic oligonucleotide
aaacucugugaacuuccau

SEQ ID NO: 2549211 - RNA, 19 nt, Artificial Sequence
  Description of Artificial Sequence: Synthetic oligonucleotide
agcagugcuuuaucuagca

SEQ ID NO: 2549212 - RNA, 19 nt, Artificial Sequence
  Description of Artificial Sequence: Synthetic oligonucleotide
acaacugcagucccaugga

SEQ ID NO: 2549213 - RNA, 19 nt, Artificial Sequence
  Description of Artificial Sequence: Synthetic oligonucleotide
cugugaagcccguguaccg

SEQ ID NO: 2549214 - RNA, 19 nt, Artificial Sequence
  Description of Artificial Sequence: Synthetic oligonucleotide
uccaacagugugaggauuu

SEQ ID NO: 2549215 - RNA, 19 nt, Artificial Sequence
  Description of Artificial Sequence: Synthetic oligonucleotide
cuggagggcacauggcugc

SEQ ID NO: 2549216 - RNA, 19 nt, Artificial Sequence
  Description of Artificial Sequence: Synthetic oligonucleotide
uagccguggagugucuucg

SEQ ID NO: 2549217 - RNA, 19 nt, Artificial Sequence
  Description of Artificial Sequence: Synthetic oligonucleotide
uagccugcaauuguuugug

SEQ ID NO: 2549218 - RNA, 19 nt, Artificial Sequence
  Description of Artificial Sequence: Synthetic oligonucleotide
ucuuaguguugcaccacuc

SEQ ID NO: 2549219 - RNA, 19 nt, Artificial Sequence
  Description of Artificial Sequence: Synthetic oligonucleotide
accgucaccaucggcuugc

SEQ ID NO: 2549220 - RNA, 19 nt, Artificial Sequence
  Description of Artificial Sequence: Synthetic oligonucleotide
agguaguagauuccccugu

SEQ ID NO: 2549221 - RNA, 19 nt, Artificial Sequence
  Description of Artificial Sequence: Synthetic oligonucleotide
gugucuucguuccuccaag

SEQ ID NO: 2549222 - RNA, 19 nt, Artificial Sequence
  Description of Artificial Sequence: Synthetic oligonucleotide
caguaaugcauucccagca

SEQ ID NO: 2549223 - RNA, 19 nt, Artificial Sequence
  Description of Artificial Sequence: Synthetic oligonucleotide
uagauuccccugugaagcc

SEQ ID NO: 2549224 - RNA, 19 nt, Artificial Sequence
  Description of Artificial Sequence: Synthetic oligonucleotide
agcuuguacgagcucucag

SEQ ID NO: 2549225 - RNA, 19 nt, Artificial Sequence
  Description of Artificial Sequence: Synthetic oligonucleotide
aacugcagucccauggaca

SEQ ID NO: 2549226 - RNA, 19 nt, Artificial Sequence
  Description of Artificial Sequence: Synthetic oligonucleotide
auacuccucuccaaguguc

SEQ ID NO: 2549227 - RNA, 19 nt, Artificial Sequence
  Description of Artificial Sequence: Synthetic oligonucleotide
agcagucgguagcuuguac

SEQ ID NO: 2549228 - RNA, 19 nt, Artificial Sequence
  Description of Artificial Sequence: Synthetic oligonucleotide
cuuaguguugcaccacuca

SEQ ID NO: 2549229 - RNA, 19 nt, Artificial Sequence
  Description of Artificial Sequence: Synthetic oligonucleotide
ucccaacauacuccucucc

SEQ ID NO: 2549230 - RNA, 19 nt, Artificial Sequence
  Description of Artificial Sequence: Synthetic oligonucleotide
ccguguaccgucaccaucg

SEQ ID NO: 2549231 - RNA, 19 nt, Artificial Sequence
  Description of Artificial Sequence: Synthetic oligonucleotide
uucugucuuaguguugcac

SEQ ID NO: 2549232 - RNA, 19 nt, Artificial Sequence
  Description of Artificial Sequence: Synthetic oligonucleotide
ucuggucagcgguaguuuc

SEQ ID NO: 2549233 - RNA, 19 nt, Artificial Sequence
  Description of Artificial Sequence: Synthetic oligonucleotide
ugucuucguuccuccaagc

SEQ ID NO: 2549234 - RNA, 19 nt, Artificial Sequence
  Description of Artificial Sequence: Synthetic oligonucleotide
ugaucugucucuggucagc

SEQ ID NO: 2549235 - RNA, 19 nt, Artificial Sequence
  Description of Artificial Sequence: Synthetic oligonucleotide
gucaccaucggcuugcagu

SEQ ID NO: 2549236 - RNA, 19 nt, Artificial Sequence
  Description of Artificial Sequence: Synthetic oligonucleotide
augaucugucucuggucag

SEQ ID NO: 2549237 - RNA, 19 nt, Artificial Sequence
  Description of Artificial Sequence: Synthetic oligonucleotide
ugucugguagccugcaauu

SEQ ID NO: 2549238 - RNA, 19 nt, Artificial Sequence
  Description of Artificial Sequence: Synthetic oligonucleotide
cagguaguagauuccccug

SEQ ID NO: 2549239 - RNA, 19 nt, Artificial Sequence
  Description of Artificial Sequence: Synthetic oligonucleotide
uucggagauacguccucca

SEQ ID NO: 2549240 - RNA, 19 nt, Artificial Sequence
  Description of Artificial Sequence: Synthetic oligonucleotide
aagguggccacaaggagua

SEQ ID NO: 2549241 - RNA, 19 nt, Artificial Sequence
  Description of Artificial Sequence: Synthetic oligonucleotide
agcgguaguuucuggggug

SEQ ID NO: 2549242 - RNA, 19 nt, Artificial Sequence
  Description of Artificial Sequence: Synthetic oligonucleotide
cauaguggggcucugcaaa

SEQ ID NO: 2549243 - RNA, 19 nt, Artificial Sequence
  Description of Artificial Sequence: Synthetic oligonucleotide
gugaggauuuuauauuucu

SEQ ID NO: 2549244 - RNA, 19 nt, Artificial Sequence
  Description of Artificial Sequence: Synthetic oligonucleotide
ugcggugcagccuccacuc

SEQ ID NO: 2549245 - RNA, 19 nt, Artificial Sequence
  Description of Artificial Sequence: Synthetic oligonucleotide
uccccugugaagcccgugu

SEQ ID NO: 2549246 - RNA, 19 nt, Artificial Sequence
  Description of Artificial Sequence: Synthetic oligonucleotide
accacaguuaugaggauaa

SEQ ID NO: 2549247 - RNA, 19 nt, Artificial Sequence
  Description of Artificial Sequence: Synthetic oligonucleotide
gcuuuaucuagcagguagg

SEQ ID NO: 2549248 - RNA, 19 nt, Artificial Sequence
  Description of Artificial Sequence: Synthetic oligonucleotide
guaaugcauucccagcaga

SEQ ID NO: 2549249 - RNA, 19 nt, Artificial Sequence
  Description of Artificial Sequence: Synthetic oligonucleotide
gacauucugucuuaguguu

SEQ ID NO: 2549250 - RNA, 19 nt, Artificial Sequence
  Description of Artificial Sequence: Synthetic oligonucleotide
aguuucuggggugggcacg

SEQ ID NO: 2549251 - RNA, 19 nt, Artificial Sequence
  Description of Artificial Sequence: Synthetic oligonucleotide
guagggcaagacagcaugg

SEQ ID NO: 2549252 - RNA, 19 nt, Artificial Sequence
  Description of Artificial Sequence: Synthetic oligonucleotide
ggugaugaucugucucugg

SEQ ID NO: 2549253 - RNA, 19 nt, Artificial Sequence
  Description of Artificial Sequence: Synthetic oligonucleotide
cuguacaaccacaguuaug

SEQ ID NO: 2549254 - RNA, 19 nt, Artificial Sequence
  Description of Artificial Sequence: Synthetic oligonucleotide
cuucguuccuccaagcaua

SEQ ID NO: 2549255 - RNA, 19 nt, Artificial Sequence
  Description of Artificial Sequence: Synthetic oligonucleotide
uugcggugcagccuccacu

SEQ ID NO: 2549256 - RNA, 19 nt, Artificial Sequence
  Description of Artificial Sequence: Synthetic oligonucleotide
acagugugaggauuuuaua

SEQ ID NO: 2549257 - RNA, 19 nt, Artificial Sequence
  Description of Artificial Sequence: Synthetic oligonucleotide
caagcggcgaguucggaga

SEQ ID NO: 2549258 - RNA, 19 nt, Artificial Sequence
  Description of Artificial Sequence: Synthetic oligonucleotide
cagcagugcuuuaucuagc

SEQ ID NO: 2549259 - RNA, 19 nt, Artificial Sequence
  Description of Artificial Sequence: Synthetic oligonucleotide
ugaagcccguguaccguca

SEQ ID NO: 2549260 - RNA, 19 nt, Artificial Sequence
  Description of Artificial Sequence: Synthetic oligonucleotide
gucccauggacagugccag

SEQ ID NO: 2549261 - RNA, 19 nt, Artificial Sequence
  Description of Artificial Sequence: Synthetic oligonucleotide
gcaaccagcacuccacggc

SEQ ID NO: 2549262 - RNA, 19 nt, Artificial Sequence
  Description of Artificial Sequence: Synthetic oligonucleotide
cugaagcuauacaacugca

SEQ ID NO: 2549263 - RNA, 19 nt, Artificial Sequence
  Description of Artificial Sequence: Synthetic oligonucleotide
gguaguagauuccccugug

SEQ ID NO: 2549264 - RNA, 19 nt, Artificial Sequence
  Description of Artificial Sequence: Synthetic oligonucleotide
uugcaccacucaguaaugc

SEQ ID NO: 2549265 - RNA, 19 nt, Artificial Sequence
  Description of Artificial Sequence: Synthetic oligonucleotide
ugugaagcccguguaccgu

SEQ ID NO: 2549266 - RNA, 19 nt, Artificial Sequence
  Description of Artificial Sequence: Synthetic oligonucleotide
cauggagugcaaccagcac

SEQ ID NO: 2549267 - RNA, 19 nt, Artificial Sequence
  Description of Artificial Sequence: Synthetic oligonucleotide
gagcucucagguccucucc

SEQ ID NO: 2549268 - RNA, 19 nt, Artificial Sequence
  Description of Artificial Sequence: Synthetic oligonucleotide
uccacggcggagccuggag

SEQ ID NO: 2549269 - RNA, 19 nt, Artificial Sequence
  Description of Artificial Sequence: Synthetic oligonucleotide
uagggcaagacagcaugga

SEQ ID NO: 2549270 - RNA, 19 nt, Artificial Sequence
  Description of Artificial Sequence: Synthetic oligonucleotide
ugcggugggacagguugcg

SEQ ID NO: 2549271 - RNA, 19 nt, Artificial Sequence
  Description of Artificial Sequence: Synthetic oligonucleotide
guaguagauuccccuguga

SEQ ID NO: 2549272 - RNA, 19 nt, Artificial Sequence
  Description of Artificial Sequence: Synthetic oligonucleotide
gcuauacaacugcaguccc

SEQ ID NO: 2549273 - RNA, 19 nt, Artificial Sequence
  Description of Artificial Sequence: Synthetic oligonucleotide
cuauacaacugcaguccca

SEQ ID NO: 2549274 - RNA, 19 nt, Artificial Sequence
  Description of Artificial Sequence: Synthetic oligonucleotide
ucuagcagguagggcaaga

SEQ ID NO: 2549275 - RNA, 19 nt, Artificial Sequence
  Description of Artificial Sequence: Synthetic oligonucleotide
cagggaacuccugcggugg

SEQ ID NO: 2549276 - RNA, 19 nt, Artificial Sequence
  Description of Artificial Sequence: Synthetic oligonucleotide
ugucuuaguguugcaccac

SEQ ID NO: 2549277 - RNA, 19 nt, Artificial Sequence
  Description of Artificial Sequence: Synthetic oligonucleotide
cuuccuggcucgcugcuuc

SEQ ID NO: 2549278 - RNA, 19 nt, Artificial Sequence
  Description of Artificial Sequence: Synthetic oligonucleotide
uggucagcgguaguuucug

SEQ ID NO: 2549279 - RNA, 19 nt, Artificial Sequence
  Description of Artificial Sequence: Synthetic oligonucleotide
cuaaaguuuccaacagugu

SEQ ID NO: 2549280 - RNA, 19 nt, Artificial Sequence
  Description of Artificial Sequence: Synthetic oligonucleotide
cagucgguagcuuguacga

SEQ ID NO: 2549281 - RNA, 19 nt, Artificial Sequence
  Description of Artificial Sequence: Synthetic oligonucleotide
uuguacgagcucucagguc

SEQ ID NO: 2549282 - RNA, 19 nt, Artificial Sequence
  Description of Artificial Sequence: Synthetic oligonucleotide
acguucuucuuggguaggg

SEQ ID NO: 2549283 - RNA, 19 nt, Artificial Sequence
  Description of Artificial Sequence: Synthetic oligonucleotide
uggugaugaucugucucug

SEQ ID NO: 2549284 - RNA, 19 nt, Artificial Sequence
  Description of Artificial Sequence: Synthetic oligonucleotide
gcaauuguuugugaggcca

SEQ ID NO: 2549285 - RNA, 19 nt, Artificial Sequence
  Description of Artificial Sequence: Synthetic oligonucleotide
cagucccauggacagugcc

SEQ ID NO: 2549286 - RNA, 19 nt, Artificial Sequence
  Description of Artificial Sequence: Synthetic oligonucleotide
uggagugucuucguuccuc

SEQ ID NO: 2549287 - RNA, 19 nt, Artificial Sequence
  Description of Artificial Sequence: Synthetic oligonucleotide
agcucucagguccucucca

SEQ ID NO: 2549288 - RNA, 19 nt, Artificial Sequence
  Description of Artificial Sequence: Synthetic oligonucleotide
cagaaaagguggccacaag

SEQ ID NO: 2549289 - RNA, 19 nt, Artificial Sequence
  Description of Artificial Sequence: Synthetic oligonucleotide
cagcauggagugcaaccag

SEQ ID NO: 2549290 - RNA, 19 nt, Artificial Sequence
  Description of Artificial Sequence: Synthetic oligonucleotide
auccacuucuuggagcugu

SEQ ID NO: 2549291 - RNA, 19 nt, Artificial Sequence
  Description of Artificial Sequence: Synthetic oligonucleotide
gucuucguuccuccaagca

SEQ ID NO: 2549292 - RNA, 19 nt, Artificial Sequence
  Description of Artificial Sequence: Synthetic oligonucleotide
agacagcauggagugcaac

SEQ ID NO: 2549293 - RNA, 19 nt, Artificial Sequence
  Description of Artificial Sequence: Synthetic oligonucleotide
ccugcggugggacagguug

SEQ ID NO: 2549294 - RNA, 19 nt, Artificial Sequence
  Description of Artificial Sequence: Synthetic oligonucleotide
cgaguucggagauacgucc

SEQ ID NO: 2549295 - RNA, 19 nt, Artificial Sequence
  Description of Artificial Sequence: Synthetic oligonucleotide
guucggagauacguccucc

SEQ ID NO: 2549296 - RNA, 19 nt, Artificial Sequence
  Description of Artificial Sequence: Synthetic oligonucleotide
ggagauacguccuccaggu

SEQ ID NO: 2549297 - RNA, 19 nt, Artificial Sequence
  Description of Artificial Sequence: Synthetic oligonucleotide
ggguccacuuggaugaucc

SEQ ID NO: 2549298 - RNA, 19 nt, Artificial Sequence
  Description of Artificial Sequence: Synthetic oligonucleotide
gagaugagucccagcaguc

SEQ ID NO: 2549299 - RNA, 19 nt, Artificial Sequence
  Description of Artificial Sequence: Synthetic oligonucleotide
agggaacuccugcgguggg

SEQ ID NO: 2549300 - RNA, 19 nt, Artificial Sequence
  Description of Artificial Sequence: Synthetic oligonucleotide
agucgguagcuuguacgag

SEQ ID NO: 2549301 - RNA, 19 nt, Artificial Sequence
  Description of Artificial Sequence: Synthetic oligonucleotide
ucucuggucagcgguaguu

SEQ ID NO: 2549302 - RNA, 19 nt, Artificial Sequence
  Description of Artificial Sequence: Synthetic oligonucleotide
caacugcagucccauggac

SEQ ID NO: 2549303 - RNA, 19 nt, Artificial Sequence
  Description of Artificial Sequence: Synthetic oligonucleotide
guagccugcaauuguuugu

SEQ ID NO: 2549304 - RNA, 19 nt, Artificial Sequence
  Description of Artificial Sequence: Synthetic oligonucleotide
cuuggaugaucccaacaua

SEQ ID NO: 2549305 - RNA, 19 nt, Artificial Sequence
  Description of Artificial Sequence: Synthetic oligonucleotide
uaccgucaccaucggcuug

SEQ ID NO: 2549306 - RNA, 19 nt, Artificial Sequence
  Description of Artificial Sequence: Synthetic oligonucleotide
guugcaccacucaguaaug

SEQ ID NO: 2549307 - RNA, 19 nt, Artificial Sequence
  Description of Artificial Sequence: Synthetic oligonucleotide
cuuguacgagcucucaggu

SEQ ID NO: 2549308 - RNA, 19 nt, Artificial Sequence
  Description of Artificial Sequence: Synthetic oligonucleotide
gucugguagccugcaauug

SEQ ID NO: 2549309 - RNA, 19 nt, Artificial Sequence
  Description of Artificial Sequence: Synthetic oligonucleotide
aagugucugguagccugca

SEQ ID NO: 2549310 - RNA, 19 nt, Artificial Sequence
  Description of Artificial Sequence: Synthetic oligonucleotide
cacuccacggcggagccug

SEQ ID NO: 2549311 - RNA, 19 nt, Artificial Sequence
  Description of Artificial Sequence: Synthetic oligonucleotide
cguggagugucuucguucc

SEQ ID NO: 2549312 - RNA, 19 nt, Artificial Sequence
  Description of Artificial Sequence: Synthetic oligonucleotide
guagccguggagugucuuc

SEQ ID NO: 2549313 - RNA, 19 nt, Artificial Sequence
  Description of Artificial Sequence: Synthetic oligonucleotide
gcaagcggcgaguucggag

SEQ ID NO: 2549314 - RNA, 19 nt, Artificial Sequence
  Description of Artificial Sequence: Synthetic oligonucleotide
agcccguguaccgucacca

SEQ ID NO: 2549315 - RNA, 19 nt, Artificial Sequence
  Description of Artificial Sequence: Synthetic oligonucleotide
ggagaugagucccagcagu

SEQ ID NO: 2549316 - RNA, 19 nt, Artificial Sequence
  Description of Artificial Sequence: Synthetic oligonucleotide
uaggggacauucugucuua

SEQ ID NO: 2549317 - RNA, 19 nt, Artificial Sequence
  Description of Artificial Sequence: Synthetic oligonucleotide
cacuuggaugaucccaaca

SEQ ID NO: 2549318 - RNA, 19 nt, Artificial Sequence
  Description of Artificial Sequence: Synthetic oligonucleotide
aagcggcgaguucggagau

SEQ ID NO: 2549319 - RNA, 19 nt, Artificial Sequence
  Description of Artificial Sequence: Synthetic oligonucleotide
gauacguccuccagguagu

SEQ ID NO: 2549320 - RNA, 19 nt, Artificial Sequence
  Description of Artificial Sequence: Synthetic oligonucleotide
gugaagcccguguaccguc

SEQ ID NO: 2549321 - RNA, 19 nt, Artificial Sequence
  Description of Artificial Sequence: Synthetic oligonucleotide
uagcuuguacgagcucuca

SEQ ID NO: 2549322 - RNA, 19 nt, Artificial Sequence
  Description of Artificial Sequence: Synthetic oligonucleotide
ccugugaagcccguguacc

SEQ ID NO: 2549323 - RNA, 19 nt, Artificial Sequence
  Description of Artificial Sequence: Synthetic oligonucleotide
caauuguuugugaggccaa

SEQ ID NO: 2549324 - RNA, 19 nt, Artificial Sequence
  Description of Artificial Sequence: Synthetic oligonucleotide
gaagcccguguaccgucac

SEQ ID NO: 2549325 - RNA, 19 nt, Artificial Sequence
  Description of Artificial Sequence: Synthetic oligonucleotide
cauacuccucuccaagugu

SEQ ID NO: 2549326 - RNA, 19 nt, Artificial Sequence
  Description of Artificial Sequence: Synthetic oligonucleotide
uccaagugucugguagccu

SEQ ID NO: 2549327 - RNA, 19 nt, Artificial Sequence
  Description of Artificial Sequence: Synthetic oligonucleotide
caaggaguagccguggagu

SEQ ID NO: 2549328 - RNA, 19 nt, Artificial Sequence
  Description of Artificial Sequence: Synthetic oligonucleotide
cagcacuccacggcggagc

SEQ ID NO: 2549329 - RNA, 19 nt, Artificial Sequence
  Description of Artificial Sequence: Synthetic oligonucleotide
uuccaacagugugaggauu

SEQ ID NO: 2549330 - RNA, 19 nt, Artificial Sequence
  Description of Artificial Sequence: Synthetic oligonucleotide
guagcuuguacgagcucuc

SEQ ID NO: 2549331 - RNA, 19 nt, Artificial Sequence
  Description of Artificial Sequence: Synthetic oligonucleotide
gguagcuuguacgagcucu

SEQ ID NO: 2549332 - RNA, 19 nt, Artificial Sequence
  Description of Artificial Sequence: Synthetic oligonucleotide
cacguucuucuuggguagg

SEQ ID NO: 2549333 - RNA, 19 nt, Artificial Sequence
  Description of Artificial Sequence: Synthetic oligonucleotide
gucuuaguguugcaccacu

SEQ ID NO: 2549334 - RNA, 19 nt, Artificial Sequence
  Description of Artificial Sequence: Synthetic oligonucleotide
ucguuccuccaagcauagg

SEQ ID NO: 2549335 - RNA, 19 nt, Artificial Sequence
  Description of Artificial Sequence: Synthetic oligonucleotide
aggaguagccguggagugu

SEQ ID NO: 2549336 - RNA, 19 nt, Artificial Sequence
  Description of Artificial Sequence: Synthetic oligonucleotide
agccugcaauuguuuguga

SEQ ID NO: 2549337 - RNA, 19 nt, Artificial Sequence
  Description of Artificial Sequence: Synthetic oligonucleotide
cagguagggcaagacagca

SEQ ID NO: 2549338 - RNA, 19 nt, Artificial Sequence
  Description of Artificial Sequence: Synthetic oligonucleotide
guguaccgucaccaucggc

SEQ ID NO: 2549339 - RNA, 19 nt, Artificial Sequence
  Description of Artificial Sequence: Synthetic oligonucleotide
cggagauacguccuccagg

SEQ ID NO: 2549340 - RNA, 19 nt, Artificial Sequence
  Description of Artificial Sequence: Synthetic oligonucleotide
ggucagcgguaguuucugg

SEQ ID NO: 2549341 - RNA, 19 nt, Artificial Sequence
  Description of Artificial Sequence: Synthetic oligonucleotide
ccuggagggcacauggcug

SEQ ID NO: 2549342 - RNA, 19 nt, Artificial Sequence
  Description of Artificial Sequence: Synthetic oligonucleotide
gcuguuuggugaugaucug

SEQ ID NO: 2549343 - RNA, 19 nt, Artificial Sequence
  Description of Artificial Sequence: Synthetic oligonucleotide
aggggacauucugucuuag

SEQ ID NO: 2549344 - RNA, 19 nt, Artificial Sequence
  Description of Artificial Sequence: Synthetic oligonucleotide
uccaagcauagggugcaua

SEQ ID NO: 2549345 - RNA, 19 nt, Artificial Sequence
  Description of Artificial Sequence: Synthetic oligonucleotide
aucuagcagguagggcaag

SEQ ID NO: 2549346 - RNA, 19 nt, Artificial Sequence
  Description of Artificial Sequence: Synthetic oligonucleotide
guugcggugcagccuccac

SEQ ID NO: 2549347 - RNA, 19 nt, Artificial Sequence
  Description of Artificial Sequence: Synthetic oligonucleotide
acuccugcggugggacagg

SEQ ID NO: 2549348 - RNA, 19 nt, Artificial Sequence
  Description of Artificial Sequence: Synthetic oligonucleotide
gugucugguagccugcaau

SEQ ID NO: 2549349 - RNA, 19 nt, Artificial Sequence
  Description of Artificial Sequence: Synthetic oligonucleotide
agggugcauaguggggcuc

SEQ ID NO: 2549350 - RNA, 19 nt, Artificial Sequence
  Description of Artificial Sequence: Synthetic oligonucleotide
cucugugaacuuccaucca

SEQ ID NO: 2549351 - RNA, 19 nt, Artificial Sequence
  Description of Artificial Sequence: Synthetic oligonucleotide
gcgguaguuucuggggugg

SEQ ID NO: 2549352 - RNA, 19 nt, Artificial Sequence
  Description of Artificial Sequence: Synthetic oligonucleotide
ucccauggacagugccaga

SEQ ID NO: 2549353 - RNA, 19 nt, Artificial Sequence
  Description of Artificial Sequence: Synthetic oligonucleotide
ggaacuccugcggugggac

SEQ ID NO: 2549354 - RNA, 19 nt, Artificial Sequence
  Description of Artificial Sequence: Synthetic oligonucleotide
ugcugggauggguccacuu

SEQ ID NO: 2549355 - RNA, 19 nt, Artificial Sequence
  Description of Artificial Sequence: Synthetic oligonucleotide
uggggugggcacguucuuc

SEQ ID NO: 2549356 - RNA, 19 nt, Artificial Sequence
  Description of Artificial Sequence: Synthetic oligonucleotide
ccacucaguaaugcauucc

SEQ ID NO: 2549357 - RNA, 19 nt, Artificial Sequence
  Description of Artificial Sequence: Synthetic oligonucleotide
ggcucgcugcuucugccug

SEQ ID NO: 2549358 - RNA, 19 nt, Artificial Sequence
  Description of Artificial Sequence: Synthetic oligonucleotide
cagauguaacagggagaug

SEQ ID NO: 2549359 - RNA, 19 nt, Artificial Sequence
  Description of Artificial Sequence: Synthetic oligonucleotide
ggcgaguucggagauacgu

SEQ ID NO: 2549360 - RNA, 19 nt, Artificial Sequence
  Description of Artificial Sequence: Synthetic oligonucleotide
gcggcgaguucggagauac

SEQ ID NO: 2549361 - RNA, 19 nt, Artificial Sequence
  Description of Artificial Sequence: Synthetic oligonucleotide
ccguggagugucuucguuc

SEQ ID NO: 2549362 - RNA, 19 nt, Artificial Sequence
  Description of Artificial Sequence: Synthetic oligonucleotide
cccaaacuaaaguuuccaa

SEQ ID NO: 2549363 - RNA, 19 nt, Artificial Sequence
  Description of Artificial Sequence: Synthetic oligonucleotide
gcauggagugcaaccagca

SEQ ID NO: 2549364 - RNA, 19 nt, Artificial Sequence
  Description of Artificial Sequence: Synthetic oligonucleotide
gaguucggagauacguccu

SEQ ID NO: 2549365 - RNA, 19 nt, Artificial Sequence
  Description of Artificial Sequence: Synthetic oligonucleotide
ggacagugccagauguaac

SEQ ID NO: 2549366 - RNA, 19 nt, Artificial Sequence
  Description of Artificial Sequence: Synthetic oligonucleotide
uuccccugugaagcccgug

SEQ ID NO: 2549367 - RNA, 19 nt, Artificial Sequence
  Description of Artificial Sequence: Synthetic oligonucleotide
ccuggcucgcugcuucugc

SEQ ID NO: 2549368 - RNA, 19 nt, Artificial Sequence
  Description of Artificial Sequence: Synthetic oligonucleotide
acgagcucucagguccucu

SEQ ID NO: 2549369 - RNA, 19 nt, Artificial Sequence
  Description of Artificial Sequence: Synthetic oligonucleotide
gagauacguccuccaggua

SEQ ID NO: 2549370 - RNA, 19 nt, Artificial Sequence
  Description of Artificial Sequence: Synthetic oligonucleotide
ccacggcggagccuggagg

SEQ ID NO: 2549371 - RNA, 19 nt, Artificial Sequence
  Description of Artificial Sequence: Synthetic oligonucleotide
uccaggcaagcggcgaguu

SEQ ID NO: 2549372 - RNA, 19 nt, Artificial Sequence
  Description of Artificial Sequence: Synthetic oligonucleotide
gggcaagacagcauggagu

SEQ ID NO: 2549373 - RNA, 19 nt, Artificial Sequence
  Description of Artificial Sequence: Synthetic oligonucleotide
agguugcggugcagccucc

SEQ ID NO: 2549374 - RNA, 19 nt, Artificial Sequence
  Description of Artificial Sequence: Synthetic oligonucleotide
ccagguaguagauuccccu

SEQ ID NO: 2549375 - RNA, 19 nt, Artificial Sequence
  Description of Artificial Sequence: Synthetic oligonucleotide
cccugugaagcccguguac

SEQ ID NO: 2549376 - RNA, 19 nt, Artificial Sequence
  Description of Artificial Sequence: Synthetic oligonucleotide
agguagggcaagacagcau

SEQ ID NO: 2549377 - RNA, 19 nt, Artificial Sequence
  Description of Artificial Sequence: Synthetic oligonucleotide
caccacucaguaaugcauu

SEQ ID NO: 2549378 - RNA, 19 nt, Artificial Sequence
  Description of Artificial Sequence: Synthetic oligonucleotide
aguagccguggagugucuu

SEQ ID NO: 2549379 - RNA, 19 nt, Artificial Sequence
  Description of Artificial Sequence: Synthetic oligonucleotide
gugccagauguaacaggga

SEQ ID NO: 2549380 - RNA, 19 nt, Artificial Sequence
  Description of Artificial Sequence: Synthetic oligonucleotide
gcgaguucggagauacguc

SEQ ID NO: 2549381 - RNA, 19 nt, Artificial Sequence
  Description of Artificial Sequence: Synthetic oligonucleotide
cugguagccugcaauuguu

SEQ ID NO: 2549382 - RNA, 19 nt, Artificial Sequence
  Description of Artificial Sequence: Synthetic oligonucleotide
ccagauguaacagggagau

SEQ ID NO: 2549383 - RNA, 19 nt, Artificial Sequence
  Description of Artificial Sequence: Synthetic oligonucleotide
cucuaggggcagcagugcu

SEQ ID NO: 2549384 - RNA, 19 nt, Artificial Sequence
  Description of Artificial Sequence: Synthetic oligonucleotide
caagcauagggugcauagu

SEQ ID NO: 2549385 - RNA, 19 nt, Artificial Sequence
  Description of Artificial Sequence: Synthetic oligonucleotide
guuucuggggugggcacgu

SEQ ID NO: 2549386 - RNA, 19 nt, Artificial Sequence
  Description of Artificial Sequence: Synthetic oligonucleotide
cagcgguaguuucuggggu

SEQ ID NO: 2549387 - RNA, 19 nt, Artificial Sequence
  Description of Artificial Sequence: Synthetic oligonucleotide
guaccgucaccaucggcuu

SEQ ID NO: 2549388 - RNA, 19 nt, Artificial Sequence
  Description of Artificial Sequence: Synthetic oligonucleotide
uacgagcucucagguccuc

SEQ ID NO: 2549389 - RNA, 19 nt, Artificial Sequence
  Description of Artificial Sequence: Synthetic oligonucleotide
ccacuuggaugaucccaac

SEQ ID NO: 2549390 - RNA, 19 nt, Artificial Sequence
  Description of Artificial Sequence: Synthetic oligonucleotide
uccugcggugggacagguu

SEQ ID NO: 2549391 - RNA, 19 nt, Artificial Sequence
  Description of Artificial Sequence: Synthetic oligonucleotide
ggagugcaaccagcacucc

SEQ ID NO: 2549392 - RNA, 19 nt, Artificial Sequence
  Description of Artificial Sequence: Synthetic oligonucleotide
auacguccuccagguagua

SEQ ID NO: 2549393 - RNA, 19 nt, Artificial Sequence
  Description of Artificial Sequence: Synthetic oligonucleotide
uucuuggguaggggacauu

SEQ ID NO: 2549394 - RNA, 19 nt, Artificial Sequence
  Description of Artificial Sequence: Synthetic oligonucleotide
gcaccacucaguaaugcau

SEQ ID NO: 2549395 - RNA, 19 nt, Artificial Sequence
  Description of Artificial Sequence: Synthetic oligonucleotide
cguguaccgucaccaucgg

SEQ ID NO: 2549396 - RNA, 19 nt, Artificial Sequence
  Description of Artificial Sequence: Synthetic oligonucleotide
auuccccugugaagcccgu

SEQ ID NO: 2549397 - RNA, 19 nt, Artificial Sequence
  Description of Artificial Sequence: Synthetic oligonucleotide
gucccagcagucgguagcu

SEQ ID NO: 2549398 - RNA, 19 nt, Artificial Sequence
  Description of Artificial Sequence: Synthetic oligonucleotide
gugcuuuaucuagcaggua

SEQ ID NO: 2549399 - RNA, 19 nt, Artificial Sequence
  Description of Artificial Sequence: Synthetic oligonucleotide
auggguccacuuggaugau

SEQ ID NO: 2549400 - RNA, 19 nt, Artificial Sequence
  Description of Artificial Sequence: Synthetic oligonucleotide
gcucgcugcuucugccuga

SEQ ID NO: 2549401 - RNA, 19 nt, Artificial Sequence
  Description of Artificial Sequence: Synthetic oligonucleotide
gucucuggucagcgguagu

SEQ ID NO: 2549402 - RNA, 19 nt, Artificial Sequence
  Description of Artificial Sequence: Synthetic oligonucleotide
guacgagcucucagguccu

SEQ ID NO: 2549403 - RNA, 19 nt, Artificial Sequence
  Description of Artificial Sequence: Synthetic oligonucleotide
ggagcuguuuggugaugau

SEQ ID NO: 2549404 - RNA, 19 nt, Artificial Sequence
  Description of Artificial Sequence: Synthetic oligonucleotide
caaccacaguuaugaggau

SEQ ID NO: 2549405 - RNA, 19 nt, Artificial Sequence
  Description of Artificial Sequence: Synthetic oligonucleotide
ggggcucugcaaacagcuc

SEQ ID NO: 2549406 - RNA, 19 nt, Artificial Sequence
  Description of Artificial Sequence: Synthetic oligonucleotide
ccagcacuccacggcggag

SEQ ID NO: 2549407 - RNA, 19 nt, Artificial Sequence
  Description of Artificial Sequence: Synthetic oligonucleotide
cucuggucagcgguaguuu

SEQ ID NO: 2549408 - RNA, 19 nt, Artificial Sequence
  Description of Artificial Sequence: Synthetic oligonucleotide
gggauggguccacuuggau

SEQ ID NO: 2549409 - RNA, 19 nt, Artificial Sequence
  Description of Artificial Sequence: Synthetic oligonucleotide
agcggcgaguucggagaua

SEQ ID NO: 2549410 - RNA, 19 nt, Artificial Sequence
  Description of Artificial Sequence: Synthetic oligonucleotide
gguugcggugcagccucca

SEQ ID NO: 2549411 - RNA, 19 nt, Artificial Sequence
  Description of Artificial Sequence: Synthetic oligonucleotide
gggugcauaguggggcucu

SEQ ID NO: 2549412 - RNA, 19 nt, Artificial Sequence
  Description of Artificial Sequence: Synthetic oligonucleotide
cagcagucgguagcuugua

SEQ ID NO: 2549413 - RNA, 19 nt, Artificial Sequence
  Description of Artificial Sequence: Synthetic oligonucleotide
cggcgaguucggagauacg

SEQ ID NO: 2549414 - RNA, 19 nt, Artificial Sequence
  Description of Artificial Sequence: Synthetic oligonucleotide
cacuccuuccuggcucgcu

SEQ ID NO: 2549415 - RNA, 19 nt, Artificial Sequence
  Description of Artificial Sequence: Synthetic oligonucleotide
ccccugugaagcccgugua

SEQ ID NO: 2549416 - RNA, 19 nt, Artificial Sequence
  Description of Artificial Sequence: Synthetic oligonucleotide
gccguggagugucuucguu

SEQ ID NO: 2549417 - RNA, 19 nt, Artificial Sequence
  Description of Artificial Sequence: Synthetic oligonucleotide
cgguagcuuguacgagcuc

SEQ ID NO: 2549418 - RNA, 19 nt, Artificial Sequence
  Description of Artificial Sequence: Synthetic oligonucleotide
cuggggugggcacguucuu

SEQ ID NO: 2549419 - RNA, 19 nt, Artificial Sequence
  Description of Artificial Sequence: Synthetic oligonucleotide
cuccugcggugggacaggu

SEQ ID NO: 2549420 - RNA, 19 nt, Artificial Sequence
  Description of Artificial Sequence: Synthetic oligonucleotide
ccucuccaagugucuggua

SEQ ID NO: 2549421 - RNA, 19 nt, Artificial Sequence
  Description of Artificial Sequence: Synthetic oligonucleotide
ccaucggcuugcaguuccu

SEQ ID NO: 2549422 - RNA, 19 nt, Artificial Sequence
  Description of Artificial Sequence: Synthetic oligonucleotide
gcccguguaccgucaccau

SEQ ID NO: 2549423 - RNA, 19 nt, Artificial Sequence
  Description of Artificial Sequence: Synthetic oligonucleotide
ccaacagugugaggauuuu

SEQ ID NO: 2549424 - RNA, 19 nt, Artificial Sequence
  Description of Artificial Sequence: Synthetic oligonucleotide
gcggagccuggagggcaca

SEQ ID NO: 2549425 - RNA, 19 nt, Artificial Sequence
  Description of Artificial Sequence: Synthetic oligonucleotide
ccgucaccaucggcuugca

SEQ ID NO: 2549426 - RNA, 19 nt, Artificial Sequence
  Description of Artificial Sequence: Synthetic oligonucleotide
aagagaagcuuuuauagag

SEQ ID NO: 2549427 - RNA, 19 nt, Artificial Sequence
  Description of Artificial Sequence: Synthetic oligonucleotide
uuuguccaugggaacauca

SEQ ID NO: 2549428 - RNA, 19 nt, Artificial Sequence
  Description of Artificial Sequence: Synthetic oligonucleotide
gagaagcuuuuauagagga

SEQ ID NO: 2549429 - RNA, 19 nt, Artificial Sequence
  Description of Artificial Sequence: Synthetic oligonucleotide
gaagagaagcuuuuauaga

SEQ ID NO: 2549430 - RNA, 19 nt, Artificial Sequence
  Description of Artificial Sequence: Synthetic oligonucleotide
uccaugggaacaucaaaca

SEQ ID NO: 2549431 - RNA, 19 nt, Artificial Sequence
  Description of Artificial Sequence: Synthetic oligonucleotide
uguuuuguccaugggaaca

SEQ ID NO: 2549432 - RNA, 19 nt, Artificial Sequence
  Description of Artificial Sequence: Synthetic oligonucleotide
aagcuuuuauagaggaguc

SEQ ID NO: 2549433 - RNA, 19 nt, Artificial Sequence
  Description of Artificial Sequence: Synthetic oligonucleotide
gaagcuuuuauagaggagu

SEQ ID NO: 2549434 - RNA, 19 nt, Artificial Sequence
  Description of Artificial Sequence: Synthetic oligonucleotide
agcuguuuuguccauggga

SEQ ID NO: 2549435 - RNA, 19 nt, Artificial Sequence
  Description of Artificial Sequence: Synthetic oligonucleotide
agagaagcuuuuauagagg

SEQ ID NO: 2549436 - RNA, 19 nt, Artificial Sequence
  Description of Artificial Sequence: Synthetic oligonucleotide
gcuuuuauagaggagucag

SEQ ID NO: 2549437 - RNA, 19 nt, Artificial Sequence
  Description of Artificial Sequence: Synthetic oligonucleotide
uguccaugggaacaucaaa

SEQ ID NO: 2549438 - RNA, 19 nt, Artificial Sequence
  Description of Artificial Sequence: Synthetic oligonucleotide
guccaugggaacaucaaac

SEQ ID NO: 2549439 - RNA, 19 nt, Artificial Sequence
  Description of Artificial Sequence: Synthetic oligonucleotide
uuguccaugggaacaucaa

SEQ ID NO: 2549440 - RNA, 19 nt, Artificial Sequence
  Description of Artificial Sequence: Synthetic oligonucleotide
agaagcuuuuauagaggag

SEQ ID NO: 2549441 - RNA, 19 nt, Artificial Sequence
  Description of Artificial Sequence: Synthetic oligonucleotide
gagcuguuuuguccauggg

SEQ ID NO: 2549442 - RNA, 19 nt, Artificial Sequence
  Description of Artificial Sequence: Synthetic oligonucleotide
cuguuuuguccaugggaac

SEQ ID NO: 2549443 - RNA, 19 nt, Artificial Sequence
  Description of Artificial Sequence: Synthetic oligonucleotide
agcuuuuauagaggaguca

SEQ ID NO: 2549444 - RNA, 19 nt, Artificial Sequence
  Description of Artificial Sequence: Synthetic oligonucleotide
gucgucgcagcguugugga

SEQ ID NO: 2549445 - RNA, 19 nt, Artificial Sequence
  Description of Artificial Sequence: Synthetic oligonucleotide
gcuguuuuguccaugggaa

SEQ ID NO: 2549446 - RNA, 19 nt, Artificial Sequence
  Description of Artificial Sequence: Synthetic oligonucleotide
ggucgucgcagcguugugg

SEQ ID NO: 2549447 - RNA, 19 nt, Artificial Sequence
  Description of Artificial Sequence: Synthetic oligonucleotide
gcgaagagaagcuuuuaua

SEQ ID NO: 2549448 - RNA, 19 nt, Artificial Sequence
  Description of Artificial Sequence: Synthetic oligonucleotide
ucgucgcagcguuguggac

SEQ ID NO: 2549449 - RNA, 19 nt, Artificial Sequence
  Description of Artificial Sequence: Synthetic oligonucleotide
gaggggucgucgcagcguu

SEQ ID NO: 2549450 - RNA, 19 nt, Artificial Sequence
  Description of Artificial Sequence: Synthetic oligonucleotide
ggggccaggggcaccucug

SEQ ID NO: 2549451 - RNA, 19 nt, Artificial Sequence
  Description of Artificial Sequence: Synthetic oligonucleotide
gggucgucgcagcguugug

SEQ ID NO: 2549452 - RNA, 19 nt, Artificial Sequence
  Description of Artificial Sequence: Synthetic oligonucleotide
aggggucgucgcagcguug

SEQ ID NO: 2549453 - RNA, 19 nt, Artificial Sequence
  Description of Artificial Sequence: Synthetic oligonucleotide
cgucgcagcguuguggaca

SEQ ID NO: 2549454 - RNA, 19 nt, Artificial Sequence
  Description of Artificial Sequence: Synthetic oligonucleotide
ggggucgucgcagcguugu

SEQ ID NO: 2549455 - RNA, 19 nt, Artificial Sequence
  Description of Artificial Sequence: Synthetic oligonucleotide
uguaaaacuaguauuaagg

SEQ ID NO: 2549456 - RNA, 19 nt, Artificial Sequence
  Description of Artificial Sequence: Synthetic oligonucleotide
uaggauauguucaagagcc

SEQ ID NO: 2549457 - RNA, 19 nt, Artificial Sequence
  Description of Artificial Sequence: Synthetic oligonucleotide
uguucuauaauuuaggaua

SEQ ID NO: 2549458 - RNA, 19 nt, Artificial Sequence
  Description of Artificial Sequence: Synthetic oligonucleotide
agucucacagcuuaggugc

SEQ ID NO: 2549459 - RNA, 19 nt, Artificial Sequence
  Description of Artificial Sequence: Synthetic oligonucleotide
uaccauauuauccuuaugc

SEQ ID NO: 2549460 - RNA, 19 nt, Artificial Sequence
  Description of Artificial Sequence: Synthetic oligonucleotide
aauaaagucucaaaagagg

SEQ ID NO: 2549461 - RNA, 19 nt, Artificial Sequence
  Description of Artificial Sequence: Synthetic oligonucleotide
aauucuuaauuuuaauaug

SEQ ID NO: 2549462 - RNA, 19 nt, Artificial Sequence
  Description of Artificial Sequence: Synthetic oligonucleotide
aaaacagcuuuccuuaaag

SEQ ID NO: 2549463 - RNA, 19 nt, Artificial Sequence
  Description of Artificial Sequence: Synthetic oligonucleotide
aaaacugugaccagaaaag

SEQ ID NO: 2549464 - RNA, 19 nt, Artificial Sequence
  Description of Artificial Sequence: Synthetic oligonucleotide
acucacugagaacaaaucc

SEQ ID NO: 2549465 - RNA, 19 nt, Artificial Sequence
  Description of Artificial Sequence: Synthetic oligonucleotide
uuuaggauauguucaagag

SEQ ID NO: 2549466 - RNA, 19 nt, Artificial Sequence
  Description of Artificial Sequence: Synthetic oligonucleotide
accauauuauccuuaugcc

SEQ ID NO: 2549467 - RNA, 19 nt, Artificial Sequence
  Description of Artificial Sequence: Synthetic oligonucleotide
uugguuaaaugauugguag

SEQ ID NO: 2549468 - RNA, 19 nt, Artificial Sequence
  Description of Artificial Sequence: Synthetic oligonucleotide
uauaaagaggggaaaacgu

SEQ ID NO: 2549469 - RNA, 19 nt, Artificial Sequence
  Description of Artificial Sequence: Synthetic oligonucleotide
ucaaaagagggaccaaagg

SEQ ID NO: 2549470 - RNA, 19 nt, Artificial Sequence
  Description of Artificial Sequence: Synthetic oligonucleotide
uaguauuaaggcaacaaac

SEQ ID NO: 2549471 - RNA, 19 nt, Artificial Sequence
  Description of Artificial Sequence: Synthetic oligonucleotide
uaaaacuaguauuaaggca

SEQ ID NO: 2549472 - RNA, 19 nt, Artificial Sequence
  Description of Artificial Sequence: Synthetic oligonucleotide
ggugaagacaacuagagug

SEQ ID NO: 2549473 - RNA, 19 nt, Artificial Sequence
  Description of Artificial Sequence: Synthetic oligonucleotide
guaaaacuaguauuaaggc

SEQ ID NO: 2549474 - RNA, 19 nt, Artificial Sequence
  Description of Artificial Sequence: Synthetic oligonucleotide
cagagaacaguauaaagag

SEQ ID NO: 2549475 - RNA, 19 nt, Artificial Sequence
  Description of Artificial Sequence: Synthetic oligonucleotide
ucuauagccaaauguauga

SEQ ID NO: 2549476 - RNA, 19 nt, Artificial Sequence
  Description of Artificial Sequence: Synthetic oligonucleotide
uccuuaaagaaauacacau

SEQ ID NO: 2549477 - RNA, 19 nt, Artificial Sequence
  Description of Artificial Sequence: Synthetic oligonucleotide
ucccucauuucacugaugg

SEQ ID NO: 2549478 - RNA, 19 nt, Artificial Sequence
  Description of Artificial Sequence: Synthetic oligonucleotide
auaaagucucaaaagaggg

SEQ ID NO: 2549479 - RNA, 19 nt, Artificial Sequence
  Description of Artificial Sequence: Synthetic oligonucleotide
uuaggauauguucaagagc

SEQ ID NO: 2549480 - RNA, 19 nt, Artificial Sequence
  Description of Artificial Sequence: Synthetic oligonucleotide
aaagaagucucacagcuua

SEQ ID NO: 2549481 - RNA, 19 nt, Artificial Sequence
  Description of Artificial Sequence: Synthetic oligonucleotide
uucauuguaagaagugacc

SEQ ID NO: 2549482 - RNA, 19 nt, Artificial Sequence
  Description of Artificial Sequence: Synthetic oligonucleotide
cucacugagaacaaauccc

SEQ ID NO: 2549483 - RNA, 19 nt, Artificial Sequence
  Description of Artificial Sequence: Synthetic oligonucleotide
ucuauaauuuaggauaugu

SEQ ID NO: 2549484 - RNA, 19 nt, Artificial Sequence
  Description of Artificial Sequence: Synthetic oligonucleotide
uguaagaagugacccaacc

SEQ ID NO: 2549485 - RNA, 19 nt, Artificial Sequence
  Description of Artificial Sequence: Synthetic oligonucleotide
agcauuaccauauuauccu

SEQ ID NO: 2549486 - RNA, 19 nt, Artificial Sequence
  Description of Artificial Sequence: Synthetic oligonucleotide
uaaagcugcacaccgauuc

SEQ ID NO: 2549487 - RNA, 19 nt, Artificial Sequence
  Description of Artificial Sequence: Synthetic oligonucleotide
ugugguguaaaacuaguau

SEQ ID NO: 2549488 - RNA, 19 nt, Artificial Sequence
  Description of Artificial Sequence: Synthetic oligonucleotide
uucuauagccaaauguaug

SEQ ID NO: 2549489 - RNA, 19 nt, Artificial Sequence
  Description of Artificial Sequence: Synthetic oligonucleotide
gaaaccggggcguucaagg

SEQ ID NO: 2549490 - RNA, 19 nt, Artificial Sequence
  Description of Artificial Sequence: Synthetic oligonucleotide
ucuuaauucuuaauuuuaa

SEQ ID NO: 2549491 - RNA, 19 nt, Artificial Sequence
  Description of Artificial Sequence: Synthetic oligonucleotide
cugauaaagcugcacaccg

SEQ ID NO: 2549492 - RNA, 19 nt, Artificial Sequence
  Description of Artificial Sequence: Synthetic oligonucleotide
uaauauguccagagaacag

SEQ ID NO: 2549493 - RNA, 19 nt, Artificial Sequence
  Description of Artificial Sequence: Synthetic oligonucleotide
ucuagugaaaggcugacuu

SEQ ID NO: 2549494 - RNA, 19 nt, Artificial Sequence
  Description of Artificial Sequence: Synthetic oligonucleotide
guauaaagaggggaaaacg

SEQ ID NO: 2549495 - RNA, 19 nt, Artificial Sequence
  Description of Artificial Sequence: Synthetic oligonucleotide
agauucuuaauucuuaauu

SEQ ID NO: 2549496 - RNA, 19 nt, Artificial Sequence
  Description of Artificial Sequence: Synthetic oligonucleotide
aguauaaagaggggaaaac

SEQ ID NO: 2549497 - RNA, 19 nt, Artificial Sequence
  Description of Artificial Sequence: Synthetic oligonucleotide
agguaagaagugcugggcc

SEQ ID NO: 2549498 - RNA, 19 nt, Artificial Sequence
  Description of Artificial Sequence: Synthetic oligonucleotide
aauauguccagagaacagu

SEQ ID NO: 2549499 - RNA, 19 nt, Artificial Sequence
  Description of Artificial Sequence: Synthetic oligonucleotide
auauuauccuuaugccacc

SEQ ID NO: 2549500 - RNA, 19 nt, Artificial Sequence
  Description of Artificial Sequence: Synthetic oligonucleotide
uaagaagugacccaaccuu

SEQ ID NO: 2549501 - RNA, 19 nt, Artificial Sequence
  Description of Artificial Sequence: Synthetic oligonucleotide
gaaaagaagucucacagcu

SEQ ID NO: 2549502 - RNA, 19 nt, Artificial Sequence
  Description of Artificial Sequence: Synthetic oligonucleotide
gauugguagcuuuuguuug

SEQ ID NO: 2549503 - RNA, 19 nt, Artificial Sequence
  Description of Artificial Sequence: Synthetic oligonucleotide
aagucucacagcuuaggug

SEQ ID NO: 2549504 - RNA, 19 nt, Artificial Sequence
  Description of Artificial Sequence: Synthetic oligonucleotide
aaugauugguagcuuuugu

SEQ ID NO: 2549505 - RNA, 19 nt, Artificial Sequence
  Description of Artificial Sequence: Synthetic oligonucleotide
uguaugaaaacagcuuucc

SEQ ID NO: 2549506 - RNA, 19 nt, Artificial Sequence
  Description of Artificial Sequence: Synthetic oligonucleotide
cagcauuaccauauuaucc

SEQ ID NO: 2549507 - RNA, 19 nt, Artificial Sequence
  Description of Artificial Sequence: Synthetic oligonucleotide
uuauccuuaugccaccuga

SEQ ID NO: 2549508 - RNA, 19 nt, Artificial Sequence
  Description of Artificial Sequence: Synthetic oligonucleotide
uguucaagagcccuuguuc

SEQ ID NO: 2549509 - RNA, 19 nt, Artificial Sequence
  Description of Artificial Sequence: Synthetic oligonucleotide
uuuugguuaaaugauuggu

SEQ ID NO: 2549510 - RNA, 19 nt, Artificial Sequence
  Description of Artificial Sequence: Synthetic oligonucleotide
ucacugauggggaaaccgg

SEQ ID NO: 2549511 - RNA, 19 nt, Artificial Sequence
  Description of Artificial Sequence: Synthetic oligonucleotide
auacaacucacugagaaca

SEQ ID NO: 2549512 - RNA, 19 nt, Artificial Sequence
  Description of Artificial Sequence: Synthetic oligonucleotide
cuucauuguaagaagugac

SEQ ID NO: 2549513 - RNA, 19 nt, Artificial Sequence
  Description of Artificial Sequence: Synthetic oligonucleotide
ugguguaaaacuaguauua

SEQ ID NO: 2549514 - RNA, 19 nt, Artificial Sequence
  Description of Artificial Sequence: Synthetic oligonucleotide
aacguguucuauaauuuag

SEQ ID NO: 2549515 - RNA, 19 nt, Artificial Sequence
  Description of Artificial Sequence: Synthetic oligonucleotide
acaaacuucauuguaagaa

SEQ ID NO: 2549516 - RNA, 19 nt, Artificial Sequence
  Description of Artificial Sequence: Synthetic oligonucleotide
uucacugauggggaaaccg

SEQ ID NO: 2549517 - RNA, 19 nt, Artificial Sequence
  Description of Artificial Sequence: Synthetic oligonucleotide
caaaggucuagugaaaggc

SEQ ID NO: 2549518 - RNA, 19 nt, Artificial Sequence
  Description of Artificial Sequence: Synthetic oligonucleotide
uucuuaauucuuaauuuua

SEQ ID NO: 2549519 - RNA, 19 nt, Artificial Sequence
  Description of Artificial Sequence: Synthetic oligonucleotide
uaaagucucaaaagaggga

SEQ ID NO: 2549520 - RNA, 19 nt, Artificial Sequence
  Description of Artificial Sequence: Synthetic oligonucleotide
cuggugaagacaacuagag

SEQ ID NO: 2549521 - RNA, 19 nt, Artificial Sequence
  Description of Artificial Sequence: Synthetic oligonucleotide
aaaucccucauuucacuga

SEQ ID NO: 2549522 - RNA, 19 nt, Artificial Sequence
  Description of Artificial Sequence: Synthetic oligonucleotide
aguauuaaggcaacaaacu

SEQ ID NO: 2549523 - RNA, 19 nt, Artificial Sequence
  Description of Artificial Sequence: Synthetic oligonucleotide
gauucguucacgcugucca

SEQ ID NO: 2549524 - RNA, 19 nt, Artificial Sequence
  Description of Artificial Sequence: Synthetic oligonucleotide
aagacaacuagagugcaga

SEQ ID NO: 2549525 - RNA, 19 nt, Artificial Sequence
  Description of Artificial Sequence: Synthetic oligonucleotide
caacaaacuucauuguaag

SEQ ID NO: 2549526 - RNA, 19 nt, Artificial Sequence
  Description of Artificial Sequence: Synthetic oligonucleotide
acugagaacaaaucccuca

SEQ ID NO: 2549527 - RNA, 19 nt, Artificial Sequence
  Description of Artificial Sequence: Synthetic oligonucleotide
agaucugagggacaaucag

SEQ ID NO: 2549528 - RNA, 19 nt, Artificial Sequence
  Description of Artificial Sequence: Synthetic oligonucleotide
cacaucugagccaaggcag

SEQ ID NO: 2549529 - RNA, 19 nt, Artificial Sequence
  Description of Artificial Sequence: Synthetic oligonucleotide
uagugaaaggcugacuuag

SEQ ID NO: 2549530 - RNA, 19 nt, Artificial Sequence
  Description of Artificial Sequence: Synthetic oligonucleotide
uuaaaugauugguagcuuu

SEQ ID NO: 2549531 - RNA, 19 nt, Artificial Sequence
  Description of Artificial Sequence: Synthetic oligonucleotide
agacugaccccacagaaga

SEQ ID NO: 2549532 - RNA, 19 nt, Artificial Sequence
  Description of Artificial Sequence: Synthetic oligonucleotide
aacaaacuucauuguaaga

SEQ ID NO: 2549533 - RNA, 19 nt, Artificial Sequence
  Description of Artificial Sequence: Synthetic oligonucleotide
uccuuaugccaccugauaa

SEQ ID NO: 2549534 - RNA, 19 nt, Artificial Sequence
  Description of Artificial Sequence: Synthetic oligonucleotide
ugaccagaaaagaagucuc

SEQ ID NO: 2549535 - RNA, 19 nt, Artificial Sequence
  Description of Artificial Sequence: Synthetic oligonucleotide
gagaaaaggcagcauuacc

SEQ ID NO: 2549536 - RNA, 19 nt, Artificial Sequence
  Description of Artificial Sequence: Synthetic oligonucleotide
aacaguauaaagaggggaa

SEQ ID NO: 2549537 - RNA, 19 nt, Artificial Sequence
  Description of Artificial Sequence: Synthetic oligonucleotide
aacucacugagaacaaauc

SEQ ID NO: 2549538 - RNA, 19 nt, Artificial Sequence
  Description of Artificial Sequence: Synthetic oligonucleotide
ugccaccugauaaagcugc

SEQ ID NO: 2549539 - RNA, 19 nt, Artificial Sequence
  Description of Artificial Sequence: Synthetic oligonucleotide
acuagagugcagaauaaag

SEQ ID NO: 2549540 - RNA, 19 nt, Artificial Sequence
  Description of Artificial Sequence: Synthetic oligonucleotide
uggaaacagccugagagag

SEQ ID NO: 2549541 - RNA, 19 nt, Artificial Sequence
  Description of Artificial Sequence: Synthetic oligonucleotide
ugguuaaaugauugguagc

SEQ ID NO: 2549542 - RNA, 19 nt, Artificial Sequence
  Description of Artificial Sequence: Synthetic oligonucleotide
gauacaacucacugagaac

SEQ ID NO: 2549543 - RNA, 19 nt, Artificial Sequence
  Description of Artificial Sequence: Synthetic oligonucleotide
ugcuuuaucaggugaggga

SEQ ID NO: 2549544 - RNA, 19 nt, Artificial Sequence
  Description of Artificial Sequence: Synthetic oligonucleotide
ugauugguagcuuuuguuu

SEQ ID NO: 2549545 - RNA, 19 nt, Artificial Sequence
  Description of Artificial Sequence: Synthetic oligonucleotide
gaacaugugguguaaaacu

SEQ ID NO: 2549546 - RNA, 19 nt, Artificial Sequence
  Description of Artificial Sequence: Synthetic oligonucleotide
auuucacugauggggaaac

SEQ ID NO: 2549547 - RNA, 19 nt, Artificial Sequence
  Description of Artificial Sequence: Synthetic oligonucleotide
auuaccauauuauccuuau

SEQ ID NO: 2549548 - RNA, 19 nt, Artificial Sequence
  Description of Artificial Sequence: Synthetic oligonucleotide
aaucaggagacugacccca

SEQ ID NO: 2549549 - RNA, 19 nt, Artificial Sequence
  Description of Artificial Sequence: Synthetic oligonucleotide
aaacguguucuauaauuua

SEQ ID NO: 2549550 - RNA, 19 nt, Artificial Sequence
  Description of Artificial Sequence: Synthetic oligonucleotide
uaauuuuaauauguccaga

SEQ ID NO: 2549551 - RNA, 19 nt, Artificial Sequence
  Description of Artificial Sequence: Synthetic oligonucleotide
gugaaaggcugacuuagag

SEQ ID NO: 2549552 - RNA, 19 nt, Artificial Sequence
  Description of Artificial Sequence: Synthetic oligonucleotide
cuuuuguuuggcucuggag

SEQ ID NO: 2549553 - RNA, 19 nt, Artificial Sequence
  Description of Artificial Sequence: Synthetic oligonucleotide
caaggugucacacaugaga

SEQ ID NO: 2549554 - RNA, 19 nt, Artificial Sequence
  Description of Artificial Sequence: Synthetic oligonucleotide
aaaacguguucuauaauuu

SEQ ID NO: 2549555 - RNA, 19 nt, Artificial Sequence
  Description of Artificial Sequence: Synthetic oligonucleotide
uugcuuuaucaggugaggg

SEQ ID NO: 2549556 - RNA, 19 nt, Artificial Sequence
  Description of Artificial Sequence: Synthetic oligonucleotide
ugcagaauaaagucucaaa

SEQ ID NO: 2549557 - RNA, 19 nt, Artificial Sequence
  Description of Artificial Sequence: Synthetic oligonucleotide
cuuuucaaucuuagcacac

SEQ ID NO: 2549558 - RNA, 19 nt, Artificial Sequence
  Description of Artificial Sequence: Synthetic oligonucleotide
acacaucugagccaaggca

SEQ ID NO: 2549559 - RNA, 19 nt, Artificial Sequence
  Description of Artificial Sequence: Synthetic oligonucleotide
acacaugagaccaaaagaa

SEQ ID NO: 2549560 - RNA, 19 nt, Artificial Sequence
  Description of Artificial Sequence: Synthetic oligonucleotide
aaucccucauuucacugau

SEQ ID NO: 2549561 - RNA, 19 nt, Artificial Sequence
  Description of Artificial Sequence: Synthetic oligonucleotide
gaaaacguguucuauaauu

SEQ ID NO: 2549562 - RNA, 19 nt, Artificial Sequence
  Description of Artificial Sequence: Synthetic oligonucleotide
gaaauacacaucugagcca

SEQ ID NO: 2549563 - RNA, 19 nt, Artificial Sequence
  Description of Artificial Sequence: Synthetic oligonucleotide
aagaagugacccaaccuug

SEQ ID NO: 2549564 - RNA, 19 nt, Artificial Sequence
  Description of Artificial Sequence: Synthetic oligonucleotide
gaacaguauaaagagggga

SEQ ID NO: 2549565 - RNA, 19 nt, Artificial Sequence
  Description of Artificial Sequence: Synthetic oligonucleotide
aagagcccuuguucuauag

SEQ ID NO: 2549566 - RNA, 19 nt, Artificial Sequence
  Description of Artificial Sequence: Synthetic oligonucleotide
aaaggucuagugaaaggcu

SEQ ID NO: 2549567 - RNA, 19 nt, Artificial Sequence
  Description of Artificial Sequence: Synthetic oligonucleotide
auuguaagaagugacccaa

SEQ ID NO: 2549568 - RNA, 19 nt, Artificial Sequence
  Description of Artificial Sequence: Synthetic oligonucleotide
aaggucuagugaaaggcug

SEQ ID NO: 2549569 - RNA, 19 nt, Artificial Sequence
  Description of Artificial Sequence: Synthetic oligonucleotide
ugauaaagcugcacaccga

SEQ ID NO: 2549570 - RNA, 19 nt, Artificial Sequence
  Description of Artificial Sequence: Synthetic oligonucleotide
acuaguauuaaggcaacaa

SEQ ID NO: 2549571 - RNA, 19 nt, Artificial Sequence
  Description of Artificial Sequence: Synthetic oligonucleotide
cacacaugagaccaaaaga

SEQ ID NO: 2549572 - RNA, 19 nt, Artificial Sequence
  Description of Artificial Sequence: Synthetic oligonucleotide
ccucauuucacugaugggg

SEQ ID NO: 2549573 - RNA, 19 nt, Artificial Sequence
  Description of Artificial Sequence: Synthetic oligonucleotide
cuuaugccaccugauaaag

SEQ ID NO: 2549574 - RNA, 19 nt, Artificial Sequence
  Description of Artificial Sequence: Synthetic oligonucleotide
auguaugaaaacagcuuuc

SEQ ID NO: 2549575 - RNA, 19 nt, Artificial Sequence
  Description of Artificial Sequence: Synthetic oligonucleotide
agaagucucacagcuuagg

SEQ ID NO: 2549576 - RNA, 19 nt, Artificial Sequence
  Description of Artificial Sequence: Synthetic oligonucleotide
auggaaacagccugagaga

SEQ ID NO: 2549577 - RNA, 19 nt, Artificial Sequence
  Description of Artificial Sequence: Synthetic oligonucleotide
gagugcagaauaaagucuc

SEQ ID NO: 2549578 - RNA, 19 nt, Artificial Sequence
  Description of Artificial Sequence: Synthetic oligonucleotide
uuaccauauuauccuuaug

SEQ ID NO: 2549579 - RNA, 19 nt, Artificial Sequence
  Description of Artificial Sequence: Synthetic oligonucleotide
acguguucuauaauuuagg

SEQ ID NO: 2549580 - RNA, 19 nt, Artificial Sequence
  Description of Artificial Sequence: Synthetic oligonucleotide
gaccccacagaagagauuc

SEQ ID NO: 2549581 - RNA, 19 nt, Artificial Sequence
  Description of Artificial Sequence: Synthetic oligonucleotide
cugucauucuccagggcag

SEQ ID NO: 2549582 - RNA, 19 nt, Artificial Sequence
  Description of Artificial Sequence: Synthetic oligonucleotide
caaaucccucauuucacug

SEQ ID NO: 2549583 - RNA, 19 nt, Artificial Sequence
  Description of Artificial Sequence: Synthetic oligonucleotide
ccaaccuugcuuuaucagg

SEQ ID NO: 2549584 - RNA, 19 nt, Artificial Sequence
  Description of Artificial Sequence: Synthetic oligonucleotide
agugacccaaccuugcuuu

SEQ ID NO: 2549585 - RNA, 19 nt, Artificial Sequence
  Description of Artificial Sequence: Synthetic oligonucleotide
cacuggugaagacaacuag

SEQ ID NO: 2549586 - RNA, 19 nt, Artificial Sequence
  Description of Artificial Sequence: Synthetic oligonucleotide
ucucaaaagagggaccaaa

SEQ ID NO: 2549587 - RNA, 19 nt, Artificial Sequence
  Description of Artificial Sequence: Synthetic oligonucleotide
caaaagagggaccaaaggu

SEQ ID NO: 2549588 - RNA, 19 nt, Artificial Sequence
  Description of Artificial Sequence: Synthetic oligonucleotide
cuucuaggaacauguggug

SEQ ID NO: 2549589 - RNA, 19 nt, Artificial Sequence
  Description of Artificial Sequence: Synthetic oligonucleotide
aaccggggcguucaaggug

SEQ ID NO: 2549590 - RNA, 19 nt, Artificial Sequence
  Description of Artificial Sequence: Synthetic oligonucleotide
uggugaagacaacuagagu

SEQ ID NO: 2549591 - RNA, 19 nt, Artificial Sequence
  Description of Artificial Sequence: Synthetic oligonucleotide
cacaccgauucguucacgc

SEQ ID NO: 2549592 - RNA, 19 nt, Artificial Sequence
  Description of Artificial Sequence: Synthetic oligonucleotide
uuaggugcuuuucaaucuu

SEQ ID NO: 2549593 - RNA, 19 nt, Artificial Sequence
  Description of Artificial Sequence: Synthetic oligonucleotide
acuuagaggugagacaggu

SEQ ID NO: 2549594 - RNA, 19 nt, Artificial Sequence
  Description of Artificial Sequence: Synthetic oligonucleotide
ucugagggacaaucaggag

SEQ ID NO: 2549595 - RNA, 19 nt, Artificial Sequence
  Description of Artificial Sequence: Synthetic oligonucleotide
agagagagaaaaggcagca

SEQ ID NO: 2549596 - RNA, 19 nt, Artificial Sequence
  Description of Artificial Sequence: Synthetic oligonucleotide
auauguucaagagcccuug

SEQ ID NO: 2549597 - RNA, 19 nt, Artificial Sequence
  Description of Artificial Sequence: Synthetic oligonucleotide
ucaaggugucacacaugag

SEQ ID NO: 2549598 - RNA, 19 nt, Artificial Sequence
  Description of Artificial Sequence: Synthetic oligonucleotide
cucauuucacugaugggga

SEQ ID NO: 2549599 - RNA, 19 nt, Artificial Sequence
  Description of Artificial Sequence: Synthetic oligonucleotide
uucuaggaacauguggugu

SEQ ID NO: 2549600 - RNA, 19 nt, Artificial Sequence
  Description of Artificial Sequence: Synthetic oligonucleotide
caaucuuagcacacaucac

SEQ ID NO: 2549601 - RNA, 19 nt, Artificial Sequence
  Description of Artificial Sequence: Synthetic oligonucleotide
ucuggagguuuccauggaa

SEQ ID NO: 2549602 - RNA, 19 nt, Artificial Sequence
  Description of Artificial Sequence: Synthetic oligonucleotide
aaaccggggcguucaaggu

SEQ ID NO: 2549603 - RNA, 19 nt, Artificial Sequence
  Description of Artificial Sequence: Synthetic oligonucleotide
acaugugguguaaaacuag

SEQ ID NO: 2549604 - RNA, 19 nt, Artificial Sequence
  Description of Artificial Sequence: Synthetic oligonucleotide
ugggccagauacaacucac

SEQ ID NO: 2549605 - RNA, 19 nt, Artificial Sequence
  Description of Artificial Sequence: Synthetic oligonucleotide
aucugagggacaaucagga

SEQ ID NO: 2549606 - RNA, 19 nt, Artificial Sequence
  Description of Artificial Sequence: Synthetic oligonucleotide
uauguccagagaacaguau

SEQ ID NO: 2549607 - RNA, 19 nt, Artificial Sequence
  Description of Artificial Sequence: Synthetic oligonucleotide
cauuguaagaagugaccca

SEQ ID NO: 2549608 - RNA, 19 nt, Artificial Sequence
  Description of Artificial Sequence: Synthetic oligonucleotide
aacuagagugcagaauaaa

SEQ ID NO: 2549609 - RNA, 19 nt, Artificial Sequence
  Description of Artificial Sequence: Synthetic oligonucleotide
uauccuuaugccaccugau

SEQ ID NO: 2549610 - RNA, 19 nt, Artificial Sequence
  Description of Artificial Sequence: Synthetic oligonucleotide
aagugacccaaccuugcuu

SEQ ID NO: 2549611 - RNA, 19 nt, Artificial Sequence
  Description of Artificial Sequence: Synthetic oligonucleotide
auuauccuuaugccaccug

SEQ ID NO: 2549612 - RNA, 19 nt, Artificial Sequence
  Description of Artificial Sequence: Synthetic oligonucleotide
caccgauucguucacgcug

SEQ ID NO: 2549613 - RNA, 19 nt, Artificial Sequence
  Description of Artificial Sequence: Synthetic oligonucleotide
gauaaagcugcacaccgau

SEQ ID NO: 2549614 - RNA, 19 nt, Artificial Sequence
  Description of Artificial Sequence: Synthetic oligonucleotide
caaucaggagacugacccc

SEQ ID NO: 2549615 - RNA, 19 nt, Artificial Sequence
  Description of Artificial Sequence: Synthetic oligonucleotide
uacaacucacugagaacaa

SEQ ID NO: 2549616 - RNA, 19 nt, Artificial Sequence
  Description of Artificial Sequence: Synthetic oligonucleotide
uuguaagaagugacccaac

SEQ ID NO: 2549617 - RNA, 19 nt, Artificial Sequence
  Description of Artificial Sequence: Synthetic oligonucleotide
acuggugaagacaacuaga

SEQ ID NO: 2549618 - RNA, 19 nt, Artificial Sequence
  Description of Artificial Sequence: Synthetic oligonucleotide
ucugagccaaggcaggcuu

SEQ ID NO: 2549619 - RNA, 19 nt, Artificial Sequence
  Description of Artificial Sequence: Synthetic oligonucleotide
agaggugagacagguaaga

SEQ ID NO: 2549620 - RNA, 19 nt, Artificial Sequence
  Description of Artificial Sequence: Synthetic oligonucleotide
aggaacaugugguguaaaa

SEQ ID NO: 2549621 - RNA, 19 nt, Artificial Sequence
  Description of Artificial Sequence: Synthetic oligonucleotide
agggacaaucaggagacug

SEQ ID NO: 2549622 - RNA, 19 nt, Artificial Sequence
  Description of Artificial Sequence: Synthetic oligonucleotide
aagaagucucacagcuuag

SEQ ID NO: 2549623 - RNA, 19 nt, Artificial Sequence
  Description of Artificial Sequence: Synthetic oligonucleotide
aacuaguauuaaggcaaca

SEQ ID NO: 2549624 - RNA, 19 nt, Artificial Sequence
  Description of Artificial Sequence: Synthetic oligonucleotide
gcucuggagguuuccaugg

SEQ ID NO: 2549625 - RNA, 19 nt, Artificial Sequence
  Description of Artificial Sequence: Synthetic oligonucleotide
uucuauaauuuaggauaug

SEQ ID NO: 2549626 - RNA, 19 nt, Artificial Sequence
  Description of Artificial Sequence: Synthetic oligonucleotide
auucguucacgcuguccag

SEQ ID NO: 2549627 - RNA, 19 nt, Artificial Sequence
  Description of Artificial Sequence: Synthetic oligonucleotide
ggugucacacaugagacca

SEQ ID NO: 2549628 - RNA, 19 nt, Artificial Sequence
  Description of Artificial Sequence: Synthetic oligonucleotide
uucacgcuguccagagcag

SEQ ID NO: 2549629 - RNA, 19 nt, Artificial Sequence
  Description of Artificial Sequence: Synthetic oligonucleotide
gcuuaggugcuuuucaauc

SEQ ID NO: 2549630 - RNA, 19 nt, Artificial Sequence
  Description of Artificial Sequence: Synthetic oligonucleotide
ggaccaaaggucuagugaa

SEQ ID NO: 2549631 - RNA, 19 nt, Artificial Sequence
  Description of Artificial Sequence: Synthetic oligonucleotide
uauuauccuuaugccaccu

SEQ ID NO: 2549632 - RNA, 19 nt, Artificial Sequence
  Description of Artificial Sequence: Synthetic oligonucleotide
caucuuugccuccccagug

SEQ ID NO: 2549633 - RNA, 19 nt, Artificial Sequence
  Description of Artificial Sequence: Synthetic oligonucleotide
ugagaacaaaucccucauu

SEQ ID NO: 2549634 - RNA, 19 nt, Artificial Sequence
  Description of Artificial Sequence: Synthetic oligonucleotide
cagguaagaagugcugggc

SEQ ID NO: 2549635 - RNA, 19 nt, Artificial Sequence
  Description of Artificial Sequence: Synthetic oligonucleotide
ccuuaaagaaauacacauc

SEQ ID NO: 2549636 - RNA, 19 nt, Artificial Sequence
  Description of Artificial Sequence: Synthetic oligonucleotide
ggugagacagguaagaagu

SEQ ID NO: 2549637 - RNA, 19 nt, Artificial Sequence
  Description of Artificial Sequence: Synthetic oligonucleotide
ucauuucacugauggggaa

SEQ ID NO: 2549638 - RNA, 19 nt, Artificial Sequence
  Description of Artificial Sequence: Synthetic oligonucleotide
guucaagagcccuuguucu

SEQ ID NO: 2549639 - RNA, 19 nt, Artificial Sequence
  Description of Artificial Sequence: Synthetic oligonucleotide
gaagucucacagcuuaggu

SEQ ID NO: 2549640 - RNA, 19 nt, Artificial Sequence
  Description of Artificial Sequence: Synthetic oligonucleotide
ggccagauacaacucacug

SEQ ID NO: 2549641 - RNA, 19 nt, Artificial Sequence
  Description of Artificial Sequence: Synthetic oligonucleotide
acaguauaaagaggggaaa

SEQ ID NO: 2549642 - RNA, 19 nt, Artificial Sequence
  Description of Artificial Sequence: Synthetic oligonucleotide
ggaacaugugguguaaaac

SEQ ID NO: 2549643 - RNA, 19 nt, Artificial Sequence
  Description of Artificial Sequence: Synthetic oligonucleotide
agggaccaaaggucuagug

SEQ ID NO: 2549644 - RNA, 19 nt, Artificial Sequence
  Description of Artificial Sequence: Synthetic oligonucleotide
ugcacaccgauucguucac

SEQ ID NO: 2549645 - RNA, 19 nt, Artificial Sequence
  Description of Artificial Sequence: Synthetic oligonucleotide
gguuaaaugauugguagcu

SEQ ID NO: 2549646 - RNA, 19 nt, Artificial Sequence
  Description of Artificial Sequence: Synthetic oligonucleotide
agcuuaggugcuuuucaau

SEQ ID NO: 2549647 - RNA, 19 nt, Artificial Sequence
  Description of Artificial Sequence: Synthetic oligonucleotide
aaaagaagucucacagcuu

SEQ ID NO: 2549648 - RNA, 19 nt, Artificial Sequence
  Description of Artificial Sequence: Synthetic oligonucleotide
gggaaaacguguucuauaa

SEQ ID NO: 2549649 - RNA, 19 nt, Artificial Sequence
  Description of Artificial Sequence: Synthetic oligonucleotide
gguaagaagugcugggcca

SEQ ID NO: 2549650 - RNA, 19 nt, Artificial Sequence
  Description of Artificial Sequence: Synthetic oligonucleotide
aaaggcugacuuagaggug

SEQ ID NO: 2549651 - RNA, 19 nt, Artificial Sequence
  Description of Artificial Sequence: Synthetic oligonucleotide
uucaagagcccuuguucua

SEQ ID NO: 2549652 - RNA, 19 nt, Artificial Sequence
  Description of Artificial Sequence: Synthetic oligonucleotide
cuuaggugcuuuucaaucu

SEQ ID NO: 2549653 - RNA, 19 nt, Artificial Sequence
  Description of Artificial Sequence: Synthetic oligonucleotide
cugcacaccgauucguuca

SEQ ID NO: 2549654 - RNA, 19 nt, Artificial Sequence
  Description of Artificial Sequence: Synthetic oligonucleotide
ucuccagggcagagcaucu

SEQ ID NO: 2549655 - RNA, 19 nt, Artificial Sequence
  Description of Artificial Sequence: Synthetic oligonucleotide
gggaccaaaggucuaguga

SEQ ID NO: 2549656 - RNA, 19 nt, Artificial Sequence
  Description of Artificial Sequence: Synthetic oligonucleotide
agacaacuagagugcagaa

SEQ ID NO: 2549657 - RNA, 19 nt, Artificial Sequence
  Description of Artificial Sequence: Synthetic oligonucleotide
ccauauuauccuuaugcca

SEQ ID NO: 2549658 - RNA, 19 nt, Artificial Sequence
  Description of Artificial Sequence: Synthetic oligonucleotide
aggugcuuuucaaucuuag

SEQ ID NO: 2549659 - RNA, 19 nt, Artificial Sequence
  Description of Artificial Sequence: Synthetic oligonucleotide
uaggugcuuuucaaucuua

SEQ ID NO: 2549660 - RNA, 19 nt, Artificial Sequence
  Description of Artificial Sequence: Synthetic oligonucleotide
uuuggcucuggagguuucc

SEQ ID NO: 2549661 - RNA, 19 nt, Artificial Sequence
  Description of Artificial Sequence: Synthetic oligonucleotide
guguucuauaauuuaggau

SEQ ID NO: 2549662 - RNA, 19 nt, Artificial Sequence
  Description of Artificial Sequence: Synthetic oligonucleotide
gaucugcccaucuuugccu

SEQ ID NO: 2549663 - RNA, 19 nt, Artificial Sequence
  Description of Artificial Sequence: Synthetic oligonucleotide
auccuuaugccaccugaua

SEQ ID NO: 2549664 - RNA, 19 nt, Artificial Sequence
  Description of Artificial Sequence: Synthetic oligonucleotide
gagauucuuaauucuuaau

SEQ ID NO: 2549665 - RNA, 19 nt, Artificial Sequence
  Description of Artificial Sequence: Synthetic oligonucleotide
aggugagggacugcagauc

SEQ ID NO: 2549666 - RNA, 19 nt, Artificial Sequence
  Description of Artificial Sequence: Synthetic oligonucleotide
ugguagcuuuuguuuggcu

SEQ ID NO: 2549667 - RNA, 19 nt, Artificial Sequence
  Description of Artificial Sequence: Synthetic oligonucleotide
gaagagauucuuaauucuu

SEQ ID NO: 2549668 - RNA, 19 nt, Artificial Sequence
  Description of Artificial Sequence: Synthetic oligonucleotide
ccugauaaagcugcacacc

SEQ ID NO: 2549669 - RNA, 19 nt, Artificial Sequence
  Description of Artificial Sequence: Synthetic oligonucleotide
guaugaaaacagcuuuccu

SEQ ID NO: 2549670 - RNA, 19 nt, Artificial Sequence
  Description of Artificial Sequence: Synthetic oligonucleotide
cccagugcugucauucucc

SEQ ID NO: 2549671 - RNA, 19 nt, Artificial Sequence
  Description of Artificial Sequence: Synthetic oligonucleotide
gccagauacaacucacuga

SEQ ID NO: 2549672 - RNA, 19 nt, Artificial Sequence
  Description of Artificial Sequence: Synthetic oligonucleotide
caugugguguaaaacuagu

SEQ ID NO: 2549673 - RNA, 19 nt, Artificial Sequence
  Description of Artificial Sequence: Synthetic oligonucleotide
cuagugaaaggcugacuua

SEQ ID NO: 2549674 - RNA, 19 nt, Artificial Sequence
  Description of Artificial Sequence: Synthetic oligonucleotide
uagcuuuuguuuggcucug

SEQ ID NO: 2549675 - RNA, 19 nt, Artificial Sequence
  Description of Artificial Sequence: Synthetic oligonucleotide
gacugaccccacagaagag

SEQ ID NO: 2549676 - RNA, 19 nt, Artificial Sequence
  Description of Artificial Sequence: Synthetic oligonucleotide
caguauaaagaggggaaaa

SEQ ID NO: 2549677 - RNA, 19 nt, Artificial Sequence
  Description of Artificial Sequence: Synthetic oligonucleotide
uguuuggcucuggagguuu

SEQ ID NO: 2549678 - RNA, 19 nt, Artificial Sequence
  Description of Artificial Sequence: Synthetic oligonucleotide
agggaucugcccaucuuug

SEQ ID NO: 2549679 - RNA, 19 nt, Artificial Sequence
  Description of Artificial Sequence: Synthetic oligonucleotide
guucuauaauuuaggauau

SEQ ID NO: 2549680 - RNA, 19 nt, Artificial Sequence
  Description of Artificial Sequence: Synthetic oligonucleotide
caacuagagugcagaauaa

SEQ ID NO: 2549681 - RNA, 19 nt, Artificial Sequence
  Description of Artificial Sequence: Synthetic oligonucleotide
accgauucguucacgcugu

SEQ ID NO: 2549682 - RNA, 19 nt, Artificial Sequence
  Description of Artificial Sequence: Synthetic oligonucleotide
ggcaacaaacuucauugua

SEQ ID NO: 2549683 - RNA, 19 nt, Artificial Sequence
  Description of Artificial Sequence: Synthetic oligonucleotide
acaacucacugagaacaaa

SEQ ID NO: 2549684 - RNA, 19 nt, Artificial Sequence
  Description of Artificial Sequence: Synthetic oligonucleotide
guucuauagccaaauguau

SEQ ID NO: 2549685 - RNA, 19 nt, Artificial Sequence
  Description of Artificial Sequence: Synthetic oligonucleotide
agcuuuuguuuggcucugg

SEQ ID NO: 2549686 - RNA, 19 nt, Artificial Sequence
  Description of Artificial Sequence: Synthetic oligonucleotide
agugaaaggcugacuuaga

SEQ ID NO: 2549687 - RNA, 19 nt, Artificial Sequence
  Description of Artificial Sequence: Synthetic oligonucleotide
gguguaaaacuaguauuaa

SEQ ID NO: 2549688 - RNA, 19 nt, Artificial Sequence
  Description of Artificial Sequence: Synthetic oligonucleotide
gagggacugcagaucugag

SEQ ID NO: 2549689 - RNA, 19 nt, Artificial Sequence
  Description of Artificial Sequence: Synthetic oligonucleotide
guucaaggugucacacaug

SEQ ID NO: 2549690 - RNA, 19 nt, Artificial Sequence
  Description of Artificial Sequence: Synthetic oligonucleotide
aggggaaaacguguucuau

SEQ ID NO: 2549691 - RNA, 19 nt, Artificial Sequence
  Description of Artificial Sequence: Synthetic oligonucleotide
ucucccuguguggcacugg

SEQ ID NO: 2549692 - RNA, 19 nt, Artificial Sequence
  Description of Artificial Sequence: Synthetic oligonucleotide
ggugagggacugcagaucu

SEQ ID NO: 2549693 - RNA, 19 nt, Artificial Sequence
  Description of Artificial Sequence: Synthetic oligonucleotide
cccaaccuugcuuuaucag

SEQ ID NO: 2549694 - RNA, 19 nt, Artificial Sequence
  Description of Artificial Sequence: Synthetic oligonucleotide
cuauagccaaauguaugaa

SEQ ID NO: 2549695 - RNA, 19 nt, Artificial Sequence
  Description of Artificial Sequence: Synthetic oligonucleotide
accggggcguucaaggugu

SEQ ID NO: 2549696 - RNA, 19 nt, Artificial Sequence
  Description of Artificial Sequence: Synthetic oligonucleotide
uaggaacaugugguguaaa

SEQ ID NO: 2549697 - RNA, 19 nt, Artificial Sequence
  Description of Artificial Sequence: Synthetic oligonucleotide
ugagccaaggcaggcuuuu

SEQ ID NO: 2549698 - RNA, 19 nt, Artificial Sequence
  Description of Artificial Sequence: Synthetic oligonucleotide
ugcccaucuuugccucccc

SEQ ID NO: 2549699 - RNA, 19 nt, Artificial Sequence
  Description of Artificial Sequence: Synthetic oligonucleotide
gauauguucaagagcccuu

SEQ ID NO: 2549700 - RNA, 19 nt, Artificial Sequence
  Description of Artificial Sequence: Synthetic oligonucleotide
augccaccugauaaagcug

SEQ ID NO: 2549701 - RNA, 19 nt, Artificial Sequence
  Description of Artificial Sequence: Synthetic oligonucleotide
cguguucuauaauuuagga

SEQ ID NO: 2549702 - RNA, 19 nt, Artificial Sequence
  Description of Artificial Sequence: Synthetic oligonucleotide
gggacaaucaggagacuga

SEQ ID NO: 2549703 - RNA, 19 nt, Artificial Sequence
  Description of Artificial Sequence: Synthetic oligonucleotide
cugagaacaaaucccucau

SEQ ID NO: 2549704 - RNA, 19 nt, Artificial Sequence
  Description of Artificial Sequence: Synthetic oligonucleotide
aucaggugagggacugcag

SEQ ID NO: 2549705 - RNA, 19 nt, Artificial Sequence
  Description of Artificial Sequence: Synthetic oligonucleotide
ggggaaaacguguucuaua

SEQ ID NO: 2549706 - RNA, 19 nt, Artificial Sequence
  Description of Artificial Sequence: Synthetic oligonucleotide
ugaccccacagaagagauu

SEQ ID NO: 2549707 - RNA, 19 nt, Artificial Sequence
  Description of Artificial Sequence: Synthetic oligonucleotide
ggggcguucaaggugucac

SEQ ID NO: 2549708 - RNA, 19 nt, Artificial Sequence
  Description of Artificial Sequence: Synthetic oligonucleotide
gcuuuuguuuggcucugga

SEQ ID NO: 2549709 - RNA, 19 nt, Artificial Sequence
  Description of Artificial Sequence: Synthetic oligonucleotide
aagagggaccaaaggucua

SEQ ID NO: 2549710 - RNA, 19 nt, Artificial Sequence
  Description of Artificial Sequence: Synthetic oligonucleotide
ggcagcauuaccauauuau

SEQ ID NO: 2549711 - RNA, 19 nt, Artificial Sequence
  Description of Artificial Sequence: Synthetic oligonucleotide
ccuuaugccaccugauaaa

SEQ ID NO: 2549712 - RNA, 19 nt, Artificial Sequence
  Description of Artificial Sequence: Synthetic oligonucleotide
auaaagcugcacaccgauu

SEQ ID NO: 2549713 - RNA, 19 nt, Artificial Sequence
  Description of Artificial Sequence: Synthetic oligonucleotide
gcugcacaccgauucguuc

SEQ ID NO: 2549714 - RNA, 19 nt, Artificial Sequence
  Description of Artificial Sequence: Synthetic oligonucleotide
uuguuuggcucuggagguu

SEQ ID NO: 2549715 - RNA, 19 nt, Artificial Sequence
  Description of Artificial Sequence: Synthetic oligonucleotide
aucucccuguguggcacug

SEQ ID NO: 2549716 - RNA, 19 nt, Artificial Sequence
  Description of Artificial Sequence: Synthetic oligonucleotide
ggaaaccggggcguucaag

SEQ ID NO: 2549717 - RNA, 19 nt, Artificial Sequence
  Description of Artificial Sequence: Synthetic oligonucleotide
guuaaaugauugguagcuu

SEQ ID NO: 2549718 - RNA, 19 nt, Artificial Sequence
  Description of Artificial Sequence: Synthetic oligonucleotide
cucuggagguuuccaugga

SEQ ID NO: 2549719 - RNA, 19 nt, Artificial Sequence
  Description of Artificial Sequence: Synthetic oligonucleotide
ggcacuggugaagacaacu

SEQ ID NO: 2549720 - RNA, 19 nt, Artificial Sequence
  Description of Artificial Sequence: Synthetic oligonucleotide
acgcuguccagagcaggga

SEQ ID NO: 2549721 - RNA, 19 nt, Artificial Sequence
  Description of Artificial Sequence: Synthetic oligonucleotide
guuuggcucuggagguuuc

SEQ ID NO: 2549722 - RNA, 19 nt, Artificial Sequence
  Description of Artificial Sequence: Synthetic oligonucleotide
ggaaaacguguucuauaau

SEQ ID NO: 2549723 - RNA, 19 nt, Artificial Sequence
  Description of Artificial Sequence: Synthetic oligonucleotide
gucucaaaagagggaccaa

SEQ ID NO: 2549724 - RNA, 19 nt, Artificial Sequence
  Description of Artificial Sequence: Synthetic oligonucleotide
gcguucaaggugucacaca

SEQ ID NO: 2549725 - RNA, 19 nt, Artificial Sequence
  Description of Artificial Sequence: Synthetic oligonucleotide
agcugcacaccgauucguu

SEQ ID NO: 2549726 - RNA, 19 nt, Artificial Sequence
  Description of Artificial Sequence: Synthetic oligonucleotide
cagggaucugcccaucuuu

SEQ ID NO: 2549727 - RNA, 19 nt, Artificial Sequence
  Description of Artificial Sequence: Synthetic oligonucleotide
agcuuuccuuaaagaaaua

SEQ ID NO: 2549728 - RNA, 19 nt, Artificial Sequence
  Description of Artificial Sequence: Synthetic oligonucleotide
gucuagugaaaggcugacu

SEQ ID NO: 2549729 - RNA, 19 nt, Artificial Sequence
  Description of Artificial Sequence: Synthetic oligonucleotide
gugacccaaccuugcuuua

SEQ ID NO: 2549730 - RNA, 19 nt, Artificial Sequence
  Description of Artificial Sequence: Synthetic oligonucleotide
ccagugcugucauucucca

SEQ ID NO: 2549731 - RNA, 19 nt, Artificial Sequence
  Description of Artificial Sequence: Synthetic oligonucleotide
accccacagaagagauucu

SEQ ID NO: 2549732 - RNA, 19 nt, Artificial Sequence
  Description of Artificial Sequence: Synthetic oligonucleotide
gcacaccgauucguucacg

SEQ ID NO: 2549733 - RNA, 19 nt, Artificial Sequence
  Description of Artificial Sequence: Synthetic oligonucleotide
gcauuaccauauuauccuu

SEQ ID NO: 2549734 - RNA, 19 nt, Artificial Sequence
  Description of Artificial Sequence: Synthetic oligonucleotide
cguucaaggugucacacau

SEQ ID NO: 2549735 - RNA, 19 nt, Artificial Sequence
  Description of Artificial Sequence: Synthetic oligonucleotide
cgauucguucacgcugucc

SEQ ID NO: 2549736 - RNA, 19 nt, Artificial Sequence
  Description of Artificial Sequence: Synthetic oligonucleotide
ccccagugcugucauucuc

SEQ ID NO: 2549737 - RNA, 19 nt, Artificial Sequence
  Description of Artificial Sequence: Synthetic oligonucleotide
gucucacagcuuaggugcu

SEQ ID NO: 2549738 - RNA, 19 nt, Artificial Sequence
  Description of Artificial Sequence: Synthetic oligonucleotide
gcccaucuuugccucccca

SEQ ID NO: 2549739 - RNA, 19 nt, Artificial Sequence
  Description of Artificial Sequence: Synthetic oligonucleotide
ccuuguucuauagccaaau

SEQ ID NO: 2549740 - RNA, 19 nt, Artificial Sequence
  Description of Artificial Sequence: Synthetic oligonucleotide
cucacagcuuaggugcuuu

SEQ ID NO: 2549741 - RNA, 19 nt, Artificial Sequence
  Description of Artificial Sequence: Synthetic oligonucleotide
cccuuguucuauagccaaa

SEQ ID NO: 2549742 - RNA, 19 nt, Artificial Sequence
  Description of Artificial Sequence: Synthetic oligonucleotide
gagggacaaucaggagacu

SEQ ID NO: 2549743 - RNA, 19 nt, Artificial Sequence
  Description of Artificial Sequence: Synthetic oligonucleotide
caucucccuguguggcacu

SEQ ID NO: 2549744 - RNA, 19 nt, Artificial Sequence
  Description of Artificial Sequence: Synthetic oligonucleotide
gggaaaccggggcguucaa

SEQ ID NO: 2549745 - RNA, 19 nt, Artificial Sequence
  Description of Artificial Sequence: Synthetic oligonucleotide
gcagggaucugcccaucuu

SEQ ID NO: 2549746 - RNA, 19 nt, Artificial Sequence
  Description of Artificial Sequence: Synthetic oligonucleotide
ccgauucguucacgcuguc

SEQ ID NO: 2549747 - RNA, 19 nt, Artificial Sequence
  Description of Artificial Sequence: Synthetic oligonucleotide
ccggggcguucaagguguc

SEQ ID NO: 2549748 - RNA, 19 nt, Artificial Sequence
  Description of Artificial Sequence: Synthetic oligonucleotide
cgcuguccagagcagggau

SEQ ID NO: 2549749 - RNA, 19 nt, Artificial Sequence
  Description of Artificial Sequence: Synthetic oligonucleotide
cggggcguucaagguguca

SEQ ID NO: 2549750 - RNA, 19 nt, Artificial Sequence
  Description of Artificial Sequence: Synthetic oligonucleotide
aauuauagaggccauaaaa

SEQ ID NO: 2549751 - RNA, 19 nt, Artificial Sequence
  Description of Artificial Sequence: Synthetic oligonucleotide
aaauuucucucucaggauc

SEQ ID NO: 2549752 - RNA, 19 nt, Artificial Sequence
  Description of Artificial Sequence: Synthetic oligonucleotide
agcauauagcucuauaggc

SEQ ID NO: 2549753 - RNA, 19 nt, Artificial Sequence
  Description of Artificial Sequence: Synthetic oligonucleotide
uuugguucacauuucaagg

SEQ ID NO: 2549754 - RNA, 19 nt, Artificial Sequence
  Description of Artificial Sequence: Synthetic oligonucleotide
gaaaggcucaauaugaugg

SEQ ID NO: 2549755 - RNA, 19 nt, Artificial Sequence
  Description of Artificial Sequence: Synthetic oligonucleotide
auaaauuucucucucagga

SEQ ID NO: 2549756 - RNA, 19 nt, Artificial Sequence
  Description of Artificial Sequence: Synthetic oligonucleotide
uuuugguucacauuucaag

SEQ ID NO: 2549757 - RNA, 19 nt, Artificial Sequence
  Description of Artificial Sequence: Synthetic oligonucleotide
aaaauuuaaaaugccuauc

SEQ ID NO: 2549758 - RNA, 19 nt, Artificial Sequence
  Description of Artificial Sequence: Synthetic oligonucleotide
ucaggaucaacauagauuu

SEQ ID NO: 2549759 - RNA, 19 nt, Artificial Sequence
  Description of Artificial Sequence: Synthetic oligonucleotide
gauaccuuucagcauauag

SEQ ID NO: 2549760 - RNA, 19 nt, Artificial Sequence
  Description of Artificial Sequence: Synthetic oligonucleotide
ucagcauauagcucuauag

SEQ ID NO: 2549761 - RNA, 19 nt, Artificial Sequence
  Description of Artificial Sequence: Synthetic oligonucleotide
uuuaaaaugccuaucccau

SEQ ID NO: 2549762 - RNA, 19 nt, Artificial Sequence
  Description of Artificial Sequence: Synthetic oligonucleotide
ucaacauagauuucaugag

SEQ ID NO: 2549763 - RNA, 19 nt, Artificial Sequence
  Description of Artificial Sequence: Synthetic oligonucleotide
acaaaguggaugcuguuac

SEQ ID NO: 2549764 - RNA, 19 nt, Artificial Sequence
  Description of Artificial Sequence: Synthetic oligonucleotide
uuuuguguuuucauaaccu

SEQ ID NO: 2549765 - RNA, 19 nt, Artificial Sequence
  Description of Artificial Sequence: Synthetic oligonucleotide
caugagaauauccagucag

SEQ ID NO: 2549766 - RNA, 19 nt, Artificial Sequence
  Description of Artificial Sequence: Synthetic oligonucleotide
uauccagucaguuugcaga

SEQ ID NO: 2549767 - RNA, 19 nt, Artificial Sequence
  Description of Artificial Sequence: Synthetic oligonucleotide
auaccuuucagcauauagc

SEQ ID NO: 2549768 - RNA, 19 nt, Artificial Sequence
  Description of Artificial Sequence: Synthetic oligonucleotide
uugguucacauuucaaggg

SEQ ID NO: 2549769 - RNA, 19 nt, Artificial Sequence
  Description of Artificial Sequence: Synthetic oligonucleotide
uugugauccaaccuauucc

SEQ ID NO: 2549770 - RNA, 19 nt, Artificial Sequence
  Description of Artificial Sequence: Synthetic oligonucleotide
ggccauaaaauuuaaaaug

SEQ ID NO: 2549771 - RNA, 19 nt, Artificial Sequence
  Description of Artificial Sequence: Synthetic oligonucleotide
cuugaagucaugaugccug

SEQ ID NO: 2549772 - RNA, 19 nt, Artificial Sequence
  Description of Artificial Sequence: Synthetic oligonucleotide
uaccuuucagcauauagcu

SEQ ID NO: 2549773 - RNA, 19 nt, Artificial Sequence
  Description of Artificial Sequence: Synthetic oligonucleotide
uuuacagacguaacacaag

SEQ ID NO: 2549774 - RNA, 19 nt, Artificial Sequence
  Description of Artificial Sequence: Synthetic oligonucleotide
aacacaagaaaugccucac

SEQ ID NO: 2549775 - RNA, 19 nt, Artificial Sequence
  Description of Artificial Sequence: Synthetic oligonucleotide
aggcugaacucccacaagc

SEQ ID NO: 2549776 - RNA, 19 nt, Artificial Sequence
  Description of Artificial Sequence: Synthetic oligonucleotide
augaugacuguccaaucac

SEQ ID NO: 2549777 - RNA, 19 nt, Artificial Sequence
  Description of Artificial Sequence: Synthetic oligonucleotide
uauagaggccauaaaauuu

SEQ ID NO: 2549778 - RNA, 19 nt, Artificial Sequence
  Description of Artificial Sequence: Synthetic oligonucleotide
gaugguaugaugacugucc

SEQ ID NO: 2549779 - RNA, 19 nt, Artificial Sequence
  Description of Artificial Sequence: Synthetic oligonucleotide
caagaaaugccucacgaac

SEQ ID NO: 2549780 - RNA, 19 nt, Artificial Sequence
  Description of Artificial Sequence: Synthetic oligonucleotide
aaaaugccuaucccauuuc

SEQ ID NO: 2549781 - RNA, 19 nt, Artificial Sequence
  Description of Artificial Sequence: Synthetic oligonucleotide
augccuaucccauuucugg

SEQ ID NO: 2549782 - RNA, 19 nt, Artificial Sequence
  Description of Artificial Sequence: Synthetic oligonucleotide
ugugauccaaccuauuccu

SEQ ID NO: 2549783 - RNA, 19 nt, Artificial Sequence
  Description of Artificial Sequence: Synthetic oligonucleotide
aggaggaaauuucuucccc

SEQ ID NO: 2549784 - RNA, 19 nt, Artificial Sequence
  Description of Artificial Sequence: Synthetic oligonucleotide
acauggauaacuguagguc

SEQ ID NO: 2549785 - RNA, 19 nt, Artificial Sequence
  Description of Artificial Sequence: Synthetic oligonucleotide
aacgucacccuucucccgg

SEQ ID NO: 2549786 - RNA, 19 nt, Artificial Sequence
  Description of Artificial Sequence: Synthetic oligonucleotide
ucaauaugaugguaugaug

SEQ ID NO: 2549787 - RNA, 19 nt, Artificial Sequence
  Description of Artificial Sequence: Synthetic oligonucleotide
gacguaacacaagaaaugc

SEQ ID NO: 2549788 - RNA, 19 nt, Artificial Sequence
  Description of Artificial Sequence: Synthetic oligonucleotide
guuuauggguuugugaucc

SEQ ID NO: 2549789 - RNA, 19 nt, Artificial Sequence
  Description of Artificial Sequence: Synthetic oligonucleotide
cagcauauagcucuauagg

SEQ ID NO: 2549790 - RNA, 19 nt, Artificial Sequence
  Description of Artificial Sequence: Synthetic oligonucleotide
uguuuucauaaccucuuga

SEQ ID NO: 2549791 - RNA, 19 nt, Artificial Sequence
  Description of Artificial Sequence: Synthetic oligonucleotide
uggaccuagaauaaggguu

SEQ ID NO: 2549792 - RNA, 19 nt, Artificial Sequence
  Description of Artificial Sequence: Synthetic oligonucleotide
cuagaauaaggguuccacc

SEQ ID NO: 2549793 - RNA, 19 nt, Artificial Sequence
  Description of Artificial Sequence: Synthetic oligonucleotide
uucauaaccucuugaaguc

SEQ ID NO: 2549794 - RNA, 19 nt, Artificial Sequence
  Description of Artificial Sequence: Synthetic oligonucleotide
uaaaaugccuaucccauuu

SEQ ID NO: 2549795 - RNA, 19 nt, Artificial Sequence
  Description of Artificial Sequence: Synthetic oligonucleotide
ugguucacauuucaagggc

SEQ ID NO: 2549796 - RNA, 19 nt, Artificial Sequence
  Description of Artificial Sequence: Synthetic oligonucleotide
ucucggugcacaaagugga

SEQ ID NO: 2549797 - RNA, 19 nt, Artificial Sequence
  Description of Artificial Sequence: Synthetic oligonucleotide
aauaaggguuccaccuugc

SEQ ID NO: 2549798 - RNA, 19 nt, Artificial Sequence
  Description of Artificial Sequence: Synthetic oligonucleotide
aucacuaugagggugacau

SEQ ID NO: 2549799 - RNA, 19 nt, Artificial Sequence
  Description of Artificial Sequence: Synthetic oligonucleotide
aaaugccuaucccauuucu

SEQ ID NO: 2549800 - RNA, 19 nt, Artificial Sequence
  Description of Artificial Sequence: Synthetic oligonucleotide
acguauucuuuacagacgu

SEQ ID NO: 2549801 - RNA, 19 nt, Artificial Sequence
  Description of Artificial Sequence: Synthetic oligonucleotide
ucucggaggacgcucuugg

SEQ ID NO: 2549802 - RNA, 19 nt, Artificial Sequence
  Description of Artificial Sequence: Synthetic oligonucleotide
acagacguaacacaagaaa

SEQ ID NO: 2549803 - RNA, 19 nt, Artificial Sequence
  Description of Artificial Sequence: Synthetic oligonucleotide
ucuuuacagacguaacaca

SEQ ID NO: 2549804 - RNA, 19 nt, Artificial Sequence
  Description of Artificial Sequence: Synthetic oligonucleotide
aaaggcucaauaugauggu

SEQ ID NO: 2549805 - RNA, 19 nt, Artificial Sequence
  Description of Artificial Sequence: Synthetic oligonucleotide
gaauaaggguuccaccuug

SEQ ID NO: 2549806 - RNA, 19 nt, Artificial Sequence
  Description of Artificial Sequence: Synthetic oligonucleotide
ucacacauggauaacugua

SEQ ID NO: 2549807 - RNA, 19 nt, Artificial Sequence
  Description of Artificial Sequence: Synthetic oligonucleotide
gaugcuguuaccuggaccu

SEQ ID NO: 2549808 - RNA, 19 nt, Artificial Sequence
  Description of Artificial Sequence: Synthetic oligonucleotide
aaaugccucacgaacacca

SEQ ID NO: 2549809 - RNA, 19 nt, Artificial Sequence
  Description of Artificial Sequence: Synthetic oligonucleotide
aggccauaaaauuuaaaau

SEQ ID NO: 2549810 - RNA, 19 nt, Artificial Sequence
  Description of Artificial Sequence: Synthetic oligonucleotide
aguucacaggcugaacucc

SEQ ID NO: 2549811 - RNA, 19 nt, Artificial Sequence
  Description of Artificial Sequence: Synthetic oligonucleotide
acacauggauaacuguagg

SEQ ID NO: 2549812 - RNA, 19 nt, Artificial Sequence
  Description of Artificial Sequence: Synthetic oligonucleotide
gacaucugcuucucggagg

SEQ ID NO: 2549813 - RNA, 19 nt, Artificial Sequence
  Description of Artificial Sequence: Synthetic oligonucleotide
uguguuuucauaaccucuu

SEQ ID NO: 2549814 - RNA, 19 nt, Artificial Sequence
  Description of Artificial Sequence: Synthetic oligonucleotide
uggaagaucccaugugaag

SEQ ID NO: 2549815 - RNA, 19 nt, Artificial Sequence
  Description of Artificial Sequence: Synthetic oligonucleotide
cacacauggauaacuguag

SEQ ID NO: 2549816 - RNA, 19 nt, Artificial Sequence
  Description of Artificial Sequence: Synthetic oligonucleotide
cacguauucuuuacagacg

SEQ ID NO: 2549817 - RNA, 19 nt, Artificial Sequence
  Description of Artificial Sequence: Synthetic oligonucleotide
aggcgaaugagcuuuugug

SEQ ID NO: 2549818 - RNA, 19 nt, Artificial Sequence
  Description of Artificial Sequence: Synthetic oligonucleotide
gccauaaaauuuaaaaugc

SEQ ID NO: 2549819 - RNA, 19 nt, Artificial Sequence
  Description of Artificial Sequence: Synthetic oligonucleotide
aauuucucucucaggauca

SEQ ID NO: 2549820 - RNA, 19 nt, Artificial Sequence
  Description of Artificial Sequence: Synthetic oligonucleotide
gaucaacauagauuucaug

SEQ ID NO: 2549821 - RNA, 19 nt, Artificial Sequence
  Description of Artificial Sequence: Synthetic oligonucleotide
aaguggaugcuguuaccug

SEQ ID NO: 2549822 - RNA, 19 nt, Artificial Sequence
  Description of Artificial Sequence: Synthetic oligonucleotide
ggugacaucugcuucucgg

SEQ ID NO: 2549823 - RNA, 19 nt, Artificial Sequence
  Description of Artificial Sequence: Synthetic oligonucleotide
agcucuauaggcgaaugag

SEQ ID NO: 2549824 - RNA, 19 nt, Artificial Sequence
  Description of Artificial Sequence: Synthetic oligonucleotide
uugaagucaugaugccugg

SEQ ID NO: 2549825 - RNA, 19 nt, Artificial Sequence
  Description of Artificial Sequence: Synthetic oligonucleotide
guuuucauaaccucuugaa

SEQ ID NO: 2549826 - RNA, 19 nt, Artificial Sequence
  Description of Artificial Sequence: Synthetic oligonucleotide
gaggaggaaauuucuuccc

SEQ ID NO: 2549827 - RNA, 19 nt, Artificial Sequence
  Description of Artificial Sequence: Synthetic oligonucleotide
cuccacguauucuuuacag

SEQ ID NO: 2549828 - RNA, 19 nt, Artificial Sequence
  Description of Artificial Sequence: Synthetic oligonucleotide
gaagucaugaugccuggca

SEQ ID NO: 2549829 - RNA, 19 nt, Artificial Sequence
  Description of Artificial Sequence: Synthetic oligonucleotide
aagucacacauggauaacu

SEQ ID NO: 2549830 - RNA, 19 nt, Artificial Sequence
  Description of Artificial Sequence: Synthetic oligonucleotide
cugaggaggaaauuucuuc

SEQ ID NO: 2549831 - RNA, 19 nt, Artificial Sequence
  Description of Artificial Sequence: Synthetic oligonucleotide
cauauagcucuauaggcga

SEQ ID NO: 2549832 - RNA, 19 nt, Artificial Sequence
  Description of Artificial Sequence: Synthetic oligonucleotide
aaugagcuuuuguguuuuc

SEQ ID NO: 2549833 - RNA, 19 nt, Artificial Sequence
  Description of Artificial Sequence: Synthetic oligonucleotide
gcaacugauaccuuucagc

SEQ ID NO: 2549834 - RNA, 19 nt, Artificial Sequence
  Description of Artificial Sequence: Synthetic oligonucleotide
agacguaacacaagaaaug

SEQ ID NO: 2549835 - RNA, 19 nt, Artificial Sequence
  Description of Artificial Sequence: Synthetic oligonucleotide
ucugcuucucggaggacgc

SEQ ID NO: 2549836 - RNA, 19 nt, Artificial Sequence
  Description of Artificial Sequence: Synthetic oligonucleotide
uaugagggugacaucugcu

SEQ ID NO: 2549837 - RNA, 19 nt, Artificial Sequence
  Description of Artificial Sequence: Synthetic oligonucleotide
uucacaaguggaagauccc

SEQ ID NO: 2549838 - RNA, 19 nt, Artificial Sequence
  Description of Artificial Sequence: Synthetic oligonucleotide
aagucaugaugccuggcau

SEQ ID NO: 2549839 - RNA, 19 nt, Artificial Sequence
  Description of Artificial Sequence: Synthetic oligonucleotide
acaaguggaagaucccaug

SEQ ID NO: 2549840 - RNA, 19 nt, Artificial Sequence
  Description of Artificial Sequence: Synthetic oligonucleotide
acguaacacaagaaaugcc

SEQ ID NO: 2549841 - RNA, 19 nt, Artificial Sequence
  Description of Artificial Sequence: Synthetic oligonucleotide
uucaagggcccauucacaa

SEQ ID NO: 2549842 - RNA, 19 nt, Artificial Sequence
  Description of Artificial Sequence: Synthetic oligonucleotide
gaguuuauggguuugugau

SEQ ID NO: 2549843 - RNA, 19 nt, Artificial Sequence
  Description of Artificial Sequence: Synthetic oligonucleotide
gaagaucccaugugaaguc

SEQ ID NO: 2549844 - RNA, 19 nt, Artificial Sequence
  Description of Artificial Sequence: Synthetic oligonucleotide
acauuucaagggcccauuc

SEQ ID NO: 2549845 - RNA, 19 nt, Artificial Sequence
  Description of Artificial Sequence: Synthetic oligonucleotide
uccaaucacuaugagggug

SEQ ID NO: 2549846 - RNA, 19 nt, Artificial Sequence
  Description of Artificial Sequence: Synthetic oligonucleotide
ccauaaaauuuaaaaugcc

SEQ ID NO: 2549847 - RNA, 19 nt, Artificial Sequence
  Description of Artificial Sequence: Synthetic oligonucleotide
gcauauagcucuauaggcg

SEQ ID NO: 2549848 - RNA, 19 nt, Artificial Sequence
  Description of Artificial Sequence: Synthetic oligonucleotide
agcuguaaaacagaguuua

SEQ ID NO: 2549849 - RNA, 19 nt, Artificial Sequence
  Description of Artificial Sequence: Synthetic oligonucleotide
ucucaggaucaacauagau

SEQ ID NO: 2549850 - RNA, 19 nt, Artificial Sequence
  Description of Artificial Sequence: Synthetic oligonucleotide
accuauuccugucucggug

SEQ ID NO: 2549851 - RNA, 19 nt, Artificial Sequence
  Description of Artificial Sequence: Synthetic oligonucleotide
aaugccuaucccauuucug

SEQ ID NO: 2549852 - RNA, 19 nt, Artificial Sequence
  Description of Artificial Sequence: Synthetic oligonucleotide
uccugaggaggaaauuucu

SEQ ID NO: 2549853 - RNA, 19 nt, Artificial Sequence
  Description of Artificial Sequence: Synthetic oligonucleotide
uuaccuggaccuagaauaa

SEQ ID NO: 2549854 - RNA, 19 nt, Artificial Sequence
  Description of Artificial Sequence: Synthetic oligonucleotide
uccacguauucuuuacaga

SEQ ID NO: 2549855 - RNA, 19 nt, Artificial Sequence
  Description of Artificial Sequence: Synthetic oligonucleotide
aucugcuucucggaggacg

SEQ ID NO: 2549856 - RNA, 19 nt, Artificial Sequence
  Description of Artificial Sequence: Synthetic oligonucleotide
uguuaccuggaccuagaau

SEQ ID NO: 2549857 - RNA, 19 nt, Artificial Sequence
  Description of Artificial Sequence: Synthetic oligonucleotide
acaagaaaugccucacgaa

SEQ ID NO: 2549858 - RNA, 19 nt, Artificial Sequence
  Description of Artificial Sequence: Synthetic oligonucleotide
caugaugccuggcauuuug

SEQ ID NO: 2549859 - RNA, 19 nt, Artificial Sequence
  Description of Artificial Sequence: Synthetic oligonucleotide
caaccuauuccugucucgg

SEQ ID NO: 2549860 - RNA, 19 nt, Artificial Sequence
  Description of Artificial Sequence: Synthetic oligonucleotide
acucccacaagcuguaaaa

SEQ ID NO: 2549861 - RNA, 19 nt, Artificial Sequence
  Description of Artificial Sequence: Synthetic oligonucleotide
caacauagauuucaugaga

SEQ ID NO: 2549862 - RNA, 19 nt, Artificial Sequence
  Description of Artificial Sequence: Synthetic oligonucleotide
ucuggcaacugauaccuuu

SEQ ID NO: 2549863 - RNA, 19 nt, Artificial Sequence
  Description of Artificial Sequence: Synthetic oligonucleotide
ugagggugacaucugcuuc

SEQ ID NO: 2549864 - RNA, 19 nt, Artificial Sequence
  Description of Artificial Sequence: Synthetic oligonucleotide
ugccuaucccauuucuggc

SEQ ID NO: 2549865 - RNA, 19 nt, Artificial Sequence
  Description of Artificial Sequence: Synthetic oligonucleotide
uucagcauauagcucuaua

SEQ ID NO: 2549866 - RNA, 19 nt, Artificial Sequence
  Description of Artificial Sequence: Synthetic oligonucleotide
ccacguauucuuuacagac

SEQ ID NO: 2549867 - RNA, 19 nt, Artificial Sequence
  Description of Artificial Sequence: Synthetic oligonucleotide
uaggcgaaugagcuuuugu

SEQ ID NO: 2549868 - RNA, 19 nt, Artificial Sequence
  Description of Artificial Sequence: Synthetic oligonucleotide
gauccaaccuauuccuguc

SEQ ID NO: 2549869 - RNA, 19 nt, Artificial Sequence
  Description of Artificial Sequence: Synthetic oligonucleotide
cccacaagcuguaaaacag

SEQ ID NO: 2549870 - RNA, 19 nt, Artificial Sequence
  Description of Artificial Sequence: Synthetic oligonucleotide
ucccaaucuuuuauaaauu

SEQ ID NO: 2549871 - RNA, 19 nt, Artificial Sequence
  Description of Artificial Sequence: Synthetic oligonucleotide
auaugaugguaugaugacu

SEQ ID NO: 2549872 - RNA, 19 nt, Artificial Sequence
  Description of Artificial Sequence: Synthetic oligonucleotide
ugaaggcuucccgaaagca

SEQ ID NO: 2549873 - RNA, 19 nt, Artificial Sequence
  Description of Artificial Sequence: Synthetic oligonucleotide
augguaugaugacugucca

SEQ ID NO: 2549874 - RNA, 19 nt, Artificial Sequence
  Description of Artificial Sequence: Synthetic oligonucleotide
caaaguggaugcuguuacc

SEQ ID NO: 2549875 - RNA, 19 nt, Artificial Sequence
  Description of Artificial Sequence: Synthetic oligonucleotide
acuguaggucugcucauga

SEQ ID NO: 2549876 - RNA, 19 nt, Artificial Sequence
  Description of Artificial Sequence: Synthetic oligonucleotide
uagauuucaugagaauauc

SEQ ID NO: 2549877 - RNA, 19 nt, Artificial Sequence
  Description of Artificial Sequence: Synthetic oligonucleotide
cucuugaagucaugaugcc

SEQ ID NO: 2549878 - RNA, 19 nt, Artificial Sequence
  Description of Artificial Sequence: Synthetic oligonucleotide
auucccaaucuuuuauaaa

SEQ ID NO: 2549879 - RNA, 19 nt, Artificial Sequence
  Description of Artificial Sequence: Synthetic oligonucleotide
ugagaauauccagucaguu

SEQ ID NO: 2549880 - RNA, 19 nt, Artificial Sequence
  Description of Artificial Sequence: Synthetic oligonucleotide
auagaggccauaaaauuua

SEQ ID NO: 2549881 - RNA, 19 nt, Artificial Sequence
  Description of Artificial Sequence: Synthetic oligonucleotide
agcgcgccgaacgucaccc

SEQ ID NO: 2549882 - RNA, 19 nt, Artificial Sequence
  Description of Artificial Sequence: Synthetic oligonucleotide
uagcucuauaggcgaauga

SEQ ID NO: 2549883 - RNA, 19 nt, Artificial Sequence
  Description of Artificial Sequence: Synthetic oligonucleotide
ucauaaccucuugaaguca

SEQ ID NO: 2549884 - RNA, 19 nt, Artificial Sequence
  Description of Artificial Sequence: Synthetic oligonucleotide
aaccuauuccugucucggu

SEQ ID NO: 2549885 - RNA, 19 nt, Artificial Sequence
  Description of Artificial Sequence: Synthetic oligonucleotide
cucuauaggcgaaugagcu

SEQ ID NO: 2549886 - RNA, 19 nt, Artificial Sequence
  Description of Artificial Sequence: Synthetic oligonucleotide
ucucucucaggaucaacau

SEQ ID NO: 2549887 - RNA, 19 nt, Artificial Sequence
  Description of Artificial Sequence: Synthetic oligonucleotide
gaacgucacccuucucccg

SEQ ID NO: 2549888 - RNA, 19 nt, Artificial Sequence
  Description of Artificial Sequence: Synthetic oligonucleotide
aaacagcgcgccgaacguc

SEQ ID NO: 2549889 - RNA, 19 nt, Artificial Sequence
  Description of Artificial Sequence: Synthetic oligonucleotide
guucacauuucaagggccc

SEQ ID NO: 2549890 - RNA, 19 nt, Artificial Sequence
  Description of Artificial Sequence: Synthetic oligonucleotide
aagaucccaugugaaguca

SEQ ID NO: 2549891 - RNA, 19 nt, Artificial Sequence
  Description of Artificial Sequence: Synthetic oligonucleotide
uggcaacugauaccuuuca

SEQ ID NO: 2549892 - RNA, 19 nt, Artificial Sequence
  Description of Artificial Sequence: Synthetic oligonucleotide
uggauaacuguaggucugc

SEQ ID NO: 2549893 - RNA, 19 nt, Artificial Sequence
  Description of Artificial Sequence: Synthetic oligonucleotide
ucuauaggcgaaugagcuu

SEQ ID NO: 2549894 - RNA, 19 nt, Artificial Sequence
  Description of Artificial Sequence: Synthetic oligonucleotide
ccuggaccuagaauaaggg

SEQ ID NO: 2549895 - RNA, 19 nt, Artificial Sequence
  Description of Artificial Sequence: Synthetic oligonucleotide
cauucccaaucuuuuauaa

SEQ ID NO: 2549896 - RNA, 19 nt, Artificial Sequence
  Description of Artificial Sequence: Synthetic oligonucleotide
aacuguaggucugcucaug

SEQ ID NO: 2549897 - RNA, 19 nt, Artificial Sequence
  Description of Artificial Sequence: Synthetic oligonucleotide
guaacacaagaaaugccuc

SEQ ID NO: 2549898 - RNA, 19 nt, Artificial Sequence
  Description of Artificial Sequence: Synthetic oligonucleotide
cauggauaacuguaggucu

SEQ ID NO: 2549899 - RNA, 19 nt, Artificial Sequence
  Description of Artificial Sequence: Synthetic oligonucleotide
uagaggccauaaaauuuaa

SEQ ID NO: 2549900 - RNA, 19 nt, Artificial Sequence
  Description of Artificial Sequence: Synthetic oligonucleotide
auuuugcccagauccucca

SEQ ID NO: 2549901 - RNA, 19 nt, Artificial Sequence
  Description of Artificial Sequence: Synthetic oligonucleotide
gacuguccaaucacuauga

SEQ ID NO: 2549902 - RNA, 19 nt, Artificial Sequence
  Description of Artificial Sequence: Synthetic oligonucleotide
ugaugguaugaugacuguc

SEQ ID NO: 2549903 - RNA, 19 nt, Artificial Sequence
  Description of Artificial Sequence: Synthetic oligonucleotide
auaaggguuccaccuugcu

SEQ ID NO: 2549904 - RNA, 19 nt, Artificial Sequence
  Description of Artificial Sequence: Synthetic oligonucleotide
cugaaggcuucccgaaagc

SEQ ID NO: 2549905 - RNA, 19 nt, Artificial Sequence
  Description of Artificial Sequence: Synthetic oligonucleotide
auagcucuauaggcgaaug

SEQ ID NO: 2549906 - RNA, 19 nt, Artificial Sequence
  Description of Artificial Sequence: Synthetic oligonucleotide
ccgaacgucacccuucucc

SEQ ID NO: 2549907 - RNA, 19 nt, Artificial Sequence
  Description of Artificial Sequence: Synthetic oligonucleotide
augaugguaugaugacugu

SEQ ID NO: 2549908 - RNA, 19 nt, Artificial Sequence
  Description of Artificial Sequence: Synthetic oligonucleotide
augagggugacaucugcuu

SEQ ID NO: 2549909 - RNA, 19 nt, Artificial Sequence
  Description of Artificial Sequence: Synthetic oligonucleotide
gcagaaaggcucaauauga

SEQ ID NO: 2549910 - RNA, 19 nt, Artificial Sequence
  Description of Artificial Sequence: Synthetic oligonucleotide
cacgaacaccaccacggcc

SEQ ID NO: 2549911 - RNA, 19 nt, Artificial Sequence
  Description of Artificial Sequence: Synthetic oligonucleotide
agaucccaugugaagucac

SEQ ID NO: 2549912 - RNA, 19 nt, Artificial Sequence
  Description of Artificial Sequence: Synthetic oligonucleotide
acgcucuuggggauuuugc

SEQ ID NO: 2549913 - RNA, 19 nt, Artificial Sequence
  Description of Artificial Sequence: Synthetic oligonucleotide
aacagcgcgccgaacguca

SEQ ID NO: 2549914 - RNA, 19 nt, Artificial Sequence
  Description of Artificial Sequence: Synthetic oligonucleotide
ucggugcacaaaguggaug

SEQ ID NO: 2549915 - RNA, 19 nt, Artificial Sequence
  Description of Artificial Sequence: Synthetic oligonucleotide
uuuauggguuugugaucca

SEQ ID NO: 2549916 - RNA, 19 nt, Artificial Sequence
  Description of Artificial Sequence: Synthetic oligonucleotide
gaaaugccucacgaacacc

SEQ ID NO: 2549917 - RNA, 19 nt, Artificial Sequence
  Description of Artificial Sequence: Synthetic oligonucleotide
guaugaugacuguccaauc

SEQ ID NO: 2549918 - RNA, 19 nt, Artificial Sequence
  Description of Artificial Sequence: Synthetic oligonucleotide
ucuuggggauuuugcccag

SEQ ID NO: 2549919 - RNA, 19 nt, Artificial Sequence
  Description of Artificial Sequence: Synthetic oligonucleotide
auuccugucucggugcaca

SEQ ID NO: 2549920 - RNA, 19 nt, Artificial Sequence
  Description of Artificial Sequence: Synthetic oligonucleotide
uuggggauuuugcccagau

SEQ ID NO: 2549921 - RNA, 19 nt, Artificial Sequence
  Description of Artificial Sequence: Synthetic oligonucleotide
uauagcucuauaggcgaau

SEQ ID NO: 2549922 - RNA, 19 nt, Artificial Sequence
  Description of Artificial Sequence: Synthetic oligonucleotide
ggcucaauaugaugguaug

SEQ ID NO: 2549923 - RNA, 19 nt, Artificial Sequence
  Description of Artificial Sequence: Synthetic oligonucleotide
uuauggguuugugauccaa

SEQ ID NO: 2549924 - RNA, 19 nt, Artificial Sequence
  Description of Artificial Sequence: Synthetic oligonucleotide
cucaggaucaacauagauu

SEQ ID NO: 2549925 - RNA, 19 nt, Artificial Sequence
  Description of Artificial Sequence: Synthetic oligonucleotide
cagacguaacacaagaaau

SEQ ID NO: 2549926 - RNA, 19 nt, Artificial Sequence
  Description of Artificial Sequence: Synthetic oligonucleotide
auccaaccuauuccugucu

SEQ ID NO: 2549927 - RNA, 19 nt, Artificial Sequence
  Description of Artificial Sequence: Synthetic oligonucleotide
gaugacuguccaaucacua

SEQ ID NO: 2549928 - RNA, 19 nt, Artificial Sequence
  Description of Artificial Sequence: Synthetic oligonucleotide
augagaauauccagucagu

SEQ ID NO: 2549929 - RNA, 19 nt, Artificial Sequence
  Description of Artificial Sequence: Synthetic oligonucleotide
cgaaacagcgcgccgaacg

SEQ ID NO: 2549930 - RNA, 19 nt, Artificial Sequence
  Description of Artificial Sequence: Synthetic oligonucleotide
ugguaugaugacuguccaa

SEQ ID NO: 2549931 - RNA, 19 nt, Artificial Sequence
  Description of Artificial Sequence: Synthetic oligonucleotide
ggaugcuguuaccuggacc

SEQ ID NO: 2549932 - RNA, 19 nt, Artificial Sequence
  Description of Artificial Sequence: Synthetic oligonucleotide
gguucacauuucaagggcc

SEQ ID NO: 2549933 - RNA, 19 nt, Artificial Sequence
  Description of Artificial Sequence: Synthetic oligonucleotide
cugaacucccacaagcugu

SEQ ID NO: 2549934 - RNA, 19 nt, Artificial Sequence
  Description of Artificial Sequence: Synthetic oligonucleotide
aaucacuaugagggugaca

SEQ ID NO: 2549935 - RNA, 19 nt, Artificial Sequence
  Description of Artificial Sequence: Synthetic oligonucleotide
uaccuggaccuagaauaag

SEQ ID NO: 2549936 - RNA, 19 nt, Artificial Sequence
  Description of Artificial Sequence: Synthetic oligonucleotide
gaagucacacauggauaac

SEQ ID NO: 2549937 - RNA, 19 nt, Artificial Sequence
  Description of Artificial Sequence: Synthetic oligonucleotide
aaggcucaauaugauggua

SEQ ID NO: 2549938 - RNA, 19 nt, Artificial Sequence
  Description of Artificial Sequence: Synthetic oligonucleotide
gcugaacucccacaagcug

SEQ ID NO: 2549939 - RNA, 19 nt, Artificial Sequence
  Description of Artificial Sequence: Synthetic oligonucleotide
cagaguuuauggguuugug

SEQ ID NO: 2549940 - RNA, 19 nt, Artificial Sequence
  Description of Artificial Sequence: Synthetic oligonucleotide
gcuucccgaaagcagguug

SEQ ID NO: 2549941 - RNA, 19 nt, Artificial Sequence
  Description of Artificial Sequence: Synthetic oligonucleotide
aggcucaauaugaugguau

SEQ ID NO: 2549942 - RNA, 19 nt, Artificial Sequence
  Description of Artificial Sequence: Synthetic oligonucleotide
gaccuagaauaaggguucc

SEQ ID NO: 2549943 - RNA, 19 nt, Artificial Sequence
  Description of Artificial Sequence: Synthetic oligonucleotide
ucccgaaacagcgcgccga

SEQ ID NO: 2549944 - RNA, 19 nt, Artificial Sequence
  Description of Artificial Sequence: Synthetic oligonucleotide
uggggauuuugcccagauc

SEQ ID NO: 2549945 - RNA, 19 nt, Artificial Sequence
  Description of Artificial Sequence: Synthetic oligonucleotide
ggaccuagaauaaggguuc

SEQ ID NO: 2549946 - RNA, 19 nt, Artificial Sequence
  Description of Artificial Sequence: Synthetic oligonucleotide
cacuaugagggugacaucu

SEQ ID NO: 2549947 - RNA, 19 nt, Artificial Sequence
  Description of Artificial Sequence: Synthetic oligonucleotide
gcucuauaggcgaaugagc

SEQ ID NO: 2549948 - RNA, 19 nt, Artificial Sequence
  Description of Artificial Sequence: Synthetic oligonucleotide
gacgcucuuggggauuuug

SEQ ID NO: 2549949 - RNA, 19 nt, Artificial Sequence
  Description of Artificial Sequence: Synthetic oligonucleotide
uaggucugcucaugaaguu

SEQ ID NO: 2549950 - RNA, 19 nt, Artificial Sequence
  Description of Artificial Sequence: Synthetic oligonucleotide
gaaacagcgcgccgaacgu

SEQ ID NO: 2549951 - RNA, 19 nt, Artificial Sequence
  Description of Artificial Sequence: Synthetic oligonucleotide
cucaauaugaugguaugau

SEQ ID NO: 2549952 - RNA, 19 nt, Artificial Sequence
  Description of Artificial Sequence: Synthetic oligonucleotide
cauucacaaguggaagauc

SEQ ID NO: 2549953 - RNA, 19 nt, Artificial Sequence
  Description of Artificial Sequence: Synthetic oligonucleotide
cucggaggacgcucuuggg

SEQ ID NO: 2549954 - RNA, 19 nt, Artificial Sequence
  Description of Artificial Sequence: Synthetic oligonucleotide
uauaggcgaaugagcuuuu

SEQ ID NO: 2549955 - RNA, 19 nt, Artificial Sequence
  Description of Artificial Sequence: Synthetic oligonucleotide
guaggucugcucaugaagu

SEQ ID NO: 2549956 - RNA, 19 nt, Artificial Sequence
  Description of Artificial Sequence: Synthetic oligonucleotide
cacauggauaacuguaggu

SEQ ID NO: 2549957 - RNA, 19 nt, Artificial Sequence
  Description of Artificial Sequence: Synthetic oligonucleotide
agggugacaucugcuucuc

SEQ ID NO: 2549958 - RNA, 19 nt, Artificial Sequence
  Description of Artificial Sequence: Synthetic oligonucleotide
cggugcacaaaguggaugc

SEQ ID NO: 2549959 - RNA, 19 nt, Artificial Sequence
  Description of Artificial Sequence: Synthetic oligonucleotide
caagggcccauucacaagu

SEQ ID NO: 2549960 - RNA, 19 nt, Artificial Sequence
  Description of Artificial Sequence: Synthetic oligonucleotide
caccuugcugagcuggguc

SEQ ID NO: 2549961 - RNA, 19 nt, Artificial Sequence
  Description of Artificial Sequence: Synthetic oligonucleotide
gaucccaugugaagucaca

SEQ ID NO: 2549962 - RNA, 19 nt, Artificial Sequence
  Description of Artificial Sequence: Synthetic oligonucleotide
gguaugaugacuguccaau

SEQ ID NO: 2549963 - RNA, 19 nt, Artificial Sequence
  Description of Artificial Sequence: Synthetic oligonucleotide
ucacuaugagggugacauc

SEQ ID NO: 2549964 - RNA, 19 nt, Artificial Sequence
  Description of Artificial Sequence: Synthetic oligonucleotide
aagggcccauucacaagug

SEQ ID NO: 2549965 - RNA, 19 nt, Artificial Sequence
  Description of Artificial Sequence: Synthetic oligonucleotide
ggcgaaugagcuuuugugu

SEQ ID NO: 2549966 - RNA, 19 nt, Artificial Sequence
  Description of Artificial Sequence: Synthetic oligonucleotide
ugcuucucggaggacgcuc

SEQ ID NO: 2549967 - RNA, 19 nt, Artificial Sequence
  Description of Artificial Sequence: Synthetic oligonucleotide
caggaucaacauagauuuc

SEQ ID NO: 2549968 - RNA, 19 nt, Artificial Sequence
  Description of Artificial Sequence: Synthetic oligonucleotide
cuauaggcgaaugagcuuu

SEQ ID NO: 2549969 - RNA, 19 nt, Artificial Sequence
  Description of Artificial Sequence: Synthetic oligonucleotide
ccucacgaacaccaccacg

SEQ ID NO: 2549970 - RNA, 19 nt, Artificial Sequence
  Description of Artificial Sequence: Synthetic oligonucleotide
cgaacgucacccuucuccc

SEQ ID NO: 2549971 - RNA, 19 nt, Artificial Sequence
  Description of Artificial Sequence: Synthetic oligonucleotide
uucccgaaagcagguugga

SEQ ID NO: 2549972 - RNA, 19 nt, Artificial Sequence
  Description of Artificial Sequence: Synthetic oligonucleotide
gugauccaaccuauuccug

SEQ ID NO: 2549973 - RNA, 19 nt, Artificial Sequence
  Description of Artificial Sequence: Synthetic oligonucleotide
auaggcgaaugagcuuuug

SEQ ID NO: 2549974 - RNA, 19 nt, Artificial Sequence
  Description of Artificial Sequence: Synthetic oligonucleotide
cuggaccuagaauaagggu

SEQ ID NO: 2549975 - RNA, 19 nt, Artificial Sequence
  Description of Artificial Sequence: Synthetic oligonucleotide
aaagcagguuggacuuuau

SEQ ID NO: 2549976 - RNA, 19 nt, Artificial Sequence
  Description of Artificial Sequence: Synthetic oligonucleotide
ccaugugaagucacacaug

SEQ ID NO: 2549977 - RNA, 19 nt, Artificial Sequence
  Description of Artificial Sequence: Synthetic oligonucleotide
cucccgaaacagcgcgccg

SEQ ID NO: 2549978 - RNA, 19 nt, Artificial Sequence
  Description of Artificial Sequence: Synthetic oligonucleotide
accuagaauaaggguucca

SEQ ID NO: 2549979 - RNA, 19 nt, Artificial Sequence
  Description of Artificial Sequence: Synthetic oligonucleotide
auauagcucuauaggcgaa

SEQ ID NO: 2549980 - RNA, 19 nt, Artificial Sequence
  Description of Artificial Sequence: Synthetic oligonucleotide
caaucacuaugagggugac

SEQ ID NO: 2549981 - RNA, 19 nt, Artificial Sequence
  Description of Artificial Sequence: Synthetic oligonucleotide
agaggccauaaaauuuaaa

SEQ ID NO: 2549982 - RNA, 19 nt, Artificial Sequence
  Description of Artificial Sequence: Synthetic oligonucleotide
ggauuuugcccagauccuc

SEQ ID NO: 2549983 - RNA, 19 nt, Artificial Sequence
  Description of Artificial Sequence: Synthetic oligonucleotide
ucucccggacgcguccugc

SEQ ID NO: 2549984 - RNA, 19 nt, Artificial Sequence
  Description of Artificial Sequence: Synthetic oligonucleotide
gccuaucccauuucuggca

SEQ ID NO: 2549985 - RNA, 19 nt, Artificial Sequence
  Description of Artificial Sequence: Synthetic oligonucleotide
cucucaggaucaacauaga

SEQ ID NO: 2549986 - RNA, 19 nt, Artificial Sequence
  Description of Artificial Sequence: Synthetic oligonucleotide
ucccggacgcguccugcac

SEQ ID NO: 2549987 - RNA, 19 nt, Artificial Sequence
  Description of Artificial Sequence: Synthetic oligonucleotide
gcucaauaugaugguauga

SEQ ID NO: 2549988 - RNA, 19 nt, Artificial Sequence
  Description of Artificial Sequence: Synthetic oligonucleotide
gggugacaucugcuucucg

SEQ ID NO: 2549989 - RNA, 19 nt, Artificial Sequence
  Description of Artificial Sequence: Synthetic oligonucleotide
ccagugacugcccaccaca

SEQ ID NO: 2549990 - RNA, 19 nt, Artificial Sequence
  Description of Artificial Sequence: Synthetic oligonucleotide
ccacaagcuguaaaacaga

SEQ ID NO: 2549991 - RNA, 19 nt, Artificial Sequence
  Description of Artificial Sequence: Synthetic oligonucleotide
ggacgcguccugcaccggc

SEQ ID NO: 2549992 - RNA, 19 nt, Artificial Sequence
  Description of Artificial Sequence: Synthetic oligonucleotide
uucuggcaacugauaccuu

SEQ ID NO: 2549993 - RNA, 19 nt, Artificial Sequence
  Description of Artificial Sequence: Synthetic oligonucleotide
ccggacgcguccugcaccg

SEQ ID NO: 2549994 - RNA, 19 nt, Artificial Sequence
  Description of Artificial Sequence: Synthetic oligonucleotide
acgucacccuucucccgga

SEQ ID NO: 2549995 - RNA, 19 nt, Artificial Sequence
  Description of Artificial Sequence: Synthetic oligonucleotide
uccugucucggugcacaaa

SEQ ID NO: 2549996 - RNA, 19 nt, Artificial Sequence
  Description of Artificial Sequence: Synthetic oligonucleotide
cgccgcucccgaaacagcg

SEQ ID NO: 2549997 - RNA, 19 nt, Artificial Sequence
  Description of Artificial Sequence: Synthetic oligonucleotide
ugauaccuuucagcauaua

SEQ ID NO: 2549998 - RNA, 19 nt, Artificial Sequence
  Description of Artificial Sequence: Synthetic oligonucleotide
gucaugaugccuggcauuu

SEQ ID NO: 2549999 - RNA, 19 nt, Artificial Sequence
  Description of Artificial Sequence: Synthetic oligonucleotide
gcucccgaaacagcgcgcc

SEQ ID NO: 2550000 - RNA, 19 nt, Artificial Sequence
  Description of Artificial Sequence: Synthetic oligonucleotide
cccgaaagcagguuggacu

SEQ ID NO: 2550001 - RNA, 19 nt, Artificial Sequence
  Description of Artificial Sequence: Synthetic oligonucleotide
gcucugaaggcuucccgaa

SEQ ID NO: 2550002 - RNA, 19 nt, Artificial Sequence
  Description of Artificial Sequence: Synthetic oligonucleotide
cacccuucucccggacgcg

SEQ ID NO: 2550003 - RNA, 19 nt, Artificial Sequence
  Description of Artificial Sequence: Synthetic oligonucleotide
ucaugaugccuggcauuuu

SEQ ID NO: 2550004 - RNA, 19 nt, Artificial Sequence
  Description of Artificial Sequence: Synthetic oligonucleotide
guccaaucacuaugagggu

SEQ ID NO: 2550005 - RNA, 19 nt, Artificial Sequence
  Description of Artificial Sequence: Synthetic oligonucleotide
caccacggcccgccgcucc

SEQ ID NO: 2550006 - RNA, 19 nt, Artificial Sequence
  Description of Artificial Sequence: Synthetic oligonucleotide
gcgaaugagcuuuuguguu

SEQ ID NO: 2550007 - RNA, 19 nt, Artificial Sequence
  Description of Artificial Sequence: Synthetic oligonucleotide
cagcgcgccgaacgucacc

SEQ ID NO: 2550008 - RNA, 19 nt, Artificial Sequence
  Description of Artificial Sequence: Synthetic oligonucleotide
gucugcucaugaaguucac

SEQ ID NO: 2550009 - RNA, 19 nt, Artificial Sequence
  Description of Artificial Sequence: Synthetic oligonucleotide
cccaaucuuuuauaaauuu

SEQ ID NO: 2550010 - RNA, 19 nt, Artificial Sequence
  Description of Artificial Sequence: Synthetic oligonucleotide
cugauaccuuucagcauau

SEQ ID NO: 2550011 - RNA, 19 nt, Artificial Sequence
  Description of Artificial Sequence: Synthetic oligonucleotide
gguuugugauccaaccuau

SEQ ID NO: 2550012 - RNA, 19 nt, Artificial Sequence
  Description of Artificial Sequence: Synthetic oligonucleotide
aggacgcucuuggggauuu

SEQ ID NO: 2550013 - RNA, 19 nt, Artificial Sequence
  Description of Artificial Sequence: Synthetic oligonucleotide
cggaggacgcucuugggga

SEQ ID NO: 2550014 - RNA, 19 nt, Artificial Sequence
  Description of Artificial Sequence: Synthetic oligonucleotide
cccggacgcguccugcacc

SEQ ID NO: 2550015 - RNA, 19 nt, Artificial Sequence
  Description of Artificial Sequence: Synthetic oligonucleotide
cuuggggauuuugcccaga

SEQ ID NO: 2550016 - RNA, 19 nt, Artificial Sequence
  Description of Artificial Sequence: Synthetic oligonucleotide
cucccggacgcguccugca

SEQ ID NO: 2550017 - RNA, 19 nt, Artificial Sequence
  Description of Artificial Sequence: Synthetic oligonucleotide
cugucucggugcacaaagu

SEQ ID NO: 2550018 - RNA, 19 nt, Artificial Sequence
  Description of Artificial Sequence: Synthetic oligonucleotide
gcugggucuccuuggaaau

SEQ ID NO: 2550019 - RNA, 19 nt, Artificial Sequence
  Description of Artificial Sequence: Synthetic oligonucleotide
cccgccgcucccgaaacag

SEQ ID NO: 2550020 - RNA, 19 nt, Artificial Sequence
  Description of Artificial Sequence: Synthetic oligonucleotide
ggcugaacucccacaagcu

SEQ ID NO: 2550021 - RNA, 19 nt, Artificial Sequence
  Description of Artificial Sequence: Synthetic oligonucleotide
ccuccacguauucuuuaca

SEQ ID NO: 2550022 - RNA, 19 nt, Artificial Sequence
  Description of Artificial Sequence: Synthetic oligonucleotide
gggauuuugcccagauccu

SEQ ID NO: 2550023 - RNA, 19 nt, Artificial Sequence
  Description of Artificial Sequence: Synthetic oligonucleotide
ggucuccuuggaaaucaaa

SEQ ID NO: 2550024 - RNA, 19 nt, Artificial Sequence
  Description of Artificial Sequence: Synthetic oligonucleotide
cagauccuccacguauucu

SEQ ID NO: 2550025 - RNA, 19 nt, Artificial Sequence
  Description of Artificial Sequence: Synthetic oligonucleotide
guuugugauccaaccuauu

SEQ ID NO: 2550026 - RNA, 19 nt, Artificial Sequence
  Description of Artificial Sequence: Synthetic oligonucleotide
ccgaaagcagguuggacuu

SEQ ID NO: 2550027 - RNA, 19 nt, Artificial Sequence
  Description of Artificial Sequence: Synthetic oligonucleotide
gccgcucccgaaacagcgc

SEQ ID NO: 2550028 - RNA, 19 nt, Artificial Sequence
  Description of Artificial Sequence: Synthetic oligonucleotide
ccauucacaaguggaagau

SEQ ID NO: 2550029 - RNA, 19 nt, Artificial Sequence
  Description of Artificial Sequence: Synthetic oligonucleotide
cacauuucaagggcccauu

SEQ ID NO: 2550030 - RNA, 19 nt, Artificial Sequence
  Description of Artificial Sequence: Synthetic oligonucleotide
ggcccgccgcucccgaaac

SEQ ID NO: 2550031 - RNA, 19 nt, Artificial Sequence
  Description of Artificial Sequence: Synthetic oligonucleotide
ggugcacaaaguggaugcu

SEQ ID NO: 2550032 - RNA, 19 nt, Artificial Sequence
  Description of Artificial Sequence: Synthetic oligonucleotide
ccgccgcucccgaaacagc

SEQ ID NO: 2550033 - RNA, 19 nt, Artificial Sequence
  Description of Artificial Sequence: Synthetic oligonucleotide
gcuguaaaacagaguuuau

SEQ ID NO: 2550034 - RNA, 19 nt, Artificial Sequence
  Description of Artificial Sequence: Synthetic oligonucleotide
ccugaggaggaaauuucuu

SEQ ID NO: 2550035 - RNA, 19 nt, Artificial Sequence
  Description of Artificial Sequence: Synthetic oligonucleotide
gcgccgaacgucacccuuc

SEQ ID NO: 2550036 - RNA, 19 nt, Artificial Sequence
  Description of Artificial Sequence: Synthetic oligonucleotide
ggaggacgcucuuggggau

SEQ ID NO: 2550037 - RNA, 19 nt, Artificial Sequence
  Description of Artificial Sequence: Synthetic oligonucleotide
gcuucucggaggacgcucu

SEQ ID NO: 2550038 - RNA, 19 nt, Artificial Sequence
  Description of Artificial Sequence: Synthetic oligonucleotide
gaggacgcucuuggggauu

SEQ ID NO: 2550039 - RNA, 19 nt, Artificial Sequence
  Description of Artificial Sequence: Synthetic oligonucleotide
gcgggccagugacugccca

SEQ ID NO: 2550040 - RNA, 19 nt, Artificial Sequence
  Description of Artificial Sequence: Synthetic oligonucleotide
cccgaaacagcgcgccgaa

SEQ ID NO: 2550041 - RNA, 19 nt, Artificial Sequence
  Description of Artificial Sequence: Synthetic oligonucleotide
gggucuccuuggaaaucaa

SEQ ID NO: 2550042 - RNA, 19 nt, Artificial Sequence
  Description of Artificial Sequence: Synthetic oligonucleotide
cuucucccggacgcguccu

SEQ ID NO: 2550043 - RNA, 19 nt, Artificial Sequence
  Description of Artificial Sequence: Synthetic oligonucleotide
cccucuuuucauucccaau

SEQ ID NO: 2550044 - RNA, 19 nt, Artificial Sequence
  Description of Artificial Sequence: Synthetic oligonucleotide
ccgaaacagcgcgccgaac

SEQ ID NO: 2550045 - RNA, 19 nt, Artificial Sequence
  Description of Artificial Sequence: Synthetic oligonucleotide
cacggcccgccgcucccga

SEQ ID NO: 2550046 - RNA, 19 nt, Artificial Sequence
  Description of Artificial Sequence: Synthetic oligonucleotide
gccgaacgucacccuucuc

SEQ ID NO: 2550047 - RNA, 19 nt, Artificial Sequence
  Description of Artificial Sequence: Synthetic oligonucleotide
cugcuucucggaggacgcu

SEQ ID NO: 2550048 - RNA, 19 nt, Artificial Sequence
  Description of Artificial Sequence: Synthetic oligonucleotide
ccacggcccgccgcucccg

SEQ ID NO: 2550049 - RNA, 19 nt, Artificial Sequence
  Description of Artificial Sequence: Synthetic oligonucleotide
gcccgccgcucccgaaaca

SEQ ID NO: 2550050 - RNA, 19 nt, Artificial Sequence
  Description of Artificial Sequence: Synthetic oligonucleotide
ggcuucccgaaagcagguu

SEQ ID NO: 2550051 - RNA, 19 nt, Artificial Sequence
  Description of Artificial Sequence: Synthetic oligonucleotide
cgccgaacgucacccuucu

SEQ ID NO: 2550052 - RNA, 19 nt, Artificial Sequence
  Description of Artificial Sequence: Synthetic oligonucleotide
cggacgcguccugcaccgg

SEQ ID NO: 2550053 - RNA, 19 nt, Artificial Sequence
  Description of Artificial Sequence: Synthetic oligonucleotide
ccaccacggcccgccgcuc

SEQ ID NO: 2550054 - RNA, 19 nt, Artificial Sequence
  Description of Artificial Sequence: Synthetic oligonucleotide
gcgcgccgaacgucacccu

SEQ ID NO: 2550055 - RNA, 19 nt, Artificial Sequence
  Description of Artificial Sequence: Synthetic oligonucleotide
cgcgccgaacgucacccuu

SEQ ID NO: 2550056 - RNA, 19 nt, Artificial Sequence
  Description of Artificial Sequence: Synthetic oligonucleotide
ggacgcucuuggggauuuu

SEQ ID NO: 2550057 - RNA, 19 nt, Artificial Sequence
  Description of Artificial Sequence: Synthetic oligonucleotide
uguccuuagagcaucaggg

SEQ ID NO: 2550058 - RNA, 19 nt, Artificial Sequence
  Description of Artificial Sequence: Synthetic oligonucleotide
aaagccuugaagguugggc

SEQ ID NO: 2550059 - RNA, 19 nt, Artificial Sequence
  Description of Artificial Sequence: Synthetic oligonucleotide
uuucaaaauggucugggug

SEQ ID NO: 2550060 - RNA, 19 nt, Artificial Sequence
  Description of Artificial Sequence: Synthetic oligonucleotide
ucuaugaugucaaagugau

SEQ ID NO: 2550061 - RNA, 19 nt, Artificial Sequence
  Description of Artificial Sequence: Synthetic oligonucleotide
augugcaugucccacgugc

SEQ ID NO: 2550062 - RNA, 19 nt, Artificial Sequence
  Description of Artificial Sequence: Synthetic oligonucleotide
ucugggaggguauauauga

SEQ ID NO: 2550063 - RNA, 19 nt, Artificial Sequence
  Description of Artificial Sequence: Synthetic oligonucleotide
cugggugagaacaucaucc

SEQ ID NO: 2550064 - RNA, 19 nt, Artificial Sequence
  Description of Artificial Sequence: Synthetic oligonucleotide
gagaaugacaggcagggug

SEQ ID NO: 2550065 - RNA, 19 nt, Artificial Sequence
  Description of Artificial Sequence: Synthetic oligonucleotide
aacgcugcgggucaccugg

SEQ ID NO: 2550066 - RNA, 19 nt, Artificial Sequence
  Description of Artificial Sequence: Synthetic oligonucleotide
augucaaagugauccacgc

SEQ ID NO: 2550067 - RNA, 19 nt, Artificial Sequence
  Description of Artificial Sequence: Synthetic oligonucleotide
aacaucauccucuuggguu

SEQ ID NO: 2550068 - RNA, 19 nt, Artificial Sequence
  Description of Artificial Sequence: Synthetic oligonucleotide
uggggagucaugcugaccc

SEQ ID NO: 2550069 - RNA, 19 nt, Artificial Sequence
  Description of Artificial Sequence: Synthetic oligonucleotide
ucauagaacucccuggacu

SEQ ID NO: 2550070 - RNA, 19 nt, Artificial Sequence
  Description of Artificial Sequence: Synthetic oligonucleotide
uuggauaccgccucuguag

SEQ ID NO: 2550071 - RNA, 19 nt, Artificial Sequence
  Description of Artificial Sequence: Synthetic oligonucleotide
aucucauagaacucccugg

SEQ ID NO: 2550072 - RNA, 19 nt, Artificial Sequence
  Description of Artificial Sequence: Synthetic oligonucleotide
guagaucccacucaccagg

SEQ ID NO: 2550073 - RNA, 19 nt, Artificial Sequence
  Description of Artificial Sequence: Synthetic oligonucleotide
acaacaaccaacacaggac

SEQ ID NO: 2550074 - RNA, 19 nt, Artificial Sequence
  Description of Artificial Sequence: Synthetic oligonucleotide
acaacagggagagugcacc

SEQ ID NO: 2550075 - RNA, 19 nt, Artificial Sequence
  Description of Artificial Sequence: Synthetic oligonucleotide
cucuguaggaacacaacgc

SEQ ID NO: 2550076 - RNA, 19 nt, Artificial Sequence
  Description of Artificial Sequence: Synthetic oligonucleotide
agaacaucauccucuuggg

SEQ ID NO: 2550077 - RNA, 19 nt, Artificial Sequence
  Description of Artificial Sequence: Synthetic oligonucleotide
ucguagaucccacucacca

SEQ ID NO: 2550078 - RNA, 19 nt, Artificial Sequence
  Description of Artificial Sequence: Synthetic oligonucleotide
ucucauagaacucccugga

SEQ ID NO: 2550079 - RNA, 19 nt, Artificial Sequence
  Description of Artificial Sequence: Synthetic oligonucleotide
uguccgcagagguagaugc

SEQ ID NO: 2550080 - RNA, 19 nt, Artificial Sequence
  Description of Artificial Sequence: Synthetic oligonucleotide
guagcuaugugcauguccc

SEQ ID NO: 2550081 - RNA, 19 nt, Artificial Sequence
  Description of Artificial Sequence: Synthetic oligonucleotide
uggguuagauucucuauga

SEQ ID NO: 2550082 - RNA, 19 nt, Artificial Sequence
  Description of Artificial Sequence: Synthetic oligonucleotide
guuagauucucuaugaugu

SEQ ID NO: 2550083 - RNA, 19 nt, Artificial Sequence
  Description of Artificial Sequence: Synthetic oligonucleotide
augcugacccacaacaacc

SEQ ID NO: 2550084 - RNA, 19 nt, Artificial Sequence
  Description of Artificial Sequence: Synthetic oligonucleotide
aaaauggucugggugagaa

SEQ ID NO: 2550085 - RNA, 19 nt, Artificial Sequence
  Description of Artificial Sequence: Synthetic oligonucleotide
ucagggaagauuguuuuca

SEQ ID NO: 2550086 - RNA, 19 nt, Artificial Sequence
  Description of Artificial Sequence: Synthetic oligonucleotide
caugcuugguccaaccggc

SEQ ID NO: 2550087 - RNA, 19 nt, Artificial Sequence
  Description of Artificial Sequence: Synthetic oligonucleotide
uggauaccgccucuguagg

SEQ ID NO: 2550088 - RNA, 19 nt, Artificial Sequence
  Description of Artificial Sequence: Synthetic oligonucleotide
aacacaacgcugcggguca

SEQ ID NO: 2550089 - RNA, 19 nt, Artificial Sequence
  Description of Artificial Sequence: Synthetic oligonucleotide
uguuuucaaaauggucugg

SEQ ID NO: 2550090 - RNA, 19 nt, Artificial Sequence
  Description of Artificial Sequence: Synthetic oligonucleotide
gaauucuggggagucaugc

SEQ ID NO: 2550091 - RNA, 19 nt, Artificial Sequence
  Description of Artificial Sequence: Synthetic oligonucleotide
gagugcaccucauggacag

SEQ ID NO: 2550092 - RNA, 19 nt, Artificial Sequence
  Description of Artificial Sequence: Synthetic oligonucleotide
agugauccacgccaggcag

SEQ ID NO: 2550093 - RNA, 19 nt, Artificial Sequence
  Description of Artificial Sequence: Synthetic oligonucleotide
gguuagauucucuaugaug

SEQ ID NO: 2550094 - RNA, 19 nt, Artificial Sequence
  Description of Artificial Sequence: Synthetic oligonucleotide
uuuucaaaauggucugggu

SEQ ID NO: 2550095 - RNA, 19 nt, Artificial Sequence
  Description of Artificial Sequence: Synthetic oligonucleotide
cauggacagacagacaggc

SEQ ID NO: 2550096 - RNA, 19 nt, Artificial Sequence
  Description of Artificial Sequence: Synthetic oligonucleotide
uucucugagcgucuuccag

SEQ ID NO: 2550097 - RNA, 19 nt, Artificial Sequence
  Description of Artificial Sequence: Synthetic oligonucleotide
agaccagguguccuuagag

SEQ ID NO: 2550098 - RNA, 19 nt, Artificial Sequence
  Description of Artificial Sequence: Synthetic oligonucleotide
gagagugcaccucauggac

SEQ ID NO: 2550099 - RNA, 19 nt, Artificial Sequence
  Description of Artificial Sequence: Synthetic oligonucleotide
ggaaagaggccuuccaucc

SEQ ID NO: 2550100 - RNA, 19 nt, Artificial Sequence
  Description of Artificial Sequence: Synthetic oligonucleotide
guguccuuagagcaucagg

SEQ ID NO: 2550101 - RNA, 19 nt, Artificial Sequence
  Description of Artificial Sequence: Synthetic oligonucleotide
cugucgguggaauucuggg

SEQ ID NO: 2550102 - RNA, 19 nt, Artificial Sequence
  Description of Artificial Sequence: Synthetic oligonucleotide
gggagagugcaccucaugg

SEQ ID NO: 2550103 - RNA, 19 nt, Artificial Sequence
  Description of Artificial Sequence: Synthetic oligonucleotide
ugugcaugucccacgugcc

SEQ ID NO: 2550104 - RNA, 19 nt, Artificial Sequence
  Description of Artificial Sequence: Synthetic oligonucleotide
cacaacaaccaacacagga

SEQ ID NO: 2550105 - RNA, 19 nt, Artificial Sequence
  Description of Artificial Sequence: Synthetic oligonucleotide
uggaaagaggccuuccauc

SEQ ID NO: 2550106 - RNA, 19 nt, Artificial Sequence
  Description of Artificial Sequence: Synthetic oligonucleotide
cucuaugaugucaaaguga

SEQ ID NO: 2550107 - RNA, 19 nt, Artificial Sequence
  Description of Artificial Sequence: Synthetic oligonucleotide
cucugagcgucuuccaggg

SEQ ID NO: 2550108 - RNA, 19 nt, Artificial Sequence
  Description of Artificial Sequence: Synthetic oligonucleotide
caucucauagaacucccug

SEQ ID NO: 2550109 - RNA, 19 nt, Artificial Sequence
  Description of Artificial Sequence: Synthetic oligonucleotide
ugucccacgugccaaucug

SEQ ID NO: 2550110 - RNA, 19 nt, Artificial Sequence
  Description of Artificial Sequence: Synthetic oligonucleotide
aaagaggccuuccauccua

SEQ ID NO: 2550111 - RNA, 19 nt, Artificial Sequence
  Description of Artificial Sequence: Synthetic oligonucleotide
guccacaacagggagagug

SEQ ID NO: 2550112 - RNA, 19 nt, Artificial Sequence
  Description of Artificial Sequence: Synthetic oligonucleotide
uucugggaggguauauaug

SEQ ID NO: 2550113 - RNA, 19 nt, Artificial Sequence
  Description of Artificial Sequence: Synthetic oligonucleotide
agucaugcugacccacaac

SEQ ID NO: 2550114 - RNA, 19 nt, Artificial Sequence
  Description of Artificial Sequence: Synthetic oligonucleotide
agacucagccagcugguag

SEQ ID NO: 2550115 - RNA, 19 nt, Artificial Sequence
  Description of Artificial Sequence: Synthetic oligonucleotide
cuucgcuggagccaccucc

SEQ ID NO: 2550116 - RNA, 19 nt, Artificial Sequence
  Description of Artificial Sequence: Synthetic oligonucleotide
agcaucucauagaacuccc

SEQ ID NO: 2550117 - RNA, 19 nt, Artificial Sequence
  Description of Artificial Sequence: Synthetic oligonucleotide
gaccagguguccuuagagc

SEQ ID NO: 2550118 - RNA, 19 nt, Artificial Sequence
  Description of Artificial Sequence: Synthetic oligonucleotide
auucugggaggguauauau

SEQ ID NO: 2550119 - RNA, 19 nt, Artificial Sequence
  Description of Artificial Sequence: Synthetic oligonucleotide
caugcugacccacaacaac

SEQ ID NO: 2550120 - RNA, 19 nt, Artificial Sequence
  Description of Artificial Sequence: Synthetic oligonucleotide
agugcugugggcuguuucu

SEQ ID NO: 2550121 - RNA, 19 nt, Artificial Sequence
  Description of Artificial Sequence: Synthetic oligonucleotide
ugcugacccacaacaacca

SEQ ID NO: 2550122 - RNA, 19 nt, Artificial Sequence
  Description of Artificial Sequence: Synthetic oligonucleotide
uacucgguguagcaucuca

SEQ ID NO: 2550123 - RNA, 19 nt, Artificial Sequence
  Description of Artificial Sequence: Synthetic oligonucleotide
aacaaccaacacaggacag

SEQ ID NO: 2550124 - RNA, 19 nt, Artificial Sequence
  Description of Artificial Sequence: Synthetic oligonucleotide
guaggaacacaacgcugcg

SEQ ID NO: 2550125 - RNA, 19 nt, Artificial Sequence
  Description of Artificial Sequence: Synthetic oligonucleotide
ugagcgucuuccaggguca

SEQ ID NO: 2550126 - RNA, 19 nt, Artificial Sequence
  Description of Artificial Sequence: Synthetic oligonucleotide
accaugcuugguccaaccg

SEQ ID NO: 2550127 - RNA, 19 nt, Artificial Sequence
  Description of Artificial Sequence: Synthetic oligonucleotide
agcuaugugcaugucccac

SEQ ID NO: 2550128 - RNA, 19 nt, Artificial Sequence
  Description of Artificial Sequence: Synthetic oligonucleotide
gguagcuaugugcaugucc

SEQ ID NO: 2550129 - RNA, 19 nt, Artificial Sequence
  Description of Artificial Sequence: Synthetic oligonucleotide
acagacaggccaguguuag

SEQ ID NO: 2550130 - RNA, 19 nt, Artificial Sequence
  Description of Artificial Sequence: Synthetic oligonucleotide
uccuacucgguguagcauc

SEQ ID NO: 2550131 - RNA, 19 nt, Artificial Sequence
  Description of Artificial Sequence: Synthetic oligonucleotide
caggguguguccacaacag

SEQ ID NO: 2550132 - RNA, 19 nt, Artificial Sequence
  Description of Artificial Sequence: Synthetic oligonucleotide
gcaaggagcaccauggcag

SEQ ID NO: 2550133 - RNA, 19 nt, Artificial Sequence
  Description of Artificial Sequence: Synthetic oligonucleotide
uuagauucucuaugauguc

SEQ ID NO: 2550134 - RNA, 19 nt, Artificial Sequence
  Description of Artificial Sequence: Synthetic oligonucleotide
caacaaccaacacaggaca

SEQ ID NO: 2550135 - RNA, 19 nt, Artificial Sequence
  Description of Artificial Sequence: Synthetic oligonucleotide
cacgugccaaucuguaggg

SEQ ID NO: 2550136 - RNA, 19 nt, Artificial Sequence
  Description of Artificial Sequence: Synthetic oligonucleotide
gucgguggaauucugggga

SEQ ID NO: 2550137 - RNA, 19 nt, Artificial Sequence
  Description of Artificial Sequence: Synthetic oligonucleotide
ugggugagaacaucauccu

SEQ ID NO: 2550138 - RNA, 19 nt, Artificial Sequence
  Description of Artificial Sequence: Synthetic oligonucleotide
ucccguuggggagagaaug

SEQ ID NO: 2550139 - RNA, 19 nt, Artificial Sequence
  Description of Artificial Sequence: Synthetic oligonucleotide
guugcuuggauaccgccuc

SEQ ID NO: 2550140 - RNA, 19 nt, Artificial Sequence
  Description of Artificial Sequence: Synthetic oligonucleotide
augacaggcaggguguguc

SEQ ID NO: 2550141 - RNA, 19 nt, Artificial Sequence
  Description of Artificial Sequence: Synthetic oligonucleotide
gacccacaggcuucgcugg

SEQ ID NO: 2550142 - RNA, 19 nt, Artificial Sequence
  Description of Artificial Sequence: Synthetic oligonucleotide
ccucuguaggaacacaacg

SEQ ID NO: 2550143 - RNA, 19 nt, Artificial Sequence
  Description of Artificial Sequence: Synthetic oligonucleotide
auaccgccucuguaggaac

SEQ ID NO: 2550144 - RNA, 19 nt, Artificial Sequence
  Description of Artificial Sequence: Synthetic oligonucleotide
ggguguguccacaacaggg

SEQ ID NO: 2550145 - RNA, 19 nt, Artificial Sequence
  Description of Artificial Sequence: Synthetic oligonucleotide
cuccaagcagugcuguggg

SEQ ID NO: 2550146 - RNA, 19 nt, Artificial Sequence
  Description of Artificial Sequence: Synthetic oligonucleotide
augaugucaaagugaucca

SEQ ID NO: 2550147 - RNA, 19 nt, Artificial Sequence
  Description of Artificial Sequence: Synthetic oligonucleotide
cugagcgucuuccaggguc

SEQ ID NO: 2550148 - RNA, 19 nt, Artificial Sequence
  Description of Artificial Sequence: Synthetic oligonucleotide
acaucauccucuuggguua

SEQ ID NO: 2550149 - RNA, 19 nt, Artificial Sequence
  Description of Artificial Sequence: Synthetic oligonucleotide
uugggcgugacaccaugcu

SEQ ID NO: 2550150 - RNA, 19 nt, Artificial Sequence
  Description of Artificial Sequence: Synthetic oligonucleotide
gguccaaccggcaaggagc

SEQ ID NO: 2550151 - RNA, 19 nt, Artificial Sequence
  Description of Artificial Sequence: Synthetic oligonucleotide
aggguguguccacaacagg

SEQ ID NO: 2550152 - RNA, 19 nt, Artificial Sequence
  Description of Artificial Sequence: Synthetic oligonucleotide
uggacugucgguggaauuc

SEQ ID NO: 2550153 - RNA, 19 nt, Artificial Sequence
  Description of Artificial Sequence: Synthetic oligonucleotide
ccuuagagcaucagggaag

SEQ ID NO: 2550154 - RNA, 19 nt, Artificial Sequence
  Description of Artificial Sequence: Synthetic oligonucleotide
ggagcucccaucccguugg

SEQ ID NO: 2550155 - RNA, 19 nt, Artificial Sequence
  Description of Artificial Sequence: Synthetic oligonucleotide
uggagccaccuccaagcag

SEQ ID NO: 2550156 - RNA, 19 nt, Artificial Sequence
  Description of Artificial Sequence: Synthetic oligonucleotide
gguguagcaucucauagaa

SEQ ID NO: 2550157 - RNA, 19 nt, Artificial Sequence
  Description of Artificial Sequence: Synthetic oligonucleotide
ucgguggaauucuggggag

SEQ ID NO: 2550158 - RNA, 19 nt, Artificial Sequence
  Description of Artificial Sequence: Synthetic oligonucleotide
caaagugauccacgccagg

SEQ ID NO: 2550159 - RNA, 19 nt, Artificial Sequence
  Description of Artificial Sequence: Synthetic oligonucleotide
aagaggccuuccauccuac

SEQ ID NO: 2550160 - RNA, 19 nt, Artificial Sequence
  Description of Artificial Sequence: Synthetic oligonucleotide
gcuaugugcaugucccacg

SEQ ID NO: 2550161 - RNA, 19 nt, Artificial Sequence
  Description of Artificial Sequence: Synthetic oligonucleotide
gaacacaacgcugcggguc

SEQ ID NO: 2550162 - RNA, 19 nt, Artificial Sequence
  Description of Artificial Sequence: Synthetic oligonucleotide
ccacgugccaaucuguagg

SEQ ID NO: 2550163 - RNA, 19 nt, Artificial Sequence
  Description of Artificial Sequence: Synthetic oligonucleotide
aggucguagaucccacuca

SEQ ID NO: 2550164 - RNA, 19 nt, Artificial Sequence
  Description of Artificial Sequence: Synthetic oligonucleotide
ccggcaaggagcaccaugg

SEQ ID NO: 2550165 - RNA, 19 nt, Artificial Sequence
  Description of Artificial Sequence: Synthetic oligonucleotide
acugucgguggaauucugg

SEQ ID NO: 2550166 - RNA, 19 nt, Artificial Sequence
  Description of Artificial Sequence: Synthetic oligonucleotide
accggcaaggagcaccaug

SEQ ID NO: 2550167 - RNA, 19 nt, Artificial Sequence
  Description of Artificial Sequence: Synthetic oligonucleotide
uaugugcaugucccacgug

SEQ ID NO: 2550168 - RNA, 19 nt, Artificial Sequence
  Description of Artificial Sequence: Synthetic oligonucleotide
aggguuccccuggagcucc

SEQ ID NO: 2550169 - RNA, 19 nt, Artificial Sequence
  Description of Artificial Sequence: Synthetic oligonucleotide
auggacagacagacaggcc

SEQ ID NO: 2550170 - RNA, 19 nt, Artificial Sequence
  Description of Artificial Sequence: Synthetic oligonucleotide
ccaugcuugguccaaccgg

SEQ ID NO: 2550171 - RNA, 19 nt, Artificial Sequence
  Description of Artificial Sequence: Synthetic oligonucleotide
uccaggucguagaucccac

SEQ ID NO: 2550172 - RNA, 19 nt, Artificial Sequence
  Description of Artificial Sequence: Synthetic oligonucleotide
cagcugguagcuaugugca

SEQ ID NO: 2550173 - RNA, 19 nt, Artificial Sequence
  Description of Artificial Sequence: Synthetic oligonucleotide
ugcuugguccaaccggcaa

SEQ ID NO: 2550174 - RNA, 19 nt, Artificial Sequence
  Description of Artificial Sequence: Synthetic oligonucleotide
cacaacagggagagugcac

SEQ ID NO: 2550175 - RNA, 19 nt, Artificial Sequence
  Description of Artificial Sequence: Synthetic oligonucleotide
gauaccgccucuguaggaa

SEQ ID NO: 2550176 - RNA, 19 nt, Artificial Sequence
  Description of Artificial Sequence: Synthetic oligonucleotide
cuuagagcaucagggaaga

SEQ ID NO: 2550177 - RNA, 19 nt, Artificial Sequence
  Description of Artificial Sequence: Synthetic oligonucleotide
uaccgccucuguaggaaca

SEQ ID NO: 2550178 - RNA, 19 nt, Artificial Sequence
  Description of Artificial Sequence: Synthetic oligonucleotide
guccuuagagcaucaggga

SEQ ID NO: 2550179 - RNA, 19 nt, Artificial Sequence
  Description of Artificial Sequence: Synthetic oligonucleotide
ugcugugggcuguuucucu

SEQ ID NO: 2550180 - RNA, 19 nt, Artificial Sequence
  Description of Artificial Sequence: Synthetic oligonucleotide
caccaugcuugguccaacc

SEQ ID NO: 2550181 - RNA, 19 nt, Artificial Sequence
  Description of Artificial Sequence: Synthetic oligonucleotide
guaggguuccccuggagcu

SEQ ID NO: 2550182 - RNA, 19 nt, Artificial Sequence
  Description of Artificial Sequence: Synthetic oligonucleotide
ggacccacaggcuucgcug

SEQ ID NO: 2550183 - RNA, 19 nt, Artificial Sequence
  Description of Artificial Sequence: Synthetic oligonucleotide
ugacaccaugcuuggucca

SEQ ID NO: 2550184 - RNA, 19 nt, Artificial Sequence
  Description of Artificial Sequence: Synthetic oligonucleotide
ugccaaucuguaggguucc

SEQ ID NO: 2550185 - RNA, 19 nt, Artificial Sequence
  Description of Artificial Sequence: Synthetic oligonucleotide
cuaugaugucaaagugauc

SEQ ID NO: 2550186 - RNA, 19 nt, Artificial Sequence
  Description of Artificial Sequence: Synthetic oligonucleotide
ggucguagaucccacucac

SEQ ID NO: 2550187 - RNA, 19 nt, Artificial Sequence
  Description of Artificial Sequence: Synthetic oligonucleotide
gauucucuaugaugucaaa

SEQ ID NO: 2550188 - RNA, 19 nt, Artificial Sequence
  Description of Artificial Sequence: Synthetic oligonucleotide
uuccauccuacucggugua

SEQ ID NO: 2550189 - RNA, 19 nt, Artificial Sequence
  Description of Artificial Sequence: Synthetic oligonucleotide
guagcaucucauagaacuc

SEQ ID NO: 2550190 - RNA, 19 nt, Artificial Sequence
  Description of Artificial Sequence: Synthetic oligonucleotide
uagcuaugugcauguccca

SEQ ID NO: 2550191 - RNA, 19 nt, Artificial Sequence
  Description of Artificial Sequence: Synthetic oligonucleotide
agggagagugcaccucaug

SEQ ID NO: 2550192 - RNA, 19 nt, Artificial Sequence
  Description of Artificial Sequence: Synthetic oligonucleotide
ggugagaacaucauccucu

SEQ ID NO: 2550193 - RNA, 19 nt, Artificial Sequence
  Description of Artificial Sequence: Synthetic oligonucleotide
acaccaugcuugguccaac

SEQ ID NO: 2550194 - RNA, 19 nt, Artificial Sequence
  Description of Artificial Sequence: Synthetic oligonucleotide
cauccuacucgguguagca

SEQ ID NO: 2550195 - RNA, 19 nt, Artificial Sequence
  Description of Artificial Sequence: Synthetic oligonucleotide
accgccucuguaggaacac

SEQ ID NO: 2550196 - RNA, 19 nt, Artificial Sequence
  Description of Artificial Sequence: Synthetic oligonucleotide
ggcgugacaccaugcuugg

SEQ ID NO: 2550197 - RNA, 19 nt, Artificial Sequence
  Description of Artificial Sequence: Synthetic oligonucleotide
gagaccagguguccuuaga

SEQ ID NO: 2550198 - RNA, 19 nt, Artificial Sequence
  Description of Artificial Sequence: Synthetic oligonucleotide
ggagagugcaccucaugga

SEQ ID NO: 2550199 - RNA, 19 nt, Artificial Sequence
  Description of Artificial Sequence: Synthetic oligonucleotide
gggcgugacaccaugcuug

SEQ ID NO: 2550200 - RNA, 19 nt, Artificial Sequence
  Description of Artificial Sequence: Synthetic oligonucleotide
ucccacgugccaaucugua

SEQ ID NO: 2550201 - RNA, 19 nt, Artificial Sequence
  Description of Artificial Sequence: Synthetic oligonucleotide
caaucuguaggguuccccu

SEQ ID NO: 2550202 - RNA, 19 nt, Artificial Sequence
  Description of Artificial Sequence: Synthetic oligonucleotide
agcaucagggaagauuguu

SEQ ID NO: 2550203 - RNA, 19 nt, Artificial Sequence
  Description of Artificial Sequence: Synthetic oligonucleotide
ugggcgugacaccaugcuu

SEQ ID NO: 2550204 - RNA, 19 nt, Artificial Sequence
  Description of Artificial Sequence: Synthetic oligonucleotide
ggccuuccauccuacucgg

SEQ ID NO: 2550205 - RNA, 19 nt, Artificial Sequence
  Description of Artificial Sequence: Synthetic oligonucleotide
ugcuuggauaccgccucug

SEQ ID NO: 2550206 - RNA, 19 nt, Artificial Sequence
  Description of Artificial Sequence: Synthetic oligonucleotide
agagugcaccucauggaca

SEQ ID NO: 2550207 - RNA, 19 nt, Artificial Sequence
  Description of Artificial Sequence: Synthetic oligonucleotide
aucccacucaccaggagaa

SEQ ID NO: 2550208 - RNA, 19 nt, Artificial Sequence
  Description of Artificial Sequence: Synthetic oligonucleotide
gacccacaacaaccaacac

SEQ ID NO: 2550209 - RNA, 19 nt, Artificial Sequence
  Description of Artificial Sequence: Synthetic oligonucleotide
uccauccuacucgguguag

SEQ ID NO: 2550210 - RNA, 19 nt, Artificial Sequence
  Description of Artificial Sequence: Synthetic oligonucleotide
cuuccauccuacucggugu

SEQ ID NO: 2550211 - RNA, 19 nt, Artificial Sequence
  Description of Artificial Sequence: Synthetic oligonucleotide
gaggggcauucugggaggg

SEQ ID NO: 2550212 - RNA, 19 nt, Artificial Sequence
  Description of Artificial Sequence: Synthetic oligonucleotide
ggcaaggagcaccauggca

SEQ ID NO: 2550213 - RNA, 19 nt, Artificial Sequence
  Description of Artificial Sequence: Synthetic oligonucleotide
auagaacucccuggacugu

SEQ ID NO: 2550214 - RNA, 19 nt, Artificial Sequence
  Description of Artificial Sequence: Synthetic oligonucleotide
accuccaagcagugcugug

SEQ ID NO: 2550215 - RNA, 19 nt, Artificial Sequence
  Description of Artificial Sequence: Synthetic oligonucleotide
gaaagaggccuuccauccu

SEQ ID NO: 2550216 - RNA, 19 nt, Artificial Sequence
  Description of Artificial Sequence: Synthetic oligonucleotide
ccaaccggcaaggagcacc

SEQ ID NO: 2550217 - RNA, 19 nt, Artificial Sequence
  Description of Artificial Sequence: Synthetic oligonucleotide
guugggcgugacaccaugc

SEQ ID NO: 2550218 - RNA, 19 nt, Artificial Sequence
  Description of Artificial Sequence: Synthetic oligonucleotide
ucugagcgucuuccagggu

SEQ ID NO: 2550219 - RNA, 19 nt, Artificial Sequence
  Description of Artificial Sequence: Synthetic oligonucleotide
ucccuggacugucggugga

SEQ ID NO: 2550220 - RNA, 19 nt, Artificial Sequence
  Description of Artificial Sequence: Synthetic oligonucleotide
caggcuucgcuggagccac

SEQ ID NO: 2550221 - RNA, 19 nt, Artificial Sequence
  Description of Artificial Sequence: Synthetic oligonucleotide
cuuggauaccgccucugua

SEQ ID NO: 2550222 - RNA, 19 nt, Artificial Sequence
  Description of Artificial Sequence: Synthetic oligonucleotide
caaccggcaaggagcacca

SEQ ID NO: 2550223 - RNA, 19 nt, Artificial Sequence
  Description of Artificial Sequence: Synthetic oligonucleotide
gguguguccacaacaggga

SEQ ID NO: 2550224 - RNA, 19 nt, Artificial Sequence
  Description of Artificial Sequence: Synthetic oligonucleotide
acaacgcugcgggucaccu

SEQ ID NO: 2550225 - RNA, 19 nt, Artificial Sequence
  Description of Artificial Sequence: Synthetic oligonucleotide
gucguagaucccacucacc

SEQ ID NO: 2550226 - RNA, 19 nt, Artificial Sequence
  Description of Artificial Sequence: Synthetic oligonucleotide
caucccguuggggagagaa

SEQ ID NO: 2550227 - RNA, 19 nt, Artificial Sequence
  Description of Artificial Sequence: Synthetic oligonucleotide
cugguagcuaugugcaugu

SEQ ID NO: 2550228 - RNA, 19 nt, Artificial Sequence
  Description of Artificial Sequence: Synthetic oligonucleotide
agagaaugacaggcagggu

SEQ ID NO: 2550229 - RNA, 19 nt, Artificial Sequence
  Description of Artificial Sequence: Synthetic oligonucleotide
caccucauggacagacaga

SEQ ID NO: 2550230 - RNA, 19 nt, Artificial Sequence
  Description of Artificial Sequence: Synthetic oligonucleotide
gacaggcagggugugucca

SEQ ID NO: 2550231 - RNA, 19 nt, Artificial Sequence
  Description of Artificial Sequence: Synthetic oligonucleotide
cagugcugugggcuguuuc

SEQ ID NO: 2550232 - RNA, 19 nt, Artificial Sequence
  Description of Artificial Sequence: Synthetic oligonucleotide
cucgguguagcaucucaua

SEQ ID NO: 2550233 - RNA, 19 nt, Artificial Sequence
  Description of Artificial Sequence: Synthetic oligonucleotide
cacacaggcuggagaccag

SEQ ID NO: 2550234 - RNA, 19 nt, Artificial Sequence
  Description of Artificial Sequence: Synthetic oligonucleotide
cuaugugcaugucccacgu

SEQ ID NO: 2550235 - RNA, 19 nt, Artificial Sequence
  Description of Artificial Sequence: Synthetic oligonucleotide
gacugucgguggaauucug

SEQ ID NO: 2550236 - RNA, 19 nt, Artificial Sequence
  Description of Artificial Sequence: Synthetic oligonucleotide
gugauccacgccaggcagc

SEQ ID NO: 2550237 - RNA, 19 nt, Artificial Sequence
  Description of Artificial Sequence: Synthetic oligonucleotide
cagccaggugagcucccgg

SEQ ID NO: 2550238 - RNA, 19 nt, Artificial Sequence
  Description of Artificial Sequence: Synthetic oligonucleotide
ggagaccagguguccuuag

SEQ ID NO: 2550239 - RNA, 19 nt, Artificial Sequence
  Description of Artificial Sequence: Synthetic oligonucleotide
caugugcagaggggcauuc

SEQ ID NO: 2550240 - RNA, 19 nt, Artificial Sequence
  Description of Artificial Sequence: Synthetic oligonucleotide
ugagcucccggcggagugu

SEQ ID NO: 2550241 - RNA, 19 nt, Artificial Sequence
  Description of Artificial Sequence: Synthetic oligonucleotide
gguggaauucuggggaguc

SEQ ID NO: 2550242 - RNA, 19 nt, Artificial Sequence
  Description of Artificial Sequence: Synthetic oligonucleotide
gugcaugucccacgugcca

SEQ ID NO: 2550243 - RNA, 19 nt, Artificial Sequence
  Description of Artificial Sequence: Synthetic oligonucleotide
gggugagaacaucauccuc

SEQ ID NO: 2550244 - RNA, 19 nt, Artificial Sequence
  Description of Artificial Sequence: Synthetic oligonucleotide
cuugaagguugggcgugac

SEQ ID NO: 2550245 - RNA, 19 nt, Artificial Sequence
  Description of Artificial Sequence: Synthetic oligonucleotide
guguccgcagagguagaug

SEQ ID NO: 2550246 - RNA, 19 nt, Artificial Sequence
  Description of Artificial Sequence: Synthetic oligonucleotide
gccaguguuagguggaagu

SEQ ID NO: 2550247 - RNA, 19 nt, Artificial Sequence
  Description of Artificial Sequence: Synthetic oligonucleotide
ucccaucccguuggggaga

SEQ ID NO: 2550248 - RNA, 19 nt, Artificial Sequence
  Description of Artificial Sequence: Synthetic oligonucleotide
cuccaggucguagauccca

SEQ ID NO: 2550249 - RNA, 19 nt, Artificial Sequence
  Description of Artificial Sequence: Synthetic oligonucleotide
cguagaucccacucaccag

SEQ ID NO: 2550250 - RNA, 19 nt, Artificial Sequence
  Description of Artificial Sequence: Synthetic oligonucleotide
cccacucaccaggagaaag

SEQ ID NO: 2550251 - RNA, 19 nt, Artificial Sequence
  Description of Artificial Sequence: Synthetic oligonucleotide
ccaaucuguaggguucccc

SEQ ID NO: 2550252 - RNA, 19 nt, Artificial Sequence
  Description of Artificial Sequence: Synthetic oligonucleotide
aguguccgcagagguagau

SEQ ID NO: 2550253 - RNA, 19 nt, Artificial Sequence
  Description of Artificial Sequence: Synthetic oligonucleotide
auccuacucgguguagcau

SEQ ID NO: 2550254 - RNA, 19 nt, Artificial Sequence
  Description of Artificial Sequence: Synthetic oligonucleotide
gccaccuccaagcagugcu

SEQ ID NO: 2550255 - RNA, 19 nt, Artificial Sequence
  Description of Artificial Sequence: Synthetic oligonucleotide
guccaaccggcaaggagca

SEQ ID NO: 2550256 - RNA, 19 nt, Artificial Sequence
  Description of Artificial Sequence: Synthetic oligonucleotide
acucgguguagcaucucau

SEQ ID NO: 2550257 - RNA, 19 nt, Artificial Sequence
  Description of Artificial Sequence: Synthetic oligonucleotide
cuggggagucaugcugacc

SEQ ID NO: 2550258 - RNA, 19 nt, Artificial Sequence
  Description of Artificial Sequence: Synthetic oligonucleotide
guguagcaucucauagaac

SEQ ID NO: 2550259 - RNA, 19 nt, Artificial Sequence
  Description of Artificial Sequence: Synthetic oligonucleotide
acacaacgcugcgggucac

SEQ ID NO: 2550260 - RNA, 19 nt, Artificial Sequence
  Description of Artificial Sequence: Synthetic oligonucleotide
guggaauucuggggaguca

SEQ ID NO: 2550261 - RNA, 19 nt, Artificial Sequence
  Description of Artificial Sequence: Synthetic oligonucleotide
ggagccaccuccaagcagu

SEQ ID NO: 2550262 - RNA, 19 nt, Artificial Sequence
  Description of Artificial Sequence: Synthetic oligonucleotide
caggacaggcuggacccac

SEQ ID NO: 2550263 - RNA, 19 nt, Artificial Sequence
  Description of Artificial Sequence: Synthetic oligonucleotide
caacgcugcgggucaccug

SEQ ID NO: 2550264 - RNA, 19 nt, Artificial Sequence
  Description of Artificial Sequence: Synthetic oligonucleotide
uugguccaaccggcaagga

SEQ ID NO: 2550265 - RNA, 19 nt, Artificial Sequence
  Description of Artificial Sequence: Synthetic oligonucleotide
cauggcagccaggugagcu

SEQ ID NO: 2550266 - RNA, 19 nt, Artificial Sequence
  Description of Artificial Sequence: Synthetic oligonucleotide
ccguugcuuggauaccgcc

SEQ ID NO: 2550267 - RNA, 19 nt, Artificial Sequence
  Description of Artificial Sequence: Synthetic oligonucleotide
cccacgugccaaucuguag

SEQ ID NO: 2550268 - RNA, 19 nt, Artificial Sequence
  Description of Artificial Sequence: Synthetic oligonucleotide
ccauccuacucgguguagc

SEQ ID NO: 2550269 - RNA, 19 nt, Artificial Sequence
  Description of Artificial Sequence: Synthetic oligonucleotide
guccgcagagguagaugcc

SEQ ID NO: 2550270 - RNA, 19 nt, Artificial Sequence
  Description of Artificial Sequence: Synthetic oligonucleotide
cuggaaagaggccuuccau

SEQ ID NO: 2550271 - RNA, 19 nt, Artificial Sequence
  Description of Artificial Sequence: Synthetic oligonucleotide
ggaauucuggggagucaug

SEQ ID NO: 2550272 - RNA, 19 nt, Artificial Sequence
  Description of Artificial Sequence: Synthetic oligonucleotide
uuagagcaucagggaagau

SEQ ID NO: 2550273 - RNA, 19 nt, Artificial Sequence
  Description of Artificial Sequence: Synthetic oligonucleotide
caguguuagguggaagucu

SEQ ID NO: 2550274 - RNA, 19 nt, Artificial Sequence
  Description of Artificial Sequence: Synthetic oligonucleotide
gguguccuuagagcaucag

SEQ ID NO: 2550275 - RNA, 19 nt, Artificial Sequence
  Description of Artificial Sequence: Synthetic oligonucleotide
cuggagccaccuccaagca

SEQ ID NO: 2550276 - RNA, 19 nt, Artificial Sequence
  Description of Artificial Sequence: Synthetic oligonucleotide
ccaguguuagguggaaguc

SEQ ID NO: 2550277 - RNA, 19 nt, Artificial Sequence
  Description of Artificial Sequence: Synthetic oligonucleotide
cacaacgcugcgggucacc

SEQ ID NO: 2550278 - RNA, 19 nt, Artificial Sequence
  Description of Artificial Sequence: Synthetic oligonucleotide
ggcggaguguccgcagagg

SEQ ID NO: 2550279 - RNA, 19 nt, Artificial Sequence
  Description of Artificial Sequence: Synthetic oligonucleotide
caugucccacgugccaauc

SEQ ID NO: 2550280 - RNA, 19 nt, Artificial Sequence
  Description of Artificial Sequence: Synthetic oligonucleotide
gugagaacaucauccucuu

SEQ ID NO: 2550281 - RNA, 19 nt, Artificial Sequence
  Description of Artificial Sequence: Synthetic oligonucleotide
ccccguugcuuggauaccg

SEQ ID NO: 2550282 - RNA, 19 nt, Artificial Sequence
  Description of Artificial Sequence: Synthetic oligonucleotide
cucccggcggaguguccgc

SEQ ID NO: 2550283 - RNA, 19 nt, Artificial Sequence
  Description of Artificial Sequence: Synthetic oligonucleotide
ucgcuggagccaccuccaa

SEQ ID NO: 2550284 - RNA, 19 nt, Artificial Sequence
  Description of Artificial Sequence: Synthetic oligonucleotide
ggggagagaaugacaggca

SEQ ID NO: 2550285 - RNA, 19 nt, Artificial Sequence
  Description of Artificial Sequence: Synthetic oligonucleotide
acgugccaaucuguagggu

SEQ ID NO: 2550286 - RNA, 19 nt, Artificial Sequence
  Description of Artificial Sequence: Synthetic oligonucleotide
caaaauggucugggugaga

SEQ ID NO: 2550287 - RNA, 19 nt, Artificial Sequence
  Description of Artificial Sequence: Synthetic oligonucleotide
gguggaagucucaucuucu

SEQ ID NO: 2550288 - RNA, 19 nt, Artificial Sequence
  Description of Artificial Sequence: Synthetic oligonucleotide
ugguagcuaugugcauguc

SEQ ID NO: 2550289 - RNA, 19 nt, Artificial Sequence
  Description of Artificial Sequence: Synthetic oligonucleotide
cccguugcuuggauaccgc

SEQ ID NO: 2550290 - RNA, 19 nt, Artificial Sequence
  Description of Artificial Sequence: Synthetic oligonucleotide
gccucuguaggaacacaac

SEQ ID NO: 2550291 - RNA, 19 nt, Artificial Sequence
  Description of Artificial Sequence: Synthetic oligonucleotide
gaggugcacacaggcugga

SEQ ID NO: 2550292 - RNA, 19 nt, Artificial Sequence
  Description of Artificial Sequence: Synthetic oligonucleotide
caacagggagagugcaccu

SEQ ID NO: 2550293 - RNA, 19 nt, Artificial Sequence
  Description of Artificial Sequence: Synthetic oligonucleotide
ggagaaagccuugaagguu

SEQ ID NO: 2550294 - RNA, 19 nt, Artificial Sequence
  Description of Artificial Sequence: Synthetic oligonucleotide
gagcucccggcggaguguc

SEQ ID NO: 2550295 - RNA, 19 nt, Artificial Sequence
  Description of Artificial Sequence: Synthetic oligonucleotide
ucccggcggaguguccgca

SEQ ID NO: 2550296 - RNA, 19 nt, Artificial Sequence
  Description of Artificial Sequence: Synthetic oligonucleotide
gcagccaggugagcucccg

SEQ ID NO: 2550297 - RNA, 19 nt, Artificial Sequence
  Description of Artificial Sequence: Synthetic oligonucleotide
ggccaguguuagguggaag

SEQ ID NO: 2550298 - RNA, 19 nt, Artificial Sequence
  Description of Artificial Sequence: Synthetic oligonucleotide
agugcaccucauggacaga

SEQ ID NO: 2550299 - RNA, 19 nt, Artificial Sequence
  Description of Artificial Sequence: Synthetic oligonucleotide
cgguguagcaucucauaga

SEQ ID NO: 2550300 - RNA, 19 nt, Artificial Sequence
  Description of Artificial Sequence: Synthetic oligonucleotide
gucaugugcagaggggcau

SEQ ID NO: 2550301 - RNA, 19 nt, Artificial Sequence
  Description of Artificial Sequence: Synthetic oligonucleotide
ccguuggggagagaaugac

SEQ ID NO: 2550302 - RNA, 19 nt, Artificial Sequence
  Description of Artificial Sequence: Synthetic oligonucleotide
uccaaccggcaaggagcac

SEQ ID NO: 2550303 - RNA, 19 nt, Artificial Sequence
  Description of Artificial Sequence: Synthetic oligonucleotide
ggggcauucugggagggua

SEQ ID NO: 2550304 - RNA, 19 nt, Artificial Sequence
  Description of Artificial Sequence: Synthetic oligonucleotide
aggggcauucugggagggu

SEQ ID NO: 2550305 - RNA, 19 nt, Artificial Sequence
  Description of Artificial Sequence: Synthetic oligonucleotide
ggggagucaugcugaccca

SEQ ID NO: 2550306 - RNA, 19 nt, Artificial Sequence
  Description of Artificial Sequence: Synthetic oligonucleotide
aggcuucgcuggagccacc

SEQ ID NO: 2550307 - RNA, 19 nt, Artificial Sequence
  Description of Artificial Sequence: Synthetic oligonucleotide
ggguuagauucucuaugau

SEQ ID NO: 2550308 - RNA, 19 nt, Artificial Sequence
  Description of Artificial Sequence: Synthetic oligonucleotide
cccguuggggagagaauga

SEQ ID NO: 2550309 - RNA, 19 nt, Artificial Sequence
  Description of Artificial Sequence: Synthetic oligonucleotide
aucccguuggggagagaau

SEQ ID NO: 2550310 - RNA, 19 nt, Artificial Sequence
  Description of Artificial Sequence: Synthetic oligonucleotide
caggcuggacccacaggcu

SEQ ID NO: 2550311 - RNA, 19 nt, Artificial Sequence
  Description of Artificial Sequence: Synthetic oligonucleotide
gcggaguguccgcagaggu

SEQ ID NO: 2550312 - RNA, 19 nt, Artificial Sequence
  Description of Artificial Sequence: Synthetic oligonucleotide
gagcaucagggaagauugu

SEQ ID NO: 2550313 - RNA, 19 nt, Artificial Sequence
  Description of Artificial Sequence: Synthetic oligonucleotide
ggacugucgguggaauucu

SEQ ID NO: 2550314 - RNA, 19 nt, Artificial Sequence
  Description of Artificial Sequence: Synthetic oligonucleotide
gccaaucuguaggguuccc

SEQ ID NO: 2550315 - RNA, 19 nt, Artificial Sequence
  Description of Artificial Sequence: Synthetic oligonucleotide
gauccacgccaggcagcuc

SEQ ID NO: 2550316 - RNA, 19 nt, Artificial Sequence
  Description of Artificial Sequence: Synthetic oligonucleotide
agcagugcugugggcuguu

SEQ ID NO: 2550317 - RNA, 19 nt, Artificial Sequence
  Description of Artificial Sequence: Synthetic oligonucleotide
cuggacccacaggcuucgc

SEQ ID NO: 2550318 - RNA, 19 nt, Artificial Sequence
  Description of Artificial Sequence: Synthetic oligonucleotide
gucccacgugccaaucugu

SEQ ID NO: 2550319 - RNA, 19 nt, Artificial Sequence
  Description of Artificial Sequence: Synthetic oligonucleotide
cuggacugucgguggaauu

SEQ ID NO: 2550320 - RNA, 19 nt, Artificial Sequence
  Description of Artificial Sequence: Synthetic oligonucleotide
gcuucgcuggagccaccuc

SEQ ID NO: 2550321 - RNA, 19 nt, Artificial Sequence
  Description of Artificial Sequence: Synthetic oligonucleotide
cgccucuguaggaacacaa

SEQ ID NO: 2550322 - RNA, 19 nt, Artificial Sequence
  Description of Artificial Sequence: Synthetic oligonucleotide
cguugcuuggauaccgccu

SEQ ID NO: 2550323 - RNA, 19 nt, Artificial Sequence
  Description of Artificial Sequence: Synthetic oligonucleotide
gcaucucauagaacucccu

SEQ ID NO: 2550324 - RNA, 19 nt, Artificial Sequence
  Description of Artificial Sequence: Synthetic oligonucleotide
cccggcggaguguccgcag

SEQ ID NO: 2550325 - RNA, 19 nt, Artificial Sequence
  Description of Artificial Sequence: Synthetic oligonucleotide
cccaucccguuggggagag

SEQ ID NO: 2550326 - RNA, 19 nt, Artificial Sequence
  Description of Artificial Sequence: Synthetic oligonucleotide
cggcggaguguccgcagag

SEQ ID NO: 2550327 - RNA, 19 nt, Artificial Sequence
  Description of Artificial Sequence: Synthetic oligonucleotide
ggggcuccaggucguagau

SEQ ID NO: 2550328 - RNA, 19 nt, Artificial Sequence
  Description of Artificial Sequence: Synthetic oligonucleotide
gggcuguuucucugagcgu

SEQ ID NO: 2550329 - RNA, 19 nt, Artificial Sequence
  Description of Artificial Sequence: Synthetic oligonucleotide
ccuggagcucccaucccgu

SEQ ID NO: 2550330 - RNA, 19 nt, Artificial Sequence
  Description of Artificial Sequence: Synthetic oligonucleotide
gggcuccaggucguagauc

SEQ ID NO: 2550331 - RNA, 19 nt, Artificial Sequence
  Description of Artificial Sequence: Synthetic oligonucleotide
gcaugucccacgugccaau

SEQ ID NO: 2550332 - RNA, 19 nt, Artificial Sequence
  Description of Artificial Sequence: Synthetic oligonucleotide
cucagccagcugguagcua

SEQ ID NO: 2550333 - RNA, 19 nt, Artificial Sequence
  Description of Artificial Sequence: Synthetic oligonucleotide
acgcugcgggucaccuggu

SEQ ID NO: 2550334 - RNA, 19 nt, Artificial Sequence
  Description of Artificial Sequence: Synthetic oligonucleotide
ggcuucgcuggagccaccu

SEQ ID NO: 2550335 - RNA, 19 nt, Artificial Sequence
  Description of Artificial Sequence: Synthetic oligonucleotide
gguuccccuggagcuccca

SEQ ID NO: 2550336 - RNA, 19 nt, Artificial Sequence
  Description of Artificial Sequence: Synthetic oligonucleotide
gggcauucugggaggguau

SEQ ID NO: 2550337 - RNA, 19 nt, Artificial Sequence
  Description of Artificial Sequence: Synthetic oligonucleotide
ccaggucguagaucccacu

SEQ ID NO: 2550338 - RNA, 19 nt, Artificial Sequence
  Description of Artificial Sequence: Synthetic oligonucleotide
gagcgucuuccagggucau

SEQ ID NO: 2550339 - RNA, 19 nt, Artificial Sequence
  Description of Artificial Sequence: Synthetic oligonucleotide
ccggcggaguguccgcaga

SEQ ID NO: 2550340 - RNA, 19 nt, Artificial Sequence
  Description of Artificial Sequence: Synthetic oligonucleotide
ggguuccccuggagcuccc

SEQ ID NO: 2550341 - RNA, 19 nt, Artificial Sequence
  Description of Artificial Sequence: Synthetic oligonucleotide
ccgccucuguaggaacaca

SEQ ID NO: 2550342 - RNA, 19 nt, Artificial Sequence
  Description of Artificial Sequence: Synthetic oligonucleotide
gcgugacaccaugcuuggu

SEQ ID NO: 2550343 - RNA, 19 nt, Artificial Sequence
  Description of Artificial Sequence: Synthetic oligonucleotide
cgguggaauucuggggagu

SEQ ID NO: 2550344 - RNA, 19 nt, Artificial Sequence
  Description of Artificial Sequence: Synthetic oligonucleotide
aaaaucaucaucuugacug

SEQ ID NO: 2550345 - RNA, 19 nt, Artificial Sequence
  Description of Artificial Sequence: Synthetic oligonucleotide
aaaaugaucaauguguucc

SEQ ID NO: 2550346 - RNA, 19 nt, Artificial Sequence
  Description of Artificial Sequence: Synthetic oligonucleotide
aauauauaaauguugcccg

SEQ ID NO: 2550347 - RNA, 19 nt, Artificial Sequence
  Description of Artificial Sequence: Synthetic oligonucleotide
uuuaauauauaaauguugc

SEQ ID NO: 2550348 - RNA, 19 nt, Artificial Sequence
  Description of Artificial Sequence: Synthetic oligonucleotide
uaaguuaucauuaguaagg

SEQ ID NO: 2550349 - RNA, 19 nt, Artificial Sequence
  Description of Artificial Sequence: Synthetic oligonucleotide
aguucauugugucuaaucc

SEQ ID NO: 2550350 - RNA, 19 nt, Artificial Sequence
  Description of Artificial Sequence: Synthetic oligonucleotide
uagaaaaugaucaaugugu

SEQ ID NO: 2550351 - RNA, 19 nt, Artificial Sequence
  Description of Artificial Sequence: Synthetic oligonucleotide
uucuuaugagauaacaggg

SEQ ID NO: 2550352 - RNA, 19 nt, Artificial Sequence
  Description of Artificial Sequence: Synthetic oligonucleotide
uaauauauaaauguugccc

SEQ ID NO: 2550353 - RNA, 19 nt, Artificial Sequence
  Description of Artificial Sequence: Synthetic oligonucleotide
ugcaauuacauuacuaugc

SEQ ID NO: 2550354 - RNA, 19 nt, Artificial Sequence
  Description of Artificial Sequence: Synthetic oligonucleotide
auaaacaucagucaucucu

SEQ ID NO: 2550355 - RNA, 19 nt, Artificial Sequence
  Description of Artificial Sequence: Synthetic oligonucleotide
aaaguaauugauaauggag

SEQ ID NO: 2550356 - RNA, 19 nt, Artificial Sequence
  Description of Artificial Sequence: Synthetic oligonucleotide
uuguucuagaaaaugauca

SEQ ID NO: 2550357 - RNA, 19 nt, Artificial Sequence
  Description of Artificial Sequence: Synthetic oligonucleotide
aauccaaacauaaauuuuc

SEQ ID NO: 2550358 - RNA, 19 nt, Artificial Sequence
  Description of Artificial Sequence: Synthetic oligonucleotide
uugauaauggagauacugg

SEQ ID NO: 2550359 - RNA, 19 nt, Artificial Sequence
  Description of Artificial Sequence: Synthetic oligonucleotide
aacauauuuaucauaauca

SEQ ID NO: 2550360 - RNA, 19 nt, Artificial Sequence
  Description of Artificial Sequence: Synthetic oligonucleotide
uaauugauaauggagauac

SEQ ID NO: 2550361 - RNA, 19 nt, Artificial Sequence
  Description of Artificial Sequence: Synthetic oligonucleotide
uuuucuuaugagauaacag

SEQ ID NO: 2550362 - RNA, 19 nt, Artificial Sequence
  Description of Artificial Sequence: Synthetic oligonucleotide
aacugcuccagacaauccc

SEQ ID NO: 2550363 - RNA, 19 nt, Artificial Sequence
  Description of Artificial Sequence: Synthetic oligonucleotide
aucaugguuaucuuuuggc

SEQ ID NO: 2550364 - RNA, 19 nt, Artificial Sequence
  Description of Artificial Sequence: Synthetic oligonucleotide
uucuagaaaaugaucaaug

SEQ ID NO: 2550365 - RNA, 19 nt, Artificial Sequence
  Description of Artificial Sequence: Synthetic oligonucleotide
aauguugcccgauaauguc

SEQ ID NO: 2550366 - RNA, 19 nt, Artificial Sequence
  Description of Artificial Sequence: Synthetic oligonucleotide
uuugcaucauuauucauug

SEQ ID NO: 2550367 - RNA, 19 nt, Artificial Sequence
  Description of Artificial Sequence: Synthetic oligonucleotide
aggacugacaugcugacac

SEQ ID NO: 2550368 - RNA, 19 nt, Artificial Sequence
  Description of Artificial Sequence: Synthetic oligonucleotide
ugagauaacagggauaccc

SEQ ID NO: 2550369 - RNA, 19 nt, Artificial Sequence
  Description of Artificial Sequence: Synthetic oligonucleotide
uugcauauggaaaacauau

SEQ ID NO: 2550370 - RNA, 19 nt, Artificial Sequence
  Description of Artificial Sequence: Synthetic oligonucleotide
uuaauaguaaguuaucauu

SEQ ID NO: 2550371 - RNA, 19 nt, Artificial Sequence
  Description of Artificial Sequence: Synthetic oligonucleotide
uuaauauauaaauguugcc

SEQ ID NO: 2550372 - RNA, 19 nt, Artificial Sequence
  Description of Artificial Sequence: Synthetic oligonucleotide
cauaccaggacugacaugc

SEQ ID NO: 2550373 - RNA, 19 nt, Artificial Sequence
  Description of Artificial Sequence: Synthetic oligonucleotide
aaauuuucuuaugagauaa

SEQ ID NO: 2550374 - RNA, 19 nt, Artificial Sequence
  Description of Artificial Sequence: Synthetic oligonucleotide
guuaucauuaguaagguca

SEQ ID NO: 2550375 - RNA, 19 nt, Artificial Sequence
  Description of Artificial Sequence: Synthetic oligonucleotide
aucuugacuguauugaaag

SEQ ID NO: 2550376 - RNA, 19 nt, Artificial Sequence
  Description of Artificial Sequence: Synthetic oligonucleotide
uaugagauaacagggauac

SEQ ID NO: 2550377 - RNA, 19 nt, Artificial Sequence
  Description of Artificial Sequence: Synthetic oligonucleotide
uuaguaaggucauaaguga

SEQ ID NO: 2550378 - RNA, 19 nt, Artificial Sequence
  Description of Artificial Sequence: Synthetic oligonucleotide
guaaguuaucauuaguaag

SEQ ID NO: 2550379 - RNA, 19 nt, Artificial Sequence
  Description of Artificial Sequence: Synthetic oligonucleotide
aauuacauuacuaugccaa

SEQ ID NO: 2550380 - RNA, 19 nt, Artificial Sequence
  Description of Artificial Sequence: Synthetic oligonucleotide
uucauugugucuaauccgc

SEQ ID NO: 2550381 - RNA, 19 nt, Artificial Sequence
  Description of Artificial Sequence: Synthetic oligonucleotide
aaguucauugugucuaauc

SEQ ID NO: 2550382 - RNA, 19 nt, Artificial Sequence
  Description of Artificial Sequence: Synthetic oligonucleotide
auuaguaaggucauaagug

SEQ ID NO: 2550383 - RNA, 19 nt, Artificial Sequence
  Description of Artificial Sequence: Synthetic oligonucleotide
ucauaagugauguuggccu

SEQ ID NO: 2550384 - RNA, 19 nt, Artificial Sequence
  Description of Artificial Sequence: Synthetic oligonucleotide
aaguaauugauaauggaga

SEQ ID NO: 2550385 - RNA, 19 nt, Artificial Sequence
  Description of Artificial Sequence: Synthetic oligonucleotide
uuuacagaggcuagcauac

SEQ ID NO: 2550386 - RNA, 19 nt, Artificial Sequence
  Description of Artificial Sequence: Synthetic oligonucleotide
uuaucuuuuggcaacugcu

SEQ ID NO: 2550387 - RNA, 19 nt, Artificial Sequence
  Description of Artificial Sequence: Synthetic oligonucleotide
uuaauuguucuagaaaaug

SEQ ID NO: 2550388 - RNA, 19 nt, Artificial Sequence
  Description of Artificial Sequence: Synthetic oligonucleotide
cauuacuaugccaauaaac

SEQ ID NO: 2550389 - RNA, 19 nt, Artificial Sequence
  Description of Artificial Sequence: Synthetic oligonucleotide
aagucuugcaguuuucuga

SEQ ID NO: 2550390 - RNA, 19 nt, Artificial Sequence
  Description of Artificial Sequence: Synthetic oligonucleotide
ucugcaauuacauuacuau

SEQ ID NO: 2550391 - RNA, 19 nt, Artificial Sequence
  Description of Artificial Sequence: Synthetic oligonucleotide
aucuuuuggcaacugcucc

SEQ ID NO: 2550392 - RNA, 19 nt, Artificial Sequence
  Description of Artificial Sequence: Synthetic oligonucleotide
uaugccaauaaacaucagu

SEQ ID NO: 2550393 - RNA, 19 nt, Artificial Sequence
  Description of Artificial Sequence: Synthetic oligonucleotide
cuuuguuucugcaagggug

SEQ ID NO: 2550394 - RNA, 19 nt, Artificial Sequence
  Description of Artificial Sequence: Synthetic oligonucleotide
uuuaucuuuugcaucauua

SEQ ID NO: 2550395 - RNA, 19 nt, Artificial Sequence
  Description of Artificial Sequence: Synthetic oligonucleotide
aauggagauacuggauucc

SEQ ID NO: 2550396 - RNA, 19 nt, Artificial Sequence
  Description of Artificial Sequence: Synthetic oligonucleotide
gauuccuuuccauaucuag

SEQ ID NO: 2550397 - RNA, 19 nt, Artificial Sequence
  Description of Artificial Sequence: Synthetic oligonucleotide
ugauaauggagauacugga

SEQ ID NO: 2550398 - RNA, 19 nt, Artificial Sequence
  Description of Artificial Sequence: Synthetic oligonucleotide
auauggaaaacauauuuau

SEQ ID NO: 2550399 - RNA, 19 nt, Artificial Sequence
  Description of Artificial Sequence: Synthetic oligonucleotide
uaaauguugcccgauaaug

SEQ ID NO: 2550400 - RNA, 19 nt, Artificial Sequence
  Description of Artificial Sequence: Synthetic oligonucleotide
agaaaaucaucaucuugac

SEQ ID NO: 2550401 - RNA, 19 nt, Artificial Sequence
  Description of Artificial Sequence: Synthetic oligonucleotide
ucuagaaaaugaucaaugu

SEQ ID NO: 2550402 - RNA, 19 nt, Artificial Sequence
  Description of Artificial Sequence: Synthetic oligonucleotide
auugauaauggagauacug

SEQ ID NO: 2550403 - RNA, 19 nt, Artificial Sequence
  Description of Artificial Sequence: Synthetic oligonucleotide
uuuugcaucauuauucauu

SEQ ID NO: 2550404 - RNA, 19 nt, Artificial Sequence
  Description of Artificial Sequence: Synthetic oligonucleotide
augguuaucuuuuggcaac

SEQ ID NO: 2550405 - RNA, 19 nt, Artificial Sequence
  Description of Artificial Sequence: Synthetic oligonucleotide
ugacuguauugaaagcucg

SEQ ID NO: 2550406 - RNA, 19 nt, Artificial Sequence
  Description of Artificial Sequence: Synthetic oligonucleotide
ucaauggcaaaguaauuga

SEQ ID NO: 2550407 - RNA, 19 nt, Artificial Sequence
  Description of Artificial Sequence: Synthetic oligonucleotide
augccaauaaacaucaguc

SEQ ID NO: 2550408 - RNA, 19 nt, Artificial Sequence
  Description of Artificial Sequence: Synthetic oligonucleotide
ucuuaugagauaacaggga

SEQ ID NO: 2550409 - RNA, 19 nt, Artificial Sequence
  Description of Artificial Sequence: Synthetic oligonucleotide
ucuugcaguuuucugacug

SEQ ID NO: 2550410 - RNA, 19 nt, Artificial Sequence
  Description of Artificial Sequence: Synthetic oligonucleotide
uguauugaaagcucggcaa

SEQ ID NO: 2550411 - RNA, 19 nt, Artificial Sequence
  Description of Artificial Sequence: Synthetic oligonucleotide
ugcaucauuauucauugau

SEQ ID NO: 2550412 - RNA, 19 nt, Artificial Sequence
  Description of Artificial Sequence: Synthetic oligonucleotide
uguguuccuuccaauuucg

SEQ ID NO: 2550413 - RNA, 19 nt, Artificial Sequence
  Description of Artificial Sequence: Synthetic oligonucleotide
uacauuacuaugccaauaa

SEQ ID NO: 2550414 - RNA, 19 nt, Artificial Sequence
  Description of Artificial Sequence: Synthetic oligonucleotide
uacuaugccaauaaacauc

SEQ ID NO: 2550415 - RNA, 19 nt, Artificial Sequence
  Description of Artificial Sequence: Synthetic oligonucleotide
auaaauuuucuuaugagau

SEQ ID NO: 2550416 - RNA, 19 nt, Artificial Sequence
  Description of Artificial Sequence: Synthetic oligonucleotide
uauaaauguugcccgauaa

SEQ ID NO: 2550417 - RNA, 19 nt, Artificial Sequence
  Description of Artificial Sequence: Synthetic oligonucleotide
uuuugcauauggaaaacau

SEQ ID NO: 2550418 - RNA, 19 nt, Artificial Sequence
  Description of Artificial Sequence: Synthetic oligonucleotide
ucuuaauaguaaguuauca

SEQ ID NO: 2550419 - RNA, 19 nt, Artificial Sequence
  Description of Artificial Sequence: Synthetic oligonucleotide
guucauugugucuaauccg

SEQ ID NO: 2550420 - RNA, 19 nt, Artificial Sequence
  Description of Artificial Sequence: Synthetic oligonucleotide
ucuaucaauccuuuuaaua

SEQ ID NO: 2550421 - RNA, 19 nt, Artificial Sequence
  Description of Artificial Sequence: Synthetic oligonucleotide
uaauguccuaaguucauug

SEQ ID NO: 2550422 - RNA, 19 nt, Artificial Sequence
  Description of Artificial Sequence: Synthetic oligonucleotide
acaucagucaucucuacca

SEQ ID NO: 2550423 - RNA, 19 nt, Artificial Sequence
  Description of Artificial Sequence: Synthetic oligonucleotide
cauaaauuuucuuaugaga

SEQ ID NO: 2550424 - RNA, 19 nt, Artificial Sequence
  Description of Artificial Sequence: Synthetic oligonucleotide
aguaaguuaucauuaguaa

SEQ ID NO: 2550425 - RNA, 19 nt, Artificial Sequence
  Description of Artificial Sequence: Synthetic oligonucleotide
uacccugcuucuuucaugg

SEQ ID NO: 2550426 - RNA, 19 nt, Artificial Sequence
  Description of Artificial Sequence: Synthetic oligonucleotide
uuuuacagaggcuagcaua

SEQ ID NO: 2550427 - RNA, 19 nt, Artificial Sequence
  Description of Artificial Sequence: Synthetic oligonucleotide
ucugucaauggcaaaguaa

SEQ ID NO: 2550428 - RNA, 19 nt, Artificial Sequence
  Description of Artificial Sequence: Synthetic oligonucleotide
uaagaguucccacucuagc

SEQ ID NO: 2550429 - RNA, 19 nt, Artificial Sequence
  Description of Artificial Sequence: Synthetic oligonucleotide
uauggaaaacauauuuauc

SEQ ID NO: 2550430 - RNA, 19 nt, Artificial Sequence
  Description of Artificial Sequence: Synthetic oligonucleotide
aaacaucagucaucucuac

SEQ ID NO: 2550431 - RNA, 19 nt, Artificial Sequence
  Description of Artificial Sequence: Synthetic oligonucleotide
aauguccuaaguucauugu

SEQ ID NO: 2550432 - RNA, 19 nt, Artificial Sequence
  Description of Artificial Sequence: Synthetic oligonucleotide
uuaagaguucccacucuag

SEQ ID NO: 2550433 - RNA, 19 nt, Artificial Sequence
  Description of Artificial Sequence: Synthetic oligonucleotide
aaucuggucuaucaauccu

SEQ ID NO: 2550434 - RNA, 19 nt, Artificial Sequence
  Description of Artificial Sequence: Synthetic oligonucleotide
gacaaucccucacuugucg

SEQ ID NO: 2550435 - RNA, 19 nt, Artificial Sequence
  Description of Artificial Sequence: Synthetic oligonucleotide
aguaauugauaauggagau

SEQ ID NO: 2550436 - RNA, 19 nt, Artificial Sequence
  Description of Artificial Sequence: Synthetic oligonucleotide
auuccuuuccauaucuagc

SEQ ID NO: 2550437 - RNA, 19 nt, Artificial Sequence
  Description of Artificial Sequence: Synthetic oligonucleotide
ucaugguuaucuuuuggca

SEQ ID NO: 2550438 - RNA, 19 nt, Artificial Sequence
  Description of Artificial Sequence: Synthetic oligonucleotide
acuguauugaaagcucggc

SEQ ID NO: 2550439 - RNA, 19 nt, Artificial Sequence
  Description of Artificial Sequence: Synthetic oligonucleotide
aauguguuccuuccaauuu

SEQ ID NO: 2550440 - RNA, 19 nt, Artificial Sequence
  Description of Artificial Sequence: Synthetic oligonucleotide
aaaugaucaauguguuccu

SEQ ID NO: 2550441 - RNA, 19 nt, Artificial Sequence
  Description of Artificial Sequence: Synthetic oligonucleotide
ucuagcagugaucuuaaua

SEQ ID NO: 2550442 - RNA, 19 nt, Artificial Sequence
  Description of Artificial Sequence: Synthetic oligonucleotide
aauccuuuuaauauauaaa

SEQ ID NO: 2550443 - RNA, 19 nt, Artificial Sequence
  Description of Artificial Sequence: Synthetic oligonucleotide
uaaacaucagucaucucua

SEQ ID NO: 2550444 - RNA, 19 nt, Artificial Sequence
  Description of Artificial Sequence: Synthetic oligonucleotide
aauuguucuagaaaaugau

SEQ ID NO: 2550445 - RNA, 19 nt, Artificial Sequence
  Description of Artificial Sequence: Synthetic oligonucleotide
auuguucuagaaaaugauc

SEQ ID NO: 2550446 - RNA, 19 nt, Artificial Sequence
  Description of Artificial Sequence: Synthetic oligonucleotide
auguguuccuuccaauuuc

SEQ ID NO: 2550447 - RNA, 19 nt, Artificial Sequence
  Description of Artificial Sequence: Synthetic oligonucleotide
auaauggagauacuggauu

SEQ ID NO: 2550448 - RNA, 19 nt, Artificial Sequence
  Description of Artificial Sequence: Synthetic oligonucleotide
gucaauggcaaaguaauug

SEQ ID NO: 2550449 - RNA, 19 nt, Artificial Sequence
  Description of Artificial Sequence: Synthetic oligonucleotide
uggagugucugucaauggc

SEQ ID NO: 2550450 - RNA, 19 nt, Artificial Sequence
  Description of Artificial Sequence: Synthetic oligonucleotide
ugaaagcucggcaacagua

SEQ ID NO: 2550451 - RNA, 19 nt, Artificial Sequence
  Description of Artificial Sequence: Synthetic oligonucleotide
aauguugccccaggcaagg

SEQ ID NO: 2550452 - RNA, 19 nt, Artificial Sequence
  Description of Artificial Sequence: Synthetic oligonucleotide
uuuccuuuaagaguuccca

SEQ ID NO: 2550453 - RNA, 19 nt, Artificial Sequence
  Description of Artificial Sequence: Synthetic oligonucleotide
ucggcaacaguauucuuug

SEQ ID NO: 2550454 - RNA, 19 nt, Artificial Sequence
  Description of Artificial Sequence: Synthetic oligonucleotide
uuaucauuaguaaggucau

SEQ ID NO: 2550455 - RNA, 19 nt, Artificial Sequence
  Description of Artificial Sequence: Synthetic oligonucleotide
aauaaacaucagucaucuc

SEQ ID NO: 2550456 - RNA, 19 nt, Artificial Sequence
  Description of Artificial Sequence: Synthetic oligonucleotide
acuggucucauuccuguuc

SEQ ID NO: 2550457 - RNA, 19 nt, Artificial Sequence
  Description of Artificial Sequence: Synthetic oligonucleotide
aguuaucauuaguaagguc

SEQ ID NO: 2550458 - RNA, 19 nt, Artificial Sequence
  Description of Artificial Sequence: Synthetic oligonucleotide
ggcaaaguaauugauaaug

SEQ ID NO: 2550459 - RNA, 19 nt, Artificial Sequence
  Description of Artificial Sequence: Synthetic oligonucleotide
uucuuuguuucugcaaggg

SEQ ID NO: 2550460 - RNA, 19 nt, Artificial Sequence
  Description of Artificial Sequence: Synthetic oligonucleotide
auugugucuaauccgcucu

SEQ ID NO: 2550461 - RNA, 19 nt, Artificial Sequence
  Description of Artificial Sequence: Synthetic oligonucleotide
aaauguugcccgauaaugu

SEQ ID NO: 2550462 - RNA, 19 nt, Artificial Sequence
  Description of Artificial Sequence: Synthetic oligonucleotide
ugaucuuaauaguaaguua

SEQ ID NO: 2550463 - RNA, 19 nt, Artificial Sequence
  Description of Artificial Sequence: Synthetic oligonucleotide
aauuuucuuaugagauaac

SEQ ID NO: 2550464 - RNA, 19 nt, Artificial Sequence
  Description of Artificial Sequence: Synthetic oligonucleotide
ugccaauaaacaucaguca

SEQ ID NO: 2550465 - RNA, 19 nt, Artificial Sequence
  Description of Artificial Sequence: Synthetic oligonucleotide
uuuaagaguucccacucua

SEQ ID NO: 2550466 - RNA, 19 nt, Artificial Sequence
  Description of Artificial Sequence: Synthetic oligonucleotide
uggucuaucaauccuuuua

SEQ ID NO: 2550467 - RNA, 19 nt, Artificial Sequence
  Description of Artificial Sequence: Synthetic oligonucleotide
uguucuagaaaaugaucaa

SEQ ID NO: 2550468 - RNA, 19 nt, Artificial Sequence
  Description of Artificial Sequence: Synthetic oligonucleotide
uccuuuaagaguucccacu

SEQ ID NO: 2550469 - RNA, 19 nt, Artificial Sequence
  Description of Artificial Sequence: Synthetic oligonucleotide
uaauggagauacuggauuc

SEQ ID NO: 2550470 - RNA, 19 nt, Artificial Sequence
  Description of Artificial Sequence: Synthetic oligonucleotide
uggauuccuuuccauaucu

SEQ ID NO: 2550471 - RNA, 19 nt, Artificial Sequence
  Description of Artificial Sequence: Synthetic oligonucleotide
aaguuaucauuaguaaggu

SEQ ID NO: 2550472 - RNA, 19 nt, Artificial Sequence
  Description of Artificial Sequence: Synthetic oligonucleotide
uaucuagcagaaaaucauc

SEQ ID NO: 2550473 - RNA, 19 nt, Artificial Sequence
  Description of Artificial Sequence: Synthetic oligonucleotide
gauaacagggauacccugc

SEQ ID NO: 2550474 - RNA, 19 nt, Artificial Sequence
  Description of Artificial Sequence: Synthetic oligonucleotide
uuuggcaacugcuccagac

SEQ ID NO: 2550475 - RNA, 19 nt, Artificial Sequence
  Description of Artificial Sequence: Synthetic oligonucleotide
uaucuuuugcaucauuauu

SEQ ID NO: 2550476 - RNA, 19 nt, Artificial Sequence
  Description of Artificial Sequence: Synthetic oligonucleotide
uguggagugucugucaaug

SEQ ID NO: 2550477 - RNA, 19 nt, Artificial Sequence
  Description of Artificial Sequence: Synthetic oligonucleotide
guuaucuuuuggcaacugc

SEQ ID NO: 2550478 - RNA, 19 nt, Artificial Sequence
  Description of Artificial Sequence: Synthetic oligonucleotide
acuaugccaauaaacauca

SEQ ID NO: 2550479 - RNA, 19 nt, Artificial Sequence
  Description of Artificial Sequence: Synthetic oligonucleotide
uacagaggcuagcauacca

SEQ ID NO: 2550480 - RNA, 19 nt, Artificial Sequence
  Description of Artificial Sequence: Synthetic oligonucleotide
ucugcaaggguguugcagu

SEQ ID NO: 2550481 - RNA, 19 nt, Artificial Sequence
  Description of Artificial Sequence: Synthetic oligonucleotide
uuuucuccagcccuuaauu

SEQ ID NO: 2550482 - RNA, 19 nt, Artificial Sequence
  Description of Artificial Sequence: Synthetic oligonucleotide
uaucuuuuggcaacugcuc

SEQ ID NO: 2550483 - RNA, 19 nt, Artificial Sequence
  Description of Artificial Sequence: Synthetic oligonucleotide
auauauaaauguugcccga

SEQ ID NO: 2550484 - RNA, 19 nt, Artificial Sequence
  Description of Artificial Sequence: Synthetic oligonucleotide
uaauguugccccaggcaag

SEQ ID NO: 2550485 - RNA, 19 nt, Artificial Sequence
  Description of Artificial Sequence: Synthetic oligonucleotide
uaucaauccuuuuaauaua

SEQ ID NO: 2550486 - RNA, 19 nt, Artificial Sequence
  Description of Artificial Sequence: Synthetic oligonucleotide
gaaaucuggucuaucaauc

SEQ ID NO: 2550487 - RNA, 19 nt, Artificial Sequence
  Description of Artificial Sequence: Synthetic oligonucleotide
uuucuccagcccuuaauug

SEQ ID NO: 2550488 - RNA, 19 nt, Artificial Sequence
  Description of Artificial Sequence: Synthetic oligonucleotide
uauuuaucauaaucaucac

SEQ ID NO: 2550489 - RNA, 19 nt, Artificial Sequence
  Description of Artificial Sequence: Synthetic oligonucleotide
uccauaucuagcagaaaau

SEQ ID NO: 2550490 - RNA, 19 nt, Artificial Sequence
  Description of Artificial Sequence: Synthetic oligonucleotide
aucaucuugacuguauuga

SEQ ID NO: 2550491 - RNA, 19 nt, Artificial Sequence
  Description of Artificial Sequence: Synthetic oligonucleotide
ucugacuggucucauuccu

SEQ ID NO: 2550492 - RNA, 19 nt, Artificial Sequence
  Description of Artificial Sequence: Synthetic oligonucleotide
uuaugagauaacagggaua

SEQ ID NO: 2550493 - RNA, 19 nt, Artificial Sequence
  Description of Artificial Sequence: Synthetic oligonucleotide
auguccuaaguucauugug

SEQ ID NO: 2550494 - RNA, 19 nt, Artificial Sequence
  Description of Artificial Sequence: Synthetic oligonucleotide
caaaguaauugauaaugga

SEQ ID NO: 2550495 - RNA, 19 nt, Artificial Sequence
  Description of Artificial Sequence: Synthetic oligonucleotide
gaaaaugaucaauguguuc

SEQ ID NO: 2550496 - RNA, 19 nt, Artificial Sequence
  Description of Artificial Sequence: Synthetic oligonucleotide
cuuucauggaaaucugguc

SEQ ID NO: 2550497 - RNA, 19 nt, Artificial Sequence
  Description of Artificial Sequence: Synthetic oligonucleotide
aaggguguugcagugaaaa

SEQ ID NO: 2550498 - RNA, 19 nt, Artificial Sequence
  Description of Artificial Sequence: Synthetic oligonucleotide
ucuuuguuucugcaagggu

SEQ ID NO: 2550499 - RNA, 19 nt, Artificial Sequence
  Description of Artificial Sequence: Synthetic oligonucleotide
acuggauuccuuuccauau

SEQ ID NO: 2550500 - RNA, 19 nt, Artificial Sequence
  Description of Artificial Sequence: Synthetic oligonucleotide
cugcaauuacauuacuaug

SEQ ID NO: 2550501 - RNA, 19 nt, Artificial Sequence
  Description of Artificial Sequence: Synthetic oligonucleotide
cuugcaguuuucugacugg

SEQ ID NO: 2550502 - RNA, 19 nt, Artificial Sequence
  Description of Artificial Sequence: Synthetic oligonucleotide
cagugaucuuaauaguaag

SEQ ID NO: 2550503 - RNA, 19 nt, Artificial Sequence
  Description of Artificial Sequence: Synthetic oligonucleotide
gaucuuaauaguaaguuau

SEQ ID NO: 2550504 - RNA, 19 nt, Artificial Sequence
  Description of Artificial Sequence: Synthetic oligonucleotide
cuaucaauccuuuuaauau

SEQ ID NO: 2550505 - RNA, 19 nt, Artificial Sequence
  Description of Artificial Sequence: Synthetic oligonucleotide
gauacuggauuccuuucca

SEQ ID NO: 2550506 - RNA, 19 nt, Artificial Sequence
  Description of Artificial Sequence: Synthetic oligonucleotide
uguugcccgauaauguccu

SEQ ID NO: 2550507 - RNA, 19 nt, Artificial Sequence
  Description of Artificial Sequence: Synthetic oligonucleotide
caucaugguuaucuuuugg

SEQ ID NO: 2550508 - RNA, 19 nt, Artificial Sequence
  Description of Artificial Sequence: Synthetic oligonucleotide
agauaacagggauacccug

SEQ ID NO: 2550509 - RNA, 19 nt, Artificial Sequence
  Description of Artificial Sequence: Synthetic oligonucleotide
gcaauuacauuacuaugcc

SEQ ID NO: 2550510 - RNA, 19 nt, Artificial Sequence
  Description of Artificial Sequence: Synthetic oligonucleotide
auguugcccgauaaugucc

SEQ ID NO: 2550511 - RNA, 19 nt, Artificial Sequence
  Description of Artificial Sequence: Synthetic oligonucleotide
uggaaaucuggucuaucaa

SEQ ID NO: 2550512 - RNA, 19 nt, Artificial Sequence
  Description of Artificial Sequence: Synthetic oligonucleotide
aggucauaagugauguugg

SEQ ID NO: 2550513 - RNA, 19 nt, Artificial Sequence
  Description of Artificial Sequence: Synthetic oligonucleotide
aauggcaaaguaauugaua

SEQ ID NO: 2550514 - RNA, 19 nt, Artificial Sequence
  Description of Artificial Sequence: Synthetic oligonucleotide
gacuguauugaaagcucgg

SEQ ID NO: 2550515 - RNA, 19 nt, Artificial Sequence
  Description of Artificial Sequence: Synthetic oligonucleotide
uuccuaauguugccccagg

SEQ ID NO: 2550516 - RNA, 19 nt, Artificial Sequence
  Description of Artificial Sequence: Synthetic oligonucleotide
gacaugcugacacugugga

SEQ ID NO: 2550517 - RNA, 19 nt, Artificial Sequence
  Description of Artificial Sequence: Synthetic oligonucleotide
auaaauguugcccgauaau

SEQ ID NO: 2550518 - RNA, 19 nt, Artificial Sequence
  Description of Artificial Sequence: Synthetic oligonucleotide
caacaguauucuuuguuuc

SEQ ID NO: 2550519 - RNA, 19 nt, Artificial Sequence
  Description of Artificial Sequence: Synthetic oligonucleotide
aguaaggucauaagugaug

SEQ ID NO: 2550520 - RNA, 19 nt, Artificial Sequence
  Description of Artificial Sequence: Synthetic oligonucleotide
uauugaaagcucggcaaca

SEQ ID NO: 2550521 - RNA, 19 nt, Artificial Sequence
  Description of Artificial Sequence: Synthetic oligonucleotide
guauugaaagcucggcaac

SEQ ID NO: 2550522 - RNA, 19 nt, Artificial Sequence
  Description of Artificial Sequence: Synthetic oligonucleotide
caucaucuugacuguauug

SEQ ID NO: 2550523 - RNA, 19 nt, Artificial Sequence
  Description of Artificial Sequence: Synthetic oligonucleotide
aucaauguguuccuuccaa

SEQ ID NO: 2550524 - RNA, 19 nt, Artificial Sequence
  Description of Artificial Sequence: Synthetic oligonucleotide
aucuuaauaguaaguuauc

SEQ ID NO: 2550525 - RNA, 19 nt, Artificial Sequence
  Description of Artificial Sequence: Synthetic oligonucleotide
caguauucuuuguuucugc

SEQ ID NO: 2550526 - RNA, 19 nt, Artificial Sequence
  Description of Artificial Sequence: Synthetic oligonucleotide
cauauggaaaacauauuua

SEQ ID NO: 2550527 - RNA, 19 nt, Artificial Sequence
  Description of Artificial Sequence: Synthetic oligonucleotide
uaguaaggucauaagugau

SEQ ID NO: 2550528 - RNA, 19 nt, Artificial Sequence
  Description of Artificial Sequence: Synthetic oligonucleotide
uguugccccaggcaaggcc

SEQ ID NO: 2550529 - RNA, 19 nt, Artificial Sequence
  Description of Artificial Sequence: Synthetic oligonucleotide
gucauaagugauguuggcc

SEQ ID NO: 2550530 - RNA, 19 nt, Artificial Sequence
  Description of Artificial Sequence: Synthetic oligonucleotide
uccuguucuuuucuccagc

SEQ ID NO: 2550531 - RNA, 19 nt, Artificial Sequence
  Description of Artificial Sequence: Synthetic oligonucleotide
gugucugucaauggcaaag

SEQ ID NO: 2550532 - RNA, 19 nt, Artificial Sequence
  Description of Artificial Sequence: Synthetic oligonucleotide
aagcucggcaacaguauuc

SEQ ID NO: 2550533 - RNA, 19 nt, Artificial Sequence
  Description of Artificial Sequence: Synthetic oligonucleotide
cagaggcuagcauaccagg

SEQ ID NO: 2550534 - RNA, 19 nt, Artificial Sequence
  Description of Artificial Sequence: Synthetic oligonucleotide
auugaaagcucggcaacag

SEQ ID NO: 2550535 - RNA, 19 nt, Artificial Sequence
  Description of Artificial Sequence: Synthetic oligonucleotide
cuaauguugccccaggcaa

SEQ ID NO: 2550536 - RNA, 19 nt, Artificial Sequence
  Description of Artificial Sequence: Synthetic oligonucleotide
uucugcaaggguguugcag

SEQ ID NO: 2550537 - RNA, 19 nt, Artificial Sequence
  Description of Artificial Sequence: Synthetic oligonucleotide
ugcccgauaauguccuaag

SEQ ID NO: 2550538 - RNA, 19 nt, Artificial Sequence
  Description of Artificial Sequence: Synthetic oligonucleotide
uuccuuuaagaguucccac

SEQ ID NO: 2550539 - RNA, 19 nt, Artificial Sequence
  Description of Artificial Sequence: Synthetic oligonucleotide
ccuuuuaauauauaaaugu

SEQ ID NO: 2550540 - RNA, 19 nt, Artificial Sequence
  Description of Artificial Sequence: Synthetic oligonucleotide
uuuccuaauguugccccag

SEQ ID NO: 2550541 - RNA, 19 nt, Artificial Sequence
  Description of Artificial Sequence: Synthetic oligonucleotide
uuuacgccugccaaauuuu

SEQ ID NO: 2550542 - RNA, 19 nt, Artificial Sequence
  Description of Artificial Sequence: Synthetic oligonucleotide
uauauaaauguugcccgau

SEQ ID NO: 2550543 - RNA, 19 nt, Artificial Sequence
  Description of Artificial Sequence: Synthetic oligonucleotide
uucauggaaaucuggucua

SEQ ID NO: 2550544 - RNA, 19 nt, Artificial Sequence
  Description of Artificial Sequence: Synthetic oligonucleotide
uccuaauguugccccaggc

SEQ ID NO: 2550545 - RNA, 19 nt, Artificial Sequence
  Description of Artificial Sequence: Synthetic oligonucleotide
agugaucuuaauaguaagu

SEQ ID NO: 2550546 - RNA, 19 nt, Artificial Sequence
  Description of Artificial Sequence: Synthetic oligonucleotide
uuuuccuaauguugcccca

SEQ ID NO: 2550547 - RNA, 19 nt, Artificial Sequence
  Description of Artificial Sequence: Synthetic oligonucleotide
ccuuaauuguucuagaaaa

SEQ ID NO: 2550548 - RNA, 19 nt, Artificial Sequence
  Description of Artificial Sequence: Synthetic oligonucleotide
ugacuggucucauuccugu

SEQ ID NO: 2550549 - RNA, 19 nt, Artificial Sequence
  Description of Artificial Sequence: Synthetic oligonucleotide
ucaucucuaccaguuuucc

SEQ ID NO: 2550550 - RNA, 19 nt, Artificial Sequence
  Description of Artificial Sequence: Synthetic oligonucleotide
ugucuaauccgcucugcaa

SEQ ID NO: 2550551 - RNA, 19 nt, Artificial Sequence
  Description of Artificial Sequence: Synthetic oligonucleotide
aaagcucggcaacaguauu

SEQ ID NO: 2550552 - RNA, 19 nt, Artificial Sequence
  Description of Artificial Sequence: Synthetic oligonucleotide
cauuaguaaggucauaagu

SEQ ID NO: 2550553 - RNA, 19 nt, Artificial Sequence
  Description of Artificial Sequence: Synthetic oligonucleotide
uucugacuggucucauucc

SEQ ID NO: 2550554 - RNA, 19 nt, Artificial Sequence
  Description of Artificial Sequence: Synthetic oligonucleotide
aucuagcagaaaaucauca

SEQ ID NO: 2550555 - RNA, 19 nt, Artificial Sequence
  Description of Artificial Sequence: Synthetic oligonucleotide
ugaagucuugcaguuuucu

SEQ ID NO: 2550556 - RNA, 19 nt, Artificial Sequence
  Description of Artificial Sequence: Synthetic oligonucleotide
uaauccgcucugcaauuac

SEQ ID NO: 2550557 - RNA, 19 nt, Artificial Sequence
  Description of Artificial Sequence: Synthetic oligonucleotide
auaagugauguuggccuuc

SEQ ID NO: 2550558 - RNA, 19 nt, Artificial Sequence
  Description of Artificial Sequence: Synthetic oligonucleotide
uccuaaguucauugugucu

SEQ ID NO: 2550559 - RNA, 19 nt, Artificial Sequence
  Description of Artificial Sequence: Synthetic oligonucleotide
agucaucucuaccaguuuu

SEQ ID NO: 2550560 - RNA, 19 nt, Artificial Sequence
  Description of Artificial Sequence: Synthetic oligonucleotide
ugcauauggaaaacauauu

SEQ ID NO: 2550561 - RNA, 19 nt, Artificial Sequence
  Description of Artificial Sequence: Synthetic oligonucleotide
acaucugucuguuuaucuu

SEQ ID NO: 2550562 - RNA, 19 nt, Artificial Sequence
  Description of Artificial Sequence: Synthetic oligonucleotide
ucauugugucuaauccgcu

SEQ ID NO: 2550563 - RNA, 19 nt, Artificial Sequence
  Description of Artificial Sequence: Synthetic oligonucleotide
uugugucuaauccgcucug

SEQ ID NO: 2550564 - RNA, 19 nt, Artificial Sequence
  Description of Artificial Sequence: Synthetic oligonucleotide
ccgauaauguccuaaguuc

SEQ ID NO: 2550565 - RNA, 19 nt, Artificial Sequence
  Description of Artificial Sequence: Synthetic oligonucleotide
ucacuugucguuuccuuua

SEQ ID NO: 2550566 - RNA, 19 nt, Artificial Sequence
  Description of Artificial Sequence: Synthetic oligonucleotide
auauaaauguugcccgaua

SEQ ID NO: 2550567 - RNA, 19 nt, Artificial Sequence
  Description of Artificial Sequence: Synthetic oligonucleotide
cuuaauaguaaguuaucau

SEQ ID NO: 2550568 - RNA, 19 nt, Artificial Sequence
  Description of Artificial Sequence: Synthetic oligonucleotide
ucaauguguuccuuccaau

SEQ ID NO: 2550569 - RNA, 19 nt, Artificial Sequence
  Description of Artificial Sequence: Synthetic oligonucleotide
uugaaagcucggcaacagu

SEQ ID NO: 2550570 - RNA, 19 nt, Artificial Sequence
  Description of Artificial Sequence: Synthetic oligonucleotide
cauugugucuaauccgcuc

SEQ ID NO: 2550571 - RNA, 19 nt, Artificial Sequence
  Description of Artificial Sequence: Synthetic oligonucleotide
caugguuaucuuuuggcaa

SEQ ID NO: 2550572 - RNA, 19 nt, Artificial Sequence
  Description of Artificial Sequence: Synthetic oligonucleotide
uccaaacauaaauuuucuu

SEQ ID NO: 2550573 - RNA, 19 nt, Artificial Sequence
  Description of Artificial Sequence: Synthetic oligonucleotide
aucaauccuuuuaauauau

SEQ ID NO: 2550574 - RNA, 19 nt, Artificial Sequence
  Description of Artificial Sequence: Synthetic oligonucleotide
ggcaaggccuccuuuacgc

SEQ ID NO: 2550575 - RNA, 19 nt, Artificial Sequence
  Description of Artificial Sequence: Synthetic oligonucleotide
uuacauuacuaugccaaua

SEQ ID NO: 2550576 - RNA, 19 nt, Artificial Sequence
  Description of Artificial Sequence: Synthetic oligonucleotide
aggcuagcauaccaggacu

SEQ ID NO: 2550577 - RNA, 19 nt, Artificial Sequence
  Description of Artificial Sequence: Synthetic oligonucleotide
ccaaacauaaauuuucuua

SEQ ID NO: 2550578 - RNA, 19 nt, Artificial Sequence
  Description of Artificial Sequence: Synthetic oligonucleotide
ucuggucuaucaauccuuu

SEQ ID NO: 2550579 - RNA, 19 nt, Artificial Sequence
  Description of Artificial Sequence: Synthetic oligonucleotide
agaaaaugaucaauguguu

SEQ ID NO: 2550580 - RNA, 19 nt, Artificial Sequence
  Description of Artificial Sequence: Synthetic oligonucleotide
cuguauugaaagcucggca

SEQ ID NO: 2550581 - RNA, 19 nt, Artificial Sequence
  Description of Artificial Sequence: Synthetic oligonucleotide
auguuggccuucuggagga

SEQ ID NO: 2550582 - RNA, 19 nt, Artificial Sequence
  Description of Artificial Sequence: Synthetic oligonucleotide
uacuggauuccuuuccaua

SEQ ID NO: 2550583 - RNA, 19 nt, Artificial Sequence
  Description of Artificial Sequence: Synthetic oligonucleotide
cugacaugcugacacugug

SEQ ID NO: 2550584 - RNA, 19 nt, Artificial Sequence
  Description of Artificial Sequence: Synthetic oligonucleotide
gaaaaucaucaucuugacu

SEQ ID NO: 2550585 - RNA, 19 nt, Artificial Sequence
  Description of Artificial Sequence: Synthetic oligonucleotide
guggagugucugucaaugg

SEQ ID NO: 2550586 - RNA, 19 nt, Artificial Sequence
  Description of Artificial Sequence: Synthetic oligonucleotide
cagcccuuaauuguucuag

SEQ ID NO: 2550587 - RNA, 19 nt, Artificial Sequence
  Description of Artificial Sequence: Synthetic oligonucleotide
ucaauccuuuuaauauaua

SEQ ID NO: 2550588 - RNA, 19 nt, Artificial Sequence
  Description of Artificial Sequence: Synthetic oligonucleotide
caucauuauucauugauuu

SEQ ID NO: 2550589 - RNA, 19 nt, Artificial Sequence
  Description of Artificial Sequence: Synthetic oligonucleotide
ucuaauccgcucugcaauu

SEQ ID NO: 2550590 - RNA, 19 nt, Artificial Sequence
  Description of Artificial Sequence: Synthetic oligonucleotide
aggcaaggccuccuuuacg

SEQ ID NO: 2550591 - RNA, 19 nt, Artificial Sequence
  Description of Artificial Sequence: Synthetic oligonucleotide
cuucuggaggacaucuguc

SEQ ID NO: 2550592 - RNA, 19 nt, Artificial Sequence
  Description of Artificial Sequence: Synthetic oligonucleotide
caauaaacaucagucaucu

SEQ ID NO: 2550593 - RNA, 19 nt, Artificial Sequence
  Description of Artificial Sequence: Synthetic oligonucleotide
augcugacacuguggagug

SEQ ID NO: 2550594 - RNA, 19 nt, Artificial Sequence
  Description of Artificial Sequence: Synthetic oligonucleotide
acagaggcuagcauaccag

SEQ ID NO: 2550595 - RNA, 19 nt, Artificial Sequence
  Description of Artificial Sequence: Synthetic oligonucleotide
cuuuuggcaacugcuccag

SEQ ID NO: 2550596 - RNA, 19 nt, Artificial Sequence
  Description of Artificial Sequence: Synthetic oligonucleotide
ugugucuaauccgcucugc

SEQ ID NO: 2550597 - RNA, 19 nt, Artificial Sequence
  Description of Artificial Sequence: Synthetic oligonucleotide
ccaauaaacaucagucauc

SEQ ID NO: 2550598 - RNA, 19 nt, Artificial Sequence
  Description of Artificial Sequence: Synthetic oligonucleotide
caauuacauuacuaugcca

SEQ ID NO: 2550599 - RNA, 19 nt, Artificial Sequence
  Description of Artificial Sequence: Synthetic oligonucleotide
gaucaauguguuccuucca

SEQ ID NO: 2550600 - RNA, 19 nt, Artificial Sequence
  Description of Artificial Sequence: Synthetic oligonucleotide
ugucugucaauggcaaagu

SEQ ID NO: 2550601 - RNA, 19 nt, Artificial Sequence
  Description of Artificial Sequence: Synthetic oligonucleotide
acaaucccucacuugucgu

SEQ ID NO: 2550602 - RNA, 19 nt, Artificial Sequence
  Description of Artificial Sequence: Synthetic oligonucleotide
acacuguggagugucuguc

SEQ ID NO: 2550603 - RNA, 19 nt, Artificial Sequence
  Description of Artificial Sequence: Synthetic oligonucleotide
acuugucguuuccuuuaag

SEQ ID NO: 2550604 - RNA, 19 nt, Artificial Sequence
  Description of Artificial Sequence: Synthetic oligonucleotide
aauugauaauggagauacu

SEQ ID NO: 2550605 - RNA, 19 nt, Artificial Sequence
  Description of Artificial Sequence: Synthetic oligonucleotide
cuuaugagauaacagggau

SEQ ID NO: 2550606 - RNA, 19 nt, Artificial Sequence
  Description of Artificial Sequence: Synthetic oligonucleotide
ugcaguuuucugacugguc

SEQ ID NO: 2550607 - RNA, 19 nt, Artificial Sequence
  Description of Artificial Sequence: Synthetic oligonucleotide
augagauaacagggauacc

SEQ ID NO: 2550608 - RNA, 19 nt, Artificial Sequence
  Description of Artificial Sequence: Synthetic oligonucleotide
guccuaaguucauuguguc

SEQ ID NO: 2550609 - RNA, 19 nt, Artificial Sequence
  Description of Artificial Sequence: Synthetic oligonucleotide
uggcaaaguaauugauaau

SEQ ID NO: 2550610 - RNA, 19 nt, Artificial Sequence
  Description of Artificial Sequence: Synthetic oligonucleotide
guaaggucauaagugaugu

SEQ ID NO: 2550611 - RNA, 19 nt, Artificial Sequence
  Description of Artificial Sequence: Synthetic oligonucleotide
cugacuggucucauuccug

SEQ ID NO: 2550612 - RNA, 19 nt, Artificial Sequence
  Description of Artificial Sequence: Synthetic oligonucleotide
aauccgcucugcaauuaca

SEQ ID NO: 2550613 - RNA, 19 nt, Artificial Sequence
  Description of Artificial Sequence: Synthetic oligonucleotide
aaugaucaauguguuccuu

SEQ ID NO: 2550614 - RNA, 19 nt, Artificial Sequence
  Description of Artificial Sequence: Synthetic oligonucleotide
gcuucuuucauggaaaucu

SEQ ID NO: 2550615 - RNA, 19 nt, Artificial Sequence
  Description of Artificial Sequence: Synthetic oligonucleotide
cagacaaucccucacuugu

SEQ ID NO: 2550616 - RNA, 19 nt, Artificial Sequence
  Description of Artificial Sequence: Synthetic oligonucleotide
uccagcccuuaauuguucu

SEQ ID NO: 2550617 - RNA, 19 nt, Artificial Sequence
  Description of Artificial Sequence: Synthetic oligonucleotide
accaggacugacaugcuga

SEQ ID NO: 2550618 - RNA, 19 nt, Artificial Sequence
  Description of Artificial Sequence: Synthetic oligonucleotide
ugcuccagacaaucccuca

SEQ ID NO: 2550619 - RNA, 19 nt, Artificial Sequence
  Description of Artificial Sequence: Synthetic oligonucleotide
cuagcauaccaggacugac

SEQ ID NO: 2550620 - RNA, 19 nt, Artificial Sequence
  Description of Artificial Sequence: Synthetic oligonucleotide
uccuuuacgccugccaaau

SEQ ID NO: 2550621 - RNA, 19 nt, Artificial Sequence
  Description of Artificial Sequence: Synthetic oligonucleotide
ggucauaagugauguuggc

SEQ ID NO: 2550622 - RNA, 19 nt, Artificial Sequence
  Description of Artificial Sequence: Synthetic oligonucleotide
aaucccucacuugucguuu

SEQ ID NO: 2550623 - RNA, 19 nt, Artificial Sequence
  Description of Artificial Sequence: Synthetic oligonucleotide
agcccuuaauuguucuaga

SEQ ID NO: 2550624 - RNA, 19 nt, Artificial Sequence
  Description of Artificial Sequence: Synthetic oligonucleotide
uugcaguuuucugacuggu

SEQ ID NO: 2550625 - RNA, 19 nt, Artificial Sequence
  Description of Artificial Sequence: Synthetic oligonucleotide
cuuaauuguucuagaaaau

SEQ ID NO: 2550626 - RNA, 19 nt, Artificial Sequence
  Description of Artificial Sequence: Synthetic oligonucleotide
caucuugacuguauugaaa

SEQ ID NO: 2550627 - RNA, 19 nt, Artificial Sequence
  Description of Artificial Sequence: Synthetic oligonucleotide
ugacacuguggagugucug

SEQ ID NO: 2550628 - RNA, 19 nt, Artificial Sequence
  Description of Artificial Sequence: Synthetic oligonucleotide
uuuuggcaacugcuccaga

SEQ ID NO: 2550629 - RNA, 19 nt, Artificial Sequence
  Description of Artificial Sequence: Synthetic oligonucleotide
auacuggauuccuuuccau

SEQ ID NO: 2550630 - RNA, 19 nt, Artificial Sequence
  Description of Artificial Sequence: Synthetic oligonucleotide
gcauauggaaaacauauuu

SEQ ID NO: 2550631 - RNA, 19 nt, Artificial Sequence
  Description of Artificial Sequence: Synthetic oligonucleotide
aucccucacuugucguuuc

SEQ ID NO: 2550632 - RNA, 19 nt, Artificial Sequence
  Description of Artificial Sequence: Synthetic oligonucleotide
agacaaucccucacuuguc

SEQ ID NO: 2550633 - RNA, 19 nt, Artificial Sequence
  Description of Artificial Sequence: Synthetic oligonucleotide
uucccacucuagcagugau

SEQ ID NO: 2550634 - RNA, 19 nt, Artificial Sequence
  Description of Artificial Sequence: Synthetic oligonucleotide
uugcaucauuauucauuga

SEQ ID NO: 2550635 - RNA, 19 nt, Artificial Sequence
  Description of Artificial Sequence: Synthetic oligonucleotide
uuacagaggcuagcauacc

SEQ ID NO: 2550636 - RNA, 19 nt, Artificial Sequence
  Description of Artificial Sequence: Synthetic oligonucleotide
cucugcaauuacauuacua

SEQ ID NO: 2550637 - RNA, 19 nt, Artificial Sequence
  Description of Artificial Sequence: Synthetic oligonucleotide
cuggauuccuuuccauauc

SEQ ID NO: 2550638 - RNA, 19 nt, Artificial Sequence
  Description of Artificial Sequence: Synthetic oligonucleotide
ugguuaucuuuuggcaacu

SEQ ID NO: 2550639 - RNA, 19 nt, Artificial Sequence
  Description of Artificial Sequence: Synthetic oligonucleotide
gugaucuuaauaguaaguu

SEQ ID NO: 2550640 - RNA, 19 nt, Artificial Sequence
  Description of Artificial Sequence: Synthetic oligonucleotide
gucguuuccuuuaagaguu

SEQ ID NO: 2550641 - RNA, 19 nt, Artificial Sequence
  Description of Artificial Sequence: Synthetic oligonucleotide
auaauguccuaaguucauu

SEQ ID NO: 2550642 - RNA, 19 nt, Artificial Sequence
  Description of Artificial Sequence: Synthetic oligonucleotide
ccuguucuuuucuccagcc

SEQ ID NO: 2550643 - RNA, 19 nt, Artificial Sequence
  Description of Artificial Sequence: Synthetic oligonucleotide
gucuaauccgcucugcaau

SEQ ID NO: 2550644 - RNA, 19 nt, Artificial Sequence
  Description of Artificial Sequence: Synthetic oligonucleotide
gugucuaauccgcucugca

SEQ ID NO: 2550645 - RNA, 19 nt, Artificial Sequence
  Description of Artificial Sequence: Synthetic oligonucleotide
guaauugauaauggagaua

SEQ ID NO: 2550646 - RNA, 19 nt, Artificial Sequence
  Description of Artificial Sequence: Synthetic oligonucleotide
cuaugccaauaaacaucag

SEQ ID NO: 2550647 - RNA, 19 nt, Artificial Sequence
  Description of Artificial Sequence: Synthetic oligonucleotide
ccauaucuagcagaaaauc

SEQ ID NO: 2550648 - RNA, 19 nt, Artificial Sequence
  Description of Artificial Sequence: Synthetic oligonucleotide
gagauaacagggauacccu

SEQ ID NO: 2550649 - RNA, 19 nt, Artificial Sequence
  Description of Artificial Sequence: Synthetic oligonucleotide
cuaaguucauugugucuaa

SEQ ID NO: 2550650 - RNA, 19 nt, Artificial Sequence
  Description of Artificial Sequence: Synthetic oligonucleotide
ucccacucuagcagugauc

SEQ ID NO: 2550651 - RNA, 19 nt, Artificial Sequence
  Description of Artificial Sequence: Synthetic oligonucleotide
agaggcuagcauaccagga

SEQ ID NO: 2550652 - RNA, 19 nt, Artificial Sequence
  Description of Artificial Sequence: Synthetic oligonucleotide
gucaucucuaccaguuuuc

SEQ ID NO: 2550653 - RNA, 19 nt, Artificial Sequence
  Description of Artificial Sequence: Synthetic oligonucleotide
cugcaaggguguugcagug

SEQ ID NO: 2550654 - RNA, 19 nt, Artificial Sequence
  Description of Artificial Sequence: Synthetic oligonucleotide
gacacuguggagugucugu

SEQ ID NO: 2550655 - RNA, 19 nt, Artificial Sequence
  Description of Artificial Sequence: Synthetic oligonucleotide
cacucuagcagugaucuua

SEQ ID NO: 2550656 - RNA, 19 nt, Artificial Sequence
  Description of Artificial Sequence: Synthetic oligonucleotide
caggcaaggccuccuuuac

SEQ ID NO: 2550657 - RNA, 19 nt, Artificial Sequence
  Description of Artificial Sequence: Synthetic oligonucleotide
uugcccgauaauguccuaa

SEQ ID NO: 2550658 - RNA, 19 nt, Artificial Sequence
  Description of Artificial Sequence: Synthetic oligonucleotide
ugcuucuuucauggaaauc

SEQ ID NO: 2550659 - RNA, 19 nt, Artificial Sequence
  Description of Artificial Sequence: Synthetic oligonucleotide
agugucugucaauggcaaa

SEQ ID NO: 2550660 - RNA, 19 nt, Artificial Sequence
  Description of Artificial Sequence: Synthetic oligonucleotide
ugcaaggguguugcaguga

SEQ ID NO: 2550661 - RNA, 19 nt, Artificial Sequence
  Description of Artificial Sequence: Synthetic oligonucleotide
ucauggaaaucuggucuau

SEQ ID NO: 2550662 - RNA, 19 nt, Artificial Sequence
  Description of Artificial Sequence: Synthetic oligonucleotide
uaaggucauaagugauguu

SEQ ID NO: 2550663 - RNA, 19 nt, Artificial Sequence
  Description of Artificial Sequence: Synthetic oligonucleotide
cuuuacgccugccaaauuu

SEQ ID NO: 2550664 - RNA, 19 nt, Artificial Sequence
  Description of Artificial Sequence: Synthetic oligonucleotide
gagugucugucaauggcaa

SEQ ID NO: 2550665 - RNA, 19 nt, Artificial Sequence
  Description of Artificial Sequence: Synthetic oligonucleotide
gauaauguccuaaguucau

SEQ ID NO: 2550666 - RNA, 19 nt, Artificial Sequence
  Description of Artificial Sequence: Synthetic oligonucleotide
uuuccauaucuagcagaaa

SEQ ID NO: 2550667 - RNA, 19 nt, Artificial Sequence
  Description of Artificial Sequence: Synthetic oligonucleotide
uaaguucauugugucuaau

SEQ ID NO: 2550668 - RNA, 19 nt, Artificial Sequence
  Description of Artificial Sequence: Synthetic oligonucleotide
gccaauaaacaucagucau

SEQ ID NO: 2550669 - RNA, 19 nt, Artificial Sequence
  Description of Artificial Sequence: Synthetic oligonucleotide
cauggaaaucuggucuauc

SEQ ID NO: 2550670 - RNA, 19 nt, Artificial Sequence
  Description of Artificial Sequence: Synthetic oligonucleotide
uaucauuaguaaggucaua

SEQ ID NO: 2550671 - RNA, 19 nt, Artificial Sequence
  Description of Artificial Sequence: Synthetic oligonucleotide
caugaagucuugcaguuuu

SEQ ID NO: 2550672 - RNA, 19 nt, Artificial Sequence
  Description of Artificial Sequence: Synthetic oligonucleotide
ggagugucugucaauggca

SEQ ID NO: 2550673 - RNA, 19 nt, Artificial Sequence
  Description of Artificial Sequence: Synthetic oligonucleotide
uuucugcaaggguguugca

SEQ ID NO: 2550674 - RNA, 19 nt, Artificial Sequence
  Description of Artificial Sequence: Synthetic oligonucleotide
gcaacugcuccagacaauc

SEQ ID NO: 2550675 - RNA, 19 nt, Artificial Sequence
  Description of Artificial Sequence: Synthetic oligonucleotide
aguucccacucuagcagug

SEQ ID NO: 2550676 - RNA, 19 nt, Artificial Sequence
  Description of Artificial Sequence: Synthetic oligonucleotide
uggaggacaucugucuguu

SEQ ID NO: 2550677 - RNA, 19 nt, Artificial Sequence
  Description of Artificial Sequence: Synthetic oligonucleotide
gauacccugcuucuuucau

SEQ ID NO: 2550678 - RNA, 19 nt, Artificial Sequence
  Description of Artificial Sequence: Synthetic oligonucleotide
ucguuuccuuuaagaguuc

SEQ ID NO: 2550679 - RNA, 19 nt, Artificial Sequence
  Description of Artificial Sequence: Synthetic oligonucleotide
cugcuccagacaaucccuc

SEQ ID NO: 2550680 - RNA, 19 nt, Artificial Sequence
  Description of Artificial Sequence: Synthetic oligonucleotide
ucaugaagucuugcaguuu

SEQ ID NO: 2550681 - RNA, 19 nt, Artificial Sequence
  Description of Artificial Sequence: Synthetic oligonucleotide
cgauaauguccuaaguuca

SEQ ID NO: 2550682 - RNA, 19 nt, Artificial Sequence
  Description of Artificial Sequence: Synthetic oligonucleotide
ccuuuccauaucuagcaga

SEQ ID NO: 2550683 - RNA, 19 nt, Artificial Sequence
  Description of Artificial Sequence: Synthetic oligonucleotide
aggccuccuuuacgccugc

SEQ ID NO: 2550684 - RNA, 19 nt, Artificial Sequence
  Description of Artificial Sequence: Synthetic oligonucleotide
acucuagcagugaucuuaa

SEQ ID NO: 2550685 - RNA, 19 nt, Artificial Sequence
  Description of Artificial Sequence: Synthetic oligonucleotide
gaaagcucggcaacaguau

SEQ ID NO: 2550686 - RNA, 19 nt, Artificial Sequence
  Description of Artificial Sequence: Synthetic oligonucleotide
ccuaauguugccccaggca

SEQ ID NO: 2550687 - RNA, 19 nt, Artificial Sequence
  Description of Artificial Sequence: Synthetic oligonucleotide
auccgcucugcaauuacau

SEQ ID NO: 2550688 - RNA, 19 nt, Artificial Sequence
  Description of Artificial Sequence: Synthetic oligonucleotide
ccagacaaucccucacuug

SEQ ID NO: 2550689 - RNA, 19 nt, Artificial Sequence
  Description of Artificial Sequence: Synthetic oligonucleotide
gcuccagacaaucccucac

SEQ ID NO: 2550690 - RNA, 19 nt, Artificial Sequence
  Description of Artificial Sequence: Synthetic oligonucleotide
uucuuuucuccagcccuua

SEQ ID NO: 2550691 - RNA, 19 nt, Artificial Sequence
  Description of Artificial Sequence: Synthetic oligonucleotide
gcaacaguauucuuuguuu

SEQ ID NO: 2550692 - RNA, 19 nt, Artificial Sequence
  Description of Artificial Sequence: Synthetic oligonucleotide
caauguguuccuuccaauu

SEQ ID NO: 2550693 - RNA, 19 nt, Artificial Sequence
  Description of Artificial Sequence: Synthetic oligonucleotide
cuggucucauuccuguucu

SEQ ID NO: 2550694 - RNA, 19 nt, Artificial Sequence
  Description of Artificial Sequence: Synthetic oligonucleotide
ggcuagcauaccaggacug

SEQ ID NO: 2550695 - RNA, 19 nt, Artificial Sequence
  Description of Artificial Sequence: Synthetic oligonucleotide
caucugucuguuuaucuuu

SEQ ID NO: 2550696 - RNA, 19 nt, Artificial Sequence
  Description of Artificial Sequence: Synthetic oligonucleotide
gcugacacuguggaguguc

SEQ ID NO: 2550697 - RNA, 19 nt, Artificial Sequence
  Description of Artificial Sequence: Synthetic oligonucleotide
cuccuuuacgccugccaaa

SEQ ID NO: 2550698 - RNA, 19 nt, Artificial Sequence
  Description of Artificial Sequence: Synthetic oligonucleotide
cgcucugcaauuacauuac

SEQ ID NO: 2550699 - RNA, 19 nt, Artificial Sequence
  Description of Artificial Sequence: Synthetic oligonucleotide
gcaaggguguugcagugaa

SEQ ID NO: 2550700 - RNA, 19 nt, Artificial Sequence
  Description of Artificial Sequence: Synthetic oligonucleotide
cccuuaauuguucuagaaa

SEQ ID NO: 2550701 - RNA, 19 nt, Artificial Sequence
  Description of Artificial Sequence: Synthetic oligonucleotide
gucuaucaauccuuuuaau

SEQ ID NO: 2550702 - RNA, 19 nt, Artificial Sequence
  Description of Artificial Sequence: Synthetic oligonucleotide
gggauacccugcuucuuuc

SEQ ID NO: 2550703 - RNA, 19 nt, Artificial Sequence
  Description of Artificial Sequence: Synthetic oligonucleotide
cuggaggacaucugucugu

SEQ ID NO: 2550704 - RNA, 19 nt, Artificial Sequence
  Description of Artificial Sequence: Synthetic oligonucleotide
ccgcucugcaauuacauua

SEQ ID NO: 2550705 - RNA, 19 nt, Artificial Sequence
  Description of Artificial Sequence: Synthetic oligonucleotide
gcccuuaauuguucuagaa

SEQ ID NO: 2550706 - RNA, 19 nt, Artificial Sequence
  Description of Artificial Sequence: Synthetic oligonucleotide
ggcaacaguauucuuuguu

SEQ ID NO: 2550707 - RNA, 19 nt, Artificial Sequence
  Description of Artificial Sequence: Synthetic oligonucleotide
gggaauccaaacauaaauu

SEQ ID NO: 2550708 - RNA, 19 nt, Artificial Sequence
  Description of Artificial Sequence: Synthetic oligonucleotide
cuuuugcaucauuauucau

SEQ ID NO: 2550709 - RNA, 19 nt, Artificial Sequence
  Description of Artificial Sequence: Synthetic oligonucleotide
cuccagacaaucccucacu

SEQ ID NO: 2550710 - RNA, 19 nt, Artificial Sequence
  Description of Artificial Sequence: Synthetic oligonucleotide
cucacuugucguuuccuuu

SEQ ID NO: 2550711 - RNA, 19 nt, Artificial Sequence
  Description of Artificial Sequence: Synthetic oligonucleotide
cguuuccuuuaagaguucc

SEQ ID NO: 2550712 - RNA, 19 nt, Artificial Sequence
  Description of Artificial Sequence: Synthetic oligonucleotide
guucccacucuagcaguga

SEQ ID NO: 2550713 - RNA, 19 nt, Artificial Sequence
  Description of Artificial Sequence: Synthetic oligonucleotide
cauaagugauguuggccuu

SEQ ID NO: 2550714 - RNA, 19 nt, Artificial Sequence
  Description of Artificial Sequence: Synthetic oligonucleotide
cacuugucguuuccuuuaa

SEQ ID NO: 2550715 - RNA, 19 nt, Artificial Sequence
  Description of Artificial Sequence: Synthetic oligonucleotide
gcauaccaggacugacaug

SEQ ID NO: 2550716 - RNA, 19 nt, Artificial Sequence
  Description of Artificial Sequence: Synthetic oligonucleotide
ugcugacacuguggagugu

SEQ ID NO: 2550717 - RNA, 19 nt, Artificial Sequence
  Description of Artificial Sequence: Synthetic oligonucleotide
cuaauccgcucugcaauua

SEQ ID NO: 2550718 - RNA, 19 nt, Artificial Sequence
  Description of Artificial Sequence: Synthetic oligonucleotide
gcuagcauaccaggacuga

SEQ ID NO: 2550719 - RNA, 19 nt, Artificial Sequence
  Description of Artificial Sequence: Synthetic oligonucleotide
uguuggccuucuggaggac

SEQ ID NO: 2550720 - RNA, 19 nt, Artificial Sequence
  Description of Artificial Sequence: Synthetic oligonucleotide
ugccccaggcaaggccucc

SEQ ID NO: 2550721 - RNA, 19 nt, Artificial Sequence
  Description of Artificial Sequence: Synthetic oligonucleotide
ccuccuuuacgccugccaa

SEQ ID NO: 2550722 - RNA, 19 nt, Artificial Sequence
  Description of Artificial Sequence: Synthetic oligonucleotide
caaucccucacuugucguu

SEQ ID NO: 2550723 - RNA, 19 nt, Artificial Sequence
  Description of Artificial Sequence: Synthetic oligonucleotide
gcaucauuauucauugauu

SEQ ID NO: 2550724 - RNA, 19 nt, Artificial Sequence
  Description of Artificial Sequence: Synthetic oligonucleotide
cccacucuagcagugaucu

SEQ ID NO: 2550725 - RNA, 19 nt, Artificial Sequence
  Description of Artificial Sequence: Synthetic oligonucleotide
cccgauaauguccuaaguu

SEQ ID NO: 2550726 - RNA, 19 nt, Artificial Sequence
  Description of Artificial Sequence: Synthetic oligonucleotide
uggccuucuggaggacauc

SEQ ID NO: 2550727 - RNA, 19 nt, Artificial Sequence
  Description of Artificial Sequence: Synthetic oligonucleotide
cccugcuucuuucauggaa

SEQ ID NO: 2550728 - RNA, 19 nt, Artificial Sequence
  Description of Artificial Sequence: Synthetic oligonucleotide
ccuucuggaggacaucugu

SEQ ID NO: 2550729 - RNA, 19 nt, Artificial Sequence
  Description of Artificial Sequence: Synthetic oligonucleotide
cugacacuguggagugucu

SEQ ID NO: 2550730 - RNA, 19 nt, Artificial Sequence
  Description of Artificial Sequence: Synthetic oligonucleotide
guugcccgauaauguccua

SEQ ID NO: 2550731 - RNA, 19 nt, Artificial Sequence
  Description of Artificial Sequence: Synthetic oligonucleotide
ggucucauuccuguucuuu

SEQ ID NO: 2550732 - RNA, 19 nt, Artificial Sequence
  Description of Artificial Sequence: Synthetic oligonucleotide
cuggucuaucaauccuuuu

SEQ ID NO: 2550733 - RNA, 19 nt, Artificial Sequence
  Description of Artificial Sequence: Synthetic oligonucleotide
cuguggagugucugucaau

SEQ ID NO: 2550734 - RNA, 19 nt, Artificial Sequence
  Description of Artificial Sequence: Synthetic oligonucleotide
gcccgauaauguccuaagu

SEQ ID NO: 2550735 - RNA, 19 nt, Artificial Sequence
  Description of Artificial Sequence: Synthetic oligonucleotide
cagucaucucuaccaguuu

SEQ ID NO: 2550736 - RNA, 19 nt, Artificial Sequence
  Description of Artificial Sequence: Synthetic oligonucleotide
ccagcccuuaauuguucua

SEQ ID NO: 2550737 - RNA, 19 nt, Artificial Sequence
  Description of Artificial Sequence: Synthetic oligonucleotide
ccucacuugucguuuccuu

SEQ ID NO: 2550738 - RNA, 19 nt, Artificial Sequence
  Description of Artificial Sequence: Synthetic oligonucleotide
ggcaacugcuccagacaau

SEQ ID NO: 2550739 - RNA, 19 nt, Artificial Sequence
  Description of Artificial Sequence: Synthetic oligonucleotide
cagggauacccugcuucuu

SEQ ID NO: 2550740 - RNA, 19 nt, Artificial Sequence
  Description of Artificial Sequence: Synthetic oligonucleotide
gcucggcaacaguauucuu

SEQ ID NO: 2550741 - RNA, 19 nt, Artificial Sequence
  Description of Artificial Sequence: Synthetic oligonucleotide
cccucacuugucguuuccu

SEQ ID NO: 2550742 - RNA, 19 nt, Artificial Sequence
  Description of Artificial Sequence: Synthetic oligonucleotide
ccuuuacgccugccaaauu

SEQ ID NO: 2550743 - RNA, 19 nt, Artificial Sequence
  Description of Artificial Sequence: Synthetic oligonucleotide
cggcaacaguauucuuugu

SEQ ID NO: 2550744 - RNA, 19 nt, Artificial Sequence
  Description of Artificial Sequence: Synthetic oligonucleotide
aauaugauccuucaggguc

SEQ ID NO: 2550745 - RNA, 19 nt, Artificial Sequence
  Description of Artificial Sequence: Synthetic oligonucleotide
gacaugacaguucagaagg

SEQ ID NO: 2550746 - RNA, 19 nt, Artificial Sequence
  Description of Artificial Sequence: Synthetic oligonucleotide
uggaauaugauccuucagg

SEQ ID NO: 2550747 - RNA, 19 nt, Artificial Sequence
  Description of Artificial Sequence: Synthetic oligonucleotide
ugaugguccagucagaggg

SEQ ID NO: 2550748 - RNA, 19 nt, Artificial Sequence
  Description of Artificial Sequence: Synthetic oligonucleotide
aaggauaaauuccuguugg

SEQ ID NO: 2550749 - RNA, 19 nt, Artificial Sequence
  Description of Artificial Sequence: Synthetic oligonucleotide
aaugucuugaugucucccc

SEQ ID NO: 2550750 - RNA, 19 nt, Artificial Sequence
  Description of Artificial Sequence: Synthetic oligonucleotide
ugaguuaaugucuugaugu

SEQ ID NO: 2550751 - RNA, 19 nt, Artificial Sequence
  Description of Artificial Sequence: Synthetic oligonucleotide
uauuugguguagcauacgg

SEQ ID NO: 2550752 - RNA, 19 nt, Artificial Sequence
  Description of Artificial Sequence: Synthetic oligonucleotide
uuugguguagcauacggcc

SEQ ID NO: 2550753 - RNA, 19 nt, Artificial Sequence
  Description of Artificial Sequence: Synthetic oligonucleotide
cuggcauggaauaugaucc

SEQ ID NO: 2550754 - RNA, 19 nt, Artificial Sequence
  Description of Artificial Sequence: Synthetic oligonucleotide
agcuucaugaguuaauguc

SEQ ID NO: 2550755 - RNA, 19 nt, Artificial Sequence
  Description of Artificial Sequence: Synthetic oligonucleotide
acuucauucacuucacggg

SEQ ID NO: 2550756 - RNA, 19 nt, Artificial Sequence
  Description of Artificial Sequence: Synthetic oligonucleotide
gacuucauucacuucacgg

SEQ ID NO: 2550757 - RNA, 19 nt, Artificial Sequence
  Description of Artificial Sequence: Synthetic oligonucleotide
accgauauggcacauuagg

SEQ ID NO: 2550758 - RNA, 19 nt, Artificial Sequence
  Description of Artificial Sequence: Synthetic oligonucleotide
caccauauugccuagguag

SEQ ID NO: 2550759 - RNA, 19 nt, Artificial Sequence
  Description of Artificial Sequence: Synthetic oligonucleotide
aacagugggauguggcccc

SEQ ID NO: 2550760 - RNA, 19 nt, Artificial Sequence
  Description of Artificial Sequence: Synthetic oligonucleotide
ugggacuucauucacuuca

SEQ ID NO: 2550761 - RNA, 19 nt, Artificial Sequence
  Description of Artificial Sequence: Synthetic oligonucleotide
aaggaagaaaggguggugg

SEQ ID NO: 2550762 - RNA, 19 nt, Artificial Sequence
  Description of Artificial Sequence: Synthetic oligonucleotide
ugguccaaaaggcaaagug

SEQ ID NO: 2550763 - RNA, 19 nt, Artificial Sequence
  Description of Artificial Sequence: Synthetic oligonucleotide
caguucagaaggaagaaag

SEQ ID NO: 2550764 - RNA, 19 nt, Artificial Sequence
  Description of Artificial Sequence: Synthetic oligonucleotide
uuggugggguaccagaagg

SEQ ID NO: 2550765 - RNA, 19 nt, Artificial Sequence
  Description of Artificial Sequence: Synthetic oligonucleotide
ugacaguucagaaggaaga

SEQ ID NO: 2550766 - RNA, 19 nt, Artificial Sequence
  Description of Artificial Sequence: Synthetic oligonucleotide
ugcuguuuccccaaggucu

SEQ ID NO: 2550767 - RNA, 19 nt, Artificial Sequence
  Description of Artificial Sequence: Synthetic oligonucleotide
ggaauaugauccuucaggg

SEQ ID NO: 2550768 - RNA, 19 nt, Artificial Sequence
  Description of Artificial Sequence: Synthetic oligonucleotide
gaaggauaaauuccuguug

SEQ ID NO: 2550769 - RNA, 19 nt, Artificial Sequence
  Description of Artificial Sequence: Synthetic oligonucleotide
uaccagaagguccugaugu

SEQ ID NO: 2550770 - RNA, 19 nt, Artificial Sequence
  Description of Artificial Sequence: Synthetic oligonucleotide
uagcauacggcccuauggg

SEQ ID NO: 2550771 - RNA, 19 nt, Artificial Sequence
  Description of Artificial Sequence: Synthetic oligonucleotide
ugugggugcaccauauugc

SEQ ID NO: 2550772 - RNA, 19 nt, Artificial Sequence
  Description of Artificial Sequence: Synthetic oligonucleotide
ucuaccuucaguugcuuca

SEQ ID NO: 2550773 - RNA, 19 nt, Artificial Sequence
  Description of Artificial Sequence: Synthetic oligonucleotide
uguuacuugguaaggauua

SEQ ID NO: 2550774 - RNA, 19 nt, Artificial Sequence
  Description of Artificial Sequence: Synthetic oligonucleotide
guagcauacggcccuaugg

SEQ ID NO: 2550775 - RNA, 19 nt, Artificial Sequence
  Description of Artificial Sequence: Synthetic oligonucleotide
uaccgucuccucuugaugg

SEQ ID NO: 2550776 - RNA, 19 nt, Artificial Sequence
  Description of Artificial Sequence: Synthetic oligonucleotide
uguaccugaaguagcagcu

SEQ ID NO: 2550777 - RNA, 19 nt, Artificial Sequence
  Description of Artificial Sequence: Synthetic oligonucleotide
gguuggauguaucaggacg

SEQ ID NO: 2550778 - RNA, 19 nt, Artificial Sequence
  Description of Artificial Sequence: Synthetic oligonucleotide
cuucauucacuucacgggg

SEQ ID NO: 2550779 - RNA, 19 nt, Artificial Sequence
  Description of Artificial Sequence: Synthetic oligonucleotide
ucaguugcuucauuugucc

SEQ ID NO: 2550780 - RNA, 19 nt, Artificial Sequence
  Description of Artificial Sequence: Synthetic oligonucleotide
auuguguccuugcuguuuc

SEQ ID NO: 2550781 - RNA, 19 nt, Artificial Sequence
  Description of Artificial Sequence: Synthetic oligonucleotide
aguugcuucauuuguccag

SEQ ID NO: 2550782 - RNA, 19 nt, Artificial Sequence
  Description of Artificial Sequence: Synthetic oligonucleotide
gauguaucaggacgggacc

SEQ ID NO: 2550783 - RNA, 19 nt, Artificial Sequence
  Description of Artificial Sequence: Synthetic oligonucleotide
aaggucucagcuucaugag

SEQ ID NO: 2550784 - RNA, 19 nt, Artificial Sequence
  Description of Artificial Sequence: Synthetic oligonucleotide
gucaucuaccuucaguugc

SEQ ID NO: 2550785 - RNA, 19 nt, Artificial Sequence
  Description of Artificial Sequence: Synthetic oligonucleotide
guuggauguaucaggacgg

SEQ ID NO: 2550786 - RNA, 19 nt, Artificial Sequence
  Description of Artificial Sequence: Synthetic oligonucleotide
ugcuucauuuguccagugg

SEQ ID NO: 2550787 - RNA, 19 nt, Artificial Sequence
  Description of Artificial Sequence: Synthetic oligonucleotide
auuauucagaguaggauga

SEQ ID NO: 2550788 - RNA, 19 nt, Artificial Sequence
  Description of Artificial Sequence: Synthetic oligonucleotide
uauucagaguaggaugagg

SEQ ID NO: 2550789 - RNA, 19 nt, Artificial Sequence
  Description of Artificial Sequence: Synthetic oligonucleotide
cuggugaugguccagucag

SEQ ID NO: 2550790 - RNA, 19 nt, Artificial Sequence
  Description of Artificial Sequence: Synthetic oligonucleotide
augaguuaaugucuugaug

SEQ ID NO: 2550791 - RNA, 19 nt, Artificial Sequence
  Description of Artificial Sequence: Synthetic oligonucleotide
aagguccugauguuacuug

SEQ ID NO: 2550792 - RNA, 19 nt, Artificial Sequence
  Description of Artificial Sequence: Synthetic oligonucleotide
uuguccaguggucucuggg

SEQ ID NO: 2550793 - RNA, 19 nt, Artificial Sequence
  Description of Artificial Sequence: Synthetic oligonucleotide
auuugguguagcauacggc

SEQ ID NO: 2550794 - RNA, 19 nt, Artificial Sequence
  Description of Artificial Sequence: Synthetic oligonucleotide
uggaaggauaaauuccugu

SEQ ID NO: 2550795 - RNA, 19 nt, Artificial Sequence
  Description of Artificial Sequence: Synthetic oligonucleotide
ucaugaguuaaugucuuga

SEQ ID NO: 2550796 - RNA, 19 nt, Artificial Sequence
  Description of Artificial Sequence: Synthetic oligonucleotide
auaaggaccacugggguug

SEQ ID NO: 2550797 - RNA, 19 nt, Artificial Sequence
  Description of Artificial Sequence: Synthetic oligonucleotide
ugauccuucagggucagga

SEQ ID NO: 2550798 - RNA, 19 nt, Artificial Sequence
  Description of Artificial Sequence: Synthetic oligonucleotide
ucagcuucaugaguuaaug

SEQ ID NO: 2550799 - RNA, 19 nt, Artificial Sequence
  Description of Artificial Sequence: Synthetic oligonucleotide
caaggucucagcuucauga

SEQ ID NO: 2550800 - RNA, 19 nt, Artificial Sequence
  Description of Artificial Sequence: Synthetic oligonucleotide
cagaaggaagaaagggugg

SEQ ID NO: 2550801 - RNA, 19 nt, Artificial Sequence
  Description of Artificial Sequence: Synthetic oligonucleotide
uuuugguaccgucuccucu

SEQ ID NO: 2550802 - RNA, 19 nt, Artificial Sequence
  Description of Artificial Sequence: Synthetic oligonucleotide
aggaagaaagggugguggg

SEQ ID NO: 2550803 - RNA, 19 nt, Artificial Sequence
  Description of Artificial Sequence: Synthetic oligonucleotide
uaccugaaguagcagcugc

SEQ ID NO: 2550804 - RNA, 19 nt, Artificial Sequence
  Description of Artificial Sequence: Synthetic oligonucleotide
agguccugauguuacuugg

SEQ ID NO: 2550805 - RNA, 19 nt, Artificial Sequence
  Description of Artificial Sequence: Synthetic oligonucleotide
uuaaugucuugaugucucc

SEQ ID NO: 2550806 - RNA, 19 nt, Artificial Sequence
  Description of Artificial Sequence: Synthetic oligonucleotide
cagucagagggauggaagg

SEQ ID NO: 2550807 - RNA, 19 nt, Artificial Sequence
  Description of Artificial Sequence: Synthetic oligonucleotide
uaggaugagguccuggcau

SEQ ID NO: 2550808 - RNA, 19 nt, Artificial Sequence
  Description of Artificial Sequence: Synthetic oligonucleotide
gauggguuugucaucuacc

SEQ ID NO: 2550809 - RNA, 19 nt, Artificial Sequence
  Description of Artificial Sequence: Synthetic oligonucleotide
accauauugccuagguagc

SEQ ID NO: 2550810 - RNA, 19 nt, Artificial Sequence
  Description of Artificial Sequence: Synthetic oligonucleotide
auggguuugucaucuaccu

SEQ ID NO: 2550811 - RNA, 19 nt, Artificial Sequence
  Description of Artificial Sequence: Synthetic oligonucleotide
ucaucuaccuucaguugcu

SEQ ID NO: 2550812 - RNA, 19 nt, Artificial Sequence
  Description of Artificial Sequence: Synthetic oligonucleotide
auauugccuagguagcucu

SEQ ID NO: 2550813 - RNA, 19 nt, Artificial Sequence
  Description of Artificial Sequence: Synthetic oligonucleotide
ugauggguuugucaucuac

SEQ ID NO: 2550814 - RNA, 19 nt, Artificial Sequence
  Description of Artificial Sequence: Synthetic oligonucleotide
aguucagaaggaagaaagg

SEQ ID NO: 2550815 - RNA, 19 nt, Artificial Sequence
  Description of Artificial Sequence: Synthetic oligonucleotide
uucaguugcuucauuuguc

SEQ ID NO: 2550816 - RNA, 19 nt, Artificial Sequence
  Description of Artificial Sequence: Synthetic oligonucleotide
ugauguuacuugguaagga

SEQ ID NO: 2550817 - RNA, 19 nt, Artificial Sequence
  Description of Artificial Sequence: Synthetic oligonucleotide
uggaaggugcauauuuggu

SEQ ID NO: 2550818 - RNA, 19 nt, Artificial Sequence
  Description of Artificial Sequence: Synthetic oligonucleotide
uacgacaggggcuggauaa

SEQ ID NO: 2550819 - RNA, 19 nt, Artificial Sequence
  Description of Artificial Sequence: Synthetic oligonucleotide
uucauuuguccaguggucu

SEQ ID NO: 2550820 - RNA, 19 nt, Artificial Sequence
  Description of Artificial Sequence: Synthetic oligonucleotide
auucagaguaggaugaggu

SEQ ID NO: 2550821 - RNA, 19 nt, Artificial Sequence
  Description of Artificial Sequence: Synthetic oligonucleotide
auguaucaggacgggaccc

SEQ ID NO: 2550822 - RNA, 19 nt, Artificial Sequence
  Description of Artificial Sequence: Synthetic oligonucleotide
gaaggugcauauuuggugu

SEQ ID NO: 2550823 - RNA, 19 nt, Artificial Sequence
  Description of Artificial Sequence: Synthetic oligonucleotide
uugguguagcauacggccc

SEQ ID NO: 2550824 - RNA, 19 nt, Artificial Sequence
  Description of Artificial Sequence: Synthetic oligonucleotide
guguaccugaaguagcagc

SEQ ID NO: 2550825 - RNA, 19 nt, Artificial Sequence
  Description of Artificial Sequence: Synthetic oligonucleotide
ugggauguggccccgggga

SEQ ID NO: 2550826 - RNA, 19 nt, Artificial Sequence
  Description of Artificial Sequence: Synthetic oligonucleotide
uuuccccaaggucucagcu

SEQ ID NO: 2550827 - RNA, 19 nt, Artificial Sequence
  Description of Artificial Sequence: Synthetic oligonucleotide
ugucaucuaccuucaguug

SEQ ID NO: 2550828 - RNA, 19 nt, Artificial Sequence
  Description of Artificial Sequence: Synthetic oligonucleotide
ugggguaccagaagguccu

SEQ ID NO: 2550829 - RNA, 19 nt, Artificial Sequence
  Description of Artificial Sequence: Synthetic oligonucleotide
guuaaugucuugaugucuc

SEQ ID NO: 2550830 - RNA, 19 nt, Artificial Sequence
  Description of Artificial Sequence: Synthetic oligonucleotide
ggaaggugcauauuuggug

SEQ ID NO: 2550831 - RNA, 19 nt, Artificial Sequence
  Description of Artificial Sequence: Synthetic oligonucleotide
uccuucagggucaggauau

SEQ ID NO: 2550832 - RNA, 19 nt, Artificial Sequence
  Description of Artificial Sequence: Synthetic oligonucleotide
auggaauaugauccuucag

SEQ ID NO: 2550833 - RNA, 19 nt, Artificial Sequence
  Description of Artificial Sequence: Synthetic oligonucleotide
gucaccagguauugguggg

SEQ ID NO: 2550834 - RNA, 19 nt, Artificial Sequence
  Description of Artificial Sequence: Synthetic oligonucleotide
ugggguuggggacaugaca

SEQ ID NO: 2550835 - RNA, 19 nt, Artificial Sequence
  Description of Artificial Sequence: Synthetic oligonucleotide
aggaacagugggauguggc

SEQ ID NO: 2550836 - RNA, 19 nt, Artificial Sequence
  Description of Artificial Sequence: Synthetic oligonucleotide
gaguuaaugucuugauguc

SEQ ID NO: 2550837 - RNA, 19 nt, Artificial Sequence
  Description of Artificial Sequence: Synthetic oligonucleotide
ugucuccccaaguuaccgg

SEQ ID NO: 2550838 - RNA, 19 nt, Artificial Sequence
  Description of Artificial Sequence: Synthetic oligonucleotide
ugguguagcauacggcccu

SEQ ID NO: 2550839 - RNA, 19 nt, Artificial Sequence
  Description of Artificial Sequence: Synthetic oligonucleotide
uugaugucuccccaaguua

SEQ ID NO: 2550840 - RNA, 19 nt, Artificial Sequence
  Description of Artificial Sequence: Synthetic oligonucleotide
auuggugggguaccagaag

SEQ ID NO: 2550841 - RNA, 19 nt, Artificial Sequence
  Description of Artificial Sequence: Synthetic oligonucleotide
cugugggugcaccauauug

SEQ ID NO: 2550842 - RNA, 19 nt, Artificial Sequence
  Description of Artificial Sequence: Synthetic oligonucleotide
gaaagggugguggggaacc

SEQ ID NO: 2550843 - RNA, 19 nt, Artificial Sequence
  Description of Artificial Sequence: Synthetic oligonucleotide
aguuaaugucuugaugucu

SEQ ID NO: 2550844 - RNA, 19 nt, Artificial Sequence
  Description of Artificial Sequence: Synthetic oligonucleotide
cagaagguccugauguuac

SEQ ID NO: 2550845 - RNA, 19 nt, Artificial Sequence
  Description of Artificial Sequence: Synthetic oligonucleotide
ggguuugucaucuaccuuc

SEQ ID NO: 2550846 - RNA, 19 nt, Artificial Sequence
  Description of Artificial Sequence: Synthetic oligonucleotide
gauggaaggauaaauuccu

SEQ ID NO: 2550847 - RNA, 19 nt, Artificial Sequence
  Description of Artificial Sequence: Synthetic oligonucleotide
cauacggcccuaugggacc

SEQ ID NO: 2550848 - RNA, 19 nt, Artificial Sequence
  Description of Artificial Sequence: Synthetic oligonucleotide
ggauggaaggauaaauucc

SEQ ID NO: 2550849 - RNA, 19 nt, Artificial Sequence
  Description of Artificial Sequence: Synthetic oligonucleotide
uaaugucuugaugucuccc

SEQ ID NO: 2550850 - RNA, 19 nt, Artificial Sequence
  Description of Artificial Sequence: Synthetic oligonucleotide
uggggugcucuccugguug

SEQ ID NO: 2550851 - RNA, 19 nt, Artificial Sequence
  Description of Artificial Sequence: Synthetic oligonucleotide
ccugauguuacuugguaag

SEQ ID NO: 2550852 - RNA, 19 nt, Artificial Sequence
  Description of Artificial Sequence: Synthetic oligonucleotide
aggaggaacagugggaugu

SEQ ID NO: 2550853 - RNA, 19 nt, Artificial Sequence
  Description of Artificial Sequence: Synthetic oligonucleotide
gaagaaaggguggugggga

SEQ ID NO: 2550854 - RNA, 19 nt, Artificial Sequence
  Description of Artificial Sequence: Synthetic oligonucleotide
uuugguaccgucuccucuu

SEQ ID NO: 2550855 - RNA, 19 nt, Artificial Sequence
  Description of Artificial Sequence: Synthetic oligonucleotide
cugauguuacuugguaagg

SEQ ID NO: 2550856 - RNA, 19 nt, Artificial Sequence
  Description of Artificial Sequence: Synthetic oligonucleotide
cuucauuuguccagugguc

SEQ ID NO: 2550857 - RNA, 19 nt, Artificial Sequence
  Description of Artificial Sequence: Synthetic oligonucleotide
uccugauguuacuugguaa

SEQ ID NO: 2550858 - RNA, 19 nt, Artificial Sequence
  Description of Artificial Sequence: Synthetic oligonucleotide
ggacaugacaguucagaag

SEQ ID NO: 2550859 - RNA, 19 nt, Artificial Sequence
  Description of Artificial Sequence: Synthetic oligonucleotide
uucaugaguuaaugucuug

SEQ ID NO: 2550860 - RNA, 19 nt, Artificial Sequence
  Description of Artificial Sequence: Synthetic oligonucleotide
aucuaccuucaguugcuuc

SEQ ID NO: 2550861 - RNA, 19 nt, Artificial Sequence
  Description of Artificial Sequence: Synthetic oligonucleotide
aaguuaccggcuuacucuu

SEQ ID NO: 2550862 - RNA, 19 nt, Artificial Sequence
  Description of Artificial Sequence: Synthetic oligonucleotide
ucuugaugucuccccaagu

SEQ ID NO: 2550863 - RNA, 19 nt, Artificial Sequence
  Description of Artificial Sequence: Synthetic oligonucleotide
auccccguguaccugaagu

SEQ ID NO: 2550864 - RNA, 19 nt, Artificial Sequence
  Description of Artificial Sequence: Synthetic oligonucleotide
uuauucagaguaggaugag

SEQ ID NO: 2550865 - RNA, 19 nt, Artificial Sequence
  Description of Artificial Sequence: Synthetic oligonucleotide
uucagaguaggaugagguc

SEQ ID NO: 2550866 - RNA, 19 nt, Artificial Sequence
  Description of Artificial Sequence: Synthetic oligonucleotide
guggggaaccuggugaugg

SEQ ID NO: 2550867 - RNA, 19 nt, Artificial Sequence
  Description of Artificial Sequence: Synthetic oligonucleotide
ggucaccagguauuggugg

SEQ ID NO: 2550868 - RNA, 19 nt, Artificial Sequence
  Description of Artificial Sequence: Synthetic oligonucleotide
ccugguuggauguaucagg

SEQ ID NO: 2550869 - RNA, 19 nt, Artificial Sequence
  Description of Artificial Sequence: Synthetic oligonucleotide
uuggauguaucaggacggg

SEQ ID NO: 2550870 - RNA, 19 nt, Artificial Sequence
  Description of Artificial Sequence: Synthetic oligonucleotide
cauggaauaugauccuuca

SEQ ID NO: 2550871 - RNA, 19 nt, Artificial Sequence
  Description of Artificial Sequence: Synthetic oligonucleotide
agaaggaagaaaggguggu

SEQ ID NO: 2550872 - RNA, 19 nt, Artificial Sequence
  Description of Artificial Sequence: Synthetic oligonucleotide
auauuugguguagcauacg

SEQ ID NO: 2550873 - RNA, 19 nt, Artificial Sequence
  Description of Artificial Sequence: Synthetic oligonucleotide
uccugguuggauguaucag

SEQ ID NO: 2550874 - RNA, 19 nt, Artificial Sequence
  Description of Artificial Sequence: Synthetic oligonucleotide
accagggccucuuacgaca

SEQ ID NO: 2550875 - RNA, 19 nt, Artificial Sequence
  Description of Artificial Sequence: Synthetic oligonucleotide
uguaucaggacgggacccc

SEQ ID NO: 2550876 - RNA, 19 nt, Artificial Sequence
  Description of Artificial Sequence: Synthetic oligonucleotide
gucuugaugucuccccaag

SEQ ID NO: 2550877 - RNA, 19 nt, Artificial Sequence
  Description of Artificial Sequence: Synthetic oligonucleotide
caaguuaccggcuuacucu

SEQ ID NO: 2550878 - RNA, 19 nt, Artificial Sequence
  Description of Artificial Sequence: Synthetic oligonucleotide
ucauuuguccaguggucuc

SEQ ID NO: 2550879 - RNA, 19 nt, Artificial Sequence
  Description of Artificial Sequence: Synthetic oligonucleotide
gaaggaagaaaggguggug

SEQ ID NO: 2550880 - RNA, 19 nt, Artificial Sequence
  Description of Artificial Sequence: Synthetic oligonucleotide
ucagagggauggaaggaua

SEQ ID NO: 2550881 - RNA, 19 nt, Artificial Sequence
  Description of Artificial Sequence: Synthetic oligonucleotide
ugagguccuggcauggaau

SEQ ID NO: 2550882 - RNA, 19 nt, Artificial Sequence
  Description of Artificial Sequence: Synthetic oligonucleotide
agggccucuuacgacaggg

SEQ ID NO: 2550883 - RNA, 19 nt, Artificial Sequence
  Description of Artificial Sequence: Synthetic oligonucleotide
augucuccccaaguuaccg

SEQ ID NO: 2550884 - RNA, 19 nt, Artificial Sequence
  Description of Artificial Sequence: Synthetic oligonucleotide
gucuccccaaguuaccggc

SEQ ID NO: 2550885 - RNA, 19 nt, Artificial Sequence
  Description of Artificial Sequence: Synthetic oligonucleotide
augucuugaugucucccca

SEQ ID NO: 2550886 - RNA, 19 nt, Artificial Sequence
  Description of Artificial Sequence: Synthetic oligonucleotide
guauuggugggguaccaga

SEQ ID NO: 2550887 - RNA, 19 nt, Artificial Sequence
  Description of Artificial Sequence: Synthetic oligonucleotide
uauugccuagguagcucug

SEQ ID NO: 2550888 - RNA, 19 nt, Artificial Sequence
  Description of Artificial Sequence: Synthetic oligonucleotide
agaaagggugguggggaac

SEQ ID NO: 2550889 - RNA, 19 nt, Artificial Sequence
  Description of Artificial Sequence: Synthetic oligonucleotide
ucuugauggguuugucauc

SEQ ID NO: 2550890 - RNA, 19 nt, Artificial Sequence
  Description of Artificial Sequence: Synthetic oligonucleotide
agugggauguggccccggg

SEQ ID NO: 2550891 - RNA, 19 nt, Artificial Sequence
  Description of Artificial Sequence: Synthetic oligonucleotide
ugcugguccaaaaggcaaa

SEQ ID NO: 2550892 - RNA, 19 nt, Artificial Sequence
  Description of Artificial Sequence: Synthetic oligonucleotide
cugcagcuggaucuguggg

SEQ ID NO: 2550893 - RNA, 19 nt, Artificial Sequence
  Description of Artificial Sequence: Synthetic oligonucleotide
gauguggccccggggaccg

SEQ ID NO: 2550894 - RNA, 19 nt, Artificial Sequence
  Description of Artificial Sequence: Synthetic oligonucleotide
accgucuccucuugauggg

SEQ ID NO: 2550895 - RNA, 19 nt, Artificial Sequence
  Description of Artificial Sequence: Synthetic oligonucleotide
cugguuggauguaucagga

SEQ ID NO: 2550896 - RNA, 19 nt, Artificial Sequence
  Description of Artificial Sequence: Synthetic oligonucleotide
ggauguaucaggacgggac

SEQ ID NO: 2550897 - RNA, 19 nt, Artificial Sequence
  Description of Artificial Sequence: Synthetic oligonucleotide
ucaccagguauuggugggg

SEQ ID NO: 2550898 - RNA, 19 nt, Artificial Sequence
  Description of Artificial Sequence: Synthetic oligonucleotide
accuucaguugcuucauuu

SEQ ID NO: 2550899 - RNA, 19 nt, Artificial Sequence
  Description of Artificial Sequence: Synthetic oligonucleotide
ccuggcauggaauaugauc

SEQ ID NO: 2550900 - RNA, 19 nt, Artificial Sequence
  Description of Artificial Sequence: Synthetic oligonucleotide
gaauaugauccuucagggu

SEQ ID NO: 2550901 - RNA, 19 nt, Artificial Sequence
  Description of Artificial Sequence: Synthetic oligonucleotide
gugguggggaaccugguga

SEQ ID NO: 2550902 - RNA, 19 nt, Artificial Sequence
  Description of Artificial Sequence: Synthetic oligonucleotide
agcauacggcccuauggga

SEQ ID NO: 2550903 - RNA, 19 nt, Artificial Sequence
  Description of Artificial Sequence: Synthetic oligonucleotide
uguuuccccaaggucucag

SEQ ID NO: 2550904 - RNA, 19 nt, Artificial Sequence
  Description of Artificial Sequence: Synthetic oligonucleotide
uggugggguaccagaaggu

SEQ ID NO: 2550905 - RNA, 19 nt, Artificial Sequence
  Description of Artificial Sequence: Synthetic oligonucleotide
gaugucuccccaaguuacc

SEQ ID NO: 2550906 - RNA, 19 nt, Artificial Sequence
  Description of Artificial Sequence: Synthetic oligonucleotide
gggguuggggacaugacag

SEQ ID NO: 2550907 - RNA, 19 nt, Artificial Sequence
  Description of Artificial Sequence: Synthetic oligonucleotide
ggaagaaaggguggugggg

SEQ ID NO: 2550908 - RNA, 19 nt, Artificial Sequence
  Description of Artificial Sequence: Synthetic oligonucleotide
uggauccccguguaccuga

SEQ ID NO: 2550909 - RNA, 19 nt, Artificial Sequence
  Description of Artificial Sequence: Synthetic oligonucleotide
guaccagaagguccugaug

SEQ ID NO: 2550910 - RNA, 19 nt, Artificial Sequence
  Description of Artificial Sequence: Synthetic oligonucleotide
uggcauggaauaugauccu

SEQ ID NO: 2550911 - RNA, 19 nt, Artificial Sequence
  Description of Artificial Sequence: Synthetic oligonucleotide
uccaguggucucuggggug

SEQ ID NO: 2550912 - RNA, 19 nt, Artificial Sequence
  Description of Artificial Sequence: Synthetic oligonucleotide
aaggugcauauuuggugua

SEQ ID NO: 2550913 - RNA, 19 nt, Artificial Sequence
  Description of Artificial Sequence: Synthetic oligonucleotide
ugucuugaugucuccccaa

SEQ ID NO: 2550914 - RNA, 19 nt, Artificial Sequence
  Description of Artificial Sequence: Synthetic oligonucleotide
guaccgucuccucuugaug

SEQ ID NO: 2550915 - RNA, 19 nt, Artificial Sequence
  Description of Artificial Sequence: Synthetic oligonucleotide
cucuggggugcucuccugg

SEQ ID NO: 2550916 - RNA, 19 nt, Artificial Sequence
  Description of Artificial Sequence: Synthetic oligonucleotide
aggucucagcuucaugagu

SEQ ID NO: 2550917 - RNA, 19 nt, Artificial Sequence
  Description of Artificial Sequence: Synthetic oligonucleotide
cauauugccuagguagcuc

SEQ ID NO: 2550918 - RNA, 19 nt, Artificial Sequence
  Description of Artificial Sequence: Synthetic oligonucleotide
acugggguuggggacauga

SEQ ID NO: 2550919 - RNA, 19 nt, Artificial Sequence
  Description of Artificial Sequence: Synthetic oligonucleotide
gugggguaccagaaggucc

SEQ ID NO: 2550920 - RNA, 19 nt, Artificial Sequence
  Description of Artificial Sequence: Synthetic oligonucleotide
aaccuggugaugguccagu

SEQ ID NO: 2550921 - RNA, 19 nt, Artificial Sequence
  Description of Artificial Sequence: Synthetic oligonucleotide
uauuguguccuugcuguuu

SEQ ID NO: 2550922 - RNA, 19 nt, Artificial Sequence
  Description of Artificial Sequence: Synthetic oligonucleotide
gggaccagggccucuuacg

SEQ ID NO: 2550923 - RNA, 19 nt, Artificial Sequence
  Description of Artificial Sequence: Synthetic oligonucleotide
ucuccugguuggauguauc

SEQ ID NO: 2550924 - RNA, 19 nt, Artificial Sequence
  Description of Artificial Sequence: Synthetic oligonucleotide
uugguaccgucuccucuug

SEQ ID NO: 2550925 - RNA, 19 nt, Artificial Sequence
  Description of Artificial Sequence: Synthetic oligonucleotide
gacaguucagaaggaagaa

SEQ ID NO: 2550926 - RNA, 19 nt, Artificial Sequence
  Description of Artificial Sequence: Synthetic oligonucleotide
ugguuggauguaucaggac

SEQ ID NO: 2550927 - RNA, 19 nt, Artificial Sequence
  Description of Artificial Sequence: Synthetic oligonucleotide
agggugguggggaaccugg

SEQ ID NO: 2550928 - RNA, 19 nt, Artificial Sequence
  Description of Artificial Sequence: Synthetic oligonucleotide
accuggugaugguccaguc

SEQ ID NO: 2550929 - RNA, 19 nt, Artificial Sequence
  Description of Artificial Sequence: Synthetic oligonucleotide
aggugcauauuugguguag

SEQ ID NO: 2550930 - RNA, 19 nt, Artificial Sequence
  Description of Artificial Sequence: Synthetic oligonucleotide
guaggaugagguccuggca

SEQ ID NO: 2550931 - RNA, 19 nt, Artificial Sequence
  Description of Artificial Sequence: Synthetic oligonucleotide
ccagucagagggauggaag

SEQ ID NO: 2550932 - RNA, 19 nt, Artificial Sequence
  Description of Artificial Sequence: Synthetic oligonucleotide
acaguucagaaggaagaaa

SEQ ID NO: 2550933 - RNA, 19 nt, Artificial Sequence
  Description of Artificial Sequence: Synthetic oligonucleotide
ucuccucuugauggguuug

SEQ ID NO: 2550934 - RNA, 19 nt, Artificial Sequence
  Description of Artificial Sequence: Synthetic oligonucleotide
ucucagcuucaugaguuaa

SEQ ID NO: 2550935 - RNA, 19 nt, Artificial Sequence
  Description of Artificial Sequence: Synthetic oligonucleotide
uuacgacaggggcuggaua

SEQ ID NO: 2550936 - RNA, 19 nt, Artificial Sequence
  Description of Artificial Sequence: Synthetic oligonucleotide
uccuugcuguuuccccaag

SEQ ID NO: 2550937 - RNA, 19 nt, Artificial Sequence
  Description of Artificial Sequence: Synthetic oligonucleotide
gaccgauauggcacauuag

SEQ ID NO: 2550938 - RNA, 19 nt, Artificial Sequence
  Description of Artificial Sequence: Synthetic oligonucleotide
augagguccuggcauggaa

SEQ ID NO: 2550939 - RNA, 19 nt, Artificial Sequence
  Description of Artificial Sequence: Synthetic oligonucleotide
uggauguaucaggacggga

SEQ ID NO: 2550940 - RNA, 19 nt, Artificial Sequence
  Description of Artificial Sequence: Synthetic oligonucleotide
uugcuucauuuguccagug

SEQ ID NO: 2550941 - RNA, 19 nt, Artificial Sequence
  Description of Artificial Sequence: Synthetic oligonucleotide
cucuugauggguuugucau

SEQ ID NO: 2550942 - RNA, 19 nt, Artificial Sequence
  Description of Artificial Sequence: Synthetic oligonucleotide
ugggaccagggccucuuac

SEQ ID NO: 2550943 - RNA, 19 nt, Artificial Sequence
  Description of Artificial Sequence: Synthetic oligonucleotide
guuuccccaaggucucagc

SEQ ID NO: 2550944 - RNA, 19 nt, Artificial Sequence
  Description of Artificial Sequence: Synthetic oligonucleotide
ucuccccaaguuaccggcu

SEQ ID NO: 2550945 - RNA, 19 nt, Artificial Sequence
  Description of Artificial Sequence: Synthetic oligonucleotide
uccagucagagggauggaa

SEQ ID NO: 2550946 - RNA, 19 nt, Artificial Sequence
  Description of Artificial Sequence: Synthetic oligonucleotide
agggauggaaggauaaauu

SEQ ID NO: 2550947 - RNA, 19 nt, Artificial Sequence
  Description of Artificial Sequence: Synthetic oligonucleotide
ggccucuuacgacaggggc

SEQ ID NO: 2550948 - RNA, 19 nt, Artificial Sequence
  Description of Artificial Sequence: Synthetic oligonucleotide
uggguuugucaucuaccuu

SEQ ID NO: 2550949 - RNA, 19 nt, Artificial Sequence
  Description of Artificial Sequence: Synthetic oligonucleotide
auggaaggauaaauuccug

SEQ ID NO: 2550950 - RNA, 19 nt, Artificial Sequence
  Description of Artificial Sequence: Synthetic oligonucleotide
ggacuucauucacuucacg

SEQ ID NO: 2550951 - RNA, 19 nt, Artificial Sequence
  Description of Artificial Sequence: Synthetic oligonucleotide
accggcuuacucuucuuuu

SEQ ID NO: 2550952 - RNA, 19 nt, Artificial Sequence
  Description of Artificial Sequence: Synthetic oligonucleotide
cuucaguugcuucauuugu

SEQ ID NO: 2550953 - RNA, 19 nt, Artificial Sequence
  Description of Artificial Sequence: Synthetic oligonucleotide
cuugauggguuugucaucu

SEQ ID NO: 2550954 - RNA, 19 nt, Artificial Sequence
  Description of Artificial Sequence: Synthetic oligonucleotide
gcuucauuuguccaguggu

SEQ ID NO: 2550955 - RNA, 19 nt, Artificial Sequence
  Description of Artificial Sequence: Synthetic oligonucleotide
guuugucaucuaccuucag

SEQ ID NO: 2550956 - RNA, 19 nt, Artificial Sequence
  Description of Artificial Sequence: Synthetic oligonucleotide
cagguauuggugggguacc

SEQ ID NO: 2550957 - RNA, 19 nt, Artificial Sequence
  Description of Artificial Sequence: Synthetic oligonucleotide
uuguguccuugcuguuucc

SEQ ID NO: 2550958 - RNA, 19 nt, Artificial Sequence
  Description of Artificial Sequence: Synthetic oligonucleotide
auguuacuugguaaggauu

SEQ ID NO: 2550959 - RNA, 19 nt, Artificial Sequence
  Description of Artificial Sequence: Synthetic oligonucleotide
gcccuaugggaccagggcc

SEQ ID NO: 2550960 - RNA, 19 nt, Artificial Sequence
  Description of Artificial Sequence: Synthetic oligonucleotide
uaccggcuuacucuucuuu

SEQ ID NO: 2550961 - RNA, 19 nt, Artificial Sequence
  Description of Artificial Sequence: Synthetic oligonucleotide
uaaggaccacugggguugg

SEQ ID NO: 2550962 - RNA, 19 nt, Artificial Sequence
  Description of Artificial Sequence: Synthetic oligonucleotide
ucuuacgacaggggcugga

SEQ ID NO: 2550963 - RNA, 19 nt, Artificial Sequence
  Description of Artificial Sequence: Synthetic oligonucleotide
gauaaggaccacugggguu

SEQ ID NO: 2550964 - RNA, 19 nt, Artificial Sequence
  Description of Artificial Sequence: Synthetic oligonucleotide
gaccagggccucuuacgac

SEQ ID NO: 2550965 - RNA, 19 nt, Artificial Sequence
  Description of Artificial Sequence: Synthetic oligonucleotide
uccccguguaccugaagua

SEQ ID NO: 2550966 - RNA, 19 nt, Artificial Sequence
  Description of Artificial Sequence: Synthetic oligonucleotide
gugggauguggccccgggg

SEQ ID NO: 2550967 - RNA, 19 nt, Artificial Sequence
  Description of Artificial Sequence: Synthetic oligonucleotide
gagguccuggcauggaaua

SEQ ID NO: 2550968 - RNA, 19 nt, Artificial Sequence
  Description of Artificial Sequence: Synthetic oligonucleotide
uggggacaugacaguucag

SEQ ID NO: 2550969 - RNA, 19 nt, Artificial Sequence
  Description of Artificial Sequence: Synthetic oligonucleotide
aaagggugguggggaaccu

SEQ ID NO: 2550970 - RNA, 19 nt, Artificial Sequence
  Description of Artificial Sequence: Synthetic oligonucleotide
ccaaguuaccggcuuacuc

SEQ ID NO: 2550971 - RNA, 19 nt, Artificial Sequence
  Description of Artificial Sequence: Synthetic oligonucleotide
guaccugaaguagcagcug

SEQ ID NO: 2550972 - RNA, 19 nt, Artificial Sequence
  Description of Artificial Sequence: Synthetic oligonucleotide
cuccugguuggauguauca

SEQ ID NO: 2550973 - RNA, 19 nt, Artificial Sequence
  Description of Artificial Sequence: Synthetic oligonucleotide
ggugcauauuugguguagc

SEQ ID NO: 2550974 - RNA, 19 nt, Artificial Sequence
  Description of Artificial Sequence: Synthetic oligonucleotide
agacauggauccccgugua

SEQ ID NO: 2550975 - RNA, 19 nt, Artificial Sequence
  Description of Artificial Sequence: Synthetic oligonucleotide
guuaccggcuuacucuucu

SEQ ID NO: 2550976 - RNA, 19 nt, Artificial Sequence
  Description of Artificial Sequence: Synthetic oligonucleotide
gggaaccuggugauggucc

SEQ ID NO: 2550977 - RNA, 19 nt, Artificial Sequence
  Description of Artificial Sequence: Synthetic oligonucleotide
caugaguuaaugucuugau

SEQ ID NO: 2550978 - RNA, 19 nt, Artificial Sequence
  Description of Artificial Sequence: Synthetic oligonucleotide
ggaccgauauggcacauua

SEQ ID NO: 2550979 - RNA, 19 nt, Artificial Sequence
  Description of Artificial Sequence: Synthetic oligonucleotide
cagagggauggaaggauaa

SEQ ID NO: 2550980 - RNA, 19 nt, Artificial Sequence
  Description of Artificial Sequence: Synthetic oligonucleotide
gacaggggcuggauaagga

SEQ ID NO: 2550981 - RNA, 19 nt, Artificial Sequence
  Description of Artificial Sequence: Synthetic oligonucleotide
cuugaugucuccccaaguu

SEQ ID NO: 2550982 - RNA, 19 nt, Artificial Sequence
  Description of Artificial Sequence: Synthetic oligonucleotide
gaaccuggugaugguccag

SEQ ID NO: 2550983 - RNA, 19 nt, Artificial Sequence
  Description of Artificial Sequence: Synthetic oligonucleotide
gauccccguguaccugaag

SEQ ID NO: 2550984 - RNA, 19 nt, Artificial Sequence
  Description of Artificial Sequence: Synthetic oligonucleotide
ggaaggauaaauuccuguu

SEQ ID NO: 2550985 - RNA, 19 nt, Artificial Sequence
  Description of Artificial Sequence: Synthetic oligonucleotide
ggcccuaugggaccagggc

SEQ ID NO: 2550986 - RNA, 19 nt, Artificial Sequence
  Description of Artificial Sequence: Synthetic oligonucleotide
caugacaguucagaaggaa

SEQ ID NO: 2550987 - RNA, 19 nt, Artificial Sequence
  Description of Artificial Sequence: Synthetic oligonucleotide
gccccggggaccgauaugg

SEQ ID NO: 2550988 - RNA, 19 nt, Artificial Sequence
  Description of Artificial Sequence: Synthetic oligonucleotide
ggggacaugacaguucaga

SEQ ID NO: 2550989 - RNA, 19 nt, Artificial Sequence
  Description of Artificial Sequence: Synthetic oligonucleotide
ugguaccgucuccucuuga

SEQ ID NO: 2550990 - RNA, 19 nt, Artificial Sequence
  Description of Artificial Sequence: Synthetic oligonucleotide
accagaagguccugauguu

SEQ ID NO: 2550991 - RNA, 19 nt, Artificial Sequence
  Description of Artificial Sequence: Synthetic oligonucleotide
caguugcuucauuugucca

SEQ ID NO: 2550992 - RNA, 19 nt, Artificial Sequence
  Description of Artificial Sequence: Synthetic oligonucleotide
guccugauguuacuuggua

SEQ ID NO: 2550993 - RNA, 19 nt, Artificial Sequence
  Description of Artificial Sequence: Synthetic oligonucleotide
uggggaaccuggugauggu

SEQ ID NO: 2550994 - RNA, 19 nt, Artificial Sequence
  Description of Artificial Sequence: Synthetic oligonucleotide
ccggggaccgauauggcac

SEQ ID NO: 2550995 - RNA, 19 nt, Artificial Sequence
  Description of Artificial Sequence: Synthetic oligonucleotide
gaugguccagucagaggga

SEQ ID NO: 2550996 - RNA, 19 nt, Artificial Sequence
  Description of Artificial Sequence: Synthetic oligonucleotide
accacugggguuggggaca

SEQ ID NO: 2550997 - RNA, 19 nt, Artificial Sequence
  Description of Artificial Sequence: Synthetic oligonucleotide
cugggguuggggacaugac

SEQ ID NO: 2550998 - RNA, 19 nt, Artificial Sequence
  Description of Artificial Sequence: Synthetic oligonucleotide
gguauuggugggguaccag

SEQ ID NO: 2550999 - RNA, 19 nt, Artificial Sequence
  Description of Artificial Sequence: Synthetic oligonucleotide
gcuucaugaguuaaugucu

SEQ ID NO: 2551000 - RNA, 19 nt, Artificial Sequence
  Description of Artificial Sequence: Synthetic oligonucleotide
uccccaaguuaccggcuua

SEQ ID NO: 2551001 - RNA, 19 nt, Artificial Sequence
  Description of Artificial Sequence: Synthetic oligonucleotide
ggugguggggaaccuggug

SEQ ID NO: 2551002 - RNA, 19 nt, Artificial Sequence
  Description of Artificial Sequence: Synthetic oligonucleotide
cccguguaccugaaguagc

SEQ ID NO: 2551003 - RNA, 19 nt, Artificial Sequence
  Description of Artificial Sequence: Synthetic oligonucleotide
aguuaccggcuuacucuuc

SEQ ID NO: 2551004 - RNA, 19 nt, Artificial Sequence
  Description of Artificial Sequence: Synthetic oligonucleotide
cuucaugaguuaaugucuu

SEQ ID NO: 2551005 - RNA, 19 nt, Artificial Sequence
  Description of Artificial Sequence: Synthetic oligonucleotide
cagaguaggaugagguccu

SEQ ID NO: 2551006 - RNA, 19 nt, Artificial Sequence
  Description of Artificial Sequence: Synthetic oligonucleotide
guugcuucauuuguccagu

SEQ ID NO: 2551007 - RNA, 19 nt, Artificial Sequence
  Description of Artificial Sequence: Synthetic oligonucleotide
acgacaggggcuggauaag

SEQ ID NO: 2551008 - RNA, 19 nt, Artificial Sequence
  Description of Artificial Sequence: Synthetic oligonucleotide
ggggugcucuccugguugg

SEQ ID NO: 2551009 - RNA, 19 nt, Artificial Sequence
  Description of Artificial Sequence: Synthetic oligonucleotide
gauccuucagggucaggau

SEQ ID NO: 2551010 - RNA, 19 nt, Artificial Sequence
  Description of Artificial Sequence: Synthetic oligonucleotide
gcauggaauaugauccuuc

SEQ ID NO: 2551011 - RNA, 19 nt, Artificial Sequence
  Description of Artificial Sequence: Synthetic oligonucleotide
guccuggcauggaauauga

SEQ ID NO: 2551012 - RNA, 19 nt, Artificial Sequence
  Description of Artificial Sequence: Synthetic oligonucleotide
uccuggcauggaauaugau

SEQ ID NO: 2551013 - RNA, 19 nt, Artificial Sequence
  Description of Artificial Sequence: Synthetic oligonucleotide
gcugguccaaaaggcaaag

SEQ ID NO: 2551014 - RNA, 19 nt, Artificial Sequence
  Description of Artificial Sequence: Synthetic oligonucleotide
ccagguauuggugggguac

SEQ ID NO: 2551015 - RNA, 19 nt, Artificial Sequence
  Description of Artificial Sequence: Synthetic oligonucleotide
ggauaaggaccacuggggu

SEQ ID NO: 2551016 - RNA, 19 nt, Artificial Sequence
  Description of Artificial Sequence: Synthetic oligonucleotide
cugggacuucauucacuuc

SEQ ID NO: 2551017 - RNA, 19 nt, Artificial Sequence
  Description of Artificial Sequence: Synthetic oligonucleotide
ccucuuacgacaggggcug

SEQ ID NO: 2551018 - RNA, 19 nt, Artificial Sequence
  Description of Artificial Sequence: Synthetic oligonucleotide
gcauacggcccuaugggac

SEQ ID NO: 2551019 - RNA, 19 nt, Artificial Sequence
  Description of Artificial Sequence: Synthetic oligonucleotide
gaugagguccuggcaugga

SEQ ID NO: 2551020 - RNA, 19 nt, Artificial Sequence
  Description of Artificial Sequence: Synthetic oligonucleotide
auggauccccguguaccug

SEQ ID NO: 2551021 - RNA, 19 nt, Artificial Sequence
  Description of Artificial Sequence: Synthetic oligonucleotide
gguuugucaucuaccuuca

SEQ ID NO: 2551022 - RNA, 19 nt, Artificial Sequence
  Description of Artificial Sequence: Synthetic oligonucleotide
uuaccggcuuacucuucuu

SEQ ID NO: 2551023 - RNA, 19 nt, Artificial Sequence
  Description of Artificial Sequence: Synthetic oligonucleotide
agguauuggugggguacca

SEQ ID NO: 2551024 - RNA, 19 nt, Artificial Sequence
  Description of Artificial Sequence: Synthetic oligonucleotide
ggaaccuggugauggucca

SEQ ID NO: 2551025 - RNA, 19 nt, Artificial Sequence
  Description of Artificial Sequence: Synthetic oligonucleotide
acagugggauguggccccg

SEQ ID NO: 2551026 - RNA, 19 nt, Artificial Sequence
  Description of Artificial Sequence: Synthetic oligonucleotide
aaggaccacugggguuggg

SEQ ID NO: 2551027 - RNA, 19 nt, Artificial Sequence
  Description of Artificial Sequence: Synthetic oligonucleotide
augguccagucagagggau

SEQ ID NO: 2551028 - RNA, 19 nt, Artificial Sequence
  Description of Artificial Sequence: Synthetic oligonucleotide
ggggucaccagguauuggu

SEQ ID NO: 2551029 - RNA, 19 nt, Artificial Sequence
  Description of Artificial Sequence: Synthetic oligonucleotide
uaccuucaguugcuucauu

SEQ ID NO: 2551030 - RNA, 19 nt, Artificial Sequence
  Description of Artificial Sequence: Synthetic oligonucleotide
uugauggguuugucaucua

SEQ ID NO: 2551031 - RNA, 19 nt, Artificial Sequence
  Description of Artificial Sequence: Synthetic oligonucleotide
ggugggguaccagaagguc

SEQ ID NO: 2551032 - RNA, 19 nt, Artificial Sequence
  Description of Artificial Sequence: Synthetic oligonucleotide
gaagguccugauguuacuu

SEQ ID NO: 2551033 - RNA, 19 nt, Artificial Sequence
  Description of Artificial Sequence: Synthetic oligonucleotide
gggacuucauucacuucac

SEQ ID NO: 2551034 - RNA, 19 nt, Artificial Sequence
  Description of Artificial Sequence: Synthetic oligonucleotide
guccaguggucucuggggu

SEQ ID NO: 2551035 - RNA, 19 nt, Artificial Sequence
  Description of Artificial Sequence: Synthetic oligonucleotide
uggccccggggaccgauau

SEQ ID NO: 2551036 - RNA, 19 nt, Artificial Sequence
  Description of Artificial Sequence: Synthetic oligonucleotide
cagcuucaugaguuaaugu

SEQ ID NO: 2551037 - RNA, 19 nt, Artificial Sequence
  Description of Artificial Sequence: Synthetic oligonucleotide
accagguauugguggggua

SEQ ID NO: 2551038 - RNA, 19 nt, Artificial Sequence
  Description of Artificial Sequence: Synthetic oligonucleotide
gucucagcuucaugaguua

SEQ ID NO: 2551039 - RNA, 19 nt, Artificial Sequence
  Description of Artificial Sequence: Synthetic oligonucleotide
auacggcccuaugggacca

SEQ ID NO: 2551040 - RNA, 19 nt, Artificial Sequence
  Description of Artificial Sequence: Synthetic oligonucleotide
ccucuugauggguuuguca

SEQ ID NO: 2551041 - RNA, 19 nt, Artificial Sequence
  Description of Artificial Sequence: Synthetic oligonucleotide
acggcccuaugggaccagg

SEQ ID NO: 2551042 - RNA, 19 nt, Artificial Sequence
  Description of Artificial Sequence: Synthetic oligonucleotide
ccaguggucucuggggugc

SEQ ID NO: 2551043 - RNA, 19 nt, Artificial Sequence
  Description of Artificial Sequence: Synthetic oligonucleotide
cucagcuucaugaguuaau

SEQ ID NO: 2551044 - RNA, 19 nt, Artificial Sequence
  Description of Artificial Sequence: Synthetic oligonucleotide
cauuuguccaguggucucu

SEQ ID NO: 2551045 - RNA, 19 nt, Artificial Sequence
  Description of Artificial Sequence: Synthetic oligonucleotide
ccccguguaccugaaguag

SEQ ID NO: 2551046 - RNA, 19 nt, Artificial Sequence
  Description of Artificial Sequence: Synthetic oligonucleotide
augauccuucagggucagg

SEQ ID NO: 2551047 - RNA, 19 nt, Artificial Sequence
  Description of Artificial Sequence: Synthetic oligonucleotide
ggaggaacagugggaugug

SEQ ID NO: 2551048 - RNA, 19 nt, Artificial Sequence
  Description of Artificial Sequence: Synthetic oligonucleotide
cucuuacgacaggggcugg

SEQ ID NO: 2551049 - RNA, 19 nt, Artificial Sequence
  Description of Artificial Sequence: Synthetic oligonucleotide
gguaccagaagguccugau

SEQ ID NO: 2551050 - RNA, 19 nt, Artificial Sequence
  Description of Artificial Sequence: Synthetic oligonucleotide
gggccucuuacgacagggg

SEQ ID NO: 2551051 - RNA, 19 nt, Artificial Sequence
  Description of Artificial Sequence: Synthetic oligonucleotide
ccguguaccugaaguagca

SEQ ID NO: 2551052 - RNA, 19 nt, Artificial Sequence
  Description of Artificial Sequence: Synthetic oligonucleotide
gggauguggccccggggac

SEQ ID NO: 2551053 - RNA, 19 nt, Artificial Sequence
  Description of Artificial Sequence: Synthetic oligonucleotide
ggucucagcuucaugaguu

SEQ ID NO: 2551054 - RNA, 19 nt, Artificial Sequence
  Description of Artificial Sequence: Synthetic oligonucleotide
gguaccgucuccucuugau

SEQ ID NO: 2551055 - RNA, 19 nt, Artificial Sequence
  Description of Artificial Sequence: Synthetic oligonucleotide
ccaaggucucagcuucaug

SEQ ID NO: 2551056 - RNA, 19 nt, Artificial Sequence
  Description of Artificial Sequence: Synthetic oligonucleotide
ccuggugaugguccaguca

SEQ ID NO: 2551057 - RNA, 19 nt, Artificial Sequence
  Description of Artificial Sequence: Synthetic oligonucleotide
uacggcccuaugggaccag

SEQ ID NO: 2551058 - RNA, 19 nt, Artificial Sequence
  Description of Artificial Sequence: Synthetic oligonucleotide
uguggccccggggaccgau

SEQ ID NO: 2551059 - RNA, 19 nt, Artificial Sequence
  Description of Artificial Sequence: Synthetic oligonucleotide
gcaccauauugccuaggua

SEQ ID NO: 2551060 - RNA, 19 nt, Artificial Sequence
  Description of Artificial Sequence: Synthetic oligonucleotide
gguggggaaccuggugaug

SEQ ID NO: 2551061 - RNA, 19 nt, Artificial Sequence
  Description of Artificial Sequence: Synthetic oligonucleotide
guauuguguccuugcuguu

SEQ ID NO: 2551062 - RNA, 19 nt, Artificial Sequence
  Description of Artificial Sequence: Synthetic oligonucleotide
cuuacgacaggggcuggau

SEQ ID NO: 2551063 - RNA, 19 nt, Artificial Sequence
  Description of Artificial Sequence: Synthetic oligonucleotide
augggaccagggccucuua

SEQ ID NO: 2551064 - RNA, 19 nt, Artificial Sequence
  Description of Artificial Sequence: Synthetic oligonucleotide
ggggaaccuggugaugguc

SEQ ID NO: 2551065 - RNA, 19 nt, Artificial Sequence
  Description of Artificial Sequence: Synthetic oligonucleotide
cgacaggggcuggauaagg

SEQ ID NO: 2551066 - RNA, 19 nt, Artificial Sequence
  Description of Artificial Sequence: Synthetic oligonucleotide
guggucucuggggugcucu

SEQ ID NO: 2551067 - RNA, 19 nt, Artificial Sequence
  Description of Artificial Sequence: Synthetic oligonucleotide
ccccaaguuaccggcuuac

SEQ ID NO: 2551068 - RNA, 19 nt, Artificial Sequence
  Description of Artificial Sequence: Synthetic oligonucleotide
cguguaccugaaguagcag

SEQ ID NO: 2551069 - RNA, 19 nt, Artificial Sequence
  Description of Artificial Sequence: Synthetic oligonucleotide
cuaccuucaguugcuucau

SEQ ID NO: 2551070 - RNA, 19 nt, Artificial Sequence
  Description of Artificial Sequence: Synthetic oligonucleotide
gccucuuacgacaggggcu

SEQ ID NO: 2551071 - RNA, 19 nt, Artificial Sequence
  Description of Artificial Sequence: Synthetic oligonucleotide
ggguaccagaagguccuga

SEQ ID NO: 2551072 - RNA, 19 nt, Artificial Sequence
  Description of Artificial Sequence: Synthetic oligonucleotide
ccugggacuucauucacuu

SEQ ID NO: 2551073 - RNA, 19 nt, Artificial Sequence
  Description of Artificial Sequence: Synthetic oligonucleotide
cccuaugggaccagggccu

SEQ ID NO: 2551074 - RNA, 19 nt, Artificial Sequence
  Description of Artificial Sequence: Synthetic oligonucleotide
cccggggaccgauauggca

SEQ ID NO: 2551075 - RNA, 19 nt, Artificial Sequence
  Description of Artificial Sequence: Synthetic oligonucleotide
ccccugggacuucauucac

SEQ ID NO: 2551076 - RNA, 19 nt, Artificial Sequence
  Description of Artificial Sequence: Synthetic oligonucleotide
cuguuuccccaaggucuca

SEQ ID NO: 2551077 - RNA, 19 nt, Artificial Sequence
  Description of Artificial Sequence: Synthetic oligonucleotide
cggcccuaugggaccaggg

SEQ ID NO: 2551078 - RNA, 19 nt, Artificial Sequence
  Description of Artificial Sequence: Synthetic oligonucleotide
gguccugauguuacuuggu

SEQ ID NO: 2551079 - RNA, 19 nt, Artificial Sequence
  Description of Artificial Sequence: Synthetic oligonucleotide
guccagucagagggaugga

SEQ ID NO: 2551080 - RNA, 19 nt, Artificial Sequence
  Description of Artificial Sequence: Synthetic oligonucleotide
gguuggggacaugacaguu

SEQ ID NO: 2551081 - RNA, 19 nt, Artificial Sequence
  Description of Artificial Sequence: Synthetic oligonucleotide
caccagguauugguggggu

SEQ ID NO: 2551082 - RNA, 19 nt, Artificial Sequence
  Description of Artificial Sequence: Synthetic oligonucleotide
ggguuggggacaugacagu

SEQ ID NO: 2551083 - RNA, 19 nt, Artificial Sequence
  Description of Artificial Sequence: Synthetic oligonucleotide
cugguccaaaaggcaaagu

SEQ ID NO: 2551084 - RNA, 19 nt, Artificial Sequence
  Description of Artificial Sequence: Synthetic oligonucleotide
ccagaagguccugauguua

SEQ ID NO: 2551085 - RNA, 19 nt, Artificial Sequence
  Description of Artificial Sequence: Synthetic oligonucleotide
cucuccugguuggauguau

SEQ ID NO: 2551086 - RNA, 19 nt, Artificial Sequence
  Description of Artificial Sequence: Synthetic oligonucleotide
cuccccaaguuaccggcuu

SEQ ID NO: 2551087 - RNA, 19 nt, Artificial Sequence
  Description of Artificial Sequence: Synthetic oligonucleotide
ggccccggggaccgauaug

SEQ ID NO: 2551088 - RNA, 19 nt, Artificial Sequence
  Description of Artificial Sequence: Synthetic oligonucleotide
ggcauggaauaugauccuu

SEQ ID NO: 2551089 - RNA, 19 nt, Artificial Sequence
  Description of Artificial Sequence: Synthetic oligonucleotide
ccauauugccuagguagcu

SEQ ID NO: 2551090 - RNA, 19 nt, Artificial Sequence
  Description of Artificial Sequence: Synthetic oligonucleotide
ccccggggaccgauauggc

SEQ ID NO: 2551091 - RNA, 19 nt, Artificial Sequence
  Description of Artificial Sequence: Synthetic oligonucleotide
gguguagcauacggcccua

SEQ ID NO: 2551092 - RNA, 19 nt, Artificial Sequence
  Description of Artificial Sequence: Synthetic oligonucleotide
ggugcucuccugguuggau

SEQ ID NO: 2551093 - RNA, 19 nt, Artificial Sequence
  Description of Artificial Sequence: Synthetic oligonucleotide
cccugggacuucauucacu

SEQ ID NO: 2551094 - RNA, 19 nt, Artificial Sequence
  Description of Artificial Sequence: Synthetic oligonucleotide
cuggggugcucuccugguu

SEQ ID NO: 2551095 - RNA, 19 nt, Artificial Sequence
  Description of Artificial Sequence: Synthetic oligonucleotide
cggggaccgauauggcaca

SEQ ID NO: 2551096 - RNA, 19 nt, Artificial Sequence
  Description of Artificial Sequence: Synthetic oligonucleotide
cacugggguuggggacaug

SEQ ID NO: 2551097 - RNA, 19 nt, Artificial Sequence
  Description of Artificial Sequence: Synthetic oligonucleotide
caucuaccuucaguugcuu

SEQ ID NO: 2551098 - RNA, 19 nt, Artificial Sequence
  Description of Artificial Sequence: Synthetic oligonucleotide
ggauccccguguaccugaa

SEQ ID NO: 2551099 - RNA, 19 nt, Artificial Sequence
  Description of Artificial Sequence: Synthetic oligonucleotide
guguagcauacggcccuau

SEQ ID NO: 2551100 - RNA, 19 nt, Artificial Sequence
  Description of Artificial Sequence: Synthetic oligonucleotide
ccccaaggucucagcuuca

SEQ ID NO: 2551101 - RNA, 19 nt, Artificial Sequence
  Description of Artificial Sequence: Synthetic oligonucleotide
gggugcucuccugguugga

SEQ ID NO: 2551102 - RNA, 19 nt, Artificial Sequence
  Description of Artificial Sequence: Synthetic oligonucleotide
auguggccccggggaccga

SEQ ID NO: 2551103 - RNA, 19 nt, Artificial Sequence
  Description of Artificial Sequence: Synthetic oligonucleotide
gcucuccugguuggaugua

SEQ ID NO: 2551104 - RNA, 19 nt, Artificial Sequence
  Description of Artificial Sequence: Synthetic oligonucleotide
guggccccggggaccgaua

SEQ ID NO: 2551105 - RNA, 19 nt, Artificial Sequence
  Description of Artificial Sequence: Synthetic oligonucleotide
caguggucucuggggugcu

SEQ ID NO: 2551106 - RNA, 19 nt, Artificial Sequence
  Description of Artificial Sequence: Synthetic oligonucleotide
cccaaguuaccggcuuacu

SEQ ID NO: 2551107 - RNA, 19 nt, Artificial Sequence
  Description of Artificial Sequence: Synthetic oligonucleotide
gggaccgauauggcacauu

SEQ ID NO: 2551108 - RNA, 19 nt, Artificial Sequence
  Description of Artificial Sequence: Synthetic oligonucleotide
ccgucuccucuugaugggu

SEQ ID NO: 2551109 - RNA, 19 nt, Artificial Sequence
  Description of Artificial Sequence: Synthetic oligonucleotide
cgucuccucuugauggguu

SEQ ID NO: 2551110 - RNA, 19 nt, Artificial Sequence
  Description of Artificial Sequence: Synthetic oligonucleotide
cccaaggucucagcuucau

SEQ ID NO: 2551111 - RNA, 19 nt, Artificial Sequence
  Description of Artificial Sequence: Synthetic oligonucleotide
ggggaccgauauggcacau

SEQ ID NO: 2551112 - RNA, 19 nt, Artificial Sequence
  Description of Artificial Sequence: Synthetic oligonucleotide
ccacugggguuggggacau

SEQ ID NO: 2551113 - RNA, 19 nt, Artificial Sequence
  Description of Artificial Sequence: Synthetic oligonucleotide
aaauucauaaagcauaagg

SEQ ID NO: 2551114 - RNA, 19 nt, Artificial Sequence
  Description of Artificial Sequence: Synthetic oligonucleotide
acauaauuaaaccaaaugg

SEQ ID NO: 2551115 - RNA, 19 nt, Artificial Sequence
  Description of Artificial Sequence: Synthetic oligonucleotide
auaaauaucaguuacaaau

SEQ ID NO: 2551116 - RNA, 19 nt, Artificial Sequence
  Description of Artificial Sequence: Synthetic oligonucleotide
uuaauaucuauuuuaaugc

SEQ ID NO: 2551117 - RNA, 19 nt, Artificial Sequence
  Description of Artificial Sequence: Synthetic oligonucleotide
uaucauauuaugaaaagcc

SEQ ID NO: 2551118 - RNA, 19 nt, Artificial Sequence
  Description of Artificial Sequence: Synthetic oligonucleotide
aguuacaaauaucacaugc

SEQ ID NO: 2551119 - RNA, 19 nt, Artificial Sequence
  Description of Artificial Sequence: Synthetic oligonucleotide
auaaauacaaguuuuaagu

SEQ ID NO: 2551120 - RNA, 19 nt, Artificial Sequence
  Description of Artificial Sequence: Synthetic oligonucleotide
aaauacaaguuuuaaguag

SEQ ID NO: 2551121 - RNA, 19 nt, Artificial Sequence
  Description of Artificial Sequence: Synthetic oligonucleotide
uucaaaaugaccaugaaua

SEQ ID NO: 2551122 - RNA, 19 nt, Artificial Sequence
  Description of Artificial Sequence: Synthetic oligonucleotide
uuugauagaugguauaugg

SEQ ID NO: 2551123 - RNA, 19 nt, Artificial Sequence
  Description of Artificial Sequence: Synthetic oligonucleotide
acaaauaucacaugcuggc

SEQ ID NO: 2551124 - RNA, 19 nt, Artificial Sequence
  Description of Artificial Sequence: Synthetic oligonucleotide
uaauuugaggaucaaagag

SEQ ID NO: 2551125 - RNA, 19 nt, Artificial Sequence
  Description of Artificial Sequence: Synthetic oligonucleotide
aauuuguucauucugaguu

SEQ ID NO: 2551126 - RNA, 19 nt, Artificial Sequence
  Description of Artificial Sequence: Synthetic oligonucleotide
uuuaucacaauucucacaa

SEQ ID NO: 2551127 - RNA, 19 nt, Artificial Sequence
  Description of Artificial Sequence: Synthetic oligonucleotide
auagaugguauauggaagc

SEQ ID NO: 2551128 - RNA, 19 nt, Artificial Sequence
  Description of Artificial Sequence: Synthetic oligonucleotide
uucauaaagcauaagguug

SEQ ID NO: 2551129 - RNA, 19 nt, Artificial Sequence
  Description of Artificial Sequence: Synthetic oligonucleotide
uuuucuaucacaccuuaag

SEQ ID NO: 2551130 - RNA, 19 nt, Artificial Sequence
  Description of Artificial Sequence: Synthetic oligonucleotide
aaaauaucaguuauagagg

SEQ ID NO: 2551131 - RNA, 19 nt, Artificial Sequence
  Description of Artificial Sequence: Synthetic oligonucleotide
aaauaucaguuauagaggu

SEQ ID NO: 2551132 - RNA, 19 nt, Artificial Sequence
  Description of Artificial Sequence: Synthetic oligonucleotide
ucauaaagcauaagguugg

SEQ ID NO: 2551133 - RNA, 19 nt, Artificial Sequence
  Description of Artificial Sequence: Synthetic oligonucleotide
auaaucuucacaguaauuc

SEQ ID NO: 2551134 - RNA, 19 nt, Artificial Sequence
  Description of Artificial Sequence: Synthetic oligonucleotide
uguaugaaggcucaugcag

SEQ ID NO: 2551135 - RNA, 19 nt, Artificial Sequence
  Description of Artificial Sequence: Synthetic oligonucleotide
ucaguuacaaauaucacau

SEQ ID NO: 2551136 - RNA, 19 nt, Artificial Sequence
  Description of Artificial Sequence: Synthetic oligonucleotide
aaaauacguaaccaaagcu

SEQ ID NO: 2551137 - RNA, 19 nt, Artificial Sequence
  Description of Artificial Sequence: Synthetic oligonucleotide
ugagaaauggugauuacug

SEQ ID NO: 2551138 - RNA, 19 nt, Artificial Sequence
  Description of Artificial Sequence: Synthetic oligonucleotide
uaugcauuauccaacauaa

SEQ ID NO: 2551139 - RNA, 19 nt, Artificial Sequence
  Description of Artificial Sequence: Synthetic oligonucleotide
augcaaauuaauuugagga

SEQ ID NO: 2551140 - RNA, 19 nt, Artificial Sequence
  Description of Artificial Sequence: Synthetic oligonucleotide
augaaaagcccacaaauuc

SEQ ID NO: 2551141 - RNA, 19 nt, Artificial Sequence
  Description of Artificial Sequence: Synthetic oligonucleotide
acuuucccaauauaaauac

SEQ ID NO: 2551142 - RNA, 19 nt, Artificial Sequence
  Description of Artificial Sequence: Synthetic oligonucleotide
gauaucguaauaaauauca

SEQ ID NO: 2551143 - RNA, 19 nt, Artificial Sequence
  Description of Artificial Sequence: Synthetic oligonucleotide
uuucuaucacaccuuaagg

SEQ ID NO: 2551144 - RNA, 19 nt, Artificial Sequence
  Description of Artificial Sequence: Synthetic oligonucleotide
ucuauuucugucuugagaa

SEQ ID NO: 2551145 - RNA, 19 nt, Artificial Sequence
  Description of Artificial Sequence: Synthetic oligonucleotide
aauucauaaagcauaaggu

SEQ ID NO: 2551146 - RNA, 19 nt, Artificial Sequence
  Description of Artificial Sequence: Synthetic oligonucleotide
aauucauuagcaaacauaa

SEQ ID NO: 2551147 - RNA, 19 nt, Artificial Sequence
  Description of Artificial Sequence: Synthetic oligonucleotide
agaaauggugauuacugac

SEQ ID NO: 2551148 - RNA, 19 nt, Artificial Sequence
  Description of Artificial Sequence: Synthetic oligonucleotide
uuacaaauaucacaugcug

SEQ ID NO: 2551149 - RNA, 19 nt, Artificial Sequence
  Description of Artificial Sequence: Synthetic oligonucleotide
ugaccaugaauacaugacg

SEQ ID NO: 2551150 - RNA, 19 nt, Artificial Sequence
  Description of Artificial Sequence: Synthetic oligonucleotide
agugcaguuaauauuaugg

SEQ ID NO: 2551151 - RNA, 19 nt, Artificial Sequence
  Description of Artificial Sequence: Synthetic oligonucleotide
uagauauggguucuuaugc

SEQ ID NO: 2551152 - RNA, 19 nt, Artificial Sequence
  Description of Artificial Sequence: Synthetic oligonucleotide
agauagaaggcacucaguc

SEQ ID NO: 2551153 - RNA, 19 nt, Artificial Sequence
  Description of Artificial Sequence: Synthetic oligonucleotide
ucauauuaugaaaagccca

SEQ ID NO: 2551154 - RNA, 19 nt, Artificial Sequence
  Description of Artificial Sequence: Synthetic oligonucleotide
uuuaaguaguugcuuauca

SEQ ID NO: 2551155 - RNA, 19 nt, Artificial Sequence
  Description of Artificial Sequence: Synthetic oligonucleotide
uucacaguaauucuguuaa

SEQ ID NO: 2551156 - RNA, 19 nt, Artificial Sequence
  Description of Artificial Sequence: Synthetic oligonucleotide
uaaagcauaagguuggcgu

SEQ ID NO: 2551157 - RNA, 19 nt, Artificial Sequence
  Description of Artificial Sequence: Synthetic oligonucleotide
ucuguuaaguauuauuucu

SEQ ID NO: 2551158 - RNA, 19 nt, Artificial Sequence
  Description of Artificial Sequence: Synthetic oligonucleotide
aaugauaucguaauaaaua

SEQ ID NO: 2551159 - RNA, 19 nt, Artificial Sequence
  Description of Artificial Sequence: Synthetic oligonucleotide
aaagcauaagguuggcguc

SEQ ID NO: 2551160 - RNA, 19 nt, Artificial Sequence
  Description of Artificial Sequence: Synthetic oligonucleotide
uaaguauuauuucuauuug

SEQ ID NO: 2551161 - RNA, 19 nt, Artificial Sequence
  Description of Artificial Sequence: Synthetic oligonucleotide
aaaaccccacauuuucccc

SEQ ID NO: 2551162 - RNA, 19 nt, Artificial Sequence
  Description of Artificial Sequence: Synthetic oligonucleotide
uuaaugcaaauuaauuuga

SEQ ID NO: 2551163 - RNA, 19 nt, Artificial Sequence
  Description of Artificial Sequence: Synthetic oligonucleotide
cauaauuaaaccaaaugga

SEQ ID NO: 2551164 - RNA, 19 nt, Artificial Sequence
  Description of Artificial Sequence: Synthetic oligonucleotide
aaaaugaccaugaauacau

SEQ ID NO: 2551165 - RNA, 19 nt, Artificial Sequence
  Description of Artificial Sequence: Synthetic oligonucleotide
ucucacaaauucauaaagc

SEQ ID NO: 2551166 - RNA, 19 nt, Artificial Sequence
  Description of Artificial Sequence: Synthetic oligonucleotide
accuuaaggauucgaaggc

SEQ ID NO: 2551167 - RNA, 19 nt, Artificial Sequence
  Description of Artificial Sequence: Synthetic oligonucleotide
cuuaucauauuaugaaaag

SEQ ID NO: 2551168 - RNA, 19 nt, Artificial Sequence
  Description of Artificial Sequence: Synthetic oligonucleotide
uuagauauggguucuuaug

SEQ ID NO: 2551169 - RNA, 19 nt, Artificial Sequence
  Description of Artificial Sequence: Synthetic oligonucleotide
auaauuaaaccaaauggag

SEQ ID NO: 2551170 - RNA, 19 nt, Artificial Sequence
  Description of Artificial Sequence: Synthetic oligonucleotide
aaauaucaguuacaaauau

SEQ ID NO: 2551171 - RNA, 19 nt, Artificial Sequence
  Description of Artificial Sequence: Synthetic oligonucleotide
uuaauuugaggaucaaaga

SEQ ID NO: 2551172 - RNA, 19 nt, Artificial Sequence
  Description of Artificial Sequence: Synthetic oligonucleotide
aaguauuauuucuauuuga

SEQ ID NO: 2551173 - RNA, 19 nt, Artificial Sequence
  Description of Artificial Sequence: Synthetic oligonucleotide
ucacaauucucacaaauuc

SEQ ID NO: 2551174 - RNA, 19 nt, Artificial Sequence
  Description of Artificial Sequence: Synthetic oligonucleotide
aucaguuacaaauaucaca

SEQ ID NO: 2551175 - RNA, 19 nt, Artificial Sequence
  Description of Artificial Sequence: Synthetic oligonucleotide
aggauucgaaggcaaaacc

SEQ ID NO: 2551176 - RNA, 19 nt, Artificial Sequence
  Description of Artificial Sequence: Synthetic oligonucleotide
uaucguaauaaauaucagu

SEQ ID NO: 2551177 - RNA, 19 nt, Artificial Sequence
  Description of Artificial Sequence: Synthetic oligonucleotide
aauacguaaccaaagcuug

SEQ ID NO: 2551178 - RNA, 19 nt, Artificial Sequence
  Description of Artificial Sequence: Synthetic oligonucleotide
ugauagaugguauauggaa

SEQ ID NO: 2551179 - RNA, 19 nt, Artificial Sequence
  Description of Artificial Sequence: Synthetic oligonucleotide
aauuugaggaucaaagagu

SEQ ID NO: 2551180 - RNA, 19 nt, Artificial Sequence
  Description of Artificial Sequence: Synthetic oligonucleotide
cauauuaugaaaagcccac

SEQ ID NO: 2551181 - RNA, 19 nt, Artificial Sequence
  Description of Artificial Sequence: Synthetic oligonucleotide
aauacaaguuuuaaguagu

SEQ ID NO: 2551182 - RNA, 19 nt, Artificial Sequence
  Description of Artificial Sequence: Synthetic oligonucleotide
uagcaaacauaauuaaacc

SEQ ID NO: 2551183 - RNA, 19 nt, Artificial Sequence
  Description of Artificial Sequence: Synthetic oligonucleotide
uuaucauauuaugaaaagc

SEQ ID NO: 2551184 - RNA, 19 nt, Artificial Sequence
  Description of Artificial Sequence: Synthetic oligonucleotide
agcaaacauaauuaaacca

SEQ ID NO: 2551185 - RNA, 19 nt, Artificial Sequence
  Description of Artificial Sequence: Synthetic oligonucleotide
gguauauggaagcugaaag

SEQ ID NO: 2551186 - RNA, 19 nt, Artificial Sequence
  Description of Artificial Sequence: Synthetic oligonucleotide
caccuuaaggauucgaagg

SEQ ID NO: 2551187 - RNA, 19 nt, Artificial Sequence
  Description of Artificial Sequence: Synthetic oligonucleotide
uaauaaauaucaguuacaa

SEQ ID NO: 2551188 - RNA, 19 nt, Artificial Sequence
  Description of Artificial Sequence: Synthetic oligonucleotide
aaggauucgaaggcaaaac

SEQ ID NO: 2551189 - RNA, 19 nt, Artificial Sequence
  Description of Artificial Sequence: Synthetic oligonucleotide
aaggcaaaaccccacauuu

SEQ ID NO: 2551190 - RNA, 19 nt, Artificial Sequence
  Description of Artificial Sequence: Synthetic oligonucleotide
uucuauuucugucuugaga

SEQ ID NO: 2551191 - RNA, 19 nt, Artificial Sequence
  Description of Artificial Sequence: Synthetic oligonucleotide
aaauaucacaugcuggcau

SEQ ID NO: 2551192 - RNA, 19 nt, Artificial Sequence
  Description of Artificial Sequence: Synthetic oligonucleotide
caugaauacaugacgcugc

SEQ ID NO: 2551193 - RNA, 19 nt, Artificial Sequence
  Description of Artificial Sequence: Synthetic oligonucleotide
uauggaagcugaaagugac

SEQ ID NO: 2551194 - RNA, 19 nt, Artificial Sequence
  Description of Artificial Sequence: Synthetic oligonucleotide
uuaugcauuauccaacaua

SEQ ID NO: 2551195 - RNA, 19 nt, Artificial Sequence
  Description of Artificial Sequence: Synthetic oligonucleotide
augauaucguaauaaauau

SEQ ID NO: 2551196 - RNA, 19 nt, Artificial Sequence
  Description of Artificial Sequence: Synthetic oligonucleotide
aagcccacaaauucauuag

SEQ ID NO: 2551197 - RNA, 19 nt, Artificial Sequence
  Description of Artificial Sequence: Synthetic oligonucleotide
auaucaguuauagaggucu

SEQ ID NO: 2551198 - RNA, 19 nt, Artificial Sequence
  Description of Artificial Sequence: Synthetic oligonucleotide
aaagcccacaaauucauua

SEQ ID NO: 2551199 - RNA, 19 nt, Artificial Sequence
  Description of Artificial Sequence: Synthetic oligonucleotide
uaaauacaaguuuuaagua

SEQ ID NO: 2551200 - RNA, 19 nt, Artificial Sequence
  Description of Artificial Sequence: Synthetic oligonucleotide
uugcuuaucauauuaugaa

SEQ ID NO: 2551201 - RNA, 19 nt, Artificial Sequence
  Description of Artificial Sequence: Synthetic oligonucleotide
uuuagaaguugcuuuauuu

SEQ ID NO: 2551202 - RNA, 19 nt, Artificial Sequence
  Description of Artificial Sequence: Synthetic oligonucleotide
uucccaauauaaauacaag

SEQ ID NO: 2551203 - RNA, 19 nt, Artificial Sequence
  Description of Artificial Sequence: Synthetic oligonucleotide
ucuauuugauagaugguau

SEQ ID NO: 2551204 - RNA, 19 nt, Artificial Sequence
  Description of Artificial Sequence: Synthetic oligonucleotide
uucuuaugcauuauccaac

SEQ ID NO: 2551205 - RNA, 19 nt, Artificial Sequence
  Description of Artificial Sequence: Synthetic oligonucleotide
aaaagacaucuuuccuugg

SEQ ID NO: 2551206 - RNA, 19 nt, Artificial Sequence
  Description of Artificial Sequence: Synthetic oligonucleotide
ugugccacucaaaaguuga

SEQ ID NO: 2551207 - RNA, 19 nt, Artificial Sequence
  Description of Artificial Sequence: Synthetic oligonucleotide
uauuuauuaauuuguucau

SEQ ID NO: 2551208 - RNA, 19 nt, Artificial Sequence
  Description of Artificial Sequence: Synthetic oligonucleotide
uuacuuuagauauggguuc

SEQ ID NO: 2551209 - RNA, 19 nt, Artificial Sequence
  Description of Artificial Sequence: Synthetic oligonucleotide
ugcaguuaauauuaugggu

SEQ ID NO: 2551210 - RNA, 19 nt, Artificial Sequence
  Description of Artificial Sequence: Synthetic oligonucleotide
uucagacauacacagaaua

SEQ ID NO: 2551211 - RNA, 19 nt, Artificial Sequence
  Description of Artificial Sequence: Synthetic oligonucleotide
aguuauagaggucugguua

SEQ ID NO: 2551212 - RNA, 19 nt, Artificial Sequence
  Description of Artificial Sequence: Synthetic oligonucleotide
uuagaaguugcuuuauuua

SEQ ID NO: 2551213 - RNA, 19 nt, Artificial Sequence
  Description of Artificial Sequence: Synthetic oligonucleotide
ucuuaugcauuauccaaca

SEQ ID NO: 2551214 - RNA, 19 nt, Artificial Sequence
  Description of Artificial Sequence: Synthetic oligonucleotide
gugcaguuaauauuauggg

SEQ ID NO: 2551215 - RNA, 19 nt, Artificial Sequence
  Description of Artificial Sequence: Synthetic oligonucleotide
aaauacguaaccaaagcuu

SEQ ID NO: 2551216 - RNA, 19 nt, Artificial Sequence
  Description of Artificial Sequence: Synthetic oligonucleotide
gauucgaaggcaaaacccc

SEQ ID NO: 2551217 - RNA, 19 nt, Artificial Sequence
  Description of Artificial Sequence: Synthetic oligonucleotide
cucacaaauucauaaagca

SEQ ID NO: 2551218 - RNA, 19 nt, Artificial Sequence
  Description of Artificial Sequence: Synthetic oligonucleotide
aguugcuuaucauauuaug

SEQ ID NO: 2551219 - RNA, 19 nt, Artificial Sequence
  Description of Artificial Sequence: Synthetic oligonucleotide
auggugauuacugacuuuc

SEQ ID NO: 2551220 - RNA, 19 nt, Artificial Sequence
  Description of Artificial Sequence: Synthetic oligonucleotide
ucagacauacacagaauaa

SEQ ID NO: 2551221 - RNA, 19 nt, Artificial Sequence
  Description of Artificial Sequence: Synthetic oligonucleotide
aguugcuuuauuuauuaau

SEQ ID NO: 2551222 - RNA, 19 nt, Artificial Sequence
  Description of Artificial Sequence: Synthetic oligonucleotide
auagaggucugguuaaucu

SEQ ID NO: 2551223 - RNA, 19 nt, Artificial Sequence
  Description of Artificial Sequence: Synthetic oligonucleotide
auuacuuuagauauggguu

SEQ ID NO: 2551224 - RNA, 19 nt, Artificial Sequence
  Description of Artificial Sequence: Synthetic oligonucleotide
ugcguaauuuaucacaauu

SEQ ID NO: 2551225 - RNA, 19 nt, Artificial Sequence
  Description of Artificial Sequence: Synthetic oligonucleotide
aaauucauuagcaaacaua

SEQ ID NO: 2551226 - RNA, 19 nt, Artificial Sequence
  Description of Artificial Sequence: Synthetic oligonucleotide
uaugaaaagcccacaaauu

SEQ ID NO: 2551227 - RNA, 19 nt, Artificial Sequence
  Description of Artificial Sequence: Synthetic oligonucleotide
aaauggugauuacugacuu

SEQ ID NO: 2551228 - RNA, 19 nt, Artificial Sequence
  Description of Artificial Sequence: Synthetic oligonucleotide
uaaguaguugcuuaucaua

SEQ ID NO: 2551229 - RNA, 19 nt, Artificial Sequence
  Description of Artificial Sequence: Synthetic oligonucleotide
ggcgucacaaaugauaucg

SEQ ID NO: 2551230 - RNA, 19 nt, Artificial Sequence
  Description of Artificial Sequence: Synthetic oligonucleotide
uugaggaucaaagaguuua

SEQ ID NO: 2551231 - RNA, 19 nt, Artificial Sequence
  Description of Artificial Sequence: Synthetic oligonucleotide
uaucacaccuuaaggauuc

SEQ ID NO: 2551232 - RNA, 19 nt, Artificial Sequence
  Description of Artificial Sequence: Synthetic oligonucleotide
aucguaauaaauaucaguu

SEQ ID NO: 2551233 - RNA, 19 nt, Artificial Sequence
  Description of Artificial Sequence: Synthetic oligonucleotide
uugauagaugguauaugga

SEQ ID NO: 2551234 - RNA, 19 nt, Artificial Sequence
  Description of Artificial Sequence: Synthetic oligonucleotide
acaccuuaaggauucgaag

SEQ ID NO: 2551235 - RNA, 19 nt, Artificial Sequence
  Description of Artificial Sequence: Synthetic oligonucleotide
accaaauggaggcaccuag

SEQ ID NO: 2551236 - RNA, 19 nt, Artificial Sequence
  Description of Artificial Sequence: Synthetic oligonucleotide
agcccacaaauucauuagc

SEQ ID NO: 2551237 - RNA, 19 nt, Artificial Sequence
  Description of Artificial Sequence: Synthetic oligonucleotide
acuaguucuucaaaaugac

SEQ ID NO: 2551238 - RNA, 19 nt, Artificial Sequence
  Description of Artificial Sequence: Synthetic oligonucleotide
aaaugauaucguaauaaau

SEQ ID NO: 2551239 - RNA, 19 nt, Artificial Sequence
  Description of Artificial Sequence: Synthetic oligonucleotide
cuaguucuucaaaaugacc

SEQ ID NO: 2551240 - RNA, 19 nt, Artificial Sequence
  Description of Artificial Sequence: Synthetic oligonucleotide
ugauaucguaauaaauauc

SEQ ID NO: 2551241 - RNA, 19 nt, Artificial Sequence
  Description of Artificial Sequence: Synthetic oligonucleotide
aaucuucacaguaauucug

SEQ ID NO: 2551242 - RNA, 19 nt, Artificial Sequence
  Description of Artificial Sequence: Synthetic oligonucleotide
cacaaauucauaaagcaua

SEQ ID NO: 2551243 - RNA, 19 nt, Artificial Sequence
  Description of Artificial Sequence: Synthetic oligonucleotide
aauaucaguuauagagguc

SEQ ID NO: 2551244 - RNA, 19 nt, Artificial Sequence
  Description of Artificial Sequence: Synthetic oligonucleotide
uauuucuauuugauagaug

SEQ ID NO: 2551245 - RNA, 19 nt, Artificial Sequence
  Description of Artificial Sequence: Synthetic oligonucleotide
auuuaucacaauucucaca

SEQ ID NO: 2551246 - RNA, 19 nt, Artificial Sequence
  Description of Artificial Sequence: Synthetic oligonucleotide
uaagguuggcgucacaaau

SEQ ID NO: 2551247 - RNA, 19 nt, Artificial Sequence
  Description of Artificial Sequence: Synthetic oligonucleotide
guuaaucucgacuaguucu

SEQ ID NO: 2551248 - RNA, 19 nt, Artificial Sequence
  Description of Artificial Sequence: Synthetic oligonucleotide
uucuguuaaguauuauuuc

SEQ ID NO: 2551249 - RNA, 19 nt, Artificial Sequence
  Description of Artificial Sequence: Synthetic oligonucleotide
ucugguuaaucucgacuag

SEQ ID NO: 2551250 - RNA, 19 nt, Artificial Sequence
  Description of Artificial Sequence: Synthetic oligonucleotide
gaugguauauggaagcuga

SEQ ID NO: 2551251 - RNA, 19 nt, Artificial Sequence
  Description of Artificial Sequence: Synthetic oligonucleotide
ugauuacugacuuucccaa

SEQ ID NO: 2551252 - RNA, 19 nt, Artificial Sequence
  Description of Artificial Sequence: Synthetic oligonucleotide
uaucaguuacaaauaucac

SEQ ID NO: 2551253 - RNA, 19 nt, Artificial Sequence
  Description of Artificial Sequence: Synthetic oligonucleotide
gaccaugaauacaugacgc

SEQ ID NO: 2551254 - RNA, 19 nt, Artificial Sequence
  Description of Artificial Sequence: Synthetic oligonucleotide
caugcuggcauuacuuuag

SEQ ID NO: 2551255 - RNA, 19 nt, Artificial Sequence
  Description of Artificial Sequence: Synthetic oligonucleotide
uaaaccaaauggaggcacc

SEQ ID NO: 2551256 - RNA, 19 nt, Artificial Sequence
  Description of Artificial Sequence: Synthetic oligonucleotide
aauaucacaugcuggcauu

SEQ ID NO: 2551257 - RNA, 19 nt, Artificial Sequence
  Description of Artificial Sequence: Synthetic oligonucleotide
uggaagcugaaagugacug

SEQ ID NO: 2551258 - RNA, 19 nt, Artificial Sequence
  Description of Artificial Sequence: Synthetic oligonucleotide
ucuugagaaauggugauua

SEQ ID NO: 2551259 - RNA, 19 nt, Artificial Sequence
  Description of Artificial Sequence: Synthetic oligonucleotide
ggcauuacuuuagauaugg

SEQ ID NO: 2551260 - RNA, 19 nt, Artificial Sequence
  Description of Artificial Sequence: Synthetic oligonucleotide
uuggcgucacaaaugauau

SEQ ID NO: 2551261 - RNA, 19 nt, Artificial Sequence
  Description of Artificial Sequence: Synthetic oligonucleotide
uuuagauauggguucuuau

SEQ ID NO: 2551262 - RNA, 19 nt, Artificial Sequence
  Description of Artificial Sequence: Synthetic oligonucleotide
ugcuuaucauauuaugaaa

SEQ ID NO: 2551263 - RNA, 19 nt, Artificial Sequence
  Description of Artificial Sequence: Synthetic oligonucleotide
uuauuucuauuugauagau

SEQ ID NO: 2551264 - RNA, 19 nt, Artificial Sequence
  Description of Artificial Sequence: Synthetic oligonucleotide
uaauuuguucauucugagu

SEQ ID NO: 2551265 - RNA, 19 nt, Artificial Sequence
  Description of Artificial Sequence: Synthetic oligonucleotide
ucagucaaagcuacuuuaa

SEQ ID NO: 2551266 - RNA, 19 nt, Artificial Sequence
  Description of Artificial Sequence: Synthetic oligonucleotide
aaguaguugcuuaucauau

SEQ ID NO: 2551267 - RNA, 19 nt, Artificial Sequence
  Description of Artificial Sequence: Synthetic oligonucleotide
aguuagugcaguuaauauu

SEQ ID NO: 2551268 - RNA, 19 nt, Artificial Sequence
  Description of Artificial Sequence: Synthetic oligonucleotide
aaaccccacauuuuccccu

SEQ ID NO: 2551269 - RNA, 19 nt, Artificial Sequence
  Description of Artificial Sequence: Synthetic oligonucleotide
aggaucaaagaguuuauuu

SEQ ID NO: 2551270 - RNA, 19 nt, Artificial Sequence
  Description of Artificial Sequence: Synthetic oligonucleotide
uuaaguaguugcuuaucau

SEQ ID NO: 2551271 - RNA, 19 nt, Artificial Sequence
  Description of Artificial Sequence: Synthetic oligonucleotide
agucaaagcuacuuuaaua

SEQ ID NO: 2551272 - RNA, 19 nt, Artificial Sequence
  Description of Artificial Sequence: Synthetic oligonucleotide
uuucuauuugauagauggu

SEQ ID NO: 2551273 - RNA, 19 nt, Artificial Sequence
  Description of Artificial Sequence: Synthetic oligonucleotide
aaucucgacuaguucuuca

SEQ ID NO: 2551274 - RNA, 19 nt, Artificial Sequence
  Description of Artificial Sequence: Synthetic oligonucleotide
gaaguugcuuuauuuauua

SEQ ID NO: 2551275 - RNA, 19 nt, Artificial Sequence
  Description of Artificial Sequence: Synthetic oligonucleotide
acaguaauucuguuaagua

SEQ ID NO: 2551276 - RNA, 19 nt, Artificial Sequence
  Description of Artificial Sequence: Synthetic oligonucleotide
agaggucugguuaaucucg

SEQ ID NO: 2551277 - RNA, 19 nt, Artificial Sequence
  Description of Artificial Sequence: Synthetic oligonucleotide
auucuguuaaguauuauuu

SEQ ID NO: 2551278 - RNA, 19 nt, Artificial Sequence
  Description of Artificial Sequence: Synthetic oligonucleotide
uaguuagugcaguuaauau

SEQ ID NO: 2551279 - RNA, 19 nt, Artificial Sequence
  Description of Artificial Sequence: Synthetic oligonucleotide
aguaauucuguuaaguauu

SEQ ID NO: 2551280 - RNA, 19 nt, Artificial Sequence
  Description of Artificial Sequence: Synthetic oligonucleotide
uuaaucucgacuaguucuu

SEQ ID NO: 2551281 - RNA, 19 nt, Artificial Sequence
  Description of Artificial Sequence: Synthetic oligonucleotide
ucaaagcuacuuuaauauc

SEQ ID NO: 2551282 - RNA, 19 nt, Artificial Sequence
  Description of Artificial Sequence: Synthetic oligonucleotide
ucguaauaaauaucaguua

SEQ ID NO: 2551283 - RNA, 19 nt, Artificial Sequence
  Description of Artificial Sequence: Synthetic oligonucleotide
uacaaguuuuaaguaguug

SEQ ID NO: 2551284 - RNA, 19 nt, Artificial Sequence
  Description of Artificial Sequence: Synthetic oligonucleotide
agauauggguucuuaugca

SEQ ID NO: 2551285 - RNA, 19 nt, Artificial Sequence
  Description of Artificial Sequence: Synthetic oligonucleotide
guugcuuaucauauuauga

SEQ ID NO: 2551286 - RNA, 19 nt, Artificial Sequence
  Description of Artificial Sequence: Synthetic oligonucleotide
guucuuaugcauuauccaa

SEQ ID NO: 2551287 - RNA, 19 nt, Artificial Sequence
  Description of Artificial Sequence: Synthetic oligonucleotide
aaauggaggcaccuaguua

SEQ ID NO: 2551288 - RNA, 19 nt, Artificial Sequence
  Description of Artificial Sequence: Synthetic oligonucleotide
auuacugacuuucccaaua

SEQ ID NO: 2551289 - RNA, 19 nt, Artificial Sequence
  Description of Artificial Sequence: Synthetic oligonucleotide
auaaagcauaagguuggcg

SEQ ID NO: 2551290 - RNA, 19 nt, Artificial Sequence
  Description of Artificial Sequence: Synthetic oligonucleotide
caguuaauauuauggguuc

SEQ ID NO: 2551291 - RNA, 19 nt, Artificial Sequence
  Description of Artificial Sequence: Synthetic oligonucleotide
gugauuacugacuuuccca

SEQ ID NO: 2551292 - RNA, 19 nt, Artificial Sequence
  Description of Artificial Sequence: Synthetic oligonucleotide
gacaucuuuccuugguuac

SEQ ID NO: 2551293 - RNA, 19 nt, Artificial Sequence
  Description of Artificial Sequence: Synthetic oligonucleotide
gucaaagcuacuuuaauau

SEQ ID NO: 2551294 - RNA, 19 nt, Artificial Sequence
  Description of Artificial Sequence: Synthetic oligonucleotide
acguaaccaaagcuuguuc

SEQ ID NO: 2551295 - RNA, 19 nt, Artificial Sequence
  Description of Artificial Sequence: Synthetic oligonucleotide
uaucuauuuuaaugcaaau

SEQ ID NO: 2551296 - RNA, 19 nt, Artificial Sequence
  Description of Artificial Sequence: Synthetic oligonucleotide
aaccccacauuuuccccuc

SEQ ID NO: 2551297 - RNA, 19 nt, Artificial Sequence
  Description of Artificial Sequence: Synthetic oligonucleotide
auuugauagaugguauaug

SEQ ID NO: 2551298 - RNA, 19 nt, Artificial Sequence
  Description of Artificial Sequence: Synthetic oligonucleotide
uuaaggauucgaaggcaaa

SEQ ID NO: 2551299 - RNA, 19 nt, Artificial Sequence
  Description of Artificial Sequence: Synthetic oligonucleotide
auaucuauuuuaaugcaaa

SEQ ID NO: 2551300 - RNA, 19 nt, Artificial Sequence
  Description of Artificial Sequence: Synthetic oligonucleotide
gagaaauggugauuacuga

SEQ ID NO: 2551301 - RNA, 19 nt, Artificial Sequence
  Description of Artificial Sequence: Synthetic oligonucleotide
gaaggcacucagucaaagc

SEQ ID NO: 2551302 - RNA, 19 nt, Artificial Sequence
  Description of Artificial Sequence: Synthetic oligonucleotide
acaaauucauuagcaaaca

SEQ ID NO: 2551303 - RNA, 19 nt, Artificial Sequence
  Description of Artificial Sequence: Synthetic oligonucleotide
uauggguucuuaugcauua

SEQ ID NO: 2551304 - RNA, 19 nt, Artificial Sequence
  Description of Artificial Sequence: Synthetic oligonucleotide
gcuguaugaaggcucaugc

SEQ ID NO: 2551305 - RNA, 19 nt, Artificial Sequence
  Description of Artificial Sequence: Synthetic oligonucleotide
uaucaguuauagaggucug

SEQ ID NO: 2551306 - RNA, 19 nt, Artificial Sequence
  Description of Artificial Sequence: Synthetic oligonucleotide
ucgacuaguucuucaaaau

SEQ ID NO: 2551307 - RNA, 19 nt, Artificial Sequence
  Description of Artificial Sequence: Synthetic oligonucleotide
ugucuugagaaauggugau

SEQ ID NO: 2551308 - RNA, 19 nt, Artificial Sequence
  Description of Artificial Sequence: Synthetic oligonucleotide
acugacuuucccaauauaa

SEQ ID NO: 2551309 - RNA, 19 nt, Artificial Sequence
  Description of Artificial Sequence: Synthetic oligonucleotide
ucacaugcuggcauuacuu

SEQ ID NO: 2551310 - RNA, 19 nt, Artificial Sequence
  Description of Artificial Sequence: Synthetic oligonucleotide
cauuacuuuagauaugggu

SEQ ID NO: 2551311 - RNA, 19 nt, Artificial Sequence
  Description of Artificial Sequence: Synthetic oligonucleotide
guaguugcuuaucauauua

SEQ ID NO: 2551312 - RNA, 19 nt, Artificial Sequence
  Description of Artificial Sequence: Synthetic oligonucleotide
cacaauucucacaaauuca

SEQ ID NO: 2551313 - RNA, 19 nt, Artificial Sequence
  Description of Artificial Sequence: Synthetic oligonucleotide
uccugcaugcguaauuuau

SEQ ID NO: 2551314 - RNA, 19 nt, Artificial Sequence
  Description of Artificial Sequence: Synthetic oligonucleotide
accuaguuagugcaguuaa

SEQ ID NO: 2551315 - RNA, 19 nt, Artificial Sequence
  Description of Artificial Sequence: Synthetic oligonucleotide
cugucuugagaaaugguga

SEQ ID NO: 2551316 - RNA, 19 nt, Artificial Sequence
  Description of Artificial Sequence: Synthetic oligonucleotide
uuacugacuuucccaauau

SEQ ID NO: 2551317 - RNA, 19 nt, Artificial Sequence
  Description of Artificial Sequence: Synthetic oligonucleotide
acaauucucacaaauucau

SEQ ID NO: 2551318 - RNA, 19 nt, Artificial Sequence
  Description of Artificial Sequence: Synthetic oligonucleotide
uaugaaggcucaugcagau

SEQ ID NO: 2551319 - RNA, 19 nt, Artificial Sequence
  Description of Artificial Sequence: Synthetic oligonucleotide
agguuggcgucacaaauga

SEQ ID NO: 2551320 - RNA, 19 nt, Artificial Sequence
  Description of Artificial Sequence: Synthetic oligonucleotide
accaugaauacaugacgcu

SEQ ID NO: 2551321 - RNA, 19 nt, Artificial Sequence
  Description of Artificial Sequence: Synthetic oligonucleotide
uuuuaaguaguugcuuauc

SEQ ID NO: 2551322 - RNA, 19 nt, Artificial Sequence
  Description of Artificial Sequence: Synthetic oligonucleotide
aagguuggcgucacaaaug

SEQ ID NO: 2551323 - RNA, 19 nt, Artificial Sequence
  Description of Artificial Sequence: Synthetic oligonucleotide
auuagcaaacauaauuaaa

SEQ ID NO: 2551324 - RNA, 19 nt, Artificial Sequence
  Description of Artificial Sequence: Synthetic oligonucleotide
aaaccaaauggaggcaccu

SEQ ID NO: 2551325 - RNA, 19 nt, Artificial Sequence
  Description of Artificial Sequence: Synthetic oligonucleotide
guuauagaggucugguuaa

SEQ ID NO: 2551326 - RNA, 19 nt, Artificial Sequence
  Description of Artificial Sequence: Synthetic oligonucleotide
gaggcaccuaguuagugca

SEQ ID NO: 2551327 - RNA, 19 nt, Artificial Sequence
  Description of Artificial Sequence: Synthetic oligonucleotide
uucgaaggcaaaaccccac

SEQ ID NO: 2551328 - RNA, 19 nt, Artificial Sequence
  Description of Artificial Sequence: Synthetic oligonucleotide
aauacaugacgcugcugua

SEQ ID NO: 2551329 - RNA, 19 nt, Artificial Sequence
  Description of Artificial Sequence: Synthetic oligonucleotide
ugguuaaucucgacuaguu

SEQ ID NO: 2551330 - RNA, 19 nt, Artificial Sequence
  Description of Artificial Sequence: Synthetic oligonucleotide
auaucguaauaaauaucag

SEQ ID NO: 2551331 - RNA, 19 nt, Artificial Sequence
  Description of Artificial Sequence: Synthetic oligonucleotide
ucgaaggcaaaaccccaca

SEQ ID NO: 2551332 - RNA, 19 nt, Artificial Sequence
  Description of Artificial Sequence: Synthetic oligonucleotide
uuucagacauacacagaau

SEQ ID NO: 2551333 - RNA, 19 nt, Artificial Sequence
  Description of Artificial Sequence: Synthetic oligonucleotide
uaaggauucgaaggcaaaa

SEQ ID NO: 2551334 - RNA, 19 nt, Artificial Sequence
  Description of Artificial Sequence: Synthetic oligonucleotide
cuggcauuacuuuagauau

SEQ ID NO: 2551335 - RNA, 19 nt, Artificial Sequence
  Description of Artificial Sequence: Synthetic oligonucleotide
ugaggaucaaagaguuuau

SEQ ID NO: 2551336 - RNA, 19 nt, Artificial Sequence
  Description of Artificial Sequence: Synthetic oligonucleotide
ggugauuacugacuuuccc

SEQ ID NO: 2551337 - RNA, 19 nt, Artificial Sequence
  Description of Artificial Sequence: Synthetic oligonucleotide
auuugaggaucaaagaguu

SEQ ID NO: 2551338 - RNA, 19 nt, Artificial Sequence
  Description of Artificial Sequence: Synthetic oligonucleotide
aaagcuacuuuaauaucua

SEQ ID NO: 2551339 - RNA, 19 nt, Artificial Sequence
  Description of Artificial Sequence: Synthetic oligonucleotide
uagaggucugguuaaucuc

SEQ ID NO: 2551340 - RNA, 19 nt, Artificial Sequence
  Description of Artificial Sequence: Synthetic oligonucleotide
uaguugcuuaucauauuau

SEQ ID NO: 2551341 - RNA, 19 nt, Artificial Sequence
  Description of Artificial Sequence: Synthetic oligonucleotide
ucacaguaauucuguuaag

SEQ ID NO: 2551342 - RNA, 19 nt, Artificial Sequence
  Description of Artificial Sequence: Synthetic oligonucleotide
aagcauaagguuggcguca

SEQ ID NO: 2551343 - RNA, 19 nt, Artificial Sequence
  Description of Artificial Sequence: Synthetic oligonucleotide
augaauacaugacgcugcu

SEQ ID NO: 2551344 - RNA, 19 nt, Artificial Sequence
  Description of Artificial Sequence: Synthetic oligonucleotide
uggugauuacugacuuucc

SEQ ID NO: 2551345 - RNA, 19 nt, Artificial Sequence
  Description of Artificial Sequence: Synthetic oligonucleotide
aagcuacuuuaauaucuau

SEQ ID NO: 2551346 - RNA, 19 nt, Artificial Sequence
  Description of Artificial Sequence: Synthetic oligonucleotide
ggauucgaaggcaaaaccc

SEQ ID NO: 2551347 - RNA, 19 nt, Artificial Sequence
  Description of Artificial Sequence: Synthetic oligonucleotide
aauggugauuacugacuuu

SEQ ID NO: 2551348 - RNA, 19 nt, Artificial Sequence
  Description of Artificial Sequence: Synthetic oligonucleotide
ugguuacuuuccugcaugc

SEQ ID NO: 2551349 - RNA, 19 nt, Artificial Sequence
  Description of Artificial Sequence: Synthetic oligonucleotide
uucugucuugagaaauggu

SEQ ID NO: 2551350 - RNA, 19 nt, Artificial Sequence
  Description of Artificial Sequence: Synthetic oligonucleotide
agacauacacagaauaaaa

SEQ ID NO: 2551351 - RNA, 19 nt, Artificial Sequence
  Description of Artificial Sequence: Synthetic oligonucleotide
acaaauucauaaagcauaa

SEQ ID NO: 2551352 - RNA, 19 nt, Artificial Sequence
  Description of Artificial Sequence: Synthetic oligonucleotide
caugcguaauuuaucacaa

SEQ ID NO: 2551353 - RNA, 19 nt, Artificial Sequence
  Description of Artificial Sequence: Synthetic oligonucleotide
cacauuuuccccucuaaaa

SEQ ID NO: 2551354 - RNA, 19 nt, Artificial Sequence
  Description of Artificial Sequence: Synthetic oligonucleotide
cuugagaaauggugauuac

SEQ ID NO: 2551355 - RNA, 19 nt, Artificial Sequence
  Description of Artificial Sequence: Synthetic oligonucleotide
gcaaacauaauuaaaccaa

SEQ ID NO: 2551356 - RNA, 19 nt, Artificial Sequence
  Description of Artificial Sequence: Synthetic oligonucleotide
gucugguuaaucucgacua

SEQ ID NO: 2551357 - RNA, 19 nt, Artificial Sequence
  Description of Artificial Sequence: Synthetic oligonucleotide
cugcaugcguaauuuauca

SEQ ID NO: 2551358 - RNA, 19 nt, Artificial Sequence
  Description of Artificial Sequence: Synthetic oligonucleotide
auuaaaccaaauggaggca

SEQ ID NO: 2551359 - RNA, 19 nt, Artificial Sequence
  Description of Artificial Sequence: Synthetic oligonucleotide
uggguucuuaugcauuauc

SEQ ID NO: 2551360 - RNA, 19 nt, Artificial Sequence
  Description of Artificial Sequence: Synthetic oligonucleotide
auuuguucauucugaguuu

SEQ ID NO: 2551361 - RNA, 19 nt, Artificial Sequence
  Description of Artificial Sequence: Synthetic oligonucleotide
guauauggaagcugaaagu

SEQ ID NO: 2551362 - RNA, 19 nt, Artificial Sequence
  Description of Artificial Sequence: Synthetic oligonucleotide
cuuaaggauucgaaggcaa

SEQ ID NO: 2551363 - RNA, 19 nt, Artificial Sequence
  Description of Artificial Sequence: Synthetic oligonucleotide
aucacaugcuggcauuacu

SEQ ID NO: 2551364 - RNA, 19 nt, Artificial Sequence
  Description of Artificial Sequence: Synthetic oligonucleotide
agacaucuuuccuugguua

SEQ ID NO: 2551365 - RNA, 19 nt, Artificial Sequence
  Description of Artificial Sequence: Synthetic oligonucleotide
ugccacucaaaaguugaug

SEQ ID NO: 2551366 - RNA, 19 nt, Artificial Sequence
  Description of Artificial Sequence: Synthetic oligonucleotide
uacuuuagauauggguucu

SEQ ID NO: 2551367 - RNA, 19 nt, Artificial Sequence
  Description of Artificial Sequence: Synthetic oligonucleotide
gucacaaaugauaucguaa

SEQ ID NO: 2551368 - RNA, 19 nt, Artificial Sequence
  Description of Artificial Sequence: Synthetic oligonucleotide
gcaaauuaauuugaggauc

SEQ ID NO: 2551369 - RNA, 19 nt, Artificial Sequence
  Description of Artificial Sequence: Synthetic oligonucleotide
aaggcucaugcagauagaa

SEQ ID NO: 2551370 - RNA, 19 nt, Artificial Sequence
  Description of Artificial Sequence: Synthetic oligonucleotide
ugcaugcguaauuuaucac

SEQ ID NO: 2551371 - RNA, 19 nt, Artificial Sequence
  Description of Artificial Sequence: Synthetic oligonucleotide
gaaauggugauuacugacu

SEQ ID NO: 2551372 - RNA, 19 nt, Artificial Sequence
  Description of Artificial Sequence: Synthetic oligonucleotide
uggcauuacuuuagauaug

SEQ ID NO: 2551373 - RNA, 19 nt, Artificial Sequence
  Description of Artificial Sequence: Synthetic oligonucleotide
aaccaaagcuuguucuauu

SEQ ID NO: 2551374 - RNA, 19 nt, Artificial Sequence
  Description of Artificial Sequence: Synthetic oligonucleotide
agaugguauauggaagcug

SEQ ID NO: 2551375 - RNA, 19 nt, Artificial Sequence
  Description of Artificial Sequence: Synthetic oligonucleotide
gacuuucccaauauaaaua

SEQ ID NO: 2551376 - RNA, 19 nt, Artificial Sequence
  Description of Artificial Sequence: Synthetic oligonucleotide
ugcuguaugaaggcucaug

SEQ ID NO: 2551377 - RNA, 19 nt, Artificial Sequence
  Description of Artificial Sequence: Synthetic oligonucleotide
gcaugcguaauuuaucaca

SEQ ID NO: 2551378 - RNA, 19 nt, Artificial Sequence
  Description of Artificial Sequence: Synthetic oligonucleotide
auaagguuggcgucacaaa

SEQ ID NO: 2551379 - RNA, 19 nt, Artificial Sequence
  Description of Artificial Sequence: Synthetic oligonucleotide
auauggaagcugaaaguga

SEQ ID NO: 2551380 - RNA, 19 nt, Artificial Sequence
  Description of Artificial Sequence: Synthetic oligonucleotide
ucucgacuaguucuucaaa

SEQ ID NO: 2551381 - RNA, 19 nt, Artificial Sequence
  Description of Artificial Sequence: Synthetic oligonucleotide
aguuaauauuauggguucu

SEQ ID NO: 2551382 - RNA, 19 nt, Artificial Sequence
  Description of Artificial Sequence: Synthetic oligonucleotide
uagaugguauauggaagcu

SEQ ID NO: 2551383 - RNA, 19 nt, Artificial Sequence
  Description of Artificial Sequence: Synthetic oligonucleotide
ggcaaaaccccacauuuuc

SEQ ID NO: 2551384 - RNA, 19 nt, Artificial Sequence
  Description of Artificial Sequence: Synthetic oligonucleotide
cugacuuucccaauauaaa

SEQ ID NO: 2551385 - RNA, 19 nt, Artificial Sequence
  Description of Artificial Sequence: Synthetic oligonucleotide
ggguucuuaugcauuaucc

SEQ ID NO: 2551386 - RNA, 19 nt, Artificial Sequence
  Description of Artificial Sequence: Synthetic oligonucleotide
uaaccaaagcuuguucuau

SEQ ID NO: 2551387 - RNA, 19 nt, Artificial Sequence
  Description of Artificial Sequence: Synthetic oligonucleotide
uuuccugcaugcguaauuu

SEQ ID NO: 2551388 - RNA, 19 nt, Artificial Sequence
  Description of Artificial Sequence: Synthetic oligonucleotide
agaaggcacucagucaaag

SEQ ID NO: 2551389 - RNA, 19 nt, Artificial Sequence
  Description of Artificial Sequence: Synthetic oligonucleotide
gcuacuuuaauaucuauuu

SEQ ID NO: 2551390 - RNA, 19 nt, Artificial Sequence
  Description of Artificial Sequence: Synthetic oligonucleotide
agcugaaagugacugcuuu

SEQ ID NO: 2551391 - RNA, 19 nt, Artificial Sequence
  Description of Artificial Sequence: Synthetic oligonucleotide
accaaagcuuguucuauuu

SEQ ID NO: 2551392 - RNA, 19 nt, Artificial Sequence
  Description of Artificial Sequence: Synthetic oligonucleotide
uauagaggucugguuaauc

SEQ ID NO: 2551393 - RNA, 19 nt, Artificial Sequence
  Description of Artificial Sequence: Synthetic oligonucleotide
aggucugguuaaucucgac

SEQ ID NO: 2551394 - RNA, 19 nt, Artificial Sequence
  Description of Artificial Sequence: Synthetic oligonucleotide
cucgacuaguucuucaaaa

SEQ ID NO: 2551395 - RNA, 19 nt, Artificial Sequence
  Description of Artificial Sequence: Synthetic oligonucleotide
aucucgacuaguucuucaa

SEQ ID NO: 2551396 - RNA, 19 nt, Artificial Sequence
  Description of Artificial Sequence: Synthetic oligonucleotide
cauaaagcauaagguuggc

SEQ ID NO: 2551397 - RNA, 19 nt, Artificial Sequence
  Description of Artificial Sequence: Synthetic oligonucleotide
acucagucaaagcuacuuu

SEQ ID NO: 2551398 - RNA, 19 nt, Artificial Sequence
  Description of Artificial Sequence: Synthetic oligonucleotide
guuggcgucacaaaugaua

SEQ ID NO: 2551399 - RNA, 19 nt, Artificial Sequence
  Description of Artificial Sequence: Synthetic oligonucleotide
gauauggguucuuaugcau

SEQ ID NO: 2551400 - RNA, 19 nt, Artificial Sequence
  Description of Artificial Sequence: Synthetic oligonucleotide
aguaguugcuuaucauauu

SEQ ID NO: 2551401 - RNA, 19 nt, Artificial Sequence
  Description of Artificial Sequence: Synthetic oligonucleotide
ggaggcaccuaguuagugc

SEQ ID NO: 2551402 - RNA, 19 nt, Artificial Sequence
  Description of Artificial Sequence: Synthetic oligonucleotide
guaaccaaagcuuguucua

SEQ ID NO: 2551403 - RNA, 19 nt, Artificial Sequence
  Description of Artificial Sequence: Synthetic oligonucleotide
agcauaagguuggcgucac

SEQ ID NO: 2551404 - RNA, 19 nt, Artificial Sequence
  Description of Artificial Sequence: Synthetic oligonucleotide
guaugaaggcucaugcaga

SEQ ID NO: 2551405 - RNA, 19 nt, Artificial Sequence
  Description of Artificial Sequence: Synthetic oligonucleotide
caguuacaaauaucacaug

SEQ ID NO: 2551406 - RNA, 19 nt, Artificial Sequence
  Description of Artificial Sequence: Synthetic oligonucleotide
gcauuauccaacauaaucu

SEQ ID NO: 2551407 - RNA, 19 nt, Artificial Sequence
  Description of Artificial Sequence: Synthetic oligonucleotide
cuauuugauagaugguaua

SEQ ID NO: 2551408 - RNA, 19 nt, Artificial Sequence
  Description of Artificial Sequence: Synthetic oligonucleotide
gcaugugccacucaaaagu

SEQ ID NO: 2551409 - RNA, 19 nt, Artificial Sequence
  Description of Artificial Sequence: Synthetic oligonucleotide
uuaucacaauucucacaaa

SEQ ID NO: 2551410 - RNA, 19 nt, Artificial Sequence
  Description of Artificial Sequence: Synthetic oligonucleotide
acaugcuggcauuacuuua

SEQ ID NO: 2551411 - RNA, 19 nt, Artificial Sequence
  Description of Artificial Sequence: Synthetic oligonucleotide
cucagucaaagcuacuuua

SEQ ID NO: 2551412 - RNA, 19 nt, Artificial Sequence
  Description of Artificial Sequence: Synthetic oligonucleotide
gcuuaucauauuaugaaaa

SEQ ID NO: 2551413 - RNA, 19 nt, Artificial Sequence
  Description of Artificial Sequence: Synthetic oligonucleotide
cuaguuagugcaguuaaua

SEQ ID NO: 2551414 - RNA, 19 nt, Artificial Sequence
  Description of Artificial Sequence: Synthetic oligonucleotide
cacaccuuaaggauucgaa

SEQ ID NO: 2551415 - RNA, 19 nt, Artificial Sequence
  Description of Artificial Sequence: Synthetic oligonucleotide
cagacauacacagaauaaa

SEQ ID NO: 2551416 - RNA, 19 nt, Artificial Sequence
  Description of Artificial Sequence: Synthetic oligonucleotide
gcuggcauuacuuuagaua

SEQ ID NO: 2551417 - RNA, 19 nt, Artificial Sequence
  Description of Artificial Sequence: Synthetic oligonucleotide
ugaauacaugacgcugcug

SEQ ID NO: 2551418 - RNA, 19 nt, Artificial Sequence
  Description of Artificial Sequence: Synthetic oligonucleotide
caguaauucuguuaaguau

SEQ ID NO: 2551419 - RNA, 19 nt, Artificial Sequence
  Description of Artificial Sequence: Synthetic oligonucleotide
ucuucacaguaauucuguu

SEQ ID NO: 2551420 - RNA, 19 nt, Artificial Sequence
  Description of Artificial Sequence: Synthetic oligonucleotide
cauaagguuggcgucacaa

SEQ ID NO: 2551421 - RNA, 19 nt, Artificial Sequence
  Description of Artificial Sequence: Synthetic oligonucleotide
gguuaaucucgacuaguuc

SEQ ID NO: 2551422 - RNA, 19 nt, Artificial Sequence
  Description of Artificial Sequence: Synthetic oligonucleotide
uacugacuuucccaauaua

SEQ ID NO: 2551423 - RNA, 19 nt, Artificial Sequence
  Description of Artificial Sequence: Synthetic oligonucleotide
auucgaaggcaaaacccca

SEQ ID NO: 2551424 - RNA, 19 nt, Artificial Sequence
  Description of Artificial Sequence: Synthetic oligonucleotide
ggaagcugaaagugacugc

SEQ ID NO: 2551425 - RNA, 19 nt, Artificial Sequence
  Description of Artificial Sequence: Synthetic oligonucleotide
agcuacuuuaauaucuauu

SEQ ID NO: 2551426 - RNA, 19 nt, Artificial Sequence
  Description of Artificial Sequence: Synthetic oligonucleotide
uacguaaccaaagcuuguu

SEQ ID NO: 2551427 - RNA, 19 nt, Artificial Sequence
  Description of Artificial Sequence: Synthetic oligonucleotide
guuuuaaguaguugcuuau

SEQ ID NO: 2551428 - RNA, 19 nt, Artificial Sequence
  Description of Artificial Sequence: Synthetic oligonucleotide
cuucaaaaugaccaugaau

SEQ ID NO: 2551429 - RNA, 19 nt, Artificial Sequence
  Description of Artificial Sequence: Synthetic oligonucleotide
gcguaauuuaucacaauuc

SEQ ID NO: 2551430 - RNA, 19 nt, Artificial Sequence
  Description of Artificial Sequence: Synthetic oligonucleotide
uaucacaugcuggcauuac

SEQ ID NO: 2551431 - RNA, 19 nt, Artificial Sequence
  Description of Artificial Sequence: Synthetic oligonucleotide
agaaguugcuuuauuuauu

SEQ ID NO: 2551432 - RNA, 19 nt, Artificial Sequence
  Description of Artificial Sequence: Synthetic oligonucleotide
auacaugacgcugcuguau

SEQ ID NO: 2551433 - RNA, 19 nt, Artificial Sequence
  Description of Artificial Sequence: Synthetic oligonucleotide
acaucuuuccuugguuacu

SEQ ID NO: 2551434 - RNA, 19 nt, Artificial Sequence
  Description of Artificial Sequence: Synthetic oligonucleotide
uagaaggcacucagucaaa

SEQ ID NO: 2551435 - RNA, 19 nt, Artificial Sequence
  Description of Artificial Sequence: Synthetic oligonucleotide
ugcuggcauuacuuuagau

SEQ ID NO: 2551436 - RNA, 19 nt, Artificial Sequence
  Description of Artificial Sequence: Synthetic oligonucleotide
caaauaucacaugcuggca

SEQ ID NO: 2551437 - RNA, 19 nt, Artificial Sequence
  Description of Artificial Sequence: Synthetic oligonucleotide
guaauucuguuaaguauua

SEQ ID NO: 2551438 - RNA, 19 nt, Artificial Sequence
  Description of Artificial Sequence: Synthetic oligonucleotide
uuauagaggucugguuaau

SEQ ID NO: 2551439 - RNA, 19 nt, Artificial Sequence
  Description of Artificial Sequence: Synthetic oligonucleotide
gccacucaaaaguugaugu

SEQ ID NO: 2551440 - RNA, 19 nt, Artificial Sequence
  Description of Artificial Sequence: Synthetic oligonucleotide
auacguaaccaaagcuugu

SEQ ID NO: 2551441 - RNA, 19 nt, Artificial Sequence
  Description of Artificial Sequence: Synthetic oligonucleotide
ugggcaugugccacucaaa

SEQ ID NO: 2551442 - RNA, 19 nt, Artificial Sequence
  Description of Artificial Sequence: Synthetic oligonucleotide
cuauuucugucuugagaaa

SEQ ID NO: 2551443 - RNA, 19 nt, Artificial Sequence
  Description of Artificial Sequence: Synthetic oligonucleotide
aggcucaugcagauagaag

SEQ ID NO: 2551444 - RNA, 19 nt, Artificial Sequence
  Description of Artificial Sequence: Synthetic oligonucleotide
uaaucucgacuaguucuuc

SEQ ID NO: 2551445 - RNA, 19 nt, Artificial Sequence
  Description of Artificial Sequence: Synthetic oligonucleotide
cacaguaauucuguuaagu

SEQ ID NO: 2551446 - RNA, 19 nt, Artificial Sequence
  Description of Artificial Sequence: Synthetic oligonucleotide
gaaggcaaaaccccacauu

SEQ ID NO: 2551447 - RNA, 19 nt, Artificial Sequence
  Description of Artificial Sequence: Synthetic oligonucleotide
caauucucacaaauucaua

SEQ ID NO: 2551448 - RNA, 19 nt, Artificial Sequence
  Description of Artificial Sequence: Synthetic oligonucleotide
augcuggcauuacuuuaga

SEQ ID NO: 2551449 - RNA, 19 nt, Artificial Sequence
  Description of Artificial Sequence: Synthetic oligonucleotide
augcguaauuuaucacaau

SEQ ID NO: 2551450 - RNA, 19 nt, Artificial Sequence
  Description of Artificial Sequence: Synthetic oligonucleotide
cccaauauaaauacaaguu

SEQ ID NO: 2551451 - RNA, 19 nt, Artificial Sequence
  Description of Artificial Sequence: Synthetic oligonucleotide
auauggguucuuaugcauu

SEQ ID NO: 2551452 - RNA, 19 nt, Artificial Sequence
  Description of Artificial Sequence: Synthetic oligonucleotide
auucauuagcaaacauaau

SEQ ID NO: 2551453 - RNA, 19 nt, Artificial Sequence
  Description of Artificial Sequence: Synthetic oligonucleotide
gcuuguucuauuucugucu

SEQ ID NO: 2551454 - RNA, 19 nt, Artificial Sequence
  Description of Artificial Sequence: Synthetic oligonucleotide
aaccaaauggaggcaccua

SEQ ID NO: 2551455 - RNA, 19 nt, Artificial Sequence
  Description of Artificial Sequence: Synthetic oligonucleotide
auacaaguuuuaaguaguu

SEQ ID NO: 2551456 - RNA, 19 nt, Artificial Sequence
  Description of Artificial Sequence: Synthetic oligonucleotide
ccugcaugcguaauuuauc

SEQ ID NO: 2551457 - RNA, 19 nt, Artificial Sequence
  Description of Artificial Sequence: Synthetic oligonucleotide
ggcacucagucaaagcuac

SEQ ID NO: 2551458 - RNA, 19 nt, Artificial Sequence
  Description of Artificial Sequence: Synthetic oligonucleotide
aucacaccuuaaggauucg

SEQ ID NO: 2551459 - RNA, 19 nt, Artificial Sequence
  Description of Artificial Sequence: Synthetic oligonucleotide
cgacuaguucuucaaaaug

SEQ ID NO: 2551460 - RNA, 19 nt, Artificial Sequence
  Description of Artificial Sequence: Synthetic oligonucleotide
gauuacugacuuucccaau

SEQ ID NO: 2551461 - RNA, 19 nt, Artificial Sequence
  Description of Artificial Sequence: Synthetic oligonucleotide
auaucacaugcuggcauua

SEQ ID NO: 2551462 - RNA, 19 nt, Artificial Sequence
  Description of Artificial Sequence: Synthetic oligonucleotide
uuccugcaugcguaauuua

SEQ ID NO: 2551463 - RNA, 19 nt, Artificial Sequence
  Description of Artificial Sequence: Synthetic oligonucleotide
gcauuacuuuagauauggg

SEQ ID NO: 2551464 - RNA, 19 nt, Artificial Sequence
  Description of Artificial Sequence: Synthetic oligonucleotide
uuccugggcaugugccacu

SEQ ID NO: 2551465 - RNA, 19 nt, Artificial Sequence
  Description of Artificial Sequence: Synthetic oligonucleotide
uggcgucacaaaugauauc

SEQ ID NO: 2551466 - RNA, 19 nt, Artificial Sequence
  Description of Artificial Sequence: Synthetic oligonucleotide
cuaucacaccuuaaggauu

SEQ ID NO: 2551467 - RNA, 19 nt, Artificial Sequence
  Description of Artificial Sequence: Synthetic oligonucleotide
cguaauuuaucacaauucu

SEQ ID NO: 2551468 - RNA, 19 nt, Artificial Sequence
  Description of Artificial Sequence: Synthetic oligonucleotide
ggucugguuaaucucgacu

SEQ ID NO: 2551469 - RNA, 19 nt, Artificial Sequence
  Description of Artificial Sequence: Synthetic oligonucleotide
auggaagcugaaagugacu

SEQ ID NO: 2551470 - RNA, 19 nt, Artificial Sequence
  Description of Artificial Sequence: Synthetic oligonucleotide
gaggucugguuaaucucga

SEQ ID NO: 2551471 - RNA, 19 nt, Artificial Sequence
  Description of Artificial Sequence: Synthetic oligonucleotide
cuacuuuaauaucuauuuu

SEQ ID NO: 2551472 - RNA, 19 nt, Artificial Sequence
  Description of Artificial Sequence: Synthetic oligonucleotide
gggcaugugccacucaaaa

SEQ ID NO: 2551473 - RNA, 19 nt, Artificial Sequence
  Description of Artificial Sequence: Synthetic oligonucleotide
cugggcaugugccacucaa

SEQ ID NO: 2551474 - RNA, 19 nt, Artificial Sequence
  Description of Artificial Sequence: Synthetic oligonucleotide
cauaaucuucacaguaauu

SEQ ID NO: 2551475 - RNA, 19 nt, Artificial Sequence
  Description of Artificial Sequence: Synthetic oligonucleotide
gcccacaaauucauuagca

SEQ ID NO: 2551476 - RNA, 19 nt, Artificial Sequence
  Description of Artificial Sequence: Synthetic oligonucleotide
aggcacucagucaaagcua

SEQ ID NO: 2551477 - RNA, 19 nt, Artificial Sequence
  Description of Artificial Sequence: Synthetic oligonucleotide
caugacgcugcuguaugaa

SEQ ID NO: 2551478 - RNA, 19 nt, Artificial Sequence
  Description of Artificial Sequence: Synthetic oligonucleotide
caugugccacucaaaaguu

SEQ ID NO: 2551479 - RNA, 19 nt, Artificial Sequence
  Description of Artificial Sequence: Synthetic oligonucleotide
acuuuagauauggguucuu

SEQ ID NO: 2551480 - RNA, 19 nt, Artificial Sequence
  Description of Artificial Sequence: Synthetic oligonucleotide
cagauagaaggcacucagu

SEQ ID NO: 2551481 - RNA, 19 nt, Artificial Sequence
  Description of Artificial Sequence: Synthetic oligonucleotide
auggguucuuaugcauuau

SEQ ID NO: 2551482 - RNA, 19 nt, Artificial Sequence
  Description of Artificial Sequence: Synthetic oligonucleotide
gcugcuguaugaaggcuca

SEQ ID NO: 2551483 - RNA, 19 nt, Artificial Sequence
  Description of Artificial Sequence: Synthetic oligonucleotide
acuuuccugcaugcguaau

SEQ ID NO: 2551484 - RNA, 19 nt, Artificial Sequence
  Description of Artificial Sequence: Synthetic oligonucleotide
aggcaccuaguuagugcag

SEQ ID NO: 2551485 - RNA, 19 nt, Artificial Sequence
  Description of Artificial Sequence: Synthetic oligonucleotide
aggcaaaaccccacauuuu

SEQ ID NO: 2551486 - RNA, 19 nt, Artificial Sequence
  Description of Artificial Sequence: Synthetic oligonucleotide
augcauuauccaacauaau

SEQ ID NO: 2551487 - RNA, 19 nt, Artificial Sequence
  Description of Artificial Sequence: Synthetic oligonucleotide
cuuuccugcaugcguaauu

SEQ ID NO: 2551488 - RNA, 19 nt, Artificial Sequence
  Description of Artificial Sequence: Synthetic oligonucleotide
cguaaccaaagcuuguucu

SEQ ID NO: 2551489 - RNA, 19 nt, Artificial Sequence
  Description of Artificial Sequence: Synthetic oligonucleotide
ccuuaaggauucgaaggca

SEQ ID NO: 2551490 - RNA, 19 nt, Artificial Sequence
  Description of Artificial Sequence: Synthetic oligonucleotide
cacaugcuggcauuacuuu

SEQ ID NO: 2551491 - RNA, 19 nt, Artificial Sequence
  Description of Artificial Sequence: Synthetic oligonucleotide
cacucagucaaagcuacuu

SEQ ID NO: 2551492 - RNA, 19 nt, Artificial Sequence
  Description of Artificial Sequence: Synthetic oligonucleotide
caccuaguuagugcaguua

SEQ ID NO: 2551493 - RNA, 19 nt, Artificial Sequence
  Description of Artificial Sequence: Synthetic oligonucleotide
ccaacauaaucuucacagu

SEQ ID NO: 2551494 - RNA, 19 nt, Artificial Sequence
  Description of Artificial Sequence: Synthetic oligonucleotide
ccacauuuuccccucuaaa

SEQ ID NO: 2551495 - RNA, 19 nt, Artificial Sequence
  Description of Artificial Sequence: Synthetic oligonucleotide
gcugaaagugacugcuuuu

SEQ ID NO: 2551496 - RNA, 19 nt, Artificial Sequence
  Description of Artificial Sequence: Synthetic oligonucleotide
cgucacaaaugauaucgua

SEQ ID NO: 2551497 - RNA, 19 nt, Artificial Sequence
  Description of Artificial Sequence: Synthetic oligonucleotide
ggcaccuaguuagugcagu

SEQ ID NO: 2551498 - RNA, 19 nt, Artificial Sequence
  Description of Artificial Sequence: Synthetic oligonucleotide
ccaaauggaggcaccuagu

SEQ ID NO: 2551499 - RNA, 19 nt, Artificial Sequence
  Description of Artificial Sequence: Synthetic oligonucleotide
cccacauuuuccccucuaa

SEQ ID NO: 2551500 - RNA, 19 nt, Artificial Sequence
  Description of Artificial Sequence: Synthetic oligonucleotide
gcauaagguuggcgucaca

SEQ ID NO: 2551501 - RNA, 19 nt, Artificial Sequence
  Description of Artificial Sequence: Synthetic oligonucleotide
ccuaguuagugcaguuaau

SEQ ID NO: 2551502 - RNA, 19 nt, Artificial Sequence
  Description of Artificial Sequence: Synthetic oligonucleotide
gugccacucaaaaguugau

SEQ ID NO: 2551503 - RNA, 19 nt, Artificial Sequence
  Description of Artificial Sequence: Synthetic oligonucleotide
gcaccuaguuagugcaguu

SEQ ID NO: 2551504 - RNA, 19 nt, Artificial Sequence
  Description of Artificial Sequence: Synthetic oligonucleotide
gcgucacaaaugauaucgu

SEQ ID NO: 2551505 - RNA, 19 nt, Artificial Sequence
  Description of Artificial Sequence: Synthetic oligonucleotide
gguuggcgucacaaaugau

SEQ ID NO: 2551506 - RNA, 19 nt, Artificial Sequence
  Description of Artificial Sequence: Synthetic oligonucleotide
ccugggcaugugccacuca

SEQ ID NO: 2551507 - RNA, 19 nt, Artificial Sequence
  Description of Artificial Sequence: Synthetic oligonucleotide
cugcuguaugaaggcucau

SEQ ID NO: 2551508 - RNA, 19 nt, Artificial Sequence
  Description of Artificial Sequence: Synthetic oligonucleotide
auuacuaucauacaaaaug

SEQ ID NO: 2551509 - RNA, 19 nt, Artificial Sequence
  Description of Artificial Sequence: Synthetic oligonucleotide
aaacaauugacugauaucg

SEQ ID NO: 2551510 - RNA, 19 nt, Artificial Sequence
  Description of Artificial Sequence: Synthetic oligonucleotide
gauacgaacaguuucaagg

SEQ ID NO: 2551511 - RNA, 19 nt, Artificial Sequence
  Description of Artificial Sequence: Synthetic oligonucleotide
uaucguaugugauagaggg

SEQ ID NO: 2551512 - RNA, 19 nt, Artificial Sequence
  Description of Artificial Sequence: Synthetic oligonucleotide
acugcuaaagagcagauac

SEQ ID NO: 2551513 - RNA, 19 nt, Artificial Sequence
  Description of Artificial Sequence: Synthetic oligonucleotide
aauggugugagacaucgcg

SEQ ID NO: 2551514 - RNA, 19 nt, Artificial Sequence
  Description of Artificial Sequence: Synthetic oligonucleotide
aacaggauuacuaucauac

SEQ ID NO: 2551515 - RNA, 19 nt, Artificial Sequence
  Description of Artificial Sequence: Synthetic oligonucleotide
uuuguuauaaggcugguac

SEQ ID NO: 2551516 - RNA, 19 nt, Artificial Sequence
  Description of Artificial Sequence: Synthetic oligonucleotide
acauaaguaaccuugucac

SEQ ID NO: 2551517 - RNA, 19 nt, Artificial Sequence
  Description of Artificial Sequence: Synthetic oligonucleotide
ucuaguaacaaaauggaaa

SEQ ID NO: 2551518 - RNA, 19 nt, Artificial Sequence
  Description of Artificial Sequence: Synthetic oligonucleotide
auaaaaucaaacaauugac

SEQ ID NO: 2551519 - RNA, 19 nt, Artificial Sequence
  Description of Artificial Sequence: Synthetic oligonucleotide
uguaccagcaaaauggugu

SEQ ID NO: 2551520 - RNA, 19 nt, Artificial Sequence
  Description of Artificial Sequence: Synthetic oligonucleotide
aaaucaaacaauugacuga

SEQ ID NO: 2551521 - RNA, 19 nt, Artificial Sequence
  Description of Artificial Sequence: Synthetic oligonucleotide
uacaaaauguucacuacag

SEQ ID NO: 2551522 - RNA, 19 nt, Artificial Sequence
  Description of Artificial Sequence: Synthetic oligonucleotide
agagaauacaacuacagaa

SEQ ID NO: 2551523 - RNA, 19 nt, Artificial Sequence
  Description of Artificial Sequence: Synthetic oligonucleotide
aacgcuuugcugcagccgc

SEQ ID NO: 2551524 - RNA, 19 nt, Artificial Sequence
  Description of Artificial Sequence: Synthetic oligonucleotide
cuaguaacaaaauggaaac

SEQ ID NO: 2551525 - RNA, 19 nt, Artificial Sequence
  Description of Artificial Sequence: Synthetic oligonucleotide
uguuucaugucauacauuc

SEQ ID NO: 2551526 - RNA, 19 nt, Artificial Sequence
  Description of Artificial Sequence: Synthetic oligonucleotide
uaaaaucaaacaauugacu

SEQ ID NO: 2551527 - RNA, 19 nt, Artificial Sequence
  Description of Artificial Sequence: Synthetic oligonucleotide
ucaauaaaaucaaacaauu

SEQ ID NO: 2551528 - RNA, 19 nt, Artificial Sequence
  Description of Artificial Sequence: Synthetic oligonucleotide
uccaaucuuuguuauaagg

SEQ ID NO: 2551529 - RNA, 19 nt, Artificial Sequence
  Description of Artificial Sequence: Synthetic oligonucleotide
uuacuaucauacaaaaugu

SEQ ID NO: 2551530 - RNA, 19 nt, Artificial Sequence
  Description of Artificial Sequence: Synthetic oligonucleotide
ugagacaucgcgccaaacg

SEQ ID NO: 2551531 - RNA, 19 nt, Artificial Sequence
  Description of Artificial Sequence: Synthetic oligonucleotide
cuaaagagcagauacgaac

SEQ ID NO: 2551532 - RNA, 19 nt, Artificial Sequence
  Description of Artificial Sequence: Synthetic oligonucleotide
accuguuucaagcccaucc

SEQ ID NO: 2551533 - RNA, 19 nt, Artificial Sequence
  Description of Artificial Sequence: Synthetic oligonucleotide
ucgucaauaaaaucaaaca

SEQ ID NO: 2551534 - RNA, 19 nt, Artificial Sequence
  Description of Artificial Sequence: Synthetic oligonucleotide
ugucauacauucaaucuug

SEQ ID NO: 2551535 - RNA, 19 nt, Artificial Sequence
  Description of Artificial Sequence: Synthetic oligonucleotide
uuacuucccagccuguugg

SEQ ID NO: 2551536 - RNA, 19 nt, Artificial Sequence
  Description of Artificial Sequence: Synthetic oligonucleotide
agcagauacgaacaguuuc

SEQ ID NO: 2551537 - RNA, 19 nt, Artificial Sequence
  Description of Artificial Sequence: Synthetic oligonucleotide
gauaucguaugugauagag

SEQ ID NO: 2551538 - RNA, 19 nt, Artificial Sequence
  Description of Artificial Sequence: Synthetic oligonucleotide
aauugacugauaucguaug

SEQ ID NO: 2551539 - RNA, 19 nt, Artificial Sequence
  Description of Artificial Sequence: Synthetic oligonucleotide
acuacagcacgcuguaugc

SEQ ID NO: 2551540 - RNA, 19 nt, Artificial Sequence
  Description of Artificial Sequence: Synthetic oligonucleotide
acuaucauacaaaauguuc

SEQ ID NO: 2551541 - RNA, 19 nt, Artificial Sequence
  Description of Artificial Sequence: Synthetic oligonucleotide
ucauagucagcguaagucc

SEQ ID NO: 2551542 - RNA, 19 nt, Artificial Sequence
  Description of Artificial Sequence: Synthetic oligonucleotide
agaucauucauguuucaug

SEQ ID NO: 2551543 - RNA, 19 nt, Artificial Sequence
  Description of Artificial Sequence: Synthetic oligonucleotide
cagaucgucaauaaaauca

SEQ ID NO: 2551544 - RNA, 19 nt, Artificial Sequence
  Description of Artificial Sequence: Synthetic oligonucleotide
cuaucauacaaaauguuca

SEQ ID NO: 2551545 - RNA, 19 nt, Artificial Sequence
  Description of Artificial Sequence: Synthetic oligonucleotide
acgucuguguaucagcucg

SEQ ID NO: 2551546 - RNA, 19 nt, Artificial Sequence
  Description of Artificial Sequence: Synthetic oligonucleotide
acuggaaccaaccuuaaau

SEQ ID NO: 2551547 - RNA, 19 nt, Artificial Sequence
  Description of Artificial Sequence: Synthetic oligonucleotide
caugcacucauucacagac

SEQ ID NO: 2551548 - RNA, 19 nt, Artificial Sequence
  Description of Artificial Sequence: Synthetic oligonucleotide
gaggacauaaguaaccuug

SEQ ID NO: 2551549 - RNA, 19 nt, Artificial Sequence
  Description of Artificial Sequence: Synthetic oligonucleotide
gacauaaguaaccuuguca

SEQ ID NO: 2551550 - RNA, 19 nt, Artificial Sequence
  Description of Artificial Sequence: Synthetic oligonucleotide
agaaugaaaagaucauuca

SEQ ID NO: 2551551 - RNA, 19 nt, Artificial Sequence
  Description of Artificial Sequence: Synthetic oligonucleotide
ucguaugugauagaggggc

SEQ ID NO: 2551552 - RNA, 19 nt, Artificial Sequence
  Description of Artificial Sequence: Synthetic oligonucleotide
aauacaacuacagaacauu

SEQ ID NO: 2551553 - RNA, 19 nt, Artificial Sequence
  Description of Artificial Sequence: Synthetic oligonucleotide
agaauacaacuacagaaca

SEQ ID NO: 2551554 - RNA, 19 nt, Artificial Sequence
  Description of Artificial Sequence: Synthetic oligonucleotide
aaguaaccuugucaccacc

SEQ ID NO: 2551555 - RNA, 19 nt, Artificial Sequence
  Description of Artificial Sequence: Synthetic oligonucleotide
uuguuauaaggcugguacg

SEQ ID NO: 2551556 - RNA, 19 nt, Artificial Sequence
  Description of Artificial Sequence: Synthetic oligonucleotide
ugccagaucgucaauaaaa

SEQ ID NO: 2551557 - RNA, 19 nt, Artificial Sequence
  Description of Artificial Sequence: Synthetic oligonucleotide
uaucauacaaaauguucac

SEQ ID NO: 2551558 - RNA, 19 nt, Artificial Sequence
  Description of Artificial Sequence: Synthetic oligonucleotide
aacaguuucaaggacugga

SEQ ID NO: 2551559 - RNA, 19 nt, Artificial Sequence
  Description of Artificial Sequence: Synthetic oligonucleotide
aauguucacuacagcacgc

SEQ ID NO: 2551560 - RNA, 19 nt, Artificial Sequence
  Description of Artificial Sequence: Synthetic oligonucleotide
gagaauacaacuacagaac

SEQ ID NO: 2551561 - RNA, 19 nt, Artificial Sequence
  Description of Artificial Sequence: Synthetic oligonucleotide
ggcucuaguaacaaaaugg

SEQ ID NO: 2551562 - RNA, 19 nt, Artificial Sequence
  Description of Artificial Sequence: Synthetic oligonucleotide
guaugcaccuguuucaagc

SEQ ID NO: 2551563 - RNA, 19 nt, Artificial Sequence
  Description of Artificial Sequence: Synthetic oligonucleotide
aauggaaacaggauuacua

SEQ ID NO: 2551564 - RNA, 19 nt, Artificial Sequence
  Description of Artificial Sequence: Synthetic oligonucleotide
auaaguaaccuugucacca

SEQ ID NO: 2551565 - RNA, 19 nt, Artificial Sequence
  Description of Artificial Sequence: Synthetic oligonucleotide
ucucugaauuaucauaaaa

SEQ ID NO: 2551566 - RNA, 19 nt, Artificial Sequence
  Description of Artificial Sequence: Synthetic oligonucleotide
gagacaucgcgccaaacgc

SEQ ID NO: 2551567 - RNA, 19 nt, Artificial Sequence
  Description of Artificial Sequence: Synthetic oligonucleotide
cugauaucguaugugauag

SEQ ID NO: 2551568 - RNA, 19 nt, Artificial Sequence
  Description of Artificial Sequence: Synthetic oligonucleotide
ugacugauaucguauguga

SEQ ID NO: 2551569 - RNA, 19 nt, Artificial Sequence
  Description of Artificial Sequence: Synthetic oligonucleotide
cuucagguguucuucauac

SEQ ID NO: 2551570 - RNA, 19 nt, Artificial Sequence
  Description of Artificial Sequence: Synthetic oligonucleotide
ucauguuucaugucauaca

SEQ ID NO: 2551571 - RNA, 19 nt, Artificial Sequence
  Description of Artificial Sequence: Synthetic oligonucleotide
uuucacuaagacuuuccca

SEQ ID NO: 2551572 - RNA, 19 nt, Artificial Sequence
  Description of Artificial Sequence: Synthetic oligonucleotide
cauacaaaauguucacuac

SEQ ID NO: 2551573 - RNA, 19 nt, Artificial Sequence
  Description of Artificial Sequence: Synthetic oligonucleotide
uacacaagacagcugagau

SEQ ID NO: 2551574 - RNA, 19 nt, Artificial Sequence
  Description of Artificial Sequence: Synthetic oligonucleotide
auacgaacaguuucaagga

SEQ ID NO: 2551575 - RNA, 19 nt, Artificial Sequence
  Description of Artificial Sequence: Synthetic oligonucleotide
ugcuaaagagcagauacga

SEQ ID NO: 2551576 - RNA, 19 nt, Artificial Sequence
  Description of Artificial Sequence: Synthetic oligonucleotide
uguguaucagcucgguaca

SEQ ID NO: 2551577 - RNA, 19 nt, Artificial Sequence
  Description of Artificial Sequence: Synthetic oligonucleotide
acuaagacuuucccagagg

SEQ ID NO: 2551578 - RNA, 19 nt, Artificial Sequence
  Description of Artificial Sequence: Synthetic oligonucleotide
uguuauaaggcugguacgu

SEQ ID NO: 2551579 - RNA, 19 nt, Artificial Sequence
  Description of Artificial Sequence: Synthetic oligonucleotide
caaucuuggcucuaguaac

SEQ ID NO: 2551580 - RNA, 19 nt, Artificial Sequence
  Description of Artificial Sequence: Synthetic oligonucleotide
uguuucaagcccaucccca

SEQ ID NO: 2551581 - RNA, 19 nt, Artificial Sequence
  Description of Artificial Sequence: Synthetic oligonucleotide
uauaaggcugguacgucug

SEQ ID NO: 2551582 - RNA, 19 nt, Artificial Sequence
  Description of Artificial Sequence: Synthetic oligonucleotide
uucagaaugaaaagaucau

SEQ ID NO: 2551583 - RNA, 19 nt, Artificial Sequence
  Description of Artificial Sequence: Synthetic oligonucleotide
uuauaaggcugguacgucu

SEQ ID NO: 2551584 - RNA, 19 nt, Artificial Sequence
  Description of Artificial Sequence: Synthetic oligonucleotide
aucagcucgguacacaaga

SEQ ID NO: 2551585 - RNA, 19 nt, Artificial Sequence
  Description of Artificial Sequence: Synthetic oligonucleotide
ccaaucuuuguuauaaggc

SEQ ID NO: 2551586 - RNA, 19 nt, Artificial Sequence
  Description of Artificial Sequence: Synthetic oligonucleotide
ucauacauucaaucuuggc

SEQ ID NO: 2551587 - RNA, 19 nt, Artificial Sequence
  Description of Artificial Sequence: Synthetic oligonucleotide
gaucauucauguuucaugu

SEQ ID NO: 2551588 - RNA, 19 nt, Artificial Sequence
  Description of Artificial Sequence: Synthetic oligonucleotide
cuuccaugcacucauucac

SEQ ID NO: 2551589 - RNA, 19 nt, Artificial Sequence
  Description of Artificial Sequence: Synthetic oligonucleotide
aggguuagugcacucacug

SEQ ID NO: 2551590 - RNA, 19 nt, Artificial Sequence
  Description of Artificial Sequence: Synthetic oligonucleotide
uaugcaccuguuucaagcc

SEQ ID NO: 2551591 - RNA, 19 nt, Artificial Sequence
  Description of Artificial Sequence: Synthetic oligonucleotide
gugauagaggggcuguugg

SEQ ID NO: 2551592 - RNA, 19 nt, Artificial Sequence
  Description of Artificial Sequence: Synthetic oligonucleotide
ugauagaggggcuguuggg

SEQ ID NO: 2551593 - RNA, 19 nt, Artificial Sequence
  Description of Artificial Sequence: Synthetic oligonucleotide
cauaaguaaccuugucacc

SEQ ID NO: 2551594 - RNA, 19 nt, Artificial Sequence
  Description of Artificial Sequence: Synthetic oligonucleotide
aguaaccuugucaccaccc

SEQ ID NO: 2551595 - RNA, 19 nt, Artificial Sequence
  Description of Artificial Sequence: Synthetic oligonucleotide
aucuuuguuauaaggcugg

SEQ ID NO: 2551596 - RNA, 19 nt, Artificial Sequence
  Description of Artificial Sequence: Synthetic oligonucleotide
cucauagucagcguaaguc

SEQ ID NO: 2551597 - RNA, 19 nt, Artificial Sequence
  Description of Artificial Sequence: Synthetic oligonucleotide
ugguuucagaaugaaaaga

SEQ ID NO: 2551598 - RNA, 19 nt, Artificial Sequence
  Description of Artificial Sequence: Synthetic oligonucleotide
aaggagcacauagaucuuc

SEQ ID NO: 2551599 - RNA, 19 nt, Artificial Sequence
  Description of Artificial Sequence: Synthetic oligonucleotide
caaacaauugacugauauc

SEQ ID NO: 2551600 - RNA, 19 nt, Artificial Sequence
  Description of Artificial Sequence: Synthetic oligonucleotide
acacaagacagcugagauc

SEQ ID NO: 2551601 - RNA, 19 nt, Artificial Sequence
  Description of Artificial Sequence: Synthetic oligonucleotide
cauacauucaaucuuggcu

SEQ ID NO: 2551602 - RNA, 19 nt, Artificial Sequence
  Description of Artificial Sequence: Synthetic oligonucleotide
ugcacucauucacagacuc

SEQ ID NO: 2551603 - RNA, 19 nt, Artificial Sequence
  Description of Artificial Sequence: Synthetic oligonucleotide
uggcucuaguaacaaaaug

SEQ ID NO: 2551604 - RNA, 19 nt, Artificial Sequence
  Description of Artificial Sequence: Synthetic oligonucleotide
gauccaaucuuuguuauaa

SEQ ID NO: 2551605 - RNA, 19 nt, Artificial Sequence
  Description of Artificial Sequence: Synthetic oligonucleotide
uugacugauaucguaugug

SEQ ID NO: 2551606 - RNA, 19 nt, Artificial Sequence
  Description of Artificial Sequence: Synthetic oligonucleotide
uggugugagacaucgcgcc

SEQ ID NO: 2551607 - RNA, 19 nt, Artificial Sequence
  Description of Artificial Sequence: Synthetic oligonucleotide
auggaaacaggauuacuau

SEQ ID NO: 2551608 - RNA, 19 nt, Artificial Sequence
  Description of Artificial Sequence: Synthetic oligonucleotide
auuacuucccagccuguug

SEQ ID NO: 2551609 - RNA, 19 nt, Artificial Sequence
  Description of Artificial Sequence: Synthetic oligonucleotide
auugacugauaucguaugu

SEQ ID NO: 2551610 - RNA, 19 nt, Artificial Sequence
  Description of Artificial Sequence: Synthetic oligonucleotide
aaagaucauucauguuuca

SEQ ID NO: 2551611 - RNA, 19 nt, Artificial Sequence
  Description of Artificial Sequence: Synthetic oligonucleotide
agcaaaauggugugagaca

SEQ ID NO: 2551612 - RNA, 19 nt, Artificial Sequence
  Description of Artificial Sequence: Synthetic oligonucleotide
augucauacauucaaucuu

SEQ ID NO: 2551613 - RNA, 19 nt, Artificial Sequence
  Description of Artificial Sequence: Synthetic oligonucleotide
cugcuaaagagcagauacg

SEQ ID NO: 2551614 - RNA, 19 nt, Artificial Sequence
  Description of Artificial Sequence: Synthetic oligonucleotide
aaaggagcaaagggcaaug

SEQ ID NO: 2551615 - RNA, 19 nt, Artificial Sequence
  Description of Artificial Sequence: Synthetic oligonucleotide
aaggacuggaaccaaccuu

SEQ ID NO: 2551616 - RNA, 19 nt, Artificial Sequence
  Description of Artificial Sequence: Synthetic oligonucleotide
cuaagacuuucccagagga

SEQ ID NO: 2551617 - RNA, 19 nt, Artificial Sequence
  Description of Artificial Sequence: Synthetic oligonucleotide
agugcacucacugcuaaag

SEQ ID NO: 2551618 - RNA, 19 nt, Artificial Sequence
  Description of Artificial Sequence: Synthetic oligonucleotide
auaaaggguuagugcacuc

SEQ ID NO: 2551619 - RNA, 19 nt, Artificial Sequence
  Description of Artificial Sequence: Synthetic oligonucleotide
agcacauagaucuucucuu

SEQ ID NO: 2551620 - RNA, 19 nt, Artificial Sequence
  Description of Artificial Sequence: Synthetic oligonucleotide
aaacgcuuugcugcagccg

SEQ ID NO: 2551621 - RNA, 19 nt, Artificial Sequence
  Description of Artificial Sequence: Synthetic oligonucleotide
uguucacuacagcacgcug

SEQ ID NO: 2551622 - RNA, 19 nt, Artificial Sequence
  Description of Artificial Sequence: Synthetic oligonucleotide
agauacgaacaguuucaag

SEQ ID NO: 2551623 - RNA, 19 nt, Artificial Sequence
  Description of Artificial Sequence: Synthetic oligonucleotide
uacuaucauacaaaauguu

SEQ ID NO: 2551624 - RNA, 19 nt, Artificial Sequence
  Description of Artificial Sequence: Synthetic oligonucleotide
acuacagaacauuuucuuu

SEQ ID NO: 2551625 - RNA, 19 nt, Artificial Sequence
  Description of Artificial Sequence: Synthetic oligonucleotide
aaauggaaacaggauuacu

SEQ ID NO: 2551626 - RNA, 19 nt, Artificial Sequence
  Description of Artificial Sequence: Synthetic oligonucleotide
agcucgguacacaagacag

SEQ ID NO: 2551627 - RNA, 19 nt, Artificial Sequence
  Description of Artificial Sequence: Synthetic oligonucleotide
uccucucugaauuaucaua

SEQ ID NO: 2551628 - RNA, 19 nt, Artificial Sequence
  Description of Artificial Sequence: Synthetic oligonucleotide
ggugguuucagaaugaaaa

SEQ ID NO: 2551629 - RNA, 19 nt, Artificial Sequence
  Description of Artificial Sequence: Synthetic oligonucleotide
uacgaacaguuucaaggac

SEQ ID NO: 2551630 - RNA, 19 nt, Artificial Sequence
  Description of Artificial Sequence: Synthetic oligonucleotide
uucaugucauacauucaau

SEQ ID NO: 2551631 - RNA, 19 nt, Artificial Sequence
  Description of Artificial Sequence: Synthetic oligonucleotide
aaacaggauuacuaucaua

SEQ ID NO: 2551632 - RNA, 19 nt, Artificial Sequence
  Description of Artificial Sequence: Synthetic oligonucleotide
auaucguaugugauagagg

SEQ ID NO: 2551633 - RNA, 19 nt, Artificial Sequence
  Description of Artificial Sequence: Synthetic oligonucleotide
aaaaggagcaaagggcaau

SEQ ID NO: 2551634 - RNA, 19 nt, Artificial Sequence
  Description of Artificial Sequence: Synthetic oligonucleotide
cacuacagcacgcuguaug

SEQ ID NO: 2551635 - RNA, 19 nt, Artificial Sequence
  Description of Artificial Sequence: Synthetic oligonucleotide
uucaaucuuggcucuagua

SEQ ID NO: 2551636 - RNA, 19 nt, Artificial Sequence
  Description of Artificial Sequence: Synthetic oligonucleotide
uacauucaaucuuggcucu

SEQ ID NO: 2551637 - RNA, 19 nt, Artificial Sequence
  Description of Artificial Sequence: Synthetic oligonucleotide
guaccagcaaaauggugug

SEQ ID NO: 2551638 - RNA, 19 nt, Artificial Sequence
  Description of Artificial Sequence: Synthetic oligonucleotide
uaaguaaccuugucaccac

SEQ ID NO: 2551639 - RNA, 19 nt, Artificial Sequence
  Description of Artificial Sequence: Synthetic oligonucleotide
caacucaauuacuucccag

SEQ ID NO: 2551640 - RNA, 19 nt, Artificial Sequence
  Description of Artificial Sequence: Synthetic oligonucleotide
aaucuuggcucuaguaaca

SEQ ID NO: 2551641 - RNA, 19 nt, Artificial Sequence
  Description of Artificial Sequence: Synthetic oligonucleotide
aaauggugugagacaucgc

SEQ ID NO: 2551642 - RNA, 19 nt, Artificial Sequence
  Description of Artificial Sequence: Synthetic oligonucleotide
uguaugcaccuguuucaag

SEQ ID NO: 2551643 - RNA, 19 nt, Artificial Sequence
  Description of Artificial Sequence: Synthetic oligonucleotide
cacuaagacuuucccagag

SEQ ID NO: 2551644 - RNA, 19 nt, Artificial Sequence
  Description of Artificial Sequence: Synthetic oligonucleotide
ucugccagaucgucaauaa

SEQ ID NO: 2551645 - RNA, 19 nt, Artificial Sequence
  Description of Artificial Sequence: Synthetic oligonucleotide
auggugugagacaucgcgc

SEQ ID NO: 2551646 - RNA, 19 nt, Artificial Sequence
  Description of Artificial Sequence: Synthetic oligonucleotide
uuagugcacucacugcuaa

SEQ ID NO: 2551647 - RNA, 19 nt, Artificial Sequence
  Description of Artificial Sequence: Synthetic oligonucleotide
uucacuacagcacgcugua

SEQ ID NO: 2551648 - RNA, 19 nt, Artificial Sequence
  Description of Artificial Sequence: Synthetic oligonucleotide
guuucaaggacuggaacca

SEQ ID NO: 2551649 - RNA, 19 nt, Artificial Sequence
  Description of Artificial Sequence: Synthetic oligonucleotide
aacaauugacugauaucgu

SEQ ID NO: 2551650 - RNA, 19 nt, Artificial Sequence
  Description of Artificial Sequence: Synthetic oligonucleotide
aagaucauucauguuucau

SEQ ID NO: 2551651 - RNA, 19 nt, Artificial Sequence
  Description of Artificial Sequence: Synthetic oligonucleotide
caaucuuuguuauaaggcu

SEQ ID NO: 2551652 - RNA, 19 nt, Artificial Sequence
  Description of Artificial Sequence: Synthetic oligonucleotide
guaaccuugucaccacccc

SEQ ID NO: 2551653 - RNA, 19 nt, Artificial Sequence
  Description of Artificial Sequence: Synthetic oligonucleotide
cuguuucaagcccaucccc

SEQ ID NO: 2551654 - RNA, 19 nt, Artificial Sequence
  Description of Artificial Sequence: Synthetic oligonucleotide
uaucagcucgguacacaag

SEQ ID NO: 2551655 - RNA, 19 nt, Artificial Sequence
  Description of Artificial Sequence: Synthetic oligonucleotide
uuggcucuaguaacaaaau

SEQ ID NO: 2551656 - RNA, 19 nt, Artificial Sequence
  Description of Artificial Sequence: Synthetic oligonucleotide
aauggugguuucagaauga

SEQ ID NO: 2551657 - RNA, 19 nt, Artificial Sequence
  Description of Artificial Sequence: Synthetic oligonucleotide
acaggauuacuaucauaca

SEQ ID NO: 2551658 - RNA, 19 nt, Artificial Sequence
  Description of Artificial Sequence: Synthetic oligonucleotide
acagcugagaucugccaga

SEQ ID NO: 2551659 - RNA, 19 nt, Artificial Sequence
  Description of Artificial Sequence: Synthetic oligonucleotide
caggauuacuaucauacaa

SEQ ID NO: 2551660 - RNA, 19 nt, Artificial Sequence
  Description of Artificial Sequence: Synthetic oligonucleotide
ugugauagaggggcuguug

SEQ ID NO: 2551661 - RNA, 19 nt, Artificial Sequence
  Description of Artificial Sequence: Synthetic oligonucleotide
aggauuacuaucauacaaa

SEQ ID NO: 2551662 - RNA, 19 nt, Artificial Sequence
  Description of Artificial Sequence: Synthetic oligonucleotide
caugucauacauucaaucu

SEQ ID NO: 2551663 - RNA, 19 nt, Artificial Sequence
  Description of Artificial Sequence: Synthetic oligonucleotide
ggaaccaaccuuaaauggc

SEQ ID NO: 2551664 - RNA, 19 nt, Artificial Sequence
  Description of Artificial Sequence: Synthetic oligonucleotide
caagacagcugagaucugc

SEQ ID NO: 2551665 - RNA, 19 nt, Artificial Sequence
  Description of Artificial Sequence: Synthetic oligonucleotide
caaacgcuuugcugcagcc

SEQ ID NO: 2551666 - RNA, 19 nt, Artificial Sequence
  Description of Artificial Sequence: Synthetic oligonucleotide
ucacuaagacuuucccaga

SEQ ID NO: 2551667 - RNA, 19 nt, Artificial Sequence
  Description of Artificial Sequence: Synthetic oligonucleotide
ggagcaaagggcaauggug

SEQ ID NO: 2551668 - RNA, 19 nt, Artificial Sequence
  Description of Artificial Sequence: Synthetic oligonucleotide
gauagaggggcuguuggga

SEQ ID NO: 2551669 - RNA, 19 nt, Artificial Sequence
  Description of Artificial Sequence: Synthetic oligonucleotide
uguaucagcucgguacaca

SEQ ID NO: 2551670 - RNA, 19 nt, Artificial Sequence
  Description of Artificial Sequence: Synthetic oligonucleotide
aacaccuuccaugcacuca

SEQ ID NO: 2551671 - RNA, 19 nt, Artificial Sequence
  Description of Artificial Sequence: Synthetic oligonucleotide
agaucgucaauaaaaucaa

SEQ ID NO: 2551672 - RNA, 19 nt, Artificial Sequence
  Description of Artificial Sequence: Synthetic oligonucleotide
gguacgucuguguaucagc

SEQ ID NO: 2551673 - RNA, 19 nt, Artificial Sequence
  Description of Artificial Sequence: Synthetic oligonucleotide
agagcagauacgaacaguu

SEQ ID NO: 2551674 - RNA, 19 nt, Artificial Sequence
  Description of Artificial Sequence: Synthetic oligonucleotide
ucagcucgguacacaagac

SEQ ID NO: 2551675 - RNA, 19 nt, Artificial Sequence
  Description of Artificial Sequence: Synthetic oligonucleotide
gucauacauucaaucuugg

SEQ ID NO: 2551676 - RNA, 19 nt, Artificial Sequence
  Description of Artificial Sequence: Synthetic oligonucleotide
cugccuucuggccucuugg

SEQ ID NO: 2551677 - RNA, 19 nt, Artificial Sequence
  Description of Artificial Sequence: Synthetic oligonucleotide
aggcuguaccagcaaaaug

SEQ ID NO: 2551678 - RNA, 19 nt, Artificial Sequence
  Description of Artificial Sequence: Synthetic oligonucleotide
ccagaggacauaaguaacc

SEQ ID NO: 2551679 - RNA, 19 nt, Artificial Sequence
  Description of Artificial Sequence: Synthetic oligonucleotide
cauucaaucuuggcucuag

SEQ ID NO: 2551680 - RNA, 19 nt, Artificial Sequence
  Description of Artificial Sequence: Synthetic oligonucleotide
agucagcguaaguccugcc

SEQ ID NO: 2551681 - RNA, 19 nt, Artificial Sequence
  Description of Artificial Sequence: Synthetic oligonucleotide
ggauuacuaucauacaaaa

SEQ ID NO: 2551682 - RNA, 19 nt, Artificial Sequence
  Description of Artificial Sequence: Synthetic oligonucleotide
guugggauucauucucuuc

SEQ ID NO: 2551683 - RNA, 19 nt, Artificial Sequence
  Description of Artificial Sequence: Synthetic oligonucleotide
gacgaaggagcacauagau

SEQ ID NO: 2551684 - RNA, 19 nt, Artificial Sequence
  Description of Artificial Sequence: Synthetic oligonucleotide
gacucauagucagcguaag

SEQ ID NO: 2551685 - RNA, 19 nt, Artificial Sequence
  Description of Artificial Sequence: Synthetic oligonucleotide
gcgccaaacgcuuugcugc

SEQ ID NO: 2551686 - RNA, 19 nt, Artificial Sequence
  Description of Artificial Sequence: Synthetic oligonucleotide
uacuucccagccuguuggg

SEQ ID NO: 2551687 - RNA, 19 nt, Artificial Sequence
  Description of Artificial Sequence: Synthetic oligonucleotide
ugauaucguaugugauaga

SEQ ID NO: 2551688 - RNA, 19 nt, Artificial Sequence
  Description of Artificial Sequence: Synthetic oligonucleotide
ugguacgucuguguaucag

SEQ ID NO: 2551689 - RNA, 19 nt, Artificial Sequence
  Description of Artificial Sequence: Synthetic oligonucleotide
cccauaaaggguuagugca

SEQ ID NO: 2551690 - RNA, 19 nt, Artificial Sequence
  Description of Artificial Sequence: Synthetic oligonucleotide
acucauagucagcguaagu

SEQ ID NO: 2551691 - RNA, 19 nt, Artificial Sequence
  Description of Artificial Sequence: Synthetic oligonucleotide
ucgguacacaagacagcug

SEQ ID NO: 2551692 - RNA, 19 nt, Artificial Sequence
  Description of Artificial Sequence: Synthetic oligonucleotide
acgaaggagcacauagauc

SEQ ID NO: 2551693 - RNA, 19 nt, Artificial Sequence
  Description of Artificial Sequence: Synthetic oligonucleotide
aucguaugugauagagggg

SEQ ID NO: 2551694 - RNA, 19 nt, Artificial Sequence
  Description of Artificial Sequence: Synthetic oligonucleotide
cucuaguaacaaaauggaa

SEQ ID NO: 2551695 - RNA, 19 nt, Artificial Sequence
  Description of Artificial Sequence: Synthetic oligonucleotide
guaucagcucgguacacaa

SEQ ID NO: 2551696 - RNA, 19 nt, Artificial Sequence
  Description of Artificial Sequence: Synthetic oligonucleotide
guaugugauagaggggcug

SEQ ID NO: 2551697 - RNA, 19 nt, Artificial Sequence
  Description of Artificial Sequence: Synthetic oligonucleotide
agccuguugggccugucga

SEQ ID NO: 2551698 - RNA, 19 nt, Artificial Sequence
  Description of Artificial Sequence: Synthetic oligonucleotide
ucacugcuaaagagcagau

SEQ ID NO: 2551699 - RNA, 19 nt, Artificial Sequence
  Description of Artificial Sequence: Synthetic oligonucleotide
uagucagcguaaguccugc

SEQ ID NO: 2551700 - RNA, 19 nt, Artificial Sequence
  Description of Artificial Sequence: Synthetic oligonucleotide
ugagaucugccagaucguc

SEQ ID NO: 2551701 - RNA, 19 nt, Artificial Sequence
  Description of Artificial Sequence: Synthetic oligonucleotide
aggacuggaaccaaccuua

SEQ ID NO: 2551702 - RNA, 19 nt, Artificial Sequence
  Description of Artificial Sequence: Synthetic oligonucleotide
ucuuggcucuaguaacaaa

SEQ ID NO: 2551703 - RNA, 19 nt, Artificial Sequence
  Description of Artificial Sequence: Synthetic oligonucleotide
uuccucucugaauuaucau

SEQ ID NO: 2551704 - RNA, 19 nt, Artificial Sequence
  Description of Artificial Sequence: Synthetic oligonucleotide
auaaggcugguacgucugu

SEQ ID NO: 2551705 - RNA, 19 nt, Artificial Sequence
  Description of Artificial Sequence: Synthetic oligonucleotide
caaaauggugugagacauc

SEQ ID NO: 2551706 - RNA, 19 nt, Artificial Sequence
  Description of Artificial Sequence: Synthetic oligonucleotide
ugugagacaucgcgccaaa

SEQ ID NO: 2551707 - RNA, 19 nt, Artificial Sequence
  Description of Artificial Sequence: Synthetic oligonucleotide
cucuugguaggcuguacca

SEQ ID NO: 2551708 - RNA, 19 nt, Artificial Sequence
  Description of Artificial Sequence: Synthetic oligonucleotide
agaggacauaaguaaccuu

SEQ ID NO: 2551709 - RNA, 19 nt, Artificial Sequence
  Description of Artificial Sequence: Synthetic oligonucleotide
uaaggcugguacgucugug

SEQ ID NO: 2551710 - RNA, 19 nt, Artificial Sequence
  Description of Artificial Sequence: Synthetic oligonucleotide
ggcaauggugguuucagaa

SEQ ID NO: 2551711 - RNA, 19 nt, Artificial Sequence
  Description of Artificial Sequence: Synthetic oligonucleotide
aucgcgccaaacgcuuugc

SEQ ID NO: 2551712 - RNA, 19 nt, Artificial Sequence
  Description of Artificial Sequence: Synthetic oligonucleotide
ccccauaaaggguuagugc

SEQ ID NO: 2551713 - RNA, 19 nt, Artificial Sequence
  Description of Artificial Sequence: Synthetic oligonucleotide
ccuguuucaagcccauccc

SEQ ID NO: 2551714 - RNA, 19 nt, Artificial Sequence
  Description of Artificial Sequence: Synthetic oligonucleotide
gcucuaguaacaaaaugga

SEQ ID NO: 2551715 - RNA, 19 nt, Artificial Sequence
  Description of Artificial Sequence: Synthetic oligonucleotide
ucuuuguuauaaggcuggu

SEQ ID NO: 2551716 - RNA, 19 nt, Artificial Sequence
  Description of Artificial Sequence: Synthetic oligonucleotide
guuauaaggcugguacguc

SEQ ID NO: 2551717 - RNA, 19 nt, Artificial Sequence
  Description of Artificial Sequence: Synthetic oligonucleotide
uguugggauucauucucuu

SEQ ID NO: 2551718 - RNA, 19 nt, Artificial Sequence
  Description of Artificial Sequence: Synthetic oligonucleotide
aggacauaaguaaccuugu

SEQ ID NO: 2551719 - RNA, 19 nt, Artificial Sequence
  Description of Artificial Sequence: Synthetic oligonucleotide
gguuagugcacucacugcu

SEQ ID NO: 2551720 - RNA, 19 nt, Artificial Sequence
  Description of Artificial Sequence: Synthetic oligonucleotide
auacaacuacagaacauuu

SEQ ID NO: 2551721 - RNA, 19 nt, Artificial Sequence
  Description of Artificial Sequence: Synthetic oligonucleotide
uaggcuguaccagcaaaau

SEQ ID NO: 2551722 - RNA, 19 nt, Artificial Sequence
  Description of Artificial Sequence: Synthetic oligonucleotide
guacacaagacagcugaga

SEQ ID NO: 2551723 - RNA, 19 nt, Artificial Sequence
  Description of Artificial Sequence: Synthetic oligonucleotide
aaggguuagugcacucacu

SEQ ID NO: 2551724 - RNA, 19 nt, Artificial Sequence
  Description of Artificial Sequence: Synthetic oligonucleotide
gaaaaggagcaaagggcaa

SEQ ID NO: 2551725 - RNA, 19 nt, Artificial Sequence
  Description of Artificial Sequence: Synthetic oligonucleotide
gcacucacugcuaaagagc

SEQ ID NO: 2551726 - RNA, 19 nt, Artificial Sequence
  Description of Artificial Sequence: Synthetic oligonucleotide
cugucgacgaaggagcaca

SEQ ID NO: 2551727 - RNA, 19 nt, Artificial Sequence
  Description of Artificial Sequence: Synthetic oligonucleotide
cgucaauaaaaucaaacaa

SEQ ID NO: 2551728 - RNA, 19 nt, Artificial Sequence
  Description of Artificial Sequence: Synthetic oligonucleotide
gauuacuaucauacaaaau

SEQ ID NO: 2551729 - RNA, 19 nt, Artificial Sequence
  Description of Artificial Sequence: Synthetic oligonucleotide
cagccuguugggccugucg

SEQ ID NO: 2551730 - RNA, 19 nt, Artificial Sequence
  Description of Artificial Sequence: Synthetic oligonucleotide
cguaaguccugccuucugg

SEQ ID NO: 2551731 - RNA, 19 nt, Artificial Sequence
  Description of Artificial Sequence: Synthetic oligonucleotide
uuucaaggacuggaaccaa

SEQ ID NO: 2551732 - RNA, 19 nt, Artificial Sequence
  Description of Artificial Sequence: Synthetic oligonucleotide
agacucauagucagcguaa

SEQ ID NO: 2551733 - RNA, 19 nt, Artificial Sequence
  Description of Artificial Sequence: Synthetic oligonucleotide
caucgcgccaaacgcuuug

SEQ ID NO: 2551734 - RNA, 19 nt, Artificial Sequence
  Description of Artificial Sequence: Synthetic oligonucleotide
guuucaugucauacauuca

SEQ ID NO: 2551735 - RNA, 19 nt, Artificial Sequence
  Description of Artificial Sequence: Synthetic oligonucleotide
ggguuagugcacucacugc

SEQ ID NO: 2551736 - RNA, 19 nt, Artificial Sequence
  Description of Artificial Sequence: Synthetic oligonucleotide
agacaucgcgccaaacgcu

SEQ ID NO: 2551737 - RNA, 19 nt, Artificial Sequence
  Description of Artificial Sequence: Synthetic oligonucleotide
ugguaggcuguaccagcaa

SEQ ID NO: 2551738 - RNA, 19 nt, Artificial Sequence
  Description of Artificial Sequence: Synthetic oligonucleotide
aaccaaccuuaaauggcaa

SEQ ID NO: 2551739 - RNA, 19 nt, Artificial Sequence
  Description of Artificial Sequence: Synthetic oligonucleotide
ggccugucgacgaaggagc

SEQ ID NO: 2551740 - RNA, 19 nt, Artificial Sequence
  Description of Artificial Sequence: Synthetic oligonucleotide
gugcacucacugcuaaaga

SEQ ID NO: 2551741 - RNA, 19 nt, Artificial Sequence
  Description of Artificial Sequence: Synthetic oligonucleotide
gaucgucaauaaaaucaaa

SEQ ID NO: 2551742 - RNA, 19 nt, Artificial Sequence
  Description of Artificial Sequence: Synthetic oligonucleotide
ugucgacgaaggagcacau

SEQ ID NO: 2551743 - RNA, 19 nt, Artificial Sequence
  Description of Artificial Sequence: Synthetic oligonucleotide
ccagaucgucaauaaaauc

SEQ ID NO: 2551744 - RNA, 19 nt, Artificial Sequence
  Description of Artificial Sequence: Synthetic oligonucleotide
cagcguaaguccugccuuc

SEQ ID NO: 2551745 - RNA, 19 nt, Artificial Sequence
  Description of Artificial Sequence: Synthetic oligonucleotide
ccucuugguaggcuguacc

SEQ ID NO: 2551746 - RNA, 19 nt, Artificial Sequence
  Description of Artificial Sequence: Synthetic oligonucleotide
uaccagcaaaaugguguga

SEQ ID NO: 2551747 - RNA, 19 nt, Artificial Sequence
  Description of Artificial Sequence: Synthetic oligonucleotide
guaggcuguaccagcaaaa

SEQ ID NO: 2551748 - RNA, 19 nt, Artificial Sequence
  Description of Artificial Sequence: Synthetic oligonucleotide
uagugcacucacugcuaaa

SEQ ID NO: 2551749 - RNA, 19 nt, Artificial Sequence
  Description of Artificial Sequence: Synthetic oligonucleotide
guucacuacagcacgcugu

SEQ ID NO: 2551750 - RNA, 19 nt, Artificial Sequence
  Description of Artificial Sequence: Synthetic oligonucleotide
cucgguacacaagacagcu

SEQ ID NO: 2551751 - RNA, 19 nt, Artificial Sequence
  Description of Artificial Sequence: Synthetic oligonucleotide
cauucauguuucaugucau

SEQ ID NO: 2551752 - RNA, 19 nt, Artificial Sequence
  Description of Artificial Sequence: Synthetic oligonucleotide
ucgcgccaaacgcuuugcu

SEQ ID NO: 2551753 - RNA, 19 nt, Artificial Sequence
  Description of Artificial Sequence: Synthetic oligonucleotide
gcugguacgucuguguauc

SEQ ID NO: 2551754 - RNA, 19 nt, Artificial Sequence
  Description of Artificial Sequence: Synthetic oligonucleotide
gacuggaaccaaccuuaaa

SEQ ID NO: 2551755 - RNA, 19 nt, Artificial Sequence
  Description of Artificial Sequence: Synthetic oligonucleotide
cucaauuacuucccagccu

SEQ ID NO: 2551756 - RNA, 19 nt, Artificial Sequence
  Description of Artificial Sequence: Synthetic oligonucleotide
aucugccagaucgucaaua

SEQ ID NO: 2551757 - RNA, 19 nt, Artificial Sequence
  Description of Artificial Sequence: Synthetic oligonucleotide
cucucugaauuaucauaaa

SEQ ID NO: 2551758 - RNA, 19 nt, Artificial Sequence
  Description of Artificial Sequence: Synthetic oligonucleotide
aggcugguacgucugugua

SEQ ID NO: 2551759 - RNA, 19 nt, Artificial Sequence
  Description of Artificial Sequence: Synthetic oligonucleotide
cauaaaggguuagugcacu

SEQ ID NO: 2551760 - RNA, 19 nt, Artificial Sequence
  Description of Artificial Sequence: Synthetic oligonucleotide
gguaggcuguaccagcaaa

SEQ ID NO: 2551761 - RNA, 19 nt, Artificial Sequence
  Description of Artificial Sequence: Synthetic oligonucleotide
acgcuuugcugcagccgcc

SEQ ID NO: 2551762 - RNA, 19 nt, Artificial Sequence
  Description of Artificial Sequence: Synthetic oligonucleotide
ccuguugggccugucgacg

SEQ ID NO: 2551763 - RNA, 19 nt, Artificial Sequence
  Description of Artificial Sequence: Synthetic oligonucleotide
ccuaaagcuuccaacucaa

SEQ ID NO: 2551764 - RNA, 19 nt, Artificial Sequence
  Description of Artificial Sequence: Synthetic oligonucleotide
agcguaaguccugccuucu

SEQ ID NO: 2551765 - RNA, 19 nt, Artificial Sequence
  Description of Artificial Sequence: Synthetic oligonucleotide
cuuuguuauaaggcuggua

SEQ ID NO: 2551766 - RNA, 19 nt, Artificial Sequence
  Description of Artificial Sequence: Synthetic oligonucleotide
guuagugcacucacugcua

SEQ ID NO: 2551767 - RNA, 19 nt, Artificial Sequence
  Description of Artificial Sequence: Synthetic oligonucleotide
guacgucuguguaucagcu

SEQ ID NO: 2551768 - RNA, 19 nt, Artificial Sequence
  Description of Artificial Sequence: Synthetic oligonucleotide
gacugauaucguaugugau

SEQ ID NO: 2551769 - RNA, 19 nt, Artificial Sequence
  Description of Artificial Sequence: Synthetic oligonucleotide
cgguacacaagacagcuga

SEQ ID NO: 2551770 - RNA, 19 nt, Artificial Sequence
  Description of Artificial Sequence: Synthetic oligonucleotide
agcuuccaacucaauuacu

SEQ ID NO: 2551771 - RNA, 19 nt, Artificial Sequence
  Description of Artificial Sequence: Synthetic oligonucleotide
cuguugggccugucgacga

SEQ ID NO: 2551772 - RNA, 19 nt, Artificial Sequence
  Description of Artificial Sequence: Synthetic oligonucleotide
cccuaaagcuuccaacuca

SEQ ID NO: 2551773 - RNA, 19 nt, Artificial Sequence
  Description of Artificial Sequence: Synthetic oligonucleotide
ccaaccuuaaauggcaaaa

SEQ ID NO: 2551774 - RNA, 19 nt, Artificial Sequence
  Description of Artificial Sequence: Synthetic oligonucleotide
guguaucagcucgguacac

SEQ ID NO: 2551775 - RNA, 19 nt, Artificial Sequence
  Description of Artificial Sequence: Synthetic oligonucleotide
gugugagacaucgcgccaa

SEQ ID NO: 2551776 - RNA, 19 nt, Artificial Sequence
  Description of Artificial Sequence: Synthetic oligonucleotide
acgcuguaugcaccuguuu

SEQ ID NO: 2551777 - RNA, 19 nt, Artificial Sequence
  Description of Artificial Sequence: Synthetic oligonucleotide
cagauacgaacaguuucaa

SEQ ID NO: 2551778 - RNA, 19 nt, Artificial Sequence
  Description of Artificial Sequence: Synthetic oligonucleotide
cuguugggauucauucucu

SEQ ID NO: 2551779 - RNA, 19 nt, Artificial Sequence
  Description of Artificial Sequence: Synthetic oligonucleotide
gcucgguacacaagacagc

SEQ ID NO: 2551780 - RNA, 19 nt, Artificial Sequence
  Description of Artificial Sequence: Synthetic oligonucleotide
caaagggcaauggugguuu

SEQ ID NO: 2551781 - RNA, 19 nt, Artificial Sequence
  Description of Artificial Sequence: Synthetic oligonucleotide
gcuaaagagcagauacgaa

SEQ ID NO: 2551782 - RNA, 19 nt, Artificial Sequence
  Description of Artificial Sequence: Synthetic oligonucleotide
cugccagaucgucaauaaa

SEQ ID NO: 2551783 - RNA, 19 nt, Artificial Sequence
  Description of Artificial Sequence: Synthetic oligonucleotide
ucacuacagcacgcuguau

SEQ ID NO: 2551784 - RNA, 19 nt, Artificial Sequence
  Description of Artificial Sequence: Synthetic oligonucleotide
cugagaucugccagaucgu

SEQ ID NO: 2551785 - RNA, 19 nt, Artificial Sequence
  Description of Artificial Sequence: Synthetic oligonucleotide
gacaucgcgccaaacgcuu

SEQ ID NO: 2551786 - RNA, 19 nt, Artificial Sequence
  Description of Artificial Sequence: Synthetic oligonucleotide
acauucaaucuuggcucua

SEQ ID NO: 2551787 - RNA, 19 nt, Artificial Sequence
  Description of Artificial Sequence: Synthetic oligonucleotide
cugguacgucuguguauca

SEQ ID NO: 2551788 - RNA, 19 nt, Artificial Sequence
  Description of Artificial Sequence: Synthetic oligonucleotide
agcacgcuguaugcaccug

SEQ ID NO: 2551789 - RNA, 19 nt, Artificial Sequence
  Description of Artificial Sequence: Synthetic oligonucleotide
cgucuguguaucagcucgg

SEQ ID NO: 2551790 - RNA, 19 nt, Artificial Sequence
  Description of Artificial Sequence: Synthetic oligonucleotide
gugagacaucgcgccaaac

SEQ ID NO: 2551791 - RNA, 19 nt, Artificial Sequence
  Description of Artificial Sequence: Synthetic oligonucleotide
acucauucacagacucaua

SEQ ID NO: 2551792 - RNA, 19 nt, Artificial Sequence
  Description of Artificial Sequence: Synthetic oligonucleotide
aucaaacaauugacugaua

SEQ ID NO: 2551793 - RNA, 19 nt, Artificial Sequence
  Description of Artificial Sequence: Synthetic oligonucleotide
augugauagaggggcuguu

SEQ ID NO: 2551794 - RNA, 19 nt, Artificial Sequence
  Description of Artificial Sequence: Synthetic oligonucleotide
cgcgccaaacgcuuugcug

SEQ ID NO: 2551795 - RNA, 19 nt, Artificial Sequence
  Description of Artificial Sequence: Synthetic oligonucleotide
gcguaaguccugccuucug

SEQ ID NO: 2551796 - RNA, 19 nt, Artificial Sequence
  Description of Artificial Sequence: Synthetic oligonucleotide
gagcagauacgaacaguuu

SEQ ID NO: 2551797 - RNA, 19 nt, Artificial Sequence
  Description of Artificial Sequence: Synthetic oligonucleotide
gccagaucgucaauaaaau

SEQ ID NO: 2551798 - RNA, 19 nt, Artificial Sequence
  Description of Artificial Sequence: Synthetic oligonucleotide
cacugcuaaagagcagaua

SEQ ID NO: 2551799 - RNA, 19 nt, Artificial Sequence
  Description of Artificial Sequence: Synthetic oligonucleotide
gcuguaccagcaaaauggu

SEQ ID NO: 2551800 - RNA, 19 nt, Artificial Sequence
  Description of Artificial Sequence: Synthetic oligonucleotide
gcacauagaucuucucuuu

SEQ ID NO: 2551801 - RNA, 19 nt, Artificial Sequence
  Description of Artificial Sequence: Synthetic oligonucleotide
gaaggagcacauagaucuu

SEQ ID NO: 2551802 - RNA, 19 nt, Artificial Sequence
  Description of Artificial Sequence: Synthetic oligonucleotide
cagcacgcuguaugcaccu

SEQ ID NO: 2551803 - RNA, 19 nt, Artificial Sequence
  Description of Artificial Sequence: Synthetic oligonucleotide
gucuguguaucagcucggu

SEQ ID NO: 2551804 - RNA, 19 nt, Artificial Sequence
  Description of Artificial Sequence: Synthetic oligonucleotide
ccugucgacgaaggagcac

SEQ ID NO: 2551805 - RNA, 19 nt, Artificial Sequence
  Description of Artificial Sequence: Synthetic oligonucleotide
gcacgcuguaugcaccugu

SEQ ID NO: 2551806 - RNA, 19 nt, Artificial Sequence
  Description of Artificial Sequence: Synthetic oligonucleotide
cacgcuguaugcaccuguu

SEQ ID NO: 2551807 - RNA, 19 nt, Artificial Sequence
  Description of Artificial Sequence: Synthetic oligonucleotide
acaucgcgccaaacgcuuu

SEQ ID NO: 2551808 - RNA, 19 nt, Artificial Sequence
  Description of Artificial Sequence: Synthetic oligonucleotide
aggggcuguugggauucau

SEQ ID NO: 2551809 - RNA, 19 nt, Artificial Sequence
  Description of Artificial Sequence: Synthetic oligonucleotide
gucgacgaaggagcacaua

SEQ ID NO: 2551810 - RNA, 19 nt, Artificial Sequence
  Description of Artificial Sequence: Synthetic oligonucleotide
ggacuggaaccaaccuuaa

SEQ ID NO: 2551811 - RNA, 19 nt, Artificial Sequence
  Description of Artificial Sequence: Synthetic oligonucleotide
gccugucgacgaaggagca

SEQ ID NO: 2551812 - RNA, 19 nt, Artificial Sequence
  Description of Artificial Sequence: Synthetic oligonucleotide
cagcugagaucugccagau

SEQ ID NO: 2551813 - RNA, 19 nt, Artificial Sequence
  Description of Artificial Sequence: Synthetic oligonucleotide
gcaaagggcaauggugguu

SEQ ID NO: 2551814 - RNA, 19 nt, Artificial Sequence
  Description of Artificial Sequence: Synthetic oligonucleotide
cguaugugauagaggggcu

SEQ ID NO: 2551815 - RNA, 19 nt, Artificial Sequence
  Description of Artificial Sequence: Synthetic oligonucleotide
gcaccuguuucaagcccau

SEQ ID NO: 2551816 - RNA, 19 nt, Artificial Sequence
  Description of Artificial Sequence: Synthetic oligonucleotide
gaauuaaugaaccagacag

SEQ ID NO: 2551817 - RNA, 19 nt, Artificial Sequence
  Description of Artificial Sequence: Synthetic oligonucleotide
uaaugaaccagacagaugc

SEQ ID NO: 2551818 - RNA, 19 nt, Artificial Sequence
  Description of Artificial Sequence: Synthetic oligonucleotide
ugaagcacugcacagaagg

SEQ ID NO: 2551819 - RNA, 19 nt, Artificial Sequence
  Description of Artificial Sequence: Synthetic oligonucleotide
uugagcaaacuccagaugg

SEQ ID NO: 2551820 - RNA, 19 nt, Artificial Sequence
  Description of Artificial Sequence: Synthetic oligonucleotide
agagcaaugccuuaaagag

SEQ ID NO: 2551821 - RNA, 19 nt, Artificial Sequence
  Description of Artificial Sequence: Synthetic oligonucleotide
uuggaaauggcgaagagca

SEQ ID NO: 2551822 - RNA, 19 nt, Artificial Sequence
  Description of Artificial Sequence: Synthetic oligonucleotide
gauggaaaagaacagcccg

SEQ ID NO: 2551823 - RNA, 19 nt, Artificial Sequence
  Description of Artificial Sequence: Synthetic oligonucleotide
auaaaugugaugaaguagg

SEQ ID NO: 2551824 - RNA, 19 nt, Artificial Sequence
  Description of Artificial Sequence: Synthetic oligonucleotide
acaaacaggaaacgcaggc

SEQ ID NO: 2551825 - RNA, 19 nt, Artificial Sequence
  Description of Artificial Sequence: Synthetic oligonucleotide
auuaaugggccucagagca

SEQ ID NO: 2551826 - RNA, 19 nt, Artificial Sequence
  Description of Artificial Sequence: Synthetic oligonucleotide
ugacagagcaugaaggagg

SEQ ID NO: 2551827 - RNA, 19 nt, Artificial Sequence
  Description of Artificial Sequence: Synthetic oligonucleotide
ugaaggagggcacaaacag

SEQ ID NO: 2551828 - RNA, 19 nt, Artificial Sequence
  Description of Artificial Sequence: Synthetic oligonucleotide
aaugccuuaaagaggaagg

SEQ ID NO: 2551829 - RNA, 19 nt, Artificial Sequence
  Description of Artificial Sequence: Synthetic oligonucleotide
gaaaagaacagcccggggc

SEQ ID NO: 2551830 - RNA, 19 nt, Artificial Sequence
  Description of Artificial Sequence: Synthetic oligonucleotide
aaaagaacagcccggggcu

SEQ ID NO: 2551831 - RNA, 19 nt, Artificial Sequence
  Description of Artificial Sequence: Synthetic oligonucleotide
cuaagguaacacacgaugg

SEQ ID NO: 2551832 - RNA, 19 nt, Artificial Sequence
  Description of Artificial Sequence: Synthetic oligonucleotide
acagaugccauggugaugg

SEQ ID NO: 2551833 - RNA, 19 nt, Artificial Sequence
  Description of Artificial Sequence: Synthetic oligonucleotide
aggaagaaggucaugaggg

SEQ ID NO: 2551834 - RNA, 19 nt, Artificial Sequence
  Description of Artificial Sequence: Synthetic oligonucleotide
ugugguagcaccugccugg

SEQ ID NO: 2551835 - RNA, 19 nt, Artificial Sequence
  Description of Artificial Sequence: Synthetic oligonucleotide
uggacaugagcauagcaag

SEQ ID NO: 2551836 - RNA, 19 nt, Artificial Sequence
  Description of Artificial Sequence: Synthetic oligonucleotide
gaagaucccagccaggccc

SEQ ID NO: 2551837 - RNA, 19 nt, Artificial Sequence
  Description of Artificial Sequence: Synthetic oligonucleotide
guaguauugagcaaacucc

SEQ ID NO: 2551838 - RNA, 19 nt, Artificial Sequence
  Description of Artificial Sequence: Synthetic oligonucleotide
agcagcauaaaugugauga

SEQ ID NO: 2551839 - RNA, 19 nt, Artificial Sequence
  Description of Artificial Sequence: Synthetic oligonucleotide
uaaagaggaaggaaagaga

SEQ ID NO: 2551840 - RNA, 19 nt, Artificial Sequence
  Description of Artificial Sequence: Synthetic oligonucleotide
ugugaugaaguacccgagg

SEQ ID NO: 2551841 - RNA, 19 nt, Artificial Sequence
  Description of Artificial Sequence: Synthetic oligonucleotide
aggcaugguacccagcugc

SEQ ID NO: 2551842 - RNA, 19 nt, Artificial Sequence
  Description of Artificial Sequence: Synthetic oligonucleotide
cagaaggaauuaaugaacc

SEQ ID NO: 2551843 - RNA, 19 nt, Artificial Sequence
  Description of Artificial Sequence: Synthetic oligonucleotide
acagaaggaauuaaugaac

SEQ ID NO: 2551844 - RNA, 19 nt, Artificial Sequence
  Description of Artificial Sequence: Synthetic oligonucleotide
uuguggggagcauuaaugg

SEQ ID NO: 2551845 - RNA, 19 nt, Artificial Sequence
  Description of Artificial Sequence: Synthetic oligonucleotide
gaaagagaggcuccgcagg

SEQ ID NO: 2551846 - RNA, 19 nt, Artificial Sequence
  Description of Artificial Sequence: Synthetic oligonucleotide
agagacaccaaguagccgu

SEQ ID NO: 2551847 - RNA, 19 nt, Artificial Sequence
  Description of Artificial Sequence: Synthetic oligonucleotide
uaacacacgauggagagga

SEQ ID NO: 2551848 - RNA, 19 nt, Artificial Sequence
  Description of Artificial Sequence: Synthetic oligonucleotide
gaugaagaggguugugggg

SEQ ID NO: 2551849 - RNA, 19 nt, Artificial Sequence
  Description of Artificial Sequence: Synthetic oligonucleotide
uaagguaacacacgaugga

SEQ ID NO: 2551850 - RNA, 19 nt, Artificial Sequence
  Description of Artificial Sequence: Synthetic oligonucleotide
gaggaggaugccuacacag

SEQ ID NO: 2551851 - RNA, 19 nt, Artificial Sequence
  Description of Artificial Sequence: Synthetic oligonucleotide
ugagcaaacuccagauggg

SEQ ID NO: 2551852 - RNA, 19 nt, Artificial Sequence
  Description of Artificial Sequence: Synthetic oligonucleotide
aagagcagcauaaauguga

SEQ ID NO: 2551853 - RNA, 19 nt, Artificial Sequence
  Description of Artificial Sequence: Synthetic oligonucleotide
ugagagacaccaaguagcc

SEQ ID NO: 2551854 - RNA, 19 nt, Artificial Sequence
  Description of Artificial Sequence: Synthetic oligonucleotide
cauaaaugugaugaaguag

SEQ ID NO: 2551855 - RNA, 19 nt, Artificial Sequence
  Description of Artificial Sequence: Synthetic oligonucleotide
agcauucuucuucaucagc

SEQ ID NO: 2551856 - RNA, 19 nt, Artificial Sequence
  Description of Artificial Sequence: Synthetic oligonucleotide
gacaugagcauagcaaggg

SEQ ID NO: 2551857 - RNA, 19 nt, Artificial Sequence
  Description of Artificial Sequence: Synthetic oligonucleotide
uaaaugugaugaaguaggc

SEQ ID NO: 2551858 - RNA, 19 nt, Artificial Sequence
  Description of Artificial Sequence: Synthetic oligonucleotide
uauugagcaaacuccagau

SEQ ID NO: 2551859 - RNA, 19 nt, Artificial Sequence
  Description of Artificial Sequence: Synthetic oligonucleotide
cagggugugaugaaguacc

SEQ ID NO: 2551860 - RNA, 19 nt, Artificial Sequence
  Description of Artificial Sequence: Synthetic oligonucleotide
uagguagaaggcaugguac

SEQ ID NO: 2551861 - RNA, 19 nt, Artificial Sequence
  Description of Artificial Sequence: Synthetic oligonucleotide
aaggaauuaaugaaccaga

SEQ ID NO: 2551862 - RNA, 19 nt, Artificial Sequence
  Description of Artificial Sequence: Synthetic oligonucleotide
uguggggagcauuaauggg

SEQ ID NO: 2551863 - RNA, 19 nt, Artificial Sequence
  Description of Artificial Sequence: Synthetic oligonucleotide
auggugauggaaaagaaca

SEQ ID NO: 2551864 - RNA, 19 nt, Artificial Sequence
  Description of Artificial Sequence: Synthetic oligonucleotide
gaaguaggcguccugccag

SEQ ID NO: 2551865 - RNA, 19 nt, Artificial Sequence
  Description of Artificial Sequence: Synthetic oligonucleotide
gcauuaaugggccucagag

SEQ ID NO: 2551866 - RNA, 19 nt, Artificial Sequence
  Description of Artificial Sequence: Synthetic oligonucleotide
auuaaugaaccagacagau

SEQ ID NO: 2551867 - RNA, 19 nt, Artificial Sequence
  Description of Artificial Sequence: Synthetic oligonucleotide
augaaguaggcguccugcc

SEQ ID NO: 2551868 - RNA, 19 nt, Artificial Sequence
  Description of Artificial Sequence: Synthetic oligonucleotide
ugaugaaguacccgagggc

SEQ ID NO: 2551869 - RNA, 19 nt, Artificial Sequence
  Description of Artificial Sequence: Synthetic oligonucleotide
aaugaaccagacagaugcc

SEQ ID NO: 2551870 - RNA, 19 nt, Artificial Sequence
  Description of Artificial Sequence: Synthetic oligonucleotide
uaggcguccugccagaaga

SEQ ID NO: 2551871 - RNA, 19 nt, Artificial Sequence
  Description of Artificial Sequence: Synthetic oligonucleotide
aaggagggcacaaacagga

SEQ ID NO: 2551872 - RNA, 19 nt, Artificial Sequence
  Description of Artificial Sequence: Synthetic oligonucleotide
ucagagcaaugccuuaaag

SEQ ID NO: 2551873 - RNA, 19 nt, Artificial Sequence
  Description of Artificial Sequence: Synthetic oligonucleotide
gugagagacaccaaguagc

SEQ ID NO: 2551874 - RNA, 19 nt, Artificial Sequence
  Description of Artificial Sequence: Synthetic oligonucleotide
aggaagagggugcuguagg

SEQ ID NO: 2551875 - RNA, 19 nt, Artificial Sequence
  Description of Artificial Sequence: Synthetic oligonucleotide
cauuaaugggccucagagc

SEQ ID NO: 2551876 - RNA, 19 nt, Artificial Sequence
  Description of Artificial Sequence: Synthetic oligonucleotide
uacaccacuggccauggac

SEQ ID NO: 2551877 - RNA, 19 nt, Artificial Sequence
  Description of Artificial Sequence: Synthetic oligonucleotide
aauuaaugaaccagacaga

SEQ ID NO: 2551878 - RNA, 19 nt, Artificial Sequence
  Description of Artificial Sequence: Synthetic oligonucleotide
ugggcaucuacaccacugg

SEQ ID NO: 2551879 - RNA, 19 nt, Artificial Sequence
  Description of Artificial Sequence: Synthetic oligonucleotide
gguaguauugagcaaacuc

SEQ ID NO: 2551880 - RNA, 19 nt, Artificial Sequence
  Description of Artificial Sequence: Synthetic oligonucleotide
gaugaaguaggcguccugc

SEQ ID NO: 2551881 - RNA, 19 nt, Artificial Sequence
  Description of Artificial Sequence: Synthetic oligonucleotide
aaagagaggcuccgcagga

SEQ ID NO: 2551882 - RNA, 19 nt, Artificial Sequence
  Description of Artificial Sequence: Synthetic oligonucleotide
aggaaggaaagagaggcuc

SEQ ID NO: 2551883 - RNA, 19 nt, Artificial Sequence
  Description of Artificial Sequence: Synthetic oligonucleotide
uggaaaagaacagcccggg

SEQ ID NO: 2551884 - RNA, 19 nt, Artificial Sequence
  Description of Artificial Sequence: Synthetic oligonucleotide
gcuaagguaacacacgaug

SEQ ID NO: 2551885 - RNA, 19 nt, Artificial Sequence
  Description of Artificial Sequence: Synthetic oligonucleotide
gaugaaguacccgagggca

SEQ ID NO: 2551886 - RNA, 19 nt, Artificial Sequence
  Description of Artificial Sequence: Synthetic oligonucleotide
agcaaugccuuaaagagga

SEQ ID NO: 2551887 - RNA, 19 nt, Artificial Sequence
  Description of Artificial Sequence: Synthetic oligonucleotide
aggaauuaaugaaccagac

SEQ ID NO: 2551888 - RNA, 19 nt, Artificial Sequence
  Description of Artificial Sequence: Synthetic oligonucleotide
gguaacacacgauggagag

SEQ ID NO: 2551889 - RNA, 19 nt, Artificial Sequence
  Description of Artificial Sequence: Synthetic oligonucleotide
agcauaaaugugaugaagu

SEQ ID NO: 2551890 - RNA, 19 nt, Artificial Sequence
  Description of Artificial Sequence: Synthetic oligonucleotide
agaaggaauuaaugaacca

SEQ ID NO: 2551891 - RNA, 19 nt, Artificial Sequence
  Description of Artificial Sequence: Synthetic oligonucleotide
gaaggaaagagaggcuccg

SEQ ID NO: 2551892 - RNA, 19 nt, Artificial Sequence
  Description of Artificial Sequence: Synthetic oligonucleotide
uggggagcauuaaugggcc

SEQ ID NO: 2551893 - RNA, 19 nt, Artificial Sequence
  Description of Artificial Sequence: Synthetic oligonucleotide
uagccguuggaaauggcga

SEQ ID NO: 2551894 - RNA, 19 nt, Artificial Sequence
  Description of Artificial Sequence: Synthetic oligonucleotide
aaggaaagagaggcuccgc

SEQ ID NO: 2551895 - RNA, 19 nt, Artificial Sequence
  Description of Artificial Sequence: Synthetic oligonucleotide
aggucugggcaucuacacc

SEQ ID NO: 2551896 - RNA, 19 nt, Artificial Sequence
  Description of Artificial Sequence: Synthetic oligonucleotide
gacagagcaugaaggaggg

SEQ ID NO: 2551897 - RNA, 19 nt, Artificial Sequence
  Description of Artificial Sequence: Synthetic oligonucleotide
caggcuaagguaacacacg

SEQ ID NO: 2551898 - RNA, 19 nt, Artificial Sequence
  Description of Artificial Sequence: Synthetic oligonucleotide
ugaaguaggcguccugcca

SEQ ID NO: 2551899 - RNA, 19 nt, Artificial Sequence
  Description of Artificial Sequence: Synthetic oligonucleotide
aauggcgaagagcagcaua

SEQ ID NO: 2551900 - RNA, 19 nt, Artificial Sequence
  Description of Artificial Sequence: Synthetic oligonucleotide
ggucucuagcuccugagcg

SEQ ID NO: 2551901 - RNA, 19 nt, Artificial Sequence
  Description of Artificial Sequence: Synthetic oligonucleotide
acaggaaacgcaggcacac

SEQ ID NO: 2551902 - RNA, 19 nt, Artificial Sequence
  Description of Artificial Sequence: Synthetic oligonucleotide
gaaacgcaggcacaccagc

SEQ ID NO: 2551903 - RNA, 19 nt, Artificial Sequence
  Description of Artificial Sequence: Synthetic oligonucleotide
guuguggggagcauuaaug

SEQ ID NO: 2551904 - RNA, 19 nt, Artificial Sequence
  Description of Artificial Sequence: Synthetic oligonucleotide
aaguagccguuggaaaugg

SEQ ID NO: 2551905 - RNA, 19 nt, Artificial Sequence
  Description of Artificial Sequence: Synthetic oligonucleotide
ucaugugguagcaccugcc

SEQ ID NO: 2551906 - RNA, 19 nt, Artificial Sequence
  Description of Artificial Sequence: Synthetic oligonucleotide
aaacgcaggcacaccagcg

SEQ ID NO: 2551907 - RNA, 19 nt, Artificial Sequence
  Description of Artificial Sequence: Synthetic oligonucleotide
guuggaaauggcgaagagc

SEQ ID NO: 2551908 - RNA, 19 nt, Artificial Sequence
  Description of Artificial Sequence: Synthetic oligonucleotide
guauugagcaaacuccaga

SEQ ID NO: 2551909 - RNA, 19 nt, Artificial Sequence
  Description of Artificial Sequence: Synthetic oligonucleotide
cauagcaagggcagcgaag

SEQ ID NO: 2551910 - RNA, 19 nt, Artificial Sequence
  Description of Artificial Sequence: Synthetic oligonucleotide
uuggccagguaguauugag

SEQ ID NO: 2551911 - RNA, 19 nt, Artificial Sequence
  Description of Artificial Sequence: Synthetic oligonucleotide
aggaugccuacacagggug

SEQ ID NO: 2551912 - RNA, 19 nt, Artificial Sequence
  Description of Artificial Sequence: Synthetic oligonucleotide
gagcauagcaagggcagcg

SEQ ID NO: 2551913 - RNA, 19 nt, Artificial Sequence
  Description of Artificial Sequence: Synthetic oligonucleotide
ggugagagacaccaaguag

SEQ ID NO: 2551914 - RNA, 19 nt, Artificial Sequence
  Description of Artificial Sequence: Synthetic oligonucleotide
acggugacagagcaugaag

SEQ ID NO: 2551915 - RNA, 19 nt, Artificial Sequence
  Description of Artificial Sequence: Synthetic oligonucleotide
gggugcuguagguagaagg

SEQ ID NO: 2551916 - RNA, 19 nt, Artificial Sequence
  Description of Artificial Sequence: Synthetic oligonucleotide
cagagcaaugccuuaaaga

SEQ ID NO: 2551917 - RNA, 19 nt, Artificial Sequence
  Description of Artificial Sequence: Synthetic oligonucleotide
uagaaggcaugguacccag

SEQ ID NO: 2551918 - RNA, 19 nt, Artificial Sequence
  Description of Artificial Sequence: Synthetic oligonucleotide
ucagcuuggaggagcucag

SEQ ID NO: 2551919 - RNA, 19 nt, Artificial Sequence
  Description of Artificial Sequence: Synthetic oligonucleotide
uuuggucucuagcuccuga

SEQ ID NO: 2551920 - RNA, 19 nt, Artificial Sequence
  Description of Artificial Sequence: Synthetic oligonucleotide
aacgcaggcacaccagcga

SEQ ID NO: 2551921 - RNA, 19 nt, Artificial Sequence
  Description of Artificial Sequence: Synthetic oligonucleotide
aggucaugagggcuccagc

SEQ ID NO: 2551922 - RNA, 19 nt, Artificial Sequence
  Description of Artificial Sequence: Synthetic oligonucleotide
auagcaagggcagcgaaga

SEQ ID NO: 2551923 - RNA, 19 nt, Artificial Sequence
  Description of Artificial Sequence: Synthetic oligonucleotide
acagggugugaugaaguac

SEQ ID NO: 2551924 - RNA, 19 nt, Artificial Sequence
  Description of Artificial Sequence: Synthetic oligonucleotide
aggaaacgcaggcacacca

SEQ ID NO: 2551925 - RNA, 19 nt, Artificial Sequence
  Description of Artificial Sequence: Synthetic oligonucleotide
ugcuguagguagaaggcau

SEQ ID NO: 2551926 - RNA, 19 nt, Artificial Sequence
  Description of Artificial Sequence: Synthetic oligonucleotide
gcagcauucuucuucauca

SEQ ID NO: 2551927 - RNA, 19 nt, Artificial Sequence
  Description of Artificial Sequence: Synthetic oligonucleotide
ccuuaaagaggaaggaaag

SEQ ID NO: 2551928 - RNA, 19 nt, Artificial Sequence
  Description of Artificial Sequence: Synthetic oligonucleotide
uggccagguaguauugagc

SEQ ID NO: 2551929 - RNA, 19 nt, Artificial Sequence
  Description of Artificial Sequence: Synthetic oligonucleotide
aggcuaagguaacacacga

SEQ ID NO: 2551930 - RNA, 19 nt, Artificial Sequence
  Description of Artificial Sequence: Synthetic oligonucleotide
aguacccgagggcagaggu

SEQ ID NO: 2551931 - RNA, 19 nt, Artificial Sequence
  Description of Artificial Sequence: Synthetic oligonucleotide
aacuccagauggggcaggc

SEQ ID NO: 2551932 - RNA, 19 nt, Artificial Sequence
  Description of Artificial Sequence: Synthetic oligonucleotide
guggggagcauuaaugggc

SEQ ID NO: 2551933 - RNA, 19 nt, Artificial Sequence
  Description of Artificial Sequence: Synthetic oligonucleotide
aggaaagagaggcuccgca

SEQ ID NO: 2551934 - RNA, 19 nt, Artificial Sequence
  Description of Artificial Sequence: Synthetic oligonucleotide
gaaccagacagaugccaug

SEQ ID NO: 2551935 - RNA, 19 nt, Artificial Sequence
  Description of Artificial Sequence: Synthetic oligonucleotide
caaugccuuaaagaggaag

SEQ ID NO: 2551936 - RNA, 19 nt, Artificial Sequence
  Description of Artificial Sequence: Synthetic oligonucleotide
caugagcauagcaagggca

SEQ ID NO: 2551937 - RNA, 19 nt, Artificial Sequence
  Description of Artificial Sequence: Synthetic oligonucleotide
ucuuggccagguaguauug

SEQ ID NO: 2551938 - RNA, 19 nt, Artificial Sequence
  Description of Artificial Sequence: Synthetic oligonucleotide
ugggacgagcuucuuggcc

SEQ ID NO: 2551939 - RNA, 19 nt, Artificial Sequence
  Description of Artificial Sequence: Synthetic oligonucleotide
caaagaggcugccuugaag

SEQ ID NO: 2551940 - RNA, 19 nt, Artificial Sequence
  Description of Artificial Sequence: Synthetic oligonucleotide
gaugccuacacagggugug

SEQ ID NO: 2551941 - RNA, 19 nt, Artificial Sequence
  Description of Artificial Sequence: Synthetic oligonucleotide
ggugugaugaaguacccga

SEQ ID NO: 2551942 - RNA, 19 nt, Artificial Sequence
  Description of Artificial Sequence: Synthetic oligonucleotide
agaaggucaugagggcucc

SEQ ID NO: 2551943 - RNA, 19 nt, Artificial Sequence
  Description of Artificial Sequence: Synthetic oligonucleotide
cagacagaugccaugguga

SEQ ID NO: 2551944 - RNA, 19 nt, Artificial Sequence
  Description of Artificial Sequence: Synthetic oligonucleotide
uggugagagacaccaagua

SEQ ID NO: 2551945 - RNA, 19 nt, Artificial Sequence
  Description of Artificial Sequence: Synthetic oligonucleotide
uggaaauggcgaagagcag

SEQ ID NO: 2551946 - RNA, 19 nt, Artificial Sequence
  Description of Artificial Sequence: Synthetic oligonucleotide
uucuuggccagguaguauu

SEQ ID NO: 2551947 - RNA, 19 nt, Artificial Sequence
  Description of Artificial Sequence: Synthetic oligonucleotide
aaggucaugagggcuccag

SEQ ID NO: 2551948 - RNA, 19 nt, Artificial Sequence
  Description of Artificial Sequence: Synthetic oligonucleotide
gaggagcucagcuuugguc

SEQ ID NO: 2551949 - RNA, 19 nt, Artificial Sequence
  Description of Artificial Sequence: Synthetic oligonucleotide
uggucucuagcuccugagc

SEQ ID NO: 2551950 - RNA, 19 nt, Artificial Sequence
  Description of Artificial Sequence: Synthetic oligonucleotide
cagcauaaaugugaugaag

SEQ ID NO: 2551951 - RNA, 19 nt, Artificial Sequence
  Description of Artificial Sequence: Synthetic oligonucleotide
ugggcacggugacagagca

SEQ ID NO: 2551952 - RNA, 19 nt, Artificial Sequence
  Description of Artificial Sequence: Synthetic oligonucleotide
gaaauggcgaagagcagca

SEQ ID NO: 2551953 - RNA, 19 nt, Artificial Sequence
  Description of Artificial Sequence: Synthetic oligonucleotide
gagucccagggccaggaag

SEQ ID NO: 2551954 - RNA, 19 nt, Artificial Sequence
  Description of Artificial Sequence: Synthetic oligonucleotide
ucuagcuccugagcguggg

SEQ ID NO: 2551955 - RNA, 19 nt, Artificial Sequence
  Description of Artificial Sequence: Synthetic oligonucleotide
cuguagguagaaggcaugg

SEQ ID NO: 2551956 - RNA, 19 nt, Artificial Sequence
  Description of Artificial Sequence: Synthetic oligonucleotide
ggaaauggcgaagagcagc

SEQ ID NO: 2551957 - RNA, 19 nt, Artificial Sequence
  Description of Artificial Sequence: Synthetic oligonucleotide
ucuacaccacuggccaugg

SEQ ID NO: 2551958 - RNA, 19 nt, Artificial Sequence
  Description of Artificial Sequence: Synthetic oligonucleotide
auggacaugagcauagcaa

SEQ ID NO: 2551959 - RNA, 19 nt, Artificial Sequence
  Description of Artificial Sequence: Synthetic oligonucleotide
gaaggcaugguacccagcu

SEQ ID NO: 2551960 - RNA, 19 nt, Artificial Sequence
  Description of Artificial Sequence: Synthetic oligonucleotide
gcaagggcagcgaagaucc

SEQ ID NO: 2551961 - RNA, 19 nt, Artificial Sequence
  Description of Artificial Sequence: Synthetic oligonucleotide
cacauggugagagacacca

SEQ ID NO: 2551962 - RNA, 19 nt, Artificial Sequence
  Description of Artificial Sequence: Synthetic oligonucleotide
ggaaagagaggcuccgcag

SEQ ID NO: 2551963 - RNA, 19 nt, Artificial Sequence
  Description of Artificial Sequence: Synthetic oligonucleotide
uugaagcacugcacagaag

SEQ ID NO: 2551964 - RNA, 19 nt, Artificial Sequence
  Description of Artificial Sequence: Synthetic oligonucleotide
gugacagagcaugaaggag

SEQ ID NO: 2551965 - RNA, 19 nt, Artificial Sequence
  Description of Artificial Sequence: Synthetic oligonucleotide
aacagcccggggcucaagu

SEQ ID NO: 2551966 - RNA, 19 nt, Artificial Sequence
  Description of Artificial Sequence: Synthetic oligonucleotide
ggaauuaaugaaccagaca

SEQ ID NO: 2551967 - RNA, 19 nt, Artificial Sequence
  Description of Artificial Sequence: Synthetic oligonucleotide
agcuuggaggagcucagcu

SEQ ID NO: 2551968 - RNA, 19 nt, Artificial Sequence
  Description of Artificial Sequence: Synthetic oligonucleotide
cucaugugguagcaccugc

SEQ ID NO: 2551969 - RNA, 19 nt, Artificial Sequence
  Description of Artificial Sequence: Synthetic oligonucleotide
ucucuagcuccugagcgug

SEQ ID NO: 2551970 - RNA, 19 nt, Artificial Sequence
  Description of Artificial Sequence: Synthetic oligonucleotide
ggucaugagggcuccagcc

SEQ ID NO: 2551971 - RNA, 19 nt, Artificial Sequence
  Description of Artificial Sequence: Synthetic oligonucleotide
aguauugagcaaacuccag

SEQ ID NO: 2551972 - RNA, 19 nt, Artificial Sequence
  Description of Artificial Sequence: Synthetic oligonucleotide
agggcagcauucuucuuca

SEQ ID NO: 2551973 - RNA, 19 nt, Artificial Sequence
  Description of Artificial Sequence: Synthetic oligonucleotide
gcgaagagcagcauaaaug

SEQ ID NO: 2551974 - RNA, 19 nt, Artificial Sequence
  Description of Artificial Sequence: Synthetic oligonucleotide
augugguagcaccugccug

SEQ ID NO: 2551975 - RNA, 19 nt, Artificial Sequence
  Description of Artificial Sequence: Synthetic oligonucleotide
agagaggcuccgcaggaga

SEQ ID NO: 2551976 - RNA, 19 nt, Artificial Sequence
  Description of Artificial Sequence: Synthetic oligonucleotide
aagggcagcgaagauccca

SEQ ID NO: 2551977 - RNA, 19 nt, Artificial Sequence
  Description of Artificial Sequence: Synthetic oligonucleotide
cuuaaagaggaaggaaaga

SEQ ID NO: 2551978 - RNA, 19 nt, Artificial Sequence
  Description of Artificial Sequence: Synthetic oligonucleotide
cuugaagcacugcacagaa

SEQ ID NO: 2551979 - RNA, 19 nt, Artificial Sequence
  Description of Artificial Sequence: Synthetic oligonucleotide
uacccgagggcagaggucu

SEQ ID NO: 2551980 - RNA, 19 nt, Artificial Sequence
  Description of Artificial Sequence: Synthetic oligonucleotide
uugggcacggugacagagc

SEQ ID NO: 2551981 - RNA, 19 nt, Artificial Sequence
  Description of Artificial Sequence: Synthetic oligonucleotide
cagcgaagaucccagccag

SEQ ID NO: 2551982 - RNA, 19 nt, Artificial Sequence
  Description of Artificial Sequence: Synthetic oligonucleotide
cuugggcacggugacagag

SEQ ID NO: 2551983 - RNA, 19 nt, Artificial Sequence
  Description of Artificial Sequence: Synthetic oligonucleotide
aagaggguuguggggagca

SEQ ID NO: 2551984 - RNA, 19 nt, Artificial Sequence
  Description of Artificial Sequence: Synthetic oligonucleotide
ggugcuguagguagaaggc

SEQ ID NO: 2551985 - RNA, 19 nt, Artificial Sequence
  Description of Artificial Sequence: Synthetic oligonucleotide
ugcccaaagaggcugccuu

SEQ ID NO: 2551986 - RNA, 19 nt, Artificial Sequence
  Description of Artificial Sequence: Synthetic oligonucleotide
uuaaugggccucagagcaa

SEQ ID NO: 2551987 - RNA, 19 nt, Artificial Sequence
  Description of Artificial Sequence: Synthetic oligonucleotide
agacagaugccauggugau

SEQ ID NO: 2551988 - RNA, 19 nt, Artificial Sequence
  Description of Artificial Sequence: Synthetic oligonucleotide
cugccugggugccagacac

SEQ ID NO: 2551989 - RNA, 19 nt, Artificial Sequence
  Description of Artificial Sequence: Synthetic oligonucleotide
gagagacaccaaguagccg

SEQ ID NO: 2551990 - RNA, 19 nt, Artificial Sequence
  Description of Artificial Sequence: Synthetic oligonucleotide
guagcaccugccugggugc

SEQ ID NO: 2551991 - RNA, 19 nt, Artificial Sequence
  Description of Artificial Sequence: Synthetic oligonucleotide
guaacacacgauggagagg

SEQ ID NO: 2551992 - RNA, 19 nt, Artificial Sequence
  Description of Artificial Sequence: Synthetic oligonucleotide
ggccagguaguauugagca

SEQ ID NO: 2551993 - RNA, 19 nt, Artificial Sequence
  Description of Artificial Sequence: Synthetic oligonucleotide
ggaaaagaacagcccgggg

SEQ ID NO: 2551994 - RNA, 19 nt, Artificial Sequence
  Description of Artificial Sequence: Synthetic oligonucleotide
cagguaguauugagcaaac

SEQ ID NO: 2551995 - RNA, 19 nt, Artificial Sequence
  Description of Artificial Sequence: Synthetic oligonucleotide
aacaggaaacgcaggcaca

SEQ ID NO: 2551996 - RNA, 19 nt, Artificial Sequence
  Description of Artificial Sequence: Synthetic oligonucleotide
agcgagggcagcauucuuc

SEQ ID NO: 2551997 - RNA, 19 nt, Artificial Sequence
  Description of Artificial Sequence: Synthetic oligonucleotide
caaguagccguuggaaaug

SEQ ID NO: 2551998 - RNA, 19 nt, Artificial Sequence
  Description of Artificial Sequence: Synthetic oligonucleotide
ggaagaaggucaugagggc

SEQ ID NO: 2551999 - RNA, 19 nt, Artificial Sequence
  Description of Artificial Sequence: Synthetic oligonucleotide
ucucaugugguagcaccug

SEQ ID NO: 2552000 - RNA, 19 nt, Artificial Sequence
  Description of Artificial Sequence: Synthetic oligonucleotide
cagaagaugguggggcagg

SEQ ID NO: 2552001 - RNA, 19 nt, Artificial Sequence
  Description of Artificial Sequence: Synthetic oligonucleotide
aagagaggcuccgcaggag

SEQ ID NO: 2552002 - RNA, 19 nt, Artificial Sequence
  Description of Artificial Sequence: Synthetic oligonucleotide
gcaggagagucccagggcc

SEQ ID NO: 2552003 - RNA, 19 nt, Artificial Sequence
  Description of Artificial Sequence: Synthetic oligonucleotide
aaguaggcguccugccaga

SEQ ID NO: 2552004 - RNA, 19 nt, Artificial Sequence
  Description of Artificial Sequence: Synthetic oligonucleotide
ggugacagagcaugaagga

SEQ ID NO: 2552005 - RNA, 19 nt, Artificial Sequence
  Description of Artificial Sequence: Synthetic oligonucleotide
aggaggaugccuacacagg

SEQ ID NO: 2552006 - RNA, 19 nt, Artificial Sequence
  Description of Artificial Sequence: Synthetic oligonucleotide
aucuacaccacuggccaug

SEQ ID NO: 2552007 - RNA, 19 nt, Artificial Sequence
  Description of Artificial Sequence: Synthetic oligonucleotide
ugagcauagcaagggcagc

SEQ ID NO: 2552008 - RNA, 19 nt, Artificial Sequence
  Description of Artificial Sequence: Synthetic oligonucleotide
acagcccggggcucaaguc

SEQ ID NO: 2552009 - RNA, 19 nt, Artificial Sequence
  Description of Artificial Sequence: Synthetic oligonucleotide
uuggaggagcucagcuuug

SEQ ID NO: 2552010 - RNA, 19 nt, Artificial Sequence
  Description of Artificial Sequence: Synthetic oligonucleotide
cgugggacgagcuucuugg

SEQ ID NO: 2552011 - RNA, 19 nt, Artificial Sequence
  Description of Artificial Sequence: Synthetic oligonucleotide
agaggaggaugccuacaca

SEQ ID NO: 2552012 - RNA, 19 nt, Artificial Sequence
  Description of Artificial Sequence: Synthetic oligonucleotide
acgcaggcacaccagcgag

SEQ ID NO: 2552013 - RNA, 19 nt, Artificial Sequence
  Description of Artificial Sequence: Synthetic oligonucleotide
agggugugaugaaguaccc

SEQ ID NO: 2552014 - RNA, 19 nt, Artificial Sequence
  Description of Artificial Sequence: Synthetic oligonucleotide
caugguacccagcugccca

SEQ ID NO: 2552015 - RNA, 19 nt, Artificial Sequence
  Description of Artificial Sequence: Synthetic oligonucleotide
uccgcaggagagucccagg

SEQ ID NO: 2552016 - RNA, 19 nt, Artificial Sequence
  Description of Artificial Sequence: Synthetic oligonucleotide
cucccucucaugugguagc

SEQ ID NO: 2552017 - RNA, 19 nt, Artificial Sequence
  Description of Artificial Sequence: Synthetic oligonucleotide
augaaggagggcacaaaca

SEQ ID NO: 2552018 - RNA, 19 nt, Artificial Sequence
  Description of Artificial Sequence: Synthetic oligonucleotide
caaacuccagauggggcag

SEQ ID NO: 2552019 - RNA, 19 nt, Artificial Sequence
  Description of Artificial Sequence: Synthetic oligonucleotide
ggcacggugacagagcaug

SEQ ID NO: 2552020 - RNA, 19 nt, Artificial Sequence
  Description of Artificial Sequence: Synthetic oligonucleotide
uaaugggccucagagcaau

SEQ ID NO: 2552021 - RNA, 19 nt, Artificial Sequence
  Description of Artificial Sequence: Synthetic oligonucleotide
cauggacaugagcauagca

SEQ ID NO: 2552022 - RNA, 19 nt, Artificial Sequence
  Description of Artificial Sequence: Synthetic oligonucleotide
acaccaaguagccguugga

SEQ ID NO: 2552023 - RNA, 19 nt, Artificial Sequence
  Description of Artificial Sequence: Synthetic oligonucleotide
agguaacacacgauggaga

SEQ ID NO: 2552024 - RNA, 19 nt, Artificial Sequence
  Description of Artificial Sequence: Synthetic oligonucleotide
gugugaugaaguacccgag

SEQ ID NO: 2552025 - RNA, 19 nt, Artificial Sequence
  Description of Artificial Sequence: Synthetic oligonucleotide
ucaaguccaccuucaccaa

SEQ ID NO: 2552026 - RNA, 19 nt, Artificial Sequence
  Description of Artificial Sequence: Synthetic oligonucleotide
aaguacccgagggcagagg

SEQ ID NO: 2552027 - RNA, 19 nt, Artificial Sequence
  Description of Artificial Sequence: Synthetic oligonucleotide
agagcagcauaaaugugau

SEQ ID NO: 2552028 - RNA, 19 nt, Artificial Sequence
  Description of Artificial Sequence: Synthetic oligonucleotide
ggcaucuacaccacuggcc

SEQ ID NO: 2552029 - RNA, 19 nt, Artificial Sequence
  Description of Artificial Sequence: Synthetic oligonucleotide
auggugagagacaccaagu

SEQ ID NO: 2552030 - RNA, 19 nt, Artificial Sequence
  Description of Artificial Sequence: Synthetic oligonucleotide
gaaguacccgagggcagag

SEQ ID NO: 2552031 - RNA, 19 nt, Artificial Sequence
  Description of Artificial Sequence: Synthetic oligonucleotide
ugagcguggggccguggga

SEQ ID NO: 2552032 - RNA, 19 nt, Artificial Sequence
  Description of Artificial Sequence: Synthetic oligonucleotide
gaagaaggucaugagggcu

SEQ ID NO: 2552033 - RNA, 19 nt, Artificial Sequence
  Description of Artificial Sequence: Synthetic oligonucleotide
gcaggcuaagguaacacac

SEQ ID NO: 2552034 - RNA, 19 nt, Artificial Sequence
  Description of Artificial Sequence: Synthetic oligonucleotide
cugagcguggggccguggg

SEQ ID NO: 2552035 - RNA, 19 nt, Artificial Sequence
  Description of Artificial Sequence: Synthetic oligonucleotide
ggcagcgaagaucccagcc

SEQ ID NO: 2552036 - RNA, 19 nt, Artificial Sequence
  Description of Artificial Sequence: Synthetic oligonucleotide
ggaaggaaagagaggcucc

SEQ ID NO: 2552037 - RNA, 19 nt, Artificial Sequence
  Description of Artificial Sequence: Synthetic oligonucleotide
uggagaggaggaugccuac

SEQ ID NO: 2552038 - RNA, 19 nt, Artificial Sequence
  Description of Artificial Sequence: Synthetic oligonucleotide
cagaggucugggcaucuac

SEQ ID NO: 2552039 - RNA, 19 nt, Artificial Sequence
  Description of Artificial Sequence: Synthetic oligonucleotide
cuucaccaauacugcaguc

SEQ ID NO: 2552040 - RNA, 19 nt, Artificial Sequence
  Description of Artificial Sequence: Synthetic oligonucleotide
cucgcuugggcacggugac

SEQ ID NO: 2552041 - RNA, 19 nt, Artificial Sequence
  Description of Artificial Sequence: Synthetic oligonucleotide
agaaggcaugguacccagc

SEQ ID NO: 2552042 - RNA, 19 nt, Artificial Sequence
  Description of Artificial Sequence: Synthetic oligonucleotide
augccauggugauggaaaa

SEQ ID NO: 2552043 - RNA, 19 nt, Artificial Sequence
  Description of Artificial Sequence: Synthetic oligonucleotide
gacucgcuugggcacggug

SEQ ID NO: 2552044 - RNA, 19 nt, Artificial Sequence
  Description of Artificial Sequence: Synthetic oligonucleotide
guagaaggcaugguaccca

SEQ ID NO: 2552045 - RNA, 19 nt, Artificial Sequence
  Description of Artificial Sequence: Synthetic oligonucleotide
gcguccugccagaagaugg

SEQ ID NO: 2552046 - RNA, 19 nt, Artificial Sequence
  Description of Artificial Sequence: Synthetic oligonucleotide
gggacgagcuucuuggcca

SEQ ID NO: 2552047 - RNA, 19 nt, Artificial Sequence
  Description of Artificial Sequence: Synthetic oligonucleotide
acugcacagaaggaauuaa

SEQ ID NO: 2552048 - RNA, 19 nt, Artificial Sequence
  Description of Artificial Sequence: Synthetic oligonucleotide
agccguuggaaauggcgaa

SEQ ID NO: 2552049 - RNA, 19 nt, Artificial Sequence
  Description of Artificial Sequence: Synthetic oligonucleotide
agggcagcgaagaucccag

SEQ ID NO: 2552050 - RNA, 19 nt, Artificial Sequence
  Description of Artificial Sequence: Synthetic oligonucleotide
acacauggugagagacacc

SEQ ID NO: 2552051 - RNA, 19 nt, Artificial Sequence
  Description of Artificial Sequence: Synthetic oligonucleotide
guaggcguccugccagaag

SEQ ID NO: 2552052 - RNA, 19 nt, Artificial Sequence
  Description of Artificial Sequence: Synthetic oligonucleotide
acugaugaagaggguugug

SEQ ID NO: 2552053 - RNA, 19 nt, Artificial Sequence
  Description of Artificial Sequence: Synthetic oligonucleotide
cagcuuuggucucuagcuc

SEQ ID NO: 2552054 - RNA, 19 nt, Artificial Sequence
  Description of Artificial Sequence: Synthetic oligonucleotide
agaggucugggcaucuaca

SEQ ID NO: 2552055 - RNA, 19 nt, Artificial Sequence
  Description of Artificial Sequence: Synthetic oligonucleotide
cuagcuccugagcgugggg

SEQ ID NO: 2552056 - RNA, 19 nt, Artificial Sequence
  Description of Artificial Sequence: Synthetic oligonucleotide
gaagaggguuguggggagc

SEQ ID NO: 2552057 - RNA, 19 nt, Artificial Sequence
  Description of Artificial Sequence: Synthetic oligonucleotide
agcguggggccgugggacg

SEQ ID NO: 2552058 - RNA, 19 nt, Artificial Sequence
  Description of Artificial Sequence: Synthetic oligonucleotide
gcacugaugaagaggguug

SEQ ID NO: 2552059 - RNA, 19 nt, Artificial Sequence
  Description of Artificial Sequence: Synthetic oligonucleotide
guacccagcugcccaaaga

SEQ ID NO: 2552060 - RNA, 19 nt, Artificial Sequence
  Description of Artificial Sequence: Synthetic oligonucleotide
ggugccagacacaugguga

SEQ ID NO: 2552061 - RNA, 19 nt, Artificial Sequence
  Description of Artificial Sequence: Synthetic oligonucleotide
agaugguggggcaggccgg

SEQ ID NO: 2552062 - RNA, 19 nt, Artificial Sequence
  Description of Artificial Sequence: Synthetic oligonucleotide
aagaucccagccaggcccu

SEQ ID NO: 2552063 - RNA, 19 nt, Artificial Sequence
  Description of Artificial Sequence: Synthetic oligonucleotide
acucgcuugggcacgguga

SEQ ID NO: 2552064 - RNA, 19 nt, Artificial Sequence
  Description of Artificial Sequence: Synthetic oligonucleotide
gaggcuccgcaggagaguc

SEQ ID NO: 2552065 - RNA, 19 nt, Artificial Sequence
  Description of Artificial Sequence: Synthetic oligonucleotide
gcagcgaagaucccagcca

SEQ ID NO: 2552066 - RNA, 19 nt, Artificial Sequence
  Description of Artificial Sequence: Synthetic oligonucleotide
agcauagcaagggcagcga

SEQ ID NO: 2552067 - RNA, 19 nt, Artificial Sequence
  Description of Artificial Sequence: Synthetic oligonucleotide
cugccagaagauggugggg

SEQ ID NO: 2552068 - RNA, 19 nt, Artificial Sequence
  Description of Artificial Sequence: Synthetic oligonucleotide
auggagaggaggaugccua

SEQ ID NO: 2552069 - RNA, 19 nt, Artificial Sequence
  Description of Artificial Sequence: Synthetic oligonucleotide
agguaguauugagcaaacu

SEQ ID NO: 2552070 - RNA, 19 nt, Artificial Sequence
  Description of Artificial Sequence: Synthetic oligonucleotide
gggugccagacacauggug

SEQ ID NO: 2552071 - RNA, 19 nt, Artificial Sequence
  Description of Artificial Sequence: Synthetic oligonucleotide
aacacacgauggagaggag

SEQ ID NO: 2552072 - RNA, 19 nt, Artificial Sequence
  Description of Artificial Sequence: Synthetic oligonucleotide
gaagagggugcuguaggua

SEQ ID NO: 2552073 - RNA, 19 nt, Artificial Sequence
  Description of Artificial Sequence: Synthetic oligonucleotide
aaauggcgaagagcagcau

SEQ ID NO: 2552074 - RNA, 19 nt, Artificial Sequence
  Description of Artificial Sequence: Synthetic oligonucleotide
ggaaacgcaggcacaccag

SEQ ID NO: 2552075 - RNA, 19 nt, Artificial Sequence
  Description of Artificial Sequence: Synthetic oligonucleotide
gcgaagaucccagccaggc

SEQ ID NO: 2552076 - RNA, 19 nt, Artificial Sequence
  Description of Artificial Sequence: Synthetic oligonucleotide
gggugugaugaaguacccg

SEQ ID NO: 2552077 - RNA, 19 nt, Artificial Sequence
  Description of Artificial Sequence: Synthetic oligonucleotide
agcaugaaggagggcacaa

SEQ ID NO: 2552078 - RNA, 19 nt, Artificial Sequence
  Description of Artificial Sequence: Synthetic oligonucleotide
gugggacgagcuucuuggc

SEQ ID NO: 2552079 - RNA, 19 nt, Artificial Sequence
  Description of Artificial Sequence: Synthetic oligonucleotide
cuccgcaggagagucccag

SEQ ID NO: 2552080 - RNA, 19 nt, Artificial Sequence
  Description of Artificial Sequence: Synthetic oligonucleotide
agcgaagaucccagccagg

SEQ ID NO: 2552081 - RNA, 19 nt, Artificial Sequence
  Description of Artificial Sequence: Synthetic oligonucleotide
aaugggccucagagcaaug

SEQ ID NO: 2552082 - RNA, 19 nt, Artificial Sequence
  Description of Artificial Sequence: Synthetic oligonucleotide
ggcaggcuaagguaacaca

SEQ ID NO: 2552083 - RNA, 19 nt, Artificial Sequence
  Description of Artificial Sequence: Synthetic oligonucleotide
gggcacaaacaggaaacgc

SEQ ID NO: 2552084 - RNA, 19 nt, Artificial Sequence
  Description of Artificial Sequence: Synthetic oligonucleotide
gagcauuaaugggccucag

SEQ ID NO: 2552085 - RNA, 19 nt, Artificial Sequence
  Description of Artificial Sequence: Synthetic oligonucleotide
ucccucucaugugguagca

SEQ ID NO: 2552086 - RNA, 19 nt, Artificial Sequence
  Description of Artificial Sequence: Synthetic oligonucleotide
caccuucaccaauacugca

SEQ ID NO: 2552087 - RNA, 19 nt, Artificial Sequence
  Description of Artificial Sequence: Synthetic oligonucleotide
ugggugccagacacauggu

SEQ ID NO: 2552088 - RNA, 19 nt, Artificial Sequence
  Description of Artificial Sequence: Synthetic oligonucleotide
gugcuguagguagaaggca

SEQ ID NO: 2552089 - RNA, 19 nt, Artificial Sequence
  Description of Artificial Sequence: Synthetic oligonucleotide
gggcaucuacaccacuggc

SEQ ID NO: 2552090 - RNA, 19 nt, Artificial Sequence
  Description of Artificial Sequence: Synthetic oligonucleotide
augguacccagcugcccaa

SEQ ID NO: 2552091 - RNA, 19 nt, Artificial Sequence
  Description of Artificial Sequence: Synthetic oligonucleotide
caggaaacgcaggcacacc

SEQ ID NO: 2552092 - RNA, 19 nt, Artificial Sequence
  Description of Artificial Sequence: Synthetic oligonucleotide
gcauucuucuucaucagcu

SEQ ID NO: 2552093 - RNA, 19 nt, Artificial Sequence
  Description of Artificial Sequence: Synthetic oligonucleotide
acgagcuucuuggccaggu

SEQ ID NO: 2552094 - RNA, 19 nt, Artificial Sequence
  Description of Artificial Sequence: Synthetic oligonucleotide
ccuacacagggugugauga

SEQ ID NO: 2552095 - RNA, 19 nt, Artificial Sequence
  Description of Artificial Sequence: Synthetic oligonucleotide
cucagagcaaugccuuaaa

SEQ ID NO: 2552096 - RNA, 19 nt, Artificial Sequence
  Description of Artificial Sequence: Synthetic oligonucleotide
ggagcauuaaugggccuca

SEQ ID NO: 2552097 - RNA, 19 nt, Artificial Sequence
  Description of Artificial Sequence: Synthetic oligonucleotide
gcagcauaaaugugaugaa

SEQ ID NO: 2552098 - RNA, 19 nt, Artificial Sequence
  Description of Artificial Sequence: Synthetic oligonucleotide
ccgcaggagagucccaggg

SEQ ID NO: 2552099 - RNA, 19 nt, Artificial Sequence
  Description of Artificial Sequence: Synthetic oligonucleotide
gucucuagcuccugagcgu

SEQ ID NO: 2552100 - RNA, 19 nt, Artificial Sequence
  Description of Artificial Sequence: Synthetic oligonucleotide
agaggcuccgcaggagagu

SEQ ID NO: 2552101 - RNA, 19 nt, Artificial Sequence
  Description of Artificial Sequence: Synthetic oligonucleotide
caugugguagcaccugccu

SEQ ID NO: 2552102 - RNA, 19 nt, Artificial Sequence
  Description of Artificial Sequence: Synthetic oligonucleotide
ugccugggugccagacaca

SEQ ID NO: 2552103 - RNA, 19 nt, Artificial Sequence
  Description of Artificial Sequence: Synthetic oligonucleotide
caggagagucccagggcca

SEQ ID NO: 2552104 - RNA, 19 nt, Artificial Sequence
  Description of Artificial Sequence: Synthetic oligonucleotide
gcuguagguagaaggcaug

SEQ ID NO: 2552105 - RNA, 19 nt, Artificial Sequence
  Description of Artificial Sequence: Synthetic oligonucleotide
ugccuacacagggugugau

SEQ ID NO: 2552106 - RNA, 19 nt, Artificial Sequence
  Description of Artificial Sequence: Synthetic oligonucleotide
ccagguaguauugagcaaa

SEQ ID NO: 2552107 - RNA, 19 nt, Artificial Sequence
  Description of Artificial Sequence: Synthetic oligonucleotide
gggagcauuaaugggccuc

SEQ ID NO: 2552108 - RNA, 19 nt, Artificial Sequence
  Description of Artificial Sequence: Synthetic oligonucleotide
cucucaugugguagcaccu

SEQ ID NO: 2552109 - RNA, 19 nt, Artificial Sequence
  Description of Artificial Sequence: Synthetic oligonucleotide
ggcuccgcaggagaguccc

SEQ ID NO: 2552110 - RNA, 19 nt, Artificial Sequence
  Description of Artificial Sequence: Synthetic oligonucleotide
cugcacagaaggaauuaau

SEQ ID NO: 2552111 - RNA, 19 nt, Artificial Sequence
  Description of Artificial Sequence: Synthetic oligonucleotide
gccuacacagggugugaug

SEQ ID NO: 2552112 - RNA, 19 nt, Artificial Sequence
  Description of Artificial Sequence: Synthetic oligonucleotide
uggcgaagagcagcauaaa

SEQ ID NO: 2552113 - RNA, 19 nt, Artificial Sequence
  Description of Artificial Sequence: Synthetic oligonucleotide
cuuggccagguaguauuga

SEQ ID NO: 2552114 - RNA, 19 nt, Artificial Sequence
  Description of Artificial Sequence: Synthetic oligonucleotide
gaggaugccuacacagggu

SEQ ID NO: 2552115 - RNA, 19 nt, Artificial Sequence
  Description of Artificial Sequence: Synthetic oligonucleotide
ugguagcaccugccugggu

SEQ ID NO: 2552116 - RNA, 19 nt, Artificial Sequence
  Description of Artificial Sequence: Synthetic oligonucleotide
gccguuggaaauggcgaag

SEQ ID NO: 2552117 - RNA, 19 nt, Artificial Sequence
  Description of Artificial Sequence: Synthetic oligonucleotide
aggcuccgcaggagagucc

SEQ ID NO: 2552118 - RNA, 19 nt, Artificial Sequence
  Description of Artificial Sequence: Synthetic oligonucleotide
gccaccucccucucaugug

SEQ ID NO: 2552119 - RNA, 19 nt, Artificial Sequence
  Description of Artificial Sequence: Synthetic oligonucleotide
ggcaggccggacucgcuug

SEQ ID NO: 2552120 - RNA, 19 nt, Artificial Sequence
  Description of Artificial Sequence: Synthetic oligonucleotide
ccucccucucaugugguag

SEQ ID NO: 2552121 - RNA, 19 nt, Artificial Sequence
  Description of Artificial Sequence: Synthetic oligonucleotide
cacaccagcgagggcagca

SEQ ID NO: 2552122 - RNA, 19 nt, Artificial Sequence
  Description of Artificial Sequence: Synthetic oligonucleotide
ggcaugguacccagcugcc

SEQ ID NO: 2552123 - RNA, 19 nt, Artificial Sequence
  Description of Artificial Sequence: Synthetic oligonucleotide
ccagaagaugguggggcag

SEQ ID NO: 2552124 - RNA, 19 nt, Artificial Sequence
  Description of Artificial Sequence: Synthetic oligonucleotide
cguuggaaauggcgaagag

SEQ ID NO: 2552125 - RNA, 19 nt, Artificial Sequence
  Description of Artificial Sequence: Synthetic oligonucleotide
cagcuuggaggagcucagc

SEQ ID NO: 2552126 - RNA, 19 nt, Artificial Sequence
  Description of Artificial Sequence: Synthetic oligonucleotide
ggccggacucgcuugggca

SEQ ID NO: 2552127 - RNA, 19 nt, Artificial Sequence
  Description of Artificial Sequence: Synthetic oligonucleotide
gcuccugagcguggggccg

SEQ ID NO: 2552128 - RNA, 19 nt, Artificial Sequence
  Description of Artificial Sequence: Synthetic oligonucleotide
ggcgaagagcagcauaaau

SEQ ID NO: 2552129 - RNA, 19 nt, Artificial Sequence
  Description of Artificial Sequence: Synthetic oligonucleotide
agcccggggcucaagucca

SEQ ID NO: 2552130 - RNA, 19 nt, Artificial Sequence
  Description of Artificial Sequence: Synthetic oligonucleotide
gucugggcaucuacaccac

SEQ ID NO: 2552131 - RNA, 19 nt, Artificial Sequence
  Description of Artificial Sequence: Synthetic oligonucleotide
gccggacucgcuugggcac

SEQ ID NO: 2552132 - RNA, 19 nt, Artificial Sequence
  Description of Artificial Sequence: Synthetic oligonucleotide
ccaaguagccguuggaaau

SEQ ID NO: 2552133 - RNA, 19 nt, Artificial Sequence
  Description of Artificial Sequence: Synthetic oligonucleotide
gaacagcccggggcucaag

SEQ ID NO: 2552134 - RNA, 19 nt, Artificial Sequence
  Description of Artificial Sequence: Synthetic oligonucleotide
accucccucucauguggua

SEQ ID NO: 2552135 - RNA, 19 nt, Artificial Sequence
  Description of Artificial Sequence: Synthetic oligonucleotide
gcauagcaagggcagcgaa

SEQ ID NO: 2552136 - RNA, 19 nt, Artificial Sequence
  Description of Artificial Sequence: Synthetic oligonucleotide
ucgcuugggcacggugaca

SEQ ID NO: 2552137 - RNA, 19 nt, Artificial Sequence
  Description of Artificial Sequence: Synthetic oligonucleotide
ccacuggccauggacauga

SEQ ID NO: 2552138 - RNA, 19 nt, Artificial Sequence
  Description of Artificial Sequence: Synthetic oligonucleotide
cgcuugggcacggugacag

SEQ ID NO: 2552139 - RNA, 19 nt, Artificial Sequence
  Description of Artificial Sequence: Synthetic oligonucleotide
guacccgagggcagagguc

SEQ ID NO: 2552140 - RNA, 19 nt, Artificial Sequence
  Description of Artificial Sequence: Synthetic oligonucleotide
gguuguggggagcauuaau

SEQ ID NO: 2552141 - RNA, 19 nt, Artificial Sequence
  Description of Artificial Sequence: Synthetic oligonucleotide
cacuggccauggacaugag

SEQ ID NO: 2552142 - RNA, 19 nt, Artificial Sequence
  Description of Artificial Sequence: Synthetic oligonucleotide
cacggugacagagcaugaa

SEQ ID NO: 2552143 - RNA, 19 nt, Artificial Sequence
  Description of Artificial Sequence: Synthetic oligonucleotide
gaaggucaugagggcucca

SEQ ID NO: 2552144 - RNA, 19 nt, Artificial Sequence
  Description of Artificial Sequence: Synthetic oligonucleotide
acauggugagagacaccaa

SEQ ID NO: 2552145 - RNA, 19 nt, Artificial Sequence
  Description of Artificial Sequence: Synthetic oligonucleotide
ggcguccugccagaagaug

SEQ ID NO: 2552146 - RNA, 19 nt, Artificial Sequence
  Description of Artificial Sequence: Synthetic oligonucleotide
gcgagggcagcauucuucu

SEQ ID NO: 2552147 - RNA, 19 nt, Artificial Sequence
  Description of Artificial Sequence: Synthetic oligonucleotide
gcaugguacccagcugccc

SEQ ID NO: 2552148 - RNA, 19 nt, Artificial Sequence
  Description of Artificial Sequence: Synthetic oligonucleotide
aggagggcacaaacaggaa

SEQ ID NO: 2552149 - RNA, 19 nt, Artificial Sequence
  Description of Artificial Sequence: Synthetic oligonucleotide
cacugaugaagaggguugu

SEQ ID NO: 2552150 - RNA, 19 nt, Artificial Sequence
  Description of Artificial Sequence: Synthetic oligonucleotide
ccuucaccaauacugcagu

SEQ ID NO: 2552151 - RNA, 19 nt, Artificial Sequence
  Description of Artificial Sequence: Synthetic oligonucleotide
agaacagcccggggcucaa

SEQ ID NO: 2552152 - RNA, 19 nt, Artificial Sequence
  Description of Artificial Sequence: Synthetic oligonucleotide
caaguccaccuucaccaau

SEQ ID NO: 2552153 - RNA, 19 nt, Artificial Sequence
  Description of Artificial Sequence: Synthetic oligonucleotide
caucagcuuggaggagcuc

SEQ ID NO: 2552154 - RNA, 19 nt, Artificial Sequence
  Description of Artificial Sequence: Synthetic oligonucleotide
uccugagcguggggccgug

SEQ ID NO: 2552155 - RNA, 19 nt, Artificial Sequence
  Description of Artificial Sequence: Synthetic oligonucleotide
gggccgugggacgagcuuc

SEQ ID NO: 2552156 - RNA, 19 nt, Artificial Sequence
  Description of Artificial Sequence: Synthetic oligonucleotide
agaucccagccaggcccug

SEQ ID NO: 2552157 - RNA, 19 nt, Artificial Sequence
  Description of Artificial Sequence: Synthetic oligonucleotide
ccgugggacgagcuucuug

SEQ ID NO: 2552158 - RNA, 19 nt, Artificial Sequence
  Description of Artificial Sequence: Synthetic oligonucleotide
gagacaccaaguagccguu

SEQ ID NO: 2552159 - RNA, 19 nt, Artificial Sequence
  Description of Artificial Sequence: Synthetic oligonucleotide
gcugcccaaagaggcugcc

SEQ ID NO: 2552160 - RNA, 19 nt, Artificial Sequence
  Description of Artificial Sequence: Synthetic oligonucleotide
gggcucaaguccaccuuca

SEQ ID NO: 2552161 - RNA, 19 nt, Artificial Sequence
  Description of Artificial Sequence: Synthetic oligonucleotide
ccguuggaaauggcgaaga

SEQ ID NO: 2552162 - RNA, 19 nt, Artificial Sequence
  Description of Artificial Sequence: Synthetic oligonucleotide
cagaugccauggugaugga

SEQ ID NO: 2552163 - RNA, 19 nt, Artificial Sequence
  Description of Artificial Sequence: Synthetic oligonucleotide
aggcguccugccagaagau

SEQ ID NO: 2552164 - RNA, 19 nt, Artificial Sequence
  Description of Artificial Sequence: Synthetic oligonucleotide
guggggccgugggacgagc

SEQ ID NO: 2552165 - RNA, 19 nt, Artificial Sequence
  Description of Artificial Sequence: Synthetic oligonucleotide
gcaugaaggagggcacaaa

SEQ ID NO: 2552166 - RNA, 19 nt, Artificial Sequence
  Description of Artificial Sequence: Synthetic oligonucleotide
cacugaggaagagggugcu

SEQ ID NO: 2552167 - RNA, 19 nt, Artificial Sequence
  Description of Artificial Sequence: Synthetic oligonucleotide
ggaggagcucagcuuuggu

SEQ ID NO: 2552168 - RNA, 19 nt, Artificial Sequence
  Description of Artificial Sequence: Synthetic oligonucleotide
cuacaccacuggccaugga

SEQ ID NO: 2552169 - RNA, 19 nt, Artificial Sequence
  Description of Artificial Sequence: Synthetic oligonucleotide
ggggcaggcuaagguaaca

SEQ ID NO: 2552170 - RNA, 19 nt, Artificial Sequence
  Description of Artificial Sequence: Synthetic oligonucleotide
caucuacaccacuggccau

SEQ ID NO: 2552171 - RNA, 19 nt, Artificial Sequence
  Description of Artificial Sequence: Synthetic oligonucleotide
ccucagagcaaugccuuaa

SEQ ID NO: 2552172 - RNA, 19 nt, Artificial Sequence
  Description of Artificial Sequence: Synthetic oligonucleotide
ggcugccuugaagcacugc

SEQ ID NO: 2552173 - RNA, 19 nt, Artificial Sequence
  Description of Artificial Sequence: Synthetic oligonucleotide
caccucccucucauguggu

SEQ ID NO: 2552174 - RNA, 19 nt, Artificial Sequence
  Description of Artificial Sequence: Synthetic oligonucleotide
ggcuaagguaacacacgau

SEQ ID NO: 2552175 - RNA, 19 nt, Artificial Sequence
  Description of Artificial Sequence: Synthetic oligonucleotide
ggaugccuacacagggugu

SEQ ID NO: 2552176 - RNA, 19 nt, Artificial Sequence
  Description of Artificial Sequence: Synthetic oligonucleotide
gcuugggcacggugacaga

SEQ ID NO: 2552177 - RNA, 19 nt, Artificial Sequence
  Description of Artificial Sequence: Synthetic oligonucleotide
gcacggugacagagcauga

SEQ ID NO: 2552178 - RNA, 19 nt, Artificial Sequence
  Description of Artificial Sequence: Synthetic oligonucleotide
ggccucagagcaaugccuu

SEQ ID NO: 2552179 - RNA, 19 nt, Artificial Sequence
  Description of Artificial Sequence: Synthetic oligonucleotide
ggguuguggggagcauuaa

SEQ ID NO: 2552180 - RNA, 19 nt, Artificial Sequence
  Description of Artificial Sequence: Synthetic oligonucleotide
cugcccaaagaggcugccu

SEQ ID NO: 2552181 - RNA, 19 nt, Artificial Sequence
  Description of Artificial Sequence: Synthetic oligonucleotide
ggggagcauuaaugggccu

SEQ ID NO: 2552182 - RNA, 19 nt, Artificial Sequence
  Description of Artificial Sequence: Synthetic oligonucleotide
gcaaugccuuaaagaggaa

SEQ ID NO: 2552183 - RNA, 19 nt, Artificial Sequence
  Description of Artificial Sequence: Synthetic oligonucleotide
cccggggcucaaguccacc

SEQ ID NO: 2552184 - RNA, 19 nt, Artificial Sequence
  Description of Artificial Sequence: Synthetic oligonucleotide
ccugagcguggggccgugg

SEQ ID NO: 2552185 - RNA, 19 nt, Artificial Sequence
  Description of Artificial Sequence: Synthetic oligonucleotide
gcacugcacagaaggaauu

SEQ ID NO: 2552186 - RNA, 19 nt, Artificial Sequence
  Description of Artificial Sequence: Synthetic oligonucleotide
gcacaccagcgagggcagc

SEQ ID NO: 2552187 - RNA, 19 nt, Artificial Sequence
  Description of Artificial Sequence: Synthetic oligonucleotide
cguccugccagaagauggu

SEQ ID NO: 2552188 - RNA, 19 nt, Artificial Sequence
  Description of Artificial Sequence: Synthetic oligonucleotide
cggacucgcuugggcacgg

SEQ ID NO: 2552189 - RNA, 19 nt, Artificial Sequence
  Description of Artificial Sequence: Synthetic oligonucleotide
gcguggggccgugggacga

SEQ ID NO: 2552190 - RNA, 19 nt, Artificial Sequence
  Description of Artificial Sequence: Synthetic oligonucleotide
gggcaggccggacucgcuu

SEQ ID NO: 2552191 - RNA, 19 nt, Artificial Sequence
  Description of Artificial Sequence: Synthetic oligonucleotide
cuccugagcguggggccgu

SEQ ID NO: 2552192 - RNA, 19 nt, Artificial Sequence
  Description of Artificial Sequence: Synthetic oligonucleotide
caccagcgagggcagcauu

SEQ ID NO: 2552193 - RNA, 19 nt, Artificial Sequence
  Description of Artificial Sequence: Synthetic oligonucleotide
gcagaggucugggcaucua

SEQ ID NO: 2552194 - RNA, 19 nt, Artificial Sequence
  Description of Artificial Sequence: Synthetic oligonucleotide
ccagcgagggcagcauucu

SEQ ID NO: 2552195 - RNA, 19 nt, Artificial Sequence
  Description of Artificial Sequence: Synthetic oligonucleotide
cagcgagggcagcauucuu

SEQ ID NO: 2552196 - RNA, 19 nt, Artificial Sequence
  Description of Artificial Sequence: Synthetic oligonucleotide
ggggccgugggacgagcuu

SEQ ID NO: 2552197 - RNA, 19 nt, Artificial Sequence
  Description of Artificial Sequence: Synthetic oligonucleotide
cguggggccgugggacgag

SEQ ID NO: 2552198 - RNA, 19 nt, Artificial Sequence
  Description of Artificial Sequence: Synthetic oligonucleotide
gcuccgcaggagaguccca

SEQ ID NO: 2552199 - RNA, 19 nt, Artificial Sequence
  Description of Artificial Sequence: Synthetic oligonucleotide
gcccggggcucaaguccac

SEQ ID NO: 2552200 - RNA, 19 nt, Artificial Sequence
  Description of Artificial Sequence: Synthetic oligonucleotide
gggcuccagccaccucccu

SEQ ID NO: 2552201 - RNA, 19 nt, Artificial Sequence
  Description of Artificial Sequence: Synthetic oligonucleotide
gggcacggugacagagcau

SEQ ID NO: 2552202 - RNA, 19 nt, Artificial Sequence
  Description of Artificial Sequence: Synthetic oligonucleotide
ggacucgcuugggcacggu

SEQ ID NO: 2552203 - RNA, 19 nt, Artificial Sequence
  Description of Artificial Sequence: Synthetic oligonucleotide
cggggcucaaguccaccuu

SEQ ID NO: 2552204 - RNA, 19 nt, Artificial Sequence
  Description of Artificial Sequence: Synthetic oligonucleotide
cgagggcagcauucuucuu

SEQ ID NO: 2552205 - RNA, 19 nt, Artificial Sequence
  Description of Artificial Sequence: Synthetic oligonucleotide
gccgugggacgagcuucuu

SEQ ID NO: 2552206 - RNA, 19 nt, Artificial Sequence
  Description of Artificial Sequence: Synthetic oligonucleotide
aaagaauccacauggaggc

SEQ ID NO: 2552207 - RNA, 19 nt, Artificial Sequence
  Description of Artificial Sequence: Synthetic oligonucleotide
aaaagcgugauucaacugc

SEQ ID NO: 2552208 - RNA, 19 nt, Artificial Sequence
  Description of Artificial Sequence: Synthetic oligonucleotide
aacaauaaugccugcaacc

SEQ ID NO: 2552209 - RNA, 19 nt, Artificial Sequence
  Description of Artificial Sequence: Synthetic oligonucleotide
auuuucaaacaucagauac

SEQ ID NO: 2552210 - RNA, 19 nt, Artificial Sequence
  Description of Artificial Sequence: Synthetic oligonucleotide
aauaaauuacaacuggcag

SEQ ID NO: 2552211 - RNA, 19 nt, Artificial Sequence
  Description of Artificial Sequence: Synthetic oligonucleotide
aguauuuaccccuaaacac

SEQ ID NO: 2552212 - RNA, 19 nt, Artificial Sequence
  Description of Artificial Sequence: Synthetic oligonucleotide
aaucuuagaguuucgggac

SEQ ID NO: 2552213 - RNA, 19 nt, Artificial Sequence
  Description of Artificial Sequence: Synthetic oligonucleotide
uaaacagccgcuuucauag

SEQ ID NO: 2552214 - RNA, 19 nt, Artificial Sequence
  Description of Artificial Sequence: Synthetic oligonucleotide
aaaagaauccacauggagg

SEQ ID NO: 2552215 - RNA, 19 nt, Artificial Sequence
  Description of Artificial Sequence: Synthetic oligonucleotide
ucaaauaaaagucauguua

SEQ ID NO: 2552216 - RNA, 19 nt, Artificial Sequence
  Description of Artificial Sequence: Synthetic oligonucleotide
aaguccaguucucuaaugc

SEQ ID NO: 2552217 - RNA, 19 nt, Artificial Sequence
  Description of Artificial Sequence: Synthetic oligonucleotide
acacauaccaaucuuagag

SEQ ID NO: 2552218 - RNA, 19 nt, Artificial Sequence
  Description of Artificial Sequence: Synthetic oligonucleotide
aauaaaagucauguuagag

SEQ ID NO: 2552219 - RNA, 19 nt, Artificial Sequence
  Description of Artificial Sequence: Synthetic oligonucleotide
auuuugcacauuuucaaac

SEQ ID NO: 2552220 - RNA, 19 nt, Artificial Sequence
  Description of Artificial Sequence: Synthetic oligonucleotide
aaacaauaaugccugcaac

SEQ ID NO: 2552221 - RNA, 19 nt, Artificial Sequence
  Description of Artificial Sequence: Synthetic oligonucleotide
agaguauuuaccccuaaac

SEQ ID NO: 2552222 - RNA, 19 nt, Artificial Sequence
  Description of Artificial Sequence: Synthetic oligonucleotide
aaugccugcaaccacggag

SEQ ID NO: 2552223 - RNA, 19 nt, Artificial Sequence
  Description of Artificial Sequence: Synthetic oligonucleotide
aauuacuuuucuaaagggg

SEQ ID NO: 2552224 - RNA, 19 nt, Artificial Sequence
  Description of Artificial Sequence: Synthetic oligonucleotide
uaaaagucauguuagagaa

SEQ ID NO: 2552225 - RNA, 19 nt, Artificial Sequence
  Description of Artificial Sequence: Synthetic oligonucleotide
agaaauuacuuuucuaaag

SEQ ID NO: 2552226 - RNA, 19 nt, Artificial Sequence
  Description of Artificial Sequence: Synthetic oligonucleotide
ucggaaguuaucuaggaag

SEQ ID NO: 2552227 - RNA, 19 nt, Artificial Sequence
  Description of Artificial Sequence: Synthetic oligonucleotide
agaguuucgggacuaaaac

SEQ ID NO: 2552228 - RNA, 19 nt, Artificial Sequence
  Description of Artificial Sequence: Synthetic oligonucleotide
ugcacauuuucaaacauca

SEQ ID NO: 2552229 - RNA, 19 nt, Artificial Sequence
  Description of Artificial Sequence: Synthetic oligonucleotide
uuucaaacuaguccuuugg

SEQ ID NO: 2552230 - RNA, 19 nt, Artificial Sequence
  Description of Artificial Sequence: Synthetic oligonucleotide
aauuacaacuggcagacau

SEQ ID NO: 2552231 - RNA, 19 nt, Artificial Sequence
  Description of Artificial Sequence: Synthetic oligonucleotide
aauaaugccugcaaccacg

SEQ ID NO: 2552232 - RNA, 19 nt, Artificial Sequence
  Description of Artificial Sequence: Synthetic oligonucleotide
auaaaagucauguuagaga

SEQ ID NO: 2552233 - RNA, 19 nt, Artificial Sequence
  Description of Artificial Sequence: Synthetic oligonucleotide
aguuucgggacuaaaaccc

SEQ ID NO: 2552234 - RNA, 19 nt, Artificial Sequence
  Description of Artificial Sequence: Synthetic oligonucleotide
ucaggcuuaggauagacca

SEQ ID NO: 2552235 - RNA, 19 nt, Artificial Sequence
  Description of Artificial Sequence: Synthetic oligonucleotide
agagaaauuacuuuucuaa

SEQ ID NO: 2552236 - RNA, 19 nt, Artificial Sequence
  Description of Artificial Sequence: Synthetic oligonucleotide
ucucuaaugcacauguaag

SEQ ID NO: 2552237 - RNA, 19 nt, Artificial Sequence
  Description of Artificial Sequence: Synthetic oligonucleotide
auaaauuacaacuggcaga

SEQ ID NO: 2552238 - RNA, 19 nt, Artificial Sequence
  Description of Artificial Sequence: Synthetic oligonucleotide
aagagcucagggcugcucc

SEQ ID NO: 2552239 - RNA, 19 nt, Artificial Sequence
  Description of Artificial Sequence: Synthetic oligonucleotide
auuuaucaugaagaaagcc

SEQ ID NO: 2552240 - RNA, 19 nt, Artificial Sequence
  Description of Artificial Sequence: Synthetic oligonucleotide
cuaaacaccaggacaauag

SEQ ID NO: 2552241 - RNA, 19 nt, Artificial Sequence
  Description of Artificial Sequence: Synthetic oligonucleotide
uugaguaacauaugcacca

SEQ ID NO: 2552242 - RNA, 19 nt, Artificial Sequence
  Description of Artificial Sequence: Synthetic oligonucleotide
aaauaaauuacaacuggca

SEQ ID NO: 2552243 - RNA, 19 nt, Artificial Sequence
  Description of Artificial Sequence: Synthetic oligonucleotide
uaaauuacaacuggcagac

SEQ ID NO: 2552244 - RNA, 19 nt, Artificial Sequence
  Description of Artificial Sequence: Synthetic oligonucleotide
ucauguuagagaaauuacu

SEQ ID NO: 2552245 - RNA, 19 nt, Artificial Sequence
  Description of Artificial Sequence: Synthetic oligonucleotide
uacagcauuuaucaugaag

SEQ ID NO: 2552246 - RNA, 19 nt, Artificial Sequence
  Description of Artificial Sequence: Synthetic oligonucleotide
uuauccaccaaccuguaaa

SEQ ID NO: 2552247 - RNA, 19 nt, Artificial Sequence
  Description of Artificial Sequence: Synthetic oligonucleotide
gcauuuaucaugaagaaag

SEQ ID NO: 2552248 - RNA, 19 nt, Artificial Sequence
  Description of Artificial Sequence: Synthetic oligonucleotide
aagccugccuauuuuacuc

SEQ ID NO: 2552249 - RNA, 19 nt, Artificial Sequence
  Description of Artificial Sequence: Synthetic oligonucleotide
uuaggauagaccacagcag

SEQ ID NO: 2552250 - RNA, 19 nt, Artificial Sequence
  Description of Artificial Sequence: Synthetic oligonucleotide
aaagucauguuagagaaau

SEQ ID NO: 2552251 - RNA, 19 nt, Artificial Sequence
  Description of Artificial Sequence: Synthetic oligonucleotide
uccaaucaaaauaaauuac

SEQ ID NO: 2552252 - RNA, 19 nt, Artificial Sequence
  Description of Artificial Sequence: Synthetic oligonucleotide
uaaaacucuuuauauaaaa

SEQ ID NO: 2552253 - RNA, 19 nt, Artificial Sequence
  Description of Artificial Sequence: Synthetic oligonucleotide
agagcugaauauuuugcac

SEQ ID NO: 2552254 - RNA, 19 nt, Artificial Sequence
  Description of Artificial Sequence: Synthetic oligonucleotide
uuuaccccuaaacaccagg

SEQ ID NO: 2552255 - RNA, 19 nt, Artificial Sequence
  Description of Artificial Sequence: Synthetic oligonucleotide
uacauucacacucuggcca

SEQ ID NO: 2552256 - RNA, 19 nt, Artificial Sequence
  Description of Artificial Sequence: Synthetic oligonucleotide
ucucuaagagcucagggcu

SEQ ID NO: 2552257 - RNA, 19 nt, Artificial Sequence
  Description of Artificial Sequence: Synthetic oligonucleotide
gacaucacuucucuaagag

SEQ ID NO: 2552258 - RNA, 19 nt, Artificial Sequence
  Description of Artificial Sequence: Synthetic oligonucleotide
ugugugaaaagcgugauuc

SEQ ID NO: 2552259 - RNA, 19 nt, Artificial Sequence
  Description of Artificial Sequence: Synthetic oligonucleotide
aaacacaccacauguguga

SEQ ID NO: 2552260 - RNA, 19 nt, Artificial Sequence
  Description of Artificial Sequence: Synthetic oligonucleotide
ugaggcagaguauuuaccc

SEQ ID NO: 2552261 - RNA, 19 nt, Artificial Sequence
  Description of Artificial Sequence: Synthetic oligonucleotide
uaaugcacauguaagcaca

SEQ ID NO: 2552262 - RNA, 19 nt, Artificial Sequence
  Description of Artificial Sequence: Synthetic oligonucleotide
aguucucuaaugcacaugu

SEQ ID NO: 2552263 - RNA, 19 nt, Artificial Sequence
  Description of Artificial Sequence: Synthetic oligonucleotide
aucauuauccaccaaccug

SEQ ID NO: 2552264 - RNA, 19 nt, Artificial Sequence
  Description of Artificial Sequence: Synthetic oligonucleotide
uuucaaacaucagauacug

SEQ ID NO: 2552265 - RNA, 19 nt, Artificial Sequence
  Description of Artificial Sequence: Synthetic oligonucleotide
aaauaaaagucauguuaga

SEQ ID NO: 2552266 - RNA, 19 nt, Artificial Sequence
  Description of Artificial Sequence: Synthetic oligonucleotide
ugaaaagcgugauucaacu

SEQ ID NO: 2552267 - RNA, 19 nt, Artificial Sequence
  Description of Artificial Sequence: Synthetic oligonucleotide
agcagcaucgaucauuauc

SEQ ID NO: 2552268 - RNA, 19 nt, Artificial Sequence
  Description of Artificial Sequence: Synthetic oligonucleotide
aaaacccugacaaucagca

SEQ ID NO: 2552269 - RNA, 19 nt, Artificial Sequence
  Description of Artificial Sequence: Synthetic oligonucleotide
ucgaucauuauccaccaac

SEQ ID NO: 2552270 - RNA, 19 nt, Artificial Sequence
  Description of Artificial Sequence: Synthetic oligonucleotide
cuuaggauagaccacagca

SEQ ID NO: 2552271 - RNA, 19 nt, Artificial Sequence
  Description of Artificial Sequence: Synthetic oligonucleotide
uguucuuccuaaacagccg

SEQ ID NO: 2552272 - RNA, 19 nt, Artificial Sequence
  Description of Artificial Sequence: Synthetic oligonucleotide
uucucuaaugcacauguaa

SEQ ID NO: 2552273 - RNA, 19 nt, Artificial Sequence
  Description of Artificial Sequence: Synthetic oligonucleotide
aucagcaugaaaccaauga

SEQ ID NO: 2552274 - RNA, 19 nt, Artificial Sequence
  Description of Artificial Sequence: Synthetic oligonucleotide
aauaagugacccgaacauc

SEQ ID NO: 2552275 - RNA, 19 nt, Artificial Sequence
  Description of Artificial Sequence: Synthetic oligonucleotide
uuugggucauuuaaaacuc

SEQ ID NO: 2552276 - RNA, 19 nt, Artificial Sequence
  Description of Artificial Sequence: Synthetic oligonucleotide
uucucuaagagcucagggc

SEQ ID NO: 2552277 - RNA, 19 nt, Artificial Sequence
  Description of Artificial Sequence: Synthetic oligonucleotide
aagugacccgaacaucagc

SEQ ID NO: 2552278 - RNA, 19 nt, Artificial Sequence
  Description of Artificial Sequence: Synthetic oligonucleotide
ugcacauguaagcacaaac

SEQ ID NO: 2552279 - RNA, 19 nt, Artificial Sequence
  Description of Artificial Sequence: Synthetic oligonucleotide
ucuaaugcacauguaagca

SEQ ID NO: 2552280 - RNA, 19 nt, Artificial Sequence
  Description of Artificial Sequence: Synthetic oligonucleotide
cauggaggcaauaagugac

SEQ ID NO: 2552281 - RNA, 19 nt, Artificial Sequence
  Description of Artificial Sequence: Synthetic oligonucleotide
acugaggcagaguauuuac

SEQ ID NO: 2552282 - RNA, 19 nt, Artificial Sequence
  Description of Artificial Sequence: Synthetic oligonucleotide
acagcauuuaucaugaaga

SEQ ID NO: 2552283 - RNA, 19 nt, Artificial Sequence
  Description of Artificial Sequence: Synthetic oligonucleotide
uauuuaccccuaaacacca

SEQ ID NO: 2552284 - RNA, 19 nt, Artificial Sequence
  Description of Artificial Sequence: Synthetic oligonucleotide
auaccaaucuuagaguuuc

SEQ ID NO: 2552285 - RNA, 19 nt, Artificial Sequence
  Description of Artificial Sequence: Synthetic oligonucleotide
gaguauuuaccccuaaaca

SEQ ID NO: 2552286 - RNA, 19 nt, Artificial Sequence
  Description of Artificial Sequence: Synthetic oligonucleotide
aaacuaguccuuuggguca

SEQ ID NO: 2552287 - RNA, 19 nt, Artificial Sequence
  Description of Artificial Sequence: Synthetic oligonucleotide
acaauagagccucagcuca

SEQ ID NO: 2552288 - RNA, 19 nt, Artificial Sequence
  Description of Artificial Sequence: Synthetic oligonucleotide
cucuaaugcacauguaagc

SEQ ID NO: 2552289 - RNA, 19 nt, Artificial Sequence
  Description of Artificial Sequence: Synthetic oligonucleotide
ucagcaucagguauuuuga

SEQ ID NO: 2552290 - RNA, 19 nt, Artificial Sequence
  Description of Artificial Sequence: Synthetic oligonucleotide
caaacuaguccuuuggguc

SEQ ID NO: 2552291 - RNA, 19 nt, Artificial Sequence
  Description of Artificial Sequence: Synthetic oligonucleotide
aggacaauagagccucagc

SEQ ID NO: 2552292 - RNA, 19 nt, Artificial Sequence
  Description of Artificial Sequence: Synthetic oligonucleotide
gaguuucgggacuaaaacc

SEQ ID NO: 2552293 - RNA, 19 nt, Artificial Sequence
  Description of Artificial Sequence: Synthetic oligonucleotide
uguagaaaacacaccacau

SEQ ID NO: 2552294 - RNA, 19 nt, Artificial Sequence
  Description of Artificial Sequence: Synthetic oligonucleotide
auuggauacagcauuuauc

SEQ ID NO: 2552295 - RNA, 19 nt, Artificial Sequence
  Description of Artificial Sequence: Synthetic oligonucleotide
acagagcugaauauuuugc

SEQ ID NO: 2552296 - RNA, 19 nt, Artificial Sequence
  Description of Artificial Sequence: Synthetic oligonucleotide
guauuuaccccuaaacacc

SEQ ID NO: 2552297 - RNA, 19 nt, Artificial Sequence
  Description of Artificial Sequence: Synthetic oligonucleotide
uaaaacccugacaaucagc

SEQ ID NO: 2552298 - RNA, 19 nt, Artificial Sequence
  Description of Artificial Sequence: Synthetic oligonucleotide
uuaucuaggaagccugccu

SEQ ID NO: 2552299 - RNA, 19 nt, Artificial Sequence
  Description of Artificial Sequence: Synthetic oligonucleotide
uugcgcauuggauacagca

SEQ ID NO: 2552300 - RNA, 19 nt, Artificial Sequence
  Description of Artificial Sequence: Synthetic oligonucleotide
acaacuggcagacaucacu

SEQ ID NO: 2552301 - RNA, 19 nt, Artificial Sequence
  Description of Artificial Sequence: Synthetic oligonucleotide
aaacaccaggacaauagag

SEQ ID NO: 2552302 - RNA, 19 nt, Artificial Sequence
  Description of Artificial Sequence: Synthetic oligonucleotide
agagccucagcucaggaca

SEQ ID NO: 2552303 - RNA, 19 nt, Artificial Sequence
  Description of Artificial Sequence: Synthetic oligonucleotide
cauuuaucaugaagaaagc

SEQ ID NO: 2552304 - RNA, 19 nt, Artificial Sequence
  Description of Artificial Sequence: Synthetic oligonucleotide
ggauacagcauuuaucaug

SEQ ID NO: 2552305 - RNA, 19 nt, Artificial Sequence
  Description of Artificial Sequence: Synthetic oligonucleotide
caaucuuagaguuucggga

SEQ ID NO: 2552306 - RNA, 19 nt, Artificial Sequence
  Description of Artificial Sequence: Synthetic oligonucleotide
uuacaacuggcagacauca

SEQ ID NO: 2552307 - RNA, 19 nt, Artificial Sequence
  Description of Artificial Sequence: Synthetic oligonucleotide
ccgaacaucagcaugaaac

SEQ ID NO: 2552308 - RNA, 19 nt, Artificial Sequence
  Description of Artificial Sequence: Synthetic oligonucleotide
uaaacaccaggacaauaga

SEQ ID NO: 2552309 - RNA, 19 nt, Artificial Sequence
  Description of Artificial Sequence: Synthetic oligonucleotide
agcaucgaucauuauccac

SEQ ID NO: 2552310 - RNA, 19 nt, Artificial Sequence
  Description of Artificial Sequence: Synthetic oligonucleotide
aaaaguccaguucucuaau

SEQ ID NO: 2552311 - RNA, 19 nt, Artificial Sequence
  Description of Artificial Sequence: Synthetic oligonucleotide
aaguuaucuaggaagccug

SEQ ID NO: 2552312 - RNA, 19 nt, Artificial Sequence
  Description of Artificial Sequence: Synthetic oligonucleotide
aaaguccaguucucuaaug

SEQ ID NO: 2552313 - RNA, 19 nt, Artificial Sequence
  Description of Artificial Sequence: Synthetic oligonucleotide
cuuugggucauuuaaaacu

SEQ ID NO: 2552314 - RNA, 19 nt, Artificial Sequence
  Description of Artificial Sequence: Synthetic oligonucleotide
cuaaugcacauguaagcac

SEQ ID NO: 2552315 - RNA, 19 nt, Artificial Sequence
  Description of Artificial Sequence: Synthetic oligonucleotide
cacauggaggcaauaagug

SEQ ID NO: 2552316 - RNA, 19 nt, Artificial Sequence
  Description of Artificial Sequence: Synthetic oligonucleotide
ucaugaagaaagccagugu

SEQ ID NO: 2552317 - RNA, 19 nt, Artificial Sequence
  Description of Artificial Sequence: Synthetic oligonucleotide
agaaagccaguguagaaaa

SEQ ID NO: 2552318 - RNA, 19 nt, Artificial Sequence
  Description of Artificial Sequence: Synthetic oligonucleotide
aagagccagacucgagcac

SEQ ID NO: 2552319 - RNA, 19 nt, Artificial Sequence
  Description of Artificial Sequence: Synthetic oligonucleotide
cucagcucaggacacauac

SEQ ID NO: 2552320 - RNA, 19 nt, Artificial Sequence
  Description of Artificial Sequence: Synthetic oligonucleotide
gggacuaaaacccugacaa

SEQ ID NO: 2552321 - RNA, 19 nt, Artificial Sequence
  Description of Artificial Sequence: Synthetic oligonucleotide
gagcugaauauuuugcaca

SEQ ID NO: 2552322 - RNA, 19 nt, Artificial Sequence
  Description of Artificial Sequence: Synthetic oligonucleotide
gacaauagagccucagcuc

SEQ ID NO: 2552323 - RNA, 19 nt, Artificial Sequence
  Description of Artificial Sequence: Synthetic oligonucleotide
accaggacaauagagccuc

SEQ ID NO: 2552324 - RNA, 19 nt, Artificial Sequence
  Description of Artificial Sequence: Synthetic oligonucleotide
aaaacacaccacaugugug

SEQ ID NO: 2552325 - RNA, 19 nt, Artificial Sequence
  Description of Artificial Sequence: Synthetic oligonucleotide
auaagugacccgaacauca

SEQ ID NO: 2552326 - RNA, 19 nt, Artificial Sequence
  Description of Artificial Sequence: Synthetic oligonucleotide
aagaaagccaguguagaaa

SEQ ID NO: 2552327 - RNA, 19 nt, Artificial Sequence
  Description of Artificial Sequence: Synthetic oligonucleotide
caguguagaaaacacacca

SEQ ID NO: 2552328 - RNA, 19 nt, Artificial Sequence
  Description of Artificial Sequence: Synthetic oligonucleotide
uagaguuucgggacuaaaa

SEQ ID NO: 2552329 - RNA, 19 nt, Artificial Sequence
  Description of Artificial Sequence: Synthetic oligonucleotide
uuaccccuaaacaccagga

SEQ ID NO: 2552330 - RNA, 19 nt, Artificial Sequence
  Description of Artificial Sequence: Synthetic oligonucleotide
aauagagccucagcucagg

SEQ ID NO: 2552331 - RNA, 19 nt, Artificial Sequence
  Description of Artificial Sequence: Synthetic oligonucleotide
acaauaaugccugcaacca

SEQ ID NO: 2552332 - RNA, 19 nt, Artificial Sequence
  Description of Artificial Sequence: Synthetic oligonucleotide
guguagaaaacacaccaca

SEQ ID NO: 2552333 - RNA, 19 nt, Artificial Sequence
  Description of Artificial Sequence: Synthetic oligonucleotide
ucacuugcgcauuggauac

SEQ ID NO: 2552334 - RNA, 19 nt, Artificial Sequence
  Description of Artificial Sequence: Synthetic oligonucleotide
accacaugugugaaaagcg

SEQ ID NO: 2552335 - RNA, 19 nt, Artificial Sequence
  Description of Artificial Sequence: Synthetic oligonucleotide
agagucacagagcugaaua

SEQ ID NO: 2552336 - RNA, 19 nt, Artificial Sequence
  Description of Artificial Sequence: Synthetic oligonucleotide
aguguagaaaacacaccac

SEQ ID NO: 2552337 - RNA, 19 nt, Artificial Sequence
  Description of Artificial Sequence: Synthetic oligonucleotide
acggcauuccuucucucac

SEQ ID NO: 2552338 - RNA, 19 nt, Artificial Sequence
  Description of Artificial Sequence: Synthetic oligonucleotide
gaaaagcgugauucaacug

SEQ ID NO: 2552339 - RNA, 19 nt, Artificial Sequence
  Description of Artificial Sequence: Synthetic oligonucleotide
aucagguauuuugaguaac

SEQ ID NO: 2552340 - RNA, 19 nt, Artificial Sequence
  Description of Artificial Sequence: Synthetic oligonucleotide
acauaccaaucuuagaguu

SEQ ID NO: 2552341 - RNA, 19 nt, Artificial Sequence
  Description of Artificial Sequence: Synthetic oligonucleotide
uaagugacccgaacaucag

SEQ ID NO: 2552342 - RNA, 19 nt, Artificial Sequence
  Description of Artificial Sequence: Synthetic oligonucleotide
gcagcaucgaucauuaucc

SEQ ID NO: 2552343 - RNA, 19 nt, Artificial Sequence
  Description of Artificial Sequence: Synthetic oligonucleotide
agucauguuagagaaauua

SEQ ID NO: 2552344 - RNA, 19 nt, Artificial Sequence
  Description of Artificial Sequence: Synthetic oligonucleotide
guucuuccuaaacagccgc

SEQ ID NO: 2552345 - RNA, 19 nt, Artificial Sequence
  Description of Artificial Sequence: Synthetic oligonucleotide
ugacccgaacaucagcaug

SEQ ID NO: 2552346 - RNA, 19 nt, Artificial Sequence
  Description of Artificial Sequence: Synthetic oligonucleotide
uaucuaggaagccugccua

SEQ ID NO: 2552347 - RNA, 19 nt, Artificial Sequence
  Description of Artificial Sequence: Synthetic oligonucleotide
gguauuuugaguaacauau

SEQ ID NO: 2552348 - RNA, 19 nt, Artificial Sequence
  Description of Artificial Sequence: Synthetic oligonucleotide
gaggcagaguauuuacccc

SEQ ID NO: 2552349 - RNA, 19 nt, Artificial Sequence
  Description of Artificial Sequence: Synthetic oligonucleotide
agcaucagguauuuugagu

SEQ ID NO: 2552350 - RNA, 19 nt, Artificial Sequence
  Description of Artificial Sequence: Synthetic oligonucleotide
auguuagagaaauuacuuu

SEQ ID NO: 2552351 - RNA, 19 nt, Artificial Sequence
  Description of Artificial Sequence: Synthetic oligonucleotide
uccuuugggucauuuaaaa

SEQ ID NO: 2552352 - RNA, 19 nt, Artificial Sequence
  Description of Artificial Sequence: Synthetic oligonucleotide
caucacuucucuaagagcu

SEQ ID NO: 2552353 - RNA, 19 nt, Artificial Sequence
  Description of Artificial Sequence: Synthetic oligonucleotide
cacaugugugaaaagcgug

SEQ ID NO: 2552354 - RNA, 19 nt, Artificial Sequence
  Description of Artificial Sequence: Synthetic oligonucleotide
guuucaaacuaguccuuug

SEQ ID NO: 2552355 - RNA, 19 nt, Artificial Sequence
  Description of Artificial Sequence: Synthetic oligonucleotide
ccagucaauacauucacac

SEQ ID NO: 2552356 - RNA, 19 nt, Artificial Sequence
  Description of Artificial Sequence: Synthetic oligonucleotide
aacaucagcaugaaaccaa

SEQ ID NO: 2552357 - RNA, 19 nt, Artificial Sequence
  Description of Artificial Sequence: Synthetic oligonucleotide
auagaccacagcagcaucg

SEQ ID NO: 2552358 - RNA, 19 nt, Artificial Sequence
  Description of Artificial Sequence: Synthetic oligonucleotide
gaggcaauaagugacccga

SEQ ID NO: 2552359 - RNA, 19 nt, Artificial Sequence
  Description of Artificial Sequence: Synthetic oligonucleotide
ugauucaacugcucaggcu

SEQ ID NO: 2552360 - RNA, 19 nt, Artificial Sequence
  Description of Artificial Sequence: Synthetic oligonucleotide
cuaaaacccugacaaucag

SEQ ID NO: 2552361 - RNA, 19 nt, Artificial Sequence
  Description of Artificial Sequence: Synthetic oligonucleotide
uuucgggacuaaaacccug

SEQ ID NO: 2552362 - RNA, 19 nt, Artificial Sequence
  Description of Artificial Sequence: Synthetic oligonucleotide
acuaaaacccugacaauca

SEQ ID NO: 2552363 - RNA, 19 nt, Artificial Sequence
  Description of Artificial Sequence: Synthetic oligonucleotide
ugugaaaagcgugauucaa

SEQ ID NO: 2552364 - RNA, 19 nt, Artificial Sequence
  Description of Artificial Sequence: Synthetic oligonucleotide
cauuuaaaacucuuuauau

SEQ ID NO: 2552365 - RNA, 19 nt, Artificial Sequence
  Description of Artificial Sequence: Synthetic oligonucleotide
uucgggacuaaaacccuga

SEQ ID NO: 2552366 - RNA, 19 nt, Artificial Sequence
  Description of Artificial Sequence: Synthetic oligonucleotide
aguccaguucucuaaugca

SEQ ID NO: 2552367 - RNA, 19 nt, Artificial Sequence
  Description of Artificial Sequence: Synthetic oligonucleotide
aguuaucuaggaagccugc

SEQ ID NO: 2552368 - RNA, 19 nt, Artificial Sequence
  Description of Artificial Sequence: Synthetic oligonucleotide
agcgugauucaacugcuca

SEQ ID NO: 2552369 - RNA, 19 nt, Artificial Sequence
  Description of Artificial Sequence: Synthetic oligonucleotide
gauucaacugcucaggcuu

SEQ ID NO: 2552370 - RNA, 19 nt, Artificial Sequence
  Description of Artificial Sequence: Synthetic oligonucleotide
uagagaaauuacuuuucua

SEQ ID NO: 2552371 - RNA, 19 nt, Artificial Sequence
  Description of Artificial Sequence: Synthetic oligonucleotide
auuacaacuggcagacauc

SEQ ID NO: 2552372 - RNA, 19 nt, Artificial Sequence
  Description of Artificial Sequence: Synthetic oligonucleotide
accaaucuuagaguuucgg

SEQ ID NO: 2552373 - RNA, 19 nt, Artificial Sequence
  Description of Artificial Sequence: Synthetic oligonucleotide
caugaagaaagccagugua

SEQ ID NO: 2552374 - RNA, 19 nt, Artificial Sequence
  Description of Artificial Sequence: Synthetic oligonucleotide
aggcagaguauuuaccccu

SEQ ID NO: 2552375 - RNA, 19 nt, Artificial Sequence
  Description of Artificial Sequence: Synthetic oligonucleotide
aguaacauaugcaccaaaa

SEQ ID NO: 2552376 - RNA, 19 nt, Artificial Sequence
  Description of Artificial Sequence: Synthetic oligonucleotide
aguaucauuuccaaucaaa

SEQ ID NO: 2552377 - RNA, 19 nt, Artificial Sequence
  Description of Artificial Sequence: Synthetic oligonucleotide
cugaggcagaguauuuacc

SEQ ID NO: 2552378 - RNA, 19 nt, Artificial Sequence
  Description of Artificial Sequence: Synthetic oligonucleotide
ucacacucuggccaucgga

SEQ ID NO: 2552379 - RNA, 19 nt, Artificial Sequence
  Description of Artificial Sequence: Synthetic oligonucleotide
uuccuaaacagccgcuuuc

SEQ ID NO: 2552380 - RNA, 19 nt, Artificial Sequence
  Description of Artificial Sequence: Synthetic oligonucleotide
auggaggcaauaagugacc

SEQ ID NO: 2552381 - RNA, 19 nt, Artificial Sequence
  Description of Artificial Sequence: Synthetic oligonucleotide
gucauguuagagaaauuac

SEQ ID NO: 2552382 - RNA, 19 nt, Artificial Sequence
  Description of Artificial Sequence: Synthetic oligonucleotide
aaguaucauuuccaaucaa

SEQ ID NO: 2552383 - RNA, 19 nt, Artificial Sequence
  Description of Artificial Sequence: Synthetic oligonucleotide
ccaaucuuagaguuucggg

SEQ ID NO: 2552384 - RNA, 19 nt, Artificial Sequence
  Description of Artificial Sequence: Synthetic oligonucleotide
ucucacuugcgcauuggau

SEQ ID NO: 2552385 - RNA, 19 nt, Artificial Sequence
  Description of Artificial Sequence: Synthetic oligonucleotide
uccagucaauacauucaca

SEQ ID NO: 2552386 - RNA, 19 nt, Artificial Sequence
  Description of Artificial Sequence: Synthetic oligonucleotide
gcaucgaucauuauccacc

SEQ ID NO: 2552387 - RNA, 19 nt, Artificial Sequence
  Description of Artificial Sequence: Synthetic oligonucleotide
ugucaccucucacuugcgc

SEQ ID NO: 2552388 - RNA, 19 nt, Artificial Sequence
  Description of Artificial Sequence: Synthetic oligonucleotide
cagggcugcuccuagaguc

SEQ ID NO: 2552389 - RNA, 19 nt, Artificial Sequence
  Description of Artificial Sequence: Synthetic oligonucleotide
ucacuucucuaagagcuca

SEQ ID NO: 2552390 - RNA, 19 nt, Artificial Sequence
  Description of Artificial Sequence: Synthetic oligonucleotide
gaggccacggcauuccuuc

SEQ ID NO: 2552391 - RNA, 19 nt, Artificial Sequence
  Description of Artificial Sequence: Synthetic oligonucleotide
guaucauuuccaaucaaaa

SEQ ID NO: 2552392 - RNA, 19 nt, Artificial Sequence
  Description of Artificial Sequence: Synthetic oligonucleotide
cugcucaggcuuaggauag

SEQ ID NO: 2552393 - RNA, 19 nt, Artificial Sequence
  Description of Artificial Sequence: Synthetic oligonucleotide
ugcgcauuggauacagcau

SEQ ID NO: 2552394 - RNA, 19 nt, Artificial Sequence
  Description of Artificial Sequence: Synthetic oligonucleotide
gccaucggaaguuaucuag

SEQ ID NO: 2552395 - RNA, 19 nt, Artificial Sequence
  Description of Artificial Sequence: Synthetic oligonucleotide
gugauucaacugcucaggc

SEQ ID NO: 2552396 - RNA, 19 nt, Artificial Sequence
  Description of Artificial Sequence: Synthetic oligonucleotide
uugggucauuuaaaacucu

SEQ ID NO: 2552397 - RNA, 19 nt, Artificial Sequence
  Description of Artificial Sequence: Synthetic oligonucleotide
caauaaugccugcaaccac

SEQ ID NO: 2552398 - RNA, 19 nt, Artificial Sequence
  Description of Artificial Sequence: Synthetic oligonucleotide
acuucucuaagagcucagg

SEQ ID NO: 2552399 - RNA, 19 nt, Artificial Sequence
  Description of Artificial Sequence: Synthetic oligonucleotide
augccugcaaccacggagg

SEQ ID NO: 2552400 - RNA, 19 nt, Artificial Sequence
  Description of Artificial Sequence: Synthetic oligonucleotide
uccuaaacagccgcuuuca

SEQ ID NO: 2552401 - RNA, 19 nt, Artificial Sequence
  Description of Artificial Sequence: Synthetic oligonucleotide
gauagaccacagcagcauc

SEQ ID NO: 2552402 - RNA, 19 nt, Artificial Sequence
  Description of Artificial Sequence: Synthetic oligonucleotide
auucacacucuggccaucg

SEQ ID NO: 2552403 - RNA, 19 nt, Artificial Sequence
  Description of Artificial Sequence: Synthetic oligonucleotide
gacacauaccaaucuuaga

SEQ ID NO: 2552404 - RNA, 19 nt, Artificial Sequence
  Description of Artificial Sequence: Synthetic oligonucleotide
auaaugccugcaaccacgg

SEQ ID NO: 2552405 - RNA, 19 nt, Artificial Sequence
  Description of Artificial Sequence: Synthetic oligonucleotide
ugggucauuuaaaacucuu

SEQ ID NO: 2552406 - RNA, 19 nt, Artificial Sequence
  Description of Artificial Sequence: Synthetic oligonucleotide
gaaguuaucuaggaagccu

SEQ ID NO: 2552407 - RNA, 19 nt, Artificial Sequence
  Description of Artificial Sequence: Synthetic oligonucleotide
agacaucacuucucuaaga

SEQ ID NO: 2552408 - RNA, 19 nt, Artificial Sequence
  Description of Artificial Sequence: Synthetic oligonucleotide
gcaauaagugacccgaaca

SEQ ID NO: 2552409 - RNA, 19 nt, Artificial Sequence
  Description of Artificial Sequence: Synthetic oligonucleotide
cucacuugcgcauuggaua

SEQ ID NO: 2552410 - RNA, 19 nt, Artificial Sequence
  Description of Artificial Sequence: Synthetic oligonucleotide
aucuuagaguuucgggacu

SEQ ID NO: 2552411 - RNA, 19 nt, Artificial Sequence
  Description of Artificial Sequence: Synthetic oligonucleotide
uucacacucuggccaucgg

SEQ ID NO: 2552412 - RNA, 19 nt, Artificial Sequence
  Description of Artificial Sequence: Synthetic oligonucleotide
uggccaucggaaguuaucu

SEQ ID NO: 2552413 - RNA, 19 nt, Artificial Sequence
  Description of Artificial Sequence: Synthetic oligonucleotide
ggucauuuaaaacucuuua

SEQ ID NO: 2552414 - RNA, 19 nt, Artificial Sequence
  Description of Artificial Sequence: Synthetic oligonucleotide
agacucgagcaccuguucu

SEQ ID NO: 2552415 - RNA, 19 nt, Artificial Sequence
  Description of Artificial Sequence: Synthetic oligonucleotide
uucuuccuaaacagccgcu

SEQ ID NO: 2552416 - RNA, 19 nt, Artificial Sequence
  Description of Artificial Sequence: Synthetic oligonucleotide
acaugugugaaaagcguga

SEQ ID NO: 2552417 - RNA, 19 nt, Artificial Sequence
  Description of Artificial Sequence: Synthetic oligonucleotide
cauguuagagaaauuacuu

SEQ ID NO: 2552418 - RNA, 19 nt, Artificial Sequence
  Description of Artificial Sequence: Synthetic oligonucleotide
cagagcugaauauuuugca

SEQ ID NO: 2552419 - RNA, 19 nt, Artificial Sequence
  Description of Artificial Sequence: Synthetic oligonucleotide
acuccagucaauacauuca

SEQ ID NO: 2552420 - RNA, 19 nt, Artificial Sequence
  Description of Artificial Sequence: Synthetic oligonucleotide
acuugcgcauuggauacag

SEQ ID NO: 2552421 - RNA, 19 nt, Artificial Sequence
  Description of Artificial Sequence: Synthetic oligonucleotide
guuaucuaggaagccugcc

SEQ ID NO: 2552422 - RNA, 19 nt, Artificial Sequence
  Description of Artificial Sequence: Synthetic oligonucleotide
uagagccucagcucaggac

SEQ ID NO: 2552423 - RNA, 19 nt, Artificial Sequence
  Description of Artificial Sequence: Synthetic oligonucleotide
caauagagccucagcucag

SEQ ID NO: 2552424 - RNA, 19 nt, Artificial Sequence
  Description of Artificial Sequence: Synthetic oligonucleotide
cucagggcugcuccuagag

SEQ ID NO: 2552425 - RNA, 19 nt, Artificial Sequence
  Description of Artificial Sequence: Synthetic oligonucleotide
gugaaaagcgugauucaac

SEQ ID NO: 2552426 - RNA, 19 nt, Artificial Sequence
  Description of Artificial Sequence: Synthetic oligonucleotide
gacccgaacaucagcauga

SEQ ID NO: 2552427 - RNA, 19 nt, Artificial Sequence
  Description of Artificial Sequence: Synthetic oligonucleotide
cagauacugaggcagagua

SEQ ID NO: 2552428 - RNA, 19 nt, Artificial Sequence
  Description of Artificial Sequence: Synthetic oligonucleotide
aucggaaguuaucuaggaa

SEQ ID NO: 2552429 - RNA, 19 nt, Artificial Sequence
  Description of Artificial Sequence: Synthetic oligonucleotide
gacaaucagcaucagguau

SEQ ID NO: 2552430 - RNA, 19 nt, Artificial Sequence
  Description of Artificial Sequence: Synthetic oligonucleotide
gccaguguagaaaacacac

SEQ ID NO: 2552431 - RNA, 19 nt, Artificial Sequence
  Description of Artificial Sequence: Synthetic oligonucleotide
ggacacauaccaaucuuag

SEQ ID NO: 2552432 - RNA, 19 nt, Artificial Sequence
  Description of Artificial Sequence: Synthetic oligonucleotide
gcaucagguauuuugagua

SEQ ID NO: 2552433 - RNA, 19 nt, Artificial Sequence
  Description of Artificial Sequence: Synthetic oligonucleotide
gaucauuauccaccaaccu

SEQ ID NO: 2552434 - RNA, 19 nt, Artificial Sequence
  Description of Artificial Sequence: Synthetic oligonucleotide
agcauuuaucaugaagaaa

SEQ ID NO: 2552435 - RNA, 19 nt, Artificial Sequence
  Description of Artificial Sequence: Synthetic oligonucleotide
cucuaagagcucagggcug

SEQ ID NO: 2552436 - RNA, 19 nt, Artificial Sequence
  Description of Artificial Sequence: Synthetic oligonucleotide
cagcaucagguauuuugag

SEQ ID NO: 2552437 - RNA, 19 nt, Artificial Sequence
  Description of Artificial Sequence: Synthetic oligonucleotide
ggaggcaauaagugacccg

SEQ ID NO: 2552438 - RNA, 19 nt, Artificial Sequence
  Description of Artificial Sequence: Synthetic oligonucleotide
ucaacugcucaggcuuagg

SEQ ID NO: 2552439 - RNA, 19 nt, Artificial Sequence
  Description of Artificial Sequence: Synthetic oligonucleotide
uaggaagccugccuauuuu

SEQ ID NO: 2552440 - RNA, 19 nt, Artificial Sequence
  Description of Artificial Sequence: Synthetic oligonucleotide
cuggcagacaucacuucuc

SEQ ID NO: 2552441 - RNA, 19 nt, Artificial Sequence
  Description of Artificial Sequence: Synthetic oligonucleotide
cgaucauuauccaccaacc

SEQ ID NO: 2552442 - RNA, 19 nt, Artificial Sequence
  Description of Artificial Sequence: Synthetic oligonucleotide
gucaccucucacuugcgca

SEQ ID NO: 2552443 - RNA, 19 nt, Artificial Sequence
  Description of Artificial Sequence: Synthetic oligonucleotide
acauucacacucuggccau

SEQ ID NO: 2552444 - RNA, 19 nt, Artificial Sequence
  Description of Artificial Sequence: Synthetic oligonucleotide
cucucacuccagucaauac

SEQ ID NO: 2552445 - RNA, 19 nt, Artificial Sequence
  Description of Artificial Sequence: Synthetic oligonucleotide
ccaucggaaguuaucuagg

SEQ ID NO: 2552446 - RNA, 19 nt, Artificial Sequence
  Description of Artificial Sequence: Synthetic oligonucleotide
caucgaucauuauccacca

SEQ ID NO: 2552447 - RNA, 19 nt, Artificial Sequence
  Description of Artificial Sequence: Synthetic oligonucleotide
uucaacugcucaggcuuag

SEQ ID NO: 2552448 - RNA, 19 nt, Artificial Sequence
  Description of Artificial Sequence: Synthetic oligonucleotide
caggcuuaggauagaccac

SEQ ID NO: 2552449 - RNA, 19 nt, Artificial Sequence
  Description of Artificial Sequence: Synthetic oligonucleotide
ucgagcaccuguucuuccu

SEQ ID NO: 2552450 - RNA, 19 nt, Artificial Sequence
  Description of Artificial Sequence: Synthetic oligonucleotide
cauagcugucaccucucac

SEQ ID NO: 2552451 - RNA, 19 nt, Artificial Sequence
  Description of Artificial Sequence: Synthetic oligonucleotide
ggacaauagagccucagcu

SEQ ID NO: 2552452 - RNA, 19 nt, Artificial Sequence
  Description of Artificial Sequence: Synthetic oligonucleotide
ucgggacuaaaacccugac

SEQ ID NO: 2552453 - RNA, 19 nt, Artificial Sequence
  Description of Artificial Sequence: Synthetic oligonucleotide
uggauacagcauuuaucau

SEQ ID NO: 2552454 - RNA, 19 nt, Artificial Sequence
  Description of Artificial Sequence: Synthetic oligonucleotide
caucggaaguuaucuagga

SEQ ID NO: 2552455 - RNA, 19 nt, Artificial Sequence
  Description of Artificial Sequence: Synthetic oligonucleotide
uuagaguuucgggacuaaa

SEQ ID NO: 2552456 - RNA, 19 nt, Artificial Sequence
  Description of Artificial Sequence: Synthetic oligonucleotide
cuaaacagccgcuuucaua

SEQ ID NO: 2552457 - RNA, 19 nt, Artificial Sequence
  Description of Artificial Sequence: Synthetic oligonucleotide
aaugcacauguaagcacaa

SEQ ID NO: 2552458 - RNA, 19 nt, Artificial Sequence
  Description of Artificial Sequence: Synthetic oligonucleotide
acauguaagcacaaacauu

SEQ ID NO: 2552459 - RNA, 19 nt, Artificial Sequence
  Description of Artificial Sequence: Synthetic oligonucleotide
auagagccucagcucagga

SEQ ID NO: 2552460 - RNA, 19 nt, Artificial Sequence
  Description of Artificial Sequence: Synthetic oligonucleotide
acucgagcaccuguucuuc

SEQ ID NO: 2552461 - RNA, 19 nt, Artificial Sequence
  Description of Artificial Sequence: Synthetic oligonucleotide
uccuucucucacuccaguc

SEQ ID NO: 2552462 - RNA, 19 nt, Artificial Sequence
  Description of Artificial Sequence: Synthetic oligonucleotide
aucacuucucuaagagcuc

SEQ ID NO: 2552463 - RNA, 19 nt, Artificial Sequence
  Description of Artificial Sequence: Synthetic oligonucleotide
caucagcaugaaaccaaug

SEQ ID NO: 2552464 - RNA, 19 nt, Artificial Sequence
  Description of Artificial Sequence: Synthetic oligonucleotide
ucuuagaguuucgggacua

SEQ ID NO: 2552465 - RNA, 19 nt, Artificial Sequence
  Description of Artificial Sequence: Synthetic oligonucleotide
acaccacaugugugaaaag

SEQ ID NO: 2552466 - RNA, 19 nt, Artificial Sequence
  Description of Artificial Sequence: Synthetic oligonucleotide
cauuuucaaacaucagaua

SEQ ID NO: 2552467 - RNA, 19 nt, Artificial Sequence
  Description of Artificial Sequence: Synthetic oligonucleotide
uagaccacagcagcaucga

SEQ ID NO: 2552468 - RNA, 19 nt, Artificial Sequence
  Description of Artificial Sequence: Synthetic oligonucleotide
auuauccaccaaccuguaa

SEQ ID NO: 2552469 - RNA, 19 nt, Artificial Sequence
  Description of Artificial Sequence: Synthetic oligonucleotide
acaaucagcaucagguauu

SEQ ID NO: 2552470 - RNA, 19 nt, Artificial Sequence
  Description of Artificial Sequence: Synthetic oligonucleotide
caauaagugacccgaacau

SEQ ID NO: 2552471 - RNA, 19 nt, Artificial Sequence
  Description of Artificial Sequence: Synthetic oligonucleotide
acggaggccacggcauucc

SEQ ID NO: 2552472 - RNA, 19 nt, Artificial Sequence
  Description of Artificial Sequence: Synthetic oligonucleotide
ucucucacuccagucaaua

SEQ ID NO: 2552473 - RNA, 19 nt, Artificial Sequence
  Description of Artificial Sequence: Synthetic oligonucleotide
gugugaaaagcgugauuca

SEQ ID NO: 2552474 - RNA, 19 nt, Artificial Sequence
  Description of Artificial Sequence: Synthetic oligonucleotide
uacaacuggcagacaucac

SEQ ID NO: 2552475 - RNA, 19 nt, Artificial Sequence
  Description of Artificial Sequence: Synthetic oligonucleotide
gaguaacauaugcaccaaa

SEQ ID NO: 2552476 - RNA, 19 nt, Artificial Sequence
  Description of Artificial Sequence: Synthetic oligonucleotide
aagcgugauucaacugcuc

SEQ ID NO: 2552477 - RNA, 19 nt, Artificial Sequence
  Description of Artificial Sequence: Synthetic oligonucleotide
cagcauuuaucaugaagaa

SEQ ID NO: 2552478 - RNA, 19 nt, Artificial Sequence
  Description of Artificial Sequence: Synthetic oligonucleotide
agccugccuauuuuacucu

SEQ ID NO: 2552479 - RNA, 19 nt, Artificial Sequence
  Description of Artificial Sequence: Synthetic oligonucleotide
cacauguaagcacaaacau

SEQ ID NO: 2552480 - RNA, 19 nt, Artificial Sequence
  Description of Artificial Sequence: Synthetic oligonucleotide
cacaccacaugugugaaaa

SEQ ID NO: 2552481 - RNA, 19 nt, Artificial Sequence
  Description of Artificial Sequence: Synthetic oligonucleotide
cacuucucuaagagcucag

SEQ ID NO: 2552482 - RNA, 19 nt, Artificial Sequence
  Description of Artificial Sequence: Synthetic oligonucleotide
aucuaggaagccugccuau

SEQ ID NO: 2552483 - RNA, 19 nt, Artificial Sequence
  Description of Artificial Sequence: Synthetic oligonucleotide
gcgugauucaacugcucag

SEQ ID NO: 2552484 - RNA, 19 nt, Artificial Sequence
  Description of Artificial Sequence: Synthetic oligonucleotide
aggaagccugccuauuuua

SEQ ID NO: 2552485 - RNA, 19 nt, Artificial Sequence
  Description of Artificial Sequence: Synthetic oligonucleotide
cucgagcaccuguucuucc

SEQ ID NO: 2552486 - RNA, 19 nt, Artificial Sequence
  Description of Artificial Sequence: Synthetic oligonucleotide
ggaaguuaucuaggaagcc

SEQ ID NO: 2552487 - RNA, 19 nt, Artificial Sequence
  Description of Artificial Sequence: Synthetic oligonucleotide
uacugaggcagaguauuua

SEQ ID NO: 2552488 - RNA, 19 nt, Artificial Sequence
  Description of Artificial Sequence: Synthetic oligonucleotide
aaauuacaacuggcagaca

SEQ ID NO: 2552489 - RNA, 19 nt, Artificial Sequence
  Description of Artificial Sequence: Synthetic oligonucleotide
agucacagagcugaauauu

SEQ ID NO: 2552490 - RNA, 19 nt, Artificial Sequence
  Description of Artificial Sequence: Synthetic oligonucleotide
uaaugccugcaaccacgga

SEQ ID NO: 2552491 - RNA, 19 nt, Artificial Sequence
  Description of Artificial Sequence: Synthetic oligonucleotide
gcacauguaagcacaaaca

SEQ ID NO: 2552492 - RNA, 19 nt, Artificial Sequence
  Description of Artificial Sequence: Synthetic oligonucleotide
ccugacaaucagcaucagg

SEQ ID NO: 2552493 - RNA, 19 nt, Artificial Sequence
  Description of Artificial Sequence: Synthetic oligonucleotide
cacacucuggccaucggaa

SEQ ID NO: 2552494 - RNA, 19 nt, Artificial Sequence
  Description of Artificial Sequence: Synthetic oligonucleotide
cacauaccaaucuuagagu

SEQ ID NO: 2552495 - RNA, 19 nt, Artificial Sequence
  Description of Artificial Sequence: Synthetic oligonucleotide
ucuggccaucggaaguuau

SEQ ID NO: 2552496 - RNA, 19 nt, Artificial Sequence
  Description of Artificial Sequence: Synthetic oligonucleotide
aacuaguccuuugggucau

SEQ ID NO: 2552497 - RNA, 19 nt, Artificial Sequence
  Description of Artificial Sequence: Synthetic oligonucleotide
cuccuagagucacagagcu

SEQ ID NO: 2552498 - RNA, 19 nt, Artificial Sequence
  Description of Artificial Sequence: Synthetic oligonucleotide
cuugcgcauuggauacagc

SEQ ID NO: 2552499 - RNA, 19 nt, Artificial Sequence
  Description of Artificial Sequence: Synthetic oligonucleotide
ugccugcaaccacggaggc

SEQ ID NO: 2552500 - RNA, 19 nt, Artificial Sequence
  Description of Artificial Sequence: Synthetic oligonucleotide
acagcagcaucgaucauua

SEQ ID NO: 2552501 - RNA, 19 nt, Artificial Sequence
  Description of Artificial Sequence: Synthetic oligonucleotide
caggacaauagagccucag

SEQ ID NO: 2552502 - RNA, 19 nt, Artificial Sequence
  Description of Artificial Sequence: Synthetic oligonucleotide
augugugaaaagcgugauu

SEQ ID NO: 2552503 - RNA, 19 nt, Artificial Sequence
  Description of Artificial Sequence: Synthetic oligonucleotide
aggacacauaccaaucuua

SEQ ID NO: 2552504 - RNA, 19 nt, Artificial Sequence
  Description of Artificial Sequence: Synthetic oligonucleotide
agagcucagggcugcuccu

SEQ ID NO: 2552505 - RNA, 19 nt, Artificial Sequence
  Description of Artificial Sequence: Synthetic oligonucleotide
accucucacuugcgcauug

SEQ ID NO: 2552506 - RNA, 19 nt, Artificial Sequence
  Description of Artificial Sequence: Synthetic oligonucleotide
acaucagcaugaaaccaau

SEQ ID NO: 2552507 - RNA, 19 nt, Artificial Sequence
  Description of Artificial Sequence: Synthetic oligonucleotide
gcuuucauagcugucaccu

SEQ ID NO: 2552508 - RNA, 19 nt, Artificial Sequence
  Description of Artificial Sequence: Synthetic oligonucleotide
caucagguauuuugaguaa

SEQ ID NO: 2552509 - RNA, 19 nt, Artificial Sequence
  Description of Artificial Sequence: Synthetic oligonucleotide
gcugcuccuagagucacag

SEQ ID NO: 2552510 - RNA, 19 nt, Artificial Sequence
  Description of Artificial Sequence: Synthetic oligonucleotide
gcuuaggauagaccacagc

SEQ ID NO: 2552511 - RNA, 19 nt, Artificial Sequence
  Description of Artificial Sequence: Synthetic oligonucleotide
agccaguguagaaaacaca

SEQ ID NO: 2552512 - RNA, 19 nt, Artificial Sequence
  Description of Artificial Sequence: Synthetic oligonucleotide
cugucaccucucacuugcg

SEQ ID NO: 2552513 - RNA, 19 nt, Artificial Sequence
  Description of Artificial Sequence: Synthetic oligonucleotide
cgugauucaacugcucagg

SEQ ID NO: 2552514 - RNA, 19 nt, Artificial Sequence
  Description of Artificial Sequence: Synthetic oligonucleotide
cacggcauuccuucucuca

SEQ ID NO: 2552515 - RNA, 19 nt, Artificial Sequence
  Description of Artificial Sequence: Synthetic oligonucleotide
ucuaggaagccugccuauu

SEQ ID NO: 2552516 - RNA, 19 nt, Artificial Sequence
  Description of Artificial Sequence: Synthetic oligonucleotide
auuuaccccuaaacaccag

SEQ ID NO: 2552517 - RNA, 19 nt, Artificial Sequence
  Description of Artificial Sequence: Synthetic oligonucleotide
cagaguauuuaccccuaaa

SEQ ID NO: 2552518 - RNA, 19 nt, Artificial Sequence
  Description of Artificial Sequence: Synthetic oligonucleotide
cagucaauacauucacacu

SEQ ID NO: 2552519 - RNA, 19 nt, Artificial Sequence
  Description of Artificial Sequence: Synthetic oligonucleotide
cauuggauacagcauuuau

SEQ ID NO: 2552520 - RNA, 19 nt, Artificial Sequence
  Description of Artificial Sequence: Synthetic oligonucleotide
cagacucgagcaccuguuc

SEQ ID NO: 2552521 - RNA, 19 nt, Artificial Sequence
  Description of Artificial Sequence: Synthetic oligonucleotide
gcaccuguucuuccuaaac

SEQ ID NO: 2552522 - RNA, 19 nt, Artificial Sequence
  Description of Artificial Sequence: Synthetic oligonucleotide
agauacugaggcagaguau

SEQ ID NO: 2552523 - RNA, 19 nt, Artificial Sequence
  Description of Artificial Sequence: Synthetic oligonucleotide
aagucauguuagagaaauu

SEQ ID NO: 2552524 - RNA, 19 nt, Artificial Sequence
  Description of Artificial Sequence: Synthetic oligonucleotide
gcuccuagagucacagagc

SEQ ID NO: 2552525 - RNA, 19 nt, Artificial Sequence
  Description of Artificial Sequence: Synthetic oligonucleotide
acacaccacaugugugaaa

SEQ ID NO: 2552526 - RNA, 19 nt, Artificial Sequence
  Description of Artificial Sequence: Synthetic oligonucleotide
ggaagccugccuauuuuac

SEQ ID NO: 2552527 - RNA, 19 nt, Artificial Sequence
  Description of Artificial Sequence: Synthetic oligonucleotide
gcacauuuucaaacaucag

SEQ ID NO: 2552528 - RNA, 19 nt, Artificial Sequence
  Description of Artificial Sequence: Synthetic oligonucleotide
aucgaucauuauccaccaa

SEQ ID NO: 2552529 - RNA, 19 nt, Artificial Sequence
  Description of Artificial Sequence: Synthetic oligonucleotide
cugccuauuuuacucugua

SEQ ID NO: 2552530 - RNA, 19 nt, Artificial Sequence
  Description of Artificial Sequence: Synthetic oligonucleotide
ccuucucucacuccaguca

SEQ ID NO: 2552531 - RNA, 19 nt, Artificial Sequence
  Description of Artificial Sequence: Synthetic oligonucleotide
gagccucagcucaggacac

SEQ ID NO: 2552532 - RNA, 19 nt, Artificial Sequence
  Description of Artificial Sequence: Synthetic oligonucleotide
agaccacagcagcaucgau

SEQ ID NO: 2552533 - RNA, 19 nt, Artificial Sequence
  Description of Artificial Sequence: Synthetic oligonucleotide
guccuuugggucauuuaaa

SEQ ID NO: 2552534 - RNA, 19 nt, Artificial Sequence
  Description of Artificial Sequence: Synthetic oligonucleotide
gccgcuuucauagcuguca

SEQ ID NO: 2552535 - RNA, 19 nt, Artificial Sequence
  Description of Artificial Sequence: Synthetic oligonucleotide
cauaccaaucuuagaguuu

SEQ ID NO: 2552536 - RNA, 19 nt, Artificial Sequence
  Description of Artificial Sequence: Synthetic oligonucleotide
caacuggcagacaucacuu

SEQ ID NO: 2552537 - RNA, 19 nt, Artificial Sequence
  Description of Artificial Sequence: Synthetic oligonucleotide
cagcaucgaucauuaucca

SEQ ID NO: 2552538 - RNA, 19 nt, Artificial Sequence
  Description of Artificial Sequence: Synthetic oligonucleotide
aaucagcaucagguauuuu

SEQ ID NO: 2552539 - RNA, 19 nt, Artificial Sequence
  Description of Artificial Sequence: Synthetic oligonucleotide
ggcuuaggauagaccacag

SEQ ID NO: 2552540 - RNA, 19 nt, Artificial Sequence
  Description of Artificial Sequence: Synthetic oligonucleotide
cauuauccaccaaccugua

SEQ ID NO: 2552541 - RNA, 19 nt, Artificial Sequence
  Description of Artificial Sequence: Synthetic oligonucleotide
accacggaggccacggcau

SEQ ID NO: 2552542 - RNA, 19 nt, Artificial Sequence
  Description of Artificial Sequence: Synthetic oligonucleotide
guuucgggacuaaaacccu

SEQ ID NO: 2552543 - RNA, 19 nt, Artificial Sequence
  Description of Artificial Sequence: Synthetic oligonucleotide
augcacauguaagcacaaa

SEQ ID NO: 2552544 - RNA, 19 nt, Artificial Sequence
  Description of Artificial Sequence: Synthetic oligonucleotide
ugcucaggcuuaggauaga

SEQ ID NO: 2552545 - RNA, 19 nt, Artificial Sequence
  Description of Artificial Sequence: Synthetic oligonucleotide
ccacauggaggcaauaagu

SEQ ID NO: 2552546 - RNA, 19 nt, Artificial Sequence
  Description of Artificial Sequence: Synthetic oligonucleotide
agccgcuuucauagcuguc

SEQ ID NO: 2552547 - RNA, 19 nt, Artificial Sequence
  Description of Artificial Sequence: Synthetic oligonucleotide
cauucacacucuggccauc

SEQ ID NO: 2552548 - RNA, 19 nt, Artificial Sequence
  Description of Artificial Sequence: Synthetic oligonucleotide
cuuagaguuucgggacuaa

SEQ ID NO: 2552549 - RNA, 19 nt, Artificial Sequence
  Description of Artificial Sequence: Synthetic oligonucleotide
cuaggaagccugccuauuu

SEQ ID NO: 2552550 - RNA, 19 nt, Artificial Sequence
  Description of Artificial Sequence: Synthetic oligonucleotide
aggccacggcauuccuucu

SEQ ID NO: 2552551 - RNA, 19 nt, Artificial Sequence
  Description of Artificial Sequence: Synthetic oligonucleotide
caugugugaaaagcgugau

SEQ ID NO: 2552552 - RNA, 19 nt, Artificial Sequence
  Description of Artificial Sequence: Synthetic oligonucleotide
ccgcuuucauagcugucac

SEQ ID NO: 2552553 - RNA, 19 nt, Artificial Sequence
  Description of Artificial Sequence: Synthetic oligonucleotide
cacggaggccacggcauuc

SEQ ID NO: 2552554 - RNA, 19 nt, Artificial Sequence
  Description of Artificial Sequence: Synthetic oligonucleotide
cuuccuaaacagccgcuuu

SEQ ID NO: 2552555 - RNA, 19 nt, Artificial Sequence
  Description of Artificial Sequence: Synthetic oligonucleotide
ggggcguuucaaacuaguc

SEQ ID NO: 2552556 - RNA, 19 nt, Artificial Sequence
  Description of Artificial Sequence: Synthetic oligonucleotide
aggcaauaagugacccgaa

SEQ ID NO: 2552557 - RNA, 19 nt, Artificial Sequence
  Description of Artificial Sequence: Synthetic oligonucleotide
ccacaugugugaaaagcgu

SEQ ID NO: 2552558 - RNA, 19 nt, Artificial Sequence
  Description of Artificial Sequence: Synthetic oligonucleotide
guucucuaaugcacaugua

SEQ ID NO: 2552559 - RNA, 19 nt, Artificial Sequence
  Description of Artificial Sequence: Synthetic oligonucleotide
ggauagaccacagcagcau

SEQ ID NO: 2552560 - RNA, 19 nt, Artificial Sequence
  Description of Artificial Sequence: Synthetic oligonucleotide
gcgcauuggauacagcauu

SEQ ID NO: 2552561 - RNA, 19 nt, Artificial Sequence
  Description of Artificial Sequence: Synthetic oligonucleotide
cgcuuucauagcugucacc

SEQ ID NO: 2552562 - RNA, 19 nt, Artificial Sequence
  Description of Artificial Sequence: Synthetic oligonucleotide
acccgaacaucagcaugaa

SEQ ID NO: 2552563 - RNA, 19 nt, Artificial Sequence
  Description of Artificial Sequence: Synthetic oligonucleotide
cagccgcuuucauagcugu

SEQ ID NO: 2552564 - RNA, 19 nt, Artificial Sequence
  Description of Artificial Sequence: Synthetic oligonucleotide
gugacccgaacaucagcau

SEQ ID NO: 2552565 - RNA, 19 nt, Artificial Sequence
  Description of Artificial Sequence: Synthetic oligonucleotide
gcagaguauuuaccccuaa

SEQ ID NO: 2552566 - RNA, 19 nt, Artificial Sequence
  Description of Artificial Sequence: Synthetic oligonucleotide
ggacuaaaacccugacaau

SEQ ID NO: 2552567 - RNA, 19 nt, Artificial Sequence
  Description of Artificial Sequence: Synthetic oligonucleotide
ggccacggcauuccuucuc

SEQ ID NO: 2552568 - RNA, 19 nt, Artificial Sequence
  Description of Artificial Sequence: Synthetic oligonucleotide
agccagacucgagcaccug

SEQ ID NO: 2552569 - RNA, 19 nt, Artificial Sequence
  Description of Artificial Sequence: Synthetic oligonucleotide
caaucagcaucagguauuu

SEQ ID NO: 2552570 - RNA, 19 nt, Artificial Sequence
  Description of Artificial Sequence: Synthetic oligonucleotide
gagccagacucgagcaccu

SEQ ID NO: 2552571 - RNA, 19 nt, Artificial Sequence
  Description of Artificial Sequence: Synthetic oligonucleotide
ggccaucggaaguuaucua

SEQ ID NO: 2552572 - RNA, 19 nt, Artificial Sequence
  Description of Artificial Sequence: Synthetic oligonucleotide
gagcucagggcugcuccua

SEQ ID NO: 2552573 - RNA, 19 nt, Artificial Sequence
  Description of Artificial Sequence: Synthetic oligonucleotide
ccuaaacaccaggacaaua

SEQ ID NO: 2552574 - RNA, 19 nt, Artificial Sequence
  Description of Artificial Sequence: Synthetic oligonucleotide
gccacggcauuccuucucu

SEQ ID NO: 2552575 - RNA, 19 nt, Artificial Sequence
  Description of Artificial Sequence: Synthetic oligonucleotide
cgggacuaaaacccugaca

SEQ ID NO: 2552576 - RNA, 19 nt, Artificial Sequence
  Description of Artificial Sequence: Synthetic oligonucleotide
gggucauuuaaaacucuuu

SEQ ID NO: 2552577 - RNA, 19 nt, Artificial Sequence
  Description of Artificial Sequence: Synthetic oligonucleotide
gccagacucgagcaccugu

SEQ ID NO: 2552578 - RNA, 19 nt, Artificial Sequence
  Description of Artificial Sequence: Synthetic oligonucleotide
gcauuggauacagcauuua

SEQ ID NO: 2552579 - RNA, 19 nt, Artificial Sequence
  Description of Artificial Sequence: Synthetic oligonucleotide
ggcagaguauuuaccccua

SEQ ID NO: 2552580 - RNA, 19 nt, Artificial Sequence
  Description of Artificial Sequence: Synthetic oligonucleotide
cacuugcgcauuggauaca

SEQ ID NO: 2552581 - RNA, 19 nt, Artificial Sequence
  Description of Artificial Sequence: Synthetic oligonucleotide
gccugcaaccacggaggcc

SEQ ID NO: 2552582 - RNA, 19 nt, Artificial Sequence
  Description of Artificial Sequence: Synthetic oligonucleotide
gcucagggcugcuccuaga

SEQ ID NO: 2552583 - RNA, 19 nt, Artificial Sequence
  Description of Artificial Sequence: Synthetic oligonucleotide
acuaguccuuugggucauu

SEQ ID NO: 2552584 - RNA, 19 nt, Artificial Sequence
  Description of Artificial Sequence: Synthetic oligonucleotide
ccacggcauuccuucucuc

SEQ ID NO: 2552585 - RNA, 19 nt, Artificial Sequence
  Description of Artificial Sequence: Synthetic oligonucleotide
cucuggccaucggaaguua

SEQ ID NO: 2552586 - RNA, 19 nt, Artificial Sequence
  Description of Artificial Sequence: Synthetic oligonucleotide
cuaagagcucagggcugcu

SEQ ID NO: 2552587 - RNA, 19 nt, Artificial Sequence
  Description of Artificial Sequence: Synthetic oligonucleotide
ccagacucgagcaccuguu

SEQ ID NO: 2552588 - RNA, 19 nt, Artificial Sequence
  Description of Artificial Sequence: Synthetic oligonucleotide
ccaggacaauagagccuca

SEQ ID NO: 2552589 - RNA, 19 nt, Artificial Sequence
  Description of Artificial Sequence: Synthetic oligonucleotide
cccugacaaucagcaucag

SEQ ID NO: 2552590 - RNA, 19 nt, Artificial Sequence
  Description of Artificial Sequence: Synthetic oligonucleotide
ccucagcucaggacacaua

SEQ ID NO: 2552591 - RNA, 19 nt, Artificial Sequence
  Description of Artificial Sequence: Synthetic oligonucleotide
gccucagcucaggacacau

SEQ ID NO: 2552592 - RNA, 19 nt, Artificial Sequence
  Description of Artificial Sequence: Synthetic oligonucleotide
cgcauuggauacagcauuu

SEQ ID NO: 2552593 - RNA, 19 nt, Artificial Sequence
  Description of Artificial Sequence: Synthetic oligonucleotide
cgagcaccuguucuuccua

SEQ ID NO: 2552594 - RNA, 19 nt, Artificial Sequence
  Description of Artificial Sequence: Synthetic oligonucleotide
gcguuucaaacuaguccuu

SEQ ID NO: 2552595 - RNA, 19 nt, Artificial Sequence
  Description of Artificial Sequence: Synthetic oligonucleotide
cagcagcaucgaucauuau

SEQ ID NO: 2552596 - RNA, 19 nt, Artificial Sequence
  Description of Artificial Sequence: Synthetic oligonucleotide
ggaggccacggcauuccuu

SEQ ID NO: 2552597 - RNA, 19 nt, Artificial Sequence
  Description of Artificial Sequence: Synthetic oligonucleotide
cggaggccacggcauuccu

SEQ ID NO: 2552598 - RNA, 19 nt, Artificial Sequence
  Description of Artificial Sequence: Synthetic oligonucleotide
uuugauuguuccaagaagg

SEQ ID NO: 2552599 - RNA, 19 nt, Artificial Sequence
  Description of Artificial Sequence: Synthetic oligonucleotide
gagucaaugacauagauga

SEQ ID NO: 2552600 - RNA, 19 nt, Artificial Sequence
  Description of Artificial Sequence: Synthetic oligonucleotide
auuuuggauagacucaucc

SEQ ID NO: 2552601 - RNA, 19 nt, Artificial Sequence
  Description of Artificial Sequence: Synthetic oligonucleotide
uguaguucuuguuaaaccg

SEQ ID NO: 2552602 - RNA, 19 nt, Artificial Sequence
  Description of Artificial Sequence: Synthetic oligonucleotide
agaauuaacaaacaaccag

SEQ ID NO: 2552603 - RNA, 19 nt, Artificial Sequence
  Description of Artificial Sequence: Synthetic oligonucleotide
agugccaauguuuaggccc

SEQ ID NO: 2552604 - RNA, 19 nt, Artificial Sequence
  Description of Artificial Sequence: Synthetic oligonucleotide
acaaacaaccagcuuagcc

SEQ ID NO: 2552605 - RNA, 19 nt, Artificial Sequence
  Description of Artificial Sequence: Synthetic oligonucleotide
uccaagacugcaaaguugg

SEQ ID NO: 2552606 - RNA, 19 nt, Artificial Sequence
  Description of Artificial Sequence: Synthetic oligonucleotide
caaacaaccagcuuagccc

SEQ ID NO: 2552607 - RNA, 19 nt, Artificial Sequence
  Description of Artificial Sequence: Synthetic oligonucleotide
uuuugauuguuccaagaag

SEQ ID NO: 2552608 - RNA, 19 nt, Artificial Sequence
  Description of Artificial Sequence: Synthetic oligonucleotide
gaaagcagcguguacaucc

SEQ ID NO: 2552609 - RNA, 19 nt, Artificial Sequence
  Description of Artificial Sequence: Synthetic oligonucleotide
ugugaugucccucugccgg

SEQ ID NO: 2552610 - RNA, 19 nt, Artificial Sequence
  Description of Artificial Sequence: Synthetic oligonucleotide
aaaguuggugcuuauguga

SEQ ID NO: 2552611 - RNA, 19 nt, Artificial Sequence
  Description of Artificial Sequence: Synthetic oligonucleotide
auagaugacgccaugacac

SEQ ID NO: 2552612 - RNA, 19 nt, Artificial Sequence
  Description of Artificial Sequence: Synthetic oligonucleotide
uaaaagaauuaacaaacaa

SEQ ID NO: 2552613 - RNA, 19 nt, Artificial Sequence
  Description of Artificial Sequence: Synthetic oligonucleotide
uucaccauccauucgaugc

SEQ ID NO: 2552614 - RNA, 19 nt, Artificial Sequence
  Description of Artificial Sequence: Synthetic oligonucleotide
uaaagcaaauaaaagaauu

SEQ ID NO: 2552615 - RNA, 19 nt, Artificial Sequence
  Description of Artificial Sequence: Synthetic oligonucleotide
uaguacuugucccacaaag

SEQ ID NO: 2552616 - RNA, 19 nt, Artificial Sequence
  Description of Artificial Sequence: Synthetic oligonucleotide
aguggagucaaugacauag

SEQ ID NO: 2552617 - RNA, 19 nt, Artificial Sequence
  Description of Artificial Sequence: Synthetic oligonucleotide
gauuguuccaagaagguug

SEQ ID NO: 2552618 - RNA, 19 nt, Artificial Sequence
  Description of Artificial Sequence: Synthetic oligonucleotide
aaugacauagaugacgcca

SEQ ID NO: 2552619 - RNA, 19 nt, Artificial Sequence
  Description of Artificial Sequence: Synthetic oligonucleotide
uaacaaacaaccagcuuag

SEQ ID NO: 2552620 - RNA, 19 nt, Artificial Sequence
  Description of Artificial Sequence: Synthetic oligonucleotide
aauguuuaggcccacggua

SEQ ID NO: 2552621 - RNA, 19 nt, Artificial Sequence
  Description of Artificial Sequence: Synthetic oligonucleotide
uaugugaugucccucugcc

SEQ ID NO: 2552622 - RNA, 19 nt, Artificial Sequence
  Description of Artificial Sequence: Synthetic oligonucleotide
ugaacauuccgcacgacac

SEQ ID NO: 2552623 - RNA, 19 nt, Artificial Sequence
  Description of Artificial Sequence: Synthetic oligonucleotide
gucaaugacauagaugacg

SEQ ID NO: 2552624 - RNA, 19 nt, Artificial Sequence
  Description of Artificial Sequence: Synthetic oligonucleotide
aagucccagaacaugagac

SEQ ID NO: 2552625 - RNA, 19 nt, Artificial Sequence
  Description of Artificial Sequence: Synthetic oligonucleotide
augucaggaauggagaggc

SEQ ID NO: 2552626 - RNA, 19 nt, Artificial Sequence
  Description of Artificial Sequence: Synthetic oligonucleotide
ucugcauaguacuuguccc

SEQ ID NO: 2552627 - RNA, 19 nt, Artificial Sequence
  Description of Artificial Sequence: Synthetic oligonucleotide
uuguaguucuuguuaaacc

SEQ ID NO: 2552628 - RNA, 19 nt, Artificial Sequence
  Description of Artificial Sequence: Synthetic oligonucleotide
agcaaauaaaagaauuaac

SEQ ID NO: 2552629 - RNA, 19 nt, Artificial Sequence
  Description of Artificial Sequence: Synthetic oligonucleotide
acauagaugacgccaugac

SEQ ID NO: 2552630 - RNA, 19 nt, Artificial Sequence
  Description of Artificial Sequence: Synthetic oligonucleotide
aacaccaggggaugaacag

SEQ ID NO: 2552631 - RNA, 19 nt, Artificial Sequence
  Description of Artificial Sequence: Synthetic oligonucleotide
uuuuggauagacucauccc

SEQ ID NO: 2552632 - RNA, 19 nt, Artificial Sequence
  Description of Artificial Sequence: Synthetic oligonucleotide
auuguccaggccuaggauc

SEQ ID NO: 2552633 - RNA, 19 nt, Artificial Sequence
  Description of Artificial Sequence: Synthetic oligonucleotide
caaucuugcagguacaguc

SEQ ID NO: 2552634 - RNA, 19 nt, Artificial Sequence
  Description of Artificial Sequence: Synthetic oligonucleotide
ucucaaaugccucuuugga

SEQ ID NO: 2552635 - RNA, 19 nt, Artificial Sequence
  Description of Artificial Sequence: Synthetic oligonucleotide
agaagguugucuucccggc

SEQ ID NO: 2552636 - RNA, 19 nt, Artificial Sequence
  Description of Artificial Sequence: Synthetic oligonucleotide
uguacagccccgaaagcag

SEQ ID NO: 2552637 - RNA, 19 nt, Artificial Sequence
  Description of Artificial Sequence: Synthetic oligonucleotide
ggugauuuuggauagacuc

SEQ ID NO: 2552638 - RNA, 19 nt, Artificial Sequence
  Description of Artificial Sequence: Synthetic oligonucleotide
uugaugucaggaauggaga

SEQ ID NO: 2552639 - RNA, 19 nt, Artificial Sequence
  Description of Artificial Sequence: Synthetic oligonucleotide
aauuaacaaacaaccagcu

SEQ ID NO: 2552640 - RNA, 19 nt, Artificial Sequence
  Description of Artificial Sequence: Synthetic oligonucleotide
aacauuccgcacgacacac

SEQ ID NO: 2552641 - RNA, 19 nt, Artificial Sequence
  Description of Artificial Sequence: Synthetic oligonucleotide
gcaguauucauccuucugg

SEQ ID NO: 2552642 - RNA, 19 nt, Artificial Sequence
  Description of Artificial Sequence: Synthetic oligonucleotide
aaugcagucuugaugucag

SEQ ID NO: 2552643 - RNA, 19 nt, Artificial Sequence
  Description of Artificial Sequence: Synthetic oligonucleotide
ucgacggccaaucuugcag

SEQ ID NO: 2552644 - RNA, 19 nt, Artificial Sequence
  Description of Artificial Sequence: Synthetic oligonucleotide
aauggagaggcaggucucc

SEQ ID NO: 2552645 - RNA, 19 nt, Artificial Sequence
  Description of Artificial Sequence: Synthetic oligonucleotide
caugagacgagccuucccc

SEQ ID NO: 2552646 - RNA, 19 nt, Artificial Sequence
  Description of Artificial Sequence: Synthetic oligonucleotide
agguacagucacugaaugc

SEQ ID NO: 2552647 - RNA, 19 nt, Artificial Sequence
  Description of Artificial Sequence: Synthetic oligonucleotide
ugucccacaaagacuguag

SEQ ID NO: 2552648 - RNA, 19 nt, Artificial Sequence
  Description of Artificial Sequence: Synthetic oligonucleotide
acagucacugaaugcaguc

SEQ ID NO: 2552649 - RNA, 19 nt, Artificial Sequence
  Description of Artificial Sequence: Synthetic oligonucleotide
gcaaauaaaagaauuaaca

SEQ ID NO: 2552650 - RNA, 19 nt, Artificial Sequence
  Description of Artificial Sequence: Synthetic oligonucleotide
uuuguaguucuuguuaaac

SEQ ID NO: 2552651 - RNA, 19 nt, Artificial Sequence
  Description of Artificial Sequence: Synthetic oligonucleotide
aggccuaggaucaggaugc

SEQ ID NO: 2552652 - RNA, 19 nt, Artificial Sequence
  Description of Artificial Sequence: Synthetic oligonucleotide
agucccagaacaugagacg

SEQ ID NO: 2552653 - RNA, 19 nt, Artificial Sequence
  Description of Artificial Sequence: Synthetic oligonucleotide
acuccuuugccugugagag

SEQ ID NO: 2552654 - RNA, 19 nt, Artificial Sequence
  Description of Artificial Sequence: Synthetic oligonucleotide
gcaucaguggcacagagcc

SEQ ID NO: 2552655 - RNA, 19 nt, Artificial Sequence
  Description of Artificial Sequence: Synthetic oligonucleotide
acuugucccacaaagacug

SEQ ID NO: 2552656 - RNA, 19 nt, Artificial Sequence
  Description of Artificial Sequence: Synthetic oligonucleotide
uuccgcacgacacacuuca

SEQ ID NO: 2552657 - RNA, 19 nt, Artificial Sequence
  Description of Artificial Sequence: Synthetic oligonucleotide
uccuucuggaacauguacu

SEQ ID NO: 2552658 - RNA, 19 nt, Artificial Sequence
  Description of Artificial Sequence: Synthetic oligonucleotide
aauuccaacaccaggggau

SEQ ID NO: 2552659 - RNA, 19 nt, Artificial Sequence
  Description of Artificial Sequence: Synthetic oligonucleotide
agacucaucccuuuguagu

SEQ ID NO: 2552660 - RNA, 19 nt, Artificial Sequence
  Description of Artificial Sequence: Synthetic oligonucleotide
ucaguggagucaaugacau

SEQ ID NO: 2552661 - RNA, 19 nt, Artificial Sequence
  Description of Artificial Sequence: Synthetic oligonucleotide
ggaacauguacuuguacag

SEQ ID NO: 2552662 - RNA, 19 nt, Artificial Sequence
  Description of Artificial Sequence: Synthetic oligonucleotide
ugacacucugcauaguacu

SEQ ID NO: 2552663 - RNA, 19 nt, Artificial Sequence
  Description of Artificial Sequence: Synthetic oligonucleotide
cuuagccccagcaucagug

SEQ ID NO: 2552664 - RNA, 19 nt, Artificial Sequence
  Description of Artificial Sequence: Synthetic oligonucleotide
uuaugugaugucccucugc

SEQ ID NO: 2552665 - RNA, 19 nt, Artificial Sequence
  Description of Artificial Sequence: Synthetic oligonucleotide
ucuuguuaaaccguguuuu

SEQ ID NO: 2552666 - RNA, 19 nt, Artificial Sequence
  Description of Artificial Sequence: Synthetic oligonucleotide
ugacagucucuccucauca

SEQ ID NO: 2552667 - RNA, 19 nt, Artificial Sequence
  Description of Artificial Sequence: Synthetic oligonucleotide
uaguggugauuuuggauag

SEQ ID NO: 2552668 - RNA, 19 nt, Artificial Sequence
  Description of Artificial Sequence: Synthetic oligonucleotide
cauguacuuguacagcccc

SEQ ID NO: 2552669 - RNA, 19 nt, Artificial Sequence
  Description of Artificial Sequence: Synthetic oligonucleotide
ggucagacagucucgacgg

SEQ ID NO: 2552670 - RNA, 19 nt, Artificial Sequence
  Description of Artificial Sequence: Synthetic oligonucleotide
aacaugagacgagccuucc

SEQ ID NO: 2552671 - RNA, 19 nt, Artificial Sequence
  Description of Artificial Sequence: Synthetic oligonucleotide
uucacucgaaaccaccuuc

SEQ ID NO: 2552672 - RNA, 19 nt, Artificial Sequence
  Description of Artificial Sequence: Synthetic oligonucleotide
ugaacaguuccaagacugc

SEQ ID NO: 2552673 - RNA, 19 nt, Artificial Sequence
  Description of Artificial Sequence: Synthetic oligonucleotide
uagacucaucccuuuguag

SEQ ID NO: 2552674 - RNA, 19 nt, Artificial Sequence
  Description of Artificial Sequence: Synthetic oligonucleotide
uuuaggcccacgguagugg

SEQ ID NO: 2552675 - RNA, 19 nt, Artificial Sequence
  Description of Artificial Sequence: Synthetic oligonucleotide
ucaccauccauucgaugcc

SEQ ID NO: 2552676 - RNA, 19 nt, Artificial Sequence
  Description of Artificial Sequence: Synthetic oligonucleotide
gacgccaugacacucugca

SEQ ID NO: 2552677 - RNA, 19 nt, Artificial Sequence
  Description of Artificial Sequence: Synthetic oligonucleotide
ugucuucccggcauugucc

SEQ ID NO: 2552678 - RNA, 19 nt, Artificial Sequence
  Description of Artificial Sequence: Synthetic oligonucleotide
uccuuugccugugagagca

SEQ ID NO: 2552679 - RNA, 19 nt, Artificial Sequence
  Description of Artificial Sequence: Synthetic oligonucleotide
cucaaaugccucuuuggac

SEQ ID NO: 2552680 - RNA, 19 nt, Artificial Sequence
  Description of Artificial Sequence: Synthetic oligonucleotide
uguacauccugcccuggca

SEQ ID NO: 2552681 - RNA, 19 nt, Artificial Sequence
  Description of Artificial Sequence: Synthetic oligonucleotide
guaguggugauuuuggaua

SEQ ID NO: 2552682 - RNA, 19 nt, Artificial Sequence
  Description of Artificial Sequence: Synthetic oligonucleotide
ugcaguauucauccuucug

SEQ ID NO: 2552683 - RNA, 19 nt, Artificial Sequence
  Description of Artificial Sequence: Synthetic oligonucleotide
uuugccugugagagcagag

SEQ ID NO: 2552684 - RNA, 19 nt, Artificial Sequence
  Description of Artificial Sequence: Synthetic oligonucleotide
cugaaugcagucuugaugu

SEQ ID NO: 2552685 - RNA, 19 nt, Artificial Sequence
  Description of Artificial Sequence: Synthetic oligonucleotide
auaaaagaauuaacaaaca

SEQ ID NO: 2552686 - RNA, 19 nt, Artificial Sequence
  Description of Artificial Sequence: Synthetic oligonucleotide
aguuccaagacugcaaagu

SEQ ID NO: 2552687 - RNA, 19 nt, Artificial Sequence
  Description of Artificial Sequence: Synthetic oligonucleotide
uaagucccagaacaugaga

SEQ ID NO: 2552688 - RNA, 19 nt, Artificial Sequence
  Description of Artificial Sequence: Synthetic oligonucleotide
caaaguuggugcuuaugug

SEQ ID NO: 2552689 - RNA, 19 nt, Artificial Sequence
  Description of Artificial Sequence: Synthetic oligonucleotide
uuguacagccccgaaagca

SEQ ID NO: 2552690 - RNA, 19 nt, Artificial Sequence
  Description of Artificial Sequence: Synthetic oligonucleotide
cacagugccaauguuuagg

SEQ ID NO: 2552691 - RNA, 19 nt, Artificial Sequence
  Description of Artificial Sequence: Synthetic oligonucleotide
agugcuucacucgaaacca

SEQ ID NO: 2552692 - RNA, 19 nt, Artificial Sequence
  Description of Artificial Sequence: Synthetic oligonucleotide
agucucuccucaucagugg

SEQ ID NO: 2552693 - RNA, 19 nt, Artificial Sequence
  Description of Artificial Sequence: Synthetic oligonucleotide
aacaaacaaccagcuuagc

SEQ ID NO: 2552694 - RNA, 19 nt, Artificial Sequence
  Description of Artificial Sequence: Synthetic oligonucleotide
uuuggacucugacagucuc

SEQ ID NO: 2552695 - RNA, 19 nt, Artificial Sequence
  Description of Artificial Sequence: Synthetic oligonucleotide
agcguguacauccugcccu

SEQ ID NO: 2552696 - RNA, 19 nt, Artificial Sequence
  Description of Artificial Sequence: Synthetic oligonucleotide
aaagacuguaguucuucuu

SEQ ID NO: 2552697 - RNA, 19 nt, Artificial Sequence
  Description of Artificial Sequence: Synthetic oligonucleotide
acaugagacgagccuuccc

SEQ ID NO: 2552698 - RNA, 19 nt, Artificial Sequence
  Description of Artificial Sequence: Synthetic oligonucleotide
ugcuucacucgaaaccacc

SEQ ID NO: 2552699 - RNA, 19 nt, Artificial Sequence
  Description of Artificial Sequence: Synthetic oligonucleotide
aagguugucuucccggcau

SEQ ID NO: 2552700 - RNA, 19 nt, Artificial Sequence
  Description of Artificial Sequence: Synthetic oligonucleotide
uacagccccgaaagcagcg

SEQ ID NO: 2552701 - RNA, 19 nt, Artificial Sequence
  Description of Artificial Sequence: Synthetic oligonucleotide
gaacauguacuuguacagc

SEQ ID NO: 2552702 - RNA, 19 nt, Artificial Sequence
  Description of Artificial Sequence: Synthetic oligonucleotide
acgagccuuccccacgucc

SEQ ID NO: 2552703 - RNA, 19 nt, Artificial Sequence
  Description of Artificial Sequence: Synthetic oligonucleotide
uucuuguuaaaccguguuu

SEQ ID NO: 2552704 - RNA, 19 nt, Artificial Sequence
  Description of Artificial Sequence: Synthetic oligonucleotide
ucuuuggacucugacaguc

SEQ ID NO: 2552705 - RNA, 19 nt, Artificial Sequence
  Description of Artificial Sequence: Synthetic oligonucleotide
agcacucggaauuccaaca

SEQ ID NO: 2552706 - RNA, 19 nt, Artificial Sequence
  Description of Artificial Sequence: Synthetic oligonucleotide
cuugcagguacagucacug

SEQ ID NO: 2552707 - RNA, 19 nt, Artificial Sequence
  Description of Artificial Sequence: Synthetic oligonucleotide
ucacucgaaaccaccuucu

SEQ ID NO: 2552708 - RNA, 19 nt, Artificial Sequence
  Description of Artificial Sequence: Synthetic oligonucleotide
aaucuugcagguacaguca

SEQ ID NO: 2552709 - RNA, 19 nt, Artificial Sequence
  Description of Artificial Sequence: Synthetic oligonucleotide
ucucggacuccuuugccug

SEQ ID NO: 2552710 - RNA, 19 nt, Artificial Sequence
  Description of Artificial Sequence: Synthetic oligonucleotide
aaccaccuucucaaaugcc

SEQ ID NO: 2552711 - RNA, 19 nt, Artificial Sequence
  Description of Artificial Sequence: Synthetic oligonucleotide
ugugagagcagagcaggcc

SEQ ID NO: 2552712 - RNA, 19 nt, Artificial Sequence
  Description of Artificial Sequence: Synthetic oligonucleotide
acucgaaaccaccuucuca

SEQ ID NO: 2552713 - RNA, 19 nt, Artificial Sequence
  Description of Artificial Sequence: Synthetic oligonucleotide
cucgaaaccaccuucucaa

SEQ ID NO: 2552714 - RNA, 19 nt, Artificial Sequence
  Description of Artificial Sequence: Synthetic oligonucleotide
uggccggugaacauuccgc

SEQ ID NO: 2552715 - RNA, 19 nt, Artificial Sequence
  Description of Artificial Sequence: Synthetic oligonucleotide
caagaagguugucuucccg

SEQ ID NO: 2552716 - RNA, 19 nt, Artificial Sequence
  Description of Artificial Sequence: Synthetic oligonucleotide
uggagucaaugacauagau

SEQ ID NO: 2552717 - RNA, 19 nt, Artificial Sequence
  Description of Artificial Sequence: Synthetic oligonucleotide
augacacucugcauaguac

SEQ ID NO: 2552718 - RNA, 19 nt, Artificial Sequence
  Description of Artificial Sequence: Synthetic oligonucleotide
gggucagacagucucgacg

SEQ ID NO: 2552719 - RNA, 19 nt, Artificial Sequence
  Description of Artificial Sequence: Synthetic oligonucleotide
uucgaugcccucucggacu

SEQ ID NO: 2552720 - RNA, 19 nt, Artificial Sequence
  Description of Artificial Sequence: Synthetic oligonucleotide
uggugcuuaugugaugucc

SEQ ID NO: 2552721 - RNA, 19 nt, Artificial Sequence
  Description of Artificial Sequence: Synthetic oligonucleotide
auuaacaaacaaccagcuu

SEQ ID NO: 2552722 - RNA, 19 nt, Artificial Sequence
  Description of Artificial Sequence: Synthetic oligonucleotide
agcagcguguacauccugc

SEQ ID NO: 2552723 - RNA, 19 nt, Artificial Sequence
  Description of Artificial Sequence: Synthetic oligonucleotide
cuucucaaaugccucuuug

SEQ ID NO: 2552724 - RNA, 19 nt, Artificial Sequence
  Description of Artificial Sequence: Synthetic oligonucleotide
aggaucaggaugcaguauu

SEQ ID NO: 2552725 - RNA, 19 nt, Artificial Sequence
  Description of Artificial Sequence: Synthetic oligonucleotide
ggaugaacaguuccaagac

SEQ ID NO: 2552726 - RNA, 19 nt, Artificial Sequence
  Description of Artificial Sequence: Synthetic oligonucleotide
ugcagucuugaugucagga

SEQ ID NO: 2552727 - RNA, 19 nt, Artificial Sequence
  Description of Artificial Sequence: Synthetic oligonucleotide
acaguuccaagacugcaaa

SEQ ID NO: 2552728 - RNA, 19 nt, Artificial Sequence
  Description of Artificial Sequence: Synthetic oligonucleotide
aucaggaugcaguauucau

SEQ ID NO: 2552729 - RNA, 19 nt, Artificial Sequence
  Description of Artificial Sequence: Synthetic oligonucleotide
gagacgagccuuccccacg

SEQ ID NO: 2552730 - RNA, 19 nt, Artificial Sequence
  Description of Artificial Sequence: Synthetic oligonucleotide
ucccagaacaugagacgag

SEQ ID NO: 2552731 - RNA, 19 nt, Artificial Sequence
  Description of Artificial Sequence: Synthetic oligonucleotide
uacuuguacagccccgaaa

SEQ ID NO: 2552732 - RNA, 19 nt, Artificial Sequence
  Description of Artificial Sequence: Synthetic oligonucleotide
gacagucucuccucaucag

SEQ ID NO: 2552733 - RNA, 19 nt, Artificial Sequence
  Description of Artificial Sequence: Synthetic oligonucleotide
auccauucgaugcccucuc

SEQ ID NO: 2552734 - RNA, 19 nt, Artificial Sequence
  Description of Artificial Sequence: Synthetic oligonucleotide
uguacuuguacagccccga

SEQ ID NO: 2552735 - RNA, 19 nt, Artificial Sequence
  Description of Artificial Sequence: Synthetic oligonucleotide
aucccuuuguaguucuugu

SEQ ID NO: 2552736 - RNA, 19 nt, Artificial Sequence
  Description of Artificial Sequence: Synthetic oligonucleotide
uggugauuuuggauagacu

SEQ ID NO: 2552737 - RNA, 19 nt, Artificial Sequence
  Description of Artificial Sequence: Synthetic oligonucleotide
auguuuaggcccacgguag

SEQ ID NO: 2552738 - RNA, 19 nt, Artificial Sequence
  Description of Artificial Sequence: Synthetic oligonucleotide
gggaugaacaguuccaaga

SEQ ID NO: 2552739 - RNA, 19 nt, Artificial Sequence
  Description of Artificial Sequence: Synthetic oligonucleotide
acagucucgacggccaauc

SEQ ID NO: 2552740 - RNA, 19 nt, Artificial Sequence
  Description of Artificial Sequence: Synthetic oligonucleotide
augugaugucccucugccg

SEQ ID NO: 2552741 - RNA, 19 nt, Artificial Sequence
  Description of Artificial Sequence: Synthetic oligonucleotide
cacuucaccauccauucga

SEQ ID NO: 2552742 - RNA, 19 nt, Artificial Sequence
  Description of Artificial Sequence: Synthetic oligonucleotide
aacaguuccaagacugcaa

SEQ ID NO: 2552743 - RNA, 19 nt, Artificial Sequence
  Description of Artificial Sequence: Synthetic oligonucleotide
agucacugaaugcagucuu

SEQ ID NO: 2552744 - RNA, 19 nt, Artificial Sequence
  Description of Artificial Sequence: Synthetic oligonucleotide
ucuggaacauguacuugua

SEQ ID NO: 2552745 - RNA, 19 nt, Artificial Sequence
  Description of Artificial Sequence: Synthetic oligonucleotide
cauagaugacgccaugaca

SEQ ID NO: 2552746 - RNA, 19 nt, Artificial Sequence
  Description of Artificial Sequence: Synthetic oligonucleotide
gugaacauuccgcacgaca

SEQ ID NO: 2552747 - RNA, 19 nt, Artificial Sequence
  Description of Artificial Sequence: Synthetic oligonucleotide
gucucgacggccaaucuug

SEQ ID NO: 2552748 - RNA, 19 nt, Artificial Sequence
  Description of Artificial Sequence: Synthetic oligonucleotide
cagguacagucacugaaug

SEQ ID NO: 2552749 - RNA, 19 nt, Artificial Sequence
  Description of Artificial Sequence: Synthetic oligonucleotide
auagacucaucccuuugua

SEQ ID NO: 2552750 - RNA, 19 nt, Artificial Sequence
  Description of Artificial Sequence: Synthetic oligonucleotide
acgguaguggugauuuugg

SEQ ID NO: 2552751 - RNA, 19 nt, Artificial Sequence
  Description of Artificial Sequence: Synthetic oligonucleotide
uguuuaggcccacgguagu

SEQ ID NO: 2552752 - RNA, 19 nt, Artificial Sequence
  Description of Artificial Sequence: Synthetic oligonucleotide
uccagugcuucacucgaaa

SEQ ID NO: 2552753 - RNA, 19 nt, Artificial Sequence
  Description of Artificial Sequence: Synthetic oligonucleotide
acacuucaccauccauucg

SEQ ID NO: 2552754 - RNA, 19 nt, Artificial Sequence
  Description of Artificial Sequence: Synthetic oligonucleotide
cuuccccacguccacagug

SEQ ID NO: 2552755 - RNA, 19 nt, Artificial Sequence
  Description of Artificial Sequence: Synthetic oligonucleotide
cuuguacagccccgaaagc

SEQ ID NO: 2552756 - RNA, 19 nt, Artificial Sequence
  Description of Artificial Sequence: Synthetic oligonucleotide
agaggcaggucuccacauc

SEQ ID NO: 2552757 - RNA, 19 nt, Artificial Sequence
  Description of Artificial Sequence: Synthetic oligonucleotide
agaugacgccaugacacuc

SEQ ID NO: 2552758 - RNA, 19 nt, Artificial Sequence
  Description of Artificial Sequence: Synthetic oligonucleotide
gauagacucaucccuuugu

SEQ ID NO: 2552759 - RNA, 19 nt, Artificial Sequence
  Description of Artificial Sequence: Synthetic oligonucleotide
ugcauaguacuugucccac

SEQ ID NO: 2552760 - RNA, 19 nt, Artificial Sequence
  Description of Artificial Sequence: Synthetic oligonucleotide
gagcacucggaauuccaac

SEQ ID NO: 2552761 - RNA, 19 nt, Artificial Sequence
  Description of Artificial Sequence: Synthetic oligonucleotide
accguccagugcuucacuc

SEQ ID NO: 2552762 - RNA, 19 nt, Artificial Sequence
  Description of Artificial Sequence: Synthetic oligonucleotide
gaacauuccgcacgacaca

SEQ ID NO: 2552763 - RNA, 19 nt, Artificial Sequence
  Description of Artificial Sequence: Synthetic oligonucleotide
cacucggaauuccaacacc

SEQ ID NO: 2552764 - RNA, 19 nt, Artificial Sequence
  Description of Artificial Sequence: Synthetic oligonucleotide
caaugacauagaugacgcc

SEQ ID NO: 2552765 - RNA, 19 nt, Artificial Sequence
  Description of Artificial Sequence: Synthetic oligonucleotide
uagaugacgccaugacacu

SEQ ID NO: 2552766 - RNA, 19 nt, Artificial Sequence
  Description of Artificial Sequence: Synthetic oligonucleotide
acucggaauuccaacacca

SEQ ID NO: 2552767 - RNA, 19 nt, Artificial Sequence
  Description of Artificial Sequence: Synthetic oligonucleotide
uuggacucugacagucucu

SEQ ID NO: 2552768 - RNA, 19 nt, Artificial Sequence
  Description of Artificial Sequence: Synthetic oligonucleotide
ccaauguuuaggcccacgg

SEQ ID NO: 2552769 - RNA, 19 nt, Artificial Sequence
  Description of Artificial Sequence: Synthetic oligonucleotide
gacucugacagucucuccu

SEQ ID NO: 2552770 - RNA, 19 nt, Artificial Sequence
  Description of Artificial Sequence: Synthetic oligonucleotide
ugcaaaguuggugcuuaug

SEQ ID NO: 2552771 - RNA, 19 nt, Artificial Sequence
  Description of Artificial Sequence: Synthetic oligonucleotide
gugauuuuggauagacuca

SEQ ID NO: 2552772 - RNA, 19 nt, Artificial Sequence
  Description of Artificial Sequence: Synthetic oligonucleotide
ucuugcagguacagucacu

SEQ ID NO: 2552773 - RNA, 19 nt, Artificial Sequence
  Description of Artificial Sequence: Synthetic oligonucleotide
acucaucccuuuguaguuc

SEQ ID NO: 2552774 - RNA, 19 nt, Artificial Sequence
  Description of Artificial Sequence: Synthetic oligonucleotide
cauaguacuugucccacaa

SEQ ID NO: 2552775 - RNA, 19 nt, Artificial Sequence
  Description of Artificial Sequence: Synthetic oligonucleotide
cuucccggcauuguccagg

SEQ ID NO: 2552776 - RNA, 19 nt, Artificial Sequence
  Description of Artificial Sequence: Synthetic oligonucleotide
guggccggugaacauuccg

SEQ ID NO: 2552777 - RNA, 19 nt, Artificial Sequence
  Description of Artificial Sequence: Synthetic oligonucleotide
ugccucuuuggacucugac

SEQ ID NO: 2552778 - RNA, 19 nt, Artificial Sequence
  Description of Artificial Sequence: Synthetic oligonucleotide
ucccacaaagacuguaguu

SEQ ID NO: 2552779 - RNA, 19 nt, Artificial Sequence
  Description of Artificial Sequence: Synthetic oligonucleotide
guggugauuuuggauagac

SEQ ID NO: 2552780 - RNA, 19 nt, Artificial Sequence
  Description of Artificial Sequence: Synthetic oligonucleotide
cuggaacauguacuuguac

SEQ ID NO: 2552781 - RNA, 19 nt, Artificial Sequence
  Description of Artificial Sequence: Synthetic oligonucleotide
ggugcuuaugugauguccc

SEQ ID NO: 2552782 - RNA, 19 nt, Artificial Sequence
  Description of Artificial Sequence: Synthetic oligonucleotide
auggggacaccguccagug

SEQ ID NO: 2552783 - RNA, 19 nt, Artificial Sequence
  Description of Artificial Sequence: Synthetic oligonucleotide
cuuaugugaugucccucug

SEQ ID NO: 2552784 - RNA, 19 nt, Artificial Sequence
  Description of Artificial Sequence: Synthetic oligonucleotide
accuaagucccagaacaug

SEQ ID NO: 2552785 - RNA, 19 nt, Artificial Sequence
  Description of Artificial Sequence: Synthetic oligonucleotide
gccaugacacucugcauag

SEQ ID NO: 2552786 - RNA, 19 nt, Artificial Sequence
  Description of Artificial Sequence: Synthetic oligonucleotide
aaagcagcguguacauccu

SEQ ID NO: 2552787 - RNA, 19 nt, Artificial Sequence
  Description of Artificial Sequence: Synthetic oligonucleotide
gagagcagagcaggccugg

SEQ ID NO: 2552788 - RNA, 19 nt, Artificial Sequence
  Description of Artificial Sequence: Synthetic oligonucleotide
ucucgacggccaaucuugc

SEQ ID NO: 2552789 - RNA, 19 nt, Artificial Sequence
  Description of Artificial Sequence: Synthetic oligonucleotide
ugagacgagccuuccccac

SEQ ID NO: 2552790 - RNA, 19 nt, Artificial Sequence
  Description of Artificial Sequence: Synthetic oligonucleotide
agacugcaaaguuggugcu

SEQ ID NO: 2552791 - RNA, 19 nt, Artificial Sequence
  Description of Artificial Sequence: Synthetic oligonucleotide
augagacgagccuucccca

SEQ ID NO: 2552792 - RNA, 19 nt, Artificial Sequence
  Description of Artificial Sequence: Synthetic oligonucleotide
auuccaacaccaggggaug

SEQ ID NO: 2552793 - RNA, 19 nt, Artificial Sequence
  Description of Artificial Sequence: Synthetic oligonucleotide
cacgguaguggugauuuug

SEQ ID NO: 2552794 - RNA, 19 nt, Artificial Sequence
  Description of Artificial Sequence: Synthetic oligonucleotide
caguuccaagacugcaaag

SEQ ID NO: 2552795 - RNA, 19 nt, Artificial Sequence
  Description of Artificial Sequence: Synthetic oligonucleotide
ccaccuaagucccagaaca

SEQ ID NO: 2552796 - RNA, 19 nt, Artificial Sequence
  Description of Artificial Sequence: Synthetic oligonucleotide
aagcagcguguacauccug

SEQ ID NO: 2552797 - RNA, 19 nt, Artificial Sequence
  Description of Artificial Sequence: Synthetic oligonucleotide
cauucgaugcccucucgga

SEQ ID NO: 2552798 - RNA, 19 nt, Artificial Sequence
  Description of Artificial Sequence: Synthetic oligonucleotide
uuaggcccacgguaguggu

SEQ ID NO: 2552799 - RNA, 19 nt, Artificial Sequence
  Description of Artificial Sequence: Synthetic oligonucleotide
gaagguugucuucccggca

SEQ ID NO: 2552800 - RNA, 19 nt, Artificial Sequence
  Description of Artificial Sequence: Synthetic oligonucleotide
gaacaugagacgagccuuc

SEQ ID NO: 2552801 - RNA, 19 nt, Artificial Sequence
  Description of Artificial Sequence: Synthetic oligonucleotide
acaccguccagugcuucac

SEQ ID NO: 2552802 - RNA, 19 nt, Artificial Sequence
  Description of Artificial Sequence: Synthetic oligonucleotide
guaguucuucuuguccacc

SEQ ID NO: 2552803 - RNA, 19 nt, Artificial Sequence
  Description of Artificial Sequence: Synthetic oligonucleotide
guuggugcuuaugugaugu

SEQ ID NO: 2552804 - RNA, 19 nt, Artificial Sequence
  Description of Artificial Sequence: Synthetic oligonucleotide
uggauagacucaucccuuu

SEQ ID NO: 2552805 - RNA, 19 nt, Artificial Sequence
  Description of Artificial Sequence: Synthetic oligonucleotide
ccuaagucccagaacauga

SEQ ID NO: 2552806 - RNA, 19 nt, Artificial Sequence
  Description of Artificial Sequence: Synthetic oligonucleotide
gcaaaguuggugcuuaugu

SEQ ID NO: 2552807 - RNA, 19 nt, Artificial Sequence
  Description of Artificial Sequence: Synthetic oligonucleotide
cugcauaguacuuguccca

SEQ ID NO: 2552808 - RNA, 19 nt, Artificial Sequence
  Description of Artificial Sequence: Synthetic oligonucleotide
agggagcacucggaauucc

SEQ ID NO: 2552809 - RNA, 19 nt, Artificial Sequence
  Description of Artificial Sequence: Synthetic oligonucleotide
ucugacagucucuccucau

SEQ ID NO: 2552810 - RNA, 19 nt, Artificial Sequence
  Description of Artificial Sequence: Synthetic oligonucleotide
cccacaaagacuguaguuc

SEQ ID NO: 2552811 - RNA, 19 nt, Artificial Sequence
  Description of Artificial Sequence: Synthetic oligonucleotide
ccggugaacauuccgcacg

SEQ ID NO: 2552812 - RNA, 19 nt, Artificial Sequence
  Description of Artificial Sequence: Synthetic oligonucleotide
gucccagaacaugagacga

SEQ ID NO: 2552813 - RNA, 19 nt, Artificial Sequence
  Description of Artificial Sequence: Synthetic oligonucleotide
uucccggcauuguccaggc

SEQ ID NO: 2552814 - RNA, 19 nt, Artificial Sequence
  Description of Artificial Sequence: Synthetic oligonucleotide
caacaccaggggaugaaca

SEQ ID NO: 2552815 - RNA, 19 nt, Artificial Sequence
  Description of Artificial Sequence: Synthetic oligonucleotide
agacgagccuuccccacgu

SEQ ID NO: 2552816 - RNA, 19 nt, Artificial Sequence
  Description of Artificial Sequence: Synthetic oligonucleotide
ugaaugcagucuugauguc

SEQ ID NO: 2552817 - RNA, 19 nt, Artificial Sequence
  Description of Artificial Sequence: Synthetic oligonucleotide
augacgccaugacacucug

SEQ ID NO: 2552818 - RNA, 19 nt, Artificial Sequence
  Description of Artificial Sequence: Synthetic oligonucleotide
augacauagaugacgccau

SEQ ID NO: 2552819 - RNA, 19 nt, Artificial Sequence
  Description of Artificial Sequence: Synthetic oligonucleotide
ugucaggaauggagaggca

SEQ ID NO: 2552820 - RNA, 19 nt, Artificial Sequence
  Description of Artificial Sequence: Synthetic oligonucleotide
auaguacuugucccacaaa

SEQ ID NO: 2552821 - RNA, 19 nt, Artificial Sequence
  Description of Artificial Sequence: Synthetic oligonucleotide
ucgaugcccucucggacuc

SEQ ID NO: 2552822 - RNA, 19 nt, Artificial Sequence
  Description of Artificial Sequence: Synthetic oligonucleotide
cuaggaucaggaugcagua

SEQ ID NO: 2552823 - RNA, 19 nt, Artificial Sequence
  Description of Artificial Sequence: Synthetic oligonucleotide
guguacauccugcccuggc

SEQ ID NO: 2552824 - RNA, 19 nt, Artificial Sequence
  Description of Artificial Sequence: Synthetic oligonucleotide
aguucuuguuaaaccgugu

SEQ ID NO: 2552825 - RNA, 19 nt, Artificial Sequence
  Description of Artificial Sequence: Synthetic oligonucleotide
cuucuggaacauguacuug

SEQ ID NO: 2552826 - RNA, 19 nt, Artificial Sequence
  Description of Artificial Sequence: Synthetic oligonucleotide
agucucgacggccaaucuu

SEQ ID NO: 2552827 - RNA, 19 nt, Artificial Sequence
  Description of Artificial Sequence: Synthetic oligonucleotide
guuuaggcccacgguagug

SEQ ID NO: 2552828 - RNA, 19 nt, Artificial Sequence
  Description of Artificial Sequence: Synthetic oligonucleotide
uccccacguccacagugcc

SEQ ID NO: 2552829 - RNA, 19 nt, Artificial Sequence
  Description of Artificial Sequence: Synthetic oligonucleotide
ggauagacucaucccuuug

SEQ ID NO: 2552830 - RNA, 19 nt, Artificial Sequence
  Description of Artificial Sequence: Synthetic oligonucleotide
ggggaugaacaguuccaag

SEQ ID NO: 2552831 - RNA, 19 nt, Artificial Sequence
  Description of Artificial Sequence: Synthetic oligonucleotide
cacauccugcuuguuggcc

SEQ ID NO: 2552832 - RNA, 19 nt, Artificial Sequence
  Description of Artificial Sequence: Synthetic oligonucleotide
cagcuuagccccagcauca

SEQ ID NO: 2552833 - RNA, 19 nt, Artificial Sequence
  Description of Artificial Sequence: Synthetic oligonucleotide
cagcguguacauccugccc

SEQ ID NO: 2552834 - RNA, 19 nt, Artificial Sequence
  Description of Artificial Sequence: Synthetic oligonucleotide
cagacagucucgacggcca

SEQ ID NO: 2552835 - RNA, 19 nt, Artificial Sequence
  Description of Artificial Sequence: Synthetic oligonucleotide
ugcuuaugugaugucccuc

SEQ ID NO: 2552836 - RNA, 19 nt, Artificial Sequence
  Description of Artificial Sequence: Synthetic oligonucleotide
gauuuuggauagacucauc

SEQ ID NO: 2552837 - RNA, 19 nt, Artificial Sequence
  Description of Artificial Sequence: Synthetic oligonucleotide
gacaccguccagugcuuca

SEQ ID NO: 2552838 - RNA, 19 nt, Artificial Sequence
  Description of Artificial Sequence: Synthetic oligonucleotide
ugacgccaugacacucugc

SEQ ID NO: 2552839 - RNA, 19 nt, Artificial Sequence
  Description of Artificial Sequence: Synthetic oligonucleotide
uguccaccuaagucccaga

SEQ ID NO: 2552840 - RNA, 19 nt, Artificial Sequence
  Description of Artificial Sequence: Synthetic oligonucleotide
gugagagcagagcaggccu

SEQ ID NO: 2552841 - RNA, 19 nt, Artificial Sequence
  Description of Artificial Sequence: Synthetic oligonucleotide
agcagggagcacucggaau

SEQ ID NO: 2552842 - RNA, 19 nt, Artificial Sequence
  Description of Artificial Sequence: Synthetic oligonucleotide
aggcccacgguagugguga

SEQ ID NO: 2552843 - RNA, 19 nt, Artificial Sequence
  Description of Artificial Sequence: Synthetic oligonucleotide
uaggcccacgguaguggug

SEQ ID NO: 2552844 - RNA, 19 nt, Artificial Sequence
  Description of Artificial Sequence: Synthetic oligonucleotide
ccagcuuagccccagcauc

SEQ ID NO: 2552845 - RNA, 19 nt, Artificial Sequence
  Description of Artificial Sequence: Synthetic oligonucleotide
uccaacaccaggggaugaa

SEQ ID NO: 2552846 - RNA, 19 nt, Artificial Sequence
  Description of Artificial Sequence: Synthetic oligonucleotide
ucuucccggcauuguccag

SEQ ID NO: 2552847 - RNA, 19 nt, Artificial Sequence
  Description of Artificial Sequence: Synthetic oligonucleotide
gccagcagggagcacucgg

SEQ ID NO: 2552848 - RNA, 19 nt, Artificial Sequence
  Description of Artificial Sequence: Synthetic oligonucleotide
gcagcguguacauccugcc

SEQ ID NO: 2552849 - RNA, 19 nt, Artificial Sequence
  Description of Artificial Sequence: Synthetic oligonucleotide
gccaacaccaggaugggga

SEQ ID NO: 2552850 - RNA, 19 nt, Artificial Sequence
  Description of Artificial Sequence: Synthetic oligonucleotide
ccauucgaugcccucucgg

SEQ ID NO: 2552851 - RNA, 19 nt, Artificial Sequence
  Description of Artificial Sequence: Synthetic oligonucleotide
caccauccauucgaugccc

SEQ ID NO: 2552852 - RNA, 19 nt, Artificial Sequence
  Description of Artificial Sequence: Synthetic oligonucleotide
guaguucuuguuaaaccgu

SEQ ID NO: 2552853 - RNA, 19 nt, Artificial Sequence
  Description of Artificial Sequence: Synthetic oligonucleotide
guucuuguuaaaccguguu

SEQ ID NO: 2552854 - RNA, 19 nt, Artificial Sequence
  Description of Artificial Sequence: Synthetic oligonucleotide
aggaugcaguauucauccu

SEQ ID NO: 2552855 - RNA, 19 nt, Artificial Sequence
  Description of Artificial Sequence: Synthetic oligonucleotide
guacagccccgaaagcagc

SEQ ID NO: 2552856 - RNA, 19 nt, Artificial Sequence
  Description of Artificial Sequence: Synthetic oligonucleotide
ccugggucagacagucucg

SEQ ID NO: 2552857 - RNA, 19 nt, Artificial Sequence
  Description of Artificial Sequence: Synthetic oligonucleotide
guuccaagacugcaaaguu

SEQ ID NO: 2552858 - RNA, 19 nt, Artificial Sequence
  Description of Artificial Sequence: Synthetic oligonucleotide
aggggaugaacaguuccaa

SEQ ID NO: 2552859 - RNA, 19 nt, Artificial Sequence
  Description of Artificial Sequence: Synthetic oligonucleotide
gauggggacaccguccagu

SEQ ID NO: 2552860 - RNA, 19 nt, Artificial Sequence
  Description of Artificial Sequence: Synthetic oligonucleotide
gaugacgccaugacacucu

SEQ ID NO: 2552861 - RNA, 19 nt, Artificial Sequence
  Description of Artificial Sequence: Synthetic oligonucleotide
ugggucagacagucucgac

SEQ ID NO: 2552862 - RNA, 19 nt, Artificial Sequence
  Description of Artificial Sequence: Synthetic oligonucleotide
ccaagaagguugucuuccc

SEQ ID NO: 2552863 - RNA, 19 nt, Artificial Sequence
  Description of Artificial Sequence: Synthetic oligonucleotide
uuggugcuuaugugauguc

SEQ ID NO: 2552864 - RNA, 19 nt, Artificial Sequence
  Description of Artificial Sequence: Synthetic oligonucleotide
gcacucggaauuccaacac

SEQ ID NO: 2552865 - RNA, 19 nt, Artificial Sequence
  Description of Artificial Sequence: Synthetic oligonucleotide
gacucaucccuuuguaguu

SEQ ID NO: 2552866 - RNA, 19 nt, Artificial Sequence
  Description of Artificial Sequence: Synthetic oligonucleotide
auuccgcacgacacacuuc

SEQ ID NO: 2552867 - RNA, 19 nt, Artificial Sequence
  Description of Artificial Sequence: Synthetic oligonucleotide
gcuuaugugaugucccucu

SEQ ID NO: 2552868 - RNA, 19 nt, Artificial Sequence
  Description of Artificial Sequence: Synthetic oligonucleotide
gcauuguccaggccuagga

SEQ ID NO: 2552869 - RNA, 19 nt, Artificial Sequence
  Description of Artificial Sequence: Synthetic oligonucleotide
cacucgaaaccaccuucuc

SEQ ID NO: 2552870 - RNA, 19 nt, Artificial Sequence
  Description of Artificial Sequence: Synthetic oligonucleotide
caaagacuguaguucuucu

SEQ ID NO: 2552871 - RNA, 19 nt, Artificial Sequence
  Description of Artificial Sequence: Synthetic oligonucleotide
augucccucugccggggug

SEQ ID NO: 2552872 - RNA, 19 nt, Artificial Sequence
  Description of Artificial Sequence: Synthetic oligonucleotide
guccaccuaagucccagaa

SEQ ID NO: 2552873 - RNA, 19 nt, Artificial Sequence
  Description of Artificial Sequence: Synthetic oligonucleotide
gguaguggugauuuuggau

SEQ ID NO: 2552874 - RNA, 19 nt, Artificial Sequence
  Description of Artificial Sequence: Synthetic oligonucleotide
ucggacuccuuugccugug

SEQ ID NO: 2552875 - RNA, 19 nt, Artificial Sequence
  Description of Artificial Sequence: Synthetic oligonucleotide
ccuaggaucaggaugcagu

SEQ ID NO: 2552876 - RNA, 19 nt, Artificial Sequence
  Description of Artificial Sequence: Synthetic oligonucleotide
cccagaacaugagacgagc

SEQ ID NO: 2552877 - RNA, 19 nt, Artificial Sequence
  Description of Artificial Sequence: Synthetic oligonucleotide
gugccaauguuuaggccca

SEQ ID NO: 2552878 - RNA, 19 nt, Artificial Sequence
  Description of Artificial Sequence: Synthetic oligonucleotide
ggcaggucuccacauccug

SEQ ID NO: 2552879 - RNA, 19 nt, Artificial Sequence
  Description of Artificial Sequence: Synthetic oligonucleotide
caauguuuaggcccacggu

SEQ ID NO: 2552880 - RNA, 19 nt, Artificial Sequence
  Description of Artificial Sequence: Synthetic oligonucleotide
ggacuccuuugccugugag

SEQ ID NO: 2552881 - RNA, 19 nt, Artificial Sequence
  Description of Artificial Sequence: Synthetic oligonucleotide
ccguccagugcuucacucg

SEQ ID NO: 2552882 - RNA, 19 nt, Artificial Sequence
  Description of Artificial Sequence: Synthetic oligonucleotide
gagccuuccccacguccac

SEQ ID NO: 2552883 - RNA, 19 nt, Artificial Sequence
  Description of Artificial Sequence: Synthetic oligonucleotide
accaggggaugaacaguuc

SEQ ID NO: 2552884 - RNA, 19 nt, Artificial Sequence
  Description of Artificial Sequence: Synthetic oligonucleotide
ggggacaccguccagugcu

SEQ ID NO: 2552885 - RNA, 19 nt, Artificial Sequence
  Description of Artificial Sequence: Synthetic oligonucleotide
agcuuagccccagcaucag

SEQ ID NO: 2552886 - RNA, 19 nt, Artificial Sequence
  Description of Artificial Sequence: Synthetic oligonucleotide
guggagucaaugacauaga

SEQ ID NO: 2552887 - RNA, 19 nt, Artificial Sequence
  Description of Artificial Sequence: Synthetic oligonucleotide
ccagugcuucacucgaaac

SEQ ID NO: 2552888 - RNA, 19 nt, Artificial Sequence
  Description of Artificial Sequence: Synthetic oligonucleotide
gccaaucuugcagguacag

SEQ ID NO: 2552889 - RNA, 19 nt, Artificial Sequence
  Description of Artificial Sequence: Synthetic oligonucleotide
cagccccgaaagcagcgug

SEQ ID NO: 2552890 - RNA, 19 nt, Artificial Sequence
  Description of Artificial Sequence: Synthetic oligonucleotide
ccgcacgacacacuucacc

SEQ ID NO: 2552891 - RNA, 19 nt, Artificial Sequence
  Description of Artificial Sequence: Synthetic oligonucleotide
caaccagcuuagccccagc

SEQ ID NO: 2552892 - RNA, 19 nt, Artificial Sequence
  Description of Artificial Sequence: Synthetic oligonucleotide
uccgcacgacacacuucac

SEQ ID NO: 2552893 - RNA, 19 nt, Artificial Sequence
  Description of Artificial Sequence: Synthetic oligonucleotide
gccuuccccacguccacag

SEQ ID NO: 2552894 - RNA, 19 nt, Artificial Sequence
  Description of Artificial Sequence: Synthetic oligonucleotide
auggagaggcaggucucca

SEQ ID NO: 2552895 - RNA, 19 nt, Artificial Sequence
  Description of Artificial Sequence: Synthetic oligonucleotide
caucaguggcacagagcca

SEQ ID NO: 2552896 - RNA, 19 nt, Artificial Sequence
  Description of Artificial Sequence: Synthetic oligonucleotide
ggaucaggaugcaguauuc

SEQ ID NO: 2552897 - RNA, 19 nt, Artificial Sequence
  Description of Artificial Sequence: Synthetic oligonucleotide
gcaggucuccacauccugc

SEQ ID NO: 2552898 - RNA, 19 nt, Artificial Sequence
  Description of Artificial Sequence: Synthetic oligonucleotide
cgacggccaaucuugcagg

SEQ ID NO: 2552899 - RNA, 19 nt, Artificial Sequence
  Description of Artificial Sequence: Synthetic oligonucleotide
cucucggacuccuuugccu

SEQ ID NO: 2552900 - RNA, 19 nt, Artificial Sequence
  Description of Artificial Sequence: Synthetic oligonucleotide
cggccaaucuugcagguac

SEQ ID NO: 2552901 - RNA, 19 nt, Artificial Sequence
  Description of Artificial Sequence: Synthetic oligonucleotide
guacuuguacagccccgaa

SEQ ID NO: 2552902 - RNA, 19 nt, Artificial Sequence
  Description of Artificial Sequence: Synthetic oligonucleotide
ggccggugaacauuccgca

SEQ ID NO: 2552903 - RNA, 19 nt, Artificial Sequence
  Description of Artificial Sequence: Synthetic oligonucleotide
agacagucucgacggccaa

SEQ ID NO: 2552904 - RNA, 19 nt, Artificial Sequence
  Description of Artificial Sequence: Synthetic oligonucleotide
gugcuuaugugaugucccu

SEQ ID NO: 2552905 - RNA, 19 nt, Artificial Sequence
  Description of Artificial Sequence: Synthetic oligonucleotide
gcguguacauccugcccug

SEQ ID NO: 2552906 - RNA, 19 nt, Artificial Sequence
  Description of Artificial Sequence: Synthetic oligonucleotide
cucaucccuuuguaguucu

SEQ ID NO: 2552907 - RNA, 19 nt, Artificial Sequence
  Description of Artificial Sequence: Synthetic oligonucleotide
cuuuggacucugacagucu

SEQ ID NO: 2552908 - RNA, 19 nt, Artificial Sequence
  Description of Artificial Sequence: Synthetic oligonucleotide
gccaauguuuaggcccacg

SEQ ID NO: 2552909 - RNA, 19 nt, Artificial Sequence
  Description of Artificial Sequence: Synthetic oligonucleotide
cagggagcacucggaauuc

SEQ ID NO: 2552910 - RNA, 19 nt, Artificial Sequence
  Description of Artificial Sequence: Synthetic oligonucleotide
agguugucuucccggcauu

SEQ ID NO: 2552911 - RNA, 19 nt, Artificial Sequence
  Description of Artificial Sequence: Synthetic oligonucleotide
cauuccgcacgacacacuu

SEQ ID NO: 2552912 - RNA, 19 nt, Artificial Sequence
  Description of Artificial Sequence: Synthetic oligonucleotide
cccuuuguaguucuuguua

SEQ ID NO: 2552913 - RNA, 19 nt, Artificial Sequence
  Description of Artificial Sequence: Synthetic oligonucleotide
cucgacggccaaucuugca

SEQ ID NO: 2552914 - RNA, 19 nt, Artificial Sequence
  Description of Artificial Sequence: Synthetic oligonucleotide
cugggucagacagucucga

SEQ ID NO: 2552915 - RNA, 19 nt, Artificial Sequence
  Description of Artificial Sequence: Synthetic oligonucleotide
acagccccgaaagcagcgu

SEQ ID NO: 2552916 - RNA, 19 nt, Artificial Sequence
  Description of Artificial Sequence: Synthetic oligonucleotide
cccgaaagcagcguguaca

SEQ ID NO: 2552917 - RNA, 19 nt, Artificial Sequence
  Description of Artificial Sequence: Synthetic oligonucleotide
cuuguccaccuaaguccca

SEQ ID NO: 2552918 - RNA, 19 nt, Artificial Sequence
  Description of Artificial Sequence: Synthetic oligonucleotide
gcauaguacuugucccaca

SEQ ID NO: 2552919 - RNA, 19 nt, Artificial Sequence
  Description of Artificial Sequence: Synthetic oligonucleotide
gugcuucacucgaaaccac

SEQ ID NO: 2552920 - RNA, 19 nt, Artificial Sequence
  Description of Artificial Sequence: Synthetic oligonucleotide
gagccagcagggagcacuc

SEQ ID NO: 2552921 - RNA, 19 nt, Artificial Sequence
  Description of Artificial Sequence: Synthetic oligonucleotide
agccccgaaagcagcgugu

SEQ ID NO: 2552922 - RNA, 19 nt, Artificial Sequence
  Description of Artificial Sequence: Synthetic oligonucleotide
accauccauucgaugcccu

SEQ ID NO: 2552923 - RNA, 19 nt, Artificial Sequence
  Description of Artificial Sequence: Synthetic oligonucleotide
ccacaaagacuguaguucu

SEQ ID NO: 2552924 - RNA, 19 nt, Artificial Sequence
  Description of Artificial Sequence: Synthetic oligonucleotide
ucccggcauuguccaggcc

SEQ ID NO: 2552925 - RNA, 19 nt, Artificial Sequence
  Description of Artificial Sequence: Synthetic oligonucleotide
cauccauucgaugcccucu

SEQ ID NO: 2552926 - RNA, 19 nt, Artificial Sequence
  Description of Artificial Sequence: Synthetic oligonucleotide
acauuccgcacgacacacu

SEQ ID NO: 2552927 - RNA, 19 nt, Artificial Sequence
  Description of Artificial Sequence: Synthetic oligonucleotide
gacacucugcauaguacuu

SEQ ID NO: 2552928 - RNA, 19 nt, Artificial Sequence
  Description of Artificial Sequence: Synthetic oligonucleotide
ccacauccugcuuguuggc

SEQ ID NO: 2552929 - RNA, 19 nt, Artificial Sequence
  Description of Artificial Sequence: Synthetic oligonucleotide
ccacagugccaauguuuag

SEQ ID NO: 2552930 - RNA, 19 nt, Artificial Sequence
  Description of Artificial Sequence: Synthetic oligonucleotide
gccggugaacauuccgcac

SEQ ID NO: 2552931 - RNA, 19 nt, Artificial Sequence
  Description of Artificial Sequence: Synthetic oligonucleotide
gcagggagcacucggaauu

SEQ ID NO: 2552932 - RNA, 19 nt, Artificial Sequence
  Description of Artificial Sequence: Synthetic oligonucleotide
ccucucggacuccuuugcc

SEQ ID NO: 2552933 - RNA, 19 nt, Artificial Sequence
  Description of Artificial Sequence: Synthetic oligonucleotide
gcccucucggacuccuuug

SEQ ID NO: 2552934 - RNA, 19 nt, Artificial Sequence
  Description of Artificial Sequence: Synthetic oligonucleotide
gaugcccucucggacuccu

SEQ ID NO: 2552935 - RNA, 19 nt, Artificial Sequence
  Description of Artificial Sequence: Synthetic oligonucleotide
aggcaggucuccacauccu

SEQ ID NO: 2552936 - RNA, 19 nt, Artificial Sequence
  Description of Artificial Sequence: Synthetic oligonucleotide
gacgagccuuccccacguc

SEQ ID NO: 2552937 - RNA, 19 nt, Artificial Sequence
  Description of Artificial Sequence: Synthetic oligonucleotide
ggccaacaccaggaugggg

SEQ ID NO: 2552938 - RNA, 19 nt, Artificial Sequence
  Description of Artificial Sequence: Synthetic oligonucleotide
ggauggggacaccguccag

SEQ ID NO: 2552939 - RNA, 19 nt, Artificial Sequence
  Description of Artificial Sequence: Synthetic oligonucleotide
ugccaauguuuaggcccac

SEQ ID NO: 2552940 - RNA, 19 nt, Artificial Sequence
  Description of Artificial Sequence: Synthetic oligonucleotide
ggagcacucggaauuccaa

SEQ ID NO: 2552941 - RNA, 19 nt, Artificial Sequence
  Description of Artificial Sequence: Synthetic oligonucleotide
ccauccauucgaugcccuc

SEQ ID NO: 2552942 - RNA, 19 nt, Artificial Sequence
  Description of Artificial Sequence: Synthetic oligonucleotide
cacugaaugcagucuugau

SEQ ID NO: 2552943 - RNA, 19 nt, Artificial Sequence
  Description of Artificial Sequence: Synthetic oligonucleotide
cuucacucgaaaccaccuu

SEQ ID NO: 2552944 - RNA, 19 nt, Artificial Sequence
  Description of Artificial Sequence: Synthetic oligonucleotide
cagucacugaaugcagucu

SEQ ID NO: 2552945 - RNA, 19 nt, Artificial Sequence
  Description of Artificial Sequence: Synthetic oligonucleotide
cucuuuggacucugacagu

SEQ ID NO: 2552946 - RNA, 19 nt, Artificial Sequence
  Description of Artificial Sequence: Synthetic oligonucleotide
ugccgggguggccggugaa

SEQ ID NO: 2552947 - RNA, 19 nt, Artificial Sequence
  Description of Artificial Sequence: Synthetic oligonucleotide
agccuuccccacguccaca

SEQ ID NO: 2552948 - RNA, 19 nt, Artificial Sequence
  Description of Artificial Sequence: Synthetic oligonucleotide
ccagcagggagcacucgga

SEQ ID NO: 2552949 - RNA, 19 nt, Artificial Sequence
  Description of Artificial Sequence: Synthetic oligonucleotide
cacaaagacuguaguucuu

SEQ ID NO: 2552950 - RNA, 19 nt, Artificial Sequence
  Description of Artificial Sequence: Synthetic oligonucleotide
ggguggccggugaacauuc

SEQ ID NO: 2552951 - RNA, 19 nt, Artificial Sequence
  Description of Artificial Sequence: Synthetic oligonucleotide
caccuaagucccagaacau

SEQ ID NO: 2552952 - RNA, 19 nt, Artificial Sequence
  Description of Artificial Sequence: Synthetic oligonucleotide
cuugucccacaaagacugu

SEQ ID NO: 2552953 - RNA, 19 nt, Artificial Sequence
  Description of Artificial Sequence: Synthetic oligonucleotide
cccggcauuguccaggccu

SEQ ID NO: 2552954 - RNA, 19 nt, Artificial Sequence
  Description of Artificial Sequence: Synthetic oligonucleotide
ggugaacauuccgcacgac

SEQ ID NO: 2552955 - RNA, 19 nt, Artificial Sequence
  Description of Artificial Sequence: Synthetic oligonucleotide
gccccagcaucaguggcac

SEQ ID NO: 2552956 - RNA, 19 nt, Artificial Sequence
  Description of Artificial Sequence: Synthetic oligonucleotide
gcagguacagucacugaau

SEQ ID NO: 2552957 - RNA, 19 nt, Artificial Sequence
  Description of Artificial Sequence: Synthetic oligonucleotide
cguccagugcuucacucga

SEQ ID NO: 2552958 - RNA, 19 nt, Artificial Sequence
  Description of Artificial Sequence: Synthetic oligonucleotide
cgccaugacacucugcaua

SEQ ID NO: 2552959 - RNA, 19 nt, Artificial Sequence
  Description of Artificial Sequence: Synthetic oligonucleotide
cgagccuuccccacgucca

SEQ ID NO: 2552960 - RNA, 19 nt, Artificial Sequence
  Description of Artificial Sequence: Synthetic oligonucleotide
cucggacuccuuugccugu

SEQ ID NO: 2552961 - RNA, 19 nt, Artificial Sequence
  Description of Artificial Sequence: Synthetic oligonucleotide
caguggagucaaugacaua

SEQ ID NO: 2552962 - RNA, 19 nt, Artificial Sequence
  Description of Artificial Sequence: Synthetic oligonucleotide
ggccaaucuugcagguaca

SEQ ID NO: 2552963 - RNA, 19 nt, Artificial Sequence
  Description of Artificial Sequence: Synthetic oligonucleotide
gguggccggugaacauucc

SEQ ID NO: 2552964 - RNA, 19 nt, Artificial Sequence
  Description of Artificial Sequence: Synthetic oligonucleotide
cggugaacauuccgcacga

SEQ ID NO: 2552965 - RNA, 19 nt, Artificial Sequence
  Description of Artificial Sequence: Synthetic oligonucleotide
cagucucgacggccaaucu

SEQ ID NO: 2552966 - RNA, 19 nt, Artificial Sequence
  Description of Artificial Sequence: Synthetic oligonucleotide
cguguacauccugcccugg

SEQ ID NO: 2552967 - RNA, 19 nt, Artificial Sequence
  Description of Artificial Sequence: Synthetic oligonucleotide
ggacaccguccagugcuuc

SEQ ID NO: 2552968 - RNA, 19 nt, Artificial Sequence
  Description of Artificial Sequence: Synthetic oligonucleotide
cgguaguggugauuuugga

SEQ ID NO: 2552969 - RNA, 19 nt, Artificial Sequence
  Description of Artificial Sequence: Synthetic oligonucleotide
cugcaaaguuggugcuuau

SEQ ID NO: 2552970 - RNA, 19 nt, Artificial Sequence
  Description of Artificial Sequence: Synthetic oligonucleotide
ccgaaagcagcguguacau

SEQ ID NO: 2552971 - RNA, 19 nt, Artificial Sequence
  Description of Artificial Sequence: Synthetic oligonucleotide
gcuuagccccagcaucagu

SEQ ID NO: 2552972 - RNA, 19 nt, Artificial Sequence
  Description of Artificial Sequence: Synthetic oligonucleotide
cugccgggguggccgguga

SEQ ID NO: 2552973 - RNA, 19 nt, Artificial Sequence
  Description of Artificial Sequence: Synthetic oligonucleotide
gcacgacacacuucaccau

SEQ ID NO: 2552974 - RNA, 19 nt, Artificial Sequence
  Description of Artificial Sequence: Synthetic oligonucleotide
ccggcauuguccaggccua

SEQ ID NO: 2552975 - RNA, 19 nt, Artificial Sequence
  Description of Artificial Sequence: Synthetic oligonucleotide
caccguccagugcuucacu

SEQ ID NO: 2552976 - RNA, 19 nt, Artificial Sequence
  Description of Artificial Sequence: Synthetic oligonucleotide
cgaaaccaccuucucaaau

SEQ ID NO: 2552977 - RNA, 19 nt, Artificial Sequence
  Description of Artificial Sequence: Synthetic oligonucleotide
cccacgguaguggugauuu

SEQ ID NO: 2552978 - RNA, 19 nt, Artificial Sequence
  Description of Artificial Sequence: Synthetic oligonucleotide
ccaaucuugcagguacagu

SEQ ID NO: 2552979 - RNA, 19 nt, Artificial Sequence
  Description of Artificial Sequence: Synthetic oligonucleotide
gccgggguggccggugaac

SEQ ID NO: 2552980 - RNA, 19 nt, Artificial Sequence
  Description of Artificial Sequence: Synthetic oligonucleotide
ccgggguggccggugaaca

SEQ ID NO: 2552981 - RNA, 19 nt, Artificial Sequence
  Description of Artificial Sequence: Synthetic oligonucleotide
gccccgaaagcagcgugua

SEQ ID NO: 2552982 - RNA, 19 nt, Artificial Sequence
  Description of Artificial Sequence: Synthetic oligonucleotide
ggccuaggaucaggaugca

SEQ ID NO: 2552983 - RNA, 19 nt, Artificial Sequence
  Description of Artificial Sequence: Synthetic oligonucleotide
augcccucucggacuccuu

SEQ ID NO: 2552984 - RNA, 19 nt, Artificial Sequence
  Description of Artificial Sequence: Synthetic oligonucleotide
gggguggccggugaacauu

SEQ ID NO: 2552985 - RNA, 19 nt, Artificial Sequence
  Description of Artificial Sequence: Synthetic oligonucleotide
cggacuccuuugccuguga

SEQ ID NO: 2552986 - RNA, 19 nt, Artificial Sequence
  Description of Artificial Sequence: Synthetic oligonucleotide
cgaugcccucucggacucc

SEQ ID NO: 2552987 - RNA, 19 nt, Artificial Sequence
  Description of Artificial Sequence: Synthetic oligonucleotide
gggacaccguccagugcuu

SEQ ID NO: 2552988 - RNA, 19 nt, Artificial Sequence
  Description of Artificial Sequence: Synthetic oligonucleotide
ccuuccccacguccacagu

SEQ ID NO: 2552989 - RNA, 19 nt, Artificial Sequence
  Description of Artificial Sequence: Synthetic oligonucleotide
ggcccacgguaguggugau

SEQ ID NO: 2552990 - RNA, 19 nt, Artificial Sequence
  Description of Artificial Sequence: Synthetic oligonucleotide
ccucaucaguggagucaau

SEQ ID NO: 2552991 - RNA, 19 nt, Artificial Sequence
  Description of Artificial Sequence: Synthetic oligonucleotide
cucugccgggguggccggu

SEQ ID NO: 2552992 - RNA, 19 nt, Artificial Sequence
  Description of Artificial Sequence: Synthetic oligonucleotide
ccacgguaguggugauuuu

SEQ ID NO: 2552993 - RNA, 19 nt, Artificial Sequence
  Description of Artificial Sequence: Synthetic oligonucleotide
gcccacgguaguggugauu

SEQ ID NO: 2552994 - RNA, 19 nt, Artificial Sequence
  Description of Artificial Sequence: Synthetic oligonucleotide
cgggguggccggugaacau

SEQ ID NO: 2552995 - RNA, 19 nt, Artificial Sequence
  Description of Artificial Sequence: Synthetic oligonucleotide
aauuaugacucauugaaac

SEQ ID NO: 2552996 - RNA, 19 nt, Artificial Sequence
  Description of Artificial Sequence: Synthetic oligonucleotide
uuaacuuaaaacuaaagcu

SEQ ID NO: 2552997 - RNA, 19 nt, Artificial Sequence
  Description of Artificial Sequence: Synthetic oligonucleotide
aaagcuaacaaauuuaaau

SEQ ID NO: 2552998 - RNA, 19 nt, Artificial Sequence
  Description of Artificial Sequence: Synthetic oligonucleotide
uaaguaauauaucugaaug

SEQ ID NO: 2552999 - RNA, 19 nt, Artificial Sequence
  Description of Artificial Sequence: Synthetic oligonucleotide
aauuauagucuucucaaag

SEQ ID NO: 2553000 - RNA, 19 nt, Artificial Sequence
  Description of Artificial Sequence: Synthetic oligonucleotide
uuuaucaugucuuaguagc

SEQ ID NO: 2553001 - RNA, 19 nt, Artificial Sequence
  Description of Artificial Sequence: Synthetic oligonucleotide
aaguauguagugcagaaag

SEQ ID NO: 2553002 - RNA, 19 nt, Artificial Sequence
  Description of Artificial Sequence: Synthetic oligonucleotide
acucauugaaaccuaaagc

SEQ ID NO: 2553003 - RNA, 19 nt, Artificial Sequence
  Description of Artificial Sequence: Synthetic oligonucleotide
uuugacuuaauuauagucu

SEQ ID NO: 2553004 - RNA, 19 nt, Artificial Sequence
  Description of Artificial Sequence: Synthetic oligonucleotide
auuugacuuaauuauaguc

SEQ ID NO: 2553005 - RNA, 19 nt, Artificial Sequence
  Description of Artificial Sequence: Synthetic oligonucleotide
uaauuugacuuaauuauag

SEQ ID NO: 2553006 - RNA, 19 nt, Artificial Sequence
  Description of Artificial Sequence: Synthetic oligonucleotide
uagauuaucuuuaucaugu

SEQ ID NO: 2553007 - RNA, 19 nt, Artificial Sequence
  Description of Artificial Sequence: Synthetic oligonucleotide
ugaauguuuaacuuaaaac

SEQ ID NO: 2553008 - RNA, 19 nt, Artificial Sequence
  Description of Artificial Sequence: Synthetic oligonucleotide
uuuacaagaauauucuucu

SEQ ID NO: 2553009 - RNA, 19 nt, Artificial Sequence
  Description of Artificial Sequence: Synthetic oligonucleotide
acaaccagcaacaaaaggc

SEQ ID NO: 2553010 - RNA, 19 nt, Artificial Sequence
  Description of Artificial Sequence: Synthetic oligonucleotide
ucuaucaaaaguauguagu

SEQ ID NO: 2553011 - RNA, 19 nt, Artificial Sequence
  Description of Artificial Sequence: Synthetic oligonucleotide
aauauguuucuaucaaaag

SEQ ID NO: 2553012 - RNA, 19 nt, Artificial Sequence
  Description of Artificial Sequence: Synthetic oligonucleotide
acaauaaaauuuuacaaga

SEQ ID NO: 2553013 - RNA, 19 nt, Artificial Sequence
  Description of Artificial Sequence: Synthetic oligonucleotide
aauacuuuggaguaaggaa

SEQ ID NO: 2553014 - RNA, 19 nt, Artificial Sequence
  Description of Artificial Sequence: Synthetic oligonucleotide
auuauagucuucucaaagg

SEQ ID NO: 2553015 - RNA, 19 nt, Artificial Sequence
  Description of Artificial Sequence: Synthetic oligonucleotide
uuaugcuuuucuaaaacag

SEQ ID NO: 2553016 - RNA, 19 nt, Artificial Sequence
  Description of Artificial Sequence: Synthetic oligonucleotide
aguucucuuagguuaagcc

SEQ ID NO: 2553017 - RNA, 19 nt, Artificial Sequence
  Description of Artificial Sequence: Synthetic oligonucleotide
ucuuauauagaaacaauaa

SEQ ID NO: 2553018 - RNA, 19 nt, Artificial Sequence
  Description of Artificial Sequence: Synthetic oligonucleotide
gaauguuuaacuuaaaacu

SEQ ID NO: 2553019 - RNA, 19 nt, Artificial Sequence
  Description of Artificial Sequence: Synthetic oligonucleotide
uuuuacaagaauauucuuc

SEQ ID NO: 2553020 - RNA, 19 nt, Artificial Sequence
  Description of Artificial Sequence: Synthetic oligonucleotide
ucuucuaccacaaccagca

SEQ ID NO: 2553021 - RNA, 19 nt, Artificial Sequence
  Description of Artificial Sequence: Synthetic oligonucleotide
ucucuuaccaauuaugacu

SEQ ID NO: 2553022 - RNA, 19 nt, Artificial Sequence
  Description of Artificial Sequence: Synthetic oligonucleotide
aauuuguguaaucuguugu

SEQ ID NO: 2553023 - RNA, 19 nt, Artificial Sequence
  Description of Artificial Sequence: Synthetic oligonucleotide
agagauucaaacucuuuac

SEQ ID NO: 2553024 - RNA, 19 nt, Artificial Sequence
  Description of Artificial Sequence: Synthetic oligonucleotide
aaucugaagucauaguaug

SEQ ID NO: 2553025 - RNA, 19 nt, Artificial Sequence
  Description of Artificial Sequence: Synthetic oligonucleotide
uuugcugccuuucaaaaug

SEQ ID NO: 2553026 - RNA, 19 nt, Artificial Sequence
  Description of Artificial Sequence: Synthetic oligonucleotide
uuaguuuggaaauugguuc

SEQ ID NO: 2553027 - RNA, 19 nt, Artificial Sequence
  Description of Artificial Sequence: Synthetic oligonucleotide
aaauugguucuauagcuug

SEQ ID NO: 2553028 - RNA, 19 nt, Artificial Sequence
  Description of Artificial Sequence: Synthetic oligonucleotide
aucucuuccuaauauuugc

SEQ ID NO: 2553029 - RNA, 19 nt, Artificial Sequence
  Description of Artificial Sequence: Synthetic oligonucleotide
uuggaaauugguucuauag

SEQ ID NO: 2553030 - RNA, 19 nt, Artificial Sequence
  Description of Artificial Sequence: Synthetic oligonucleotide
uuguuucuuauauagaaac

SEQ ID NO: 2553031 - RNA, 19 nt, Artificial Sequence
  Description of Artificial Sequence: Synthetic oligonucleotide
uucuauagcuugaugaggc

SEQ ID NO: 2553032 - RNA, 19 nt, Artificial Sequence
  Description of Artificial Sequence: Synthetic oligonucleotide
ugcagaaagagauucaaac

SEQ ID NO: 2553033 - RNA, 19 nt, Artificial Sequence
  Description of Artificial Sequence: Synthetic oligonucleotide
uguuguuucuuauauagaa

SEQ ID NO: 2553034 - RNA, 19 nt, Artificial Sequence
  Description of Artificial Sequence: Synthetic oligonucleotide
acagaaauauguuucuauc

SEQ ID NO: 2553035 - RNA, 19 nt, Artificial Sequence
  Description of Artificial Sequence: Synthetic oligonucleotide
ucuaccacaaccagcaaca

SEQ ID NO: 2553036 - RNA, 19 nt, Artificial Sequence
  Description of Artificial Sequence: Synthetic oligonucleotide
agaaacaauaaaauuuuac

SEQ ID NO: 2553037 - RNA, 19 nt, Artificial Sequence
  Description of Artificial Sequence: Synthetic oligonucleotide
aaaaugauuccugcagccc

SEQ ID NO: 2553038 - RNA, 19 nt, Artificial Sequence
  Description of Artificial Sequence: Synthetic oligonucleotide
uaagccaugggaagaauag

SEQ ID NO: 2553039 - RNA, 19 nt, Artificial Sequence
  Description of Artificial Sequence: Synthetic oligonucleotide
auuaguaaguucucuuagg

SEQ ID NO: 2553040 - RNA, 19 nt, Artificial Sequence
  Description of Artificial Sequence: Synthetic oligonucleotide
uaauauaucugaaugccau

SEQ ID NO: 2553041 - RNA, 19 nt, Artificial Sequence
  Description of Artificial Sequence: Synthetic oligonucleotide
uuaguaaguucucuuaggu

SEQ ID NO: 2553042 - RNA, 19 nt, Artificial Sequence
  Description of Artificial Sequence: Synthetic oligonucleotide
gacucauugaaaccuaaag

SEQ ID NO: 2553043 - RNA, 19 nt, Artificial Sequence
  Description of Artificial Sequence: Synthetic oligonucleotide
uccaacauaaucucuguca

SEQ ID NO: 2553044 - RNA, 19 nt, Artificial Sequence
  Description of Artificial Sequence: Synthetic oligonucleotide
uucuaucaaaaguauguag

SEQ ID NO: 2553045 - RNA, 19 nt, Artificial Sequence
  Description of Artificial Sequence: Synthetic oligonucleotide
ucaaaaugauuccugcagc

SEQ ID NO: 2553046 - RNA, 19 nt, Artificial Sequence
  Description of Artificial Sequence: Synthetic oligonucleotide
auugacauuaguaaguucu

SEQ ID NO: 2553047 - RNA, 19 nt, Artificial Sequence
  Description of Artificial Sequence: Synthetic oligonucleotide
uggaaauugguucuauagc

SEQ ID NO: 2553048 - RNA, 19 nt, Artificial Sequence
  Description of Artificial Sequence: Synthetic oligonucleotide
aaaaguauguagugcagaa

SEQ ID NO: 2553049 - RNA, 19 nt, Artificial Sequence
  Description of Artificial Sequence: Synthetic oligonucleotide
uggacucuaaguaauauau

SEQ ID NO: 2553050 - RNA, 19 nt, Artificial Sequence
  Description of Artificial Sequence: Synthetic oligonucleotide
uuagguuaagccaugggaa

SEQ ID NO: 2553051 - RNA, 19 nt, Artificial Sequence
  Description of Artificial Sequence: Synthetic oligonucleotide
ugguucuauagcuugauga

SEQ ID NO: 2553052 - RNA, 19 nt, Artificial Sequence
  Description of Artificial Sequence: Synthetic oligonucleotide
aguaaguucucuuagguua

SEQ ID NO: 2553053 - RNA, 19 nt, Artificial Sequence
  Description of Artificial Sequence: Synthetic oligonucleotide
ucucugucaacacagaaau

SEQ ID NO: 2553054 - RNA, 19 nt, Artificial Sequence
  Description of Artificial Sequence: Synthetic oligonucleotide
ugucaacacagaaauaugu

SEQ ID NO: 2553055 - RNA, 19 nt, Artificial Sequence
  Description of Artificial Sequence: Synthetic oligonucleotide
agugauuuaguuuggaaau

SEQ ID NO: 2553056 - RNA, 19 nt, Artificial Sequence
  Description of Artificial Sequence: Synthetic oligonucleotide
uucuuauauagaaacaaua

SEQ ID NO: 2553057 - RNA, 19 nt, Artificial Sequence
  Description of Artificial Sequence: Synthetic oligonucleotide
aaaugauuccugcagccca

SEQ ID NO: 2553058 - RNA, 19 nt, Artificial Sequence
  Description of Artificial Sequence: Synthetic oligonucleotide
uccacgauagacaaaucug

SEQ ID NO: 2553059 - RNA, 19 nt, Artificial Sequence
  Description of Artificial Sequence: Synthetic oligonucleotide
cuuucaaaaugauuccugc

SEQ ID NO: 2553060 - RNA, 19 nt, Artificial Sequence
  Description of Artificial Sequence: Synthetic oligonucleotide
uacaagaauauucuucuaa

SEQ ID NO: 2553061 - RNA, 19 nt, Artificial Sequence
  Description of Artificial Sequence: Synthetic oligonucleotide
ucugucaacacagaaauau

SEQ ID NO: 2553062 - RNA, 19 nt, Artificial Sequence
  Description of Artificial Sequence: Synthetic oligonucleotide
auaucugaaugccaucuuc

SEQ ID NO: 2553063 - RNA, 19 nt, Artificial Sequence
  Description of Artificial Sequence: Synthetic oligonucleotide
uaccaauuaugacucauug

SEQ ID NO: 2553064 - RNA, 19 nt, Artificial Sequence
  Description of Artificial Sequence: Synthetic oligonucleotide
agucauaguaugaaggaac

SEQ ID NO: 2553065 - RNA, 19 nt, Artificial Sequence
  Description of Artificial Sequence: Synthetic oligonucleotide
uuaaaacuaaagcucacuu

SEQ ID NO: 2553066 - RNA, 19 nt, Artificial Sequence
  Description of Artificial Sequence: Synthetic oligonucleotide
uugaauguuuaacuuaaaa

SEQ ID NO: 2553067 - RNA, 19 nt, Artificial Sequence
  Description of Artificial Sequence: Synthetic oligonucleotide
ucuuaguagcuaaaguugu

SEQ ID NO: 2553068 - RNA, 19 nt, Artificial Sequence
  Description of Artificial Sequence: Synthetic oligonucleotide
aaaggcacuaaguucugca

SEQ ID NO: 2553069 - RNA, 19 nt, Artificial Sequence
  Description of Artificial Sequence: Synthetic oligonucleotide
aacaaaaggcgucaacagu

SEQ ID NO: 2553070 - RNA, 19 nt, Artificial Sequence
  Description of Artificial Sequence: Synthetic oligonucleotide
cacuagauuaucuuuauca

SEQ ID NO: 2553071 - RNA, 19 nt, Artificial Sequence
  Description of Artificial Sequence: Synthetic oligonucleotide
ugucuuaguagcuaaaguu

SEQ ID NO: 2553072 - RNA, 19 nt, Artificial Sequence
  Description of Artificial Sequence: Synthetic oligonucleotide
uaugcuuuucuaaaacagu

SEQ ID NO: 2553073 - RNA, 19 nt, Artificial Sequence
  Description of Artificial Sequence: Synthetic oligonucleotide
aguaugaaggaacuuuuca

SEQ ID NO: 2553074 - RNA, 19 nt, Artificial Sequence
  Description of Artificial Sequence: Synthetic oligonucleotide
cuaucaaaaguauguagug

SEQ ID NO: 2553075 - RNA, 19 nt, Artificial Sequence
  Description of Artificial Sequence: Synthetic oligonucleotide
uguuucuuauauagaaaca

SEQ ID NO: 2553076 - RNA, 19 nt, Artificial Sequence
  Description of Artificial Sequence: Synthetic oligonucleotide
uguuucuaucaaaaguaug

SEQ ID NO: 2553077 - RNA, 19 nt, Artificial Sequence
  Description of Artificial Sequence: Synthetic oligonucleotide
gacaaaucugaagucauag

SEQ ID NO: 2553078 - RNA, 19 nt, Artificial Sequence
  Description of Artificial Sequence: Synthetic oligonucleotide
aaauacuuuggaguaagga

SEQ ID NO: 2553079 - RNA, 19 nt, Artificial Sequence
  Description of Artificial Sequence: Synthetic oligonucleotide
ucugcaucugaucucuucc

SEQ ID NO: 2553080 - RNA, 19 nt, Artificial Sequence
  Description of Artificial Sequence: Synthetic oligonucleotide
uuuacaggaucucggaaac

SEQ ID NO: 2553081 - RNA, 19 nt, Artificial Sequence
  Description of Artificial Sequence: Synthetic oligonucleotide
uggaguaaggaauuugugu

SEQ ID NO: 2553082 - RNA, 19 nt, Artificial Sequence
  Description of Artificial Sequence: Synthetic oligonucleotide
aauguuuaacuuaaaacua

SEQ ID NO: 2553083 - RNA, 19 nt, Artificial Sequence
  Description of Artificial Sequence: Synthetic oligonucleotide
aacucuuuacaggaucucg

SEQ ID NO: 2553084 - RNA, 19 nt, Artificial Sequence
  Description of Artificial Sequence: Synthetic oligonucleotide
aauagcccugcaaaugagc

SEQ ID NO: 2553085 - RNA, 19 nt, Artificial Sequence
  Description of Artificial Sequence: Synthetic oligonucleotide
auaaucucugucaacacag

SEQ ID NO: 2553086 - RNA, 19 nt, Artificial Sequence
  Description of Artificial Sequence: Synthetic oligonucleotide
agcuaacaaauuuaaauaa

SEQ ID NO: 2553087 - RNA, 19 nt, Artificial Sequence
  Description of Artificial Sequence: Synthetic oligonucleotide
aauauuugcugccuuucaa

SEQ ID NO: 2553088 - RNA, 19 nt, Artificial Sequence
  Description of Artificial Sequence: Synthetic oligonucleotide
cuuguucucugucacaagc

SEQ ID NO: 2553089 - RNA, 19 nt, Artificial Sequence
  Description of Artificial Sequence: Synthetic oligonucleotide
gaauuuguguaaucuguug

SEQ ID NO: 2553090 - RNA, 19 nt, Artificial Sequence
  Description of Artificial Sequence: Synthetic oligonucleotide
aaaugagcuggacucuaag

SEQ ID NO: 2553091 - RNA, 19 nt, Artificial Sequence
  Description of Artificial Sequence: Synthetic oligonucleotide
uugucucuuaccaauuaug

SEQ ID NO: 2553092 - RNA, 19 nt, Artificial Sequence
  Description of Artificial Sequence: Synthetic oligonucleotide
uauagcuugaugaggcugu

SEQ ID NO: 2553093 - RNA, 19 nt, Artificial Sequence
  Description of Artificial Sequence: Synthetic oligonucleotide
gaagucauaguaugaagga

SEQ ID NO: 2553094 - RNA, 19 nt, Artificial Sequence
  Description of Artificial Sequence: Synthetic oligonucleotide
uucucuuagguuaagccau

SEQ ID NO: 2553095 - RNA, 19 nt, Artificial Sequence
  Description of Artificial Sequence: Synthetic oligonucleotide
aaaaggcgucaacaguuuc

SEQ ID NO: 2553096 - RNA, 19 nt, Artificial Sequence
  Description of Artificial Sequence: Synthetic oligonucleotide
cuagauuaucuuuaucaug

SEQ ID NO: 2553097 - RNA, 19 nt, Artificial Sequence
  Description of Artificial Sequence: Synthetic oligonucleotide
cuuuaucaugucuuaguag

SEQ ID NO: 2553098 - RNA, 19 nt, Artificial Sequence
  Description of Artificial Sequence: Synthetic oligonucleotide
uaucaaaaguauguagugc

SEQ ID NO: 2553099 - RNA, 19 nt, Artificial Sequence
  Description of Artificial Sequence: Synthetic oligonucleotide
ucuaaguaauauaucugaa

SEQ ID NO: 2553100 - RNA, 19 nt, Artificial Sequence
  Description of Artificial Sequence: Synthetic oligonucleotide
uucccauugacauuaguaa

SEQ ID NO: 2553101 - RNA, 19 nt, Artificial Sequence
  Description of Artificial Sequence: Synthetic oligonucleotide
uguuuaacuuaaaacuaaa

SEQ ID NO: 2553102 - RNA, 19 nt, Artificial Sequence
  Description of Artificial Sequence: Synthetic oligonucleotide
ucaaacucuuuacaggauc

SEQ ID NO: 2553103 - RNA, 19 nt, Artificial Sequence
  Description of Artificial Sequence: Synthetic oligonucleotide
uuucacuagauuaucuuua

SEQ ID NO: 2553104 - RNA, 19 nt, Artificial Sequence
  Description of Artificial Sequence: Synthetic oligonucleotide
ucuuuaucaugucuuagua

SEQ ID NO: 2553105 - RNA, 19 nt, Artificial Sequence
  Description of Artificial Sequence: Synthetic oligonucleotide
ugaaggaacuuuucacuag

SEQ ID NO: 2553106 - RNA, 19 nt, Artificial Sequence
  Description of Artificial Sequence: Synthetic oligonucleotide
ucuuagguuaagccauggg

SEQ ID NO: 2553107 - RNA, 19 nt, Artificial Sequence
  Description of Artificial Sequence: Synthetic oligonucleotide
gacucuaaguaauauaucu

SEQ ID NO: 2553108 - RNA, 19 nt, Artificial Sequence
  Description of Artificial Sequence: Synthetic oligonucleotide
uguucucugucacaagccc

SEQ ID NO: 2553109 - RNA, 19 nt, Artificial Sequence
  Description of Artificial Sequence: Synthetic oligonucleotide
cauuaguaaguucucuuag

SEQ ID NO: 2553110 - RNA, 19 nt, Artificial Sequence
  Description of Artificial Sequence: Synthetic oligonucleotide
uucucaaaggcacuaaguu

SEQ ID NO: 2553111 - RNA, 19 nt, Artificial Sequence
  Description of Artificial Sequence: Synthetic oligonucleotide
ugggaaagguagcuuaugc

SEQ ID NO: 2553112 - RNA, 19 nt, Artificial Sequence
  Description of Artificial Sequence: Synthetic oligonucleotide
agaauagcccugcaaauga

SEQ ID NO: 2553113 - RNA, 19 nt, Artificial Sequence
  Description of Artificial Sequence: Synthetic oligonucleotide
uaucaauggaccuuugaau

SEQ ID NO: 2553114 - RNA, 19 nt, Artificial Sequence
  Description of Artificial Sequence: Synthetic oligonucleotide
guaugaaggaacuuuucac

SEQ ID NO: 2553115 - RNA, 19 nt, Artificial Sequence
  Description of Artificial Sequence: Synthetic oligonucleotide
guauguagugcagaaagag

SEQ ID NO: 2553116 - RNA, 19 nt, Artificial Sequence
  Description of Artificial Sequence: Synthetic oligonucleotide
ucugaucucuuccuaauau

SEQ ID NO: 2553117 - RNA, 19 nt, Artificial Sequence
  Description of Artificial Sequence: Synthetic oligonucleotide
ugauuuaguuuggaaauug

SEQ ID NO: 2553118 - RNA, 19 nt, Artificial Sequence
  Description of Artificial Sequence: Synthetic oligonucleotide
aacuuuucacuagauuauc

SEQ ID NO: 2553119 - RNA, 19 nt, Artificial Sequence
  Description of Artificial Sequence: Synthetic oligonucleotide
aagaauagcccugcaaaug

SEQ ID NO: 2553120 - RNA, 19 nt, Artificial Sequence
  Description of Artificial Sequence: Synthetic oligonucleotide
cucuaaguaauauaucuga

SEQ ID NO: 2553121 - RNA, 19 nt, Artificial Sequence
  Description of Artificial Sequence: Synthetic oligonucleotide
cuaaaguugucucuuacca

SEQ ID NO: 2553122 - RNA, 19 nt, Artificial Sequence
  Description of Artificial Sequence: Synthetic oligonucleotide
aaguucucuuagguuaagc

SEQ ID NO: 2553123 - RNA, 19 nt, Artificial Sequence
  Description of Artificial Sequence: Synthetic oligonucleotide
ucccauugacauuaguaag

SEQ ID NO: 2553124 - RNA, 19 nt, Artificial Sequence
  Description of Artificial Sequence: Synthetic oligonucleotide
gauagacaaaucugaaguc

SEQ ID NO: 2553125 - RNA, 19 nt, Artificial Sequence
  Description of Artificial Sequence: Synthetic oligonucleotide
cucauugaaaccuaaagcu

SEQ ID NO: 2553126 - RNA, 19 nt, Artificial Sequence
  Description of Artificial Sequence: Synthetic oligonucleotide
agccaugggaagaauagcc

SEQ ID NO: 2553127 - RNA, 19 nt, Artificial Sequence
  Description of Artificial Sequence: Synthetic oligonucleotide
cucuuaccaauuaugacuc

SEQ ID NO: 2553128 - RNA, 19 nt, Artificial Sequence
  Description of Artificial Sequence: Synthetic oligonucleotide
agcuaaaguugucucuuac

SEQ ID NO: 2553129 - RNA, 19 nt, Artificial Sequence
  Description of Artificial Sequence: Synthetic oligonucleotide
cuuauauagaaacaauaaa

SEQ ID NO: 2553130 - RNA, 19 nt, Artificial Sequence
  Description of Artificial Sequence: Synthetic oligonucleotide
ucauugaaaccuaaagcua

SEQ ID NO: 2553131 - RNA, 19 nt, Artificial Sequence
  Description of Artificial Sequence: Synthetic oligonucleotide
acuagauuaucuuuaucau

SEQ ID NO: 2553132 - RNA, 19 nt, Artificial Sequence
  Description of Artificial Sequence: Synthetic oligonucleotide
uagguuaagccaugggaag

SEQ ID NO: 2553133 - RNA, 19 nt, Artificial Sequence
  Description of Artificial Sequence: Synthetic oligonucleotide
aucuuuaucaugucuuagu

SEQ ID NO: 2553134 - RNA, 19 nt, Artificial Sequence
  Description of Artificial Sequence: Synthetic oligonucleotide
uaauauuugcugccuuuca

SEQ ID NO: 2553135 - RNA, 19 nt, Artificial Sequence
  Description of Artificial Sequence: Synthetic oligonucleotide
aaaucugaagucauaguau

SEQ ID NO: 2553136 - RNA, 19 nt, Artificial Sequence
  Description of Artificial Sequence: Synthetic oligonucleotide
cuuagguuaagccauggga

SEQ ID NO: 2553137 - RNA, 19 nt, Artificial Sequence
  Description of Artificial Sequence: Synthetic oligonucleotide
uugacuuaauuauagucuu

SEQ ID NO: 2553138 - RNA, 19 nt, Artificial Sequence
  Description of Artificial Sequence: Synthetic oligonucleotide
cugcaaaugagcuggacuc

SEQ ID NO: 2553139 - RNA, 19 nt, Artificial Sequence
  Description of Artificial Sequence: Synthetic oligonucleotide
aucugaaugccaucuucac

SEQ ID NO: 2553140 - RNA, 19 nt, Artificial Sequence
  Description of Artificial Sequence: Synthetic oligonucleotide
ucugaaugccaucuucaca

SEQ ID NO: 2553141 - RNA, 19 nt, Artificial Sequence
  Description of Artificial Sequence: Synthetic oligonucleotide
ugaucucuuccuaauauuu

SEQ ID NO: 2553142 - RNA, 19 nt, Artificial Sequence
  Description of Artificial Sequence: Synthetic oligonucleotide
uuaguagcuaaaguugucu

SEQ ID NO: 2553143 - RNA, 19 nt, Artificial Sequence
  Description of Artificial Sequence: Synthetic oligonucleotide
aagccaugggaagaauagc

SEQ ID NO: 2553144 - RNA, 19 nt, Artificial Sequence
  Description of Artificial Sequence: Synthetic oligonucleotide
auagacaaaucugaaguca

SEQ ID NO: 2553145 - RNA, 19 nt, Artificial Sequence
  Description of Artificial Sequence: Synthetic oligonucleotide
uuguucucugucacaagcc

SEQ ID NO: 2553146 - RNA, 19 nt, Artificial Sequence
  Description of Artificial Sequence: Synthetic oligonucleotide
uuggaguaaggaauuugug

SEQ ID NO: 2553147 - RNA, 19 nt, Artificial Sequence
  Description of Artificial Sequence: Synthetic oligonucleotide
ggaacuuuucacuagauua

SEQ ID NO: 2553148 - RNA, 19 nt, Artificial Sequence
  Description of Artificial Sequence: Synthetic oligonucleotide
auauaucugaaugccaucu

SEQ ID NO: 2553149 - RNA, 19 nt, Artificial Sequence
  Description of Artificial Sequence: Synthetic oligonucleotide
gucuuaguagcuaaaguug

SEQ ID NO: 2553150 - RNA, 19 nt, Artificial Sequence
  Description of Artificial Sequence: Synthetic oligonucleotide
aaucucugucaacacagaa

SEQ ID NO: 2553151 - RNA, 19 nt, Artificial Sequence
  Description of Artificial Sequence: Synthetic oligonucleotide
cuuugaauguuuaacuuaa

SEQ ID NO: 2553152 - RNA, 19 nt, Artificial Sequence
  Description of Artificial Sequence: Synthetic oligonucleotide
uuaucaugucuuaguagcu

SEQ ID NO: 2553153 - RNA, 19 nt, Artificial Sequence
  Description of Artificial Sequence: Synthetic oligonucleotide
ucacagguccaacauaauc

SEQ ID NO: 2553154 - RNA, 19 nt, Artificial Sequence
  Description of Artificial Sequence: Synthetic oligonucleotide
gguucuauagcuugaugag

SEQ ID NO: 2553155 - RNA, 19 nt, Artificial Sequence
  Description of Artificial Sequence: Synthetic oligonucleotide
agcaacaaaaggcgucaac

SEQ ID NO: 2553156 - RNA, 19 nt, Artificial Sequence
  Description of Artificial Sequence: Synthetic oligonucleotide
gagauucaaacucuuuaca

SEQ ID NO: 2553157 - RNA, 19 nt, Artificial Sequence
  Description of Artificial Sequence: Synthetic oligonucleotide
uagacaaaucugaagucau

SEQ ID NO: 2553158 - RNA, 19 nt, Artificial Sequence
  Description of Artificial Sequence: Synthetic oligonucleotide
agcccugcaaaugagcugg

SEQ ID NO: 2553159 - RNA, 19 nt, Artificial Sequence
  Description of Artificial Sequence: Synthetic oligonucleotide
ugccuuucaaaaugauucc

SEQ ID NO: 2553160 - RNA, 19 nt, Artificial Sequence
  Description of Artificial Sequence: Synthetic oligonucleotide
agauuaucuuuaucauguc

SEQ ID NO: 2553161 - RNA, 19 nt, Artificial Sequence
  Description of Artificial Sequence: Synthetic oligonucleotide
cuuaugcuuuucuaaaaca

SEQ ID NO: 2553162 - RNA, 19 nt, Artificial Sequence
  Description of Artificial Sequence: Synthetic oligonucleotide
cagaaauauguuucuauca

SEQ ID NO: 2553163 - RNA, 19 nt, Artificial Sequence
  Description of Artificial Sequence: Synthetic oligonucleotide
guucucuuagguuaagcca

SEQ ID NO: 2553164 - RNA, 19 nt, Artificial Sequence
  Description of Artificial Sequence: Synthetic oligonucleotide
auuaucuuuaucaugucuu

SEQ ID NO: 2553165 - RNA, 19 nt, Artificial Sequence
  Description of Artificial Sequence: Synthetic oligonucleotide
gaaggaacuuuucacuaga

SEQ ID NO: 2553166 - RNA, 19 nt, Artificial Sequence
  Description of Artificial Sequence: Synthetic oligonucleotide
guuucuaucaaaaguaugu

SEQ ID NO: 2553167 - RNA, 19 nt, Artificial Sequence
  Description of Artificial Sequence: Synthetic oligonucleotide
aaacucuuuacaggaucuc

SEQ ID NO: 2553168 - RNA, 19 nt, Artificial Sequence
  Description of Artificial Sequence: Synthetic oligonucleotide
caaaucugaagucauagua

SEQ ID NO: 2553169 - RNA, 19 nt, Artificial Sequence
  Description of Artificial Sequence: Synthetic oligonucleotide
guucuauagcuugaugagg

SEQ ID NO: 2553170 - RNA, 19 nt, Artificial Sequence
  Description of Artificial Sequence: Synthetic oligonucleotide
cauugaaaccuaaagcuaa

SEQ ID NO: 2553171 - RNA, 19 nt, Artificial Sequence
  Description of Artificial Sequence: Synthetic oligonucleotide
gucacaagcccuaucaaug

SEQ ID NO: 2553172 - RNA, 19 nt, Artificial Sequence
  Description of Artificial Sequence: Synthetic oligonucleotide
aggcacuaaguucugcauc

SEQ ID NO: 2553173 - RNA, 19 nt, Artificial Sequence
  Description of Artificial Sequence: Synthetic oligonucleotide
uuaagccaugggaagaaua

SEQ ID NO: 2553174 - RNA, 19 nt, Artificial Sequence
  Description of Artificial Sequence: Synthetic oligonucleotide
auugaaaccuaaagcuaac

SEQ ID NO: 2553175 - RNA, 19 nt, Artificial Sequence
  Description of Artificial Sequence: Synthetic oligonucleotide
cacaaccagcaacaaaagg

SEQ ID NO: 2553176 - RNA, 19 nt, Artificial Sequence
  Description of Artificial Sequence: Synthetic oligonucleotide
augucuuaguagcuaaagu

SEQ ID NO: 2553177 - RNA, 19 nt, Artificial Sequence
  Description of Artificial Sequence: Synthetic oligonucleotide
caagcccuaucaauggacc

SEQ ID NO: 2553178 - RNA, 19 nt, Artificial Sequence
  Description of Artificial Sequence: Synthetic oligonucleotide
uaauuauagucuucucaaa

SEQ ID NO: 2553179 - RNA, 19 nt, Artificial Sequence
  Description of Artificial Sequence: Synthetic oligonucleotide
uaaaguugucucuuaccaa

SEQ ID NO: 2553180 - RNA, 19 nt, Artificial Sequence
  Description of Artificial Sequence: Synthetic oligonucleotide
uagcuuaugcuuuucuaaa

SEQ ID NO: 2553181 - RNA, 19 nt, Artificial Sequence
  Description of Artificial Sequence: Synthetic oligonucleotide
accaauuaugacucauuga

SEQ ID NO: 2553182 - RNA, 19 nt, Artificial Sequence
  Description of Artificial Sequence: Synthetic oligonucleotide
auacuuuggaguaaggaau

SEQ ID NO: 2553183 - RNA, 19 nt, Artificial Sequence
  Description of Artificial Sequence: Synthetic oligonucleotide
ugauuccugcagcccaugg

SEQ ID NO: 2553184 - RNA, 19 nt, Artificial Sequence
  Description of Artificial Sequence: Synthetic oligonucleotide
acauuaguaaguucucuua

SEQ ID NO: 2553185 - RNA, 19 nt, Artificial Sequence
  Description of Artificial Sequence: Synthetic oligonucleotide
cuaaguucugcaucugauc

SEQ ID NO: 2553186 - RNA, 19 nt, Artificial Sequence
  Description of Artificial Sequence: Synthetic oligonucleotide
acucuuuacaggaucucgg

SEQ ID NO: 2553187 - RNA, 19 nt, Artificial Sequence
  Description of Artificial Sequence: Synthetic oligonucleotide
guagcuuaugcuuuucuaa

SEQ ID NO: 2553188 - RNA, 19 nt, Artificial Sequence
  Description of Artificial Sequence: Synthetic oligonucleotide
augaggcugucucuucuac

SEQ ID NO: 2553189 - RNA, 19 nt, Artificial Sequence
  Description of Artificial Sequence: Synthetic oligonucleotide
acuuaaaacuaaagcucac

SEQ ID NO: 2553190 - RNA, 19 nt, Artificial Sequence
  Description of Artificial Sequence: Synthetic oligonucleotide
caugucuuaguagcuaaag

SEQ ID NO: 2553191 - RNA, 19 nt, Artificial Sequence
  Description of Artificial Sequence: Synthetic oligonucleotide
ugaaugccaucuucacagg

SEQ ID NO: 2553192 - RNA, 19 nt, Artificial Sequence
  Description of Artificial Sequence: Synthetic oligonucleotide
ugucacaagcccuaucaau

SEQ ID NO: 2553193 - RNA, 19 nt, Artificial Sequence
  Description of Artificial Sequence: Synthetic oligonucleotide
gaucucuuccuaauauuug

SEQ ID NO: 2553194 - RNA, 19 nt, Artificial Sequence
  Description of Artificial Sequence: Synthetic oligonucleotide
cucuuccuaauauuugcug

SEQ ID NO: 2553195 - RNA, 19 nt, Artificial Sequence
  Description of Artificial Sequence: Synthetic oligonucleotide
aaagguagcuuaugcuuuu

SEQ ID NO: 2553196 - RNA, 19 nt, Artificial Sequence
  Description of Artificial Sequence: Synthetic oligonucleotide
uagaaacaauaaaauuuua

SEQ ID NO: 2553197 - RNA, 19 nt, Artificial Sequence
  Description of Artificial Sequence: Synthetic oligonucleotide
cuuuacaggaucucggaaa

SEQ ID NO: 2553198 - RNA, 19 nt, Artificial Sequence
  Description of Artificial Sequence: Synthetic oligonucleotide
acaagcccuaucaauggac

SEQ ID NO: 2553199 - RNA, 19 nt, Artificial Sequence
  Description of Artificial Sequence: Synthetic oligonucleotide
aaggcacuaaguucugcau

SEQ ID NO: 2553200 - RNA, 19 nt, Artificial Sequence
  Description of Artificial Sequence: Synthetic oligonucleotide
cuucacagguccaacauaa

SEQ ID NO: 2553201 - RNA, 19 nt, Artificial Sequence
  Description of Artificial Sequence: Synthetic oligonucleotide
cuaucaauggaccuuugaa

SEQ ID NO: 2553202 - RNA, 19 nt, Artificial Sequence
  Description of Artificial Sequence: Synthetic oligonucleotide
acucuaaguaauauaucug

SEQ ID NO: 2553203 - RNA, 19 nt, Artificial Sequence
  Description of Artificial Sequence: Synthetic oligonucleotide
aagucauaguaugaaggaa

SEQ ID NO: 2553204 - RNA, 19 nt, Artificial Sequence
  Description of Artificial Sequence: Synthetic oligonucleotide
uucuuguucucugucacaa

SEQ ID NO: 2553205 - RNA, 19 nt, Artificial Sequence
  Description of Artificial Sequence: Synthetic oligonucleotide
caugggaagaauagcccug

SEQ ID NO: 2553206 - RNA, 19 nt, Artificial Sequence
  Description of Artificial Sequence: Synthetic oligonucleotide
uuucuaucaaaaguaugua

SEQ ID NO: 2553207 - RNA, 19 nt, Artificial Sequence
  Description of Artificial Sequence: Synthetic oligonucleotide
aaccccucuuaauuugacu

SEQ ID NO: 2553208 - RNA, 19 nt, Artificial Sequence
  Description of Artificial Sequence: Synthetic oligonucleotide
cagugauuuaguuuggaaa

SEQ ID NO: 2553209 - RNA, 19 nt, Artificial Sequence
  Description of Artificial Sequence: Synthetic oligonucleotide
aaaccccucuuaauuugac

SEQ ID NO: 2553210 - RNA, 19 nt, Artificial Sequence
  Description of Artificial Sequence: Synthetic oligonucleotide
uaguagcuaaaguugucuc

SEQ ID NO: 2553211 - RNA, 19 nt, Artificial Sequence
  Description of Artificial Sequence: Synthetic oligonucleotide
cugucaacacagaaauaug

SEQ ID NO: 2553212 - RNA, 19 nt, Artificial Sequence
  Description of Artificial Sequence: Synthetic oligonucleotide
uaguaugaaggaacuuuuc

SEQ ID NO: 2553213 - RNA, 19 nt, Artificial Sequence
  Description of Artificial Sequence: Synthetic oligonucleotide
ggaagaauagcccugcaaa

SEQ ID NO: 2553214 - RNA, 19 nt, Artificial Sequence
  Description of Artificial Sequence: Synthetic oligonucleotide
cuuaguagcuaaaguuguc

SEQ ID NO: 2553215 - RNA, 19 nt, Artificial Sequence
  Description of Artificial Sequence: Synthetic oligonucleotide
uacuuuggaguaaggaauu

SEQ ID NO: 2553216 - RNA, 19 nt, Artificial Sequence
  Description of Artificial Sequence: Synthetic oligonucleotide
uuaccaauuaugacucauu

SEQ ID NO: 2553217 - RNA, 19 nt, Artificial Sequence
  Description of Artificial Sequence: Synthetic oligonucleotide
uugguucuauagcuugaug

SEQ ID NO: 2553218 - RNA, 19 nt, Artificial Sequence
  Description of Artificial Sequence: Synthetic oligonucleotide
uuugaauguuuaacuuaaa

SEQ ID NO: 2553219 - RNA, 19 nt, Artificial Sequence
  Description of Artificial Sequence: Synthetic oligonucleotide
ggaaauugguucuauagcu

SEQ ID NO: 2553220 - RNA, 19 nt, Artificial Sequence
  Description of Artificial Sequence: Synthetic oligonucleotide
ugacuuaauuauagucuuc

SEQ ID NO: 2553221 - RNA, 19 nt, Artificial Sequence
  Description of Artificial Sequence: Synthetic oligonucleotide
aucaugucuuaguagcuaa

SEQ ID NO: 2553222 - RNA, 19 nt, Artificial Sequence
  Description of Artificial Sequence: Synthetic oligonucleotide
aagcccuaucaauggaccu

SEQ ID NO: 2553223 - RNA, 19 nt, Artificial Sequence
  Description of Artificial Sequence: Synthetic oligonucleotide
uaaucucugucaacacaga

SEQ ID NO: 2553224 - RNA, 19 nt, Artificial Sequence
  Description of Artificial Sequence: Synthetic oligonucleotide
acaaaaggcgucaacaguu

SEQ ID NO: 2553225 - RNA, 19 nt, Artificial Sequence
  Description of Artificial Sequence: Synthetic oligonucleotide
accuuugaauguuuaacuu

SEQ ID NO: 2553226 - RNA, 19 nt, Artificial Sequence
  Description of Artificial Sequence: Synthetic oligonucleotide
uugaaaccuaaagcuaaca

SEQ ID NO: 2553227 - RNA, 19 nt, Artificial Sequence
  Description of Artificial Sequence: Synthetic oligonucleotide
aaaguauguagugcagaaa

SEQ ID NO: 2553228 - RNA, 19 nt, Artificial Sequence
  Description of Artificial Sequence: Synthetic oligonucleotide
aauugguucuauagcuuga

SEQ ID NO: 2553229 - RNA, 19 nt, Artificial Sequence
  Description of Artificial Sequence: Synthetic oligonucleotide
acagugauuuaguuuggaa

SEQ ID NO: 2553230 - RNA, 19 nt, Artificial Sequence
  Description of Artificial Sequence: Synthetic oligonucleotide
accccucuuaauuugacuu

SEQ ID NO: 2553231 - RNA, 19 nt, Artificial Sequence
  Description of Artificial Sequence: Synthetic oligonucleotide
ucuauagcuugaugaggcu

SEQ ID NO: 2553232 - RNA, 19 nt, Artificial Sequence
  Description of Artificial Sequence: Synthetic oligonucleotide
uuuggaaauugguucuaua

SEQ ID NO: 2553233 - RNA, 19 nt, Artificial Sequence
  Description of Artificial Sequence: Synthetic oligonucleotide
cuaauauuugcugccuuuc

SEQ ID NO: 2553234 - RNA, 19 nt, Artificial Sequence
  Description of Artificial Sequence: Synthetic oligonucleotide
ucucuuagguuaagccaug

SEQ ID NO: 2553235 - RNA, 19 nt, Artificial Sequence
  Description of Artificial Sequence: Synthetic oligonucleotide
ggaguaaggaauuugugua

SEQ ID NO: 2553236 - RNA, 19 nt, Artificial Sequence
  Description of Artificial Sequence: Synthetic oligonucleotide
cuuuggaguaaggaauuug

SEQ ID NO: 2553237 - RNA, 19 nt, Artificial Sequence
  Description of Artificial Sequence: Synthetic oligonucleotide
uucaaacucuuuacaggau

SEQ ID NO: 2553238 - RNA, 19 nt, Artificial Sequence
  Description of Artificial Sequence: Synthetic oligonucleotide
gaguaaggaauuuguguaa

SEQ ID NO: 2553239 - RNA, 19 nt, Artificial Sequence
  Description of Artificial Sequence: Synthetic oligonucleotide
cacagguccaacauaaucu

SEQ ID NO: 2553240 - RNA, 19 nt, Artificial Sequence
  Description of Artificial Sequence: Synthetic oligonucleotide
accagcaacaaaaggcguc

SEQ ID NO: 2553241 - RNA, 19 nt, Artificial Sequence
  Description of Artificial Sequence: Synthetic oligonucleotide
gacuuaauuauagucuucu

SEQ ID NO: 2553242 - RNA, 19 nt, Artificial Sequence
  Description of Artificial Sequence: Synthetic oligonucleotide
aaaaccccucuuaauuuga

SEQ ID NO: 2553243 - RNA, 19 nt, Artificial Sequence
  Description of Artificial Sequence: Synthetic oligonucleotide
gcuaaaguugucucuuacc

SEQ ID NO: 2553244 - RNA, 19 nt, Artificial Sequence
  Description of Artificial Sequence: Synthetic oligonucleotide
aacagugauuuaguuugga

SEQ ID NO: 2553245 - RNA, 19 nt, Artificial Sequence
  Description of Artificial Sequence: Synthetic oligonucleotide
ugacucauugaaaccuaaa

SEQ ID NO: 2553246 - RNA, 19 nt, Artificial Sequence
  Description of Artificial Sequence: Synthetic oligonucleotide
auuugcugccuuucaaaau

SEQ ID NO: 2553247 - RNA, 19 nt, Artificial Sequence
  Description of Artificial Sequence: Synthetic oligonucleotide
uuuguguaaucuguuguuu

SEQ ID NO: 2553248 - RNA, 19 nt, Artificial Sequence
  Description of Artificial Sequence: Synthetic oligonucleotide
uugcugccuuucaaaauga

SEQ ID NO: 2553249 - RNA, 19 nt, Artificial Sequence
  Description of Artificial Sequence: Synthetic oligonucleotide
ucuucacagguccaacaua

SEQ ID NO: 2553250 - RNA, 19 nt, Artificial Sequence
  Description of Artificial Sequence: Synthetic oligonucleotide
gcuuaugcuuuucuaaaac

SEQ ID NO: 2553251 - RNA, 19 nt, Artificial Sequence
  Description of Artificial Sequence: Synthetic oligonucleotide
gaucucggaaacagcacug

SEQ ID NO: 2553252 - RNA, 19 nt, Artificial Sequence
  Description of Artificial Sequence: Synthetic oligonucleotide
guaauauaucugaaugcca

SEQ ID NO: 2553253 - RNA, 19 nt, Artificial Sequence
  Description of Artificial Sequence: Synthetic oligonucleotide
gaauagcccugcaaaugag

SEQ ID NO: 2553254 - RNA, 19 nt, Artificial Sequence
  Description of Artificial Sequence: Synthetic oligonucleotide
agcuuaugcuuuucuaaaa

SEQ ID NO: 2553255 - RNA, 19 nt, Artificial Sequence
  Description of Artificial Sequence: Synthetic oligonucleotide
agguccaacauaaucucug

SEQ ID NO: 2553256 - RNA, 19 nt, Artificial Sequence
  Description of Artificial Sequence: Synthetic oligonucleotide
aagguagcuuaugcuuuuc

SEQ ID NO: 2553257 - RNA, 19 nt, Artificial Sequence
  Description of Artificial Sequence: Synthetic oligonucleotide
guaaggaauuuguguaauc

SEQ ID NO: 2553258 - RNA, 19 nt, Artificial Sequence
  Description of Artificial Sequence: Synthetic oligonucleotide
caacauaaucucugucaac

SEQ ID NO: 2553259 - RNA, 19 nt, Artificial Sequence
  Description of Artificial Sequence: Synthetic oligonucleotide
acaggaucucggaaacagc

SEQ ID NO: 2553260 - RNA, 19 nt, Artificial Sequence
  Description of Artificial Sequence: Synthetic oligonucleotide
aguaaggaauuuguguaau

SEQ ID NO: 2553261 - RNA, 19 nt, Artificial Sequence
  Description of Artificial Sequence: Synthetic oligonucleotide
gaaacagcacugucuccac

SEQ ID NO: 2553262 - RNA, 19 nt, Artificial Sequence
  Description of Artificial Sequence: Synthetic oligonucleotide
ucaugucuuaguagcuaaa

SEQ ID NO: 2553263 - RNA, 19 nt, Artificial Sequence
  Description of Artificial Sequence: Synthetic oligonucleotide
acuuuucacuagauuaucu

SEQ ID NO: 2553264 - RNA, 19 nt, Artificial Sequence
  Description of Artificial Sequence: Synthetic oligonucleotide
cuaaguaauauaucugaau

SEQ ID NO: 2553265 - RNA, 19 nt, Artificial Sequence
  Description of Artificial Sequence: Synthetic oligonucleotide
auagcccugcaaaugagcu

SEQ ID NO: 2553266 - RNA, 19 nt, Artificial Sequence
  Description of Artificial Sequence: Synthetic oligonucleotide
uaucaugucuuaguagcua

SEQ ID NO: 2553267 - RNA, 19 nt, Artificial Sequence
  Description of Artificial Sequence: Synthetic oligonucleotide
uuacaagaauauucuucua

SEQ ID NO: 2553268 - RNA, 19 nt, Artificial Sequence
  Description of Artificial Sequence: Synthetic oligonucleotide
uggaccuuugaauguuuaa

SEQ ID NO: 2553269 - RNA, 19 nt, Artificial Sequence
  Description of Artificial Sequence: Synthetic oligonucleotide
ccuuucaaaaugauuccug

SEQ ID NO: 2553270 - RNA, 19 nt, Artificial Sequence
  Description of Artificial Sequence: Synthetic oligonucleotide
ucucggaaacagcacuguc

SEQ ID NO: 2553271 - RNA, 19 nt, Artificial Sequence
  Description of Artificial Sequence: Synthetic oligonucleotide
uaccacaaccagcaacaaa

SEQ ID NO: 2553272 - RNA, 19 nt, Artificial Sequence
  Description of Artificial Sequence: Synthetic oligonucleotide
gcaacaaaaggcgucaaca

SEQ ID NO: 2553273 - RNA, 19 nt, Artificial Sequence
  Description of Artificial Sequence: Synthetic oligonucleotide
gaagaauagcccugcaaau

SEQ ID NO: 2553274 - RNA, 19 nt, Artificial Sequence
  Description of Artificial Sequence: Synthetic oligonucleotide
uuccuaauauuugcugccu

SEQ ID NO: 2553275 - RNA, 19 nt, Artificial Sequence
  Description of Artificial Sequence: Synthetic oligonucleotide
aguauguagugcagaaaga

SEQ ID NO: 2553276 - RNA, 19 nt, Artificial Sequence
  Description of Artificial Sequence: Synthetic oligonucleotide
acuaaguucugcaucugau

SEQ ID NO: 2553277 - RNA, 19 nt, Artificial Sequence
  Description of Artificial Sequence: Synthetic oligonucleotide
caauuaugacucauugaaa

SEQ ID NO: 2553278 - RNA, 19 nt, Artificial Sequence
  Description of Artificial Sequence: Synthetic oligonucleotide
ugcaucugaucucuuccua

SEQ ID NO: 2553279 - RNA, 19 nt, Artificial Sequence
  Description of Artificial Sequence: Synthetic oligonucleotide
ucuuaccaauuaugacuca

SEQ ID NO: 2553280 - RNA, 19 nt, Artificial Sequence
  Description of Artificial Sequence: Synthetic oligonucleotide
caaaaguauguagugcaga

SEQ ID NO: 2553281 - RNA, 19 nt, Artificial Sequence
  Description of Artificial Sequence: Synthetic oligonucleotide
agguagcuuaugcuuuucu

SEQ ID NO: 2553282 - RNA, 19 nt, Artificial Sequence
  Description of Artificial Sequence: Synthetic oligonucleotide
ugcaaaugagcuggacucu

SEQ ID NO: 2553283 - RNA, 19 nt, Artificial Sequence
  Description of Artificial Sequence: Synthetic oligonucleotide
uaaguucucuuagguuaag

SEQ ID NO: 2553284 - RNA, 19 nt, Artificial Sequence
  Description of Artificial Sequence: Synthetic oligonucleotide
cucuuuacaggaucucgga

SEQ ID NO: 2553285 - RNA, 19 nt, Artificial Sequence
  Description of Artificial Sequence: Synthetic oligonucleotide
cucuuagguuaagccaugg

SEQ ID NO: 2553286 - RNA, 19 nt, Artificial Sequence
  Description of Artificial Sequence: Synthetic oligonucleotide
caaacucuuuacaggaucu

SEQ ID NO: 2553287 - RNA, 19 nt, Artificial Sequence
  Description of Artificial Sequence: Synthetic oligonucleotide
cuguuguuucuuauauaga

SEQ ID NO: 2553288 - RNA, 19 nt, Artificial Sequence
  Description of Artificial Sequence: Synthetic oligonucleotide
agguuaagccaugggaaga

SEQ ID NO: 2553289 - RNA, 19 nt, Artificial Sequence
  Description of Artificial Sequence: Synthetic oligonucleotide
cauaguaugaaggaacuuu

SEQ ID NO: 2553290 - RNA, 19 nt, Artificial Sequence
  Description of Artificial Sequence: Synthetic oligonucleotide
auugguucuauagcuugau

SEQ ID NO: 2553291 - RNA, 19 nt, Artificial Sequence
  Description of Artificial Sequence: Synthetic oligonucleotide
aaggaacuuuucacuagau

SEQ ID NO: 2553292 - RNA, 19 nt, Artificial Sequence
  Description of Artificial Sequence: Synthetic oligonucleotide
cacgauagacaaaucugaa

SEQ ID NO: 2553293 - RNA, 19 nt, Artificial Sequence
  Description of Artificial Sequence: Synthetic oligonucleotide
agcccaugggaaagguagc

SEQ ID NO: 2553294 - RNA, 19 nt, Artificial Sequence
  Description of Artificial Sequence: Synthetic oligonucleotide
auagcuugaugaggcuguc

SEQ ID NO: 2553295 - RNA, 19 nt, Artificial Sequence
  Description of Artificial Sequence: Synthetic oligonucleotide
cuuaaaacuaaagcucacu

SEQ ID NO: 2553296 - RNA, 19 nt, Artificial Sequence
  Description of Artificial Sequence: Synthetic oligonucleotide
gcagaaagagauucaaacu

SEQ ID NO: 2553297 - RNA, 19 nt, Artificial Sequence
  Description of Artificial Sequence: Synthetic oligonucleotide
cacagaaauauguuucuau

SEQ ID NO: 2553298 - RNA, 19 nt, Artificial Sequence
  Description of Artificial Sequence: Synthetic oligonucleotide
ucauaguaugaaggaacuu

SEQ ID NO: 2553299 - RNA, 19 nt, Artificial Sequence
  Description of Artificial Sequence: Synthetic oligonucleotide
uucacagguccaacauaau

SEQ ID NO: 2553300 - RNA, 19 nt, Artificial Sequence
  Description of Artificial Sequence: Synthetic oligonucleotide
cucggaaacagcacugucu

SEQ ID NO: 2553301 - RNA, 19 nt, Artificial Sequence
  Description of Artificial Sequence: Synthetic oligonucleotide
caaaggcacuaaguucugc

SEQ ID NO: 2553302 - RNA, 19 nt, Artificial Sequence
  Description of Artificial Sequence: Synthetic oligonucleotide
cuccacgauagacaaaucu

SEQ ID NO: 2553303 - RNA, 19 nt, Artificial Sequence
  Description of Artificial Sequence: Synthetic oligonucleotide
cuuuucacuagauuaucuu

SEQ ID NO: 2553304 - RNA, 19 nt, Artificial Sequence
  Description of Artificial Sequence: Synthetic oligonucleotide
augggaaagguagcuuaug

SEQ ID NO: 2553305 - RNA, 19 nt, Artificial Sequence
  Description of Artificial Sequence: Synthetic oligonucleotide
guccaacauaaucucuguc

SEQ ID NO: 2553306 - RNA, 19 nt, Artificial Sequence
  Description of Artificial Sequence: Synthetic oligonucleotide
guaaguucucuuagguuaa

SEQ ID NO: 2553307 - RNA, 19 nt, Artificial Sequence
  Description of Artificial Sequence: Synthetic oligonucleotide
aauggaccuuugaauguuu

SEQ ID NO: 2553308 - RNA, 19 nt, Artificial Sequence
  Description of Artificial Sequence: Synthetic oligonucleotide
cacuaaguucugcaucuga

SEQ ID NO: 2553309 - RNA, 19 nt, Artificial Sequence
  Description of Artificial Sequence: Synthetic oligonucleotide
cuggacucuaaguaauaua

SEQ ID NO: 2553310 - RNA, 19 nt, Artificial Sequence
  Description of Artificial Sequence: Synthetic oligonucleotide
ugcugccuuucaaaaugau

SEQ ID NO: 2553311 - RNA, 19 nt, Artificial Sequence
  Description of Artificial Sequence: Synthetic oligonucleotide
ccacgauagacaaaucuga

SEQ ID NO: 2553312 - RNA, 19 nt, Artificial Sequence
  Description of Artificial Sequence: Synthetic oligonucleotide
uagcuaaaguugucucuua

SEQ ID NO: 2553313 - RNA, 19 nt, Artificial Sequence
  Description of Artificial Sequence: Synthetic oligonucleotide
gucauaguaugaaggaacu

SEQ ID NO: 2553314 - RNA, 19 nt, Artificial Sequence
  Description of Artificial Sequence: Synthetic oligonucleotide
gucuccacgauagacaaau

SEQ ID NO: 2553315 - RNA, 19 nt, Artificial Sequence
  Description of Artificial Sequence: Synthetic oligonucleotide
ggcacuaaguucugcaucu

SEQ ID NO: 2553316 - RNA, 19 nt, Artificial Sequence
  Description of Artificial Sequence: Synthetic oligonucleotide
ggcgucaacaguuucuugu

SEQ ID NO: 2553317 - RNA, 19 nt, Artificial Sequence
  Description of Artificial Sequence: Synthetic oligonucleotide
aucucggaaacagcacugu

SEQ ID NO: 2553318 - RNA, 19 nt, Artificial Sequence
  Description of Artificial Sequence: Synthetic oligonucleotide
ucuccacgauagacaaauc

SEQ ID NO: 2553319 - RNA, 19 nt, Artificial Sequence
  Description of Artificial Sequence: Synthetic oligonucleotide
gguagcuuaugcuuuucua

SEQ ID NO: 2553320 - RNA, 19 nt, Artificial Sequence
  Description of Artificial Sequence: Synthetic oligonucleotide
cucuuaauuugacuuaauu

SEQ ID NO: 2553321 - RNA, 19 nt, Artificial Sequence
  Description of Artificial Sequence: Synthetic oligonucleotide
gaaauugguucuauagcuu

SEQ ID NO: 2553322 - RNA, 19 nt, Artificial Sequence
  Description of Artificial Sequence: Synthetic oligonucleotide
guugucucuuaccaauuau

SEQ ID NO: 2553323 - RNA, 19 nt, Artificial Sequence
  Description of Artificial Sequence: Synthetic oligonucleotide
agucuucucaaaggcacua

SEQ ID NO: 2553324 - RNA, 19 nt, Artificial Sequence
  Description of Artificial Sequence: Synthetic oligonucleotide
ugucuccacgauagacaaa

SEQ ID NO: 2553325 - RNA, 19 nt, Artificial Sequence
  Description of Artificial Sequence: Synthetic oligonucleotide
ccuuugaauguuuaacuua

SEQ ID NO: 2553326 - RNA, 19 nt, Artificial Sequence
  Description of Artificial Sequence: Synthetic oligonucleotide
gccaugggaagaauagccc

SEQ ID NO: 2553327 - RNA, 19 nt, Artificial Sequence
  Description of Artificial Sequence: Synthetic oligonucleotide
gaaagagauucaaacucuu

SEQ ID NO: 2553328 - RNA, 19 nt, Artificial Sequence
  Description of Artificial Sequence: Synthetic oligonucleotide
caaaugagcuggacucuaa

SEQ ID NO: 2553329 - RNA, 19 nt, Artificial Sequence
  Description of Artificial Sequence: Synthetic oligonucleotide
cacaagcccuaucaaugga

SEQ ID NO: 2553330 - RNA, 19 nt, Artificial Sequence
  Description of Artificial Sequence: Synthetic oligonucleotide
aguuuggaaauugguucua

SEQ ID NO: 2553331 - RNA, 19 nt, Artificial Sequence
  Description of Artificial Sequence: Synthetic oligonucleotide
aggcgucaacaguuucuug

SEQ ID NO: 2553332 - RNA, 19 nt, Artificial Sequence
  Description of Artificial Sequence: Synthetic oligonucleotide
ggaucucggaaacagcacu

SEQ ID NO: 2553333 - RNA, 19 nt, Artificial Sequence
  Description of Artificial Sequence: Synthetic oligonucleotide
guagcuaaaguugucucuu

SEQ ID NO: 2553334 - RNA, 19 nt, Artificial Sequence
  Description of Artificial Sequence: Synthetic oligonucleotide
augacucauugaaaccuaa

SEQ ID NO: 2553335 - RNA, 19 nt, Artificial Sequence
  Description of Artificial Sequence: Synthetic oligonucleotide
ugcagcccaugggaaaggu

SEQ ID NO: 2553336 - RNA, 19 nt, Artificial Sequence
  Description of Artificial Sequence: Synthetic oligonucleotide
agcccuaucaauggaccuu

SEQ ID NO: 2553337 - RNA, 19 nt, Artificial Sequence
  Description of Artificial Sequence: Synthetic oligonucleotide
gggaagaauagcccugcaa

SEQ ID NO: 2553338 - RNA, 19 nt, Artificial Sequence
  Description of Artificial Sequence: Synthetic oligonucleotide
ggcugucucuucuaccaca

SEQ ID NO: 2553339 - RNA, 19 nt, Artificial Sequence
  Description of Artificial Sequence: Synthetic oligonucleotide
gcuaacaaauuuaaauaau

SEQ ID NO: 2553340 - RNA, 19 nt, Artificial Sequence
  Description of Artificial Sequence: Synthetic oligonucleotide
agacaaaucugaagucaua

SEQ ID NO: 2553341 - RNA, 19 nt, Artificial Sequence
  Description of Artificial Sequence: Synthetic oligonucleotide
ggacucuaaguaauauauc

SEQ ID NO: 2553342 - RNA, 19 nt, Artificial Sequence
  Description of Artificial Sequence: Synthetic oligonucleotide
cuuaccaauuaugacucau

SEQ ID NO: 2553343 - RNA, 19 nt, Artificial Sequence
  Description of Artificial Sequence: Synthetic oligonucleotide
gucaacacagaaauauguu

SEQ ID NO: 2553344 - RNA, 19 nt, Artificial Sequence
  Description of Artificial Sequence: Synthetic oligonucleotide
gcaucugaucucuuccuaa

SEQ ID NO: 2553345 - RNA, 19 nt, Artificial Sequence
  Description of Artificial Sequence: Synthetic oligonucleotide
cugucucuucuaccacaac

SEQ ID NO: 2553346 - RNA, 19 nt, Artificial Sequence
  Description of Artificial Sequence: Synthetic oligonucleotide
gguuaagccaugggaagaa

SEQ ID NO: 2553347 - RNA, 19 nt, Artificial Sequence
  Description of Artificial Sequence: Synthetic oligonucleotide
augauuccugcagcccaug

SEQ ID NO: 2553348 - RNA, 19 nt, Artificial Sequence
  Description of Artificial Sequence: Synthetic oligonucleotide
cugcagcccaugggaaagg

SEQ ID NO: 2553349 - RNA, 19 nt, Artificial Sequence
  Description of Artificial Sequence: Synthetic oligonucleotide
cccauugacauuaguaagu

SEQ ID NO: 2553350 - RNA, 19 nt, Artificial Sequence
  Description of Artificial Sequence: Synthetic oligonucleotide
caucugaucucuuccuaau

SEQ ID NO: 2553351 - RNA, 19 nt, Artificial Sequence
  Description of Artificial Sequence: Synthetic oligonucleotide
caugggaaagguagcuuau

SEQ ID NO: 2553352 - RNA, 19 nt, Artificial Sequence
  Description of Artificial Sequence: Synthetic oligonucleotide
ccugcagcccaugggaaag

SEQ ID NO: 2553353 - RNA, 19 nt, Artificial Sequence
  Description of Artificial Sequence: Synthetic oligonucleotide
cugaucucuuccuaauauu

SEQ ID NO: 2553354 - RNA, 19 nt, Artificial Sequence
  Description of Artificial Sequence: Synthetic oligonucleotide
ucucugucacaagcccuau

SEQ ID NO: 2553355 - RNA, 19 nt, Artificial Sequence
  Description of Artificial Sequence: Synthetic oligonucleotide
ccuaucaauggaccuuuga

SEQ ID NO: 2553356 - RNA, 19 nt, Artificial Sequence
  Description of Artificial Sequence: Synthetic oligonucleotide
ccaugggaaagguagcuua

SEQ ID NO: 2553357 - RNA, 19 nt, Artificial Sequence
  Description of Artificial Sequence: Synthetic oligonucleotide
guucucugucacaagcccu

SEQ ID NO: 2553358 - RNA, 19 nt, Artificial Sequence
  Description of Artificial Sequence: Synthetic oligonucleotide
gguccaacauaaucucugu

SEQ ID NO: 2553359 - RNA, 19 nt, Artificial Sequence
  Description of Artificial Sequence: Synthetic oligonucleotide
cugcaucugaucucuuccu

SEQ ID NO: 2553360 - RNA, 19 nt, Artificial Sequence
  Description of Artificial Sequence: Synthetic oligonucleotide
auggaccuuugaauguuua

SEQ ID NO: 2553361 - RNA, 19 nt, Artificial Sequence
  Description of Artificial Sequence: Synthetic oligonucleotide
caaaaggcgucaacaguuu

SEQ ID NO: 2553362 - RNA, 19 nt, Artificial Sequence
  Description of Artificial Sequence: Synthetic oligonucleotide
cucugucaacacagaaaua

SEQ ID NO: 2553363 - RNA, 19 nt, Artificial Sequence
  Description of Artificial Sequence: Synthetic oligonucleotide
gugauuuaguuuggaaauu

SEQ ID NO: 2553364 - RNA, 19 nt, Artificial Sequence
  Description of Artificial Sequence: Synthetic oligonucleotide
guuuggaaauugguucuau

SEQ ID NO: 2553365 - RNA, 19 nt, Artificial Sequence
  Description of Artificial Sequence: Synthetic oligonucleotide
cagguccaacauaaucucu

SEQ ID NO: 2553366 - RNA, 19 nt, Artificial Sequence
  Description of Artificial Sequence: Synthetic oligonucleotide
agcuggacucuaaguaaua

SEQ ID NO: 2553367 - RNA, 19 nt, Artificial Sequence
  Description of Artificial Sequence: Synthetic oligonucleotide
ccaugggaagaauagcccu

SEQ ID NO: 2553368 - RNA, 19 nt, Artificial Sequence
  Description of Artificial Sequence: Synthetic oligonucleotide
ggaauuuguguaaucuguu

SEQ ID NO: 2553369 - RNA, 19 nt, Artificial Sequence
  Description of Artificial Sequence: Synthetic oligonucleotide
ccaucuucacagguccaac

SEQ ID NO: 2553370 - RNA, 19 nt, Artificial Sequence
  Description of Artificial Sequence: Synthetic oligonucleotide
caauggaccuuugaauguu

SEQ ID NO: 2553371 - RNA, 19 nt, Artificial Sequence
  Description of Artificial Sequence: Synthetic oligonucleotide
gcugucucuucuaccacaa

SEQ ID NO: 2553372 - RNA, 19 nt, Artificial Sequence
  Description of Artificial Sequence: Synthetic oligonucleotide
gcaaaugagcuggacucua

SEQ ID NO: 2553373 - RNA, 19 nt, Artificial Sequence
  Description of Artificial Sequence: Synthetic oligonucleotide
gcacuaaguucugcaucug

SEQ ID NO: 2553374 - RNA, 19 nt, Artificial Sequence
  Description of Artificial Sequence: Synthetic oligonucleotide
gccuuucaaaaugauuccu

SEQ ID NO: 2553375 - RNA, 19 nt, Artificial Sequence
  Description of Artificial Sequence: Synthetic oligonucleotide
ccuaauauuugcugccuuu

SEQ ID NO: 2553376 - RNA, 19 nt, Artificial Sequence
  Description of Artificial Sequence: Synthetic oligonucleotide
guuaagccaugggaagaau

SEQ ID NO: 2553377 - RNA, 19 nt, Artificial Sequence
  Description of Artificial Sequence: Synthetic oligonucleotide
cuaccacaaccagcaacaa

SEQ ID NO: 2553378 - RNA, 19 nt, Artificial Sequence
  Description of Artificial Sequence: Synthetic oligonucleotide
cccucuuaauuugacuuaa

SEQ ID NO: 2553379 - RNA, 19 nt, Artificial Sequence
  Description of Artificial Sequence: Synthetic oligonucleotide
gccaucuucacagguccaa

SEQ ID NO: 2553380 - RNA, 19 nt, Artificial Sequence
  Description of Artificial Sequence: Synthetic oligonucleotide
cccuaucaauggaccuuug

SEQ ID NO: 2553381 - RNA, 19 nt, Artificial Sequence
  Description of Artificial Sequence: Synthetic oligonucleotide
ccccucuuaauuugacuua

SEQ ID NO: 2553382 - RNA, 19 nt, Artificial Sequence
  Description of Artificial Sequence: Synthetic oligonucleotide
gcgucaacaguuucuuguu

SEQ ID NO: 2553383 - RNA, 19 nt, Artificial Sequence
  Description of Artificial Sequence: Synthetic oligonucleotide
gcugccuuucaaaaugauu

SEQ ID NO: 2553384 - RNA, 19 nt, Artificial Sequence
  Description of Artificial Sequence: Synthetic oligonucleotide
cagcaacaaaaggcgucaa

SEQ ID NO: 2553385 - RNA, 19 nt, Artificial Sequence
  Description of Artificial Sequence: Synthetic oligonucleotide
ccauugacauuaguaaguu

SEQ ID NO: 2553386 - RNA, 19 nt, Artificial Sequence
  Description of Artificial Sequence: Synthetic oligonucleotide
cccugcaaaugagcuggac

SEQ ID NO: 2553387 - RNA, 19 nt, Artificial Sequence
  Description of Artificial Sequence: Synthetic oligonucleotide
gcccaugggaaagguagcu

SEQ ID NO: 2553388 - RNA, 19 nt, Artificial Sequence
  Description of Artificial Sequence: Synthetic oligonucleotide
gcccuaucaauggaccuuu

SEQ ID NO: 2553389 - RNA, 19 nt, Artificial Sequence
  Description of Artificial Sequence: Synthetic oligonucleotide
ccucuuaauuugacuuaau

SEQ ID NO: 2553390 - RNA, 19 nt, Artificial Sequence
  Description of Artificial Sequence: Synthetic oligonucleotide
gcagcccaugggaaaggua

SEQ ID NO: 2553391 - RNA, 19 nt, Artificial Sequence
  Description of Artificial Sequence: Synthetic oligonucleotide
gcccugcaaaugagcugga

SEQ ID NO: 2553392 - RNA, 19 nt, Artificial Sequence
  Description of Artificial Sequence: Synthetic oligonucleotide
cccaugggaaagguagcuu

SEQ ID NO: 2553393 - RNA, 19 nt, Artificial Sequence
  Description of Artificial Sequence: Synthetic oligonucleotide
auaacuagcaaaucuagac

SEQ ID NO: 2553394 - RNA, 19 nt, Artificial Sequence
  Description of Artificial Sequence: Synthetic oligonucleotide
aacaauaacuagcaaaucu

SEQ ID NO: 2553395 - RNA, 19 nt, Artificial Sequence
  Description of Artificial Sequence: Synthetic oligonucleotide
caaaucuagacccauaucc

SEQ ID NO: 2553396 - RNA, 19 nt, Artificial Sequence
  Description of Artificial Sequence: Synthetic oligonucleotide
uuugaaaggguugagagag

SEQ ID NO: 2553397 - RNA, 19 nt, Artificial Sequence
  Description of Artificial Sequence: Synthetic oligonucleotide
ucucauauaauccagcaaa

SEQ ID NO: 2553398 - RNA, 19 nt, Artificial Sequence
  Description of Artificial Sequence: Synthetic oligonucleotide
aaggaaguaggccacacag

SEQ ID NO: 2553399 - RNA, 19 nt, Artificial Sequence
  Description of Artificial Sequence: Synthetic oligonucleotide
uccuuuaggccuuugaaag

SEQ ID NO: 2553400 - RNA, 19 nt, Artificial Sequence
  Description of Artificial Sequence: Synthetic oligonucleotide
acacgguuggcuuuggugc

SEQ ID NO: 2553401 - RNA, 19 nt, Artificial Sequence
  Description of Artificial Sequence: Synthetic oligonucleotide
uacggaaauauuccaagag

SEQ ID NO: 2553402 - RNA, 19 nt, Artificial Sequence
  Description of Artificial Sequence: Synthetic oligonucleotide
uaacuagcaaaucuagacc

SEQ ID NO: 2553403 - RNA, 19 nt, Artificial Sequence
  Description of Artificial Sequence: Synthetic oligonucleotide
aauccagcaaacaauaacu

SEQ ID NO: 2553404 - RNA, 19 nt, Artificial Sequence
  Description of Artificial Sequence: Synthetic oligonucleotide
uauaauccagcaaacaaua

SEQ ID NO: 2553405 - RNA, 19 nt, Artificial Sequence
  Description of Artificial Sequence: Synthetic oligonucleotide
uagacccauauccaaauag

SEQ ID NO: 2553406 - RNA, 19 nt, Artificial Sequence
  Description of Artificial Sequence: Synthetic oligonucleotide
uaauccagcaaacaauaac

SEQ ID NO: 2553407 - RNA, 19 nt, Artificial Sequence
  Description of Artificial Sequence: Synthetic oligonucleotide
aagagaaagcccaugacug

SEQ ID NO: 2553408 - RNA, 19 nt, Artificial Sequence
  Description of Artificial Sequence: Synthetic oligonucleotide
aaaaggaauuucacuacgg

SEQ ID NO: 2553409 - RNA, 19 nt, Artificial Sequence
  Description of Artificial Sequence: Synthetic oligonucleotide
acuacggaaauauuccaag

SEQ ID NO: 2553410 - RNA, 19 nt, Artificial Sequence
  Description of Artificial Sequence: Synthetic oligonucleotide
uuuucugcccaguuccucg

SEQ ID NO: 2553411 - RNA, 19 nt, Artificial Sequence
  Description of Artificial Sequence: Synthetic oligonucleotide
aaugcuuucagagccguug

SEQ ID NO: 2553412 - RNA, 19 nt, Artificial Sequence
  Description of Artificial Sequence: Synthetic oligonucleotide
auauccaaauagcaguaag

SEQ ID NO: 2553413 - RNA, 19 nt, Artificial Sequence
  Description of Artificial Sequence: Synthetic oligonucleotide
ugugguuaugcacauugug

SEQ ID NO: 2553414 - RNA, 19 nt, Artificial Sequence
  Description of Artificial Sequence: Synthetic oligonucleotide
aauagcaguaagcccauau

SEQ ID NO: 2553415 - RNA, 19 nt, Artificial Sequence
  Description of Artificial Sequence: Synthetic oligonucleotide
agaguugcgguacucucgc

SEQ ID NO: 2553416 - RNA, 19 nt, Artificial Sequence
  Description of Artificial Sequence: Synthetic oligonucleotide
caauaacuagcaaaucuag

SEQ ID NO: 2553417 - RNA, 19 nt, Artificial Sequence
  Description of Artificial Sequence: Synthetic oligonucleotide
cuugucauuggugaugugg

SEQ ID NO: 2553418 - RNA, 19 nt, Artificial Sequence
  Description of Artificial Sequence: Synthetic oligonucleotide
uaauuguggggacugguca

SEQ ID NO: 2553419 - RNA, 19 nt, Artificial Sequence
  Description of Artificial Sequence: Synthetic oligonucleotide
uguaucggcgacuucgaag

SEQ ID NO: 2553420 - RNA, 19 nt, Artificial Sequence
  Description of Artificial Sequence: Synthetic oligonucleotide
ugguuaugcacauugugga

SEQ ID NO: 2553421 - RNA, 19 nt, Artificial Sequence
  Description of Artificial Sequence: Synthetic oligonucleotide
acaccuggcucauuaagac

SEQ ID NO: 2553422 - RNA, 19 nt, Artificial Sequence
  Description of Artificial Sequence: Synthetic oligonucleotide
caugauacuggaucgguug

SEQ ID NO: 2553423 - RNA, 19 nt, Artificial Sequence
  Description of Artificial Sequence: Synthetic oligonucleotide
agcaguaagcccauauucc

SEQ ID NO: 2553424 - RNA, 19 nt, Artificial Sequence
  Description of Artificial Sequence: Synthetic oligonucleotide
ugagcuuuuccaaaaggaa

SEQ ID NO: 2553425 - RNA, 19 nt, Artificial Sequence
  Description of Artificial Sequence: Synthetic oligonucleotide
uaucaguguaauugugggg

SEQ ID NO: 2553426 - RNA, 19 nt, Artificial Sequence
  Description of Artificial Sequence: Synthetic oligonucleotide
  modified_base (13)..(13): a, c, u, g, unknown or other
uuagcauccaggngguagc

SEQ ID NO: 2553427 - RNA, 19 nt, Artificial Sequence
  Description of Artificial Sequence: Synthetic oligonucleotide
  modified_base (19)..(19): a, c, u, g, unknown or other
uucgaguuagcauccaggn

SEQ ID NO: 2553428 - RNA, 19 nt, Artificial Sequence
  Description of Artificial Sequence: Synthetic oligonucleotide
uccaaauagcaguaagccc

SEQ ID NO: 2553429 - RNA, 19 nt, Artificial Sequence
  Description of Artificial Sequence: Synthetic oligonucleotide
aaacaauaacuagcaaauc

SEQ ID NO: 2553430 - RNA, 19 nt, Artificial Sequence
  Description of Artificial Sequence: Synthetic oligonucleotide
aaaagccuguaucggcgac

SEQ ID NO: 2553431 - RNA, 19 nt, Artificial Sequence
  Description of Artificial Sequence: Synthetic oligonucleotide
accagaucucgcuugcgcc

SEQ ID NO: 2553432 - RNA, 19 nt, Artificial Sequence
  Description of Artificial Sequence: Synthetic oligonucleotide
gacuuaaugcuuucagagc

SEQ ID NO: 2553433 - RNA, 19 nt, Artificial Sequence
  Description of Artificial Sequence: Synthetic oligonucleotide
cuugagcuuuuccaaaagg

SEQ ID NO: 2553434 - RNA, 19 nt, Artificial Sequence
  Description of Artificial Sequence: Synthetic oligonucleotide
cuucgaguuagcauccagg

SEQ ID NO: 2553435 - RNA, 19 nt, Artificial Sequence
  Description of Artificial Sequence: Synthetic oligonucleotide
uagcaguaagcccauauuc

SEQ ID NO: 2553436 - RNA, 19 nt, Artificial Sequence
  Description of Artificial Sequence: Synthetic oligonucleotide
  modified_base (14)..(14): a, c, u, g, unknown or other
guuagcauccaggngguag

SEQ ID NO: 2553437 - RNA, 19 nt, Artificial Sequence
  Description of Artificial Sequence: Synthetic oligonucleotide
gugguuaugcacauugugg

SEQ ID NO: 2553438 - RNA, 19 nt, Artificial Sequence
  Description of Artificial Sequence: Synthetic oligonucleotide
agacccauauccaaauagc

SEQ ID NO: 2553439 - RNA, 19 nt, Artificial Sequence
  Description of Artificial Sequence: Synthetic oligonucleotide
cuuaaugcuuucagagccg

SEQ ID NO: 2553440 - RNA, 19 nt, Artificial Sequence
  Description of Artificial Sequence: Synthetic oligonucleotide
aucaguguaauugugggga

SEQ ID NO: 2553441 - RNA, 19 nt, Artificial Sequence
  Description of Artificial Sequence: Synthetic oligonucleotide
ucuugguaaggaaguaggc

SEQ ID NO: 2553442 - RNA, 19 nt, Artificial Sequence
  Description of Artificial Sequence: Synthetic oligonucleotide
ugccucaugauacuggauc

SEQ ID NO: 2553443 - RNA, 19 nt, Artificial Sequence
  Description of Artificial Sequence: Synthetic oligonucleotide
  modified_base (7)..(7): a, c, u, g, unknown or other
uccaggngguagcagagcu

SEQ ID NO: 2553444 - RNA, 19 nt, Artificial Sequence
  Description of Artificial Sequence: Synthetic oligonucleotide
aaucuagacccauauccaa

SEQ ID NO: 2553445 - RNA, 19 nt, Artificial Sequence
  Description of Artificial Sequence: Synthetic oligonucleotide
uuuggugccgugcuucgag

SEQ ID NO: 2553446 - RNA, 19 nt, Artificial Sequence
  Description of Artificial Sequence: Synthetic oligonucleotide
cuuucagagccguugaauc

SEQ ID NO: 2553447 - RNA, 19 nt, Artificial Sequence
  Description of Artificial Sequence: Synthetic oligonucleotide
aagaggacuuaaugcuuuc

SEQ ID NO: 2553448 - RNA, 19 nt, Artificial Sequence
  Description of Artificial Sequence: Synthetic oligonucleotide
aauaacuagcaaaucuaga

SEQ ID NO: 2553449 - RNA, 19 nt, Artificial Sequence
  Description of Artificial Sequence: Synthetic oligonucleotide
aaaucuagacccauaucca

SEQ ID NO: 2553450 - RNA, 19 nt, Artificial Sequence
  Description of Artificial Sequence: Synthetic oligonucleotide
uguggaccaguuuggagag

SEQ ID NO: 2553451 - RNA, 19 nt, Artificial Sequence
  Description of Artificial Sequence: Synthetic oligonucleotide
uuaugcacauuguggacca

SEQ ID NO: 2553452 - RNA, 19 nt, Artificial Sequence
  Description of Artificial Sequence: Synthetic oligonucleotide
uccgaaaugccucaugaua

SEQ ID NO: 2553453 - RNA, 19 nt, Artificial Sequence
  Description of Artificial Sequence: Synthetic oligonucleotide
ugcucagaagagaaagccc

SEQ ID NO: 2553454 - RNA, 19 nt, Artificial Sequence
  Description of Artificial Sequence: Synthetic oligonucleotide
ugaaucucuugucauuggu

SEQ ID NO: 2553455 - RNA, 19 nt, Artificial Sequence
  Description of Artificial Sequence: Synthetic oligonucleotide
ucggacaucaguucuucug

SEQ ID NO: 2553456 - RNA, 19 nt, Artificial Sequence
  Description of Artificial Sequence: Synthetic oligonucleotide
ggaaguaggccacacaggc

SEQ ID NO: 2553457 - RNA, 19 nt, Artificial Sequence
  Description of Artificial Sequence: Synthetic oligonucleotide
agagaguugcgguacucuc

SEQ ID NO: 2553458 - RNA, 19 nt, Artificial Sequence
  Description of Artificial Sequence: Synthetic oligonucleotide
uugaaucucuugucauugg

SEQ ID NO: 2553459 - RNA, 19 nt, Artificial Sequence
  Description of Artificial Sequence: Synthetic oligonucleotide
uccuuucaguuccuuauca

SEQ ID NO: 2553460 - RNA, 19 nt, Artificial Sequence
  Description of Artificial Sequence: Synthetic oligonucleotide
cucauauaauccagcaaac

SEQ ID NO: 2553461 - RNA, 19 nt, Artificial Sequence
  Description of Artificial Sequence: Synthetic oligonucleotide
uacacgguuggcuuuggug

SEQ ID NO: 2553462 - RNA, 19 nt, Artificial Sequence
  Description of Artificial Sequence: Synthetic oligonucleotide
guuaugcacauuguggacc

SEQ ID NO: 2553463 - RNA, 19 nt, Artificial Sequence
  Description of Artificial Sequence: Synthetic oligonucleotide
agcaaaucuagacccauau

SEQ ID NO: 2553464 - RNA, 19 nt, Artificial Sequence
  Description of Artificial Sequence: Synthetic oligonucleotide
guugaaucucuugucauug

SEQ ID NO: 2553465 - RNA, 19 nt, Artificial Sequence
  Description of Artificial Sequence: Synthetic oligonucleotide
  modified_base (18)..(18): a, c, u, g, unknown or other
ucgaguuagcauccaggng

SEQ ID NO: 2553466 - RNA, 19 nt, Artificial Sequence
  Description of Artificial Sequence: Synthetic oligonucleotide
aguaagcccauauuccccu

SEQ ID NO: 2553467 - RNA, 19 nt, Artificial Sequence
  Description of Artificial Sequence: Synthetic oligonucleotide
  modified_base (17)..(17): a, c, u, g, unknown or other
cgaguuagcauccaggngg

SEQ ID NO: 2553468 - RNA, 19 nt, Artificial Sequence
  Description of Artificial Sequence: Synthetic oligonucleotide
auauaauccagcaaacaau

SEQ ID NO: 2553469 - RNA, 19 nt, Artificial Sequence
  Description of Artificial Sequence: Synthetic oligonucleotide
ucgccucuugguaaggaag

SEQ ID NO: 2553470 - RNA, 19 nt, Artificial Sequence
  Description of Artificial Sequence: Synthetic oligonucleotide
gguagcagagcucugugag

SEQ ID NO: 2553471 - RNA, 19 nt, Artificial Sequence
  Description of Artificial Sequence: Synthetic oligonucleotide
ucuagacccauauccaaau

SEQ ID NO: 2553472 - RNA, 19 nt, Artificial Sequence
  Description of Artificial Sequence: Synthetic oligonucleotide
uggcucauuaagacugucc

SEQ ID NO: 2553473 - RNA, 19 nt, Artificial Sequence
  Description of Artificial Sequence: Synthetic oligonucleotide
uaggccuuugaaaggguug

SEQ ID NO: 2553474 - RNA, 19 nt, Artificial Sequence
  Description of Artificial Sequence: Synthetic oligonucleotide
ucacuacggaaauauucca

SEQ ID NO: 2553475 - RNA, 19 nt, Artificial Sequence
  Description of Artificial Sequence: Synthetic oligonucleotide
gaaucucuugucauuggug

SEQ ID NO: 2553476 - RNA, 19 nt, Artificial Sequence
  Description of Artificial Sequence: Synthetic oligonucleotide
cugcucagaagagaaagcc

SEQ ID NO: 2553477 - RNA, 19 nt, Artificial Sequence
  Description of Artificial Sequence: Synthetic oligonucleotide
uauuccaagaggacuuaau

SEQ ID NO: 2553478 - RNA, 19 nt, Artificial Sequence
  Description of Artificial Sequence: Synthetic oligonucleotide
aguguaauuguggggacug

SEQ ID NO: 2553479 - RNA, 19 nt, Artificial Sequence
  Description of Artificial Sequence: Synthetic oligonucleotide
gagaguugcgguacucucg

SEQ ID NO: 2553480 - RNA, 19 nt, Artificial Sequence
  Description of Artificial Sequence: Synthetic oligonucleotide
uaaggaaguaggccacaca

SEQ ID NO: 2553481 - RNA, 19 nt, Artificial Sequence
  Description of Artificial Sequence: Synthetic oligonucleotide
ccagcaaacaauaacuauc

SEQ ID NO: 2553482 - RNA, 19 nt, Artificial Sequence
  Description of Artificial Sequence: Synthetic oligonucleotide
acaauaacuagcaaaucua

SEQ ID NO: 2553483 - RNA, 19 nt, Artificial Sequence
  Description of Artificial Sequence: Synthetic oligonucleotide
aggguugagagaguugcgg

SEQ ID NO: 2553484 - RNA, 19 nt, Artificial Sequence
  Description of Artificial Sequence: Synthetic oligonucleotide
acacaccuggcucauuaag

SEQ ID NO: 2553485 - RNA, 19 nt, Artificial Sequence
  Description of Artificial Sequence: Synthetic oligonucleotide
caguaagcccauauucccc

SEQ ID NO: 2553486 - RNA, 19 nt, Artificial Sequence
  Description of Artificial Sequence: Synthetic oligonucleotide
guagcagagcucugugagg

SEQ ID NO: 2553487 - RNA, 19 nt, Artificial Sequence
  Description of Artificial Sequence: Synthetic oligonucleotide
uuccucggauccugcaugg

SEQ ID NO: 2553488 - RNA, 19 nt, Artificial Sequence
  Description of Artificial Sequence: Synthetic oligonucleotide
uguaauuguggggacuggu

SEQ ID NO: 2553489 - RNA, 19 nt, Artificial Sequence
  Description of Artificial Sequence: Synthetic oligonucleotide
agccguugaaucucuuguc

SEQ ID NO: 2553490 - RNA, 19 nt, Artificial Sequence
  Description of Artificial Sequence: Synthetic oligonucleotide
cauggggagccaauaaauc

SEQ ID NO: 2553491 - RNA, 19 nt, Artificial Sequence
  Description of Artificial Sequence: Synthetic oligonucleotide
ucucgcuugcgccuggagu

SEQ ID NO: 2553492 - RNA, 19 nt, Artificial Sequence
  Description of Artificial Sequence: Synthetic oligonucleotide
gagcgggccacccacacac

SEQ ID NO: 2553493 - RNA, 19 nt, Artificial Sequence
  Description of Artificial Sequence: Synthetic oligonucleotide
  modified_base (9)..(9): a, c, u, g, unknown or other
cauccaggngguagcagag

SEQ ID NO: 2553494 - RNA, 19 nt, Artificial Sequence
  Description of Artificial Sequence: Synthetic oligonucleotide
gaaggcagucugucugagg

SEQ ID NO: 2553495 - RNA, 19 nt, Artificial Sequence
  Description of Artificial Sequence: Synthetic oligonucleotide
agagccguugaaucucuug

SEQ ID NO: 2553496 - RNA, 19 nt, Artificial Sequence
  Description of Artificial Sequence: Synthetic oligonucleotide
uuaaugcuuucagagccgu

SEQ ID NO: 2553497 - RNA, 19 nt, Artificial Sequence
  Description of Artificial Sequence: Synthetic oligonucleotide
auagcaguaagcccauauu

SEQ ID NO: 2553498 - RNA, 19 nt, Artificial Sequence
  Description of Artificial Sequence: Synthetic oligonucleotide
uccaaacaauaacuagcaa

SEQ ID NO: 2553499 - RNA, 19 nt, Artificial Sequence
  Description of Artificial Sequence: Synthetic oligonucleotide
gcaguaagcccauauuccc

SEQ ID NO: 2553500 - RNA, 19 nt, Artificial Sequence
  Description of Artificial Sequence: Synthetic oligonucleotide
ccgaaaugccucaugauac

SEQ ID NO: 2553501 - RNA, 19 nt, Artificial Sequence
  Description of Artificial Sequence: Synthetic oligonucleotide
agacuguccuccucaucgg

SEQ ID NO: 2553502 - RNA, 19 nt, Artificial Sequence
  Description of Artificial Sequence: Synthetic oligonucleotide
guaucggcgacuucgaagu

SEQ ID NO: 2553503 - RNA, 19 nt, Artificial Sequence
  Description of Artificial Sequence: Synthetic oligonucleotide
gccucaugauacuggaucg

SEQ ID NO: 2553504 - RNA, 19 nt, Artificial Sequence
  Description of Artificial Sequence: Synthetic oligonucleotide
gagggaggcccguauacac

SEQ ID NO: 2553505 - RNA, 19 nt, Artificial Sequence
  Description of Artificial Sequence: Synthetic oligonucleotide
  modified_base (2)..(2): a, c, u, g, unknown or other
gngguagcagagcucugug

SEQ ID NO: 2553506 - RNA, 19 nt, Artificial Sequence
  Description of Artificial Sequence: Synthetic oligonucleotide
uccccugcucagaagagaa

SEQ ID NO: 2553507 - RNA, 19 nt, Artificial Sequence
  Description of Artificial Sequence: Synthetic oligonucleotide
aagcccauauuccccugcu

SEQ ID NO: 2553508 - RNA, 19 nt, Artificial Sequence
  Description of Artificial Sequence: Synthetic oligonucleotide
ucaguguaauuguggggac

SEQ ID NO: 2553509 - RNA, 19 nt, Artificial Sequence
  Description of Artificial Sequence: Synthetic oligonucleotide
ucggcgacuucgaaguuuc

SEQ ID NO: 2553510 - RNA, 19 nt, Artificial Sequence
  Description of Artificial Sequence: Synthetic oligonucleotide
guugagagaguugcgguac

SEQ ID NO: 2553511 - RNA, 19 nt, Artificial Sequence
  Description of Artificial Sequence: Synthetic oligonucleotide
gacccauauccaaauagca

SEQ ID NO: 2553512 - RNA, 19 nt, Artificial Sequence
  Description of Artificial Sequence: Synthetic oligonucleotide
ugaaaggguugagagaguu

SEQ ID NO: 2553513 - RNA, 19 nt, Artificial Sequence
  Description of Artificial Sequence: Synthetic oligonucleotide
ucauuaagacuguccuccu

SEQ ID NO: 2553514 - RNA, 19 nt, Artificial Sequence
  Description of Artificial Sequence: Synthetic oligonucleotide
ggugaugugguuaugcaca

SEQ ID NO: 2553515 - RNA, 19 nt, Artificial Sequence
  Description of Artificial Sequence: Synthetic oligonucleotide
uucagagccguugaaucuc

SEQ ID NO: 2553516 - RNA, 19 nt, Artificial Sequence
  Description of Artificial Sequence: Synthetic oligonucleotide
ugauacuggaucgguuggc

SEQ ID NO: 2553517 - RNA, 19 nt, Artificial Sequence
  Description of Artificial Sequence: Synthetic oligonucleotide
uacucucgccucuugguaa

SEQ ID NO: 2553518 - RNA, 19 nt, Artificial Sequence
  Description of Artificial Sequence: Synthetic oligonucleotide
uuaggccuuugaaaggguu

SEQ ID NO: 2553519 - RNA, 19 nt, Artificial Sequence
  Description of Artificial Sequence: Synthetic oligonucleotide
ucaugauacuggaucgguu

SEQ ID NO: 2553520 - RNA, 19 nt, Artificial Sequence
  Description of Artificial Sequence: Synthetic oligonucleotide
ugguccucggguccgaaau

SEQ ID NO: 2553521 - RNA, 19 nt, Artificial Sequence
  Description of Artificial Sequence: Synthetic oligonucleotide
ccaaaaggaauuucacuac

SEQ ID NO: 2553522 - RNA, 19 nt, Artificial Sequence
  Description of Artificial Sequence: Synthetic oligonucleotide
aaggguugagagaguugcg

SEQ ID NO: 2553523 - RNA, 19 nt, Artificial Sequence
  Description of Artificial Sequence: Synthetic oligonucleotide
cugugaggcgcugagcccg

SEQ ID NO: 2553524 - RNA, 19 nt, Artificial Sequence
  Description of Artificial Sequence: Synthetic oligonucleotide
cuacggaaauauuccaaga

SEQ ID NO: 2553525 - RNA, 19 nt, Artificial Sequence
  Description of Artificial Sequence: Synthetic oligonucleotide
ucaucaguuccugcuugag

SEQ ID NO: 2553526 - RNA, 19 nt, Artificial Sequence
  Description of Artificial Sequence: Synthetic oligonucleotide
ucggauccugcauggggag

SEQ ID NO: 2553527 - RNA, 19 nt, Artificial Sequence
  Description of Artificial Sequence: Synthetic oligonucleotide
gccuguaucggcgacuucg

SEQ ID NO: 2553528 - RNA, 19 nt, Artificial Sequence
  Description of Artificial Sequence: Synthetic oligonucleotide
gggacuggucaucaguucc

SEQ ID NO: 2553529 - RNA, 19 nt, Artificial Sequence
  Description of Artificial Sequence: Synthetic oligonucleotide
acucucgccucuugguaag

SEQ ID NO: 2553530 - RNA, 19 nt, Artificial Sequence
  Description of Artificial Sequence: Synthetic oligonucleotide
gaaucggggagagcgggcc

SEQ ID NO: 2553531 - RNA, 19 nt, Artificial Sequence
  Description of Artificial Sequence: Synthetic oligonucleotide
aguuccuuaucaguguaau

SEQ ID NO: 2553532 - RNA, 19 nt, Artificial Sequence
  Description of Artificial Sequence: Synthetic oligonucleotide
gaaaggguugagagaguug

SEQ ID NO: 2553533 - RNA, 19 nt, Artificial Sequence
  Description of Artificial Sequence: Synthetic oligonucleotide
gauacuggaucgguuggca

SEQ ID NO: 2553534 - RNA, 19 nt, Artificial Sequence
  Description of Artificial Sequence: Synthetic oligonucleotide
gggaggcccguauacacgg

SEQ ID NO: 2553535 - RNA, 19 nt, Artificial Sequence
  Description of Artificial Sequence: Synthetic oligonucleotide
uuaagacuguccuccucau

SEQ ID NO: 2553536 - RNA, 19 nt, Artificial Sequence
  Description of Artificial Sequence: Synthetic oligonucleotide
gagcaccagaucucgcuug

SEQ ID NO: 2553537 - RNA, 19 nt, Artificial Sequence
  Description of Artificial Sequence: Synthetic oligonucleotide
aggaaguaggccacacagg

SEQ ID NO: 2553538 - RNA, 19 nt, Artificial Sequence
  Description of Artificial Sequence: Synthetic oligonucleotide
uggggacuggucaucaguu

SEQ ID NO: 2553539 - RNA, 19 nt, Artificial Sequence
  Description of Artificial Sequence: Synthetic oligonucleotide
cgugcuucgaguuagcauc

SEQ ID NO: 2553540 - RNA, 19 nt, Artificial Sequence
  Description of Artificial Sequence: Synthetic oligonucleotide
auauuccccugcucagaag

SEQ ID NO: 2553541 - RNA, 19 nt, Artificial Sequence
  Description of Artificial Sequence: Synthetic oligonucleotide
cugagggaggcccguauac

SEQ ID NO: 2553542 - RNA, 19 nt, Artificial Sequence
  Description of Artificial Sequence: Synthetic oligonucleotide
ggaaauauuccaagaggac

SEQ ID NO: 2553543 - RNA, 19 nt, Artificial Sequence
  Description of Artificial Sequence: Synthetic oligonucleotide
cacaccuggcucauuaaga

SEQ ID NO: 2553544 - RNA, 19 nt, Artificial Sequence
  Description of Artificial Sequence: Synthetic oligonucleotide
uugagagaguugcgguacu

SEQ ID NO: 2553545 - RNA, 19 nt, Artificial Sequence
  Description of Artificial Sequence: Synthetic oligonucleotide
ucaucggacaucaguucuu

SEQ ID NO: 2553546 - RNA, 19 nt, Artificial Sequence
  Description of Artificial Sequence: Synthetic oligonucleotide
cucggguccgaaaugccuc

SEQ ID NO: 2553547 - RNA, 19 nt, Artificial Sequence
  Description of Artificial Sequence: Synthetic oligonucleotide
cacgguuggcuuuggugcc

SEQ ID NO: 2553548 - RNA, 19 nt, Artificial Sequence
  Description of Artificial Sequence: Synthetic oligonucleotide
guauacacgguuggcuuug

SEQ ID NO: 2553549 - RNA, 19 nt, Artificial Sequence
  Description of Artificial Sequence: Synthetic oligonucleotide
ugugaggcgcugagcccgg

SEQ ID NO: 2553550 - RNA, 19 nt, Artificial Sequence
  Description of Artificial Sequence: Synthetic oligonucleotide
aggcgcugagcccggaauc

SEQ ID NO: 2553551 - RNA, 19 nt, Artificial Sequence
  Description of Artificial Sequence: Synthetic oligonucleotide
aguuuggagagcaccagau

SEQ ID NO: 2553552 - RNA, 19 nt, Artificial Sequence
  Description of Artificial Sequence: Synthetic oligonucleotide
aguuccucggauccugcau

SEQ ID NO: 2553553 - RNA, 19 nt, Artificial Sequence
  Description of Artificial Sequence: Synthetic oligonucleotide
cccggaaucggggagagcg

SEQ ID NO: 2553554 - RNA, 19 nt, Artificial Sequence
  Description of Artificial Sequence: Synthetic oligonucleotide
uauacacgguuggcuuugg

SEQ ID NO: 2553555 - RNA, 19 nt, Artificial Sequence
  Description of Artificial Sequence: Synthetic oligonucleotide
guaauuguggggacugguc

SEQ ID NO: 2553556 - RNA, 19 nt, Artificial Sequence
  Description of Artificial Sequence: Synthetic oligonucleotide
  modified_base (10)..(10): a, c, u, g, unknown or other
gcauccaggngguagcaga

SEQ ID NO: 2553557 - RNA, 19 nt, Artificial Sequence
  Description of Artificial Sequence: Synthetic oligonucleotide
cauuaagacuguccuccuc

SEQ ID NO: 2553558 - RNA, 19 nt, Artificial Sequence
  Description of Artificial Sequence: Synthetic oligonucleotide
  modified_base (8)..(8): a, c, u, g, unknown or other
auccaggngguagcagagc

SEQ ID NO: 2553559 - RNA, 19 nt, Artificial Sequence
  Description of Artificial Sequence: Synthetic oligonucleotide
gguccgaaaugccucauga

SEQ ID NO: 2553560 - RNA, 19 nt, Artificial Sequence
  Description of Artificial Sequence: Synthetic oligonucleotide
aaucggggagagcgggcca

SEQ ID NO: 2553561 - RNA, 19 nt, Artificial Sequence
  Description of Artificial Sequence: Synthetic oligonucleotide
gguuaugcacauuguggac

SEQ ID NO: 2553562 - RNA, 19 nt, Artificial Sequence
  Description of Artificial Sequence: Synthetic oligonucleotide
gcgacuucgaaguuucuuc

SEQ ID NO: 2553563 - RNA, 19 nt, Artificial Sequence
  Description of Artificial Sequence: Synthetic oligonucleotide
uccucggguccgaaaugcc

SEQ ID NO: 2553564 - RNA, 19 nt, Artificial Sequence
  Description of Artificial Sequence: Synthetic oligonucleotide
uagcaaaucuagacccaua

SEQ ID NO: 2553565 - RNA, 19 nt, Artificial Sequence
  Description of Artificial Sequence: Synthetic oligonucleotide
agcccauauuccccugcuc

SEQ ID NO: 2553566 - RNA, 19 nt, Artificial Sequence
  Description of Artificial Sequence: Synthetic oligonucleotide
ucugagggaggcccguaua

SEQ ID NO: 2553567 - RNA, 19 nt, Artificial Sequence
  Description of Artificial Sequence: Synthetic oligonucleotide
aucucuugucauuggugau

SEQ ID NO: 2553568 - RNA, 19 nt, Artificial Sequence
  Description of Artificial Sequence: Synthetic oligonucleotide
guaaggaaguaggccacac

SEQ ID NO: 2553569 - RNA, 19 nt, Artificial Sequence
  Description of Artificial Sequence: Synthetic oligonucleotide
cacuacggaaauauuccaa

SEQ ID NO: 2553570 - RNA, 19 nt, Artificial Sequence
  Description of Artificial Sequence: Synthetic oligonucleotide
agagcaccagaucucgcuu

SEQ ID NO: 2553571 - RNA, 19 nt, Artificial Sequence
  Description of Artificial Sequence: Synthetic oligonucleotide
ggcagucugucugagggag

SEQ ID NO: 2553572 - RNA, 19 nt, Artificial Sequence
  Description of Artificial Sequence: Synthetic oligonucleotide
auacuggaucgguuggcaa

SEQ ID NO: 2553573 - RNA, 19 nt, Artificial Sequence
  Description of Artificial Sequence: Synthetic oligonucleotide
ucugcccaguuccucggau

SEQ ID NO: 2553574 - RNA, 19 nt, Artificial Sequence
  Description of Artificial Sequence: Synthetic oligonucleotide
agucugucugagggaggcc

SEQ ID NO: 2553575 - RNA, 19 nt, Artificial Sequence
  Description of Artificial Sequence: Synthetic oligonucleotide
ccuuaucaguguaauugug

SEQ ID NO: 2553576 - RNA, 19 nt, Artificial Sequence
  Description of Artificial Sequence: Synthetic oligonucleotide
ugucauuggugaugugguu

SEQ ID NO: 2553577 - RNA, 19 nt, Artificial Sequence
  Description of Artificial Sequence: Synthetic oligonucleotide
guguaauuguggggacugg

SEQ ID NO: 2553578 - RNA, 19 nt, Artificial Sequence
  Description of Artificial Sequence: Synthetic oligonucleotide
aucuagacccauauccaaa

SEQ ID NO: 2553579 - RNA, 19 nt, Artificial Sequence
  Description of Artificial Sequence: Synthetic oligonucleotide
agggaggcccguauacacg

SEQ ID NO: 2553580 - RNA, 19 nt, Artificial Sequence
  Description of Artificial Sequence: Synthetic oligonucleotide
agaucucgcuugcgccugg

SEQ ID NO: 2553581 - RNA, 19 nt, Artificial Sequence
  Description of Artificial Sequence: Synthetic oligonucleotide
ggcccguauacacgguugg

SEQ ID NO: 2553582 - RNA, 19 nt, Artificial Sequence
  Description of Artificial Sequence: Synthetic oligonucleotide
guccucggguccgaaaugc

SEQ ID NO: 2553583 - RNA, 19 nt, Artificial Sequence
  Description of Artificial Sequence: Synthetic oligonucleotide
acuggaucgguuggcaaaa

SEQ ID NO: 2553584 - RNA, 19 nt, Artificial Sequence
  Description of Artificial Sequence: Synthetic oligonucleotide
gacuggucaucaguuccug

SEQ ID NO: 2553585 - RNA, 19 nt, Artificial Sequence
  Description of Artificial Sequence: Synthetic oligonucleotide
aagccuguaucggcgacuu

SEQ ID NO: 2553586 - RNA, 19 nt, Artificial Sequence
  Description of Artificial Sequence: Synthetic oligonucleotide
uuccccugcucagaagaga

SEQ ID NO: 2553587 - RNA, 19 nt, Artificial Sequence
  Description of Artificial Sequence: Synthetic oligonucleotide
aucggggagagcgggccac

SEQ ID NO: 2553588 - RNA, 19 nt, Artificial Sequence
  Description of Artificial Sequence: Synthetic oligonucleotide
gucaucaguuccugcuuga

SEQ ID NO: 2553589 - RNA, 19 nt, Artificial Sequence
  Description of Artificial Sequence: Synthetic oligonucleotide
gagagcgggccacccacac

SEQ ID NO: 2553590 - RNA, 19 nt, Artificial Sequence
  Description of Artificial Sequence: Synthetic oligonucleotide
ugagagaguugcgguacuc

SEQ ID NO: 2553591 - RNA, 19 nt, Artificial Sequence
  Description of Artificial Sequence: Synthetic oligonucleotide
gugccgugcuucgaguuag

SEQ ID NO: 2553592 - RNA, 19 nt, Artificial Sequence
  Description of Artificial Sequence: Synthetic oligonucleotide
  modified_base (16)..(16): a, c, u, g, unknown or other
gaguuagcauccaggnggu

SEQ ID NO: 2553593 - RNA, 19 nt, Artificial Sequence
  Description of Artificial Sequence: Synthetic oligonucleotide
caucggacaucaguucuuc

SEQ ID NO: 2553594 - RNA, 19 nt, Artificial Sequence
  Description of Artificial Sequence: Synthetic oligonucleotide
uugcgguacucucgccucu

SEQ ID NO: 2553595 - RNA, 19 nt, Artificial Sequence
  Description of Artificial Sequence: Synthetic oligonucleotide
cccauauccaaauagcagu

SEQ ID NO: 2553596 - RNA, 19 nt, Artificial Sequence
  Description of Artificial Sequence: Synthetic oligonucleotide
gccguugaaucucuuguca

SEQ ID NO: 2553597 - RNA, 19 nt, Artificial Sequence
  Description of Artificial Sequence: Synthetic oligonucleotide
auccagcaaacaauaacua

SEQ ID NO: 2553598 - RNA, 19 nt, Artificial Sequence
  Description of Artificial Sequence: Synthetic oligonucleotide
cucaucggacaucaguucu

SEQ ID NO: 2553599 - RNA, 19 nt, Artificial Sequence
  Description of Artificial Sequence: Synthetic oligonucleotide
ucucgccucuugguaagga

SEQ ID NO: 2553600 - RNA, 19 nt, Artificial Sequence
  Description of Artificial Sequence: Synthetic oligonucleotide
gcuguugguccucgggucc

SEQ ID NO: 2553601 - RNA, 19 nt, Artificial Sequence
  Description of Artificial Sequence: Synthetic oligonucleotide
cuguugguccucggguccg

SEQ ID NO: 2553602 - RNA, 19 nt, Artificial Sequence
  Description of Artificial Sequence: Synthetic oligonucleotide
aucucgcuugcgccuggag

SEQ ID NO: 2553603 - RNA, 19 nt, Artificial Sequence
  Description of Artificial Sequence: Synthetic oligonucleotide
uaaugcuuucagagccguu

SEQ ID NO: 2553604 - RNA, 19 nt, Artificial Sequence
  Description of Artificial Sequence: Synthetic oligonucleotide
auacacgguuggcuuuggu

SEQ ID NO: 2553605 - RNA, 19 nt, Artificial Sequence
  Description of Artificial Sequence: Synthetic oligonucleotide
uccucggauccugcauggg

SEQ ID NO: 2553606 - RNA, 19 nt, Artificial Sequence
  Description of Artificial Sequence: Synthetic oligonucleotide
uccugcauggggagccaau

SEQ ID NO: 2553607 - RNA, 19 nt, Artificial Sequence
  Description of Artificial Sequence: Synthetic oligonucleotide
guacucucgccucuuggua

SEQ ID NO: 2553608 - RNA, 19 nt, Artificial Sequence
  Description of Artificial Sequence: Synthetic oligonucleotide
gaauuucacuacggaaaua

SEQ ID NO: 2553609 - RNA, 19 nt, Artificial Sequence
  Description of Artificial Sequence: Synthetic oligonucleotide
ggcgcugagcccggaaucg

SEQ ID NO: 2553610 - RNA, 19 nt, Artificial Sequence
  Description of Artificial Sequence: Synthetic oligonucleotide
augugguuaugcacauugu

SEQ ID NO: 2553611 - RNA, 19 nt, Artificial Sequence
  Description of Artificial Sequence: Synthetic oligonucleotide
ccucuugguaaggaaguag

SEQ ID NO: 2553612 - RNA, 19 nt, Artificial Sequence
  Description of Artificial Sequence: Synthetic oligonucleotide
ugaggcgcugagcccggaa

SEQ ID NO: 2553613 - RNA, 19 nt, Artificial Sequence
  Description of Artificial Sequence: Synthetic oligonucleotide
caagaggacuuaaugcuuu

SEQ ID NO: 2553614 - RNA, 19 nt, Artificial Sequence
  Description of Artificial Sequence: Synthetic oligonucleotide
gguugagagaguugcggua

SEQ ID NO: 2553615 - RNA, 19 nt, Artificial Sequence
  Description of Artificial Sequence: Synthetic oligonucleotide
gagagaguugcgguacucu

SEQ ID NO: 2553616 - RNA, 19 nt, Artificial Sequence
  Description of Artificial Sequence: Synthetic oligonucleotide
cauuguggaccaguuugga

SEQ ID NO: 2553617 - RNA, 19 nt, Artificial Sequence
  Description of Artificial Sequence: Synthetic oligonucleotide
ggacaucaguucuucuguc

SEQ ID NO: 2553618 - RNA, 19 nt, Artificial Sequence
  Description of Artificial Sequence: Synthetic oligonucleotide
  modified_base (5)..(5): a, c, u, g, unknown or other
caggngguagcagagcucu

SEQ ID NO: 2553619 - RNA, 19 nt, Artificial Sequence
  Description of Artificial Sequence: Synthetic oligonucleotide
agagcgggccacccacaca

SEQ ID NO: 2553620 - RNA, 19 nt, Artificial Sequence
  Description of Artificial Sequence: Synthetic oligonucleotide
aggcccguauacacgguug

SEQ ID NO: 2553621 - RNA, 19 nt, Artificial Sequence
  Description of Artificial Sequence: Synthetic oligonucleotide
ugccgugcuucgaguuagc

SEQ ID NO: 2553622 - RNA, 19 nt, Artificial Sequence
  Description of Artificial Sequence: Synthetic oligonucleotide
ucaguucuucugucacauu

SEQ ID NO: 2553623 - RNA, 19 nt, Artificial Sequence
  Description of Artificial Sequence: Synthetic oligonucleotide
gggagagcgggccacccac

SEQ ID NO: 2553624 - RNA, 19 nt, Artificial Sequence
  Description of Artificial Sequence: Synthetic oligonucleotide
uggugccgugcuucgaguu

SEQ ID NO: 2553625 - RNA, 19 nt, Artificial Sequence
  Description of Artificial Sequence: Synthetic oligonucleotide
cagaucucgcuugcgccug

SEQ ID NO: 2553626 - RNA, 19 nt, Artificial Sequence
  Description of Artificial Sequence: Synthetic oligonucleotide
ccucaugauacuggaucgg

SEQ ID NO: 2553627 - RNA, 19 nt, Artificial Sequence
  Description of Artificial Sequence: Synthetic oligonucleotide
gcugagcccggaaucgggg

SEQ ID NO: 2553628 - RNA, 19 nt, Artificial Sequence
  Description of Artificial Sequence: Synthetic oligonucleotide
aucggcgacuucgaaguuu

SEQ ID NO: 2553629 - RNA, 19 nt, Artificial Sequence
  Description of Artificial Sequence: Synthetic oligonucleotide
aaauagcaguaagcccaua

SEQ ID NO: 2553630 - RNA, 19 nt, Artificial Sequence
  Description of Artificial Sequence: Synthetic oligonucleotide
caguuccuuaucaguguaa

SEQ ID NO: 2553631 - RNA, 19 nt, Artificial Sequence
  Description of Artificial Sequence: Synthetic oligonucleotide
guggggacuggucaucagu

SEQ ID NO: 2553632 - RNA, 19 nt, Artificial Sequence
  Description of Artificial Sequence: Synthetic oligonucleotide
cccaugacugaaacuucac

SEQ ID NO: 2553633 - RNA, 19 nt, Artificial Sequence
  Description of Artificial Sequence: Synthetic oligonucleotide
gaaguaggccacacaggcu

SEQ ID NO: 2553634 - RNA, 19 nt, Artificial Sequence
  Description of Artificial Sequence: Synthetic oligonucleotide
cucgccucuugguaaggaa

SEQ ID NO: 2553635 - RNA, 19 nt, Artificial Sequence
  Description of Artificial Sequence: Synthetic oligonucleotide
cuagacccauauccaaaua

SEQ ID NO: 2553636 - RNA, 19 nt, Artificial Sequence
  Description of Artificial Sequence: Synthetic oligonucleotide
cucgcuugcgccuggaguu

SEQ ID NO: 2553637 - RNA, 19 nt, Artificial Sequence
  Description of Artificial Sequence: Synthetic oligonucleotide
uaucggcgacuucgaaguu

SEQ ID NO: 2553638 - RNA, 19 nt, Artificial Sequence
  Description of Artificial Sequence: Synthetic oligonucleotide
agccuguaucggcgacuuc

SEQ ID NO: 2553639 - RNA, 19 nt, Artificial Sequence
  Description of Artificial Sequence: Synthetic oligonucleotide
cugagcccggaaucgggga

SEQ ID NO: 2553640 - RNA, 19 nt, Artificial Sequence
  Description of Artificial Sequence: Synthetic oligonucleotide
ccucaucggacaucaguuc

SEQ ID NO: 2553641 - RNA, 19 nt, Artificial Sequence
  Description of Artificial Sequence: Synthetic oligonucleotide
gguccucggguccgaaaug

SEQ ID NO: 2553642 - RNA, 19 nt, Artificial Sequence
  Description of Artificial Sequence: Synthetic oligonucleotide
cauuggugaugugguuaug

SEQ ID NO: 2553643 - RNA, 19 nt, Artificial Sequence
  Description of Artificial Sequence: Synthetic oligonucleotide
ccauauccaaauagcagua

SEQ ID NO: 2553644 - RNA, 19 nt, Artificial Sequence
  Description of Artificial Sequence: Synthetic oligonucleotide
cucaugauacuggaucggu

SEQ ID NO: 2553645 - RNA, 19 nt, Artificial Sequence
  Description of Artificial Sequence: Synthetic oligonucleotide
cugcauggggagccaauaa

SEQ ID NO: 2553646 - RNA, 19 nt, Artificial Sequence
  Description of Artificial Sequence: Synthetic oligonucleotide
cucucgccucuugguaagg

SEQ ID NO: 2553647 - RNA, 19 nt, Artificial Sequence
  Description of Artificial Sequence: Synthetic oligonucleotide
uguugguccucggguccga

SEQ ID NO: 2553648 - RNA, 19 nt, Artificial Sequence
  Description of Artificial Sequence: Synthetic oligonucleotide
ggguccgaaaugccucaug

SEQ ID NO: 2553649 - RNA, 19 nt, Artificial Sequence
  Description of Artificial Sequence: Synthetic oligonucleotide
gugaugugguuaugcacau

SEQ ID NO: 2553650 - RNA, 19 nt, Artificial Sequence
  Description of Artificial Sequence: Synthetic oligonucleotide
ccaguuuggagagcaccag

SEQ ID NO: 2553651 - RNA, 19 nt, Artificial Sequence
  Description of Artificial Sequence: Synthetic oligonucleotide
ugaugugguuaugcacauu

SEQ ID NO: 2553652 - RNA, 19 nt, Artificial Sequence
  Description of Artificial Sequence: Synthetic oligonucleotide
ggccacacaggcuccuuuc

SEQ ID NO: 2553653 - RNA, 19 nt, Artificial Sequence
  Description of Artificial Sequence: Synthetic oligonucleotide
aggccacacaggcuccuuu

SEQ ID NO: 2553654 - RNA, 19 nt, Artificial Sequence
  Description of Artificial Sequence: Synthetic oligonucleotide
cuagcaaaucuagacccau

SEQ ID NO: 2553655 - RNA, 19 nt, Artificial Sequence
  Description of Artificial Sequence: Synthetic oligonucleotide
gccuuugaaaggguugaga

SEQ ID NO: 2553656 - RNA, 19 nt, Artificial Sequence
  Description of Artificial Sequence: Synthetic oligonucleotide
guuccuuaucaguguaauu

SEQ ID NO: 2553657 - RNA, 19 nt, Artificial Sequence
  Description of Artificial Sequence: Synthetic oligonucleotide
caguuccucggauccugca

SEQ ID NO: 2553658 - RNA, 19 nt, Artificial Sequence
  Description of Artificial Sequence: Synthetic oligonucleotide
gguaaggaaguaggccaca

SEQ ID NO: 2553659 - RNA, 19 nt, Artificial Sequence
  Description of Artificial Sequence: Synthetic oligonucleotide
gagcccggaaucggggaga

SEQ ID NO: 2553660 - RNA, 19 nt, Artificial Sequence
  Description of Artificial Sequence: Synthetic oligonucleotide
agcgggccacccacacacc

SEQ ID NO: 2553661 - RNA, 19 nt, Artificial Sequence
  Description of Artificial Sequence: Synthetic oligonucleotide
cacacaccuggcucauuaa

SEQ ID NO: 2553662 - RNA, 19 nt, Artificial Sequence
  Description of Artificial Sequence: Synthetic oligonucleotide
ccggaaucggggagagcgg

SEQ ID NO: 2553663 - RNA, 19 nt, Artificial Sequence
  Description of Artificial Sequence: Synthetic oligonucleotide
gaggcgcugagcccggaau

SEQ ID NO: 2553664 - RNA, 19 nt, Artificial Sequence
  Description of Artificial Sequence: Synthetic oligonucleotide
ggaaucggggagagcgggc

SEQ ID NO: 2553665 - RNA, 19 nt, Artificial Sequence
  Description of Artificial Sequence: Synthetic oligonucleotide
cagcuguugguccucgggu

SEQ ID NO: 2553666 - RNA, 19 nt, Artificial Sequence
  Description of Artificial Sequence: Synthetic oligonucleotide
gcccaugacugaaacuuca

SEQ ID NO: 2553667 - RNA, 19 nt, Artificial Sequence
  Description of Artificial Sequence: Synthetic oligonucleotide
ucggggagagcgggccacc

SEQ ID NO: 2553668 - RNA, 19 nt, Artificial Sequence
  Description of Artificial Sequence: Synthetic oligonucleotide
guccgaaaugccucaugau

SEQ ID NO: 2553669 - RNA, 19 nt, Artificial Sequence
  Description of Artificial Sequence: Synthetic oligonucleotide
  modified_base (6)..(6): a, c, u, g, unknown or other
ccaggngguagcagagcuc

SEQ ID NO: 2553670 - RNA, 19 nt, Artificial Sequence
  Description of Artificial Sequence: Synthetic oligonucleotide
ggccuuugaaaggguugag

SEQ ID NO: 2553671 - RNA, 19 nt, Artificial Sequence
  Description of Artificial Sequence: Synthetic oligonucleotide
  modified_base (4)..(4): a, c, u, g, unknown or other
aggngguagcagagcucug

SEQ ID NO: 2553672 - RNA, 19 nt, Artificial Sequence
  Description of Artificial Sequence: Synthetic oligonucleotide
  modified_base (3)..(3): a, c, u, g, unknown or other
ggngguagcagagcucugu

SEQ ID NO: 2553673 - RNA, 19 nt, Artificial Sequence
  Description of Artificial Sequence: Synthetic oligonucleotide
ugcgguacucucgccucuu

SEQ ID NO: 2553674 - RNA, 19 nt, Artificial Sequence
  Description of Artificial Sequence: Synthetic oligonucleotide
gaggcccguauacacgguu

SEQ ID NO: 2553675 - RNA, 19 nt, Artificial Sequence
  Description of Artificial Sequence: Synthetic oligonucleotide
ccuguaucggcgacuucga

SEQ ID NO: 2553676 - RNA, 19 nt, Artificial Sequence
  Description of Artificial Sequence: Synthetic oligonucleotide
guggaccaguuuggagagc

SEQ ID NO: 2553677 - RNA, 19 nt, Artificial Sequence
  Description of Artificial Sequence: Synthetic oligonucleotide
gaucucgcuugcgccugga

SEQ ID NO: 2553678 - RNA, 19 nt, Artificial Sequence
  Description of Artificial Sequence: Synthetic oligonucleotide
cggaaucggggagagcggg

SEQ ID NO: 2553679 - RNA, 19 nt, Artificial Sequence
  Description of Artificial Sequence: Synthetic oligonucleotide
gcauggggagccaauaaau

SEQ ID NO: 2553680 - RNA, 19 nt, Artificial Sequence
  Description of Artificial Sequence: Synthetic oligonucleotide
ucgcuugcgccuggaguuu

SEQ ID NO: 2553681 - RNA, 19 nt, Artificial Sequence
  Description of Artificial Sequence: Synthetic oligonucleotide
caguguaauuguggggacu

SEQ ID NO: 2553682 - RNA, 19 nt, Artificial Sequence
  Description of Artificial Sequence: Synthetic oligonucleotide
gcccguauacacgguuggc

SEQ ID NO: 2553683 - RNA, 19 nt, Artificial Sequence
  Description of Artificial Sequence: Synthetic oligonucleotide
  modified_base (15)..(15): a, c, u, g, unknown or other
aguuagcauccaggnggua

SEQ ID NO: 2553684 - RNA, 19 nt, Artificial Sequence
  Description of Artificial Sequence: Synthetic oligonucleotide
gcgcugagcccggaaucgg

SEQ ID NO: 2553685 - RNA, 19 nt, Artificial Sequence
  Description of Artificial Sequence: Synthetic oligonucleotide
gucugagggaggcccguau

SEQ ID NO: 2553686 - RNA, 19 nt, Artificial Sequence
  Description of Artificial Sequence: Synthetic oligonucleotide
ggacuggucaucaguuccu

SEQ ID NO: 2553687 - RNA, 19 nt, Artificial Sequence
  Description of Artificial Sequence: Synthetic oligonucleotide
ccacagcuguugguccucg

SEQ ID NO: 2553688 - RNA, 19 nt, Artificial Sequence
  Description of Artificial Sequence: Synthetic oligonucleotide
gcgguacucucgccucuug

SEQ ID NO: 2553689 - RNA, 19 nt, Artificial Sequence
  Description of Artificial Sequence: Synthetic oligonucleotide
ccaagaggacuuaaugcuu

SEQ ID NO: 2553690 - RNA, 19 nt, Artificial Sequence
  Description of Artificial Sequence: Synthetic oligonucleotide
cggacaucaguucuucugu

SEQ ID NO: 2553691 - RNA, 19 nt, Artificial Sequence
  Description of Artificial Sequence: Synthetic oligonucleotide
cgaaaugccucaugauacu

SEQ ID NO: 2553692 - RNA, 19 nt, Artificial Sequence
  Description of Artificial Sequence: Synthetic oligonucleotide
guaggccacacaggcuccu

SEQ ID NO: 2553693 - RNA, 19 nt, Artificial Sequence
  Description of Artificial Sequence: Synthetic oligonucleotide
ccguauacacgguuggcuu

SEQ ID NO: 2553694 - RNA, 19 nt, Artificial Sequence
  Description of Artificial Sequence: Synthetic oligonucleotide
guugguccucggguccgaa

SEQ ID NO: 2553695 - RNA, 19 nt, Artificial Sequence
  Description of Artificial Sequence: Synthetic oligonucleotide
gccgugcuucgaguuagca

SEQ ID NO: 2553696 - RNA, 19 nt, Artificial Sequence
  Description of Artificial Sequence: Synthetic oligonucleotide
cgacuucgaaguuucuucu

SEQ ID NO: 2553697 - RNA, 19 nt, Artificial Sequence
  Description of Artificial Sequence: Synthetic oligonucleotide
ccguugaaucucuugucau

SEQ ID NO: 2553698 - RNA, 19 nt, Artificial Sequence
  Description of Artificial Sequence: Synthetic oligonucleotide
cccguauacacgguuggcu

SEQ ID NO: 2553699 - RNA, 19 nt, Artificial Sequence
  Description of Artificial Sequence: Synthetic oligonucleotide
ccucggguccgaaaugccu

SEQ ID NO: 2553700 - RNA, 19 nt, Artificial Sequence
  Description of Artificial Sequence: Synthetic oligonucleotide
ggagagcgggccacccaca

SEQ ID NO: 2553701 - RNA, 19 nt, Artificial Sequence
  Description of Artificial Sequence: Synthetic oligonucleotide
gcacauuguggaccaguuu

SEQ ID NO: 2553702 - RNA, 19 nt, Artificial Sequence
  Description of Artificial Sequence: Synthetic oligonucleotide
ccugcauggggagccaaua

SEQ ID NO: 2553703 - RNA, 19 nt, Artificial Sequence
  Description of Artificial Sequence: Synthetic oligonucleotide
gcgggccacccacacaccu

SEQ ID NO: 2553704 - RNA, 19 nt, Artificial Sequence
  Description of Artificial Sequence: Synthetic oligonucleotide
cguugaaucucuugucauu

SEQ ID NO: 2553705 - RNA, 19 nt, Artificial Sequence
  Description of Artificial Sequence: Synthetic oligonucleotide
cgccucuugguaaggaagu

SEQ ID NO: 2553706 - RNA, 19 nt, Artificial Sequence
  Description of Artificial Sequence: Synthetic oligonucleotide
ccgugcuucgaguuagcau

SEQ ID NO: 2553707 - RNA, 19 nt, Artificial Sequence
  Description of Artificial Sequence: Synthetic oligonucleotide
cggauccugcauggggagc

SEQ ID NO: 2553708 - RNA, 19 nt, Artificial Sequence
  Description of Artificial Sequence: Synthetic oligonucleotide
ccccugcucagaagagaaa

SEQ ID NO: 2553709 - RNA, 19 nt, Artificial Sequence
  Description of Artificial Sequence: Synthetic oligonucleotide
gugaggcgcugagcccgga

SEQ ID NO: 2553710 - RNA, 19 nt, Artificial Sequence
  Description of Artificial Sequence: Synthetic oligonucleotide
gcccggaaucggggagagc

SEQ ID NO: 2553711 - RNA, 19 nt, Artificial Sequence
  Description of Artificial Sequence: Synthetic oligonucleotide
ggaggcccguauacacggu

SEQ ID NO: 2553712 - RNA, 19 nt, Artificial Sequence
  Description of Artificial Sequence: Synthetic oligonucleotide
cggcgacuucgaaguuucu

SEQ ID NO: 2553713 - RNA, 19 nt, Artificial Sequence
  Description of Artificial Sequence: Synthetic oligonucleotide
cggguccgaaaugccucau

SEQ ID NO: 2553714 - RNA, 19 nt, Artificial Sequence
  Description of Artificial Sequence: Synthetic oligonucleotide
cgcuugcgccuggaguuuu

SEQ ID NO: 2553715 - RNA, 19 nt, Artificial Sequence
  Description of Artificial Sequence: Synthetic oligonucleotide
  modified_base (1)..(1): a, c, u, g, unknown or other
ngguagcagagcucuguga

SEQ ID NO: 2553716 - RNA, 19 nt, Artificial Sequence
  Description of Artificial Sequence: Synthetic oligonucleotide
aacaggaagagcuucgugg

SEQ ID NO: 2553717 - RNA, 19 nt, Artificial Sequence
  Description of Artificial Sequence: Synthetic oligonucleotide
aaguccggaaaacaggaag

SEQ ID NO: 2553718 - RNA, 19 nt, Artificial Sequence
  Description of Artificial Sequence: Synthetic oligonucleotide
acaggaagagcuucguggg

SEQ ID NO: 2553719 - RNA, 19 nt, Artificial Sequence
  Description of Artificial Sequence: Synthetic oligonucleotide
aaacaggaagagcuucgug

SEQ ID NO: 2553720 - RNA, 19 nt, Artificial Sequence
  Description of Artificial Sequence: Synthetic oligonucleotide
caggaaguccggaaaacag

SEQ ID NO: 2553721 - RNA, 19 nt, Artificial Sequence
  Description of Artificial Sequence: Synthetic oligonucleotide
augaccggagggugcagcc

SEQ ID NO: 2553722 - RNA, 19 nt, Artificial Sequence
  Description of Artificial Sequence: Synthetic oligonucleotide
aggaaguccggaaaacagg

SEQ ID NO: 2553723 - RNA, 19 nt, Artificial Sequence
  Description of Artificial Sequence: Synthetic oligonucleotide
aagagcuucguggguaccu

SEQ ID NO: 2553724 - RNA, 19 nt, Artificial Sequence
  Description of Artificial Sequence: Synthetic oligonucleotide
uccggaaaacaggaagagc

SEQ ID NO: 2553725 - RNA, 19 nt, Artificial Sequence
  Description of Artificial Sequence: Synthetic oligonucleotide
aguccggaaaacaggaaga

SEQ ID NO: 2553726 - RNA, 19 nt, Artificial Sequence
  Description of Artificial Sequence: Synthetic oligonucleotide
uacaggaaguccggaaaac

SEQ ID NO: 2553727 - RNA, 19 nt, Artificial Sequence
  Description of Artificial Sequence: Synthetic oligonucleotide
acaggaaguccggaaaaca

SEQ ID NO: 2553728 - RNA, 19 nt, Artificial Sequence
  Description of Artificial Sequence: Synthetic oligonucleotide
guccggaaaacaggaagag

SEQ ID NO: 2553729 - RNA, 19 nt, Artificial Sequence
  Description of Artificial Sequence: Synthetic oligonucleotide
gaccggagggugcagccgc

SEQ ID NO: 2553730 - RNA, 19 nt, Artificial Sequence
  Description of Artificial Sequence: Synthetic oligonucleotide
ggaaguccggaaaacagga

SEQ ID NO: 2553731 - RNA, 19 nt, Artificial Sequence
  Description of Artificial Sequence: Synthetic oligonucleotide
ugaccggagggugcagccg

SEQ ID NO: 2553732 - RNA, 19 nt, Artificial Sequence
  Description of Artificial Sequence: Synthetic oligonucleotide
ccggaaaacaggaagagcu

SEQ ID NO: 2553733 - RNA, 19 nt, Artificial Sequence
  Description of Artificial Sequence: Synthetic oligonucleotide
ggaagagcuucguggguac

SEQ ID NO: 2553734 - RNA, 19 nt, Artificial Sequence
  Description of Artificial Sequence: Synthetic oligonucleotide
gaagagcuucguggguacc

SEQ ID NO: 2553735 - RNA, 19 nt, Artificial Sequence
  Description of Artificial Sequence: Synthetic oligonucleotide
ggagggugcagccgcagac

SEQ ID NO: 2553736 - RNA, 19 nt, Artificial Sequence
  Description of Artificial Sequence: Synthetic oligonucleotide
gaaguccggaaaacaggaa

SEQ ID NO: 2553737 - RNA, 19 nt, Artificial Sequence
  Description of Artificial Sequence: Synthetic oligonucleotide
agagcuucguggguaccuu

SEQ ID NO: 2553738 - RNA, 19 nt, Artificial Sequence
  Description of Artificial Sequence: Synthetic oligonucleotide
agcuucguggguaccuuuu

SEQ ID NO: 2553739 - RNA, 19 nt, Artificial Sequence
  Description of Artificial Sequence: Synthetic oligonucleotide
caggaagagcuucgugggu

SEQ ID NO: 2553740 - RNA, 19 nt, Artificial Sequence
  Description of Artificial Sequence: Synthetic oligonucleotide
gagcuucguggguaccuuu

SEQ ID NO: 2553741 - RNA, 19 nt, Artificial Sequence
  Description of Artificial Sequence: Synthetic oligonucleotide
accggagggugcagccgca

SEQ ID NO: 2553742 - RNA, 19 nt, Artificial Sequence
  Description of Artificial Sequence: Synthetic oligonucleotide
ccggagggugcagccgcag

SEQ ID NO: 2553743 - RNA, 19 nt, Artificial Sequence
  Description of Artificial Sequence: Synthetic oligonucleotide
cggaaaacaggaagagcuu

SEQ ID NO: 2553744 - RNA, 19 nt, Artificial Sequence
  Description of Artificial Sequence: Synthetic oligonucleotide
cggagggugcagccgcaga

SEQ ID NO: 2553745 - RNA, 19 nt, Artificial Sequence
  Description of Artificial Sequence: Synthetic oligonucleotide
aaugaucacauuuagacac

SEQ ID NO: 2553746 - RNA, 19 nt, Artificial Sequence
  Description of Artificial Sequence: Synthetic oligonucleotide
ugaagaaaaggcuacaugg

SEQ ID NO: 2553747 - RNA, 19 nt, Artificial Sequence
  Description of Artificial Sequence: Synthetic oligonucleotide
aauucuuuuacaaaguaac

SEQ ID NO: 2553748 - RNA, 19 nt, Artificial Sequence
  Description of Artificial Sequence: Synthetic oligonucleotide
ucaaauucuuaaaaggugg

SEQ ID NO: 2553749 - RNA, 19 nt, Artificial Sequence
  Description of Artificial Sequence: Synthetic oligonucleotide
caaaugaucacauuuagac

SEQ ID NO: 2553750 - RNA, 19 nt, Artificial Sequence
  Description of Artificial Sequence: Synthetic oligonucleotide
agaucaaauucuuaaaagg

SEQ ID NO: 2553751 - RNA, 19 nt, Artificial Sequence
  Description of Artificial Sequence: Synthetic oligonucleotide
aaaguaacgaauuuccccu

SEQ ID NO: 2553752 - RNA, 19 nt, Artificial Sequence
  Description of Artificial Sequence: Synthetic oligonucleotide
uggucugugauccagaagc

SEQ ID NO: 2553753 - RNA, 19 nt, Artificial Sequence
  Description of Artificial Sequence: Synthetic oligonucleotide
aaugaaucucuccaagauc

SEQ ID NO: 2553754 - RNA, 19 nt, Artificial Sequence
  Description of Artificial Sequence: Synthetic oligonucleotide
auauuucucagcuugaaga

SEQ ID NO: 2553755 - RNA, 19 nt, Artificial Sequence
  Description of Artificial Sequence: Synthetic oligonucleotide
uaaaagguggaaaacuuug

SEQ ID NO: 2553756 - RNA, 19 nt, Artificial Sequence
  Description of Artificial Sequence: Synthetic oligonucleotide
agcauauugcucuuugagc

SEQ ID NO: 2553757 - RNA, 19 nt, Artificial Sequence
  Description of Artificial Sequence: Synthetic oligonucleotide
gaguauauuucucagcuug

SEQ ID NO: 2553758 - RNA, 19 nt, Artificial Sequence
  Description of Artificial Sequence: Synthetic oligonucleotide
gaaaaggcuacaugguugg

SEQ ID NO: 2553759 - RNA, 19 nt, Artificial Sequence
  Description of Artificial Sequence: Synthetic oligonucleotide
caaaguaacgaauuucccc

SEQ ID NO: 2553760 - RNA, 19 nt, Artificial Sequence
  Description of Artificial Sequence: Synthetic oligonucleotide
aaugaggugcgccgcaccc

SEQ ID NO: 2553761 - RNA, 19 nt, Artificial Sequence
  Description of Artificial Sequence: Synthetic oligonucleotide
cucagcuugaagaaaaggc

SEQ ID NO: 2553762 - RNA, 19 nt, Artificial Sequence
  Description of Artificial Sequence: Synthetic oligonucleotide
aaaugaucacauuuagaca

SEQ ID NO: 2553763 - RNA, 19 nt, Artificial Sequence
  Description of Artificial Sequence: Synthetic oligonucleotide
gaagauuugguggaaagcc

SEQ ID NO: 2553764 - RNA, 19 nt, Artificial Sequence
  Description of Artificial Sequence: Synthetic oligonucleotide
uugauaaugaggugcgccg

SEQ ID NO: 2553765 - RNA, 19 nt, Artificial Sequence
  Description of Artificial Sequence: Synthetic oligonucleotide
aaaagguggaaaacuuugc

SEQ ID NO: 2553766 - RNA, 19 nt, Artificial Sequence
  Description of Artificial Sequence: Synthetic oligonucleotide
agguggaaaacuuugcuag

SEQ ID NO: 2553767 - RNA, 19 nt, Artificial Sequence
  Description of Artificial Sequence: Synthetic oligonucleotide
caaguggucauuaaucacc

SEQ ID NO: 2553768 - RNA, 19 nt, Artificial Sequence
  Description of Artificial Sequence: Synthetic oligonucleotide
ucaccggacauuuaucugg

SEQ ID NO: 2553769 - RNA, 19 nt, Artificial Sequence
  Description of Artificial Sequence: Synthetic oligonucleotide
ucauuugucuccuggauca

SEQ ID NO: 2553770 - RNA, 19 nt, Artificial Sequence
  Description of Artificial Sequence: Synthetic oligonucleotide
acugaguauauuucucagc

SEQ ID NO: 2553771 - RNA, 19 nt, Artificial Sequence
  Description of Artificial Sequence: Synthetic oligonucleotide
ucuuugagccuuuccaugg

SEQ ID NO: 2553772 - RNA, 19 nt, Artificial Sequence
  Description of Artificial Sequence: Synthetic oligonucleotide
aaagguggaaaacuuugcu

SEQ ID NO: 2553773 - RNA, 19 nt, Artificial Sequence
  Description of Artificial Sequence: Synthetic oligonucleotide
ucacauuuagacacguaag

SEQ ID NO: 2553774 - RNA, 19 nt, Artificial Sequence
  Description of Artificial Sequence: Synthetic oligonucleotide
uauauuucucagcuugaag

SEQ ID NO: 2553775 - RNA, 19 nt, Artificial Sequence
  Description of Artificial Sequence: Synthetic oligonucleotide
auccuugauaaugaggugc

SEQ ID NO: 2553776 - RNA, 19 nt, Artificial Sequence
  Description of Artificial Sequence: Synthetic oligonucleotide
aagcacucucuuuucaccg

SEQ ID NO: 2553777 - RNA, 19 nt, Artificial Sequence
  Description of Artificial Sequence: Synthetic oligonucleotide
uugaaugaaucucuccaag

SEQ ID NO: 2553778 - RNA, 19 nt, Artificial Sequence
  Description of Artificial Sequence: Synthetic oligonucleotide
uccuugauaaugaggugcg

SEQ ID NO: 2553779 - RNA, 19 nt, Artificial Sequence
  Description of Artificial Sequence: Synthetic oligonucleotide
gaaguuucucucuucagac

SEQ ID NO: 2553780 - RNA, 19 nt, Artificial Sequence
  Description of Artificial Sequence: Synthetic oligonucleotide
ucuccaagauccuugauaa

SEQ ID NO: 2553781 - RNA, 19 nt, Artificial Sequence
  Description of Artificial Sequence: Synthetic oligonucleotide
ucuuaaaagguggaaaacu

SEQ ID NO: 2553782 - RNA, 19 nt, Artificial Sequence
  Description of Artificial Sequence: Synthetic oligonucleotide
ugucaaguggucauuaauc

SEQ ID NO: 2553783 - RNA, 19 nt, Artificial Sequence
  Description of Artificial Sequence: Synthetic oligonucleotide
cauuuagacacguaagcac

SEQ ID NO: 2553784 - RNA, 19 nt, Artificial Sequence
  Description of Artificial Sequence: Synthetic oligonucleotide
cucacuagcugucaagugg

SEQ ID NO: 2553785 - RNA, 19 nt, Artificial Sequence
  Description of Artificial Sequence: Synthetic oligonucleotide
uccaagauccuugauaaug

SEQ ID NO: 2553786 - RNA, 19 nt, Artificial Sequence
  Description of Artificial Sequence: Synthetic oligonucleotide
cucuucagaccuuagagug

SEQ ID NO: 2553787 - RNA, 19 nt, Artificial Sequence
  Description of Artificial Sequence: Synthetic oligonucleotide
cacauuuagacacguaagc

SEQ ID NO: 2553788 - RNA, 19 nt, Artificial Sequence
  Description of Artificial Sequence: Synthetic oligonucleotide
ucucuucuucaaaugauca

SEQ ID NO: 2553789 - RNA, 19 nt, Artificial Sequence
  Description of Artificial Sequence: Synthetic oligonucleotide
aucacauuuagacacguaa

SEQ ID NO: 2553790 - RNA, 19 nt, Artificial Sequence
  Description of Artificial Sequence: Synthetic oligonucleotide
caagaacucgcaauucucg

SEQ ID NO: 2553791 - RNA, 19 nt, Artificial Sequence
  Description of Artificial Sequence: Synthetic oligonucleotide
auucuuaaaagguggaaaa

SEQ ID NO: 2553792 - RNA, 19 nt, Artificial Sequence
  Description of Artificial Sequence: Synthetic oligonucleotide
ucaaaugaucacauuuaga

SEQ ID NO: 2553793 - RNA, 19 nt, Artificial Sequence
  Description of Artificial Sequence: Synthetic oligonucleotide
uuugcuagguccuucucca

SEQ ID NO: 2553794 - RNA, 19 nt, Artificial Sequence
  Description of Artificial Sequence: Synthetic oligonucleotide
aacucgcaauucucgaagg

SEQ ID NO: 2553795 - RNA, 19 nt, Artificial Sequence
  Description of Artificial Sequence: Synthetic oligonucleotide
aacgaauuuccccuugggu

SEQ ID NO: 2553796 - RNA, 19 nt, Artificial Sequence
  Description of Artificial Sequence: Synthetic oligonucleotide
cucucuucagaccuuagag

SEQ ID NO: 2553797 - RNA, 19 nt, Artificial Sequence
  Description of Artificial Sequence: Synthetic oligonucleotide
ugcuuucucauucaucugu

SEQ ID NO: 2553798 - RNA, 19 nt, Artificial Sequence
  Description of Artificial Sequence: Synthetic oligonucleotide
uguagaucaaauucuuaaa

SEQ ID NO: 2553799 - RNA, 19 nt, Artificial Sequence
  Description of Artificial Sequence: Synthetic oligonucleotide
agaaguuucucucuucaga

SEQ ID NO: 2553800 - RNA, 19 nt, Artificial Sequence
  Description of Artificial Sequence: Synthetic oligonucleotide
gaacucgcaauucucgaag

SEQ ID NO: 2553801 - RNA, 19 nt, Artificial Sequence
  Description of Artificial Sequence: Synthetic oligonucleotide
ugaaugaaucucuccaaga

SEQ ID NO: 2553802 - RNA, 19 nt, Artificial Sequence
  Description of Artificial Sequence: Synthetic oligonucleotide
uuucaccggacauuuaucu

SEQ ID NO: 2553803 - RNA, 19 nt, Artificial Sequence
  Description of Artificial Sequence: Synthetic oligonucleotide
uccauugcagcauauugcu

SEQ ID NO: 2553804 - RNA, 19 nt, Artificial Sequence
  Description of Artificial Sequence: Synthetic oligonucleotide
aagauccuugauaaugagg

SEQ ID NO: 2553805 - RNA, 19 nt, Artificial Sequence
  Description of Artificial Sequence: Synthetic oligonucleotide
caaguucucaagaacucgc

SEQ ID NO: 2553806 - RNA, 19 nt, Artificial Sequence
  Description of Artificial Sequence: Synthetic oligonucleotide
aagaaaaggcuacaugguu

SEQ ID NO: 2553807 - RNA, 19 nt, Artificial Sequence
  Description of Artificial Sequence: Synthetic oligonucleotide
uaacgaauuuccccuuggg

SEQ ID NO: 2553808 - RNA, 19 nt, Artificial Sequence
  Description of Artificial Sequence: Synthetic oligonucleotide
uaagcacucucuuuucacc

SEQ ID NO: 2553809 - RNA, 19 nt, Artificial Sequence
  Description of Artificial Sequence: Synthetic oligonucleotide
aaagccagugcuuucucau

SEQ ID NO: 2553810 - RNA, 19 nt, Artificial Sequence
  Description of Artificial Sequence: Synthetic oligonucleotide
acaaaguaacgaauuuccc

SEQ ID NO: 2553811 - RNA, 19 nt, Artificial Sequence
  Description of Artificial Sequence: Synthetic oligonucleotide
uuaaaagguggaaaacuuu

SEQ ID NO: 2553812 - RNA, 19 nt, Artificial Sequence
  Description of Artificial Sequence: Synthetic oligonucleotide
cuccauugcagcauauugc

SEQ ID NO: 2553813 - RNA, 19 nt, Artificial Sequence
  Description of Artificial Sequence: Synthetic oligonucleotide
aagaacucgcaauucucga

SEQ ID NO: 2553814 - RNA, 19 nt, Artificial Sequence
  Description of Artificial Sequence: Synthetic oligonucleotide
cuugauaaugaggugcgcc

SEQ ID NO: 2553815 - RNA, 19 nt, Artificial Sequence
  Description of Artificial Sequence: Synthetic oligonucleotide
caugcggucauuugucucc

SEQ ID NO: 2553816 - RNA, 19 nt, Artificial Sequence
  Description of Artificial Sequence: Synthetic oligonucleotide
gugcucgucauccacuucg

SEQ ID NO: 2553817 - RNA, 19 nt, Artificial Sequence
  Description of Artificial Sequence: Synthetic oligonucleotide
uucaaguucucaagaacuc

SEQ ID NO: 2553818 - RNA, 19 nt, Artificial Sequence
  Description of Artificial Sequence: Synthetic oligonucleotide
ucaagaacucgcaauucuc

SEQ ID NO: 2553819 - RNA, 19 nt, Artificial Sequence
  Description of Artificial Sequence: Synthetic oligonucleotide
ucuauuaucuucucuucuu

SEQ ID NO: 2553820 - RNA, 19 nt, Artificial Sequence
  Description of Artificial Sequence: Synthetic oligonucleotide
ggaaaacuuugcuaggucc

SEQ ID NO: 2553821 - RNA, 19 nt, Artificial Sequence
  Description of Artificial Sequence: Synthetic oligonucleotide
uuugucuccuggaucauau

SEQ ID NO: 2553822 - RNA, 19 nt, Artificial Sequence
  Description of Artificial Sequence: Synthetic oligonucleotide
guagaucaaauucuuaaaa

SEQ ID NO: 2553823 - RNA, 19 nt, Artificial Sequence
  Description of Artificial Sequence: Synthetic oligonucleotide
ucgcaauucucgaaggcca

SEQ ID NO: 2553824 - RNA, 19 nt, Artificial Sequence
  Description of Artificial Sequence: Synthetic oligonucleotide
aagguggaaaacuuugcua

SEQ ID NO: 2553825 - RNA, 19 nt, Artificial Sequence
  Description of Artificial Sequence: Synthetic oligonucleotide
cuuugcuagguccuucucc

SEQ ID NO: 2553826 - RNA, 19 nt, Artificial Sequence
  Description of Artificial Sequence: Synthetic oligonucleotide
agcgagucccgcuucuugc

SEQ ID NO: 2553827 - RNA, 19 nt, Artificial Sequence
  Description of Artificial Sequence: Synthetic oligonucleotide
uucucuucuucaaaugauc

SEQ ID NO: 2553828 - RNA, 19 nt, Artificial Sequence
  Description of Artificial Sequence: Synthetic oligonucleotide
ucacuagcugucaaguggu

SEQ ID NO: 2553829 - RNA, 19 nt, Artificial Sequence
  Description of Artificial Sequence: Synthetic oligonucleotide
ucucccugcauuugggaag

SEQ ID NO: 2553830 - RNA, 19 nt, Artificial Sequence
  Description of Artificial Sequence: Synthetic oligonucleotide
uucucaagaacucgcaauu

SEQ ID NO: 2553831 - RNA, 19 nt, Artificial Sequence
  Description of Artificial Sequence: Synthetic oligonucleotide
agugccacugaguauauuu

SEQ ID NO: 2553832 - RNA, 19 nt, Artificial Sequence
  Description of Artificial Sequence: Synthetic oligonucleotide
acgaauuuccccuugggua

SEQ ID NO: 2553833 - RNA, 19 nt, Artificial Sequence
  Description of Artificial Sequence: Synthetic oligonucleotide
uuaucuucucuucuucaaa

SEQ ID NO: 2553834 - RNA, 19 nt, Artificial Sequence
  Description of Artificial Sequence: Synthetic oligonucleotide
ucuucagaccuuagagugc

SEQ ID NO: 2553835 - RNA, 19 nt, Artificial Sequence
  Description of Artificial Sequence: Synthetic oligonucleotide
guaacgaauuuccccuugg

SEQ ID NO: 2553836 - RNA, 19 nt, Artificial Sequence
  Description of Artificial Sequence: Synthetic oligonucleotide
ucaaguggucauuaaucac

SEQ ID NO: 2553837 - RNA, 19 nt, Artificial Sequence
  Description of Artificial Sequence: Synthetic oligonucleotide
agaaaaggcuacaugguug

SEQ ID NO: 2553838 - RNA, 19 nt, Artificial Sequence
  Description of Artificial Sequence: Synthetic oligonucleotide
gaucaaauucuuaaaaggu

SEQ ID NO: 2553839 - RNA, 19 nt, Artificial Sequence
  Description of Artificial Sequence: Synthetic oligonucleotide
cagcauauugcucuuugag

SEQ ID NO: 2553840 - RNA, 19 nt, Artificial Sequence
  Description of Artificial Sequence: Synthetic oligonucleotide
aacuuugcuagguccuucu

SEQ ID NO: 2553841 - RNA, 19 nt, Artificial Sequence
  Description of Artificial Sequence: Synthetic oligonucleotide
auuuagacacguaagcacu

SEQ ID NO: 2553842 - RNA, 19 nt, Artificial Sequence
  Description of Artificial Sequence: Synthetic oligonucleotide
uuggugggaagauuuggug

SEQ ID NO: 2553843 - RNA, 19 nt, Artificial Sequence
  Description of Artificial Sequence: Synthetic oligonucleotide
gucaaguggucauuaauca

SEQ ID NO: 2553844 - RNA, 19 nt, Artificial Sequence
  Description of Artificial Sequence: Synthetic oligonucleotide
aaauucuuaaaagguggaa

SEQ ID NO: 2553845 - RNA, 19 nt, Artificial Sequence
  Description of Artificial Sequence: Synthetic oligonucleotide
cuguagaucaaauucuuaa

SEQ ID NO: 2553846 - RNA, 19 nt, Artificial Sequence
  Description of Artificial Sequence: Synthetic oligonucleotide
uggcuguucuuucaggaac

SEQ ID NO: 2553847 - RNA, 19 nt, Artificial Sequence
  Description of Artificial Sequence: Synthetic oligonucleotide
acauuuagacacguaagca

SEQ ID NO: 2553848 - RNA, 19 nt, Artificial Sequence
  Description of Artificial Sequence: Synthetic oligonucleotide
auuaucuucucuucuucaa

SEQ ID NO: 2553849 - RNA, 19 nt, Artificial Sequence
  Description of Artificial Sequence: Synthetic oligonucleotide
uugcaaucucugcagggcc

SEQ ID NO: 2553850 - RNA, 19 nt, Artificial Sequence
  Description of Artificial Sequence: Synthetic oligonucleotide
agcuugaagaaaaggcuac

SEQ ID NO: 2553851 - RNA, 19 nt, Artificial Sequence
  Description of Artificial Sequence: Synthetic oligonucleotide
agccagugcuuucucauuc

SEQ ID NO: 2553852 - RNA, 19 nt, Artificial Sequence
  Description of Artificial Sequence: Synthetic oligonucleotide
uuuagacacguaagcacuc

SEQ ID NO: 2553853 - RNA, 19 nt, Artificial Sequence
  Description of Artificial Sequence: Synthetic oligonucleotide
auuugggaagcaugcgguc

SEQ ID NO: 2553854 - RNA, 19 nt, Artificial Sequence
  Description of Artificial Sequence: Synthetic oligonucleotide
ugcuugcaaucucugcagg

SEQ ID NO: 2553855 - RNA, 19 nt, Artificial Sequence
  Description of Artificial Sequence: Synthetic oligonucleotide
aaacuuugcuagguccuuc

SEQ ID NO: 2553856 - RNA, 19 nt, Artificial Sequence
  Description of Artificial Sequence: Synthetic oligonucleotide
ucgucauccacuucggcuc

SEQ ID NO: 2553857 - RNA, 19 nt, Artificial Sequence
  Description of Artificial Sequence: Synthetic oligonucleotide
uucuuaaaagguggaaaac

SEQ ID NO: 2553858 - RNA, 19 nt, Artificial Sequence
  Description of Artificial Sequence: Synthetic oligonucleotide
aagcaugcggucauuuguc

SEQ ID NO: 2553859 - RNA, 19 nt, Artificial Sequence
  Description of Artificial Sequence: Synthetic oligonucleotide
cuucagaccuuagagugcc

SEQ ID NO: 2553860 - RNA, 19 nt, Artificial Sequence
  Description of Artificial Sequence: Synthetic oligonucleotide
uagagugccacugaguaua

SEQ ID NO: 2553861 - RNA, 19 nt, Artificial Sequence
  Description of Artificial Sequence: Synthetic oligonucleotide
uucucagcuugaagaaaag

SEQ ID NO: 2553862 - RNA, 19 nt, Artificial Sequence
  Description of Artificial Sequence: Synthetic oligonucleotide
ugaggugcgccgcacccgg

SEQ ID NO: 2553863 - RNA, 19 nt, Artificial Sequence
  Description of Artificial Sequence: Synthetic oligonucleotide
aucgucucccugcauuugg

SEQ ID NO: 2553864 - RNA, 19 nt, Artificial Sequence
  Description of Artificial Sequence: Synthetic oligonucleotide
cacugaguauauuucucag

SEQ ID NO: 2553865 - RNA, 19 nt, Artificial Sequence
  Description of Artificial Sequence: Synthetic oligonucleotide
aguaacgaauuuccccuug

SEQ ID NO: 2553866 - RNA, 19 nt, Artificial Sequence
  Description of Artificial Sequence: Synthetic oligonucleotide
auucaucugucccuguaga

SEQ ID NO: 2553867 - RNA, 19 nt, Artificial Sequence
  Description of Artificial Sequence: Synthetic oligonucleotide
uuuucaccggacauuuauc

SEQ ID NO: 2553868 - RNA, 19 nt, Artificial Sequence
  Description of Artificial Sequence: Synthetic oligonucleotide
uggaaaacuuugcuagguc

SEQ ID NO: 2553869 - RNA, 19 nt, Artificial Sequence
  Description of Artificial Sequence: Synthetic oligonucleotide
ugcagauggagucguuagc

SEQ ID NO: 2553870 - RNA, 19 nt, Artificial Sequence
  Description of Artificial Sequence: Synthetic oligonucleotide
uggucauuaaucaccuuuu

SEQ ID NO: 2553871 - RNA, 19 nt, Artificial Sequence
  Description of Artificial Sequence: Synthetic oligonucleotide
cuuagagugccacugagua

SEQ ID NO: 2553872 - RNA, 19 nt, Artificial Sequence
  Description of Artificial Sequence: Synthetic oligonucleotide
caucugucccuguagauca

SEQ ID NO: 2553873 - RNA, 19 nt, Artificial Sequence
  Description of Artificial Sequence: Synthetic oligonucleotide
ucuguuggagucugcagau

SEQ ID NO: 2553874 - RNA, 19 nt, Artificial Sequence
  Description of Artificial Sequence: Synthetic oligonucleotide
cucuucuucaaaugaucac

SEQ ID NO: 2553875 - RNA, 19 nt, Artificial Sequence
  Description of Artificial Sequence: Synthetic oligonucleotide
uuugagccuuuccauggcu

SEQ ID NO: 2553876 - RNA, 19 nt, Artificial Sequence
  Description of Artificial Sequence: Synthetic oligonucleotide
aagauuugguggaaagcca

SEQ ID NO: 2553877 - RNA, 19 nt, Artificial Sequence
  Description of Artificial Sequence: Synthetic oligonucleotide
gcauuugggaagcaugcgg

SEQ ID NO: 2553878 - RNA, 19 nt, Artificial Sequence
  Description of Artificial Sequence: Synthetic oligonucleotide
ucucuguuggagucugcag

SEQ ID NO: 2553879 - RNA, 19 nt, Artificial Sequence
  Description of Artificial Sequence: Synthetic oligonucleotide
cuucaaguucucaagaacu

SEQ ID NO: 2553880 - RNA, 19 nt, Artificial Sequence
  Description of Artificial Sequence: Synthetic oligonucleotide
uucaccggacauuuaucug

SEQ ID NO: 2553881 - RNA, 19 nt, Artificial Sequence
  Description of Artificial Sequence: Synthetic oligonucleotide
ugcauuugggaagcaugcg

SEQ ID NO: 2553882 - RNA, 19 nt, Artificial Sequence
  Description of Artificial Sequence: Synthetic oligonucleotide
uuugggaagcaugcgguca

SEQ ID NO: 2553883 - RNA, 19 nt, Artificial Sequence
  Description of Artificial Sequence: Synthetic oligonucleotide
agaagccuugaaugaaucu

SEQ ID NO: 2553884 - RNA, 19 nt, Artificial Sequence
  Description of Artificial Sequence: Synthetic oligonucleotide
aaguggucauuaaucaccu

SEQ ID NO: 2553885 - RNA, 19 nt, Artificial Sequence
  Description of Artificial Sequence: Synthetic oligonucleotide
uucggcucgguguuguggc

SEQ ID NO: 2553886 - RNA, 19 nt, Artificial Sequence
  Description of Artificial Sequence: Synthetic oligonucleotide
cucgcaauucucgaaggcc

SEQ ID NO: 2553887 - RNA, 19 nt, Artificial Sequence
  Description of Artificial Sequence: Synthetic oligonucleotide
agcacucucuuuucaccgg

SEQ ID NO: 2553888 - RNA, 19 nt, Artificial Sequence
  Description of Artificial Sequence: Synthetic oligonucleotide
cuggaucauauucuucaag

SEQ ID NO: 2553889 - RNA, 19 nt, Artificial Sequence
  Description of Artificial Sequence: Synthetic oligonucleotide
ucugugcucgucauccacu

SEQ ID NO: 2553890 - RNA, 19 nt, Artificial Sequence
  Description of Artificial Sequence: Synthetic oligonucleotide
uucucacuagcugucaagu

SEQ ID NO: 2553891 - RNA, 19 nt, Artificial Sequence
  Description of Artificial Sequence: Synthetic oligonucleotide
gauccuugauaaugaggug

SEQ ID NO: 2553892 - RNA, 19 nt, Artificial Sequence
  Description of Artificial Sequence: Synthetic oligonucleotide
cuucucacuagcugucaag

SEQ ID NO: 2553893 - RNA, 19 nt, Artificial Sequence
  Description of Artificial Sequence: Synthetic oligonucleotide
gaaugaaucucuccaagau

SEQ ID NO: 2553894 - RNA, 19 nt, Artificial Sequence
  Description of Artificial Sequence: Synthetic oligonucleotide
cucuuugagccuuuccaug

SEQ ID NO: 2553895 - RNA, 19 nt, Artificial Sequence
  Description of Artificial Sequence: Synthetic oligonucleotide
cugaguauauuucucagcu

SEQ ID NO: 2553896 - RNA, 19 nt, Artificial Sequence
  Description of Artificial Sequence: Synthetic oligonucleotide
ucucacuagcugucaagug

SEQ ID NO: 2553897 - RNA, 19 nt, Artificial Sequence
  Description of Artificial Sequence: Synthetic oligonucleotide
uuaucuggcuccagaaguu

SEQ ID NO: 2553898 - RNA, 19 nt, Artificial Sequence
  Description of Artificial Sequence: Synthetic oligonucleotide
uuccauggcucuucugugc

SEQ ID NO: 2553899 - RNA, 19 nt, Artificial Sequence
  Description of Artificial Sequence: Synthetic oligonucleotide
uccguucuuguucucucug

SEQ ID NO: 2553900 - RNA, 19 nt, Artificial Sequence
  Description of Artificial Sequence: Synthetic oligonucleotide
ugauaaugaggugcgccgc

SEQ ID NO: 2553901 - RNA, 19 nt, Artificial Sequence
  Description of Artificial Sequence: Synthetic oligonucleotide
cugcagauggagucguuag

SEQ ID NO: 2553902 - RNA, 19 nt, Artificial Sequence
  Description of Artificial Sequence: Synthetic oligonucleotide
ugcucgucauccacuucgg

SEQ ID NO: 2553903 - RNA, 19 nt, Artificial Sequence
  Description of Artificial Sequence: Synthetic oligonucleotide
ucgucucccugcauuuggg

SEQ ID NO: 2553904 - RNA, 19 nt, Artificial Sequence
  Description of Artificial Sequence: Synthetic oligonucleotide
cuuguucucucuguuggag

SEQ ID NO: 2553905 - RNA, 19 nt, Artificial Sequence
  Description of Artificial Sequence: Synthetic oligonucleotide
cugcuugcaaucucugcag

SEQ ID NO: 2553906 - RNA, 19 nt, Artificial Sequence
  Description of Artificial Sequence: Synthetic oligonucleotide
agaccuuagagugccacug

SEQ ID NO: 2553907 - RNA, 19 nt, Artificial Sequence
  Description of Artificial Sequence: Synthetic oligonucleotide
cauggcucuucugugcucg

SEQ ID NO: 2553908 - RNA, 19 nt, Artificial Sequence
  Description of Artificial Sequence: Synthetic oligonucleotide
uucucgaaggccacguuuu

SEQ ID NO: 2553909 - RNA, 19 nt, Artificial Sequence
  Description of Artificial Sequence: Synthetic oligonucleotide
cauugcagcauauugcucu

SEQ ID NO: 2553910 - RNA, 19 nt, Artificial Sequence
  Description of Artificial Sequence: Synthetic oligonucleotide
auuugguggaaagccagug

SEQ ID NO: 2553911 - RNA, 19 nt, Artificial Sequence
  Description of Artificial Sequence: Synthetic oligonucleotide
uccaggccauccugcaucg

SEQ ID NO: 2553912 - RNA, 19 nt, Artificial Sequence
  Description of Artificial Sequence: Synthetic oligonucleotide
ugagccuuuccauggcucu

SEQ ID NO: 2553913 - RNA, 19 nt, Artificial Sequence
  Description of Artificial Sequence: Synthetic oligonucleotide
uaacuggucugugauccag

SEQ ID NO: 2553914 - RNA, 19 nt, Artificial Sequence
  Description of Artificial Sequence: Synthetic oligonucleotide
uccauggcucuucugugcu

SEQ ID NO: 2553915 - RNA, 19 nt, Artificial Sequence
  Description of Artificial Sequence: Synthetic oligonucleotide
aggaacuccucccacugga

SEQ ID NO: 2553916 - RNA, 19 nt, Artificial Sequence
  Description of Artificial Sequence: Synthetic oligonucleotide
acguaagcacucucuuuuc

SEQ ID NO: 2553917 - RNA, 19 nt, Artificial Sequence
  Description of Artificial Sequence: Synthetic oligonucleotide
uacaugguuggugggaaga

SEQ ID NO: 2553918 - RNA, 19 nt, Artificial Sequence
  Description of Artificial Sequence: Synthetic oligonucleotide
uuggguaacuggucuguga

SEQ ID NO: 2553919 - RNA, 19 nt, Artificial Sequence
  Description of Artificial Sequence: Synthetic oligonucleotide
ucaucugucccuguagauc

SEQ ID NO: 2553920 - RNA, 19 nt, Artificial Sequence
  Description of Artificial Sequence: Synthetic oligonucleotide
uucaggaacuccucccacu

SEQ ID NO: 2553921 - RNA, 19 nt, Artificial Sequence
  Description of Artificial Sequence: Synthetic oligonucleotide
uaaugaggugcgccgcacc

SEQ ID NO: 2553922 - RNA, 19 nt, Artificial Sequence
  Description of Artificial Sequence: Synthetic oligonucleotide
gaagcaugcggucauuugu

SEQ ID NO: 2553923 - RNA, 19 nt, Artificial Sequence
  Description of Artificial Sequence: Synthetic oligonucleotide
gguggaaaacuuugcuagg

SEQ ID NO: 2553924 - RNA, 19 nt, Artificial Sequence
  Description of Artificial Sequence: Synthetic oligonucleotide
cucccacuggagcagacgc

SEQ ID NO: 2553925 - RNA, 19 nt, Artificial Sequence
  Description of Artificial Sequence: Synthetic oligonucleotide
uuuuccguucuuguucucu

SEQ ID NO: 2553926 - RNA, 19 nt, Artificial Sequence
  Description of Artificial Sequence: Synthetic oligonucleotide
gauaaugaggugcgccgca

SEQ ID NO: 2553927 - RNA, 19 nt, Artificial Sequence
  Description of Artificial Sequence: Synthetic oligonucleotide
ucgguguuguggcuguucu

SEQ ID NO: 2553928 - RNA, 19 nt, Artificial Sequence
  Description of Artificial Sequence: Synthetic oligonucleotide
ugcaaucucugcagggccu

SEQ ID NO: 2553929 - RNA, 19 nt, Artificial Sequence
  Description of Artificial Sequence: Synthetic oligonucleotide
auaaugaggugcgccgcac

SEQ ID NO: 2553930 - RNA, 19 nt, Artificial Sequence
  Description of Artificial Sequence: Synthetic oligonucleotide
ugcaucgucucccugcauu

SEQ ID NO: 2553931 - RNA, 19 nt, Artificial Sequence
  Description of Artificial Sequence: Synthetic oligonucleotide
gggaagauuugguggaaag

SEQ ID NO: 2553932 - RNA, 19 nt, Artificial Sequence
  Description of Artificial Sequence: Synthetic oligonucleotide
uuuccguucuuguucucuc

SEQ ID NO: 2553933 - RNA, 19 nt, Artificial Sequence
  Description of Artificial Sequence: Synthetic oligonucleotide
agaacucgcaauucucgaa

SEQ ID NO: 2553934 - RNA, 19 nt, Artificial Sequence
  Description of Artificial Sequence: Synthetic oligonucleotide
ugaaucucuccaagauccu

SEQ ID NO: 2553935 - RNA, 19 nt, Artificial Sequence
  Description of Artificial Sequence: Synthetic oligonucleotide
ucuuguucucucuguugga

SEQ ID NO: 2553936 - RNA, 19 nt, Artificial Sequence
  Description of Artificial Sequence: Synthetic oligonucleotide
ucuucucacuagcugucaa

SEQ ID NO: 2553937 - RNA, 19 nt, Artificial Sequence
  Description of Artificial Sequence: Synthetic oligonucleotide
cagaaguuucucucuucag

SEQ ID NO: 2553938 - RNA, 19 nt, Artificial Sequence
  Description of Artificial Sequence: Synthetic oligonucleotide
uggaaagccagugcuuucu

SEQ ID NO: 2553939 - RNA, 19 nt, Artificial Sequence
  Description of Artificial Sequence: Synthetic oligonucleotide
cuuugagccuuuccauggc

SEQ ID NO: 2553940 - RNA, 19 nt, Artificial Sequence
  Description of Artificial Sequence: Synthetic oligonucleotide
acuuugcuagguccuucuc

SEQ ID NO: 2553941 - RNA, 19 nt, Artificial Sequence
  Description of Artificial Sequence: Synthetic oligonucleotide
aaguucucaagaacucgca

SEQ ID NO: 2553942 - RNA, 19 nt, Artificial Sequence
  Description of Artificial Sequence: Synthetic oligonucleotide
auucucgaaggccacguuu

SEQ ID NO: 2553943 - RNA, 19 nt, Artificial Sequence
  Description of Artificial Sequence: Synthetic oligonucleotide
uugagccuuuccauggcuc

SEQ ID NO: 2553944 - RNA, 19 nt, Artificial Sequence
  Description of Artificial Sequence: Synthetic oligonucleotide
ucguuagcugcuugcaauc

SEQ ID NO: 2553945 - RNA, 19 nt, Artificial Sequence
  Description of Artificial Sequence: Synthetic oligonucleotide
cauuuaucuggcuccagaa

SEQ ID NO: 2553946 - RNA, 19 nt, Artificial Sequence
  Description of Artificial Sequence: Synthetic oligonucleotide
gaaagccagugcuuucuca

SEQ ID NO: 2553947 - RNA, 19 nt, Artificial Sequence
  Description of Artificial Sequence: Synthetic oligonucleotide
uuagacacguaagcacucu

SEQ ID NO: 2553948 - RNA, 19 nt, Artificial Sequence
  Description of Artificial Sequence: Synthetic oligonucleotide
agcagacgccucuucucac

SEQ ID NO: 2553949 - RNA, 19 nt, Artificial Sequence
  Description of Artificial Sequence: Synthetic oligonucleotide
cucuguuggagucugcaga

SEQ ID NO: 2553950 - RNA, 19 nt, Artificial Sequence
  Description of Artificial Sequence: Synthetic oligonucleotide
aaguaacgaauuuccccuu

SEQ ID NO: 2553951 - RNA, 19 nt, Artificial Sequence
  Description of Artificial Sequence: Synthetic oligonucleotide
uuagagugccacugaguau

SEQ ID NO: 2553952 - RNA, 19 nt, Artificial Sequence
  Description of Artificial Sequence: Synthetic oligonucleotide
agucccgcuucuugccgcc

SEQ ID NO: 2553953 - RNA, 19 nt, Artificial Sequence
  Description of Artificial Sequence: Synthetic oligonucleotide
acucucuuuucaccggaca

SEQ ID NO: 2553954 - RNA, 19 nt, Artificial Sequence
  Description of Artificial Sequence: Synthetic oligonucleotide
uccacuucggcucgguguu

SEQ ID NO: 2553955 - RNA, 19 nt, Artificial Sequence
  Description of Artificial Sequence: Synthetic oligonucleotide
ucagaccuuagagugccac

SEQ ID NO: 2553956 - RNA, 19 nt, Artificial Sequence
  Description of Artificial Sequence: Synthetic oligonucleotide
aaaacuuugcuagguccuu

SEQ ID NO: 2553957 - RNA, 19 nt, Artificial Sequence
  Description of Artificial Sequence: Synthetic oligonucleotide
aucucuccaagauccuuga

SEQ ID NO: 2553958 - RNA, 19 nt, Artificial Sequence
  Description of Artificial Sequence: Synthetic oligonucleotide
caccggacauuuaucuggc

SEQ ID NO: 2553959 - RNA, 19 nt, Artificial Sequence
  Description of Artificial Sequence: Synthetic oligonucleotide
cagaagccuugaaugaauc

SEQ ID NO: 2553960 - RNA, 19 nt, Artificial Sequence
  Description of Artificial Sequence: Synthetic oligonucleotide
uucaucugucccuguagau

SEQ ID NO: 2553961 - RNA, 19 nt, Artificial Sequence
  Description of Artificial Sequence: Synthetic oligonucleotide
gaaaacuuugcuagguccu

SEQ ID NO: 2553962 - RNA, 19 nt, Artificial Sequence
  Description of Artificial Sequence: Synthetic oligonucleotide
aguauauuucucagcuuga

SEQ ID NO: 2553963 - RNA, 19 nt, Artificial Sequence
  Description of Artificial Sequence: Synthetic oligonucleotide
gguccuucuccauugcagc

SEQ ID NO: 2553964 - RNA, 19 nt, Artificial Sequence
  Description of Artificial Sequence: Synthetic oligonucleotide
ugaguauauuucucagcuu

SEQ ID NO: 2553965 - RNA, 19 nt, Artificial Sequence
  Description of Artificial Sequence: Synthetic oligonucleotide
uagacacguaagcacucuc

SEQ ID NO: 2553966 - RNA, 19 nt, Artificial Sequence
  Description of Artificial Sequence: Synthetic oligonucleotide
uugggaagcaugcggucau

SEQ ID NO: 2553967 - RNA, 19 nt, Artificial Sequence
  Description of Artificial Sequence: Synthetic oligonucleotide
ugucccuguagaucaaauu

SEQ ID NO: 2553968 - RNA, 19 nt, Artificial Sequence
  Description of Artificial Sequence: Synthetic oligonucleotide
uagguccuucuccauugca

SEQ ID NO: 2553969 - RNA, 19 nt, Artificial Sequence
  Description of Artificial Sequence: Synthetic oligonucleotide
uucucucuguuggagucug

SEQ ID NO: 2553970 - RNA, 19 nt, Artificial Sequence
  Description of Artificial Sequence: Synthetic oligonucleotide
ucucaagaacucgcaauuc

SEQ ID NO: 2553971 - RNA, 19 nt, Artificial Sequence
  Description of Artificial Sequence: Synthetic oligonucleotide
ggaagauuugguggaaagc

SEQ ID NO: 2553972 - RNA, 19 nt, Artificial Sequence
  Description of Artificial Sequence: Synthetic oligonucleotide
acuagcugucaagugguca

SEQ ID NO: 2553973 - RNA, 19 nt, Artificial Sequence
  Description of Artificial Sequence: Synthetic oligonucleotide
gcugcuugcaaucucugca

SEQ ID NO: 2553974 - RNA, 19 nt, Artificial Sequence
  Description of Artificial Sequence: Synthetic oligonucleotide
aauucucgaaggccacguu

SEQ ID NO: 2553975 - RNA, 19 nt, Artificial Sequence
  Description of Artificial Sequence: Synthetic oligonucleotide
gguuggugggaagauuugg

SEQ ID NO: 2553976 - RNA, 19 nt, Artificial Sequence
  Description of Artificial Sequence: Synthetic oligonucleotide
uggagucguuagcugcuug

SEQ ID NO: 2553977 - RNA, 19 nt, Artificial Sequence
  Description of Artificial Sequence: Synthetic oligonucleotide
ccugcauuugggaagcaug

SEQ ID NO: 2553978 - RNA, 19 nt, Artificial Sequence
  Description of Artificial Sequence: Synthetic oligonucleotide
guuagcugcuugcaaucuc

SEQ ID NO: 2553979 - RNA, 19 nt, Artificial Sequence
  Description of Artificial Sequence: Synthetic oligonucleotide
ggagucguuagcugcuugc

SEQ ID NO: 2553980 - RNA, 19 nt, Artificial Sequence
  Description of Artificial Sequence: Synthetic oligonucleotide
agcaugcggucauuugucu

SEQ ID NO: 2553981 - RNA, 19 nt, Artificial Sequence
  Description of Artificial Sequence: Synthetic oligonucleotide
ucccacuggagcagacgcc

SEQ ID NO: 2553982 - RNA, 19 nt, Artificial Sequence
  Description of Artificial Sequence: Synthetic oligonucleotide
cucuccaagauccuugaua

SEQ ID NO: 2553983 - RNA, 19 nt, Artificial Sequence
  Description of Artificial Sequence: Synthetic oligonucleotide
ucucuuuucaccggacauu

SEQ ID NO: 2553984 - RNA, 19 nt, Artificial Sequence
  Description of Artificial Sequence: Synthetic oligonucleotide
ugcuagguccuucuccauu

SEQ ID NO: 2553985 - RNA, 19 nt, Artificial Sequence
  Description of Artificial Sequence: Synthetic oligonucleotide
cuacaugguuggugggaag

SEQ ID NO: 2553986 - RNA, 19 nt, Artificial Sequence
  Description of Artificial Sequence: Synthetic oligonucleotide
cggacauuuaucuggcucc

SEQ ID NO: 2553987 - RNA, 19 nt, Artificial Sequence
  Description of Artificial Sequence: Synthetic oligonucleotide
ucugcagauggagucguua

SEQ ID NO: 2553988 - RNA, 19 nt, Artificial Sequence
  Description of Artificial Sequence: Synthetic oligonucleotide
cuucggcucgguguugugg

SEQ ID NO: 2553989 - RNA, 19 nt, Artificial Sequence
  Description of Artificial Sequence: Synthetic oligonucleotide
gcggucauuugucuccugg

SEQ ID NO: 2553990 - RNA, 19 nt, Artificial Sequence
  Description of Artificial Sequence: Synthetic oligonucleotide
agacacguaagcacucucu

SEQ ID NO: 2553991 - RNA, 19 nt, Artificial Sequence
  Description of Artificial Sequence: Synthetic oligonucleotide
ugugauccagaagccuuga

SEQ ID NO: 2553992 - RNA, 19 nt, Artificial Sequence
  Description of Artificial Sequence: Synthetic oligonucleotide
ucucuucuauuaucuucuc

SEQ ID NO: 2553993 - RNA, 19 nt, Artificial Sequence
  Description of Artificial Sequence: Synthetic oligonucleotide
guggucauuaaucaccuuu

SEQ ID NO: 2553994 - RNA, 19 nt, Artificial Sequence
  Description of Artificial Sequence: Synthetic oligonucleotide
cauuugggaagcaugcggu

SEQ ID NO: 2553995 - RNA, 19 nt, Artificial Sequence
  Description of Artificial Sequence: Synthetic oligonucleotide
gagucccgcuucuugccgc

SEQ ID NO: 2553996 - RNA, 19 nt, Artificial Sequence
  Description of Artificial Sequence: Synthetic oligonucleotide
augguuggugggaagauuu

SEQ ID NO: 2553997 - RNA, 19 nt, Artificial Sequence
  Description of Artificial Sequence: Synthetic oligonucleotide
agucguuagcugcuugcaa

SEQ ID NO: 2553998 - RNA, 19 nt, Artificial Sequence
  Description of Artificial Sequence: Synthetic oligonucleotide
gacauuuaucuggcuccag

SEQ ID NO: 2553999 - RNA, 19 nt, Artificial Sequence
  Description of Artificial Sequence: Synthetic oligonucleotide
auugcagcauauugcucuu

SEQ ID NO: 2554000 - RNA, 19 nt, Artificial Sequence
  Description of Artificial Sequence: Synthetic oligonucleotide
cuuuucaccggacauuuau

SEQ ID NO: 2554001 - RNA, 19 nt, Artificial Sequence
  Description of Artificial Sequence: Synthetic oligonucleotide
aggcuacaugguugguggg

SEQ ID NO: 2554002 - RNA, 19 nt, Artificial Sequence
  Description of Artificial Sequence: Synthetic oligonucleotide
ggaagcaugcggucauuug

SEQ ID NO: 2554003 - RNA, 19 nt, Artificial Sequence
  Description of Artificial Sequence: Synthetic oligonucleotide
acacguaagcacucucuuu

SEQ ID NO: 2554004 - RNA, 19 nt, Artificial Sequence
  Description of Artificial Sequence: Synthetic oligonucleotide
cagugcuuucucauucauc

SEQ ID NO: 2554005 - RNA, 19 nt, Artificial Sequence
  Description of Artificial Sequence: Synthetic oligonucleotide
aggugcgccgcacccggcg

SEQ ID NO: 2554006 - RNA, 19 nt, Artificial Sequence
  Description of Artificial Sequence: Synthetic oligonucleotide
aaaaggcuacaugguuggu

SEQ ID NO: 2554007 - RNA, 19 nt, Artificial Sequence
  Description of Artificial Sequence: Synthetic oligonucleotide
ccaagauccuugauaauga

SEQ ID NO: 2554008 - RNA, 19 nt, Artificial Sequence
  Description of Artificial Sequence: Synthetic oligonucleotide
caggaacuccucccacugg

SEQ ID NO: 2554009 - RNA, 19 nt, Artificial Sequence
  Description of Artificial Sequence: Synthetic oligonucleotide
aauuuccccuuggguaacu

SEQ ID NO: 2554010 - RNA, 19 nt, Artificial Sequence
  Description of Artificial Sequence: Synthetic oligonucleotide
cucaagaacucgcaauucu

SEQ ID NO: 2554011 - RNA, 19 nt, Artificial Sequence
  Description of Artificial Sequence: Synthetic oligonucleotide
uccuccaggccauccugca

SEQ ID NO: 2554012 - RNA, 19 nt, Artificial Sequence
  Description of Artificial Sequence: Synthetic oligonucleotide
cuggucugugauccagaag

SEQ ID NO: 2554013 - RNA, 19 nt, Artificial Sequence
  Description of Artificial Sequence: Synthetic oligonucleotide
guauauuucucagcuugaa

SEQ ID NO: 2554014 - RNA, 19 nt, Artificial Sequence
  Description of Artificial Sequence: Synthetic oligonucleotide
aaucucugcagggccuccu

SEQ ID NO: 2554015 - RNA, 19 nt, Artificial Sequence
  Description of Artificial Sequence: Synthetic oligonucleotide
ugguggaaagccagugcuu

SEQ ID NO: 2554016 - RNA, 19 nt, Artificial Sequence
  Description of Artificial Sequence: Synthetic oligonucleotide
caggccauccugcaucguc

SEQ ID NO: 2554017 - RNA, 19 nt, Artificial Sequence
  Description of Artificial Sequence: Synthetic oligonucleotide
cucgucauccacuucggcu

SEQ ID NO: 2554018 - RNA, 19 nt, Artificial Sequence
  Description of Artificial Sequence: Synthetic oligonucleotide
ucuuuucaccggacauuua

SEQ ID NO: 2554019 - RNA, 19 nt, Artificial Sequence
  Description of Artificial Sequence: Synthetic oligonucleotide
ucucucuguuggagucugc

SEQ ID NO: 2554020 - RNA, 19 nt, Artificial Sequence
  Description of Artificial Sequence: Synthetic oligonucleotide
augaggugcgccgcacccg

SEQ ID NO: 2554021 - RNA, 19 nt, Artificial Sequence
  Description of Artificial Sequence: Synthetic oligonucleotide
cacucucuuuucaccggac

SEQ ID NO: 2554022 - RNA, 19 nt, Artificial Sequence
  Description of Artificial Sequence: Synthetic oligonucleotide
gucguuagcugcuugcaau

SEQ ID NO: 2554023 - RNA, 19 nt, Artificial Sequence
  Description of Artificial Sequence: Synthetic oligonucleotide
cuagcugucaaguggucau

SEQ ID NO: 2554024 - RNA, 19 nt, Artificial Sequence
  Description of Artificial Sequence: Synthetic oligonucleotide
uucagaccuuagagugcca

SEQ ID NO: 2554025 - RNA, 19 nt, Artificial Sequence
  Description of Artificial Sequence: Synthetic oligonucleotide
gucucccugcauuugggaa

SEQ ID NO: 2554026 - RNA, 19 nt, Artificial Sequence
  Description of Artificial Sequence: Synthetic oligonucleotide
uaucuggcuccagaaguuu

SEQ ID NO: 2554027 - RNA, 19 nt, Artificial Sequence
  Description of Artificial Sequence: Synthetic oligonucleotide
gauggagucguuagcugcu

SEQ ID NO: 2554028 - RNA, 19 nt, Artificial Sequence
  Description of Artificial Sequence: Synthetic oligonucleotide
ucucuccaagauccuugau

SEQ ID NO: 2554029 - RNA, 19 nt, Artificial Sequence
  Description of Artificial Sequence: Synthetic oligonucleotide
cuuggguaacuggucugug

SEQ ID NO: 2554030 - RNA, 19 nt, Artificial Sequence
  Description of Artificial Sequence: Synthetic oligonucleotide
ucugucccuguagaucaaa

SEQ ID NO: 2554031 - RNA, 19 nt, Artificial Sequence
  Description of Artificial Sequence: Synthetic oligonucleotide
cacguaagcacucucuuuu

SEQ ID NO: 2554032 - RNA, 19 nt, Artificial Sequence
  Description of Artificial Sequence: Synthetic oligonucleotide
guaacuggucugugaucca

SEQ ID NO: 2554033 - RNA, 19 nt, Artificial Sequence
  Description of Artificial Sequence: Synthetic oligonucleotide
guggcuguucuuucaggaa

SEQ ID NO: 2554034 - RNA, 19 nt, Artificial Sequence
  Description of Artificial Sequence: Synthetic oligonucleotide
guggaaaacuuugcuaggu

SEQ ID NO: 2554035 - RNA, 19 nt, Artificial Sequence
  Description of Artificial Sequence: Synthetic oligonucleotide
ccggacauuuaucuggcuc

SEQ ID NO: 2554036 - RNA, 19 nt, Artificial Sequence
  Description of Artificial Sequence: Synthetic oligonucleotide
gcaauucucgaaggccacg

SEQ ID NO: 2554037 - RNA, 19 nt, Artificial Sequence
  Description of Artificial Sequence: Synthetic oligonucleotide
ccacugaguauauuucuca

SEQ ID NO: 2554038 - RNA, 19 nt, Artificial Sequence
  Description of Artificial Sequence: Synthetic oligonucleotide
guuggugggaagauuuggu

SEQ ID NO: 2554039 - RNA, 19 nt, Artificial Sequence
  Description of Artificial Sequence: Synthetic oligonucleotide
cagcgagucccgcuucuug

SEQ ID NO: 2554040 - RNA, 19 nt, Artificial Sequence
  Description of Artificial Sequence: Synthetic oligonucleotide
uccccagcgagucccgcuu

SEQ ID NO: 2554041 - RNA, 19 nt, Artificial Sequence
  Description of Artificial Sequence: Synthetic oligonucleotide
gauuugguggaaagccagu

SEQ ID NO: 2554042 - RNA, 19 nt, Artificial Sequence
  Description of Artificial Sequence: Synthetic oligonucleotide
cuugaagaaaaggcuacau

SEQ ID NO: 2554043 - RNA, 19 nt, Artificial Sequence
  Description of Artificial Sequence: Synthetic oligonucleotide
cauccacuucggcucggug

SEQ ID NO: 2554044 - RNA, 19 nt, Artificial Sequence
  Description of Artificial Sequence: Synthetic oligonucleotide
cacuagcugucaagugguc

SEQ ID NO: 2554045 - RNA, 19 nt, Artificial Sequence
  Description of Artificial Sequence: Synthetic oligonucleotide
acuucggcucgguguugug

SEQ ID NO: 2554046 - RNA, 19 nt, Artificial Sequence
  Description of Artificial Sequence: Synthetic oligonucleotide
gcacccggcguccccagcg

SEQ ID NO: 2554047 - RNA, 19 nt, Artificial Sequence
  Description of Artificial Sequence: Synthetic oligonucleotide
ucauccacuucggcucggu

SEQ ID NO: 2554048 - RNA, 19 nt, Artificial Sequence
  Description of Artificial Sequence: Synthetic oligonucleotide
gaucacauuuagacacgua

SEQ ID NO: 2554049 - RNA, 19 nt, Artificial Sequence
  Description of Artificial Sequence: Synthetic oligonucleotide
accggacauuuaucuggcu

SEQ ID NO: 2554050 - RNA, 19 nt, Artificial Sequence
  Description of Artificial Sequence: Synthetic oligonucleotide
agcugucaaguggucauua

SEQ ID NO: 2554051 - RNA, 19 nt, Artificial Sequence
  Description of Artificial Sequence: Synthetic oligonucleotide
caaucucugcagggccucc

SEQ ID NO: 2554052 - RNA, 19 nt, Artificial Sequence
  Description of Artificial Sequence: Synthetic oligonucleotide
gcagcauauugcucuuuga

SEQ ID NO: 2554053 - RNA, 19 nt, Artificial Sequence
  Description of Artificial Sequence: Synthetic oligonucleotide
uugcuagguccuucuccau

SEQ ID NO: 2554054 - RNA, 19 nt, Artificial Sequence
  Description of Artificial Sequence: Synthetic oligonucleotide
cugucaaguggucauuaau

SEQ ID NO: 2554055 - RNA, 19 nt, Artificial Sequence
  Description of Artificial Sequence: Synthetic oligonucleotide
ggaaagccagugcuuucuc

SEQ ID NO: 2554056 - RNA, 19 nt, Artificial Sequence
  Description of Artificial Sequence: Synthetic oligonucleotide
ugcggucauuugucuccug

SEQ ID NO: 2554057 - RNA, 19 nt, Artificial Sequence
  Description of Artificial Sequence: Synthetic oligonucleotide
caucgucucccugcauuug

SEQ ID NO: 2554058 - RNA, 19 nt, Artificial Sequence
  Description of Artificial Sequence: Synthetic oligonucleotide
ucggcucgguguuguggcu

SEQ ID NO: 2554059 - RNA, 19 nt, Artificial Sequence
  Description of Artificial Sequence: Synthetic oligonucleotide
ccucuucucacuagcuguc

SEQ ID NO: 2554060 - RNA, 19 nt, Artificial Sequence
  Description of Artificial Sequence: Synthetic oligonucleotide
cucgguguuguggcuguuc

SEQ ID NO: 2554061 - RNA, 19 nt, Artificial Sequence
  Description of Artificial Sequence: Synthetic oligonucleotide
gccacugaguauauuucuc

SEQ ID NO: 2554062 - RNA, 19 nt, Artificial Sequence
  Description of Artificial Sequence: Synthetic oligonucleotide
augcggucauuugucuccu

SEQ ID NO: 2554063 - RNA, 19 nt, Artificial Sequence
  Description of Artificial Sequence: Synthetic oligonucleotide
gcuugaagaaaaggcuaca

SEQ ID NO: 2554064 - RNA, 19 nt, Artificial Sequence
  Description of Artificial Sequence: Synthetic oligonucleotide
gcagauggagucguuagcu

SEQ ID NO: 2554065 - RNA, 19 nt, Artificial Sequence
  Description of Artificial Sequence: Synthetic oligonucleotide
gcaugcggucauuugucuc

SEQ ID NO: 2554066 - RNA, 19 nt, Artificial Sequence
  Description of Artificial Sequence: Synthetic oligonucleotide
caauucucgaaggccacgu

SEQ ID NO: 2554067 - RNA, 19 nt, Artificial Sequence
  Description of Artificial Sequence: Synthetic oligonucleotide
ggcguccccagcgaguccc

SEQ ID NO: 2554068 - RNA, 19 nt, Artificial Sequence
  Description of Artificial Sequence: Synthetic oligonucleotide
auggcucuucugugcucgu

SEQ ID NO: 2554069 - RNA, 19 nt, Artificial Sequence
  Description of Artificial Sequence: Synthetic oligonucleotide
ggacauuuaucuggcucca

SEQ ID NO: 2554070 - RNA, 19 nt, Artificial Sequence
  Description of Artificial Sequence: Synthetic oligonucleotide
cucuuuucaccggacauuu

SEQ ID NO: 2554071 - RNA, 19 nt, Artificial Sequence
  Description of Artificial Sequence: Synthetic oligonucleotide
ugcgccgcacccggcgucc

SEQ ID NO: 2554072 - RNA, 19 nt, Artificial Sequence
  Description of Artificial Sequence: Synthetic oligonucleotide
gcacucucuuuucaccgga

SEQ ID NO: 2554073 - RNA, 19 nt, Artificial Sequence
  Description of Artificial Sequence: Synthetic oligonucleotide
gugauccagaagccuugaa

SEQ ID NO: 2554074 - RNA, 19 nt, Artificial Sequence
  Description of Artificial Sequence: Synthetic oligonucleotide
ggcuacaugguugguggga

SEQ ID NO: 2554075 - RNA, 19 nt, Artificial Sequence
  Description of Artificial Sequence: Synthetic oligonucleotide
ccauugcagcauauugcuc

SEQ ID NO: 2554076 - RNA, 19 nt, Artificial Sequence
  Description of Artificial Sequence: Synthetic oligonucleotide
gcuacaugguuggugggaa

SEQ ID NO: 2554077 - RNA, 19 nt, Artificial Sequence
  Description of Artificial Sequence: Synthetic oligonucleotide
cagaccuuagagugccacu

SEQ ID NO: 2554078 - RNA, 19 nt, Artificial Sequence
  Description of Artificial Sequence: Synthetic oligonucleotide
gcugucaaguggucauuaa

SEQ ID NO: 2554079 - RNA, 19 nt, Artificial Sequence
  Description of Artificial Sequence: Synthetic oligonucleotide
acgccucuucucacuagcu

SEQ ID NO: 2554080 - RNA, 19 nt, Artificial Sequence
  Description of Artificial Sequence: Synthetic oligonucleotide
gcucgucauccacuucggc

SEQ ID NO: 2554081 - RNA, 19 nt, Artificial Sequence
  Description of Artificial Sequence: Synthetic oligonucleotide
cccuuggguaacuggucug

SEQ ID NO: 2554082 - RNA, 19 nt, Artificial Sequence
  Description of Artificial Sequence: Synthetic oligonucleotide
ccuugauaaugaggugcgc

SEQ ID NO: 2554083 - RNA, 19 nt, Artificial Sequence
  Description of Artificial Sequence: Synthetic oligonucleotide
uugcagcauauugcucuuu

SEQ ID NO: 2554084 - RNA, 19 nt, Artificial Sequence
  Description of Artificial Sequence: Synthetic oligonucleotide
agagugccacugaguauau

SEQ ID NO: 2554085 - RNA, 19 nt, Artificial Sequence
  Description of Artificial Sequence: Synthetic oligonucleotide
ccuguagaucaaauucuua

SEQ ID NO: 2554086 - RNA, 19 nt, Artificial Sequence
  Description of Artificial Sequence: Synthetic oligonucleotide
cgucauccacuucggcucg

SEQ ID NO: 2554087 - RNA, 19 nt, Artificial Sequence
  Description of Artificial Sequence: Synthetic oligonucleotide
auggagucguuagcugcuu

SEQ ID NO: 2554088 - RNA, 19 nt, Artificial Sequence
  Description of Artificial Sequence: Synthetic oligonucleotide
gugggaagauuugguggaa

SEQ ID NO: 2554089 - RNA, 19 nt, Artificial Sequence
  Description of Artificial Sequence: Synthetic oligonucleotide
cguaagcacucucuuuuca

SEQ ID NO: 2554090 - RNA, 19 nt, Artificial Sequence
  Description of Artificial Sequence: Synthetic oligonucleotide
cugucccuguagaucaaau

SEQ ID NO: 2554091 - RNA, 19 nt, Artificial Sequence
  Description of Artificial Sequence: Synthetic oligonucleotide
cgagucccgcuucuugccg

SEQ ID NO: 2554092 - RNA, 19 nt, Artificial Sequence
  Description of Artificial Sequence: Synthetic oligonucleotide
ccuggaucauauucuucaa

SEQ ID NO: 2554093 - RNA, 19 nt, Artificial Sequence
  Description of Artificial Sequence: Synthetic oligonucleotide
gcaaucucugcagggccuc

SEQ ID NO: 2554094 - RNA, 19 nt, Artificial Sequence
  Description of Artificial Sequence: Synthetic oligonucleotide
ggcuguucuuucaggaacu

SEQ ID NO: 2554095 - RNA, 19 nt, Artificial Sequence
  Description of Artificial Sequence: Synthetic oligonucleotide
ccugcaucgucucccugca

SEQ ID NO: 2554096 - RNA, 19 nt, Artificial Sequence
  Description of Artificial Sequence: Synthetic oligonucleotide
ucccugcauuugggaagca

SEQ ID NO: 2554097 - RNA, 19 nt, Artificial Sequence
  Description of Artificial Sequence: Synthetic oligonucleotide
ccuuagagugccacugagu

SEQ ID NO: 2554098 - RNA, 19 nt, Artificial Sequence
  Description of Artificial Sequence: Synthetic oligonucleotide
gcagacgccucuucucacu

SEQ ID NO: 2554099 - RNA, 19 nt, Artificial Sequence
  Description of Artificial Sequence: Synthetic oligonucleotide
gaggugcgccgcacccggc

SEQ ID NO: 2554100 - RNA, 19 nt, Artificial Sequence
  Description of Artificial Sequence: Synthetic oligonucleotide
aucugucccuguagaucaa

SEQ ID NO: 2554101 - RNA, 19 nt, Artificial Sequence
  Description of Artificial Sequence: Synthetic oligonucleotide
ccagaagccuugaaugaau

SEQ ID NO: 2554102 - RNA, 19 nt, Artificial Sequence
  Description of Artificial Sequence: Synthetic oligonucleotide
ccauggcucuucugugcuc

SEQ ID NO: 2554103 - RNA, 19 nt, Artificial Sequence
  Description of Artificial Sequence: Synthetic oligonucleotide
cuccaagauccuugauaau

SEQ ID NO: 2554104 - RNA, 19 nt, Artificial Sequence
  Description of Artificial Sequence: Synthetic oligonucleotide
caugguuggugggaagauu

SEQ ID NO: 2554105 - RNA, 19 nt, Artificial Sequence
  Description of Artificial Sequence: Synthetic oligonucleotide
cggucauuugucuccugga

SEQ ID NO: 2554106 - RNA, 19 nt, Artificial Sequence
  Description of Artificial Sequence: Synthetic oligonucleotide
guccccagcgagucccgcu

SEQ ID NO: 2554107 - RNA, 19 nt, Artificial Sequence
  Description of Artificial Sequence: Synthetic oligonucleotide
gugcgccgcacccggcguc

SEQ ID NO: 2554108 - RNA, 19 nt, Artificial Sequence
  Description of Artificial Sequence: Synthetic oligonucleotide
gcaucgucucccugcauuu

SEQ ID NO: 2554109 - RNA, 19 nt, Artificial Sequence
  Description of Artificial Sequence: Synthetic oligonucleotide
cacccggcguccccagcga

SEQ ID NO: 2554110 - RNA, 19 nt, Artificial Sequence
  Description of Artificial Sequence: Synthetic oligonucleotide
ccacuggagcagacgccuc

SEQ ID NO: 2554111 - RNA, 19 nt, Artificial Sequence
  Description of Artificial Sequence: Synthetic oligonucleotide
ccggcguccccagcgaguc

SEQ ID NO: 2554112 - RNA, 19 nt, Artificial Sequence
  Description of Artificial Sequence: Synthetic oligonucleotide
ccguucuuguucucucugu

SEQ ID NO: 2554113 - RNA, 19 nt, Artificial Sequence
  Description of Artificial Sequence: Synthetic oligonucleotide
cgucucccugcauuuggga

SEQ ID NO: 2554114 - RNA, 19 nt, Artificial Sequence
  Description of Artificial Sequence: Synthetic oligonucleotide
gcguccccagcgagucccg

SEQ ID NO: 2554115 - RNA, 19 nt, Artificial Sequence
  Description of Artificial Sequence: Synthetic oligonucleotide
gagugccacugaguauauu

SEQ ID NO: 2554116 - RNA, 19 nt, Artificial Sequence
  Description of Artificial Sequence: Synthetic oligonucleotide
ggugcgccgcacccggcgu

SEQ ID NO: 2554117 - RNA, 19 nt, Artificial Sequence
  Description of Artificial Sequence: Synthetic oligonucleotide
ccagugcuuucucauucau

SEQ ID NO: 2554118 - RNA, 19 nt, Artificial Sequence
  Description of Artificial Sequence: Synthetic oligonucleotide
cggcucgguguuguggcug

SEQ ID NO: 2554119 - RNA, 19 nt, Artificial Sequence
  Description of Artificial Sequence: Synthetic oligonucleotide
ccccagcgagucccgcuuc

SEQ ID NO: 2554120 - RNA, 19 nt, Artificial Sequence
  Description of Artificial Sequence: Synthetic oligonucleotide
gccgcacccggcgucccca

SEQ ID NO: 2554121 - RNA, 19 nt, Artificial Sequence
  Description of Artificial Sequence: Synthetic oligonucleotide
ccgcacccggcguccccag

SEQ ID NO: 2554122 - RNA, 19 nt, Artificial Sequence
  Description of Artificial Sequence: Synthetic oligonucleotide
gucugcagauggagucguu

SEQ ID NO: 2554123 - RNA, 19 nt, Artificial Sequence
  Description of Artificial Sequence: Synthetic oligonucleotide
cugcaucgucucccugcau

SEQ ID NO: 2554124 - RNA, 19 nt, Artificial Sequence
  Description of Artificial Sequence: Synthetic oligonucleotide
cgcacccggcguccccagc

SEQ ID NO: 2554125 - RNA, 19 nt, Artificial Sequence
  Description of Artificial Sequence: Synthetic oligonucleotide
cccugcauuugggaagcau

SEQ ID NO: 2554126 - RNA, 19 nt, Artificial Sequence
  Description of Artificial Sequence: Synthetic oligonucleotide
cggcguccccagcgagucc

SEQ ID NO: 2554127 - RNA, 19 nt, Artificial Sequence
  Description of Artificial Sequence: Synthetic oligonucleotide
ccuccaggccauccugcau

SEQ ID NO: 2554128 - RNA, 19 nt, Artificial Sequence
  Description of Artificial Sequence: Synthetic oligonucleotide
cccggcguccccagcgagu

SEQ ID NO: 2554129 - RNA, 19 nt, Artificial Sequence
  Description of Artificial Sequence: Synthetic oligonucleotide
cgccgcacccggcgucccc

SEQ ID NO: 2554130 - RNA, 19 nt, Artificial Sequence
  Description of Artificial Sequence: Synthetic oligonucleotide
gcgccgcacccggcguccc

SEQ ID NO: 2554131 - RNA, 19 nt, Artificial Sequence
  Description of Artificial Sequence: Synthetic oligonucleotide
cgguguuguggcuguucuu

SEQ ID NO: 2554132 - RNA, 19 nt, Artificial Sequence
  Description of Artificial Sequence: Synthetic oligonucleotide
ccaggccauccugcaucgu

SEQ ID NO: 2554133 - RNA, 19 nt, Artificial Sequence
  Description of Artificial Sequence: Synthetic oligonucleotide
ucuauuuuaacuaagagcu

SEQ ID NO: 2554134 - RNA, 19 nt, Artificial Sequence
  Description of Artificial Sequence: Synthetic oligonucleotide
uaaaacauuaguuaauugg

SEQ ID NO: 2554135 - RNA, 19 nt, Artificial Sequence
  Description of Artificial Sequence: Synthetic oligonucleotide
aaaguuaccuguuuacccc

SEQ ID NO: 2554136 - RNA, 19 nt, Artificial Sequence
  Description of Artificial Sequence: Synthetic oligonucleotide
acuacuuuuacuuaaaaga

SEQ ID NO: 2554137 - RNA, 19 nt, Artificial Sequence
  Description of Artificial Sequence: Synthetic oligonucleotide
aauucuuaaggauacaagu

SEQ ID NO: 2554138 - RNA, 19 nt, Artificial Sequence
  Description of Artificial Sequence: Synthetic oligonucleotide
gauacaaguauuuacuucc

SEQ ID NO: 2554139 - RNA, 19 nt, Artificial Sequence
  Description of Artificial Sequence: Synthetic oligonucleotide
uauuaaauauuucaagggc

SEQ ID NO: 2554140 - RNA, 19 nt, Artificial Sequence
  Description of Artificial Sequence: Synthetic oligonucleotide
uuauaauaaauaauguucu

SEQ ID NO: 2554141 - RNA, 19 nt, Artificial Sequence
  Description of Artificial Sequence: Synthetic oligonucleotide
auaacuucucuucacauac

SEQ ID NO: 2554142 - RNA, 19 nt, Artificial Sequence
  Description of Artificial Sequence: Synthetic oligonucleotide
aaauagucaaaacuuagca

SEQ ID NO: 2554143 - RNA, 19 nt, Artificial Sequence
  Description of Artificial Sequence: Synthetic oligonucleotide
uucuuaaucacucuuggag

SEQ ID NO: 2554144 - RNA, 19 nt, Artificial Sequence
  Description of Artificial Sequence: Synthetic oligonucleotide
uguaacaggaaacuaagug

SEQ ID NO: 2554145 - RNA, 19 nt, Artificial Sequence
  Description of Artificial Sequence: Synthetic oligonucleotide
uuugagaugaauccagccg

SEQ ID NO: 2554146 - RNA, 19 nt, Artificial Sequence
  Description of Artificial Sequence: Synthetic oligonucleotide
acauuaguuaauuggaugg

SEQ ID NO: 2554147 - RNA, 19 nt, Artificial Sequence
  Description of Artificial Sequence: Synthetic oligonucleotide
aaaauagucaaaacuuagc

SEQ ID NO: 2554148 - RNA, 19 nt, Artificial Sequence
  Description of Artificial Sequence: Synthetic oligonucleotide
auagucaaaacuuagcaug

SEQ ID NO: 2554149 - RNA, 19 nt, Artificial Sequence
  Description of Artificial Sequence: Synthetic oligonucleotide
acaaguauuaaauauuuca

SEQ ID NO: 2554150 - RNA, 19 nt, Artificial Sequence
  Description of Artificial Sequence: Synthetic oligonucleotide
uguacuaaaacauuaguua

SEQ ID NO: 2554151 - RNA, 19 nt, Artificial Sequence
  Description of Artificial Sequence: Synthetic oligonucleotide
aaaacuuagcauguguaac

SEQ ID NO: 2554152 - RNA, 19 nt, Artificial Sequence
  Description of Artificial Sequence: Synthetic oligonucleotide
aacauuaguuaauuggaug

SEQ ID NO: 2554153 - RNA, 19 nt, Artificial Sequence
  Description of Artificial Sequence: Synthetic oligonucleotide
uuaaaagacuugcugcacg

SEQ ID NO: 2554154 - RNA, 19 nt, Artificial Sequence
  Description of Artificial Sequence: Synthetic oligonucleotide
uuaacaacuaacuauguuu

SEQ ID NO: 2554155 - RNA, 19 nt, Artificial Sequence
  Description of Artificial Sequence: Synthetic oligonucleotide
uuacuuaaaagacuugcug

SEQ ID NO: 2554156 - RNA, 19 nt, Artificial Sequence
  Description of Artificial Sequence: Synthetic oligonucleotide
uguucuuaaucacucuugg

SEQ ID NO: 2554157 - RNA, 19 nt, Artificial Sequence
  Description of Artificial Sequence: Synthetic oligonucleotide
uacuuaaaagacuugcugc

SEQ ID NO: 2554158 - RNA, 19 nt, Artificial Sequence
  Description of Artificial Sequence: Synthetic oligonucleotide
aaagacuugcugcacggcg

SEQ ID NO: 2554159 - RNA, 19 nt, Artificial Sequence
  Description of Artificial Sequence: Synthetic oligonucleotide
uguaccauuauucccagcu

SEQ ID NO: 2554160 - RNA, 19 nt, Artificial Sequence
  Description of Artificial Sequence: Synthetic oligonucleotide
uuuuacuuaaaagacuugc

SEQ ID NO: 2554161 - RNA, 19 nt, Artificial Sequence
  Description of Artificial Sequence: Synthetic oligonucleotide
auuugagaugaauccagcc

SEQ ID NO: 2554162 - RNA, 19 nt, Artificial Sequence
  Description of Artificial Sequence: Synthetic oligonucleotide
gucuauuuuaacuaagagc

SEQ ID NO: 2554163 - RNA, 19 nt, Artificial Sequence
  Description of Artificial Sequence: Synthetic oligonucleotide
acaaguauuuacuuccuuc

SEQ ID NO: 2554164 - RNA, 19 nt, Artificial Sequence
  Description of Artificial Sequence: Synthetic oligonucleotide
aaaacauuaguuaauugga

SEQ ID NO: 2554165 - RNA, 19 nt, Artificial Sequence
  Description of Artificial Sequence: Synthetic oligonucleotide
agugaugucuauuuuaacu

SEQ ID NO: 2554166 - RNA, 19 nt, Artificial Sequence
  Description of Artificial Sequence: Synthetic oligonucleotide
gaaacuaagugcuuguuca

SEQ ID NO: 2554167 - RNA, 19 nt, Artificial Sequence
  Description of Artificial Sequence: Synthetic oligonucleotide
ugucuauuuuaacuaagag

SEQ ID NO: 2554168 - RNA, 19 nt, Artificial Sequence
  Description of Artificial Sequence: Synthetic oligonucleotide
uuuaauuucucuucccuac

SEQ ID NO: 2554169 - RNA, 19 nt, Artificial Sequence
  Description of Artificial Sequence: Synthetic oligonucleotide
cuacuuuuacuuaaaagac

SEQ ID NO: 2554170 - RNA, 19 nt, Artificial Sequence
  Description of Artificial Sequence: Synthetic oligonucleotide
ugcuuguucagaaacagac

SEQ ID NO: 2554171 - RNA, 19 nt, Artificial Sequence
  Description of Artificial Sequence: Synthetic oligonucleotide
aauagucaaaacuuagcau

SEQ ID NO: 2554172 - RNA, 19 nt, Artificial Sequence
  Description of Artificial Sequence: Synthetic oligonucleotide
auuucaagggcuuuuccuc

SEQ ID NO: 2554173 - RNA, 19 nt, Artificial Sequence
  Description of Artificial Sequence: Synthetic oligonucleotide
uauuacacuuauaauaaau

SEQ ID NO: 2554174 - RNA, 19 nt, Artificial Sequence
  Description of Artificial Sequence: Synthetic oligonucleotide
uuaguuaauuggauggggc

SEQ ID NO: 2554175 - RNA, 19 nt, Artificial Sequence
  Description of Artificial Sequence: Synthetic oligonucleotide
uaaaagacuugcugcacgg

SEQ ID NO: 2554176 - RNA, 19 nt, Artificial Sequence
  Description of Artificial Sequence: Synthetic oligonucleotide
ucuuugucuagcuugcaag

SEQ ID NO: 2554177 - RNA, 19 nt, Artificial Sequence
  Description of Artificial Sequence: Synthetic oligonucleotide
acuuauucucucuccaugg

SEQ ID NO: 2554178 - RNA, 19 nt, Artificial Sequence
  Description of Artificial Sequence: Synthetic oligonucleotide
uuuacuuaaaagacuugcu

SEQ ID NO: 2554179 - RNA, 19 nt, Artificial Sequence
  Description of Artificial Sequence: Synthetic oligonucleotide
aauauuucaagggcuuuuc

SEQ ID NO: 2554180 - RNA, 19 nt, Artificial Sequence
  Description of Artificial Sequence: Synthetic oligonucleotide
aauaauguucuuaaucacu

SEQ ID NO: 2554181 - RNA, 19 nt, Artificial Sequence
  Description of Artificial Sequence: Synthetic oligonucleotide
caaaguuaccuguuuaccc

SEQ ID NO: 2554182 - RNA, 19 nt, Artificial Sequence
  Description of Artificial Sequence: Synthetic oligonucleotide
aacuuauucucucuccaug

SEQ ID NO: 2554183 - RNA, 19 nt, Artificial Sequence
  Description of Artificial Sequence: Synthetic oligonucleotide
ucuuaaucacucuuggaga

SEQ ID NO: 2554184 - RNA, 19 nt, Artificial Sequence
  Description of Artificial Sequence: Synthetic oligonucleotide
uaaaggucuacccaaaguu

SEQ ID NO: 2554185 - RNA, 19 nt, Artificial Sequence
  Description of Artificial Sequence: Synthetic oligonucleotide
uucuuaaggauacaaguau

SEQ ID NO: 2554186 - RNA, 19 nt, Artificial Sequence
  Description of Artificial Sequence: Synthetic oligonucleotide
uauuuuaacuaagagcugu

SEQ ID NO: 2554187 - RNA, 19 nt, Artificial Sequence
  Description of Artificial Sequence: Synthetic oligonucleotide
aaguuuuguaaguggcuuc

SEQ ID NO: 2554188 - RNA, 19 nt, Artificial Sequence
  Description of Artificial Sequence: Synthetic oligonucleotide
uucaucguggguauuacac

SEQ ID NO: 2554189 - RNA, 19 nt, Artificial Sequence
  Description of Artificial Sequence: Synthetic oligonucleotide
uauacacucucucaaugug

SEQ ID NO: 2554190 - RNA, 19 nt, Artificial Sequence
  Description of Artificial Sequence: Synthetic oligonucleotide
auuauucccagcuuugcug

SEQ ID NO: 2554191 - RNA, 19 nt, Artificial Sequence
  Description of Artificial Sequence: Synthetic oligonucleotide
auguccuaaaggucuaccc

SEQ ID NO: 2554192 - RNA, 19 nt, Artificial Sequence
  Description of Artificial Sequence: Synthetic oligonucleotide
uaacaaguauuaaauauuu

SEQ ID NO: 2554193 - RNA, 19 nt, Artificial Sequence
  Description of Artificial Sequence: Synthetic oligonucleotide
ucuggcuuaaguuuuguaa

SEQ ID NO: 2554194 - RNA, 19 nt, Artificial Sequence
  Description of Artificial Sequence: Synthetic oligonucleotide
caugggauuaacaacuaac

SEQ ID NO: 2554195 - RNA, 19 nt, Artificial Sequence
  Description of Artificial Sequence: Synthetic oligonucleotide
auauuucaagggcuuuucc

SEQ ID NO: 2554196 - RNA, 19 nt, Artificial Sequence
  Description of Artificial Sequence: Synthetic oligonucleotide
aaggauacaaguauuuacu

SEQ ID NO: 2554197 - RNA, 19 nt, Artificial Sequence
  Description of Artificial Sequence: Synthetic oligonucleotide
cauucuuuaauuucucuuc

SEQ ID NO: 2554198 - RNA, 19 nt, Artificial Sequence
  Description of Artificial Sequence: Synthetic oligonucleotide
ugcaacuuugcucagcuaa

SEQ ID NO: 2554199 - RNA, 19 nt, Artificial Sequence
  Description of Artificial Sequence: Synthetic oligonucleotide
uuaaauauuucaagggcuu

SEQ ID NO: 2554200 - RNA, 19 nt, Artificial Sequence
  Description of Artificial Sequence: Synthetic oligonucleotide
aaggucuacccaaaguuac

SEQ ID NO: 2554201 - RNA, 19 nt, Artificial Sequence
  Description of Artificial Sequence: Synthetic oligonucleotide
aauguucuuaaucacucuu

SEQ ID NO: 2554202 - RNA, 19 nt, Artificial Sequence
  Description of Artificial Sequence: Synthetic oligonucleotide
uuaaguuuuguaaguggcu

SEQ ID NO: 2554203 - RNA, 19 nt, Artificial Sequence
  Description of Artificial Sequence: Synthetic oligonucleotide
uucauaacuucucuucaca

SEQ ID NO: 2554204 - RNA, 19 nt, Artificial Sequence
  Description of Artificial Sequence: Synthetic oligonucleotide
ucucuucacauacugaguc

SEQ ID NO: 2554205 - RNA, 19 nt, Artificial Sequence
  Description of Artificial Sequence: Synthetic oligonucleotide
aguauuuacuuccuucuga

SEQ ID NO: 2554206 - RNA, 19 nt, Artificial Sequence
  Description of Artificial Sequence: Synthetic oligonucleotide
aagugaugucuauuuuaac

SEQ ID NO: 2554207 - RNA, 19 nt, Artificial Sequence
  Description of Artificial Sequence: Synthetic oligonucleotide
uauuucaagggcuuuuccu

SEQ ID NO: 2554208 - RNA, 19 nt, Artificial Sequence
  Description of Artificial Sequence: Synthetic oligonucleotide
uuuguaaguggcuuccucu

SEQ ID NO: 2554209 - RNA, 19 nt, Artificial Sequence
  Description of Artificial Sequence: Synthetic oligonucleotide
uuuaacuaagagcuguuuu

SEQ ID NO: 2554210 - RNA, 19 nt, Artificial Sequence
  Description of Artificial Sequence: Synthetic oligonucleotide
augaauccagccgauaugg

SEQ ID NO: 2554211 - RNA, 19 nt, Artificial Sequence
  Description of Artificial Sequence: Synthetic oligonucleotide
aaacuaagugcuuguucag

SEQ ID NO: 2554212 - RNA, 19 nt, Artificial Sequence
  Description of Artificial Sequence: Synthetic oligonucleotide
auuaguuaauuggaugggg

SEQ ID NO: 2554213 - RNA, 19 nt, Artificial Sequence
  Description of Artificial Sequence: Synthetic oligonucleotide
cuuaaucacucuuggagac

SEQ ID NO: 2554214 - RNA, 19 nt, Artificial Sequence
  Description of Artificial Sequence: Synthetic oligonucleotide
cuuugucuagcuugcaagg

SEQ ID NO: 2554215 - RNA, 19 nt, Artificial Sequence
  Description of Artificial Sequence: Synthetic oligonucleotide
  modified_base (16)..(16): a, c, u, g, unknown or other
ucacucuuggagacancgg

SEQ ID NO: 2554216 - RNA, 19 nt, Artificial Sequence
  Description of Artificial Sequence: Synthetic oligonucleotide
uuuuaacaaguauuaaaua

SEQ ID NO: 2554217 - RNA, 19 nt, Artificial Sequence
  Description of Artificial Sequence: Synthetic oligonucleotide
uaacaacuaacuauguuuu

SEQ ID NO: 2554218 - RNA, 19 nt, Artificial Sequence
  Description of Artificial Sequence: Synthetic oligonucleotide
uaguuaauuggauggggcc

SEQ ID NO: 2554219 - RNA, 19 nt, Artificial Sequence
  Description of Artificial Sequence: Synthetic oligonucleotide
ucaaaacuuagcaugugua

SEQ ID NO: 2554220 - RNA, 19 nt, Artificial Sequence
  Description of Artificial Sequence: Synthetic oligonucleotide
uguccuaaaggucuaccca

SEQ ID NO: 2554221 - RNA, 19 nt, Artificial Sequence
  Description of Artificial Sequence: Synthetic oligonucleotide
uuaauucuuaaggauacaa

SEQ ID NO: 2554222 - RNA, 19 nt, Artificial Sequence
  Description of Artificial Sequence: Synthetic oligonucleotide
cacuacuuuuacuuaaaag

SEQ ID NO: 2554223 - RNA, 19 nt, Artificial Sequence
  Description of Artificial Sequence: Synthetic oligonucleotide
agggcuuuuccucucugcc

SEQ ID NO: 2554224 - RNA, 19 nt, Artificial Sequence
  Description of Artificial Sequence: Synthetic oligonucleotide
aacuuugcucagcuaauca

SEQ ID NO: 2554225 - RNA, 19 nt, Artificial Sequence
  Description of Artificial Sequence: Synthetic oligonucleotide
aacaaguauuaaauauuuc

SEQ ID NO: 2554226 - RNA, 19 nt, Artificial Sequence
  Description of Artificial Sequence: Synthetic oligonucleotide
uguaaguggcuuccucugg

SEQ ID NO: 2554227 - RNA, 19 nt, Artificial Sequence
  Description of Artificial Sequence: Synthetic oligonucleotide
uacugagucagguauuucu

SEQ ID NO: 2554228 - RNA, 19 nt, Artificial Sequence
  Description of Artificial Sequence: Synthetic oligonucleotide
  modified_base (7)..(7): a, c, u, g, unknown or other
gagacancggguuagagau

SEQ ID NO: 2554229 - RNA, 19 nt, Artificial Sequence
  Description of Artificial Sequence: Synthetic oligonucleotide
ucuacccaaaguuaccugu

SEQ ID NO: 2554230 - RNA, 19 nt, Artificial Sequence
  Description of Artificial Sequence: Synthetic oligonucleotide
ugaacucagggcuauuuga

SEQ ID NO: 2554231 - RNA, 19 nt, Artificial Sequence
  Description of Artificial Sequence: Synthetic oligonucleotide
ucuucccuacccaucagcc

SEQ ID NO: 2554232 - RNA, 19 nt, Artificial Sequence
  Description of Artificial Sequence: Synthetic oligonucleotide
aacuuagcauguguaacag

SEQ ID NO: 2554233 - RNA, 19 nt, Artificial Sequence
  Description of Artificial Sequence: Synthetic oligonucleotide
aauccagccgauauggaug

SEQ ID NO: 2554234 - RNA, 19 nt, Artificial Sequence
  Description of Artificial Sequence: Synthetic oligonucleotide
auuggauggggccaggcug

SEQ ID NO: 2554235 - RNA, 19 nt, Artificial Sequence
  Description of Artificial Sequence: Synthetic oligonucleotide
cuaaaacauuaguuaauug

SEQ ID NO: 2554236 - RNA, 19 nt, Artificial Sequence
  Description of Artificial Sequence: Synthetic oligonucleotide
guggguauuacacuuauaa

SEQ ID NO: 2554237 - RNA, 19 nt, Artificial Sequence
  Description of Artificial Sequence: Synthetic oligonucleotide
uuauucucucuccauggga

SEQ ID NO: 2554238 - RNA, 19 nt, Artificial Sequence
  Description of Artificial Sequence: Synthetic oligonucleotide
uagucaaaacuuagcaugu

SEQ ID NO: 2554239 - RNA, 19 nt, Artificial Sequence
  Description of Artificial Sequence: Synthetic oligonucleotide
ggcuauuugagaugaaucc

SEQ ID NO: 2554240 - RNA, 19 nt, Artificial Sequence
  Description of Artificial Sequence: Synthetic oligonucleotide
uuuaccccuguacuaaaac

SEQ ID NO: 2554241 - RNA, 19 nt, Artificial Sequence
  Description of Artificial Sequence: Synthetic oligonucleotide
  modified_base (17)..(17): a, c, u, g, unknown or other
aucacucuuggagacancg

SEQ ID NO: 2554242 - RNA, 19 nt, Artificial Sequence
  Description of Artificial Sequence: Synthetic oligonucleotide
uauucucucuccaugggau

SEQ ID NO: 2554243 - RNA, 19 nt, Artificial Sequence
  Description of Artificial Sequence: Synthetic oligonucleotide
uacuaaaacauuaguuaau

SEQ ID NO: 2554244 - RNA, 19 nt, Artificial Sequence
  Description of Artificial Sequence: Synthetic oligonucleotide
gaugaauccagccgauaug

SEQ ID NO: 2554245 - RNA, 19 nt, Artificial Sequence
  Description of Artificial Sequence: Synthetic oligonucleotide
  modified_base (15)..(15): a, c, u, g, unknown or other
cacucuuggagacancggg

SEQ ID NO: 2554246 - RNA, 19 nt, Artificial Sequence
  Description of Artificial Sequence: Synthetic oligonucleotide
ugcaaggcugaauuguacc

SEQ ID NO: 2554247 - RNA, 19 nt, Artificial Sequence
  Description of Artificial Sequence: Synthetic oligonucleotide
agaacuuauucucucucca

SEQ ID NO: 2554248 - RNA, 19 nt, Artificial Sequence
  Description of Artificial Sequence: Synthetic oligonucleotide
  modified_base (2)..(2): a, c, u, g, unknown or other
ancggguuagagaugaccu

SEQ ID NO: 2554249 - RNA, 19 nt, Artificial Sequence
  Description of Artificial Sequence: Synthetic oligonucleotide
uuucauaacuucucuucac

SEQ ID NO: 2554250 - RNA, 19 nt, Artificial Sequence
  Description of Artificial Sequence: Synthetic oligonucleotide
ggauuaacaacuaacuaug

SEQ ID NO: 2554251 - RNA, 19 nt, Artificial Sequence
  Description of Artificial Sequence: Synthetic oligonucleotide
gaugucuauuuuaacuaag

SEQ ID NO: 2554252 - RNA, 19 nt, Artificial Sequence
  Description of Artificial Sequence: Synthetic oligonucleotide
guacuaaaacauuaguuaa

SEQ ID NO: 2554253 - RNA, 19 nt, Artificial Sequence
  Description of Artificial Sequence: Synthetic oligonucleotide
ugucuagcuugcaaggcug

SEQ ID NO: 2554254 - RNA, 19 nt, Artificial Sequence
  Description of Artificial Sequence: Synthetic oligonucleotide
uuagagaugaccuccucuu

SEQ ID NO: 2554255 - RNA, 19 nt, Artificial Sequence
  Description of Artificial Sequence: Synthetic oligonucleotide
uuaccccuguacuaaaaca

SEQ ID NO: 2554256 - RNA, 19 nt, Artificial Sequence
  Description of Artificial Sequence: Synthetic oligonucleotide
gaaacagacuugcaaguga

SEQ ID NO: 2554257 - RNA, 19 nt, Artificial Sequence
  Description of Artificial Sequence: Synthetic oligonucleotide
aauuggauggggccaggcu

SEQ ID NO: 2554258 - RNA, 19 nt, Artificial Sequence
  Description of Artificial Sequence: Synthetic oligonucleotide
uuugcucagcuaaucaaaa

SEQ ID NO: 2554259 - RNA, 19 nt, Artificial Sequence
  Description of Artificial Sequence: Synthetic oligonucleotide
ucuuaaggauacaaguauu

SEQ ID NO: 2554260 - RNA, 19 nt, Artificial Sequence
  Description of Artificial Sequence: Synthetic oligonucleotide
auuaacaacuaacuauguu

SEQ ID NO: 2554261 - RNA, 19 nt, Artificial Sequence
  Description of Artificial Sequence: Synthetic oligonucleotide
cauuaguuaauuggauggg

SEQ ID NO: 2554262 - RNA, 19 nt, Artificial Sequence
  Description of Artificial Sequence: Synthetic oligonucleotide
uacccaucagccaucagaa

SEQ ID NO: 2554263 - RNA, 19 nt, Artificial Sequence
  Description of Artificial Sequence: Synthetic oligonucleotide
ucuccaugggauuaacaac

SEQ ID NO: 2554264 - RNA, 19 nt, Artificial Sequence
  Description of Artificial Sequence: Synthetic oligonucleotide
cuuauucucucuccauggg

SEQ ID NO: 2554265 - RNA, 19 nt, Artificial Sequence
  Description of Artificial Sequence: Synthetic oligonucleotide
agaugaauccagccgauau

SEQ ID NO: 2554266 - RNA, 19 nt, Artificial Sequence
  Description of Artificial Sequence: Synthetic oligonucleotide
ugaugucuauuuuaacuaa

SEQ ID NO: 2554267 - RNA, 19 nt, Artificial Sequence
  Description of Artificial Sequence: Synthetic oligonucleotide
agugcuuguucagaaacag

SEQ ID NO: 2554268 - RNA, 19 nt, Artificial Sequence
  Description of Artificial Sequence: Synthetic oligonucleotide
uugucuagcuugcaaggcu

SEQ ID NO: 2554269 - RNA, 19 nt, Artificial Sequence
  Description of Artificial Sequence: Synthetic oligonucleotide
agcauguguaacaggaaac

SEQ ID NO: 2554270 - RNA, 19 nt, Artificial Sequence
  Description of Artificial Sequence: Synthetic oligonucleotide
ugggauuaacaacuaacua

SEQ ID NO: 2554271 - RNA, 19 nt, Artificial Sequence
  Description of Artificial Sequence: Synthetic oligonucleotide
uaccccuguacuaaaacau

SEQ ID NO: 2554272 - RNA, 19 nt, Artificial Sequence
  Description of Artificial Sequence: Synthetic oligonucleotide
uuguaaguggcuuccucug

SEQ ID NO: 2554273 - RNA, 19 nt, Artificial Sequence
  Description of Artificial Sequence: Synthetic oligonucleotide
caucuuuucauaacuucuc

SEQ ID NO: 2554274 - RNA, 19 nt, Artificial Sequence
  Description of Artificial Sequence: Synthetic oligonucleotide
aaguuaccuguuuaccccu

SEQ ID NO: 2554275 - RNA, 19 nt, Artificial Sequence
  Description of Artificial Sequence: Synthetic oligonucleotide
acagacuugcaagugaugu

SEQ ID NO: 2554276 - RNA, 19 nt, Artificial Sequence
  Description of Artificial Sequence: Synthetic oligonucleotide
cagaacuuauucucucucc

SEQ ID NO: 2554277 - RNA, 19 nt, Artificial Sequence
  Description of Artificial Sequence: Synthetic oligonucleotide
ggguauuacacuuauaaua

SEQ ID NO: 2554278 - RNA, 19 nt, Artificial Sequence
  Description of Artificial Sequence: Synthetic oligonucleotide
uucugaauuuuaacaagua

SEQ ID NO: 2554279 - RNA, 19 nt, Artificial Sequence
  Description of Artificial Sequence: Synthetic oligonucleotide
aacucagggcuauuugaga

SEQ ID NO: 2554280 - RNA, 19 nt, Artificial Sequence
  Description of Artificial Sequence: Synthetic oligonucleotide
aaugacugccucccuuuca

SEQ ID NO: 2554281 - RNA, 19 nt, Artificial Sequence
  Description of Artificial Sequence: Synthetic oligonucleotide
gauauggaugaccagcucu

SEQ ID NO: 2554282 - RNA, 19 nt, Artificial Sequence
  Description of Artificial Sequence: Synthetic oligonucleotide
acuaagugcuuguucagaa

SEQ ID NO: 2554283 - RNA, 19 nt, Artificial Sequence
  Description of Artificial Sequence: Synthetic oligonucleotide
uucacauacugagucaggu

SEQ ID NO: 2554284 - RNA, 19 nt, Artificial Sequence
  Description of Artificial Sequence: Synthetic oligonucleotide
auuguaccauuauucccag

SEQ ID NO: 2554285 - RNA, 19 nt, Artificial Sequence
  Description of Artificial Sequence: Synthetic oligonucleotide
gaacucagggcuauuugag

SEQ ID NO: 2554286 - RNA, 19 nt, Artificial Sequence
  Description of Artificial Sequence: Synthetic oligonucleotide
ucagggcuauuugagauga

SEQ ID NO: 2554287 - RNA, 19 nt, Artificial Sequence
  Description of Artificial Sequence: Synthetic oligonucleotide
acuuagcauguguaacagg

SEQ ID NO: 2554288 - RNA, 19 nt, Artificial Sequence
  Description of Artificial Sequence: Synthetic oligonucleotide
aaauauuucaagggcuuuu

SEQ ID NO: 2554289 - RNA, 19 nt, Artificial Sequence
  Description of Artificial Sequence: Synthetic oligonucleotide
uuugucuagcuugcaaggc

SEQ ID NO: 2554290 - RNA, 19 nt, Artificial Sequence
  Description of Artificial Sequence: Synthetic oligonucleotide
auuacacuuauaauaaaua

SEQ ID NO: 2554291 - RNA, 19 nt, Artificial Sequence
  Description of Artificial Sequence: Synthetic oligonucleotide
agacuugcaagugaugucu

SEQ ID NO: 2554292 - RNA, 19 nt, Artificial Sequence
  Description of Artificial Sequence: Synthetic oligonucleotide
cuuuuacuuaaaagacuug

SEQ ID NO: 2554293 - RNA, 19 nt, Artificial Sequence
  Description of Artificial Sequence: Synthetic oligonucleotide
uucccuacccaucagccau

SEQ ID NO: 2554294 - RNA, 19 nt, Artificial Sequence
  Description of Artificial Sequence: Synthetic oligonucleotide
accuguuuaccccuguacu

SEQ ID NO: 2554295 - RNA, 19 nt, Artificial Sequence
  Description of Artificial Sequence: Synthetic oligonucleotide
cuauuuuaacuaagagcug

SEQ ID NO: 2554296 - RNA, 19 nt, Artificial Sequence
  Description of Artificial Sequence: Synthetic oligonucleotide
uagcuugcaaggcugaauu

SEQ ID NO: 2554297 - RNA, 19 nt, Artificial Sequence
  Description of Artificial Sequence: Synthetic oligonucleotide
augggauuaacaacuaacu

SEQ ID NO: 2554298 - RNA, 19 nt, Artificial Sequence
  Description of Artificial Sequence: Synthetic oligonucleotide
gguauuacacuuauaauaa

SEQ ID NO: 2554299 - RNA, 19 nt, Artificial Sequence
  Description of Artificial Sequence: Synthetic oligonucleotide
gugaugucuauuuuaacua

SEQ ID NO: 2554300 - RNA, 19 nt, Artificial Sequence
  Description of Artificial Sequence: Synthetic oligonucleotide
uucuuugucuagcuugcaa

SEQ ID NO: 2554301 - RNA, 19 nt, Artificial Sequence
  Description of Artificial Sequence: Synthetic oligonucleotide
uaccauuauucccagcuuu

SEQ ID NO: 2554302 - RNA, 19 nt, Artificial Sequence
  Description of Artificial Sequence: Synthetic oligonucleotide
cagaaaauagucaaaacuu

SEQ ID NO: 2554303 - RNA, 19 nt, Artificial Sequence
  Description of Artificial Sequence: Synthetic oligonucleotide
  modified_base (5)..(5): a, c, u, g, unknown or other
gacancggguuagagauga

SEQ ID NO: 2554304 - RNA, 19 nt, Artificial Sequence
  Description of Artificial Sequence: Synthetic oligonucleotide
uuaaggauacaaguauuua

SEQ ID NO: 2554305 - RNA, 19 nt, Artificial Sequence
  Description of Artificial Sequence: Synthetic oligonucleotide
ucaucguggguauuacacu

SEQ ID NO: 2554306 - RNA, 19 nt, Artificial Sequence
  Description of Artificial Sequence: Synthetic oligonucleotide
uaccuguuuaccccuguac

SEQ ID NO: 2554307 - RNA, 19 nt, Artificial Sequence
  Description of Artificial Sequence: Synthetic oligonucleotide
  modified_base (19)..(19): a, c, u, g, unknown or other
uaaucacucuuggagacan

SEQ ID NO: 2554308 - RNA, 19 nt, Artificial Sequence
  Description of Artificial Sequence: Synthetic oligonucleotide
acaggaaacuaagugcuug

SEQ ID NO: 2554309 - RNA, 19 nt, Artificial Sequence
  Description of Artificial Sequence: Synthetic oligonucleotide
uggcuuaaguuuuguaagu

SEQ ID NO: 2554310 - RNA, 19 nt, Artificial Sequence
  Description of Artificial Sequence: Synthetic oligonucleotide
agucagguauuucucuucu

SEQ ID NO: 2554311 - RNA, 19 nt, Artificial Sequence
  Description of Artificial Sequence: Synthetic oligonucleotide
uggaccaucuuuucauaac

SEQ ID NO: 2554312 - RNA, 19 nt, Artificial Sequence
  Description of Artificial Sequence: Synthetic oligonucleotide
acuuugcucagcuaaucaa

SEQ ID NO: 2554313 - RNA, 19 nt, Artificial Sequence
  Description of Artificial Sequence: Synthetic oligonucleotide
acucagggcuauuugagau

SEQ ID NO: 2554314 - RNA, 19 nt, Artificial Sequence
  Description of Artificial Sequence: Synthetic oligonucleotide
aguuaauuggauggggcca

SEQ ID NO: 2554315 - RNA, 19 nt, Artificial Sequence
  Description of Artificial Sequence: Synthetic oligonucleotide
aacuaagugcuuguucaga

SEQ ID NO: 2554316 - RNA, 19 nt, Artificial Sequence
  Description of Artificial Sequence: Synthetic oligonucleotide
guauuuacuuccuucugaa

SEQ ID NO: 2554317 - RNA, 19 nt, Artificial Sequence
  Description of Artificial Sequence: Synthetic oligonucleotide
guuaauuggauggggccag

SEQ ID NO: 2554318 - RNA, 19 nt, Artificial Sequence
  Description of Artificial Sequence: Synthetic oligonucleotide
uuuaauucuuaaggauaca

SEQ ID NO: 2554319 - RNA, 19 nt, Artificial Sequence
  Description of Artificial Sequence: Synthetic oligonucleotide
cagguauuucucuucuuug

SEQ ID NO: 2554320 - RNA, 19 nt, Artificial Sequence
  Description of Artificial Sequence: Synthetic oligonucleotide
uugcaagugaugucuauuu

SEQ ID NO: 2554321 - RNA, 19 nt, Artificial Sequence
  Description of Artificial Sequence: Synthetic oligonucleotide
uuugcugccagcucuucua

SEQ ID NO: 2554322 - RNA, 19 nt, Artificial Sequence
  Description of Artificial Sequence: Synthetic oligonucleotide
  modified_base (11)..(11): a, c, u, g, unknown or other
cuuggagacancggguuag

SEQ ID NO: 2554323 - RNA, 19 nt, Artificial Sequence
  Description of Artificial Sequence: Synthetic oligonucleotide
uucccagcuuugcugacug

SEQ ID NO: 2554324 - RNA, 19 nt, Artificial Sequence
  Description of Artificial Sequence: Synthetic oligonucleotide
uuagcauguguaacaggaa

SEQ ID NO: 2554325 - RNA, 19 nt, Artificial Sequence
  Description of Artificial Sequence: Synthetic oligonucleotide
acugagucagguauuucuc

SEQ ID NO: 2554326 - RNA, 19 nt, Artificial Sequence
  Description of Artificial Sequence: Synthetic oligonucleotide
aaacagacuugcaagugau

SEQ ID NO: 2554327 - RNA, 19 nt, Artificial Sequence
  Description of Artificial Sequence: Synthetic oligonucleotide
caagugaugucuauuuuaa

SEQ ID NO: 2554328 - RNA, 19 nt, Artificial Sequence
  Description of Artificial Sequence: Synthetic oligonucleotide
cacucucucaaugugauca

SEQ ID NO: 2554329 - RNA, 19 nt, Artificial Sequence
  Description of Artificial Sequence: Synthetic oligonucleotide
cuacccaucagccaucaga

SEQ ID NO: 2554330 - RNA, 19 nt, Artificial Sequence
  Description of Artificial Sequence: Synthetic oligonucleotide
cuucauguccuaaaggucu

SEQ ID NO: 2554331 - RNA, 19 nt, Artificial Sequence
  Description of Artificial Sequence: Synthetic oligonucleotide
agaaaauagucaaaacuua

SEQ ID NO: 2554332 - RNA, 19 nt, Artificial Sequence
  Description of Artificial Sequence: Synthetic oligonucleotide
caucagaacuuauucucuc

SEQ ID NO: 2554333 - RNA, 19 nt, Artificial Sequence
  Description of Artificial Sequence: Synthetic oligonucleotide
ugcugacugaacucagggc

SEQ ID NO: 2554334 - RNA, 19 nt, Artificial Sequence
  Description of Artificial Sequence: Synthetic oligonucleotide
uucuauacacucucucaau

SEQ ID NO: 2554335 - RNA, 19 nt, Artificial Sequence
  Description of Artificial Sequence: Synthetic oligonucleotide
caaaacuuagcauguguaa

SEQ ID NO: 2554336 - RNA, 19 nt, Artificial Sequence
  Description of Artificial Sequence: Synthetic oligonucleotide
cucuccaugggauuaacaa

SEQ ID NO: 2554337 - RNA, 19 nt, Artificial Sequence
  Description of Artificial Sequence: Synthetic oligonucleotide
cuuaaaagacuugcugcac

SEQ ID NO: 2554338 - RNA, 19 nt, Artificial Sequence
  Description of Artificial Sequence: Synthetic oligonucleotide
aaggcugaauuguaccauu

SEQ ID NO: 2554339 - RNA, 19 nt, Artificial Sequence
  Description of Artificial Sequence: Synthetic oligonucleotide
aaaggucuacccaaaguua

SEQ ID NO: 2554340 - RNA, 19 nt, Artificial Sequence
  Description of Artificial Sequence: Synthetic oligonucleotide
auuucucuucccuacccau

SEQ ID NO: 2554341 - RNA, 19 nt, Artificial Sequence
  Description of Artificial Sequence: Synthetic oligonucleotide
ugcacggcguacaacugac

SEQ ID NO: 2554342 - RNA, 19 nt, Artificial Sequence
  Description of Artificial Sequence: Synthetic oligonucleotide
gaugaccuccucuucaugu

SEQ ID NO: 2554343 - RNA, 19 nt, Artificial Sequence
  Description of Artificial Sequence: Synthetic oligonucleotide
uugcaaggcugaauuguac

SEQ ID NO: 2554344 - RNA, 19 nt, Artificial Sequence
  Description of Artificial Sequence: Synthetic oligonucleotide
ugaaugacugccucccuuu

SEQ ID NO: 2554345 - RNA, 19 nt, Artificial Sequence
  Description of Artificial Sequence: Synthetic oligonucleotide
cuuugcugacugaacucag

SEQ ID NO: 2554346 - RNA, 19 nt, Artificial Sequence
  Description of Artificial Sequence: Synthetic oligonucleotide
auucuuaaggauacaagua

SEQ ID NO: 2554347 - RNA, 19 nt, Artificial Sequence
  Description of Artificial Sequence: Synthetic oligonucleotide
cuucuauacacucucucaa

SEQ ID NO: 2554348 - RNA, 19 nt, Artificial Sequence
  Description of Artificial Sequence: Synthetic oligonucleotide
uuucaucguggguauuaca

SEQ ID NO: 2554349 - RNA, 19 nt, Artificial Sequence
  Description of Artificial Sequence: Synthetic oligonucleotide
auguucuuaaucacucuug

SEQ ID NO: 2554350 - RNA, 19 nt, Artificial Sequence
  Description of Artificial Sequence: Synthetic oligonucleotide
augucuauuuuaacuaaga

SEQ ID NO: 2554351 - RNA, 19 nt, Artificial Sequence
  Description of Artificial Sequence: Synthetic oligonucleotide
  modified_base (3)..(3): a, c, u, g, unknown or other
cancggguuagagaugacc

SEQ ID NO: 2554352 - RNA, 19 nt, Artificial Sequence
  Description of Artificial Sequence: Synthetic oligonucleotide
uuaaucacucuuggagaca

SEQ ID NO: 2554353 - RNA, 19 nt, Artificial Sequence
  Description of Artificial Sequence: Synthetic oligonucleotide
cuuugcucagcuaaucaaa

SEQ ID NO: 2554354 - RNA, 19 nt, Artificial Sequence
  Description of Artificial Sequence: Synthetic oligonucleotide
gggauuaacaacuaacuau

SEQ ID NO: 2554355 - RNA, 19 nt, Artificial Sequence
  Description of Artificial Sequence: Synthetic oligonucleotide
cucuucuauacacucucuc

SEQ ID NO: 2554356 - RNA, 19 nt, Artificial Sequence
  Description of Artificial Sequence: Synthetic oligonucleotide
uugcugaaugacugccucc

SEQ ID NO: 2554357 - RNA, 19 nt, Artificial Sequence
  Description of Artificial Sequence: Synthetic oligonucleotide
ucucuccaugggauuaaca

SEQ ID NO: 2554358 - RNA, 19 nt, Artificial Sequence
  Description of Artificial Sequence: Synthetic oligonucleotide
aggucuacccaaaguuacc

SEQ ID NO: 2554359 - RNA, 19 nt, Artificial Sequence
  Description of Artificial Sequence: Synthetic oligonucleotide
cugaacucagggcuauuug

SEQ ID NO: 2554360 - RNA, 19 nt, Artificial Sequence
  Description of Artificial Sequence: Synthetic oligonucleotide
auccagccgauauggauga

SEQ ID NO: 2554361 - RNA, 19 nt, Artificial Sequence
  Description of Artificial Sequence: Synthetic oligonucleotide
gagucagguauuucucuuc

SEQ ID NO: 2554362 - RNA, 19 nt, Artificial Sequence
  Description of Artificial Sequence: Synthetic oligonucleotide
cuccaugggauuaacaacu

SEQ ID NO: 2554363 - RNA, 19 nt, Artificial Sequence
  Description of Artificial Sequence: Synthetic oligonucleotide
uauuuacuuccuucugaau

SEQ ID NO: 2554364 - RNA, 19 nt, Artificial Sequence
  Description of Artificial Sequence: Synthetic oligonucleotide
uuuuaacuaagagcuguuu

SEQ ID NO: 2554365 - RNA, 19 nt, Artificial Sequence
  Description of Artificial Sequence: Synthetic oligonucleotide
cacuuauaauaaauaaugu

SEQ ID NO: 2554366 - RNA, 19 nt, Artificial Sequence
  Description of Artificial Sequence: Synthetic oligonucleotide
ugaauccagccgauaugga

SEQ ID NO: 2554367 - RNA, 19 nt, Artificial Sequence
  Description of Artificial Sequence: Synthetic oligonucleotide
aagacuugcugcacggcgu

SEQ ID NO: 2554368 - RNA, 19 nt, Artificial Sequence
  Description of Artificial Sequence: Synthetic oligonucleotide
uacaaguauuuacuuccuu

SEQ ID NO: 2554369 - RNA, 19 nt, Artificial Sequence
  Description of Artificial Sequence: Synthetic oligonucleotide
uccuaaaggucuacccaaa

SEQ ID NO: 2554370 - RNA, 19 nt, Artificial Sequence
  Description of Artificial Sequence: Synthetic oligonucleotide
ggaaacuaagugcuuguuc

SEQ ID NO: 2554371 - RNA, 19 nt, Artificial Sequence
  Description of Artificial Sequence: Synthetic oligonucleotide
  modified_base (12)..(12): a, c, u, g, unknown or other
ucuuggagacancggguua

SEQ ID NO: 2554372 - RNA, 19 nt, Artificial Sequence
  Description of Artificial Sequence: Synthetic oligonucleotide
ugcaagugaugucuauuuu

SEQ ID NO: 2554373 - RNA, 19 nt, Artificial Sequence
  Description of Artificial Sequence: Synthetic oligonucleotide
cucuucccuacccaucagc

SEQ ID NO: 2554374 - RNA, 19 nt, Artificial Sequence
  Description of Artificial Sequence: Synthetic oligonucleotide
uuaauuggauggggccagg

SEQ ID NO: 2554375 - RNA, 19 nt, Artificial Sequence
  Description of Artificial Sequence: Synthetic oligonucleotide
uaaguggcuuccucuggac

SEQ ID NO: 2554376 - RNA, 19 nt, Artificial Sequence
  Description of Artificial Sequence: Synthetic oligonucleotide
augacugccucccuuucau

SEQ ID NO: 2554377 - RNA, 19 nt, Artificial Sequence
  Description of Artificial Sequence: Synthetic oligonucleotide
cucagggcuauuugagaug

SEQ ID NO: 2554378 - RNA, 19 nt, Artificial Sequence
  Description of Artificial Sequence: Synthetic oligonucleotide
ucaagggcuuuuccucucu

SEQ ID NO: 2554379 - RNA, 19 nt, Artificial Sequence
  Description of Artificial Sequence: Synthetic oligonucleotide
uagagaugaccuccucuuc

SEQ ID NO: 2554380 - RNA, 19 nt, Artificial Sequence
  Description of Artificial Sequence: Synthetic oligonucleotide
cauguccuaaaggucuacc

SEQ ID NO: 2554381 - RNA, 19 nt, Artificial Sequence
  Description of Artificial Sequence: Synthetic oligonucleotide
uucauguccuaaaggucua

SEQ ID NO: 2554382 - RNA, 19 nt, Artificial Sequence
  Description of Artificial Sequence: Synthetic oligonucleotide
guucuuaaucacucuugga

SEQ ID NO: 2554383 - RNA, 19 nt, Artificial Sequence
  Description of Artificial Sequence: Synthetic oligonucleotide
guaaguggcuuccucugga

SEQ ID NO: 2554384 - RNA, 19 nt, Artificial Sequence
  Description of Artificial Sequence: Synthetic oligonucleotide
uguuuaccccuguacuaaa

SEQ ID NO: 2554385 - RNA, 19 nt, Artificial Sequence
  Description of Artificial Sequence: Synthetic oligonucleotide
uguccacuacuuuuacuua

SEQ ID NO: 2554386 - RNA, 19 nt, Artificial Sequence
  Description of Artificial Sequence: Synthetic oligonucleotide
  modified_base (14)..(14): a, c, u, g, unknown or other
acucuuggagacancgggu

SEQ ID NO: 2554387 - RNA, 19 nt, Artificial Sequence
  Description of Artificial Sequence: Synthetic oligonucleotide
guccuaaaggucuacccaa

SEQ ID NO: 2554388 - RNA, 19 nt, Artificial Sequence
  Description of Artificial Sequence: Synthetic oligonucleotide
gucaaaacuuagcaugugu

SEQ ID NO: 2554389 - RNA, 19 nt, Artificial Sequence
  Description of Artificial Sequence: Synthetic oligonucleotide
guauuacacuuauaauaaa

SEQ ID NO: 2554390 - RNA, 19 nt, Artificial Sequence
  Description of Artificial Sequence: Synthetic oligonucleotide
  modified_base (18)..(18): a, c, u, g, unknown or other
aaucacucuuggagacanc

SEQ ID NO: 2554391 - RNA, 19 nt, Artificial Sequence
  Description of Artificial Sequence: Synthetic oligonucleotide
cagacuugcaagugauguc

SEQ ID NO: 2554392 - RNA, 19 nt, Artificial Sequence
  Description of Artificial Sequence: Synthetic oligonucleotide
cuguacuaaaacauuaguu

SEQ ID NO: 2554393 - RNA, 19 nt, Artificial Sequence
  Description of Artificial Sequence: Synthetic oligonucleotide
auacacucucucaauguga

SEQ ID NO: 2554394 - RNA, 19 nt, Artificial Sequence
  Description of Artificial Sequence: Synthetic oligonucleotide
guuagagaugaccuccucu

SEQ ID NO: 2554395 - RNA, 19 nt, Artificial Sequence
  Description of Artificial Sequence: Synthetic oligonucleotide
uaauuggauggggccaggc

SEQ ID NO: 2554396 - RNA, 19 nt, Artificial Sequence
  Description of Artificial Sequence: Synthetic oligonucleotide
cauaacuucucuucacaua

SEQ ID NO: 2554397 - RNA, 19 nt, Artificial Sequence
  Description of Artificial Sequence: Synthetic oligonucleotide
aacagacuugcaagugaug

SEQ ID NO: 2554398 - RNA, 19 nt, Artificial Sequence
  Description of Artificial Sequence: Synthetic oligonucleotide
ucucuucccuacccaucag

SEQ ID NO: 2554399 - RNA, 19 nt, Artificial Sequence
  Description of Artificial Sequence: Synthetic oligonucleotide
cagccgauauggaugacca

SEQ ID NO: 2554400 - RNA, 19 nt, Artificial Sequence
  Description of Artificial Sequence: Synthetic oligonucleotide
  modified_base (8)..(8): a, c, u, g, unknown or other
ggagacancggguuagaga

SEQ ID NO: 2554401 - RNA, 19 nt, Artificial Sequence
  Description of Artificial Sequence: Synthetic oligonucleotide
acacucucucaaugugauc

SEQ ID NO: 2554402 - RNA, 19 nt, Artificial Sequence
  Description of Artificial Sequence: Synthetic oligonucleotide
gccgauauggaugaccagc

SEQ ID NO: 2554403 - RNA, 19 nt, Artificial Sequence
  Description of Artificial Sequence: Synthetic oligonucleotide
gucuacccaaaguuaccug

SEQ ID NO: 2554404 - RNA, 19 nt, Artificial Sequence
  Description of Artificial Sequence: Synthetic oligonucleotide
agucaaaacuuagcaugug

SEQ ID NO: 2554405 - RNA, 19 nt, Artificial Sequence
  Description of Artificial Sequence: Synthetic oligonucleotide
cuuaaggauacaaguauuu

SEQ ID NO: 2554406 - RNA, 19 nt, Artificial Sequence
  Description of Artificial Sequence: Synthetic oligonucleotide
gaauccagccgauauggau

SEQ ID NO: 2554407 - RNA, 19 nt, Artificial Sequence
  Description of Artificial Sequence: Synthetic oligonucleotide
cuauacacucucucaaugu

SEQ ID NO: 2554408 - RNA, 19 nt, Artificial Sequence
  Description of Artificial Sequence: Synthetic oligonucleotide
uccaugggauuaacaacua

SEQ ID NO: 2554409 - RNA, 19 nt, Artificial Sequence
  Description of Artificial Sequence: Synthetic oligonucleotide
cuuucaucguggguauuac

SEQ ID NO: 2554410 - RNA, 19 nt, Artificial Sequence
  Description of Artificial Sequence: Synthetic oligonucleotide
  modified_base (9)..(9): a, c, u, g, unknown or other
uggagacancggguuagag

SEQ ID NO: 2554411 - RNA, 19 nt, Artificial Sequence
  Description of Artificial Sequence: Synthetic oligonucleotide
  modified_base (10)..(10): a, c, u, g, unknown or other
uuggagacancggguuaga

SEQ ID NO: 2554412 - RNA, 19 nt, Artificial Sequence
  Description of Artificial Sequence: Synthetic oligonucleotide
gcugccagcucuucuauac

SEQ ID NO: 2554413 - RNA, 19 nt, Artificial Sequence
  Description of Artificial Sequence: Synthetic oligonucleotide
uuaccuguuuaccccugua

SEQ ID NO: 2554414 - RNA, 19 nt, Artificial Sequence
  Description of Artificial Sequence: Synthetic oligonucleotide
agaugaccuccucuucaug

SEQ ID NO: 2554415 - RNA, 19 nt, Artificial Sequence
  Description of Artificial Sequence: Synthetic oligonucleotide
acccaucagccaucagaac

SEQ ID NO: 2554416 - RNA, 19 nt, Artificial Sequence
  Description of Artificial Sequence: Synthetic oligonucleotide
gcugacugaacucagggcu

SEQ ID NO: 2554417 - RNA, 19 nt, Artificial Sequence
  Description of Artificial Sequence: Synthetic oligonucleotide
auacaaguauuuacuuccu

SEQ ID NO: 2554418 - RNA, 19 nt, Artificial Sequence
  Description of Artificial Sequence: Synthetic oligonucleotide
guccacuacuuuuacuuaa

SEQ ID NO: 2554419 - RNA, 19 nt, Artificial Sequence
  Description of Artificial Sequence: Synthetic oligonucleotide
uacccaaaguuaccuguuu

SEQ ID NO: 2554420 - RNA, 19 nt, Artificial Sequence
  Description of Artificial Sequence: Synthetic oligonucleotide
cacggcguacaacugacca

SEQ ID NO: 2554421 - RNA, 19 nt, Artificial Sequence
  Description of Artificial Sequence: Synthetic oligonucleotide
uucaagggcuuuuccucuc

SEQ ID NO: 2554422 - RNA, 19 nt, Artificial Sequence
  Description of Artificial Sequence: Synthetic oligonucleotide
cccaaaguuaccuguuuac

SEQ ID NO: 2554423 - RNA, 19 nt, Artificial Sequence
  Description of Artificial Sequence: Synthetic oligonucleotide
gaaugacugccucccuuuc

SEQ ID NO: 2554424 - RNA, 19 nt, Artificial Sequence
  Description of Artificial Sequence: Synthetic oligonucleotide
acuugcaagugaugucuau

SEQ ID NO: 2554425 - RNA, 19 nt, Artificial Sequence
  Description of Artificial Sequence: Synthetic oligonucleotide
cucuucacauacugaguca

SEQ ID NO: 2554426 - RNA, 19 nt, Artificial Sequence
  Description of Artificial Sequence: Synthetic oligonucleotide
ccaaaguuaccuguuuacc

SEQ ID NO: 2554427 - RNA, 19 nt, Artificial Sequence
  Description of Artificial Sequence: Synthetic oligonucleotide
gcuauuugagaugaaucca

SEQ ID NO: 2554428 - RNA, 19 nt, Artificial Sequence
  Description of Artificial Sequence: Synthetic oligonucleotide
cuguccacuacuuuuacuu

SEQ ID NO: 2554429 - RNA, 19 nt, Artificial Sequence
  Description of Artificial Sequence: Synthetic oligonucleotide
cuaaaggucuacccaaagu

SEQ ID NO: 2554430 - RNA, 19 nt, Artificial Sequence
  Description of Artificial Sequence: Synthetic oligonucleotide
cccuguacuaaaacauuag

SEQ ID NO: 2554431 - RNA, 19 nt, Artificial Sequence
  Description of Artificial Sequence: Synthetic oligonucleotide
ggcuuaaguuuuguaagug

SEQ ID NO: 2554432 - RNA, 19 nt, Artificial Sequence
  Description of Artificial Sequence: Synthetic oligonucleotide
uucuggcuuaaguuuugua

SEQ ID NO: 2554433 - RNA, 19 nt, Artificial Sequence
  Description of Artificial Sequence: Synthetic oligonucleotide
uucucucuccaugggauua

SEQ ID NO: 2554434 - RNA, 19 nt, Artificial Sequence
  Description of Artificial Sequence: Synthetic oligonucleotide
gauuaacaacuaacuaugu

SEQ ID NO: 2554435 - RNA, 19 nt, Artificial Sequence
  Description of Artificial Sequence: Synthetic oligonucleotide
uuguaccauuauucccagc

SEQ ID NO: 2554436 - RNA, 19 nt, Artificial Sequence
  Description of Artificial Sequence: Synthetic oligonucleotide
auauggaugaccagcucuu

SEQ ID NO: 2554437 - RNA, 19 nt, Artificial Sequence
  Description of Artificial Sequence: Synthetic oligonucleotide
auuuuaacuaagagcuguu

SEQ ID NO: 2554438 - RNA, 19 nt, Artificial Sequence
  Description of Artificial Sequence: Synthetic oligonucleotide
gcaagugaugucuauuuua

SEQ ID NO: 2554439 - RNA, 19 nt, Artificial Sequence
  Description of Artificial Sequence: Synthetic oligonucleotide
ucccuuucaucguggguau

SEQ ID NO: 2554440 - RNA, 19 nt, Artificial Sequence
  Description of Artificial Sequence: Synthetic oligonucleotide
cuaagugcuuguucagaaa

SEQ ID NO: 2554441 - RNA, 19 nt, Artificial Sequence
  Description of Artificial Sequence: Synthetic oligonucleotide
ggaugaccagcucuugcug

SEQ ID NO: 2554442 - RNA, 19 nt, Artificial Sequence
  Description of Artificial Sequence: Synthetic oligonucleotide
cagaaacagacuugcaagu

SEQ ID NO: 2554443 - RNA, 19 nt, Artificial Sequence
  Description of Artificial Sequence: Synthetic oligonucleotide
gaacuuauucucucuccau

SEQ ID NO: 2554444 - RNA, 19 nt, Artificial Sequence
  Description of Artificial Sequence: Synthetic oligonucleotide
acugaacucagggcuauuu

SEQ ID NO: 2554445 - RNA, 19 nt, Artificial Sequence
  Description of Artificial Sequence: Synthetic oligonucleotide
cucccuuucaucgugggua

SEQ ID NO: 2554446 - RNA, 19 nt, Artificial Sequence
  Description of Artificial Sequence: Synthetic oligonucleotide
agccgauauggaugaccag

SEQ ID NO: 2554447 - RNA, 19 nt, Artificial Sequence
  Description of Artificial Sequence: Synthetic oligonucleotide
gcguacaacugaccaaagc

SEQ ID NO: 2554448 - RNA, 19 nt, Artificial Sequence
  Description of Artificial Sequence: Synthetic oligonucleotide
auucucucuccaugggauu

SEQ ID NO: 2554449 - RNA, 19 nt, Artificial Sequence
  Description of Artificial Sequence: Synthetic oligonucleotide
ccagcucuucuauacacuc

SEQ ID NO: 2554450 - RNA, 19 nt, Artificial Sequence
  Description of Artificial Sequence: Synthetic oligonucleotide
ucauguccuaaaggucuac

SEQ ID NO: 2554451 - RNA, 19 nt, Artificial Sequence
  Description of Artificial Sequence: Synthetic oligonucleotide
ccuaaaggucuacccaaag

SEQ ID NO: 2554452 - RNA, 19 nt, Artificial Sequence
  Description of Artificial Sequence: Synthetic oligonucleotide
acggcguacaacugaccaa

SEQ ID NO: 2554453 - RNA, 19 nt, Artificial Sequence
  Description of Artificial Sequence: Synthetic oligonucleotide
gggcuauuugagaugaauc

SEQ ID NO: 2554454 - RNA, 19 nt, Artificial Sequence
  Description of Artificial Sequence: Synthetic oligonucleotide
ucuagcuugcaaggcugaa

SEQ ID NO: 2554455 - RNA, 19 nt, Artificial Sequence
  Description of Artificial Sequence: Synthetic oligonucleotide
ggaccaucuuuucauaacu

SEQ ID NO: 2554456 - RNA, 19 nt, Artificial Sequence
  Description of Artificial Sequence: Synthetic oligonucleotide
cauuauucccagcuuugcu

SEQ ID NO: 2554457 - RNA, 19 nt, Artificial Sequence
  Description of Artificial Sequence: Synthetic oligonucleotide
ugacugaacucagggcuau

SEQ ID NO: 2554458 - RNA, 19 nt, Artificial Sequence
  Description of Artificial Sequence: Synthetic oligonucleotide
cuguuuaccccuguacuaa

SEQ ID NO: 2554459 - RNA, 19 nt, Artificial Sequence
  Description of Artificial Sequence: Synthetic oligonucleotide
cuucccuacccaucagcca

SEQ ID NO: 2554460 - RNA, 19 nt, Artificial Sequence
  Description of Artificial Sequence: Synthetic oligonucleotide
auucccagcuuugcugacu

SEQ ID NO: 2554461 - RNA, 19 nt, Artificial Sequence
  Description of Artificial Sequence: Synthetic oligonucleotide
ucucucuccaugggauuaa

SEQ ID NO: 2554462 - RNA, 19 nt, Artificial Sequence
  Description of Artificial Sequence: Synthetic oligonucleotide
cugccucccuuucaucgug

SEQ ID NO: 2554463 - RNA, 19 nt, Artificial Sequence
  Description of Artificial Sequence: Synthetic oligonucleotide
gcuuugcugacugaacuca

SEQ ID NO: 2554464 - RNA, 19 nt, Artificial Sequence
  Description of Artificial Sequence: Synthetic oligonucleotide
cucucugccauucuuuaau

SEQ ID NO: 2554465 - RNA, 19 nt, Artificial Sequence
  Description of Artificial Sequence: Synthetic oligonucleotide
  modified_base (4)..(4): a, c, u, g, unknown or other
acancggguuagagaugac

SEQ ID NO: 2554466 - RNA, 19 nt, Artificial Sequence
  Description of Artificial Sequence: Synthetic oligonucleotide
cugagucagguauuucucu

SEQ ID NO: 2554467 - RNA, 19 nt, Artificial Sequence
  Description of Artificial Sequence: Synthetic oligonucleotide
aguuaccuguuuaccccug

SEQ ID NO: 2554468 - RNA, 19 nt, Artificial Sequence
  Description of Artificial Sequence: Synthetic oligonucleotide
cguacaacugaccaaagcu

SEQ ID NO: 2554469 - RNA, 19 nt, Artificial Sequence
  Description of Artificial Sequence: Synthetic oligonucleotide
aggaaacuaagugcuuguu

SEQ ID NO: 2554470 - RNA, 19 nt, Artificial Sequence
  Description of Artificial Sequence: Synthetic oligonucleotide
caucguggguauuacacuu

SEQ ID NO: 2554471 - RNA, 19 nt, Artificial Sequence
  Description of Artificial Sequence: Synthetic oligonucleotide
ugacugccucccuuucauc

SEQ ID NO: 2554472 - RNA, 19 nt, Artificial Sequence
  Description of Artificial Sequence: Synthetic oligonucleotide
ucccuacccaucagccauc

SEQ ID NO: 2554473 - RNA, 19 nt, Artificial Sequence
  Description of Artificial Sequence: Synthetic oligonucleotide
caggaaacuaagugcuugu

SEQ ID NO: 2554474 - RNA, 19 nt, Artificial Sequence
  Description of Artificial Sequence: Synthetic oligonucleotide
cugcacggcguacaacuga

SEQ ID NO: 2554475 - RNA, 19 nt, Artificial Sequence
  Description of Artificial Sequence: Synthetic oligonucleotide
acauacugagucagguauu

SEQ ID NO: 2554476 - RNA, 19 nt, Artificial Sequence
  Description of Artificial Sequence: Synthetic oligonucleotide
ccagccgauauggaugacc

SEQ ID NO: 2554477 - RNA, 19 nt, Artificial Sequence
  Description of Artificial Sequence: Synthetic oligonucleotide
cggguuagagaugaccucc

SEQ ID NO: 2554478 - RNA, 19 nt, Artificial Sequence
  Description of Artificial Sequence: Synthetic oligonucleotide
guuuaccccuguacuaaaa

SEQ ID NO: 2554479 - RNA, 19 nt, Artificial Sequence
  Description of Artificial Sequence: Synthetic oligonucleotide
uugcaacuuugcucagcua

SEQ ID NO: 2554480 - RNA, 19 nt, Artificial Sequence
  Description of Artificial Sequence: Synthetic oligonucleotide
  modified_base (6)..(6): a, c, u, g, unknown or other
agacancggguuagagaug

SEQ ID NO: 2554481 - RNA, 19 nt, Artificial Sequence
  Description of Artificial Sequence: Synthetic oligonucleotide
cuugcugcacggcguacaa

SEQ ID NO: 2554482 - RNA, 19 nt, Artificial Sequence
  Description of Artificial Sequence: Synthetic oligonucleotide
caggcuguccacuacuuuu

SEQ ID NO: 2554483 - RNA, 19 nt, Artificial Sequence
  Description of Artificial Sequence: Synthetic oligonucleotide
gggcuuuuccucucugcca

SEQ ID NO: 2554484 - RNA, 19 nt, Artificial Sequence
  Description of Artificial Sequence: Synthetic oligonucleotide
  modified_base (13)..(13): a, c, u, g, unknown or other
cucuuggagacancggguu

SEQ ID NO: 2554485 - RNA, 19 nt, Artificial Sequence
  Description of Artificial Sequence: Synthetic oligonucleotide
gcauguguaacaggaaacu

SEQ ID NO: 2554486 - RNA, 19 nt, Artificial Sequence
  Description of Artificial Sequence: Synthetic oligonucleotide
guuaccuguuuaccccugu

SEQ ID NO: 2554487 - RNA, 19 nt, Artificial Sequence
  Description of Artificial Sequence: Synthetic oligonucleotide
cucucuccaugggauuaac

SEQ ID NO: 2554488 - RNA, 19 nt, Artificial Sequence
  Description of Artificial Sequence: Synthetic oligonucleotide
ugcugccagcucuucuaua

SEQ ID NO: 2554489 - RNA, 19 nt, Artificial Sequence
  Description of Artificial Sequence: Synthetic oligonucleotide
accccuguacuaaaacauu

SEQ ID NO: 2554490 - RNA, 19 nt, Artificial Sequence
  Description of Artificial Sequence: Synthetic oligonucleotide
gagaugaauccagccgaua

SEQ ID NO: 2554491 - RNA, 19 nt, Artificial Sequence
  Description of Artificial Sequence: Synthetic oligonucleotide
gccucccuuucaucguggg

SEQ ID NO: 2554492 - RNA, 19 nt, Artificial Sequence
  Description of Artificial Sequence: Synthetic oligonucleotide
ucccagcuuugcugacuga

SEQ ID NO: 2554493 - RNA, 19 nt, Artificial Sequence
  Description of Artificial Sequence: Synthetic oligonucleotide
aggcuguccacuacuuuua

SEQ ID NO: 2554494 - RNA, 19 nt, Artificial Sequence
  Description of Artificial Sequence: Synthetic oligonucleotide
aggcugaauuguaccauua

SEQ ID NO: 2554495 - RNA, 19 nt, Artificial Sequence
  Description of Artificial Sequence: Synthetic oligonucleotide
gucuagcuugcaaggcuga

SEQ ID NO: 2554496 - RNA, 19 nt, Artificial Sequence
  Description of Artificial Sequence: Synthetic oligonucleotide
gacuugcaagugaugucua

SEQ ID NO: 2554497 - RNA, 19 nt, Artificial Sequence
  Description of Artificial Sequence: Synthetic oligonucleotide
ccuguacuaaaacauuagu

SEQ ID NO: 2554498 - RNA, 19 nt, Artificial Sequence
  Description of Artificial Sequence: Synthetic oligonucleotide
aucguggguauuacacuua

SEQ ID NO: 2554499 - RNA, 19 nt, Artificial Sequence
  Description of Artificial Sequence: Synthetic oligonucleotide
ccuguuuaccccuguacua

SEQ ID NO: 2554500 - RNA, 19 nt, Artificial Sequence
  Description of Artificial Sequence: Synthetic oligonucleotide
ggcuuuuccucucugccau

SEQ ID NO: 2554501 - RNA, 19 nt, Artificial Sequence
  Description of Artificial Sequence: Synthetic oligonucleotide
cagcucuugcugaaugacu

SEQ ID NO: 2554502 - RNA, 19 nt, Artificial Sequence
  Description of Artificial Sequence: Synthetic oligonucleotide
ggucuacccaaaguuaccu

SEQ ID NO: 2554503 - RNA, 19 nt, Artificial Sequence
  Description of Artificial Sequence: Synthetic oligonucleotide
gacuugcugcacggcguac

SEQ ID NO: 2554504 - RNA, 19 nt, Artificial Sequence
  Description of Artificial Sequence: Synthetic oligonucleotide
cuucuuugucuagcuugca

SEQ ID NO: 2554505 - RNA, 19 nt, Artificial Sequence
  Description of Artificial Sequence: Synthetic oligonucleotide
cuugcaagugaugucuauu

SEQ ID NO: 2554506 - RNA, 19 nt, Artificial Sequence
  Description of Artificial Sequence: Synthetic oligonucleotide
ccaucagaacuuauucucu

SEQ ID NO: 2554507 - RNA, 19 nt, Artificial Sequence
  Description of Artificial Sequence: Synthetic oligonucleotide
ggcguacaacugaccaaag

SEQ ID NO: 2554508 - RNA, 19 nt, Artificial Sequence
  Description of Artificial Sequence: Synthetic oligonucleotide
aucagccaucagaacuuau

SEQ ID NO: 2554509 - RNA, 19 nt, Artificial Sequence
  Description of Artificial Sequence: Synthetic oligonucleotide
cucugccauucuuuaauuu

SEQ ID NO: 2554510 - RNA, 19 nt, Artificial Sequence
  Description of Artificial Sequence: Synthetic oligonucleotide
caaggcugaauuguaccau

SEQ ID NO: 2554511 - RNA, 19 nt, Artificial Sequence
  Description of Artificial Sequence: Synthetic oligonucleotide
ggcugaauuguaccauuau

SEQ ID NO: 2554512 - RNA, 19 nt, Artificial Sequence
  Description of Artificial Sequence: Synthetic oligonucleotide
cuagcuugcaaggcugaau

SEQ ID NO: 2554513 - RNA, 19 nt, Artificial Sequence
  Description of Artificial Sequence: Synthetic oligonucleotide
ccgauauggaugaccagcu

SEQ ID NO: 2554514 - RNA, 19 nt, Artificial Sequence
  Description of Artificial Sequence: Synthetic oligonucleotide
gcugcacggcguacaacug

SEQ ID NO: 2554515 - RNA, 19 nt, Artificial Sequence
  Description of Artificial Sequence: Synthetic oligonucleotide
ccacuacuuuuacuuaaaa

SEQ ID NO: 2554516 - RNA, 19 nt, Artificial Sequence
  Description of Artificial Sequence: Synthetic oligonucleotide
uccagccgauauggaugac

SEQ ID NO: 2554517 - RNA, 19 nt, Artificial Sequence
  Description of Artificial Sequence: Synthetic oligonucleotide
gcuguccacuacuuuuacu

SEQ ID NO: 2554518 - RNA, 19 nt, Artificial Sequence
  Description of Artificial Sequence: Synthetic oligonucleotide
caucagccaucagaacuua

SEQ ID NO: 2554519 - RNA, 19 nt, Artificial Sequence
  Description of Artificial Sequence: Synthetic oligonucleotide
ccaugggauuaacaacuaa

SEQ ID NO: 2554520 - RNA, 19 nt, Artificial Sequence
  Description of Artificial Sequence: Synthetic oligonucleotide
ccaucagccaucagaacuu

SEQ ID NO: 2554521 - RNA, 19 nt, Artificial Sequence
  Description of Artificial Sequence: Synthetic oligonucleotide
cgauauggaugaccagcuc

SEQ ID NO: 2554522 - RNA, 19 nt, Artificial Sequence
  Description of Artificial Sequence: Synthetic oligonucleotide
gcacggcguacaacugacc

SEQ ID NO: 2554523 - RNA, 19 nt, Artificial Sequence
  Description of Artificial Sequence: Synthetic oligonucleotide
ccuacccaucagccaucag

SEQ ID NO: 2554524 - RNA, 19 nt, Artificial Sequence
  Description of Artificial Sequence: Synthetic oligonucleotide
ccucucugccauucuuuaa

SEQ ID NO: 2554525 - RNA, 19 nt, Artificial Sequence
  Description of Artificial Sequence: Synthetic oligonucleotide
cggcguacaacugaccaaa

SEQ ID NO: 2554526 - RNA, 19 nt, Artificial Sequence
  Description of Artificial Sequence: Synthetic oligonucleotide
gcucuucuauacacucucu

SEQ ID NO: 2554527 - RNA, 19 nt, Artificial Sequence
  Description of Artificial Sequence: Synthetic oligonucleotide
gacugaacucagggcuauu

SEQ ID NO: 2554528 - RNA, 19 nt, Artificial Sequence
  Description of Artificial Sequence: Synthetic oligonucleotide
cccuacccaucagccauca

SEQ ID NO: 2554529 - RNA, 19 nt, Artificial Sequence
  Description of Artificial Sequence: Synthetic oligonucleotide
cguggguauuacacuuaua

SEQ ID NO: 2554530 - RNA, 19 nt, Artificial Sequence
  Description of Artificial Sequence: Synthetic oligonucleotide
ccucccuuucaucgugggu

SEQ ID NO: 2554531 - RNA, 19 nt, Artificial Sequence
  Description of Artificial Sequence: Synthetic oligonucleotide
cccuuucaucguggguauu

SEQ ID NO: 2554532 - RNA, 19 nt, Artificial Sequence
  Description of Artificial Sequence: Synthetic oligonucleotide
gacaagauaguauugcugg

SEQ ID NO: 2554533 - RNA, 19 nt, Artificial Sequence
  Description of Artificial Sequence: Synthetic oligonucleotide
aaauaaauauggccguccc

SEQ ID NO: 2554534 - RNA, 19 nt, Artificial Sequence
  Description of Artificial Sequence: Synthetic oligonucleotide
acugaaauaaauauggccg

SEQ ID NO: 2554535 - RNA, 19 nt, Artificial Sequence
  Description of Artificial Sequence: Synthetic oligonucleotide
ucagcgaaaagcuauagcc

SEQ ID NO: 2554536 - RNA, 19 nt, Artificial Sequence
  Description of Artificial Sequence: Synthetic oligonucleotide
aauaaguaaagaaacacca

SEQ ID NO: 2554537 - RNA, 19 nt, Artificial Sequence
  Description of Artificial Sequence: Synthetic oligonucleotide
uuuaguguuaagauggcug

SEQ ID NO: 2554538 - RNA, 19 nt, Artificial Sequence
  Description of Artificial Sequence: Synthetic oligonucleotide
auuauaucucuucucaagg

SEQ ID NO: 2554539 - RNA, 19 nt, Artificial Sequence
  Description of Artificial Sequence: Synthetic oligonucleotide
caaaguaggcuccagaugg

SEQ ID NO: 2554540 - RNA, 19 nt, Artificial Sequence
  Description of Artificial Sequence: Synthetic oligonucleotide
aucuuuauuacgcuauggc

SEQ ID NO: 2554541 - RNA, 19 nt, Artificial Sequence
  Description of Artificial Sequence: Synthetic oligonucleotide
cuuuauuacgcuauggcag

SEQ ID NO: 2554542 - RNA, 19 nt, Artificial Sequence
  Description of Artificial Sequence: Synthetic oligonucleotide
acucuugcaucacagaggc

SEQ ID NO: 2554543 - RNA, 19 nt, Artificial Sequence
  Description of Artificial Sequence: Synthetic oligonucleotide
aaauggacgaacaccaccc

SEQ ID NO: 2554544 - RNA, 19 nt, Artificial Sequence
  Description of Artificial Sequence: Synthetic oligonucleotide
uucauuauaucucuucuca

SEQ ID NO: 2554545 - RNA, 19 nt, Artificial Sequence
  Description of Artificial Sequence: Synthetic oligonucleotide
gacugaaauaaauauggcc

SEQ ID NO: 2554546 - RNA, 19 nt, Artificial Sequence
  Description of Artificial Sequence: Synthetic oligonucleotide
aaacuacaccauuugcagc

SEQ ID NO: 2554547 - RNA, 19 nt, Artificial Sequence
  Description of Artificial Sequence: Synthetic oligonucleotide
agcgaaaagcuauagccgc

SEQ ID NO: 2554548 - RNA, 19 nt, Artificial Sequence
  Description of Artificial Sequence: Synthetic oligonucleotide
auagacaagauaguauugc

SEQ ID NO: 2554549 - RNA, 19 nt, Artificial Sequence
  Description of Artificial Sequence: Synthetic oligonucleotide
agcauauucaaucuggaca

SEQ ID NO: 2554550 - RNA, 19 nt, Artificial Sequence
  Description of Artificial Sequence: Synthetic oligonucleotide
aguaaagaaacaccaaaug

SEQ ID NO: 2554551 - RNA, 19 nt, Artificial Sequence
  Description of Artificial Sequence: Synthetic oligonucleotide
aacuacaccauuugcagcu

SEQ ID NO: 2554552 - RNA, 19 nt, Artificial Sequence
  Description of Artificial Sequence: Synthetic oligonucleotide
ucugacugaaauaaauaug

SEQ ID NO: 2554553 - RNA, 19 nt, Artificial Sequence
  Description of Artificial Sequence: Synthetic oligonucleotide
uuaauuccuacugaagggg

SEQ ID NO: 2554554 - RNA, 19 nt, Artificial Sequence
  Description of Artificial Sequence: Synthetic oligonucleotide
uuaucuucugucauuugcc

SEQ ID NO: 2554555 - RNA, 19 nt, Artificial Sequence
  Description of Artificial Sequence: Synthetic oligonucleotide
auaaauauggccgucccuc

SEQ ID NO: 2554556 - RNA, 19 nt, Artificial Sequence
  Description of Artificial Sequence: Synthetic oligonucleotide
ucuuuauuacgcuauggca

SEQ ID NO: 2554557 - RNA, 19 nt, Artificial Sequence
  Description of Artificial Sequence: Synthetic oligonucleotide
aagcauauucaaucuggac

SEQ ID NO: 2554558 - RNA, 19 nt, Artificial Sequence
  Description of Artificial Sequence: Synthetic oligonucleotide
cuuucaucguacaggaugg

SEQ ID NO: 2554559 - RNA, 19 nt, Artificial Sequence
  Description of Artificial Sequence: Synthetic oligonucleotide
ucauuugcccuucaaagcu

SEQ ID NO: 2554560 - RNA, 19 nt, Artificial Sequence
  Description of Artificial Sequence: Synthetic oligonucleotide
uuuauuacgcuauggcagc

SEQ ID NO: 2554561 - RNA, 19 nt, Artificial Sequence
  Description of Artificial Sequence: Synthetic oligonucleotide
aaaccgauaugcuugguaa

SEQ ID NO: 2554562 - RNA, 19 nt, Artificial Sequence
  Description of Artificial Sequence: Synthetic oligonucleotide
auacucuugcaucacagag

SEQ ID NO: 2554563 - RNA, 19 nt, Artificial Sequence
  Description of Artificial Sequence: Synthetic oligonucleotide
guguacacuccuuucaucg

SEQ ID NO: 2554564 - RNA, 19 nt, Artificial Sequence
  Description of Artificial Sequence: Synthetic oligonucleotide
ucuccuaaagccagcuucg

SEQ ID NO: 2554565 - RNA, 19 nt, Artificial Sequence
  Description of Artificial Sequence: Synthetic oligonucleotide
uacucuugcaucacagagg

SEQ ID NO: 2554566 - RNA, 19 nt, Artificial Sequence
  Description of Artificial Sequence: Synthetic oligonucleotide
aaaagcuauagccgcgcuc

SEQ ID NO: 2554567 - RNA, 19 nt, Artificial Sequence
  Description of Artificial Sequence: Synthetic oligonucleotide
aagauaguauugcugggca

SEQ ID NO: 2554568 - RNA, 19 nt, Artificial Sequence
  Description of Artificial Sequence: Synthetic oligonucleotide
ugauagacaagauaguauu

SEQ ID NO: 2554569 - RNA, 19 nt, Artificial Sequence
  Description of Artificial Sequence: Synthetic oligonucleotide
agaggcuacucucugcacc

SEQ ID NO: 2554570 - RNA, 19 nt, Artificial Sequence
  Description of Artificial Sequence: Synthetic oligonucleotide
ucuauguuaucuucuguca

SEQ ID NO: 2554571 - RNA, 19 nt, Artificial Sequence
  Description of Artificial Sequence: Synthetic oligonucleotide
auauucaaucuggacaagc

SEQ ID NO: 2554572 - RNA, 19 nt, Artificial Sequence
  Description of Artificial Sequence: Synthetic oligonucleotide
aagcuuaccagaugggcug

SEQ ID NO: 2554573 - RNA, 19 nt, Artificial Sequence
  Description of Artificial Sequence: Synthetic oligonucleotide
aaagcuauagccgcgcucu

SEQ ID NO: 2554574 - RNA, 19 nt, Artificial Sequence
  Description of Artificial Sequence: Synthetic oligonucleotide
uuaguguuaagauggcugu

SEQ ID NO: 2554575 - RNA, 19 nt, Artificial Sequence
  Description of Artificial Sequence: Synthetic oligonucleotide
ucaguugcuaaaacuacac

SEQ ID NO: 2554576 - RNA, 19 nt, Artificial Sequence
  Description of Artificial Sequence: Synthetic oligonucleotide
gccacuauacaccaaaccg

SEQ ID NO: 2554577 - RNA, 19 nt, Artificial Sequence
  Description of Artificial Sequence: Synthetic oligonucleotide
aaucgguuccacuuugugu

SEQ ID NO: 2554578 - RNA, 19 nt, Artificial Sequence
  Description of Artificial Sequence: Synthetic oligonucleotide
aauaaauauggccgucccu

SEQ ID NO: 2554579 - RNA, 19 nt, Artificial Sequence
  Description of Artificial Sequence: Synthetic oligonucleotide
uauaucucuucucaaggaa

SEQ ID NO: 2554580 - RNA, 19 nt, Artificial Sequence
  Description of Artificial Sequence: Synthetic oligonucleotide
uucuauguuaucuucuguc

SEQ ID NO: 2554581 - RNA, 19 nt, Artificial Sequence
  Description of Artificial Sequence: Synthetic oligonucleotide
ugcacaaguacucuguaau

SEQ ID NO: 2554582 - RNA, 19 nt, Artificial Sequence
  Description of Artificial Sequence: Synthetic oligonucleotide
uuauaucucuucucaagga

SEQ ID NO: 2554583 - RNA, 19 nt, Artificial Sequence
  Description of Artificial Sequence: Synthetic oligonucleotide
uugauagacaagauaguau

SEQ ID NO: 2554584 - RNA, 19 nt, Artificial Sequence
  Description of Artificial Sequence: Synthetic oligonucleotide
acaagcuuaccagaugggc

SEQ ID NO: 2554585 - RNA, 19 nt, Artificial Sequence
  Description of Artificial Sequence: Synthetic oligonucleotide
aguucuuccccauugcugu

SEQ ID NO: 2554586 - RNA, 19 nt, Artificial Sequence
  Description of Artificial Sequence: Synthetic oligonucleotide
uguuaagauggcuguauga

SEQ ID NO: 2554587 - RNA, 19 nt, Artificial Sequence
  Description of Artificial Sequence: Synthetic oligonucleotide
uuaccagaugggcugaaug

SEQ ID NO: 2554588 - RNA, 19 nt, Artificial Sequence
  Description of Artificial Sequence: Synthetic oligonucleotide
aauggacgaacaccacccg

SEQ ID NO: 2554589 - RNA, 19 nt, Artificial Sequence
  Description of Artificial Sequence: Synthetic oligonucleotide
ucuuuacccgggaagccgg

SEQ ID NO: 2554590 - RNA, 19 nt, Artificial Sequence
  Description of Artificial Sequence: Synthetic oligonucleotide
aucuggacaagcuuaccag

SEQ ID NO: 2554591 - RNA, 19 nt, Artificial Sequence
  Description of Artificial Sequence: Synthetic oligonucleotide
uaauuccuacugaaggggc

SEQ ID NO: 2554592 - RNA, 19 nt, Artificial Sequence
  Description of Artificial Sequence: Synthetic oligonucleotide
ucuugcaucacagaggcua

SEQ ID NO: 2554593 - RNA, 19 nt, Artificial Sequence
  Description of Artificial Sequence: Synthetic oligonucleotide
augcuugguaaucgguucc

SEQ ID NO: 2554594 - RNA, 19 nt, Artificial Sequence
  Description of Artificial Sequence: Synthetic oligonucleotide
uuggguauacucuugcauc

SEQ ID NO: 2554595 - RNA, 19 nt, Artificial Sequence
  Description of Artificial Sequence: Synthetic oligonucleotide
ggacaagcuuaccagaugg

SEQ ID NO: 2554596 - RNA, 19 nt, Artificial Sequence
  Description of Artificial Sequence: Synthetic oligonucleotide
acaagauaguauugcuggg

SEQ ID NO: 2554597 - RNA, 19 nt, Artificial Sequence
  Description of Artificial Sequence: Synthetic oligonucleotide
caaauggacgaacaccacc

SEQ ID NO: 2554598 - RNA, 19 nt, Artificial Sequence
  Description of Artificial Sequence: Synthetic oligonucleotide
cuucacuucaguuggggug

SEQ ID NO: 2554599 - RNA, 19 nt, Artificial Sequence
  Description of Artificial Sequence: Synthetic oligonucleotide
cagcgaaaagcuauagccg

SEQ ID NO: 2554600 - RNA, 19 nt, Artificial Sequence
  Description of Artificial Sequence: Synthetic oligonucleotide
uucacauaguucuucccca

SEQ ID NO: 2554601 - RNA, 19 nt, Artificial Sequence
  Description of Artificial Sequence: Synthetic oligonucleotide
gaagccggaaaacagccac

SEQ ID NO: 2554602 - RNA, 19 nt, Artificial Sequence
  Description of Artificial Sequence: Synthetic oligonucleotide
caccaaaccgauaugcuug

SEQ ID NO: 2554603 - RNA, 19 nt, Artificial Sequence
  Description of Artificial Sequence: Synthetic oligonucleotide
ucuugauagacaagauagu

SEQ ID NO: 2554604 - RNA, 19 nt, Artificial Sequence
  Description of Artificial Sequence: Synthetic oligonucleotide
uguaaucugggcccaugcc

SEQ ID NO: 2554605 - RNA, 19 nt, Artificial Sequence
  Description of Artificial Sequence: Synthetic oligonucleotide
acaccaaauggacgaacac

SEQ ID NO: 2554606 - RNA, 19 nt, Artificial Sequence
  Description of Artificial Sequence: Synthetic oligonucleotide
guacucuguaaucugggcc

SEQ ID NO: 2554607 - RNA, 19 nt, Artificial Sequence
  Description of Artificial Sequence: Synthetic oligonucleotide
uagacaagauaguauugcu

SEQ ID NO: 2554608 - RNA, 19 nt, Artificial Sequence
  Description of Artificial Sequence: Synthetic oligonucleotide
uucguugcagaucccaacu

SEQ ID NO: 2554609 - RNA, 19 nt, Artificial Sequence
  Description of Artificial Sequence: Synthetic oligonucleotide
aacaccacccgauugggua

SEQ ID NO: 2554610 - RNA, 19 nt, Artificial Sequence
  Description of Artificial Sequence: Synthetic oligonucleotide
uauacaccaaaccgauaug

SEQ ID NO: 2554611 - RNA, 19 nt, Artificial Sequence
  Description of Artificial Sequence: Synthetic oligonucleotide
gucauuugcccuucaaagc

SEQ ID NO: 2554612 - RNA, 19 nt, Artificial Sequence
  Description of Artificial Sequence: Synthetic oligonucleotide
ugccacuauacaccaaacc

SEQ ID NO: 2554613 - RNA, 19 nt, Artificial Sequence
  Description of Artificial Sequence: Synthetic oligonucleotide
augggcugaauguagucag

SEQ ID NO: 2554614 - RNA, 19 nt, Artificial Sequence
  Description of Artificial Sequence: Synthetic oligonucleotide
ugagcugugggaauggguu

SEQ ID NO: 2554615 - RNA, 19 nt, Artificial Sequence
  Description of Artificial Sequence: Synthetic oligonucleotide
aaguacucuguaaucuggg

SEQ ID NO: 2554616 - RNA, 19 nt, Artificial Sequence
  Description of Artificial Sequence: Synthetic oligonucleotide
aucgguuccacuuugugua

SEQ ID NO: 2554617 - RNA, 19 nt, Artificial Sequence
  Description of Artificial Sequence: Synthetic oligonucleotide
acuucaguuggggugaguc

SEQ ID NO: 2554618 - RNA, 19 nt, Artificial Sequence
  Description of Artificial Sequence: Synthetic oligonucleotide
uggguauacucuugcauca

SEQ ID NO: 2554619 - RNA, 19 nt, Artificial Sequence
  Description of Artificial Sequence: Synthetic oligonucleotide
gauagacaagauaguauug

SEQ ID NO: 2554620 - RNA, 19 nt, Artificial Sequence
  Description of Artificial Sequence: Synthetic oligonucleotide
uccauccacaaauaaguaa

SEQ ID NO: 2554621 - RNA, 19 nt, Artificial Sequence
  Description of Artificial Sequence: Synthetic oligonucleotide
uaugcuugguaaucgguuc

SEQ ID NO: 2554622 - RNA, 19 nt, Artificial Sequence
  Description of Artificial Sequence: Synthetic oligonucleotide
uugguaaucgguuccacuu

SEQ ID NO: 2554623 - RNA, 19 nt, Artificial Sequence
  Description of Artificial Sequence: Synthetic oligonucleotide
uaaucgguuccacuuugug

SEQ ID NO: 2554624 - RNA, 19 nt, Artificial Sequence
  Description of Artificial Sequence: Synthetic oligonucleotide
auuggguauacucuugcau

SEQ ID NO: 2554625 - RNA, 19 nt, Artificial Sequence
  Description of Artificial Sequence: Synthetic oligonucleotide
ucuucucaaggaaaguuuu

SEQ ID NO: 2554626 - RNA, 19 nt, Artificial Sequence
  Description of Artificial Sequence: Synthetic oligonucleotide
gcagcuuuaauuccuacug

SEQ ID NO: 2554627 - RNA, 19 nt, Artificial Sequence
  Description of Artificial Sequence: Synthetic oligonucleotide
auggguucuugauagacaa

SEQ ID NO: 2554628 - RNA, 19 nt, Artificial Sequence
  Description of Artificial Sequence: Synthetic oligonucleotide
auauggccgucccucauuc

SEQ ID NO: 2554629 - RNA, 19 nt, Artificial Sequence
  Description of Artificial Sequence: Synthetic oligonucleotide
ucaucguacaggauggauu

SEQ ID NO: 2554630 - RNA, 19 nt, Artificial Sequence
  Description of Artificial Sequence: Synthetic oligonucleotide
uuaagauggcuguaugaau

SEQ ID NO: 2554631 - RNA, 19 nt, Artificial Sequence
  Description of Artificial Sequence: Synthetic oligonucleotide
accaaauggacgaacacca

SEQ ID NO: 2554632 - RNA, 19 nt, Artificial Sequence
  Description of Artificial Sequence: Synthetic oligonucleotide
ucuggacaagcuuaccaga

SEQ ID NO: 2554633 - RNA, 19 nt, Artificial Sequence
  Description of Artificial Sequence: Synthetic oligonucleotide
caagauaguauugcugggc

SEQ ID NO: 2554634 - RNA, 19 nt, Artificial Sequence
  Description of Artificial Sequence: Synthetic oligonucleotide
uaccagaugggcugaaugu

SEQ ID NO: 2554635 - RNA, 19 nt, Artificial Sequence
  Description of Artificial Sequence: Synthetic oligonucleotide
uacaccaaaccgauaugcu

SEQ ID NO: 2554636 - RNA, 19 nt, Artificial Sequence
  Description of Artificial Sequence: Synthetic oligonucleotide
gaaaguuuucccauucaca

SEQ ID NO: 2554637 - RNA, 19 nt, Artificial Sequence
  Description of Artificial Sequence: Synthetic oligonucleotide
uauugcugggcaaguuucc

SEQ ID NO: 2554638 - RNA, 19 nt, Artificial Sequence
  Description of Artificial Sequence: Synthetic oligonucleotide
accaaaccgauaugcuugg

SEQ ID NO: 2554639 - RNA, 19 nt, Artificial Sequence
  Description of Artificial Sequence: Synthetic oligonucleotide
aaagcauauucaaucugga

SEQ ID NO: 2554640 - RNA, 19 nt, Artificial Sequence
  Description of Artificial Sequence: Synthetic oligonucleotide
uggggugagucuccuaaag

SEQ ID NO: 2554641 - RNA, 19 nt, Artificial Sequence
  Description of Artificial Sequence: Synthetic oligonucleotide
agcuuuaauuccuacugaa

SEQ ID NO: 2554642 - RNA, 19 nt, Artificial Sequence
  Description of Artificial Sequence: Synthetic oligonucleotide
agccaaguaauccuucacu

SEQ ID NO: 2554643 - RNA, 19 nt, Artificial Sequence
  Description of Artificial Sequence: Synthetic oligonucleotide
aacaccaaauggacgaaca

SEQ ID NO: 2554644 - RNA, 19 nt, Artificial Sequence
  Description of Artificial Sequence: Synthetic oligonucleotide
gucuccuaaagccagcuuc

SEQ ID NO: 2554645 - RNA, 19 nt, Artificial Sequence
  Description of Artificial Sequence: Synthetic oligonucleotide
guauacucuugcaucacag

SEQ ID NO: 2554646 - RNA, 19 nt, Artificial Sequence
  Description of Artificial Sequence: Synthetic oligonucleotide
cauccacaaauaaguaaag

SEQ ID NO: 2554647 - RNA, 19 nt, Artificial Sequence
  Description of Artificial Sequence: Synthetic oligonucleotide
agaugggcugaauguaguc

SEQ ID NO: 2554648 - RNA, 19 nt, Artificial Sequence
  Description of Artificial Sequence: Synthetic oligonucleotide
gaauggguucuugauagac

SEQ ID NO: 2554649 - RNA, 19 nt, Artificial Sequence
  Description of Artificial Sequence: Synthetic oligonucleotide
cauaguucuuccccauugc

SEQ ID NO: 2554650 - RNA, 19 nt, Artificial Sequence
  Description of Artificial Sequence: Synthetic oligonucleotide
ugugggaauggguucuuga

SEQ ID NO: 2554651 - RNA, 19 nt, Artificial Sequence
  Description of Artificial Sequence: Synthetic oligonucleotide
guaugaauggcaucuucca

SEQ ID NO: 2554652 - RNA, 19 nt, Artificial Sequence
  Description of Artificial Sequence: Synthetic oligonucleotide
uaaauauggccgucccuca

SEQ ID NO: 2554653 - RNA, 19 nt, Artificial Sequence
  Description of Artificial Sequence: Synthetic oligonucleotide
uuccaggcaaaguaggcuc

SEQ ID NO: 2554654 - RNA, 19 nt, Artificial Sequence
  Description of Artificial Sequence: Synthetic oligonucleotide
gggugagucuccuaaagcc

SEQ ID NO: 2554655 - RNA, 19 nt, Artificial Sequence
  Description of Artificial Sequence: Synthetic oligonucleotide
ccuaaagccagcuucguug

SEQ ID NO: 2554656 - RNA, 19 nt, Artificial Sequence
  Description of Artificial Sequence: Synthetic oligonucleotide
uacgcuauggcagccaagu

SEQ ID NO: 2554657 - RNA, 19 nt, Artificial Sequence
  Description of Artificial Sequence: Synthetic oligonucleotide
caucuuuauuacgcuaugg

SEQ ID NO: 2554658 - RNA, 19 nt, Artificial Sequence
  Description of Artificial Sequence: Synthetic oligonucleotide
accgauaugcuugguaauc

SEQ ID NO: 2554659 - RNA, 19 nt, Artificial Sequence
  Description of Artificial Sequence: Synthetic oligonucleotide
aucuuuacccgggaagccg

SEQ ID NO: 2554660 - RNA, 19 nt, Artificial Sequence
  Description of Artificial Sequence: Synthetic oligonucleotide
caccaaauggacgaacacc

SEQ ID NO: 2554661 - RNA, 19 nt, Artificial Sequence
  Description of Artificial Sequence: Synthetic oligonucleotide
aguucuaggucuucauuau

SEQ ID NO: 2554662 - RNA, 19 nt, Artificial Sequence
  Description of Artificial Sequence: Synthetic oligonucleotide
uggacaagcuuaccagaug

SEQ ID NO: 2554663 - RNA, 19 nt, Artificial Sequence
  Description of Artificial Sequence: Synthetic oligonucleotide
ugaauguagucagcgaaaa

SEQ ID NO: 2554664 - RNA, 19 nt, Artificial Sequence
  Description of Artificial Sequence: Synthetic oligonucleotide
aguauugcugggcaaguuu

SEQ ID NO: 2554665 - RNA, 19 nt, Artificial Sequence
  Description of Artificial Sequence: Synthetic oligonucleotide
ccuuucaucguacaggaug

SEQ ID NO: 2554666 - RNA, 19 nt, Artificial Sequence
  Description of Artificial Sequence: Synthetic oligonucleotide
uacacuccuuucaucguac

SEQ ID NO: 2554667 - RNA, 19 nt, Artificial Sequence
  Description of Artificial Sequence: Synthetic oligonucleotide
gacgaacaccacccgauug

SEQ ID NO: 2554668 - RNA, 19 nt, Artificial Sequence
  Description of Artificial Sequence: Synthetic oligonucleotide
guuaagauggcuguaugaa

SEQ ID NO: 2554669 - RNA, 19 nt, Artificial Sequence
  Description of Artificial Sequence: Synthetic oligonucleotide
cuuuguguacacuccuuuc

SEQ ID NO: 2554670 - RNA, 19 nt, Artificial Sequence
  Description of Artificial Sequence: Synthetic oligonucleotide
ugcccuucaaagcuuuccu

SEQ ID NO: 2554671 - RNA, 19 nt, Artificial Sequence
  Description of Artificial Sequence: Synthetic oligonucleotide
aauauggccgucccucauu

SEQ ID NO: 2554672 - RNA, 19 nt, Artificial Sequence
  Description of Artificial Sequence: Synthetic oligonucleotide
caaguuuccgagcucugug

SEQ ID NO: 2554673 - RNA, 19 nt, Artificial Sequence
  Description of Artificial Sequence: Synthetic oligonucleotide
uggacgaacaccacccgau

SEQ ID NO: 2554674 - RNA, 19 nt, Artificial Sequence
  Description of Artificial Sequence: Synthetic oligonucleotide
ugaaauaaauauggccguc

SEQ ID NO: 2554675 - RNA, 19 nt, Artificial Sequence
  Description of Artificial Sequence: Synthetic oligonucleotide
aguaauccuucacuucagu

SEQ ID NO: 2554676 - RNA, 19 nt, Artificial Sequence
  Description of Artificial Sequence: Synthetic oligonucleotide
guacaggauggauuucugc

SEQ ID NO: 2554677 - RNA, 19 nt, Artificial Sequence
  Description of Artificial Sequence: Synthetic oligonucleotide
uucaguuggggugagucuc

SEQ ID NO: 2554678 - RNA, 19 nt, Artificial Sequence
  Description of Artificial Sequence: Synthetic oligonucleotide
gucagcgaaaagcuauagc

SEQ ID NO: 2554679 - RNA, 19 nt, Artificial Sequence
  Description of Artificial Sequence: Synthetic oligonucleotide
cuauacaccaaaccgauau

SEQ ID NO: 2554680 - RNA, 19 nt, Artificial Sequence
  Description of Artificial Sequence: Synthetic oligonucleotide
uguagucagcgaaaagcua

SEQ ID NO: 2554681 - RNA, 19 nt, Artificial Sequence
  Description of Artificial Sequence: Synthetic oligonucleotide
gacaagcuuaccagauggg

SEQ ID NO: 2554682 - RNA, 19 nt, Artificial Sequence
  Description of Artificial Sequence: Synthetic oligonucleotide
aaauauggccgucccucau

SEQ ID NO: 2554683 - RNA, 19 nt, Artificial Sequence
  Description of Artificial Sequence: Synthetic oligonucleotide
ucaguuggggugagucucc

SEQ ID NO: 2554684 - RNA, 19 nt, Artificial Sequence
  Description of Artificial Sequence: Synthetic oligonucleotide
ugcagaucccaacuucuau

SEQ ID NO: 2554685 - RNA, 19 nt, Artificial Sequence
  Description of Artificial Sequence: Synthetic oligonucleotide
uguacacuccuuucaucgu

SEQ ID NO: 2554686 - RNA, 19 nt, Artificial Sequence
  Description of Artificial Sequence: Synthetic oligonucleotide
cuguaaucugggcccaugc

SEQ ID NO: 2554687 - RNA, 19 nt, Artificial Sequence
  Description of Artificial Sequence: Synthetic oligonucleotide
uuuccgagcucugugcaca

SEQ ID NO: 2554688 - RNA, 19 nt, Artificial Sequence
  Description of Artificial Sequence: Synthetic oligonucleotide
aaccgauaugcuugguaau

SEQ ID NO: 2554689 - RNA, 19 nt, Artificial Sequence
  Description of Artificial Sequence: Synthetic oligonucleotide
ucguacaggauggauuucu

SEQ ID NO: 2554690 - RNA, 19 nt, Artificial Sequence
  Description of Artificial Sequence: Synthetic oligonucleotide
aguuuccgagcucugugca

SEQ ID NO: 2554691 - RNA, 19 nt, Artificial Sequence
  Description of Artificial Sequence: Synthetic oligonucleotide
ucucuucucaaggaaaguu

SEQ ID NO: 2554692 - RNA, 19 nt, Artificial Sequence
  Description of Artificial Sequence: Synthetic oligonucleotide
gauggcuguaugaauggca

SEQ ID NO: 2554693 - RNA, 19 nt, Artificial Sequence
  Description of Artificial Sequence: Synthetic oligonucleotide
cuucguugcagaucccaac

SEQ ID NO: 2554694 - RNA, 19 nt, Artificial Sequence
  Description of Artificial Sequence: Synthetic oligonucleotide
acuuuguguacacuccuuu

SEQ ID NO: 2554695 - RNA, 19 nt, Artificial Sequence
  Description of Artificial Sequence: Synthetic oligonucleotide
uguguacacuccuuucauc

SEQ ID NO: 2554696 - RNA, 19 nt, Artificial Sequence
  Description of Artificial Sequence: Synthetic oligonucleotide
gauuggguauacucuugca

SEQ ID NO: 2554697 - RNA, 19 nt, Artificial Sequence
  Description of Artificial Sequence: Synthetic oligonucleotide
cacccgauuggguauacuc

SEQ ID NO: 2554698 - RNA, 19 nt, Artificial Sequence
  Description of Artificial Sequence: Synthetic oligonucleotide
uugcuaaaacuacaccauu

SEQ ID NO: 2554699 - RNA, 19 nt, Artificial Sequence
  Description of Artificial Sequence: Synthetic oligonucleotide
aggaaaguuuucccauuca

SEQ ID NO: 2554700 - RNA, 19 nt, Artificial Sequence
  Description of Artificial Sequence: Synthetic oligonucleotide
aguguuaagauggcuguau

SEQ ID NO: 2554701 - RNA, 19 nt, Artificial Sequence
  Description of Artificial Sequence: Synthetic oligonucleotide
uauagccgcgcucugccau

SEQ ID NO: 2554702 - RNA, 19 nt, Artificial Sequence
  Description of Artificial Sequence: Synthetic oligonucleotide
cuugauagacaagauagua

SEQ ID NO: 2554703 - RNA, 19 nt, Artificial Sequence
  Description of Artificial Sequence: Synthetic oligonucleotide
guguuaagauggcuguaug

SEQ ID NO: 2554704 - RNA, 19 nt, Artificial Sequence
  Description of Artificial Sequence: Synthetic oligonucleotide
cuccuuucaucguacagga

SEQ ID NO: 2554705 - RNA, 19 nt, Artificial Sequence
  Description of Artificial Sequence: Synthetic oligonucleotide
ucugucauuugcccuucaa

SEQ ID NO: 2554706 - RNA, 19 nt, Artificial Sequence
  Description of Artificial Sequence: Synthetic oligonucleotide
cuucucaaggaaaguuuuc

SEQ ID NO: 2554707 - RNA, 19 nt, Artificial Sequence
  Description of Artificial Sequence: Synthetic oligonucleotide
gaucugacugaaauaaaua

SEQ ID NO: 2554708 - RNA, 19 nt, Artificial Sequence
  Description of Artificial Sequence: Synthetic oligonucleotide
guucuugauagacaagaua

SEQ ID NO: 2554709 - RNA, 19 nt, Artificial Sequence
  Description of Artificial Sequence: Synthetic oligonucleotide
gaggcuacucucugcacca

SEQ ID NO: 2554710 - RNA, 19 nt, Artificial Sequence
  Description of Artificial Sequence: Synthetic oligonucleotide
guaggcuccagauggaucu

SEQ ID NO: 2554711 - RNA, 19 nt, Artificial Sequence
  Description of Artificial Sequence: Synthetic oligonucleotide
agcuauagccgcgcucugc

SEQ ID NO: 2554712 - RNA, 19 nt, Artificial Sequence
  Description of Artificial Sequence: Synthetic oligonucleotide
uuccauccacaaauaagua

SEQ ID NO: 2554713 - RNA, 19 nt, Artificial Sequence
  Description of Artificial Sequence: Synthetic oligonucleotide
uggguucuugauagacaag

SEQ ID NO: 2554714 - RNA, 19 nt, Artificial Sequence
  Description of Artificial Sequence: Synthetic oligonucleotide
uacugaaggggcuccucca

SEQ ID NO: 2554715 - RNA, 19 nt, Artificial Sequence
  Description of Artificial Sequence: Synthetic oligonucleotide
caugccacuauacaccaaa

SEQ ID NO: 2554716 - RNA, 19 nt, Artificial Sequence
  Description of Artificial Sequence: Synthetic oligonucleotide
uuacgcuauggcagccaag

SEQ ID NO: 2554717 - RNA, 19 nt, Artificial Sequence
  Description of Artificial Sequence: Synthetic oligonucleotide
aagccggaaaacagccacg

SEQ ID NO: 2554718 - RNA, 19 nt, Artificial Sequence
  Description of Artificial Sequence: Synthetic oligonucleotide
ugugcacaaguacucugua

SEQ ID NO: 2554719 - RNA, 19 nt, Artificial Sequence
  Description of Artificial Sequence: Synthetic oligonucleotide
auuacgcuauggcagccaa

SEQ ID NO: 2554720 - RNA, 19 nt, Artificial Sequence
  Description of Artificial Sequence: Synthetic oligonucleotide
uuauuacgcuauggcagcc

SEQ ID NO: 2554721 - RNA, 19 nt, Artificial Sequence
  Description of Artificial Sequence: Synthetic oligonucleotide
gguaaucgguuccacuuug

SEQ ID NO: 2554722 - RNA, 19 nt, Artificial Sequence
  Description of Artificial Sequence: Synthetic oligonucleotide
gcagaucccaacuucuaug

SEQ ID NO: 2554723 - RNA, 19 nt, Artificial Sequence
  Description of Artificial Sequence: Synthetic oligonucleotide
uacaccauuugcagcuuua

SEQ ID NO: 2554724 - RNA, 19 nt, Artificial Sequence
  Description of Artificial Sequence: Synthetic oligonucleotide
auaucucuucucaaggaaa

SEQ ID NO: 2554725 - RNA, 19 nt, Artificial Sequence
  Description of Artificial Sequence: Synthetic oligonucleotide
aguaggcuccagauggauc

SEQ ID NO: 2554726 - RNA, 19 nt, Artificial Sequence
  Description of Artificial Sequence: Synthetic oligonucleotide
caguucuaggucuucauua

SEQ ID NO: 2554727 - RNA, 19 nt, Artificial Sequence
  Description of Artificial Sequence: Synthetic oligonucleotide
ugggcugaauguagucagc

SEQ ID NO: 2554728 - RNA, 19 nt, Artificial Sequence
  Description of Artificial Sequence: Synthetic oligonucleotide
cugaaauaaauauggccgu

SEQ ID NO: 2554729 - RNA, 19 nt, Artificial Sequence
  Description of Artificial Sequence: Synthetic oligonucleotide
ucuguaaucugggcccaug

SEQ ID NO: 2554730 - RNA, 19 nt, Artificial Sequence
  Description of Artificial Sequence: Synthetic oligonucleotide
uauuacgcuauggcagcca

SEQ ID NO: 2554731 - RNA, 19 nt, Artificial Sequence
  Description of Artificial Sequence: Synthetic oligonucleotide
agauaguauugcugggcaa

SEQ ID NO: 2554732 - RNA, 19 nt, Artificial Sequence
  Description of Artificial Sequence: Synthetic oligonucleotide
ugguaaucgguuccacuuu

SEQ ID NO: 2554733 - RNA, 19 nt, Artificial Sequence
  Description of Artificial Sequence: Synthetic oligonucleotide
ucacauaguucuuccccau

SEQ ID NO: 2554734 - RNA, 19 nt, Artificial Sequence
  Description of Artificial Sequence: Synthetic oligonucleotide
ccauccacaaauaaguaaa

SEQ ID NO: 2554735 - RNA, 19 nt, Artificial Sequence
  Description of Artificial Sequence: Synthetic oligonucleotide
ucccucauuccauccacaa

SEQ ID NO: 2554736 - RNA, 19 nt, Artificial Sequence
  Description of Artificial Sequence: Synthetic oligonucleotide
agucagcgaaaagcuauag

SEQ ID NO: 2554737 - RNA, 19 nt, Artificial Sequence
  Description of Artificial Sequence: Synthetic oligonucleotide
auggacgaacaccacccga

SEQ ID NO: 2554738 - RNA, 19 nt, Artificial Sequence
  Description of Artificial Sequence: Synthetic oligonucleotide
uagucagcgaaaagcuaua

SEQ ID NO: 2554739 - RNA, 19 nt, Artificial Sequence
  Description of Artificial Sequence: Synthetic oligonucleotide
uacccgggaagccggaaaa

SEQ ID NO: 2554740 - RNA, 19 nt, Artificial Sequence
  Description of Artificial Sequence: Synthetic oligonucleotide
gcugaauguagucagcgaa

SEQ ID NO: 2554741 - RNA, 19 nt, Artificial Sequence
  Description of Artificial Sequence: Synthetic oligonucleotide
auagccgcgcucugccauc

SEQ ID NO: 2554742 - RNA, 19 nt, Artificial Sequence
  Description of Artificial Sequence: Synthetic oligonucleotide
uuacccgggaagccggaaa

SEQ ID NO: 2554743 - RNA, 19 nt, Artificial Sequence
  Description of Artificial Sequence: Synthetic oligonucleotide
cugaauguagucagcgaaa

SEQ ID NO: 2554744 - RNA, 19 nt, Artificial Sequence
  Description of Artificial Sequence: Synthetic oligonucleotide
auaguauugcugggcaagu

SEQ ID NO: 2554745 - RNA, 19 nt, Artificial Sequence
  Description of Artificial Sequence: Synthetic oligonucleotide
aaaguaggcuccagaugga

SEQ ID NO: 2554746 - RNA, 19 nt, Artificial Sequence
  Description of Artificial Sequence: Synthetic oligonucleotide
caucuuuacccgggaagcc

SEQ ID NO: 2554747 - RNA, 19 nt, Artificial Sequence
  Description of Artificial Sequence: Synthetic oligonucleotide
uucaucguacaggauggau

SEQ ID NO: 2554748 - RNA, 19 nt, Artificial Sequence
  Description of Artificial Sequence: Synthetic oligonucleotide
gcuauagccgcgcucugcc

SEQ ID NO: 2554749 - RNA, 19 nt, Artificial Sequence
  Description of Artificial Sequence: Synthetic oligonucleotide
cugaaggggcuccuccagc

SEQ ID NO: 2554750 - RNA, 19 nt, Artificial Sequence
  Description of Artificial Sequence: Synthetic oligonucleotide
augccacuauacaccaaac

SEQ ID NO: 2554751 - RNA, 19 nt, Artificial Sequence
  Description of Artificial Sequence: Synthetic oligonucleotide
ugcuugguaaucgguucca

SEQ ID NO: 2554752 - RNA, 19 nt, Artificial Sequence
  Description of Artificial Sequence: Synthetic oligonucleotide
caagcuuaccagaugggcu

SEQ ID NO: 2554753 - RNA, 19 nt, Artificial Sequence
  Description of Artificial Sequence: Synthetic oligonucleotide
aaguaggcuccagauggau

SEQ ID NO: 2554754 - RNA, 19 nt, Artificial Sequence
  Description of Artificial Sequence: Synthetic oligonucleotide
aagcuauagccgcgcucug

SEQ ID NO: 2554755 - RNA, 19 nt, Artificial Sequence
  Description of Artificial Sequence: Synthetic oligonucleotide
gggcugaauguagucagcg

SEQ ID NO: 2554756 - RNA, 19 nt, Artificial Sequence
  Description of Artificial Sequence: Synthetic oligonucleotide
aucccaacuucuauguuau

SEQ ID NO: 2554757 - RNA, 19 nt, Artificial Sequence
  Description of Artificial Sequence: Synthetic oligonucleotide
gauaugcuugguaaucggu

SEQ ID NO: 2554758 - RNA, 19 nt, Artificial Sequence
  Description of Artificial Sequence: Synthetic oligonucleotide
ccagaugggcugaauguag

SEQ ID NO: 2554759 - RNA, 19 nt, Artificial Sequence
  Description of Artificial Sequence: Synthetic oligonucleotide
cacaucuuuauuacgcuau

SEQ ID NO: 2554760 - RNA, 19 nt, Artificial Sequence
  Description of Artificial Sequence: Synthetic oligonucleotide
guagucagcgaaaagcuau

SEQ ID NO: 2554761 - RNA, 19 nt, Artificial Sequence
  Description of Artificial Sequence: Synthetic oligonucleotide
ggcccaugccacuauacac

SEQ ID NO: 2554762 - RNA, 19 nt, Artificial Sequence
  Description of Artificial Sequence: Synthetic oligonucleotide
ccaucuuuacccgggaagc

SEQ ID NO: 2554763 - RNA, 19 nt, Artificial Sequence
  Description of Artificial Sequence: Synthetic oligonucleotide
ucguugcagaucccaacuu

SEQ ID NO: 2554764 - RNA, 19 nt, Artificial Sequence
  Description of Artificial Sequence: Synthetic oligonucleotide
ccacuauacaccaaaccga

SEQ ID NO: 2554765 - RNA, 19 nt, Artificial Sequence
  Description of Artificial Sequence: Synthetic oligonucleotide
gguauacucuugcaucaca

SEQ ID NO: 2554766 - RNA, 19 nt, Artificial Sequence
  Description of Artificial Sequence: Synthetic oligonucleotide
ccaaguaauccuucacuuc

SEQ ID NO: 2554767 - RNA, 19 nt, Artificial Sequence
  Description of Artificial Sequence: Synthetic oligonucleotide
uauggccgucccucauucc

SEQ ID NO: 2554768 - RNA, 19 nt, Artificial Sequence
  Description of Artificial Sequence: Synthetic oligonucleotide
ucgguuccacuuuguguac

SEQ ID NO: 2554769 - RNA, 19 nt, Artificial Sequence
  Description of Artificial Sequence: Synthetic oligonucleotide
caaaccgauaugcuuggua

SEQ ID NO: 2554770 - RNA, 19 nt, Artificial Sequence
  Description of Artificial Sequence: Synthetic oligonucleotide
acccgauuggguauacucu

SEQ ID NO: 2554771 - RNA, 19 nt, Artificial Sequence
  Description of Artificial Sequence: Synthetic oligonucleotide
guacacuccuuucaucgua

SEQ ID NO: 2554772 - RNA, 19 nt, Artificial Sequence
  Description of Artificial Sequence: Synthetic oligonucleotide
cacuauacaccaaaccgau

SEQ ID NO: 2554773 - RNA, 19 nt, Artificial Sequence
  Description of Artificial Sequence: Synthetic oligonucleotide
acaccacccgauuggguau

SEQ ID NO: 2554774 - RNA, 19 nt, Artificial Sequence
  Description of Artificial Sequence: Synthetic oligonucleotide
ccgauaugcuugguaaucg

SEQ ID NO: 2554775 - RNA, 19 nt, Artificial Sequence
  Description of Artificial Sequence: Synthetic oligonucleotide
caucguacaggauggauuu

SEQ ID NO: 2554776 - RNA, 19 nt, Artificial Sequence
  Description of Artificial Sequence: Synthetic oligonucleotide
aucguacaggauggauuuc

SEQ ID NO: 2554777 - RNA, 19 nt, Artificial Sequence
  Description of Artificial Sequence: Synthetic oligonucleotide
gcccaugccacuauacacc

SEQ ID NO: 2554778 - RNA, 19 nt, Artificial Sequence
  Description of Artificial Sequence: Synthetic oligonucleotide
uucugucauuugcccuuca

SEQ ID NO: 2554779 - RNA, 19 nt, Artificial Sequence
  Description of Artificial Sequence: Synthetic oligonucleotide
ugggcaaguuuccgagcuc

SEQ ID NO: 2554780 - RNA, 19 nt, Artificial Sequence
  Description of Artificial Sequence: Synthetic oligonucleotide
cgauaugcuugguaaucgg

SEQ ID NO: 2554781 - RNA, 19 nt, Artificial Sequence
  Description of Artificial Sequence: Synthetic oligonucleotide
gcacaaguacucuguaauc

SEQ ID NO: 2554782 - RNA, 19 nt, Artificial Sequence
  Description of Artificial Sequence: Synthetic oligonucleotide
uggcuguaugaauggcauc

SEQ ID NO: 2554783 - RNA, 19 nt, Artificial Sequence
  Description of Artificial Sequence: Synthetic oligonucleotide
ggugagucuccuaaagcca

SEQ ID NO: 2554784 - RNA, 19 nt, Artificial Sequence
  Description of Artificial Sequence: Synthetic oligonucleotide
gcgaaaagcuauagccgcg

SEQ ID NO: 2554785 - RNA, 19 nt, Artificial Sequence
  Description of Artificial Sequence: Synthetic oligonucleotide
accagaugggcugaaugua

SEQ ID NO: 2554786 - RNA, 19 nt, Artificial Sequence
  Description of Artificial Sequence: Synthetic oligonucleotide
gaaaagcuauagccgcgcu

SEQ ID NO: 2554787 - RNA, 19 nt, Artificial Sequence
  Description of Artificial Sequence: Synthetic oligonucleotide
cuugguaaucgguuccacu

SEQ ID NO: 2554788 - RNA, 19 nt, Artificial Sequence
  Description of Artificial Sequence: Synthetic oligonucleotide
gugcacaaguacucuguaa

SEQ ID NO: 2554789 - RNA, 19 nt, Artificial Sequence
  Description of Artificial Sequence: Synthetic oligonucleotide
uaguguuaagauggcugua

SEQ ID NO: 2554790 - RNA, 19 nt, Artificial Sequence
  Description of Artificial Sequence: Synthetic oligonucleotide
ggcuguaugaauggcaucu

SEQ ID NO: 2554791 - RNA, 19 nt, Artificial Sequence
  Description of Artificial Sequence: Synthetic oligonucleotide
ccgggaagccggaaaacag

SEQ ID NO: 2554792 - RNA, 19 nt, Artificial Sequence
  Description of Artificial Sequence: Synthetic oligonucleotide
acccgggaagccggaaaac

SEQ ID NO: 2554793 - RNA, 19 nt, Artificial Sequence
  Description of Artificial Sequence: Synthetic oligonucleotide
uccuuucaucguacaggau

SEQ ID NO: 2554794 - RNA, 19 nt, Artificial Sequence
  Description of Artificial Sequence: Synthetic oligonucleotide
guucuaggucuucauuaua

SEQ ID NO: 2554795 - RNA, 19 nt, Artificial Sequence
  Description of Artificial Sequence: Synthetic oligonucleotide
cucuucucaaggaaaguuu

SEQ ID NO: 2554796 - RNA, 19 nt, Artificial Sequence
  Description of Artificial Sequence: Synthetic oligonucleotide
cagaggcuacucucugcac

SEQ ID NO: 2554797 - RNA, 19 nt, Artificial Sequence
  Description of Artificial Sequence: Synthetic oligonucleotide
uggccgucccucauuccau

SEQ ID NO: 2554798 - RNA, 19 nt, Artificial Sequence
  Description of Artificial Sequence: Synthetic oligonucleotide
uaguauugcugggcaaguu

SEQ ID NO: 2554799 - RNA, 19 nt, Artificial Sequence
  Description of Artificial Sequence: Synthetic oligonucleotide
cuuccccauugcuguggcc

SEQ ID NO: 2554800 - RNA, 19 nt, Artificial Sequence
  Description of Artificial Sequence: Synthetic oligonucleotide
cgauuggguauacucuugc

SEQ ID NO: 2554801 - RNA, 19 nt, Artificial Sequence
  Description of Artificial Sequence: Synthetic oligonucleotide
acagcagccaaagcauauu

SEQ ID NO: 2554802 - RNA, 19 nt, Artificial Sequence
  Description of Artificial Sequence: Synthetic oligonucleotide
uuuacccgggaagccggaa

SEQ ID NO: 2554803 - RNA, 19 nt, Artificial Sequence
  Description of Artificial Sequence: Synthetic oligonucleotide
agucuccuaaagccagcuu

SEQ ID NO: 2554804 - RNA, 19 nt, Artificial Sequence
  Description of Artificial Sequence: Synthetic oligonucleotide
ggaucugacugaaauaaau

SEQ ID NO: 2554805 - RNA, 19 nt, Artificial Sequence
  Description of Artificial Sequence: Synthetic oligonucleotide
cuucugucauuugcccuuc

SEQ ID NO: 2554806 - RNA, 19 nt, Artificial Sequence
  Description of Artificial Sequence: Synthetic oligonucleotide
cagcugagcugugggaaug

SEQ ID NO: 2554807 - RNA, 19 nt, Artificial Sequence
  Description of Artificial Sequence: Synthetic oligonucleotide
ggcuacucucugcaccagc

SEQ ID NO: 2554808 - RNA, 19 nt, Artificial Sequence
  Description of Artificial Sequence: Synthetic oligonucleotide
ggcugaauguagucagcga

SEQ ID NO: 2554809 - RNA, 19 nt, Artificial Sequence
  Description of Artificial Sequence: Synthetic oligonucleotide
uuccgagcucugugcacaa

SEQ ID NO: 2554810 - RNA, 19 nt, Artificial Sequence
  Description of Artificial Sequence: Synthetic oligonucleotide
ccaaauggacgaacaccac

SEQ ID NO: 2554811 - RNA, 19 nt, Artificial Sequence
  Description of Artificial Sequence: Synthetic oligonucleotide
accacccgauuggguauac

SEQ ID NO: 2554812 - RNA, 19 nt, Artificial Sequence
  Description of Artificial Sequence: Synthetic oligonucleotide
gcuguggccuuccaggcaa

SEQ ID NO: 2554813 - RNA, 19 nt, Artificial Sequence
  Description of Artificial Sequence: Synthetic oligonucleotide
cuucaguuggggugagucu

SEQ ID NO: 2554814 - RNA, 19 nt, Artificial Sequence
  Description of Artificial Sequence: Synthetic oligonucleotide
uccgagcucugugcacaag

SEQ ID NO: 2554815 - RNA, 19 nt, Artificial Sequence
  Description of Artificial Sequence: Synthetic oligonucleotide
agcuuaccagaugggcuga

SEQ ID NO: 2554816 - RNA, 19 nt, Artificial Sequence
  Description of Artificial Sequence: Synthetic oligonucleotide
cuuccaggcaaaguaggcu

SEQ ID NO: 2554817 - RNA, 19 nt, Artificial Sequence
  Description of Artificial Sequence: Synthetic oligonucleotide
uccuacugaaggggcuccu

SEQ ID NO: 2554818 - RNA, 19 nt, Artificial Sequence
  Description of Artificial Sequence: Synthetic oligonucleotide
cuauagccgcgcucugcca

SEQ ID NO: 2554819 - RNA, 19 nt, Artificial Sequence
  Description of Artificial Sequence: Synthetic oligonucleotide
ccgauuggguauacucuug

SEQ ID NO: 2554820 - RNA, 19 nt, Artificial Sequence
  Description of Artificial Sequence: Synthetic oligonucleotide
cgaaaagcuauagccgcgc

SEQ ID NO: 2554821 - RNA, 19 nt, Artificial Sequence
  Description of Artificial Sequence: Synthetic oligonucleotide
uccccauugcuguggccuu

SEQ ID NO: 2554822 - RNA, 19 nt, Artificial Sequence
  Description of Artificial Sequence: Synthetic oligonucleotide
ucccaacuucuauguuauc

SEQ ID NO: 2554823 - RNA, 19 nt, Artificial Sequence
  Description of Artificial Sequence: Synthetic oligonucleotide
acuauacaccaaaccgaua

SEQ ID NO: 2554824 - RNA, 19 nt, Artificial Sequence
  Description of Artificial Sequence: Synthetic oligonucleotide
cagaugggcugaauguagu

SEQ ID NO: 2554825 - RNA, 19 nt, Artificial Sequence
  Description of Artificial Sequence: Synthetic oligonucleotide
gccaaguaauccuucacuu

SEQ ID NO: 2554826 - RNA, 19 nt, Artificial Sequence
  Description of Artificial Sequence: Synthetic oligonucleotide
cuuuacccgggaagccgga

SEQ ID NO: 2554827 - RNA, 19 nt, Artificial Sequence
  Description of Artificial Sequence: Synthetic oligonucleotide
gggcccaugccacuauaca

SEQ ID NO: 2554828 - RNA, 19 nt, Artificial Sequence
  Description of Artificial Sequence: Synthetic oligonucleotide
caaggaaaguuuucccauu

SEQ ID NO: 2554829 - RNA, 19 nt, Artificial Sequence
  Description of Artificial Sequence: Synthetic oligonucleotide
gaaggggcuccuccagcua

SEQ ID NO: 2554830 - RNA, 19 nt, Artificial Sequence
  Description of Artificial Sequence: Synthetic oligonucleotide
gcuauggcagccaaguaau

SEQ ID NO: 2554831 - RNA, 19 nt, Artificial Sequence
  Description of Artificial Sequence: Synthetic oligonucleotide
cugugggaauggguucuug

SEQ ID NO: 2554832 - RNA, 19 nt, Artificial Sequence
  Description of Artificial Sequence: Synthetic oligonucleotide
acuacaccauuugcagcuu

SEQ ID NO: 2554833 - RNA, 19 nt, Artificial Sequence
  Description of Artificial Sequence: Synthetic oligonucleotide
aguuggggugagucuccua

SEQ ID NO: 2554834 - RNA, 19 nt, Artificial Sequence
  Description of Artificial Sequence: Synthetic oligonucleotide
cagccaaagcauauucaau

SEQ ID NO: 2554835 - RNA, 19 nt, Artificial Sequence
  Description of Artificial Sequence: Synthetic oligonucleotide
acgcuauggcagccaagua

SEQ ID NO: 2554836 - RNA, 19 nt, Artificial Sequence
  Description of Artificial Sequence: Synthetic oligonucleotide
cccaugccacuauacacca

SEQ ID NO: 2554837 - RNA, 19 nt, Artificial Sequence
  Description of Artificial Sequence: Synthetic oligonucleotide
gccgucccucauuccaucc

SEQ ID NO: 2554838 - RNA, 19 nt, Artificial Sequence
  Description of Artificial Sequence: Synthetic oligonucleotide
ggguauacucuugcaucac

SEQ ID NO: 2554839 - RNA, 19 nt, Artificial Sequence
  Description of Artificial Sequence: Synthetic oligonucleotide
aggcuacucucugcaccag

SEQ ID NO: 2554840 - RNA, 19 nt, Artificial Sequence
  Description of Artificial Sequence: Synthetic oligonucleotide
gcgcucugccaucuuuacc

SEQ ID NO: 2554841 - RNA, 19 nt, Artificial Sequence
  Description of Artificial Sequence: Synthetic oligonucleotide
cagcuucguugcagauccc

SEQ ID NO: 2554842 - RNA, 19 nt, Artificial Sequence
  Description of Artificial Sequence: Synthetic oligonucleotide
cauuugcccuucaaagcuu

SEQ ID NO: 2554843 - RNA, 19 nt, Artificial Sequence
  Description of Artificial Sequence: Synthetic oligonucleotide
uagccgcgcucugccaucu

SEQ ID NO: 2554844 - RNA, 19 nt, Artificial Sequence
  Description of Artificial Sequence: Synthetic oligonucleotide
cgcuauggcagccaaguaa

SEQ ID NO: 2554845 - RNA, 19 nt, Artificial Sequence
  Description of Artificial Sequence: Synthetic oligonucleotide
aucugggcccaugccacua

SEQ ID NO: 2554846 - RNA, 19 nt, Artificial Sequence
  Description of Artificial Sequence: Synthetic oligonucleotide
gcuugguaaucgguuccac

SEQ ID NO: 2554847 - RNA, 19 nt, Artificial Sequence
  Description of Artificial Sequence: Synthetic oligonucleotide
gcaucacagaggcuacucu

SEQ ID NO: 2554848 - RNA, 19 nt, Artificial Sequence
  Description of Artificial Sequence: Synthetic oligonucleotide
caccauuugcagcuuuaau

SEQ ID NO: 2554849 - RNA, 19 nt, Artificial Sequence
  Description of Artificial Sequence: Synthetic oligonucleotide
cgucccucauuccauccac

SEQ ID NO: 2554850 - RNA, 19 nt, Artificial Sequence
  Description of Artificial Sequence: Synthetic oligonucleotide
gaacaccacccgauugggu

SEQ ID NO: 2554851 - RNA, 19 nt, Artificial Sequence
  Description of Artificial Sequence: Synthetic oligonucleotide
gcuacucucugcaccagcu

SEQ ID NO: 2554852 - RNA, 19 nt, Artificial Sequence
  Description of Artificial Sequence: Synthetic oligonucleotide
cucugugcacaaguacucu

SEQ ID NO: 2554853 - RNA, 19 nt, Artificial Sequence
  Description of Artificial Sequence: Synthetic oligonucleotide
ggcuccagauggaucugac

SEQ ID NO: 2554854 - RNA, 19 nt, Artificial Sequence
  Description of Artificial Sequence: Synthetic oligonucleotide
cacuuuguguacacuccuu

SEQ ID NO: 2554855 - RNA, 19 nt, Artificial Sequence
  Description of Artificial Sequence: Synthetic oligonucleotide
gggcaaguuuccgagcucu

SEQ ID NO: 2554856 - RNA, 19 nt, Artificial Sequence
  Description of Artificial Sequence: Synthetic oligonucleotide
ggccgucccucauuccauc

SEQ ID NO: 2554857 - RNA, 19 nt, Artificial Sequence
  Description of Artificial Sequence: Synthetic oligonucleotide
guggccuuccaggcaaagu

SEQ ID NO: 2554858 - RNA, 19 nt, Artificial Sequence
  Description of Artificial Sequence: Synthetic oligonucleotide
cacauaguucuuccccauu

SEQ ID NO: 2554859 - RNA, 19 nt, Artificial Sequence
  Description of Artificial Sequence: Synthetic oligonucleotide
gcuccagauggaucugacu

SEQ ID NO: 2554860 - RNA, 19 nt, Artificial Sequence
  Description of Artificial Sequence: Synthetic oligonucleotide
ccuacugaaggggcuccuc

SEQ ID NO: 2554861 - RNA, 19 nt, Artificial Sequence
  Description of Artificial Sequence: Synthetic oligonucleotide
ccacuuuguguacacuccu

SEQ ID NO: 2554862 - RNA, 19 nt, Artificial Sequence
  Description of Artificial Sequence: Synthetic oligonucleotide
cccgggaagccggaaaaca

SEQ ID NO: 2554863 - RNA, 19 nt, Artificial Sequence
  Description of Artificial Sequence: Synthetic oligonucleotide
ccuucacuucaguuggggu

SEQ ID NO: 2554864 - RNA, 19 nt, Artificial Sequence
  Description of Artificial Sequence: Synthetic oligonucleotide
cccucauuccauccacaaa

SEQ ID NO: 2554865 - RNA, 19 nt, Artificial Sequence
  Description of Artificial Sequence: Synthetic oligonucleotide
cugggcccaugccacuaua

SEQ ID NO: 2554866 - RNA, 19 nt, Artificial Sequence
  Description of Artificial Sequence: Synthetic oligonucleotide
ccgagcucugugcacaagu

SEQ ID NO: 2554867 - RNA, 19 nt, Artificial Sequence
  Description of Artificial Sequence: Synthetic oligonucleotide
cuccuaaagccagcuucgu

SEQ ID NO: 2554868 - RNA, 19 nt, Artificial Sequence
  Description of Artificial Sequence: Synthetic oligonucleotide
cccgauuggguauacucuu

SEQ ID NO: 2554869 - RNA, 19 nt, Artificial Sequence
  Description of Artificial Sequence: Synthetic oligonucleotide
cuguggccuuccaggcaaa

SEQ ID NO: 2554870 - RNA, 19 nt, Artificial Sequence
  Description of Artificial Sequence: Synthetic oligonucleotide
cucuugcaucacagaggcu

SEQ ID NO: 2554871 - RNA, 19 nt, Artificial Sequence
  Description of Artificial Sequence: Synthetic oligonucleotide
ggacgaacaccacccgauu

SEQ ID NO: 2554872 - RNA, 19 nt, Artificial Sequence
  Description of Artificial Sequence: Synthetic oligonucleotide
ccgucccucauuccaucca

SEQ ID NO: 2554873 - RNA, 19 nt, Artificial Sequence
  Description of Artificial Sequence: Synthetic oligonucleotide
ccaggcaaaguaggcucca

SEQ ID NO: 2554874 - RNA, 19 nt, Artificial Sequence
  Description of Artificial Sequence: Synthetic oligonucleotide
caccacccgauuggguaua

SEQ ID NO: 2554875 - RNA, 19 nt, Artificial Sequence
  Description of Artificial Sequence: Synthetic oligonucleotide
caguuggggugagucuccu

SEQ ID NO: 2554876 - RNA, 19 nt, Artificial Sequence
  Description of Artificial Sequence: Synthetic oligonucleotide
gcuuaccagaugggcugaa

SEQ ID NO: 2554877 - RNA, 19 nt, Artificial Sequence
  Description of Artificial Sequence: Synthetic oligonucleotide
gcuguaugaauggcaucuu

SEQ ID NO: 2554878 - RNA, 19 nt, Artificial Sequence
  Description of Artificial Sequence: Synthetic oligonucleotide
agccgcgcucugccaucuu

SEQ ID NO: 2554879 - RNA, 19 nt, Artificial Sequence
  Description of Artificial Sequence: Synthetic oligonucleotide
ccgcgcucugccaucuuua

SEQ ID NO: 2554880 - RNA, 19 nt, Artificial Sequence
  Description of Artificial Sequence: Synthetic oligonucleotide
ccagcugagcugugggaau

SEQ ID NO: 2554881 - RNA, 19 nt, Artificial Sequence
  Description of Artificial Sequence: Synthetic oligonucleotide
cucuguaaucugggcccau

SEQ ID NO: 2554882 - RNA, 19 nt, Artificial Sequence
  Description of Artificial Sequence: Synthetic oligonucleotide
cacuucaguuggggugagu

SEQ ID NO: 2554883 - RNA, 19 nt, Artificial Sequence
  Description of Artificial Sequence: Synthetic oligonucleotide
gccgcgcucugccaucuuu

SEQ ID NO: 2554884 - RNA, 19 nt, Artificial Sequence
  Description of Artificial Sequence: Synthetic oligonucleotide
gcugugggaauggguucuu

SEQ ID NO: 2554885 - RNA, 19 nt, Artificial Sequence
  Description of Artificial Sequence: Synthetic oligonucleotide
ccaaaccgauaugcuuggu

SEQ ID NO: 2554886 - RNA, 19 nt, Artificial Sequence
  Description of Artificial Sequence: Synthetic oligonucleotide
ccacccgauuggguauacu

SEQ ID NO: 2554887 - RNA, 19 nt, Artificial Sequence
  Description of Artificial Sequence: Synthetic oligonucleotide
uuugucaugggcuucaugg

SEQ ID NO: 2554888 - RNA, 19 nt, Artificial Sequence
  Description of Artificial Sequence: Synthetic oligonucleotide
ugauuugugccacugaucc

SEQ ID NO: 2554889 - RNA, 19 nt, Artificial Sequence
  Description of Artificial Sequence: Synthetic oligonucleotide
uacgauuuccucuaaaacc

SEQ ID NO: 2554890 - RNA, 19 nt, Artificial Sequence
  Description of Artificial Sequence: Synthetic oligonucleotide
aacaguaguucacagaccu

SEQ ID NO: 2554891 - RNA, 19 nt, Artificial Sequence
  Description of Artificial Sequence: Synthetic oligonucleotide
uaaaaccucaccaucuccc

SEQ ID NO: 2554892 - RNA, 19 nt, Artificial Sequence
  Description of Artificial Sequence: Synthetic oligonucleotide
ucuuacuucgcuuuucuga

SEQ ID NO: 2554893 - RNA, 19 nt, Artificial Sequence
  Description of Artificial Sequence: Synthetic oligonucleotide
uguacgaccugucucuggg

SEQ ID NO: 2554894 - RNA, 19 nt, Artificial Sequence
  Description of Artificial Sequence: Synthetic oligonucleotide
uuugguuacgauuuccucu

SEQ ID NO: 2554895 - RNA, 19 nt, Artificial Sequence
  Description of Artificial Sequence: Synthetic oligonucleotide
aaugacacucugucgagca

SEQ ID NO: 2554896 - RNA, 19 nt, Artificial Sequence
  Description of Artificial Sequence: Synthetic oligonucleotide
aaggcaauuggacccaucu

SEQ ID NO: 2554897 - RNA, 19 nt, Artificial Sequence
  Description of Artificial Sequence: Synthetic oligonucleotide
ugcuacucuucuuacuucg

SEQ ID NO: 2554898 - RNA, 19 nt, Artificial Sequence
  Description of Artificial Sequence: Synthetic oligonucleotide
uuacgauuuccucuaaaac

SEQ ID NO: 2554899 - RNA, 19 nt, Artificial Sequence
  Description of Artificial Sequence: Synthetic oligonucleotide
uguugauuucccugugucg

SEQ ID NO: 2554900 - RNA, 19 nt, Artificial Sequence
  Description of Artificial Sequence: Synthetic oligonucleotide
cuggauacgagacuucugc

SEQ ID NO: 2554901 - RNA, 19 nt, Artificial Sequence
  Description of Artificial Sequence: Synthetic oligonucleotide
cuuacuucgcuuuucugac

SEQ ID NO: 2554902 - RNA, 19 nt, Artificial Sequence
  Description of Artificial Sequence: Synthetic oligonucleotide
uacuucgcuuuucugaccc

SEQ ID NO: 2554903 - RNA, 19 nt, Artificial Sequence
  Description of Artificial Sequence: Synthetic oligonucleotide
gauacgagacuucugcuca

SEQ ID NO: 2554904 - RNA, 19 nt, Artificial Sequence
  Description of Artificial Sequence: Synthetic oligonucleotide
ugggccaucguccuccccg

SEQ ID NO: 2554905 - RNA, 19 nt, Artificial Sequence
  Description of Artificial Sequence: Synthetic oligonucleotide
uugccuuuccucuucagcu

SEQ ID NO: 2554906 - RNA, 19 nt, Artificial Sequence
  Description of Artificial Sequence: Synthetic oligonucleotide
ucuuugguuacgauuuccu

SEQ ID NO: 2554907 - RNA, 19 nt, Artificial Sequence
  Description of Artificial Sequence: Synthetic oligonucleotide
ugcucaucagucaggacug

SEQ ID NO: 2554908 - RNA, 19 nt, Artificial Sequence
  Description of Artificial Sequence: Synthetic oligonucleotide
ugcuucucuccucagaggu

SEQ ID NO: 2554909 - RNA, 19 nt, Artificial Sequence
  Description of Artificial Sequence: Synthetic oligonucleotide
gacugcgacuccucgagcg

SEQ ID NO: 2554910 - RNA, 19 nt, Artificial Sequence
  Description of Artificial Sequence: Synthetic oligonucleotide
gacccaucugucuucaagc

SEQ ID NO: 2554911 - RNA, 19 nt, Artificial Sequence
  Description of Artificial Sequence: Synthetic oligonucleotide
ugaggggccgggcagagcc

SEQ ID NO: 2554912 - RNA, 19 nt, Artificial Sequence
  Description of Artificial Sequence: Synthetic oligonucleotide
caguaguucacagaccugg

SEQ ID NO: 2554913 - RNA, 19 nt, Artificial Sequence
  Description of Artificial Sequence: Synthetic oligonucleotide
aaaaccucaccaucucccu

SEQ ID NO: 2554914 - RNA, 19 nt, Artificial Sequence
  Description of Artificial Sequence: Synthetic oligonucleotide
uuuccucuaaaaccucacc

SEQ ID NO: 2554915 - RNA, 19 nt, Artificial Sequence
  Description of Artificial Sequence: Synthetic oligonucleotide
ucgagcaucccacuccucc

SEQ ID NO: 2554916 - RNA, 19 nt, Artificial Sequence
  Description of Artificial Sequence: Synthetic oligonucleotide
acccaucugucuucaagcc

SEQ ID NO: 2554917 - RNA, 19 nt, Artificial Sequence
  Description of Artificial Sequence: Synthetic oligonucleotide
uugcgaaugacacucuguc

SEQ ID NO: 2554918 - RNA, 19 nt, Artificial Sequence
  Description of Artificial Sequence: Synthetic oligonucleotide
ucuaaaaccucaccaucuc

SEQ ID NO: 2554919 - RNA, 19 nt, Artificial Sequence
  Description of Artificial Sequence: Synthetic oligonucleotide
ugcgaaugacacucugucg

SEQ ID NO: 2554920 - RNA, 19 nt, Artificial Sequence
  Description of Artificial Sequence: Synthetic oligonucleotide
gacgaugcggagcuggaag

SEQ ID NO: 2554921 - RNA, 19 nt, Artificial Sequence
  Description of Artificial Sequence: Synthetic oligonucleotide
accaccuugcgaaugacac

SEQ ID NO: 2554922 - RNA, 19 nt, Artificial Sequence
  Description of Artificial Sequence: Synthetic oligonucleotide
ugaugagccuuguacgacc

SEQ ID NO: 2554923 - RNA, 19 nt, Artificial Sequence
  Description of Artificial Sequence: Synthetic oligonucleotide
cugagcaguucuucgaggc

SEQ ID NO: 2554924 - RNA, 19 nt, Artificial Sequence
  Description of Artificial Sequence: Synthetic oligonucleotide
cuaaaaccucaccaucucc

SEQ ID NO: 2554925 - RNA, 19 nt, Artificial Sequence
  Description of Artificial Sequence: Synthetic oligonucleotide
aucacuggaggaugaggac

SEQ ID NO: 2554926 - RNA, 19 nt, Artificial Sequence
  Description of Artificial Sequence: Synthetic oligonucleotide
ugugccacugauccaguga

SEQ ID NO: 2554927 - RNA, 19 nt, Artificial Sequence
  Description of Artificial Sequence: Synthetic oligonucleotide
caucagucaggacugggcc

SEQ ID NO: 2554928 - RNA, 19 nt, Artificial Sequence
  Description of Artificial Sequence: Synthetic oligonucleotide
ugcuuguugauuucccugu

SEQ ID NO: 2554929 - RNA, 19 nt, Artificial Sequence
  Description of Artificial Sequence: Synthetic oligonucleotide
cacugauccagugaggggc

SEQ ID NO: 2554930 - RNA, 19 nt, Artificial Sequence
  Description of Artificial Sequence: Synthetic oligonucleotide
auuggacccaucugucuuc

SEQ ID NO: 2554931 - RNA, 19 nt, Artificial Sequence
  Description of Artificial Sequence: Synthetic oligonucleotide
augaggacgaugcggagcu

SEQ ID NO: 2554932 - RNA, 19 nt, Artificial Sequence
  Description of Artificial Sequence: Synthetic oligonucleotide
accaucucccuugaugagc

SEQ ID NO: 2554933 - RNA, 19 nt, Artificial Sequence
  Description of Artificial Sequence: Synthetic oligonucleotide
ccaacaguaguucacagac

SEQ ID NO: 2554934 - RNA, 19 nt, Artificial Sequence
  Description of Artificial Sequence: Synthetic oligonucleotide
guuacgauuuccucuaaaa

SEQ ID NO: 2554935 - RNA, 19 nt, Artificial Sequence
  Description of Artificial Sequence: Synthetic oligonucleotide
cuugcgagagccaacguga

SEQ ID NO: 2554936 - RNA, 19 nt, Artificial Sequence
  Description of Artificial Sequence: Synthetic oligonucleotide
uugguuacgauuuccucua

SEQ ID NO: 2554937 - RNA, 19 nt, Artificial Sequence
  Description of Artificial Sequence: Synthetic oligonucleotide
cuugccuuuccucuucagc

SEQ ID NO: 2554938 - RNA, 19 nt, Artificial Sequence
  Description of Artificial Sequence: Synthetic oligonucleotide
gaccuggggacuuggaggc

SEQ ID NO: 2554939 - RNA, 19 nt, Artificial Sequence
  Description of Artificial Sequence: Synthetic oligonucleotide
cuucuuccggccaucacug

SEQ ID NO: 2554940 - RNA, 19 nt, Artificial Sequence
  Description of Artificial Sequence: Synthetic oligonucleotide
acgaccugucucugggucc

SEQ ID NO: 2554941 - RNA, 19 nt, Artificial Sequence
  Description of Artificial Sequence: Synthetic oligonucleotide
aagccaccaacaguaguuc

SEQ ID NO: 2554942 - RNA, 19 nt, Artificial Sequence
  Description of Artificial Sequence: Synthetic oligonucleotide
uucgaggcguccuugcuac

SEQ ID NO: 2554943 - RNA, 19 nt, Artificial Sequence
  Description of Artificial Sequence: Synthetic oligonucleotide
uugucaugggcuucauggc

SEQ ID NO: 2554944 - RNA, 19 nt, Artificial Sequence
  Description of Artificial Sequence: Synthetic oligonucleotide
caggacugggccaucgucc

SEQ ID NO: 2554945 - RNA, 19 nt, Artificial Sequence
  Description of Artificial Sequence: Synthetic oligonucleotide
gugccacugauccagugag

SEQ ID NO: 2554946 - RNA, 19 nt, Artificial Sequence
  Description of Artificial Sequence: Synthetic oligonucleotide
ccuugaugagccuuguacg

SEQ ID NO: 2554947 - RNA, 19 nt, Artificial Sequence
  Description of Artificial Sequence: Synthetic oligonucleotide
cauggccuggauacgagac

SEQ ID NO: 2554948 - RNA, 19 nt, Artificial Sequence
  Description of Artificial Sequence: Synthetic oligonucleotide
ucugucuucaagccaccaa

SEQ ID NO: 2554949 - RNA, 19 nt, Artificial Sequence
  Description of Artificial Sequence: Synthetic oligonucleotide
ucucccuugaugagccuug

SEQ ID NO: 2554950 - RNA, 19 nt, Artificial Sequence
  Description of Artificial Sequence: Synthetic oligonucleotide
ugugucguucuuugguuac

SEQ ID NO: 2554951 - RNA, 19 nt, Artificial Sequence
  Description of Artificial Sequence: Synthetic oligonucleotide
ucuuccggccaucacugga

SEQ ID NO: 2554952 - RNA, 19 nt, Artificial Sequence
  Description of Artificial Sequence: Synthetic oligonucleotide
uucaagccaccaacaguag

SEQ ID NO: 2554953 - RNA, 19 nt, Artificial Sequence
  Description of Artificial Sequence: Synthetic oligonucleotide
cuugaugagccuuguacga

SEQ ID NO: 2554954 - RNA, 19 nt, Artificial Sequence
  Description of Artificial Sequence: Synthetic oligonucleotide
ggcuucauggccuggauac

SEQ ID NO: 2554955 - RNA, 19 nt, Artificial Sequence
  Description of Artificial Sequence: Synthetic oligonucleotide
cuuugguuacgauuuccuc

SEQ ID NO: 2554956 - RNA, 19 nt, Artificial Sequence
  Description of Artificial Sequence: Synthetic oligonucleotide
uguccuccgggccuugugc

SEQ ID NO: 2554957 - RNA, 19 nt, Artificial Sequence
  Description of Artificial Sequence: Synthetic oligonucleotide
ugucgagcaucccacuccu

SEQ ID NO: 2554958 - RNA, 19 nt, Artificial Sequence
  Description of Artificial Sequence: Synthetic oligonucleotide
aagcaggccugcucgcauc

SEQ ID NO: 2554959 - RNA, 19 nt, Artificial Sequence
  Description of Artificial Sequence: Synthetic oligonucleotide
gaggacgaugcggagcugg

SEQ ID NO: 2554960 - RNA, 19 nt, Artificial Sequence
  Description of Artificial Sequence: Synthetic oligonucleotide
uuguacgaccugucucugg

SEQ ID NO: 2554961 - RNA, 19 nt, Artificial Sequence
  Description of Artificial Sequence: Synthetic oligonucleotide
aguucacagaccugggaaa

SEQ ID NO: 2554962 - RNA, 19 nt, Artificial Sequence
  Description of Artificial Sequence: Synthetic oligonucleotide
acucugucgagcaucccac

SEQ ID NO: 2554963 - RNA, 19 nt, Artificial Sequence
  Description of Artificial Sequence: Synthetic oligonucleotide
ucacagaccugggaaacca

SEQ ID NO: 2554964 - RNA, 19 nt, Artificial Sequence
  Description of Artificial Sequence: Synthetic oligonucleotide
ucguucuuugguuacgauu

SEQ ID NO: 2554965 - RNA, 19 nt, Artificial Sequence
  Description of Artificial Sequence: Synthetic oligonucleotide
cuuccggccaucacuggag

SEQ ID NO: 2554966 - RNA, 19 nt, Artificial Sequence
  Description of Artificial Sequence: Synthetic oligonucleotide
caacaguaguucacagacc

SEQ ID NO: 2554967 - RNA, 19 nt, Artificial Sequence
  Description of Artificial Sequence: Synthetic oligonucleotide
cugucgagcaucccacucc

SEQ ID NO: 2554968 - RNA, 19 nt, Artificial Sequence
  Description of Artificial Sequence: Synthetic oligonucleotide
ugagccuuguacgaccugu

SEQ ID NO: 2554969 - RNA, 19 nt, Artificial Sequence
  Description of Artificial Sequence: Synthetic oligonucleotide
acuucgcuuuucugacccc

SEQ ID NO: 2554970 - RNA, 19 nt, Artificial Sequence
  Description of Artificial Sequence: Synthetic oligonucleotide
ucgagcgcuugcgagagcc

SEQ ID NO: 2554971 - RNA, 19 nt, Artificial Sequence
  Description of Artificial Sequence: Synthetic oligonucleotide
uacgaccugucucuggguc

SEQ ID NO: 2554972 - RNA, 19 nt, Artificial Sequence
  Description of Artificial Sequence: Synthetic oligonucleotide
aaaccagggcccucaggga

SEQ ID NO: 2554973 - RNA, 19 nt, Artificial Sequence
  Description of Artificial Sequence: Synthetic oligonucleotide
uuacuucgcuuuucugacc

SEQ ID NO: 2554974 - RNA, 19 nt, Artificial Sequence
  Description of Artificial Sequence: Synthetic oligonucleotide
ucugucgagcaucccacuc

SEQ ID NO: 2554975 - RNA, 19 nt, Artificial Sequence
  Description of Artificial Sequence: Synthetic oligonucleotide
accugggaaaccagggccc

SEQ ID NO: 2554976 - RNA, 19 nt, Artificial Sequence
  Description of Artificial Sequence: Synthetic oligonucleotide
caccuugcgaaugacacuc

SEQ ID NO: 2554977 - RNA, 19 nt, Artificial Sequence
  Description of Artificial Sequence: Synthetic oligonucleotide
acugauccagugaggggcc

SEQ ID NO: 2554978 - RNA, 19 nt, Artificial Sequence
  Description of Artificial Sequence: Synthetic oligonucleotide
uggauacgagacuucugcu

SEQ ID NO: 2554979 - RNA, 19 nt, Artificial Sequence
  Description of Artificial Sequence: Synthetic oligonucleotide
ucaggacugggccaucguc

SEQ ID NO: 2554980 - RNA, 19 nt, Artificial Sequence
  Description of Artificial Sequence: Synthetic oligonucleotide
uccccggcugauuugugcc

SEQ ID NO: 2554981 - RNA, 19 nt, Artificial Sequence
  Description of Artificial Sequence: Synthetic oligonucleotide
cugauuugugccacugauc

SEQ ID NO: 2554982 - RNA, 19 nt, Artificial Sequence
  Description of Artificial Sequence: Synthetic oligonucleotide
gcgaaugacacucugucga

SEQ ID NO: 2554983 - RNA, 19 nt, Artificial Sequence
  Description of Artificial Sequence: Synthetic oligonucleotide
aguaguucacagaccuggg

SEQ ID NO: 2554984 - RNA, 19 nt, Artificial Sequence
  Description of Artificial Sequence: Synthetic oligonucleotide
cucgcaucuggaaggcuag

SEQ ID NO: 2554985 - RNA, 19 nt, Artificial Sequence
  Description of Artificial Sequence: Synthetic oligonucleotide
uucuucgaggcguccuugc

SEQ ID NO: 2554986 - RNA, 19 nt, Artificial Sequence
  Description of Artificial Sequence: Synthetic oligonucleotide
uugcgagagccaacgugag

SEQ ID NO: 2554987 - RNA, 19 nt, Artificial Sequence
  Description of Artificial Sequence: Synthetic oligonucleotide
gacacucugucgagcaucc

SEQ ID NO: 2554988 - RNA, 19 nt, Artificial Sequence
  Description of Artificial Sequence: Synthetic oligonucleotide
gaaugacacucugucgagc

SEQ ID NO: 2554989 - RNA, 19 nt, Artificial Sequence
  Description of Artificial Sequence: Synthetic oligonucleotide
ugccacugauccagugagg

SEQ ID NO: 2554990 - RNA, 19 nt, Artificial Sequence
  Description of Artificial Sequence: Synthetic oligonucleotide
aggccauccccucgggugg

SEQ ID NO: 2554991 - RNA, 19 nt, Artificial Sequence
  Description of Artificial Sequence: Synthetic oligonucleotide
aucagucaggacugggcca

SEQ ID NO: 2554992 - RNA, 19 nt, Artificial Sequence
  Description of Artificial Sequence: Synthetic oligonucleotide
uugaugagccuuguacgac

SEQ ID NO: 2554993 - RNA, 19 nt, Artificial Sequence
  Description of Artificial Sequence: Synthetic oligonucleotide
gacuccucgagcgcuugcg

SEQ ID NO: 2554994 - RNA, 19 nt, Artificial Sequence
  Description of Artificial Sequence: Synthetic oligonucleotide
aggaugaggacgaugcgga

SEQ ID NO: 2554995 - RNA, 19 nt, Artificial Sequence
  Description of Artificial Sequence: Synthetic oligonucleotide
ccugcucgcaucuggaagg

SEQ ID NO: 2554996 - RNA, 19 nt, Artificial Sequence
  Description of Artificial Sequence: Synthetic oligonucleotide
uggaaggcuaggccauccc

SEQ ID NO: 2554997 - RNA, 19 nt, Artificial Sequence
  Description of Artificial Sequence: Synthetic oligonucleotide
aaaggcaauuggacccauc

SEQ ID NO: 2554998 - RNA, 19 nt, Artificial Sequence
  Description of Artificial Sequence: Synthetic oligonucleotide
gcgagagccaacgugagcc

SEQ ID NO: 2554999 - RNA, 19 nt, Artificial Sequence
  Description of Artificial Sequence: Synthetic oligonucleotide
ucuucgaggcguccuugcu

SEQ ID NO: 2555000 - RNA, 19 nt, Artificial Sequence
  Description of Artificial Sequence: Synthetic oligonucleotide
ugucguucuuugguuacga

SEQ ID NO: 2555001 - RNA, 19 nt, Artificial Sequence
  Description of Artificial Sequence: Synthetic oligonucleotide
uucacagaccugggaaacc

SEQ ID NO: 2555002 - RNA, 19 nt, Artificial Sequence
  Description of Artificial Sequence: Synthetic oligonucleotide
gaccucgcuguccuccggg

SEQ ID NO: 2555003 - RNA, 19 nt, Artificial Sequence
  Description of Artificial Sequence: Synthetic oligonucleotide
aggcaauuggacccaucug

SEQ ID NO: 2555004 - RNA, 19 nt, Artificial Sequence
  Description of Artificial Sequence: Synthetic oligonucleotide
uccuugcuacucuucuuac

SEQ ID NO: 2555005 - RNA, 19 nt, Artificial Sequence
  Description of Artificial Sequence: Synthetic oligonucleotide
cucuaaaaccucaccaucu

SEQ ID NO: 2555006 - RNA, 19 nt, Artificial Sequence
  Description of Artificial Sequence: Synthetic oligonucleotide
aggccuugugaccugggga

SEQ ID NO: 2555007 - RNA, 19 nt, Artificial Sequence
  Description of Artificial Sequence: Synthetic oligonucleotide
ugcgagagccaacgugagc

SEQ ID NO: 2555008 - RNA, 19 nt, Artificial Sequence
  Description of Artificial Sequence: Synthetic oligonucleotide
ugacacucugucgagcauc

SEQ ID NO: 2555009 - RNA, 19 nt, Artificial Sequence
  Description of Artificial Sequence: Synthetic oligonucleotide
acgagacuucugcucauca

SEQ ID NO: 2555010 - RNA, 19 nt, Artificial Sequence
  Description of Artificial Sequence: Synthetic oligonucleotide
gccacugauccagugaggg

SEQ ID NO: 2555011 - RNA, 19 nt, Artificial Sequence
  Description of Artificial Sequence: Synthetic oligonucleotide
caccaacaguaguucacag

SEQ ID NO: 2555012 - RNA, 19 nt, Artificial Sequence
  Description of Artificial Sequence: Synthetic oligonucleotide
acgaugcggagcuggaaga

SEQ ID NO: 2555013 - RNA, 19 nt, Artificial Sequence
  Description of Artificial Sequence: Synthetic oligonucleotide
guugauuucccugugucgu

SEQ ID NO: 2555014 - RNA, 19 nt, Artificial Sequence
  Description of Artificial Sequence: Synthetic oligonucleotide
aaaccucaccaucucccuu

SEQ ID NO: 2555015 - RNA, 19 nt, Artificial Sequence
  Description of Artificial Sequence: Synthetic oligonucleotide
gauuugugccacugaucca

SEQ ID NO: 2555016 - RNA, 19 nt, Artificial Sequence
  Description of Artificial Sequence: Synthetic oligonucleotide
cccuugaugagccuuguac

SEQ ID NO: 2555017 - RNA, 19 nt, Artificial Sequence
  Description of Artificial Sequence: Synthetic oligonucleotide
ugcugcaggccuugugacc

SEQ ID NO: 2555018 - RNA, 19 nt, Artificial Sequence
  Description of Artificial Sequence: Synthetic oligonucleotide
cagagccucagccgggugc

SEQ ID NO: 2555019 - RNA, 19 nt, Artificial Sequence
  Description of Artificial Sequence: Synthetic oligonucleotide
ggauacgagacuucugcuc

SEQ ID NO: 2555020 - RNA, 19 nt, Artificial Sequence
  Description of Artificial Sequence: Synthetic oligonucleotide
guaguucacagaccuggga

SEQ ID NO: 2555021 - RNA, 19 nt, Artificial Sequence
  Description of Artificial Sequence: Synthetic oligonucleotide
ucagccgggugcagcacca

SEQ ID NO: 2555022 - RNA, 19 nt, Artificial Sequence
  Description of Artificial Sequence: Synthetic oligonucleotide
ugggaaaccagggcccuca

SEQ ID NO: 2555023 - RNA, 19 nt, Artificial Sequence
  Description of Artificial Sequence: Synthetic oligonucleotide
uuugugccacugauccagu

SEQ ID NO: 2555024 - RNA, 19 nt, Artificial Sequence
  Description of Artificial Sequence: Synthetic oligonucleotide
cucuccucagaggugcugc

SEQ ID NO: 2555025 - RNA, 19 nt, Artificial Sequence
  Description of Artificial Sequence: Synthetic oligonucleotide
agcuggaccucgcuguccu

SEQ ID NO: 2555026 - RNA, 19 nt, Artificial Sequence
  Description of Artificial Sequence: Synthetic oligonucleotide
ggcaauuggacccaucugu

SEQ ID NO: 2555027 - RNA, 19 nt, Artificial Sequence
  Description of Artificial Sequence: Synthetic oligonucleotide
guucacagaccugggaaac

SEQ ID NO: 2555028 - RNA, 19 nt, Artificial Sequence
  Description of Artificial Sequence: Synthetic oligonucleotide
ccaucucccuugaugagcc

SEQ ID NO: 2555029 - RNA, 19 nt, Artificial Sequence
  Description of Artificial Sequence: Synthetic oligonucleotide
auggccuggauacgagacu

SEQ ID NO: 2555030 - RNA, 19 nt, Artificial Sequence
  Description of Artificial Sequence: Synthetic oligonucleotide
agucaggacugggccaucg

SEQ ID NO: 2555031 - RNA, 19 nt, Artificial Sequence
  Description of Artificial Sequence: Synthetic oligonucleotide
cuccucgagcgcuugcgag

SEQ ID NO: 2555032 - RNA, 19 nt, Artificial Sequence
  Description of Artificial Sequence: Synthetic oligonucleotide
ucccugugucguucuuugg

SEQ ID NO: 2555033 - RNA, 19 nt, Artificial Sequence
  Description of Artificial Sequence: Synthetic oligonucleotide
gcuugcgagagccaacgug

SEQ ID NO: 2555034 - RNA, 19 nt, Artificial Sequence
  Description of Artificial Sequence: Synthetic oligonucleotide
ggugcugcaggccuuguga

SEQ ID NO: 2555035 - RNA, 19 nt, Artificial Sequence
  Description of Artificial Sequence: Synthetic oligonucleotide
aggcugagcaguucuucga

SEQ ID NO: 2555036 - RNA, 19 nt, Artificial Sequence
  Description of Artificial Sequence: Synthetic oligonucleotide
gcugagcaguucuucgagg

SEQ ID NO: 2555037 - RNA, 19 nt, Artificial Sequence
  Description of Artificial Sequence: Synthetic oligonucleotide
gaugcggagcuggaagaac

SEQ ID NO: 2555038 - RNA, 19 nt, Artificial Sequence
  Description of Artificial Sequence: Synthetic oligonucleotide
uugugaccuggggacuugg

SEQ ID NO: 2555039 - RNA, 19 nt, Artificial Sequence
  Description of Artificial Sequence: Synthetic oligonucleotide
ggccuugugaccuggggac

SEQ ID NO: 2555040 - RNA, 19 nt, Artificial Sequence
  Description of Artificial Sequence: Synthetic oligonucleotide
ggguccaccaccuugcgaa

SEQ ID NO: 2555041 - RNA, 19 nt, Artificial Sequence
  Description of Artificial Sequence: Synthetic oligonucleotide
caggccuugugaccugggg

SEQ ID NO: 2555042 - RNA, 19 nt, Artificial Sequence
  Description of Artificial Sequence: Synthetic oligonucleotide
cuccccggcugauuugugc

SEQ ID NO: 2555043 - RNA, 19 nt, Artificial Sequence
  Description of Artificial Sequence: Synthetic oligonucleotide
acugggccaucguccuccc

SEQ ID NO: 2555044 - RNA, 19 nt, Artificial Sequence
  Description of Artificial Sequence: Synthetic oligonucleotide
agccuuguacgaccugucu

SEQ ID NO: 2555045 - RNA, 19 nt, Artificial Sequence
  Description of Artificial Sequence: Synthetic oligonucleotide
cuuugucaugggcuucaug

SEQ ID NO: 2555046 - RNA, 19 nt, Artificial Sequence
  Description of Artificial Sequence: Synthetic oligonucleotide
cuugcuacucuucuuacuu

SEQ ID NO: 2555047 - RNA, 19 nt, Artificial Sequence
  Description of Artificial Sequence: Synthetic oligonucleotide
agccgggugcagcaccacg

SEQ ID NO: 2555048 - RNA, 19 nt, Artificial Sequence
  Description of Artificial Sequence: Synthetic oligonucleotide
aguucuucgaggcguccuu

SEQ ID NO: 2555049 - RNA, 19 nt, Artificial Sequence
  Description of Artificial Sequence: Synthetic oligonucleotide
aggcuaggccauccccucg

SEQ ID NO: 2555050 - RNA, 19 nt, Artificial Sequence
  Description of Artificial Sequence: Synthetic oligonucleotide
agccaccaacaguaguuca

SEQ ID NO: 2555051 - RNA, 19 nt, Artificial Sequence
  Description of Artificial Sequence: Synthetic oligonucleotide
cuggaccucgcuguccucc

SEQ ID NO: 2555052 - RNA, 19 nt, Artificial Sequence
  Description of Artificial Sequence: Synthetic oligonucleotide
gugucguucuuugguuacg

SEQ ID NO: 2555053 - RNA, 19 nt, Artificial Sequence
  Description of Artificial Sequence: Synthetic oligonucleotide
uugauuucccugugucguu

SEQ ID NO: 2555054 - RNA, 19 nt, Artificial Sequence
  Description of Artificial Sequence: Synthetic oligonucleotide
augcggagcuggaagaacu

SEQ ID NO: 2555055 - RNA, 19 nt, Artificial Sequence
  Description of Artificial Sequence: Synthetic oligonucleotide
cucagccgggugcagcacc

SEQ ID NO: 2555056 - RNA, 19 nt, Artificial Sequence
  Description of Artificial Sequence: Synthetic oligonucleotide
uccucuucuuauccuuguu

SEQ ID NO: 2555057 - RNA, 19 nt, Artificial Sequence
  Description of Artificial Sequence: Synthetic oligonucleotide
ggcuaggccauccccucgg

SEQ ID NO: 2555058 - RNA, 19 nt, Artificial Sequence
  Description of Artificial Sequence: Synthetic oligonucleotide
uggccuggauacgagacuu

SEQ ID NO: 2555059 - RNA, 19 nt, Artificial Sequence
  Description of Artificial Sequence: Synthetic oligonucleotide
caccaucucccuugaugag

SEQ ID NO: 2555060 - RNA, 19 nt, Artificial Sequence
  Description of Artificial Sequence: Synthetic oligonucleotide
cuggaaggcuaggccaucc

SEQ ID NO: 2555061 - RNA, 19 nt, Artificial Sequence
  Description of Artificial Sequence: Synthetic oligonucleotide
ccucuaaaaccucaccauc

SEQ ID NO: 2555062 - RNA, 19 nt, Artificial Sequence
  Description of Artificial Sequence: Synthetic oligonucleotide
caagccaccaacaguaguu

SEQ ID NO: 2555063 - RNA, 19 nt, Artificial Sequence
  Description of Artificial Sequence: Synthetic oligonucleotide
agcaggccugcucgcaucu

SEQ ID NO: 2555064 - RNA, 19 nt, Artificial Sequence
  Description of Artificial Sequence: Synthetic oligonucleotide
cuucauggccuggauacga

SEQ ID NO: 2555065 - RNA, 19 nt, Artificial Sequence
  Description of Artificial Sequence: Synthetic oligonucleotide
cuugcgaaugacacucugu

SEQ ID NO: 2555066 - RNA, 19 nt, Artificial Sequence
  Description of Artificial Sequence: Synthetic oligonucleotide
auacgagacuucugcucau

SEQ ID NO: 2555067 - RNA, 19 nt, Artificial Sequence
  Description of Artificial Sequence: Synthetic oligonucleotide
ccucuucuuauccuuguuc

SEQ ID NO: 2555068 - RNA, 19 nt, Artificial Sequence
  Description of Artificial Sequence: Synthetic oligonucleotide
gugcugcaggccuugugac

SEQ ID NO: 2555069 - RNA, 19 nt, Artificial Sequence
  Description of Artificial Sequence: Synthetic oligonucleotide
cuugcuuguugauuucccu

SEQ ID NO: 2555070 - RNA, 19 nt, Artificial Sequence
  Description of Artificial Sequence: Synthetic oligonucleotide
acuccucgagcgcuugcga

SEQ ID NO: 2555071 - RNA, 19 nt, Artificial Sequence
  Description of Artificial Sequence: Synthetic oligonucleotide
ucgcaucuggaaggcuagg

SEQ ID NO: 2555072 - RNA, 19 nt, Artificial Sequence
  Description of Artificial Sequence: Synthetic oligonucleotide
uccggccaucacuggagga

SEQ ID NO: 2555073 - RNA, 19 nt, Artificial Sequence
  Description of Artificial Sequence: Synthetic oligonucleotide
gccugcucgcaucuggaag

SEQ ID NO: 2555074 - RNA, 19 nt, Artificial Sequence
  Description of Artificial Sequence: Synthetic oligonucleotide
agggcccucagggaagcag

SEQ ID NO: 2555075 - RNA, 19 nt, Artificial Sequence
  Description of Artificial Sequence: Synthetic oligonucleotide
cuuguacgaccugucucug

SEQ ID NO: 2555076 - RNA, 19 nt, Artificial Sequence
  Description of Artificial Sequence: Synthetic oligonucleotide
acaguaguucacagaccug

SEQ ID NO: 2555077 - RNA, 19 nt, Artificial Sequence
  Description of Artificial Sequence: Synthetic oligonucleotide
augacacucugucgagcau

SEQ ID NO: 2555078 - RNA, 19 nt, Artificial Sequence
  Description of Artificial Sequence: Synthetic oligonucleotide
ugguuacgauuuccucuaa

SEQ ID NO: 2555079 - RNA, 19 nt, Artificial Sequence
  Description of Artificial Sequence: Synthetic oligonucleotide
cugucucuggguccaccac

SEQ ID NO: 2555080 - RNA, 19 nt, Artificial Sequence
  Description of Artificial Sequence: Synthetic oligonucleotide
cagggaagcaggccugcuc

SEQ ID NO: 2555081 - RNA, 19 nt, Artificial Sequence
  Description of Artificial Sequence: Synthetic oligonucleotide
gcuuguugauuucccugug

SEQ ID NO: 2555082 - RNA, 19 nt, Artificial Sequence
  Description of Artificial Sequence: Synthetic oligonucleotide
agcgcuugcgagagccaac

SEQ ID NO: 2555083 - RNA, 19 nt, Artificial Sequence
  Description of Artificial Sequence: Synthetic oligonucleotide
uacgagacuucugcucauc

SEQ ID NO: 2555084 - RNA, 19 nt, Artificial Sequence
  Description of Artificial Sequence: Synthetic oligonucleotide
augagccuuguacgaccug

SEQ ID NO: 2555085 - RNA, 19 nt, Artificial Sequence
  Description of Artificial Sequence: Synthetic oligonucleotide
acacucugucgagcauccc

SEQ ID NO: 2555086 - RNA, 19 nt, Artificial Sequence
  Description of Artificial Sequence: Synthetic oligonucleotide
gauuucccugugucguucu

SEQ ID NO: 2555087 - RNA, 19 nt, Artificial Sequence
  Description of Artificial Sequence: Synthetic oligonucleotide
uggcuugcuuguugauuuc

SEQ ID NO: 2555088 - RNA, 19 nt, Artificial Sequence
  Description of Artificial Sequence: Synthetic oligonucleotide
gccuuguacgaccugucuc

SEQ ID NO: 2555089 - RNA, 19 nt, Artificial Sequence
  Description of Artificial Sequence: Synthetic oligonucleotide
gcuugcuuguugauuuccc

SEQ ID NO: 2555090 - RNA, 19 nt, Artificial Sequence
  Description of Artificial Sequence: Synthetic oligonucleotide
cuacucuucuuacuucgcu

SEQ ID NO: 2555091 - RNA, 19 nt, Artificial Sequence
  Description of Artificial Sequence: Synthetic oligonucleotide
ccucagaggugcugcaggc

SEQ ID NO: 2555092 - RNA, 19 nt, Artificial Sequence
  Description of Artificial Sequence: Synthetic oligonucleotide
cauccccucggguggcuug

SEQ ID NO: 2555093 - RNA, 19 nt, Artificial Sequence
  Description of Artificial Sequence: Synthetic oligonucleotide
accucaccaucucccuuga

SEQ ID NO: 2555094 - RNA, 19 nt, Artificial Sequence
  Description of Artificial Sequence: Synthetic oligonucleotide
ccacugauccagugagggg

SEQ ID NO: 2555095 - RNA, 19 nt, Artificial Sequence
  Description of Artificial Sequence: Synthetic oligonucleotide
cuugugaccuggggacuug

SEQ ID NO: 2555096 - RNA, 19 nt, Artificial Sequence
  Description of Artificial Sequence: Synthetic oligonucleotide
caauuggacccaucugucu

SEQ ID NO: 2555097 - RNA, 19 nt, Artificial Sequence
  Description of Artificial Sequence: Synthetic oligonucleotide
ggcuugcuuguugauuucc

SEQ ID NO: 2555098 - RNA, 19 nt, Artificial Sequence
  Description of Artificial Sequence: Synthetic oligonucleotide
gcgcuugcgagagccaacg

SEQ ID NO: 2555099 - RNA, 19 nt, Artificial Sequence
  Description of Artificial Sequence: Synthetic oligonucleotide
gaugagccuuguacgaccu

SEQ ID NO: 2555100 - RNA, 19 nt, Artificial Sequence
  Description of Artificial Sequence: Synthetic oligonucleotide
gcaauuggacccaucuguc

SEQ ID NO: 2555101 - RNA, 19 nt, Artificial Sequence
  Description of Artificial Sequence: Synthetic oligonucleotide
cugcucgcaucuggaaggc

SEQ ID NO: 2555102 - RNA, 19 nt, Artificial Sequence
  Description of Artificial Sequence: Synthetic oligonucleotide
gcugauuugugccacugau

SEQ ID NO: 2555103 - RNA, 19 nt, Artificial Sequence
  Description of Artificial Sequence: Synthetic oligonucleotide
cugugucguucuuugguua

SEQ ID NO: 2555104 - RNA, 19 nt, Artificial Sequence
  Description of Artificial Sequence: Synthetic oligonucleotide
ucuggaaggcuaggccauc

SEQ ID NO: 2555105 - RNA, 19 nt, Artificial Sequence
  Description of Artificial Sequence: Synthetic oligonucleotide
gguuacgauuuccucuaaa

SEQ ID NO: 2555106 - RNA, 19 nt, Artificial Sequence
  Description of Artificial Sequence: Synthetic oligonucleotide
cgaaugacacucugucgag

SEQ ID NO: 2555107 - RNA, 19 nt, Artificial Sequence
  Description of Artificial Sequence: Synthetic oligonucleotide
aucucccuugaugagccuu

SEQ ID NO: 2555108 - RNA, 19 nt, Artificial Sequence
  Description of Artificial Sequence: Synthetic oligonucleotide
ucccuugaugagccuugua

SEQ ID NO: 2555109 - RNA, 19 nt, Artificial Sequence
  Description of Artificial Sequence: Synthetic oligonucleotide
gggcccucagggaagcagg

SEQ ID NO: 2555110 - RNA, 19 nt, Artificial Sequence
  Description of Artificial Sequence: Synthetic oligonucleotide
gagccuuguacgaccuguc

SEQ ID NO: 2555111 - RNA, 19 nt, Artificial Sequence
  Description of Artificial Sequence: Synthetic oligonucleotide
gccgggugcagcaccacgg

SEQ ID NO: 2555112 - RNA, 19 nt, Artificial Sequence
  Description of Artificial Sequence: Synthetic oligonucleotide
cuucgaggcguccuugcua

SEQ ID NO: 2555113 - RNA, 19 nt, Artificial Sequence
  Description of Artificial Sequence: Synthetic oligonucleotide
ccuggauacgagacuucug

SEQ ID NO: 2555114 - RNA, 19 nt, Artificial Sequence
  Description of Artificial Sequence: Synthetic oligonucleotide
gaggcguccuugcuacucu

SEQ ID NO: 2555115 - RNA, 19 nt, Artificial Sequence
  Description of Artificial Sequence: Synthetic oligonucleotide
gcuacucuucuuacuucgc

SEQ ID NO: 2555116 - RNA, 19 nt, Artificial Sequence
  Description of Artificial Sequence: Synthetic oligonucleotide
gggccaucguccuccccgg

SEQ ID NO: 2555117 - RNA, 19 nt, Artificial Sequence
  Description of Artificial Sequence: Synthetic oligonucleotide
cgagacuucugcucaucag

SEQ ID NO: 2555118 - RNA, 19 nt, Artificial Sequence
  Description of Artificial Sequence: Synthetic oligonucleotide
ccuugcgaaugacacucug

SEQ ID NO: 2555119 - RNA, 19 nt, Artificial Sequence
  Description of Artificial Sequence: Synthetic oligonucleotide
ugcgacuccucgagcgcuu

SEQ ID NO: 2555120 - RNA, 19 nt, Artificial Sequence
  Description of Artificial Sequence: Synthetic oligonucleotide
ccuuguacgaccugucucu

SEQ ID NO: 2555121 - RNA, 19 nt, Artificial Sequence
  Description of Artificial Sequence: Synthetic oligonucleotide
gcuugcuucucuccucaga

SEQ ID NO: 2555122 - RNA, 19 nt, Artificial Sequence
  Description of Artificial Sequence: Synthetic oligonucleotide
gaagcaggccugcucgcau

SEQ ID NO: 2555123 - RNA, 19 nt, Artificial Sequence
  Description of Artificial Sequence: Synthetic oligonucleotide
gcuaggccauccccucggg

SEQ ID NO: 2555124 - RNA, 19 nt, Artificial Sequence
  Description of Artificial Sequence: Synthetic oligonucleotide
gagcgcuugcgagagccaa

SEQ ID NO: 2555125 - RNA, 19 nt, Artificial Sequence
  Description of Artificial Sequence: Synthetic oligonucleotide
cguucuuugguuacgauuu

SEQ ID NO: 2555126 - RNA, 19 nt, Artificial Sequence
  Description of Artificial Sequence: Synthetic oligonucleotide
cggacugcgacuccucgag

SEQ ID NO: 2555127 - RNA, 19 nt, Artificial Sequence
  Description of Artificial Sequence: Synthetic oligonucleotide
uggggacuuggaggcugag

SEQ ID NO: 2555128 - RNA, 19 nt, Artificial Sequence
  Description of Artificial Sequence: Synthetic oligonucleotide
ggcugauuugugccacuga

SEQ ID NO: 2555129 - RNA, 19 nt, Artificial Sequence
  Description of Artificial Sequence: Synthetic oligonucleotide
ccaucguccuccccggcug

SEQ ID NO: 2555130 - RNA, 19 nt, Artificial Sequence
  Description of Artificial Sequence: Synthetic oligonucleotide
ugaggacgaugcggagcug

SEQ ID NO: 2555131 - RNA, 19 nt, Artificial Sequence
  Description of Artificial Sequence: Synthetic oligonucleotide
gcaucccacuccuccuuug

SEQ ID NO: 2555132 - RNA, 19 nt, Artificial Sequence
  Description of Artificial Sequence: Synthetic oligonucleotide
guccuccccggcugauuug

SEQ ID NO: 2555133 - RNA, 19 nt, Artificial Sequence
  Description of Artificial Sequence: Synthetic oligonucleotide
cuggggacuuggaggcuga

SEQ ID NO: 2555134 - RNA, 19 nt, Artificial Sequence
  Description of Artificial Sequence: Synthetic oligonucleotide
uccuccgggccuugugcuu

SEQ ID NO: 2555135 - RNA, 19 nt, Artificial Sequence
  Description of Artificial Sequence: Synthetic oligonucleotide
gggaaaccagggcccucag

SEQ ID NO: 2555136 - RNA, 19 nt, Artificial Sequence
  Description of Artificial Sequence: Synthetic oligonucleotide
ucgaggcguccuugcuacu

SEQ ID NO: 2555137 - RNA, 19 nt, Artificial Sequence
  Description of Artificial Sequence: Synthetic oligonucleotide
ggacugcgacuccucgagc

SEQ ID NO: 2555138 - RNA, 19 nt, Artificial Sequence
  Description of Artificial Sequence: Synthetic oligonucleotide
cugcaggccuugugaccug

SEQ ID NO: 2555139 - RNA, 19 nt, Artificial Sequence
  Description of Artificial Sequence: Synthetic oligonucleotide
ccucgagcgcuugcgagag

SEQ ID NO: 2555140 - RNA, 19 nt, Artificial Sequence
  Description of Artificial Sequence: Synthetic oligonucleotide
cgggccuugugcuugcuuc

SEQ ID NO: 2555141 - RNA, 19 nt, Artificial Sequence
  Description of Artificial Sequence: Synthetic oligonucleotide
gcugcaggccuugugaccu

SEQ ID NO: 2555142 - RNA, 19 nt, Artificial Sequence
  Description of Artificial Sequence: Synthetic oligonucleotide
aggcguccuugcuacucuu

SEQ ID NO: 2555143 - RNA, 19 nt, Artificial Sequence
  Description of Artificial Sequence: Synthetic oligonucleotide
cccggacugcgacuccucg

SEQ ID NO: 2555144 - RNA, 19 nt, Artificial Sequence
  Description of Artificial Sequence: Synthetic oligonucleotide
aggccugcucgcaucugga

SEQ ID NO: 2555145 - RNA, 19 nt, Artificial Sequence
  Description of Artificial Sequence: Synthetic oligonucleotide
cucgagcgcuugcgagagc

SEQ ID NO: 2555146 - RNA, 19 nt, Artificial Sequence
  Description of Artificial Sequence: Synthetic oligonucleotide
acccggacugcgacuccuc

SEQ ID NO: 2555147 - RNA, 19 nt, Artificial Sequence
  Description of Artificial Sequence: Synthetic oligonucleotide
accuugcgaaugacacucu

SEQ ID NO: 2555148 - RNA, 19 nt, Artificial Sequence
  Description of Artificial Sequence: Synthetic oligonucleotide
cgauuuccucuaaaaccuc

SEQ ID NO: 2555149 - RNA, 19 nt, Artificial Sequence
  Description of Artificial Sequence: Synthetic oligonucleotide
gccucagccgggugcagca

SEQ ID NO: 2555150 - RNA, 19 nt, Artificial Sequence
  Description of Artificial Sequence: Synthetic oligonucleotide
ccaccaacaguaguucaca

SEQ ID NO: 2555151 - RNA, 19 nt, Artificial Sequence
  Description of Artificial Sequence: Synthetic oligonucleotide
gcucgcaucuggaaggcua

SEQ ID NO: 2555152 - RNA, 19 nt, Artificial Sequence
  Description of Artificial Sequence: Synthetic oligonucleotide
gagcaucccacuccuccuu

SEQ ID NO: 2555153 - RNA, 19 nt, Artificial Sequence
  Description of Artificial Sequence: Synthetic oligonucleotide
ggaagcaggccugcucgca

SEQ ID NO: 2555154 - RNA, 19 nt, Artificial Sequence
  Description of Artificial Sequence: Synthetic oligonucleotide
guccuccgggccuugugcu

SEQ ID NO: 2555155 - RNA, 19 nt, Artificial Sequence
  Description of Artificial Sequence: Synthetic oligonucleotide
cugggccaucguccucccc

SEQ ID NO: 2555156 - RNA, 19 nt, Artificial Sequence
  Description of Artificial Sequence: Synthetic oligonucleotide
gucguucuuugguuacgau

SEQ ID NO: 2555157 - RNA, 19 nt, Artificial Sequence
  Description of Artificial Sequence: Synthetic oligonucleotide
guacgaccugucucugggu

SEQ ID NO: 2555158 - RNA, 19 nt, Artificial Sequence
  Description of Artificial Sequence: Synthetic oligonucleotide
caucguccuccccggcuga

SEQ ID NO: 2555159 - RNA, 19 nt, Artificial Sequence
  Description of Artificial Sequence: Synthetic oligonucleotide
gaaaggcaauuggacccau

SEQ ID NO: 2555160 - RNA, 19 nt, Artificial Sequence
  Description of Artificial Sequence: Synthetic oligonucleotide
ccgggugcagcaccacggc

SEQ ID NO: 2555161 - RNA, 19 nt, Artificial Sequence
  Description of Artificial Sequence: Synthetic oligonucleotide
cugggaaaccagggcccuc

SEQ ID NO: 2555162 - RNA, 19 nt, Artificial Sequence
  Description of Artificial Sequence: Synthetic oligonucleotide
gucaggacugggccaucgu

SEQ ID NO: 2555163 - RNA, 19 nt, Artificial Sequence
  Description of Artificial Sequence: Synthetic oligonucleotide
gcaguucuucgaggcgucc

SEQ ID NO: 2555164 - RNA, 19 nt, Artificial Sequence
  Description of Artificial Sequence: Synthetic oligonucleotide
gcguccuugcuacucuucu

SEQ ID NO: 2555165 - RNA, 19 nt, Artificial Sequence
  Description of Artificial Sequence: Synthetic oligonucleotide
gagagccaacgugagccau

SEQ ID NO: 2555166 - RNA, 19 nt, Artificial Sequence
  Description of Artificial Sequence: Synthetic oligonucleotide
ggcccucagggaagcaggc

SEQ ID NO: 2555167 - RNA, 19 nt, Artificial Sequence
  Description of Artificial Sequence: Synthetic oligonucleotide
cucugucgagcaucccacu

SEQ ID NO: 2555168 - RNA, 19 nt, Artificial Sequence
  Description of Artificial Sequence: Synthetic oligonucleotide
gacccggacugcgacuccu

SEQ ID NO: 2555169 - RNA, 19 nt, Artificial Sequence
  Description of Artificial Sequence: Synthetic oligonucleotide
gcaggccuugugaccuggg

SEQ ID NO: 2555170 - RNA, 19 nt, Artificial Sequence
  Description of Artificial Sequence: Synthetic oligonucleotide
cuaggccauccccucgggu

SEQ ID NO: 2555171 - RNA, 19 nt, Artificial Sequence
  Description of Artificial Sequence: Synthetic oligonucleotide
cccugugucguucuuuggu

SEQ ID NO: 2555172 - RNA, 19 nt, Artificial Sequence
  Description of Artificial Sequence: Synthetic oligonucleotide
caguucuucgaggcguccu

SEQ ID NO: 2555173 - RNA, 19 nt, Artificial Sequence
  Description of Artificial Sequence: Synthetic oligonucleotide
ggacccggacugcgacucc

SEQ ID NO: 2555174 - RNA, 19 nt, Artificial Sequence
  Description of Artificial Sequence: Synthetic oligonucleotide
ucguccuccccggcugauu

SEQ ID NO: 2555175 - RNA, 19 nt, Artificial Sequence
  Description of Artificial Sequence: Synthetic oligonucleotide
ccuccgggccuugugcuug

SEQ ID NO: 2555176 - RNA, 19 nt, Artificial Sequence
  Description of Artificial Sequence: Synthetic oligonucleotide
gccuggauacgagacuucu

SEQ ID NO: 2555177 - RNA, 19 nt, Artificial Sequence
  Description of Artificial Sequence: Synthetic oligonucleotide
gugaggggccgggcagagc

SEQ ID NO: 2555178 - RNA, 19 nt, Artificial Sequence
  Description of Artificial Sequence: Synthetic oligonucleotide
ucgcuguccuccgggccuu

SEQ ID NO: 2555179 - RNA, 19 nt, Artificial Sequence
  Description of Artificial Sequence: Synthetic oligonucleotide
ccuugcuacucuucuuacu

SEQ ID NO: 2555180 - RNA, 19 nt, Artificial Sequence
  Description of Artificial Sequence: Synthetic oligonucleotide
ggcguccuugcuacucuuc

SEQ ID NO: 2555181 - RNA, 19 nt, Artificial Sequence
  Description of Artificial Sequence: Synthetic oligonucleotide
cccggcugauuugugccac

SEQ ID NO: 2555182 - RNA, 19 nt, Artificial Sequence
  Description of Artificial Sequence: Synthetic oligonucleotide
ggugcagcaccacggcuuu

SEQ ID NO: 2555183 - RNA, 19 nt, Artificial Sequence
  Description of Artificial Sequence: Synthetic oligonucleotide
aucguccuccccggcugau

SEQ ID NO: 2555184 - RNA, 19 nt, Artificial Sequence
  Description of Artificial Sequence: Synthetic oligonucleotide
ggccugcucgcaucuggaa

SEQ ID NO: 2555185 - RNA, 19 nt, Artificial Sequence
  Description of Artificial Sequence: Synthetic oligonucleotide
gucgagcaucccacuccuc

SEQ ID NO: 2555186 - RNA, 19 nt, Artificial Sequence
  Description of Artificial Sequence: Synthetic oligonucleotide
uccccucggguggcuugcu

SEQ ID NO: 2555187 - RNA, 19 nt, Artificial Sequence
  Description of Artificial Sequence: Synthetic oligonucleotide
ccugugucguucuuugguu

SEQ ID NO: 2555188 - RNA, 19 nt, Artificial Sequence
  Description of Artificial Sequence: Synthetic oligonucleotide
ggccuggauacgagacuuc

SEQ ID NO: 2555189 - RNA, 19 nt, Artificial Sequence
  Description of Artificial Sequence: Synthetic oligonucleotide
ccggacugcgacuccucga

SEQ ID NO: 2555190 - RNA, 19 nt, Artificial Sequence
  Description of Artificial Sequence: Synthetic oligonucleotide
cgaggcguccuugcuacuc

SEQ ID NO: 2555191 - RNA, 19 nt, Artificial Sequence
  Description of Artificial Sequence: Synthetic oligonucleotide
ggacgaugcggagcuggaa

SEQ ID NO: 2555192 - RNA, 19 nt, Artificial Sequence
  Description of Artificial Sequence: Synthetic oligonucleotide
gcgacuccucgagcgcuug

SEQ ID NO: 2555193 - RNA, 19 nt, Artificial Sequence
  Description of Artificial Sequence: Synthetic oligonucleotide
cagccgggugcagcaccac

SEQ ID NO: 2555194 - RNA, 19 nt, Artificial Sequence
  Description of Artificial Sequence: Synthetic oligonucleotide
gggugcagcaccacggcuu

SEQ ID NO: 2555195 - RNA, 19 nt, Artificial Sequence
  Description of Artificial Sequence: Synthetic oligonucleotide
cggccaucacuggaggaug

SEQ ID NO: 2555196 - RNA, 19 nt, Artificial Sequence
  Description of Artificial Sequence: Synthetic oligonucleotide
gggccgggcagagccucag

SEQ ID NO: 2555197 - RNA, 19 nt, Artificial Sequence
  Description of Artificial Sequence: Synthetic oligonucleotide
ggccauccccucggguggc

SEQ ID NO: 2555198 - RNA, 19 nt, Artificial Sequence
  Description of Artificial Sequence: Synthetic oligonucleotide
caucucccuugaugagccu

SEQ ID NO: 2555199 - RNA, 19 nt, Artificial Sequence
  Description of Artificial Sequence: Synthetic oligonucleotide
cgagagccaacgugagcca

SEQ ID NO: 2555200 - RNA, 19 nt, Artificial Sequence
  Description of Artificial Sequence: Synthetic oligonucleotide
ccaccuugcgaaugacacu

SEQ ID NO: 2555201 - RNA, 19 nt, Artificial Sequence
  Description of Artificial Sequence: Synthetic oligonucleotide
ccuccccggcugauuugug

SEQ ID NO: 2555202 - RNA, 19 nt, Artificial Sequence
  Description of Artificial Sequence: Synthetic oligonucleotide
ccccggcugauuugugcca

SEQ ID NO: 2555203 - RNA, 19 nt, Artificial Sequence
  Description of Artificial Sequence: Synthetic oligonucleotide
cucccuugaugagccuugu

SEQ ID NO: 2555204 - RNA, 19 nt, Artificial Sequence
  Description of Artificial Sequence: Synthetic oligonucleotide
cgacuccucgagcgcuugc

SEQ ID NO: 2555205 - RNA, 19 nt, Artificial Sequence
  Description of Artificial Sequence: Synthetic oligonucleotide
cccacuccuccuuugucau

SEQ ID NO: 2555206 - RNA, 19 nt, Artificial Sequence
  Description of Artificial Sequence: Synthetic oligonucleotide
ccccgggacccggacugcg

SEQ ID NO: 2555207 - RNA, 19 nt, Artificial Sequence
  Description of Artificial Sequence: Synthetic oligonucleotide
cgcuucuuccggccaucac

SEQ ID NO: 2555208 - RNA, 19 nt, Artificial Sequence
  Description of Artificial Sequence: Synthetic oligonucleotide
gugcagcaccacggcuuuc

SEQ ID NO: 2555209 - RNA, 19 nt, Artificial Sequence
  Description of Artificial Sequence: Synthetic oligonucleotide
cgaccugucucugggucca

SEQ ID NO: 2555210 - RNA, 19 nt, Artificial Sequence
  Description of Artificial Sequence: Synthetic oligonucleotide
ccucagccgggugcagcac

SEQ ID NO: 2555211 - RNA, 19 nt, Artificial Sequence
  Description of Artificial Sequence: Synthetic oligonucleotide
cccgcuucuuccggccauc

SEQ ID NO: 2555212 - RNA, 19 nt, Artificial Sequence
  Description of Artificial Sequence: Synthetic oligonucleotide
gccuugugaccuggggacu

SEQ ID NO: 2555213 - RNA, 19 nt, Artificial Sequence
  Description of Artificial Sequence: Synthetic oligonucleotide
cagggcccucagggaagca

SEQ ID NO: 2555214 - RNA, 19 nt, Artificial Sequence
  Description of Artificial Sequence: Synthetic oligonucleotide
cgaugcggagcuggaagaa

SEQ ID NO: 2555215 - RNA, 19 nt, Artificial Sequence
  Description of Artificial Sequence: Synthetic oligonucleotide
cgagcgcuugcgagagcca

SEQ ID NO: 2555216 - RNA, 19 nt, Artificial Sequence
  Description of Artificial Sequence: Synthetic oligonucleotide
ccgcuucuuccggccauca

SEQ ID NO: 2555217 - RNA, 19 nt, Artificial Sequence
  Description of Artificial Sequence: Synthetic oligonucleotide
cguccuccccggcugauuu

SEQ ID NO: 2555218 - RNA, 19 nt, Artificial Sequence
  Description of Artificial Sequence: Synthetic oligonucleotide
cgggugcagcaccacggcu

SEQ ID NO: 2555219 - RNA, 19 nt, Artificial Sequence
  Description of Artificial Sequence: Synthetic oligonucleotide
ccccgcuucuuccggccau

SEQ ID NO: 2555220 - RNA, 19 nt, Artificial Sequence
  Description of Artificial Sequence: Synthetic oligonucleotide
gccauccccucggguggcu

SEQ ID NO: 2555221 - RNA, 19 nt, Artificial Sequence
  Description of Artificial Sequence: Synthetic oligonucleotide
cgggacccggacugcgacu

SEQ ID NO: 2555222 - RNA, 19 nt, Artificial Sequence
  Description of Artificial Sequence: Synthetic oligonucleotide
ccucaccaucucccuugau

SEQ ID NO: 2555223 - RNA, 19 nt, Artificial Sequence
  Description of Artificial Sequence: Synthetic oligonucleotide
cgcuugcgagagccaacgu

SEQ ID NO: 2555224 - RNA, 19 nt, Artificial Sequence
  Description of Artificial Sequence: Synthetic oligonucleotide
cgcuguccuccgggccuug

SEQ ID NO: 2555225 - RNA, 19 nt, Artificial Sequence
  Description of Artificial Sequence: Synthetic oligonucleotide
ccgggccuugugcuugcuu

SEQ ID NO: 2555226 - RNA, 19 nt, Artificial Sequence
  Description of Artificial Sequence: Synthetic oligonucleotide
ccauccccucggguggcuu

SEQ ID NO: 2555227 - RNA, 19 nt, Artificial Sequence
  Description of Artificial Sequence: Synthetic oligonucleotide
ccccucggguggcuugcuu

SEQ ID NO: 2555228 - RNA, 19 nt, Artificial Sequence
  Description of Artificial Sequence: Synthetic oligonucleotide
agagauggcaaauauggcc

SEQ ID NO: 2555229 - RNA, 19 nt, Artificial Sequence
  Description of Artificial Sequence: Synthetic oligonucleotide
gauuucuccauucagauuc

SEQ ID NO: 2555230 - RNA, 19 nt, Artificial Sequence
  Description of Artificial Sequence: Synthetic oligonucleotide
uaguaaaucuguuugugcg

SEQ ID NO: 2555231 - RNA, 19 nt, Artificial Sequence
  Description of Artificial Sequence: Synthetic oligonucleotide
caucaaaugcguuuuaggg

SEQ ID NO: 2555232 - RNA, 19 nt, Artificial Sequence
  Description of Artificial Sequence: Synthetic oligonucleotide
gauucagacaucaaaugcg

SEQ ID NO: 2555233 - RNA, 19 nt, Artificial Sequence
  Description of Artificial Sequence: Synthetic oligonucleotide
ucaaaugcguuuuagggac

SEQ ID NO: 2555234 - RNA, 19 nt, Artificial Sequence
  Description of Artificial Sequence: Synthetic oligonucleotide
uguuugugcgacaugacug

SEQ ID NO: 2555235 - RNA, 19 nt, Artificial Sequence
  Description of Artificial Sequence: Synthetic oligonucleotide
gacaugacugcucagcccg

SEQ ID NO: 2555236 - RNA, 19 nt, Artificial Sequence
  Description of Artificial Sequence: Synthetic oligonucleotide
aauaguaaaucuguuugug

SEQ ID NO: 2555237 - RNA, 19 nt, Artificial Sequence
  Description of Artificial Sequence: Synthetic oligonucleotide
ucagauucagacaucaaau

SEQ ID NO: 2555238 - RNA, 19 nt, Artificial Sequence
  Description of Artificial Sequence: Synthetic oligonucleotide
uuggcuauguccuugggca

SEQ ID NO: 2555239 - RNA, 19 nt, Artificial Sequence
  Description of Artificial Sequence: Synthetic oligonucleotide
aagauuucuccauucagau

SEQ ID NO: 2555240 - RNA, 19 nt, Artificial Sequence
  Description of Artificial Sequence: Synthetic oligonucleotide
uucagauucagacaucaaa

SEQ ID NO: 2555241 - RNA, 19 nt, Artificial Sequence
  Description of Artificial Sequence: Synthetic oligonucleotide
acaucaaaugcguuuuagg

SEQ ID NO: 2555242 - RNA, 19 nt, Artificial Sequence
  Description of Artificial Sequence: Synthetic oligonucleotide
uguccgaauaguaaaucug

SEQ ID NO: 2555243 - RNA, 19 nt, Artificial Sequence
  Description of Artificial Sequence: Synthetic oligonucleotide
uauuuguccgaauaguaaa

SEQ ID NO: 2555244 - RNA, 19 nt, Artificial Sequence
  Description of Artificial Sequence: Synthetic oligonucleotide
aauauggccugcuggauaa

SEQ ID NO: 2555245 - RNA, 19 nt, Artificial Sequence
  Description of Artificial Sequence: Synthetic oligonucleotide
ugggcaacaugacaugccg

SEQ ID NO: 2555246 - RNA, 19 nt, Artificial Sequence
  Description of Artificial Sequence: Synthetic oligonucleotide
aucaaaugcguuuuaggga

SEQ ID NO: 2555247 - RNA, 19 nt, Artificial Sequence
  Description of Artificial Sequence: Synthetic oligonucleotide
ugacugcucagcccgaggg

SEQ ID NO: 2555248 - RNA, 19 nt, Artificial Sequence
  Description of Artificial Sequence: Synthetic oligonucleotide
uuagggaccagcuuggcua

SEQ ID NO: 2555249 - RNA, 19 nt, Artificial Sequence
  Description of Artificial Sequence: Synthetic oligonucleotide
ugugcgacaugacugcuca

SEQ ID NO: 2555250 - RNA, 19 nt, Artificial Sequence
  Description of Artificial Sequence: Synthetic oligonucleotide
ugaacgccaagauuucucc

SEQ ID NO: 2555251 - RNA, 19 nt, Artificial Sequence
  Description of Artificial Sequence: Synthetic oligonucleotide
ucgucgucguauuuguccg

SEQ ID NO: 2555252 - RNA, 19 nt, Artificial Sequence
  Description of Artificial Sequence: Synthetic oligonucleotide
cucgucgucguauuugucc

SEQ ID NO: 2555253 - RNA, 19 nt, Artificial Sequence
  Description of Artificial Sequence: Synthetic oligonucleotide
agcccgagggcccucagcc

SEQ ID NO: 2555254 - RNA, 19 nt, Artificial Sequence
  Description of Artificial Sequence: Synthetic oligonucleotide
uccuugggcaacaugacau

SEQ ID NO: 2555255 - RNA, 19 nt, Artificial Sequence
  Description of Artificial Sequence: Synthetic oligonucleotide
uuguccgaauaguaaaucu

SEQ ID NO: 2555256 - RNA, 19 nt, Artificial Sequence
  Description of Artificial Sequence: Synthetic oligonucleotide
aguaaaucuguuugugcga

SEQ ID NO: 2555257 - RNA, 19 nt, Artificial Sequence
  Description of Artificial Sequence: Synthetic oligonucleotide
gucguauuuguccgaauag

SEQ ID NO: 2555258 - RNA, 19 nt, Artificial Sequence
  Description of Artificial Sequence: Synthetic oligonucleotide
aacgccaagauuucuccau

SEQ ID NO: 2555259 - RNA, 19 nt, Artificial Sequence
  Description of Artificial Sequence: Synthetic oligonucleotide
gacgacucccagcagcacg

SEQ ID NO: 2555260 - RNA, 19 nt, Artificial Sequence
  Description of Artificial Sequence: Synthetic oligonucleotide
aaauauggccugcuggaua

SEQ ID NO: 2555261 - RNA, 19 nt, Artificial Sequence
  Description of Artificial Sequence: Synthetic oligonucleotide
guuugugcgacaugacugc

SEQ ID NO: 2555262 - RNA, 19 nt, Artificial Sequence
  Description of Artificial Sequence: Synthetic oligonucleotide
ggcaaauauggccugcugg

SEQ ID NO: 2555263 - RNA, 19 nt, Artificial Sequence
  Description of Artificial Sequence: Synthetic oligonucleotide
aacaugacaugccgguacu

SEQ ID NO: 2555264 - RNA, 19 nt, Artificial Sequence
  Description of Artificial Sequence: Synthetic oligonucleotide
ugcguuuuagggaccagcu

SEQ ID NO: 2555265 - RNA, 19 nt, Artificial Sequence
  Description of Artificial Sequence: Synthetic oligonucleotide
aaaucuguuugugcgacau

SEQ ID NO: 2555266 - RNA, 19 nt, Artificial Sequence
  Description of Artificial Sequence: Synthetic oligonucleotide
caagauuucuccauucaga

SEQ ID NO: 2555267 - RNA, 19 nt, Artificial Sequence
  Description of Artificial Sequence: Synthetic oligonucleotide
gacaucaaaugcguuuuag

SEQ ID NO: 2555268 - RNA, 19 nt, Artificial Sequence
  Description of Artificial Sequence: Synthetic oligonucleotide
uugggcaacaugacaugcc

SEQ ID NO: 2555269 - RNA, 19 nt, Artificial Sequence
  Description of Artificial Sequence: Synthetic oligonucleotide
uuuagggaccagcuuggcu

SEQ ID NO: 2555270 - RNA, 19 nt, Artificial Sequence
  Description of Artificial Sequence: Synthetic oligonucleotide
cuuggcuauguccuugggc

SEQ ID NO: 2555271 - RNA, 19 nt, Artificial Sequence
  Description of Artificial Sequence: Synthetic oligonucleotide
aucuguuugugcgacauga

SEQ ID NO: 2555272 - RNA, 19 nt, Artificial Sequence
  Description of Artificial Sequence: Synthetic oligonucleotide
guuuuagggaccagcuugg

SEQ ID NO: 2555273 - RNA, 19 nt, Artificial Sequence
  Description of Artificial Sequence: Synthetic oligonucleotide
guacucgaacuccucgucg

SEQ ID NO: 2555274 - RNA, 19 nt, Artificial Sequence
  Description of Artificial Sequence: Synthetic oligonucleotide
augcguuuuagggaccagc

SEQ ID NO: 2555275 - RNA, 19 nt, Artificial Sequence
  Description of Artificial Sequence: Synthetic oligonucleotide
caacaugacaugccgguac

SEQ ID NO: 2555276 - RNA, 19 nt, Artificial Sequence
  Description of Artificial Sequence: Synthetic oligonucleotide
cgaauaguaaaucuguuug

SEQ ID NO: 2555277 - RNA, 19 nt, Artificial Sequence
  Description of Artificial Sequence: Synthetic oligonucleotide
auguccuugggcaacauga

SEQ ID NO: 2555278 - RNA, 19 nt, Artificial Sequence
  Description of Artificial Sequence: Synthetic oligonucleotide
gaauaguaaaucuguuugu

SEQ ID NO: 2555279 - RNA, 19 nt, Artificial Sequence
  Description of Artificial Sequence: Synthetic oligonucleotide
ucguauuuguccgaauagu

SEQ ID NO: 2555280 - RNA, 19 nt, Artificial Sequence
  Description of Artificial Sequence: Synthetic oligonucleotide
ugcgacaugacugcucagc

SEQ ID NO: 2555281 - RNA, 19 nt, Artificial Sequence
  Description of Artificial Sequence: Synthetic oligonucleotide
aaaugcguuuuagggacca

SEQ ID NO: 2555282 - RNA, 19 nt, Artificial Sequence
  Description of Artificial Sequence: Synthetic oligonucleotide
aaucuguuugugcgacaug

SEQ ID NO: 2555283 - RNA, 19 nt, Artificial Sequence
  Description of Artificial Sequence: Synthetic oligonucleotide
gaccagcuuggcuaugucc

SEQ ID NO: 2555284 - RNA, 19 nt, Artificial Sequence
  Description of Artificial Sequence: Synthetic oligonucleotide
guaaaucuguuugugcgac

SEQ ID NO: 2555285 - RNA, 19 nt, Artificial Sequence
  Description of Artificial Sequence: Synthetic oligonucleotide
uacucgaacuccucgucgu

SEQ ID NO: 2555286 - RNA, 19 nt, Artificial Sequence
  Description of Artificial Sequence: Synthetic oligonucleotide
ucuguuugugcgacaugac

SEQ ID NO: 2555287 - RNA, 19 nt, Artificial Sequence
  Description of Artificial Sequence: Synthetic oligonucleotide
cugaacgccaagauuucuc

SEQ ID NO: 2555288 - RNA, 19 nt, Artificial Sequence
  Description of Artificial Sequence: Synthetic oligonucleotide
cuugggcaacaugacaugc

SEQ ID NO: 2555289 - RNA, 19 nt, Artificial Sequence
  Description of Artificial Sequence: Synthetic oligonucleotide
cauucagauucagacauca

SEQ ID NO: 2555290 - RNA, 19 nt, Artificial Sequence
  Description of Artificial Sequence: Synthetic oligonucleotide
acgacucccagcagcacgc

SEQ ID NO: 2555291 - RNA, 19 nt, Artificial Sequence
  Description of Artificial Sequence: Synthetic oligonucleotide
augccgguacucgaacucc

SEQ ID NO: 2555292 - RNA, 19 nt, Artificial Sequence
  Description of Artificial Sequence: Synthetic oligonucleotide
uccgaauaguaaaucuguu

SEQ ID NO: 2555293 - RNA, 19 nt, Artificial Sequence
  Description of Artificial Sequence: Synthetic oligonucleotide
gagauggcaaauauggccu

SEQ ID NO: 2555294 - RNA, 19 nt, Artificial Sequence
  Description of Artificial Sequence: Synthetic oligonucleotide
uaaaucuguuugugcgaca

SEQ ID NO: 2555295 - RNA, 19 nt, Artificial Sequence
  Description of Artificial Sequence: Synthetic oligonucleotide
agauggcaaauauggccug

SEQ ID NO: 2555296 - RNA, 19 nt, Artificial Sequence
  Description of Artificial Sequence: Synthetic oligonucleotide
gcaaauauggccugcugga

SEQ ID NO: 2555297 - RNA, 19 nt, Artificial Sequence
  Description of Artificial Sequence: Synthetic oligonucleotide
uccucgucgucguauuugu

SEQ ID NO: 2555298 - RNA, 19 nt, Artificial Sequence
  Description of Artificial Sequence: Synthetic oligonucleotide
uggcaaauauggccugcug

SEQ ID NO: 2555299 - RNA, 19 nt, Artificial Sequence
  Description of Artificial Sequence: Synthetic oligonucleotide
gauggcaaauauggccugc

SEQ ID NO: 2555300 - RNA, 19 nt, Artificial Sequence
  Description of Artificial Sequence: Synthetic oligonucleotide
guauuuguccgaauaguaa

SEQ ID NO: 2555301 - RNA, 19 nt, Artificial Sequence
  Description of Artificial Sequence: Synthetic oligonucleotide
caaaugcguuuuagggacc

SEQ ID NO: 2555302 - RNA, 19 nt, Artificial Sequence
  Description of Artificial Sequence: Synthetic oligonucleotide
cguuuuagggaccagcuug

SEQ ID NO: 2555303 - RNA, 19 nt, Artificial Sequence
  Description of Artificial Sequence: Synthetic oligonucleotide
cucgaacuccucgucgucg

SEQ ID NO: 2555304 - RNA, 19 nt, Artificial Sequence
  Description of Artificial Sequence: Synthetic oligonucleotide
agggcccucagccccgcgc

SEQ ID NO: 2555305 - RNA, 19 nt, Artificial Sequence
  Description of Artificial Sequence: Synthetic oligonucleotide
aaugcguuuuagggaccag

SEQ ID NO: 2555306 - RNA, 19 nt, Artificial Sequence
  Description of Artificial Sequence: Synthetic oligonucleotide
gacaugccgguacucgaac

SEQ ID NO: 2555307 - RNA, 19 nt, Artificial Sequence
  Description of Artificial Sequence: Synthetic oligonucleotide
caugccgguacucgaacuc

SEQ ID NO: 2555308 - RNA, 19 nt, Artificial Sequence
  Description of Artificial Sequence: Synthetic oligonucleotide
ccaagauuucuccauucag

SEQ ID NO: 2555309 - RNA, 19 nt, Artificial Sequence
  Description of Artificial Sequence: Synthetic oligonucleotide
auuuguccgaauaguaaau

SEQ ID NO: 2555310 - RNA, 19 nt, Artificial Sequence
  Description of Artificial Sequence: Synthetic oligonucleotide
ucgaacuccucgucgucgu

SEQ ID NO: 2555311 - RNA, 19 nt, Artificial Sequence
  Description of Artificial Sequence: Synthetic oligonucleotide
agauuucuccauucagauu

SEQ ID NO: 2555312 - RNA, 19 nt, Artificial Sequence
  Description of Artificial Sequence: Synthetic oligonucleotide
uugugcgacaugacugcuc

SEQ ID NO: 2555313 - RNA, 19 nt, Artificial Sequence
  Description of Artificial Sequence: Synthetic oligonucleotide
uuuuagggaccagcuuggc

SEQ ID NO: 2555314 - RNA, 19 nt, Artificial Sequence
  Description of Artificial Sequence: Synthetic oligonucleotide
aacuccucgucgucguauu

SEQ ID NO: 2555315 - RNA, 19 nt, Artificial Sequence
  Description of Artificial Sequence: Synthetic oligonucleotide
acaugccgguacucgaacu

SEQ ID NO: 2555316 - RNA, 19 nt, Artificial Sequence
  Description of Artificial Sequence: Synthetic oligonucleotide
cucccgacgacucccagca

SEQ ID NO: 2555317 - RNA, 19 nt, Artificial Sequence
  Description of Artificial Sequence: Synthetic oligonucleotide
uuugugcgacaugacugcu

SEQ ID NO: 2555318 - RNA, 19 nt, Artificial Sequence
  Description of Artificial Sequence: Synthetic oligonucleotide
ugccgguacucgaacuccu

SEQ ID NO: 2555319 - RNA, 19 nt, Artificial Sequence
  Description of Artificial Sequence: Synthetic oligonucleotide
gcgacaugacugcucagcc

SEQ ID NO: 2555320 - RNA, 19 nt, Artificial Sequence
  Description of Artificial Sequence: Synthetic oligonucleotide
auggcaaauauggccugcu

SEQ ID NO: 2555321 - RNA, 19 nt, Artificial Sequence
  Description of Artificial Sequence: Synthetic oligonucleotide
guccgaauaguaaaucugu

SEQ ID NO: 2555322 - RNA, 19 nt, Artificial Sequence
  Description of Artificial Sequence: Synthetic oligonucleotide
uagggaccagcuuggcuau

SEQ ID NO: 2555323 - RNA, 19 nt, Artificial Sequence
  Description of Artificial Sequence: Synthetic oligonucleotide
guccuugggcaacaugaca

SEQ ID NO: 2555324 - RNA, 19 nt, Artificial Sequence
  Description of Artificial Sequence: Synthetic oligonucleotide
gacucccagcagcacgcgc

SEQ ID NO: 2555325 - RNA, 19 nt, Artificial Sequence
  Description of Artificial Sequence: Synthetic oligonucleotide
gguacucgaacuccucguc

SEQ ID NO: 2555326 - RNA, 19 nt, Artificial Sequence
  Description of Artificial Sequence: Synthetic oligonucleotide
uggcuauguccuugggcaa

SEQ ID NO: 2555327 - RNA, 19 nt, Artificial Sequence
  Description of Artificial Sequence: Synthetic oligonucleotide
agacaucaaaugcguuuua

SEQ ID NO: 2555328 - RNA, 19 nt, Artificial Sequence
  Description of Artificial Sequence: Synthetic oligonucleotide
cuguuugugcgacaugacu

SEQ ID NO: 2555329 - RNA, 19 nt, Artificial Sequence
  Description of Artificial Sequence: Synthetic oligonucleotide
gccaagauuucuccauuca

SEQ ID NO: 2555330 - RNA, 19 nt, Artificial Sequence
  Description of Artificial Sequence: Synthetic oligonucleotide
ggcaacaugacaugccggu

SEQ ID NO: 2555331 - RNA, 19 nt, Artificial Sequence
  Description of Artificial Sequence: Synthetic oligonucleotide
cugcucagcccgagggccc

SEQ ID NO: 2555332 - RNA, 19 nt, Artificial Sequence
  Description of Artificial Sequence: Synthetic oligonucleotide
acgccaagauuucuccauu

SEQ ID NO: 2555333 - RNA, 19 nt, Artificial Sequence
  Description of Artificial Sequence: Synthetic oligonucleotide
ccgguacucgaacuccucg

SEQ ID NO: 2555334 - RNA, 19 nt, Artificial Sequence
  Description of Artificial Sequence: Synthetic oligonucleotide
cccgacgacucccagcagc

SEQ ID NO: 2555335 - RNA, 19 nt, Artificial Sequence
  Description of Artificial Sequence: Synthetic oligonucleotide
ucagcccgagggcccucag

SEQ ID NO: 2555336 - RNA, 19 nt, Artificial Sequence
  Description of Artificial Sequence: Synthetic oligonucleotide
gggcaacaugacaugccgg

SEQ ID NO: 2555337 - RNA, 19 nt, Artificial Sequence
  Description of Artificial Sequence: Synthetic oligonucleotide
ucgucguauuuguccgaau

SEQ ID NO: 2555338 - RNA, 19 nt, Artificial Sequence
  Description of Artificial Sequence: Synthetic oligonucleotide
ccuugggcaacaugacaug

SEQ ID NO: 2555339 - RNA, 19 nt, Artificial Sequence
  Description of Artificial Sequence: Synthetic oligonucleotide
auucagauucagacaucaa

SEQ ID NO: 2555340 - RNA, 19 nt, Artificial Sequence
  Description of Artificial Sequence: Synthetic oligonucleotide
ucccgacgacucccagcag

SEQ ID NO: 2555341 - RNA, 19 nt, Artificial Sequence
  Description of Artificial Sequence: Synthetic oligonucleotide
cguauuuguccgaauagua

SEQ ID NO: 2555342 - RNA, 19 nt, Artificial Sequence
  Description of Artificial Sequence: Synthetic oligonucleotide
gucgucguauuuguccgaa

SEQ ID NO: 2555343 - RNA, 19 nt, Artificial Sequence
  Description of Artificial Sequence: Synthetic oligonucleotide
gugcgacaugacugcucag

SEQ ID NO: 2555344 - RNA, 19 nt, Artificial Sequence
  Description of Artificial Sequence: Synthetic oligonucleotide
ggcuauguccuugggcaac

SEQ ID NO: 2555345 - RNA, 19 nt, Artificial Sequence
  Description of Artificial Sequence: Synthetic oligonucleotide
cgacaugacugcucagccc

SEQ ID NO: 2555346 - RNA, 19 nt, Artificial Sequence
  Description of Artificial Sequence: Synthetic oligonucleotide
acuccucgucgucguauuu

SEQ ID NO: 2555347 - RNA, 19 nt, Artificial Sequence
  Description of Artificial Sequence: Synthetic oligonucleotide
cccgagggcccucagcccc

SEQ ID NO: 2555348 - RNA, 19 nt, Artificial Sequence
  Description of Artificial Sequence: Synthetic oligonucleotide
ccauucagauucagacauc

SEQ ID NO: 2555349 - RNA, 19 nt, Artificial Sequence
  Description of Artificial Sequence: Synthetic oligonucleotide
ugcucagcccgagggcccu

SEQ ID NO: 2555350 - RNA, 19 nt, Artificial Sequence
  Description of Artificial Sequence: Synthetic oligonucleotide
cagcccgagggcccucagc

SEQ ID NO: 2555351 - RNA, 19 nt, Artificial Sequence
  Description of Artificial Sequence: Synthetic oligonucleotide
gaacuccucgucgucguau

SEQ ID NO: 2555352 - RNA, 19 nt, Artificial Sequence
  Description of Artificial Sequence: Synthetic oligonucleotide
ccucccgacgacucccagc

SEQ ID NO: 2555353 - RNA, 19 nt, Artificial Sequence
  Description of Artificial Sequence: Synthetic oligonucleotide
gggcccucagccccgcgcc

SEQ ID NO: 2555354 - RNA, 19 nt, Artificial Sequence
  Description of Artificial Sequence: Synthetic oligonucleotide
gcuauguccuugggcaaca

SEQ ID NO: 2555355 - RNA, 19 nt, Artificial Sequence
  Description of Artificial Sequence: Synthetic oligonucleotide
acaugacugcucagcccga

SEQ ID NO: 2555356 - RNA, 19 nt, Artificial Sequence
  Description of Artificial Sequence: Synthetic oligonucleotide
gagggcccucagccccgcg

SEQ ID NO: 2555357 - RNA, 19 nt, Artificial Sequence
  Description of Artificial Sequence: Synthetic oligonucleotide
ccgaauaguaaaucuguuu

SEQ ID NO: 2555358 - RNA, 19 nt, Artificial Sequence
  Description of Artificial Sequence: Synthetic oligonucleotide
caaauauggccugcuggau

SEQ ID NO: 2555359 - RNA, 19 nt, Artificial Sequence
  Description of Artificial Sequence: Synthetic oligonucleotide
ggaccagcuuggcuauguc

SEQ ID NO: 2555360 - RNA, 19 nt, Artificial Sequence
  Description of Artificial Sequence: Synthetic oligonucleotide
ccgacgacucccagcagca

SEQ ID NO: 2555361 - RNA, 19 nt, Artificial Sequence
  Description of Artificial Sequence: Synthetic oligonucleotide
cgccaagauuucuccauuc

SEQ ID NO: 2555362 - RNA, 19 nt, Artificial Sequence
  Description of Artificial Sequence: Synthetic oligonucleotide
auauggccugcuggauaaa

SEQ ID NO: 2555363 - RNA, 19 nt, Artificial Sequence
  Description of Artificial Sequence: Synthetic oligonucleotide
agccccgcgccgccggccu

SEQ ID NO: 2555364 - RNA, 19 nt, Artificial Sequence
  Description of Artificial Sequence: Synthetic oligonucleotide
cgucguauuuguccgaaua

SEQ ID NO: 2555365 - RNA, 19 nt, Artificial Sequence
  Description of Artificial Sequence: Synthetic oligonucleotide
agggaccagcuuggcuaug

SEQ ID NO: 2555366 - RNA, 19 nt, Artificial Sequence
  Description of Artificial Sequence: Synthetic oligonucleotide
ccgagggcccucagccccg

SEQ ID NO: 2555367 - RNA, 19 nt, Artificial Sequence
  Description of Artificial Sequence: Synthetic oligonucleotide
gcaacaugacaugccggua

SEQ ID NO: 2555368 - RNA, 19 nt, Artificial Sequence
  Description of Artificial Sequence: Synthetic oligonucleotide
gcccgagggcccucagccc

SEQ ID NO: 2555369 - RNA, 19 nt, Artificial Sequence
  Description of Artificial Sequence: Synthetic oligonucleotide
gccgccggccucccgacga

SEQ ID NO: 2555370 - RNA, 19 nt, Artificial Sequence
  Description of Artificial Sequence: Synthetic oligonucleotide
gcugaacgccaagauuucu

SEQ ID NO: 2555371 - RNA, 19 nt, Artificial Sequence
  Description of Artificial Sequence: Synthetic oligonucleotide
gccucccgacgacucccag

SEQ ID NO: 2555372 - RNA, 19 nt, Artificial Sequence
  Description of Artificial Sequence: Synthetic oligonucleotide
gggaccagcuuggcuaugu

SEQ ID NO: 2555373 - RNA, 19 nt, Artificial Sequence
  Description of Artificial Sequence: Synthetic oligonucleotide
cucagcccgagggcccuca

SEQ ID NO: 2555374 - RNA, 19 nt, Artificial Sequence
  Description of Artificial Sequence: Synthetic oligonucleotide
ccggccucccgacgacucc

SEQ ID NO: 2555375 - RNA, 19 nt, Artificial Sequence
  Description of Artificial Sequence: Synthetic oligonucleotide
gccgguacucgaacuccuc

SEQ ID NO: 2555376 - RNA, 19 nt, Artificial Sequence
  Description of Artificial Sequence: Synthetic oligonucleotide
gcguuuuagggaccagcuu

SEQ ID NO: 2555377 - RNA, 19 nt, Artificial Sequence
  Description of Artificial Sequence: Synthetic oligonucleotide
gcccucagccccgcgccgc

SEQ ID NO: 2555378 - RNA, 19 nt, Artificial Sequence
  Description of Artificial Sequence: Synthetic oligonucleotide
cuauguccuugggcaacau

SEQ ID NO: 2555379 - RNA, 19 nt, Artificial Sequence
  Description of Artificial Sequence: Synthetic oligonucleotide
cgguacucgaacuccucgu

SEQ ID NO: 2555380 - RNA, 19 nt, Artificial Sequence
  Description of Artificial Sequence: Synthetic oligonucleotide
gccggccucccgacgacuc

SEQ ID NO: 2555381 - RNA, 19 nt, Artificial Sequence
  Description of Artificial Sequence: Synthetic oligonucleotide
cggccucccgacgacuccc

SEQ ID NO: 2555382 - RNA, 19 nt, Artificial Sequence
  Description of Artificial Sequence: Synthetic oligonucleotide
cgucgucguauuuguccga

SEQ ID NO: 2555383 - RNA, 19 nt, Artificial Sequence
  Description of Artificial Sequence: Synthetic oligonucleotide
cgacucccagcagcacgcg

SEQ ID NO: 2555384 - RNA, 19 nt, Artificial Sequence
  Description of Artificial Sequence: Synthetic oligonucleotide
ggccucccgacgacuccca

SEQ ID NO: 2555385 - RNA, 19 nt, Artificial Sequence
  Description of Artificial Sequence: Synthetic oligonucleotide
gcgccgccggccucccgac

SEQ ID NO: 2555386 - RNA, 19 nt, Artificial Sequence
  Description of Artificial Sequence: Synthetic oligonucleotide
cgacgacucccagcagcac

SEQ ID NO: 2555387 - RNA, 19 nt, Artificial Sequence
  Description of Artificial Sequence: Synthetic oligonucleotide
ccgccggccucccgacgac

SEQ ID NO: 2555388 - RNA, 19 nt, Artificial Sequence
  Description of Artificial Sequence: Synthetic oligonucleotide
ccccgcgccgccggccucc

SEQ ID NO: 2555389 - RNA, 19 nt, Artificial Sequence
  Description of Artificial Sequence: Synthetic oligonucleotide
cgcgccgccggccucccga

SEQ ID NO: 2555390 - RNA, 19 nt, Artificial Sequence
  Description of Artificial Sequence: Synthetic oligonucleotide
cgaacuccucgucgucgua

SEQ ID NO: 2555391 - RNA, 19 nt, Artificial Sequence
  Description of Artificial Sequence: Synthetic oligonucleotide
cgagggcccucagccccgc

SEQ ID NO: 2555392 - RNA, 19 nt, Artificial Sequence
  Description of Artificial Sequence: Synthetic oligonucleotide
gcucagcccgagggcccuc

SEQ ID NO: 2555393 - RNA, 19 nt, Artificial Sequence
  Description of Artificial Sequence: Synthetic oligonucleotide
cgccgccggccucccgacg

SEQ ID NO: 2555394 - RNA, 19 nt, Artificial Sequence
  Description of Artificial Sequence: Synthetic oligonucleotide
ccgcgccgccggccucccg

SEQ ID NO: 2555395 - RNA, 19 nt, Artificial Sequence
  Description of Artificial Sequence: Synthetic oligonucleotide
uuaagaacuacaauuacag

SEQ ID NO: 2555396 - RNA, 19 nt, Artificial Sequence
  Description of Artificial Sequence: Synthetic oligonucleotide
aguaaagcaagucacacag

SEQ ID NO: 2555397 - RNA, 19 nt, Artificial Sequence
  Description of Artificial Sequence: Synthetic oligonucleotide
aagaacuacaauuacagau

SEQ ID NO: 2555398 - RNA, 19 nt, Artificial Sequence
  Description of Artificial Sequence: Synthetic oligonucleotide
aauaccuuggaaaacacag

SEQ ID NO: 2555399 - RNA, 19 nt, Artificial Sequence
  Description of Artificial Sequence: Synthetic oligonucleotide
uuuagugucuuucacaaac

SEQ ID NO: 2555400 - RNA, 19 nt, Artificial Sequence
  Description of Artificial Sequence: Synthetic oligonucleotide
uugguuacaaacaauauau

SEQ ID NO: 2555401 - RNA, 19 nt, Artificial Sequence
  Description of Artificial Sequence: Synthetic oligonucleotide
aauguuuccugauugugag

SEQ ID NO: 2555402 - RNA, 19 nt, Artificial Sequence
  Description of Artificial Sequence: Synthetic oligonucleotide
uauacuguuugccacaccc

SEQ ID NO: 2555403 - RNA, 19 nt, Artificial Sequence
  Description of Artificial Sequence: Synthetic oligonucleotide
aauuccgaaacacagguau

SEQ ID NO: 2555404 - RNA, 19 nt, Artificial Sequence
  Description of Artificial Sequence: Synthetic oligonucleotide
uccaaauuccgaaacacag

SEQ ID NO: 2555405 - RNA, 19 nt, Artificial Sequence
  Description of Artificial Sequence: Synthetic oligonucleotide
aaaacccaacaacauggcc

SEQ ID NO: 2555406 - RNA, 19 nt, Artificial Sequence
  Description of Artificial Sequence: Synthetic oligonucleotide
acacauuugacauauuaag

SEQ ID NO: 2555407 - RNA, 19 nt, Artificial Sequence
  Description of Artificial Sequence: Synthetic oligonucleotide
aauccucaugcuuuagccc

SEQ ID NO: 2555408 - RNA, 19 nt, Artificial Sequence
  Description of Artificial Sequence: Synthetic oligonucleotide
aaacacagguaucaggcuc

SEQ ID NO: 2555409 - RNA, 19 nt, Artificial Sequence
  Description of Artificial Sequence: Synthetic oligonucleotide
aacuacauggcugagaccu

SEQ ID NO: 2555410 - RNA, 19 nt, Artificial Sequence
  Description of Artificial Sequence: Synthetic oligonucleotide
gagaccuaggacuuuaccg

SEQ ID NO: 2555411 - RNA, 19 nt, Artificial Sequence
  Description of Artificial Sequence: Synthetic oligonucleotide
ucguucaucuagcacaugg

SEQ ID NO: 2555412 - RNA, 19 nt, Artificial Sequence
  Description of Artificial Sequence: Synthetic oligonucleotide
aaaugaacuacauggcuga

SEQ ID NO: 2555413 - RNA, 19 nt, Artificial Sequence
  Description of Artificial Sequence: Synthetic oligonucleotide
ugacauauuaagaacuaca

SEQ ID NO: 2555414 - RNA, 19 nt, Artificial Sequence
  Description of Artificial Sequence: Synthetic oligonucleotide
uacaauuacagaugcauga

SEQ ID NO: 2555415 - RNA, 19 nt, Artificial Sequence
  Description of Artificial Sequence: Synthetic oligonucleotide
ugaacuacauggcugagac

SEQ ID NO: 2555416 - RNA, 19 nt, Artificial Sequence
  Description of Artificial Sequence: Synthetic oligonucleotide
ugcaacacagaaaugagaa

SEQ ID NO: 2555417 - RNA, 19 nt, Artificial Sequence
  Description of Artificial Sequence: Synthetic oligonucleotide
acaugucuugguuacaaac

SEQ ID NO: 2555418 - RNA, 19 nt, Artificial Sequence
  Description of Artificial Sequence: Synthetic oligonucleotide
uguuuucuccauaaggggc

SEQ ID NO: 2555419 - RNA, 19 nt, Artificial Sequence
  Description of Artificial Sequence: Synthetic oligonucleotide
aaaaugaacuacauggcug

SEQ ID NO: 2555420 - RNA, 19 nt, Artificial Sequence
  Description of Artificial Sequence: Synthetic oligonucleotide
uuaaacaugucuugguuac

SEQ ID NO: 2555421 - RNA, 19 nt, Artificial Sequence
  Description of Artificial Sequence: Synthetic oligonucleotide
cacacagugaccaaggaac

SEQ ID NO: 2555422 - RNA, 19 nt, Artificial Sequence
  Description of Artificial Sequence: Synthetic oligonucleotide
acauuugacauauuaagaa

SEQ ID NO: 2555423 - RNA, 19 nt, Artificial Sequence
  Description of Artificial Sequence: Synthetic oligonucleotide
aucaggcucauuuuaaaag

SEQ ID NO: 2555424 - RNA, 19 nt, Artificial Sequence
  Description of Artificial Sequence: Synthetic oligonucleotide
uuggcauuugaacacagcu

SEQ ID NO: 2555425 - RNA, 19 nt, Artificial Sequence
  Description of Artificial Sequence: Synthetic oligonucleotide
ucuggccuggaacugaagg

SEQ ID NO: 2555426 - RNA, 19 nt, Artificial Sequence
  Description of Artificial Sequence: Synthetic oligonucleotide
aaacacauuugacauauua

SEQ ID NO: 2555427 - RNA, 19 nt, Artificial Sequence
  Description of Artificial Sequence: Synthetic oligonucleotide
uauuaagaacuacaauuac

SEQ ID NO: 2555428 - RNA, 19 nt, Artificial Sequence
  Description of Artificial Sequence: Synthetic oligonucleotide
agagaguaaagcaagucac

SEQ ID NO: 2555429 - RNA, 19 nt, Artificial Sequence
  Description of Artificial Sequence: Synthetic oligonucleotide
uguuuagugucuuucacaa

SEQ ID NO: 2555430 - RNA, 19 nt, Artificial Sequence
  Description of Artificial Sequence: Synthetic oligonucleotide
uccucguucaucuagcaca

SEQ ID NO: 2555431 - RNA, 19 nt, Artificial Sequence
  Description of Artificial Sequence: Synthetic oligonucleotide
uuugaacacagcugcaugc

SEQ ID NO: 2555432 - RNA, 19 nt, Artificial Sequence
  Description of Artificial Sequence: Synthetic oligonucleotide
uccauaaggggcuucaugu

SEQ ID NO: 2555433 - RNA, 19 nt, Artificial Sequence
  Description of Artificial Sequence: Synthetic oligonucleotide
ucacaaacacauuugacau

SEQ ID NO: 2555434 - RNA, 19 nt, Artificial Sequence
  Description of Artificial Sequence: Synthetic oligonucleotide
auugcacauaaauuaaaca

SEQ ID NO: 2555435 - RNA, 19 nt, Artificial Sequence
  Description of Artificial Sequence: Synthetic oligonucleotide
cauuugacauauuaagaac

SEQ ID NO: 2555436 - RNA, 19 nt, Artificial Sequence
  Description of Artificial Sequence: Synthetic oligonucleotide
ugcuauuuggcauuugaac

SEQ ID NO: 2555437 - RNA, 19 nt, Artificial Sequence
  Description of Artificial Sequence: Synthetic oligonucleotide
aaacccaacaacauggcca

SEQ ID NO: 2555438 - RNA, 19 nt, Artificial Sequence
  Description of Artificial Sequence: Synthetic oligonucleotide
aaaauaccuuggaaaacac

SEQ ID NO: 2555439 - RNA, 19 nt, Artificial Sequence
  Description of Artificial Sequence: Synthetic oligonucleotide
aacgcaccugaucagaaca

SEQ ID NO: 2555440 - RNA, 19 nt, Artificial Sequence
  Description of Artificial Sequence: Synthetic oligonucleotide
agaguaaagcaagucacac

SEQ ID NO: 2555441 - RNA, 19 nt, Artificial Sequence
  Description of Artificial Sequence: Synthetic oligonucleotide
ugugugugugugcagacug

SEQ ID NO: 2555442 - RNA, 19 nt, Artificial Sequence
  Description of Artificial Sequence: Synthetic oligonucleotide
uaccuuggaaaacacaggu

SEQ ID NO: 2555443 - RNA, 19 nt, Artificial Sequence
  Description of Artificial Sequence: Synthetic oligonucleotide
guuugccacacccugaugc

SEQ ID NO: 2555444 - RNA, 19 nt, Artificial Sequence
  Description of Artificial Sequence: Synthetic oligonucleotide
cuauuuggcauuugaacac

SEQ ID NO: 2555445 - RNA, 19 nt, Artificial Sequence
  Description of Artificial Sequence: Synthetic oligonucleotide
aauuacagaugcaugacau

SEQ ID NO: 2555446 - RNA, 19 nt, Artificial Sequence
  Description of Artificial Sequence: Synthetic oligonucleotide
caauccucaugcuuuagcc

SEQ ID NO: 2555447 - RNA, 19 nt, Artificial Sequence
  Description of Artificial Sequence: Synthetic oligonucleotide
ugugugugcagacuguugu

SEQ ID NO: 2555448 - RNA, 19 nt, Artificial Sequence
  Description of Artificial Sequence: Synthetic oligonucleotide
uuacagaugcaugacaugu

SEQ ID NO: 2555449 - RNA, 19 nt, Artificial Sequence
  Description of Artificial Sequence: Synthetic oligonucleotide
cacagaaaugagaagguug

SEQ ID NO: 2555450 - RNA, 19 nt, Artificial Sequence
  Description of Artificial Sequence: Synthetic oligonucleotide
ucaggcucauuuuaaaagu

SEQ ID NO: 2555451 - RNA, 19 nt, Artificial Sequence
  Description of Artificial Sequence: Synthetic oligonucleotide
gaucagaacacucagcucu

SEQ ID NO: 2555452 - RNA, 19 nt, Artificial Sequence
  Description of Artificial Sequence: Synthetic oligonucleotide
acagguaucaggcucauuu

SEQ ID NO: 2555453 - RNA, 19 nt, Artificial Sequence
  Description of Artificial Sequence: Synthetic oligonucleotide
gagagaguaaagcaaguca

SEQ ID NO: 2555454 - RNA, 19 nt, Artificial Sequence
  Description of Artificial Sequence: Synthetic oligonucleotide
auuugacauauuaagaacu

SEQ ID NO: 2555455 - RNA, 19 nt, Artificial Sequence
  Description of Artificial Sequence: Synthetic oligonucleotide
agggagaguaaauguuucc

SEQ ID NO: 2555456 - RNA, 19 nt, Artificial Sequence
  Description of Artificial Sequence: Synthetic oligonucleotide
aggacuuuaccgaagcccc

SEQ ID NO: 2555457 - RNA, 19 nt, Artificial Sequence
  Description of Artificial Sequence: Synthetic oligonucleotide
auugcuauuuggcauuuga

SEQ ID NO: 2555458 - RNA, 19 nt, Artificial Sequence
  Description of Artificial Sequence: Synthetic oligonucleotide
uuucacaaacacauuugac

SEQ ID NO: 2555459 - RNA, 19 nt, Artificial Sequence
  Description of Artificial Sequence: Synthetic oligonucleotide
agaacuacaauuacagaug

SEQ ID NO: 2555460 - RNA, 19 nt, Artificial Sequence
  Description of Artificial Sequence: Synthetic oligonucleotide
acuacaauuacagaugcau

SEQ ID NO: 2555461 - RNA, 19 nt, Artificial Sequence
  Description of Artificial Sequence: Synthetic oligonucleotide
acaauuacagaugcaugac

SEQ ID NO: 2555462 - RNA, 19 nt, Artificial Sequence
  Description of Artificial Sequence: Synthetic oligonucleotide
ggcauuugaacacagcugc

SEQ ID NO: 2555463 - RNA, 19 nt, Artificial Sequence
  Description of Artificial Sequence: Synthetic oligonucleotide
acaauauauauaucaguaa

SEQ ID NO: 2555464 - RNA, 19 nt, Artificial Sequence
  Description of Artificial Sequence: Synthetic oligonucleotide
acauggagagaguaaagca

SEQ ID NO: 2555465 - RNA, 19 nt, Artificial Sequence
  Description of Artificial Sequence: Synthetic oligonucleotide
agaccuaggacuuuaccga

SEQ ID NO: 2555466 - RNA, 19 nt, Artificial Sequence
  Description of Artificial Sequence: Synthetic oligonucleotide
agcucugauugcuauuugg

SEQ ID NO: 2555467 - RNA, 19 nt, Artificial Sequence
  Description of Artificial Sequence: Synthetic oligonucleotide
uaaauguuuccugauugug

SEQ ID NO: 2555468 - RNA, 19 nt, Artificial Sequence
  Description of Artificial Sequence: Synthetic oligonucleotide
caugcaacacagaaaugag

SEQ ID NO: 2555469 - RNA, 19 nt, Artificial Sequence
  Description of Artificial Sequence: Synthetic oligonucleotide
gaugccacaguugguaggg

SEQ ID NO: 2555470 - RNA, 19 nt, Artificial Sequence
  Description of Artificial Sequence: Synthetic oligonucleotide
auuugaacacagcugcaug

SEQ ID NO: 2555471 - RNA, 19 nt, Artificial Sequence
  Description of Artificial Sequence: Synthetic oligonucleotide
gagaguaaauguuuccuga

SEQ ID NO: 2555472 - RNA, 19 nt, Artificial Sequence
  Description of Artificial Sequence: Synthetic oligonucleotide
guucaucuagcacauggag

SEQ ID NO: 2555473 - RNA, 19 nt, Artificial Sequence
  Description of Artificial Sequence: Synthetic oligonucleotide
uaggacuuuaccgaagccc

SEQ ID NO: 2555474 - RNA, 19 nt, Artificial Sequence
  Description of Artificial Sequence: Synthetic oligonucleotide
agaugcaugacaugugaca

SEQ ID NO: 2555475 - RNA, 19 nt, Artificial Sequence
  Description of Artificial Sequence: Synthetic oligonucleotide
uggcauuugaacacagcug

SEQ ID NO: 2555476 - RNA, 19 nt, Artificial Sequence
  Description of Artificial Sequence: Synthetic oligonucleotide
aaauguuuccugauuguga

SEQ ID NO: 2555477 - RNA, 19 nt, Artificial Sequence
  Description of Artificial Sequence: Synthetic oligonucleotide
ugugaguccccucaacugu

SEQ ID NO: 2555478 - RNA, 19 nt, Artificial Sequence
  Description of Artificial Sequence: Synthetic oligonucleotide
uugaucuuuuaaauguaaa

SEQ ID NO: 2555479 - RNA, 19 nt, Artificial Sequence
  Description of Artificial Sequence: Synthetic oligonucleotide
gaaaugagaagguuguugu

SEQ ID NO: 2555480 - RNA, 19 nt, Artificial Sequence
  Description of Artificial Sequence: Synthetic oligonucleotide
ggauggaugccacaguugg

SEQ ID NO: 2555481 - RNA, 19 nt, Artificial Sequence
  Description of Artificial Sequence: Synthetic oligonucleotide
uuagugucuuucacaaaca

SEQ ID NO: 2555482 - RNA, 19 nt, Artificial Sequence
  Description of Artificial Sequence: Synthetic oligonucleotide
aggugcuagaaacacaggu

SEQ ID NO: 2555483 - RNA, 19 nt, Artificial Sequence
  Description of Artificial Sequence: Synthetic oligonucleotide
uacuguuugccacacccug

SEQ ID NO: 2555484 - RNA, 19 nt, Artificial Sequence
  Description of Artificial Sequence: Synthetic oligonucleotide
caugcuuuagccccucagg

SEQ ID NO: 2555485 - RNA, 19 nt, Artificial Sequence
  Description of Artificial Sequence: Synthetic oligonucleotide
ucauguuuagugucuuuca

SEQ ID NO: 2555486 - RNA, 19 nt, Artificial Sequence
  Description of Artificial Sequence: Synthetic oligonucleotide
cuguuguugagcuaccgug

SEQ ID NO: 2555487 - RNA, 19 nt, Artificial Sequence
  Description of Artificial Sequence: Synthetic oligonucleotide
cacauauacuguuugccac

SEQ ID NO: 2555488 - RNA, 19 nt, Artificial Sequence
  Description of Artificial Sequence: Synthetic oligonucleotide
acaaacacauuugacauau

SEQ ID NO: 2555489 - RNA, 19 nt, Artificial Sequence
  Description of Artificial Sequence: Synthetic oligonucleotide
uguuuccugauugugaguc

SEQ ID NO: 2555490 - RNA, 19 nt, Artificial Sequence
  Description of Artificial Sequence: Synthetic oligonucleotide
uguuguugagcuaccgugu

SEQ ID NO: 2555491 - RNA, 19 nt, Artificial Sequence
  Description of Artificial Sequence: Synthetic oligonucleotide
auauuaagaacuacaauua

SEQ ID NO: 2555492 - RNA, 19 nt, Artificial Sequence
  Description of Artificial Sequence: Synthetic oligonucleotide
acauauuaagaacuacaau

SEQ ID NO: 2555493 - RNA, 19 nt, Artificial Sequence
  Description of Artificial Sequence: Synthetic oligonucleotide
ugugugucuggccuggaac

SEQ ID NO: 2555494 - RNA, 19 nt, Artificial Sequence
  Description of Artificial Sequence: Synthetic oligonucleotide
acagaugcaugacauguga

SEQ ID NO: 2555495 - RNA, 19 nt, Artificial Sequence
  Description of Artificial Sequence: Synthetic oligonucleotide
uaagaacuacaauuacaga

SEQ ID NO: 2555496 - RNA, 19 nt, Artificial Sequence
  Description of Artificial Sequence: Synthetic oligonucleotide
agaaacacagguaugcacu

SEQ ID NO: 2555497 - RNA, 19 nt, Artificial Sequence
  Description of Artificial Sequence: Synthetic oligonucleotide
cuacaauuacagaugcaug

SEQ ID NO: 2555498 - RNA, 19 nt, Artificial Sequence
  Description of Artificial Sequence: Synthetic oligonucleotide
aacccaacaacauggccau

SEQ ID NO: 2555499 - RNA, 19 nt, Artificial Sequence
  Description of Artificial Sequence: Synthetic oligonucleotide
ugucuccaaauuccgaaac

SEQ ID NO: 2555500 - RNA, 19 nt, Artificial Sequence
  Description of Artificial Sequence: Synthetic oligonucleotide
ucaugcuuuagccccucag

SEQ ID NO: 2555501 - RNA, 19 nt, Artificial Sequence
  Description of Artificial Sequence: Synthetic oligonucleotide
ucuugguuacaaacaauau

SEQ ID NO: 2555502 - RNA, 19 nt, Artificial Sequence
  Description of Artificial Sequence: Synthetic oligonucleotide
caaggaacgcaccugauca

SEQ ID NO: 2555503 - RNA, 19 nt, Artificial Sequence
  Description of Artificial Sequence: Synthetic oligonucleotide
uguugagcuaccgugugug

SEQ ID NO: 2555504 - RNA, 19 nt, Artificial Sequence
  Description of Artificial Sequence: Synthetic oligonucleotide
uuuggcauuugaacacagc

SEQ ID NO: 2555505 - RNA, 19 nt, Artificial Sequence
  Description of Artificial Sequence: Synthetic oligonucleotide
gcuauuuggcauuugaaca

SEQ ID NO: 2555506 - RNA, 19 nt, Artificial Sequence
  Description of Artificial Sequence: Synthetic oligonucleotide
auuacagaugcaugacaug

SEQ ID NO: 2555507 - RNA, 19 nt, Artificial Sequence
  Description of Artificial Sequence: Synthetic oligonucleotide
augagaagguuguugugug

SEQ ID NO: 2555508 - RNA, 19 nt, Artificial Sequence
  Description of Artificial Sequence: Synthetic oligonucleotide
uagugucuuucacaaacac

SEQ ID NO: 2555509 - RNA, 19 nt, Artificial Sequence
  Description of Artificial Sequence: Synthetic oligonucleotide
acagaaaugagaagguugu

SEQ ID NO: 2555510 - RNA, 19 nt, Artificial Sequence
  Description of Artificial Sequence: Synthetic oligonucleotide
uggaacugaaggcaauccu

SEQ ID NO: 2555511 - RNA, 19 nt, Artificial Sequence
  Description of Artificial Sequence: Synthetic oligonucleotide
aagauugcacauaaauuaa

SEQ ID NO: 2555512 - RNA, 19 nt, Artificial Sequence
  Description of Artificial Sequence: Synthetic oligonucleotide
uugguagggagaguaaaug

SEQ ID NO: 2555513 - RNA, 19 nt, Artificial Sequence
  Description of Artificial Sequence: Synthetic oligonucleotide
cacauuugacauauuaaga

SEQ ID NO: 2555514 - RNA, 19 nt, Artificial Sequence
  Description of Artificial Sequence: Synthetic oligonucleotide
uguugugugugugugugug

SEQ ID NO: 2555515 - RNA, 19 nt, Artificial Sequence
  Description of Artificial Sequence: Synthetic oligonucleotide
uacagaugcaugacaugug

SEQ ID NO: 2555516 - RNA, 19 nt, Artificial Sequence
  Description of Artificial Sequence: Synthetic oligonucleotide
uuugccacacccugaugcc

SEQ ID NO: 2555517 - RNA, 19 nt, Artificial Sequence
  Description of Artificial Sequence: Synthetic oligonucleotide
cauguuuagugucuuucac

SEQ ID NO: 2555518 - RNA, 19 nt, Artificial Sequence
  Description of Artificial Sequence: Synthetic oligonucleotide
uaucaggcucauuuuaaaa

SEQ ID NO: 2555519 - RNA, 19 nt, Artificial Sequence
  Description of Artificial Sequence: Synthetic oligonucleotide
caugucuugguuacaaaca

SEQ ID NO: 2555520 - RNA, 19 nt, Artificial Sequence
  Description of Artificial Sequence: Synthetic oligonucleotide
aaggaacgcaccugaucag

SEQ ID NO: 2555521 - RNA, 19 nt, Artificial Sequence
  Description of Artificial Sequence: Synthetic oligonucleotide
aaacaugucuugguuacaa

SEQ ID NO: 2555522 - RNA, 19 nt, Artificial Sequence
  Description of Artificial Sequence: Synthetic oligonucleotide
cauuccucguucaucuagc

SEQ ID NO: 2555523 - RNA, 19 nt, Artificial Sequence
  Description of Artificial Sequence: Synthetic oligonucleotide
uuccgaaacacagguauca

SEQ ID NO: 2555524 - RNA, 19 nt, Artificial Sequence
  Description of Artificial Sequence: Synthetic oligonucleotide
uuuccugauugugaguccc

SEQ ID NO: 2555525 - RNA, 19 nt, Artificial Sequence
  Description of Artificial Sequence: Synthetic oligonucleotide
acugaaggcaauccucaug

SEQ ID NO: 2555526 - RNA, 19 nt, Artificial Sequence
  Description of Artificial Sequence: Synthetic oligonucleotide
auggagagaguaaagcaag

SEQ ID NO: 2555527 - RNA, 19 nt, Artificial Sequence
  Description of Artificial Sequence: Synthetic oligonucleotide
ugagcuaccgugugugugu

SEQ ID NO: 2555528 - RNA, 19 nt, Artificial Sequence
  Description of Artificial Sequence: Synthetic oligonucleotide
auauacuguuugccacacc

SEQ ID NO: 2555529 - RNA, 19 nt, Artificial Sequence
  Description of Artificial Sequence: Synthetic oligonucleotide
cagacuguuguugagcuac

SEQ ID NO: 2555530 - RNA, 19 nt, Artificial Sequence
  Description of Artificial Sequence: Synthetic oligonucleotide
ugcuagaaacacagguaug

SEQ ID NO: 2555531 - RNA, 19 nt, Artificial Sequence
  Description of Artificial Sequence: Synthetic oligonucleotide
aggugugcauuccucguuc

SEQ ID NO: 2555532 - RNA, 19 nt, Artificial Sequence
  Description of Artificial Sequence: Synthetic oligonucleotide
gagaagguuguugugugug

SEQ ID NO: 2555533 - RNA, 19 nt, Artificial Sequence
  Description of Artificial Sequence: Synthetic oligonucleotide
agcugcaugcaacacagaa

SEQ ID NO: 2555534 - RNA, 19 nt, Artificial Sequence
  Description of Artificial Sequence: Synthetic oligonucleotide
ugugcagacuguuguugag

SEQ ID NO: 2555535 - RNA, 19 nt, Artificial Sequence
  Description of Artificial Sequence: Synthetic oligonucleotide
ugugugcagacuguuguug

SEQ ID NO: 2555536 - RNA, 19 nt, Artificial Sequence
  Description of Artificial Sequence: Synthetic oligonucleotide
augcuuuagccccucaggu

SEQ ID NO: 2555537 - RNA, 19 nt, Artificial Sequence
  Description of Artificial Sequence: Synthetic oligonucleotide
guuguugugugugugugug

SEQ ID NO: 2555538 - RNA, 19 nt, Artificial Sequence
  Description of Artificial Sequence: Synthetic oligonucleotide
agaguaaauguuuccugau

SEQ ID NO: 2555539 - RNA, 19 nt, Artificial Sequence
  Description of Artificial Sequence: Synthetic oligonucleotide
uugcuauuuggcauuugaa

SEQ ID NO: 2555540 - RNA, 19 nt, Artificial Sequence
  Description of Artificial Sequence: Synthetic oligonucleotide
cauggagagaguaaagcaa

SEQ ID NO: 2555541 - RNA, 19 nt, Artificial Sequence
  Description of Artificial Sequence: Synthetic oligonucleotide
gaguaaagcaagucacaca

SEQ ID NO: 2555542 - RNA, 19 nt, Artificial Sequence
  Description of Artificial Sequence: Synthetic oligonucleotide
cuugguuacaaacaauaua

SEQ ID NO: 2555543 - RNA, 19 nt, Artificial Sequence
  Description of Artificial Sequence: Synthetic oligonucleotide
ugcuuuagccccucaggug

SEQ ID NO: 2555544 - RNA, 19 nt, Artificial Sequence
  Description of Artificial Sequence: Synthetic oligonucleotide
uggaaaacacaggugugca

SEQ ID NO: 2555545 - RNA, 19 nt, Artificial Sequence
  Description of Artificial Sequence: Synthetic oligonucleotide
aacacagguaucaggcuca

SEQ ID NO: 2555546 - RNA, 19 nt, Artificial Sequence
  Description of Artificial Sequence: Synthetic oligonucleotide
gcuuuagccccucaggugc

SEQ ID NO: 2555547 - RNA, 19 nt, Artificial Sequence
  Description of Artificial Sequence: Synthetic oligonucleotide
uggauggaugccacaguug

SEQ ID NO: 2555548 - RNA, 19 nt, Artificial Sequence
  Description of Artificial Sequence: Synthetic oligonucleotide
auaccuuggaaaacacagg

SEQ ID NO: 2555549 - RNA, 19 nt, Artificial Sequence
  Description of Artificial Sequence: Synthetic oligonucleotide
ugugugugugugugucugg

SEQ ID NO: 2555550 - RNA, 19 nt, Artificial Sequence
  Description of Artificial Sequence: Synthetic oligonucleotide
acuguuguugagcuaccgu

SEQ ID NO: 2555551 - RNA, 19 nt, Artificial Sequence
  Description of Artificial Sequence: Synthetic oligonucleotide
ugccacaguugguagggag

SEQ ID NO: 2555552 - RNA, 19 nt, Artificial Sequence
  Description of Artificial Sequence: Synthetic oligonucleotide
ggagaguaaauguuuccug

SEQ ID NO: 2555553 - RNA, 19 nt, Artificial Sequence
  Description of Artificial Sequence: Synthetic oligonucleotide
aaagcaagucacacaguga

SEQ ID NO: 2555554 - RNA, 19 nt, Artificial Sequence
  Description of Artificial Sequence: Synthetic oligonucleotide
aaugaacuacauggcugag

SEQ ID NO: 2555555 - RNA, 19 nt, Artificial Sequence
  Description of Artificial Sequence: Synthetic oligonucleotide
uugugugugugugugugug

SEQ ID NO: 2555556 - RNA, 19 nt, Artificial Sequence
  Description of Artificial Sequence: Synthetic oligonucleotide
uggaugccacaguugguag

SEQ ID NO: 2555557 - RNA, 19 nt, Artificial Sequence
  Description of Artificial Sequence: Synthetic oligonucleotide
caaauuccgaaacacaggu

SEQ ID NO: 2555558 - RNA, 19 nt, Artificial Sequence
  Description of Artificial Sequence: Synthetic oligonucleotide
uggagagaguaaagcaagu

SEQ ID NO: 2555559 - RNA, 19 nt, Artificial Sequence
  Description of Artificial Sequence: Synthetic oligonucleotide
uugaacacagcugcaugca

SEQ ID NO: 2555560 - RNA, 19 nt, Artificial Sequence
  Description of Artificial Sequence: Synthetic oligonucleotide
aacaugucuugguuacaaa

SEQ ID NO: 2555561 - RNA, 19 nt, Artificial Sequence
  Description of Artificial Sequence: Synthetic oligonucleotide
ccaaauuccgaaacacagg

SEQ ID NO: 2555562 - RNA, 19 nt, Artificial Sequence
  Description of Artificial Sequence: Synthetic oligonucleotide
gaagguuguugugugugug

SEQ ID NO: 2555563 - RNA, 19 nt, Artificial Sequence
  Description of Artificial Sequence: Synthetic oligonucleotide
caugucuccaaauuccgaa

SEQ ID NO: 2555564 - RNA, 19 nt, Artificial Sequence
  Description of Artificial Sequence: Synthetic oligonucleotide
agaacacucagcucugauu

SEQ ID NO: 2555565 - RNA, 19 nt, Artificial Sequence
  Description of Artificial Sequence: Synthetic oligonucleotide
gugucuuucacaaacacau

SEQ ID NO: 2555566 - RNA, 19 nt, Artificial Sequence
  Description of Artificial Sequence: Synthetic oligonucleotide
gauugugaguccccucaac

SEQ ID NO: 2555567 - RNA, 19 nt, Artificial Sequence
  Description of Artificial Sequence: Synthetic oligonucleotide
acagugaccaaggaacgca

SEQ ID NO: 2555568 - RNA, 19 nt, Artificial Sequence
  Description of Artificial Sequence: Synthetic oligonucleotide
ugucuugguuacaaacaau

SEQ ID NO: 2555569 - RNA, 19 nt, Artificial Sequence
  Description of Artificial Sequence: Synthetic oligonucleotide
cugaucagaacacucagcu

SEQ ID NO: 2555570 - RNA, 19 nt, Artificial Sequence
  Description of Artificial Sequence: Synthetic oligonucleotide
agaagguuguugugugugu

SEQ ID NO: 2555571 - RNA, 19 nt, Artificial Sequence
  Description of Artificial Sequence: Synthetic oligonucleotide
agcaagucacacagugacc

SEQ ID NO: 2555572 - RNA, 19 nt, Artificial Sequence
  Description of Artificial Sequence: Synthetic oligonucleotide
cauggcugagaccuaggac

SEQ ID NO: 2555573 - RNA, 19 nt, Artificial Sequence
  Description of Artificial Sequence: Synthetic oligonucleotide
ugugugugugugucuggcc

SEQ ID NO: 2555574 - RNA, 19 nt, Artificial Sequence
  Description of Artificial Sequence: Synthetic oligonucleotide
gcaugcaacacagaaauga

SEQ ID NO: 2555575 - RNA, 19 nt, Artificial Sequence
  Description of Artificial Sequence: Synthetic oligonucleotide
ugaacacagcugcaugcaa

SEQ ID NO: 2555576 - RNA, 19 nt, Artificial Sequence
  Description of Artificial Sequence: Synthetic oligonucleotide
gaacacagcugcaugcaac

SEQ ID NO: 2555577 - RNA, 19 nt, Artificial Sequence
  Description of Artificial Sequence: Synthetic oligonucleotide
cugauugugaguccccuca

SEQ ID NO: 2555578 - RNA, 19 nt, Artificial Sequence
  Description of Artificial Sequence: Synthetic oligonucleotide
ugugugugugugugugugc

SEQ ID NO: 2555579 - RNA, 19 nt, Artificial Sequence
  Description of Artificial Sequence: Synthetic oligonucleotide
uugagcuaccgugugugug

SEQ ID NO: 2555580 - RNA, 19 nt, Artificial Sequence
  Description of Artificial Sequence: Synthetic oligonucleotide
ucuagcacauggagagagu

SEQ ID NO: 2555581 - RNA, 19 nt, Artificial Sequence
  Description of Artificial Sequence: Synthetic oligonucleotide
uaaggggcuucauguuuag

SEQ ID NO: 2555582 - RNA, 19 nt, Artificial Sequence
  Description of Artificial Sequence: Synthetic oligonucleotide
ucagcucugauugcuauuu

SEQ ID NO: 2555583 - RNA, 19 nt, Artificial Sequence
  Description of Artificial Sequence: Synthetic oligonucleotide
ugaucagaacacucagcuc

SEQ ID NO: 2555584 - RNA, 19 nt, Artificial Sequence
  Description of Artificial Sequence: Synthetic oligonucleotide
ugugugugugugugcagac

SEQ ID NO: 2555585 - RNA, 19 nt, Artificial Sequence
  Description of Artificial Sequence: Synthetic oligonucleotide
agugaccaaggaacgcacc

SEQ ID NO: 2555586 - RNA, 19 nt, Artificial Sequence
  Description of Artificial Sequence: Synthetic oligonucleotide
agcacauggagagaguaaa

SEQ ID NO: 2555587 - RNA, 19 nt, Artificial Sequence
  Description of Artificial Sequence: Synthetic oligonucleotide
aacugaaggcaauccucau

SEQ ID NO: 2555588 - RNA, 19 nt, Artificial Sequence
  Description of Artificial Sequence: Synthetic oligonucleotide
cuaggacuuuaccgaagcc

SEQ ID NO: 2555589 - RNA, 19 nt, Artificial Sequence
  Description of Artificial Sequence: Synthetic oligonucleotide
caauuacagaugcaugaca

SEQ ID NO: 2555590 - RNA, 19 nt, Artificial Sequence
  Description of Artificial Sequence: Synthetic oligonucleotide
acacagugaccaaggaacg

SEQ ID NO: 2555591 - RNA, 19 nt, Artificial Sequence
  Description of Artificial Sequence: Synthetic oligonucleotide
uccgaaacacagguaucag

SEQ ID NO: 2555592 - RNA, 19 nt, Artificial Sequence
  Description of Artificial Sequence: Synthetic oligonucleotide
gacuguuguugagcuaccg

SEQ ID NO: 2555593 - RNA, 19 nt, Artificial Sequence
  Description of Artificial Sequence: Synthetic oligonucleotide
ugugugugugugugugcag

SEQ ID NO: 2555594 - RNA, 19 nt, Artificial Sequence
  Description of Artificial Sequence: Synthetic oligonucleotide
uuguugagcuaccgugugu

SEQ ID NO: 2555595 - RNA, 19 nt, Artificial Sequence
  Description of Artificial Sequence: Synthetic oligonucleotide
uuccucguucaucuagcac

SEQ ID NO: 2555596 - RNA, 19 nt, Artificial Sequence
  Description of Artificial Sequence: Synthetic oligonucleotide
cauauacuguuugccacac

SEQ ID NO: 2555597 - RNA, 19 nt, Artificial Sequence
  Description of Artificial Sequence: Synthetic oligonucleotide
acaguugguagggagagua

SEQ ID NO: 2555598 - RNA, 19 nt, Artificial Sequence
  Description of Artificial Sequence: Synthetic oligonucleotide
gucuugguuacaaacaaua

SEQ ID NO: 2555599 - RNA, 19 nt, Artificial Sequence
  Description of Artificial Sequence: Synthetic oligonucleotide
auggccaugucuccaaauu

SEQ ID NO: 2555600 - RNA, 19 nt, Artificial Sequence
  Description of Artificial Sequence: Synthetic oligonucleotide
augccuggcuccuucuuug

SEQ ID NO: 2555601 - RNA, 19 nt, Artificial Sequence
  Description of Artificial Sequence: Synthetic oligonucleotide
uuccugauugugagucccc

SEQ ID NO: 2555602 - RNA, 19 nt, Artificial Sequence
  Description of Artificial Sequence: Synthetic oligonucleotide
cagaugcaugacaugugac

SEQ ID NO: 2555603 - RNA, 19 nt, Artificial Sequence
  Description of Artificial Sequence: Synthetic oligonucleotide
guuuccugauugugagucc

SEQ ID NO: 2555604 - RNA, 19 nt, Artificial Sequence
  Description of Artificial Sequence: Synthetic oligonucleotide
uucuccauaaggggcuuca

SEQ ID NO: 2555605 - RNA, 19 nt, Artificial Sequence
  Description of Artificial Sequence: Synthetic oligonucleotide
cuccauaaggggcuucaug

SEQ ID NO: 2555606 - RNA, 19 nt, Artificial Sequence
  Description of Artificial Sequence: Synthetic oligonucleotide
uagcacauggagagaguaa

SEQ ID NO: 2555607 - RNA, 19 nt, Artificial Sequence
  Description of Artificial Sequence: Synthetic oligonucleotide
auauaucaguaaauauaca

SEQ ID NO: 2555608 - RNA, 19 nt, Artificial Sequence
  Description of Artificial Sequence: Synthetic oligonucleotide
ugaccaaggaacgcaccug

SEQ ID NO: 2555609 - RNA, 19 nt, Artificial Sequence
  Description of Artificial Sequence: Synthetic oligonucleotide
gaacgcaccugaucagaac

SEQ ID NO: 2555610 - RNA, 19 nt, Artificial Sequence
  Description of Artificial Sequence: Synthetic oligonucleotide
agguaucaggcucauuuua

SEQ ID NO: 2555611 - RNA, 19 nt, Artificial Sequence
  Description of Artificial Sequence: Synthetic oligonucleotide
aacuacaauuacagaugca

SEQ ID NO: 2555612 - RNA, 19 nt, Artificial Sequence
  Description of Artificial Sequence: Synthetic oligonucleotide
gaacuacauggcugagacc

SEQ ID NO: 2555613 - RNA, 19 nt, Artificial Sequence
  Description of Artificial Sequence: Synthetic oligonucleotide
ugauugugaguccccucaa

SEQ ID NO: 2555614 - RNA, 19 nt, Artificial Sequence
  Description of Artificial Sequence: Synthetic oligonucleotide
guaaauguuuccugauugu

SEQ ID NO: 2555615 - RNA, 19 nt, Artificial Sequence
  Description of Artificial Sequence: Synthetic oligonucleotide
ugugugugugugugugucu

SEQ ID NO: 2555616 - RNA, 19 nt, Artificial Sequence
  Description of Artificial Sequence: Synthetic oligonucleotide
gcauuccucguucaucuag

SEQ ID NO: 2555617 - RNA, 19 nt, Artificial Sequence
  Description of Artificial Sequence: Synthetic oligonucleotide
ugccacacccugaugcccu

SEQ ID NO: 2555618 - RNA, 19 nt, Artificial Sequence
  Description of Artificial Sequence: Synthetic oligonucleotide
uaccgugugugugugugug

SEQ ID NO: 2555619 - RNA, 19 nt, Artificial Sequence
  Description of Artificial Sequence: Synthetic oligonucleotide
cuucuuugaucuuuuaaau

SEQ ID NO: 2555620 - RNA, 19 nt, Artificial Sequence
  Description of Artificial Sequence: Synthetic oligonucleotide
cacccugaugcccuggaug

SEQ ID NO: 2555621 - RNA, 19 nt, Artificial Sequence
  Description of Artificial Sequence: Synthetic oligonucleotide
cuccaaauuccgaaacaca

SEQ ID NO: 2555622 - RNA, 19 nt, Artificial Sequence
  Description of Artificial Sequence: Synthetic oligonucleotide
auuuggcauuugaacacag

SEQ ID NO: 2555623 - RNA, 19 nt, Artificial Sequence
  Description of Artificial Sequence: Synthetic oligonucleotide
auuccucguucaucuagca

SEQ ID NO: 2555624 - RNA, 19 nt, Artificial Sequence
  Description of Artificial Sequence: Synthetic oligonucleotide
gcaacacagaaaugagaag

SEQ ID NO: 2555625 - RNA, 19 nt, Artificial Sequence
  Description of Artificial Sequence: Synthetic oligonucleotide
uaaacaugucuugguuaca

SEQ ID NO: 2555626 - RNA, 19 nt, Artificial Sequence
  Description of Artificial Sequence: Synthetic oligonucleotide
ugugugugugugugugugu

SEQ ID NO: 2555627 - RNA, 19 nt, Artificial Sequence
  Description of Artificial Sequence: Synthetic oligonucleotide
agguuguugugugugugug

SEQ ID NO: 2555628 - RNA, 19 nt, Artificial Sequence
  Description of Artificial Sequence: Synthetic oligonucleotide
ccuaggacuuuaccgaagc

SEQ ID NO: 2555629 - RNA, 19 nt, Artificial Sequence
  Description of Artificial Sequence: Synthetic oligonucleotide
guaucaggcucauuuuaaa

SEQ ID NO: 2555630 - RNA, 19 nt, Artificial Sequence
  Description of Artificial Sequence: Synthetic oligonucleotide
uguuugccacacccugaug

SEQ ID NO: 2555631 - RNA, 19 nt, Artificial Sequence
  Description of Artificial Sequence: Synthetic oligonucleotide
ggaugccacaguugguagg

SEQ ID NO: 2555632 - RNA, 19 nt, Artificial Sequence
  Description of Artificial Sequence: Synthetic oligonucleotide
acucagcucugauugcuau

SEQ ID NO: 2555633 - RNA, 19 nt, Artificial Sequence
  Description of Artificial Sequence: Synthetic oligonucleotide
cagugaccaaggaacgcac

SEQ ID NO: 2555634 - RNA, 19 nt, Artificial Sequence
  Description of Artificial Sequence: Synthetic oligonucleotide
gcaagucacacagugacca

SEQ ID NO: 2555635 - RNA, 19 nt, Artificial Sequence
  Description of Artificial Sequence: Synthetic oligonucleotide
auggaugccacaguuggua

SEQ ID NO: 2555636 - RNA, 19 nt, Artificial Sequence
  Description of Artificial Sequence: Synthetic oligonucleotide
gaaaacacaggugugcauu

SEQ ID NO: 2555637 - RNA, 19 nt, Artificial Sequence
  Description of Artificial Sequence: Synthetic oligonucleotide
ccgaaacacagguaucagg

SEQ ID NO: 2555638 - RNA, 19 nt, Artificial Sequence
  Description of Artificial Sequence: Synthetic oligonucleotide
gugugugugugugugugug

SEQ ID NO: 2555639 - RNA, 19 nt, Artificial Sequence
  Description of Artificial Sequence: Synthetic oligonucleotide
augaacuacauggcugaga

SEQ ID NO: 2555640 - RNA, 19 nt, Artificial Sequence
  Description of Artificial Sequence: Synthetic oligonucleotide
agauugcacauaaauuaaa

SEQ ID NO: 2555641 - RNA, 19 nt, Artificial Sequence
  Description of Artificial Sequence: Synthetic oligonucleotide
ggccaugucuccaaauucc

SEQ ID NO: 2555642 - RNA, 19 nt, Artificial Sequence
  Description of Artificial Sequence: Synthetic oligonucleotide
ggaacugaaggcaauccuc

SEQ ID NO: 2555643 - RNA, 19 nt, Artificial Sequence
  Description of Artificial Sequence: Synthetic oligonucleotide
agacuguuguugagcuacc

SEQ ID NO: 2555644 - RNA, 19 nt, Artificial Sequence
  Description of Artificial Sequence: Synthetic oligonucleotide
gugugugugugugugucug

SEQ ID NO: 2555645 - RNA, 19 nt, Artificial Sequence
  Description of Artificial Sequence: Synthetic oligonucleotide
augcaacacagaaaugaga

SEQ ID NO: 2555646 - RNA, 19 nt, Artificial Sequence
  Description of Artificial Sequence: Synthetic oligonucleotide
gcucugauugcuauuuggc

SEQ ID NO: 2555647 - RNA, 19 nt, Artificial Sequence
  Description of Artificial Sequence: Synthetic oligonucleotide
cacagugaccaaggaacgc

SEQ ID NO: 2555648 - RNA, 19 nt, Artificial Sequence
  Description of Artificial Sequence: Synthetic oligonucleotide
cccacauauacuguuugcc

SEQ ID NO: 2555649 - RNA, 19 nt, Artificial Sequence
  Description of Artificial Sequence: Synthetic oligonucleotide
gugugcagacuguuguuga

SEQ ID NO: 2555650 - RNA, 19 nt, Artificial Sequence
  Description of Artificial Sequence: Synthetic oligonucleotide
uuguugugugugugugugu

SEQ ID NO: 2555651 - RNA, 19 nt, Artificial Sequence
  Description of Artificial Sequence: Synthetic oligonucleotide
acgcaccugaucagaacac

SEQ ID NO: 2555652 - RNA, 19 nt, Artificial Sequence
  Description of Artificial Sequence: Synthetic oligonucleotide
gugcagacuguuguugagc

SEQ ID NO: 2555653 - RNA, 19 nt, Artificial Sequence
  Description of Artificial Sequence: Synthetic oligonucleotide
cacagcugcaugcaacaca

SEQ ID NO: 2555654 - RNA, 19 nt, Artificial Sequence
  Description of Artificial Sequence: Synthetic oligonucleotide
gaccuaggacuuuaccgaa

SEQ ID NO: 2555655 - RNA, 19 nt, Artificial Sequence
  Description of Artificial Sequence: Synthetic oligonucleotide
aaauuccgaaacacaggua

SEQ ID NO: 2555656 - RNA, 19 nt, Artificial Sequence
  Description of Artificial Sequence: Synthetic oligonucleotide
uggcugagaccuaggacuu

SEQ ID NO: 2555657 - RNA, 19 nt, Artificial Sequence
  Description of Artificial Sequence: Synthetic oligonucleotide
guuuucuccauaaggggcu

SEQ ID NO: 2555658 - RNA, 19 nt, Artificial Sequence
  Description of Artificial Sequence: Synthetic oligonucleotide
gugugugugugugucuggc

SEQ ID NO: 2555659 - RNA, 19 nt, Artificial Sequence
  Description of Artificial Sequence: Synthetic oligonucleotide
auaaggggcuucauguuua

SEQ ID NO: 2555660 - RNA, 19 nt, Artificial Sequence
  Description of Artificial Sequence: Synthetic oligonucleotide
gaaggcaauccucaugcuu

SEQ ID NO: 2555661 - RNA, 19 nt, Artificial Sequence
  Description of Artificial Sequence: Synthetic oligonucleotide
aucagaacacucagcucug

SEQ ID NO: 2555662 - RNA, 19 nt, Artificial Sequence
  Description of Artificial Sequence: Synthetic oligonucleotide
aggaacgcaccugaucaga

SEQ ID NO: 2555663 - RNA, 19 nt, Artificial Sequence
  Description of Artificial Sequence: Synthetic oligonucleotide
cuggcuccuucuuugaucu

SEQ ID NO: 2555664 - RNA, 19 nt, Artificial Sequence
  Description of Artificial Sequence: Synthetic oligonucleotide
cugagaccuaggacuuuac

SEQ ID NO: 2555665 - RNA, 19 nt, Artificial Sequence
  Description of Artificial Sequence: Synthetic oligonucleotide
gauugcuauuuggcauuug

SEQ ID NO: 2555666 - RNA, 19 nt, Artificial Sequence
  Description of Artificial Sequence: Synthetic oligonucleotide
cucaggugcuagaaacaca

SEQ ID NO: 2555667 - RNA, 19 nt, Artificial Sequence
  Description of Artificial Sequence: Synthetic oligonucleotide
ggagagaguaaagcaaguc

SEQ ID NO: 2555668 - RNA, 19 nt, Artificial Sequence
  Description of Artificial Sequence: Synthetic oligonucleotide
gugugugugugucuggccu

SEQ ID NO: 2555669 - RNA, 19 nt, Artificial Sequence
  Description of Artificial Sequence: Synthetic oligonucleotide
ccccucaggugcuagaaac

SEQ ID NO: 2555670 - RNA, 19 nt, Artificial Sequence
  Description of Artificial Sequence: Synthetic oligonucleotide
gugugugugugugugugca

SEQ ID NO: 2555671 - RNA, 19 nt, Artificial Sequence
  Description of Artificial Sequence: Synthetic oligonucleotide
guguguguguguguguguc

SEQ ID NO: 2555672 - RNA, 19 nt, Artificial Sequence
  Description of Artificial Sequence: Synthetic oligonucleotide
gugaccaaggaacgcaccu

SEQ ID NO: 2555673 - RNA, 19 nt, Artificial Sequence
  Description of Artificial Sequence: Synthetic oligonucleotide
acuguuugccacacccuga

SEQ ID NO: 2555674 - RNA, 19 nt, Artificial Sequence
  Description of Artificial Sequence: Synthetic oligonucleotide
cacugccaugccuggcucc

SEQ ID NO: 2555675 - RNA, 19 nt, Artificial Sequence
  Description of Artificial Sequence: Synthetic oligonucleotide
guuuagugucuuucacaaa

SEQ ID NO: 2555676 - RNA, 19 nt, Artificial Sequence
  Description of Artificial Sequence: Synthetic oligonucleotide
ccacauauacuguuugcca

SEQ ID NO: 2555677 - RNA, 19 nt, Artificial Sequence
  Description of Artificial Sequence: Synthetic oligonucleotide
gcuaccgugugugugugug

SEQ ID NO: 2555678 - RNA, 19 nt, Artificial Sequence
  Description of Artificial Sequence: Synthetic oligonucleotide
gugugucuggccuggaacu

SEQ ID NO: 2555679 - RNA, 19 nt, Artificial Sequence
  Description of Artificial Sequence: Synthetic oligonucleotide
ccccucaacuguuuucucc

SEQ ID NO: 2555680 - RNA, 19 nt, Artificial Sequence
  Description of Artificial Sequence: Synthetic oligonucleotide
accuaggacuuuaccgaag

SEQ ID NO: 2555681 - RNA, 19 nt, Artificial Sequence
  Description of Artificial Sequence: Synthetic oligonucleotide
gugugugugugugugcaga

SEQ ID NO: 2555682 - RNA, 19 nt, Artificial Sequence
  Description of Artificial Sequence: Synthetic oligonucleotide
ugauugcuauuuggcauuu

SEQ ID NO: 2555683 - RNA, 19 nt, Artificial Sequence
  Description of Artificial Sequence: Synthetic oligonucleotide
cuagcacauggagagagua

SEQ ID NO: 2555684 - RNA, 19 nt, Artificial Sequence
  Description of Artificial Sequence: Synthetic oligonucleotide
gguaucaggcucauuuuaa

SEQ ID NO: 2555685 - RNA, 19 nt, Artificial Sequence
  Description of Artificial Sequence: Synthetic oligonucleotide
ggugcuagaaacacaggua

SEQ ID NO: 2555686 - RNA, 19 nt, Artificial Sequence
  Description of Artificial Sequence: Synthetic oligonucleotide
augcccuggauggaugcca

SEQ ID NO: 2555687 - RNA, 19 nt, Artificial Sequence
  Description of Artificial Sequence: Synthetic oligonucleotide
aaggggcuucauguuuagu

SEQ ID NO: 2555688 - RNA, 19 nt, Artificial Sequence
  Description of Artificial Sequence: Synthetic oligonucleotide
guagggagaguaaauguuu

SEQ ID NO: 2555689 - RNA, 19 nt, Artificial Sequence
  Description of Artificial Sequence: Synthetic oligonucleotide
accgugugugugugugugu

SEQ ID NO: 2555690 - RNA, 19 nt, Artificial Sequence
  Description of Artificial Sequence: Synthetic oligonucleotide
ccacaguugguagggagag

SEQ ID NO: 2555691 - RNA, 19 nt, Artificial Sequence
  Description of Artificial Sequence: Synthetic oligonucleotide
ccccacauauacuguuugc

SEQ ID NO: 2555692 - RNA, 19 nt, Artificial Sequence
  Description of Artificial Sequence: Synthetic oligonucleotide
gagcuaccgugugugugug

SEQ ID NO: 2555693 - RNA, 19 nt, Artificial Sequence
  Description of Artificial Sequence: Synthetic oligonucleotide
cugauugcuauuuggcauu

SEQ ID NO: 2555694 - RNA, 19 nt, Artificial Sequence
  Description of Artificial Sequence: Synthetic oligonucleotide
aggcaauccucaugcuuua

SEQ ID NO: 2555695 - RNA, 19 nt, Artificial Sequence
  Description of Artificial Sequence: Synthetic oligonucleotide
cauaaggggcuucauguuu

SEQ ID NO: 2555696 - RNA, 19 nt, Artificial Sequence
  Description of Artificial Sequence: Synthetic oligonucleotide
ccaaggaacgcaccugauc

SEQ ID NO: 2555697 - RNA, 19 nt, Artificial Sequence
  Description of Artificial Sequence: Synthetic oligonucleotide
ugcauuccucguucaucua

SEQ ID NO: 2555698 - RNA, 19 nt, Artificial Sequence
  Description of Artificial Sequence: Synthetic oligonucleotide
caacaacauggccaugucu

SEQ ID NO: 2555699 - RNA, 19 nt, Artificial Sequence
  Description of Artificial Sequence: Synthetic oligonucleotide
cccucaacuguuuucucca

SEQ ID NO: 2555700 - RNA, 19 nt, Artificial Sequence
  Description of Artificial Sequence: Synthetic oligonucleotide
uccccucaacuguuuucuc

SEQ ID NO: 2555701 - RNA, 19 nt, Artificial Sequence
  Description of Artificial Sequence: Synthetic oligonucleotide
uagccccucaggugcuaga

SEQ ID NO: 2555702 - RNA, 19 nt, Artificial Sequence
  Description of Artificial Sequence: Synthetic oligonucleotide
cauuugaacacagcugcau

SEQ ID NO: 2555703 - RNA, 19 nt, Artificial Sequence
  Description of Artificial Sequence: Synthetic oligonucleotide
gggagaguaaauguuuccu

SEQ ID NO: 2555704 - RNA, 19 nt, Artificial Sequence
  Description of Artificial Sequence: Synthetic oligonucleotide
ucuccauaaggggcuucau

SEQ ID NO: 2555705 - RNA, 19 nt, Artificial Sequence
  Description of Artificial Sequence: Synthetic oligonucleotide
guugugugugugugugugu

SEQ ID NO: 2555706 - RNA, 19 nt, Artificial Sequence
  Description of Artificial Sequence: Synthetic oligonucleotide
guccccucaacuguuuucu

SEQ ID NO: 2555707 - RNA, 19 nt, Artificial Sequence
  Description of Artificial Sequence: Synthetic oligonucleotide
ggugugcauuccucguuca

SEQ ID NO: 2555708 - RNA, 19 nt, Artificial Sequence
  Description of Artificial Sequence: Synthetic oligonucleotide
acacccugaugcccuggau

SEQ ID NO: 2555709 - RNA, 19 nt, Artificial Sequence
  Description of Artificial Sequence: Synthetic oligonucleotide
agcuaccgugugugugugu

SEQ ID NO: 2555710 - RNA, 19 nt, Artificial Sequence
  Description of Artificial Sequence: Synthetic oligonucleotide
gcaccugaucagaacacuc

SEQ ID NO: 2555711 - RNA, 19 nt, Artificial Sequence
  Description of Artificial Sequence: Synthetic oligonucleotide
gguagggagaguaaauguu

SEQ ID NO: 2555712 - RNA, 19 nt, Artificial Sequence
  Description of Artificial Sequence: Synthetic oligonucleotide
gugucuggccuggaacuga

SEQ ID NO: 2555713 - RNA, 19 nt, Artificial Sequence
  Description of Artificial Sequence: Synthetic oligonucleotide
ccaacaacauggccauguc

SEQ ID NO: 2555714 - RNA, 19 nt, Artificial Sequence
  Description of Artificial Sequence: Synthetic oligonucleotide
uuuagccccucaggugcua

SEQ ID NO: 2555715 - RNA, 19 nt, Artificial Sequence
  Description of Artificial Sequence: Synthetic oligonucleotide
gugugugucuggccuggaa

SEQ ID NO: 2555716 - RNA, 19 nt, Artificial Sequence
  Description of Artificial Sequence: Synthetic oligonucleotide
guugagcuaccgugugugu

SEQ ID NO: 2555717 - RNA, 19 nt, Artificial Sequence
  Description of Artificial Sequence: Synthetic oligonucleotide
ccugauugugaguccccuc

SEQ ID NO: 2555718 - RNA, 19 nt, Artificial Sequence
  Description of Artificial Sequence: Synthetic oligonucleotide
cuguuugccacacccugau

SEQ ID NO: 2555719 - RNA, 19 nt, Artificial Sequence
  Description of Artificial Sequence: Synthetic oligonucleotide
ggcaauccucaugcuuuag

SEQ ID NO: 2555720 - RNA, 19 nt, Artificial Sequence
  Description of Artificial Sequence: Synthetic oligonucleotide
gccacaguugguagggaga

SEQ ID NO: 2555721 - RNA, 19 nt, Artificial Sequence
  Description of Artificial Sequence: Synthetic oligonucleotide
cacucagcucugauugcua

SEQ ID NO: 2555722 - RNA, 19 nt, Artificial Sequence
  Description of Artificial Sequence: Synthetic oligonucleotide
cguucaucuagcacaugga

SEQ ID NO: 2555723 - RNA, 19 nt, Artificial Sequence
  Description of Artificial Sequence: Synthetic oligonucleotide
gguuguugugugugugugu

SEQ ID NO: 2555724 - RNA, 19 nt, Artificial Sequence
  Description of Artificial Sequence: Synthetic oligonucleotide
ccgugugugugugugugug

SEQ ID NO: 2555725 - RNA, 19 nt, Artificial Sequence
  Description of Artificial Sequence: Synthetic oligonucleotide
ccaugucuccaaauuccga

SEQ ID NO: 2555726 - RNA, 19 nt, Artificial Sequence
  Description of Artificial Sequence: Synthetic oligonucleotide
accaaggaacgcaccugau

SEQ ID NO: 2555727 - RNA, 19 nt, Artificial Sequence
  Description of Artificial Sequence: Synthetic oligonucleotide
cuuuagccccucaggugcu

SEQ ID NO: 2555728 - RNA, 19 nt, Artificial Sequence
  Description of Artificial Sequence: Synthetic oligonucleotide
ggaacgcaccugaucagaa

SEQ ID NO: 2555729 - RNA, 19 nt, Artificial Sequence
  Description of Artificial Sequence: Synthetic oligonucleotide
acacagguaucaggcucau

SEQ ID NO: 2555730 - RNA, 19 nt, Artificial Sequence
  Description of Artificial Sequence: Synthetic oligonucleotide
cucaugcuuuagccccuca

SEQ ID NO: 2555731 - RNA, 19 nt, Artificial Sequence
  Description of Artificial Sequence: Synthetic oligonucleotide
cagguaucaggcucauuuu

SEQ ID NO: 2555732 - RNA, 19 nt, Artificial Sequence
  Description of Artificial Sequence: Synthetic oligonucleotide
cucguucaucuagcacaug

SEQ ID NO: 2555733 - RNA, 19 nt, Artificial Sequence
  Description of Artificial Sequence: Synthetic oligonucleotide
cauggccaugucuccaaau

SEQ ID NO: 2555734 - RNA, 19 nt, Artificial Sequence
  Description of Artificial Sequence: Synthetic oligonucleotide
cuucauguuuagugucuuu

SEQ ID NO: 2555735 - RNA, 19 nt, Artificial Sequence
  Description of Artificial Sequence: Synthetic oligonucleotide
gcugagaccuaggacuuua

SEQ ID NO: 2555736 - RNA, 19 nt, Artificial Sequence
  Description of Artificial Sequence: Synthetic oligonucleotide
cccucaggugcuagaaaca

SEQ ID NO: 2555737 - RNA, 19 nt, Artificial Sequence
  Description of Artificial Sequence: Synthetic oligonucleotide
cagaacacucagcucugau

SEQ ID NO: 2555738 - RNA, 19 nt, Artificial Sequence
  Description of Artificial Sequence: Synthetic oligonucleotide
caugccuggcuccuucuuu

SEQ ID NO: 2555739 - RNA, 19 nt, Artificial Sequence
  Description of Artificial Sequence: Synthetic oligonucleotide
gugugugugugugcagacu

SEQ ID NO: 2555740 - RNA, 19 nt, Artificial Sequence
  Description of Artificial Sequence: Synthetic oligonucleotide
gugugcauuccucguucau

SEQ ID NO: 2555741 - RNA, 19 nt, Artificial Sequence
  Description of Artificial Sequence: Synthetic oligonucleotide
cuaccgugugugugugugu

SEQ ID NO: 2555742 - RNA, 19 nt, Artificial Sequence
  Description of Artificial Sequence: Synthetic oligonucleotide
acccaacaacauggccaug

SEQ ID NO: 2555743 - RNA, 19 nt, Artificial Sequence
  Description of Artificial Sequence: Synthetic oligonucleotide
cccaacaacauggccaugu

SEQ ID NO: 2555744 - RNA, 19 nt, Artificial Sequence
  Description of Artificial Sequence: Synthetic oligonucleotide
cucagcucugauugcuauu

SEQ ID NO: 2555745 - RNA, 19 nt, Artificial Sequence
  Description of Artificial Sequence: Synthetic oligonucleotide
cagcugcaugcaacacaga

SEQ ID NO: 2555746 - RNA, 19 nt, Artificial Sequence
  Description of Artificial Sequence: Synthetic oligonucleotide
gcagacuguuguugagcua

SEQ ID NO: 2555747 - RNA, 19 nt, Artificial Sequence
  Description of Artificial Sequence: Synthetic oligonucleotide
caggugugcauuccucguu

SEQ ID NO: 2555748 - RNA, 19 nt, Artificial Sequence
  Description of Artificial Sequence: Synthetic oligonucleotide
caaacacauuugacauauu

SEQ ID NO: 2555749 - RNA, 19 nt, Artificial Sequence
  Description of Artificial Sequence: Synthetic oligonucleotide
ccucguucaucuagcacau

SEQ ID NO: 2555750 - RNA, 19 nt, Artificial Sequence
  Description of Artificial Sequence: Synthetic oligonucleotide
gccccucaggugcuagaaa

SEQ ID NO: 2555751 - RNA, 19 nt, Artificial Sequence
  Description of Artificial Sequence: Synthetic oligonucleotide
ccauaaggggcuucauguu

SEQ ID NO: 2555752 - RNA, 19 nt, Artificial Sequence
  Description of Artificial Sequence: Synthetic oligonucleotide
cacaguugguagggagagu

SEQ ID NO: 2555753 - RNA, 19 nt, Artificial Sequence
  Description of Artificial Sequence: Synthetic oligonucleotide
ccuggauggaugccacagu

SEQ ID NO: 2555754 - RNA, 19 nt, Artificial Sequence
  Description of Artificial Sequence: Synthetic oligonucleotide
gccuggcuccuucuuugau

SEQ ID NO: 2555755 - RNA, 19 nt, Artificial Sequence
  Description of Artificial Sequence: Synthetic oligonucleotide
ccucaacuguuuucuccau

SEQ ID NO: 2555756 - RNA, 19 nt, Artificial Sequence
  Description of Artificial Sequence: Synthetic oligonucleotide
cgugugugugugugugugu

SEQ ID NO: 2555757 - RNA, 19 nt, Artificial Sequence
  Description of Artificial Sequence: Synthetic oligonucleotide
cgcaccugaucagaacacu

SEQ ID NO: 2555758 - RNA, 19 nt, Artificial Sequence
  Description of Artificial Sequence: Synthetic oligonucleotide
cacagguaucaggcucauu

SEQ ID NO: 2555759 - RNA, 19 nt, Artificial Sequence
  Description of Artificial Sequence: Synthetic oligonucleotide
ggcugagaccuaggacuuu

SEQ ID NO: 2555760 - RNA, 19 nt, Artificial Sequence
  Description of Artificial Sequence: Synthetic oligonucleotide
cugccaugccuggcuccuu

SEQ ID NO: 2555761 - RNA, 19 nt, Artificial Sequence
  Description of Artificial Sequence: Synthetic oligonucleotide
uuuuaaauuaauaucaccu

SEQ ID NO: 2555762 - RNA, 19 nt, Artificial Sequence
  Description of Artificial Sequence: Synthetic oligonucleotide
uuaaauuaauaucaccucc

SEQ ID NO: 2555763 - RNA, 19 nt, Artificial Sequence
  Description of Artificial Sequence: Synthetic oligonucleotide
auuaauaucaccucccacu

SEQ ID NO: 2555764 - RNA, 19 nt, Artificial Sequence
  Description of Artificial Sequence: Synthetic oligonucleotide
uuuaaauuaauaucaccuc

SEQ ID NO: 2555765 - RNA, 19 nt, Artificial Sequence
  Description of Artificial Sequence: Synthetic oligonucleotide
aauaucaccucccacuauu

SEQ ID NO: 2555766 - RNA, 19 nt, Artificial Sequence
  Description of Artificial Sequence: Synthetic oligonucleotide
uuaauaucaccucccacua

SEQ ID NO: 2555767 - RNA, 19 nt, Artificial Sequence
  Description of Artificial Sequence: Synthetic oligonucleotide
acuucucgaaguuggguug

SEQ ID NO: 2555768 - RNA, 19 nt, Artificial Sequence
  Description of Artificial Sequence: Synthetic oligonucleotide
ucgaaguuggguugggguc

SEQ ID NO: 2555769 - RNA, 19 nt, Artificial Sequence
  Description of Artificial Sequence: Synthetic oligonucleotide
guuggguuggggucgacac

SEQ ID NO: 2555770 - RNA, 19 nt, Artificial Sequence
  Description of Artificial Sequence: Synthetic oligonucleotide
uaucaccucccacuauuuc

SEQ ID NO: 2555771 - RNA, 19 nt, Artificial Sequence
  Description of Artificial Sequence: Synthetic oligonucleotide
uaauaucaccucccacuau

SEQ ID NO: 2555772 - RNA, 19 nt, Artificial Sequence
  Description of Artificial Sequence: Synthetic oligonucleotide
cuucucgaaguuggguugg

SEQ ID NO: 2555773 - RNA, 19 nt, Artificial Sequence
  Description of Artificial Sequence: Synthetic oligonucleotide
uuggguuggggucgacaca

SEQ ID NO: 2555774 - RNA, 19 nt, Artificial Sequence
  Description of Artificial Sequence: Synthetic oligonucleotide
ggggccggcaccaaagucc

SEQ ID NO: 2555775 - RNA, 19 nt, Artificial Sequence
  Description of Artificial Sequence: Synthetic oligonucleotide
cucgaaguuggguuggggu

SEQ ID NO: 2555776 - RNA, 19 nt, Artificial Sequence
  Description of Artificial Sequence: Synthetic oligonucleotide
aguuggguuggggucgaca

SEQ ID NO: 2555777 - RNA, 19 nt, Artificial Sequence
  Description of Artificial Sequence: Synthetic oligonucleotide
cgaaguuggguuggggucg

SEQ ID NO: 2555778 - RNA, 19 nt, Artificial Sequence
  Description of Artificial Sequence: Synthetic oligonucleotide
aaguuggguuggggucgac

SEQ ID NO: 2555779 - RNA, 19 nt, Artificial Sequence
  Description of Artificial Sequence: Synthetic oligonucleotide
auaucaccucccacuauuu

SEQ ID NO: 2555780 - RNA, 19 nt, Artificial Sequence
  Description of Artificial Sequence: Synthetic oligonucleotide
gaaguuggguuggggucga

SEQ ID NO: 2555781 - RNA, 19 nt, Artificial Sequence
  Description of Artificial Sequence: Synthetic oligonucleotide
gggccggcaccaaagucca

SEQ ID NO: 2555782 - RNA, 19 nt, Artificial Sequence
  Description of Artificial Sequence: Synthetic oligonucleotide
ccggcaccaaaguccagga

SEQ ID NO: 2555783 - RNA, 19 nt, Artificial Sequence
  Description of Artificial Sequence: Synthetic oligonucleotide
cggcaccaaaguccaggac

SEQ ID NO: 2555784 - RNA, 19 nt, Artificial Sequence
  Description of Artificial Sequence: Synthetic oligonucleotide
ggccggcaccaaaguccag

SEQ ID NO: 2555785 - RNA, 19 nt, Artificial Sequence
  Description of Artificial Sequence: Synthetic oligonucleotide
acuaaagcaccuuuguccc

SEQ ID NO: 2555786 - RNA, 19 nt, Artificial Sequence
  Description of Artificial Sequence: Synthetic oligonucleotide
uuuccagaaauguugaugc

SEQ ID NO: 2555787 - RNA, 19 nt, Artificial Sequence
  Description of Artificial Sequence: Synthetic oligonucleotide
gacuaaagcaccuuugucc

SEQ ID NO: 2555788 - RNA, 19 nt, Artificial Sequence
  Description of Artificial Sequence: Synthetic oligonucleotide
acaacgacuaccuuccggc

SEQ ID NO: 2555789 - RNA, 19 nt, Artificial Sequence
  Description of Artificial Sequence: Synthetic oligonucleotide
uguugaugccuucacagcg

SEQ ID NO: 2555790 - RNA, 19 nt, Artificial Sequence
  Description of Artificial Sequence: Synthetic oligonucleotide
uuucuaaguacccucuucc

SEQ ID NO: 2555791 - RNA, 19 nt, Artificial Sequence
  Description of Artificial Sequence: Synthetic oligonucleotide
agguacuuuaacuuguuuc

SEQ ID NO: 2555792 - RNA, 19 nt, Artificial Sequence
  Description of Artificial Sequence: Synthetic oligonucleotide
aaagccagguacuuuaacu

SEQ ID NO: 2555793 - RNA, 19 nt, Artificial Sequence
  Description of Artificial Sequence: Synthetic oligonucleotide
ucuaguaggcuucagccgc

SEQ ID NO: 2555794 - RNA, 19 nt, Artificial Sequence
  Description of Artificial Sequence: Synthetic oligonucleotide
uuuaacuuguuucuguaaa

SEQ ID NO: 2555795 - RNA, 19 nt, Artificial Sequence
  Description of Artificial Sequence: Synthetic oligonucleotide
agccgcacaaccuugaggg

SEQ ID NO: 2555796 - RNA, 19 nt, Artificial Sequence
  Description of Artificial Sequence: Synthetic oligonucleotide
uguucauccgcuuucggag

SEQ ID NO: 2555797 - RNA, 19 nt, Artificial Sequence
  Description of Artificial Sequence: Synthetic oligonucleotide
acaaacagucuuuauuggg

SEQ ID NO: 2555798 - RNA, 19 nt, Artificial Sequence
  Description of Artificial Sequence: Synthetic oligonucleotide
aacgacuaccuuccggccc

SEQ ID NO: 2555799 - RNA, 19 nt, Artificial Sequence
  Description of Artificial Sequence: Synthetic oligonucleotide
uucuguaaaaguuuccaga

SEQ ID NO: 2555800 - RNA, 19 nt, Artificial Sequence
  Description of Artificial Sequence: Synthetic oligonucleotide
uaggcaaacuuucuaguag

SEQ ID NO: 2555801 - RNA, 19 nt, Artificial Sequence
  Description of Artificial Sequence: Synthetic oligonucleotide
caaacagucuuuauugggc

SEQ ID NO: 2555802 - RNA, 19 nt, Artificial Sequence
  Description of Artificial Sequence: Synthetic oligonucleotide
cuugucauagggaggaggg

SEQ ID NO: 2555803 - RNA, 19 nt, Artificial Sequence
  Description of Artificial Sequence: Synthetic oligonucleotide
aacacuagaaccugucccu

SEQ ID NO: 2555804 - RNA, 19 nt, Artificial Sequence
  Description of Artificial Sequence: Synthetic oligonucleotide
ucuguaaaaguuuccagaa

SEQ ID NO: 2555805 - RNA, 19 nt, Artificial Sequence
  Description of Artificial Sequence: Synthetic oligonucleotide
uaaaaguuuccagaaaugu

SEQ ID NO: 2555806 - RNA, 19 nt, Artificial Sequence
  Description of Artificial Sequence: Synthetic oligonucleotide
aacuuguuucuguaaaagu

SEQ ID NO: 2555807 - RNA, 19 nt, Artificial Sequence
  Description of Artificial Sequence: Synthetic oligonucleotide
gaccucaugagccaggcgc

SEQ ID NO: 2555808 - RNA, 19 nt, Artificial Sequence
  Description of Artificial Sequence: Synthetic oligonucleotide
caggcauuagcacaaacag

SEQ ID NO: 2555809 - RNA, 19 nt, Artificial Sequence
  Description of Artificial Sequence: Synthetic oligonucleotide
cuaaguacccucuuccuac

SEQ ID NO: 2555810 - RNA, 19 nt, Artificial Sequence
  Description of Artificial Sequence: Synthetic oligonucleotide
aguccguuggucuugagga

SEQ ID NO: 2555811 - RNA, 19 nt, Artificial Sequence
  Description of Artificial Sequence: Synthetic oligonucleotide
aagauggccucugccaucc

SEQ ID NO: 2555812 - RNA, 19 nt, Artificial Sequence
  Description of Artificial Sequence: Synthetic oligonucleotide
ccauccaacaccuugaggc

SEQ ID NO: 2555813 - RNA, 19 nt, Artificial Sequence
  Description of Artificial Sequence: Synthetic oligonucleotide
cuugcuuugccacaauggc

SEQ ID NO: 2555814 - RNA, 19 nt, Artificial Sequence
  Description of Artificial Sequence: Synthetic oligonucleotide
aggcaaacuuucuaguagg

SEQ ID NO: 2555815 - RNA, 19 nt, Artificial Sequence
  Description of Artificial Sequence: Synthetic oligonucleotide
ugucccuccgccaucuucg

SEQ ID NO: 2555816 - RNA, 19 nt, Artificial Sequence
  Description of Artificial Sequence: Synthetic oligonucleotide
uugcguagccucaagagcu

SEQ ID NO: 2555817 - RNA, 19 nt, Artificial Sequence
  Description of Artificial Sequence: Synthetic oligonucleotide
aacuugcuuauuuucuucu

SEQ ID NO: 2555818 - RNA, 19 nt, Artificial Sequence
  Description of Artificial Sequence: Synthetic oligonucleotide
uucuaguaggcuucagccg

SEQ ID NO: 2555819 - RNA, 19 nt, Artificial Sequence
  Description of Artificial Sequence: Synthetic oligonucleotide
cuuuauugggcucacacca

SEQ ID NO: 2555820 - RNA, 19 nt, Artificial Sequence
  Description of Artificial Sequence: Synthetic oligonucleotide
uaacuuguuucuguaaaag

SEQ ID NO: 2555821 - RNA, 19 nt, Artificial Sequence
  Description of Artificial Sequence: Synthetic oligonucleotide
uuucuugucauagggagga

SEQ ID NO: 2555822 - RNA, 19 nt, Artificial Sequence
  Description of Artificial Sequence: Synthetic oligonucleotide
ucuuuauugggcucacacc

SEQ ID NO: 2555823 - RNA, 19 nt, Artificial Sequence
  Description of Artificial Sequence: Synthetic oligonucleotide
ucggaggaaagccagguac

SEQ ID NO: 2555824 - RNA, 19 nt, Artificial Sequence
  Description of Artificial Sequence: Synthetic oligonucleotide
aacagucuuuauugggcuc

SEQ ID NO: 2555825 - RNA, 19 nt, Artificial Sequence
  Description of Artificial Sequence: Synthetic oligonucleotide
cuugcuuauuuucuucucc

SEQ ID NO: 2555826 - RNA, 19 nt, Artificial Sequence
  Description of Artificial Sequence: Synthetic oligonucleotide
ugguauuuccacccgaccu

SEQ ID NO: 2555827 - RNA, 19 nt, Artificial Sequence
  Description of Artificial Sequence: Synthetic oligonucleotide
caacacuagaaccuguccc

SEQ ID NO: 2555828 - RNA, 19 nt, Artificial Sequence
  Description of Artificial Sequence: Synthetic oligonucleotide
gagggguugguguucaucc

SEQ ID NO: 2555829 - RNA, 19 nt, Artificial Sequence
  Description of Artificial Sequence: Synthetic oligonucleotide
guuugcguagccucaagag

SEQ ID NO: 2555830 - RNA, 19 nt, Artificial Sequence
  Description of Artificial Sequence: Synthetic oligonucleotide
agguaggcaaacuuucuag

SEQ ID NO: 2555831 - RNA, 19 nt, Artificial Sequence
  Description of Artificial Sequence: Synthetic oligonucleotide
ugugaacuugcuuauuuuc

SEQ ID NO: 2555832 - RNA, 19 nt, Artificial Sequence
  Description of Artificial Sequence: Synthetic oligonucleotide
cuuucuaguaggcuucagc

SEQ ID NO: 2555833 - RNA, 19 nt, Artificial Sequence
  Description of Artificial Sequence: Synthetic oligonucleotide
uuuauugggcucacaccag

SEQ ID NO: 2555834 - RNA, 19 nt, Artificial Sequence
  Description of Artificial Sequence: Synthetic oligonucleotide
acuagaaccugucccuccg

SEQ ID NO: 2555835 - RNA, 19 nt, Artificial Sequence
  Description of Artificial Sequence: Synthetic oligonucleotide
uuuccacccgaccucauga

SEQ ID NO: 2555836 - RNA, 19 nt, Artificial Sequence
  Description of Artificial Sequence: Synthetic oligonucleotide
uuuuccuugcguuucuccu

SEQ ID NO: 2555837 - RNA, 19 nt, Artificial Sequence
  Description of Artificial Sequence: Synthetic oligonucleotide
gcacaaacagucuuuauug

SEQ ID NO: 2555838 - RNA, 19 nt, Artificial Sequence
  Description of Artificial Sequence: Synthetic oligonucleotide
aguacccucuuccuacugg

SEQ ID NO: 2555839 - RNA, 19 nt, Artificial Sequence
  Description of Artificial Sequence: Synthetic oligonucleotide
uugcuuugccacaauggcc

SEQ ID NO: 2555840 - RNA, 19 nt, Artificial Sequence
  Description of Artificial Sequence: Synthetic oligonucleotide
uucacagcgcacaacgacu

SEQ ID NO: 2555841 - RNA, 19 nt, Artificial Sequence
  Description of Artificial Sequence: Synthetic oligonucleotide
uugaggaccucugugaacu

SEQ ID NO: 2555842 - RNA, 19 nt, Artificial Sequence
  Description of Artificial Sequence: Synthetic oligonucleotide
ucugugaacuugcuuauuu

SEQ ID NO: 2555843 - RNA, 19 nt, Artificial Sequence
  Description of Artificial Sequence: Synthetic oligonucleotide
aagccagguacuuuaacuu

SEQ ID NO: 2555844 - RNA, 19 nt, Artificial Sequence
  Description of Artificial Sequence: Synthetic oligonucleotide
uuuucugccuguuugcgua

SEQ ID NO: 2555845 - RNA, 19 nt, Artificial Sequence
  Description of Artificial Sequence: Synthetic oligonucleotide
accucugugaacuugcuua

SEQ ID NO: 2555846 - RNA, 19 nt, Artificial Sequence
  Description of Artificial Sequence: Synthetic oligonucleotide
gaguccguuggucuugagg

SEQ ID NO: 2555847 - RNA, 19 nt, Artificial Sequence
  Description of Artificial Sequence: Synthetic oligonucleotide
agcaccuuuguccccacuc

SEQ ID NO: 2555848 - RNA, 19 nt, Artificial Sequence
  Description of Artificial Sequence: Synthetic oligonucleotide
acuugcuuauuuucuucuc

SEQ ID NO: 2555849 - RNA, 19 nt, Artificial Sequence
  Description of Artificial Sequence: Synthetic oligonucleotide
cacaauggccgccaggcgg

SEQ ID NO: 2555850 - RNA, 19 nt, Artificial Sequence
  Description of Artificial Sequence: Synthetic oligonucleotide
uguuugcguagccucaaga

SEQ ID NO: 2555851 - RNA, 19 nt, Artificial Sequence
  Description of Artificial Sequence: Synthetic oligonucleotide
agucuuguggggcagcaug

SEQ ID NO: 2555852 - RNA, 19 nt, Artificial Sequence
  Description of Artificial Sequence: Synthetic oligonucleotide
uuccaaggcagccuggccu

SEQ ID NO: 2555853 - RNA, 19 nt, Artificial Sequence
  Description of Artificial Sequence: Synthetic oligonucleotide
aguagcacuugcuuugcca

SEQ ID NO: 2555854 - RNA, 19 nt, Artificial Sequence
  Description of Artificial Sequence: Synthetic oligonucleotide
cauccaacaccuugaggcg

SEQ ID NO: 2555855 - RNA, 19 nt, Artificial Sequence
  Description of Artificial Sequence: Synthetic oligonucleotide
aaaaguuuccagaaauguu

SEQ ID NO: 2555856 - RNA, 19 nt, Artificial Sequence
  Description of Artificial Sequence: Synthetic oligonucleotide
ucuaaguacccucuuccua

SEQ ID NO: 2555857 - RNA, 19 nt, Artificial Sequence
  Description of Artificial Sequence: Synthetic oligonucleotide
guaaaaguuuccagaaaug

SEQ ID NO: 2555858 - RNA, 19 nt, Artificial Sequence
  Description of Artificial Sequence: Synthetic oligonucleotide
ggcauuagcacaaacaguc

SEQ ID NO: 2555859 - RNA, 19 nt, Artificial Sequence
  Description of Artificial Sequence: Synthetic oligonucleotide
uucuccacguucuuuucug

SEQ ID NO: 2555860 - RNA, 19 nt, Artificial Sequence
  Description of Artificial Sequence: Synthetic oligonucleotide
uccagaaauguugaugccu

SEQ ID NO: 2555861 - RNA, 19 nt, Artificial Sequence
  Description of Artificial Sequence: Synthetic oligonucleotide
uuccuugcguuucuccucc

SEQ ID NO: 2555862 - RNA, 19 nt, Artificial Sequence
  Description of Artificial Sequence: Synthetic oligonucleotide
ugacuaaagcaccuuuguc

SEQ ID NO: 2555863 - RNA, 19 nt, Artificial Sequence
  Description of Artificial Sequence: Synthetic oligonucleotide
agugguaggggccucgaga

SEQ ID NO: 2555864 - RNA, 19 nt, Artificial Sequence
  Description of Artificial Sequence: Synthetic oligonucleotide
gucacugccugguauuucc

SEQ ID NO: 2555865 - RNA, 19 nt, Artificial Sequence
  Description of Artificial Sequence: Synthetic oligonucleotide
acagcgcacaacgacuacc

SEQ ID NO: 2555866 - RNA, 19 nt, Artificial Sequence
  Description of Artificial Sequence: Synthetic oligonucleotide
ucuugaggaccucugugaa

SEQ ID NO: 2555867 - RNA, 19 nt, Artificial Sequence
  Description of Artificial Sequence: Synthetic oligonucleotide
aggcuucagccgcacaacc

SEQ ID NO: 2555868 - RNA, 19 nt, Artificial Sequence
  Description of Artificial Sequence: Synthetic oligonucleotide
ugaacuugcuuauuuucuu

SEQ ID NO: 2555869 - RNA, 19 nt, Artificial Sequence
  Description of Artificial Sequence: Synthetic oligonucleotide
cucgcuuagucuugugggg

SEQ ID NO: 2555870 - RNA, 19 nt, Artificial Sequence
  Description of Artificial Sequence: Synthetic oligonucleotide
gugguaggggccucgagag

SEQ ID NO: 2555871 - RNA, 19 nt, Artificial Sequence
  Description of Artificial Sequence: Synthetic oligonucleotide
uguggggcagcaugccucg

SEQ ID NO: 2555872 - RNA, 19 nt, Artificial Sequence
  Description of Artificial Sequence: Synthetic oligonucleotide
uugggcucacaccaggagu

SEQ ID NO: 2555873 - RNA, 19 nt, Artificial Sequence
  Description of Artificial Sequence: Synthetic oligonucleotide
uaccuuccggcccaguagc

SEQ ID NO: 2555874 - RNA, 19 nt, Artificial Sequence
  Description of Artificial Sequence: Synthetic oligonucleotide
uaaagcaccuuugucccca

SEQ ID NO: 2555875 - RNA, 19 nt, Artificial Sequence
  Description of Artificial Sequence: Synthetic oligonucleotide
auugggcucacaccaggag

SEQ ID NO: 2555876 - RNA, 19 nt, Artificial Sequence
  Description of Artificial Sequence: Synthetic oligonucleotide
aaguuuccagaaauguuga

SEQ ID NO: 2555877 - RNA, 19 nt, Artificial Sequence
  Description of Artificial Sequence: Synthetic oligonucleotide
cuuucuaaguacccucuuc

SEQ ID NO: 2555878 - RNA, 19 nt, Artificial Sequence
  Description of Artificial Sequence: Synthetic oligonucleotide
aggaaagccagguacuuua

SEQ ID NO: 2555879 - RNA, 19 nt, Artificial Sequence
  Description of Artificial Sequence: Synthetic oligonucleotide
uucuaaguacccucuuccu

SEQ ID NO: 2555880 - RNA, 19 nt, Artificial Sequence
  Description of Artificial Sequence: Synthetic oligonucleotide
cugccugguauuuccaccc

SEQ ID NO: 2555881 - RNA, 19 nt, Artificial Sequence
  Description of Artificial Sequence: Synthetic oligonucleotide
uccagcguggcugucacug

SEQ ID NO: 2555882 - RNA, 19 nt, Artificial Sequence
  Description of Artificial Sequence: Synthetic oligonucleotide
agccagguacuuuaacuug

SEQ ID NO: 2555883 - RNA, 19 nt, Artificial Sequence
  Description of Artificial Sequence: Synthetic oligonucleotide
ugccauccaacacuagaac

SEQ ID NO: 2555884 - RNA, 19 nt, Artificial Sequence
  Description of Artificial Sequence: Synthetic oligonucleotide
ucauagggaggagggaucc

SEQ ID NO: 2555885 - RNA, 19 nt, Artificial Sequence
  Description of Artificial Sequence: Synthetic oligonucleotide
aaagcaccuuuguccccac

SEQ ID NO: 2555886 - RNA, 19 nt, Artificial Sequence
  Description of Artificial Sequence: Synthetic oligonucleotide
agaaauguugaugccuuca

SEQ ID NO: 2555887 - RNA, 19 nt, Artificial Sequence
  Description of Artificial Sequence: Synthetic oligonucleotide
uauugggcucacaccagga

SEQ ID NO: 2555888 - RNA, 19 nt, Artificial Sequence
  Description of Artificial Sequence: Synthetic oligonucleotide
guucauccgcuuucggagg

SEQ ID NO: 2555889 - RNA, 19 nt, Artificial Sequence
  Description of Artificial Sequence: Synthetic oligonucleotide
ugggcucacaccaggaguc

SEQ ID NO: 2555890 - RNA, 19 nt, Artificial Sequence
  Description of Artificial Sequence: Synthetic oligonucleotide
aaccuugagggcggcaggg

SEQ ID NO: 2555891 - RNA, 19 nt, Artificial Sequence
  Description of Artificial Sequence: Synthetic oligonucleotide
cacaacgacuaccuuccgg

SEQ ID NO: 2555892 - RNA, 19 nt, Artificial Sequence
  Description of Artificial Sequence: Synthetic oligonucleotide
agaagauggccucugccau

SEQ ID NO: 2555893 - RNA, 19 nt, Artificial Sequence
  Description of Artificial Sequence: Synthetic oligonucleotide
uccacguucuuuucugccu

SEQ ID NO: 2555894 - RNA, 19 nt, Artificial Sequence
  Description of Artificial Sequence: Synthetic oligonucleotide
ugucauagggaggagggau

SEQ ID NO: 2555895 - RNA, 19 nt, Artificial Sequence
  Description of Artificial Sequence: Synthetic oligonucleotide
uccgauaguggaccuuggc

SEQ ID NO: 2555896 - RNA, 19 nt, Artificial Sequence
  Description of Artificial Sequence: Synthetic oligonucleotide
gaugccuucacagcgcaca

SEQ ID NO: 2555897 - RNA, 19 nt, Artificial Sequence
  Description of Artificial Sequence: Synthetic oligonucleotide
acaauggccgccaggcggc

SEQ ID NO: 2555898 - RNA, 19 nt, Artificial Sequence
  Description of Artificial Sequence: Synthetic oligonucleotide
ugcuuauuuucuucuccac

SEQ ID NO: 2555899 - RNA, 19 nt, Artificial Sequence
  Description of Artificial Sequence: Synthetic oligonucleotide
cagcaugccucguacagug

SEQ ID NO: 2555900 - RNA, 19 nt, Artificial Sequence
  Description of Artificial Sequence: Synthetic oligonucleotide
agugacuaaagcaccuuug

SEQ ID NO: 2555901 - RNA, 19 nt, Artificial Sequence
  Description of Artificial Sequence: Synthetic oligonucleotide
uuccuacuggagcagugac

SEQ ID NO: 2555902 - RNA, 19 nt, Artificial Sequence
  Description of Artificial Sequence: Synthetic oligonucleotide
uuugccacaauggccgcca

SEQ ID NO: 2555903 - RNA, 19 nt, Artificial Sequence
  Description of Artificial Sequence: Synthetic oligonucleotide
uccgcuuucggaggaaagc

SEQ ID NO: 2555904 - RNA, 19 nt, Artificial Sequence
  Description of Artificial Sequence: Synthetic oligonucleotide
uuuccuugcguuucuccuc

SEQ ID NO: 2555905 - RNA, 19 nt, Artificial Sequence
  Description of Artificial Sequence: Synthetic oligonucleotide
cucggaagugguaggggcc

SEQ ID NO: 2555906 - RNA, 19 nt, Artificial Sequence
  Description of Artificial Sequence: Synthetic oligonucleotide
cuaccuuccggcccaguag

SEQ ID NO: 2555907 - RNA, 19 nt, Artificial Sequence
  Description of Artificial Sequence: Synthetic oligonucleotide
agccaggcgccccagguag

SEQ ID NO: 2555908 - RNA, 19 nt, Artificial Sequence
  Description of Artificial Sequence: Synthetic oligonucleotide
uuguggggcagcaugccuc

SEQ ID NO: 2555909 - RNA, 19 nt, Artificial Sequence
  Description of Artificial Sequence: Synthetic oligonucleotide
uucauccgcuuucggagga

SEQ ID NO: 2555910 - RNA, 19 nt, Artificial Sequence
  Description of Artificial Sequence: Synthetic oligonucleotide
uccguuggucuugaggacc

SEQ ID NO: 2555911 - RNA, 19 nt, Artificial Sequence
  Description of Artificial Sequence: Synthetic oligonucleotide
ucccauccaacaccuugag

SEQ ID NO: 2555912 - RNA, 19 nt, Artificial Sequence
  Description of Artificial Sequence: Synthetic oligonucleotide
uuccgauaguggaccuugg

SEQ ID NO: 2555913 - RNA, 19 nt, Artificial Sequence
  Description of Artificial Sequence: Synthetic oligonucleotide
gagggaucccauccaacac

SEQ ID NO: 2555914 - RNA, 19 nt, Artificial Sequence
  Description of Artificial Sequence: Synthetic oligonucleotide
ugguguucauccgcuuucg

SEQ ID NO: 2555915 - RNA, 19 nt, Artificial Sequence
  Description of Artificial Sequence: Synthetic oligonucleotide
cuccacguucuuuucugcc

SEQ ID NO: 2555916 - RNA, 19 nt, Artificial Sequence
  Description of Artificial Sequence: Synthetic oligonucleotide
gguaggggccucgagaggg

SEQ ID NO: 2555917 - RNA, 19 nt, Artificial Sequence
  Description of Artificial Sequence: Synthetic oligonucleotide
ugccugguauuuccacccg

SEQ ID NO: 2555918 - RNA, 19 nt, Artificial Sequence
  Description of Artificial Sequence: Synthetic oligonucleotide
cuuccgauaguggaccuug

SEQ ID NO: 2555919 - RNA, 19 nt, Artificial Sequence
  Description of Artificial Sequence: Synthetic oligonucleotide
gccauccaacacuagaacc

SEQ ID NO: 2555920 - RNA, 19 nt, Artificial Sequence
  Description of Artificial Sequence: Synthetic oligonucleotide
uacuggagcagugacuaaa

SEQ ID NO: 2555921 - RNA, 19 nt, Artificial Sequence
  Description of Artificial Sequence: Synthetic oligonucleotide
ccucgcuuagucuuguggg

SEQ ID NO: 2555922 - RNA, 19 nt, Artificial Sequence
  Description of Artificial Sequence: Synthetic oligonucleotide
uccacccgaccucaugagc

SEQ ID NO: 2555923 - RNA, 19 nt, Artificial Sequence
  Description of Artificial Sequence: Synthetic oligonucleotide
cuaaagcaccuuugucccc

SEQ ID NO: 2555924 - RNA, 19 nt, Artificial Sequence
  Description of Artificial Sequence: Synthetic oligonucleotide
agggguugguguucauccg

SEQ ID NO: 2555925 - RNA, 19 nt, Artificial Sequence
  Description of Artificial Sequence: Synthetic oligonucleotide
uuucugccuguuugcguag

SEQ ID NO: 2555926 - RNA, 19 nt, Artificial Sequence
  Description of Artificial Sequence: Synthetic oligonucleotide
cugguauuuccacccgacc

SEQ ID NO: 2555927 - RNA, 19 nt, Artificial Sequence
  Description of Artificial Sequence: Synthetic oligonucleotide
acgacuaccuuccggccca

SEQ ID NO: 2555928 - RNA, 19 nt, Artificial Sequence
  Description of Artificial Sequence: Synthetic oligonucleotide
cacuagaaccugucccucc

SEQ ID NO: 2555929 - RNA, 19 nt, Artificial Sequence
  Description of Artificial Sequence: Synthetic oligonucleotide
cuugaggaccucugugaac

SEQ ID NO: 2555930 - RNA, 19 nt, Artificial Sequence
  Description of Artificial Sequence: Synthetic oligonucleotide
cugcuucuucuuccgauag

SEQ ID NO: 2555931 - RNA, 19 nt, Artificial Sequence
  Description of Artificial Sequence: Synthetic oligonucleotide
ucgcuuagucuuguggggc

SEQ ID NO: 2555932 - RNA, 19 nt, Artificial Sequence
  Description of Artificial Sequence: Synthetic oligonucleotide
gcaugccucguacagugcg

SEQ ID NO: 2555933 - RNA, 19 nt, Artificial Sequence
  Description of Artificial Sequence: Synthetic oligonucleotide
caugccucguacagugcgc

SEQ ID NO: 2555934 - RNA, 19 nt, Artificial Sequence
  Description of Artificial Sequence: Synthetic oligonucleotide
guguucauccgcuuucgga

SEQ ID NO: 2555935 - RNA, 19 nt, Artificial Sequence
  Description of Artificial Sequence: Synthetic oligonucleotide
auuagcacaaacagucuuu

SEQ ID NO: 2555936 - RNA, 19 nt, Artificial Sequence
  Description of Artificial Sequence: Synthetic oligonucleotide
gguauuuccacccgaccuc

SEQ ID NO: 2555937 - RNA, 19 nt, Artificial Sequence
  Description of Artificial Sequence: Synthetic oligonucleotide
aaaugcggcucggggcucg

SEQ ID NO: 2555938 - RNA, 19 nt, Artificial Sequence
  Description of Artificial Sequence: Synthetic oligonucleotide
guaggcuucagccgcacaa

SEQ ID NO: 2555939 - RNA, 19 nt, Artificial Sequence
  Description of Artificial Sequence: Synthetic oligonucleotide
uggucuugaggaccucugu

SEQ ID NO: 2555940 - RNA, 19 nt, Artificial Sequence
  Description of Artificial Sequence: Synthetic oligonucleotide
guaggcaaacuuucuagua

SEQ ID NO: 2555941 - RNA, 19 nt, Artificial Sequence
  Description of Artificial Sequence: Synthetic oligonucleotide
uuccacccgaccucaugag

SEQ ID NO: 2555942 - RNA, 19 nt, Artificial Sequence
  Description of Artificial Sequence: Synthetic oligonucleotide
ugcguagccucaagagcug

SEQ ID NO: 2555943 - RNA, 19 nt, Artificial Sequence
  Description of Artificial Sequence: Synthetic oligonucleotide
aaccugucccuccgccauc

SEQ ID NO: 2555944 - RNA, 19 nt, Artificial Sequence
  Description of Artificial Sequence: Synthetic oligonucleotide
cauccaacacuagaaccug

SEQ ID NO: 2555945 - RNA, 19 nt, Artificial Sequence
  Description of Artificial Sequence: Synthetic oligonucleotide
aacuuucuaguaggcuuca

SEQ ID NO: 2555946 - RNA, 19 nt, Artificial Sequence
  Description of Artificial Sequence: Synthetic oligonucleotide
ugguaggggccucgagagg

SEQ ID NO: 2555947 - RNA, 19 nt, Artificial Sequence
  Description of Artificial Sequence: Synthetic oligonucleotide
aaaaugcggcucggggcuc

SEQ ID NO: 2555948 - RNA, 19 nt, Artificial Sequence
  Description of Artificial Sequence: Synthetic oligonucleotide
ggcagcaugccucguacag

SEQ ID NO: 2555949 - RNA, 19 nt, Artificial Sequence
  Description of Artificial Sequence: Synthetic oligonucleotide
auagggaggagggauccca

SEQ ID NO: 2555950 - RNA, 19 nt, Artificial Sequence
  Description of Artificial Sequence: Synthetic oligonucleotide
cacuugcuuugccacaaug

SEQ ID NO: 2555951 - RNA, 19 nt, Artificial Sequence
  Description of Artificial Sequence: Synthetic oligonucleotide
gaagauggccucugccauc

SEQ ID NO: 2555952 - RNA, 19 nt, Artificial Sequence
  Description of Artificial Sequence: Synthetic oligonucleotide
acacuagaaccugucccuc

SEQ ID NO: 2555953 - RNA, 19 nt, Artificial Sequence
  Description of Artificial Sequence: Synthetic oligonucleotide
agaaccugucccuccgcca

SEQ ID NO: 2555954 - RNA, 19 nt, Artificial Sequence
  Description of Artificial Sequence: Synthetic oligonucleotide
uggucggcgguggaggaag

SEQ ID NO: 2555955 - RNA, 19 nt, Artificial Sequence
  Description of Artificial Sequence: Synthetic oligonucleotide
caacgacuaccuuccggcc

SEQ ID NO: 2555956 - RNA, 19 nt, Artificial Sequence
  Description of Artificial Sequence: Synthetic oligonucleotide
uugagggcggcagggacca

SEQ ID NO: 2555957 - RNA, 19 nt, Artificial Sequence
  Description of Artificial Sequence: Synthetic oligonucleotide
uccaaggcagccuggccuc

SEQ ID NO: 2555958 - RNA, 19 nt, Artificial Sequence
  Description of Artificial Sequence: Synthetic oligonucleotide
caccuuuguccccacuccc

SEQ ID NO: 2555959 - RNA, 19 nt, Artificial Sequence
  Description of Artificial Sequence: Synthetic oligonucleotide
ccgauaguggaccuuggcc

SEQ ID NO: 2555960 - RNA, 19 nt, Artificial Sequence
  Description of Artificial Sequence: Synthetic oligonucleotide
ggagggaucccauccaaca

SEQ ID NO: 2555961 - RNA, 19 nt, Artificial Sequence
  Description of Artificial Sequence: Synthetic oligonucleotide
cgcacaacgacuaccuucc

SEQ ID NO: 2555962 - RNA, 19 nt, Artificial Sequence
  Description of Artificial Sequence: Synthetic oligonucleotide
aguuuccagaaauguugau

SEQ ID NO: 2555963 - RNA, 19 nt, Artificial Sequence
  Description of Artificial Sequence: Synthetic oligonucleotide
gugacuaaagcaccuuugu

SEQ ID NO: 2555964 - RNA, 19 nt, Artificial Sequence
  Description of Artificial Sequence: Synthetic oligonucleotide
uagcacuugcuuugccaca

SEQ ID NO: 2555965 - RNA, 19 nt, Artificial Sequence
  Description of Artificial Sequence: Synthetic oligonucleotide
caagagcugcuucuucuuc

SEQ ID NO: 2555966 - RNA, 19 nt, Artificial Sequence
  Description of Artificial Sequence: Synthetic oligonucleotide
acuaccuuccggcccagua

SEQ ID NO: 2555967 - RNA, 19 nt, Artificial Sequence
  Description of Artificial Sequence: Synthetic oligonucleotide
guacccucuuccuacugga

SEQ ID NO: 2555968 - RNA, 19 nt, Artificial Sequence
  Description of Artificial Sequence: Synthetic oligonucleotide
aauggccgccaggcggccc

SEQ ID NO: 2555969 - RNA, 19 nt, Artificial Sequence
  Description of Artificial Sequence: Synthetic oligonucleotide
ccacccgaccucaugagcc

SEQ ID NO: 2555970 - RNA, 19 nt, Artificial Sequence
  Description of Artificial Sequence: Synthetic oligonucleotide
ucggcgguggaggaagagc

SEQ ID NO: 2555971 - RNA, 19 nt, Artificial Sequence
  Description of Artificial Sequence: Synthetic oligonucleotide
gccucgcuuagucuugugg

SEQ ID NO: 2555972 - RNA, 19 nt, Artificial Sequence
  Description of Artificial Sequence: Synthetic oligonucleotide
cuagaaccugucccuccgc

SEQ ID NO: 2555973 - RNA, 19 nt, Artificial Sequence
  Description of Artificial Sequence: Synthetic oligonucleotide
uccccacuccccuggucgg

SEQ ID NO: 2555974 - RNA, 19 nt, Artificial Sequence
  Description of Artificial Sequence: Synthetic oligonucleotide
ucggaagugguaggggccu

SEQ ID NO: 2555975 - RNA, 19 nt, Artificial Sequence
  Description of Artificial Sequence: Synthetic oligonucleotide
agcuuucuaaguacccucu

SEQ ID NO: 2555976 - RNA, 19 nt, Artificial Sequence
  Description of Artificial Sequence: Synthetic oligonucleotide
uucggaggaaagccaggua

SEQ ID NO: 2555977 - RNA, 19 nt, Artificial Sequence
  Description of Artificial Sequence: Synthetic oligonucleotide
gucuuguggggcagcaugc

SEQ ID NO: 2555978 - RNA, 19 nt, Artificial Sequence
  Description of Artificial Sequence: Synthetic oligonucleotide
aggagggaucccauccaac

SEQ ID NO: 2555979 - RNA, 19 nt, Artificial Sequence
  Description of Artificial Sequence: Synthetic oligonucleotide
cacugccugguauuuccac

SEQ ID NO: 2555980 - RNA, 19 nt, Artificial Sequence
  Description of Artificial Sequence: Synthetic oligonucleotide
aggcauuagcacaaacagu

SEQ ID NO: 2555981 - RNA, 19 nt, Artificial Sequence
  Description of Artificial Sequence: Synthetic oligonucleotide
uaggcuucagccgcacaac

SEQ ID NO: 2555982 - RNA, 19 nt, Artificial Sequence
  Description of Artificial Sequence: Synthetic oligonucleotide
cuguaaaaguuuccagaaa

SEQ ID NO: 2555983 - RNA, 19 nt, Artificial Sequence
  Description of Artificial Sequence: Synthetic oligonucleotide
ucuccuccagcguggcugu

SEQ ID NO: 2555984 - RNA, 19 nt, Artificial Sequence
  Description of Artificial Sequence: Synthetic oligonucleotide
cagcguggcugucacugcc

SEQ ID NO: 2555985 - RNA, 19 nt, Artificial Sequence
  Description of Artificial Sequence: Synthetic oligonucleotide
uagcacaaacagucuuuau

SEQ ID NO: 2555986 - RNA, 19 nt, Artificial Sequence
  Description of Artificial Sequence: Synthetic oligonucleotide
gggguugguguucauccgc

SEQ ID NO: 2555987 - RNA, 19 nt, Artificial Sequence
  Description of Artificial Sequence: Synthetic oligonucleotide
guauuuccacccgaccuca

SEQ ID NO: 2555988 - RNA, 19 nt, Artificial Sequence
  Description of Artificial Sequence: Synthetic oligonucleotide
uucuugucauagggaggag

SEQ ID NO: 2555989 - RNA, 19 nt, Artificial Sequence
  Description of Artificial Sequence: Synthetic oligonucleotide
ccuugaggcguuccaaggc

SEQ ID NO: 2555990 - RNA, 19 nt, Artificial Sequence
  Description of Artificial Sequence: Synthetic oligonucleotide
agcacuugcuuugccacaa

SEQ ID NO: 2555991 - RNA, 19 nt, Artificial Sequence
  Description of Artificial Sequence: Synthetic oligonucleotide
cuuugccacaauggccgcc

SEQ ID NO: 2555992 - RNA, 19 nt, Artificial Sequence
  Description of Artificial Sequence: Synthetic oligonucleotide
gcaccuuuguccccacucc

SEQ ID NO: 2555993 - RNA, 19 nt, Artificial Sequence
  Description of Artificial Sequence: Synthetic oligonucleotide
ggcguuccaaggcagccug

SEQ ID NO: 2555994 - RNA, 19 nt, Artificial Sequence
  Description of Artificial Sequence: Synthetic oligonucleotide
gaggagggaucccauccaa

SEQ ID NO: 2555995 - RNA, 19 nt, Artificial Sequence
  Description of Artificial Sequence: Synthetic oligonucleotide
cuguuugcguagccucaag

SEQ ID NO: 2555996 - RNA, 19 nt, Artificial Sequence
  Description of Artificial Sequence: Synthetic oligonucleotide
agcaugccucguacagugc

SEQ ID NO: 2555997 - RNA, 19 nt, Artificial Sequence
  Description of Artificial Sequence: Synthetic oligonucleotide
auccaacaccuugaggcgu

SEQ ID NO: 2555998 - RNA, 19 nt, Artificial Sequence
  Description of Artificial Sequence: Synthetic oligonucleotide
uggccuuuuccuugcguuu

SEQ ID NO: 2555999 - RNA, 19 nt, Artificial Sequence
  Description of Artificial Sequence: Synthetic oligonucleotide
acuuucuaguaggcuucag

SEQ ID NO: 2556000 - RNA, 19 nt, Artificial Sequence
  Description of Artificial Sequence: Synthetic oligonucleotide
uagggaggagggaucccau

SEQ ID NO: 2556001 - RNA, 19 nt, Artificial Sequence
  Description of Artificial Sequence: Synthetic oligonucleotide
ccugguauuuccacccgac

SEQ ID NO: 2556002 - RNA, 19 nt, Artificial Sequence
  Description of Artificial Sequence: Synthetic oligonucleotide
aguggaccuuggccuuuuc

SEQ ID NO: 2556003 - RNA, 19 nt, Artificial Sequence
  Description of Artificial Sequence: Synthetic oligonucleotide
cccagguaggcaaacuuuc

SEQ ID NO: 2556004 - RNA, 19 nt, Artificial Sequence
  Description of Artificial Sequence: Synthetic oligonucleotide
ugcggcucggggcucggaa

SEQ ID NO: 2556005 - RNA, 19 nt, Artificial Sequence
  Description of Artificial Sequence: Synthetic oligonucleotide
gcgcacaacgacuaccuuc

SEQ ID NO: 2556006 - RNA, 19 nt, Artificial Sequence
  Description of Artificial Sequence: Synthetic oligonucleotide
caguagcacuugcuuugcc

SEQ ID NO: 2556007 - RNA, 19 nt, Artificial Sequence
  Description of Artificial Sequence: Synthetic oligonucleotide
gauaguggaccuuggccuu

SEQ ID NO: 2556008 - RNA, 19 nt, Artificial Sequence
  Description of Artificial Sequence: Synthetic oligonucleotide
aguaggcuucagccgcaca

SEQ ID NO: 2556009 - RNA, 19 nt, Artificial Sequence
  Description of Artificial Sequence: Synthetic oligonucleotide
aagcaccuuuguccccacu

SEQ ID NO: 2556010 - RNA, 19 nt, Artificial Sequence
  Description of Artificial Sequence: Synthetic oligonucleotide
gguaggcaaacuuucuagu

SEQ ID NO: 2556011 - RNA, 19 nt, Artificial Sequence
  Description of Artificial Sequence: Synthetic oligonucleotide
gagggcggcagggaccacc

SEQ ID NO: 2556012 - RNA, 19 nt, Artificial Sequence
  Description of Artificial Sequence: Synthetic oligonucleotide
aaugcggcucggggcucgg

SEQ ID NO: 2556013 - RNA, 19 nt, Artificial Sequence
  Description of Artificial Sequence: Synthetic oligonucleotide
cuaguaggcuucagccgca

SEQ ID NO: 2556014 - RNA, 19 nt, Artificial Sequence
  Description of Artificial Sequence: Synthetic oligonucleotide
cauuagcacaaacagucuu

SEQ ID NO: 2556015 - RNA, 19 nt, Artificial Sequence
  Description of Artificial Sequence: Synthetic oligonucleotide
guccguuggucuugaggac

SEQ ID NO: 2556016 - RNA, 19 nt, Artificial Sequence
  Description of Artificial Sequence: Synthetic oligonucleotide
cucaugagccaggcgcccc

SEQ ID NO: 2556017 - RNA, 19 nt, Artificial Sequence
  Description of Artificial Sequence: Synthetic oligonucleotide
cuuccuacuggagcaguga

SEQ ID NO: 2556018 - RNA, 19 nt, Artificial Sequence
  Description of Artificial Sequence: Synthetic oligonucleotide
cauagggaggagggauccc

SEQ ID NO: 2556019 - RNA, 19 nt, Artificial Sequence
  Description of Artificial Sequence: Synthetic oligonucleotide
ggaggaagagcaggccagg

SEQ ID NO: 2556020 - RNA, 19 nt, Artificial Sequence
  Description of Artificial Sequence: Synthetic oligonucleotide
uauuuccacccgaccucau

SEQ ID NO: 2556021 - RNA, 19 nt, Artificial Sequence
  Description of Artificial Sequence: Synthetic oligonucleotide
uggggcagcaugccucgua

SEQ ID NO: 2556022 - RNA, 19 nt, Artificial Sequence
  Description of Artificial Sequence: Synthetic oligonucleotide
ugucacugccugguauuuc

SEQ ID NO: 2556023 - RNA, 19 nt, Artificial Sequence
  Description of Artificial Sequence: Synthetic oligonucleotide
cugucccuccgccaucuuc

SEQ ID NO: 2556024 - RNA, 19 nt, Artificial Sequence
  Description of Artificial Sequence: Synthetic oligonucleotide
ccgcacaaccuugagggcg

SEQ ID NO: 2556025 - RNA, 19 nt, Artificial Sequence
  Description of Artificial Sequence: Synthetic oligonucleotide
cagguaggcaaacuuucua

SEQ ID NO: 2556026 - RNA, 19 nt, Artificial Sequence
  Description of Artificial Sequence: Synthetic oligonucleotide
gaaccugucccuccgccau

SEQ ID NO: 2556027 - RNA, 19 nt, Artificial Sequence
  Description of Artificial Sequence: Synthetic oligonucleotide
auccgcuuucggaggaaag

SEQ ID NO: 2556028 - RNA, 19 nt, Artificial Sequence
  Description of Artificial Sequence: Synthetic oligonucleotide
auggccgccaggcggccca

SEQ ID NO: 2556029 - RNA, 19 nt, Artificial Sequence
  Description of Artificial Sequence: Synthetic oligonucleotide
gucccuccgccaucuucgg

SEQ ID NO: 2556030 - RNA, 19 nt, Artificial Sequence
  Description of Artificial Sequence: Synthetic oligonucleotide
guaggggccucgagagggg

SEQ ID NO: 2556031 - RNA, 19 nt, Artificial Sequence
  Description of Artificial Sequence: Synthetic oligonucleotide
ucccuccgccaucuucggc

SEQ ID NO: 2556032 - RNA, 19 nt, Artificial Sequence
  Description of Artificial Sequence: Synthetic oligonucleotide
ggggcucggaagugguagg

SEQ ID NO: 2556033 - RNA, 19 nt, Artificial Sequence
  Description of Artificial Sequence: Synthetic oligonucleotide
acaccuugaggcguuccaa

SEQ ID NO: 2556034 - RNA, 19 nt, Artificial Sequence
  Description of Artificial Sequence: Synthetic oligonucleotide
cguuucuccuccagcgugg

SEQ ID NO: 2556035 - RNA, 19 nt, Artificial Sequence
  Description of Artificial Sequence: Synthetic oligonucleotide
caacaccuugaggcguucc

SEQ ID NO: 2556036 - RNA, 19 nt, Artificial Sequence
  Description of Artificial Sequence: Synthetic oligonucleotide
ugccucguacagugcgcca

SEQ ID NO: 2556037 - RNA, 19 nt, Artificial Sequence
  Description of Artificial Sequence: Synthetic oligonucleotide
uuccggcccaguagcacuu

SEQ ID NO: 2556038 - RNA, 19 nt, Artificial Sequence
  Description of Artificial Sequence: Synthetic oligonucleotide
cacagcgcacaacgacuac

SEQ ID NO: 2556039 - RNA, 19 nt, Artificial Sequence
  Description of Artificial Sequence: Synthetic oligonucleotide
aggcgccccagguaggcaa

SEQ ID NO: 2556040 - RNA, 19 nt, Artificial Sequence
  Description of Artificial Sequence: Synthetic oligonucleotide
ccgcuuucggaggaaagcc

SEQ ID NO: 2556041 - RNA, 19 nt, Artificial Sequence
  Description of Artificial Sequence: Synthetic oligonucleotide
ggggcagcaugccucguac

SEQ ID NO: 2556042 - RNA, 19 nt, Artificial Sequence
  Description of Artificial Sequence: Synthetic oligonucleotide
ucuuccgauaguggaccuu

SEQ ID NO: 2556043 - RNA, 19 nt, Artificial Sequence
  Description of Artificial Sequence: Synthetic oligonucleotide
uguccccacuccccugguc

SEQ ID NO: 2556044 - RNA, 19 nt, Artificial Sequence
  Description of Artificial Sequence: Synthetic oligonucleotide
caggaguccguuggucuug

SEQ ID NO: 2556045 - RNA, 19 nt, Artificial Sequence
  Description of Artificial Sequence: Synthetic oligonucleotide
ccacguucuuuucugccug

SEQ ID NO: 2556046 - RNA, 19 nt, Artificial Sequence
  Description of Artificial Sequence: Synthetic oligonucleotide
ggaggagggaucccaucca

SEQ ID NO: 2556047 - RNA, 19 nt, Artificial Sequence
  Description of Artificial Sequence: Synthetic oligonucleotide
gaagugguaggggccucga

SEQ ID NO: 2556048 - RNA, 19 nt, Artificial Sequence
  Description of Artificial Sequence: Synthetic oligonucleotide
cgcacaaccuugagggcgg

SEQ ID NO: 2556049 - RNA, 19 nt, Artificial Sequence
  Description of Artificial Sequence: Synthetic oligonucleotide
ggcucggaagugguagggg

SEQ ID NO: 2556050 - RNA, 19 nt, Artificial Sequence
  Description of Artificial Sequence: Synthetic oligonucleotide
ggcaggcauuagcacaaac

SEQ ID NO: 2556051 - RNA, 19 nt, Artificial Sequence
  Description of Artificial Sequence: Synthetic oligonucleotide
cccauccaacaccuugagg

SEQ ID NO: 2556052 - RNA, 19 nt, Artificial Sequence
  Description of Artificial Sequence: Synthetic oligonucleotide
ugaggaccucugugaacuu

SEQ ID NO: 2556053 - RNA, 19 nt, Artificial Sequence
  Description of Artificial Sequence: Synthetic oligonucleotide
cagcgcacaacgacuaccu

SEQ ID NO: 2556054 - RNA, 19 nt, Artificial Sequence
  Description of Artificial Sequence: Synthetic oligonucleotide
aggcguuccaaggcagccu

SEQ ID NO: 2556055 - RNA, 19 nt, Artificial Sequence
  Description of Artificial Sequence: Synthetic oligonucleotide
cuuccggcccaguagcacu

SEQ ID NO: 2556056 - RNA, 19 nt, Artificial Sequence
  Description of Artificial Sequence: Synthetic oligonucleotide
cuucuccacguucuuuucu

SEQ ID NO: 2556057 - RNA, 19 nt, Artificial Sequence
  Description of Artificial Sequence: Synthetic oligonucleotide
gggcucggaagugguaggg

SEQ ID NO: 2556058 - RNA, 19 nt, Artificial Sequence
  Description of Artificial Sequence: Synthetic oligonucleotide
ggcggcagggaccaccauc

SEQ ID NO: 2556059 - RNA, 19 nt, Artificial Sequence
  Description of Artificial Sequence: Synthetic oligonucleotide
gcuuagucuuguggggcag

SEQ ID NO: 2556060 - RNA, 19 nt, Artificial Sequence
  Description of Artificial Sequence: Synthetic oligonucleotide
ucauccgcuuucggaggaa

SEQ ID NO: 2556061 - RNA, 19 nt, Artificial Sequence
  Description of Artificial Sequence: Synthetic oligonucleotide
ccuugagggcggcagggac

SEQ ID NO: 2556062 - RNA, 19 nt, Artificial Sequence
  Description of Artificial Sequence: Synthetic oligonucleotide
cacccgaccucaugagcca

SEQ ID NO: 2556063 - RNA, 19 nt, Artificial Sequence
  Description of Artificial Sequence: Synthetic oligonucleotide
agggaccaccauccguuuu

SEQ ID NO: 2556064 - RNA, 19 nt, Artificial Sequence
  Description of Artificial Sequence: Synthetic oligonucleotide
guggcugucacugccuggu

SEQ ID NO: 2556065 - RNA, 19 nt, Artificial Sequence
  Description of Artificial Sequence: Synthetic oligonucleotide
cuccccuggucggcggugg

SEQ ID NO: 2556066 - RNA, 19 nt, Artificial Sequence
  Description of Artificial Sequence: Synthetic oligonucleotide
cgauaguggaccuuggccu

SEQ ID NO: 2556067 - RNA, 19 nt, Artificial Sequence
  Description of Artificial Sequence: Synthetic oligonucleotide
cccuccgccaucuucggca

SEQ ID NO: 2556068 - RNA, 19 nt, Artificial Sequence
  Description of Artificial Sequence: Synthetic oligonucleotide
aggaguccguuggucuuga

SEQ ID NO: 2556069 - RNA, 19 nt, Artificial Sequence
  Description of Artificial Sequence: Synthetic oligonucleotide
uagucuuguggggcagcau

SEQ ID NO: 2556070 - RNA, 19 nt, Artificial Sequence
  Description of Artificial Sequence: Synthetic oligonucleotide
agcgcacaacgacuaccuu

SEQ ID NO: 2556071 - RNA, 19 nt, Artificial Sequence
  Description of Artificial Sequence: Synthetic oligonucleotide
gucggcgguggaggaagag

SEQ ID NO: 2556072 - RNA, 19 nt, Artificial Sequence
  Description of Artificial Sequence: Synthetic oligonucleotide
caaggcagccuggccucgc

SEQ ID NO: 2556073 - RNA, 19 nt, Artificial Sequence
  Description of Artificial Sequence: Synthetic oligonucleotide
auaguggaccuuggccuuu

SEQ ID NO: 2556074 - RNA, 19 nt, Artificial Sequence
  Description of Artificial Sequence: Synthetic oligonucleotide
ggggccucgagagggguug

SEQ ID NO: 2556075 - RNA, 19 nt, Artificial Sequence
  Description of Artificial Sequence: Synthetic oligonucleotide
agagcaggccaggcaggca

SEQ ID NO: 2556076 - RNA, 19 nt, Artificial Sequence
  Description of Artificial Sequence: Synthetic oligonucleotide
agcguggcugucacugccu

SEQ ID NO: 2556077 - RNA, 19 nt, Artificial Sequence
  Description of Artificial Sequence: Synthetic oligonucleotide
gcacaacgacuaccuuccg

SEQ ID NO: 2556078 - RNA, 19 nt, Artificial Sequence
  Description of Artificial Sequence: Synthetic oligonucleotide
gcaaacuuucuaguaggcu

SEQ ID NO: 2556079 - RNA, 19 nt, Artificial Sequence
  Description of Artificial Sequence: Synthetic oligonucleotide
uggcugucacugccuggua

SEQ ID NO: 2556080 - RNA, 19 nt, Artificial Sequence
  Description of Artificial Sequence: Synthetic oligonucleotide
ccacaauggccgccaggcg

SEQ ID NO: 2556081 - RNA, 19 nt, Artificial Sequence
  Description of Artificial Sequence: Synthetic oligonucleotide
uccccuggucggcggugga

SEQ ID NO: 2556082 - RNA, 19 nt, Artificial Sequence
  Description of Artificial Sequence: Synthetic oligonucleotide
ccucaagagcugcuucuuc

SEQ ID NO: 2556083 - RNA, 19 nt, Artificial Sequence
  Description of Artificial Sequence: Synthetic oligonucleotide
gagccaggcgccccaggua

SEQ ID NO: 2556084 - RNA, 19 nt, Artificial Sequence
  Description of Artificial Sequence: Synthetic oligonucleotide
caggccaggcaggcauuag

SEQ ID NO: 2556085 - RNA, 19 nt, Artificial Sequence
  Description of Artificial Sequence: Synthetic oligonucleotide
gcucggggcucggaagugg

SEQ ID NO: 2556086 - RNA, 19 nt, Artificial Sequence
  Description of Artificial Sequence: Synthetic oligonucleotide
agggcggcagggaccacca

SEQ ID NO: 2556087 - RNA, 19 nt, Artificial Sequence
  Description of Artificial Sequence: Synthetic oligonucleotide
gaccucugugaacuugcuu

SEQ ID NO: 2556088 - RNA, 19 nt, Artificial Sequence
  Description of Artificial Sequence: Synthetic oligonucleotide
gcggcucggggcucggaag

SEQ ID NO: 2556089 - RNA, 19 nt, Artificial Sequence
  Description of Artificial Sequence: Synthetic oligonucleotide
uaguggaccuuggccuuuu

SEQ ID NO: 2556090 - RNA, 19 nt, Artificial Sequence
  Description of Artificial Sequence: Synthetic oligonucleotide
cagugacuaaagcaccuuu

SEQ ID NO: 2556091 - RNA, 19 nt, Artificial Sequence
  Description of Artificial Sequence: Synthetic oligonucleotide
cuacuggagcagugacuaa

SEQ ID NO: 2556092 - RNA, 19 nt, Artificial Sequence
  Description of Artificial Sequence: Synthetic oligonucleotide
cccuggucggcgguggagg

SEQ ID NO: 2556093 - RNA, 19 nt, Artificial Sequence
  Description of Artificial Sequence: Synthetic oligonucleotide
gccugguauuuccacccga

SEQ ID NO: 2556094 - RNA, 19 nt, Artificial Sequence
  Description of Artificial Sequence: Synthetic oligonucleotide
acuccccuggucggcggug

SEQ ID NO: 2556095 - RNA, 19 nt, Artificial Sequence
  Description of Artificial Sequence: Synthetic oligonucleotide
gccgcacaaccuugagggc

SEQ ID NO: 2556096 - RNA, 19 nt, Artificial Sequence
  Description of Artificial Sequence: Synthetic oligonucleotide
gcguggcugucacugccug

SEQ ID NO: 2556097 - RNA, 19 nt, Artificial Sequence
  Description of Artificial Sequence: Synthetic oligonucleotide
ccagcguggcugucacugc

SEQ ID NO: 2556098 - RNA, 19 nt, Artificial Sequence
  Description of Artificial Sequence: Synthetic oligonucleotide
acguucuuuucugccuguu

SEQ ID NO: 2556099 - RNA, 19 nt, Artificial Sequence
  Description of Artificial Sequence: Synthetic oligonucleotide
ggaaagccagguacuuuaa

SEQ ID NO: 2556100 - RNA, 19 nt, Artificial Sequence
  Description of Artificial Sequence: Synthetic oligonucleotide
cucgagagggguugguguu

SEQ ID NO: 2556101 - RNA, 19 nt, Artificial Sequence
  Description of Artificial Sequence: Synthetic oligonucleotide
ccgaccucaugagccaggc

SEQ ID NO: 2556102 - RNA, 19 nt, Artificial Sequence
  Description of Artificial Sequence: Synthetic oligonucleotide
gcuucagccgcacaaccuu

SEQ ID NO: 2556103 - RNA, 19 nt, Artificial Sequence
  Description of Artificial Sequence: Synthetic oligonucleotide
caauggccgccaggcggcc

SEQ ID NO: 2556104 - RNA, 19 nt, Artificial Sequence
  Description of Artificial Sequence: Synthetic oligonucleotide
gccucgagagggguuggug

SEQ ID NO: 2556105 - RNA, 19 nt, Artificial Sequence
  Description of Artificial Sequence: Synthetic oligonucleotide
cauccgcuuucggaggaaa

SEQ ID NO: 2556106 - RNA, 19 nt, Artificial Sequence
  Description of Artificial Sequence: Synthetic oligonucleotide
guagccucaagagcugcuu

SEQ ID NO: 2556107 - RNA, 19 nt, Artificial Sequence
  Description of Artificial Sequence: Synthetic oligonucleotide
gggcucacaccaggagucc

SEQ ID NO: 2556108 - RNA, 19 nt, Artificial Sequence
  Description of Artificial Sequence: Synthetic oligonucleotide
accuuccggcccaguagca

SEQ ID NO: 2556109 - RNA, 19 nt, Artificial Sequence
  Description of Artificial Sequence: Synthetic oligonucleotide
ggaguccguuggucuugag

SEQ ID NO: 2556110 - RNA, 19 nt, Artificial Sequence
  Description of Artificial Sequence: Synthetic oligonucleotide
cacguucuuuucugccugu

SEQ ID NO: 2556111 - RNA, 19 nt, Artificial Sequence
  Description of Artificial Sequence: Synthetic oligonucleotide
gcauuagcacaaacagucu

SEQ ID NO: 2556112 - RNA, 19 nt, Artificial Sequence
  Description of Artificial Sequence: Synthetic oligonucleotide
ccucaugagccaggcgccc

SEQ ID NO: 2556113 - RNA, 19 nt, Artificial Sequence
  Description of Artificial Sequence: Synthetic oligonucleotide
gccuguuugcguagccuca

SEQ ID NO: 2556114 - RNA, 19 nt, Artificial Sequence
  Description of Artificial Sequence: Synthetic oligonucleotide
cagguacuuuaacuuguuu

SEQ ID NO: 2556115 - RNA, 19 nt, Artificial Sequence
  Description of Artificial Sequence: Synthetic oligonucleotide
cucggggcucggaaguggu

SEQ ID NO: 2556116 - RNA, 19 nt, Artificial Sequence
  Description of Artificial Sequence: Synthetic oligonucleotide
gcccagaagauggccucug

SEQ ID NO: 2556117 - RNA, 19 nt, Artificial Sequence
  Description of Artificial Sequence: Synthetic oligonucleotide
ccuuccggcccaguagcac

SEQ ID NO: 2556118 - RNA, 19 nt, Artificial Sequence
  Description of Artificial Sequence: Synthetic oligonucleotide
ccaggcggcccagaagaug

SEQ ID NO: 2556119 - RNA, 19 nt, Artificial Sequence
  Description of Artificial Sequence: Synthetic oligonucleotide
gcguuccaaggcagccugg

SEQ ID NO: 2556120 - RNA, 19 nt, Artificial Sequence
  Description of Artificial Sequence: Synthetic oligonucleotide
gggcagcaugccucguaca

SEQ ID NO: 2556121 - RNA, 19 nt, Artificial Sequence
  Description of Artificial Sequence: Synthetic oligonucleotide
cccacuccccuggucggcg

SEQ ID NO: 2556122 - RNA, 19 nt, Artificial Sequence
  Description of Artificial Sequence: Synthetic oligonucleotide
ggcccaguagcacuugcuu

SEQ ID NO: 2556123 - RNA, 19 nt, Artificial Sequence
  Description of Artificial Sequence: Synthetic oligonucleotide
ccaggcgccccagguaggc

SEQ ID NO: 2556124 - RNA, 19 nt, Artificial Sequence
  Description of Artificial Sequence: Synthetic oligonucleotide
ccacuccccuggucggcgg

SEQ ID NO: 2556125 - RNA, 19 nt, Artificial Sequence
  Description of Artificial Sequence: Synthetic oligonucleotide
cgcuuucggaggaaagcca

SEQ ID NO: 2556126 - RNA, 19 nt, Artificial Sequence
  Description of Artificial Sequence: Synthetic oligonucleotide
ggccucgcuuagucuugug

SEQ ID NO: 2556127 - RNA, 19 nt, Artificial Sequence
  Description of Artificial Sequence: Synthetic oligonucleotide
cacaaccuugagggcggca

SEQ ID NO: 2556128 - RNA, 19 nt, Artificial Sequence
  Description of Artificial Sequence: Synthetic oligonucleotide
ccggcccaguagcacuugc

SEQ ID NO: 2556129 - RNA, 19 nt, Artificial Sequence
  Description of Artificial Sequence: Synthetic oligonucleotide
gccucguacagugcgccaa

SEQ ID NO: 2556130 - RNA, 19 nt, Artificial Sequence
  Description of Artificial Sequence: Synthetic oligonucleotide
cucuuccuacuggagcagu

SEQ ID NO: 2556131 - RNA, 19 nt, Artificial Sequence
  Description of Artificial Sequence: Synthetic oligonucleotide
cgcuuagucuuguggggca

SEQ ID NO: 2556132 - RNA, 19 nt, Artificial Sequence
  Description of Artificial Sequence: Synthetic oligonucleotide
ggcuucagccgcacaaccu

SEQ ID NO: 2556133 - RNA, 19 nt, Artificial Sequence
  Description of Artificial Sequence: Synthetic oligonucleotide
aggcaggcauuagcacaaa

SEQ ID NO: 2556134 - RNA, 19 nt, Artificial Sequence
  Description of Artificial Sequence: Synthetic oligonucleotide
gcuuucuaaguacccucuu

SEQ ID NO: 2556135 - RNA, 19 nt, Artificial Sequence
  Description of Artificial Sequence: Synthetic oligonucleotide
ggcucggggcucggaagug

SEQ ID NO: 2556136 - RNA, 19 nt, Artificial Sequence
  Description of Artificial Sequence: Synthetic oligonucleotide
ccaaggcagccuggccucg

SEQ ID NO: 2556137 - RNA, 19 nt, Artificial Sequence
  Description of Artificial Sequence: Synthetic oligonucleotide
cgaccucaugagccaggcg

SEQ ID NO: 2556138 - RNA, 19 nt, Artificial Sequence
  Description of Artificial Sequence: Synthetic oligonucleotide
gggccucgagagggguugg

SEQ ID NO: 2556139 - RNA, 19 nt, Artificial Sequence
  Description of Artificial Sequence: Synthetic oligonucleotide
ccuuuguccccacuccccu

SEQ ID NO: 2556140 - RNA, 19 nt, Artificial Sequence
  Description of Artificial Sequence: Synthetic oligonucleotide
ccgccaggcggcccagaag

SEQ ID NO: 2556141 - RNA, 19 nt, Artificial Sequence
  Description of Artificial Sequence: Synthetic oligonucleotide
ccuggucggcgguggagga

SEQ ID NO: 2556142 - RNA, 19 nt, Artificial Sequence
  Description of Artificial Sequence: Synthetic oligonucleotide
ccuguuugcguagccucaa

SEQ ID NO: 2556143 - RNA, 19 nt, Artificial Sequence
  Description of Artificial Sequence: Synthetic oligonucleotide
cuggucggcgguggaggaa

SEQ ID NO: 2556144 - RNA, 19 nt, Artificial Sequence
  Description of Artificial Sequence: Synthetic oligonucleotide
ccguuggucuugaggaccu

SEQ ID NO: 2556145 - RNA, 19 nt, Artificial Sequence
  Description of Artificial Sequence: Synthetic oligonucleotide
gguugguguucauccgcuu

SEQ ID NO: 2556146 - RNA, 19 nt, Artificial Sequence
  Description of Artificial Sequence: Synthetic oligonucleotide
cggaggaaagccagguacu

SEQ ID NO: 2556147 - RNA, 19 nt, Artificial Sequence
  Description of Artificial Sequence: Synthetic oligonucleotide
ugagggcggcagggaccac

SEQ ID NO: 2556148 - RNA, 19 nt, Artificial Sequence
  Description of Artificial Sequence: Synthetic oligonucleotide
ccaacaccuugaggcguuc

SEQ ID NO: 2556149 - RNA, 19 nt, Artificial Sequence
  Description of Artificial Sequence: Synthetic oligonucleotide
caggcgccccagguaggca

SEQ ID NO: 2556150 - RNA, 19 nt, Artificial Sequence
  Description of Artificial Sequence: Synthetic oligonucleotide
gcggcccagaagauggccu

SEQ ID NO: 2556151 - RNA, 19 nt, Artificial Sequence
  Description of Artificial Sequence: Synthetic oligonucleotide
augcggcucggggcucgga

SEQ ID NO: 2556152 - RNA, 19 nt, Artificial Sequence
  Description of Artificial Sequence: Synthetic oligonucleotide
cagggaccaccauccguuu

SEQ ID NO: 2556153 - RNA, 19 nt, Artificial Sequence
  Description of Artificial Sequence: Synthetic oligonucleotide
gacuaccuuccggcccagu

SEQ ID NO: 2556154 - RNA, 19 nt, Artificial Sequence
  Description of Artificial Sequence: Synthetic oligonucleotide
cggcagggaccaccauccg

SEQ ID NO: 2556155 - RNA, 19 nt, Artificial Sequence
  Description of Artificial Sequence: Synthetic oligonucleotide
ccccacuccccuggucggc

SEQ ID NO: 2556156 - RNA, 19 nt, Artificial Sequence
  Description of Artificial Sequence: Synthetic oligonucleotide
ccaggaguccguuggucuu

SEQ ID NO: 2556157 - RNA, 19 nt, Artificial Sequence
  Description of Artificial Sequence: Synthetic oligonucleotide
cacuccccuggucggcggu

SEQ ID NO: 2556158 - RNA, 19 nt, Artificial Sequence
  Description of Artificial Sequence: Synthetic oligonucleotide
ggucggcgguggaggaaga

SEQ ID NO: 2556159 - RNA, 19 nt, Artificial Sequence
  Description of Artificial Sequence: Synthetic oligonucleotide
cguagccucaagagcugcu

SEQ ID NO: 2556160 - RNA, 19 nt, Artificial Sequence
  Description of Artificial Sequence: Synthetic oligonucleotide
ggcgccccagguaggcaaa

SEQ ID NO: 2556161 - RNA, 19 nt, Artificial Sequence
  Description of Artificial Sequence: Synthetic oligonucleotide
gcgccccagguaggcaaac

SEQ ID NO: 2556162 - RNA, 19 nt, Artificial Sequence
  Description of Artificial Sequence: Synthetic oligonucleotide
gcacuugcuuugccacaau

SEQ ID NO: 2556163 - RNA, 19 nt, Artificial Sequence
  Description of Artificial Sequence: Synthetic oligonucleotide
cggaagugguaggggccuc

SEQ ID NO: 2556164 - RNA, 19 nt, Artificial Sequence
  Description of Artificial Sequence: Synthetic oligonucleotide
guggggcagcaugccucgu

SEQ ID NO: 2556165 - RNA, 19 nt, Artificial Sequence
  Description of Artificial Sequence: Synthetic oligonucleotide
cggcccaguagcacuugcu

SEQ ID NO: 2556166 - RNA, 19 nt, Artificial Sequence
  Description of Artificial Sequence: Synthetic oligonucleotide
uauucuaagaccauuauug

SEQ ID NO: 2556167 - RNA, 19 nt, Artificial Sequence
  Description of Artificial Sequence: Synthetic oligonucleotide
aauaauuuaauacguuaac

SEQ ID NO: 2556168 - RNA, 19 nt, Artificial Sequence
  Description of Artificial Sequence: Synthetic oligonucleotide
uugagaauaauuuaauacg

SEQ ID NO: 2556169 - RNA, 19 nt, Artificial Sequence
  Description of Artificial Sequence: Synthetic oligonucleotide
ucuaauuaaacaaucaggu

SEQ ID NO: 2556170 - RNA, 19 nt, Artificial Sequence
  Description of Artificial Sequence: Synthetic oligonucleotide
uucuaauuaaacaaucagg

SEQ ID NO: 2556171 - RNA, 19 nt, Artificial Sequence
  Description of Artificial Sequence: Synthetic oligonucleotide
accacuauauucuaagacc

SEQ ID NO: 2556172 - RNA, 19 nt, Artificial Sequence
  Description of Artificial Sequence: Synthetic oligonucleotide
aagaccauuauuguaaagg

SEQ ID NO: 2556173 - RNA, 19 nt, Artificial Sequence
  Description of Artificial Sequence: Synthetic oligonucleotide
gauaucacaacacucuggg

SEQ ID NO: 2556174 - RNA, 19 nt, Artificial Sequence
  Description of Artificial Sequence: Synthetic oligonucleotide
aauacguuaaccucaagau

SEQ ID NO: 2556175 - RNA, 19 nt, Artificial Sequence
  Description of Artificial Sequence: Synthetic oligonucleotide
ucuuauucuaauuaaacaa

SEQ ID NO: 2556176 - RNA, 19 nt, Artificial Sequence
  Description of Artificial Sequence: Synthetic oligonucleotide
uuuuaugugagcuccauca

SEQ ID NO: 2556177 - RNA, 19 nt, Artificial Sequence
  Description of Artificial Sequence: Synthetic oligonucleotide
uacguuaaccucaagauac

SEQ ID NO: 2556178 - RNA, 19 nt, Artificial Sequence
  Description of Artificial Sequence: Synthetic oligonucleotide
ucuauuacuuuccaaguug

SEQ ID NO: 2556179 - RNA, 19 nt, Artificial Sequence
  Description of Artificial Sequence: Synthetic oligonucleotide
aacggauccuuacaagacc

SEQ ID NO: 2556180 - RNA, 19 nt, Artificial Sequence
  Description of Artificial Sequence: Synthetic oligonucleotide
auguacaugauuuugagaa

SEQ ID NO: 2556181 - RNA, 19 nt, Artificial Sequence
  Description of Artificial Sequence: Synthetic oligonucleotide
uaauacguuaaccucaaga

SEQ ID NO: 2556182 - RNA, 19 nt, Artificial Sequence
  Description of Artificial Sequence: Synthetic oligonucleotide
aaauaacccauauaucaug

SEQ ID NO: 2556183 - RNA, 19 nt, Artificial Sequence
  Description of Artificial Sequence: Synthetic oligonucleotide
ugagaauaauuuaauacgu

SEQ ID NO: 2556184 - RNA, 19 nt, Artificial Sequence
  Description of Artificial Sequence: Synthetic oligonucleotide
uaacccauauaucaugagg

SEQ ID NO: 2556185 - RNA, 19 nt, Artificial Sequence
  Description of Artificial Sequence: Synthetic oligonucleotide
acuaaguaauaugagaagg

SEQ ID NO: 2556186 - RNA, 19 nt, Artificial Sequence
  Description of Artificial Sequence: Synthetic oligonucleotide
uucguuauguuuuauguga

SEQ ID NO: 2556187 - RNA, 19 nt, Artificial Sequence
  Description of Artificial Sequence: Synthetic oligonucleotide
uaucacaacacucuggggu

SEQ ID NO: 2556188 - RNA, 19 nt, Artificial Sequence
  Description of Artificial Sequence: Synthetic oligonucleotide
uuacaagaccaaaauaacc

SEQ ID NO: 2556189 - RNA, 19 nt, Artificial Sequence
  Description of Artificial Sequence: Synthetic oligonucleotide
aaucaggugauaucacaac

SEQ ID NO: 2556190 - RNA, 19 nt, Artificial Sequence
  Description of Artificial Sequence: Synthetic oligonucleotide
uauucuaauuaaacaauca

SEQ ID NO: 2556191 - RNA, 19 nt, Artificial Sequence
  Description of Artificial Sequence: Synthetic oligonucleotide
aaucaaugcaaugucauca

SEQ ID NO: 2556192 - RNA, 19 nt, Artificial Sequence
  Description of Artificial Sequence: Synthetic oligonucleotide
uaugugagcuccaucacag

SEQ ID NO: 2556193 - RNA, 19 nt, Artificial Sequence
  Description of Artificial Sequence: Synthetic oligonucleotide
aaagacgcgaccuccgggg

SEQ ID NO: 2556194 - RNA, 19 nt, Artificial Sequence
  Description of Artificial Sequence: Synthetic oligonucleotide
ucgguuuucuuuaacguag

SEQ ID NO: 2556195 - RNA, 19 nt, Artificial Sequence
  Description of Artificial Sequence: Synthetic oligonucleotide
ucaagauaccacuauauuc

SEQ ID NO: 2556196 - RNA, 19 nt, Artificial Sequence
  Description of Artificial Sequence: Synthetic oligonucleotide
uauguuuuaugugagcucc

SEQ ID NO: 2556197 - RNA, 19 nt, Artificial Sequence
  Description of Artificial Sequence: Synthetic oligonucleotide
aaacaaucaggugauauca

SEQ ID NO: 2556198 - RNA, 19 nt, Artificial Sequence
  Description of Artificial Sequence: Synthetic oligonucleotide
uugacuaaguaauaugaga

SEQ ID NO: 2556199 - RNA, 19 nt, Artificial Sequence
  Description of Artificial Sequence: Synthetic oligonucleotide
uuaaccucaagauaccacu

SEQ ID NO: 2556200 - RNA, 19 nt, Artificial Sequence
  Description of Artificial Sequence: Synthetic oligonucleotide
uuauucuaauuaaacaauc

SEQ ID NO: 2556201 - RNA, 19 nt, Artificial Sequence
  Description of Artificial Sequence: Synthetic oligonucleotide
uaugcuguaagaaaucaau

SEQ ID NO: 2556202 - RNA, 19 nt, Artificial Sequence
  Description of Artificial Sequence: Synthetic oligonucleotide
aaguugacuaaguaauaug

SEQ ID NO: 2556203 - RNA, 19 nt, Artificial Sequence
  Description of Artificial Sequence: Synthetic oligonucleotide
uuuuggaccuccagcagcg

SEQ ID NO: 2556204 - RNA, 19 nt, Artificial Sequence
  Description of Artificial Sequence: Synthetic oligonucleotide
cacucuauuacuuuccaag

SEQ ID NO: 2556205 - RNA, 19 nt, Artificial Sequence
  Description of Artificial Sequence: Synthetic oligonucleotide
cuuacaaguacaauguuca

SEQ ID NO: 2556206 - RNA, 19 nt, Artificial Sequence
  Description of Artificial Sequence: Synthetic oligonucleotide
ugauaucacaacacucugg

SEQ ID NO: 2556207 - RNA, 19 nt, Artificial Sequence
  Description of Artificial Sequence: Synthetic oligonucleotide
aaugcaaugucaucacacu

SEQ ID NO: 2556208 - RNA, 19 nt, Artificial Sequence
  Description of Artificial Sequence: Synthetic oligonucleotide
uuacuuuccaaguugacua

SEQ ID NO: 2556209 - RNA, 19 nt, Artificial Sequence
  Description of Artificial Sequence: Synthetic oligonucleotide
uguaagaaaucaaugcaau

SEQ ID NO: 2556210 - RNA, 19 nt, Artificial Sequence
  Description of Artificial Sequence: Synthetic oligonucleotide
agaauaauuuaauacguua

SEQ ID NO: 2556211 - RNA, 19 nt, Artificial Sequence
  Description of Artificial Sequence: Synthetic oligonucleotide
ucauguacaugauuuugag

SEQ ID NO: 2556212 - RNA, 19 nt, Artificial Sequence
  Description of Artificial Sequence: Synthetic oligonucleotide
uuuguaagccagguaaccg

SEQ ID NO: 2556213 - RNA, 19 nt, Artificial Sequence
  Description of Artificial Sequence: Synthetic oligonucleotide
cuuacaagaccaaaauaac

SEQ ID NO: 2556214 - RNA, 19 nt, Artificial Sequence
  Description of Artificial Sequence: Synthetic oligonucleotide
gacuaaguaauaugagaag

SEQ ID NO: 2556215 - RNA, 19 nt, Artificial Sequence
  Description of Artificial Sequence: Synthetic oligonucleotide
uucauguacaugauuuuga

SEQ ID NO: 2556216 - RNA, 19 nt, Artificial Sequence
  Description of Artificial Sequence: Synthetic oligonucleotide
uauaucaugaggucgguuu

SEQ ID NO: 2556217 - RNA, 19 nt, Artificial Sequence
  Description of Artificial Sequence: Synthetic oligonucleotide
uauuguaaaggaacggauc

SEQ ID NO: 2556218 - RNA, 19 nt, Artificial Sequence
  Description of Artificial Sequence: Synthetic oligonucleotide
cuaauuaaacaaucaggug

SEQ ID NO: 2556219 - RNA, 19 nt, Artificial Sequence
  Description of Artificial Sequence: Synthetic oligonucleotide
aucacacucuauuacuuuc

SEQ ID NO: 2556220 - RNA, 19 nt, Artificial Sequence
  Description of Artificial Sequence: Synthetic oligonucleotide
uaccacuauauucuaagac

SEQ ID NO: 2556221 - RNA, 19 nt, Artificial Sequence
  Description of Artificial Sequence: Synthetic oligonucleotide
uuauuguaaaggaacggau

SEQ ID NO: 2556222 - RNA, 19 nt, Artificial Sequence
  Description of Artificial Sequence: Synthetic oligonucleotide
aacccauauaucaugaggu

SEQ ID NO: 2556223 - RNA, 19 nt, Artificial Sequence
  Description of Artificial Sequence: Synthetic oligonucleotide
uuuaauacguuaaccucaa

SEQ ID NO: 2556224 - RNA, 19 nt, Artificial Sequence
  Description of Artificial Sequence: Synthetic oligonucleotide
auuauuguaaaggaacgga

SEQ ID NO: 2556225 - RNA, 19 nt, Artificial Sequence
  Description of Artificial Sequence: Synthetic oligonucleotide
acuuacaaguacaauguuc

SEQ ID NO: 2556226 - RNA, 19 nt, Artificial Sequence
  Description of Artificial Sequence: Synthetic oligonucleotide
auuuaauacguuaaccuca

SEQ ID NO: 2556227 - RNA, 19 nt, Artificial Sequence
  Description of Artificial Sequence: Synthetic oligonucleotide
ucaggugauaucacaacac

SEQ ID NO: 2556228 - RNA, 19 nt, Artificial Sequence
  Description of Artificial Sequence: Synthetic oligonucleotide
uuuugagaauaauuuaaua

SEQ ID NO: 2556229 - RNA, 19 nt, Artificial Sequence
  Description of Artificial Sequence: Synthetic oligonucleotide
agaccauuauuguaaagga

SEQ ID NO: 2556230 - RNA, 19 nt, Artificial Sequence
  Description of Artificial Sequence: Synthetic oligonucleotide
aauaacccauauaucauga

SEQ ID NO: 2556231 - RNA, 19 nt, Artificial Sequence
  Description of Artificial Sequence: Synthetic oligonucleotide
aaaauaacccauauaucau

SEQ ID NO: 2556232 - RNA, 19 nt, Artificial Sequence
  Description of Artificial Sequence: Synthetic oligonucleotide
aguugacuaaguaauauga

SEQ ID NO: 2556233 - RNA, 19 nt, Artificial Sequence
  Description of Artificial Sequence: Synthetic oligonucleotide
aaccgagagcagcugugcc

SEQ ID NO: 2556234 - RNA, 19 nt, Artificial Sequence
  Description of Artificial Sequence: Synthetic oligonucleotide
uuaaacaaucaggugauau

SEQ ID NO: 2556235 - RNA, 19 nt, Artificial Sequence
  Description of Artificial Sequence: Synthetic oligonucleotide
uguccauuaaguuucuuuu

SEQ ID NO: 2556236 - RNA, 19 nt, Artificial Sequence
  Description of Artificial Sequence: Synthetic oligonucleotide
uauauucuaagaccauuau

SEQ ID NO: 2556237 - RNA, 19 nt, Artificial Sequence
  Description of Artificial Sequence: Synthetic oligonucleotide
augauuuugagaauaauuu

SEQ ID NO: 2556238 - RNA, 19 nt, Artificial Sequence
  Description of Artificial Sequence: Synthetic oligonucleotide
uggaucugaagguucacca

SEQ ID NO: 2556239 - RNA, 19 nt, Artificial Sequence
  Description of Artificial Sequence: Synthetic oligonucleotide
ugaaaauguccauuaaguu

SEQ ID NO: 2556240 - RNA, 19 nt, Artificial Sequence
  Description of Artificial Sequence: Synthetic oligonucleotide
ucguuauguuuuaugugag

SEQ ID NO: 2556241 - RNA, 19 nt, Artificial Sequence
  Description of Artificial Sequence: Synthetic oligonucleotide
aauccacucagcucgcacu

SEQ ID NO: 2556242 - RNA, 19 nt, Artificial Sequence
  Description of Artificial Sequence: Synthetic oligonucleotide
aaagcguggacaaccuugg

SEQ ID NO: 2556243 - RNA, 19 nt, Artificial Sequence
  Description of Artificial Sequence: Synthetic oligonucleotide
agguucaccauagauuugg

SEQ ID NO: 2556244 - RNA, 19 nt, Artificial Sequence
  Description of Artificial Sequence: Synthetic oligonucleotide
cauuauuguaaaggaacgg

SEQ ID NO: 2556245 - RNA, 19 nt, Artificial Sequence
  Description of Artificial Sequence: Synthetic oligonucleotide
uuuuguaagccagguaacc

SEQ ID NO: 2556246 - RNA, 19 nt, Artificial Sequence
  Description of Artificial Sequence: Synthetic oligonucleotide
agcguggacaaccuugggg

SEQ ID NO: 2556247 - RNA, 19 nt, Artificial Sequence
  Description of Artificial Sequence: Synthetic oligonucleotide
gaucagaggucccacguug

SEQ ID NO: 2556248 - RNA, 19 nt, Artificial Sequence
  Description of Artificial Sequence: Synthetic oligonucleotide
gaugaucagaggucccacg

SEQ ID NO: 2556249 - RNA, 19 nt, Artificial Sequence
  Description of Artificial Sequence: Synthetic oligonucleotide
acaagaccaaaauaaccca

SEQ ID NO: 2556250 - RNA, 19 nt, Artificial Sequence
  Description of Artificial Sequence: Synthetic oligonucleotide
auucuaagaccauuauugu

SEQ ID NO: 2556251 - RNA, 19 nt, Artificial Sequence
  Description of Artificial Sequence: Synthetic oligonucleotide
caagauaccacuauauucu

SEQ ID NO: 2556252 - RNA, 19 nt, Artificial Sequence
  Description of Artificial Sequence: Synthetic oligonucleotide
uaaaggaacggauccuuac

SEQ ID NO: 2556253 - RNA, 19 nt, Artificial Sequence
  Description of Artificial Sequence: Synthetic oligonucleotide
uuccaaguugacuaaguaa

SEQ ID NO: 2556254 - RNA, 19 nt, Artificial Sequence
  Description of Artificial Sequence: Synthetic oligonucleotide
auuacuuuccaaguugacu

SEQ ID NO: 2556255 - RNA, 19 nt, Artificial Sequence
  Description of Artificial Sequence: Synthetic oligonucleotide
cuggggaccacggagaucc

SEQ ID NO: 2556256 - RNA, 19 nt, Artificial Sequence
  Description of Artificial Sequence: Synthetic oligonucleotide
uuguaagccagguaaccga

SEQ ID NO: 2556257 - RNA, 19 nt, Artificial Sequence
  Description of Artificial Sequence: Synthetic oligonucleotide
aaggaacggauccuuacaa

SEQ ID NO: 2556258 - RNA, 19 nt, Artificial Sequence
  Description of Artificial Sequence: Synthetic oligonucleotide
aucaggugauaucacaaca

SEQ ID NO: 2556259 - RNA, 19 nt, Artificial Sequence
  Description of Artificial Sequence: Synthetic oligonucleotide
uuuaugugagcuccaucac

SEQ ID NO: 2556260 - RNA, 19 nt, Artificial Sequence
  Description of Artificial Sequence: Synthetic oligonucleotide
ucuccuaugcuguaagaaa

SEQ ID NO: 2556261 - RNA, 19 nt, Artificial Sequence
  Description of Artificial Sequence: Synthetic oligonucleotide
aguaauaugagaagguuua

SEQ ID NO: 2556262 - RNA, 19 nt, Artificial Sequence
  Description of Artificial Sequence: Synthetic oligonucleotide
ucuuuaacguagaacuuuu

SEQ ID NO: 2556263 - RNA, 19 nt, Artificial Sequence
  Description of Artificial Sequence: Synthetic oligonucleotide
aucacaacacucuggggug

SEQ ID NO: 2556264 - RNA, 19 nt, Artificial Sequence
  Description of Artificial Sequence: Synthetic oligonucleotide
gaagguucaccauagauuu

SEQ ID NO: 2556265 - RNA, 19 nt, Artificial Sequence
  Description of Artificial Sequence: Synthetic oligonucleotide
acggcugcaauccacucag

SEQ ID NO: 2556266 - RNA, 19 nt, Artificial Sequence
  Description of Artificial Sequence: Synthetic oligonucleotide
guugacuaaguaauaugag

SEQ ID NO: 2556267 - RNA, 19 nt, Artificial Sequence
  Description of Artificial Sequence: Synthetic oligonucleotide
gaaagacgcgaccuccggg

SEQ ID NO: 2556268 - RNA, 19 nt, Artificial Sequence
  Description of Artificial Sequence: Synthetic oligonucleotide
acccauauaucaugagguc

SEQ ID NO: 2556269 - RNA, 19 nt, Artificial Sequence
  Description of Artificial Sequence: Synthetic oligonucleotide
uuuccaaguugacuaagua

SEQ ID NO: 2556270 - RNA, 19 nt, Artificial Sequence
  Description of Artificial Sequence: Synthetic oligonucleotide
aagacgcgaccuccggggc

SEQ ID NO: 2556271 - RNA, 19 nt, Artificial Sequence
  Description of Artificial Sequence: Synthetic oligonucleotide
ccauuauuguaaaggaacg

SEQ ID NO: 2556272 - RNA, 19 nt, Artificial Sequence
  Description of Artificial Sequence: Synthetic oligonucleotide
gcuucgguuuucuuuaacg

SEQ ID NO: 2556273 - RNA, 19 nt, Artificial Sequence
  Description of Artificial Sequence: Synthetic oligonucleotide
aacacucuggggugcagca

SEQ ID NO: 2556274 - RNA, 19 nt, Artificial Sequence
  Description of Artificial Sequence: Synthetic oligonucleotide
uaaguaauaugagaagguu

SEQ ID NO: 2556275 - RNA, 19 nt, Artificial Sequence
  Description of Artificial Sequence: Synthetic oligonucleotide
ucaaugcaaugucaucaca

SEQ ID NO: 2556276 - RNA, 19 nt, Artificial Sequence
  Description of Artificial Sequence: Synthetic oligonucleotide
uaagaccauuauuguaaag

SEQ ID NO: 2556277 - RNA, 19 nt, Artificial Sequence
  Description of Artificial Sequence: Synthetic oligonucleotide
auauucuaagaccauuauu

SEQ ID NO: 2556278 - RNA, 19 nt, Artificial Sequence
  Description of Artificial Sequence: Synthetic oligonucleotide
auaucacaacacucugggg

SEQ ID NO: 2556279 - RNA, 19 nt, Artificial Sequence
  Description of Artificial Sequence: Synthetic oligonucleotide
aaguaauaugagaagguuu

SEQ ID NO: 2556280 - RNA, 19 nt, Artificial Sequence
  Description of Artificial Sequence: Synthetic oligonucleotide
auccuuacaagaccaaaau

SEQ ID NO: 2556281 - RNA, 19 nt, Artificial Sequence
  Description of Artificial Sequence: Synthetic oligonucleotide
uauuacuuuccaaguugac

SEQ ID NO: 2556282 - RNA, 19 nt, Artificial Sequence
  Description of Artificial Sequence: Synthetic oligonucleotide
agcagcaaaugucacggcu

SEQ ID NO: 2556283 - RNA, 19 nt, Artificial Sequence
  Description of Artificial Sequence: Synthetic oligonucleotide
acucagcucgcacugagga

SEQ ID NO: 2556284 - RNA, 19 nt, Artificial Sequence
  Description of Artificial Sequence: Synthetic oligonucleotide
uccuccaugucgaaagcgu

SEQ ID NO: 2556285 - RNA, 19 nt, Artificial Sequence
  Description of Artificial Sequence: Synthetic oligonucleotide
ccuuacaagaccaaaauaa

SEQ ID NO: 2556286 - RNA, 19 nt, Artificial Sequence
  Description of Artificial Sequence: Synthetic oligonucleotide
uccuuacaagaccaaaaua

SEQ ID NO: 2556287 - RNA, 19 nt, Artificial Sequence
  Description of Artificial Sequence: Synthetic oligonucleotide
aaccucaagauaccacuau

SEQ ID NO: 2556288 - RNA, 19 nt, Artificial Sequence
  Description of Artificial Sequence: Synthetic oligonucleotide
gugauaucacaacacucug

SEQ ID NO: 2556289 - RNA, 19 nt, Artificial Sequence
  Description of Artificial Sequence: Synthetic oligonucleotide
cuguaagaaaucaaugcaa

SEQ ID NO: 2556290 - RNA, 19 nt, Artificial Sequence
  Description of Artificial Sequence: Synthetic oligonucleotide
ucaugaggucgguuuaccc

SEQ ID NO: 2556291 - RNA, 19 nt, Artificial Sequence
  Description of Artificial Sequence: Synthetic oligonucleotide
acggagauccgggaaagac

SEQ ID NO: 2556292 - RNA, 19 nt, Artificial Sequence
  Description of Artificial Sequence: Synthetic oligonucleotide
cuauuacuuuccaaguuga

SEQ ID NO: 2556293 - RNA, 19 nt, Artificial Sequence
  Description of Artificial Sequence: Synthetic oligonucleotide
cucuugaugaucagagguc

SEQ ID NO: 2556294 - RNA, 19 nt, Artificial Sequence
  Description of Artificial Sequence: Synthetic oligonucleotide
uucuuuaacguagaacuuu

SEQ ID NO: 2556295 - RNA, 19 nt, Artificial Sequence
  Description of Artificial Sequence: Synthetic oligonucleotide
uuaaacuuacaaguacaau

SEQ ID NO: 2556296 - RNA, 19 nt, Artificial Sequence
  Description of Artificial Sequence: Synthetic oligonucleotide
uucgguuuucuuuaacgua

SEQ ID NO: 2556297 - RNA, 19 nt, Artificial Sequence
  Description of Artificial Sequence: Synthetic oligonucleotide
aaccuugggguugucuuuc

SEQ ID NO: 2556298 - RNA, 19 nt, Artificial Sequence
  Description of Artificial Sequence: Synthetic oligonucleotide
acagccuuaucucccaggu

SEQ ID NO: 2556299 - RNA, 19 nt, Artificial Sequence
  Description of Artificial Sequence: Synthetic oligonucleotide
gucgaaagcguggacaacc

SEQ ID NO: 2556300 - RNA, 19 nt, Artificial Sequence
  Description of Artificial Sequence: Synthetic oligonucleotide
augaucagaggucccacgu

SEQ ID NO: 2556301 - RNA, 19 nt, Artificial Sequence
  Description of Artificial Sequence: Synthetic oligonucleotide
aucaugaggucgguuuacc

SEQ ID NO: 2556302 - RNA, 19 nt, Artificial Sequence
  Description of Artificial Sequence: Synthetic oligonucleotide
agaaaucaaugcaauguca

SEQ ID NO: 2556303 - RNA, 19 nt, Artificial Sequence
  Description of Artificial Sequence: Synthetic oligonucleotide
cucuucguuauguuuuaug

SEQ ID NO: 2556304 - RNA, 19 nt, Artificial Sequence
  Description of Artificial Sequence: Synthetic oligonucleotide
ucgguuuacccuuucuuau

SEQ ID NO: 2556305 - RNA, 19 nt, Artificial Sequence
  Description of Artificial Sequence: Synthetic oligonucleotide
aggugauaucacaacacuc

SEQ ID NO: 2556306 - RNA, 19 nt, Artificial Sequence
  Description of Artificial Sequence: Synthetic oligonucleotide
aggaacggauccuuacaag

SEQ ID NO: 2556307 - RNA, 19 nt, Artificial Sequence
  Description of Artificial Sequence: Synthetic oligonucleotide
uguacaugauuuugagaau

SEQ ID NO: 2556308 - RNA, 19 nt, Artificial Sequence
  Description of Artificial Sequence: Synthetic oligonucleotide
auaccacuauauucuaaga

SEQ ID NO: 2556309 - RNA, 19 nt, Artificial Sequence
  Description of Artificial Sequence: Synthetic oligonucleotide
uuaauacguuaaccucaag

SEQ ID NO: 2556310 - RNA, 19 nt, Artificial Sequence
  Description of Artificial Sequence: Synthetic oligonucleotide
auacguuaaccucaagaua

SEQ ID NO: 2556311 - RNA, 19 nt, Artificial Sequence
  Description of Artificial Sequence: Synthetic oligonucleotide
agcuccaucacagaacgga

SEQ ID NO: 2556312 - RNA, 19 nt, Artificial Sequence
  Description of Artificial Sequence: Synthetic oligonucleotide
cuugaugaucagagguccc

SEQ ID NO: 2556313 - RNA, 19 nt, Artificial Sequence
  Description of Artificial Sequence: Synthetic oligonucleotide
uugaugaucagagguccca

SEQ ID NO: 2556314 - RNA, 19 nt, Artificial Sequence
  Description of Artificial Sequence: Synthetic oligonucleotide
ucuccagucucuucguuau

SEQ ID NO: 2556315 - RNA, 19 nt, Artificial Sequence
  Description of Artificial Sequence: Synthetic oligonucleotide
cuaaguaauaugagaaggu

SEQ ID NO: 2556316 - RNA, 19 nt, Artificial Sequence
  Description of Artificial Sequence: Synthetic oligonucleotide
gaacggauccuuacaagac

SEQ ID NO: 2556317 - RNA, 19 nt, Artificial Sequence
  Description of Artificial Sequence: Synthetic oligonucleotide
uaauaugagaagguuuauu

SEQ ID NO: 2556318 - RNA, 19 nt, Artificial Sequence
  Description of Artificial Sequence: Synthetic oligonucleotide
uucuccuaugcuguaagaa

SEQ ID NO: 2556319 - RNA, 19 nt, Artificial Sequence
  Description of Artificial Sequence: Synthetic oligonucleotide
uguucauguacaugauuuu

SEQ ID NO: 2556320 - RNA, 19 nt, Artificial Sequence
  Description of Artificial Sequence: Synthetic oligonucleotide
uguaaaggaacggauccuu

SEQ ID NO: 2556321 - RNA, 19 nt, Artificial Sequence
  Description of Artificial Sequence: Synthetic oligonucleotide
gaucugaagguucaccaua

SEQ ID NO: 2556322 - RNA, 19 nt, Artificial Sequence
  Description of Artificial Sequence: Synthetic oligonucleotide
uacccuuucuuauucuaau

SEQ ID NO: 2556323 - RNA, 19 nt, Artificial Sequence
  Description of Artificial Sequence: Synthetic oligonucleotide
augucgaaagcguggacaa

SEQ ID NO: 2556324 - RNA, 19 nt, Artificial Sequence
  Description of Artificial Sequence: Synthetic oligonucleotide
auccgggaaagacgcgacc

SEQ ID NO: 2556325 - RNA, 19 nt, Artificial Sequence
  Description of Artificial Sequence: Synthetic oligonucleotide
gauccuuacaagaccaaaa

SEQ ID NO: 2556326 - RNA, 19 nt, Artificial Sequence
  Description of Artificial Sequence: Synthetic oligonucleotide
cagcaaaugucacggcugc

SEQ ID NO: 2556327 - RNA, 19 nt, Artificial Sequence
  Description of Artificial Sequence: Synthetic oligonucleotide
guuaaccucaagauaccac

SEQ ID NO: 2556328 - RNA, 19 nt, Artificial Sequence
  Description of Artificial Sequence: Synthetic oligonucleotide
ucgaaagcguggacaaccu

SEQ ID NO: 2556329 - RNA, 19 nt, Artificial Sequence
  Description of Artificial Sequence: Synthetic oligonucleotide
acguuaaccucaagauacc

SEQ ID NO: 2556330 - RNA, 19 nt, Artificial Sequence
  Description of Artificial Sequence: Synthetic oligonucleotide
acuauauucuaagaccauu

SEQ ID NO: 2556331 - RNA, 19 nt, Artificial Sequence
  Description of Artificial Sequence: Synthetic oligonucleotide
uaaccucaagauaccacua

SEQ ID NO: 2556332 - RNA, 19 nt, Artificial Sequence
  Description of Artificial Sequence: Synthetic oligonucleotide
ggaacggauccuuacaaga

SEQ ID NO: 2556333 - RNA, 19 nt, Artificial Sequence
  Description of Artificial Sequence: Synthetic oligonucleotide
ggagauccgggaaagacgc

SEQ ID NO: 2556334 - RNA, 19 nt, Artificial Sequence
  Description of Artificial Sequence: Synthetic oligonucleotide
uuucuccuaugcuguaaga

SEQ ID NO: 2556335 - RNA, 19 nt, Artificial Sequence
  Description of Artificial Sequence: Synthetic oligonucleotide
caaucaggugauaucacaa

SEQ ID NO: 2556336 - RNA, 19 nt, Artificial Sequence
  Description of Artificial Sequence: Synthetic oligonucleotide
cauuaaguuucuuuucucu

SEQ ID NO: 2556337 - RNA, 19 nt, Artificial Sequence
  Description of Artificial Sequence: Synthetic oligonucleotide
uuguaaaggaacggauccu

SEQ ID NO: 2556338 - RNA, 19 nt, Artificial Sequence
  Description of Artificial Sequence: Synthetic oligonucleotide
accuccggggcccacucac

SEQ ID NO: 2556339 - RNA, 19 nt, Artificial Sequence
  Description of Artificial Sequence: Synthetic oligonucleotide
uccaugucgaaagcgugga

SEQ ID NO: 2556340 - RNA, 19 nt, Artificial Sequence
  Description of Artificial Sequence: Synthetic oligonucleotide
auaucaugaggucgguuua

SEQ ID NO: 2556341 - RNA, 19 nt, Artificial Sequence
  Description of Artificial Sequence: Synthetic oligonucleotide
ccagcagcaaaugucacgg

SEQ ID NO: 2556342 - RNA, 19 nt, Artificial Sequence
  Description of Artificial Sequence: Synthetic oligonucleotide
agacgcgaccuccggggcc

SEQ ID NO: 2556343 - RNA, 19 nt, Artificial Sequence
  Description of Artificial Sequence: Synthetic oligonucleotide
ugucacggcugcaauccac

SEQ ID NO: 2556344 - RNA, 19 nt, Artificial Sequence
  Description of Artificial Sequence: Synthetic oligonucleotide
uagauuuggcuucgguuuu

SEQ ID NO: 2556345 - RNA, 19 nt, Artificial Sequence
  Description of Artificial Sequence: Synthetic oligonucleotide
ggucaugguagguuucucc

SEQ ID NO: 2556346 - RNA, 19 nt, Artificial Sequence
  Description of Artificial Sequence: Synthetic oligonucleotide
augaggucgguuuacccuu

SEQ ID NO: 2556347 - RNA, 19 nt, Artificial Sequence
  Description of Artificial Sequence: Synthetic oligonucleotide
uuacaaguacaauguucau

SEQ ID NO: 2556348 - RNA, 19 nt, Artificial Sequence
  Description of Artificial Sequence: Synthetic oligonucleotide
acuuuccaaguugacuaag

SEQ ID NO: 2556349 - RNA, 19 nt, Artificial Sequence
  Description of Artificial Sequence: Synthetic oligonucleotide
cccauauaucaugaggucg

SEQ ID NO: 2556350 - RNA, 19 nt, Artificial Sequence
  Description of Artificial Sequence: Synthetic oligonucleotide
caugucgaaagcguggaca

SEQ ID NO: 2556351 - RNA, 19 nt, Artificial Sequence
  Description of Artificial Sequence: Synthetic oligonucleotide
accgagagcagcugugcca

SEQ ID NO: 2556352 - RNA, 19 nt, Artificial Sequence
  Description of Artificial Sequence: Synthetic oligonucleotide
guuuuaugugagcuccauc

SEQ ID NO: 2556353 - RNA, 19 nt, Artificial Sequence
  Description of Artificial Sequence: Synthetic oligonucleotide
uaucaugaggucgguuuac

SEQ ID NO: 2556354 - RNA, 19 nt, Artificial Sequence
  Description of Artificial Sequence: Synthetic oligonucleotide
agauccgggaaagacgcga

SEQ ID NO: 2556355 - RNA, 19 nt, Artificial Sequence
  Description of Artificial Sequence: Synthetic oligonucleotide
ccacuauauucuaagacca

SEQ ID NO: 2556356 - RNA, 19 nt, Artificial Sequence
  Description of Artificial Sequence: Synthetic oligonucleotide
accucaagauaccacuaua

SEQ ID NO: 2556357 - RNA, 19 nt, Artificial Sequence
  Description of Artificial Sequence: Synthetic oligonucleotide
ggaaagacgcgaccuccgg

SEQ ID NO: 2556358 - RNA, 19 nt, Artificial Sequence
  Description of Artificial Sequence: Synthetic oligonucleotide
ucaugguagguuucuccua

SEQ ID NO: 2556359 - RNA, 19 nt, Artificial Sequence
  Description of Artificial Sequence: Synthetic oligonucleotide
guaaccgagagcagcugug

SEQ ID NO: 2556360 - RNA, 19 nt, Artificial Sequence
  Description of Artificial Sequence: Synthetic oligonucleotide
ugaucagaggucccacguu

SEQ ID NO: 2556361 - RNA, 19 nt, Artificial Sequence
  Description of Artificial Sequence: Synthetic oligonucleotide
gucgguuuacccuuucuua

SEQ ID NO: 2556362 - RNA, 19 nt, Artificial Sequence
  Description of Artificial Sequence: Synthetic oligonucleotide
ucccacguugucuccaguc

SEQ ID NO: 2556363 - RNA, 19 nt, Artificial Sequence
  Description of Artificial Sequence: Synthetic oligonucleotide
agauuuggcuucgguuuuc

SEQ ID NO: 2556364 - RNA, 19 nt, Artificial Sequence
  Description of Artificial Sequence: Synthetic oligonucleotide
ucagaggucccacguuguc

SEQ ID NO: 2556365 - RNA, 19 nt, Artificial Sequence
  Description of Artificial Sequence: Synthetic oligonucleotide
cucagcucgcacugaggag

SEQ ID NO: 2556366 - RNA, 19 nt, Artificial Sequence
  Description of Artificial Sequence: Synthetic oligonucleotide
cuucgguuuucuuuaacgu

SEQ ID NO: 2556367 - RNA, 19 nt, Artificial Sequence
  Description of Artificial Sequence: Synthetic oligonucleotide
ucgcacugaggaguggcag

SEQ ID NO: 2556368 - RNA, 19 nt, Artificial Sequence
  Description of Artificial Sequence: Synthetic oligonucleotide
gggguugucuuucuggauc

SEQ ID NO: 2556369 - RNA, 19 nt, Artificial Sequence
  Description of Artificial Sequence: Synthetic oligonucleotide
cacucagcucgcacugagg

SEQ ID NO: 2556370 - RNA, 19 nt, Artificial Sequence
  Description of Artificial Sequence: Synthetic oligonucleotide
caccauagauuuggcuucg

SEQ ID NO: 2556371 - RNA, 19 nt, Artificial Sequence
  Description of Artificial Sequence: Synthetic oligonucleotide
ucacaacacucuggggugc

SEQ ID NO: 2556372 - RNA, 19 nt, Artificial Sequence
  Description of Artificial Sequence: Synthetic oligonucleotide
caugaggucgguuuacccu

SEQ ID NO: 2556373 - RNA, 19 nt, Artificial Sequence
  Description of Artificial Sequence: Synthetic oligonucleotide
cauagauuuggcuucgguu

SEQ ID NO: 2556374 - RNA, 19 nt, Artificial Sequence
  Description of Artificial Sequence: Synthetic oligonucleotide
aagguucaccauagauuug

SEQ ID NO: 2556375 - RNA, 19 nt, Artificial Sequence
  Description of Artificial Sequence: Synthetic oligonucleotide
uggacaaccuugggguugu

SEQ ID NO: 2556376 - RNA, 19 nt, Artificial Sequence
  Description of Artificial Sequence: Synthetic oligonucleotide
guggacaaccuugggguug

SEQ ID NO: 2556377 - RNA, 19 nt, Artificial Sequence
  Description of Artificial Sequence: Synthetic oligonucleotide
gcugcaauccacucagcuc

SEQ ID NO: 2556378 - RNA, 19 nt, Artificial Sequence
  Description of Artificial Sequence: Synthetic oligonucleotide
caacacucuggggugcagc

SEQ ID NO: 2556379 - RNA, 19 nt, Artificial Sequence
  Description of Artificial Sequence: Synthetic oligonucleotide
gacgcgaccuccggggccc

SEQ ID NO: 2556380 - RNA, 19 nt, Artificial Sequence
  Description of Artificial Sequence: Synthetic oligonucleotide
aggucgguuuacccuuucu

SEQ ID NO: 2556381 - RNA, 19 nt, Artificial Sequence
  Description of Artificial Sequence: Synthetic oligonucleotide
cugaagguucaccauagau

SEQ ID NO: 2556382 - RNA, 19 nt, Artificial Sequence
  Description of Artificial Sequence: Synthetic oligonucleotide
gggaccacggagauccggg

SEQ ID NO: 2556383 - RNA, 19 nt, Artificial Sequence
  Description of Artificial Sequence: Synthetic oligonucleotide
gagauccgggaaagacgcg

SEQ ID NO: 2556384 - RNA, 19 nt, Artificial Sequence
  Description of Artificial Sequence: Synthetic oligonucleotide
guucaccauagauuuggcu

SEQ ID NO: 2556385 - RNA, 19 nt, Artificial Sequence
  Description of Artificial Sequence: Synthetic oligonucleotide
caagaccaaaauaacccau

SEQ ID NO: 2556386 - RNA, 19 nt, Artificial Sequence
  Description of Artificial Sequence: Synthetic oligonucleotide
ugggguugucuuucuggau

SEQ ID NO: 2556387 - RNA, 19 nt, Artificial Sequence
  Description of Artificial Sequence: Synthetic oligonucleotide
caggugauaucacaacacu

SEQ ID NO: 2556388 - RNA, 19 nt, Artificial Sequence
  Description of Artificial Sequence: Synthetic oligonucleotide
accauagauuuggcuucgg

SEQ ID NO: 2556389 - RNA, 19 nt, Artificial Sequence
  Description of Artificial Sequence: Synthetic oligonucleotide
caaguugacuaaguaauau

SEQ ID NO: 2556390 - RNA, 19 nt, Artificial Sequence
  Description of Artificial Sequence: Synthetic oligonucleotide
aggaccgcgcgggcgagcg

SEQ ID NO: 2556391 - RNA, 19 nt, Artificial Sequence
  Description of Artificial Sequence: Synthetic oligonucleotide
ucacggcugcaauccacuc

SEQ ID NO: 2556392 - RNA, 19 nt, Artificial Sequence
  Description of Artificial Sequence: Synthetic oligonucleotide
gggaaagacgcgaccuccg

SEQ ID NO: 2556393 - RNA, 19 nt, Artificial Sequence
  Description of Artificial Sequence: Synthetic oligonucleotide
cagcagcaaaugucacggc

SEQ ID NO: 2556394 - RNA, 19 nt, Artificial Sequence
  Description of Artificial Sequence: Synthetic oligonucleotide
auauaucaugaggucgguu

SEQ ID NO: 2556395 - RNA, 19 nt, Artificial Sequence
  Description of Artificial Sequence: Synthetic oligonucleotide
caugguagguuucuccuau

SEQ ID NO: 2556396 - RNA, 19 nt, Artificial Sequence
  Description of Artificial Sequence: Synthetic oligonucleotide
uggcaggaccgcgcgggcg

SEQ ID NO: 2556397 - RNA, 19 nt, Artificial Sequence
  Description of Artificial Sequence: Synthetic oligonucleotide
gcguggacaaccuuggggu

SEQ ID NO: 2556398 - RNA, 19 nt, Artificial Sequence
  Description of Artificial Sequence: Synthetic oligonucleotide
aucagaggucccacguugu

SEQ ID NO: 2556399 - RNA, 19 nt, Artificial Sequence
  Description of Artificial Sequence: Synthetic oligonucleotide
ugaggucgguuuacccuuu

SEQ ID NO: 2556400 - RNA, 19 nt, Artificial Sequence
  Description of Artificial Sequence: Synthetic oligonucleotide
cagcucgcacugaggagug

SEQ ID NO: 2556401 - RNA, 19 nt, Artificial Sequence
  Description of Artificial Sequence: Synthetic oligonucleotide
cacggcugcaauccacuca

SEQ ID NO: 2556402 - RNA, 19 nt, Artificial Sequence
  Description of Artificial Sequence: Synthetic oligonucleotide
gucucuucguuauguuuua

SEQ ID NO: 2556403 - RNA, 19 nt, Artificial Sequence
  Description of Artificial Sequence: Synthetic oligonucleotide
cagguaaccgagagcagcu

SEQ ID NO: 2556404 - RNA, 19 nt, Artificial Sequence
  Description of Artificial Sequence: Synthetic oligonucleotide
cucuauuacuuuccaaguu

SEQ ID NO: 2556405 - RNA, 19 nt, Artificial Sequence
  Description of Artificial Sequence: Synthetic oligonucleotide
guaaaggaacggauccuua

SEQ ID NO: 2556406 - RNA, 19 nt, Artificial Sequence
  Description of Artificial Sequence: Synthetic oligonucleotide
acaacacucuggggugcag

SEQ ID NO: 2556407 - RNA, 19 nt, Artificial Sequence
  Description of Artificial Sequence: Synthetic oligonucleotide
agguaaccgagagcagcug

SEQ ID NO: 2556408 - RNA, 19 nt, Artificial Sequence
  Description of Artificial Sequence: Synthetic oligonucleotide
uccacucagcucgcacuga

SEQ ID NO: 2556409 - RNA, 19 nt, Artificial Sequence
  Description of Artificial Sequence: Synthetic oligonucleotide
cucgcacugaggaguggca

SEQ ID NO: 2556410 - RNA, 19 nt, Artificial Sequence
  Description of Artificial Sequence: Synthetic oligonucleotide
uggcuucgguuuucuuuaa

SEQ ID NO: 2556411 - RNA, 19 nt, Artificial Sequence
  Description of Artificial Sequence: Synthetic oligonucleotide
gauuuggcuucgguuuucu

SEQ ID NO: 2556412 - RNA, 19 nt, Artificial Sequence
  Description of Artificial Sequence: Synthetic oligonucleotide
agcaaaugucacggcugca

SEQ ID NO: 2556413 - RNA, 19 nt, Artificial Sequence
  Description of Artificial Sequence: Synthetic oligonucleotide
cagccuuaucucccagguc

SEQ ID NO: 2556414 - RNA, 19 nt, Artificial Sequence
  Description of Artificial Sequence: Synthetic oligonucleotide
agguuucuccuaugcugua

SEQ ID NO: 2556415 - RNA, 19 nt, Artificial Sequence
  Description of Artificial Sequence: Synthetic oligonucleotide
guaauaugagaagguuuau

SEQ ID NO: 2556416 - RNA, 19 nt, Artificial Sequence
  Description of Artificial Sequence: Synthetic oligonucleotide
ggauccuuacaagaccaaa

SEQ ID NO: 2556417 - RNA, 19 nt, Artificial Sequence
  Description of Artificial Sequence: Synthetic oligonucleotide
cuccagucucuucguuaug

SEQ ID NO: 2556418 - RNA, 19 nt, Artificial Sequence
  Description of Artificial Sequence: Synthetic oligonucleotide
gguaaccgagagcagcugu

SEQ ID NO: 2556419 - RNA, 19 nt, Artificial Sequence
  Description of Artificial Sequence: Synthetic oligonucleotide
caucacacucuauuacuuu

SEQ ID NO: 2556420 - RNA, 19 nt, Artificial Sequence
  Description of Artificial Sequence: Synthetic oligonucleotide
gcucgcacugaggaguggc

SEQ ID NO: 2556421 - RNA, 19 nt, Artificial Sequence
  Description of Artificial Sequence: Synthetic oligonucleotide
caaguacaauguucaugua

SEQ ID NO: 2556422 - RNA, 19 nt, Artificial Sequence
  Description of Artificial Sequence: Synthetic oligonucleotide
caaaugucacggcugcaau

SEQ ID NO: 2556423 - RNA, 19 nt, Artificial Sequence
  Description of Artificial Sequence: Synthetic oligonucleotide
ccacucagcucgcacugag

SEQ ID NO: 2556424 - RNA, 19 nt, Artificial Sequence
  Description of Artificial Sequence: Synthetic oligonucleotide
ggcugcaauccacucagcu

SEQ ID NO: 2556425 - RNA, 19 nt, Artificial Sequence
  Description of Artificial Sequence: Synthetic oligonucleotide
ggcuucgguuuucuuuaac

SEQ ID NO: 2556426 - RNA, 19 nt, Artificial Sequence
  Description of Artificial Sequence: Synthetic oligonucleotide
ggcaggccguggcaggacc

SEQ ID NO: 2556427 - RNA, 19 nt, Artificial Sequence
  Description of Artificial Sequence: Synthetic oligonucleotide
aggccguggcaggaccgcg

SEQ ID NO: 2556428 - RNA, 19 nt, Artificial Sequence
  Description of Artificial Sequence: Synthetic oligonucleotide
aggucccacguugucucca

SEQ ID NO: 2556429 - RNA, 19 nt, Artificial Sequence
  Description of Artificial Sequence: Synthetic oligonucleotide
ccacguugucuccagucuc

SEQ ID NO: 2556430 - RNA, 19 nt, Artificial Sequence
  Description of Artificial Sequence: Synthetic oligonucleotide
ccucaagauaccacuauau

SEQ ID NO: 2556431 - RNA, 19 nt, Artificial Sequence
  Description of Artificial Sequence: Synthetic oligonucleotide
caggccguggcaggaccgc

SEQ ID NO: 2556432 - RNA, 19 nt, Artificial Sequence
  Description of Artificial Sequence: Synthetic oligonucleotide
cgcacugaggaguggcagc

SEQ ID NO: 2556433 - RNA, 19 nt, Artificial Sequence
  Description of Artificial Sequence: Synthetic oligonucleotide
ccaaguugacuaaguaaua

SEQ ID NO: 2556434 - RNA, 19 nt, Artificial Sequence
  Description of Artificial Sequence: Synthetic oligonucleotide
guggcaggaccgcgcgggc

SEQ ID NO: 2556435 - RNA, 19 nt, Artificial Sequence
  Description of Artificial Sequence: Synthetic oligonucleotide
cagucucuucguuauguuu

SEQ ID NO: 2556436 - RNA, 19 nt, Artificial Sequence
  Description of Artificial Sequence: Synthetic oligonucleotide
gucacggcugcaauccacu

SEQ ID NO: 2556437 - RNA, 19 nt, Artificial Sequence
  Description of Artificial Sequence: Synthetic oligonucleotide
cguggcaggaccgcgcggg

SEQ ID NO: 2556438 - RNA, 19 nt, Artificial Sequence
  Description of Artificial Sequence: Synthetic oligonucleotide
cacaacacucuggggugca

SEQ ID NO: 2556439 - RNA, 19 nt, Artificial Sequence
  Description of Artificial Sequence: Synthetic oligonucleotide
cgggaaagacgcgaccucc

SEQ ID NO: 2556440 - RNA, 19 nt, Artificial Sequence
  Description of Artificial Sequence: Synthetic oligonucleotide
ggaccacggagauccggga

SEQ ID NO: 2556441 - RNA, 19 nt, Artificial Sequence
  Description of Artificial Sequence: Synthetic oligonucleotide
gcaggccguggcaggaccg

SEQ ID NO: 2556442 - RNA, 19 nt, Artificial Sequence
  Description of Artificial Sequence: Synthetic oligonucleotide
cagaggucccacguugucu

SEQ ID NO: 2556443 - RNA, 19 nt, Artificial Sequence
  Description of Artificial Sequence: Synthetic oligonucleotide
ccaugucgaaagcguggac

SEQ ID NO: 2556444 - RNA, 19 nt, Artificial Sequence
  Description of Artificial Sequence: Synthetic oligonucleotide
gcgagcgcuggggaccacg

SEQ ID NO: 2556445 - RNA, 19 nt, Artificial Sequence
  Description of Artificial Sequence: Synthetic oligonucleotide
gaccuccggggcccacuca

SEQ ID NO: 2556446 - RNA, 19 nt, Artificial Sequence
  Description of Artificial Sequence: Synthetic oligonucleotide
ccgggaaagacgcgaccuc

SEQ ID NO: 2556447 - RNA, 19 nt, Artificial Sequence
  Description of Artificial Sequence: Synthetic oligonucleotide
gccagguaaccgagagcag

SEQ ID NO: 2556448 - RNA, 19 nt, Artificial Sequence
  Description of Artificial Sequence: Synthetic oligonucleotide
cguuaaccucaagauacca

SEQ ID NO: 2556449 - RNA, 19 nt, Artificial Sequence
  Description of Artificial Sequence: Synthetic oligonucleotide
cacggagauccgggaaaga

SEQ ID NO: 2556450 - RNA, 19 nt, Artificial Sequence
  Description of Artificial Sequence: Synthetic oligonucleotide
ccauagauuuggcuucggu

SEQ ID NO: 2556451 - RNA, 19 nt, Artificial Sequence
  Description of Artificial Sequence: Synthetic oligonucleotide
cccacguugucuccagucu

SEQ ID NO: 2556452 - RNA, 19 nt, Artificial Sequence
  Description of Artificial Sequence: Synthetic oligonucleotide
caggaccgcgcgggcgagc

SEQ ID NO: 2556453 - RNA, 19 nt, Artificial Sequence
  Description of Artificial Sequence: Synthetic oligonucleotide
gcaauccacucagcucgca

SEQ ID NO: 2556454 - RNA, 19 nt, Artificial Sequence
  Description of Artificial Sequence: Synthetic oligonucleotide
cgggcgagcgcuggggacc

SEQ ID NO: 2556455 - RNA, 19 nt, Artificial Sequence
  Description of Artificial Sequence: Synthetic oligonucleotide
gucccacguugucuccagu

SEQ ID NO: 2556456 - RNA, 19 nt, Artificial Sequence
  Description of Artificial Sequence: Synthetic oligonucleotide
ccguggcaggaccgcgcgg

SEQ ID NO: 2556457 - RNA, 19 nt, Artificial Sequence
  Description of Artificial Sequence: Synthetic oligonucleotide
gcaggaccgcgcgggcgag

SEQ ID NO: 2556458 - RNA, 19 nt, Artificial Sequence
  Description of Artificial Sequence: Synthetic oligonucleotide
ggaccgcgcgggcgagcgc

SEQ ID NO: 2556459 - RNA, 19 nt, Artificial Sequence
  Description of Artificial Sequence: Synthetic oligonucleotide
accgcgcgggcgagcgcug

SEQ ID NO: 2556460 - RNA, 19 nt, Artificial Sequence
  Description of Artificial Sequence: Synthetic oligonucleotide
gcggcaguacacagccuua

SEQ ID NO: 2556461 - RNA, 19 nt, Artificial Sequence
  Description of Artificial Sequence: Synthetic oligonucleotide
cggcugcaauccacucagc

SEQ ID NO: 2556462 - RNA, 19 nt, Artificial Sequence
  Description of Artificial Sequence: Synthetic oligonucleotide
cgguuuacccuuucuuauu

SEQ ID NO: 2556463 - RNA, 19 nt, Artificial Sequence
  Description of Artificial Sequence: Synthetic oligonucleotide
acgcgaccuccggggccca

SEQ ID NO: 2556464 - RNA, 19 nt, Artificial Sequence
  Description of Artificial Sequence: Synthetic oligonucleotide
ggacaaccuugggguuguc

SEQ ID NO: 2556465 - RNA, 19 nt, Artificial Sequence
  Description of Artificial Sequence: Synthetic oligonucleotide
ccgcgcgggcgagcgcugg

SEQ ID NO: 2556466 - RNA, 19 nt, Artificial Sequence
  Description of Artificial Sequence: Synthetic oligonucleotide
cguggacaaccuugggguu

SEQ ID NO: 2556467 - RNA, 19 nt, Artificial Sequence
  Description of Artificial Sequence: Synthetic oligonucleotide
cgcgggcgagcgcugggga

SEQ ID NO: 2556468 - RNA, 19 nt, Artificial Sequence
  Description of Artificial Sequence: Synthetic oligonucleotide
gcgaccuccggggcccacu

SEQ ID NO: 2556469 - RNA, 19 nt, Artificial Sequence
  Description of Artificial Sequence: Synthetic oligonucleotide
ggcgagcgcuggggaccac

SEQ ID NO: 2556470 - RNA, 19 nt, Artificial Sequence
  Description of Artificial Sequence: Synthetic oligonucleotide
cggcaguacacagccuuau

SEQ ID NO: 2556471 - RNA, 19 nt, Artificial Sequence
  Description of Artificial Sequence: Synthetic oligonucleotide
cgcgaccuccggggcccac

SEQ ID NO: 2556472 - RNA, 19 nt, Artificial Sequence
  Description of Artificial Sequence: Synthetic oligonucleotide
aauacauacaugcagagcc

SEQ ID NO: 2556473 - RNA, 19 nt, Artificial Sequence
  Description of Artificial Sequence: Synthetic oligonucleotide
uuuguuauuacccugaggc

SEQ ID NO: 2556474 - RNA, 19 nt, Artificial Sequence
  Description of Artificial Sequence: Synthetic oligonucleotide
uuuauuacaaucacucucg

SEQ ID NO: 2556475 - RNA, 19 nt, Artificial Sequence
  Description of Artificial Sequence: Synthetic oligonucleotide
uuuugcacgaggcagaagg

SEQ ID NO: 2556476 - RNA, 19 nt, Artificial Sequence
  Description of Artificial Sequence: Synthetic oligonucleotide
aauaaagaagacaagagug

SEQ ID NO: 2556477 - RNA, 19 nt, Artificial Sequence
  Description of Artificial Sequence: Synthetic oligonucleotide
auuuaaaacucacuugggc

SEQ ID NO: 2556478 - RNA, 19 nt, Artificial Sequence
  Description of Artificial Sequence: Synthetic oligonucleotide
auuacaaucacucucgagu

SEQ ID NO: 2556479 - RNA, 19 nt, Artificial Sequence
  Description of Artificial Sequence: Synthetic oligonucleotide
aaugacuaucucuaccuac

SEQ ID NO: 2556480 - RNA, 19 nt, Artificial Sequence
  Description of Artificial Sequence: Synthetic oligonucleotide
aaaucuggggccaaaauac

SEQ ID NO: 2556481 - RNA, 19 nt, Artificial Sequence
  Description of Artificial Sequence: Synthetic oligonucleotide
acagucuaaaaucuguccc

SEQ ID NO: 2556482 - RNA, 19 nt, Artificial Sequence
  Description of Artificial Sequence: Synthetic oligonucleotide
aagacaagagugccgaucg

SEQ ID NO: 2556483 - RNA, 19 nt, Artificial Sequence
  Description of Artificial Sequence: Synthetic oligonucleotide
uacucagaaagcuaguugg

SEQ ID NO: 2556484 - RNA, 19 nt, Artificial Sequence
  Description of Artificial Sequence: Synthetic oligonucleotide
uuuuauuacaaucacucuc

SEQ ID NO: 2556485 - RNA, 19 nt, Artificial Sequence
  Description of Artificial Sequence: Synthetic oligonucleotide
acugcuaucacagaggccg

SEQ ID NO: 2556486 - RNA, 19 nt, Artificial Sequence
  Description of Artificial Sequence: Synthetic oligonucleotide
uaauaaagaagacaagagu

SEQ ID NO: 2556487 - RNA, 19 nt, Artificial Sequence
  Description of Artificial Sequence: Synthetic oligonucleotide
uaaagggugauuaaaauuu

SEQ ID NO: 2556488 - RNA, 19 nt, Artificial Sequence
  Description of Artificial Sequence: Synthetic oligonucleotide
caugcuagcaacaucgagg

SEQ ID NO: 2556489 - RNA, 19 nt, Artificial Sequence
  Description of Artificial Sequence: Synthetic oligonucleotide
  modified_base (17)..(17): a, c, u, g, unknown or other
aaagaaagaaagaaaanaa

SEQ ID NO: 2556490 - RNA, 19 nt, Artificial Sequence
  Description of Artificial Sequence: Synthetic oligonucleotide
aaccaaguuuauuacugac

SEQ ID NO: 2556491 - RNA, 19 nt, Artificial Sequence
  Description of Artificial Sequence: Synthetic oligonucleotide
aaauacauacaugcagagc

SEQ ID NO: 2556492 - RNA, 19 nt, Artificial Sequence
  Description of Artificial Sequence: Synthetic oligonucleotide
aauaaagggugauuaaaau

SEQ ID NO: 2556493 - RNA, 19 nt, Artificial Sequence
  Description of Artificial Sequence: Synthetic oligonucleotide
agacugugcaaacagaaag

SEQ ID NO: 2556494 - RNA, 19 nt, Artificial Sequence
  Description of Artificial Sequence: Synthetic oligonucleotide
aaagcuaguuggcaaaugu

SEQ ID NO: 2556495 - RNA, 19 nt, Artificial Sequence
  Description of Artificial Sequence: Synthetic oligonucleotide
cagaaggagaaccugaagg

SEQ ID NO: 2556496 - RNA, 19 nt, Artificial Sequence
  Description of Artificial Sequence: Synthetic oligonucleotide
acucacuugggcuuguggc

SEQ ID NO: 2556497 - RNA, 19 nt, Artificial Sequence
  Description of Artificial Sequence: Synthetic oligonucleotide
aagagugccgaucggagag

SEQ ID NO: 2556498 - RNA, 19 nt, Artificial Sequence
  Description of Artificial Sequence: Synthetic oligonucleotide
guaauaaagaagacaagag

SEQ ID NO: 2556499 - RNA, 19 nt, Artificial Sequence
  Description of Artificial Sequence: Synthetic oligonucleotide
caaguguccguguugaagg

SEQ ID NO: 2556500 - RNA, 19 nt, Artificial Sequence
  Description of Artificial Sequence: Synthetic oligonucleotide
gauaucacaagcuggguga

SEQ ID NO: 2556501 - RNA, 19 nt, Artificial Sequence
  Description of Artificial Sequence: Synthetic oligonucleotide
aucucuaccuacaacagac

SEQ ID NO: 2556502 - RNA, 19 nt, Artificial Sequence
  Description of Artificial Sequence: Synthetic oligonucleotide
caaacgacaguauggacag

SEQ ID NO: 2556503 - RNA, 19 nt, Artificial Sequence
  Description of Artificial Sequence: Synthetic oligonucleotide
uuacaaucacucucgagug

SEQ ID NO: 2556504 - RNA, 19 nt, Artificial Sequence
  Description of Artificial Sequence: Synthetic oligonucleotide
agucacaugaccucacauc

SEQ ID NO: 2556505 - RNA, 19 nt, Artificial Sequence
  Description of Artificial Sequence: Synthetic oligonucleotide
aacgacaguauggacagag

SEQ ID NO: 2556506 - RNA, 19 nt, Artificial Sequence
  Description of Artificial Sequence: Synthetic oligonucleotide
uguuauuacccugaggcca

SEQ ID NO: 2556507 - RNA, 19 nt, Artificial Sequence
  Description of Artificial Sequence: Synthetic oligonucleotide
aaauguggaacugcuauca

SEQ ID NO: 2556508 - RNA, 19 nt, Artificial Sequence
  Description of Artificial Sequence: Synthetic oligonucleotide
aauguggaacugcuaucac

SEQ ID NO: 2556509 - RNA, 19 nt, Artificial Sequence
  Description of Artificial Sequence: Synthetic oligonucleotide
gucacaugaccucacaucc

SEQ ID NO: 2556510 - RNA, 19 nt, Artificial Sequence
  Description of Artificial Sequence: Synthetic oligonucleotide
aaguauuugugcuuuguua

SEQ ID NO: 2556511 - RNA, 19 nt, Artificial Sequence
  Description of Artificial Sequence: Synthetic oligonucleotide
aaacugcggagaugggacc

SEQ ID NO: 2556512 - RNA, 19 nt, Artificial Sequence
  Description of Artificial Sequence: Synthetic oligonucleotide
cugauuccgaaucaacugg

SEQ ID NO: 2556513 - RNA, 19 nt, Artificial Sequence
  Description of Artificial Sequence: Synthetic oligonucleotide
auuacugacagcuuuuauu

SEQ ID NO: 2556514 - RNA, 19 nt, Artificial Sequence
  Description of Artificial Sequence: Synthetic oligonucleotide
uuccgaaucaacuggccag

SEQ ID NO: 2556515 - RNA, 19 nt, Artificial Sequence
  Description of Artificial Sequence: Synthetic oligonucleotide
gaacugcuaucacagaggc

SEQ ID NO: 2556516 - RNA, 19 nt, Artificial Sequence
  Description of Artificial Sequence: Synthetic oligonucleotide
ugugcuuuguuauuacccu

SEQ ID NO: 2556517 - RNA, 19 nt, Artificial Sequence
  Description of Artificial Sequence: Synthetic oligonucleotide
aguggauuuugcacgaggc

SEQ ID NO: 2556518 - RNA, 19 nt, Artificial Sequence
  Description of Artificial Sequence: Synthetic oligonucleotide
auaaagggugauuaaaauu

SEQ ID NO: 2556519 - RNA, 19 nt, Artificial Sequence
  Description of Artificial Sequence: Synthetic oligonucleotide
ucuaccuacaacagacaca

SEQ ID NO: 2556520 - RNA, 19 nt, Artificial Sequence
  Description of Artificial Sequence: Synthetic oligonucleotide
ucuggggccaaaauacacc

SEQ ID NO: 2556521 - RNA, 19 nt, Artificial Sequence
  Description of Artificial Sequence: Synthetic oligonucleotide
uuaaaacucacuugggcuu

SEQ ID NO: 2556522 - RNA, 19 nt, Artificial Sequence
  Description of Artificial Sequence: Synthetic oligonucleotide
uauuacaaucacucucgag

SEQ ID NO: 2556523 - RNA, 19 nt, Artificial Sequence
  Description of Artificial Sequence: Synthetic oligonucleotide
aacucacuugggcuugugg

SEQ ID NO: 2556524 - RNA, 19 nt, Artificial Sequence
  Description of Artificial Sequence: Synthetic oligonucleotide
agaaccaaguuuauuacug

SEQ ID NO: 2556525 - RNA, 19 nt, Artificial Sequence
  Description of Artificial Sequence: Synthetic oligonucleotide
agcuaguuggcaaaugugg

SEQ ID NO: 2556526 - RNA, 19 nt, Artificial Sequence
  Description of Artificial Sequence: Synthetic oligonucleotide
caaacugcggagaugggac

SEQ ID NO: 2556527 - RNA, 19 nt, Artificial Sequence
  Description of Artificial Sequence: Synthetic oligonucleotide
uuuauuacugacagcuuuu

SEQ ID NO: 2556528 - RNA, 19 nt, Artificial Sequence
  Description of Artificial Sequence: Synthetic oligonucleotide
aaaccucuacucagaaagc

SEQ ID NO: 2556529 - RNA, 19 nt, Artificial Sequence
  Description of Artificial Sequence: Synthetic oligonucleotide
ugauuccgaaucaacuggc

SEQ ID NO: 2556530 - RNA, 19 nt, Artificial Sequence
  Description of Artificial Sequence: Synthetic oligonucleotide
cacagucuaaaaucugucc

SEQ ID NO: 2556531 - RNA, 19 nt, Artificial Sequence
  Description of Artificial Sequence: Synthetic oligonucleotide
uccguguugaaggacauca

SEQ ID NO: 2556532 - RNA, 19 nt, Artificial Sequence
  Description of Artificial Sequence: Synthetic oligonucleotide
cagucuaaaaucugucccc

SEQ ID NO: 2556533 - RNA, 19 nt, Artificial Sequence
  Description of Artificial Sequence: Synthetic oligonucleotide
agaaccugaagguggcuuc

SEQ ID NO: 2556534 - RNA, 19 nt, Artificial Sequence
  Description of Artificial Sequence: Synthetic oligonucleotide
acaguauggacagagguga

SEQ ID NO: 2556535 - RNA, 19 nt, Artificial Sequence
  Description of Artificial Sequence: Synthetic oligonucleotide
acaaacgacaguauggaca

SEQ ID NO: 2556536 - RNA, 19 nt, Artificial Sequence
  Description of Artificial Sequence: Synthetic oligonucleotide
ucagaaagcuaguuggcaa

SEQ ID NO: 2556537 - RNA, 19 nt, Artificial Sequence
  Description of Artificial Sequence: Synthetic oligonucleotide
ucgaggggauaucacaagc

SEQ ID NO: 2556538 - RNA, 19 nt, Artificial Sequence
  Description of Artificial Sequence: Synthetic oligonucleotide
ccaaguuuauuacugacag

SEQ ID NO: 2556539 - RNA, 19 nt, Artificial Sequence
  Description of Artificial Sequence: Synthetic oligonucleotide
uuguuauuacccugaggcc

SEQ ID NO: 2556540 - RNA, 19 nt, Artificial Sequence
  Description of Artificial Sequence: Synthetic oligonucleotide
cuaucucuaccuacaacag

SEQ ID NO: 2556541 - RNA, 19 nt, Artificial Sequence
  Description of Artificial Sequence: Synthetic oligonucleotide
ucggagagcacaagugucc

SEQ ID NO: 2556542 - RNA, 19 nt, Artificial Sequence
  Description of Artificial Sequence: Synthetic oligonucleotide
aaaaucuguccccaugcua

SEQ ID NO: 2556543 - RNA, 19 nt, Artificial Sequence
  Description of Artificial Sequence: Synthetic oligonucleotide
guagucuucccagaaaccc

SEQ ID NO: 2556544 - RNA, 19 nt, Artificial Sequence
  Description of Artificial Sequence: Synthetic oligonucleotide
ucuugccugauuccgaauc

SEQ ID NO: 2556545 - RNA, 19 nt, Artificial Sequence
  Description of Artificial Sequence: Synthetic oligonucleotide
ucacaaacgacaguaugga

SEQ ID NO: 2556546 - RNA, 19 nt, Artificial Sequence
  Description of Artificial Sequence: Synthetic oligonucleotide
gaggggauaucacaagcug

SEQ ID NO: 2556547 - RNA, 19 nt, Artificial Sequence
  Description of Artificial Sequence: Synthetic oligonucleotide
ugcaguucacuggagaaug

SEQ ID NO: 2556548 - RNA, 19 nt, Artificial Sequence
  Description of Artificial Sequence: Synthetic oligonucleotide
acgaggcagaaggagaacc

SEQ ID NO: 2556549 - RNA, 19 nt, Artificial Sequence
  Description of Artificial Sequence: Synthetic oligonucleotide
uccacguauggaaugacua

SEQ ID NO: 2556550 - RNA, 19 nt, Artificial Sequence
  Description of Artificial Sequence: Synthetic oligonucleotide
uguugaaggacaucacaaa

SEQ ID NO: 2556551 - RNA, 19 nt, Artificial Sequence
  Description of Artificial Sequence: Synthetic oligonucleotide
gcuuuuauuacaaucacuc

SEQ ID NO: 2556552 - RNA, 19 nt, Artificial Sequence
  Description of Artificial Sequence: Synthetic oligonucleotide
uaucucuaccuacaacaga

SEQ ID NO: 2556553 - RNA, 19 nt, Artificial Sequence
  Description of Artificial Sequence: Synthetic oligonucleotide
gacaucacaaacgacagua

SEQ ID NO: 2556554 - RNA, 19 nt, Artificial Sequence
  Description of Artificial Sequence: Synthetic oligonucleotide
uaaaaucuguccccaugcu

SEQ ID NO: 2556555 - RNA, 19 nt, Artificial Sequence
  Description of Artificial Sequence: Synthetic oligonucleotide
uagaaccaaguuuauuacu

SEQ ID NO: 2556556 - RNA, 19 nt, Artificial Sequence
  Description of Artificial Sequence: Synthetic oligonucleotide
uuaagggagugccugcccu

SEQ ID NO: 2556557 - RNA, 19 nt, Artificial Sequence
  Description of Artificial Sequence: Synthetic oligonucleotide
cuggggccaaaauacaccc

SEQ ID NO: 2556558 - RNA, 19 nt, Artificial Sequence
  Description of Artificial Sequence: Synthetic oligonucleotide
caccuagcgucacagaacc

SEQ ID NO: 2556559 - RNA, 19 nt, Artificial Sequence
  Description of Artificial Sequence: Synthetic oligonucleotide
cuuuguuauuacccugagg

SEQ ID NO: 2556560 - RNA, 19 nt, Artificial Sequence
  Description of Artificial Sequence: Synthetic oligonucleotide
cacuggguguaccacaggg

SEQ ID NO: 2556561 - RNA, 19 nt, Artificial Sequence
  Description of Artificial Sequence: Synthetic oligonucleotide
uuauuacaaucacucucga

SEQ ID NO: 2556562 - RNA, 19 nt, Artificial Sequence
  Description of Artificial Sequence: Synthetic oligonucleotide
gacugugcaaacagaaagc

SEQ ID NO: 2556563 - RNA, 19 nt, Artificial Sequence
  Description of Artificial Sequence: Synthetic oligonucleotide
ugcacgaggcagaaggaga

SEQ ID NO: 2556564 - RNA, 19 nt, Artificial Sequence
  Description of Artificial Sequence: Synthetic oligonucleotide
uggguguaccacagggugg

SEQ ID NO: 2556565 - RNA, 19 nt, Artificial Sequence
  Description of Artificial Sequence: Synthetic oligonucleotide
aacaucgaggggauaucac

SEQ ID NO: 2556566 - RNA, 19 nt, Artificial Sequence
  Description of Artificial Sequence: Synthetic oligonucleotide
ugaccucacauccacguau

SEQ ID NO: 2556567 - RNA, 19 nt, Artificial Sequence
  Description of Artificial Sequence: Synthetic oligonucleotide
ucaacuggccagaugcagu

SEQ ID NO: 2556568 - RNA, 19 nt, Artificial Sequence
  Description of Artificial Sequence: Synthetic oligonucleotide
acagaggccguagucuucc

SEQ ID NO: 2556569 - RNA, 19 nt, Artificial Sequence
  Description of Artificial Sequence: Synthetic oligonucleotide
uuacccugaggccaccuca

SEQ ID NO: 2556570 - RNA, 19 nt, Artificial Sequence
  Description of Artificial Sequence: Synthetic oligonucleotide
cuacucagaaagcuaguug

SEQ ID NO: 2556571 - RNA, 19 nt, Artificial Sequence
  Description of Artificial Sequence: Synthetic oligonucleotide
acaucgaggggauaucaca

SEQ ID NO: 2556572 - RNA, 19 nt, Artificial Sequence
  Description of Artificial Sequence: Synthetic oligonucleotide
uuucacuggguguaccaca

SEQ ID NO: 2556573 - RNA, 19 nt, Artificial Sequence
  Description of Artificial Sequence: Synthetic oligonucleotide
aaccucuacucagaaagcu

SEQ ID NO: 2556574 - RNA, 19 nt, Artificial Sequence
  Description of Artificial Sequence: Synthetic oligonucleotide
gaggccguagucuucccag

SEQ ID NO: 2556575 - RNA, 19 nt, Artificial Sequence
  Description of Artificial Sequence: Synthetic oligonucleotide
uagucuucccagaaaccca

SEQ ID NO: 2556576 - RNA, 19 nt, Artificial Sequence
  Description of Artificial Sequence: Synthetic oligonucleotide
auuccgaaucaacuggcca

SEQ ID NO: 2556577 - RNA, 19 nt, Artificial Sequence
  Description of Artificial Sequence: Synthetic oligonucleotide
uaguuggcaaauguggaac

SEQ ID NO: 2556578 - RNA, 19 nt, Artificial Sequence
  Description of Artificial Sequence: Synthetic oligonucleotide
aagggagugccugcccucc

SEQ ID NO: 2556579 - RNA, 19 nt, Artificial Sequence
  Description of Artificial Sequence: Synthetic oligonucleotide
acucagaaagcuaguuggc

SEQ ID NO: 2556580 - RNA, 19 nt, Artificial Sequence
  Description of Artificial Sequence: Synthetic oligonucleotide
acaaguguccguguugaag

SEQ ID NO: 2556581 - RNA, 19 nt, Artificial Sequence
  Description of Artificial Sequence: Synthetic oligonucleotide
cugaagguggcuucccacc

SEQ ID NO: 2556582 - RNA, 19 nt, Artificial Sequence
  Description of Artificial Sequence: Synthetic oligonucleotide
caaguuuauuacugacagc

SEQ ID NO: 2556583 - RNA, 19 nt, Artificial Sequence
  Description of Artificial Sequence: Synthetic oligonucleotide
uggcaaauguggaacugcu

SEQ ID NO: 2556584 - RNA, 19 nt, Artificial Sequence
  Description of Artificial Sequence: Synthetic oligonucleotide
uaaaacucacuugggcuug

SEQ ID NO: 2556585 - RNA, 19 nt, Artificial Sequence
  Description of Artificial Sequence: Synthetic oligonucleotide
uauuugugcuuuguuauua

SEQ ID NO: 2556586 - RNA, 19 nt, Artificial Sequence
  Description of Artificial Sequence: Synthetic oligonucleotide
uuggcaaauguggaacugc

SEQ ID NO: 2556587 - RNA, 19 nt, Artificial Sequence
  Description of Artificial Sequence: Synthetic oligonucleotide
acugugcaaacagaaagcu

SEQ ID NO: 2556588 - RNA, 19 nt, Artificial Sequence
  Description of Artificial Sequence: Synthetic oligonucleotide
gaaccaaguuuauuacuga

SEQ ID NO: 2556589 - RNA, 19 nt, Artificial Sequence
  Description of Artificial Sequence: Synthetic oligonucleotide
acagaggugaagucacaug

SEQ ID NO: 2556590 - RNA, 19 nt, Artificial Sequence
  Description of Artificial Sequence: Synthetic oligonucleotide
gggugauuaaaauuuaaaa

SEQ ID NO: 2556591 - RNA, 19 nt, Artificial Sequence
  Description of Artificial Sequence: Synthetic oligonucleotide
ccccaugcuagcaacaucg

SEQ ID NO: 2556592 - RNA, 19 nt, Artificial Sequence
  Description of Artificial Sequence: Synthetic oligonucleotide
uuugcacgaggcagaagga

SEQ ID NO: 2556593 - RNA, 19 nt, Artificial Sequence
  Description of Artificial Sequence: Synthetic oligonucleotide
aagcuaguuggcaaaugug

SEQ ID NO: 2556594 - RNA, 19 nt, Artificial Sequence
  Description of Artificial Sequence: Synthetic oligonucleotide
agaugggaccuuaagggag

SEQ ID NO: 2556595 - RNA, 19 nt, Artificial Sequence
  Description of Artificial Sequence: Synthetic oligonucleotide
uauuacugacagcuuuuau

SEQ ID NO: 2556596 - RNA, 19 nt, Artificial Sequence
  Description of Artificial Sequence: Synthetic oligonucleotide
acaagcugggugaaaaucu

SEQ ID NO: 2556597 - RNA, 19 nt, Artificial Sequence
  Description of Artificial Sequence: Synthetic oligonucleotide
agucuucccagaaacccac

SEQ ID NO: 2556598 - RNA, 19 nt, Artificial Sequence
  Description of Artificial Sequence: Synthetic oligonucleotide
aagcccucaaguauuugug

SEQ ID NO: 2556599 - RNA, 19 nt, Artificial Sequence
  Description of Artificial Sequence: Synthetic oligonucleotide
augagguaauaaagaagac

SEQ ID NO: 2556600 - RNA, 19 nt, Artificial Sequence
  Description of Artificial Sequence: Synthetic oligonucleotide
aacugcuaucacagaggcc

SEQ ID NO: 2556601 - RNA, 19 nt, Artificial Sequence
  Description of Artificial Sequence: Synthetic oligonucleotide
ggauaucacaagcugggug

SEQ ID NO: 2556602 - RNA, 19 nt, Artificial Sequence
  Description of Artificial Sequence: Synthetic oligonucleotide
caaauguggaacugcuauc

SEQ ID NO: 2556603 - RNA, 19 nt, Artificial Sequence
  Description of Artificial Sequence: Synthetic oligonucleotide
auuacccugaggccaccuc

SEQ ID NO: 2556604 - RNA, 19 nt, Artificial Sequence
  Description of Artificial Sequence: Synthetic oligonucleotide
ugaagucacaugaccucac

SEQ ID NO: 2556605 - RNA, 19 nt, Artificial Sequence
  Description of Artificial Sequence: Synthetic oligonucleotide
uguaccacaggguggggau

SEQ ID NO: 2556606 - RNA, 19 nt, Artificial Sequence
  Description of Artificial Sequence: Synthetic oligonucleotide
caguggauuuugcacgagg

SEQ ID NO: 2556607 - RNA, 19 nt, Artificial Sequence
  Description of Artificial Sequence: Synthetic oligonucleotide
uacaaucacucucgagugu

SEQ ID NO: 2556608 - RNA, 19 nt, Artificial Sequence
  Description of Artificial Sequence: Synthetic oligonucleotide
aucgaggggauaucacaag

SEQ ID NO: 2556609 - RNA, 19 nt, Artificial Sequence
  Description of Artificial Sequence: Synthetic oligonucleotide
cagcuuuuauuacaaucac

SEQ ID NO: 2556610 - RNA, 19 nt, Artificial Sequence
  Description of Artificial Sequence: Synthetic oligonucleotide
gaagacaagagugccgauc

SEQ ID NO: 2556611 - RNA, 19 nt, Artificial Sequence
  Description of Artificial Sequence: Synthetic oligonucleotide
aggagaaccugaagguggc

SEQ ID NO: 2556612 - RNA, 19 nt, Artificial Sequence
  Description of Artificial Sequence: Synthetic oligonucleotide
ucucuaccuacaacagaca

SEQ ID NO: 2556613 - RNA, 19 nt, Artificial Sequence
  Description of Artificial Sequence: Synthetic oligonucleotide
cucaguaaagcccucaagu

SEQ ID NO: 2556614 - RNA, 19 nt, Artificial Sequence
  Description of Artificial Sequence: Synthetic oligonucleotide
ggggauaucacaagcuggg

SEQ ID NO: 2556615 - RNA, 19 nt, Artificial Sequence
  Description of Artificial Sequence: Synthetic oligonucleotide
aucuggggccaaaauacac

SEQ ID NO: 2556616 - RNA, 19 nt, Artificial Sequence
  Description of Artificial Sequence: Synthetic oligonucleotide
gaccuuaagggagugccug

SEQ ID NO: 2556617 - RNA, 19 nt, Artificial Sequence
  Description of Artificial Sequence: Synthetic oligonucleotide
agaggugaagucacaugac

SEQ ID NO: 2556618 - RNA, 19 nt, Artificial Sequence
  Description of Artificial Sequence: Synthetic oligonucleotide
gguggcuucccaccuagcg

SEQ ID NO: 2556619 - RNA, 19 nt, Artificial Sequence
  Description of Artificial Sequence: Synthetic oligonucleotide
aucggagagcacaaguguc

SEQ ID NO: 2556620 - RNA, 19 nt, Artificial Sequence
  Description of Artificial Sequence: Synthetic oligonucleotide
augacuaucucuaccuaca

SEQ ID NO: 2556621 - RNA, 19 nt, Artificial Sequence
  Description of Artificial Sequence: Synthetic oligonucleotide
uauggacagaggugaaguc

SEQ ID NO: 2556622 - RNA, 19 nt, Artificial Sequence
  Description of Artificial Sequence: Synthetic oligonucleotide
gauuccgaaucaacuggcc

SEQ ID NO: 2556623 - RNA, 19 nt, Artificial Sequence
  Description of Artificial Sequence: Synthetic oligonucleotide
ccucuacucagaaagcuag

SEQ ID NO: 2556624 - RNA, 19 nt, Artificial Sequence
  Description of Artificial Sequence: Synthetic oligonucleotide
ugacuaucucuaccuacaa

SEQ ID NO: 2556625 - RNA, 19 nt, Artificial Sequence
  Description of Artificial Sequence: Synthetic oligonucleotide
cacaggguggggaucuugc

SEQ ID NO: 2556626 - RNA, 19 nt, Artificial Sequence
  Description of Artificial Sequence: Synthetic oligonucleotide
cuuaagggagugccugccc

SEQ ID NO: 2556627 - RNA, 19 nt, Artificial Sequence
  Description of Artificial Sequence: Synthetic oligonucleotide
cacauccacguauggaaug

SEQ ID NO: 2556628 - RNA, 19 nt, Artificial Sequence
  Description of Artificial Sequence: Synthetic oligonucleotide
ugagcagacugugcaaaca

SEQ ID NO: 2556629 - RNA, 19 nt, Artificial Sequence
  Description of Artificial Sequence: Synthetic oligonucleotide
ucuacucagaaagcuaguu

SEQ ID NO: 2556630 - RNA, 19 nt, Artificial Sequence
  Description of Artificial Sequence: Synthetic oligonucleotide
acaagagugccgaucggag

SEQ ID NO: 2556631 - RNA, 19 nt, Artificial Sequence
  Description of Artificial Sequence: Synthetic oligonucleotide
ucugagcagacugugcaaa

SEQ ID NO: 2556632 - RNA, 19 nt, Artificial Sequence
  Description of Artificial Sequence: Synthetic oligonucleotide
gaaagcuaguuggcaaaug

SEQ ID NO: 2556633 - RNA, 19 nt, Artificial Sequence
  Description of Artificial Sequence: Synthetic oligonucleotide
ugaaaaucuggggccaaaa

SEQ ID NO: 2556634 - RNA, 19 nt, Artificial Sequence
  Description of Artificial Sequence: Synthetic oligonucleotide
ugccugauuccgaaucaac

SEQ ID NO: 2556635 - RNA, 19 nt, Artificial Sequence
  Description of Artificial Sequence: Synthetic oligonucleotide
guuuauuacugacagcuuu

SEQ ID NO: 2556636 - RNA, 19 nt, Artificial Sequence
  Description of Artificial Sequence: Synthetic oligonucleotide
agcaacaucgaggggauau

SEQ ID NO: 2556637 - RNA, 19 nt, Artificial Sequence
  Description of Artificial Sequence: Synthetic oligonucleotide
gcuagcaacaucgagggga

SEQ ID NO: 2556638 - RNA, 19 nt, Artificial Sequence
  Description of Artificial Sequence: Synthetic oligonucleotide
aucacaagcugggugaaaa

SEQ ID NO: 2556639 - RNA, 19 nt, Artificial Sequence
  Description of Artificial Sequence: Synthetic oligonucleotide
aucacucucgaguguaaaa

SEQ ID NO: 2556640 - RNA, 19 nt, Artificial Sequence
  Description of Artificial Sequence: Synthetic oligonucleotide
ucuguccccaugcuagcaa

SEQ ID NO: 2556641 - RNA, 19 nt, Artificial Sequence
  Description of Artificial Sequence: Synthetic oligonucleotide
gaucggagagcacaagugu

SEQ ID NO: 2556642 - RNA, 19 nt, Artificial Sequence
  Description of Artificial Sequence: Synthetic oligonucleotide
guuauuacccugaggccac

SEQ ID NO: 2556643 - RNA, 19 nt, Artificial Sequence
  Description of Artificial Sequence: Synthetic oligonucleotide
agacaagagugccgaucgg

SEQ ID NO: 2556644 - RNA, 19 nt, Artificial Sequence
  Description of Artificial Sequence: Synthetic oligonucleotide
ggaaugacuaucucuaccu

SEQ ID NO: 2556645 - RNA, 19 nt, Artificial Sequence
  Description of Artificial Sequence: Synthetic oligonucleotide
cacguauggaaugacuauc

SEQ ID NO: 2556646 - RNA, 19 nt, Artificial Sequence
  Description of Artificial Sequence: Synthetic oligonucleotide
agcuuuuauuacaaucacu

SEQ ID NO: 2556647 - RNA, 19 nt, Artificial Sequence
  Description of Artificial Sequence: Synthetic oligonucleotide
gacaagagugccgaucgga

SEQ ID NO: 2556648 - RNA, 19 nt, Artificial Sequence
  Description of Artificial Sequence: Synthetic oligonucleotide
gaucuugccugauuccgaa

SEQ ID NO: 2556649 - RNA, 19 nt, Artificial Sequence
  Description of Artificial Sequence: Synthetic oligonucleotide
ucacuggguguaccacagg

SEQ ID NO: 2556650 - RNA, 19 nt, Artificial Sequence
  Description of Artificial Sequence: Synthetic oligonucleotide
cacaaacgacaguauggac

SEQ ID NO: 2556651 - RNA, 19 nt, Artificial Sequence
  Description of Artificial Sequence: Synthetic oligonucleotide
ggugaagucacaugaccuc

SEQ ID NO: 2556652 - RNA, 19 nt, Artificial Sequence
  Description of Artificial Sequence: Synthetic oligonucleotide
ucacagaacccuggcuggg

SEQ ID NO: 2556653 - RNA, 19 nt, Artificial Sequence
  Description of Artificial Sequence: Synthetic oligonucleotide
acguauggaaugacuaucu

SEQ ID NO: 2556654 - RNA, 19 nt, Artificial Sequence
  Description of Artificial Sequence: Synthetic oligonucleotide
cacaagcugggugaaaauc

SEQ ID NO: 2556655 - RNA, 19 nt, Artificial Sequence
  Description of Artificial Sequence: Synthetic oligonucleotide
aacugcggagaugggaccu

SEQ ID NO: 2556656 - RNA, 19 nt, Artificial Sequence
  Description of Artificial Sequence: Synthetic oligonucleotide
acacacccaaacugcggag

SEQ ID NO: 2556657 - RNA, 19 nt, Artificial Sequence
  Description of Artificial Sequence: Synthetic oligonucleotide
agggugauuaaaauuuaaa

SEQ ID NO: 2556658 - RNA, 19 nt, Artificial Sequence
  Description of Artificial Sequence: Synthetic oligonucleotide
cuaguuggcaaauguggaa

SEQ ID NO: 2556659 - RNA, 19 nt, Artificial Sequence
  Description of Artificial Sequence: Synthetic oligonucleotide
uccgaaucaacuggccaga

SEQ ID NO: 2556660 - RNA, 19 nt, Artificial Sequence
  Description of Artificial Sequence: Synthetic oligonucleotide
uguccccaugcuagcaaca

SEQ ID NO: 2556661 - RNA, 19 nt, Artificial Sequence
  Description of Artificial Sequence: Synthetic oligonucleotide
gggaucuugccugauuccg

SEQ ID NO: 2556662 - RNA, 19 nt, Artificial Sequence
  Description of Artificial Sequence: Synthetic oligonucleotide
gggaccuuaagggagugcc

SEQ ID NO: 2556663 - RNA, 19 nt, Artificial Sequence
  Description of Artificial Sequence: Synthetic oligonucleotide
caaaauacacccucucagu

SEQ ID NO: 2556664 - RNA, 19 nt, Artificial Sequence
  Description of Artificial Sequence: Synthetic oligonucleotide
agagugccgaucggagagc

SEQ ID NO: 2556665 - RNA, 19 nt, Artificial Sequence
  Description of Artificial Sequence: Synthetic oligonucleotide
acaaucacucucgagugua

SEQ ID NO: 2556666 - RNA, 19 nt, Artificial Sequence
  Description of Artificial Sequence: Synthetic oligonucleotide
caguucacuggagaaugag

SEQ ID NO: 2556667 - RNA, 19 nt, Artificial Sequence
  Description of Artificial Sequence: Synthetic oligonucleotide
caucgaggggauaucacaa

SEQ ID NO: 2556668 - RNA, 19 nt, Artificial Sequence
  Description of Artificial Sequence: Synthetic oligonucleotide
cugagcagacugugcaaac

SEQ ID NO: 2556669 - RNA, 19 nt, Artificial Sequence
  Description of Artificial Sequence: Synthetic oligonucleotide
caaacagaaagcugcgcua

SEQ ID NO: 2556670 - RNA, 19 nt, Artificial Sequence
  Description of Artificial Sequence: Synthetic oligonucleotide
agaaacccacagucuaaaa

SEQ ID NO: 2556671 - RNA, 19 nt, Artificial Sequence
  Description of Artificial Sequence: Synthetic oligonucleotide
agagcacaaguguccgugu

SEQ ID NO: 2556672 - RNA, 19 nt, Artificial Sequence
  Description of Artificial Sequence: Synthetic oligonucleotide
cucaguggauuuugcacga

SEQ ID NO: 2556673 - RNA, 19 nt, Artificial Sequence
  Description of Artificial Sequence: Synthetic oligonucleotide
ucacaagcugggugaaaau

SEQ ID NO: 2556674 - RNA, 19 nt, Artificial Sequence
  Description of Artificial Sequence: Synthetic oligonucleotide
cagaaagcuaguuggcaaa

SEQ ID NO: 2556675 - RNA, 19 nt, Artificial Sequence
  Description of Artificial Sequence: Synthetic oligonucleotide
gugaagucacaugaccuca

SEQ ID NO: 2556676 - RNA, 19 nt, Artificial Sequence
  Description of Artificial Sequence: Synthetic oligonucleotide
aaaacucacuugggcuugu

SEQ ID NO: 2556677 - RNA, 19 nt, Artificial Sequence
  Description of Artificial Sequence: Synthetic oligonucleotide
uaaagcccucaaguauuug

SEQ ID NO: 2556678 - RNA, 19 nt, Artificial Sequence
  Description of Artificial Sequence: Synthetic oligonucleotide
uggcugggccucaguaaag

SEQ ID NO: 2556679 - RNA, 19 nt, Artificial Sequence
  Description of Artificial Sequence: Synthetic oligonucleotide
cuguccccaugcuagcaac

SEQ ID NO: 2556680 - RNA, 19 nt, Artificial Sequence
  Description of Artificial Sequence: Synthetic oligonucleotide
uaagggagugccugcccuc

SEQ ID NO: 2556681 - RNA, 19 nt, Artificial Sequence
  Description of Artificial Sequence: Synthetic oligonucleotide
agaaagcuaguuggcaaau

SEQ ID NO: 2556682 - RNA, 19 nt, Artificial Sequence
  Description of Artificial Sequence: Synthetic oligonucleotide
guauggacagaggugaagu

SEQ ID NO: 2556683 - RNA, 19 nt, Artificial Sequence
  Description of Artificial Sequence: Synthetic oligonucleotide
acgacaguauggacagagg

SEQ ID NO: 2556684 - RNA, 19 nt, Artificial Sequence
  Description of Artificial Sequence: Synthetic oligonucleotide
gcuuuguuauuacccugag

SEQ ID NO: 2556685 - RNA, 19 nt, Artificial Sequence
  Description of Artificial Sequence: Synthetic oligonucleotide
ucaguggauuuugcacgag

SEQ ID NO: 2556686 - RNA, 19 nt, Artificial Sequence
  Description of Artificial Sequence: Synthetic oligonucleotide
ccguagucuucccagaaac

SEQ ID NO: 2556687 - RNA, 19 nt, Artificial Sequence
  Description of Artificial Sequence: Synthetic oligonucleotide
agugccugcccucccucug

SEQ ID NO: 2556688 - RNA, 19 nt, Artificial Sequence
  Description of Artificial Sequence: Synthetic oligonucleotide
agaggccguagucuuccca

SEQ ID NO: 2556689 - RNA, 19 nt, Artificial Sequence
  Description of Artificial Sequence: Synthetic oligonucleotide
gccaaaauacacccucuca

SEQ ID NO: 2556690 - RNA, 19 nt, Artificial Sequence
  Description of Artificial Sequence: Synthetic oligonucleotide
ucccucugagcagacugug

SEQ ID NO: 2556691 - RNA, 19 nt, Artificial Sequence
  Description of Artificial Sequence: Synthetic oligonucleotide
acaugaccucacauccacg

SEQ ID NO: 2556692 - RNA, 19 nt, Artificial Sequence
  Description of Artificial Sequence: Synthetic oligonucleotide
caagagugccgaucggaga

SEQ ID NO: 2556693 - RNA, 19 nt, Artificial Sequence
  Description of Artificial Sequence: Synthetic oligonucleotide
uccccaugcuagcaacauc

SEQ ID NO: 2556694 - RNA, 19 nt, Artificial Sequence
  Description of Artificial Sequence: Synthetic oligonucleotide
aaacucacuugggcuugug

SEQ ID NO: 2556695 - RNA, 19 nt, Artificial Sequence
  Description of Artificial Sequence: Synthetic oligonucleotide
cuuguggcuuggcuuucac

SEQ ID NO: 2556696 - RNA, 19 nt, Artificial Sequence
  Description of Artificial Sequence: Synthetic oligonucleotide
ugccgaucggagagcacaa

SEQ ID NO: 2556697 - RNA, 19 nt, Artificial Sequence
  Description of Artificial Sequence: Synthetic oligonucleotide
cgucacagaacccuggcug

SEQ ID NO: 2556698 - RNA, 19 nt, Artificial Sequence
  Description of Artificial Sequence: Synthetic oligonucleotide
cuggagaaugagguaauaa

SEQ ID NO: 2556699 - RNA, 19 nt, Artificial Sequence
  Description of Artificial Sequence: Synthetic oligonucleotide
caacagacacaaauacaua

SEQ ID NO: 2556700 - RNA, 19 nt, Artificial Sequence
  Description of Artificial Sequence: Synthetic oligonucleotide
gugccgaucggagagcaca

SEQ ID NO: 2556701 - RNA, 19 nt, Artificial Sequence
  Description of Artificial Sequence: Synthetic oligonucleotide
uugccugauuccgaaucaa

SEQ ID NO: 2556702 - RNA, 19 nt, Artificial Sequence
  Description of Artificial Sequence: Synthetic oligonucleotide
gcuaucacagaggccguag

SEQ ID NO: 2556703 - RNA, 19 nt, Artificial Sequence
  Description of Artificial Sequence: Synthetic oligonucleotide
uuauuacccugaggccacc

SEQ ID NO: 2556704 - RNA, 19 nt, Artificial Sequence
  Description of Artificial Sequence: Synthetic oligonucleotide
auuuugcacgaggcagaag

SEQ ID NO: 2556705 - RNA, 19 nt, Artificial Sequence
  Description of Artificial Sequence: Synthetic oligonucleotide
acuggguguaccacagggu

SEQ ID NO: 2556706 - RNA, 19 nt, Artificial Sequence
  Description of Artificial Sequence: Synthetic oligonucleotide
auccacguauggaaugacu

SEQ ID NO: 2556707 - RNA, 19 nt, Artificial Sequence
  Description of Artificial Sequence: Synthetic oligonucleotide
agaagacaagagugccgau

SEQ ID NO: 2556708 - RNA, 19 nt, Artificial Sequence
  Description of Artificial Sequence: Synthetic oligonucleotide
caacaucgaggggauauca

SEQ ID NO: 2556709 - RNA, 19 nt, Artificial Sequence
  Description of Artificial Sequence: Synthetic oligonucleotide
ccacagucuaaaaucuguc

SEQ ID NO: 2556710 - RNA, 19 nt, Artificial Sequence
  Description of Artificial Sequence: Synthetic oligonucleotide
agcagacugugcaaacaga

SEQ ID NO: 2556711 - RNA, 19 nt, Artificial Sequence
  Description of Artificial Sequence: Synthetic oligonucleotide
gcuaguuggcaaaugugga

SEQ ID NO: 2556712 - RNA, 19 nt, Artificial Sequence
  Description of Artificial Sequence: Synthetic oligonucleotide
cacagaacccuggcugggc

SEQ ID NO: 2556713 - RNA, 19 nt, Artificial Sequence
  Description of Artificial Sequence: Synthetic oligonucleotide
acauacaugcagagccaca

SEQ ID NO: 2556714 - RNA, 19 nt, Artificial Sequence
  Description of Artificial Sequence: Synthetic oligonucleotide
ggggaucuugccugauucc

SEQ ID NO: 2556715 - RNA, 19 nt, Artificial Sequence
  Description of Artificial Sequence: Synthetic oligonucleotide
aguuuauuacugacagcuu

SEQ ID NO: 2556716 - RNA, 19 nt, Artificial Sequence
  Description of Artificial Sequence: Synthetic oligonucleotide
auaucacaagcugggugaa

SEQ ID NO: 2556717 - RNA, 19 nt, Artificial Sequence
  Description of Artificial Sequence: Synthetic oligonucleotide
ccaugcuagcaacaucgag

SEQ ID NO: 2556718 - RNA, 19 nt, Artificial Sequence
  Description of Artificial Sequence: Synthetic oligonucleotide
augaccucacauccacgua

SEQ ID NO: 2556719 - RNA, 19 nt, Artificial Sequence
  Description of Artificial Sequence: Synthetic oligonucleotide
acccucucaguggauuuug

SEQ ID NO: 2556720 - RNA, 19 nt, Artificial Sequence
  Description of Artificial Sequence: Synthetic oligonucleotide
cucacuugggcuuguggcu

SEQ ID NO: 2556721 - RNA, 19 nt, Artificial Sequence
  Description of Artificial Sequence: Synthetic oligonucleotide
acaucacaaacgacaguau

SEQ ID NO: 2556722 - RNA, 19 nt, Artificial Sequence
  Description of Artificial Sequence: Synthetic oligonucleotide
ugcggagaugggaccuuaa

SEQ ID NO: 2556723 - RNA, 19 nt, Artificial Sequence
  Description of Artificial Sequence: Synthetic oligonucleotide
gcggagaugggaccuuaag

SEQ ID NO: 2556724 - RNA, 19 nt, Artificial Sequence
  Description of Artificial Sequence: Synthetic oligonucleotide
cuuggcuuucacugggugu

SEQ ID NO: 2556725 - RNA, 19 nt, Artificial Sequence
  Description of Artificial Sequence: Synthetic oligonucleotide
accuagcgucacagaaccc

SEQ ID NO: 2556726 - RNA, 19 nt, Artificial Sequence
  Description of Artificial Sequence: Synthetic oligonucleotide
cgaucggagagcacaagug

SEQ ID NO: 2556727 - RNA, 19 nt, Artificial Sequence
  Description of Artificial Sequence: Synthetic oligonucleotide
gcuuucacuggguguacca

SEQ ID NO: 2556728 - RNA, 19 nt, Artificial Sequence
  Description of Artificial Sequence: Synthetic oligonucleotide
gcagacugugcaaacagaa

SEQ ID NO: 2556729 - RNA, 19 nt, Artificial Sequence
  Description of Artificial Sequence: Synthetic oligonucleotide
ugggaccuuaagggagugc

SEQ ID NO: 2556730 - RNA, 19 nt, Artificial Sequence
  Description of Artificial Sequence: Synthetic oligonucleotide
acccacagucuaaaaucug

SEQ ID NO: 2556731 - RNA, 19 nt, Artificial Sequence
  Description of Artificial Sequence: Synthetic oligonucleotide
cauccacguauggaaugac

SEQ ID NO: 2556732 - RNA, 19 nt, Artificial Sequence
  Description of Artificial Sequence: Synthetic oligonucleotide
ccaccuagcgucacagaac

SEQ ID NO: 2556733 - RNA, 19 nt, Artificial Sequence
  Description of Artificial Sequence: Synthetic oligonucleotide
agguagaaccaaguuuauu

SEQ ID NO: 2556734 - RNA, 19 nt, Artificial Sequence
  Description of Artificial Sequence: Synthetic oligonucleotide
aucuugccugauuccgaau

SEQ ID NO: 2556735 - RNA, 19 nt, Artificial Sequence
  Description of Artificial Sequence: Synthetic oligonucleotide
aggccguagucuucccaga

SEQ ID NO: 2556736 - RNA, 19 nt, Artificial Sequence
  Description of Artificial Sequence: Synthetic oligonucleotide
aaacgacaguauggacaga

SEQ ID NO: 2556737 - RNA, 19 nt, Artificial Sequence
  Description of Artificial Sequence: Synthetic oligonucleotide
guauuugugcuuuguuauu

SEQ ID NO: 2556738 - RNA, 19 nt, Artificial Sequence
  Description of Artificial Sequence: Synthetic oligonucleotide
gagugccgaucggagagca

SEQ ID NO: 2556739 - RNA, 19 nt, Artificial Sequence
  Description of Artificial Sequence: Synthetic oligonucleotide
guggcuucccaccuagcgu

SEQ ID NO: 2556740 - RNA, 19 nt, Artificial Sequence
  Description of Artificial Sequence: Synthetic oligonucleotide
cuagcaacaucgaggggau

SEQ ID NO: 2556741 - RNA, 19 nt, Artificial Sequence
  Description of Artificial Sequence: Synthetic oligonucleotide
gacagaggugaagucacau

SEQ ID NO: 2556742 - RNA, 19 nt, Artificial Sequence
  Description of Artificial Sequence: Synthetic oligonucleotide
cagaaacccacagucuaaa

SEQ ID NO: 2556743 - RNA, 19 nt, Artificial Sequence
  Description of Artificial Sequence: Synthetic oligonucleotide
ucccaccuagcgucacaga

SEQ ID NO: 2556744 - RNA, 19 nt, Artificial Sequence
  Description of Artificial Sequence: Synthetic oligonucleotide
gcacaaguguccguguuga

SEQ ID NO: 2556745 - RNA, 19 nt, Artificial Sequence
  Description of Artificial Sequence: Synthetic oligonucleotide
agugccgaucggagagcac

SEQ ID NO: 2556746 - RNA, 19 nt, Artificial Sequence
  Description of Artificial Sequence: Synthetic oligonucleotide
augggaccuuaagggagug

SEQ ID NO: 2556747 - RNA, 19 nt, Artificial Sequence
  Description of Artificial Sequence: Synthetic oligonucleotide
guguaccacagggugggga

SEQ ID NO: 2556748 - RNA, 19 nt, Artificial Sequence
  Description of Artificial Sequence: Synthetic oligonucleotide
ugcuaucacagaggccgua

SEQ ID NO: 2556749 - RNA, 19 nt, Artificial Sequence
  Description of Artificial Sequence: Synthetic oligonucleotide
cagaggccguagucuuccc

SEQ ID NO: 2556750 - RNA, 19 nt, Artificial Sequence
  Description of Artificial Sequence: Synthetic oligonucleotide
gagaaccugaagguggcuu

SEQ ID NO: 2556751 - RNA, 19 nt, Artificial Sequence
  Description of Artificial Sequence: Synthetic oligonucleotide
uggcuuucacuggguguac

SEQ ID NO: 2556752 - RNA, 19 nt, Artificial Sequence
  Description of Artificial Sequence: Synthetic oligonucleotide
cacccaaacugcggagaug

SEQ ID NO: 2556753 - RNA, 19 nt, Artificial Sequence
  Description of Artificial Sequence: Synthetic oligonucleotide
gugaaaaucuggggccaaa

SEQ ID NO: 2556754 - RNA, 19 nt, Artificial Sequence
  Description of Artificial Sequence: Synthetic oligonucleotide
cucuacucagaaagcuagu

SEQ ID NO: 2556755 - RNA, 19 nt, Artificial Sequence
  Description of Artificial Sequence: Synthetic oligonucleotide
ggaucuugccugauuccga

SEQ ID NO: 2556756 - RNA, 19 nt, Artificial Sequence
  Description of Artificial Sequence: Synthetic oligonucleotide
cuaucacagaggccguagu

SEQ ID NO: 2556757 - RNA, 19 nt, Artificial Sequence
  Description of Artificial Sequence: Synthetic oligonucleotide
caguauggacagaggugaa

SEQ ID NO: 2556758 - RNA, 19 nt, Artificial Sequence
  Description of Artificial Sequence: Synthetic oligonucleotide
gggugaaaaucuggggcca

SEQ ID NO: 2556759 - RNA, 19 nt, Artificial Sequence
  Description of Artificial Sequence: Synthetic oligonucleotide
ggcagaaggagaaccugaa

SEQ ID NO: 2556760 - RNA, 19 nt, Artificial Sequence
  Description of Artificial Sequence: Synthetic oligonucleotide
cccacagucuaaaaucugu

SEQ ID NO: 2556761 - RNA, 19 nt, Artificial Sequence
  Description of Artificial Sequence: Synthetic oligonucleotide
gcccucaaguauuugugcu

SEQ ID NO: 2556762 - RNA, 19 nt, Artificial Sequence
  Description of Artificial Sequence: Synthetic oligonucleotide
ccaaacugcggagauggga

SEQ ID NO: 2556763 - RNA, 19 nt, Artificial Sequence
  Description of Artificial Sequence: Synthetic oligonucleotide
cguauggaaugacuaucuc

SEQ ID NO: 2556764 - RNA, 19 nt, Artificial Sequence
  Description of Artificial Sequence: Synthetic oligonucleotide
cccaccuagcgucacagaa

SEQ ID NO: 2556765 - RNA, 19 nt, Artificial Sequence
  Description of Artificial Sequence: Synthetic oligonucleotide
caggguggggaucuugccu

SEQ ID NO: 2556766 - RNA, 19 nt, Artificial Sequence
  Description of Artificial Sequence: Synthetic oligonucleotide
cccucucaguggauuuugc

SEQ ID NO: 2556767 - RNA, 19 nt, Artificial Sequence
  Description of Artificial Sequence: Synthetic oligonucleotide
caacuggccagaugcaguu

SEQ ID NO: 2556768 - RNA, 19 nt, Artificial Sequence
  Description of Artificial Sequence: Synthetic oligonucleotide
gagcacaaguguccguguu

SEQ ID NO: 2556769 - RNA, 19 nt, Artificial Sequence
  Description of Artificial Sequence: Synthetic oligonucleotide
cgaaucaacuggccagaug

SEQ ID NO: 2556770 - RNA, 19 nt, Artificial Sequence
  Description of Artificial Sequence: Synthetic oligonucleotide
gcaacaucgaggggauauc

SEQ ID NO: 2556771 - RNA, 19 nt, Artificial Sequence
  Description of Artificial Sequence: Synthetic oligonucleotide
cggagagcacaaguguccg

SEQ ID NO: 2556772 - RNA, 19 nt, Artificial Sequence
  Description of Artificial Sequence: Synthetic oligonucleotide
guaaagcccucaaguauuu

SEQ ID NO: 2556773 - RNA, 19 nt, Artificial Sequence
  Description of Artificial Sequence: Synthetic oligonucleotide
cccaaacugcggagauggg

SEQ ID NO: 2556774 - RNA, 19 nt, Artificial Sequence
  Description of Artificial Sequence: Synthetic oligonucleotide
gcacgaggcagaaggagaa

SEQ ID NO: 2556775 - RNA, 19 nt, Artificial Sequence
  Description of Artificial Sequence: Synthetic oligonucleotide
gccucaguaaagcccucaa

SEQ ID NO: 2556776 - RNA, 19 nt, Artificial Sequence
  Description of Artificial Sequence: Synthetic oligonucleotide
cacaaguguccguguugaa

SEQ ID NO: 2556777 - RNA, 19 nt, Artificial Sequence
  Description of Artificial Sequence: Synthetic oligonucleotide
gguguaccacagggugggg

SEQ ID NO: 2556778 - RNA, 19 nt, Artificial Sequence
  Description of Artificial Sequence: Synthetic oligonucleotide
ggccguagucuucccagaa

SEQ ID NO: 2556779 - RNA, 19 nt, Artificial Sequence
  Description of Artificial Sequence: Synthetic oligonucleotide
ccuagcgucacagaacccu

SEQ ID NO: 2556780 - RNA, 19 nt, Artificial Sequence
  Description of Artificial Sequence: Synthetic oligonucleotide
ccucacauccacguaugga

SEQ ID NO: 2556781 - RNA, 19 nt, Artificial Sequence
  Description of Artificial Sequence: Synthetic oligonucleotide
gccguagucuucccagaaa

SEQ ID NO: 2556782 - RNA, 19 nt, Artificial Sequence
  Description of Artificial Sequence: Synthetic oligonucleotide
guccguguugaaggacauc

SEQ ID NO: 2556783 - RNA, 19 nt, Artificial Sequence
  Description of Artificial Sequence: Synthetic oligonucleotide
ggugaaaaucuggggccaa

SEQ ID NO: 2556784 - RNA, 19 nt, Artificial Sequence
  Description of Artificial Sequence: Synthetic oligonucleotide
cgacaguauggacagaggu

SEQ ID NO: 2556785 - RNA, 19 nt, Artificial Sequence
  Description of Artificial Sequence: Synthetic oligonucleotide
ggcaaauguggaacugcua

SEQ ID NO: 2556786 - RNA, 19 nt, Artificial Sequence
  Description of Artificial Sequence: Synthetic oligonucleotide
uagcaacaucgaggggaua

SEQ ID NO: 2556787 - RNA, 19 nt, Artificial Sequence
  Description of Artificial Sequence: Synthetic oligonucleotide
gccgaucggagagcacaag

SEQ ID NO: 2556788 - RNA, 19 nt, Artificial Sequence
  Description of Artificial Sequence: Synthetic oligonucleotide
ggccucaguaaagcccuca

SEQ ID NO: 2556789 - RNA, 19 nt, Artificial Sequence
  Description of Artificial Sequence: Synthetic oligonucleotide
gggcuuguggcuuggcuuu

SEQ ID NO: 2556790 - RNA, 19 nt, Artificial Sequence
  Description of Artificial Sequence: Synthetic oligonucleotide
guccccaugcuagcaacau

SEQ ID NO: 2556791 - RNA, 19 nt, Artificial Sequence
  Description of Artificial Sequence: Synthetic oligonucleotide
cugcuaucacagaggccgu

SEQ ID NO: 2556792 - RNA, 19 nt, Artificial Sequence
  Description of Artificial Sequence: Synthetic oligonucleotide
ggguggggaucuugccuga

SEQ ID NO: 2556793 - RNA, 19 nt, Artificial Sequence
  Description of Artificial Sequence: Synthetic oligonucleotide
auacacccucucaguggau

SEQ ID NO: 2556794 - RNA, 19 nt, Artificial Sequence
  Description of Artificial Sequence: Synthetic oligonucleotide
ccacguauggaaugacuau

SEQ ID NO: 2556795 - RNA, 19 nt, Artificial Sequence
  Description of Artificial Sequence: Synthetic oligonucleotide
ggagagcacaaguguccgu

SEQ ID NO: 2556796 - RNA, 19 nt, Artificial Sequence
  Description of Artificial Sequence: Synthetic oligonucleotide
guggggaucuugccugauu

SEQ ID NO: 2556797 - RNA, 19 nt, Artificial Sequence
  Description of Artificial Sequence: Synthetic oligonucleotide
cccaugcuagcaacaucga

SEQ ID NO: 2556798 - RNA, 19 nt, Artificial Sequence
  Description of Artificial Sequence: Synthetic oligonucleotide
cccugaggccaccucaaaa

SEQ ID NO: 2556799 - RNA, 19 nt, Artificial Sequence
  Description of Artificial Sequence: Synthetic oligonucleotide
cgaggggauaucacaagcu

SEQ ID NO: 2556800 - RNA, 19 nt, Artificial Sequence
  Description of Artificial Sequence: Synthetic oligonucleotide
ccgaucggagagcacaagu

SEQ ID NO: 2556801 - RNA, 19 nt, Artificial Sequence
  Description of Artificial Sequence: Synthetic oligonucleotide
gggauaucacaagcugggu

SEQ ID NO: 2556802 - RNA, 19 nt, Artificial Sequence
  Description of Artificial Sequence: Synthetic oligonucleotide
gcuuguggcuuggcuuuca

SEQ ID NO: 2556803 - RNA, 19 nt, Artificial Sequence
  Description of Artificial Sequence: Synthetic oligonucleotide
gcgucacagaacccuggcu

SEQ ID NO: 2556804 - RNA, 19 nt, Artificial Sequence
  Description of Artificial Sequence: Synthetic oligonucleotide
gggccaaaauacacccucu

SEQ ID NO: 2556805 - RNA, 19 nt, Artificial Sequence
  Description of Artificial Sequence: Synthetic oligonucleotide
ggaccuuaagggagugccu

SEQ ID NO: 2556806 - RNA, 19 nt, Artificial Sequence
  Description of Artificial Sequence: Synthetic oligonucleotide
ggcuuguggcuuggcuuuc

SEQ ID NO: 2556807 - RNA, 19 nt, Artificial Sequence
  Description of Artificial Sequence: Synthetic oligonucleotide
cugcggagaugggaccuua

SEQ ID NO: 2556808 - RNA, 19 nt, Artificial Sequence
  Description of Artificial Sequence: Synthetic oligonucleotide
ggcuucccaccuagcguca

SEQ ID NO: 2556809 - RNA, 19 nt, Artificial Sequence
  Description of Artificial Sequence: Synthetic oligonucleotide
cccucaaguauuugugcuu

SEQ ID NO: 2556810 - RNA, 19 nt, Artificial Sequence
  Description of Artificial Sequence: Synthetic oligonucleotide
cacccucucaguggauuuu

SEQ ID NO: 2556811 - RNA, 19 nt, Artificial Sequence
  Description of Artificial Sequence: Synthetic oligonucleotide
ccgaaucaacuggccagau

SEQ ID NO: 2556812 - RNA, 19 nt, Artificial Sequence
  Description of Artificial Sequence: Synthetic oligonucleotide
uuaucaaacaaacacaugg

SEQ ID NO: 2556813 - RNA, 19 nt, Artificial Sequence
  Description of Artificial Sequence: Synthetic oligonucleotide
uuuugaagaacuuaaauag

SEQ ID NO: 2556814 - RNA, 19 nt, Artificial Sequence
  Description of Artificial Sequence: Synthetic oligonucleotide
uuaaauaggaugcaguugg

SEQ ID NO: 2556815 - RNA, 19 nt, Artificial Sequence
  Description of Artificial Sequence: Synthetic oligonucleotide
aagacauggaauuuuauuc

SEQ ID NO: 2556816 - RNA, 19 nt, Artificial Sequence
  Description of Artificial Sequence: Synthetic oligonucleotide
uuaauugacacaauuaaug

SEQ ID NO: 2556817 - RNA, 19 nt, Artificial Sequence
  Description of Artificial Sequence: Synthetic oligonucleotide
uggaauuuuauucagaaca

SEQ ID NO: 2556818 - RNA, 19 nt, Artificial Sequence
  Description of Artificial Sequence: Synthetic oligonucleotide
uuauuuguaaacaugaagu

SEQ ID NO: 2556819 - RNA, 19 nt, Artificial Sequence
  Description of Artificial Sequence: Synthetic oligonucleotide
aauaaauagcaucagauaa

SEQ ID NO: 2556820 - RNA, 19 nt, Artificial Sequence
  Description of Artificial Sequence: Synthetic oligonucleotide
aaauugaaaaguuuuggag

SEQ ID NO: 2556821 - RNA, 19 nt, Artificial Sequence
  Description of Artificial Sequence: Synthetic oligonucleotide
aauagcaucagauaaggcu

SEQ ID NO: 2556822 - RNA, 19 nt, Artificial Sequence
  Description of Artificial Sequence: Synthetic oligonucleotide
aagaacuuaaauaggaugc

SEQ ID NO: 2556823 - RNA, 19 nt, Artificial Sequence
  Description of Artificial Sequence: Synthetic oligonucleotide
auuaaugaaaacuggaaag

SEQ ID NO: 2556824 - RNA, 19 nt, Artificial Sequence
  Description of Artificial Sequence: Synthetic oligonucleotide
aaaucuaagaaugguaucg

SEQ ID NO: 2556825 - RNA, 19 nt, Artificial Sequence
  Description of Artificial Sequence: Synthetic oligonucleotide
aauaggaugcaguuggcac

SEQ ID NO: 2556826 - RNA, 19 nt, Artificial Sequence
  Description of Artificial Sequence: Synthetic oligonucleotide
aauugaaaaguuuuggaga

SEQ ID NO: 2556827 - RNA, 19 nt, Artificial Sequence
  Description of Artificial Sequence: Synthetic oligonucleotide
uaaguuauaguuuuggcug

SEQ ID NO: 2556828 - RNA, 19 nt, Artificial Sequence
  Description of Artificial Sequence: Synthetic oligonucleotide
uucuuuaauguacaaauag

SEQ ID NO: 2556829 - RNA, 19 nt, Artificial Sequence
  Description of Artificial Sequence: Synthetic oligonucleotide
guaaacaugaaguuaacag

SEQ ID NO: 2556830 - RNA, 19 nt, Artificial Sequence
  Description of Artificial Sequence: Synthetic oligonucleotide
uuaauguacaaauagagua

SEQ ID NO: 2556831 - RNA, 19 nt, Artificial Sequence
  Description of Artificial Sequence: Synthetic oligonucleotide
aacuaaaguucucacauag

SEQ ID NO: 2556832 - RNA, 19 nt, Artificial Sequence
  Description of Artificial Sequence: Synthetic oligonucleotide
acacacuugguauauaacc

SEQ ID NO: 2556833 - RNA, 19 nt, Artificial Sequence
  Description of Artificial Sequence: Synthetic oligonucleotide
ucuaucugaacacacuugg

SEQ ID NO: 2556834 - RNA, 19 nt, Artificial Sequence
  Description of Artificial Sequence: Synthetic oligonucleotide
cuuuaauguacaaauagag

SEQ ID NO: 2556835 - RNA, 19 nt, Artificial Sequence
  Description of Artificial Sequence: Synthetic oligonucleotide
aaacaaaagcuguauuuac

SEQ ID NO: 2556836 - RNA, 19 nt, Artificial Sequence
  Description of Artificial Sequence: Synthetic oligonucleotide
aaacaugaaguuaacagac

SEQ ID NO: 2556837 - RNA, 19 nt, Artificial Sequence
  Description of Artificial Sequence: Synthetic oligonucleotide
aauguacaaauagaguacc

SEQ ID NO: 2556838 - RNA, 19 nt, Artificial Sequence
  Description of Artificial Sequence: Synthetic oligonucleotide
uuuuaagaacaacaaauug

SEQ ID NO: 2556839 - RNA, 19 nt, Artificial Sequence
  Description of Artificial Sequence: Synthetic oligonucleotide
auuacuguaaguuauaguu

SEQ ID NO: 2556840 - RNA, 19 nt, Artificial Sequence
  Description of Artificial Sequence: Synthetic oligonucleotide
aagaaugguaucgaaagac

SEQ ID NO: 2556841 - RNA, 19 nt, Artificial Sequence
  Description of Artificial Sequence: Synthetic oligonucleotide
ucuuuuauuuauuauugag

SEQ ID NO: 2556842 - RNA, 19 nt, Artificial Sequence
  Description of Artificial Sequence: Synthetic oligonucleotide
ugguauauaaccuuuagaa

SEQ ID NO: 2556843 - RNA, 19 nt, Artificial Sequence
  Description of Artificial Sequence: Synthetic oligonucleotide
uuaagaacaacaaauugaa

SEQ ID NO: 2556844 - RNA, 19 nt, Artificial Sequence
  Description of Artificial Sequence: Synthetic oligonucleotide
aauuaaugaaaacuggaaa

SEQ ID NO: 2556845 - RNA, 19 nt, Artificial Sequence
  Description of Artificial Sequence: Synthetic oligonucleotide
aaacuggagacacacacag

SEQ ID NO: 2556846 - RNA, 19 nt, Artificial Sequence
  Description of Artificial Sequence: Synthetic oligonucleotide
uuugaagaacuuaaauagg

SEQ ID NO: 2556847 - RNA, 19 nt, Artificial Sequence
  Description of Artificial Sequence: Synthetic oligonucleotide
cuaagaaugguaucgaaag

SEQ ID NO: 2556848 - RNA, 19 nt, Artificial Sequence
  Description of Artificial Sequence: Synthetic oligonucleotide
aaguauugcauuacaaagc

SEQ ID NO: 2556849 - RNA, 19 nt, Artificial Sequence
  Description of Artificial Sequence: Synthetic oligonucleotide
cucgauuuguaucagaagg

SEQ ID NO: 2556850 - RNA, 19 nt, Artificial Sequence
  Description of Artificial Sequence: Synthetic oligonucleotide
aaaagcuguauuuacacaa

SEQ ID NO: 2556851 - RNA, 19 nt, Artificial Sequence
  Description of Artificial Sequence: Synthetic oligonucleotide
uauauaaccuuuagaaggc

SEQ ID NO: 2556852 - RNA, 19 nt, Artificial Sequence
  Description of Artificial Sequence: Synthetic oligonucleotide
uugaagaacuuaaauagga

SEQ ID NO: 2556853 - RNA, 19 nt, Artificial Sequence
  Description of Artificial Sequence: Synthetic oligonucleotide
gaagaacuuaaauaggaug

SEQ ID NO: 2556854 - RNA, 19 nt, Artificial Sequence
  Description of Artificial Sequence: Synthetic oligonucleotide
uaaacaugaaguuaacaga

SEQ ID NO: 2556855 - RNA, 19 nt, Artificial Sequence
  Description of Artificial Sequence: Synthetic oligonucleotide
uauugcauuacaaagcaaa

SEQ ID NO: 2556856 - RNA, 19 nt, Artificial Sequence
  Description of Artificial Sequence: Synthetic oligonucleotide
guuagggugacuucuaagg

SEQ ID NO: 2556857 - RNA, 19 nt, Artificial Sequence
  Description of Artificial Sequence: Synthetic oligonucleotide
ugcauuacaaagcaaacaa

SEQ ID NO: 2556858 - RNA, 19 nt, Artificial Sequence
  Description of Artificial Sequence: Synthetic oligonucleotide
aucagaaggaguuagggug

SEQ ID NO: 2556859 - RNA, 19 nt, Artificial Sequence
  Description of Artificial Sequence: Synthetic oligonucleotide
aaauagaguacccuuuuga

SEQ ID NO: 2556860 - RNA, 19 nt, Artificial Sequence
  Description of Artificial Sequence: Synthetic oligonucleotide
caugguaacauuaauugac

SEQ ID NO: 2556861 - RNA, 19 nt, Artificial Sequence
  Description of Artificial Sequence: Synthetic oligonucleotide
uagaguacccuuuugaaga

SEQ ID NO: 2556862 - RNA, 19 nt, Artificial Sequence
  Description of Artificial Sequence: Synthetic oligonucleotide
uucagaacaccuaagaaau

SEQ ID NO: 2556863 - RNA, 19 nt, Artificial Sequence
  Description of Artificial Sequence: Synthetic oligonucleotide
uaacagacaacuaaaguuc

SEQ ID NO: 2556864 - RNA, 19 nt, Artificial Sequence
  Description of Artificial Sequence: Synthetic oligonucleotide
uaauugacacaauuaauga

SEQ ID NO: 2556865 - RNA, 19 nt, Artificial Sequence
  Description of Artificial Sequence: Synthetic oligonucleotide
aaaguuuuggagaauuauc

SEQ ID NO: 2556866 - RNA, 19 nt, Artificial Sequence
  Description of Artificial Sequence: Synthetic oligonucleotide
agugugaccagacacugcg

SEQ ID NO: 2556867 - RNA, 19 nt, Artificial Sequence
  Description of Artificial Sequence: Synthetic oligonucleotide
aacaauuauuuguaaacau

SEQ ID NO: 2556868 - RNA, 19 nt, Artificial Sequence
  Description of Artificial Sequence: Synthetic oligonucleotide
uggcuuaucuaucugaaca

SEQ ID NO: 2556869 - RNA, 19 nt, Artificial Sequence
  Description of Artificial Sequence: Synthetic oligonucleotide
aaguuauaguuuuggcugg

SEQ ID NO: 2556870 - RNA, 19 nt, Artificial Sequence
  Description of Artificial Sequence: Synthetic oligonucleotide
ugugcuucaagcuaccaca

SEQ ID NO: 2556871 - RNA, 19 nt, Artificial Sequence
  Description of Artificial Sequence: Synthetic oligonucleotide
acaacuaaaguucucacau

SEQ ID NO: 2556872 - RNA, 19 nt, Artificial Sequence
  Description of Artificial Sequence: Synthetic oligonucleotide
aacauuaauugacacaauu

SEQ ID NO: 2556873 - RNA, 19 nt, Artificial Sequence
  Description of Artificial Sequence: Synthetic oligonucleotide
augguaucgaaagacaugg

SEQ ID NO: 2556874 - RNA, 19 nt, Artificial Sequence
  Description of Artificial Sequence: Synthetic oligonucleotide
aauugacacaauuaaugaa

SEQ ID NO: 2556875 - RNA, 19 nt, Artificial Sequence
  Description of Artificial Sequence: Synthetic oligonucleotide
uuuauucagaacaccuaag

SEQ ID NO: 2556876 - RNA, 19 nt, Artificial Sequence
  Description of Artificial Sequence: Synthetic oligonucleotide
aauagaguacccuuuugaa

SEQ ID NO: 2556877 - RNA, 19 nt, Artificial Sequence
  Description of Artificial Sequence: Synthetic oligonucleotide
aaacaauuauuuguaaaca

SEQ ID NO: 2556878 - RNA, 19 nt, Artificial Sequence
  Description of Artificial Sequence: Synthetic oligonucleotide
gaaguuaacagacaacuaa

SEQ ID NO: 2556879 - RNA, 19 nt, Artificial Sequence
  Description of Artificial Sequence: Synthetic oligonucleotide
uuuuaaguauugcauuaca

SEQ ID NO: 2556880 - RNA, 19 nt, Artificial Sequence
  Description of Artificial Sequence: Synthetic oligonucleotide
auucagaacaccuaagaaa

SEQ ID NO: 2556881 - RNA, 19 nt, Artificial Sequence
  Description of Artificial Sequence: Synthetic oligonucleotide
caauuauuuguaaacauga

SEQ ID NO: 2556882 - RNA, 19 nt, Artificial Sequence
  Description of Artificial Sequence: Synthetic oligonucleotide
guaagugcugccaaaauag

SEQ ID NO: 2556883 - RNA, 19 nt, Artificial Sequence
  Description of Artificial Sequence: Synthetic oligonucleotide
gaaggcaaaaguguuuugg

SEQ ID NO: 2556884 - RNA, 19 nt, Artificial Sequence
  Description of Artificial Sequence: Synthetic oligonucleotide
uaucaaacaaacacaugga

SEQ ID NO: 2556885 - RNA, 19 nt, Artificial Sequence
  Description of Artificial Sequence: Synthetic oligonucleotide
guauauuuuaaguauugca

SEQ ID NO: 2556886 - RNA, 19 nt, Artificial Sequence
  Description of Artificial Sequence: Synthetic oligonucleotide
uguaaguuauaguuuuggc

SEQ ID NO: 2556887 - RNA, 19 nt, Artificial Sequence
  Description of Artificial Sequence: Synthetic oligonucleotide
uuaaugaaaacuggaaagu

SEQ ID NO: 2556888 - RNA, 19 nt, Artificial Sequence
  Description of Artificial Sequence: Synthetic oligonucleotide
ugguauauuuuaaguauug

SEQ ID NO: 2556889 - RNA, 19 nt, Artificial Sequence
  Description of Artificial Sequence: Synthetic oligonucleotide
auugaaaaguuuuggagaa

SEQ ID NO: 2556890 - RNA, 19 nt, Artificial Sequence
  Description of Artificial Sequence: Synthetic oligonucleotide
uacaaaguggcuuaucuau

SEQ ID NO: 2556891 - RNA, 19 nt, Artificial Sequence
  Description of Artificial Sequence: Synthetic oligonucleotide
augaaguuaacagacaacu

SEQ ID NO: 2556892 - RNA, 19 nt, Artificial Sequence
  Description of Artificial Sequence: Synthetic oligonucleotide
uaaggaaacccaaacugga

SEQ ID NO: 2556893 - RNA, 19 nt, Artificial Sequence
  Description of Artificial Sequence: Synthetic oligonucleotide
auagaguacccuuuugaag

SEQ ID NO: 2556894 - RNA, 19 nt, Artificial Sequence
  Description of Artificial Sequence: Synthetic oligonucleotide
uguaucagaaggaguuagg

SEQ ID NO: 2556895 - RNA, 19 nt, Artificial Sequence
  Description of Artificial Sequence: Synthetic oligonucleotide
ucuaagaaugguaucgaaa

SEQ ID NO: 2556896 - RNA, 19 nt, Artificial Sequence
  Description of Artificial Sequence: Synthetic oligonucleotide
aaacuggaaagugugacca

SEQ ID NO: 2556897 - RNA, 19 nt, Artificial Sequence
  Description of Artificial Sequence: Synthetic oligonucleotide
aacacauggacaguggugu

SEQ ID NO: 2556898 - RNA, 19 nt, Artificial Sequence
  Description of Artificial Sequence: Synthetic oligonucleotide
acaccuaagaaauuacugu

SEQ ID NO: 2556899 - RNA, 19 nt, Artificial Sequence
  Description of Artificial Sequence: Synthetic oligonucleotide
aacaccuaagaaauuacug

SEQ ID NO: 2556900 - RNA, 19 nt, Artificial Sequence
  Description of Artificial Sequence: Synthetic oligonucleotide
aaaacaaaagcuguauuua

SEQ ID NO: 2556901 - RNA, 19 nt, Artificial Sequence
  Description of Artificial Sequence: Synthetic oligonucleotide
uauucagaacaccuaagaa

SEQ ID NO: 2556902 - RNA, 19 nt, Artificial Sequence
  Description of Artificial Sequence: Synthetic oligonucleotide
guaacauuaauugacacaa

SEQ ID NO: 2556903 - RNA, 19 nt, Artificial Sequence
  Description of Artificial Sequence: Synthetic oligonucleotide
acacgcaacaauaaauagc

SEQ ID NO: 2556904 - RNA, 19 nt, Artificial Sequence
  Description of Artificial Sequence: Synthetic oligonucleotide
cacgcaacaauaaauagca

SEQ ID NO: 2556905 - RNA, 19 nt, Artificial Sequence
  Description of Artificial Sequence: Synthetic oligonucleotide
uuuagaaggcaaaaguguu

SEQ ID NO: 2556906 - RNA, 19 nt, Artificial Sequence
  Description of Artificial Sequence: Synthetic oligonucleotide
gcuguauuuacacaaaaug

SEQ ID NO: 2556907 - RNA, 19 nt, Artificial Sequence
  Description of Artificial Sequence: Synthetic oligonucleotide
uuuguuguuguuguuguug

SEQ ID NO: 2556908 - RNA, 19 nt, Artificial Sequence
  Description of Artificial Sequence: Synthetic oligonucleotide
auuuuaaguauugcauuac

SEQ ID NO: 2556909 - RNA, 19 nt, Artificial Sequence
  Description of Artificial Sequence: Synthetic oligonucleotide
aucagauaaggcuuccauc

SEQ ID NO: 2556910 - RNA, 19 nt, Artificial Sequence
  Description of Artificial Sequence: Synthetic oligonucleotide
aaaaguuuuggagaauuau

SEQ ID NO: 2556911 - RNA, 19 nt, Artificial Sequence
  Description of Artificial Sequence: Synthetic oligonucleotide
accuuuagaaggcaaaagu

SEQ ID NO: 2556912 - RNA, 19 nt, Artificial Sequence
  Description of Artificial Sequence: Synthetic oligonucleotide
acacaauuaaugaaaacug

SEQ ID NO: 2556913 - RNA, 19 nt, Artificial Sequence
  Description of Artificial Sequence: Synthetic oligonucleotide
gacauggaauuuuauucag

SEQ ID NO: 2556914 - RNA, 19 nt, Artificial Sequence
  Description of Artificial Sequence: Synthetic oligonucleotide
agacauggaauuuuauuca

SEQ ID NO: 2556915 - RNA, 19 nt, Artificial Sequence
  Description of Artificial Sequence: Synthetic oligonucleotide
uaaggcuuccaucuuaaaa

SEQ ID NO: 2556916 - RNA, 19 nt, Artificial Sequence
  Description of Artificial Sequence: Synthetic oligonucleotide
auauuuuaaguauugcauu

SEQ ID NO: 2556917 - RNA, 19 nt, Artificial Sequence
  Description of Artificial Sequence: Synthetic oligonucleotide
uucuaaggaaacccaaacu

SEQ ID NO: 2556918 - RNA, 19 nt, Artificial Sequence
  Description of Artificial Sequence: Synthetic oligonucleotide
uuaucuaucugaacacacu

SEQ ID NO: 2556919 - RNA, 19 nt, Artificial Sequence
  Description of Artificial Sequence: Synthetic oligonucleotide
uaucgaaagacauggaauu

SEQ ID NO: 2556920 - RNA, 19 nt, Artificial Sequence
  Description of Artificial Sequence: Synthetic oligonucleotide
ucgauuuguaucagaagga

SEQ ID NO: 2556921 - RNA, 19 nt, Artificial Sequence
  Description of Artificial Sequence: Synthetic oligonucleotide
auaaauagcaucagauaag

SEQ ID NO: 2556922 - RNA, 19 nt, Artificial Sequence
  Description of Artificial Sequence: Synthetic oligonucleotide
gacacaauuaaugaaaacu

SEQ ID NO: 2556923 - RNA, 19 nt, Artificial Sequence
  Description of Artificial Sequence: Synthetic oligonucleotide
gguauauaaccuuuagaag

SEQ ID NO: 2556924 - RNA, 19 nt, Artificial Sequence
  Description of Artificial Sequence: Synthetic oligonucleotide
aaauagcaucagauaaggc

SEQ ID NO: 2556925 - RNA, 19 nt, Artificial Sequence
  Description of Artificial Sequence: Synthetic oligonucleotide
acaauaaauagcaucagau

SEQ ID NO: 2556926 - RNA, 19 nt, Artificial Sequence
  Description of Artificial Sequence: Synthetic oligonucleotide
cauuaauugacacaauuaa

SEQ ID NO: 2556927 - RNA, 19 nt, Artificial Sequence
  Description of Artificial Sequence: Synthetic oligonucleotide
uaucugaacacacuuggua

SEQ ID NO: 2556928 - RNA, 19 nt, Artificial Sequence
  Description of Artificial Sequence: Synthetic oligonucleotide
uuguuguuguuccacagaa

SEQ ID NO: 2556929 - RNA, 19 nt, Artificial Sequence
  Description of Artificial Sequence: Synthetic oligonucleotide
uguaagugcugccaaaaua

SEQ ID NO: 2556930 - RNA, 19 nt, Artificial Sequence
  Description of Artificial Sequence: Synthetic oligonucleotide
uauuuguaaacaugaaguu

SEQ ID NO: 2556931 - RNA, 19 nt, Artificial Sequence
  Description of Artificial Sequence: Synthetic oligonucleotide
uuguuguuguuguuguucc

SEQ ID NO: 2556932 - RNA, 19 nt, Artificial Sequence
  Description of Artificial Sequence: Synthetic oligonucleotide
uguacaaauagaguacccu

SEQ ID NO: 2556933 - RNA, 19 nt, Artificial Sequence
  Description of Artificial Sequence: Synthetic oligonucleotide
uuagggugacuucuaagga

SEQ ID NO: 2556934 - RNA, 19 nt, Artificial Sequence
  Description of Artificial Sequence: Synthetic oligonucleotide
acaauuauuuguaaacaug

SEQ ID NO: 2556935 - RNA, 19 nt, Artificial Sequence
  Description of Artificial Sequence: Synthetic oligonucleotide
uuggcugguauauuuuaag

SEQ ID NO: 2556936 - RNA, 19 nt, Artificial Sequence
  Description of Artificial Sequence: Synthetic oligonucleotide
caaagcaaacaauuauuug

SEQ ID NO: 2556937 - RNA, 19 nt, Artificial Sequence
  Description of Artificial Sequence: Synthetic oligonucleotide
gaaaacuggaaagugugac

SEQ ID NO: 2556938 - RNA, 19 nt, Artificial Sequence
  Description of Artificial Sequence: Synthetic oligonucleotide
ugaagaacuuaaauaggau

SEQ ID NO: 2556939 - RNA, 19 nt, Artificial Sequence
  Description of Artificial Sequence: Synthetic oligonucleotide
aaagugugaccagacacug

SEQ ID NO: 2556940 - RNA, 19 nt, Artificial Sequence
  Description of Artificial Sequence: Synthetic oligonucleotide
auugcauuacaaagcaaac

SEQ ID NO: 2556941 - RNA, 19 nt, Artificial Sequence
  Description of Artificial Sequence: Synthetic oligonucleotide
aaugguaucgaaagacaug

SEQ ID NO: 2556942 - RNA, 19 nt, Artificial Sequence
  Description of Artificial Sequence: Synthetic oligonucleotide
aacuuaaauaggaugcagu

SEQ ID NO: 2556943 - RNA, 19 nt, Artificial Sequence
  Description of Artificial Sequence: Synthetic oligonucleotide
cuugguauauaaccuuuag

SEQ ID NO: 2556944 - RNA, 19 nt, Artificial Sequence
  Description of Artificial Sequence: Synthetic oligonucleotide
acuuaaauaggaugcaguu

SEQ ID NO: 2556945 - RNA, 19 nt, Artificial Sequence
  Description of Artificial Sequence: Synthetic oligonucleotide
uaucuaucugaacacacuu

SEQ ID NO: 2556946 - RNA, 19 nt, Artificial Sequence
  Description of Artificial Sequence: Synthetic oligonucleotide
uguuguuguuguuccacag

SEQ ID NO: 2556947 - RNA, 19 nt, Artificial Sequence
  Description of Artificial Sequence: Synthetic oligonucleotide
acaugaaguuaacagacaa

SEQ ID NO: 2556948 - RNA, 19 nt, Artificial Sequence
  Description of Artificial Sequence: Synthetic oligonucleotide
cuaaaguucucacauagaa

SEQ ID NO: 2556949 - RNA, 19 nt, Artificial Sequence
  Description of Artificial Sequence: Synthetic oligonucleotide
uacuguaaguuauaguuuu

SEQ ID NO: 2556950 - RNA, 19 nt, Artificial Sequence
  Description of Artificial Sequence: Synthetic oligonucleotide
uggagaauuaucuuuuauu

SEQ ID NO: 2556951 - RNA, 19 nt, Artificial Sequence
  Description of Artificial Sequence: Synthetic oligonucleotide
ugccaaaauaguuaucaaa

SEQ ID NO: 2556952 - RNA, 19 nt, Artificial Sequence
  Description of Artificial Sequence: Synthetic oligonucleotide
cuucuaaggaaacccaaac

SEQ ID NO: 2556953 - RNA, 19 nt, Artificial Sequence
  Description of Artificial Sequence: Synthetic oligonucleotide
aacacacuugguauauaac

SEQ ID NO: 2556954 - RNA, 19 nt, Artificial Sequence
  Description of Artificial Sequence: Synthetic oligonucleotide
ucagaaggaguuaggguga

SEQ ID NO: 2556955 - RNA, 19 nt, Artificial Sequence
  Description of Artificial Sequence: Synthetic oligonucleotide
aaggaguuagggugacuuc

SEQ ID NO: 2556956 - RNA, 19 nt, Artificial Sequence
  Description of Artificial Sequence: Synthetic oligonucleotide
aaaguggcuuaucuaucug

SEQ ID NO: 2556957 - RNA, 19 nt, Artificial Sequence
  Description of Artificial Sequence: Synthetic oligonucleotide
ugaaaacuggaaaguguga

SEQ ID NO: 2556958 - RNA, 19 nt, Artificial Sequence
  Description of Artificial Sequence: Synthetic oligonucleotide
uuauaguuuuggcugguau

SEQ ID NO: 2556959 - RNA, 19 nt, Artificial Sequence
  Description of Artificial Sequence: Synthetic oligonucleotide
aaauacaaaguggcuuauc

SEQ ID NO: 2556960 - RNA, 19 nt, Artificial Sequence
  Description of Artificial Sequence: Synthetic oligonucleotide
uguaaacaugaaguuaaca

SEQ ID NO: 2556961 - RNA, 19 nt, Artificial Sequence
  Description of Artificial Sequence: Synthetic oligonucleotide
gaaaucuaagaaugguauc

SEQ ID NO: 2556962 - RNA, 19 nt, Artificial Sequence
  Description of Artificial Sequence: Synthetic oligonucleotide
agaaaucuaagaaugguau

SEQ ID NO: 2556963 - RNA, 19 nt, Artificial Sequence
  Description of Artificial Sequence: Synthetic oligonucleotide
uuguaucagaaggaguuag

SEQ ID NO: 2556964 - RNA, 19 nt, Artificial Sequence
  Description of Artificial Sequence: Synthetic oligonucleotide
auuuguaucagaaggaguu

SEQ ID NO: 2556965 - RNA, 19 nt, Artificial Sequence
  Description of Artificial Sequence: Synthetic oligonucleotide
cuguaaguuauaguuuugg

SEQ ID NO: 2556966 - RNA, 19 nt, Artificial Sequence
  Description of Artificial Sequence: Synthetic oligonucleotide
aaccuuuagaaggcaaaag

SEQ ID NO: 2556967 - RNA, 19 nt, Artificial Sequence
  Description of Artificial Sequence: Synthetic oligonucleotide
gugacuucuaaggaaaccc

SEQ ID NO: 2556968 - RNA, 19 nt, Artificial Sequence
  Description of Artificial Sequence: Synthetic oligonucleotide
uauaaccuuuagaaggcaa

SEQ ID NO: 2556969 - RNA, 19 nt, Artificial Sequence
  Description of Artificial Sequence: Synthetic oligonucleotide
gaacuuaaauaggaugcag

SEQ ID NO: 2556970 - RNA, 19 nt, Artificial Sequence
  Description of Artificial Sequence: Synthetic oligonucleotide
aguuaucaaacaaacacau

SEQ ID NO: 2556971 - RNA, 19 nt, Artificial Sequence
  Description of Artificial Sequence: Synthetic oligonucleotide
ugacuucuaaggaaaccca

SEQ ID NO: 2556972 - RNA, 19 nt, Artificial Sequence
  Description of Artificial Sequence: Synthetic oligonucleotide
aucugaacacacuugguau

SEQ ID NO: 2556973 - RNA, 19 nt, Artificial Sequence
  Description of Artificial Sequence: Synthetic oligonucleotide
aaucuaagaaugguaucga

SEQ ID NO: 2556974 - RNA, 19 nt, Artificial Sequence
  Description of Artificial Sequence: Synthetic oligonucleotide
uauaguuuuggcugguaua

SEQ ID NO: 2556975 - RNA, 19 nt, Artificial Sequence
  Description of Artificial Sequence: Synthetic oligonucleotide
guaaguuauaguuuuggcu

SEQ ID NO: 2556976 - RNA, 19 nt, Artificial Sequence
  Description of Artificial Sequence: Synthetic oligonucleotide
uuacuguaaguuauaguuu

SEQ ID NO: 2556977 - RNA, 19 nt, Artificial Sequence
  Description of Artificial Sequence: Synthetic oligonucleotide
agaacaccuaagaaauuac

SEQ ID NO: 2556978 - RNA, 19 nt, Artificial Sequence
  Description of Artificial Sequence: Synthetic oligonucleotide
caugaaguuaacagacaac

SEQ ID NO: 2556979 - RNA, 19 nt, Artificial Sequence
  Description of Artificial Sequence: Synthetic oligonucleotide
ugaaaaguuuuggagaauu

SEQ ID NO: 2556980 - RNA, 19 nt, Artificial Sequence
  Description of Artificial Sequence: Synthetic oligonucleotide
cacacgcaacaauaaauag

SEQ ID NO: 2556981 - RNA, 19 nt, Artificial Sequence
  Description of Artificial Sequence: Synthetic oligonucleotide
ggaaagugugaccagacac

SEQ ID NO: 2556982 - RNA, 19 nt, Artificial Sequence
  Description of Artificial Sequence: Synthetic oligonucleotide
cuuaaauaggaugcaguug

SEQ ID NO: 2556983 - RNA, 19 nt, Artificial Sequence
  Description of Artificial Sequence: Synthetic oligonucleotide
aggaaacccaaacuggaga

SEQ ID NO: 2556984 - RNA, 19 nt, Artificial Sequence
  Description of Artificial Sequence: Synthetic oligonucleotide
uugcauuacaaagcaaaca

SEQ ID NO: 2556985 - RNA, 19 nt, Artificial Sequence
  Description of Artificial Sequence: Synthetic oligonucleotide
aguuaacagacaacuaaag

SEQ ID NO: 2556986 - RNA, 19 nt, Artificial Sequence
  Description of Artificial Sequence: Synthetic oligonucleotide
aguuagggugacuucuaag

SEQ ID NO: 2556987 - RNA, 19 nt, Artificial Sequence
  Description of Artificial Sequence: Synthetic oligonucleotide
uuuauuuauuauugagguu

SEQ ID NO: 2556988 - RNA, 19 nt, Artificial Sequence
  Description of Artificial Sequence: Synthetic oligonucleotide
cauggaauuuuauucagaa

SEQ ID NO: 2556989 - RNA, 19 nt, Artificial Sequence
  Description of Artificial Sequence: Synthetic oligonucleotide
uuguuguuguuguuguugu

SEQ ID NO: 2556990 - RNA, 19 nt, Artificial Sequence
  Description of Artificial Sequence: Synthetic oligonucleotide
guuguuguuguuguuguug

SEQ ID NO: 2556991 - RNA, 19 nt, Artificial Sequence
  Description of Artificial Sequence: Synthetic oligonucleotide
aaauaggaugcaguuggca

SEQ ID NO: 2556992 - RNA, 19 nt, Artificial Sequence
  Description of Artificial Sequence: Synthetic oligonucleotide
aauuauuuguaaacaugaa

SEQ ID NO: 2556993 - RNA, 19 nt, Artificial Sequence
  Description of Artificial Sequence: Synthetic oligonucleotide
ugguaacauuaauugacac

SEQ ID NO: 2556994 - RNA, 19 nt, Artificial Sequence
  Description of Artificial Sequence: Synthetic oligonucleotide
acagaaaucuaagaauggu

SEQ ID NO: 2556995 - RNA, 19 nt, Artificial Sequence
  Description of Artificial Sequence: Synthetic oligonucleotide
uuagaaggcaaaaguguuu

SEQ ID NO: 2556996 - RNA, 19 nt, Artificial Sequence
  Description of Artificial Sequence: Synthetic oligonucleotide
aaacacauggacaguggug

SEQ ID NO: 2556997 - RNA, 19 nt, Artificial Sequence
  Description of Artificial Sequence: Synthetic oligonucleotide
aguuuuggcugguauauuu

SEQ ID NO: 2556998 - RNA, 19 nt, Artificial Sequence
  Description of Artificial Sequence: Synthetic oligonucleotide
gccaaaauaguuaucaaac

SEQ ID NO: 2556999 - RNA, 19 nt, Artificial Sequence
  Description of Artificial Sequence: Synthetic oligonucleotide
uuuggcugguauauuuuaa

SEQ ID NO: 2557000 - RNA, 19 nt, Artificial Sequence
  Description of Artificial Sequence: Synthetic oligonucleotide
aacuggaaagugugaccag

SEQ ID NO: 2557001 - RNA, 19 nt, Artificial Sequence
  Description of Artificial Sequence: Synthetic oligonucleotide
gcaacaauaaauagcauca

SEQ ID NO: 2557002 - RNA, 19 nt, Artificial Sequence
  Description of Artificial Sequence: Synthetic oligonucleotide
auguacaaauagaguaccc

SEQ ID NO: 2557003 - RNA, 19 nt, Artificial Sequence
  Description of Artificial Sequence: Synthetic oligonucleotide
gaacacacuugguauauaa

SEQ ID NO: 2557004 - RNA, 19 nt, Artificial Sequence
  Description of Artificial Sequence: Synthetic oligonucleotide
ugaaguuaacagacaacua

SEQ ID NO: 2557005 - RNA, 19 nt, Artificial Sequence
  Description of Artificial Sequence: Synthetic oligonucleotide
cuuuagaaggcaaaagugu

SEQ ID NO: 2557006 - RNA, 19 nt, Artificial Sequence
  Description of Artificial Sequence: Synthetic oligonucleotide
auaguuuuggcugguauau

SEQ ID NO: 2557007 - RNA, 19 nt, Artificial Sequence
  Description of Artificial Sequence: Synthetic oligonucleotide
aaggaaacccaaacuggag

SEQ ID NO: 2557008 - RNA, 19 nt, Artificial Sequence
  Description of Artificial Sequence: Synthetic oligonucleotide
aaaaguguuuugguuuggu

SEQ ID NO: 2557009 - RNA, 19 nt, Artificial Sequence
  Description of Artificial Sequence: Synthetic oligonucleotide
ugcuucaagcuaccacacg

SEQ ID NO: 2557010 - RNA, 19 nt, Artificial Sequence
  Description of Artificial Sequence: Synthetic oligonucleotide
ugacacaauuaaugaaaac

SEQ ID NO: 2557011 - RNA, 19 nt, Artificial Sequence
  Description of Artificial Sequence: Synthetic oligonucleotide
uuggagaauuaucuuuuau

SEQ ID NO: 2557012 - RNA, 19 nt, Artificial Sequence
  Description of Artificial Sequence: Synthetic oligonucleotide
auuaauugacacaauuaau

SEQ ID NO: 2557013 - RNA, 19 nt, Artificial Sequence
  Description of Artificial Sequence: Synthetic oligonucleotide
uggcugguauauuuuaagu

SEQ ID NO: 2557014 - RNA, 19 nt, Artificial Sequence
  Description of Artificial Sequence: Synthetic oligonucleotide
aacagacaacuaaaguucu

SEQ ID NO: 2557015 - RNA, 19 nt, Artificial Sequence
  Description of Artificial Sequence: Synthetic oligonucleotide
gcuucaagcuaccacacgc

SEQ ID NO: 2557016 - RNA, 19 nt, Artificial Sequence
  Description of Artificial Sequence: Synthetic oligonucleotide
gagaauuaucuuuuauuua

SEQ ID NO: 2557017 - RNA, 19 nt, Artificial Sequence
  Description of Artificial Sequence: Synthetic oligonucleotide
gguaacauuaauugacaca

SEQ ID NO: 2557018 - RNA, 19 nt, Artificial Sequence
  Description of Artificial Sequence: Synthetic oligonucleotide
uaagugcugccaaaauagu

SEQ ID NO: 2557019 - RNA, 19 nt, Artificial Sequence
  Description of Artificial Sequence: Synthetic oligonucleotide
ccuuuagaaggcaaaagug

SEQ ID NO: 2557020 - RNA, 19 nt, Artificial Sequence
  Description of Artificial Sequence: Synthetic oligonucleotide
uagggugacuucuaaggaa

SEQ ID NO: 2557021 - RNA, 19 nt, Artificial Sequence
  Description of Artificial Sequence: Synthetic oligonucleotide
uuguaaacaugaaguuaac

SEQ ID NO: 2557022 - RNA, 19 nt, Artificial Sequence
  Description of Artificial Sequence: Synthetic oligonucleotide
auagcaucagauaaggcuu

SEQ ID NO: 2557023 - RNA, 19 nt, Artificial Sequence
  Description of Artificial Sequence: Synthetic oligonucleotide
agaacuuaaauaggaugca

SEQ ID NO: 2557024 - RNA, 19 nt, Artificial Sequence
  Description of Artificial Sequence: Synthetic oligonucleotide
ugaccagacacugcguuug

SEQ ID NO: 2557025 - RNA, 19 nt, Artificial Sequence
  Description of Artificial Sequence: Synthetic oligonucleotide
ucugaacacacuugguaua

SEQ ID NO: 2557026 - RNA, 19 nt, Artificial Sequence
  Description of Artificial Sequence: Synthetic oligonucleotide
uguuuugguuugguugggg

SEQ ID NO: 2557027 - RNA, 19 nt, Artificial Sequence
  Description of Artificial Sequence: Synthetic oligonucleotide
uucaagcuaccacacgcaa

SEQ ID NO: 2557028 - RNA, 19 nt, Artificial Sequence
  Description of Artificial Sequence: Synthetic oligonucleotide
ccuaagaaauuacuguaag

SEQ ID NO: 2557029 - RNA, 19 nt, Artificial Sequence
  Description of Artificial Sequence: Synthetic oligonucleotide
guuguuguuguuguuguuc

SEQ ID NO: 2557030 - RNA, 19 nt, Artificial Sequence
  Description of Artificial Sequence: Synthetic oligonucleotide
aagugugaccagacacugc

SEQ ID NO: 2557031 - RNA, 19 nt, Artificial Sequence
  Description of Artificial Sequence: Synthetic oligonucleotide
cauuacaaagcaaacaauu

SEQ ID NO: 2557032 - RNA, 19 nt, Artificial Sequence
  Description of Artificial Sequence: Synthetic oligonucleotide
acauuaauugacacaauua

SEQ ID NO: 2557033 - RNA, 19 nt, Artificial Sequence
  Description of Artificial Sequence: Synthetic oligonucleotide
ugugaccagacacugcguu

SEQ ID NO: 2557034 - RNA, 19 nt, Artificial Sequence
  Description of Artificial Sequence: Synthetic oligonucleotide
acaaagcaaacaauuauuu

SEQ ID NO: 2557035 - RNA, 19 nt, Artificial Sequence
  Description of Artificial Sequence: Synthetic oligonucleotide
caaauagaguacccuuuug

SEQ ID NO: 2557036 - RNA, 19 nt, Artificial Sequence
  Description of Artificial Sequence: Synthetic oligonucleotide
acaaacacauggacagugg

SEQ ID NO: 2557037 - RNA, 19 nt, Artificial Sequence
  Description of Artificial Sequence: Synthetic oligonucleotide
aaaauacaaaguggcuuau

SEQ ID NO: 2557038 - RNA, 19 nt, Artificial Sequence
  Description of Artificial Sequence: Synthetic oligonucleotide
ccaaacuggagacacacac

SEQ ID NO: 2557039 - RNA, 19 nt, Artificial Sequence
  Description of Artificial Sequence: Synthetic oligonucleotide
aguggugugcuucaagcua

SEQ ID NO: 2557040 - RNA, 19 nt, Artificial Sequence
  Description of Artificial Sequence: Synthetic oligonucleotide
acaaaguggcuuaucuauc

SEQ ID NO: 2557041 - RNA, 19 nt, Artificial Sequence
  Description of Artificial Sequence: Synthetic oligonucleotide
uaaccuuuagaaggcaaaa

SEQ ID NO: 2557042 - RNA, 19 nt, Artificial Sequence
  Description of Artificial Sequence: Synthetic oligonucleotide
gguauauuuuaaguauugc

SEQ ID NO: 2557043 - RNA, 19 nt, Artificial Sequence
  Description of Artificial Sequence: Synthetic oligonucleotide
uaggaugcaguuggcaccc

SEQ ID NO: 2557044 - RNA, 19 nt, Artificial Sequence
  Description of Artificial Sequence: Synthetic oligonucleotide
agaaugguaucgaaagaca

SEQ ID NO: 2557045 - RNA, 19 nt, Artificial Sequence
  Description of Artificial Sequence: Synthetic oligonucleotide
agcaaacaauuauuuguaa

SEQ ID NO: 2557046 - RNA, 19 nt, Artificial Sequence
  Description of Artificial Sequence: Synthetic oligonucleotide
cuggaaagugugaccagac

SEQ ID NO: 2557047 - RNA, 19 nt, Artificial Sequence
  Description of Artificial Sequence: Synthetic oligonucleotide
guuaucaaacaaacacaug

SEQ ID NO: 2557048 - RNA, 19 nt, Artificial Sequence
  Description of Artificial Sequence: Synthetic oligonucleotide
aaagcuguauuuacacaaa

SEQ ID NO: 2557049 - RNA, 19 nt, Artificial Sequence
  Description of Artificial Sequence: Synthetic oligonucleotide
ggaauuuuauucagaacac

SEQ ID NO: 2557050 - RNA, 19 nt, Artificial Sequence
  Description of Artificial Sequence: Synthetic oligonucleotide
aguacccuuuugaagaacu

SEQ ID NO: 2557051 - RNA, 19 nt, Artificial Sequence
  Description of Artificial Sequence: Synthetic oligonucleotide
auacaaaguggcuuaucua

SEQ ID NO: 2557052 - RNA, 19 nt, Artificial Sequence
  Description of Artificial Sequence: Synthetic oligonucleotide
acacugcguuuguaagugc

SEQ ID NO: 2557053 - RNA, 19 nt, Artificial Sequence
  Description of Artificial Sequence: Synthetic oligonucleotide
acaacaaauugaaaaguuu

SEQ ID NO: 2557054 - RNA, 19 nt, Artificial Sequence
  Description of Artificial Sequence: Synthetic oligonucleotide
agauaaggcuuccaucuua

SEQ ID NO: 2557055 - RNA, 19 nt, Artificial Sequence
  Description of Artificial Sequence: Synthetic oligonucleotide
uguuguuguuccacagaaa

SEQ ID NO: 2557056 - RNA, 19 nt, Artificial Sequence
  Description of Artificial Sequence: Synthetic oligonucleotide
uuguaagugcugccaaaau

SEQ ID NO: 2557057 - RNA, 19 nt, Artificial Sequence
  Description of Artificial Sequence: Synthetic oligonucleotide
gaacaacaaauugaaaagu

SEQ ID NO: 2557058 - RNA, 19 nt, Artificial Sequence
  Description of Artificial Sequence: Synthetic oligonucleotide
ugcguuuguaagugcugcc

SEQ ID NO: 2557059 - RNA, 19 nt, Artificial Sequence
  Description of Artificial Sequence: Synthetic oligonucleotide
uaccacacgcaacaauaaa

SEQ ID NO: 2557060 - RNA, 19 nt, Artificial Sequence
  Description of Artificial Sequence: Synthetic oligonucleotide
agcaucagauaaggcuucc

SEQ ID NO: 2557061 - RNA, 19 nt, Artificial Sequence
  Description of Artificial Sequence: Synthetic oligonucleotide
cagaaaucuaagaauggua

SEQ ID NO: 2557062 - RNA, 19 nt, Artificial Sequence
  Description of Artificial Sequence: Synthetic oligonucleotide
acacuugguauauaaccuu

SEQ ID NO: 2557063 - RNA, 19 nt, Artificial Sequence
  Description of Artificial Sequence: Synthetic oligonucleotide
ucgaaagacauggaauuuu

SEQ ID NO: 2557064 - RNA, 19 nt, Artificial Sequence
  Description of Artificial Sequence: Synthetic oligonucleotide
gguaucgaaagacauggaa

SEQ ID NO: 2557065 - RNA, 19 nt, Artificial Sequence
  Description of Artificial Sequence: Synthetic oligonucleotide
aucuaagaaugguaucgaa

SEQ ID NO: 2557066 - RNA, 19 nt, Artificial Sequence
  Description of Artificial Sequence: Synthetic oligonucleotide
agaaggcaaaaguguuuug

SEQ ID NO: 2557067 - RNA, 19 nt, Artificial Sequence
  Description of Artificial Sequence: Synthetic oligonucleotide
caacaaauugaaaaguuuu

SEQ ID NO: 2557068 - RNA, 19 nt, Artificial Sequence
  Description of Artificial Sequence: Synthetic oligonucleotide
uaacauuaauugacacaau

SEQ ID NO: 2557069 - RNA, 19 nt, Artificial Sequence
  Description of Artificial Sequence: Synthetic oligonucleotide
guuguuguuguuccacaga

SEQ ID NO: 2557070 - RNA, 19 nt, Artificial Sequence
  Description of Artificial Sequence: Synthetic oligonucleotide
aguuggcacccaugguaac

SEQ ID NO: 2557071 - RNA, 19 nt, Artificial Sequence
  Description of Artificial Sequence: Synthetic oligonucleotide
ggagaauuaucuuuuauuu

SEQ ID NO: 2557072 - RNA, 19 nt, Artificial Sequence
  Description of Artificial Sequence: Synthetic oligonucleotide
auaaccuuuagaaggcaaa

SEQ ID NO: 2557073 - RNA, 19 nt, Artificial Sequence
  Description of Artificial Sequence: Synthetic oligonucleotide
aucuaucugaacacacuug

SEQ ID NO: 2557074 - RNA, 19 nt, Artificial Sequence
  Description of Artificial Sequence: Synthetic oligonucleotide
uagcaucagauaaggcuuc

SEQ ID NO: 2557075 - RNA, 19 nt, Artificial Sequence
  Description of Artificial Sequence: Synthetic oligonucleotide
uuuguaucagaaggaguua

SEQ ID NO: 2557076 - RNA, 19 nt, Artificial Sequence
  Description of Artificial Sequence: Synthetic oligonucleotide
cuaagaaauuacuguaagu

SEQ ID NO: 2557077 - RNA, 19 nt, Artificial Sequence
  Description of Artificial Sequence: Synthetic oligonucleotide
ggcuuaucuaucugaacac

SEQ ID NO: 2557078 - RNA, 19 nt, Artificial Sequence
  Description of Artificial Sequence: Synthetic oligonucleotide
cugcguuuguaagugcugc

SEQ ID NO: 2557079 - RNA, 19 nt, Artificial Sequence
  Description of Artificial Sequence: Synthetic oligonucleotide
gauaaggcuuccaucuuaa

SEQ ID NO: 2557080 - RNA, 19 nt, Artificial Sequence
  Description of Artificial Sequence: Synthetic oligonucleotide
gugugcuucaagcuaccac

SEQ ID NO: 2557081 - RNA, 19 nt, Artificial Sequence
  Description of Artificial Sequence: Synthetic oligonucleotide
aggcaaaaguguuuugguu

SEQ ID NO: 2557082 - RNA, 19 nt, Artificial Sequence
  Description of Artificial Sequence: Synthetic oligonucleotide
gaaagugugaccagacacu

SEQ ID NO: 2557083 - RNA, 19 nt, Artificial Sequence
  Description of Artificial Sequence: Synthetic oligonucleotide
accacacgcaacaauaaau

SEQ ID NO: 2557084 - RNA, 19 nt, Artificial Sequence
  Description of Artificial Sequence: Synthetic oligonucleotide
cacacuugguauauaaccu

SEQ ID NO: 2557085 - RNA, 19 nt, Artificial Sequence
  Description of Artificial Sequence: Synthetic oligonucleotide
cgcaacaauaaauagcauc

SEQ ID NO: 2557086 - RNA, 19 nt, Artificial Sequence
  Description of Artificial Sequence: Synthetic oligonucleotide
caaaaguguuuugguuugg

SEQ ID NO: 2557087 - RNA, 19 nt, Artificial Sequence
  Description of Artificial Sequence: Synthetic oligonucleotide
caaacuggagacacacaca

SEQ ID NO: 2557088 - RNA, 19 nt, Artificial Sequence
  Description of Artificial Sequence: Synthetic oligonucleotide
cuucaagcuaccacacgca

SEQ ID NO: 2557089 - RNA, 19 nt, Artificial Sequence
  Description of Artificial Sequence: Synthetic oligonucleotide
uacccuuuugaagaacuua

SEQ ID NO: 2557090 - RNA, 19 nt, Artificial Sequence
  Description of Artificial Sequence: Synthetic oligonucleotide
ugguaucgaaagacaugga

SEQ ID NO: 2557091 - RNA, 19 nt, Artificial Sequence
  Description of Artificial Sequence: Synthetic oligonucleotide
auauaaccuuuagaaggca

SEQ ID NO: 2557092 - RNA, 19 nt, Artificial Sequence
  Description of Artificial Sequence: Synthetic oligonucleotide
agaguacccuuuugaagaa

SEQ ID NO: 2557093 - RNA, 19 nt, Artificial Sequence
  Description of Artificial Sequence: Synthetic oligonucleotide
acccuuuugaagaacuuaa

SEQ ID NO: 2557094 - RNA, 19 nt, Artificial Sequence
  Description of Artificial Sequence: Synthetic oligonucleotide
cacauggacaguggugugc

SEQ ID NO: 2557095 - RNA, 19 nt, Artificial Sequence
  Description of Artificial Sequence: Synthetic oligonucleotide
ucagaacaccuaagaaauu

SEQ ID NO: 2557096 - RNA, 19 nt, Artificial Sequence
  Description of Artificial Sequence: Synthetic oligonucleotide
gcugguauauuuuaaguau

SEQ ID NO: 2557097 - RNA, 19 nt, Artificial Sequence
  Description of Artificial Sequence: Synthetic oligonucleotide
accuaagaaauuacuguaa

SEQ ID NO: 2557098 - RNA, 19 nt, Artificial Sequence
  Description of Artificial Sequence: Synthetic oligonucleotide
acauggacaguggugugcu

SEQ ID NO: 2557099 - RNA, 19 nt, Artificial Sequence
  Description of Artificial Sequence: Synthetic oligonucleotide
acuguaaguuauaguuuug

SEQ ID NO: 2557100 - RNA, 19 nt, Artificial Sequence
  Description of Artificial Sequence: Synthetic oligonucleotide
gauuuguaucagaaggagu

SEQ ID NO: 2557101 - RNA, 19 nt, Artificial Sequence
  Description of Artificial Sequence: Synthetic oligonucleotide
uuuuguuguuguuguuguu

SEQ ID NO: 2557102 - RNA, 19 nt, Artificial Sequence
  Description of Artificial Sequence: Synthetic oligonucleotide
acauggaauuuuauucaga

SEQ ID NO: 2557103 - RNA, 19 nt, Artificial Sequence
  Description of Artificial Sequence: Synthetic oligonucleotide
gaaugguaucgaaagacau

SEQ ID NO: 2557104 - RNA, 19 nt, Artificial Sequence
  Description of Artificial Sequence: Synthetic oligonucleotide
uggugugcuucaagcuacc

SEQ ID NO: 2557105 - RNA, 19 nt, Artificial Sequence
  Description of Artificial Sequence: Synthetic oligonucleotide
acuucuaaggaaacccaaa

SEQ ID NO: 2557106 - RNA, 19 nt, Artificial Sequence
  Description of Artificial Sequence: Synthetic oligonucleotide
guaucgaaagacauggaau

SEQ ID NO: 2557107 - RNA, 19 nt, Artificial Sequence
  Description of Artificial Sequence: Synthetic oligonucleotide
aguggcuuaucuaucugaa

SEQ ID NO: 2557108 - RNA, 19 nt, Artificial Sequence
  Description of Artificial Sequence: Synthetic oligonucleotide
ggugacuucuaaggaaacc

SEQ ID NO: 2557109 - RNA, 19 nt, Artificial Sequence
  Description of Artificial Sequence: Synthetic oligonucleotide
guggugugcuucaagcuac

SEQ ID NO: 2557110 - RNA, 19 nt, Artificial Sequence
  Description of Artificial Sequence: Synthetic oligonucleotide
guggcuuaucuaucugaac

SEQ ID NO: 2557111 - RNA, 19 nt, Artificial Sequence
  Description of Artificial Sequence: Synthetic oligonucleotide
gacuucuaaggaaacccaa

SEQ ID NO: 2557112 - RNA, 19 nt, Artificial Sequence
  Description of Artificial Sequence: Synthetic oligonucleotide
ggcugguauauuuuaagua

SEQ ID NO: 2557113 - RNA, 19 nt, Artificial Sequence
  Description of Artificial Sequence: Synthetic oligonucleotide
aguuauaguuuuggcuggu

SEQ ID NO: 2557114 - RNA, 19 nt, Artificial Sequence
  Description of Artificial Sequence: Synthetic oligonucleotide
gaacaccuaagaaauuacu

SEQ ID NO: 2557115 - RNA, 19 nt, Artificial Sequence
  Description of Artificial Sequence: Synthetic oligonucleotide
agcuaccacacgcaacaau

SEQ ID NO: 2557116 - RNA, 19 nt, Artificial Sequence
  Description of Artificial Sequence: Synthetic oligonucleotide
uguuguuguuguuguuguu

SEQ ID NO: 2557117 - RNA, 19 nt, Artificial Sequence
  Description of Artificial Sequence: Synthetic oligonucleotide
aucgaaagacauggaauuu

SEQ ID NO: 2557118 - RNA, 19 nt, Artificial Sequence
  Description of Artificial Sequence: Synthetic oligonucleotide
acugcguuuguaagugcug

SEQ ID NO: 2557119 - RNA, 19 nt, Artificial Sequence
  Description of Artificial Sequence: Synthetic oligonucleotide
acccaugguaacauuaauu

SEQ ID NO: 2557120 - RNA, 19 nt, Artificial Sequence
  Description of Artificial Sequence: Synthetic oligonucleotide
ggcaaaaguguuuugguuu

SEQ ID NO: 2557121 - RNA, 19 nt, Artificial Sequence
  Description of Artificial Sequence: Synthetic oligonucleotide
gaguuagggugacuucuaa

SEQ ID NO: 2557122 - RNA, 19 nt, Artificial Sequence
  Description of Artificial Sequence: Synthetic oligonucleotide
ugcugccaaaauaguuauc

SEQ ID NO: 2557123 - RNA, 19 nt, Artificial Sequence
  Description of Artificial Sequence: Synthetic oligonucleotide
cuaccacacgcaacaauaa

SEQ ID NO: 2557124 - RNA, 19 nt, Artificial Sequence
  Description of Artificial Sequence: Synthetic oligonucleotide
caguuggcacccaugguaa

SEQ ID NO: 2557125 - RNA, 19 nt, Artificial Sequence
  Description of Artificial Sequence: Synthetic oligonucleotide
guuggcacccaugguaaca

SEQ ID NO: 2557126 - RNA, 19 nt, Artificial Sequence
  Description of Artificial Sequence: Synthetic oligonucleotide
gcaguuggcacccauggua

SEQ ID NO: 2557127 - RNA, 19 nt, Artificial Sequence
  Description of Artificial Sequence: Synthetic oligonucleotide
cgauuuguaucagaaggag

SEQ ID NO: 2557128 - RNA, 19 nt, Artificial Sequence
  Description of Artificial Sequence: Synthetic oligonucleotide
caaacacauggacaguggu

SEQ ID NO: 2557129 - RNA, 19 nt, Artificial Sequence
  Description of Artificial Sequence: Synthetic oligonucleotide
gaguacccuuuugaagaac

SEQ ID NO: 2557130 - RNA, 19 nt, Artificial Sequence
  Description of Artificial Sequence: Synthetic oligonucleotide
gcuaccacacgcaacaaua

SEQ ID NO: 2557131 - RNA, 19 nt, Artificial Sequence
  Description of Artificial Sequence: Synthetic oligonucleotide
caacuaaaguucucacaua

SEQ ID NO: 2557132 - RNA, 19 nt, Artificial Sequence
  Description of Artificial Sequence: Synthetic oligonucleotide
acuugguauauaaccuuua

SEQ ID NO: 2557133 - RNA, 19 nt, Artificial Sequence
  Description of Artificial Sequence: Synthetic oligonucleotide
ccaugguaacauuaauuga

SEQ ID NO: 2557134 - RNA, 19 nt, Artificial Sequence
  Description of Artificial Sequence: Synthetic oligonucleotide
cugguauauuuuaaguauu

SEQ ID NO: 2557135 - RNA, 19 nt, Artificial Sequence
  Description of Artificial Sequence: Synthetic oligonucleotide
caucagauaaggcuuccau

SEQ ID NO: 2557136 - RNA, 19 nt, Artificial Sequence
  Description of Artificial Sequence: Synthetic oligonucleotide
ugaacacacuugguauaua

SEQ ID NO: 2557137 - RNA, 19 nt, Artificial Sequence
  Description of Artificial Sequence: Synthetic oligonucleotide
gugcuucaagcuaccacac

SEQ ID NO: 2557138 - RNA, 19 nt, Artificial Sequence
  Description of Artificial Sequence: Synthetic oligonucleotide
gcuuaucuaucugaacaca

SEQ ID NO: 2557139 - RNA, 19 nt, Artificial Sequence
  Description of Artificial Sequence: Synthetic oligonucleotide
cuaucugaacacacuuggu

SEQ ID NO: 2557140 - RNA, 19 nt, Artificial Sequence
  Description of Artificial Sequence: Synthetic oligonucleotide
gaaagacauggaauuuuau

SEQ ID NO: 2557141 - RNA, 19 nt, Artificial Sequence
  Description of Artificial Sequence: Synthetic oligonucleotide
cacugcguuuguaagugcu

SEQ ID NO: 2557142 - RNA, 19 nt, Artificial Sequence
  Description of Artificial Sequence: Synthetic oligonucleotide
cagaaggaguuagggugac

SEQ ID NO: 2557143 - RNA, 19 nt, Artificial Sequence
  Description of Artificial Sequence: Synthetic oligonucleotide
ccacacgcaacaauaaaua

SEQ ID NO: 2557144 - RNA, 19 nt, Artificial Sequence
  Description of Artificial Sequence: Synthetic oligonucleotide
gugcugccaaaauaguuau

SEQ ID NO: 2557145 - RNA, 19 nt, Artificial Sequence
  Description of Artificial Sequence: Synthetic oligonucleotide
uaguuuuggcugguauauu

SEQ ID NO: 2557146 - RNA, 19 nt, Artificial Sequence
  Description of Artificial Sequence: Synthetic oligonucleotide
cacuugguauauaaccuuu

SEQ ID NO: 2557147 - RNA, 19 nt, Artificial Sequence
  Description of Artificial Sequence: Synthetic oligonucleotide
aagcuaccacacgcaacaa

SEQ ID NO: 2557148 - RNA, 19 nt, Artificial Sequence
  Description of Artificial Sequence: Synthetic oligonucleotide
guuauaguuuuggcuggua

SEQ ID NO: 2557149 - RNA, 19 nt, Artificial Sequence
  Description of Artificial Sequence: Synthetic oligonucleotide
ccuuuugaagaacuuaaau

SEQ ID NO: 2557150 - RNA, 19 nt, Artificial Sequence
  Description of Artificial Sequence: Synthetic oligonucleotide
caguggugugcuucaagcu

SEQ ID NO: 2557151 - RNA, 19 nt, Artificial Sequence
  Description of Artificial Sequence: Synthetic oligonucleotide
gcguuuguaagugcugcca

SEQ ID NO: 2557152 - RNA, 19 nt, Artificial Sequence
  Description of Artificial Sequence: Synthetic oligonucleotide
guuuuggcugguauauuuu

SEQ ID NO: 2557153 - RNA, 19 nt, Artificial Sequence
  Description of Artificial Sequence: Synthetic oligonucleotide
cugaacacacuugguauau

SEQ ID NO: 2557154 - RNA, 19 nt, Artificial Sequence
  Description of Artificial Sequence: Synthetic oligonucleotide
cgaaagacauggaauuuua

SEQ ID NO: 2557155 - RNA, 19 nt, Artificial Sequence
  Description of Artificial Sequence: Synthetic oligonucleotide
acgcaacaauaaauagcau

SEQ ID NO: 2557156 - RNA, 19 nt, Artificial Sequence
  Description of Artificial Sequence: Synthetic oligonucleotide
uggcacccaugguaacauu

SEQ ID NO: 2557157 - RNA, 19 nt, Artificial Sequence
  Description of Artificial Sequence: Synthetic oligonucleotide
gugaccagacacugcguuu

SEQ ID NO: 2557158 - RNA, 19 nt, Artificial Sequence
  Description of Artificial Sequence: Synthetic oligonucleotide
gcauuacaaagcaaacaau

SEQ ID NO: 2557159 - RNA, 19 nt, Artificial Sequence
  Description of Artificial Sequence: Synthetic oligonucleotide
gcacccaugguaacauuaa

SEQ ID NO: 2557160 - RNA, 19 nt, Artificial Sequence
  Description of Artificial Sequence: Synthetic oligonucleotide
gcaucagauaaggcuucca

SEQ ID NO: 2557161 - RNA, 19 nt, Artificial Sequence
  Description of Artificial Sequence: Synthetic oligonucleotide
ggaguuagggugacuucua

SEQ ID NO: 2557162 - RNA, 19 nt, Artificial Sequence
  Description of Artificial Sequence: Synthetic oligonucleotide
ggugugcuucaagcuacca

SEQ ID NO: 2557163 - RNA, 19 nt, Artificial Sequence
  Description of Artificial Sequence: Synthetic oligonucleotide
cacccaugguaacauuaau

SEQ ID NO: 2557164 - RNA, 19 nt, Artificial Sequence
  Description of Artificial Sequence: Synthetic oligonucleotide
guacccuuuugaagaacuu

SEQ ID NO: 2557165 - RNA, 19 nt, Artificial Sequence
  Description of Artificial Sequence: Synthetic oligonucleotide
cccaaacuggagacacaca

SEQ ID NO: 2557166 - RNA, 19 nt, Artificial Sequence
  Description of Artificial Sequence: Synthetic oligonucleotide
aggaugcaguuggcaccca

SEQ ID NO: 2557167 - RNA, 19 nt, Artificial Sequence
  Description of Artificial Sequence: Synthetic oligonucleotide
gugugaccagacacugcgu

SEQ ID NO: 2557168 - RNA, 19 nt, Artificial Sequence
  Description of Artificial Sequence: Synthetic oligonucleotide
ggaugcaguuggcacccau

SEQ ID NO: 2557169 - RNA, 19 nt, Artificial Sequence
  Description of Artificial Sequence: Synthetic oligonucleotide
ccccucgauuuguaucaga

SEQ ID NO: 2557170 - RNA, 19 nt, Artificial Sequence
  Description of Artificial Sequence: Synthetic oligonucleotide
cauggacaguggugugcuu

SEQ ID NO: 2557171 - RNA, 19 nt, Artificial Sequence
  Description of Artificial Sequence: Synthetic oligonucleotide
uauaguaugaauaauucug

SEQ ID NO: 2557172 - RNA, 19 nt, Artificial Sequence
  Description of Artificial Sequence: Synthetic oligonucleotide
ugauuuaaggcuuucaucc

SEQ ID NO: 2557173 - RNA, 19 nt, Artificial Sequence
  Description of Artificial Sequence: Synthetic oligonucleotide
auggauuccaccuucauac

SEQ ID NO: 2557174 - RNA, 19 nt, Artificial Sequence
  Description of Artificial Sequence: Synthetic oligonucleotide
aaugcuuauagacacuguc

SEQ ID NO: 2557175 - RNA, 19 nt, Artificial Sequence
  Description of Artificial Sequence: Synthetic oligonucleotide
accuucauacuucaaaugc

SEQ ID NO: 2557176 - RNA, 19 nt, Artificial Sequence
  Description of Artificial Sequence: Synthetic oligonucleotide
aaauuuccaguguuuauag

SEQ ID NO: 2557177 - RNA, 19 nt, Artificial Sequence
  Description of Artificial Sequence: Synthetic oligonucleotide
guaugaauaauucugguac

SEQ ID NO: 2557178 - RNA, 19 nt, Artificial Sequence
  Description of Artificial Sequence: Synthetic oligonucleotide
uuuauaguaugaauaauuc

SEQ ID NO: 2557179 - RNA, 19 nt, Artificial Sequence
  Description of Artificial Sequence: Synthetic oligonucleotide
guuucuagcacucuguugc

SEQ ID NO: 2557180 - RNA, 19 nt, Artificial Sequence
  Description of Artificial Sequence: Synthetic oligonucleotide
aacucuauggauuccaccu

SEQ ID NO: 2557181 - RNA, 19 nt, Artificial Sequence
  Description of Artificial Sequence: Synthetic oligonucleotide
uucaaaugcuauucuaugg

SEQ ID NO: 2557182 - RNA, 19 nt, Artificial Sequence
  Description of Artificial Sequence: Synthetic oligonucleotide
uucggauucucucugauug

SEQ ID NO: 2557183 - RNA, 19 nt, Artificial Sequence
  Description of Artificial Sequence: Synthetic oligonucleotide
aaaauuauauguucggauu

SEQ ID NO: 2557184 - RNA, 19 nt, Artificial Sequence
  Description of Artificial Sequence: Synthetic oligonucleotide
aauucagcagcucaaauuu

SEQ ID NO: 2557185 - RNA, 19 nt, Artificial Sequence
  Description of Artificial Sequence: Synthetic oligonucleotide
aggacaauaacugacauug

SEQ ID NO: 2557186 - RNA, 19 nt, Artificial Sequence
  Description of Artificial Sequence: Synthetic oligonucleotide
uucaaaugcuuauagacac

SEQ ID NO: 2557187 - RNA, 19 nt, Artificial Sequence
  Description of Artificial Sequence: Synthetic oligonucleotide
auaauucugguacauauca

SEQ ID NO: 2557188 - RNA, 19 nt, Artificial Sequence
  Description of Artificial Sequence: Synthetic oligonucleotide
aaugcuauucuauggucag

SEQ ID NO: 2557189 - RNA, 19 nt, Artificial Sequence
  Description of Artificial Sequence: Synthetic oligonucleotide
ucugguacauaucaaauau

SEQ ID NO: 2557190 - RNA, 19 nt, Artificial Sequence
  Description of Artificial Sequence: Synthetic oligonucleotide
cauaucaaauauuucucgg

SEQ ID NO: 2557191 - RNA, 19 nt, Artificial Sequence
  Description of Artificial Sequence: Synthetic oligonucleotide
aguaucugcugguagaguc

SEQ ID NO: 2557192 - RNA, 19 nt, Artificial Sequence
  Description of Artificial Sequence: Synthetic oligonucleotide
ugucguguuaacaugcugc

SEQ ID NO: 2557193 - RNA, 19 nt, Artificial Sequence
  Description of Artificial Sequence: Synthetic oligonucleotide
aauucugguacauaucaaa

SEQ ID NO: 2557194 - RNA, 19 nt, Artificial Sequence
  Description of Artificial Sequence: Synthetic oligonucleotide
guauggacgagccucaccg

SEQ ID NO: 2557195 - RNA, 19 nt, Artificial Sequence
  Description of Artificial Sequence: Synthetic oligonucleotide
ugugucuauccgcagaucc

SEQ ID NO: 2557196 - RNA, 19 nt, Artificial Sequence
  Description of Artificial Sequence: Synthetic oligonucleotide
uuucucgguaaacuguugg

SEQ ID NO: 2557197 - RNA, 19 nt, Artificial Sequence
  Description of Artificial Sequence: Synthetic oligonucleotide
ucaaaugcuauucuauggu

SEQ ID NO: 2557198 - RNA, 19 nt, Artificial Sequence
  Description of Artificial Sequence: Synthetic oligonucleotide
auuucacugauuuaaggcu

SEQ ID NO: 2557199 - RNA, 19 nt, Artificial Sequence
  Description of Artificial Sequence: Synthetic oligonucleotide
uguguaauucagcagcuca

SEQ ID NO: 2557200 - RNA, 19 nt, Artificial Sequence
  Description of Artificial Sequence: Synthetic oligonucleotide
ucgacuuucacaucaaccu

SEQ ID NO: 2557201 - RNA, 19 nt, Artificial Sequence
  Description of Artificial Sequence: Synthetic oligonucleotide
uuauaguaugaauaauucu

SEQ ID NO: 2557202 - RNA, 19 nt, Artificial Sequence
  Description of Artificial Sequence: Synthetic oligonucleotide
aucgaaaugugucuauccg

SEQ ID NO: 2557203 - RNA, 19 nt, Artificial Sequence
  Description of Artificial Sequence: Synthetic oligonucleotide
gguaaaauuauauguucgg

SEQ ID NO: 2557204 - RNA, 19 nt, Artificial Sequence
  Description of Artificial Sequence: Synthetic oligonucleotide
gauguaguccaccauaauc

SEQ ID NO: 2557205 - RNA, 19 nt, Artificial Sequence
  Description of Artificial Sequence: Synthetic oligonucleotide
auaguaugaauaauucugg

SEQ ID NO: 2557206 - RNA, 19 nt, Artificial Sequence
  Description of Artificial Sequence: Synthetic oligonucleotide
aaugucccgaacuucaaau

SEQ ID NO: 2557207 - RNA, 19 nt, Artificial Sequence
  Description of Artificial Sequence: Synthetic oligonucleotide
uaacaugcugcccuccugg

SEQ ID NO: 2557208 - RNA, 19 nt, Artificial Sequence
  Description of Artificial Sequence: Synthetic oligonucleotide
ucuuucucaaguaucugcu

SEQ ID NO: 2557209 - RNA, 19 nt, Artificial Sequence
  Description of Artificial Sequence: Synthetic oligonucleotide
uagagucuagcucucaaca

SEQ ID NO: 2557210 - RNA, 19 nt, Artificial Sequence
  Description of Artificial Sequence: Synthetic oligonucleotide
acaauaacugacauuguuc

SEQ ID NO: 2557211 - RNA, 19 nt, Artificial Sequence
  Description of Artificial Sequence: Synthetic oligonucleotide
uauucuauggucagucacu

SEQ ID NO: 2557212 - RNA, 19 nt, Artificial Sequence
  Description of Artificial Sequence: Synthetic oligonucleotide
guacauaucaaauauuucu

SEQ ID NO: 2557213 - RNA, 19 nt, Artificial Sequence
  Description of Artificial Sequence: Synthetic oligonucleotide
ugucccgaacuucaaaugc

SEQ ID NO: 2557214 - RNA, 19 nt, Artificial Sequence
  Description of Artificial Sequence: Synthetic oligonucleotide
gaucgaaaugugucuaucc

SEQ ID NO: 2557215 - RNA, 19 nt, Artificial Sequence
  Description of Artificial Sequence: Synthetic oligonucleotide
uguuccugugugaauacgc

SEQ ID NO: 2557216 - RNA, 19 nt, Artificial Sequence
  Description of Artificial Sequence: Synthetic oligonucleotide
ucuauggucagucacucua

SEQ ID NO: 2557217 - RNA, 19 nt, Artificial Sequence
  Description of Artificial Sequence: Synthetic oligonucleotide
aaaugugucuauccgcaga

SEQ ID NO: 2557218 - RNA, 19 nt, Artificial Sequence
  Description of Artificial Sequence: Synthetic oligonucleotide
uauauguucggauucucuc

SEQ ID NO: 2557219 - RNA, 19 nt, Artificial Sequence
  Description of Artificial Sequence: Synthetic oligonucleotide
uacgcugcauccuugacga

SEQ ID NO: 2557220 - RNA, 19 nt, Artificial Sequence
  Description of Artificial Sequence: Synthetic oligonucleotide
ucacaucaaccucaucugg

SEQ ID NO: 2557221 - RNA, 19 nt, Artificial Sequence
  Description of Artificial Sequence: Synthetic oligonucleotide
ucucaacacacgcaaagcu

SEQ ID NO: 2557222 - RNA, 19 nt, Artificial Sequence
  Description of Artificial Sequence: Synthetic oligonucleotide
ucugauugugcucuuguuc

SEQ ID NO: 2557223 - RNA, 19 nt, Artificial Sequence
  Description of Artificial Sequence: Synthetic oligonucleotide
uaugaauaauucugguaca

SEQ ID NO: 2557224 - RNA, 19 nt, Artificial Sequence
  Description of Artificial Sequence: Synthetic oligonucleotide
aauacgcugcauccuugac

SEQ ID NO: 2557225 - RNA, 19 nt, Artificial Sequence
  Description of Artificial Sequence: Synthetic oligonucleotide
ugcuuauagacacugucuc

SEQ ID NO: 2557226 - RNA, 19 nt, Artificial Sequence
  Description of Artificial Sequence: Synthetic oligonucleotide
aauuauauguucggauucu

SEQ ID NO: 2557227 - RNA, 19 nt, Artificial Sequence
  Description of Artificial Sequence: Synthetic oligonucleotide
aaugugucuauccgcagau

SEQ ID NO: 2557228 - RNA, 19 nt, Artificial Sequence
  Description of Artificial Sequence: Synthetic oligonucleotide
agagucuagcucucaacac

SEQ ID NO: 2557229 - RNA, 19 nt, Artificial Sequence
  Description of Artificial Sequence: Synthetic oligonucleotide
agcacucuguugcugacac

SEQ ID NO: 2557230 - RNA, 19 nt, Artificial Sequence
  Description of Artificial Sequence: Synthetic oligonucleotide
auacgcugcauccuugacg

SEQ ID NO: 2557231 - RNA, 19 nt, Artificial Sequence
  Description of Artificial Sequence: Synthetic oligonucleotide
uuucucaccacguaagaau

SEQ ID NO: 2557232 - RNA, 19 nt, Artificial Sequence
  Description of Artificial Sequence: Synthetic oligonucleotide
ugugugaauacgcugcauc

SEQ ID NO: 2557233 - RNA, 19 nt, Artificial Sequence
  Description of Artificial Sequence: Synthetic oligonucleotide
aauuccuuaaugucccgaa

SEQ ID NO: 2557234 - RNA, 19 nt, Artificial Sequence
  Description of Artificial Sequence: Synthetic oligonucleotide
uggguaaaauuauauguuc

SEQ ID NO: 2557235 - RNA, 19 nt, Artificial Sequence
  Description of Artificial Sequence: Synthetic oligonucleotide
uauguucggauucucucug

SEQ ID NO: 2557236 - RNA, 19 nt, Artificial Sequence
  Description of Artificial Sequence: Synthetic oligonucleotide
auaacugacauuguuccug

SEQ ID NO: 2557237 - RNA, 19 nt, Artificial Sequence
  Description of Artificial Sequence: Synthetic oligonucleotide
ucgaaaugugucuauccgc

SEQ ID NO: 2557238 - RNA, 19 nt, Artificial Sequence
  Description of Artificial Sequence: Synthetic oligonucleotide
uuauauguucggauucucu

SEQ ID NO: 2557239 - RNA, 19 nt, Artificial Sequence
  Description of Artificial Sequence: Synthetic oligonucleotide
cagaaauucuggcagcugc

SEQ ID NO: 2557240 - RNA, 19 nt, Artificial Sequence
  Description of Artificial Sequence: Synthetic oligonucleotide
aaaugcuauucuaugguca

SEQ ID NO: 2557241 - RNA, 19 nt, Artificial Sequence
  Description of Artificial Sequence: Synthetic oligonucleotide
ucagcugugaucguucuug

SEQ ID NO: 2557242 - RNA, 19 nt, Artificial Sequence
  Description of Artificial Sequence: Synthetic oligonucleotide
ugcugauugaagcagucuc

SEQ ID NO: 2557243 - RNA, 19 nt, Artificial Sequence
  Description of Artificial Sequence: Synthetic oligonucleotide
uuguuuggcacucuaccac

SEQ ID NO: 2557244 - RNA, 19 nt, Artificial Sequence
  Description of Artificial Sequence: Synthetic oligonucleotide
cuuaaugucccgaacuuca

SEQ ID NO: 2557245 - RNA, 19 nt, Artificial Sequence
  Description of Artificial Sequence: Synthetic oligonucleotide
uuuccaguguuuauaguau

SEQ ID NO: 2557246 - RNA, 19 nt, Artificial Sequence
  Description of Artificial Sequence: Synthetic oligonucleotide
uccaguguuuauaguauga

SEQ ID NO: 2557247 - RNA, 19 nt, Artificial Sequence
  Description of Artificial Sequence: Synthetic oligonucleotide
acugauuuaaggcuuucau

SEQ ID NO: 2557248 - RNA, 19 nt, Artificial Sequence
  Description of Artificial Sequence: Synthetic oligonucleotide
acacuugucuuucucaagu

SEQ ID NO: 2557249 - RNA, 19 nt, Artificial Sequence
  Description of Artificial Sequence: Synthetic oligonucleotide
aguaugaauaauucuggua

SEQ ID NO: 2557250 - RNA, 19 nt, Artificial Sequence
  Description of Artificial Sequence: Synthetic oligonucleotide
uccuggguaaaauuauaug

SEQ ID NO: 2557251 - RNA, 19 nt, Artificial Sequence
  Description of Artificial Sequence: Synthetic oligonucleotide
cuugucuuucucaaguauc

SEQ ID NO: 2557252 - RNA, 19 nt, Artificial Sequence
  Description of Artificial Sequence: Synthetic oligonucleotide
cuauucuauggucagucac

SEQ ID NO: 2557253 - RNA, 19 nt, Artificial Sequence
  Description of Artificial Sequence: Synthetic oligonucleotide
uguuuggcacucuaccacc

SEQ ID NO: 2557254 - RNA, 19 nt, Artificial Sequence
  Description of Artificial Sequence: Synthetic oligonucleotide
auauguucggauucucucu

SEQ ID NO: 2557255 - RNA, 19 nt, Artificial Sequence
  Description of Artificial Sequence: Synthetic oligonucleotide
acguaagaauuccuuaaug

SEQ ID NO: 2557256 - RNA, 19 nt, Artificial Sequence
  Description of Artificial Sequence: Synthetic oligonucleotide
ucuagcacucuguugcuga

SEQ ID NO: 2557257 - RNA, 19 nt, Artificial Sequence
  Description of Artificial Sequence: Synthetic oligonucleotide
cacacgcaaagcuauuucc

SEQ ID NO: 2557258 - RNA, 19 nt, Artificial Sequence
  Description of Artificial Sequence: Synthetic oligonucleotide
gaucguucuuguuuggcac

SEQ ID NO: 2557259 - RNA, 19 nt, Artificial Sequence
  Description of Artificial Sequence: Synthetic oligonucleotide
uguaguccaccauaaucug

SEQ ID NO: 2557260 - RNA, 19 nt, Artificial Sequence
  Description of Artificial Sequence: Synthetic oligonucleotide
ugaucguucuuguuuggca

SEQ ID NO: 2557261 - RNA, 19 nt, Artificial Sequence
  Description of Artificial Sequence: Synthetic oligonucleotide
ugauccaagcauuucucac

SEQ ID NO: 2557262 - RNA, 19 nt, Artificial Sequence
  Description of Artificial Sequence: Synthetic oligonucleotide
acugacauuguuccugugu

SEQ ID NO: 2557263 - RNA, 19 nt, Artificial Sequence
  Description of Artificial Sequence: Synthetic oligonucleotide
accauaaucugcuggugug

SEQ ID NO: 2557264 - RNA, 19 nt, Artificial Sequence
  Description of Artificial Sequence: Synthetic oligonucleotide
uauuucucgguaaacuguu

SEQ ID NO: 2557265 - RNA, 19 nt, Artificial Sequence
  Description of Artificial Sequence: Synthetic oligonucleotide
uuuucagcugugaucguuc

SEQ ID NO: 2557266 - RNA, 19 nt, Artificial Sequence
  Description of Artificial Sequence: Synthetic oligonucleotide
aaauucagcaauggccucu

SEQ ID NO: 2557267 - RNA, 19 nt, Artificial Sequence
  Description of Artificial Sequence: Synthetic oligonucleotide
gugugaauacgcugcaucc

SEQ ID NO: 2557268 - RNA, 19 nt, Artificial Sequence
  Description of Artificial Sequence: Synthetic oligonucleotide
uuucacugauuuaaggcuu

SEQ ID NO: 2557269 - RNA, 19 nt, Artificial Sequence
  Description of Artificial Sequence: Synthetic oligonucleotide
cacaucaaccucaucuggc

SEQ ID NO: 2557270 - RNA, 19 nt, Artificial Sequence
  Description of Artificial Sequence: Synthetic oligonucleotide
uaguaugaauaauucuggu

SEQ ID NO: 2557271 - RNA, 19 nt, Artificial Sequence
  Description of Artificial Sequence: Synthetic oligonucleotide
uuuaaggcuuucauccaaa

SEQ ID NO: 2557272 - RNA, 19 nt, Artificial Sequence
  Description of Artificial Sequence: Synthetic oligonucleotide
acacacgcaaagcuauuuc

SEQ ID NO: 2557273 - RNA, 19 nt, Artificial Sequence
  Description of Artificial Sequence: Synthetic oligonucleotide
uuauagacacugucuccag

SEQ ID NO: 2557274 - RNA, 19 nt, Artificial Sequence
  Description of Artificial Sequence: Synthetic oligonucleotide
uucucgguaaacuguuggc

SEQ ID NO: 2557275 - RNA, 19 nt, Artificial Sequence
  Description of Artificial Sequence: Synthetic oligonucleotide
gaacucuauggauuccacc

SEQ ID NO: 2557276 - RNA, 19 nt, Artificial Sequence
  Description of Artificial Sequence: Synthetic oligonucleotide
caaaugcuuauagacacug

SEQ ID NO: 2557277 - RNA, 19 nt, Artificial Sequence
  Description of Artificial Sequence: Synthetic oligonucleotide
ucagucacucuauccuggg

SEQ ID NO: 2557278 - RNA, 19 nt, Artificial Sequence
  Description of Artificial Sequence: Synthetic oligonucleotide
ggguaaaauuauauguucg

SEQ ID NO: 2557279 - RNA, 19 nt, Artificial Sequence
  Description of Artificial Sequence: Synthetic oligonucleotide
agucuagcucucaacacac

SEQ ID NO: 2557280 - RNA, 19 nt, Artificial Sequence
  Description of Artificial Sequence: Synthetic oligonucleotide
ugugcucuuguucccaccu

SEQ ID NO: 2557281 - RNA, 19 nt, Artificial Sequence
  Description of Artificial Sequence: Synthetic oligonucleotide
auucuauggucagucacuc

SEQ ID NO: 2557282 - RNA, 19 nt, Artificial Sequence
  Description of Artificial Sequence: Synthetic oligonucleotide
ugucugucguguuaacaug

SEQ ID NO: 2557283 - RNA, 19 nt, Artificial Sequence
  Description of Artificial Sequence: Synthetic oligonucleotide
ucucugauugugcucuugu

SEQ ID NO: 2557284 - RNA, 19 nt, Artificial Sequence
  Description of Artificial Sequence: Synthetic oligonucleotide
acgacaggcccacaucugg

SEQ ID NO: 2557285 - RNA, 19 nt, Artificial Sequence
  Description of Artificial Sequence: Synthetic oligonucleotide
uuaacaugcugcccuccug

SEQ ID NO: 2557286 - RNA, 19 nt, Artificial Sequence
  Description of Artificial Sequence: Synthetic oligonucleotide
uauagacacugucuccaga

SEQ ID NO: 2557287 - RNA, 19 nt, Artificial Sequence
  Description of Artificial Sequence: Synthetic oligonucleotide
auuauauguucggauucuc

SEQ ID NO: 2557288 - RNA, 19 nt, Artificial Sequence
  Description of Artificial Sequence: Synthetic oligonucleotide
uucugguacauaucaaaua

SEQ ID NO: 2557289 - RNA, 19 nt, Artificial Sequence
  Description of Artificial Sequence: Synthetic oligonucleotide
gaaaugugucuauccgcag

SEQ ID NO: 2557290 - RNA, 19 nt, Artificial Sequence
  Description of Artificial Sequence: Synthetic oligonucleotide
aguuucuagcacucuguug

SEQ ID NO: 2557291 - RNA, 19 nt, Artificial Sequence
  Description of Artificial Sequence: Synthetic oligonucleotide
cucgggaucgaaauguguc

SEQ ID NO: 2557292 - RNA, 19 nt, Artificial Sequence
  Description of Artificial Sequence: Synthetic oligonucleotide
cugugaucguucuuguuug

SEQ ID NO: 2557293 - RNA, 19 nt, Artificial Sequence
  Description of Artificial Sequence: Synthetic oligonucleotide
gagucuagcucucaacaca

SEQ ID NO: 2557294 - RNA, 19 nt, Artificial Sequence
  Description of Artificial Sequence: Synthetic oligonucleotide
auugugcucuuguucccac

SEQ ID NO: 2557295 - RNA, 19 nt, Artificial Sequence
  Description of Artificial Sequence: Synthetic oligonucleotide
guaaaauuauauguucgga

SEQ ID NO: 2557296 - RNA, 19 nt, Artificial Sequence
  Description of Artificial Sequence: Synthetic oligonucleotide
aucaaccucaucuggcuga

SEQ ID NO: 2557297 - RNA, 19 nt, Artificial Sequence
  Description of Artificial Sequence: Synthetic oligonucleotide
uucgcugaacucuauggau

SEQ ID NO: 2557298 - RNA, 19 nt, Artificial Sequence
  Description of Artificial Sequence: Synthetic oligonucleotide
cucaaguaucugcugguag

SEQ ID NO: 2557299 - RNA, 19 nt, Artificial Sequence
  Description of Artificial Sequence: Synthetic oligonucleotide
ugugaucguucuuguuugg

SEQ ID NO: 2557300 - RNA, 19 nt, Artificial Sequence
  Description of Artificial Sequence: Synthetic oligonucleotide
uauccgcagaucccugggg

SEQ ID NO: 2557301 - RNA, 19 nt, Artificial Sequence
  Description of Artificial Sequence: Synthetic oligonucleotide
uaauucugguacauaucaa

SEQ ID NO: 2557302 - RNA, 19 nt, Artificial Sequence
  Description of Artificial Sequence: Synthetic oligonucleotide
aaggacaauaacugacauu

SEQ ID NO: 2557303 - RNA, 19 nt, Artificial Sequence
  Description of Artificial Sequence: Synthetic oligonucleotide
cuuauagacacugucucca

SEQ ID NO: 2557304 - RNA, 19 nt, Artificial Sequence
  Description of Artificial Sequence: Synthetic oligonucleotide
gucguguuaacaugcugcc

SEQ ID NO: 2557305 - RNA, 19 nt, Artificial Sequence
  Description of Artificial Sequence: Synthetic oligonucleotide
agcauuucucaccacguaa

SEQ ID NO: 2557306 - RNA, 19 nt, Artificial Sequence
  Description of Artificial Sequence: Synthetic oligonucleotide
auauuucucgguaaacugu

SEQ ID NO: 2557307 - RNA, 19 nt, Artificial Sequence
  Description of Artificial Sequence: Synthetic oligonucleotide
ugcuauucuauggucaguc

SEQ ID NO: 2557308 - RNA, 19 nt, Artificial Sequence
  Description of Artificial Sequence: Synthetic oligonucleotide
ugaacucuauggauuccac

SEQ ID NO: 2557309 - RNA, 19 nt, Artificial Sequence
  Description of Artificial Sequence: Synthetic oligonucleotide
uucucaccacguaagaauu

SEQ ID NO: 2557310 - RNA, 19 nt, Artificial Sequence
  Description of Artificial Sequence: Synthetic oligonucleotide
uguuuauaguaugaauaau

SEQ ID NO: 2557311 - RNA, 19 nt, Artificial Sequence
  Description of Artificial Sequence: Synthetic oligonucleotide
aagcagucucugaauuagc

SEQ ID NO: 2557312 - RNA, 19 nt, Artificial Sequence
  Description of Artificial Sequence: Synthetic oligonucleotide
cucaccacguaagaauucc

SEQ ID NO: 2557313 - RNA, 19 nt, Artificial Sequence
  Description of Artificial Sequence: Synthetic oligonucleotide
agucacucuauccugggua

SEQ ID NO: 2557314 - RNA, 19 nt, Artificial Sequence
  Description of Artificial Sequence: Synthetic oligonucleotide
uuagcugauccaagcauuu

SEQ ID NO: 2557315 - RNA, 19 nt, Artificial Sequence
  Description of Artificial Sequence: Synthetic oligonucleotide
uccuuaaugucccgaacuu

SEQ ID NO: 2557316 - RNA, 19 nt, Artificial Sequence
  Description of Artificial Sequence: Synthetic oligonucleotide
ucgggaucgaaaugugucu

SEQ ID NO: 2557317 - RNA, 19 nt, Artificial Sequence
  Description of Artificial Sequence: Synthetic oligonucleotide
uguaauucagcagcucaaa

SEQ ID NO: 2557318 - RNA, 19 nt, Artificial Sequence
  Description of Artificial Sequence: Synthetic oligonucleotide
ugauugaagcagucucuga

SEQ ID NO: 2557319 - RNA, 19 nt, Artificial Sequence
  Description of Artificial Sequence: Synthetic oligonucleotide
uaaugucccgaacuucaaa

SEQ ID NO: 2557320 - RNA, 19 nt, Artificial Sequence
  Description of Artificial Sequence: Synthetic oligonucleotide
cuuguuuggcacucuacca

SEQ ID NO: 2557321 - RNA, 19 nt, Artificial Sequence
  Description of Artificial Sequence: Synthetic oligonucleotide
uuaaugucccgaacuucaa

SEQ ID NO: 2557322 - RNA, 19 nt, Artificial Sequence
  Description of Artificial Sequence: Synthetic oligonucleotide
ucugucguguuaacaugcu

SEQ ID NO: 2557323 - RNA, 19 nt, Artificial Sequence
  Description of Artificial Sequence: Synthetic oligonucleotide
augucccgaacuucaaaug

SEQ ID NO: 2557324 - RNA, 19 nt, Artificial Sequence
  Description of Artificial Sequence: Synthetic oligonucleotide
cuuucucaaguaucugcug

SEQ ID NO: 2557325 - RNA, 19 nt, Artificial Sequence
  Description of Artificial Sequence: Synthetic oligonucleotide
ugugaauacgcugcauccu

SEQ ID NO: 2557326 - RNA, 19 nt, Artificial Sequence
  Description of Artificial Sequence: Synthetic oligonucleotide
ucuguugcugacacuuguc

SEQ ID NO: 2557327 - RNA, 19 nt, Artificial Sequence
  Description of Artificial Sequence: Synthetic oligonucleotide
ugucuauccgcagaucccu

SEQ ID NO: 2557328 - RNA, 19 nt, Artificial Sequence
  Description of Artificial Sequence: Synthetic oligonucleotide
ugaagcagucucugaauua

SEQ ID NO: 2557329 - RNA, 19 nt, Artificial Sequence
  Description of Artificial Sequence: Synthetic oligonucleotide
guagagucuagcucucaac

SEQ ID NO: 2557330 - RNA, 19 nt, Artificial Sequence
  Description of Artificial Sequence: Synthetic oligonucleotide
cugguguguaauucagcag

SEQ ID NO: 2557331 - RNA, 19 nt, Artificial Sequence
  Description of Artificial Sequence: Synthetic oligonucleotide
gauucucucugauugugcu

SEQ ID NO: 2557332 - RNA, 19 nt, Artificial Sequence
  Description of Artificial Sequence: Synthetic oligonucleotide
cuauccgcagaucccuggg

SEQ ID NO: 2557333 - RNA, 19 nt, Artificial Sequence
  Description of Artificial Sequence: Synthetic oligonucleotide
caccuucauacuucaaaug

SEQ ID NO: 2557334 - RNA, 19 nt, Artificial Sequence
  Description of Artificial Sequence: Synthetic oligonucleotide
accugcaguuucuagcacu

SEQ ID NO: 2557335 - RNA, 19 nt, Artificial Sequence
  Description of Artificial Sequence: Synthetic oligonucleotide
aucugggauucgcugaacu

SEQ ID NO: 2557336 - RNA, 19 nt, Artificial Sequence
  Description of Artificial Sequence: Synthetic oligonucleotide
gcucucaacacacgcaaag

SEQ ID NO: 2557337 - RNA, 19 nt, Artificial Sequence
  Description of Artificial Sequence: Synthetic oligonucleotide
gaauacgcugcauccuuga

SEQ ID NO: 2557338 - RNA, 19 nt, Artificial Sequence
  Description of Artificial Sequence: Synthetic oligonucleotide
gucagucacucuauccugg

SEQ ID NO: 2557339 - RNA, 19 nt, Artificial Sequence
  Description of Artificial Sequence: Synthetic oligonucleotide
cacucuaccacccaguccu

SEQ ID NO: 2557340 - RNA, 19 nt, Artificial Sequence
  Description of Artificial Sequence: Synthetic oligonucleotide
ugaauaauucugguacaua

SEQ ID NO: 2557341 - RNA, 19 nt, Artificial Sequence
  Description of Artificial Sequence: Synthetic oligonucleotide
augcuuauagacacugucu

SEQ ID NO: 2557342 - RNA, 19 nt, Artificial Sequence
  Description of Artificial Sequence: Synthetic oligonucleotide
uguucggauucucucugau

SEQ ID NO: 2557343 - RNA, 19 nt, Artificial Sequence
  Description of Artificial Sequence: Synthetic oligonucleotide
gucugucguguuaacaugc

SEQ ID NO: 2557344 - RNA, 19 nt, Artificial Sequence
  Description of Artificial Sequence: Synthetic oligonucleotide
augaauaauucugguacau

SEQ ID NO: 2557345 - RNA, 19 nt, Artificial Sequence
  Description of Artificial Sequence: Synthetic oligonucleotide
aaaugcuuauagacacugu

SEQ ID NO: 2557346 - RNA, 19 nt, Artificial Sequence
  Description of Artificial Sequence: Synthetic oligonucleotide
uccagaaauucuggcagcu

SEQ ID NO: 2557347 - RNA, 19 nt, Artificial Sequence
  Description of Artificial Sequence: Synthetic oligonucleotide
aagcauuucucaccacgua

SEQ ID NO: 2557348 - RNA, 19 nt, Artificial Sequence
  Description of Artificial Sequence: Synthetic oligonucleotide
uuucuagcacucuguugcu

SEQ ID NO: 2557349 - RNA, 19 nt, Artificial Sequence
  Description of Artificial Sequence: Synthetic oligonucleotide
ucaccacguaagaauuccu

SEQ ID NO: 2557350 - RNA, 19 nt, Artificial Sequence
  Description of Artificial Sequence: Synthetic oligonucleotide
cucugaauuagcugaucca

SEQ ID NO: 2557351 - RNA, 19 nt, Artificial Sequence
  Description of Artificial Sequence: Synthetic oligonucleotide
ucucaccacguaagaauuc

SEQ ID NO: 2557352 - RNA, 19 nt, Artificial Sequence
  Description of Artificial Sequence: Synthetic oligonucleotide
gcuuauagacacugucucc

SEQ ID NO: 2557353 - RNA, 19 nt, Artificial Sequence
  Description of Artificial Sequence: Synthetic oligonucleotide
aucguucuuguuuggcacu

SEQ ID NO: 2557354 - RNA, 19 nt, Artificial Sequence
  Description of Artificial Sequence: Synthetic oligonucleotide
uguucccaccugcaguuuc

SEQ ID NO: 2557355 - RNA, 19 nt, Artificial Sequence
  Description of Artificial Sequence: Synthetic oligonucleotide
cucaccgcacugucugucg

SEQ ID NO: 2557356 - RNA, 19 nt, Artificial Sequence
  Description of Artificial Sequence: Synthetic oligonucleotide
aacacacgcaaagcuauuu

SEQ ID NO: 2557357 - RNA, 19 nt, Artificial Sequence
  Description of Artificial Sequence: Synthetic oligonucleotide
auggacgagccucaccgca

SEQ ID NO: 2557358 - RNA, 19 nt, Artificial Sequence
  Description of Artificial Sequence: Synthetic oligonucleotide
caaauuuccaguguuuaua

SEQ ID NO: 2557359 - RNA, 19 nt, Artificial Sequence
  Description of Artificial Sequence: Synthetic oligonucleotide
uggcugaagaaggacaaua

SEQ ID NO: 2557360 - RNA, 19 nt, Artificial Sequence
  Description of Artificial Sequence: Synthetic oligonucleotide
uguuaacaugcugcccucc

SEQ ID NO: 2557361 - RNA, 19 nt, Artificial Sequence
  Description of Artificial Sequence: Synthetic oligonucleotide
ugggccucgggaucgaaau

SEQ ID NO: 2557362 - RNA, 19 nt, Artificial Sequence
  Description of Artificial Sequence: Synthetic oligonucleotide
ugggauucgcugaacucua

SEQ ID NO: 2557363 - RNA, 19 nt, Artificial Sequence
  Description of Artificial Sequence: Synthetic oligonucleotide
auuucucaccacguaagaa

SEQ ID NO: 2557364 - RNA, 19 nt, Artificial Sequence
  Description of Artificial Sequence: Synthetic oligonucleotide
guaguccaccauaaucugc

SEQ ID NO: 2557365 - RNA, 19 nt, Artificial Sequence
  Description of Artificial Sequence: Synthetic oligonucleotide
gaauuccuuaaugucccga

SEQ ID NO: 2557366 - RNA, 19 nt, Artificial Sequence
  Description of Artificial Sequence: Synthetic oligonucleotide
auccgcagaucccuggggu

SEQ ID NO: 2557367 - RNA, 19 nt, Artificial Sequence
  Description of Artificial Sequence: Synthetic oligonucleotide
ucggauucucucugauugu

SEQ ID NO: 2557368 - RNA, 19 nt, Artificial Sequence
  Description of Artificial Sequence: Synthetic oligonucleotide
aggcccacaucugggauuc

SEQ ID NO: 2557369 - RNA, 19 nt, Artificial Sequence
  Description of Artificial Sequence: Synthetic oligonucleotide
aucccuggggucgacuuuc

SEQ ID NO: 2557370 - RNA, 19 nt, Artificial Sequence
  Description of Artificial Sequence: Synthetic oligonucleotide
aaguaucugcugguagagu

SEQ ID NO: 2557371 - RNA, 19 nt, Artificial Sequence
  Description of Artificial Sequence: Synthetic oligonucleotide
uggauuccaccuucauacu

SEQ ID NO: 2557372 - RNA, 19 nt, Artificial Sequence
  Description of Artificial Sequence: Synthetic oligonucleotide
gcugguagagucuagcucu

SEQ ID NO: 2557373 - RNA, 19 nt, Artificial Sequence
  Description of Artificial Sequence: Synthetic oligonucleotide
gcauuucucaccacguaag

SEQ ID NO: 2557374 - RNA, 19 nt, Artificial Sequence
  Description of Artificial Sequence: Synthetic oligonucleotide
acacgcaaagcuauuuccu

SEQ ID NO: 2557375 - RNA, 19 nt, Artificial Sequence
  Description of Artificial Sequence: Synthetic oligonucleotide
ccuggguaaaauuauaugu

SEQ ID NO: 2557376 - RNA, 19 nt, Artificial Sequence
  Description of Artificial Sequence: Synthetic oligonucleotide
cauuguuccugugugaaua

SEQ ID NO: 2557377 - RNA, 19 nt, Artificial Sequence
  Description of Artificial Sequence: Synthetic oligonucleotide
ggucagucacucuauccug

SEQ ID NO: 2557378 - RNA, 19 nt, Artificial Sequence
  Description of Artificial Sequence: Synthetic oligonucleotide
uggacgagccucaccgcac

SEQ ID NO: 2557379 - RNA, 19 nt, Artificial Sequence
  Description of Artificial Sequence: Synthetic oligonucleotide
uugugcucuuguucccacc

SEQ ID NO: 2557380 - RNA, 19 nt, Artificial Sequence
  Description of Artificial Sequence: Synthetic oligonucleotide
acgcaaagcuauuuccuua

SEQ ID NO: 2557381 - RNA, 19 nt, Artificial Sequence
  Description of Artificial Sequence: Synthetic oligonucleotide
ucguguuaacaugcugccc

SEQ ID NO: 2557382 - RNA, 19 nt, Artificial Sequence
  Description of Artificial Sequence: Synthetic oligonucleotide
uucuauggucagucacucu

SEQ ID NO: 2557383 - RNA, 19 nt, Artificial Sequence
  Description of Artificial Sequence: Synthetic oligonucleotide
cuaccacccaguccuguug

SEQ ID NO: 2557384 - RNA, 19 nt, Artificial Sequence
  Description of Artificial Sequence: Synthetic oligonucleotide
gguacauaucaaauauuuc

SEQ ID NO: 2557385 - RNA, 19 nt, Artificial Sequence
  Description of Artificial Sequence: Synthetic oligonucleotide
cugucguguuaacaugcug

SEQ ID NO: 2557386 - RNA, 19 nt, Artificial Sequence
  Description of Artificial Sequence: Synthetic oligonucleotide
uucuagcacucuguugcug

SEQ ID NO: 2557387 - RNA, 19 nt, Artificial Sequence
  Description of Artificial Sequence: Synthetic oligonucleotide
cuggguaaaauuauauguu

SEQ ID NO: 2557388 - RNA, 19 nt, Artificial Sequence
  Description of Artificial Sequence: Synthetic oligonucleotide
cccaccugcaguuucuagc

SEQ ID NO: 2557389 - RNA, 19 nt, Artificial Sequence
  Description of Artificial Sequence: Synthetic oligonucleotide
gugaucguucuuguuuggc

SEQ ID NO: 2557390 - RNA, 19 nt, Artificial Sequence
  Description of Artificial Sequence: Synthetic oligonucleotide
ucuaccacccaguccuguu

SEQ ID NO: 2557391 - RNA, 19 nt, Artificial Sequence
  Description of Artificial Sequence: Synthetic oligonucleotide
ggggucgacuuucacauca

SEQ ID NO: 2557392 - RNA, 19 nt, Artificial Sequence
  Description of Artificial Sequence: Synthetic oligonucleotide
acauuguuccugugugaau

SEQ ID NO: 2557393 - RNA, 19 nt, Artificial Sequence
  Description of Artificial Sequence: Synthetic oligonucleotide
ucaccgcacugucugucgu

SEQ ID NO: 2557394 - RNA, 19 nt, Artificial Sequence
  Description of Artificial Sequence: Synthetic oligonucleotide
guuuggcacucuaccaccc

SEQ ID NO: 2557395 - RNA, 19 nt, Artificial Sequence
  Description of Artificial Sequence: Synthetic oligonucleotide
cgaacuucaaaugcuauuc

SEQ ID NO: 2557396 - RNA, 19 nt, Artificial Sequence
  Description of Artificial Sequence: Synthetic oligonucleotide
ggauucgcugaacucuaug

SEQ ID NO: 2557397 - RNA, 19 nt, Artificial Sequence
  Description of Artificial Sequence: Synthetic oligonucleotide
ucucaaguaucugcuggua

SEQ ID NO: 2557398 - RNA, 19 nt, Artificial Sequence
  Description of Artificial Sequence: Synthetic oligonucleotide
auguucggauucucucuga

SEQ ID NO: 2557399 - RNA, 19 nt, Artificial Sequence
  Description of Artificial Sequence: Synthetic oligonucleotide
uugcugacacuugucuuuc

SEQ ID NO: 2557400 - RNA, 19 nt, Artificial Sequence
  Description of Artificial Sequence: Synthetic oligonucleotide
cugucugucguguuaacau

SEQ ID NO: 2557401 - RNA, 19 nt, Artificial Sequence
  Description of Artificial Sequence: Synthetic oligonucleotide
agaucccuggggucgacuu

SEQ ID NO: 2557402 - RNA, 19 nt, Artificial Sequence
  Description of Artificial Sequence: Synthetic oligonucleotide
caagcauuucucaccacgu

SEQ ID NO: 2557403 - RNA, 19 nt, Artificial Sequence
  Description of Artificial Sequence: Synthetic oligonucleotide
acucuauccuggguaaaau

SEQ ID NO: 2557404 - RNA, 19 nt, Artificial Sequence
  Description of Artificial Sequence: Synthetic oligonucleotide
ucguucuuguuuggcacuc

SEQ ID NO: 2557405 - RNA, 19 nt, Artificial Sequence
  Description of Artificial Sequence: Synthetic oligonucleotide
uccuugacgacaggcccac

SEQ ID NO: 2557406 - RNA, 19 nt, Artificial Sequence
  Description of Artificial Sequence: Synthetic oligonucleotide
gguauggacgagccucacc

SEQ ID NO: 2557407 - RNA, 19 nt, Artificial Sequence
  Description of Artificial Sequence: Synthetic oligonucleotide
cuauccuggguaaaauuau

SEQ ID NO: 2557408 - RNA, 19 nt, Artificial Sequence
  Description of Artificial Sequence: Synthetic oligonucleotide
guguuaacaugcugcccuc

SEQ ID NO: 2557409 - RNA, 19 nt, Artificial Sequence
  Description of Artificial Sequence: Synthetic oligonucleotide
uccgcagaucccugggguc

SEQ ID NO: 2557410 - RNA, 19 nt, Artificial Sequence
  Description of Artificial Sequence: Synthetic oligonucleotide
guuaacaugcugcccuccu

SEQ ID NO: 2557411 - RNA, 19 nt, Artificial Sequence
  Description of Artificial Sequence: Synthetic oligonucleotide
guaauucagcagcucaaau

SEQ ID NO: 2557412 - RNA, 19 nt, Artificial Sequence
  Description of Artificial Sequence: Synthetic oligonucleotide
uucagcugugaucguucuu

SEQ ID NO: 2557413 - RNA, 19 nt, Artificial Sequence
  Description of Artificial Sequence: Synthetic oligonucleotide
ucacugauuuaaggcuuuc

SEQ ID NO: 2557414 - RNA, 19 nt, Artificial Sequence
  Description of Artificial Sequence: Synthetic oligonucleotide
caguguuuauaguaugaau

SEQ ID NO: 2557415 - RNA, 19 nt, Artificial Sequence
  Description of Artificial Sequence: Synthetic oligonucleotide
gguagagucuagcucucaa

SEQ ID NO: 2557416 - RNA, 19 nt, Artificial Sequence
  Description of Artificial Sequence: Synthetic oligonucleotide
uagcugauccaagcauuuc

SEQ ID NO: 2557417 - RNA, 19 nt, Artificial Sequence
  Description of Artificial Sequence: Synthetic oligonucleotide
ugguagagucuagcucuca

SEQ ID NO: 2557418 - RNA, 19 nt, Artificial Sequence
  Description of Artificial Sequence: Synthetic oligonucleotide
gcuauucuauggucaguca

SEQ ID NO: 2557419 - RNA, 19 nt, Artificial Sequence
  Description of Artificial Sequence: Synthetic oligonucleotide
auccuugacgacaggccca

SEQ ID NO: 2557420 - RNA, 19 nt, Artificial Sequence
  Description of Artificial Sequence: Synthetic oligonucleotide
cugggauucgcugaacucu

SEQ ID NO: 2557421 - RNA, 19 nt, Artificial Sequence
  Description of Artificial Sequence: Synthetic oligonucleotide
gacgagccucaccgcacug

SEQ ID NO: 2557422 - RNA, 19 nt, Artificial Sequence
  Description of Artificial Sequence: Synthetic oligonucleotide
accgcacugucugucgugu

SEQ ID NO: 2557423 - RNA, 19 nt, Artificial Sequence
  Description of Artificial Sequence: Synthetic oligonucleotide
gugaauacgcugcauccuu

SEQ ID NO: 2557424 - RNA, 19 nt, Artificial Sequence
  Description of Artificial Sequence: Synthetic oligonucleotide
cacugauuuaaggcuuuca

SEQ ID NO: 2557425 - RNA, 19 nt, Artificial Sequence
  Description of Artificial Sequence: Synthetic oligonucleotide
gcugauccaagcauuucuc

SEQ ID NO: 2557426 - RNA, 19 nt, Artificial Sequence
  Description of Artificial Sequence: Synthetic oligonucleotide
caccauaaucugcuggugu

SEQ ID NO: 2557427 - RNA, 19 nt, Artificial Sequence
  Description of Artificial Sequence: Synthetic oligonucleotide
ggaucgaaaugugucuauc

SEQ ID NO: 2557428 - RNA, 19 nt, Artificial Sequence
  Description of Artificial Sequence: Synthetic oligonucleotide
augcuauucuauggucagu

SEQ ID NO: 2557429 - RNA, 19 nt, Artificial Sequence
  Description of Artificial Sequence: Synthetic oligonucleotide
ccacguaagaauuccuuaa

SEQ ID NO: 2557430 - RNA, 19 nt, Artificial Sequence
  Description of Artificial Sequence: Synthetic oligonucleotide
cucucugauugugcucuug

SEQ ID NO: 2557431 - RNA, 19 nt, Artificial Sequence
  Description of Artificial Sequence: Synthetic oligonucleotide
ggucgacuuucacaucaac

SEQ ID NO: 2557432 - RNA, 19 nt, Artificial Sequence
  Description of Artificial Sequence: Synthetic oligonucleotide
ucacucuauccuggguaaa

SEQ ID NO: 2557433 - RNA, 19 nt, Artificial Sequence
  Description of Artificial Sequence: Synthetic oligonucleotide
guuccugugugaauacgcu

SEQ ID NO: 2557434 - RNA, 19 nt, Artificial Sequence
  Description of Artificial Sequence: Synthetic oligonucleotide
caccgcacugucugucgug

SEQ ID NO: 2557435 - RNA, 19 nt, Artificial Sequence
  Description of Artificial Sequence: Synthetic oligonucleotide
agcugugaucguucuuguu

SEQ ID NO: 2557436 - RNA, 19 nt, Artificial Sequence
  Description of Artificial Sequence: Synthetic oligonucleotide
cucuguugcugacacuugu

SEQ ID NO: 2557437 - RNA, 19 nt, Artificial Sequence
  Description of Artificial Sequence: Synthetic oligonucleotide
cuugacgacaggcccacau

SEQ ID NO: 2557438 - RNA, 19 nt, Artificial Sequence
  Description of Artificial Sequence: Synthetic oligonucleotide
caccugcaguuucuagcac

SEQ ID NO: 2557439 - RNA, 19 nt, Artificial Sequence
  Description of Artificial Sequence: Synthetic oligonucleotide
ucccuggggucgacuuuca

SEQ ID NO: 2557440 - RNA, 19 nt, Artificial Sequence
  Description of Artificial Sequence: Synthetic oligonucleotide
cacucuauccuggguaaaa

SEQ ID NO: 2557441 - RNA, 19 nt, Artificial Sequence
  Description of Artificial Sequence: Synthetic oligonucleotide
acgcugcauccuugacgac

SEQ ID NO: 2557442 - RNA, 19 nt, Artificial Sequence
  Description of Artificial Sequence: Synthetic oligonucleotide
acgagccucaccgcacugu

SEQ ID NO: 2557443 - RNA, 19 nt, Artificial Sequence
  Description of Artificial Sequence: Synthetic oligonucleotide
gucuauccgcagaucccug

SEQ ID NO: 2557444 - RNA, 19 nt, Artificial Sequence
  Description of Artificial Sequence: Synthetic oligonucleotide
cuauggucagucacucuau

SEQ ID NO: 2557445 - RNA, 19 nt, Artificial Sequence
  Description of Artificial Sequence: Synthetic oligonucleotide
cucuauccuggguaaaauu

SEQ ID NO: 2557446 - RNA, 19 nt, Artificial Sequence
  Description of Artificial Sequence: Synthetic oligonucleotide
cugguacauaucaaauauu

SEQ ID NO: 2557447 - RNA, 19 nt, Artificial Sequence
  Description of Artificial Sequence: Synthetic oligonucleotide
gcugaacucuauggauucc

SEQ ID NO: 2557448 - RNA, 19 nt, Artificial Sequence
  Description of Artificial Sequence: Synthetic oligonucleotide
uggggucgacuuucacauc

SEQ ID NO: 2557449 - RNA, 19 nt, Artificial Sequence
  Description of Artificial Sequence: Synthetic oligonucleotide
cugcauccuugacgacagg

SEQ ID NO: 2557450 - RNA, 19 nt, Artificial Sequence
  Description of Artificial Sequence: Synthetic oligonucleotide
cacgcaaagcuauuuccuu

SEQ ID NO: 2557451 - RNA, 19 nt, Artificial Sequence
  Description of Artificial Sequence: Synthetic oligonucleotide
cgacaggcccacaucuggg

SEQ ID NO: 2557452 - RNA, 19 nt, Artificial Sequence
  Description of Artificial Sequence: Synthetic oligonucleotide
ccgcagaucccuggggucg

SEQ ID NO: 2557453 - RNA, 19 nt, Artificial Sequence
  Description of Artificial Sequence: Synthetic oligonucleotide
caccacguaagaauuccuu

SEQ ID NO: 2557454 - RNA, 19 nt, Artificial Sequence
  Description of Artificial Sequence: Synthetic oligonucleotide
gcugauugaagcagucucu

SEQ ID NO: 2557455 - RNA, 19 nt, Artificial Sequence
  Description of Artificial Sequence: Synthetic oligonucleotide
guucggauucucucugauu

SEQ ID NO: 2557456 - RNA, 19 nt, Artificial Sequence
  Description of Artificial Sequence: Synthetic oligonucleotide
ccaguguuuauaguaugaa

SEQ ID NO: 2557457 - RNA, 19 nt, Artificial Sequence
  Description of Artificial Sequence: Synthetic oligonucleotide
agcucucaacacacgcaaa

SEQ ID NO: 2557458 - RNA, 19 nt, Artificial Sequence
  Description of Artificial Sequence: Synthetic oligonucleotide
gcccacaucugggauucgc

SEQ ID NO: 2557459 - RNA, 19 nt, Artificial Sequence
  Description of Artificial Sequence: Synthetic oligonucleotide
cuggcagcugcaugaugua

SEQ ID NO: 2557460 - RNA, 19 nt, Artificial Sequence
  Description of Artificial Sequence: Synthetic oligonucleotide
ccugugugaauacgcugca

SEQ ID NO: 2557461 - RNA, 19 nt, Artificial Sequence
  Description of Artificial Sequence: Synthetic oligonucleotide
ggccucgggaucgaaaugu

SEQ ID NO: 2557462 - RNA, 19 nt, Artificial Sequence
  Description of Artificial Sequence: Synthetic oligonucleotide
cugggccucgggaucgaaa

SEQ ID NO: 2557463 - RNA, 19 nt, Artificial Sequence
  Description of Artificial Sequence: Synthetic oligonucleotide
caguuucuagcacucuguu

SEQ ID NO: 2557464 - RNA, 19 nt, Artificial Sequence
  Description of Artificial Sequence: Synthetic oligonucleotide
ccaccauaaucugcuggug

SEQ ID NO: 2557465 - RNA, 19 nt, Artificial Sequence
  Description of Artificial Sequence: Synthetic oligonucleotide
gcacugucugucguguuaa

SEQ ID NO: 2557466 - RNA, 19 nt, Artificial Sequence
  Description of Artificial Sequence: Synthetic oligonucleotide
gggaucgaaaugugucuau

SEQ ID NO: 2557467 - RNA, 19 nt, Artificial Sequence
  Description of Artificial Sequence: Synthetic oligonucleotide
gccucgggaucgaaaugug

SEQ ID NO: 2557468 - RNA, 19 nt, Artificial Sequence
  Description of Artificial Sequence: Synthetic oligonucleotide
cagucacucuauccugggu

SEQ ID NO: 2557469 - RNA, 19 nt, Artificial Sequence
  Description of Artificial Sequence: Synthetic oligonucleotide
uccugggccucgggaucga

SEQ ID NO: 2557470 - RNA, 19 nt, Artificial Sequence
  Description of Artificial Sequence: Synthetic oligonucleotide
caacacacgcaaagcuauu

SEQ ID NO: 2557471 - RNA, 19 nt, Artificial Sequence
  Description of Artificial Sequence: Synthetic oligonucleotide
cgagccucaccgcacuguc

SEQ ID NO: 2557472 - RNA, 19 nt, Artificial Sequence
  Description of Artificial Sequence: Synthetic oligonucleotide
ccucaccgcacugucuguc

SEQ ID NO: 2557473 - RNA, 19 nt, Artificial Sequence
  Description of Artificial Sequence: Synthetic oligonucleotide
ggacgagccucaccgcacu

SEQ ID NO: 2557474 - RNA, 19 nt, Artificial Sequence
  Description of Artificial Sequence: Synthetic oligonucleotide
ccgaacuucaaaugcuauu

SEQ ID NO: 2557475 - RNA, 19 nt, Artificial Sequence
  Description of Artificial Sequence: Synthetic oligonucleotide
cgcugcauccuugacgaca

SEQ ID NO: 2557476 - RNA, 19 nt, Artificial Sequence
  Description of Artificial Sequence: Synthetic oligonucleotide
ggguauggacgagccucac

SEQ ID NO: 2557477 - RNA, 19 nt, Artificial Sequence
  Description of Artificial Sequence: Synthetic oligonucleotide
gggucgacuuucacaucaa

SEQ ID NO: 2557478 - RNA, 19 nt, Artificial Sequence
  Description of Artificial Sequence: Synthetic oligonucleotide
cucuaccacccaguccugu

SEQ ID NO: 2557479 - RNA, 19 nt, Artificial Sequence
  Description of Artificial Sequence: Synthetic oligonucleotide
cugcaguuucuagcacucu

SEQ ID NO: 2557480 - RNA, 19 nt, Artificial Sequence
  Description of Artificial Sequence: Synthetic oligonucleotide
ccucgggaucgaaaugugu

SEQ ID NO: 2557481 - RNA, 19 nt, Artificial Sequence
  Description of Artificial Sequence: Synthetic oligonucleotide
cccgaacuucaaaugcuau

SEQ ID NO: 2557482 - RNA, 19 nt, Artificial Sequence
  Description of Artificial Sequence: Synthetic oligonucleotide
ggcccacaucugggauucg

SEQ ID NO: 2557483 - RNA, 19 nt, Artificial Sequence
  Description of Artificial Sequence: Synthetic oligonucleotide
cagaucccuggggucgacu

SEQ ID NO: 2557484 - RNA, 19 nt, Artificial Sequence
  Description of Artificial Sequence: Synthetic oligonucleotide
gcagaucccuggggucgac

SEQ ID NO: 2557485 - RNA, 19 nt, Artificial Sequence
  Description of Artificial Sequence: Synthetic oligonucleotide
gcacucuguugcugacacu

SEQ ID NO: 2557486 - RNA, 19 nt, Artificial Sequence
  Description of Artificial Sequence: Synthetic oligonucleotide
cgggaucgaaaugugucua

SEQ ID NO: 2557487 - RNA, 19 nt, Artificial Sequence
  Description of Artificial Sequence: Synthetic oligonucleotide
gggauucgcugaacucuau

SEQ ID NO: 2557488 - RNA, 19 nt, Artificial Sequence
  Description of Artificial Sequence: Synthetic oligonucleotide
cgcagaucccuggggucga

SEQ ID NO: 2557489 - RNA, 19 nt, Artificial Sequence
  Description of Artificial Sequence: Synthetic oligonucleotide
ccuugacgacaggcccaca

SEQ ID NO: 2557490 - RNA, 19 nt, Artificial Sequence
  Description of Artificial Sequence: Synthetic oligonucleotide
ccugggccucgggaucgaa

SEQ ID NO: 2557491 - RNA, 19 nt, Artificial Sequence
  Description of Artificial Sequence: Synthetic oligonucleotide
ccgcacugucugucguguu

SEQ ID NO: 2557492 - RNA, 19 nt, Artificial Sequence
  Description of Artificial Sequence: Synthetic oligonucleotide
cuugguuugaacuucaggg

SEQ ID NO: 2557493 - RNA, 19 nt, Artificial Sequence
  Description of Artificial Sequence: Synthetic oligonucleotide
aaaaccuuuggccaguggg

SEQ ID NO: 2557494 - RNA, 19 nt, Artificial Sequence
  Description of Artificial Sequence: Synthetic oligonucleotide
aauuacagaaccaaggcuc

SEQ ID NO: 2557495 - RNA, 19 nt, Artificial Sequence
  Description of Artificial Sequence: Synthetic oligonucleotide
aguaaaacaaccuuagucu

SEQ ID NO: 2557496 - RNA, 19 nt, Artificial Sequence
  Description of Artificial Sequence: Synthetic oligonucleotide
aaguacaucccacugaaag

SEQ ID NO: 2557497 - RNA, 19 nt, Artificial Sequence
  Description of Artificial Sequence: Synthetic oligonucleotide
uuaauuacagaaccaaggc

SEQ ID NO: 2557498 - RNA, 19 nt, Artificial Sequence
  Description of Artificial Sequence: Synthetic oligonucleotide
ugauacaaaaccuuuggcc

SEQ ID NO: 2557499 - RNA, 19 nt, Artificial Sequence
  Description of Artificial Sequence: Synthetic oligonucleotide
uuguuguucaaguacaucc

SEQ ID NO: 2557500 - RNA, 19 nt, Artificial Sequence
  Description of Artificial Sequence: Synthetic oligonucleotide
aaugguacaugccugucuc

SEQ ID NO: 2557501 - RNA, 19 nt, Artificial Sequence
  Description of Artificial Sequence: Synthetic oligonucleotide
acgcuguugauacaaaacc

SEQ ID NO: 2557502 - RNA, 19 nt, Artificial Sequence
  Description of Artificial Sequence: Synthetic oligonucleotide
uagugaaugaaccaaggca

SEQ ID NO: 2557503 - RNA, 19 nt, Artificial Sequence
  Description of Artificial Sequence: Synthetic oligonucleotide
guugauacaaaaccuuugg

SEQ ID NO: 2557504 - RNA, 19 nt, Artificial Sequence
  Description of Artificial Sequence: Synthetic oligonucleotide
augauggccagccagugcc

SEQ ID NO: 2557505 - RNA, 19 nt, Artificial Sequence
  Description of Artificial Sequence: Synthetic oligonucleotide
uuuuagugaaugaaccaag

SEQ ID NO: 2557506 - RNA, 19 nt, Artificial Sequence
  Description of Artificial Sequence: Synthetic oligonucleotide
uaaggaauuguccagucgu

SEQ ID NO: 2557507 - RNA, 19 nt, Artificial Sequence
  Description of Artificial Sequence: Synthetic oligonucleotide
ugagcuucggaaaaugaug

SEQ ID NO: 2557508 - RNA, 19 nt, Artificial Sequence
  Description of Artificial Sequence: Synthetic oligonucleotide
ugaaaggcgcuucaguucc

SEQ ID NO: 2557509 - RNA, 19 nt, Artificial Sequence
  Description of Artificial Sequence: Synthetic oligonucleotide
aaugauggccagccagugc

SEQ ID NO: 2557510 - RNA, 19 nt, Artificial Sequence
  Description of Artificial Sequence: Synthetic oligonucleotide
aguacaucccacugaaagg

SEQ ID NO: 2557511 - RNA, 19 nt, Artificial Sequence
  Description of Artificial Sequence: Synthetic oligonucleotide
aaacacauggccgagguga

SEQ ID NO: 2557512 - RNA, 19 nt, Artificial Sequence
  Description of Artificial Sequence: Synthetic oligonucleotide
uuagugaaugaaccaaggc

SEQ ID NO: 2557513 - RNA, 19 nt, Artificial Sequence
  Description of Artificial Sequence: Synthetic oligonucleotide
uuguaagggacccugaguc

SEQ ID NO: 2557514 - RNA, 19 nt, Artificial Sequence
  Description of Artificial Sequence: Synthetic oligonucleotide
uaauuacagaaccaaggcu

SEQ ID NO: 2557515 - RNA, 19 nt, Artificial Sequence
  Description of Artificial Sequence: Synthetic oligonucleotide
uguccuaaggaauugucca

SEQ ID NO: 2557516 - RNA, 19 nt, Artificial Sequence
  Description of Artificial Sequence: Synthetic oligonucleotide
uucucagaacugaagagug

SEQ ID NO: 2557517 - RNA, 19 nt, Artificial Sequence
  Description of Artificial Sequence: Synthetic oligonucleotide
uguugauacaaaaccuuug

SEQ ID NO: 2557518 - RNA, 19 nt, Artificial Sequence
  Description of Artificial Sequence: Synthetic oligonucleotide
agaaccaaggcucuacaag

SEQ ID NO: 2557519 - RNA, 19 nt, Artificial Sequence
  Description of Artificial Sequence: Synthetic oligonucleotide
uguuguucaaguacauccc

SEQ ID NO: 2557520 - RNA, 19 nt, Artificial Sequence
  Description of Artificial Sequence: Synthetic oligonucleotide
uugaguuguuuucagguga

SEQ ID NO: 2557521 - RNA, 19 nt, Artificial Sequence
  Description of Artificial Sequence: Synthetic oligonucleotide
ugguuugaacuucagggcc

SEQ ID NO: 2557522 - RNA, 19 nt, Artificial Sequence
  Description of Artificial Sequence: Synthetic oligonucleotide
gugacuaagaagcuguggc

SEQ ID NO: 2557523 - RNA, 19 nt, Artificial Sequence
  Description of Artificial Sequence: Synthetic oligonucleotide
cuugcuuagacagagcuug

SEQ ID NO: 2557524 - RNA, 19 nt, Artificial Sequence
  Description of Artificial Sequence: Synthetic oligonucleotide
ugugccaugagcuucggaa

SEQ ID NO: 2557525 - RNA, 19 nt, Artificial Sequence
  Description of Artificial Sequence: Synthetic oligonucleotide
cauacacaaugguacaugc

SEQ ID NO: 2557526 - RNA, 19 nt, Artificial Sequence
  Description of Artificial Sequence: Synthetic oligonucleotide
gaagagugggcuaucacag

SEQ ID NO: 2557527 - RNA, 19 nt, Artificial Sequence
  Description of Artificial Sequence: Synthetic oligonucleotide
agggccacgcuguugauac

SEQ ID NO: 2557528 - RNA, 19 nt, Artificial Sequence
  Description of Artificial Sequence: Synthetic oligonucleotide
aagagugggcuaucacagc

SEQ ID NO: 2557529 - RNA, 19 nt, Artificial Sequence
  Description of Artificial Sequence: Synthetic oligonucleotide
caucaggaaacacauggcc

SEQ ID NO: 2557530 - RNA, 19 nt, Artificial Sequence
  Description of Artificial Sequence: Synthetic oligonucleotide
aaagcugggguugaguugu

SEQ ID NO: 2557531 - RNA, 19 nt, Artificial Sequence
  Description of Artificial Sequence: Synthetic oligonucleotide
gagcuucggaaaaugaugg

SEQ ID NO: 2557532 - RNA, 19 nt, Artificial Sequence
  Description of Artificial Sequence: Synthetic oligonucleotide
auacaaaaccuuuggccag

SEQ ID NO: 2557533 - RNA, 19 nt, Artificial Sequence
  Description of Artificial Sequence: Synthetic oligonucleotide
gaaccaaggcucuacaaga

SEQ ID NO: 2557534 - RNA, 19 nt, Artificial Sequence
  Description of Artificial Sequence: Synthetic oligonucleotide
aucccgaccccgcacaacc

SEQ ID NO: 2557535 - RNA, 19 nt, Artificial Sequence
  Description of Artificial Sequence: Synthetic oligonucleotide
ucucagaacugaagagugg

SEQ ID NO: 2557536 - RNA, 19 nt, Artificial Sequence
  Description of Artificial Sequence: Synthetic oligonucleotide
ugacgcuuccaccaacggg

SEQ ID NO: 2557537 - RNA, 19 nt, Artificial Sequence
  Description of Artificial Sequence: Synthetic oligonucleotide
uuagacagagcuuggacuu

SEQ ID NO: 2557538 - RNA, 19 nt, Artificial Sequence
  Description of Artificial Sequence: Synthetic oligonucleotide
ugcgaguauguccuaagga

SEQ ID NO: 2557539 - RNA, 19 nt, Artificial Sequence
  Description of Artificial Sequence: Synthetic oligonucleotide
uguucaaguacaucccacu

SEQ ID NO: 2557540 - RNA, 19 nt, Artificial Sequence
  Description of Artificial Sequence: Synthetic oligonucleotide
ucacacugcuugcagacca

SEQ ID NO: 2557541 - RNA, 19 nt, Artificial Sequence
  Description of Artificial Sequence: Synthetic oligonucleotide
agugaaugaaccaaggcau

SEQ ID NO: 2557542 - RNA, 19 nt, Artificial Sequence
  Description of Artificial Sequence: Synthetic oligonucleotide
auguccuaaggaauugucc

SEQ ID NO: 2557543 - RNA, 19 nt, Artificial Sequence
  Description of Artificial Sequence: Synthetic oligonucleotide
aucaggaaacacauggccg

SEQ ID NO: 2557544 - RNA, 19 nt, Artificial Sequence
  Description of Artificial Sequence: Synthetic oligonucleotide
ugaaugaaccaaggcaucc

SEQ ID NO: 2557545 - RNA, 19 nt, Artificial Sequence
  Description of Artificial Sequence: Synthetic oligonucleotide
cuaaggaauuguccagucg

SEQ ID NO: 2557546 - RNA, 19 nt, Artificial Sequence
  Description of Artificial Sequence: Synthetic oligonucleotide
aguaggcgcgccaugacgc

SEQ ID NO: 2557547 - RNA, 19 nt, Artificial Sequence
  Description of Artificial Sequence: Synthetic oligonucleotide
acaaccccgaacuggccgc

SEQ ID NO: 2557548 - RNA, 19 nt, Artificial Sequence
  Description of Artificial Sequence: Synthetic oligonucleotide
ucucuggugacguggaacu

SEQ ID NO: 2557549 - RNA, 19 nt, Artificial Sequence
  Description of Artificial Sequence: Synthetic oligonucleotide
gauggucagugcuugcuug

SEQ ID NO: 2557550 - RNA, 19 nt, Artificial Sequence
  Description of Artificial Sequence: Synthetic oligonucleotide
uauguccuaaggaauuguc

SEQ ID NO: 2557551 - RNA, 19 nt, Artificial Sequence
  Description of Artificial Sequence: Synthetic oligonucleotide
aguccccgcaucccgaccc

SEQ ID NO: 2557552 - RNA, 19 nt, Artificial Sequence
  Description of Artificial Sequence: Synthetic oligonucleotide
caugacgcuuccaccaacg

SEQ ID NO: 2557553 - RNA, 19 nt, Artificial Sequence
  Description of Artificial Sequence: Synthetic oligonucleotide
agcuucggaaaaugauggc

SEQ ID NO: 2557554 - RNA, 19 nt, Artificial Sequence
  Description of Artificial Sequence: Synthetic oligonucleotide
uacaagauggugggcaaag

SEQ ID NO: 2557555 - RNA, 19 nt, Artificial Sequence
  Description of Artificial Sequence: Synthetic oligonucleotide
guugaguuguuuucaggug

SEQ ID NO: 2557556 - RNA, 19 nt, Artificial Sequence
  Description of Artificial Sequence: Synthetic oligonucleotide
ugacuaagaagcuguggcu

SEQ ID NO: 2557557 - RNA, 19 nt, Artificial Sequence
  Description of Artificial Sequence: Synthetic oligonucleotide
cuucacacugcuugcagac

SEQ ID NO: 2557558 - RNA, 19 nt, Artificial Sequence
  Description of Artificial Sequence: Synthetic oligonucleotide
ugaguuguuuucaggugac

SEQ ID NO: 2557559 - RNA, 19 nt, Artificial Sequence
  Description of Artificial Sequence: Synthetic oligonucleotide
uucggaaaaugauggccag

SEQ ID NO: 2557560 - RNA, 19 nt, Artificial Sequence
  Description of Artificial Sequence: Synthetic oligonucleotide
uguaagggacccugagucc

SEQ ID NO: 2557561 - RNA, 19 nt, Artificial Sequence
  Description of Artificial Sequence: Synthetic oligonucleotide
gaaagcugggguugaguug

SEQ ID NO: 2557562 - RNA, 19 nt, Artificial Sequence
  Description of Artificial Sequence: Synthetic oligonucleotide
ccaaggcucuacaagaugg

SEQ ID NO: 2557563 - RNA, 19 nt, Artificial Sequence
  Description of Artificial Sequence: Synthetic oligonucleotide
ugcgugacucucaucggag

SEQ ID NO: 2557564 - RNA, 19 nt, Artificial Sequence
  Description of Artificial Sequence: Synthetic oligonucleotide
cuuuguaagggacccugag

SEQ ID NO: 2557565 - RNA, 19 nt, Artificial Sequence
  Description of Artificial Sequence: Synthetic oligonucleotide
auacacaaugguacaugcc

SEQ ID NO: 2557566 - RNA, 19 nt, Artificial Sequence
  Description of Artificial Sequence: Synthetic oligonucleotide
gagcuuggacuuuguaagg

SEQ ID NO: 2557567 - RNA, 19 nt, Artificial Sequence
  Description of Artificial Sequence: Synthetic oligonucleotide
ugagcuucacacugcuugc

SEQ ID NO: 2557568 - RNA, 19 nt, Artificial Sequence
  Description of Artificial Sequence: Synthetic oligonucleotide
guucaaguacaucccacug

SEQ ID NO: 2557569 - RNA, 19 nt, Artificial Sequence
  Description of Artificial Sequence: Synthetic oligonucleotide
cacgcuguugauacaaaac

SEQ ID NO: 2557570 - RNA, 19 nt, Artificial Sequence
  Description of Artificial Sequence: Synthetic oligonucleotide
acuaagaagcuguggcuca

SEQ ID NO: 2557571 - RNA, 19 nt, Artificial Sequence
  Description of Artificial Sequence: Synthetic oligonucleotide
augcgaguauguccuaagg

SEQ ID NO: 2557572 - RNA, 19 nt, Artificial Sequence
  Description of Artificial Sequence: Synthetic oligonucleotide
gaacuggccgcccaggcac

SEQ ID NO: 2557573 - RNA, 19 nt, Artificial Sequence
  Description of Artificial Sequence: Synthetic oligonucleotide
agaaagcugggguugaguu

SEQ ID NO: 2557574 - RNA, 19 nt, Artificial Sequence
  Description of Artificial Sequence: Synthetic oligonucleotide
aaggaauuguccagucguc

SEQ ID NO: 2557575 - RNA, 19 nt, Artificial Sequence
  Description of Artificial Sequence: Synthetic oligonucleotide
gcuaucacagcauacacaa

SEQ ID NO: 2557576 - RNA, 19 nt, Artificial Sequence
  Description of Artificial Sequence: Synthetic oligonucleotide
aaaugauggccagccagug

SEQ ID NO: 2557577 - RNA, 19 nt, Artificial Sequence
  Description of Artificial Sequence: Synthetic oligonucleotide
gacuuuguaagggacccug

SEQ ID NO: 2557578 - RNA, 19 nt, Artificial Sequence
  Description of Artificial Sequence: Synthetic oligonucleotide
aagcaagggccuccuagug

SEQ ID NO: 2557579 - RNA, 19 nt, Artificial Sequence
  Description of Artificial Sequence: Synthetic oligonucleotide
agugccagagcaguacuuc

SEQ ID NO: 2557580 - RNA, 19 nt, Artificial Sequence
  Description of Artificial Sequence: Synthetic oligonucleotide
ugggcuaucacagcauaca

SEQ ID NO: 2557581 - RNA, 19 nt, Artificial Sequence
  Description of Artificial Sequence: Synthetic oligonucleotide
aggcucuacaagauggugg

SEQ ID NO: 2557582 - RNA, 19 nt, Artificial Sequence
  Description of Artificial Sequence: Synthetic oligonucleotide
ucuggugacguggaacugc

SEQ ID NO: 2557583 - RNA, 19 nt, Artificial Sequence
  Description of Artificial Sequence: Synthetic oligonucleotide
ucaucggagccuucugugc

SEQ ID NO: 2557584 - RNA, 19 nt, Artificial Sequence
  Description of Artificial Sequence: Synthetic oligonucleotide
gagcaguacuucuucucag

SEQ ID NO: 2557585 - RNA, 19 nt, Artificial Sequence
  Description of Artificial Sequence: Synthetic oligonucleotide
ucaggugacuaagaagcug

SEQ ID NO: 2557586 - RNA, 19 nt, Artificial Sequence
  Description of Artificial Sequence: Synthetic oligonucleotide
uugcuuagacagagcuugg

SEQ ID NO: 2557587 - RNA, 19 nt, Artificial Sequence
  Description of Artificial Sequence: Synthetic oligonucleotide
cacaaccccgaacuggccg

SEQ ID NO: 2557588 - RNA, 19 nt, Artificial Sequence
  Description of Artificial Sequence: Synthetic oligonucleotide
ucuacaagauggugggcaa

SEQ ID NO: 2557589 - RNA, 19 nt, Artificial Sequence
  Description of Artificial Sequence: Synthetic oligonucleotide
gacuaagaagcuguggcuc

SEQ ID NO: 2557590 - RNA, 19 nt, Artificial Sequence
  Description of Artificial Sequence: Synthetic oligonucleotide
aggcgcuucaguuccuuuc

SEQ ID NO: 2557591 - RNA, 19 nt, Artificial Sequence
  Description of Artificial Sequence: Synthetic oligonucleotide
acaagauggugggcaaagc

SEQ ID NO: 2557592 - RNA, 19 nt, Artificial Sequence
  Description of Artificial Sequence: Synthetic oligonucleotide
aguauguccuaaggaauug

SEQ ID NO: 2557593 - RNA, 19 nt, Artificial Sequence
  Description of Artificial Sequence: Synthetic oligonucleotide
cugaaaggcgcuucaguuc

SEQ ID NO: 2557594 - RNA, 19 nt, Artificial Sequence
  Description of Artificial Sequence: Synthetic oligonucleotide
aaggcucuacaagauggug

SEQ ID NO: 2557595 - RNA, 19 nt, Artificial Sequence
  Description of Artificial Sequence: Synthetic oligonucleotide
ucacgugcagccaguaaaa

SEQ ID NO: 2557596 - RNA, 19 nt, Artificial Sequence
  Description of Artificial Sequence: Synthetic oligonucleotide
guuuucaggugacuaagaa

SEQ ID NO: 2557597 - RNA, 19 nt, Artificial Sequence
  Description of Artificial Sequence: Synthetic oligonucleotide
caugcgaguauguccuaag

SEQ ID NO: 2557598 - RNA, 19 nt, Artificial Sequence
  Description of Artificial Sequence: Synthetic oligonucleotide
uccagucgucucaggaucc

SEQ ID NO: 2557599 - RNA, 19 nt, Artificial Sequence
  Description of Artificial Sequence: Synthetic oligonucleotide
guacaugccugucuccuug

SEQ ID NO: 2557600 - RNA, 19 nt, Artificial Sequence
  Description of Artificial Sequence: Synthetic oligonucleotide
cccugcgugacucucaucg

SEQ ID NO: 2557601 - RNA, 19 nt, Artificial Sequence
  Description of Artificial Sequence: Synthetic oligonucleotide
caucggagccuucugugcc

SEQ ID NO: 2557602 - RNA, 19 nt, Artificial Sequence
  Description of Artificial Sequence: Synthetic oligonucleotide
caucuuaauuacagaacca

SEQ ID NO: 2557603 - RNA, 19 nt, Artificial Sequence
  Description of Artificial Sequence: Synthetic oligonucleotide
acgugcagccaguaaaaca

SEQ ID NO: 2557604 - RNA, 19 nt, Artificial Sequence
  Description of Artificial Sequence: Synthetic oligonucleotide
uccaccaacggguuccccu

SEQ ID NO: 2557605 - RNA, 19 nt, Artificial Sequence
  Description of Artificial Sequence: Synthetic oligonucleotide
aacccaagagaaagcuggg

SEQ ID NO: 2557606 - RNA, 19 nt, Artificial Sequence
  Description of Artificial Sequence: Synthetic oligonucleotide
agcaguacuucuucucaga

SEQ ID NO: 2557607 - RNA, 19 nt, Artificial Sequence
  Description of Artificial Sequence: Synthetic oligonucleotide
acccugaguccccgcaucc

SEQ ID NO: 2557608 - RNA, 19 nt, Artificial Sequence
  Description of Artificial Sequence: Synthetic oligonucleotide
uacagaaccaaggcucuac

SEQ ID NO: 2557609 - RNA, 19 nt, Artificial Sequence
  Description of Artificial Sequence: Synthetic oligonucleotide
accaaggcucuacaagaug

SEQ ID NO: 2557610 - RNA, 19 nt, Artificial Sequence
  Description of Artificial Sequence: Synthetic oligonucleotide
augacgcuuccaccaacgg

SEQ ID NO: 2557611 - RNA, 19 nt, Artificial Sequence
  Description of Artificial Sequence: Synthetic oligonucleotide
cuuagacagagcuuggacu

SEQ ID NO: 2557612 - RNA, 19 nt, Artificial Sequence
  Description of Artificial Sequence: Synthetic oligonucleotide
uaagaagcuguggcucacg

SEQ ID NO: 2557613 - RNA, 19 nt, Artificial Sequence
  Description of Artificial Sequence: Synthetic oligonucleotide
caagauggugggcaaagca

SEQ ID NO: 2557614 - RNA, 19 nt, Artificial Sequence
  Description of Artificial Sequence: Synthetic oligonucleotide
auuacagaaccaaggcucu

SEQ ID NO: 2557615 - RNA, 19 nt, Artificial Sequence
  Description of Artificial Sequence: Synthetic oligonucleotide
uccuaaggaauuguccagu

SEQ ID NO: 2557616 - RNA, 19 nt, Artificial Sequence
  Description of Artificial Sequence: Synthetic oligonucleotide
ugccaugagcuucggaaaa

SEQ ID NO: 2557617 - RNA, 19 nt, Artificial Sequence
  Description of Artificial Sequence: Synthetic oligonucleotide
ugccagucagucuugcuua

SEQ ID NO: 2557618 - RNA, 19 nt, Artificial Sequence
  Description of Artificial Sequence: Synthetic oligonucleotide
ucuugcuuagacagagcuu

SEQ ID NO: 2557619 - RNA, 19 nt, Artificial Sequence
  Description of Artificial Sequence: Synthetic oligonucleotide
aaacaaccuuagucuaaau

SEQ ID NO: 2557620 - RNA, 19 nt, Artificial Sequence
  Description of Artificial Sequence: Synthetic oligonucleotide
cagugcucgcaguaggcgc

SEQ ID NO: 2557621 - RNA, 19 nt, Artificial Sequence
  Description of Artificial Sequence: Synthetic oligonucleotide
caguaggcgcgccaugacg

SEQ ID NO: 2557622 - RNA, 19 nt, Artificial Sequence
  Description of Artificial Sequence: Synthetic oligonucleotide
accaacggguuccccuccc

SEQ ID NO: 2557623 - RNA, 19 nt, Artificial Sequence
  Description of Artificial Sequence: Synthetic oligonucleotide
ugggguugaguuguuuuca

SEQ ID NO: 2557624 - RNA, 19 nt, Artificial Sequence
  Description of Artificial Sequence: Synthetic oligonucleotide
gaaacacauggccgaggug

SEQ ID NO: 2557625 - RNA, 19 nt, Artificial Sequence
  Description of Artificial Sequence: Synthetic oligonucleotide
gacgcuuccaccaacgggu

SEQ ID NO: 2557626 - RNA, 19 nt, Artificial Sequence
  Description of Artificial Sequence: Synthetic oligonucleotide
ggugacguggaacugcuca

SEQ ID NO: 2557627 - RNA, 19 nt, Artificial Sequence
  Description of Artificial Sequence: Synthetic oligonucleotide
gccaguaaaacaaccuuag

SEQ ID NO: 2557628 - RNA, 19 nt, Artificial Sequence
  Description of Artificial Sequence: Synthetic oligonucleotide
ugcuugguuugaacuucag

SEQ ID NO: 2557629 - RNA, 19 nt, Artificial Sequence
  Description of Artificial Sequence: Synthetic oligonucleotide
aacugaagagugggcuauc

SEQ ID NO: 2557630 - RNA, 19 nt, Artificial Sequence
  Description of Artificial Sequence: Synthetic oligonucleotide
gcuucggaaaaugauggcc

SEQ ID NO: 2557631 - RNA, 19 nt, Artificial Sequence
  Description of Artificial Sequence: Synthetic oligonucleotide
acacugcuugcagaccacc

SEQ ID NO: 2557632 - RNA, 19 nt, Artificial Sequence
  Description of Artificial Sequence: Synthetic oligonucleotide
uaagggacccugagucccc

SEQ ID NO: 2557633 - RNA, 19 nt, Artificial Sequence
  Description of Artificial Sequence: Synthetic oligonucleotide
gaaugaaccaaggcaucca

SEQ ID NO: 2557634 - RNA, 19 nt, Artificial Sequence
  Description of Artificial Sequence: Synthetic oligonucleotide
acaaugguacaugccuguc

SEQ ID NO: 2557635 - RNA, 19 nt, Artificial Sequence
  Description of Artificial Sequence: Synthetic oligonucleotide
cagagcaguacuucuucuc

SEQ ID NO: 2557636 - RNA, 19 nt, Artificial Sequence
  Description of Artificial Sequence: Synthetic oligonucleotide
aggcaccuccagcaagggc

SEQ ID NO: 2557637 - RNA, 19 nt, Artificial Sequence
  Description of Artificial Sequence: Synthetic oligonucleotide
cucuacaagauggugggca

SEQ ID NO: 2557638 - RNA, 19 nt, Artificial Sequence
  Description of Artificial Sequence: Synthetic oligonucleotide
gucucaggaucccugcgug

SEQ ID NO: 2557639 - RNA, 19 nt, Artificial Sequence
  Description of Artificial Sequence: Synthetic oligonucleotide
agugcucgcaguaggcgcg

SEQ ID NO: 2557640 - RNA, 19 nt, Artificial Sequence
  Description of Artificial Sequence: Synthetic oligonucleotide
uacaaaaccuuuggccagu

SEQ ID NO: 2557641 - RNA, 19 nt, Artificial Sequence
  Description of Artificial Sequence: Synthetic oligonucleotide
acguggaacugcucaggag

SEQ ID NO: 2557642 - RNA, 19 nt, Artificial Sequence
  Description of Artificial Sequence: Synthetic oligonucleotide
caugagcuucggaaaauga

SEQ ID NO: 2557643 - RNA, 19 nt, Artificial Sequence
  Description of Artificial Sequence: Synthetic oligonucleotide
gguugaguuguuuucaggu

SEQ ID NO: 2557644 - RNA, 19 nt, Artificial Sequence
  Description of Artificial Sequence: Synthetic oligonucleotide
ugauggucagugcuugcuu

SEQ ID NO: 2557645 - RNA, 19 nt, Artificial Sequence
  Description of Artificial Sequence: Synthetic oligonucleotide
caaaaccuuuggccagugg

SEQ ID NO: 2557646 - RNA, 19 nt, Artificial Sequence
  Description of Artificial Sequence: Synthetic oligonucleotide
guccagucgucucaggauc

SEQ ID NO: 2557647 - RNA, 19 nt, Artificial Sequence
  Description of Artificial Sequence: Synthetic oligonucleotide
gacguggaacugcucagga

SEQ ID NO: 2557648 - RNA, 19 nt, Artificial Sequence
  Description of Artificial Sequence: Synthetic oligonucleotide
ucggaaaaugauggccagc

SEQ ID NO: 2557649 - RNA, 19 nt, Artificial Sequence
  Description of Artificial Sequence: Synthetic oligonucleotide
gcgaguauguccuaaggaa

SEQ ID NO: 2557650 - RNA, 19 nt, Artificial Sequence
  Description of Artificial Sequence: Synthetic oligonucleotide
uccuagugauggucagugc

SEQ ID NO: 2557651 - RNA, 19 nt, Artificial Sequence
  Description of Artificial Sequence: Synthetic oligonucleotide
ggguugaguuguuuucagg

SEQ ID NO: 2557652 - RNA, 19 nt, Artificial Sequence
  Description of Artificial Sequence: Synthetic oligonucleotide
augagcuucggaaaaugau

SEQ ID NO: 2557653 - RNA, 19 nt, Artificial Sequence
  Description of Artificial Sequence: Synthetic oligonucleotide
gucgucucaggaucccugc

SEQ ID NO: 2557654 - RNA, 19 nt, Artificial Sequence
  Description of Artificial Sequence: Synthetic oligonucleotide
ugcuuagacagagcuugga

SEQ ID NO: 2557655 - RNA, 19 nt, Artificial Sequence
  Description of Artificial Sequence: Synthetic oligonucleotide
augaaccaaggcauccauc

SEQ ID NO: 2557656 - RNA, 19 nt, Artificial Sequence
  Description of Artificial Sequence: Synthetic oligonucleotide
aggaaacacauggccgagg

SEQ ID NO: 2557657 - RNA, 19 nt, Artificial Sequence
  Description of Artificial Sequence: Synthetic oligonucleotide
uuugaacuucagggccacg

SEQ ID NO: 2557658 - RNA, 19 nt, Artificial Sequence
  Description of Artificial Sequence: Synthetic oligonucleotide
ucaggaucccugcgugacu

SEQ ID NO: 2557659 - RNA, 19 nt, Artificial Sequence
  Description of Artificial Sequence: Synthetic oligonucleotide
agugggcuaucacagcaua

SEQ ID NO: 2557660 - RNA, 19 nt, Artificial Sequence
  Description of Artificial Sequence: Synthetic oligonucleotide
cucaggaucccugcgugac

SEQ ID NO: 2557661 - RNA, 19 nt, Artificial Sequence
  Description of Artificial Sequence: Synthetic oligonucleotide
acugaagagugggcuauca

SEQ ID NO: 2557662 - RNA, 19 nt, Artificial Sequence
  Description of Artificial Sequence: Synthetic oligonucleotide
ggaauuguccagucgucuc

SEQ ID NO: 2557663 - RNA, 19 nt, Artificial Sequence
  Description of Artificial Sequence: Synthetic oligonucleotide
caggugacuaagaagcugu

SEQ ID NO: 2557664 - RNA, 19 nt, Artificial Sequence
  Description of Artificial Sequence: Synthetic oligonucleotide
cuccaugcgaguauguccu

SEQ ID NO: 2557665 - RNA, 19 nt, Artificial Sequence
  Description of Artificial Sequence: Synthetic oligonucleotide
ucugccagucagucuugcu

SEQ ID NO: 2557666 - RNA, 19 nt, Artificial Sequence
  Description of Artificial Sequence: Synthetic oligonucleotide
ccaucaggaaacacauggc

SEQ ID NO: 2557667 - RNA, 19 nt, Artificial Sequence
  Description of Artificial Sequence: Synthetic oligonucleotide
ucccacaacccaagagaaa

SEQ ID NO: 2557668 - RNA, 19 nt, Artificial Sequence
  Description of Artificial Sequence: Synthetic oligonucleotide
ugccagagcaguacuucuu

SEQ ID NO: 2557669 - RNA, 19 nt, Artificial Sequence
  Description of Artificial Sequence: Synthetic oligonucleotide
accaccuccaugcgaguau

SEQ ID NO: 2557670 - RNA, 19 nt, Artificial Sequence
  Description of Artificial Sequence: Synthetic oligonucleotide
acacauggccgaggugagc

SEQ ID NO: 2557671 - RNA, 19 nt, Artificial Sequence
  Description of Artificial Sequence: Synthetic oligonucleotide
accccgcacaaccccgaac

SEQ ID NO: 2557672 - RNA, 19 nt, Artificial Sequence
  Description of Artificial Sequence: Synthetic oligonucleotide
aaccccgaacuggccgccc

SEQ ID NO: 2557673 - RNA, 19 nt, Artificial Sequence
  Description of Artificial Sequence: Synthetic oligonucleotide
guuugaacuucagggccac

SEQ ID NO: 2557674 - RNA, 19 nt, Artificial Sequence
  Description of Artificial Sequence: Synthetic oligonucleotide
aucccacaacccaagagaa

SEQ ID NO: 2557675 - RNA, 19 nt, Artificial Sequence
  Description of Artificial Sequence: Synthetic oligonucleotide
cggaaaaugauggccagcc

SEQ ID NO: 2557676 - RNA, 19 nt, Artificial Sequence
  Description of Artificial Sequence: Synthetic oligonucleotide
gugaaugaaccaaggcauc

SEQ ID NO: 2557677 - RNA, 19 nt, Artificial Sequence
  Description of Artificial Sequence: Synthetic oligonucleotide
ugaguccccgcaucccgac

SEQ ID NO: 2557678 - RNA, 19 nt, Artificial Sequence
  Description of Artificial Sequence: Synthetic oligonucleotide
agucgucucaggaucccug

SEQ ID NO: 2557679 - RNA, 19 nt, Artificial Sequence
  Description of Artificial Sequence: Synthetic oligonucleotide
gggcuaucacagcauacac

SEQ ID NO: 2557680 - RNA, 19 nt, Artificial Sequence
  Description of Artificial Sequence: Synthetic oligonucleotide
cucucaucggagccuucug

SEQ ID NO: 2557681 - RNA, 19 nt, Artificial Sequence
  Description of Artificial Sequence: Synthetic oligonucleotide
cacacugcuugcagaccac

SEQ ID NO: 2557682 - RNA, 19 nt, Artificial Sequence
  Description of Artificial Sequence: Synthetic oligonucleotide
acaaaaccuuuggccagug

SEQ ID NO: 2557683 - RNA, 19 nt, Artificial Sequence
  Description of Artificial Sequence: Synthetic oligonucleotide
caggaaacacauggccgag

SEQ ID NO: 2557684 - RNA, 19 nt, Artificial Sequence
  Description of Artificial Sequence: Synthetic oligonucleotide
gacccugaguccccgcauc

SEQ ID NO: 2557685 - RNA, 19 nt, Artificial Sequence
  Description of Artificial Sequence: Synthetic oligonucleotide
caggaucccugcgugacuc

SEQ ID NO: 2557686 - RNA, 19 nt, Artificial Sequence
  Description of Artificial Sequence: Synthetic oligonucleotide
agcaagggcaggccccgca

SEQ ID NO: 2557687 - RNA, 19 nt, Artificial Sequence
  Description of Artificial Sequence: Synthetic oligonucleotide
aaggcgcuucaguuccuuu

SEQ ID NO: 2557688 - RNA, 19 nt, Artificial Sequence
  Description of Artificial Sequence: Synthetic oligonucleotide
ccuaaggaauuguccaguc

SEQ ID NO: 2557689 - RNA, 19 nt, Artificial Sequence
  Description of Artificial Sequence: Synthetic oligonucleotide
cuucaguuccuuucucucu

SEQ ID NO: 2557690 - RNA, 19 nt, Artificial Sequence
  Description of Artificial Sequence: Synthetic oligonucleotide
ccugaguccccgcaucccg

SEQ ID NO: 2557691 - RNA, 19 nt, Artificial Sequence
  Description of Artificial Sequence: Synthetic oligonucleotide
ucccgaccccgcacaaccc

SEQ ID NO: 2557692 - RNA, 19 nt, Artificial Sequence
  Description of Artificial Sequence: Synthetic oligonucleotide
ucugugccaugagcuucgg

SEQ ID NO: 2557693 - RNA, 19 nt, Artificial Sequence
  Description of Artificial Sequence: Synthetic oligonucleotide
cgaggugagcuucacacug

SEQ ID NO: 2557694 - RNA, 19 nt, Artificial Sequence
  Description of Artificial Sequence: Synthetic oligonucleotide
gaguauguccuaaggaauu

SEQ ID NO: 2557695 - RNA, 19 nt, Artificial Sequence
  Description of Artificial Sequence: Synthetic oligonucleotide
cugcgugacucucaucgga

SEQ ID NO: 2557696 - RNA, 19 nt, Artificial Sequence
  Description of Artificial Sequence: Synthetic oligonucleotide
cacaaugguacaugccugu

SEQ ID NO: 2557697 - RNA, 19 nt, Artificial Sequence
  Description of Artificial Sequence: Synthetic oligonucleotide
uggucagugcuugcuuggu

SEQ ID NO: 2557698 - RNA, 19 nt, Artificial Sequence
  Description of Artificial Sequence: Synthetic oligonucleotide
gaacugaagagugggcuau

SEQ ID NO: 2557699 - RNA, 19 nt, Artificial Sequence
  Description of Artificial Sequence: Synthetic oligonucleotide
aucccugcgugacucucau

SEQ ID NO: 2557700 - RNA, 19 nt, Artificial Sequence
  Description of Artificial Sequence: Synthetic oligonucleotide
ugacucucaucggagccuu

SEQ ID NO: 2557701 - RNA, 19 nt, Artificial Sequence
  Description of Artificial Sequence: Synthetic oligonucleotide
cauggccgaggugagcuuc

SEQ ID NO: 2557702 - RNA, 19 nt, Artificial Sequence
  Description of Artificial Sequence: Synthetic oligonucleotide
ucgcaguaggcgcgccaug

SEQ ID NO: 2557703 - RNA, 19 nt, Artificial Sequence
  Description of Artificial Sequence: Synthetic oligonucleotide
cacaacccaagagaaagcu

SEQ ID NO: 2557704 - RNA, 19 nt, Artificial Sequence
  Description of Artificial Sequence: Synthetic oligonucleotide
cgugacucucaucggagcc

SEQ ID NO: 2557705 - RNA, 19 nt, Artificial Sequence
  Description of Artificial Sequence: Synthetic oligonucleotide
cacgugcagccaguaaaac

SEQ ID NO: 2557706 - RNA, 19 nt, Artificial Sequence
  Description of Artificial Sequence: Synthetic oligonucleotide
gugggcuaucacagcauac

SEQ ID NO: 2557707 - RNA, 19 nt, Artificial Sequence
  Description of Artificial Sequence: Synthetic oligonucleotide
gagcuucacacugcuugca

SEQ ID NO: 2557708 - RNA, 19 nt, Artificial Sequence
  Description of Artificial Sequence: Synthetic oligonucleotide
ggcuaucacagcauacaca

SEQ ID NO: 2557709 - RNA, 19 nt, Artificial Sequence
  Description of Artificial Sequence: Synthetic oligonucleotide
aggugacuaagaagcugug

SEQ ID NO: 2557710 - RNA, 19 nt, Artificial Sequence
  Description of Artificial Sequence: Synthetic oligonucleotide
gaucccugcgugacucuca

SEQ ID NO: 2557711 - RNA, 19 nt, Artificial Sequence
  Description of Artificial Sequence: Synthetic oligonucleotide
cuagugauggucagugcuu

SEQ ID NO: 2557712 - RNA, 19 nt, Artificial Sequence
  Description of Artificial Sequence: Synthetic oligonucleotide
caccaacggguuccccucc

SEQ ID NO: 2557713 - RNA, 19 nt, Artificial Sequence
  Description of Artificial Sequence: Synthetic oligonucleotide
cuuccaccaacggguuccc

SEQ ID NO: 2557714 - RNA, 19 nt, Artificial Sequence
  Description of Artificial Sequence: Synthetic oligonucleotide
aggcgcgccaugacgcuuc

SEQ ID NO: 2557715 - RNA, 19 nt, Artificial Sequence
  Description of Artificial Sequence: Synthetic oligonucleotide
ccugcgugacucucaucgg

SEQ ID NO: 2557716 - RNA, 19 nt, Artificial Sequence
  Description of Artificial Sequence: Synthetic oligonucleotide
gccagucagucuugcuuag

SEQ ID NO: 2557717 - RNA, 19 nt, Artificial Sequence
  Description of Artificial Sequence: Synthetic oligonucleotide
caggcaccuccagcaaggg

SEQ ID NO: 2557718 - RNA, 19 nt, Artificial Sequence
  Description of Artificial Sequence: Synthetic oligonucleotide
cacugaaaggcgcuucagu

SEQ ID NO: 2557719 - RNA, 19 nt, Artificial Sequence
  Description of Artificial Sequence: Synthetic oligonucleotide
gcgugacucucaucggagc

SEQ ID NO: 2557720 - RNA, 19 nt, Artificial Sequence
  Description of Artificial Sequence: Synthetic oligonucleotide
ccuagugauggucagugcu

SEQ ID NO: 2557721 - RNA, 19 nt, Artificial Sequence
  Description of Artificial Sequence: Synthetic oligonucleotide
cacauggccgaggugagcu

SEQ ID NO: 2557722 - RNA, 19 nt, Artificial Sequence
  Description of Artificial Sequence: Synthetic oligonucleotide
gguccaucaggaaacacau

SEQ ID NO: 2557723 - RNA, 19 nt, Artificial Sequence
  Description of Artificial Sequence: Synthetic oligonucleotide
agaccaccuccaugcgagu

SEQ ID NO: 2557724 - RNA, 19 nt, Artificial Sequence
  Description of Artificial Sequence: Synthetic oligonucleotide
gccuccuagugauggucag

SEQ ID NO: 2557725 - RNA, 19 nt, Artificial Sequence
  Description of Artificial Sequence: Synthetic oligonucleotide
gugauggucagugcuugcu

SEQ ID NO: 2557726 - RNA, 19 nt, Artificial Sequence
  Description of Artificial Sequence: Synthetic oligonucleotide
uccccgcaucccgaccccg

SEQ ID NO: 2557727 - RNA, 19 nt, Artificial Sequence
  Description of Artificial Sequence: Synthetic oligonucleotide
gugccagagcaguacuucu

SEQ ID NO: 2557728 - RNA, 19 nt, Artificial Sequence
  Description of Artificial Sequence: Synthetic oligonucleotide
uccaugcgaguauguccua

SEQ ID NO: 2557729 - RNA, 19 nt, Artificial Sequence
  Description of Artificial Sequence: Synthetic oligonucleotide
ccgcacaaccccgaacugg

SEQ ID NO: 2557730 - RNA, 19 nt, Artificial Sequence
  Description of Artificial Sequence: Synthetic oligonucleotide
gccagugccagagcaguac

SEQ ID NO: 2557731 - RNA, 19 nt, Artificial Sequence
  Description of Artificial Sequence: Synthetic oligonucleotide
cugccagucagucuugcuu

SEQ ID NO: 2557732 - RNA, 19 nt, Artificial Sequence
  Description of Artificial Sequence: Synthetic oligonucleotide
ccgcagugcucgcaguagg

SEQ ID NO: 2557733 - RNA, 19 nt, Artificial Sequence
  Description of Artificial Sequence: Synthetic oligonucleotide
gcgccaugacgcuuccacc

SEQ ID NO: 2557734 - RNA, 19 nt, Artificial Sequence
  Description of Artificial Sequence: Synthetic oligonucleotide
cgcgccaugacgcuuccac

SEQ ID NO: 2557735 - RNA, 19 nt, Artificial Sequence
  Description of Artificial Sequence: Synthetic oligonucleotide
gcagaccaccuccaugcga

SEQ ID NO: 2557736 - RNA, 19 nt, Artificial Sequence
  Description of Artificial Sequence: Synthetic oligonucleotide
caaccccgaacuggccgcc

SEQ ID NO: 2557737 - RNA, 19 nt, Artificial Sequence
  Description of Artificial Sequence: Synthetic oligonucleotide
gcuguugauacaaaaccuu

SEQ ID NO: 2557738 - RNA, 19 nt, Artificial Sequence
  Description of Artificial Sequence: Synthetic oligonucleotide
ccaccaacggguuccccuc

SEQ ID NO: 2557739 - RNA, 19 nt, Artificial Sequence
  Description of Artificial Sequence: Synthetic oligonucleotide
gugacucucaucggagccu

SEQ ID NO: 2557740 - RNA, 19 nt, Artificial Sequence
  Description of Artificial Sequence: Synthetic oligonucleotide
ccgaccccgcacaaccccg

SEQ ID NO: 2557741 - RNA, 19 nt, Artificial Sequence
  Description of Artificial Sequence: Synthetic oligonucleotide
cuacaagauggugggcaaa

SEQ ID NO: 2557742 - RNA, 19 nt, Artificial Sequence
  Description of Artificial Sequence: Synthetic oligonucleotide
cacugcuugcagaccaccu

SEQ ID NO: 2557743 - RNA, 19 nt, Artificial Sequence
  Description of Artificial Sequence: Synthetic oligonucleotide
gaccaccuccaugcgagua

SEQ ID NO: 2557744 - RNA, 19 nt, Artificial Sequence
  Description of Artificial Sequence: Synthetic oligonucleotide
cguggaacugcucaggagu

SEQ ID NO: 2557745 - RNA, 19 nt, Artificial Sequence
  Description of Artificial Sequence: Synthetic oligonucleotide
guccccgcaucccgacccc

SEQ ID NO: 2557746 - RNA, 19 nt, Artificial Sequence
  Description of Artificial Sequence: Synthetic oligonucleotide
ggccccgcagugcucgcag

SEQ ID NO: 2557747 - RNA, 19 nt, Artificial Sequence
  Description of Artificial Sequence: Synthetic oligonucleotide
gcaguaggcgcgccaugac

SEQ ID NO: 2557748 - RNA, 19 nt, Artificial Sequence
  Description of Artificial Sequence: Synthetic oligonucleotide
auggccgaggugagcuuca

SEQ ID NO: 2557749 - RNA, 19 nt, Artificial Sequence
  Description of Artificial Sequence: Synthetic oligonucleotide
ccgaacuggccgcccaggc

SEQ ID NO: 2557750 - RNA, 19 nt, Artificial Sequence
  Description of Artificial Sequence: Synthetic oligonucleotide
ccaugacgcuuccaccaac

SEQ ID NO: 2557751 - RNA, 19 nt, Artificial Sequence
  Description of Artificial Sequence: Synthetic oligonucleotide
cccgaccccgcacaacccc

SEQ ID NO: 2557752 - RNA, 19 nt, Artificial Sequence
  Description of Artificial Sequence: Synthetic oligonucleotide
ggccacgcuguugauacaa

SEQ ID NO: 2557753 - RNA, 19 nt, Artificial Sequence
  Description of Artificial Sequence: Synthetic oligonucleotide
ggccuccuagugaugguca

SEQ ID NO: 2557754 - RNA, 19 nt, Artificial Sequence
  Description of Artificial Sequence: Synthetic oligonucleotide
cuaucacagcauacacaau

SEQ ID NO: 2557755 - RNA, 19 nt, Artificial Sequence
  Description of Artificial Sequence: Synthetic oligonucleotide
cagugcuugcuugguuuga

SEQ ID NO: 2557756 - RNA, 19 nt, Artificial Sequence
  Description of Artificial Sequence: Synthetic oligonucleotide
ccacugaaaggcgcuucag

SEQ ID NO: 2557757 - RNA, 19 nt, Artificial Sequence
  Description of Artificial Sequence: Synthetic oligonucleotide
ccacgcuguugauacaaaa

SEQ ID NO: 2557758 - RNA, 19 nt, Artificial Sequence
  Description of Artificial Sequence: Synthetic oligonucleotide
cgccaugacgcuuccacca

SEQ ID NO: 2557759 - RNA, 19 nt, Artificial Sequence
  Description of Artificial Sequence: Synthetic oligonucleotide
gagugggcuaucacagcau

SEQ ID NO: 2557760 - RNA, 19 nt, Artificial Sequence
  Description of Artificial Sequence: Synthetic oligonucleotide
gcucuacaagauggugggc

SEQ ID NO: 2557761 - RNA, 19 nt, Artificial Sequence
  Description of Artificial Sequence: Synthetic oligonucleotide
guaggcgcgccaugacgcu

SEQ ID NO: 2557762 - RNA, 19 nt, Artificial Sequence
  Description of Artificial Sequence: Synthetic oligonucleotide
ucccugcgugacucucauc

SEQ ID NO: 2557763 - RNA, 19 nt, Artificial Sequence
  Description of Artificial Sequence: Synthetic oligonucleotide
uggccgaggugagcuucac

SEQ ID NO: 2557764 - RNA, 19 nt, Artificial Sequence
  Description of Artificial Sequence: Synthetic oligonucleotide
uaggcgcgccaugacgcuu

SEQ ID NO: 2557765 - RNA, 19 nt, Artificial Sequence
  Description of Artificial Sequence: Synthetic oligonucleotide
ccagucgucucaggauccc

SEQ ID NO: 2557766 - RNA, 19 nt, Artificial Sequence
  Description of Artificial Sequence: Synthetic oligonucleotide
gaccccgcacaaccccgaa

SEQ ID NO: 2557767 - RNA, 19 nt, Artificial Sequence
  Description of Artificial Sequence: Synthetic oligonucleotide
gggccuccuagugaugguc

SEQ ID NO: 2557768 - RNA, 19 nt, Artificial Sequence
  Description of Artificial Sequence: Synthetic oligonucleotide
gccaugacgcuuccaccaa

SEQ ID NO: 2557769 - RNA, 19 nt, Artificial Sequence
  Description of Artificial Sequence: Synthetic oligonucleotide
gacucucaucggagccuuc

SEQ ID NO: 2557770 - RNA, 19 nt, Artificial Sequence
  Description of Artificial Sequence: Synthetic oligonucleotide
ccaccuccaugcgaguaug

SEQ ID NO: 2557771 - RNA, 19 nt, Artificial Sequence
  Description of Artificial Sequence: Synthetic oligonucleotide
cgaguauguccuaaggaau

SEQ ID NO: 2557772 - RNA, 19 nt, Artificial Sequence
  Description of Artificial Sequence: Synthetic oligonucleotide
gaaaggcgcuucaguuccu

SEQ ID NO: 2557773 - RNA, 19 nt, Artificial Sequence
  Description of Artificial Sequence: Synthetic oligonucleotide
caggccccgcagugcucgc

SEQ ID NO: 2557774 - RNA, 19 nt, Artificial Sequence
  Description of Artificial Sequence: Synthetic oligonucleotide
ccaguaaaacaaccuuagu

SEQ ID NO: 2557775 - RNA, 19 nt, Artificial Sequence
  Description of Artificial Sequence: Synthetic oligonucleotide
gcucacgugcagccaguaa

SEQ ID NO: 2557776 - RNA, 19 nt, Artificial Sequence
  Description of Artificial Sequence: Synthetic oligonucleotide
ccccgcacaaccccgaacu

SEQ ID NO: 2557777 - RNA, 19 nt, Artificial Sequence
  Description of Artificial Sequence: Synthetic oligonucleotide
cccgaacuggccgcccagg

SEQ ID NO: 2557778 - RNA, 19 nt, Artificial Sequence
  Description of Artificial Sequence: Synthetic oligonucleotide
cccgcacaaccccgaacug

SEQ ID NO: 2557779 - RNA, 19 nt, Artificial Sequence
  Description of Artificial Sequence: Synthetic oligonucleotide
ggccgaggugagcuucaca

SEQ ID NO: 2557780 - RNA, 19 nt, Artificial Sequence
  Description of Artificial Sequence: Synthetic oligonucleotide
gcucgcaguaggcgcgcca

SEQ ID NO: 2557781 - RNA, 19 nt, Artificial Sequence
  Description of Artificial Sequence: Synthetic oligonucleotide
gguacaugccugucuccuu

SEQ ID NO: 2557782 - RNA, 19 nt, Artificial Sequence
  Description of Artificial Sequence: Synthetic oligonucleotide
agccagugccagagcagua

SEQ ID NO: 2557783 - RNA, 19 nt, Artificial Sequence
  Description of Artificial Sequence: Synthetic oligonucleotide
acgcuuccaccaacggguu

SEQ ID NO: 2557784 - RNA, 19 nt, Artificial Sequence
  Description of Artificial Sequence: Synthetic oligonucleotide
ccuuguuguucaaguacau

SEQ ID NO: 2557785 - RNA, 19 nt, Artificial Sequence
  Description of Artificial Sequence: Synthetic oligonucleotide
ccagagcaguacuucuucu

SEQ ID NO: 2557786 - RNA, 19 nt, Artificial Sequence
  Description of Artificial Sequence: Synthetic oligonucleotide
ggcgcgccaugacgcuucc

SEQ ID NO: 2557787 - RNA, 19 nt, Artificial Sequence
  Description of Artificial Sequence: Synthetic oligonucleotide
ccccgcaucccgaccccgc

SEQ ID NO: 2557788 - RNA, 19 nt, Artificial Sequence
  Description of Artificial Sequence: Synthetic oligonucleotide
cucgcaguaggcgcgccau

SEQ ID NO: 2557789 - RNA, 19 nt, Artificial Sequence
  Description of Artificial Sequence: Synthetic oligonucleotide
caccuccaugcgaguaugu

SEQ ID NO: 2557790 - RNA, 19 nt, Artificial Sequence
  Description of Artificial Sequence: Synthetic oligonucleotide
cagggccacgcuguugaua

SEQ ID NO: 2557791 - RNA, 19 nt, Artificial Sequence
  Description of Artificial Sequence: Synthetic oligonucleotide
ccccgaacuggccgcccag

SEQ ID NO: 2557792 - RNA, 19 nt, Artificial Sequence
  Description of Artificial Sequence: Synthetic oligonucleotide
cgaacuggccgcccaggca

SEQ ID NO: 2557793 - RNA, 19 nt, Artificial Sequence
  Description of Artificial Sequence: Synthetic oligonucleotide
ggacuuuguaagggacccu

SEQ ID NO: 2557794 - RNA, 19 nt, Artificial Sequence
  Description of Artificial Sequence: Synthetic oligonucleotide
cagucgucucaggaucccu

SEQ ID NO: 2557795 - RNA, 19 nt, Artificial Sequence
  Description of Artificial Sequence: Synthetic oligonucleotide
gcaucccgaccccgcacaa

SEQ ID NO: 2557796 - RNA, 19 nt, Artificial Sequence
  Description of Artificial Sequence: Synthetic oligonucleotide
ccgcaucccgaccccgcac

SEQ ID NO: 2557797 - RNA, 19 nt, Artificial Sequence
  Description of Artificial Sequence: Synthetic oligonucleotide
cgcaguaggcgcgccauga

SEQ ID NO: 2557798 - RNA, 19 nt, Artificial Sequence
  Description of Artificial Sequence: Synthetic oligonucleotide
gcuugcagaccaccuccau

SEQ ID NO: 2557799 - RNA, 19 nt, Artificial Sequence
  Description of Artificial Sequence: Synthetic oligonucleotide
gccaugagcuucggaaaau

SEQ ID NO: 2557800 - RNA, 19 nt, Artificial Sequence
  Description of Artificial Sequence: Synthetic oligonucleotide
ggacccugaguccccgcau

SEQ ID NO: 2557801 - RNA, 19 nt, Artificial Sequence
  Description of Artificial Sequence: Synthetic oligonucleotide
ccgaggugagcuucacacu

SEQ ID NO: 2557802 - RNA, 19 nt, Artificial Sequence
  Description of Artificial Sequence: Synthetic oligonucleotide
ccagucagucuugcuuaga

SEQ ID NO: 2557803 - RNA, 19 nt, Artificial Sequence
  Description of Artificial Sequence: Synthetic oligonucleotide
gccacgcuguugauacaaa

SEQ ID NO: 2557804 - RNA, 19 nt, Artificial Sequence
  Description of Artificial Sequence: Synthetic oligonucleotide
gggccacgcuguugauaca

SEQ ID NO: 2557805 - RNA, 19 nt, Artificial Sequence
  Description of Artificial Sequence: Synthetic oligonucleotide
cccgcaucccgaccccgca

SEQ ID NO: 2557806 - RNA, 19 nt, Artificial Sequence
  Description of Artificial Sequence: Synthetic oligonucleotide
ggcucacgugcagccagua

SEQ ID NO: 2557807 - RNA, 19 nt, Artificial Sequence
  Description of Artificial Sequence: Synthetic oligonucleotide
ccuccuagugauggucagu

SEQ ID NO: 2557808 - RNA, 19 nt, Artificial Sequence
  Description of Artificial Sequence: Synthetic oligonucleotide
gccccgcagugcucgcagu

SEQ ID NO: 2557809 - RNA, 19 nt, Artificial Sequence
  Description of Artificial Sequence: Synthetic oligonucleotide
gcgcgccaugacgcuucca

SEQ ID NO: 2557810 - RNA, 19 nt, Artificial Sequence
  Description of Artificial Sequence: Synthetic oligonucleotide
agcuaaauaaccuugaugg

SEQ ID NO: 2557811 - RNA, 19 nt, Artificial Sequence
  Description of Artificial Sequence: Synthetic oligonucleotide
uagauuaucuuaaagaaca

SEQ ID NO: 2557812 - RNA, 19 nt, Artificial Sequence
  Description of Artificial Sequence: Synthetic oligonucleotide
aaguagauuaucuuaaaga

SEQ ID NO: 2557813 - RNA, 19 nt, Artificial Sequence
  Description of Artificial Sequence: Synthetic oligonucleotide
uaggcaaugauccaaaucu

SEQ ID NO: 2557814 - RNA, 19 nt, Artificial Sequence
  Description of Artificial Sequence: Synthetic oligonucleotide
uaaauguacacauauucag

SEQ ID NO: 2557815 - RNA, 19 nt, Artificial Sequence
  Description of Artificial Sequence: Synthetic oligonucleotide
uguaaacccacauacacag

SEQ ID NO: 2557816 - RNA, 19 nt, Artificial Sequence
  Description of Artificial Sequence: Synthetic oligonucleotide
ucuaaauguacacauauuc

SEQ ID NO: 2557817 - RNA, 19 nt, Artificial Sequence
  Description of Artificial Sequence: Synthetic oligonucleotide
uuagagaucauuguaaacc

SEQ ID NO: 2557818 - RNA, 19 nt, Artificial Sequence
  Description of Artificial Sequence: Synthetic oligonucleotide
ucauuguaaacccacauac

SEQ ID NO: 2557819 - RNA, 19 nt, Artificial Sequence
  Description of Artificial Sequence: Synthetic oligonucleotide
uggauuagcagcuaaauaa

SEQ ID NO: 2557820 - RNA, 19 nt, Artificial Sequence
  Description of Artificial Sequence: Synthetic oligonucleotide
caacuuuaggcaaugaucc

SEQ ID NO: 2557821 - RNA, 19 nt, Artificial Sequence
  Description of Artificial Sequence: Synthetic oligonucleotide
caaaucuuggauuagcagc

SEQ ID NO: 2557822 - RNA, 19 nt, Artificial Sequence
  Description of Artificial Sequence: Synthetic oligonucleotide
uauucagagguuuagagau

SEQ ID NO: 2557823 - RNA, 19 nt, Artificial Sequence
  Description of Artificial Sequence: Synthetic oligonucleotide
agccagagcaacuuuaggc

SEQ ID NO: 2557824 - RNA, 19 nt, Artificial Sequence
  Description of Artificial Sequence: Synthetic oligonucleotide
uuuugggcaaaacaacagg

SEQ ID NO: 2557825 - RNA, 19 nt, Artificial Sequence
  Description of Artificial Sequence: Synthetic oligonucleotide
aguagauuaucuuaaagaa

SEQ ID NO: 2557826 - RNA, 19 nt, Artificial Sequence
  Description of Artificial Sequence: Synthetic oligonucleotide
uaucuuaaagaacauuuga

SEQ ID NO: 2557827 - RNA, 19 nt, Artificial Sequence
  Description of Artificial Sequence: Synthetic oligonucleotide
aaaggaacgcaagaguuac

SEQ ID NO: 2557828 - RNA, 19 nt, Artificial Sequence
  Description of Artificial Sequence: Synthetic oligonucleotide
acauuugaaagucuaaaug

SEQ ID NO: 2557829 - RNA, 19 nt, Artificial Sequence
  Description of Artificial Sequence: Synthetic oligonucleotide
aagcauuucaaaggaacgc

SEQ ID NO: 2557830 - RNA, 19 nt, Artificial Sequence
  Description of Artificial Sequence: Synthetic oligonucleotide
gaaggaauggaauuuacuc

SEQ ID NO: 2557831 - RNA, 19 nt, Artificial Sequence
  Description of Artificial Sequence: Synthetic oligonucleotide
uuugggcaaaacaacaggc

SEQ ID NO: 2557832 - RNA, 19 nt, Artificial Sequence
  Description of Artificial Sequence: Synthetic oligonucleotide
uuugaaagucuaaauguac

SEQ ID NO: 2557833 - RNA, 19 nt, Artificial Sequence
  Description of Artificial Sequence: Synthetic oligonucleotide
caugaguggacacugaggc

SEQ ID NO: 2557834 - RNA, 19 nt, Artificial Sequence
  Description of Artificial Sequence: Synthetic oligonucleotide
ucugaauacuucuaggccu

SEQ ID NO: 2557835 - RNA, 19 nt, Artificial Sequence
  Description of Artificial Sequence: Synthetic oligonucleotide
uuuugcacuccucacaugu

SEQ ID NO: 2557836 - RNA, 19 nt, Artificial Sequence
  Description of Artificial Sequence: Synthetic oligonucleotide
aaugggauggcuggggccc

SEQ ID NO: 2557837 - RNA, 19 nt, Artificial Sequence
  Description of Artificial Sequence: Synthetic oligonucleotide
aauacuucuaggccugaug

SEQ ID NO: 2557838 - RNA, 19 nt, Artificial Sequence
  Description of Artificial Sequence: Synthetic oligonucleotide
aacauuugaaagucuaaau

SEQ ID NO: 2557839 - RNA, 19 nt, Artificial Sequence
  Description of Artificial Sequence: Synthetic oligonucleotide
uuuacucuggcacacucug

SEQ ID NO: 2557840 - RNA, 19 nt, Artificial Sequence
  Description of Artificial Sequence: Synthetic oligonucleotide
uagagaucauuguaaaccc

SEQ ID NO: 2557841 - RNA, 19 nt, Artificial Sequence
  Description of Artificial Sequence: Synthetic oligonucleotide
cauguaagcaggcagugcc

SEQ ID NO: 2557842 - RNA, 19 nt, Artificial Sequence
  Description of Artificial Sequence: Synthetic oligonucleotide
cuuucugcucgcuuaaucc

SEQ ID NO: 2557843 - RNA, 19 nt, Artificial Sequence
  Description of Artificial Sequence: Synthetic oligonucleotide
uuucaacagaaguagauua

SEQ ID NO: 2557844 - RNA, 19 nt, Artificial Sequence
  Description of Artificial Sequence: Synthetic oligonucleotide
caagcauuucaaaggaacg

SEQ ID NO: 2557845 - RNA, 19 nt, Artificial Sequence
  Description of Artificial Sequence: Synthetic oligonucleotide
agaguuacaagguuucugu

SEQ ID NO: 2557846 - RNA, 19 nt, Artificial Sequence
  Description of Artificial Sequence: Synthetic oligonucleotide
ugaaagucuaaauguacac

SEQ ID NO: 2557847 - RNA, 19 nt, Artificial Sequence
  Description of Artificial Sequence: Synthetic oligonucleotide
ugugcaguuuugauuuugg

SEQ ID NO: 2557848 - RNA, 19 nt, Artificial Sequence
  Description of Artificial Sequence: Synthetic oligonucleotide
aaacaacaggcucugcuug

SEQ ID NO: 2557849 - RNA, 19 nt, Artificial Sequence
  Description of Artificial Sequence: Synthetic oligonucleotide
uuucugcucgcuuaauccg

SEQ ID NO: 2557850 - RNA, 19 nt, Artificial Sequence
  Description of Artificial Sequence: Synthetic oligonucleotide
ucucggauaaucuuggcaa

SEQ ID NO: 2557851 - RNA, 19 nt, Artificial Sequence
  Description of Artificial Sequence: Synthetic oligonucleotide
aaggccaaaucccaggaga

SEQ ID NO: 2557852 - RNA, 19 nt, Artificial Sequence
  Description of Artificial Sequence: Synthetic oligonucleotide
ugauuuugggcaaaacaac

SEQ ID NO: 2557853 - RNA, 19 nt, Artificial Sequence
  Description of Artificial Sequence: Synthetic oligonucleotide
agagccuuccacugcaagc

SEQ ID NO: 2557854 - RNA, 19 nt, Artificial Sequence
  Description of Artificial Sequence: Synthetic oligonucleotide
ucugguuuugcacuccuca

SEQ ID NO: 2557855 - RNA, 19 nt, Artificial Sequence
  Description of Artificial Sequence: Synthetic oligonucleotide
cuaaauaaccuugauggac

SEQ ID NO: 2557856 - RNA, 19 nt, Artificial Sequence
  Description of Artificial Sequence: Synthetic oligonucleotide
aaaucuuggauuagcagcu

SEQ ID NO: 2557857 - RNA, 19 nt, Artificial Sequence
  Description of Artificial Sequence: Synthetic oligonucleotide
agucuaaauguacacauau

SEQ ID NO: 2557858 - RNA, 19 nt, Artificial Sequence
  Description of Artificial Sequence: Synthetic oligonucleotide
ugugcucgggaccaaaacc

SEQ ID NO: 2557859 - RNA, 19 nt, Artificial Sequence
  Description of Artificial Sequence: Synthetic oligonucleotide
cacacucugauguaggaag

SEQ ID NO: 2557860 - RNA, 19 nt, Artificial Sequence
  Description of Artificial Sequence: Synthetic oligonucleotide
auacuucuaggccugauga

SEQ ID NO: 2557861 - RNA, 19 nt, Artificial Sequence
  Description of Artificial Sequence: Synthetic oligonucleotide
acaagcaugcuuauaagag

SEQ ID NO: 2557862 - RNA, 19 nt, Artificial Sequence
  Description of Artificial Sequence: Synthetic oligonucleotide
caguuuaggaaugggaugg

SEQ ID NO: 2557863 - RNA, 19 nt, Artificial Sequence
  Description of Artificial Sequence: Synthetic oligonucleotide
auauucagagguuuagaga

SEQ ID NO: 2557864 - RNA, 19 nt, Artificial Sequence
  Description of Artificial Sequence: Synthetic oligonucleotide
cuaaauguacacauauuca

SEQ ID NO: 2557865 - RNA, 19 nt, Artificial Sequence
  Description of Artificial Sequence: Synthetic oligonucleotide
uccaaaucuuggauuagca

SEQ ID NO: 2557866 - RNA, 19 nt, Artificial Sequence
  Description of Artificial Sequence: Synthetic oligonucleotide
uuuagagaucauuguaaac

SEQ ID NO: 2557867 - RNA, 19 nt, Artificial Sequence
  Description of Artificial Sequence: Synthetic oligonucleotide
agaaacuuucuucuugaca

SEQ ID NO: 2557868 - RNA, 19 nt, Artificial Sequence
  Description of Artificial Sequence: Synthetic oligonucleotide
aaauguacacauauucaga

SEQ ID NO: 2557869 - RNA, 19 nt, Artificial Sequence
  Description of Artificial Sequence: Synthetic oligonucleotide
ugaguggacacugaggcca

SEQ ID NO: 2557870 - RNA, 19 nt, Artificial Sequence
  Description of Artificial Sequence: Synthetic oligonucleotide
cucacauguaagcaggcag

SEQ ID NO: 2557871 - RNA, 19 nt, Artificial Sequence
  Description of Artificial Sequence: Synthetic oligonucleotide
gcaguuuugauuuugggca

SEQ ID NO: 2557872 - RNA, 19 nt, Artificial Sequence
  Description of Artificial Sequence: Synthetic oligonucleotide
aagaguuacaagguuucug

SEQ ID NO: 2557873 - RNA, 19 nt, Artificial Sequence
  Description of Artificial Sequence: Synthetic oligonucleotide
agagguuuagagaucauug

SEQ ID NO: 2557874 - RNA, 19 nt, Artificial Sequence
  Description of Artificial Sequence: Synthetic oligonucleotide
cauuucaaaggaacgcaag

SEQ ID NO: 2557875 - RNA, 19 nt, Artificial Sequence
  Description of Artificial Sequence: Synthetic oligonucleotide
uagcagcuaaauaaccuug

SEQ ID NO: 2557876 - RNA, 19 nt, Artificial Sequence
  Description of Artificial Sequence: Synthetic oligonucleotide
ucacauguaagcaggcagu

SEQ ID NO: 2557877 - RNA, 19 nt, Artificial Sequence
  Description of Artificial Sequence: Synthetic oligonucleotide
augacgucguccuuucuuc

SEQ ID NO: 2557878 - RNA, 19 nt, Artificial Sequence
  Description of Artificial Sequence: Synthetic oligonucleotide
gaccaaaaccagcaccacg

SEQ ID NO: 2557879 - RNA, 19 nt, Artificial Sequence
  Description of Artificial Sequence: Synthetic oligonucleotide
gacaagcaugcuuauaaga

SEQ ID NO: 2557880 - RNA, 19 nt, Artificial Sequence
  Description of Artificial Sequence: Synthetic oligonucleotide
auccaaaucuuggauuagc

SEQ ID NO: 2557881 - RNA, 19 nt, Artificial Sequence
  Description of Artificial Sequence: Synthetic oligonucleotide
uccacugcaagcauuucaa

SEQ ID NO: 2557882 - RNA, 19 nt, Artificial Sequence
  Description of Artificial Sequence: Synthetic oligonucleotide
auggacaagucccugggug

SEQ ID NO: 2557883 - RNA, 19 nt, Artificial Sequence
  Description of Artificial Sequence: Synthetic oligonucleotide
ugggcaaaacaacaggcuc

SEQ ID NO: 2557884 - RNA, 19 nt, Artificial Sequence
  Description of Artificial Sequence: Synthetic oligonucleotide
uuagcagcuaaauaaccuu

SEQ ID NO: 2557885 - RNA, 19 nt, Artificial Sequence
  Description of Artificial Sequence: Synthetic oligonucleotide
ugacaagcaugcuuauaag

SEQ ID NO: 2557886 - RNA, 19 nt, Artificial Sequence
  Description of Artificial Sequence: Synthetic oligonucleotide
acuccucacauguaagcag

SEQ ID NO: 2557887 - RNA, 19 nt, Artificial Sequence
  Description of Artificial Sequence: Synthetic oligonucleotide
aaaucccaggagaccagcc

SEQ ID NO: 2557888 - RNA, 19 nt, Artificial Sequence
  Description of Artificial Sequence: Synthetic oligonucleotide
aaacuuucuucuugacacu

SEQ ID NO: 2557889 - RNA, 19 nt, Artificial Sequence
  Description of Artificial Sequence: Synthetic oligonucleotide
ucugcucgcuuaauccgcg

SEQ ID NO: 2557890 - RNA, 19 nt, Artificial Sequence
  Description of Artificial Sequence: Synthetic oligonucleotide
gauguaggaagccuuccca

SEQ ID NO: 2557891 - RNA, 19 nt, Artificial Sequence
  Description of Artificial Sequence: Synthetic oligonucleotide
gagaucauuguaaacccac

SEQ ID NO: 2557892 - RNA, 19 nt, Artificial Sequence
  Description of Artificial Sequence: Synthetic oligonucleotide
aacgcaagaguuacaaggu

SEQ ID NO: 2557893 - RNA, 19 nt, Artificial Sequence
  Description of Artificial Sequence: Synthetic oligonucleotide
uucgauggcugcugaaugc

SEQ ID NO: 2557894 - RNA, 19 nt, Artificial Sequence
  Description of Artificial Sequence: Synthetic oligonucleotide
guagauuaucuuaaagaac

SEQ ID NO: 2557895 - RNA, 19 nt, Artificial Sequence
  Description of Artificial Sequence: Synthetic oligonucleotide
aacuuuaggcaaugaucca

SEQ ID NO: 2557896 - RNA, 19 nt, Artificial Sequence
  Description of Artificial Sequence: Synthetic oligonucleotide
uacacaguuuaggaauggg

SEQ ID NO: 2557897 - RNA, 19 nt, Artificial Sequence
  Description of Artificial Sequence: Synthetic oligonucleotide
guaggaagccuucccaaag

SEQ ID NO: 2557898 - RNA, 19 nt, Artificial Sequence
  Description of Artificial Sequence: Synthetic oligonucleotide
uuggauuagcagcuaaaua

SEQ ID NO: 2557899 - RNA, 19 nt, Artificial Sequence
  Description of Artificial Sequence: Synthetic oligonucleotide
uccgcgaucuuccuuuucu

SEQ ID NO: 2557900 - RNA, 19 nt, Artificial Sequence
  Description of Artificial Sequence: Synthetic oligonucleotide
aagaacauuugaaagucua

SEQ ID NO: 2557901 - RNA, 19 nt, Artificial Sequence
  Description of Artificial Sequence: Synthetic oligonucleotide
aguuacaagguuucuguuu

SEQ ID NO: 2557902 - RNA, 19 nt, Artificial Sequence
  Description of Artificial Sequence: Synthetic oligonucleotide
uucugcucgcuuaauccgc

SEQ ID NO: 2557903 - RNA, 19 nt, Artificial Sequence
  Description of Artificial Sequence: Synthetic oligonucleotide
cacucucggauaaucuugg

SEQ ID NO: 2557904 - RNA, 19 nt, Artificial Sequence
  Description of Artificial Sequence: Synthetic oligonucleotide
caugcucaggucuacccag

SEQ ID NO: 2557905 - RNA, 19 nt, Artificial Sequence
  Description of Artificial Sequence: Synthetic oligonucleotide
ugcacuccucacauguaag

SEQ ID NO: 2557906 - RNA, 19 nt, Artificial Sequence
  Description of Artificial Sequence: Synthetic oligonucleotide
cugaauacuucuaggccug

SEQ ID NO: 2557907 - RNA, 19 nt, Artificial Sequence
  Description of Artificial Sequence: Synthetic oligonucleotide
uugguuuccaugaguggac

SEQ ID NO: 2557908 - RNA, 19 nt, Artificial Sequence
  Description of Artificial Sequence: Synthetic oligonucleotide
ucuuggauuagcagcuaaa

SEQ ID NO: 2557909 - RNA, 19 nt, Artificial Sequence
  Description of Artificial Sequence: Synthetic oligonucleotide
guuuagagaucauuguaaa

SEQ ID NO: 2557910 - RNA, 19 nt, Artificial Sequence
  Description of Artificial Sequence: Synthetic oligonucleotide
ucuacccagagccuuccac

SEQ ID NO: 2557911 - RNA, 19 nt, Artificial Sequence
  Description of Artificial Sequence: Synthetic oligonucleotide
uggcacacucugauguagg

SEQ ID NO: 2557912 - RNA, 19 nt, Artificial Sequence
  Description of Artificial Sequence: Synthetic oligonucleotide
ucuugacacucucggauaa

SEQ ID NO: 2557913 - RNA, 19 nt, Artificial Sequence
  Description of Artificial Sequence: Synthetic oligonucleotide
gcaaugauccaaaucuugg

SEQ ID NO: 2557914 - RNA, 19 nt, Artificial Sequence
  Description of Artificial Sequence: Synthetic oligonucleotide
ucgaaggaauggaauuuac

SEQ ID NO: 2557915 - RNA, 19 nt, Artificial Sequence
  Description of Artificial Sequence: Synthetic oligonucleotide
ucccaaaggccaaauccca

SEQ ID NO: 2557916 - RNA, 19 nt, Artificial Sequence
  Description of Artificial Sequence: Synthetic oligonucleotide
agcauuucaaaggaacgca

SEQ ID NO: 2557917 - RNA, 19 nt, Artificial Sequence
  Description of Artificial Sequence: Synthetic oligonucleotide
acauguaagcaggcagugc

SEQ ID NO: 2557918 - RNA, 19 nt, Artificial Sequence
  Description of Artificial Sequence: Synthetic oligonucleotide
uggaugugcaguuuugauu

SEQ ID NO: 2557919 - RNA, 19 nt, Artificial Sequence
  Description of Artificial Sequence: Synthetic oligonucleotide
uggacaagucccuggguga

SEQ ID NO: 2557920 - RNA, 19 nt, Artificial Sequence
  Description of Artificial Sequence: Synthetic oligonucleotide
ucuucuugacacucucgga

SEQ ID NO: 2557921 - RNA, 19 nt, Artificial Sequence
  Description of Artificial Sequence: Synthetic oligonucleotide
ugauccucgaaggaaugga

SEQ ID NO: 2557922 - RNA, 19 nt, Artificial Sequence
  Description of Artificial Sequence: Synthetic oligonucleotide
aguuuaggaaugggauggc

SEQ ID NO: 2557923 - RNA, 19 nt, Artificial Sequence
  Description of Artificial Sequence: Synthetic oligonucleotide
uugcacuccucacauguaa

SEQ ID NO: 2557924 - RNA, 19 nt, Artificial Sequence
  Description of Artificial Sequence: Synthetic oligonucleotide
ugacgucguccuuucuucg

SEQ ID NO: 2557925 - RNA, 19 nt, Artificial Sequence
  Description of Artificial Sequence: Synthetic oligonucleotide
acacucugauguaggaagc

SEQ ID NO: 2557926 - RNA, 19 nt, Artificial Sequence
  Description of Artificial Sequence: Synthetic oligonucleotide
ucuguggaugugcaguuuu

SEQ ID NO: 2557927 - RNA, 19 nt, Artificial Sequence
  Description of Artificial Sequence: Synthetic oligonucleotide
caagcaugcuuauaagaga

SEQ ID NO: 2557928 - RNA, 19 nt, Artificial Sequence
  Description of Artificial Sequence: Synthetic oligonucleotide
cuucgauggcugcugaaug

SEQ ID NO: 2557929 - RNA, 19 nt, Artificial Sequence
  Description of Artificial Sequence: Synthetic oligonucleotide
auacacaguuuaggaaugg

SEQ ID NO: 2557930 - RNA, 19 nt, Artificial Sequence
  Description of Artificial Sequence: Synthetic oligonucleotide
uccucuguggaugugcagu

SEQ ID NO: 2557931 - RNA, 19 nt, Artificial Sequence
  Description of Artificial Sequence: Synthetic oligonucleotide
caaugauccaaaucuugga

SEQ ID NO: 2557932 - RNA, 19 nt, Artificial Sequence
  Description of Artificial Sequence: Synthetic oligonucleotide
ugcucgggaccaaaaccag

SEQ ID NO: 2557933 - RNA, 19 nt, Artificial Sequence
  Description of Artificial Sequence: Synthetic oligonucleotide
uugugcucgggaccaaaac

SEQ ID NO: 2557934 - RNA, 19 nt, Artificial Sequence
  Description of Artificial Sequence: Synthetic oligonucleotide
cuuccagaaacuuucuucu

SEQ ID NO: 2557935 - RNA, 19 nt, Artificial Sequence
  Description of Artificial Sequence: Synthetic oligonucleotide
cauuguaaacccacauaca

SEQ ID NO: 2557936 - RNA, 19 nt, Artificial Sequence
  Description of Artificial Sequence: Synthetic oligonucleotide
uaaccuugauggacaaguc

SEQ ID NO: 2557937 - RNA, 19 nt, Artificial Sequence
  Description of Artificial Sequence: Synthetic oligonucleotide
uacccagagccuuccacug

SEQ ID NO: 2557938 - RNA, 19 nt, Artificial Sequence
  Description of Artificial Sequence: Synthetic oligonucleotide
uuucuucgauggcugcuga

SEQ ID NO: 2557939 - RNA, 19 nt, Artificial Sequence
  Description of Artificial Sequence: Synthetic oligonucleotide
ggcaaucucuccucugugg

SEQ ID NO: 2557940 - RNA, 19 nt, Artificial Sequence
  Description of Artificial Sequence: Synthetic oligonucleotide
cucgggaccaaaaccagca

SEQ ID NO: 2557941 - RNA, 19 nt, Artificial Sequence
  Description of Artificial Sequence: Synthetic oligonucleotide
acuuuaggcaaugauccaa

SEQ ID NO: 2557942 - RNA, 19 nt, Artificial Sequence
  Description of Artificial Sequence: Synthetic oligonucleotide
aacgugccaugcucagguc

SEQ ID NO: 2557943 - RNA, 19 nt, Artificial Sequence
  Description of Artificial Sequence: Synthetic oligonucleotide
uucuugacacucucggaua

SEQ ID NO: 2557944 - RNA, 19 nt, Artificial Sequence
  Description of Artificial Sequence: Synthetic oligonucleotide
gcaacuuuaggcaaugauc

SEQ ID NO: 2557945 - RNA, 19 nt, Artificial Sequence
  Description of Artificial Sequence: Synthetic oligonucleotide
uacuucuaggccugaugac

SEQ ID NO: 2557946 - RNA, 19 nt, Artificial Sequence
  Description of Artificial Sequence: Synthetic oligonucleotide
gaacgugccaugcucaggu

SEQ ID NO: 2557947 - RNA, 19 nt, Artificial Sequence
  Description of Artificial Sequence: Synthetic oligonucleotide
uugacacucucggauaauc

SEQ ID NO: 2557948 - RNA, 19 nt, Artificial Sequence
  Description of Artificial Sequence: Synthetic oligonucleotide
gcaagcauuucaaaggaac

SEQ ID NO: 2557949 - RNA, 19 nt, Artificial Sequence
  Description of Artificial Sequence: Synthetic oligonucleotide
acacucucggauaaucuug

SEQ ID NO: 2557950 - RNA, 19 nt, Artificial Sequence
  Description of Artificial Sequence: Synthetic oligonucleotide
aggccaaaucccaggagac

SEQ ID NO: 2557951 - RNA, 19 nt, Artificial Sequence
  Description of Artificial Sequence: Synthetic oligonucleotide
gcgaucuuccuuuucuucc

SEQ ID NO: 2557952 - RNA, 19 nt, Artificial Sequence
  Description of Artificial Sequence: Synthetic oligonucleotide
auguaggaagccuucccaa

SEQ ID NO: 2557953 - RNA, 19 nt, Artificial Sequence
  Description of Artificial Sequence: Synthetic oligonucleotide
uccgcgucugguuuugcac

SEQ ID NO: 2557954 - RNA, 19 nt, Artificial Sequence
  Description of Artificial Sequence: Synthetic oligonucleotide
aggaacgcaagaguuacaa

SEQ ID NO: 2557955 - RNA, 19 nt, Artificial Sequence
  Description of Artificial Sequence: Synthetic oligonucleotide
ucuucgauggcugcugaau

SEQ ID NO: 2557956 - RNA, 19 nt, Artificial Sequence
  Description of Artificial Sequence: Synthetic oligonucleotide
uggcaaucucuccucugug

SEQ ID NO: 2557957 - RNA, 19 nt, Artificial Sequence
  Description of Artificial Sequence: Synthetic oligonucleotide
acacaguuuaggaauggga

SEQ ID NO: 2557958 - RNA, 19 nt, Artificial Sequence
  Description of Artificial Sequence: Synthetic oligonucleotide
ccaaaucuuggauuagcag

SEQ ID NO: 2557959 - RNA, 19 nt, Artificial Sequence
  Description of Artificial Sequence: Synthetic oligonucleotide
cuuucuucgauggcugcug

SEQ ID NO: 2557960 - RNA, 19 nt, Artificial Sequence
  Description of Artificial Sequence: Synthetic oligonucleotide
gaugacuuucuccgcgauc

SEQ ID NO: 2557961 - RNA, 19 nt, Artificial Sequence
  Description of Artificial Sequence: Synthetic oligonucleotide
gagccuuccacugcaagca

SEQ ID NO: 2557962 - RNA, 19 nt, Artificial Sequence
  Description of Artificial Sequence: Synthetic oligonucleotide
ggauuagcagcuaaauaac

SEQ ID NO: 2557963 - RNA, 19 nt, Artificial Sequence
  Description of Artificial Sequence: Synthetic oligonucleotide
ccugaugacuuucuccgcg

SEQ ID NO: 2557964 - RNA, 19 nt, Artificial Sequence
  Description of Artificial Sequence: Synthetic oligonucleotide
ccaaaggccaaaucccagg

SEQ ID NO: 2557965 - RNA, 19 nt, Artificial Sequence
  Description of Artificial Sequence: Synthetic oligonucleotide
agagcaacuuuaggcaaug

SEQ ID NO: 2557966 - RNA, 19 nt, Artificial Sequence
  Description of Artificial Sequence: Synthetic oligonucleotide
caaaacaacaggcucugcu

SEQ ID NO: 2557967 - RNA, 19 nt, Artificial Sequence
  Description of Artificial Sequence: Synthetic oligonucleotide
gguuuagagaucauuguaa

SEQ ID NO: 2557968 - RNA, 19 nt, Artificial Sequence
  Description of Artificial Sequence: Synthetic oligonucleotide
cagaaacuuucuucuugac

SEQ ID NO: 2557969 - RNA, 19 nt, Artificial Sequence
  Description of Artificial Sequence: Synthetic oligonucleotide
cucucggauaaucuuggca

SEQ ID NO: 2557970 - RNA, 19 nt, Artificial Sequence
  Description of Artificial Sequence: Synthetic oligonucleotide
ucaggucuacccagagccu

SEQ ID NO: 2557971 - RNA, 19 nt, Artificial Sequence
  Description of Artificial Sequence: Synthetic oligonucleotide
acgugccaugcucaggucu

SEQ ID NO: 2557972 - RNA, 19 nt, Artificial Sequence
  Description of Artificial Sequence: Synthetic oligonucleotide
cacugaggccaugaugacg

SEQ ID NO: 2557973 - RNA, 19 nt, Artificial Sequence
  Description of Artificial Sequence: Synthetic oligonucleotide
uuugcacuccucacaugua

SEQ ID NO: 2557974 - RNA, 19 nt, Artificial Sequence
  Description of Artificial Sequence: Synthetic oligonucleotide
ucguccuuucuucgauggc

SEQ ID NO: 2557975 - RNA, 19 nt, Artificial Sequence
  Description of Artificial Sequence: Synthetic oligonucleotide
ggaugugcaguuuugauuu

SEQ ID NO: 2557976 - RNA, 19 nt, Artificial Sequence
  Description of Artificial Sequence: Synthetic oligonucleotide
uuaauccgcgucugguuuu

SEQ ID NO: 2557977 - RNA, 19 nt, Artificial Sequence
  Description of Artificial Sequence: Synthetic oligonucleotide
acucugauguaggaagccu

SEQ ID NO: 2557978 - RNA, 19 nt, Artificial Sequence
  Description of Artificial Sequence: Synthetic oligonucleotide
ucggauaaucuuggcaauc

SEQ ID NO: 2557979 - RNA, 19 nt, Artificial Sequence
  Description of Artificial Sequence: Synthetic oligonucleotide
cacauguaagcaggcagug

SEQ ID NO: 2557980 - RNA, 19 nt, Artificial Sequence
  Description of Artificial Sequence: Synthetic oligonucleotide
aauccgcgucugguuuugc

SEQ ID NO: 2557981 - RNA, 19 nt, Artificial Sequence
  Description of Artificial Sequence: Synthetic oligonucleotide
cuguggaugugcaguuuug

SEQ ID NO: 2557982 - RNA, 19 nt, Artificial Sequence
  Description of Artificial Sequence: Synthetic oligonucleotide
aagucuaaauguacacaua

SEQ ID NO: 2557983 - RNA, 19 nt, Artificial Sequence
  Description of Artificial Sequence: Synthetic oligonucleotide
agaacgugccaugcucagg

SEQ ID NO: 2557984 - RNA, 19 nt, Artificial Sequence
  Description of Artificial Sequence: Synthetic oligonucleotide
ugaugacuuucuccgcgau

SEQ ID NO: 2557985 - RNA, 19 nt, Artificial Sequence
  Description of Artificial Sequence: Synthetic oligonucleotide
ccaugaguggacacugagg

SEQ ID NO: 2557986 - RNA, 19 nt, Artificial Sequence
  Description of Artificial Sequence: Synthetic oligonucleotide
caaaucccaggagaccagc

SEQ ID NO: 2557987 - RNA, 19 nt, Artificial Sequence
  Description of Artificial Sequence: Synthetic oligonucleotide
agaucauuguaaacccaca

SEQ ID NO: 2557988 - RNA, 19 nt, Artificial Sequence
  Description of Artificial Sequence: Synthetic oligonucleotide
uuccaugaguggacacuga

SEQ ID NO: 2557989 - RNA, 19 nt, Artificial Sequence
  Description of Artificial Sequence: Synthetic oligonucleotide
caaaggaacgcaagaguua

SEQ ID NO: 2557990 - RNA, 19 nt, Artificial Sequence
  Description of Artificial Sequence: Synthetic oligonucleotide
agcagcuaaauaaccuuga

SEQ ID NO: 2557991 - RNA, 19 nt, Artificial Sequence
  Description of Artificial Sequence: Synthetic oligonucleotide
ugcucgcuuaauccgcguc

SEQ ID NO: 2557992 - RNA, 19 nt, Artificial Sequence
  Description of Artificial Sequence: Synthetic oligonucleotide
cuggggcccuuucugcucg

SEQ ID NO: 2557993 - RNA, 19 nt, Artificial Sequence
  Description of Artificial Sequence: Synthetic oligonucleotide
ggaacgcaagaguuacaag

SEQ ID NO: 2557994 - RNA, 19 nt, Artificial Sequence
  Description of Artificial Sequence: Synthetic oligonucleotide
gugcucgggaccaaaacca

SEQ ID NO: 2557995 - RNA, 19 nt, Artificial Sequence
  Description of Artificial Sequence: Synthetic oligonucleotide
acucuggcacacucugaug

SEQ ID NO: 2557996 - RNA, 19 nt, Artificial Sequence
  Description of Artificial Sequence: Synthetic oligonucleotide
gcuaaauaaccuugaugga

SEQ ID NO: 2557997 - RNA, 19 nt, Artificial Sequence
  Description of Artificial Sequence: Synthetic oligonucleotide
agagaucauuguaaaccca

SEQ ID NO: 2557998 - RNA, 19 nt, Artificial Sequence
  Description of Artificial Sequence: Synthetic oligonucleotide
cuucuugacacucucggau

SEQ ID NO: 2557999 - RNA, 19 nt, Artificial Sequence
  Description of Artificial Sequence: Synthetic oligonucleotide
ucuaggccugaugacuuuc

SEQ ID NO: 2558000 - RNA, 19 nt, Artificial Sequence
  Description of Artificial Sequence: Synthetic oligonucleotide
ucgggaccaaaaccagcac

SEQ ID NO: 2558001 - RNA, 19 nt, Artificial Sequence
  Description of Artificial Sequence: Synthetic oligonucleotide
guuuugcacuccucacaug

SEQ ID NO: 2558002 - RNA, 19 nt, Artificial Sequence
  Description of Artificial Sequence: Synthetic oligonucleotide
uaggccugaugacuuucuc

SEQ ID NO: 2558003 - RNA, 19 nt, Artificial Sequence
  Description of Artificial Sequence: Synthetic oligonucleotide
uaauccgcgucugguuuug

SEQ ID NO: 2558004 - RNA, 19 nt, Artificial Sequence
  Description of Artificial Sequence: Synthetic oligonucleotide
agauuaucuuaaagaacau

SEQ ID NO: 2558005 - RNA, 19 nt, Artificial Sequence
  Description of Artificial Sequence: Synthetic oligonucleotide
ucuggcacacucugaugua

SEQ ID NO: 2558006 - RNA, 19 nt, Artificial Sequence
  Description of Artificial Sequence: Synthetic oligonucleotide
cucugcuugcucaguggug

SEQ ID NO: 2558007 - RNA, 19 nt, Artificial Sequence
  Description of Artificial Sequence: Synthetic oligonucleotide
ggcaaaacaacaggcucug

SEQ ID NO: 2558008 - RNA, 19 nt, Artificial Sequence
  Description of Artificial Sequence: Synthetic oligonucleotide
cagagccuuccacugcaag

SEQ ID NO: 2558009 - RNA, 19 nt, Artificial Sequence
  Description of Artificial Sequence: Synthetic oligonucleotide
accacggagcugauccucg

SEQ ID NO: 2558010 - RNA, 19 nt, Artificial Sequence
  Description of Artificial Sequence: Synthetic oligonucleotide
gauccucgaaggaauggaa

SEQ ID NO: 2558011 - RNA, 19 nt, Artificial Sequence
  Description of Artificial Sequence: Synthetic oligonucleotide
acgcaagaguuacaagguu

SEQ ID NO: 2558012 - RNA, 19 nt, Artificial Sequence
  Description of Artificial Sequence: Synthetic oligonucleotide
cugaugacuuucuccgcga

SEQ ID NO: 2558013 - RNA, 19 nt, Artificial Sequence
  Description of Artificial Sequence: Synthetic oligonucleotide
uucuucgauggcugcugaa

SEQ ID NO: 2558014 - RNA, 19 nt, Artificial Sequence
  Description of Artificial Sequence: Synthetic oligonucleotide
ggauaaucuuggcaaucuc

SEQ ID NO: 2558015 - RNA, 19 nt, Artificial Sequence
  Description of Artificial Sequence: Synthetic oligonucleotide
acgucguccuuucuucgau

SEQ ID NO: 2558016 - RNA, 19 nt, Artificial Sequence
  Description of Artificial Sequence: Synthetic oligonucleotide
acaagucccugggugacaa

SEQ ID NO: 2558017 - RNA, 19 nt, Artificial Sequence
  Description of Artificial Sequence: Synthetic oligonucleotide
aaucuuggauuagcagcua

SEQ ID NO: 2558018 - RNA, 19 nt, Artificial Sequence
  Description of Artificial Sequence: Synthetic oligonucleotide
aguuuugauuuugggcaaa

SEQ ID NO: 2558019 - RNA, 19 nt, Artificial Sequence
  Description of Artificial Sequence: Synthetic oligonucleotide
cacuccucacauguaagca

SEQ ID NO: 2558020 - RNA, 19 nt, Artificial Sequence
  Description of Artificial Sequence: Synthetic oligonucleotide
auccgcgucugguuuugca

SEQ ID NO: 2558021 - RNA, 19 nt, Artificial Sequence
  Description of Artificial Sequence: Synthetic oligonucleotide
uaagcaggcagugccuguu

SEQ ID NO: 2558022 - RNA, 19 nt, Artificial Sequence
  Description of Artificial Sequence: Synthetic oligonucleotide
acaacaggcucugcuugcu

SEQ ID NO: 2558023 - RNA, 19 nt, Artificial Sequence
  Description of Artificial Sequence: Synthetic oligonucleotide
aaggaacgcaagaguuaca

SEQ ID NO: 2558024 - RNA, 19 nt, Artificial Sequence
  Description of Artificial Sequence: Synthetic oligonucleotide
agugccuguugugcucggg

SEQ ID NO: 2558025 - RNA, 19 nt, Artificial Sequence
  Description of Artificial Sequence: Synthetic oligonucleotide
guuuccaugaguggacacu

SEQ ID NO: 2558026 - RNA, 19 nt, Artificial Sequence
  Description of Artificial Sequence: Synthetic oligonucleotide
auguaagcaggcagugccu

SEQ ID NO: 2558027 - RNA, 19 nt, Artificial Sequence
  Description of Artificial Sequence: Synthetic oligonucleotide
cugcuugcucagugguggc

SEQ ID NO: 2558028 - RNA, 19 nt, Artificial Sequence
  Description of Artificial Sequence: Synthetic oligonucleotide
cuacccagagccuuccacu

SEQ ID NO: 2558029 - RNA, 19 nt, Artificial Sequence
  Description of Artificial Sequence: Synthetic oligonucleotide
ggagcugauccucgaagga

SEQ ID NO: 2558030 - RNA, 19 nt, Artificial Sequence
  Description of Artificial Sequence: Synthetic oligonucleotide
auccucgaaggaauggaau

SEQ ID NO: 2558031 - RNA, 19 nt, Artificial Sequence
  Description of Artificial Sequence: Synthetic oligonucleotide
gaggccaugaugacgucgu

SEQ ID NO: 2558032 - RNA, 19 nt, Artificial Sequence
  Description of Artificial Sequence: Synthetic oligonucleotide
uugcucagugguggcaagu

SEQ ID NO: 2558033 - RNA, 19 nt, Artificial Sequence
  Description of Artificial Sequence: Synthetic oligonucleotide
cuuaauccgcgucugguuu

SEQ ID NO: 2558034 - RNA, 19 nt, Artificial Sequence
  Description of Artificial Sequence: Synthetic oligonucleotide
aggccaugaugacgucguc

SEQ ID NO: 2558035 - RNA, 19 nt, Artificial Sequence
  Description of Artificial Sequence: Synthetic oligonucleotide
cugaaugcucugaauacuu

SEQ ID NO: 2558036 - RNA, 19 nt, Artificial Sequence
  Description of Artificial Sequence: Synthetic oligonucleotide
uucuaggccugaugacuuu

SEQ ID NO: 2558037 - RNA, 19 nt, Artificial Sequence
  Description of Artificial Sequence: Synthetic oligonucleotide
gugccuguugugcucggga

SEQ ID NO: 2558038 - RNA, 19 nt, Artificial Sequence
  Description of Artificial Sequence: Synthetic oligonucleotide
cuccucuguggaugugcag

SEQ ID NO: 2558039 - RNA, 19 nt, Artificial Sequence
  Description of Artificial Sequence: Synthetic oligonucleotide
gguuuugcacuccucacau

SEQ ID NO: 2558040 - RNA, 19 nt, Artificial Sequence
  Description of Artificial Sequence: Synthetic oligonucleotide
gauggacaagucccugggu

SEQ ID NO: 2558041 - RNA, 19 nt, Artificial Sequence
  Description of Artificial Sequence: Synthetic oligonucleotide
gcagugccuguugugcucg

SEQ ID NO: 2558042 - RNA, 19 nt, Artificial Sequence
  Description of Artificial Sequence: Synthetic oligonucleotide
gauggcuggggcccuuucu

SEQ ID NO: 2558043 - RNA, 19 nt, Artificial Sequence
  Description of Artificial Sequence: Synthetic oligonucleotide
gccuguugugcucgggacc

SEQ ID NO: 2558044 - RNA, 19 nt, Artificial Sequence
  Description of Artificial Sequence: Synthetic oligonucleotide
cucgaaggaauggaauuua

SEQ ID NO: 2558045 - RNA, 19 nt, Artificial Sequence
  Description of Artificial Sequence: Synthetic oligonucleotide
gcucaggucuacccagagc

SEQ ID NO: 2558046 - RNA, 19 nt, Artificial Sequence
  Description of Artificial Sequence: Synthetic oligonucleotide
caacaggcucugcuugcuc

SEQ ID NO: 2558047 - RNA, 19 nt, Artificial Sequence
  Description of Artificial Sequence: Synthetic oligonucleotide
cgggaccaaaaccagcacc

SEQ ID NO: 2558048 - RNA, 19 nt, Artificial Sequence
  Description of Artificial Sequence: Synthetic oligonucleotide
guuuaggaaugggauggcu

SEQ ID NO: 2558049 - RNA, 19 nt, Artificial Sequence
  Description of Artificial Sequence: Synthetic oligonucleotide
gaauuuacucuggcacacu

SEQ ID NO: 2558050 - RNA, 19 nt, Artificial Sequence
  Description of Artificial Sequence: Synthetic oligonucleotide
agcaugcuuauaagagaaa

SEQ ID NO: 2558051 - RNA, 19 nt, Artificial Sequence
  Description of Artificial Sequence: Synthetic oligonucleotide
ggcagagcucucuuccaga

SEQ ID NO: 2558052 - RNA, 19 nt, Artificial Sequence
  Description of Artificial Sequence: Synthetic oligonucleotide
cucugauguaggaagccuu

SEQ ID NO: 2558053 - RNA, 19 nt, Artificial Sequence
  Description of Artificial Sequence: Synthetic oligonucleotide
gcauuucaaaggaacgcaa

SEQ ID NO: 2558054 - RNA, 19 nt, Artificial Sequence
  Description of Artificial Sequence: Synthetic oligonucleotide
caccacggagcugauccuc

SEQ ID NO: 2558055 - RNA, 19 nt, Artificial Sequence
  Description of Artificial Sequence: Synthetic oligonucleotide
guugugcucgggaccaaaa

SEQ ID NO: 2558056 - RNA, 19 nt, Artificial Sequence
  Description of Artificial Sequence: Synthetic oligonucleotide
gccugaugacuuucuccgc

SEQ ID NO: 2558057 - RNA, 19 nt, Artificial Sequence
  Description of Artificial Sequence: Synthetic oligonucleotide
ggcagugccuguugugcuc

SEQ ID NO: 2558058 - RNA, 19 nt, Artificial Sequence
  Description of Artificial Sequence: Synthetic oligonucleotide
cuaggccugaugacuuucu

SEQ ID NO: 2558059 - RNA, 19 nt, Artificial Sequence
  Description of Artificial Sequence: Synthetic oligonucleotide
guaagcaggcagugccugu

SEQ ID NO: 2558060 - RNA, 19 nt, Artificial Sequence
  Description of Artificial Sequence: Synthetic oligonucleotide
ggacaagucccugggugac

SEQ ID NO: 2558061 - RNA, 19 nt, Artificial Sequence
  Description of Artificial Sequence: Synthetic oligonucleotide
gggcaaaacaacaggcucu

SEQ ID NO: 2558062 - RNA, 19 nt, Artificial Sequence
  Description of Artificial Sequence: Synthetic oligonucleotide
cucggauaaucuuggcaau

SEQ ID NO: 2558063 - RNA, 19 nt, Artificial Sequence
  Description of Artificial Sequence: Synthetic oligonucleotide
cagagcaacuuuaggcaau

SEQ ID NO: 2558064 - RNA, 19 nt, Artificial Sequence
  Description of Artificial Sequence: Synthetic oligonucleotide
ucuccgcgaucuuccuuuu

SEQ ID NO: 2558065 - RNA, 19 nt, Artificial Sequence
  Description of Artificial Sequence: Synthetic oligonucleotide
gaauacuucuaggccugau

SEQ ID NO: 2558066 - RNA, 19 nt, Artificial Sequence
  Description of Artificial Sequence: Synthetic oligonucleotide
augcucaggucuacccaga

SEQ ID NO: 2558067 - RNA, 19 nt, Artificial Sequence
  Description of Artificial Sequence: Synthetic oligonucleotide
ggaccaaaaccagcaccac

SEQ ID NO: 2558068 - RNA, 19 nt, Artificial Sequence
  Description of Artificial Sequence: Synthetic oligonucleotide
cugaggccaugaugacguc

SEQ ID NO: 2558069 - RNA, 19 nt, Artificial Sequence
  Description of Artificial Sequence: Synthetic oligonucleotide
ccuguugugcucgggacca

SEQ ID NO: 2558070 - RNA, 19 nt, Artificial Sequence
  Description of Artificial Sequence: Synthetic oligonucleotide
caagaguuacaagguuucu

SEQ ID NO: 2558071 - RNA, 19 nt, Artificial Sequence
  Description of Artificial Sequence: Synthetic oligonucleotide
aguggacacugaggccaug

SEQ ID NO: 2558072 - RNA, 19 nt, Artificial Sequence
  Description of Artificial Sequence: Synthetic oligonucleotide
cuccgcgaucuuccuuuuc

SEQ ID NO: 2558073 - RNA, 19 nt, Artificial Sequence
  Description of Artificial Sequence: Synthetic oligonucleotide
uggggcccuuucugcucgc

SEQ ID NO: 2558074 - RNA, 19 nt, Artificial Sequence
  Description of Artificial Sequence: Synthetic oligonucleotide
gcaaaacaacaggcucugc

SEQ ID NO: 2558075 - RNA, 19 nt, Artificial Sequence
  Description of Artificial Sequence: Synthetic oligonucleotide
cgcgaucuuccuuuucuuc

SEQ ID NO: 2558076 - RNA, 19 nt, Artificial Sequence
  Description of Artificial Sequence: Synthetic oligonucleotide
gcagcuaaauaaccuugau

SEQ ID NO: 2558077 - RNA, 19 nt, Artificial Sequence
  Description of Artificial Sequence: Synthetic oligonucleotide
ccaggagaccagccagagc

SEQ ID NO: 2558078 - RNA, 19 nt, Artificial Sequence
  Description of Artificial Sequence: Synthetic oligonucleotide
guaaacccacauacacagu

SEQ ID NO: 2558079 - RNA, 19 nt, Artificial Sequence
  Description of Artificial Sequence: Synthetic oligonucleotide
gcucugcuugcucaguggu

SEQ ID NO: 2558080 - RNA, 19 nt, Artificial Sequence
  Description of Artificial Sequence: Synthetic oligonucleotide
cacggagcugauccucgaa

SEQ ID NO: 2558081 - RNA, 19 nt, Artificial Sequence
  Description of Artificial Sequence: Synthetic oligonucleotide
gcuuaauccgcgucugguu

SEQ ID NO: 2558082 - RNA, 19 nt, Artificial Sequence
  Description of Artificial Sequence: Synthetic oligonucleotide
gucccugggugacaagcau

SEQ ID NO: 2558083 - RNA, 19 nt, Artificial Sequence
  Description of Artificial Sequence: Synthetic oligonucleotide
gcacacucugauguaggaa

SEQ ID NO: 2558084 - RNA, 19 nt, Artificial Sequence
  Description of Artificial Sequence: Synthetic oligonucleotide
cgaaggaauggaauuuacu

SEQ ID NO: 2558085 - RNA, 19 nt, Artificial Sequence
  Description of Artificial Sequence: Synthetic oligonucleotide
cgucguccuuucuucgaug

SEQ ID NO: 2558086 - RNA, 19 nt, Artificial Sequence
  Description of Artificial Sequence: Synthetic oligonucleotide
gcgucugguuuugcacucc

SEQ ID NO: 2558087 - RNA, 19 nt, Artificial Sequence
  Description of Artificial Sequence: Synthetic oligonucleotide
ggauggcuggggcccuuuc

SEQ ID NO: 2558088 - RNA, 19 nt, Artificial Sequence
  Description of Artificial Sequence: Synthetic oligonucleotide
cgauggcugcugaaugcuc

SEQ ID NO: 2558089 - RNA, 19 nt, Artificial Sequence
  Description of Artificial Sequence: Synthetic oligonucleotide
cgcgucugguuuugcacuc

SEQ ID NO: 2558090 - RNA, 19 nt, Artificial Sequence
  Description of Artificial Sequence: Synthetic oligonucleotide
cgcaagaguuacaagguuu

SEQ ID NO: 2558091 - RNA, 19 nt, Artificial Sequence
  Description of Artificial Sequence: Synthetic oligonucleotide
cuugacacucucggauaau

SEQ ID NO: 2558092 - RNA, 19 nt, Artificial Sequence
  Description of Artificial Sequence: Synthetic oligonucleotide
ccacugcaagcauuucaaa

SEQ ID NO: 2558093 - RNA, 19 nt, Artificial Sequence
  Description of Artificial Sequence: Synthetic oligonucleotide
ggcuggggcccuuucugcu

SEQ ID NO: 2558094 - RNA, 19 nt, Artificial Sequence
  Description of Artificial Sequence: Synthetic oligonucleotide
caggucuacccagagccuu

SEQ ID NO: 2558095 - RNA, 19 nt, Artificial Sequence
  Description of Artificial Sequence: Synthetic oligonucleotide
cgugccaugcucaggucua

SEQ ID NO: 2558096 - RNA, 19 nt, Artificial Sequence
  Description of Artificial Sequence: Synthetic oligonucleotide
cugcucgcuuaauccgcgu

SEQ ID NO: 2558097 - RNA, 19 nt, Artificial Sequence
  Description of Artificial Sequence: Synthetic oligonucleotide
ccgcgucugguuuugcacu

SEQ ID NO: 2558098 - RNA, 19 nt, Artificial Sequence
  Description of Artificial Sequence: Synthetic oligonucleotide
cucuguggaugugcaguuu

SEQ ID NO: 2558099 - RNA, 19 nt, Artificial Sequence
  Description of Artificial Sequence: Synthetic oligonucleotide
ccucuguggaugugcaguu

SEQ ID NO: 2558100 - RNA, 19 nt, Artificial Sequence
  Description of Artificial Sequence: Synthetic oligonucleotide
cuguugugcucgggaccaa

SEQ ID NO: 2558101 - RNA, 19 nt, Artificial Sequence
  Description of Artificial Sequence: Synthetic oligonucleotide
ccgcgaucuuccuuuucuu

SEQ ID NO: 2558102 - RNA, 19 nt, Artificial Sequence
  Description of Artificial Sequence: Synthetic oligonucleotide
ccugggugacaagcaugcu

SEQ ID NO: 2558103 - RNA, 19 nt, Artificial Sequence
  Description of Artificial Sequence: Synthetic oligonucleotide
uacaauaucgguaacaccg

SEQ ID NO: 2558104 - RNA, 19 nt, Artificial Sequence
  Description of Artificial Sequence: Synthetic oligonucleotide
aaagaugcgaauuuuagca

SEQ ID NO: 2558105 - RNA, 19 nt, Artificial Sequence
  Description of Artificial Sequence: Synthetic oligonucleotide
uuuaccauguauuuguugg

SEQ ID NO: 2558106 - RNA, 19 nt, Artificial Sequence
  Description of Artificial Sequence: Synthetic oligonucleotide
uauauuugaccccacagcc

SEQ ID NO: 2558107 - RNA, 19 nt, Artificial Sequence
  Description of Artificial Sequence: Synthetic oligonucleotide
augacaauaggauagucgg

SEQ ID NO: 2558108 - RNA, 19 nt, Artificial Sequence
  Description of Artificial Sequence: Synthetic oligonucleotide
auauauuugaccccacagc

SEQ ID NO: 2558109 - RNA, 19 nt, Artificial Sequence
  Description of Artificial Sequence: Synthetic oligonucleotide
uuaaacuuggugaagcccc

SEQ ID NO: 2558110 - RNA, 19 nt, Artificial Sequence
  Description of Artificial Sequence: Synthetic oligonucleotide
auugauucggaugacaugg

SEQ ID NO: 2558111 - RNA, 19 nt, Artificial Sequence
  Description of Artificial Sequence: Synthetic oligonucleotide
caugaugacaauaggauag

SEQ ID NO: 2558112 - RNA, 19 nt, Artificial Sequence
  Description of Artificial Sequence: Synthetic oligonucleotide
ugaacuuugcucuacgaag

SEQ ID NO: 2558113 - RNA, 19 nt, Artificial Sequence
  Description of Artificial Sequence: Synthetic oligonucleotide
ucaucugacaccaugugcc

SEQ ID NO: 2558114 - RNA, 19 nt, Artificial Sequence
  Description of Artificial Sequence: Synthetic oligonucleotide
gacaacaucuuauugauuc

SEQ ID NO: 2558115 - RNA, 19 nt, Artificial Sequence
  Description of Artificial Sequence: Synthetic oligonucleotide
uuauucugcagcuuggugc

SEQ ID NO: 2558116 - RNA, 19 nt, Artificial Sequence
  Description of Artificial Sequence: Synthetic oligonucleotide
gauauauuugaccccacag

SEQ ID NO: 2558117 - RNA, 19 nt, Artificial Sequence
  Description of Artificial Sequence: Synthetic oligonucleotide
ucaaagaugcgaauuuuag

SEQ ID NO: 2558118 - RNA, 19 nt, Artificial Sequence
  Description of Artificial Sequence: Synthetic oligonucleotide
cuuugcucuacgaagagcc

SEQ ID NO: 2558119 - RNA, 19 nt, Artificial Sequence
  Description of Artificial Sequence: Synthetic oligonucleotide
uuugguaggguacaggaga

SEQ ID NO: 2558120 - RNA, 19 nt, Artificial Sequence
  Description of Artificial Sequence: Synthetic oligonucleotide
ucuacgaagagccucaauc

SEQ ID NO: 2558121 - RNA, 19 nt, Artificial Sequence
  Description of Artificial Sequence: Synthetic oligonucleotide
auucggaugacauggaaag

SEQ ID NO: 2558122 - RNA, 19 nt, Artificial Sequence
  Description of Artificial Sequence: Synthetic oligonucleotide
ucgaauaugaaagccaucc

SEQ ID NO: 2558123 - RNA, 19 nt, Artificial Sequence
  Description of Artificial Sequence: Synthetic oligonucleotide
gaugacaauaggauagucg

SEQ ID NO: 2558124 - RNA, 19 nt, Artificial Sequence
  Description of Artificial Sequence: Synthetic oligonucleotide
uauucugcagcuuggugcg

SEQ ID NO: 2558125 - RNA, 19 nt, Artificial Sequence
  Description of Artificial Sequence: Synthetic oligonucleotide
aucuuauugauucggauga

SEQ ID NO: 2558126 - RNA, 19 nt, Artificial Sequence
  Description of Artificial Sequence: Synthetic oligonucleotide
auaugaaagccauccuugc

SEQ ID NO: 2558127 - RNA, 19 nt, Artificial Sequence
  Description of Artificial Sequence: Synthetic oligonucleotide
uuuagcaucagggacaccu

SEQ ID NO: 2558128 - RNA, 19 nt, Artificial Sequence
  Description of Artificial Sequence: Synthetic oligonucleotide
uguucuuacaauaucggua

SEQ ID NO: 2558129 - RNA, 19 nt, Artificial Sequence
  Description of Artificial Sequence: Synthetic oligonucleotide
gaugacauggaaagggugg

SEQ ID NO: 2558130 - RNA, 19 nt, Artificial Sequence
  Description of Artificial Sequence: Synthetic oligonucleotide
aauaggauagucgguggcg

SEQ ID NO: 2558131 - RNA, 19 nt, Artificial Sequence
  Description of Artificial Sequence: Synthetic oligonucleotide
aauuuuagcaucagggaca

SEQ ID NO: 2558132 - RNA, 19 nt, Artificial Sequence
  Description of Artificial Sequence: Synthetic oligonucleotide
aauaucgguaacaccgggc

SEQ ID NO: 2558133 - RNA, 19 nt, Artificial Sequence
  Description of Artificial Sequence: Synthetic oligonucleotide
cuugccacaacucuuuacc

SEQ ID NO: 2558134 - RNA, 19 nt, Artificial Sequence
  Description of Artificial Sequence: Synthetic oligonucleotide
ucauauucaucugacacca

SEQ ID NO: 2558135 - RNA, 19 nt, Artificial Sequence
  Description of Artificial Sequence: Synthetic oligonucleotide
acagccaucaggaaugagc

SEQ ID NO: 2558136 - RNA, 19 nt, Artificial Sequence
  Description of Artificial Sequence: Synthetic oligonucleotide
uguggaagcucucaggagu

SEQ ID NO: 2558137 - RNA, 19 nt, Artificial Sequence
  Description of Artificial Sequence: Synthetic oligonucleotide
uauucaucugacaccaugu

SEQ ID NO: 2558138 - RNA, 19 nt, Artificial Sequence
  Description of Artificial Sequence: Synthetic oligonucleotide
acugaacaugauuugguag

SEQ ID NO: 2558139 - RNA, 19 nt, Artificial Sequence
  Description of Artificial Sequence: Synthetic oligonucleotide
aagugggaauucaucaacc

SEQ ID NO: 2558140 - RNA, 19 nt, Artificial Sequence
  Description of Artificial Sequence: Synthetic oligonucleotide
uuauugauucggaugacau

SEQ ID NO: 2558141 - RNA, 19 nt, Artificial Sequence
  Description of Artificial Sequence: Synthetic oligonucleotide
agaugcgaauuuuagcauc

SEQ ID NO: 2558142 - RNA, 19 nt, Artificial Sequence
  Description of Artificial Sequence: Synthetic oligonucleotide
uuugagauguggaucuucu

SEQ ID NO: 2558143 - RNA, 19 nt, Artificial Sequence
  Description of Artificial Sequence: Synthetic oligonucleotide
uuuggguacggcuuguucu

SEQ ID NO: 2558144 - RNA, 19 nt, Artificial Sequence
  Description of Artificial Sequence: Synthetic oligonucleotide
caaagaugcgaauuuuagc

SEQ ID NO: 2558145 - RNA, 19 nt, Artificial Sequence
  Description of Artificial Sequence: Synthetic oligonucleotide
uucaucugacaccaugugc

SEQ ID NO: 2558146 - RNA, 19 nt, Artificial Sequence
  Description of Artificial Sequence: Synthetic oligonucleotide
gauguggaucuucuggcgg

SEQ ID NO: 2558147 - RNA, 19 nt, Artificial Sequence
  Description of Artificial Sequence: Synthetic oligonucleotide
ugcgaauuuuagcaucagg

SEQ ID NO: 2558148 - RNA, 19 nt, Artificial Sequence
  Description of Artificial Sequence: Synthetic oligonucleotide
acgcauacccgucuggagc

SEQ ID NO: 2558149 - RNA, 19 nt, Artificial Sequence
  Description of Artificial Sequence: Synthetic oligonucleotide
aacaugauuugguagggua

SEQ ID NO: 2558150 - RNA, 19 nt, Artificial Sequence
  Description of Artificial Sequence: Synthetic oligonucleotide
uggauggagauuuauuacu

SEQ ID NO: 2558151 - RNA, 19 nt, Artificial Sequence
  Description of Artificial Sequence: Synthetic oligonucleotide
uuacugaacaugauuuggu

SEQ ID NO: 2558152 - RNA, 19 nt, Artificial Sequence
  Description of Artificial Sequence: Synthetic oligonucleotide
acaacaucuuauugauucg

SEQ ID NO: 2558153 - RNA, 19 nt, Artificial Sequence
  Description of Artificial Sequence: Synthetic oligonucleotide
aacucuuuaccauguauuu

SEQ ID NO: 2558154 - RNA, 19 nt, Artificial Sequence
  Description of Artificial Sequence: Synthetic oligonucleotide
uggagauuuauuacugaac

SEQ ID NO: 2558155 - RNA, 19 nt, Artificial Sequence
  Description of Artificial Sequence: Synthetic oligonucleotide
cacauguucuuuauucugc

SEQ ID NO: 2558156 - RNA, 19 nt, Artificial Sequence
  Description of Artificial Sequence: Synthetic oligonucleotide
gguaacaccgggcagggcg

SEQ ID NO: 2558157 - RNA, 19 nt, Artificial Sequence
  Description of Artificial Sequence: Synthetic oligonucleotide
aaggguggagccucacucg

SEQ ID NO: 2558158 - RNA, 19 nt, Artificial Sequence
  Description of Artificial Sequence: Synthetic oligonucleotide
uauuugaccccacagccau

SEQ ID NO: 2558159 - RNA, 19 nt, Artificial Sequence
  Description of Artificial Sequence: Synthetic oligonucleotide
agagcuucggaagagagcu

SEQ ID NO: 2558160 - RNA, 19 nt, Artificial Sequence
  Description of Artificial Sequence: Synthetic oligonucleotide
auaucgguaacaccgggca

SEQ ID NO: 2558161 - RNA, 19 nt, Artificial Sequence
  Description of Artificial Sequence: Synthetic oligonucleotide
ugaacaugauuugguaggg

SEQ ID NO: 2558162 - RNA, 19 nt, Artificial Sequence
  Description of Artificial Sequence: Synthetic oligonucleotide
acaccaugugcccacaaag

SEQ ID NO: 2558163 - RNA, 19 nt, Artificial Sequence
  Description of Artificial Sequence: Synthetic oligonucleotide
ggagauuuauuacugaaca

SEQ ID NO: 2558164 - RNA, 19 nt, Artificial Sequence
  Description of Artificial Sequence: Synthetic oligonucleotide
acuggauggagauuuauua

SEQ ID NO: 2558165 - RNA, 19 nt, Artificial Sequence
  Description of Artificial Sequence: Synthetic oligonucleotide
aacuuugcucuacgaagag

SEQ ID NO: 2558166 - RNA, 19 nt, Artificial Sequence
  Description of Artificial Sequence: Synthetic oligonucleotide
ucccaaaucaaagaugcga

SEQ ID NO: 2558167 - RNA, 19 nt, Artificial Sequence
  Description of Artificial Sequence: Synthetic oligonucleotide
cauuaaacuuggugaagcc

SEQ ID NO: 2558168 - RNA, 19 nt, Artificial Sequence
  Description of Artificial Sequence: Synthetic oligonucleotide
agaagcgagacuuugggua

SEQ ID NO: 2558169 - RNA, 19 nt, Artificial Sequence
  Description of Artificial Sequence: Synthetic oligonucleotide
uugaacuuugcucuacgaa

SEQ ID NO: 2558170 - RNA, 19 nt, Artificial Sequence
  Description of Artificial Sequence: Synthetic oligonucleotide
auuuuagcaucagggacac

SEQ ID NO: 2558171 - RNA, 19 nt, Artificial Sequence
  Description of Artificial Sequence: Synthetic oligonucleotide
guucuuacaauaucgguaa

SEQ ID NO: 2558172 - RNA, 19 nt, Artificial Sequence
  Description of Artificial Sequence: Synthetic oligonucleotide
uauugauucggaugacaug

SEQ ID NO: 2558173 - RNA, 19 nt, Artificial Sequence
  Description of Artificial Sequence: Synthetic oligonucleotide
uaagcagacuggauggaga

SEQ ID NO: 2558174 - RNA, 19 nt, Artificial Sequence
  Description of Artificial Sequence: Synthetic oligonucleotide
uuggcacaaauacgggccg

SEQ ID NO: 2558175 - RNA, 19 nt, Artificial Sequence
  Description of Artificial Sequence: Synthetic oligonucleotide
aacuugaacuuugcucuac

SEQ ID NO: 2558176 - RNA, 19 nt, Artificial Sequence
  Description of Artificial Sequence: Synthetic oligonucleotide
uuguucuuacaauaucggu

SEQ ID NO: 2558177 - RNA, 19 nt, Artificial Sequence
  Description of Artificial Sequence: Synthetic oligonucleotide
guuggcacaaauacgggcc

SEQ ID NO: 2558178 - RNA, 19 nt, Artificial Sequence
  Description of Artificial Sequence: Synthetic oligonucleotide
agcuucggaagagagcugc

SEQ ID NO: 2558179 - RNA, 19 nt, Artificial Sequence
  Description of Artificial Sequence: Synthetic oligonucleotide
aagaugcgaauuuuagcau

SEQ ID NO: 2558180 - RNA, 19 nt, Artificial Sequence
  Description of Artificial Sequence: Synthetic oligonucleotide
ccucacucgaauaugaaag

SEQ ID NO: 2558181 - RNA, 19 nt, Artificial Sequence
  Description of Artificial Sequence: Synthetic oligonucleotide
cuuccgucccaaaucaaag

SEQ ID NO: 2558182 - RNA, 19 nt, Artificial Sequence
  Description of Artificial Sequence: Synthetic oligonucleotide
uuaccauguauuuguuggc

SEQ ID NO: 2558183 - RNA, 19 nt, Artificial Sequence
  Description of Artificial Sequence: Synthetic oligonucleotide
cucacucgaauaugaaagc

SEQ ID NO: 2558184 - RNA, 19 nt, Artificial Sequence
  Description of Artificial Sequence: Synthetic oligonucleotide
cuucccaaaggcaccacgc

SEQ ID NO: 2558185 - RNA, 19 nt, Artificial Sequence
  Description of Artificial Sequence: Synthetic oligonucleotide
aaccaugucuucaaauuca

SEQ ID NO: 2558186 - RNA, 19 nt, Artificial Sequence
  Description of Artificial Sequence: Synthetic oligonucleotide
cuggauggagauuuauuac

SEQ ID NO: 2558187 - RNA, 19 nt, Artificial Sequence
  Description of Artificial Sequence: Synthetic oligonucleotide
gacaugaugaccuggccaa

SEQ ID NO: 2558188 - RNA, 19 nt, Artificial Sequence
  Description of Artificial Sequence: Synthetic oligonucleotide
ucacucgaauaugaaagcc

SEQ ID NO: 2558189 - RNA, 19 nt, Artificial Sequence
  Description of Artificial Sequence: Synthetic oligonucleotide
uacgaagagccucaaucac

SEQ ID NO: 2558190 - RNA, 19 nt, Artificial Sequence
  Description of Artificial Sequence: Synthetic oligonucleotide
gaaugagccguuucucagc

SEQ ID NO: 2558191 - RNA, 19 nt, Artificial Sequence
  Description of Artificial Sequence: Synthetic oligonucleotide
uuaagcagacuggauggag

SEQ ID NO: 2558192 - RNA, 19 nt, Artificial Sequence
  Description of Artificial Sequence: Synthetic oligonucleotide
acaaauacgggccgccucu

SEQ ID NO: 2558193 - RNA, 19 nt, Artificial Sequence
  Description of Artificial Sequence: Synthetic oligonucleotide
ucuuccgucccaaaucaaa

SEQ ID NO: 2558194 - RNA, 19 nt, Artificial Sequence
  Description of Artificial Sequence: Synthetic oligonucleotide
auggacaugaugaccuggc

SEQ ID NO: 2558195 - RNA, 19 nt, Artificial Sequence
  Description of Artificial Sequence: Synthetic oligonucleotide
gaagcgagacuuuggguac

SEQ ID NO: 2558196 - RNA, 19 nt, Artificial Sequence
  Description of Artificial Sequence: Synthetic oligonucleotide
auggagauuuauuacugaa

SEQ ID NO: 2558197 - RNA, 19 nt, Artificial Sequence
  Description of Artificial Sequence: Synthetic oligonucleotide
ugauuugguaggguacagg

SEQ ID NO: 2558198 - RNA, 19 nt, Artificial Sequence
  Description of Artificial Sequence: Synthetic oligonucleotide
aauacgggccgccucuaga

SEQ ID NO: 2558199 - RNA, 19 nt, Artificial Sequence
  Description of Artificial Sequence: Synthetic oligonucleotide
ugcucuacgaagagccuca

SEQ ID NO: 2558200 - RNA, 19 nt, Artificial Sequence
  Description of Artificial Sequence: Synthetic oligonucleotide
aucgguaacaccgggcagg

SEQ ID NO: 2558201 - RNA, 19 nt, Artificial Sequence
  Description of Artificial Sequence: Synthetic oligonucleotide
gauggacaugaugaccugg

SEQ ID NO: 2558202 - RNA, 19 nt, Artificial Sequence
  Description of Artificial Sequence: Synthetic oligonucleotide
uccgucccaaaucaaagau

SEQ ID NO: 2558203 - RNA, 19 nt, Artificial Sequence
  Description of Artificial Sequence: Synthetic oligonucleotide
agugggaauucaucaaccu

SEQ ID NO: 2558204 - RNA, 19 nt, Artificial Sequence
  Description of Artificial Sequence: Synthetic oligonucleotide
cacaaagugggaauucauc

SEQ ID NO: 2558205 - RNA, 19 nt, Artificial Sequence
  Description of Artificial Sequence: Synthetic oligonucleotide
gacccaugaugacaauagg

SEQ ID NO: 2558206 - RNA, 19 nt, Artificial Sequence
  Description of Artificial Sequence: Synthetic oligonucleotide
uagagcuucggaagagagc

SEQ ID NO: 2558207 - RNA, 19 nt, Artificial Sequence
  Description of Artificial Sequence: Synthetic oligonucleotide
gauggagauuuauuacuga

SEQ ID NO: 2558208 - RNA, 19 nt, Artificial Sequence
  Description of Artificial Sequence: Synthetic oligonucleotide
ugcauuaaacuuggugaag

SEQ ID NO: 2558209 - RNA, 19 nt, Artificial Sequence
  Description of Artificial Sequence: Synthetic oligonucleotide
acaacucuuuaccauguau

SEQ ID NO: 2558210 - RNA, 19 nt, Artificial Sequence
  Description of Artificial Sequence: Synthetic oligonucleotide
caauaggauagucgguggc

SEQ ID NO: 2558211 - RNA, 19 nt, Artificial Sequence
  Description of Artificial Sequence: Synthetic oligonucleotide
uaggguacaggagagcacu

SEQ ID NO: 2558212 - RNA, 19 nt, Artificial Sequence
  Description of Artificial Sequence: Synthetic oligonucleotide
acaauaucgguaacaccgg

SEQ ID NO: 2558213 - RNA, 19 nt, Artificial Sequence
  Description of Artificial Sequence: Synthetic oligonucleotide
auacgggccgccucuagag

SEQ ID NO: 2558214 - RNA, 19 nt, Artificial Sequence
  Description of Artificial Sequence: Synthetic oligonucleotide
aaccuuugccuucuuccgu

SEQ ID NO: 2558215 - RNA, 19 nt, Artificial Sequence
  Description of Artificial Sequence: Synthetic oligonucleotide
caauaucgguaacaccggg

SEQ ID NO: 2558216 - RNA, 19 nt, Artificial Sequence
  Description of Artificial Sequence: Synthetic oligonucleotide
aggaaugagccguuucuca

SEQ ID NO: 2558217 - RNA, 19 nt, Artificial Sequence
  Description of Artificial Sequence: Synthetic oligonucleotide
cuacgaagagccucaauca

SEQ ID NO: 2558218 - RNA, 19 nt, Artificial Sequence
  Description of Artificial Sequence: Synthetic oligonucleotide
aaauacgggccgccucuag

SEQ ID NO: 2558219 - RNA, 19 nt, Artificial Sequence
  Description of Artificial Sequence: Synthetic oligonucleotide
gaugaccuggccaauguga

SEQ ID NO: 2558220 - RNA, 19 nt, Artificial Sequence
  Description of Artificial Sequence: Synthetic oligonucleotide
gcagaagcgagacuuuggg

SEQ ID NO: 2558221 - RNA, 19 nt, Artificial Sequence
  Description of Artificial Sequence: Synthetic oligonucleotide
uacugaacaugauuuggua

SEQ ID NO: 2558222 - RNA, 19 nt, Artificial Sequence
  Description of Artificial Sequence: Synthetic oligonucleotide
uaucgguaacaccgggcag

SEQ ID NO: 2558223 - RNA, 19 nt, Artificial Sequence
  Description of Artificial Sequence: Synthetic oligonucleotide
gggaacuugaacuuugcuc

SEQ ID NO: 2558224 - RNA, 19 nt, Artificial Sequence
  Description of Artificial Sequence: Synthetic oligonucleotide
ugucagcuccagcacagga

SEQ ID NO: 2558225 - RNA, 19 nt, Artificial Sequence
  Description of Artificial Sequence: Synthetic oligonucleotide
gaugcgaauuuuagcauca

SEQ ID NO: 2558226 - RNA, 19 nt, Artificial Sequence
  Description of Artificial Sequence: Synthetic oligonucleotide
uaccauguauuuguuggca

SEQ ID NO: 2558227 - RNA, 19 nt, Artificial Sequence
  Description of Artificial Sequence: Synthetic oligonucleotide
agggcggcgacccaugaug

SEQ ID NO: 2558228 - RNA, 19 nt, Artificial Sequence
  Description of Artificial Sequence: Synthetic oligonucleotide
uuccgucccaaaucaaaga

SEQ ID NO: 2558229 - RNA, 19 nt, Artificial Sequence
  Description of Artificial Sequence: Synthetic oligonucleotide
gaacccuggccacugugcc

SEQ ID NO: 2558230 - RNA, 19 nt, Artificial Sequence
  Description of Artificial Sequence: Synthetic oligonucleotide
uucccaaaggcaccacgca

SEQ ID NO: 2558231 - RNA, 19 nt, Artificial Sequence
  Description of Artificial Sequence: Synthetic oligonucleotide
uucggaugacauggaaagg

SEQ ID NO: 2558232 - RNA, 19 nt, Artificial Sequence
  Description of Artificial Sequence: Synthetic oligonucleotide
ggaaugagccguuucucag

SEQ ID NO: 2558233 - RNA, 19 nt, Artificial Sequence
  Description of Artificial Sequence: Synthetic oligonucleotide
uggagccucacucgaauau

SEQ ID NO: 2558234 - RNA, 19 nt, Artificial Sequence
  Description of Artificial Sequence: Synthetic oligonucleotide
uugccacaacucuuuacca

SEQ ID NO: 2558235 - RNA, 19 nt, Artificial Sequence
  Description of Artificial Sequence: Synthetic oligonucleotide
acggcuuguucuuacaaua

SEQ ID NO: 2558236 - RNA, 19 nt, Artificial Sequence
  Description of Artificial Sequence: Synthetic oligonucleotide
gcauuaaacuuggugaagc

SEQ ID NO: 2558237 - RNA, 19 nt, Artificial Sequence
  Description of Artificial Sequence: Synthetic oligonucleotide
uugagauguggaucuucug

SEQ ID NO: 2558238 - RNA, 19 nt, Artificial Sequence
  Description of Artificial Sequence: Synthetic oligonucleotide
uuuaagcagacuggaugga

SEQ ID NO: 2558239 - RNA, 19 nt, Artificial Sequence
  Description of Artificial Sequence: Synthetic oligonucleotide
uuugcucuacgaagagccu

SEQ ID NO: 2558240 - RNA, 19 nt, Artificial Sequence
  Description of Artificial Sequence: Synthetic oligonucleotide
caucugacaccaugugccc

SEQ ID NO: 2558241 - RNA, 19 nt, Artificial Sequence
  Description of Artificial Sequence: Synthetic oligonucleotide
cuucuuccgucccaaauca

SEQ ID NO: 2558242 - RNA, 19 nt, Artificial Sequence
  Description of Artificial Sequence: Synthetic oligonucleotide
uugauucggaugacaugga

SEQ ID NO: 2558243 - RNA, 19 nt, Artificial Sequence
  Description of Artificial Sequence: Synthetic oligonucleotide
ucgccacuuguccagggga

SEQ ID NO: 2558244 - RNA, 19 nt, Artificial Sequence
  Description of Artificial Sequence: Synthetic oligonucleotide
uggaucuucuggcggccag

SEQ ID NO: 2558245 - RNA, 19 nt, Artificial Sequence
  Description of Artificial Sequence: Synthetic oligonucleotide
ucuagagcuucggaagaga

SEQ ID NO: 2558246 - RNA, 19 nt, Artificial Sequence
  Description of Artificial Sequence: Synthetic oligonucleotide
gauucggaugacauggaaa

SEQ ID NO: 2558247 - RNA, 19 nt, Artificial Sequence
  Description of Artificial Sequence: Synthetic oligonucleotide
auuugguaggguacaggag

SEQ ID NO: 2558248 - RNA, 19 nt, Artificial Sequence
  Description of Artificial Sequence: Synthetic oligonucleotide
accacgauuggggauauau

SEQ ID NO: 2558249 - RNA, 19 nt, Artificial Sequence
  Description of Artificial Sequence: Synthetic oligonucleotide
gccucuagagcuucggaag

SEQ ID NO: 2558250 - RNA, 19 nt, Artificial Sequence
  Description of Artificial Sequence: Synthetic oligonucleotide
uacggcuuguucuuacaau

SEQ ID NO: 2558251 - RNA, 19 nt, Artificial Sequence
  Description of Artificial Sequence: Synthetic oligonucleotide
ugccacaacucuuuaccau

SEQ ID NO: 2558252 - RNA, 19 nt, Artificial Sequence
  Description of Artificial Sequence: Synthetic oligonucleotide
ucgguaacaccgggcaggg

SEQ ID NO: 2558253 - RNA, 19 nt, Artificial Sequence
  Description of Artificial Sequence: Synthetic oligonucleotide
gauuggggauauauuugac

SEQ ID NO: 2558254 - RNA, 19 nt, Artificial Sequence
  Description of Artificial Sequence: Synthetic oligonucleotide
acucgaauaugaaagccau

SEQ ID NO: 2558255 - RNA, 19 nt, Artificial Sequence
  Description of Artificial Sequence: Synthetic oligonucleotide
ucccaaaggcaccacgcau

SEQ ID NO: 2558256 - RNA, 19 nt, Artificial Sequence
  Description of Artificial Sequence: Synthetic oligonucleotide
aagcgagacuuuggguacg

SEQ ID NO: 2558257 - RNA, 19 nt, Artificial Sequence
  Description of Artificial Sequence: Synthetic oligonucleotide
accucggcagaagcgagac

SEQ ID NO: 2558258 - RNA, 19 nt, Artificial Sequence
  Description of Artificial Sequence: Synthetic oligonucleotide
ggauggagauuuauuacug

SEQ ID NO: 2558259 - RNA, 19 nt, Artificial Sequence
  Description of Artificial Sequence: Synthetic oligonucleotide
uguccaggggaccacgauu

SEQ ID NO: 2558260 - RNA, 19 nt, Artificial Sequence
  Description of Artificial Sequence: Synthetic oligonucleotide
ugacauggaaaggguggag

SEQ ID NO: 2558261 - RNA, 19 nt, Artificial Sequence
  Description of Artificial Sequence: Synthetic oligonucleotide
uccaggggaccacgauugg

SEQ ID NO: 2558262 - RNA, 19 nt, Artificial Sequence
  Description of Artificial Sequence: Synthetic oligonucleotide
gugaagccccauuucuuug

SEQ ID NO: 2558263 - RNA, 19 nt, Artificial Sequence
  Description of Artificial Sequence: Synthetic oligonucleotide
gccacaacucuuuaccaug

SEQ ID NO: 2558264 - RNA, 19 nt, Artificial Sequence
  Description of Artificial Sequence: Synthetic oligonucleotide
cagggaacuugaacuuugc

SEQ ID NO: 2558265 - RNA, 19 nt, Artificial Sequence
  Description of Artificial Sequence: Synthetic oligonucleotide
cuugaacuuugcucuacga

SEQ ID NO: 2558266 - RNA, 19 nt, Artificial Sequence
  Description of Artificial Sequence: Synthetic oligonucleotide
uuggugcggauggacauga

SEQ ID NO: 2558267 - RNA, 19 nt, Artificial Sequence
  Description of Artificial Sequence: Synthetic oligonucleotide
accacgcauacccgucugg

SEQ ID NO: 2558268 - RNA, 19 nt, Artificial Sequence
  Description of Artificial Sequence: Synthetic oligonucleotide
ugaugacaauaggauaguc

SEQ ID NO: 2558269 - RNA, 19 nt, Artificial Sequence
  Description of Artificial Sequence: Synthetic oligonucleotide
guaacaccgggcagggcgg

SEQ ID NO: 2558270 - RNA, 19 nt, Artificial Sequence
  Description of Artificial Sequence: Synthetic oligonucleotide
ucuuauugauucggaugac

SEQ ID NO: 2558271 - RNA, 19 nt, Artificial Sequence
  Description of Artificial Sequence: Synthetic oligonucleotide
augaugacaauaggauagu

SEQ ID NO: 2558272 - RNA, 19 nt, Artificial Sequence
  Description of Artificial Sequence: Synthetic oligonucleotide
gacaccucggcagaagcga

SEQ ID NO: 2558273 - RNA, 19 nt, Artificial Sequence
  Description of Artificial Sequence: Synthetic oligonucleotide
augauuugguaggguacag

SEQ ID NO: 2558274 - RNA, 19 nt, Artificial Sequence
  Description of Artificial Sequence: Synthetic oligonucleotide
cuuuggguacggcuuguuc

SEQ ID NO: 2558275 - RNA, 19 nt, Artificial Sequence
  Description of Artificial Sequence: Synthetic oligonucleotide
cuucuggcggccagggaac

SEQ ID NO: 2558276 - RNA, 19 nt, Artificial Sequence
  Description of Artificial Sequence: Synthetic oligonucleotide
augacauggaaagggugga

SEQ ID NO: 2558277 - RNA, 19 nt, Artificial Sequence
  Description of Artificial Sequence: Synthetic oligonucleotide
uuggguacggcuuguucuu

SEQ ID NO: 2558278 - RNA, 19 nt, Artificial Sequence
  Description of Artificial Sequence: Synthetic oligonucleotide
agcuccagcacaggacaac

SEQ ID NO: 2558279 - RNA, 19 nt, Artificial Sequence
  Description of Artificial Sequence: Synthetic oligonucleotide
agcacaggacaacaucuua

SEQ ID NO: 2558280 - RNA, 19 nt, Artificial Sequence
  Description of Artificial Sequence: Synthetic oligonucleotide
cucgaauaugaaagccauc

SEQ ID NO: 2558281 - RNA, 19 nt, Artificial Sequence
  Description of Artificial Sequence: Synthetic oligonucleotide
ugugcccuggggcuuccca

SEQ ID NO: 2558282 - RNA, 19 nt, Artificial Sequence
  Description of Artificial Sequence: Synthetic oligonucleotide
aagccccauuucuuugaga

SEQ ID NO: 2558283 - RNA, 19 nt, Artificial Sequence
  Description of Artificial Sequence: Synthetic oligonucleotide
guauuuguuggcacaaaua

SEQ ID NO: 2558284 - RNA, 19 nt, Artificial Sequence
  Description of Artificial Sequence: Synthetic oligonucleotide
cucgccacuuguccagggg

SEQ ID NO: 2558285 - RNA, 19 nt, Artificial Sequence
  Description of Artificial Sequence: Synthetic oligonucleotide
caugaugaccuggccaaug

SEQ ID NO: 2558286 - RNA, 19 nt, Artificial Sequence
  Description of Artificial Sequence: Synthetic oligonucleotide
cacgcauacccgucuggag

SEQ ID NO: 2558287 - RNA, 19 nt, Artificial Sequence
  Description of Artificial Sequence: Synthetic oligonucleotide
cucaggagugcagggcucg

SEQ ID NO: 2558288 - RNA, 19 nt, Artificial Sequence
  Description of Artificial Sequence: Synthetic oligonucleotide
cacaaauacgggccgccuc

SEQ ID NO: 2558289 - RNA, 19 nt, Artificial Sequence
  Description of Artificial Sequence: Synthetic oligonucleotide
cucuagagcuucggaagag

SEQ ID NO: 2558290 - RNA, 19 nt, Artificial Sequence
  Description of Artificial Sequence: Synthetic oligonucleotide
gguaggguacaggagagca

SEQ ID NO: 2558291 - RNA, 19 nt, Artificial Sequence
  Description of Artificial Sequence: Synthetic oligonucleotide
ggauauauuugaccccaca

SEQ ID NO: 2558292 - RNA, 19 nt, Artificial Sequence
  Description of Artificial Sequence: Synthetic oligonucleotide
ugaccuggccaaugugaac

SEQ ID NO: 2558293 - RNA, 19 nt, Artificial Sequence
  Description of Artificial Sequence: Synthetic oligonucleotide
gagagcacuguggaagcuc

SEQ ID NO: 2558294 - RNA, 19 nt, Artificial Sequence
  Description of Artificial Sequence: Synthetic oligonucleotide
guggaagcucucaggagug

SEQ ID NO: 2558295 - RNA, 19 nt, Artificial Sequence
  Description of Artificial Sequence: Synthetic oligonucleotide
gugaacccuggccacugug

SEQ ID NO: 2558296 - RNA, 19 nt, Artificial Sequence
  Description of Artificial Sequence: Synthetic oligonucleotide
gagccucacucgaauauga

SEQ ID NO: 2558297 - RNA, 19 nt, Artificial Sequence
  Description of Artificial Sequence: Synthetic oligonucleotide
gagccguuucucagcaacc

SEQ ID NO: 2558298 - RNA, 19 nt, Artificial Sequence
  Description of Artificial Sequence: Synthetic oligonucleotide
agcgagacuuuggguacgg

SEQ ID NO: 2558299 - RNA, 19 nt, Artificial Sequence
  Description of Artificial Sequence: Synthetic oligonucleotide
gucccaaaucaaagaugcg

SEQ ID NO: 2558300 - RNA, 19 nt, Artificial Sequence
  Description of Artificial Sequence: Synthetic oligonucleotide
caacucuuuaccauguauu

SEQ ID NO: 2558301 - RNA, 19 nt, Artificial Sequence
  Description of Artificial Sequence: Synthetic oligonucleotide
agggcucgccacuugucca

SEQ ID NO: 2558302 - RNA, 19 nt, Artificial Sequence
  Description of Artificial Sequence: Synthetic oligonucleotide
ccuucuuccgucccaaauc

SEQ ID NO: 2558303 - RNA, 19 nt, Artificial Sequence
  Description of Artificial Sequence: Synthetic oligonucleotide
ggcuuguucuuacaauauc

SEQ ID NO: 2558304 - RNA, 19 nt, Artificial Sequence
  Description of Artificial Sequence: Synthetic oligonucleotide
uucuuccgucccaaaucaa

SEQ ID NO: 2558305 - RNA, 19 nt, Artificial Sequence
  Description of Artificial Sequence: Synthetic oligonucleotide
ugugaacccuggccacugu

SEQ ID NO: 2558306 - RNA, 19 nt, Artificial Sequence
  Description of Artificial Sequence: Synthetic oligonucleotide
ccguuucucagcaaccaug

SEQ ID NO: 2558307 - RNA, 19 nt, Artificial Sequence
  Description of Artificial Sequence: Synthetic oligonucleotide
gaacuugaacuuugcucua

SEQ ID NO: 2558308 - RNA, 19 nt, Artificial Sequence
  Description of Artificial Sequence: Synthetic oligonucleotide
augugaacccuggccacug

SEQ ID NO: 2558309 - RNA, 19 nt, Artificial Sequence
  Description of Artificial Sequence: Synthetic oligonucleotide
guacggcuuguucuuacaa

SEQ ID NO: 2558310 - RNA, 19 nt, Artificial Sequence
  Description of Artificial Sequence: Synthetic oligonucleotide
cuucggaagagagcugcuc

SEQ ID NO: 2558311 - RNA, 19 nt, Artificial Sequence
  Description of Artificial Sequence: Synthetic oligonucleotide
cgaauuuuagcaucaggga

SEQ ID NO: 2558312 - RNA, 19 nt, Artificial Sequence
  Description of Artificial Sequence: Synthetic oligonucleotide
ccauuucuuugagaugugg

SEQ ID NO: 2558313 - RNA, 19 nt, Artificial Sequence
  Description of Artificial Sequence: Synthetic oligonucleotide
augcgaauuuuagcaucag

SEQ ID NO: 2558314 - RNA, 19 nt, Artificial Sequence
  Description of Artificial Sequence: Synthetic oligonucleotide
aacaccgggcagggcggcg

SEQ ID NO: 2558315 - RNA, 19 nt, Artificial Sequence
  Description of Artificial Sequence: Synthetic oligonucleotide
aggcaccacgcauacccgu

SEQ ID NO: 2558316 - RNA, 19 nt, Artificial Sequence
  Description of Artificial Sequence: Synthetic oligonucleotide
augaccuggccaaugugaa

SEQ ID NO: 2558317 - RNA, 19 nt, Artificial Sequence
  Description of Artificial Sequence: Synthetic oligonucleotide
guaggguacaggagagcac

SEQ ID NO: 2558318 - RNA, 19 nt, Artificial Sequence
  Description of Artificial Sequence: Synthetic oligonucleotide
ugacaccaugugcccacaa

SEQ ID NO: 2558319 - RNA, 19 nt, Artificial Sequence
  Description of Artificial Sequence: Synthetic oligonucleotide
gaaaggguggagccucacu

SEQ ID NO: 2558320 - RNA, 19 nt, Artificial Sequence
  Description of Artificial Sequence: Synthetic oligonucleotide
ggauggacaugaugaccug

SEQ ID NO: 2558321 - RNA, 19 nt, Artificial Sequence
  Description of Artificial Sequence: Synthetic oligonucleotide
aucugacaccaugugccca

SEQ ID NO: 2558322 - RNA, 19 nt, Artificial Sequence
  Description of Artificial Sequence: Synthetic oligonucleotide
auuugaccccacagccauc

SEQ ID NO: 2558323 - RNA, 19 nt, Artificial Sequence
  Description of Artificial Sequence: Synthetic oligonucleotide
ccgucccaaaucaaagaug

SEQ ID NO: 2558324 - RNA, 19 nt, Artificial Sequence
  Description of Artificial Sequence: Synthetic oligonucleotide
gcaaccaugucuucaaauu

SEQ ID NO: 2558325 - RNA, 19 nt, Artificial Sequence
  Description of Artificial Sequence: Synthetic oligonucleotide
acaccucggcagaagcgag

SEQ ID NO: 2558326 - RNA, 19 nt, Artificial Sequence
  Description of Artificial Sequence: Synthetic oligonucleotide
ggcacaaauacgggccgcc

SEQ ID NO: 2558327 - RNA, 19 nt, Artificial Sequence
  Description of Artificial Sequence: Synthetic oligonucleotide
gaagagagcugcucauauu

SEQ ID NO: 2558328 - RNA, 19 nt, Artificial Sequence
  Description of Artificial Sequence: Synthetic oligonucleotide
cgcauacccgucuggagcc

SEQ ID NO: 2558329 - RNA, 19 nt, Artificial Sequence
  Description of Artificial Sequence: Synthetic oligonucleotide
ugcccacaaagugggaauu

SEQ ID NO: 2558330 - RNA, 19 nt, Artificial Sequence
  Description of Artificial Sequence: Synthetic oligonucleotide
cgauuggggauauauuuga

SEQ ID NO: 2558331 - RNA, 19 nt, Artificial Sequence
  Description of Artificial Sequence: Synthetic oligonucleotide
gcggauggacaugaugacc

SEQ ID NO: 2558332 - RNA, 19 nt, Artificial Sequence
  Description of Artificial Sequence: Synthetic oligonucleotide
gccucacucgaauaugaaa

SEQ ID NO: 2558333 - RNA, 19 nt, Artificial Sequence
  Description of Artificial Sequence: Synthetic oligonucleotide
gguacggcuuguucuuaca

SEQ ID NO: 2558334 - RNA, 19 nt, Artificial Sequence
  Description of Artificial Sequence: Synthetic oligonucleotide
cccaugaugacaauaggau

SEQ ID NO: 2558335 - RNA, 19 nt, Artificial Sequence
  Description of Artificial Sequence: Synthetic oligonucleotide
ggaagagagcugcucauau

SEQ ID NO: 2558336 - RNA, 19 nt, Artificial Sequence
  Description of Artificial Sequence: Synthetic oligonucleotide
gaacaugauuugguagggu

SEQ ID NO: 2558337 - RNA, 19 nt, Artificial Sequence
  Description of Artificial Sequence: Synthetic oligonucleotide
caccacgcauacccgucug

SEQ ID NO: 2558338 - RNA, 19 nt, Artificial Sequence
  Description of Artificial Sequence: Synthetic oligonucleotide
ccaugaugacaauaggaua

SEQ ID NO: 2558339 - RNA, 19 nt, Artificial Sequence
  Description of Artificial Sequence: Synthetic oligonucleotide
gggcucgccacuuguccag

SEQ ID NO: 2558340 - RNA, 19 nt, Artificial Sequence
  Description of Artificial Sequence: Synthetic oligonucleotide
cucggcagaagcgagacuu

SEQ ID NO: 2558341 - RNA, 19 nt, Artificial Sequence
  Description of Artificial Sequence: Synthetic oligonucleotide
gcggccagggaacuugaac

SEQ ID NO: 2558342 - RNA, 19 nt, Artificial Sequence
  Description of Artificial Sequence: Synthetic oligonucleotide
uaacaccgggcagggcggc

SEQ ID NO: 2558343 - RNA, 19 nt, Artificial Sequence
  Description of Artificial Sequence: Synthetic oligonucleotide
acccgucuggagccuguca

SEQ ID NO: 2558344 - RNA, 19 nt, Artificial Sequence
  Description of Artificial Sequence: Synthetic oligonucleotide
cauacccgucuggagccug

SEQ ID NO: 2558345 - RNA, 19 nt, Artificial Sequence
  Description of Artificial Sequence: Synthetic oligonucleotide
ggguacggcuuguucuuac

SEQ ID NO: 2558346 - RNA, 19 nt, Artificial Sequence
  Description of Artificial Sequence: Synthetic oligonucleotide
gagcuucggaagagagcug

SEQ ID NO: 2558347 - RNA, 19 nt, Artificial Sequence
  Description of Artificial Sequence: Synthetic oligonucleotide
ggaagcucucaggagugca

SEQ ID NO: 2558348 - RNA, 19 nt, Artificial Sequence
  Description of Artificial Sequence: Synthetic oligonucleotide
aggguacaggagagcacug

SEQ ID NO: 2558349 - RNA, 19 nt, Artificial Sequence
  Description of Artificial Sequence: Synthetic oligonucleotide
ccaugucuucaaauucauc

SEQ ID NO: 2558350 - RNA, 19 nt, Artificial Sequence
  Description of Artificial Sequence: Synthetic oligonucleotide
cagaagcgagacuuugggu

SEQ ID NO: 2558351 - RNA, 19 nt, Artificial Sequence
  Description of Artificial Sequence: Synthetic oligonucleotide
ggugaagccccauuucuuu

SEQ ID NO: 2558352 - RNA, 19 nt, Artificial Sequence
  Description of Artificial Sequence: Synthetic oligonucleotide
uucuggcggccagggaacu

SEQ ID NO: 2558353 - RNA, 19 nt, Artificial Sequence
  Description of Artificial Sequence: Synthetic oligonucleotide
gcagacuggauggagauuu

SEQ ID NO: 2558354 - RNA, 19 nt, Artificial Sequence
  Description of Artificial Sequence: Synthetic oligonucleotide
ccaggggaccacgauuggg

SEQ ID NO: 2558355 - RNA, 19 nt, Artificial Sequence
  Description of Artificial Sequence: Synthetic oligonucleotide
cacuuguccaggggaccac

SEQ ID NO: 2558356 - RNA, 19 nt, Artificial Sequence
  Description of Artificial Sequence: Synthetic oligonucleotide
acaugaugaccuggccaau

SEQ ID NO: 2558357 - RNA, 19 nt, Artificial Sequence
  Description of Artificial Sequence: Synthetic oligonucleotide
guggagccucacucgaaua

SEQ ID NO: 2558358 - RNA, 19 nt, Artificial Sequence
  Description of Artificial Sequence: Synthetic oligonucleotide
augagccguuucucagcaa

SEQ ID NO: 2558359 - RNA, 19 nt, Artificial Sequence
  Description of Artificial Sequence: Synthetic oligonucleotide
ccgucuggagccugucagc

SEQ ID NO: 2558360 - RNA, 19 nt, Artificial Sequence
  Description of Artificial Sequence: Synthetic oligonucleotide
gcuccagcacaggacaaca

SEQ ID NO: 2558361 - RNA, 19 nt, Artificial Sequence
  Description of Artificial Sequence: Synthetic oligonucleotide
ccucuagagcuucggaaga

SEQ ID NO: 2558362 - RNA, 19 nt, Artificial Sequence
  Description of Artificial Sequence: Synthetic oligonucleotide
caccucggcagaagcgaga

SEQ ID NO: 2558363 - RNA, 19 nt, Artificial Sequence
  Description of Artificial Sequence: Synthetic oligonucleotide
uggguacggcuuguucuua

SEQ ID NO: 2558364 - RNA, 19 nt, Artificial Sequence
  Description of Artificial Sequence: Synthetic oligonucleotide
gggaccacgauuggggaua

SEQ ID NO: 2558365 - RNA, 19 nt, Artificial Sequence
  Description of Artificial Sequence: Synthetic oligonucleotide
cggauggacaugaugaccu

SEQ ID NO: 2558366 - RNA, 19 nt, Artificial Sequence
  Description of Artificial Sequence: Synthetic oligonucleotide
agcagacuggauggagauu

SEQ ID NO: 2558367 - RNA, 19 nt, Artificial Sequence
  Description of Artificial Sequence: Synthetic oligonucleotide
auacccgucuggagccugu

SEQ ID NO: 2558368 - RNA, 19 nt, Artificial Sequence
  Description of Artificial Sequence: Synthetic oligonucleotide
gccacuuguccaggggacc

SEQ ID NO: 2558369 - RNA, 19 nt, Artificial Sequence
  Description of Artificial Sequence: Synthetic oligonucleotide
cccaaaggcaccacgcaua

SEQ ID NO: 2558370 - RNA, 19 nt, Artificial Sequence
  Description of Artificial Sequence: Synthetic oligonucleotide
acaccgggcagggcggcga

SEQ ID NO: 2558371 - RNA, 19 nt, Artificial Sequence
  Description of Artificial Sequence: Synthetic oligonucleotide
gguggagccucacucgaau

SEQ ID NO: 2558372 - RNA, 19 nt, Artificial Sequence
  Description of Artificial Sequence: Synthetic oligonucleotide
gccgccucuagagcuucgg

SEQ ID NO: 2558373 - RNA, 19 nt, Artificial Sequence
  Description of Artificial Sequence: Synthetic oligonucleotide
gcggcgacccaugaugaca

SEQ ID NO: 2558374 - RNA, 19 nt, Artificial Sequence
  Description of Artificial Sequence: Synthetic oligonucleotide
cagacuggauggagauuua

SEQ ID NO: 2558375 - RNA, 19 nt, Artificial Sequence
  Description of Artificial Sequence: Synthetic oligonucleotide
cguuucucagcaaccaugu

SEQ ID NO: 2558376 - RNA, 19 nt, Artificial Sequence
  Description of Artificial Sequence: Synthetic oligonucleotide
ggcaccacgcauacccguc

SEQ ID NO: 2558377 - RNA, 19 nt, Artificial Sequence
  Description of Artificial Sequence: Synthetic oligonucleotide
gacuuuggguacggcuugu

SEQ ID NO: 2558378 - RNA, 19 nt, Artificial Sequence
  Description of Artificial Sequence: Synthetic oligonucleotide
uacccgucuggagccuguc

SEQ ID NO: 2558379 - RNA, 19 nt, Artificial Sequence
  Description of Artificial Sequence: Synthetic oligonucleotide
ggaaaggguggagccucac

SEQ ID NO: 2558380 - RNA, 19 nt, Artificial Sequence
  Description of Artificial Sequence: Synthetic oligonucleotide
ggcucgccacuuguccagg

SEQ ID NO: 2558381 - RNA, 19 nt, Artificial Sequence
  Description of Artificial Sequence: Synthetic oligonucleotide
ucuggcggccagggaacuu

SEQ ID NO: 2558382 - RNA, 19 nt, Artificial Sequence
  Description of Artificial Sequence: Synthetic oligonucleotide
ccaaaucaaagaugcgaau

SEQ ID NO: 2558383 - RNA, 19 nt, Artificial Sequence
  Description of Artificial Sequence: Synthetic oligonucleotide
ggcggcgacccaugaugac

SEQ ID NO: 2558384 - RNA, 19 nt, Artificial Sequence
  Description of Artificial Sequence: Synthetic oligonucleotide
caccgggcagggcggcgac

SEQ ID NO: 2558385 - RNA, 19 nt, Artificial Sequence
  Description of Artificial Sequence: Synthetic oligonucleotide
caaauacgggccgccucua

SEQ ID NO: 2558386 - RNA, 19 nt, Artificial Sequence
  Description of Artificial Sequence: Synthetic oligonucleotide
gcgacccaugaugacaaua

SEQ ID NO: 2558387 - RNA, 19 nt, Artificial Sequence
  Description of Artificial Sequence: Synthetic oligonucleotide
cgccucuagagcuucggaa

SEQ ID NO: 2558388 - RNA, 19 nt, Artificial Sequence
  Description of Artificial Sequence: Synthetic oligonucleotide
gggcggcgacccaugauga

SEQ ID NO: 2558389 - RNA, 19 nt, Artificial Sequence
  Description of Artificial Sequence: Synthetic oligonucleotide
cucuacgaagagccucaau

SEQ ID NO: 2558390 - RNA, 19 nt, Artificial Sequence
  Description of Artificial Sequence: Synthetic oligonucleotide
ggcagggcggcgacccaug

SEQ ID NO: 2558391 - RNA, 19 nt, Artificial Sequence
  Description of Artificial Sequence: Synthetic oligonucleotide
ccacgcauacccgucugga

SEQ ID NO: 2558392 - RNA, 19 nt, Artificial Sequence
  Description of Artificial Sequence: Synthetic oligonucleotide
gcgagacuuuggguacggc

SEQ ID NO: 2558393 - RNA, 19 nt, Artificial Sequence
  Description of Artificial Sequence: Synthetic oligonucleotide
ccacaaagugggaauucau

SEQ ID NO: 2558394 - RNA, 19 nt, Artificial Sequence
  Description of Artificial Sequence: Synthetic oligonucleotide
gcaccacgcauacccgucu

SEQ ID NO: 2558395 - RNA, 19 nt, Artificial Sequence
  Description of Artificial Sequence: Synthetic oligonucleotide
cggaugacauggaaagggu

SEQ ID NO: 2558396 - RNA, 19 nt, Artificial Sequence
  Description of Artificial Sequence: Synthetic oligonucleotide
gcagggcggcgacccauga

SEQ ID NO: 2558397 - RNA, 19 nt, Artificial Sequence
  Description of Artificial Sequence: Synthetic oligonucleotide
ggggaccacgauuggggau

SEQ ID NO: 2558398 - RNA, 19 nt, Artificial Sequence
  Description of Artificial Sequence: Synthetic oligonucleotide
cggcgacccaugaugacaa

SEQ ID NO: 2558399 - RNA, 19 nt, Artificial Sequence
  Description of Artificial Sequence: Synthetic oligonucleotide
ggccgccucuagagcuucg

SEQ ID NO: 2558400 - RNA, 19 nt, Artificial Sequence
  Description of Artificial Sequence: Synthetic oligonucleotide
gcacaaauacgggccgccu

SEQ ID NO: 2558401 - RNA, 19 nt, Artificial Sequence
  Description of Artificial Sequence: Synthetic oligonucleotide
ccacgauuggggauauauu

SEQ ID NO: 2558402 - RNA, 19 nt, Artificial Sequence
  Description of Artificial Sequence: Synthetic oligonucleotide
ggguggagccucacucgaa

SEQ ID NO: 2558403 - RNA, 19 nt, Artificial Sequence
  Description of Artificial Sequence: Synthetic oligonucleotide
ccgccucuagagcuucgga

SEQ ID NO: 2558404 - RNA, 19 nt, Artificial Sequence
  Description of Artificial Sequence: Synthetic oligonucleotide
gcuucggaagagagcugcu

SEQ ID NO: 2558405 - RNA, 19 nt, Artificial Sequence
  Description of Artificial Sequence: Synthetic oligonucleotide
gaccacgauuggggauaua

SEQ ID NO: 2558406 - RNA, 19 nt, Artificial Sequence
  Description of Artificial Sequence: Synthetic oligonucleotide
gccagggaacuugaacuuu

SEQ ID NO: 2558407 - RNA, 19 nt, Artificial Sequence
  Description of Artificial Sequence: Synthetic oligonucleotide
gcucuacgaagagccucaa

SEQ ID NO: 2558408 - RNA, 19 nt, Artificial Sequence
  Description of Artificial Sequence: Synthetic oligonucleotide
cagggcggcgacccaugau

SEQ ID NO: 2558409 - RNA, 19 nt, Artificial Sequence
  Description of Artificial Sequence: Synthetic oligonucleotide
ggaccacgauuggggauau

SEQ ID NO: 2558410 - RNA, 19 nt, Artificial Sequence
  Description of Artificial Sequence: Synthetic oligonucleotide
cggaagagagcugcucaua

SEQ ID NO: 2558411 - RNA, 19 nt, Artificial Sequence
  Description of Artificial Sequence: Synthetic oligonucleotide
gcauacccgucuggagccu

SEQ ID NO: 2558412 - RNA, 19 nt, Artificial Sequence
  Description of Artificial Sequence: Synthetic oligonucleotide
ggcgacccaugaugacaau

SEQ ID NO: 2558413 - RNA, 19 nt, Artificial Sequence
  Description of Artificial Sequence: Synthetic oligonucleotide
cgguaacaccgggcagggc

SEQ ID NO: 2558414 - RNA, 19 nt, Artificial Sequence
  Description of Artificial Sequence: Synthetic oligonucleotide
ccuggccaaugugaacccu

SEQ ID NO: 2558415 - RNA, 19 nt, Artificial Sequence
  Description of Artificial Sequence: Synthetic oligonucleotide
ccucggcagaagcgagacu

SEQ ID NO: 2558416 - RNA, 19 nt, Artificial Sequence
  Description of Artificial Sequence: Synthetic oligonucleotide
aauaauuugcuccugugcc

SEQ ID NO: 2558417 - RNA, 19 nt, Artificial Sequence
  Description of Artificial Sequence: Synthetic oligonucleotide
aauaacccuccuuucaggc

SEQ ID NO: 2558418 - RNA, 19 nt, Artificial Sequence
  Description of Artificial Sequence: Synthetic oligonucleotide
uguuugaaagugaauuugg

SEQ ID NO: 2558419 - RNA, 19 nt, Artificial Sequence
  Description of Artificial Sequence: Synthetic oligonucleotide
uucugauucaaucucagga

SEQ ID NO: 2558420 - RNA, 19 nt, Artificial Sequence
  Description of Artificial Sequence: Synthetic oligonucleotide
uaacgugccagaaugaacc

SEQ ID NO: 2558421 - RNA, 19 nt, Artificial Sequence
  Description of Artificial Sequence: Synthetic oligonucleotide
uucagauacaacuacugcc

SEQ ID NO: 2558422 - RNA, 19 nt, Artificial Sequence
  Description of Artificial Sequence: Synthetic oligonucleotide
guagaugucaacuuucucc

SEQ ID NO: 2558423 - RNA, 19 nt, Artificial Sequence
  Description of Artificial Sequence: Synthetic oligonucleotide
aacuacugccuuucuagcc

SEQ ID NO: 2558424 - RNA, 19 nt, Artificial Sequence
  Description of Artificial Sequence: Synthetic oligonucleotide
uuugaaagugaauuuggcc

SEQ ID NO: 2558425 - RNA, 19 nt, Artificial Sequence
  Description of Artificial Sequence: Synthetic oligonucleotide
uuguuagggauuuucaaag

SEQ ID NO: 2558426 - RNA, 19 nt, Artificial Sequence
  Description of Artificial Sequence: Synthetic oligonucleotide
caccaugugaccuuaaggg

SEQ ID NO: 2558427 - RNA, 19 nt, Artificial Sequence
  Description of Artificial Sequence: Synthetic oligonucleotide
acaacuacugccuuucuag

SEQ ID NO: 2558428 - RNA, 19 nt, Artificial Sequence
  Description of Artificial Sequence: Synthetic oligonucleotide
uguguuucccugcagcugg

SEQ ID NO: 2558429 - RNA, 19 nt, Artificial Sequence
  Description of Artificial Sequence: Synthetic oligonucleotide
uaauaauuugcuccugugc

SEQ ID NO: 2558430 - RNA, 19 nt, Artificial Sequence
  Description of Artificial Sequence: Synthetic oligonucleotide
auaauuugcuccugugccc

SEQ ID NO: 2558431 - RNA, 19 nt, Artificial Sequence
  Description of Artificial Sequence: Synthetic oligonucleotide
ucagauacaacuacugccu

SEQ ID NO: 2558432 - RNA, 19 nt, Artificial Sequence
  Description of Artificial Sequence: Synthetic oligonucleotide
cuauuuuaggagaacuggg

SEQ ID NO: 2558433 - RNA, 19 nt, Artificial Sequence
  Description of Artificial Sequence: Synthetic oligonucleotide
gaugagaaugcccagccug

SEQ ID NO: 2558434 - RNA, 19 nt, Artificial Sequence
  Description of Artificial Sequence: Synthetic oligonucleotide
uccaguuucuaauaauuug

SEQ ID NO: 2558435 - RNA, 19 nt, Artificial Sequence
  Description of Artificial Sequence: Synthetic oligonucleotide
ugaaagugaauuuggccag

SEQ ID NO: 2558436 - RNA, 19 nt, Artificial Sequence
  Description of Artificial Sequence: Synthetic oligonucleotide
uugcuaacgugccagaaug

SEQ ID NO: 2558437 - RNA, 19 nt, Artificial Sequence
  Description of Artificial Sequence: Synthetic oligonucleotide
uucaaagccacauuuuccu

SEQ ID NO: 2558438 - RNA, 19 nt, Artificial Sequence
  Description of Artificial Sequence: Synthetic oligonucleotide
aaagcgaaggagaagguug

SEQ ID NO: 2558439 - RNA, 19 nt, Artificial Sequence
  Description of Artificial Sequence: Synthetic oligonucleotide
uuauuguuagggauuuuca

SEQ ID NO: 2558440 - RNA, 19 nt, Artificial Sequence
  Description of Artificial Sequence: Synthetic oligonucleotide
uuugcccugagguuuauug

SEQ ID NO: 2558441 - RNA, 19 nt, Artificial Sequence
  Description of Artificial Sequence: Synthetic oligonucleotide
aguuucuaauaauuugcuc

SEQ ID NO: 2558442 - RNA, 19 nt, Artificial Sequence
  Description of Artificial Sequence: Synthetic oligonucleotide
cucacugcuauuuuaggag

SEQ ID NO: 2558443 - RNA, 19 nt, Artificial Sequence
  Description of Artificial Sequence: Synthetic oligonucleotide
aauuuuagaacugcucacu

SEQ ID NO: 2558444 - RNA, 19 nt, Artificial Sequence
  Description of Artificial Sequence: Synthetic oligonucleotide
cuuucuagccuuuguaccc

SEQ ID NO: 2558445 - RNA, 19 nt, Artificial Sequence
  Description of Artificial Sequence: Synthetic oligonucleotide
agaaugcccagccugguuc

SEQ ID NO: 2558446 - RNA, 19 nt, Artificial Sequence
  Description of Artificial Sequence: Synthetic oligonucleotide
guuagggauuuucaaagcc

SEQ ID NO: 2558447 - RNA, 19 nt, Artificial Sequence
  Description of Artificial Sequence: Synthetic oligonucleotide
cugagguuuauuguuaggg

SEQ ID NO: 2558448 - RNA, 19 nt, Artificial Sequence
  Description of Artificial Sequence: Synthetic oligonucleotide
gaauuuuagaacugcucac

SEQ ID NO: 2558449 - RNA, 19 nt, Artificial Sequence
  Description of Artificial Sequence: Synthetic oligonucleotide
ugcuauuuuaggagaacug

SEQ ID NO: 2558450 - RNA, 19 nt, Artificial Sequence
  Description of Artificial Sequence: Synthetic oligonucleotide
aguucgagcugaauaaccc

SEQ ID NO: 2558451 - RNA, 19 nt, Artificial Sequence
  Description of Artificial Sequence: Synthetic oligonucleotide
uuuauuguuagggauuuuc

SEQ ID NO: 2558452 - RNA, 19 nt, Artificial Sequence
  Description of Artificial Sequence: Synthetic oligonucleotide
gaugucaacuuucuccggc

SEQ ID NO: 2558453 - RNA, 19 nt, Artificial Sequence
  Description of Artificial Sequence: Synthetic oligonucleotide
gaauaacccuccuuucagg

SEQ ID NO: 2558454 - RNA, 19 nt, Artificial Sequence
  Description of Artificial Sequence: Synthetic oligonucleotide
ugcuccugugcccugaucc

SEQ ID NO: 2558455 - RNA, 19 nt, Artificial Sequence
  Description of Artificial Sequence: Synthetic oligonucleotide
agaggagugacucaguuuu

SEQ ID NO: 2558456 - RNA, 19 nt, Artificial Sequence
  Description of Artificial Sequence: Synthetic oligonucleotide
uaacccuccuuucaggccc

SEQ ID NO: 2558457 - RNA, 19 nt, Artificial Sequence
  Description of Artificial Sequence: Synthetic oligonucleotide
uuuggccagcuucagauac

SEQ ID NO: 2558458 - RNA, 19 nt, Artificial Sequence
  Description of Artificial Sequence: Synthetic oligonucleotide
caggaguuggccaggaugg

SEQ ID NO: 2558459 - RNA, 19 nt, Artificial Sequence
  Description of Artificial Sequence: Synthetic oligonucleotide
uuuguuggggaauuuuaga

SEQ ID NO: 2558460 - RNA, 19 nt, Artificial Sequence
  Description of Artificial Sequence: Synthetic oligonucleotide
acaccaugugaccuuaagg

SEQ ID NO: 2558461 - RNA, 19 nt, Artificial Sequence
  Description of Artificial Sequence: Synthetic oligonucleotide
auuguuagggauuuucaaa

SEQ ID NO: 2558462 - RNA, 19 nt, Artificial Sequence
  Description of Artificial Sequence: Synthetic oligonucleotide
auaacccuccuuucaggcc

SEQ ID NO: 2558463 - RNA, 19 nt, Artificial Sequence
  Description of Artificial Sequence: Synthetic oligonucleotide
accaugugaccuuaagggg

SEQ ID NO: 2558464 - RNA, 19 nt, Artificial Sequence
  Description of Artificial Sequence: Synthetic oligonucleotide
auuuuagaacugcucacug

SEQ ID NO: 2558465 - RNA, 19 nt, Artificial Sequence
  Description of Artificial Sequence: Synthetic oligonucleotide
augucaacuuucuccggcc

SEQ ID NO: 2558466 - RNA, 19 nt, Artificial Sequence
  Description of Artificial Sequence: Synthetic oligonucleotide
uucuguuugaaagugaauu

SEQ ID NO: 2558467 - RNA, 19 nt, Artificial Sequence
  Description of Artificial Sequence: Synthetic oligonucleotide
uggaugagaaugcccagcc

SEQ ID NO: 2558468 - RNA, 19 nt, Artificial Sequence
  Description of Artificial Sequence: Synthetic oligonucleotide
gauucugguggggaaagcg

SEQ ID NO: 2558469 - RNA, 19 nt, Artificial Sequence
  Description of Artificial Sequence: Synthetic oligonucleotide
uuguuggggaauuuuagaa

SEQ ID NO: 2558470 - RNA, 19 nt, Artificial Sequence
  Description of Artificial Sequence: Synthetic oligonucleotide
ugauuuggauucugguggg

SEQ ID NO: 2558471 - RNA, 19 nt, Artificial Sequence
  Description of Artificial Sequence: Synthetic oligonucleotide
uuucugauucaaucucagg

SEQ ID NO: 2558472 - RNA, 19 nt, Artificial Sequence
  Description of Artificial Sequence: Synthetic oligonucleotide
ugagguuuauuguuaggga

SEQ ID NO: 2558473 - RNA, 19 nt, Artificial Sequence
  Description of Artificial Sequence: Synthetic oligonucleotide
cuuucacaggcacaguugc

SEQ ID NO: 2558474 - RNA, 19 nt, Artificial Sequence
  Description of Artificial Sequence: Synthetic oligonucleotide
agagcauccaucuccugag

SEQ ID NO: 2558475 - RNA, 19 nt, Artificial Sequence
  Description of Artificial Sequence: Synthetic oligonucleotide
uauuguuagggauuuucaa

SEQ ID NO: 2558476 - RNA, 19 nt, Artificial Sequence
  Description of Artificial Sequence: Synthetic oligonucleotide
uguuggggaauuuuagaac

SEQ ID NO: 2558477 - RNA, 19 nt, Artificial Sequence
  Description of Artificial Sequence: Synthetic oligonucleotide
acuuucuccggccuuucac

SEQ ID NO: 2558478 - RNA, 19 nt, Artificial Sequence
  Description of Artificial Sequence: Synthetic oligonucleotide
ggaauuuuagaacugcuca

SEQ ID NO: 2558479 - RNA, 19 nt, Artificial Sequence
  Description of Artificial Sequence: Synthetic oligonucleotide
cuuuguguuucccugcagc

SEQ ID NO: 2558480 - RNA, 19 nt, Artificial Sequence
  Description of Artificial Sequence: Synthetic oligonucleotide
uuuugucugucucgcaagc

SEQ ID NO: 2558481 - RNA, 19 nt, Artificial Sequence
  Description of Artificial Sequence: Synthetic oligonucleotide
ugucucgcaagcuggauga

SEQ ID NO: 2558482 - RNA, 19 nt, Artificial Sequence
  Description of Artificial Sequence: Synthetic oligonucleotide
aagcgaaggagaagguugc

SEQ ID NO: 2558483 - RNA, 19 nt, Artificial Sequence
  Description of Artificial Sequence: Synthetic oligonucleotide
cuaauaauuugcuccugug

SEQ ID NO: 2558484 - RNA, 19 nt, Artificial Sequence
  Description of Artificial Sequence: Synthetic oligonucleotide
uagggauuuucaaagccac

SEQ ID NO: 2558485 - RNA, 19 nt, Artificial Sequence
  Description of Artificial Sequence: Synthetic oligonucleotide
uucuuguucuuuguugggg

SEQ ID NO: 2558486 - RNA, 19 nt, Artificial Sequence
  Description of Artificial Sequence: Synthetic oligonucleotide
uccaguucgagcugaauaa

SEQ ID NO: 2558487 - RNA, 19 nt, Artificial Sequence
  Description of Artificial Sequence: Synthetic oligonucleotide
ucuccggccuuucacaggc

SEQ ID NO: 2558488 - RNA, 19 nt, Artificial Sequence
  Description of Artificial Sequence: Synthetic oligonucleotide
ccaguuucuaauaauuugc

SEQ ID NO: 2558489 - RNA, 19 nt, Artificial Sequence
  Description of Artificial Sequence: Synthetic oligonucleotide
agugacucaguuuuguuuu

SEQ ID NO: 2558490 - RNA, 19 nt, Artificial Sequence
  Description of Artificial Sequence: Synthetic oligonucleotide
uuucucuuuugcccugagg

SEQ ID NO: 2558491 - RNA, 19 nt, Artificial Sequence
  Description of Artificial Sequence: Synthetic oligonucleotide
gcuauuuuaggagaacugg

SEQ ID NO: 2558492 - RNA, 19 nt, Artificial Sequence
  Description of Artificial Sequence: Synthetic oligonucleotide
aagguugccagucuugcua

SEQ ID NO: 2558493 - RNA, 19 nt, Artificial Sequence
  Description of Artificial Sequence: Synthetic oligonucleotide
acuacugccuuucuagccu

SEQ ID NO: 2558494 - RNA, 19 nt, Artificial Sequence
  Description of Artificial Sequence: Synthetic oligonucleotide
agugauggaagauguccag

SEQ ID NO: 2558495 - RNA, 19 nt, Artificial Sequence
  Description of Artificial Sequence: Synthetic oligonucleotide
ccagaaugaaccuugcugc

SEQ ID NO: 2558496 - RNA, 19 nt, Artificial Sequence
  Description of Artificial Sequence: Synthetic oligonucleotide
ucuuuguuggggaauuuua

SEQ ID NO: 2558497 - RNA, 19 nt, Artificial Sequence
  Description of Artificial Sequence: Synthetic oligonucleotide
gaguuggccaggauggugg

SEQ ID NO: 2558498 - RNA, 19 nt, Artificial Sequence
  Description of Artificial Sequence: Synthetic oligonucleotide
gggaaagcgaaggagaagg

SEQ ID NO: 2558499 - RNA, 19 nt, Artificial Sequence
  Description of Artificial Sequence: Synthetic oligonucleotide
gauacaacuacugccuuuc

SEQ ID NO: 2558500 - RNA, 19 nt, Artificial Sequence
  Description of Artificial Sequence: Synthetic oligonucleotide
ucaaucucaggaguuggcc

SEQ ID NO: 2558501 - RNA, 19 nt, Artificial Sequence
  Description of Artificial Sequence: Synthetic oligonucleotide
agcugaauaacccuccuuu

SEQ ID NO: 2558502 - RNA, 19 nt, Artificial Sequence
  Description of Artificial Sequence: Synthetic oligonucleotide
ucaguuguuuucaguucag

SEQ ID NO: 2558503 - RNA, 19 nt, Artificial Sequence
  Description of Artificial Sequence: Synthetic oligonucleotide
uucaaucucaggaguuggc

SEQ ID NO: 2558504 - RNA, 19 nt, Artificial Sequence
  Description of Artificial Sequence: Synthetic oligonucleotide
ugauccauguuucucuuuu

SEQ ID NO: 2558505 - RNA, 19 nt, Artificial Sequence
  Description of Artificial Sequence: Synthetic oligonucleotide
gauucaaucucaggaguug

SEQ ID NO: 2558506 - RNA, 19 nt, Artificial Sequence
  Description of Artificial Sequence: Synthetic oligonucleotide
uucugauuuggauucuggu

SEQ ID NO: 2558507 - RNA, 19 nt, Artificial Sequence
  Description of Artificial Sequence: Synthetic oligonucleotide
ucacugcuauuuuaggaga

SEQ ID NO: 2558508 - RNA, 19 nt, Artificial Sequence
  Description of Artificial Sequence: Synthetic oligonucleotide
uggaagauguccaguuucu

SEQ ID NO: 2558509 - RNA, 19 nt, Artificial Sequence
  Description of Artificial Sequence: Synthetic oligonucleotide
uuucccugcagcuggucag

SEQ ID NO: 2558510 - RNA, 19 nt, Artificial Sequence
  Description of Artificial Sequence: Synthetic oligonucleotide
uucgagcugaauaacccuc

SEQ ID NO: 2558511 - RNA, 19 nt, Artificial Sequence
  Description of Artificial Sequence: Synthetic oligonucleotide
uccucaguuguuuucaguu

SEQ ID NO: 2558512 - RNA, 19 nt, Artificial Sequence
  Description of Artificial Sequence: Synthetic oligonucleotide
aagcuggaugagaaugccc

SEQ ID NO: 2558513 - RNA, 19 nt, Artificial Sequence
  Description of Artificial Sequence: Synthetic oligonucleotide
ucgagcugaauaacccucc

SEQ ID NO: 2558514 - RNA, 19 nt, Artificial Sequence
  Description of Artificial Sequence: Synthetic oligonucleotide
uucaggagacacagcacug

SEQ ID NO: 2558515 - RNA, 19 nt, Artificial Sequence
  Description of Artificial Sequence: Synthetic oligonucleotide
ugugcccugauccauguuu

SEQ ID NO: 2558516 - RNA, 19 nt, Artificial Sequence
  Description of Artificial Sequence: Synthetic oligonucleotide
ugcucacugcuauuuuagg

SEQ ID NO: 2558517 - RNA, 19 nt, Artificial Sequence
  Description of Artificial Sequence: Synthetic oligonucleotide
ggucagagcauccaucucc

SEQ ID NO: 2558518 - RNA, 19 nt, Artificial Sequence
  Description of Artificial Sequence: Synthetic oligonucleotide
uagaacugcucacugcuau

SEQ ID NO: 2558519 - RNA, 19 nt, Artificial Sequence
  Description of Artificial Sequence: Synthetic oligonucleotide
guuugaaagugaauuuggc

SEQ ID NO: 2558520 - RNA, 19 nt, Artificial Sequence
  Description of Artificial Sequence: Synthetic oligonucleotide
gacaccaugugaccuuaag

SEQ ID NO: 2558521 - RNA, 19 nt, Artificial Sequence
  Description of Artificial Sequence: Synthetic oligonucleotide
uuggggaauuuuagaacug

SEQ ID NO: 2558522 - RNA, 19 nt, Artificial Sequence
  Description of Artificial Sequence: Synthetic oligonucleotide
uuucuccggccuuucacag

SEQ ID NO: 2558523 - RNA, 19 nt, Artificial Sequence
  Description of Artificial Sequence: Synthetic oligonucleotide
ugauucaaucucaggaguu

SEQ ID NO: 2558524 - RNA, 19 nt, Artificial Sequence
  Description of Artificial Sequence: Synthetic oligonucleotide
caguucgagcugaauaacc

SEQ ID NO: 2558525 - RNA, 19 nt, Artificial Sequence
  Description of Artificial Sequence: Synthetic oligonucleotide
accccugacaccaugugac

SEQ ID NO: 2558526 - RNA, 19 nt, Artificial Sequence
  Description of Artificial Sequence: Synthetic oligonucleotide
cuuuguaccccugacacca

SEQ ID NO: 2558527 - RNA, 19 nt, Artificial Sequence
  Description of Artificial Sequence: Synthetic oligonucleotide
ugaaccuugcugcuuuuau

SEQ ID NO: 2558528 - RNA, 19 nt, Artificial Sequence
  Description of Artificial Sequence: Synthetic oligonucleotide
agggauucugauuuggauu

SEQ ID NO: 2558529 - RNA, 19 nt, Artificial Sequence
  Description of Artificial Sequence: Synthetic oligonucleotide
guuggggaauuuuagaacu

SEQ ID NO: 2558530 - RNA, 19 nt, Artificial Sequence
  Description of Artificial Sequence: Synthetic oligonucleotide
acugcuauuuuaggagaac

SEQ ID NO: 2558531 - RNA, 19 nt, Artificial Sequence
  Description of Artificial Sequence: Synthetic oligonucleotide
agucuugcuaacgugccag

SEQ ID NO: 2558532 - RNA, 19 nt, Artificial Sequence
  Description of Artificial Sequence: Synthetic oligonucleotide
cugcucacugcuauuuuag

SEQ ID NO: 2558533 - RNA, 19 nt, Artificial Sequence
  Description of Artificial Sequence: Synthetic oligonucleotide
uggggaauuuuagaacugc

SEQ ID NO: 2558534 - RNA, 19 nt, Artificial Sequence
  Description of Artificial Sequence: Synthetic oligonucleotide
ccauguuucucuuuugccc

SEQ ID NO: 2558535 - RNA, 19 nt, Artificial Sequence
  Description of Artificial Sequence: Synthetic oligonucleotide
uguaccccugacaccaugu

SEQ ID NO: 2558536 - RNA, 19 nt, Artificial Sequence
  Description of Artificial Sequence: Synthetic oligonucleotide
uuuggauucugguggggaa

SEQ ID NO: 2558537 - RNA, 19 nt, Artificial Sequence
  Description of Artificial Sequence: Synthetic oligonucleotide
uugccagucuugcuaacgu

SEQ ID NO: 2558538 - RNA, 19 nt, Artificial Sequence
  Description of Artificial Sequence: Synthetic oligonucleotide
aaagugaauuuggccagcu

SEQ ID NO: 2558539 - RNA, 19 nt, Artificial Sequence
  Description of Artificial Sequence: Synthetic oligonucleotide
uucugguggggaaagcgaa

SEQ ID NO: 2558540 - RNA, 19 nt, Artificial Sequence
  Description of Artificial Sequence: Synthetic oligonucleotide
uccuuuguguuucccugca

SEQ ID NO: 2558541 - RNA, 19 nt, Artificial Sequence
  Description of Artificial Sequence: Synthetic oligonucleotide
ugccuugagagcuccuuug

SEQ ID NO: 2558542 - RNA, 19 nt, Artificial Sequence
  Description of Artificial Sequence: Synthetic oligonucleotide
agaugucaacuuucuccgg

SEQ ID NO: 2558543 - RNA, 19 nt, Artificial Sequence
  Description of Artificial Sequence: Synthetic oligonucleotide
aacgugccagaaugaaccu

SEQ ID NO: 2558544 - RNA, 19 nt, Artificial Sequence
  Description of Artificial Sequence: Synthetic oligonucleotide
uuucuagccuuuguacccc

SEQ ID NO: 2558545 - RNA, 19 nt, Artificial Sequence
  Description of Artificial Sequence: Synthetic oligonucleotide
uggggaaagcgaaggagaa

SEQ ID NO: 2558546 - RNA, 19 nt, Artificial Sequence
  Description of Artificial Sequence: Synthetic oligonucleotide
cucaguuguuuucaguuca

SEQ ID NO: 2558547 - RNA, 19 nt, Artificial Sequence
  Description of Artificial Sequence: Synthetic oligonucleotide
uacaacuacugccuuucua

SEQ ID NO: 2558548 - RNA, 19 nt, Artificial Sequence
  Description of Artificial Sequence: Synthetic oligonucleotide
augagaaugcccagccugg

SEQ ID NO: 2558549 - RNA, 19 nt, Artificial Sequence
  Description of Artificial Sequence: Synthetic oligonucleotide
cuuucaggccccugguccc

SEQ ID NO: 2558550 - RNA, 19 nt, Artificial Sequence
  Description of Artificial Sequence: Synthetic oligonucleotide
ugguugacuucucucuggu

SEQ ID NO: 2558551 - RNA, 19 nt, Artificial Sequence
  Description of Artificial Sequence: Synthetic oligonucleotide
ugaauuuggccagcuucag

SEQ ID NO: 2558552 - RNA, 19 nt, Artificial Sequence
  Description of Artificial Sequence: Synthetic oligonucleotide
aguucaggagacacagcac

SEQ ID NO: 2558553 - RNA, 19 nt, Artificial Sequence
  Description of Artificial Sequence: Synthetic oligonucleotide
cugaauaacccuccuuuca

SEQ ID NO: 2558554 - RNA, 19 nt, Artificial Sequence
  Description of Artificial Sequence: Synthetic oligonucleotide
uaccccugacaccauguga

SEQ ID NO: 2558555 - RNA, 19 nt, Artificial Sequence
  Description of Artificial Sequence: Synthetic oligonucleotide
uuauuacugcaggaacccc

SEQ ID NO: 2558556 - RNA, 19 nt, Artificial Sequence
  Description of Artificial Sequence: Synthetic oligonucleotide
ccuuucuagccuuuguacc

SEQ ID NO: 2558557 - RNA, 19 nt, Artificial Sequence
  Description of Artificial Sequence: Synthetic oligonucleotide
uggauucugguggggaaag

SEQ ID NO: 2558558 - RNA, 19 nt, Artificial Sequence
  Description of Artificial Sequence: Synthetic oligonucleotide
ugucaacuuucuccggccu

SEQ ID NO: 2558559 - RNA, 19 nt, Artificial Sequence
  Description of Artificial Sequence: Synthetic oligonucleotide
uugagagcuccuuuguguu

SEQ ID NO: 2558560 - RNA, 19 nt, Artificial Sequence
  Description of Artificial Sequence: Synthetic oligonucleotide
ucaaagccacauuuuccuc

SEQ ID NO: 2558561 - RNA, 19 nt, Artificial Sequence
  Description of Artificial Sequence: Synthetic oligonucleotide
gauuuggauucuggugggg

SEQ ID NO: 2558562 - RNA, 19 nt, Artificial Sequence
  Description of Artificial Sequence: Synthetic oligonucleotide
gagguuuauuguuagggau

SEQ ID NO: 2558563 - RNA, 19 nt, Artificial Sequence
  Description of Artificial Sequence: Synthetic oligonucleotide
uuucacaggcacaguugcu

SEQ ID NO: 2558564 - RNA, 19 nt, Artificial Sequence
  Description of Artificial Sequence: Synthetic oligonucleotide
ugccuuucuagccuuugua

SEQ ID NO: 2558565 - RNA, 19 nt, Artificial Sequence
  Description of Artificial Sequence: Synthetic oligonucleotide
cagcacugcuuucugauuc

SEQ ID NO: 2558566 - RNA, 19 nt, Artificial Sequence
  Description of Artificial Sequence: Synthetic oligonucleotide
ugcuaacgugccagaauga

SEQ ID NO: 2558567 - RNA, 19 nt, Artificial Sequence
  Description of Artificial Sequence: Synthetic oligonucleotide
gcugcuuuuauuacugcag

SEQ ID NO: 2558568 - RNA, 19 nt, Artificial Sequence
  Description of Artificial Sequence: Synthetic oligonucleotide
gcauccauggcucccagug

SEQ ID NO: 2558569 - RNA, 19 nt, Artificial Sequence
  Description of Artificial Sequence: Synthetic oligonucleotide
auuuggauucuggugggga

SEQ ID NO: 2558570 - RNA, 19 nt, Artificial Sequence
  Description of Artificial Sequence: Synthetic oligonucleotide
uugcccugagguuuauugu

SEQ ID NO: 2558571 - RNA, 19 nt, Artificial Sequence
  Description of Artificial Sequence: Synthetic oligonucleotide
uucuccggccuuucacagg

SEQ ID NO: 2558572 - RNA, 19 nt, Artificial Sequence
  Description of Artificial Sequence: Synthetic oligonucleotide
guucaggagacacagcacu

SEQ ID NO: 2558573 - RNA, 19 nt, Artificial Sequence
  Description of Artificial Sequence: Synthetic oligonucleotide
gccuuuguaccccugacac

SEQ ID NO: 2558574 - RNA, 19 nt, Artificial Sequence
  Description of Artificial Sequence: Synthetic oligonucleotide
cagcuucagauacaacuac

SEQ ID NO: 2558575 - RNA, 19 nt, Artificial Sequence
  Description of Artificial Sequence: Synthetic oligonucleotide
uaggagaacugggaggcac

SEQ ID NO: 2558576 - RNA, 19 nt, Artificial Sequence
  Description of Artificial Sequence: Synthetic oligonucleotide
caagcuggaugagaaugcc

SEQ ID NO: 2558577 - RNA, 19 nt, Artificial Sequence
  Description of Artificial Sequence: Synthetic oligonucleotide
gagggagggauucugauuu

SEQ ID NO: 2558578 - RNA, 19 nt, Artificial Sequence
  Description of Artificial Sequence: Synthetic oligonucleotide
agauguccaguuucuaaua

SEQ ID NO: 2558579 - RNA, 19 nt, Artificial Sequence
  Description of Artificial Sequence: Synthetic oligonucleotide
ccagugauggaagaugucc

SEQ ID NO: 2558580 - RNA, 19 nt, Artificial Sequence
  Description of Artificial Sequence: Synthetic oligonucleotide
uuagaacugcucacugcua

SEQ ID NO: 2558581 - RNA, 19 nt, Artificial Sequence
  Description of Artificial Sequence: Synthetic oligonucleotide
uguucuuuguuggggaauu

SEQ ID NO: 2558582 - RNA, 19 nt, Artificial Sequence
  Description of Artificial Sequence: Synthetic oligonucleotide
agauacaacuacugccuuu

SEQ ID NO: 2558583 - RNA, 19 nt, Artificial Sequence
  Description of Artificial Sequence: Synthetic oligonucleotide
uuguguuucccugcagcug

SEQ ID NO: 2558584 - RNA, 19 nt, Artificial Sequence
  Description of Artificial Sequence: Synthetic oligonucleotide
agcuccuuuguguuucccu

SEQ ID NO: 2558585 - RNA, 19 nt, Artificial Sequence
  Description of Artificial Sequence: Synthetic oligonucleotide
uuucaggagggagggauuc

SEQ ID NO: 2558586 - RNA, 19 nt, Artificial Sequence
  Description of Artificial Sequence: Synthetic oligonucleotide
gugaauuuggccagcuuca

SEQ ID NO: 2558587 - RNA, 19 nt, Artificial Sequence
  Description of Artificial Sequence: Synthetic oligonucleotide
cuuucuccggccuuucaca

SEQ ID NO: 2558588 - RNA, 19 nt, Artificial Sequence
  Description of Artificial Sequence: Synthetic oligonucleotide
uucacaggcacaguugcuu

SEQ ID NO: 2558589 - RNA, 19 nt, Artificial Sequence
  Description of Artificial Sequence: Synthetic oligonucleotide
ugcccugagguuuauuguu

SEQ ID NO: 2558590 - RNA, 19 nt, Artificial Sequence
  Description of Artificial Sequence: Synthetic oligonucleotide
aacuuucuccggccuuuca

SEQ ID NO: 2558591 - RNA, 19 nt, Artificial Sequence
  Description of Artificial Sequence: Synthetic oligonucleotide
gagaagguugccagucuug

SEQ ID NO: 2558592 - RNA, 19 nt, Artificial Sequence
  Description of Artificial Sequence: Synthetic oligonucleotide
uagccuuuguaccccugac

SEQ ID NO: 2558593 - RNA, 19 nt, Artificial Sequence
  Description of Artificial Sequence: Synthetic oligonucleotide
uuguaccccugacaccaug

SEQ ID NO: 2558594 - RNA, 19 nt, Artificial Sequence
  Description of Artificial Sequence: Synthetic oligonucleotide
acugcucacugcuauuuua

SEQ ID NO: 2558595 - RNA, 19 nt, Artificial Sequence
  Description of Artificial Sequence: Synthetic oligonucleotide
cuugagagcuccuuugugu

SEQ ID NO: 2558596 - RNA, 19 nt, Artificial Sequence
  Description of Artificial Sequence: Synthetic oligonucleotide
caucuccugagguagaugu

SEQ ID NO: 2558597 - RNA, 19 nt, Artificial Sequence
  Description of Artificial Sequence: Synthetic oligonucleotide
ucucuuuugcccugagguu

SEQ ID NO: 2558598 - RNA, 19 nt, Artificial Sequence
  Description of Artificial Sequence: Synthetic oligonucleotide
cagugauggaagaugucca

SEQ ID NO: 2558599 - RNA, 19 nt, Artificial Sequence
  Description of Artificial Sequence: Synthetic oligonucleotide
cugucucgcaagcuggaug

SEQ ID NO: 2558600 - RNA, 19 nt, Artificial Sequence
  Description of Artificial Sequence: Synthetic oligonucleotide
cucgcaagcuggaugagaa

SEQ ID NO: 2558601 - RNA, 19 nt, Artificial Sequence
  Description of Artificial Sequence: Synthetic oligonucleotide
aguugcuucucuucuuguu

SEQ ID NO: 2558602 - RNA, 19 nt, Artificial Sequence
  Description of Artificial Sequence: Synthetic oligonucleotide
agccuuuguaccccugaca

SEQ ID NO: 2558603 - RNA, 19 nt, Artificial Sequence
  Description of Artificial Sequence: Synthetic oligonucleotide
agcacugcuuucugauuca

SEQ ID NO: 2558604 - RNA, 19 nt, Artificial Sequence
  Description of Artificial Sequence: Synthetic oligonucleotide
ccuuucaggccccuggucc

SEQ ID NO: 2558605 - RNA, 19 nt, Artificial Sequence
  Description of Artificial Sequence: Synthetic oligonucleotide
uuggccagcuucagauaca

SEQ ID NO: 2558606 - RNA, 19 nt, Artificial Sequence
  Description of Artificial Sequence: Synthetic oligonucleotide
aacugcucacugcuauuuu

SEQ ID NO: 2558607 - RNA, 19 nt, Artificial Sequence
  Description of Artificial Sequence: Synthetic oligonucleotide
ucuagccuuuguaccccug

SEQ ID NO: 2558608 - RNA, 19 nt, Artificial Sequence
  Description of Artificial Sequence: Synthetic oligonucleotide
ugacucaguuuuguuuucu

SEQ ID NO: 2558609 - RNA, 19 nt, Artificial Sequence
  Description of Artificial Sequence: Synthetic oligonucleotide
uggcucccagugauggaag

SEQ ID NO: 2558610 - RNA, 19 nt, Artificial Sequence
  Description of Artificial Sequence: Synthetic oligonucleotide
agcgaaggagaagguugcc

SEQ ID NO: 2558611 - RNA, 19 nt, Artificial Sequence
  Description of Artificial Sequence: Synthetic oligonucleotide
aaugaaccuugcugcuuuu

SEQ ID NO: 2558612 - RNA, 19 nt, Artificial Sequence
  Description of Artificial Sequence: Synthetic oligonucleotide
cucucugguagcugccuug

SEQ ID NO: 2558613 - RNA, 19 nt, Artificial Sequence
  Description of Artificial Sequence: Synthetic oligonucleotide
acaggcacaguugcuucuc

SEQ ID NO: 2558614 - RNA, 19 nt, Artificial Sequence
  Description of Artificial Sequence: Synthetic oligonucleotide
cucccagugauggaagaug

SEQ ID NO: 2558615 - RNA, 19 nt, Artificial Sequence
  Description of Artificial Sequence: Synthetic oligonucleotide
uguggccaucagaggagug

SEQ ID NO: 2558616 - RNA, 19 nt, Artificial Sequence
  Description of Artificial Sequence: Synthetic oligonucleotide
ucaacuuucuccggccuuu

SEQ ID NO: 2558617 - RNA, 19 nt, Artificial Sequence
  Description of Artificial Sequence: Synthetic oligonucleotide
uucuuuguuggggaauuuu

SEQ ID NO: 2558618 - RNA, 19 nt, Artificial Sequence
  Description of Artificial Sequence: Synthetic oligonucleotide
aggagaagguugccagucu

SEQ ID NO: 2558619 - RNA, 19 nt, Artificial Sequence
  Description of Artificial Sequence: Synthetic oligonucleotide
ucucugguagcugccuuga

SEQ ID NO: 2558620 - RNA, 19 nt, Artificial Sequence
  Description of Artificial Sequence: Synthetic oligonucleotide
ugacuucucucugguagcu

SEQ ID NO: 2558621 - RNA, 19 nt, Artificial Sequence
  Description of Artificial Sequence: Synthetic oligonucleotide
aacccuccuuucaggcccc

SEQ ID NO: 2558622 - RNA, 19 nt, Artificial Sequence
  Description of Artificial Sequence: Synthetic oligonucleotide
guggggaaagcgaaggaga

SEQ ID NO: 2558623 - RNA, 19 nt, Artificial Sequence
  Description of Artificial Sequence: Synthetic oligonucleotide
uuggauucugguggggaaa

SEQ ID NO: 2558624 - RNA, 19 nt, Artificial Sequence
  Description of Artificial Sequence: Synthetic oligonucleotide
gccuuucuagccuuuguac

SEQ ID NO: 2558625 - RNA, 19 nt, Artificial Sequence
  Description of Artificial Sequence: Synthetic oligonucleotide
aggagugacucaguuuugu

SEQ ID NO: 2558626 - RNA, 19 nt, Artificial Sequence
  Description of Artificial Sequence: Synthetic oligonucleotide
ucuugcuaacgugccagaa

SEQ ID NO: 2558627 - RNA, 19 nt, Artificial Sequence
  Description of Artificial Sequence: Synthetic oligonucleotide
ucucgcaagcuggaugaga

SEQ ID NO: 2558628 - RNA, 19 nt, Artificial Sequence
  Description of Artificial Sequence: Synthetic oligonucleotide
auucugguggggaaagcga

SEQ ID NO: 2558629 - RNA, 19 nt, Artificial Sequence
  Description of Artificial Sequence: Synthetic oligonucleotide
gagaacugggaggcacagg

SEQ ID NO: 2558630 - RNA, 19 nt, Artificial Sequence
  Description of Artificial Sequence: Synthetic oligonucleotide
uggccaucagaggagugac

SEQ ID NO: 2558631 - RNA, 19 nt, Artificial Sequence
  Description of Artificial Sequence: Synthetic oligonucleotide
agguagaugucaacuuucu

SEQ ID NO: 2558632 - RNA, 19 nt, Artificial Sequence
  Description of Artificial Sequence: Synthetic oligonucleotide
uuguucuuuguuggggaau

SEQ ID NO: 2558633 - RNA, 19 nt, Artificial Sequence
  Description of Artificial Sequence: Synthetic oligonucleotide
gagugacucaguuuuguuu

SEQ ID NO: 2558634 - RNA, 19 nt, Artificial Sequence
  Description of Artificial Sequence: Synthetic oligonucleotide
ugguagcugccuugagagc

SEQ ID NO: 2558635 - RNA, 19 nt, Artificial Sequence
  Description of Artificial Sequence: Synthetic oligonucleotide
aggagggagggauucugau

SEQ ID NO: 2558636 - RNA, 19 nt, Artificial Sequence
  Description of Artificial Sequence: Synthetic oligonucleotide
gcucacugcuauuuuagga

SEQ ID NO: 2558637 - RNA, 19 nt, Artificial Sequence
  Description of Artificial Sequence: Synthetic oligonucleotide
gagggauucugauuuggau

SEQ ID NO: 2558638 - RNA, 19 nt, Artificial Sequence
  Description of Artificial Sequence: Synthetic oligonucleotide
cuccaguucgagcugaaua

SEQ ID NO: 2558639 - RNA, 19 nt, Artificial Sequence
  Description of Artificial Sequence: Synthetic oligonucleotide
gggaauuuuagaacugcuc

SEQ ID NO: 2558640 - RNA, 19 nt, Artificial Sequence
  Description of Artificial Sequence: Synthetic oligonucleotide
ccuuucacaggcacaguug

SEQ ID NO: 2558641 - RNA, 19 nt, Artificial Sequence
  Description of Artificial Sequence: Synthetic oligonucleotide
ugcagcuggucagagcauc

SEQ ID NO: 2558642 - RNA, 19 nt, Artificial Sequence
  Description of Artificial Sequence: Synthetic oligonucleotide
cugauucaaucucaggagu

SEQ ID NO: 2558643 - RNA, 19 nt, Artificial Sequence
  Description of Artificial Sequence: Synthetic oligonucleotide
guaccccugacaccaugug

SEQ ID NO: 2558644 - RNA, 19 nt, Artificial Sequence
  Description of Artificial Sequence: Synthetic oligonucleotide
uucuagccuuuguaccccu

SEQ ID NO: 2558645 - RNA, 19 nt, Artificial Sequence
  Description of Artificial Sequence: Synthetic oligonucleotide
agaacugcucacugcuauu

SEQ ID NO: 2558646 - RNA, 19 nt, Artificial Sequence
  Description of Artificial Sequence: Synthetic oligonucleotide
ccagucuugcuaacgugcc

SEQ ID NO: 2558647 - RNA, 19 nt, Artificial Sequence
  Description of Artificial Sequence: Synthetic oligonucleotide
cuagccuuuguaccccuga

SEQ ID NO: 2558648 - RNA, 19 nt, Artificial Sequence
  Description of Artificial Sequence: Synthetic oligonucleotide
ugguucccaagcuccaguu

SEQ ID NO: 2558649 - RNA, 19 nt, Artificial Sequence
  Description of Artificial Sequence: Synthetic oligonucleotide
ugagagcuccuuuguguuu

SEQ ID NO: 2558650 - RNA, 19 nt, Artificial Sequence
  Description of Artificial Sequence: Synthetic oligonucleotide
cuuguucuuuguuggggaa

SEQ ID NO: 2558651 - RNA, 19 nt, Artificial Sequence
  Description of Artificial Sequence: Synthetic oligonucleotide
gcaagcuggaugagaaugc

SEQ ID NO: 2558652 - RNA, 19 nt, Artificial Sequence
  Description of Artificial Sequence: Synthetic oligonucleotide
auggcucccagugauggaa

SEQ ID NO: 2558653 - RNA, 19 nt, Artificial Sequence
  Description of Artificial Sequence: Synthetic oligonucleotide
cgugccagaaugaaccuug

SEQ ID NO: 2558654 - RNA, 19 nt, Artificial Sequence
  Description of Artificial Sequence: Synthetic oligonucleotide
gccagucuugcuaacgugc

SEQ ID NO: 2558655 - RNA, 19 nt, Artificial Sequence
  Description of Artificial Sequence: Synthetic oligonucleotide
ugagaaugcccagccuggu

SEQ ID NO: 2558656 - RNA, 19 nt, Artificial Sequence
  Description of Artificial Sequence: Synthetic oligonucleotide
agggagggauucugauuug

SEQ ID NO: 2558657 - RNA, 19 nt, Artificial Sequence
  Description of Artificial Sequence: Synthetic oligonucleotide
uggccagcuucagauacaa

SEQ ID NO: 2558658 - RNA, 19 nt, Artificial Sequence
  Description of Artificial Sequence: Synthetic oligonucleotide
ucucucugguagcugccuu

SEQ ID NO: 2558659 - RNA, 19 nt, Artificial Sequence
  Description of Artificial Sequence: Synthetic oligonucleotide
ccugagguuuauuguuagg

SEQ ID NO: 2558660 - RNA, 19 nt, Artificial Sequence
  Description of Artificial Sequence: Synthetic oligonucleotide
cugugguugacuucucucu

SEQ ID NO: 2558661 - RNA, 19 nt, Artificial Sequence
  Description of Artificial Sequence: Synthetic oligonucleotide
gguagaugucaacuuucuc

SEQ ID NO: 2558662 - RNA, 19 nt, Artificial Sequence
  Description of Artificial Sequence: Synthetic oligonucleotide
guucgagcugaauaacccu

SEQ ID NO: 2558663 - RNA, 19 nt, Artificial Sequence
  Description of Artificial Sequence: Synthetic oligonucleotide
gggagggauucugauuugg

SEQ ID NO: 2558664 - RNA, 19 nt, Artificial Sequence
  Description of Artificial Sequence: Synthetic oligonucleotide
gaaggagaagguugccagu

SEQ ID NO: 2558665 - RNA, 19 nt, Artificial Sequence
  Description of Artificial Sequence: Synthetic oligonucleotide
agaaugaaccuugcugcuu

SEQ ID NO: 2558666 - RNA, 19 nt, Artificial Sequence
  Description of Artificial Sequence: Synthetic oligonucleotide
ugcccugauccauguuucu

SEQ ID NO: 2558667 - RNA, 19 nt, Artificial Sequence
  Description of Artificial Sequence: Synthetic oligonucleotide
gugacucaguuuuguuuuc

SEQ ID NO: 2558668 - RNA, 19 nt, Artificial Sequence
  Description of Artificial Sequence: Synthetic oligonucleotide
aucuccugagguagauguc

SEQ ID NO: 2558669 - RNA, 19 nt, Artificial Sequence
  Description of Artificial Sequence: Synthetic oligonucleotide
ggucccucuccuccugugg

SEQ ID NO: 2558670 - RNA, 19 nt, Artificial Sequence
  Description of Artificial Sequence: Synthetic oligonucleotide
cacugcuauuuuaggagaa

SEQ ID NO: 2558671 - RNA, 19 nt, Artificial Sequence
  Description of Artificial Sequence: Synthetic oligonucleotide
uuuguaccccugacaccau

SEQ ID NO: 2558672 - RNA, 19 nt, Artificial Sequence
  Description of Artificial Sequence: Synthetic oligonucleotide
ucucaggaguuggccagga

SEQ ID NO: 2558673 - RNA, 19 nt, Artificial Sequence
  Description of Artificial Sequence: Synthetic oligonucleotide
gacuucucucugguagcug

SEQ ID NO: 2558674 - RNA, 19 nt, Artificial Sequence
  Description of Artificial Sequence: Synthetic oligonucleotide
uggucccucuccuccugug

SEQ ID NO: 2558675 - RNA, 19 nt, Artificial Sequence
  Description of Artificial Sequence: Synthetic oligonucleotide
uccaucuccugagguagau

SEQ ID NO: 2558676 - RNA, 19 nt, Artificial Sequence
  Description of Artificial Sequence: Synthetic oligonucleotide
auuugcuccugugcccuga

SEQ ID NO: 2558677 - RNA, 19 nt, Artificial Sequence
  Description of Artificial Sequence: Synthetic oligonucleotide
ccugugguugacuucucuc

SEQ ID NO: 2558678 - RNA, 19 nt, Artificial Sequence
  Description of Artificial Sequence: Synthetic oligonucleotide
gguagcugccuugagagcu

SEQ ID NO: 2558679 - RNA, 19 nt, Artificial Sequence
  Description of Artificial Sequence: Synthetic oligonucleotide
gaagguugccagucuugcu

SEQ ID NO: 2558680 - RNA, 19 nt, Artificial Sequence
  Description of Artificial Sequence: Synthetic oligonucleotide
ccuuuguaccccugacacc

SEQ ID NO: 2558681 - RNA, 19 nt, Artificial Sequence
  Description of Artificial Sequence: Synthetic oligonucleotide
cccugagguuuauuguuag

SEQ ID NO: 2558682 - RNA, 19 nt, Artificial Sequence
  Description of Artificial Sequence: Synthetic oligonucleotide
agggauuuucaaagccaca

SEQ ID NO: 2558683 - RNA, 19 nt, Artificial Sequence
  Description of Artificial Sequence: Synthetic oligonucleotide
ccucaguuguuuucaguuc

SEQ ID NO: 2558684 - RNA, 19 nt, Artificial Sequence
  Description of Artificial Sequence: Synthetic oligonucleotide
gcuguggccaucagaggag

SEQ ID NO: 2558685 - RNA, 19 nt, Artificial Sequence
  Description of Artificial Sequence: Synthetic oligonucleotide
gaaagcgaaggagaagguu

SEQ ID NO: 2558686 - RNA, 19 nt, Artificial Sequence
  Description of Artificial Sequence: Synthetic oligonucleotide
ucugucucgcaagcuggau

SEQ ID NO: 2558687 - RNA, 19 nt, Artificial Sequence
  Description of Artificial Sequence: Synthetic oligonucleotide
ugacaccaugugaccuuaa

SEQ ID NO: 2558688 - RNA, 19 nt, Artificial Sequence
  Description of Artificial Sequence: Synthetic oligonucleotide
cugcuauuuuaggagaacu

SEQ ID NO: 2558689 - RNA, 19 nt, Artificial Sequence
  Description of Artificial Sequence: Synthetic oligonucleotide
cacagcacugcuuucugau

SEQ ID NO: 2558690 - RNA, 19 nt, Artificial Sequence
  Description of Artificial Sequence: Synthetic oligonucleotide
ucgcaagcuggaugagaau

SEQ ID NO: 2558691 - RNA, 19 nt, Artificial Sequence
  Description of Artificial Sequence: Synthetic oligonucleotide
aggagaacugggaggcaca

SEQ ID NO: 2558692 - RNA, 19 nt, Artificial Sequence
  Description of Artificial Sequence: Synthetic oligonucleotide
cuugcuaacgugccagaau

SEQ ID NO: 2558693 - RNA, 19 nt, Artificial Sequence
  Description of Artificial Sequence: Synthetic oligonucleotide
cucugguagcugccuugag

SEQ ID NO: 2558694 - RNA, 19 nt, Artificial Sequence
  Description of Artificial Sequence: Synthetic oligonucleotide
cagaaugaaccuugcugcu

SEQ ID NO: 2558695 - RNA, 19 nt, Artificial Sequence
  Description of Artificial Sequence: Synthetic oligonucleotide
ggaguuggccaggauggug

SEQ ID NO: 2558696 - RNA, 19 nt, Artificial Sequence
  Description of Artificial Sequence: Synthetic oligonucleotide
gucuugcuaacgugccaga

SEQ ID NO: 2558697 - RNA, 19 nt, Artificial Sequence
  Description of Artificial Sequence: Synthetic oligonucleotide
cauccauggcucccaguga

SEQ ID NO: 2558698 - RNA, 19 nt, Artificial Sequence
  Description of Artificial Sequence: Synthetic oligonucleotide
gugcccugauccauguuuc

SEQ ID NO: 2558699 - RNA, 19 nt, Artificial Sequence
  Description of Artificial Sequence: Synthetic oligonucleotide
ccuugagagcuccuuugug

SEQ ID NO: 2558700 - RNA, 19 nt, Artificial Sequence
  Description of Artificial Sequence: Synthetic oligonucleotide
uuucaggccccuggucccu

SEQ ID NO: 2558701 - RNA, 19 nt, Artificial Sequence
  Description of Artificial Sequence: Synthetic oligonucleotide
gggauuuucaaagccacau

SEQ ID NO: 2558702 - RNA, 19 nt, Artificial Sequence
  Description of Artificial Sequence: Synthetic oligonucleotide
ggggaaagcgaaggagaag

SEQ ID NO: 2558703 - RNA, 19 nt, Artificial Sequence
  Description of Artificial Sequence: Synthetic oligonucleotide
cugagguagaugucaacuu

SEQ ID NO: 2558704 - RNA, 19 nt, Artificial Sequence
  Description of Artificial Sequence: Synthetic oligonucleotide
gugccagaaugaaccuugc

SEQ ID NO: 2558705 - RNA, 19 nt, Artificial Sequence
  Description of Artificial Sequence: Synthetic oligonucleotide
gagcuccuuuguguuuccc

SEQ ID NO: 2558706 - RNA, 19 nt, Artificial Sequence
  Description of Artificial Sequence: Synthetic oligonucleotide
gcuaacgugccagaaugaa

SEQ ID NO: 2558707 - RNA, 19 nt, Artificial Sequence
  Description of Artificial Sequence: Synthetic oligonucleotide
cagucuugcuaacgugcca

SEQ ID NO: 2558708 - RNA, 19 nt, Artificial Sequence
  Description of Artificial Sequence: Synthetic oligonucleotide
guagcugccuugagagcuc

SEQ ID NO: 2558709 - RNA, 19 nt, Artificial Sequence
  Description of Artificial Sequence: Synthetic oligonucleotide
uacugccuuucuagccuuu

SEQ ID NO: 2558710 - RNA, 19 nt, Artificial Sequence
  Description of Artificial Sequence: Synthetic oligonucleotide
gggcuguggccaucagagg

SEQ ID NO: 2558711 - RNA, 19 nt, Artificial Sequence
  Description of Artificial Sequence: Synthetic oligonucleotide
cucuuuugcccugagguuu

SEQ ID NO: 2558712 - RNA, 19 nt, Artificial Sequence
  Description of Artificial Sequence: Synthetic oligonucleotide
gcauccaucuccugaggua

SEQ ID NO: 2558713 - RNA, 19 nt, Artificial Sequence
  Description of Artificial Sequence: Synthetic oligonucleotide
uccuuucaggagggaggga

SEQ ID NO: 2558714 - RNA, 19 nt, Artificial Sequence
  Description of Artificial Sequence: Synthetic oligonucleotide
ggagggauucugauuugga

SEQ ID NO: 2558715 - RNA, 19 nt, Artificial Sequence
  Description of Artificial Sequence: Synthetic oligonucleotide
gugauggaagauguccagu

SEQ ID NO: 2558716 - RNA, 19 nt, Artificial Sequence
  Description of Artificial Sequence: Synthetic oligonucleotide
cauggcucccagugaugga

SEQ ID NO: 2558717 - RNA, 19 nt, Artificial Sequence
  Description of Artificial Sequence: Synthetic oligonucleotide
augaaccuugcugcuuuua

SEQ ID NO: 2558718 - RNA, 19 nt, Artificial Sequence
  Description of Artificial Sequence: Synthetic oligonucleotide
ucaggccccuggucccucu

SEQ ID NO: 2558719 - RNA, 19 nt, Artificial Sequence
  Description of Artificial Sequence: Synthetic oligonucleotide
cacauuuuccucaguuguu

SEQ ID NO: 2558720 - RNA, 19 nt, Artificial Sequence
  Description of Artificial Sequence: Synthetic oligonucleotide
gcuggucagagcauccauc

SEQ ID NO: 2558721 - RNA, 19 nt, Artificial Sequence
  Description of Artificial Sequence: Synthetic oligonucleotide
ccaguucgagcugaauaac

SEQ ID NO: 2558722 - RNA, 19 nt, Artificial Sequence
  Description of Artificial Sequence: Synthetic oligonucleotide
uuuugcccugagguuuauu

SEQ ID NO: 2558723 - RNA, 19 nt, Artificial Sequence
  Description of Artificial Sequence: Synthetic oligonucleotide
caacuuucuccggccuuuc

SEQ ID NO: 2558724 - RNA, 19 nt, Artificial Sequence
  Description of Artificial Sequence: Synthetic oligonucleotide
ccuuuguguuucccugcag

SEQ ID NO: 2558725 - RNA, 19 nt, Artificial Sequence
  Description of Artificial Sequence: Synthetic oligonucleotide
gagcugaauaacccuccuu

SEQ ID NO: 2558726 - RNA, 19 nt, Artificial Sequence
  Description of Artificial Sequence: Synthetic oligonucleotide
gcacaguugcuucucuucu

SEQ ID NO: 2558727 - RNA, 19 nt, Artificial Sequence
  Description of Artificial Sequence: Synthetic oligonucleotide
gucucgcaagcuggaugag

SEQ ID NO: 2558728 - RNA, 19 nt, Artificial Sequence
  Description of Artificial Sequence: Synthetic oligonucleotide
gcagcuggucagagcaucc

SEQ ID NO: 2558729 - RNA, 19 nt, Artificial Sequence
  Description of Artificial Sequence: Synthetic oligonucleotide
cucuccuccugugguugac

SEQ ID NO: 2558730 - RNA, 19 nt, Artificial Sequence
  Description of Artificial Sequence: Synthetic oligonucleotide
gcgaaggagaagguugcca

SEQ ID NO: 2558731 - RNA, 19 nt, Artificial Sequence
  Description of Artificial Sequence: Synthetic oligonucleotide
ggauucugguggggaaagc

SEQ ID NO: 2558732 - RNA, 19 nt, Artificial Sequence
  Description of Artificial Sequence: Synthetic oligonucleotide
acgugccagaaugaaccuu

SEQ ID NO: 2558733 - RNA, 19 nt, Artificial Sequence
  Description of Artificial Sequence: Synthetic oligonucleotide
gagaaugcccagccugguu

SEQ ID NO: 2558734 - RNA, 19 nt, Artificial Sequence
  Description of Artificial Sequence: Synthetic oligonucleotide
gucugucucgcaagcugga

SEQ ID NO: 2558735 - RNA, 19 nt, Artificial Sequence
  Description of Artificial Sequence: Synthetic oligonucleotide
gcuccugugcccugaucca

SEQ ID NO: 2558736 - RNA, 19 nt, Artificial Sequence
  Description of Artificial Sequence: Synthetic oligonucleotide
ccccugacaccaugugacc

SEQ ID NO: 2558737 - RNA, 19 nt, Artificial Sequence
  Description of Artificial Sequence: Synthetic oligonucleotide
ccugagguagaugucaacu

SEQ ID NO: 2558738 - RNA, 19 nt, Artificial Sequence
  Description of Artificial Sequence: Synthetic oligonucleotide
gguugccagucuugcuaac

SEQ ID NO: 2558739 - RNA, 19 nt, Artificial Sequence
  Description of Artificial Sequence: Synthetic oligonucleotide
cuccugugguugacuucuc

SEQ ID NO: 2558740 - RNA, 19 nt, Artificial Sequence
  Description of Artificial Sequence: Synthetic oligonucleotide
auccaucuccugagguaga

SEQ ID NO: 2558741 - RNA, 19 nt, Artificial Sequence
  Description of Artificial Sequence: Synthetic oligonucleotide
cacaggcacaguugcuucu

SEQ ID NO: 2558742 - RNA, 19 nt, Artificial Sequence
  Description of Artificial Sequence: Synthetic oligonucleotide
gucaacuuucuccggccuu

SEQ ID NO: 2558743 - RNA, 19 nt, Artificial Sequence
  Description of Artificial Sequence: Synthetic oligonucleotide
ggggaauuuuagaacugcu

SEQ ID NO: 2558744 - RNA, 19 nt, Artificial Sequence
  Description of Artificial Sequence: Synthetic oligonucleotide
gguugacuucucucuggua

SEQ ID NO: 2558745 - RNA, 19 nt, Artificial Sequence
  Description of Artificial Sequence: Synthetic oligonucleotide
ggaugagaaugcccagccu

SEQ ID NO: 2558746 - RNA, 19 nt, Artificial Sequence
  Description of Artificial Sequence: Synthetic oligonucleotide
gccuuucacaggcacaguu

SEQ ID NO: 2558747 - RNA, 19 nt, Artificial Sequence
  Description of Artificial Sequence: Synthetic oligonucleotide
cugccuuucuagccuuugu

SEQ ID NO: 2558748 - RNA, 19 nt, Artificial Sequence
  Description of Artificial Sequence: Synthetic oligonucleotide
uucaggccccuggucccuc

SEQ ID NO: 2558749 - RNA, 19 nt, Artificial Sequence
  Description of Artificial Sequence: Synthetic oligonucleotide
cacaguugcuucucuucuu

SEQ ID NO: 2558750 - RNA, 19 nt, Artificial Sequence
  Description of Artificial Sequence: Synthetic oligonucleotide
cagauacaacuacugccuu

SEQ ID NO: 2558751 - RNA, 19 nt, Artificial Sequence
  Description of Artificial Sequence: Synthetic oligonucleotide
gcccugauccauguuucuc

SEQ ID NO: 2558752 - RNA, 19 nt, Artificial Sequence
  Description of Artificial Sequence: Synthetic oligonucleotide
ggagugacucaguuuuguu

SEQ ID NO: 2558753 - RNA, 19 nt, Artificial Sequence
  Description of Artificial Sequence: Synthetic oligonucleotide
ggagggagggauucugauu

SEQ ID NO: 2558754 - RNA, 19 nt, Artificial Sequence
  Description of Artificial Sequence: Synthetic oligonucleotide
gccuugagagcuccuuugu

SEQ ID NO: 2558755 - RNA, 19 nt, Artificial Sequence
  Description of Artificial Sequence: Synthetic oligonucleotide
cuacugccuuucuagccuu

SEQ ID NO: 2558756 - RNA, 19 nt, Artificial Sequence
  Description of Artificial Sequence: Synthetic oligonucleotide
ggaaagcgaaggagaaggu

SEQ ID NO: 2558757 - RNA, 19 nt, Artificial Sequence
  Description of Artificial Sequence: Synthetic oligonucleotide
cccucuccuccugugguug

SEQ ID NO: 2558758 - RNA, 19 nt, Artificial Sequence
  Description of Artificial Sequence: Synthetic oligonucleotide
cugauccauguuucucuuu

SEQ ID NO: 2558759 - RNA, 19 nt, Artificial Sequence
  Description of Artificial Sequence: Synthetic oligonucleotide
ccuuucaggagggagggau

SEQ ID NO: 2558760 - RNA, 19 nt, Artificial Sequence
  Description of Artificial Sequence: Synthetic oligonucleotide
cugccuugagagcuccuuu

SEQ ID NO: 2558761 - RNA, 19 nt, Artificial Sequence
  Description of Artificial Sequence: Synthetic oligonucleotide
agcuccaguucgagcugaa

SEQ ID NO: 2558762 - RNA, 19 nt, Artificial Sequence
  Description of Artificial Sequence: Synthetic oligonucleotide
caggcacaguugcuucucu

SEQ ID NO: 2558763 - RNA, 19 nt, Artificial Sequence
  Description of Artificial Sequence: Synthetic oligonucleotide
caggccccuggucccucuc

SEQ ID NO: 2558764 - RNA, 19 nt, Artificial Sequence
  Description of Artificial Sequence: Synthetic oligonucleotide
gcccugagguuuauuguua

SEQ ID NO: 2558765 - RNA, 19 nt, Artificial Sequence
  Description of Artificial Sequence: Synthetic oligonucleotide
guucuuuguuggggaauuu

SEQ ID NO: 2558766 - RNA, 19 nt, Artificial Sequence
  Description of Artificial Sequence: Synthetic oligonucleotide
ccggccuuucacaggcaca

SEQ ID NO: 2558767 - RNA, 19 nt, Artificial Sequence
  Description of Artificial Sequence: Synthetic oligonucleotide
guguuucccugcagcuggu

SEQ ID NO: 2558768 - RNA, 19 nt, Artificial Sequence
  Description of Artificial Sequence: Synthetic oligonucleotide
cuccugugcccugauccau

SEQ ID NO: 2558769 - RNA, 19 nt, Artificial Sequence
  Description of Artificial Sequence: Synthetic oligonucleotide
ggcauccauggcucccagu

SEQ ID NO: 2558770 - RNA, 19 nt, Artificial Sequence
  Description of Artificial Sequence: Synthetic oligonucleotide
acccuccuuucaggccccu

SEQ ID NO: 2558771 - RNA, 19 nt, Artificial Sequence
  Description of Artificial Sequence: Synthetic oligonucleotide
gccccuggucccucuccuc

SEQ ID NO: 2558772 - RNA, 19 nt, Artificial Sequence
  Description of Artificial Sequence: Synthetic oligonucleotide
gcucccagugauggaagau

SEQ ID NO: 2558773 - RNA, 19 nt, Artificial Sequence
  Description of Artificial Sequence: Synthetic oligonucleotide
cgagcugaauaacccuccu

SEQ ID NO: 2558774 - RNA, 19 nt, Artificial Sequence
  Description of Artificial Sequence: Synthetic oligonucleotide
cugugcccugauccauguu

SEQ ID NO: 2558775 - RNA, 19 nt, Artificial Sequence
  Description of Artificial Sequence: Synthetic oligonucleotide
ggccuuucacaggcacagu

SEQ ID NO: 2558776 - RNA, 19 nt, Artificial Sequence
  Description of Artificial Sequence: Synthetic oligonucleotide
gcuccaguucgagcugaau

SEQ ID NO: 2558777 - RNA, 19 nt, Artificial Sequence
  Description of Artificial Sequence: Synthetic oligonucleotide
aauacaaaguacaaggugg

SEQ ID NO: 2558778 - RNA, 19 nt, Artificial Sequence
  Description of Artificial Sequence: Synthetic oligonucleotide
acugaugucuacuacagcc

SEQ ID NO: 2558779 - RNA, 19 nt, Artificial Sequence
  Description of Artificial Sequence: Synthetic oligonucleotide
uuucaaaacacuuauccag

SEQ ID NO: 2558780 - RNA, 19 nt, Artificial Sequence
  Description of Artificial Sequence: Synthetic oligonucleotide
uuauccauauggaagauca

SEQ ID NO: 2558781 - RNA, 19 nt, Artificial Sequence
  Description of Artificial Sequence: Synthetic oligonucleotide
uguaucagagagcagcagg

SEQ ID NO: 2558782 - RNA, 19 nt, Artificial Sequence
  Description of Artificial Sequence: Synthetic oligonucleotide
ucgcuugaggaccagaugg

SEQ ID NO: 2558783 - RNA, 19 nt, Artificial Sequence
  Description of Artificial Sequence: Synthetic oligonucleotide
ucaguuuguagucagcacc

SEQ ID NO: 2558784 - RNA, 19 nt, Artificial Sequence
  Description of Artificial Sequence: Synthetic oligonucleotide
gauguagugcaccuuaucc

SEQ ID NO: 2558785 - RNA, 19 nt, Artificial Sequence
  Description of Artificial Sequence: Synthetic oligonucleotide
uuuguagucagcaccacca

SEQ ID NO: 2558786 - RNA, 19 nt, Artificial Sequence
  Description of Artificial Sequence: Synthetic oligonucleotide
gagacuuccaccuucuaag

SEQ ID NO: 2558787 - RNA, 19 nt, Artificial Sequence
  Description of Artificial Sequence: Synthetic oligonucleotide
agaaauuacagauguuguc

SEQ ID NO: 2558788 - RNA, 19 nt, Artificial Sequence
  Description of Artificial Sequence: Synthetic oligonucleotide
cacugaaugauacagaauc

SEQ ID NO: 2558789 - RNA, 19 nt, Artificial Sequence
  Description of Artificial Sequence: Synthetic oligonucleotide
uacaagguggcauagugcc

SEQ ID NO: 2558790 - RNA, 19 nt, Artificial Sequence
  Description of Artificial Sequence: Synthetic oligonucleotide
ugaaugauacagaaucuca

SEQ ID NO: 2558791 - RNA, 19 nt, Artificial Sequence
  Description of Artificial Sequence: Synthetic oligonucleotide
ucuacuacagccaugugua

SEQ ID NO: 2558792 - RNA, 19 nt, Artificial Sequence
  Description of Artificial Sequence: Synthetic oligonucleotide
aagaucaaauccaauucac

SEQ ID NO: 2558793 - RNA, 19 nt, Artificial Sequence
  Description of Artificial Sequence: Synthetic oligonucleotide
gauguguucagucucggug

SEQ ID NO: 2558794 - RNA, 19 nt, Artificial Sequence
  Description of Artificial Sequence: Synthetic oligonucleotide
aaaggcuggcccuucuccc

SEQ ID NO: 2558795 - RNA, 19 nt, Artificial Sequence
  Description of Artificial Sequence: Synthetic oligonucleotide
ugauacagaaucucagaag

SEQ ID NO: 2558796 - RNA, 19 nt, Artificial Sequence
  Description of Artificial Sequence: Synthetic oligonucleotide
agccauguguaucagagag

SEQ ID NO: 2558797 - RNA, 19 nt, Artificial Sequence
  Description of Artificial Sequence: Synthetic oligonucleotide
aacaccaucccacccauca

SEQ ID NO: 2558798 - RNA, 19 nt, Artificial Sequence
  Description of Artificial Sequence: Synthetic oligonucleotide
gaggcaaagaagcaguggc

SEQ ID NO: 2558799 - RNA, 19 nt, Artificial Sequence
  Description of Artificial Sequence: Synthetic oligonucleotide
uucaaaacacuuauccaga

SEQ ID NO: 2558800 - RNA, 19 nt, Artificial Sequence
  Description of Artificial Sequence: Synthetic oligonucleotide
aagcagugugcacucaaac

SEQ ID NO: 2558801 - RNA, 19 nt, Artificial Sequence
  Description of Artificial Sequence: Synthetic oligonucleotide
uacagauguugucaucucg

SEQ ID NO: 2558802 - RNA, 19 nt, Artificial Sequence
  Description of Artificial Sequence: Synthetic oligonucleotide
uucuaagaaauuacagaug

SEQ ID NO: 2558803 - RNA, 19 nt, Artificial Sequence
  Description of Artificial Sequence: Synthetic oligonucleotide
aacacuuauccagagucuc

SEQ ID NO: 2558804 - RNA, 19 nt, Artificial Sequence
  Description of Artificial Sequence: Synthetic oligonucleotide
ucagauguguucagucucg

SEQ ID NO: 2558805 - RNA, 19 nt, Artificial Sequence
  Description of Artificial Sequence: Synthetic oligonucleotide
cuuugaaaggcucaguguc

SEQ ID NO: 2558806 - RNA, 19 nt, Artificial Sequence
  Description of Artificial Sequence: Synthetic oligonucleotide
uuugaaaggcucagugucc

SEQ ID NO: 2558807 - RNA, 19 nt, Artificial Sequence
  Description of Artificial Sequence: Synthetic oligonucleotide
cauagugccgguaaaucag

SEQ ID NO: 2558808 - RNA, 19 nt, Artificial Sequence
  Description of Artificial Sequence: Synthetic oligonucleotide
aaauuacagauguugucau

SEQ ID NO: 2558809 - RNA, 19 nt, Artificial Sequence
  Description of Artificial Sequence: Synthetic oligonucleotide
gaaugauacagaaucucag

SEQ ID NO: 2558810 - RNA, 19 nt, Artificial Sequence
  Description of Artificial Sequence: Synthetic oligonucleotide
agucucucgaacaaucugc

SEQ ID NO: 2558811 - RNA, 19 nt, Artificial Sequence
  Description of Artificial Sequence: Synthetic oligonucleotide
uuuugagcuucaauuugag

SEQ ID NO: 2558812 - RNA, 19 nt, Artificial Sequence
  Description of Artificial Sequence: Synthetic oligonucleotide
caccuuauccauauggaag

SEQ ID NO: 2558813 - RNA, 19 nt, Artificial Sequence
  Description of Artificial Sequence: Synthetic oligonucleotide
aauucacauacauuuucaa

SEQ ID NO: 2558814 - RNA, 19 nt, Artificial Sequence
  Description of Artificial Sequence: Synthetic oligonucleotide
uacagaaucucagaagccc

SEQ ID NO: 2558815 - RNA, 19 nt, Artificial Sequence
  Description of Artificial Sequence: Synthetic oligonucleotide
guugucaucucgcuugagg

SEQ ID NO: 2558816 - RNA, 19 nt, Artificial Sequence
  Description of Artificial Sequence: Synthetic oligonucleotide
uccugaaggauguagugca

SEQ ID NO: 2558817 - RNA, 19 nt, Artificial Sequence
  Description of Artificial Sequence: Synthetic oligonucleotide
gauggaaagucucucgaac

SEQ ID NO: 2558818 - RNA, 19 nt, Artificial Sequence
  Description of Artificial Sequence: Synthetic oligonucleotide
aacaaucugcuguugaauu

SEQ ID NO: 2558819 - RNA, 19 nt, Artificial Sequence
  Description of Artificial Sequence: Synthetic oligonucleotide
uggcuuagugcacugaugu

SEQ ID NO: 2558820 - RNA, 19 nt, Artificial Sequence
  Description of Artificial Sequence: Synthetic oligonucleotide
acuacagccauguguauca

SEQ ID NO: 2558821 - RNA, 19 nt, Artificial Sequence
  Description of Artificial Sequence: Synthetic oligonucleotide
uccauauggaagaucaaau

SEQ ID NO: 2558822 - RNA, 19 nt, Artificial Sequence
  Description of Artificial Sequence: Synthetic oligonucleotide
aagaaauuacagauguugu

SEQ ID NO: 2558823 - RNA, 19 nt, Artificial Sequence
  Description of Artificial Sequence: Synthetic oligonucleotide
aagucucucgaacaaucug

SEQ ID NO: 2558824 - RNA, 19 nt, Artificial Sequence
  Description of Artificial Sequence: Synthetic oligonucleotide
acaccuggcaucugaaagg

SEQ ID NO: 2558825 - RNA, 19 nt, Artificial Sequence
  Description of Artificial Sequence: Synthetic oligonucleotide
acagauguugucaucucgc

SEQ ID NO: 2558826 - RNA, 19 nt, Artificial Sequence
  Description of Artificial Sequence: Synthetic oligonucleotide
uugucaucucgcuugagga

SEQ ID NO: 2558827 - RNA, 19 nt, Artificial Sequence
  Description of Artificial Sequence: Synthetic oligonucleotide
acucaaacucccuucccac

SEQ ID NO: 2558828 - RNA, 19 nt, Artificial Sequence
  Description of Artificial Sequence: Synthetic oligonucleotide
aauuugagccacaauuuca

SEQ ID NO: 2558829 - RNA, 19 nt, Artificial Sequence
  Description of Artificial Sequence: Synthetic oligonucleotide
uauggaagaucaaauccaa

SEQ ID NO: 2558830 - RNA, 19 nt, Artificial Sequence
  Description of Artificial Sequence: Synthetic oligonucleotide
accuuauccauauggaaga

SEQ ID NO: 2558831 - RNA, 19 nt, Artificial Sequence
  Description of Artificial Sequence: Synthetic oligonucleotide
agaggugcgacuccagagg

SEQ ID NO: 2558832 - RNA, 19 nt, Artificial Sequence
  Description of Artificial Sequence: Synthetic oligonucleotide
aucaguuuguagucagcac

SEQ ID NO: 2558833 - RNA, 19 nt, Artificial Sequence
  Description of Artificial Sequence: Synthetic oligonucleotide
gugcaccuuauccauaugg

SEQ ID NO: 2558834 - RNA, 19 nt, Artificial Sequence
  Description of Artificial Sequence: Synthetic oligonucleotide
ugcacugaugucuacuaca

SEQ ID NO: 2558835 - RNA, 19 nt, Artificial Sequence
  Description of Artificial Sequence: Synthetic oligonucleotide
ucuuugaaaggcucagugu

SEQ ID NO: 2558836 - RNA, 19 nt, Artificial Sequence
  Description of Artificial Sequence: Synthetic oligonucleotide
uguucagucucgguggcgg

SEQ ID NO: 2558837 - RNA, 19 nt, Artificial Sequence
  Description of Artificial Sequence: Synthetic oligonucleotide
ucagcaccaccaaugagac

SEQ ID NO: 2558838 - RNA, 19 nt, Artificial Sequence
  Description of Artificial Sequence: Synthetic oligonucleotide
ugcaccuuauccauaugga

SEQ ID NO: 2558839 - RNA, 19 nt, Artificial Sequence
  Description of Artificial Sequence: Synthetic oligonucleotide
uuauccagagucuccacaa

SEQ ID NO: 2558840 - RNA, 19 nt, Artificial Sequence
  Description of Artificial Sequence: Synthetic oligonucleotide
uccacaguccccaacccug

SEQ ID NO: 2558841 - RNA, 19 nt, Artificial Sequence
  Description of Artificial Sequence: Synthetic oligonucleotide
aggauggacaagcagugug

SEQ ID NO: 2558842 - RNA, 19 nt, Artificial Sequence
  Description of Artificial Sequence: Synthetic oligonucleotide
aaggauguagugcaccuua

SEQ ID NO: 2558843 - RNA, 19 nt, Artificial Sequence
  Description of Artificial Sequence: Synthetic oligonucleotide
uguagugcaccuuauccau

SEQ ID NO: 2558844 - RNA, 19 nt, Artificial Sequence
  Description of Artificial Sequence: Synthetic oligonucleotide
ugcacucaaacucccuucc

SEQ ID NO: 2558845 - RNA, 19 nt, Artificial Sequence
  Description of Artificial Sequence: Synthetic oligonucleotide
caagaucccaaguucacuc

SEQ ID NO: 2558846 - RNA, 19 nt, Artificial Sequence
  Description of Artificial Sequence: Synthetic oligonucleotide
aaaguacaagguggcauag

SEQ ID NO: 2558847 - RNA, 19 nt, Artificial Sequence
  Description of Artificial Sequence: Synthetic oligonucleotide
gaaaggcuggcccuucucc

SEQ ID NO: 2558848 - RNA, 19 nt, Artificial Sequence
  Description of Artificial Sequence: Synthetic oligonucleotide
gucucuugcccacugaaug

SEQ ID NO: 2558849 - RNA, 19 nt, Artificial Sequence
  Description of Artificial Sequence: Synthetic oligonucleotide
auguagugcaccuuaucca

SEQ ID NO: 2558850 - RNA, 19 nt, Artificial Sequence
  Description of Artificial Sequence: Synthetic oligonucleotide
gugccgguaaaucaguuug

SEQ ID NO: 2558851 - RNA, 19 nt, Artificial Sequence
  Description of Artificial Sequence: Synthetic oligonucleotide
ugaaggauguagugcaccu

SEQ ID NO: 2558852 - RNA, 19 nt, Artificial Sequence
  Description of Artificial Sequence: Synthetic oligonucleotide
cuucuaagaaauuacagau

SEQ ID NO: 2558853 - RNA, 19 nt, Artificial Sequence
  Description of Artificial Sequence: Synthetic oligonucleotide
ucgaacaaucugcuguuga

SEQ ID NO: 2558854 - RNA, 19 nt, Artificial Sequence
  Description of Artificial Sequence: Synthetic oligonucleotide
cugaccugccacuugacac

SEQ ID NO: 2558855 - RNA, 19 nt, Artificial Sequence
  Description of Artificial Sequence: Synthetic oligonucleotide
uggacaagcagugugcacu

SEQ ID NO: 2558856 - RNA, 19 nt, Artificial Sequence
  Description of Artificial Sequence: Synthetic oligonucleotide
cuugcccacugaaugauac

SEQ ID NO: 2558857 - RNA, 19 nt, Artificial Sequence
  Description of Artificial Sequence: Synthetic oligonucleotide
acuugacacaccuggcauc

SEQ ID NO: 2558858 - RNA, 19 nt, Artificial Sequence
  Description of Artificial Sequence: Synthetic oligonucleotide
ucaaacucccuucccacuc

SEQ ID NO: 2558859 - RNA, 19 nt, Artificial Sequence
  Description of Artificial Sequence: Synthetic oligonucleotide
acuuccaccuucuaagaaa

SEQ ID NO: 2558860 - RNA, 19 nt, Artificial Sequence
  Description of Artificial Sequence: Synthetic oligonucleotide
aagaucccaaguucacucu

SEQ ID NO: 2558861 - RNA, 19 nt, Artificial Sequence
  Description of Artificial Sequence: Synthetic oligonucleotide
uaucucugcagcccugacc

SEQ ID NO: 2558862 - RNA, 19 nt, Artificial Sequence
  Description of Artificial Sequence: Synthetic oligonucleotide
cuucccacucuuugaaagg

SEQ ID NO: 2558863 - RNA, 19 nt, Artificial Sequence
  Description of Artificial Sequence: Synthetic oligonucleotide
uggcuuguuccacaguccc

SEQ ID NO: 2558864 - RNA, 19 nt, Artificial Sequence
  Description of Artificial Sequence: Synthetic oligonucleotide
ugggaggcaaagaagcagu

SEQ ID NO: 2558865 - RNA, 19 nt, Artificial Sequence
  Description of Artificial Sequence: Synthetic oligonucleotide
gaaucucagaagcccuggg

SEQ ID NO: 2558866 - RNA, 19 nt, Artificial Sequence
  Description of Artificial Sequence: Synthetic oligonucleotide
guuuguuuccaacaccauc

SEQ ID NO: 2558867 - RNA, 19 nt, Artificial Sequence
  Description of Artificial Sequence: Synthetic oligonucleotide
gaaagucucucgaacaauc

SEQ ID NO: 2558868 - RNA, 19 nt, Artificial Sequence
  Description of Artificial Sequence: Synthetic oligonucleotide
agcagugugcacucaaacu

SEQ ID NO: 2558869 - RNA, 19 nt, Artificial Sequence
  Description of Artificial Sequence: Synthetic oligonucleotide
caauuugagccacaauuuc

SEQ ID NO: 2558870 - RNA, 19 nt, Artificial Sequence
  Description of Artificial Sequence: Synthetic oligonucleotide
agaucccaaguucacucuc

SEQ ID NO: 2558871 - RNA, 19 nt, Artificial Sequence
  Description of Artificial Sequence: Synthetic oligonucleotide
ucucuugcccacugaauga

SEQ ID NO: 2558872 - RNA, 19 nt, Artificial Sequence
  Description of Artificial Sequence: Synthetic oligonucleotide
caagguggcauagugccgg

SEQ ID NO: 2558873 - RNA, 19 nt, Artificial Sequence
  Description of Artificial Sequence: Synthetic oligonucleotide
auguuuguuuccaacacca

SEQ ID NO: 2558874 - RNA, 19 nt, Artificial Sequence
  Description of Artificial Sequence: Synthetic oligonucleotide
accuucuaagaaauuacag

SEQ ID NO: 2558875 - RNA, 19 nt, Artificial Sequence
  Description of Artificial Sequence: Synthetic oligonucleotide
ugaggcagcuguguguggg

SEQ ID NO: 2558876 - RNA, 19 nt, Artificial Sequence
  Description of Artificial Sequence: Synthetic oligonucleotide
uagucagcaccaccaauga

SEQ ID NO: 2558877 - RNA, 19 nt, Artificial Sequence
  Description of Artificial Sequence: Synthetic oligonucleotide
gcuguugaauuucuucugg

SEQ ID NO: 2558878 - RNA, 19 nt, Artificial Sequence
  Description of Artificial Sequence: Synthetic oligonucleotide
ugacacaccuggcaucuga

SEQ ID NO: 2558879 - RNA, 19 nt, Artificial Sequence
  Description of Artificial Sequence: Synthetic oligonucleotide
uccaccuucuaagaaauua

SEQ ID NO: 2558880 - RNA, 19 nt, Artificial Sequence
  Description of Artificial Sequence: Synthetic oligonucleotide
aggcucaguguccagaggu

SEQ ID NO: 2558881 - RNA, 19 nt, Artificial Sequence
  Description of Artificial Sequence: Synthetic oligonucleotide
guuuguagucagcaccacc

SEQ ID NO: 2558882 - RNA, 19 nt, Artificial Sequence
  Description of Artificial Sequence: Synthetic oligonucleotide
ugaugucuacuacagccau

SEQ ID NO: 2558883 - RNA, 19 nt, Artificial Sequence
  Description of Artificial Sequence: Synthetic oligonucleotide
acuuauccagagucuccac

SEQ ID NO: 2558884 - RNA, 19 nt, Artificial Sequence
  Description of Artificial Sequence: Synthetic oligonucleotide
aaugagacuuccaccuucu

SEQ ID NO: 2558885 - RNA, 19 nt, Artificial Sequence
  Description of Artificial Sequence: Synthetic oligonucleotide
uccaagaucccaaguucac

SEQ ID NO: 2558886 - RNA, 19 nt, Artificial Sequence
  Description of Artificial Sequence: Synthetic oligonucleotide
caccaaugagacuuccacc

SEQ ID NO: 2558887 - RNA, 19 nt, Artificial Sequence
  Description of Artificial Sequence: Synthetic oligonucleotide
cugaaugauacagaaucuc

SEQ ID NO: 2558888 - RNA, 19 nt, Artificial Sequence
  Description of Artificial Sequence: Synthetic oligonucleotide
aaagucucucgaacaaucu

SEQ ID NO: 2558889 - RNA, 19 nt, Artificial Sequence
  Description of Artificial Sequence: Synthetic oligonucleotide
aaaaccuggaugaggucca

SEQ ID NO: 2558890 - RNA, 19 nt, Artificial Sequence
  Description of Artificial Sequence: Synthetic oligonucleotide
ucucccuggucucuugccc

SEQ ID NO: 2558891 - RNA, 19 nt, Artificial Sequence
  Description of Artificial Sequence: Synthetic oligonucleotide
cuggcaucugaaaggcugg

SEQ ID NO: 2558892 - RNA, 19 nt, Artificial Sequence
  Description of Artificial Sequence: Synthetic oligonucleotide
agcaggauggacaagcagu

SEQ ID NO: 2558893 - RNA, 19 nt, Artificial Sequence
  Description of Artificial Sequence: Synthetic oligonucleotide
caaagaagcaguggcuuag

SEQ ID NO: 2558894 - RNA, 19 nt, Artificial Sequence
  Description of Artificial Sequence: Synthetic oligonucleotide
acacuuauccagagucucc

SEQ ID NO: 2558895 - RNA, 19 nt, Artificial Sequence
  Description of Artificial Sequence: Synthetic oligonucleotide
gucagcaccaccaaugaga

SEQ ID NO: 2558896 - RNA, 19 nt, Artificial Sequence
  Description of Artificial Sequence: Synthetic oligonucleotide
ggcccugagaagcaggugg

SEQ ID NO: 2558897 - RNA, 19 nt, Artificial Sequence
  Description of Artificial Sequence: Synthetic oligonucleotide
caucccacccaucaccacc

SEQ ID NO: 2558898 - RNA, 19 nt, Artificial Sequence
  Description of Artificial Sequence: Synthetic oligonucleotide
uguuuccaacaccauccca

SEQ ID NO: 2558899 - RNA, 19 nt, Artificial Sequence
  Description of Artificial Sequence: Synthetic oligonucleotide
ugugcacucaaacucccuu

SEQ ID NO: 2558900 - RNA, 19 nt, Artificial Sequence
  Description of Artificial Sequence: Synthetic oligonucleotide
uugaaaggcucagugucca

SEQ ID NO: 2558901 - RNA, 19 nt, Artificial Sequence
  Description of Artificial Sequence: Synthetic oligonucleotide
auggacaagcagugugcac

SEQ ID NO: 2558902 - RNA, 19 nt, Artificial Sequence
  Description of Artificial Sequence: Synthetic oligonucleotide
uucccacucuuugaaaggc

SEQ ID NO: 2558903 - RNA, 19 nt, Artificial Sequence
  Description of Artificial Sequence: Synthetic oligonucleotide
ugucaucucgcuugaggac

SEQ ID NO: 2558904 - RNA, 19 nt, Artificial Sequence
  Description of Artificial Sequence: Synthetic oligonucleotide
cauacauuuucaaaacacu

SEQ ID NO: 2558905 - RNA, 19 nt, Artificial Sequence
  Description of Artificial Sequence: Synthetic oligonucleotide
gucaucucgcuugaggacc

SEQ ID NO: 2558906 - RNA, 19 nt, Artificial Sequence
  Description of Artificial Sequence: Synthetic oligonucleotide
gaggugcgacuccagaggc

SEQ ID NO: 2558907 - RNA, 19 nt, Artificial Sequence
  Description of Artificial Sequence: Synthetic oligonucleotide
accagauggaaagucucuc

SEQ ID NO: 2558908 - RNA, 19 nt, Artificial Sequence
  Description of Artificial Sequence: Synthetic oligonucleotide
ucucgcuugaggaccagau

SEQ ID NO: 2558909 - RNA, 19 nt, Artificial Sequence
  Description of Artificial Sequence: Synthetic oligonucleotide
gcaucugaaaggcuggccc

SEQ ID NO: 2558910 - RNA, 19 nt, Artificial Sequence
  Description of Artificial Sequence: Synthetic oligonucleotide
agcccugggugcuagggag

SEQ ID NO: 2558911 - RNA, 19 nt, Artificial Sequence
  Description of Artificial Sequence: Synthetic oligonucleotide
cagaggugcgacuccagag

SEQ ID NO: 2558912 - RNA, 19 nt, Artificial Sequence
  Description of Artificial Sequence: Synthetic oligonucleotide
agaggcuccccucugacuu

SEQ ID NO: 2558913 - RNA, 19 nt, Artificial Sequence
  Description of Artificial Sequence: Synthetic oligonucleotide
gcagugugcacucaaacuc

SEQ ID NO: 2558914 - RNA, 19 nt, Artificial Sequence
  Description of Artificial Sequence: Synthetic oligonucleotide
uagugcaccuuauccauau

SEQ ID NO: 2558915 - RNA, 19 nt, Artificial Sequence
  Description of Artificial Sequence: Synthetic oligonucleotide
aguggcuuagugcacugau

SEQ ID NO: 2558916 - RNA, 19 nt, Artificial Sequence
  Description of Artificial Sequence: Synthetic oligonucleotide
auuugagccacaauuucau

SEQ ID NO: 2558917 - RNA, 19 nt, Artificial Sequence
  Description of Artificial Sequence: Synthetic oligonucleotide
gaagcccugggugcuaggg

SEQ ID NO: 2558918 - RNA, 19 nt, Artificial Sequence
  Description of Artificial Sequence: Synthetic oligonucleotide
agguccaagaucccaaguu

SEQ ID NO: 2558919 - RNA, 19 nt, Artificial Sequence
  Description of Artificial Sequence: Synthetic oligonucleotide
acugaaugauacagaaucu

SEQ ID NO: 2558920 - RNA, 19 nt, Artificial Sequence
  Description of Artificial Sequence: Synthetic oligonucleotide
auccauauggaagaucaaa

SEQ ID NO: 2558921 - RNA, 19 nt, Artificial Sequence
  Description of Artificial Sequence: Synthetic oligonucleotide
cugaaggauguagugcacc

SEQ ID NO: 2558922 - RNA, 19 nt, Artificial Sequence
  Description of Artificial Sequence: Synthetic oligonucleotide
ccuucuaagaaauuacaga

SEQ ID NO: 2558923 - RNA, 19 nt, Artificial Sequence
  Description of Artificial Sequence: Synthetic oligonucleotide
agauggaaagucucucgaa

SEQ ID NO: 2558924 - RNA, 19 nt, Artificial Sequence
  Description of Artificial Sequence: Synthetic oligonucleotide
acaccaucccacccaucac

SEQ ID NO: 2558925 - RNA, 19 nt, Artificial Sequence
  Description of Artificial Sequence: Synthetic oligonucleotide
gucuacuacagccaugugu

SEQ ID NO: 2558926 - RNA, 19 nt, Artificial Sequence
  Description of Artificial Sequence: Synthetic oligonucleotide
uacaaaguacaagguggca

SEQ ID NO: 2558927 - RNA, 19 nt, Artificial Sequence
  Description of Artificial Sequence: Synthetic oligonucleotide
uggucucuugcccacugaa

SEQ ID NO: 2558928 - RNA, 19 nt, Artificial Sequence
  Description of Artificial Sequence: Synthetic oligonucleotide
uuccacaguccccaacccu

SEQ ID NO: 2558929 - RNA, 19 nt, Artificial Sequence
  Description of Artificial Sequence: Synthetic oligonucleotide
gguggcuuguuccacaguc

SEQ ID NO: 2558930 - RNA, 19 nt, Artificial Sequence
  Description of Artificial Sequence: Synthetic oligonucleotide
auccagagucuccacaaaa

SEQ ID NO: 2558931 - RNA, 19 nt, Artificial Sequence
  Description of Artificial Sequence: Synthetic oligonucleotide
agucagcaccaccaaugag

SEQ ID NO: 2558932 - RNA, 19 nt, Artificial Sequence
  Description of Artificial Sequence: Synthetic oligonucleotide
guaucagagagcagcagga

SEQ ID NO: 2558933 - RNA, 19 nt, Artificial Sequence
  Description of Artificial Sequence: Synthetic oligonucleotide
cagaaucucagaagcccug

SEQ ID NO: 2558934 - RNA, 19 nt, Artificial Sequence
  Description of Artificial Sequence: Synthetic oligonucleotide
agacuuccaccuucuaaga

SEQ ID NO: 2558935 - RNA, 19 nt, Artificial Sequence
  Description of Artificial Sequence: Synthetic oligonucleotide
caaaguacaagguggcaua

SEQ ID NO: 2558936 - RNA, 19 nt, Artificial Sequence
  Description of Artificial Sequence: Synthetic oligonucleotide
guacaagguggcauagugc

SEQ ID NO: 2558937 - RNA, 19 nt, Artificial Sequence
  Description of Artificial Sequence: Synthetic oligonucleotide
uauccauauggaagaucaa

SEQ ID NO: 2558938 - RNA, 19 nt, Artificial Sequence
  Description of Artificial Sequence: Synthetic oligonucleotide
cucucgaacaaucugcugu

SEQ ID NO: 2558939 - RNA, 19 nt, Artificial Sequence
  Description of Artificial Sequence: Synthetic oligonucleotide
uguccagaggugcgacucc

SEQ ID NO: 2558940 - RNA, 19 nt, Artificial Sequence
  Description of Artificial Sequence: Synthetic oligonucleotide
uucagucucgguggcgggg

SEQ ID NO: 2558941 - RNA, 19 nt, Artificial Sequence
  Description of Artificial Sequence: Synthetic oligonucleotide
gugggaggcaaagaagcag

SEQ ID NO: 2558942 - RNA, 19 nt, Artificial Sequence
  Description of Artificial Sequence: Synthetic oligonucleotide
ucucucgaacaaucugcug

SEQ ID NO: 2558943 - RNA, 19 nt, Artificial Sequence
  Description of Artificial Sequence: Synthetic oligonucleotide
uacuacagccauguguauc

SEQ ID NO: 2558944 - RNA, 19 nt, Artificial Sequence
  Description of Artificial Sequence: Synthetic oligonucleotide
ccaauucacauacauuuuc

SEQ ID NO: 2558945 - RNA, 19 nt, Artificial Sequence
  Description of Artificial Sequence: Synthetic oligonucleotide
caccuucuaagaaauuaca

SEQ ID NO: 2558946 - RNA, 19 nt, Artificial Sequence
  Description of Artificial Sequence: Synthetic oligonucleotide
ugaaaggcucaguguccag

SEQ ID NO: 2558947 - RNA, 19 nt, Artificial Sequence
  Description of Artificial Sequence: Synthetic oligonucleotide
uuguagucagcaccaccaa

SEQ ID NO: 2558948 - RNA, 19 nt, Artificial Sequence
  Description of Artificial Sequence: Synthetic oligonucleotide
ccauauggaagaucaaauc

SEQ ID NO: 2558949 - RNA, 19 nt, Artificial Sequence
  Description of Artificial Sequence: Synthetic oligonucleotide
ccagauggaaagucucucg

SEQ ID NO: 2558950 - RNA, 19 nt, Artificial Sequence
  Description of Artificial Sequence: Synthetic oligonucleotide
cacucuuugaaaggcucag

SEQ ID NO: 2558951 - RNA, 19 nt, Artificial Sequence
  Description of Artificial Sequence: Synthetic oligonucleotide
ccuucccacucuuugaaag

SEQ ID NO: 2558952 - RNA, 19 nt, Artificial Sequence
  Description of Artificial Sequence: Synthetic oligonucleotide
ugccgguaaaucaguuugu

SEQ ID NO: 2558953 - RNA, 19 nt, Artificial Sequence
  Description of Artificial Sequence: Synthetic oligonucleotide
aucccaaguucacucucug

SEQ ID NO: 2558954 - RNA, 19 nt, Artificial Sequence
  Description of Artificial Sequence: Synthetic oligonucleotide
gaaaggcucaguguccaga

SEQ ID NO: 2558955 - RNA, 19 nt, Artificial Sequence
  Description of Artificial Sequence: Synthetic oligonucleotide
cugggugcuagggaggaag

SEQ ID NO: 2558956 - RNA, 19 nt, Artificial Sequence
  Description of Artificial Sequence: Synthetic oligonucleotide
cuuauccauauggaagauc

SEQ ID NO: 2558957 - RNA, 19 nt, Artificial Sequence
  Description of Artificial Sequence: Synthetic oligonucleotide
gauggacaagcagugugca

SEQ ID NO: 2558958 - RNA, 19 nt, Artificial Sequence
  Description of Artificial Sequence: Synthetic oligonucleotide
ucccacucuuugaaaggcu

SEQ ID NO: 2558959 - RNA, 19 nt, Artificial Sequence
  Description of Artificial Sequence: Synthetic oligonucleotide
aagcccugggugcuaggga

SEQ ID NO: 2558960 - RNA, 19 nt, Artificial Sequence
  Description of Artificial Sequence: Synthetic oligonucleotide
cagauggaaagucucucga

SEQ ID NO: 2558961 - RNA, 19 nt, Artificial Sequence
  Description of Artificial Sequence: Synthetic oligonucleotide
caccuggcaucugaaaggc

SEQ ID NO: 2558962 - RNA, 19 nt, Artificial Sequence
  Description of Artificial Sequence: Synthetic oligonucleotide
agauguugucaucucgcuu

SEQ ID NO: 2558963 - RNA, 19 nt, Artificial Sequence
  Description of Artificial Sequence: Synthetic oligonucleotide
uagugcacugaugucuacu

SEQ ID NO: 2558964 - RNA, 19 nt, Artificial Sequence
  Description of Artificial Sequence: Synthetic oligonucleotide
guuccacaguccccaaccc

SEQ ID NO: 2558965 - RNA, 19 nt, Artificial Sequence
  Description of Artificial Sequence: Synthetic oligonucleotide
gugcuagggaggaagucag

SEQ ID NO: 2558966 - RNA, 19 nt, Artificial Sequence
  Description of Artificial Sequence: Synthetic oligonucleotide
agugccgguaaaucaguuu

SEQ ID NO: 2558967 - RNA, 19 nt, Artificial Sequence
  Description of Artificial Sequence: Synthetic oligonucleotide
ucaguguccagaggugcga

SEQ ID NO: 2558968 - RNA, 19 nt, Artificial Sequence
  Description of Artificial Sequence: Synthetic oligonucleotide
cacucaaacucccuuccca

SEQ ID NO: 2558969 - RNA, 19 nt, Artificial Sequence
  Description of Artificial Sequence: Synthetic oligonucleotide
agauguguucagucucggu

SEQ ID NO: 2558970 - RNA, 19 nt, Artificial Sequence
  Description of Artificial Sequence: Synthetic oligonucleotide
uccagaggcuccccucuga

SEQ ID NO: 2558971 - RNA, 19 nt, Artificial Sequence
  Description of Artificial Sequence: Synthetic oligonucleotide
uccagaggugcgacuccag

SEQ ID NO: 2558972 - RNA, 19 nt, Artificial Sequence
  Description of Artificial Sequence: Synthetic oligonucleotide
cuuagugcacugaugucua

SEQ ID NO: 2558973 - RNA, 19 nt, Artificial Sequence
  Description of Artificial Sequence: Synthetic oligonucleotide
cauguguaucagagagcag

SEQ ID NO: 2558974 - RNA, 19 nt, Artificial Sequence
  Description of Artificial Sequence: Synthetic oligonucleotide
aagcaguggcuuagugcac

SEQ ID NO: 2558975 - RNA, 19 nt, Artificial Sequence
  Description of Artificial Sequence: Synthetic oligonucleotide
ccaccaaugagacuuccac

SEQ ID NO: 2558976 - RNA, 19 nt, Artificial Sequence
  Description of Artificial Sequence: Synthetic oligonucleotide
cacugaugucuacuacagc

SEQ ID NO: 2558977 - RNA, 19 nt, Artificial Sequence
  Description of Artificial Sequence: Synthetic oligonucleotide
ggaggcaaagaagcagugg

SEQ ID NO: 2558978 - RNA, 19 nt, Artificial Sequence
  Description of Artificial Sequence: Synthetic oligonucleotide
gcauagugccgguaaauca

SEQ ID NO: 2558979 - RNA, 19 nt, Artificial Sequence
  Description of Artificial Sequence: Synthetic oligonucleotide
ucagucucgguggcggggc

SEQ ID NO: 2558980 - RNA, 19 nt, Artificial Sequence
  Description of Artificial Sequence: Synthetic oligonucleotide
ggauggacaagcagugugc

SEQ ID NO: 2558981 - RNA, 19 nt, Artificial Sequence
  Description of Artificial Sequence: Synthetic oligonucleotide
acaagguggcauagugccg

SEQ ID NO: 2558982 - RNA, 19 nt, Artificial Sequence
  Description of Artificial Sequence: Synthetic oligonucleotide
ugggugcuagggaggaagu

SEQ ID NO: 2558983 - RNA, 19 nt, Artificial Sequence
  Description of Artificial Sequence: Synthetic oligonucleotide
ugucuacuacagccaugug

SEQ ID NO: 2558984 - RNA, 19 nt, Artificial Sequence
  Description of Artificial Sequence: Synthetic oligonucleotide
uuagugcacugaugucuac

SEQ ID NO: 2558985 - RNA, 19 nt, Artificial Sequence
  Description of Artificial Sequence: Synthetic oligonucleotide
guccaagaucccaaguuca

SEQ ID NO: 2558986 - RNA, 19 nt, Artificial Sequence
  Description of Artificial Sequence: Synthetic oligonucleotide
uggcggggcccugagaagc

SEQ ID NO: 2558987 - RNA, 19 nt, Artificial Sequence
  Description of Artificial Sequence: Synthetic oligonucleotide
uaucagagagcagcaggau

SEQ ID NO: 2558988 - RNA, 19 nt, Artificial Sequence
  Description of Artificial Sequence: Synthetic oligonucleotide
cagauguguucagucucgg

SEQ ID NO: 2558989 - RNA, 19 nt, Artificial Sequence
  Description of Artificial Sequence: Synthetic oligonucleotide
aaacucccuucccacucuu

SEQ ID NO: 2558990 - RNA, 19 nt, Artificial Sequence
  Description of Artificial Sequence: Synthetic oligonucleotide
agugcaccuuauccauaug

SEQ ID NO: 2558991 - RNA, 19 nt, Artificial Sequence
  Description of Artificial Sequence: Synthetic oligonucleotide
agcaguggcuuagugcacu

SEQ ID NO: 2558992 - RNA, 19 nt, Artificial Sequence
  Description of Artificial Sequence: Synthetic oligonucleotide
ugcuagggaggaagucaga

SEQ ID NO: 2558993 - RNA, 19 nt, Artificial Sequence
  Description of Artificial Sequence: Synthetic oligonucleotide
acuaucucugcagcccuga

SEQ ID NO: 2558994 - RNA, 19 nt, Artificial Sequence
  Description of Artificial Sequence: Synthetic oligonucleotide
aagguggcauagugccggu

SEQ ID NO: 2558995 - RNA, 19 nt, Artificial Sequence
  Description of Artificial Sequence: Synthetic oligonucleotide
gacuccagaggcuccccuc

SEQ ID NO: 2558996 - RNA, 19 nt, Artificial Sequence
  Description of Artificial Sequence: Synthetic oligonucleotide
ggugcuagggaggaaguca

SEQ ID NO: 2558997 - RNA, 19 nt, Artificial Sequence
  Description of Artificial Sequence: Synthetic oligonucleotide
ccauguguaucagagagca

SEQ ID NO: 2558998 - RNA, 19 nt, Artificial Sequence
  Description of Artificial Sequence: Synthetic oligonucleotide
ccgguaaaucaguuuguag

SEQ ID NO: 2558999 - RNA, 19 nt, Artificial Sequence
  Description of Artificial Sequence: Synthetic oligonucleotide
cccucugacuucuccagcc

SEQ ID NO: 2559000 - RNA, 19 nt, Artificial Sequence
  Description of Artificial Sequence: Synthetic oligonucleotide
gugcacugaugucuacuac

SEQ ID NO: 2559001 - RNA, 19 nt, Artificial Sequence
  Description of Artificial Sequence: Synthetic oligonucleotide
agccacaauuucauucaug

SEQ ID NO: 2559002 - RNA, 19 nt, Artificial Sequence
  Description of Artificial Sequence: Synthetic oligonucleotide
agucucgguggcggggccc

SEQ ID NO: 2559003 - RNA, 19 nt, Artificial Sequence
  Description of Artificial Sequence: Synthetic oligonucleotide
ccuguuuugagcuucaauu

SEQ ID NO: 2559004 - RNA, 19 nt, Artificial Sequence
  Description of Artificial Sequence: Synthetic oligonucleotide
cuguuuugagcuucaauuu

SEQ ID NO: 2559005 - RNA, 19 nt, Artificial Sequence
  Description of Artificial Sequence: Synthetic oligonucleotide
uguugucaucucgcuugag

SEQ ID NO: 2559006 - RNA, 19 nt, Artificial Sequence
  Description of Artificial Sequence: Synthetic oligonucleotide
cuuccaccuucuaagaaau

SEQ ID NO: 2559007 - RNA, 19 nt, Artificial Sequence
  Description of Artificial Sequence: Synthetic oligonucleotide
uggcauagugccgguaaau

SEQ ID NO: 2559008 - RNA, 19 nt, Artificial Sequence
  Description of Artificial Sequence: Synthetic oligonucleotide
guggcuuagugcacugaug

SEQ ID NO: 2559009 - RNA, 19 nt, Artificial Sequence
  Description of Artificial Sequence: Synthetic oligonucleotide
augagguccaagaucccaa

SEQ ID NO: 2559010 - RNA, 19 nt, Artificial Sequence
  Description of Artificial Sequence: Synthetic oligonucleotide
acucuuugaaaggcucagu

SEQ ID NO: 2559011 - RNA, 19 nt, Artificial Sequence
  Description of Artificial Sequence: Synthetic oligonucleotide
uagugccgguaaaucaguu

SEQ ID NO: 2559012 - RNA, 19 nt, Artificial Sequence
  Description of Artificial Sequence: Synthetic oligonucleotide
gaacaaucugcuguugaau

SEQ ID NO: 2559013 - RNA, 19 nt, Artificial Sequence
  Description of Artificial Sequence: Synthetic oligonucleotide
gguggcauagugccgguaa

SEQ ID NO: 2559014 - RNA, 19 nt, Artificial Sequence
  Description of Artificial Sequence: Synthetic oligonucleotide
cuaucucugcagcccugac

SEQ ID NO: 2559015 - RNA, 19 nt, Artificial Sequence
  Description of Artificial Sequence: Synthetic oligonucleotide
acccaucaccaccuccuga

SEQ ID NO: 2559016 - RNA, 19 nt, Artificial Sequence
  Description of Artificial Sequence: Synthetic oligonucleotide
gguggcggggcccugagaa

SEQ ID NO: 2559017 - RNA, 19 nt, Artificial Sequence
  Description of Artificial Sequence: Synthetic oligonucleotide
ggauguagugcaccuuauc

SEQ ID NO: 2559018 - RNA, 19 nt, Artificial Sequence
  Description of Artificial Sequence: Synthetic oligonucleotide
ggcagcugugugugggagg

SEQ ID NO: 2559019 - RNA, 19 nt, Artificial Sequence
  Description of Artificial Sequence: Synthetic oligonucleotide
cacuaucucugcagcccug

SEQ ID NO: 2559020 - RNA, 19 nt, Artificial Sequence
  Description of Artificial Sequence: Synthetic oligonucleotide
gcuuguuccacagucccca

SEQ ID NO: 2559021 - RNA, 19 nt, Artificial Sequence
  Description of Artificial Sequence: Synthetic oligonucleotide
cccacugaaugauacagaa

SEQ ID NO: 2559022 - RNA, 19 nt, Artificial Sequence
  Description of Artificial Sequence: Synthetic oligonucleotide
gaccugccacuugacacac

SEQ ID NO: 2559023 - RNA, 19 nt, Artificial Sequence
  Description of Artificial Sequence: Synthetic oligonucleotide
gcuuagugcacugaugucu

SEQ ID NO: 2559024 - RNA, 19 nt, Artificial Sequence
  Description of Artificial Sequence: Synthetic oligonucleotide
caagcagugugcacucaaa

SEQ ID NO: 2559025 - RNA, 19 nt, Artificial Sequence
  Description of Artificial Sequence: Synthetic oligonucleotide
gcaccuuauccauauggaa

SEQ ID NO: 2559026 - RNA, 19 nt, Artificial Sequence
  Description of Artificial Sequence: Synthetic oligonucleotide
ugacuucuccagccuguuu

SEQ ID NO: 2559027 - RNA, 19 nt, Artificial Sequence
  Description of Artificial Sequence: Synthetic oligonucleotide
aucccacccaucaccaccu

SEQ ID NO: 2559028 - RNA, 19 nt, Artificial Sequence
  Description of Artificial Sequence: Synthetic oligonucleotide
ggcauagugccgguaaauc

SEQ ID NO: 2559029 - RNA, 19 nt, Artificial Sequence
  Description of Artificial Sequence: Synthetic oligonucleotide
cuugacacaccuggcaucu

SEQ ID NO: 2559030 - RNA, 19 nt, Artificial Sequence
  Description of Artificial Sequence: Synthetic oligonucleotide
ucgguggcggggcccugag

SEQ ID NO: 2559031 - RNA, 19 nt, Artificial Sequence
  Description of Artificial Sequence: Synthetic oligonucleotide
guguucagucucgguggcg

SEQ ID NO: 2559032 - RNA, 19 nt, Artificial Sequence
  Description of Artificial Sequence: Synthetic oligonucleotide
cucgaacaaucugcuguug

SEQ ID NO: 2559033 - RNA, 19 nt, Artificial Sequence
  Description of Artificial Sequence: Synthetic oligonucleotide
cuccccucugacuucucca

SEQ ID NO: 2559034 - RNA, 19 nt, Artificial Sequence
  Description of Artificial Sequence: Synthetic oligonucleotide
ggacaagcagugugcacuc

SEQ ID NO: 2559035 - RNA, 19 nt, Artificial Sequence
  Description of Artificial Sequence: Synthetic oligonucleotide
cgguaaaucaguuuguagu

SEQ ID NO: 2559036 - RNA, 19 nt, Artificial Sequence
  Description of Artificial Sequence: Synthetic oligonucleotide
auggaagaucaaauccaau

SEQ ID NO: 2559037 - RNA, 19 nt, Artificial Sequence
  Description of Artificial Sequence: Synthetic oligonucleotide
ggugcgacuccagaggcuc

SEQ ID NO: 2559038 - RNA, 19 nt, Artificial Sequence
  Description of Artificial Sequence: Synthetic oligonucleotide
uuccaccuucuaagaaauu

SEQ ID NO: 2559039 - RNA, 19 nt, Artificial Sequence
  Description of Artificial Sequence: Synthetic oligonucleotide
caucugaaaggcuggcccu

SEQ ID NO: 2559040 - RNA, 19 nt, Artificial Sequence
  Description of Artificial Sequence: Synthetic oligonucleotide
cuacagccauguguaucag

SEQ ID NO: 2559041 - RNA, 19 nt, Artificial Sequence
  Description of Artificial Sequence: Synthetic oligonucleotide
gaucccaaguucacucucu

SEQ ID NO: 2559042 - RNA, 19 nt, Artificial Sequence
  Description of Artificial Sequence: Synthetic oligonucleotide
ucucugcagcccugaccug

SEQ ID NO: 2559043 - RNA, 19 nt, Artificial Sequence
  Description of Artificial Sequence: Synthetic oligonucleotide
agcccugaccugccacuug

SEQ ID NO: 2559044 - RNA, 19 nt, Artificial Sequence
  Description of Artificial Sequence: Synthetic oligonucleotide
gcacucaaacucccuuccc

SEQ ID NO: 2559045 - RNA, 19 nt, Artificial Sequence
  Description of Artificial Sequence: Synthetic oligonucleotide
caccaccaaugagacuucc

SEQ ID NO: 2559046 - RNA, 19 nt, Artificial Sequence
  Description of Artificial Sequence: Synthetic oligonucleotide
gaggcuccccucugacuuc

SEQ ID NO: 2559047 - RNA, 19 nt, Artificial Sequence
  Description of Artificial Sequence: Synthetic oligonucleotide
cagauguugucaucucgcu

SEQ ID NO: 2559048 - RNA, 19 nt, Artificial Sequence
  Description of Artificial Sequence: Synthetic oligonucleotide
ggcaucugaaaggcuggcc

SEQ ID NO: 2559049 - RNA, 19 nt, Artificial Sequence
  Description of Artificial Sequence: Synthetic oligonucleotide
uccagccuguuuugagcuu

SEQ ID NO: 2559050 - RNA, 19 nt, Artificial Sequence
  Description of Artificial Sequence: Synthetic oligonucleotide
gccauguguaucagagagc

SEQ ID NO: 2559051 - RNA, 19 nt, Artificial Sequence
  Description of Artificial Sequence: Synthetic oligonucleotide
aucugaaaggcuggcccuu

SEQ ID NO: 2559052 - RNA, 19 nt, Artificial Sequence
  Description of Artificial Sequence: Synthetic oligonucleotide
caguguccagaggugcgac

SEQ ID NO: 2559053 - RNA, 19 nt, Artificial Sequence
  Description of Artificial Sequence: Synthetic oligonucleotide
uugacacaccuggcaucug

SEQ ID NO: 2559054 - RNA, 19 nt, Artificial Sequence
  Description of Artificial Sequence: Synthetic oligonucleotide
cucaaacucccuucccacu

SEQ ID NO: 2559055 - RNA, 19 nt, Artificial Sequence
  Description of Artificial Sequence: Synthetic oligonucleotide
cagccauguguaucagaga

SEQ ID NO: 2559056 - RNA, 19 nt, Artificial Sequence
  Description of Artificial Sequence: Synthetic oligonucleotide
agguggcuuguuccacagu

SEQ ID NO: 2559057 - RNA, 19 nt, Artificial Sequence
  Description of Artificial Sequence: Synthetic oligonucleotide
aggauguagugcaccuuau

SEQ ID NO: 2559058 - RNA, 19 nt, Artificial Sequence
  Description of Artificial Sequence: Synthetic oligonucleotide
ggcuuagugcacugauguc

SEQ ID NO: 2559059 - RNA, 19 nt, Artificial Sequence
  Description of Artificial Sequence: Synthetic oligonucleotide
gucucucgaacaaucugcu

SEQ ID NO: 2559060 - RNA, 19 nt, Artificial Sequence
  Description of Artificial Sequence: Synthetic oligonucleotide
augagacuuccaccuucua

SEQ ID NO: 2559061 - RNA, 19 nt, Artificial Sequence
  Description of Artificial Sequence: Synthetic oligonucleotide
aucucgcuugaggaccaga

SEQ ID NO: 2559062 - RNA, 19 nt, Artificial Sequence
  Description of Artificial Sequence: Synthetic oligonucleotide
gacaagcagugugcacuca

SEQ ID NO: 2559063 - RNA, 19 nt, Artificial Sequence
  Description of Artificial Sequence: Synthetic oligonucleotide
guccagaggugcgacucca

SEQ ID NO: 2559064 - RNA, 19 nt, Artificial Sequence
  Description of Artificial Sequence: Synthetic oligonucleotide
ucagaagcccugggugcua

SEQ ID NO: 2559065 - RNA, 19 nt, Artificial Sequence
  Description of Artificial Sequence: Synthetic oligonucleotide
ggcuuguuccacagucccc

SEQ ID NO: 2559066 - RNA, 19 nt, Artificial Sequence
  Description of Artificial Sequence: Synthetic oligonucleotide
caacaccaucccacccauc

SEQ ID NO: 2559067 - RNA, 19 nt, Artificial Sequence
  Description of Artificial Sequence: Synthetic oligonucleotide
cagucucgguggcggggcc

SEQ ID NO: 2559068 - RNA, 19 nt, Artificial Sequence
  Description of Artificial Sequence: Synthetic oligonucleotide
aacucccuucccacucuuu

SEQ ID NO: 2559069 - RNA, 19 nt, Artificial Sequence
  Description of Artificial Sequence: Synthetic oligonucleotide
cagccuguuuugagcuuca

SEQ ID NO: 2559070 - RNA, 19 nt, Artificial Sequence
  Description of Artificial Sequence: Synthetic oligonucleotide
gcccugaccugccacuuga

SEQ ID NO: 2559071 - RNA, 19 nt, Artificial Sequence
  Description of Artificial Sequence: Synthetic oligonucleotide
aggcuccccucugacuucu

SEQ ID NO: 2559072 - RNA, 19 nt, Artificial Sequence
  Description of Artificial Sequence: Synthetic oligonucleotide
gggaggaagucagaugugu

SEQ ID NO: 2559073 - RNA, 19 nt, Artificial Sequence
  Description of Artificial Sequence: Synthetic oligonucleotide
cuggucucuugcccacuga

SEQ ID NO: 2559074 - RNA, 19 nt, Artificial Sequence
  Description of Artificial Sequence: Synthetic oligonucleotide
ccagaggcuccccucugac

SEQ ID NO: 2559075 - RNA, 19 nt, Artificial Sequence
  Description of Artificial Sequence: Synthetic oligonucleotide
guagugcaccuuauccaua

SEQ ID NO: 2559076 - RNA, 19 nt, Artificial Sequence
  Description of Artificial Sequence: Synthetic oligonucleotide
ccuggucucuugcccacug

SEQ ID NO: 2559077 - RNA, 19 nt, Artificial Sequence
  Description of Artificial Sequence: Synthetic oligonucleotide
gaaggauguagugcaccuu

SEQ ID NO: 2559078 - RNA, 19 nt, Artificial Sequence
  Description of Artificial Sequence: Synthetic oligonucleotide
aggugcgacuccagaggcu

SEQ ID NO: 2559079 - RNA, 19 nt, Artificial Sequence
  Description of Artificial Sequence: Synthetic oligonucleotide
ggcaaagaagcaguggcuu

SEQ ID NO: 2559080 - RNA, 19 nt, Artificial Sequence
  Description of Artificial Sequence: Synthetic oligonucleotide
gcuugaggaccagauggaa

SEQ ID NO: 2559081 - RNA, 19 nt, Artificial Sequence
  Description of Artificial Sequence: Synthetic oligonucleotide
gcuagggaggaagucagau

SEQ ID NO: 2559082 - RNA, 19 nt, Artificial Sequence
  Description of Artificial Sequence: Synthetic oligonucleotide
cucagaagcccugggugcu

SEQ ID NO: 2559083 - RNA, 19 nt, Artificial Sequence
  Description of Artificial Sequence: Synthetic oligonucleotide
ccaacccugaggcagcugu

SEQ ID NO: 2559084 - RNA, 19 nt, Artificial Sequence
  Description of Artificial Sequence: Synthetic oligonucleotide
ggaaagucucucgaacaau

SEQ ID NO: 2559085 - RNA, 19 nt, Artificial Sequence
  Description of Artificial Sequence: Synthetic oligonucleotide
ccagaggugcgacuccaga

SEQ ID NO: 2559086 - RNA, 19 nt, Artificial Sequence
  Description of Artificial Sequence: Synthetic oligonucleotide
cucuugcccacugaaugau

SEQ ID NO: 2559087 - RNA, 19 nt, Artificial Sequence
  Description of Artificial Sequence: Synthetic oligonucleotide
gcccacugaaugauacaga

SEQ ID NO: 2559088 - RNA, 19 nt, Artificial Sequence
  Description of Artificial Sequence: Synthetic oligonucleotide
gccgguaaaucaguuugua

SEQ ID NO: 2559089 - RNA, 19 nt, Artificial Sequence
  Description of Artificial Sequence: Synthetic oligonucleotide
caguggcuuagugcacuga

SEQ ID NO: 2559090 - RNA, 19 nt, Artificial Sequence
  Description of Artificial Sequence: Synthetic oligonucleotide
gggugcuagggaggaaguc

SEQ ID NO: 2559091 - RNA, 19 nt, Artificial Sequence
  Description of Artificial Sequence: Synthetic oligonucleotide
agccuguuuugagcuucaa

SEQ ID NO: 2559092 - RNA, 19 nt, Artificial Sequence
  Description of Artificial Sequence: Synthetic oligonucleotide
gccuguuuugagcuucaau

SEQ ID NO: 2559093 - RNA, 19 nt, Artificial Sequence
  Description of Artificial Sequence: Synthetic oligonucleotide
cgcuugaggaccagaugga

SEQ ID NO: 2559094 - RNA, 19 nt, Artificial Sequence
  Description of Artificial Sequence: Synthetic oligonucleotide
ccacaguccccaacccuga

SEQ ID NO: 2559095 - RNA, 19 nt, Artificial Sequence
  Description of Artificial Sequence: Synthetic oligonucleotide
gcagcccugaccugccacu

SEQ ID NO: 2559096 - RNA, 19 nt, Artificial Sequence
  Description of Artificial Sequence: Synthetic oligonucleotide
ucucgguggcggggcccug

SEQ ID NO: 2559097 - RNA, 19 nt, Artificial Sequence
  Description of Artificial Sequence: Synthetic oligonucleotide
caggauggacaagcagugu

SEQ ID NO: 2559098 - RNA, 19 nt, Artificial Sequence
  Description of Artificial Sequence: Synthetic oligonucleotide
agguggcauagugccggua

SEQ ID NO: 2559099 - RNA, 19 nt, Artificial Sequence
  Description of Artificial Sequence: Synthetic oligonucleotide
ccuggaugagguccaagau

SEQ ID NO: 2559100 - RNA, 19 nt, Artificial Sequence
  Description of Artificial Sequence: Synthetic oligonucleotide
ccaagaucccaaguucacu

SEQ ID NO: 2559101 - RNA, 19 nt, Artificial Sequence
  Description of Artificial Sequence: Synthetic oligonucleotide
gcaccaccaaugagacuuc

SEQ ID NO: 2559102 - RNA, 19 nt, Artificial Sequence
  Description of Artificial Sequence: Synthetic oligonucleotide
ccacugaaugauacagaau

SEQ ID NO: 2559103 - RNA, 19 nt, Artificial Sequence
  Description of Artificial Sequence: Synthetic oligonucleotide
ggucucuugcccacugaau

SEQ ID NO: 2559104 - RNA, 19 nt, Artificial Sequence
  Description of Artificial Sequence: Synthetic oligonucleotide
cucgguggcggggcccuga

SEQ ID NO: 2559105 - RNA, 19 nt, Artificial Sequence
  Description of Artificial Sequence: Synthetic oligonucleotide
gcgacuccagaggcucccc

SEQ ID NO: 2559106 - RNA, 19 nt, Artificial Sequence
  Description of Artificial Sequence: Synthetic oligonucleotide
gucucgguggcggggcccu

SEQ ID NO: 2559107 - RNA, 19 nt, Artificial Sequence
  Description of Artificial Sequence: Synthetic oligonucleotide
ccaacaccaucccacccau

SEQ ID NO: 2559108 - RNA, 19 nt, Artificial Sequence
  Description of Artificial Sequence: Synthetic oligonucleotide
ggcggggcccugagaagca

SEQ ID NO: 2559109 - RNA, 19 nt, Artificial Sequence
  Description of Artificial Sequence: Synthetic oligonucleotide
cagcaccaccaaugagacu

SEQ ID NO: 2559110 - RNA, 19 nt, Artificial Sequence
  Description of Artificial Sequence: Synthetic oligonucleotide
cccugggugcuagggagga

SEQ ID NO: 2559111 - RNA, 19 nt, Artificial Sequence
  Description of Artificial Sequence: Synthetic oligonucleotide
cagcugugugugggaggca

SEQ ID NO: 2559112 - RNA, 19 nt, Artificial Sequence
  Description of Artificial Sequence: Synthetic oligonucleotide
ccaaugagacuuccaccuu

SEQ ID NO: 2559113 - RNA, 19 nt, Artificial Sequence
  Description of Artificial Sequence: Synthetic oligonucleotide
ccuuauccauauggaagau

SEQ ID NO: 2559114 - RNA, 19 nt, Artificial Sequence
  Description of Artificial Sequence: Synthetic oligonucleotide
cccaacccugaggcagcug

SEQ ID NO: 2559115 - RNA, 19 nt, Artificial Sequence
  Description of Artificial Sequence: Synthetic oligonucleotide
cagcccugaccugccacuu

SEQ ID NO: 2559116 - RNA, 19 nt, Artificial Sequence
  Description of Artificial Sequence: Synthetic oligonucleotide
cccuggucucuugcccacu

SEQ ID NO: 2559117 - RNA, 19 nt, Artificial Sequence
  Description of Artificial Sequence: Synthetic oligonucleotide
aacauauucaaugaggucc

SEQ ID NO: 2559118 - RNA, 19 nt, Artificial Sequence
  Description of Artificial Sequence: Synthetic oligonucleotide
agcauugcgguucagacgc

SEQ ID NO: 2559119 - RNA, 19 nt, Artificial Sequence
  Description of Artificial Sequence: Synthetic oligonucleotide
ugcaaagaauccaugaagg

SEQ ID NO: 2559120 - RNA, 19 nt, Artificial Sequence
  Description of Artificial Sequence: Synthetic oligonucleotide
guaaugaacauauucaaug

SEQ ID NO: 2559121 - RNA, 19 nt, Artificial Sequence
  Description of Artificial Sequence: Synthetic oligonucleotide
agguuugccacucugaugg

SEQ ID NO: 2559122 - RNA, 19 nt, Artificial Sequence
  Description of Artificial Sequence: Synthetic oligonucleotide
aaugaacauauucaaugag

SEQ ID NO: 2559123 - RNA, 19 nt, Artificial Sequence
  Description of Artificial Sequence: Synthetic oligonucleotide
auugaucuuauuccgaauc

SEQ ID NO: 2559124 - RNA, 19 nt, Artificial Sequence
  Description of Artificial Sequence: Synthetic oligonucleotide
uugauaguaauucuucuca

SEQ ID NO: 2559125 - RNA, 19 nt, Artificial Sequence
  Description of Artificial Sequence: Synthetic oligonucleotide
ugaacauauucaaugaggu

SEQ ID NO: 2559126 - RNA, 19 nt, Artificial Sequence
  Description of Artificial Sequence: Synthetic oligonucleotide
cuuugguguaucuugauag

SEQ ID NO: 2559127 - RNA, 19 nt, Artificial Sequence
  Description of Artificial Sequence: Synthetic oligonucleotide
aauucuucucaucccgggc

SEQ ID NO: 2559128 - RNA, 19 nt, Artificial Sequence
  Description of Artificial Sequence: Synthetic oligonucleotide
ucauucagcacauagggcu

SEQ ID NO: 2559129 - RNA, 19 nt, Artificial Sequence
  Description of Artificial Sequence: Synthetic oligonucleotide
uggguaaaagcgcuuauag

SEQ ID NO: 2559130 - RNA, 19 nt, Artificial Sequence
  Description of Artificial Sequence: Synthetic oligonucleotide
gguaaaagcgcuuauagac

SEQ ID NO: 2559131 - RNA, 19 nt, Artificial Sequence
  Description of Artificial Sequence: Synthetic oligonucleotide
uguaucuugauaguaauuc

SEQ ID NO: 2559132 - RNA, 19 nt, Artificial Sequence
  Description of Artificial Sequence: Synthetic oligonucleotide
uaaugaacauauucaauga

SEQ ID NO: 2559133 - RNA, 19 nt, Artificial Sequence
  Description of Artificial Sequence: Synthetic oligonucleotide
uuaccuuccucuuacggag

SEQ ID NO: 2559134 - RNA, 19 nt, Artificial Sequence
  Description of Artificial Sequence: Synthetic oligonucleotide
cauguaaugaacauauuca

SEQ ID NO: 2559135 - RNA, 19 nt, Artificial Sequence
  Description of Artificial Sequence: Synthetic oligonucleotide
aaaaccuggcuuugguuuc

SEQ ID NO: 2559136 - RNA, 19 nt, Artificial Sequence
  Description of Artificial Sequence: Synthetic oligonucleotide
uauucaaugaggucccgag

SEQ ID NO: 2559137 - RNA, 19 nt, Artificial Sequence
  Description of Artificial Sequence: Synthetic oligonucleotide
agacauugaucuuauuccg

SEQ ID NO: 2559138 - RNA, 19 nt, Artificial Sequence
  Description of Artificial Sequence: Synthetic oligonucleotide
cuuauaguccuccccaugg

SEQ ID NO: 2559139 - RNA, 19 nt, Artificial Sequence
  Description of Artificial Sequence: Synthetic oligonucleotide
uugggcaucgcgcagacug

SEQ ID NO: 2559140 - RNA, 19 nt, Artificial Sequence
  Description of Artificial Sequence: Synthetic oligonucleotide
uccaguagaccuaagugug

SEQ ID NO: 2559141 - RNA, 19 nt, Artificial Sequence
  Description of Artificial Sequence: Synthetic oligonucleotide
acucugauggguaaaagcg

SEQ ID NO: 2559142 - RNA, 19 nt, Artificial Sequence
  Description of Artificial Sequence: Synthetic oligonucleotide
aggggaaccgccuuguugg

SEQ ID NO: 2559143 - RNA, 19 nt, Artificial Sequence
  Description of Artificial Sequence: Synthetic oligonucleotide
aaagaauccaugaagguuu

SEQ ID NO: 2559144 - RNA, 19 nt, Artificial Sequence
  Description of Artificial Sequence: Synthetic oligonucleotide
augaacauauucaaugagg

SEQ ID NO: 2559145 - RNA, 19 nt, Artificial Sequence
  Description of Artificial Sequence: Synthetic oligonucleotide
ggucauucagcacauaggg

SEQ ID NO: 2559146 - RNA, 19 nt, Artificial Sequence
  Description of Artificial Sequence: Synthetic oligonucleotide
uguggucccaggcaugucg

SEQ ID NO: 2559147 - RNA, 19 nt, Artificial Sequence
  Description of Artificial Sequence: Synthetic oligonucleotide
aaagcgcuuauagacauug

SEQ ID NO: 2559148 - RNA, 19 nt, Artificial Sequence
  Description of Artificial Sequence: Synthetic oligonucleotide
uuuaccuuccucuuacgga

SEQ ID NO: 2559149 - RNA, 19 nt, Artificial Sequence
  Description of Artificial Sequence: Synthetic oligonucleotide
auccaugaagguuugccac

SEQ ID NO: 2559150 - RNA, 19 nt, Artificial Sequence
  Description of Artificial Sequence: Synthetic oligonucleotide
guuguaaccgaacuucugc

SEQ ID NO: 2559151 - RNA, 19 nt, Artificial Sequence
  Description of Artificial Sequence: Synthetic oligonucleotide
aguccaguagaccuaagug

SEQ ID NO: 2559152 - RNA, 19 nt, Artificial Sequence
  Description of Artificial Sequence: Synthetic oligonucleotide
uguaaugaacauauucaau

SEQ ID NO: 2559153 - RNA, 19 nt, Artificial Sequence
  Description of Artificial Sequence: Synthetic oligonucleotide
ucugauggguaaaagcgcu

SEQ ID NO: 2559154 - RNA, 19 nt, Artificial Sequence
  Description of Artificial Sequence: Synthetic oligonucleotide
cuuccgacgagcauugcgg

SEQ ID NO: 2559155 - RNA, 19 nt, Artificial Sequence
  Description of Artificial Sequence: Synthetic oligonucleotide
augugggagcacucgaucc

SEQ ID NO: 2559156 - RNA, 19 nt, Artificial Sequence
  Description of Artificial Sequence: Synthetic oligonucleotide
uuucgguugacguuguaac

SEQ ID NO: 2559157 - RNA, 19 nt, Artificial Sequence
  Description of Artificial Sequence: Synthetic oligonucleotide
ucaaccuccaucuucuuau

SEQ ID NO: 2559158 - RNA, 19 nt, Artificial Sequence
  Description of Artificial Sequence: Synthetic oligonucleotide
acauauucaaugagguccc

SEQ ID NO: 2559159 - RNA, 19 nt, Artificial Sequence
  Description of Artificial Sequence: Synthetic oligonucleotide
uccgaaucugcuuuggugu

SEQ ID NO: 2559160 - RNA, 19 nt, Artificial Sequence
  Description of Artificial Sequence: Synthetic oligonucleotide
ucgguugacguuguaaccg

SEQ ID NO: 2559161 - RNA, 19 nt, Artificial Sequence
  Description of Artificial Sequence: Synthetic oligonucleotide
ugugggagcacucgauccg

SEQ ID NO: 2559162 - RNA, 19 nt, Artificial Sequence
  Description of Artificial Sequence: Synthetic oligonucleotide
uugacguuguaaccgaacu

SEQ ID NO: 2559163 - RNA, 19 nt, Artificial Sequence
  Description of Artificial Sequence: Synthetic oligonucleotide
uugaucuuauuccgaaucu

SEQ ID NO: 2559164 - RNA, 19 nt, Artificial Sequence
  Description of Artificial Sequence: Synthetic oligonucleotide
gaauccaugaagguuugcc

SEQ ID NO: 2559165 - RNA, 19 nt, Artificial Sequence
  Description of Artificial Sequence: Synthetic oligonucleotide
acucagucaaccuccaucu

SEQ ID NO: 2559166 - RNA, 19 nt, Artificial Sequence
  Description of Artificial Sequence: Synthetic oligonucleotide
cuugauaguaauucuucuc

SEQ ID NO: 2559167 - RNA, 19 nt, Artificial Sequence
  Description of Artificial Sequence: Synthetic oligonucleotide
auagccuuauaguccuccc

SEQ ID NO: 2559168 - RNA, 19 nt, Artificial Sequence
  Description of Artificial Sequence: Synthetic oligonucleotide
gaucuuauuccgaaucugc

SEQ ID NO: 2559169 - RNA, 19 nt, Artificial Sequence
  Description of Artificial Sequence: Synthetic oligonucleotide
uaaaagcgcuuauagacau

SEQ ID NO: 2559170 - RNA, 19 nt, Artificial Sequence
  Description of Artificial Sequence: Synthetic oligonucleotide
cuuuaccuuccucuuacgg

SEQ ID NO: 2559171 - RNA, 19 nt, Artificial Sequence
  Description of Artificial Sequence: Synthetic oligonucleotide
gauaguaauucuucucauc

SEQ ID NO: 2559172 - RNA, 19 nt, Artificial Sequence
  Description of Artificial Sequence: Synthetic oligonucleotide
uuguaaccgaacuucugcc

SEQ ID NO: 2559173 - RNA, 19 nt, Artificial Sequence
  Description of Artificial Sequence: Synthetic oligonucleotide
agggcuuccgcacaagguc

SEQ ID NO: 2559174 - RNA, 19 nt, Artificial Sequence
  Description of Artificial Sequence: Synthetic oligonucleotide
ugguuugccaccauguaau

SEQ ID NO: 2559175 - RNA, 19 nt, Artificial Sequence
  Description of Artificial Sequence: Synthetic oligonucleotide
uaguaauucuucucauccc

SEQ ID NO: 2559176 - RNA, 19 nt, Artificial Sequence
  Description of Artificial Sequence: Synthetic oligonucleotide
uuccgaaucugcuuuggug

SEQ ID NO: 2559177 - RNA, 19 nt, Artificial Sequence
  Description of Artificial Sequence: Synthetic oligonucleotide
caugucuaccuccauggcc

SEQ ID NO: 2559178 - RNA, 19 nt, Artificial Sequence
  Description of Artificial Sequence: Synthetic oligonucleotide
agacaagguauuuccuuuc

SEQ ID NO: 2559179 - RNA, 19 nt, Artificial Sequence
  Description of Artificial Sequence: Synthetic oligonucleotide
ugaagguuugccacucuga

SEQ ID NO: 2559180 - RNA, 19 nt, Artificial Sequence
  Description of Artificial Sequence: Synthetic oligonucleotide
uuccccuuggccuugggca

SEQ ID NO: 2559181 - RNA, 19 nt, Artificial Sequence
  Description of Artificial Sequence: Synthetic oligonucleotide
cuggcuuugguuucuuuag

SEQ ID NO: 2559182 - RNA, 19 nt, Artificial Sequence
  Description of Artificial Sequence: Synthetic oligonucleotide
ugguguaucuugauaguaa

SEQ ID NO: 2559183 - RNA, 19 nt, Artificial Sequence
  Description of Artificial Sequence: Synthetic oligonucleotide
gacguuguaaccgaacuuc

SEQ ID NO: 2559184 - RNA, 19 nt, Artificial Sequence
  Description of Artificial Sequence: Synthetic oligonucleotide
aagguuugccacucugaug

SEQ ID NO: 2559185 - RNA, 19 nt, Artificial Sequence
  Description of Artificial Sequence: Synthetic oligonucleotide
cucugauggguaaaagcgc

SEQ ID NO: 2559186 - RNA, 19 nt, Artificial Sequence
  Description of Artificial Sequence: Synthetic oligonucleotide
gagcauugcgguucagacg

SEQ ID NO: 2559187 - RNA, 19 nt, Artificial Sequence
  Description of Artificial Sequence: Synthetic oligonucleotide
uuggccuugggcaucgcgc

SEQ ID NO: 2559188 - RNA, 19 nt, Artificial Sequence
  Description of Artificial Sequence: Synthetic oligonucleotide
cuuacggaggggaaccgcc

SEQ ID NO: 2559189 - RNA, 19 nt, Artificial Sequence
  Description of Artificial Sequence: Synthetic oligonucleotide
caggucauucagcacauag

SEQ ID NO: 2559190 - RNA, 19 nt, Artificial Sequence
  Description of Artificial Sequence: Synthetic oligonucleotide
uuugguguaucuugauagu

SEQ ID NO: 2559191 - RNA, 19 nt, Artificial Sequence
  Description of Artificial Sequence: Synthetic oligonucleotide
ucugguguggucccaggca

SEQ ID NO: 2559192 - RNA, 19 nt, Artificial Sequence
  Description of Artificial Sequence: Synthetic oligonucleotide
acauugaucuuauuccgaa

SEQ ID NO: 2559193 - RNA, 19 nt, Artificial Sequence
  Description of Artificial Sequence: Synthetic oligonucleotide
auagggcuuccgcacaagg

SEQ ID NO: 2559194 - RNA, 19 nt, Artificial Sequence
  Description of Artificial Sequence: Synthetic oligonucleotide
uguaaccgaacuucugccu

SEQ ID NO: 2559195 - RNA, 19 nt, Artificial Sequence
  Description of Artificial Sequence: Synthetic oligonucleotide
aagguccuugggucucucc

SEQ ID NO: 2559196 - RNA, 19 nt, Artificial Sequence
  Description of Artificial Sequence: Synthetic oligonucleotide
uucgguugacguuguaacc

SEQ ID NO: 2559197 - RNA, 19 nt, Artificial Sequence
  Description of Artificial Sequence: Synthetic oligonucleotide
gaacauauucaaugagguc

SEQ ID NO: 2559198 - RNA, 19 nt, Artificial Sequence
  Description of Artificial Sequence: Synthetic oligonucleotide
uaguccaguagaccuaagu

SEQ ID NO: 2559199 - RNA, 19 nt, Artificial Sequence
  Description of Artificial Sequence: Synthetic oligonucleotide
agcacauagggcuuccgca

SEQ ID NO: 2559200 - RNA, 19 nt, Artificial Sequence
  Description of Artificial Sequence: Synthetic oligonucleotide
aguagaccuaagugugggg

SEQ ID NO: 2559201 - RNA, 19 nt, Artificial Sequence
  Description of Artificial Sequence: Synthetic oligonucleotide
ugauaguaauucuucucau

SEQ ID NO: 2559202 - RNA, 19 nt, Artificial Sequence
  Description of Artificial Sequence: Synthetic oligonucleotide
gguuucuuuaguccaguag

SEQ ID NO: 2559203 - RNA, 19 nt, Artificial Sequence
  Description of Artificial Sequence: Synthetic oligonucleotide
agccuuauaguccucccca

SEQ ID NO: 2559204 - RNA, 19 nt, Artificial Sequence
  Description of Artificial Sequence: Synthetic oligonucleotide
ucuuauuccgaaucugcuu

SEQ ID NO: 2559205 - RNA, 19 nt, Artificial Sequence
  Description of Artificial Sequence: Synthetic oligonucleotide
ucaaugaggucccgagaca

SEQ ID NO: 2559206 - RNA, 19 nt, Artificial Sequence
  Description of Artificial Sequence: Synthetic oligonucleotide
caccacucagucaaccucc

SEQ ID NO: 2559207 - RNA, 19 nt, Artificial Sequence
  Description of Artificial Sequence: Synthetic oligonucleotide
acucgauccgcggagcagc

SEQ ID NO: 2559208 - RNA, 19 nt, Artificial Sequence
  Description of Artificial Sequence: Synthetic oligonucleotide
uucuuuaguccaguagacc

SEQ ID NO: 2559209 - RNA, 19 nt, Artificial Sequence
  Description of Artificial Sequence: Synthetic oligonucleotide
uuugccacucugaugggua

SEQ ID NO: 2559210 - RNA, 19 nt, Artificial Sequence
  Description of Artificial Sequence: Synthetic oligonucleotide
guaauucuucucaucccgg

SEQ ID NO: 2559211 - RNA, 19 nt, Artificial Sequence
  Description of Artificial Sequence: Synthetic oligonucleotide
acagcccuugccccaaaac

SEQ ID NO: 2559212 - RNA, 19 nt, Artificial Sequence
  Description of Artificial Sequence: Synthetic oligonucleotide
agcgcuuauagacauugau

SEQ ID NO: 2559213 - RNA, 19 nt, Artificial Sequence
  Description of Artificial Sequence: Synthetic oligonucleotide
uuauaguccuccccauggu

SEQ ID NO: 2559214 - RNA, 19 nt, Artificial Sequence
  Description of Artificial Sequence: Synthetic oligonucleotide
uagccuuauaguccucccc

SEQ ID NO: 2559215 - RNA, 19 nt, Artificial Sequence
  Description of Artificial Sequence: Synthetic oligonucleotide
augaagguuugccacucug

SEQ ID NO: 2559216 - RNA, 19 nt, Artificial Sequence
  Description of Artificial Sequence: Synthetic oligonucleotide
ccauguaaugaacauauuc

SEQ ID NO: 2559217 - RNA, 19 nt, Artificial Sequence
  Description of Artificial Sequence: Synthetic oligonucleotide
ugccaccauguaaugaaca

SEQ ID NO: 2559218 - RNA, 19 nt, Artificial Sequence
  Description of Artificial Sequence: Synthetic oligonucleotide
uaaccgaacuucugccucc

SEQ ID NO: 2559219 - RNA, 19 nt, Artificial Sequence
  Description of Artificial Sequence: Synthetic oligonucleotide
cuucuuauucugcaaagaa

SEQ ID NO: 2559220 - RNA, 19 nt, Artificial Sequence
  Description of Artificial Sequence: Synthetic oligonucleotide
cagcccuugccccaaaacc

SEQ ID NO: 2559221 - RNA, 19 nt, Artificial Sequence
  Description of Artificial Sequence: Synthetic oligonucleotide
uuauuccgaaucugcuuug

SEQ ID NO: 2559222 - RNA, 19 nt, Artificial Sequence
  Description of Artificial Sequence: Synthetic oligonucleotide
acggaucuggugugguccc

SEQ ID NO: 2559223 - RNA, 19 nt, Artificial Sequence
  Description of Artificial Sequence: Synthetic oligonucleotide
uuuaguccaguagaccuaa

SEQ ID NO: 2559224 - RNA, 19 nt, Artificial Sequence
  Description of Artificial Sequence: Synthetic oligonucleotide
uccaugaagguuugccacu

SEQ ID NO: 2559225 - RNA, 19 nt, Artificial Sequence
  Description of Artificial Sequence: Synthetic oligonucleotide
augucuaccuccauggccu

SEQ ID NO: 2559226 - RNA, 19 nt, Artificial Sequence
  Description of Artificial Sequence: Synthetic oligonucleotide
cacucagucaaccuccauc

SEQ ID NO: 2559227 - RNA, 19 nt, Artificial Sequence
  Description of Artificial Sequence: Synthetic oligonucleotide
augguuugccaccauguaa

SEQ ID NO: 2559228 - RNA, 19 nt, Artificial Sequence
  Description of Artificial Sequence: Synthetic oligonucleotide
guaaaagcgcuuauagaca

SEQ ID NO: 2559229 - RNA, 19 nt, Artificial Sequence
  Description of Artificial Sequence: Synthetic oligonucleotide
cauagccuuauaguccucc

SEQ ID NO: 2559230 - RNA, 19 nt, Artificial Sequence
  Description of Artificial Sequence: Synthetic oligonucleotide
gaugugggagcacucgauc

SEQ ID NO: 2559231 - RNA, 19 nt, Artificial Sequence
  Description of Artificial Sequence: Synthetic oligonucleotide
gaggggaaccgccuuguug

SEQ ID NO: 2559232 - RNA, 19 nt, Artificial Sequence
  Description of Artificial Sequence: Synthetic oligonucleotide
agacgcuuucgguugacgu

SEQ ID NO: 2559233 - RNA, 19 nt, Artificial Sequence
  Description of Artificial Sequence: Synthetic oligonucleotide
cagacugucgcaccagcag

SEQ ID NO: 2559234 - RNA, 19 nt, Artificial Sequence
  Description of Artificial Sequence: Synthetic oligonucleotide
uugggucucuccuccaugu

SEQ ID NO: 2559235 - RNA, 19 nt, Artificial Sequence
  Description of Artificial Sequence: Synthetic oligonucleotide
cuccaggucauucagcaca

SEQ ID NO: 2559236 - RNA, 19 nt, Artificial Sequence
  Description of Artificial Sequence: Synthetic oligonucleotide
auucaaugaggucccgaga

SEQ ID NO: 2559237 - RNA, 19 nt, Artificial Sequence
  Description of Artificial Sequence: Synthetic oligonucleotide
guaaccgaacuucugccuc

SEQ ID NO: 2559238 - RNA, 19 nt, Artificial Sequence
  Description of Artificial Sequence: Synthetic oligonucleotide
ugcgguucagacgcuuucg

SEQ ID NO: 2559239 - RNA, 19 nt, Artificial Sequence
  Description of Artificial Sequence: Synthetic oligonucleotide
ucggaugugggagcacucg

SEQ ID NO: 2559240 - RNA, 19 nt, Artificial Sequence
  Description of Artificial Sequence: Synthetic oligonucleotide
accuuccucuuacggaggg

SEQ ID NO: 2559241 - RNA, 19 nt, Artificial Sequence
  Description of Artificial Sequence: Synthetic oligonucleotide
uaccuuccucuuacggagg

SEQ ID NO: 2559242 - RNA, 19 nt, Artificial Sequence
  Description of Artificial Sequence: Synthetic oligonucleotide
uucucugggaggcuggcuu

SEQ ID NO: 2559243 - RNA, 19 nt, Artificial Sequence
  Description of Artificial Sequence: Synthetic oligonucleotide
uagggcuuccgcacaaggu

SEQ ID NO: 2559244 - RNA, 19 nt, Artificial Sequence
  Description of Artificial Sequence: Synthetic oligonucleotide
ucugccuccgagucuuccc

SEQ ID NO: 2559245 - RNA, 19 nt, Artificial Sequence
  Description of Artificial Sequence: Synthetic oligonucleotide
ugacguuguaaccgaacuu

SEQ ID NO: 2559246 - RNA, 19 nt, Artificial Sequence
  Description of Artificial Sequence: Synthetic oligonucleotide
gaucugguguggucccagg

SEQ ID NO: 2559247 - RNA, 19 nt, Artificial Sequence
  Description of Artificial Sequence: Synthetic oligonucleotide
cacggaucugguguggucc

SEQ ID NO: 2559248 - RNA, 19 nt, Artificial Sequence
  Description of Artificial Sequence: Synthetic oligonucleotide
aagaauccaugaagguuug

SEQ ID NO: 2559249 - RNA, 19 nt, Artificial Sequence
  Description of Artificial Sequence: Synthetic oligonucleotide
cccgagacaagguauuucc

SEQ ID NO: 2559250 - RNA, 19 nt, Artificial Sequence
  Description of Artificial Sequence: Synthetic oligonucleotide
aaccgccuuguuggggucc

SEQ ID NO: 2559251 - RNA, 19 nt, Artificial Sequence
  Description of Artificial Sequence: Synthetic oligonucleotide
gagcacucgauccgcggag

SEQ ID NO: 2559252 - RNA, 19 nt, Artificial Sequence
  Description of Artificial Sequence: Synthetic oligonucleotide
ugggaggcuggcuucugcc

SEQ ID NO: 2559253 - RNA, 19 nt, Artificial Sequence
  Description of Artificial Sequence: Synthetic oligonucleotide
aaccgaacuucugccuccg

SEQ ID NO: 2559254 - RNA, 19 nt, Artificial Sequence
  Description of Artificial Sequence: Synthetic oligonucleotide
uccgcacaagguccuuggg

SEQ ID NO: 2559255 - RNA, 19 nt, Artificial Sequence
  Description of Artificial Sequence: Synthetic oligonucleotide
guccaguagaccuaagugu

SEQ ID NO: 2559256 - RNA, 19 nt, Artificial Sequence
  Description of Artificial Sequence: Synthetic oligonucleotide
caccauguaaugaacauau

SEQ ID NO: 2559257 - RNA, 19 nt, Artificial Sequence
  Description of Artificial Sequence: Synthetic oligonucleotide
guaucuugauaguaauucu

SEQ ID NO: 2559258 - RNA, 19 nt, Artificial Sequence
  Description of Artificial Sequence: Synthetic oligonucleotide
aaccccaucuccgccaggu

SEQ ID NO: 2559259 - RNA, 19 nt, Artificial Sequence
  Description of Artificial Sequence: Synthetic oligonucleotide
gacauugaucuuauuccga

SEQ ID NO: 2559260 - RNA, 19 nt, Artificial Sequence
  Description of Artificial Sequence: Synthetic oligonucleotide
agaauccaugaagguuugc

SEQ ID NO: 2559261 - RNA, 19 nt, Artificial Sequence
  Description of Artificial Sequence: Synthetic oligonucleotide
uugguguaucuugauagua

SEQ ID NO: 2559262 - RNA, 19 nt, Artificial Sequence
  Description of Artificial Sequence: Synthetic oligonucleotide
uugccaccauguaaugaac

SEQ ID NO: 2559263 - RNA, 19 nt, Artificial Sequence
  Description of Artificial Sequence: Synthetic oligonucleotide
ucaucccgggccauagccu

SEQ ID NO: 2559264 - RNA, 19 nt, Artificial Sequence
  Description of Artificial Sequence: Synthetic oligonucleotide
uucucaucccgggccauag

SEQ ID NO: 2559265 - RNA, 19 nt, Artificial Sequence
  Description of Artificial Sequence: Synthetic oligonucleotide
ugauggguaaaagcgcuua

SEQ ID NO: 2559266 - RNA, 19 nt, Artificial Sequence
  Description of Artificial Sequence: Synthetic oligonucleotide
aucuuauuccgaaucugcu

SEQ ID NO: 2559267 - RNA, 19 nt, Artificial Sequence
  Description of Artificial Sequence: Synthetic oligonucleotide
aucgcgcagacugucgcac

SEQ ID NO: 2559268 - RNA, 19 nt, Artificial Sequence
  Description of Artificial Sequence: Synthetic oligonucleotide
ugggagcacucgauccgcg

SEQ ID NO: 2559269 - RNA, 19 nt, Artificial Sequence
  Description of Artificial Sequence: Synthetic oligonucleotide
ucuccgccagguucugccg

SEQ ID NO: 2559270 - RNA, 19 nt, Artificial Sequence
  Description of Artificial Sequence: Synthetic oligonucleotide
caggcaugucggauguggg

SEQ ID NO: 2559271 - RNA, 19 nt, Artificial Sequence
  Description of Artificial Sequence: Synthetic oligonucleotide
acgcuuucgguugacguug

SEQ ID NO: 2559272 - RNA, 19 nt, Artificial Sequence
  Description of Artificial Sequence: Synthetic oligonucleotide
uuacggaggggaaccgccu

SEQ ID NO: 2559273 - RNA, 19 nt, Artificial Sequence
  Description of Artificial Sequence: Synthetic oligonucleotide
ugucgcaccagcagcucaa

SEQ ID NO: 2559274 - RNA, 19 nt, Artificial Sequence
  Description of Artificial Sequence: Synthetic oligonucleotide
uugggguccacggccaacc

SEQ ID NO: 2559275 - RNA, 19 nt, Artificial Sequence
  Description of Artificial Sequence: Synthetic oligonucleotide
caucuucuuauucugcaaa

SEQ ID NO: 2559276 - RNA, 19 nt, Artificial Sequence
  Description of Artificial Sequence: Synthetic oligonucleotide
uuaguccaguagaccuaag

SEQ ID NO: 2559277 - RNA, 19 nt, Artificial Sequence
  Description of Artificial Sequence: Synthetic oligonucleotide
auuccgaaucugcuuuggu

SEQ ID NO: 2559278 - RNA, 19 nt, Artificial Sequence
  Description of Artificial Sequence: Synthetic oligonucleotide
ucccaggcaugucggaugu

SEQ ID NO: 2559279 - RNA, 19 nt, Artificial Sequence
  Description of Artificial Sequence: Synthetic oligonucleotide
uccaggucauucagcacau

SEQ ID NO: 2559280 - RNA, 19 nt, Artificial Sequence
  Description of Artificial Sequence: Synthetic oligonucleotide
cagcacauagggcuuccgc

SEQ ID NO: 2559281 - RNA, 19 nt, Artificial Sequence
  Description of Artificial Sequence: Synthetic oligonucleotide
ugucggaugugggagcacu

SEQ ID NO: 2559282 - RNA, 19 nt, Artificial Sequence
  Description of Artificial Sequence: Synthetic oligonucleotide
ucuuacggaggggaaccgc

SEQ ID NO: 2559283 - RNA, 19 nt, Artificial Sequence
  Description of Artificial Sequence: Synthetic oligonucleotide
gucauucagcacauagggc

SEQ ID NO: 2559284 - RNA, 19 nt, Artificial Sequence
  Description of Artificial Sequence: Synthetic oligonucleotide
auauucaaugaggucccga

SEQ ID NO: 2559285 - RNA, 19 nt, Artificial Sequence
  Description of Artificial Sequence: Synthetic oligonucleotide
gaagguuugccacucugau

SEQ ID NO: 2559286 - RNA, 19 nt, Artificial Sequence
  Description of Artificial Sequence: Synthetic oligonucleotide
uugguuucuuuaguccagu

SEQ ID NO: 2559287 - RNA, 19 nt, Artificial Sequence
  Description of Artificial Sequence: Synthetic oligonucleotide
agcacucgauccgcggagc

SEQ ID NO: 2559288 - RNA, 19 nt, Artificial Sequence
  Description of Artificial Sequence: Synthetic oligonucleotide
acggccaaccccaucuccg

SEQ ID NO: 2559289 - RNA, 19 nt, Artificial Sequence
  Description of Artificial Sequence: Synthetic oligonucleotide
ggcaugucggaugugggag

SEQ ID NO: 2559290 - RNA, 19 nt, Artificial Sequence
  Description of Artificial Sequence: Synthetic oligonucleotide
gaaucugcuuugguguauc

SEQ ID NO: 2559291 - RNA, 19 nt, Artificial Sequence
  Description of Artificial Sequence: Synthetic oligonucleotide
uugcgguucagacgcuuuc

SEQ ID NO: 2559292 - RNA, 19 nt, Artificial Sequence
  Description of Artificial Sequence: Synthetic oligonucleotide
gagacaagguauuuccuuu

SEQ ID NO: 2559293 - RNA, 19 nt, Artificial Sequence
  Description of Artificial Sequence: Synthetic oligonucleotide
aggcaugucggauguggga

SEQ ID NO: 2559294 - RNA, 19 nt, Artificial Sequence
  Description of Artificial Sequence: Synthetic oligonucleotide
guugacguuguaaccgaac

SEQ ID NO: 2559295 - RNA, 19 nt, Artificial Sequence
  Description of Artificial Sequence: Synthetic oligonucleotide
aaaccuggcuuugguuucu

SEQ ID NO: 2559296 - RNA, 19 nt, Artificial Sequence
  Description of Artificial Sequence: Synthetic oligonucleotide
uugccccaaaaccuggcuu

SEQ ID NO: 2559297 - RNA, 19 nt, Artificial Sequence
  Description of Artificial Sequence: Synthetic oligonucleotide
cuugggucucuccuccaug

SEQ ID NO: 2559298 - RNA, 19 nt, Artificial Sequence
  Description of Artificial Sequence: Synthetic oligonucleotide
agcccuugccccaaaaccu

SEQ ID NO: 2559299 - RNA, 19 nt, Artificial Sequence
  Description of Artificial Sequence: Synthetic oligonucleotide
gacaagguauuuccuuucu

SEQ ID NO: 2559300 - RNA, 19 nt, Artificial Sequence
  Description of Artificial Sequence: Synthetic oligonucleotide
uuccgacgagcauugcggu

SEQ ID NO: 2559301 - RNA, 19 nt, Artificial Sequence
  Description of Artificial Sequence: Synthetic oligonucleotide
uccucuuacggaggggaac

SEQ ID NO: 2559302 - RNA, 19 nt, Artificial Sequence
  Description of Artificial Sequence: Synthetic oligonucleotide
caaaaccuggcuuugguuu

SEQ ID NO: 2559303 - RNA, 19 nt, Artificial Sequence
  Description of Artificial Sequence: Synthetic oligonucleotide
cauauucaaugaggucccg

SEQ ID NO: 2559304 - RNA, 19 nt, Artificial Sequence
  Description of Artificial Sequence: Synthetic oligonucleotide
cugccuccgagucuucccc

SEQ ID NO: 2559305 - RNA, 19 nt, Artificial Sequence
  Description of Artificial Sequence: Synthetic oligonucleotide
cuccgagucuuccccuugg

SEQ ID NO: 2559306 - RNA, 19 nt, Artificial Sequence
  Description of Artificial Sequence: Synthetic oligonucleotide
gucccaggcaugucggaug

SEQ ID NO: 2559307 - RNA, 19 nt, Artificial Sequence
  Description of Artificial Sequence: Synthetic oligonucleotide
ggcuuugguuucuuuaguc

SEQ ID NO: 2559308 - RNA, 19 nt, Artificial Sequence
  Description of Artificial Sequence: Synthetic oligonucleotide
gccuuuaccuuccucuuac

SEQ ID NO: 2559309 - RNA, 19 nt, Artificial Sequence
  Description of Artificial Sequence: Synthetic oligonucleotide
cuuuaguccaguagaccua

SEQ ID NO: 2559310 - RNA, 19 nt, Artificial Sequence
  Description of Artificial Sequence: Synthetic oligonucleotide
ucucaucccgggccauagc

SEQ ID NO: 2559311 - RNA, 19 nt, Artificial Sequence
  Description of Artificial Sequence: Synthetic oligonucleotide
cuuccucuuacggagggga

SEQ ID NO: 2559312 - RNA, 19 nt, Artificial Sequence
  Description of Artificial Sequence: Synthetic oligonucleotide
ccuuccgacgagcauugcg

SEQ ID NO: 2559313 - RNA, 19 nt, Artificial Sequence
  Description of Artificial Sequence: Synthetic oligonucleotide
uuccucuuacggaggggaa

SEQ ID NO: 2559314 - RNA, 19 nt, Artificial Sequence
  Description of Artificial Sequence: Synthetic oligonucleotide
ucuucucugggaggcuggc

SEQ ID NO: 2559315 - RNA, 19 nt, Artificial Sequence
  Description of Artificial Sequence: Synthetic oligonucleotide
ccaguagaccuaagugugg

SEQ ID NO: 2559316 - RNA, 19 nt, Artificial Sequence
  Description of Artificial Sequence: Synthetic oligonucleotide
uauagacauugaucuuauu

SEQ ID NO: 2559317 - RNA, 19 nt, Artificial Sequence
  Description of Artificial Sequence: Synthetic oligonucleotide
auaguccuccccaugguuu

SEQ ID NO: 2559318 - RNA, 19 nt, Artificial Sequence
  Description of Artificial Sequence: Synthetic oligonucleotide
ugggcaucgcgcagacugu

SEQ ID NO: 2559319 - RNA, 19 nt, Artificial Sequence
  Description of Artificial Sequence: Synthetic oligonucleotide
cagucaaccuccaucuucu

SEQ ID NO: 2559320 - RNA, 19 nt, Artificial Sequence
  Description of Artificial Sequence: Synthetic oligonucleotide
ugguuucuuuaguccagua

SEQ ID NO: 2559321 - RNA, 19 nt, Artificial Sequence
  Description of Artificial Sequence: Synthetic oligonucleotide
cuuucgguugacguuguaa

SEQ ID NO: 2559322 - RNA, 19 nt, Artificial Sequence
  Description of Artificial Sequence: Synthetic oligonucleotide
gguucugccgcacggaucu

SEQ ID NO: 2559323 - RNA, 19 nt, Artificial Sequence
  Description of Artificial Sequence: Synthetic oligonucleotide
cgcuuauagacauugaucu

SEQ ID NO: 2559324 - RNA, 19 nt, Artificial Sequence
  Description of Artificial Sequence: Synthetic oligonucleotide
cacggccaaccccaucucc

SEQ ID NO: 2559325 - RNA, 19 nt, Artificial Sequence
  Description of Artificial Sequence: Synthetic oligonucleotide
acggaggggaaccgccuug

SEQ ID NO: 2559326 - RNA, 19 nt, Artificial Sequence
  Description of Artificial Sequence: Synthetic oligonucleotide
cucgauccgcggagcagcc

SEQ ID NO: 2559327 - RNA, 19 nt, Artificial Sequence
  Description of Artificial Sequence: Synthetic oligonucleotide
caaugaggucccgagacaa

SEQ ID NO: 2559328 - RNA, 19 nt, Artificial Sequence
  Description of Artificial Sequence: Synthetic oligonucleotide
ccaggcaugucggaugugg

SEQ ID NO: 2559329 - RNA, 19 nt, Artificial Sequence
  Description of Artificial Sequence: Synthetic oligonucleotide
caaagaauccaugaagguu

SEQ ID NO: 2559330 - RNA, 19 nt, Artificial Sequence
  Description of Artificial Sequence: Synthetic oligonucleotide
auggguaaaagcgcuuaua

SEQ ID NO: 2559331 - RNA, 19 nt, Artificial Sequence
  Description of Artificial Sequence: Synthetic oligonucleotide
acguuguaaccgaacuucu

SEQ ID NO: 2559332 - RNA, 19 nt, Artificial Sequence
  Description of Artificial Sequence: Synthetic oligonucleotide
acgagcauugcgguucaga

SEQ ID NO: 2559333 - RNA, 19 nt, Artificial Sequence
  Description of Artificial Sequence: Synthetic oligonucleotide
uggccuuuaccuuccucuu

SEQ ID NO: 2559334 - RNA, 19 nt, Artificial Sequence
  Description of Artificial Sequence: Synthetic oligonucleotide
uucugccuccgagucuucc

SEQ ID NO: 2559335 - RNA, 19 nt, Artificial Sequence
  Description of Artificial Sequence: Synthetic oligonucleotide
ucccgagacaagguauuuc

SEQ ID NO: 2559336 - RNA, 19 nt, Artificial Sequence
  Description of Artificial Sequence: Synthetic oligonucleotide
gcgguucagacgcuuucgg

SEQ ID NO: 2559337 - RNA, 19 nt, Artificial Sequence
  Description of Artificial Sequence: Synthetic oligonucleotide
cucuuacggaggggaaccg

SEQ ID NO: 2559338 - RNA, 19 nt, Artificial Sequence
  Description of Artificial Sequence: Synthetic oligonucleotide
uccgccagguucugccgca

SEQ ID NO: 2559339 - RNA, 19 nt, Artificial Sequence
  Description of Artificial Sequence: Synthetic oligonucleotide
cgagcauugcgguucagac

SEQ ID NO: 2559340 - RNA, 19 nt, Artificial Sequence
  Description of Artificial Sequence: Synthetic oligonucleotide
gguuugccaccauguaaug

SEQ ID NO: 2559341 - RNA, 19 nt, Artificial Sequence
  Description of Artificial Sequence: Synthetic oligonucleotide
ugggguccacggccaaccc

SEQ ID NO: 2559342 - RNA, 19 nt, Artificial Sequence
  Description of Artificial Sequence: Synthetic oligonucleotide
gauggguaaaagcgcuuau

SEQ ID NO: 2559343 - RNA, 19 nt, Artificial Sequence
  Description of Artificial Sequence: Synthetic oligonucleotide
aaaagcgcuuauagacauu

SEQ ID NO: 2559344 - RNA, 19 nt, Artificial Sequence
  Description of Artificial Sequence: Synthetic oligonucleotide
uccccaugguuugccacca

SEQ ID NO: 2559345 - RNA, 19 nt, Artificial Sequence
  Description of Artificial Sequence: Synthetic oligonucleotide
uccccuuggccuugggcau

SEQ ID NO: 2559346 - RNA, 19 nt, Artificial Sequence
  Description of Artificial Sequence: Synthetic oligonucleotide
gguguaucuugauaguaau

SEQ ID NO: 2559347 - RNA, 19 nt, Artificial Sequence
  Description of Artificial Sequence: Synthetic oligonucleotide
aagcgcuuauagacauuga

SEQ ID NO: 2559348 - RNA, 19 nt, Artificial Sequence
  Description of Artificial Sequence: Synthetic oligonucleotide
ccucuuacggaggggaacc

SEQ ID NO: 2559349 - RNA, 19 nt, Artificial Sequence
  Description of Artificial Sequence: Synthetic oligonucleotide
gggagcacucgauccgcgg

SEQ ID NO: 2559350 - RNA, 19 nt, Artificial Sequence
  Description of Artificial Sequence: Synthetic oligonucleotide
agguucugccgcacggauc

SEQ ID NO: 2559351 - RNA, 19 nt, Artificial Sequence
  Description of Artificial Sequence: Synthetic oligonucleotide
ucgcgcagacugucgcacc

SEQ ID NO: 2559352 - RNA, 19 nt, Artificial Sequence
  Description of Artificial Sequence: Synthetic oligonucleotide
uacggaggggaaccgccuu

SEQ ID NO: 2559353 - RNA, 19 nt, Artificial Sequence
  Description of Artificial Sequence: Synthetic oligonucleotide
cuccgccagguucugccgc

SEQ ID NO: 2559354 - RNA, 19 nt, Artificial Sequence
  Description of Artificial Sequence: Synthetic oligonucleotide
cagacgcuuucgguugacg

SEQ ID NO: 2559355 - RNA, 19 nt, Artificial Sequence
  Description of Artificial Sequence: Synthetic oligonucleotide
cauggccuuuaccuuccuc

SEQ ID NO: 2559356 - RNA, 19 nt, Artificial Sequence
  Description of Artificial Sequence: Synthetic oligonucleotide
gcaaagaauccaugaaggu

SEQ ID NO: 2559357 - RNA, 19 nt, Artificial Sequence
  Description of Artificial Sequence: Synthetic oligonucleotide
ccgaacuucugccuccgag

SEQ ID NO: 2559358 - RNA, 19 nt, Artificial Sequence
  Description of Artificial Sequence: Synthetic oligonucleotide
gugggagcacucgauccgc

SEQ ID NO: 2559359 - RNA, 19 nt, Artificial Sequence
  Description of Artificial Sequence: Synthetic oligonucleotide
gcaucgcgcagacugucgc

SEQ ID NO: 2559360 - RNA, 19 nt, Artificial Sequence
  Description of Artificial Sequence: Synthetic oligonucleotide
cgcacaagguccuuggguc

SEQ ID NO: 2559361 - RNA, 19 nt, Artificial Sequence
  Description of Artificial Sequence: Synthetic oligonucleotide
cuuccgcacaagguccuug

SEQ ID NO: 2559362 - RNA, 19 nt, Artificial Sequence
  Description of Artificial Sequence: Synthetic oligonucleotide
caugguuugccaccaugua

SEQ ID NO: 2559363 - RNA, 19 nt, Artificial Sequence
  Description of Artificial Sequence: Synthetic oligonucleotide
gacgcuuucgguugacguu

SEQ ID NO: 2559364 - RNA, 19 nt, Artificial Sequence
  Description of Artificial Sequence: Synthetic oligonucleotide
uccuugggucucuccucca

SEQ ID NO: 2559365 - RNA, 19 nt, Artificial Sequence
  Description of Artificial Sequence: Synthetic oligonucleotide
agccuuccgacgagcauug

SEQ ID NO: 2559366 - RNA, 19 nt, Artificial Sequence
  Description of Artificial Sequence: Synthetic oligonucleotide
gcaugucggaugugggagc

SEQ ID NO: 2559367 - RNA, 19 nt, Artificial Sequence
  Description of Artificial Sequence: Synthetic oligonucleotide
gccauagccuuauaguccu

SEQ ID NO: 2559368 - RNA, 19 nt, Artificial Sequence
  Description of Artificial Sequence: Synthetic oligonucleotide
ccuuuaccuuccucuuacg

SEQ ID NO: 2559369 - RNA, 19 nt, Artificial Sequence
  Description of Artificial Sequence: Synthetic oligonucleotide
ccaggacagcccuugcccc

SEQ ID NO: 2559370 - RNA, 19 nt, Artificial Sequence
  Description of Artificial Sequence: Synthetic oligonucleotide
ggagcagccuuccgacgag

SEQ ID NO: 2559371 - RNA, 19 nt, Artificial Sequence
  Description of Artificial Sequence: Synthetic oligonucleotide
cacaagguccuugggucuc

SEQ ID NO: 2559372 - RNA, 19 nt, Artificial Sequence
  Description of Artificial Sequence: Synthetic oligonucleotide
ccuuauaguccuccccaug

SEQ ID NO: 2559373 - RNA, 19 nt, Artificial Sequence
  Description of Artificial Sequence: Synthetic oligonucleotide
gguucagacgcuuucgguu

SEQ ID NO: 2559374 - RNA, 19 nt, Artificial Sequence
  Description of Artificial Sequence: Synthetic oligonucleotide
caugucggaugugggagca

SEQ ID NO: 2559375 - RNA, 19 nt, Artificial Sequence
  Description of Artificial Sequence: Synthetic oligonucleotide
cacucgauccgcggagcag

SEQ ID NO: 2559376 - RNA, 19 nt, Artificial Sequence
  Description of Artificial Sequence: Synthetic oligonucleotide
ugccuccgagucuuccccu

SEQ ID NO: 2559377 - RNA, 19 nt, Artificial Sequence
  Description of Artificial Sequence: Synthetic oligonucleotide
aggucccgagacaagguau

SEQ ID NO: 2559378 - RNA, 19 nt, Artificial Sequence
  Description of Artificial Sequence: Synthetic oligonucleotide
augucggaugugggagcac

SEQ ID NO: 2559379 - RNA, 19 nt, Artificial Sequence
  Description of Artificial Sequence: Synthetic oligonucleotide
ggagcacucgauccgcgga

SEQ ID NO: 2559380 - RNA, 19 nt, Artificial Sequence
  Description of Artificial Sequence: Synthetic oligonucleotide
uccgacgagcauugcgguu

SEQ ID NO: 2559381 - RNA, 19 nt, Artificial Sequence
  Description of Artificial Sequence: Synthetic oligonucleotide
gcuuugguguaucuugaua

SEQ ID NO: 2559382 - RNA, 19 nt, Artificial Sequence
  Description of Artificial Sequence: Synthetic oligonucleotide
ucagacgcuuucgguugac

SEQ ID NO: 2559383 - RNA, 19 nt, Artificial Sequence
  Description of Artificial Sequence: Synthetic oligonucleotide
gaaccgccuuguugggguc

SEQ ID NO: 2559384 - RNA, 19 nt, Artificial Sequence
  Description of Artificial Sequence: Synthetic oligonucleotide
gggcuuccgcacaaggucc

SEQ ID NO: 2559385 - RNA, 19 nt, Artificial Sequence
  Description of Artificial Sequence: Synthetic oligonucleotide
ccgggccauagccuuauag

SEQ ID NO: 2559386 - RNA, 19 nt, Artificial Sequence
  Description of Artificial Sequence: Synthetic oligonucleotide
gacugucgcaccagcagcu

SEQ ID NO: 2559387 - RNA, 19 nt, Artificial Sequence
  Description of Artificial Sequence: Synthetic oligonucleotide
ggaaccgccuuguuggggu

SEQ ID NO: 2559388 - RNA, 19 nt, Artificial Sequence
  Description of Artificial Sequence: Synthetic oligonucleotide
cauugaucuuauuccgaau

SEQ ID NO: 2559389 - RNA, 19 nt, Artificial Sequence
  Description of Artificial Sequence: Synthetic oligonucleotide
gagcagccuuccgacgagc

SEQ ID NO: 2559390 - RNA, 19 nt, Artificial Sequence
  Description of Artificial Sequence: Synthetic oligonucleotide
gagucuuccccuuggccuu

SEQ ID NO: 2559391 - RNA, 19 nt, Artificial Sequence
  Description of Artificial Sequence: Synthetic oligonucleotide
ggggaaccgccuuguuggg

SEQ ID NO: 2559392 - RNA, 19 nt, Artificial Sequence
  Description of Artificial Sequence: Synthetic oligonucleotide
cuaccuccauggccuuuac

SEQ ID NO: 2559393 - RNA, 19 nt, Artificial Sequence
  Description of Artificial Sequence: Synthetic oligonucleotide
cguuguaaccgaacuucug

SEQ ID NO: 2559394 - RNA, 19 nt, Artificial Sequence
  Description of Artificial Sequence: Synthetic oligonucleotide
ugccacucugauggguaaa

SEQ ID NO: 2559395 - RNA, 19 nt, Artificial Sequence
  Description of Artificial Sequence: Synthetic oligonucleotide
ggcaucgcgcagacugucg

SEQ ID NO: 2559396 - RNA, 19 nt, Artificial Sequence
  Description of Artificial Sequence: Synthetic oligonucleotide
caucgcgcagacugucgca

SEQ ID NO: 2559397 - RNA, 19 nt, Artificial Sequence
  Description of Artificial Sequence: Synthetic oligonucleotide
caggacagcccuugcccca

SEQ ID NO: 2559398 - RNA, 19 nt, Artificial Sequence
  Description of Artificial Sequence: Synthetic oligonucleotide
ccgagucuuccccuuggcc

SEQ ID NO: 2559399 - RNA, 19 nt, Artificial Sequence
  Description of Artificial Sequence: Synthetic oligonucleotide
cugucgcaccagcagcuca

SEQ ID NO: 2559400 - RNA, 19 nt, Artificial Sequence
  Description of Artificial Sequence: Synthetic oligonucleotide
ugucuaccuccauggccuu

SEQ ID NO: 2559401 - RNA, 19 nt, Artificial Sequence
  Description of Artificial Sequence: Synthetic oligonucleotide
auugcgguucagacgcuuu

SEQ ID NO: 2559402 - RNA, 19 nt, Artificial Sequence
  Description of Artificial Sequence: Synthetic oligonucleotide
cccaugguuugccaccaug

SEQ ID NO: 2559403 - RNA, 19 nt, Artificial Sequence
  Description of Artificial Sequence: Synthetic oligonucleotide
ccgacgagcauugcgguuc

SEQ ID NO: 2559404 - RNA, 19 nt, Artificial Sequence
  Description of Artificial Sequence: Synthetic oligonucleotide
agucaaccuccaucuucuu

SEQ ID NO: 2559405 - RNA, 19 nt, Artificial Sequence
  Description of Artificial Sequence: Synthetic oligonucleotide
gacagcccuugccccaaaa

SEQ ID NO: 2559406 - RNA, 19 nt, Artificial Sequence
  Description of Artificial Sequence: Synthetic oligonucleotide
gggaaccgccuuguugggg

SEQ ID NO: 2559407 - RNA, 19 nt, Artificial Sequence
  Description of Artificial Sequence: Synthetic oligonucleotide
ugcccaccacucagucaac

SEQ ID NO: 2559408 - RNA, 19 nt, Artificial Sequence
  Description of Artificial Sequence: Synthetic oligonucleotide
cauucagcacauagggcuu

SEQ ID NO: 2559409 - RNA, 19 nt, Artificial Sequence
  Description of Artificial Sequence: Synthetic oligonucleotide
cuugccccaaaaccuggcu

SEQ ID NO: 2559410 - RNA, 19 nt, Artificial Sequence
  Description of Artificial Sequence: Synthetic oligonucleotide
accauguaaugaacauauu

SEQ ID NO: 2559411 - RNA, 19 nt, Artificial Sequence
  Description of Artificial Sequence: Synthetic oligonucleotide
accgaacuucugccuccga

SEQ ID NO: 2559412 - RNA, 19 nt, Artificial Sequence
  Description of Artificial Sequence: Synthetic oligonucleotide
ccaugaagguuugccacuc

SEQ ID NO: 2559413 - RNA, 19 nt, Artificial Sequence
  Description of Artificial Sequence: Synthetic oligonucleotide
ggugcccaccacucaguca

SEQ ID NO: 2559414 - RNA, 19 nt, Artificial Sequence
  Description of Artificial Sequence: Synthetic oligonucleotide
gccaaccccaucuccgcca

SEQ ID NO: 2559415 - RNA, 19 nt, Artificial Sequence
  Description of Artificial Sequence: Synthetic oligonucleotide
gccgcacggaucuggugug

SEQ ID NO: 2559416 - RNA, 19 nt, Artificial Sequence
  Description of Artificial Sequence: Synthetic oligonucleotide
gccaccauguaaugaacau

SEQ ID NO: 2559417 - RNA, 19 nt, Artificial Sequence
  Description of Artificial Sequence: Synthetic oligonucleotide
ccccaucuccgccagguuc

SEQ ID NO: 2559418 - RNA, 19 nt, Artificial Sequence
  Description of Artificial Sequence: Synthetic oligonucleotide
cugguguggucccaggcau

SEQ ID NO: 2559419 - RNA, 19 nt, Artificial Sequence
  Description of Artificial Sequence: Synthetic oligonucleotide
caaccccaucuccgccagg

SEQ ID NO: 2559420 - RNA, 19 nt, Artificial Sequence
  Description of Artificial Sequence: Synthetic oligonucleotide
gauccgcggagcagccuuc

SEQ ID NO: 2559421 - RNA, 19 nt, Artificial Sequence
  Description of Artificial Sequence: Synthetic oligonucleotide
caucuccgccagguucugc

SEQ ID NO: 2559422 - RNA, 19 nt, Artificial Sequence
  Description of Artificial Sequence: Synthetic oligonucleotide
ccaucuucuuauucugcaa

SEQ ID NO: 2559423 - RNA, 19 nt, Artificial Sequence
  Description of Artificial Sequence: Synthetic oligonucleotide
gucggaugugggagcacuc

SEQ ID NO: 2559424 - RNA, 19 nt, Artificial Sequence
  Description of Artificial Sequence: Synthetic oligonucleotide
accuggcuuugguuucuuu

SEQ ID NO: 2559425 - RNA, 19 nt, Artificial Sequence
  Description of Artificial Sequence: Synthetic oligonucleotide
ucccgggccauagccuuau

SEQ ID NO: 2559426 - RNA, 19 nt, Artificial Sequence
  Description of Artificial Sequence: Synthetic oligonucleotide
gcccuugccccaaaaccug

SEQ ID NO: 2559427 - RNA, 19 nt, Artificial Sequence
  Description of Artificial Sequence: Synthetic oligonucleotide
gacgagcauugcgguucag

SEQ ID NO: 2559428 - RNA, 19 nt, Artificial Sequence
  Description of Artificial Sequence: Synthetic oligonucleotide
ggucucuccuccaugucua

SEQ ID NO: 2559429 - RNA, 19 nt, Artificial Sequence
  Description of Artificial Sequence: Synthetic oligonucleotide
guguaucuugauaguaauu

SEQ ID NO: 2559430 - RNA, 19 nt, Artificial Sequence
  Description of Artificial Sequence: Synthetic oligonucleotide
ucgauccgcggagcagccu

SEQ ID NO: 2559431 - RNA, 19 nt, Artificial Sequence
  Description of Artificial Sequence: Synthetic oligonucleotide
aggacagcccuugccccaa

SEQ ID NO: 2559432 - RNA, 19 nt, Artificial Sequence
  Description of Artificial Sequence: Synthetic oligonucleotide
gcuuauagacauugaucuu

SEQ ID NO: 2559433 - RNA, 19 nt, Artificial Sequence
  Description of Artificial Sequence: Synthetic oligonucleotide
gggugcccaccacucaguc

SEQ ID NO: 2559434 - RNA, 19 nt, Artificial Sequence
  Description of Artificial Sequence: Synthetic oligonucleotide
caugaagguuugccacucu

SEQ ID NO: 2559435 - RNA, 19 nt, Artificial Sequence
  Description of Artificial Sequence: Synthetic oligonucleotide
cgagucuuccccuuggccu

SEQ ID NO: 2559436 - RNA, 19 nt, Artificial Sequence
  Description of Artificial Sequence: Synthetic oligonucleotide
gcagacugucgcaccagca

SEQ ID NO: 2559437 - RNA, 19 nt, Artificial Sequence
  Description of Artificial Sequence: Synthetic oligonucleotide
ccuugggcaucgcgcagac

SEQ ID NO: 2559438 - RNA, 19 nt, Artificial Sequence
  Description of Artificial Sequence: Synthetic oligonucleotide
gcacggaucuggugugguc

SEQ ID NO: 2559439 - RNA, 19 nt, Artificial Sequence
  Description of Artificial Sequence: Synthetic oligonucleotide
caagguccuugggucucuc

SEQ ID NO: 2559440 - RNA, 19 nt, Artificial Sequence
  Description of Artificial Sequence: Synthetic oligonucleotide
ccccaaaaccuggcuuugg

SEQ ID NO: 2559441 - RNA, 19 nt, Artificial Sequence
  Description of Artificial Sequence: Synthetic oligonucleotide
caucccgggccauagccuu

SEQ ID NO: 2559442 - RNA, 19 nt, Artificial Sequence
  Description of Artificial Sequence: Synthetic oligonucleotide
ggccuuuaccuuccucuua

SEQ ID NO: 2559443 - RNA, 19 nt, Artificial Sequence
  Description of Artificial Sequence: Synthetic oligonucleotide
gcacucgauccgcggagca

SEQ ID NO: 2559444 - RNA, 19 nt, Artificial Sequence
  Description of Artificial Sequence: Synthetic oligonucleotide
cugauggguaaaagcgcuu

SEQ ID NO: 2559445 - RNA, 19 nt, Artificial Sequence
  Description of Artificial Sequence: Synthetic oligonucleotide
gcacaagguccuugggucu

SEQ ID NO: 2559446 - RNA, 19 nt, Artificial Sequence
  Description of Artificial Sequence: Synthetic oligonucleotide
cgcagacugucgcaccagc

SEQ ID NO: 2559447 - RNA, 19 nt, Artificial Sequence
  Description of Artificial Sequence: Synthetic oligonucleotide
gccacucugauggguaaaa

SEQ ID NO: 2559448 - RNA, 19 nt, Artificial Sequence
  Description of Artificial Sequence: Synthetic oligonucleotide
gguguggucccaggcaugu

SEQ ID NO: 2559449 - RNA, 19 nt, Artificial Sequence
  Description of Artificial Sequence: Synthetic oligonucleotide
guccacggccaaccccauc

SEQ ID NO: 2559450 - RNA, 19 nt, Artificial Sequence
  Description of Artificial Sequence: Synthetic oligonucleotide
gguugacguuguaaccgaa

SEQ ID NO: 2559451 - RNA, 19 nt, Artificial Sequence
  Description of Artificial Sequence: Synthetic oligonucleotide
cuuucuucucugggaggcu

SEQ ID NO: 2559452 - RNA, 19 nt, Artificial Sequence
  Description of Artificial Sequence: Synthetic oligonucleotide
ccuccgagucuuccccuug

SEQ ID NO: 2559453 - RNA, 19 nt, Artificial Sequence
  Description of Artificial Sequence: Synthetic oligonucleotide
cagccuuccgacgagcauu

SEQ ID NO: 2559454 - RNA, 19 nt, Artificial Sequence
  Description of Artificial Sequence: Synthetic oligonucleotide
cagguucugccgcacggau

SEQ ID NO: 2559455 - RNA, 19 nt, Artificial Sequence
  Description of Artificial Sequence: Synthetic oligonucleotide
cggccaaccccaucuccgc

SEQ ID NO: 2559456 - RNA, 19 nt, Artificial Sequence
  Description of Artificial Sequence: Synthetic oligonucleotide
ccaccauguaaugaacaua

SEQ ID NO: 2559457 - RNA, 19 nt, Artificial Sequence
  Description of Artificial Sequence: Synthetic oligonucleotide
guucugccgcacggaucug

SEQ ID NO: 2559458 - RNA, 19 nt, Artificial Sequence
  Description of Artificial Sequence: Synthetic oligonucleotide
cgguugacguuguaaccga

SEQ ID NO: 2559459 - RNA, 19 nt, Artificial Sequence
  Description of Artificial Sequence: Synthetic oligonucleotide
cggagcagccuuccgacga

SEQ ID NO: 2559460 - RNA, 19 nt, Artificial Sequence
  Description of Artificial Sequence: Synthetic oligonucleotide
gcgcagacugucgcaccag

SEQ ID NO: 2559461 - RNA, 19 nt, Artificial Sequence
  Description of Artificial Sequence: Synthetic oligonucleotide
ccgaaucugcuuuggugua

SEQ ID NO: 2559462 - RNA, 19 nt, Artificial Sequence
  Description of Artificial Sequence: Synthetic oligonucleotide
ggaugugggagcacucgau

SEQ ID NO: 2559463 - RNA, 19 nt, Artificial Sequence
  Description of Artificial Sequence: Synthetic oligonucleotide
ccauagccuuauaguccuc

SEQ ID NO: 2559464 - RNA, 19 nt, Artificial Sequence
  Description of Artificial Sequence: Synthetic oligonucleotide
gccuugggcaucgcgcaga

SEQ ID NO: 2559465 - RNA, 19 nt, Artificial Sequence
  Description of Artificial Sequence: Synthetic oligonucleotide
gggcaucgcgcagacuguc

SEQ ID NO: 2559466 - RNA, 19 nt, Artificial Sequence
  Description of Artificial Sequence: Synthetic oligonucleotide
caaccuccaucuucuuauu

SEQ ID NO: 2559467 - RNA, 19 nt, Artificial Sequence
  Description of Artificial Sequence: Synthetic oligonucleotide
guguggucccaggcauguc

SEQ ID NO: 2559468 - RNA, 19 nt, Artificial Sequence
  Description of Artificial Sequence: Synthetic oligonucleotide
ccaaaaccuggcuuugguu

SEQ ID NO: 2559469 - RNA, 19 nt, Artificial Sequence
  Description of Artificial Sequence: Synthetic oligonucleotide
cgagacaagguauuuccuu

SEQ ID NO: 2559470 - RNA, 19 nt, Artificial Sequence
  Description of Artificial Sequence: Synthetic oligonucleotide
gccuuauaguccuccccau

SEQ ID NO: 2559471 - RNA, 19 nt, Artificial Sequence
  Description of Artificial Sequence: Synthetic oligonucleotide
ccgagacaagguauuuccu

SEQ ID NO: 2559472 - RNA, 19 nt, Artificial Sequence
  Description of Artificial Sequence: Synthetic oligonucleotide
cucagucaaccuccaucuu

SEQ ID NO: 2559473 - RNA, 19 nt, Artificial Sequence
  Description of Artificial Sequence: Synthetic oligonucleotide
cccaccacucagucaaccu

SEQ ID NO: 2559474 - RNA, 19 nt, Artificial Sequence
  Description of Artificial Sequence: Synthetic oligonucleotide
ccgcacaagguccuugggu

SEQ ID NO: 2559475 - RNA, 19 nt, Artificial Sequence
  Description of Artificial Sequence: Synthetic oligonucleotide
cauugcgguucagacgcuu

SEQ ID NO: 2559476 - RNA, 19 nt, Artificial Sequence
  Description of Artificial Sequence: Synthetic oligonucleotide
ccgcacggaucuggugugg

SEQ ID NO: 2559477 - RNA, 19 nt, Artificial Sequence
  Description of Artificial Sequence: Synthetic oligonucleotide
ggucccgagacaagguauu

SEQ ID NO: 2559478 - RNA, 19 nt, Artificial Sequence
  Description of Artificial Sequence: Synthetic oligonucleotide
ggucccaggcaugucggau

SEQ ID NO: 2559479 - RNA, 19 nt, Artificial Sequence
  Description of Artificial Sequence: Synthetic oligonucleotide
gucccgagacaagguauuu

SEQ ID NO: 2559480 - RNA, 19 nt, Artificial Sequence
  Description of Artificial Sequence: Synthetic oligonucleotide
aucccgggccauagccuua

SEQ ID NO: 2559481 - RNA, 19 nt, Artificial Sequence
  Description of Artificial Sequence: Synthetic oligonucleotide
gcagccuuccgacgagcau

SEQ ID NO: 2559482 - RNA, 19 nt, Artificial Sequence
  Description of Artificial Sequence: Synthetic oligonucleotide
cgcgcagacugucgcacca

SEQ ID NO: 2559483 - RNA, 19 nt, Artificial Sequence
  Description of Artificial Sequence: Synthetic oligonucleotide
gcuuucgguugacguugua

SEQ ID NO: 2559484 - RNA, 19 nt, Artificial Sequence
  Description of Artificial Sequence: Synthetic oligonucleotide
gccuuccgacgagcauugc

SEQ ID NO: 2559485 - RNA, 19 nt, Artificial Sequence
  Description of Artificial Sequence: Synthetic oligonucleotide
cgacgagcauugcgguuca

SEQ ID NO: 2559486 - RNA, 19 nt, Artificial Sequence
  Description of Artificial Sequence: Synthetic oligonucleotide
cgguucagacgcuuucggu

SEQ ID NO: 2559487 - RNA, 19 nt, Artificial Sequence
  Description of Artificial Sequence: Synthetic oligonucleotide
ggacagcccuugccccaaa

SEQ ID NO: 2559488 - RNA, 19 nt, Artificial Sequence
  Description of Artificial Sequence: Synthetic oligonucleotide
ggggugcccaccacucagu

SEQ ID NO: 2559489 - RNA, 19 nt, Artificial Sequence
  Description of Artificial Sequence: Synthetic oligonucleotide
cuugggcaucgcgcagacu

SEQ ID NO: 2559490 - RNA, 19 nt, Artificial Sequence
  Description of Artificial Sequence: Synthetic oligonucleotide
ccuugggucucuccuccau

SEQ ID NO: 2559491 - RNA, 19 nt, Artificial Sequence
  Description of Artificial Sequence: Synthetic oligonucleotide
ccccuuggccuugggcauc

SEQ ID NO: 2559492 - RNA, 19 nt, Artificial Sequence
  Description of Artificial Sequence: Synthetic oligonucleotide
cccaggcaugucggaugug

SEQ ID NO: 2559493 - RNA, 19 nt, Artificial Sequence
  Description of Artificial Sequence: Synthetic oligonucleotide
ccgccagguucugccgcac

SEQ ID NO: 2559494 - RNA, 19 nt, Artificial Sequence
  Description of Artificial Sequence: Synthetic oligonucleotide
cgauccgcggagcagccuu

SEQ ID NO: 2559495 - RNA, 19 nt, Artificial Sequence
  Description of Artificial Sequence: Synthetic oligonucleotide
gcauugcgguucagacgcu

SEQ ID NO: 2559496 - RNA, 19 nt, Artificial Sequence
  Description of Artificial Sequence: Synthetic oligonucleotide
ccacucagucaaccuccau

SEQ ID NO: 2559497 - RNA, 19 nt, Artificial Sequence
  Description of Artificial Sequence: Synthetic oligonucleotide
cgcuuucgguugacguugu

SEQ ID NO: 2559498 - RNA, 19 nt, Artificial Sequence
  Description of Artificial Sequence: Synthetic oligonucleotide
cggaucuggugugguccca

SEQ ID NO: 2559499 - RNA, 19 nt, Artificial Sequence
  Description of Artificial Sequence: Synthetic oligonucleotide
ccauggccuuuaccuuccu

SEQ ID NO: 2559500 - RNA, 19 nt, Artificial Sequence
  Description of Artificial Sequence: Synthetic oligonucleotide
cgcacggaucugguguggu

SEQ ID NO: 2559501 - RNA, 19 nt, Artificial Sequence
  Description of Artificial Sequence: Synthetic oligonucleotide
cccgggccauagccuuaua

SEQ ID NO: 2559502 - RNA, 19 nt, Artificial Sequence
  Description of Artificial Sequence: Synthetic oligonucleotide
ccccaugguuugccaccau

SEQ ID NO: 2559503 - RNA, 19 nt, Artificial Sequence
  Description of Artificial Sequence: Synthetic oligonucleotide
aacaaacucuuacaaaacc

SEQ ID NO: 2559504 - RNA, 19 nt, Artificial Sequence
  Description of Artificial Sequence: Synthetic oligonucleotide
ucuuacaaaacccagcuag

SEQ ID NO: 2559505 - RNA, 19 nt, Artificial Sequence
  Description of Artificial Sequence: Synthetic oligonucleotide
aacaucaccaaucacaggu

SEQ ID NO: 2559506 - RNA, 19 nt, Artificial Sequence
  Description of Artificial Sequence: Synthetic oligonucleotide
aaagcuguucccuucaagg

SEQ ID NO: 2559507 - RNA, 19 nt, Artificial Sequence
  Description of Artificial Sequence: Synthetic oligonucleotide
aauguagucagucagucca

SEQ ID NO: 2559508 - RNA, 19 nt, Artificial Sequence
  Description of Artificial Sequence: Synthetic oligonucleotide
uaaaacaccaaugagaccu

SEQ ID NO: 2559509 - RNA, 19 nt, Artificial Sequence
  Description of Artificial Sequence: Synthetic oligonucleotide
cuuaaaacaccaaugagac

SEQ ID NO: 2559510 - RNA, 19 nt, Artificial Sequence
  Description of Artificial Sequence: Synthetic oligonucleotide
agcaagagagaccaaaacc

SEQ ID NO: 2559511 - RNA, 19 nt, Artificial Sequence
  Description of Artificial Sequence: Synthetic oligonucleotide
  modified_base (4)..(4): a, c, u, g, unknown or other
aacnggagcuggcaaaugc

SEQ ID NO: 2559512 - RNA, 19 nt, Artificial Sequence
  Description of Artificial Sequence: Synthetic oligonucleotide
aauugugauauuuuaaaau

SEQ ID NO: 2559513 - RNA, 19 nt, Artificial Sequence
  Description of Artificial Sequence: Synthetic oligonucleotide
aagaaaacaagacagugau

SEQ ID NO: 2559514 - RNA, 19 nt, Artificial Sequence
  Description of Artificial Sequence: Synthetic oligonucleotide
uauuuagacucuuaaaaug

SEQ ID NO: 2559515 - RNA, 19 nt, Artificial Sequence
  Description of Artificial Sequence: Synthetic oligonucleotide
aauaaguuuaccccuucag

SEQ ID NO: 2559516 - RNA, 19 nt, Artificial Sequence
  Description of Artificial Sequence: Synthetic oligonucleotide
aucucaaucuaucuguccc

SEQ ID NO: 2559517 - RNA, 19 nt, Artificial Sequence
  Description of Artificial Sequence: Synthetic oligonucleotide
uucaguuccuauaugaagc

SEQ ID NO: 2559518 - RNA, 19 nt, Artificial Sequence
  Description of Artificial Sequence: Synthetic oligonucleotide
aaaaccuaaccugaguuac

SEQ ID NO: 2559519 - RNA, 19 nt, Artificial Sequence
  Description of Artificial Sequence: Synthetic oligonucleotide
gguuaaacagcucagaucc

SEQ ID NO: 2559520 - RNA, 19 nt, Artificial Sequence
  Description of Artificial Sequence: Synthetic oligonucleotide
uuuaucucaaucuaucugu

SEQ ID NO: 2559521 - RNA, 19 nt, Artificial Sequence
  Description of Artificial Sequence: Synthetic oligonucleotide
uauagaaggagugaccugg

SEQ ID NO: 2559522 - RNA, 19 nt, Artificial Sequence
  Description of Artificial Sequence: Synthetic oligonucleotide
aacagugaauuucaucuuc

SEQ ID NO: 2559523 - RNA, 19 nt, Artificial Sequence
  Description of Artificial Sequence: Synthetic oligonucleotide
uuaaaauuguacaaguuuu

SEQ ID NO: 2559524 - RNA, 19 nt, Artificial Sequence
  Description of Artificial Sequence: Synthetic oligonucleotide
uccuuuaccucccacaucc

SEQ ID NO: 2559525 - RNA, 19 nt, Artificial Sequence
  Description of Artificial Sequence: Synthetic oligonucleotide
uuaauugugauauuuuaaa

SEQ ID NO: 2559526 - RNA, 19 nt, Artificial Sequence
  Description of Artificial Sequence: Synthetic oligonucleotide
aaauguagucagucagucc

SEQ ID NO: 2559527 - RNA, 19 nt, Artificial Sequence
  Description of Artificial Sequence: Synthetic oligonucleotide
ugugauauuuuaaaauugu

SEQ ID NO: 2559528 - RNA, 19 nt, Artificial Sequence
  Description of Artificial Sequence: Synthetic oligonucleotide
aaaacaagacagugauggc

SEQ ID NO: 2559529 - RNA, 19 nt, Artificial Sequence
  Description of Artificial Sequence: Synthetic oligonucleotide
aaaacaucaccaaucacag

SEQ ID NO: 2559530 - RNA, 19 nt, Artificial Sequence
  Description of Artificial Sequence: Synthetic oligonucleotide
aaaauguagucagucaguc

SEQ ID NO: 2559531 - RNA, 19 nt, Artificial Sequence
  Description of Artificial Sequence: Synthetic oligonucleotide
aguuaaaauuacaaagccc

SEQ ID NO: 2559532 - RNA, 19 nt, Artificial Sequence
  Description of Artificial Sequence: Synthetic oligonucleotide
aaguuuaccccuucaguuc

SEQ ID NO: 2559533 - RNA, 19 nt, Artificial Sequence
  Description of Artificial Sequence: Synthetic oligonucleotide
gaaaacaucaccaaucaca

SEQ ID NO: 2559534 - RNA, 19 nt, Artificial Sequence
  Description of Artificial Sequence: Synthetic oligonucleotide
agaaggagugaccuggagc

SEQ ID NO: 2559535 - RNA, 19 nt, Artificial Sequence
  Description of Artificial Sequence: Synthetic oligonucleotide
uaugaagcacccaauauuc

SEQ ID NO: 2559536 - RNA, 19 nt, Artificial Sequence
  Description of Artificial Sequence: Synthetic oligonucleotide
uuuaauugugauauuuuaa

SEQ ID NO: 2559537 - RNA, 19 nt, Artificial Sequence
  Description of Artificial Sequence: Synthetic oligonucleotide
caauguaugugcuucacag

SEQ ID NO: 2559538 - RNA, 19 nt, Artificial Sequence
  Description of Artificial Sequence: Synthetic oligonucleotide
uuccuuaaaacaccaauga

SEQ ID NO: 2559539 - RNA, 19 nt, Artificial Sequence
  Description of Artificial Sequence: Synthetic oligonucleotide
gagaccaaaaccuaaccug

SEQ ID NO: 2559540 - RNA, 19 nt, Artificial Sequence
  Description of Artificial Sequence: Synthetic oligonucleotide
aguuuaccccuucaguucc

SEQ ID NO: 2559541 - RNA, 19 nt, Artificial Sequence
  Description of Artificial Sequence: Synthetic oligonucleotide
acaaacucuuacaaaaccc

SEQ ID NO: 2559542 - RNA, 19 nt, Artificial Sequence
  Description of Artificial Sequence: Synthetic oligonucleotide
uucaggguuaaacagcuca

SEQ ID NO: 2559543 - RNA, 19 nt, Artificial Sequence
  Description of Artificial Sequence: Synthetic oligonucleotide
aguuacaagaaaacaagac

SEQ ID NO: 2559544 - RNA, 19 nt, Artificial Sequence
  Description of Artificial Sequence: Synthetic oligonucleotide
uugaauggguuuaauaagu

SEQ ID NO: 2559545 - RNA, 19 nt, Artificial Sequence
  Description of Artificial Sequence: Synthetic oligonucleotide
auugugauauuuuaaaauu

SEQ ID NO: 2559546 - RNA, 19 nt, Artificial Sequence
  Description of Artificial Sequence: Synthetic oligonucleotide
guuacaagaaaacaagaca

SEQ ID NO: 2559547 - RNA, 19 nt, Artificial Sequence
  Description of Artificial Sequence: Synthetic oligonucleotide
ucuuaaaaugacaggaaaa

SEQ ID NO: 2559548 - RNA, 19 nt, Artificial Sequence
  Description of Artificial Sequence: Synthetic oligonucleotide
gguuuaauaaguuuacccc

SEQ ID NO: 2559549 - RNA, 19 nt, Artificial Sequence
  Description of Artificial Sequence: Synthetic oligonucleotide
gaugcaguggcacuugucc

SEQ ID NO: 2559550 - RNA, 19 nt, Artificial Sequence
  Description of Artificial Sequence: Synthetic oligonucleotide
agucagucaguccaggaac

SEQ ID NO: 2559551 - RNA, 19 nt, Artificial Sequence
  Description of Artificial Sequence: Synthetic oligonucleotide
aaagugggaggguaaauga

SEQ ID NO: 2559552 - RNA, 19 nt, Artificial Sequence
  Description of Artificial Sequence: Synthetic oligonucleotide
aacugguacagccccauag

SEQ ID NO: 2559553 - RNA, 19 nt, Artificial Sequence
  Description of Artificial Sequence: Synthetic oligonucleotide
ugacaggaaaacaucacca

SEQ ID NO: 2559554 - RNA, 19 nt, Artificial Sequence
  Description of Artificial Sequence: Synthetic oligonucleotide
agugaauuucaucuucagg

SEQ ID NO: 2559555 - RNA, 19 nt, Artificial Sequence
  Description of Artificial Sequence: Synthetic oligonucleotide
aacucuuacaaaacccagc

SEQ ID NO: 2559556 - RNA, 19 nt, Artificial Sequence
  Description of Artificial Sequence: Synthetic oligonucleotide
uauuccuuaaaacaccaau

SEQ ID NO: 2559557 - RNA, 19 nt, Artificial Sequence
  Description of Artificial Sequence: Synthetic oligonucleotide
caauauuccuuaaaacacc

SEQ ID NO: 2559558 - RNA, 19 nt, Artificial Sequence
  Description of Artificial Sequence: Synthetic oligonucleotide
uaacaacaaauucacaaaa

SEQ ID NO: 2559559 - RNA, 19 nt, Artificial Sequence
  Description of Artificial Sequence: Synthetic oligonucleotide
cauauuuagacucuuaaaa

SEQ ID NO: 2559560 - RNA, 19 nt, Artificial Sequence
  Description of Artificial Sequence: Synthetic oligonucleotide
aaacaaacucuuacaaaac

SEQ ID NO: 2559561 - RNA, 19 nt, Artificial Sequence
  Description of Artificial Sequence: Synthetic oligonucleotide
ucacguuuaauugugauau

SEQ ID NO: 2559562 - RNA, 19 nt, Artificial Sequence
  Description of Artificial Sequence: Synthetic oligonucleotide
auucacaaaauacaacagu

SEQ ID NO: 2559563 - RNA, 19 nt, Artificial Sequence
  Description of Artificial Sequence: Synthetic oligonucleotide
gaaggagugaccuggagca

SEQ ID NO: 2559564 - RNA, 19 nt, Artificial Sequence
  Description of Artificial Sequence: Synthetic oligonucleotide
gaaggcaaguaaaaguggg

SEQ ID NO: 2559565 - RNA, 19 nt, Artificial Sequence
  Description of Artificial Sequence: Synthetic oligonucleotide
aaaagugggaggguaaaug

SEQ ID NO: 2559566 - RNA, 19 nt, Artificial Sequence
  Description of Artificial Sequence: Synthetic oligonucleotide
aaacccagcuaguuuaucu

SEQ ID NO: 2559567 - RNA, 19 nt, Artificial Sequence
  Description of Artificial Sequence: Synthetic oligonucleotide
aacuggaaugcuccuuuac

SEQ ID NO: 2559568 - RNA, 19 nt, Artificial Sequence
  Description of Artificial Sequence: Synthetic oligonucleotide
uuagacucuuaaaaugaca

SEQ ID NO: 2559569 - RNA, 19 nt, Artificial Sequence
  Description of Artificial Sequence: Synthetic oligonucleotide
uccuauaugaagcacccaa

SEQ ID NO: 2559570 - RNA, 19 nt, Artificial Sequence
  Description of Artificial Sequence: Synthetic oligonucleotide
gaggguaaaugacacgggg

SEQ ID NO: 2559571 - RNA, 19 nt, Artificial Sequence
  Description of Artificial Sequence: Synthetic oligonucleotide
aacccagcuaguuuaucuc

SEQ ID NO: 2559572 - RNA, 19 nt, Artificial Sequence
  Description of Artificial Sequence: Synthetic oligonucleotide
uuaaaaugacaggaaaaca

SEQ ID NO: 2559573 - RNA, 19 nt, Artificial Sequence
  Description of Artificial Sequence: Synthetic oligonucleotide
aguuggggaacuuaauuug

SEQ ID NO: 2559574 - RNA, 19 nt, Artificial Sequence
  Description of Artificial Sequence: Synthetic oligonucleotide
ucuucaggguuaaacagcu

SEQ ID NO: 2559575 - RNA, 19 nt, Artificial Sequence
  Description of Artificial Sequence: Synthetic oligonucleotide
uuaauuuguaccagugaaa

SEQ ID NO: 2559576 - RNA, 19 nt, Artificial Sequence
  Description of Artificial Sequence: Synthetic oligonucleotide
uuuacaucugcccucccac

SEQ ID NO: 2559577 - RNA, 19 nt, Artificial Sequence
  Description of Artificial Sequence: Synthetic oligonucleotide
acucuuacaaaacccagcu

SEQ ID NO: 2559578 - RNA, 19 nt, Artificial Sequence
  Description of Artificial Sequence: Synthetic oligonucleotide
guuuaucucaaucuaucug

SEQ ID NO: 2559579 - RNA, 19 nt, Artificial Sequence
  Description of Artificial Sequence: Synthetic oligonucleotide
gacucuuaaaaugacagga

SEQ ID NO: 2559580 - RNA, 19 nt, Artificial Sequence
  Description of Artificial Sequence: Synthetic oligonucleotide
uaauuuguaccagugaaaa

SEQ ID NO: 2559581 - RNA, 19 nt, Artificial Sequence
  Description of Artificial Sequence: Synthetic oligonucleotide
aauauuccuuaaaacacca

SEQ ID NO: 2559582 - RNA, 19 nt, Artificial Sequence
  Description of Artificial Sequence: Synthetic oligonucleotide
auaaguuuaccccuucagu

SEQ ID NO: 2559583 - RNA, 19 nt, Artificial Sequence
  Description of Artificial Sequence: Synthetic oligonucleotide
agcuaguuuaucucaaucu

SEQ ID NO: 2559584 - RNA, 19 nt, Artificial Sequence
  Description of Artificial Sequence: Synthetic oligonucleotide
uuuuaaaauuguacaaguu

SEQ ID NO: 2559585 - RNA, 19 nt, Artificial Sequence
  Description of Artificial Sequence: Synthetic oligonucleotide
gguacagccccauaguugg

SEQ ID NO: 2559586 - RNA, 19 nt, Artificial Sequence
  Description of Artificial Sequence: Synthetic oligonucleotide
acaagaaaacaagacagug

SEQ ID NO: 2559587 - RNA, 19 nt, Artificial Sequence
  Description of Artificial Sequence: Synthetic oligonucleotide
cuucaguuccuauaugaag

SEQ ID NO: 2559588 - RNA, 19 nt, Artificial Sequence
  Description of Artificial Sequence: Synthetic oligonucleotide
uaguuuaucucaaucuauc

SEQ ID NO: 2559589 - RNA, 19 nt, Artificial Sequence
  Description of Artificial Sequence: Synthetic oligonucleotide
uacaacaguuaaaauuaca

SEQ ID NO: 2559590 - RNA, 19 nt, Artificial Sequence
  Description of Artificial Sequence: Synthetic oligonucleotide
aauguaugugcuucacaga

SEQ ID NO: 2559591 - RNA, 19 nt, Artificial Sequence
  Description of Artificial Sequence: Synthetic oligonucleotide
ugacacggggcuaauagga

SEQ ID NO: 2559592 - RNA, 19 nt, Artificial Sequence
  Description of Artificial Sequence: Synthetic oligonucleotide
cuuaauuuguaccagugaa

SEQ ID NO: 2559593 - RNA, 19 nt, Artificial Sequence
  Description of Artificial Sequence: Synthetic oligonucleotide
uacaaagcccauucaauac

SEQ ID NO: 2559594 - RNA, 19 nt, Artificial Sequence
  Description of Artificial Sequence: Synthetic oligonucleotide
aauaccagggguagacugg

SEQ ID NO: 2559595 - RNA, 19 nt, Artificial Sequence
  Description of Artificial Sequence: Synthetic oligonucleotide
ggguuuaauaaguuuaccc

SEQ ID NO: 2559596 - RNA, 19 nt, Artificial Sequence
  Description of Artificial Sequence: Synthetic oligonucleotide
uuuaauaaguuuaccccuu

SEQ ID NO: 2559597 - RNA, 19 nt, Artificial Sequence
  Description of Artificial Sequence: Synthetic oligonucleotide
cacucugugaugcaguggc

SEQ ID NO: 2559598 - RNA, 19 nt, Artificial Sequence
  Description of Artificial Sequence: Synthetic oligonucleotide
ucaggguuaaacagcucag

SEQ ID NO: 2559599 - RNA, 19 nt, Artificial Sequence
  Description of Artificial Sequence: Synthetic oligonucleotide
auaugaagcacccaauauu

SEQ ID NO: 2559600 - RNA, 19 nt, Artificial Sequence
  Description of Artificial Sequence: Synthetic oligonucleotide
auguaugugcuucacagaa

SEQ ID NO: 2559601 - RNA, 19 nt, Artificial Sequence
  Description of Artificial Sequence: Synthetic oligonucleotide
agcuguucccuucaagggg

SEQ ID NO: 2559602 - RNA, 19 nt, Artificial Sequence
  Description of Artificial Sequence: Synthetic oligonucleotide
uuccuuuucugcagcagag

SEQ ID NO: 2559603 - RNA, 19 nt, Artificial Sequence
  Description of Artificial Sequence: Synthetic oligonucleotide
uuuuacaucugcccuccca

SEQ ID NO: 2559604 - RNA, 19 nt, Artificial Sequence
  Description of Artificial Sequence: Synthetic oligonucleotide
  modified_base (14)..(14): a, c, u, g, unknown or other
ucaguccaggaacnggagc

SEQ ID NO: 2559605 - RNA, 19 nt, Artificial Sequence
  Description of Artificial Sequence: Synthetic oligonucleotide
agagaccaaaaccuaaccu

SEQ ID NO: 2559606 - RNA, 19 nt, Artificial Sequence
  Description of Artificial Sequence: Synthetic oligonucleotide
ccaauauuccuuaaaacac

SEQ ID NO: 2559607 - RNA, 19 nt, Artificial Sequence
  Description of Artificial Sequence: Synthetic oligonucleotide
uaauaaguuuaccccuuca

SEQ ID NO: 2559608 - RNA, 19 nt, Artificial Sequence
  Description of Artificial Sequence: Synthetic oligonucleotide
uagacuggaaggcaaguaa

SEQ ID NO: 2559609 - RNA, 19 nt, Artificial Sequence
  Description of Artificial Sequence: Synthetic oligonucleotide
gcaaguaaaagugggaggg

SEQ ID NO: 2559610 - RNA, 19 nt, Artificial Sequence
  Description of Artificial Sequence: Synthetic oligonucleotide
aaacucuuacaaaacccag

SEQ ID NO: 2559611 - RNA, 19 nt, Artificial Sequence
  Description of Artificial Sequence: Synthetic oligonucleotide
acagugauggcuauagaag

SEQ ID NO: 2559612 - RNA, 19 nt, Artificial Sequence
  Description of Artificial Sequence: Synthetic oligonucleotide
gacagugauggcuauagaa

SEQ ID NO: 2559613 - RNA, 19 nt, Artificial Sequence
  Description of Artificial Sequence: Synthetic oligonucleotide
uuaccucccacauccaaug

SEQ ID NO: 2559614 - RNA, 19 nt, Artificial Sequence
  Description of Artificial Sequence: Synthetic oligonucleotide
auuccuuaaaacaccaaug

SEQ ID NO: 2559615 - RNA, 19 nt, Artificial Sequence
  Description of Artificial Sequence: Synthetic oligonucleotide
cugaguuacaagaaaacaa

SEQ ID NO: 2559616 - RNA, 19 nt, Artificial Sequence
  Description of Artificial Sequence: Synthetic oligonucleotide
ucugcagcagagcaagaga

SEQ ID NO: 2559617 - RNA, 19 nt, Artificial Sequence
  Description of Artificial Sequence: Synthetic oligonucleotide
gguugaauggguuuaauaa

SEQ ID NO: 2559618 - RNA, 19 nt, Artificial Sequence
  Description of Artificial Sequence: Synthetic oligonucleotide
uucaauaccagggguagac

SEQ ID NO: 2559619 - RNA, 19 nt, Artificial Sequence
  Description of Artificial Sequence: Synthetic oligonucleotide
gauggcuauagaaggagug

SEQ ID NO: 2559620 - RNA, 19 nt, Artificial Sequence
  Description of Artificial Sequence: Synthetic oligonucleotide
ucaguuccuauaugaagca

SEQ ID NO: 2559621 - RNA, 19 nt, Artificial Sequence
  Description of Artificial Sequence: Synthetic oligonucleotide
uuaaaacaccaaugagacc

SEQ ID NO: 2559622 - RNA, 19 nt, Artificial Sequence
  Description of Artificial Sequence: Synthetic oligonucleotide
agcagagcaagagagacca

SEQ ID NO: 2559623 - RNA, 19 nt, Artificial Sequence
  Description of Artificial Sequence: Synthetic oligonucleotide
aacaccaaugagaccuggc

SEQ ID NO: 2559624 - RNA, 19 nt, Artificial Sequence
  Description of Artificial Sequence: Synthetic oligonucleotide
ugguacagccccauaguug

SEQ ID NO: 2559625 - RNA, 19 nt, Artificial Sequence
  Description of Artificial Sequence: Synthetic oligonucleotide
agagagaccaaaaccuaac

SEQ ID NO: 2559626 - RNA, 19 nt, Artificial Sequence
  Description of Artificial Sequence: Synthetic oligonucleotide
accuggagcaacuggaaug

SEQ ID NO: 2559627 - RNA, 19 nt, Artificial Sequence
  Description of Artificial Sequence: Synthetic oligonucleotide
caaacucuuacaaaaccca

SEQ ID NO: 2559628 - RNA, 19 nt, Artificial Sequence
  Description of Artificial Sequence: Synthetic oligonucleotide
cugcagcagagcaagagag

SEQ ID NO: 2559629 - RNA, 19 nt, Artificial Sequence
  Description of Artificial Sequence: Synthetic oligonucleotide
uaucucaaucuaucugucc

SEQ ID NO: 2559630 - RNA, 19 nt, Artificial Sequence
  Description of Artificial Sequence: Synthetic oligonucleotide
aagugggaggguaaaugac

SEQ ID NO: 2559631 - RNA, 19 nt, Artificial Sequence
  Description of Artificial Sequence: Synthetic oligonucleotide
ucugagcacucugugaugc

SEQ ID NO: 2559632 - RNA, 19 nt, Artificial Sequence
  Description of Artificial Sequence: Synthetic oligonucleotide
auggguuuaauaaguuuac

SEQ ID NO: 2559633 - RNA, 19 nt, Artificial Sequence
  Description of Artificial Sequence: Synthetic oligonucleotide
uuaauaaguuuaccccuuc

SEQ ID NO: 2559634 - RNA, 19 nt, Artificial Sequence
  Description of Artificial Sequence: Synthetic oligonucleotide
accaaugagaccuggcagu

SEQ ID NO: 2559635 - RNA, 19 nt, Artificial Sequence
  Description of Artificial Sequence: Synthetic oligonucleotide
acagcucagauccucugag

SEQ ID NO: 2559636 - RNA, 19 nt, Artificial Sequence
  Description of Artificial Sequence: Synthetic oligonucleotide
uaucugucccaucucuuca

SEQ ID NO: 2559637 - RNA, 19 nt, Artificial Sequence
  Description of Artificial Sequence: Synthetic oligonucleotide
guuuaauaaguuuaccccu

SEQ ID NO: 2559638 - RNA, 19 nt, Artificial Sequence
  Description of Artificial Sequence: Synthetic oligonucleotide
caauaccagggguagacug

SEQ ID NO: 2559639 - RNA, 19 nt, Artificial Sequence
  Description of Artificial Sequence: Synthetic oligonucleotide
uuuaccucccacauccaau

SEQ ID NO: 2559640 - RNA, 19 nt, Artificial Sequence
  Description of Artificial Sequence: Synthetic oligonucleotide
aggguaaaugacacggggc

SEQ ID NO: 2559641 - RNA, 19 nt, Artificial Sequence
  Description of Artificial Sequence: Synthetic oligonucleotide
uaaacagcucagauccucu

SEQ ID NO: 2559642 - RNA, 19 nt, Artificial Sequence
  Description of Artificial Sequence: Synthetic oligonucleotide
aaacagcucagauccucug

SEQ ID NO: 2559643 - RNA, 19 nt, Artificial Sequence
  Description of Artificial Sequence: Synthetic oligonucleotide
uacaucugcccucccaccc

SEQ ID NO: 2559644 - RNA, 19 nt, Artificial Sequence
  Description of Artificial Sequence: Synthetic oligonucleotide
uaaccugaguuacaagaaa

SEQ ID NO: 2559645 - RNA, 19 nt, Artificial Sequence
  Description of Artificial Sequence: Synthetic oligonucleotide
ucugucccaucucuucagg

SEQ ID NO: 2559646 - RNA, 19 nt, Artificial Sequence
  Description of Artificial Sequence: Synthetic oligonucleotide
aggcaaguaaaagugggag

SEQ ID NO: 2559647 - RNA, 19 nt, Artificial Sequence
  Description of Artificial Sequence: Synthetic oligonucleotide
uacaaaacccagcuaguuu

SEQ ID NO: 2559648 - RNA, 19 nt, Artificial Sequence
  Description of Artificial Sequence: Synthetic oligonucleotide
acaccaaugagaccuggca

SEQ ID NO: 2559649 - RNA, 19 nt, Artificial Sequence
  Description of Artificial Sequence: Synthetic oligonucleotide
cauucaauaccagggguag

SEQ ID NO: 2559650 - RNA, 19 nt, Artificial Sequence
  Description of Artificial Sequence: Synthetic oligonucleotide
ugcaguggcacuuguccag

SEQ ID NO: 2559651 - RNA, 19 nt, Artificial Sequence
  Description of Artificial Sequence: Synthetic oligonucleotide
gggaggguaaaugacacgg

SEQ ID NO: 2559652 - RNA, 19 nt, Artificial Sequence
  Description of Artificial Sequence: Synthetic oligonucleotide
ccuuaaaacaccaaugaga

SEQ ID NO: 2559653 - RNA, 19 nt, Artificial Sequence
  Description of Artificial Sequence: Synthetic oligonucleotide
ucucaaucuaucuguccca

SEQ ID NO: 2559654 - RNA, 19 nt, Artificial Sequence
  Description of Artificial Sequence: Synthetic oligonucleotide
uggggaacuuaauuuguac

SEQ ID NO: 2559655 - RNA, 19 nt, Artificial Sequence
  Description of Artificial Sequence: Synthetic oligonucleotide
guaugugcuucacagaaaa

SEQ ID NO: 2559656 - RNA, 19 nt, Artificial Sequence
  Description of Artificial Sequence: Synthetic oligonucleotide
uuaaacagcucagauccuc

SEQ ID NO: 2559657 - RNA, 19 nt, Artificial Sequence
  Description of Artificial Sequence: Synthetic oligonucleotide
acaucugcccucccacccc

SEQ ID NO: 2559658 - RNA, 19 nt, Artificial Sequence
  Description of Artificial Sequence: Synthetic oligonucleotide
accugaguuacaagaaaac

SEQ ID NO: 2559659 - RNA, 19 nt, Artificial Sequence
  Description of Artificial Sequence: Synthetic oligonucleotide
ugaauggguuuaauaaguu

SEQ ID NO: 2559660 - RNA, 19 nt, Artificial Sequence
  Description of Artificial Sequence: Synthetic oligonucleotide
ggcaaguaaaagugggagg

SEQ ID NO: 2559661 - RNA, 19 nt, Artificial Sequence
  Description of Artificial Sequence: Synthetic oligonucleotide
ugucccaucucuucaggcu

SEQ ID NO: 2559662 - RNA, 19 nt, Artificial Sequence
  Description of Artificial Sequence: Synthetic oligonucleotide
aacaagacagugauggcua

SEQ ID NO: 2559663 - RNA, 19 nt, Artificial Sequence
  Description of Artificial Sequence: Synthetic oligonucleotide
cccaauauuccuuaaaaca

SEQ ID NO: 2559664 - RNA, 19 nt, Artificial Sequence
  Description of Artificial Sequence: Synthetic oligonucleotide
aaacaccaaugagaccugg

SEQ ID NO: 2559665 - RNA, 19 nt, Artificial Sequence
  Description of Artificial Sequence: Synthetic oligonucleotide
ugauggcuauagaaggagu

SEQ ID NO: 2559666 - RNA, 19 nt, Artificial Sequence
  Description of Artificial Sequence: Synthetic oligonucleotide
aaaacccagcuaguuuauc

SEQ ID NO: 2559667 - RNA, 19 nt, Artificial Sequence
  Description of Artificial Sequence: Synthetic oligonucleotide
uguagucagucaguccagg

SEQ ID NO: 2559668 - RNA, 19 nt, Artificial Sequence
  Description of Artificial Sequence: Synthetic oligonucleotide
gggaacuuaauuuguacca

SEQ ID NO: 2559669 - RNA, 19 nt, Artificial Sequence
  Description of Artificial Sequence: Synthetic oligonucleotide
  modified_base (16)..(16): a, c, u, g, unknown or other
agucaguccaggaacngga

SEQ ID NO: 2559670 - RNA, 19 nt, Artificial Sequence
  Description of Artificial Sequence: Synthetic oligonucleotide
ucccacauccaauguaugu

SEQ ID NO: 2559671 - RNA, 19 nt, Artificial Sequence
  Description of Artificial Sequence: Synthetic oligonucleotide
aggguuaaacagcucagau

SEQ ID NO: 2559672 - RNA, 19 nt, Artificial Sequence
  Description of Artificial Sequence: Synthetic oligonucleotide
  modified_base (10)..(10): a, c, u, g, unknown or other
uccaggaacnggagcuggc

SEQ ID NO: 2559673 - RNA, 19 nt, Artificial Sequence
  Description of Artificial Sequence: Synthetic oligonucleotide
aaucacagguugaaugggu

SEQ ID NO: 2559674 - RNA, 19 nt, Artificial Sequence
  Description of Artificial Sequence: Synthetic oligonucleotide
ugcuccuuuaccucccaca

SEQ ID NO: 2559675 - RNA, 19 nt, Artificial Sequence
  Description of Artificial Sequence: Synthetic oligonucleotide
uagaaggagugaccuggag

SEQ ID NO: 2559676 - RNA, 19 nt, Artificial Sequence
  Description of Artificial Sequence: Synthetic oligonucleotide
acugguacagccccauagu

SEQ ID NO: 2559677 - RNA, 19 nt, Artificial Sequence
  Description of Artificial Sequence: Synthetic oligonucleotide
cauccaauguaugugcuuc

SEQ ID NO: 2559678 - RNA, 19 nt, Artificial Sequence
  Description of Artificial Sequence: Synthetic oligonucleotide
cuaucugucccaucucuuc

SEQ ID NO: 2559679 - RNA, 19 nt, Artificial Sequence
  Description of Artificial Sequence: Synthetic oligonucleotide
uguaugugcuucacagaaa

SEQ ID NO: 2559680 - RNA, 19 nt, Artificial Sequence
  Description of Artificial Sequence: Synthetic oligonucleotide
aaguaaaagugggagggua

SEQ ID NO: 2559681 - RNA, 19 nt, Artificial Sequence
  Description of Artificial Sequence: Synthetic oligonucleotide
caccaaugagaccuggcag

SEQ ID NO: 2559682 - RNA, 19 nt, Artificial Sequence
  Description of Artificial Sequence: Synthetic oligonucleotide
accaaaaccuaaccugagu

SEQ ID NO: 2559683 - RNA, 19 nt, Artificial Sequence
  Description of Artificial Sequence: Synthetic oligonucleotide
gaguuacaagaaaacaaga

SEQ ID NO: 2559684 - RNA, 19 nt, Artificial Sequence
  Description of Artificial Sequence: Synthetic oligonucleotide
gugauggcuauagaaggag

SEQ ID NO: 2559685 - RNA, 19 nt, Artificial Sequence
  Description of Artificial Sequence: Synthetic oligonucleotide
aaccuaaccugaguuacaa

SEQ ID NO: 2559686 - RNA, 19 nt, Artificial Sequence
  Description of Artificial Sequence: Synthetic oligonucleotide
uggaaugcuccuuuaccuc

SEQ ID NO: 2559687 - RNA, 19 nt, Artificial Sequence
  Description of Artificial Sequence: Synthetic oligonucleotide
caaucacagguugaauggg

SEQ ID NO: 2559688 - RNA, 19 nt, Artificial Sequence
  Description of Artificial Sequence: Synthetic oligonucleotide
ugggaggguaaaugacacg

SEQ ID NO: 2559689 - RNA, 19 nt, Artificial Sequence
  Description of Artificial Sequence: Synthetic oligonucleotide
cucuuaaaaugacaggaaa

SEQ ID NO: 2559690 - RNA, 19 nt, Artificial Sequence
  Description of Artificial Sequence: Synthetic oligonucleotide
ggaaugcuccuuuaccucc

SEQ ID NO: 2559691 - RNA, 19 nt, Artificial Sequence
  Description of Artificial Sequence: Synthetic oligonucleotide
cagugaauuucaucuucag

SEQ ID NO: 2559692 - RNA, 19 nt, Artificial Sequence
  Description of Artificial Sequence: Synthetic oligonucleotide
agauccucugagcacucug

SEQ ID NO: 2559693 - RNA, 19 nt, Artificial Sequence
  Description of Artificial Sequence: Synthetic oligonucleotide
aagagagaccaaaaccuaa

SEQ ID NO: 2559694 - RNA, 19 nt, Artificial Sequence
  Description of Artificial Sequence: Synthetic oligonucleotide
uuacaucugcccucccacc

SEQ ID NO: 2559695 - RNA, 19 nt, Artificial Sequence
  Description of Artificial Sequence: Synthetic oligonucleotide
cuauagaaggagugaccug

SEQ ID NO: 2559696 - RNA, 19 nt, Artificial Sequence
  Description of Artificial Sequence: Synthetic oligonucleotide
  modified_base (7)..(7): a, c, u, g, unknown or other
aggaacnggagcuggcaaa

SEQ ID NO: 2559697 - RNA, 19 nt, Artificial Sequence
  Description of Artificial Sequence: Synthetic oligonucleotide
cuaaccugaguuacaagaa

SEQ ID NO: 2559698 - RNA, 19 nt, Artificial Sequence
  Description of Artificial Sequence: Synthetic oligonucleotide
caucaccaaucacagguug

SEQ ID NO: 2559699 - RNA, 19 nt, Artificial Sequence
  Description of Artificial Sequence: Synthetic oligonucleotide
aaggcaaguaaaaguggga

SEQ ID NO: 2559700 - RNA, 19 nt, Artificial Sequence
  Description of Artificial Sequence: Synthetic oligonucleotide
uggcuauagaaggagugac

SEQ ID NO: 2559701 - RNA, 19 nt, Artificial Sequence
  Description of Artificial Sequence: Synthetic oligonucleotide
aggagugaccuggagcaac

SEQ ID NO: 2559702 - RNA, 19 nt, Artificial Sequence
  Description of Artificial Sequence: Synthetic oligonucleotide
ggagcaacuggaaugcucc

SEQ ID NO: 2559703 - RNA, 19 nt, Artificial Sequence
  Description of Artificial Sequence: Synthetic oligonucleotide
aaaacaccaaugagaccug

SEQ ID NO: 2559704 - RNA, 19 nt, Artificial Sequence
  Description of Artificial Sequence: Synthetic oligonucleotide
ggaacuuaauuuguaccag

SEQ ID NO: 2559705 - RNA, 19 nt, Artificial Sequence
  Description of Artificial Sequence: Synthetic oligonucleotide
ccuaaccugaguuacaaga

SEQ ID NO: 2559706 - RNA, 19 nt, Artificial Sequence
  Description of Artificial Sequence: Synthetic oligonucleotide
acguuuaauugugauauuu

SEQ ID NO: 2559707 - RNA, 19 nt, Artificial Sequence
  Description of Artificial Sequence: Synthetic oligonucleotide
agugggaggguaaaugaca

SEQ ID NO: 2559708 - RNA, 19 nt, Artificial Sequence
  Description of Artificial Sequence: Synthetic oligonucleotide
ggaaggcaaguaaaagugg

SEQ ID NO: 2559709 - RNA, 19 nt, Artificial Sequence
  Description of Artificial Sequence: Synthetic oligonucleotide
agguugaauggguuuaaua

SEQ ID NO: 2559710 - RNA, 19 nt, Artificial Sequence
  Description of Artificial Sequence: Synthetic oligonucleotide
gaacuuaauuuguaccagu

SEQ ID NO: 2559711 - RNA, 19 nt, Artificial Sequence
  Description of Artificial Sequence: Synthetic oligonucleotide
aagcacccaauauuccuua

SEQ ID NO: 2559712 - RNA, 19 nt, Artificial Sequence
  Description of Artificial Sequence: Synthetic oligonucleotide
uuacaaaacccagcuaguu

SEQ ID NO: 2559713 - RNA, 19 nt, Artificial Sequence
  Description of Artificial Sequence: Synthetic oligonucleotide
  modified_base (18)..(18): a, c, u, g, unknown or other
ucagucaguccaggaacng

SEQ ID NO: 2559714 - RNA, 19 nt, Artificial Sequence
  Description of Artificial Sequence: Synthetic oligonucleotide
ggcuaauaggaaaagaaaa

SEQ ID NO: 2559715 - RNA, 19 nt, Artificial Sequence
  Description of Artificial Sequence: Synthetic oligonucleotide
aaugcuccuuuaccuccca

SEQ ID NO: 2559716 - RNA, 19 nt, Artificial Sequence
  Description of Artificial Sequence: Synthetic oligonucleotide
ucucuucaggcucuauuuu

SEQ ID NO: 2559717 - RNA, 19 nt, Artificial Sequence
  Description of Artificial Sequence: Synthetic oligonucleotide
acccagcuaguuuaucuca

SEQ ID NO: 2559718 - RNA, 19 nt, Artificial Sequence
  Description of Artificial Sequence: Synthetic oligonucleotide
cuauaugaagcacccaaua

SEQ ID NO: 2559719 - RNA, 19 nt, Artificial Sequence
  Description of Artificial Sequence: Synthetic oligonucleotide
cagcuaguuuaucucaauc

SEQ ID NO: 2559720 - RNA, 19 nt, Artificial Sequence
  Description of Artificial Sequence: Synthetic oligonucleotide
auggcuauagaaggaguga

SEQ ID NO: 2559721 - RNA, 19 nt, Artificial Sequence
  Description of Artificial Sequence: Synthetic oligonucleotide
guggccaacagugaauuuc

SEQ ID NO: 2559722 - RNA, 19 nt, Artificial Sequence
  Description of Artificial Sequence: Synthetic oligonucleotide
agccccauaguuggggaac

SEQ ID NO: 2559723 - RNA, 19 nt, Artificial Sequence
  Description of Artificial Sequence: Synthetic oligonucleotide
ccagggguagacuggaagg

SEQ ID NO: 2559724 - RNA, 19 nt, Artificial Sequence
  Description of Artificial Sequence: Synthetic oligonucleotide
gaccaaaaccuaaccugag

SEQ ID NO: 2559725 - RNA, 19 nt, Artificial Sequence
  Description of Artificial Sequence: Synthetic oligonucleotide
cuggaaggcaaguaaaagu

SEQ ID NO: 2559726 - RNA, 19 nt, Artificial Sequence
  Description of Artificial Sequence: Synthetic oligonucleotide
acagugaauuucaucuuca

SEQ ID NO: 2559727 - RNA, 19 nt, Artificial Sequence
  Description of Artificial Sequence: Synthetic oligonucleotide
ugugaugcaguggcacuug

SEQ ID NO: 2559728 - RNA, 19 nt, Artificial Sequence
  Description of Artificial Sequence: Synthetic oligonucleotide
cacccaauauuccuuaaaa

SEQ ID NO: 2559729 - RNA, 19 nt, Artificial Sequence
  Description of Artificial Sequence: Synthetic oligonucleotide
agugauggcuauagaagga

SEQ ID NO: 2559730 - RNA, 19 nt, Artificial Sequence
  Description of Artificial Sequence: Synthetic oligonucleotide
gaaugcuccuuuaccuccc

SEQ ID NO: 2559731 - RNA, 19 nt, Artificial Sequence
  Description of Artificial Sequence: Synthetic oligonucleotide
aaaccuaaccugaguuaca

SEQ ID NO: 2559732 - RNA, 19 nt, Artificial Sequence
  Description of Artificial Sequence: Synthetic oligonucleotide
ucacagguugaauggguuu

SEQ ID NO: 2559733 - RNA, 19 nt, Artificial Sequence
  Description of Artificial Sequence: Synthetic oligonucleotide
augcaguggcacuugucca

SEQ ID NO: 2559734 - RNA, 19 nt, Artificial Sequence
  Description of Artificial Sequence: Synthetic oligonucleotide
ggguuaaacagcucagauc

SEQ ID NO: 2559735 - RNA, 19 nt, Artificial Sequence
  Description of Artificial Sequence: Synthetic oligonucleotide
uaaaagugggaggguaaau

SEQ ID NO: 2559736 - RNA, 19 nt, Artificial Sequence
  Description of Artificial Sequence: Synthetic oligonucleotide
guaaaugacacggggcuaa

SEQ ID NO: 2559737 - RNA, 19 nt, Artificial Sequence
  Description of Artificial Sequence: Synthetic oligonucleotide
cagcagagcaagagagacc

SEQ ID NO: 2559738 - RNA, 19 nt, Artificial Sequence
  Description of Artificial Sequence: Synthetic oligonucleotide
caaaaccuaaccugaguua

SEQ ID NO: 2559739 - RNA, 19 nt, Artificial Sequence
  Description of Artificial Sequence: Synthetic oligonucleotide
aguaaaagugggaggguaa

SEQ ID NO: 2559740 - RNA, 19 nt, Artificial Sequence
  Description of Artificial Sequence: Synthetic oligonucleotide
acucuuaaaaugacaggaa

SEQ ID NO: 2559741 - RNA, 19 nt, Artificial Sequence
  Description of Artificial Sequence: Synthetic oligonucleotide
ugaugcaguggcacuuguc

SEQ ID NO: 2559742 - RNA, 19 nt, Artificial Sequence
  Description of Artificial Sequence: Synthetic oligonucleotide
gcccauucaauaccagggg

SEQ ID NO: 2559743 - RNA, 19 nt, Artificial Sequence
  Description of Artificial Sequence: Synthetic oligonucleotide
cucugugaugcaguggcac

SEQ ID NO: 2559744 - RNA, 19 nt, Artificial Sequence
  Description of Artificial Sequence: Synthetic oligonucleotide
cagggguagacuggaaggc

SEQ ID NO: 2559745 - RNA, 19 nt, Artificial Sequence
  Description of Artificial Sequence: Synthetic oligonucleotide
  modified_base (17)..(17): a, c, u, g, unknown or other
cagucaguccaggaacngg

SEQ ID NO: 2559746 - RNA, 19 nt, Artificial Sequence
  Description of Artificial Sequence: Synthetic oligonucleotide
uaccccuucaguuccuaua

SEQ ID NO: 2559747 - RNA, 19 nt, Artificial Sequence
  Description of Artificial Sequence: Synthetic oligonucleotide
ucaauaccagggguagacu

SEQ ID NO: 2559748 - RNA, 19 nt, Artificial Sequence
  Description of Artificial Sequence: Synthetic oligonucleotide
ccagaacugguacagcccc

SEQ ID NO: 2559749 - RNA, 19 nt, Artificial Sequence
  Description of Artificial Sequence: Synthetic oligonucleotide
gcuaguuuaucucaaucua

SEQ ID NO: 2559750 - RNA, 19 nt, Artificial Sequence
  Description of Artificial Sequence: Synthetic oligonucleotide
cuuguccagaacugguaca

SEQ ID NO: 2559751 - RNA, 19 nt, Artificial Sequence
  Description of Artificial Sequence: Synthetic oligonucleotide
gcaagagagaccaaaaccu

SEQ ID NO: 2559752 - RNA, 19 nt, Artificial Sequence
  Description of Artificial Sequence: Synthetic oligonucleotide
gugggaggguaaaugacac

SEQ ID NO: 2559753 - RNA, 19 nt, Artificial Sequence
  Description of Artificial Sequence: Synthetic oligonucleotide
acacggggcuaauaggaaa

SEQ ID NO: 2559754 - RNA, 19 nt, Artificial Sequence
  Description of Artificial Sequence: Synthetic oligonucleotide
ucccaucucuucaggcucu

SEQ ID NO: 2559755 - RNA, 19 nt, Artificial Sequence
  Description of Artificial Sequence: Synthetic oligonucleotide
guucccuucaaggggaaga

SEQ ID NO: 2559756 - RNA, 19 nt, Artificial Sequence
  Description of Artificial Sequence: Synthetic oligonucleotide
cuggaaugcuccuuuaccu

SEQ ID NO: 2559757 - RNA, 19 nt, Artificial Sequence
  Description of Artificial Sequence: Synthetic oligonucleotide
ucaaucuaucugucccauc

SEQ ID NO: 2559758 - RNA, 19 nt, Artificial Sequence
  Description of Artificial Sequence: Synthetic oligonucleotide
acauccaauguaugugcuu

SEQ ID NO: 2559759 - RNA, 19 nt, Artificial Sequence
  Description of Artificial Sequence: Synthetic oligonucleotide
guggcacuuguccagaacu

SEQ ID NO: 2559760 - RNA, 19 nt, Artificial Sequence
  Description of Artificial Sequence: Synthetic oligonucleotide
cucacguuuaauugugaua

SEQ ID NO: 2559761 - RNA, 19 nt, Artificial Sequence
  Description of Artificial Sequence: Synthetic oligonucleotide
  modified_base (3)..(3): a, c, u, g, unknown or other
acnggagcuggcaaaugcu

SEQ ID NO: 2559762 - RNA, 19 nt, Artificial Sequence
  Description of Artificial Sequence: Synthetic oligonucleotide
  modified_base (11)..(11): a, c, u, g, unknown or other
guccaggaacnggagcugg

SEQ ID NO: 2559763 - RNA, 19 nt, Artificial Sequence
  Description of Artificial Sequence: Synthetic oligonucleotide
guagucagucaguccagga

SEQ ID NO: 2559764 - RNA, 19 nt, Artificial Sequence
  Description of Artificial Sequence: Synthetic oligonucleotide
caagagagaccaaaaccua

SEQ ID NO: 2559765 - RNA, 19 nt, Artificial Sequence
  Description of Artificial Sequence: Synthetic oligonucleotide
augcuccuuuaccucccac

SEQ ID NO: 2559766 - RNA, 19 nt, Artificial Sequence
  Description of Artificial Sequence: Synthetic oligonucleotide
agagcaagagagaccaaaa

SEQ ID NO: 2559767 - RNA, 19 nt, Artificial Sequence
  Description of Artificial Sequence: Synthetic oligonucleotide
ggaaaacaucaccaaucac

SEQ ID NO: 2559768 - RNA, 19 nt, Artificial Sequence
  Description of Artificial Sequence: Synthetic oligonucleotide
ggcacuuguccagaacugg

SEQ ID NO: 2559769 - RNA, 19 nt, Artificial Sequence
  Description of Artificial Sequence: Synthetic oligonucleotide
cagcucagauccucugagc

SEQ ID NO: 2559770 - RNA, 19 nt, Artificial Sequence
  Description of Artificial Sequence: Synthetic oligonucleotide
gaauuucaucuucaggguu

SEQ ID NO: 2559771 - RNA, 19 nt, Artificial Sequence
  Description of Artificial Sequence: Synthetic oligonucleotide
acagccccauaguugggga

SEQ ID NO: 2559772 - RNA, 19 nt, Artificial Sequence
  Description of Artificial Sequence: Synthetic oligonucleotide
cuuacaaaacccagcuagu

SEQ ID NO: 2559773 - RNA, 19 nt, Artificial Sequence
  Description of Artificial Sequence: Synthetic oligonucleotide
  modified_base (13)..(13): a, c, u, g, unknown or other
caguccaggaacnggagcu

SEQ ID NO: 2559774 - RNA, 19 nt, Artificial Sequence
  Description of Artificial Sequence: Synthetic oligonucleotide
ggggcuaauaggaaaagaa

SEQ ID NO: 2559775 - RNA, 19 nt, Artificial Sequence
  Description of Artificial Sequence: Synthetic oligonucleotide
uguccagaacugguacagc

SEQ ID NO: 2559776 - RNA, 19 nt, Artificial Sequence
  Description of Artificial Sequence: Synthetic oligonucleotide
uucccuucaaggggaagaa

SEQ ID NO: 2559777 - RNA, 19 nt, Artificial Sequence
  Description of Artificial Sequence: Synthetic oligonucleotide
agacuggaaggcaaguaaa

SEQ ID NO: 2559778 - RNA, 19 nt, Artificial Sequence
  Description of Artificial Sequence: Synthetic oligonucleotide
caaugagaccuggcagugg

SEQ ID NO: 2559779 - RNA, 19 nt, Artificial Sequence
  Description of Artificial Sequence: Synthetic oligonucleotide
ggguaaaugacacggggcu

SEQ ID NO: 2559780 - RNA, 19 nt, Artificial Sequence
  Description of Artificial Sequence: Synthetic oligonucleotide
acaagacagugauggcuau

SEQ ID NO: 2559781 - RNA, 19 nt, Artificial Sequence
  Description of Artificial Sequence: Synthetic oligonucleotide
auaccagggguagacugga

SEQ ID NO: 2559782 - RNA, 19 nt, Artificial Sequence
  Description of Artificial Sequence: Synthetic oligonucleotide
uaccucccacauccaaugu

SEQ ID NO: 2559783 - RNA, 19 nt, Artificial Sequence
  Description of Artificial Sequence: Synthetic oligonucleotide
augagaccuggcaguggcc

SEQ ID NO: 2559784 - RNA, 19 nt, Artificial Sequence
  Description of Artificial Sequence: Synthetic oligonucleotide
ccuggagcaacuggaaugc

SEQ ID NO: 2559785 - RNA, 19 nt, Artificial Sequence
  Description of Artificial Sequence: Synthetic oligonucleotide
  modified_base (5)..(5): a, c, u, g, unknown or other
gaacnggagcuggcaaaug

SEQ ID NO: 2559786 - RNA, 19 nt, Artificial Sequence
  Description of Artificial Sequence: Synthetic oligonucleotide
  modified_base (12)..(12): a, c, u, g, unknown or other
aguccaggaacnggagcug

SEQ ID NO: 2559787 - RNA, 19 nt, Artificial Sequence
  Description of Artificial Sequence: Synthetic oligonucleotide
ggaggguaaaugacacggg

SEQ ID NO: 2559788 - RNA, 19 nt, Artificial Sequence
  Description of Artificial Sequence: Synthetic oligonucleotide
uguucccuucaaggggaag

SEQ ID NO: 2559789 - RNA, 19 nt, Artificial Sequence
  Description of Artificial Sequence: Synthetic oligonucleotide
ggcuauagaaggagugacc

SEQ ID NO: 2559790 - RNA, 19 nt, Artificial Sequence
  Description of Artificial Sequence: Synthetic oligonucleotide
cacggggcuaauaggaaaa

SEQ ID NO: 2559791 - RNA, 19 nt, Artificial Sequence
  Description of Artificial Sequence: Synthetic oligonucleotide
uuccuauaugaagcaccca

SEQ ID NO: 2559792 - RNA, 19 nt, Artificial Sequence
  Description of Artificial Sequence: Synthetic oligonucleotide
accucccacauccaaugua

SEQ ID NO: 2559793 - RNA, 19 nt, Artificial Sequence
  Description of Artificial Sequence: Synthetic oligonucleotide
cucccacauccaauguaug

SEQ ID NO: 2559794 - RNA, 19 nt, Artificial Sequence
  Description of Artificial Sequence: Synthetic oligonucleotide
  modified_base (15)..(15): a, c, u, g, unknown or other
gucaguccaggaacnggag

SEQ ID NO: 2559795 - RNA, 19 nt, Artificial Sequence
  Description of Artificial Sequence: Synthetic oligonucleotide
  modified_base (19)..(19): a, c, u, g, unknown or other
gucagucaguccaggaacn

SEQ ID NO: 2559796 - RNA, 19 nt, Artificial Sequence
  Description of Artificial Sequence: Synthetic oligonucleotide
aaaugacacggggcuaaua

SEQ ID NO: 2559797 - RNA, 19 nt, Artificial Sequence
  Description of Artificial Sequence: Synthetic oligonucleotide
gcuauagaaggagugaccu

SEQ ID NO: 2559798 - RNA, 19 nt, Artificial Sequence
  Description of Artificial Sequence: Synthetic oligonucleotide
cuuuaccucccacauccaa

SEQ ID NO: 2559799 - RNA, 19 nt, Artificial Sequence
  Description of Artificial Sequence: Synthetic oligonucleotide
acggggcuaauaggaaaag

SEQ ID NO: 2559800 - RNA, 19 nt, Artificial Sequence
  Description of Artificial Sequence: Synthetic oligonucleotide
caguuccuauaugaagcac

SEQ ID NO: 2559801 - RNA, 19 nt, Artificial Sequence
  Description of Artificial Sequence: Synthetic oligonucleotide
agggguagacuggaaggca

SEQ ID NO: 2559802 - RNA, 19 nt, Artificial Sequence
  Description of Artificial Sequence: Synthetic oligonucleotide
auucaauaccagggguaga

SEQ ID NO: 2559803 - RNA, 19 nt, Artificial Sequence
  Description of Artificial Sequence: Synthetic oligonucleotide
cccacauccaauguaugug

SEQ ID NO: 2559804 - RNA, 19 nt, Artificial Sequence
  Description of Artificial Sequence: Synthetic oligonucleotide
auagaaggagugaccugga

SEQ ID NO: 2559805 - RNA, 19 nt, Artificial Sequence
  Description of Artificial Sequence: Synthetic oligonucleotide
ccugaguuacaagaaaaca

SEQ ID NO: 2559806 - RNA, 19 nt, Artificial Sequence
  Description of Artificial Sequence: Synthetic oligonucleotide
uuaccccuucaguuccuau

SEQ ID NO: 2559807 - RNA, 19 nt, Artificial Sequence
  Description of Artificial Sequence: Synthetic oligonucleotide
cuucaggguuaaacagcuc

SEQ ID NO: 2559808 - RNA, 19 nt, Artificial Sequence
  Description of Artificial Sequence: Synthetic oligonucleotide
auauuccuuaaaacaccaa

SEQ ID NO: 2559809 - RNA, 19 nt, Artificial Sequence
  Description of Artificial Sequence: Synthetic oligonucleotide
agcacccaauauuccuuaa

SEQ ID NO: 2559810 - RNA, 19 nt, Artificial Sequence
  Description of Artificial Sequence: Synthetic oligonucleotide
aucacagguugaauggguu

SEQ ID NO: 2559811 - RNA, 19 nt, Artificial Sequence
  Description of Artificial Sequence: Synthetic oligonucleotide
guuggggaacuuaauuugu

SEQ ID NO: 2559812 - RNA, 19 nt, Artificial Sequence
  Description of Artificial Sequence: Synthetic oligonucleotide
cccuucaaggggaagaaaa

SEQ ID NO: 2559813 - RNA, 19 nt, Artificial Sequence
  Description of Artificial Sequence: Synthetic oligonucleotide
cuccuuuaccucccacauc

SEQ ID NO: 2559814 - RNA, 19 nt, Artificial Sequence
  Description of Artificial Sequence: Synthetic oligonucleotide
gcucagauccucugagcac

SEQ ID NO: 2559815 - RNA, 19 nt, Artificial Sequence
  Description of Artificial Sequence: Synthetic oligonucleotide
cccauauuuagacucuuaa

SEQ ID NO: 2559816 - RNA, 19 nt, Artificial Sequence
  Description of Artificial Sequence: Synthetic oligonucleotide
acagguugaauggguuuaa

SEQ ID NO: 2559817 - RNA, 19 nt, Artificial Sequence
  Description of Artificial Sequence: Synthetic oligonucleotide
guagacuggaaggcaagua

SEQ ID NO: 2559818 - RNA, 19 nt, Artificial Sequence
  Description of Artificial Sequence: Synthetic oligonucleotide
uuuaccccuucaguuccua

SEQ ID NO: 2559819 - RNA, 19 nt, Artificial Sequence
  Description of Artificial Sequence: Synthetic oligonucleotide
gauccucugagcacucugu

SEQ ID NO: 2559820 - RNA, 19 nt, Artificial Sequence
  Description of Artificial Sequence: Synthetic oligonucleotide
gacacggggcuaauaggaa

SEQ ID NO: 2559821 - RNA, 19 nt, Artificial Sequence
  Description of Artificial Sequence: Synthetic oligonucleotide
aaggagugaccuggagcaa

SEQ ID NO: 2559822 - RNA, 19 nt, Artificial Sequence
  Description of Artificial Sequence: Synthetic oligonucleotide
cacagguugaauggguuua

SEQ ID NO: 2559823 - RNA, 19 nt, Artificial Sequence
  Description of Artificial Sequence: Synthetic oligonucleotide
aguggccaacagugaauuu

SEQ ID NO: 2559824 - RNA, 19 nt, Artificial Sequence
  Description of Artificial Sequence: Synthetic oligonucleotide
ggcaguggccaacagugaa

SEQ ID NO: 2559825 - RNA, 19 nt, Artificial Sequence
  Description of Artificial Sequence: Synthetic oligonucleotide
gagugaccuggagcaacug

SEQ ID NO: 2559826 - RNA, 19 nt, Artificial Sequence
  Description of Artificial Sequence: Synthetic oligonucleotide
agcaacuggaaugcuccuu

SEQ ID NO: 2559827 - RNA, 19 nt, Artificial Sequence
  Description of Artificial Sequence: Synthetic oligonucleotide
ccauaguuggggaacuuaa

SEQ ID NO: 2559828 - RNA, 19 nt, Artificial Sequence
  Description of Artificial Sequence: Synthetic oligonucleotide
gcuguucccuucaagggga

SEQ ID NO: 2559829 - RNA, 19 nt, Artificial Sequence
  Description of Artificial Sequence: Synthetic oligonucleotide
acaucaccaaucacagguu

SEQ ID NO: 2559830 - RNA, 19 nt, Artificial Sequence
  Description of Artificial Sequence: Synthetic oligonucleotide
cauaguuggggaacuuaau

SEQ ID NO: 2559831 - RNA, 19 nt, Artificial Sequence
  Description of Artificial Sequence: Synthetic oligonucleotide
guacagccccauaguuggg

SEQ ID NO: 2559832 - RNA, 19 nt, Artificial Sequence
  Description of Artificial Sequence: Synthetic oligonucleotide
ggguagacuggaaggcaag

SEQ ID NO: 2559833 - RNA, 19 nt, Artificial Sequence
  Description of Artificial Sequence: Synthetic oligonucleotide
cacauccaauguaugugcu

SEQ ID NO: 2559834 - RNA, 19 nt, Artificial Sequence
  Description of Artificial Sequence: Synthetic oligonucleotide
ccauucaauaccaggggua

SEQ ID NO: 2559835 - RNA, 19 nt, Artificial Sequence
  Description of Artificial Sequence: Synthetic oligonucleotide
  modified_base (8)..(8): a, c, u, g, unknown or other
caggaacnggagcuggcaa

SEQ ID NO: 2559836 - RNA, 19 nt, Artificial Sequence
  Description of Artificial Sequence: Synthetic oligonucleotide
uaccagggguagacuggaa

SEQ ID NO: 2559837 - RNA, 19 nt, Artificial Sequence
  Description of Artificial Sequence: Synthetic oligonucleotide
cucuuacaaaacccagcua

SEQ ID NO: 2559838 - RNA, 19 nt, Artificial Sequence
  Description of Artificial Sequence: Synthetic oligonucleotide
ccaaugagaccuggcagug

SEQ ID NO: 2559839 - RNA, 19 nt, Artificial Sequence
  Description of Artificial Sequence: Synthetic oligonucleotide
gcacccaauauuccuuaaa

SEQ ID NO: 2559840 - RNA, 19 nt, Artificial Sequence
  Description of Artificial Sequence: Synthetic oligonucleotide
ccaauguaugugcuucaca

SEQ ID NO: 2559841 - RNA, 19 nt, Artificial Sequence
  Description of Artificial Sequence: Synthetic oligonucleotide
ccaaaaccuaaccugaguu

SEQ ID NO: 2559842 - RNA, 19 nt, Artificial Sequence
  Description of Artificial Sequence: Synthetic oligonucleotide
caucugcccucccacccca

SEQ ID NO: 2559843 - RNA, 19 nt, Artificial Sequence
  Description of Artificial Sequence: Synthetic oligonucleotide
gaccuggcaguggccaaca

SEQ ID NO: 2559844 - RNA, 19 nt, Artificial Sequence
  Description of Artificial Sequence: Synthetic oligonucleotide
caacagugaauuucaucuu

SEQ ID NO: 2559845 - RNA, 19 nt, Artificial Sequence
  Description of Artificial Sequence: Synthetic oligonucleotide
acucugugaugcaguggca

SEQ ID NO: 2559846 - RNA, 19 nt, Artificial Sequence
  Description of Artificial Sequence: Synthetic oligonucleotide
gaacugguacagccccaua

SEQ ID NO: 2559847 - RNA, 19 nt, Artificial Sequence
  Description of Artificial Sequence: Synthetic oligonucleotide
caccccauauuuagacucu

SEQ ID NO: 2559848 - RNA, 19 nt, Artificial Sequence
  Description of Artificial Sequence: Synthetic oligonucleotide
caaguaaaagugggagggu

SEQ ID NO: 2559849 - RNA, 19 nt, Artificial Sequence
  Description of Artificial Sequence: Synthetic oligonucleotide
caacuggaaugcuccuuua

SEQ ID NO: 2559850 - RNA, 19 nt, Artificial Sequence
  Description of Artificial Sequence: Synthetic oligonucleotide
guuaaacagcucagauccu

SEQ ID NO: 2559851 - RNA, 19 nt, Artificial Sequence
  Description of Artificial Sequence: Synthetic oligonucleotide
gcaacuggaaugcuccuuu

SEQ ID NO: 2559852 - RNA, 19 nt, Artificial Sequence
  Description of Artificial Sequence: Synthetic oligonucleotide
accccauauuuagacucuu

SEQ ID NO: 2559853 - RNA, 19 nt, Artificial Sequence
  Description of Artificial Sequence: Synthetic oligonucleotide
cugguacagccccauaguu

SEQ ID NO: 2559854 - RNA, 19 nt, Artificial Sequence
  Description of Artificial Sequence: Synthetic oligonucleotide
cucaaucuaucugucccau

SEQ ID NO: 2559855 - RNA, 19 nt, Artificial Sequence
  Description of Artificial Sequence: Synthetic oligonucleotide
ccuauaugaagcacccaau

SEQ ID NO: 2559856 - RNA, 19 nt, Artificial Sequence
  Description of Artificial Sequence: Synthetic oligonucleotide
caagacagugauggcuaua

SEQ ID NO: 2559857 - RNA, 19 nt, Artificial Sequence
  Description of Artificial Sequence: Synthetic oligonucleotide
  modified_base (6)..(6): a, c, u, g, unknown or other
ggaacnggagcuggcaaau

SEQ ID NO: 2559858 - RNA, 19 nt, Artificial Sequence
  Description of Artificial Sequence: Synthetic oligonucleotide
gguagacuggaaggcaagu

SEQ ID NO: 2559859 - RNA, 19 nt, Artificial Sequence
  Description of Artificial Sequence: Synthetic oligonucleotide
cagccccauaguuggggaa

SEQ ID NO: 2559860 - RNA, 19 nt, Artificial Sequence
  Description of Artificial Sequence: Synthetic oligonucleotide
ccucccacauccaauguau

SEQ ID NO: 2559861 - RNA, 19 nt, Artificial Sequence
  Description of Artificial Sequence: Synthetic oligonucleotide
cccauucaauaccaggggu

SEQ ID NO: 2559862 - RNA, 19 nt, Artificial Sequence
  Description of Artificial Sequence: Synthetic oligonucleotide
  modified_base (9)..(9): a, c, u, g, unknown or other
ccaggaacnggagcuggca

SEQ ID NO: 2559863 - RNA, 19 nt, Artificial Sequence
  Description of Artificial Sequence: Synthetic oligonucleotide
ggagugaccuggagcaacu

SEQ ID NO: 2559864 - RNA, 19 nt, Artificial Sequence
  Description of Artificial Sequence: Synthetic oligonucleotide
cacguuuaauugugauauu

SEQ ID NO: 2559865 - RNA, 19 nt, Artificial Sequence
  Description of Artificial Sequence: Synthetic oligonucleotide
ccuuuaccucccacaucca

SEQ ID NO: 2559866 - RNA, 19 nt, Artificial Sequence
  Description of Artificial Sequence: Synthetic oligonucleotide
ccccauauuuagacucuua

SEQ ID NO: 2559867 - RNA, 19 nt, Artificial Sequence
  Description of Artificial Sequence: Synthetic oligonucleotide
ccuggcaguggccaacagu

SEQ ID NO: 2559868 - RNA, 19 nt, Artificial Sequence
  Description of Artificial Sequence: Synthetic oligonucleotide
cccauaguuggggaacuua

SEQ ID NO: 2559869 - RNA, 19 nt, Artificial Sequence
  Description of Artificial Sequence: Synthetic oligonucleotide
caccaaucacagguugaau

SEQ ID NO: 2559870 - RNA, 19 nt, Artificial Sequence
  Description of Artificial Sequence: Synthetic oligonucleotide
ccagcuaguuuaucucaau

SEQ ID NO: 2559871 - RNA, 19 nt, Artificial Sequence
  Description of Artificial Sequence: Synthetic oligonucleotide
cccaccccauauuuagacu

SEQ ID NO: 2559872 - RNA, 19 nt, Artificial Sequence
  Description of Artificial Sequence: Synthetic oligonucleotide
cggggcuaauaggaaaaga

SEQ ID NO: 2559873 - RNA, 19 nt, Artificial Sequence
  Description of Artificial Sequence: Synthetic oligonucleotide
aucugcccucccaccccau

SEQ ID NO: 2559874 - RNA, 19 nt, Artificial Sequence
  Description of Artificial Sequence: Synthetic oligonucleotide
gcccucccaccccauauuu

SEQ ID NO: 2559875 - RNA, 19 nt, Artificial Sequence
  Description of Artificial Sequence: Synthetic oligonucleotide
gccccauaguuggggaacu

SEQ ID NO: 2559876 - RNA, 19 nt, Artificial Sequence
  Description of Artificial Sequence: Synthetic oligonucleotide
ggccaacagugaauuucau

SEQ ID NO: 2559877 - RNA, 19 nt, Artificial Sequence
  Description of Artificial Sequence: Synthetic oligonucleotide
ccccauaguuggggaacuu

SEQ ID NO: 2559878 - RNA, 19 nt, Artificial Sequence
  Description of Artificial Sequence: Synthetic oligonucleotide
aaaacaaugauucuaguga

SEQ ID NO: 2559879 - RNA, 19 nt, Artificial Sequence
  Description of Artificial Sequence: Synthetic oligonucleotide
aaggcuaccaaguaagugc

SEQ ID NO: 2559880 - RNA, 19 nt, Artificial Sequence
  Description of Artificial Sequence: Synthetic oligonucleotide
cugaauaagauccauaugc

SEQ ID NO: 2559881 - RNA, 19 nt, Artificial Sequence
  Description of Artificial Sequence: Synthetic oligonucleotide
ucaugugucaauaaccagg

SEQ ID NO: 2559882 - RNA, 19 nt, Artificial Sequence
  Description of Artificial Sequence: Synthetic oligonucleotide
ucaauaaccaggaaagaag

SEQ ID NO: 2559883 - RNA, 19 nt, Artificial Sequence
  Description of Artificial Sequence: Synthetic oligonucleotide
auaaccaggaaagaagugc

SEQ ID NO: 2559884 - RNA, 19 nt, Artificial Sequence
  Description of Artificial Sequence: Synthetic oligonucleotide
cuuacuaaugucaucacac

SEQ ID NO: 2559885 - RNA, 19 nt, Artificial Sequence
  Description of Artificial Sequence: Synthetic oligonucleotide
aacuuuacauucuuguaug

SEQ ID NO: 2559886 - RNA, 19 nt, Artificial Sequence
  Description of Artificial Sequence: Synthetic oligonucleotide
caucaaaccaauauggcag

SEQ ID NO: 2559887 - RNA, 19 nt, Artificial Sequence
  Description of Artificial Sequence: Synthetic oligonucleotide
aauacaaccagauggggau

SEQ ID NO: 2559888 - RNA, 19 nt, Artificial Sequence
  Description of Artificial Sequence: Synthetic oligonucleotide
aaagccauacagcugaaca

SEQ ID NO: 2559889 - RNA, 19 nt, Artificial Sequence
  Description of Artificial Sequence: Synthetic oligonucleotide
auccugaagaagcaggucc

SEQ ID NO: 2559890 - RNA, 19 nt, Artificial Sequence
  Description of Artificial Sequence: Synthetic oligonucleotide
auccauaugccauauucgc

SEQ ID NO: 2559891 - RNA, 19 nt, Artificial Sequence
  Description of Artificial Sequence: Synthetic oligonucleotide
aauuccaggacuaaguuca

SEQ ID NO: 2559892 - RNA, 19 nt, Artificial Sequence
  Description of Artificial Sequence: Synthetic oligonucleotide
uagguuacuaccuuggcug

SEQ ID NO: 2559893 - RNA, 19 nt, Artificial Sequence
  Description of Artificial Sequence: Synthetic oligonucleotide
ugaauaagauccauaugcc

SEQ ID NO: 2559894 - RNA, 19 nt, Artificial Sequence
  Description of Artificial Sequence: Synthetic oligonucleotide
uuucgagucacuucuuugg

SEQ ID NO: 2559895 - RNA, 19 nt, Artificial Sequence
  Description of Artificial Sequence: Synthetic oligonucleotide
cugacaacccuuuuaaacc

SEQ ID NO: 2559896 - RNA, 19 nt, Artificial Sequence
  Description of Artificial Sequence: Synthetic oligonucleotide
uguucuuucuccuuccgag

SEQ ID NO: 2559897 - RNA, 19 nt, Artificial Sequence
  Description of Artificial Sequence: Synthetic oligonucleotide
ucucacuuaauauucugcc

SEQ ID NO: 2559898 - RNA, 19 nt, Artificial Sequence
  Description of Artificial Sequence: Synthetic oligonucleotide
uaagugcuuacuaauguca

SEQ ID NO: 2559899 - RNA, 19 nt, Artificial Sequence
  Description of Artificial Sequence: Synthetic oligonucleotide
cuuaauauucugccuauag

SEQ ID NO: 2559900 - RNA, 19 nt, Artificial Sequence
  Description of Artificial Sequence: Synthetic oligonucleotide
cauucuuguaugcaaaggc

SEQ ID NO: 2559901 - RNA, 19 nt, Artificial Sequence
  Description of Artificial Sequence: Synthetic oligonucleotide
ucucaugugucaauaacca

SEQ ID NO: 2559902 - RNA, 19 nt, Artificial Sequence
  Description of Artificial Sequence: Synthetic oligonucleotide
uuaauauucugccuauagu

SEQ ID NO: 2559903 - RNA, 19 nt, Artificial Sequence
  Description of Artificial Sequence: Synthetic oligonucleotide
uucaggacaaacuuuacau

SEQ ID NO: 2559904 - RNA, 19 nt, Artificial Sequence
  Description of Artificial Sequence: Synthetic oligonucleotide
cagaaaacaaugauucuag

SEQ ID NO: 2559905 - RNA, 19 nt, Artificial Sequence
  Description of Artificial Sequence: Synthetic oligonucleotide
caggccaacacucauaggc

SEQ ID NO: 2559906 - RNA, 19 nt, Artificial Sequence
  Description of Artificial Sequence: Synthetic oligonucleotide
uuuacauucuuguaugcaa

SEQ ID NO: 2559907 - RNA, 19 nt, Artificial Sequence
  Description of Artificial Sequence: Synthetic oligonucleotide
uacuuugugcuucaggaca

SEQ ID NO: 2559908 - RNA, 19 nt, Artificial Sequence
  Description of Artificial Sequence: Synthetic oligonucleotide
gaaauccugaagaagcagg

SEQ ID NO: 2559909 - RNA, 19 nt, Artificial Sequence
  Description of Artificial Sequence: Synthetic oligonucleotide
uauggcagggucaagcuga

SEQ ID NO: 2559910 - RNA, 19 nt, Artificial Sequence
  Description of Artificial Sequence: Synthetic oligonucleotide
uuaaaccacuguaaauucc

SEQ ID NO: 2559911 - RNA, 19 nt, Artificial Sequence
  Description of Artificial Sequence: Synthetic oligonucleotide
aauaagauccauaugccau

SEQ ID NO: 2559912 - RNA, 19 nt, Artificial Sequence
  Description of Artificial Sequence: Synthetic oligonucleotide
cauauucgccaauacaacc

SEQ ID NO: 2559913 - RNA, 19 nt, Artificial Sequence
  Description of Artificial Sequence: Synthetic oligonucleotide
agugcugagagccugguca

SEQ ID NO: 2559914 - RNA, 19 nt, Artificial Sequence
  Description of Artificial Sequence: Synthetic oligonucleotide
cuguaaauuccuuggagag

SEQ ID NO: 2559915 - RNA, 19 nt, Artificial Sequence
  Description of Artificial Sequence: Synthetic oligonucleotide
uacuaaugucaucacacug

SEQ ID NO: 2559916 - RNA, 19 nt, Artificial Sequence
  Description of Artificial Sequence: Synthetic oligonucleotide
aauauggcagggucaagcu

SEQ ID NO: 2559917 - RNA, 19 nt, Artificial Sequence
  Description of Artificial Sequence: Synthetic oligonucleotide
ucucccucaaguuggagag

SEQ ID NO: 2559918 - RNA, 19 nt, Artificial Sequence
  Description of Artificial Sequence: Synthetic oligonucleotide
acuuuacauucuuguaugc

SEQ ID NO: 2559919 - RNA, 19 nt, Artificial Sequence
  Description of Artificial Sequence: Synthetic oligonucleotide
uuuaaaccacuguaaauuc

SEQ ID NO: 2559920 - RNA, 19 nt, Artificial Sequence
  Description of Artificial Sequence: Synthetic oligonucleotide
cucucaugugucaauaacc

SEQ ID NO: 2559921 - RNA, 19 nt, Artificial Sequence
  Description of Artificial Sequence: Synthetic oligonucleotide
acuguaaauuccuuggaga

SEQ ID NO: 2559922 - RNA, 19 nt, Artificial Sequence
  Description of Artificial Sequence: Synthetic oligonucleotide
uucagaaaguuuucgaguc

SEQ ID NO: 2559923 - RNA, 19 nt, Artificial Sequence
  Description of Artificial Sequence: Synthetic oligonucleotide
acaucaaaccaauauggca

SEQ ID NO: 2559924 - RNA, 19 nt, Artificial Sequence
  Description of Artificial Sequence: Synthetic oligonucleotide
aguuggagaggccauguuc

SEQ ID NO: 2559925 - RNA, 19 nt, Artificial Sequence
  Description of Artificial Sequence: Synthetic oligonucleotide
uucucacuuaauauucugc

SEQ ID NO: 2559926 - RNA, 19 nt, Artificial Sequence
  Description of Artificial Sequence: Synthetic oligonucleotide
aguaagugcuuacuaaugu

SEQ ID NO: 2559927 - RNA, 19 nt, Artificial Sequence
  Description of Artificial Sequence: Synthetic oligonucleotide
acacucauaggcuggguac

SEQ ID NO: 2559928 - RNA, 19 nt, Artificial Sequence
  Description of Artificial Sequence: Synthetic oligonucleotide
ucacuuaauauucugccua

SEQ ID NO: 2559929 - RNA, 19 nt, Artificial Sequence
  Description of Artificial Sequence: Synthetic oligonucleotide
uuagguuacuaccuuggcu

SEQ ID NO: 2559930 - RNA, 19 nt, Artificial Sequence
  Description of Artificial Sequence: Synthetic oligonucleotide
aaagaagugcuuucucacu

SEQ ID NO: 2559931 - RNA, 19 nt, Artificial Sequence
  Description of Artificial Sequence: Synthetic oligonucleotide
auggcagacacgaugaacg

SEQ ID NO: 2559932 - RNA, 19 nt, Artificial Sequence
  Description of Artificial Sequence: Synthetic oligonucleotide
gauccauaugccauauucg

SEQ ID NO: 2559933 - RNA, 19 nt, Artificial Sequence
  Description of Artificial Sequence: Synthetic oligonucleotide
uauucgccaauacaaccag

SEQ ID NO: 2559934 - RNA, 19 nt, Artificial Sequence
  Description of Artificial Sequence: Synthetic oligonucleotide
aaguuucucucccucaagu

SEQ ID NO: 2559935 - RNA, 19 nt, Artificial Sequence
  Description of Artificial Sequence: Synthetic oligonucleotide
cuggucacagaaaacaaug

SEQ ID NO: 2559936 - RNA, 19 nt, Artificial Sequence
  Description of Artificial Sequence: Synthetic oligonucleotide
cugccuauagugcugagag

SEQ ID NO: 2559937 - RNA, 19 nt, Artificial Sequence
  Description of Artificial Sequence: Synthetic oligonucleotide
guaugcaaaggcuaccaag

SEQ ID NO: 2559938 - RNA, 19 nt, Artificial Sequence
  Description of Artificial Sequence: Synthetic oligonucleotide
gaguucacugaauuccagg

SEQ ID NO: 2559939 - RNA, 19 nt, Artificial Sequence
  Description of Artificial Sequence: Synthetic oligonucleotide
ucuuguaugcaaaggcuac

SEQ ID NO: 2559940 - RNA, 19 nt, Artificial Sequence
  Description of Artificial Sequence: Synthetic oligonucleotide
uaaccaggaaagaagugcu

SEQ ID NO: 2559941 - RNA, 19 nt, Artificial Sequence
  Description of Artificial Sequence: Synthetic oligonucleotide
ugacuucacacaucaaacc

SEQ ID NO: 2559942 - RNA, 19 nt, Artificial Sequence
  Description of Artificial Sequence: Synthetic oligonucleotide
aucaaaccaauauggcagg

SEQ ID NO: 2559943 - RNA, 19 nt, Artificial Sequence
  Description of Artificial Sequence: Synthetic oligonucleotide
caggacaaacuuuacauuc

SEQ ID NO: 2559944 - RNA, 19 nt, Artificial Sequence
  Description of Artificial Sequence: Synthetic oligonucleotide
aguucacugaauuccagga

SEQ ID NO: 2559945 - RNA, 19 nt, Artificial Sequence
  Description of Artificial Sequence: Synthetic oligonucleotide
gagaacagcagacugaaua

SEQ ID NO: 2559946 - RNA, 19 nt, Artificial Sequence
  Description of Artificial Sequence: Synthetic oligonucleotide
gaauaagauccauaugcca

SEQ ID NO: 2559947 - RNA, 19 nt, Artificial Sequence
  Description of Artificial Sequence: Synthetic oligonucleotide
uuucucacuuaauauucug

SEQ ID NO: 2559948 - RNA, 19 nt, Artificial Sequence
  Description of Artificial Sequence: Synthetic oligonucleotide
uauagugcugagagccugg

SEQ ID NO: 2559949 - RNA, 19 nt, Artificial Sequence
  Description of Artificial Sequence: Synthetic oligonucleotide
gaggccauguucuuucucc

SEQ ID NO: 2559950 - RNA, 19 nt, Artificial Sequence
  Description of Artificial Sequence: Synthetic oligonucleotide
uuuagguuacuaccuuggc

SEQ ID NO: 2559951 - RNA, 19 nt, Artificial Sequence
  Description of Artificial Sequence: Synthetic oligonucleotide
uuuucgagucacuucuuug

SEQ ID NO: 2559952 - RNA, 19 nt, Artificial Sequence
  Description of Artificial Sequence: Synthetic oligonucleotide
gacacgaugaacgcguucc

SEQ ID NO: 2559953 - RNA, 19 nt, Artificial Sequence
  Description of Artificial Sequence: Synthetic oligonucleotide
uccauaugccauauucgcc

SEQ ID NO: 2559954 - RNA, 19 nt, Artificial Sequence
  Description of Artificial Sequence: Synthetic oligonucleotide
auauucugccuauagugcu

SEQ ID NO: 2559955 - RNA, 19 nt, Artificial Sequence
  Description of Artificial Sequence: Synthetic oligonucleotide
ucucucaugugucaauaac

SEQ ID NO: 2559956 - RNA, 19 nt, Artificial Sequence
  Description of Artificial Sequence: Synthetic oligonucleotide
auucuagugacuucacaca

SEQ ID NO: 2559957 - RNA, 19 nt, Artificial Sequence
  Description of Artificial Sequence: Synthetic oligonucleotide
aacccuuuuaaaccacugu

SEQ ID NO: 2559958 - RNA, 19 nt, Artificial Sequence
  Description of Artificial Sequence: Synthetic oligonucleotide
aaaggcuaccaaguaagug

SEQ ID NO: 2559959 - RNA, 19 nt, Artificial Sequence
  Description of Artificial Sequence: Synthetic oligonucleotide
ugacaacccuuuuaaacca

SEQ ID NO: 2559960 - RNA, 19 nt, Artificial Sequence
  Description of Artificial Sequence: Synthetic oligonucleotide
uucuucuggucucucaugu

SEQ ID NO: 2559961 - RNA, 19 nt, Artificial Sequence
  Description of Artificial Sequence: Synthetic oligonucleotide
ugcuacuuugugcuucagg

SEQ ID NO: 2559962 - RNA, 19 nt, Artificial Sequence
  Description of Artificial Sequence: Synthetic oligonucleotide
aucaacugcaaguuucucu

SEQ ID NO: 2559963 - RNA, 19 nt, Artificial Sequence
  Description of Artificial Sequence: Synthetic oligonucleotide
uuacauucuuguaugcaaa

SEQ ID NO: 2559964 - RNA, 19 nt, Artificial Sequence
  Description of Artificial Sequence: Synthetic oligonucleotide
uuggaaacagcauccuccc

SEQ ID NO: 2559965 - RNA, 19 nt, Artificial Sequence
  Description of Artificial Sequence: Synthetic oligonucleotide
uucccgaagaacagcgccg

SEQ ID NO: 2559966 - RNA, 19 nt, Artificial Sequence
  Description of Artificial Sequence: Synthetic oligonucleotide
cacaucaaaccaauauggc

SEQ ID NO: 2559967 - RNA, 19 nt, Artificial Sequence
  Description of Artificial Sequence: Synthetic oligonucleotide
aacagcgccgacgacuugg

SEQ ID NO: 2559968 - RNA, 19 nt, Artificial Sequence
  Description of Artificial Sequence: Synthetic oligonucleotide
aagaacagcgccgacgacu

SEQ ID NO: 2559969 - RNA, 19 nt, Artificial Sequence
  Description of Artificial Sequence: Synthetic oligonucleotide
aacgcguucccgaagaaca

SEQ ID NO: 2559970 - RNA, 19 nt, Artificial Sequence
  Description of Artificial Sequence: Synthetic oligonucleotide
uuacuaaugucaucacacu

SEQ ID NO: 2559971 - RNA, 19 nt, Artificial Sequence
  Description of Artificial Sequence: Synthetic oligonucleotide
acugaauaagauccauaug

SEQ ID NO: 2559972 - RNA, 19 nt, Artificial Sequence
  Description of Artificial Sequence: Synthetic oligonucleotide
ugcuucaggacaaacuuua

SEQ ID NO: 2559973 - RNA, 19 nt, Artificial Sequence
  Description of Artificial Sequence: Synthetic oligonucleotide
uucuuguaugcaaaggcua

SEQ ID NO: 2559974 - RNA, 19 nt, Artificial Sequence
  Description of Artificial Sequence: Synthetic oligonucleotide
agcgccgacgacuuggccg

SEQ ID NO: 2559975 - RNA, 19 nt, Artificial Sequence
  Description of Artificial Sequence: Synthetic oligonucleotide
ugccauauucgccaauaca

SEQ ID NO: 2559976 - RNA, 19 nt, Artificial Sequence
  Description of Artificial Sequence: Synthetic oligonucleotide
uauucugccuauagugcug

SEQ ID NO: 2559977 - RNA, 19 nt, Artificial Sequence
  Description of Artificial Sequence: Synthetic oligonucleotide
agugcuuacuaaugucauc

SEQ ID NO: 2559978 - RNA, 19 nt, Artificial Sequence
  Description of Artificial Sequence: Synthetic oligonucleotide
ugaaauccugaagaagcag

SEQ ID NO: 2559979 - RNA, 19 nt, Artificial Sequence
  Description of Artificial Sequence: Synthetic oligonucleotide
ucagaaaguuuucgaguca

SEQ ID NO: 2559980 - RNA, 19 nt, Artificial Sequence
  Description of Artificial Sequence: Synthetic oligonucleotide
ugcaaaggcuaccaaguaa

SEQ ID NO: 2559981 - RNA, 19 nt, Artificial Sequence
  Description of Artificial Sequence: Synthetic oligonucleotide
uucuagugacuucacacau

SEQ ID NO: 2559982 - RNA, 19 nt, Artificial Sequence
  Description of Artificial Sequence: Synthetic oligonucleotide
cagguugcggcugaaaucc

SEQ ID NO: 2559983 - RNA, 19 nt, Artificial Sequence
  Description of Artificial Sequence: Synthetic oligonucleotide
aauaaccaggaaagaagug

SEQ ID NO: 2559984 - RNA, 19 nt, Artificial Sequence
  Description of Artificial Sequence: Synthetic oligonucleotide
agguuacuaccuuggcugc

SEQ ID NO: 2559985 - RNA, 19 nt, Artificial Sequence
  Description of Artificial Sequence: Synthetic oligonucleotide
uggucacagaaaacaauga

SEQ ID NO: 2559986 - RNA, 19 nt, Artificial Sequence
  Description of Artificial Sequence: Synthetic oligonucleotide
cuagugacuucacacauca

SEQ ID NO: 2559987 - RNA, 19 nt, Artificial Sequence
  Description of Artificial Sequence: Synthetic oligonucleotide
aauccugaagaagcagguc

SEQ ID NO: 2559988 - RNA, 19 nt, Artificial Sequence
  Description of Artificial Sequence: Synthetic oligonucleotide
gaauuccaggacuaaguuc

SEQ ID NO: 2559989 - RNA, 19 nt, Artificial Sequence
  Description of Artificial Sequence: Synthetic oligonucleotide
ggagaguucacugaauucc

SEQ ID NO: 2559990 - RNA, 19 nt, Artificial Sequence
  Description of Artificial Sequence: Synthetic oligonucleotide
aaauuccuuggagaguuca

SEQ ID NO: 2559991 - RNA, 19 nt, Artificial Sequence
  Description of Artificial Sequence: Synthetic oligonucleotide
aaauccugaagaagcaggu

SEQ ID NO: 2559992 - RNA, 19 nt, Artificial Sequence
  Description of Artificial Sequence: Synthetic oligonucleotide
aaaucaacugcaaguuucu

SEQ ID NO: 2559993 - RNA, 19 nt, Artificial Sequence
  Description of Artificial Sequence: Synthetic oligonucleotide
uacaaccagauggggaugg

SEQ ID NO: 2559994 - RNA, 19 nt, Artificial Sequence
  Description of Artificial Sequence: Synthetic oligonucleotide
gugugcuguagcuucacag

SEQ ID NO: 2559995 - RNA, 19 nt, Artificial Sequence
  Description of Artificial Sequence: Synthetic oligonucleotide
cuuggagccgccuuuagga

SEQ ID NO: 2559996 - RNA, 19 nt, Artificial Sequence
  Description of Artificial Sequence: Synthetic oligonucleotide
gucaucacacuguagagaa

SEQ ID NO: 2559997 - RNA, 19 nt, Artificial Sequence
  Description of Artificial Sequence: Synthetic oligonucleotide
acagaaaacaaugauucua

SEQ ID NO: 2559998 - RNA, 19 nt, Artificial Sequence
  Description of Artificial Sequence: Synthetic oligonucleotide
gcuucagaaaguuuucgag

SEQ ID NO: 2559999 - RNA, 19 nt, Artificial Sequence
  Description of Artificial Sequence: Synthetic oligonucleotide
gacugaauaagauccauau

SEQ ID NO: 2560000 - RNA, 19 nt, Artificial Sequence
  Description of Artificial Sequence: Synthetic oligonucleotide
cacaggccaacacucauag

SEQ ID NO: 2560001 - RNA, 19 nt, Artificial Sequence
  Description of Artificial Sequence: Synthetic oligonucleotide
caugugucaauaaccagga

SEQ ID NO: 2560002 - RNA, 19 nt, Artificial Sequence
  Description of Artificial Sequence: Synthetic oligonucleotide
guucccgaagaacagcgcc

SEQ ID NO: 2560003 - RNA, 19 nt, Artificial Sequence
  Description of Artificial Sequence: Synthetic oligonucleotide
uuggccgacagguugcggc

SEQ ID NO: 2560004 - RNA, 19 nt, Artificial Sequence
  Description of Artificial Sequence: Synthetic oligonucleotide
aacacucauaggcugggua

SEQ ID NO: 2560005 - RNA, 19 nt, Artificial Sequence
  Description of Artificial Sequence: Synthetic oligonucleotide
uucgagucacuucuuugga

SEQ ID NO: 2560006 - RNA, 19 nt, Artificial Sequence
  Description of Artificial Sequence: Synthetic oligonucleotide
aaucaacugcaaguuucuc

SEQ ID NO: 2560007 - RNA, 19 nt, Artificial Sequence
  Description of Artificial Sequence: Synthetic oligonucleotide
cgccaauacaaccagaugg

SEQ ID NO: 2560008 - RNA, 19 nt, Artificial Sequence
  Description of Artificial Sequence: Synthetic oligonucleotide
agggccaaagccauacagc

SEQ ID NO: 2560009 - RNA, 19 nt, Artificial Sequence
  Description of Artificial Sequence: Synthetic oligonucleotide
agaaaacaaugauucuagu

SEQ ID NO: 2560010 - RNA, 19 nt, Artificial Sequence
  Description of Artificial Sequence: Synthetic oligonucleotide
cacuucuuuggaaacagca

SEQ ID NO: 2560011 - RNA, 19 nt, Artificial Sequence
  Description of Artificial Sequence: Synthetic oligonucleotide
uccugaagaagcagguccu

SEQ ID NO: 2560012 - RNA, 19 nt, Artificial Sequence
  Description of Artificial Sequence: Synthetic oligonucleotide
auauucgccaauacaacca

SEQ ID NO: 2560013 - RNA, 19 nt, Artificial Sequence
  Description of Artificial Sequence: Synthetic oligonucleotide
uguaaauuccuuggagagu

SEQ ID NO: 2560014 - RNA, 19 nt, Artificial Sequence
  Description of Artificial Sequence: Synthetic oligonucleotide
uuguaugcaaaggcuacca

SEQ ID NO: 2560015 - RNA, 19 nt, Artificial Sequence
  Description of Artificial Sequence: Synthetic oligonucleotide
ugucaucacacuguagaga

SEQ ID NO: 2560016 - RNA, 19 nt, Artificial Sequence
  Description of Artificial Sequence: Synthetic oligonucleotide
ugcggcugaaauccugaag

SEQ ID NO: 2560017 - RNA, 19 nt, Artificial Sequence
  Description of Artificial Sequence: Synthetic oligonucleotide
acugaauuccaggacuaag

SEQ ID NO: 2560018 - RNA, 19 nt, Artificial Sequence
  Description of Artificial Sequence: Synthetic oligonucleotide
agcuucagaaaguuuucga

SEQ ID NO: 2560019 - RNA, 19 nt, Artificial Sequence
  Description of Artificial Sequence: Synthetic oligonucleotide
acacgaugaacgcguuccc

SEQ ID NO: 2560020 - RNA, 19 nt, Artificial Sequence
  Description of Artificial Sequence: Synthetic oligonucleotide
auaagauccauaugccaua

SEQ ID NO: 2560021 - RNA, 19 nt, Artificial Sequence
  Description of Artificial Sequence: Synthetic oligonucleotide
ucaaaccaauauggcaggg

SEQ ID NO: 2560022 - RNA, 19 nt, Artificial Sequence
  Description of Artificial Sequence: Synthetic oligonucleotide
augccauauucgccaauac

SEQ ID NO: 2560023 - RNA, 19 nt, Artificial Sequence
  Description of Artificial Sequence: Synthetic oligonucleotide
ugagagccuggucacagaa

SEQ ID NO: 2560024 - RNA, 19 nt, Artificial Sequence
  Description of Artificial Sequence: Synthetic oligonucleotide
gugcuuacuaaugucauca

SEQ ID NO: 2560025 - RNA, 19 nt, Artificial Sequence
  Description of Artificial Sequence: Synthetic oligonucleotide
acccuuuuaaaccacugua

SEQ ID NO: 2560026 - RNA, 19 nt, Artificial Sequence
  Description of Artificial Sequence: Synthetic oligonucleotide
uagagaacagcagacugaa

SEQ ID NO: 2560027 - RNA, 19 nt, Artificial Sequence
  Description of Artificial Sequence: Synthetic oligonucleotide
auucuuguaugcaaaggcu

SEQ ID NO: 2560028 - RNA, 19 nt, Artificial Sequence
  Description of Artificial Sequence: Synthetic oligonucleotide
ucggacugcugcuuggagc

SEQ ID NO: 2560029 - RNA, 19 nt, Artificial Sequence
  Description of Artificial Sequence: Synthetic oligonucleotide
acaaugauucuagugacuu

SEQ ID NO: 2560030 - RNA, 19 nt, Artificial Sequence
  Description of Artificial Sequence: Synthetic oligonucleotide
agcuucacaggccaacacu

SEQ ID NO: 2560031 - RNA, 19 nt, Artificial Sequence
  Description of Artificial Sequence: Synthetic oligonucleotide
ucuagugacuucacacauc

SEQ ID NO: 2560032 - RNA, 19 nt, Artificial Sequence
  Description of Artificial Sequence: Synthetic oligonucleotide
gucacuucuuuggaaacag

SEQ ID NO: 2560033 - RNA, 19 nt, Artificial Sequence
  Description of Artificial Sequence: Synthetic oligonucleotide
caauacaaccagaugggga

SEQ ID NO: 2560034 - RNA, 19 nt, Artificial Sequence
  Description of Artificial Sequence: Synthetic oligonucleotide
gcaaaggcuaccaaguaag

SEQ ID NO: 2560035 - RNA, 19 nt, Artificial Sequence
  Description of Artificial Sequence: Synthetic oligonucleotide
cucaugugucaauaaccag

SEQ ID NO: 2560036 - RNA, 19 nt, Artificial Sequence
  Description of Artificial Sequence: Synthetic oligonucleotide
gaugaacgcguucccgaag

SEQ ID NO: 2560037 - RNA, 19 nt, Artificial Sequence
  Description of Artificial Sequence: Synthetic oligonucleotide
ugugcuacuuugugcuuca

SEQ ID NO: 2560038 - RNA, 19 nt, Artificial Sequence
  Description of Artificial Sequence: Synthetic oligonucleotide
augaacgcguucccgaaga

SEQ ID NO: 2560039 - RNA, 19 nt, Artificial Sequence
  Description of Artificial Sequence: Synthetic oligonucleotide
accuuggcugccuuuaccu

SEQ ID NO: 2560040 - RNA, 19 nt, Artificial Sequence
  Description of Artificial Sequence: Synthetic oligonucleotide
gccuauagugcugagagcc

SEQ ID NO: 2560041 - RNA, 19 nt, Artificial Sequence
  Description of Artificial Sequence: Synthetic oligonucleotide
aacaaugauucuagugacu

SEQ ID NO: 2560042 - RNA, 19 nt, Artificial Sequence
  Description of Artificial Sequence: Synthetic oligonucleotide
ugcaaguuucucucccuca

SEQ ID NO: 2560043 - RNA, 19 nt, Artificial Sequence
  Description of Artificial Sequence: Synthetic oligonucleotide
cuacuuugugcuucaggac

SEQ ID NO: 2560044 - RNA, 19 nt, Artificial Sequence
  Description of Artificial Sequence: Synthetic oligonucleotide
ucccucaaguuggagaggc

SEQ ID NO: 2560045 - RNA, 19 nt, Artificial Sequence
  Description of Artificial Sequence: Synthetic oligonucleotide
caucacacuguagagaaca

SEQ ID NO: 2560046 - RNA, 19 nt, Artificial Sequence
  Description of Artificial Sequence: Synthetic oligonucleotide
uguaugcaaaggcuaccaa

SEQ ID NO: 2560047 - RNA, 19 nt, Artificial Sequence
  Description of Artificial Sequence: Synthetic oligonucleotide
gugcuguagcuucacaggc

SEQ ID NO: 2560048 - RNA, 19 nt, Artificial Sequence
  Description of Artificial Sequence: Synthetic oligonucleotide
uuaucagcuucagaaaguu

SEQ ID NO: 2560049 - RNA, 19 nt, Artificial Sequence
  Description of Artificial Sequence: Synthetic oligonucleotide
ucaggacaaacuuuacauu

SEQ ID NO: 2560050 - RNA, 19 nt, Artificial Sequence
  Description of Artificial Sequence: Synthetic oligonucleotide
agccuggucacagaaaaca

SEQ ID NO: 2560051 - RNA, 19 nt, Artificial Sequence
  Description of Artificial Sequence: Synthetic oligonucleotide
auauggcagggucaagcug

SEQ ID NO: 2560052 - RNA, 19 nt, Artificial Sequence
  Description of Artificial Sequence: Synthetic oligonucleotide
ucuggucucucauguguca

SEQ ID NO: 2560053 - RNA, 19 nt, Artificial Sequence
  Description of Artificial Sequence: Synthetic oligonucleotide
cagaaaguuuucgagucac

SEQ ID NO: 2560054 - RNA, 19 nt, Artificial Sequence
  Description of Artificial Sequence: Synthetic oligonucleotide
uguagcuucacaggccaac

SEQ ID NO: 2560055 - RNA, 19 nt, Artificial Sequence
  Description of Artificial Sequence: Synthetic oligonucleotide
ucgccaauacaaccagaug

SEQ ID NO: 2560056 - RNA, 19 nt, Artificial Sequence
  Description of Artificial Sequence: Synthetic oligonucleotide
accaaguaagugcuuacua

SEQ ID NO: 2560057 - RNA, 19 nt, Artificial Sequence
  Description of Artificial Sequence: Synthetic oligonucleotide
acgaugaacgcguucccga

SEQ ID NO: 2560058 - RNA, 19 nt, Artificial Sequence
  Description of Artificial Sequence: Synthetic oligonucleotide
ucaagcugaccucccuggc

SEQ ID NO: 2560059 - RNA, 19 nt, Artificial Sequence
  Description of Artificial Sequence: Synthetic oligonucleotide
gagucacuucuuuggaaac

SEQ ID NO: 2560060 - RNA, 19 nt, Artificial Sequence
  Description of Artificial Sequence: Synthetic oligonucleotide
gccaauacaaccagauggg

SEQ ID NO: 2560061 - RNA, 19 nt, Artificial Sequence
  Description of Artificial Sequence: Synthetic oligonucleotide
cagggccaaagccauacag

SEQ ID NO: 2560062 - RNA, 19 nt, Artificial Sequence
  Description of Artificial Sequence: Synthetic oligonucleotide
uucacaggccaacacucau

SEQ ID NO: 2560063 - RNA, 19 nt, Artificial Sequence
  Description of Artificial Sequence: Synthetic oligonucleotide
ggaaacagcauccucccuc

SEQ ID NO: 2560064 - RNA, 19 nt, Artificial Sequence
  Description of Artificial Sequence: Synthetic oligonucleotide
gauggcagacacgaugaac

SEQ ID NO: 2560065 - RNA, 19 nt, Artificial Sequence
  Description of Artificial Sequence: Synthetic oligonucleotide
uuggagccgccuuuaggag

SEQ ID NO: 2560066 - RNA, 19 nt, Artificial Sequence
  Description of Artificial Sequence: Synthetic oligonucleotide
cuaccaaguaagugcuuac

SEQ ID NO: 2560067 - RNA, 19 nt, Artificial Sequence
  Description of Artificial Sequence: Synthetic oligonucleotide
uaccuuggcugccuuuacc

SEQ ID NO: 2560068 - RNA, 19 nt, Artificial Sequence
  Description of Artificial Sequence: Synthetic oligonucleotide
cacuguagagaacagcaga

SEQ ID NO: 2560069 - RNA, 19 nt, Artificial Sequence
  Description of Artificial Sequence: Synthetic oligonucleotide
cagcagacugaauaagauc

SEQ ID NO: 2560070 - RNA, 19 nt, Artificial Sequence
  Description of Artificial Sequence: Synthetic oligonucleotide
gccaaagccauacagcuga

SEQ ID NO: 2560071 - RNA, 19 nt, Artificial Sequence
  Description of Artificial Sequence: Synthetic oligonucleotide
caacccuuuuaaaccacug

SEQ ID NO: 2560072 - RNA, 19 nt, Artificial Sequence
  Description of Artificial Sequence: Synthetic oligonucleotide
aaccaauauggcaggguca

SEQ ID NO: 2560073 - RNA, 19 nt, Artificial Sequence
  Description of Artificial Sequence: Synthetic oligonucleotide
cugaaauccugaagaagca

SEQ ID NO: 2560074 - RNA, 19 nt, Artificial Sequence
  Description of Artificial Sequence: Synthetic oligonucleotide
ucuucuggucucucaugug

SEQ ID NO: 2560075 - RNA, 19 nt, Artificial Sequence
  Description of Artificial Sequence: Synthetic oligonucleotide
caggacuaaguucacaaaa

SEQ ID NO: 2560076 - RNA, 19 nt, Artificial Sequence
  Description of Artificial Sequence: Synthetic oligonucleotide
uucuggucucucauguguc

SEQ ID NO: 2560077 - RNA, 19 nt, Artificial Sequence
  Description of Artificial Sequence: Synthetic oligonucleotide
ucaaguuggagaggccaug

SEQ ID NO: 2560078 - RNA, 19 nt, Artificial Sequence
  Description of Artificial Sequence: Synthetic oligonucleotide
gaagaagcagguccuccuc

SEQ ID NO: 2560079 - RNA, 19 nt, Artificial Sequence
  Description of Artificial Sequence: Synthetic oligonucleotide
agacacgaugaacgcguuc

SEQ ID NO: 2560080 - RNA, 19 nt, Artificial Sequence
  Description of Artificial Sequence: Synthetic oligonucleotide
uucuccuuccgagacauuu

SEQ ID NO: 2560081 - RNA, 19 nt, Artificial Sequence
  Description of Artificial Sequence: Synthetic oligonucleotide
aagugcuuacuaaugucau

SEQ ID NO: 2560082 - RNA, 19 nt, Artificial Sequence
  Description of Artificial Sequence: Synthetic oligonucleotide
agccauacagcugaacagu

SEQ ID NO: 2560083 - RNA, 19 nt, Artificial Sequence
  Description of Artificial Sequence: Synthetic oligonucleotide
gcggcugaaauccugaaga

SEQ ID NO: 2560084 - RNA, 19 nt, Artificial Sequence
  Description of Artificial Sequence: Synthetic oligonucleotide
ucugccuauagugcugaga

SEQ ID NO: 2560085 - RNA, 19 nt, Artificial Sequence
  Description of Artificial Sequence: Synthetic oligonucleotide
uggcagacacgaugaacgc

SEQ ID NO: 2560086 - RNA, 19 nt, Artificial Sequence
  Description of Artificial Sequence: Synthetic oligonucleotide
acugcaaguuucucucccu

SEQ ID NO: 2560087 - RNA, 19 nt, Artificial Sequence
  Description of Artificial Sequence: Synthetic oligonucleotide
caaacuuuacauucuugua

SEQ ID NO: 2560088 - RNA, 19 nt, Artificial Sequence
  Description of Artificial Sequence: Synthetic oligonucleotide
cuucagaaaguuuucgagu

SEQ ID NO: 2560089 - RNA, 19 nt, Artificial Sequence
  Description of Artificial Sequence: Synthetic oligonucleotide
ugcuuacuaaugucaucac

SEQ ID NO: 2560090 - RNA, 19 nt, Artificial Sequence
  Description of Artificial Sequence: Synthetic oligonucleotide
ugugugcuguagcuucaca

SEQ ID NO: 2560091 - RNA, 19 nt, Artificial Sequence
  Description of Artificial Sequence: Synthetic oligonucleotide
caaguuucucucccucaag

SEQ ID NO: 2560092 - RNA, 19 nt, Artificial Sequence
  Description of Artificial Sequence: Synthetic oligonucleotide
cuuuacauucuuguaugca

SEQ ID NO: 2560093 - RNA, 19 nt, Artificial Sequence
  Description of Artificial Sequence: Synthetic oligonucleotide
caaugauucuagugacuuc

SEQ ID NO: 2560094 - RNA, 19 nt, Artificial Sequence
  Description of Artificial Sequence: Synthetic oligonucleotide
ucgagucacuucuuuggaa

SEQ ID NO: 2560095 - RNA, 19 nt, Artificial Sequence
  Description of Artificial Sequence: Synthetic oligonucleotide
guagagaacagcagacuga

SEQ ID NO: 2560096 - RNA, 19 nt, Artificial Sequence
  Description of Artificial Sequence: Synthetic oligonucleotide
agcugaacagugugugcug

SEQ ID NO: 2560097 - RNA, 19 nt, Artificial Sequence
  Description of Artificial Sequence: Synthetic oligonucleotide
gaagugcuuucucacuuaa

SEQ ID NO: 2560098 - RNA, 19 nt, Artificial Sequence
  Description of Artificial Sequence: Synthetic oligonucleotide
uaccaaguaagugcuuacu

SEQ ID NO: 2560099 - RNA, 19 nt, Artificial Sequence
  Description of Artificial Sequence: Synthetic oligonucleotide
uaagauccauaugccauau

SEQ ID NO: 2560100 - RNA, 19 nt, Artificial Sequence
  Description of Artificial Sequence: Synthetic oligonucleotide
cagcuucagaaaguuuucg

SEQ ID NO: 2560101 - RNA, 19 nt, Artificial Sequence
  Description of Artificial Sequence: Synthetic oligonucleotide
gaaacagcauccucccucu

SEQ ID NO: 2560102 - RNA, 19 nt, Artificial Sequence
  Description of Artificial Sequence: Synthetic oligonucleotide
cugaauuccaggacuaagu

SEQ ID NO: 2560103 - RNA, 19 nt, Artificial Sequence
  Description of Artificial Sequence: Synthetic oligonucleotide
gagaguucacugaauucca

SEQ ID NO: 2560104 - RNA, 19 nt, Artificial Sequence
  Description of Artificial Sequence: Synthetic oligonucleotide
uccucggacugcugcuugg

SEQ ID NO: 2560105 - RNA, 19 nt, Artificial Sequence
  Description of Artificial Sequence: Synthetic oligonucleotide
accaauauggcagggucaa

SEQ ID NO: 2560106 - RNA, 19 nt, Artificial Sequence
  Description of Artificial Sequence: Synthetic oligonucleotide
uagcuucacaggccaacac

SEQ ID NO: 2560107 - RNA, 19 nt, Artificial Sequence
  Description of Artificial Sequence: Synthetic oligonucleotide
augauucuagugacuucac

SEQ ID NO: 2560108 - RNA, 19 nt, Artificial Sequence
  Description of Artificial Sequence: Synthetic oligonucleotide
gacgacuuggccgacaggu

SEQ ID NO: 2560109 - RNA, 19 nt, Artificial Sequence
  Description of Artificial Sequence: Synthetic oligonucleotide
auaggcuggguacuauuuu

SEQ ID NO: 2560110 - RNA, 19 nt, Artificial Sequence
  Description of Artificial Sequence: Synthetic oligonucleotide
gcuuucucacuuaauauuc

SEQ ID NO: 2560111 - RNA, 19 nt, Artificial Sequence
  Description of Artificial Sequence: Synthetic oligonucleotide
caacugcaaguuucucucc

SEQ ID NO: 2560112 - RNA, 19 nt, Artificial Sequence
  Description of Artificial Sequence: Synthetic oligonucleotide
ucaucacacuguagagaac

SEQ ID NO: 2560113 - RNA, 19 nt, Artificial Sequence
  Description of Artificial Sequence: Synthetic oligonucleotide
gccauauucgccaauacaa

SEQ ID NO: 2560114 - RNA, 19 nt, Artificial Sequence
  Description of Artificial Sequence: Synthetic oligonucleotide
agucacuucuuuggaaaca

SEQ ID NO: 2560115 - RNA, 19 nt, Artificial Sequence
  Description of Artificial Sequence: Synthetic oligonucleotide
guaaauuccuuggagaguu

SEQ ID NO: 2560116 - RNA, 19 nt, Artificial Sequence
  Description of Artificial Sequence: Synthetic oligonucleotide
ucacaggccaacacucaua

SEQ ID NO: 2560117 - RNA, 19 nt, Artificial Sequence
  Description of Artificial Sequence: Synthetic oligonucleotide
ugccuauagugcugagagc

SEQ ID NO: 2560118 - RNA, 19 nt, Artificial Sequence
  Description of Artificial Sequence: Synthetic oligonucleotide
acuucacacaucaaaccaa

SEQ ID NO: 2560119 - RNA, 19 nt, Artificial Sequence
  Description of Artificial Sequence: Synthetic oligonucleotide
cuaaugucaucacacugua

SEQ ID NO: 2560120 - RNA, 19 nt, Artificial Sequence
  Description of Artificial Sequence: Synthetic oligonucleotide
uaaauuccuuggagaguuc

SEQ ID NO: 2560121 - RNA, 19 nt, Artificial Sequence
  Description of Artificial Sequence: Synthetic oligonucleotide
cucucccucaaguuggaga

SEQ ID NO: 2560122 - RNA, 19 nt, Artificial Sequence
  Description of Artificial Sequence: Synthetic oligonucleotide
gacuuggccgacagguugc

SEQ ID NO: 2560123 - RNA, 19 nt, Artificial Sequence
  Description of Artificial Sequence: Synthetic oligonucleotide
cacgaugaacgcguucccg

SEQ ID NO: 2560124 - RNA, 19 nt, Artificial Sequence
  Description of Artificial Sequence: Synthetic oligonucleotide
ucauaggcuggguacuauu

SEQ ID NO: 2560125 - RNA, 19 nt, Artificial Sequence
  Description of Artificial Sequence: Synthetic oligonucleotide
acacuguagagaacagcag

SEQ ID NO: 2560126 - RNA, 19 nt, Artificial Sequence
  Description of Artificial Sequence: Synthetic oligonucleotide
ugaccucccuggcagccca

SEQ ID NO: 2560127 - RNA, 19 nt, Artificial Sequence
  Description of Artificial Sequence: Synthetic oligonucleotide
agaagugcuuucucacuua

SEQ ID NO: 2560128 - RNA, 19 nt, Artificial Sequence
  Description of Artificial Sequence: Synthetic oligonucleotide
caaguaagugcuuacuaau

SEQ ID NO: 2560129 - RNA, 19 nt, Artificial Sequence
  Description of Artificial Sequence: Synthetic oligonucleotide
acaaccagauggggauggc

SEQ ID NO: 2560130 - RNA, 19 nt, Artificial Sequence
  Description of Artificial Sequence: Synthetic oligonucleotide
ccauauucgccaauacaac

SEQ ID NO: 2560131 - RNA, 19 nt, Artificial Sequence
  Description of Artificial Sequence: Synthetic oligonucleotide
agcugaccucccuggcagc

SEQ ID NO: 2560132 - RNA, 19 nt, Artificial Sequence
  Description of Artificial Sequence: Synthetic oligonucleotide
agaguucacugaauuccag

SEQ ID NO: 2560133 - RNA, 19 nt, Artificial Sequence
  Description of Artificial Sequence: Synthetic oligonucleotide
acaggccaacacucauagg

SEQ ID NO: 2560134 - RNA, 19 nt, Artificial Sequence
  Description of Artificial Sequence: Synthetic oligonucleotide
ugcuuggagccgccuuuag

SEQ ID NO: 2560135 - RNA, 19 nt, Artificial Sequence
  Description of Artificial Sequence: Synthetic oligonucleotide
guuggagaggccauguucu

SEQ ID NO: 2560136 - RNA, 19 nt, Artificial Sequence
  Description of Artificial Sequence: Synthetic oligonucleotide
aaguuggagaggccauguu

SEQ ID NO: 2560137 - RNA, 19 nt, Artificial Sequence
  Description of Artificial Sequence: Synthetic oligonucleotide
uggaaacagcauccucccu

SEQ ID NO: 2560138 - RNA, 19 nt, Artificial Sequence
  Description of Artificial Sequence: Synthetic oligonucleotide
gcuuacuaaugucaucaca

SEQ ID NO: 2560139 - RNA, 19 nt, Artificial Sequence
  Description of Artificial Sequence: Synthetic oligonucleotide
gacaacccuuuuaaaccac

SEQ ID NO: 2560140 - RNA, 19 nt, Artificial Sequence
  Description of Artificial Sequence: Synthetic oligonucleotide
gaaaguuuucgagucacuu

SEQ ID NO: 2560141 - RNA, 19 nt, Artificial Sequence
  Description of Artificial Sequence: Synthetic oligonucleotide
gacagguugcggcugaaau

SEQ ID NO: 2560142 - RNA, 19 nt, Artificial Sequence
  Description of Artificial Sequence: Synthetic oligonucleotide
auucugccuauagugcuga

SEQ ID NO: 2560143 - RNA, 19 nt, Artificial Sequence
  Description of Artificial Sequence: Synthetic oligonucleotide
ggcugaaauccugaagaag

SEQ ID NO: 2560144 - RNA, 19 nt, Artificial Sequence
  Description of Artificial Sequence: Synthetic oligonucleotide
aggcuaccaaguaagugcu

SEQ ID NO: 2560145 - RNA, 19 nt, Artificial Sequence
  Description of Artificial Sequence: Synthetic oligonucleotide
gaacgcguucccgaagaac

SEQ ID NO: 2560146 - RNA, 19 nt, Artificial Sequence
  Description of Artificial Sequence: Synthetic oligonucleotide
gcuuggagccgccuuuagg

SEQ ID NO: 2560147 - RNA, 19 nt, Artificial Sequence
  Description of Artificial Sequence: Synthetic oligonucleotide
augcaaaggcuaccaagua

SEQ ID NO: 2560148 - RNA, 19 nt, Artificial Sequence
  Description of Artificial Sequence: Synthetic oligonucleotide
ucccgaagaacagcgccga

SEQ ID NO: 2560149 - RNA, 19 nt, Artificial Sequence
  Description of Artificial Sequence: Synthetic oligonucleotide
cucacuuaauauucugccu

SEQ ID NO: 2560150 - RNA, 19 nt, Artificial Sequence
  Description of Artificial Sequence: Synthetic oligonucleotide
gcuguagcuucacaggcca

SEQ ID NO: 2560151 - RNA, 19 nt, Artificial Sequence
  Description of Artificial Sequence: Synthetic oligonucleotide
ugaacgcguucccgaagaa

SEQ ID NO: 2560152 - RNA, 19 nt, Artificial Sequence
  Description of Artificial Sequence: Synthetic oligonucleotide
cugcaaguuucucucccuc

SEQ ID NO: 2560153 - RNA, 19 nt, Artificial Sequence
  Description of Artificial Sequence: Synthetic oligonucleotide
gucacagaaaacaaugauu

SEQ ID NO: 2560154 - RNA, 19 nt, Artificial Sequence
  Description of Artificial Sequence: Synthetic oligonucleotide
acuaccuuggcugccuuua

SEQ ID NO: 2560155 - RNA, 19 nt, Artificial Sequence
  Description of Artificial Sequence: Synthetic oligonucleotide
auacaaccagauggggaug

SEQ ID NO: 2560156 - RNA, 19 nt, Artificial Sequence
  Description of Artificial Sequence: Synthetic oligonucleotide
auacagcugaacagugugu

SEQ ID NO: 2560157 - RNA, 19 nt, Artificial Sequence
  Description of Artificial Sequence: Synthetic oligonucleotide
guuaucagcuucagaaagu

SEQ ID NO: 2560158 - RNA, 19 nt, Artificial Sequence
  Description of Artificial Sequence: Synthetic oligonucleotide
cuucacaggccaacacuca

SEQ ID NO: 2560159 - RNA, 19 nt, Artificial Sequence
  Description of Artificial Sequence: Synthetic oligonucleotide
agggucaagcugaccuccc

SEQ ID NO: 2560160 - RNA, 19 nt, Artificial Sequence
  Description of Artificial Sequence: Synthetic oligonucleotide
acuuugugcuucaggacaa

SEQ ID NO: 2560161 - RNA, 19 nt, Artificial Sequence
  Description of Artificial Sequence: Synthetic oligonucleotide
ggccaacacucauaggcug

SEQ ID NO: 2560162 - RNA, 19 nt, Artificial Sequence
  Description of Artificial Sequence: Synthetic oligonucleotide
gacugcugcuuggagccgc

SEQ ID NO: 2560163 - RNA, 19 nt, Artificial Sequence
  Description of Artificial Sequence: Synthetic oligonucleotide
ggucaagcugaccucccug

SEQ ID NO: 2560164 - RNA, 19 nt, Artificial Sequence
  Description of Artificial Sequence: Synthetic oligonucleotide
acagcgccgacgacuuggc

SEQ ID NO: 2560165 - RNA, 19 nt, Artificial Sequence
  Description of Artificial Sequence: Synthetic oligonucleotide
ccauguucuuucuccuucc

SEQ ID NO: 2560166 - RNA, 19 nt, Artificial Sequence
  Description of Artificial Sequence: Synthetic oligonucleotide
gcguucccgaagaacagcg

SEQ ID NO: 2560167 - RNA, 19 nt, Artificial Sequence
  Description of Artificial Sequence: Synthetic oligonucleotide
guugcggcugaaauccuga

SEQ ID NO: 2560168 - RNA, 19 nt, Artificial Sequence
  Description of Artificial Sequence: Synthetic oligonucleotide
aggccaacacucauaggcu

SEQ ID NO: 2560169 - RNA, 19 nt, Artificial Sequence
  Description of Artificial Sequence: Synthetic oligonucleotide
cagcccagggccaaagcca

SEQ ID NO: 2560170 - RNA, 19 nt, Artificial Sequence
  Description of Artificial Sequence: Synthetic oligonucleotide
gaagaacagcgccgacgac

SEQ ID NO: 2560171 - RNA, 19 nt, Artificial Sequence
  Description of Artificial Sequence: Synthetic oligonucleotide
ccuuuuaaaccacuguaaa

SEQ ID NO: 2560172 - RNA, 19 nt, Artificial Sequence
  Description of Artificial Sequence: Synthetic oligonucleotide
cggacugcugcuuggagcc

SEQ ID NO: 2560173 - RNA, 19 nt, Artificial Sequence
  Description of Artificial Sequence: Synthetic oligonucleotide
uucugccuauagugcugag

SEQ ID NO: 2560174 - RNA, 19 nt, Artificial Sequence
  Description of Artificial Sequence: Synthetic oligonucleotide
ccaauacaaccagaugggg

SEQ ID NO: 2560175 - RNA, 19 nt, Artificial Sequence
  Description of Artificial Sequence: Synthetic oligonucleotide
guagcuucacaggccaaca

SEQ ID NO: 2560176 - RNA, 19 nt, Artificial Sequence
  Description of Artificial Sequence: Synthetic oligonucleotide
acugcugcuuggagccgcc

SEQ ID NO: 2560177 - RNA, 19 nt, Artificial Sequence
  Description of Artificial Sequence: Synthetic oligonucleotide
gccauguucuuucuccuuc

SEQ ID NO: 2560178 - RNA, 19 nt, Artificial Sequence
  Description of Artificial Sequence: Synthetic oligonucleotide
ccaaguaagugcuuacuaa

SEQ ID NO: 2560179 - RNA, 19 nt, Artificial Sequence
  Description of Artificial Sequence: Synthetic oligonucleotide
gccaacacucauaggcugg

SEQ ID NO: 2560180 - RNA, 19 nt, Artificial Sequence
  Description of Artificial Sequence: Synthetic oligonucleotide
acuuggccgacagguugcg

SEQ ID NO: 2560181 - RNA, 19 nt, Artificial Sequence
  Description of Artificial Sequence: Synthetic oligonucleotide
cucggacugcugcuuggag

SEQ ID NO: 2560182 - RNA, 19 nt, Artificial Sequence
  Description of Artificial Sequence: Synthetic oligonucleotide
caaagccauacagcugaac

SEQ ID NO: 2560183 - RNA, 19 nt, Artificial Sequence
  Description of Artificial Sequence: Synthetic oligonucleotide
agacugaauaagauccaua

SEQ ID NO: 2560184 - RNA, 19 nt, Artificial Sequence
  Description of Artificial Sequence: Synthetic oligonucleotide
caagcugaccucccuggca

SEQ ID NO: 2560185 - RNA, 19 nt, Artificial Sequence
  Description of Artificial Sequence: Synthetic oligonucleotide
auaugccauauucgccaau

SEQ ID NO: 2560186 - RNA, 19 nt, Artificial Sequence
  Description of Artificial Sequence: Synthetic oligonucleotide
cuaccuuggcugccuuuac

SEQ ID NO: 2560187 - RNA, 19 nt, Artificial Sequence
  Description of Artificial Sequence: Synthetic oligonucleotide
agaacagcgccgacgacuu

SEQ ID NO: 2560188 - RNA, 19 nt, Artificial Sequence
  Description of Artificial Sequence: Synthetic oligonucleotide
gcuucacaggccaacacuc

SEQ ID NO: 2560189 - RNA, 19 nt, Artificial Sequence
  Description of Artificial Sequence: Synthetic oligonucleotide
uagugcugagagccugguc

SEQ ID NO: 2560190 - RNA, 19 nt, Artificial Sequence
  Description of Artificial Sequence: Synthetic oligonucleotide
cacagaaaacaaugauucu

SEQ ID NO: 2560191 - RNA, 19 nt, Artificial Sequence
  Description of Artificial Sequence: Synthetic oligonucleotide
ccgaagaacagcgccgacg

SEQ ID NO: 2560192 - RNA, 19 nt, Artificial Sequence
  Description of Artificial Sequence: Synthetic oligonucleotide
cauaugccauauucgccaa

SEQ ID NO: 2560193 - RNA, 19 nt, Artificial Sequence
  Description of Artificial Sequence: Synthetic oligonucleotide
ggucacagaaaacaaugau

SEQ ID NO: 2560194 - RNA, 19 nt, Artificial Sequence
  Description of Artificial Sequence: Synthetic oligonucleotide
gucucucaugugucaauaa

SEQ ID NO: 2560195 - RNA, 19 nt, Artificial Sequence
  Description of Artificial Sequence: Synthetic oligonucleotide
uagugacuucacacaucaa

SEQ ID NO: 2560196 - RNA, 19 nt, Artificial Sequence
  Description of Artificial Sequence: Synthetic oligonucleotide
uugcggcugaaauccugaa

SEQ ID NO: 2560197 - RNA, 19 nt, Artificial Sequence
  Description of Artificial Sequence: Synthetic oligonucleotide
acuuaauauucugccuaua

SEQ ID NO: 2560198 - RNA, 19 nt, Artificial Sequence
  Description of Artificial Sequence: Synthetic oligonucleotide
gcaaguuucucucccucaa

SEQ ID NO: 2560199 - RNA, 19 nt, Artificial Sequence
  Description of Artificial Sequence: Synthetic oligonucleotide
cacuuaauauucugccuau

SEQ ID NO: 2560200 - RNA, 19 nt, Artificial Sequence
  Description of Artificial Sequence: Synthetic oligonucleotide
auucgccaauacaaccaga

SEQ ID NO: 2560201 - RNA, 19 nt, Artificial Sequence
  Description of Artificial Sequence: Synthetic oligonucleotide
guuacuaccuuggcugccu

SEQ ID NO: 2560202 - RNA, 19 nt, Artificial Sequence
  Description of Artificial Sequence: Synthetic oligonucleotide
cuccucggacugcugcuug

SEQ ID NO: 2560203 - RNA, 19 nt, Artificial Sequence
  Description of Artificial Sequence: Synthetic oligonucleotide
ccaacacucauaggcuggg

SEQ ID NO: 2560204 - RNA, 19 nt, Artificial Sequence
  Description of Artificial Sequence: Synthetic oligonucleotide
cucccucaaguuggagagg

SEQ ID NO: 2560205 - RNA, 19 nt, Artificial Sequence
  Description of Artificial Sequence: Synthetic oligonucleotide
acgcguucccgaagaacag

SEQ ID NO: 2560206 - RNA, 19 nt, Artificial Sequence
  Description of Artificial Sequence: Synthetic oligonucleotide
ccgccuuuaggagccaugg

SEQ ID NO: 2560207 - RNA, 19 nt, Artificial Sequence
  Description of Artificial Sequence: Synthetic oligonucleotide
gguuacuaccuuggcugcc

SEQ ID NO: 2560208 - RNA, 19 nt, Artificial Sequence
  Description of Artificial Sequence: Synthetic oligonucleotide
gcuaccaaguaagugcuua

SEQ ID NO: 2560209 - RNA, 19 nt, Artificial Sequence
  Description of Artificial Sequence: Synthetic oligonucleotide
cauaggcuggguacuauuu

SEQ ID NO: 2560210 - RNA, 19 nt, Artificial Sequence
  Description of Artificial Sequence: Synthetic oligonucleotide
caaaggcuaccaaguaagu

SEQ ID NO: 2560211 - RNA, 19 nt, Artificial Sequence
  Description of Artificial Sequence: Synthetic oligonucleotide
cgaagaacagcgccgacga

SEQ ID NO: 2560212 - RNA, 19 nt, Artificial Sequence
  Description of Artificial Sequence: Synthetic oligonucleotide
cuuggccgacagguugcgg

SEQ ID NO: 2560213 - RNA, 19 nt, Artificial Sequence
  Description of Artificial Sequence: Synthetic oligonucleotide
caaccagauggggauggca

SEQ ID NO: 2560214 - RNA, 19 nt, Artificial Sequence
  Description of Artificial Sequence: Synthetic oligonucleotide
cugaccucccuggcagccc

SEQ ID NO: 2560215 - RNA, 19 nt, Artificial Sequence
  Description of Artificial Sequence: Synthetic oligonucleotide
gcagacacgaugaacgcgu

SEQ ID NO: 2560216 - RNA, 19 nt, Artificial Sequence
  Description of Artificial Sequence: Synthetic oligonucleotide
gaacagcgccgacgacuug

SEQ ID NO: 2560217 - RNA, 19 nt, Artificial Sequence
  Description of Artificial Sequence: Synthetic oligonucleotide
acucauaggcuggguacua

SEQ ID NO: 2560218 - RNA, 19 nt, Artificial Sequence
  Description of Artificial Sequence: Synthetic oligonucleotide
cucaaguuggagaggccau

SEQ ID NO: 2560219 - RNA, 19 nt, Artificial Sequence
  Description of Artificial Sequence: Synthetic oligonucleotide
gagagccuggucacagaaa

SEQ ID NO: 2560220 - RNA, 19 nt, Artificial Sequence
  Description of Artificial Sequence: Synthetic oligonucleotide
cugagagccuggucacaga

SEQ ID NO: 2560221 - RNA, 19 nt, Artificial Sequence
  Description of Artificial Sequence: Synthetic oligonucleotide
ccgacgacuuggccgacag

SEQ ID NO: 2560222 - RNA, 19 nt, Artificial Sequence
  Description of Artificial Sequence: Synthetic oligonucleotide
gcagacugaauaagaucca

SEQ ID NO: 2560223 - RNA, 19 nt, Artificial Sequence
  Description of Artificial Sequence: Synthetic oligonucleotide
aguuuucgagucacuucuu

SEQ ID NO: 2560224 - RNA, 19 nt, Artificial Sequence
  Description of Artificial Sequence: Synthetic oligonucleotide
gugugugcuguagcuucac

SEQ ID NO: 2560225 - RNA, 19 nt, Artificial Sequence
  Description of Artificial Sequence: Synthetic oligonucleotide
gagaggccauguucuuucu

SEQ ID NO: 2560226 - RNA, 19 nt, Artificial Sequence
  Description of Artificial Sequence: Synthetic oligonucleotide
caaguuggagaggccaugu

SEQ ID NO: 2560227 - RNA, 19 nt, Artificial Sequence
  Description of Artificial Sequence: Synthetic oligonucleotide
uuucuccuuccgagacauu

SEQ ID NO: 2560228 - RNA, 19 nt, Artificial Sequence
  Description of Artificial Sequence: Synthetic oligonucleotide
gcuucaggacaaacuuuac

SEQ ID NO: 2560229 - RNA, 19 nt, Artificial Sequence
  Description of Artificial Sequence: Synthetic oligonucleotide
ggacaaacuuuacauucuu

SEQ ID NO: 2560230 - RNA, 19 nt, Artificial Sequence
  Description of Artificial Sequence: Synthetic oligonucleotide
gcugaccucccuggcagcc

SEQ ID NO: 2560231 - RNA, 19 nt, Artificial Sequence
  Description of Artificial Sequence: Synthetic oligonucleotide
ccacuguaaauuccuugga

SEQ ID NO: 2560232 - RNA, 19 nt, Artificial Sequence
  Description of Artificial Sequence: Synthetic oligonucleotide
gcgccgacgacuuggccga

SEQ ID NO: 2560233 - RNA, 19 nt, Artificial Sequence
  Description of Artificial Sequence: Synthetic oligonucleotide
agagaacagcagacugaau

SEQ ID NO: 2560234 - RNA, 19 nt, Artificial Sequence
  Description of Artificial Sequence: Synthetic oligonucleotide
cagacugaauaagauccau

SEQ ID NO: 2560235 - RNA, 19 nt, Artificial Sequence
  Description of Artificial Sequence: Synthetic oligonucleotide
cacugaauuccaggacuaa

SEQ ID NO: 2560236 - RNA, 19 nt, Artificial Sequence
  Description of Artificial Sequence: Synthetic oligonucleotide
cagcgccgacgacuuggcc

SEQ ID NO: 2560237 - RNA, 19 nt, Artificial Sequence
  Description of Artificial Sequence: Synthetic oligonucleotide
gugcuacuuugugcuucag

SEQ ID NO: 2560238 - RNA, 19 nt, Artificial Sequence
  Description of Artificial Sequence: Synthetic oligonucleotide
cguucccgaagaacagcgc

SEQ ID NO: 2560239 - RNA, 19 nt, Artificial Sequence
  Description of Artificial Sequence: Synthetic oligonucleotide
ccaggacuaaguucacaaa

SEQ ID NO: 2560240 - RNA, 19 nt, Artificial Sequence
  Description of Artificial Sequence: Synthetic oligonucleotide
cagguccuccucggacugc

SEQ ID NO: 2560241 - RNA, 19 nt, Artificial Sequence
  Description of Artificial Sequence: Synthetic oligonucleotide
cuguagcuucacaggccaa

SEQ ID NO: 2560242 - RNA, 19 nt, Artificial Sequence
  Description of Artificial Sequence: Synthetic oligonucleotide
acgacuuggccgacagguu

SEQ ID NO: 2560243 - RNA, 19 nt, Artificial Sequence
  Description of Artificial Sequence: Synthetic oligonucleotide
ggacugcugcuuggagccg

SEQ ID NO: 2560244 - RNA, 19 nt, Artificial Sequence
  Description of Artificial Sequence: Synthetic oligonucleotide
gccuggucacagaaaacaa

SEQ ID NO: 2560245 - RNA, 19 nt, Artificial Sequence
  Description of Artificial Sequence: Synthetic oligonucleotide
agguugcggcugaaauccu

SEQ ID NO: 2560246 - RNA, 19 nt, Artificial Sequence
  Description of Artificial Sequence: Synthetic oligonucleotide
ccaauauggcagggucaag

SEQ ID NO: 2560247 - RNA, 19 nt, Artificial Sequence
  Description of Artificial Sequence: Synthetic oligonucleotide
gccgccuuuaggagccaug

SEQ ID NO: 2560248 - RNA, 19 nt, Artificial Sequence
  Description of Artificial Sequence: Synthetic oligonucleotide
gccgacagguugcggcuga

SEQ ID NO: 2560249 - RNA, 19 nt, Artificial Sequence
  Description of Artificial Sequence: Synthetic oligonucleotide
ccuauagugcugagagccu

SEQ ID NO: 2560250 - RNA, 19 nt, Artificial Sequence
  Description of Artificial Sequence: Synthetic oligonucleotide
cgcguucccgaagaacagc

SEQ ID NO: 2560251 - RNA, 19 nt, Artificial Sequence
  Description of Artificial Sequence: Synthetic oligonucleotide
gcugcuuggagccgccuuu

SEQ ID NO: 2560252 - RNA, 19 nt, Artificial Sequence
  Description of Artificial Sequence: Synthetic oligonucleotide
agccgccuuuaggagccau

SEQ ID NO: 2560253 - RNA, 19 nt, Artificial Sequence
  Description of Artificial Sequence: Synthetic oligonucleotide
gggucaagcugaccucccu

SEQ ID NO: 2560254 - RNA, 19 nt, Artificial Sequence
  Description of Artificial Sequence: Synthetic oligonucleotide
cugcuuggagccgccuuua

SEQ ID NO: 2560255 - RNA, 19 nt, Artificial Sequence
  Description of Artificial Sequence: Synthetic oligonucleotide
ggccgacagguugcggcug

SEQ ID NO: 2560256 - RNA, 19 nt, Artificial Sequence
  Description of Artificial Sequence: Synthetic oligonucleotide
cgaugaacgcguucccgaa

SEQ ID NO: 2560257 - RNA, 19 nt, Artificial Sequence
  Description of Artificial Sequence: Synthetic oligonucleotide
cccgaagaacagcgccgac

SEQ ID NO: 2560258 - RNA, 19 nt, Artificial Sequence
  Description of Artificial Sequence: Synthetic oligonucleotide
caacacucauaggcugggu

SEQ ID NO: 2560259 - RNA, 19 nt, Artificial Sequence
  Description of Artificial Sequence: Synthetic oligonucleotide
ccaaagccauacagcugaa

SEQ ID NO: 2560260 - RNA, 19 nt, Artificial Sequence
  Description of Artificial Sequence: Synthetic oligonucleotide
cgacgacuuggccgacagg

SEQ ID NO: 2560261 - RNA, 19 nt, Artificial Sequence
  Description of Artificial Sequence: Synthetic oligonucleotide
cagacacgaugaacgcguu

SEQ ID NO: 2560262 - RNA, 19 nt, Artificial Sequence
  Description of Artificial Sequence: Synthetic oligonucleotide
ggccauguucuuucuccuu

SEQ ID NO: 2560263 - RNA, 19 nt, Artificial Sequence
  Description of Artificial Sequence: Synthetic oligonucleotide
gagccgccuuuaggagcca

SEQ ID NO: 2560264 - RNA, 19 nt, Artificial Sequence
  Description of Artificial Sequence: Synthetic oligonucleotide
ccucggacugcugcuugga

SEQ ID NO: 2560265 - RNA, 19 nt, Artificial Sequence
  Description of Artificial Sequence: Synthetic oligonucleotide
gccgacgacuuggccgaca

SEQ ID NO: 2560266 - RNA, 19 nt, Artificial Sequence
  Description of Artificial Sequence: Synthetic oligonucleotide
cugcugcuuggagccgccu

SEQ ID NO: 2560267 - RNA, 19 nt, Artificial Sequence
  Description of Artificial Sequence: Synthetic oligonucleotide
ggcuaccaaguaagugcuu

SEQ ID NO: 2560268 - RNA, 19 nt, Artificial Sequence
  Description of Artificial Sequence: Synthetic oligonucleotide
ccgacagguugcggcugaa

SEQ ID NO: 2560269 - RNA, 19 nt, Artificial Sequence
  Description of Artificial Sequence: Synthetic oligonucleotide
cgccgacgacuuggccgac

SEQ ID NO: 2560270 - RNA, 19 nt, Artificial Sequence
  Description of Artificial Sequence: Synthetic oligonucleotide
aauacauucuuccucagcc

SEQ ID NO: 2560271 - RNA, 19 nt, Artificial Sequence
  Description of Artificial Sequence: Synthetic oligonucleotide
ucucuaaacacauagccgg

SEQ ID NO: 2560272 - RNA, 19 nt, Artificial Sequence
  Description of Artificial Sequence: Synthetic oligonucleotide
cuugaaaucaauuccacag

SEQ ID NO: 2560273 - RNA, 19 nt, Artificial Sequence
  Description of Artificial Sequence: Synthetic oligonucleotide
aaauguaaucauaagacag

SEQ ID NO: 2560274 - RNA, 19 nt, Artificial Sequence
  Description of Artificial Sequence: Synthetic oligonucleotide
ucuuauuaaacucugacuu

SEQ ID NO: 2560275 - RNA, 19 nt, Artificial Sequence
  Description of Artificial Sequence: Synthetic oligonucleotide
aacuugacacacuucauuc

SEQ ID NO: 2560276 - RNA, 19 nt, Artificial Sequence
  Description of Artificial Sequence: Synthetic oligonucleotide
aagguaauuuugcaucugc

SEQ ID NO: 2560277 - RNA, 19 nt, Artificial Sequence
  Description of Artificial Sequence: Synthetic oligonucleotide
uccacuagcaugauaagag

SEQ ID NO: 2560278 - RNA, 19 nt, Artificial Sequence
  Description of Artificial Sequence: Synthetic oligonucleotide
uucaaaacaaccugaacug

SEQ ID NO: 2560279 - RNA, 19 nt, Artificial Sequence
  Description of Artificial Sequence: Synthetic oligonucleotide
agaaacuugacacacuuca

SEQ ID NO: 2560280 - RNA, 19 nt, Artificial Sequence
  Description of Artificial Sequence: Synthetic oligonucleotide
acuucggauacuuuucacc

SEQ ID NO: 2560281 - RNA, 19 nt, Artificial Sequence
  Description of Artificial Sequence: Synthetic oligonucleotide
cuugucucuaaacacauag

SEQ ID NO: 2560282 - RNA, 19 nt, Artificial Sequence
  Description of Artificial Sequence: Synthetic oligonucleotide
guaauuuugcaucugcugc

SEQ ID NO: 2560283 - RNA, 19 nt, Artificial Sequence
  Description of Artificial Sequence: Synthetic oligonucleotide
uuaaacucugacuucaccu

SEQ ID NO: 2560284 - RNA, 19 nt, Artificial Sequence
  Description of Artificial Sequence: Synthetic oligonucleotide
auuaaacucugacuucacc

SEQ ID NO: 2560285 - RNA, 19 nt, Artificial Sequence
  Description of Artificial Sequence: Synthetic oligonucleotide
auaccagugauguucuccc

SEQ ID NO: 2560286 - RNA, 19 nt, Artificial Sequence
  Description of Artificial Sequence: Synthetic oligonucleotide
uuuuccuugaaaucaauuc

SEQ ID NO: 2560287 - RNA, 19 nt, Artificial Sequence
  Description of Artificial Sequence: Synthetic oligonucleotide
uuacuucauagccacuucg

SEQ ID NO: 2560288 - RNA, 19 nt, Artificial Sequence
  Description of Artificial Sequence: Synthetic oligonucleotide
uucaccuugucucuaaaca

SEQ ID NO: 2560289 - RNA, 19 nt, Artificial Sequence
  Description of Artificial Sequence: Synthetic oligonucleotide
aaacaaccugaacugcuac

SEQ ID NO: 2560290 - RNA, 19 nt, Artificial Sequence
  Description of Artificial Sequence: Synthetic oligonucleotide
uacauuacuucauagccac

SEQ ID NO: 2560291 - RNA, 19 nt, Artificial Sequence
  Description of Artificial Sequence: Synthetic oligonucleotide
gagaacguagagcagaaac

SEQ ID NO: 2560292 - RNA, 19 nt, Artificial Sequence
  Description of Artificial Sequence: Synthetic oligonucleotide
guaguuguuagcuccacag

SEQ ID NO: 2560293 - RNA, 19 nt, Artificial Sequence
  Description of Artificial Sequence: Synthetic oligonucleotide
acuugacacacuucauucc

SEQ ID NO: 2560294 - RNA, 19 nt, Artificial Sequence
  Description of Artificial Sequence: Synthetic oligonucleotide
gaugcagcaggaaucaggg

SEQ ID NO: 2560295 - RNA, 19 nt, Artificial Sequence
  Description of Artificial Sequence: Synthetic oligonucleotide
uucuuauuaaacucugacu

SEQ ID NO: 2560296 - RNA, 19 nt, Artificial Sequence
  Description of Artificial Sequence: Synthetic oligonucleotide
aaccugaacugcuacacca

SEQ ID NO: 2560297 - RNA, 19 nt, Artificial Sequence
  Description of Artificial Sequence: Synthetic oligonucleotide
uacuucauagccacuucgg

SEQ ID NO: 2560298 - RNA, 19 nt, Artificial Sequence
  Description of Artificial Sequence: Synthetic oligonucleotide
uguaaucauaagacaguag

SEQ ID NO: 2560299 - RNA, 19 nt, Artificial Sequence
  Description of Artificial Sequence: Synthetic oligonucleotide
accccuauauucuccacgc

SEQ ID NO: 2560300 - RNA, 19 nt, Artificial Sequence
  Description of Artificial Sequence: Synthetic oligonucleotide
aucuccacaaaagcaaugc

SEQ ID NO: 2560301 - RNA, 19 nt, Artificial Sequence
  Description of Artificial Sequence: Synthetic oligonucleotide
aagauaauucccaggaucu

SEQ ID NO: 2560302 - RNA, 19 nt, Artificial Sequence
  Description of Artificial Sequence: Synthetic oligonucleotide
aguuguuagcuccacagca

SEQ ID NO: 2560303 - RNA, 19 nt, Artificial Sequence
  Description of Artificial Sequence: Synthetic oligonucleotide
aauguaaucauaagacagu

SEQ ID NO: 2560304 - RNA, 19 nt, Artificial Sequence
  Description of Artificial Sequence: Synthetic oligonucleotide
uuaggcauaccagugaugu

SEQ ID NO: 2560305 - RNA, 19 nt, Artificial Sequence
  Description of Artificial Sequence: Synthetic oligonucleotide
uuaagguaauuuugcaucu

SEQ ID NO: 2560306 - RNA, 19 nt, Artificial Sequence
  Description of Artificial Sequence: Synthetic oligonucleotide
aucauaagacaguaguucu

SEQ ID NO: 2560307 - RNA, 19 nt, Artificial Sequence
  Description of Artificial Sequence: Synthetic oligonucleotide
aauuuugcaucugcugccg

SEQ ID NO: 2560308 - RNA, 19 nt, Artificial Sequence
  Description of Artificial Sequence: Synthetic oligonucleotide
caaucuguguaguuguuag

SEQ ID NO: 2560309 - RNA, 19 nt, Artificial Sequence
  Description of Artificial Sequence: Synthetic oligonucleotide
agcaugauaagagacagga

SEQ ID NO: 2560310 - RNA, 19 nt, Artificial Sequence
  Description of Artificial Sequence: Synthetic oligonucleotide
auacuuuucaccagacagc

SEQ ID NO: 2560311 - RNA, 19 nt, Artificial Sequence
  Description of Artificial Sequence: Synthetic oligonucleotide
auauucuccacgcagcccu

SEQ ID NO: 2560312 - RNA, 19 nt, Artificial Sequence
  Description of Artificial Sequence: Synthetic oligonucleotide
acuaaggccgucuuguugu

SEQ ID NO: 2560313 - RNA, 19 nt, Artificial Sequence
  Description of Artificial Sequence: Synthetic oligonucleotide
aaugaugaccacaggcaac

SEQ ID NO: 2560314 - RNA, 19 nt, Artificial Sequence
  Description of Artificial Sequence: Synthetic oligonucleotide
uguugaugcagcaggaauc

SEQ ID NO: 2560315 - RNA, 19 nt, Artificial Sequence
  Description of Artificial Sequence: Synthetic oligonucleotide
ugaguauggaucuuguuuu

SEQ ID NO: 2560316 - RNA, 19 nt, Artificial Sequence
  Description of Artificial Sequence: Synthetic oligonucleotide
acgggugauggucugauuc

SEQ ID NO: 2560317 - RNA, 19 nt, Artificial Sequence
  Description of Artificial Sequence: Synthetic oligonucleotide
guaaucauaagacaguagu

SEQ ID NO: 2560318 - RNA, 19 nt, Artificial Sequence
  Description of Artificial Sequence: Synthetic oligonucleotide
gauaauucccaggaucucc

SEQ ID NO: 2560319 - RNA, 19 nt, Artificial Sequence
  Description of Artificial Sequence: Synthetic oligonucleotide
ugcacaggcgcaaaaggcc

SEQ ID NO: 2560320 - RNA, 19 nt, Artificial Sequence
  Description of Artificial Sequence: Synthetic oligonucleotide
aaacuugacacacuucauu

SEQ ID NO: 2560321 - RNA, 19 nt, Artificial Sequence
  Description of Artificial Sequence: Synthetic oligonucleotide
caguaguucuccuugcagg

SEQ ID NO: 2560322 - RNA, 19 nt, Artificial Sequence
  Description of Artificial Sequence: Synthetic oligonucleotide
cauaagacaguaguucucc

SEQ ID NO: 2560323 - RNA, 19 nt, Artificial Sequence
  Description of Artificial Sequence: Synthetic oligonucleotide
gcaaauguaaucauaagac

SEQ ID NO: 2560324 - RNA, 19 nt, Artificial Sequence
  Description of Artificial Sequence: Synthetic oligonucleotide
aacuaaggccgucuuguug

SEQ ID NO: 2560325 - RNA, 19 nt, Artificial Sequence
  Description of Artificial Sequence: Synthetic oligonucleotide
auuacuucauagccacuuc

SEQ ID NO: 2560326 - RNA, 19 nt, Artificial Sequence
  Description of Artificial Sequence: Synthetic oligonucleotide
acaaccugaacugcuacac

SEQ ID NO: 2560327 - RNA, 19 nt, Artificial Sequence
  Description of Artificial Sequence: Synthetic oligonucleotide
aggcauaccagugauguuc

SEQ ID NO: 2560328 - RNA, 19 nt, Artificial Sequence
  Description of Artificial Sequence: Synthetic oligonucleotide
cuagcaugauaagagacag

SEQ ID NO: 2560329 - RNA, 19 nt, Artificial Sequence
  Description of Artificial Sequence: Synthetic oligonucleotide
cuuauuaaacucugacuuc

SEQ ID NO: 2560330 - RNA, 19 nt, Artificial Sequence
  Description of Artificial Sequence: Synthetic oligonucleotide
ugauguucucccaaucugu

SEQ ID NO: 2560331 - RNA, 19 nt, Artificial Sequence
  Description of Artificial Sequence: Synthetic oligonucleotide
aacugcuacaccaauggca

SEQ ID NO: 2560332 - RNA, 19 nt, Artificial Sequence
  Description of Artificial Sequence: Synthetic oligonucleotide
uucauuccuccuuccaccg

SEQ ID NO: 2560333 - RNA, 19 nt, Artificial Sequence
  Description of Artificial Sequence: Synthetic oligonucleotide
cauccguccagaacuaagg

SEQ ID NO: 2560334 - RNA, 19 nt, Artificial Sequence
  Description of Artificial Sequence: Synthetic oligonucleotide
uucauagccacuucggaua

SEQ ID NO: 2560335 - RNA, 19 nt, Artificial Sequence
  Description of Artificial Sequence: Synthetic oligonucleotide
auccguccagaacuaaggc

SEQ ID NO: 2560336 - RNA, 19 nt, Artificial Sequence
  Description of Artificial Sequence: Synthetic oligonucleotide
aaagcaaugcccagggcug

SEQ ID NO: 2560337 - RNA, 19 nt, Artificial Sequence
  Description of Artificial Sequence: Synthetic oligonucleotide
ucggauacuuuucaccaga

SEQ ID NO: 2560338 - RNA, 19 nt, Artificial Sequence
  Description of Artificial Sequence: Synthetic oligonucleotide
aaaggcuaccaggaagagg

SEQ ID NO: 2560339 - RNA, 19 nt, Artificial Sequence
  Description of Artificial Sequence: Synthetic oligonucleotide
gaccccuauauucuccacg

SEQ ID NO: 2560340 - RNA, 19 nt, Artificial Sequence
  Description of Artificial Sequence: Synthetic oligonucleotide
uguucucccaaucugugua

SEQ ID NO: 2560341 - RNA, 19 nt, Artificial Sequence
  Description of Artificial Sequence: Synthetic oligonucleotide
uugucucuaaacacauagc

SEQ ID NO: 2560342 - RNA, 19 nt, Artificial Sequence
  Description of Artificial Sequence: Synthetic oligonucleotide
acaggaagauggcaaaugu

SEQ ID NO: 2560343 - RNA, 19 nt, Artificial Sequence
  Description of Artificial Sequence: Synthetic oligonucleotide
aaucaauuccacagcccac

SEQ ID NO: 2560344 - RNA, 19 nt, Artificial Sequence
  Description of Artificial Sequence: Synthetic oligonucleotide
cuauauucuccacgcagcc

SEQ ID NO: 2560345 - RNA, 19 nt, Artificial Sequence
  Description of Artificial Sequence: Synthetic oligonucleotide
aacaaccugaacugcuaca

SEQ ID NO: 2560346 - RNA, 19 nt, Artificial Sequence
  Description of Artificial Sequence: Synthetic oligonucleotide
agaacuaaggccgucuugu

SEQ ID NO: 2560347 - RNA, 19 nt, Artificial Sequence
  Description of Artificial Sequence: Synthetic oligonucleotide
cacucaaauuccuucugcc

SEQ ID NO: 2560348 - RNA, 19 nt, Artificial Sequence
  Description of Artificial Sequence: Synthetic oligonucleotide
ucuccacaaaagcaaugcc

SEQ ID NO: 2560349 - RNA, 19 nt, Artificial Sequence
  Description of Artificial Sequence: Synthetic oligonucleotide
uuuucaccagacagcaaga

SEQ ID NO: 2560350 - RNA, 19 nt, Artificial Sequence
  Description of Artificial Sequence: Synthetic oligonucleotide
acaguaguucuccuugcag

SEQ ID NO: 2560351 - RNA, 19 nt, Artificial Sequence
  Description of Artificial Sequence: Synthetic oligonucleotide
cacuagcaugauaagagac

SEQ ID NO: 2560352 - RNA, 19 nt, Artificial Sequence
  Description of Artificial Sequence: Synthetic oligonucleotide
ucaaugccacugcacaggc

SEQ ID NO: 2560353 - RNA, 19 nt, Artificial Sequence
  Description of Artificial Sequence: Synthetic oligonucleotide
ucauaagacaguaguucuc

SEQ ID NO: 2560354 - RNA, 19 nt, Artificial Sequence
  Description of Artificial Sequence: Synthetic oligonucleotide
ucaaaacaaccugaacugc

SEQ ID NO: 2560355 - RNA, 19 nt, Artificial Sequence
  Description of Artificial Sequence: Synthetic oligonucleotide
gauaagagacaggaagaug

SEQ ID NO: 2560356 - RNA, 19 nt, Artificial Sequence
  Description of Artificial Sequence: Synthetic oligonucleotide
ugauggucugauucaaaac

SEQ ID NO: 2560357 - RNA, 19 nt, Artificial Sequence
  Description of Artificial Sequence: Synthetic oligonucleotide
uccguccagaacuaaggcc

SEQ ID NO: 2560358 - RNA, 19 nt, Artificial Sequence
  Description of Artificial Sequence: Synthetic oligonucleotide
uaguuguuagcuccacagc

SEQ ID NO: 2560359 - RNA, 19 nt, Artificial Sequence
  Description of Artificial Sequence: Synthetic oligonucleotide
uguguaguuguuagcucca

SEQ ID NO: 2560360 - RNA, 19 nt, Artificial Sequence
  Description of Artificial Sequence: Synthetic oligonucleotide
cagcaagagaagauaauuc

SEQ ID NO: 2560361 - RNA, 19 nt, Artificial Sequence
  Description of Artificial Sequence: Synthetic oligonucleotide
ugauguugaugcagcagga

SEQ ID NO: 2560362 - RNA, 19 nt, Artificial Sequence
  Description of Artificial Sequence: Synthetic oligonucleotide
guagucucacgggugaugg

SEQ ID NO: 2560363 - RNA, 19 nt, Artificial Sequence
  Description of Artificial Sequence: Synthetic oligonucleotide
cauaccagugauguucucc

SEQ ID NO: 2560364 - RNA, 19 nt, Artificial Sequence
  Description of Artificial Sequence: Synthetic oligonucleotide
uguaguuguuagcuccaca

SEQ ID NO: 2560365 - RNA, 19 nt, Artificial Sequence
  Description of Artificial Sequence: Synthetic oligonucleotide
ucaauuccacagcccacag

SEQ ID NO: 2560366 - RNA, 19 nt, Artificial Sequence
  Description of Artificial Sequence: Synthetic oligonucleotide
ggaaucagggacucggucc

SEQ ID NO: 2560367 - RNA, 19 nt, Artificial Sequence
  Description of Artificial Sequence: Synthetic oligonucleotide
ucuuguugucuuuaaggua

SEQ ID NO: 2560368 - RNA, 19 nt, Artificial Sequence
  Description of Artificial Sequence: Synthetic oligonucleotide
caaucaaugccacugcaca

SEQ ID NO: 2560369 - RNA, 19 nt, Artificial Sequence
  Description of Artificial Sequence: Synthetic oligonucleotide
cauuccuccuuccaccgcc

SEQ ID NO: 2560370 - RNA, 19 nt, Artificial Sequence
  Description of Artificial Sequence: Synthetic oligonucleotide
ucccaaucuguguaguugu

SEQ ID NO: 2560371 - RNA, 19 nt, Artificial Sequence
  Description of Artificial Sequence: Synthetic oligonucleotide
uccuuaggcauaccaguga

SEQ ID NO: 2560372 - RNA, 19 nt, Artificial Sequence
  Description of Artificial Sequence: Synthetic oligonucleotide
uucggauacuuuucaccag

SEQ ID NO: 2560373 - RNA, 19 nt, Artificial Sequence
  Description of Artificial Sequence: Synthetic oligonucleotide
ugauaagagacaggaagau

SEQ ID NO: 2560374 - RNA, 19 nt, Artificial Sequence
  Description of Artificial Sequence: Synthetic oligonucleotide
ucugccauccguccagaac

SEQ ID NO: 2560375 - RNA, 19 nt, Artificial Sequence
  Description of Artificial Sequence: Synthetic oligonucleotide
agucucacgggugaugguc

SEQ ID NO: 2560376 - RNA, 19 nt, Artificial Sequence
  Description of Artificial Sequence: Synthetic oligonucleotide
acuucauagccacuucgga

SEQ ID NO: 2560377 - RNA, 19 nt, Artificial Sequence
  Description of Artificial Sequence: Synthetic oligonucleotide
cuacauuacuucauagcca

SEQ ID NO: 2560378 - RNA, 19 nt, Artificial Sequence
  Description of Artificial Sequence: Synthetic oligonucleotide
auguugaugcagcaggaau

SEQ ID NO: 2560379 - RNA, 19 nt, Artificial Sequence
  Description of Artificial Sequence: Synthetic oligonucleotide
acuagcaugauaagagaca

SEQ ID NO: 2560380 - RNA, 19 nt, Artificial Sequence
  Description of Artificial Sequence: Synthetic oligonucleotide
uuucaccagacagcaagag

SEQ ID NO: 2560381 - RNA, 19 nt, Artificial Sequence
  Description of Artificial Sequence: Synthetic oligonucleotide
ucauagccacuucggauac

SEQ ID NO: 2560382 - RNA, 19 nt, Artificial Sequence
  Description of Artificial Sequence: Synthetic oligonucleotide
cucuaaacacauagccggc

SEQ ID NO: 2560383 - RNA, 19 nt, Artificial Sequence
  Description of Artificial Sequence: Synthetic oligonucleotide
agaacguagagcagaaacu

SEQ ID NO: 2560384 - RNA, 19 nt, Artificial Sequence
  Description of Artificial Sequence: Synthetic oligonucleotide
ucuaaacacauagccggca

SEQ ID NO: 2560385 - RNA, 19 nt, Artificial Sequence
  Description of Artificial Sequence: Synthetic oligonucleotide
aacguagagcagaaacuug

SEQ ID NO: 2560386 - RNA, 19 nt, Artificial Sequence
  Description of Artificial Sequence: Synthetic oligonucleotide
cagccagaccccuauauuc

SEQ ID NO: 2560387 - RNA, 19 nt, Artificial Sequence
  Description of Artificial Sequence: Synthetic oligonucleotide
caccaauggcaaucaaugc

SEQ ID NO: 2560388 - RNA, 19 nt, Artificial Sequence
  Description of Artificial Sequence: Synthetic oligonucleotide
cugaacugcuacaccaaug

SEQ ID NO: 2560389 - RNA, 19 nt, Artificial Sequence
  Description of Artificial Sequence: Synthetic oligonucleotide
acagcaagagaagauaauu

SEQ ID NO: 2560390 - RNA, 19 nt, Artificial Sequence
  Description of Artificial Sequence: Synthetic oligonucleotide
gagcagaaacuugacacac

SEQ ID NO: 2560391 - RNA, 19 nt, Artificial Sequence
  Description of Artificial Sequence: Synthetic oligonucleotide
ccuauauucuccacgcagc

SEQ ID NO: 2560392 - RNA, 19 nt, Artificial Sequence
  Description of Artificial Sequence: Synthetic oligonucleotide
uaaacacauagccggcaau

SEQ ID NO: 2560393 - RNA, 19 nt, Artificial Sequence
  Description of Artificial Sequence: Synthetic oligonucleotide
gaacugcuacaccaauggc

SEQ ID NO: 2560394 - RNA, 19 nt, Artificial Sequence
  Description of Artificial Sequence: Synthetic oligonucleotide
caggaucuccacaaaagca

SEQ ID NO: 2560395 - RNA, 19 nt, Artificial Sequence
  Description of Artificial Sequence: Synthetic oligonucleotide
aaaacaaccugaacugcua

SEQ ID NO: 2560396 - RNA, 19 nt, Artificial Sequence
  Description of Artificial Sequence: Synthetic oligonucleotide
aucaauuccacagcccaca

SEQ ID NO: 2560397 - RNA, 19 nt, Artificial Sequence
  Description of Artificial Sequence: Synthetic oligonucleotide
uaagguaauuuugcaucug

SEQ ID NO: 2560398 - RNA, 19 nt, Artificial Sequence
  Description of Artificial Sequence: Synthetic oligonucleotide
ugcuacaccaauggcaauc

SEQ ID NO: 2560399 - RNA, 19 nt, Artificial Sequence
  Description of Artificial Sequence: Synthetic oligonucleotide
cacacuucauuccuccuuc

SEQ ID NO: 2560400 - RNA, 19 nt, Artificial Sequence
  Description of Artificial Sequence: Synthetic oligonucleotide
gaaggcgcccacugcaaug

SEQ ID NO: 2560401 - RNA, 19 nt, Artificial Sequence
  Description of Artificial Sequence: Synthetic oligonucleotide
cuucaccuugucucuaaac

SEQ ID NO: 2560402 - RNA, 19 nt, Artificial Sequence
  Description of Artificial Sequence: Synthetic oligonucleotide
uguuuuccuugaaaucaau

SEQ ID NO: 2560403 - RNA, 19 nt, Artificial Sequence
  Description of Artificial Sequence: Synthetic oligonucleotide
auaagacaguaguucuccu

SEQ ID NO: 2560404 - RNA, 19 nt, Artificial Sequence
  Description of Artificial Sequence: Synthetic oligonucleotide
gaggaaggcgcccacugca

SEQ ID NO: 2560405 - RNA, 19 nt, Artificial Sequence
  Description of Artificial Sequence: Synthetic oligonucleotide
aaggccgucuuguugucuu

SEQ ID NO: 2560406 - RNA, 19 nt, Artificial Sequence
  Description of Artificial Sequence: Synthetic oligonucleotide
acguagagcagaaacuuga

SEQ ID NO: 2560407 - RNA, 19 nt, Artificial Sequence
  Description of Artificial Sequence: Synthetic oligonucleotide
guugaugcagcaggaauca

SEQ ID NO: 2560408 - RNA, 19 nt, Artificial Sequence
  Description of Artificial Sequence: Synthetic oligonucleotide
guucucccaaucuguguag

SEQ ID NO: 2560409 - RNA, 19 nt, Artificial Sequence
  Description of Artificial Sequence: Synthetic oligonucleotide
auguaaucauaagacagua

SEQ ID NO: 2560410 - RNA, 19 nt, Artificial Sequence
  Description of Artificial Sequence: Synthetic oligonucleotide
cuuaggcauaccagugaug

SEQ ID NO: 2560411 - RNA, 19 nt, Artificial Sequence
  Description of Artificial Sequence: Synthetic oligonucleotide
auaauucccaggaucucca

SEQ ID NO: 2560412 - RNA, 19 nt, Artificial Sequence
  Description of Artificial Sequence: Synthetic oligonucleotide
gacaguaguucuccuugca

SEQ ID NO: 2560413 - RNA, 19 nt, Artificial Sequence
  Description of Artificial Sequence: Synthetic oligonucleotide
acagcccacagugauguug

SEQ ID NO: 2560414 - RNA, 19 nt, Artificial Sequence
  Description of Artificial Sequence: Synthetic oligonucleotide
cacgcagcccugaguaugg

SEQ ID NO: 2560415 - RNA, 19 nt, Artificial Sequence
  Description of Artificial Sequence: Synthetic oligonucleotide
guuguuagcuccacagcac

SEQ ID NO: 2560416 - RNA, 19 nt, Artificial Sequence
  Description of Artificial Sequence: Synthetic oligonucleotide
cuugcaggccccacagcag

SEQ ID NO: 2560417 - RNA, 19 nt, Artificial Sequence
  Description of Artificial Sequence: Synthetic oligonucleotide
agccacuucggauacuuuu

SEQ ID NO: 2560418 - RNA, 19 nt, Artificial Sequence
  Description of Artificial Sequence: Synthetic oligonucleotide
cucccaaucuguguaguug

SEQ ID NO: 2560419 - RNA, 19 nt, Artificial Sequence
  Description of Artificial Sequence: Synthetic oligonucleotide
gccggcaauggcuacagcc

SEQ ID NO: 2560420 - RNA, 19 nt, Artificial Sequence
  Description of Artificial Sequence: Synthetic oligonucleotide
agaccccuauauucuccac

SEQ ID NO: 2560421 - RNA, 19 nt, Artificial Sequence
  Description of Artificial Sequence: Synthetic oligonucleotide
ucagccagaccccuauauu

SEQ ID NO: 2560422 - RNA, 19 nt, Artificial Sequence
  Description of Artificial Sequence: Synthetic oligonucleotide
aaggcgcccacugcaauga

SEQ ID NO: 2560423 - RNA, 19 nt, Artificial Sequence
  Description of Artificial Sequence: Synthetic oligonucleotide
auguucucccaaucugugu

SEQ ID NO: 2560424 - RNA, 19 nt, Artificial Sequence
  Description of Artificial Sequence: Synthetic oligonucleotide
cuaccaggaagaggaaggc

SEQ ID NO: 2560425 - RNA, 19 nt, Artificial Sequence
  Description of Artificial Sequence: Synthetic oligonucleotide
ucauuccuccuuccaccgc

SEQ ID NO: 2560426 - RNA, 19 nt, Artificial Sequence
  Description of Artificial Sequence: Synthetic oligonucleotide
ugccggaaguucuuauuaa

SEQ ID NO: 2560427 - RNA, 19 nt, Artificial Sequence
  Description of Artificial Sequence: Synthetic oligonucleotide
ccaggaucuccacaaaagc

SEQ ID NO: 2560428 - RNA, 19 nt, Artificial Sequence
  Description of Artificial Sequence: Synthetic oligonucleotide
acaggcgcaaaaggccagc

SEQ ID NO: 2560429 - RNA, 19 nt, Artificial Sequence
  Description of Artificial Sequence: Synthetic oligonucleotide
cccuauauucuccacgcag

SEQ ID NO: 2560430 - RNA, 19 nt, Artificial Sequence
  Description of Artificial Sequence: Synthetic oligonucleotide
gaaucagggacucgguccu

SEQ ID NO: 2560431 - RNA, 19 nt, Artificial Sequence
  Description of Artificial Sequence: Synthetic oligonucleotide
accagugauguucucccaa

SEQ ID NO: 2560432 - RNA, 19 nt, Artificial Sequence
  Description of Artificial Sequence: Synthetic oligonucleotide
guuagcuccacagcacuca

SEQ ID NO: 2560433 - RNA, 19 nt, Artificial Sequence
  Description of Artificial Sequence: Synthetic oligonucleotide
aguucuuauuaaacucuga

SEQ ID NO: 2560434 - RNA, 19 nt, Artificial Sequence
  Description of Artificial Sequence: Synthetic oligonucleotide
cacuucggauacuuuucac

SEQ ID NO: 2560435 - RNA, 19 nt, Artificial Sequence
  Description of Artificial Sequence: Synthetic oligonucleotide
caggcaacagggagccagg

SEQ ID NO: 2560436 - RNA, 19 nt, Artificial Sequence
  Description of Artificial Sequence: Synthetic oligonucleotide
cugaguauggaucuuguuu

SEQ ID NO: 2560437 - RNA, 19 nt, Artificial Sequence
  Description of Artificial Sequence: Synthetic oligonucleotide
auggucugauucaaaacaa

SEQ ID NO: 2560438 - RNA, 19 nt, Artificial Sequence
  Description of Artificial Sequence: Synthetic oligonucleotide
uaauucccaggaucuccac

SEQ ID NO: 2560439 - RNA, 19 nt, Artificial Sequence
  Description of Artificial Sequence: Synthetic oligonucleotide
ccggaaguucuuauuaaac

SEQ ID NO: 2560440 - RNA, 19 nt, Artificial Sequence
  Description of Artificial Sequence: Synthetic oligonucleotide
guccuuaggcauaccagug

SEQ ID NO: 2560441 - RNA, 19 nt, Artificial Sequence
  Description of Artificial Sequence: Synthetic oligonucleotide
gcacucaaauuccuucugc

SEQ ID NO: 2560442 - RNA, 19 nt, Artificial Sequence
  Description of Artificial Sequence: Synthetic oligonucleotide
guauggaucuuguuuuccu

SEQ ID NO: 2560443 - RNA, 19 nt, Artificial Sequence
  Description of Artificial Sequence: Synthetic oligonucleotide
auagccacuucggauacuu

SEQ ID NO: 2560444 - RNA, 19 nt, Artificial Sequence
  Description of Artificial Sequence: Synthetic oligonucleotide
caaugccacugcacaggcg

SEQ ID NO: 2560445 - RNA, 19 nt, Artificial Sequence
  Description of Artificial Sequence: Synthetic oligonucleotide
aggcgcaaaaggccagcag

SEQ ID NO: 2560446 - RNA, 19 nt, Artificial Sequence
  Description of Artificial Sequence: Synthetic oligonucleotide
uccuuccaccgccauggcu

SEQ ID NO: 2560447 - RNA, 19 nt, Artificial Sequence
  Description of Artificial Sequence: Synthetic oligonucleotide
cugccauccguccagaacu

SEQ ID NO: 2560448 - RNA, 19 nt, Artificial Sequence
  Description of Artificial Sequence: Synthetic oligonucleotide
caaugcccagggcugcugc

SEQ ID NO: 2560449 - RNA, 19 nt, Artificial Sequence
  Description of Artificial Sequence: Synthetic oligonucleotide
gcuacagccaccuccacua

SEQ ID NO: 2560450 - RNA, 19 nt, Artificial Sequence
  Description of Artificial Sequence: Synthetic oligonucleotide
gaacguagagcagaaacuu

SEQ ID NO: 2560451 - RNA, 19 nt, Artificial Sequence
  Description of Artificial Sequence: Synthetic oligonucleotide
caggagaacguagagcaga

SEQ ID NO: 2560452 - RNA, 19 nt, Artificial Sequence
  Description of Artificial Sequence: Synthetic oligonucleotide
ucucacgggugauggucug

SEQ ID NO: 2560453 - RNA, 19 nt, Artificial Sequence
  Description of Artificial Sequence: Synthetic oligonucleotide
uagccggcaauggcuacag

SEQ ID NO: 2560454 - RNA, 19 nt, Artificial Sequence
  Description of Artificial Sequence: Synthetic oligonucleotide
agcccacaaaggcuaccag

SEQ ID NO: 2560455 - RNA, 19 nt, Artificial Sequence
  Description of Artificial Sequence: Synthetic oligonucleotide
guaguucuccuugcaggcc

SEQ ID NO: 2560456 - RNA, 19 nt, Artificial Sequence
  Description of Artificial Sequence: Synthetic oligonucleotide
gauguugaugcagcaggaa

SEQ ID NO: 2560457 - RNA, 19 nt, Artificial Sequence
  Description of Artificial Sequence: Synthetic oligonucleotide
uugaugcagcaggaaucag

SEQ ID NO: 2560458 - RNA, 19 nt, Artificial Sequence
  Description of Artificial Sequence: Synthetic oligonucleotide
uaccagugauguucuccca

SEQ ID NO: 2560459 - RNA, 19 nt, Artificial Sequence
  Description of Artificial Sequence: Synthetic oligonucleotide
caaaggcuaccaggaagag

SEQ ID NO: 2560460 - RNA, 19 nt, Artificial Sequence
  Description of Artificial Sequence: Synthetic oligonucleotide
cacaggcgcaaaaggccag

SEQ ID NO: 2560461 - RNA, 19 nt, Artificial Sequence
  Description of Artificial Sequence: Synthetic oligonucleotide
agccagaccccuauauucu

SEQ ID NO: 2560462 - RNA, 19 nt, Artificial Sequence
  Description of Artificial Sequence: Synthetic oligonucleotide
cagcccacagugauguuga

SEQ ID NO: 2560463 - RNA, 19 nt, Artificial Sequence
  Description of Artificial Sequence: Synthetic oligonucleotide
gacuucaccuugucucuaa

SEQ ID NO: 2560464 - RNA, 19 nt, Artificial Sequence
  Description of Artificial Sequence: Synthetic oligonucleotide
cuccacuagcaugauaaga

SEQ ID NO: 2560465 - RNA, 19 nt, Artificial Sequence
  Description of Artificial Sequence: Synthetic oligonucleotide
gccaggcguagucucacgg

SEQ ID NO: 2560466 - RNA, 19 nt, Artificial Sequence
  Description of Artificial Sequence: Synthetic oligonucleotide
cagggacucgguccuuagg

SEQ ID NO: 2560467 - RNA, 19 nt, Artificial Sequence
  Description of Artificial Sequence: Synthetic oligonucleotide
cauagccggcaauggcuac

SEQ ID NO: 2560468 - RNA, 19 nt, Artificial Sequence
  Description of Artificial Sequence: Synthetic oligonucleotide
ggauacuuuucaccagaca

SEQ ID NO: 2560469 - RNA, 19 nt, Artificial Sequence
  Description of Artificial Sequence: Synthetic oligonucleotide
cagaccccuauauucucca

SEQ ID NO: 2560470 - RNA, 19 nt, Artificial Sequence
  Description of Artificial Sequence: Synthetic oligonucleotide
gcaacagggagccaggcgu

SEQ ID NO: 2560471 - RNA, 19 nt, Artificial Sequence
  Description of Artificial Sequence: Synthetic oligonucleotide
agccaggcguagucucacg

SEQ ID NO: 2560472 - RNA, 19 nt, Artificial Sequence
  Description of Artificial Sequence: Synthetic oligonucleotide
auagccggcaauggcuaca

SEQ ID NO: 2560473 - RNA, 19 nt, Artificial Sequence
  Description of Artificial Sequence: Synthetic oligonucleotide
gguccuuaggcauaccagu

SEQ ID NO: 2560474 - RNA, 19 nt, Artificial Sequence
  Description of Artificial Sequence: Synthetic oligonucleotide
ccauccguccagaacuaag

SEQ ID NO: 2560475 - RNA, 19 nt, Artificial Sequence
  Description of Artificial Sequence: Synthetic oligonucleotide
cagacagcaagagaagaua

SEQ ID NO: 2560476 - RNA, 19 nt, Artificial Sequence
  Description of Artificial Sequence: Synthetic oligonucleotide
gcaaucaaugccacugcac

SEQ ID NO: 2560477 - RNA, 19 nt, Artificial Sequence
  Description of Artificial Sequence: Synthetic oligonucleotide
agcaggaaucagggacucg

SEQ ID NO: 2560478 - RNA, 19 nt, Artificial Sequence
  Description of Artificial Sequence: Synthetic oligonucleotide
cagggagccaggcguaguc

SEQ ID NO: 2560479 - RNA, 19 nt, Artificial Sequence
  Description of Artificial Sequence: Synthetic oligonucleotide
cuaaggccgucuuguuguc

SEQ ID NO: 2560480 - RNA, 19 nt, Artificial Sequence
  Description of Artificial Sequence: Synthetic oligonucleotide
ccagaccccuauauucucc

SEQ ID NO: 2560481 - RNA, 19 nt, Artificial Sequence
  Description of Artificial Sequence: Synthetic oligonucleotide
ccaggcguagucucacggg

SEQ ID NO: 2560482 - RNA, 19 nt, Artificial Sequence
  Description of Artificial Sequence: Synthetic oligonucleotide
ggcaaucaaugccacugca

SEQ ID NO: 2560483 - RNA, 19 nt, Artificial Sequence
  Description of Artificial Sequence: Synthetic oligonucleotide
cuacagccaccuccacuag

SEQ ID NO: 2560484 - RNA, 19 nt, Artificial Sequence
  Description of Artificial Sequence: Synthetic oligonucleotide
agccggcaauggcuacagc

SEQ ID NO: 2560485 - RNA, 19 nt, Artificial Sequence
  Description of Artificial Sequence: Synthetic oligonucleotide
uagucucacgggugauggu

SEQ ID NO: 2560486 - RNA, 19 nt, Artificial Sequence
  Description of Artificial Sequence: Synthetic oligonucleotide
uaaggccgucuuguugucu

SEQ ID NO: 2560487 - RNA, 19 nt, Artificial Sequence
  Description of Artificial Sequence: Synthetic oligonucleotide
cauuacuucauagccacuu

SEQ ID NO: 2560488 - RNA, 19 nt, Artificial Sequence
  Description of Artificial Sequence: Synthetic oligonucleotide
cagugauguugaugcagca

SEQ ID NO: 2560489 - RNA, 19 nt, Artificial Sequence
  Description of Artificial Sequence: Synthetic oligonucleotide
gaaacuugacacacuucau

SEQ ID NO: 2560490 - RNA, 19 nt, Artificial Sequence
  Description of Artificial Sequence: Synthetic oligonucleotide
uaggcauaccagugauguu

SEQ ID NO: 2560491 - RNA, 19 nt, Artificial Sequence
  Description of Artificial Sequence: Synthetic oligonucleotide
ccacaaaagcaaugcccag

SEQ ID NO: 2560492 - RNA, 19 nt, Artificial Sequence
  Description of Artificial Sequence: Synthetic oligonucleotide
acauagccggcaauggcua

SEQ ID NO: 2560493 - RNA, 19 nt, Artificial Sequence
  Description of Artificial Sequence: Synthetic oligonucleotide
ccccuacauuacuucauag

SEQ ID NO: 2560494 - RNA, 19 nt, Artificial Sequence
  Description of Artificial Sequence: Synthetic oligonucleotide
ggcguagucucacggguga

SEQ ID NO: 2560495 - RNA, 19 nt, Artificial Sequence
  Description of Artificial Sequence: Synthetic oligonucleotide
cagcacucaaauuccuucu

SEQ ID NO: 2560496 - RNA, 19 nt, Artificial Sequence
  Description of Artificial Sequence: Synthetic oligonucleotide
gacagcaagagaagauaau

SEQ ID NO: 2560497 - RNA, 19 nt, Artificial Sequence
  Description of Artificial Sequence: Synthetic oligonucleotide
uucugccauccguccagaa

SEQ ID NO: 2560498 - RNA, 19 nt, Artificial Sequence
  Description of Artificial Sequence: Synthetic oligonucleotide
gcuacaccaauggcaauca

SEQ ID NO: 2560499 - RNA, 19 nt, Artificial Sequence
  Description of Artificial Sequence: Synthetic oligonucleotide
guguaguuguuagcuccac

SEQ ID NO: 2560500 - RNA, 19 nt, Artificial Sequence
  Description of Artificial Sequence: Synthetic oligonucleotide
cguagagcagaaacuugac

SEQ ID NO: 2560501 - RNA, 19 nt, Artificial Sequence
  Description of Artificial Sequence: Synthetic oligonucleotide
ugacuucaccuugucucua

SEQ ID NO: 2560502 - RNA, 19 nt, Artificial Sequence
  Description of Artificial Sequence: Synthetic oligonucleotide
aggcguagucucacgggug

SEQ ID NO: 2560503 - RNA, 19 nt, Artificial Sequence
  Description of Artificial Sequence: Synthetic oligonucleotide
gccacuucggauacuuuuc

SEQ ID NO: 2560504 - RNA, 19 nt, Artificial Sequence
  Description of Artificial Sequence: Synthetic oligonucleotide
cgguccuuaggcauaccag

SEQ ID NO: 2560505 - RNA, 19 nt, Artificial Sequence
  Description of Artificial Sequence: Synthetic oligonucleotide
ccacuagcaugauaagaga

SEQ ID NO: 2560506 - RNA, 19 nt, Artificial Sequence
  Description of Artificial Sequence: Synthetic oligonucleotide
ccggcaauggcuacagcca

SEQ ID NO: 2560507 - RNA, 19 nt, Artificial Sequence
  Description of Artificial Sequence: Synthetic oligonucleotide
ccgucuuguugucuuuaag

SEQ ID NO: 2560508 - RNA, 19 nt, Artificial Sequence
  Description of Artificial Sequence: Synthetic oligonucleotide
cagcccacaaaggcuacca

SEQ ID NO: 2560509 - RNA, 19 nt, Artificial Sequence
  Description of Artificial Sequence: Synthetic oligonucleotide
ugccacugcacaggcgcaa

SEQ ID NO: 2560510 - RNA, 19 nt, Artificial Sequence
  Description of Artificial Sequence: Synthetic oligonucleotide
ccuccacuagcaugauaag

SEQ ID NO: 2560511 - RNA, 19 nt, Artificial Sequence
  Description of Artificial Sequence: Synthetic oligonucleotide
caggcguagucucacgggu

SEQ ID NO: 2560512 - RNA, 19 nt, Artificial Sequence
  Description of Artificial Sequence: Synthetic oligonucleotide
uggcuacagccaccuccac

SEQ ID NO: 2560513 - RNA, 19 nt, Artificial Sequence
  Description of Artificial Sequence: Synthetic oligonucleotide
gggagccaggcguagucuc

SEQ ID NO: 2560514 - RNA, 19 nt, Artificial Sequence
  Description of Artificial Sequence: Synthetic oligonucleotide
gacucgguccuuaggcaua

SEQ ID NO: 2560515 - RNA, 19 nt, Artificial Sequence
  Description of Artificial Sequence: Synthetic oligonucleotide
gaacuaaggccgucuuguu

SEQ ID NO: 2560516 - RNA, 19 nt, Artificial Sequence
  Description of Artificial Sequence: Synthetic oligonucleotide
cggaaguucuuauuaaacu

SEQ ID NO: 2560517 - RNA, 19 nt, Artificial Sequence
  Description of Artificial Sequence: Synthetic oligonucleotide
gcacaggcgcaaaaggcca

SEQ ID NO: 2560518 - RNA, 19 nt, Artificial Sequence
  Description of Artificial Sequence: Synthetic oligonucleotide
gccagaccccuauauucuc

SEQ ID NO: 2560519 - RNA, 19 nt, Artificial Sequence
  Description of Artificial Sequence: Synthetic oligonucleotide
ggaagauggcaaauguaau

SEQ ID NO: 2560520 - RNA, 19 nt, Artificial Sequence
  Description of Artificial Sequence: Synthetic oligonucleotide
cggauacuuuucaccagac

SEQ ID NO: 2560521 - RNA, 19 nt, Artificial Sequence
  Description of Artificial Sequence: Synthetic oligonucleotide
gcccacagugauguugaug

SEQ ID NO: 2560522 - RNA, 19 nt, Artificial Sequence
  Description of Artificial Sequence: Synthetic oligonucleotide
ccagcaauacauucuuccu

SEQ ID NO: 2560523 - RNA, 19 nt, Artificial Sequence
  Description of Artificial Sequence: Synthetic oligonucleotide
ccacuucggauacuuuuca

SEQ ID NO: 2560524 - RNA, 19 nt, Artificial Sequence
  Description of Artificial Sequence: Synthetic oligonucleotide
aggaaggcgcccacugcaa

SEQ ID NO: 2560525 - RNA, 19 nt, Artificial Sequence
  Description of Artificial Sequence: Synthetic oligonucleotide
caauggcuacagccaccuc

SEQ ID NO: 2560526 - RNA, 19 nt, Artificial Sequence
  Description of Artificial Sequence: Synthetic oligonucleotide
cuacaccaauggcaaucaa

SEQ ID NO: 2560527 - RNA, 19 nt, Artificial Sequence
  Description of Artificial Sequence: Synthetic oligonucleotide
aggccagcaggagaacgua

SEQ ID NO: 2560528 - RNA, 19 nt, Artificial Sequence
  Description of Artificial Sequence: Synthetic oligonucleotide
gucucacgggugauggucu

SEQ ID NO: 2560529 - RNA, 19 nt, Artificial Sequence
  Description of Artificial Sequence: Synthetic oligonucleotide
cccgccccuacauuacuuc

SEQ ID NO: 2560530 - RNA, 19 nt, Artificial Sequence
  Description of Artificial Sequence: Synthetic oligonucleotide
gcaugauaagagacaggaa

SEQ ID NO: 2560531 - RNA, 19 nt, Artificial Sequence
  Description of Artificial Sequence: Synthetic oligonucleotide
ggcgcccacugcaaugaug

SEQ ID NO: 2560532 - RNA, 19 nt, Artificial Sequence
  Description of Artificial Sequence: Synthetic oligonucleotide
ggcuacagccaccuccacu

SEQ ID NO: 2560533 - RNA, 19 nt, Artificial Sequence
  Description of Artificial Sequence: Synthetic oligonucleotide
ggcauaccagugauguucu

SEQ ID NO: 2560534 - RNA, 19 nt, Artificial Sequence
  Description of Artificial Sequence: Synthetic oligonucleotide
ggacucgguccuuaggcau

SEQ ID NO: 2560535 - RNA, 19 nt, Artificial Sequence
  Description of Artificial Sequence: Synthetic oligonucleotide
ccagacagcaagagaagau

SEQ ID NO: 2560536 - RNA, 19 nt, Artificial Sequence
  Description of Artificial Sequence: Synthetic oligonucleotide
cucacgggugauggucuga

SEQ ID NO: 2560537 - RNA, 19 nt, Artificial Sequence
  Description of Artificial Sequence: Synthetic oligonucleotide
cucgguccuuaggcauacc

SEQ ID NO: 2560538 - RNA, 19 nt, Artificial Sequence
  Description of Artificial Sequence: Synthetic oligonucleotide
cgcaaaaggccagcaggag

SEQ ID NO: 2560539 - RNA, 19 nt, Artificial Sequence
  Description of Artificial Sequence: Synthetic oligonucleotide
gccgucuuguugucuuuaa

SEQ ID NO: 2560540 - RNA, 19 nt, Artificial Sequence
  Description of Artificial Sequence: Synthetic oligonucleotide
cgggugauggucugauuca

SEQ ID NO: 2560541 - RNA, 19 nt, Artificial Sequence
  Description of Artificial Sequence: Synthetic oligonucleotide
cguagucucacgggugaug

SEQ ID NO: 2560542 - RNA, 19 nt, Artificial Sequence
  Description of Artificial Sequence: Synthetic oligonucleotide
aggcgcccacugcaaugau

SEQ ID NO: 2560543 - RNA, 19 nt, Artificial Sequence
  Description of Artificial Sequence: Synthetic oligonucleotide
ccaaucuguguaguuguua

SEQ ID NO: 2560544 - RNA, 19 nt, Artificial Sequence
  Description of Artificial Sequence: Synthetic oligonucleotide
ggagaacguagagcagaaa

SEQ ID NO: 2560545 - RNA, 19 nt, Artificial Sequence
  Description of Artificial Sequence: Synthetic oligonucleotide
uuccaccgccauggcugcu

SEQ ID NO: 2560546 - RNA, 19 nt, Artificial Sequence
  Description of Artificial Sequence: Synthetic oligonucleotide
acgcagcccugaguaugga

SEQ ID NO: 2560547 - RNA, 19 nt, Artificial Sequence
  Description of Artificial Sequence: Synthetic oligonucleotide
ccgccccuacauuacuuca

SEQ ID NO: 2560548 - RNA, 19 nt, Artificial Sequence
  Description of Artificial Sequence: Synthetic oligonucleotide
aggcuaccaggaagaggaa

SEQ ID NO: 2560549 - RNA, 19 nt, Artificial Sequence
  Description of Artificial Sequence: Synthetic oligonucleotide
ggaaggcgcccacugcaau

SEQ ID NO: 2560550 - RNA, 19 nt, Artificial Sequence
  Description of Artificial Sequence: Synthetic oligonucleotide
ccugaacugcuacaccaau

SEQ ID NO: 2560551 - RNA, 19 nt, Artificial Sequence
  Description of Artificial Sequence: Synthetic oligonucleotide
ccccuauauucuccacgca

SEQ ID NO: 2560552 - RNA, 19 nt, Artificial Sequence
  Description of Artificial Sequence: Synthetic oligonucleotide
cugcuacaccaauggcaau

SEQ ID NO: 2560553 - RNA, 19 nt, Artificial Sequence
  Description of Artificial Sequence: Synthetic oligonucleotide
ccugaguauggaucuuguu

SEQ ID NO: 2560554 - RNA, 19 nt, Artificial Sequence
  Description of Artificial Sequence: Synthetic oligonucleotide
cacaggcaacagggagcca

SEQ ID NO: 2560555 - RNA, 19 nt, Artificial Sequence
  Description of Artificial Sequence: Synthetic oligonucleotide
gccauccguccagaacuaa

SEQ ID NO: 2560556 - RNA, 19 nt, Artificial Sequence
  Description of Artificial Sequence: Synthetic oligonucleotide
cacagcccacagugauguu

SEQ ID NO: 2560557 - RNA, 19 nt, Artificial Sequence
  Description of Artificial Sequence: Synthetic oligonucleotide
cgccccuacauuacuucau

SEQ ID NO: 2560558 - RNA, 19 nt, Artificial Sequence
  Description of Artificial Sequence: Synthetic oligonucleotide
gcguagucucacgggugau

SEQ ID NO: 2560559 - RNA, 19 nt, Artificial Sequence
  Description of Artificial Sequence: Synthetic oligonucleotide
uugucgaugagaaacuugg

SEQ ID NO: 2560560 - RNA, 19 nt, Artificial Sequence
  Description of Artificial Sequence: Synthetic oligonucleotide
uggacuuucauccauuucc

SEQ ID NO: 2560561 - RNA, 19 nt, Artificial Sequence
  Description of Artificial Sequence: Synthetic oligonucleotide
auaucgggcaugcagaucg

SEQ ID NO: 2560562 - RNA, 19 nt, Artificial Sequence
  Description of Artificial Sequence: Synthetic oligonucleotide
aacuugacaucguagcugg

SEQ ID NO: 2560563 - RNA, 19 nt, Artificial Sequence
  Description of Artificial Sequence: Synthetic oligonucleotide
auucuugucgaugagaaac

SEQ ID NO: 2560564 - RNA, 19 nt, Artificial Sequence
  Description of Artificial Sequence: Synthetic oligonucleotide
cugguuuucaggcagaccg

SEQ ID NO: 2560565 - RNA, 19 nt, Artificial Sequence
  Description of Artificial Sequence: Synthetic oligonucleotide
ucguaaaccacacucagca

SEQ ID NO: 2560566 - RNA, 19 nt, Artificial Sequence
  Description of Artificial Sequence: Synthetic oligonucleotide
cugaguguaguuuacgucg

SEQ ID NO: 2560567 - RNA, 19 nt, Artificial Sequence
  Description of Artificial Sequence: Synthetic oligonucleotide
ucaaacuugacaucguagc

SEQ ID NO: 2560568 - RNA, 19 nt, Artificial Sequence
  Description of Artificial Sequence: Synthetic oligonucleotide
uccccauuuacacagaucu

SEQ ID NO: 2560569 - RNA, 19 nt, Artificial Sequence
  Description of Artificial Sequence: Synthetic oligonucleotide
auuaguuccugguuccugc

SEQ ID NO: 2560570 - RNA, 19 nt, Artificial Sequence
  Description of Artificial Sequence: Synthetic oligonucleotide
aaggccaggauucguaaac

SEQ ID NO: 2560571 - RNA, 19 nt, Artificial Sequence
  Description of Artificial Sequence: Synthetic oligonucleotide
uacaugucaaacuugacau

SEQ ID NO: 2560572 - RNA, 19 nt, Artificial Sequence
  Description of Artificial Sequence: Synthetic oligonucleotide
aaccacacucagcauaucg

SEQ ID NO: 2560573 - RNA, 19 nt, Artificial Sequence
  Description of Artificial Sequence: Synthetic oligonucleotide
cauuuuauucccacaaggc

SEQ ID NO: 2560574 - RNA, 19 nt, Artificial Sequence
  Description of Artificial Sequence: Synthetic oligonucleotide
uagggcuagagauagcacg

SEQ ID NO: 2560575 - RNA, 19 nt, Artificial Sequence
  Description of Artificial Sequence: Synthetic oligonucleotide
ucgguuuugccucauugcg

SEQ ID NO: 2560576 - RNA, 19 nt, Artificial Sequence
  Description of Artificial Sequence: Synthetic oligonucleotide
aauucgugcauggagcgcg

SEQ ID NO: 2560577 - RNA, 19 nt, Artificial Sequence
  Description of Artificial Sequence: Synthetic oligonucleotide
uuggugacgaugcacacgc

SEQ ID NO: 2560578 - RNA, 19 nt, Artificial Sequence
  Description of Artificial Sequence: Synthetic oligonucleotide
uugggcuggacuuucaucc

SEQ ID NO: 2560579 - RNA, 19 nt, Artificial Sequence
  Description of Artificial Sequence: Synthetic oligonucleotide
auuuuauucccacaaggca

SEQ ID NO: 2560580 - RNA, 19 nt, Artificial Sequence
  Description of Artificial Sequence: Synthetic oligonucleotide
aaucaugugaccgucgaug

SEQ ID NO: 2560581 - RNA, 19 nt, Artificial Sequence
  Description of Artificial Sequence: Synthetic oligonucleotide
ucauccauuuccacagugg

SEQ ID NO: 2560582 - RNA, 19 nt, Artificial Sequence
  Description of Artificial Sequence: Synthetic oligonucleotide
uuuauucccacaaggcagc

SEQ ID NO: 2560583 - RNA, 19 nt, Artificial Sequence
  Description of Artificial Sequence: Synthetic oligonucleotide
ugaaguuccauuugauggc

SEQ ID NO: 2560584 - RNA, 19 nt, Artificial Sequence
  Description of Artificial Sequence: Synthetic oligonucleotide
ugcgaauucgugcauggag

SEQ ID NO: 2560585 - RNA, 19 nt, Artificial Sequence
  Description of Artificial Sequence: Synthetic oligonucleotide
uuuacgucgguuuugccuc

SEQ ID NO: 2560586 - RNA, 19 nt, Artificial Sequence
  Description of Artificial Sequence: Synthetic oligonucleotide
auucguaaaccacacucag

SEQ ID NO: 2560587 - RNA, 19 nt, Artificial Sequence
  Description of Artificial Sequence: Synthetic oligonucleotide
aucguccccauuuacacag

SEQ ID NO: 2560588 - RNA, 19 nt, Artificial Sequence
  Description of Artificial Sequence: Synthetic oligonucleotide
uugauuaguuccugguucc

SEQ ID NO: 2560589 - RNA, 19 nt, Artificial Sequence
  Description of Artificial Sequence: Synthetic oligonucleotide
cacgcagccauucuugucg

SEQ ID NO: 2560590 - RNA, 19 nt, Artificial Sequence
  Description of Artificial Sequence: Synthetic oligonucleotide
ugaagcucgagcccggggc

SEQ ID NO: 2560591 - RNA, 19 nt, Artificial Sequence
  Description of Artificial Sequence: Synthetic oligonucleotide
ucacauuucuacauuuuau

SEQ ID NO: 2560592 - RNA, 19 nt, Artificial Sequence
  Description of Artificial Sequence: Synthetic oligonucleotide
uguagggcuagagauagca

SEQ ID NO: 2560593 - RNA, 19 nt, Artificial Sequence
  Description of Artificial Sequence: Synthetic oligonucleotide
ugcagaucgacuagcugag

SEQ ID NO: 2560594 - RNA, 19 nt, Artificial Sequence
  Description of Artificial Sequence: Synthetic oligonucleotide
agcgcuucaucacgcagcc

SEQ ID NO: 2560595 - RNA, 19 nt, Artificial Sequence
  Description of Artificial Sequence: Synthetic oligonucleotide
aacuccuugauuucuugau

SEQ ID NO: 2560596 - RNA, 19 nt, Artificial Sequence
  Description of Artificial Sequence: Synthetic oligonucleotide
guacaugucaaacuugaca

SEQ ID NO: 2560597 - RNA, 19 nt, Artificial Sequence
  Description of Artificial Sequence: Synthetic oligonucleotide
uuugauggcguuucccagc

SEQ ID NO: 2560598 - RNA, 19 nt, Artificial Sequence
  Description of Artificial Sequence: Synthetic oligonucleotide
gagauagcacggcaggucc

SEQ ID NO: 2560599 - RNA, 19 nt, Artificial Sequence
  Description of Artificial Sequence: Synthetic oligonucleotide
ugacgaugcacacgcaacc

SEQ ID NO: 2560600 - RNA, 19 nt, Artificial Sequence
  Description of Artificial Sequence: Synthetic oligonucleotide
agugggugggcaucguccc

SEQ ID NO: 2560601 - RNA, 19 nt, Artificial Sequence
  Description of Artificial Sequence: Synthetic oligonucleotide
gucgaugagaaacuuggug

SEQ ID NO: 2560602 - RNA, 19 nt, Artificial Sequence
  Description of Artificial Sequence: Synthetic oligonucleotide
cacagcgccaaucaucacg

SEQ ID NO: 2560603 - RNA, 19 nt, Artificial Sequence
  Description of Artificial Sequence: Synthetic oligonucleotide
ugaaccuuccuccggcaag

SEQ ID NO: 2560604 - RNA, 19 nt, Artificial Sequence
  Description of Artificial Sequence: Synthetic oligonucleotide
uugauuucuugauuaguuc

SEQ ID NO: 2560605 - RNA, 19 nt, Artificial Sequence
  Description of Artificial Sequence: Synthetic oligonucleotide
caugugaccgucgaugucc

SEQ ID NO: 2560606 - RNA, 19 nt, Artificial Sequence
  Description of Artificial Sequence: Synthetic oligonucleotide
gaaguuccauuugauggcg

SEQ ID NO: 2560607 - RNA, 19 nt, Artificial Sequence
  Description of Artificial Sequence: Synthetic oligonucleotide
uucuacauuuuauucccac

SEQ ID NO: 2560608 - RNA, 19 nt, Artificial Sequence
  Description of Artificial Sequence: Synthetic oligonucleotide
gauggcguuucccagcaug

SEQ ID NO: 2560609 - RNA, 19 nt, Artificial Sequence
  Description of Artificial Sequence: Synthetic oligonucleotide
aucaucacgggaugcgcac

SEQ ID NO: 2560610 - RNA, 19 nt, Artificial Sequence
  Description of Artificial Sequence: Synthetic oligonucleotide
caggcaaaucaugugaccg

SEQ ID NO: 2560611 - RNA, 19 nt, Artificial Sequence
  Description of Artificial Sequence: Synthetic oligonucleotide
ugcgaggccacguugguga

SEQ ID NO: 2560612 - RNA, 19 nt, Artificial Sequence
  Description of Artificial Sequence: Synthetic oligonucleotide
uucguaaaccacacucagc

SEQ ID NO: 2560613 - RNA, 19 nt, Artificial Sequence
  Description of Artificial Sequence: Synthetic oligonucleotide
aucguagcuggcugcaaac

SEQ ID NO: 2560614 - RNA, 19 nt, Artificial Sequence
  Description of Artificial Sequence: Synthetic oligonucleotide
acaugucaaacuugacauc

SEQ ID NO: 2560615 - RNA, 19 nt, Artificial Sequence
  Description of Artificial Sequence: Synthetic oligonucleotide
cauugcgaggccacguugg

SEQ ID NO: 2560616 - RNA, 19 nt, Artificial Sequence
  Description of Artificial Sequence: Synthetic oligonucleotide
uccuugauuucuugauuag

SEQ ID NO: 2560617 - RNA, 19 nt, Artificial Sequence
  Description of Artificial Sequence: Synthetic oligonucleotide
uguaguuuacgucgguuuu

SEQ ID NO: 2560618 - RNA, 19 nt, Artificial Sequence
  Description of Artificial Sequence: Synthetic oligonucleotide
ugccccaccagcaggcugg

SEQ ID NO: 2560619 - RNA, 19 nt, Artificial Sequence
  Description of Artificial Sequence: Synthetic oligonucleotide
uucccgaacugguugcagg

SEQ ID NO: 2560620 - RNA, 19 nt, Artificial Sequence
  Description of Artificial Sequence: Synthetic oligonucleotide
uauccaggcaaaucaugug

SEQ ID NO: 2560621 - RNA, 19 nt, Artificial Sequence
  Description of Artificial Sequence: Synthetic oligonucleotide
acacucagcauaucgggca

SEQ ID NO: 2560622 - RNA, 19 nt, Artificial Sequence
  Description of Artificial Sequence: Synthetic oligonucleotide
uagcgcuucaucacgcagc

SEQ ID NO: 2560623 - RNA, 19 nt, Artificial Sequence
  Description of Artificial Sequence: Synthetic oligonucleotide
uuuucaggcagaccgucau

SEQ ID NO: 2560624 - RNA, 19 nt, Artificial Sequence
  Description of Artificial Sequence: Synthetic oligonucleotide
cuuccaugggaccguagcg

SEQ ID NO: 2560625 - RNA, 19 nt, Artificial Sequence
  Description of Artificial Sequence: Synthetic oligonucleotide
accguagcgcuucaucacg

SEQ ID NO: 2560626 - RNA, 19 nt, Artificial Sequence
  Description of Artificial Sequence: Synthetic oligonucleotide
acugguugcaggggaaggc

SEQ ID NO: 2560627 - RNA, 19 nt, Artificial Sequence
  Description of Artificial Sequence: Synthetic oligonucleotide
agaucgacuagcugagugu

SEQ ID NO: 2560628 - RNA, 19 nt, Artificial Sequence
  Description of Artificial Sequence: Synthetic oligonucleotide
agagauagcacggcagguc

SEQ ID NO: 2560629 - RNA, 19 nt, Artificial Sequence
  Description of Artificial Sequence: Synthetic oligonucleotide
cagcauaucgggcaugcag

SEQ ID NO: 2560630 - RNA, 19 nt, Artificial Sequence
  Description of Artificial Sequence: Synthetic oligonucleotide
cuugucgaugagaaacuug

SEQ ID NO: 2560631 - RNA, 19 nt, Artificial Sequence
  Description of Artificial Sequence: Synthetic oligonucleotide
cuguacaugucaaacuuga

SEQ ID NO: 2560632 - RNA, 19 nt, Artificial Sequence
  Description of Artificial Sequence: Synthetic oligonucleotide
uugcuguacaugucaaacu

SEQ ID NO: 2560633 - RNA, 19 nt, Artificial Sequence
  Description of Artificial Sequence: Synthetic oligonucleotide
gauucguaaaccacacuca

SEQ ID NO: 2560634 - RNA, 19 nt, Artificial Sequence
  Description of Artificial Sequence: Synthetic oligonucleotide
aucaugugaccgucgaugu

SEQ ID NO: 2560635 - RNA, 19 nt, Artificial Sequence
  Description of Artificial Sequence: Synthetic oligonucleotide
aacugguugcaggggaagg

SEQ ID NO: 2560636 - RNA, 19 nt, Artificial Sequence
  Description of Artificial Sequence: Synthetic oligonucleotide
aguuuacgucgguuuugcc

SEQ ID NO: 2560637 - RNA, 19 nt, Artificial Sequence
  Description of Artificial Sequence: Synthetic oligonucleotide
acuagcugaguguaguuua

SEQ ID NO: 2560638 - RNA, 19 nt, Artificial Sequence
  Description of Artificial Sequence: Synthetic oligonucleotide
acagcgccaaucaucacgg

SEQ ID NO: 2560639 - RNA, 19 nt, Artificial Sequence
  Description of Artificial Sequence: Synthetic oligonucleotide
ugucaaacuugacaucgua

SEQ ID NO: 2560640 - RNA, 19 nt, Artificial Sequence
  Description of Artificial Sequence: Synthetic oligonucleotide
ucauugcgaggccacguug

SEQ ID NO: 2560641 - RNA, 19 nt, Artificial Sequence
  Description of Artificial Sequence: Synthetic oligonucleotide
gucaaacuugacaucguag

SEQ ID NO: 2560642 - RNA, 19 nt, Artificial Sequence
  Description of Artificial Sequence: Synthetic oligonucleotide
agcugaguguaguuuacgu

SEQ ID NO: 2560643 - RNA, 19 nt, Artificial Sequence
  Description of Artificial Sequence: Synthetic oligonucleotide
cuuguacuuauccaggcaa

SEQ ID NO: 2560644 - RNA, 19 nt, Artificial Sequence
  Description of Artificial Sequence: Synthetic oligonucleotide
uccugguuccugcuucccg

SEQ ID NO: 2560645 - RNA, 19 nt, Artificial Sequence
  Description of Artificial Sequence: Synthetic oligonucleotide
gaaccuuccuccggcaagg

SEQ ID NO: 2560646 - RNA, 19 nt, Artificial Sequence
  Description of Artificial Sequence: Synthetic oligonucleotide
uaguuuacgucgguuuugc

SEQ ID NO: 2560647 - RNA, 19 nt, Artificial Sequence
  Description of Artificial Sequence: Synthetic oligonucleotide
gucgguuuugccucauugc

SEQ ID NO: 2560648 - RNA, 19 nt, Artificial Sequence
  Description of Artificial Sequence: Synthetic oligonucleotide
cagaccgucaugagugccg

SEQ ID NO: 2560649 - RNA, 19 nt, Artificial Sequence
  Description of Artificial Sequence: Synthetic oligonucleotide
caucacgcagccauucuug

SEQ ID NO: 2560650 - RNA, 19 nt, Artificial Sequence
  Description of Artificial Sequence: Synthetic oligonucleotide
uuguacuuauccaggcaaa

SEQ ID NO: 2560651 - RNA, 19 nt, Artificial Sequence
  Description of Artificial Sequence: Synthetic oligonucleotide
cagaucgacuagcugagug

SEQ ID NO: 2560652 - RNA, 19 nt, Artificial Sequence
  Description of Artificial Sequence: Synthetic oligonucleotide
caggauucguaaaccacac

SEQ ID NO: 2560653 - RNA, 19 nt, Artificial Sequence
  Description of Artificial Sequence: Synthetic oligonucleotide
accacacucagcauaucgg

SEQ ID NO: 2560654 - RNA, 19 nt, Artificial Sequence
  Description of Artificial Sequence: Synthetic oligonucleotide
agggcuagagauagcacgg

SEQ ID NO: 2560655 - RNA, 19 nt, Artificial Sequence
  Description of Artificial Sequence: Synthetic oligonucleotide
acucuuguagggcuagaga

SEQ ID NO: 2560656 - RNA, 19 nt, Artificial Sequence
  Description of Artificial Sequence: Synthetic oligonucleotide
cacacucagcauaucgggc

SEQ ID NO: 2560657 - RNA, 19 nt, Artificial Sequence
  Description of Artificial Sequence: Synthetic oligonucleotide
aggcagaccgucaugagug

SEQ ID NO: 2560658 - RNA, 19 nt, Artificial Sequence
  Description of Artificial Sequence: Synthetic oligonucleotide
cucugaaccuuccuccggc

SEQ ID NO: 2560659 - RNA, 19 nt, Artificial Sequence
  Description of Artificial Sequence: Synthetic oligonucleotide
cagugggugggcaucgucc

SEQ ID NO: 2560660 - RNA, 19 nt, Artificial Sequence
  Description of Artificial Sequence: Synthetic oligonucleotide
auggcguuucccagcaugc

SEQ ID NO: 2560661 - RNA, 19 nt, Artificial Sequence
  Description of Artificial Sequence: Synthetic oligonucleotide
uuugccucauugcgaggcc

SEQ ID NO: 2560662 - RNA, 19 nt, Artificial Sequence
  Description of Artificial Sequence: Synthetic oligonucleotide
caggggaaggccaggauuc

SEQ ID NO: 2560663 - RNA, 19 nt, Artificial Sequence
  Description of Artificial Sequence: Synthetic oligonucleotide
ugacaucguagcuggcugc

SEQ ID NO: 2560664 - RNA, 19 nt, Artificial Sequence
  Description of Artificial Sequence: Synthetic oligonucleotide
accgucaugagugccgggg

SEQ ID NO: 2560665 - RNA, 19 nt, Artificial Sequence
  Description of Artificial Sequence: Synthetic oligonucleotide
aggccaggauucguaaacc

SEQ ID NO: 2560666 - RNA, 19 nt, Artificial Sequence
  Description of Artificial Sequence: Synthetic oligonucleotide
gauuaguuccugguuccug

SEQ ID NO: 2560667 - RNA, 19 nt, Artificial Sequence
  Description of Artificial Sequence: Synthetic oligonucleotide
aaucaucacgggaugcgca

SEQ ID NO: 2560668 - RNA, 19 nt, Artificial Sequence
  Description of Artificial Sequence: Synthetic oligonucleotide
cuagcugaguguaguuuac

SEQ ID NO: 2560669 - RNA, 19 nt, Artificial Sequence
  Description of Artificial Sequence: Synthetic oligonucleotide
uccauuugauggcguuucc

SEQ ID NO: 2560670 - RNA, 19 nt, Artificial Sequence
  Description of Artificial Sequence: Synthetic oligonucleotide
guuuacgucgguuuugccu

SEQ ID NO: 2560671 - RNA, 19 nt, Artificial Sequence
  Description of Artificial Sequence: Synthetic oligonucleotide
uucaucacgcagccauucu

SEQ ID NO: 2560672 - RNA, 19 nt, Artificial Sequence
  Description of Artificial Sequence: Synthetic oligonucleotide
gcaacccuuguacuuaucc

SEQ ID NO: 2560673 - RNA, 19 nt, Artificial Sequence
  Description of Artificial Sequence: Synthetic oligonucleotide
guuggugacgaugcacacg

SEQ ID NO: 2560674 - RNA, 19 nt, Artificial Sequence
  Description of Artificial Sequence: Synthetic oligonucleotide
gagaaacuuggugaaguuc

SEQ ID NO: 2560675 - RNA, 19 nt, Artificial Sequence
  Description of Artificial Sequence: Synthetic oligonucleotide
ucgacuagcugaguguagu

SEQ ID NO: 2560676 - RNA, 19 nt, Artificial Sequence
  Description of Artificial Sequence: Synthetic oligonucleotide
uuccauuugauggcguuuc

SEQ ID NO: 2560677 - RNA, 19 nt, Artificial Sequence
  Description of Artificial Sequence: Synthetic oligonucleotide
aggcaaaucaugugaccgu

SEQ ID NO: 2560678 - RNA, 19 nt, Artificial Sequence
  Description of Artificial Sequence: Synthetic oligonucleotide
uaucaccaggggcucuucc

SEQ ID NO: 2560679 - RNA, 19 nt, Artificial Sequence
  Description of Artificial Sequence: Synthetic oligonucleotide
agcgccaaucaucacggga

SEQ ID NO: 2560680 - RNA, 19 nt, Artificial Sequence
  Description of Artificial Sequence: Synthetic oligonucleotide
caggugaagcucgagcccg

SEQ ID NO: 2560681 - RNA, 19 nt, Artificial Sequence
  Description of Artificial Sequence: Synthetic oligonucleotide
uagcugaguguaguuuacg

SEQ ID NO: 2560682 - RNA, 19 nt, Artificial Sequence
  Description of Artificial Sequence: Synthetic oligonucleotide
uccaugggaccguagcgcu

SEQ ID NO: 2560683 - RNA, 19 nt, Artificial Sequence
  Description of Artificial Sequence: Synthetic oligonucleotide
ucgggcaugcagaucgacu

SEQ ID NO: 2560684 - RNA, 19 nt, Artificial Sequence
  Description of Artificial Sequence: Synthetic oligonucleotide
agcauaucgggcaugcaga

SEQ ID NO: 2560685 - RNA, 19 nt, Artificial Sequence
  Description of Artificial Sequence: Synthetic oligonucleotide
ucaucacgcagccauucuu

SEQ ID NO: 2560686 - RNA, 19 nt, Artificial Sequence
  Description of Artificial Sequence: Synthetic oligonucleotide
gacgaugcacacgcaaccc

SEQ ID NO: 2560687 - RNA, 19 nt, Artificial Sequence
  Description of Artificial Sequence: Synthetic oligonucleotide
uggugaaguuccauuugau

SEQ ID NO: 2560688 - RNA, 19 nt, Artificial Sequence
  Description of Artificial Sequence: Synthetic oligonucleotide
caaaucaugugaccgucga

SEQ ID NO: 2560689 - RNA, 19 nt, Artificial Sequence
  Description of Artificial Sequence: Synthetic oligonucleotide
guaguuuacgucgguuuug

SEQ ID NO: 2560690 - RNA, 19 nt, Artificial Sequence
  Description of Artificial Sequence: Synthetic oligonucleotide
cucagcauaucgggcaugc

SEQ ID NO: 2560691 - RNA, 19 nt, Artificial Sequence
  Description of Artificial Sequence: Synthetic oligonucleotide
gaccguagcgcuucaucac

SEQ ID NO: 2560692 - RNA, 19 nt, Artificial Sequence
  Description of Artificial Sequence: Synthetic oligonucleotide
ugguuuucaggcagaccgu

SEQ ID NO: 2560693 - RNA, 19 nt, Artificial Sequence
  Description of Artificial Sequence: Synthetic oligonucleotide
ucaggcagaccgucaugag

SEQ ID NO: 2560694 - RNA, 19 nt, Artificial Sequence
  Description of Artificial Sequence: Synthetic oligonucleotide
caugcagaucgacuagcug

SEQ ID NO: 2560695 - RNA, 19 nt, Artificial Sequence
  Description of Artificial Sequence: Synthetic oligonucleotide
caaucaucacgggaugcgc

SEQ ID NO: 2560696 - RNA, 19 nt, Artificial Sequence
  Description of Artificial Sequence: Synthetic oligonucleotide
acagaucuugcuguacaug

SEQ ID NO: 2560697 - RNA, 19 nt, Artificial Sequence
  Description of Artificial Sequence: Synthetic oligonucleotide
ugguugcaggggaaggcca

SEQ ID NO: 2560698 - RNA, 19 nt, Artificial Sequence
  Description of Artificial Sequence: Synthetic oligonucleotide
ccacacucagcauaucggg

SEQ ID NO: 2560699 - RNA, 19 nt, Artificial Sequence
  Description of Artificial Sequence: Synthetic oligonucleotide
gcugcgaauucgugcaugg

SEQ ID NO: 2560700 - RNA, 19 nt, Artificial Sequence
  Description of Artificial Sequence: Synthetic oligonucleotide
cuugggcuggacuuucauc

SEQ ID NO: 2560701 - RNA, 19 nt, Artificial Sequence
  Description of Artificial Sequence: Synthetic oligonucleotide
ucugaaccuuccuccggca

SEQ ID NO: 2560702 - RNA, 19 nt, Artificial Sequence
  Description of Artificial Sequence: Synthetic oligonucleotide
cucuuguagggcuagagau

SEQ ID NO: 2560703 - RNA, 19 nt, Artificial Sequence
  Description of Artificial Sequence: Synthetic oligonucleotide
agcacggcagguccuucuc

SEQ ID NO: 2560704 - RNA, 19 nt, Artificial Sequence
  Description of Artificial Sequence: Synthetic oligonucleotide
aguuccauuugauggcguu

SEQ ID NO: 2560705 - RNA, 19 nt, Artificial Sequence
  Description of Artificial Sequence: Synthetic oligonucleotide
cccauuuacacagaucuug

SEQ ID NO: 2560706 - RNA, 19 nt, Artificial Sequence
  Description of Artificial Sequence: Synthetic oligonucleotide
ccuuccuccggcaaggaug

SEQ ID NO: 2560707 - RNA, 19 nt, Artificial Sequence
  Description of Artificial Sequence: Synthetic oligonucleotide
gcaucguccccauuuacac

SEQ ID NO: 2560708 - RNA, 19 nt, Artificial Sequence
  Description of Artificial Sequence: Synthetic oligonucleotide
acgaugcacacgcaacccu

SEQ ID NO: 2560709 - RNA, 19 nt, Artificial Sequence
  Description of Artificial Sequence: Synthetic oligonucleotide
ucgggacugccccaccagc

SEQ ID NO: 2560710 - RNA, 19 nt, Artificial Sequence
  Description of Artificial Sequence: Synthetic oligonucleotide
aucacgcagccauucuugu

SEQ ID NO: 2560711 - RNA, 19 nt, Artificial Sequence
  Description of Artificial Sequence: Synthetic oligonucleotide
gaauucgugcauggagcgc

SEQ ID NO: 2560712 - RNA, 19 nt, Artificial Sequence
  Description of Artificial Sequence: Synthetic oligonucleotide
caacccuuguacuuaucca

SEQ ID NO: 2560713 - RNA, 19 nt, Artificial Sequence
  Description of Artificial Sequence: Synthetic oligonucleotide
agaccgucaugagugccgg

SEQ ID NO: 2560714 - RNA, 19 nt, Artificial Sequence
  Description of Artificial Sequence: Synthetic oligonucleotide
cugguugcaggggaaggcc

SEQ ID NO: 2560715 - RNA, 19 nt, Artificial Sequence
  Description of Artificial Sequence: Synthetic oligonucleotide
gcuagagauagcacggcag

SEQ ID NO: 2560716 - RNA, 19 nt, Artificial Sequence
  Description of Artificial Sequence: Synthetic oligonucleotide
cauggagcgcgcacagcgc

SEQ ID NO: 2560717 - RNA, 19 nt, Artificial Sequence
  Description of Artificial Sequence: Synthetic oligonucleotide
ucaugugaccgucgauguc

SEQ ID NO: 2560718 - RNA, 19 nt, Artificial Sequence
  Description of Artificial Sequence: Synthetic oligonucleotide
augugaccgucgauguccc

SEQ ID NO: 2560719 - RNA, 19 nt, Artificial Sequence
  Description of Artificial Sequence: Synthetic oligonucleotide
guacuuauccaggcaaauc

SEQ ID NO: 2560720 - RNA, 19 nt, Artificial Sequence
  Description of Artificial Sequence: Synthetic oligonucleotide
uacacagaucuugcuguac

SEQ ID NO: 2560721 - RNA, 19 nt, Artificial Sequence
  Description of Artificial Sequence: Synthetic oligonucleotide
uuauucccacaaggcagcc

SEQ ID NO: 2560722 - RNA, 19 nt, Artificial Sequence
  Description of Artificial Sequence: Synthetic oligonucleotide
gcgaauucgugcauggagc

SEQ ID NO: 2560723 - RNA, 19 nt, Artificial Sequence
  Description of Artificial Sequence: Synthetic oligonucleotide
guuccugguuccugcuucc

SEQ ID NO: 2560724 - RNA, 19 nt, Artificial Sequence
  Description of Artificial Sequence: Synthetic oligonucleotide
gcacacgcaacccuuguac

SEQ ID NO: 2560725 - RNA, 19 nt, Artificial Sequence
  Description of Artificial Sequence: Synthetic oligonucleotide
gucgaugucccuggcugcg

SEQ ID NO: 2560726 - RNA, 19 nt, Artificial Sequence
  Description of Artificial Sequence: Synthetic oligonucleotide
gaugcacgccagguccucg

SEQ ID NO: 2560727 - RNA, 19 nt, Artificial Sequence
  Description of Artificial Sequence: Synthetic oligonucleotide
cacgccagguccucgggac

SEQ ID NO: 2560728 - RNA, 19 nt, Artificial Sequence
  Description of Artificial Sequence: Synthetic oligonucleotide
aggauucguaaaccacacu

SEQ ID NO: 2560729 - RNA, 19 nt, Artificial Sequence
  Description of Artificial Sequence: Synthetic oligonucleotide
ugauuaguuccugguuccu

SEQ ID NO: 2560730 - RNA, 19 nt, Artificial Sequence
  Description of Artificial Sequence: Synthetic oligonucleotide
gcugaguguaguuuacguc

SEQ ID NO: 2560731 - RNA, 19 nt, Artificial Sequence
  Description of Artificial Sequence: Synthetic oligonucleotide
cuucaucacgcagccauuc

SEQ ID NO: 2560732 - RNA, 19 nt, Artificial Sequence
  Description of Artificial Sequence: Synthetic oligonucleotide
agccauucuugucgaugag

SEQ ID NO: 2560733 - RNA, 19 nt, Artificial Sequence
  Description of Artificial Sequence: Synthetic oligonucleotide
acacgcaacccuuguacuu

SEQ ID NO: 2560734 - RNA, 19 nt, Artificial Sequence
  Description of Artificial Sequence: Synthetic oligonucleotide
cgaauucgugcauggagcg

SEQ ID NO: 2560735 - RNA, 19 nt, Artificial Sequence
  Description of Artificial Sequence: Synthetic oligonucleotide
ccaaucaucacgggaugcg

SEQ ID NO: 2560736 - RNA, 19 nt, Artificial Sequence
  Description of Artificial Sequence: Synthetic oligonucleotide
ggcguuucccagcaugccc

SEQ ID NO: 2560737 - RNA, 19 nt, Artificial Sequence
  Description of Artificial Sequence: Synthetic oligonucleotide
uuguagggcuagagauagc

SEQ ID NO: 2560738 - RNA, 19 nt, Artificial Sequence
  Description of Artificial Sequence: Synthetic oligonucleotide
ggaccguagcgcuucauca

SEQ ID NO: 2560739 - RNA, 19 nt, Artificial Sequence
  Description of Artificial Sequence: Synthetic oligonucleotide
caaacuugacaucguagcu

SEQ ID NO: 2560740 - RNA, 19 nt, Artificial Sequence
  Description of Artificial Sequence: Synthetic oligonucleotide
gaucgacuagcugagugua

SEQ ID NO: 2560741 - RNA, 19 nt, Artificial Sequence
  Description of Artificial Sequence: Synthetic oligonucleotide
cacguuggugacgaugcac

SEQ ID NO: 2560742 - RNA, 19 nt, Artificial Sequence
  Description of Artificial Sequence: Synthetic oligonucleotide
uauucccacaaggcagcca

SEQ ID NO: 2560743 - RNA, 19 nt, Artificial Sequence
  Description of Artificial Sequence: Synthetic oligonucleotide
aguguaguuuacgucgguu

SEQ ID NO: 2560744 - RNA, 19 nt, Artificial Sequence
  Description of Artificial Sequence: Synthetic oligonucleotide
auucgugcauggagcgcgc

SEQ ID NO: 2560745 - RNA, 19 nt, Artificial Sequence
  Description of Artificial Sequence: Synthetic oligonucleotide
ucguagcuggcugcaaacu

SEQ ID NO: 2560746 - RNA, 19 nt, Artificial Sequence
  Description of Artificial Sequence: Synthetic oligonucleotide
uccuccggcaaggaugcac

SEQ ID NO: 2560747 - RNA, 19 nt, Artificial Sequence
  Description of Artificial Sequence: Synthetic oligonucleotide
gccacguuggugacgaugc

SEQ ID NO: 2560748 - RNA, 19 nt, Artificial Sequence
  Description of Artificial Sequence: Synthetic oligonucleotide
uuacgucgguuuugccuca

SEQ ID NO: 2560749 - RNA, 19 nt, Artificial Sequence
  Description of Artificial Sequence: Synthetic oligonucleotide
uccggcaaggaugcacgcc

SEQ ID NO: 2560750 - RNA, 19 nt, Artificial Sequence
  Description of Artificial Sequence: Synthetic oligonucleotide
gugcauggagcgcgcacag

SEQ ID NO: 2560751 - RNA, 19 nt, Artificial Sequence
  Description of Artificial Sequence: Synthetic oligonucleotide
ccaggauucguaaaccaca

SEQ ID NO: 2560752 - RNA, 19 nt, Artificial Sequence
  Description of Artificial Sequence: Synthetic oligonucleotide
caugggaccguagcgcuuc

SEQ ID NO: 2560753 - RNA, 19 nt, Artificial Sequence
  Description of Artificial Sequence: Synthetic oligonucleotide
ccuccggcaaggaugcacg

SEQ ID NO: 2560754 - RNA, 19 nt, Artificial Sequence
  Description of Artificial Sequence: Synthetic oligonucleotide
ucacgcagccauucuuguc

SEQ ID NO: 2560755 - RNA, 19 nt, Artificial Sequence
  Description of Artificial Sequence: Synthetic oligonucleotide
aucgggcaugcagaucgac

SEQ ID NO: 2560756 - RNA, 19 nt, Artificial Sequence
  Description of Artificial Sequence: Synthetic oligonucleotide
ugucccuggcugcgaauuc

SEQ ID NO: 2560757 - RNA, 19 nt, Artificial Sequence
  Description of Artificial Sequence: Synthetic oligonucleotide
aaggcuccaggggucacau

SEQ ID NO: 2560758 - RNA, 19 nt, Artificial Sequence
  Description of Artificial Sequence: Synthetic oligonucleotide
uaucgggcaugcagaucga

SEQ ID NO: 2560759 - RNA, 19 nt, Artificial Sequence
  Description of Artificial Sequence: Synthetic oligonucleotide
cacacucuuguagggcuag

SEQ ID NO: 2560760 - RNA, 19 nt, Artificial Sequence
  Description of Artificial Sequence: Synthetic oligonucleotide
guugcaggggaaggccagg

SEQ ID NO: 2560761 - RNA, 19 nt, Artificial Sequence
  Description of Artificial Sequence: Synthetic oligonucleotide
augcacacgcaacccuugu

SEQ ID NO: 2560762 - RNA, 19 nt, Artificial Sequence
  Description of Artificial Sequence: Synthetic oligonucleotide
uagcacggcagguccuucu

SEQ ID NO: 2560763 - RNA, 19 nt, Artificial Sequence
  Description of Artificial Sequence: Synthetic oligonucleotide
aaguuccauuugauggcgu

SEQ ID NO: 2560764 - RNA, 19 nt, Artificial Sequence
  Description of Artificial Sequence: Synthetic oligonucleotide
gcaaaucaugugaccgucg

SEQ ID NO: 2560765 - RNA, 19 nt, Artificial Sequence
  Description of Artificial Sequence: Synthetic oligonucleotide
ucaucacgggaugcgcaca

SEQ ID NO: 2560766 - RNA, 19 nt, Artificial Sequence
  Description of Artificial Sequence: Synthetic oligonucleotide
ccaggcaaaucaugugacc

SEQ ID NO: 2560767 - RNA, 19 nt, Artificial Sequence
  Description of Artificial Sequence: Synthetic oligonucleotide
cucgggacugccccaccag

SEQ ID NO: 2560768 - RNA, 19 nt, Artificial Sequence
  Description of Artificial Sequence: Synthetic oligonucleotide
agcgcgcacagcgccaauc

SEQ ID NO: 2560769 - RNA, 19 nt, Artificial Sequence
  Description of Artificial Sequence: Synthetic oligonucleotide
ggacugccccaccagcagg

SEQ ID NO: 2560770 - RNA, 19 nt, Artificial Sequence
  Description of Artificial Sequence: Synthetic oligonucleotide
gcuguacaugucaaacuug

SEQ ID NO: 2560771 - RNA, 19 nt, Artificial Sequence
  Description of Artificial Sequence: Synthetic oligonucleotide
ugguuccugcuucccgaac

SEQ ID NO: 2560772 - RNA, 19 nt, Artificial Sequence
  Description of Artificial Sequence: Synthetic oligonucleotide
uggcguuucccagcaugcc

SEQ ID NO: 2560773 - RNA, 19 nt, Artificial Sequence
  Description of Artificial Sequence: Synthetic oligonucleotide
guguaguuuacgucgguuu

SEQ ID NO: 2560774 - RNA, 19 nt, Artificial Sequence
  Description of Artificial Sequence: Synthetic oligonucleotide
guagggcuagagauagcac

SEQ ID NO: 2560775 - RNA, 19 nt, Artificial Sequence
  Description of Artificial Sequence: Synthetic oligonucleotide
aucgacuagcugaguguag

SEQ ID NO: 2560776 - RNA, 19 nt, Artificial Sequence
  Description of Artificial Sequence: Synthetic oligonucleotide
accgucgaugucccuggcu

SEQ ID NO: 2560777 - RNA, 19 nt, Artificial Sequence
  Description of Artificial Sequence: Synthetic oligonucleotide
caucguccccauuuacaca

SEQ ID NO: 2560778 - RNA, 19 nt, Artificial Sequence
  Description of Artificial Sequence: Synthetic oligonucleotide
ggcaaggaugcacgccagg

SEQ ID NO: 2560779 - RNA, 19 nt, Artificial Sequence
  Description of Artificial Sequence: Synthetic oligonucleotide
auagcacggcagguccuuc

SEQ ID NO: 2560780 - RNA, 19 nt, Artificial Sequence
  Description of Artificial Sequence: Synthetic oligonucleotide
agcaugccccugcccuugg

SEQ ID NO: 2560781 - RNA, 19 nt, Artificial Sequence
  Description of Artificial Sequence: Synthetic oligonucleotide
cacaaggcagccaggugaa

SEQ ID NO: 2560782 - RNA, 19 nt, Artificial Sequence
  Description of Artificial Sequence: Synthetic oligonucleotide
agcccggggccacaggccu

SEQ ID NO: 2560783 - RNA, 19 nt, Artificial Sequence
  Description of Artificial Sequence: Synthetic oligonucleotide
gaccgucaugagugccggg

SEQ ID NO: 2560784 - RNA, 19 nt, Artificial Sequence
  Description of Artificial Sequence: Synthetic oligonucleotide
uuccacagugggugggcau

SEQ ID NO: 2560785 - RNA, 19 nt, Artificial Sequence
  Description of Artificial Sequence: Synthetic oligonucleotide
augucaaacuugacaucgu

SEQ ID NO: 2560786 - RNA, 19 nt, Artificial Sequence
  Description of Artificial Sequence: Synthetic oligonucleotide
ggcaugcagaucgacuagc

SEQ ID NO: 2560787 - RNA, 19 nt, Artificial Sequence
  Description of Artificial Sequence: Synthetic oligonucleotide
ggacuuucauccauuucca

SEQ ID NO: 2560788 - RNA, 19 nt, Artificial Sequence
  Description of Artificial Sequence: Synthetic oligonucleotide
uugcgaggccacguuggug

SEQ ID NO: 2560789 - RNA, 19 nt, Artificial Sequence
  Description of Artificial Sequence: Synthetic oligonucleotide
gggcucuuccaugggaccg

SEQ ID NO: 2560790 - RNA, 19 nt, Artificial Sequence
  Description of Artificial Sequence: Synthetic oligonucleotide
acgcagccauucuugucga

SEQ ID NO: 2560791 - RNA, 19 nt, Artificial Sequence
  Description of Artificial Sequence: Synthetic oligonucleotide
cuugacaucguagcuggcu

SEQ ID NO: 2560792 - RNA, 19 nt, Artificial Sequence
  Description of Artificial Sequence: Synthetic oligonucleotide
ccgucgaugucccuggcug

SEQ ID NO: 2560793 - RNA, 19 nt, Artificial Sequence
  Description of Artificial Sequence: Synthetic oligonucleotide
gcagccauucuugucgaug

SEQ ID NO: 2560794 - RNA, 19 nt, Artificial Sequence
  Description of Artificial Sequence: Synthetic oligonucleotide
ucagcauaucgggcaugca

SEQ ID NO: 2560795 - RNA, 19 nt, Artificial Sequence
  Description of Artificial Sequence: Synthetic oligonucleotide
ggcuagagauagcacggca

SEQ ID NO: 2560796 - RNA, 19 nt, Artificial Sequence
  Description of Artificial Sequence: Synthetic oligonucleotide
gggcaugcagaucgacuag

SEQ ID NO: 2560797 - RNA, 19 nt, Artificial Sequence
  Description of Artificial Sequence: Synthetic oligonucleotide
cauucuugucgaugagaaa

SEQ ID NO: 2560798 - RNA, 19 nt, Artificial Sequence
  Description of Artificial Sequence: Synthetic oligonucleotide
ucguccccauuuacacaga

SEQ ID NO: 2560799 - RNA, 19 nt, Artificial Sequence
  Description of Artificial Sequence: Synthetic oligonucleotide
gggacugccccaccagcag

SEQ ID NO: 2560800 - RNA, 19 nt, Artificial Sequence
  Description of Artificial Sequence: Synthetic oligonucleotide
ccauuugauggcguuuccc

SEQ ID NO: 2560801 - RNA, 19 nt, Artificial Sequence
  Description of Artificial Sequence: Synthetic oligonucleotide
cuccggcaaggaugcacgc

SEQ ID NO: 2560802 - RNA, 19 nt, Artificial Sequence
  Description of Artificial Sequence: Synthetic oligonucleotide
cauaucgggcaugcagauc

SEQ ID NO: 2560803 - RNA, 19 nt, Artificial Sequence
  Description of Artificial Sequence: Synthetic oligonucleotide
gcguuucccagcaugcccc

SEQ ID NO: 2560804 - RNA, 19 nt, Artificial Sequence
  Description of Artificial Sequence: Synthetic oligonucleotide
ggccaggauucguaaacca

SEQ ID NO: 2560805 - RNA, 19 nt, Artificial Sequence
  Description of Artificial Sequence: Synthetic oligonucleotide
acgcaacccuuguacuuau

SEQ ID NO: 2560806 - RNA, 19 nt, Artificial Sequence
  Description of Artificial Sequence: Synthetic oligonucleotide
uggugacgaugcacacgca

SEQ ID NO: 2560807 - RNA, 19 nt, Artificial Sequence
  Description of Artificial Sequence: Synthetic oligonucleotide
gccaggauucguaaaccac

SEQ ID NO: 2560808 - RNA, 19 nt, Artificial Sequence
  Description of Artificial Sequence: Synthetic oligonucleotide
ggaaggccaggauucguaa

SEQ ID NO: 2560809 - RNA, 19 nt, Artificial Sequence
  Description of Artificial Sequence: Synthetic oligonucleotide
agauagcacggcagguccu

SEQ ID NO: 2560810 - RNA, 19 nt, Artificial Sequence
  Description of Artificial Sequence: Synthetic oligonucleotide
aagcucgagcccggggcca

SEQ ID NO: 2560811 - RNA, 19 nt, Artificial Sequence
  Description of Artificial Sequence: Synthetic oligonucleotide
gggaccguagcgcuucauc

SEQ ID NO: 2560812 - RNA, 19 nt, Artificial Sequence
  Description of Artificial Sequence: Synthetic oligonucleotide
ccucugaaccuuccuccgg

SEQ ID NO: 2560813 - RNA, 19 nt, Artificial Sequence
  Description of Artificial Sequence: Synthetic oligonucleotide
ggcaucguccccauuuaca

SEQ ID NO: 2560814 - RNA, 19 nt, Artificial Sequence
  Description of Artificial Sequence: Synthetic oligonucleotide
uccucgggacugccccacc

SEQ ID NO: 2560815 - RNA, 19 nt, Artificial Sequence
  Description of Artificial Sequence: Synthetic oligonucleotide
acggcagguccuucucuau

SEQ ID NO: 2560816 - RNA, 19 nt, Artificial Sequence
  Description of Artificial Sequence: Synthetic oligonucleotide
ucgaugucccuggcugcga

SEQ ID NO: 2560817 - RNA, 19 nt, Artificial Sequence
  Description of Artificial Sequence: Synthetic oligonucleotide
gccaaucaucacgggaugc

SEQ ID NO: 2560818 - RNA, 19 nt, Artificial Sequence
  Description of Artificial Sequence: Synthetic oligonucleotide
ggcagaccgucaugagugc

SEQ ID NO: 2560819 - RNA, 19 nt, Artificial Sequence
  Description of Artificial Sequence: Synthetic oligonucleotide
gacuagcugaguguaguuu

SEQ ID NO: 2560820 - RNA, 19 nt, Artificial Sequence
  Description of Artificial Sequence: Synthetic oligonucleotide
ugugaccgucgaugucccu

SEQ ID NO: 2560821 - RNA, 19 nt, Artificial Sequence
  Description of Artificial Sequence: Synthetic oligonucleotide
guccccauuuacacagauc

SEQ ID NO: 2560822 - RNA, 19 nt, Artificial Sequence
  Description of Artificial Sequence: Synthetic oligonucleotide
cgucgguuuugccucauug

SEQ ID NO: 2560823 - RNA, 19 nt, Artificial Sequence
  Description of Artificial Sequence: Synthetic oligonucleotide
cagcgccaaucaucacggg

SEQ ID NO: 2560824 - RNA, 19 nt, Artificial Sequence
  Description of Artificial Sequence: Synthetic oligonucleotide
gagcccggggccacaggcc

SEQ ID NO: 2560825 - RNA, 19 nt, Artificial Sequence
  Description of Artificial Sequence: Synthetic oligonucleotide
cacacgcaacccuuguacu

SEQ ID NO: 2560826 - RNA, 19 nt, Artificial Sequence
  Description of Artificial Sequence: Synthetic oligonucleotide
gaguguaguuuacgucggu

SEQ ID NO: 2560827 - RNA, 19 nt, Artificial Sequence
  Description of Artificial Sequence: Synthetic oligonucleotide
ccguagcgcuucaucacgc

SEQ ID NO: 2560828 - RNA, 19 nt, Artificial Sequence
  Description of Artificial Sequence: Synthetic oligonucleotide
uggcugcgaauucgugcau

SEQ ID NO: 2560829 - RNA, 19 nt, Artificial Sequence
  Description of Artificial Sequence: Synthetic oligonucleotide
cacgcaacccuuguacuua

SEQ ID NO: 2560830 - RNA, 19 nt, Artificial Sequence
  Description of Artificial Sequence: Synthetic oligonucleotide
aggaugcacgccagguccu

SEQ ID NO: 2560831 - RNA, 19 nt, Artificial Sequence
  Description of Artificial Sequence: Synthetic oligonucleotide
caggcagaccgucaugagu

SEQ ID NO: 2560832 - RNA, 19 nt, Artificial Sequence
  Description of Artificial Sequence: Synthetic oligonucleotide
cacggcagguccuucucua

SEQ ID NO: 2560833 - RNA, 19 nt, Artificial Sequence
  Description of Artificial Sequence: Synthetic oligonucleotide
gagugccgggguggaaggc

SEQ ID NO: 2560834 - RNA, 19 nt, Artificial Sequence
  Description of Artificial Sequence: Synthetic oligonucleotide
ccggcaaggaugcacgcca

SEQ ID NO: 2560835 - RNA, 19 nt, Artificial Sequence
  Description of Artificial Sequence: Synthetic oligonucleotide
gcagaccgucaugagugcc

SEQ ID NO: 2560836 - RNA, 19 nt, Artificial Sequence
  Description of Artificial Sequence: Synthetic oligonucleotide
cugguuccugcuucccgaa

SEQ ID NO: 2560837 - RNA, 19 nt, Artificial Sequence
  Description of Artificial Sequence: Synthetic oligonucleotide
augggaccguagcgcuuca

SEQ ID NO: 2560838 - RNA, 19 nt, Artificial Sequence
  Description of Artificial Sequence: Synthetic oligonucleotide
gauagcacggcagguccuu

SEQ ID NO: 2560839 - RNA, 19 nt, Artificial Sequence
  Description of Artificial Sequence: Synthetic oligonucleotide
cucgagcccggggccacag

SEQ ID NO: 2560840 - RNA, 19 nt, Artificial Sequence
  Description of Artificial Sequence: Synthetic oligonucleotide
gccucauugcgaggccacg

SEQ ID NO: 2560841 - RNA, 19 nt, Artificial Sequence
  Description of Artificial Sequence: Synthetic oligonucleotide
ggcugguuuucaggcagac

SEQ ID NO: 2560842 - RNA, 19 nt, Artificial Sequence
  Description of Artificial Sequence: Synthetic oligonucleotide
ccgaacugguugcagggga

SEQ ID NO: 2560843 - RNA, 19 nt, Artificial Sequence
  Description of Artificial Sequence: Synthetic oligonucleotide
gaugucccuggcugcgaau

SEQ ID NO: 2560844 - RNA, 19 nt, Artificial Sequence
  Description of Artificial Sequence: Synthetic oligonucleotide
gcgcacagcgccaaucauc

SEQ ID NO: 2560845 - RNA, 19 nt, Artificial Sequence
  Description of Artificial Sequence: Synthetic oligonucleotide
cgagcccggggccacaggc

SEQ ID NO: 2560846 - RNA, 19 nt, Artificial Sequence
  Description of Artificial Sequence: Synthetic oligonucleotide
aggcugguuuucaggcaga

SEQ ID NO: 2560847 - RNA, 19 nt, Artificial Sequence
  Description of Artificial Sequence: Synthetic oligonucleotide
cguuggugacgaugcacac

SEQ ID NO: 2560848 - RNA, 19 nt, Artificial Sequence
  Description of Artificial Sequence: Synthetic oligonucleotide
gcuccaggggucacauggc

SEQ ID NO: 2560849 - RNA, 19 nt, Artificial Sequence
  Description of Artificial Sequence: Synthetic oligonucleotide
gcgcgcacagcgccaauca

SEQ ID NO: 2560850 - RNA, 19 nt, Artificial Sequence
  Description of Artificial Sequence: Synthetic oligonucleotide
guccucgggacugccccac

SEQ ID NO: 2560851 - RNA, 19 nt, Artificial Sequence
  Description of Artificial Sequence: Synthetic oligonucleotide
cgucgaugucccuggcugc

SEQ ID NO: 2560852 - RNA, 19 nt, Artificial Sequence
  Description of Artificial Sequence: Synthetic oligonucleotide
cugcgaauucgugcaugga

SEQ ID NO: 2560853 - RNA, 19 nt, Artificial Sequence
  Description of Artificial Sequence: Synthetic oligonucleotide
gggaaggccaggauucgua

SEQ ID NO: 2560854 - RNA, 19 nt, Artificial Sequence
  Description of Artificial Sequence: Synthetic oligonucleotide
acgucgguuuugccucauu

SEQ ID NO: 2560855 - RNA, 19 nt, Artificial Sequence
  Description of Artificial Sequence: Synthetic oligonucleotide
cucauugcgaggccacguu

SEQ ID NO: 2560856 - RNA, 19 nt, Artificial Sequence
  Description of Artificial Sequence: Synthetic oligonucleotide
gugccgggguggaaggcuc

SEQ ID NO: 2560857 - RNA, 19 nt, Artificial Sequence
  Description of Artificial Sequence: Synthetic oligonucleotide
gcaggggaaggccaggauu

SEQ ID NO: 2560858 - RNA, 19 nt, Artificial Sequence
  Description of Artificial Sequence: Synthetic oligonucleotide
gcauaucgggcaugcagau

SEQ ID NO: 2560859 - RNA, 19 nt, Artificial Sequence
  Description of Artificial Sequence: Synthetic oligonucleotide
cgguuuugccucauugcga

SEQ ID NO: 2560860 - RNA, 19 nt, Artificial Sequence
  Description of Artificial Sequence: Synthetic oligonucleotide
cgggcaugcagaucgacua

SEQ ID NO: 2560861 - RNA, 19 nt, Artificial Sequence
  Description of Artificial Sequence: Synthetic oligonucleotide
ugggaccguagcgcuucau

SEQ ID NO: 2560862 - RNA, 19 nt, Artificial Sequence
  Description of Artificial Sequence: Synthetic oligonucleotide
cgccaaucaucacgggaug

SEQ ID NO: 2560863 - RNA, 19 nt, Artificial Sequence
  Description of Artificial Sequence: Synthetic oligonucleotide
ccuugauuucuugauuagu

SEQ ID NO: 2560864 - RNA, 19 nt, Artificial Sequence
  Description of Artificial Sequence: Synthetic oligonucleotide
gguccucgggacugcccca

SEQ ID NO: 2560865 - RNA, 19 nt, Artificial Sequence
  Description of Artificial Sequence: Synthetic oligonucleotide
gcaugcagaucgacuagcu

SEQ ID NO: 2560866 - RNA, 19 nt, Artificial Sequence
  Description of Artificial Sequence: Synthetic oligonucleotide
gcacgccagguccucggga

SEQ ID NO: 2560867 - RNA, 19 nt, Artificial Sequence
  Description of Artificial Sequence: Synthetic oligonucleotide
ggaugcacgccagguccuc

SEQ ID NO: 2560868 - RNA, 19 nt, Artificial Sequence
  Description of Artificial Sequence: Synthetic oligonucleotide
uuccuccggcaaggaugca

SEQ ID NO: 2560869 - RNA, 19 nt, Artificial Sequence
  Description of Artificial Sequence: Synthetic oligonucleotide
gcgaggccacguuggugac

SEQ ID NO: 2560870 - RNA, 19 nt, Artificial Sequence
  Description of Artificial Sequence: Synthetic oligonucleotide
gcuucccgaacugguugca

SEQ ID NO: 2560871 - RNA, 19 nt, Artificial Sequence
  Description of Artificial Sequence: Synthetic oligonucleotide
cgugcauggagcgcgcaca

SEQ ID NO: 2560872 - RNA, 19 nt, Artificial Sequence
  Description of Artificial Sequence: Synthetic oligonucleotide
cguagcgcuucaucacgca

SEQ ID NO: 2560873 - RNA, 19 nt, Artificial Sequence
  Description of Artificial Sequence: Synthetic oligonucleotide
gcagccaggugaagcucga

SEQ ID NO: 2560874 - RNA, 19 nt, Artificial Sequence
  Description of Artificial Sequence: Synthetic oligonucleotide
cggcagguccuucucuauc

SEQ ID NO: 2560875 - RNA, 19 nt, Artificial Sequence
  Description of Artificial Sequence: Synthetic oligonucleotide
cgggacugccccaccagca

SEQ ID NO: 2560876 - RNA, 19 nt, Artificial Sequence
  Description of Artificial Sequence: Synthetic oligonucleotide
ggagcgcgcacagcgccaa

SEQ ID NO: 2560877 - RNA, 19 nt, Artificial Sequence
  Description of Artificial Sequence: Synthetic oligonucleotide
gcacggcagguccuucucu

SEQ ID NO: 2560878 - RNA, 19 nt, Artificial Sequence
  Description of Artificial Sequence: Synthetic oligonucleotide
gcccuugggcuggacuuuc

SEQ ID NO: 2560879 - RNA, 19 nt, Artificial Sequence
  Description of Artificial Sequence: Synthetic oligonucleotide
ccacguuggugacgaugca

SEQ ID NO: 2560880 - RNA, 19 nt, Artificial Sequence
  Description of Artificial Sequence: Synthetic oligonucleotide
cgcaacccuuguacuuauc

SEQ ID NO: 2560881 - RNA, 19 nt, Artificial Sequence
  Description of Artificial Sequence: Synthetic oligonucleotide
ggcuggacuuucauccauu

SEQ ID NO: 2560882 - RNA, 19 nt, Artificial Sequence
  Description of Artificial Sequence: Synthetic oligonucleotide
cccuugggcuggacuuuca

SEQ ID NO: 2560883 - RNA, 19 nt, Artificial Sequence
  Description of Artificial Sequence: Synthetic oligonucleotide
ccucauugcgaggccacgu

SEQ ID NO: 2560884 - RNA, 19 nt, Artificial Sequence
  Description of Artificial Sequence: Synthetic oligonucleotide
gccgggguggaaggcucca

SEQ ID NO: 2560885 - RNA, 19 nt, Artificial Sequence
  Description of Artificial Sequence: Synthetic oligonucleotide
ccgucaugagugccggggu

SEQ ID NO: 2560886 - RNA, 19 nt, Artificial Sequence
  Description of Artificial Sequence: Synthetic oligonucleotide
ccuugggcuggacuuucau

SEQ ID NO: 2560887 - RNA, 19 nt, Artificial Sequence
  Description of Artificial Sequence: Synthetic oligonucleotide
cgaugucccuggcugcgaa

SEQ ID NO: 2560888 - RNA, 19 nt, Artificial Sequence
  Description of Artificial Sequence: Synthetic oligonucleotide
gcagaucgacuagcugagu

SEQ ID NO: 2560889 - RNA, 19 nt, Artificial Sequence
  Description of Artificial Sequence: Synthetic oligonucleotide
gcuucaucacgcagccauu

SEQ ID NO: 2560890 - RNA, 19 nt, Artificial Sequence
  Description of Artificial Sequence: Synthetic oligonucleotide
gagcgcgcacagcgccaau

SEQ ID NO: 2560891 - RNA, 19 nt, Artificial Sequence
  Description of Artificial Sequence: Synthetic oligonucleotide
ccccauuuacacagaucuu

SEQ ID NO: 2560892 - RNA, 19 nt, Artificial Sequence
  Description of Artificial Sequence: Synthetic oligonucleotide
gcgcuucaucacgcagcca

SEQ ID NO: 2560893 - RNA, 19 nt, Artificial Sequence
  Description of Artificial Sequence: Synthetic oligonucleotide
cguccccauuuacacagau

SEQ ID NO: 2560894 - RNA, 19 nt, Artificial Sequence
  Description of Artificial Sequence: Synthetic oligonucleotide
gcucgagcccggggccaca

SEQ ID NO: 2560895 - RNA, 19 nt, Artificial Sequence
  Description of Artificial Sequence: Synthetic oligonucleotide
ccaugggaccguagcgcuu

SEQ ID NO: 2560896 - RNA, 19 nt, Artificial Sequence
  Description of Artificial Sequence: Synthetic oligonucleotide
agaaaugucacguuuaggg

SEQ ID NO: 2560897 - RNA, 19 nt, Artificial Sequence
  Description of Artificial Sequence: Synthetic oligonucleotide
ucaacauucccgaagaagc

SEQ ID NO: 2560898 - RNA, 19 nt, Artificial Sequence
  Description of Artificial Sequence: Synthetic oligonucleotide
aaaugucacguuuaggguc

SEQ ID NO: 2560899 - RNA, 19 nt, Artificial Sequence
  Description of Artificial Sequence: Synthetic oligonucleotide
uucacaaggggccacaggg

SEQ ID NO: 2560900 - RNA, 19 nt, Artificial Sequence
  Description of Artificial Sequence: Synthetic oligonucleotide
aacucauuuucacaagggg

SEQ ID NO: 2560901 - RNA, 19 nt, Artificial Sequence
  Description of Artificial Sequence: Synthetic oligonucleotide
ugacaaagaagaaauguca

SEQ ID NO: 2560902 - RNA, 19 nt, Artificial Sequence
  Description of Artificial Sequence: Synthetic oligonucleotide
ucuagaaagacgcugcugu

SEQ ID NO: 2560903 - RNA, 19 nt, Artificial Sequence
  Description of Artificial Sequence: Synthetic oligonucleotide
uuuagggucagcuuucugc

SEQ ID NO: 2560904 - RNA, 19 nt, Artificial Sequence
  Description of Artificial Sequence: Synthetic oligonucleotide
cucauuuucacaaggggcc

SEQ ID NO: 2560905 - RNA, 19 nt, Artificial Sequence
  Description of Artificial Sequence: Synthetic oligonucleotide
uuugacaaagaagaaaugu

SEQ ID NO: 2560906 - RNA, 19 nt, Artificial Sequence
  Description of Artificial Sequence: Synthetic oligonucleotide
accuuugucauacuugaac

SEQ ID NO: 2560907 - RNA, 19 nt, Artificial Sequence
  Description of Artificial Sequence: Synthetic oligonucleotide
uggucuuuugugaugaagc

SEQ ID NO: 2560908 - RNA, 19 nt, Artificial Sequence
  Description of Artificial Sequence: Synthetic oligonucleotide
uggaaggacaagaugaaga

SEQ ID NO: 2560909 - RNA, 19 nt, Artificial Sequence
  Description of Artificial Sequence: Synthetic oligonucleotide
uggcugaagaguaacggcg

SEQ ID NO: 2560910 - RNA, 19 nt, Artificial Sequence
  Description of Artificial Sequence: Synthetic oligonucleotide
aaggugaccuuugucauac

SEQ ID NO: 2560911 - RNA, 19 nt, Artificial Sequence
  Description of Artificial Sequence: Synthetic oligonucleotide
caauucugccuuuacaagg

SEQ ID NO: 2560912 - RNA, 19 nt, Artificial Sequence
  Description of Artificial Sequence: Synthetic oligonucleotide
ucaucuagaaagacgcugc

SEQ ID NO: 2560913 - RNA, 19 nt, Artificial Sequence
  Description of Artificial Sequence: Synthetic oligonucleotide
cauaagcucaacauucccg

SEQ ID NO: 2560914 - RNA, 19 nt, Artificial Sequence
  Description of Artificial Sequence: Synthetic oligonucleotide
aauucucgccugcucaugg

SEQ ID NO: 2560915 - RNA, 19 nt, Artificial Sequence
  Description of Artificial Sequence: Synthetic oligonucleotide
uugacaaagaagaaauguc

SEQ ID NO: 2560916 - RNA, 19 nt, Artificial Sequence
  Description of Artificial Sequence: Synthetic oligonucleotide
acucauuuucacaaggggc

SEQ ID NO: 2560917 - RNA, 19 nt, Artificial Sequence
  Description of Artificial Sequence: Synthetic oligonucleotide
ugcaaacucauuuucacaa

SEQ ID NO: 2560918 - RNA, 19 nt, Artificial Sequence
  Description of Artificial Sequence: Synthetic oligonucleotide
uugugaugaagccagacau

SEQ ID NO: 2560919 - RNA, 19 nt, Artificial Sequence
  Description of Artificial Sequence: Synthetic oligonucleotide
uuugugaugaagccagaca

SEQ ID NO: 2560920 - RNA, 19 nt, Artificial Sequence
  Description of Artificial Sequence: Synthetic oligonucleotide
agacaugcugucuuggcgg

SEQ ID NO: 2560921 - RNA, 19 nt, Artificial Sequence
  Description of Artificial Sequence: Synthetic oligonucleotide
aaacucauuuucacaaggg

SEQ ID NO: 2560922 - RNA, 19 nt, Artificial Sequence
  Description of Artificial Sequence: Synthetic oligonucleotide
aaucuucagucuuugcuga

SEQ ID NO: 2560923 - RNA, 19 nt, Artificial Sequence
  Description of Artificial Sequence: Synthetic oligonucleotide
auaagcucaacauucccga

SEQ ID NO: 2560924 - RNA, 19 nt, Artificial Sequence
  Description of Artificial Sequence: Synthetic oligonucleotide
ugaccuuugucauacuuga

SEQ ID NO: 2560925 - RNA, 19 nt, Artificial Sequence
  Description of Artificial Sequence: Synthetic oligonucleotide
aagcucaacauucccgaag

SEQ ID NO: 2560926 - RNA, 19 nt, Artificial Sequence
  Description of Artificial Sequence: Synthetic oligonucleotide
uuuugacaaagaagaaaug

SEQ ID NO: 2560927 - RNA, 19 nt, Artificial Sequence
  Description of Artificial Sequence: Synthetic oligonucleotide
caaucuucagucuuugcug

SEQ ID NO: 2560928 - RNA, 19 nt, Artificial Sequence
  Description of Artificial Sequence: Synthetic oligonucleotide
uggcagaacuuucaucagg

SEQ ID NO: 2560929 - RNA, 19 nt, Artificial Sequence
  Description of Artificial Sequence: Synthetic oligonucleotide
cugcauaagcucaacauuc

SEQ ID NO: 2560930 - RNA, 19 nt, Artificial Sequence
  Description of Artificial Sequence: Synthetic oligonucleotide
uuagggucagcuuucugca

SEQ ID NO: 2560931 - RNA, 19 nt, Artificial Sequence
  Description of Artificial Sequence: Synthetic oligonucleotide
uuggaagugcguuugucug

SEQ ID NO: 2560932 - RNA, 19 nt, Artificial Sequence
  Description of Artificial Sequence: Synthetic oligonucleotide
ucugccuuuacaaggugac

SEQ ID NO: 2560933 - RNA, 19 nt, Artificial Sequence
  Description of Artificial Sequence: Synthetic oligonucleotide
uggcagauccugcauaagc

SEQ ID NO: 2560934 - RNA, 19 nt, Artificial Sequence
  Description of Artificial Sequence: Synthetic oligonucleotide
aagaguaacggcgggcccg

SEQ ID NO: 2560935 - RNA, 19 nt, Artificial Sequence
  Description of Artificial Sequence: Synthetic oligonucleotide
uuuacaaggugaccuuugu

SEQ ID NO: 2560936 - RNA, 19 nt, Artificial Sequence
  Description of Artificial Sequence: Synthetic oligonucleotide
ugugaugaagccagacaug

SEQ ID NO: 2560937 - RNA, 19 nt, Artificial Sequence
  Description of Artificial Sequence: Synthetic oligonucleotide
aauguccucggcaggggcc

SEQ ID NO: 2560938 - RNA, 19 nt, Artificial Sequence
  Description of Artificial Sequence: Synthetic oligonucleotide
gacaaagaagaaaugucac

SEQ ID NO: 2560939 - RNA, 19 nt, Artificial Sequence
  Description of Artificial Sequence: Synthetic oligonucleotide
guaacggcgggcccgaagg

SEQ ID NO: 2560940 - RNA, 19 nt, Artificial Sequence
  Description of Artificial Sequence: Synthetic oligonucleotide
aaagaagaaaugucacguu

SEQ ID NO: 2560941 - RNA, 19 nt, Artificial Sequence
  Description of Artificial Sequence: Synthetic oligonucleotide
aauucugccuuuacaaggu

SEQ ID NO: 2560942 - RNA, 19 nt, Artificial Sequence
  Description of Artificial Sequence: Synthetic oligonucleotide
ugaagaguaacggcgggcc

SEQ ID NO: 2560943 - RNA, 19 nt, Artificial Sequence
  Description of Artificial Sequence: Synthetic oligonucleotide
ggaaggacaagaugaagag

SEQ ID NO: 2560944 - RNA, 19 nt, Artificial Sequence
  Description of Artificial Sequence: Synthetic oligonucleotide
caacauucccgaagaagcg

SEQ ID NO: 2560945 - RNA, 19 nt, Artificial Sequence
  Description of Artificial Sequence: Synthetic oligonucleotide
gaaggacaagaugaagagg

SEQ ID NO: 2560946 - RNA, 19 nt, Artificial Sequence
  Description of Artificial Sequence: Synthetic oligonucleotide
aaagacgcugcuguccauc

SEQ ID NO: 2560947 - RNA, 19 nt, Artificial Sequence
  Description of Artificial Sequence: Synthetic oligonucleotide
uuugcugaggguuccucgc

SEQ ID NO: 2560948 - RNA, 19 nt, Artificial Sequence
  Description of Artificial Sequence: Synthetic oligonucleotide
ugcuccucaugagugagcg

SEQ ID NO: 2560949 - RNA, 19 nt, Artificial Sequence
  Description of Artificial Sequence: Synthetic oligonucleotide
aaugucacguuuaggguca

SEQ ID NO: 2560950 - RNA, 19 nt, Artificial Sequence
  Description of Artificial Sequence: Synthetic oligonucleotide
cugaggaucgcacuccacc

SEQ ID NO: 2560951 - RNA, 19 nt, Artificial Sequence
  Description of Artificial Sequence: Synthetic oligonucleotide
aucaucuagaaagacgcug

SEQ ID NO: 2560952 - RNA, 19 nt, Artificial Sequence
  Description of Artificial Sequence: Synthetic oligonucleotide
acaggggccacuuuugaca

SEQ ID NO: 2560953 - RNA, 19 nt, Artificial Sequence
  Description of Artificial Sequence: Synthetic oligonucleotide
uccugcauaagcucaacau

SEQ ID NO: 2560954 - RNA, 19 nt, Artificial Sequence
  Description of Artificial Sequence: Synthetic oligonucleotide
agugcguuugucugugguc

SEQ ID NO: 2560955 - RNA, 19 nt, Artificial Sequence
  Description of Artificial Sequence: Synthetic oligonucleotide
ccacuuuugacaaagaaga

SEQ ID NO: 2560956 - RNA, 19 nt, Artificial Sequence
  Description of Artificial Sequence: Synthetic oligonucleotide
ugccuuuacaaggugaccu

SEQ ID NO: 2560957 - RNA, 19 nt, Artificial Sequence
  Description of Artificial Sequence: Synthetic oligonucleotide
ucacaaggggccacagggg

SEQ ID NO: 2560958 - RNA, 19 nt, Artificial Sequence
  Description of Artificial Sequence: Synthetic oligonucleotide
cuuugcugaggguuccucg

SEQ ID NO: 2560959 - RNA, 19 nt, Artificial Sequence
  Description of Artificial Sequence: Synthetic oligonucleotide
agaaagacgcugcugucca

SEQ ID NO: 2560960 - RNA, 19 nt, Artificial Sequence
  Description of Artificial Sequence: Synthetic oligonucleotide
cuccucaugagugagcgcc

SEQ ID NO: 2560961 - RNA, 19 nt, Artificial Sequence
  Description of Artificial Sequence: Synthetic oligonucleotide
ucuucagucuuugcugagg

SEQ ID NO: 2560962 - RNA, 19 nt, Artificial Sequence
  Description of Artificial Sequence: Synthetic oligonucleotide
uccaucugaagcacaggug

SEQ ID NO: 2560963 - RNA, 19 nt, Artificial Sequence
  Description of Artificial Sequence: Synthetic oligonucleotide
aaccgcgcggcucucggcg

SEQ ID NO: 2560964 - RNA, 19 nt, Artificial Sequence
  Description of Artificial Sequence: Synthetic oligonucleotide
gaggguuccucgcucacag

SEQ ID NO: 2560965 - RNA, 19 nt, Artificial Sequence
  Description of Artificial Sequence: Synthetic oligonucleotide
uuuucggaauucucgccug

SEQ ID NO: 2560966 - RNA, 19 nt, Artificial Sequence
  Description of Artificial Sequence: Synthetic oligonucleotide
agucuuagcacuguccucu

SEQ ID NO: 2560967 - RNA, 19 nt, Artificial Sequence
  Description of Artificial Sequence: Synthetic oligonucleotide
cucuuuggcccugaaaugc

SEQ ID NO: 2560968 - RNA, 19 nt, Artificial Sequence
  Description of Artificial Sequence: Synthetic oligonucleotide
uucugccuuuacaagguga

SEQ ID NO: 2560969 - RNA, 19 nt, Artificial Sequence
  Description of Artificial Sequence: Synthetic oligonucleotide
uagaaagacgcugcugucc

SEQ ID NO: 2560970 - RNA, 19 nt, Artificial Sequence
  Description of Artificial Sequence: Synthetic oligonucleotide
cucaacauucccgaagaag

SEQ ID NO: 2560971 - RNA, 19 nt, Artificial Sequence
  Description of Artificial Sequence: Synthetic oligonucleotide
gaaggcgugcugaggaucg

SEQ ID NO: 2560972 - RNA, 19 nt, Artificial Sequence
  Description of Artificial Sequence: Synthetic oligonucleotide
uuugucauacuugaacuuu

SEQ ID NO: 2560973 - RNA, 19 nt, Artificial Sequence
  Description of Artificial Sequence: Synthetic oligonucleotide
cuuuacaaggugaccuuug

SEQ ID NO: 2560974 - RNA, 19 nt, Artificial Sequence
  Description of Artificial Sequence: Synthetic oligonucleotide
ugcucauggaaggacaaga

SEQ ID NO: 2560975 - RNA, 19 nt, Artificial Sequence
  Description of Artificial Sequence: Synthetic oligonucleotide
cuggcugaagaguaacggc

SEQ ID NO: 2560976 - RNA, 19 nt, Artificial Sequence
  Description of Artificial Sequence: Synthetic oligonucleotide
aagugcguuugucuguggu

SEQ ID NO: 2560977 - RNA, 19 nt, Artificial Sequence
  Description of Artificial Sequence: Synthetic oligonucleotide
agcagucuuagcacugucc

SEQ ID NO: 2560978 - RNA, 19 nt, Artificial Sequence
  Description of Artificial Sequence: Synthetic oligonucleotide
ucuguggucuuuugugaug

SEQ ID NO: 2560979 - RNA, 19 nt, Artificial Sequence
  Description of Artificial Sequence: Synthetic oligonucleotide
ucuuuggcccugaaaugca

SEQ ID NO: 2560980 - RNA, 19 nt, Artificial Sequence
  Description of Artificial Sequence: Synthetic oligonucleotide
ugaggaucgcacuccaccu

SEQ ID NO: 2560981 - RNA, 19 nt, Artificial Sequence
  Description of Artificial Sequence: Synthetic oligonucleotide
agaagcgacucacaggcau

SEQ ID NO: 2560982 - RNA, 19 nt, Artificial Sequence
  Description of Artificial Sequence: Synthetic oligonucleotide
aacauucccgaagaagcga

SEQ ID NO: 2560983 - RNA, 19 nt, Artificial Sequence
  Description of Artificial Sequence: Synthetic oligonucleotide
ccaucugaagcacaggugc

SEQ ID NO: 2560984 - RNA, 19 nt, Artificial Sequence
  Description of Artificial Sequence: Synthetic oligonucleotide
uuuugugaugaagccagac

SEQ ID NO: 2560985 - RNA, 19 nt, Artificial Sequence
  Description of Artificial Sequence: Synthetic oligonucleotide
cucauggaaggacaagaug

SEQ ID NO: 2560986 - RNA, 19 nt, Artificial Sequence
  Description of Artificial Sequence: Synthetic oligonucleotide
ugggcaggcaaucuucagu

SEQ ID NO: 2560987 - RNA, 19 nt, Artificial Sequence
  Description of Artificial Sequence: Synthetic oligonucleotide
cucgcucacagccugggag

SEQ ID NO: 2560988 - RNA, 19 nt, Artificial Sequence
  Description of Artificial Sequence: Synthetic oligonucleotide
cucgccugcucauggaagg

SEQ ID NO: 2560989 - RNA, 19 nt, Artificial Sequence
  Description of Artificial Sequence: Synthetic oligonucleotide
uccgcagagucccaaccgc

SEQ ID NO: 2560990 - RNA, 19 nt, Artificial Sequence
  Description of Artificial Sequence: Synthetic oligonucleotide
uuacaaggugaccuuuguc

SEQ ID NO: 2560991 - RNA, 19 nt, Artificial Sequence
  Description of Artificial Sequence: Synthetic oligonucleotide
ucagucuuugcugaggguu

SEQ ID NO: 2560992 - RNA, 19 nt, Artificial Sequence
  Description of Artificial Sequence: Synthetic oligonucleotide
ucucgccugcucauggaag

SEQ ID NO: 2560993 - RNA, 19 nt, Artificial Sequence
  Description of Artificial Sequence: Synthetic oligonucleotide
acauucccgaagaagcgac

SEQ ID NO: 2560994 - RNA, 19 nt, Artificial Sequence
  Description of Artificial Sequence: Synthetic oligonucleotide
aagacgcugcuguccaucu

SEQ ID NO: 2560995 - RNA, 19 nt, Artificial Sequence
  Description of Artificial Sequence: Synthetic oligonucleotide
gaaaugucacguuuagggu

SEQ ID NO: 2560996 - RNA, 19 nt, Artificial Sequence
  Description of Artificial Sequence: Synthetic oligonucleotide
ugcuggguucugcuguggg

SEQ ID NO: 2560997 - RNA, 19 nt, Artificial Sequence
  Description of Artificial Sequence: Synthetic oligonucleotide
acaaggugaccuuugucau

SEQ ID NO: 2560998 - RNA, 19 nt, Artificial Sequence
  Description of Artificial Sequence: Synthetic oligonucleotide
aucgcacuccaccugugag

SEQ ID NO: 2560999 - RNA, 19 nt, Artificial Sequence
  Description of Artificial Sequence: Synthetic oligonucleotide
uuucggaauucucgccugc

SEQ ID NO: 2561000 - RNA, 19 nt, Artificial Sequence
  Description of Artificial Sequence: Synthetic oligonucleotide
ucugcugugggcaggcaau

SEQ ID NO: 2561001 - RNA, 19 nt, Artificial Sequence
  Description of Artificial Sequence: Synthetic oligonucleotide
uccucaugagugagcgccg

SEQ ID NO: 2561002 - RNA, 19 nt, Artificial Sequence
  Description of Artificial Sequence: Synthetic oligonucleotide
uugucauacuugaacuuuu

SEQ ID NO: 2561003 - RNA, 19 nt, Artificial Sequence
  Description of Artificial Sequence: Synthetic oligonucleotide
auucccgaagaagcgacuc

SEQ ID NO: 2561004 - RNA, 19 nt, Artificial Sequence
  Description of Artificial Sequence: Synthetic oligonucleotide
cacaaggggccacaggggc

SEQ ID NO: 2561005 - RNA, 19 nt, Artificial Sequence
  Description of Artificial Sequence: Synthetic oligonucleotide
aagccagacaugcugucuu

SEQ ID NO: 2561006 - RNA, 19 nt, Artificial Sequence
  Description of Artificial Sequence: Synthetic oligonucleotide
ugucuuggcggauguggag

SEQ ID NO: 2561007 - RNA, 19 nt, Artificial Sequence
  Description of Artificial Sequence: Synthetic oligonucleotide
ucaugagugagcgccgccc

SEQ ID NO: 2561008 - RNA, 19 nt, Artificial Sequence
  Description of Artificial Sequence: Synthetic oligonucleotide
uuggcggauguggagcugg

SEQ ID NO: 2561009 - RNA, 19 nt, Artificial Sequence
  Description of Artificial Sequence: Synthetic oligonucleotide
caaagaagaaaugucacgu

SEQ ID NO: 2561010 - RNA, 19 nt, Artificial Sequence
  Description of Artificial Sequence: Synthetic oligonucleotide
gugaccuuugucauacuug

SEQ ID NO: 2561011 - RNA, 19 nt, Artificial Sequence
  Description of Artificial Sequence: Synthetic oligonucleotide
gaagaguaacggcgggccc

SEQ ID NO: 2561012 - RNA, 19 nt, Artificial Sequence
  Description of Artificial Sequence: Synthetic oligonucleotide
ucauuuucacaaggggcca

SEQ ID NO: 2561013 - RNA, 19 nt, Artificial Sequence
  Description of Artificial Sequence: Synthetic oligonucleotide
gcaauucugccuuuacaag

SEQ ID NO: 2561014 - RNA, 19 nt, Artificial Sequence
  Description of Artificial Sequence: Synthetic oligonucleotide
cuuagcacuguccucugca

SEQ ID NO: 2561015 - RNA, 19 nt, Artificial Sequence
  Description of Artificial Sequence: Synthetic oligonucleotide
ucgcacuccaccugugagc

SEQ ID NO: 2561016 - RNA, 19 nt, Artificial Sequence
  Description of Artificial Sequence: Synthetic oligonucleotide
caugagugagcgccgcccg

SEQ ID NO: 2561017 - RNA, 19 nt, Artificial Sequence
  Description of Artificial Sequence: Synthetic oligonucleotide
ucgcucacagccugggagc

SEQ ID NO: 2561018 - RNA, 19 nt, Artificial Sequence
  Description of Artificial Sequence: Synthetic oligonucleotide
uggaagugcguuugucugu

SEQ ID NO: 2561019 - RNA, 19 nt, Artificial Sequence
  Description of Artificial Sequence: Synthetic oligonucleotide
ucuuagcacuguccucugc

SEQ ID NO: 2561020 - RNA, 19 nt, Artificial Sequence
  Description of Artificial Sequence: Synthetic oligonucleotide
aacggcgggcccgaaggcg

SEQ ID NO: 2561021 - RNA, 19 nt, Artificial Sequence
  Description of Artificial Sequence: Synthetic oligonucleotide
ucuuggcggauguggagcu

SEQ ID NO: 2561022 - RNA, 19 nt, Artificial Sequence
  Description of Artificial Sequence: Synthetic oligonucleotide
ggcagaacuuucaucaggc

SEQ ID NO: 2561023 - RNA, 19 nt, Artificial Sequence
  Description of Artificial Sequence: Synthetic oligonucleotide
ccaccugugagcuuccugc

SEQ ID NO: 2561024 - RNA, 19 nt, Artificial Sequence
  Description of Artificial Sequence: Synthetic oligonucleotide
ugagugagcgccgcccggg

SEQ ID NO: 2561025 - RNA, 19 nt, Artificial Sequence
  Description of Artificial Sequence: Synthetic oligonucleotide
auggaaggacaagaugaag

SEQ ID NO: 2561026 - RNA, 19 nt, Artificial Sequence
  Description of Artificial Sequence: Synthetic oligonucleotide
gcugccgcagcacugcugg

SEQ ID NO: 2561027 - RNA, 19 nt, Artificial Sequence
  Description of Artificial Sequence: Synthetic oligonucleotide
cuaacgcuccuccgcagag

SEQ ID NO: 2561028 - RNA, 19 nt, Artificial Sequence
  Description of Artificial Sequence: Synthetic oligonucleotide
cuccgcagagucccaaccg

SEQ ID NO: 2561029 - RNA, 19 nt, Artificial Sequence
  Description of Artificial Sequence: Synthetic oligonucleotide
aggaucgcacuccaccugu

SEQ ID NO: 2561030 - RNA, 19 nt, Artificial Sequence
  Description of Artificial Sequence: Synthetic oligonucleotide
cuagaaagacgcugcuguc

SEQ ID NO: 2561031 - RNA, 19 nt, Artificial Sequence
  Description of Artificial Sequence: Synthetic oligonucleotide
aguaacggcgggcccgaag

SEQ ID NO: 2561032 - RNA, 19 nt, Artificial Sequence
  Description of Artificial Sequence: Synthetic oligonucleotide
ugucuggcagaacuuucau

SEQ ID NO: 2561033 - RNA, 19 nt, Artificial Sequence
  Description of Artificial Sequence: Synthetic oligonucleotide
gacucacaggcaugggcug

SEQ ID NO: 2561034 - RNA, 19 nt, Artificial Sequence
  Description of Artificial Sequence: Synthetic oligonucleotide
agaagaaaugucacguuua

SEQ ID NO: 2561035 - RNA, 19 nt, Artificial Sequence
  Description of Artificial Sequence: Synthetic oligonucleotide
uccaccugugagcuuccug

SEQ ID NO: 2561036 - RNA, 19 nt, Artificial Sequence
  Description of Artificial Sequence: Synthetic oligonucleotide
gcuggcugaagaguaacgg

SEQ ID NO: 2561037 - RNA, 19 nt, Artificial Sequence
  Description of Artificial Sequence: Synthetic oligonucleotide
ggguuccucgcucacagcc

SEQ ID NO: 2561038 - RNA, 19 nt, Artificial Sequence
  Description of Artificial Sequence: Synthetic oligonucleotide
cagauccugcauaagcuca

SEQ ID NO: 2561039 - RNA, 19 nt, Artificial Sequence
  Description of Artificial Sequence: Synthetic oligonucleotide
gcaaacucauuuucacaag

SEQ ID NO: 2561040 - RNA, 19 nt, Artificial Sequence
  Description of Artificial Sequence: Synthetic oligonucleotide
gaggaucgcacuccaccug

SEQ ID NO: 2561041 - RNA, 19 nt, Artificial Sequence
  Description of Artificial Sequence: Synthetic oligonucleotide
uucucgccugcucauggaa

SEQ ID NO: 2561042 - RNA, 19 nt, Artificial Sequence
  Description of Artificial Sequence: Synthetic oligonucleotide
gaagugcguuugucugugg

SEQ ID NO: 2561043 - RNA, 19 nt, Artificial Sequence
  Description of Artificial Sequence: Synthetic oligonucleotide
cuggcagaacuuucaucag

SEQ ID NO: 2561044 - RNA, 19 nt, Artificial Sequence
  Description of Artificial Sequence: Synthetic oligonucleotide
cugaagaguaacggcgggc

SEQ ID NO: 2561045 - RNA, 19 nt, Artificial Sequence
  Description of Artificial Sequence: Synthetic oligonucleotide
cagucuuugcugaggguuc

SEQ ID NO: 2561046 - RNA, 19 nt, Artificial Sequence
  Description of Artificial Sequence: Synthetic oligonucleotide
agggucagcuuucugcaau

SEQ ID NO: 2561047 - RNA, 19 nt, Artificial Sequence
  Description of Artificial Sequence: Synthetic oligonucleotide
ugagcuuccugcuccucau

SEQ ID NO: 2561048 - RNA, 19 nt, Artificial Sequence
  Description of Artificial Sequence: Synthetic oligonucleotide
auccugcauaagcucaaca

SEQ ID NO: 2561049 - RNA, 19 nt, Artificial Sequence
  Description of Artificial Sequence: Synthetic oligonucleotide
ucccgaagaagcgacucac

SEQ ID NO: 2561050 - RNA, 19 nt, Artificial Sequence
  Description of Artificial Sequence: Synthetic oligonucleotide
gacagcagucuuagcacug

SEQ ID NO: 2561051 - RNA, 19 nt, Artificial Sequence
  Description of Artificial Sequence: Synthetic oligonucleotide
augagugagcgccgcccgg

SEQ ID NO: 2561052 - RNA, 19 nt, Artificial Sequence
  Description of Artificial Sequence: Synthetic oligonucleotide
cauggaaggacaagaugaa

SEQ ID NO: 2561053 - RNA, 19 nt, Artificial Sequence
  Description of Artificial Sequence: Synthetic oligonucleotide
acguuuagggucagcuuuc

SEQ ID NO: 2561054 - RNA, 19 nt, Artificial Sequence
  Description of Artificial Sequence: Synthetic oligonucleotide
caauguccucggcaggggc

SEQ ID NO: 2561055 - RNA, 19 nt, Artificial Sequence
  Description of Artificial Sequence: Synthetic oligonucleotide
gucuuggcggauguggagc

SEQ ID NO: 2561056 - RNA, 19 nt, Artificial Sequence
  Description of Artificial Sequence: Synthetic oligonucleotide
guuccucgcucacagccug

SEQ ID NO: 2561057 - RNA, 19 nt, Artificial Sequence
  Description of Artificial Sequence: Synthetic oligonucleotide
ucggaauucucgccugcuc

SEQ ID NO: 2561058 - RNA, 19 nt, Artificial Sequence
  Description of Artificial Sequence: Synthetic oligonucleotide
gcauaagcucaacauuccc

SEQ ID NO: 2561059 - RNA, 19 nt, Artificial Sequence
  Description of Artificial Sequence: Synthetic oligonucleotide
cagagucccaaccgcgcgg

SEQ ID NO: 2561060 - RNA, 19 nt, Artificial Sequence
  Description of Artificial Sequence: Synthetic oligonucleotide
cugcuguccaucugaagca

SEQ ID NO: 2561061 - RNA, 19 nt, Artificial Sequence
  Description of Artificial Sequence: Synthetic oligonucleotide
ccugugagcuuccugcucc

SEQ ID NO: 2561062 - RNA, 19 nt, Artificial Sequence
  Description of Artificial Sequence: Synthetic oligonucleotide
ggcaauguccucggcaggg

SEQ ID NO: 2561063 - RNA, 19 nt, Artificial Sequence
  Description of Artificial Sequence: Synthetic oligonucleotide
uucagucuuugcugagggu

SEQ ID NO: 2561064 - RNA, 19 nt, Artificial Sequence
  Description of Artificial Sequence: Synthetic oligonucleotide
uugcugaggguuccucgcu

SEQ ID NO: 2561065 - RNA, 19 nt, Artificial Sequence
  Description of Artificial Sequence: Synthetic oligonucleotide
aaggcgugcugaggaucgc

SEQ ID NO: 2561066 - RNA, 19 nt, Artificial Sequence
  Description of Artificial Sequence: Synthetic oligonucleotide
cuuucugcaauucugccuu

SEQ ID NO: 2561067 - RNA, 19 nt, Artificial Sequence
  Description of Artificial Sequence: Synthetic oligonucleotide
auuuucacaaggggccaca

SEQ ID NO: 2561068 - RNA, 19 nt, Artificial Sequence
  Description of Artificial Sequence: Synthetic oligonucleotide
gcugaagaguaacggcggg

SEQ ID NO: 2561069 - RNA, 19 nt, Artificial Sequence
  Description of Artificial Sequence: Synthetic oligonucleotide
uuccucgcucacagccugg

SEQ ID NO: 2561070 - RNA, 19 nt, Artificial Sequence
  Description of Artificial Sequence: Synthetic oligonucleotide
cacuccaccugugagcuuc

SEQ ID NO: 2561071 - RNA, 19 nt, Artificial Sequence
  Description of Artificial Sequence: Synthetic oligonucleotide
ugcugucaucaucuagaaa

SEQ ID NO: 2561072 - RNA, 19 nt, Artificial Sequence
  Description of Artificial Sequence: Synthetic oligonucleotide
gaauucucgccugcucaug

SEQ ID NO: 2561073 - RNA, 19 nt, Artificial Sequence
  Description of Artificial Sequence: Synthetic oligonucleotide
gggcaggcaaucuucaguc

SEQ ID NO: 2561074 - RNA, 19 nt, Artificial Sequence
  Description of Artificial Sequence: Synthetic oligonucleotide
gacaugcugucuuggcgga

SEQ ID NO: 2561075 - RNA, 19 nt, Artificial Sequence
  Description of Artificial Sequence: Synthetic oligonucleotide
cacaggggccacuuuugac

SEQ ID NO: 2561076 - RNA, 19 nt, Artificial Sequence
  Description of Artificial Sequence: Synthetic oligonucleotide
ggcugaagaguaacggcgg

SEQ ID NO: 2561077 - RNA, 19 nt, Artificial Sequence
  Description of Artificial Sequence: Synthetic oligonucleotide
ucacguuuagggucagcuu

SEQ ID NO: 2561078 - RNA, 19 nt, Artificial Sequence
  Description of Artificial Sequence: Synthetic oligonucleotide
guccaucugaagcacaggu

SEQ ID NO: 2561079 - RNA, 19 nt, Artificial Sequence
  Description of Artificial Sequence: Synthetic oligonucleotide
ccgaagaagcgacucacag

SEQ ID NO: 2561080 - RNA, 19 nt, Artificial Sequence
  Description of Artificial Sequence: Synthetic oligonucleotide
agcuggcugaagaguaacg

SEQ ID NO: 2561081 - RNA, 19 nt, Artificial Sequence
  Description of Artificial Sequence: Synthetic oligonucleotide
caugcugucuuggcggaug

SEQ ID NO: 2561082 - RNA, 19 nt, Artificial Sequence
  Description of Artificial Sequence: Synthetic oligonucleotide
guuuagggucagcuuucug

SEQ ID NO: 2561083 - RNA, 19 nt, Artificial Sequence
  Description of Artificial Sequence: Synthetic oligonucleotide
acaagaugaagaggcuggu

SEQ ID NO: 2561084 - RNA, 19 nt, Artificial Sequence
  Description of Artificial Sequence: Synthetic oligonucleotide
ugcugaggguuccucgcuc

SEQ ID NO: 2561085 - RNA, 19 nt, Artificial Sequence
  Description of Artificial Sequence: Synthetic oligonucleotide
agccagacaugcugucuug

SEQ ID NO: 2561086 - RNA, 19 nt, Artificial Sequence
  Description of Artificial Sequence: Synthetic oligonucleotide
gaucgcacuccaccuguga

SEQ ID NO: 2561087 - RNA, 19 nt, Artificial Sequence
  Description of Artificial Sequence: Synthetic oligonucleotide
cuguccugggcgcaggcuc

SEQ ID NO: 2561088 - RNA, 19 nt, Artificial Sequence
  Description of Artificial Sequence: Synthetic oligonucleotide
uaacggcgggcccgaaggc

SEQ ID NO: 2561089 - RNA, 19 nt, Artificial Sequence
  Description of Artificial Sequence: Synthetic oligonucleotide
cgaagaagcgacucacagg

SEQ ID NO: 2561090 - RNA, 19 nt, Artificial Sequence
  Description of Artificial Sequence: Synthetic oligonucleotide
uucggaauucucgccugcu

SEQ ID NO: 2561091 - RNA, 19 nt, Artificial Sequence
  Description of Artificial Sequence: Synthetic oligonucleotide
auucucgccugcucaugga

SEQ ID NO: 2561092 - RNA, 19 nt, Artificial Sequence
  Description of Artificial Sequence: Synthetic oligonucleotide
agucccaaccgcgcggcuc

SEQ ID NO: 2561093 - RNA, 19 nt, Artificial Sequence
  Description of Artificial Sequence: Synthetic oligonucleotide
agcuggcaauguccucggc

SEQ ID NO: 2561094 - RNA, 19 nt, Artificial Sequence
  Description of Artificial Sequence: Synthetic oligonucleotide
gcagagucccaaccgcgcg

SEQ ID NO: 2561095 - RNA, 19 nt, Artificial Sequence
  Description of Artificial Sequence: Synthetic oligonucleotide
cauuuucacaaggggccac

SEQ ID NO: 2561096 - RNA, 19 nt, Artificial Sequence
  Description of Artificial Sequence: Synthetic oligonucleotide
cucaugagugagcgccgcc

SEQ ID NO: 2561097 - RNA, 19 nt, Artificial Sequence
  Description of Artificial Sequence: Synthetic oligonucleotide
cacuuuugacaaagaagaa

SEQ ID NO: 2561098 - RNA, 19 nt, Artificial Sequence
  Description of Artificial Sequence: Synthetic oligonucleotide
uggggaggcucuucccucu

SEQ ID NO: 2561099 - RNA, 19 nt, Artificial Sequence
  Description of Artificial Sequence: Synthetic oligonucleotide
gcgacucacaggcaugggc

SEQ ID NO: 2561100 - RNA, 19 nt, Artificial Sequence
  Description of Artificial Sequence: Synthetic oligonucleotide
cagucuuagcacuguccuc

SEQ ID NO: 2561101 - RNA, 19 nt, Artificial Sequence
  Description of Artificial Sequence: Synthetic oligonucleotide
ggaagugcguuugucugug

SEQ ID NO: 2561102 - RNA, 19 nt, Artificial Sequence
  Description of Artificial Sequence: Synthetic oligonucleotide
gucacguuuagggucagcu

SEQ ID NO: 2561103 - RNA, 19 nt, Artificial Sequence
  Description of Artificial Sequence: Synthetic oligonucleotide
acagcagucuuagcacugu

SEQ ID NO: 2561104 - RNA, 19 nt, Artificial Sequence
  Description of Artificial Sequence: Synthetic oligonucleotide
ugggcugccgcagcacugc

SEQ ID NO: 2561105 - RNA, 19 nt, Artificial Sequence
  Description of Artificial Sequence: Synthetic oligonucleotide
aggcaaucuucagucuuug

SEQ ID NO: 2561106 - RNA, 19 nt, Artificial Sequence
  Description of Artificial Sequence: Synthetic oligonucleotide
cugccuuuacaaggugacc

SEQ ID NO: 2561107 - RNA, 19 nt, Artificial Sequence
  Description of Artificial Sequence: Synthetic oligonucleotide
cugucuuggcggaugugga

SEQ ID NO: 2561108 - RNA, 19 nt, Artificial Sequence
  Description of Artificial Sequence: Synthetic oligonucleotide
accgcgcggcucucggcgc

SEQ ID NO: 2561109 - RNA, 19 nt, Artificial Sequence
  Description of Artificial Sequence: Synthetic oligonucleotide
augcugucuuggcggaugu

SEQ ID NO: 2561110 - RNA, 19 nt, Artificial Sequence
  Description of Artificial Sequence: Synthetic oligonucleotide
cugcuccucaugagugagc

SEQ ID NO: 2561111 - RNA, 19 nt, Artificial Sequence
  Description of Artificial Sequence: Synthetic oligonucleotide
gucuuagcacuguccucug

SEQ ID NO: 2561112 - RNA, 19 nt, Artificial Sequence
  Description of Artificial Sequence: Synthetic oligonucleotide
cacaggcaugggcugguug

SEQ ID NO: 2561113 - RNA, 19 nt, Artificial Sequence
  Description of Artificial Sequence: Synthetic oligonucleotide
ccuuugucauacuugaacu

SEQ ID NO: 2561114 - RNA, 19 nt, Artificial Sequence
  Description of Artificial Sequence: Synthetic oligonucleotide
cacguuuagggucagcuuu

SEQ ID NO: 2561115 - RNA, 19 nt, Artificial Sequence
  Description of Artificial Sequence: Synthetic oligonucleotide
gguggcagauccugcauaa

SEQ ID NO: 2561116 - RNA, 19 nt, Artificial Sequence
  Description of Artificial Sequence: Synthetic oligonucleotide
gcagucuuagcacuguccu

SEQ ID NO: 2561117 - RNA, 19 nt, Artificial Sequence
  Description of Artificial Sequence: Synthetic oligonucleotide
ggauguggagcuggcaaug

SEQ ID NO: 2561118 - RNA, 19 nt, Artificial Sequence
  Description of Artificial Sequence: Synthetic oligonucleotide
gucagcuuucugcaauucu

SEQ ID NO: 2561119 - RNA, 19 nt, Artificial Sequence
  Description of Artificial Sequence: Synthetic oligonucleotide
ggcaaucuucagucuuugc

SEQ ID NO: 2561120 - RNA, 19 nt, Artificial Sequence
  Description of Artificial Sequence: Synthetic oligonucleotide
uguccucugcaaacucauu

SEQ ID NO: 2561121 - RNA, 19 nt, Artificial Sequence
  Description of Artificial Sequence: Synthetic oligonucleotide
guccucugcaaacucauuu

SEQ ID NO: 2561122 - RNA, 19 nt, Artificial Sequence
  Description of Artificial Sequence: Synthetic oligonucleotide
cuuugucauacuugaacuu

SEQ ID NO: 2561123 - RNA, 19 nt, Artificial Sequence
  Description of Artificial Sequence: Synthetic oligonucleotide
uggcggauguggagcuggc

SEQ ID NO: 2561124 - RNA, 19 nt, Artificial Sequence
  Description of Artificial Sequence: Synthetic oligonucleotide
uccuccgcagagucccaac

SEQ ID NO: 2561125 - RNA, 19 nt, Artificial Sequence
  Description of Artificial Sequence: Synthetic oligonucleotide
gggccuaacgcuccuccgc

SEQ ID NO: 2561126 - RNA, 19 nt, Artificial Sequence
  Description of Artificial Sequence: Synthetic oligonucleotide
ugccgcagcacugcugggu

SEQ ID NO: 2561127 - RNA, 19 nt, Artificial Sequence
  Description of Artificial Sequence: Synthetic oligonucleotide
gagugagcgccgcccgggc

SEQ ID NO: 2561128 - RNA, 19 nt, Artificial Sequence
  Description of Artificial Sequence: Synthetic oligonucleotide
agacgcugcuguccaucug

SEQ ID NO: 2561129 - RNA, 19 nt, Artificial Sequence
  Description of Artificial Sequence: Synthetic oligonucleotide
ccucugcaaacucauuuuc

SEQ ID NO: 2561130 - RNA, 19 nt, Artificial Sequence
  Description of Artificial Sequence: Synthetic oligonucleotide
agauccugcauaagcucaa

SEQ ID NO: 2561131 - RNA, 19 nt, Artificial Sequence
  Description of Artificial Sequence: Synthetic oligonucleotide
agaguaacggcgggcccga

SEQ ID NO: 2561132 - RNA, 19 nt, Artificial Sequence
  Description of Artificial Sequence: Synthetic oligonucleotide
uaacgcuccuccgcagagu

SEQ ID NO: 2561133 - RNA, 19 nt, Artificial Sequence
  Description of Artificial Sequence: Synthetic oligonucleotide
gugcguuugucuguggucu

SEQ ID NO: 2561134 - RNA, 19 nt, Artificial Sequence
  Description of Artificial Sequence: Synthetic oligonucleotide
agcagcccuggggaggcuc

SEQ ID NO: 2561135 - RNA, 19 nt, Artificial Sequence
  Description of Artificial Sequence: Synthetic oligonucleotide
ugucacguuuagggucagc

SEQ ID NO: 2561136 - RNA, 19 nt, Artificial Sequence
  Description of Artificial Sequence: Synthetic oligonucleotide
gcuuucugcaauucugccu

SEQ ID NO: 2561137 - RNA, 19 nt, Artificial Sequence
  Description of Artificial Sequence: Synthetic oligonucleotide
gccagacaugcugucuugg

SEQ ID NO: 2561138 - RNA, 19 nt, Artificial Sequence
  Description of Artificial Sequence: Synthetic oligonucleotide
ggcucuucccucucuggca

SEQ ID NO: 2561139 - RNA, 19 nt, Artificial Sequence
  Description of Artificial Sequence: Synthetic oligonucleotide
ucgccugcucauggaagga

SEQ ID NO: 2561140 - RNA, 19 nt, Artificial Sequence
  Description of Artificial Sequence: Synthetic oligonucleotide
ggccgagcuggcugaagag

SEQ ID NO: 2561141 - RNA, 19 nt, Artificial Sequence
  Description of Artificial Sequence: Synthetic oligonucleotide
guggcagauccugcauaag

SEQ ID NO: 2561142 - RNA, 19 nt, Artificial Sequence
  Description of Artificial Sequence: Synthetic oligonucleotide
ugcguuugucuguggucuu

SEQ ID NO: 2561143 - RNA, 19 nt, Artificial Sequence
  Description of Artificial Sequence: Synthetic oligonucleotide
gcaggggccgagcuggcug

SEQ ID NO: 2561144 - RNA, 19 nt, Artificial Sequence
  Description of Artificial Sequence: Synthetic oligonucleotide
gcggauguggagcuggcaa

SEQ ID NO: 2561145 - RNA, 19 nt, Artificial Sequence
  Description of Artificial Sequence: Synthetic oligonucleotide
caaggugaccuuugucaua

SEQ ID NO: 2561146 - RNA, 19 nt, Artificial Sequence
  Description of Artificial Sequence: Synthetic oligonucleotide
ccgcagagucccaaccgcg

SEQ ID NO: 2561147 - RNA, 19 nt, Artificial Sequence
  Description of Artificial Sequence: Synthetic oligonucleotide
cucggcaggggccgagcug

SEQ ID NO: 2561148 - RNA, 19 nt, Artificial Sequence
  Description of Artificial Sequence: Synthetic oligonucleotide
gcaauguccucggcagggg

SEQ ID NO: 2561149 - RNA, 19 nt, Artificial Sequence
  Description of Artificial Sequence: Synthetic oligonucleotide
gucuguggucuuuugugau

SEQ ID NO: 2561150 - RNA, 19 nt, Artificial Sequence
  Description of Artificial Sequence: Synthetic oligonucleotide
ugguugcugucaucaucua

SEQ ID NO: 2561151 - RNA, 19 nt, Artificial Sequence
  Description of Artificial Sequence: Synthetic oligonucleotide
ggugcccgcaccuccucug

SEQ ID NO: 2561152 - RNA, 19 nt, Artificial Sequence
  Description of Artificial Sequence: Synthetic oligonucleotide
caucuagaaagacgcugcu

SEQ ID NO: 2561153 - RNA, 19 nt, Artificial Sequence
  Description of Artificial Sequence: Synthetic oligonucleotide
caucaucuagaaagacgcu

SEQ ID NO: 2561154 - RNA, 19 nt, Artificial Sequence
  Description of Artificial Sequence: Synthetic oligonucleotide
ugggcugguugcugucauc

SEQ ID NO: 2561155 - RNA, 19 nt, Artificial Sequence
  Description of Artificial Sequence: Synthetic oligonucleotide
ccuccgcagagucccaacc

SEQ ID NO: 2561156 - RNA, 19 nt, Artificial Sequence
  Description of Artificial Sequence: Synthetic oligonucleotide
gggcugguugcugucauca

SEQ ID NO: 2561157 - RNA, 19 nt, Artificial Sequence
  Description of Artificial Sequence: Synthetic oligonucleotide
caccuccucuguccugggc

SEQ ID NO: 2561158 - RNA, 19 nt, Artificial Sequence
  Description of Artificial Sequence: Synthetic oligonucleotide
caaccgcgcggcucucggc

SEQ ID NO: 2561159 - RNA, 19 nt, Artificial Sequence
  Description of Artificial Sequence: Synthetic oligonucleotide
ggccuaacgcuccuccgca

SEQ ID NO: 2561160 - RNA, 19 nt, Artificial Sequence
  Description of Artificial Sequence: Synthetic oligonucleotide
gaacuuucaucaggcuccu

SEQ ID NO: 2561161 - RNA, 19 nt, Artificial Sequence
  Description of Artificial Sequence: Synthetic oligonucleotide
gaccuuugucauacuugaa

SEQ ID NO: 2561162 - RNA, 19 nt, Artificial Sequence
  Description of Artificial Sequence: Synthetic oligonucleotide
ucagccugucuggcagaac

SEQ ID NO: 2561163 - RNA, 19 nt, Artificial Sequence
  Description of Artificial Sequence: Synthetic oligonucleotide
ggacagcagucuuagcacu

SEQ ID NO: 2561164 - RNA, 19 nt, Artificial Sequence
  Description of Artificial Sequence: Synthetic oligonucleotide
gggccgagcuggcugaaga

SEQ ID NO: 2561165 - RNA, 19 nt, Artificial Sequence
  Description of Artificial Sequence: Synthetic oligonucleotide
aggcaugggcugguugcug

SEQ ID NO: 2561166 - RNA, 19 nt, Artificial Sequence
  Description of Artificial Sequence: Synthetic oligonucleotide
aggcgugcugaggaucgca

SEQ ID NO: 2561167 - RNA, 19 nt, Artificial Sequence
  Description of Artificial Sequence: Synthetic oligonucleotide
cuuggcggauguggagcug

SEQ ID NO: 2561168 - RNA, 19 nt, Artificial Sequence
  Description of Artificial Sequence: Synthetic oligonucleotide
cccgaaggcgugcugagga

SEQ ID NO: 2561169 - RNA, 19 nt, Artificial Sequence
  Description of Artificial Sequence: Synthetic oligonucleotide
aggugaccuuugucauacu

SEQ ID NO: 2561170 - RNA, 19 nt, Artificial Sequence
  Description of Artificial Sequence: Synthetic oligonucleotide
uccucggcaggggccgagc

SEQ ID NO: 2561171 - RNA, 19 nt, Artificial Sequence
  Description of Artificial Sequence: Synthetic oligonucleotide
ggcccgaaggcgugcugag

SEQ ID NO: 2561172 - RNA, 19 nt, Artificial Sequence
  Description of Artificial Sequence: Synthetic oligonucleotide
cugccgcagcacugcuggg

SEQ ID NO: 2561173 - RNA, 19 nt, Artificial Sequence
  Description of Artificial Sequence: Synthetic oligonucleotide
augucacguuuagggucag

SEQ ID NO: 2561174 - RNA, 19 nt, Artificial Sequence
  Description of Artificial Sequence: Synthetic oligonucleotide
ggugaccuuugucauacuu

SEQ ID NO: 2561175 - RNA, 19 nt, Artificial Sequence
  Description of Artificial Sequence: Synthetic oligonucleotide
gucccaaccgcgcggcucu

SEQ ID NO: 2561176 - RNA, 19 nt, Artificial Sequence
  Description of Artificial Sequence: Synthetic oligonucleotide
cgcagagucccaaccgcgc

SEQ ID NO: 2561177 - RNA, 19 nt, Artificial Sequence
  Description of Artificial Sequence: Synthetic oligonucleotide
caggcaaucuucagucuuu

SEQ ID NO: 2561178 - RNA, 19 nt, Artificial Sequence
  Description of Artificial Sequence: Synthetic oligonucleotide
ggaauucucgccugcucau

SEQ ID NO: 2561179 - RNA, 19 nt, Artificial Sequence
  Description of Artificial Sequence: Synthetic oligonucleotide
gccuaacgcuccuccgcag

SEQ ID NO: 2561180 - RNA, 19 nt, Artificial Sequence
  Description of Artificial Sequence: Synthetic oligonucleotide
acggcgggcccgaaggcgu

SEQ ID NO: 2561181 - RNA, 19 nt, Artificial Sequence
  Description of Artificial Sequence: Synthetic oligonucleotide
ccgggccuaacgcuccucc

SEQ ID NO: 2561182 - RNA, 19 nt, Artificial Sequence
  Description of Artificial Sequence: Synthetic oligonucleotide
caggggccgagcuggcuga

SEQ ID NO: 2561183 - RNA, 19 nt, Artificial Sequence
  Description of Artificial Sequence: Synthetic oligonucleotide
cauucccgaagaagcgacu

SEQ ID NO: 2561184 - RNA, 19 nt, Artificial Sequence
  Description of Artificial Sequence: Synthetic oligonucleotide
ggguucugcugugggcagg

SEQ ID NO: 2561185 - RNA, 19 nt, Artificial Sequence
  Description of Artificial Sequence: Synthetic oligonucleotide
ggucagcuuucugcaauuc

SEQ ID NO: 2561186 - RNA, 19 nt, Artificial Sequence
  Description of Artificial Sequence: Synthetic oligonucleotide
gaaagacgcugcuguccau

SEQ ID NO: 2561187 - RNA, 19 nt, Artificial Sequence
  Description of Artificial Sequence: Synthetic oligonucleotide
gugagcgccgcccgggccu

SEQ ID NO: 2561188 - RNA, 19 nt, Artificial Sequence
  Description of Artificial Sequence: Synthetic oligonucleotide
ggcgugcugaggaucgcac

SEQ ID NO: 2561189 - RNA, 19 nt, Artificial Sequence
  Description of Artificial Sequence: Synthetic oligonucleotide
gcuccucaugagugagcgc

SEQ ID NO: 2561190 - RNA, 19 nt, Artificial Sequence
  Description of Artificial Sequence: Synthetic oligonucleotide
gcaggcaaucuucagucuu

SEQ ID NO: 2561191 - RNA, 19 nt, Artificial Sequence
  Description of Artificial Sequence: Synthetic oligonucleotide
ccucaugagugagcgccgc

SEQ ID NO: 2561192 - RNA, 19 nt, Artificial Sequence
  Description of Artificial Sequence: Synthetic oligonucleotide
ccuaacgcuccuccgcaga

SEQ ID NO: 2561193 - RNA, 19 nt, Artificial Sequence
  Description of Artificial Sequence: Synthetic oligonucleotide
ggcuccugggcugccgcag

SEQ ID NO: 2561194 - RNA, 19 nt, Artificial Sequence
  Description of Artificial Sequence: Synthetic oligonucleotide
ggcaugggcugguugcugu

SEQ ID NO: 2561195 - RNA, 19 nt, Artificial Sequence
  Description of Artificial Sequence: Synthetic oligonucleotide
acaugcugucuuggcggau

SEQ ID NO: 2561196 - RNA, 19 nt, Artificial Sequence
  Description of Artificial Sequence: Synthetic oligonucleotide
agcgccgcccgggccuaac

SEQ ID NO: 2561197 - RNA, 19 nt, Artificial Sequence
  Description of Artificial Sequence: Synthetic oligonucleotide
caccugugagcuuccugcu

SEQ ID NO: 2561198 - RNA, 19 nt, Artificial Sequence
  Description of Artificial Sequence: Synthetic oligonucleotide
caggugcccgcaccuccuc

SEQ ID NO: 2561199 - RNA, 19 nt, Artificial Sequence
  Description of Artificial Sequence: Synthetic oligonucleotide
agccugucuggcagaacuu

SEQ ID NO: 2561200 - RNA, 19 nt, Artificial Sequence
  Description of Artificial Sequence: Synthetic oligonucleotide
ggaucgcacuccaccugug

SEQ ID NO: 2561201 - RNA, 19 nt, Artificial Sequence
  Description of Artificial Sequence: Synthetic oligonucleotide
cucagccugucuggcagaa

SEQ ID NO: 2561202 - RNA, 19 nt, Artificial Sequence
  Description of Artificial Sequence: Synthetic oligonucleotide
gcucaacauucccgaagaa

SEQ ID NO: 2561203 - RNA, 19 nt, Artificial Sequence
  Description of Artificial Sequence: Synthetic oligonucleotide
uguccucggcaggggccga

SEQ ID NO: 2561204 - RNA, 19 nt, Artificial Sequence
  Description of Artificial Sequence: Synthetic oligonucleotide
cgacucacaggcaugggcu

SEQ ID NO: 2561205 - RNA, 19 nt, Artificial Sequence
  Description of Artificial Sequence: Synthetic oligonucleotide
guccucggcaggggccgag

SEQ ID NO: 2561206 - RNA, 19 nt, Artificial Sequence
  Description of Artificial Sequence: Synthetic oligonucleotide
cgggccuaacgcuccuccg

SEQ ID NO: 2561207 - RNA, 19 nt, Artificial Sequence
  Description of Artificial Sequence: Synthetic oligonucleotide
cugggcgcaggcucagccu

SEQ ID NO: 2561208 - RNA, 19 nt, Artificial Sequence
  Description of Artificial Sequence: Synthetic oligonucleotide
cugugagcuuccugcuccu

SEQ ID NO: 2561209 - RNA, 19 nt, Artificial Sequence
  Description of Artificial Sequence: Synthetic oligonucleotide
ggcaggcaaucuucagucu

SEQ ID NO: 2561210 - RNA, 19 nt, Artificial Sequence
  Description of Artificial Sequence: Synthetic oligonucleotide
gcccgaaggcgugcugagg

SEQ ID NO: 2561211 - RNA, 19 nt, Artificial Sequence
  Description of Artificial Sequence: Synthetic oligonucleotide
gcucauggaaggacaagau

SEQ ID NO: 2561212 - RNA, 19 nt, Artificial Sequence
  Description of Artificial Sequence: Synthetic oligonucleotide
gccugggagcagcccuggg

SEQ ID NO: 2561213 - RNA, 19 nt, Artificial Sequence
  Description of Artificial Sequence: Synthetic oligonucleotide
gggcccgaaggcgugcuga

SEQ ID NO: 2561214 - RNA, 19 nt, Artificial Sequence
  Description of Artificial Sequence: Synthetic oligonucleotide
gcucacagccugggagcag

SEQ ID NO: 2561215 - RNA, 19 nt, Artificial Sequence
  Description of Artificial Sequence: Synthetic oligonucleotide
ugagcgccgcccgggccua

SEQ ID NO: 2561216 - RNA, 19 nt, Artificial Sequence
  Description of Artificial Sequence: Synthetic oligonucleotide
gguuccucgcucacagccu

SEQ ID NO: 2561217 - RNA, 19 nt, Artificial Sequence
  Description of Artificial Sequence: Synthetic oligonucleotide
gcgccgcccgggccuaacg

SEQ ID NO: 2561218 - RNA, 19 nt, Artificial Sequence
  Description of Artificial Sequence: Synthetic oligonucleotide
gugcccgcaccuccucugu

SEQ ID NO: 2561219 - RNA, 19 nt, Artificial Sequence
  Description of Artificial Sequence: Synthetic oligonucleotide
ccgcccgggccuaacgcuc

SEQ ID NO: 2561220 - RNA, 19 nt, Artificial Sequence
  Description of Artificial Sequence: Synthetic oligonucleotide
cuccucuguccugggcgca

SEQ ID NO: 2561221 - RNA, 19 nt, Artificial Sequence
  Description of Artificial Sequence: Synthetic oligonucleotide
caggcaugggcugguugcu

SEQ ID NO: 2561222 - RNA, 19 nt, Artificial Sequence
  Description of Artificial Sequence: Synthetic oligonucleotide
gccgagcuggcugaagagu

SEQ ID NO: 2561223 - RNA, 19 nt, Artificial Sequence
  Description of Artificial Sequence: Synthetic oligonucleotide
ggggccgagcuggcugaag

SEQ ID NO: 2561224 - RNA, 19 nt, Artificial Sequence
  Description of Artificial Sequence: Synthetic oligonucleotide
cccaaccgcgcggcucucg

SEQ ID NO: 2561225 - RNA, 19 nt, Artificial Sequence
  Description of Artificial Sequence: Synthetic oligonucleotide
cgccugcucauggaaggac

SEQ ID NO: 2561226 - RNA, 19 nt, Artificial Sequence
  Description of Artificial Sequence: Synthetic oligonucleotide
ucccaaccgcgcggcucuc

SEQ ID NO: 2561227 - RNA, 19 nt, Artificial Sequence
  Description of Artificial Sequence: Synthetic oligonucleotide
ccgcgcggcucucggcgcg

SEQ ID NO: 2561228 - RNA, 19 nt, Artificial Sequence
  Description of Artificial Sequence: Synthetic oligonucleotide
cgccgcccgggccuaacgc

SEQ ID NO: 2561229 - RNA, 19 nt, Artificial Sequence
  Description of Artificial Sequence: Synthetic oligonucleotide
gccgcccgggccuaacgcu

SEQ ID NO: 2561230 - RNA, 19 nt, Artificial Sequence
  Description of Artificial Sequence: Synthetic oligonucleotide
gaguaacggcgggcccgaa

SEQ ID NO: 2561231 - RNA, 19 nt, Artificial Sequence
  Description of Artificial Sequence: Synthetic oligonucleotide
ggcgggcccgaaggcgugc

SEQ ID NO: 2561232 - RNA, 19 nt, Artificial Sequence
  Description of Artificial Sequence: Synthetic oligonucleotide
gccgcagcacugcuggguu

SEQ ID NO: 2561233 - RNA, 19 nt, Artificial Sequence
  Description of Artificial Sequence: Synthetic oligonucleotide
aggggccgagcuggcugaa

SEQ ID NO: 2561234 - RNA, 19 nt, Artificial Sequence
  Description of Artificial Sequence: Synthetic oligonucleotide
cgcacuccaccugugagcu

SEQ ID NO: 2561235 - RNA, 19 nt, Artificial Sequence
  Description of Artificial Sequence: Synthetic oligonucleotide
ccgcaccuccucuguccug

SEQ ID NO: 2561236 - RNA, 19 nt, Artificial Sequence
  Description of Artificial Sequence: Synthetic oligonucleotide
gccugucuggcagaacuuu

SEQ ID NO: 2561237 - RNA, 19 nt, Artificial Sequence
  Description of Artificial Sequence: Synthetic oligonucleotide
ccuuuacaaggugaccuuu

SEQ ID NO: 2561238 - RNA, 19 nt, Artificial Sequence
  Description of Artificial Sequence: Synthetic oligonucleotide
cggauguggagcuggcaau

SEQ ID NO: 2561239 - RNA, 19 nt, Artificial Sequence
  Description of Artificial Sequence: Synthetic oligonucleotide
gcgcggcucucggcgcgcg

SEQ ID NO: 2561240 - RNA, 19 nt, Artificial Sequence
  Description of Artificial Sequence: Synthetic oligonucleotide
cgcucacagccugggagca

SEQ ID NO: 2561241 - RNA, 19 nt, Artificial Sequence
  Description of Artificial Sequence: Synthetic oligonucleotide
cccgcaccuccucuguccu

SEQ ID NO: 2561242 - RNA, 19 nt, Artificial Sequence
  Description of Artificial Sequence: Synthetic oligonucleotide
gcguuugucuguggucuuu

SEQ ID NO: 2561243 - RNA, 19 nt, Artificial Sequence
  Description of Artificial Sequence: Synthetic oligonucleotide
gcuccuccgcagaguccca

SEQ ID NO: 2561244 - RNA, 19 nt, Artificial Sequence
  Description of Artificial Sequence: Synthetic oligonucleotide
cuccaccugugagcuuccu

SEQ ID NO: 2561245 - RNA, 19 nt, Artificial Sequence
  Description of Artificial Sequence: Synthetic oligonucleotide
ccgaaggcgugcugaggau

SEQ ID NO: 2561246 - RNA, 19 nt, Artificial Sequence
  Description of Artificial Sequence: Synthetic oligonucleotide
gggcugccgcagcacugcu

SEQ ID NO: 2561247 - RNA, 19 nt, Artificial Sequence
  Description of Artificial Sequence: Synthetic oligonucleotide
cguuuagggucagcuuucu

SEQ ID NO: 2561248 - RNA, 19 nt, Artificial Sequence
  Description of Artificial Sequence: Synthetic oligonucleotide
ccucggcaggggccgagcu

SEQ ID NO: 2561249 - RNA, 19 nt, Artificial Sequence
  Description of Artificial Sequence: Synthetic oligonucleotide
cggcgggcccgaaggcgug

SEQ ID NO: 2561250 - RNA, 19 nt, Artificial Sequence
  Description of Artificial Sequence: Synthetic oligonucleotide
gcgcaggcucagccugucu

SEQ ID NO: 2561251 - RNA, 19 nt, Artificial Sequence
  Description of Artificial Sequence: Synthetic oligonucleotide
cccgggccuaacgcuccuc

SEQ ID NO: 2561252 - RNA, 19 nt, Artificial Sequence
  Description of Artificial Sequence: Synthetic oligonucleotide
cgggcccgaaggcgugcug

SEQ ID NO: 2561253 - RNA, 19 nt, Artificial Sequence
  Description of Artificial Sequence: Synthetic oligonucleotide
cguuugucuguggucuuuu

SEQ ID NO: 2561254 - RNA, 19 nt, Artificial Sequence
  Description of Artificial Sequence: Synthetic oligonucleotide
cgcgcggcucucggcgcgc

SEQ ID NO: 2561255 - RNA, 19 nt, Artificial Sequence
  Description of Artificial Sequence: Synthetic oligonucleotide
gcccgggccuaacgcuccu

SEQ ID NO: 2561256 - RNA, 19 nt, Artificial Sequence
  Description of Artificial Sequence: Synthetic oligonucleotide
gcgggcccgaaggcgugcu

SEQ ID NO: 2561257 - RNA, 19 nt, Artificial Sequence
  Description of Artificial Sequence: Synthetic oligonucleotide
gcacuccaccugugagcuu

SEQ ID NO: 2561258 - RNA, 19 nt, Artificial Sequence
  Description of Artificial Sequence: Synthetic oligonucleotide
aacucauucacuuucagag

SEQ ID NO: 2561259 - RNA, 19 nt, Artificial Sequence
  Description of Artificial Sequence: Synthetic oligonucleotide
aauguuagcaugcagacca

SEQ ID NO: 2561260 - RNA, 19 nt, Artificial Sequence
  Description of Artificial Sequence: Synthetic oligonucleotide
auugcuguaaccuucgacc

SEQ ID NO: 2561261 - RNA, 19 nt, Artificial Sequence
  Description of Artificial Sequence: Synthetic oligonucleotide
acaaguuguauuuccagcc

SEQ ID NO: 2561262 - RNA, 19 nt, Artificial Sequence
  Description of Artificial Sequence: Synthetic oligonucleotide
uguauuuccagccagccca

SEQ ID NO: 2561263 - RNA, 19 nt, Artificial Sequence
  Description of Artificial Sequence: Synthetic oligonucleotide
uuuacuacaaguuguauuu

SEQ ID NO: 2561264 - RNA, 19 nt, Artificial Sequence
  Description of Artificial Sequence: Synthetic oligonucleotide
auaaauauugcuguaaccu

SEQ ID NO: 2561265 - RNA, 19 nt, Artificial Sequence
  Description of Artificial Sequence: Synthetic oligonucleotide
acaauguuagcaugcagac

SEQ ID NO: 2561266 - RNA, 19 nt, Artificial Sequence
  Description of Artificial Sequence: Synthetic oligonucleotide
guaaccuucgaccuggagg

SEQ ID NO: 2561267 - RNA, 19 nt, Artificial Sequence
  Description of Artificial Sequence: Synthetic oligonucleotide
gauaucggcacagucaccg

SEQ ID NO: 2561268 - RNA, 19 nt, Artificial Sequence
  Description of Artificial Sequence: Synthetic oligonucleotide
uuucagagcaccauugcug

SEQ ID NO: 2561269 - RNA, 19 nt, Artificial Sequence
  Description of Artificial Sequence: Synthetic oligonucleotide
auugagagguaguuccucc

SEQ ID NO: 2561270 - RNA, 19 nt, Artificial Sequence
  Description of Artificial Sequence: Synthetic oligonucleotide
cucauuuuggcuuuacuac

SEQ ID NO: 2561271 - RNA, 19 nt, Artificial Sequence
  Description of Artificial Sequence: Synthetic oligonucleotide
ucugucaccccuccaagcg

SEQ ID NO: 2561272 - RNA, 19 nt, Artificial Sequence
  Description of Artificial Sequence: Synthetic oligonucleotide
caugaggcggccuacauag

SEQ ID NO: 2561273 - RNA, 19 nt, Artificial Sequence
  Description of Artificial Sequence: Synthetic oligonucleotide
uccuuugucaagcagucug

SEQ ID NO: 2561274 - RNA, 19 nt, Artificial Sequence
  Description of Artificial Sequence: Synthetic oligonucleotide
uuggcuuuacuacaaguug

SEQ ID NO: 2561275 - RNA, 19 nt, Artificial Sequence
  Description of Artificial Sequence: Synthetic oligonucleotide
uaaccuucgaccuggagga

SEQ ID NO: 2561276 - RNA, 19 nt, Artificial Sequence
  Description of Artificial Sequence: Synthetic oligonucleotide
aauauugcuguaaccuucg

SEQ ID NO: 2561277 - RNA, 19 nt, Artificial Sequence
  Description of Artificial Sequence: Synthetic oligonucleotide
uugauaucggcacagucac

SEQ ID NO: 2561278 - RNA, 19 nt, Artificial Sequence
  Description of Artificial Sequence: Synthetic oligonucleotide
ugauaggccaucuugggcu

SEQ ID NO: 2561279 - RNA, 19 nt, Artificial Sequence
  Description of Artificial Sequence: Synthetic oligonucleotide
gacaauguuggccacaaca

SEQ ID NO: 2561280 - RNA, 19 nt, Artificial Sequence
  Description of Artificial Sequence: Synthetic oligonucleotide
ucaccgauggcauaaauau

SEQ ID NO: 2561281 - RNA, 19 nt, Artificial Sequence
  Description of Artificial Sequence: Synthetic oligonucleotide
cauaaauauugcuguaacc

SEQ ID NO: 2561282 - RNA, 19 nt, Artificial Sequence
  Description of Artificial Sequence: Synthetic oligonucleotide
aaguuguauuuccagccag

SEQ ID NO: 2561283 - RNA, 19 nt, Artificial Sequence
  Description of Artificial Sequence: Synthetic oligonucleotide
aacgcacuggaguaggcag

SEQ ID NO: 2561284 - RNA, 19 nt, Artificial Sequence
  Description of Artificial Sequence: Synthetic oligonucleotide
ugcaccuugauguacuccc

SEQ ID NO: 2561285 - RNA, 19 nt, Artificial Sequence
  Description of Artificial Sequence: Synthetic oligonucleotide
cacaacaauguuagcaugc

SEQ ID NO: 2561286 - RNA, 19 nt, Artificial Sequence
  Description of Artificial Sequence: Synthetic oligonucleotide
ucuauucucgaacgcacug

SEQ ID NO: 2561287 - RNA, 19 nt, Artificial Sequence
  Description of Artificial Sequence: Synthetic oligonucleotide
ucauuuuggcuuuacuaca

SEQ ID NO: 2561288 - RNA, 19 nt, Artificial Sequence
  Description of Artificial Sequence: Synthetic oligonucleotide
ucucauuuuggcuuuacua

SEQ ID NO: 2561289 - RNA, 19 nt, Artificial Sequence
  Description of Artificial Sequence: Synthetic oligonucleotide
augcagaccagcaugauag

SEQ ID NO: 2561290 - RNA, 19 nt, Artificial Sequence
  Description of Artificial Sequence: Synthetic oligonucleotide
caugauccagacaaagagc

SEQ ID NO: 2561291 - RNA, 19 nt, Artificial Sequence
  Description of Artificial Sequence: Synthetic oligonucleotide
ucauuucugcccauggaca

SEQ ID NO: 2561292 - RNA, 19 nt, Artificial Sequence
  Description of Artificial Sequence: Synthetic oligonucleotide
aggcggccuacauagaagc

SEQ ID NO: 2561293 - RNA, 19 nt, Artificial Sequence
  Description of Artificial Sequence: Synthetic oligonucleotide
agagcuuuugcccuuggca

SEQ ID NO: 2561294 - RNA, 19 nt, Artificial Sequence
  Description of Artificial Sequence: Synthetic oligonucleotide
agguaguuccuccagguug

SEQ ID NO: 2561295 - RNA, 19 nt, Artificial Sequence
  Description of Artificial Sequence: Synthetic oligonucleotide
uagcaugcagaccagcaug

SEQ ID NO: 2561296 - RNA, 19 nt, Artificial Sequence
  Description of Artificial Sequence: Synthetic oligonucleotide
aagaggucccugcucuugg

SEQ ID NO: 2561297 - RNA, 19 nt, Artificial Sequence
  Description of Artificial Sequence: Synthetic oligonucleotide
cacgccaucauuucugccc

SEQ ID NO: 2561298 - RNA, 19 nt, Artificial Sequence
  Description of Artificial Sequence: Synthetic oligonucleotide
uggcuuuacuacaaguugu

SEQ ID NO: 2561299 - RNA, 19 nt, Artificial Sequence
  Description of Artificial Sequence: Synthetic oligonucleotide
caugauaggccaucuuggg

SEQ ID NO: 2561300 - RNA, 19 nt, Artificial Sequence
  Description of Artificial Sequence: Synthetic oligonucleotide
accgauggcauaaauauug

SEQ ID NO: 2561301 - RNA, 19 nt, Artificial Sequence
  Description of Artificial Sequence: Synthetic oligonucleotide
agcuuuugcccuuggcacc

SEQ ID NO: 2561302 - RNA, 19 nt, Artificial Sequence
  Description of Artificial Sequence: Synthetic oligonucleotide
uauugcuguaaccuucgac

SEQ ID NO: 2561303 - RNA, 19 nt, Artificial Sequence
  Description of Artificial Sequence: Synthetic oligonucleotide
cuacaaguuguauuuccag

SEQ ID NO: 2561304 - RNA, 19 nt, Artificial Sequence
  Description of Artificial Sequence: Synthetic oligonucleotide
uauucucgaacgcacugga

SEQ ID NO: 2561305 - RNA, 19 nt, Artificial Sequence
  Description of Artificial Sequence: Synthetic oligonucleotide
ucccgguacucauugagag

SEQ ID NO: 2561306 - RNA, 19 nt, Artificial Sequence
  Description of Artificial Sequence: Synthetic oligonucleotide
cuugauguacucccgguac

SEQ ID NO: 2561307 - RNA, 19 nt, Artificial Sequence
  Description of Artificial Sequence: Synthetic oligonucleotide
acuuaucuggcccacgcca

SEQ ID NO: 2561308 - RNA, 19 nt, Artificial Sequence
  Description of Artificial Sequence: Synthetic oligonucleotide
gagcuuuugcccuuggcac

SEQ ID NO: 2561309 - RNA, 19 nt, Artificial Sequence
  Description of Artificial Sequence: Synthetic oligonucleotide
agugcaccuggcuuguagg

SEQ ID NO: 2561310 - RNA, 19 nt, Artificial Sequence
  Description of Artificial Sequence: Synthetic oligonucleotide
gaucccguugcacacaauc

SEQ ID NO: 2561311 - RNA, 19 nt, Artificial Sequence
  Description of Artificial Sequence: Synthetic oligonucleotide
cucacucaauaacagcugc

SEQ ID NO: 2561312 - RNA, 19 nt, Artificial Sequence
  Description of Artificial Sequence: Synthetic oligonucleotide
uuuacucucugucucucau

SEQ ID NO: 2561313 - RNA, 19 nt, Artificial Sequence
  Description of Artificial Sequence: Synthetic oligonucleotide
aucuugaucccguugcaca

SEQ ID NO: 2561314 - RNA, 19 nt, Artificial Sequence
  Description of Artificial Sequence: Synthetic oligonucleotide
uguccuuugucaagcaguc

SEQ ID NO: 2561315 - RNA, 19 nt, Artificial Sequence
  Description of Artificial Sequence: Synthetic oligonucleotide
cuugggcuccuugauaucg

SEQ ID NO: 2561316 - RNA, 19 nt, Artificial Sequence
  Description of Artificial Sequence: Synthetic oligonucleotide
cuuguaggcuuugaggggc

SEQ ID NO: 2561317 - RNA, 19 nt, Artificial Sequence
  Description of Artificial Sequence: Synthetic oligonucleotide
ucacucaauaacagcugca

SEQ ID NO: 2561318 - RNA, 19 nt, Artificial Sequence
  Description of Artificial Sequence: Synthetic oligonucleotide
aaagagcuuuugcccuugg

SEQ ID NO: 2561319 - RNA, 19 nt, Artificial Sequence
  Description of Artificial Sequence: Synthetic oligonucleotide
auuuuggcuuuacuacaag

SEQ ID NO: 2561320 - RNA, 19 nt, Artificial Sequence
  Description of Artificial Sequence: Synthetic oligonucleotide
accgagacucccucgcagc

SEQ ID NO: 2561321 - RNA, 19 nt, Artificial Sequence
  Description of Artificial Sequence: Synthetic oligonucleotide
cgaccugacaccaugaucc

SEQ ID NO: 2561322 - RNA, 19 nt, Artificial Sequence
  Description of Artificial Sequence: Synthetic oligonucleotide
agaccagcaugauaggcca

SEQ ID NO: 2561323 - RNA, 19 nt, Artificial Sequence
  Description of Artificial Sequence: Synthetic oligonucleotide
uacauagaagccacuuauc

SEQ ID NO: 2561324 - RNA, 19 nt, Artificial Sequence
  Description of Artificial Sequence: Synthetic oligonucleotide
ucuugaucccguugcacac

SEQ ID NO: 2561325 - RNA, 19 nt, Artificial Sequence
  Description of Artificial Sequence: Synthetic oligonucleotide
uacucucugucucucauuu

SEQ ID NO: 2561326 - RNA, 19 nt, Artificial Sequence
  Description of Artificial Sequence: Synthetic oligonucleotide
ugccgcaugguuuuccagc

SEQ ID NO: 2561327 - RNA, 19 nt, Artificial Sequence
  Description of Artificial Sequence: Synthetic oligonucleotide
acgaccugacaccaugauc

SEQ ID NO: 2561328 - RNA, 19 nt, Artificial Sequence
  Description of Artificial Sequence: Synthetic oligonucleotide
acgaagaggucccugcucu

SEQ ID NO: 2561329 - RNA, 19 nt, Artificial Sequence
  Description of Artificial Sequence: Synthetic oligonucleotide
cuauucucgaacgcacugg

SEQ ID NO: 2561330 - RNA, 19 nt, Artificial Sequence
  Description of Artificial Sequence: Synthetic oligonucleotide
uugggcuccuugauaucgg

SEQ ID NO: 2561331 - RNA, 19 nt, Artificial Sequence
  Description of Artificial Sequence: Synthetic oligonucleotide
ugucaagcagucugucacc

SEQ ID NO: 2561332 - RNA, 19 nt, Artificial Sequence
  Description of Artificial Sequence: Synthetic oligonucleotide
aauaacagcugcacacccu

SEQ ID NO: 2561333 - RNA, 19 nt, Artificial Sequence
  Description of Artificial Sequence: Synthetic oligonucleotide
aggaggguguccuuuguca

SEQ ID NO: 2561334 - RNA, 19 nt, Artificial Sequence
  Description of Artificial Sequence: Synthetic oligonucleotide
uugauguacucccgguacu

SEQ ID NO: 2561335 - RNA, 19 nt, Artificial Sequence
  Description of Artificial Sequence: Synthetic oligonucleotide
acucauugagagguaguuc

SEQ ID NO: 2561336 - RNA, 19 nt, Artificial Sequence
  Description of Artificial Sequence: Synthetic oligonucleotide
uagaagccacuuaucuggc

SEQ ID NO: 2561337 - RNA, 19 nt, Artificial Sequence
  Description of Artificial Sequence: Synthetic oligonucleotide
uguaaccuucgaccuggag

SEQ ID NO: 2561338 - RNA, 19 nt, Artificial Sequence
  Description of Artificial Sequence: Synthetic oligonucleotide
uuuccagccagcccacgac

SEQ ID NO: 2561339 - RNA, 19 nt, Artificial Sequence
  Description of Artificial Sequence: Synthetic oligonucleotide
aaggucagugcaccuggcu

SEQ ID NO: 2561340 - RNA, 19 nt, Artificial Sequence
  Description of Artificial Sequence: Synthetic oligonucleotide
ugcccuuggcaccugucag

SEQ ID NO: 2561341 - RNA, 19 nt, Artificial Sequence
  Description of Artificial Sequence: Synthetic oligonucleotide
uugagagguaguuccucca

SEQ ID NO: 2561342 - RNA, 19 nt, Artificial Sequence
  Description of Artificial Sequence: Synthetic oligonucleotide
aagcgguaccgagacuccc

SEQ ID NO: 2561343 - RNA, 19 nt, Artificial Sequence
  Description of Artificial Sequence: Synthetic oligonucleotide
gacaaagagcuuuugcccu

SEQ ID NO: 2561344 - RNA, 19 nt, Artificial Sequence
  Description of Artificial Sequence: Synthetic oligonucleotide
uaccgagacucccucgcag

SEQ ID NO: 2561345 - RNA, 19 nt, Artificial Sequence
  Description of Artificial Sequence: Synthetic oligonucleotide
ucgaacgcacuggaguagg

SEQ ID NO: 2561346 - RNA, 19 nt, Artificial Sequence
  Description of Artificial Sequence: Synthetic oligonucleotide
ucucgaacgcacuggagua

SEQ ID NO: 2561347 - RNA, 19 nt, Artificial Sequence
  Description of Artificial Sequence: Synthetic oligonucleotide
aagccacuuaucuggccca

SEQ ID NO: 2561348 - RNA, 19 nt, Artificial Sequence
  Description of Artificial Sequence: Synthetic oligonucleotide
gaccuggaggaacucauuc

SEQ ID NO: 2561349 - RNA, 19 nt, Artificial Sequence
  Description of Artificial Sequence: Synthetic oligonucleotide
agucugucaccccuccaag

SEQ ID NO: 2561350 - RNA, 19 nt, Artificial Sequence
  Description of Artificial Sequence: Synthetic oligonucleotide
gaggguguccuuugucaag

SEQ ID NO: 2561351 - RNA, 19 nt, Artificial Sequence
  Description of Artificial Sequence: Synthetic oligonucleotide
gccagucuauucucgaacg

SEQ ID NO: 2561352 - RNA, 19 nt, Artificial Sequence
  Description of Artificial Sequence: Synthetic oligonucleotide
uuucugcccauggacagga

SEQ ID NO: 2561353 - RNA, 19 nt, Artificial Sequence
  Description of Artificial Sequence: Synthetic oligonucleotide
ugcuguaaccuucgaccug

SEQ ID NO: 2561354 - RNA, 19 nt, Artificial Sequence
  Description of Artificial Sequence: Synthetic oligonucleotide
ucacuuucagagcaccauu

SEQ ID NO: 2561355 - RNA, 19 nt, Artificial Sequence
  Description of Artificial Sequence: Synthetic oligonucleotide
caacaauguuagcaugcag

SEQ ID NO: 2561356 - RNA, 19 nt, Artificial Sequence
  Description of Artificial Sequence: Synthetic oligonucleotide
acaacaauguuagcaugca

SEQ ID NO: 2561357 - RNA, 19 nt, Artificial Sequence
  Description of Artificial Sequence: Synthetic oligonucleotide
caaucaccagguugguggc

SEQ ID NO: 2561358 - RNA, 19 nt, Artificial Sequence
  Description of Artificial Sequence: Synthetic oligonucleotide
ugucaccccuccaagcggu

SEQ ID NO: 2561359 - RNA, 19 nt, Artificial Sequence
  Description of Artificial Sequence: Synthetic oligonucleotide
gcuguaaccuucgaccugg

SEQ ID NO: 2561360 - RNA, 19 nt, Artificial Sequence
  Description of Artificial Sequence: Synthetic oligonucleotide
ucgaccuggaggaacucau

SEQ ID NO: 2561361 - RNA, 19 nt, Artificial Sequence
  Description of Artificial Sequence: Synthetic oligonucleotide
guacucccgguacucauug

SEQ ID NO: 2561362 - RNA, 19 nt, Artificial Sequence
  Description of Artificial Sequence: Synthetic oligonucleotide
uacucauugagagguaguu

SEQ ID NO: 2561363 - RNA, 19 nt, Artificial Sequence
  Description of Artificial Sequence: Synthetic oligonucleotide
cuccaagcgguaccgagac

SEQ ID NO: 2561364 - RNA, 19 nt, Artificial Sequence
  Description of Artificial Sequence: Synthetic oligonucleotide
accauugcuggccagucua

SEQ ID NO: 2561365 - RNA, 19 nt, Artificial Sequence
  Description of Artificial Sequence: Synthetic oligonucleotide
caauguuagcaugcagacc

SEQ ID NO: 2561366 - RNA, 19 nt, Artificial Sequence
  Description of Artificial Sequence: Synthetic oligonucleotide
uaucggcacagucaccgau

SEQ ID NO: 2561367 - RNA, 19 nt, Artificial Sequence
  Description of Artificial Sequence: Synthetic oligonucleotide
accagcaugauaggccauc

SEQ ID NO: 2561368 - RNA, 19 nt, Artificial Sequence
  Description of Artificial Sequence: Synthetic oligonucleotide
caccuugauguacucccgg

SEQ ID NO: 2561369 - RNA, 19 nt, Artificial Sequence
  Description of Artificial Sequence: Synthetic oligonucleotide
ugauaucggcacagucacc

SEQ ID NO: 2561370 - RNA, 19 nt, Artificial Sequence
  Description of Artificial Sequence: Synthetic oligonucleotide
agguugcucacccgcucac

SEQ ID NO: 2561371 - RNA, 19 nt, Artificial Sequence
  Description of Artificial Sequence: Synthetic oligonucleotide
cauuuuggcuuuacuacaa

SEQ ID NO: 2561372 - RNA, 19 nt, Artificial Sequence
  Description of Artificial Sequence: Synthetic oligonucleotide
gcuuguaggcuuugagggg

SEQ ID NO: 2561373 - RNA, 19 nt, Artificial Sequence
  Description of Artificial Sequence: Synthetic oligonucleotide
uuguaggcuuugaggggcc

SEQ ID NO: 2561374 - RNA, 19 nt, Artificial Sequence
  Description of Artificial Sequence: Synthetic oligonucleotide
caaguuguauuuccagcca

SEQ ID NO: 2561375 - RNA, 19 nt, Artificial Sequence
  Description of Artificial Sequence: Synthetic oligonucleotide
gguacucauugagagguag

SEQ ID NO: 2561376 - RNA, 19 nt, Artificial Sequence
  Description of Artificial Sequence: Synthetic oligonucleotide
gguaccgagacucccucgc

SEQ ID NO: 2561377 - RNA, 19 nt, Artificial Sequence
  Description of Artificial Sequence: Synthetic oligonucleotide
gaucuugaucccguugcac

SEQ ID NO: 2561378 - RNA, 19 nt, Artificial Sequence
  Description of Artificial Sequence: Synthetic oligonucleotide
ugcucacccgcucacucaa

SEQ ID NO: 2561379 - RNA, 19 nt, Artificial Sequence
  Description of Artificial Sequence: Synthetic oligonucleotide
cugucaccccuccaagcgg

SEQ ID NO: 2561380 - RNA, 19 nt, Artificial Sequence
  Description of Artificial Sequence: Synthetic oligonucleotide
acgccaucauuucugccca

SEQ ID NO: 2561381 - RNA, 19 nt, Artificial Sequence
  Description of Artificial Sequence: Synthetic oligonucleotide
cagcccacgaccugacacc

SEQ ID NO: 2561382 - RNA, 19 nt, Artificial Sequence
  Description of Artificial Sequence: Synthetic oligonucleotide
gaggucccugcucuuggcc

SEQ ID NO: 2561383 - RNA, 19 nt, Artificial Sequence
  Description of Artificial Sequence: Synthetic oligonucleotide
ccagacaaagagcuuuugc

SEQ ID NO: 2561384 - RNA, 19 nt, Artificial Sequence
  Description of Artificial Sequence: Synthetic oligonucleotide
gaggcggccuacauagaag

SEQ ID NO: 2561385 - RNA, 19 nt, Artificial Sequence
  Description of Artificial Sequence: Synthetic oligonucleotide
gguaguuccuccagguugc

SEQ ID NO: 2561386 - RNA, 19 nt, Artificial Sequence
  Description of Artificial Sequence: Synthetic oligonucleotide
gucaagcagucugucaccc

SEQ ID NO: 2561387 - RNA, 19 nt, Artificial Sequence
  Description of Artificial Sequence: Synthetic oligonucleotide
gacgaagaggucccugcuc

SEQ ID NO: 2561388 - RNA, 19 nt, Artificial Sequence
  Description of Artificial Sequence: Synthetic oligonucleotide
ucuuuacucucugucucuc

SEQ ID NO: 2561389 - RNA, 19 nt, Artificial Sequence
  Description of Artificial Sequence: Synthetic oligonucleotide
ggaacucauucacuuucag

SEQ ID NO: 2561390 - RNA, 19 nt, Artificial Sequence
  Description of Artificial Sequence: Synthetic oligonucleotide
uguacucccgguacucauu

SEQ ID NO: 2561391 - RNA, 19 nt, Artificial Sequence
  Description of Artificial Sequence: Synthetic oligonucleotide
agacgaagaggucccugcu

SEQ ID NO: 2561392 - RNA, 19 nt, Artificial Sequence
  Description of Artificial Sequence: Synthetic oligonucleotide
gucugucaccccuccaagc

SEQ ID NO: 2561393 - RNA, 19 nt, Artificial Sequence
  Description of Artificial Sequence: Synthetic oligonucleotide
cacccgcucacucaauaac

SEQ ID NO: 2561394 - RNA, 19 nt, Artificial Sequence
  Description of Artificial Sequence: Synthetic oligonucleotide
uggcauaaauauugcugua

SEQ ID NO: 2561395 - RNA, 19 nt, Artificial Sequence
  Description of Artificial Sequence: Synthetic oligonucleotide
cugcacacccuuccggaag

SEQ ID NO: 2561396 - RNA, 19 nt, Artificial Sequence
  Description of Artificial Sequence: Synthetic oligonucleotide
cccauggacaggaggaagg

SEQ ID NO: 2561397 - RNA, 19 nt, Artificial Sequence
  Description of Artificial Sequence: Synthetic oligonucleotide
cacuuaucuggcccacgcc

SEQ ID NO: 2561398 - RNA, 19 nt, Artificial Sequence
  Description of Artificial Sequence: Synthetic oligonucleotide
uuaucuggcccacgccauc

SEQ ID NO: 2561399 - RNA, 19 nt, Artificial Sequence
  Description of Artificial Sequence: Synthetic oligonucleotide
guggagacgaagagguccc

SEQ ID NO: 2561400 - RNA, 19 nt, Artificial Sequence
  Description of Artificial Sequence: Synthetic oligonucleotide
ugucucucauuuuggcuuu

SEQ ID NO: 2561401 - RNA, 19 nt, Artificial Sequence
  Description of Artificial Sequence: Synthetic oligonucleotide
accaugauccagacaaaga

SEQ ID NO: 2561402 - RNA, 19 nt, Artificial Sequence
  Description of Artificial Sequence: Synthetic oligonucleotide
ucacccgcucacucaauaa

SEQ ID NO: 2561403 - RNA, 19 nt, Artificial Sequence
  Description of Artificial Sequence: Synthetic oligonucleotide
ggccacaacaauguuagca

SEQ ID NO: 2561404 - RNA, 19 nt, Artificial Sequence
  Description of Artificial Sequence: Synthetic oligonucleotide
guaggcagagcuguugauc

SEQ ID NO: 2561405 - RNA, 19 nt, Artificial Sequence
  Description of Artificial Sequence: Synthetic oligonucleotide
uaggcuuugaggggccucu

SEQ ID NO: 2561406 - RNA, 19 nt, Artificial Sequence
  Description of Artificial Sequence: Synthetic oligonucleotide
gguguccuuugucaagcag

SEQ ID NO: 2561407 - RNA, 19 nt, Artificial Sequence
  Description of Artificial Sequence: Synthetic oligonucleotide
cauugagagguaguuccuc

SEQ ID NO: 2561408 - RNA, 19 nt, Artificial Sequence
  Description of Artificial Sequence: Synthetic oligonucleotide
uauuuccagccagcccacg

SEQ ID NO: 2561409 - RNA, 19 nt, Artificial Sequence
  Description of Artificial Sequence: Synthetic oligonucleotide
auauugcuguaaccuucga

SEQ ID NO: 2561410 - RNA, 19 nt, Artificial Sequence
  Description of Artificial Sequence: Synthetic oligonucleotide
cagcugcacacccuuccgg

SEQ ID NO: 2561411 - RNA, 19 nt, Artificial Sequence
  Description of Artificial Sequence: Synthetic oligonucleotide
auaggccaucuugggcucc

SEQ ID NO: 2561412 - RNA, 19 nt, Artificial Sequence
  Description of Artificial Sequence: Synthetic oligonucleotide
cuuugucaagcagucuguc

SEQ ID NO: 2561413 - RNA, 19 nt, Artificial Sequence
  Description of Artificial Sequence: Synthetic oligonucleotide
agcaugcagaccagcauga

SEQ ID NO: 2561414 - RNA, 19 nt, Artificial Sequence
  Description of Artificial Sequence: Synthetic oligonucleotide
ggaggaaggucagugcacc

SEQ ID NO: 2561415 - RNA, 19 nt, Artificial Sequence
  Description of Artificial Sequence: Synthetic oligonucleotide
cagucuauucucgaacgca

SEQ ID NO: 2561416 - RNA, 19 nt, Artificial Sequence
  Description of Artificial Sequence: Synthetic oligonucleotide
uuacucucugucucucauu

SEQ ID NO: 2561417 - RNA, 19 nt, Artificial Sequence
  Description of Artificial Sequence: Synthetic oligonucleotide
gauguacucccgguacuca

SEQ ID NO: 2561418 - RNA, 19 nt, Artificial Sequence
  Description of Artificial Sequence: Synthetic oligonucleotide
caugguuuuccagcuugug

SEQ ID NO: 2561419 - RNA, 19 nt, Artificial Sequence
  Description of Artificial Sequence: Synthetic oligonucleotide
uguugaucuugaucccguu

SEQ ID NO: 2561420 - RNA, 19 nt, Artificial Sequence
  Description of Artificial Sequence: Synthetic oligonucleotide
gaacgcacuggaguaggca

SEQ ID NO: 2561421 - RNA, 19 nt, Artificial Sequence
  Description of Artificial Sequence: Synthetic oligonucleotide
ugguggagacugccgcaug

SEQ ID NO: 2561422 - RNA, 19 nt, Artificial Sequence
  Description of Artificial Sequence: Synthetic oligonucleotide
uggagacugccgcaugguu

SEQ ID NO: 2561423 - RNA, 19 nt, Artificial Sequence
  Description of Artificial Sequence: Synthetic oligonucleotide
aucccguugcacacaauca

SEQ ID NO: 2561424 - RNA, 19 nt, Artificial Sequence
  Description of Artificial Sequence: Synthetic oligonucleotide
auaucggcacagucaccga

SEQ ID NO: 2561425 - RNA, 19 nt, Artificial Sequence
  Description of Artificial Sequence: Synthetic oligonucleotide
uguccgucugcaccuugau

SEQ ID NO: 2561426 - RNA, 19 nt, Artificial Sequence
  Description of Artificial Sequence: Synthetic oligonucleotide
ucucucauuuuggcuuuac

SEQ ID NO: 2561427 - RNA, 19 nt, Artificial Sequence
  Description of Artificial Sequence: Synthetic oligonucleotide
aggaacucauucacuuuca

SEQ ID NO: 2561428 - RNA, 19 nt, Artificial Sequence
  Description of Artificial Sequence: Synthetic oligonucleotide
ggccagucuauucucgaac

SEQ ID NO: 2561429 - RNA, 19 nt, Artificial Sequence
  Description of Artificial Sequence: Synthetic oligonucleotide
cucccugucaugguggaga

SEQ ID NO: 2561430 - RNA, 19 nt, Artificial Sequence
  Description of Artificial Sequence: Synthetic oligonucleotide
cucgaacgcacuggaguag

SEQ ID NO: 2561431 - RNA, 19 nt, Artificial Sequence
  Description of Artificial Sequence: Synthetic oligonucleotide
caccccuccaagcgguacc

SEQ ID NO: 2561432 - RNA, 19 nt, Artificial Sequence
  Description of Artificial Sequence: Synthetic oligonucleotide
cugucaugguggagacugc

SEQ ID NO: 2561433 - RNA, 19 nt, Artificial Sequence
  Description of Artificial Sequence: Synthetic oligonucleotide
aucggcacagucaccgaug

SEQ ID NO: 2561434 - RNA, 19 nt, Artificial Sequence
  Description of Artificial Sequence: Synthetic oligonucleotide
acccgcucacucaauaaca

SEQ ID NO: 2561435 - RNA, 19 nt, Artificial Sequence
  Description of Artificial Sequence: Synthetic oligonucleotide
ccaagcgguaccgagacuc

SEQ ID NO: 2561436 - RNA, 19 nt, Artificial Sequence
  Description of Artificial Sequence: Synthetic oligonucleotide
ccacuuaucuggcccacgc

SEQ ID NO: 2561437 - RNA, 19 nt, Artificial Sequence
  Description of Artificial Sequence: Synthetic oligonucleotide
ucugugcccuuguccgucu

SEQ ID NO: 2561438 - RNA, 19 nt, Artificial Sequence
  Description of Artificial Sequence: Synthetic oligonucleotide
cacccuuccggaagaagga

SEQ ID NO: 2561439 - RNA, 19 nt, Artificial Sequence
  Description of Artificial Sequence: Synthetic oligonucleotide
gaaggucagugcaccuggc

SEQ ID NO: 2561440 - RNA, 19 nt, Artificial Sequence
  Description of Artificial Sequence: Synthetic oligonucleotide
accccuccaagcgguaccg

SEQ ID NO: 2561441 - RNA, 19 nt, Artificial Sequence
  Description of Artificial Sequence: Synthetic oligonucleotide
gaccugacaccaugaucca

SEQ ID NO: 2561442 - RNA, 19 nt, Artificial Sequence
  Description of Artificial Sequence: Synthetic oligonucleotide
gagacugccgcaugguuuu

SEQ ID NO: 2561443 - RNA, 19 nt, Artificial Sequence
  Description of Artificial Sequence: Synthetic oligonucleotide
agccacuuaucuggcccac

SEQ ID NO: 2561444 - RNA, 19 nt, Artificial Sequence
  Description of Artificial Sequence: Synthetic oligonucleotide
ccacaacaauguuagcaug

SEQ ID NO: 2561445 - RNA, 19 nt, Artificial Sequence
  Description of Artificial Sequence: Synthetic oligonucleotide
gacugccgcaugguuuucc

SEQ ID NO: 2561446 - RNA, 19 nt, Artificial Sequence
  Description of Artificial Sequence: Synthetic oligonucleotide
gucaccgauggcauaaaua

SEQ ID NO: 2561447 - RNA, 19 nt, Artificial Sequence
  Description of Artificial Sequence: Synthetic oligonucleotide
cccgcucacucaauaacag

SEQ ID NO: 2561448 - RNA, 19 nt, Artificial Sequence
  Description of Artificial Sequence: Synthetic oligonucleotide
ugucaggaggguguccuuu

SEQ ID NO: 2561449 - RNA, 19 nt, Artificial Sequence
  Description of Artificial Sequence: Synthetic oligonucleotide
gcccuuguccgucugcacc

SEQ ID NO: 2561450 - RNA, 19 nt, Artificial Sequence
  Description of Artificial Sequence: Synthetic oligonucleotide
ccagucuauucucgaacgc

SEQ ID NO: 2561451 - RNA, 19 nt, Artificial Sequence
  Description of Artificial Sequence: Synthetic oligonucleotide
ucccucgcagccucccugu

SEQ ID NO: 2561452 - RNA, 19 nt, Artificial Sequence
  Description of Artificial Sequence: Synthetic oligonucleotide
caugcagaccagcaugaua

SEQ ID NO: 2561453 - RNA, 19 nt, Artificial Sequence
  Description of Artificial Sequence: Synthetic oligonucleotide
ccuugauaucggcacaguc

SEQ ID NO: 2561454 - RNA, 19 nt, Artificial Sequence
  Description of Artificial Sequence: Synthetic oligonucleotide
accugacaccaugauccag

SEQ ID NO: 2561455 - RNA, 19 nt, Artificial Sequence
  Description of Artificial Sequence: Synthetic oligonucleotide
gcagaccagcaugauaggc

SEQ ID NO: 2561456 - RNA, 19 nt, Artificial Sequence
  Description of Artificial Sequence: Synthetic oligonucleotide
ccagcccacgaccugacac

SEQ ID NO: 2561457 - RNA, 19 nt, Artificial Sequence
  Description of Artificial Sequence: Synthetic oligonucleotide
caggaggguguccuuuguc

SEQ ID NO: 2561458 - RNA, 19 nt, Artificial Sequence
  Description of Artificial Sequence: Synthetic oligonucleotide
cugccgcaugguuuuccag

SEQ ID NO: 2561459 - RNA, 19 nt, Artificial Sequence
  Description of Artificial Sequence: Synthetic oligonucleotide
uccaagcgguaccgagacu

SEQ ID NO: 2561460 - RNA, 19 nt, Artificial Sequence
  Description of Artificial Sequence: Synthetic oligonucleotide
guauuuccagccagcccac

SEQ ID NO: 2561461 - RNA, 19 nt, Artificial Sequence
  Description of Artificial Sequence: Synthetic oligonucleotide
cuggccagucuauucucga

SEQ ID NO: 2561462 - RNA, 19 nt, Artificial Sequence
  Description of Artificial Sequence: Synthetic oligonucleotide
gccacaacaauguuagcau

SEQ ID NO: 2561463 - RNA, 19 nt, Artificial Sequence
  Description of Artificial Sequence: Synthetic oligonucleotide
uguaggcuuugaggggccu

SEQ ID NO: 2561464 - RNA, 19 nt, Artificial Sequence
  Description of Artificial Sequence: Synthetic oligonucleotide
uggccacaacaauguuagc

SEQ ID NO: 2561465 - RNA, 19 nt, Artificial Sequence
  Description of Artificial Sequence: Synthetic oligonucleotide
agguugguggccaccucug

SEQ ID NO: 2561466 - RNA, 19 nt, Artificial Sequence
  Description of Artificial Sequence: Synthetic oligonucleotide
cuguugaucuugaucccgu

SEQ ID NO: 2561467 - RNA, 19 nt, Artificial Sequence
  Description of Artificial Sequence: Synthetic oligonucleotide
augguggagacugccgcau

SEQ ID NO: 2561468 - RNA, 19 nt, Artificial Sequence
  Description of Artificial Sequence: Synthetic oligonucleotide
cucugugcccuuguccguc

SEQ ID NO: 2561469 - RNA, 19 nt, Artificial Sequence
  Description of Artificial Sequence: Synthetic oligonucleotide
ugcucuuggccagccgcac

SEQ ID NO: 2561470 - RNA, 19 nt, Artificial Sequence
  Description of Artificial Sequence: Synthetic oligonucleotide
guaccgagacucccucgca

SEQ ID NO: 2561471 - RNA, 19 nt, Artificial Sequence
  Description of Artificial Sequence: Synthetic oligonucleotide
cgcaugguuuuccagcuug

SEQ ID NO: 2561472 - RNA, 19 nt, Artificial Sequence
  Description of Artificial Sequence: Synthetic oligonucleotide
agcgguaccgagacucccu

SEQ ID NO: 2561473 - RNA, 19 nt, Artificial Sequence
  Description of Artificial Sequence: Synthetic oligonucleotide
ucaccccuccaagcgguac

SEQ ID NO: 2561474 - RNA, 19 nt, Artificial Sequence
  Description of Artificial Sequence: Synthetic oligonucleotide
ccgcucacucaauaacagc

SEQ ID NO: 2561475 - RNA, 19 nt, Artificial Sequence
  Description of Artificial Sequence: Synthetic oligonucleotide
cuugaucccguugcacaca

SEQ ID NO: 2561476 - RNA, 19 nt, Artificial Sequence
  Description of Artificial Sequence: Synthetic oligonucleotide
cagguugcucacccgcuca

SEQ ID NO: 2561477 - RNA, 19 nt, Artificial Sequence
  Description of Artificial Sequence: Synthetic oligonucleotide
ggaggguguccuuugucaa

SEQ ID NO: 2561478 - RNA, 19 nt, Artificial Sequence
  Description of Artificial Sequence: Synthetic oligonucleotide
agcccacgaccugacacca

SEQ ID NO: 2561479 - RNA, 19 nt, Artificial Sequence
  Description of Artificial Sequence: Synthetic oligonucleotide
cccacgaccugacaccaug

SEQ ID NO: 2561480 - RNA, 19 nt, Artificial Sequence
  Description of Artificial Sequence: Synthetic oligonucleotide
ccguugcacacaaucacca

SEQ ID NO: 2561481 - RNA, 19 nt, Artificial Sequence
  Description of Artificial Sequence: Synthetic oligonucleotide
cccuccaagcgguaccgag

SEQ ID NO: 2561482 - RNA, 19 nt, Artificial Sequence
  Description of Artificial Sequence: Synthetic oligonucleotide
ggagacgaagaggucccug

SEQ ID NO: 2561483 - RNA, 19 nt, Artificial Sequence
  Description of Artificial Sequence: Synthetic oligonucleotide
cccacgccaucauuucugc

SEQ ID NO: 2561484 - RNA, 19 nt, Artificial Sequence
  Description of Artificial Sequence: Synthetic oligonucleotide
auccagacaaagagcuuuu

SEQ ID NO: 2561485 - RNA, 19 nt, Artificial Sequence
  Description of Artificial Sequence: Synthetic oligonucleotide
gaggaaggucagugcaccu

SEQ ID NO: 2561486 - RNA, 19 nt, Artificial Sequence
  Description of Artificial Sequence: Synthetic oligonucleotide
gcggccuacauagaagcca

SEQ ID NO: 2561487 - RNA, 19 nt, Artificial Sequence
  Description of Artificial Sequence: Synthetic oligonucleotide
cucucauuuuggcuuuacu

SEQ ID NO: 2561488 - RNA, 19 nt, Artificial Sequence
  Description of Artificial Sequence: Synthetic oligonucleotide
acgcacuggaguaggcaga

SEQ ID NO: 2561489 - RNA, 19 nt, Artificial Sequence
  Description of Artificial Sequence: Synthetic oligonucleotide
uggagacgaagaggucccu

SEQ ID NO: 2561490 - RNA, 19 nt, Artificial Sequence
  Description of Artificial Sequence: Synthetic oligonucleotide
agccagcccacgaccugac

SEQ ID NO: 2561491 - RNA, 19 nt, Artificial Sequence
  Description of Artificial Sequence: Synthetic oligonucleotide
cguugcacacaaucaccag

SEQ ID NO: 2561492 - RNA, 19 nt, Artificial Sequence
  Description of Artificial Sequence: Synthetic oligonucleotide
guaggcuuugaggggccuc

SEQ ID NO: 2561493 - RNA, 19 nt, Artificial Sequence
  Description of Artificial Sequence: Synthetic oligonucleotide
cucacccgcucacucaaua

SEQ ID NO: 2561494 - RNA, 19 nt, Artificial Sequence
  Description of Artificial Sequence: Synthetic oligonucleotide
gcccacgccaucauuucug

SEQ ID NO: 2561495 - RNA, 19 nt, Artificial Sequence
  Description of Artificial Sequence: Synthetic oligonucleotide
cggccuacauagaagccac

SEQ ID NO: 2561496 - RNA, 19 nt, Artificial Sequence
  Description of Artificial Sequence: Synthetic oligonucleotide
guacucauugagagguagu

SEQ ID NO: 2561497 - RNA, 19 nt, Artificial Sequence
  Description of Artificial Sequence: Synthetic oligonucleotide
acccuuccggaagaaggau

SEQ ID NO: 2561498 - RNA, 19 nt, Artificial Sequence
  Description of Artificial Sequence: Synthetic oligonucleotide
ggcaccugucaggagggug

SEQ ID NO: 2561499 - RNA, 19 nt, Artificial Sequence
  Description of Artificial Sequence: Synthetic oligonucleotide
ccgagacucccucgcagcc

SEQ ID NO: 2561500 - RNA, 19 nt, Artificial Sequence
  Description of Artificial Sequence: Synthetic oligonucleotide
ggcuuuacuacaaguugua

SEQ ID NO: 2561501 - RNA, 19 nt, Artificial Sequence
  Description of Artificial Sequence: Synthetic oligonucleotide
cgcucacucaauaacagcu

SEQ ID NO: 2561502 - RNA, 19 nt, Artificial Sequence
  Description of Artificial Sequence: Synthetic oligonucleotide
gagguaguuccuccagguu

SEQ ID NO: 2561503 - RNA, 19 nt, Artificial Sequence
  Description of Artificial Sequence: Synthetic oligonucleotide
ccuacauagaagccacuua

SEQ ID NO: 2561504 - RNA, 19 nt, Artificial Sequence
  Description of Artificial Sequence: Synthetic oligonucleotide
agacugccgcaugguuuuc

SEQ ID NO: 2561505 - RNA, 19 nt, Artificial Sequence
  Description of Artificial Sequence: Synthetic oligonucleotide
cuuugaggggccucugcuu

SEQ ID NO: 2561506 - RNA, 19 nt, Artificial Sequence
  Description of Artificial Sequence: Synthetic oligonucleotide
cuggcccacgccaucauuu

SEQ ID NO: 2561507 - RNA, 19 nt, Artificial Sequence
  Description of Artificial Sequence: Synthetic oligonucleotide
gccacuuaucuggcccacg

SEQ ID NO: 2561508 - RNA, 19 nt, Artificial Sequence
  Description of Artificial Sequence: Synthetic oligonucleotide
cucgcagccucccugucau

SEQ ID NO: 2561509 - RNA, 19 nt, Artificial Sequence
  Description of Artificial Sequence: Synthetic oligonucleotide
ggcggccuacauagaagcc

SEQ ID NO: 2561510 - RNA, 19 nt, Artificial Sequence
  Description of Artificial Sequence: Synthetic oligonucleotide
ccgguacucauugagaggu

SEQ ID NO: 2561511 - RNA, 19 nt, Artificial Sequence
  Description of Artificial Sequence: Synthetic oligonucleotide
ccuccaagcgguaccgaga

SEQ ID NO: 2561512 - RNA, 19 nt, Artificial Sequence
  Description of Artificial Sequence: Synthetic oligonucleotide
ucgcagccucccugucaug

SEQ ID NO: 2561513 - RNA, 19 nt, Artificial Sequence
  Description of Artificial Sequence: Synthetic oligonucleotide
cugugcccuuguccgucug

SEQ ID NO: 2561514 - RNA, 19 nt, Artificial Sequence
  Description of Artificial Sequence: Synthetic oligonucleotide
ccacgccaucauuucugcc

SEQ ID NO: 2561515 - RNA, 19 nt, Artificial Sequence
  Description of Artificial Sequence: Synthetic oligonucleotide
aggcuuugaggggccucug

SEQ ID NO: 2561516 - RNA, 19 nt, Artificial Sequence
  Description of Artificial Sequence: Synthetic oligonucleotide
cuguaaccuucgaccugga

SEQ ID NO: 2561517 - RNA, 19 nt, Artificial Sequence
  Description of Artificial Sequence: Synthetic oligonucleotide
cagccagcccacgaccuga

SEQ ID NO: 2561518 - RNA, 19 nt, Artificial Sequence
  Description of Artificial Sequence: Synthetic oligonucleotide
gccgcaugguuuuccagcu

SEQ ID NO: 2561519 - RNA, 19 nt, Artificial Sequence
  Description of Artificial Sequence: Synthetic oligonucleotide
gcgguaccgagacucccuc

SEQ ID NO: 2561520 - RNA, 19 nt, Artificial Sequence
  Description of Artificial Sequence: Synthetic oligonucleotide
ccuuugucaagcagucugu

SEQ ID NO: 2561521 - RNA, 19 nt, Artificial Sequence
  Description of Artificial Sequence: Synthetic oligonucleotide
cgaacgcacuggaguaggc

SEQ ID NO: 2561522 - RNA, 19 nt, Artificial Sequence
  Description of Artificial Sequence: Synthetic oligonucleotide
gcaccauugcuggccaguc

SEQ ID NO: 2561523 - RNA, 19 nt, Artificial Sequence
  Description of Artificial Sequence: Synthetic oligonucleotide
ccuucgaccuggaggaacu

SEQ ID NO: 2561524 - RNA, 19 nt, Artificial Sequence
  Description of Artificial Sequence: Synthetic oligonucleotide
augaggcggccuacauaga

SEQ ID NO: 2561525 - RNA, 19 nt, Artificial Sequence
  Description of Artificial Sequence: Synthetic oligonucleotide
ggagacugccgcaugguuu

SEQ ID NO: 2561526 - RNA, 19 nt, Artificial Sequence
  Description of Artificial Sequence: Synthetic oligonucleotide
cacgaccugacaccaugau

SEQ ID NO: 2561527 - RNA, 19 nt, Artificial Sequence
  Description of Artificial Sequence: Synthetic oligonucleotide
cgguaccgagacucccucg

SEQ ID NO: 2561528 - RNA, 19 nt, Artificial Sequence
  Description of Artificial Sequence: Synthetic oligonucleotide
ccacgaccugacaccauga

SEQ ID NO: 2561529 - RNA, 19 nt, Artificial Sequence
  Description of Artificial Sequence: Synthetic oligonucleotide
gcuuuacuacaaguuguau

SEQ ID NO: 2561530 - RNA, 19 nt, Artificial Sequence
  Description of Artificial Sequence: Synthetic oligonucleotide
caccauugcuggccagucu

SEQ ID NO: 2561531 - RNA, 19 nt, Artificial Sequence
  Description of Artificial Sequence: Synthetic oligonucleotide
cccuuggcaccugucagga

SEQ ID NO: 2561532 - RNA, 19 nt, Artificial Sequence
  Description of Artificial Sequence: Synthetic oligonucleotide
gguugguggccaccucugu

SEQ ID NO: 2561533 - RNA, 19 nt, Artificial Sequence
  Description of Artificial Sequence: Synthetic oligonucleotide
cgucugcaccuugauguac

SEQ ID NO: 2561534 - RNA, 19 nt, Artificial Sequence
  Description of Artificial Sequence: Synthetic oligonucleotide
cagucaccgauggcauaaa

SEQ ID NO: 2561535 - RNA, 19 nt, Artificial Sequence
  Description of Artificial Sequence: Synthetic oligonucleotide
ggcccacgccaucauuucu

SEQ ID NO: 2561536 - RNA, 19 nt, Artificial Sequence
  Description of Artificial Sequence: Synthetic oligonucleotide
cagcaugauaggccaucuu

SEQ ID NO: 2561537 - RNA, 19 nt, Artificial Sequence
  Description of Artificial Sequence: Synthetic oligonucleotide
gguugcucacccgcucacu

SEQ ID NO: 2561538 - RNA, 19 nt, Artificial Sequence
  Description of Artificial Sequence: Synthetic oligonucleotide
ccgucugcaccuugaugua

SEQ ID NO: 2561539 - RNA, 19 nt, Artificial Sequence
  Description of Artificial Sequence: Synthetic oligonucleotide
ccagcaugauaggccaucu

SEQ ID NO: 2561540 - RNA, 19 nt, Artificial Sequence
  Description of Artificial Sequence: Synthetic oligonucleotide
caccuggcuuguaggcuuu

SEQ ID NO: 2561541 - RNA, 19 nt, Artificial Sequence
  Description of Artificial Sequence: Synthetic oligonucleotide
cggcacagucaccgauggc

SEQ ID NO: 2561542 - RNA, 19 nt, Artificial Sequence
  Description of Artificial Sequence: Synthetic oligonucleotide
gccgcaccaugaggcggcc

SEQ ID NO: 2561543 - RNA, 19 nt, Artificial Sequence
  Description of Artificial Sequence: Synthetic oligonucleotide
gcaugcagaccagcaugau

SEQ ID NO: 2561544 - RNA, 19 nt, Artificial Sequence
  Description of Artificial Sequence: Synthetic oligonucleotide
ggccuacauagaagccacu

SEQ ID NO: 2561545 - RNA, 19 nt, Artificial Sequence
  Description of Artificial Sequence: Synthetic oligonucleotide
ccucugugcccuuguccgu

SEQ ID NO: 2561546 - RNA, 19 nt, Artificial Sequence
  Description of Artificial Sequence: Synthetic oligonucleotide
ccggaagaaggaucuccuu

SEQ ID NO: 2561547 - RNA, 19 nt, Artificial Sequence
  Description of Artificial Sequence: Synthetic oligonucleotide
cgguacucauugagaggua

SEQ ID NO: 2561548 - RNA, 19 nt, Artificial Sequence
  Description of Artificial Sequence: Synthetic oligonucleotide
ccccuccaagcgguaccga

SEQ ID NO: 2561549 - RNA, 19 nt, Artificial Sequence
  Description of Artificial Sequence: Synthetic oligonucleotide
cgaccuggaggaacucauu

SEQ ID NO: 2561550 - RNA, 19 nt, Artificial Sequence
  Description of Artificial Sequence: Synthetic oligonucleotide
gcucacccgcucacucaau

SEQ ID NO: 2561551 - RNA, 19 nt, Artificial Sequence
  Description of Artificial Sequence: Synthetic oligonucleotide
ccgcaugguuuuccagcuu

SEQ ID NO: 2561552 - RNA, 19 nt, Artificial Sequence
  Description of Artificial Sequence: Synthetic oligonucleotide
cccugucaugguggagacu

SEQ ID NO: 2561553 - RNA, 19 nt, Artificial Sequence
  Description of Artificial Sequence: Synthetic oligonucleotide
gcccacgaccugacaccau

SEQ ID NO: 2561554 - RNA, 19 nt, Artificial Sequence
  Description of Artificial Sequence: Synthetic oligonucleotide
ccuuguccgucugcaccuu

SEQ ID NO: 2561555 - RNA, 19 nt, Artificial Sequence
  Description of Artificial Sequence: Synthetic oligonucleotide
ccgcaccaugaggcggccu

SEQ ID NO: 2561556 - RNA, 19 nt, Artificial Sequence
  Description of Artificial Sequence: Synthetic oligonucleotide
ucaaauaacacaaaguagc

SEQ ID NO: 2561557 - RNA, 19 nt, Artificial Sequence
  Description of Artificial Sequence: Synthetic oligonucleotide
uauucagaauauaagaacg

SEQ ID NO: 2561558 - RNA, 19 nt, Artificial Sequence
  Description of Artificial Sequence: Synthetic oligonucleotide
aaaguagccauuuuacagc

SEQ ID NO: 2561559 - RNA, 19 nt, Artificial Sequence
  Description of Artificial Sequence: Synthetic oligonucleotide
aacaacaguacauucaagg

SEQ ID NO: 2561560 - RNA, 19 nt, Artificial Sequence
  Description of Artificial Sequence: Synthetic oligonucleotide
uuaaauuucaugcaaaagu

SEQ ID NO: 2561561 - RNA, 19 nt, Artificial Sequence
  Description of Artificial Sequence: Synthetic oligonucleotide
aacaauauguuacuaaaag

SEQ ID NO: 2561562 - RNA, 19 nt, Artificial Sequence
  Description of Artificial Sequence: Synthetic oligonucleotide
aaaauuagguuaucggggc

SEQ ID NO: 2561563 - RNA, 19 nt, Artificial Sequence
  Description of Artificial Sequence: Synthetic oligonucleotide
aacauuuaaagcuacaagu

SEQ ID NO: 2561564 - RNA, 19 nt, Artificial Sequence
  Description of Artificial Sequence: Synthetic oligonucleotide
uguaaaauauuauaaaugu

SEQ ID NO: 2561565 - RNA, 19 nt, Artificial Sequence
  Description of Artificial Sequence: Synthetic oligonucleotide
aacaaaauuagguuaucgg

SEQ ID NO: 2561566 - RNA, 19 nt, Artificial Sequence
  Description of Artificial Sequence: Synthetic oligonucleotide
uauaucaaauaacacaaag

SEQ ID NO: 2561567 - RNA, 19 nt, Artificial Sequence
  Description of Artificial Sequence: Synthetic oligonucleotide
aacagaacaguacugacag

SEQ ID NO: 2561568 - RNA, 19 nt, Artificial Sequence
  Description of Artificial Sequence: Synthetic oligonucleotide
aagaaagaaauuuagaguu

SEQ ID NO: 2561569 - RNA, 19 nt, Artificial Sequence
  Description of Artificial Sequence: Synthetic oligonucleotide
aauauuauaaaugucucug

SEQ ID NO: 2561570 - RNA, 19 nt, Artificial Sequence
  Description of Artificial Sequence: Synthetic oligonucleotide
auuagaaauauuuauucag

SEQ ID NO: 2561571 - RNA, 19 nt, Artificial Sequence
  Description of Artificial Sequence: Synthetic oligonucleotide
aaguuaaacaauauguuac

SEQ ID NO: 2561572 - RNA, 19 nt, Artificial Sequence
  Description of Artificial Sequence: Synthetic oligonucleotide
ucuggaaacauuuaaagcu

SEQ ID NO: 2561573 - RNA, 19 nt, Artificial Sequence
  Description of Artificial Sequence: Synthetic oligonucleotide
aauuacaagguauaguaca

SEQ ID NO: 2561574 - RNA, 19 nt, Artificial Sequence
  Description of Artificial Sequence: Synthetic oligonucleotide
ucuguauaaauaaauggag

SEQ ID NO: 2561575 - RNA, 19 nt, Artificial Sequence
  Description of Artificial Sequence: Synthetic oligonucleotide
uuguaaaauauuauaaaug

SEQ ID NO: 2561576 - RNA, 19 nt, Artificial Sequence
  Description of Artificial Sequence: Synthetic oligonucleotide
acaauauguuacuaaaagc

SEQ ID NO: 2561577 - RNA, 19 nt, Artificial Sequence
  Description of Artificial Sequence: Synthetic oligonucleotide
ucucuguauaaauaaaugg

SEQ ID NO: 2561578 - RNA, 19 nt, Artificial Sequence
  Description of Artificial Sequence: Synthetic oligonucleotide
acaaaauuagguuaucggg

SEQ ID NO: 2561579 - RNA, 19 nt, Artificial Sequence
  Description of Artificial Sequence: Synthetic oligonucleotide
auucgagugguauaaaagc

SEQ ID NO: 2561580 - RNA, 19 nt, Artificial Sequence
  Description of Artificial Sequence: Synthetic oligonucleotide
uaucaaauaacacaaagua

SEQ ID NO: 2561581 - RNA, 19 nt, Artificial Sequence
  Description of Artificial Sequence: Synthetic oligonucleotide
aagaaauuuagaguucucc

SEQ ID NO: 2561582 - RNA, 19 nt, Artificial Sequence
  Description of Artificial Sequence: Synthetic oligonucleotide
auuucuguagguucaaggc

SEQ ID NO: 2561583 - RNA, 19 nt, Artificial Sequence
  Description of Artificial Sequence: Synthetic oligonucleotide
aauaacacaaaguagccau

SEQ ID NO: 2561584 - RNA, 19 nt, Artificial Sequence
  Description of Artificial Sequence: Synthetic oligonucleotide
aauauaagaacguuuguaa

SEQ ID NO: 2561585 - RNA, 19 nt, Artificial Sequence
  Description of Artificial Sequence: Synthetic oligonucleotide
uucuauaucaaauaacaca

SEQ ID NO: 2561586 - RNA, 19 nt, Artificial Sequence
  Description of Artificial Sequence: Synthetic oligonucleotide
aauucuauaucaaauaaca

SEQ ID NO: 2561587 - RNA, 19 nt, Artificial Sequence
  Description of Artificial Sequence: Synthetic oligonucleotide
auuuauucagaauauaaga

SEQ ID NO: 2561588 - RNA, 19 nt, Artificial Sequence
  Description of Artificial Sequence: Synthetic oligonucleotide
aaacauuuaaagcuacaag

SEQ ID NO: 2561589 - RNA, 19 nt, Artificial Sequence
  Description of Artificial Sequence: Synthetic oligonucleotide
acuaaaggcaucuggaaac

SEQ ID NO: 2561590 - RNA, 19 nt, Artificial Sequence
  Description of Artificial Sequence: Synthetic oligonucleotide
aauuagaaauauuuauuca

SEQ ID NO: 2561591 - RNA, 19 nt, Artificial Sequence
  Description of Artificial Sequence: Synthetic oligonucleotide
aaaauauuauaaaugucuc

SEQ ID NO: 2561592 - RNA, 19 nt, Artificial Sequence
  Description of Artificial Sequence: Synthetic oligonucleotide
aaaaguuaaauuucaugca

SEQ ID NO: 2561593 - RNA, 19 nt, Artificial Sequence
  Description of Artificial Sequence: Synthetic oligonucleotide
agaaauuuagaguucuccg

SEQ ID NO: 2561594 - RNA, 19 nt, Artificial Sequence
  Description of Artificial Sequence: Synthetic oligonucleotide
gaauuagaaauauuuauuc

SEQ ID NO: 2561595 - RNA, 19 nt, Artificial Sequence
  Description of Artificial Sequence: Synthetic oligonucleotide
uuuaaacaauucuauauca

SEQ ID NO: 2561596 - RNA, 19 nt, Artificial Sequence
  Description of Artificial Sequence: Synthetic oligonucleotide
uuuauucagaauauaagaa

SEQ ID NO: 2561597 - RNA, 19 nt, Artificial Sequence
  Description of Artificial Sequence: Synthetic oligonucleotide
caaaauuagguuaucgggg

SEQ ID NO: 2561598 - RNA, 19 nt, Artificial Sequence
  Description of Artificial Sequence: Synthetic oligonucleotide
uuuguaaaauauuauaaau

SEQ ID NO: 2561599 - RNA, 19 nt, Artificial Sequence
  Description of Artificial Sequence: Synthetic oligonucleotide
uuuaaagcuacaagugagg

SEQ ID NO: 2561600 - RNA, 19 nt, Artificial Sequence
  Description of Artificial Sequence: Synthetic oligonucleotide
uuuaacaacaguacauuca

SEQ ID NO: 2561601 - RNA, 19 nt, Artificial Sequence
  Description of Artificial Sequence: Synthetic oligonucleotide
uuuuaaacaauucuauauc

SEQ ID NO: 2561602 - RNA, 19 nt, Artificial Sequence
  Description of Artificial Sequence: Synthetic oligonucleotide
acaacaguacauucaaggc

SEQ ID NO: 2561603 - RNA, 19 nt, Artificial Sequence
  Description of Artificial Sequence: Synthetic oligonucleotide
aguacugacagaugcaaac

SEQ ID NO: 2561604 - RNA, 19 nt, Artificial Sequence
  Description of Artificial Sequence: Synthetic oligonucleotide
auuuagaguucuccgaagc

SEQ ID NO: 2561605 - RNA, 19 nt, Artificial Sequence
  Description of Artificial Sequence: Synthetic oligonucleotide
aguaaguuaaacaauaugu

SEQ ID NO: 2561606 - RNA, 19 nt, Artificial Sequence
  Description of Artificial Sequence: Synthetic oligonucleotide
aucuggaaacauuuaaagc

SEQ ID NO: 2561607 - RNA, 19 nt, Artificial Sequence
  Description of Artificial Sequence: Synthetic oligonucleotide
aaugucucuguauaaauaa

SEQ ID NO: 2561608 - RNA, 19 nt, Artificial Sequence
  Description of Artificial Sequence: Synthetic oligonucleotide
aaguaaguuaaacaauaug

SEQ ID NO: 2561609 - RNA, 19 nt, Artificial Sequence
  Description of Artificial Sequence: Synthetic oligonucleotide
uaaaagcagaauuagaaau

SEQ ID NO: 2561610 - RNA, 19 nt, Artificial Sequence
  Description of Artificial Sequence: Synthetic oligonucleotide
aaauauuauaaaugucucu

SEQ ID NO: 2561611 - RNA, 19 nt, Artificial Sequence
  Description of Artificial Sequence: Synthetic oligonucleotide
aaaguuaaauuucaugcaa

SEQ ID NO: 2561612 - RNA, 19 nt, Artificial Sequence
  Description of Artificial Sequence: Synthetic oligonucleotide
aauagaaaugaacauguuu

SEQ ID NO: 2561613 - RNA, 19 nt, Artificial Sequence
  Description of Artificial Sequence: Synthetic oligonucleotide
aauuucaugcaaaaguaag

SEQ ID NO: 2561614 - RNA, 19 nt, Artificial Sequence
  Description of Artificial Sequence: Synthetic oligonucleotide
uccaguacaaacagaacag

SEQ ID NO: 2561615 - RNA, 19 nt, Artificial Sequence
  Description of Artificial Sequence: Synthetic oligonucleotide
ucaugcaaaaguaaguuaa

SEQ ID NO: 2561616 - RNA, 19 nt, Artificial Sequence
  Description of Artificial Sequence: Synthetic oligonucleotide
uaaauuucaugcaaaagua

SEQ ID NO: 2561617 - RNA, 19 nt, Artificial Sequence
  Description of Artificial Sequence: Synthetic oligonucleotide
aaagcagaauuagaaauag

SEQ ID NO: 2561618 - RNA, 19 nt, Artificial Sequence
  Description of Artificial Sequence: Synthetic oligonucleotide
aaagaaggaacgaaggaag

SEQ ID NO: 2561619 - RNA, 19 nt, Artificial Sequence
  Description of Artificial Sequence: Synthetic oligonucleotide
ugcaaaaguaaguuaaaca

SEQ ID NO: 2561620 - RNA, 19 nt, Artificial Sequence
  Description of Artificial Sequence: Synthetic oligonucleotide
uaaacaauauguuacuaaa

SEQ ID NO: 2561621 - RNA, 19 nt, Artificial Sequence
  Description of Artificial Sequence: Synthetic oligonucleotide
caaaguagccauuuuacag

SEQ ID NO: 2561622 - RNA, 19 nt, Artificial Sequence
  Description of Artificial Sequence: Synthetic oligonucleotide
uuaguagccacuuucaaau

SEQ ID NO: 2561623 - RNA, 19 nt, Artificial Sequence
  Description of Artificial Sequence: Synthetic oligonucleotide
ucagguucuaacaaaauua

SEQ ID NO: 2561624 - RNA, 19 nt, Artificial Sequence
  Description of Artificial Sequence: Synthetic oligonucleotide
uguauaaauaaauggaguu

SEQ ID NO: 2561625 - RNA, 19 nt, Artificial Sequence
  Description of Artificial Sequence: Synthetic oligonucleotide
ugugcuuuaacaacaguac

SEQ ID NO: 2561626 - RNA, 19 nt, Artificial Sequence
  Description of Artificial Sequence: Synthetic oligonucleotide
aacaguacauucaaggcag

SEQ ID NO: 2561627 - RNA, 19 nt, Artificial Sequence
  Description of Artificial Sequence: Synthetic oligonucleotide
gauuuucuaauucgagugg

SEQ ID NO: 2561628 - RNA, 19 nt, Artificial Sequence
  Description of Artificial Sequence: Synthetic oligonucleotide
uuaacaacaguacauucaa

SEQ ID NO: 2561629 - RNA, 19 nt, Artificial Sequence
  Description of Artificial Sequence: Synthetic oligonucleotide
gucuggaaaagaaagaagg

SEQ ID NO: 2561630 - RNA, 19 nt, Artificial Sequence
  Description of Artificial Sequence: Synthetic oligonucleotide
ucaaaugagacuccaguac

SEQ ID NO: 2561631 - RNA, 19 nt, Artificial Sequence
  Description of Artificial Sequence: Synthetic oligonucleotide
cagaauauaagaacguuug

SEQ ID NO: 2561632 - RNA, 19 nt, Artificial Sequence
  Description of Artificial Sequence: Synthetic oligonucleotide
ucuaacaaaauuagguuau

SEQ ID NO: 2561633 - RNA, 19 nt, Artificial Sequence
  Description of Artificial Sequence: Synthetic oligonucleotide
gaacaguacugacagaugc

SEQ ID NO: 2561634 - RNA, 19 nt, Artificial Sequence
  Description of Artificial Sequence: Synthetic oligonucleotide
uauguuacuaaaagcagaa

SEQ ID NO: 2561635 - RNA, 19 nt, Artificial Sequence
  Description of Artificial Sequence: Synthetic oligonucleotide
uauaguacaguguuuagua

SEQ ID NO: 2561636 - RNA, 19 nt, Artificial Sequence
  Description of Artificial Sequence: Synthetic oligonucleotide
ugaagcagcacuccagagg

SEQ ID NO: 2561637 - RNA, 19 nt, Artificial Sequence
  Description of Artificial Sequence: Synthetic oligonucleotide
aacaauucuauaucaaaua

SEQ ID NO: 2561638 - RNA, 19 nt, Artificial Sequence
  Description of Artificial Sequence: Synthetic oligonucleotide
uuaaacaauauguuacuaa

SEQ ID NO: 2561639 - RNA, 19 nt, Artificial Sequence
  Description of Artificial Sequence: Synthetic oligonucleotide
uggaauuagaaauauuuau

SEQ ID NO: 2561640 - RNA, 19 nt, Artificial Sequence
  Description of Artificial Sequence: Synthetic oligonucleotide
uauaagaacguuuguaaaa

SEQ ID NO: 2561641 - RNA, 19 nt, Artificial Sequence
  Description of Artificial Sequence: Synthetic oligonucleotide
uuuguaucagguucuaaca

SEQ ID NO: 2561642 - RNA, 19 nt, Artificial Sequence
  Description of Artificial Sequence: Synthetic oligonucleotide
agaaauagaaaugaacaug

SEQ ID NO: 2561643 - RNA, 19 nt, Artificial Sequence
  Description of Artificial Sequence: Synthetic oligonucleotide
aaauuuagaguucuccgaa

SEQ ID NO: 2561644 - RNA, 19 nt, Artificial Sequence
  Description of Artificial Sequence: Synthetic oligonucleotide
augaacauguuuuguaauc

SEQ ID NO: 2561645 - RNA, 19 nt, Artificial Sequence
  Description of Artificial Sequence: Synthetic oligonucleotide
uuuuguaaucuuuguauca

SEQ ID NO: 2561646 - RNA, 19 nt, Artificial Sequence
  Description of Artificial Sequence: Synthetic oligonucleotide
aguacaaacagaacaguac

SEQ ID NO: 2561647 - RNA, 19 nt, Artificial Sequence
  Description of Artificial Sequence: Synthetic oligonucleotide
aauucgagugguauaaaag

SEQ ID NO: 2561648 - RNA, 19 nt, Artificial Sequence
  Description of Artificial Sequence: Synthetic oligonucleotide
acaacgugaguucaaggac

SEQ ID NO: 2561649 - RNA, 19 nt, Artificial Sequence
  Description of Artificial Sequence: Synthetic oligonucleotide
cuuuguaucagguucuaac

SEQ ID NO: 2561650 - RNA, 19 nt, Artificial Sequence
  Description of Artificial Sequence: Synthetic oligonucleotide
aauuuagaguucuccgaag

SEQ ID NO: 2561651 - RNA, 19 nt, Artificial Sequence
  Description of Artificial Sequence: Synthetic oligonucleotide
gaauuagaaauagaaauga

SEQ ID NO: 2561652 - RNA, 19 nt, Artificial Sequence
  Description of Artificial Sequence: Synthetic oligonucleotide
caaauaacacaaaguagcc

SEQ ID NO: 2561653 - RNA, 19 nt, Artificial Sequence
  Description of Artificial Sequence: Synthetic oligonucleotide
uaaguuaaacaauauguua

SEQ ID NO: 2561654 - RNA, 19 nt, Artificial Sequence
  Description of Artificial Sequence: Synthetic oligonucleotide
uaaacaauucuauaucaaa

SEQ ID NO: 2561655 - RNA, 19 nt, Artificial Sequence
  Description of Artificial Sequence: Synthetic oligonucleotide
aaauuacaagguauaguac

SEQ ID NO: 2561656 - RNA, 19 nt, Artificial Sequence
  Description of Artificial Sequence: Synthetic oligonucleotide
aaaaguaaguuaaacaaua

SEQ ID NO: 2561657 - RNA, 19 nt, Artificial Sequence
  Description of Artificial Sequence: Synthetic oligonucleotide
aaagcuacaagugaggcua

SEQ ID NO: 2561658 - RNA, 19 nt, Artificial Sequence
  Description of Artificial Sequence: Synthetic oligonucleotide
aaaacuaaaggcaucugga

SEQ ID NO: 2561659 - RNA, 19 nt, Artificial Sequence
  Description of Artificial Sequence: Synthetic oligonucleotide
uaacaaaauuagguuaucg

SEQ ID NO: 2561660 - RNA, 19 nt, Artificial Sequence
  Description of Artificial Sequence: Synthetic oligonucleotide
uguaaucuuuguaucaggu

SEQ ID NO: 2561661 - RNA, 19 nt, Artificial Sequence
  Description of Artificial Sequence: Synthetic oligonucleotide
ugagacuccaguacaaaca

SEQ ID NO: 2561662 - RNA, 19 nt, Artificial Sequence
  Description of Artificial Sequence: Synthetic oligonucleotide
uacaagguauaguacagug

SEQ ID NO: 2561663 - RNA, 19 nt, Artificial Sequence
  Description of Artificial Sequence: Synthetic oligonucleotide
uuacuaaaagcagaauuag

SEQ ID NO: 2561664 - RNA, 19 nt, Artificial Sequence
  Description of Artificial Sequence: Synthetic oligonucleotide
uuuguaaucuuuguaucag

SEQ ID NO: 2561665 - RNA, 19 nt, Artificial Sequence
  Description of Artificial Sequence: Synthetic oligonucleotide
uacaacgugaguucaagga

SEQ ID NO: 2561666 - RNA, 19 nt, Artificial Sequence
  Description of Artificial Sequence: Synthetic oligonucleotide
uucuguagguucaaggcug

SEQ ID NO: 2561667 - RNA, 19 nt, Artificial Sequence
  Description of Artificial Sequence: Synthetic oligonucleotide
gacagaugcaaacacaguc

SEQ ID NO: 2561668 - RNA, 19 nt, Artificial Sequence
  Description of Artificial Sequence: Synthetic oligonucleotide
uuaaacaauucuauaucaa

SEQ ID NO: 2561669 - RNA, 19 nt, Artificial Sequence
  Description of Artificial Sequence: Synthetic oligonucleotide
ucuggaaaagaaagaagga

SEQ ID NO: 2561670 - RNA, 19 nt, Artificial Sequence
  Description of Artificial Sequence: Synthetic oligonucleotide
aguacaguguuuaguagcc

SEQ ID NO: 2561671 - RNA, 19 nt, Artificial Sequence
  Description of Artificial Sequence: Synthetic oligonucleotide
auuuaaagcuacaagugag

SEQ ID NO: 2561672 - RNA, 19 nt, Artificial Sequence
  Description of Artificial Sequence: Synthetic oligonucleotide
uauaaauaaauggaguuuu

SEQ ID NO: 2561673 - RNA, 19 nt, Artificial Sequence
  Description of Artificial Sequence: Synthetic oligonucleotide
uaguacaguguuuaguagc

SEQ ID NO: 2561674 - RNA, 19 nt, Artificial Sequence
  Description of Artificial Sequence: Synthetic oligonucleotide
agaauuagaaauagaaaug

SEQ ID NO: 2561675 - RNA, 19 nt, Artificial Sequence
  Description of Artificial Sequence: Synthetic oligonucleotide
uuuagaguucuccgaagcc

SEQ ID NO: 2561676 - RNA, 19 nt, Artificial Sequence
  Description of Artificial Sequence: Synthetic oligonucleotide
ugucuggaaaagaaagaag

SEQ ID NO: 2561677 - RNA, 19 nt, Artificial Sequence
  Description of Artificial Sequence: Synthetic oligonucleotide
uucuaacaaaauuagguua

SEQ ID NO: 2561678 - RNA, 19 nt, Artificial Sequence
  Description of Artificial Sequence: Synthetic oligonucleotide
acaauucuauaucaaauaa

SEQ ID NO: 2561679 - RNA, 19 nt, Artificial Sequence
  Description of Artificial Sequence: Synthetic oligonucleotide
aauuagguuaucggggcuc

SEQ ID NO: 2561680 - RNA, 19 nt, Artificial Sequence
  Description of Artificial Sequence: Synthetic oligonucleotide
ugguauaaaagcuaacuuu

SEQ ID NO: 2561681 - RNA, 19 nt, Artificial Sequence
  Description of Artificial Sequence: Synthetic oligonucleotide
cugacagaugcaaacacag

SEQ ID NO: 2561682 - RNA, 19 nt, Artificial Sequence
  Description of Artificial Sequence: Synthetic oligonucleotide
aguuaaacaauauguuacu

SEQ ID NO: 2561683 - RNA, 19 nt, Artificial Sequence
  Description of Artificial Sequence: Synthetic oligonucleotide
uauuauaaaugucucugua

SEQ ID NO: 2561684 - RNA, 19 nt, Artificial Sequence
  Description of Artificial Sequence: Synthetic oligonucleotide
gaaauuuagaguucuccga

SEQ ID NO: 2561685 - RNA, 19 nt, Artificial Sequence
  Description of Artificial Sequence: Synthetic oligonucleotide
cucuguauaaauaaaugga

SEQ ID NO: 2561686 - RNA, 19 nt, Artificial Sequence
  Description of Artificial Sequence: Synthetic oligonucleotide
uguuguacagcgaaacccu

SEQ ID NO: 2561687 - RNA, 19 nt, Artificial Sequence
  Description of Artificial Sequence: Synthetic oligonucleotide
aaugaacauguuuuguaau

SEQ ID NO: 2561688 - RNA, 19 nt, Artificial Sequence
  Description of Artificial Sequence: Synthetic oligonucleotide
uuaucggggcucuugaagc

SEQ ID NO: 2561689 - RNA, 19 nt, Artificial Sequence
  Description of Artificial Sequence: Synthetic oligonucleotide
auagaaaugaacauguuuu

SEQ ID NO: 2561690 - RNA, 19 nt, Artificial Sequence
  Description of Artificial Sequence: Synthetic oligonucleotide
caauucuauaucaaauaac

SEQ ID NO: 2561691 - RNA, 19 nt, Artificial Sequence
  Description of Artificial Sequence: Synthetic oligonucleotide
aacuaaaggcaucuggaaa

SEQ ID NO: 2561692 - RNA, 19 nt, Artificial Sequence
  Description of Artificial Sequence: Synthetic oligonucleotide
auuauaaaugucucuguau

SEQ ID NO: 2561693 - RNA, 19 nt, Artificial Sequence
  Description of Artificial Sequence: Synthetic oligonucleotide
gagacuccaguacaaacag

SEQ ID NO: 2561694 - RNA, 19 nt, Artificial Sequence
  Description of Artificial Sequence: Synthetic oligonucleotide
uagaaauagaaaugaacau

SEQ ID NO: 2561695 - RNA, 19 nt, Artificial Sequence
  Description of Artificial Sequence: Synthetic oligonucleotide
ugcuuuaacaacaguacau

SEQ ID NO: 2561696 - RNA, 19 nt, Artificial Sequence
  Description of Artificial Sequence: Synthetic oligonucleotide
uagaaaugaacauguuuug

SEQ ID NO: 2561697 - RNA, 19 nt, Artificial Sequence
  Description of Artificial Sequence: Synthetic oligonucleotide
aaacaauucuauaucaaau

SEQ ID NO: 2561698 - RNA, 19 nt, Artificial Sequence
  Description of Artificial Sequence: Synthetic oligonucleotide
uucgagugguauaaaagcu

SEQ ID NO: 2561699 - RNA, 19 nt, Artificial Sequence
  Description of Artificial Sequence: Synthetic oligonucleotide
augagacuccaguacaaac

SEQ ID NO: 2561700 - RNA, 19 nt, Artificial Sequence
  Description of Artificial Sequence: Synthetic oligonucleotide
ucagaauauaagaacguuu

SEQ ID NO: 2561701 - RNA, 19 nt, Artificial Sequence
  Description of Artificial Sequence: Synthetic oligonucleotide
cacaaaguagccauuuuac

SEQ ID NO: 2561702 - RNA, 19 nt, Artificial Sequence
  Description of Artificial Sequence: Synthetic oligonucleotide
uuaaagcuacaagugaggc

SEQ ID NO: 2561703 - RNA, 19 nt, Artificial Sequence
  Description of Artificial Sequence: Synthetic oligonucleotide
uuguaaucuuuguaucagg

SEQ ID NO: 2561704 - RNA, 19 nt, Artificial Sequence
  Description of Artificial Sequence: Synthetic oligonucleotide
uacaaacagaacaguacug

SEQ ID NO: 2561705 - RNA, 19 nt, Artificial Sequence
  Description of Artificial Sequence: Synthetic oligonucleotide
uuuaguagccacuuucaaa

SEQ ID NO: 2561706 - RNA, 19 nt, Artificial Sequence
  Description of Artificial Sequence: Synthetic oligonucleotide
ucuugaagcagcacuccag

SEQ ID NO: 2561707 - RNA, 19 nt, Artificial Sequence
  Description of Artificial Sequence: Synthetic oligonucleotide
ugcaaacacagucacgugu

SEQ ID NO: 2561708 - RNA, 19 nt, Artificial Sequence
  Description of Artificial Sequence: Synthetic oligonucleotide
aaagaaagaaagaaauuua

SEQ ID NO: 2561709 - RNA, 19 nt, Artificial Sequence
  Description of Artificial Sequence: Synthetic oligonucleotide
ucuaauucgagugguauaa

SEQ ID NO: 2561710 - RNA, 19 nt, Artificial Sequence
  Description of Artificial Sequence: Synthetic oligonucleotide
aaguagccauuuuacagca

SEQ ID NO: 2561711 - RNA, 19 nt, Artificial Sequence
  Description of Artificial Sequence: Synthetic oligonucleotide
guuuguaaaauauuauaaa

SEQ ID NO: 2561712 - RNA, 19 nt, Artificial Sequence
  Description of Artificial Sequence: Synthetic oligonucleotide
cagguucuaacaaaauuag

SEQ ID NO: 2561713 - RNA, 19 nt, Artificial Sequence
  Description of Artificial Sequence: Synthetic oligonucleotide
aucaaauaacacaaaguag

SEQ ID NO: 2561714 - RNA, 19 nt, Artificial Sequence
  Description of Artificial Sequence: Synthetic oligonucleotide
agugguauaaaagcuaacu

SEQ ID NO: 2561715 - RNA, 19 nt, Artificial Sequence
  Description of Artificial Sequence: Synthetic oligonucleotide
aaacuaaaggcaucuggaa

SEQ ID NO: 2561716 - RNA, 19 nt, Artificial Sequence
  Description of Artificial Sequence: Synthetic oligonucleotide
auauuauaaaugucucugu

SEQ ID NO: 2561717 - RNA, 19 nt, Artificial Sequence
  Description of Artificial Sequence: Synthetic oligonucleotide
uuagaguucuccgaagccc

SEQ ID NO: 2561718 - RNA, 19 nt, Artificial Sequence
  Description of Artificial Sequence: Synthetic oligonucleotide
acauuuaaagcuacaagug

SEQ ID NO: 2561719 - RNA, 19 nt, Artificial Sequence
  Description of Artificial Sequence: Synthetic oligonucleotide
aaauaacacaaaguagcca

SEQ ID NO: 2561720 - RNA, 19 nt, Artificial Sequence
  Description of Artificial Sequence: Synthetic oligonucleotide
auucuauaucaaauaacac

SEQ ID NO: 2561721 - RNA, 19 nt, Artificial Sequence
  Description of Artificial Sequence: Synthetic oligonucleotide
guagccauuuuacagcagc

SEQ ID NO: 2561722 - RNA, 19 nt, Artificial Sequence
  Description of Artificial Sequence: Synthetic oligonucleotide
guuaaauuucaugcaaaag

SEQ ID NO: 2561723 - RNA, 19 nt, Artificial Sequence
  Description of Artificial Sequence: Synthetic oligonucleotide
aguuaaauuucaugcaaaa

SEQ ID NO: 2561724 - RNA, 19 nt, Artificial Sequence
  Description of Artificial Sequence: Synthetic oligonucleotide
auaucaaauaacacaaagu

SEQ ID NO: 2561725 - RNA, 19 nt, Artificial Sequence
  Description of Artificial Sequence: Synthetic oligonucleotide
uaaaugucucuguauaaau

SEQ ID NO: 2561726 - RNA, 19 nt, Artificial Sequence
  Description of Artificial Sequence: Synthetic oligonucleotide
uguaucagguucuaacaaa

SEQ ID NO: 2561727 - RNA, 19 nt, Artificial Sequence
  Description of Artificial Sequence: Synthetic oligonucleotide
agcagaauuagaaauagaa

SEQ ID NO: 2561728 - RNA, 19 nt, Artificial Sequence
  Description of Artificial Sequence: Synthetic oligonucleotide
auaguacaguguuuaguag

SEQ ID NO: 2561729 - RNA, 19 nt, Artificial Sequence
  Description of Artificial Sequence: Synthetic oligonucleotide
augcaaaaguaaguuaaac

SEQ ID NO: 2561730 - RNA, 19 nt, Artificial Sequence
  Description of Artificial Sequence: Synthetic oligonucleotide
aagaacguuuguaaaauau

SEQ ID NO: 2561731 - RNA, 19 nt, Artificial Sequence
  Description of Artificial Sequence: Synthetic oligonucleotide
ugaacauguuuuguaaucu

SEQ ID NO: 2561732 - RNA, 19 nt, Artificial Sequence
  Description of Artificial Sequence: Synthetic oligonucleotide
auauaagaacguuuguaaa

SEQ ID NO: 2561733 - RNA, 19 nt, Artificial Sequence
  Description of Artificial Sequence: Synthetic oligonucleotide
auuacaagguauaguacag

SEQ ID NO: 2561734 - RNA, 19 nt, Artificial Sequence
  Description of Artificial Sequence: Synthetic oligonucleotide
cuuuaacaacaguacauuc

SEQ ID NO: 2561735 - RNA, 19 nt, Artificial Sequence
  Description of Artificial Sequence: Synthetic oligonucleotide
cuguuguacagcgaaaccc

SEQ ID NO: 2561736 - RNA, 19 nt, Artificial Sequence
  Description of Artificial Sequence: Synthetic oligonucleotide
guuaucggggcucuugaag

SEQ ID NO: 2561737 - RNA, 19 nt, Artificial Sequence
  Description of Artificial Sequence: Synthetic oligonucleotide
ucuacaacgugaguucaag

SEQ ID NO: 2561738 - RNA, 19 nt, Artificial Sequence
  Description of Artificial Sequence: Synthetic oligonucleotide
aaagaaauuuagaguucuc

SEQ ID NO: 2561739 - RNA, 19 nt, Artificial Sequence
  Description of Artificial Sequence: Synthetic oligonucleotide
aguagccacuuucaaauga

SEQ ID NO: 2561740 - RNA, 19 nt, Artificial Sequence
  Description of Artificial Sequence: Synthetic oligonucleotide
aaaagcagaauuagaaaua

SEQ ID NO: 2561741 - RNA, 19 nt, Artificial Sequence
  Description of Artificial Sequence: Synthetic oligonucleotide
acaaaguagccauuuuaca

SEQ ID NO: 2561742 - RNA, 19 nt, Artificial Sequence
  Description of Artificial Sequence: Synthetic oligonucleotide
aaacagaacaguacugaca

SEQ ID NO: 2561743 - RNA, 19 nt, Artificial Sequence
  Description of Artificial Sequence: Synthetic oligonucleotide
ucuguagguucaaggcugg

SEQ ID NO: 2561744 - RNA, 19 nt, Artificial Sequence
  Description of Artificial Sequence: Synthetic oligonucleotide
aaauuagguuaucggggcu

SEQ ID NO: 2561745 - RNA, 19 nt, Artificial Sequence
  Description of Artificial Sequence: Synthetic oligonucleotide
uacaguguuuaguagccac

SEQ ID NO: 2561746 - RNA, 19 nt, Artificial Sequence
  Description of Artificial Sequence: Synthetic oligonucleotide
gaaagaaggaacgaaggaa

SEQ ID NO: 2561747 - RNA, 19 nt, Artificial Sequence
  Description of Artificial Sequence: Synthetic oligonucleotide
uucaaaugagacuccagua

SEQ ID NO: 2561748 - RNA, 19 nt, Artificial Sequence
  Description of Artificial Sequence: Synthetic oligonucleotide
uaauucgagugguauaaaa

SEQ ID NO: 2561749 - RNA, 19 nt, Artificial Sequence
  Description of Artificial Sequence: Synthetic oligonucleotide
uuucaugcaaaaguaaguu

SEQ ID NO: 2561750 - RNA, 19 nt, Artificial Sequence
  Description of Artificial Sequence: Synthetic oligonucleotide
ggcaggauuuucuaauucg

SEQ ID NO: 2561751 - RNA, 19 nt, Artificial Sequence
  Description of Artificial Sequence: Synthetic oligonucleotide
uacugacagaugcaaacac

SEQ ID NO: 2561752 - RNA, 19 nt, Artificial Sequence
  Description of Artificial Sequence: Synthetic oligonucleotide
uaaagcuacaagugaggcu

SEQ ID NO: 2561753 - RNA, 19 nt, Artificial Sequence
  Description of Artificial Sequence: Synthetic oligonucleotide
agucacgugugcuuuaaca

SEQ ID NO: 2561754 - RNA, 19 nt, Artificial Sequence
  Description of Artificial Sequence: Synthetic oligonucleotide
agaauauaagaacguuugu

SEQ ID NO: 2561755 - RNA, 19 nt, Artificial Sequence
  Description of Artificial Sequence: Synthetic oligonucleotide
cuccaguacaaacagaaca

SEQ ID NO: 2561756 - RNA, 19 nt, Artificial Sequence
  Description of Artificial Sequence: Synthetic oligonucleotide
aauuagaaauagaaaugaa

SEQ ID NO: 2561757 - RNA, 19 nt, Artificial Sequence
  Description of Artificial Sequence: Synthetic oligonucleotide
acguuuguaaaauauuaua

SEQ ID NO: 2561758 - RNA, 19 nt, Artificial Sequence
  Description of Artificial Sequence: Synthetic oligonucleotide
gaaacauuuaaagcuacaa

SEQ ID NO: 2561759 - RNA, 19 nt, Artificial Sequence
  Description of Artificial Sequence: Synthetic oligonucleotide
agaaagaaauuuagaguuc

SEQ ID NO: 2561760 - RNA, 19 nt, Artificial Sequence
  Description of Artificial Sequence: Synthetic oligonucleotide
gaugcaaacacagucacgu

SEQ ID NO: 2561761 - RNA, 19 nt, Artificial Sequence
  Description of Artificial Sequence: Synthetic oligonucleotide
gaauauaagaacguuugua

SEQ ID NO: 2561762 - RNA, 19 nt, Artificial Sequence
  Description of Artificial Sequence: Synthetic oligonucleotide
uggaaacauuuaaagcuac

SEQ ID NO: 2561763 - RNA, 19 nt, Artificial Sequence
  Description of Artificial Sequence: Synthetic oligonucleotide
guuacuaaaagcagaauua

SEQ ID NO: 2561764 - RNA, 19 nt, Artificial Sequence
  Description of Artificial Sequence: Synthetic oligonucleotide
cauuuaaagcuacaaguga

SEQ ID NO: 2561765 - RNA, 19 nt, Artificial Sequence
  Description of Artificial Sequence: Synthetic oligonucleotide
auaagaacguuuguaaaau

SEQ ID NO: 2561766 - RNA, 19 nt, Artificial Sequence
  Description of Artificial Sequence: Synthetic oligonucleotide
acaaacagaacaguacuga

SEQ ID NO: 2561767 - RNA, 19 nt, Artificial Sequence
  Description of Artificial Sequence: Synthetic oligonucleotide
uaacaacaguacauucaag

SEQ ID NO: 2561768 - RNA, 19 nt, Artificial Sequence
  Description of Artificial Sequence: Synthetic oligonucleotide
aaaguaaguuaaacaauau

SEQ ID NO: 2561769 - RNA, 19 nt, Artificial Sequence
  Description of Artificial Sequence: Synthetic oligonucleotide
aucagguucuaacaaaauu

SEQ ID NO: 2561770 - RNA, 19 nt, Artificial Sequence
  Description of Artificial Sequence: Synthetic oligonucleotide
uguacagcgaaacccuguc

SEQ ID NO: 2561771 - RNA, 19 nt, Artificial Sequence
  Description of Artificial Sequence: Synthetic oligonucleotide
auauguuacuaaaagcaga

SEQ ID NO: 2561772 - RNA, 19 nt, Artificial Sequence
  Description of Artificial Sequence: Synthetic oligonucleotide
cuaaaagcagaauuagaaa

SEQ ID NO: 2561773 - RNA, 19 nt, Artificial Sequence
  Description of Artificial Sequence: Synthetic oligonucleotide
cauggaauuagaaauauuu

SEQ ID NO: 2561774 - RNA, 19 nt, Artificial Sequence
  Description of Artificial Sequence: Synthetic oligonucleotide
uagaguucuccgaagcccu

SEQ ID NO: 2561775 - RNA, 19 nt, Artificial Sequence
  Description of Artificial Sequence: Synthetic oligonucleotide
caggauuuucuaauucgag

SEQ ID NO: 2561776 - RNA, 19 nt, Artificial Sequence
  Description of Artificial Sequence: Synthetic oligonucleotide
ucacgugugcuuuaacaac

SEQ ID NO: 2561777 - RNA, 19 nt, Artificial Sequence
  Description of Artificial Sequence: Synthetic oligonucleotide
acagccagggcuguuguac

SEQ ID NO: 2561778 - RNA, 19 nt, Artificial Sequence
  Description of Artificial Sequence: Synthetic oligonucleotide
aacguuuguaaaauauuau

SEQ ID NO: 2561779 - RNA, 19 nt, Artificial Sequence
  Description of Artificial Sequence: Synthetic oligonucleotide
guguuuaguagccacuuuc

SEQ ID NO: 2561780 - RNA, 19 nt, Artificial Sequence
  Description of Artificial Sequence: Synthetic oligonucleotide
auuucaugcaaaaguaagu

SEQ ID NO: 2561781 - RNA, 19 nt, Artificial Sequence
  Description of Artificial Sequence: Synthetic oligonucleotide
gaacguuuguaaaauauua

SEQ ID NO: 2561782 - RNA, 19 nt, Artificial Sequence
  Description of Artificial Sequence: Synthetic oligonucleotide
aggcaggauuuucuaauuc

SEQ ID NO: 2561783 - RNA, 19 nt, Artificial Sequence
  Description of Artificial Sequence: Synthetic oligonucleotide
uguagguucaaggcuggcc

SEQ ID NO: 2561784 - RNA, 19 nt, Artificial Sequence
  Description of Artificial Sequence: Synthetic oligonucleotide
ucgagugguauaaaagcua

SEQ ID NO: 2561785 - RNA, 19 nt, Artificial Sequence
  Description of Artificial Sequence: Synthetic oligonucleotide
uuucuaauucgagugguau

SEQ ID NO: 2561786 - RNA, 19 nt, Artificial Sequence
  Description of Artificial Sequence: Synthetic oligonucleotide
uucaugcaaaaguaaguua

SEQ ID NO: 2561787 - RNA, 19 nt, Artificial Sequence
  Description of Artificial Sequence: Synthetic oligonucleotide
agaaaugaacauguuuugu

SEQ ID NO: 2561788 - RNA, 19 nt, Artificial Sequence
  Description of Artificial Sequence: Synthetic oligonucleotide
auuuucuaauucgaguggu

SEQ ID NO: 2561789 - RNA, 19 nt, Artificial Sequence
  Description of Artificial Sequence: Synthetic oligonucleotide
cuacaacgugaguucaagg

SEQ ID NO: 2561790 - RNA, 19 nt, Artificial Sequence
  Description of Artificial Sequence: Synthetic oligonucleotide
aaguuaaauuucaugcaaa

SEQ ID NO: 2561791 - RNA, 19 nt, Artificial Sequence
  Description of Artificial Sequence: Synthetic oligonucleotide
acauguuuuguaaucuuug

SEQ ID NO: 2561792 - RNA, 19 nt, Artificial Sequence
  Description of Artificial Sequence: Synthetic oligonucleotide
uucuccgaagcccuuguaa

SEQ ID NO: 2561793 - RNA, 19 nt, Artificial Sequence
  Description of Artificial Sequence: Synthetic oligonucleotide
gcuggccuagucuacaacg

SEQ ID NO: 2561794 - RNA, 19 nt, Artificial Sequence
  Description of Artificial Sequence: Synthetic oligonucleotide
aacgugaguucaaggacag

SEQ ID NO: 2561795 - RNA, 19 nt, Artificial Sequence
  Description of Artificial Sequence: Synthetic oligonucleotide
caaaugagacuccaguaca

SEQ ID NO: 2561796 - RNA, 19 nt, Artificial Sequence
  Description of Artificial Sequence: Synthetic oligonucleotide
gacuccaguacaaacagaa

SEQ ID NO: 2561797 - RNA, 19 nt, Artificial Sequence
  Description of Artificial Sequence: Synthetic oligonucleotide
gaaagaaauuuagaguucu

SEQ ID NO: 2561798 - RNA, 19 nt, Artificial Sequence
  Description of Artificial Sequence: Synthetic oligonucleotide
auggcaggcagauuucugu

SEQ ID NO: 2561799 - RNA, 19 nt, Artificial Sequence
  Description of Artificial Sequence: Synthetic oligonucleotide
aaaugucucuguauaaaua

SEQ ID NO: 2561800 - RNA, 19 nt, Artificial Sequence
  Description of Artificial Sequence: Synthetic oligonucleotide
uugaagcagcacuccagag

SEQ ID NO: 2561801 - RNA, 19 nt, Artificial Sequence
  Description of Artificial Sequence: Synthetic oligonucleotide
cagaugcaaacacagucac

SEQ ID NO: 2561802 - RNA, 19 nt, Artificial Sequence
  Description of Artificial Sequence: Synthetic oligonucleotide
ucaaggcuggccuagucua

SEQ ID NO: 2561803 - RNA, 19 nt, Artificial Sequence
  Description of Artificial Sequence: Synthetic oligonucleotide
uuuucuaauucgaguggua

SEQ ID NO: 2561804 - RNA, 19 nt, Artificial Sequence
  Description of Artificial Sequence: Synthetic oligonucleotide
guagccacuuucaaaugag

SEQ ID NO: 2561805 - RNA, 19 nt, Artificial Sequence
  Description of Artificial Sequence: Synthetic oligonucleotide
auucagaauauaagaacgu

SEQ ID NO: 2561806 - RNA, 19 nt, Artificial Sequence
  Description of Artificial Sequence: Synthetic oligonucleotide
uuguacagcgaaacccugu

SEQ ID NO: 2561807 - RNA, 19 nt, Artificial Sequence
  Description of Artificial Sequence: Synthetic oligonucleotide
aacacaaaguagccauuuu

SEQ ID NO: 2561808 - RNA, 19 nt, Artificial Sequence
  Description of Artificial Sequence: Synthetic oligonucleotide
uucagaauauaagaacguu

SEQ ID NO: 2561809 - RNA, 19 nt, Artificial Sequence
  Description of Artificial Sequence: Synthetic oligonucleotide
acagaugcaaacacaguca

SEQ ID NO: 2561810 - RNA, 19 nt, Artificial Sequence
  Description of Artificial Sequence: Synthetic oligonucleotide
gguucuaacaaaauuaggu

SEQ ID NO: 2561811 - RNA, 19 nt, Artificial Sequence
  Description of Artificial Sequence: Synthetic oligonucleotide
aacauguuuuguaaucuuu

SEQ ID NO: 2561812 - RNA, 19 nt, Artificial Sequence
  Description of Artificial Sequence: Synthetic oligonucleotide
aaacacagucacgugugcu

SEQ ID NO: 2561813 - RNA, 19 nt, Artificial Sequence
  Description of Artificial Sequence: Synthetic oligonucleotide
uucuaauucgagugguaua

SEQ ID NO: 2561814 - RNA, 19 nt, Artificial Sequence
  Description of Artificial Sequence: Synthetic oligonucleotide
aacaguacugacagaugca

SEQ ID NO: 2561815 - RNA, 19 nt, Artificial Sequence
  Description of Artificial Sequence: Synthetic oligonucleotide
aaggcaggauuuucuaauu

SEQ ID NO: 2561816 - RNA, 19 nt, Artificial Sequence
  Description of Artificial Sequence: Synthetic oligonucleotide
uaucagguucuaacaaaau

SEQ ID NO: 2561817 - RNA, 19 nt, Artificial Sequence
  Description of Artificial Sequence: Synthetic oligonucleotide
ugacagaugcaaacacagu

SEQ ID NO: 2561818 - RNA, 19 nt, Artificial Sequence
  Description of Artificial Sequence: Synthetic oligonucleotide
uaagaacguuuguaaaaua

SEQ ID NO: 2561819 - RNA, 19 nt, Artificial Sequence
  Description of Artificial Sequence: Synthetic oligonucleotide
agguucuaacaaaauuagg

SEQ ID NO: 2561820 - RNA, 19 nt, Artificial Sequence
  Description of Artificial Sequence: Synthetic oligonucleotide
cuguauaaauaaauggagu

SEQ ID NO: 2561821 - RNA, 19 nt, Artificial Sequence
  Description of Artificial Sequence: Synthetic oligonucleotide
uucaaggcaggauuuucua

SEQ ID NO: 2561822 - RNA, 19 nt, Artificial Sequence
  Description of Artificial Sequence: Synthetic oligonucleotide
uccagaggcaauggcaggc

SEQ ID NO: 2561823 - RNA, 19 nt, Artificial Sequence
  Description of Artificial Sequence: Synthetic oligonucleotide
caacgugaguucaaggaca

SEQ ID NO: 2561824 - RNA, 19 nt, Artificial Sequence
  Description of Artificial Sequence: Synthetic oligonucleotide
uuacaagguauaguacagu

SEQ ID NO: 2561825 - RNA, 19 nt, Artificial Sequence
  Description of Artificial Sequence: Synthetic oligonucleotide
uggccuagucuacaacgug

SEQ ID NO: 2561826 - RNA, 19 nt, Artificial Sequence
  Description of Artificial Sequence: Synthetic oligonucleotide
aguacauucaaggcaggau

SEQ ID NO: 2561827 - RNA, 19 nt, Artificial Sequence
  Description of Artificial Sequence: Synthetic oligonucleotide
guucuaacaaaauuagguu

SEQ ID NO: 2561828 - RNA, 19 nt, Artificial Sequence
  Description of Artificial Sequence: Synthetic oligonucleotide
agguauaguacaguguuua

SEQ ID NO: 2561829 - RNA, 19 nt, Artificial Sequence
  Description of Artificial Sequence: Synthetic oligonucleotide
gucacgugugcuuuaacaa

SEQ ID NO: 2561830 - RNA, 19 nt, Artificial Sequence
  Description of Artificial Sequence: Synthetic oligonucleotide
gguauaguacaguguuuag

SEQ ID NO: 2561831 - RNA, 19 nt, Artificial Sequence
  Description of Artificial Sequence: Synthetic oligonucleotide
ucauggaauuagaaauauu

SEQ ID NO: 2561832 - RNA, 19 nt, Artificial Sequence
  Description of Artificial Sequence: Synthetic oligonucleotide
cacgugugcuuuaacaaca

SEQ ID NO: 2561833 - RNA, 19 nt, Artificial Sequence
  Description of Artificial Sequence: Synthetic oligonucleotide
aauggcaggcagauuucug

SEQ ID NO: 2561834 - RNA, 19 nt, Artificial Sequence
  Description of Artificial Sequence: Synthetic oligonucleotide
uagccacuuucaaaugaga

SEQ ID NO: 2561835 - RNA, 19 nt, Artificial Sequence
  Description of Artificial Sequence: Synthetic oligonucleotide
gugcuuuaacaacaguaca

SEQ ID NO: 2561836 - RNA, 19 nt, Artificial Sequence
  Description of Artificial Sequence: Synthetic oligonucleotide
ccacuuucaaaugagacuc

SEQ ID NO: 2561837 - RNA, 19 nt, Artificial Sequence
  Description of Artificial Sequence: Synthetic oligonucleotide
acuuucaaaugagacucca

SEQ ID NO: 2561838 - RNA, 19 nt, Artificial Sequence
  Description of Artificial Sequence: Synthetic oligonucleotide
cuggaaaagaaagaaggaa

SEQ ID NO: 2561839 - RNA, 19 nt, Artificial Sequence
  Description of Artificial Sequence: Synthetic oligonucleotide
cuugaagcagcacuccaga

SEQ ID NO: 2561840 - RNA, 19 nt, Artificial Sequence
  Description of Artificial Sequence: Synthetic oligonucleotide
cuggaaacauuuaaagcua

SEQ ID NO: 2561841 - RNA, 19 nt, Artificial Sequence
  Description of Artificial Sequence: Synthetic oligonucleotide
uaucggggcucuugaagca

SEQ ID NO: 2561842 - RNA, 19 nt, Artificial Sequence
  Description of Artificial Sequence: Synthetic oligonucleotide
cacuuucaaaugagacucc

SEQ ID NO: 2561843 - RNA, 19 nt, Artificial Sequence
  Description of Artificial Sequence: Synthetic oligonucleotide
uagguuaucggggcucuug

SEQ ID NO: 2561844 - RNA, 19 nt, Artificial Sequence
  Description of Artificial Sequence: Synthetic oligonucleotide
auucaaggcaggauuuucu

SEQ ID NO: 2561845 - RNA, 19 nt, Artificial Sequence
  Description of Artificial Sequence: Synthetic oligonucleotide
acaagguauaguacagugu

SEQ ID NO: 2561846 - RNA, 19 nt, Artificial Sequence
  Description of Artificial Sequence: Synthetic oligonucleotide
guagguucaaggcuggccu

SEQ ID NO: 2561847 - RNA, 19 nt, Artificial Sequence
  Description of Artificial Sequence: Synthetic oligonucleotide
acaguacugacagaugcaa

SEQ ID NO: 2561848 - RNA, 19 nt, Artificial Sequence
  Description of Artificial Sequence: Synthetic oligonucleotide
caaacacagucacgugugc

SEQ ID NO: 2561849 - RNA, 19 nt, Artificial Sequence
  Description of Artificial Sequence: Synthetic oligonucleotide
acugacagaugcaaacaca

SEQ ID NO: 2561850 - RNA, 19 nt, Artificial Sequence
  Description of Artificial Sequence: Synthetic oligonucleotide
agaacguuuguaaaauauu

SEQ ID NO: 2561851 - RNA, 19 nt, Artificial Sequence
  Description of Artificial Sequence: Synthetic oligonucleotide
acuccaguacaaacagaac

SEQ ID NO: 2561852 - RNA, 19 nt, Artificial Sequence
  Description of Artificial Sequence: Synthetic oligonucleotide
guaucagguucuaacaaaa

SEQ ID NO: 2561853 - RNA, 19 nt, Artificial Sequence
  Description of Artificial Sequence: Synthetic oligonucleotide
agaugcaaacacagucacg

SEQ ID NO: 2561854 - RNA, 19 nt, Artificial Sequence
  Description of Artificial Sequence: Synthetic oligonucleotide
caagguauaguacaguguu

SEQ ID NO: 2561855 - RNA, 19 nt, Artificial Sequence
  Description of Artificial Sequence: Synthetic oligonucleotide
agguuaucggggcucuuga

SEQ ID NO: 2561856 - RNA, 19 nt, Artificial Sequence
  Description of Artificial Sequence: Synthetic oligonucleotide
aagcagaauuagaaauaga

SEQ ID NO: 2561857 - RNA, 19 nt, Artificial Sequence
  Description of Artificial Sequence: Synthetic oligonucleotide
agcacuccagaggcaaugg

SEQ ID NO: 2561858 - RNA, 19 nt, Artificial Sequence
  Description of Artificial Sequence: Synthetic oligonucleotide
guaaguuaaacaauauguu

SEQ ID NO: 2561859 - RNA, 19 nt, Artificial Sequence
  Description of Artificial Sequence: Synthetic oligonucleotide
caugcaaaaguaaguuaaa

SEQ ID NO: 2561860 - RNA, 19 nt, Artificial Sequence
  Description of Artificial Sequence: Synthetic oligonucleotide
guuuaguagccacuuucaa

SEQ ID NO: 2561861 - RNA, 19 nt, Artificial Sequence
  Description of Artificial Sequence: Synthetic oligonucleotide
caguacaaacagaacagua

SEQ ID NO: 2561862 - RNA, 19 nt, Artificial Sequence
  Description of Artificial Sequence: Synthetic oligonucleotide
aguucuccgaagcccuugu

SEQ ID NO: 2561863 - RNA, 19 nt, Artificial Sequence
  Description of Artificial Sequence: Synthetic oligonucleotide
guuaaacaauauguuacua

SEQ ID NO: 2561864 - RNA, 19 nt, Artificial Sequence
  Description of Artificial Sequence: Synthetic oligonucleotide
auuagguuaucggggcucu

SEQ ID NO: 2561865 - RNA, 19 nt, Artificial Sequence
  Description of Artificial Sequence: Synthetic oligonucleotide
cguuuguaaaauauuauaa

SEQ ID NO: 2561866 - RNA, 19 nt, Artificial Sequence
  Description of Artificial Sequence: Synthetic oligonucleotide
ucggggcucuugaagcagc

SEQ ID NO: 2561867 - RNA, 19 nt, Artificial Sequence
  Description of Artificial Sequence: Synthetic oligonucleotide
augcaaacacagucacgug

SEQ ID NO: 2561868 - RNA, 19 nt, Artificial Sequence
  Description of Artificial Sequence: Synthetic oligonucleotide
agaacaguacugacagaug

SEQ ID NO: 2561869 - RNA, 19 nt, Artificial Sequence
  Description of Artificial Sequence: Synthetic oligonucleotide
guauaaauaaauggaguuu

SEQ ID NO: 2561870 - RNA, 19 nt, Artificial Sequence
  Description of Artificial Sequence: Synthetic oligonucleotide
guacugacagaugcaaaca

SEQ ID NO: 2561871 - RNA, 19 nt, Artificial Sequence
  Description of Artificial Sequence: Synthetic oligonucleotide
gcaaacacagucacgugug

SEQ ID NO: 2561872 - RNA, 19 nt, Artificial Sequence
  Description of Artificial Sequence: Synthetic oligonucleotide
gcuguuguacagcgaaacc

SEQ ID NO: 2561873 - RNA, 19 nt, Artificial Sequence
  Description of Artificial Sequence: Synthetic oligonucleotide
aguguuuaguagccacuuu

SEQ ID NO: 2561874 - RNA, 19 nt, Artificial Sequence
  Description of Artificial Sequence: Synthetic oligonucleotide
gguauaaaagcuaacuuuu

SEQ ID NO: 2561875 - RNA, 19 nt, Artificial Sequence
  Description of Artificial Sequence: Synthetic oligonucleotide
ggcaucuggaaacauuuaa

SEQ ID NO: 2561876 - RNA, 19 nt, Artificial Sequence
  Description of Artificial Sequence: Synthetic oligonucleotide
acaguguuuaguagccacu

SEQ ID NO: 2561877 - RNA, 19 nt, Artificial Sequence
  Description of Artificial Sequence: Synthetic oligonucleotide
guauaguacaguguuuagu

SEQ ID NO: 2561878 - RNA, 19 nt, Artificial Sequence
  Description of Artificial Sequence: Synthetic oligonucleotide
gugguauaaaagcuaacuu

SEQ ID NO: 2561879 - RNA, 19 nt, Artificial Sequence
  Description of Artificial Sequence: Synthetic oligonucleotide
aagguauaguacaguguuu

SEQ ID NO: 2561880 - RNA, 19 nt, Artificial Sequence
  Description of Artificial Sequence: Synthetic oligonucleotide
guuguacagcgaaacccug

SEQ ID NO: 2561881 - RNA, 19 nt, Artificial Sequence
  Description of Artificial Sequence: Synthetic oligonucleotide
gccauuuuacagcagcuaa

SEQ ID NO: 2561882 - RNA, 19 nt, Artificial Sequence
  Description of Artificial Sequence: Synthetic oligonucleotide
agguucaaggcuggccuag

SEQ ID NO: 2561883 - RNA, 19 nt, Artificial Sequence
  Description of Artificial Sequence: Synthetic oligonucleotide
ucuuuguaucagguucuaa

SEQ ID NO: 2561884 - RNA, 19 nt, Artificial Sequence
  Description of Artificial Sequence: Synthetic oligonucleotide
gcagaauuagaaauagaaa

SEQ ID NO: 2561885 - RNA, 19 nt, Artificial Sequence
  Description of Artificial Sequence: Synthetic oligonucleotide
gagugguauaaaagcuaac

SEQ ID NO: 2561886 - RNA, 19 nt, Artificial Sequence
  Description of Artificial Sequence: Synthetic oligonucleotide
cagaacaguacugacagau

SEQ ID NO: 2561887 - RNA, 19 nt, Artificial Sequence
  Description of Artificial Sequence: Synthetic oligonucleotide
ggaauuagaaauauuuauu

SEQ ID NO: 2561888 - RNA, 19 nt, Artificial Sequence
  Description of Artificial Sequence: Synthetic oligonucleotide
ggcaauggcaggcagauuu

SEQ ID NO: 2561889 - RNA, 19 nt, Artificial Sequence
  Description of Artificial Sequence: Synthetic oligonucleotide
caaggcaggauuuucuaau

SEQ ID NO: 2561890 - RNA, 19 nt, Artificial Sequence
  Description of Artificial Sequence: Synthetic oligonucleotide
gaacauguuuuguaaucuu

SEQ ID NO: 2561891 - RNA, 19 nt, Artificial Sequence
  Description of Artificial Sequence: Synthetic oligonucleotide
acaguacauucaaggcagg

SEQ ID NO: 2561892 - RNA, 19 nt, Artificial Sequence
  Description of Artificial Sequence: Synthetic oligonucleotide
agcagcacuccagaggcaa

SEQ ID NO: 2561893 - RNA, 19 nt, Artificial Sequence
  Description of Artificial Sequence: Synthetic oligonucleotide
cagaggcaauggcaggcag

SEQ ID NO: 2561894 - RNA, 19 nt, Artificial Sequence
  Description of Artificial Sequence: Synthetic oligonucleotide
gaguucuccgaagcccuug

SEQ ID NO: 2561895 - RNA, 19 nt, Artificial Sequence
  Description of Artificial Sequence: Synthetic oligonucleotide
acgugugcuuuaacaacag

SEQ ID NO: 2561896 - RNA, 19 nt, Artificial Sequence
  Description of Artificial Sequence: Synthetic oligonucleotide
cucuugaagcagcacucca

SEQ ID NO: 2561897 - RNA, 19 nt, Artificial Sequence
  Description of Artificial Sequence: Synthetic oligonucleotide
augucucuguauaaauaaa

SEQ ID NO: 2561898 - RNA, 19 nt, Artificial Sequence
  Description of Artificial Sequence: Synthetic oligonucleotide
ggcuguuguacagcgaaac

SEQ ID NO: 2561899 - RNA, 19 nt, Artificial Sequence
  Description of Artificial Sequence: Synthetic oligonucleotide
aucggggcucuugaagcag

SEQ ID NO: 2561900 - RNA, 19 nt, Artificial Sequence
  Description of Artificial Sequence: Synthetic oligonucleotide
acgugaguucaaggacagc

SEQ ID NO: 2561901 - RNA, 19 nt, Artificial Sequence
  Description of Artificial Sequence: Synthetic oligonucleotide
auguuacuaaaagcagaau

SEQ ID NO: 2561902 - RNA, 19 nt, Artificial Sequence
  Description of Artificial Sequence: Synthetic oligonucleotide
uagguucaaggcuggccua

SEQ ID NO: 2561903 - RNA, 19 nt, Artificial Sequence
  Description of Artificial Sequence: Synthetic oligonucleotide
auaacacaaaguagccauu

SEQ ID NO: 2561904 - RNA, 19 nt, Artificial Sequence
  Description of Artificial Sequence: Synthetic oligonucleotide
aguagccauuuuacagcag

SEQ ID NO: 2561905 - RNA, 19 nt, Artificial Sequence
  Description of Artificial Sequence: Synthetic oligonucleotide
gucauggaauuagaaauau

SEQ ID NO: 2561906 - RNA, 19 nt, Artificial Sequence
  Description of Artificial Sequence: Synthetic oligonucleotide
ggaaacauuuaaagcuaca

SEQ ID NO: 2561907 - RNA, 19 nt, Artificial Sequence
  Description of Artificial Sequence: Synthetic oligonucleotide
gcaggauuuucuaauucga

SEQ ID NO: 2561908 - RNA, 19 nt, Artificial Sequence
  Description of Artificial Sequence: Synthetic oligonucleotide
agccauuuuacagcagcua

SEQ ID NO: 2561909 - RNA, 19 nt, Artificial Sequence
  Description of Artificial Sequence: Synthetic oligonucleotide
cagcacuccagaggcaaug

SEQ ID NO: 2561910 - RNA, 19 nt, Artificial Sequence
  Description of Artificial Sequence: Synthetic oligonucleotide
ccugucuggaaaagaaaga

SEQ ID NO: 2561911 - RNA, 19 nt, Artificial Sequence
  Description of Artificial Sequence: Synthetic oligonucleotide
acacagucacgugugcuuu

SEQ ID NO: 2561912 - RNA, 19 nt, Artificial Sequence
  Description of Artificial Sequence: Synthetic oligonucleotide
acagucacgugugcuuuaa

SEQ ID NO: 2561913 - RNA, 19 nt, Artificial Sequence
  Description of Artificial Sequence: Synthetic oligonucleotide
guacaguguuuaguagcca

SEQ ID NO: 2561914 - RNA, 19 nt, Artificial Sequence
  Description of Artificial Sequence: Synthetic oligonucleotide
cuggccuagucuacaacgu

SEQ ID NO: 2561915 - RNA, 19 nt, Artificial Sequence
  Description of Artificial Sequence: Synthetic oligonucleotide
gcucuugaagcagcacucc

SEQ ID NO: 2561916 - RNA, 19 nt, Artificial Sequence
  Description of Artificial Sequence: Synthetic oligonucleotide
cuguagguucaaggcuggc

SEQ ID NO: 2561917 - RNA, 19 nt, Artificial Sequence
  Description of Artificial Sequence: Synthetic oligonucleotide
aucuuuguaucagguucua

SEQ ID NO: 2561918 - RNA, 19 nt, Artificial Sequence
  Description of Artificial Sequence: Synthetic oligonucleotide
cuaauucgagugguauaaa

SEQ ID NO: 2561919 - RNA, 19 nt, Artificial Sequence
  Description of Artificial Sequence: Synthetic oligonucleotide
gcacuccagaggcaauggc

SEQ ID NO: 2561920 - RNA, 19 nt, Artificial Sequence
  Description of Artificial Sequence: Synthetic oligonucleotide
cagucacgugugcuuuaac

SEQ ID NO: 2561921 - RNA, 19 nt, Artificial Sequence
  Description of Artificial Sequence: Synthetic oligonucleotide
aagcuacaagugaggcuaa

SEQ ID NO: 2561922 - RNA, 19 nt, Artificial Sequence
  Description of Artificial Sequence: Synthetic oligonucleotide
gggcucuugaagcagcacu

SEQ ID NO: 2561923 - RNA, 19 nt, Artificial Sequence
  Description of Artificial Sequence: Synthetic oligonucleotide
cgagugguauaaaagcuaa

SEQ ID NO: 2561924 - RNA, 19 nt, Artificial Sequence
  Description of Artificial Sequence: Synthetic oligonucleotide
aagcagcacuccagaggca

SEQ ID NO: 2561925 - RNA, 19 nt, Artificial Sequence
  Description of Artificial Sequence: Synthetic oligonucleotide
gcuuuaacaacaguacauu

SEQ ID NO: 2561926 - RNA, 19 nt, Artificial Sequence
  Description of Artificial Sequence: Synthetic oligonucleotide
gcuacaagugaggcuaaaa

SEQ ID NO: 2561927 - RNA, 19 nt, Artificial Sequence
  Description of Artificial Sequence: Synthetic oligonucleotide
gucuacaacgugaguucaa

SEQ ID NO: 2561928 - RNA, 19 nt, Artificial Sequence
  Description of Artificial Sequence: Synthetic oligonucleotide
caggcagauuucuguaggu

SEQ ID NO: 2561929 - RNA, 19 nt, Artificial Sequence
  Description of Artificial Sequence: Synthetic oligonucleotide
agcuacaagugaggcuaaa

SEQ ID NO: 2561930 - RNA, 19 nt, Artificial Sequence
  Description of Artificial Sequence: Synthetic oligonucleotide
gguuaucggggcucuugaa

SEQ ID NO: 2561931 - RNA, 19 nt, Artificial Sequence
  Description of Artificial Sequence: Synthetic oligonucleotide
ggcuggccuagucuacaac

SEQ ID NO: 2561932 - RNA, 19 nt, Artificial Sequence
  Description of Artificial Sequence: Synthetic oligonucleotide
uuagguuaucggggcucuu

SEQ ID NO: 2561933 - RNA, 19 nt, Artificial Sequence
  Description of Artificial Sequence: Synthetic oligonucleotide
gacagccagggcuguugua

SEQ ID NO: 2561934 - RNA, 19 nt, Artificial Sequence
  Description of Artificial Sequence: Synthetic oligonucleotide
aggcaucuggaaacauuua

SEQ ID NO: 2561935 - RNA, 19 nt, Artificial Sequence
  Description of Artificial Sequence: Synthetic oligonucleotide
guucuccgaagcccuugua

SEQ ID NO: 2561936 - RNA, 19 nt, Artificial Sequence
  Description of Artificial Sequence: Synthetic oligonucleotide
caguguuuaguagccacuu

SEQ ID NO: 2561937 - RNA, 19 nt, Artificial Sequence
  Description of Artificial Sequence: Synthetic oligonucleotide
agaguucuccgaagcccuu

SEQ ID NO: 2561938 - RNA, 19 nt, Artificial Sequence
  Description of Artificial Sequence: Synthetic oligonucleotide
ggggcucuugaagcagcac

SEQ ID NO: 2561939 - RNA, 19 nt, Artificial Sequence
  Description of Artificial Sequence: Synthetic oligonucleotide
ccaguacaaacagaacagu

SEQ ID NO: 2561940 - RNA, 19 nt, Artificial Sequence
  Description of Artificial Sequence: Synthetic oligonucleotide
ccagaggcaauggcaggca

SEQ ID NO: 2561941 - RNA, 19 nt, Artificial Sequence
  Description of Artificial Sequence: Synthetic oligonucleotide
aggcaauggcaggcagauu

SEQ ID NO: 2561942 - RNA, 19 nt, Artificial Sequence
  Description of Artificial Sequence: Synthetic oligonucleotide
gggcuguuguacagcgaaa

SEQ ID NO: 2561943 - RNA, 19 nt, Artificial Sequence
  Description of Artificial Sequence: Synthetic oligonucleotide
cgugugcuuuaacaacagu

SEQ ID NO: 2561944 - RNA, 19 nt, Artificial Sequence
  Description of Artificial Sequence: Synthetic oligonucleotide
aaucauuguacauaaaauc

SEQ ID NO: 2561945 - RNA, 19 nt, Artificial Sequence
  Description of Artificial Sequence: Synthetic oligonucleotide
aaauguuuacauuuuacuc

SEQ ID NO: 2561946 - RNA, 19 nt, Artificial Sequence
  Description of Artificial Sequence: Synthetic oligonucleotide
aaaaugagaguauaaauca

SEQ ID NO: 2561947 - RNA, 19 nt, Artificial Sequence
  Description of Artificial Sequence: Synthetic oligonucleotide
aagguuugcguucucaucc

SEQ ID NO: 2561948 - RNA, 19 nt, Artificial Sequence
  Description of Artificial Sequence: Synthetic oligonucleotide
aaauaguuaauauauauuu

SEQ ID NO: 2561949 - RNA, 19 nt, Artificial Sequence
  Description of Artificial Sequence: Synthetic oligonucleotide
auuaccaucagauaacagg

SEQ ID NO: 2561950 - RNA, 19 nt, Artificial Sequence
  Description of Artificial Sequence: Synthetic oligonucleotide
aauguuuacauuuuacucu

SEQ ID NO: 2561951 - RNA, 19 nt, Artificial Sequence
  Description of Artificial Sequence: Synthetic oligonucleotide
auaguuaauauauauuuuc

SEQ ID NO: 2561952 - RNA, 19 nt, Artificial Sequence
  Description of Artificial Sequence: Synthetic oligonucleotide
uauaauaaaauaaauguuu

SEQ ID NO: 2561953 - RNA, 19 nt, Artificial Sequence
  Description of Artificial Sequence: Synthetic oligonucleotide
ucauccagaaguuuaaccg

SEQ ID NO: 2561954 - RNA, 19 nt, Artificial Sequence
  Description of Artificial Sequence: Synthetic oligonucleotide
aaggaacuaaaucucuugc

SEQ ID NO: 2561955 - RNA, 19 nt, Artificial Sequence
  Description of Artificial Sequence: Synthetic oligonucleotide
uuagauuaccaucagauaa

SEQ ID NO: 2561956 - RNA, 19 nt, Artificial Sequence
  Description of Artificial Sequence: Synthetic oligonucleotide
uagaaauuaggcaugaaac

SEQ ID NO: 2561957 - RNA, 19 nt, Artificial Sequence
  Description of Artificial Sequence: Synthetic oligonucleotide
uuuucuagaaauuaggcau

SEQ ID NO: 2561958 - RNA, 19 nt, Artificial Sequence
  Description of Artificial Sequence: Synthetic oligonucleotide
aggaaagucacacaugugg

SEQ ID NO: 2561959 - RNA, 19 nt, Artificial Sequence
  Description of Artificial Sequence: Synthetic oligonucleotide
ucagauaacaggaaaguca

SEQ ID NO: 2561960 - RNA, 19 nt, Artificial Sequence
  Description of Artificial Sequence: Synthetic oligonucleotide
aacauaaaacaucuuauaa

SEQ ID NO: 2561961 - RNA, 19 nt, Artificial Sequence
  Description of Artificial Sequence: Synthetic oligonucleotide
uuacauuuuacucuuagau

SEQ ID NO: 2561962 - RNA, 19 nt, Artificial Sequence
  Description of Artificial Sequence: Synthetic oligonucleotide
ucuuagauuaccaucagau

SEQ ID NO: 2561963 - RNA, 19 nt, Artificial Sequence
  Description of Artificial Sequence: Synthetic oligonucleotide
ugaaacauaaaacaucuua

SEQ ID NO: 2561964 - RNA, 19 nt, Artificial Sequence
  Description of Artificial Sequence: Synthetic oligonucleotide
uuuacaguuucguacaggc

SEQ ID NO: 2561965 - RNA, 19 nt, Artificial Sequence
  Description of Artificial Sequence: Synthetic oligonucleotide
caaaaugagaguauaaauc

SEQ ID NO: 2561966 - RNA, 19 nt, Artificial Sequence
  Description of Artificial Sequence: Synthetic oligonucleotide
aaauuaauguccgcagccc

SEQ ID NO: 2561967 - RNA, 19 nt, Artificial Sequence
  Description of Artificial Sequence: Synthetic oligonucleotide
uacaguuucguacaggcca

SEQ ID NO: 2561968 - RNA, 19 nt, Artificial Sequence
  Description of Artificial Sequence: Synthetic oligonucleotide
uuaccaucagauaacagga

SEQ ID NO: 2561969 - RNA, 19 nt, Artificial Sequence
  Description of Artificial Sequence: Synthetic oligonucleotide
aaucaaaauaguuaauaua

SEQ ID NO: 2561970 - RNA, 19 nt, Artificial Sequence
  Description of Artificial Sequence: Synthetic oligonucleotide
aacacaaauuaauguccgc

SEQ ID NO: 2561971 - RNA, 19 nt, Artificial Sequence
  Description of Artificial Sequence: Synthetic oligonucleotide
uacucuuagauuaccauca

SEQ ID NO: 2561972 - RNA, 19 nt, Artificial Sequence
  Description of Artificial Sequence: Synthetic oligonucleotide
acauuuuacucuuagauua

SEQ ID NO: 2561973 - RNA, 19 nt, Artificial Sequence
  Description of Artificial Sequence: Synthetic oligonucleotide
gaaacacaaauuaaugucc

SEQ ID NO: 2561974 - RNA, 19 nt, Artificial Sequence
  Description of Artificial Sequence: Synthetic oligonucleotide
uaugacaaggaacuaaauc

SEQ ID NO: 2561975 - RNA, 19 nt, Artificial Sequence
  Description of Artificial Sequence: Synthetic oligonucleotide
agaguauaaaucauuguac

SEQ ID NO: 2561976 - RNA, 19 nt, Artificial Sequence
  Description of Artificial Sequence: Synthetic oligonucleotide
acaucuuauaaauuuauau

SEQ ID NO: 2561977 - RNA, 19 nt, Artificial Sequence
  Description of Artificial Sequence: Synthetic oligonucleotide
cauuuucuagaaauuaggc

SEQ ID NO: 2561978 - RNA, 19 nt, Artificial Sequence
  Description of Artificial Sequence: Synthetic oligonucleotide
uuuguuccuguccacagag

SEQ ID NO: 2561979 - RNA, 19 nt, Artificial Sequence
  Description of Artificial Sequence: Synthetic oligonucleotide
aagauugggucuucuuccc

SEQ ID NO: 2561980 - RNA, 19 nt, Artificial Sequence
  Description of Artificial Sequence: Synthetic oligonucleotide
uaagauugggucuucuucc

SEQ ID NO: 2561981 - RNA, 19 nt, Artificial Sequence
  Description of Artificial Sequence: Synthetic oligonucleotide
aucaaaauaguuaauauau

SEQ ID NO: 2561982 - RNA, 19 nt, Artificial Sequence
  Description of Artificial Sequence: Synthetic oligonucleotide
auuuucuagaaauuaggca

SEQ ID NO: 2561983 - RNA, 19 nt, Artificial Sequence
  Description of Artificial Sequence: Synthetic oligonucleotide
ugcguucucauccagaagu

SEQ ID NO: 2561984 - RNA, 19 nt, Artificial Sequence
  Description of Artificial Sequence: Synthetic oligonucleotide
uacauaaaaucaaaauagu

SEQ ID NO: 2561985 - RNA, 19 nt, Artificial Sequence
  Description of Artificial Sequence: Synthetic oligonucleotide
aaacacaaauuaauguccg

SEQ ID NO: 2561986 - RNA, 19 nt, Artificial Sequence
  Description of Artificial Sequence: Synthetic oligonucleotide
aguggauuuggacuucgcc

SEQ ID NO: 2561987 - RNA, 19 nt, Artificial Sequence
  Description of Artificial Sequence: Synthetic oligonucleotide
uuuucuggcauuuucuaga

SEQ ID NO: 2561988 - RNA, 19 nt, Artificial Sequence
  Description of Artificial Sequence: Synthetic oligonucleotide
agaaauuaggcaugaaaca

SEQ ID NO: 2561989 - RNA, 19 nt, Artificial Sequence
  Description of Artificial Sequence: Synthetic oligonucleotide
gauaacaggaaagucacac

SEQ ID NO: 2561990 - RNA, 19 nt, Artificial Sequence
  Description of Artificial Sequence: Synthetic oligonucleotide
uggaaacacaaauuaaugu

SEQ ID NO: 2561991 - RNA, 19 nt, Artificial Sequence
  Description of Artificial Sequence: Synthetic oligonucleotide
ucuggcauuuucuagaaau

SEQ ID NO: 2561992 - RNA, 19 nt, Artificial Sequence
  Description of Artificial Sequence: Synthetic oligonucleotide
aacuaaaucucuugcugug

SEQ ID NO: 2561993 - RNA, 19 nt, Artificial Sequence
  Description of Artificial Sequence: Synthetic oligonucleotide
caaauuaauguccgcagcc

SEQ ID NO: 2561994 - RNA, 19 nt, Artificial Sequence
  Description of Artificial Sequence: Synthetic oligonucleotide
aaacauaaaacaucuuaua

SEQ ID NO: 2561995 - RNA, 19 nt, Artificial Sequence
  Description of Artificial Sequence: Synthetic oligonucleotide
uuucguacaggccaguccu

SEQ ID NO: 2561996 - RNA, 19 nt, Artificial Sequence
  Description of Artificial Sequence: Synthetic oligonucleotide
uguuccuguccacagaggc

SEQ ID NO: 2561997 - RNA, 19 nt, Artificial Sequence
  Description of Artificial Sequence: Synthetic oligonucleotide
acaggaaagucacacaugu

SEQ ID NO: 2561998 - RNA, 19 nt, Artificial Sequence
  Description of Artificial Sequence: Synthetic oligonucleotide
uuuuacucuuagauuacca

SEQ ID NO: 2561999 - RNA, 19 nt, Artificial Sequence
  Description of Artificial Sequence: Synthetic oligonucleotide
uuccuuuacaguuucguac

SEQ ID NO: 2562000 - RNA, 19 nt, Artificial Sequence
  Description of Artificial Sequence: Synthetic oligonucleotide
gaguauaaaucauuguaca

SEQ ID NO: 2562001 - RNA, 19 nt, Artificial Sequence
  Description of Artificial Sequence: Synthetic oligonucleotide
uuucuagaaauuaggcaug

SEQ ID NO: 2562002 - RNA, 19 nt, Artificial Sequence
  Description of Artificial Sequence: Synthetic oligonucleotide
agaaguuuaaccggaacag

SEQ ID NO: 2562003 - RNA, 19 nt, Artificial Sequence
  Description of Artificial Sequence: Synthetic oligonucleotide
aauuaauguccgcagcccu

SEQ ID NO: 2562004 - RNA, 19 nt, Artificial Sequence
  Description of Artificial Sequence: Synthetic oligonucleotide
gagaguauaaaucauugua

SEQ ID NO: 2562005 - RNA, 19 nt, Artificial Sequence
  Description of Artificial Sequence: Synthetic oligonucleotide
uaacaggaaagucacacau

SEQ ID NO: 2562006 - RNA, 19 nt, Artificial Sequence
  Description of Artificial Sequence: Synthetic oligonucleotide
aaaucauuguacauaaaau

SEQ ID NO: 2562007 - RNA, 19 nt, Artificial Sequence
  Description of Artificial Sequence: Synthetic oligonucleotide
cagauaacaggaaagucac

SEQ ID NO: 2562008 - RNA, 19 nt, Artificial Sequence
  Description of Artificial Sequence: Synthetic oligonucleotide
aucauuguacauaaaauca

SEQ ID NO: 2562009 - RNA, 19 nt, Artificial Sequence
  Description of Artificial Sequence: Synthetic oligonucleotide
augcucuccgcguucaugc

SEQ ID NO: 2562010 - RNA, 19 nt, Artificial Sequence
  Description of Artificial Sequence: Synthetic oligonucleotide
uuggggauagacaccacag

SEQ ID NO: 2562011 - RNA, 19 nt, Artificial Sequence
  Description of Artificial Sequence: Synthetic oligonucleotide
ucacuggaaacacaaauua

SEQ ID NO: 2562012 - RNA, 19 nt, Artificial Sequence
  Description of Artificial Sequence: Synthetic oligonucleotide
agcuuaugugcuuuauugg

SEQ ID NO: 2562013 - RNA, 19 nt, Artificial Sequence
  Description of Artificial Sequence: Synthetic oligonucleotide
aggcauauuccgcaaaguc

SEQ ID NO: 2562014 - RNA, 19 nt, Artificial Sequence
  Description of Artificial Sequence: Synthetic oligonucleotide
uuaugugcuuuauuggugu

SEQ ID NO: 2562015 - RNA, 19 nt, Artificial Sequence
  Description of Artificial Sequence: Synthetic oligonucleotide
uuuacauuuuacucuuaga

SEQ ID NO: 2562016 - RNA, 19 nt, Artificial Sequence
  Description of Artificial Sequence: Synthetic oligonucleotide
cauccagaaguuuaaccgg

SEQ ID NO: 2562017 - RNA, 19 nt, Artificial Sequence
  Description of Artificial Sequence: Synthetic oligonucleotide
uucaaaaugagaguauaaa

SEQ ID NO: 2562018 - RNA, 19 nt, Artificial Sequence
  Description of Artificial Sequence: Synthetic oligonucleotide
ggaaacacaaauuaauguc

SEQ ID NO: 2562019 - RNA, 19 nt, Artificial Sequence
  Description of Artificial Sequence: Synthetic oligonucleotide
auuuuacucuuagauuacc

SEQ ID NO: 2562020 - RNA, 19 nt, Artificial Sequence
  Description of Artificial Sequence: Synthetic oligonucleotide
cacaaauuaauguccgcag

SEQ ID NO: 2562021 - RNA, 19 nt, Artificial Sequence
  Description of Artificial Sequence: Synthetic oligonucleotide
uccuucaaggcagaagugg

SEQ ID NO: 2562022 - RNA, 19 nt, Artificial Sequence
  Description of Artificial Sequence: Synthetic oligonucleotide
uccuuuacaguuucguaca

SEQ ID NO: 2562023 - RNA, 19 nt, Artificial Sequence
  Description of Artificial Sequence: Synthetic oligonucleotide
ugacaaggaacuaaaucuc

SEQ ID NO: 2562024 - RNA, 19 nt, Artificial Sequence
  Description of Artificial Sequence: Synthetic oligonucleotide
uuacucuuagauuaccauc

SEQ ID NO: 2562025 - RNA, 19 nt, Artificial Sequence
  Description of Artificial Sequence: Synthetic oligonucleotide
uuucaaaaugagaguauaa

SEQ ID NO: 2562026 - RNA, 19 nt, Artificial Sequence
  Description of Artificial Sequence: Synthetic oligonucleotide
uuuacucuuagauuaccau

SEQ ID NO: 2562027 - RNA, 19 nt, Artificial Sequence
  Description of Artificial Sequence: Synthetic oligonucleotide
ucaaaauaguuaauauaua

SEQ ID NO: 2562028 - RNA, 19 nt, Artificial Sequence
  Description of Artificial Sequence: Synthetic oligonucleotide
aauuaggcaugaaacauaa

SEQ ID NO: 2562029 - RNA, 19 nt, Artificial Sequence
  Description of Artificial Sequence: Synthetic oligonucleotide
uuuggggauagacaccaca

SEQ ID NO: 2562030 - RNA, 19 nt, Artificial Sequence
  Description of Artificial Sequence: Synthetic oligonucleotide
aauaguuaauauauauuuu

SEQ ID NO: 2562031 - RNA, 19 nt, Artificial Sequence
  Description of Artificial Sequence: Synthetic oligonucleotide
aauguccgcagcccuuugg

SEQ ID NO: 2562032 - RNA, 19 nt, Artificial Sequence
  Description of Artificial Sequence: Synthetic oligonucleotide
cuuaugugcuuuauuggug

SEQ ID NO: 2562033 - RNA, 19 nt, Artificial Sequence
  Description of Artificial Sequence: Synthetic oligonucleotide
ugggguuuccucuuccagg

SEQ ID NO: 2562034 - RNA, 19 nt, Artificial Sequence
  Description of Artificial Sequence: Synthetic oligonucleotide
gaaguuuaaccggaacagg

SEQ ID NO: 2562035 - RNA, 19 nt, Artificial Sequence
  Description of Artificial Sequence: Synthetic oligonucleotide
caugaaacauaaaacaucu

SEQ ID NO: 2562036 - RNA, 19 nt, Artificial Sequence
  Description of Artificial Sequence: Synthetic oligonucleotide
ucccagaaugcucuccgcg

SEQ ID NO: 2562037 - RNA, 19 nt, Artificial Sequence
  Description of Artificial Sequence: Synthetic oligonucleotide
aaggcagaaguggauuugg

SEQ ID NO: 2562038 - RNA, 19 nt, Artificial Sequence
  Description of Artificial Sequence: Synthetic oligonucleotide
uuugcguucucauccagaa

SEQ ID NO: 2562039 - RNA, 19 nt, Artificial Sequence
  Description of Artificial Sequence: Synthetic oligonucleotide
guaagauugggucuucuuc

SEQ ID NO: 2562040 - RNA, 19 nt, Artificial Sequence
  Description of Artificial Sequence: Synthetic oligonucleotide
ugagaguauaaaucauugu

SEQ ID NO: 2562041 - RNA, 19 nt, Artificial Sequence
  Description of Artificial Sequence: Synthetic oligonucleotide
ggaacuaaaucucuugcug

SEQ ID NO: 2562042 - RNA, 19 nt, Artificial Sequence
  Description of Artificial Sequence: Synthetic oligonucleotide
agaggcauauuccgcaaag

SEQ ID NO: 2562043 - RNA, 19 nt, Artificial Sequence
  Description of Artificial Sequence: Synthetic oligonucleotide
aaucucuugcuguguccac

SEQ ID NO: 2562044 - RNA, 19 nt, Artificial Sequence
  Description of Artificial Sequence: Synthetic oligonucleotide
caaggaacuaaaucucuug

SEQ ID NO: 2562045 - RNA, 19 nt, Artificial Sequence
  Description of Artificial Sequence: Synthetic oligonucleotide
aaugagaguauaaaucauu

SEQ ID NO: 2562046 - RNA, 19 nt, Artificial Sequence
  Description of Artificial Sequence: Synthetic oligonucleotide
aucagauaacaggaaaguc

SEQ ID NO: 2562047 - RNA, 19 nt, Artificial Sequence
  Description of Artificial Sequence: Synthetic oligonucleotide
uaaaucucuugcugugucc

SEQ ID NO: 2562048 - RNA, 19 nt, Artificial Sequence
  Description of Artificial Sequence: Synthetic oligonucleotide
aaaucucuugcugugucca

SEQ ID NO: 2562049 - RNA, 19 nt, Artificial Sequence
  Description of Artificial Sequence: Synthetic oligonucleotide
aaacaucuuauaaauuuau

SEQ ID NO: 2562050 - RNA, 19 nt, Artificial Sequence
  Description of Artificial Sequence: Synthetic oligonucleotide
aagucacacaugugggcag

SEQ ID NO: 2562051 - RNA, 19 nt, Artificial Sequence
  Description of Artificial Sequence: Synthetic oligonucleotide
augagaguauaaaucauug

SEQ ID NO: 2562052 - RNA, 19 nt, Artificial Sequence
  Description of Artificial Sequence: Synthetic oligonucleotide
uccgucaccuccuugauuu

SEQ ID NO: 2562053 - RNA, 19 nt, Artificial Sequence
  Description of Artificial Sequence: Synthetic oligonucleotide
uggacuucgccauucuggc

SEQ ID NO: 2562054 - RNA, 19 nt, Artificial Sequence
  Description of Artificial Sequence: Synthetic oligonucleotide
aaauaaauguuuacauuuu

SEQ ID NO: 2562055 - RNA, 19 nt, Artificial Sequence
  Description of Artificial Sequence: Synthetic oligonucleotide
cuagaaauuaggcaugaaa

SEQ ID NO: 2562056 - RNA, 19 nt, Artificial Sequence
  Description of Artificial Sequence: Synthetic oligonucleotide
uccgcguucaugcuuuggc

SEQ ID NO: 2562057 - RNA, 19 nt, Artificial Sequence
  Description of Artificial Sequence: Synthetic oligonucleotide
uguguggggccgcugaagc

SEQ ID NO: 2562058 - RNA, 19 nt, Artificial Sequence
  Description of Artificial Sequence: Synthetic oligonucleotide
uguccacagaggcauauuc

SEQ ID NO: 2562059 - RNA, 19 nt, Artificial Sequence
  Description of Artificial Sequence: Synthetic oligonucleotide
gcauauuccgcaaagucgg

SEQ ID NO: 2562060 - RNA, 19 nt, Artificial Sequence
  Description of Artificial Sequence: Synthetic oligonucleotide
aggaacuaaaucucuugcu

SEQ ID NO: 2562061 - RNA, 19 nt, Artificial Sequence
  Description of Artificial Sequence: Synthetic oligonucleotide
uuacaguuucguacaggcc

SEQ ID NO: 2562062 - RNA, 19 nt, Artificial Sequence
  Description of Artificial Sequence: Synthetic oligonucleotide
auaacaggaaagucacaca

SEQ ID NO: 2562063 - RNA, 19 nt, Artificial Sequence
  Description of Artificial Sequence: Synthetic oligonucleotide
acacaaauuaauguccgca

SEQ ID NO: 2562064 - RNA, 19 nt, Artificial Sequence
  Description of Artificial Sequence: Synthetic oligonucleotide
ggauagacaccacagcugc

SEQ ID NO: 2562065 - RNA, 19 nt, Artificial Sequence
  Description of Artificial Sequence: Synthetic oligonucleotide
cauuuuacucuuagauuac

SEQ ID NO: 2562066 - RNA, 19 nt, Artificial Sequence
  Description of Artificial Sequence: Synthetic oligonucleotide
uuuuguuccuguccacaga

SEQ ID NO: 2562067 - RNA, 19 nt, Artificial Sequence
  Description of Artificial Sequence: Synthetic oligonucleotide
gaggagcuauccuugagca

SEQ ID NO: 2562068 - RNA, 19 nt, Artificial Sequence
  Description of Artificial Sequence: Synthetic oligonucleotide
gacuuguaugacaaggaac

SEQ ID NO: 2562069 - RNA, 19 nt, Artificial Sequence
  Description of Artificial Sequence: Synthetic oligonucleotide
gcauuuucuagaaauuagg

SEQ ID NO: 2562070 - RNA, 19 nt, Artificial Sequence
  Description of Artificial Sequence: Synthetic oligonucleotide
uauauauuuucuggcauuu

SEQ ID NO: 2562071 - RNA, 19 nt, Artificial Sequence
  Description of Artificial Sequence: Synthetic oligonucleotide
guauaaaucauuguacaua

SEQ ID NO: 2562072 - RNA, 19 nt, Artificial Sequence
  Description of Artificial Sequence: Synthetic oligonucleotide
cagaaguuuaaccggaaca

SEQ ID NO: 2562073 - RNA, 19 nt, Artificial Sequence
  Description of Artificial Sequence: Synthetic oligonucleotide
uuuggacuucgccauucug

SEQ ID NO: 2562074 - RNA, 19 nt, Artificial Sequence
  Description of Artificial Sequence: Synthetic oligonucleotide
aaaugagaguauaaaucau

SEQ ID NO: 2562075 - RNA, 19 nt, Artificial Sequence
  Description of Artificial Sequence: Synthetic oligonucleotide
uucucauccagaaguuuaa

SEQ ID NO: 2562076 - RNA, 19 nt, Artificial Sequence
  Description of Artificial Sequence: Synthetic oligonucleotide
uugauuuccuuuacaguuu

SEQ ID NO: 2562077 - RNA, 19 nt, Artificial Sequence
  Description of Artificial Sequence: Synthetic oligonucleotide
accaucagauaacaggaaa

SEQ ID NO: 2562078 - RNA, 19 nt, Artificial Sequence
  Description of Artificial Sequence: Synthetic oligonucleotide
guuucguacaggccagucc

SEQ ID NO: 2562079 - RNA, 19 nt, Artificial Sequence
  Description of Artificial Sequence: Synthetic oligonucleotide
auguccgcagcccuuuggg

SEQ ID NO: 2562080 - RNA, 19 nt, Artificial Sequence
  Description of Artificial Sequence: Synthetic oligonucleotide
uggggauagacaccacagc

SEQ ID NO: 2562081 - RNA, 19 nt, Artificial Sequence
  Description of Artificial Sequence: Synthetic oligonucleotide
cuaaaucucuugcuguguc

SEQ ID NO: 2562082 - RNA, 19 nt, Artificial Sequence
  Description of Artificial Sequence: Synthetic oligonucleotide
ucuucccgagacuuguaug

SEQ ID NO: 2562083 - RNA, 19 nt, Artificial Sequence
  Description of Artificial Sequence: Synthetic oligonucleotide
ggagcuauccuugagcacc

SEQ ID NO: 2562084 - RNA, 19 nt, Artificial Sequence
  Description of Artificial Sequence: Synthetic oligonucleotide
cauuguacauaaaaucaaa

SEQ ID NO: 2562085 - RNA, 19 nt, Artificial Sequence
  Description of Artificial Sequence: Synthetic oligonucleotide
uuaaccggaacagguguug

SEQ ID NO: 2562086 - RNA, 19 nt, Artificial Sequence
  Description of Artificial Sequence: Synthetic oligonucleotide
uuuccuuuacaguuucgua

SEQ ID NO: 2562087 - RNA, 19 nt, Artificial Sequence
  Description of Artificial Sequence: Synthetic oligonucleotide
agauugggucuucuucccg

SEQ ID NO: 2562088 - RNA, 19 nt, Artificial Sequence
  Description of Artificial Sequence: Synthetic oligonucleotide
agacuuguaugacaaggaa

SEQ ID NO: 2562089 - RNA, 19 nt, Artificial Sequence
  Description of Artificial Sequence: Synthetic oligonucleotide
gaucacuggaaacacaaau

SEQ ID NO: 2562090 - RNA, 19 nt, Artificial Sequence
  Description of Artificial Sequence: Synthetic oligonucleotide
aacaggaaagucacacaug

SEQ ID NO: 2562091 - RNA, 19 nt, Artificial Sequence
  Description of Artificial Sequence: Synthetic oligonucleotide
gaaguggauuuggacuucg

SEQ ID NO: 2562092 - RNA, 19 nt, Artificial Sequence
  Description of Artificial Sequence: Synthetic oligonucleotide
auuguacauaaaaucaaaa

SEQ ID NO: 2562093 - RNA, 19 nt, Artificial Sequence
  Description of Artificial Sequence: Synthetic oligonucleotide
uucuagaaauuaggcauga

SEQ ID NO: 2562094 - RNA, 19 nt, Artificial Sequence
  Description of Artificial Sequence: Synthetic oligonucleotide
gagaucacuggaaacacaa

SEQ ID NO: 2562095 - RNA, 19 nt, Artificial Sequence
  Description of Artificial Sequence: Synthetic oligonucleotide
aguucccagaaugcucucc

SEQ ID NO: 2562096 - RNA, 19 nt, Artificial Sequence
  Description of Artificial Sequence: Synthetic oligonucleotide
gauugggucuucuucccga

SEQ ID NO: 2562097 - RNA, 19 nt, Artificial Sequence
  Description of Artificial Sequence: Synthetic oligonucleotide
ucuucuucccgagacuugu

SEQ ID NO: 2562098 - RNA, 19 nt, Artificial Sequence
  Description of Artificial Sequence: Synthetic oligonucleotide
acaugugggcagcagagau

SEQ ID NO: 2562099 - RNA, 19 nt, Artificial Sequence
  Description of Artificial Sequence: Synthetic oligonucleotide
acucuuagauuaccaucag

SEQ ID NO: 2562100 - RNA, 19 nt, Artificial Sequence
  Description of Artificial Sequence: Synthetic oligonucleotide
gauuaccaucagauaacag

SEQ ID NO: 2562101 - RNA, 19 nt, Artificial Sequence
  Description of Artificial Sequence: Synthetic oligonucleotide
auagacaccacagcugcca

SEQ ID NO: 2562102 - RNA, 19 nt, Artificial Sequence
  Description of Artificial Sequence: Synthetic oligonucleotide
ggcauuuucuagaaauuag

SEQ ID NO: 2562103 - RNA, 19 nt, Artificial Sequence
  Description of Artificial Sequence: Synthetic oligonucleotide
aaugcucuccgcguucaug

SEQ ID NO: 2562104 - RNA, 19 nt, Artificial Sequence
  Description of Artificial Sequence: Synthetic oligonucleotide
accggaacagguguugggg

SEQ ID NO: 2562105 - RNA, 19 nt, Artificial Sequence
  Description of Artificial Sequence: Synthetic oligonucleotide
aacaucuuauaaauuuaua

SEQ ID NO: 2562106 - RNA, 19 nt, Artificial Sequence
  Description of Artificial Sequence: Synthetic oligonucleotide
uggaaguucccagaaugcu

SEQ ID NO: 2562107 - RNA, 19 nt, Artificial Sequence
  Description of Artificial Sequence: Synthetic oligonucleotide
aaguggauuuggacuucgc

SEQ ID NO: 2562108 - RNA, 19 nt, Artificial Sequence
  Description of Artificial Sequence: Synthetic oligonucleotide
aguuuaaccggaacaggug

SEQ ID NO: 2562109 - RNA, 19 nt, Artificial Sequence
  Description of Artificial Sequence: Synthetic oligonucleotide
agguguugggguuuccucu

SEQ ID NO: 2562110 - RNA, 19 nt, Artificial Sequence
  Description of Artificial Sequence: Synthetic oligonucleotide
caccauguucuccugggag

SEQ ID NO: 2562111 - RNA, 19 nt, Artificial Sequence
  Description of Artificial Sequence: Synthetic oligonucleotide
uuuaaccggaacagguguu

SEQ ID NO: 2562112 - RNA, 19 nt, Artificial Sequence
  Description of Artificial Sequence: Synthetic oligonucleotide
ucggcuuugcccucugugu

SEQ ID NO: 2562113 - RNA, 19 nt, Artificial Sequence
  Description of Artificial Sequence: Synthetic oligonucleotide
agauuaccaucagauaaca

SEQ ID NO: 2562114 - RNA, 19 nt, Artificial Sequence
  Description of Artificial Sequence: Synthetic oligonucleotide
uguaagauugggucuucuu

SEQ ID NO: 2562115 - RNA, 19 nt, Artificial Sequence
  Description of Artificial Sequence: Synthetic oligonucleotide
uaaccggaacagguguugg

SEQ ID NO: 2562116 - RNA, 19 nt, Artificial Sequence
  Description of Artificial Sequence: Synthetic oligonucleotide
uauuccgcaaagucggcuu

SEQ ID NO: 2562117 - RNA, 19 nt, Artificial Sequence
  Description of Artificial Sequence: Synthetic oligonucleotide
aggagcuauccuugagcac

SEQ ID NO: 2562118 - RNA, 19 nt, Artificial Sequence
  Description of Artificial Sequence: Synthetic oligonucleotide
uguccgcagcccuuugggg

SEQ ID NO: 2562119 - RNA, 19 nt, Artificial Sequence
  Description of Artificial Sequence: Synthetic oligonucleotide
agucacacaugugggcagc

SEQ ID NO: 2562120 - RNA, 19 nt, Artificial Sequence
  Description of Artificial Sequence: Synthetic oligonucleotide
uguucuccugggaggagcu

SEQ ID NO: 2562121 - RNA, 19 nt, Artificial Sequence
  Description of Artificial Sequence: Synthetic oligonucleotide
ucaaggcagaaguggauuu

SEQ ID NO: 2562122 - RNA, 19 nt, Artificial Sequence
  Description of Artificial Sequence: Synthetic oligonucleotide
uggcauuuucuagaaauua

SEQ ID NO: 2562123 - RNA, 19 nt, Artificial Sequence
  Description of Artificial Sequence: Synthetic oligonucleotide
ggaggagcuauccuugagc

SEQ ID NO: 2562124 - RNA, 19 nt, Artificial Sequence
  Description of Artificial Sequence: Synthetic oligonucleotide
acacaugugggcagcagag

SEQ ID NO: 2562125 - RNA, 19 nt, Artificial Sequence
  Description of Artificial Sequence: Synthetic oligonucleotide
uucuucccgagacuuguau

SEQ ID NO: 2562126 - RNA, 19 nt, Artificial Sequence
  Description of Artificial Sequence: Synthetic oligonucleotide
gacuucgccauucuggccu

SEQ ID NO: 2562127 - RNA, 19 nt, Artificial Sequence
  Description of Artificial Sequence: Synthetic oligonucleotide
gccauucuggccuuugucc

SEQ ID NO: 2562128 - RNA, 19 nt, Artificial Sequence
  Description of Artificial Sequence: Synthetic oligonucleotide
ucguagggccccuccaugc

SEQ ID NO: 2562129 - RNA, 19 nt, Artificial Sequence
  Description of Artificial Sequence: Synthetic oligonucleotide
uacaggccaguccuccacc

SEQ ID NO: 2562130 - RNA, 19 nt, Artificial Sequence
  Description of Artificial Sequence: Synthetic oligonucleotide
cacugguccccucuggagc

SEQ ID NO: 2562131 - RNA, 19 nt, Artificial Sequence
  Description of Artificial Sequence: Synthetic oligonucleotide
guuuaaccggaacaggugu

SEQ ID NO: 2562132 - RNA, 19 nt, Artificial Sequence
  Description of Artificial Sequence: Synthetic oligonucleotide
ucuggaagguuugcguucu

SEQ ID NO: 2562133 - RNA, 19 nt, Artificial Sequence
  Description of Artificial Sequence: Synthetic oligonucleotide
cugggaggagcuauccuug

SEQ ID NO: 2562134 - RNA, 19 nt, Artificial Sequence
  Description of Artificial Sequence: Synthetic oligonucleotide
uugcguucucauccagaag

SEQ ID NO: 2562135 - RNA, 19 nt, Artificial Sequence
  Description of Artificial Sequence: Synthetic oligonucleotide
uggagcuggcucuuccacc

SEQ ID NO: 2562136 - RNA, 19 nt, Artificial Sequence
  Description of Artificial Sequence: Synthetic oligonucleotide
uggccuuuguccgucaccu

SEQ ID NO: 2562137 - RNA, 19 nt, Artificial Sequence
  Description of Artificial Sequence: Synthetic oligonucleotide
uccacugguccccucugga

SEQ ID NO: 2562138 - RNA, 19 nt, Artificial Sequence
  Description of Artificial Sequence: Synthetic oligonucleotide
cauauuccgcaaagucggc

SEQ ID NO: 2562139 - RNA, 19 nt, Artificial Sequence
  Description of Artificial Sequence: Synthetic oligonucleotide
gcaugaaacauaaaacauc

SEQ ID NO: 2562140 - RNA, 19 nt, Artificial Sequence
  Description of Artificial Sequence: Synthetic oligonucleotide
uaccaucagauaacaggaa

SEQ ID NO: 2562141 - RNA, 19 nt, Artificial Sequence
  Description of Artificial Sequence: Synthetic oligonucleotide
aguuucguacaggccaguc

SEQ ID NO: 2562142 - RNA, 19 nt, Artificial Sequence
  Description of Artificial Sequence: Synthetic oligonucleotide
cuuagauuaccaucagaua

SEQ ID NO: 2562143 - RNA, 19 nt, Artificial Sequence
  Description of Artificial Sequence: Synthetic oligonucleotide
uucuguaagauugggucuu

SEQ ID NO: 2562144 - RNA, 19 nt, Artificial Sequence
  Description of Artificial Sequence: Synthetic oligonucleotide
acuaaaucucuugcugugu

SEQ ID NO: 2562145 - RNA, 19 nt, Artificial Sequence
  Description of Artificial Sequence: Synthetic oligonucleotide
uccagaaguuuaaccggaa

SEQ ID NO: 2562146 - RNA, 19 nt, Artificial Sequence
  Description of Artificial Sequence: Synthetic oligonucleotide
cagagaucacuggaaacac

SEQ ID NO: 2562147 - RNA, 19 nt, Artificial Sequence
  Description of Artificial Sequence: Synthetic oligonucleotide
cucuggaagguuugcguuc

SEQ ID NO: 2562148 - RNA, 19 nt, Artificial Sequence
  Description of Artificial Sequence: Synthetic oligonucleotide
ucccgagacuuguaugaca

SEQ ID NO: 2562149 - RNA, 19 nt, Artificial Sequence
  Description of Artificial Sequence: Synthetic oligonucleotide
gcuauccuugagcaccucg

SEQ ID NO: 2562150 - RNA, 19 nt, Artificial Sequence
  Description of Artificial Sequence: Synthetic oligonucleotide
guagggccccuccaugccg

SEQ ID NO: 2562151 - RNA, 19 nt, Artificial Sequence
  Description of Artificial Sequence: Synthetic oligonucleotide
uuccaccucgcucucuccu

SEQ ID NO: 2562152 - RNA, 19 nt, Artificial Sequence
  Description of Artificial Sequence: Synthetic oligonucleotide
auuuggacuucgccauucu

SEQ ID NO: 2562153 - RNA, 19 nt, Artificial Sequence
  Description of Artificial Sequence: Synthetic oligonucleotide
aacagguguugggguuucc

SEQ ID NO: 2562154 - RNA, 19 nt, Artificial Sequence
  Description of Artificial Sequence: Synthetic oligonucleotide
acagaucuccucuucugua

SEQ ID NO: 2562155 - RNA, 19 nt, Artificial Sequence
  Description of Artificial Sequence: Synthetic oligonucleotide
acaguuucguacaggccag

SEQ ID NO: 2562156 - RNA, 19 nt, Artificial Sequence
  Description of Artificial Sequence: Synthetic oligonucleotide
uaugugcuuuauugguguc

SEQ ID NO: 2562157 - RNA, 19 nt, Artificial Sequence
  Description of Artificial Sequence: Synthetic oligonucleotide
uggaagguuugcguucuca

SEQ ID NO: 2562158 - RNA, 19 nt, Artificial Sequence
  Description of Artificial Sequence: Synthetic oligonucleotide
gcccuuuggggauagacac

SEQ ID NO: 2562159 - RNA, 19 nt, Artificial Sequence
  Description of Artificial Sequence: Synthetic oligonucleotide
agacaccacagcugccauc

SEQ ID NO: 2562160 - RNA, 19 nt, Artificial Sequence
  Description of Artificial Sequence: Synthetic oligonucleotide
ucguacaggccaguccucc

SEQ ID NO: 2562161 - RNA, 19 nt, Artificial Sequence
  Description of Artificial Sequence: Synthetic oligonucleotide
ggcagaaguggauuuggac

SEQ ID NO: 2562162 - RNA, 19 nt, Artificial Sequence
  Description of Artificial Sequence: Synthetic oligonucleotide
aggccaguccuccaccaug

SEQ ID NO: 2562163 - RNA, 19 nt, Artificial Sequence
  Description of Artificial Sequence: Synthetic oligonucleotide
gguuuccucuuccagguca

SEQ ID NO: 2562164 - RNA, 19 nt, Artificial Sequence
  Description of Artificial Sequence: Synthetic oligonucleotide
caugugggcagcagagauc

SEQ ID NO: 2562165 - RNA, 19 nt, Artificial Sequence
  Description of Artificial Sequence: Synthetic oligonucleotide
cgagacuuguaugacaagg

SEQ ID NO: 2562166 - RNA, 19 nt, Artificial Sequence
  Description of Artificial Sequence: Synthetic oligonucleotide
auauuccgcaaagucggcu

SEQ ID NO: 2562167 - RNA, 19 nt, Artificial Sequence
  Description of Artificial Sequence: Synthetic oligonucleotide
gccuuuguccgucaccucc

SEQ ID NO: 2562168 - RNA, 19 nt, Artificial Sequence
  Description of Artificial Sequence: Synthetic oligonucleotide
cacuggaaacacaaauuaa

SEQ ID NO: 2562169 - RNA, 19 nt, Artificial Sequence
  Description of Artificial Sequence: Synthetic oligonucleotide
uguggggccgcugaagcuc

SEQ ID NO: 2562170 - RNA, 19 nt, Artificial Sequence
  Description of Artificial Sequence: Synthetic oligonucleotide
gauagacaccacagcugcc

SEQ ID NO: 2562171 - RNA, 19 nt, Artificial Sequence
  Description of Artificial Sequence: Synthetic oligonucleotide
agcuccuucaaggcagaag

SEQ ID NO: 2562172 - RNA, 19 nt, Artificial Sequence
  Description of Artificial Sequence: Synthetic oligonucleotide
auccagaaguuuaaccgga

SEQ ID NO: 2562173 - RNA, 19 nt, Artificial Sequence
  Description of Artificial Sequence: Synthetic oligonucleotide
uuaauguccgcagcccuuu

SEQ ID NO: 2562174 - RNA, 19 nt, Artificial Sequence
  Description of Artificial Sequence: Synthetic oligonucleotide
caggaaagucacacaugug

SEQ ID NO: 2562175 - RNA, 19 nt, Artificial Sequence
  Description of Artificial Sequence: Synthetic oligonucleotide
uggcucuuccaccucgcuc

SEQ ID NO: 2562176 - RNA, 19 nt, Artificial Sequence
  Description of Artificial Sequence: Synthetic oligonucleotide
uaauguccgcagcccuuug

SEQ ID NO: 2562177 - RNA, 19 nt, Artificial Sequence
  Description of Artificial Sequence: Synthetic oligonucleotide
agguuugcguucucaucca

SEQ ID NO: 2562178 - RNA, 19 nt, Artificial Sequence
  Description of Artificial Sequence: Synthetic oligonucleotide
cgcugaagcuccuucaagg

SEQ ID NO: 2562179 - RNA, 19 nt, Artificial Sequence
  Description of Artificial Sequence: Synthetic oligonucleotide
guucucauccagaaguuua

SEQ ID NO: 2562180 - RNA, 19 nt, Artificial Sequence
  Description of Artificial Sequence: Synthetic oligonucleotide
caggucacuggaaguuccc

SEQ ID NO: 2562181 - RNA, 19 nt, Artificial Sequence
  Description of Artificial Sequence: Synthetic oligonucleotide
ucacacaugugggcagcag

SEQ ID NO: 2562182 - RNA, 19 nt, Artificial Sequence
  Description of Artificial Sequence: Synthetic oligonucleotide
acagaggcauauuccgcaa

SEQ ID NO: 2562183 - RNA, 19 nt, Artificial Sequence
  Description of Artificial Sequence: Synthetic oligonucleotide
gacaaggaacuaaaucucu

SEQ ID NO: 2562184 - RNA, 19 nt, Artificial Sequence
  Description of Artificial Sequence: Synthetic oligonucleotide
cugaagcuccuucaaggca

SEQ ID NO: 2562185 - RNA, 19 nt, Artificial Sequence
  Description of Artificial Sequence: Synthetic oligonucleotide
cucuuagauuaccaucaga

SEQ ID NO: 2562186 - RNA, 19 nt, Artificial Sequence
  Description of Artificial Sequence: Synthetic oligonucleotide
cagguguugggguuuccuc

SEQ ID NO: 2562187 - RNA, 19 nt, Artificial Sequence
  Description of Artificial Sequence: Synthetic oligonucleotide
guacaggccaguccuccac

SEQ ID NO: 2562188 - RNA, 19 nt, Artificial Sequence
  Description of Artificial Sequence: Synthetic oligonucleotide
gcuuaugugcuuuauuggu

SEQ ID NO: 2562189 - RNA, 19 nt, Artificial Sequence
  Description of Artificial Sequence: Synthetic oligonucleotide
cuggccuuuguccgucacc

SEQ ID NO: 2562190 - RNA, 19 nt, Artificial Sequence
  Description of Artificial Sequence: Synthetic oligonucleotide
uucuggcauuuucuagaaa

SEQ ID NO: 2562191 - RNA, 19 nt, Artificial Sequence
  Description of Artificial Sequence: Synthetic oligonucleotide
gggauagacaccacagcug

SEQ ID NO: 2562192 - RNA, 19 nt, Artificial Sequence
  Description of Artificial Sequence: Synthetic oligonucleotide
uccccucuggagcuggcuc

SEQ ID NO: 2562193 - RNA, 19 nt, Artificial Sequence
  Description of Artificial Sequence: Synthetic oligonucleotide
uccgcaaagucggcuuugc

SEQ ID NO: 2562194 - RNA, 19 nt, Artificial Sequence
  Description of Artificial Sequence: Synthetic oligonucleotide
agaaugcucuccgcguuca

SEQ ID NO: 2562195 - RNA, 19 nt, Artificial Sequence
  Description of Artificial Sequence: Synthetic oligonucleotide
acaaggaacuaaaucucuu

SEQ ID NO: 2562196 - RNA, 19 nt, Artificial Sequence
  Description of Artificial Sequence: Synthetic oligonucleotide
cacacaugugggcagcaga

SEQ ID NO: 2562197 - RNA, 19 nt, Artificial Sequence
  Description of Artificial Sequence: Synthetic oligonucleotide
ucuggccuuuguccgucac

SEQ ID NO: 2562198 - RNA, 19 nt, Artificial Sequence
  Description of Artificial Sequence: Synthetic oligonucleotide
guccgcagcccuuugggga

SEQ ID NO: 2562199 - RNA, 19 nt, Artificial Sequence
  Description of Artificial Sequence: Synthetic oligonucleotide
acaggccaguccuccacca

SEQ ID NO: 2562200 - RNA, 19 nt, Artificial Sequence
  Description of Artificial Sequence: Synthetic oligonucleotide
caucagauaacaggaaagu

SEQ ID NO: 2562201 - RNA, 19 nt, Artificial Sequence
  Description of Artificial Sequence: Synthetic oligonucleotide
ggggauagacaccacagcu

SEQ ID NO: 2562202 - RNA, 19 nt, Artificial Sequence
  Description of Artificial Sequence: Synthetic oligonucleotide
ccuugagcaccucguaggg

SEQ ID NO: 2562203 - RNA, 19 nt, Artificial Sequence
  Description of Artificial Sequence: Synthetic oligonucleotide
auuaauguccgcagcccuu

SEQ ID NO: 2562204 - RNA, 19 nt, Artificial Sequence
  Description of Artificial Sequence: Synthetic oligonucleotide
aagucggcuuugcccucug

SEQ ID NO: 2562205 - RNA, 19 nt, Artificial Sequence
  Description of Artificial Sequence: Synthetic oligonucleotide
uucguacaggccaguccuc

SEQ ID NO: 2562206 - RNA, 19 nt, Artificial Sequence
  Description of Artificial Sequence: Synthetic oligonucleotide
cucguagggccccuccaug

SEQ ID NO: 2562207 - RNA, 19 nt, Artificial Sequence
  Description of Artificial Sequence: Synthetic oligonucleotide
uucccgagacuuguaugac

SEQ ID NO: 2562208 - RNA, 19 nt, Artificial Sequence
  Description of Artificial Sequence: Synthetic oligonucleotide
ucuguaagauugggucuuc

SEQ ID NO: 2562209 - RNA, 19 nt, Artificial Sequence
  Description of Artificial Sequence: Synthetic oligonucleotide
acagguguugggguuuccu

SEQ ID NO: 2562210 - RNA, 19 nt, Artificial Sequence
  Description of Artificial Sequence: Synthetic oligonucleotide
uuccgcaaagucggcuuug

SEQ ID NO: 2562211 - RNA, 19 nt, Artificial Sequence
  Description of Artificial Sequence: Synthetic oligonucleotide
cagaaguggauuuggacuu

SEQ ID NO: 2562212 - RNA, 19 nt, Artificial Sequence
  Description of Artificial Sequence: Synthetic oligonucleotide
cuuccaccucgcucucucc

SEQ ID NO: 2562213 - RNA, 19 nt, Artificial Sequence
  Description of Artificial Sequence: Synthetic oligonucleotide
uucgccauucuggccuuug

SEQ ID NO: 2562214 - RNA, 19 nt, Artificial Sequence
  Description of Artificial Sequence: Synthetic oligonucleotide
guuuccucuuccaggucac

SEQ ID NO: 2562215 - RNA, 19 nt, Artificial Sequence
  Description of Artificial Sequence: Synthetic oligonucleotide
uucaugcuuuggcggcacu

SEQ ID NO: 2562216 - RNA, 19 nt, Artificial Sequence
  Description of Artificial Sequence: Synthetic oligonucleotide
guuugcguucucauccaga

SEQ ID NO: 2562217 - RNA, 19 nt, Artificial Sequence
  Description of Artificial Sequence: Synthetic oligonucleotide
ggcucuuccaccucgcucu

SEQ ID NO: 2562218 - RNA, 19 nt, Artificial Sequence
  Description of Artificial Sequence: Synthetic oligonucleotide
ucucuccuuuucucuggaa

SEQ ID NO: 2562219 - RNA, 19 nt, Artificial Sequence
  Description of Artificial Sequence: Synthetic oligonucleotide
gguuugcguucucauccag

SEQ ID NO: 2562220 - RNA, 19 nt, Artificial Sequence
  Description of Artificial Sequence: Synthetic oligonucleotide
ccagaaguuuaaccggaac

SEQ ID NO: 2562221 - RNA, 19 nt, Artificial Sequence
  Description of Artificial Sequence: Synthetic oligonucleotide
auaaaucauuguacauaaa

SEQ ID NO: 2562222 - RNA, 19 nt, Artificial Sequence
  Description of Artificial Sequence: Synthetic oligonucleotide
ucaugcuuuggcggcacuu

SEQ ID NO: 2562223 - RNA, 19 nt, Artificial Sequence
  Description of Artificial Sequence: Synthetic oligonucleotide
ugguccccucuggagcugg

SEQ ID NO: 2562224 - RNA, 19 nt, Artificial Sequence
  Description of Artificial Sequence: Synthetic oligonucleotide
agauaacaggaaagucaca

SEQ ID NO: 2562225 - RNA, 19 nt, Artificial Sequence
  Description of Artificial Sequence: Synthetic oligonucleotide
ccgcguucaugcuuuggcg

SEQ ID NO: 2562226 - RNA, 19 nt, Artificial Sequence
  Description of Artificial Sequence: Synthetic oligonucleotide
cgcguucaugcuuuggcgg

SEQ ID NO: 2562227 - RNA, 19 nt, Artificial Sequence
  Description of Artificial Sequence: Synthetic oligonucleotide
ccuucaaggcagaagugga

SEQ ID NO: 2562228 - RNA, 19 nt, Artificial Sequence
  Description of Artificial Sequence: Synthetic oligonucleotide
cuuugcccucugugugggg

SEQ ID NO: 2562229 - RNA, 19 nt, Artificial Sequence
  Description of Artificial Sequence: Synthetic oligonucleotide
gggaggagcuauccuugag

SEQ ID NO: 2562230 - RNA, 19 nt, Artificial Sequence
  Description of Artificial Sequence: Synthetic oligonucleotide
accucguagggccccucca

SEQ ID NO: 2562231 - RNA, 19 nt, Artificial Sequence
  Description of Artificial Sequence: Synthetic oligonucleotide
cagcagagaucacuggaaa

SEQ ID NO: 2562232 - RNA, 19 nt, Artificial Sequence
  Description of Artificial Sequence: Synthetic oligonucleotide
augcuuuggcggcacuuuu

SEQ ID NO: 2562233 - RNA, 19 nt, Artificial Sequence
  Description of Artificial Sequence: Synthetic oligonucleotide
ccuuuacaguuucguacag

SEQ ID NO: 2562234 - RNA, 19 nt, Artificial Sequence
  Description of Artificial Sequence: Synthetic oligonucleotide
uccaccucgcucucuccuu

SEQ ID NO: 2562235 - RNA, 19 nt, Artificial Sequence
  Description of Artificial Sequence: Synthetic oligonucleotide
cuguguggggccgcugaag

SEQ ID NO: 2562236 - RNA, 19 nt, Artificial Sequence
  Description of Artificial Sequence: Synthetic oligonucleotide
gaagcuccuucaaggcaga

SEQ ID NO: 2562237 - RNA, 19 nt, Artificial Sequence
  Description of Artificial Sequence: Synthetic oligonucleotide
augaaacauaaaacaucuu

SEQ ID NO: 2562238 - RNA, 19 nt, Artificial Sequence
  Description of Artificial Sequence: Synthetic oligonucleotide
caccucguagggccccucc

SEQ ID NO: 2562239 - RNA, 19 nt, Artificial Sequence
  Description of Artificial Sequence: Synthetic oligonucleotide
agaucacuggaaacacaaa

SEQ ID NO: 2562240 - RNA, 19 nt, Artificial Sequence
  Description of Artificial Sequence: Synthetic oligonucleotide
cacagaucuccucuucugu

SEQ ID NO: 2562241 - RNA, 19 nt, Artificial Sequence
  Description of Artificial Sequence: Synthetic oligonucleotide
ggacuucgccauucuggcc

SEQ ID NO: 2562242 - RNA, 19 nt, Artificial Sequence
  Description of Artificial Sequence: Synthetic oligonucleotide
gggguuuccucuuccaggu

SEQ ID NO: 2562243 - RNA, 19 nt, Artificial Sequence
  Description of Artificial Sequence: Synthetic oligonucleotide
ucuccgcguucaugcuuug

SEQ ID NO: 2562244 - RNA, 19 nt, Artificial Sequence
  Description of Artificial Sequence: Synthetic oligonucleotide
cuuguaugacaaggaacua

SEQ ID NO: 2562245 - RNA, 19 nt, Artificial Sequence
  Description of Artificial Sequence: Synthetic oligonucleotide
cuccgcguucaugcuuugg

SEQ ID NO: 2562246 - RNA, 19 nt, Artificial Sequence
  Description of Artificial Sequence: Synthetic oligonucleotide
cuucaaggcagaaguggau

SEQ ID NO: 2562247 - RNA, 19 nt, Artificial Sequence
  Description of Artificial Sequence: Synthetic oligonucleotide
ggccccuccaugccgggcc

SEQ ID NO: 2562248 - RNA, 19 nt, Artificial Sequence
  Description of Artificial Sequence: Synthetic oligonucleotide
cuggcauuuucuagaaauu

SEQ ID NO: 2562249 - RNA, 19 nt, Artificial Sequence
  Description of Artificial Sequence: Synthetic oligonucleotide
guguugggguuuccucuuc

SEQ ID NO: 2562250 - RNA, 19 nt, Artificial Sequence
  Description of Artificial Sequence: Synthetic oligonucleotide
cuagcuuaugugcuuuauu

SEQ ID NO: 2562251 - RNA, 19 nt, Artificial Sequence
  Description of Artificial Sequence: Synthetic oligonucleotide
ccaguccuccaccauguuc

SEQ ID NO: 2562252 - RNA, 19 nt, Artificial Sequence
  Description of Artificial Sequence: Synthetic oligonucleotide
uguguccacugguccccuc

SEQ ID NO: 2562253 - RNA, 19 nt, Artificial Sequence
  Description of Artificial Sequence: Synthetic oligonucleotide
ccacugguccccucuggag

SEQ ID NO: 2562254 - RNA, 19 nt, Artificial Sequence
  Description of Artificial Sequence: Synthetic oligonucleotide
ggaagguuugcguucucau

SEQ ID NO: 2562255 - RNA, 19 nt, Artificial Sequence
  Description of Artificial Sequence: Synthetic oligonucleotide
guggggccgcugaagcucc

SEQ ID NO: 2562256 - RNA, 19 nt, Artificial Sequence
  Description of Artificial Sequence: Synthetic oligonucleotide
agcuauccuugagcaccuc

SEQ ID NO: 2562257 - RNA, 19 nt, Artificial Sequence
  Description of Artificial Sequence: Synthetic oligonucleotide
agucggcuuugcccucugu

SEQ ID NO: 2562258 - RNA, 19 nt, Artificial Sequence
  Description of Artificial Sequence: Synthetic oligonucleotide
gcagcagagaucacuggaa

SEQ ID NO: 2562259 - RNA, 19 nt, Artificial Sequence
  Description of Artificial Sequence: Synthetic oligonucleotide
cacaugugggcagcagaga

SEQ ID NO: 2562260 - RNA, 19 nt, Artificial Sequence
  Description of Artificial Sequence: Synthetic oligonucleotide
guaugacaaggaacuaaau

SEQ ID NO: 2562261 - RNA, 19 nt, Artificial Sequence
  Description of Artificial Sequence: Synthetic oligonucleotide
gucacacaugugggcagca

SEQ ID NO: 2562262 - RNA, 19 nt, Artificial Sequence
  Description of Artificial Sequence: Synthetic oligonucleotide
ccgcugaagcuccuucaag

SEQ ID NO: 2562263 - RNA, 19 nt, Artificial Sequence
  Description of Artificial Sequence: Synthetic oligonucleotide
gagcuauccuugagcaccu

SEQ ID NO: 2562264 - RNA, 19 nt, Artificial Sequence
  Description of Artificial Sequence: Synthetic oligonucleotide
ccgagacuuguaugacaag

SEQ ID NO: 2562265 - RNA, 19 nt, Artificial Sequence
  Description of Artificial Sequence: Synthetic oligonucleotide
cucuccgcguucaugcuuu

SEQ ID NO: 2562266 - RNA, 19 nt, Artificial Sequence
  Description of Artificial Sequence: Synthetic oligonucleotide
ccgcaaagucggcuuugcc

SEQ ID NO: 2562267 - RNA, 19 nt, Artificial Sequence
  Description of Artificial Sequence: Synthetic oligonucleotide
cguagggccccuccaugcc

SEQ ID NO: 2562268 - RNA, 19 nt, Artificial Sequence
  Description of Artificial Sequence: Synthetic oligonucleotide
cggcuuugcccucugugug

SEQ ID NO: 2562269 - RNA, 19 nt, Artificial Sequence
  Description of Artificial Sequence: Synthetic oligonucleotide
gccgcugaagcuccuucaa

SEQ ID NO: 2562270 - RNA, 19 nt, Artificial Sequence
  Description of Artificial Sequence: Synthetic oligonucleotide
agcaccucguagggccccu

SEQ ID NO: 2562271 - RNA, 19 nt, Artificial Sequence
  Description of Artificial Sequence: Synthetic oligonucleotide
guguggggccgcugaagcu

SEQ ID NO: 2562272 - RNA, 19 nt, Artificial Sequence
  Description of Artificial Sequence: Synthetic oligonucleotide
gggccgcugaagcuccuuc

SEQ ID NO: 2562273 - RNA, 19 nt, Artificial Sequence
  Description of Artificial Sequence: Synthetic oligonucleotide
gguguugggguuuccucuu

SEQ ID NO: 2562274 - RNA, 19 nt, Artificial Sequence
  Description of Artificial Sequence: Synthetic oligonucleotide
ggucuucuucccgagacuu

SEQ ID NO: 2562275 - RNA, 19 nt, Artificial Sequence
  Description of Artificial Sequence: Synthetic oligonucleotide
uggggccgcugaagcuccu

SEQ ID NO: 2562276 - RNA, 19 nt, Artificial Sequence
  Description of Artificial Sequence: Synthetic oligonucleotide
gaaugcucuccgcguucau

SEQ ID NO: 2562277 - RNA, 19 nt, Artificial Sequence
  Description of Artificial Sequence: Synthetic oligonucleotide
ggguuuccucuuccagguc

SEQ ID NO: 2562278 - RNA, 19 nt, Artificial Sequence
  Description of Artificial Sequence: Synthetic oligonucleotide
ccugggaggagcuauccuu

SEQ ID NO: 2562279 - RNA, 19 nt, Artificial Sequence
  Description of Artificial Sequence: Synthetic oligonucleotide
cgccauucuggccuuuguc

SEQ ID NO: 2562280 - RNA, 19 nt, Artificial Sequence
  Description of Artificial Sequence: Synthetic oligonucleotide
cugguccccucuggagcug

SEQ ID NO: 2562281 - RNA, 19 nt, Artificial Sequence
  Description of Artificial Sequence: Synthetic oligonucleotide
cccagaaugcucuccgcgu

SEQ ID NO: 2562282 - RNA, 19 nt, Artificial Sequence
  Description of Artificial Sequence: Synthetic oligonucleotide
gggucuucuucccgagacu

SEQ ID NO: 2562283 - RNA, 19 nt, Artificial Sequence
  Description of Artificial Sequence: Synthetic oligonucleotide
ccuuuguccgucaccuccu

SEQ ID NO: 2562284 - RNA, 19 nt, Artificial Sequence
  Description of Artificial Sequence: Synthetic oligonucleotide
cagcugccauccacacaga

SEQ ID NO: 2562285 - RNA, 19 nt, Artificial Sequence
  Description of Artificial Sequence: Synthetic oligonucleotide
ggccaguccuccaccaugu

SEQ ID NO: 2562286 - RNA, 19 nt, Artificial Sequence
  Description of Artificial Sequence: Synthetic oligonucleotide
gccccuccaugccgggccc

SEQ ID NO: 2562287 - RNA, 19 nt, Artificial Sequence
  Description of Artificial Sequence: Synthetic oligonucleotide
cuggcucuuccaccucgcu

SEQ ID NO: 2562288 - RNA, 19 nt, Artificial Sequence
  Description of Artificial Sequence: Synthetic oligonucleotide
guccgucaccuccuugauu

SEQ ID NO: 2562289 - RNA, 19 nt, Artificial Sequence
  Description of Artificial Sequence: Synthetic oligonucleotide
ggauuuggacuucgccauu

SEQ ID NO: 2562290 - RNA, 19 nt, Artificial Sequence
  Description of Artificial Sequence: Synthetic oligonucleotide
cuuuguccgucaccuccuu

SEQ ID NO: 2562291 - RNA, 19 nt, Artificial Sequence
  Description of Artificial Sequence: Synthetic oligonucleotide
cguacaggccaguccucca

SEQ ID NO: 2562292 - RNA, 19 nt, Artificial Sequence
  Description of Artificial Sequence: Synthetic oligonucleotide
ccgucaccuccuugauuuc

SEQ ID NO: 2562293 - RNA, 19 nt, Artificial Sequence
  Description of Artificial Sequence: Synthetic oligonucleotide
ccggaacagguguuggggu

SEQ ID NO: 2562294 - RNA, 19 nt, Artificial Sequence
  Description of Artificial Sequence: Synthetic oligonucleotide
guccccucuggagcuggcu

SEQ ID NO: 2562295 - RNA, 19 nt, Artificial Sequence
  Description of Artificial Sequence: Synthetic oligonucleotide
caguuucguacaggccagu

SEQ ID NO: 2562296 - RNA, 19 nt, Artificial Sequence
  Description of Artificial Sequence: Synthetic oligonucleotide
ccccucuggagcuggcucu

SEQ ID NO: 2562297 - RNA, 19 nt, Artificial Sequence
  Description of Artificial Sequence: Synthetic oligonucleotide
gcguucucauccagaaguu

SEQ ID NO: 2562298 - RNA, 19 nt, Artificial Sequence
  Description of Artificial Sequence: Synthetic oligonucleotide
cuguguccacugguccccu

SEQ ID NO: 2562299 - RNA, 19 nt, Artificial Sequence
  Description of Artificial Sequence: Synthetic oligonucleotide
caccucgcucucuccuuuu

SEQ ID NO: 2562300 - RNA, 19 nt, Artificial Sequence
  Description of Artificial Sequence: Synthetic oligonucleotide
cgcagcccuuuggggauag

SEQ ID NO: 2562301 - RNA, 19 nt, Artificial Sequence
  Description of Artificial Sequence: Synthetic oligonucleotide
gcccucuguguggggccgc

SEQ ID NO: 2562302 - RNA, 19 nt, Artificial Sequence
  Description of Artificial Sequence: Synthetic oligonucleotide
ccucguagggccccuccau

SEQ ID NO: 2562303 - RNA, 19 nt, Artificial Sequence
  Description of Artificial Sequence: Synthetic oligonucleotide
gcaccucguagggccccuc

SEQ ID NO: 2562304 - RNA, 19 nt, Artificial Sequence
  Description of Artificial Sequence: Synthetic oligonucleotide
gccaguccuccaccauguu

SEQ ID NO: 2562305 - RNA, 19 nt, Artificial Sequence
  Description of Artificial Sequence: Synthetic oligonucleotide
cuucgccauucuggccuuu

SEQ ID NO: 2562306 - RNA, 19 nt, Artificial Sequence
  Description of Artificial Sequence: Synthetic oligonucleotide
ggggccgcugaagcuccuu

SEQ ID NO: 2562307 - RNA, 19 nt, Artificial Sequence
  Description of Artificial Sequence: Synthetic oligonucleotide
ccgcagcccuuuggggaua

SEQ ID NO: 2562308 - RNA, 19 nt, Artificial Sequence
  Description of Artificial Sequence: Synthetic oligonucleotide
aaugcuauuaaauugaaug

SEQ ID NO: 2562309 - RNA, 19 nt, Artificial Sequence
  Description of Artificial Sequence: Synthetic oligonucleotide
aauugaaugagacuucccc

SEQ ID NO: 2562310 - RNA, 19 nt, Artificial Sequence
  Description of Artificial Sequence: Synthetic oligonucleotide
uaaauuaagacaaaguaug

SEQ ID NO: 2562311 - RNA, 19 nt, Artificial Sequence
  Description of Artificial Sequence: Synthetic oligonucleotide
aaguacaugaaacaauuuc

SEQ ID NO: 2562312 - RNA, 19 nt, Artificial Sequence
  Description of Artificial Sequence: Synthetic oligonucleotide
acaaauucacaucucaagc

SEQ ID NO: 2562313 - RNA, 19 nt, Artificial Sequence
  Description of Artificial Sequence: Synthetic oligonucleotide
uaagacauuaguauuaaca

SEQ ID NO: 2562314 - RNA, 19 nt, Artificial Sequence
  Description of Artificial Sequence: Synthetic oligonucleotide
aaauucacaucucaagccg

SEQ ID NO: 2562315 - RNA, 19 nt, Artificial Sequence
  Description of Artificial Sequence: Synthetic oligonucleotide
uagucuauaaaacaaauuc

SEQ ID NO: 2562316 - RNA, 19 nt, Artificial Sequence
  Description of Artificial Sequence: Synthetic oligonucleotide
ugaaaugucgccaaaguca

SEQ ID NO: 2562317 - RNA, 19 nt, Artificial Sequence
  Description of Artificial Sequence: Synthetic oligonucleotide
uaaaaugcuauuaaauuga

SEQ ID NO: 2562318 - RNA, 19 nt, Artificial Sequence
  Description of Artificial Sequence: Synthetic oligonucleotide
aacaaauucacaucucaag

SEQ ID NO: 2562319 - RNA, 19 nt, Artificial Sequence
  Description of Artificial Sequence: Synthetic oligonucleotide
uuuauagucuauaaaacaa

SEQ ID NO: 2562320 - RNA, 19 nt, Artificial Sequence
  Description of Artificial Sequence: Synthetic oligonucleotide
uauuuacuaacuaguaagg

SEQ ID NO: 2562321 - RNA, 19 nt, Artificial Sequence
  Description of Artificial Sequence: Synthetic oligonucleotide
auaaaacaaauucacaucu

SEQ ID NO: 2562322 - RNA, 19 nt, Artificial Sequence
  Description of Artificial Sequence: Synthetic oligonucleotide
aaagucauauucccugagc

SEQ ID NO: 2562323 - RNA, 19 nt, Artificial Sequence
  Description of Artificial Sequence: Synthetic oligonucleotide
uauggcuuaacgauuauca

SEQ ID NO: 2562324 - RNA, 19 nt, Artificial Sequence
  Description of Artificial Sequence: Synthetic oligonucleotide
auaguaauuuacaauaugg

SEQ ID NO: 2562325 - RNA, 19 nt, Artificial Sequence
  Description of Artificial Sequence: Synthetic oligonucleotide
uauaugaacuucaacuugc

SEQ ID NO: 2562326 - RNA, 19 nt, Artificial Sequence
  Description of Artificial Sequence: Synthetic oligonucleotide
ucuucuauaggacacaauc

SEQ ID NO: 2562327 - RNA, 19 nt, Artificial Sequence
  Description of Artificial Sequence: Synthetic oligonucleotide
uuuacaggauauaugaacu

SEQ ID NO: 2562328 - RNA, 19 nt, Artificial Sequence
  Description of Artificial Sequence: Synthetic oligonucleotide
gaaaccucagaugauaugg

SEQ ID NO: 2562329 - RNA, 19 nt, Artificial Sequence
  Description of Artificial Sequence: Synthetic oligonucleotide
uacacuaugccuuuacagg

SEQ ID NO: 2562330 - RNA, 19 nt, Artificial Sequence
  Description of Artificial Sequence: Synthetic oligonucleotide
uugaccauuucuaauaaug

SEQ ID NO: 2562331 - RNA, 19 nt, Artificial Sequence
  Description of Artificial Sequence: Synthetic oligonucleotide
uauuuauagucuauaaaac

SEQ ID NO: 2562332 - RNA, 19 nt, Artificial Sequence
  Description of Artificial Sequence: Synthetic oligonucleotide
aagacauuaguauuaacaa

SEQ ID NO: 2562333 - RNA, 19 nt, Artificial Sequence
  Description of Artificial Sequence: Synthetic oligonucleotide
ucuaaacuuguuuugacca

SEQ ID NO: 2562334 - RNA, 19 nt, Artificial Sequence
  Description of Artificial Sequence: Synthetic oligonucleotide
aagucuaagacauuaguau

SEQ ID NO: 2562335 - RNA, 19 nt, Artificial Sequence
  Description of Artificial Sequence: Synthetic oligonucleotide
auuaaauugaaugagacuu

SEQ ID NO: 2562336 - RNA, 19 nt, Artificial Sequence
  Description of Artificial Sequence: Synthetic oligonucleotide
acuaguaaggcuuuggacu

SEQ ID NO: 2562337 - RNA, 19 nt, Artificial Sequence
  Description of Artificial Sequence: Synthetic oligonucleotide
uaucaaagcaaacagcacu

SEQ ID NO: 2562338 - RNA, 19 nt, Artificial Sequence
  Description of Artificial Sequence: Synthetic oligonucleotide
aaaagaacagggugguggg

SEQ ID NO: 2562339 - RNA, 19 nt, Artificial Sequence
  Description of Artificial Sequence: Synthetic oligonucleotide
auuuauagucuauaaaaca

SEQ ID NO: 2562340 - RNA, 19 nt, Artificial Sequence
  Description of Artificial Sequence: Synthetic oligonucleotide
uuuacuaacuaguaaggcu

SEQ ID NO: 2562341 - RNA, 19 nt, Artificial Sequence
  Description of Artificial Sequence: Synthetic oligonucleotide
guaauuuacaauaugguac

SEQ ID NO: 2562342 - RNA, 19 nt, Artificial Sequence
  Description of Artificial Sequence: Synthetic oligonucleotide
uuuugaaaagacaaucaac

SEQ ID NO: 2562343 - RNA, 19 nt, Artificial Sequence
  Description of Artificial Sequence: Synthetic oligonucleotide
ucaugaaugcaucuggcag

SEQ ID NO: 2562344 - RNA, 19 nt, Artificial Sequence
  Description of Artificial Sequence: Synthetic oligonucleotide
aaaagucuaagacauuagu

SEQ ID NO: 2562345 - RNA, 19 nt, Artificial Sequence
  Description of Artificial Sequence: Synthetic oligonucleotide
aauaauguggucugguuaa

SEQ ID NO: 2562346 - RNA, 19 nt, Artificial Sequence
  Description of Artificial Sequence: Synthetic oligonucleotide
aagguugaccaacagauga

SEQ ID NO: 2562347 - RNA, 19 nt, Artificial Sequence
  Description of Artificial Sequence: Synthetic oligonucleotide
aaagaauaaauaaauagua

SEQ ID NO: 2562348 - RNA, 19 nt, Artificial Sequence
  Description of Artificial Sequence: Synthetic oligonucleotide
aaaagguugaccaacagau

SEQ ID NO: 2562349 - RNA, 19 nt, Artificial Sequence
  Description of Artificial Sequence: Synthetic oligonucleotide
uucuauaggacacaaucca

SEQ ID NO: 2562350 - RNA, 19 nt, Artificial Sequence
  Description of Artificial Sequence: Synthetic oligonucleotide
aaauaaauaguaauuuaca

SEQ ID NO: 2562351 - RNA, 19 nt, Artificial Sequence
  Description of Artificial Sequence: Synthetic oligonucleotide
uccaaaacuggacugaccu

SEQ ID NO: 2562352 - RNA, 19 nt, Artificial Sequence
  Description of Artificial Sequence: Synthetic oligonucleotide
aaauuaagacaaaguaugg

SEQ ID NO: 2562353 - RNA, 19 nt, Artificial Sequence
  Description of Artificial Sequence: Synthetic oligonucleotide
auuuacuaacuaguaaggc

SEQ ID NO: 2562354 - RNA, 19 nt, Artificial Sequence
  Description of Artificial Sequence: Synthetic oligonucleotide
aaaguaugguauuuccuca

SEQ ID NO: 2562355 - RNA, 19 nt, Artificial Sequence
  Description of Artificial Sequence: Synthetic oligonucleotide
cuauaggacacaauccacg

SEQ ID NO: 2562356 - RNA, 19 nt, Artificial Sequence
  Description of Artificial Sequence: Synthetic oligonucleotide
accauuucuaauaaugugg

SEQ ID NO: 2562357 - RNA, 19 nt, Artificial Sequence
  Description of Artificial Sequence: Synthetic oligonucleotide
uuaagacaaaguaugguau

SEQ ID NO: 2562358 - RNA, 19 nt, Artificial Sequence
  Description of Artificial Sequence: Synthetic oligonucleotide
auuaagacaaaguauggua

SEQ ID NO: 2562359 - RNA, 19 nt, Artificial Sequence
  Description of Artificial Sequence: Synthetic oligonucleotide
uaguaauuuacaauauggu

SEQ ID NO: 2562360 - RNA, 19 nt, Artificial Sequence
  Description of Artificial Sequence: Synthetic oligonucleotide
aucuuuugaaaagacaauc

SEQ ID NO: 2562361 - RNA, 19 nt, Artificial Sequence
  Description of Artificial Sequence: Synthetic oligonucleotide
uuucuaauaauguggucug

SEQ ID NO: 2562362 - RNA, 19 nt, Artificial Sequence
  Description of Artificial Sequence: Synthetic oligonucleotide
uuacuaacuaguaaggcuu

SEQ ID NO: 2562363 - RNA, 19 nt, Artificial Sequence
  Description of Artificial Sequence: Synthetic oligonucleotide
uauagucuauaaaacaaau

SEQ ID NO: 2562364 - RNA, 19 nt, Artificial Sequence
  Description of Artificial Sequence: Synthetic oligonucleotide
ugcuauuaaauugaaugag

SEQ ID NO: 2562365 - RNA, 19 nt, Artificial Sequence
  Description of Artificial Sequence: Synthetic oligonucleotide
aguaauuuacaauauggua

SEQ ID NO: 2562366 - RNA, 19 nt, Artificial Sequence
  Description of Artificial Sequence: Synthetic oligonucleotide
aaguacacuaugccuuuac

SEQ ID NO: 2562367 - RNA, 19 nt, Artificial Sequence
  Description of Artificial Sequence: Synthetic oligonucleotide
auauaugaacuucaacuug

SEQ ID NO: 2562368 - RNA, 19 nt, Artificial Sequence
  Description of Artificial Sequence: Synthetic oligonucleotide
uccucaugaaugcaucugg

SEQ ID NO: 2562369 - RNA, 19 nt, Artificial Sequence
  Description of Artificial Sequence: Synthetic oligonucleotide
ucaaucuuuugaaaagaca

SEQ ID NO: 2562370 - RNA, 19 nt, Artificial Sequence
  Description of Artificial Sequence: Synthetic oligonucleotide
uauucccugagcaaguaca

SEQ ID NO: 2562371 - RNA, 19 nt, Artificial Sequence
  Description of Artificial Sequence: Synthetic oligonucleotide
ugaacuucaacuugccuga

SEQ ID NO: 2562372 - RNA, 19 nt, Artificial Sequence
  Description of Artificial Sequence: Synthetic oligonucleotide
gacaaaguaugguauuucc

SEQ ID NO: 2562373 - RNA, 19 nt, Artificial Sequence
  Description of Artificial Sequence: Synthetic oligonucleotide
uuauagucuauaaaacaaa

SEQ ID NO: 2562374 - RNA, 19 nt, Artificial Sequence
  Description of Artificial Sequence: Synthetic oligonucleotide
uugaccaacagaugaaaug

SEQ ID NO: 2562375 - RNA, 19 nt, Artificial Sequence
  Description of Artificial Sequence: Synthetic oligonucleotide
aauuaagacaaaguauggu

SEQ ID NO: 2562376 - RNA, 19 nt, Artificial Sequence
  Description of Artificial Sequence: Synthetic oligonucleotide
aucucaaucuuuugaaaag

SEQ ID NO: 2562377 - RNA, 19 nt, Artificial Sequence
  Description of Artificial Sequence: Synthetic oligonucleotide
aacuggacugaccucauca

SEQ ID NO: 2562378 - RNA, 19 nt, Artificial Sequence
  Description of Artificial Sequence: Synthetic oligonucleotide
augaaaugucgccaaaguc

SEQ ID NO: 2562379 - RNA, 19 nt, Artificial Sequence
  Description of Artificial Sequence: Synthetic oligonucleotide
cuucuauaggacacaaucc

SEQ ID NO: 2562380 - RNA, 19 nt, Artificial Sequence
  Description of Artificial Sequence: Synthetic oligonucleotide
caaaguaugguauuuccuc

SEQ ID NO: 2562381 - RNA, 19 nt, Artificial Sequence
  Description of Artificial Sequence: Synthetic oligonucleotide
uauaggacacaauccacgc

SEQ ID NO: 2562382 - RNA, 19 nt, Artificial Sequence
  Description of Artificial Sequence: Synthetic oligonucleotide
ucugcuuuauacauacacu

SEQ ID NO: 2562383 - RNA, 19 nt, Artificial Sequence
  Description of Artificial Sequence: Synthetic oligonucleotide
gacauuaguauuaacaaaa

SEQ ID NO: 2562384 - RNA, 19 nt, Artificial Sequence
  Description of Artificial Sequence: Synthetic oligonucleotide
aacuucaacuugccugagc

SEQ ID NO: 2562385 - RNA, 19 nt, Artificial Sequence
  Description of Artificial Sequence: Synthetic oligonucleotide
agauacugcaucucaaucu

SEQ ID NO: 2562386 - RNA, 19 nt, Artificial Sequence
  Description of Artificial Sequence: Synthetic oligonucleotide
caaucuuuugaaaagacaa

SEQ ID NO: 2562387 - RNA, 19 nt, Artificial Sequence
  Description of Artificial Sequence: Synthetic oligonucleotide
acuucaacuugccugagca

SEQ ID NO: 2562388 - RNA, 19 nt, Artificial Sequence
  Description of Artificial Sequence: Synthetic oligonucleotide
acuuguuuugaccauuucu

SEQ ID NO: 2562389 - RNA, 19 nt, Artificial Sequence
  Description of Artificial Sequence: Synthetic oligonucleotide
uggacugaccucaucaggc

SEQ ID NO: 2562390 - RNA, 19 nt, Artificial Sequence
  Description of Artificial Sequence: Synthetic oligonucleotide
gauuaucaaagcaaacagc

SEQ ID NO: 2562391 - RNA, 19 nt, Artificial Sequence
  Description of Artificial Sequence: Synthetic oligonucleotide
ugaccauuucuaauaaugu

SEQ ID NO: 2562392 - RNA, 19 nt, Artificial Sequence
  Description of Artificial Sequence: Synthetic oligonucleotide
augcuauuaaauugaauga

SEQ ID NO: 2562393 - RNA, 19 nt, Artificial Sequence
  Description of Artificial Sequence: Synthetic oligonucleotide
ugcagugcuuccaaaacug

SEQ ID NO: 2562394 - RNA, 19 nt, Artificial Sequence
  Description of Artificial Sequence: Synthetic oligonucleotide
aauguggucugguuaaaau

SEQ ID NO: 2562395 - RNA, 19 nt, Artificial Sequence
  Description of Artificial Sequence: Synthetic oligonucleotide
uuuauacauacacuguaua

SEQ ID NO: 2562396 - RNA, 19 nt, Artificial Sequence
  Description of Artificial Sequence: Synthetic oligonucleotide
ugagacuuccccuagcagu

SEQ ID NO: 2562397 - RNA, 19 nt, Artificial Sequence
  Description of Artificial Sequence: Synthetic oligonucleotide
cagaugauauggcuuaacg

SEQ ID NO: 2562398 - RNA, 19 nt, Artificial Sequence
  Description of Artificial Sequence: Synthetic oligonucleotide
gaugauauggcuuaacgau

SEQ ID NO: 2562399 - RNA, 19 nt, Artificial Sequence
  Description of Artificial Sequence: Synthetic oligonucleotide
ugaccaacagaugaaaugu

SEQ ID NO: 2562400 - RNA, 19 nt, Artificial Sequence
  Description of Artificial Sequence: Synthetic oligonucleotide
uuaaauugaaugagacuuc

SEQ ID NO: 2562401 - RNA, 19 nt, Artificial Sequence
  Description of Artificial Sequence: Synthetic oligonucleotide
gaccauuucuaauaaugug

SEQ ID NO: 2562402 - RNA, 19 nt, Artificial Sequence
  Description of Artificial Sequence: Synthetic oligonucleotide
uaauaauguggucugguua

SEQ ID NO: 2562403 - RNA, 19 nt, Artificial Sequence
  Description of Artificial Sequence: Synthetic oligonucleotide
guacacuaugccuuuacag

SEQ ID NO: 2562404 - RNA, 19 nt, Artificial Sequence
  Description of Artificial Sequence: Synthetic oligonucleotide
aguacaugaaacaauuucu

SEQ ID NO: 2562405 - RNA, 19 nt, Artificial Sequence
  Description of Artificial Sequence: Synthetic oligonucleotide
agaugauauggcuuaacga

SEQ ID NO: 2562406 - RNA, 19 nt, Artificial Sequence
  Description of Artificial Sequence: Synthetic oligonucleotide
cucuaaacuuguuuugacc

SEQ ID NO: 2562407 - RNA, 19 nt, Artificial Sequence
  Description of Artificial Sequence: Synthetic oligonucleotide
auacauacacuguauauuu

SEQ ID NO: 2562408 - RNA, 19 nt, Artificial Sequence
  Description of Artificial Sequence: Synthetic oligonucleotide
auaggacacaauccacgcc

SEQ ID NO: 2562409 - RNA, 19 nt, Artificial Sequence
  Description of Artificial Sequence: Synthetic oligonucleotide
aaaccucagaugauauggc

SEQ ID NO: 2562410 - RNA, 19 nt, Artificial Sequence
  Description of Artificial Sequence: Synthetic oligonucleotide
uggaacaguauccucugug

SEQ ID NO: 2562411 - RNA, 19 nt, Artificial Sequence
  Description of Artificial Sequence: Synthetic oligonucleotide
auugaaugagacuuccccu

SEQ ID NO: 2562412 - RNA, 19 nt, Artificial Sequence
  Description of Artificial Sequence: Synthetic oligonucleotide
aaagcaaacagcacugagu

SEQ ID NO: 2562413 - RNA, 19 nt, Artificial Sequence
  Description of Artificial Sequence: Synthetic oligonucleotide
auccucuuggaacaguauc

SEQ ID NO: 2562414 - RNA, 19 nt, Artificial Sequence
  Description of Artificial Sequence: Synthetic oligonucleotide
uaacuaguaaggcuuugga

SEQ ID NO: 2562415 - RNA, 19 nt, Artificial Sequence
  Description of Artificial Sequence: Synthetic oligonucleotide
ucuauaggacacaauccac

SEQ ID NO: 2562416 - RNA, 19 nt, Artificial Sequence
  Description of Artificial Sequence: Synthetic oligonucleotide
aacagaugaaaugucgcca

SEQ ID NO: 2562417 - RNA, 19 nt, Artificial Sequence
  Description of Artificial Sequence: Synthetic oligonucleotide
aauucacaucucaagccgg

SEQ ID NO: 2562418 - RNA, 19 nt, Artificial Sequence
  Description of Artificial Sequence: Synthetic oligonucleotide
uuuugaccauuucuaauaa

SEQ ID NO: 2562419 - RNA, 19 nt, Artificial Sequence
  Description of Artificial Sequence: Synthetic oligonucleotide
caggcuauccucuuggaac

SEQ ID NO: 2562420 - RNA, 19 nt, Artificial Sequence
  Description of Artificial Sequence: Synthetic oligonucleotide
acgauuaucaaagcaaaca

SEQ ID NO: 2562421 - RNA, 19 nt, Artificial Sequence
  Description of Artificial Sequence: Synthetic oligonucleotide
cuaguaaggcuuuggacug

SEQ ID NO: 2562422 - RNA, 19 nt, Artificial Sequence
  Description of Artificial Sequence: Synthetic oligonucleotide
caacagaugaaaugucgcc

SEQ ID NO: 2562423 - RNA, 19 nt, Artificial Sequence
  Description of Artificial Sequence: Synthetic oligonucleotide
ucucaagccggaaaccuca

SEQ ID NO: 2562424 - RNA, 19 nt, Artificial Sequence
  Description of Artificial Sequence: Synthetic oligonucleotide
acaauccacgccaagcacc

SEQ ID NO: 2562425 - RNA, 19 nt, Artificial Sequence
  Description of Artificial Sequence: Synthetic oligonucleotide
ugagcaucuucuauaggac

SEQ ID NO: 2562426 - RNA, 19 nt, Artificial Sequence
  Description of Artificial Sequence: Synthetic oligonucleotide
aaagucuaagacauuagua

SEQ ID NO: 2562427 - RNA, 19 nt, Artificial Sequence
  Description of Artificial Sequence: Synthetic oligonucleotide
ugauauggcuuaacgauua

SEQ ID NO: 2562428 - RNA, 19 nt, Artificial Sequence
  Description of Artificial Sequence: Synthetic oligonucleotide
agucuauaaaacaaauuca

SEQ ID NO: 2562429 - RNA, 19 nt, Artificial Sequence
  Description of Artificial Sequence: Synthetic oligonucleotide
ucucucuaaacuuguuuug

SEQ ID NO: 2562430 - RNA, 19 nt, Artificial Sequence
  Description of Artificial Sequence: Synthetic oligonucleotide
ugcaucucaaucuuuugaa

SEQ ID NO: 2562431 - RNA, 19 nt, Artificial Sequence
  Description of Artificial Sequence: Synthetic oligonucleotide
ugcuuuauacauacacugu

SEQ ID NO: 2562432 - RNA, 19 nt, Artificial Sequence
  Description of Artificial Sequence: Synthetic oligonucleotide
cuuaacgauuaucaaagca

SEQ ID NO: 2562433 - RNA, 19 nt, Artificial Sequence
  Description of Artificial Sequence: Synthetic oligonucleotide
gguauuuccucaugaaugc

SEQ ID NO: 2562434 - RNA, 19 nt, Artificial Sequence
  Description of Artificial Sequence: Synthetic oligonucleotide
acacuaugccuuuacagga

SEQ ID NO: 2562435 - RNA, 19 nt, Artificial Sequence
  Description of Artificial Sequence: Synthetic oligonucleotide
ggcuuaacgauuaucaaag

SEQ ID NO: 2562436 - RNA, 19 nt, Artificial Sequence
  Description of Artificial Sequence: Synthetic oligonucleotide
cucaaucuuuugaaaagac

SEQ ID NO: 2562437 - RNA, 19 nt, Artificial Sequence
  Description of Artificial Sequence: Synthetic oligonucleotide
gaaugcaucuggcagaucu

SEQ ID NO: 2562438 - RNA, 19 nt, Artificial Sequence
  Description of Artificial Sequence: Synthetic oligonucleotide
gucauauucccugagcaag

SEQ ID NO: 2562439 - RNA, 19 nt, Artificial Sequence
  Description of Artificial Sequence: Synthetic oligonucleotide
accucaucaggcuauccuc

SEQ ID NO: 2562440 - RNA, 19 nt, Artificial Sequence
  Description of Artificial Sequence: Synthetic oligonucleotide
aaccucagaugauauggcu

SEQ ID NO: 2562441 - RNA, 19 nt, Artificial Sequence
  Description of Artificial Sequence: Synthetic oligonucleotide
agcaucuucuauaggacac

SEQ ID NO: 2562442 - RNA, 19 nt, Artificial Sequence
  Description of Artificial Sequence: Synthetic oligonucleotide
ugucgccaaagucauauuc

SEQ ID NO: 2562443 - RNA, 19 nt, Artificial Sequence
  Description of Artificial Sequence: Synthetic oligonucleotide
ucucaaucuuuugaaaaga

SEQ ID NO: 2562444 - RNA, 19 nt, Artificial Sequence
  Description of Artificial Sequence: Synthetic oligonucleotide
uggcuuaacgauuaucaaa

SEQ ID NO: 2562445 - RNA, 19 nt, Artificial Sequence
  Description of Artificial Sequence: Synthetic oligonucleotide
gauauaugaacuucaacuu

SEQ ID NO: 2562446 - RNA, 19 nt, Artificial Sequence
  Description of Artificial Sequence: Synthetic oligonucleotide
cuuguuuugaccauuucua

SEQ ID NO: 2562447 - RNA, 19 nt, Artificial Sequence
  Description of Artificial Sequence: Synthetic oligonucleotide
auauucccugagcaaguac

SEQ ID NO: 2562448 - RNA, 19 nt, Artificial Sequence
  Description of Artificial Sequence: Synthetic oligonucleotide
ggaacaguauccucugugg

SEQ ID NO: 2562449 - RNA, 19 nt, Artificial Sequence
  Description of Artificial Sequence: Synthetic oligonucleotide
aacaguauccucugugguu

SEQ ID NO: 2562450 - RNA, 19 nt, Artificial Sequence
  Description of Artificial Sequence: Synthetic oligonucleotide
ucuaauaauguggucuggu

SEQ ID NO: 2562451 - RNA, 19 nt, Artificial Sequence
  Description of Artificial Sequence: Synthetic oligonucleotide
accaacagaugaaaugucg

SEQ ID NO: 2562452 - RNA, 19 nt, Artificial Sequence
  Description of Artificial Sequence: Synthetic oligonucleotide
agccggaaaccucagauga

SEQ ID NO: 2562453 - RNA, 19 nt, Artificial Sequence
  Description of Artificial Sequence: Synthetic oligonucleotide
cagcguauuuacuaacuag

SEQ ID NO: 2562454 - RNA, 19 nt, Artificial Sequence
  Description of Artificial Sequence: Synthetic oligonucleotide
ucaacuugccugagcaucu

SEQ ID NO: 2562455 - RNA, 19 nt, Artificial Sequence
  Description of Artificial Sequence: Synthetic oligonucleotide
ucgccaaagucauauuccc

SEQ ID NO: 2562456 - RNA, 19 nt, Artificial Sequence
  Description of Artificial Sequence: Synthetic oligonucleotide
gacacaauccacgccaagc

SEQ ID NO: 2562457 - RNA, 19 nt, Artificial Sequence
  Description of Artificial Sequence: Synthetic oligonucleotide
uguuuugaccauuucuaau

SEQ ID NO: 2562458 - RNA, 19 nt, Artificial Sequence
  Description of Artificial Sequence: Synthetic oligonucleotide
agacauuaguauuaacaaa

SEQ ID NO: 2562459 - RNA, 19 nt, Artificial Sequence
  Description of Artificial Sequence: Synthetic oligonucleotide
ucucuaaacuuguuuugac

SEQ ID NO: 2562460 - RNA, 19 nt, Artificial Sequence
  Description of Artificial Sequence: Synthetic oligonucleotide
caucaggcuauccucuugg

SEQ ID NO: 2562461 - RNA, 19 nt, Artificial Sequence
  Description of Artificial Sequence: Synthetic oligonucleotide
aauuucucucuaaacuugu

SEQ ID NO: 2562462 - RNA, 19 nt, Artificial Sequence
  Description of Artificial Sequence: Synthetic oligonucleotide
ucauauucccugagcaagu

SEQ ID NO: 2562463 - RNA, 19 nt, Artificial Sequence
  Description of Artificial Sequence: Synthetic oligonucleotide
ugaaacaauuucucucuaa

SEQ ID NO: 2562464 - RNA, 19 nt, Artificial Sequence
  Description of Artificial Sequence: Synthetic oligonucleotide
cacaucucaagccggaaac

SEQ ID NO: 2562465 - RNA, 19 nt, Artificial Sequence
  Description of Artificial Sequence: Synthetic oligonucleotide
uugaaugagacuuccccua

SEQ ID NO: 2562466 - RNA, 19 nt, Artificial Sequence
  Description of Artificial Sequence: Synthetic oligonucleotide
aaguaugguauuuccucau

SEQ ID NO: 2562467 - RNA, 19 nt, Artificial Sequence
  Description of Artificial Sequence: Synthetic oligonucleotide
agucuaagacauuaguauu

SEQ ID NO: 2562468 - RNA, 19 nt, Artificial Sequence
  Description of Artificial Sequence: Synthetic oligonucleotide
acacaauccacgccaagca

SEQ ID NO: 2562469 - RNA, 19 nt, Artificial Sequence
  Description of Artificial Sequence: Synthetic oligonucleotide
caaagcaaacagcacugag

SEQ ID NO: 2562470 - RNA, 19 nt, Artificial Sequence
  Description of Artificial Sequence: Synthetic oligonucleotide
aagccggaaaccucagaug

SEQ ID NO: 2562471 - RNA, 19 nt, Artificial Sequence
  Description of Artificial Sequence: Synthetic oligonucleotide
acuguauauuuauagucua

SEQ ID NO: 2562472 - RNA, 19 nt, Artificial Sequence
  Description of Artificial Sequence: Synthetic oligonucleotide
ugcuuccaaaacuggacug

SEQ ID NO: 2562473 - RNA, 19 nt, Artificial Sequence
  Description of Artificial Sequence: Synthetic oligonucleotide
ucuaagacauuaguauuaa

SEQ ID NO: 2562474 - RNA, 19 nt, Artificial Sequence
  Description of Artificial Sequence: Synthetic oligonucleotide
gagauacugcaucucaauc

SEQ ID NO: 2562475 - RNA, 19 nt, Artificial Sequence
  Description of Artificial Sequence: Synthetic oligonucleotide
aaucuuuugaaaagacaau

SEQ ID NO: 2562476 - RNA, 19 nt, Artificial Sequence
  Description of Artificial Sequence: Synthetic oligonucleotide
uucaacuugccugagcauc

SEQ ID NO: 2562477 - RNA, 19 nt, Artificial Sequence
  Description of Artificial Sequence: Synthetic oligonucleotide
agaugaaaugucgccaaag

SEQ ID NO: 2562478 - RNA, 19 nt, Artificial Sequence
  Description of Artificial Sequence: Synthetic oligonucleotide
uuguuuugaccauuucuaa

SEQ ID NO: 2562479 - RNA, 19 nt, Artificial Sequence
  Description of Artificial Sequence: Synthetic oligonucleotide
cuuggaacaguauccucug

SEQ ID NO: 2562480 - RNA, 19 nt, Artificial Sequence
  Description of Artificial Sequence: Synthetic oligonucleotide
aaacagcacugaguucugc

SEQ ID NO: 2562481 - RNA, 19 nt, Artificial Sequence
  Description of Artificial Sequence: Synthetic oligonucleotide
uccccuagcagugaggcca

SEQ ID NO: 2562482 - RNA, 19 nt, Artificial Sequence
  Description of Artificial Sequence: Synthetic oligonucleotide
aaacaaauucacaucucaa

SEQ ID NO: 2562483 - RNA, 19 nt, Artificial Sequence
  Description of Artificial Sequence: Synthetic oligonucleotide
agcguauuuacuaacuagu

SEQ ID NO: 2562484 - RNA, 19 nt, Artificial Sequence
  Description of Artificial Sequence: Synthetic oligonucleotide
uacaggauauaugaacuuc

SEQ ID NO: 2562485 - RNA, 19 nt, Artificial Sequence
  Description of Artificial Sequence: Synthetic oligonucleotide
aguaugguauuuccucaug

SEQ ID NO: 2562486 - RNA, 19 nt, Artificial Sequence
  Description of Artificial Sequence: Synthetic oligonucleotide
auuuccucaugaaugcauc

SEQ ID NO: 2562487 - RNA, 19 nt, Artificial Sequence
  Description of Artificial Sequence: Synthetic oligonucleotide
uccacgccaagcaccagag

SEQ ID NO: 2562488 - RNA, 19 nt, Artificial Sequence
  Description of Artificial Sequence: Synthetic oligonucleotide
acaucucaagccggaaacc

SEQ ID NO: 2562489 - RNA, 19 nt, Artificial Sequence
  Description of Artificial Sequence: Synthetic oligonucleotide
acuggacugaccucaucag

SEQ ID NO: 2562490 - RNA, 19 nt, Artificial Sequence
  Description of Artificial Sequence: Synthetic oligonucleotide
gccuuuacaggauauauga

SEQ ID NO: 2562491 - RNA, 19 nt, Artificial Sequence
  Description of Artificial Sequence: Synthetic oligonucleotide
uacagaaggacaggcauuc

SEQ ID NO: 2562492 - RNA, 19 nt, Artificial Sequence
  Description of Artificial Sequence: Synthetic oligonucleotide
uucuaauaauguggucugg

SEQ ID NO: 2562493 - RNA, 19 nt, Artificial Sequence
  Description of Artificial Sequence: Synthetic oligonucleotide
aguacacuaugccuuuaca

SEQ ID NO: 2562494 - RNA, 19 nt, Artificial Sequence
  Description of Artificial Sequence: Synthetic oligonucleotide
gaugaaaugucgccaaagu

SEQ ID NO: 2562495 - RNA, 19 nt, Artificial Sequence
  Description of Artificial Sequence: Synthetic oligonucleotide
aaacuggacugaccucauc

SEQ ID NO: 2562496 - RNA, 19 nt, Artificial Sequence
  Description of Artificial Sequence: Synthetic oligonucleotide
agagauacugcaucucaau

SEQ ID NO: 2562497 - RNA, 19 nt, Artificial Sequence
  Description of Artificial Sequence: Synthetic oligonucleotide
auauggcuuaacgauuauc

SEQ ID NO: 2562498 - RNA, 19 nt, Artificial Sequence
  Description of Artificial Sequence: Synthetic oligonucleotide
aaaaugcuauuaaauugaa

SEQ ID NO: 2562499 - RNA, 19 nt, Artificial Sequence
  Description of Artificial Sequence: Synthetic oligonucleotide
uuuccucaugaaugcaucu

SEQ ID NO: 2562500 - RNA, 19 nt, Artificial Sequence
  Description of Artificial Sequence: Synthetic oligonucleotide
uuccaaaacuggacugacc

SEQ ID NO: 2562501 - RNA, 19 nt, Artificial Sequence
  Description of Artificial Sequence: Synthetic oligonucleotide
aggacaggcauucugcuuu

SEQ ID NO: 2562502 - RNA, 19 nt, Artificial Sequence
  Description of Artificial Sequence: Synthetic oligonucleotide
uacugcaucucaaucuuuu

SEQ ID NO: 2562503 - RNA, 19 nt, Artificial Sequence
  Description of Artificial Sequence: Synthetic oligonucleotide
guaugguauuuccucauga

SEQ ID NO: 2562504 - RNA, 19 nt, Artificial Sequence
  Description of Artificial Sequence: Synthetic oligonucleotide
ucccugagcaaguacacua

SEQ ID NO: 2562505 - RNA, 19 nt, Artificial Sequence
  Description of Artificial Sequence: Synthetic oligonucleotide
caugaaugcaucuggcaga

SEQ ID NO: 2562506 - RNA, 19 nt, Artificial Sequence
  Description of Artificial Sequence: Synthetic oligonucleotide
gagacuuccccuagcagug

SEQ ID NO: 2562507 - RNA, 19 nt, Artificial Sequence
  Description of Artificial Sequence: Synthetic oligonucleotide
ucaucaggcuauccucuug

SEQ ID NO: 2562508 - RNA, 19 nt, Artificial Sequence
  Description of Artificial Sequence: Synthetic oligonucleotide
aaagguugaccaacagaug

SEQ ID NO: 2562509 - RNA, 19 nt, Artificial Sequence
  Description of Artificial Sequence: Synthetic oligonucleotide
gucgccaaagucauauucc

SEQ ID NO: 2562510 - RNA, 19 nt, Artificial Sequence
  Description of Artificial Sequence: Synthetic oligonucleotide
cuggacugaccucaucagg

SEQ ID NO: 2562511 - RNA, 19 nt, Artificial Sequence
  Description of Artificial Sequence: Synthetic oligonucleotide
ucacaucucaagccggaaa

SEQ ID NO: 2562512 - RNA, 19 nt, Artificial Sequence
  Description of Artificial Sequence: Synthetic oligonucleotide
acaggauauaugaacuuca

SEQ ID NO: 2562513 - RNA, 19 nt, Artificial Sequence
  Description of Artificial Sequence: Synthetic oligonucleotide
aagaacaggguggugggaa

SEQ ID NO: 2562514 - RNA, 19 nt, Artificial Sequence
  Description of Artificial Sequence: Synthetic oligonucleotide
uuacaggauauaugaacuu

SEQ ID NO: 2562515 - RNA, 19 nt, Artificial Sequence
  Description of Artificial Sequence: Synthetic oligonucleotide
acagcacugaguucugccu

SEQ ID NO: 2562516 - RNA, 19 nt, Artificial Sequence
  Description of Artificial Sequence: Synthetic oligonucleotide
cgauuaucaaagcaaacag

SEQ ID NO: 2562517 - RNA, 19 nt, Artificial Sequence
  Description of Artificial Sequence: Synthetic oligonucleotide
aggcuauccucuuggaaca

SEQ ID NO: 2562518 - RNA, 19 nt, Artificial Sequence
  Description of Artificial Sequence: Synthetic oligonucleotide
acugcaucucaaucuuuug

SEQ ID NO: 2562519 - RNA, 19 nt, Artificial Sequence
  Description of Artificial Sequence: Synthetic oligonucleotide
cuuccccuagcagugaggc

SEQ ID NO: 2562520 - RNA, 19 nt, Artificial Sequence
  Description of Artificial Sequence: Synthetic oligonucleotide
cuaagacauuaguauuaac

SEQ ID NO: 2562521 - RNA, 19 nt, Artificial Sequence
  Description of Artificial Sequence: Synthetic oligonucleotide
cuagcagugaggccacaag

SEQ ID NO: 2562522 - RNA, 19 nt, Artificial Sequence
  Description of Artificial Sequence: Synthetic oligonucleotide
cagaaggacaggcauucug

SEQ ID NO: 2562523 - RNA, 19 nt, Artificial Sequence
  Description of Artificial Sequence: Synthetic oligonucleotide
ccaacagaugaaaugucgc

SEQ ID NO: 2562524 - RNA, 19 nt, Artificial Sequence
  Description of Artificial Sequence: Synthetic oligonucleotide
augagacuuccccuagcag

SEQ ID NO: 2562525 - RNA, 19 nt, Artificial Sequence
  Description of Artificial Sequence: Synthetic oligonucleotide
aaaugcuauuaaauugaau

SEQ ID NO: 2562526 - RNA, 19 nt, Artificial Sequence
  Description of Artificial Sequence: Synthetic oligonucleotide
auucccugagcaaguacac

SEQ ID NO: 2562527 - RNA, 19 nt, Artificial Sequence
  Description of Artificial Sequence: Synthetic oligonucleotide
uuccucaugaaugcaucug

SEQ ID NO: 2562528 - RNA, 19 nt, Artificial Sequence
  Description of Artificial Sequence: Synthetic oligonucleotide
acaaaguaugguauuuccu

SEQ ID NO: 2562529 - RNA, 19 nt, Artificial Sequence
  Description of Artificial Sequence: Synthetic oligonucleotide
aaugcaucuggcagaucug

SEQ ID NO: 2562530 - RNA, 19 nt, Artificial Sequence
  Description of Artificial Sequence: Synthetic oligonucleotide
agcaaguacacuaugccuu

SEQ ID NO: 2562531 - RNA, 19 nt, Artificial Sequence
  Description of Artificial Sequence: Synthetic oligonucleotide
cauuucuaauaaugugguc

SEQ ID NO: 2562532 - RNA, 19 nt, Artificial Sequence
  Description of Artificial Sequence: Synthetic oligonucleotide
uaaacuuguuuugaccauu

SEQ ID NO: 2562533 - RNA, 19 nt, Artificial Sequence
  Description of Artificial Sequence: Synthetic oligonucleotide
ucaaagcaaacagcacuga

SEQ ID NO: 2562534 - RNA, 19 nt, Artificial Sequence
  Description of Artificial Sequence: Synthetic oligonucleotide
cugaguucugccugccggc

SEQ ID NO: 2562535 - RNA, 19 nt, Artificial Sequence
  Description of Artificial Sequence: Synthetic oligonucleotide
auggcuuaacgauuaucaa

SEQ ID NO: 2562536 - RNA, 19 nt, Artificial Sequence
  Description of Artificial Sequence: Synthetic oligonucleotide
aaaguacaugaaacaauuu

SEQ ID NO: 2562537 - RNA, 19 nt, Artificial Sequence
  Description of Artificial Sequence: Synthetic oligonucleotide
gauacugcaucucaaucuu

SEQ ID NO: 2562538 - RNA, 19 nt, Artificial Sequence
  Description of Artificial Sequence: Synthetic oligonucleotide
cucaugaaugcaucuggca

SEQ ID NO: 2562539 - RNA, 19 nt, Artificial Sequence
  Description of Artificial Sequence: Synthetic oligonucleotide
auagucuauaaaacaaauu

SEQ ID NO: 2562540 - RNA, 19 nt, Artificial Sequence
  Description of Artificial Sequence: Synthetic oligonucleotide
uggugcagugcuuccaaaa

SEQ ID NO: 2562541 - RNA, 19 nt, Artificial Sequence
  Description of Artificial Sequence: Synthetic oligonucleotide
uacuaacuaguaaggcuuu

SEQ ID NO: 2562542 - RNA, 19 nt, Artificial Sequence
  Description of Artificial Sequence: Synthetic oligonucleotide
ccaagcaccagagauacug

SEQ ID NO: 2562543 - RNA, 19 nt, Artificial Sequence
  Description of Artificial Sequence: Synthetic oligonucleotide
gacuuccccuagcagugag

SEQ ID NO: 2562544 - RNA, 19 nt, Artificial Sequence
  Description of Artificial Sequence: Synthetic oligonucleotide
acaguauccucugugguuu

SEQ ID NO: 2562545 - RNA, 19 nt, Artificial Sequence
  Description of Artificial Sequence: Synthetic oligonucleotide
gcuauuaaauugaaugaga

SEQ ID NO: 2562546 - RNA, 19 nt, Artificial Sequence
  Description of Artificial Sequence: Synthetic oligonucleotide
ucagaugauauggcuuaac

SEQ ID NO: 2562547 - RNA, 19 nt, Artificial Sequence
  Description of Artificial Sequence: Synthetic oligonucleotide
cuuuggacuggugcagugc

SEQ ID NO: 2562548 - RNA, 19 nt, Artificial Sequence
  Description of Artificial Sequence: Synthetic oligonucleotide
uugccugagcaucuucuau

SEQ ID NO: 2562549 - RNA, 19 nt, Artificial Sequence
  Description of Artificial Sequence: Synthetic oligonucleotide
aaacuuguuuugaccauuu

SEQ ID NO: 2562550 - RNA, 19 nt, Artificial Sequence
  Description of Artificial Sequence: Synthetic oligonucleotide
cacaauccacgccaagcac

SEQ ID NO: 2562551 - RNA, 19 nt, Artificial Sequence
  Description of Artificial Sequence: Synthetic oligonucleotide
uaguaaggcuuuggacugg

SEQ ID NO: 2562552 - RNA, 19 nt, Artificial Sequence
  Description of Artificial Sequence: Synthetic oligonucleotide
gagcaaguacacuaugccu

SEQ ID NO: 2562553 - RNA, 19 nt, Artificial Sequence
  Description of Artificial Sequence: Synthetic oligonucleotide
cugcaucucaaucuuuuga

SEQ ID NO: 2562554 - RNA, 19 nt, Artificial Sequence
  Description of Artificial Sequence: Synthetic oligonucleotide
augccuuuacaggauauau

SEQ ID NO: 2562555 - RNA, 19 nt, Artificial Sequence
  Description of Artificial Sequence: Synthetic oligonucleotide
cuuccaaaacuggacugac

SEQ ID NO: 2562556 - RNA, 19 nt, Artificial Sequence
  Description of Artificial Sequence: Synthetic oligonucleotide
ucaagccggaaaccucaga

SEQ ID NO: 2562557 - RNA, 19 nt, Artificial Sequence
  Description of Artificial Sequence: Synthetic oligonucleotide
ggugcagugcuuccaaaac

SEQ ID NO: 2562558 - RNA, 19 nt, Artificial Sequence
  Description of Artificial Sequence: Synthetic oligonucleotide
aucucaagccggaaaccuc

SEQ ID NO: 2562559 - RNA, 19 nt, Artificial Sequence
  Description of Artificial Sequence: Synthetic oligonucleotide
gguaaagaauaaauaaaua

SEQ ID NO: 2562560 - RNA, 19 nt, Artificial Sequence
  Description of Artificial Sequence: Synthetic oligonucleotide
acuaugccuuuacaggaua

SEQ ID NO: 2562561 - RNA, 19 nt, Artificial Sequence
  Description of Artificial Sequence: Synthetic oligonucleotide
uaauguggucugguuaaaa

SEQ ID NO: 2562562 - RNA, 19 nt, Artificial Sequence
  Description of Artificial Sequence: Synthetic oligonucleotide
caauccacgccaagcacca

SEQ ID NO: 2562563 - RNA, 19 nt, Artificial Sequence
  Description of Artificial Sequence: Synthetic oligonucleotide
ggaaaccucagaugauaug

SEQ ID NO: 2562564 - RNA, 19 nt, Artificial Sequence
  Description of Artificial Sequence: Synthetic oligonucleotide
acuaacuaguaaggcuuug

SEQ ID NO: 2562565 - RNA, 19 nt, Artificial Sequence
  Description of Artificial Sequence: Synthetic oligonucleotide
ugccagcguauuuacuaac

SEQ ID NO: 2562566 - RNA, 19 nt, Artificial Sequence
  Description of Artificial Sequence: Synthetic oligonucleotide
ucuggcagaucuguuuaaa

SEQ ID NO: 2562567 - RNA, 19 nt, Artificial Sequence
  Description of Artificial Sequence: Synthetic oligonucleotide
gaaaugucgccaaagucau

SEQ ID NO: 2562568 - RNA, 19 nt, Artificial Sequence
  Description of Artificial Sequence: Synthetic oligonucleotide
acuugccugagcaucuucu

SEQ ID NO: 2562569 - RNA, 19 nt, Artificial Sequence
  Description of Artificial Sequence: Synthetic oligonucleotide
cagcacugaguucugccug

SEQ ID NO: 2562570 - RNA, 19 nt, Artificial Sequence
  Description of Artificial Sequence: Synthetic oligonucleotide
augauauggcuuaacgauu

SEQ ID NO: 2562571 - RNA, 19 nt, Artificial Sequence
  Description of Artificial Sequence: Synthetic oligonucleotide
cuauccucuuggaacagua

SEQ ID NO: 2562572 - RNA, 19 nt, Artificial Sequence
  Description of Artificial Sequence: Synthetic oligonucleotide
gcuuaacgauuaucaaagc

SEQ ID NO: 2562573 - RNA, 19 nt, Artificial Sequence
  Description of Artificial Sequence: Synthetic oligonucleotide
caggauauaugaacuucaa

SEQ ID NO: 2562574 - RNA, 19 nt, Artificial Sequence
  Description of Artificial Sequence: Synthetic oligonucleotide
auucacaucucaagccgga

SEQ ID NO: 2562575 - RNA, 19 nt, Artificial Sequence
  Description of Artificial Sequence: Synthetic oligonucleotide
ccucaugaaugcaucuggc

SEQ ID NO: 2562576 - RNA, 19 nt, Artificial Sequence
  Description of Artificial Sequence: Synthetic oligonucleotide
aaaacuggacugaccucau

SEQ ID NO: 2562577 - RNA, 19 nt, Artificial Sequence
  Description of Artificial Sequence: Synthetic oligonucleotide
augcaucuggcagaucugu

SEQ ID NO: 2562578 - RNA, 19 nt, Artificial Sequence
  Description of Artificial Sequence: Synthetic oligonucleotide
cucaagccggaaaccucag

SEQ ID NO: 2562579 - RNA, 19 nt, Artificial Sequence
  Description of Artificial Sequence: Synthetic oligonucleotide
cacugaguucugccugccg

SEQ ID NO: 2562580 - RNA, 19 nt, Artificial Sequence
  Description of Artificial Sequence: Synthetic oligonucleotide
cagagauacugcaucucaa

SEQ ID NO: 2562581 - RNA, 19 nt, Artificial Sequence
  Description of Artificial Sequence: Synthetic oligonucleotide
caucuggcagaucuguuua

SEQ ID NO: 2562582 - RNA, 19 nt, Artificial Sequence
  Description of Artificial Sequence: Synthetic oligonucleotide
ugcaucuggcagaucuguu

SEQ ID NO: 2562583 - RNA, 19 nt, Artificial Sequence
  Description of Artificial Sequence: Synthetic oligonucleotide
acugaccucaucaggcuau

SEQ ID NO: 2562584 - RNA, 19 nt, Artificial Sequence
  Description of Artificial Sequence: Synthetic oligonucleotide
uuccccuagcagugaggcc

SEQ ID NO: 2562585 - RNA, 19 nt, Artificial Sequence
  Description of Artificial Sequence: Synthetic oligonucleotide
uucccugagcaaguacacu

SEQ ID NO: 2562586 - RNA, 19 nt, Artificial Sequence
  Description of Artificial Sequence: Synthetic oligonucleotide
acuuccccuagcagugagg

SEQ ID NO: 2562587 - RNA, 19 nt, Artificial Sequence
  Description of Artificial Sequence: Synthetic oligonucleotide
uucacaucucaagccggaa

SEQ ID NO: 2562588 - RNA, 19 nt, Artificial Sequence
  Description of Artificial Sequence: Synthetic oligonucleotide
ugaccucaucaggcuaucc

SEQ ID NO: 2562589 - RNA, 19 nt, Artificial Sequence
  Description of Artificial Sequence: Synthetic oligonucleotide
caagccggaaaccucagau

SEQ ID NO: 2562590 - RNA, 19 nt, Artificial Sequence
  Description of Artificial Sequence: Synthetic oligonucleotide
cacgccaagcaccagagau

SEQ ID NO: 2562591 - RNA, 19 nt, Artificial Sequence
  Description of Artificial Sequence: Synthetic oligonucleotide
cugccugccggcugcgccc

SEQ ID NO: 2562592 - RNA, 19 nt, Artificial Sequence
  Description of Artificial Sequence: Synthetic oligonucleotide
cuaauaauguggucugguu

SEQ ID NO: 2562593 - RNA, 19 nt, Artificial Sequence
  Description of Artificial Sequence: Synthetic oligonucleotide
gugcuuccaaaacuggacu

SEQ ID NO: 2562594 - RNA, 19 nt, Artificial Sequence
  Description of Artificial Sequence: Synthetic oligonucleotide
auacagaaggacaggcauu

SEQ ID NO: 2562595 - RNA, 19 nt, Artificial Sequence
  Description of Artificial Sequence: Synthetic oligonucleotide
gugcagugcuuccaaaacu

SEQ ID NO: 2562596 - RNA, 19 nt, Artificial Sequence
  Description of Artificial Sequence: Synthetic oligonucleotide
cuaaacuuguuuugaccau

SEQ ID NO: 2562597 - RNA, 19 nt, Artificial Sequence
  Description of Artificial Sequence: Synthetic oligonucleotide
gacugaccucaucaggcua

SEQ ID NO: 2562598 - RNA, 19 nt, Artificial Sequence
  Description of Artificial Sequence: Synthetic oligonucleotide
agguugaccaacagaugaa

SEQ ID NO: 2562599 - RNA, 19 nt, Artificial Sequence
  Description of Artificial Sequence: Synthetic oligonucleotide
aguauccucugugguuucu

SEQ ID NO: 2562600 - RNA, 19 nt, Artificial Sequence
  Description of Artificial Sequence: Synthetic oligonucleotide
auaauguggucugguuaaa

SEQ ID NO: 2562601 - RNA, 19 nt, Artificial Sequence
  Description of Artificial Sequence: Synthetic oligonucleotide
aggccacaaggaaugaaaa

SEQ ID NO: 2562602 - RNA, 19 nt, Artificial Sequence
  Description of Artificial Sequence: Synthetic oligonucleotide
ccauuucuaauaauguggu

SEQ ID NO: 2562603 - RNA, 19 nt, Artificial Sequence
  Description of Artificial Sequence: Synthetic oligonucleotide
cugccagcguauuuacuaa

SEQ ID NO: 2562604 - RNA, 19 nt, Artificial Sequence
  Description of Artificial Sequence: Synthetic oligonucleotide
gcaucucaaucuuuugaaa

SEQ ID NO: 2562605 - RNA, 19 nt, Artificial Sequence
  Description of Artificial Sequence: Synthetic oligonucleotide
caucuucuauaggacacaa

SEQ ID NO: 2562606 - RNA, 19 nt, Artificial Sequence
  Description of Artificial Sequence: Synthetic oligonucleotide
cguauuuacuaacuaguaa

SEQ ID NO: 2562607 - RNA, 19 nt, Artificial Sequence
  Description of Artificial Sequence: Synthetic oligonucleotide
gcuuuggacuggugcagug

SEQ ID NO: 2562608 - RNA, 19 nt, Artificial Sequence
  Description of Artificial Sequence: Synthetic oligonucleotide
gauauggcuuaacgauuau

SEQ ID NO: 2562609 - RNA, 19 nt, Artificial Sequence
  Description of Artificial Sequence: Synthetic oligonucleotide
gcuuccaaaacuggacuga

SEQ ID NO: 2562610 - RNA, 19 nt, Artificial Sequence
  Description of Artificial Sequence: Synthetic oligonucleotide
gaacaggguggugggaaaa

SEQ ID NO: 2562611 - RNA, 19 nt, Artificial Sequence
  Description of Artificial Sequence: Synthetic oligonucleotide
ugcgccccuccugccagcg

SEQ ID NO: 2562612 - RNA, 19 nt, Artificial Sequence
  Description of Artificial Sequence: Synthetic oligonucleotide
ggacacaauccacgccaag

SEQ ID NO: 2562613 - RNA, 19 nt, Artificial Sequence
  Description of Artificial Sequence: Synthetic oligonucleotide
auuucucucuaaacuuguu

SEQ ID NO: 2562614 - RNA, 19 nt, Artificial Sequence
  Description of Artificial Sequence: Synthetic oligonucleotide
gguugaccaacagaugaaa

SEQ ID NO: 2562615 - RNA, 19 nt, Artificial Sequence
  Description of Artificial Sequence: Synthetic oligonucleotide
ccugagcaaguacacuaug

SEQ ID NO: 2562616 - RNA, 19 nt, Artificial Sequence
  Description of Artificial Sequence: Synthetic oligonucleotide
ccucagaugauauggcuua

SEQ ID NO: 2562617 - RNA, 19 nt, Artificial Sequence
  Description of Artificial Sequence: Synthetic oligonucleotide
gcagugaggccacaaggaa

SEQ ID NO: 2562618 - RNA, 19 nt, Artificial Sequence
  Description of Artificial Sequence: Synthetic oligonucleotide
ccaaaacuggacugaccuc

SEQ ID NO: 2562619 - RNA, 19 nt, Artificial Sequence
  Description of Artificial Sequence: Synthetic oligonucleotide
caucucaagccggaaaccu

SEQ ID NO: 2562620 - RNA, 19 nt, Artificial Sequence
  Description of Artificial Sequence: Synthetic oligonucleotide
caguauccucugugguuuc

SEQ ID NO: 2562621 - RNA, 19 nt, Artificial Sequence
  Description of Artificial Sequence: Synthetic oligonucleotide
guugaccaacagaugaaau

SEQ ID NO: 2562622 - RNA, 19 nt, Artificial Sequence
  Description of Artificial Sequence: Synthetic oligonucleotide
aucuucuauaggacacaau

SEQ ID NO: 2562623 - RNA, 19 nt, Artificial Sequence
  Description of Artificial Sequence: Synthetic oligonucleotide
cagaugaaaugucgccaaa

SEQ ID NO: 2562624 - RNA, 19 nt, Artificial Sequence
  Description of Artificial Sequence: Synthetic oligonucleotide
augucgccaaagucauauu

SEQ ID NO: 2562625 - RNA, 19 nt, Artificial Sequence
  Description of Artificial Sequence: Synthetic oligonucleotide
ggacuggugcagugcuucc

SEQ ID NO: 2562626 - RNA, 19 nt, Artificial Sequence
  Description of Artificial Sequence: Synthetic oligonucleotide
gucugguuaaaaugcuauu

SEQ ID NO: 2562627 - RNA, 19 nt, Artificial Sequence
  Description of Artificial Sequence: Synthetic oligonucleotide
guaaggcuuuggacuggug

SEQ ID NO: 2562628 - RNA, 19 nt, Artificial Sequence
  Description of Artificial Sequence: Synthetic oligonucleotide
ggucugguuaaaaugcuau

SEQ ID NO: 2562629 - RNA, 19 nt, Artificial Sequence
  Description of Artificial Sequence: Synthetic oligonucleotide
aaaugucgccaaagucaua

SEQ ID NO: 2562630 - RNA, 19 nt, Artificial Sequence
  Description of Artificial Sequence: Synthetic oligonucleotide
cauauucccugagcaagua

SEQ ID NO: 2562631 - RNA, 19 nt, Artificial Sequence
  Description of Artificial Sequence: Synthetic oligonucleotide
gcguauuuacuaacuagua

SEQ ID NO: 2562632 - RNA, 19 nt, Artificial Sequence
  Description of Artificial Sequence: Synthetic oligonucleotide
gcugcgccccuccugccag

SEQ ID NO: 2562633 - RNA, 19 nt, Artificial Sequence
  Description of Artificial Sequence: Synthetic oligonucleotide
gcaucuucuauaggacaca

SEQ ID NO: 2562634 - RNA, 19 nt, Artificial Sequence
  Description of Artificial Sequence: Synthetic oligonucleotide
agacuuccccuagcaguga

SEQ ID NO: 2562635 - RNA, 19 nt, Artificial Sequence
  Description of Artificial Sequence: Synthetic oligonucleotide
cacuaugccuuuacaggau

SEQ ID NO: 2562636 - RNA, 19 nt, Artificial Sequence
  Description of Artificial Sequence: Synthetic oligonucleotide
acgccaagcaccagagaua

SEQ ID NO: 2562637 - RNA, 19 nt, Artificial Sequence
  Description of Artificial Sequence: Synthetic oligonucleotide
cgccaagcaccagagauac

SEQ ID NO: 2562638 - RNA, 19 nt, Artificial Sequence
  Description of Artificial Sequence: Synthetic oligonucleotide
auacugcaucucaaucuuu

SEQ ID NO: 2562639 - RNA, 19 nt, Artificial Sequence
  Description of Artificial Sequence: Synthetic oligonucleotide
aggacacaauccacgccaa

SEQ ID NO: 2562640 - RNA, 19 nt, Artificial Sequence
  Description of Artificial Sequence: Synthetic oligonucleotide
ccggcugcgccccuccugc

SEQ ID NO: 2562641 - RNA, 19 nt, Artificial Sequence
  Description of Artificial Sequence: Synthetic oligonucleotide
cucagaugauauggcuuaa

SEQ ID NO: 2562642 - RNA, 19 nt, Artificial Sequence
  Description of Artificial Sequence: Synthetic oligonucleotide
cugccggcugcgccccucc

SEQ ID NO: 2562643 - RNA, 19 nt, Artificial Sequence
  Description of Artificial Sequence: Synthetic oligonucleotide
cuucaacuugccugagcau

SEQ ID NO: 2562644 - RNA, 19 nt, Artificial Sequence
  Description of Artificial Sequence: Synthetic oligonucleotide
gcaucuggcagaucuguuu

SEQ ID NO: 2562645 - RNA, 19 nt, Artificial Sequence
  Description of Artificial Sequence: Synthetic oligonucleotide
ccagcguauuuacuaacua

SEQ ID NO: 2562646 - RNA, 19 nt, Artificial Sequence
  Description of Artificial Sequence: Synthetic oligonucleotide
gcaaguacacuaugccuuu

SEQ ID NO: 2562647 - RNA, 19 nt, Artificial Sequence
  Description of Artificial Sequence: Synthetic oligonucleotide
gugaggccacaaggaauga

SEQ ID NO: 2562648 - RNA, 19 nt, Artificial Sequence
  Description of Artificial Sequence: Synthetic oligonucleotide
ccucaucaggcuauccucu

SEQ ID NO: 2562649 - RNA, 19 nt, Artificial Sequence
  Description of Artificial Sequence: Synthetic oligonucleotide
gccagcguauuuacuaacu

SEQ ID NO: 2562650 - RNA, 19 nt, Artificial Sequence
  Description of Artificial Sequence: Synthetic oligonucleotide
cucaucaggcuauccucuu

SEQ ID NO: 2562651 - RNA, 19 nt, Artificial Sequence
  Description of Artificial Sequence: Synthetic oligonucleotide
gcacugaguucugccugcc

SEQ ID NO: 2562652 - RNA, 19 nt, Artificial Sequence
  Description of Artificial Sequence: Synthetic oligonucleotide
ggacaggcauucugcuuua

SEQ ID NO: 2562653 - RNA, 19 nt, Artificial Sequence
  Description of Artificial Sequence: Synthetic oligonucleotide
cugugguuucuuuccuuuu

SEQ ID NO: 2562654 - RNA, 19 nt, Artificial Sequence
  Description of Artificial Sequence: Synthetic oligonucleotide
ccggaaaccucagaugaua

SEQ ID NO: 2562655 - RNA, 19 nt, Artificial Sequence
  Description of Artificial Sequence: Synthetic oligonucleotide
guauccucugugguuucuu

SEQ ID NO: 2562656 - RNA, 19 nt, Artificial Sequence
  Description of Artificial Sequence: Synthetic oligonucleotide
ccccuagcagugaggccac

SEQ ID NO: 2562657 - RNA, 19 nt, Artificial Sequence
  Description of Artificial Sequence: Synthetic oligonucleotide
ggcugcgccccuccugcca

SEQ ID NO: 2562658 - RNA, 19 nt, Artificial Sequence
  Description of Artificial Sequence: Synthetic oligonucleotide
ccuccugccagcguauuua

SEQ ID NO: 2562659 - RNA, 19 nt, Artificial Sequence
  Description of Artificial Sequence: Synthetic oligonucleotide
gcuauccucuuggaacagu

SEQ ID NO: 2562660 - RNA, 19 nt, Artificial Sequence
  Description of Artificial Sequence: Synthetic oligonucleotide
gacaggcauucugcuuuau

SEQ ID NO: 2562661 - RNA, 19 nt, Artificial Sequence
  Description of Artificial Sequence: Synthetic oligonucleotide
ccuagcagugaggccacaa

SEQ ID NO: 2562662 - RNA, 19 nt, Artificial Sequence
  Description of Artificial Sequence: Synthetic oligonucleotide
ggcuuuggacuggugcagu

SEQ ID NO: 2562663 - RNA, 19 nt, Artificial Sequence
  Description of Artificial Sequence: Synthetic oligonucleotide
cccugagcaaguacacuau

SEQ ID NO: 2562664 - RNA, 19 nt, Artificial Sequence
  Description of Artificial Sequence: Synthetic oligonucleotide
cggaaaccucagaugauau

SEQ ID NO: 2562665 - RNA, 19 nt, Artificial Sequence
  Description of Artificial Sequence: Synthetic oligonucleotide
cgccaaagucauauucccu

SEQ ID NO: 2562666 - RNA, 19 nt, Artificial Sequence
  Description of Artificial Sequence: Synthetic oligonucleotide
caacuugccugagcaucuu

SEQ ID NO: 2562667 - RNA, 19 nt, Artificial Sequence
  Description of Artificial Sequence: Synthetic oligonucleotide
ccacgccaagcaccagaga

SEQ ID NO: 2562668 - RNA, 19 nt, Artificial Sequence
  Description of Artificial Sequence: Synthetic oligonucleotide
gccggaaaccucagaugau

SEQ ID NO: 2562669 - RNA, 19 nt, Artificial Sequence
  Description of Artificial Sequence: Synthetic oligonucleotide
gccaagcaccagagauacu

SEQ ID NO: 2562670 - RNA, 19 nt, Artificial Sequence
  Description of Artificial Sequence: Synthetic oligonucleotide
acagauauuacucaggggc

SEQ ID NO: 2562671 - RNA, 19 nt, Artificial Sequence
  Description of Artificial Sequence: Synthetic oligonucleotide
aagaguguaugcuaaggcc

SEQ ID NO: 2562672 - RNA, 19 nt, Artificial Sequence
  Description of Artificial Sequence: Synthetic oligonucleotide
agaauagugauuuccuccc

SEQ ID NO: 2562673 - RNA, 19 nt, Artificial Sequence
  Description of Artificial Sequence: Synthetic oligonucleotide
guaaauugguuuuacauug

SEQ ID NO: 2562674 - RNA, 19 nt, Artificial Sequence
  Description of Artificial Sequence: Synthetic oligonucleotide
ucuguucgaauuuugauug

SEQ ID NO: 2562675 - RNA, 19 nt, Artificial Sequence
  Description of Artificial Sequence: Synthetic oligonucleotide
acugauguuaguccggccc

SEQ ID NO: 2562676 - RNA, 19 nt, Artificial Sequence
  Description of Artificial Sequence: Synthetic oligonucleotide
aaggacuaagaguguaugc

SEQ ID NO: 2562677 - RNA, 19 nt, Artificial Sequence
  Description of Artificial Sequence: Synthetic oligonucleotide
aaugaauccaggcugcaca

SEQ ID NO: 2562678 - RNA, 19 nt, Artificial Sequence
  Description of Artificial Sequence: Synthetic oligonucleotide
uucgaauuuugauugaagc

SEQ ID NO: 2562679 - RNA, 19 nt, Artificial Sequence
  Description of Artificial Sequence: Synthetic oligonucleotide
gauugcaugagguucuggg

SEQ ID NO: 2562680 - RNA, 19 nt, Artificial Sequence
  Description of Artificial Sequence: Synthetic oligonucleotide
ugguuuuacauugugagag

SEQ ID NO: 2562681 - RNA, 19 nt, Artificial Sequence
  Description of Artificial Sequence: Synthetic oligonucleotide
uuaugaaccagcaucucug

SEQ ID NO: 2562682 - RNA, 19 nt, Artificial Sequence
  Description of Artificial Sequence: Synthetic oligonucleotide
ucuacuggcagugacaaag

SEQ ID NO: 2562683 - RNA, 19 nt, Artificial Sequence
  Description of Artificial Sequence: Synthetic oligonucleotide
uuauguaggugccuacugg

SEQ ID NO: 2562684 - RNA, 19 nt, Artificial Sequence
  Description of Artificial Sequence: Synthetic oligonucleotide
cuagcagaggcuuaugucc

SEQ ID NO: 2562685 - RNA, 19 nt, Artificial Sequence
  Description of Artificial Sequence: Synthetic oligonucleotide
ucgaauuuugauugaagcc

SEQ ID NO: 2562686 - RNA, 19 nt, Artificial Sequence
  Description of Artificial Sequence: Synthetic oligonucleotide
uaaauccagcaucuguucg

SEQ ID NO: 2562687 - RNA, 19 nt, Artificial Sequence
  Description of Artificial Sequence: Synthetic oligonucleotide
agacagaauagugauuucc

SEQ ID NO: 2562688 - RNA, 19 nt, Artificial Sequence
  Description of Artificial Sequence: Synthetic oligonucleotide
auugcaugagguucugggc

SEQ ID NO: 2562689 - RNA, 19 nt, Artificial Sequence
  Description of Artificial Sequence: Synthetic oligonucleotide
uggauaggaaauuuugagc

SEQ ID NO: 2562690 - RNA, 19 nt, Artificial Sequence
  Description of Artificial Sequence: Synthetic oligonucleotide
aacaguguaaauugguuuu

SEQ ID NO: 2562691 - RNA, 19 nt, Artificial Sequence
  Description of Artificial Sequence: Synthetic oligonucleotide
aggaacuaggauugcaugg

SEQ ID NO: 2562692 - RNA, 19 nt, Artificial Sequence
  Description of Artificial Sequence: Synthetic oligonucleotide
gauaaagacagaauaguga

SEQ ID NO: 2562693 - RNA, 19 nt, Artificial Sequence
  Description of Artificial Sequence: Synthetic oligonucleotide
uuuacauugugagaggaac

SEQ ID NO: 2562694 - RNA, 19 nt, Artificial Sequence
  Description of Artificial Sequence: Synthetic oligonucleotide
uuacucaggggcaugauaa

SEQ ID NO: 2562695 - RNA, 19 nt, Artificial Sequence
  Description of Artificial Sequence: Synthetic oligonucleotide
uguaaauugguuuuacauu

SEQ ID NO: 2562696 - RNA, 19 nt, Artificial Sequence
  Description of Artificial Sequence: Synthetic oligonucleotide
uuugauuucuacucccggc

SEQ ID NO: 2562697 - RNA, 19 nt, Artificial Sequence
  Description of Artificial Sequence: Synthetic oligonucleotide
gagucuuucggacccagcg

SEQ ID NO: 2562698 - RNA, 19 nt, Artificial Sequence
  Description of Artificial Sequence: Synthetic oligonucleotide
auaggaaauuuugagcugg

SEQ ID NO: 2562699 - RNA, 19 nt, Artificial Sequence
  Description of Artificial Sequence: Synthetic oligonucleotide
agaggcuuaugucccagcc

SEQ ID NO: 2562700 - RNA, 19 nt, Artificial Sequence
  Description of Artificial Sequence: Synthetic oligonucleotide
uucacagauugcaugaggu

SEQ ID NO: 2562701 - RNA, 19 nt, Artificial Sequence
  Description of Artificial Sequence: Synthetic oligonucleotide
aggggcaugauaaagacag

SEQ ID NO: 2562702 - RNA, 19 nt, Artificial Sequence
  Description of Artificial Sequence: Synthetic oligonucleotide
aauuugauuucuacucccg

SEQ ID NO: 2562703 - RNA, 19 nt, Artificial Sequence
  Description of Artificial Sequence: Synthetic oligonucleotide
uucacuguggauaggaaau

SEQ ID NO: 2562704 - RNA, 19 nt, Artificial Sequence
  Description of Artificial Sequence: Synthetic oligonucleotide
uugauuucuacucccggca

SEQ ID NO: 2562705 - RNA, 19 nt, Artificial Sequence
  Description of Artificial Sequence: Synthetic oligonucleotide
auuugauuucuacucccgg

SEQ ID NO: 2562706 - RNA, 19 nt, Artificial Sequence
  Description of Artificial Sequence: Synthetic oligonucleotide
agcaugguagccuucacug

SEQ ID NO: 2562707 - RNA, 19 nt, Artificial Sequence
  Description of Artificial Sequence: Synthetic oligonucleotide
uuuugauugaagccgcuuc

SEQ ID NO: 2562708 - RNA, 19 nt, Artificial Sequence
  Description of Artificial Sequence: Synthetic oligonucleotide
uuugauugaagccgcuucu

SEQ ID NO: 2562709 - RNA, 19 nt, Artificial Sequence
  Description of Artificial Sequence: Synthetic oligonucleotide
aacagucuccuucacagau

SEQ ID NO: 2562710 - RNA, 19 nt, Artificial Sequence
  Description of Artificial Sequence: Synthetic oligonucleotide
uaugcuaaggccucagcac

SEQ ID NO: 2562711 - RNA, 19 nt, Artificial Sequence
  Description of Artificial Sequence: Synthetic oligonucleotide
auuaugaaccagcaucucu

SEQ ID NO: 2562712 - RNA, 19 nt, Artificial Sequence
  Description of Artificial Sequence: Synthetic oligonucleotide
auagugauuuccucccaac

SEQ ID NO: 2562713 - RNA, 19 nt, Artificial Sequence
  Description of Artificial Sequence: Synthetic oligonucleotide
uuaugucccagccagguua

SEQ ID NO: 2562714 - RNA, 19 nt, Artificial Sequence
  Description of Artificial Sequence: Synthetic oligonucleotide
ugugagaccacggaauuug

SEQ ID NO: 2562715 - RNA, 19 nt, Artificial Sequence
  Description of Artificial Sequence: Synthetic oligonucleotide
ggcauuaugaaccagcauc

SEQ ID NO: 2562716 - RNA, 19 nt, Artificial Sequence
  Description of Artificial Sequence: Synthetic oligonucleotide
gauaggaaauuuugagcug

SEQ ID NO: 2562717 - RNA, 19 nt, Artificial Sequence
  Description of Artificial Sequence: Synthetic oligonucleotide
aaaggacuaagaguguaug

SEQ ID NO: 2562718 - RNA, 19 nt, Artificial Sequence
  Description of Artificial Sequence: Synthetic oligonucleotide
uggaugguuaccuuggcaa

SEQ ID NO: 2562719 - RNA, 19 nt, Artificial Sequence
  Description of Artificial Sequence: Synthetic oligonucleotide
agucuuucggacccagcgc

SEQ ID NO: 2562720 - RNA, 19 nt, Artificial Sequence
  Description of Artificial Sequence: Synthetic oligonucleotide
aggcuuaugucccagccag

SEQ ID NO: 2562721 - RNA, 19 nt, Artificial Sequence
  Description of Artificial Sequence: Synthetic oligonucleotide
aauagugauuuccucccaa

SEQ ID NO: 2562722 - RNA, 19 nt, Artificial Sequence
  Description of Artificial Sequence: Synthetic oligonucleotide
uguaggugccuacugguac

SEQ ID NO: 2562723 - RNA, 19 nt, Artificial Sequence
  Description of Artificial Sequence: Synthetic oligonucleotide
cuuggcaaccaaagcaagg

SEQ ID NO: 2562724 - RNA, 19 nt, Artificial Sequence
  Description of Artificial Sequence: Synthetic oligonucleotide
guuaggcaggaucacaccc

SEQ ID NO: 2562725 - RNA, 19 nt, Artificial Sequence
  Description of Artificial Sequence: Synthetic oligonucleotide
ucuacucccggcaacucug

SEQ ID NO: 2562726 - RNA, 19 nt, Artificial Sequence
  Description of Artificial Sequence: Synthetic oligonucleotide
uauguaggugccuacuggu

SEQ ID NO: 2562727 - RNA, 19 nt, Artificial Sequence
  Description of Artificial Sequence: Synthetic oligonucleotide
aggaaguuucccuagcaca

SEQ ID NO: 2562728 - RNA, 19 nt, Artificial Sequence
  Description of Artificial Sequence: Synthetic oligonucleotide
uucugcuucucgaacaguc

SEQ ID NO: 2562729 - RNA, 19 nt, Artificial Sequence
  Description of Artificial Sequence: Synthetic oligonucleotide
gaacuaggauugcaugggg

SEQ ID NO: 2562730 - RNA, 19 nt, Artificial Sequence
  Description of Artificial Sequence: Synthetic oligonucleotide
uucccuagcacagauauua

SEQ ID NO: 2562731 - RNA, 19 nt, Artificial Sequence
  Description of Artificial Sequence: Synthetic oligonucleotide
uuaccuuggcaaccaaagc

SEQ ID NO: 2562732 - RNA, 19 nt, Artificial Sequence
  Description of Artificial Sequence: Synthetic oligonucleotide
gaaccagcaucucuguggc

SEQ ID NO: 2562733 - RNA, 19 nt, Artificial Sequence
  Description of Artificial Sequence: Synthetic oligonucleotide
ucgucacugauguuagucc

SEQ ID NO: 2562734 - RNA, 19 nt, Artificial Sequence
  Description of Artificial Sequence: Synthetic oligonucleotide
uagcacagauauuacucag

SEQ ID NO: 2562735 - RNA, 19 nt, Artificial Sequence
  Description of Artificial Sequence: Synthetic oligonucleotide
aaauuuugagcugggugcu

SEQ ID NO: 2562736 - RNA, 19 nt, Artificial Sequence
  Description of Artificial Sequence: Synthetic oligonucleotide
aucuguucgaauuuugauu

SEQ ID NO: 2562737 - RNA, 19 nt, Artificial Sequence
  Description of Artificial Sequence: Synthetic oligonucleotide
uuuuacauugugagaggaa

SEQ ID NO: 2562738 - RNA, 19 nt, Artificial Sequence
  Description of Artificial Sequence: Synthetic oligonucleotide
uagugauuuccucccaaca

SEQ ID NO: 2562739 - RNA, 19 nt, Artificial Sequence
  Description of Artificial Sequence: Synthetic oligonucleotide
gaggaacuaggauugcaug

SEQ ID NO: 2562740 - RNA, 19 nt, Artificial Sequence
  Description of Artificial Sequence: Synthetic oligonucleotide
acuaagaguguaugcuaag

SEQ ID NO: 2562741 - RNA, 19 nt, Artificial Sequence
  Description of Artificial Sequence: Synthetic oligonucleotide
gcacagauauuacucaggg

SEQ ID NO: 2562742 - RNA, 19 nt, Artificial Sequence
  Description of Artificial Sequence: Synthetic oligonucleotide
ugggcauuaugaaccagca

SEQ ID NO: 2562743 - RNA, 19 nt, Artificial Sequence
  Description of Artificial Sequence: Synthetic oligonucleotide
aguguaaauugguuuuaca

SEQ ID NO: 2562744 - RNA, 19 nt, Artificial Sequence
  Description of Artificial Sequence: Synthetic oligonucleotide
guuaguccggcccagcaug

SEQ ID NO: 2562745 - RNA, 19 nt, Artificial Sequence
  Description of Artificial Sequence: Synthetic oligonucleotide
uguguuugcuggaugguua

SEQ ID NO: 2562746 - RNA, 19 nt, Artificial Sequence
  Description of Artificial Sequence: Synthetic oligonucleotide
guaccagggagucuuucgg

SEQ ID NO: 2562747 - RNA, 19 nt, Artificial Sequence
  Description of Artificial Sequence: Synthetic oligonucleotide
aggacuaagaguguaugcu

SEQ ID NO: 2562748 - RNA, 19 nt, Artificial Sequence
  Description of Artificial Sequence: Synthetic oligonucleotide
agaccacggaauuugauuu

SEQ ID NO: 2562749 - RNA, 19 nt, Artificial Sequence
  Description of Artificial Sequence: Synthetic oligonucleotide
gugagaggaacuaggauug

SEQ ID NO: 2562750 - RNA, 19 nt, Artificial Sequence
  Description of Artificial Sequence: Synthetic oligonucleotide
uccucgucacugauguuag

SEQ ID NO: 2562751 - RNA, 19 nt, Artificial Sequence
  Description of Artificial Sequence: Synthetic oligonucleotide
ggauaggaaauuuugagcu

SEQ ID NO: 2562752 - RNA, 19 nt, Artificial Sequence
  Description of Artificial Sequence: Synthetic oligonucleotide
ugugaggcaggaaguuucc

SEQ ID NO: 2562753 - RNA, 19 nt, Artificial Sequence
  Description of Artificial Sequence: Synthetic oligonucleotide
gaugguuaccuuggcaacc

SEQ ID NO: 2562754 - RNA, 19 nt, Artificial Sequence
  Description of Artificial Sequence: Synthetic oligonucleotide
uuaguccggcccagcaugg

SEQ ID NO: 2562755 - RNA, 19 nt, Artificial Sequence
  Description of Artificial Sequence: Synthetic oligonucleotide
cacagauauuacucagggg

SEQ ID NO: 2562756 - RNA, 19 nt, Artificial Sequence
  Description of Artificial Sequence: Synthetic oligonucleotide
guaugcuaaggccucagca

SEQ ID NO: 2562757 - RNA, 19 nt, Artificial Sequence
  Description of Artificial Sequence: Synthetic oligonucleotide
aaguuucccuagcacagau

SEQ ID NO: 2562758 - RNA, 19 nt, Artificial Sequence
  Description of Artificial Sequence: Synthetic oligonucleotide
agaguguaugcuaaggccu

SEQ ID NO: 2562759 - RNA, 19 nt, Artificial Sequence
  Description of Artificial Sequence: Synthetic oligonucleotide
caucauucucuucucuagc

SEQ ID NO: 2562760 - RNA, 19 nt, Artificial Sequence
  Description of Artificial Sequence: Synthetic oligonucleotide
uguaugcuaaggccucagc

SEQ ID NO: 2562761 - RNA, 19 nt, Artificial Sequence
  Description of Artificial Sequence: Synthetic oligonucleotide
agguuaggcaggaucacac

SEQ ID NO: 2562762 - RNA, 19 nt, Artificial Sequence
  Description of Artificial Sequence: Synthetic oligonucleotide
cacagauugcaugagguuc

SEQ ID NO: 2562763 - RNA, 19 nt, Artificial Sequence
  Description of Artificial Sequence: Synthetic oligonucleotide
gguuuuacauugugagagg

SEQ ID NO: 2562764 - RNA, 19 nt, Artificial Sequence
  Description of Artificial Sequence: Synthetic oligonucleotide
ggaacuaggauugcauggg

SEQ ID NO: 2562765 - RNA, 19 nt, Artificial Sequence
  Description of Artificial Sequence: Synthetic oligonucleotide
uaugaaccagcaucucugu

SEQ ID NO: 2562766 - RNA, 19 nt, Artificial Sequence
  Description of Artificial Sequence: Synthetic oligonucleotide
gauuucuacucccggcaac

SEQ ID NO: 2562767 - RNA, 19 nt, Artificial Sequence
  Description of Artificial Sequence: Synthetic oligonucleotide
aaaaggacuaagaguguau

SEQ ID NO: 2562768 - RNA, 19 nt, Artificial Sequence
  Description of Artificial Sequence: Synthetic oligonucleotide
ucgaacagucuccuucaca

SEQ ID NO: 2562769 - RNA, 19 nt, Artificial Sequence
  Description of Artificial Sequence: Synthetic oligonucleotide
cuagcacagauauuacuca

SEQ ID NO: 2562770 - RNA, 19 nt, Artificial Sequence
  Description of Artificial Sequence: Synthetic oligonucleotide
guguaaauugguuuuacau

SEQ ID NO: 2562771 - RNA, 19 nt, Artificial Sequence
  Description of Artificial Sequence: Synthetic oligonucleotide
uaaagacagaauagugauu

SEQ ID NO: 2562772 - RNA, 19 nt, Artificial Sequence
  Description of Artificial Sequence: Synthetic oligonucleotide
uuucggacccagcgcagag

SEQ ID NO: 2562773 - RNA, 19 nt, Artificial Sequence
  Description of Artificial Sequence: Synthetic oligonucleotide
ccuagcacagauauuacuc

SEQ ID NO: 2562774 - RNA, 19 nt, Artificial Sequence
  Description of Artificial Sequence: Synthetic oligonucleotide
agguuauguaggugccuac

SEQ ID NO: 2562775 - RNA, 19 nt, Artificial Sequence
  Description of Artificial Sequence: Synthetic oligonucleotide
gaccaccuuacccugcagc

SEQ ID NO: 2562776 - RNA, 19 nt, Artificial Sequence
  Description of Artificial Sequence: Synthetic oligonucleotide
uuuccucccaacaguguaa

SEQ ID NO: 2562777 - RNA, 19 nt, Artificial Sequence
  Description of Artificial Sequence: Synthetic oligonucleotide
accaccuuacccugcagca

SEQ ID NO: 2562778 - RNA, 19 nt, Artificial Sequence
  Description of Artificial Sequence: Synthetic oligonucleotide
uacuggcagugacaaagca

SEQ ID NO: 2562779 - RNA, 19 nt, Artificial Sequence
  Description of Artificial Sequence: Synthetic oligonucleotide
auugaagccgcuucugcuu

SEQ ID NO: 2562780 - RNA, 19 nt, Artificial Sequence
  Description of Artificial Sequence: Synthetic oligonucleotide
ucccagccagguuauguag

SEQ ID NO: 2562781 - RNA, 19 nt, Artificial Sequence
  Description of Artificial Sequence: Synthetic oligonucleotide
ugagcugggugcuuauagu

SEQ ID NO: 2562782 - RNA, 19 nt, Artificial Sequence
  Description of Artificial Sequence: Synthetic oligonucleotide
cagggagucuuucggaccc

SEQ ID NO: 2562783 - RNA, 19 nt, Artificial Sequence
  Description of Artificial Sequence: Synthetic oligonucleotide
gguaccagggagucuuucg

SEQ ID NO: 2562784 - RNA, 19 nt, Artificial Sequence
  Description of Artificial Sequence: Synthetic oligonucleotide
ugauuucuacucccggcaa

SEQ ID NO: 2562785 - RNA, 19 nt, Artificial Sequence
  Description of Artificial Sequence: Synthetic oligonucleotide
uguucgaauuuugauugaa

SEQ ID NO: 2562786 - RNA, 19 nt, Artificial Sequence
  Description of Artificial Sequence: Synthetic oligonucleotide
guaggugccuacugguacc

SEQ ID NO: 2562787 - RNA, 19 nt, Artificial Sequence
  Description of Artificial Sequence: Synthetic oligonucleotide
ggaaguuucccuagcacag

SEQ ID NO: 2562788 - RNA, 19 nt, Artificial Sequence
  Description of Artificial Sequence: Synthetic oligonucleotide
gauauuacucaggggcaug

SEQ ID NO: 2562789 - RNA, 19 nt, Artificial Sequence
  Description of Artificial Sequence: Synthetic oligonucleotide
ucccuagagaccaccuuac

SEQ ID NO: 2562790 - RNA, 19 nt, Artificial Sequence
  Description of Artificial Sequence: Synthetic oligonucleotide
gcaggaaaugaauccaggc

SEQ ID NO: 2562791 - RNA, 19 nt, Artificial Sequence
  Description of Artificial Sequence: Synthetic oligonucleotide
cuacuggcagugacaaagc

SEQ ID NO: 2562792 - RNA, 19 nt, Artificial Sequence
  Description of Artificial Sequence: Synthetic oligonucleotide
gaguaaauccagcaucugu

SEQ ID NO: 2562793 - RNA, 19 nt, Artificial Sequence
  Description of Artificial Sequence: Synthetic oligonucleotide
auugugagaggaacuagga

SEQ ID NO: 2562794 - RNA, 19 nt, Artificial Sequence
  Description of Artificial Sequence: Synthetic oligonucleotide
cgaacagucuccuucacag

SEQ ID NO: 2562795 - RNA, 19 nt, Artificial Sequence
  Description of Artificial Sequence: Synthetic oligonucleotide
ucacugauguuaguccggc

SEQ ID NO: 2562796 - RNA, 19 nt, Artificial Sequence
  Description of Artificial Sequence: Synthetic oligonucleotide
auuucuacucccggcaacu

SEQ ID NO: 2562797 - RNA, 19 nt, Artificial Sequence
  Description of Artificial Sequence: Synthetic oligonucleotide
auuacucaggggcaugaua

SEQ ID NO: 2562798 - RNA, 19 nt, Artificial Sequence
  Description of Artificial Sequence: Synthetic oligonucleotide
gugccuacugguaccaggg

SEQ ID NO: 2562799 - RNA, 19 nt, Artificial Sequence
  Description of Artificial Sequence: Synthetic oligonucleotide
ggcaacucugaauagcuuc

SEQ ID NO: 2562800 - RNA, 19 nt, Artificial Sequence
  Description of Artificial Sequence: Synthetic oligonucleotide
acauugugagaggaacuag

SEQ ID NO: 2562801 - RNA, 19 nt, Artificial Sequence
  Description of Artificial Sequence: Synthetic oligonucleotide
gguucugggcauuaugaac

SEQ ID NO: 2562802 - RNA, 19 nt, Artificial Sequence
  Description of Artificial Sequence: Synthetic oligonucleotide
ucuuucggacccagcgcag

SEQ ID NO: 2562803 - RNA, 19 nt, Artificial Sequence
  Description of Artificial Sequence: Synthetic oligonucleotide
guuuuacauugugagagga

SEQ ID NO: 2562804 - RNA, 19 nt, Artificial Sequence
  Description of Artificial Sequence: Synthetic oligonucleotide
uugaagccgcuucugcuuc

SEQ ID NO: 2562805 - RNA, 19 nt, Artificial Sequence
  Description of Artificial Sequence: Synthetic oligonucleotide
cagauauuacucaggggca

SEQ ID NO: 2562806 - RNA, 19 nt, Artificial Sequence
  Description of Artificial Sequence: Synthetic oligonucleotide
uguuaguccggcccagcau

SEQ ID NO: 2562807 - RNA, 19 nt, Artificial Sequence
  Description of Artificial Sequence: Synthetic oligonucleotide
cugaauagcuucuggaacu

SEQ ID NO: 2562808 - RNA, 19 nt, Artificial Sequence
  Description of Artificial Sequence: Synthetic oligonucleotide
acagauugcaugagguucu

SEQ ID NO: 2562809 - RNA, 19 nt, Artificial Sequence
  Description of Artificial Sequence: Synthetic oligonucleotide
gucuuucggacccagcgca

SEQ ID NO: 2562810 - RNA, 19 nt, Artificial Sequence
  Description of Artificial Sequence: Synthetic oligonucleotide
cucgucacugauguuaguc

SEQ ID NO: 2562811 - RNA, 19 nt, Artificial Sequence
  Description of Artificial Sequence: Synthetic oligonucleotide
aauuuugauugaagccgcu

SEQ ID NO: 2562812 - RNA, 19 nt, Artificial Sequence
  Description of Artificial Sequence: Synthetic oligonucleotide
gauugaagccgcuucugcu

SEQ ID NO: 2562813 - RNA, 19 nt, Artificial Sequence
  Description of Artificial Sequence: Synthetic oligonucleotide
agcuacucugccccucuag

SEQ ID NO: 2562814 - RNA, 19 nt, Artificial Sequence
  Description of Artificial Sequence: Synthetic oligonucleotide
ggugccuacugguaccagg

SEQ ID NO: 2562815 - RNA, 19 nt, Artificial Sequence
  Description of Artificial Sequence: Synthetic oligonucleotide
auauuacucaggggcauga

SEQ ID NO: 2562816 - RNA, 19 nt, Artificial Sequence
  Description of Artificial Sequence: Synthetic oligonucleotide
cugggaguggccccacugg

SEQ ID NO: 2562817 - RNA, 19 nt, Artificial Sequence
  Description of Artificial Sequence: Synthetic oligonucleotide
ugaauagcuucuggaacuc

SEQ ID NO: 2562818 - RNA, 19 nt, Artificial Sequence
  Description of Artificial Sequence: Synthetic oligonucleotide
gacuaagaguguaugcuaa

SEQ ID NO: 2562819 - RNA, 19 nt, Artificial Sequence
  Description of Artificial Sequence: Synthetic oligonucleotide
gaauagugauuuccuccca

SEQ ID NO: 2562820 - RNA, 19 nt, Artificial Sequence
  Description of Artificial Sequence: Synthetic oligonucleotide
cagcgcagaguaaauccag

SEQ ID NO: 2562821 - RNA, 19 nt, Artificial Sequence
  Description of Artificial Sequence: Synthetic oligonucleotide
ugagaccacggaauuugau

SEQ ID NO: 2562822 - RNA, 19 nt, Artificial Sequence
  Description of Artificial Sequence: Synthetic oligonucleotide
augaauccaggcugcacaa

SEQ ID NO: 2562823 - RNA, 19 nt, Artificial Sequence
  Description of Artificial Sequence: Synthetic oligonucleotide
uaccagggagucuuucgga

SEQ ID NO: 2562824 - RNA, 19 nt, Artificial Sequence
  Description of Artificial Sequence: Synthetic oligonucleotide
uaugucccagccagguuau

SEQ ID NO: 2562825 - RNA, 19 nt, Artificial Sequence
  Description of Artificial Sequence: Synthetic oligonucleotide
acaccccagcuacucugcc

SEQ ID NO: 2562826 - RNA, 19 nt, Artificial Sequence
  Description of Artificial Sequence: Synthetic oligonucleotide
augaaccagcaucucugug

SEQ ID NO: 2562827 - RNA, 19 nt, Artificial Sequence
  Description of Artificial Sequence: Synthetic oligonucleotide
auguuaguccggcccagca

SEQ ID NO: 2562828 - RNA, 19 nt, Artificial Sequence
  Description of Artificial Sequence: Synthetic oligonucleotide
cccagcgcagaguaaaucc

SEQ ID NO: 2562829 - RNA, 19 nt, Artificial Sequence
  Description of Artificial Sequence: Synthetic oligonucleotide
ucggacccagcgcagagua

SEQ ID NO: 2562830 - RNA, 19 nt, Artificial Sequence
  Description of Artificial Sequence: Synthetic oligonucleotide
ugcucagauuccucgucac

SEQ ID NO: 2562831 - RNA, 19 nt, Artificial Sequence
  Description of Artificial Sequence: Synthetic oligonucleotide
augguagccuucacugugg

SEQ ID NO: 2562832 - RNA, 19 nt, Artificial Sequence
  Description of Artificial Sequence: Synthetic oligonucleotide
ugauguuaguccggcccag

SEQ ID NO: 2562833 - RNA, 19 nt, Artificial Sequence
  Description of Artificial Sequence: Synthetic oligonucleotide
ggaaagcaggaaaugaauc

SEQ ID NO: 2562834 - RNA, 19 nt, Artificial Sequence
  Description of Artificial Sequence: Synthetic oligonucleotide
cugcuucucgaacagucuc

SEQ ID NO: 2562835 - RNA, 19 nt, Artificial Sequence
  Description of Artificial Sequence: Synthetic oligonucleotide
guguuugcuggaugguuac

SEQ ID NO: 2562836 - RNA, 19 nt, Artificial Sequence
  Description of Artificial Sequence: Synthetic oligonucleotide
ucccuagcacagauauuac

SEQ ID NO: 2562837 - RNA, 19 nt, Artificial Sequence
  Description of Artificial Sequence: Synthetic oligonucleotide
uuugcuggaugguuaccuu

SEQ ID NO: 2562838 - RNA, 19 nt, Artificial Sequence
  Description of Artificial Sequence: Synthetic oligonucleotide
cagaguaaauccagcaucu

SEQ ID NO: 2562839 - RNA, 19 nt, Artificial Sequence
  Description of Artificial Sequence: Synthetic oligonucleotide
agguucugggcauuaugaa

SEQ ID NO: 2562840 - RNA, 19 nt, Artificial Sequence
  Description of Artificial Sequence: Synthetic oligonucleotide
gaccacggaauuugauuuc

SEQ ID NO: 2562841 - RNA, 19 nt, Artificial Sequence
  Description of Artificial Sequence: Synthetic oligonucleotide
gaggcaggaaguuucccua

SEQ ID NO: 2562842 - RNA, 19 nt, Artificial Sequence
  Description of Artificial Sequence: Synthetic oligonucleotide
agauauuacucaggggcau

SEQ ID NO: 2562843 - RNA, 19 nt, Artificial Sequence
  Description of Artificial Sequence: Synthetic oligonucleotide
ggaguggccccacugggag

SEQ ID NO: 2562844 - RNA, 19 nt, Artificial Sequence
  Description of Artificial Sequence: Synthetic oligonucleotide
gaucacaccccagcuacuc

SEQ ID NO: 2562845 - RNA, 19 nt, Artificial Sequence
  Description of Artificial Sequence: Synthetic oligonucleotide
accacggaauuugauuucu

SEQ ID NO: 2562846 - RNA, 19 nt, Artificial Sequence
  Description of Artificial Sequence: Synthetic oligonucleotide
agagaccaccuuacccugc

SEQ ID NO: 2562847 - RNA, 19 nt, Artificial Sequence
  Description of Artificial Sequence: Synthetic oligonucleotide
ugguagccuucacugugga

SEQ ID NO: 2562848 - RNA, 19 nt, Artificial Sequence
  Description of Artificial Sequence: Synthetic oligonucleotide
cugcagcauuccuuucugg

SEQ ID NO: 2562849 - RNA, 19 nt, Artificial Sequence
  Description of Artificial Sequence: Synthetic oligonucleotide
agaguaaauccagcaucug

SEQ ID NO: 2562850 - RNA, 19 nt, Artificial Sequence
  Description of Artificial Sequence: Synthetic oligonucleotide
gagaccacggaauuugauu

SEQ ID NO: 2562851 - RNA, 19 nt, Artificial Sequence
  Description of Artificial Sequence: Synthetic oligonucleotide
gagaggaacuaggauugca

SEQ ID NO: 2562852 - RNA, 19 nt, Artificial Sequence
  Description of Artificial Sequence: Synthetic oligonucleotide
cacaccccagcuacucugc

SEQ ID NO: 2562853 - RNA, 19 nt, Artificial Sequence
  Description of Artificial Sequence: Synthetic oligonucleotide
cacagaccucuacuggcag

SEQ ID NO: 2562854 - RNA, 19 nt, Artificial Sequence
  Description of Artificial Sequence: Synthetic oligonucleotide
augguuaccuuggcaacca

SEQ ID NO: 2562855 - RNA, 19 nt, Artificial Sequence
  Description of Artificial Sequence: Synthetic oligonucleotide
uguuugcuggaugguuacc

SEQ ID NO: 2562856 - RNA, 19 nt, Artificial Sequence
  Description of Artificial Sequence: Synthetic oligonucleotide
uuuugagcugggugcuuau

SEQ ID NO: 2562857 - RNA, 19 nt, Artificial Sequence
  Description of Artificial Sequence: Synthetic oligonucleotide
agauugcaugagguucugg

SEQ ID NO: 2562858 - RNA, 19 nt, Artificial Sequence
  Description of Artificial Sequence: Synthetic oligonucleotide
gccuacugguaccagggag

SEQ ID NO: 2562859 - RNA, 19 nt, Artificial Sequence
  Description of Artificial Sequence: Synthetic oligonucleotide
ugagaggaacuaggauugc

SEQ ID NO: 2562860 - RNA, 19 nt, Artificial Sequence
  Description of Artificial Sequence: Synthetic oligonucleotide
cugauguuaguccggccca

SEQ ID NO: 2562861 - RNA, 19 nt, Artificial Sequence
  Description of Artificial Sequence: Synthetic oligonucleotide
gauguuaguccggcccagc

SEQ ID NO: 2562862 - RNA, 19 nt, Artificial Sequence
  Description of Artificial Sequence: Synthetic oligonucleotide
gguuaggcaggaucacacc

SEQ ID NO: 2562863 - RNA, 19 nt, Artificial Sequence
  Description of Artificial Sequence: Synthetic oligonucleotide
gaaaugaauccaggcugca

SEQ ID NO: 2562864 - RNA, 19 nt, Artificial Sequence
  Description of Artificial Sequence: Synthetic oligonucleotide
auuuugauugaagccgcuu

SEQ ID NO: 2562865 - RNA, 19 nt, Artificial Sequence
  Description of Artificial Sequence: Synthetic oligonucleotide
agcugggugcuuauaguug

SEQ ID NO: 2562866 - RNA, 19 nt, Artificial Sequence
  Description of Artificial Sequence: Synthetic oligonucleotide
acuggcagugacaaagcau

SEQ ID NO: 2562867 - RNA, 19 nt, Artificial Sequence
  Description of Artificial Sequence: Synthetic oligonucleotide
agcaucuguucgaauuuug

SEQ ID NO: 2562868 - RNA, 19 nt, Artificial Sequence
  Description of Artificial Sequence: Synthetic oligonucleotide
gaguggccccacugggagg

SEQ ID NO: 2562869 - RNA, 19 nt, Artificial Sequence
  Description of Artificial Sequence: Synthetic oligonucleotide
cgucacugauguuaguccg

SEQ ID NO: 2562870 - RNA, 19 nt, Artificial Sequence
  Description of Artificial Sequence: Synthetic oligonucleotide
ggaugguuaccuuggcaac

SEQ ID NO: 2562871 - RNA, 19 nt, Artificial Sequence
  Description of Artificial Sequence: Synthetic oligonucleotide
ugccuacugguaccaggga

SEQ ID NO: 2562872 - RNA, 19 nt, Artificial Sequence
  Description of Artificial Sequence: Synthetic oligonucleotide
aggaaauuuugagcugggu

SEQ ID NO: 2562873 - RNA, 19 nt, Artificial Sequence
  Description of Artificial Sequence: Synthetic oligonucleotide
gagguuaggcaggaucaca

SEQ ID NO: 2562874 - RNA, 19 nt, Artificial Sequence
  Description of Artificial Sequence: Synthetic oligonucleotide
cacugauguuaguccggcc

SEQ ID NO: 2562875 - RNA, 19 nt, Artificial Sequence
  Description of Artificial Sequence: Synthetic oligonucleotide
caucucuguggccugcuca

SEQ ID NO: 2562876 - RNA, 19 nt, Artificial Sequence
  Description of Artificial Sequence: Synthetic oligonucleotide
aguggccccacugggaggu

SEQ ID NO: 2562877 - RNA, 19 nt, Artificial Sequence
  Description of Artificial Sequence: Synthetic oligonucleotide
gcaaggcaggaugugaggc

SEQ ID NO: 2562878 - RNA, 19 nt, Artificial Sequence
  Description of Artificial Sequence: Synthetic oligonucleotide
caccccagcuacucugccc

SEQ ID NO: 2562879 - RNA, 19 nt, Artificial Sequence
  Description of Artificial Sequence: Synthetic oligonucleotide
auuuugagcugggugcuua

SEQ ID NO: 2562880 - RNA, 19 nt, Artificial Sequence
  Description of Artificial Sequence: Synthetic oligonucleotide
ucccggcaacucugaauag

SEQ ID NO: 2562881 - RNA, 19 nt, Artificial Sequence
  Description of Artificial Sequence: Synthetic oligonucleotide
caacaguguaaauugguuu

SEQ ID NO: 2562882 - RNA, 19 nt, Artificial Sequence
  Description of Artificial Sequence: Synthetic oligonucleotide
cuacugguaccagggaguc

SEQ ID NO: 2562883 - RNA, 19 nt, Artificial Sequence
  Description of Artificial Sequence: Synthetic oligonucleotide
uuucccuagcacagauauu

SEQ ID NO: 2562884 - RNA, 19 nt, Artificial Sequence
  Description of Artificial Sequence: Synthetic oligonucleotide
agauuccucgucacugaug

SEQ ID NO: 2562885 - RNA, 19 nt, Artificial Sequence
  Description of Artificial Sequence: Synthetic oligonucleotide
aauuuugagcugggugcuu

SEQ ID NO: 2562886 - RNA, 19 nt, Artificial Sequence
  Description of Artificial Sequence: Synthetic oligonucleotide
cuggaugguuaccuuggca

SEQ ID NO: 2562887 - RNA, 19 nt, Artificial Sequence
  Description of Artificial Sequence: Synthetic oligonucleotide
guguaugcuaaggccucag

SEQ ID NO: 2562888 - RNA, 19 nt, Artificial Sequence
  Description of Artificial Sequence: Synthetic oligonucleotide
ucacuguggauaggaaauu

SEQ ID NO: 2562889 - RNA, 19 nt, Artificial Sequence
  Description of Artificial Sequence: Synthetic oligonucleotide
uauuacucaggggcaugau

SEQ ID NO: 2562890 - RNA, 19 nt, Artificial Sequence
  Description of Artificial Sequence: Synthetic oligonucleotide
guuugcuggaugguuaccu

SEQ ID NO: 2562891 - RNA, 19 nt, Artificial Sequence
  Description of Artificial Sequence: Synthetic oligonucleotide
gggagguuaggcaggauca

SEQ ID NO: 2562892 - RNA, 19 nt, Artificial Sequence
  Description of Artificial Sequence: Synthetic oligonucleotide
aguguaugcuaaggccuca

SEQ ID NO: 2562893 - RNA, 19 nt, Artificial Sequence
  Description of Artificial Sequence: Synthetic oligonucleotide
ggacuaagaguguaugcua

SEQ ID NO: 2562894 - RNA, 19 nt, Artificial Sequence
  Description of Artificial Sequence: Synthetic oligonucleotide
cccagccagguuauguagg

SEQ ID NO: 2562895 - RNA, 19 nt, Artificial Sequence
  Description of Artificial Sequence: Synthetic oligonucleotide
cugcucagauuccucguca

SEQ ID NO: 2562896 - RNA, 19 nt, Artificial Sequence
  Description of Artificial Sequence: Synthetic oligonucleotide
accuuacccugcagcauuc

SEQ ID NO: 2562897 - RNA, 19 nt, Artificial Sequence
  Description of Artificial Sequence: Synthetic oligonucleotide
uuucuacucccggcaacuc

SEQ ID NO: 2562898 - RNA, 19 nt, Artificial Sequence
  Description of Artificial Sequence: Synthetic oligonucleotide
cuguucgaauuuugauuga

SEQ ID NO: 2562899 - RNA, 19 nt, Artificial Sequence
  Description of Artificial Sequence: Synthetic oligonucleotide
accucuacuggcagugaca

SEQ ID NO: 2562900 - RNA, 19 nt, Artificial Sequence
  Description of Artificial Sequence: Synthetic oligonucleotide
gggcaugauaaagacagaa

SEQ ID NO: 2562901 - RNA, 19 nt, Artificial Sequence
  Description of Artificial Sequence: Synthetic oligonucleotide
gagcugggugcuuauaguu

SEQ ID NO: 2562902 - RNA, 19 nt, Artificial Sequence
  Description of Artificial Sequence: Synthetic oligonucleotide
aaccugggaguggccccac

SEQ ID NO: 2562903 - RNA, 19 nt, Artificial Sequence
  Description of Artificial Sequence: Synthetic oligonucleotide
gcaggaaguuucccuagca

SEQ ID NO: 2562904 - RNA, 19 nt, Artificial Sequence
  Description of Artificial Sequence: Synthetic oligonucleotide
ugguuaccuuggcaaccaa

SEQ ID NO: 2562905 - RNA, 19 nt, Artificial Sequence
  Description of Artificial Sequence: Synthetic oligonucleotide
gcgcagaguaaauccagca

SEQ ID NO: 2562906 - RNA, 19 nt, Artificial Sequence
  Description of Artificial Sequence: Synthetic oligonucleotide
aguccggcccagcauggua

SEQ ID NO: 2562907 - RNA, 19 nt, Artificial Sequence
  Description of Artificial Sequence: Synthetic oligonucleotide
uucggacccagcgcagagu

SEQ ID NO: 2562908 - RNA, 19 nt, Artificial Sequence
  Description of Artificial Sequence: Synthetic oligonucleotide
cagauugcaugagguucug

SEQ ID NO: 2562909 - RNA, 19 nt, Artificial Sequence
  Description of Artificial Sequence: Synthetic oligonucleotide
cagguuauguaggugccua

SEQ ID NO: 2562910 - RNA, 19 nt, Artificial Sequence
  Description of Artificial Sequence: Synthetic oligonucleotide
ugguaccagggagucuuuc

SEQ ID NO: 2562911 - RNA, 19 nt, Artificial Sequence
  Description of Artificial Sequence: Synthetic oligonucleotide
cccucuaguggcagagagc

SEQ ID NO: 2562912 - RNA, 19 nt, Artificial Sequence
  Description of Artificial Sequence: Synthetic oligonucleotide
gaugugaggcaggaaguuu

SEQ ID NO: 2562913 - RNA, 19 nt, Artificial Sequence
  Description of Artificial Sequence: Synthetic oligonucleotide
uacugguaccagggagucu

SEQ ID NO: 2562914 - RNA, 19 nt, Artificial Sequence
  Description of Artificial Sequence: Synthetic oligonucleotide
uccucccaacaguguaaau

SEQ ID NO: 2562915 - RNA, 19 nt, Artificial Sequence
  Description of Artificial Sequence: Synthetic oligonucleotide
gccagguuauguaggugcc

SEQ ID NO: 2562916 - RNA, 19 nt, Artificial Sequence
  Description of Artificial Sequence: Synthetic oligonucleotide
cucuucucuagcagaggcu

SEQ ID NO: 2562917 - RNA, 19 nt, Artificial Sequence
  Description of Artificial Sequence: Synthetic oligonucleotide
auguaggugccuacuggua

SEQ ID NO: 2562918 - RNA, 19 nt, Artificial Sequence
  Description of Artificial Sequence: Synthetic oligonucleotide
aggcaggaugugaggcagg

SEQ ID NO: 2562919 - RNA, 19 nt, Artificial Sequence
  Description of Artificial Sequence: Synthetic oligonucleotide
ccagcgcagaguaaaucca

SEQ ID NO: 2562920 - RNA, 19 nt, Artificial Sequence
  Description of Artificial Sequence: Synthetic oligonucleotide
gugagaccacggaauuuga

SEQ ID NO: 2562921 - RNA, 19 nt, Artificial Sequence
  Description of Artificial Sequence: Synthetic oligonucleotide
cagccagguuauguaggug

SEQ ID NO: 2562922 - RNA, 19 nt, Artificial Sequence
  Description of Artificial Sequence: Synthetic oligonucleotide
ggagguuaggcaggaucac

SEQ ID NO: 2562923 - RNA, 19 nt, Artificial Sequence
  Description of Artificial Sequence: Synthetic oligonucleotide
cuuucggacccagcgcaga

SEQ ID NO: 2562924 - RNA, 19 nt, Artificial Sequence
  Description of Artificial Sequence: Synthetic oligonucleotide
ggacccagcgcagaguaaa

SEQ ID NO: 2562925 - RNA, 19 nt, Artificial Sequence
  Description of Artificial Sequence: Synthetic oligonucleotide
aguuucccuagcacagaua

SEQ ID NO: 2562926 - RNA, 19 nt, Artificial Sequence
  Description of Artificial Sequence: Synthetic oligonucleotide
ggcuuaugucccagccagg

SEQ ID NO: 2562927 - RNA, 19 nt, Artificial Sequence
  Description of Artificial Sequence: Synthetic oligonucleotide
gguuauguaggugccuacu

SEQ ID NO: 2562928 - RNA, 19 nt, Artificial Sequence
  Description of Artificial Sequence: Synthetic oligonucleotide
gguuaccuuggcaaccaaa

SEQ ID NO: 2562929 - RNA, 19 nt, Artificial Sequence
  Description of Artificial Sequence: Synthetic oligonucleotide
agaccucuacuggcaguga

SEQ ID NO: 2562930 - RNA, 19 nt, Artificial Sequence
  Description of Artificial Sequence: Synthetic oligonucleotide
cagcaugguagccuucacu

SEQ ID NO: 2562931 - RNA, 19 nt, Artificial Sequence
  Description of Artificial Sequence: Synthetic oligonucleotide
ggcugcacaagcuggcccu

SEQ ID NO: 2562932 - RNA, 19 nt, Artificial Sequence
  Description of Artificial Sequence: Synthetic oligonucleotide
gggagucuuucggacccag

SEQ ID NO: 2562933 - RNA, 19 nt, Artificial Sequence
  Description of Artificial Sequence: Synthetic oligonucleotide
gcuuaugucccagccaggu

SEQ ID NO: 2562934 - RNA, 19 nt, Artificial Sequence
  Description of Artificial Sequence: Synthetic oligonucleotide
aggugccuacugguaccag

SEQ ID NO: 2562935 - RNA, 19 nt, Artificial Sequence
  Description of Artificial Sequence: Synthetic oligonucleotide
ggagucuuucggacccagc

SEQ ID NO: 2562936 - RNA, 19 nt, Artificial Sequence
  Description of Artificial Sequence: Synthetic oligonucleotide
caccuuacccugcagcauu

SEQ ID NO: 2562937 - RNA, 19 nt, Artificial Sequence
  Description of Artificial Sequence: Synthetic oligonucleotide
cucuacuggcagugacaaa

SEQ ID NO: 2562938 - RNA, 19 nt, Artificial Sequence
  Description of Artificial Sequence: Synthetic oligonucleotide
ccccacugggagguuaggc

SEQ ID NO: 2562939 - RNA, 19 nt, Artificial Sequence
  Description of Artificial Sequence: Synthetic oligonucleotide
guguguuugcuggaugguu

SEQ ID NO: 2562940 - RNA, 19 nt, Artificial Sequence
  Description of Artificial Sequence: Synthetic oligonucleotide
cuuaugucccagccagguu

SEQ ID NO: 2562941 - RNA, 19 nt, Artificial Sequence
  Description of Artificial Sequence: Synthetic oligonucleotide
gcaugguagccuucacugu

SEQ ID NO: 2562942 - RNA, 19 nt, Artificial Sequence
  Description of Artificial Sequence: Synthetic oligonucleotide
uggccccacugggagguua

SEQ ID NO: 2562943 - RNA, 19 nt, Artificial Sequence
  Description of Artificial Sequence: Synthetic oligonucleotide
gcuaaggccucagcacaga

SEQ ID NO: 2562944 - RNA, 19 nt, Artificial Sequence
  Description of Artificial Sequence: Synthetic oligonucleotide
gcucagauuccucgucacu

SEQ ID NO: 2562945 - RNA, 19 nt, Artificial Sequence
  Description of Artificial Sequence: Synthetic oligonucleotide
cccuagcacagauauuacu

SEQ ID NO: 2562946 - RNA, 19 nt, Artificial Sequence
  Description of Artificial Sequence: Synthetic oligonucleotide
gggaguggccccacuggga

SEQ ID NO: 2562947 - RNA, 19 nt, Artificial Sequence
  Description of Artificial Sequence: Synthetic oligonucleotide
ccagccagguuauguaggu

SEQ ID NO: 2562948 - RNA, 19 nt, Artificial Sequence
  Description of Artificial Sequence: Synthetic oligonucleotide
cugccccucuaguggcaga

SEQ ID NO: 2562949 - RNA, 19 nt, Artificial Sequence
  Description of Artificial Sequence: Synthetic oligonucleotide
cagagagcaccaguguguu

SEQ ID NO: 2562950 - RNA, 19 nt, Artificial Sequence
  Description of Artificial Sequence: Synthetic oligonucleotide
ggggcaugauaaagacaga

SEQ ID NO: 2562951 - RNA, 19 nt, Artificial Sequence
  Description of Artificial Sequence: Synthetic oligonucleotide
gugugagaccacggaauuu

SEQ ID NO: 2562952 - RNA, 19 nt, Artificial Sequence
  Description of Artificial Sequence: Synthetic oligonucleotide
gacccagcgcagaguaaau

SEQ ID NO: 2562953 - RNA, 19 nt, Artificial Sequence
  Description of Artificial Sequence: Synthetic oligonucleotide
gcccucccuagagaccacc

SEQ ID NO: 2562954 - RNA, 19 nt, Artificial Sequence
  Description of Artificial Sequence: Synthetic oligonucleotide
gccugcucagauuccucgu

SEQ ID NO: 2562955 - RNA, 19 nt, Artificial Sequence
  Description of Artificial Sequence: Synthetic oligonucleotide
ccacggaauuugauuucua

SEQ ID NO: 2562956 - RNA, 19 nt, Artificial Sequence
  Description of Artificial Sequence: Synthetic oligonucleotide
cagcuacucugccccucua

SEQ ID NO: 2562957 - RNA, 19 nt, Artificial Sequence
  Description of Artificial Sequence: Synthetic oligonucleotide
ccggcccagcaugguagcc

SEQ ID NO: 2562958 - RNA, 19 nt, Artificial Sequence
  Description of Artificial Sequence: Synthetic oligonucleotide
ccagguuauguaggugccu

SEQ ID NO: 2562959 - RNA, 19 nt, Artificial Sequence
  Description of Artificial Sequence: Synthetic oligonucleotide
cccucccuagagaccaccu

SEQ ID NO: 2562960 - RNA, 19 nt, Artificial Sequence
  Description of Artificial Sequence: Synthetic oligonucleotide
ccucccuagagaccaccuu

SEQ ID NO: 2562961 - RNA, 19 nt, Artificial Sequence
  Description of Artificial Sequence: Synthetic oligonucleotide
ccaccuuacccugcagcau

SEQ ID NO: 2562962 - RNA, 19 nt, Artificial Sequence
  Description of Artificial Sequence: Synthetic oligonucleotide
cggacccagcgcagaguaa

SEQ ID NO: 2562963 - RNA, 19 nt, Artificial Sequence
  Description of Artificial Sequence: Synthetic oligonucleotide
cggcccagcaugguagccu

SEQ ID NO: 2562964 - RNA, 19 nt, Artificial Sequence
  Description of Artificial Sequence: Synthetic oligonucleotide
agugaaaagccacuggacc

SEQ ID NO: 2562965 - RNA, 19 nt, Artificial Sequence
  Description of Artificial Sequence: Synthetic oligonucleotide
uugaaugucagaaugggug

SEQ ID NO: 2562966 - RNA, 19 nt, Artificial Sequence
  Description of Artificial Sequence: Synthetic oligonucleotide
ugcaugaucauuuauuggc

SEQ ID NO: 2562967 - RNA, 19 nt, Artificial Sequence
  Description of Artificial Sequence: Synthetic oligonucleotide
aauacuuggcucugugagc

SEQ ID NO: 2562968 - RNA, 19 nt, Artificial Sequence
  Description of Artificial Sequence: Synthetic oligonucleotide
aaaagugaaaagccacugg

SEQ ID NO: 2562969 - RNA, 19 nt, Artificial Sequence
  Description of Artificial Sequence: Synthetic oligonucleotide
uuucaaucuccucagaccc

SEQ ID NO: 2562970 - RNA, 19 nt, Artificial Sequence
  Description of Artificial Sequence: Synthetic oligonucleotide
acauaauugguuuucacug

SEQ ID NO: 2562971 - RNA, 19 nt, Artificial Sequence
  Description of Artificial Sequence: Synthetic oligonucleotide
aauggguacgaugauggcc

SEQ ID NO: 2562972 - RNA, 19 nt, Artificial Sequence
  Description of Artificial Sequence: Synthetic oligonucleotide
ucuaaaagugaaaagccac

SEQ ID NO: 2562973 - RNA, 19 nt, Artificial Sequence
  Description of Artificial Sequence: Synthetic oligonucleotide
gucaaaggcacuuugaaug

SEQ ID NO: 2562974 - RNA, 19 nt, Artificial Sequence
  Description of Artificial Sequence: Synthetic oligonucleotide
gaauacuuggcucugugag

SEQ ID NO: 2562975 - RNA, 19 nt, Artificial Sequence
  Description of Artificial Sequence: Synthetic oligonucleotide
auggccaagacacagauga

SEQ ID NO: 2562976 - RNA, 19 nt, Artificial Sequence
  Description of Artificial Sequence: Synthetic oligonucleotide
aauugguuuucacugguca

SEQ ID NO: 2562977 - RNA, 19 nt, Artificial Sequence
  Description of Artificial Sequence: Synthetic oligonucleotide
acgaugauggccaagacac

SEQ ID NO: 2562978 - RNA, 19 nt, Artificial Sequence
  Description of Artificial Sequence: Synthetic oligonucleotide
aguuucaaucuccucagac

SEQ ID NO: 2562979 - RNA, 19 nt, Artificial Sequence
  Description of Artificial Sequence: Synthetic oligonucleotide
gaucucuguggucagaggg

SEQ ID NO: 2562980 - RNA, 19 nt, Artificial Sequence
  Description of Artificial Sequence: Synthetic oligonucleotide
agaagucuaggucggaggc

SEQ ID NO: 2562981 - RNA, 19 nt, Artificial Sequence
  Description of Artificial Sequence: Synthetic oligonucleotide
ucauuuauuggcuuugacu

SEQ ID NO: 2562982 - RNA, 19 nt, Artificial Sequence
  Description of Artificial Sequence: Synthetic oligonucleotide
uccucuguaccacagagug

SEQ ID NO: 2562983 - RNA, 19 nt, Artificial Sequence
  Description of Artificial Sequence: Synthetic oligonucleotide
aggugagaagucuaggucg

SEQ ID NO: 2562984 - RNA, 19 nt, Artificial Sequence
  Description of Artificial Sequence: Synthetic oligonucleotide
ucaggucagagucaaaggc

SEQ ID NO: 2562985 - RNA, 19 nt, Artificial Sequence
  Description of Artificial Sequence: Synthetic oligonucleotide
ucugugagaggaaacagga

SEQ ID NO: 2562986 - RNA, 19 nt, Artificial Sequence
  Description of Artificial Sequence: Synthetic oligonucleotide
uugggaauggguacgauga

SEQ ID NO: 2562987 - RNA, 19 nt, Artificial Sequence
  Description of Artificial Sequence: Synthetic oligonucleotide
auuaacgugaauacuuggc

SEQ ID NO: 2562988 - RNA, 19 nt, Artificial Sequence
  Description of Artificial Sequence: Synthetic oligonucleotide
uuaacgugaauacuuggcu

SEQ ID NO: 2562989 - RNA, 19 nt, Artificial Sequence
  Description of Artificial Sequence: Synthetic oligonucleotide
gaagauggcucccaggaag

SEQ ID NO: 2562990 - RNA, 19 nt, Artificial Sequence
  Description of Artificial Sequence: Synthetic oligonucleotide
gauuaacgugaauacuugg

SEQ ID NO: 2562991 - RNA, 19 nt, Artificial Sequence
  Description of Artificial Sequence: Synthetic oligonucleotide
aacgugaauacuuggcucu

SEQ ID NO: 2562992 - RNA, 19 nt, Artificial Sequence
  Description of Artificial Sequence: Synthetic oligonucleotide
cagaugagcuggaagaugg

SEQ ID NO: 2562993 - RNA, 19 nt, Artificial Sequence
  Description of Artificial Sequence: Synthetic oligonucleotide
gaaggaauggcagucuugg

SEQ ID NO: 2562994 - RNA, 19 nt, Artificial Sequence
  Description of Artificial Sequence: Synthetic oligonucleotide
auacuuggcucugugagcc

SEQ ID NO: 2562995 - RNA, 19 nt, Artificial Sequence
  Description of Artificial Sequence: Synthetic oligonucleotide
cauaauugguuuucacugg

SEQ ID NO: 2562996 - RNA, 19 nt, Artificial Sequence
  Description of Artificial Sequence: Synthetic oligonucleotide
ucagaaugggugaacggag

SEQ ID NO: 2562997 - RNA, 19 nt, Artificial Sequence
  Description of Artificial Sequence: Synthetic oligonucleotide
agggaaugaagacacgggg

SEQ ID NO: 2562998 - RNA, 19 nt, Artificial Sequence
  Description of Artificial Sequence: Synthetic oligonucleotide
caugcaugaucauuuauug

SEQ ID NO: 2562999 - RNA, 19 nt, Artificial Sequence
  Description of Artificial Sequence: Synthetic oligonucleotide
ucagggaaugaagacacgg

SEQ ID NO: 2563000 - RNA, 19 nt, Artificial Sequence
  Description of Artificial Sequence: Synthetic oligonucleotide
caaggauuaacgugaauac

SEQ ID NO: 2563001 - RNA, 19 nt, Artificial Sequence
  Description of Artificial Sequence: Synthetic oligonucleotide
aaugggugaacggagguug

SEQ ID NO: 2563002 - RNA, 19 nt, Artificial Sequence
  Description of Artificial Sequence: Synthetic oligonucleotide
guuucaaucuccucagacc

SEQ ID NO: 2563003 - RNA, 19 nt, Artificial Sequence
  Description of Artificial Sequence: Synthetic oligonucleotide
acuguucagaucucugugg

SEQ ID NO: 2563004 - RNA, 19 nt, Artificial Sequence
  Description of Artificial Sequence: Synthetic oligonucleotide
cuuugaaugucagaauggg

SEQ ID NO: 2563005 - RNA, 19 nt, Artificial Sequence
  Description of Artificial Sequence: Synthetic oligonucleotide
ugaaugucagaauggguga

SEQ ID NO: 2563006 - RNA, 19 nt, Artificial Sequence
  Description of Artificial Sequence: Synthetic oligonucleotide
uaaaagugaaaagccacug

SEQ ID NO: 2563007 - RNA, 19 nt, Artificial Sequence
  Description of Artificial Sequence: Synthetic oligonucleotide
ugucaggucagagucaaag

SEQ ID NO: 2563008 - RNA, 19 nt, Artificial Sequence
  Description of Artificial Sequence: Synthetic oligonucleotide
gagaagucuaggucggagg

SEQ ID NO: 2563009 - RNA, 19 nt, Artificial Sequence
  Description of Artificial Sequence: Synthetic oligonucleotide
auuuauuggcuuugacuuc

SEQ ID NO: 2563010 - RNA, 19 nt, Artificial Sequence
  Description of Artificial Sequence: Synthetic oligonucleotide
aagugaaaagccacuggac

SEQ ID NO: 2563011 - RNA, 19 nt, Artificial Sequence
  Description of Artificial Sequence: Synthetic oligonucleotide
cacuuugaaugucagaaug

SEQ ID NO: 2563012 - RNA, 19 nt, Artificial Sequence
  Description of Artificial Sequence: Synthetic oligonucleotide
aaugucagaaugggugaac

SEQ ID NO: 2563013 - RNA, 19 nt, Artificial Sequence
  Description of Artificial Sequence: Synthetic oligonucleotide
uguaccacagagugaagga

SEQ ID NO: 2563014 - RNA, 19 nt, Artificial Sequence
  Description of Artificial Sequence: Synthetic oligonucleotide
uacgaugauggccaagaca

SEQ ID NO: 2563015 - RNA, 19 nt, Artificial Sequence
  Description of Artificial Sequence: Synthetic oligonucleotide
agucuuggguuucuucagc

SEQ ID NO: 2563016 - RNA, 19 nt, Artificial Sequence
  Description of Artificial Sequence: Synthetic oligonucleotide
uugguuuucacuggucagg

SEQ ID NO: 2563017 - RNA, 19 nt, Artificial Sequence
  Description of Artificial Sequence: Synthetic oligonucleotide
uuugaaugucagaaugggu

SEQ ID NO: 2563018 - RNA, 19 nt, Artificial Sequence
  Description of Artificial Sequence: Synthetic oligonucleotide
caagucaccacugccaggg

SEQ ID NO: 2563019 - RNA, 19 nt, Artificial Sequence
  Description of Artificial Sequence: Synthetic oligonucleotide
aguccucuguaccacagag

SEQ ID NO: 2563020 - RNA, 19 nt, Artificial Sequence
  Description of Artificial Sequence: Synthetic oligonucleotide
acggagguugaucuaaaag

SEQ ID NO: 2563021 - RNA, 19 nt, Artificial Sequence
  Description of Artificial Sequence: Synthetic oligonucleotide
ugucagaaugggugaacgg

SEQ ID NO: 2563022 - RNA, 19 nt, Artificial Sequence
  Description of Artificial Sequence: Synthetic oligonucleotide
auaauugguuuucacuggu

SEQ ID NO: 2563023 - RNA, 19 nt, Artificial Sequence
  Description of Artificial Sequence: Synthetic oligonucleotide
acuuugaaugucagaaugg

SEQ ID NO: 2563024 - RNA, 19 nt, Artificial Sequence
  Description of Artificial Sequence: Synthetic oligonucleotide
ggaauggguacgaugaugg

SEQ ID NO: 2563025 - RNA, 19 nt, Artificial Sequence
  Description of Artificial Sequence: Synthetic oligonucleotide
ucagagggaguuucaaucu

SEQ ID NO: 2563026 - RNA, 19 nt, Artificial Sequence
  Description of Artificial Sequence: Synthetic oligonucleotide
ucugggaguccucuguacc

SEQ ID NO: 2563027 - RNA, 19 nt, Artificial Sequence
  Description of Artificial Sequence: Synthetic oligonucleotide
ucagaccccagccaagggc

SEQ ID NO: 2563028 - RNA, 19 nt, Artificial Sequence
  Description of Artificial Sequence: Synthetic oligonucleotide
aggaauggcagucuugggu

SEQ ID NO: 2563029 - RNA, 19 nt, Artificial Sequence
  Description of Artificial Sequence: Synthetic oligonucleotide
auuggcuuugacuucucca

SEQ ID NO: 2563030 - RNA, 19 nt, Artificial Sequence
  Description of Artificial Sequence: Synthetic oligonucleotide
agcaccucugcacuucugg

SEQ ID NO: 2563031 - RNA, 19 nt, Artificial Sequence
  Description of Artificial Sequence: Synthetic oligonucleotide
gucagagggaguuucaauc

SEQ ID NO: 2563032 - RNA, 19 nt, Artificial Sequence
  Description of Artificial Sequence: Synthetic oligonucleotide
agagggaguuucaaucucc

SEQ ID NO: 2563033 - RNA, 19 nt, Artificial Sequence
  Description of Artificial Sequence: Synthetic oligonucleotide
aaggauuaacgugaauacu

SEQ ID NO: 2563034 - RNA, 19 nt, Artificial Sequence
  Description of Artificial Sequence: Synthetic oligonucleotide
guccccaaggcuucuaccg

SEQ ID NO: 2563035 - RNA, 19 nt, Artificial Sequence
  Description of Artificial Sequence: Synthetic oligonucleotide
uaacgugaauacuuggcuc

SEQ ID NO: 2563036 - RNA, 19 nt, Artificial Sequence
  Description of Artificial Sequence: Synthetic oligonucleotide
gagcccauaccgcagcagg

SEQ ID NO: 2563037 - RNA, 19 nt, Artificial Sequence
  Description of Artificial Sequence: Synthetic oligonucleotide
ugaucauuuauuggcuuug

SEQ ID NO: 2563038 - RNA, 19 nt, Artificial Sequence
  Description of Artificial Sequence: Synthetic oligonucleotide
cuggacccaaggauuaacg

SEQ ID NO: 2563039 - RNA, 19 nt, Artificial Sequence
  Description of Artificial Sequence: Synthetic oligonucleotide
ugguuuucacuggucaggg

SEQ ID NO: 2563040 - RNA, 19 nt, Artificial Sequence
  Description of Artificial Sequence: Synthetic oligonucleotide
cagggaaugaagacacggg

SEQ ID NO: 2563041 - RNA, 19 nt, Artificial Sequence
  Description of Artificial Sequence: Synthetic oligonucleotide
gucaggucagagucaaagg

SEQ ID NO: 2563042 - RNA, 19 nt, Artificial Sequence
  Description of Artificial Sequence: Synthetic oligonucleotide
uucuccacauaauugguuu

SEQ ID NO: 2563043 - RNA, 19 nt, Artificial Sequence
  Description of Artificial Sequence: Synthetic oligonucleotide
uucgccuccuucuuuggcc

SEQ ID NO: 2563044 - RNA, 19 nt, Artificial Sequence
  Description of Artificial Sequence: Synthetic oligonucleotide
ucuaggucggaggccaugg

SEQ ID NO: 2563045 - RNA, 19 nt, Artificial Sequence
  Description of Artificial Sequence: Synthetic oligonucleotide
cauuuauuggcuuugacuu

SEQ ID NO: 2563046 - RNA, 19 nt, Artificial Sequence
  Description of Artificial Sequence: Synthetic oligonucleotide
aggucggaggccauggucc

SEQ ID NO: 2563047 - RNA, 19 nt, Artificial Sequence
  Description of Artificial Sequence: Synthetic oligonucleotide
ugauggccaagacacagau

SEQ ID NO: 2563048 - RNA, 19 nt, Artificial Sequence
  Description of Artificial Sequence: Synthetic oligonucleotide
ucuuaagagucacccuucu

SEQ ID NO: 2563049 - RNA, 19 nt, Artificial Sequence
  Description of Artificial Sequence: Synthetic oligonucleotide
gugagaggaaacaggaugc

SEQ ID NO: 2563050 - RNA, 19 nt, Artificial Sequence
  Description of Artificial Sequence: Synthetic oligonucleotide
guuuucacuggucagggaa

SEQ ID NO: 2563051 - RNA, 19 nt, Artificial Sequence
  Description of Artificial Sequence: Synthetic oligonucleotide
cuugggaauggguacgaug

SEQ ID NO: 2563052 - RNA, 19 nt, Artificial Sequence
  Description of Artificial Sequence: Synthetic oligonucleotide
augucagaaugggugaacg

SEQ ID NO: 2563053 - RNA, 19 nt, Artificial Sequence
  Description of Artificial Sequence: Synthetic oligonucleotide
gaggugagaagucuagguc

SEQ ID NO: 2563054 - RNA, 19 nt, Artificial Sequence
  Description of Artificial Sequence: Synthetic oligonucleotide
uucuaccgcuucuucuucg

SEQ ID NO: 2563055 - RNA, 19 nt, Artificial Sequence
  Description of Artificial Sequence: Synthetic oligonucleotide
aagagucacccuucuccag

SEQ ID NO: 2563056 - RNA, 19 nt, Artificial Sequence
  Description of Artificial Sequence: Synthetic oligonucleotide
gacccaaggauuaacguga

SEQ ID NO: 2563057 - RNA, 19 nt, Artificial Sequence
  Description of Artificial Sequence: Synthetic oligonucleotide
ugagaagucuaggucggag

SEQ ID NO: 2563058 - RNA, 19 nt, Artificial Sequence
  Description of Artificial Sequence: Synthetic oligonucleotide
uucuucgccuccuucuuug

SEQ ID NO: 2563059 - RNA, 19 nt, Artificial Sequence
  Description of Artificial Sequence: Synthetic oligonucleotide
aagaggaagugguggucug

SEQ ID NO: 2563060 - RNA, 19 nt, Artificial Sequence
  Description of Artificial Sequence: Synthetic oligonucleotide
uauuggcuuugacuucucc

SEQ ID NO: 2563061 - RNA, 19 nt, Artificial Sequence
  Description of Artificial Sequence: Synthetic oligonucleotide
uuuucacuggucagggaau

SEQ ID NO: 2563062 - RNA, 19 nt, Artificial Sequence
  Description of Artificial Sequence: Synthetic oligonucleotide
aucuaaaagugaaaagcca

SEQ ID NO: 2563063 - RNA, 19 nt, Artificial Sequence
  Description of Artificial Sequence: Synthetic oligonucleotide
agucaaaggcacuuugaau

SEQ ID NO: 2563064 - RNA, 19 nt, Artificial Sequence
  Description of Artificial Sequence: Synthetic oligonucleotide
gugaaggaagaggaagugg

SEQ ID NO: 2563065 - RNA, 19 nt, Artificial Sequence
  Description of Artificial Sequence: Synthetic oligonucleotide
aggauuaacgugaauacuu

SEQ ID NO: 2563066 - RNA, 19 nt, Artificial Sequence
  Description of Artificial Sequence: Synthetic oligonucleotide
agaaugggugaacggaggu

SEQ ID NO: 2563067 - RNA, 19 nt, Artificial Sequence
  Description of Artificial Sequence: Synthetic oligonucleotide
uggucagggaaugaagaca

SEQ ID NO: 2563068 - RNA, 19 nt, Artificial Sequence
  Description of Artificial Sequence: Synthetic oligonucleotide
ugaacggagguugaucuaa

SEQ ID NO: 2563069 - RNA, 19 nt, Artificial Sequence
  Description of Artificial Sequence: Synthetic oligonucleotide
auggguacgaugauggcca

SEQ ID NO: 2563070 - RNA, 19 nt, Artificial Sequence
  Description of Artificial Sequence: Synthetic oligonucleotide
ggagguugaucuaaaagug

SEQ ID NO: 2563071 - RNA, 19 nt, Artificial Sequence
  Description of Artificial Sequence: Synthetic oligonucleotide
agagucacccuucuccaga

SEQ ID NO: 2563072 - RNA, 19 nt, Artificial Sequence
  Description of Artificial Sequence: Synthetic oligonucleotide
gagucaaaggcacuuugaa

SEQ ID NO: 2563073 - RNA, 19 nt, Artificial Sequence
  Description of Artificial Sequence: Synthetic oligonucleotide
ucuaccgcuucuucuucgc

SEQ ID NO: 2563074 - RNA, 19 nt, Artificial Sequence
  Description of Artificial Sequence: Synthetic oligonucleotide
uaauugguuuucacugguc

SEQ ID NO: 2563075 - RNA, 19 nt, Artificial Sequence
  Description of Artificial Sequence: Synthetic oligonucleotide
uggacccaaggauuaacgu

SEQ ID NO: 2563076 - RNA, 19 nt, Artificial Sequence
  Description of Artificial Sequence: Synthetic oligonucleotide
accucugcacuucugggcu

SEQ ID NO: 2563077 - RNA, 19 nt, Artificial Sequence
  Description of Artificial Sequence: Synthetic oligonucleotide
agugguggucugcacagcu

SEQ ID NO: 2563078 - RNA, 19 nt, Artificial Sequence
  Description of Artificial Sequence: Synthetic oligonucleotide
gggaugucaggucagaguc

SEQ ID NO: 2563079 - RNA, 19 nt, Artificial Sequence
  Description of Artificial Sequence: Synthetic oligonucleotide
augaucauuuauuggcuuu

SEQ ID NO: 2563080 - RNA, 19 nt, Artificial Sequence
  Description of Artificial Sequence: Synthetic oligonucleotide
uucagaucucuguggucag

SEQ ID NO: 2563081 - RNA, 19 nt, Artificial Sequence
  Description of Artificial Sequence: Synthetic oligonucleotide
cuggucagggaaugaagac

SEQ ID NO: 2563082 - RNA, 19 nt, Artificial Sequence
  Description of Artificial Sequence: Synthetic oligonucleotide
ucuugcugguggaaggaau

SEQ ID NO: 2563083 - RNA, 19 nt, Artificial Sequence
  Description of Artificial Sequence: Synthetic oligonucleotide
ggacccaaggauuaacgug

SEQ ID NO: 2563084 - RNA, 19 nt, Artificial Sequence
  Description of Artificial Sequence: Synthetic oligonucleotide
acuggacccaaggauuaac

SEQ ID NO: 2563085 - RNA, 19 nt, Artificial Sequence
  Description of Artificial Sequence: Synthetic oligonucleotide
agaggaagugguggucugc

SEQ ID NO: 2563086 - RNA, 19 nt, Artificial Sequence
  Description of Artificial Sequence: Synthetic oligonucleotide
ugguccaagucaccacugc

SEQ ID NO: 2563087 - RNA, 19 nt, Artificial Sequence
  Description of Artificial Sequence: Synthetic oligonucleotide
ugcacuucugggcuccgac

SEQ ID NO: 2563088 - RNA, 19 nt, Artificial Sequence
  Description of Artificial Sequence: Synthetic oligonucleotide
gaauggguacgaugauggc

SEQ ID NO: 2563089 - RNA, 19 nt, Artificial Sequence
  Description of Artificial Sequence: Synthetic oligonucleotide
uuucacuggucagggaaug

SEQ ID NO: 2563090 - RNA, 19 nt, Artificial Sequence
  Description of Artificial Sequence: Synthetic oligonucleotide
gaaggaagaggaaguggug

SEQ ID NO: 2563091 - RNA, 19 nt, Artificial Sequence
  Description of Artificial Sequence: Synthetic oligonucleotide
cucuuaagagucacccuuc

SEQ ID NO: 2563092 - RNA, 19 nt, Artificial Sequence
  Description of Artificial Sequence: Synthetic oligonucleotide
caggaggugagaagucuag

SEQ ID NO: 2563093 - RNA, 19 nt, Artificial Sequence
  Description of Artificial Sequence: Synthetic oligonucleotide
uccacauaauugguuuuca

SEQ ID NO: 2563094 - RNA, 19 nt, Artificial Sequence
  Description of Artificial Sequence: Synthetic oligonucleotide
acgagggcuguccccaagg

SEQ ID NO: 2563095 - RNA, 19 nt, Artificial Sequence
  Description of Artificial Sequence: Synthetic oligonucleotide
accucaggaggugagaagu

SEQ ID NO: 2563096 - RNA, 19 nt, Artificial Sequence
  Description of Artificial Sequence: Synthetic oligonucleotide
ucuucgccuccuucuuugg

SEQ ID NO: 2563097 - RNA, 19 nt, Artificial Sequence
  Description of Artificial Sequence: Synthetic oligonucleotide
gucagaaugggugaacgga

SEQ ID NO: 2563098 - RNA, 19 nt, Artificial Sequence
  Description of Artificial Sequence: Synthetic oligonucleotide
caggaugcugguucccacg

SEQ ID NO: 2563099 - RNA, 19 nt, Artificial Sequence
  Description of Artificial Sequence: Synthetic oligonucleotide
cucugugagccugaccugg

SEQ ID NO: 2563100 - RNA, 19 nt, Artificial Sequence
  Description of Artificial Sequence: Synthetic oligonucleotide
cuaaaagugaaaagccacu

SEQ ID NO: 2563101 - RNA, 19 nt, Artificial Sequence
  Description of Artificial Sequence: Synthetic oligonucleotide
cacauaauugguuuucacu

SEQ ID NO: 2563102 - RNA, 19 nt, Artificial Sequence
  Description of Artificial Sequence: Synthetic oligonucleotide
ggcacuuugaaugucagaa

SEQ ID NO: 2563103 - RNA, 19 nt, Artificial Sequence
  Description of Artificial Sequence: Synthetic oligonucleotide
aggguuugcucugggaguc

SEQ ID NO: 2563104 - RNA, 19 nt, Artificial Sequence
  Description of Artificial Sequence: Synthetic oligonucleotide
ucaggaggugagaagucua

SEQ ID NO: 2563105 - RNA, 19 nt, Artificial Sequence
  Description of Artificial Sequence: Synthetic oligonucleotide
uaccgcuucuucuucgccu

SEQ ID NO: 2563106 - RNA, 19 nt, Artificial Sequence
  Description of Artificial Sequence: Synthetic oligonucleotide
caagggcagagacagucug

SEQ ID NO: 2563107 - RNA, 19 nt, Artificial Sequence
  Description of Artificial Sequence: Synthetic oligonucleotide
acuggucagggaaugaaga

SEQ ID NO: 2563108 - RNA, 19 nt, Artificial Sequence
  Description of Artificial Sequence: Synthetic oligonucleotide
cagagacagucugugagag

SEQ ID NO: 2563109 - RNA, 19 nt, Artificial Sequence
  Description of Artificial Sequence: Synthetic oligonucleotide
ucuguggucagagggaguu

SEQ ID NO: 2563110 - RNA, 19 nt, Artificial Sequence
  Description of Artificial Sequence: Synthetic oligonucleotide
caccucugcacuucugggc

SEQ ID NO: 2563111 - RNA, 19 nt, Artificial Sequence
  Description of Artificial Sequence: Synthetic oligonucleotide
aacggagguugaucuaaaa

SEQ ID NO: 2563112 - RNA, 19 nt, Artificial Sequence
  Description of Artificial Sequence: Synthetic oligonucleotide
cucuguaccacagagugaa

SEQ ID NO: 2563113 - RNA, 19 nt, Artificial Sequence
  Description of Artificial Sequence: Synthetic oligonucleotide
ugccaggggccucuuaaga

SEQ ID NO: 2563114 - RNA, 19 nt, Artificial Sequence
  Description of Artificial Sequence: Synthetic oligonucleotide
gagguugaucuaaaaguga

SEQ ID NO: 2563115 - RNA, 19 nt, Artificial Sequence
  Description of Artificial Sequence: Synthetic oligonucleotide
aagucaccacugccagggg

SEQ ID NO: 2563116 - RNA, 19 nt, Artificial Sequence
  Description of Artificial Sequence: Synthetic oligonucleotide
agguugaucuaaaagugaa

SEQ ID NO: 2563117 - RNA, 19 nt, Artificial Sequence
  Description of Artificial Sequence: Synthetic oligonucleotide
aagauggcucccaggaaga

SEQ ID NO: 2563118 - RNA, 19 nt, Artificial Sequence
  Description of Artificial Sequence: Synthetic oligonucleotide
uguccccaaggcuucuacc

SEQ ID NO: 2563119 - RNA, 19 nt, Artificial Sequence
  Description of Artificial Sequence: Synthetic oligonucleotide
gaagucuaggucggaggcc

SEQ ID NO: 2563120 - RNA, 19 nt, Artificial Sequence
  Description of Artificial Sequence: Synthetic oligonucleotide
uaggucggaggccaugguc

SEQ ID NO: 2563121 - RNA, 19 nt, Artificial Sequence
  Description of Artificial Sequence: Synthetic oligonucleotide
agccacuggacccaaggau

SEQ ID NO: 2563122 - RNA, 19 nt, Artificial Sequence
  Description of Artificial Sequence: Synthetic oligonucleotide
cuuugacuucuccacauaa

SEQ ID NO: 2563123 - RNA, 19 nt, Artificial Sequence
  Description of Artificial Sequence: Synthetic oligonucleotide
ggauuaacgugaauacuug

SEQ ID NO: 2563124 - RNA, 19 nt, Artificial Sequence
  Description of Artificial Sequence: Synthetic oligonucleotide
gauggcucccaggaagagc

SEQ ID NO: 2563125 - RNA, 19 nt, Artificial Sequence
  Description of Artificial Sequence: Synthetic oligonucleotide
aagagcccauaccgcagca

SEQ ID NO: 2563126 - RNA, 19 nt, Artificial Sequence
  Description of Artificial Sequence: Synthetic oligonucleotide
ggugagaagucuaggucgg

SEQ ID NO: 2563127 - RNA, 19 nt, Artificial Sequence
  Description of Artificial Sequence: Synthetic oligonucleotide
ucagguaccucaggaggug

SEQ ID NO: 2563128 - RNA, 19 nt, Artificial Sequence
  Description of Artificial Sequence: Synthetic oligonucleotide
aggccaugguccaagucac

SEQ ID NO: 2563129 - RNA, 19 nt, Artificial Sequence
  Description of Artificial Sequence: Synthetic oligonucleotide
ggucagggaaugaagacac

SEQ ID NO: 2563130 - RNA, 19 nt, Artificial Sequence
  Description of Artificial Sequence: Synthetic oligonucleotide
ugagaggaaacaggaugcu

SEQ ID NO: 2563131 - RNA, 19 nt, Artificial Sequence
  Description of Artificial Sequence: Synthetic oligonucleotide
cagaucucuguggucagag

SEQ ID NO: 2563132 - RNA, 19 nt, Artificial Sequence
  Description of Artificial Sequence: Synthetic oligonucleotide
uguucagaucucugugguc

SEQ ID NO: 2563133 - RNA, 19 nt, Artificial Sequence
  Description of Artificial Sequence: Synthetic oligonucleotide
cuggggacuguucagaucu

SEQ ID NO: 2563134 - RNA, 19 nt, Artificial Sequence
  Description of Artificial Sequence: Synthetic oligonucleotide
aggaggugagaagucuagg

SEQ ID NO: 2563135 - RNA, 19 nt, Artificial Sequence
  Description of Artificial Sequence: Synthetic oligonucleotide
cuuaagagucacccuucuc

SEQ ID NO: 2563136 - RNA, 19 nt, Artificial Sequence
  Description of Artificial Sequence: Synthetic oligonucleotide
uggccaagacacagaugag

SEQ ID NO: 2563137 - RNA, 19 nt, Artificial Sequence
  Description of Artificial Sequence: Synthetic oligonucleotide
agcaugcaugaucauuuau

SEQ ID NO: 2563138 - RNA, 19 nt, Artificial Sequence
  Description of Artificial Sequence: Synthetic oligonucleotide
ugugagccugaccuggcuu

SEQ ID NO: 2563139 - RNA, 19 nt, Artificial Sequence
  Description of Artificial Sequence: Synthetic oligonucleotide
gucaccacugccaggggcc

SEQ ID NO: 2563140 - RNA, 19 nt, Artificial Sequence
  Description of Artificial Sequence: Synthetic oligonucleotide
ugaccuggcuucgggaccc

SEQ ID NO: 2563141 - RNA, 19 nt, Artificial Sequence
  Description of Artificial Sequence: Synthetic oligonucleotide
ggcucugugagccugaccu

SEQ ID NO: 2563142 - RNA, 19 nt, Artificial Sequence
  Description of Artificial Sequence: Synthetic oligonucleotide
agagucaaaggcacuuuga

SEQ ID NO: 2563143 - RNA, 19 nt, Artificial Sequence
  Description of Artificial Sequence: Synthetic oligonucleotide
agggcagagacagucugug

SEQ ID NO: 2563144 - RNA, 19 nt, Artificial Sequence
  Description of Artificial Sequence: Synthetic oligonucleotide
ucuccacauaauugguuuu

SEQ ID NO: 2563145 - RNA, 19 nt, Artificial Sequence
  Description of Artificial Sequence: Synthetic oligonucleotide
gaaggugggcucagguacc

SEQ ID NO: 2563146 - RNA, 19 nt, Artificial Sequence
  Description of Artificial Sequence: Synthetic oligonucleotide
gaucauuuauuggcuuuga

SEQ ID NO: 2563147 - RNA, 19 nt, Artificial Sequence
  Description of Artificial Sequence: Synthetic oligonucleotide
ggucugcacagcuggagcc

SEQ ID NO: 2563148 - RNA, 19 nt, Artificial Sequence
  Description of Artificial Sequence: Synthetic oligonucleotide
gguacgaugauggccaaga

SEQ ID NO: 2563149 - RNA, 19 nt, Artificial Sequence
  Description of Artificial Sequence: Synthetic oligonucleotide
cugaccuggcuucgggacc

SEQ ID NO: 2563150 - RNA, 19 nt, Artificial Sequence
  Description of Artificial Sequence: Synthetic oligonucleotide
cuccacauaauugguuuuc

SEQ ID NO: 2563151 - RNA, 19 nt, Artificial Sequence
  Description of Artificial Sequence: Synthetic oligonucleotide
gggacuugggaauggguac

SEQ ID NO: 2563152 - RNA, 19 nt, Artificial Sequence
  Description of Artificial Sequence: Synthetic oligonucleotide
ucggaggccaugguccaag

SEQ ID NO: 2563153 - RNA, 19 nt, Artificial Sequence
  Description of Artificial Sequence: Synthetic oligonucleotide
ggugaacggagguugaucu

SEQ ID NO: 2563154 - RNA, 19 nt, Artificial Sequence
  Description of Artificial Sequence: Synthetic oligonucleotide
cuucgccuccuucuuuggc

SEQ ID NO: 2563155 - RNA, 19 nt, Artificial Sequence
  Description of Artificial Sequence: Synthetic oligonucleotide
gagccuggggacuguucag

SEQ ID NO: 2563156 - RNA, 19 nt, Artificial Sequence
  Description of Artificial Sequence: Synthetic oligonucleotide
gaagaggaagugguggucu

SEQ ID NO: 2563157 - RNA, 19 nt, Artificial Sequence
  Description of Artificial Sequence: Synthetic oligonucleotide
ggccaagacacagaugagc

SEQ ID NO: 2563158 - RNA, 19 nt, Artificial Sequence
  Description of Artificial Sequence: Synthetic oligonucleotide
gugagccugaccuggcuuc

SEQ ID NO: 2563159 - RNA, 19 nt, Artificial Sequence
  Description of Artificial Sequence: Synthetic oligonucleotide
caggggccucuuaagaguc

SEQ ID NO: 2563160 - RNA, 19 nt, Artificial Sequence
  Description of Artificial Sequence: Synthetic oligonucleotide
uucccacgagggcuguccc

SEQ ID NO: 2563161 - RNA, 19 nt, Artificial Sequence
  Description of Artificial Sequence: Synthetic oligonucleotide
uuauuggcuuugacuucuc

SEQ ID NO: 2563162 - RNA, 19 nt, Artificial Sequence
  Description of Artificial Sequence: Synthetic oligonucleotide
cucagaccccagccaaggg

SEQ ID NO: 2563163 - RNA, 19 nt, Artificial Sequence
  Description of Artificial Sequence: Synthetic oligonucleotide
ggacuugggaauggguacg

SEQ ID NO: 2563164 - RNA, 19 nt, Artificial Sequence
  Description of Artificial Sequence: Synthetic oligonucleotide
accacagagugaaggaaga

SEQ ID NO: 2563165 - RNA, 19 nt, Artificial Sequence
  Description of Artificial Sequence: Synthetic oligonucleotide
guucccacgagggcugucc

SEQ ID NO: 2563166 - RNA, 19 nt, Artificial Sequence
  Description of Artificial Sequence: Synthetic oligonucleotide
gauggccaagacacagaug

SEQ ID NO: 2563167 - RNA, 19 nt, Artificial Sequence
  Description of Artificial Sequence: Synthetic oligonucleotide
aagggcagagacagucugu

SEQ ID NO: 2563168 - RNA, 19 nt, Artificial Sequence
  Description of Artificial Sequence: Synthetic oligonucleotide
guccaagucaccacugcca

SEQ ID NO: 2563169 - RNA, 19 nt, Artificial Sequence
  Description of Artificial Sequence: Synthetic oligonucleotide
gaggaagugguggucugca

SEQ ID NO: 2563170 - RNA, 19 nt, Artificial Sequence
  Description of Artificial Sequence: Synthetic oligonucleotide
ugggaauggguacgaugau

SEQ ID NO: 2563171 - RNA, 19 nt, Artificial Sequence
  Description of Artificial Sequence: Synthetic oligonucleotide
cuucuaccgcuucuucuuc

SEQ ID NO: 2563172 - RNA, 19 nt, Artificial Sequence
  Description of Artificial Sequence: Synthetic oligonucleotide
uccgacugcucugccuccg

SEQ ID NO: 2563173 - RNA, 19 nt, Artificial Sequence
  Description of Artificial Sequence: Synthetic oligonucleotide
aucucuguggucagaggga

SEQ ID NO: 2563174 - RNA, 19 nt, Artificial Sequence
  Description of Artificial Sequence: Synthetic oligonucleotide
cugggaguccucuguacca

SEQ ID NO: 2563175 - RNA, 19 nt, Artificial Sequence
  Description of Artificial Sequence: Synthetic oligonucleotide
cagucugugagaggaaaca

SEQ ID NO: 2563176 - RNA, 19 nt, Artificial Sequence
  Description of Artificial Sequence: Synthetic oligonucleotide
cucaugggacuugggaaug

SEQ ID NO: 2563177 - RNA, 19 nt, Artificial Sequence
  Description of Artificial Sequence: Synthetic oligonucleotide
gguggaaggaauggcaguc

SEQ ID NO: 2563178 - RNA, 19 nt, Artificial Sequence
  Description of Artificial Sequence: Synthetic oligonucleotide
ugggaguccucuguaccac

SEQ ID NO: 2563179 - RNA, 19 nt, Artificial Sequence
  Description of Artificial Sequence: Synthetic oligonucleotide
guacgaugauggccaagac

SEQ ID NO: 2563180 - RNA, 19 nt, Artificial Sequence
  Description of Artificial Sequence: Synthetic oligonucleotide
guggucugcacagcuggag

SEQ ID NO: 2563181 - RNA, 19 nt, Artificial Sequence
  Description of Artificial Sequence: Synthetic oligonucleotide
aggcacuuugaaugucaga

SEQ ID NO: 2563182 - RNA, 19 nt, Artificial Sequence
  Description of Artificial Sequence: Synthetic oligonucleotide
ccaaggauuaacgugaaua

SEQ ID NO: 2563183 - RNA, 19 nt, Artificial Sequence
  Description of Artificial Sequence: Synthetic oligonucleotide
ugggcuccgacugcucugc

SEQ ID NO: 2563184 - RNA, 19 nt, Artificial Sequence
  Description of Artificial Sequence: Synthetic oligonucleotide
agggcuguccccaaggcuu

SEQ ID NO: 2563185 - RNA, 19 nt, Artificial Sequence
  Description of Artificial Sequence: Synthetic oligonucleotide
aaggugggcucagguaccu

SEQ ID NO: 2563186 - RNA, 19 nt, Artificial Sequence
  Description of Artificial Sequence: Synthetic oligonucleotide
ucagaucucuguggucaga

SEQ ID NO: 2563187 - RNA, 19 nt, Artificial Sequence
  Description of Artificial Sequence: Synthetic oligonucleotide
cucugcacuucugggcucc

SEQ ID NO: 2563188 - RNA, 19 nt, Artificial Sequence
  Description of Artificial Sequence: Synthetic oligonucleotide
gggaauggguacgaugaug

SEQ ID NO: 2563189 - RNA, 19 nt, Artificial Sequence
  Description of Artificial Sequence: Synthetic oligonucleotide
gagucacccuucuccagaa

SEQ ID NO: 2563190 - RNA, 19 nt, Artificial Sequence
  Description of Artificial Sequence: Synthetic oligonucleotide
gucagggaaugaagacacg

SEQ ID NO: 2563191 - RNA, 19 nt, Artificial Sequence
  Description of Artificial Sequence: Synthetic oligonucleotide
ggugggcucagguaccuca

SEQ ID NO: 2563192 - RNA, 19 nt, Artificial Sequence
  Description of Artificial Sequence: Synthetic oligonucleotide
cuguccccaaggcuucuac

SEQ ID NO: 2563193 - RNA, 19 nt, Artificial Sequence
  Description of Artificial Sequence: Synthetic oligonucleotide
caugguccaagucaccacu

SEQ ID NO: 2563194 - RNA, 19 nt, Artificial Sequence
  Description of Artificial Sequence: Synthetic oligonucleotide
ccacauaauugguuuucac

SEQ ID NO: 2563195 - RNA, 19 nt, Artificial Sequence
  Description of Artificial Sequence: Synthetic oligonucleotide
ggaggugagaagucuaggu

SEQ ID NO: 2563196 - RNA, 19 nt, Artificial Sequence
  Description of Artificial Sequence: Synthetic oligonucleotide
ucccacgagggcugucccc

SEQ ID NO: 2563197 - RNA, 19 nt, Artificial Sequence
  Description of Artificial Sequence: Synthetic oligonucleotide
agagcccauaccgcagcag

SEQ ID NO: 2563198 - RNA, 19 nt, Artificial Sequence
  Description of Artificial Sequence: Synthetic oligonucleotide
gcagagacagucugugaga

SEQ ID NO: 2563199 - RNA, 19 nt, Artificial Sequence
  Description of Artificial Sequence: Synthetic oligonucleotide
acgugaauacuuggcucug

SEQ ID NO: 2563200 - RNA, 19 nt, Artificial Sequence
  Description of Artificial Sequence: Synthetic oligonucleotide
uggcucugugagccugacc

SEQ ID NO: 2563201 - RNA, 19 nt, Artificial Sequence
  Description of Artificial Sequence: Synthetic oligonucleotide
ugccuccgccucaugggac

SEQ ID NO: 2563202 - RNA, 19 nt, Artificial Sequence
  Description of Artificial Sequence: Synthetic oligonucleotide
ggaaggaauggcagucuug

SEQ ID NO: 2563203 - RNA, 19 nt, Artificial Sequence
  Description of Artificial Sequence: Synthetic oligonucleotide
cccaggaagagcccauacc

SEQ ID NO: 2563204 - RNA, 19 nt, Artificial Sequence
  Description of Artificial Sequence: Synthetic oligonucleotide
gacuugggaauggguacga

SEQ ID NO: 2563205 - RNA, 19 nt, Artificial Sequence
  Description of Artificial Sequence: Synthetic oligonucleotide
cuguucagaucucuguggu

SEQ ID NO: 2563206 - RNA, 19 nt, Artificial Sequence
  Description of Artificial Sequence: Synthetic oligonucleotide
cucagguaccucaggaggu

SEQ ID NO: 2563207 - RNA, 19 nt, Artificial Sequence
  Description of Artificial Sequence: Synthetic oligonucleotide
augguccaagucaccacug

SEQ ID NO: 2563208 - RNA, 19 nt, Artificial Sequence
  Description of Artificial Sequence: Synthetic oligonucleotide
ucugcacuucugggcuccg

SEQ ID NO: 2563209 - RNA, 19 nt, Artificial Sequence
  Description of Artificial Sequence: Synthetic oligonucleotide
guaccucaggaggugagaa

SEQ ID NO: 2563210 - RNA, 19 nt, Artificial Sequence
  Description of Artificial Sequence: Synthetic oligonucleotide
gccaagggcagagacaguc

SEQ ID NO: 2563211 - RNA, 19 nt, Artificial Sequence
  Description of Artificial Sequence: Synthetic oligonucleotide
agguaccucaggaggugag

SEQ ID NO: 2563212 - RNA, 19 nt, Artificial Sequence
  Description of Artificial Sequence: Synthetic oligonucleotide
uggagccuggggacuguuc

SEQ ID NO: 2563213 - RNA, 19 nt, Artificial Sequence
  Description of Artificial Sequence: Synthetic oligonucleotide
ggaauggcagucuuggguu

SEQ ID NO: 2563214 - RNA, 19 nt, Artificial Sequence
  Description of Artificial Sequence: Synthetic oligonucleotide
ggaguccucuguaccacag

SEQ ID NO: 2563215 - RNA, 19 nt, Artificial Sequence
  Description of Artificial Sequence: Synthetic oligonucleotide
gcuccgacugcucugccuc

SEQ ID NO: 2563216 - RNA, 19 nt, Artificial Sequence
  Description of Artificial Sequence: Synthetic oligonucleotide
cauaccgcagcagguucuc

SEQ ID NO: 2563217 - RNA, 19 nt, Artificial Sequence
  Description of Artificial Sequence: Synthetic oligonucleotide
cuccgacugcucugccucc

SEQ ID NO: 2563218 - RNA, 19 nt, Artificial Sequence
  Description of Artificial Sequence: Synthetic oligonucleotide
caugaucauuuauuggcuu

SEQ ID NO: 2563219 - RNA, 19 nt, Artificial Sequence
  Description of Artificial Sequence: Synthetic oligonucleotide
augggacuugggaaugggu

SEQ ID NO: 2563220 - RNA, 19 nt, Artificial Sequence
  Description of Artificial Sequence: Synthetic oligonucleotide
agccuggggacuguucaga

SEQ ID NO: 2563221 - RNA, 19 nt, Artificial Sequence
  Description of Artificial Sequence: Synthetic oligonucleotide
ggacuguucagaucucugu

SEQ ID NO: 2563222 - RNA, 19 nt, Artificial Sequence
  Description of Artificial Sequence: Synthetic oligonucleotide
gugguggucugcacagcug

SEQ ID NO: 2563223 - RNA, 19 nt, Artificial Sequence
  Description of Artificial Sequence: Synthetic oligonucleotide
gggacuguucagaucucug

SEQ ID NO: 2563224 - RNA, 19 nt, Artificial Sequence
  Description of Artificial Sequence: Synthetic oligonucleotide
gagcuggaagauggcuccc

SEQ ID NO: 2563225 - RNA, 19 nt, Artificial Sequence
  Description of Artificial Sequence: Synthetic oligonucleotide
gagccugaccuggcuucgg

SEQ ID NO: 2563226 - RNA, 19 nt, Artificial Sequence
  Description of Artificial Sequence: Synthetic oligonucleotide
gagggaguuucaaucuccu

SEQ ID NO: 2563227 - RNA, 19 nt, Artificial Sequence
  Description of Artificial Sequence: Synthetic oligonucleotide
ccaagucaccacugccagg

SEQ ID NO: 2563228 - RNA, 19 nt, Artificial Sequence
  Description of Artificial Sequence: Synthetic oligonucleotide
ccucagaccccagccaagg

SEQ ID NO: 2563229 - RNA, 19 nt, Artificial Sequence
  Description of Artificial Sequence: Synthetic oligonucleotide
cacgagggcuguccccaag

SEQ ID NO: 2563230 - RNA, 19 nt, Artificial Sequence
  Description of Artificial Sequence: Synthetic oligonucleotide
uucugggcuccgacugcuc

SEQ ID NO: 2563231 - RNA, 19 nt, Artificial Sequence
  Description of Artificial Sequence: Synthetic oligonucleotide
ccaugguccaagucaccac

SEQ ID NO: 2563232 - RNA, 19 nt, Artificial Sequence
  Description of Artificial Sequence: Synthetic oligonucleotide
ucaccacugccaggggccu

SEQ ID NO: 2563233 - RNA, 19 nt, Artificial Sequence
  Description of Artificial Sequence: Synthetic oligonucleotide
ugggugaacggagguugau

SEQ ID NO: 2563234 - RNA, 19 nt, Artificial Sequence
  Description of Artificial Sequence: Synthetic oligonucleotide
caggguuugcucugggagu

SEQ ID NO: 2563235 - RNA, 19 nt, Artificial Sequence
  Description of Artificial Sequence: Synthetic oligonucleotide
gucuaggucggaggccaug

SEQ ID NO: 2563236 - RNA, 19 nt, Artificial Sequence
  Description of Artificial Sequence: Synthetic oligonucleotide
gucagagucaaaggcacuu

SEQ ID NO: 2563237 - RNA, 19 nt, Artificial Sequence
  Description of Artificial Sequence: Synthetic oligonucleotide
gugaacggagguugaucua

SEQ ID NO: 2563238 - RNA, 19 nt, Artificial Sequence
  Description of Artificial Sequence: Synthetic oligonucleotide
gaauggcagucuuggguuu

SEQ ID NO: 2563239 - RNA, 19 nt, Artificial Sequence
  Description of Artificial Sequence: Synthetic oligonucleotide
ggggaugucaggucagagu

SEQ ID NO: 2563240 - RNA, 19 nt, Artificial Sequence
  Description of Artificial Sequence: Synthetic oligonucleotide
augggugaacggagguuga

SEQ ID NO: 2563241 - RNA, 19 nt, Artificial Sequence
  Description of Artificial Sequence: Synthetic oligonucleotide
gguuuucacuggucaggga

SEQ ID NO: 2563242 - RNA, 19 nt, Artificial Sequence
  Description of Artificial Sequence: Synthetic oligonucleotide
cugccuccgccucauggga

SEQ ID NO: 2563243 - RNA, 19 nt, Artificial Sequence
  Description of Artificial Sequence: Synthetic oligonucleotide
gcucugugagccugaccug

SEQ ID NO: 2563244 - RNA, 19 nt, Artificial Sequence
  Description of Artificial Sequence: Synthetic oligonucleotide
gcaugaucauuuauuggcu

SEQ ID NO: 2563245 - RNA, 19 nt, Artificial Sequence
  Description of Artificial Sequence: Synthetic oligonucleotide
gaaugggugaacggagguu

SEQ ID NO: 2563246 - RNA, 19 nt, Artificial Sequence
  Description of Artificial Sequence: Synthetic oligonucleotide
acuugggaauggguacgau

SEQ ID NO: 2563247 - RNA, 19 nt, Artificial Sequence
  Description of Artificial Sequence: Synthetic oligonucleotide
ggcuucuaccgcuucuucu

SEQ ID NO: 2563248 - RNA, 19 nt, Artificial Sequence
  Description of Artificial Sequence: Synthetic oligonucleotide
gggugaacggagguugauc

SEQ ID NO: 2563249 - RNA, 19 nt, Artificial Sequence
  Description of Artificial Sequence: Synthetic oligonucleotide
guggucagagggaguuuca

SEQ ID NO: 2563250 - RNA, 19 nt, Artificial Sequence
  Description of Artificial Sequence: Synthetic oligonucleotide
gguaccucaggaggugaga

SEQ ID NO: 2563251 - RNA, 19 nt, Artificial Sequence
  Description of Artificial Sequence: Synthetic oligonucleotide
cccauaccgcagcagguuc

SEQ ID NO: 2563252 - RNA, 19 nt, Artificial Sequence
  Description of Artificial Sequence: Synthetic oligonucleotide
ggggccucuuaagagucac

SEQ ID NO: 2563253 - RNA, 19 nt, Artificial Sequence
  Description of Artificial Sequence: Synthetic oligonucleotide
gcugguucccacgagggcu

SEQ ID NO: 2563254 - RNA, 19 nt, Artificial Sequence
  Description of Artificial Sequence: Synthetic oligonucleotide
ggaugucaggucagaguca

SEQ ID NO: 2563255 - RNA, 19 nt, Artificial Sequence
  Description of Artificial Sequence: Synthetic oligonucleotide
ggaggccaugguccaaguc

SEQ ID NO: 2563256 - RNA, 19 nt, Artificial Sequence
  Description of Artificial Sequence: Synthetic oligonucleotide
ggucggaggccauggucca

SEQ ID NO: 2563257 - RNA, 19 nt, Artificial Sequence
  Description of Artificial Sequence: Synthetic oligonucleotide
guggaaggaauggcagucu

SEQ ID NO: 2563258 - RNA, 19 nt, Artificial Sequence
  Description of Artificial Sequence: Synthetic oligonucleotide
gugagaagucuaggucgga

SEQ ID NO: 2563259 - RNA, 19 nt, Artificial Sequence
  Description of Artificial Sequence: Synthetic oligonucleotide
acccaaggauuaacgugaa

SEQ ID NO: 2563260 - RNA, 19 nt, Artificial Sequence
  Description of Artificial Sequence: Synthetic oligonucleotide
gggcaggguuugcucuggg

SEQ ID NO: 2563261 - RNA, 19 nt, Artificial Sequence
  Description of Artificial Sequence: Synthetic oligonucleotide
cagguaccucaggagguga

SEQ ID NO: 2563262 - RNA, 19 nt, Artificial Sequence
  Description of Artificial Sequence: Synthetic oligonucleotide
ggucagagggaguuucaau

SEQ ID NO: 2563263 - RNA, 19 nt, Artificial Sequence
  Description of Artificial Sequence: Synthetic oligonucleotide
gcuuugacuucuccacaua

SEQ ID NO: 2563264 - RNA, 19 nt, Artificial Sequence
  Description of Artificial Sequence: Synthetic oligonucleotide
acccuucuccagaaccaaa

SEQ ID NO: 2563265 - RNA, 19 nt, Artificial Sequence
  Description of Artificial Sequence: Synthetic oligonucleotide
gcacuuugaaugucagaau

SEQ ID NO: 2563266 - RNA, 19 nt, Artificial Sequence
  Description of Artificial Sequence: Synthetic oligonucleotide
ggguacgaugauggccaag

SEQ ID NO: 2563267 - RNA, 19 nt, Artificial Sequence
  Description of Artificial Sequence: Synthetic oligonucleotide
cacccuucuccagaaccaa

SEQ ID NO: 2563268 - RNA, 19 nt, Artificial Sequence
  Description of Artificial Sequence: Synthetic oligonucleotide
ugguucccacgagggcugu

SEQ ID NO: 2563269 - RNA, 19 nt, Artificial Sequence
  Description of Artificial Sequence: Synthetic oligonucleotide
guccucuguaccacagagu

SEQ ID NO: 2563270 - RNA, 19 nt, Artificial Sequence
  Description of Artificial Sequence: Synthetic oligonucleotide
ccucaugggacuugggaau

SEQ ID NO: 2563271 - RNA, 19 nt, Artificial Sequence
  Description of Artificial Sequence: Synthetic oligonucleotide
gccugaccuggcuucggga

SEQ ID NO: 2563272 - RNA, 19 nt, Artificial Sequence
  Description of Artificial Sequence: Synthetic oligonucleotide
gggccucuuaagagucacc

SEQ ID NO: 2563273 - RNA, 19 nt, Artificial Sequence
  Description of Artificial Sequence: Synthetic oligonucleotide
ggguuugcucugggagucc

SEQ ID NO: 2563274 - RNA, 19 nt, Artificial Sequence
  Description of Artificial Sequence: Synthetic oligonucleotide
ccaggggccucuuaagagu

SEQ ID NO: 2563275 - RNA, 19 nt, Artificial Sequence
  Description of Artificial Sequence: Synthetic oligonucleotide
ccacuggacccaaggauua

SEQ ID NO: 2563276 - RNA, 19 nt, Artificial Sequence
  Description of Artificial Sequence: Synthetic oligonucleotide
uggcagucuuggguuucuu

SEQ ID NO: 2563277 - RNA, 19 nt, Artificial Sequence
  Description of Artificial Sequence: Synthetic oligonucleotide
gcucugggaguccucugua

SEQ ID NO: 2563278 - RNA, 19 nt, Artificial Sequence
  Description of Artificial Sequence: Synthetic oligonucleotide
gaccuggcuucgggacccc

SEQ ID NO: 2563279 - RNA, 19 nt, Artificial Sequence
  Description of Artificial Sequence: Synthetic oligonucleotide
cucuguggucagagggagu

SEQ ID NO: 2563280 - RNA, 19 nt, Artificial Sequence
  Description of Artificial Sequence: Synthetic oligonucleotide
cuaggucggaggccauggu

SEQ ID NO: 2563281 - RNA, 19 nt, Artificial Sequence
  Description of Artificial Sequence: Synthetic oligonucleotide
cacuggacccaaggauuaa

SEQ ID NO: 2563282 - RNA, 19 nt, Artificial Sequence
  Description of Artificial Sequence: Synthetic oligonucleotide
cuucuucgccuccuucuuu

SEQ ID NO: 2563283 - RNA, 19 nt, Artificial Sequence
  Description of Artificial Sequence: Synthetic oligonucleotide
gcacuucugggcuccgacu

SEQ ID NO: 2563284 - RNA, 19 nt, Artificial Sequence
  Description of Artificial Sequence: Synthetic oligonucleotide
cuucagcaccucugcacuu

SEQ ID NO: 2563285 - RNA, 19 nt, Artificial Sequence
  Description of Artificial Sequence: Synthetic oligonucleotide
ccucugcacuucugggcuc

SEQ ID NO: 2563286 - RNA, 19 nt, Artificial Sequence
  Description of Artificial Sequence: Synthetic oligonucleotide
agucuaggucggaggccau

SEQ ID NO: 2563287 - RNA, 19 nt, Artificial Sequence
  Description of Artificial Sequence: Synthetic oligonucleotide
cgccucaugggacuuggga

SEQ ID NO: 2563288 - RNA, 19 nt, Artificial Sequence
  Description of Artificial Sequence: Synthetic oligonucleotide
ccgacugcucugccuccgc

SEQ ID NO: 2563289 - RNA, 19 nt, Artificial Sequence
  Description of Artificial Sequence: Synthetic oligonucleotide
ggggacuguucagaucucu

SEQ ID NO: 2563290 - RNA, 19 nt, Artificial Sequence
  Description of Artificial Sequence: Synthetic oligonucleotide
ccaagggcagagacagucu

SEQ ID NO: 2563291 - RNA, 19 nt, Artificial Sequence
  Description of Artificial Sequence: Synthetic oligonucleotide
ccgccucaugggacuuggg

SEQ ID NO: 2563292 - RNA, 19 nt, Artificial Sequence
  Description of Artificial Sequence: Synthetic oligonucleotide
cucccaggaagagcccaua

SEQ ID NO: 2563293 - RNA, 19 nt, Artificial Sequence
  Description of Artificial Sequence: Synthetic oligonucleotide
gccuccgccucaugggacu

SEQ ID NO: 2563294 - RNA, 19 nt, Artificial Sequence
  Description of Artificial Sequence: Synthetic oligonucleotide
gucggaggccaugguccaa

SEQ ID NO: 2563295 - RNA, 19 nt, Artificial Sequence
  Description of Artificial Sequence: Synthetic oligonucleotide
ccccaaggcuucuaccgcu

SEQ ID NO: 2563296 - RNA, 19 nt, Artificial Sequence
  Description of Artificial Sequence: Synthetic oligonucleotide
gguucccacgagggcuguc

SEQ ID NO: 2563297 - RNA, 19 nt, Artificial Sequence
  Description of Artificial Sequence: Synthetic oligonucleotide
gcccauaccgcagcagguu

SEQ ID NO: 2563298 - RNA, 19 nt, Artificial Sequence
  Description of Artificial Sequence: Synthetic oligonucleotide
cuguggucagagggaguuu

SEQ ID NO: 2563299 - RNA, 19 nt, Artificial Sequence
  Description of Artificial Sequence: Synthetic oligonucleotide
cccaaggauuaacgugaau

SEQ ID NO: 2563300 - RNA, 19 nt, Artificial Sequence
  Description of Artificial Sequence: Synthetic oligonucleotide
gcuggagccuggggacugu

SEQ ID NO: 2563301 - RNA, 19 nt, Artificial Sequence
  Description of Artificial Sequence: Synthetic oligonucleotide
cuggagccuggggacuguu

SEQ ID NO: 2563302 - RNA, 19 nt, Artificial Sequence
  Description of Artificial Sequence: Synthetic oligonucleotide
cggaggccaugguccaagu

SEQ ID NO: 2563303 - RNA, 19 nt, Artificial Sequence
  Description of Artificial Sequence: Synthetic oligonucleotide
ccuccgccucaugggacuu

SEQ ID NO: 2563304 - RNA, 19 nt, Artificial Sequence
  Description of Artificial Sequence: Synthetic oligonucleotide
uuuauugugacuuugaacg

SEQ ID NO: 2563305 - RNA, 19 nt, Artificial Sequence
  Description of Artificial Sequence: Synthetic oligonucleotide
aguacugaaaccuuuggcc

SEQ ID NO: 2563306 - RNA, 19 nt, Artificial Sequence
  Description of Artificial Sequence: Synthetic oligonucleotide
aaaugaguuccuuugucgc

SEQ ID NO: 2563307 - RNA, 19 nt, Artificial Sequence
  Description of Artificial Sequence: Synthetic oligonucleotide
uccaguauuaguaaaagca

SEQ ID NO: 2563308 - RNA, 19 nt, Artificial Sequence
  Description of Artificial Sequence: Synthetic oligonucleotide
aaaaugaguuccuuugucg

SEQ ID NO: 2563309 - RNA, 19 nt, Artificial Sequence
  Description of Artificial Sequence: Synthetic oligonucleotide
uuaaauaucucauccaucu

SEQ ID NO: 2563310 - RNA, 19 nt, Artificial Sequence
  Description of Artificial Sequence: Synthetic oligonucleotide
aaaagcaucuuuccuuuuc

SEQ ID NO: 2563311 - RNA, 19 nt, Artificial Sequence
  Description of Artificial Sequence: Synthetic oligonucleotide
auuaguaaaagcaucuuuc

SEQ ID NO: 2563312 - RNA, 19 nt, Artificial Sequence
  Description of Artificial Sequence: Synthetic oligonucleotide
uguucaaagugucuguucc

SEQ ID NO: 2563313 - RNA, 19 nt, Artificial Sequence
  Description of Artificial Sequence: Synthetic oligonucleotide
aaucugguuaaauaucuca

SEQ ID NO: 2563314 - RNA, 19 nt, Artificial Sequence
  Description of Artificial Sequence: Synthetic oligonucleotide
gaaaccuuuggccaaaaug

SEQ ID NO: 2563315 - RNA, 19 nt, Artificial Sequence
  Description of Artificial Sequence: Synthetic oligonucleotide
aaaccuuuggccaaaauga

SEQ ID NO: 2563316 - RNA, 19 nt, Artificial Sequence
  Description of Artificial Sequence: Synthetic oligonucleotide
uucacaauguguuugcuga

SEQ ID NO: 2563317 - RNA, 19 nt, Artificial Sequence
  Description of Artificial Sequence: Synthetic oligonucleotide
cuuuguguccaaaucaugc

SEQ ID NO: 2563318 - RNA, 19 nt, Artificial Sequence
  Description of Artificial Sequence: Synthetic oligonucleotide
aaaacacacauggaggcgg

SEQ ID NO: 2563319 - RNA, 19 nt, Artificial Sequence
  Description of Artificial Sequence: Synthetic oligonucleotide
uuaguaaaagcaucuuucc

SEQ ID NO: 2563320 - RNA, 19 nt, Artificial Sequence
  Description of Artificial Sequence: Synthetic oligonucleotide
aucucauccaucucauucc

SEQ ID NO: 2563321 - RNA, 19 nt, Artificial Sequence
  Description of Artificial Sequence: Synthetic oligonucleotide
ucuguuucuucucaccagg

SEQ ID NO: 2563322 - RNA, 19 nt, Artificial Sequence
  Description of Artificial Sequence: Synthetic oligonucleotide
cugguuaaauaucucaucc

SEQ ID NO: 2563323 - RNA, 19 nt, Artificial Sequence
  Description of Artificial Sequence: Synthetic oligonucleotide
uguguuugcugaaacaugu

SEQ ID NO: 2563324 - RNA, 19 nt, Artificial Sequence
  Description of Artificial Sequence: Synthetic oligonucleotide
uuuccuuccaguauuagua

SEQ ID NO: 2563325 - RNA, 19 nt, Artificial Sequence
  Description of Artificial Sequence: Synthetic oligonucleotide
ucuuucuugcucaagggac

SEQ ID NO: 2563326 - RNA, 19 nt, Artificial Sequence
  Description of Artificial Sequence: Synthetic oligonucleotide
ugagcugguacucgggugg

SEQ ID NO: 2563327 - RNA, 19 nt, Artificial Sequence
  Description of Artificial Sequence: Synthetic oligonucleotide
agagcuucgggguggaggc

SEQ ID NO: 2563328 - RNA, 19 nt, Artificial Sequence
  Description of Artificial Sequence: Synthetic oligonucleotide
ugaugaaucuguuuacucu

SEQ ID NO: 2563329 - RNA, 19 nt, Artificial Sequence
  Description of Artificial Sequence: Synthetic oligonucleotide
gucaucuuuguucaaagug

SEQ ID NO: 2563330 - RNA, 19 nt, Artificial Sequence
  Description of Artificial Sequence: Synthetic oligonucleotide
aauguguuugcugaaacau

SEQ ID NO: 2563331 - RNA, 19 nt, Artificial Sequence
  Description of Artificial Sequence: Synthetic oligonucleotide
aguaaaagcaucuuuccuu

SEQ ID NO: 2563332 - RNA, 19 nt, Artificial Sequence
  Description of Artificial Sequence: Synthetic oligonucleotide
ucaguacugaaaccuuugg

SEQ ID NO: 2563333 - RNA, 19 nt, Artificial Sequence
  Description of Artificial Sequence: Synthetic oligonucleotide
ucuguuuacucuuuguguc

SEQ ID NO: 2563334 - RNA, 19 nt, Artificial Sequence
  Description of Artificial Sequence: Synthetic oligonucleotide
ucauccaucucauuccuug

SEQ ID NO: 2563335 - RNA, 19 nt, Artificial Sequence
  Description of Artificial Sequence: Synthetic oligonucleotide
agucugaucacauccgcuc

SEQ ID NO: 2563336 - RNA, 19 nt, Artificial Sequence
  Description of Artificial Sequence: Synthetic oligonucleotide
aaagcaucuuuccuuuucu

SEQ ID NO: 2563337 - RNA, 19 nt, Artificial Sequence
  Description of Artificial Sequence: Synthetic oligonucleotide
ucuuuguucaaagugucug

SEQ ID NO: 2563338 - RNA, 19 nt, Artificial Sequence
  Description of Artificial Sequence: Synthetic oligonucleotide
uguuucuucucaccagggg

SEQ ID NO: 2563339 - RNA, 19 nt, Artificial Sequence
  Description of Artificial Sequence: Synthetic oligonucleotide
cuuuauugugacuuugaac

SEQ ID NO: 2563340 - RNA, 19 nt, Artificial Sequence
  Description of Artificial Sequence: Synthetic oligonucleotide
guuccuuugucgcagcugg

SEQ ID NO: 2563341 - RNA, 19 nt, Artificial Sequence
  Description of Artificial Sequence: Synthetic oligonucleotide
gugacuuugaacgagguac

SEQ ID NO: 2563342 - RNA, 19 nt, Artificial Sequence
  Description of Artificial Sequence: Synthetic oligonucleotide
uauuaguaaaagcaucuuu

SEQ ID NO: 2563343 - RNA, 19 nt, Artificial Sequence
  Description of Artificial Sequence: Synthetic oligonucleotide
uccugagugugucuguacg

SEQ ID NO: 2563344 - RNA, 19 nt, Artificial Sequence
  Description of Artificial Sequence: Synthetic oligonucleotide
acucuuuguguccaaauca

SEQ ID NO: 2563345 - RNA, 19 nt, Artificial Sequence
  Description of Artificial Sequence: Synthetic oligonucleotide
uuucuucucaccaggggug

SEQ ID NO: 2563346 - RNA, 19 nt, Artificial Sequence
  Description of Artificial Sequence: Synthetic oligonucleotide
ugcaccaaccucaagucca

SEQ ID NO: 2563347 - RNA, 19 nt, Artificial Sequence
  Description of Artificial Sequence: Synthetic oligonucleotide
uguuugcugaaacauguuc

SEQ ID NO: 2563348 - RNA, 19 nt, Artificial Sequence
  Description of Artificial Sequence: Synthetic oligonucleotide
uccagcuuguccaugaguc

SEQ ID NO: 2563349 - RNA, 19 nt, Artificial Sequence
  Description of Artificial Sequence: Synthetic oligonucleotide
gucgcuaucgcagucauag

SEQ ID NO: 2563350 - RNA, 19 nt, Artificial Sequence
  Description of Artificial Sequence: Synthetic oligonucleotide
aucauucccaggucagugc

SEQ ID NO: 2563351 - RNA, 19 nt, Artificial Sequence
  Description of Artificial Sequence: Synthetic oligonucleotide
aguauuaguaaaagcaucu

SEQ ID NO: 2563352 - RNA, 19 nt, Artificial Sequence
  Description of Artificial Sequence: Synthetic oligonucleotide
gaucacauccgcucggugc

SEQ ID NO: 2563353 - RNA, 19 nt, Artificial Sequence
  Description of Artificial Sequence: Synthetic oligonucleotide
aaugaguuccuuugucgca

SEQ ID NO: 2563354 - RNA, 19 nt, Artificial Sequence
  Description of Artificial Sequence: Synthetic oligonucleotide
cuugagaaggucgcuaucg

SEQ ID NO: 2563355 - RNA, 19 nt, Artificial Sequence
  Description of Artificial Sequence: Synthetic oligonucleotide
aaaucaugcuguccaauau

SEQ ID NO: 2563356 - RNA, 19 nt, Artificial Sequence
  Description of Artificial Sequence: Synthetic oligonucleotide
uguucccggauccuuagcc

SEQ ID NO: 2563357 - RNA, 19 nt, Artificial Sequence
  Description of Artificial Sequence: Synthetic oligonucleotide
uccaucaguacugaaaccu

SEQ ID NO: 2563358 - RNA, 19 nt, Artificial Sequence
  Description of Artificial Sequence: Synthetic oligonucleotide
uguguccaaaucaugcugu

SEQ ID NO: 2563359 - RNA, 19 nt, Artificial Sequence
  Description of Artificial Sequence: Synthetic oligonucleotide
uuguguccaaaucaugcug

SEQ ID NO: 2563360 - RNA, 19 nt, Artificial Sequence
  Description of Artificial Sequence: Synthetic oligonucleotide
cuuucuugcucaagggacg

SEQ ID NO: 2563361 - RNA, 19 nt, Artificial Sequence
  Description of Artificial Sequence: Synthetic oligonucleotide
uccaggacacggauaaucc

SEQ ID NO: 2563362 - RNA, 19 nt, Artificial Sequence
  Description of Artificial Sequence: Synthetic oligonucleotide
uucggucugcuugagaagg

SEQ ID NO: 2563363 - RNA, 19 nt, Artificial Sequence
  Description of Artificial Sequence: Synthetic oligonucleotide
uaguaaaagcaucuuuccu

SEQ ID NO: 2563364 - RNA, 19 nt, Artificial Sequence
  Description of Artificial Sequence: Synthetic oligonucleotide
gucagugccuuucucaucc

SEQ ID NO: 2563365 - RNA, 19 nt, Artificial Sequence
  Description of Artificial Sequence: Synthetic oligonucleotide
acuaauuuuccuuccagua

SEQ ID NO: 2563366 - RNA, 19 nt, Artificial Sequence
  Description of Artificial Sequence: Synthetic oligonucleotide
uucuuucuugcucaaggga

SEQ ID NO: 2563367 - RNA, 19 nt, Artificial Sequence
  Description of Artificial Sequence: Synthetic oligonucleotide
uuuguguccaaaucaugcu

SEQ ID NO: 2563368 - RNA, 19 nt, Artificial Sequence
  Description of Artificial Sequence: Synthetic oligonucleotide
agugucuguucccucaguc

SEQ ID NO: 2563369 - RNA, 19 nt, Artificial Sequence
  Description of Artificial Sequence: Synthetic oligonucleotide
aucuguuuacucuuugugu

SEQ ID NO: 2563370 - RNA, 19 nt, Artificial Sequence
  Description of Artificial Sequence: Synthetic oligonucleotide
aagagcuucgggguggagg

SEQ ID NO: 2563371 - RNA, 19 nt, Artificial Sequence
  Description of Artificial Sequence: Synthetic oligonucleotide
ucugaucacauccgcucgg

SEQ ID NO: 2563372 - RNA, 19 nt, Artificial Sequence
  Description of Artificial Sequence: Synthetic oligonucleotide
aaagugucuguucccucag

SEQ ID NO: 2563373 - RNA, 19 nt, Artificial Sequence
  Description of Artificial Sequence: Synthetic oligonucleotide
auccaucucauuccuuggc

SEQ ID NO: 2563374 - RNA, 19 nt, Artificial Sequence
  Description of Artificial Sequence: Synthetic oligonucleotide
uauugugacuuugaacgag

SEQ ID NO: 2563375 - RNA, 19 nt, Artificial Sequence
  Description of Artificial Sequence: Synthetic oligonucleotide
ugaaucuguuuacucuuug

SEQ ID NO: 2563376 - RNA, 19 nt, Artificial Sequence
  Description of Artificial Sequence: Synthetic oligonucleotide
uuccaguauuaguaaaagc

SEQ ID NO: 2563377 - RNA, 19 nt, Artificial Sequence
  Description of Artificial Sequence: Synthetic oligonucleotide
ugguuaaauaucucaucca

SEQ ID NO: 2563378 - RNA, 19 nt, Artificial Sequence
  Description of Artificial Sequence: Synthetic oligonucleotide
gagaaggucgcuaucgcag

SEQ ID NO: 2563379 - RNA, 19 nt, Artificial Sequence
  Description of Artificial Sequence: Synthetic oligonucleotide
gauccuuagccgcuccugg

SEQ ID NO: 2563380 - RNA, 19 nt, Artificial Sequence
  Description of Artificial Sequence: Synthetic oligonucleotide
uuuggccaaaaugagguac

SEQ ID NO: 2563381 - RNA, 19 nt, Artificial Sequence
  Description of Artificial Sequence: Synthetic oligonucleotide
uacgccuucauuucuuucu

SEQ ID NO: 2563382 - RNA, 19 nt, Artificial Sequence
  Description of Artificial Sequence: Synthetic oligonucleotide
aaucaugcuguccaauauu

SEQ ID NO: 2563383 - RNA, 19 nt, Artificial Sequence
  Description of Artificial Sequence: Synthetic oligonucleotide
ucugguuaaauaucucauc

SEQ ID NO: 2563384 - RNA, 19 nt, Artificial Sequence
  Description of Artificial Sequence: Synthetic oligonucleotide
uguucccucagucuccuga

SEQ ID NO: 2563385 - RNA, 19 nt, Artificial Sequence
  Description of Artificial Sequence: Synthetic oligonucleotide
ugcaucauucccaggucag

SEQ ID NO: 2563386 - RNA, 19 nt, Artificial Sequence
  Description of Artificial Sequence: Synthetic oligonucleotide
caguauuaguaaaagcauc

SEQ ID NO: 2563387 - RNA, 19 nt, Artificial Sequence
  Description of Artificial Sequence: Synthetic oligonucleotide
ugagucugaucacauccgc

SEQ ID NO: 2563388 - RNA, 19 nt, Artificial Sequence
  Description of Artificial Sequence: Synthetic oligonucleotide
caggacacggauaauccgc

SEQ ID NO: 2563389 - RNA, 19 nt, Artificial Sequence
  Description of Artificial Sequence: Synthetic oligonucleotide
agaaucugguuaaauaucu

SEQ ID NO: 2563390 - RNA, 19 nt, Artificial Sequence
  Description of Artificial Sequence: Synthetic oligonucleotide
ugucuguacgccuucauuu

SEQ ID NO: 2563391 - RNA, 19 nt, Artificial Sequence
  Description of Artificial Sequence: Synthetic oligonucleotide
acucggguggcucugagcu

SEQ ID NO: 2563392 - RNA, 19 nt, Artificial Sequence
  Description of Artificial Sequence: Synthetic oligonucleotide
uuauugugacuuugaacga

SEQ ID NO: 2563393 - RNA, 19 nt, Artificial Sequence
  Description of Artificial Sequence: Synthetic oligonucleotide
uacucuuuguguccaaauc

SEQ ID NO: 2563394 - RNA, 19 nt, Artificial Sequence
  Description of Artificial Sequence: Synthetic oligonucleotide
ucucaauccacugaugaau

SEQ ID NO: 2563395 - RNA, 19 nt, Artificial Sequence
  Description of Artificial Sequence: Synthetic oligonucleotide
acauggaggcgguuccucc

SEQ ID NO: 2563396 - RNA, 19 nt, Artificial Sequence
  Description of Artificial Sequence: Synthetic oligonucleotide
acacggauaauccgcucac

SEQ ID NO: 2563397 - RNA, 19 nt, Artificial Sequence
  Description of Artificial Sequence: Synthetic oligonucleotide
ugggucuggcuucacaaug

SEQ ID NO: 2563398 - RNA, 19 nt, Artificial Sequence
  Description of Artificial Sequence: Synthetic oligonucleotide
uuggccaaaaugagguaca

SEQ ID NO: 2563399 - RNA, 19 nt, Artificial Sequence
  Description of Artificial Sequence: Synthetic oligonucleotide
uuuucucaauccacugaug

SEQ ID NO: 2563400 - RNA, 19 nt, Artificial Sequence
  Description of Artificial Sequence: Synthetic oligonucleotide
ucaugagcugguacucggg

SEQ ID NO: 2563401 - RNA, 19 nt, Artificial Sequence
  Description of Artificial Sequence: Synthetic oligonucleotide
cuguuuacucuuugugucc

SEQ ID NO: 2563402 - RNA, 19 nt, Artificial Sequence
  Description of Artificial Sequence: Synthetic oligonucleotide
uugagaaggucgcuaucgc

SEQ ID NO: 2563403 - RNA, 19 nt, Artificial Sequence
  Description of Artificial Sequence: Synthetic oligonucleotide
auugugacuuugaacgagg

SEQ ID NO: 2563404 - RNA, 19 nt, Artificial Sequence
  Description of Artificial Sequence: Synthetic oligonucleotide
aaguccagcuuguccauga

SEQ ID NO: 2563405 - RNA, 19 nt, Artificial Sequence
  Description of Artificial Sequence: Synthetic oligonucleotide
cuuccaguauuaguaaaag

SEQ ID NO: 2563406 - RNA, 19 nt, Artificial Sequence
  Description of Artificial Sequence: Synthetic oligonucleotide
uacaagagcuucggggugg

SEQ ID NO: 2563407 - RNA, 19 nt, Artificial Sequence
  Description of Artificial Sequence: Synthetic oligonucleotide
caucucauuccuuggcugc

SEQ ID NO: 2563408 - RNA, 19 nt, Artificial Sequence
  Description of Artificial Sequence: Synthetic oligonucleotide
ugacuuugaacgagguacu

SEQ ID NO: 2563409 - RNA, 19 nt, Artificial Sequence
  Description of Artificial Sequence: Synthetic oligonucleotide
aauccacugaugaaucugu

SEQ ID NO: 2563410 - RNA, 19 nt, Artificial Sequence
  Description of Artificial Sequence: Synthetic oligonucleotide
guccaaaucaugcugucca

SEQ ID NO: 2563411 - RNA, 19 nt, Artificial Sequence
  Description of Artificial Sequence: Synthetic oligonucleotide
uccaucucauuccuuggcu

SEQ ID NO: 2563412 - RNA, 19 nt, Artificial Sequence
  Description of Artificial Sequence: Synthetic oligonucleotide
caguacugaaaccuuuggc

SEQ ID NO: 2563413 - RNA, 19 nt, Artificial Sequence
  Description of Artificial Sequence: Synthetic oligonucleotide
cuucacaauguguuugcug

SEQ ID NO: 2563414 - RNA, 19 nt, Artificial Sequence
  Description of Artificial Sequence: Synthetic oligonucleotide
gucaugagcugguacucgg

SEQ ID NO: 2563415 - RNA, 19 nt, Artificial Sequence
  Description of Artificial Sequence: Synthetic oligonucleotide
caucuuuguucaaaguguc

SEQ ID NO: 2563416 - RNA, 19 nt, Artificial Sequence
  Description of Artificial Sequence: Synthetic oligonucleotide
agucuggagaaucugguua

SEQ ID NO: 2563417 - RNA, 19 nt, Artificial Sequence
  Description of Artificial Sequence: Synthetic oligonucleotide
auccaggacacggauaauc

SEQ ID NO: 2563418 - RNA, 19 nt, Artificial Sequence
  Description of Artificial Sequence: Synthetic oligonucleotide
cuuucggucugcuugagaa

SEQ ID NO: 2563419 - RNA, 19 nt, Artificial Sequence
  Description of Artificial Sequence: Synthetic oligonucleotide
ucccucagucuccugagug

SEQ ID NO: 2563420 - RNA, 19 nt, Artificial Sequence
  Description of Artificial Sequence: Synthetic oligonucleotide
ugagaaggucgcuaucgca

SEQ ID NO: 2563421 - RNA, 19 nt, Artificial Sequence
  Description of Artificial Sequence: Synthetic oligonucleotide
cugaugaaucuguuuacuc

SEQ ID NO: 2563422 - RNA, 19 nt, Artificial Sequence
  Description of Artificial Sequence: Synthetic oligonucleotide
uucaaagugucuguucccu

SEQ ID NO: 2563423 - RNA, 19 nt, Artificial Sequence
  Description of Artificial Sequence: Synthetic oligonucleotide
uaucgcagucauagucugg

SEQ ID NO: 2563424 - RNA, 19 nt, Artificial Sequence
  Description of Artificial Sequence: Synthetic oligonucleotide
gagaaucugguuaaauauc

SEQ ID NO: 2563425 - RNA, 19 nt, Artificial Sequence
  Description of Artificial Sequence: Synthetic oligonucleotide
ucuguacgccuucauuucu

SEQ ID NO: 2563426 - RNA, 19 nt, Artificial Sequence
  Description of Artificial Sequence: Synthetic oligonucleotide
gucugaucacauccgcucg

SEQ ID NO: 2563427 - RNA, 19 nt, Artificial Sequence
  Description of Artificial Sequence: Synthetic oligonucleotide
aucacauccgcucggugca

SEQ ID NO: 2563428 - RNA, 19 nt, Artificial Sequence
  Description of Artificial Sequence: Synthetic oligonucleotide
uguuuacucuuugugucca

SEQ ID NO: 2563429 - RNA, 19 nt, Artificial Sequence
  Description of Artificial Sequence: Synthetic oligonucleotide
auuccuuggcugcucagca

SEQ ID NO: 2563430 - RNA, 19 nt, Artificial Sequence
  Description of Artificial Sequence: Synthetic oligonucleotide
uuucggucugcuugagaag

SEQ ID NO: 2563431 - RNA, 19 nt, Artificial Sequence
  Description of Artificial Sequence: Synthetic oligonucleotide
ucgggguggaggcagucag

SEQ ID NO: 2563432 - RNA, 19 nt, Artificial Sequence
  Description of Artificial Sequence: Synthetic oligonucleotide
gacacggauaauccgcuca

SEQ ID NO: 2563433 - RNA, 19 nt, Artificial Sequence
  Description of Artificial Sequence: Synthetic oligonucleotide
guucccggauccuuagccg

SEQ ID NO: 2563434 - RNA, 19 nt, Artificial Sequence
  Description of Artificial Sequence: Synthetic oligonucleotide
cauccaucucauuccuugg

SEQ ID NO: 2563435 - RNA, 19 nt, Artificial Sequence
  Description of Artificial Sequence: Synthetic oligonucleotide
ucggguggcucugagcugg

SEQ ID NO: 2563436 - RNA, 19 nt, Artificial Sequence
  Description of Artificial Sequence: Synthetic oligonucleotide
cuguuucuucucaccaggg

SEQ ID NO: 2563437 - RNA, 19 nt, Artificial Sequence
  Description of Artificial Sequence: Synthetic oligonucleotide
ucaauccacugaugaaucu

SEQ ID NO: 2563438 - RNA, 19 nt, Artificial Sequence
  Description of Artificial Sequence: Synthetic oligonucleotide
cuaucgcagucauagucug

SEQ ID NO: 2563439 - RNA, 19 nt, Artificial Sequence
  Description of Artificial Sequence: Synthetic oligonucleotide
guucaaagugucuguuccc

SEQ ID NO: 2563440 - RNA, 19 nt, Artificial Sequence
  Description of Artificial Sequence: Synthetic oligonucleotide
accaaccucaaguccagcu

SEQ ID NO: 2563441 - RNA, 19 nt, Artificial Sequence
  Description of Artificial Sequence: Synthetic oligonucleotide
caaccucaaguccagcuug

SEQ ID NO: 2563442 - RNA, 19 nt, Artificial Sequence
  Description of Artificial Sequence: Synthetic oligonucleotide
augaguuccuuugucgcag

SEQ ID NO: 2563443 - RNA, 19 nt, Artificial Sequence
  Description of Artificial Sequence: Synthetic oligonucleotide
uccuuagccgcuccuggug

SEQ ID NO: 2563444 - RNA, 19 nt, Artificial Sequence
  Description of Artificial Sequence: Synthetic oligonucleotide
uuguucaaagugucuguuc

SEQ ID NO: 2563445 - RNA, 19 nt, Artificial Sequence
  Description of Artificial Sequence: Synthetic oligonucleotide
guuaaauaucucauccauc

SEQ ID NO: 2563446 - RNA, 19 nt, Artificial Sequence
  Description of Artificial Sequence: Synthetic oligonucleotide
gguggaggcagucagggac

SEQ ID NO: 2563447 - RNA, 19 nt, Artificial Sequence
  Description of Artificial Sequence: Synthetic oligonucleotide
augagucugaucacauccg

SEQ ID NO: 2563448 - RNA, 19 nt, Artificial Sequence
  Description of Artificial Sequence: Synthetic oligonucleotide
uucccggauccuuagccgc

SEQ ID NO: 2563449 - RNA, 19 nt, Artificial Sequence
  Description of Artificial Sequence: Synthetic oligonucleotide
ggucuuuuccuguucccgg

SEQ ID NO: 2563450 - RNA, 19 nt, Artificial Sequence
  Description of Artificial Sequence: Synthetic oligonucleotide
acugaugaaucuguuuacu

SEQ ID NO: 2563451 - RNA, 19 nt, Artificial Sequence
  Description of Artificial Sequence: Synthetic oligonucleotide
uccaugagucugaucacau

SEQ ID NO: 2563452 - RNA, 19 nt, Artificial Sequence
  Description of Artificial Sequence: Synthetic oligonucleotide
cacacauggaggcgguucc

SEQ ID NO: 2563453 - RNA, 19 nt, Artificial Sequence
  Description of Artificial Sequence: Synthetic oligonucleotide
uugugacuuugaacgaggu

SEQ ID NO: 2563454 - RNA, 19 nt, Artificial Sequence
  Description of Artificial Sequence: Synthetic oligonucleotide
auaauccgcucacuaauuu

SEQ ID NO: 2563455 - RNA, 19 nt, Artificial Sequence
  Description of Artificial Sequence: Synthetic oligonucleotide
gaugaaucuguuuacucuu

SEQ ID NO: 2563456 - RNA, 19 nt, Artificial Sequence
  Description of Artificial Sequence: Synthetic oligonucleotide
ugugacuuugaacgaggua

SEQ ID NO: 2563457 - RNA, 19 nt, Artificial Sequence
  Description of Artificial Sequence: Synthetic oligonucleotide
uguccaaaucaugcugucc

SEQ ID NO: 2563458 - RNA, 19 nt, Artificial Sequence
  Description of Artificial Sequence: Synthetic oligonucleotide
accuuuggccaaaaugagg

SEQ ID NO: 2563459 - RNA, 19 nt, Artificial Sequence
  Description of Artificial Sequence: Synthetic oligonucleotide
acacacauggaggcgguuc

SEQ ID NO: 2563460 - RNA, 19 nt, Artificial Sequence
  Description of Artificial Sequence: Synthetic oligonucleotide
uaauccgcucacuaauuuu

SEQ ID NO: 2563461 - RNA, 19 nt, Artificial Sequence
  Description of Artificial Sequence: Synthetic oligonucleotide
cucggugcaucauucccag

SEQ ID NO: 2563462 - RNA, 19 nt, Artificial Sequence
  Description of Artificial Sequence: Synthetic oligonucleotide
ugagugugucuguacgccu

SEQ ID NO: 2563463 - RNA, 19 nt, Artificial Sequence
  Description of Artificial Sequence: Synthetic oligonucleotide
aucgcagucauagucugga

SEQ ID NO: 2563464 - RNA, 19 nt, Artificial Sequence
  Description of Artificial Sequence: Synthetic oligonucleotide
agaaggucgcuaucgcagu

SEQ ID NO: 2563465 - RNA, 19 nt, Artificial Sequence
  Description of Artificial Sequence: Synthetic oligonucleotide
uuuguucaaagugucuguu

SEQ ID NO: 2563466 - RNA, 19 nt, Artificial Sequence
  Description of Artificial Sequence: Synthetic oligonucleotide
ucuugcucaagggacgaaa

SEQ ID NO: 2563467 - RNA, 19 nt, Artificial Sequence
  Description of Artificial Sequence: Synthetic oligonucleotide
aucaguacugaaaccuuug

SEQ ID NO: 2563468 - RNA, 19 nt, Artificial Sequence
  Description of Artificial Sequence: Synthetic oligonucleotide
ugcuugagaaggucgcuau

SEQ ID NO: 2563469 - RNA, 19 nt, Artificial Sequence
  Description of Artificial Sequence: Synthetic oligonucleotide
guucccucagucuccugag

SEQ ID NO: 2563470 - RNA, 19 nt, Artificial Sequence
  Description of Artificial Sequence: Synthetic oligonucleotide
uuucuugcucaagggacga

SEQ ID NO: 2563471 - RNA, 19 nt, Artificial Sequence
  Description of Artificial Sequence: Synthetic oligonucleotide
caucauucccaggucagug

SEQ ID NO: 2563472 - RNA, 19 nt, Artificial Sequence
  Description of Artificial Sequence: Synthetic oligonucleotide
uccuuccaguauuaguaaa

SEQ ID NO: 2563473 - RNA, 19 nt, Artificial Sequence
  Description of Artificial Sequence: Synthetic oligonucleotide
uccacugaugaaucuguuu

SEQ ID NO: 2563474 - RNA, 19 nt, Artificial Sequence
  Description of Artificial Sequence: Synthetic oligonucleotide
ugaucacauccgcucggug

SEQ ID NO: 2563475 - RNA, 19 nt, Artificial Sequence
  Description of Artificial Sequence: Synthetic oligonucleotide
gaaucuguuuacucuuugu

SEQ ID NO: 2563476 - RNA, 19 nt, Artificial Sequence
  Description of Artificial Sequence: Synthetic oligonucleotide
uguccaugagucugaucac

SEQ ID NO: 2563477 - RNA, 19 nt, Artificial Sequence
  Description of Artificial Sequence: Synthetic oligonucleotide
ucaaagugucuguucccuc

SEQ ID NO: 2563478 - RNA, 19 nt, Artificial Sequence
  Description of Artificial Sequence: Synthetic oligonucleotide
cauuccuuggcugcucagc

SEQ ID NO: 2563479 - RNA, 19 nt, Artificial Sequence
  Description of Artificial Sequence: Synthetic oligonucleotide
acggauaauccgcucacua

SEQ ID NO: 2563480 - RNA, 19 nt, Artificial Sequence
  Description of Artificial Sequence: Synthetic oligonucleotide
uccuuggcugcucagcauu

SEQ ID NO: 2563481 - RNA, 19 nt, Artificial Sequence
  Description of Artificial Sequence: Synthetic oligonucleotide
guacaagagcuucggggug

SEQ ID NO: 2563482 - RNA, 19 nt, Artificial Sequence
  Description of Artificial Sequence: Synthetic oligonucleotide
gcuggcauuccucugcacc

SEQ ID NO: 2563483 - RNA, 19 nt, Artificial Sequence
  Description of Artificial Sequence: Synthetic oligonucleotide
uuugucgcagcugguccag

SEQ ID NO: 2563484 - RNA, 19 nt, Artificial Sequence
  Description of Artificial Sequence: Synthetic oligonucleotide
uccggucaugagcugguac

SEQ ID NO: 2563485 - RNA, 19 nt, Artificial Sequence
  Description of Artificial Sequence: Synthetic oligonucleotide
caaaucaugcuguccaaua

SEQ ID NO: 2563486 - RNA, 19 nt, Artificial Sequence
  Description of Artificial Sequence: Synthetic oligonucleotide
aggucagugccuuucucau

SEQ ID NO: 2563487 - RNA, 19 nt, Artificial Sequence
  Description of Artificial Sequence: Synthetic oligonucleotide
aaggucgcuaucgcaguca

SEQ ID NO: 2563488 - RNA, 19 nt, Artificial Sequence
  Description of Artificial Sequence: Synthetic oligonucleotide
uccaaaucaugcuguccaa

SEQ ID NO: 2563489 - RNA, 19 nt, Artificial Sequence
  Description of Artificial Sequence: Synthetic oligonucleotide
gaaucugguuaaauaucuc

SEQ ID NO: 2563490 - RNA, 19 nt, Artificial Sequence
  Description of Artificial Sequence: Synthetic oligonucleotide
auguguuugcugaaacaug

SEQ ID NO: 2563491 - RNA, 19 nt, Artificial Sequence
  Description of Artificial Sequence: Synthetic oligonucleotide
gucuguacgccuucauuuc

SEQ ID NO: 2563492 - RNA, 19 nt, Artificial Sequence
  Description of Artificial Sequence: Synthetic oligonucleotide
aagugucuguucccucagu

SEQ ID NO: 2563493 - RNA, 19 nt, Artificial Sequence
  Description of Artificial Sequence: Synthetic oligonucleotide
uccgcucggugcaucauuc

SEQ ID NO: 2563494 - RNA, 19 nt, Artificial Sequence
  Description of Artificial Sequence: Synthetic oligonucleotide
auggaggcgguuccuccuc

SEQ ID NO: 2563495 - RNA, 19 nt, Artificial Sequence
  Description of Artificial Sequence: Synthetic oligonucleotide
ucuccggucaugagcuggu

SEQ ID NO: 2563496 - RNA, 19 nt, Artificial Sequence
  Description of Artificial Sequence: Synthetic oligonucleotide
uccgcucacuaauuuuccu

SEQ ID NO: 2563497 - RNA, 19 nt, Artificial Sequence
  Description of Artificial Sequence: Synthetic oligonucleotide
gcgguuccuccucugaugg

SEQ ID NO: 2563498 - RNA, 19 nt, Artificial Sequence
  Description of Artificial Sequence: Synthetic oligonucleotide
cuuugaacgagguacuuuu

SEQ ID NO: 2563499 - RNA, 19 nt, Artificial Sequence
  Description of Artificial Sequence: Synthetic oligonucleotide
agucuccugagugugucug

SEQ ID NO: 2563500 - RNA, 19 nt, Artificial Sequence
  Description of Artificial Sequence: Synthetic oligonucleotide
ucacaauguguuugcugaa

SEQ ID NO: 2563501 - RNA, 19 nt, Artificial Sequence
  Description of Artificial Sequence: Synthetic oligonucleotide
cugcaccaaccucaagucc

SEQ ID NO: 2563502 - RNA, 19 nt, Artificial Sequence
  Description of Artificial Sequence: Synthetic oligonucleotide
aucaugcuguccaauauuu

SEQ ID NO: 2563503 - RNA, 19 nt, Artificial Sequence
  Description of Artificial Sequence: Synthetic oligonucleotide
gguacaagagcuucggggu

SEQ ID NO: 2563504 - RNA, 19 nt, Artificial Sequence
  Description of Artificial Sequence: Synthetic oligonucleotide
gucuggagaaucugguuaa

SEQ ID NO: 2563505 - RNA, 19 nt, Artificial Sequence
  Description of Artificial Sequence: Synthetic oligonucleotide
uccaguuuugggguugguc

SEQ ID NO: 2563506 - RNA, 19 nt, Artificial Sequence
  Description of Artificial Sequence: Synthetic oligonucleotide
gucugcuugagaaggucgc

SEQ ID NO: 2563507 - RNA, 19 nt, Artificial Sequence
  Description of Artificial Sequence: Synthetic oligonucleotide
cuggcauuccucugcacca

SEQ ID NO: 2563508 - RNA, 19 nt, Artificial Sequence
  Description of Artificial Sequence: Synthetic oligonucleotide
ucaaguccagcuuguccau

SEQ ID NO: 2563509 - RNA, 19 nt, Artificial Sequence
  Description of Artificial Sequence: Synthetic oligonucleotide
cucacuaauuuuccuucca

SEQ ID NO: 2563510 - RNA, 19 nt, Artificial Sequence
  Description of Artificial Sequence: Synthetic oligonucleotide
aguuccuuugucgcagcug

SEQ ID NO: 2563511 - RNA, 19 nt, Artificial Sequence
  Description of Artificial Sequence: Synthetic oligonucleotide
gcuguccaauauuugaaga

SEQ ID NO: 2563512 - RNA, 19 nt, Artificial Sequence
  Description of Artificial Sequence: Synthetic oligonucleotide
caggucagugccuuucuca

SEQ ID NO: 2563513 - RNA, 19 nt, Artificial Sequence
  Description of Artificial Sequence: Synthetic oligonucleotide
cuaauuuuccuuccaguau

SEQ ID NO: 2563514 - RNA, 19 nt, Artificial Sequence
  Description of Artificial Sequence: Synthetic oligonucleotide
cauuucuuucuugcucaag

SEQ ID NO: 2563515 - RNA, 19 nt, Artificial Sequence
  Description of Artificial Sequence: Synthetic oligonucleotide
guccaauauuugaagaaaa

SEQ ID NO: 2563516 - RNA, 19 nt, Artificial Sequence
  Description of Artificial Sequence: Synthetic oligonucleotide
ccucugauggcuuucgguc

SEQ ID NO: 2563517 - RNA, 19 nt, Artificial Sequence
  Description of Artificial Sequence: Synthetic oligonucleotide
uguacgccuucauuucuuu

SEQ ID NO: 2563518 - RNA, 19 nt, Artificial Sequence
  Description of Artificial Sequence: Synthetic oligonucleotide
aaacacacauggaggcggu

SEQ ID NO: 2563519 - RNA, 19 nt, Artificial Sequence
  Description of Artificial Sequence: Synthetic oligonucleotide
ucugcuugagaaggucgcu

SEQ ID NO: 2563520 - RNA, 19 nt, Artificial Sequence
  Description of Artificial Sequence: Synthetic oligonucleotide
cuuuuccuguucccggauc

SEQ ID NO: 2563521 - RNA, 19 nt, Artificial Sequence
  Description of Artificial Sequence: Synthetic oligonucleotide
agucagggacagcugugcu

SEQ ID NO: 2563522 - RNA, 19 nt, Artificial Sequence
  Description of Artificial Sequence: Synthetic oligonucleotide
uacucggguggcucugagc

SEQ ID NO: 2563523 - RNA, 19 nt, Artificial Sequence
  Description of Artificial Sequence: Synthetic oligonucleotide
gaaggucgcuaucgcaguc

SEQ ID NO: 2563524 - RNA, 19 nt, Artificial Sequence
  Description of Artificial Sequence: Synthetic oligonucleotide
cuugcucaagggacgaaaa

SEQ ID NO: 2563525 - RNA, 19 nt, Artificial Sequence
  Description of Artificial Sequence: Synthetic oligonucleotide
ucgcagucauagucuggag

SEQ ID NO: 2563526 - RNA, 19 nt, Artificial Sequence
  Description of Artificial Sequence: Synthetic oligonucleotide
cuuuguucaaagugucugu

SEQ ID NO: 2563527 - RNA, 19 nt, Artificial Sequence
  Description of Artificial Sequence: Synthetic oligonucleotide
uccuuugucgcagcugguc

SEQ ID NO: 2563528 - RNA, 19 nt, Artificial Sequence
  Description of Artificial Sequence: Synthetic oligonucleotide
cuuugucgcagcuggucca

SEQ ID NO: 2563529 - RNA, 19 nt, Artificial Sequence
  Description of Artificial Sequence: Synthetic oligonucleotide
cagucagggacagcugugc

SEQ ID NO: 2563530 - RNA, 19 nt, Artificial Sequence
  Description of Artificial Sequence: Synthetic oligonucleotide
uccuguucccggauccuua

SEQ ID NO: 2563531 - RNA, 19 nt, Artificial Sequence
  Description of Artificial Sequence: Synthetic oligonucleotide
acuuugaacgagguacuuu

SEQ ID NO: 2563532 - RNA, 19 nt, Artificial Sequence
  Description of Artificial Sequence: Synthetic oligonucleotide
gucuuuuccuguucccgga

SEQ ID NO: 2563533 - RNA, 19 nt, Artificial Sequence
  Description of Artificial Sequence: Synthetic oligonucleotide
ucggucugcuugagaaggu

SEQ ID NO: 2563534 - RNA, 19 nt, Artificial Sequence
  Description of Artificial Sequence: Synthetic oligonucleotide
ccaggacacggauaauccg

SEQ ID NO: 2563535 - RNA, 19 nt, Artificial Sequence
  Description of Artificial Sequence: Synthetic oligonucleotide
auccuuagccgcuccuggu

SEQ ID NO: 2563536 - RNA, 19 nt, Artificial Sequence
  Description of Artificial Sequence: Synthetic oligonucleotide
aaccucaaguccagcuugu

SEQ ID NO: 2563537 - RNA, 19 nt, Artificial Sequence
  Description of Artificial Sequence: Synthetic oligonucleotide
ccuuugucgcagcuggucc

SEQ ID NO: 2563538 - RNA, 19 nt, Artificial Sequence
  Description of Artificial Sequence: Synthetic oligonucleotide
ugugcugggucuggcuuca

SEQ ID NO: 2563539 - RNA, 19 nt, Artificial Sequence
  Description of Artificial Sequence: Synthetic oligonucleotide
augcuguccaauauuugaa

SEQ ID NO: 2563540 - RNA, 19 nt, Artificial Sequence
  Description of Artificial Sequence: Synthetic oligonucleotide
acauccgcucggugcauca

SEQ ID NO: 2563541 - RNA, 19 nt, Artificial Sequence
  Description of Artificial Sequence: Synthetic oligonucleotide
agcuucgggguggaggcag

SEQ ID NO: 2563542 - RNA, 19 nt, Artificial Sequence
  Description of Artificial Sequence: Synthetic oligonucleotide
cacuaauuuuccuuccagu

SEQ ID NO: 2563543 - RNA, 19 nt, Artificial Sequence
  Description of Artificial Sequence: Synthetic oligonucleotide
gggguggaggcagucaggg

SEQ ID NO: 2563544 - RNA, 19 nt, Artificial Sequence
  Description of Artificial Sequence: Synthetic oligonucleotide
ggucaugagcugguacucg

SEQ ID NO: 2563545 - RNA, 19 nt, Artificial Sequence
  Description of Artificial Sequence: Synthetic oligonucleotide
ucccggauccuuagccgcu

SEQ ID NO: 2563546 - RNA, 19 nt, Artificial Sequence
  Description of Artificial Sequence: Synthetic oligonucleotide
ccuuuggccaaaaugaggu

SEQ ID NO: 2563547 - RNA, 19 nt, Artificial Sequence
  Description of Artificial Sequence: Synthetic oligonucleotide
ucggugcaucauucccagg

SEQ ID NO: 2563548 - RNA, 19 nt, Artificial Sequence
  Description of Artificial Sequence: Synthetic oligonucleotide
cagugccuuucucauccag

SEQ ID NO: 2563549 - RNA, 19 nt, Artificial Sequence
  Description of Artificial Sequence: Synthetic oligonucleotide
ucucaccagggguguuucc

SEQ ID NO: 2563550 - RNA, 19 nt, Artificial Sequence
  Description of Artificial Sequence: Synthetic oligonucleotide
ggauaauccgcucacuaau

SEQ ID NO: 2563551 - RNA, 19 nt, Artificial Sequence
  Description of Artificial Sequence: Synthetic oligonucleotide
uucccucagucuccugagu

SEQ ID NO: 2563552 - RNA, 19 nt, Artificial Sequence
  Description of Artificial Sequence: Synthetic oligonucleotide
cuccugagugugucuguac

SEQ ID NO: 2563553 - RNA, 19 nt, Artificial Sequence
  Description of Artificial Sequence: Synthetic oligonucleotide
uccugguggaucugcucuc

SEQ ID NO: 2563554 - RNA, 19 nt, Artificial Sequence
  Description of Artificial Sequence: Synthetic oligonucleotide
cugugcugggucuggcuuc

SEQ ID NO: 2563555 - RNA, 19 nt, Artificial Sequence
  Description of Artificial Sequence: Synthetic oligonucleotide
gucuguucccucagucucc

SEQ ID NO: 2563556 - RNA, 19 nt, Artificial Sequence
  Description of Artificial Sequence: Synthetic oligonucleotide
aggacacggauaauccgcu

SEQ ID NO: 2563557 - RNA, 19 nt, Artificial Sequence
  Description of Artificial Sequence: Synthetic oligonucleotide
agggguguuuccaucagua

SEQ ID NO: 2563558 - RNA, 19 nt, Artificial Sequence
  Description of Artificial Sequence: Synthetic oligonucleotide
cuccucugauggcuuucgg

SEQ ID NO: 2563559 - RNA, 19 nt, Artificial Sequence
  Description of Artificial Sequence: Synthetic oligonucleotide
gacagcugugcugggucug

SEQ ID NO: 2563560 - RNA, 19 nt, Artificial Sequence
  Description of Artificial Sequence: Synthetic oligonucleotide
ccaucucauuccuuggcug

SEQ ID NO: 2563561 - RNA, 19 nt, Artificial Sequence
  Description of Artificial Sequence: Synthetic oligonucleotide
ggguguuuccaucaguacu

SEQ ID NO: 2563562 - RNA, 19 nt, Artificial Sequence
  Description of Artificial Sequence: Synthetic oligonucleotide
ucuggagaaucugguuaaa

SEQ ID NO: 2563563 - RNA, 19 nt, Artificial Sequence
  Description of Artificial Sequence: Synthetic oligonucleotide
aucugcucuccggucauga

SEQ ID NO: 2563564 - RNA, 19 nt, Artificial Sequence
  Description of Artificial Sequence: Synthetic oligonucleotide
ccuuagccgcuccuggugg

SEQ ID NO: 2563565 - RNA, 19 nt, Artificial Sequence
  Description of Artificial Sequence: Synthetic oligonucleotide
uuccuuugucgcagcuggu

SEQ ID NO: 2563566 - RNA, 19 nt, Artificial Sequence
  Description of Artificial Sequence: Synthetic oligonucleotide
guccaugagucugaucaca

SEQ ID NO: 2563567 - RNA, 19 nt, Artificial Sequence
  Description of Artificial Sequence: Synthetic oligonucleotide
ucuccugagugugucugua

SEQ ID NO: 2563568 - RNA, 19 nt, Artificial Sequence
  Description of Artificial Sequence: Synthetic oligonucleotide
guacgccuucauuucuuuc

SEQ ID NO: 2563569 - RNA, 19 nt, Artificial Sequence
  Description of Artificial Sequence: Synthetic oligonucleotide
uucucaccagggguguuuc

SEQ ID NO: 2563570 - RNA, 19 nt, Artificial Sequence
  Description of Artificial Sequence: Synthetic oligonucleotide
ugucgcagcugguccaguu

SEQ ID NO: 2563571 - RNA, 19 nt, Artificial Sequence
  Description of Artificial Sequence: Synthetic oligonucleotide
guacucggguggcucugag

SEQ ID NO: 2563572 - RNA, 19 nt, Artificial Sequence
  Description of Artificial Sequence: Synthetic oligonucleotide
accucaaguccagcuuguc

SEQ ID NO: 2563573 - RNA, 19 nt, Artificial Sequence
  Description of Artificial Sequence: Synthetic oligonucleotide
uucgggguggaggcaguca

SEQ ID NO: 2563574 - RNA, 19 nt, Artificial Sequence
  Description of Artificial Sequence: Synthetic oligonucleotide
aggucgcuaucgcagucau

SEQ ID NO: 2563575 - RNA, 19 nt, Artificial Sequence
  Description of Artificial Sequence: Synthetic oligonucleotide
ggcgguuccuccucugaug

SEQ ID NO: 2563576 - RNA, 19 nt, Artificial Sequence
  Description of Artificial Sequence: Synthetic oligonucleotide
ggugcaucauucccagguc

SEQ ID NO: 2563577 - RNA, 19 nt, Artificial Sequence
  Description of Artificial Sequence: Synthetic oligonucleotide
ucccaggucagugccuuuc

SEQ ID NO: 2563578 - RNA, 19 nt, Artificial Sequence
  Description of Artificial Sequence: Synthetic oligonucleotide
gaggcgguuccuccucuga

SEQ ID NO: 2563579 - RNA, 19 nt, Artificial Sequence
  Description of Artificial Sequence: Synthetic oligonucleotide
ccaguuuugggguuggucu

SEQ ID NO: 2563580 - RNA, 19 nt, Artificial Sequence
  Description of Artificial Sequence: Synthetic oligonucleotide
cauuccucugcaccaaccu

SEQ ID NO: 2563581 - RNA, 19 nt, Artificial Sequence
  Description of Artificial Sequence: Synthetic oligonucleotide
gauaauccgcucacuaauu

SEQ ID NO: 2563582 - RNA, 19 nt, Artificial Sequence
  Description of Artificial Sequence: Synthetic oligonucleotide
ucgcuaucgcagucauagu

SEQ ID NO: 2563583 - RNA, 19 nt, Artificial Sequence
  Description of Artificial Sequence: Synthetic oligonucleotide
auucccaggucagugccuu

SEQ ID NO: 2563584 - RNA, 19 nt, Artificial Sequence
  Description of Artificial Sequence: Synthetic oligonucleotide
gcugggucuggcuucacaa

SEQ ID NO: 2563585 - RNA, 19 nt, Artificial Sequence
  Description of Artificial Sequence: Synthetic oligonucleotide
ccuuccaguauuaguaaaa

SEQ ID NO: 2563586 - RNA, 19 nt, Artificial Sequence
  Description of Artificial Sequence: Synthetic oligonucleotide
gggacagcugugcuggguc

SEQ ID NO: 2563587 - RNA, 19 nt, Artificial Sequence
  Description of Artificial Sequence: Synthetic oligonucleotide
gggguguuuccaucaguac

SEQ ID NO: 2563588 - RNA, 19 nt, Artificial Sequence
  Description of Artificial Sequence: Synthetic oligonucleotide
agcuuguccaugagucuga

SEQ ID NO: 2563589 - RNA, 19 nt, Artificial Sequence
  Description of Artificial Sequence: Synthetic oligonucleotide
augaaucuguuuacucuuu

SEQ ID NO: 2563590 - RNA, 19 nt, Artificial Sequence
  Description of Artificial Sequence: Synthetic oligonucleotide
cacaauguguuugcugaaa

SEQ ID NO: 2563591 - RNA, 19 nt, Artificial Sequence
  Description of Artificial Sequence: Synthetic oligonucleotide
uggcucugagcuggcauuc

SEQ ID NO: 2563592 - RNA, 19 nt, Artificial Sequence
  Description of Artificial Sequence: Synthetic oligonucleotide
aguuuugggguuggucuuu

SEQ ID NO: 2563593 - RNA, 19 nt, Artificial Sequence
  Description of Artificial Sequence: Synthetic oligonucleotide
aggcgguuccuccucugau

SEQ ID NO: 2563594 - RNA, 19 nt, Artificial Sequence
  Description of Artificial Sequence: Synthetic oligonucleotide
cgcuaucgcagucauaguc

SEQ ID NO: 2563595 - RNA, 19 nt, Artificial Sequence
  Description of Artificial Sequence: Synthetic oligonucleotide
ccaguauuaguaaaagcau

SEQ ID NO: 2563596 - RNA, 19 nt, Artificial Sequence
  Description of Artificial Sequence: Synthetic oligonucleotide
ggauccuuagccgcuccug

SEQ ID NO: 2563597 - RNA, 19 nt, Artificial Sequence
  Description of Artificial Sequence: Synthetic oligonucleotide
cgcucacuaauuuuccuuc

SEQ ID NO: 2563598 - RNA, 19 nt, Artificial Sequence
  Description of Artificial Sequence: Synthetic oligonucleotide
cuuuggccaaaaugaggua

SEQ ID NO: 2563599 - RNA, 19 nt, Artificial Sequence
  Description of Artificial Sequence: Synthetic oligonucleotide
gagcugguacucggguggc

SEQ ID NO: 2563600 - RNA, 19 nt, Artificial Sequence
  Description of Artificial Sequence: Synthetic oligonucleotide
cuuagccgcuccuggugga

SEQ ID NO: 2563601 - RNA, 19 nt, Artificial Sequence
  Description of Artificial Sequence: Synthetic oligonucleotide
ccuguucccggauccuuag

SEQ ID NO: 2563602 - RNA, 19 nt, Artificial Sequence
  Description of Artificial Sequence: Synthetic oligonucleotide
auccgcucggugcaucauu

SEQ ID NO: 2563603 - RNA, 19 nt, Artificial Sequence
  Description of Artificial Sequence: Synthetic oligonucleotide
caaguccagcuuguccaug

SEQ ID NO: 2563604 - RNA, 19 nt, Artificial Sequence
  Description of Artificial Sequence: Synthetic oligonucleotide
cugauggcuuucggucugc

SEQ ID NO: 2563605 - RNA, 19 nt, Artificial Sequence
  Description of Artificial Sequence: Synthetic oligonucleotide
gagucugaucacauccgcu

SEQ ID NO: 2563606 - RNA, 19 nt, Artificial Sequence
  Description of Artificial Sequence: Synthetic oligonucleotide
caugagcugguacucgggu

SEQ ID NO: 2563607 - RNA, 19 nt, Artificial Sequence
  Description of Artificial Sequence: Synthetic oligonucleotide
guauuaguaaaagcaucuu

SEQ ID NO: 2563608 - RNA, 19 nt, Artificial Sequence
  Description of Artificial Sequence: Synthetic oligonucleotide
cacauggaggcgguuccuc

SEQ ID NO: 2563609 - RNA, 19 nt, Artificial Sequence
  Description of Artificial Sequence: Synthetic oligonucleotide
ugauggcuuucggucugcu

SEQ ID NO: 2563610 - RNA, 19 nt, Artificial Sequence
  Description of Artificial Sequence: Synthetic oligonucleotide
cucggguggcucugagcug

SEQ ID NO: 2563611 - RNA, 19 nt, Artificial Sequence
  Description of Artificial Sequence: Synthetic oligonucleotide
uggcauuccucugcaccaa

SEQ ID NO: 2563612 - RNA, 19 nt, Artificial Sequence
  Description of Artificial Sequence: Synthetic oligonucleotide
gcuaucgcagucauagucu

SEQ ID NO: 2563613 - RNA, 19 nt, Artificial Sequence
  Description of Artificial Sequence: Synthetic oligonucleotide
gcugguccaguuuuggggu

SEQ ID NO: 2563614 - RNA, 19 nt, Artificial Sequence
  Description of Artificial Sequence: Synthetic oligonucleotide
acaagagcuucggggugga

SEQ ID NO: 2563615 - RNA, 19 nt, Artificial Sequence
  Description of Artificial Sequence: Synthetic oligonucleotide
guguuuccaucaguacuga

SEQ ID NO: 2563616 - RNA, 19 nt, Artificial Sequence
  Description of Artificial Sequence: Synthetic oligonucleotide
gcauuccucugcaccaacc

SEQ ID NO: 2563617 - RNA, 19 nt, Artificial Sequence
  Description of Artificial Sequence: Synthetic oligonucleotide
uucuugcucaagggacgaa

SEQ ID NO: 2563618 - RNA, 19 nt, Artificial Sequence
  Description of Artificial Sequence: Synthetic oligonucleotide
uccuccucugauggcuuuc

SEQ ID NO: 2563619 - RNA, 19 nt, Artificial Sequence
  Description of Artificial Sequence: Synthetic oligonucleotide
uuagccgcuccugguggau

SEQ ID NO: 2563620 - RNA, 19 nt, Artificial Sequence
  Description of Artificial Sequence: Synthetic oligonucleotide
aacacacauggaggcgguu

SEQ ID NO: 2563621 - RNA, 19 nt, Artificial Sequence
  Description of Artificial Sequence: Synthetic oligonucleotide
ccaugagucugaucacauc

SEQ ID NO: 2563622 - RNA, 19 nt, Artificial Sequence
  Description of Artificial Sequence: Synthetic oligonucleotide
gcuugagaaggucgcuauc

SEQ ID NO: 2563623 - RNA, 19 nt, Artificial Sequence
  Description of Artificial Sequence: Synthetic oligonucleotide
ggucagugccuuucucauc

SEQ ID NO: 2563624 - RNA, 19 nt, Artificial Sequence
  Description of Artificial Sequence: Synthetic oligonucleotide
gcaccaaccucaaguccag

SEQ ID NO: 2563625 - RNA, 19 nt, Artificial Sequence
  Description of Artificial Sequence: Synthetic oligonucleotide
gguuccuccucugauggcu

SEQ ID NO: 2563626 - RNA, 19 nt, Artificial Sequence
  Description of Artificial Sequence: Synthetic oligonucleotide
cauggaggcgguuccuccu

SEQ ID NO: 2563627 - RNA, 19 nt, Artificial Sequence
  Description of Artificial Sequence: Synthetic oligonucleotide
cgcucggugcaucauuccc

SEQ ID NO: 2563628 - RNA, 19 nt, Artificial Sequence
  Description of Artificial Sequence: Synthetic oligonucleotide
gugucuguacgccuucauu

SEQ ID NO: 2563629 - RNA, 19 nt, Artificial Sequence
  Description of Artificial Sequence: Synthetic oligonucleotide
ccuccucugauggcuuucg

SEQ ID NO: 2563630 - RNA, 19 nt, Artificial Sequence
  Description of Artificial Sequence: Synthetic oligonucleotide
gcagucagggacagcugug

SEQ ID NO: 2563631 - RNA, 19 nt, Artificial Sequence
  Description of Artificial Sequence: Synthetic oligonucleotide
gcucggugcaucauuccca

SEQ ID NO: 2563632 - RNA, 19 nt, Artificial Sequence
  Description of Artificial Sequence: Synthetic oligonucleotide
caccaaccucaaguccagc

SEQ ID NO: 2563633 - RNA, 19 nt, Artificial Sequence
  Description of Artificial Sequence: Synthetic oligonucleotide
ggacacggauaauccgcuc

SEQ ID NO: 2563634 - RNA, 19 nt, Artificial Sequence
  Description of Artificial Sequence: Synthetic oligonucleotide
gcugguacucggguggcuc

SEQ ID NO: 2563635 - RNA, 19 nt, Artificial Sequence
  Description of Artificial Sequence: Synthetic oligonucleotide
cugcuugagaaggucgcua

SEQ ID NO: 2563636 - RNA, 19 nt, Artificial Sequence
  Description of Artificial Sequence: Synthetic oligonucleotide
auccacugaugaaucuguu

SEQ ID NO: 2563637 - RNA, 19 nt, Artificial Sequence
  Description of Artificial Sequence: Synthetic oligonucleotide
aggcagucagggacagcug

SEQ ID NO: 2563638 - RNA, 19 nt, Artificial Sequence
  Description of Artificial Sequence: Synthetic oligonucleotide
ggaggcgguuccuccucug

SEQ ID NO: 2563639 - RNA, 19 nt, Artificial Sequence
  Description of Artificial Sequence: Synthetic oligonucleotide
cuucgggguggaggcaguc

SEQ ID NO: 2563640 - RNA, 19 nt, Artificial Sequence
  Description of Artificial Sequence: Synthetic oligonucleotide
gacuuugaacgagguacuu

SEQ ID NO: 2563641 - RNA, 19 nt, Artificial Sequence
  Description of Artificial Sequence: Synthetic oligonucleotide
cacauccgcucggugcauc

SEQ ID NO: 2563642 - RNA, 19 nt, Artificial Sequence
  Description of Artificial Sequence: Synthetic oligonucleotide
caguuuugggguuggucuu

SEQ ID NO: 2563643 - RNA, 19 nt, Artificial Sequence
  Description of Artificial Sequence: Synthetic oligonucleotide
caagagcuucgggguggag

SEQ ID NO: 2563644 - RNA, 19 nt, Artificial Sequence
  Description of Artificial Sequence: Synthetic oligonucleotide
cgcagucauagucuggaga

SEQ ID NO: 2563645 - RNA, 19 nt, Artificial Sequence
  Description of Artificial Sequence: Synthetic oligonucleotide
cauucccaggucagugccu

SEQ ID NO: 2563646 - RNA, 19 nt, Artificial Sequence
  Description of Artificial Sequence: Synthetic oligonucleotide
gcuuucggucugcuugaga

SEQ ID NO: 2563647 - RNA, 19 nt, Artificial Sequence
  Description of Artificial Sequence: Synthetic oligonucleotide
cuguucccucagucuccug

SEQ ID NO: 2563648 - RNA, 19 nt, Artificial Sequence
  Description of Artificial Sequence: Synthetic oligonucleotide
gucuccugagugugucugu

SEQ ID NO: 2563649 - RNA, 19 nt, Artificial Sequence
  Description of Artificial Sequence: Synthetic oligonucleotide
agcugguacucggguggcu

SEQ ID NO: 2563650 - RNA, 19 nt, Artificial Sequence
  Description of Artificial Sequence: Synthetic oligonucleotide
cugguacucggguggcucu

SEQ ID NO: 2563651 - RNA, 19 nt, Artificial Sequence
  Description of Artificial Sequence: Synthetic oligonucleotide
cuguacgccuucauuucuu

SEQ ID NO: 2563652 - RNA, 19 nt, Artificial Sequence
  Description of Artificial Sequence: Synthetic oligonucleotide
ggcucugagcuggcauucc

SEQ ID NO: 2563653 - RNA, 19 nt, Artificial Sequence
  Description of Artificial Sequence: Synthetic oligonucleotide
ccggucaugagcugguacu

SEQ ID NO: 2563654 - RNA, 19 nt, Artificial Sequence
  Description of Artificial Sequence: Synthetic oligonucleotide
cggauaauccgcucacuaa

SEQ ID NO: 2563655 - RNA, 19 nt, Artificial Sequence
  Description of Artificial Sequence: Synthetic oligonucleotide
ccaggucagugccuuucuc

SEQ ID NO: 2563656 - RNA, 19 nt, Artificial Sequence
  Description of Artificial Sequence: Synthetic oligonucleotide
cugggucuggcuucacaau

SEQ ID NO: 2563657 - RNA, 19 nt, Artificial Sequence
  Description of Artificial Sequence: Synthetic oligonucleotide
cugaucacauccgcucggu

SEQ ID NO: 2563658 - RNA, 19 nt, Artificial Sequence
  Description of Artificial Sequence: Synthetic oligonucleotide
ccgcucggugcaucauucc

SEQ ID NO: 2563659 - RNA, 19 nt, Artificial Sequence
  Description of Artificial Sequence: Synthetic oligonucleotide
gggucuggcuucacaaugu

SEQ ID NO: 2563660 - RNA, 19 nt, Artificial Sequence
  Description of Artificial Sequence: Synthetic oligonucleotide
cagggguguuuccaucagu

SEQ ID NO: 2563661 - RNA, 19 nt, Artificial Sequence
  Description of Artificial Sequence: Synthetic oligonucleotide
gagcuucgggguggaggca

SEQ ID NO: 2563662 - RNA, 19 nt, Artificial Sequence
  Description of Artificial Sequence: Synthetic oligonucleotide
ggacagcugugcugggucu

SEQ ID NO: 2563663 - RNA, 19 nt, Artificial Sequence
  Description of Artificial Sequence: Synthetic oligonucleotide
ccggauccuuagccgcucc

SEQ ID NO: 2563664 - RNA, 19 nt, Artificial Sequence
  Description of Artificial Sequence: Synthetic oligonucleotide
gguacucggguggcucuga

SEQ ID NO: 2563665 - RNA, 19 nt, Artificial Sequence
  Description of Artificial Sequence: Synthetic oligonucleotide
cuucucaccagggguguuu

SEQ ID NO: 2563666 - RNA, 19 nt, Artificial Sequence
  Description of Artificial Sequence: Synthetic oligonucleotide
cacggauaauccgcucacu

SEQ ID NO: 2563667 - RNA, 19 nt, Artificial Sequence
  Description of Artificial Sequence: Synthetic oligonucleotide
guuuugggguuggucuuuu

SEQ ID NO: 2563668 - RNA, 19 nt, Artificial Sequence
  Description of Artificial Sequence: Synthetic oligonucleotide
ccaucaguacugaaaccuu

SEQ ID NO: 2563669 - RNA, 19 nt, Artificial Sequence
  Description of Artificial Sequence: Synthetic oligonucleotide
cggucaugagcugguacuc

SEQ ID NO: 2563670 - RNA, 19 nt, Artificial Sequence
  Description of Artificial Sequence: Synthetic oligonucleotide
ccaaccucaaguccagcuu

SEQ ID NO: 2563671 - RNA, 19 nt, Artificial Sequence
  Description of Artificial Sequence: Synthetic oligonucleotide
cagucauagucuggagaau

SEQ ID NO: 2563672 - RNA, 19 nt, Artificial Sequence
  Description of Artificial Sequence: Synthetic oligonucleotide
ggguuggucuuuuccuguu

SEQ ID NO: 2563673 - RNA, 19 nt, Artificial Sequence
  Description of Artificial Sequence: Synthetic oligonucleotide
cugguccaguuuugggguu

SEQ ID NO: 2563674 - RNA, 19 nt, Artificial Sequence
  Description of Artificial Sequence: Synthetic oligonucleotide
ccgcuccugguggaucugc

SEQ ID NO: 2563675 - RNA, 19 nt, Artificial Sequence
  Description of Artificial Sequence: Synthetic oligonucleotide
ccgcucacuaauuuuccuu

SEQ ID NO: 2563676 - RNA, 19 nt, Artificial Sequence
  Description of Artificial Sequence: Synthetic oligonucleotide
cccggauccuuagccgcuc

SEQ ID NO: 2563677 - RNA, 19 nt, Artificial Sequence
  Description of Artificial Sequence: Synthetic oligonucleotide
cuccggucaugagcuggua

SEQ ID NO: 2563678 - RNA, 19 nt, Artificial Sequence
  Description of Artificial Sequence: Synthetic oligonucleotide
gugcugggucuggcuucac

SEQ ID NO: 2563679 - RNA, 19 nt, Artificial Sequence
  Description of Artificial Sequence: Synthetic oligonucleotide
cauccaggacacggauaau

SEQ ID NO: 2563680 - RNA, 19 nt, Artificial Sequence
  Description of Artificial Sequence: Synthetic oligonucleotide
gcuuguccaugagucugau

SEQ ID NO: 2563681 - RNA, 19 nt, Artificial Sequence
  Description of Artificial Sequence: Synthetic oligonucleotide
ggucgcuaucgcagucaua

SEQ ID NO: 2563682 - RNA, 19 nt, Artificial Sequence
  Description of Artificial Sequence: Synthetic oligonucleotide
cauccgcucggugcaucau

SEQ ID NO: 2563683 - RNA, 19 nt, Artificial Sequence
  Description of Artificial Sequence: Synthetic oligonucleotide
gcuucgggguggaggcagu

SEQ ID NO: 2563684 - RNA, 19 nt, Artificial Sequence
  Description of Artificial Sequence: Synthetic oligonucleotide
cggauccuuagccgcuccu

SEQ ID NO: 2563685 - RNA, 19 nt, Artificial Sequence
  Description of Artificial Sequence: Synthetic oligonucleotide
aaucacaccauguugaacc

SEQ ID NO: 2563686 - RNA, 19 nt, Artificial Sequence
  Description of Artificial Sequence: Synthetic oligonucleotide
aaguagacaagauaacugc

SEQ ID NO: 2563687 - RNA, 19 nt, Artificial Sequence
  Description of Artificial Sequence: Synthetic oligonucleotide
cuagcaaacacaaacaagg

SEQ ID NO: 2563688 - RNA, 19 nt, Artificial Sequence
  Description of Artificial Sequence: Synthetic oligonucleotide
aaaagcuacaaucacacca

SEQ ID NO: 2563689 - RNA, 19 nt, Artificial Sequence
  Description of Artificial Sequence: Synthetic oligonucleotide
aauuguuuccaacaccaac

SEQ ID NO: 2563690 - RNA, 19 nt, Artificial Sequence
  Description of Artificial Sequence: Synthetic oligonucleotide
aauuguagugaucugaaga

SEQ ID NO: 2563691 - RNA, 19 nt, Artificial Sequence
  Description of Artificial Sequence: Synthetic oligonucleotide
ugagaaguuauccaggaag

SEQ ID NO: 2563692 - RNA, 19 nt, Artificial Sequence
  Description of Artificial Sequence: Synthetic oligonucleotide
uguaacaggagauugacac

SEQ ID NO: 2563693 - RNA, 19 nt, Artificial Sequence
  Description of Artificial Sequence: Synthetic oligonucleotide
auaaaauuguuuccaacac

SEQ ID NO: 2563694 - RNA, 19 nt, Artificial Sequence
  Description of Artificial Sequence: Synthetic oligonucleotide
auuguagugaucugaagac

SEQ ID NO: 2563695 - RNA, 19 nt, Artificial Sequence
  Description of Artificial Sequence: Synthetic oligonucleotide
aaguuauccaggaagaggg

SEQ ID NO: 2563696 - RNA, 19 nt, Artificial Sequence
  Description of Artificial Sequence: Synthetic oligonucleotide
auaggaaaugcuccaagcc

SEQ ID NO: 2563697 - RNA, 19 nt, Artificial Sequence
  Description of Artificial Sequence: Synthetic oligonucleotide
auaacugcaaauaaaauug

SEQ ID NO: 2563698 - RNA, 19 nt, Artificial Sequence
  Description of Artificial Sequence: Synthetic oligonucleotide
uuucuauuccaguauaucc

SEQ ID NO: 2563699 - RNA, 19 nt, Artificial Sequence
  Description of Artificial Sequence: Synthetic oligonucleotide
aauguaacaggagauugac

SEQ ID NO: 2563700 - RNA, 19 nt, Artificial Sequence
  Description of Artificial Sequence: Synthetic oligonucleotide
aauuguaguaaaaguagac

SEQ ID NO: 2563701 - RNA, 19 nt, Artificial Sequence
  Description of Artificial Sequence: Synthetic oligonucleotide
uuaguggugcuccauauag

SEQ ID NO: 2563702 - RNA, 19 nt, Artificial Sequence
  Description of Artificial Sequence: Synthetic oligonucleotide
uguaacuccauuucuacug

SEQ ID NO: 2563703 - RNA, 19 nt, Artificial Sequence
  Description of Artificial Sequence: Synthetic oligonucleotide
aaugcuccaagccaugcuc

SEQ ID NO: 2563704 - RNA, 19 nt, Artificial Sequence
  Description of Artificial Sequence: Synthetic oligonucleotide
uguaguaaaaguagacaag

SEQ ID NO: 2563705 - RNA, 19 nt, Artificial Sequence
  Description of Artificial Sequence: Synthetic oligonucleotide
acaacagugcuguaaaagg

SEQ ID NO: 2563706 - RNA, 19 nt, Artificial Sequence
  Description of Artificial Sequence: Synthetic oligonucleotide
uacuaaauguaacaggaga

SEQ ID NO: 2563707 - RNA, 19 nt, Artificial Sequence
  Description of Artificial Sequence: Synthetic oligonucleotide
ucuucuagaagacacauuu

SEQ ID NO: 2563708 - RNA, 19 nt, Artificial Sequence
  Description of Artificial Sequence: Synthetic oligonucleotide
uauugagaaguuauccagg

SEQ ID NO: 2563709 - RNA, 19 nt, Artificial Sequence
  Description of Artificial Sequence: Synthetic oligonucleotide
cuacugaaaacucucagcc

SEQ ID NO: 2563710 - RNA, 19 nt, Artificial Sequence
  Description of Artificial Sequence: Synthetic oligonucleotide
ugugugauaaggaacuucu

SEQ ID NO: 2563711 - RNA, 19 nt, Artificial Sequence
  Description of Artificial Sequence: Synthetic oligonucleotide
uucacuacuaaauguaaca

SEQ ID NO: 2563712 - RNA, 19 nt, Artificial Sequence
  Description of Artificial Sequence: Synthetic oligonucleotide
ucuuaauugcucuuguaug

SEQ ID NO: 2563713 - RNA, 19 nt, Artificial Sequence
  Description of Artificial Sequence: Synthetic oligonucleotide
uguagugaucugaagacug

SEQ ID NO: 2563714 - RNA, 19 nt, Artificial Sequence
  Description of Artificial Sequence: Synthetic oligonucleotide
uuguaguaaaaguagacaa

SEQ ID NO: 2563715 - RNA, 19 nt, Artificial Sequence
  Description of Artificial Sequence: Synthetic oligonucleotide
aaaguagacaagauaacug

SEQ ID NO: 2563716 - RNA, 19 nt, Artificial Sequence
  Description of Artificial Sequence: Synthetic oligonucleotide
uucuauuccaguauaucca

SEQ ID NO: 2563717 - RNA, 19 nt, Artificial Sequence
  Description of Artificial Sequence: Synthetic oligonucleotide
aguguuacaggagaugggc

SEQ ID NO: 2563718 - RNA, 19 nt, Artificial Sequence
  Description of Artificial Sequence: Synthetic oligonucleotide
ugcaaauaaaauuguuucc

SEQ ID NO: 2563719 - RNA, 19 nt, Artificial Sequence
  Description of Artificial Sequence: Synthetic oligonucleotide
uuggcuuugaccauacaca

SEQ ID NO: 2563720 - RNA, 19 nt, Artificial Sequence
  Description of Artificial Sequence: Synthetic oligonucleotide
guauugagaaguuauccag

SEQ ID NO: 2563721 - RNA, 19 nt, Artificial Sequence
  Description of Artificial Sequence: Synthetic oligonucleotide
guaaaaguagacaagauaa

SEQ ID NO: 2563722 - RNA, 19 nt, Artificial Sequence
  Description of Artificial Sequence: Synthetic oligonucleotide
ugaccauacacauuucugc

SEQ ID NO: 2563723 - RNA, 19 nt, Artificial Sequence
  Description of Artificial Sequence: Synthetic oligonucleotide
ugugauaaggaacuucuuc

SEQ ID NO: 2563724 - RNA, 19 nt, Artificial Sequence
  Description of Artificial Sequence: Synthetic oligonucleotide
ucuacugaaaacucucagc

SEQ ID NO: 2563725 - RNA, 19 nt, Artificial Sequence
  Description of Artificial Sequence: Synthetic oligonucleotide
uaaauguaacaggagauug

SEQ ID NO: 2563726 - RNA, 19 nt, Artificial Sequence
  Description of Artificial Sequence: Synthetic oligonucleotide
uccauuucuacugaaaacu

SEQ ID NO: 2563727 - RNA, 19 nt, Artificial Sequence
  Description of Artificial Sequence: Synthetic oligonucleotide
aacaccaacucuauuagug

SEQ ID NO: 2563728 - RNA, 19 nt, Artificial Sequence
  Description of Artificial Sequence: Synthetic oligonucleotide
aacacaaacaaggaauugu

SEQ ID NO: 2563729 - RNA, 19 nt, Artificial Sequence
  Description of Artificial Sequence: Synthetic oligonucleotide
gauaaggaacuucuucuag

SEQ ID NO: 2563730 - RNA, 19 nt, Artificial Sequence
  Description of Artificial Sequence: Synthetic oligonucleotide
acacauuugguuucacuac

SEQ ID NO: 2563731 - RNA, 19 nt, Artificial Sequence
  Description of Artificial Sequence: Synthetic oligonucleotide
auggauguaacuccauuuc

SEQ ID NO: 2563732 - RNA, 19 nt, Artificial Sequence
  Description of Artificial Sequence: Synthetic oligonucleotide
caugcuuugagauuugguc

SEQ ID NO: 2563733 - RNA, 19 nt, Artificial Sequence
  Description of Artificial Sequence: Synthetic oligonucleotide
aguauugagaaguuaucca

SEQ ID NO: 2563734 - RNA, 19 nt, Artificial Sequence
  Description of Artificial Sequence: Synthetic oligonucleotide
aagauaacugcaaauaaaa

SEQ ID NO: 2563735 - RNA, 19 nt, Artificial Sequence
  Description of Artificial Sequence: Synthetic oligonucleotide
uguaaguugcuuucuauuc

SEQ ID NO: 2563736 - RNA, 19 nt, Artificial Sequence
  Description of Artificial Sequence: Synthetic oligonucleotide
acuacuaaauguaacagga

SEQ ID NO: 2563737 - RNA, 19 nt, Artificial Sequence
  Description of Artificial Sequence: Synthetic oligonucleotide
ugagauuugguccuagcaa

SEQ ID NO: 2563738 - RNA, 19 nt, Artificial Sequence
  Description of Artificial Sequence: Synthetic oligonucleotide
aaauuguagugaucugaag

SEQ ID NO: 2563739 - RNA, 19 nt, Artificial Sequence
  Description of Artificial Sequence: Synthetic oligonucleotide
ucugcacaaagaaaugucu

SEQ ID NO: 2563740 - RNA, 19 nt, Artificial Sequence
  Description of Artificial Sequence: Synthetic oligonucleotide
uccaguauugagaaguuau

SEQ ID NO: 2563741 - RNA, 19 nt, Artificial Sequence
  Description of Artificial Sequence: Synthetic oligonucleotide
uucuacugaaaacucucag

SEQ ID NO: 2563742 - RNA, 19 nt, Artificial Sequence
  Description of Artificial Sequence: Synthetic oligonucleotide
aguaaaaguagacaagaua

SEQ ID NO: 2563743 - RNA, 19 nt, Artificial Sequence
  Description of Artificial Sequence: Synthetic oligonucleotide
caugcuccuauaaaacugg

SEQ ID NO: 2563744 - RNA, 19 nt, Artificial Sequence
  Description of Artificial Sequence: Synthetic oligonucleotide
agaagacacauuugguuuc

SEQ ID NO: 2563745 - RNA, 19 nt, Artificial Sequence
  Description of Artificial Sequence: Synthetic oligonucleotide
gauguaacuccauuucuac

SEQ ID NO: 2563746 - RNA, 19 nt, Artificial Sequence
  Description of Artificial Sequence: Synthetic oligonucleotide
uugaccauacacauuucug

SEQ ID NO: 2563747 - RNA, 19 nt, Artificial Sequence
  Description of Artificial Sequence: Synthetic oligonucleotide
aguggaauaggaaaugcuc

SEQ ID NO: 2563748 - RNA, 19 nt, Artificial Sequence
  Description of Artificial Sequence: Synthetic oligonucleotide
gaagaaaguagaugcagca

SEQ ID NO: 2563749 - RNA, 19 nt, Artificial Sequence
  Description of Artificial Sequence: Synthetic oligonucleotide
aguauauccagagugguga

SEQ ID NO: 2563750 - RNA, 19 nt, Artificial Sequence
  Description of Artificial Sequence: Synthetic oligonucleotide
aacucuauuaguggugcuc

SEQ ID NO: 2563751 - RNA, 19 nt, Artificial Sequence
  Description of Artificial Sequence: Synthetic oligonucleotide
auuucuacugaaaacucuc

SEQ ID NO: 2563752 - RNA, 19 nt, Artificial Sequence
  Description of Artificial Sequence: Synthetic oligonucleotide
ugcuguaaaaggaacugcu

SEQ ID NO: 2563753 - RNA, 19 nt, Artificial Sequence
  Description of Artificial Sequence: Synthetic oligonucleotide
gaauaggaaaugcuccaag

SEQ ID NO: 2563754 - RNA, 19 nt, Artificial Sequence
  Description of Artificial Sequence: Synthetic oligonucleotide
acucuauuaguggugcucc

SEQ ID NO: 2563755 - RNA, 19 nt, Artificial Sequence
  Description of Artificial Sequence: Synthetic oligonucleotide
ucuagaagacacauuuggu

SEQ ID NO: 2563756 - RNA, 19 nt, Artificial Sequence
  Description of Artificial Sequence: Synthetic oligonucleotide
acaccaacucuauuagugg

SEQ ID NO: 2563757 - RNA, 19 nt, Artificial Sequence
  Description of Artificial Sequence: Synthetic oligonucleotide
ucacuacuaaauguaacag

SEQ ID NO: 2563758 - RNA, 19 nt, Artificial Sequence
  Description of Artificial Sequence: Synthetic oligonucleotide
uuacggaaucugcacaaag

SEQ ID NO: 2563759 - RNA, 19 nt, Artificial Sequence
  Description of Artificial Sequence: Synthetic oligonucleotide
uuucacuacuaaauguaac

SEQ ID NO: 2563760 - RNA, 19 nt, Artificial Sequence
  Description of Artificial Sequence: Synthetic oligonucleotide
uaacaggagauugacacca

SEQ ID NO: 2563761 - RNA, 19 nt, Artificial Sequence
  Description of Artificial Sequence: Synthetic oligonucleotide
guaaguugcuuucuauucc

SEQ ID NO: 2563762 - RNA, 19 nt, Artificial Sequence
  Description of Artificial Sequence: Synthetic oligonucleotide
uguuacaggagaugggcca

SEQ ID NO: 2563763 - RNA, 19 nt, Artificial Sequence
  Description of Artificial Sequence: Synthetic oligonucleotide
uuauccaggaagagggaug

SEQ ID NO: 2563764 - RNA, 19 nt, Artificial Sequence
  Description of Artificial Sequence: Synthetic oligonucleotide
uaaguugcuuucuauucca

SEQ ID NO: 2563765 - RNA, 19 nt, Artificial Sequence
  Description of Artificial Sequence: Synthetic oligonucleotide
ugcagcauuucaaaacucu

SEQ ID NO: 2563766 - RNA, 19 nt, Artificial Sequence
  Description of Artificial Sequence: Synthetic oligonucleotide
uuugguccuagcaaacaca

SEQ ID NO: 2563767 - RNA, 19 nt, Artificial Sequence
  Description of Artificial Sequence: Synthetic oligonucleotide
guugaaccgacauugaaaa

SEQ ID NO: 2563768 - RNA, 19 nt, Artificial Sequence
  Description of Artificial Sequence: Synthetic oligonucleotide
uacggaaucugcacaaaga

SEQ ID NO: 2563769 - RNA, 19 nt, Artificial Sequence
  Description of Artificial Sequence: Synthetic oligonucleotide
uagaagacacauuugguuu

SEQ ID NO: 2563770 - RNA, 19 nt, Artificial Sequence
  Description of Artificial Sequence: Synthetic oligonucleotide
caagacagaagaaaguaga

SEQ ID NO: 2563771 - RNA, 19 nt, Artificial Sequence
  Description of Artificial Sequence: Synthetic oligonucleotide
aaacuggaaauuguaguga

SEQ ID NO: 2563772 - RNA, 19 nt, Artificial Sequence
  Description of Artificial Sequence: Synthetic oligonucleotide
gucaccuugugugauaagg

SEQ ID NO: 2563773 - RNA, 19 nt, Artificial Sequence
  Description of Artificial Sequence: Synthetic oligonucleotide
aacuggaaauuguagugau

SEQ ID NO: 2563774 - RNA, 19 nt, Artificial Sequence
  Description of Artificial Sequence: Synthetic oligonucleotide
guaguaaaaguagacaaga

SEQ ID NO: 2563775 - RNA, 19 nt, Artificial Sequence
  Description of Artificial Sequence: Synthetic oligonucleotide
ucacagaagcagaacacgu

SEQ ID NO: 2563776 - RNA, 19 nt, Artificial Sequence
  Description of Artificial Sequence: Synthetic oligonucleotide
uagacaagauaacugcaaa

SEQ ID NO: 2563777 - RNA, 19 nt, Artificial Sequence
  Description of Artificial Sequence: Synthetic oligonucleotide
caguauugagaaguuaucc

SEQ ID NO: 2563778 - RNA, 19 nt, Artificial Sequence
  Description of Artificial Sequence: Synthetic oligonucleotide
gguccuagcaaacacaaac

SEQ ID NO: 2563779 - RNA, 19 nt, Artificial Sequence
  Description of Artificial Sequence: Synthetic oligonucleotide
gugaguuuccaguauugag

SEQ ID NO: 2563780 - RNA, 19 nt, Artificial Sequence
  Description of Artificial Sequence: Synthetic oligonucleotide
uuucuacugaaaacucuca

SEQ ID NO: 2563781 - RNA, 19 nt, Artificial Sequence
  Description of Artificial Sequence: Synthetic oligonucleotide
gacacauuugguuucacua

SEQ ID NO: 2563782 - RNA, 19 nt, Artificial Sequence
  Description of Artificial Sequence: Synthetic oligonucleotide
uccuagcaaacacaaacaa

SEQ ID NO: 2563783 - RNA, 19 nt, Artificial Sequence
  Description of Artificial Sequence: Synthetic oligonucleotide
aaauggauguaacuccauu

SEQ ID NO: 2563784 - RNA, 19 nt, Artificial Sequence
  Description of Artificial Sequence: Synthetic oligonucleotide
aaacaaggaauuguaguaa

SEQ ID NO: 2563785 - RNA, 19 nt, Artificial Sequence
  Description of Artificial Sequence: Synthetic oligonucleotide
uggauguaacuccauuucu

SEQ ID NO: 2563786 - RNA, 19 nt, Artificial Sequence
  Description of Artificial Sequence: Synthetic oligonucleotide
caaaacucuggucaccuug

SEQ ID NO: 2563787 - RNA, 19 nt, Artificial Sequence
  Description of Artificial Sequence: Synthetic oligonucleotide
cuacaaucacaccauguug

SEQ ID NO: 2563788 - RNA, 19 nt, Artificial Sequence
  Description of Artificial Sequence: Synthetic oligonucleotide
aaagcuacaaucacaccau

SEQ ID NO: 2563789 - RNA, 19 nt, Artificial Sequence
  Description of Artificial Sequence: Synthetic oligonucleotide
cuacuaaauguaacaggag

SEQ ID NO: 2563790 - RNA, 19 nt, Artificial Sequence
  Description of Artificial Sequence: Synthetic oligonucleotide
uauguaaguugcuuucuau

SEQ ID NO: 2563791 - RNA, 19 nt, Artificial Sequence
  Description of Artificial Sequence: Synthetic oligonucleotide
ugcuuugagauuugguccu

SEQ ID NO: 2563792 - RNA, 19 nt, Artificial Sequence
  Description of Artificial Sequence: Synthetic oligonucleotide
agucaggugaguuuccagu

SEQ ID NO: 2563793 - RNA, 19 nt, Artificial Sequence
  Description of Artificial Sequence: Synthetic oligonucleotide
gagauuugguccuagcaaa

SEQ ID NO: 2563794 - RNA, 19 nt, Artificial Sequence
  Description of Artificial Sequence: Synthetic oligonucleotide
uugguccuagcaaacacaa

SEQ ID NO: 2563795 - RNA, 19 nt, Artificial Sequence
  Description of Artificial Sequence: Synthetic oligonucleotide
ugaaaacucucagccaugc

SEQ ID NO: 2563796 - RNA, 19 nt, Artificial Sequence
  Description of Artificial Sequence: Synthetic oligonucleotide
agcuaaccaggccagccac

SEQ ID NO: 2563797 - RNA, 19 nt, Artificial Sequence
  Description of Artificial Sequence: Synthetic oligonucleotide
uuugagauuugguccuagc

SEQ ID NO: 2563798 - RNA, 19 nt, Artificial Sequence
  Description of Artificial Sequence: Synthetic oligonucleotide
caaacaaggaauuguagua

SEQ ID NO: 2563799 - RNA, 19 nt, Artificial Sequence
  Description of Artificial Sequence: Synthetic oligonucleotide
auuucugcacagcccuuac

SEQ ID NO: 2563800 - RNA, 19 nt, Artificial Sequence
  Description of Artificial Sequence: Synthetic oligonucleotide
aacucuggucaccuugugu

SEQ ID NO: 2563801 - RNA, 19 nt, Artificial Sequence
  Description of Artificial Sequence: Synthetic oligonucleotide
uuucugcacagcccuuacg

SEQ ID NO: 2563802 - RNA, 19 nt, Artificial Sequence
  Description of Artificial Sequence: Synthetic oligonucleotide
aguggugagcuaaccaggc

SEQ ID NO: 2563803 - RNA, 19 nt, Artificial Sequence
  Description of Artificial Sequence: Synthetic oligonucleotide
acggaaucugcacaaagaa

SEQ ID NO: 2563804 - RNA, 19 nt, Artificial Sequence
  Description of Artificial Sequence: Synthetic oligonucleotide
auugcucuuguauguaagu

SEQ ID NO: 2563805 - RNA, 19 nt, Artificial Sequence
  Description of Artificial Sequence: Synthetic oligonucleotide
gaccauacacauuucugca

SEQ ID NO: 2563806 - RNA, 19 nt, Artificial Sequence
  Description of Artificial Sequence: Synthetic oligonucleotide
gucuuucccaauccagugg

SEQ ID NO: 2563807 - RNA, 19 nt, Artificial Sequence
  Description of Artificial Sequence: Synthetic oligonucleotide
agacagaagaaaguagaug

SEQ ID NO: 2563808 - RNA, 19 nt, Artificial Sequence
  Description of Artificial Sequence: Synthetic oligonucleotide
aggaauuguaguaaaagua

SEQ ID NO: 2563809 - RNA, 19 nt, Artificial Sequence
  Description of Artificial Sequence: Synthetic oligonucleotide
uauuaguggugcuccauau

SEQ ID NO: 2563810 - RNA, 19 nt, Artificial Sequence
  Description of Artificial Sequence: Synthetic oligonucleotide
guaacaggagauugacacc

SEQ ID NO: 2563811 - RNA, 19 nt, Artificial Sequence
  Description of Artificial Sequence: Synthetic oligonucleotide
acguacacagccaagucag

SEQ ID NO: 2563812 - RNA, 19 nt, Artificial Sequence
  Description of Artificial Sequence: Synthetic oligonucleotide
uacugaaaacucucagcca

SEQ ID NO: 2563813 - RNA, 19 nt, Artificial Sequence
  Description of Artificial Sequence: Synthetic oligonucleotide
agacaagauaacugcaaau

SEQ ID NO: 2563814 - RNA, 19 nt, Artificial Sequence
  Description of Artificial Sequence: Synthetic oligonucleotide
ucucccaaauggauguaac

SEQ ID NO: 2563815 - RNA, 19 nt, Artificial Sequence
  Description of Artificial Sequence: Synthetic oligonucleotide
guaaaaggaacugcuuggc

SEQ ID NO: 2563816 - RNA, 19 nt, Artificial Sequence
  Description of Artificial Sequence: Synthetic oligonucleotide
gagaaguuauccaggaaga

SEQ ID NO: 2563817 - RNA, 19 nt, Artificial Sequence
  Description of Artificial Sequence: Synthetic oligonucleotide
gaaauuguagugaucugaa

SEQ ID NO: 2563818 - RNA, 19 nt, Artificial Sequence
  Description of Artificial Sequence: Synthetic oligonucleotide
uaauugcucuuguauguaa

SEQ ID NO: 2563819 - RNA, 19 nt, Artificial Sequence
  Description of Artificial Sequence: Synthetic oligonucleotide
cacaccauguugaaccgac

SEQ ID NO: 2563820 - RNA, 19 nt, Artificial Sequence
  Description of Artificial Sequence: Synthetic oligonucleotide
uguauguaaguugcuuucu

SEQ ID NO: 2563821 - RNA, 19 nt, Artificial Sequence
  Description of Artificial Sequence: Synthetic oligonucleotide
uuucaaaacucuggucacc

SEQ ID NO: 2563822 - RNA, 19 nt, Artificial Sequence
  Description of Artificial Sequence: Synthetic oligonucleotide
ugagcuaaccaggccagcc

SEQ ID NO: 2563823 - RNA, 19 nt, Artificial Sequence
  Description of Artificial Sequence: Synthetic oligonucleotide
aagaaaguagaugcagcau

SEQ ID NO: 2563824 - RNA, 19 nt, Artificial Sequence
  Description of Artificial Sequence: Synthetic oligonucleotide
uccucuuaauugcucuugu

SEQ ID NO: 2563825 - RNA, 19 nt, Artificial Sequence
  Description of Artificial Sequence: Synthetic oligonucleotide
cuuaauugcucuuguaugu

SEQ ID NO: 2563826 - RNA, 19 nt, Artificial Sequence
  Description of Artificial Sequence: Synthetic oligonucleotide
caggagauugacaccaguc

SEQ ID NO: 2563827 - RNA, 19 nt, Artificial Sequence
  Description of Artificial Sequence: Synthetic oligonucleotide
cuguucucccaaauggaug

SEQ ID NO: 2563828 - RNA, 19 nt, Artificial Sequence
  Description of Artificial Sequence: Synthetic oligonucleotide
agccaugcuccuauaaaac

SEQ ID NO: 2563829 - RNA, 19 nt, Artificial Sequence
  Description of Artificial Sequence: Synthetic oligonucleotide
uggaaauuguagugaucug

SEQ ID NO: 2563830 - RNA, 19 nt, Artificial Sequence
  Description of Artificial Sequence: Synthetic oligonucleotide
cuuucuauuccaguauauc

SEQ ID NO: 2563831 - RNA, 19 nt, Artificial Sequence
  Description of Artificial Sequence: Synthetic oligonucleotide
aagcuacaaucacaccaug

SEQ ID NO: 2563832 - RNA, 19 nt, Artificial Sequence
  Description of Artificial Sequence: Synthetic oligonucleotide
aguugcuuucuauuccagu

SEQ ID NO: 2563833 - RNA, 19 nt, Artificial Sequence
  Description of Artificial Sequence: Synthetic oligonucleotide
uggcuuugaccauacacau

SEQ ID NO: 2563834 - RNA, 19 nt, Artificial Sequence
  Description of Artificial Sequence: Synthetic oligonucleotide
cccaaauggauguaacucc

SEQ ID NO: 2563835 - RNA, 19 nt, Artificial Sequence
  Description of Artificial Sequence: Synthetic oligonucleotide
gcuccuauaaaacuggaaa

SEQ ID NO: 2563836 - RNA, 19 nt, Artificial Sequence
  Description of Artificial Sequence: Synthetic oligonucleotide
uccaguggaauaggaaaug

SEQ ID NO: 2563837 - RNA, 19 nt, Artificial Sequence
  Description of Artificial Sequence: Synthetic oligonucleotide
auguaacuccauuucuacu

SEQ ID NO: 2563838 - RNA, 19 nt, Artificial Sequence
  Description of Artificial Sequence: Synthetic oligonucleotide
gaguguuacaggagauggg

SEQ ID NO: 2563839 - RNA, 19 nt, Artificial Sequence
  Description of Artificial Sequence: Synthetic oligonucleotide
aaacucuggucaccuugug

SEQ ID NO: 2563840 - RNA, 19 nt, Artificial Sequence
  Description of Artificial Sequence: Synthetic oligonucleotide
ugggccacaccugccaugg

SEQ ID NO: 2563841 - RNA, 19 nt, Artificial Sequence
  Description of Artificial Sequence: Synthetic oligonucleotide
agaaaugucuucuccccuu

SEQ ID NO: 2563842 - RNA, 19 nt, Artificial Sequence
  Description of Artificial Sequence: Synthetic oligonucleotide
gcagaacacguacacagcc

SEQ ID NO: 2563843 - RNA, 19 nt, Artificial Sequence
  Description of Artificial Sequence: Synthetic oligonucleotide
caacagugcuguaaaagga

SEQ ID NO: 2563844 - RNA, 19 nt, Artificial Sequence
  Description of Artificial Sequence: Synthetic oligonucleotide
agacacauuugguuucacu

SEQ ID NO: 2563845 - RNA, 19 nt, Artificial Sequence
  Description of Artificial Sequence: Synthetic oligonucleotide
ugcuccuauaaaacuggaa

SEQ ID NO: 2563846 - RNA, 19 nt, Artificial Sequence
  Description of Artificial Sequence: Synthetic oligonucleotide
aguagacaagauaacugca

SEQ ID NO: 2563847 - RNA, 19 nt, Artificial Sequence
  Description of Artificial Sequence: Synthetic oligonucleotide
acaggagaugggccacacc

SEQ ID NO: 2563848 - RNA, 19 nt, Artificial Sequence
  Description of Artificial Sequence: Synthetic oligonucleotide
aacucucagccaugcuuug

SEQ ID NO: 2563849 - RNA, 19 nt, Artificial Sequence
  Description of Artificial Sequence: Synthetic oligonucleotide
uauauccagaguggugagc

SEQ ID NO: 2563850 - RNA, 19 nt, Artificial Sequence
  Description of Artificial Sequence: Synthetic oligonucleotide
aguagaugcagcauuucaa

SEQ ID NO: 2563851 - RNA, 19 nt, Artificial Sequence
  Description of Artificial Sequence: Synthetic oligonucleotide
uaguggugcuccauauaga

SEQ ID NO: 2563852 - RNA, 19 nt, Artificial Sequence
  Description of Artificial Sequence: Synthetic oligonucleotide
ccauguugaaccgacauug

SEQ ID NO: 2563853 - RNA, 19 nt, Artificial Sequence
  Description of Artificial Sequence: Synthetic oligonucleotide
agccacguagccaaagguc

SEQ ID NO: 2563854 - RNA, 19 nt, Artificial Sequence
  Description of Artificial Sequence: Synthetic oligonucleotide
guaacuccauuucuacuga

SEQ ID NO: 2563855 - RNA, 19 nt, Artificial Sequence
  Description of Artificial Sequence: Synthetic oligonucleotide
gagauugacaccagucaca

SEQ ID NO: 2563856 - RNA, 19 nt, Artificial Sequence
  Description of Artificial Sequence: Synthetic oligonucleotide
uuaauugcucuuguaugua

SEQ ID NO: 2563857 - RNA, 19 nt, Artificial Sequence
  Description of Artificial Sequence: Synthetic oligonucleotide
aagacacauuugguuucac

SEQ ID NO: 2563858 - RNA, 19 nt, Artificial Sequence
  Description of Artificial Sequence: Synthetic oligonucleotide
cuggaaauuguagugaucu

SEQ ID NO: 2563859 - RNA, 19 nt, Artificial Sequence
  Description of Artificial Sequence: Synthetic oligonucleotide
gcucuuguauguaaguugc

SEQ ID NO: 2563860 - RNA, 19 nt, Artificial Sequence
  Description of Artificial Sequence: Synthetic oligonucleotide
aacugcaaauaaaauuguu

SEQ ID NO: 2563861 - RNA, 19 nt, Artificial Sequence
  Description of Artificial Sequence: Synthetic oligonucleotide
gucgcuccgaguguuacag

SEQ ID NO: 2563862 - RNA, 19 nt, Artificial Sequence
  Description of Artificial Sequence: Synthetic oligonucleotide
aguuuccaguauugagaag

SEQ ID NO: 2563863 - RNA, 19 nt, Artificial Sequence
  Description of Artificial Sequence: Synthetic oligonucleotide
ccaaaggucgcuccgagug

SEQ ID NO: 2563864 - RNA, 19 nt, Artificial Sequence
  Description of Artificial Sequence: Synthetic oligonucleotide
gccacguagccaaaggucg

SEQ ID NO: 2563865 - RNA, 19 nt, Artificial Sequence
  Description of Artificial Sequence: Synthetic oligonucleotide
gugaucugaagacuguucu

SEQ ID NO: 2563866 - RNA, 19 nt, Artificial Sequence
  Description of Artificial Sequence: Synthetic oligonucleotide
acuggaaauuguagugauc

SEQ ID NO: 2563867 - RNA, 19 nt, Artificial Sequence
  Description of Artificial Sequence: Synthetic oligonucleotide
uuucccaauccaguggaau

SEQ ID NO: 2563868 - RNA, 19 nt, Artificial Sequence
  Description of Artificial Sequence: Synthetic oligonucleotide
ucagccaugcuuugagauu

SEQ ID NO: 2563869 - RNA, 19 nt, Artificial Sequence
  Description of Artificial Sequence: Synthetic oligonucleotide
ggaaucugcacaaagaaau

SEQ ID NO: 2563870 - RNA, 19 nt, Artificial Sequence
  Description of Artificial Sequence: Synthetic oligonucleotide
guagacaagauaacugcaa

SEQ ID NO: 2563871 - RNA, 19 nt, Artificial Sequence
  Description of Artificial Sequence: Synthetic oligonucleotide
ucuauuaguggugcuccau

SEQ ID NO: 2563872 - RNA, 19 nt, Artificial Sequence
  Description of Artificial Sequence: Synthetic oligonucleotide
uucuucuagaagacacauu

SEQ ID NO: 2563873 - RNA, 19 nt, Artificial Sequence
  Description of Artificial Sequence: Synthetic oligonucleotide
auuaguggugcuccauaua

SEQ ID NO: 2563874 - RNA, 19 nt, Artificial Sequence
  Description of Artificial Sequence: Synthetic oligonucleotide
agccaaaggucgcuccgag

SEQ ID NO: 2563875 - RNA, 19 nt, Artificial Sequence
  Description of Artificial Sequence: Synthetic oligonucleotide
uccgaguguuacaggagau

SEQ ID NO: 2563876 - RNA, 19 nt, Artificial Sequence
  Description of Artificial Sequence: Synthetic oligonucleotide
cacguacacagccaaguca

SEQ ID NO: 2563877 - RNA, 19 nt, Artificial Sequence
  Description of Artificial Sequence: Synthetic oligonucleotide
aggaaaugcuccaagccau

SEQ ID NO: 2563878 - RNA, 19 nt, Artificial Sequence
  Description of Artificial Sequence: Synthetic oligonucleotide
uccagaguggugagcuaac

SEQ ID NO: 2563879 - RNA, 19 nt, Artificial Sequence
  Description of Artificial Sequence: Synthetic oligonucleotide
aaauuguuuccaacaccaa

SEQ ID NO: 2563880 - RNA, 19 nt, Artificial Sequence
  Description of Artificial Sequence: Synthetic oligonucleotide
gaagagggauggaauaaaa

SEQ ID NO: 2563881 - RNA, 19 nt, Artificial Sequence
  Description of Artificial Sequence: Synthetic oligonucleotide
cagcccuuacggaaucugc

SEQ ID NO: 2563882 - RNA, 19 nt, Artificial Sequence
  Description of Artificial Sequence: Synthetic oligonucleotide
accaacucuauuaguggug

SEQ ID NO: 2563883 - RNA, 19 nt, Artificial Sequence
  Description of Artificial Sequence: Synthetic oligonucleotide
gacuguucucccaaaugga

SEQ ID NO: 2563884 - RNA, 19 nt, Artificial Sequence
  Description of Artificial Sequence: Synthetic oligonucleotide
accauguugaaccgacauu

SEQ ID NO: 2563885 - RNA, 19 nt, Artificial Sequence
  Description of Artificial Sequence: Synthetic oligonucleotide
uugcucuuguauguaaguu

SEQ ID NO: 2563886 - RNA, 19 nt, Artificial Sequence
  Description of Artificial Sequence: Synthetic oligonucleotide
cuuugagauuugguccuag

SEQ ID NO: 2563887 - RNA, 19 nt, Artificial Sequence
  Description of Artificial Sequence: Synthetic oligonucleotide
uaacuccauuucuacugaa

SEQ ID NO: 2563888 - RNA, 19 nt, Artificial Sequence
  Description of Artificial Sequence: Synthetic oligonucleotide
agcuacaaucacaccaugu

SEQ ID NO: 2563889 - RNA, 19 nt, Artificial Sequence
  Description of Artificial Sequence: Synthetic oligonucleotide
gagcuaaccaggccagcca

SEQ ID NO: 2563890 - RNA, 19 nt, Artificial Sequence
  Description of Artificial Sequence: Synthetic oligonucleotide
aaaggucgcuccgaguguu

SEQ ID NO: 2563891 - RNA, 19 nt, Artificial Sequence
  Description of Artificial Sequence: Synthetic oligonucleotide
uucucccaaauggauguaa

SEQ ID NO: 2563892 - RNA, 19 nt, Artificial Sequence
  Description of Artificial Sequence: Synthetic oligonucleotide
guguuacaggagaugggcc

SEQ ID NO: 2563893 - RNA, 19 nt, Artificial Sequence
  Description of Artificial Sequence: Synthetic oligonucleotide
acuguucucccaaauggau

SEQ ID NO: 2563894 - RNA, 19 nt, Artificial Sequence
  Description of Artificial Sequence: Synthetic oligonucleotide
cgaguguuacaggagaugg

SEQ ID NO: 2563895 - RNA, 19 nt, Artificial Sequence
  Description of Artificial Sequence: Synthetic oligonucleotide
cuuguauguaaguugcuuu

SEQ ID NO: 2563896 - RNA, 19 nt, Artificial Sequence
  Description of Artificial Sequence: Synthetic oligonucleotide
augcagcauuucaaaacuc

SEQ ID NO: 2563897 - RNA, 19 nt, Artificial Sequence
  Description of Artificial Sequence: Synthetic oligonucleotide
cuccucuuaauugcucuug

SEQ ID NO: 2563898 - RNA, 19 nt, Artificial Sequence
  Description of Artificial Sequence: Synthetic oligonucleotide
cuccuauaaaacuggaaau

SEQ ID NO: 2563899 - RNA, 19 nt, Artificial Sequence
  Description of Artificial Sequence: Synthetic oligonucleotide
guuacaggagaugggccac

SEQ ID NO: 2563900 - RNA, 19 nt, Artificial Sequence
  Description of Artificial Sequence: Synthetic oligonucleotide
caagccaugcuccuauaaa

SEQ ID NO: 2563901 - RNA, 19 nt, Artificial Sequence
  Description of Artificial Sequence: Synthetic oligonucleotide
aggugaguuuccaguauug

SEQ ID NO: 2563902 - RNA, 19 nt, Artificial Sequence
  Description of Artificial Sequence: Synthetic oligonucleotide
cauguugaaccgacauuga

SEQ ID NO: 2563903 - RNA, 19 nt, Artificial Sequence
  Description of Artificial Sequence: Synthetic oligonucleotide
cauggucuuucccaaucca

SEQ ID NO: 2563904 - RNA, 19 nt, Artificial Sequence
  Description of Artificial Sequence: Synthetic oligonucleotide
uggucaccuugugugauaa

SEQ ID NO: 2563905 - RNA, 19 nt, Artificial Sequence
  Description of Artificial Sequence: Synthetic oligonucleotide
ucuccucuuaauugcucuu

SEQ ID NO: 2563906 - RNA, 19 nt, Artificial Sequence
  Description of Artificial Sequence: Synthetic oligonucleotide
cagaguggugagcuaacca

SEQ ID NO: 2563907 - RNA, 19 nt, Artificial Sequence
  Description of Artificial Sequence: Synthetic oligonucleotide
caccuugugugauaaggaa

SEQ ID NO: 2563908 - RNA, 19 nt, Artificial Sequence
  Description of Artificial Sequence: Synthetic oligonucleotide
aggucgcuccgaguguuac

SEQ ID NO: 2563909 - RNA, 19 nt, Artificial Sequence
  Description of Artificial Sequence: Synthetic oligonucleotide
ccaguauugagaaguuauc

SEQ ID NO: 2563910 - RNA, 19 nt, Artificial Sequence
  Description of Artificial Sequence: Synthetic oligonucleotide
ucuggucaccuugugugau

SEQ ID NO: 2563911 - RNA, 19 nt, Artificial Sequence
  Description of Artificial Sequence: Synthetic oligonucleotide
agccaagucaggugaguuu

SEQ ID NO: 2563912 - RNA, 19 nt, Artificial Sequence
  Description of Artificial Sequence: Synthetic oligonucleotide
gcagcauuucaaaacucug

SEQ ID NO: 2563913 - RNA, 19 nt, Artificial Sequence
  Description of Artificial Sequence: Synthetic oligonucleotide
cuauuaguggugcuccaua

SEQ ID NO: 2563914 - RNA, 19 nt, Artificial Sequence
  Description of Artificial Sequence: Synthetic oligonucleotide
acagcccuuacggaaucug

SEQ ID NO: 2563915 - RNA, 19 nt, Artificial Sequence
  Description of Artificial Sequence: Synthetic oligonucleotide
ucaaaacucuggucaccuu

SEQ ID NO: 2563916 - RNA, 19 nt, Artificial Sequence
  Description of Artificial Sequence: Synthetic oligonucleotide
ucgcuccgaguguuacagg

SEQ ID NO: 2563917 - RNA, 19 nt, Artificial Sequence
  Description of Artificial Sequence: Synthetic oligonucleotide
ugguccuagcaaacacaaa

SEQ ID NO: 2563918 - RNA, 19 nt, Artificial Sequence
  Description of Artificial Sequence: Synthetic oligonucleotide
ucacaccauguugaaccga

SEQ ID NO: 2563919 - RNA, 19 nt, Artificial Sequence
  Description of Artificial Sequence: Synthetic oligonucleotide
gaagacuguucucccaaau

SEQ ID NO: 2563920 - RNA, 19 nt, Artificial Sequence
  Description of Artificial Sequence: Synthetic oligonucleotide
auguaacaggagauugaca

SEQ ID NO: 2563921 - RNA, 19 nt, Artificial Sequence
  Description of Artificial Sequence: Synthetic oligonucleotide
agcccuuacggaaucugca

SEQ ID NO: 2563922 - RNA, 19 nt, Artificial Sequence
  Description of Artificial Sequence: Synthetic oligonucleotide
uagccaaaggucgcuccga

SEQ ID NO: 2563923 - RNA, 19 nt, Artificial Sequence
  Description of Artificial Sequence: Synthetic oligonucleotide
ccaguggaauaggaaaugc

SEQ ID NO: 2563924 - RNA, 19 nt, Artificial Sequence
  Description of Artificial Sequence: Synthetic oligonucleotide
ccuugugugauaaggaacu

SEQ ID NO: 2563925 - RNA, 19 nt, Artificial Sequence
  Description of Artificial Sequence: Synthetic oligonucleotide
acguagccaaaggucgcuc

SEQ ID NO: 2563926 - RNA, 19 nt, Artificial Sequence
  Description of Artificial Sequence: Synthetic oligonucleotide
gauugacaccagucacaga

SEQ ID NO: 2563927 - RNA, 19 nt, Artificial Sequence
  Description of Artificial Sequence: Synthetic oligonucleotide
aguuauccaggaagaggga

SEQ ID NO: 2563928 - RNA, 19 nt, Artificial Sequence
  Description of Artificial Sequence: Synthetic oligonucleotide
ccauggucuuucccaaucc

SEQ ID NO: 2563929 - RNA, 19 nt, Artificial Sequence
  Description of Artificial Sequence: Synthetic oligonucleotide
caguggaauaggaaaugcu

SEQ ID NO: 2563930 - RNA, 19 nt, Artificial Sequence
  Description of Artificial Sequence: Synthetic oligonucleotide
cuaaauguaacaggagauu

SEQ ID NO: 2563931 - RNA, 19 nt, Artificial Sequence
  Description of Artificial Sequence: Synthetic oligonucleotide
gaaaacucucagccaugcu

SEQ ID NO: 2563932 - RNA, 19 nt, Artificial Sequence
  Description of Artificial Sequence: Synthetic oligonucleotide
gcuacaaucacaccauguu

SEQ ID NO: 2563933 - RNA, 19 nt, Artificial Sequence
  Description of Artificial Sequence: Synthetic oligonucleotide
cucuauuaguggugcucca

SEQ ID NO: 2563934 - RNA, 19 nt, Artificial Sequence
  Description of Artificial Sequence: Synthetic oligonucleotide
acagccaagucaggugagu

SEQ ID NO: 2563935 - RNA, 19 nt, Artificial Sequence
  Description of Artificial Sequence: Synthetic oligonucleotide
cucuggucaccuuguguga

SEQ ID NO: 2563936 - RNA, 19 nt, Artificial Sequence
  Description of Artificial Sequence: Synthetic oligonucleotide
caccaacucuauuaguggu

SEQ ID NO: 2563937 - RNA, 19 nt, Artificial Sequence
  Description of Artificial Sequence: Synthetic oligonucleotide
gaaaugucuucuccccuuu

SEQ ID NO: 2563938 - RNA, 19 nt, Artificial Sequence
  Description of Artificial Sequence: Synthetic oligonucleotide
guggugcuccauauagaac

SEQ ID NO: 2563939 - RNA, 19 nt, Artificial Sequence
  Description of Artificial Sequence: Synthetic oligonucleotide
cucccaaauggauguaacu

SEQ ID NO: 2563940 - RNA, 19 nt, Artificial Sequence
  Description of Artificial Sequence: Synthetic oligonucleotide
ggaaaugcuccaagccaug

SEQ ID NO: 2563941 - RNA, 19 nt, Artificial Sequence
  Description of Artificial Sequence: Synthetic oligonucleotide
gcccuuacggaaucugcac

SEQ ID NO: 2563942 - RNA, 19 nt, Artificial Sequence
  Description of Artificial Sequence: Synthetic oligonucleotide
guacacagccaagucaggu

SEQ ID NO: 2563943 - RNA, 19 nt, Artificial Sequence
  Description of Artificial Sequence: Synthetic oligonucleotide
gcacaaagaaaugucuucu

SEQ ID NO: 2563944 - RNA, 19 nt, Artificial Sequence
  Description of Artificial Sequence: Synthetic oligonucleotide
ccaagucaggugaguuucc

SEQ ID NO: 2563945 - RNA, 19 nt, Artificial Sequence
  Description of Artificial Sequence: Synthetic oligonucleotide
ugccauggucuuucccaau

SEQ ID NO: 2563946 - RNA, 19 nt, Artificial Sequence
  Description of Artificial Sequence: Synthetic oligonucleotide
ccacguagccaaaggucgc

SEQ ID NO: 2563947 - RNA, 19 nt, Artificial Sequence
  Description of Artificial Sequence: Synthetic oligonucleotide
augcuccuauaaaacugga

SEQ ID NO: 2563948 - RNA, 19 nt, Artificial Sequence
  Description of Artificial Sequence: Synthetic oligonucleotide
gcuaaccaggccagccacg

SEQ ID NO: 2563949 - RNA, 19 nt, Artificial Sequence
  Description of Artificial Sequence: Synthetic oligonucleotide
ggaauaggaaaugcuccaa

SEQ ID NO: 2563950 - RNA, 19 nt, Artificial Sequence
  Description of Artificial Sequence: Synthetic oligonucleotide
gccaugcuccuauaaaacu

SEQ ID NO: 2563951 - RNA, 19 nt, Artificial Sequence
  Description of Artificial Sequence: Synthetic oligonucleotide
caccauguugaaccgacau

SEQ ID NO: 2563952 - RNA, 19 nt, Artificial Sequence
  Description of Artificial Sequence: Synthetic oligonucleotide
uccaagccaugcuccuaua

SEQ ID NO: 2563953 - RNA, 19 nt, Artificial Sequence
  Description of Artificial Sequence: Synthetic oligonucleotide
ccuuacggaaucugcacaa

SEQ ID NO: 2563954 - RNA, 19 nt, Artificial Sequence
  Description of Artificial Sequence: Synthetic oligonucleotide
cuuacggaaucugcacaaa

SEQ ID NO: 2563955 - RNA, 19 nt, Artificial Sequence
  Description of Artificial Sequence: Synthetic oligonucleotide
gugagcuaaccaggccagc

SEQ ID NO: 2563956 - RNA, 19 nt, Artificial Sequence
  Description of Artificial Sequence: Synthetic oligonucleotide
gcuccgaguguuacaggag

SEQ ID NO: 2563957 - RNA, 19 nt, Artificial Sequence
  Description of Artificial Sequence: Synthetic oligonucleotide
ggucaccuugugugauaag

SEQ ID NO: 2563958 - RNA, 19 nt, Artificial Sequence
  Description of Artificial Sequence: Synthetic oligonucleotide
acaccauguugaaccgaca

SEQ ID NO: 2563959 - RNA, 19 nt, Artificial Sequence
  Description of Artificial Sequence: Synthetic oligonucleotide
cuaaccaggccagccacgu

SEQ ID NO: 2563960 - RNA, 19 nt, Artificial Sequence
  Description of Artificial Sequence: Synthetic oligonucleotide
ccagaguggugagcuaacc

SEQ ID NO: 2563961 - RNA, 19 nt, Artificial Sequence
  Description of Artificial Sequence: Synthetic oligonucleotide
cguacacagccaagucagg

SEQ ID NO: 2563962 - RNA, 19 nt, Artificial Sequence
  Description of Artificial Sequence: Synthetic oligonucleotide
ccgaguguuacaggagaug

SEQ ID NO: 2563963 - RNA, 19 nt, Artificial Sequence
  Description of Artificial Sequence: Synthetic oligonucleotide
caaaggucgcuccgagugu

SEQ ID NO: 2563964 - RNA, 19 nt, Artificial Sequence
  Description of Artificial Sequence: Synthetic oligonucleotide
cagccacguagccaaaggu

SEQ ID NO: 2563965 - RNA, 19 nt, Artificial Sequence
  Description of Artificial Sequence: Synthetic oligonucleotide
agccaugcuuugagauuug

SEQ ID NO: 2563966 - RNA, 19 nt, Artificial Sequence
  Description of Artificial Sequence: Synthetic oligonucleotide
cagccaugcuuugagauuu

SEQ ID NO: 2563967 - RNA, 19 nt, Artificial Sequence
  Description of Artificial Sequence: Synthetic oligonucleotide
cccuuacggaaucugcaca

SEQ ID NO: 2563968 - RNA, 19 nt, Artificial Sequence
  Description of Artificial Sequence: Synthetic oligonucleotide
ggugcuccauauagaacaa

SEQ ID NO: 2563969 - RNA, 19 nt, Artificial Sequence
  Description of Artificial Sequence: Synthetic oligonucleotide
aaggucgcuccgaguguua

SEQ ID NO: 2563970 - RNA, 19 nt, Artificial Sequence
  Description of Artificial Sequence: Synthetic oligonucleotide
caacucuauuaguggugcu

SEQ ID NO: 2563971 - RNA, 19 nt, Artificial Sequence
  Description of Artificial Sequence: Synthetic oligonucleotide
cgcuccgaguguuacagga

SEQ ID NO: 2563972 - RNA, 19 nt, Artificial Sequence
  Description of Artificial Sequence: Synthetic oligonucleotide
caggugaguuuccaguauu

SEQ ID NO: 2563973 - RNA, 19 nt, Artificial Sequence
  Description of Artificial Sequence: Synthetic oligonucleotide
ggucgcuccgaguguuaca

SEQ ID NO: 2563974 - RNA, 19 nt, Artificial Sequence
  Description of Artificial Sequence: Synthetic oligonucleotide
gcacagcccuuacggaauc

SEQ ID NO: 2563975 - RNA, 19 nt, Artificial Sequence
  Description of Artificial Sequence: Synthetic oligonucleotide
ccaagccaugcuccuauaa

SEQ ID NO: 2563976 - RNA, 19 nt, Artificial Sequence
  Description of Artificial Sequence: Synthetic oligonucleotide
ccaugcuuugagauuuggu

SEQ ID NO: 2563977 - RNA, 19 nt, Artificial Sequence
  Description of Artificial Sequence: Synthetic oligonucleotide
cacguagccaaaggucgcu

SEQ ID NO: 2563978 - RNA, 19 nt, Artificial Sequence
  Description of Artificial Sequence: Synthetic oligonucleotide
ccaguauauccagaguggu

SEQ ID NO: 2563979 - RNA, 19 nt, Artificial Sequence
  Description of Artificial Sequence: Synthetic oligonucleotide
cuugugugauaaggaacuu

SEQ ID NO: 2563980 - RNA, 19 nt, Artificial Sequence
  Description of Artificial Sequence: Synthetic oligonucleotide
gugugauaaggaacuucuu

SEQ ID NO: 2563981 - RNA, 19 nt, Artificial Sequence
  Description of Artificial Sequence: Synthetic oligonucleotide
gccaaaggucgcuccgagu

SEQ ID NO: 2563982 - RNA, 19 nt, Artificial Sequence
  Description of Artificial Sequence: Synthetic oligonucleotide
cacagcccuuacggaaucu

SEQ ID NO: 2563983 - RNA, 19 nt, Artificial Sequence
  Description of Artificial Sequence: Synthetic oligonucleotide
gggccacaccugccauggu

SEQ ID NO: 2563984 - RNA, 19 nt, Artificial Sequence
  Description of Artificial Sequence: Synthetic oligonucleotide
aaagccuugaaccuggucc

SEQ ID NO: 2563985 - RNA, 19 nt, Artificial Sequence
  Description of Artificial Sequence: Synthetic oligonucleotide
gaagaaaucaauaaucucg

SEQ ID NO: 2563986 - RNA, 19 nt, Artificial Sequence
  Description of Artificial Sequence: Synthetic oligonucleotide
acuuaauucacuuuauuuc

SEQ ID NO: 2563987 - RNA, 19 nt, Artificial Sequence
  Description of Artificial Sequence: Synthetic oligonucleotide
aaucaauaaucucggauuc

SEQ ID NO: 2563988 - RNA, 19 nt, Artificial Sequence
  Description of Artificial Sequence: Synthetic oligonucleotide
gaucuuuagaaccucaucc

SEQ ID NO: 2563989 - RNA, 19 nt, Artificial Sequence
  Description of Artificial Sequence: Synthetic oligonucleotide
aagauggucagugaauucc

SEQ ID NO: 2563990 - RNA, 19 nt, Artificial Sequence
  Description of Artificial Sequence: Synthetic oligonucleotide
cuuaauucacuuuauuucc

SEQ ID NO: 2563991 - RNA, 19 nt, Artificial Sequence
  Description of Artificial Sequence: Synthetic oligonucleotide
uuuacauggaacagugugg

SEQ ID NO: 2563992 - RNA, 19 nt, Artificial Sequence
  Description of Artificial Sequence: Synthetic oligonucleotide
aucaauaccagccaucauc

SEQ ID NO: 2563993 - RNA, 19 nt, Artificial Sequence
  Description of Artificial Sequence: Synthetic oligonucleotide
aaaucaauaaucucggauu

SEQ ID NO: 2563994 - RNA, 19 nt, Artificial Sequence
  Description of Artificial Sequence: Synthetic oligonucleotide
aacaugaccguuguagucc

SEQ ID NO: 2563995 - RNA, 19 nt, Artificial Sequence
  Description of Artificial Sequence: Synthetic oligonucleotide
aagaaaucaauaaucucgg

SEQ ID NO: 2563996 - RNA, 19 nt, Artificial Sequence
  Description of Artificial Sequence: Synthetic oligonucleotide
agcacuuaacaccaagacc

SEQ ID NO: 2563997 - RNA, 19 nt, Artificial Sequence
  Description of Artificial Sequence: Synthetic oligonucleotide
aaaacccuuaugugguggc

SEQ ID NO: 2563998 - RNA, 19 nt, Artificial Sequence
  Description of Artificial Sequence: Synthetic oligonucleotide
accaagaccaacaugaccg

SEQ ID NO: 2563999 - RNA, 19 nt, Artificial Sequence
  Description of Artificial Sequence: Synthetic oligonucleotide
agggagaacagguagaucu

SEQ ID NO: 2564000 - RNA, 19 nt, Artificial Sequence
  Description of Artificial Sequence: Synthetic oligonucleotide
cauguccuuaaccagacgg

SEQ ID NO: 2564001 - RNA, 19 nt, Artificial Sequence
  Description of Artificial Sequence: Synthetic oligonucleotide
ucaauaccagccaucauca

SEQ ID NO: 2564002 - RNA, 19 nt, Artificial Sequence
  Description of Artificial Sequence: Synthetic oligonucleotide
guuguaguccccaauagcg

SEQ ID NO: 2564003 - RNA, 19 nt, Artificial Sequence
  Description of Artificial Sequence: Synthetic oligonucleotide
cuuuacauggaacagugug

SEQ ID NO: 2564004 - RNA, 19 nt, Artificial Sequence
  Description of Artificial Sequence: Synthetic oligonucleotide
agcgacaaaagccuugaac

SEQ ID NO: 2564005 - RNA, 19 nt, Artificial Sequence
  Description of Artificial Sequence: Synthetic oligonucleotide
acuggcaugaucuuuagaa

SEQ ID NO: 2564006 - RNA, 19 nt, Artificial Sequence
  Description of Artificial Sequence: Synthetic oligonucleotide
ugauaaggagacuugguga

SEQ ID NO: 2564007 - RNA, 19 nt, Artificial Sequence
  Description of Artificial Sequence: Synthetic oligonucleotide
acauggaacaguguggggc

SEQ ID NO: 2564008 - RNA, 19 nt, Artificial Sequence
  Description of Artificial Sequence: Synthetic oligonucleotide
ugaauuccugauaaggaga

SEQ ID NO: 2564009 - RNA, 19 nt, Artificial Sequence
  Description of Artificial Sequence: Synthetic oligonucleotide
ugucacuuuacauggaaca

SEQ ID NO: 2564010 - RNA, 19 nt, Artificial Sequence
  Description of Artificial Sequence: Synthetic oligonucleotide
agggacuugaucuucaugu

SEQ ID NO: 2564011 - RNA, 19 nt, Artificial Sequence
  Description of Artificial Sequence: Synthetic oligonucleotide
uuaauucacuuuauuuccc

SEQ ID NO: 2564012 - RNA, 19 nt, Artificial Sequence
  Description of Artificial Sequence: Synthetic oligonucleotide
gacgcaccaacacagagcc

SEQ ID NO: 2564013 - RNA, 19 nt, Artificial Sequence
  Description of Artificial Sequence: Synthetic oligonucleotide
uuacauggaacaguguggg

SEQ ID NO: 2564014 - RNA, 19 nt, Artificial Sequence
  Description of Artificial Sequence: Synthetic oligonucleotide
aagccuugaaccugguccg

SEQ ID NO: 2564015 - RNA, 19 nt, Artificial Sequence
  Description of Artificial Sequence: Synthetic oligonucleotide
aauaaucucggauuccuua

SEQ ID NO: 2564016 - RNA, 19 nt, Artificial Sequence
  Description of Artificial Sequence: Synthetic oligonucleotide
aacacagucucuuuccaga

SEQ ID NO: 2564017 - RNA, 19 nt, Artificial Sequence
  Description of Artificial Sequence: Synthetic oligonucleotide
acaauggaaagcuuggcca

SEQ ID NO: 2564018 - RNA, 19 nt, Artificial Sequence
  Description of Artificial Sequence: Synthetic oligonucleotide
aaccagacggcccagcuug

SEQ ID NO: 2564019 - RNA, 19 nt, Artificial Sequence
  Description of Artificial Sequence: Synthetic oligonucleotide
ucucggauuccuuaauggg

SEQ ID NO: 2564020 - RNA, 19 nt, Artificial Sequence
  Description of Artificial Sequence: Synthetic oligonucleotide
uggcaugaucuuuagaacc

SEQ ID NO: 2564021 - RNA, 19 nt, Artificial Sequence
  Description of Artificial Sequence: Synthetic oligonucleotide
aaccucauccuuuagggau

SEQ ID NO: 2564022 - RNA, 19 nt, Artificial Sequence
  Description of Artificial Sequence: Synthetic oligonucleotide
uuaaugggcagggagaaca

SEQ ID NO: 2564023 - RNA, 19 nt, Artificial Sequence
  Description of Artificial Sequence: Synthetic oligonucleotide
aucucggauuccuuaaugg

SEQ ID NO: 2564024 - RNA, 19 nt, Artificial Sequence
  Description of Artificial Sequence: Synthetic oligonucleotide
uuaugugguggccacagcu

SEQ ID NO: 2564025 - RNA, 19 nt, Artificial Sequence
  Description of Artificial Sequence: Synthetic oligonucleotide
accaacaugaccguuguag

SEQ ID NO: 2564026 - RNA, 19 nt, Artificial Sequence
  Description of Artificial Sequence: Synthetic oligonucleotide
aaucucggauuccuuaaug

SEQ ID NO: 2564027 - RNA, 19 nt, Artificial Sequence
  Description of Artificial Sequence: Synthetic oligonucleotide
gcgacaaaagccuugaacc

SEQ ID NO: 2564028 - RNA, 19 nt, Artificial Sequence
  Description of Artificial Sequence: Synthetic oligonucleotide
agccucuucgcacagggac

SEQ ID NO: 2564029 - RNA, 19 nt, Artificial Sequence
  Description of Artificial Sequence: Synthetic oligonucleotide
cuuggagauggcaucaaag

SEQ ID NO: 2564030 - RNA, 19 nt, Artificial Sequence
  Description of Artificial Sequence: Synthetic oligonucleotide
ucuucauguccuuaaccag

SEQ ID NO: 2564031 - RNA, 19 nt, Artificial Sequence
  Description of Artificial Sequence: Synthetic oligonucleotide
ucaguagcuucuuaggcac

SEQ ID NO: 2564032 - RNA, 19 nt, Artificial Sequence
  Description of Artificial Sequence: Synthetic oligonucleotide
gauuccuuaaugggcaggg

SEQ ID NO: 2564033 - RNA, 19 nt, Artificial Sequence
  Description of Artificial Sequence: Synthetic oligonucleotide
ucggauuccuuaaugggca

SEQ ID NO: 2564034 - RNA, 19 nt, Artificial Sequence
  Description of Artificial Sequence: Synthetic oligonucleotide
gaacagguagaucuccucc

SEQ ID NO: 2564035 - RNA, 19 nt, Artificial Sequence
  Description of Artificial Sequence: Synthetic oligonucleotide
cuuaacaccaagaccaaca

SEQ ID NO: 2564036 - RNA, 19 nt, Artificial Sequence
  Description of Artificial Sequence: Synthetic oligonucleotide
aaggagacuuggugaacac

SEQ ID NO: 2564037 - RNA, 19 nt, Artificial Sequence
  Description of Artificial Sequence: Synthetic oligonucleotide
gauggcaguggcuaccucc

SEQ ID NO: 2564038 - RNA, 19 nt, Artificial Sequence
  Description of Artificial Sequence: Synthetic oligonucleotide
gaucuucauguccuuaacc

SEQ ID NO: 2564039 - RNA, 19 nt, Artificial Sequence
  Description of Artificial Sequence: Synthetic oligonucleotide
cauccuuuagggaugcgcc

SEQ ID NO: 2564040 - RNA, 19 nt, Artificial Sequence
  Description of Artificial Sequence: Synthetic oligonucleotide
cucggauuccuuaaugggc

SEQ ID NO: 2564041 - RNA, 19 nt, Artificial Sequence
  Description of Artificial Sequence: Synthetic oligonucleotide
uccccaauagcgacaaaag

SEQ ID NO: 2564042 - RNA, 19 nt, Artificial Sequence
  Description of Artificial Sequence: Synthetic oligonucleotide
cccaauagcgacaaaagcc

SEQ ID NO: 2564043 - RNA, 19 nt, Artificial Sequence
  Description of Artificial Sequence: Synthetic oligonucleotide
cacuuuacauggaacagug

SEQ ID NO: 2564044 - RNA, 19 nt, Artificial Sequence
  Description of Artificial Sequence: Synthetic oligonucleotide
aaaagccuugaaccugguc

SEQ ID NO: 2564045 - RNA, 19 nt, Artificial Sequence
  Description of Artificial Sequence: Synthetic oligonucleotide
gaugccagugccucugggg

SEQ ID NO: 2564046 - RNA, 19 nt, Artificial Sequence
  Description of Artificial Sequence: Synthetic oligonucleotide
cugauaaggagacuuggug

SEQ ID NO: 2564047 - RNA, 19 nt, Artificial Sequence
  Description of Artificial Sequence: Synthetic oligonucleotide
acagucucuuuccagaggu

SEQ ID NO: 2564048 - RNA, 19 nt, Artificial Sequence
  Description of Artificial Sequence: Synthetic oligonucleotide
aucaguagcuucuuaggca

SEQ ID NO: 2564049 - RNA, 19 nt, Artificial Sequence
  Description of Artificial Sequence: Synthetic oligonucleotide
ucaauaaucucggauuccu

SEQ ID NO: 2564050 - RNA, 19 nt, Artificial Sequence
  Description of Artificial Sequence: Synthetic oligonucleotide
aucuuuagaaccucauccu

SEQ ID NO: 2564051 - RNA, 19 nt, Artificial Sequence
  Description of Artificial Sequence: Synthetic oligonucleotide
guggcuaccuccuuggagc

SEQ ID NO: 2564052 - RNA, 19 nt, Artificial Sequence
  Description of Artificial Sequence: Synthetic oligonucleotide
acaugaccguuguaguccc

SEQ ID NO: 2564053 - RNA, 19 nt, Artificial Sequence
  Description of Artificial Sequence: Synthetic oligonucleotide
uccuuaaugggcagggaga

SEQ ID NO: 2564054 - RNA, 19 nt, Artificial Sequence
  Description of Artificial Sequence: Synthetic oligonucleotide
aucaauaaucucggauucc

SEQ ID NO: 2564055 - RNA, 19 nt, Artificial Sequence
  Description of Artificial Sequence: Synthetic oligonucleotide
caucaguagcuucuuaggc

SEQ ID NO: 2564056 - RNA, 19 nt, Artificial Sequence
  Description of Artificial Sequence: Synthetic oligonucleotide
uaauucacuuuauuucccu

SEQ ID NO: 2564057 - RNA, 19 nt, Artificial Sequence
  Description of Artificial Sequence: Synthetic oligonucleotide
ugacguguagcagucauca

SEQ ID NO: 2564058 - RNA, 19 nt, Artificial Sequence
  Description of Artificial Sequence: Synthetic oligonucleotide
agucucuuuccagaggucg

SEQ ID NO: 2564059 - RNA, 19 nt, Artificial Sequence
  Description of Artificial Sequence: Synthetic oligonucleotide
uaugugguggccacagcug

SEQ ID NO: 2564060 - RNA, 19 nt, Artificial Sequence
  Description of Artificial Sequence: Synthetic oligonucleotide
gagcacuuaacaccaagac

SEQ ID NO: 2564061 - RNA, 19 nt, Artificial Sequence
  Description of Artificial Sequence: Synthetic oligonucleotide
aaacccuuaugugguggcc

SEQ ID NO: 2564062 - RNA, 19 nt, Artificial Sequence
  Description of Artificial Sequence: Synthetic oligonucleotide
agaacagguagaucuccuc

SEQ ID NO: 2564063 - RNA, 19 nt, Artificial Sequence
  Description of Artificial Sequence: Synthetic oligonucleotide
uguaguccccaauagcgac

SEQ ID NO: 2564064 - RNA, 19 nt, Artificial Sequence
  Description of Artificial Sequence: Synthetic oligonucleotide
auccuuuagggaugcgccc

SEQ ID NO: 2564065 - RNA, 19 nt, Artificial Sequence
  Description of Artificial Sequence: Synthetic oligonucleotide
cuguaggucuuggagaugg

SEQ ID NO: 2564066 - RNA, 19 nt, Artificial Sequence
  Description of Artificial Sequence: Synthetic oligonucleotide
aauagcgacaaaagccuug

SEQ ID NO: 2564067 - RNA, 19 nt, Artificial Sequence
  Description of Artificial Sequence: Synthetic oligonucleotide
ugaucuuuagaaccucauc

SEQ ID NO: 2564068 - RNA, 19 nt, Artificial Sequence
  Description of Artificial Sequence: Synthetic oligonucleotide
gaaaucaauaaucucggau

SEQ ID NO: 2564069 - RNA, 19 nt, Artificial Sequence
  Description of Artificial Sequence: Synthetic oligonucleotide
uccugauaaggagacuugg

SEQ ID NO: 2564070 - RNA, 19 nt, Artificial Sequence
  Description of Artificial Sequence: Synthetic oligonucleotide
uccuuaaccagacggccca

SEQ ID NO: 2564071 - RNA, 19 nt, Artificial Sequence
  Description of Artificial Sequence: Synthetic oligonucleotide
gaugagacgcaccaacaca

SEQ ID NO: 2564072 - RNA, 19 nt, Artificial Sequence
  Description of Artificial Sequence: Synthetic oligonucleotide
ucugaacagagacucuggu

SEQ ID NO: 2564073 - RNA, 19 nt, Artificial Sequence
  Description of Artificial Sequence: Synthetic oligonucleotide
aagaccaacaugaccguug

SEQ ID NO: 2564074 - RNA, 19 nt, Artificial Sequence
  Description of Artificial Sequence: Synthetic oligonucleotide
caauggaaagcuuggccag

SEQ ID NO: 2564075 - RNA, 19 nt, Artificial Sequence
  Description of Artificial Sequence: Synthetic oligonucleotide
gcuucuuaggcacaggagc

SEQ ID NO: 2564076 - RNA, 19 nt, Artificial Sequence
  Description of Artificial Sequence: Synthetic oligonucleotide
accaacacagagccacagc

SEQ ID NO: 2564077 - RNA, 19 nt, Artificial Sequence
  Description of Artificial Sequence: Synthetic oligonucleotide
gcacuuaacaccaagacca

SEQ ID NO: 2564078 - RNA, 19 nt, Artificial Sequence
  Description of Artificial Sequence: Synthetic oligonucleotide
acaaaagccuugaaccugg

SEQ ID NO: 2564079 - RNA, 19 nt, Artificial Sequence
  Description of Artificial Sequence: Synthetic oligonucleotide
cuucgcacagggacaaugg

SEQ ID NO: 2564080 - RNA, 19 nt, Artificial Sequence
  Description of Artificial Sequence: Synthetic oligonucleotide
uagcuucuuaggcacagga

SEQ ID NO: 2564081 - RNA, 19 nt, Artificial Sequence
  Description of Artificial Sequence: Synthetic oligonucleotide
gaauuccugauaaggagac

SEQ ID NO: 2564082 - RNA, 19 nt, Artificial Sequence
  Description of Artificial Sequence: Synthetic oligonucleotide
ugggcuuucacaagauggu

SEQ ID NO: 2564083 - RNA, 19 nt, Artificial Sequence
  Description of Artificial Sequence: Synthetic oligonucleotide
cuuggagcacuuaacacca

SEQ ID NO: 2564084 - RNA, 19 nt, Artificial Sequence
  Description of Artificial Sequence: Synthetic oligonucleotide
uaaggagacuuggugaaca

SEQ ID NO: 2564085 - RNA, 19 nt, Artificial Sequence
  Description of Artificial Sequence: Synthetic oligonucleotide
uuuagggaugcgcccagga

SEQ ID NO: 2564086 - RNA, 19 nt, Artificial Sequence
  Description of Artificial Sequence: Synthetic oligonucleotide
acagggacaauggaaagcu

SEQ ID NO: 2564087 - RNA, 19 nt, Artificial Sequence
  Description of Artificial Sequence: Synthetic oligonucleotide
gagacgcaccaacacagag

SEQ ID NO: 2564088 - RNA, 19 nt, Artificial Sequence
  Description of Artificial Sequence: Synthetic oligonucleotide
uuguaguccccaauagcga

SEQ ID NO: 2564089 - RNA, 19 nt, Artificial Sequence
  Description of Artificial Sequence: Synthetic oligonucleotide
gacaaaagccuugaaccug

SEQ ID NO: 2564090 - RNA, 19 nt, Artificial Sequence
  Description of Artificial Sequence: Synthetic oligonucleotide
gucagugaauuccugauaa

SEQ ID NO: 2564091 - RNA, 19 nt, Artificial Sequence
  Description of Artificial Sequence: Synthetic oligonucleotide
auaaucucggauuccuuaa

SEQ ID NO: 2564092 - RNA, 19 nt, Artificial Sequence
  Description of Artificial Sequence: Synthetic oligonucleotide
uuaaccagacggcccagcu

SEQ ID NO: 2564093 - RNA, 19 nt, Artificial Sequence
  Description of Artificial Sequence: Synthetic oligonucleotide
ggcaaaguugcccagggug

SEQ ID NO: 2564094 - RNA, 19 nt, Artificial Sequence
  Description of Artificial Sequence: Synthetic oligonucleotide
uguccuuaaccagacggcc

SEQ ID NO: 2564095 - RNA, 19 nt, Artificial Sequence
  Description of Artificial Sequence: Synthetic oligonucleotide
auguccuuaaccagacggc

SEQ ID NO: 2564096 - RNA, 19 nt, Artificial Sequence
  Description of Artificial Sequence: Synthetic oligonucleotide
aguggcuaccuccuuggag

SEQ ID NO: 2564097 - RNA, 19 nt, Artificial Sequence
  Description of Artificial Sequence: Synthetic oligonucleotide
augagacgcaccaacacag

SEQ ID NO: 2564098 - RNA, 19 nt, Artificial Sequence
  Description of Artificial Sequence: Synthetic oligonucleotide
ugguccgcuggccagcccg

SEQ ID NO: 2564099 - RNA, 19 nt, Artificial Sequence
  Description of Artificial Sequence: Synthetic oligonucleotide
agacgcaccaacacagagc

SEQ ID NO: 2564100 - RNA, 19 nt, Artificial Sequence
  Description of Artificial Sequence: Synthetic oligonucleotide
cucugaacagagacucugg

SEQ ID NO: 2564101 - RNA, 19 nt, Artificial Sequence
  Description of Artificial Sequence: Synthetic oligonucleotide
agccacagcggccugucac

SEQ ID NO: 2564102 - RNA, 19 nt, Artificial Sequence
  Description of Artificial Sequence: Synthetic oligonucleotide
caacacagagccacagcgg

SEQ ID NO: 2564103 - RNA, 19 nt, Artificial Sequence
  Description of Artificial Sequence: Synthetic oligonucleotide
ccuuggagcacuuaacacc

SEQ ID NO: 2564104 - RNA, 19 nt, Artificial Sequence
  Description of Artificial Sequence: Synthetic oligonucleotide
uagcagucaucaauaccag

SEQ ID NO: 2564105 - RNA, 19 nt, Artificial Sequence
  Description of Artificial Sequence: Synthetic oligonucleotide
uaggucuuggagauggcau

SEQ ID NO: 2564106 - RNA, 19 nt, Artificial Sequence
  Description of Artificial Sequence: Synthetic oligonucleotide
ucacuuuacauggaacagu

SEQ ID NO: 2564107 - RNA, 19 nt, Artificial Sequence
  Description of Artificial Sequence: Synthetic oligonucleotide
uccuuggagcacuuaacac

SEQ ID NO: 2564108 - RNA, 19 nt, Artificial Sequence
  Description of Artificial Sequence: Synthetic oligonucleotide
ggccugucacuuuacaugg

SEQ ID NO: 2564109 - RNA, 19 nt, Artificial Sequence
  Description of Artificial Sequence: Synthetic oligonucleotide
acguguagcagucaucaau

SEQ ID NO: 2564110 - RNA, 19 nt, Artificial Sequence
  Description of Artificial Sequence: Synthetic oligonucleotide
cuggcaugaucuuuagaac

SEQ ID NO: 2564111 - RNA, 19 nt, Artificial Sequence
  Description of Artificial Sequence: Synthetic oligonucleotide
ugugggcuuucacaagaug

SEQ ID NO: 2564112 - RNA, 19 nt, Artificial Sequence
  Description of Artificial Sequence: Synthetic oligonucleotide
ucauguccuuaaccagacg

SEQ ID NO: 2564113 - RNA, 19 nt, Artificial Sequence
  Description of Artificial Sequence: Synthetic oligonucleotide
ggagauggcaucaaaggug

SEQ ID NO: 2564114 - RNA, 19 nt, Artificial Sequence
  Description of Artificial Sequence: Synthetic oligonucleotide
ucuucgcacagggacaaug

SEQ ID NO: 2564115 - RNA, 19 nt, Artificial Sequence
  Description of Artificial Sequence: Synthetic oligonucleotide
cuuaggcacaggagcagag

SEQ ID NO: 2564116 - RNA, 19 nt, Artificial Sequence
  Description of Artificial Sequence: Synthetic oligonucleotide
auggucagugaauuccuga

SEQ ID NO: 2564117 - RNA, 19 nt, Artificial Sequence
  Description of Artificial Sequence: Synthetic oligonucleotide
cuugaaccugguccgcugg

SEQ ID NO: 2564118 - RNA, 19 nt, Artificial Sequence
  Description of Artificial Sequence: Synthetic oligonucleotide
agaaaucaauaaucucgga

SEQ ID NO: 2564119 - RNA, 19 nt, Artificial Sequence
  Description of Artificial Sequence: Synthetic oligonucleotide
aguagcuucuuaggcacag

SEQ ID NO: 2564120 - RNA, 19 nt, Artificial Sequence
  Description of Artificial Sequence: Synthetic oligonucleotide
gcuuucacaagauggucag

SEQ ID NO: 2564121 - RNA, 19 nt, Artificial Sequence
  Description of Artificial Sequence: Synthetic oligonucleotide
acuuaacaccaagaccaac

SEQ ID NO: 2564122 - RNA, 19 nt, Artificial Sequence
  Description of Artificial Sequence: Synthetic oligonucleotide
ggaagaaaucaauaaucuc

SEQ ID NO: 2564123 - RNA, 19 nt, Artificial Sequence
  Description of Artificial Sequence: Synthetic oligonucleotide
uggucagugaauuccugau

SEQ ID NO: 2564124 - RNA, 19 nt, Artificial Sequence
  Description of Artificial Sequence: Synthetic oligonucleotide
acccuuaugugguggccac

SEQ ID NO: 2564125 - RNA, 19 nt, Artificial Sequence
  Description of Artificial Sequence: Synthetic oligonucleotide
agggacaauggaaagcuug

SEQ ID NO: 2564126 - RNA, 19 nt, Artificial Sequence
  Description of Artificial Sequence: Synthetic oligonucleotide
ucgcacagggacaauggaa

SEQ ID NO: 2564127 - RNA, 19 nt, Artificial Sequence
  Description of Artificial Sequence: Synthetic oligonucleotide
auaaggagacuuggugaac

SEQ ID NO: 2564128 - RNA, 19 nt, Artificial Sequence
  Description of Artificial Sequence: Synthetic oligonucleotide
uucgcacagggacaaugga

SEQ ID NO: 2564129 - RNA, 19 nt, Artificial Sequence
  Description of Artificial Sequence: Synthetic oligonucleotide
uuagggaugcgcccaggaa

SEQ ID NO: 2564130 - RNA, 19 nt, Artificial Sequence
  Description of Artificial Sequence: Synthetic oligonucleotide
guuagguagcuguaggucu

SEQ ID NO: 2564131 - RNA, 19 nt, Artificial Sequence
  Description of Artificial Sequence: Synthetic oligonucleotide
agucugcuucugcacuggc

SEQ ID NO: 2564132 - RNA, 19 nt, Artificial Sequence
  Description of Artificial Sequence: Synthetic oligonucleotide
agaccaacaugaccguugu

SEQ ID NO: 2564133 - RNA, 19 nt, Artificial Sequence
  Description of Artificial Sequence: Synthetic oligonucleotide
caacaugaccguuguaguc

SEQ ID NO: 2564134 - RNA, 19 nt, Artificial Sequence
  Description of Artificial Sequence: Synthetic oligonucleotide
ggaaagcuuggccaggaug

SEQ ID NO: 2564135 - RNA, 19 nt, Artificial Sequence
  Description of Artificial Sequence: Synthetic oligonucleotide
aaccugguccgcuggccag

SEQ ID NO: 2564136 - RNA, 19 nt, Artificial Sequence
  Description of Artificial Sequence: Synthetic oligonucleotide
acagagacucugguguggg

SEQ ID NO: 2564137 - RNA, 19 nt, Artificial Sequence
  Description of Artificial Sequence: Synthetic oligonucleotide
uaaucucggauuccuuaau

SEQ ID NO: 2564138 - RNA, 19 nt, Artificial Sequence
  Description of Artificial Sequence: Synthetic oligonucleotide
ucuuggagauggcaucaaa

SEQ ID NO: 2564139 - RNA, 19 nt, Artificial Sequence
  Description of Artificial Sequence: Synthetic oligonucleotide
cuugccaaucuuguucccc

SEQ ID NO: 2564140 - RNA, 19 nt, Artificial Sequence
  Description of Artificial Sequence: Synthetic oligonucleotide
auagcgacaaaagccuuga

SEQ ID NO: 2564141 - RNA, 19 nt, Artificial Sequence
  Description of Artificial Sequence: Synthetic oligonucleotide
aacccuuaugugguggcca

SEQ ID NO: 2564142 - RNA, 19 nt, Artificial Sequence
  Description of Artificial Sequence: Synthetic oligonucleotide
auaccagccaucaucagua

SEQ ID NO: 2564143 - RNA, 19 nt, Artificial Sequence
  Description of Artificial Sequence: Synthetic oligonucleotide
agacuuaauucacuuuauu

SEQ ID NO: 2564144 - RNA, 19 nt, Artificial Sequence
  Description of Artificial Sequence: Synthetic oligonucleotide
uucuuaggcacaggagcag

SEQ ID NO: 2564145 - RNA, 19 nt, Artificial Sequence
  Description of Artificial Sequence: Synthetic oligonucleotide
cacagggacaauggaaagc

SEQ ID NO: 2564146 - RNA, 19 nt, Artificial Sequence
  Description of Artificial Sequence: Synthetic oligonucleotide
agacggcccagcuugguga

SEQ ID NO: 2564147 - RNA, 19 nt, Artificial Sequence
  Description of Artificial Sequence: Synthetic oligonucleotide
aaguugcccaggguggcag

SEQ ID NO: 2564148 - RNA, 19 nt, Artificial Sequence
  Description of Artificial Sequence: Synthetic oligonucleotide
agagacucuggugugggcu

SEQ ID NO: 2564149 - RNA, 19 nt, Artificial Sequence
  Description of Artificial Sequence: Synthetic oligonucleotide
cacaggagcagagacgaug

SEQ ID NO: 2564150 - RNA, 19 nt, Artificial Sequence
  Description of Artificial Sequence: Synthetic oligonucleotide
cacagucucuuuccagagg

SEQ ID NO: 2564151 - RNA, 19 nt, Artificial Sequence
  Description of Artificial Sequence: Synthetic oligonucleotide
gggacaauggaaagcuugg

SEQ ID NO: 2564152 - RNA, 19 nt, Artificial Sequence
  Description of Artificial Sequence: Synthetic oligonucleotide
ugagacgcaccaacacaga

SEQ ID NO: 2564153 - RNA, 19 nt, Artificial Sequence
  Description of Artificial Sequence: Synthetic oligonucleotide
ucuuaggcacaggagcaga

SEQ ID NO: 2564154 - RNA, 19 nt, Artificial Sequence
  Description of Artificial Sequence: Synthetic oligonucleotide
uugaaccugguccgcuggc

SEQ ID NO: 2564155 - RNA, 19 nt, Artificial Sequence
  Description of Artificial Sequence: Synthetic oligonucleotide
caugaucuuuagaaccuca

SEQ ID NO: 2564156 - RNA, 19 nt, Artificial Sequence
  Description of Artificial Sequence: Synthetic oligonucleotide
uccuuuagggaugcgccca

SEQ ID NO: 2564157 - RNA, 19 nt, Artificial Sequence
  Description of Artificial Sequence: Synthetic oligonucleotide
gggguuagguagcuguagg

SEQ ID NO: 2564158 - RNA, 19 nt, Artificial Sequence
  Description of Artificial Sequence: Synthetic oligonucleotide
caagauggucagugaauuc

SEQ ID NO: 2564159 - RNA, 19 nt, Artificial Sequence
  Description of Artificial Sequence: Synthetic oligonucleotide
gagacgaugccagugccuc

SEQ ID NO: 2564160 - RNA, 19 nt, Artificial Sequence
  Description of Artificial Sequence: Synthetic oligonucleotide
gaaccucauccuuuaggga

SEQ ID NO: 2564161 - RNA, 19 nt, Artificial Sequence
  Description of Artificial Sequence: Synthetic oligonucleotide
aauuccugauaaggagacu

SEQ ID NO: 2564162 - RNA, 19 nt, Artificial Sequence
  Description of Artificial Sequence: Synthetic oligonucleotide
ugcgcccaggaagaaauca

SEQ ID NO: 2564163 - RNA, 19 nt, Artificial Sequence
  Description of Artificial Sequence: Synthetic oligonucleotide
agcagagacgaugccagug

SEQ ID NO: 2564164 - RNA, 19 nt, Artificial Sequence
  Description of Artificial Sequence: Synthetic oligonucleotide
uguaggucuuggagauggc

SEQ ID NO: 2564165 - RNA, 19 nt, Artificial Sequence
  Description of Artificial Sequence: Synthetic oligonucleotide
uuaggcacaggagcagaga

SEQ ID NO: 2564166 - RNA, 19 nt, Artificial Sequence
  Description of Artificial Sequence: Synthetic oligonucleotide
agcccgagucugcuucugc

SEQ ID NO: 2564167 - RNA, 19 nt, Artificial Sequence
  Description of Artificial Sequence: Synthetic oligonucleotide
cagagacgaugccagugcc

SEQ ID NO: 2564168 - RNA, 19 nt, Artificial Sequence
  Description of Artificial Sequence: Synthetic oligonucleotide
ugugguggccacagcugca

SEQ ID NO: 2564169 - RNA, 19 nt, Artificial Sequence
  Description of Artificial Sequence: Synthetic oligonucleotide
cuggguccucugaacagag

SEQ ID NO: 2564170 - RNA, 19 nt, Artificial Sequence
  Description of Artificial Sequence: Synthetic oligonucleotide
gacgaugccagugccucug

SEQ ID NO: 2564171 - RNA, 19 nt, Artificial Sequence
  Description of Artificial Sequence: Synthetic oligonucleotide
gauggucagugaauuccug

SEQ ID NO: 2564172 - RNA, 19 nt, Artificial Sequence
  Description of Artificial Sequence: Synthetic oligonucleotide
aggagcagagacgaugcca

SEQ ID NO: 2564173 - RNA, 19 nt, Artificial Sequence
  Description of Artificial Sequence: Synthetic oligonucleotide
ugaaccugguccgcuggcc

SEQ ID NO: 2564174 - RNA, 19 nt, Artificial Sequence
  Description of Artificial Sequence: Synthetic oligonucleotide
caaaguugcccaggguggc

SEQ ID NO: 2564175 - RNA, 19 nt, Artificial Sequence
  Description of Artificial Sequence: Synthetic oligonucleotide
agcuucuuaggcacaggag

SEQ ID NO: 2564176 - RNA, 19 nt, Artificial Sequence
  Description of Artificial Sequence: Synthetic oligonucleotide
ggaugagacgcaccaacac

SEQ ID NO: 2564177 - RNA, 19 nt, Artificial Sequence
  Description of Artificial Sequence: Synthetic oligonucleotide
gcagagacgaugccagugc

SEQ ID NO: 2564178 - RNA, 19 nt, Artificial Sequence
  Description of Artificial Sequence: Synthetic oligonucleotide
cuuaugugguggccacagc

SEQ ID NO: 2564179 - RNA, 19 nt, Artificial Sequence
  Description of Artificial Sequence: Synthetic oligonucleotide
aaaguugcccaggguggca

SEQ ID NO: 2564180 - RNA, 19 nt, Artificial Sequence
  Description of Artificial Sequence: Synthetic oligonucleotide
ggugugggcuuucacaaga

SEQ ID NO: 2564181 - RNA, 19 nt, Artificial Sequence
  Description of Artificial Sequence: Synthetic oligonucleotide
guguagcagucaucaauac

SEQ ID NO: 2564182 - RNA, 19 nt, Artificial Sequence
  Description of Artificial Sequence: Synthetic oligonucleotide
agauggucagugaauuccu

SEQ ID NO: 2564183 - RNA, 19 nt, Artificial Sequence
  Description of Artificial Sequence: Synthetic oligonucleotide
ugcagccccuggcugacgu

SEQ ID NO: 2564184 - RNA, 19 nt, Artificial Sequence
  Description of Artificial Sequence: Synthetic oligonucleotide
uaccagccaucaucaguag

SEQ ID NO: 2564185 - RNA, 19 nt, Artificial Sequence
  Description of Artificial Sequence: Synthetic oligonucleotide
caucaaagguggccuuggc

SEQ ID NO: 2564186 - RNA, 19 nt, Artificial Sequence
  Description of Artificial Sequence: Synthetic oligonucleotide
uccucugaacagagacucu

SEQ ID NO: 2564187 - RNA, 19 nt, Artificial Sequence
  Description of Artificial Sequence: Synthetic oligonucleotide
gaaccugguccgcuggcca

SEQ ID NO: 2564188 - RNA, 19 nt, Artificial Sequence
  Description of Artificial Sequence: Synthetic oligonucleotide
uggcugacguguagcaguc

SEQ ID NO: 2564189 - RNA, 19 nt, Artificial Sequence
  Description of Artificial Sequence: Synthetic oligonucleotide
gucaucaauaccagccauc

SEQ ID NO: 2564190 - RNA, 19 nt, Artificial Sequence
  Description of Artificial Sequence: Synthetic oligonucleotide
ucggauggcaguggcuacc

SEQ ID NO: 2564191 - RNA, 19 nt, Artificial Sequence
  Description of Artificial Sequence: Synthetic oligonucleotide
agugcagccccuggcugac

SEQ ID NO: 2564192 - RNA, 19 nt, Artificial Sequence
  Description of Artificial Sequence: Synthetic oligonucleotide
cuuaaccagacggcccagc

SEQ ID NO: 2564193 - RNA, 19 nt, Artificial Sequence
  Description of Artificial Sequence: Synthetic oligonucleotide
acagcggccugucacuuua

SEQ ID NO: 2564194 - RNA, 19 nt, Artificial Sequence
  Description of Artificial Sequence: Synthetic oligonucleotide
uaaccagacggcccagcuu

SEQ ID NO: 2564195 - RNA, 19 nt, Artificial Sequence
  Description of Artificial Sequence: Synthetic oligonucleotide
uggcuaccuccuuggagca

SEQ ID NO: 2564196 - RNA, 19 nt, Artificial Sequence
  Description of Artificial Sequence: Synthetic oligonucleotide
guccccaauagcgacaaaa

SEQ ID NO: 2564197 - RNA, 19 nt, Artificial Sequence
  Description of Artificial Sequence: Synthetic oligonucleotide
guccuuaaccagacggccc

SEQ ID NO: 2564198 - RNA, 19 nt, Artificial Sequence
  Description of Artificial Sequence: Synthetic oligonucleotide
gguuagguagcuguagguc

SEQ ID NO: 2564199 - RNA, 19 nt, Artificial Sequence
  Description of Artificial Sequence: Synthetic oligonucleotide
guagcuucuuaggcacagg

SEQ ID NO: 2564200 - RNA, 19 nt, Artificial Sequence
  Description of Artificial Sequence: Synthetic oligonucleotide
aaagcuuggccaggaugau

SEQ ID NO: 2564201 - RNA, 19 nt, Artificial Sequence
  Description of Artificial Sequence: Synthetic oligonucleotide
gaugcgcccaggaagaaau

SEQ ID NO: 2564202 - RNA, 19 nt, Artificial Sequence
  Description of Artificial Sequence: Synthetic oligonucleotide
uaguccccaauagcgacaa

SEQ ID NO: 2564203 - RNA, 19 nt, Artificial Sequence
  Description of Artificial Sequence: Synthetic oligonucleotide
guggcagugcagccccugg

SEQ ID NO: 2564204 - RNA, 19 nt, Artificial Sequence
  Description of Artificial Sequence: Synthetic oligonucleotide
ccccaauagcgacaaaagc

SEQ ID NO: 2564205 - RNA, 19 nt, Artificial Sequence
  Description of Artificial Sequence: Synthetic oligonucleotide
agagccacagcggccuguc

SEQ ID NO: 2564206 - RNA, 19 nt, Artificial Sequence
  Description of Artificial Sequence: Synthetic oligonucleotide
gcagggaugagacgcacca

SEQ ID NO: 2564207 - RNA, 19 nt, Artificial Sequence
  Description of Artificial Sequence: Synthetic oligonucleotide
uguggggcuugccaaucuu

SEQ ID NO: 2564208 - RNA, 19 nt, Artificial Sequence
  Description of Artificial Sequence: Synthetic oligonucleotide
cugacguguagcagucauc

SEQ ID NO: 2564209 - RNA, 19 nt, Artificial Sequence
  Description of Artificial Sequence: Synthetic oligonucleotide
augaccguuguagucccca

SEQ ID NO: 2564210 - RNA, 19 nt, Artificial Sequence
  Description of Artificial Sequence: Synthetic oligonucleotide
aguagccucuucgcacagg

SEQ ID NO: 2564211 - RNA, 19 nt, Artificial Sequence
  Description of Artificial Sequence: Synthetic oligonucleotide
augaucuuuagaaccucau

SEQ ID NO: 2564212 - RNA, 19 nt, Artificial Sequence
  Description of Artificial Sequence: Synthetic oligonucleotide
cagggacuugaucuucaug

SEQ ID NO: 2564213 - RNA, 19 nt, Artificial Sequence
  Description of Artificial Sequence: Synthetic oligonucleotide
accucauccuuuagggaug

SEQ ID NO: 2564214 - RNA, 19 nt, Artificial Sequence
  Description of Artificial Sequence: Synthetic oligonucleotide
acgaugccagugccucugg

SEQ ID NO: 2564215 - RNA, 19 nt, Artificial Sequence
  Description of Artificial Sequence: Synthetic oligonucleotide
guaggucuuggagauggca

SEQ ID NO: 2564216 - RNA, 19 nt, Artificial Sequence
  Description of Artificial Sequence: Synthetic oligonucleotide
auggaaagcuuggccagga

SEQ ID NO: 2564217 - RNA, 19 nt, Artificial Sequence
  Description of Artificial Sequence: Synthetic oligonucleotide
ucugcacuggcaugaucuu

SEQ ID NO: 2564218 - RNA, 19 nt, Artificial Sequence
  Description of Artificial Sequence: Synthetic oligonucleotide
agggaugcgcccaggaaga

SEQ ID NO: 2564219 - RNA, 19 nt, Artificial Sequence
  Description of Artificial Sequence: Synthetic oligonucleotide
ccaauagcgacaaaagccu

SEQ ID NO: 2564220 - RNA, 19 nt, Artificial Sequence
  Description of Artificial Sequence: Synthetic oligonucleotide
ggauuccuuaaugggcagg

SEQ ID NO: 2564221 - RNA, 19 nt, Artificial Sequence
  Description of Artificial Sequence: Synthetic oligonucleotide
cuuaaugggcagggagaac

SEQ ID NO: 2564222 - RNA, 19 nt, Artificial Sequence
  Description of Artificial Sequence: Synthetic oligonucleotide
cauggaacaguguggggcu

SEQ ID NO: 2564223 - RNA, 19 nt, Artificial Sequence
  Description of Artificial Sequence: Synthetic oligonucleotide
cuuuagggaugcgcccagg

SEQ ID NO: 2564224 - RNA, 19 nt, Artificial Sequence
  Description of Artificial Sequence: Synthetic oligonucleotide
gcacagggacaauggaaag

SEQ ID NO: 2564225 - RNA, 19 nt, Artificial Sequence
  Description of Artificial Sequence: Synthetic oligonucleotide
ggcuuucacaagaugguca

SEQ ID NO: 2564226 - RNA, 19 nt, Artificial Sequence
  Description of Artificial Sequence: Synthetic oligonucleotide
uggguccucugaacagaga

SEQ ID NO: 2564227 - RNA, 19 nt, Artificial Sequence
  Description of Artificial Sequence: Synthetic oligonucleotide
accugguccgcuggccagc

SEQ ID NO: 2564228 - RNA, 19 nt, Artificial Sequence
  Description of Artificial Sequence: Synthetic oligonucleotide
uggaaagcuuggccaggau

SEQ ID NO: 2564229 - RNA, 19 nt, Artificial Sequence
  Description of Artificial Sequence: Synthetic oligonucleotide
auggcaguggcuaccuccu

SEQ ID NO: 2564230 - RNA, 19 nt, Artificial Sequence
  Description of Artificial Sequence: Synthetic oligonucleotide
uggugaacacagucucuuu

SEQ ID NO: 2564231 - RNA, 19 nt, Artificial Sequence
  Description of Artificial Sequence: Synthetic oligonucleotide
cuggcugacguguagcagu

SEQ ID NO: 2564232 - RNA, 19 nt, Artificial Sequence
  Description of Artificial Sequence: Synthetic oligonucleotide
cucggauggcaguggcuac

SEQ ID NO: 2564233 - RNA, 19 nt, Artificial Sequence
  Description of Artificial Sequence: Synthetic oligonucleotide
cagagacucuggugugggc

SEQ ID NO: 2564234 - RNA, 19 nt, Artificial Sequence
  Description of Artificial Sequence: Synthetic oligonucleotide
ugaccguuguaguccccaa

SEQ ID NO: 2564235 - RNA, 19 nt, Artificial Sequence
  Description of Artificial Sequence: Synthetic oligonucleotide
cguuguaguccccaauagc

SEQ ID NO: 2564236 - RNA, 19 nt, Artificial Sequence
  Description of Artificial Sequence: Synthetic oligonucleotide
gacggcccagcuuggugac

SEQ ID NO: 2564237 - RNA, 19 nt, Artificial Sequence
  Description of Artificial Sequence: Synthetic oligonucleotide
cagacggcccagcuuggug

SEQ ID NO: 2564238 - RNA, 19 nt, Artificial Sequence
  Description of Artificial Sequence: Synthetic oligonucleotide
ccuuaugugguggccacag

SEQ ID NO: 2564239 - RNA, 19 nt, Artificial Sequence
  Description of Artificial Sequence: Synthetic oligonucleotide
uagccucuucgcacaggga

SEQ ID NO: 2564240 - RNA, 19 nt, Artificial Sequence
  Description of Artificial Sequence: Synthetic oligonucleotide
acuuuacauggaacagugu

SEQ ID NO: 2564241 - RNA, 19 nt, Artificial Sequence
  Description of Artificial Sequence: Synthetic oligonucleotide
agcggccugucacuuuaca

SEQ ID NO: 2564242 - RNA, 19 nt, Artificial Sequence
  Description of Artificial Sequence: Synthetic oligonucleotide
caggagcagagacgaugcc

SEQ ID NO: 2564243 - RNA, 19 nt, Artificial Sequence
  Description of Artificial Sequence: Synthetic oligonucleotide
gggacuugaucuucauguc

SEQ ID NO: 2564244 - RNA, 19 nt, Artificial Sequence
  Description of Artificial Sequence: Synthetic oligonucleotide
auuccuuaaugggcaggga

SEQ ID NO: 2564245 - RNA, 19 nt, Artificial Sequence
  Description of Artificial Sequence: Synthetic oligonucleotide
cugcuucugcacuggcaug

SEQ ID NO: 2564246 - RNA, 19 nt, Artificial Sequence
  Description of Artificial Sequence: Synthetic oligonucleotide
agagacgaugccagugccu

SEQ ID NO: 2564247 - RNA, 19 nt, Artificial Sequence
  Description of Artificial Sequence: Synthetic oligonucleotide
cuggccagcccgagucugc

SEQ ID NO: 2564248 - RNA, 19 nt, Artificial Sequence
  Description of Artificial Sequence: Synthetic oligonucleotide
cacaagauggucagugaau

SEQ ID NO: 2564249 - RNA, 19 nt, Artificial Sequence
  Description of Artificial Sequence: Synthetic oligonucleotide
caugaccguuguagucccc

SEQ ID NO: 2564250 - RNA, 19 nt, Artificial Sequence
  Description of Artificial Sequence: Synthetic oligonucleotide
uuggagcacuuaacaccaa

SEQ ID NO: 2564251 - RNA, 19 nt, Artificial Sequence
  Description of Artificial Sequence: Synthetic oligonucleotide
agacgaugccagugccucu

SEQ ID NO: 2564252 - RNA, 19 nt, Artificial Sequence
  Description of Artificial Sequence: Synthetic oligonucleotide
ccucugaacagagacucug

SEQ ID NO: 2564253 - RNA, 19 nt, Artificial Sequence
  Description of Artificial Sequence: Synthetic oligonucleotide
ggccuuggcaaaguugccc

SEQ ID NO: 2564254 - RNA, 19 nt, Artificial Sequence
  Description of Artificial Sequence: Synthetic oligonucleotide
uagcgacaaaagccuugaa

SEQ ID NO: 2564255 - RNA, 19 nt, Artificial Sequence
  Description of Artificial Sequence: Synthetic oligonucleotide
cgcaccaacacagagccac

SEQ ID NO: 2564256 - RNA, 19 nt, Artificial Sequence
  Description of Artificial Sequence: Synthetic oligonucleotide
guaguccccaauagcgaca

SEQ ID NO: 2564257 - RNA, 19 nt, Artificial Sequence
  Description of Artificial Sequence: Synthetic oligonucleotide
cggccugucacuuuacaug

SEQ ID NO: 2564258 - RNA, 19 nt, Artificial Sequence
  Description of Artificial Sequence: Synthetic oligonucleotide
ccguuguaguccccaauag

SEQ ID NO: 2564259 - RNA, 19 nt, Artificial Sequence
  Description of Artificial Sequence: Synthetic oligonucleotide
cagucucuuuccagagguc

SEQ ID NO: 2564260 - RNA, 19 nt, Artificial Sequence
  Description of Artificial Sequence: Synthetic oligonucleotide
cacuuaacaccaagaccaa

SEQ ID NO: 2564261 - RNA, 19 nt, Artificial Sequence
  Description of Artificial Sequence: Synthetic oligonucleotide
ccuccuuggagcacuuaac

SEQ ID NO: 2564262 - RNA, 19 nt, Artificial Sequence
  Description of Artificial Sequence: Synthetic oligonucleotide
gagaacagguagaucuccu

SEQ ID NO: 2564263 - RNA, 19 nt, Artificial Sequence
  Description of Artificial Sequence: Synthetic oligonucleotide
cucuggugugggcuuucac

SEQ ID NO: 2564264 - RNA, 19 nt, Artificial Sequence
  Description of Artificial Sequence: Synthetic oligonucleotide
caguagccucuucgcacag

SEQ ID NO: 2564265 - RNA, 19 nt, Artificial Sequence
  Description of Artificial Sequence: Synthetic oligonucleotide
cagacuuaauucacuuuau

SEQ ID NO: 2564266 - RNA, 19 nt, Artificial Sequence
  Description of Artificial Sequence: Synthetic oligonucleotide
gacguguagcagucaucaa

SEQ ID NO: 2564267 - RNA, 19 nt, Artificial Sequence
  Description of Artificial Sequence: Synthetic oligonucleotide
ggucuuggagauggcauca

SEQ ID NO: 2564268 - RNA, 19 nt, Artificial Sequence
  Description of Artificial Sequence: Synthetic oligonucleotide
gcacuggcaugaucuuuag

SEQ ID NO: 2564269 - RNA, 19 nt, Artificial Sequence
  Description of Artificial Sequence: Synthetic oligonucleotide
ggcaugaucuuuagaaccu

SEQ ID NO: 2564270 - RNA, 19 nt, Artificial Sequence
  Description of Artificial Sequence: Synthetic oligonucleotide
ggucagugaauuccugaua

SEQ ID NO: 2564271 - RNA, 19 nt, Artificial Sequence
  Description of Artificial Sequence: Synthetic oligonucleotide
gcagugcagccccuggcug

SEQ ID NO: 2564272 - RNA, 19 nt, Artificial Sequence
  Description of Artificial Sequence: Synthetic oligonucleotide
ccuugaaccugguccgcug

SEQ ID NO: 2564273 - RNA, 19 nt, Artificial Sequence
  Description of Artificial Sequence: Synthetic oligonucleotide
cucauccuuuagggaugcg

SEQ ID NO: 2564274 - RNA, 19 nt, Artificial Sequence
  Description of Artificial Sequence: Synthetic oligonucleotide
cguguagcagucaucaaua

SEQ ID NO: 2564275 - RNA, 19 nt, Artificial Sequence
  Description of Artificial Sequence: Synthetic oligonucleotide
uggccccucggauggcagu

SEQ ID NO: 2564276 - RNA, 19 nt, Artificial Sequence
  Description of Artificial Sequence: Synthetic oligonucleotide
gggaugagacgcaccaaca

SEQ ID NO: 2564277 - RNA, 19 nt, Artificial Sequence
  Description of Artificial Sequence: Synthetic oligonucleotide
ccaggaagaaaucaauaau

SEQ ID NO: 2564278 - RNA, 19 nt, Artificial Sequence
  Description of Artificial Sequence: Synthetic oligonucleotide
ccaguagccucuucgcaca

SEQ ID NO: 2564279 - RNA, 19 nt, Artificial Sequence
  Description of Artificial Sequence: Synthetic oligonucleotide
caguagcuucuuaggcaca

SEQ ID NO: 2564280 - RNA, 19 nt, Artificial Sequence
  Description of Artificial Sequence: Synthetic oligonucleotide
ccuuuagggaugcgcccag

SEQ ID NO: 2564281 - RNA, 19 nt, Artificial Sequence
  Description of Artificial Sequence: Synthetic oligonucleotide
gggagaacagguagaucuc

SEQ ID NO: 2564282 - RNA, 19 nt, Artificial Sequence
  Description of Artificial Sequence: Synthetic oligonucleotide
augcgcccaggaagaaauc

SEQ ID NO: 2564283 - RNA, 19 nt, Artificial Sequence
  Description of Artificial Sequence: Synthetic oligonucleotide
cgcacagggacaauggaaa

SEQ ID NO: 2564284 - RNA, 19 nt, Artificial Sequence
  Description of Artificial Sequence: Synthetic oligonucleotide
gcuugccaaucuuguuccc

SEQ ID NO: 2564285 - RNA, 19 nt, Artificial Sequence
  Description of Artificial Sequence: Synthetic oligonucleotide
uggccagcccgagucugcu

SEQ ID NO: 2564286 - RNA, 19 nt, Artificial Sequence
  Description of Artificial Sequence: Synthetic oligonucleotide
accagacggcccagcuugg

SEQ ID NO: 2564287 - RNA, 19 nt, Artificial Sequence
  Description of Artificial Sequence: Synthetic oligonucleotide
ggguuagguagcuguaggu

SEQ ID NO: 2564288 - RNA, 19 nt, Artificial Sequence
  Description of Artificial Sequence: Synthetic oligonucleotide
cacuggcaugaucuuuaga

SEQ ID NO: 2564289 - RNA, 19 nt, Artificial Sequence
  Description of Artificial Sequence: Synthetic oligonucleotide
cccgagucugcuucugcac

SEQ ID NO: 2564290 - RNA, 19 nt, Artificial Sequence
  Description of Artificial Sequence: Synthetic oligonucleotide
gcaugaucuuuagaaccuc

SEQ ID NO: 2564291 - RNA, 19 nt, Artificial Sequence
  Description of Artificial Sequence: Synthetic oligonucleotide
gggcuuucacaagaugguc

SEQ ID NO: 2564292 - RNA, 19 nt, Artificial Sequence
  Description of Artificial Sequence: Synthetic oligonucleotide
caauaaucucggauuccuu

SEQ ID NO: 2564293 - RNA, 19 nt, Artificial Sequence
  Description of Artificial Sequence: Synthetic oligonucleotide
gaccguuguaguccccaau

SEQ ID NO: 2564294 - RNA, 19 nt, Artificial Sequence
  Description of Artificial Sequence: Synthetic oligonucleotide
ugauggccccucggauggc

SEQ ID NO: 2564295 - RNA, 19 nt, Artificial Sequence
  Description of Artificial Sequence: Synthetic oligonucleotide
caauagcgacaaaagccuu

SEQ ID NO: 2564296 - RNA, 19 nt, Artificial Sequence
  Description of Artificial Sequence: Synthetic oligonucleotide
ccuuaaugggcagggagaa

SEQ ID NO: 2564297 - RNA, 19 nt, Artificial Sequence
  Description of Artificial Sequence: Synthetic oligonucleotide
ccaacaugaccguuguagu

SEQ ID NO: 2564298 - RNA, 19 nt, Artificial Sequence
  Description of Artificial Sequence: Synthetic oligonucleotide
gcugacguguagcagucau

SEQ ID NO: 2564299 - RNA, 19 nt, Artificial Sequence
  Description of Artificial Sequence: Synthetic oligonucleotide
gcccgagucugcuucugca

SEQ ID NO: 2564300 - RNA, 19 nt, Artificial Sequence
  Description of Artificial Sequence: Synthetic oligonucleotide
ccugauaaggagacuuggu

SEQ ID NO: 2564301 - RNA, 19 nt, Artificial Sequence
  Description of Artificial Sequence: Synthetic oligonucleotide
acggcccagcuuggugacg

SEQ ID NO: 2564302 - RNA, 19 nt, Artificial Sequence
  Description of Artificial Sequence: Synthetic oligonucleotide
gaccaacaugaccguugua

SEQ ID NO: 2564303 - RNA, 19 nt, Artificial Sequence
  Description of Artificial Sequence: Synthetic oligonucleotide
cagcggccugucacuuuac

SEQ ID NO: 2564304 - RNA, 19 nt, Artificial Sequence
  Description of Artificial Sequence: Synthetic oligonucleotide
gagcagagacgaugccagu

SEQ ID NO: 2564305 - RNA, 19 nt, Artificial Sequence
  Description of Artificial Sequence: Synthetic oligonucleotide
ccuggcugacguguagcag

SEQ ID NO: 2564306 - RNA, 19 nt, Artificial Sequence
  Description of Artificial Sequence: Synthetic oligonucleotide
ccgcuggccagcccgaguc

SEQ ID NO: 2564307 - RNA, 19 nt, Artificial Sequence
  Description of Artificial Sequence: Synthetic oligonucleotide
gagccacagcggccuguca

SEQ ID NO: 2564308 - RNA, 19 nt, Artificial Sequence
  Description of Artificial Sequence: Synthetic oligonucleotide
gcuaccuccuuggagcacu

SEQ ID NO: 2564309 - RNA, 19 nt, Artificial Sequence
  Description of Artificial Sequence: Synthetic oligonucleotide
gccucuucgcacagggaca

SEQ ID NO: 2564310 - RNA, 19 nt, Artificial Sequence
  Description of Artificial Sequence: Synthetic oligonucleotide
auggaacaguguggggcuu

SEQ ID NO: 2564311 - RNA, 19 nt, Artificial Sequence
  Description of Artificial Sequence: Synthetic oligonucleotide
ggccccucggauggcagug

SEQ ID NO: 2564312 - RNA, 19 nt, Artificial Sequence
  Description of Artificial Sequence: Synthetic oligonucleotide
caaaagccuugaaccuggu

SEQ ID NO: 2564313 - RNA, 19 nt, Artificial Sequence
  Description of Artificial Sequence: Synthetic oligonucleotide
aguccccaauagcgacaaa

SEQ ID NO: 2564314 - RNA, 19 nt, Artificial Sequence
  Description of Artificial Sequence: Synthetic oligonucleotide
caguggcuaccuccuugga

SEQ ID NO: 2564315 - RNA, 19 nt, Artificial Sequence
  Description of Artificial Sequence: Synthetic oligonucleotide
gccccuggcugacguguag

SEQ ID NO: 2564316 - RNA, 19 nt, Artificial Sequence
  Description of Artificial Sequence: Synthetic oligonucleotide
gccaggaugauggccccuc

SEQ ID NO: 2564317 - RNA, 19 nt, Artificial Sequence
  Description of Artificial Sequence: Synthetic oligonucleotide
caucaauaccagccaucau

SEQ ID NO: 2564318 - RNA, 19 nt, Artificial Sequence
  Description of Artificial Sequence: Synthetic oligonucleotide
cuuucacaagauggucagu

SEQ ID NO: 2564319 - RNA, 19 nt, Artificial Sequence
  Description of Artificial Sequence: Synthetic oligonucleotide
cagcccgagucugcuucug

SEQ ID NO: 2564320 - RNA, 19 nt, Artificial Sequence
  Description of Artificial Sequence: Synthetic oligonucleotide
ccccucggauggcaguggc

SEQ ID NO: 2564321 - RNA, 19 nt, Artificial Sequence
  Description of Artificial Sequence: Synthetic oligonucleotide
ccuuaaccagacggcccag

SEQ ID NO: 2564322 - RNA, 19 nt, Artificial Sequence
  Description of Artificial Sequence: Synthetic oligonucleotide
cccuggcugacguguagca

SEQ ID NO: 2564323 - RNA, 19 nt, Artificial Sequence
  Description of Artificial Sequence: Synthetic oligonucleotide
cggcccagcuuggugacgg

SEQ ID NO: 2564324 - RNA, 19 nt, Artificial Sequence
  Description of Artificial Sequence: Synthetic oligonucleotide
ggaugcgcccaggaagaaa

SEQ ID NO: 2564325 - RNA, 19 nt, Artificial Sequence
  Description of Artificial Sequence: Synthetic oligonucleotide
ccucggauggcaguggcua

SEQ ID NO: 2564326 - RNA, 19 nt, Artificial Sequence
  Description of Artificial Sequence: Synthetic oligonucleotide
gugcagccccuggcugacg

SEQ ID NO: 2564327 - RNA, 19 nt, Artificial Sequence
  Description of Artificial Sequence: Synthetic oligonucleotide
gcgcccaggaagaaaucaa

SEQ ID NO: 2564328 - RNA, 19 nt, Artificial Sequence
  Description of Artificial Sequence: Synthetic oligonucleotide
guccgcuggccagcccgag

SEQ ID NO: 2564329 - RNA, 19 nt, Artificial Sequence
  Description of Artificial Sequence: Synthetic oligonucleotide
gggcagggaugagacgcac

SEQ ID NO: 2564330 - RNA, 19 nt, Artificial Sequence
  Description of Artificial Sequence: Synthetic oligonucleotide
gcggccugucacuuuacau

SEQ ID NO: 2564331 - RNA, 19 nt, Artificial Sequence
  Description of Artificial Sequence: Synthetic oligonucleotide
gccccucggauggcagugg

SEQ ID NO: 2564332 - RNA, 19 nt, Artificial Sequence
  Description of Artificial Sequence: Synthetic oligonucleotide
gugugggcuuucacaagau

SEQ ID NO: 2564333 - RNA, 19 nt, Artificial Sequence
  Description of Artificial Sequence: Synthetic oligonucleotide
gcaccaacacagagccaca

SEQ ID NO: 2564334 - RNA, 19 nt, Artificial Sequence
  Description of Artificial Sequence: Synthetic oligonucleotide
acgcaccaacacagagcca

SEQ ID NO: 2564335 - RNA, 19 nt, Artificial Sequence
  Description of Artificial Sequence: Synthetic oligonucleotide
cagccccuggcugacgugu

SEQ ID NO: 2564336 - RNA, 19 nt, Artificial Sequence
  Description of Artificial Sequence: Synthetic oligonucleotide
ccucuucgcacagggacaa

SEQ ID NO: 2564337 - RNA, 19 nt, Artificial Sequence
  Description of Artificial Sequence: Synthetic oligonucleotide
ggcuaccuccuuggagcac

SEQ ID NO: 2564338 - RNA, 19 nt, Artificial Sequence
  Description of Artificial Sequence: Synthetic oligonucleotide
cagggacaauggaaagcuu

SEQ ID NO: 2564339 - RNA, 19 nt, Artificial Sequence
  Description of Artificial Sequence: Synthetic oligonucleotide
ccgagucugcuucugcacu

SEQ ID NO: 2564340 - RNA, 19 nt, Artificial Sequence
  Description of Artificial Sequence: Synthetic oligonucleotide
gcccagcuuggugacggga

SEQ ID NO: 2564341 - RNA, 19 nt, Artificial Sequence
  Description of Artificial Sequence: Synthetic oligonucleotide
cagccaucaucaguagcuu

SEQ ID NO: 2564342 - RNA, 19 nt, Artificial Sequence
  Description of Artificial Sequence: Synthetic oligonucleotide
ggcugacguguagcaguca

SEQ ID NO: 2564343 - RNA, 19 nt, Artificial Sequence
  Description of Artificial Sequence: Synthetic oligonucleotide
cuaccuccuuggagcacuu

SEQ ID NO: 2564344 - RNA, 19 nt, Artificial Sequence
  Description of Artificial Sequence: Synthetic oligonucleotide
agccccuggcugacgugua

SEQ ID NO: 2564345 - RNA, 19 nt, Artificial Sequence
  Description of Artificial Sequence: Synthetic oligonucleotide
gguccgcuggccagcccga

SEQ ID NO: 2564346 - RNA, 19 nt, Artificial Sequence
  Description of Artificial Sequence: Synthetic oligonucleotide
gggaugcgcccaggaagaa

SEQ ID NO: 2564347 - RNA, 19 nt, Artificial Sequence
  Description of Artificial Sequence: Synthetic oligonucleotide
cgcccaggaagaaaucaau

SEQ ID NO: 2564348 - RNA, 19 nt, Artificial Sequence
  Description of Artificial Sequence: Synthetic oligonucleotide
cccuuaugugguggccaca

SEQ ID NO: 2564349 - RNA, 19 nt, Artificial Sequence
  Description of Artificial Sequence: Synthetic oligonucleotide
ccagcccgagucugcuucu

SEQ ID NO: 2564350 - RNA, 19 nt, Artificial Sequence
  Description of Artificial Sequence: Synthetic oligonucleotide
cccucggauggcaguggcu

SEQ ID NO: 2564351 - RNA, 19 nt, Artificial Sequence
  Description of Artificial Sequence: Synthetic oligonucleotide
cucuucgcacagggacaau

SEQ ID NO: 2564352 - RNA, 19 nt, Artificial Sequence
  Description of Artificial Sequence: Synthetic oligonucleotide
ggccaggaugauggccccu

SEQ ID NO: 2564353 - RNA, 19 nt, Artificial Sequence
  Description of Artificial Sequence: Synthetic oligonucleotide
ggccagcccgagucugcuu

SEQ ID NO: 2564354 - RNA, 19 nt, Artificial Sequence
  Description of Artificial Sequence: Synthetic oligonucleotide
gcacaggagcagagacgau

SEQ ID NO: 2564355 - RNA, 19 nt, Artificial Sequence
  Description of Artificial Sequence: Synthetic oligonucleotide
ccagacggcccagcuuggu

SEQ ID NO: 2564356 - RNA, 19 nt, Artificial Sequence
  Description of Artificial Sequence: Synthetic oligonucleotide
cgcuggccagcccgagucu

SEQ ID NO: 2564357 - RNA, 19 nt, Artificial Sequence
  Description of Artificial Sequence: Synthetic oligonucleotide
aauacaacugaccaaaagg

SEQ ID NO: 2564358 - RNA, 19 nt, Artificial Sequence
  Description of Artificial Sequence: Synthetic oligonucleotide
aaacgcauuacacaaauac

SEQ ID NO: 2564359 - RNA, 19 nt, Artificial Sequence
  Description of Artificial Sequence: Synthetic oligonucleotide
auaugaacaacucugagag

SEQ ID NO: 2564360 - RNA, 19 nt, Artificial Sequence
  Description of Artificial Sequence: Synthetic oligonucleotide
accauaaccagccagcucc

SEQ ID NO: 2564361 - RNA, 19 nt, Artificial Sequence
  Description of Artificial Sequence: Synthetic oligonucleotide
aagaguaucagcggcaucc

SEQ ID NO: 2564362 - RNA, 19 nt, Artificial Sequence
  Description of Artificial Sequence: Synthetic oligonucleotide
ugcagcaagaguaucagcg

SEQ ID NO: 2564363 - RNA, 19 nt, Artificial Sequence
  Description of Artificial Sequence: Synthetic oligonucleotide
uaaaagagaaggcuggucc

SEQ ID NO: 2564364 - RNA, 19 nt, Artificial Sequence
  Description of Artificial Sequence: Synthetic oligonucleotide
cuguagauaaaagagaagg

SEQ ID NO: 2564365 - RNA, 19 nt, Artificial Sequence
  Description of Artificial Sequence: Synthetic oligonucleotide
agugugaugugauagagug

SEQ ID NO: 2564366 - RNA, 19 nt, Artificial Sequence
  Description of Artificial Sequence: Synthetic oligonucleotide
auuauaaaacgcauuacac

SEQ ID NO: 2564367 - RNA, 19 nt, Artificial Sequence
  Description of Artificial Sequence: Synthetic oligonucleotide
uuauaaaacgcauuacaca

SEQ ID NO: 2564368 - RNA, 19 nt, Artificial Sequence
  Description of Artificial Sequence: Synthetic oligonucleotide
gacucuucuaaccuuaucc

SEQ ID NO: 2564369 - RNA, 19 nt, Artificial Sequence
  Description of Artificial Sequence: Synthetic oligonucleotide
aaauaugaacaacucugag

SEQ ID NO: 2564370 - RNA, 19 nt, Artificial Sequence
  Description of Artificial Sequence: Synthetic oligonucleotide
aaggagaggaugcucugcc

SEQ ID NO: 2564371 - RNA, 19 nt, Artificial Sequence
  Description of Artificial Sequence: Synthetic oligonucleotide
uguagauaaaagagaaggc

SEQ ID NO: 2564372 - RNA, 19 nt, Artificial Sequence
  Description of Artificial Sequence: Synthetic oligonucleotide
aguguagagcuuuucauag

SEQ ID NO: 2564373 - RNA, 19 nt, Artificial Sequence
  Description of Artificial Sequence: Synthetic oligonucleotide
aaagguccgggcuuggagg

SEQ ID NO: 2564374 - RNA, 19 nt, Artificial Sequence
  Description of Artificial Sequence: Synthetic oligonucleotide
ucuucuaaccuuauccacc

SEQ ID NO: 2564375 - RNA, 19 nt, Artificial Sequence
  Description of Artificial Sequence: Synthetic oligonucleotide
aucagcggcauccacaaac

SEQ ID NO: 2564376 - RNA, 19 nt, Artificial Sequence
  Description of Artificial Sequence: Synthetic oligonucleotide
cauuacacaaauacaacug

SEQ ID NO: 2564377 - RNA, 19 nt, Artificial Sequence
  Description of Artificial Sequence: Synthetic oligonucleotide
agaacgaagacagcgaagg

SEQ ID NO: 2564378 - RNA, 19 nt, Artificial Sequence
  Description of Artificial Sequence: Synthetic oligonucleotide
gaggaagugucccagggcg

SEQ ID NO: 2564379 - RNA, 19 nt, Artificial Sequence
  Description of Artificial Sequence: Synthetic oligonucleotide
cuuuucauagagaaaggug

SEQ ID NO: 2564380 - RNA, 19 nt, Artificial Sequence
  Description of Artificial Sequence: Synthetic oligonucleotide
uuuggagguggcaagguug

SEQ ID NO: 2564381 - RNA, 19 nt, Artificial Sequence
  Description of Artificial Sequence: Synthetic oligonucleotide
gugaagaacgaagacagcg

SEQ ID NO: 2564382 - RNA, 19 nt, Artificial Sequence
  Description of Artificial Sequence: Synthetic oligonucleotide
aaccuuauccaccuguaga

SEQ ID NO: 2564383 - RNA, 19 nt, Artificial Sequence
  Description of Artificial Sequence: Synthetic oligonucleotide
uaaaacgcauuacacaaau

SEQ ID NO: 2564384 - RNA, 19 nt, Artificial Sequence
  Description of Artificial Sequence: Synthetic oligonucleotide
ugauagaguguuuuguugu

SEQ ID NO: 2564385 - RNA, 19 nt, Artificial Sequence
  Description of Artificial Sequence: Synthetic oligonucleotide
agacuugccaccauuaggg

SEQ ID NO: 2564386 - RNA, 19 nt, Artificial Sequence
  Description of Artificial Sequence: Synthetic oligonucleotide
ucuaaccuuauccaccugu

SEQ ID NO: 2564387 - RNA, 19 nt, Artificial Sequence
  Description of Artificial Sequence: Synthetic oligonucleotide
uuacacaaauacaacugac

SEQ ID NO: 2564388 - RNA, 19 nt, Artificial Sequence
  Description of Artificial Sequence: Synthetic oligonucleotide
caugauuccccucaaggag

SEQ ID NO: 2564389 - RNA, 19 nt, Artificial Sequence
  Description of Artificial Sequence: Synthetic oligonucleotide
gagacuugccaccauuagg

SEQ ID NO: 2564390 - RNA, 19 nt, Artificial Sequence
  Description of Artificial Sequence: Synthetic oligonucleotide
ugaagaacgaagacagcga

SEQ ID NO: 2564391 - RNA, 19 nt, Artificial Sequence
  Description of Artificial Sequence: Synthetic oligonucleotide
acaagguuuggcuugccag

SEQ ID NO: 2564392 - RNA, 19 nt, Artificial Sequence
  Description of Artificial Sequence: Synthetic oligonucleotide
aagguccgggcuuggaggc

SEQ ID NO: 2564393 - RNA, 19 nt, Artificial Sequence
  Description of Artificial Sequence: Synthetic oligonucleotide
acaaauacaacugaccaaa

SEQ ID NO: 2564394 - RNA, 19 nt, Artificial Sequence
  Description of Artificial Sequence: Synthetic oligonucleotide
aggaggaauguccauagug

SEQ ID NO: 2564395 - RNA, 19 nt, Artificial Sequence
  Description of Artificial Sequence: Synthetic oligonucleotide
aagacagcgaagguggaag

SEQ ID NO: 2564396 - RNA, 19 nt, Artificial Sequence
  Description of Artificial Sequence: Synthetic oligonucleotide
augaacaacucugagagga

SEQ ID NO: 2564397 - RNA, 19 nt, Artificial Sequence
  Description of Artificial Sequence: Synthetic oligonucleotide
gauaccggagcccaaucag

SEQ ID NO: 2564398 - RNA, 19 nt, Artificial Sequence
  Description of Artificial Sequence: Synthetic oligonucleotide
gauugagagacuugccacc

SEQ ID NO: 2564399 - RNA, 19 nt, Artificial Sequence
  Description of Artificial Sequence: Synthetic oligonucleotide
ucucggaagcucuggagcg

SEQ ID NO: 2564400 - RNA, 19 nt, Artificial Sequence
  Description of Artificial Sequence: Synthetic oligonucleotide
ucaugauuccccucaagga

SEQ ID NO: 2564401 - RNA, 19 nt, Artificial Sequence
  Description of Artificial Sequence: Synthetic oligonucleotide
aguacuacugcagcaagag

SEQ ID NO: 2564402 - RNA, 19 nt, Artificial Sequence
  Description of Artificial Sequence: Synthetic oligonucleotide
gaugugauagaguguuuug

SEQ ID NO: 2564403 - RNA, 19 nt, Artificial Sequence
  Description of Artificial Sequence: Synthetic oligonucleotide
ugccaguacaccaacugug

SEQ ID NO: 2564404 - RNA, 19 nt, Artificial Sequence
  Description of Artificial Sequence: Synthetic oligonucleotide
ugugaugugauagaguguu

SEQ ID NO: 2564405 - RNA, 19 nt, Artificial Sequence
  Description of Artificial Sequence: Synthetic oligonucleotide
aguacaccaacugugggag

SEQ ID NO: 2564406 - RNA, 19 nt, Artificial Sequence
  Description of Artificial Sequence: Synthetic oligonucleotide
uuauuauaaaacgcauuac

SEQ ID NO: 2564407 - RNA, 19 nt, Artificial Sequence
  Description of Artificial Sequence: Synthetic oligonucleotide
agcccagacucuucuaacc

SEQ ID NO: 2564408 - RNA, 19 nt, Artificial Sequence
  Description of Artificial Sequence: Synthetic oligonucleotide
gauagaguguuuuguugug

SEQ ID NO: 2564409 - RNA, 19 nt, Artificial Sequence
  Description of Artificial Sequence: Synthetic oligonucleotide
ugcuucuagauaccggagc

SEQ ID NO: 2564410 - RNA, 19 nt, Artificial Sequence
  Description of Artificial Sequence: Synthetic oligonucleotide
auacaacugaccaaaaggu

SEQ ID NO: 2564411 - RNA, 19 nt, Artificial Sequence
  Description of Artificial Sequence: Synthetic oligonucleotide
aggauugagagacuugcca

SEQ ID NO: 2564412 - RNA, 19 nt, Artificial Sequence
  Description of Artificial Sequence: Synthetic oligonucleotide
uucugcuucuagauaccgg

SEQ ID NO: 2564413 - RNA, 19 nt, Artificial Sequence
  Description of Artificial Sequence: Synthetic oligonucleotide
gaggaauguccauagugug

SEQ ID NO: 2564414 - RNA, 19 nt, Artificial Sequence
  Description of Artificial Sequence: Synthetic oligonucleotide
aaucagcauacccaggauu

SEQ ID NO: 2564415 - RNA, 19 nt, Artificial Sequence
  Description of Artificial Sequence: Synthetic oligonucleotide
auaaaagagaaggcugguc

SEQ ID NO: 2564416 - RNA, 19 nt, Artificial Sequence
  Description of Artificial Sequence: Synthetic oligonucleotide
acaacugaccaaaaggucu

SEQ ID NO: 2564417 - RNA, 19 nt, Artificial Sequence
  Description of Artificial Sequence: Synthetic oligonucleotide
ugccugaggacccaguacu

SEQ ID NO: 2564418 - RNA, 19 nt, Artificial Sequence
  Description of Artificial Sequence: Synthetic oligonucleotide
uaugaacaacucugagagg

SEQ ID NO: 2564419 - RNA, 19 nt, Artificial Sequence
  Description of Artificial Sequence: Synthetic oligonucleotide
aacgcauuacacaaauaca

SEQ ID NO: 2564420 - RNA, 19 nt, Artificial Sequence
  Description of Artificial Sequence: Synthetic oligonucleotide
uccagaucccaaagguccg

SEQ ID NO: 2564421 - RNA, 19 nt, Artificial Sequence
  Description of Artificial Sequence: Synthetic oligonucleotide
gugauagaguguuuuguug

SEQ ID NO: 2564422 - RNA, 19 nt, Artificial Sequence
  Description of Artificial Sequence: Synthetic oligonucleotide
uagaguguuuuguugugga

SEQ ID NO: 2564423 - RNA, 19 nt, Artificial Sequence
  Description of Artificial Sequence: Synthetic oligonucleotide
aaacagcccagacucuucu

SEQ ID NO: 2564424 - RNA, 19 nt, Artificial Sequence
  Description of Artificial Sequence: Synthetic oligonucleotide
ugggugaagaacgaagaca

SEQ ID NO: 2564425 - RNA, 19 nt, Artificial Sequence
  Description of Artificial Sequence: Synthetic oligonucleotide
ucagcggcauccacaaacc

SEQ ID NO: 2564426 - RNA, 19 nt, Artificial Sequence
  Description of Artificial Sequence: Synthetic oligonucleotide
ugugauagaguguuuuguu

SEQ ID NO: 2564427 - RNA, 19 nt, Artificial Sequence
  Description of Artificial Sequence: Synthetic oligonucleotide
gaagguggaagaugauggc

SEQ ID NO: 2564428 - RNA, 19 nt, Artificial Sequence
  Description of Artificial Sequence: Synthetic oligonucleotide
agggcgaggaggaaugucc

SEQ ID NO: 2564429 - RNA, 19 nt, Artificial Sequence
  Description of Artificial Sequence: Synthetic oligonucleotide
ugauuccccucaaggagag

SEQ ID NO: 2564430 - RNA, 19 nt, Artificial Sequence
  Description of Artificial Sequence: Synthetic oligonucleotide
auagaguguuuuguugugg

SEQ ID NO: 2564431 - RNA, 19 nt, Artificial Sequence
  Description of Artificial Sequence: Synthetic oligonucleotide
agagacuugccaccauuag

SEQ ID NO: 2564432 - RNA, 19 nt, Artificial Sequence
  Description of Artificial Sequence: Synthetic oligonucleotide
accuuauccaccuguagau

SEQ ID NO: 2564433 - RNA, 19 nt, Artificial Sequence
  Description of Artificial Sequence: Synthetic oligonucleotide
uugggugaagaacgaagac

SEQ ID NO: 2564434 - RNA, 19 nt, Artificial Sequence
  Description of Artificial Sequence: Synthetic oligonucleotide
agaucccaaagguccgggc

SEQ ID NO: 2564435 - RNA, 19 nt, Artificial Sequence
  Description of Artificial Sequence: Synthetic oligonucleotide
cucuucuaaccuuauccac

SEQ ID NO: 2564436 - RNA, 19 nt, Artificial Sequence
  Description of Artificial Sequence: Synthetic oligonucleotide
uucuagauaccggagccca

SEQ ID NO: 2564437 - RNA, 19 nt, Artificial Sequence
  Description of Artificial Sequence: Synthetic oligonucleotide
gaacaacucugagaggaag

SEQ ID NO: 2564438 - RNA, 19 nt, Artificial Sequence
  Description of Artificial Sequence: Synthetic oligonucleotide
gaagaacgaagacagcgaa

SEQ ID NO: 2564439 - RNA, 19 nt, Artificial Sequence
  Description of Artificial Sequence: Synthetic oligonucleotide
aucacagaugacagcagcg

SEQ ID NO: 2564440 - RNA, 19 nt, Artificial Sequence
  Description of Artificial Sequence: Synthetic oligonucleotide
agcgaaucacagaugacag

SEQ ID NO: 2564441 - RNA, 19 nt, Artificial Sequence
  Description of Artificial Sequence: Synthetic oligonucleotide
acgcauuacacaaauacaa

SEQ ID NO: 2564442 - RNA, 19 nt, Artificial Sequence
  Description of Artificial Sequence: Synthetic oligonucleotide
gucucggaagcucuggagc

SEQ ID NO: 2564443 - RNA, 19 nt, Artificial Sequence
  Description of Artificial Sequence: Synthetic oligonucleotide
agcguccagaucccaaagg

SEQ ID NO: 2564444 - RNA, 19 nt, Artificial Sequence
  Description of Artificial Sequence: Synthetic oligonucleotide
uguccauagugugauguga

SEQ ID NO: 2564445 - RNA, 19 nt, Artificial Sequence
  Description of Artificial Sequence: Synthetic oligonucleotide
uaccggagcccaaucagca

SEQ ID NO: 2564446 - RNA, 19 nt, Artificial Sequence
  Description of Artificial Sequence: Synthetic oligonucleotide
aagaacgaagacagcgaag

SEQ ID NO: 2564447 - RNA, 19 nt, Artificial Sequence
  Description of Artificial Sequence: Synthetic oligonucleotide
gagcccaaucagcauaccc

SEQ ID NO: 2564448 - RNA, 19 nt, Artificial Sequence
  Description of Artificial Sequence: Synthetic oligonucleotide
gacuugccaccauuagggg

SEQ ID NO: 2564449 - RNA, 19 nt, Artificial Sequence
  Description of Artificial Sequence: Synthetic oligonucleotide
cuuauccaccuguagauaa

SEQ ID NO: 2564450 - RNA, 19 nt, Artificial Sequence
  Description of Artificial Sequence: Synthetic oligonucleotide
uaaccagccagcuccguaa

SEQ ID NO: 2564451 - RNA, 19 nt, Artificial Sequence
  Description of Artificial Sequence: Synthetic oligonucleotide
cauagagaaaggugugguc

SEQ ID NO: 2564452 - RNA, 19 nt, Artificial Sequence
  Description of Artificial Sequence: Synthetic oligonucleotide
ugguccugcuuacaccgag

SEQ ID NO: 2564453 - RNA, 19 nt, Artificial Sequence
  Description of Artificial Sequence: Synthetic oligonucleotide
auuaggggugccaguacac

SEQ ID NO: 2564454 - RNA, 19 nt, Artificial Sequence
  Description of Artificial Sequence: Synthetic oligonucleotide
agacucuucuaaccuuauc

SEQ ID NO: 2564455 - RNA, 19 nt, Artificial Sequence
  Description of Artificial Sequence: Synthetic oligonucleotide
ccuucuuggaagaacugcc

SEQ ID NO: 2564456 - RNA, 19 nt, Artificial Sequence
  Description of Artificial Sequence: Synthetic oligonucleotide
auaccggagcccaaucagc

SEQ ID NO: 2564457 - RNA, 19 nt, Artificial Sequence
  Description of Artificial Sequence: Synthetic oligonucleotide
aagguuuggcuugccagug

SEQ ID NO: 2564458 - RNA, 19 nt, Artificial Sequence
  Description of Artificial Sequence: Synthetic oligonucleotide
uuauccaccuguagauaaa

SEQ ID NO: 2564459 - RNA, 19 nt, Artificial Sequence
  Description of Artificial Sequence: Synthetic oligonucleotide
ggauugagagacuugccac

SEQ ID NO: 2564460 - RNA, 19 nt, Artificial Sequence
  Description of Artificial Sequence: Synthetic oligonucleotide
ugaugugauagaguguuuu

SEQ ID NO: 2564461 - RNA, 19 nt, Artificial Sequence
  Description of Artificial Sequence: Synthetic oligonucleotide
agauaccggagcccaauca

SEQ ID NO: 2564462 - RNA, 19 nt, Artificial Sequence
  Description of Artificial Sequence: Synthetic oligonucleotide
caaagguccgggcuuggag

SEQ ID NO: 2564463 - RNA, 19 nt, Artificial Sequence
  Description of Artificial Sequence: Synthetic oligonucleotide
augugauagaguguuuugu

SEQ ID NO: 2564464 - RNA, 19 nt, Artificial Sequence
  Description of Artificial Sequence: Synthetic oligonucleotide
cauagugugaugugauaga

SEQ ID NO: 2564465 - RNA, 19 nt, Artificial Sequence
  Description of Artificial Sequence: Synthetic oligonucleotide
gaggcagcgaaucacagau

SEQ ID NO: 2564466 - RNA, 19 nt, Artificial Sequence
  Description of Artificial Sequence: Synthetic oligonucleotide
uaggggugccaguacacca

SEQ ID NO: 2564467 - RNA, 19 nt, Artificial Sequence
  Description of Artificial Sequence: Synthetic oligonucleotide
gcauacccaggauugagag

SEQ ID NO: 2564468 - RNA, 19 nt, Artificial Sequence
  Description of Artificial Sequence: Synthetic oligonucleotide
agcuccguaacacguucag

SEQ ID NO: 2564469 - RNA, 19 nt, Artificial Sequence
  Description of Artificial Sequence: Synthetic oligonucleotide
ugagagacuugccaccauu

SEQ ID NO: 2564470 - RNA, 19 nt, Artificial Sequence
  Description of Artificial Sequence: Synthetic oligonucleotide
ugucaauggcacagaggca

SEQ ID NO: 2564471 - RNA, 19 nt, Artificial Sequence
  Description of Artificial Sequence: Synthetic oligonucleotide
auguccauagugugaugug

SEQ ID NO: 2564472 - RNA, 19 nt, Artificial Sequence
  Description of Artificial Sequence: Synthetic oligonucleotide
aguaucagcggcauccaca

SEQ ID NO: 2564473 - RNA, 19 nt, Artificial Sequence
  Description of Artificial Sequence: Synthetic oligonucleotide
uggcuugccaguguagagc

SEQ ID NO: 2564474 - RNA, 19 nt, Artificial Sequence
  Description of Artificial Sequence: Synthetic oligonucleotide
gcagcaagaguaucagcgg

SEQ ID NO: 2564475 - RNA, 19 nt, Artificial Sequence
  Description of Artificial Sequence: Synthetic oligonucleotide
gcuguuccaaauaugaaca

SEQ ID NO: 2564476 - RNA, 19 nt, Artificial Sequence
  Description of Artificial Sequence: Synthetic oligonucleotide
ggugccaguacaccaacug

SEQ ID NO: 2564477 - RNA, 19 nt, Artificial Sequence
  Description of Artificial Sequence: Synthetic oligonucleotide
caccuguagauaaaagaga

SEQ ID NO: 2564478 - RNA, 19 nt, Artificial Sequence
  Description of Artificial Sequence: Synthetic oligonucleotide
uuaggggugccaguacacc

SEQ ID NO: 2564479 - RNA, 19 nt, Artificial Sequence
  Description of Artificial Sequence: Synthetic oligonucleotide
auugagagacuugccacca

SEQ ID NO: 2564480 - RNA, 19 nt, Artificial Sequence
  Description of Artificial Sequence: Synthetic oligonucleotide
aggaagcggcucaugauuc

SEQ ID NO: 2564481 - RNA, 19 nt, Artificial Sequence
  Description of Artificial Sequence: Synthetic oligonucleotide
caggauugagagacuugcc

SEQ ID NO: 2564482 - RNA, 19 nt, Artificial Sequence
  Description of Artificial Sequence: Synthetic oligonucleotide
gaaagguguggucucggaa

SEQ ID NO: 2564483 - RNA, 19 nt, Artificial Sequence
  Description of Artificial Sequence: Synthetic oligonucleotide
acagcgaagguggaagaug

SEQ ID NO: 2564484 - RNA, 19 nt, Artificial Sequence
  Description of Artificial Sequence: Synthetic oligonucleotide
uccguaacacguucaggaa

SEQ ID NO: 2564485 - RNA, 19 nt, Artificial Sequence
  Description of Artificial Sequence: Synthetic oligonucleotide
cuuggaggccauucacaag

SEQ ID NO: 2564486 - RNA, 19 nt, Artificial Sequence
  Description of Artificial Sequence: Synthetic oligonucleotide
uguggucucggaagcucug

SEQ ID NO: 2564487 - RNA, 19 nt, Artificial Sequence
  Description of Artificial Sequence: Synthetic oligonucleotide
guaucagcggcauccacaa

SEQ ID NO: 2564488 - RNA, 19 nt, Artificial Sequence
  Description of Artificial Sequence: Synthetic oligonucleotide
ggcagcgaaucacagauga

SEQ ID NO: 2564489 - RNA, 19 nt, Artificial Sequence
  Description of Artificial Sequence: Synthetic oligonucleotide
cguaacacguucaggaagc

SEQ ID NO: 2564490 - RNA, 19 nt, Artificial Sequence
  Description of Artificial Sequence: Synthetic oligonucleotide
cacaaauacaacugaccaa

SEQ ID NO: 2564491 - RNA, 19 nt, Artificial Sequence
  Description of Artificial Sequence: Synthetic oligonucleotide
ucugccugaggacccagua

SEQ ID NO: 2564492 - RNA, 19 nt, Artificial Sequence
  Description of Artificial Sequence: Synthetic oligonucleotide
acagcccagacucuucuaa

SEQ ID NO: 2564493 - RNA, 19 nt, Artificial Sequence
  Description of Artificial Sequence: Synthetic oligonucleotide
aauggcacagaggcagcga

SEQ ID NO: 2564494 - RNA, 19 nt, Artificial Sequence
  Description of Artificial Sequence: Synthetic oligonucleotide
uccugcuuacaccgagggc

SEQ ID NO: 2564495 - RNA, 19 nt, Artificial Sequence
  Description of Artificial Sequence: Synthetic oligonucleotide
agcggcauccacaaaccag

SEQ ID NO: 2564496 - RNA, 19 nt, Artificial Sequence
  Description of Artificial Sequence: Synthetic oligonucleotide
aggccauucacaagguuug

SEQ ID NO: 2564497 - RNA, 19 nt, Artificial Sequence
  Description of Artificial Sequence: Synthetic oligonucleotide
caguacaccaacuguggga

SEQ ID NO: 2564498 - RNA, 19 nt, Artificial Sequence
  Description of Artificial Sequence: Synthetic oligonucleotide
cuucuagauaccggagccc

SEQ ID NO: 2564499 - RNA, 19 nt, Artificial Sequence
  Description of Artificial Sequence: Synthetic oligonucleotide
cagcgaaucacagaugaca

SEQ ID NO: 2564500 - RNA, 19 nt, Artificial Sequence
  Description of Artificial Sequence: Synthetic oligonucleotide
gagaggaugcucugccuga

SEQ ID NO: 2564501 - RNA, 19 nt, Artificial Sequence
  Description of Artificial Sequence: Synthetic oligonucleotide
augauuccccucaaggaga

SEQ ID NO: 2564502 - RNA, 19 nt, Artificial Sequence
  Description of Artificial Sequence: Synthetic oligonucleotide
ccauagugugaugugauag

SEQ ID NO: 2564503 - RNA, 19 nt, Artificial Sequence
  Description of Artificial Sequence: Synthetic oligonucleotide
gcauuacacaaauacaacu

SEQ ID NO: 2564504 - RNA, 19 nt, Artificial Sequence
  Description of Artificial Sequence: Synthetic oligonucleotide
cugcuucuagauaccggag

SEQ ID NO: 2564505 - RNA, 19 nt, Artificial Sequence
  Description of Artificial Sequence: Synthetic oligonucleotide
ccaggauugagagacuugc

SEQ ID NO: 2564506 - RNA, 19 nt, Artificial Sequence
  Description of Artificial Sequence: Synthetic oligonucleotide
uagauaccggagcccaauc

SEQ ID NO: 2564507 - RNA, 19 nt, Artificial Sequence
  Description of Artificial Sequence: Synthetic oligonucleotide
cugcuuacaccgagggcag

SEQ ID NO: 2564508 - RNA, 19 nt, Artificial Sequence
  Description of Artificial Sequence: Synthetic oligonucleotide
gcugcuguuccaaauauga

SEQ ID NO: 2564509 - RNA, 19 nt, Artificial Sequence
  Description of Artificial Sequence: Synthetic oligonucleotide
uuacaccgagggcagcccu

SEQ ID NO: 2564510 - RNA, 19 nt, Artificial Sequence
  Description of Artificial Sequence: Synthetic oligonucleotide
acguucaggaagcggcuca

SEQ ID NO: 2564511 - RNA, 19 nt, Artificial Sequence
  Description of Artificial Sequence: Synthetic oligonucleotide
uccauagugugaugugaua

SEQ ID NO: 2564512 - RNA, 19 nt, Artificial Sequence
  Description of Artificial Sequence: Synthetic oligonucleotide
cauuaggggugccaguaca

SEQ ID NO: 2564513 - RNA, 19 nt, Artificial Sequence
  Description of Artificial Sequence: Synthetic oligonucleotide
guaacacguucaggaagcg

SEQ ID NO: 2564514 - RNA, 19 nt, Artificial Sequence
  Description of Artificial Sequence: Synthetic oligonucleotide
gaucccaaagguccgggcu

SEQ ID NO: 2564515 - RNA, 19 nt, Artificial Sequence
  Description of Artificial Sequence: Synthetic oligonucleotide
aggacccaguacuacugca

SEQ ID NO: 2564516 - RNA, 19 nt, Artificial Sequence
  Description of Artificial Sequence: Synthetic oligonucleotide
auaaccagccagcuccgua

SEQ ID NO: 2564517 - RNA, 19 nt, Artificial Sequence
  Description of Artificial Sequence: Synthetic oligonucleotide
uucuaaccuuauccaccug

SEQ ID NO: 2564518 - RNA, 19 nt, Artificial Sequence
  Description of Artificial Sequence: Synthetic oligonucleotide
ucuagauaccggagcccaa

SEQ ID NO: 2564519 - RNA, 19 nt, Artificial Sequence
  Description of Artificial Sequence: Synthetic oligonucleotide
acccaguacuacugcagca

SEQ ID NO: 2564520 - RNA, 19 nt, Artificial Sequence
  Description of Artificial Sequence: Synthetic oligonucleotide
gaacugcccgucccuuggg

SEQ ID NO: 2564521 - RNA, 19 nt, Artificial Sequence
  Description of Artificial Sequence: Synthetic oligonucleotide
caauggcacagaggcagcg

SEQ ID NO: 2564522 - RNA, 19 nt, Artificial Sequence
  Description of Artificial Sequence: Synthetic oligonucleotide
auggcacagaggcagcgaa

SEQ ID NO: 2564523 - RNA, 19 nt, Artificial Sequence
  Description of Artificial Sequence: Synthetic oligonucleotide
agacagcgaagguggaaga

SEQ ID NO: 2564524 - RNA, 19 nt, Artificial Sequence
  Description of Artificial Sequence: Synthetic oligonucleotide
ccuguagauaaaagagaag

SEQ ID NO: 2564525 - RNA, 19 nt, Artificial Sequence
  Description of Artificial Sequence: Synthetic oligonucleotide
cuucuaaccuuauccaccu

SEQ ID NO: 2564526 - RNA, 19 nt, Artificial Sequence
  Description of Artificial Sequence: Synthetic oligonucleotide
acuacugcagcaagaguau

SEQ ID NO: 2564527 - RNA, 19 nt, Artificial Sequence
  Description of Artificial Sequence: Synthetic oligonucleotide
gcuaugauggacaccauaa

SEQ ID NO: 2564528 - RNA, 19 nt, Artificial Sequence
  Description of Artificial Sequence: Synthetic oligonucleotide
ucagcauacccaggauuga

SEQ ID NO: 2564529 - RNA, 19 nt, Artificial Sequence
  Description of Artificial Sequence: Synthetic oligonucleotide
cagccagcuccguaacacg

SEQ ID NO: 2564530 - RNA, 19 nt, Artificial Sequence
  Description of Artificial Sequence: Synthetic oligonucleotide
agcccuucuuggaagaacu

SEQ ID NO: 2564531 - RNA, 19 nt, Artificial Sequence
  Description of Artificial Sequence: Synthetic oligonucleotide
caguguagagcuuuucaua

SEQ ID NO: 2564532 - RNA, 19 nt, Artificial Sequence
  Description of Artificial Sequence: Synthetic oligonucleotide
uccccucaaggagaggaug

SEQ ID NO: 2564533 - RNA, 19 nt, Artificial Sequence
  Description of Artificial Sequence: Synthetic oligonucleotide
aaaacgcauuacacaaaua

SEQ ID NO: 2564534 - RNA, 19 nt, Artificial Sequence
  Description of Artificial Sequence: Synthetic oligonucleotide
cagcauacccaggauugag

SEQ ID NO: 2564535 - RNA, 19 nt, Artificial Sequence
  Description of Artificial Sequence: Synthetic oligonucleotide
gccaguacaccaacugugg

SEQ ID NO: 2564536 - RNA, 19 nt, Artificial Sequence
  Description of Artificial Sequence: Synthetic oligonucleotide
cuaaccuuauccaccugua

SEQ ID NO: 2564537 - RNA, 19 nt, Artificial Sequence
  Description of Artificial Sequence: Synthetic oligonucleotide
cuuacaccgagggcagccc

SEQ ID NO: 2564538 - RNA, 19 nt, Artificial Sequence
  Description of Artificial Sequence: Synthetic oligonucleotide
uggaugucaauggcacaga

SEQ ID NO: 2564539 - RNA, 19 nt, Artificial Sequence
  Description of Artificial Sequence: Synthetic oligonucleotide
gaguaucagcggcauccac

SEQ ID NO: 2564540 - RNA, 19 nt, Artificial Sequence
  Description of Artificial Sequence: Synthetic oligonucleotide
ggucucggaagcucuggag

SEQ ID NO: 2564541 - RNA, 19 nt, Artificial Sequence
  Description of Artificial Sequence: Synthetic oligonucleotide
ucggaagcucuggagcgug

SEQ ID NO: 2564542 - RNA, 19 nt, Artificial Sequence
  Description of Artificial Sequence: Synthetic oligonucleotide
accauuaggggugccagua

SEQ ID NO: 2564543 - RNA, 19 nt, Artificial Sequence
  Description of Artificial Sequence: Synthetic oligonucleotide
aagguuggccucaguuucu

SEQ ID NO: 2564544 - RNA, 19 nt, Artificial Sequence
  Description of Artificial Sequence: Synthetic oligonucleotide
aucccaaagguccgggcuu

SEQ ID NO: 2564545 - RNA, 19 nt, Artificial Sequence
  Description of Artificial Sequence: Synthetic oligonucleotide
cagcccagacucuucuaac

SEQ ID NO: 2564546 - RNA, 19 nt, Artificial Sequence
  Description of Artificial Sequence: Synthetic oligonucleotide
ccguaacacguucaggaag

SEQ ID NO: 2564547 - RNA, 19 nt, Artificial Sequence
  Description of Artificial Sequence: Synthetic oligonucleotide
guuuggcuugccaguguag

SEQ ID NO: 2564548 - RNA, 19 nt, Artificial Sequence
  Description of Artificial Sequence: Synthetic oligonucleotide
agcauacccaggauugaga

SEQ ID NO: 2564549 - RNA, 19 nt, Artificial Sequence
  Description of Artificial Sequence: Synthetic oligonucleotide
agaggaugcucugccugag

SEQ ID NO: 2564550 - RNA, 19 nt, Artificial Sequence
  Description of Artificial Sequence: Synthetic oligonucleotide
cagaucccaaagguccggg

SEQ ID NO: 2564551 - RNA, 19 nt, Artificial Sequence
  Description of Artificial Sequence: Synthetic oligonucleotide
caguacuacugcagcaaga

SEQ ID NO: 2564552 - RNA, 19 nt, Artificial Sequence
  Description of Artificial Sequence: Synthetic oligonucleotide
ucuggagcguguuccccau

SEQ ID NO: 2564553 - RNA, 19 nt, Artificial Sequence
  Description of Artificial Sequence: Synthetic oligonucleotide
uggcauuuuggagguggca

SEQ ID NO: 2564554 - RNA, 19 nt, Artificial Sequence
  Description of Artificial Sequence: Synthetic oligonucleotide
cgcauuacacaaauacaac

SEQ ID NO: 2564555 - RNA, 19 nt, Artificial Sequence
  Description of Artificial Sequence: Synthetic oligonucleotide
uuccccucaaggagaggau

SEQ ID NO: 2564556 - RNA, 19 nt, Artificial Sequence
  Description of Artificial Sequence: Synthetic oligonucleotide
cagcguccagaucccaaag

SEQ ID NO: 2564557 - RNA, 19 nt, Artificial Sequence
  Description of Artificial Sequence: Synthetic oligonucleotide
agaguaucagcggcaucca

SEQ ID NO: 2564558 - RNA, 19 nt, Artificial Sequence
  Description of Artificial Sequence: Synthetic oligonucleotide
ccaguacaccaacuguggg

SEQ ID NO: 2564559 - RNA, 19 nt, Artificial Sequence
  Description of Artificial Sequence: Synthetic oligonucleotide
ggaagugucccagggcgag

SEQ ID NO: 2564560 - RNA, 19 nt, Artificial Sequence
  Description of Artificial Sequence: Synthetic oligonucleotide
agguuuggcuugccagugu

SEQ ID NO: 2564561 - RNA, 19 nt, Artificial Sequence
  Description of Artificial Sequence: Synthetic oligonucleotide
gagagacuugccaccauua

SEQ ID NO: 2564562 - RNA, 19 nt, Artificial Sequence
  Description of Artificial Sequence: Synthetic oligonucleotide
gcgaagguggaagaugaug

SEQ ID NO: 2564563 - RNA, 19 nt, Artificial Sequence
  Description of Artificial Sequence: Synthetic oligonucleotide
gcgaaucacagaugacagc

SEQ ID NO: 2564564 - RNA, 19 nt, Artificial Sequence
  Description of Artificial Sequence: Synthetic oligonucleotide
ggaggaauguccauagugu

SEQ ID NO: 2564565 - RNA, 19 nt, Artificial Sequence
  Description of Artificial Sequence: Synthetic oligonucleotide
gagcguguuccccauggcu

SEQ ID NO: 2564566 - RNA, 19 nt, Artificial Sequence
  Description of Artificial Sequence: Synthetic oligonucleotide
aaggcugguccugcuuaca

SEQ ID NO: 2564567 - RNA, 19 nt, Artificial Sequence
  Description of Artificial Sequence: Synthetic oligonucleotide
agcugcuguuccaaauaug

SEQ ID NO: 2564568 - RNA, 19 nt, Artificial Sequence
  Description of Artificial Sequence: Synthetic oligonucleotide
uguuccccauggcuaugau

SEQ ID NO: 2564569 - RNA, 19 nt, Artificial Sequence
  Description of Artificial Sequence: Synthetic oligonucleotide
agcguguuccccauggcua

SEQ ID NO: 2564570 - RNA, 19 nt, Artificial Sequence
  Description of Artificial Sequence: Synthetic oligonucleotide
guacaccaacugugggagc

SEQ ID NO: 2564571 - RNA, 19 nt, Artificial Sequence
  Description of Artificial Sequence: Synthetic oligonucleotide
caccaacugugggagcugc

SEQ ID NO: 2564572 - RNA, 19 nt, Artificial Sequence
  Description of Artificial Sequence: Synthetic oligonucleotide
ggcauuuuggagguggcaa

SEQ ID NO: 2564573 - RNA, 19 nt, Artificial Sequence
  Description of Artificial Sequence: Synthetic oligonucleotide
caccauaaccagccagcuc

SEQ ID NO: 2564574 - RNA, 19 nt, Artificial Sequence
  Description of Artificial Sequence: Synthetic oligonucleotide
caagaguaucagcggcauc

SEQ ID NO: 2564575 - RNA, 19 nt, Artificial Sequence
  Description of Artificial Sequence: Synthetic oligonucleotide
cugcuguuccaaauaugaa

SEQ ID NO: 2564576 - RNA, 19 nt, Artificial Sequence
  Description of Artificial Sequence: Synthetic oligonucleotide
acugaccaaaaggucuaaa

SEQ ID NO: 2564577 - RNA, 19 nt, Artificial Sequence
  Description of Artificial Sequence: Synthetic oligonucleotide
gguucugcuucuagauacc

SEQ ID NO: 2564578 - RNA, 19 nt, Artificial Sequence
  Description of Artificial Sequence: Synthetic oligonucleotide
agccagcuccguaacacgu

SEQ ID NO: 2564579 - RNA, 19 nt, Artificial Sequence
  Description of Artificial Sequence: Synthetic oligonucleotide
ccauaaccagccagcuccg

SEQ ID NO: 2564580 - RNA, 19 nt, Artificial Sequence
  Description of Artificial Sequence: Synthetic oligonucleotide
gcucaugauuccccucaag

SEQ ID NO: 2564581 - RNA, 19 nt, Artificial Sequence
  Description of Artificial Sequence: Synthetic oligonucleotide
acacguucaggaagcggcu

SEQ ID NO: 2564582 - RNA, 19 nt, Artificial Sequence
  Description of Artificial Sequence: Synthetic oligonucleotide
cagcccuucuuggaagaac

SEQ ID NO: 2564583 - RNA, 19 nt, Artificial Sequence
  Description of Artificial Sequence: Synthetic oligonucleotide
agguccgggcuuggaggcc

SEQ ID NO: 2564584 - RNA, 19 nt, Artificial Sequence
  Description of Artificial Sequence: Synthetic oligonucleotide
uaucagcggcauccacaaa

SEQ ID NO: 2564585 - RNA, 19 nt, Artificial Sequence
  Description of Artificial Sequence: Synthetic oligonucleotide
gccauucacaagguuuggc

SEQ ID NO: 2564586 - RNA, 19 nt, Artificial Sequence
  Description of Artificial Sequence: Synthetic oligonucleotide
gcuccguaacacguucagg

SEQ ID NO: 2564587 - RNA, 19 nt, Artificial Sequence
  Description of Artificial Sequence: Synthetic oligonucleotide
cccaaucagcauacccagg

SEQ ID NO: 2564588 - RNA, 19 nt, Artificial Sequence
  Description of Artificial Sequence: Synthetic oligonucleotide
ccauggcuaugauggacac

SEQ ID NO: 2564589 - RNA, 19 nt, Artificial Sequence
  Description of Artificial Sequence: Synthetic oligonucleotide
ggcuaugauggacaccaua

SEQ ID NO: 2564590 - RNA, 19 nt, Artificial Sequence
  Description of Artificial Sequence: Synthetic oligonucleotide
ugcuuacaccgagggcagc

SEQ ID NO: 2564591 - RNA, 19 nt, Artificial Sequence
  Description of Artificial Sequence: Synthetic oligonucleotide
ggcuugccaguguagagcu

SEQ ID NO: 2564592 - RNA, 19 nt, Artificial Sequence
  Description of Artificial Sequence: Synthetic oligonucleotide
ccaccauuaggggugccag

SEQ ID NO: 2564593 - RNA, 19 nt, Artificial Sequence
  Description of Artificial Sequence: Synthetic oligonucleotide
gguguggucucggaagcuc

SEQ ID NO: 2564594 - RNA, 19 nt, Artificial Sequence
  Description of Artificial Sequence: Synthetic oligonucleotide
aggggugccaguacaccaa

SEQ ID NO: 2564595 - RNA, 19 nt, Artificial Sequence
  Description of Artificial Sequence: Synthetic oligonucleotide
ggagcguguuccccauggc

SEQ ID NO: 2564596 - RNA, 19 nt, Artificial Sequence
  Description of Artificial Sequence: Synthetic oligonucleotide
cacguucaggaagcggcuc

SEQ ID NO: 2564597 - RNA, 19 nt, Artificial Sequence
  Description of Artificial Sequence: Synthetic oligonucleotide
ccagcuccguaacacguuc

SEQ ID NO: 2564598 - RNA, 19 nt, Artificial Sequence
  Description of Artificial Sequence: Synthetic oligonucleotide
cuugccaguguagagcuuu

SEQ ID NO: 2564599 - RNA, 19 nt, Artificial Sequence
  Description of Artificial Sequence: Synthetic oligonucleotide
agguguggucucggaagcu

SEQ ID NO: 2564600 - RNA, 19 nt, Artificial Sequence
  Description of Artificial Sequence: Synthetic oligonucleotide
ggcaagguuggccucaguu

SEQ ID NO: 2564601 - RNA, 19 nt, Artificial Sequence
  Description of Artificial Sequence: Synthetic oligonucleotide
cagcuccguaacacguuca

SEQ ID NO: 2564602 - RNA, 19 nt, Artificial Sequence
  Description of Artificial Sequence: Synthetic oligonucleotide
gcagcguccagaucccaaa

SEQ ID NO: 2564603 - RNA, 19 nt, Artificial Sequence
  Description of Artificial Sequence: Synthetic oligonucleotide
ccauuaggggugccaguac

SEQ ID NO: 2564604 - RNA, 19 nt, Artificial Sequence
  Description of Artificial Sequence: Synthetic oligonucleotide
ccagacucuucuaaccuua

SEQ ID NO: 2564605 - RNA, 19 nt, Artificial Sequence
  Description of Artificial Sequence: Synthetic oligonucleotide
cagggcgaggaggaauguc

SEQ ID NO: 2564606 - RNA, 19 nt, Artificial Sequence
  Description of Artificial Sequence: Synthetic oligonucleotide
guccauagugugaugugau

SEQ ID NO: 2564607 - RNA, 19 nt, Artificial Sequence
  Description of Artificial Sequence: Synthetic oligonucleotide
agcagcguccagaucccaa

SEQ ID NO: 2564608 - RNA, 19 nt, Artificial Sequence
  Description of Artificial Sequence: Synthetic oligonucleotide
ggcagcccuucuuggaaga

SEQ ID NO: 2564609 - RNA, 19 nt, Artificial Sequence
  Description of Artificial Sequence: Synthetic oligonucleotide
gacagcgaagguggaagau

SEQ ID NO: 2564610 - RNA, 19 nt, Artificial Sequence
  Description of Artificial Sequence: Synthetic oligonucleotide
ccugaggacccaguacuac

SEQ ID NO: 2564611 - RNA, 19 nt, Artificial Sequence
  Description of Artificial Sequence: Synthetic oligonucleotide
cagcggcauccacaaacca

SEQ ID NO: 2564612 - RNA, 19 nt, Artificial Sequence
  Description of Artificial Sequence: Synthetic oligonucleotide
cuggagcguguuccccaug

SEQ ID NO: 2564613 - RNA, 19 nt, Artificial Sequence
  Description of Artificial Sequence: Synthetic oligonucleotide
guguuuuguuguggauguc

SEQ ID NO: 2564614 - RNA, 19 nt, Artificial Sequence
  Description of Artificial Sequence: Synthetic oligonucleotide
gugggagcugcuguuccaa

SEQ ID NO: 2564615 - RNA, 19 nt, Artificial Sequence
  Description of Artificial Sequence: Synthetic oligonucleotide
caacucugagaggaagugu

SEQ ID NO: 2564616 - RNA, 19 nt, Artificial Sequence
  Description of Artificial Sequence: Synthetic oligonucleotide
cugguccugcuuacaccga

SEQ ID NO: 2564617 - RNA, 19 nt, Artificial Sequence
  Description of Artificial Sequence: Synthetic oligonucleotide
cggagcccaaucagcauac

SEQ ID NO: 2564618 - RNA, 19 nt, Artificial Sequence
  Description of Artificial Sequence: Synthetic oligonucleotide
gcccagacucuucuaaccu

SEQ ID NO: 2564619 - RNA, 19 nt, Artificial Sequence
  Description of Artificial Sequence: Synthetic oligonucleotide
ugcccgucccuugggugaa

SEQ ID NO: 2564620 - RNA, 19 nt, Artificial Sequence
  Description of Artificial Sequence: Synthetic oligonucleotide
gcagcgaaucacagaugac

SEQ ID NO: 2564621 - RNA, 19 nt, Artificial Sequence
  Description of Artificial Sequence: Synthetic oligonucleotide
agcgaagguggaagaugau

SEQ ID NO: 2564622 - RNA, 19 nt, Artificial Sequence
  Description of Artificial Sequence: Synthetic oligonucleotide
gcucuggagcguguucccc

SEQ ID NO: 2564623 - RNA, 19 nt, Artificial Sequence
  Description of Artificial Sequence: Synthetic oligonucleotide
gccaccauuaggggugcca

SEQ ID NO: 2564624 - RNA, 19 nt, Artificial Sequence
  Description of Artificial Sequence: Synthetic oligonucleotide
gcccuucuuggaagaacug

SEQ ID NO: 2564625 - RNA, 19 nt, Artificial Sequence
  Description of Artificial Sequence: Synthetic oligonucleotide
cagacucuucuaaccuuau

SEQ ID NO: 2564626 - RNA, 19 nt, Artificial Sequence
  Description of Artificial Sequence: Synthetic oligonucleotide
gggcgaggaggaaugucca

SEQ ID NO: 2564627 - RNA, 19 nt, Artificial Sequence
  Description of Artificial Sequence: Synthetic oligonucleotide
ugccaccauuaggggugcc

SEQ ID NO: 2564628 - RNA, 19 nt, Artificial Sequence
  Description of Artificial Sequence: Synthetic oligonucleotide
gguccgggcuuggaggcca

SEQ ID NO: 2564629 - RNA, 19 nt, Artificial Sequence
  Description of Artificial Sequence: Synthetic oligonucleotide
ccggagcccaaucagcaua

SEQ ID NO: 2564630 - RNA, 19 nt, Artificial Sequence
  Description of Artificial Sequence: Synthetic oligonucleotide
gcggcucaugauuccccuc

SEQ ID NO: 2564631 - RNA, 19 nt, Artificial Sequence
  Description of Artificial Sequence: Synthetic oligonucleotide
cucugccugaggacccagu

SEQ ID NO: 2564632 - RNA, 19 nt, Artificial Sequence
  Description of Artificial Sequence: Synthetic oligonucleotide
gguuggccucaguuucucu

SEQ ID NO: 2564633 - RNA, 19 nt, Artificial Sequence
  Description of Artificial Sequence: Synthetic oligonucleotide
cucggaagcucuggagcgu

SEQ ID NO: 2564634 - RNA, 19 nt, Artificial Sequence
  Description of Artificial Sequence: Synthetic oligonucleotide
gcguguuccccauggcuau

SEQ ID NO: 2564635 - RNA, 19 nt, Artificial Sequence
  Description of Artificial Sequence: Synthetic oligonucleotide
ccuuauccaccuguagaua

SEQ ID NO: 2564636 - RNA, 19 nt, Artificial Sequence
  Description of Artificial Sequence: Synthetic oligonucleotide
cauaaccagccagcuccgu

SEQ ID NO: 2564637 - RNA, 19 nt, Artificial Sequence
  Description of Artificial Sequence: Synthetic oligonucleotide
gugaugugauagaguguuu

SEQ ID NO: 2564638 - RNA, 19 nt, Artificial Sequence
  Description of Artificial Sequence: Synthetic oligonucleotide
ggaggccauucacaagguu

SEQ ID NO: 2564639 - RNA, 19 nt, Artificial Sequence
  Description of Artificial Sequence: Synthetic oligonucleotide
ggcgaggaggaauguccau

SEQ ID NO: 2564640 - RNA, 19 nt, Artificial Sequence
  Description of Artificial Sequence: Synthetic oligonucleotide
gcagcccuucuuggaagaa

SEQ ID NO: 2564641 - RNA, 19 nt, Artificial Sequence
  Description of Artificial Sequence: Synthetic oligonucleotide
cagcagcguccagauccca

SEQ ID NO: 2564642 - RNA, 19 nt, Artificial Sequence
  Description of Artificial Sequence: Synthetic oligonucleotide
cccagacucuucuaaccuu

SEQ ID NO: 2564643 - RNA, 19 nt, Artificial Sequence
  Description of Artificial Sequence: Synthetic oligonucleotide
gccugaggacccaguacua

SEQ ID NO: 2564644 - RNA, 19 nt, Artificial Sequence
  Description of Artificial Sequence: Synthetic oligonucleotide
gggugccaguacaccaacu

SEQ ID NO: 2564645 - RNA, 19 nt, Artificial Sequence
  Description of Artificial Sequence: Synthetic oligonucleotide
cccuugggugaagaacgaa

SEQ ID NO: 2564646 - RNA, 19 nt, Artificial Sequence
  Description of Artificial Sequence: Synthetic oligonucleotide
caccgagggcagcccuucu

SEQ ID NO: 2564647 - RNA, 19 nt, Artificial Sequence
  Description of Artificial Sequence: Synthetic oligonucleotide
cccgucccuugggugaaga

SEQ ID NO: 2564648 - RNA, 19 nt, Artificial Sequence
  Description of Artificial Sequence: Synthetic oligonucleotide
gccagcuccguaacacguu

SEQ ID NO: 2564649 - RNA, 19 nt, Artificial Sequence
  Description of Artificial Sequence: Synthetic oligonucleotide
gcccgucccuugggugaag

SEQ ID NO: 2564650 - RNA, 19 nt, Artificial Sequence
  Description of Artificial Sequence: Synthetic oligonucleotide
agaaguauaagcuuagagg

SEQ ID NO: 2564651 - RNA, 19 nt, Artificial Sequence
  Description of Artificial Sequence: Synthetic oligonucleotide
auaaucuugaauuucauug

SEQ ID NO: 2564652 - RNA, 19 nt, Artificial Sequence
  Description of Artificial Sequence: Synthetic oligonucleotide
ucuuuaccaauaaagaccc

SEQ ID NO: 2564653 - RNA, 19 nt, Artificial Sequence
  Description of Artificial Sequence: Synthetic oligonucleotide
uaagcuuagagguagagac

SEQ ID NO: 2564654 - RNA, 19 nt, Artificial Sequence
  Description of Artificial Sequence: Synthetic oligonucleotide
aaaauuauuucagcugacc

SEQ ID NO: 2564655 - RNA, 19 nt, Artificial Sequence
  Description of Artificial Sequence: Synthetic oligonucleotide
uuguaaauaaucuugaauu

SEQ ID NO: 2564656 - RNA, 19 nt, Artificial Sequence
  Description of Artificial Sequence: Synthetic oligonucleotide
ugaugaauacauaaucuag

SEQ ID NO: 2564657 - RNA, 19 nt, Artificial Sequence
  Description of Artificial Sequence: Synthetic oligonucleotide
agucuuuaccaauaaagac

SEQ ID NO: 2564658 - RNA, 19 nt, Artificial Sequence
  Description of Artificial Sequence: Synthetic oligonucleotide
auuauuucagcugaccagc

SEQ ID NO: 2564659 - RNA, 19 nt, Artificial Sequence
  Description of Artificial Sequence: Synthetic oligonucleotide
aacacgaccaccuucccag

SEQ ID NO: 2564660 - RNA, 19 nt, Artificial Sequence
  Description of Artificial Sequence: Synthetic oligonucleotide
ucauugagaaguauaagcu

SEQ ID NO: 2564661 - RNA, 19 nt, Artificial Sequence
  Description of Artificial Sequence: Synthetic oligonucleotide
uuagacaaacuucauugag

SEQ ID NO: 2564662 - RNA, 19 nt, Artificial Sequence
  Description of Artificial Sequence: Synthetic oligonucleotide
acgaaaagaagucaaagcu

SEQ ID NO: 2564663 - RNA, 19 nt, Artificial Sequence
  Description of Artificial Sequence: Synthetic oligonucleotide
auuugcuggagacuuagac

SEQ ID NO: 2564664 - RNA, 19 nt, Artificial Sequence
  Description of Artificial Sequence: Synthetic oligonucleotide
cauaaucuagcuaguaugg

SEQ ID NO: 2564665 - RNA, 19 nt, Artificial Sequence
  Description of Artificial Sequence: Synthetic oligonucleotide
acauaaucuagcuaguaug

SEQ ID NO: 2564666 - RNA, 19 nt, Artificial Sequence
  Description of Artificial Sequence: Synthetic oligonucleotide
gaaguauaagcuuagaggu

SEQ ID NO: 2564667 - RNA, 19 nt, Artificial Sequence
  Description of Artificial Sequence: Synthetic oligonucleotide
uguucaaaaucccagucac

SEQ ID NO: 2564668 - RNA, 19 nt, Artificial Sequence
  Description of Artificial Sequence: Synthetic oligonucleotide
ucuugaauuucauuggugu

SEQ ID NO: 2564669 - RNA, 19 nt, Artificial Sequence
  Description of Artificial Sequence: Synthetic oligonucleotide
gagaaguauaagcuuagag

SEQ ID NO: 2564670 - RNA, 19 nt, Artificial Sequence
  Description of Artificial Sequence: Synthetic oligonucleotide
auccacgaauuccagaagc

SEQ ID NO: 2564671 - RNA, 19 nt, Artificial Sequence
  Description of Artificial Sequence: Synthetic oligonucleotide
gacgaaaagaagucaaagc

SEQ ID NO: 2564672 - RNA, 19 nt, Artificial Sequence
  Description of Artificial Sequence: Synthetic oligonucleotide
gaugaauacauaaucuagc

SEQ ID NO: 2564673 - RNA, 19 nt, Artificial Sequence
  Description of Artificial Sequence: Synthetic oligonucleotide
auggguaagagcaaauugc

SEQ ID NO: 2564674 - RNA, 19 nt, Artificial Sequence
  Description of Artificial Sequence: Synthetic oligonucleotide
ucugacaucuuugugauac

SEQ ID NO: 2564675 - RNA, 19 nt, Artificial Sequence
  Description of Artificial Sequence: Synthetic oligonucleotide
auggugauuagaucauugc

SEQ ID NO: 2564676 - RNA, 19 nt, Artificial Sequence
  Description of Artificial Sequence: Synthetic oligonucleotide
agcacuauuagagagccgg

SEQ ID NO: 2564677 - RNA, 19 nt, Artificial Sequence
  Description of Artificial Sequence: Synthetic oligonucleotide
uuagcacugacgaaaagaa

SEQ ID NO: 2564678 - RNA, 19 nt, Artificial Sequence
  Description of Artificial Sequence: Synthetic oligonucleotide
auuagaucauugcauccac

SEQ ID NO: 2564679 - RNA, 19 nt, Artificial Sequence
  Description of Artificial Sequence: Synthetic oligonucleotide
aaaggcaguugucugagga

SEQ ID NO: 2564680 - RNA, 19 nt, Artificial Sequence
  Description of Artificial Sequence: Synthetic oligonucleotide
aguauaagcuuagagguag

SEQ ID NO: 2564681 - RNA, 19 nt, Artificial Sequence
  Description of Artificial Sequence: Synthetic oligonucleotide
gucuuuaccaauaaagacc

SEQ ID NO: 2564682 - RNA, 19 nt, Artificial Sequence
  Description of Artificial Sequence: Synthetic oligonucleotide
aaucuugaauuucauuggu

SEQ ID NO: 2564683 - RNA, 19 nt, Artificial Sequence
  Description of Artificial Sequence: Synthetic oligonucleotide
uacaggucagcucucaggc

SEQ ID NO: 2564684 - RNA, 19 nt, Artificial Sequence
  Description of Artificial Sequence: Synthetic oligonucleotide
uuuagcacugacgaaaaga

SEQ ID NO: 2564685 - RNA, 19 nt, Artificial Sequence
  Description of Artificial Sequence: Synthetic oligonucleotide
augaauacauaaucuagcu

SEQ ID NO: 2564686 - RNA, 19 nt, Artificial Sequence
  Description of Artificial Sequence: Synthetic oligonucleotide
uagacaaacuucauugaga

SEQ ID NO: 2564687 - RNA, 19 nt, Artificial Sequence
  Description of Artificial Sequence: Synthetic oligonucleotide
guucacaaacuccugagcc

SEQ ID NO: 2564688 - RNA, 19 nt, Artificial Sequence
  Description of Artificial Sequence: Synthetic oligonucleotide
caaaaucccagucaccagg

SEQ ID NO: 2564689 - RNA, 19 nt, Artificial Sequence
  Description of Artificial Sequence: Synthetic oligonucleotide
aguucacaaacuccugagc

SEQ ID NO: 2564690 - RNA, 19 nt, Artificial Sequence
  Description of Artificial Sequence: Synthetic oligonucleotide
uugaugaacacgaccaccu

SEQ ID NO: 2564691 - RNA, 19 nt, Artificial Sequence
  Description of Artificial Sequence: Synthetic oligonucleotide
uuuaccaauaaagacccga

SEQ ID NO: 2564692 - RNA, 19 nt, Artificial Sequence
  Description of Artificial Sequence: Synthetic oligonucleotide
uuugcuggagacuuagaca

SEQ ID NO: 2564693 - RNA, 19 nt, Artificial Sequence
  Description of Artificial Sequence: Synthetic oligonucleotide
uguaaauaaucuugaauuu

SEQ ID NO: 2564694 - RNA, 19 nt, Artificial Sequence
  Description of Artificial Sequence: Synthetic oligonucleotide
cuugcaguucacaaacucc

SEQ ID NO: 2564695 - RNA, 19 nt, Artificial Sequence
  Description of Artificial Sequence: Synthetic oligonucleotide
uuuguucaaaaucccaguc

SEQ ID NO: 2564696 - RNA, 19 nt, Artificial Sequence
  Description of Artificial Sequence: Synthetic oligonucleotide
uccgaucugcuucaggcgg

SEQ ID NO: 2564697 - RNA, 19 nt, Artificial Sequence
  Description of Artificial Sequence: Synthetic oligonucleotide
auauccacgaauuccagaa

SEQ ID NO: 2564698 - RNA, 19 nt, Artificial Sequence
  Description of Artificial Sequence: Synthetic oligonucleotide
uugagaaguauaagcuuag

SEQ ID NO: 2564699 - RNA, 19 nt, Artificial Sequence
  Description of Artificial Sequence: Synthetic oligonucleotide
uaccaauaaagacccgagg

SEQ ID NO: 2564700 - RNA, 19 nt, Artificial Sequence
  Description of Artificial Sequence: Synthetic oligonucleotide
ugucugaggauuucuuggg

SEQ ID NO: 2564701 - RNA, 19 nt, Artificial Sequence
  Description of Artificial Sequence: Synthetic oligonucleotide
ugguuugaaaggcaguugu

SEQ ID NO: 2564702 - RNA, 19 nt, Artificial Sequence
  Description of Artificial Sequence: Synthetic oligonucleotide
ugacgaaaagaagucaaag

SEQ ID NO: 2564703 - RNA, 19 nt, Artificial Sequence
  Description of Artificial Sequence: Synthetic oligonucleotide
uagaucauugcauccaccu

SEQ ID NO: 2564704 - RNA, 19 nt, Artificial Sequence
  Description of Artificial Sequence: Synthetic oligonucleotide
gagacuuagacaaacuuca

SEQ ID NO: 2564705 - RNA, 19 nt, Artificial Sequence
  Description of Artificial Sequence: Synthetic oligonucleotide
uacauaaucuagcuaguau

SEQ ID NO: 2564706 - RNA, 19 nt, Artificial Sequence
  Description of Artificial Sequence: Synthetic oligonucleotide
ugauuagaucauugcaucc

SEQ ID NO: 2564707 - RNA, 19 nt, Artificial Sequence
  Description of Artificial Sequence: Synthetic oligonucleotide
uggguaagagcaaauugca

SEQ ID NO: 2564708 - RNA, 19 nt, Artificial Sequence
  Description of Artificial Sequence: Synthetic oligonucleotide
uggcacaugaugaauacau

SEQ ID NO: 2564709 - RNA, 19 nt, Artificial Sequence
  Description of Artificial Sequence: Synthetic oligonucleotide
gguaagagcaaauugcaac

SEQ ID NO: 2564710 - RNA, 19 nt, Artificial Sequence
  Description of Artificial Sequence: Synthetic oligonucleotide
augcugucagcauaggguc

SEQ ID NO: 2564711 - RNA, 19 nt, Artificial Sequence
  Description of Artificial Sequence: Synthetic oligonucleotide
gacaugguggcacaugaug

SEQ ID NO: 2564712 - RNA, 19 nt, Artificial Sequence
  Description of Artificial Sequence: Synthetic oligonucleotide
agaagcccugguuugaaag

SEQ ID NO: 2564713 - RNA, 19 nt, Artificial Sequence
  Description of Artificial Sequence: Synthetic oligonucleotide
uaaucuagcuaguaugguc

SEQ ID NO: 2564714 - RNA, 19 nt, Artificial Sequence
  Description of Artificial Sequence: Synthetic oligonucleotide
accuaugcagucuuuacca

SEQ ID NO: 2564715 - RNA, 19 nt, Artificial Sequence
  Description of Artificial Sequence: Synthetic oligonucleotide
aauaaagacccgaggaacu

SEQ ID NO: 2564716 - RNA, 19 nt, Artificial Sequence
  Description of Artificial Sequence: Synthetic oligonucleotide
auacaggucagcucucagg

SEQ ID NO: 2564717 - RNA, 19 nt, Artificial Sequence
  Description of Artificial Sequence: Synthetic oligonucleotide
guaagagcaaauugcaaca

SEQ ID NO: 2564718 - RNA, 19 nt, Artificial Sequence
  Description of Artificial Sequence: Synthetic oligonucleotide
ggucuguuaagcuucuugg

SEQ ID NO: 2564719 - RNA, 19 nt, Artificial Sequence
  Description of Artificial Sequence: Synthetic oligonucleotide
auaaagcugaguucuacaa

SEQ ID NO: 2564720 - RNA, 19 nt, Artificial Sequence
  Description of Artificial Sequence: Synthetic oligonucleotide
uggucuguuaagcuucuug

SEQ ID NO: 2564721 - RNA, 19 nt, Artificial Sequence
  Description of Artificial Sequence: Synthetic oligonucleotide
cauggguaagagcaaauug

SEQ ID NO: 2564722 - RNA, 19 nt, Artificial Sequence
  Description of Artificial Sequence: Synthetic oligonucleotide
uagagagccggcaacagau

SEQ ID NO: 2564723 - RNA, 19 nt, Artificial Sequence
  Description of Artificial Sequence: Synthetic oligonucleotide
augaugaauacauaaucua

SEQ ID NO: 2564724 - RNA, 19 nt, Artificial Sequence
  Description of Artificial Sequence: Synthetic oligonucleotide
agcacugacgaaaagaagu

SEQ ID NO: 2564725 - RNA, 19 nt, Artificial Sequence
  Description of Artificial Sequence: Synthetic oligonucleotide
acaaacuccugagccaugc

SEQ ID NO: 2564726 - RNA, 19 nt, Artificial Sequence
  Description of Artificial Sequence: Synthetic oligonucleotide
uuugugauacaggucagcu

SEQ ID NO: 2564727 - RNA, 19 nt, Artificial Sequence
  Description of Artificial Sequence: Synthetic oligonucleotide
uuggugucagcauggcugg

SEQ ID NO: 2564728 - RNA, 19 nt, Artificial Sequence
  Description of Artificial Sequence: Synthetic oligonucleotide
ugaauacauaaucuagcua

SEQ ID NO: 2564729 - RNA, 19 nt, Artificial Sequence
  Description of Artificial Sequence: Synthetic oligonucleotide
uccacgaauuccagaagcc

SEQ ID NO: 2564730 - RNA, 19 nt, Artificial Sequence
  Description of Artificial Sequence: Synthetic oligonucleotide
agcaaauugcaacaguuuu

SEQ ID NO: 2564731 - RNA, 19 nt, Artificial Sequence
  Description of Artificial Sequence: Synthetic oligonucleotide
uauaagcuuagagguagag

SEQ ID NO: 2564732 - RNA, 19 nt, Artificial Sequence
  Description of Artificial Sequence: Synthetic oligonucleotide
aaucccagucaccaggaaa

SEQ ID NO: 2564733 - RNA, 19 nt, Artificial Sequence
  Description of Artificial Sequence: Synthetic oligonucleotide
cuguuaagcuucuuggcug

SEQ ID NO: 2564734 - RNA, 19 nt, Artificial Sequence
  Description of Artificial Sequence: Synthetic oligonucleotide
uuagaucauugcauccacc

SEQ ID NO: 2564735 - RNA, 19 nt, Artificial Sequence
  Description of Artificial Sequence: Synthetic oligonucleotide
aacacuuuauaaagcugag

SEQ ID NO: 2564736 - RNA, 19 nt, Artificial Sequence
  Description of Artificial Sequence: Synthetic oligonucleotide
aaagaagucaaagcuguuu

SEQ ID NO: 2564737 - RNA, 19 nt, Artificial Sequence
  Description of Artificial Sequence: Synthetic oligonucleotide
cauggugauuagaucauug

SEQ ID NO: 2564738 - RNA, 19 nt, Artificial Sequence
  Description of Artificial Sequence: Synthetic oligonucleotide
gacaucuuugugauacagg

SEQ ID NO: 2564739 - RNA, 19 nt, Artificial Sequence
  Description of Artificial Sequence: Synthetic oligonucleotide
gauuagaucauugcaucca

SEQ ID NO: 2564740 - RNA, 19 nt, Artificial Sequence
  Description of Artificial Sequence: Synthetic oligonucleotide
uaagagcaaauugcaacag

SEQ ID NO: 2564741 - RNA, 19 nt, Artificial Sequence
  Description of Artificial Sequence: Synthetic oligonucleotide
ugauauccacgaauuccag

SEQ ID NO: 2564742 - RNA, 19 nt, Artificial Sequence
  Description of Artificial Sequence: Synthetic oligonucleotide
gcuguuguaaauaaucuug

SEQ ID NO: 2564743 - RNA, 19 nt, Artificial Sequence
  Description of Artificial Sequence: Synthetic oligonucleotide
cugcauggugauuagauca

SEQ ID NO: 2564744 - RNA, 19 nt, Artificial Sequence
  Description of Artificial Sequence: Synthetic oligonucleotide
uuauaaagcugaguucuac

SEQ ID NO: 2564745 - RNA, 19 nt, Artificial Sequence
  Description of Artificial Sequence: Synthetic oligonucleotide
uguuguaaauaaucuugaa

SEQ ID NO: 2564746 - RNA, 19 nt, Artificial Sequence
  Description of Artificial Sequence: Synthetic oligonucleotide
aguauggucuguuaagcuu

SEQ ID NO: 2564747 - RNA, 19 nt, Artificial Sequence
  Description of Artificial Sequence: Synthetic oligonucleotide
caacagauuugcuggagac

SEQ ID NO: 2564748 - RNA, 19 nt, Artificial Sequence
  Description of Artificial Sequence: Synthetic oligonucleotide
uuguugguggcugugauau

SEQ ID NO: 2564749 - RNA, 19 nt, Artificial Sequence
  Description of Artificial Sequence: Synthetic oligonucleotide
gaugaacacgaccaccuuc

SEQ ID NO: 2564750 - RNA, 19 nt, Artificial Sequence
  Description of Artificial Sequence: Synthetic oligonucleotide
cuuuauaaagcugaguucu

SEQ ID NO: 2564751 - RNA, 19 nt, Artificial Sequence
  Description of Artificial Sequence: Synthetic oligonucleotide
uauuagagagccggcaaca

SEQ ID NO: 2564752 - RNA, 19 nt, Artificial Sequence
  Description of Artificial Sequence: Synthetic oligonucleotide
uuagagagccggcaacaga

SEQ ID NO: 2564753 - RNA, 19 nt, Artificial Sequence
  Description of Artificial Sequence: Synthetic oligonucleotide
cagucuuuaccaauaaaga

SEQ ID NO: 2564754 - RNA, 19 nt, Artificial Sequence
  Description of Artificial Sequence: Synthetic oligonucleotide
uggacagaugcugucagca

SEQ ID NO: 2564755 - RNA, 19 nt, Artificial Sequence
  Description of Artificial Sequence: Synthetic oligonucleotide
uucuuggguccucuggcag

SEQ ID NO: 2564756 - RNA, 19 nt, Artificial Sequence
  Description of Artificial Sequence: Synthetic oligonucleotide
caugaugaauacauaaucu

SEQ ID NO: 2564757 - RNA, 19 nt, Artificial Sequence
  Description of Artificial Sequence: Synthetic oligonucleotide
gaaauucugacaucuuugu

SEQ ID NO: 2564758 - RNA, 19 nt, Artificial Sequence
  Description of Artificial Sequence: Synthetic oligonucleotide
auugagaaguauaagcuua

SEQ ID NO: 2564759 - RNA, 19 nt, Artificial Sequence
  Description of Artificial Sequence: Synthetic oligonucleotide
uaguauggucuguuaagcu

SEQ ID NO: 2564760 - RNA, 19 nt, Artificial Sequence
  Description of Artificial Sequence: Synthetic oligonucleotide
uagcacugacgaaaagaag

SEQ ID NO: 2564761 - RNA, 19 nt, Artificial Sequence
  Description of Artificial Sequence: Synthetic oligonucleotide
cuauuagagagccggcaac

SEQ ID NO: 2564762 - RNA, 19 nt, Artificial Sequence
  Description of Artificial Sequence: Synthetic oligonucleotide
uuagagguagagacauggu

SEQ ID NO: 2564763 - RNA, 19 nt, Artificial Sequence
  Description of Artificial Sequence: Synthetic oligonucleotide
gcuaguauggucuguuaag

SEQ ID NO: 2564764 - RNA, 19 nt, Artificial Sequence
  Description of Artificial Sequence: Synthetic oligonucleotide
agauuugcuggagacuuag

SEQ ID NO: 2564765 - RNA, 19 nt, Artificial Sequence
  Description of Artificial Sequence: Synthetic oligonucleotide
auuacugcagagcuccgau

SEQ ID NO: 2564766 - RNA, 19 nt, Artificial Sequence
  Description of Artificial Sequence: Synthetic oligonucleotide
gauauccacgaauuccaga

SEQ ID NO: 2564767 - RNA, 19 nt, Artificial Sequence
  Description of Artificial Sequence: Synthetic oligonucleotide
guuguaaauaaucuugaau

SEQ ID NO: 2564768 - RNA, 19 nt, Artificial Sequence
  Description of Artificial Sequence: Synthetic oligonucleotide
caccuaugcagucuuuacc

SEQ ID NO: 2564769 - RNA, 19 nt, Artificial Sequence
  Description of Artificial Sequence: Synthetic oligonucleotide
cuguuguaaauaaucuuga

SEQ ID NO: 2564770 - RNA, 19 nt, Artificial Sequence
  Description of Artificial Sequence: Synthetic oligonucleotide
uauuucagcugaccagcac

SEQ ID NO: 2564771 - RNA, 19 nt, Artificial Sequence
  Description of Artificial Sequence: Synthetic oligonucleotide
acuguucucgccccgguga

SEQ ID NO: 2564772 - RNA, 19 nt, Artificial Sequence
  Description of Artificial Sequence: Synthetic oligonucleotide
ugaccagcacuauuagaga

SEQ ID NO: 2564773 - RNA, 19 nt, Artificial Sequence
  Description of Artificial Sequence: Synthetic oligonucleotide
aaaaucccagucaccagga

SEQ ID NO: 2564774 - RNA, 19 nt, Artificial Sequence
  Description of Artificial Sequence: Synthetic oligonucleotide
cuucauugagaaguauaag

SEQ ID NO: 2564775 - RNA, 19 nt, Artificial Sequence
  Description of Artificial Sequence: Synthetic oligonucleotide
ucauugcauccaccuaugc

SEQ ID NO: 2564776 - RNA, 19 nt, Artificial Sequence
  Description of Artificial Sequence: Synthetic oligonucleotide
uuucuuggguccucuggca

SEQ ID NO: 2564777 - RNA, 19 nt, Artificial Sequence
  Description of Artificial Sequence: Synthetic oligonucleotide
uucaggcgggucaucagcu

SEQ ID NO: 2564778 - RNA, 19 nt, Artificial Sequence
  Description of Artificial Sequence: Synthetic oligonucleotide
cuucaggcgggucaucagc

SEQ ID NO: 2564779 - RNA, 19 nt, Artificial Sequence
  Description of Artificial Sequence: Synthetic oligonucleotide
ugcauggugauuagaucau

SEQ ID NO: 2564780 - RNA, 19 nt, Artificial Sequence
  Description of Artificial Sequence: Synthetic oligonucleotide
auaagcuuagagguagaga

SEQ ID NO: 2564781 - RNA, 19 nt, Artificial Sequence
  Description of Artificial Sequence: Synthetic oligonucleotide
agacccgaggaacuguucu

SEQ ID NO: 2564782 - RNA, 19 nt, Artificial Sequence
  Description of Artificial Sequence: Synthetic oligonucleotide
auaaagacccgaggaacug

SEQ ID NO: 2564783 - RNA, 19 nt, Artificial Sequence
  Description of Artificial Sequence: Synthetic oligonucleotide
cauagggucugcugccucc

SEQ ID NO: 2564784 - RNA, 19 nt, Artificial Sequence
  Description of Artificial Sequence: Synthetic oligonucleotide
agcuaguauggucuguuaa

SEQ ID NO: 2564785 - RNA, 19 nt, Artificial Sequence
  Description of Artificial Sequence: Synthetic oligonucleotide
uuucauugguguuguuggu

SEQ ID NO: 2564786 - RNA, 19 nt, Artificial Sequence
  Description of Artificial Sequence: Synthetic oligonucleotide
uuggcugcauggguaagag

SEQ ID NO: 2564787 - RNA, 19 nt, Artificial Sequence
  Description of Artificial Sequence: Synthetic oligonucleotide
guauggucuguuaagcuuc

SEQ ID NO: 2564788 - RNA, 19 nt, Artificial Sequence
  Description of Artificial Sequence: Synthetic oligonucleotide
uauggucuguuaagcuucu

SEQ ID NO: 2564789 - RNA, 19 nt, Artificial Sequence
  Description of Artificial Sequence: Synthetic oligonucleotide
agagcaaauugcaacaguu

SEQ ID NO: 2564790 - RNA, 19 nt, Artificial Sequence
  Description of Artificial Sequence: Synthetic oligonucleotide
gcuccgaucugcuucaggc

SEQ ID NO: 2564791 - RNA, 19 nt, Artificial Sequence
  Description of Artificial Sequence: Synthetic oligonucleotide
gaggaacuguucucgcccc

SEQ ID NO: 2564792 - RNA, 19 nt, Artificial Sequence
  Description of Artificial Sequence: Synthetic oligonucleotide
uugugauacaggucagcuc

SEQ ID NO: 2564793 - RNA, 19 nt, Artificial Sequence
  Description of Artificial Sequence: Synthetic oligonucleotide
auuagagagccggcaacag

SEQ ID NO: 2564794 - RNA, 19 nt, Artificial Sequence
  Description of Artificial Sequence: Synthetic oligonucleotide
acugacgaaaagaagucaa

SEQ ID NO: 2564795 - RNA, 19 nt, Artificial Sequence
  Description of Artificial Sequence: Synthetic oligonucleotide
cuuuaccaauaaagacccg

SEQ ID NO: 2564796 - RNA, 19 nt, Artificial Sequence
  Description of Artificial Sequence: Synthetic oligonucleotide
agcugaguucuacaaaauu

SEQ ID NO: 2564797 - RNA, 19 nt, Artificial Sequence
  Description of Artificial Sequence: Synthetic oligonucleotide
auaaucuagcuaguauggu

SEQ ID NO: 2564798 - RNA, 19 nt, Artificial Sequence
  Description of Artificial Sequence: Synthetic oligonucleotide
agcugaccagcacuauuag

SEQ ID NO: 2564799 - RNA, 19 nt, Artificial Sequence
  Description of Artificial Sequence: Synthetic oligonucleotide
agagcuccgaucugcuuca

SEQ ID NO: 2564800 - RNA, 19 nt, Artificial Sequence
  Description of Artificial Sequence: Synthetic oligonucleotide
auagggucugcugccuccc

SEQ ID NO: 2564801 - RNA, 19 nt, Artificial Sequence
  Description of Artificial Sequence: Synthetic oligonucleotide
agugggcuugaugaacacg

SEQ ID NO: 2564802 - RNA, 19 nt, Artificial Sequence
  Description of Artificial Sequence: Synthetic oligonucleotide
gggcaagugggcuugauga

SEQ ID NO: 2564803 - RNA, 19 nt, Artificial Sequence
  Description of Artificial Sequence: Synthetic oligonucleotide
ugagaaguauaagcuuaga

SEQ ID NO: 2564804 - RNA, 19 nt, Artificial Sequence
  Description of Artificial Sequence: Synthetic oligonucleotide
cuuccauuacugcagagcu

SEQ ID NO: 2564805 - RNA, 19 nt, Artificial Sequence
  Description of Artificial Sequence: Synthetic oligonucleotide
agccaugcugacagggugc

SEQ ID NO: 2564806 - RNA, 19 nt, Artificial Sequence
  Description of Artificial Sequence: Synthetic oligonucleotide
ggcugcauggguaagagca

SEQ ID NO: 2564807 - RNA, 19 nt, Artificial Sequence
  Description of Artificial Sequence: Synthetic oligonucleotide
caagugggcuugaugaaca

SEQ ID NO: 2564808 - RNA, 19 nt, Artificial Sequence
  Description of Artificial Sequence: Synthetic oligonucleotide
gagccggcaacagauuugc

SEQ ID NO: 2564809 - RNA, 19 nt, Artificial Sequence
  Description of Artificial Sequence: Synthetic oligonucleotide
gacagaugcugucagcaua

SEQ ID NO: 2564810 - RNA, 19 nt, Artificial Sequence
  Description of Artificial Sequence: Synthetic oligonucleotide
aucuagcuaguauggucug

SEQ ID NO: 2564811 - RNA, 19 nt, Artificial Sequence
  Description of Artificial Sequence: Synthetic oligonucleotide
ugaacacgaccaccuuccc

SEQ ID NO: 2564812 - RNA, 19 nt, Artificial Sequence
  Description of Artificial Sequence: Synthetic oligonucleotide
acccgaggaacuguucucg

SEQ ID NO: 2564813 - RNA, 19 nt, Artificial Sequence
  Description of Artificial Sequence: Synthetic oligonucleotide
gcacaugaugaauacauaa

SEQ ID NO: 2564814 - RNA, 19 nt, Artificial Sequence
  Description of Artificial Sequence: Synthetic oligonucleotide
ucagcugaccagcacuauu

SEQ ID NO: 2564815 - RNA, 19 nt, Artificial Sequence
  Description of Artificial Sequence: Synthetic oligonucleotide
cagcauagggucugcugcc

SEQ ID NO: 2564816 - RNA, 19 nt, Artificial Sequence
  Description of Artificial Sequence: Synthetic oligonucleotide
aaguauaagcuuagaggua

SEQ ID NO: 2564817 - RNA, 19 nt, Artificial Sequence
  Description of Artificial Sequence: Synthetic oligonucleotide
aagcuuagagguagagaca

SEQ ID NO: 2564818 - RNA, 19 nt, Artificial Sequence
  Description of Artificial Sequence: Synthetic oligonucleotide
ugcauggguaagagcaaau

SEQ ID NO: 2564819 - RNA, 19 nt, Artificial Sequence
  Description of Artificial Sequence: Synthetic oligonucleotide
aaacuucauugagaaguau

SEQ ID NO: 2564820 - RNA, 19 nt, Artificial Sequence
  Description of Artificial Sequence: Synthetic oligonucleotide
ugauacaggucagcucuca

SEQ ID NO: 2564821 - RNA, 19 nt, Artificial Sequence
  Description of Artificial Sequence: Synthetic oligonucleotide
aggaacuguucucgccccg

SEQ ID NO: 2564822 - RNA, 19 nt, Artificial Sequence
  Description of Artificial Sequence: Synthetic oligonucleotide
uuccauuacugcagagcuc

SEQ ID NO: 2564823 - RNA, 19 nt, Artificial Sequence
  Description of Artificial Sequence: Synthetic oligonucleotide
aucccagucaccaggaaau

SEQ ID NO: 2564824 - RNA, 19 nt, Artificial Sequence
  Description of Artificial Sequence: Synthetic oligonucleotide
uccccaagaggaccacuca

SEQ ID NO: 2564825 - RNA, 19 nt, Artificial Sequence
  Description of Artificial Sequence: Synthetic oligonucleotide
ucagcauggcuggacagau

SEQ ID NO: 2564826 - RNA, 19 nt, Artificial Sequence
  Description of Artificial Sequence: Synthetic oligonucleotide
ugcagagcuccgaucugcu

SEQ ID NO: 2564827 - RNA, 19 nt, Artificial Sequence
  Description of Artificial Sequence: Synthetic oligonucleotide
acacuuuauaaagcugagu

SEQ ID NO: 2564828 - RNA, 19 nt, Artificial Sequence
  Description of Artificial Sequence: Synthetic oligonucleotide
aaaucccagucaccaggaa

SEQ ID NO: 2564829 - RNA, 19 nt, Artificial Sequence
  Description of Artificial Sequence: Synthetic oligonucleotide
ucucaggcauuggugucag

SEQ ID NO: 2564830 - RNA, 19 nt, Artificial Sequence
  Description of Artificial Sequence: Synthetic oligonucleotide
acgaauuccagaagcccug

SEQ ID NO: 2564831 - RNA, 19 nt, Artificial Sequence
  Description of Artificial Sequence: Synthetic oligonucleotide
agaucauugcauccaccua

SEQ ID NO: 2564832 - RNA, 19 nt, Artificial Sequence
  Description of Artificial Sequence: Synthetic oligonucleotide
accuucccaggcuggaucu

SEQ ID NO: 2564833 - RNA, 19 nt, Artificial Sequence
  Description of Artificial Sequence: Synthetic oligonucleotide
aagacccgaggaacuguuc

SEQ ID NO: 2564834 - RNA, 19 nt, Artificial Sequence
  Description of Artificial Sequence: Synthetic oligonucleotide
gccggcaacagauuugcug

SEQ ID NO: 2564835 - RNA, 19 nt, Artificial Sequence
  Description of Artificial Sequence: Synthetic oligonucleotide
acgaccaccuucccaggcu

SEQ ID NO: 2564836 - RNA, 19 nt, Artificial Sequence
  Description of Artificial Sequence: Synthetic oligonucleotide
ucuagcuaguauggucugu

SEQ ID NO: 2564837 - RNA, 19 nt, Artificial Sequence
  Description of Artificial Sequence: Synthetic oligonucleotide
uuacugcagagcuccgauc

SEQ ID NO: 2564838 - RNA, 19 nt, Artificial Sequence
  Description of Artificial Sequence: Synthetic oligonucleotide
agagacaugguggcacaug

SEQ ID NO: 2564839 - RNA, 19 nt, Artificial Sequence
  Description of Artificial Sequence: Synthetic oligonucleotide
ugaugaacacgaccaccuu

SEQ ID NO: 2564840 - RNA, 19 nt, Artificial Sequence
  Description of Artificial Sequence: Synthetic oligonucleotide
agcuccgaucugcuucagg

SEQ ID NO: 2564841 - RNA, 19 nt, Artificial Sequence
  Description of Artificial Sequence: Synthetic oligonucleotide
aucauugcauccaccuaug

SEQ ID NO: 2564842 - RNA, 19 nt, Artificial Sequence
  Description of Artificial Sequence: Synthetic oligonucleotide
gacuuagacaaacuucauu

SEQ ID NO: 2564843 - RNA, 19 nt, Artificial Sequence
  Description of Artificial Sequence: Synthetic oligonucleotide
cugacgaaaagaagucaaa

SEQ ID NO: 2564844 - RNA, 19 nt, Artificial Sequence
  Description of Artificial Sequence: Synthetic oligonucleotide
gguggcugugauauccacg

SEQ ID NO: 2564845 - RNA, 19 nt, Artificial Sequence
  Description of Artificial Sequence: Synthetic oligonucleotide
gggcuugaugaacacgacc

SEQ ID NO: 2564846 - RNA, 19 nt, Artificial Sequence
  Description of Artificial Sequence: Synthetic oligonucleotide
ggugagcuguuguaaauaa

SEQ ID NO: 2564847 - RNA, 19 nt, Artificial Sequence
  Description of Artificial Sequence: Synthetic oligonucleotide
gacccgaggaacuguucuc

SEQ ID NO: 2564848 - RNA, 19 nt, Artificial Sequence
  Description of Artificial Sequence: Synthetic oligonucleotide
ccuuccauuacugcagagc

SEQ ID NO: 2564849 - RNA, 19 nt, Artificial Sequence
  Description of Artificial Sequence: Synthetic oligonucleotide
acacgaccaccuucccagg

SEQ ID NO: 2564850 - RNA, 19 nt, Artificial Sequence
  Description of Artificial Sequence: Synthetic oligonucleotide
cacgaauuccagaagcccu

SEQ ID NO: 2564851 - RNA, 19 nt, Artificial Sequence
  Description of Artificial Sequence: Synthetic oligonucleotide
guaggggcaagugggcuug

SEQ ID NO: 2564852 - RNA, 19 nt, Artificial Sequence
  Description of Artificial Sequence: Synthetic oligonucleotide
uccaccuaugcagucuuua

SEQ ID NO: 2564853 - RNA, 19 nt, Artificial Sequence
  Description of Artificial Sequence: Synthetic oligonucleotide
caugguggcacaugaugaa

SEQ ID NO: 2564854 - RNA, 19 nt, Artificial Sequence
  Description of Artificial Sequence: Synthetic oligonucleotide
acaggucagcucucaggca

SEQ ID NO: 2564855 - RNA, 19 nt, Artificial Sequence
  Description of Artificial Sequence: Synthetic oligonucleotide
cauugagaaguauaagcuu

SEQ ID NO: 2564856 - RNA, 19 nt, Artificial Sequence
  Description of Artificial Sequence: Synthetic oligonucleotide
gcaguucacaaacuccuga

SEQ ID NO: 2564857 - RNA, 19 nt, Artificial Sequence
  Description of Artificial Sequence: Synthetic oligonucleotide
agagccggcaacagauuug

SEQ ID NO: 2564858 - RNA, 19 nt, Artificial Sequence
  Description of Artificial Sequence: Synthetic oligonucleotide
cagcugaccagcacuauua

SEQ ID NO: 2564859 - RNA, 19 nt, Artificial Sequence
  Description of Artificial Sequence: Synthetic oligonucleotide
cuguucucgccccggugag

SEQ ID NO: 2564860 - RNA, 19 nt, Artificial Sequence
  Description of Artificial Sequence: Synthetic oligonucleotide
cacuauuagagagccggca

SEQ ID NO: 2564861 - RNA, 19 nt, Artificial Sequence
  Description of Artificial Sequence: Synthetic oligonucleotide
cacgaccaccuucccaggc

SEQ ID NO: 2564862 - RNA, 19 nt, Artificial Sequence
  Description of Artificial Sequence: Synthetic oligonucleotide
uagcuaguauggucuguua

SEQ ID NO: 2564863 - RNA, 19 nt, Artificial Sequence
  Description of Artificial Sequence: Synthetic oligonucleotide
cagcacuauuagagagccg

SEQ ID NO: 2564864 - RNA, 19 nt, Artificial Sequence
  Description of Artificial Sequence: Synthetic oligonucleotide
cgaggaacuguucucgccc

SEQ ID NO: 2564865 - RNA, 19 nt, Artificial Sequence
  Description of Artificial Sequence: Synthetic oligonucleotide
caccuucccaggcuggauc

SEQ ID NO: 2564866 - RNA, 19 nt, Artificial Sequence
  Description of Artificial Sequence: Synthetic oligonucleotide
gcaacagauuugcuggaga

SEQ ID NO: 2564867 - RNA, 19 nt, Artificial Sequence
  Description of Artificial Sequence: Synthetic oligonucleotide
cuggcaguaggggcaagug

SEQ ID NO: 2564868 - RNA, 19 nt, Artificial Sequence
  Description of Artificial Sequence: Synthetic oligonucleotide
ggaacuguucucgccccgg

SEQ ID NO: 2564869 - RNA, 19 nt, Artificial Sequence
  Description of Artificial Sequence: Synthetic oligonucleotide
caggcgggucaucagcuuc

SEQ ID NO: 2564870 - RNA, 19 nt, Artificial Sequence
  Description of Artificial Sequence: Synthetic oligonucleotide
auggcuggacagaugcugu

SEQ ID NO: 2564871 - RNA, 19 nt, Artificial Sequence
  Description of Artificial Sequence: Synthetic oligonucleotide
gaccacucaguugaaggua

SEQ ID NO: 2564872 - RNA, 19 nt, Artificial Sequence
  Description of Artificial Sequence: Synthetic oligonucleotide
ucccauucugcugcauggu

SEQ ID NO: 2564873 - RNA, 19 nt, Artificial Sequence
  Description of Artificial Sequence: Synthetic oligonucleotide
cacugacgaaaagaaguca

SEQ ID NO: 2564874 - RNA, 19 nt, Artificial Sequence
  Description of Artificial Sequence: Synthetic oligonucleotide
ccacgaauuccagaagccc

SEQ ID NO: 2564875 - RNA, 19 nt, Artificial Sequence
  Description of Artificial Sequence: Synthetic oligonucleotide
guuguugguggcugugaua

SEQ ID NO: 2564876 - RNA, 19 nt, Artificial Sequence
  Description of Artificial Sequence: Synthetic oligonucleotide
ggcaacagauuugcuggag

SEQ ID NO: 2564877 - RNA, 19 nt, Artificial Sequence
  Description of Artificial Sequence: Synthetic oligonucleotide
ugucagcauagggucugcu

SEQ ID NO: 2564878 - RNA, 19 nt, Artificial Sequence
  Description of Artificial Sequence: Synthetic oligonucleotide
gcacugacgaaaagaaguc

SEQ ID NO: 2564879 - RNA, 19 nt, Artificial Sequence
  Description of Artificial Sequence: Synthetic oligonucleotide
uguugguggcugugauauc

SEQ ID NO: 2564880 - RNA, 19 nt, Artificial Sequence
  Description of Artificial Sequence: Synthetic oligonucleotide
guauaagcuuagagguaga

SEQ ID NO: 2564881 - RNA, 19 nt, Artificial Sequence
  Description of Artificial Sequence: Synthetic oligonucleotide
gucagcauggcuggacaga

SEQ ID NO: 2564882 - RNA, 19 nt, Artificial Sequence
  Description of Artificial Sequence: Synthetic oligonucleotide
ccaccuaugcagucuuuac

SEQ ID NO: 2564883 - RNA, 19 nt, Artificial Sequence
  Description of Artificial Sequence: Synthetic oligonucleotide
cuuggcugcauggguaaga

SEQ ID NO: 2564884 - RNA, 19 nt, Artificial Sequence
  Description of Artificial Sequence: Synthetic oligonucleotide
gcaagugggcuugaugaac

SEQ ID NO: 2564885 - RNA, 19 nt, Artificial Sequence
  Description of Artificial Sequence: Synthetic oligonucleotide
uguucucgccccggugagc

SEQ ID NO: 2564886 - RNA, 19 nt, Artificial Sequence
  Description of Artificial Sequence: Synthetic oligonucleotide
ggggcaagugggcuugaug

SEQ ID NO: 2564887 - RNA, 19 nt, Artificial Sequence
  Description of Artificial Sequence: Synthetic oligonucleotide
agcauagggucugcugccu

SEQ ID NO: 2564888 - RNA, 19 nt, Artificial Sequence
  Description of Artificial Sequence: Synthetic oligonucleotide
cuaugcagucuuuaccaau

SEQ ID NO: 2564889 - RNA, 19 nt, Artificial Sequence
  Description of Artificial Sequence: Synthetic oligonucleotide
agcuuccccaagaggacca

SEQ ID NO: 2564890 - RNA, 19 nt, Artificial Sequence
  Description of Artificial Sequence: Synthetic oligonucleotide
ccauucugcugcaugguga

SEQ ID NO: 2564891 - RNA, 19 nt, Artificial Sequence
  Description of Artificial Sequence: Synthetic oligonucleotide
gagagccggcaacagauuu

SEQ ID NO: 2564892 - RNA, 19 nt, Artificial Sequence
  Description of Artificial Sequence: Synthetic oligonucleotide
uucugacaucuuugugaua

SEQ ID NO: 2564893 - RNA, 19 nt, Artificial Sequence
  Description of Artificial Sequence: Synthetic oligonucleotide
ccgaggaacuguucucgcc

SEQ ID NO: 2564894 - RNA, 19 nt, Artificial Sequence
  Description of Artificial Sequence: Synthetic oligonucleotide
agguagagacaugguggca

SEQ ID NO: 2564895 - RNA, 19 nt, Artificial Sequence
  Description of Artificial Sequence: Synthetic oligonucleotide
ccucccuuccauuacugca

SEQ ID NO: 2564896 - RNA, 19 nt, Artificial Sequence
  Description of Artificial Sequence: Synthetic oligonucleotide
uagggucugcugccucccu

SEQ ID NO: 2564897 - RNA, 19 nt, Artificial Sequence
  Description of Artificial Sequence: Synthetic oligonucleotide
gcugaccagcacuauuaga

SEQ ID NO: 2564898 - RNA, 19 nt, Artificial Sequence
  Description of Artificial Sequence: Synthetic oligonucleotide
ccgaucugcuucaggcggg

SEQ ID NO: 2564899 - RNA, 19 nt, Artificial Sequence
  Description of Artificial Sequence: Synthetic oligonucleotide
cagcauggcuggacagaug

SEQ ID NO: 2564900 - RNA, 19 nt, Artificial Sequence
  Description of Artificial Sequence: Synthetic oligonucleotide
caggucagcucucaggcau

SEQ ID NO: 2564901 - RNA, 19 nt, Artificial Sequence
  Description of Artificial Sequence: Synthetic oligonucleotide
ggcugugauauccacgaau

SEQ ID NO: 2564902 - RNA, 19 nt, Artificial Sequence
  Description of Artificial Sequence: Synthetic oligonucleotide
agcccugguuugaaaggca

SEQ ID NO: 2564903 - RNA, 19 nt, Artificial Sequence
  Description of Artificial Sequence: Synthetic oligonucleotide
ccaggaaauucugacaucu

SEQ ID NO: 2564904 - RNA, 19 nt, Artificial Sequence
  Description of Artificial Sequence: Synthetic oligonucleotide
ggcaagugggcuugaugaa

SEQ ID NO: 2564905 - RNA, 19 nt, Artificial Sequence
  Description of Artificial Sequence: Synthetic oligonucleotide
gggucugcugccucccuuc

SEQ ID NO: 2564906 - RNA, 19 nt, Artificial Sequence
  Description of Artificial Sequence: Synthetic oligonucleotide
gcaguaggggcaagugggc

SEQ ID NO: 2564907 - RNA, 19 nt, Artificial Sequence
  Description of Artificial Sequence: Synthetic oligonucleotide
cucaggcauuggugucagc

SEQ ID NO: 2564908 - RNA, 19 nt, Artificial Sequence
  Description of Artificial Sequence: Synthetic oligonucleotide
ccauuacugcagagcuccg

SEQ ID NO: 2564909 - RNA, 19 nt, Artificial Sequence
  Description of Artificial Sequence: Synthetic oligonucleotide
cugcauggguaagagcaaa

SEQ ID NO: 2564910 - RNA, 19 nt, Artificial Sequence
  Description of Artificial Sequence: Synthetic oligonucleotide
cccgaggaacuguucucgc

SEQ ID NO: 2564911 - RNA, 19 nt, Artificial Sequence
  Description of Artificial Sequence: Synthetic oligonucleotide
ucccagucaccaggaaauu
